United States Patent Application Publication US 2014/0004565 A1 - sequence listing, part 48

SEQ ID NO: 1123556 - RNA, 19 nt, Artificial Sequence
  Description of Artificial Sequence: Synthetic oligonucleotide
cuagaaaauucacuacugu

SEQ ID NO: 1123557 - RNA, 19 nt, Artificial Sequence
  Description of Artificial Sequence: Synthetic oligonucleotide
cacgacucuggccacagca

SEQ ID NO: 1123558 - RNA, 19 nt, Artificial Sequence
  Description of Artificial Sequence: Synthetic oligonucleotide
caacuaagcagccagcggu

SEQ ID NO: 1123559 - RNA, 19 nt, Artificial Sequence
  Description of Artificial Sequence: Synthetic oligonucleotide
caguaugcauccacauuuc

SEQ ID NO: 1123560 - RNA, 19 nt, Artificial Sequence
  Description of Artificial Sequence: Synthetic oligonucleotide
aucuaagcuuuggccaagg

SEQ ID NO: 1123561 - RNA, 19 nt, Artificial Sequence
  Description of Artificial Sequence: Synthetic oligonucleotide
ggugacuaauugcuguaac

SEQ ID NO: 1123562 - RNA, 19 nt, Artificial Sequence
  Description of Artificial Sequence: Synthetic oligonucleotide
aucucacgacucuggccac

SEQ ID NO: 1123563 - RNA, 19 nt, Artificial Sequence
  Description of Artificial Sequence: Synthetic oligonucleotide
guacccugugcgcugagga

SEQ ID NO: 1123564 - RNA, 19 nt, Artificial Sequence
  Description of Artificial Sequence: Synthetic oligonucleotide
caagcgccgaagcuccugc

SEQ ID NO: 1123565 - RNA, 19 nt, Artificial Sequence
  Description of Artificial Sequence: Synthetic oligonucleotide
agcgccgaagcuccugcag

SEQ ID NO: 1123566 - RNA, 19 nt, Artificial Sequence
  Description of Artificial Sequence: Synthetic oligonucleotide
caacagucggaaauuucga

SEQ ID NO: 1123567 - RNA, 19 nt, Artificial Sequence
  Description of Artificial Sequence: Synthetic oligonucleotide
accaaggacccugagcgcu

SEQ ID NO: 1123568 - RNA, 19 nt, Artificial Sequence
  Description of Artificial Sequence: Synthetic oligonucleotide
agucggaaauuucgaggga

SEQ ID NO: 1123569 - RNA, 19 nt, Artificial Sequence
  Description of Artificial Sequence: Synthetic oligonucleotide
cacggaguccuguccaaac

SEQ ID NO: 1123570 - RNA, 19 nt, Artificial Sequence
  Description of Artificial Sequence: Synthetic oligonucleotide
accucgagaccugagcuca

SEQ ID NO: 1123571 - RNA, 19 nt, Artificial Sequence
  Description of Artificial Sequence: Synthetic oligonucleotide
gugagcguguggccaagag

SEQ ID NO: 1123572 - RNA, 19 nt, Artificial Sequence
  Description of Artificial Sequence: Synthetic oligonucleotide
uuaggcccacauucuauuu

SEQ ID NO: 1123573 - RNA, 19 nt, Artificial Sequence
  Description of Artificial Sequence: Synthetic oligonucleotide
cagcaccccuugauaaagg

SEQ ID NO: 1123574 - RNA, 19 nt, Artificial Sequence
  Description of Artificial Sequence: Synthetic oligonucleotide
acucaguacccugugcgcu

SEQ ID NO: 1123575 - RNA, 19 nt, Artificial Sequence
  Description of Artificial Sequence: Synthetic oligonucleotide
agucccacggcugcuaccu

SEQ ID NO: 1123576 - RNA, 19 nt, Artificial Sequence
  Description of Artificial Sequence: Synthetic oligonucleotide
cuauucuaagggccaccac

SEQ ID NO: 1123577 - RNA, 19 nt, Artificial Sequence
  Description of Artificial Sequence: Synthetic oligonucleotide
auuuaggcccacauucuau

SEQ ID NO: 1123578 - RNA, 19 nt, Artificial Sequence
  Description of Artificial Sequence: Synthetic oligonucleotide
aacuacucacgccgcucau

SEQ ID NO: 1123579 - RNA, 19 nt, Artificial Sequence
  Description of Artificial Sequence: Synthetic oligonucleotide
cugaaaccugaguccgcag

SEQ ID NO: 1123580 - RNA, 19 nt, Artificial Sequence
  Description of Artificial Sequence: Synthetic oligonucleotide
caucucguaagugucaugu

SEQ ID NO: 1123581 - RNA, 19 nt, Artificial Sequence
  Description of Artificial Sequence: Synthetic oligonucleotide
cagauguuacacagcacaa

SEQ ID NO: 1123582 - RNA, 19 nt, Artificial Sequence
  Description of Artificial Sequence: Synthetic oligonucleotide
uguggucccuugacugacu

SEQ ID NO: 1123583 - RNA, 19 nt, Artificial Sequence
  Description of Artificial Sequence: Synthetic oligonucleotide
agcaguagucccacggcug

SEQ ID NO: 1123584 - RNA, 19 nt, Artificial Sequence
  Description of Artificial Sequence: Synthetic oligonucleotide
aguacccugugcgcugagg

SEQ ID NO: 1123585 - RNA, 19 nt, Artificial Sequence
  Description of Artificial Sequence: Synthetic oligonucleotide
caacaauuagugguccuga

SEQ ID NO: 1123586 - RNA, 19 nt, Artificial Sequence
  Description of Artificial Sequence: Synthetic oligonucleotide
aaccgacucaguacccugu

SEQ ID NO: 1123587 - RNA, 19 nt, Artificial Sequence
  Description of Artificial Sequence: Synthetic oligonucleotide
uaacugugccgucgccuac

SEQ ID NO: 1123588 - RNA, 19 nt, Artificial Sequence
  Description of Artificial Sequence: Synthetic oligonucleotide
uugaucccagaaguucaac

SEQ ID NO: 1123589 - RNA, 19 nt, Artificial Sequence
  Description of Artificial Sequence: Synthetic oligonucleotide
caccgcucccaaaggaaac

SEQ ID NO: 1123590 - RNA, 19 nt, Artificial Sequence
  Description of Artificial Sequence: Synthetic oligonucleotide
cagcaagacugaaaccuga

SEQ ID NO: 1123591 - RNA, 19 nt, Artificial Sequence
  Description of Artificial Sequence: Synthetic oligonucleotide
ucaagcgccgaagcuccug

SEQ ID NO: 1123592 - RNA, 19 nt, Artificial Sequence
  Description of Artificial Sequence: Synthetic oligonucleotide
gggccgaggacccggaacc

SEQ ID NO: 1123593 - RNA, 19 nt, Artificial Sequence
  Description of Artificial Sequence: Synthetic oligonucleotide
uggucccuugacugacugc

SEQ ID NO: 1123594 - RNA, 19 nt, Artificial Sequence
  Description of Artificial Sequence: Synthetic oligonucleotide
cauuagcugugcccaccgc

SEQ ID NO: 1123595 - RNA, 19 nt, Artificial Sequence
  Description of Artificial Sequence: Synthetic oligonucleotide
cuaacugugccgucgccua

SEQ ID NO: 1123596 - RNA, 19 nt, Artificial Sequence
  Description of Artificial Sequence: Synthetic oligonucleotide
gcaguagucccacggcugc

SEQ ID NO: 1123597 - RNA, 19 nt, Artificial Sequence
  Description of Artificial Sequence: Synthetic oligonucleotide
uugcauuagcugugcccac

SEQ ID NO: 1123598 - RNA, 19 nt, Artificial Sequence
  Description of Artificial Sequence: Synthetic oligonucleotide
auucacuacuguggaaaau

SEQ ID NO: 1123599 - RNA, 19 nt, Artificial Sequence
  Description of Artificial Sequence: Synthetic oligonucleotide
acgucagaccugaugggug

SEQ ID NO: 1123600 - RNA, 19 nt, Artificial Sequence
  Description of Artificial Sequence: Synthetic oligonucleotide
aagcgccgaagcuccugca

SEQ ID NO: 1123601 - RNA, 19 nt, Artificial Sequence
  Description of Artificial Sequence: Synthetic oligonucleotide
uagucccacggcugcuacc

SEQ ID NO: 1123602 - RNA, 19 nt, Artificial Sequence
  Description of Artificial Sequence: Synthetic oligonucleotide
caccaaggacccugagcgc

SEQ ID NO: 1123603 - RNA, 19 nt, Artificial Sequence
  Description of Artificial Sequence: Synthetic oligonucleotide
gguuggauuggggagggga

SEQ ID NO: 1123604 - RNA, 19 nt, Artificial Sequence
  Description of Artificial Sequence: Synthetic oligonucleotide
agaccccagcuaacugugc

SEQ ID NO: 1123605 - RNA, 19 nt, Artificial Sequence
  Description of Artificial Sequence: Synthetic oligonucleotide
ugagaagaccaggcucuuc

SEQ ID NO: 1123606 - RNA, 19 nt, Artificial Sequence
  Description of Artificial Sequence: Synthetic oligonucleotide
ggugugggcaacgagggaa

SEQ ID NO: 1123607 - RNA, 19 nt, Artificial Sequence
  Description of Artificial Sequence: Synthetic oligonucleotide
gcugaggacucuccgcaug

SEQ ID NO: 1123608 - RNA, 19 nt, Artificial Sequence
  Description of Artificial Sequence: Synthetic oligonucleotide
gcaagugauugugugacaa

SEQ ID NO: 1123609 - RNA, 19 nt, Artificial Sequence
  Description of Artificial Sequence: Synthetic oligonucleotide
ucacgacucuggccacagc

SEQ ID NO: 1123610 - RNA, 19 nt, Artificial Sequence
  Description of Artificial Sequence: Synthetic oligonucleotide
cgucagaccugaugggugg

SEQ ID NO: 1123611 - RNA, 19 nt, Artificial Sequence
  Description of Artificial Sequence: Synthetic oligonucleotide
gaaguccgaguggagccuc

SEQ ID NO: 1123612 - RNA, 19 nt, Artificial Sequence
  Description of Artificial Sequence: Synthetic oligonucleotide
gacacggaguccuguccaa

SEQ ID NO: 1123613 - RNA, 19 nt, Artificial Sequence
  Description of Artificial Sequence: Synthetic oligonucleotide
cuguaacacuguccuucug

SEQ ID NO: 1123614 - RNA, 19 nt, Artificial Sequence
  Description of Artificial Sequence: Synthetic oligonucleotide
ucucacgacucuggccaca

SEQ ID NO: 1123615 - RNA, 19 nt, Artificial Sequence
  Description of Artificial Sequence: Synthetic oligonucleotide
cucccgagccugugguggc

SEQ ID NO: 1123616 - RNA, 19 nt, Artificial Sequence
  Description of Artificial Sequence: Synthetic oligonucleotide
cucacgccgcucauauuga

SEQ ID NO: 1123617 - RNA, 19 nt, Artificial Sequence
  Description of Artificial Sequence: Synthetic oligonucleotide
ggccaauuucagagggagg

SEQ ID NO: 1123618 - RNA, 19 nt, Artificial Sequence
  Description of Artificial Sequence: Synthetic oligonucleotide
ccacgucagaccugauggg

SEQ ID NO: 1123619 - RNA, 19 nt, Artificial Sequence
  Description of Artificial Sequence: Synthetic oligonucleotide
cuacucacgccgcucauau

SEQ ID NO: 1123620 - RNA, 19 nt, Artificial Sequence
  Description of Artificial Sequence: Synthetic oligonucleotide
gcaaugaggcaggaggcca

SEQ ID NO: 1123621 - RNA, 19 nt, Artificial Sequence
  Description of Artificial Sequence: Synthetic oligonucleotide
ugguggcaagugagcgugu

SEQ ID NO: 1123622 - RNA, 19 nt, Artificial Sequence
  Description of Artificial Sequence: Synthetic oligonucleotide
ccugggauccaccacucca

SEQ ID NO: 1123623 - RNA, 19 nt, Artificial Sequence
  Description of Artificial Sequence: Synthetic oligonucleotide
gguggcaagugagcgugug

SEQ ID NO: 1123624 - RNA, 19 nt, Artificial Sequence
  Description of Artificial Sequence: Synthetic oligonucleotide
acgacucuggccacagcaa

SEQ ID NO: 1123625 - RNA, 19 nt, Artificial Sequence
  Description of Artificial Sequence: Synthetic oligonucleotide
ggcaucacuuaagacuuaa

SEQ ID NO: 1123626 - RNA, 19 nt, Artificial Sequence
  Description of Artificial Sequence: Synthetic oligonucleotide
acggccaauuucagaggga

SEQ ID NO: 1123627 - RNA, 19 nt, Artificial Sequence
  Description of Artificial Sequence: Synthetic oligonucleotide
gguuagggccucuguucca

SEQ ID NO: 1123628 - RNA, 19 nt, Artificial Sequence
  Description of Artificial Sequence: Synthetic oligonucleotide
cucuagaccccagcuaacu

SEQ ID NO: 1123629 - RNA, 19 nt, Artificial Sequence
  Description of Artificial Sequence: Synthetic oligonucleotide
cagcaguagucccacggcu

SEQ ID NO: 1123630 - RNA, 19 nt, Artificial Sequence
  Description of Artificial Sequence: Synthetic oligonucleotide
agguuggauuggggagggg

SEQ ID NO: 1123631 - RNA, 19 nt, Artificial Sequence
  Description of Artificial Sequence: Synthetic oligonucleotide
uacucacgccgcucauauu

SEQ ID NO: 1123632 - RNA, 19 nt, Artificial Sequence
  Description of Artificial Sequence: Synthetic oligonucleotide
cugcuaccugaagccuucc

SEQ ID NO: 1123633 - RNA, 19 nt, Artificial Sequence
  Description of Artificial Sequence: Synthetic oligonucleotide
ccaaccucaucucacgacu

SEQ ID NO: 1123634 - RNA, 19 nt, Artificial Sequence
  Description of Artificial Sequence: Synthetic oligonucleotide
cuuuuacucccgagccugu

SEQ ID NO: 1123635 - RNA, 19 nt, Artificial Sequence
  Description of Artificial Sequence: Synthetic oligonucleotide
cacgccgcucauauugacu

SEQ ID NO: 1123636 - RNA, 19 nt, Artificial Sequence
  Description of Artificial Sequence: Synthetic oligonucleotide
cccuugacugacugcucug

SEQ ID NO: 1123637 - RNA, 19 nt, Artificial Sequence
  Description of Artificial Sequence: Synthetic oligonucleotide
cacgucagaccugaugggu

SEQ ID NO: 1123638 - RNA, 19 nt, Artificial Sequence
  Description of Artificial Sequence: Synthetic oligonucleotide
ccucuagaccccagcuaac

SEQ ID NO: 1123639 - RNA, 19 nt, Artificial Sequence
  Description of Artificial Sequence: Synthetic oligonucleotide
acagcacaacuuagguauu

SEQ ID NO: 1123640 - RNA, 19 nt, Artificial Sequence
  Description of Artificial Sequence: Synthetic oligonucleotide
gagcgcuggcagguuugug

SEQ ID NO: 1123641 - RNA, 19 nt, Artificial Sequence
  Description of Artificial Sequence: Synthetic oligonucleotide
ccgcucauauugacuuuug

SEQ ID NO: 1123642 - RNA, 19 nt, Artificial Sequence
  Description of Artificial Sequence: Synthetic oligonucleotide
ccgcauggccuuucucuag

SEQ ID NO: 1123643 - RNA, 19 nt, Artificial Sequence
  Description of Artificial Sequence: Synthetic oligonucleotide
guuacacucgacagauguu

SEQ ID NO: 1123644 - RNA, 19 nt, Artificial Sequence
  Description of Artificial Sequence: Synthetic oligonucleotide
ccucgucguccucuagacc

SEQ ID NO: 1123645 - RNA, 19 nt, Artificial Sequence
  Description of Artificial Sequence: Synthetic oligonucleotide
cuuugaugcugugggaauu

SEQ ID NO: 1123646 - RNA, 19 nt, Artificial Sequence
  Description of Artificial Sequence: Synthetic oligonucleotide
ccaucucguaagugucaug

SEQ ID NO: 1123647 - RNA, 19 nt, Artificial Sequence
  Description of Artificial Sequence: Synthetic oligonucleotide
gcgguuacacucgacagau

SEQ ID NO: 1123648 - RNA, 19 nt, Artificial Sequence
  Description of Artificial Sequence: Synthetic oligonucleotide
caguacccugugcgcugag

SEQ ID NO: 1123649 - RNA, 19 nt, Artificial Sequence
  Description of Artificial Sequence: Synthetic oligonucleotide
ggagacgggaagcccugaa

SEQ ID NO: 1123650 - RNA, 19 nt, Artificial Sequence
  Description of Artificial Sequence: Synthetic oligonucleotide
gggcaacgagggaauugag

SEQ ID NO: 1123651 - RNA, 19 nt, Artificial Sequence
  Description of Artificial Sequence: Synthetic oligonucleotide
ggggagacgggaagcccug

SEQ ID NO: 1123652 - RNA, 19 nt, Artificial Sequence
  Description of Artificial Sequence: Synthetic oligonucleotide
cccugugcgcugaggacuc

SEQ ID NO: 1123653 - RNA, 19 nt, Artificial Sequence
  Description of Artificial Sequence: Synthetic oligonucleotide
cgagggucugaggagcagc

SEQ ID NO: 1123654 - RNA, 19 nt, Artificial Sequence
  Description of Artificial Sequence: Synthetic oligonucleotide
ggaaccgacucaguacccu

SEQ ID NO: 1123655 - RNA, 19 nt, Artificial Sequence
  Description of Artificial Sequence: Synthetic oligonucleotide
cggaguccuguccaaacca

SEQ ID NO: 1123656 - RNA, 19 nt, Artificial Sequence
  Description of Artificial Sequence: Synthetic oligonucleotide
cucgagaccugagcucaaa

SEQ ID NO: 1123657 - RNA, 19 nt, Artificial Sequence
  Description of Artificial Sequence: Synthetic oligonucleotide
gcaaagcgauuaugagaaa

SEQ ID NO: 1123658 - RNA, 19 nt, Artificial Sequence
  Description of Artificial Sequence: Synthetic oligonucleotide
auccucacccacggccaau

SEQ ID NO: 1123659 - RNA, 19 nt, Artificial Sequence
  Description of Artificial Sequence: Synthetic oligonucleotide
gccgucgccuacuccuuuc

SEQ ID NO: 1123660 - RNA, 19 nt, Artificial Sequence
  Description of Artificial Sequence: Synthetic oligonucleotide
ccaccgcucccaaaggaaa

SEQ ID NO: 1123661 - RNA, 19 nt, Artificial Sequence
  Description of Artificial Sequence: Synthetic oligonucleotide
aucaagcgccgaagcuccu

SEQ ID NO: 1123662 - RNA, 19 nt, Artificial Sequence
  Description of Artificial Sequence: Synthetic oligonucleotide
gugggaauucugccacuuu

SEQ ID NO: 1123663 - RNA, 19 nt, Artificial Sequence
  Description of Artificial Sequence: Synthetic oligonucleotide
ccgcucccaaaggaaacug

SEQ ID NO: 1123664 - RNA, 19 nt, Artificial Sequence
  Description of Artificial Sequence: Synthetic oligonucleotide
guccgcaggguuagggccu

SEQ ID NO: 1123665 - RNA, 19 nt, Artificial Sequence
  Description of Artificial Sequence: Synthetic oligonucleotide
gcguguggccaagagcuaa

SEQ ID NO: 1123666 - RNA, 19 nt, Artificial Sequence
  Description of Artificial Sequence: Synthetic oligonucleotide
cccugggauccaccacucc

SEQ ID NO: 1123667 - RNA, 19 nt, Artificial Sequence
  Description of Artificial Sequence: Synthetic oligonucleotide
cgagaccugagcucaaagu

SEQ ID NO: 1123668 - RNA, 19 nt, Artificial Sequence
  Description of Artificial Sequence: Synthetic oligonucleotide
gcugccaucuugcgucgcu

SEQ ID NO: 1123669 - RNA, 19 nt, Artificial Sequence
  Description of Artificial Sequence: Synthetic oligonucleotide
cucuaggcgcagccaccaa

SEQ ID NO: 1123670 - RNA, 19 nt, Artificial Sequence
  Description of Artificial Sequence: Synthetic oligonucleotide
ggccaagagcuaagugaga

SEQ ID NO: 1123671 - RNA, 19 nt, Artificial Sequence
  Description of Artificial Sequence: Synthetic oligonucleotide
ccacccaucuggacacaga

SEQ ID NO: 1123672 - RNA, 19 nt, Artificial Sequence
  Description of Artificial Sequence: Synthetic oligonucleotide
ccacggcugcuaccugaag

SEQ ID NO: 1123673 - RNA, 19 nt, Artificial Sequence
  Description of Artificial Sequence: Synthetic oligonucleotide
cgucgccuacuccuuucug

SEQ ID NO: 1123674 - RNA, 19 nt, Artificial Sequence
  Description of Artificial Sequence: Synthetic oligonucleotide
ccgagggucugaggagcag

SEQ ID NO: 1123675 - RNA, 19 nt, Artificial Sequence
  Description of Artificial Sequence: Synthetic oligonucleotide
cgguuacacucgacagaug

SEQ ID NO: 1123676 - RNA, 19 nt, Artificial Sequence
  Description of Artificial Sequence: Synthetic oligonucleotide
gccgcucauauugacuuuu

SEQ ID NO: 1123677 - RNA, 19 nt, Artificial Sequence
  Description of Artificial Sequence: Synthetic oligonucleotide
ccgccguggcccugggauc

SEQ ID NO: 1123678 - RNA, 19 nt, Artificial Sequence
  Description of Artificial Sequence: Synthetic oligonucleotide
caguagucccacggcugcu

SEQ ID NO: 1123679 - RNA, 19 nt, Artificial Sequence
  Description of Artificial Sequence: Synthetic oligonucleotide
gggagacgggaagcccuga

SEQ ID NO: 1123680 - RNA, 19 nt, Artificial Sequence
  Description of Artificial Sequence: Synthetic oligonucleotide
cguccucuagaccccagcu

SEQ ID NO: 1123681 - RNA, 19 nt, Artificial Sequence
  Description of Artificial Sequence: Synthetic oligonucleotide
cagggccgaggacccggaa

SEQ ID NO: 1123682 - RNA, 19 nt, Artificial Sequence
  Description of Artificial Sequence: Synthetic oligonucleotide
ggggagagcagcaccccuu

SEQ ID NO: 1123683 - RNA, 19 nt, Artificial Sequence
  Description of Artificial Sequence: Synthetic oligonucleotide
ggccaucaucaagcgccga

SEQ ID NO: 1123684 - RNA, 19 nt, Artificial Sequence
  Description of Artificial Sequence: Synthetic oligonucleotide
ccucgagaccugagcucaa

SEQ ID NO: 1123685 - RNA, 19 nt, Artificial Sequence
  Description of Artificial Sequence: Synthetic oligonucleotide
ccgucgccuacuccuuucu

SEQ ID NO: 1123686 - RNA, 19 nt, Artificial Sequence
  Description of Artificial Sequence: Synthetic oligonucleotide
cggaaauuucgagggacuu

SEQ ID NO: 1123687 - RNA, 19 nt, Artificial Sequence
  Description of Artificial Sequence: Synthetic oligonucleotide
ccugugcgcugaggacucu

SEQ ID NO: 1123688 - RNA, 19 nt, Artificial Sequence
  Description of Artificial Sequence: Synthetic oligonucleotide
agaaauacuuggcacaggg

SEQ ID NO: 1123689 - RNA, 19 nt, Artificial Sequence
  Description of Artificial Sequence: Synthetic oligonucleotide
gaaauuggcaucuggagug

SEQ ID NO: 1123690 - RNA, 19 nt, Artificial Sequence
  Description of Artificial Sequence: Synthetic oligonucleotide
uuuucagacagucaccgcc

SEQ ID NO: 1123691 - RNA, 19 nt, Artificial Sequence
  Description of Artificial Sequence: Synthetic oligonucleotide
agggauugcgaguauagcc

SEQ ID NO: 1123692 - RNA, 19 nt, Artificial Sequence
  Description of Artificial Sequence: Synthetic oligonucleotide
aguuacaagagcccagccc

SEQ ID NO: 1123693 - RNA, 19 nt, Artificial Sequence
  Description of Artificial Sequence: Synthetic oligonucleotide
uggauuguuccacagaaca

SEQ ID NO: 1123694 - RNA, 19 nt, Artificial Sequence
  Description of Artificial Sequence: Synthetic oligonucleotide
auuacuauggggacaaugg

SEQ ID NO: 1123695 - RNA, 19 nt, Artificial Sequence
  Description of Artificial Sequence: Synthetic oligonucleotide
guuacaagagcccagcccc

SEQ ID NO: 1123696 - RNA, 19 nt, Artificial Sequence
  Description of Artificial Sequence: Synthetic oligonucleotide
uuaggaaugggucuagagu

SEQ ID NO: 1123697 - RNA, 19 nt, Artificial Sequence
  Description of Artificial Sequence: Synthetic oligonucleotide
ugcgaguauagccaggaag

SEQ ID NO: 1123698 - RNA, 19 nt, Artificial Sequence
  Description of Artificial Sequence: Synthetic oligonucleotide
uuacuauggggacaauggg

SEQ ID NO: 1123699 - RNA, 19 nt, Artificial Sequence
  Description of Artificial Sequence: Synthetic oligonucleotide
cuugcuguuacccagauaa

SEQ ID NO: 1123700 - RNA, 19 nt, Artificial Sequence
  Description of Artificial Sequence: Synthetic oligonucleotide
uuaauguggagcagcagca

SEQ ID NO: 1123701 - RNA, 19 nt, Artificial Sequence
  Description of Artificial Sequence: Synthetic oligonucleotide
acgucaucuggucucagcc

SEQ ID NO: 1123702 - RNA, 19 nt, Artificial Sequence
  Description of Artificial Sequence: Synthetic oligonucleotide
cauacagguauuuaaugug

SEQ ID NO: 1123703 - RNA, 19 nt, Artificial Sequence
  Description of Artificial Sequence: Synthetic oligonucleotide
ugucccacaagacaagaug

SEQ ID NO: 1123704 - RNA, 19 nt, Artificial Sequence
  Description of Artificial Sequence: Synthetic oligonucleotide
accacacaaaacuggauuc

SEQ ID NO: 1123705 - RNA, 19 nt, Artificial Sequence
  Description of Artificial Sequence: Synthetic oligonucleotide
aguugaagauucccaaagg

SEQ ID NO: 1123706 - RNA, 19 nt, Artificial Sequence
  Description of Artificial Sequence: Synthetic oligonucleotide
uaauuaaucgcggggaagc

SEQ ID NO: 1123707 - RNA, 19 nt, Artificial Sequence
  Description of Artificial Sequence: Synthetic oligonucleotide
agaaauuggcaucuggagu

SEQ ID NO: 1123708 - RNA, 19 nt, Artificial Sequence
  Description of Artificial Sequence: Synthetic oligonucleotide
ugacucuguauccauauuc

SEQ ID NO: 1123709 - RNA, 19 nt, Artificial Sequence
  Description of Artificial Sequence: Synthetic oligonucleotide
cucacuagcagaugggccc

SEQ ID NO: 1123710 - RNA, 19 nt, Artificial Sequence
  Description of Artificial Sequence: Synthetic oligonucleotide
aucccaagcaggucgaggg

SEQ ID NO: 1123711 - RNA, 19 nt, Artificial Sequence
  Description of Artificial Sequence: Synthetic oligonucleotide
aaccacacaaaacuggauu

SEQ ID NO: 1123712 - RNA, 19 nt, Artificial Sequence
  Description of Artificial Sequence: Synthetic oligonucleotide
uuaaucgcggggaagcaga

SEQ ID NO: 1123713 - RNA, 19 nt, Artificial Sequence
  Description of Artificial Sequence: Synthetic oligonucleotide
auguucucgacguugcguc

SEQ ID NO: 1123714 - RNA, 19 nt, Artificial Sequence
  Description of Artificial Sequence: Synthetic oligonucleotide
uacuauggggacaauggga

SEQ ID NO: 1123715 - RNA, 19 nt, Artificial Sequence
  Description of Artificial Sequence: Synthetic oligonucleotide
auacagguauuuaaugugg

SEQ ID NO: 1123716 - RNA, 19 nt, Artificial Sequence
  Description of Artificial Sequence: Synthetic oligonucleotide
gaggacauuacuaugggga

SEQ ID NO: 1123717 - RNA, 19 nt, Artificial Sequence
  Description of Artificial Sequence: Synthetic oligonucleotide
cauugugguuucuuguucc

SEQ ID NO: 1123718 - RNA, 19 nt, Artificial Sequence
  Description of Artificial Sequence: Synthetic oligonucleotide
ugggucuagagucggaggc

SEQ ID NO: 1123719 - RNA, 19 nt, Artificial Sequence
  Description of Artificial Sequence: Synthetic oligonucleotide
cagaaauuggcaucuggag

SEQ ID NO: 1123720 - RNA, 19 nt, Artificial Sequence
  Description of Artificial Sequence: Synthetic oligonucleotide
aagaggauccaaccguugu

SEQ ID NO: 1123721 - RNA, 19 nt, Artificial Sequence
  Description of Artificial Sequence: Synthetic oligonucleotide
uuaauuaaucgcggggaag

SEQ ID NO: 1123722 - RNA, 19 nt, Artificial Sequence
  Description of Artificial Sequence: Synthetic oligonucleotide
ugauaggaggacauuacua

SEQ ID NO: 1123723 - RNA, 19 nt, Artificial Sequence
  Description of Artificial Sequence: Synthetic oligonucleotide
aacuggauuccacccguuc

SEQ ID NO: 1123724 - RNA, 19 nt, Artificial Sequence
  Description of Artificial Sequence: Synthetic oligonucleotide
cuuaggaaugggucuagag

SEQ ID NO: 1123725 - RNA, 19 nt, Artificial Sequence
  Description of Artificial Sequence: Synthetic oligonucleotide
acacaugaguccauugucc

SEQ ID NO: 1123726 - RNA, 19 nt, Artificial Sequence
  Description of Artificial Sequence: Synthetic oligonucleotide
aaugggucuagagucggag

SEQ ID NO: 1123727 - RNA, 19 nt, Artificial Sequence
  Description of Artificial Sequence: Synthetic oligonucleotide
ucuagagucggaggcaggg

SEQ ID NO: 1123728 - RNA, 19 nt, Artificial Sequence
  Description of Artificial Sequence: Synthetic oligonucleotide
gauccaaccguuguagaag

SEQ ID NO: 1123729 - RNA, 19 nt, Artificial Sequence
  Description of Artificial Sequence: Synthetic oligonucleotide
guugaagauucccaaagga

SEQ ID NO: 1123730 - RNA, 19 nt, Artificial Sequence
  Description of Artificial Sequence: Synthetic oligonucleotide
ugaggaguccucacuagca

SEQ ID NO: 1123731 - RNA, 19 nt, Artificial Sequence
  Description of Artificial Sequence: Synthetic oligonucleotide
auccaaccguuguagaagg

SEQ ID NO: 1123732 - RNA, 19 nt, Artificial Sequence
  Description of Artificial Sequence: Synthetic oligonucleotide
acucuguauccauauucac

SEQ ID NO: 1123733 - RNA, 19 nt, Artificial Sequence
  Description of Artificial Sequence: Synthetic oligonucleotide
acaacguagggcugcgugg

SEQ ID NO: 1123734 - RNA, 19 nt, Artificial Sequence
  Description of Artificial Sequence: Synthetic oligonucleotide
acugcaagguggaaggcgc

SEQ ID NO: 1123735 - RNA, 19 nt, Artificial Sequence
  Description of Artificial Sequence: Synthetic oligonucleotide
agggugacaguguugagga

SEQ ID NO: 1123736 - RNA, 19 nt, Artificial Sequence
  Description of Artificial Sequence: Synthetic oligonucleotide
gaugggcccacucagucug

SEQ ID NO: 1123737 - RNA, 19 nt, Artificial Sequence
  Description of Artificial Sequence: Synthetic oligonucleotide
aaacccagacucucacauc

SEQ ID NO: 1123738 - RNA, 19 nt, Artificial Sequence
  Description of Artificial Sequence: Synthetic oligonucleotide
uacagguauuuaaugugga

SEQ ID NO: 1123739 - RNA, 19 nt, Artificial Sequence
  Description of Artificial Sequence: Synthetic oligonucleotide
gagaccacaacguagggcu

SEQ ID NO: 1123740 - RNA, 19 nt, Artificial Sequence
  Description of Artificial Sequence: Synthetic oligonucleotide
gucgagggagcucuggugg

SEQ ID NO: 1123741 - RNA, 19 nt, Artificial Sequence
  Description of Artificial Sequence: Synthetic oligonucleotide
agccacuugacaugagggg

SEQ ID NO: 1123742 - RNA, 19 nt, Artificial Sequence
  Description of Artificial Sequence: Synthetic oligonucleotide
aagcgucguuccuucuugc

SEQ ID NO: 1123743 - RNA, 19 nt, Artificial Sequence
  Description of Artificial Sequence: Synthetic oligonucleotide
gucccacaagacaagaugg

SEQ ID NO: 1123744 - RNA, 19 nt, Artificial Sequence
  Description of Artificial Sequence: Synthetic oligonucleotide
ugcguuuccggucaaugaa

SEQ ID NO: 1123745 - RNA, 19 nt, Artificial Sequence
  Description of Artificial Sequence: Synthetic oligonucleotide
agcagaugggcccacucag

SEQ ID NO: 1123746 - RNA, 19 nt, Artificial Sequence
  Description of Artificial Sequence: Synthetic oligonucleotide
ugguuggagaccacaacgu

SEQ ID NO: 1123747 - RNA, 19 nt, Artificial Sequence
  Description of Artificial Sequence: Synthetic oligonucleotide
ugaggaguguucaggcuca

SEQ ID NO: 1123748 - RNA, 19 nt, Artificial Sequence
  Description of Artificial Sequence: Synthetic oligonucleotide
aagaaauacuuggcacagg

SEQ ID NO: 1123749 - RNA, 19 nt, Artificial Sequence
  Description of Artificial Sequence: Synthetic oligonucleotide
gaagcgucguuccuucuug

SEQ ID NO: 1123750 - RNA, 19 nt, Artificial Sequence
  Description of Artificial Sequence: Synthetic oligonucleotide
guuggagaccacaacguag

SEQ ID NO: 1123751 - RNA, 19 nt, Artificial Sequence
  Description of Artificial Sequence: Synthetic oligonucleotide
acaagacaagauggcaggc

SEQ ID NO: 1123752 - RNA, 19 nt, Artificial Sequence
  Description of Artificial Sequence: Synthetic oligonucleotide
ucuugauaggaggacauua

SEQ ID NO: 1123753 - RNA, 19 nt, Artificial Sequence
  Description of Artificial Sequence: Synthetic oligonucleotide
gaggaagauccccagguga

SEQ ID NO: 1123754 - RNA, 19 nt, Artificial Sequence
  Description of Artificial Sequence: Synthetic oligonucleotide
ugagacuucugaguuacaa

SEQ ID NO: 1123755 - RNA, 19 nt, Artificial Sequence
  Description of Artificial Sequence: Synthetic oligonucleotide
ucgcgcuuggcaaugggca

SEQ ID NO: 1123756 - RNA, 19 nt, Artificial Sequence
  Description of Artificial Sequence: Synthetic oligonucleotide
caagacaagauggcaggcg

SEQ ID NO: 1123757 - RNA, 19 nt, Artificial Sequence
  Description of Artificial Sequence: Synthetic oligonucleotide
acccgcacaugacaucgcc

SEQ ID NO: 1123758 - RNA, 19 nt, Artificial Sequence
  Description of Artificial Sequence: Synthetic oligonucleotide
aucgcggggaagcagaaau

SEQ ID NO: 1123759 - RNA, 19 nt, Artificial Sequence
  Description of Artificial Sequence: Synthetic oligonucleotide
aauuaaucgcggggaagca

SEQ ID NO: 1123760 - RNA, 19 nt, Artificial Sequence
  Description of Artificial Sequence: Synthetic oligonucleotide
agcauggagugccggacuc

SEQ ID NO: 1123761 - RNA, 19 nt, Artificial Sequence
  Description of Artificial Sequence: Synthetic oligonucleotide
cugaguuacaagagcccag

SEQ ID NO: 1123762 - RNA, 19 nt, Artificial Sequence
  Description of Artificial Sequence: Synthetic oligonucleotide
cauuacuauggggacaaug

SEQ ID NO: 1123763 - RNA, 19 nt, Artificial Sequence
  Description of Artificial Sequence: Synthetic oligonucleotide
aguagcucgcgcuuggcaa

SEQ ID NO: 1123764 - RNA, 19 nt, Artificial Sequence
  Description of Artificial Sequence: Synthetic oligonucleotide
acugcucagagagggaguc

SEQ ID NO: 1123765 - RNA, 19 nt, Artificial Sequence
  Description of Artificial Sequence: Synthetic oligonucleotide
acucucacauccuggguga

SEQ ID NO: 1123766 - RNA, 19 nt, Artificial Sequence
  Description of Artificial Sequence: Synthetic oligonucleotide
auuaaucgcggggaagcag

SEQ ID NO: 1123767 - RNA, 19 nt, Artificial Sequence
  Description of Artificial Sequence: Synthetic oligonucleotide
aggggugagacuucugagu

SEQ ID NO: 1123768 - RNA, 19 nt, Artificial Sequence
  Description of Artificial Sequence: Synthetic oligonucleotide
gagccauugugguuucuug

SEQ ID NO: 1123769 - RNA, 19 nt, Artificial Sequence
  Description of Artificial Sequence: Synthetic oligonucleotide
caaaggagaguagggagug

SEQ ID NO: 1123770 - RNA, 19 nt, Artificial Sequence
  Description of Artificial Sequence: Synthetic oligonucleotide
guuaauuaaucgcggggaa

SEQ ID NO: 1123771 - RNA, 19 nt, Artificial Sequence
  Description of Artificial Sequence: Synthetic oligonucleotide
aguugcuugcuguuaccca

SEQ ID NO: 1123772 - RNA, 19 nt, Artificial Sequence
  Description of Artificial Sequence: Synthetic oligonucleotide
acaagaugggaaggguagg

SEQ ID NO: 1123773 - RNA, 19 nt, Artificial Sequence
  Description of Artificial Sequence: Synthetic oligonucleotide
cauccguggagaucucccg

SEQ ID NO: 1123774 - RNA, 19 nt, Artificial Sequence
  Description of Artificial Sequence: Synthetic oligonucleotide
ucaguugcuugcuguuacc

SEQ ID NO: 1123775 - RNA, 19 nt, Artificial Sequence
  Description of Artificial Sequence: Synthetic oligonucleotide
agccauugugguuucuugu

SEQ ID NO: 1123776 - RNA, 19 nt, Artificial Sequence
  Description of Artificial Sequence: Synthetic oligonucleotide
acagggauugcgaguauag

SEQ ID NO: 1123777 - RNA, 19 nt, Artificial Sequence
  Description of Artificial Sequence: Synthetic oligonucleotide
uggagugccggacucgguc

SEQ ID NO: 1123778 - RNA, 19 nt, Artificial Sequence
  Description of Artificial Sequence: Synthetic oligonucleotide
ugcuguuacccagauaaua

SEQ ID NO: 1123779 - RNA, 19 nt, Artificial Sequence
  Description of Artificial Sequence: Synthetic oligonucleotide
uccucacuagcagaugggc

SEQ ID NO: 1123780 - RNA, 19 nt, Artificial Sequence
  Description of Artificial Sequence: Synthetic oligonucleotide
cacaacguagggcugcgug

SEQ ID NO: 1123781 - RNA, 19 nt, Artificial Sequence
  Description of Artificial Sequence: Synthetic oligonucleotide
gaugagccacuugacauga

SEQ ID NO: 1123782 - RNA, 19 nt, Artificial Sequence
  Description of Artificial Sequence: Synthetic oligonucleotide
gguggauuguuccacagaa

SEQ ID NO: 1123783 - RNA, 19 nt, Artificial Sequence
  Description of Artificial Sequence: Synthetic oligonucleotide
caugacaucgccccgaggu

SEQ ID NO: 1123784 - RNA, 19 nt, Artificial Sequence
  Description of Artificial Sequence: Synthetic oligonucleotide
guugcguccccgcacagca

SEQ ID NO: 1123785 - RNA, 19 nt, Artificial Sequence
  Description of Artificial Sequence: Synthetic oligonucleotide
gacgucaucuggucucagc

SEQ ID NO: 1123786 - RNA, 19 nt, Artificial Sequence
  Description of Artificial Sequence: Synthetic oligonucleotide
cacucagucuguguggccc

SEQ ID NO: 1123787 - RNA, 19 nt, Artificial Sequence
  Description of Artificial Sequence: Synthetic oligonucleotide
aaauuggcaucuggagugu

SEQ ID NO: 1123788 - RNA, 19 nt, Artificial Sequence
  Description of Artificial Sequence: Synthetic oligonucleotide
uuacaagagcccagcccca

SEQ ID NO: 1123789 - RNA, 19 nt, Artificial Sequence
  Description of Artificial Sequence: Synthetic oligonucleotide
ggaggacauuacuaugggg

SEQ ID NO: 1123790 - RNA, 19 nt, Artificial Sequence
  Description of Artificial Sequence: Synthetic oligonucleotide
gaagcagaaauuggcaucu

SEQ ID NO: 1123791 - RNA, 19 nt, Artificial Sequence
  Description of Artificial Sequence: Synthetic oligonucleotide
ggucaaugaagaugacucc

SEQ ID NO: 1123792 - RNA, 19 nt, Artificial Sequence
  Description of Artificial Sequence: Synthetic oligonucleotide
aagagaccacuggggaggg

SEQ ID NO: 1123793 - RNA, 19 nt, Artificial Sequence
  Description of Artificial Sequence: Synthetic oligonucleotide
aggaagauccccaggugag

SEQ ID NO: 1123794 - RNA, 19 nt, Artificial Sequence
  Description of Artificial Sequence: Synthetic oligonucleotide
uguucucgacguugcgucc

SEQ ID NO: 1123795 - RNA, 19 nt, Artificial Sequence
  Description of Artificial Sequence: Synthetic oligonucleotide
gauugcgaguauagccagg

SEQ ID NO: 1123796 - RNA, 19 nt, Artificial Sequence
  Description of Artificial Sequence: Synthetic oligonucleotide
uccacucggaucccauaca

SEQ ID NO: 1123797 - RNA, 19 nt, Artificial Sequence
  Description of Artificial Sequence: Synthetic oligonucleotide
aucgccccgaggugaagcg

SEQ ID NO: 1123798 - RNA, 19 nt, Artificial Sequence
  Description of Artificial Sequence: Synthetic oligonucleotide
gaccacuggggagggaugg

SEQ ID NO: 1123799 - RNA, 19 nt, Artificial Sequence
  Description of Artificial Sequence: Synthetic oligonucleotide
caacguagggcugcguggg

SEQ ID NO: 1123800 - RNA, 19 nt, Artificial Sequence
  Description of Artificial Sequence: Synthetic oligonucleotide
cacucggaucccauacagg

SEQ ID NO: 1123801 - RNA, 19 nt, Artificial Sequence
  Description of Artificial Sequence: Synthetic oligonucleotide
ugaagcgucguuccuucuu

SEQ ID NO: 1123802 - RNA, 19 nt, Artificial Sequence
  Description of Artificial Sequence: Synthetic oligonucleotide
agauccccaggugagccgg

SEQ ID NO: 1123803 - RNA, 19 nt, Artificial Sequence
  Description of Artificial Sequence: Synthetic oligonucleotide
cuccacucggaucccauac

SEQ ID NO: 1123804 - RNA, 19 nt, Artificial Sequence
  Description of Artificial Sequence: Synthetic oligonucleotide
augacaucgccccgaggug

SEQ ID NO: 1123805 - RNA, 19 nt, Artificial Sequence
  Description of Artificial Sequence: Synthetic oligonucleotide
acaugacacugauggcauc

SEQ ID NO: 1123806 - RNA, 19 nt, Artificial Sequence
  Description of Artificial Sequence: Synthetic oligonucleotide
cuugcaguagaagucuuga

SEQ ID NO: 1123807 - RNA, 19 nt, Artificial Sequence
  Description of Artificial Sequence: Synthetic oligonucleotide
uccguggagaucucccgga

SEQ ID NO: 1123808 - RNA, 19 nt, Artificial Sequence
  Description of Artificial Sequence: Synthetic oligonucleotide
cauggagugccggacucgg

SEQ ID NO: 1123809 - RNA, 19 nt, Artificial Sequence
  Description of Artificial Sequence: Synthetic oligonucleotide
ggugagacuucugaguuac

SEQ ID NO: 1123810 - RNA, 19 nt, Artificial Sequence
  Description of Artificial Sequence: Synthetic oligonucleotide
ggauugcgaguauagccag

SEQ ID NO: 1123811 - RNA, 19 nt, Artificial Sequence
  Description of Artificial Sequence: Synthetic oligonucleotide
cacugggaggaaaugaaaa

SEQ ID NO: 1123812 - RNA, 19 nt, Artificial Sequence
  Description of Artificial Sequence: Synthetic oligonucleotide
ugacaucgccccgagguga

SEQ ID NO: 1123813 - RNA, 19 nt, Artificial Sequence
  Description of Artificial Sequence: Synthetic oligonucleotide
agauucccaaaggagagua

SEQ ID NO: 1123814 - RNA, 19 nt, Artificial Sequence
  Description of Artificial Sequence: Synthetic oligonucleotide
ucccgugcguuuccgguca

SEQ ID NO: 1123815 - RNA, 19 nt, Artificial Sequence
  Description of Artificial Sequence: Synthetic oligonucleotide
ugugcucagcccugggcac

SEQ ID NO: 1123816 - RNA, 19 nt, Artificial Sequence
  Description of Artificial Sequence: Synthetic oligonucleotide
caguugcuugcuguuaccc

SEQ ID NO: 1123817 - RNA, 19 nt, Artificial Sequence
  Description of Artificial Sequence: Synthetic oligonucleotide
agaggauccaaccguugua

SEQ ID NO: 1123818 - RNA, 19 nt, Artificial Sequence
  Description of Artificial Sequence: Synthetic oligonucleotide
aagcucagagccgggccuc

SEQ ID NO: 1123819 - RNA, 19 nt, Artificial Sequence
  Description of Artificial Sequence: Synthetic oligonucleotide
uccaaccguuguagaaggc

SEQ ID NO: 1123820 - RNA, 19 nt, Artificial Sequence
  Description of Artificial Sequence: Synthetic oligonucleotide
ucgacguugcguccccgca

SEQ ID NO: 1123821 - RNA, 19 nt, Artificial Sequence
  Description of Artificial Sequence: Synthetic oligonucleotide
agaugggcccacucagucu

SEQ ID NO: 1123822 - RNA, 19 nt, Artificial Sequence
  Description of Artificial Sequence: Synthetic oligonucleotide
cucuguauccauauucacu

SEQ ID NO: 1123823 - RNA, 19 nt, Artificial Sequence
  Description of Artificial Sequence: Synthetic oligonucleotide
ggagcggagaguccauggg

SEQ ID NO: 1123824 - RNA, 19 nt, Artificial Sequence
  Description of Artificial Sequence: Synthetic oligonucleotide
agcacccgcacaugacauc

SEQ ID NO: 1123825 - RNA, 19 nt, Artificial Sequence
  Description of Artificial Sequence: Synthetic oligonucleotide
cacagccccacugagggug

SEQ ID NO: 1123826 - RNA, 19 nt, Artificial Sequence
  Description of Artificial Sequence: Synthetic oligonucleotide
gaccacaacguagggcugc

SEQ ID NO: 1123827 - RNA, 19 nt, Artificial Sequence
  Description of Artificial Sequence: Synthetic oligonucleotide
cuauggggacaaugggaac

SEQ ID NO: 1123828 - RNA, 19 nt, Artificial Sequence
  Description of Artificial Sequence: Synthetic oligonucleotide
cagaugggcccacucaguc

SEQ ID NO: 1123829 - RNA, 19 nt, Artificial Sequence
  Description of Artificial Sequence: Synthetic oligonucleotide
agaguagcucgcgcuuggc

SEQ ID NO: 1123830 - RNA, 19 nt, Artificial Sequence
  Description of Artificial Sequence: Synthetic oligonucleotide
uucucgacguugcgucccc

SEQ ID NO: 1123831 - RNA, 19 nt, Artificial Sequence
  Description of Artificial Sequence: Synthetic oligonucleotide
cuagagucggaggcagggg

SEQ ID NO: 1123832 - RNA, 19 nt, Artificial Sequence
  Description of Artificial Sequence: Synthetic oligonucleotide
uggaaggcgccacguuuga

SEQ ID NO: 1123833 - RNA, 19 nt, Artificial Sequence
  Description of Artificial Sequence: Synthetic oligonucleotide
cccauacagguauuuaaug

SEQ ID NO: 1123834 - RNA, 19 nt, Artificial Sequence
  Description of Artificial Sequence: Synthetic oligonucleotide
agcggagaguccaugggug

SEQ ID NO: 1123835 - RNA, 19 nt, Artificial Sequence
  Description of Artificial Sequence: Synthetic oligonucleotide
gacguugcguccccgcaca

SEQ ID NO: 1123836 - RNA, 19 nt, Artificial Sequence
  Description of Artificial Sequence: Synthetic oligonucleotide
ucccaagcaggucgaggga

SEQ ID NO: 1123837 - RNA, 19 nt, Artificial Sequence
  Description of Artificial Sequence: Synthetic oligonucleotide
uaaucgcggggaagcagaa

SEQ ID NO: 1123838 - RNA, 19 nt, Artificial Sequence
  Description of Artificial Sequence: Synthetic oligonucleotide
ggaagcucagagccgggcc

SEQ ID NO: 1123839 - RNA, 19 nt, Artificial Sequence
  Description of Artificial Sequence: Synthetic oligonucleotide
agucuugauaggaggacau

SEQ ID NO: 1123840 - RNA, 19 nt, Artificial Sequence
  Description of Artificial Sequence: Synthetic oligonucleotide
gggauugcgaguauagcca

SEQ ID NO: 1123841 - RNA, 19 nt, Artificial Sequence
  Description of Artificial Sequence: Synthetic oligonucleotide
ugguauccgaugagccacu

SEQ ID NO: 1123842 - RNA, 19 nt, Artificial Sequence
  Description of Artificial Sequence: Synthetic oligonucleotide
ccgcacaugacaucgcccc

SEQ ID NO: 1123843 - RNA, 19 nt, Artificial Sequence
  Description of Artificial Sequence: Synthetic oligonucleotide
gcacccgcacaugacaucg

SEQ ID NO: 1123844 - RNA, 19 nt, Artificial Sequence
  Description of Artificial Sequence: Synthetic oligonucleotide
gaguagggaguggggaccc

SEQ ID NO: 1123845 - RNA, 19 nt, Artificial Sequence
  Description of Artificial Sequence: Synthetic oligonucleotide
cagggauugcgaguauagc

SEQ ID NO: 1123846 - RNA, 19 nt, Artificial Sequence
  Description of Artificial Sequence: Synthetic oligonucleotide
guauccgaugagccacuug

SEQ ID NO: 1123847 - RNA, 19 nt, Artificial Sequence
  Description of Artificial Sequence: Synthetic oligonucleotide
cucgacguugcguccccgc

SEQ ID NO: 1123848 - RNA, 19 nt, Artificial Sequence
  Description of Artificial Sequence: Synthetic oligonucleotide
aacguagggcugcguggga

SEQ ID NO: 1123849 - RNA, 19 nt, Artificial Sequence
  Description of Artificial Sequence: Synthetic oligonucleotide
ugcgugggagggaaguguu

SEQ ID NO: 1123850 - RNA, 19 nt, Artificial Sequence
  Description of Artificial Sequence: Synthetic oligonucleotide
aggucgagggagcucuggu

SEQ ID NO: 1123851 - RNA, 19 nt, Artificial Sequence
  Description of Artificial Sequence: Synthetic oligonucleotide
gcuguuacccagauaauaa

SEQ ID NO: 1123852 - RNA, 19 nt, Artificial Sequence
  Description of Artificial Sequence: Synthetic oligonucleotide
cagacgcaggaucuucaug

SEQ ID NO: 1123853 - RNA, 19 nt, Artificial Sequence
  Description of Artificial Sequence: Synthetic oligonucleotide
ccaaccguuguagaaggcc

SEQ ID NO: 1123854 - RNA, 19 nt, Artificial Sequence
  Description of Artificial Sequence: Synthetic oligonucleotide
guucucgacguugcguccc

SEQ ID NO: 1123855 - RNA, 19 nt, Artificial Sequence
  Description of Artificial Sequence: Synthetic oligonucleotide
accacaacguagggcugcg

SEQ ID NO: 1123856 - RNA, 19 nt, Artificial Sequence
  Description of Artificial Sequence: Synthetic oligonucleotide
cugccugaggcgcuggguc

SEQ ID NO: 1123857 - RNA, 19 nt, Artificial Sequence
  Description of Artificial Sequence: Synthetic oligonucleotide
uugcuguuacccagauaau

SEQ ID NO: 1123858 - RNA, 19 nt, Artificial Sequence
  Description of Artificial Sequence: Synthetic oligonucleotide
agugccggacucggucugc

SEQ ID NO: 1123859 - RNA, 19 nt, Artificial Sequence
  Description of Artificial Sequence: Synthetic oligonucleotide
agggguggauuguuccaca

SEQ ID NO: 1123860 - RNA, 19 nt, Artificial Sequence
  Description of Artificial Sequence: Synthetic oligonucleotide
ucgagggagcucugguggu

SEQ ID NO: 1123861 - RNA, 19 nt, Artificial Sequence
  Description of Artificial Sequence: Synthetic oligonucleotide
ggauuguuccacagaacac

SEQ ID NO: 1123862 - RNA, 19 nt, Artificial Sequence
  Description of Artificial Sequence: Synthetic oligonucleotide
ggagaccacaacguagggc

SEQ ID NO: 1123863 - RNA, 19 nt, Artificial Sequence
  Description of Artificial Sequence: Synthetic oligonucleotide
ggucuagagucggaggcag

SEQ ID NO: 1123864 - RNA, 19 nt, Artificial Sequence
  Description of Artificial Sequence: Synthetic oligonucleotide
caucgccccgaggugaagc

SEQ ID NO: 1123865 - RNA, 19 nt, Artificial Sequence
  Description of Artificial Sequence: Synthetic oligonucleotide
uugcgaguauagccaggaa

SEQ ID NO: 1123866 - RNA, 19 nt, Artificial Sequence
  Description of Artificial Sequence: Synthetic oligonucleotide
guagggaguggggacccag

SEQ ID NO: 1123867 - RNA, 19 nt, Artificial Sequence
  Description of Artificial Sequence: Synthetic oligonucleotide
gagugccggacucggucug

SEQ ID NO: 1123868 - RNA, 19 nt, Artificial Sequence
  Description of Artificial Sequence: Synthetic oligonucleotide
aaccguuguagaaggccau

SEQ ID NO: 1123869 - RNA, 19 nt, Artificial Sequence
  Description of Artificial Sequence: Synthetic oligonucleotide
cccacugagggugacagug

SEQ ID NO: 1123870 - RNA, 19 nt, Artificial Sequence
  Description of Artificial Sequence: Synthetic oligonucleotide
acguagggcugcgugggag

SEQ ID NO: 1123871 - RNA, 19 nt, Artificial Sequence
  Description of Artificial Sequence: Synthetic oligonucleotide
gcggagaguccaugggugg

SEQ ID NO: 1123872 - RNA, 19 nt, Artificial Sequence
  Description of Artificial Sequence: Synthetic oligonucleotide
cuggcccugccugaggcgc

SEQ ID NO: 1123873 - RNA, 19 nt, Artificial Sequence
  Description of Artificial Sequence: Synthetic oligonucleotide
gaucccauacagguauuua

SEQ ID NO: 1123874 - RNA, 19 nt, Artificial Sequence
  Description of Artificial Sequence: Synthetic oligonucleotide
agcgcggggacgucaucug

SEQ ID NO: 1123875 - RNA, 19 nt, Artificial Sequence
  Description of Artificial Sequence: Synthetic oligonucleotide
ggaaagggcguggagugac

SEQ ID NO: 1123876 - RNA, 19 nt, Artificial Sequence
  Description of Artificial Sequence: Synthetic oligonucleotide
ggggacgucaucuggucuc

SEQ ID NO: 1123877 - RNA, 19 nt, Artificial Sequence
  Description of Artificial Sequence: Synthetic oligonucleotide
ccauacagguauuuaaugu

SEQ ID NO: 1123878 - RNA, 19 nt, Artificial Sequence
  Description of Artificial Sequence: Synthetic oligonucleotide
ucaucccaagcaggucgag

SEQ ID NO: 1123879 - RNA, 19 nt, Artificial Sequence
  Description of Artificial Sequence: Synthetic oligonucleotide
gagcggagaguccaugggu

SEQ ID NO: 1123880 - RNA, 19 nt, Artificial Sequence
  Description of Artificial Sequence: Synthetic oligonucleotide
gaccggagcggagagucca

SEQ ID NO: 1123881 - RNA, 19 nt, Artificial Sequence
  Description of Artificial Sequence: Synthetic oligonucleotide
uggagaucucccggaagau

SEQ ID NO: 1123882 - RNA, 19 nt, Artificial Sequence
  Description of Artificial Sequence: Synthetic oligonucleotide
ggagaguagggagugggga

SEQ ID NO: 1123883 - RNA, 19 nt, Artificial Sequence
  Description of Artificial Sequence: Synthetic oligonucleotide
agcugucccacaagacaag

SEQ ID NO: 1123884 - RNA, 19 nt, Artificial Sequence
  Description of Artificial Sequence: Synthetic oligonucleotide
ggcgccacguuugaagggc

SEQ ID NO: 1123885 - RNA, 19 nt, Artificial Sequence
  Description of Artificial Sequence: Synthetic oligonucleotide
aucaucccaagcaggucga

SEQ ID NO: 1123886 - RNA, 19 nt, Artificial Sequence
  Description of Artificial Sequence: Synthetic oligonucleotide
ucgcggggaagcagaaauu

SEQ ID NO: 1123887 - RNA, 19 nt, Artificial Sequence
  Description of Artificial Sequence: Synthetic oligonucleotide
gcggggaagcagaaauugg

SEQ ID NO: 1123888 - RNA, 19 nt, Artificial Sequence
  Description of Artificial Sequence: Synthetic oligonucleotide
ucucgacguugcguccccg

SEQ ID NO: 1123889 - RNA, 19 nt, Artificial Sequence
  Description of Artificial Sequence: Synthetic oligonucleotide
cucccgugcguuuccgguc

SEQ ID NO: 1123890 - RNA, 19 nt, Artificial Sequence
  Description of Artificial Sequence: Synthetic oligonucleotide
gcguuuccggucaaugaag

SEQ ID NO: 1123891 - RNA, 19 nt, Artificial Sequence
  Description of Artificial Sequence: Synthetic oligonucleotide
aaucgcggggaagcagaaa

SEQ ID NO: 1123892 - RNA, 19 nt, Artificial Sequence
  Description of Artificial Sequence: Synthetic oligonucleotide
ugagccggugaggaguguu

SEQ ID NO: 1123893 - RNA, 19 nt, Artificial Sequence
  Description of Artificial Sequence: Synthetic oligonucleotide
ggccaccucagacaugaca

SEQ ID NO: 1123894 - RNA, 19 nt, Artificial Sequence
  Description of Artificial Sequence: Synthetic oligonucleotide
gggucuuaggaaugggucu

SEQ ID NO: 1123895 - RNA, 19 nt, Artificial Sequence
  Description of Artificial Sequence: Synthetic oligonucleotide
uagcucgcgcuuggcaaug

SEQ ID NO: 1123896 - RNA, 19 nt, Artificial Sequence
  Description of Artificial Sequence: Synthetic oligonucleotide
gaaugggucuagagucgga

SEQ ID NO: 1123897 - RNA, 19 nt, Artificial Sequence
  Description of Artificial Sequence: Synthetic oligonucleotide
ggccugcacugcaaggugg

SEQ ID NO: 1123898 - RNA, 19 nt, Artificial Sequence
  Description of Artificial Sequence: Synthetic oligonucleotide
caucucccgugcguuuccg

SEQ ID NO: 1123899 - RNA, 19 nt, Artificial Sequence
  Description of Artificial Sequence: Synthetic oligonucleotide
agccggugaggaguguuca

SEQ ID NO: 1123900 - RNA, 19 nt, Artificial Sequence
  Description of Artificial Sequence: Synthetic oligonucleotide
ccagccuaccuccuggguc

SEQ ID NO: 1123901 - RNA, 19 nt, Artificial Sequence
  Description of Artificial Sequence: Synthetic oligonucleotide
ccggugaggaguguucagg

SEQ ID NO: 1123902 - RNA, 19 nt, Artificial Sequence
  Description of Artificial Sequence: Synthetic oligonucleotide
cagcccggcagagccagcc

SEQ ID NO: 1123903 - RNA, 19 nt, Artificial Sequence
  Description of Artificial Sequence: Synthetic oligonucleotide
ugacaguguugaggaagau

SEQ ID NO: 1123904 - RNA, 19 nt, Artificial Sequence
  Description of Artificial Sequence: Synthetic oligonucleotide
cagccuaccuccugggucu

SEQ ID NO: 1123905 - RNA, 19 nt, Artificial Sequence
  Description of Artificial Sequence: Synthetic oligonucleotide
cacccgcacaugacaucgc

SEQ ID NO: 1123906 - RNA, 19 nt, Artificial Sequence
  Description of Artificial Sequence: Synthetic oligonucleotide
gaggaguguucaggcucag

SEQ ID NO: 1123907 - RNA, 19 nt, Artificial Sequence
  Description of Artificial Sequence: Synthetic oligonucleotide
gggaccggagcggagaguc

SEQ ID NO: 1123908 - RNA, 19 nt, Artificial Sequence
  Description of Artificial Sequence: Synthetic oligonucleotide
cauguucucgacguugcgu

SEQ ID NO: 1123909 - RNA, 19 nt, Artificial Sequence
  Description of Artificial Sequence: Synthetic oligonucleotide
gagccggugaggaguguuc

SEQ ID NO: 1123910 - RNA, 19 nt, Artificial Sequence
  Description of Artificial Sequence: Synthetic oligonucleotide
agggcugcgugggagggaa

SEQ ID NO: 1123911 - RNA, 19 nt, Artificial Sequence
  Description of Artificial Sequence: Synthetic oligonucleotide
uugcguccccgcacagcac

SEQ ID NO: 1123912 - RNA, 19 nt, Artificial Sequence
  Description of Artificial Sequence: Synthetic oligonucleotide
caucuggucucagcccuuc

SEQ ID NO: 1123913 - RNA, 19 nt, Artificial Sequence
  Description of Artificial Sequence: Synthetic oligonucleotide
acguugcguccccgcacag

SEQ ID NO: 1123914 - RNA, 19 nt, Artificial Sequence
  Description of Artificial Sequence: Synthetic oligonucleotide
cagcagacgcaggaucuuc

SEQ ID NO: 1123915 - RNA, 19 nt, Artificial Sequence
  Description of Artificial Sequence: Synthetic oligonucleotide
ugggcccacucagucugug

SEQ ID NO: 1123916 - RNA, 19 nt, Artificial Sequence
  Description of Artificial Sequence: Synthetic oligonucleotide
agcucgcgcuuggcaaugg

SEQ ID NO: 1123917 - RNA, 19 nt, Artificial Sequence
  Description of Artificial Sequence: Synthetic oligonucleotide
ugccggacucggucugcca

SEQ ID NO: 1123918 - RNA, 19 nt, Artificial Sequence
  Description of Artificial Sequence: Synthetic oligonucleotide
gcauggagugccggacucg

SEQ ID NO: 1123919 - RNA, 19 nt, Artificial Sequence
  Description of Artificial Sequence: Synthetic oligonucleotide
cccgcacaugacaucgccc

SEQ ID NO: 1123920 - RNA, 19 nt, Artificial Sequence
  Description of Artificial Sequence: Synthetic oligonucleotide
acagaacacaugaguccau

SEQ ID NO: 1123921 - RNA, 19 nt, Artificial Sequence
  Description of Artificial Sequence: Synthetic oligonucleotide
ggugagccggugaggagug

SEQ ID NO: 1123922 - RNA, 19 nt, Artificial Sequence
  Description of Artificial Sequence: Synthetic oligonucleotide
ggcgcugggucagagguga

SEQ ID NO: 1123923 - RNA, 19 nt, Artificial Sequence
  Description of Artificial Sequence: Synthetic oligonucleotide
ggucuuaggaaugggucua

SEQ ID NO: 1123924 - RNA, 19 nt, Artificial Sequence
  Description of Artificial Sequence: Synthetic oligonucleotide
cccagacucucacauccug

SEQ ID NO: 1123925 - RNA, 19 nt, Artificial Sequence
  Description of Artificial Sequence: Synthetic oligonucleotide
acacagggauugcgaguau

SEQ ID NO: 1123926 - RNA, 19 nt, Artificial Sequence
  Description of Artificial Sequence: Synthetic oligonucleotide
ccggaagauggugagcaug

SEQ ID NO: 1123927 - RNA, 19 nt, Artificial Sequence
  Description of Artificial Sequence: Synthetic oligonucleotide
cggagcggagaguccaugg

SEQ ID NO: 1123928 - RNA, 19 nt, Artificial Sequence
  Description of Artificial Sequence: Synthetic oligonucleotide
ggggugagacuucugaguu

SEQ ID NO: 1123929 - RNA, 19 nt, Artificial Sequence
  Description of Artificial Sequence: Synthetic oligonucleotide
guagcucgcgcuuggcaau

SEQ ID NO: 1123930 - RNA, 19 nt, Artificial Sequence
  Description of Artificial Sequence: Synthetic oligonucleotide
gccacguuugaagggcagc

SEQ ID NO: 1123931 - RNA, 19 nt, Artificial Sequence
  Description of Artificial Sequence: Synthetic oligonucleotide
gacaucgccccgaggugaa

SEQ ID NO: 1123932 - RNA, 19 nt, Artificial Sequence
  Description of Artificial Sequence: Synthetic oligonucleotide
gccggugaggaguguucag

SEQ ID NO: 1123933 - RNA, 19 nt, Artificial Sequence
  Description of Artificial Sequence: Synthetic oligonucleotide
cguuccuucuugcaguaga

SEQ ID NO: 1123934 - RNA, 19 nt, Artificial Sequence
  Description of Artificial Sequence: Synthetic oligonucleotide
ggugaggaguguucaggcu

SEQ ID NO: 1123935 - RNA, 19 nt, Artificial Sequence
  Description of Artificial Sequence: Synthetic oligonucleotide
ugccagcgcggggacguca

SEQ ID NO: 1123936 - RNA, 19 nt, Artificial Sequence
  Description of Artificial Sequence: Synthetic oligonucleotide
gcgcggggacgucaucugg

SEQ ID NO: 1123937 - RNA, 19 nt, Artificial Sequence
  Description of Artificial Sequence: Synthetic oligonucleotide
gcugucccacaagacaaga

SEQ ID NO: 1123938 - RNA, 19 nt, Artificial Sequence
  Description of Artificial Sequence: Synthetic oligonucleotide
aguagggaguggggaccca

SEQ ID NO: 1123939 - RNA, 19 nt, Artificial Sequence
  Description of Artificial Sequence: Synthetic oligonucleotide
ccgaugagccacuugacau

SEQ ID NO: 1123940 - RNA, 19 nt, Artificial Sequence
  Description of Artificial Sequence: Synthetic oligonucleotide
cgcggggaagcagaaauug

SEQ ID NO: 1123941 - RNA, 19 nt, Artificial Sequence
  Description of Artificial Sequence: Synthetic oligonucleotide
ggggagugaguggccaaug

SEQ ID NO: 1123942 - RNA, 19 nt, Artificial Sequence
  Description of Artificial Sequence: Synthetic oligonucleotide
gucugccagcgcggggacg

SEQ ID NO: 1123943 - RNA, 19 nt, Artificial Sequence
  Description of Artificial Sequence: Synthetic oligonucleotide
ccgaggugaagcgucguuc

SEQ ID NO: 1123944 - RNA, 19 nt, Artificial Sequence
  Description of Artificial Sequence: Synthetic oligonucleotide
ucgccccgaggugaagcgu

SEQ ID NO: 1123945 - RNA, 19 nt, Artificial Sequence
  Description of Artificial Sequence: Synthetic oligonucleotide
acaucgccccgaggugaag

SEQ ID NO: 1123946 - RNA, 19 nt, Artificial Sequence
  Description of Artificial Sequence: Synthetic oligonucleotide
gggucuagagucggaggca

SEQ ID NO: 1123947 - RNA, 19 nt, Artificial Sequence
  Description of Artificial Sequence: Synthetic oligonucleotide
ccagaguagcucgcgcuug

SEQ ID NO: 1123948 - RNA, 19 nt, Artificial Sequence
  Description of Artificial Sequence: Synthetic oligonucleotide
ggagugccggacucggucu

SEQ ID NO: 1123949 - RNA, 19 nt, Artificial Sequence
  Description of Artificial Sequence: Synthetic oligonucleotide
gaaagggcguggagugacu

SEQ ID NO: 1123950 - RNA, 19 nt, Artificial Sequence
  Description of Artificial Sequence: Synthetic oligonucleotide
ccacguuugaagggcagca

SEQ ID NO: 1123951 - RNA, 19 nt, Artificial Sequence
  Description of Artificial Sequence: Synthetic oligonucleotide
cgugcguuuccggucaaug

SEQ ID NO: 1123952 - RNA, 19 nt, Artificial Sequence
  Description of Artificial Sequence: Synthetic oligonucleotide
gcugcgugggagggaagug

SEQ ID NO: 1123953 - RNA, 19 nt, Artificial Sequence
  Description of Artificial Sequence: Synthetic oligonucleotide
caaugccacugggaggaaa

SEQ ID NO: 1123954 - RNA, 19 nt, Artificial Sequence
  Description of Artificial Sequence: Synthetic oligonucleotide
acauuacuauggggacaau

SEQ ID NO: 1123955 - RNA, 19 nt, Artificial Sequence
  Description of Artificial Sequence: Synthetic oligonucleotide
gcggggacgucaucugguc

SEQ ID NO: 1123956 - RNA, 19 nt, Artificial Sequence
  Description of Artificial Sequence: Synthetic oligonucleotide
gggugagacuucugaguua

SEQ ID NO: 1123957 - RNA, 19 nt, Artificial Sequence
  Description of Artificial Sequence: Synthetic oligonucleotide
cacuagcagaugggcccac

SEQ ID NO: 1123958 - RNA, 19 nt, Artificial Sequence
  Description of Artificial Sequence: Synthetic oligonucleotide
gccauccguggagaucucc

SEQ ID NO: 1123959 - RNA, 19 nt, Artificial Sequence
  Description of Artificial Sequence: Synthetic oligonucleotide
cagcacccgcacaugacau

SEQ ID NO: 1123960 - RNA, 19 nt, Artificial Sequence
  Description of Artificial Sequence: Synthetic oligonucleotide
cggagaguccauggguggg

SEQ ID NO: 1123961 - RNA, 19 nt, Artificial Sequence
  Description of Artificial Sequence: Synthetic oligonucleotide
ggaagaggauccaaccguu

SEQ ID NO: 1123962 - RNA, 19 nt, Artificial Sequence
  Description of Artificial Sequence: Synthetic oligonucleotide
ccaucaucccaagcagguc

SEQ ID NO: 1123963 - RNA, 19 nt, Artificial Sequence
  Description of Artificial Sequence: Synthetic oligonucleotide
gggacgucaucuggucuca

SEQ ID NO: 1123964 - RNA, 19 nt, Artificial Sequence
  Description of Artificial Sequence: Synthetic oligonucleotide
gugaagcgucguuccuucu

SEQ ID NO: 1123965 - RNA, 19 nt, Artificial Sequence
  Description of Artificial Sequence: Synthetic oligonucleotide
ggacucggucugccagcgc

SEQ ID NO: 1123966 - RNA, 19 nt, Artificial Sequence
  Description of Artificial Sequence: Synthetic oligonucleotide
ggacgucaucuggucucag

SEQ ID NO: 1123967 - RNA, 19 nt, Artificial Sequence
  Description of Artificial Sequence: Synthetic oligonucleotide
cgacguugcguccccgcac

SEQ ID NO: 1123968 - RNA, 19 nt, Artificial Sequence
  Description of Artificial Sequence: Synthetic oligonucleotide
cacagcggucuggcagcac

SEQ ID NO: 1123969 - RNA, 19 nt, Artificial Sequence
  Description of Artificial Sequence: Synthetic oligonucleotide
cgucguuccuucuugcagu

SEQ ID NO: 1123970 - RNA, 19 nt, Artificial Sequence
  Description of Artificial Sequence: Synthetic oligonucleotide
augggcccacucagucugu

SEQ ID NO: 1123971 - RNA, 19 nt, Artificial Sequence
  Description of Artificial Sequence: Synthetic oligonucleotide
cgccacguuugaagggcag

SEQ ID NO: 1123972 - RNA, 19 nt, Artificial Sequence
  Description of Artificial Sequence: Synthetic oligonucleotide
cagcgcggggacgucaucu

SEQ ID NO: 1123973 - RNA, 19 nt, Artificial Sequence
  Description of Artificial Sequence: Synthetic oligonucleotide
gcuugcuguuacccagaua

SEQ ID NO: 1123974 - RNA, 19 nt, Artificial Sequence
  Description of Artificial Sequence: Synthetic oligonucleotide
cacguuugaagggcagcau

SEQ ID NO: 1123975 - RNA, 19 nt, Artificial Sequence
  Description of Artificial Sequence: Synthetic oligonucleotide
gcagacgcaggaucuucau

SEQ ID NO: 1123976 - RNA, 19 nt, Artificial Sequence
  Description of Artificial Sequence: Synthetic oligonucleotide
ccgcaccuccacucggauc

SEQ ID NO: 1123977 - RNA, 19 nt, Artificial Sequence
  Description of Artificial Sequence: Synthetic oligonucleotide
cguugcguccccgcacagc

SEQ ID NO: 1123978 - RNA, 19 nt, Artificial Sequence
  Description of Artificial Sequence: Synthetic oligonucleotide
gcguggagugacucuguau

SEQ ID NO: 1123979 - RNA, 19 nt, Artificial Sequence
  Description of Artificial Sequence: Synthetic oligonucleotide
ggaucccauacagguauuu

SEQ ID NO: 1123980 - RNA, 19 nt, Artificial Sequence
  Description of Artificial Sequence: Synthetic oligonucleotide
ggaaggcgccacguuugaa

SEQ ID NO: 1123981 - RNA, 19 nt, Artificial Sequence
  Description of Artificial Sequence: Synthetic oligonucleotide
cggggaccggagcggagag

SEQ ID NO: 1123982 - RNA, 19 nt, Artificial Sequence
  Description of Artificial Sequence: Synthetic oligonucleotide
gcagaugggcccacucagu

SEQ ID NO: 1123983 - RNA, 19 nt, Artificial Sequence
  Description of Artificial Sequence: Synthetic oligonucleotide
ccguuguagaaggccaucu

SEQ ID NO: 1123984 - RNA, 19 nt, Artificial Sequence
  Description of Artificial Sequence: Synthetic oligonucleotide
ggcccucacuuggggugag

SEQ ID NO: 1123985 - RNA, 19 nt, Artificial Sequence
  Description of Artificial Sequence: Synthetic oligonucleotide
ccggagcggagaguccaug

SEQ ID NO: 1123986 - RNA, 19 nt, Artificial Sequence
  Description of Artificial Sequence: Synthetic oligonucleotide
ccgggccucgcccgcuccc

SEQ ID NO: 1123987 - RNA, 19 nt, Artificial Sequence
  Description of Artificial Sequence: Synthetic oligonucleotide
gccgggccucgcccgcucc

SEQ ID NO: 1123988 - RNA, 19 nt, Artificial Sequence
  Description of Artificial Sequence: Synthetic oligonucleotide
ccguggagaucucccggaa

SEQ ID NO: 1123989 - RNA, 19 nt, Artificial Sequence
  Description of Artificial Sequence: Synthetic oligonucleotide
gcguccccgcacagcacac

SEQ ID NO: 1123990 - RNA, 19 nt, Artificial Sequence
  Description of Artificial Sequence: Synthetic oligonucleotide
cugccagcgcggggacguc

SEQ ID NO: 1123991 - RNA, 19 nt, Artificial Sequence
  Description of Artificial Sequence: Synthetic oligonucleotide
gcgcugggucagaggugag

SEQ ID NO: 1123992 - RNA, 19 nt, Artificial Sequence
  Description of Artificial Sequence: Synthetic oligonucleotide
ccagcgcggggacgucauc

SEQ ID NO: 1123993 - RNA, 19 nt, Artificial Sequence
  Description of Artificial Sequence: Synthetic oligonucleotide
cgcggggacgucaucuggu

SEQ ID NO: 1123994 - RNA, 19 nt, Artificial Sequence
  Description of Artificial Sequence: Synthetic oligonucleotide
gggccaccucagacaugac

SEQ ID NO: 1123995 - RNA, 19 nt, Artificial Sequence
  Description of Artificial Sequence: Synthetic oligonucleotide
ggggaccggagcggagagu

SEQ ID NO: 1123996 - RNA, 19 nt, Artificial Sequence
  Description of Artificial Sequence: Synthetic oligonucleotide
ccacagccccacugagggu

SEQ ID NO: 1123997 - RNA, 19 nt, Artificial Sequence
  Description of Artificial Sequence: Synthetic oligonucleotide
gccagcgcggggacgucau

SEQ ID NO: 1123998 - RNA, 19 nt, Artificial Sequence
  Description of Artificial Sequence: Synthetic oligonucleotide
ccccacugagggugacagu

SEQ ID NO: 1123999 - RNA, 19 nt, Artificial Sequence
  Description of Artificial Sequence: Synthetic oligonucleotide
cccgcaccuccacucggau

SEQ ID NO: 1124000 - RNA, 19 nt, Artificial Sequence
  Description of Artificial Sequence: Synthetic oligonucleotide
ccacaacguagggcugcgu

SEQ ID NO: 1124001 - RNA, 19 nt, Artificial Sequence
  Description of Artificial Sequence: Synthetic oligonucleotide
ccccgaggugaagcgucgu

SEQ ID NO: 1124002 - RNA, 19 nt, Artificial Sequence
  Description of Artificial Sequence: Synthetic oligonucleotide
caaauuuauaaccugaccc

SEQ ID NO: 1124003 - RNA, 19 nt, Artificial Sequence
  Description of Artificial Sequence: Synthetic oligonucleotide
aacaagguuguccugaauc

SEQ ID NO: 1124004 - RNA, 19 nt, Artificial Sequence
  Description of Artificial Sequence: Synthetic oligonucleotide
aagguuagaggucuuaagg

SEQ ID NO: 1124005 - RNA, 19 nt, Artificial Sequence
  Description of Artificial Sequence: Synthetic oligonucleotide
aaaacgaagcaaaacaagg

SEQ ID NO: 1124006 - RNA, 19 nt, Artificial Sequence
  Description of Artificial Sequence: Synthetic oligonucleotide
aaauuuauaaccugaccca

SEQ ID NO: 1124007 - RNA, 19 nt, Artificial Sequence
  Description of Artificial Sequence: Synthetic oligonucleotide
aguuaaaacaccccugcgc

SEQ ID NO: 1124008 - RNA, 19 nt, Artificial Sequence
  Description of Artificial Sequence: Synthetic oligonucleotide
aaggucaucuucuugacug

SEQ ID NO: 1124009 - RNA, 19 nt, Artificial Sequence
  Description of Artificial Sequence: Synthetic oligonucleotide
ugaucugauaacaaagccc

SEQ ID NO: 1124010 - RNA, 19 nt, Artificial Sequence
  Description of Artificial Sequence: Synthetic oligonucleotide
uaauaugucaggaacuugu

SEQ ID NO: 1124011 - RNA, 19 nt, Artificial Sequence
  Description of Artificial Sequence: Synthetic oligonucleotide
ugugauuuaauucuacaaa

SEQ ID NO: 1124012 - RNA, 19 nt, Artificial Sequence
  Description of Artificial Sequence: Synthetic oligonucleotide
aggguaauaugucaggaac

SEQ ID NO: 1124013 - RNA, 19 nt, Artificial Sequence
  Description of Artificial Sequence: Synthetic oligonucleotide
uguagaguauuccuuagca

SEQ ID NO: 1124014 - RNA, 19 nt, Artificial Sequence
  Description of Artificial Sequence: Synthetic oligonucleotide
gaucugauaacaaagcccc

SEQ ID NO: 1124015 - RNA, 19 nt, Artificial Sequence
  Description of Artificial Sequence: Synthetic oligonucleotide
ucaaucugaccucagaacu

SEQ ID NO: 1124016 - RNA, 19 nt, Artificial Sequence
  Description of Artificial Sequence: Synthetic oligonucleotide
ucuccaaagauacagccca

SEQ ID NO: 1124017 - RNA, 19 nt, Artificial Sequence
  Description of Artificial Sequence: Synthetic oligonucleotide
acccauuugaguuaaaaca

SEQ ID NO: 1124018 - RNA, 19 nt, Artificial Sequence
  Description of Artificial Sequence: Synthetic oligonucleotide
ucuacaaauuuauaaccug

SEQ ID NO: 1124019 - RNA, 19 nt, Artificial Sequence
  Description of Artificial Sequence: Synthetic oligonucleotide
uagggauacucgcugaagg

SEQ ID NO: 1124020 - RNA, 19 nt, Artificial Sequence
  Description of Artificial Sequence: Synthetic oligonucleotide
agguacauagucuccuucc

SEQ ID NO: 1124021 - RNA, 19 nt, Artificial Sequence
  Description of Artificial Sequence: Synthetic oligonucleotide
uuauagccaggccagaucu

SEQ ID NO: 1124022 - RNA, 19 nt, Artificial Sequence
  Description of Artificial Sequence: Synthetic oligonucleotide
cauuugaguuaaaacaccc

SEQ ID NO: 1124023 - RNA, 19 nt, Artificial Sequence
  Description of Artificial Sequence: Synthetic oligonucleotide
gauaacaaagccccaaauc

SEQ ID NO: 1124024 - RNA, 19 nt, Artificial Sequence
  Description of Artificial Sequence: Synthetic oligonucleotide
guuguuauagggauacucg

SEQ ID NO: 1124025 - RNA, 19 nt, Artificial Sequence
  Description of Artificial Sequence: Synthetic oligonucleotide
gauaccacaagguuacgac

SEQ ID NO: 1124026 - RNA, 19 nt, Artificial Sequence
  Description of Artificial Sequence: Synthetic oligonucleotide
aaagccccaaaucgcuugc

SEQ ID NO: 1124027 - RNA, 19 nt, Artificial Sequence
  Description of Artificial Sequence: Synthetic oligonucleotide
ucuguagacuacuccauag

SEQ ID NO: 1124028 - RNA, 19 nt, Artificial Sequence
  Description of Artificial Sequence: Synthetic oligonucleotide
aagguuacgacaacgggag

SEQ ID NO: 1124029 - RNA, 19 nt, Artificial Sequence
  Description of Artificial Sequence: Synthetic oligonucleotide
gauauuggggugcugggcc

SEQ ID NO: 1124030 - RNA, 19 nt, Artificial Sequence
  Description of Artificial Sequence: Synthetic oligonucleotide
aaagcccugaucugauaac

SEQ ID NO: 1124031 - RNA, 19 nt, Artificial Sequence
  Description of Artificial Sequence: Synthetic oligonucleotide
uguagacuacuccauaggu

SEQ ID NO: 1124032 - RNA, 19 nt, Artificial Sequence
  Description of Artificial Sequence: Synthetic oligonucleotide
auacucgugcuucaggccg

SEQ ID NO: 1124033 - RNA, 19 nt, Artificial Sequence
  Description of Artificial Sequence: Synthetic oligonucleotide
gaggucaugcucaacauag

SEQ ID NO: 1124034 - RNA, 19 nt, Artificial Sequence
  Description of Artificial Sequence: Synthetic oligonucleotide
cauguuacuucccaccacg

SEQ ID NO: 1124035 - RNA, 19 nt, Artificial Sequence
  Description of Artificial Sequence: Synthetic oligonucleotide
aaccugacccaaaacaaac

SEQ ID NO: 1124036 - RNA, 19 nt, Artificial Sequence
  Description of Artificial Sequence: Synthetic oligonucleotide
agaaucucggucaaaucgc

SEQ ID NO: 1124037 - RNA, 19 nt, Artificial Sequence
  Description of Artificial Sequence: Synthetic oligonucleotide
aacgaagcaaaacaagguu

SEQ ID NO: 1124038 - RNA, 19 nt, Artificial Sequence
  Description of Artificial Sequence: Synthetic oligonucleotide
aaaacaaacuucacggaga

SEQ ID NO: 1124039 - RNA, 19 nt, Artificial Sequence
  Description of Artificial Sequence: Synthetic oligonucleotide
caaaucgcgacucuggaac

SEQ ID NO: 1124040 - RNA, 19 nt, Artificial Sequence
  Description of Artificial Sequence: Synthetic oligonucleotide
uuguuauagggauacucgc

SEQ ID NO: 1124041 - RNA, 19 nt, Artificial Sequence
  Description of Artificial Sequence: Synthetic oligonucleotide
aucucggucaaaucgcgac

SEQ ID NO: 1124042 - RNA, 19 nt, Artificial Sequence
  Description of Artificial Sequence: Synthetic oligonucleotide
gaaucagcagaucugccug

SEQ ID NO: 1124043 - RNA, 19 nt, Artificial Sequence
  Description of Artificial Sequence: Synthetic oligonucleotide
ucaggggugagccauacuc

SEQ ID NO: 1124044 - RNA, 19 nt, Artificial Sequence
  Description of Artificial Sequence: Synthetic oligonucleotide
auuauagccaggccagauc

SEQ ID NO: 1124045 - RNA, 19 nt, Artificial Sequence
  Description of Artificial Sequence: Synthetic oligonucleotide
acaagguuacgacaacggg

SEQ ID NO: 1124046 - RNA, 19 nt, Artificial Sequence
  Description of Artificial Sequence: Synthetic oligonucleotide
uguuauagggauacucgcu

SEQ ID NO: 1124047 - RNA, 19 nt, Artificial Sequence
  Description of Artificial Sequence: Synthetic oligonucleotide
guuauagggauacucgcug

SEQ ID NO: 1124048 - RNA, 19 nt, Artificial Sequence
  Description of Artificial Sequence: Synthetic oligonucleotide
gagaucaaagcccugaucu

SEQ ID NO: 1124049 - RNA, 19 nt, Artificial Sequence
  Description of Artificial Sequence: Synthetic oligonucleotide
ugaucgaucucugacuucc

SEQ ID NO: 1124050 - RNA, 19 nt, Artificial Sequence
  Description of Artificial Sequence: Synthetic oligonucleotide
auuccuuagcaccaagcag

SEQ ID NO: 1124051 - RNA, 19 nt, Artificial Sequence
  Description of Artificial Sequence: Synthetic oligonucleotide
cuugagaaugccagcgugg

SEQ ID NO: 1124052 - RNA, 19 nt, Artificial Sequence
  Description of Artificial Sequence: Synthetic oligonucleotide
cacaagguuacgacaacgg

SEQ ID NO: 1124053 - RNA, 19 nt, Artificial Sequence
  Description of Artificial Sequence: Synthetic oligonucleotide
cacgauaccacaagguuac

SEQ ID NO: 1124054 - RNA, 19 nt, Artificial Sequence
  Description of Artificial Sequence: Synthetic oligonucleotide
cacgugggaaacauggacg

SEQ ID NO: 1124055 - RNA, 19 nt, Artificial Sequence
  Description of Artificial Sequence: Synthetic oligonucleotide
ugaaucagcagaucugccu

SEQ ID NO: 1124056 - RNA, 19 nt, Artificial Sequence
  Description of Artificial Sequence: Synthetic oligonucleotide
uuaaaacaccccugcgccg

SEQ ID NO: 1124057 - RNA, 19 nt, Artificial Sequence
  Description of Artificial Sequence: Synthetic oligonucleotide
ucuuuagccguuucagagc

SEQ ID NO: 1124058 - RNA, 19 nt, Artificial Sequence
  Description of Artificial Sequence: Synthetic oligonucleotide
acgugggaaacauggacgg

SEQ ID NO: 1124059 - RNA, 19 nt, Artificial Sequence
  Description of Artificial Sequence: Synthetic oligonucleotide
acugcuguagaguauuccu

SEQ ID NO: 1124060 - RNA, 19 nt, Artificial Sequence
  Description of Artificial Sequence: Synthetic oligonucleotide
ucuguucaggcacuggaac

SEQ ID NO: 1124061 - RNA, 19 nt, Artificial Sequence
  Description of Artificial Sequence: Synthetic oligonucleotide
accacgauuucucggacag

SEQ ID NO: 1124062 - RNA, 19 nt, Artificial Sequence
  Description of Artificial Sequence: Synthetic oligonucleotide
acaagguuguccugaauca

SEQ ID NO: 1124063 - RNA, 19 nt, Artificial Sequence
  Description of Artificial Sequence: Synthetic oligonucleotide
cugcagacuguucugaggc

SEQ ID NO: 1124064 - RNA, 19 nt, Artificial Sequence
  Description of Artificial Sequence: Synthetic oligonucleotide
aagcccgucuccuucaggu

SEQ ID NO: 1124065 - RNA, 19 nt, Artificial Sequence
  Description of Artificial Sequence: Synthetic oligonucleotide
uaccacaagguuacgacaa

SEQ ID NO: 1124066 - RNA, 19 nt, Artificial Sequence
  Description of Artificial Sequence: Synthetic oligonucleotide
ccuguuuuagcucaauggg

SEQ ID NO: 1124067 - RNA, 19 nt, Artificial Sequence
  Description of Artificial Sequence: Synthetic oligonucleotide
ucugaccucagaacuugag

SEQ ID NO: 1124068 - RNA, 19 nt, Artificial Sequence
  Description of Artificial Sequence: Synthetic oligonucleotide
gaguguaggccuucagggg

SEQ ID NO: 1124069 - RNA, 19 nt, Artificial Sequence
  Description of Artificial Sequence: Synthetic oligonucleotide
uuauaaccugacccaaaac

SEQ ID NO: 1124070 - RNA, 19 nt, Artificial Sequence
  Description of Artificial Sequence: Synthetic oligonucleotide
aggucauuauagccaggcc

SEQ ID NO: 1124071 - RNA, 19 nt, Artificial Sequence
  Description of Artificial Sequence: Synthetic oligonucleotide
acuguucugaggcuuccuc

SEQ ID NO: 1124072 - RNA, 19 nt, Artificial Sequence
  Description of Artificial Sequence: Synthetic oligonucleotide
uguccuuugcucuguagac

SEQ ID NO: 1124073 - RNA, 19 nt, Artificial Sequence
  Description of Artificial Sequence: Synthetic oligonucleotide
auccaauugucauggaggu

SEQ ID NO: 1124074 - RNA, 19 nt, Artificial Sequence
  Description of Artificial Sequence: Synthetic oligonucleotide
cucucggaaauacucgugc

SEQ ID NO: 1124075 - RNA, 19 nt, Artificial Sequence
  Description of Artificial Sequence: Synthetic oligonucleotide
gagguuguuauagggauac

SEQ ID NO: 1124076 - RNA, 19 nt, Artificial Sequence
  Description of Artificial Sequence: Synthetic oligonucleotide
ucccaggguaauaugucag

SEQ ID NO: 1124077 - RNA, 19 nt, Artificial Sequence
  Description of Artificial Sequence: Synthetic oligonucleotide
cuucacggagaaaacgaag

SEQ ID NO: 1124078 - RNA, 19 nt, Artificial Sequence
  Description of Artificial Sequence: Synthetic oligonucleotide
cuguagacuacuccauagg

SEQ ID NO: 1124079 - RNA, 19 nt, Artificial Sequence
  Description of Artificial Sequence: Synthetic oligonucleotide
ucgaucucugacuucccag

SEQ ID NO: 1124080 - RNA, 19 nt, Artificial Sequence
  Description of Artificial Sequence: Synthetic oligonucleotide
ucggacagugacgauauug

SEQ ID NO: 1124081 - RNA, 19 nt, Artificial Sequence
  Description of Artificial Sequence: Synthetic oligonucleotide
uacuccauagguuccuucu

SEQ ID NO: 1124082 - RNA, 19 nt, Artificial Sequence
  Description of Artificial Sequence: Synthetic oligonucleotide
ucugaucgaucucugacuu

SEQ ID NO: 1124083 - RNA, 19 nt, Artificial Sequence
  Description of Artificial Sequence: Synthetic oligonucleotide
auuucucggacagugacga

SEQ ID NO: 1124084 - RNA, 19 nt, Artificial Sequence
  Description of Artificial Sequence: Synthetic oligonucleotide
acaacgggaguguaggccu

SEQ ID NO: 1124085 - RNA, 19 nt, Artificial Sequence
  Description of Artificial Sequence: Synthetic oligonucleotide
agaggucuuaaggucacgg

SEQ ID NO: 1124086 - RNA, 19 nt, Artificial Sequence
  Description of Artificial Sequence: Synthetic oligonucleotide
aaaucgcuugcggagguug

SEQ ID NO: 1124087 - RNA, 19 nt, Artificial Sequence
  Description of Artificial Sequence: Synthetic oligonucleotide
caagguuacgacaacggga

SEQ ID NO: 1124088 - RNA, 19 nt, Artificial Sequence
  Description of Artificial Sequence: Synthetic oligonucleotide
acgacaacgggaguguagg

SEQ ID NO: 1124089 - RNA, 19 nt, Artificial Sequence
  Description of Artificial Sequence: Synthetic oligonucleotide
uacgacaacgggaguguag

SEQ ID NO: 1124090 - RNA, 19 nt, Artificial Sequence
  Description of Artificial Sequence: Synthetic oligonucleotide
uaaccugacccaaaacaaa

SEQ ID NO: 1124091 - RNA, 19 nt, Artificial Sequence
  Description of Artificial Sequence: Synthetic oligonucleotide
gaaucucggucaaaucgcg

SEQ ID NO: 1124092 - RNA, 19 nt, Artificial Sequence
  Description of Artificial Sequence: Synthetic oligonucleotide
uaaaacaccccugcgccgc

SEQ ID NO: 1124093 - RNA, 19 nt, Artificial Sequence
  Description of Artificial Sequence: Synthetic oligonucleotide
gucaaucugaccucagaac

SEQ ID NO: 1124094 - RNA, 19 nt, Artificial Sequence
  Description of Artificial Sequence: Synthetic oligonucleotide
ucaauucuguucaggcacu

SEQ ID NO: 1124095 - RNA, 19 nt, Artificial Sequence
  Description of Artificial Sequence: Synthetic oligonucleotide
ccaauugucauggaggugc

SEQ ID NO: 1124096 - RNA, 19 nt, Artificial Sequence
  Description of Artificial Sequence: Synthetic oligonucleotide
cauggacgggucaaugggg

SEQ ID NO: 1124097 - RNA, 19 nt, Artificial Sequence
  Description of Artificial Sequence: Synthetic oligonucleotide
aaaucgcgacucuggaaca

SEQ ID NO: 1124098 - RNA, 19 nt, Artificial Sequence
  Description of Artificial Sequence: Synthetic oligonucleotide
ggugcuuuaccccacucag

SEQ ID NO: 1124099 - RNA, 19 nt, Artificial Sequence
  Description of Artificial Sequence: Synthetic oligonucleotide
ucugauaacaaagccccaa

SEQ ID NO: 1124100 - RNA, 19 nt, Artificial Sequence
  Description of Artificial Sequence: Synthetic oligonucleotide
cacccauuugaguuaaaac

SEQ ID NO: 1124101 - RNA, 19 nt, Artificial Sequence
  Description of Artificial Sequence: Synthetic oligonucleotide
caaacuucacggagaaaac

SEQ ID NO: 1124102 - RNA, 19 nt, Artificial Sequence
  Description of Artificial Sequence: Synthetic oligonucleotide
uggaacucuucuacacucc

SEQ ID NO: 1124103 - RNA, 19 nt, Artificial Sequence
  Description of Artificial Sequence: Synthetic oligonucleotide
ucuucuacacuccggcauc

SEQ ID NO: 1124104 - RNA, 19 nt, Artificial Sequence
  Description of Artificial Sequence: Synthetic oligonucleotide
auaccacaagguuacgaca

SEQ ID NO: 1124105 - RNA, 19 nt, Artificial Sequence
  Description of Artificial Sequence: Synthetic oligonucleotide
ucccucagugaggugaugg

SEQ ID NO: 1124106 - RNA, 19 nt, Artificial Sequence
  Description of Artificial Sequence: Synthetic oligonucleotide
acgauauuggggugcuggg

SEQ ID NO: 1124107 - RNA, 19 nt, Artificial Sequence
  Description of Artificial Sequence: Synthetic oligonucleotide
acaaccaagaugugguuuu

SEQ ID NO: 1124108 - RNA, 19 nt, Artificial Sequence
  Description of Artificial Sequence: Synthetic oligonucleotide
ucacccaccuugagaaugc

SEQ ID NO: 1124109 - RNA, 19 nt, Artificial Sequence
  Description of Artificial Sequence: Synthetic oligonucleotide
uacauagucuccuuccguu

SEQ ID NO: 1124110 - RNA, 19 nt, Artificial Sequence
  Description of Artificial Sequence: Synthetic oligonucleotide
gacaacgggaguguaggcc

SEQ ID NO: 1124111 - RNA, 19 nt, Artificial Sequence
  Description of Artificial Sequence: Synthetic oligonucleotide
uugagaaugccagcguggc

SEQ ID NO: 1124112 - RNA, 19 nt, Artificial Sequence
  Description of Artificial Sequence: Synthetic oligonucleotide
ucucucggaaauacucgug

SEQ ID NO: 1124113 - RNA, 19 nt, Artificial Sequence
  Description of Artificial Sequence: Synthetic oligonucleotide
agggccggcagguacuugg

SEQ ID NO: 1124114 - RNA, 19 nt, Artificial Sequence
  Description of Artificial Sequence: Synthetic oligonucleotide
ucggaaauacucgugcuuc

SEQ ID NO: 1124115 - RNA, 19 nt, Artificial Sequence
  Description of Artificial Sequence: Synthetic oligonucleotide
auaguucaucacaauguag

SEQ ID NO: 1124116 - RNA, 19 nt, Artificial Sequence
  Description of Artificial Sequence: Synthetic oligonucleotide
ugcuguagaguauuccuua

SEQ ID NO: 1124117 - RNA, 19 nt, Artificial Sequence
  Description of Artificial Sequence: Synthetic oligonucleotide
cuucccaccacgauuucuc

SEQ ID NO: 1124118 - RNA, 19 nt, Artificial Sequence
  Description of Artificial Sequence: Synthetic oligonucleotide
uggggcacgauaccacaag

SEQ ID NO: 1124119 - RNA, 19 nt, Artificial Sequence
  Description of Artificial Sequence: Synthetic oligonucleotide
cucuuggcgggccacgugg

SEQ ID NO: 1124120 - RNA, 19 nt, Artificial Sequence
  Description of Artificial Sequence: Synthetic oligonucleotide
auaaccugacccaaaacaa

SEQ ID NO: 1124121 - RNA, 19 nt, Artificial Sequence
  Description of Artificial Sequence: Synthetic oligonucleotide
acugaccacauguccacug

SEQ ID NO: 1124122 - RNA, 19 nt, Artificial Sequence
  Description of Artificial Sequence: Synthetic oligonucleotide
uuuuagcucaaugggugac

SEQ ID NO: 1124123 - RNA, 19 nt, Artificial Sequence
  Description of Artificial Sequence: Synthetic oligonucleotide
cuuuaccuccccuggcagg

SEQ ID NO: 1124124 - RNA, 19 nt, Artificial Sequence
  Description of Artificial Sequence: Synthetic oligonucleotide
cuguagaguauuccuuagc

SEQ ID NO: 1124125 - RNA, 19 nt, Artificial Sequence
  Description of Artificial Sequence: Synthetic oligonucleotide
gacgggucaauggggaggg

SEQ ID NO: 1124126 - RNA, 19 nt, Artificial Sequence
  Description of Artificial Sequence: Synthetic oligonucleotide
ggaacucuucuacacuccg

SEQ ID NO: 1124127 - RNA, 19 nt, Artificial Sequence
  Description of Artificial Sequence: Synthetic oligonucleotide
ucucggaaauacucgugcu

SEQ ID NO: 1124128 - RNA, 19 nt, Artificial Sequence
  Description of Artificial Sequence: Synthetic oligonucleotide
uuagccguuucagagccac

SEQ ID NO: 1124129 - RNA, 19 nt, Artificial Sequence
  Description of Artificial Sequence: Synthetic oligonucleotide
uuuagcucaaugggugaca

SEQ ID NO: 1124130 - RNA, 19 nt, Artificial Sequence
  Description of Artificial Sequence: Synthetic oligonucleotide
ugagguggaagcccgucuc

SEQ ID NO: 1124131 - RNA, 19 nt, Artificial Sequence
  Description of Artificial Sequence: Synthetic oligonucleotide
ucccuagccagcccaaagu

SEQ ID NO: 1124132 - RNA, 19 nt, Artificial Sequence
  Description of Artificial Sequence: Synthetic oligonucleotide
ucucggucaaaucgcgacu

SEQ ID NO: 1124133 - RNA, 19 nt, Artificial Sequence
  Description of Artificial Sequence: Synthetic oligonucleotide
ucaaaucgcgacucuggaa

SEQ ID NO: 1124134 - RNA, 19 nt, Artificial Sequence
  Description of Artificial Sequence: Synthetic oligonucleotide
cuuguugaucugaucgauc

SEQ ID NO: 1124135 - RNA, 19 nt, Artificial Sequence
  Description of Artificial Sequence: Synthetic oligonucleotide
agggauacucgcugaaggu

SEQ ID NO: 1124136 - RNA, 19 nt, Artificial Sequence
  Description of Artificial Sequence: Synthetic oligonucleotide
uguuacuucccaccacgau

SEQ ID NO: 1124137 - RNA, 19 nt, Artificial Sequence
  Description of Artificial Sequence: Synthetic oligonucleotide
ugaucugaucgaucucuga

SEQ ID NO: 1124138 - RNA, 19 nt, Artificial Sequence
  Description of Artificial Sequence: Synthetic oligonucleotide
agaguauuccuuagcacca

SEQ ID NO: 1124139 - RNA, 19 nt, Artificial Sequence
  Description of Artificial Sequence: Synthetic oligonucleotide
agggucuuuaccuccccug

SEQ ID NO: 1124140 - RNA, 19 nt, Artificial Sequence
  Description of Artificial Sequence: Synthetic oligonucleotide
uugcggagguuguuauagg

SEQ ID NO: 1124141 - RNA, 19 nt, Artificial Sequence
  Description of Artificial Sequence: Synthetic oligonucleotide
agacuacuccauagguucc

SEQ ID NO: 1124142 - RNA, 19 nt, Artificial Sequence
  Description of Artificial Sequence: Synthetic oligonucleotide
ucuuggcgggccacguggg

SEQ ID NO: 1124143 - RNA, 19 nt, Artificial Sequence
  Description of Artificial Sequence: Synthetic oligonucleotide
cugaaucagcagaucugcc

SEQ ID NO: 1124144 - RNA, 19 nt, Artificial Sequence
  Description of Artificial Sequence: Synthetic oligonucleotide
ucaucacccauuugaguua

SEQ ID NO: 1124145 - RNA, 19 nt, Artificial Sequence
  Description of Artificial Sequence: Synthetic oligonucleotide
uacucgcugaaggucaucu

SEQ ID NO: 1124146 - RNA, 19 nt, Artificial Sequence
  Description of Artificial Sequence: Synthetic oligonucleotide
cuacacuccggcaucccug

SEQ ID NO: 1124147 - RNA, 19 nt, Artificial Sequence
  Description of Artificial Sequence: Synthetic oligonucleotide
uggaucaucagggucuuua

SEQ ID NO: 1124148 - RNA, 19 nt, Artificial Sequence
  Description of Artificial Sequence: Synthetic oligonucleotide
ucgcgacucuggaacaacc

SEQ ID NO: 1124149 - RNA, 19 nt, Artificial Sequence
  Description of Artificial Sequence: Synthetic oligonucleotide
auacucccuagccagccca

SEQ ID NO: 1124150 - RNA, 19 nt, Artificial Sequence
  Description of Artificial Sequence: Synthetic oligonucleotide
cccugaucugauaacaaag

SEQ ID NO: 1124151 - RNA, 19 nt, Artificial Sequence
  Description of Artificial Sequence: Synthetic oligonucleotide
ucacggugcaguauccaau

SEQ ID NO: 1124152 - RNA, 19 nt, Artificial Sequence
  Description of Artificial Sequence: Synthetic oligonucleotide
gggaggucauuauagccag

SEQ ID NO: 1124153 - RNA, 19 nt, Artificial Sequence
  Description of Artificial Sequence: Synthetic oligonucleotide
auagggauacucgcugaag

SEQ ID NO: 1124154 - RNA, 19 nt, Artificial Sequence
  Description of Artificial Sequence: Synthetic oligonucleotide
guuuuagcucaauggguga

SEQ ID NO: 1124155 - RNA, 19 nt, Artificial Sequence
  Description of Artificial Sequence: Synthetic oligonucleotide
cugaccacauguccacugc

SEQ ID NO: 1124156 - RNA, 19 nt, Artificial Sequence
  Description of Artificial Sequence: Synthetic oligonucleotide
ugggaaacauggacggguc

SEQ ID NO: 1124157 - RNA, 19 nt, Artificial Sequence
  Description of Artificial Sequence: Synthetic oligonucleotide
ggucaaaucgcgacucugg

SEQ ID NO: 1124158 - RNA, 19 nt, Artificial Sequence
  Description of Artificial Sequence: Synthetic oligonucleotide
aggugcuuuaccccacuca

SEQ ID NO: 1124159 - RNA, 19 nt, Artificial Sequence
  Description of Artificial Sequence: Synthetic oligonucleotide
aaacaagguuguccugaau

SEQ ID NO: 1124160 - RNA, 19 nt, Artificial Sequence
  Description of Artificial Sequence: Synthetic oligonucleotide
gguuacgacaacgggagug

SEQ ID NO: 1124161 - RNA, 19 nt, Artificial Sequence
  Description of Artificial Sequence: Synthetic oligonucleotide
aucgaucucugacuuccca

SEQ ID NO: 1124162 - RNA, 19 nt, Artificial Sequence
  Description of Artificial Sequence: Synthetic oligonucleotide
gucacccaccuugagaaug

SEQ ID NO: 1124163 - RNA, 19 nt, Artificial Sequence
  Description of Artificial Sequence: Synthetic oligonucleotide
aaccaagaugugguuuuca

SEQ ID NO: 1124164 - RNA, 19 nt, Artificial Sequence
  Description of Artificial Sequence: Synthetic oligonucleotide
caaagcccugaucugauaa

SEQ ID NO: 1124165 - RNA, 19 nt, Artificial Sequence
  Description of Artificial Sequence: Synthetic oligonucleotide
aggggagucucucggaaau

SEQ ID NO: 1124166 - RNA, 19 nt, Artificial Sequence
  Description of Artificial Sequence: Synthetic oligonucleotide
gucaaaucgcgacucugga

SEQ ID NO: 1124167 - RNA, 19 nt, Artificial Sequence
  Description of Artificial Sequence: Synthetic oligonucleotide
uuccuccuccuccuccucc

SEQ ID NO: 1124168 - RNA, 19 nt, Artificial Sequence
  Description of Artificial Sequence: Synthetic oligonucleotide
agaagguuagaggucuuaa

SEQ ID NO: 1124169 - RNA, 19 nt, Artificial Sequence
  Description of Artificial Sequence: Synthetic oligonucleotide
uggacgggucaauggggag

SEQ ID NO: 1124170 - RNA, 19 nt, Artificial Sequence
  Description of Artificial Sequence: Synthetic oligonucleotide
caucuuuagccguuucaga

SEQ ID NO: 1124171 - RNA, 19 nt, Artificial Sequence
  Description of Artificial Sequence: Synthetic oligonucleotide
acucuucuacacuccggca

SEQ ID NO: 1124172 - RNA, 19 nt, Artificial Sequence
  Description of Artificial Sequence: Synthetic oligonucleotide
guuacuucccaccacgauu

SEQ ID NO: 1124173 - RNA, 19 nt, Artificial Sequence
  Description of Artificial Sequence: Synthetic oligonucleotide
aacgggaguguaggccuuc

SEQ ID NO: 1124174 - RNA, 19 nt, Artificial Sequence
  Description of Artificial Sequence: Synthetic oligonucleotide
aagccccaaaucgcuugcg

SEQ ID NO: 1124175 - RNA, 19 nt, Artificial Sequence
  Description of Artificial Sequence: Synthetic oligonucleotide
cauacucccuagccagccc

SEQ ID NO: 1124176 - RNA, 19 nt, Artificial Sequence
  Description of Artificial Sequence: Synthetic oligonucleotide
cucgugccucgcuucaccc

SEQ ID NO: 1124177 - RNA, 19 nt, Artificial Sequence
  Description of Artificial Sequence: Synthetic oligonucleotide
uccaauugucauggaggug

SEQ ID NO: 1124178 - RNA, 19 nt, Artificial Sequence
  Description of Artificial Sequence: Synthetic oligonucleotide
uuuagccguuucagagcca

SEQ ID NO: 1124179 - RNA, 19 nt, Artificial Sequence
  Description of Artificial Sequence: Synthetic oligonucleotide
ggggcacgauaccacaagg

SEQ ID NO: 1124180 - RNA, 19 nt, Artificial Sequence
  Description of Artificial Sequence: Synthetic oligonucleotide
ugucauggaggugcuuuac

SEQ ID NO: 1124181 - RNA, 19 nt, Artificial Sequence
  Description of Artificial Sequence: Synthetic oligonucleotide
cuucucacugggagucccc

SEQ ID NO: 1124182 - RNA, 19 nt, Artificial Sequence
  Description of Artificial Sequence: Synthetic oligonucleotide
aaucucggucaaaucgcga

SEQ ID NO: 1124183 - RNA, 19 nt, Artificial Sequence
  Description of Artificial Sequence: Synthetic oligonucleotide
ucggucaaaucgcgacucu

SEQ ID NO: 1124184 - RNA, 19 nt, Artificial Sequence
  Description of Artificial Sequence: Synthetic oligonucleotide
uccuccuccuccuccucug

SEQ ID NO: 1124185 - RNA, 19 nt, Artificial Sequence
  Description of Artificial Sequence: Synthetic oligonucleotide
ucauuauagccaggccaga

SEQ ID NO: 1124186 - RNA, 19 nt, Artificial Sequence
  Description of Artificial Sequence: Synthetic oligonucleotide
uacucgugcuucaggccgu

SEQ ID NO: 1124187 - RNA, 19 nt, Artificial Sequence
  Description of Artificial Sequence: Synthetic oligonucleotide
cucccuagccagcccaaag

SEQ ID NO: 1124188 - RNA, 19 nt, Artificial Sequence
  Description of Artificial Sequence: Synthetic oligonucleotide
ucacucuuggcgggccacg

SEQ ID NO: 1124189 - RNA, 19 nt, Artificial Sequence
  Description of Artificial Sequence: Synthetic oligonucleotide
cugauaacaaagccccaaa

SEQ ID NO: 1124190 - RNA, 19 nt, Artificial Sequence
  Description of Artificial Sequence: Synthetic oligonucleotide
cucccaggguaauauguca

SEQ ID NO: 1124191 - RNA, 19 nt, Artificial Sequence
  Description of Artificial Sequence: Synthetic oligonucleotide
cucggucaaaucgcgacuc

SEQ ID NO: 1124192 - RNA, 19 nt, Artificial Sequence
  Description of Artificial Sequence: Synthetic oligonucleotide
acggugcaguauccaauug

SEQ ID NO: 1124193 - RNA, 19 nt, Artificial Sequence
  Description of Artificial Sequence: Synthetic oligonucleotide
cagcuagcuggccaggguc

SEQ ID NO: 1124194 - RNA, 19 nt, Artificial Sequence
  Description of Artificial Sequence: Synthetic oligonucleotide
aaucgcgacucuggaacaa

SEQ ID NO: 1124195 - RNA, 19 nt, Artificial Sequence
  Description of Artificial Sequence: Synthetic oligonucleotide
gaccucagaacuugaggcu

SEQ ID NO: 1124196 - RNA, 19 nt, Artificial Sequence
  Description of Artificial Sequence: Synthetic oligonucleotide
aggucacggugcaguaucc

SEQ ID NO: 1124197 - RNA, 19 nt, Artificial Sequence
  Description of Artificial Sequence: Synthetic oligonucleotide
aaucgcuugcggagguugu

SEQ ID NO: 1124198 - RNA, 19 nt, Artificial Sequence
  Description of Artificial Sequence: Synthetic oligonucleotide
gacccaaaacaaacuucac

SEQ ID NO: 1124199 - RNA, 19 nt, Artificial Sequence
  Description of Artificial Sequence: Synthetic oligonucleotide
ggauacucgcugaagguca

SEQ ID NO: 1124200 - RNA, 19 nt, Artificial Sequence
  Description of Artificial Sequence: Synthetic oligonucleotide
cccaggguaauaugucagg

SEQ ID NO: 1124201 - RNA, 19 nt, Artificial Sequence
  Description of Artificial Sequence: Synthetic oligonucleotide
uccuccuccuccuccuccu

SEQ ID NO: 1124202 - RNA, 19 nt, Artificial Sequence
  Description of Artificial Sequence: Synthetic oligonucleotide
uauagccaggccagaucuu

SEQ ID NO: 1124203 - RNA, 19 nt, Artificial Sequence
  Description of Artificial Sequence: Synthetic oligonucleotide
ggacgggucaauggggagg

SEQ ID NO: 1124204 - RNA, 19 nt, Artificial Sequence
  Description of Artificial Sequence: Synthetic oligonucleotide
ccccaaaucgcuugcggag

SEQ ID NO: 1124205 - RNA, 19 nt, Artificial Sequence
  Description of Artificial Sequence: Synthetic oligonucleotide
gaggucuuaaggucacggu

SEQ ID NO: 1124206 - RNA, 19 nt, Artificial Sequence
  Description of Artificial Sequence: Synthetic oligonucleotide
accugacccaaaacaaacu

SEQ ID NO: 1124207 - RNA, 19 nt, Artificial Sequence
  Description of Artificial Sequence: Synthetic oligonucleotide
gucacggugcaguauccaa

SEQ ID NO: 1124208 - RNA, 19 nt, Artificial Sequence
  Description of Artificial Sequence: Synthetic oligonucleotide
gucagucaaucugaccuca

SEQ ID NO: 1124209 - RNA, 19 nt, Artificial Sequence
  Description of Artificial Sequence: Synthetic oligonucleotide
auggacgggucaaugggga

SEQ ID NO: 1124210 - RNA, 19 nt, Artificial Sequence
  Description of Artificial Sequence: Synthetic oligonucleotide
ggucuuuaccuccccuggc

SEQ ID NO: 1124211 - RNA, 19 nt, Artificial Sequence
  Description of Artificial Sequence: Synthetic oligonucleotide
cugaucgaucucugacuuc

SEQ ID NO: 1124212 - RNA, 19 nt, Artificial Sequence
  Description of Artificial Sequence: Synthetic oligonucleotide
ccacgugggaaacauggac

SEQ ID NO: 1124213 - RNA, 19 nt, Artificial Sequence
  Description of Artificial Sequence: Synthetic oligonucleotide
gaucgaucucugacuuccc

SEQ ID NO: 1124214 - RNA, 19 nt, Artificial Sequence
  Description of Artificial Sequence: Synthetic oligonucleotide
ccacaagguuacgacaacg

SEQ ID NO: 1124215 - RNA, 19 nt, Artificial Sequence
  Description of Artificial Sequence: Synthetic oligonucleotide
acuucccaccacgauuucu

SEQ ID NO: 1124216 - RNA, 19 nt, Artificial Sequence
  Description of Artificial Sequence: Synthetic oligonucleotide
gccagcguggcucagcaga

SEQ ID NO: 1124217 - RNA, 19 nt, Artificial Sequence
  Description of Artificial Sequence: Synthetic oligonucleotide
guacauagucuccuuccgu

SEQ ID NO: 1124218 - RNA, 19 nt, Artificial Sequence
  Description of Artificial Sequence: Synthetic oligonucleotide
ggucagucaaucugaccuc

SEQ ID NO: 1124219 - RNA, 19 nt, Artificial Sequence
  Description of Artificial Sequence: Synthetic oligonucleotide
guuacgacaacgggagugu

SEQ ID NO: 1124220 - RNA, 19 nt, Artificial Sequence
  Description of Artificial Sequence: Synthetic oligonucleotide
acucuuggcgggccacgug

SEQ ID NO: 1124221 - RNA, 19 nt, Artificial Sequence
  Description of Artificial Sequence: Synthetic oligonucleotide
gggucaauggggaggggag

SEQ ID NO: 1124222 - RNA, 19 nt, Artificial Sequence
  Description of Artificial Sequence: Synthetic oligonucleotide
uacucccuagccagcccaa

SEQ ID NO: 1124223 - RNA, 19 nt, Artificial Sequence
  Description of Artificial Sequence: Synthetic oligonucleotide
gaggugcuuuaccccacuc

SEQ ID NO: 1124224 - RNA, 19 nt, Artificial Sequence
  Description of Artificial Sequence: Synthetic oligonucleotide
ucgugccucgcuucacccu

SEQ ID NO: 1124225 - RNA, 19 nt, Artificial Sequence
  Description of Artificial Sequence: Synthetic oligonucleotide
cuggaacaaccaagaugug

SEQ ID NO: 1124226 - RNA, 19 nt, Artificial Sequence
  Description of Artificial Sequence: Synthetic oligonucleotide
cagugacgauauuggggug

SEQ ID NO: 1124227 - RNA, 19 nt, Artificial Sequence
  Description of Artificial Sequence: Synthetic oligonucleotide
cauagguuccuucuucaau

SEQ ID NO: 1124228 - RNA, 19 nt, Artificial Sequence
  Description of Artificial Sequence: Synthetic oligonucleotide
gugggaaacauggacgggu

SEQ ID NO: 1124229 - RNA, 19 nt, Artificial Sequence
  Description of Artificial Sequence: Synthetic oligonucleotide
gaggggagucucucggaaa

SEQ ID NO: 1124230 - RNA, 19 nt, Artificial Sequence
  Description of Artificial Sequence: Synthetic oligonucleotide
gugcuuuaccccacucagc

SEQ ID NO: 1124231 - RNA, 19 nt, Artificial Sequence
  Description of Artificial Sequence: Synthetic oligonucleotide
cuguucaggcacuggaacu

SEQ ID NO: 1124232 - RNA, 19 nt, Artificial Sequence
  Description of Artificial Sequence: Synthetic oligonucleotide
ugggcucgugccucgcuuc

SEQ ID NO: 1124233 - RNA, 19 nt, Artificial Sequence
  Description of Artificial Sequence: Synthetic oligonucleotide
ugcucacucuuggcgggcc

SEQ ID NO: 1124234 - RNA, 19 nt, Artificial Sequence
  Description of Artificial Sequence: Synthetic oligonucleotide
auacucgcugaaggucauc

SEQ ID NO: 1124235 - RNA, 19 nt, Artificial Sequence
  Description of Artificial Sequence: Synthetic oligonucleotide
ugccugucaccagcuagcu

SEQ ID NO: 1124236 - RNA, 19 nt, Artificial Sequence
  Description of Artificial Sequence: Synthetic oligonucleotide
auguuacuucccaccacga

SEQ ID NO: 1124237 - RNA, 19 nt, Artificial Sequence
  Description of Artificial Sequence: Synthetic oligonucleotide
cucuucuacacuccggcau

SEQ ID NO: 1124238 - RNA, 19 nt, Artificial Sequence
  Description of Artificial Sequence: Synthetic oligonucleotide
acgauaccacaagguuacg

SEQ ID NO: 1124239 - RNA, 19 nt, Artificial Sequence
  Description of Artificial Sequence: Synthetic oligonucleotide
cccaaaucgcuugcggagg

SEQ ID NO: 1124240 - RNA, 19 nt, Artificial Sequence
  Description of Artificial Sequence: Synthetic oligonucleotide
agguggaagcccgucuccu

SEQ ID NO: 1124241 - RNA, 19 nt, Artificial Sequence
  Description of Artificial Sequence: Synthetic oligonucleotide
cucuguagacuacuccaua

SEQ ID NO: 1124242 - RNA, 19 nt, Artificial Sequence
  Description of Artificial Sequence: Synthetic oligonucleotide
cagugaggugauggggaag

SEQ ID NO: 1124243 - RNA, 19 nt, Artificial Sequence
  Description of Artificial Sequence: Synthetic oligonucleotide
agguuacgacaacgggagu

SEQ ID NO: 1124244 - RNA, 19 nt, Artificial Sequence
  Description of Artificial Sequence: Synthetic oligonucleotide
gguaauaugucaggaacuu

SEQ ID NO: 1124245 - RNA, 19 nt, Artificial Sequence
  Description of Artificial Sequence: Synthetic oligonucleotide
caaccaagaugugguuuuc

SEQ ID NO: 1124246 - RNA, 19 nt, Artificial Sequence
  Description of Artificial Sequence: Synthetic oligonucleotide
aaacaccccugcgccgcug

SEQ ID NO: 1124247 - RNA, 19 nt, Artificial Sequence
  Description of Artificial Sequence: Synthetic oligonucleotide
acgauuucucggacaguga

SEQ ID NO: 1124248 - RNA, 19 nt, Artificial Sequence
  Description of Artificial Sequence: Synthetic oligonucleotide
ccagaaucucggucaaauc

SEQ ID NO: 1124249 - RNA, 19 nt, Artificial Sequence
  Description of Artificial Sequence: Synthetic oligonucleotide
caccacgauuucucggaca

SEQ ID NO: 1124250 - RNA, 19 nt, Artificial Sequence
  Description of Artificial Sequence: Synthetic oligonucleotide
guagacuacuccauagguu

SEQ ID NO: 1124251 - RNA, 19 nt, Artificial Sequence
  Description of Artificial Sequence: Synthetic oligonucleotide
ugccagcguggcucagcag

SEQ ID NO: 1124252 - RNA, 19 nt, Artificial Sequence
  Description of Artificial Sequence: Synthetic oligonucleotide
gacuacuccauagguuccu

SEQ ID NO: 1124253 - RNA, 19 nt, Artificial Sequence
  Description of Artificial Sequence: Synthetic oligonucleotide
cuuccguuggggcacugcu

SEQ ID NO: 1124254 - RNA, 19 nt, Artificial Sequence
  Description of Artificial Sequence: Synthetic oligonucleotide
aggucaugcucaacauagu

SEQ ID NO: 1124255 - RNA, 19 nt, Artificial Sequence
  Description of Artificial Sequence: Synthetic oligonucleotide
cccaccacgauuucucgga

SEQ ID NO: 1124256 - RNA, 19 nt, Artificial Sequence
  Description of Artificial Sequence: Synthetic oligonucleotide
gcucgugccucgcuucacc

SEQ ID NO: 1124257 - RNA, 19 nt, Artificial Sequence
  Description of Artificial Sequence: Synthetic oligonucleotide
ugacgauauuggggugcug

SEQ ID NO: 1124258 - RNA, 19 nt, Artificial Sequence
  Description of Artificial Sequence: Synthetic oligonucleotide
ccauguuacuucccaccac

SEQ ID NO: 1124259 - RNA, 19 nt, Artificial Sequence
  Description of Artificial Sequence: Synthetic oligonucleotide
acucgugcuucaggccguc

SEQ ID NO: 1124260 - RNA, 19 nt, Artificial Sequence
  Description of Artificial Sequence: Synthetic oligonucleotide
ggguaauaugucaggaacu

SEQ ID NO: 1124261 - RNA, 19 nt, Artificial Sequence
  Description of Artificial Sequence: Synthetic oligonucleotide
caucacccauuugaguuaa

SEQ ID NO: 1124262 - RNA, 19 nt, Artificial Sequence
  Description of Artificial Sequence: Synthetic oligonucleotide
ggcacgauaccacaagguu

SEQ ID NO: 1124263 - RNA, 19 nt, Artificial Sequence
  Description of Artificial Sequence: Synthetic oligonucleotide
cccuagccagcccaaaguc

SEQ ID NO: 1124264 - RNA, 19 nt, Artificial Sequence
  Description of Artificial Sequence: Synthetic oligonucleotide
gcccugaucugauaacaaa

SEQ ID NO: 1124265 - RNA, 19 nt, Artificial Sequence
  Description of Artificial Sequence: Synthetic oligonucleotide
gcacgauaccacaagguua

SEQ ID NO: 1124266 - RNA, 19 nt, Artificial Sequence
  Description of Artificial Sequence: Synthetic oligonucleotide
gccccaaaucgcuugcgga

SEQ ID NO: 1124267 - RNA, 19 nt, Artificial Sequence
  Description of Artificial Sequence: Synthetic oligonucleotide
acuacuccauagguuccuu

SEQ ID NO: 1124268 - RNA, 19 nt, Artificial Sequence
  Description of Artificial Sequence: Synthetic oligonucleotide
ggaggggagucucucggaa

SEQ ID NO: 1124269 - RNA, 19 nt, Artificial Sequence
  Description of Artificial Sequence: Synthetic oligonucleotide
cuuccuccuccuccuccuc

SEQ ID NO: 1124270 - RNA, 19 nt, Artificial Sequence
  Description of Artificial Sequence: Synthetic oligonucleotide
guacuugggcagcuccugu

SEQ ID NO: 1124271 - RNA, 19 nt, Artificial Sequence
  Description of Artificial Sequence: Synthetic oligonucleotide
cauuauagccaggccagau

SEQ ID NO: 1124272 - RNA, 19 nt, Artificial Sequence
  Description of Artificial Sequence: Synthetic oligonucleotide
caccagcuagcuggccagg

SEQ ID NO: 1124273 - RNA, 19 nt, Artificial Sequence
  Description of Artificial Sequence: Synthetic oligonucleotide
cucggaaauacucgugcuu

SEQ ID NO: 1124274 - RNA, 19 nt, Artificial Sequence
  Description of Artificial Sequence: Synthetic oligonucleotide
gcggagguuguuauaggga

SEQ ID NO: 1124275 - RNA, 19 nt, Artificial Sequence
  Description of Artificial Sequence: Synthetic oligonucleotide
cacggugcaguauccaauu

SEQ ID NO: 1124276 - RNA, 19 nt, Artificial Sequence
  Description of Artificial Sequence: Synthetic oligonucleotide
cgauauuggggugcugggc

SEQ ID NO: 1124277 - RNA, 19 nt, Artificial Sequence
  Description of Artificial Sequence: Synthetic oligonucleotide
gauacucgcugaaggucau

SEQ ID NO: 1124278 - RNA, 19 nt, Artificial Sequence
  Description of Artificial Sequence: Synthetic oligonucleotide
acgggaguguaggccuuca

SEQ ID NO: 1124279 - RNA, 19 nt, Artificial Sequence
  Description of Artificial Sequence: Synthetic oligonucleotide
gugacgauauuggggugcu

SEQ ID NO: 1124280 - RNA, 19 nt, Artificial Sequence
  Description of Artificial Sequence: Synthetic oligonucleotide
ggugagguggaagcccguc

SEQ ID NO: 1124281 - RNA, 19 nt, Artificial Sequence
  Description of Artificial Sequence: Synthetic oligonucleotide
gcuagcuggccagggucag

SEQ ID NO: 1124282 - RNA, 19 nt, Artificial Sequence
  Description of Artificial Sequence: Synthetic oligonucleotide
uuaccuccccuggcaggaa

SEQ ID NO: 1124283 - RNA, 19 nt, Artificial Sequence
  Description of Artificial Sequence: Synthetic oligonucleotide
aucgcuugcggagguuguu

SEQ ID NO: 1124284 - RNA, 19 nt, Artificial Sequence
  Description of Artificial Sequence: Synthetic oligonucleotide
ccucagaacuugaggcuga

SEQ ID NO: 1124285 - RNA, 19 nt, Artificial Sequence
  Description of Artificial Sequence: Synthetic oligonucleotide
ggccggcagguacuugggc

SEQ ID NO: 1124286 - RNA, 19 nt, Artificial Sequence
  Description of Artificial Sequence: Synthetic oligonucleotide
ggagguuguuauagggaua

SEQ ID NO: 1124287 - RNA, 19 nt, Artificial Sequence
  Description of Artificial Sequence: Synthetic oligonucleotide
cucagaacuugaggcugaa

SEQ ID NO: 1124288 - RNA, 19 nt, Artificial Sequence
  Description of Artificial Sequence: Synthetic oligonucleotide
ccaccacgauuucucggac

SEQ ID NO: 1124289 - RNA, 19 nt, Artificial Sequence
  Description of Artificial Sequence: Synthetic oligonucleotide
cgugccucgcuucacccuc

SEQ ID NO: 1124290 - RNA, 19 nt, Artificial Sequence
  Description of Artificial Sequence: Synthetic oligonucleotide
gggccggcagguacuuggg

SEQ ID NO: 1124291 - RNA, 19 nt, Artificial Sequence
  Description of Artificial Sequence: Synthetic oligonucleotide
ggucacggugcaguaucca

SEQ ID NO: 1124292 - RNA, 19 nt, Artificial Sequence
  Description of Artificial Sequence: Synthetic oligonucleotide
ggagagucagguacauagu

SEQ ID NO: 1124293 - RNA, 19 nt, Artificial Sequence
  Description of Artificial Sequence: Synthetic oligonucleotide
cgacaacgggaguguaggc

SEQ ID NO: 1124294 - RNA, 19 nt, Artificial Sequence
  Description of Artificial Sequence: Synthetic oligonucleotide
cgugggaaacauggacggg

SEQ ID NO: 1124295 - RNA, 19 nt, Artificial Sequence
  Description of Artificial Sequence: Synthetic oligonucleotide
gggcacgauaccacaaggu

SEQ ID NO: 1124296 - RNA, 19 nt, Artificial Sequence
  Description of Artificial Sequence: Synthetic oligonucleotide
cggaaauacucgugcuuca

SEQ ID NO: 1124297 - RNA, 19 nt, Artificial Sequence
  Description of Artificial Sequence: Synthetic oligonucleotide
cgauaccacaagguuacga

SEQ ID NO: 1124298 - RNA, 19 nt, Artificial Sequence
  Description of Artificial Sequence: Synthetic oligonucleotide
ccuugaaaaccuuguugau

SEQ ID NO: 1124299 - RNA, 19 nt, Artificial Sequence
  Description of Artificial Sequence: Synthetic oligonucleotide
ccaagaugugguuuucauu

SEQ ID NO: 1124300 - RNA, 19 nt, Artificial Sequence
  Description of Artificial Sequence: Synthetic oligonucleotide
cggagguuguuauagggau

SEQ ID NO: 1124301 - RNA, 19 nt, Artificial Sequence
  Description of Artificial Sequence: Synthetic oligonucleotide
cuccuccuccuccuccucu

SEQ ID NO: 1124302 - RNA, 19 nt, Artificial Sequence
  Description of Artificial Sequence: Synthetic oligonucleotide
cuggagagucagguacaua

SEQ ID NO: 1124303 - RNA, 19 nt, Artificial Sequence
  Description of Artificial Sequence: Synthetic oligonucleotide
cccagaaucucggucaaau

SEQ ID NO: 1124304 - RNA, 19 nt, Artificial Sequence
  Description of Artificial Sequence: Synthetic oligonucleotide
gugggcucgugccucgcuu

SEQ ID NO: 1124305 - RNA, 19 nt, Artificial Sequence
  Description of Artificial Sequence: Synthetic oligonucleotide
aucacccauuugaguuaaa

SEQ ID NO: 1124306 - RNA, 19 nt, Artificial Sequence
  Description of Artificial Sequence: Synthetic oligonucleotide
gccgucuucugcgcugauc

SEQ ID NO: 1124307 - RNA, 19 nt, Artificial Sequence
  Description of Artificial Sequence: Synthetic oligonucleotide
ccaaaucgcuugcggaggu

SEQ ID NO: 1124308 - RNA, 19 nt, Artificial Sequence
  Description of Artificial Sequence: Synthetic oligonucleotide
cggugcaguauccaauugu

SEQ ID NO: 1124309 - RNA, 19 nt, Artificial Sequence
  Description of Artificial Sequence: Synthetic oligonucleotide
cgggaguguaggccuucag

SEQ ID NO: 1124310 - RNA, 19 nt, Artificial Sequence
  Description of Artificial Sequence: Synthetic oligonucleotide
ccguuggggcacugcucug

SEQ ID NO: 1124311 - RNA, 19 nt, Artificial Sequence
  Description of Artificial Sequence: Synthetic oligonucleotide
cacucuuggcgggccacgu

SEQ ID NO: 1124312 - RNA, 19 nt, Artificial Sequence
  Description of Artificial Sequence: Synthetic oligonucleotide
ggcgggccacgugggaaac

SEQ ID NO: 1124313 - RNA, 19 nt, Artificial Sequence
  Description of Artificial Sequence: Synthetic oligonucleotide
caacgggaguguaggccuu

SEQ ID NO: 1124314 - RNA, 19 nt, Artificial Sequence
  Description of Artificial Sequence: Synthetic oligonucleotide
cucccugguuggugguggu

SEQ ID NO: 1124315 - RNA, 19 nt, Artificial Sequence
  Description of Artificial Sequence: Synthetic oligonucleotide
gccguuucagagccacaau

SEQ ID NO: 1124316 - RNA, 19 nt, Artificial Sequence
  Description of Artificial Sequence: Synthetic oligonucleotide
ggggagucucucggaaaua

SEQ ID NO: 1124317 - RNA, 19 nt, Artificial Sequence
  Description of Artificial Sequence: Synthetic oligonucleotide
gcuggagagucagguacau

SEQ ID NO: 1124318 - RNA, 19 nt, Artificial Sequence
  Description of Artificial Sequence: Synthetic oligonucleotide
ggggugagccauacucccu

SEQ ID NO: 1124319 - RNA, 19 nt, Artificial Sequence
  Description of Artificial Sequence: Synthetic oligonucleotide
ccuccuccuccuccuccuc

SEQ ID NO: 1124320 - RNA, 19 nt, Artificial Sequence
  Description of Artificial Sequence: Synthetic oligonucleotide
caaaucgcuugcggagguu

SEQ ID NO: 1124321 - RNA, 19 nt, Artificial Sequence
  Description of Artificial Sequence: Synthetic oligonucleotide
cggcagguacuugggcagc

SEQ ID NO: 1124322 - RNA, 19 nt, Artificial Sequence
  Description of Artificial Sequence: Synthetic oligonucleotide
ccgccgccgguccugaagu

SEQ ID NO: 1124323 - RNA, 19 nt, Artificial Sequence
  Description of Artificial Sequence: Synthetic oligonucleotide
cucgugcuucaggccgucu

SEQ ID NO: 1124324 - RNA, 19 nt, Artificial Sequence
  Description of Artificial Sequence: Synthetic oligonucleotide
gcgggccacgugggaaaca

SEQ ID NO: 1124325 - RNA, 19 nt, Artificial Sequence
  Description of Artificial Sequence: Synthetic oligonucleotide
cucggacagugacgauauu

SEQ ID NO: 1124326 - RNA, 19 nt, Artificial Sequence
  Description of Artificial Sequence: Synthetic oligonucleotide
cguuggggcacugcucugu

SEQ ID NO: 1124327 - RNA, 19 nt, Artificial Sequence
  Description of Artificial Sequence: Synthetic oligonucleotide
cgucuucugcgcugauccu

SEQ ID NO: 1124328 - RNA, 19 nt, Artificial Sequence
  Description of Artificial Sequence: Synthetic oligonucleotide
cuggaucaucagggucuuu

SEQ ID NO: 1124329 - RNA, 19 nt, Artificial Sequence
  Description of Artificial Sequence: Synthetic oligonucleotide
ccccagaaucucggucaaa

SEQ ID NO: 1124330 - RNA, 19 nt, Artificial Sequence
  Description of Artificial Sequence: Synthetic oligonucleotide
gcagggccggcagguacuu

SEQ ID NO: 1124331 - RNA, 19 nt, Artificial Sequence
  Description of Artificial Sequence: Synthetic oligonucleotide
cgugggcucgugccucgcu

SEQ ID NO: 1124332 - RNA, 19 nt, Artificial Sequence
  Description of Artificial Sequence: Synthetic oligonucleotide
aauaucagguuccugaugc

SEQ ID NO: 1124333 - RNA, 19 nt, Artificial Sequence
  Description of Artificial Sequence: Synthetic oligonucleotide
acuauaagcaccuuaggcc

SEQ ID NO: 1124334 - RNA, 19 nt, Artificial Sequence
  Description of Artificial Sequence: Synthetic oligonucleotide
aguauugccaccccaaucc

SEQ ID NO: 1124335 - RNA, 19 nt, Artificial Sequence
  Description of Artificial Sequence: Synthetic oligonucleotide
uucauaauuaagaacagcu

SEQ ID NO: 1124336 - RNA, 19 nt, Artificial Sequence
  Description of Artificial Sequence: Synthetic oligonucleotide
ugucggaggaguaaaaggg

SEQ ID NO: 1124337 - RNA, 19 nt, Artificial Sequence
  Description of Artificial Sequence: Synthetic oligonucleotide
uuuagugcuggguaguugg

SEQ ID NO: 1124338 - RNA, 19 nt, Artificial Sequence
  Description of Artificial Sequence: Synthetic oligonucleotide
cucaauagaagacaggaag

SEQ ID NO: 1124339 - RNA, 19 nt, Artificial Sequence
  Description of Artificial Sequence: Synthetic oligonucleotide
aauggaaacguuccgugag

SEQ ID NO: 1124340 - RNA, 19 nt, Artificial Sequence
  Description of Artificial Sequence: Synthetic oligonucleotide
ugaagugacaucuugggcu

SEQ ID NO: 1124341 - RNA, 19 nt, Artificial Sequence
  Description of Artificial Sequence: Synthetic oligonucleotide
aucaauguugcccacgaac

SEQ ID NO: 1124342 - RNA, 19 nt, Artificial Sequence
  Description of Artificial Sequence: Synthetic oligonucleotide
uuauugaggcuccacaugc

SEQ ID NO: 1124343 - RNA, 19 nt, Artificial Sequence
  Description of Artificial Sequence: Synthetic oligonucleotide
uguguauacucgcagaugu

SEQ ID NO: 1124344 - RNA, 19 nt, Artificial Sequence
  Description of Artificial Sequence: Synthetic oligonucleotide
uugaacacggaguugaucu

SEQ ID NO: 1124345 - RNA, 19 nt, Artificial Sequence
  Description of Artificial Sequence: Synthetic oligonucleotide
uuugaugaaaagacaagcu

SEQ ID NO: 1124346 - RNA, 19 nt, Artificial Sequence
  Description of Artificial Sequence: Synthetic oligonucleotide
aguaauuucggagacgcac

SEQ ID NO: 1124347 - RNA, 19 nt, Artificial Sequence
  Description of Artificial Sequence: Synthetic oligonucleotide
ugggcauucgcuuugagga

SEQ ID NO: 1124348 - RNA, 19 nt, Artificial Sequence
  Description of Artificial Sequence: Synthetic oligonucleotide
auuucggagacgcacaaag

SEQ ID NO: 1124349 - RNA, 19 nt, Artificial Sequence
  Description of Artificial Sequence: Synthetic oligonucleotide
augaugagaagcucaauag

SEQ ID NO: 1124350 - RNA, 19 nt, Artificial Sequence
  Description of Artificial Sequence: Synthetic oligonucleotide
uccggugaugaaaaggugg

SEQ ID NO: 1124351 - RNA, 19 nt, Artificial Sequence
  Description of Artificial Sequence: Synthetic oligonucleotide
aaguuucuggcuccggcgc

SEQ ID NO: 1124352 - RNA, 19 nt, Artificial Sequence
  Description of Artificial Sequence: Synthetic oligonucleotide
aaaccuggcaucuaucacu

SEQ ID NO: 1124353 - RNA, 19 nt, Artificial Sequence
  Description of Artificial Sequence: Synthetic oligonucleotide
ucagguaaaugucagccug

SEQ ID NO: 1124354 - RNA, 19 nt, Artificial Sequence
  Description of Artificial Sequence: Synthetic oligonucleotide
gaaguaauuucggagacgc

SEQ ID NO: 1124355 - RNA, 19 nt, Artificial Sequence
  Description of Artificial Sequence: Synthetic oligonucleotide
ucaauguugcccacgaaca

SEQ ID NO: 1124356 - RNA, 19 nt, Artificial Sequence
  Description of Artificial Sequence: Synthetic oligonucleotide
uucauagaauaucagguuc

SEQ ID NO: 1124357 - RNA, 19 nt, Artificial Sequence
  Description of Artificial Sequence: Synthetic oligonucleotide
aacucgagaaaaguccacc

SEQ ID NO: 1124358 - RNA, 19 nt, Artificial Sequence
  Description of Artificial Sequence: Synthetic oligonucleotide
uugaggacgugguuuaugg

SEQ ID NO: 1124359 - RNA, 19 nt, Artificial Sequence
  Description of Artificial Sequence: Synthetic oligonucleotide
acacaugacugauggagcc

SEQ ID NO: 1124360 - RNA, 19 nt, Artificial Sequence
  Description of Artificial Sequence: Synthetic oligonucleotide
cuuugaugaaaagacaagc

SEQ ID NO: 1124361 - RNA, 19 nt, Artificial Sequence
  Description of Artificial Sequence: Synthetic oligonucleotide
caguucauagaauaucagg

SEQ ID NO: 1124362 - RNA, 19 nt, Artificial Sequence
  Description of Artificial Sequence: Synthetic oligonucleotide
uguuagcuaacacuugggc

SEQ ID NO: 1124363 - RNA, 19 nt, Artificial Sequence
  Description of Artificial Sequence: Synthetic oligonucleotide
guaccuuuuguagaaaugg

SEQ ID NO: 1124364 - RNA, 19 nt, Artificial Sequence
  Description of Artificial Sequence: Synthetic oligonucleotide
acuguuguuagcuaacacu

SEQ ID NO: 1124365 - RNA, 19 nt, Artificial Sequence
  Description of Artificial Sequence: Synthetic oligonucleotide
aaguauugccaccccaauc

SEQ ID NO: 1124366 - RNA, 19 nt, Artificial Sequence
  Description of Artificial Sequence: Synthetic oligonucleotide
uagaaauggaaacguuccg

SEQ ID NO: 1124367 - RNA, 19 nt, Artificial Sequence
  Description of Artificial Sequence: Synthetic oligonucleotide
acucgagaaaaguccaccc

SEQ ID NO: 1124368 - RNA, 19 nt, Artificial Sequence
  Description of Artificial Sequence: Synthetic oligonucleotide
aacacaugacugauggagc

SEQ ID NO: 1124369 - RNA, 19 nt, Artificial Sequence
  Description of Artificial Sequence: Synthetic oligonucleotide
aaaguaggaggggacauag

SEQ ID NO: 1124370 - RNA, 19 nt, Artificial Sequence
  Description of Artificial Sequence: Synthetic oligonucleotide
aaagguggacguucuuugg

SEQ ID NO: 1124371 - RNA, 19 nt, Artificial Sequence
  Description of Artificial Sequence: Synthetic oligonucleotide
aguucauagaauaucaggu

SEQ ID NO: 1124372 - RNA, 19 nt, Artificial Sequence
  Description of Artificial Sequence: Synthetic oligonucleotide
caucguauuuggaauagag

SEQ ID NO: 1124373 - RNA, 19 nt, Artificial Sequence
  Description of Artificial Sequence: Synthetic oligonucleotide
aagggcaccacuauaagca

SEQ ID NO: 1124374 - RNA, 19 nt, Artificial Sequence
  Description of Artificial Sequence: Synthetic oligonucleotide
ucuccggugaugaaaaggu

SEQ ID NO: 1124375 - RNA, 19 nt, Artificial Sequence
  Description of Artificial Sequence: Synthetic oligonucleotide
agguuuaaauguuuccauc

SEQ ID NO: 1124376 - RNA, 19 nt, Artificial Sequence
  Description of Artificial Sequence: Synthetic oligonucleotide
uagaagugaggguagguug

SEQ ID NO: 1124377 - RNA, 19 nt, Artificial Sequence
  Description of Artificial Sequence: Synthetic oligonucleotide
guagaaauggaaacguucc

SEQ ID NO: 1124378 - RNA, 19 nt, Artificial Sequence
  Description of Artificial Sequence: Synthetic oligonucleotide
uuguuagcuaacacuuggg

SEQ ID NO: 1124379 - RNA, 19 nt, Artificial Sequence
  Description of Artificial Sequence: Synthetic oligonucleotide
cuugaaguaauuucggaga

SEQ ID NO: 1124380 - RNA, 19 nt, Artificial Sequence
  Description of Artificial Sequence: Synthetic oligonucleotide
ucgagaaaaguccacccca

SEQ ID NO: 1124381 - RNA, 19 nt, Artificial Sequence
  Description of Artificial Sequence: Synthetic oligonucleotide
uugaaguaauuucggagac

SEQ ID NO: 1124382 - RNA, 19 nt, Artificial Sequence
  Description of Artificial Sequence: Synthetic oligonucleotide
caucagguaaaugucagcc

SEQ ID NO: 1124383 - RNA, 19 nt, Artificial Sequence
  Description of Artificial Sequence: Synthetic oligonucleotide
caacacaugacugauggag

SEQ ID NO: 1124384 - RNA, 19 nt, Artificial Sequence
  Description of Artificial Sequence: Synthetic oligonucleotide
gaaacguuccgugaggagc

SEQ ID NO: 1124385 - RNA, 19 nt, Artificial Sequence
  Description of Artificial Sequence: Synthetic oligonucleotide
cucgacaccgaccacagag

SEQ ID NO: 1124386 - RNA, 19 nt, Artificial Sequence
  Description of Artificial Sequence: Synthetic oligonucleotide
cucgcuguagaagugaggg

SEQ ID NO: 1124387 - RNA, 19 nt, Artificial Sequence
  Description of Artificial Sequence: Synthetic oligonucleotide
aaauggaaacguuccguga

SEQ ID NO: 1124388 - RNA, 19 nt, Artificial Sequence
  Description of Artificial Sequence: Synthetic oligonucleotide
uacaauuacuuucuucuua

SEQ ID NO: 1124389 - RNA, 19 nt, Artificial Sequence
  Description of Artificial Sequence: Synthetic oligonucleotide
uugggcauucgcuuugagg

SEQ ID NO: 1124390 - RNA, 19 nt, Artificial Sequence
  Description of Artificial Sequence: Synthetic oligonucleotide
ucuaucacugaagugacau

SEQ ID NO: 1124391 - RNA, 19 nt, Artificial Sequence
  Description of Artificial Sequence: Synthetic oligonucleotide
uuguugaacacggaguuga

SEQ ID NO: 1124392 - RNA, 19 nt, Artificial Sequence
  Description of Artificial Sequence: Synthetic oligonucleotide
aguaggaggggacauagau

SEQ ID NO: 1124393 - RNA, 19 nt, Artificial Sequence
  Description of Artificial Sequence: Synthetic oligonucleotide
uaaaugucagccuggucga

SEQ ID NO: 1124394 - RNA, 19 nt, Artificial Sequence
  Description of Artificial Sequence: Synthetic oligonucleotide
uaguuggagggcuugaagu

SEQ ID NO: 1124395 - RNA, 19 nt, Artificial Sequence
  Description of Artificial Sequence: Synthetic oligonucleotide
uuuaaggaagaagugccga

SEQ ID NO: 1124396 - RNA, 19 nt, Artificial Sequence
  Description of Artificial Sequence: Synthetic oligonucleotide
ugugguucaccaaaugcaa

SEQ ID NO: 1124397 - RNA, 19 nt, Artificial Sequence
  Description of Artificial Sequence: Synthetic oligonucleotide
cauauugcagaccucgcug

SEQ ID NO: 1124398 - RNA, 19 nt, Artificial Sequence
  Description of Artificial Sequence: Synthetic oligonucleotide
ugaaguauugccaccccaa

SEQ ID NO: 1124399 - RNA, 19 nt, Artificial Sequence
  Description of Artificial Sequence: Synthetic oligonucleotide
ugguucaccaaaugcaaga

SEQ ID NO: 1124400 - RNA, 19 nt, Artificial Sequence
  Description of Artificial Sequence: Synthetic oligonucleotide
gaggggacauagaugagcg

SEQ ID NO: 1124401 - RNA, 19 nt, Artificial Sequence
  Description of Artificial Sequence: Synthetic oligonucleotide
acgaaugcuccucugaagu

SEQ ID NO: 1124402 - RNA, 19 nt, Artificial Sequence
  Description of Artificial Sequence: Synthetic oligonucleotide
uaggaauuggcuauugguu

SEQ ID NO: 1124403 - RNA, 19 nt, Artificial Sequence
  Description of Artificial Sequence: Synthetic oligonucleotide
augaaaagacaagcugucc

SEQ ID NO: 1124404 - RNA, 19 nt, Artificial Sequence
  Description of Artificial Sequence: Synthetic oligonucleotide
caugggacuccaaaggcag

SEQ ID NO: 1124405 - RNA, 19 nt, Artificial Sequence
  Description of Artificial Sequence: Synthetic oligonucleotide
agcucaauagaagacagga

SEQ ID NO: 1124406 - RNA, 19 nt, Artificial Sequence
  Description of Artificial Sequence: Synthetic oligonucleotide
gagacugcagcaucugugc

SEQ ID NO: 1124407 - RNA, 19 nt, Artificial Sequence
  Description of Artificial Sequence: Synthetic oligonucleotide
caugacggcaucccgauac

SEQ ID NO: 1124408 - RNA, 19 nt, Artificial Sequence
  Description of Artificial Sequence: Synthetic oligonucleotide
ucggagacgcacaaaguca

SEQ ID NO: 1124409 - RNA, 19 nt, Artificial Sequence
  Description of Artificial Sequence: Synthetic oligonucleotide
uggauuggagccauacucu

SEQ ID NO: 1124410 - RNA, 19 nt, Artificial Sequence
  Description of Artificial Sequence: Synthetic oligonucleotide
uaauccucgggccucuuca

SEQ ID NO: 1124411 - RNA, 19 nt, Artificial Sequence
  Description of Artificial Sequence: Synthetic oligonucleotide
ccaaugaugguucucaagc

SEQ ID NO: 1124412 - RNA, 19 nt, Artificial Sequence
  Description of Artificial Sequence: Synthetic oligonucleotide
uguauacucgcagaugugu

SEQ ID NO: 1124413 - RNA, 19 nt, Artificial Sequence
  Description of Artificial Sequence: Synthetic oligonucleotide
gaugagaagcucaauagaa

SEQ ID NO: 1124414 - RNA, 19 nt, Artificial Sequence
  Description of Artificial Sequence: Synthetic oligonucleotide
ugaaguaauuucggagacg

SEQ ID NO: 1124415 - RNA, 19 nt, Artificial Sequence
  Description of Artificial Sequence: Synthetic oligonucleotide
ccuuuaaggaagaagugcc

SEQ ID NO: 1124416 - RNA, 19 nt, Artificial Sequence
  Description of Artificial Sequence: Synthetic oligonucleotide
gaugaaaagguggacguuc

SEQ ID NO: 1124417 - RNA, 19 nt, Artificial Sequence
  Description of Artificial Sequence: Synthetic oligonucleotide
ucuguguauacucgcagau

SEQ ID NO: 1124418 - RNA, 19 nt, Artificial Sequence
  Description of Artificial Sequence: Synthetic oligonucleotide
accacuauaagcaccuuag

SEQ ID NO: 1124419 - RNA, 19 nt, Artificial Sequence
  Description of Artificial Sequence: Synthetic oligonucleotide
uucgcuuugaggacguggu

SEQ ID NO: 1124420 - RNA, 19 nt, Artificial Sequence
  Description of Artificial Sequence: Synthetic oligonucleotide
cagugcuuguugaacacgg

SEQ ID NO: 1124421 - RNA, 19 nt, Artificial Sequence
  Description of Artificial Sequence: Synthetic oligonucleotide
uguuguuagcuaacacuug

SEQ ID NO: 1124422 - RNA, 19 nt, Artificial Sequence
  Description of Artificial Sequence: Synthetic oligonucleotide
augaagugacuucauguca

SEQ ID NO: 1124423 - RNA, 19 nt, Artificial Sequence
  Description of Artificial Sequence: Synthetic oligonucleotide
caaguuucuggcuccggcg

SEQ ID NO: 1124424 - RNA, 19 nt, Artificial Sequence
  Description of Artificial Sequence: Synthetic oligonucleotide
gaggacgugguuuauggca

SEQ ID NO: 1124425 - RNA, 19 nt, Artificial Sequence
  Description of Artificial Sequence: Synthetic oligonucleotide
aguuauugaggcuccacau

SEQ ID NO: 1124426 - RNA, 19 nt, Artificial Sequence
  Description of Artificial Sequence: Synthetic oligonucleotide
uccacaugcgaacucgaga

SEQ ID NO: 1124427 - RNA, 19 nt, Artificial Sequence
  Description of Artificial Sequence: Synthetic oligonucleotide
gaaagggcaccacuauaag

SEQ ID NO: 1124428 - RNA, 19 nt, Artificial Sequence
  Description of Artificial Sequence: Synthetic oligonucleotide
uaccuuuuguagaaaugga

SEQ ID NO: 1124429 - RNA, 19 nt, Artificial Sequence
  Description of Artificial Sequence: Synthetic oligonucleotide
gaugaaaagacaagcuguc

SEQ ID NO: 1124430 - RNA, 19 nt, Artificial Sequence
  Description of Artificial Sequence: Synthetic oligonucleotide
ucgacaccgaccacagagg

SEQ ID NO: 1124431 - RNA, 19 nt, Artificial Sequence
  Description of Artificial Sequence: Synthetic oligonucleotide
cagcauauugcagaccucg

SEQ ID NO: 1124432 - RNA, 19 nt, Artificial Sequence
  Description of Artificial Sequence: Synthetic oligonucleotide
ugcgaacucgagaaaaguc

SEQ ID NO: 1124433 - RNA, 19 nt, Artificial Sequence
  Description of Artificial Sequence: Synthetic oligonucleotide
aagguggacguucuuugga

SEQ ID NO: 1124434 - RNA, 19 nt, Artificial Sequence
  Description of Artificial Sequence: Synthetic oligonucleotide
gaugccuuuuauuguguac

SEQ ID NO: 1124435 - RNA, 19 nt, Artificial Sequence
  Description of Artificial Sequence: Synthetic oligonucleotide
gacauagaugagcgugugg

SEQ ID NO: 1124436 - RNA, 19 nt, Artificial Sequence
  Description of Artificial Sequence: Synthetic oligonucleotide
gacuucuguguauacucgc

SEQ ID NO: 1124437 - RNA, 19 nt, Artificial Sequence
  Description of Artificial Sequence: Synthetic oligonucleotide
uaaggaagaagugccgagc

SEQ ID NO: 1124438 - RNA, 19 nt, Artificial Sequence
  Description of Artificial Sequence: Synthetic oligonucleotide
augcaagacauguucccag

SEQ ID NO: 1124439 - RNA, 19 nt, Artificial Sequence
  Description of Artificial Sequence: Synthetic oligonucleotide
caucuaucacugaagugac

SEQ ID NO: 1124440 - RNA, 19 nt, Artificial Sequence
  Description of Artificial Sequence: Synthetic oligonucleotide
agaaauggaaacguuccgu

SEQ ID NO: 1124441 - RNA, 19 nt, Artificial Sequence
  Description of Artificial Sequence: Synthetic oligonucleotide
gugguuuauggcaugcagg

SEQ ID NO: 1124442 - RNA, 19 nt, Artificial Sequence
  Description of Artificial Sequence: Synthetic oligonucleotide
gagacgcacaaagucaaag

SEQ ID NO: 1124443 - RNA, 19 nt, Artificial Sequence
  Description of Artificial Sequence: Synthetic oligonucleotide
gacaugugggagcugcacc

SEQ ID NO: 1124444 - RNA, 19 nt, Artificial Sequence
  Description of Artificial Sequence: Synthetic oligonucleotide
gacgaaugcuccucugaag

SEQ ID NO: 1124445 - RNA, 19 nt, Artificial Sequence
  Description of Artificial Sequence: Synthetic oligonucleotide
agugaaaccuggcaucuau

SEQ ID NO: 1124446 - RNA, 19 nt, Artificial Sequence
  Description of Artificial Sequence: Synthetic oligonucleotide
ucugaaguauugccacccc

SEQ ID NO: 1124447 - RNA, 19 nt, Artificial Sequence
  Description of Artificial Sequence: Synthetic oligonucleotide
agacaggaagucaaaaucu

SEQ ID NO: 1124448 - RNA, 19 nt, Artificial Sequence
  Description of Artificial Sequence: Synthetic oligonucleotide
caugcgaacucgagaaaag

SEQ ID NO: 1124449 - RNA, 19 nt, Artificial Sequence
  Description of Artificial Sequence: Synthetic oligonucleotide
uuguugcuuacaauuacuu

SEQ ID NO: 1124450 - RNA, 19 nt, Artificial Sequence
  Description of Artificial Sequence: Synthetic oligonucleotide
auauugcagaccucgcugu

SEQ ID NO: 1124451 - RNA, 19 nt, Artificial Sequence
  Description of Artificial Sequence: Synthetic oligonucleotide
agacgcacaaagucaaagu

SEQ ID NO: 1124452 - RNA, 19 nt, Artificial Sequence
  Description of Artificial Sequence: Synthetic oligonucleotide
caugucaacauccuucgga

SEQ ID NO: 1124453 - RNA, 19 nt, Artificial Sequence
  Description of Artificial Sequence: Synthetic oligonucleotide
cucgagaaaaguccacccc

SEQ ID NO: 1124454 - RNA, 19 nt, Artificial Sequence
  Description of Artificial Sequence: Synthetic oligonucleotide
gcaucuaucacugaaguga

SEQ ID NO: 1124455 - RNA, 19 nt, Artificial Sequence
  Description of Artificial Sequence: Synthetic oligonucleotide
agaauaucagguuccugau

SEQ ID NO: 1124456 - RNA, 19 nt, Artificial Sequence
  Description of Artificial Sequence: Synthetic oligonucleotide
uacuguuguuagcuaacac

SEQ ID NO: 1124457 - RNA, 19 nt, Artificial Sequence
  Description of Artificial Sequence: Synthetic oligonucleotide
gaggcuucugaagaugaag

SEQ ID NO: 1124458 - RNA, 19 nt, Artificial Sequence
  Description of Artificial Sequence: Synthetic oligonucleotide
uauaagcaccuuaggccug

SEQ ID NO: 1124459 - RNA, 19 nt, Artificial Sequence
  Description of Artificial Sequence: Synthetic oligonucleotide
cagguaaaugucagccugg

SEQ ID NO: 1124460 - RNA, 19 nt, Artificial Sequence
  Description of Artificial Sequence: Synthetic oligonucleotide
agguggacguucuuuggag

SEQ ID NO: 1124461 - RNA, 19 nt, Artificial Sequence
  Description of Artificial Sequence: Synthetic oligonucleotide
aaacguuccgugaggagca

SEQ ID NO: 1124462 - RNA, 19 nt, Artificial Sequence
  Description of Artificial Sequence: Synthetic oligonucleotide
accagauaggaauuggcua

SEQ ID NO: 1124463 - RNA, 19 nt, Artificial Sequence
  Description of Artificial Sequence: Synthetic oligonucleotide
gcuauuugauuguugagga

SEQ ID NO: 1124464 - RNA, 19 nt, Artificial Sequence
  Description of Artificial Sequence: Synthetic oligonucleotide
uccgcucuggguagaacag

SEQ ID NO: 1124465 - RNA, 19 nt, Artificial Sequence
  Description of Artificial Sequence: Synthetic oligonucleotide
guaguuggagggcuugaag

SEQ ID NO: 1124466 - RNA, 19 nt, Artificial Sequence
  Description of Artificial Sequence: Synthetic oligonucleotide
uaauuucggagacgcacaa

SEQ ID NO: 1124467 - RNA, 19 nt, Artificial Sequence
  Description of Artificial Sequence: Synthetic oligonucleotide
agcaccuuaggccugguua

SEQ ID NO: 1124468 - RNA, 19 nt, Artificial Sequence
  Description of Artificial Sequence: Synthetic oligonucleotide
ucccgguaagaauucauaa

SEQ ID NO: 1124469 - RNA, 19 nt, Artificial Sequence
  Description of Artificial Sequence: Synthetic oligonucleotide
ugggcaucguauuuggaau

SEQ ID NO: 1124470 - RNA, 19 nt, Artificial Sequence
  Description of Artificial Sequence: Synthetic oligonucleotide
ucuggauuggagccauacu

SEQ ID NO: 1124471 - RNA, 19 nt, Artificial Sequence
  Description of Artificial Sequence: Synthetic oligonucleotide
agggcaccacuauaagcac

SEQ ID NO: 1124472 - RNA, 19 nt, Artificial Sequence
  Description of Artificial Sequence: Synthetic oligonucleotide
gacgcacaaagucaaagua

SEQ ID NO: 1124473 - RNA, 19 nt, Artificial Sequence
  Description of Artificial Sequence: Synthetic oligonucleotide
acgcacaaagucaaaguag

SEQ ID NO: 1124474 - RNA, 19 nt, Artificial Sequence
  Description of Artificial Sequence: Synthetic oligonucleotide
uuucggagacgcacaaagu

SEQ ID NO: 1124475 - RNA, 19 nt, Artificial Sequence
  Description of Artificial Sequence: Synthetic oligonucleotide
ccugguuagcccuuggucc

SEQ ID NO: 1124476 - RNA, 19 nt, Artificial Sequence
  Description of Artificial Sequence: Synthetic oligonucleotide
auaauuaagaacagcucuu

SEQ ID NO: 1124477 - RNA, 19 nt, Artificial Sequence
  Description of Artificial Sequence: Synthetic oligonucleotide
gguaagaauucauaauuaa

SEQ ID NO: 1124478 - RNA, 19 nt, Artificial Sequence
  Description of Artificial Sequence: Synthetic oligonucleotide
cuauaagcaccuuaggccu

SEQ ID NO: 1124479 - RNA, 19 nt, Artificial Sequence
  Description of Artificial Sequence: Synthetic oligonucleotide
ugaacacggaguugaucug

SEQ ID NO: 1124480 - RNA, 19 nt, Artificial Sequence
  Description of Artificial Sequence: Synthetic oligonucleotide
aaccuggcaucuaucacug

SEQ ID NO: 1124481 - RNA, 19 nt, Artificial Sequence
  Description of Artificial Sequence: Synthetic oligonucleotide
cucuccggugaugaaaagg

SEQ ID NO: 1124482 - RNA, 19 nt, Artificial Sequence
  Description of Artificial Sequence: Synthetic oligonucleotide
uuuuagugcuggguaguug

SEQ ID NO: 1124483 - RNA, 19 nt, Artificial Sequence
  Description of Artificial Sequence: Synthetic oligonucleotide
gucggaggaguaaaagggg

SEQ ID NO: 1124484 - RNA, 19 nt, Artificial Sequence
  Description of Artificial Sequence: Synthetic oligonucleotide
uccugaaguggucaucaau

SEQ ID NO: 1124485 - RNA, 19 nt, Artificial Sequence
  Description of Artificial Sequence: Synthetic oligonucleotide
uagagacgaaugcuccucu

SEQ ID NO: 1124486 - RNA, 19 nt, Artificial Sequence
  Description of Artificial Sequence: Synthetic oligonucleotide
uggcgguaguaccuggacc

SEQ ID NO: 1124487 - RNA, 19 nt, Artificial Sequence
  Description of Artificial Sequence: Synthetic oligonucleotide
gagaaaaguccaccccaug

SEQ ID NO: 1124488 - RNA, 19 nt, Artificial Sequence
  Description of Artificial Sequence: Synthetic oligonucleotide
ugcaagacauguucccagu

SEQ ID NO: 1124489 - RNA, 19 nt, Artificial Sequence
  Description of Artificial Sequence: Synthetic oligonucleotide
auaagcaccuuaggccugg

SEQ ID NO: 1124490 - RNA, 19 nt, Artificial Sequence
  Description of Artificial Sequence: Synthetic oligonucleotide
acggaguugaucugggcau

SEQ ID NO: 1124491 - RNA, 19 nt, Artificial Sequence
  Description of Artificial Sequence: Synthetic oligonucleotide
cacgaacacagcuucauaa

SEQ ID NO: 1124492 - RNA, 19 nt, Artificial Sequence
  Description of Artificial Sequence: Synthetic oligonucleotide
agcauauugcagaccucgc

SEQ ID NO: 1124493 - RNA, 19 nt, Artificial Sequence
  Description of Artificial Sequence: Synthetic oligonucleotide
gcugaugaagagcugcacc

SEQ ID NO: 1124494 - RNA, 19 nt, Artificial Sequence
  Description of Artificial Sequence: Synthetic oligonucleotide
gagacgaaugcuccucuga

SEQ ID NO: 1124495 - RNA, 19 nt, Artificial Sequence
  Description of Artificial Sequence: Synthetic oligonucleotide
agacgaaugcuccucugaa

SEQ ID NO: 1124496 - RNA, 19 nt, Artificial Sequence
  Description of Artificial Sequence: Synthetic oligonucleotide
acaccgaccacagaggcaa

SEQ ID NO: 1124497 - RNA, 19 nt, Artificial Sequence
  Description of Artificial Sequence: Synthetic oligonucleotide
aaccccagacuucugugua

SEQ ID NO: 1124498 - RNA, 19 nt, Artificial Sequence
  Description of Artificial Sequence: Synthetic oligonucleotide
guggacguucuuuggagac

SEQ ID NO: 1124499 - RNA, 19 nt, Artificial Sequence
  Description of Artificial Sequence: Synthetic oligonucleotide
gcgaacucgagaaaagucc

SEQ ID NO: 1124500 - RNA, 19 nt, Artificial Sequence
  Description of Artificial Sequence: Synthetic oligonucleotide
cuggagcgggguaaagggg

SEQ ID NO: 1124501 - RNA, 19 nt, Artificial Sequence
  Description of Artificial Sequence: Synthetic oligonucleotide
cauggcggaccucuucucc

SEQ ID NO: 1124502 - RNA, 19 nt, Artificial Sequence
  Description of Artificial Sequence: Synthetic oligonucleotide
cucagcauauugcagaccu

SEQ ID NO: 1124503 - RNA, 19 nt, Artificial Sequence
  Description of Artificial Sequence: Synthetic oligonucleotide
guauacucgcagaugugug

SEQ ID NO: 1124504 - RNA, 19 nt, Artificial Sequence
  Description of Artificial Sequence: Synthetic oligonucleotide
gcgaugaggaugucggagg

SEQ ID NO: 1124505 - RNA, 19 nt, Artificial Sequence
  Description of Artificial Sequence: Synthetic oligonucleotide
gaugguucucaagcccagg

SEQ ID NO: 1124506 - RNA, 19 nt, Artificial Sequence
  Description of Artificial Sequence: Synthetic oligonucleotide
guaauuucggagacgcaca

SEQ ID NO: 1124507 - RNA, 19 nt, Artificial Sequence
  Description of Artificial Sequence: Synthetic oligonucleotide
acugaggcaaaaucuuguu

SEQ ID NO: 1124508 - RNA, 19 nt, Artificial Sequence
  Description of Artificial Sequence: Synthetic oligonucleotide
ggagguuuaaauguuucca

SEQ ID NO: 1124509 - RNA, 19 nt, Artificial Sequence
  Description of Artificial Sequence: Synthetic oligonucleotide
uucggagguuuaaauguuu

SEQ ID NO: 1124510 - RNA, 19 nt, Artificial Sequence
  Description of Artificial Sequence: Synthetic oligonucleotide
acaugcgaacucgagaaaa

SEQ ID NO: 1124511 - RNA, 19 nt, Artificial Sequence
  Description of Artificial Sequence: Synthetic oligonucleotide
gagguuuaaauguuuccau

SEQ ID NO: 1124512 - RNA, 19 nt, Artificial Sequence
  Description of Artificial Sequence: Synthetic oligonucleotide
agcuuggaccuuccuuuuc

SEQ ID NO: 1124513 - RNA, 19 nt, Artificial Sequence
  Description of Artificial Sequence: Synthetic oligonucleotide
ucuuucuggagcgggguaa

SEQ ID NO: 1124514 - RNA, 19 nt, Artificial Sequence
  Description of Artificial Sequence: Synthetic oligonucleotide
aggcuucugaagaugaagu

SEQ ID NO: 1124515 - RNA, 19 nt, Artificial Sequence
  Description of Artificial Sequence: Synthetic oligonucleotide
ggggacauagaugagcgug

SEQ ID NO: 1124516 - RNA, 19 nt, Artificial Sequence
  Description of Artificial Sequence: Synthetic oligonucleotide
agagacgaaugcuccucug

SEQ ID NO: 1124517 - RNA, 19 nt, Artificial Sequence
  Description of Artificial Sequence: Synthetic oligonucleotide
ggguaaaggggcuauuuga

SEQ ID NO: 1124518 - RNA, 19 nt, Artificial Sequence
  Description of Artificial Sequence: Synthetic oligonucleotide
gucgaugaugagaagcuca

SEQ ID NO: 1124519 - RNA, 19 nt, Artificial Sequence
  Description of Artificial Sequence: Synthetic oligonucleotide
guucaccaaaugcaagaca

SEQ ID NO: 1124520 - RNA, 19 nt, Artificial Sequence
  Description of Artificial Sequence: Synthetic oligonucleotide
cuggguagaacaggucccg

SEQ ID NO: 1124521 - RNA, 19 nt, Artificial Sequence
  Description of Artificial Sequence: Synthetic oligonucleotide
caccccaauccugaagugg

SEQ ID NO: 1124522 - RNA, 19 nt, Artificial Sequence
  Description of Artificial Sequence: Synthetic oligonucleotide
uggaccaguuauugaggcu

SEQ ID NO: 1124523 - RNA, 19 nt, Artificial Sequence
  Description of Artificial Sequence: Synthetic oligonucleotide
ugccaccccaauccugaag

SEQ ID NO: 1124524 - RNA, 19 nt, Artificial Sequence
  Description of Artificial Sequence: Synthetic oligonucleotide
cuaucacugaagugacauc

SEQ ID NO: 1124525 - RNA, 19 nt, Artificial Sequence
  Description of Artificial Sequence: Synthetic oligonucleotide
cugggcaucguauuuggaa

SEQ ID NO: 1124526 - RNA, 19 nt, Artificial Sequence
  Description of Artificial Sequence: Synthetic oligonucleotide
ccauuuuagugcuggguag

SEQ ID NO: 1124527 - RNA, 19 nt, Artificial Sequence
  Description of Artificial Sequence: Synthetic oligonucleotide
gccauacucucccugaaac

SEQ ID NO: 1124528 - RNA, 19 nt, Artificial Sequence
  Description of Artificial Sequence: Synthetic oligonucleotide
ggcgguaguaccuggacca

SEQ ID NO: 1124529 - RNA, 19 nt, Artificial Sequence
  Description of Artificial Sequence: Synthetic oligonucleotide
cuucagguuagguggucuc

SEQ ID NO: 1124530 - RNA, 19 nt, Artificial Sequence
  Description of Artificial Sequence: Synthetic oligonucleotide
gcaccuuaggccugguuag

SEQ ID NO: 1124531 - RNA, 19 nt, Artificial Sequence
  Description of Artificial Sequence: Synthetic oligonucleotide
accgaccacagaggcaagc

SEQ ID NO: 1124532 - RNA, 19 nt, Artificial Sequence
  Description of Artificial Sequence: Synthetic oligonucleotide
cuguuguuagcuaacacuu

SEQ ID NO: 1124533 - RNA, 19 nt, Artificial Sequence
  Description of Artificial Sequence: Synthetic oligonucleotide
gaagugaggguagguuggc

SEQ ID NO: 1124534 - RNA, 19 nt, Artificial Sequence
  Description of Artificial Sequence: Synthetic oligonucleotide
gaggaccagauaggaauug

SEQ ID NO: 1124535 - RNA, 19 nt, Artificial Sequence
  Description of Artificial Sequence: Synthetic oligonucleotide
uguugaacacggaguugau

SEQ ID NO: 1124536 - RNA, 19 nt, Artificial Sequence
  Description of Artificial Sequence: Synthetic oligonucleotide
guccgcucuggguagaaca

SEQ ID NO: 1124537 - RNA, 19 nt, Artificial Sequence
  Description of Artificial Sequence: Synthetic oligonucleotide
cuccacaugcgaacucgag

SEQ ID NO: 1124538 - RNA, 19 nt, Artificial Sequence
  Description of Artificial Sequence: Synthetic oligonucleotide
ggaccaguuauugaggcuc

SEQ ID NO: 1124539 - RNA, 19 nt, Artificial Sequence
  Description of Artificial Sequence: Synthetic oligonucleotide
guucauagaauaucagguu

SEQ ID NO: 1124540 - RNA, 19 nt, Artificial Sequence
  Description of Artificial Sequence: Synthetic oligonucleotide
agguuagguggucucuccu

SEQ ID NO: 1124541 - RNA, 19 nt, Artificial Sequence
  Description of Artificial Sequence: Synthetic oligonucleotide
augaaaagguggacguucu

SEQ ID NO: 1124542 - RNA, 19 nt, Artificial Sequence
  Description of Artificial Sequence: Synthetic oligonucleotide
ugcugcccgcucgacaccg

SEQ ID NO: 1124543 - RNA, 19 nt, Artificial Sequence
  Description of Artificial Sequence: Synthetic oligonucleotide
ggauucuagaggcuucuga

SEQ ID NO: 1124544 - RNA, 19 nt, Artificial Sequence
  Description of Artificial Sequence: Synthetic oligonucleotide
cguauuuggaauagagcac

SEQ ID NO: 1124545 - RNA, 19 nt, Artificial Sequence
  Description of Artificial Sequence: Synthetic oligonucleotide
gaccaguuauugaggcucc

SEQ ID NO: 1124546 - RNA, 19 nt, Artificial Sequence
  Description of Artificial Sequence: Synthetic oligonucleotide
augcgaacucgagaaaagu

SEQ ID NO: 1124547 - RNA, 19 nt, Artificial Sequence
  Description of Artificial Sequence: Synthetic oligonucleotide
uacucgcagauguguguga

SEQ ID NO: 1124548 - RNA, 19 nt, Artificial Sequence
  Description of Artificial Sequence: Synthetic oligonucleotide
cuguguauacucgcagaug

SEQ ID NO: 1124549 - RNA, 19 nt, Artificial Sequence
  Description of Artificial Sequence: Synthetic oligonucleotide
gaacucgagaaaaguccac

SEQ ID NO: 1124550 - RNA, 19 nt, Artificial Sequence
  Description of Artificial Sequence: Synthetic oligonucleotide
aauuucggagacgcacaaa

SEQ ID NO: 1124551 - RNA, 19 nt, Artificial Sequence
  Description of Artificial Sequence: Synthetic oligonucleotide
aagagcugcaccacccgaa

SEQ ID NO: 1124552 - RNA, 19 nt, Artificial Sequence
  Description of Artificial Sequence: Synthetic oligonucleotide
agcuucccgaaagggcacc

SEQ ID NO: 1124553 - RNA, 19 nt, Artificial Sequence
  Description of Artificial Sequence: Synthetic oligonucleotide
guagaacaggucccgguaa

SEQ ID NO: 1124554 - RNA, 19 nt, Artificial Sequence
  Description of Artificial Sequence: Synthetic oligonucleotide
cucgcagaugugugugaag

SEQ ID NO: 1124555 - RNA, 19 nt, Artificial Sequence
  Description of Artificial Sequence: Synthetic oligonucleotide
ggcaucuaucacugaagug

SEQ ID NO: 1124556 - RNA, 19 nt, Artificial Sequence
  Description of Artificial Sequence: Synthetic oligonucleotide
aggcaaaaucuuguuuaug

SEQ ID NO: 1124557 - RNA, 19 nt, Artificial Sequence
  Description of Artificial Sequence: Synthetic oligonucleotide
gaagaagugccgagcccug

SEQ ID NO: 1124558 - RNA, 19 nt, Artificial Sequence
  Description of Artificial Sequence: Synthetic oligonucleotide
cauacucucccugaaaccu

SEQ ID NO: 1124559 - RNA, 19 nt, Artificial Sequence
  Description of Artificial Sequence: Synthetic oligonucleotide
cucucuccggugaugaaaa

SEQ ID NO: 1124560 - RNA, 19 nt, Artificial Sequence
  Description of Artificial Sequence: Synthetic oligonucleotide
cuccggugaugaaaaggug

SEQ ID NO: 1124561 - RNA, 19 nt, Artificial Sequence
  Description of Artificial Sequence: Synthetic oligonucleotide
cugaaguauugccacccca

SEQ ID NO: 1124562 - RNA, 19 nt, Artificial Sequence
  Description of Artificial Sequence: Synthetic oligonucleotide
ggaaacguuccgugaggag

SEQ ID NO: 1124563 - RNA, 19 nt, Artificial Sequence
  Description of Artificial Sequence: Synthetic oligonucleotide
aaguaauuucggagacgca

SEQ ID NO: 1124564 - RNA, 19 nt, Artificial Sequence
  Description of Artificial Sequence: Synthetic oligonucleotide
agguaaaugucagccuggu

SEQ ID NO: 1124565 - RNA, 19 nt, Artificial Sequence
  Description of Artificial Sequence: Synthetic oligonucleotide
uuagcccuuggucccugaa

SEQ ID NO: 1124566 - RNA, 19 nt, Artificial Sequence
  Description of Artificial Sequence: Synthetic oligonucleotide
gacggcaucccgauacuga

SEQ ID NO: 1124567 - RNA, 19 nt, Artificial Sequence
  Description of Artificial Sequence: Synthetic oligonucleotide
aagugaggguagguuggca

SEQ ID NO: 1124568 - RNA, 19 nt, Artificial Sequence
  Description of Artificial Sequence: Synthetic oligonucleotide
ucauaauccucgggccucu

SEQ ID NO: 1124569 - RNA, 19 nt, Artificial Sequence
  Description of Artificial Sequence: Synthetic oligonucleotide
uggacguucuuuggagacu

SEQ ID NO: 1124570 - RNA, 19 nt, Artificial Sequence
  Description of Artificial Sequence: Synthetic oligonucleotide
acguucuuuggagacugca

SEQ ID NO: 1124571 - RNA, 19 nt, Artificial Sequence
  Description of Artificial Sequence: Synthetic oligonucleotide
ccaaguuucuggcuccggc

SEQ ID NO: 1124572 - RNA, 19 nt, Artificial Sequence
  Description of Artificial Sequence: Synthetic oligonucleotide
ugccgagcccuggaaaccc

SEQ ID NO: 1124573 - RNA, 19 nt, Artificial Sequence
  Description of Artificial Sequence: Synthetic oligonucleotide
cuggcgguaguaccuggac

SEQ ID NO: 1124574 - RNA, 19 nt, Artificial Sequence
  Description of Artificial Sequence: Synthetic oligonucleotide
acauuccucacggccaccu

SEQ ID NO: 1124575 - RNA, 19 nt, Artificial Sequence
  Description of Artificial Sequence: Synthetic oligonucleotide
aggcuccacaugcgaacuc

SEQ ID NO: 1124576 - RNA, 19 nt, Artificial Sequence
  Description of Artificial Sequence: Synthetic oligonucleotide
ggauuggagccauacucuc

SEQ ID NO: 1124577 - RNA, 19 nt, Artificial Sequence
  Description of Artificial Sequence: Synthetic oligonucleotide
ggacguucuuuggagacug

SEQ ID NO: 1124578 - RNA, 19 nt, Artificial Sequence
  Description of Artificial Sequence: Synthetic oligonucleotide
gaggcaaaaucuuguuuau

SEQ ID NO: 1124579 - RNA, 19 nt, Artificial Sequence
  Description of Artificial Sequence: Synthetic oligonucleotide
ggaccagauaggaauuggc

SEQ ID NO: 1124580 - RNA, 19 nt, Artificial Sequence
  Description of Artificial Sequence: Synthetic oligonucleotide
ggaauagagcacagugcag

SEQ ID NO: 1124581 - RNA, 19 nt, Artificial Sequence
  Description of Artificial Sequence: Synthetic oligonucleotide
gcaguucauagaauaucag

SEQ ID NO: 1124582 - RNA, 19 nt, Artificial Sequence
  Description of Artificial Sequence: Synthetic oligonucleotide
ugacggcaucccgauacug

SEQ ID NO: 1124583 - RNA, 19 nt, Artificial Sequence
  Description of Artificial Sequence: Synthetic oligonucleotide
augacggcaucccgauacu

SEQ ID NO: 1124584 - RNA, 19 nt, Artificial Sequence
  Description of Artificial Sequence: Synthetic oligonucleotide
ucaacauccuucggagguu

SEQ ID NO: 1124585 - RNA, 19 nt, Artificial Sequence
  Description of Artificial Sequence: Synthetic oligonucleotide
uggauucuagaggcuucug

SEQ ID NO: 1124586 - RNA, 19 nt, Artificial Sequence
  Description of Artificial Sequence: Synthetic oligonucleotide
ggagccauacucucccuga

SEQ ID NO: 1124587 - RNA, 19 nt, Artificial Sequence
  Description of Artificial Sequence: Synthetic oligonucleotide
ccacuauaagcaccuuagg

SEQ ID NO: 1124588 - RNA, 19 nt, Artificial Sequence
  Description of Artificial Sequence: Synthetic oligonucleotide
gaaguauugccaccccaau

SEQ ID NO: 1124589 - RNA, 19 nt, Artificial Sequence
  Description of Artificial Sequence: Synthetic oligonucleotide
guguauacucgcagaugug

SEQ ID NO: 1124590 - RNA, 19 nt, Artificial Sequence
  Description of Artificial Sequence: Synthetic oligonucleotide
ugcccgcucgacaccgacc

SEQ ID NO: 1124591 - RNA, 19 nt, Artificial Sequence
  Description of Artificial Sequence: Synthetic oligonucleotide
ccacaugcgaacucgagaa

SEQ ID NO: 1124592 - RNA, 19 nt, Artificial Sequence
  Description of Artificial Sequence: Synthetic oligonucleotide
cuacuguuguuagcuaaca

SEQ ID NO: 1124593 - RNA, 19 nt, Artificial Sequence
  Description of Artificial Sequence: Synthetic oligonucleotide
aggacgugguuuauggcau

SEQ ID NO: 1124594 - RNA, 19 nt, Artificial Sequence
  Description of Artificial Sequence: Synthetic oligonucleotide
cuccucgcggcacucagca

SEQ ID NO: 1124595 - RNA, 19 nt, Artificial Sequence
  Description of Artificial Sequence: Synthetic oligonucleotide
ggaccuuccuuuucuuuca

SEQ ID NO: 1124596 - RNA, 19 nt, Artificial Sequence
  Description of Artificial Sequence: Synthetic oligonucleotide
aacguuccgugaggagcag

SEQ ID NO: 1124597 - RNA, 19 nt, Artificial Sequence
  Description of Artificial Sequence: Synthetic oligonucleotide
aaguaggaggggacauaga

SEQ ID NO: 1124598 - RNA, 19 nt, Artificial Sequence
  Description of Artificial Sequence: Synthetic oligonucleotide
cuuaggccugguuagcccu

SEQ ID NO: 1124599 - RNA, 19 nt, Artificial Sequence
  Description of Artificial Sequence: Synthetic oligonucleotide
agguggucucuccucugga

SEQ ID NO: 1124600 - RNA, 19 nt, Artificial Sequence
  Description of Artificial Sequence: Synthetic oligonucleotide
ccuuaggccugguuagccc

SEQ ID NO: 1124601 - RNA, 19 nt, Artificial Sequence
  Description of Artificial Sequence: Synthetic oligonucleotide
ccuucggagguuuaaaugu

SEQ ID NO: 1124602 - RNA, 19 nt, Artificial Sequence
  Description of Artificial Sequence: Synthetic oligonucleotide
ggcguagagacgaaugcuc

SEQ ID NO: 1124603 - RNA, 19 nt, Artificial Sequence
  Description of Artificial Sequence: Synthetic oligonucleotide
guacacauggcggaccucu

SEQ ID NO: 1124604 - RNA, 19 nt, Artificial Sequence
  Description of Artificial Sequence: Synthetic oligonucleotide
uuaggccugguuagcccuu

SEQ ID NO: 1124605 - RNA, 19 nt, Artificial Sequence
  Description of Artificial Sequence: Synthetic oligonucleotide
aguccgcucuggguagaac

SEQ ID NO: 1124606 - RNA, 19 nt, Artificial Sequence
  Description of Artificial Sequence: Synthetic oligonucleotide
aaggggcuauuugauuguu

SEQ ID NO: 1124607 - RNA, 19 nt, Artificial Sequence
  Description of Artificial Sequence: Synthetic oligonucleotide
cggagguuuaaauguuucc

SEQ ID NO: 1124608 - RNA, 19 nt, Artificial Sequence
  Description of Artificial Sequence: Synthetic oligonucleotide
gcguagagacgaaugcucc

SEQ ID NO: 1124609 - RNA, 19 nt, Artificial Sequence
  Description of Artificial Sequence: Synthetic oligonucleotide
ucuccucuccucgcggcac

SEQ ID NO: 1124610 - RNA, 19 nt, Artificial Sequence
  Description of Artificial Sequence: Synthetic oligonucleotide
gcagaccucgcuguagaag

SEQ ID NO: 1124611 - RNA, 19 nt, Artificial Sequence
  Description of Artificial Sequence: Synthetic oligonucleotide
cagcuucccgaaagggcac

SEQ ID NO: 1124612 - RNA, 19 nt, Artificial Sequence
  Description of Artificial Sequence: Synthetic oligonucleotide
gguggacguucuuuggaga

SEQ ID NO: 1124613 - RNA, 19 nt, Artificial Sequence
  Description of Artificial Sequence: Synthetic oligonucleotide
guaaaggggcuauuugauu

SEQ ID NO: 1124614 - RNA, 19 nt, Artificial Sequence
  Description of Artificial Sequence: Synthetic oligonucleotide
acauccuucggagguuuaa

SEQ ID NO: 1124615 - RNA, 19 nt, Artificial Sequence
  Description of Artificial Sequence: Synthetic oligonucleotide
aggggcuauuugauuguug

SEQ ID NO: 1124616 - RNA, 19 nt, Artificial Sequence
  Description of Artificial Sequence: Synthetic oligonucleotide
aagcaccuuaggccugguu

SEQ ID NO: 1124617 - RNA, 19 nt, Artificial Sequence
  Description of Artificial Sequence: Synthetic oligonucleotide
gagccauacucucccugaa

SEQ ID NO: 1124618 - RNA, 19 nt, Artificial Sequence
  Description of Artificial Sequence: Synthetic oligonucleotide
agugcuuguugaacacgga

SEQ ID NO: 1124619 - RNA, 19 nt, Artificial Sequence
  Description of Artificial Sequence: Synthetic oligonucleotide
gugaaaccuggcaucuauc

SEQ ID NO: 1124620 - RNA, 19 nt, Artificial Sequence
  Description of Artificial Sequence: Synthetic oligonucleotide
uacacauggcggaccucuu

SEQ ID NO: 1124621 - RNA, 19 nt, Artificial Sequence
  Description of Artificial Sequence: Synthetic oligonucleotide
cuggcuccggcgccuacug

SEQ ID NO: 1124622 - RNA, 19 nt, Artificial Sequence
  Description of Artificial Sequence: Synthetic oligonucleotide
ucgcuuugaggacgugguu

SEQ ID NO: 1124623 - RNA, 19 nt, Artificial Sequence
  Description of Artificial Sequence: Synthetic oligonucleotide
aagugaaaccuggcaucua

SEQ ID NO: 1124624 - RNA, 19 nt, Artificial Sequence
  Description of Artificial Sequence: Synthetic oligonucleotide
cauagaauaucagguuccu

SEQ ID NO: 1124625 - RNA, 19 nt, Artificial Sequence
  Description of Artificial Sequence: Synthetic oligonucleotide
ccaggacgggccauuuuag

SEQ ID NO: 1124626 - RNA, 19 nt, Artificial Sequence
  Description of Artificial Sequence: Synthetic oligonucleotide
guagaagugaggguagguu

SEQ ID NO: 1124627 - RNA, 19 nt, Artificial Sequence
  Description of Artificial Sequence: Synthetic oligonucleotide
caccuuaggccugguuagc

SEQ ID NO: 1124628 - RNA, 19 nt, Artificial Sequence
  Description of Artificial Sequence: Synthetic oligonucleotide
uuauggcaugcaggcagua

SEQ ID NO: 1124629 - RNA, 19 nt, Artificial Sequence
  Description of Artificial Sequence: Synthetic oligonucleotide
uggcggaccucuucuccau

SEQ ID NO: 1124630 - RNA, 19 nt, Artificial Sequence
  Description of Artificial Sequence: Synthetic oligonucleotide
cauguucccaguucugcau

SEQ ID NO: 1124631 - RNA, 19 nt, Artificial Sequence
  Description of Artificial Sequence: Synthetic oligonucleotide
cauuuuagugcuggguagu

SEQ ID NO: 1124632 - RNA, 19 nt, Artificial Sequence
  Description of Artificial Sequence: Synthetic oligonucleotide
cgaaagggcaccacuauaa

SEQ ID NO: 1124633 - RNA, 19 nt, Artificial Sequence
  Description of Artificial Sequence: Synthetic oligonucleotide
gccuacuguuguuagcuaa

SEQ ID NO: 1124634 - RNA, 19 nt, Artificial Sequence
  Description of Artificial Sequence: Synthetic oligonucleotide
gacauuccucacggccacc

SEQ ID NO: 1124635 - RNA, 19 nt, Artificial Sequence
  Description of Artificial Sequence: Synthetic oligonucleotide
aucuaucacugaagugaca

SEQ ID NO: 1124636 - RNA, 19 nt, Artificial Sequence
  Description of Artificial Sequence: Synthetic oligonucleotide
gaggguagguuggcaguuc

SEQ ID NO: 1124637 - RNA, 19 nt, Artificial Sequence
  Description of Artificial Sequence: Synthetic oligonucleotide
gugccgagcccuggaaacc

SEQ ID NO: 1124638 - RNA, 19 nt, Artificial Sequence
  Description of Artificial Sequence: Synthetic oligonucleotide
gcgugugggacaugacggc

SEQ ID NO: 1124639 - RNA, 19 nt, Artificial Sequence
  Description of Artificial Sequence: Synthetic oligonucleotide
acgugguuuauggcaugca

SEQ ID NO: 1124640 - RNA, 19 nt, Artificial Sequence
  Description of Artificial Sequence: Synthetic oligonucleotide
ccagauaggaauuggcuau

SEQ ID NO: 1124641 - RNA, 19 nt, Artificial Sequence
  Description of Artificial Sequence: Synthetic oligonucleotide
caccccaugggacuccaaa

SEQ ID NO: 1124642 - RNA, 19 nt, Artificial Sequence
  Description of Artificial Sequence: Synthetic oligonucleotide
ccuggcaucuaucacugaa

SEQ ID NO: 1124643 - RNA, 19 nt, Artificial Sequence
  Description of Artificial Sequence: Synthetic oligonucleotide
ggagccugucauugggaca

SEQ ID NO: 1124644 - RNA, 19 nt, Artificial Sequence
  Description of Artificial Sequence: Synthetic oligonucleotide
ggcgccuacuguuguuagc

SEQ ID NO: 1124645 - RNA, 19 nt, Artificial Sequence
  Description of Artificial Sequence: Synthetic oligonucleotide
gguaaaggggcuauuugau

SEQ ID NO: 1124646 - RNA, 19 nt, Artificial Sequence
  Description of Artificial Sequence: Synthetic oligonucleotide
gggcauucgcuuugaggac

SEQ ID NO: 1124647 - RNA, 19 nt, Artificial Sequence
  Description of Artificial Sequence: Synthetic oligonucleotide
gcaguacacauggcggacc

SEQ ID NO: 1124648 - RNA, 19 nt, Artificial Sequence
  Description of Artificial Sequence: Synthetic oligonucleotide
gcauauugcagaccucgcu

SEQ ID NO: 1124649 - RNA, 19 nt, Artificial Sequence
  Description of Artificial Sequence: Synthetic oligonucleotide
ugguuagcccuuggucccu

SEQ ID NO: 1124650 - RNA, 19 nt, Artificial Sequence
  Description of Artificial Sequence: Synthetic oligonucleotide
ggacgugguuuauggcaug

SEQ ID NO: 1124651 - RNA, 19 nt, Artificial Sequence
  Description of Artificial Sequence: Synthetic oligonucleotide
aucucucuccggugaugaa

SEQ ID NO: 1124652 - RNA, 19 nt, Artificial Sequence
  Description of Artificial Sequence: Synthetic oligonucleotide
gggagcugcaccaacacau

SEQ ID NO: 1124653 - RNA, 19 nt, Artificial Sequence
  Description of Artificial Sequence: Synthetic oligonucleotide
cuucggagguuuaaauguu

SEQ ID NO: 1124654 - RNA, 19 nt, Artificial Sequence
  Description of Artificial Sequence: Synthetic oligonucleotide
ccgguaagaauucauaauu

SEQ ID NO: 1124655 - RNA, 19 nt, Artificial Sequence
  Description of Artificial Sequence: Synthetic oligonucleotide
agcgggguaaaggggcuau

SEQ ID NO: 1124656 - RNA, 19 nt, Artificial Sequence
  Description of Artificial Sequence: Synthetic oligonucleotide
gggcaccacuauaagcacc

SEQ ID NO: 1124657 - RNA, 19 nt, Artificial Sequence
  Description of Artificial Sequence: Synthetic oligonucleotide
ggaauuggcuauugguuuu

SEQ ID NO: 1124658 - RNA, 19 nt, Artificial Sequence
  Description of Artificial Sequence: Synthetic oligonucleotide
ccgugaggagcagaaacug

SEQ ID NO: 1124659 - RNA, 19 nt, Artificial Sequence
  Description of Artificial Sequence: Synthetic oligonucleotide
ggcaguacacauggcggac

SEQ ID NO: 1124660 - RNA, 19 nt, Artificial Sequence
  Description of Artificial Sequence: Synthetic oligonucleotide
gcccgcucgacaccgacca

SEQ ID NO: 1124661 - RNA, 19 nt, Artificial Sequence
  Description of Artificial Sequence: Synthetic oligonucleotide
caaaguaggaggggacaua

SEQ ID NO: 1124662 - RNA, 19 nt, Artificial Sequence
  Description of Artificial Sequence: Synthetic oligonucleotide
cugaggcaaaaucuuguuu

SEQ ID NO: 1124663 - RNA, 19 nt, Artificial Sequence
  Description of Artificial Sequence: Synthetic oligonucleotide
cugcccgcucgacaccgac

SEQ ID NO: 1124664 - RNA, 19 nt, Artificial Sequence
  Description of Artificial Sequence: Synthetic oligonucleotide
caguacacauggcggaccu

SEQ ID NO: 1124665 - RNA, 19 nt, Artificial Sequence
  Description of Artificial Sequence: Synthetic oligonucleotide
cacaugcgaacucgagaaa

SEQ ID NO: 1124666 - RNA, 19 nt, Artificial Sequence
  Description of Artificial Sequence: Synthetic oligonucleotide
gcucaauagaagacaggaa

SEQ ID NO: 1124667 - RNA, 19 nt, Artificial Sequence
  Description of Artificial Sequence: Synthetic oligonucleotide
ucccaggacgggccauuuu

SEQ ID NO: 1124668 - RNA, 19 nt, Artificial Sequence
  Description of Artificial Sequence: Synthetic oligonucleotide
cuuucuggagcgggguaaa

SEQ ID NO: 1124669 - RNA, 19 nt, Artificial Sequence
  Description of Artificial Sequence: Synthetic oligonucleotide
gggcaucguauuuggaaua

SEQ ID NO: 1124670 - RNA, 19 nt, Artificial Sequence
  Description of Artificial Sequence: Synthetic oligonucleotide
ccucugggcaucguauuug

SEQ ID NO: 1124671 - RNA, 19 nt, Artificial Sequence
  Description of Artificial Sequence: Synthetic oligonucleotide
acaugacggcaucccgaua

SEQ ID NO: 1124672 - RNA, 19 nt, Artificial Sequence
  Description of Artificial Sequence: Synthetic oligonucleotide
caucaauguugcccacgaa

SEQ ID NO: 1124673 - RNA, 19 nt, Artificial Sequence
  Description of Artificial Sequence: Synthetic oligonucleotide
cgguaagaauucauaauua

SEQ ID NO: 1124674 - RNA, 19 nt, Artificial Sequence
  Description of Artificial Sequence: Synthetic oligonucleotide
uccggcgccuacuguuguu

SEQ ID NO: 1124675 - RNA, 19 nt, Artificial Sequence
  Description of Artificial Sequence: Synthetic oligonucleotide
caccgaccacagaggcaag

SEQ ID NO: 1124676 - RNA, 19 nt, Artificial Sequence
  Description of Artificial Sequence: Synthetic oligonucleotide
cauucgcuuugaggacgug

SEQ ID NO: 1124677 - RNA, 19 nt, Artificial Sequence
  Description of Artificial Sequence: Synthetic oligonucleotide
acguuccgugaggagcaga

SEQ ID NO: 1124678 - RNA, 19 nt, Artificial Sequence
  Description of Artificial Sequence: Synthetic oligonucleotide
cgcucgacaccgaccacag

SEQ ID NO: 1124679 - RNA, 19 nt, Artificial Sequence
  Description of Artificial Sequence: Synthetic oligonucleotide
gggacauagaugagcgugu

SEQ ID NO: 1124680 - RNA, 19 nt, Artificial Sequence
  Description of Artificial Sequence: Synthetic oligonucleotide
uccucgcggcacucagcau

SEQ ID NO: 1124681 - RNA, 19 nt, Artificial Sequence
  Description of Artificial Sequence: Synthetic oligonucleotide
cacaugacugauggagccu

SEQ ID NO: 1124682 - RNA, 19 nt, Artificial Sequence
  Description of Artificial Sequence: Synthetic oligonucleotide
cucacggccaccuguccuu

SEQ ID NO: 1124683 - RNA, 19 nt, Artificial Sequence
  Description of Artificial Sequence: Synthetic oligonucleotide
caucuugggcuuccauccu

SEQ ID NO: 1124684 - RNA, 19 nt, Artificial Sequence
  Description of Artificial Sequence: Synthetic oligonucleotide
guccaccccaugggacucc

SEQ ID NO: 1124685 - RNA, 19 nt, Artificial Sequence
  Description of Artificial Sequence: Synthetic oligonucleotide
cucgcggcacucagcauau

SEQ ID NO: 1124686 - RNA, 19 nt, Artificial Sequence
  Description of Artificial Sequence: Synthetic oligonucleotide
cccaggacgggccauuuua

SEQ ID NO: 1124687 - RNA, 19 nt, Artificial Sequence
  Description of Artificial Sequence: Synthetic oligonucleotide
guuucuggcuccggcgccu

SEQ ID NO: 1124688 - RNA, 19 nt, Artificial Sequence
  Description of Artificial Sequence: Synthetic oligonucleotide
ggaugucggaggaguaaaa

SEQ ID NO: 1124689 - RNA, 19 nt, Artificial Sequence
  Description of Artificial Sequence: Synthetic oligonucleotide
cccgguaagaauucauaau

SEQ ID NO: 1124690 - RNA, 19 nt, Artificial Sequence
  Description of Artificial Sequence: Synthetic oligonucleotide
ccucgcggcacucagcaua

SEQ ID NO: 1124691 - RNA, 19 nt, Artificial Sequence
  Description of Artificial Sequence: Synthetic oligonucleotide
gguuagcccuuggucccug

SEQ ID NO: 1124692 - RNA, 19 nt, Artificial Sequence
  Description of Artificial Sequence: Synthetic oligonucleotide
cggagacgcacaaagucaa

SEQ ID NO: 1124693 - RNA, 19 nt, Artificial Sequence
  Description of Artificial Sequence: Synthetic oligonucleotide
ggaagacaugugggagcug

SEQ ID NO: 1124694 - RNA, 19 nt, Artificial Sequence
  Description of Artificial Sequence: Synthetic oligonucleotide
gggcguagagacgaaugcu

SEQ ID NO: 1124695 - RNA, 19 nt, Artificial Sequence
  Description of Artificial Sequence: Synthetic oligonucleotide
ccccaauccugaagugguc

SEQ ID NO: 1124696 - RNA, 19 nt, Artificial Sequence
  Description of Artificial Sequence: Synthetic oligonucleotide
gcuggguaguuggagggcu

SEQ ID NO: 1124697 - RNA, 19 nt, Artificial Sequence
  Description of Artificial Sequence: Synthetic oligonucleotide
ccccaaguuucuggcuccg

SEQ ID NO: 1124698 - RNA, 19 nt, Artificial Sequence
  Description of Artificial Sequence: Synthetic oligonucleotide
gcuccacaugcgaacucga

SEQ ID NO: 1124699 - RNA, 19 nt, Artificial Sequence
  Description of Artificial Sequence: Synthetic oligonucleotide
ccgaaagggcaccacuaua

SEQ ID NO: 1124700 - RNA, 19 nt, Artificial Sequence
  Description of Artificial Sequence: Synthetic oligonucleotide
cagauaggaauuggcuauu

SEQ ID NO: 1124701 - RNA, 19 nt, Artificial Sequence
  Description of Artificial Sequence: Synthetic oligonucleotide
cauugacacagugcuuguu

SEQ ID NO: 1124702 - RNA, 19 nt, Artificial Sequence
  Description of Artificial Sequence: Synthetic oligonucleotide
gcaccacccgaagggcagc

SEQ ID NO: 1124703 - RNA, 19 nt, Artificial Sequence
  Description of Artificial Sequence: Synthetic oligonucleotide
gccgagcccuggaaacccc

SEQ ID NO: 1124704 - RNA, 19 nt, Artificial Sequence
  Description of Artificial Sequence: Synthetic oligonucleotide
cggcgccuacuguuguuag

SEQ ID NO: 1124705 - RNA, 19 nt, Artificial Sequence
  Description of Artificial Sequence: Synthetic oligonucleotide
cgaaugcuccucugaagua

SEQ ID NO: 1124706 - RNA, 19 nt, Artificial Sequence
  Description of Artificial Sequence: Synthetic oligonucleotide
ggucccgguaagaauucau

SEQ ID NO: 1124707 - RNA, 19 nt, Artificial Sequence
  Description of Artificial Sequence: Synthetic oligonucleotide
gcauucgcuuugaggacgu

SEQ ID NO: 1124708 - RNA, 19 nt, Artificial Sequence
  Description of Artificial Sequence: Synthetic oligonucleotide
cgugugggacaugacggca

SEQ ID NO: 1124709 - RNA, 19 nt, Artificial Sequence
  Description of Artificial Sequence: Synthetic oligonucleotide
gguuggcaguucauagaau

SEQ ID NO: 1124710 - RNA, 19 nt, Artificial Sequence
  Description of Artificial Sequence: Synthetic oligonucleotide
gccucugggcaucguauuu

SEQ ID NO: 1124711 - RNA, 19 nt, Artificial Sequence
  Description of Artificial Sequence: Synthetic oligonucleotide
cuccggcgccuacuguugu

SEQ ID NO: 1124712 - RNA, 19 nt, Artificial Sequence
  Description of Artificial Sequence: Synthetic oligonucleotide
caguccgcucuggguagaa

SEQ ID NO: 1124713 - RNA, 19 nt, Artificial Sequence
  Description of Artificial Sequence: Synthetic oligonucleotide
gcucgacaccgaccacaga

SEQ ID NO: 1124714 - RNA, 19 nt, Artificial Sequence
  Description of Artificial Sequence: Synthetic oligonucleotide
ccucacggccaccuguccu

SEQ ID NO: 1124715 - RNA, 19 nt, Artificial Sequence
  Description of Artificial Sequence: Synthetic oligonucleotide
ucgcggcacucagcauauu

SEQ ID NO: 1124716 - RNA, 19 nt, Artificial Sequence
  Description of Artificial Sequence: Synthetic oligonucleotide
cccacgaacacagcuucau

SEQ ID NO: 1124717 - RNA, 19 nt, Artificial Sequence
  Description of Artificial Sequence: Synthetic oligonucleotide
caccacccgaagggcagcu

SEQ ID NO: 1124718 - RNA, 19 nt, Artificial Sequence
  Description of Artificial Sequence: Synthetic oligonucleotide
cccgauacugaggcaaaau

SEQ ID NO: 1124719 - RNA, 19 nt, Artificial Sequence
  Description of Artificial Sequence: Synthetic oligonucleotide
cccgcucgacaccgaccac

SEQ ID NO: 1124720 - RNA, 19 nt, Artificial Sequence
  Description of Artificial Sequence: Synthetic oligonucleotide
cauaauccucgggccucuu

SEQ ID NO: 1124721 - RNA, 19 nt, Artificial Sequence
  Description of Artificial Sequence: Synthetic oligonucleotide
ccggcgccuacuguuguua

SEQ ID NO: 1124722 - RNA, 19 nt, Artificial Sequence
  Description of Artificial Sequence: Synthetic oligonucleotide
gucccaggacgggccauuu

SEQ ID NO: 1124723 - RNA, 19 nt, Artificial Sequence
  Description of Artificial Sequence: Synthetic oligonucleotide
ggcggaccucuucuccauu

SEQ ID NO: 1124724 - RNA, 19 nt, Artificial Sequence
  Description of Artificial Sequence: Synthetic oligonucleotide
cgccuacuguuguuagcua

SEQ ID NO: 1124725 - RNA, 19 nt, Artificial Sequence
  Description of Artificial Sequence: Synthetic oligonucleotide
gcugcccgcucgacaccga

SEQ ID NO: 1124726 - RNA, 19 nt, Artificial Sequence
  Description of Artificial Sequence: Synthetic oligonucleotide
gggcuugaaguggcagcuu

SEQ ID NO: 1124727 - RNA, 19 nt, Artificial Sequence
  Description of Artificial Sequence: Synthetic oligonucleotide
cgggguaaaggggcuauuu

SEQ ID NO: 1124728 - RNA, 19 nt, Artificial Sequence
  Description of Artificial Sequence: Synthetic oligonucleotide
gcgggguaaaggggcuauu

SEQ ID NO: 1124729 - RNA, 19 nt, Artificial Sequence
  Description of Artificial Sequence: Synthetic oligonucleotide
uaaucuggagaacagaugg

SEQ ID NO: 1124730 - RNA, 19 nt, Artificial Sequence
  Description of Artificial Sequence: Synthetic oligonucleotide
aacuuguggguccaaagcc

SEQ ID NO: 1124731 - RNA, 19 nt, Artificial Sequence
  Description of Artificial Sequence: Synthetic oligonucleotide
uucauugcauguauguggg

SEQ ID NO: 1124732 - RNA, 19 nt, Artificial Sequence
  Description of Artificial Sequence: Synthetic oligonucleotide
uauccuuuuacugucaugc

SEQ ID NO: 1124733 - RNA, 19 nt, Artificial Sequence
  Description of Artificial Sequence: Synthetic oligonucleotide
uguaugugggacauuuugg

SEQ ID NO: 1124734 - RNA, 19 nt, Artificial Sequence
  Description of Artificial Sequence: Synthetic oligonucleotide
gaacuggacaucuuccugg

SEQ ID NO: 1124735 - RNA, 19 nt, Artificial Sequence
  Description of Artificial Sequence: Synthetic oligonucleotide
aaugguucccuugcaaugg

SEQ ID NO: 1124736 - RNA, 19 nt, Artificial Sequence
  Description of Artificial Sequence: Synthetic oligonucleotide
guaugugggacauuuuggg

SEQ ID NO: 1124737 - RNA, 19 nt, Artificial Sequence
  Description of Artificial Sequence: Synthetic oligonucleotide
cuggcugaaguucacagcg

SEQ ID NO: 1124738 - RNA, 19 nt, Artificial Sequence
  Description of Artificial Sequence: Synthetic oligonucleotide
auguaugugggacauuuug

SEQ ID NO: 1124739 - RNA, 19 nt, Artificial Sequence
  Description of Artificial Sequence: Synthetic oligonucleotide
caggaagggaccuaaggcc

SEQ ID NO: 1124740 - RNA, 19 nt, Artificial Sequence
  Description of Artificial Sequence: Synthetic oligonucleotide
agcgauguccauguggagc

SEQ ID NO: 1124741 - RNA, 19 nt, Artificial Sequence
  Description of Artificial Sequence: Synthetic oligonucleotide
agguacauagaagucaaag

SEQ ID NO: 1124742 - RNA, 19 nt, Artificial Sequence
  Description of Artificial Sequence: Synthetic oligonucleotide
agggauucccggcagucgc

SEQ ID NO: 1124743 - RNA, 19 nt, Artificial Sequence
  Description of Artificial Sequence: Synthetic oligonucleotide
agaacuuguggguccaaag

SEQ ID NO: 1124744 - RNA, 19 nt, Artificial Sequence
  Description of Artificial Sequence: Synthetic oligonucleotide
ugcacgugggccacgauca

SEQ ID NO: 1124745 - RNA, 19 nt, Artificial Sequence
  Description of Artificial Sequence: Synthetic oligonucleotide
aacaauuggugugugcuga

SEQ ID NO: 1124746 - RNA, 19 nt, Artificial Sequence
  Description of Artificial Sequence: Synthetic oligonucleotide
acauuguggagaugaggac

SEQ ID NO: 1124747 - RNA, 19 nt, Artificial Sequence
  Description of Artificial Sequence: Synthetic oligonucleotide
gaaguuagggguccgguuc

SEQ ID NO: 1124748 - RNA, 19 nt, Artificial Sequence
  Description of Artificial Sequence: Synthetic oligonucleotide
cucagcgcagacauugugg

SEQ ID NO: 1124749 - RNA, 19 nt, Artificial Sequence
  Description of Artificial Sequence: Synthetic oligonucleotide
acuuguagggugccggccg

SEQ ID NO: 1124750 - RNA, 19 nt, Artificial Sequence
  Description of Artificial Sequence: Synthetic oligonucleotide
gaacacacaccccuggaac

SEQ ID NO: 1124751 - RNA, 19 nt, Artificial Sequence
  Description of Artificial Sequence: Synthetic oligonucleotide
ucuggagaacagaugggca

SEQ ID NO: 1124752 - RNA, 19 nt, Artificial Sequence
  Description of Artificial Sequence: Synthetic oligonucleotide
caccccuggaacaaguucc

SEQ ID NO: 1124753 - RNA, 19 nt, Artificial Sequence
  Description of Artificial Sequence: Synthetic oligonucleotide
uccgcuggcacgcugcucc

SEQ ID NO: 1124754 - RNA, 19 nt, Artificial Sequence
  Description of Artificial Sequence: Synthetic oligonucleotide
uccgcggugaaggagauga

SEQ ID NO: 1124755 - RNA, 19 nt, Artificial Sequence
  Description of Artificial Sequence: Synthetic oligonucleotide
uccucggucucucacuugc

SEQ ID NO: 1124756 - RNA, 19 nt, Artificial Sequence
  Description of Artificial Sequence: Synthetic oligonucleotide
aaugggaaggugugauaca

SEQ ID NO: 1124757 - RNA, 19 nt, Artificial Sequence
  Description of Artificial Sequence: Synthetic oligonucleotide
agaagccuaggccaguuca

SEQ ID NO: 1124758 - RNA, 19 nt, Artificial Sequence
  Description of Artificial Sequence: Synthetic oligonucleotide
aggucauggcuucagcauc

SEQ ID NO: 1124759 - RNA, 19 nt, Artificial Sequence
  Description of Artificial Sequence: Synthetic oligonucleotide
ucugagguacauagaaguc

SEQ ID NO: 1124760 - RNA, 19 nt, Artificial Sequence
  Description of Artificial Sequence: Synthetic oligonucleotide
aaaguucgcccgaaguuag

SEQ ID NO: 1124761 - RNA, 19 nt, Artificial Sequence
  Description of Artificial Sequence: Synthetic oligonucleotide
auugcauguaugugggaca

SEQ ID NO: 1124762 - RNA, 19 nt, Artificial Sequence
  Description of Artificial Sequence: Synthetic oligonucleotide
auuguggagaugaggacuc

SEQ ID NO: 1124763 - RNA, 19 nt, Artificial Sequence
  Description of Artificial Sequence: Synthetic oligonucleotide
gacgcgccuacaaaguucg

SEQ ID NO: 1124764 - RNA, 19 nt, Artificial Sequence
  Description of Artificial Sequence: Synthetic oligonucleotide
gucggguuugcgcagcucg

SEQ ID NO: 1124765 - RNA, 19 nt, Artificial Sequence
  Description of Artificial Sequence: Synthetic oligonucleotide
cauguggucucaagggcgg

SEQ ID NO: 1124766 - RNA, 19 nt, Artificial Sequence
  Description of Artificial Sequence: Synthetic oligonucleotide
cacagcgauguccaugugg

SEQ ID NO: 1124767 - RNA, 19 nt, Artificial Sequence
  Description of Artificial Sequence: Synthetic oligonucleotide
cuguuaaucuggagaacag

SEQ ID NO: 1124768 - RNA, 19 nt, Artificial Sequence
  Description of Artificial Sequence: Synthetic oligonucleotide
gagaugagagugccgucgg

SEQ ID NO: 1124769 - RNA, 19 nt, Artificial Sequence
  Description of Artificial Sequence: Synthetic oligonucleotide
aacgggaggaacaauuggu

SEQ ID NO: 1124770 - RNA, 19 nt, Artificial Sequence
  Description of Artificial Sequence: Synthetic oligonucleotide
agacuguagcggcaggcac

SEQ ID NO: 1124771 - RNA, 19 nt, Artificial Sequence
  Description of Artificial Sequence: Synthetic oligonucleotide
aaauccgcggugaaggaga

SEQ ID NO: 1124772 - RNA, 19 nt, Artificial Sequence
  Description of Artificial Sequence: Synthetic oligonucleotide
cauugcauguaugugggac

SEQ ID NO: 1124773 - RNA, 19 nt, Artificial Sequence
  Description of Artificial Sequence: Synthetic oligonucleotide
aagaagccuaggccaguuc

SEQ ID NO: 1124774 - RNA, 19 nt, Artificial Sequence
  Description of Artificial Sequence: Synthetic oligonucleotide
augaggucauggcuucagc

SEQ ID NO: 1124775 - RNA, 19 nt, Artificial Sequence
  Description of Artificial Sequence: Synthetic oligonucleotide
acaaaguucgcccgaaguu

SEQ ID NO: 1124776 - RNA, 19 nt, Artificial Sequence
  Description of Artificial Sequence: Synthetic oligonucleotide
agaaccuugccaaaguccu

SEQ ID NO: 1124777 - RNA, 19 nt, Artificial Sequence
  Description of Artificial Sequence: Synthetic oligonucleotide
uccaacgggaggaacaauu

SEQ ID NO: 1124778 - RNA, 19 nt, Artificial Sequence
  Description of Artificial Sequence: Synthetic oligonucleotide
gcacauguggucucaaggg

SEQ ID NO: 1124779 - RNA, 19 nt, Artificial Sequence
  Description of Artificial Sequence: Synthetic oligonucleotide
aaguuagggguccgguuca

SEQ ID NO: 1124780 - RNA, 19 nt, Artificial Sequence
  Description of Artificial Sequence: Synthetic oligonucleotide
aauucaaguuuuccuugua

SEQ ID NO: 1124781 - RNA, 19 nt, Artificial Sequence
  Description of Artificial Sequence: Synthetic oligonucleotide
acauguggucucaagggcg

SEQ ID NO: 1124782 - RNA, 19 nt, Artificial Sequence
  Description of Artificial Sequence: Synthetic oligonucleotide
cacauguggucucaagggc

SEQ ID NO: 1124783 - RNA, 19 nt, Artificial Sequence
  Description of Artificial Sequence: Synthetic oligonucleotide
acuuguggguccaaagccg

SEQ ID NO: 1124784 - RNA, 19 nt, Artificial Sequence
  Description of Artificial Sequence: Synthetic oligonucleotide
uucgcccgaaguuaggggu

SEQ ID NO: 1124785 - RNA, 19 nt, Artificial Sequence
  Description of Artificial Sequence: Synthetic oligonucleotide
agggcggcgaucucccugc

SEQ ID NO: 1124786 - RNA, 19 nt, Artificial Sequence
  Description of Artificial Sequence: Synthetic oligonucleotide
caacgggaggaacaauugg

SEQ ID NO: 1124787 - RNA, 19 nt, Artificial Sequence
  Description of Artificial Sequence: Synthetic oligonucleotide
ugcgaaugcacgugggcca

SEQ ID NO: 1124788 - RNA, 19 nt, Artificial Sequence
  Description of Artificial Sequence: Synthetic oligonucleotide
cugggugauauccuuuuac

SEQ ID NO: 1124789 - RNA, 19 nt, Artificial Sequence
  Description of Artificial Sequence: Synthetic oligonucleotide
ugugcguguccccgagucg

SEQ ID NO: 1124790 - RNA, 19 nt, Artificial Sequence
  Description of Artificial Sequence: Synthetic oligonucleotide
ggugacaaagcagagcccc

SEQ ID NO: 1124791 - RNA, 19 nt, Artificial Sequence
  Description of Artificial Sequence: Synthetic oligonucleotide
ugccaaaguccuucagucc

SEQ ID NO: 1124792 - RNA, 19 nt, Artificial Sequence
  Description of Artificial Sequence: Synthetic oligonucleotide
aguucgcccgaaguuaggg

SEQ ID NO: 1124793 - RNA, 19 nt, Artificial Sequence
  Description of Artificial Sequence: Synthetic oligonucleotide
aggugugauacaggaacac

SEQ ID NO: 1124794 - RNA, 19 nt, Artificial Sequence
  Description of Artificial Sequence: Synthetic oligonucleotide
gaaauccgcggugaaggag

SEQ ID NO: 1124795 - RNA, 19 nt, Artificial Sequence
  Description of Artificial Sequence: Synthetic oligonucleotide
aagccguucuuugcucccc

SEQ ID NO: 1124796 - RNA, 19 nt, Artificial Sequence
  Description of Artificial Sequence: Synthetic oligonucleotide
cugacucugccccuucucc

SEQ ID NO: 1124797 - RNA, 19 nt, Artificial Sequence
  Description of Artificial Sequence: Synthetic oligonucleotide
guacuugagcaugcaaggg

SEQ ID NO: 1124798 - RNA, 19 nt, Artificial Sequence
  Description of Artificial Sequence: Synthetic oligonucleotide
ugcugcgaaugcacguggg

SEQ ID NO: 1124799 - RNA, 19 nt, Artificial Sequence
  Description of Artificial Sequence: Synthetic oligonucleotide
cucugagguacauagaagu

SEQ ID NO: 1124800 - RNA, 19 nt, Artificial Sequence
  Description of Artificial Sequence: Synthetic oligonucleotide
ggagaugagagugccgucg

SEQ ID NO: 1124801 - RNA, 19 nt, Artificial Sequence
  Description of Artificial Sequence: Synthetic oligonucleotide
ugaaauccgcggugaagga

SEQ ID NO: 1124802 - RNA, 19 nt, Artificial Sequence
  Description of Artificial Sequence: Synthetic oligonucleotide
ucagacuguagcggcaggc

SEQ ID NO: 1124803 - RNA, 19 nt, Artificial Sequence
  Description of Artificial Sequence: Synthetic oligonucleotide
uccccuaggaucagggcuc

SEQ ID NO: 1124804 - RNA, 19 nt, Artificial Sequence
  Description of Artificial Sequence: Synthetic oligonucleotide
auccccacgacgugcugcg

SEQ ID NO: 1124805 - RNA, 19 nt, Artificial Sequence
  Description of Artificial Sequence: Synthetic oligonucleotide
guucgcccgaaguuagggg

SEQ ID NO: 1124806 - RNA, 19 nt, Artificial Sequence
  Description of Artificial Sequence: Synthetic oligonucleotide
aaggugugauacaggaaca

SEQ ID NO: 1124807 - RNA, 19 nt, Artificial Sequence
  Description of Artificial Sequence: Synthetic oligonucleotide
uguggucucaagggcggcg

SEQ ID NO: 1124808 - RNA, 19 nt, Artificial Sequence
  Description of Artificial Sequence: Synthetic oligonucleotide
gccacgaucagccacgcac

SEQ ID NO: 1124809 - RNA, 19 nt, Artificial Sequence
  Description of Artificial Sequence: Synthetic oligonucleotide
aguugggucccaggaaagg

SEQ ID NO: 1124810 - RNA, 19 nt, Artificial Sequence
  Description of Artificial Sequence: Synthetic oligonucleotide
cugagguacauagaaguca

SEQ ID NO: 1124811 - RNA, 19 nt, Artificial Sequence
  Description of Artificial Sequence: Synthetic oligonucleotide
agaugagagugccgucggg

SEQ ID NO: 1124812 - RNA, 19 nt, Artificial Sequence
  Description of Artificial Sequence: Synthetic oligonucleotide
ucggucucucacuugccca

SEQ ID NO: 1124813 - RNA, 19 nt, Artificial Sequence
  Description of Artificial Sequence: Synthetic oligonucleotide
cuugagcaugcaaggguac

SEQ ID NO: 1124814 - RNA, 19 nt, Artificial Sequence
  Description of Artificial Sequence: Synthetic oligonucleotide
gggagacgcgccuacaaag

SEQ ID NO: 1124815 - RNA, 19 nt, Artificial Sequence
  Description of Artificial Sequence: Synthetic oligonucleotide
ugcccaaaaguugucccug

SEQ ID NO: 1124816 - RNA, 19 nt, Artificial Sequence
  Description of Artificial Sequence: Synthetic oligonucleotide
agcgaggcaauuccaucug

SEQ ID NO: 1124817 - RNA, 19 nt, Artificial Sequence
  Description of Artificial Sequence: Synthetic oligonucleotide
cacaccucgcuccauccag

SEQ ID NO: 1124818 - RNA, 19 nt, Artificial Sequence
  Description of Artificial Sequence: Synthetic oligonucleotide
guugggucccaggaaaggc

SEQ ID NO: 1124819 - RNA, 19 nt, Artificial Sequence
  Description of Artificial Sequence: Synthetic oligonucleotide
uuugcgcagcucgaggcug

SEQ ID NO: 1124820 - RNA, 19 nt, Artificial Sequence
  Description of Artificial Sequence: Synthetic oligonucleotide
cucggucucucacuugccc

SEQ ID NO: 1124821 - RNA, 19 nt, Artificial Sequence
  Description of Artificial Sequence: Synthetic oligonucleotide
gguuugcgcagcucgaggc

SEQ ID NO: 1124822 - RNA, 19 nt, Artificial Sequence
  Description of Artificial Sequence: Synthetic oligonucleotide
acuguagcggcaggcacag

SEQ ID NO: 1124823 - RNA, 19 nt, Artificial Sequence
  Description of Artificial Sequence: Synthetic oligonucleotide
gacgugcugcgaaugcacg

SEQ ID NO: 1124824 - RNA, 19 nt, Artificial Sequence
  Description of Artificial Sequence: Synthetic oligonucleotide
aacugacucugccccuucu

SEQ ID NO: 1124825 - RNA, 19 nt, Artificial Sequence
  Description of Artificial Sequence: Synthetic oligonucleotide
ucagccacgcaccccgagu

SEQ ID NO: 1124826 - RNA, 19 nt, Artificial Sequence
  Description of Artificial Sequence: Synthetic oligonucleotide
guuaaucuggagaacagau

SEQ ID NO: 1124827 - RNA, 19 nt, Artificial Sequence
  Description of Artificial Sequence: Synthetic oligonucleotide
cuuguagggugccggccgg

SEQ ID NO: 1124828 - RNA, 19 nt, Artificial Sequence
  Description of Artificial Sequence: Synthetic oligonucleotide
agacgcgccuacaaaguuc

SEQ ID NO: 1124829 - RNA, 19 nt, Artificial Sequence
  Description of Artificial Sequence: Synthetic oligonucleotide
caaguugggucccaggaaa

SEQ ID NO: 1124830 - RNA, 19 nt, Artificial Sequence
  Description of Artificial Sequence: Synthetic oligonucleotide
gguccaaagccguucuuug

SEQ ID NO: 1124831 - RNA, 19 nt, Artificial Sequence
  Description of Artificial Sequence: Synthetic oligonucleotide
ggcacuucagacacgggag

SEQ ID NO: 1124832 - RNA, 19 nt, Artificial Sequence
  Description of Artificial Sequence: Synthetic oligonucleotide
gagagugccgucggguuug

SEQ ID NO: 1124833 - RNA, 19 nt, Artificial Sequence
  Description of Artificial Sequence: Synthetic oligonucleotide
ccggaugccacacuuguag

SEQ ID NO: 1124834 - RNA, 19 nt, Artificial Sequence
  Description of Artificial Sequence: Synthetic oligonucleotide
uguggguccaaagccguuc

SEQ ID NO: 1124835 - RNA, 19 nt, Artificial Sequence
  Description of Artificial Sequence: Synthetic oligonucleotide
cauuggggcugcccaaaag

SEQ ID NO: 1124836 - RNA, 19 nt, Artificial Sequence
  Description of Artificial Sequence: Synthetic oligonucleotide
cuacaaaguucgcccgaag

SEQ ID NO: 1124837 - RNA, 19 nt, Artificial Sequence
  Description of Artificial Sequence: Synthetic oligonucleotide
gcgccuacaaaguucgccc

SEQ ID NO: 1124838 - RNA, 19 nt, Artificial Sequence
  Description of Artificial Sequence: Synthetic oligonucleotide
guucagggauucccggcag

SEQ ID NO: 1124839 - RNA, 19 nt, Artificial Sequence
  Description of Artificial Sequence: Synthetic oligonucleotide
uggggcgugaguccccaga

SEQ ID NO: 1124840 - RNA, 19 nt, Artificial Sequence
  Description of Artificial Sequence: Synthetic oligonucleotide
gauccccacgacgugcugc

SEQ ID NO: 1124841 - RNA, 19 nt, Artificial Sequence
  Description of Artificial Sequence: Synthetic oligonucleotide
gcggugaaggagaugagag

SEQ ID NO: 1124842 - RNA, 19 nt, Artificial Sequence
  Description of Artificial Sequence: Synthetic oligonucleotide
uugcauguaugugggacau

SEQ ID NO: 1124843 - RNA, 19 nt, Artificial Sequence
  Description of Artificial Sequence: Synthetic oligonucleotide
acgggaggaacaauuggug

SEQ ID NO: 1124844 - RNA, 19 nt, Artificial Sequence
  Description of Artificial Sequence: Synthetic oligonucleotide
ucauugcauguauguggga

SEQ ID NO: 1124845 - RNA, 19 nt, Artificial Sequence
  Description of Artificial Sequence: Synthetic oligonucleotide
cugucggcgucgcuguccg

SEQ ID NO: 1124846 - RNA, 19 nt, Artificial Sequence
  Description of Artificial Sequence: Synthetic oligonucleotide
cacgacgugcugcgaaugc

SEQ ID NO: 1124847 - RNA, 19 nt, Artificial Sequence
  Description of Artificial Sequence: Synthetic oligonucleotide
aagaggggaggcuguuaau

SEQ ID NO: 1124848 - RNA, 19 nt, Artificial Sequence
  Description of Artificial Sequence: Synthetic oligonucleotide
uucagggauucccggcagu

SEQ ID NO: 1124849 - RNA, 19 nt, Artificial Sequence
  Description of Artificial Sequence: Synthetic oligonucleotide
ugagagugccgucggguuu

SEQ ID NO: 1124850 - RNA, 19 nt, Artificial Sequence
  Description of Artificial Sequence: Synthetic oligonucleotide
agggguccgguucagggau

SEQ ID NO: 1124851 - RNA, 19 nt, Artificial Sequence
  Description of Artificial Sequence: Synthetic oligonucleotide
caucaguggccucagcgca

SEQ ID NO: 1124852 - RNA, 19 nt, Artificial Sequence
  Description of Artificial Sequence: Synthetic oligonucleotide
agccgggugacaaagcaga

SEQ ID NO: 1124853 - RNA, 19 nt, Artificial Sequence
  Description of Artificial Sequence: Synthetic oligonucleotide
aaguucgcccgaaguuagg

SEQ ID NO: 1124854 - RNA, 19 nt, Artificial Sequence
  Description of Artificial Sequence: Synthetic oligonucleotide
uagggugccggccggucac

SEQ ID NO: 1124855 - RNA, 19 nt, Artificial Sequence
  Description of Artificial Sequence: Synthetic oligonucleotide
accucgcuccauccagaac

SEQ ID NO: 1124856 - RNA, 19 nt, Artificial Sequence
  Description of Artificial Sequence: Synthetic oligonucleotide
ucggguuugcgcagcucga

SEQ ID NO: 1124857 - RNA, 19 nt, Artificial Sequence
  Description of Artificial Sequence: Synthetic oligonucleotide
gaccccgcacuucuucagc

SEQ ID NO: 1124858 - RNA, 19 nt, Artificial Sequence
  Description of Artificial Sequence: Synthetic oligonucleotide
caauuggugugugcugaag

SEQ ID NO: 1124859 - RNA, 19 nt, Artificial Sequence
  Description of Artificial Sequence: Synthetic oligonucleotide
cacgaucagccacgcaccc

SEQ ID NO: 1124860 - RNA, 19 nt, Artificial Sequence
  Description of Artificial Sequence: Synthetic oligonucleotide
ucagggauucccggcaguc

SEQ ID NO: 1124861 - RNA, 19 nt, Artificial Sequence
  Description of Artificial Sequence: Synthetic oligonucleotide
acaauuggugugugcugaa

SEQ ID NO: 1124862 - RNA, 19 nt, Artificial Sequence
  Description of Artificial Sequence: Synthetic oligonucleotide
acgugcugcgaaugcacgu

SEQ ID NO: 1124863 - RNA, 19 nt, Artificial Sequence
  Description of Artificial Sequence: Synthetic oligonucleotide
uggaacugacucugccccu

SEQ ID NO: 1124864 - RNA, 19 nt, Artificial Sequence
  Description of Artificial Sequence: Synthetic oligonucleotide
caaaguucgcccgaaguua

SEQ ID NO: 1124865 - RNA, 19 nt, Artificial Sequence
  Description of Artificial Sequence: Synthetic oligonucleotide
cucagacuguagcggcagg

SEQ ID NO: 1124866 - RNA, 19 nt, Artificial Sequence
  Description of Artificial Sequence: Synthetic oligonucleotide
ucccuugcaaugggaaggu

SEQ ID NO: 1124867 - RNA, 19 nt, Artificial Sequence
  Description of Artificial Sequence: Synthetic oligonucleotide
gugcguguccccgagucgc

SEQ ID NO: 1124868 - RNA, 19 nt, Artificial Sequence
  Description of Artificial Sequence: Synthetic oligonucleotide
cauuguggagaugaggacu

SEQ ID NO: 1124869 - RNA, 19 nt, Artificial Sequence
  Description of Artificial Sequence: Synthetic oligonucleotide
ggguuugcgcagcucgagg

SEQ ID NO: 1124870 - RNA, 19 nt, Artificial Sequence
  Description of Artificial Sequence: Synthetic oligonucleotide
agcuccggaugccacacuu

SEQ ID NO: 1124871 - RNA, 19 nt, Artificial Sequence
  Description of Artificial Sequence: Synthetic oligonucleotide
ccaacgggaggaacaauug

SEQ ID NO: 1124872 - RNA, 19 nt, Artificial Sequence
  Description of Artificial Sequence: Synthetic oligonucleotide
ggccucagcgcagacauug

SEQ ID NO: 1124873 - RNA, 19 nt, Artificial Sequence
  Description of Artificial Sequence: Synthetic oligonucleotide
guuagggguccgguucagg

SEQ ID NO: 1124874 - RNA, 19 nt, Artificial Sequence
  Description of Artificial Sequence: Synthetic oligonucleotide
cagggauucccggcagucg

SEQ ID NO: 1124875 - RNA, 19 nt, Artificial Sequence
  Description of Artificial Sequence: Synthetic oligonucleotide
cgaucagccacgcaccccg

SEQ ID NO: 1124876 - RNA, 19 nt, Artificial Sequence
  Description of Artificial Sequence: Synthetic oligonucleotide
cuggccgucgggcagccuc

SEQ ID NO: 1124877 - RNA, 19 nt, Artificial Sequence
  Description of Artificial Sequence: Synthetic oligonucleotide
cuaggaucagggcucggaa

SEQ ID NO: 1124878 - RNA, 19 nt, Artificial Sequence
  Description of Artificial Sequence: Synthetic oligonucleotide
aguccaacgggaggaacaa

SEQ ID NO: 1124879 - RNA, 19 nt, Artificial Sequence
  Description of Artificial Sequence: Synthetic oligonucleotide
ugcguguccccgagucgcc

SEQ ID NO: 1124880 - RNA, 19 nt, Artificial Sequence
  Description of Artificial Sequence: Synthetic oligonucleotide
gccaaguugggucccagga

SEQ ID NO: 1124881 - RNA, 19 nt, Artificial Sequence
  Description of Artificial Sequence: Synthetic oligonucleotide
guaggcauuggggcugccc

SEQ ID NO: 1124882 - RNA, 19 nt, Artificial Sequence
  Description of Artificial Sequence: Synthetic oligonucleotide
ucgggcagccucacacgga

SEQ ID NO: 1124883 - RNA, 19 nt, Artificial Sequence
  Description of Artificial Sequence: Synthetic oligonucleotide
ggagauccccacgacgugc

SEQ ID NO: 1124884 - RNA, 19 nt, Artificial Sequence
  Description of Artificial Sequence: Synthetic oligonucleotide
ucaugcagaugaggucaug

SEQ ID NO: 1124885 - RNA, 19 nt, Artificial Sequence
  Description of Artificial Sequence: Synthetic oligonucleotide
aaugcacgugggccacgau

SEQ ID NO: 1124886 - RNA, 19 nt, Artificial Sequence
  Description of Artificial Sequence: Synthetic oligonucleotide
guggccucagcgcagacau

SEQ ID NO: 1124887 - RNA, 19 nt, Artificial Sequence
  Description of Artificial Sequence: Synthetic oligonucleotide
ccacgaucagccacgcacc

SEQ ID NO: 1124888 - RNA, 19 nt, Artificial Sequence
  Description of Artificial Sequence: Synthetic oligonucleotide
gaaugcacgugggccacga

SEQ ID NO: 1124889 - RNA, 19 nt, Artificial Sequence
  Description of Artificial Sequence: Synthetic oligonucleotide
gcugaugcugucggcgucg

SEQ ID NO: 1124890 - RNA, 19 nt, Artificial Sequence
  Description of Artificial Sequence: Synthetic oligonucleotide
gaucagggcucggaagauc

SEQ ID NO: 1124891 - RNA, 19 nt, Artificial Sequence
  Description of Artificial Sequence: Synthetic oligonucleotide
gaacugacucugccccuuc

SEQ ID NO: 1124892 - RNA, 19 nt, Artificial Sequence
  Description of Artificial Sequence: Synthetic oligonucleotide
cagccacgcaccccgaguc

SEQ ID NO: 1124893 - RNA, 19 nt, Artificial Sequence
  Description of Artificial Sequence: Synthetic oligonucleotide
ggaggcuguuaaucuggag

SEQ ID NO: 1124894 - RNA, 19 nt, Artificial Sequence
  Description of Artificial Sequence: Synthetic oligonucleotide
cacagggcuuuccucgguc

SEQ ID NO: 1124895 - RNA, 19 nt, Artificial Sequence
  Description of Artificial Sequence: Synthetic oligonucleotide
gacgucgcagcggccgggg

SEQ ID NO: 1124896 - RNA, 19 nt, Artificial Sequence
  Description of Artificial Sequence: Synthetic oligonucleotide
cagcucgaggcugaugcug

SEQ ID NO: 1124897 - RNA, 19 nt, Artificial Sequence
  Description of Artificial Sequence: Synthetic oligonucleotide
cagaacuggacaucuuccu

SEQ ID NO: 1124898 - RNA, 19 nt, Artificial Sequence
  Description of Artificial Sequence: Synthetic oligonucleotide
uccggaugccacacuugua

SEQ ID NO: 1124899 - RNA, 19 nt, Artificial Sequence
  Description of Artificial Sequence: Synthetic oligonucleotide
ccucucuggucaaugguuc

SEQ ID NO: 1124900 - RNA, 19 nt, Artificial Sequence
  Description of Artificial Sequence: Synthetic oligonucleotide
acgacgugcugcgaaugca

SEQ ID NO: 1124901 - RNA, 19 nt, Artificial Sequence
  Description of Artificial Sequence: Synthetic oligonucleotide
uggccgucgggcagccuca

SEQ ID NO: 1124902 - RNA, 19 nt, Artificial Sequence
  Description of Artificial Sequence: Synthetic oligonucleotide
cuuuuacugucaugcagau

SEQ ID NO: 1124903 - RNA, 19 nt, Artificial Sequence
  Description of Artificial Sequence: Synthetic oligonucleotide
aguuagggguccgguucag

SEQ ID NO: 1124904 - RNA, 19 nt, Artificial Sequence
  Description of Artificial Sequence: Synthetic oligonucleotide
ggggacgugaagaggggag

SEQ ID NO: 1124905 - RNA, 19 nt, Artificial Sequence
  Description of Artificial Sequence: Synthetic oligonucleotide
gucaccuggccgucgggca

SEQ ID NO: 1124906 - RNA, 19 nt, Artificial Sequence
  Description of Artificial Sequence: Synthetic oligonucleotide
ugccgucggguuugcgcag

SEQ ID NO: 1124907 - RNA, 19 nt, Artificial Sequence
  Description of Artificial Sequence: Synthetic oligonucleotide
cagcgaggcaauuccaucu

SEQ ID NO: 1124908 - RNA, 19 nt, Artificial Sequence
  Description of Artificial Sequence: Synthetic oligonucleotide
agccguucuuugcucccca

SEQ ID NO: 1124909 - RNA, 19 nt, Artificial Sequence
  Description of Artificial Sequence: Synthetic oligonucleotide
auggccucacuggggauga

SEQ ID NO: 1124910 - RNA, 19 nt, Artificial Sequence
  Description of Artificial Sequence: Synthetic oligonucleotide
cacgugggccacgaucagc

SEQ ID NO: 1124911 - RNA, 19 nt, Artificial Sequence
  Description of Artificial Sequence: Synthetic oligonucleotide
cagccucacacggacccgc

SEQ ID NO: 1124912 - RNA, 19 nt, Artificial Sequence
  Description of Artificial Sequence: Synthetic oligonucleotide
agagugccgucggguuugc

SEQ ID NO: 1124913 - RNA, 19 nt, Artificial Sequence
  Description of Artificial Sequence: Synthetic oligonucleotide
ggacgugaagaggggaggc

SEQ ID NO: 1124914 - RNA, 19 nt, Artificial Sequence
  Description of Artificial Sequence: Synthetic oligonucleotide
ccuaggccaguucauuuuc

SEQ ID NO: 1124915 - RNA, 19 nt, Artificial Sequence
  Description of Artificial Sequence: Synthetic oligonucleotide
ggcgugaguccccagaagu

SEQ ID NO: 1124916 - RNA, 19 nt, Artificial Sequence
  Description of Artificial Sequence: Synthetic oligonucleotide
caccccgagucgcggacag

SEQ ID NO: 1124917 - RNA, 19 nt, Artificial Sequence
  Description of Artificial Sequence: Synthetic oligonucleotide
gagucgcggacagcgcccc

SEQ ID NO: 1124918 - RNA, 19 nt, Artificial Sequence
  Description of Artificial Sequence: Synthetic oligonucleotide
agauccccacgacgugcug

SEQ ID NO: 1124919 - RNA, 19 nt, Artificial Sequence
  Description of Artificial Sequence: Synthetic oligonucleotide
guagggugccggccgguca

SEQ ID NO: 1124920 - RNA, 19 nt, Artificial Sequence
  Description of Artificial Sequence: Synthetic oligonucleotide
cagacuguagcggcaggca

SEQ ID NO: 1124921 - RNA, 19 nt, Artificial Sequence
  Description of Artificial Sequence: Synthetic oligonucleotide
gcucagacuguagcggcag

SEQ ID NO: 1124922 - RNA, 19 nt, Artificial Sequence
  Description of Artificial Sequence: Synthetic oligonucleotide
gcccaaaaguugucccugc

SEQ ID NO: 1124923 - RNA, 19 nt, Artificial Sequence
  Description of Artificial Sequence: Synthetic oligonucleotide
ggcugcccaaaaguugucc

SEQ ID NO: 1124924 - RNA, 19 nt, Artificial Sequence
  Description of Artificial Sequence: Synthetic oligonucleotide
guccuucaguccaacggga

SEQ ID NO: 1124925 - RNA, 19 nt, Artificial Sequence
  Description of Artificial Sequence: Synthetic oligonucleotide
aaggcacauguggucucaa

SEQ ID NO: 1124926 - RNA, 19 nt, Artificial Sequence
  Description of Artificial Sequence: Synthetic oligonucleotide
gaagucccucucuggucaa

SEQ ID NO: 1124927 - RNA, 19 nt, Artificial Sequence
  Description of Artificial Sequence: Synthetic oligonucleotide
gauucccggcagucgccuc

SEQ ID NO: 1124928 - RNA, 19 nt, Artificial Sequence
  Description of Artificial Sequence: Synthetic oligonucleotide
aggcauuggggcugcccaa

SEQ ID NO: 1124929 - RNA, 19 nt, Artificial Sequence
  Description of Artificial Sequence: Synthetic oligonucleotide
uggucucaagggcggcgau

SEQ ID NO: 1124930 - RNA, 19 nt, Artificial Sequence
  Description of Artificial Sequence: Synthetic oligonucleotide
ucggcgucgcuguccgccu

SEQ ID NO: 1124931 - RNA, 19 nt, Artificial Sequence
  Description of Artificial Sequence: Synthetic oligonucleotide
gcgaggcaauuccaucugc

SEQ ID NO: 1124932 - RNA, 19 nt, Artificial Sequence
  Description of Artificial Sequence: Synthetic oligonucleotide
ccccgagucgcggacagcg

SEQ ID NO: 1124933 - RNA, 19 nt, Artificial Sequence
  Description of Artificial Sequence: Synthetic oligonucleotide
ggucaaugguucccuugca

SEQ ID NO: 1124934 - RNA, 19 nt, Artificial Sequence
  Description of Artificial Sequence: Synthetic oligonucleotide
ccgagucgcggacagcgcc

SEQ ID NO: 1124935 - RNA, 19 nt, Artificial Sequence
  Description of Artificial Sequence: Synthetic oligonucleotide
uggguccaaagccguucuu

SEQ ID NO: 1124936 - RNA, 19 nt, Artificial Sequence
  Description of Artificial Sequence: Synthetic oligonucleotide
agcuggggcgugagucccc

SEQ ID NO: 1124937 - RNA, 19 nt, Artificial Sequence
  Description of Artificial Sequence: Synthetic oligonucleotide
cuccggaugccacacuugu

SEQ ID NO: 1124938 - RNA, 19 nt, Artificial Sequence
  Description of Artificial Sequence: Synthetic oligonucleotide
accccuggaacaaguucca

SEQ ID NO: 1124939 - RNA, 19 nt, Artificial Sequence
  Description of Artificial Sequence: Synthetic oligonucleotide
gagacgcgccuacaaaguu

SEQ ID NO: 1124940 - RNA, 19 nt, Artificial Sequence
  Description of Artificial Sequence: Synthetic oligonucleotide
cacgcaccccgagucgcgg

SEQ ID NO: 1124941 - RNA, 19 nt, Artificial Sequence
  Description of Artificial Sequence: Synthetic oligonucleotide
cugcccaaaaguugucccu

SEQ ID NO: 1124942 - RNA, 19 nt, Artificial Sequence
  Description of Artificial Sequence: Synthetic oligonucleotide
gggagauccccacgacgug

SEQ ID NO: 1124943 - RNA, 19 nt, Artificial Sequence
  Description of Artificial Sequence: Synthetic oligonucleotide
guggucucaagggcggcga

SEQ ID NO: 1124944 - RNA, 19 nt, Artificial Sequence
  Description of Artificial Sequence: Synthetic oligonucleotide
agccugccgcacugcgcgg

SEQ ID NO: 1124945 - RNA, 19 nt, Artificial Sequence
  Description of Artificial Sequence: Synthetic oligonucleotide
ccuugcaaugggaaggugu

SEQ ID NO: 1124946 - RNA, 19 nt, Artificial Sequence
  Description of Artificial Sequence: Synthetic oligonucleotide
ggaggggagacgcgccuac

SEQ ID NO: 1124947 - RNA, 19 nt, Artificial Sequence
  Description of Artificial Sequence: Synthetic oligonucleotide
gggacgucgcagcggccgg

SEQ ID NO: 1124948 - RNA, 19 nt, Artificial Sequence
  Description of Artificial Sequence: Synthetic oligonucleotide
ccucaagaggggagauccc

SEQ ID NO: 1124949 - RNA, 19 nt, Artificial Sequence
  Description of Artificial Sequence: Synthetic oligonucleotide
cgccuacaaaguucgcccg

SEQ ID NO: 1124950 - RNA, 19 nt, Artificial Sequence
  Description of Artificial Sequence: Synthetic oligonucleotide
accuggccgucgggcagcc

SEQ ID NO: 1124951 - RNA, 19 nt, Artificial Sequence
  Description of Artificial Sequence: Synthetic oligonucleotide
gaagccuaggccaguucau

SEQ ID NO: 1124952 - RNA, 19 nt, Artificial Sequence
  Description of Artificial Sequence: Synthetic oligonucleotide
ccucagcgcagacauugug

SEQ ID NO: 1124953 - RNA, 19 nt, Artificial Sequence
  Description of Artificial Sequence: Synthetic oligonucleotide
gagauccccacgacgugcu

SEQ ID NO: 1124954 - RNA, 19 nt, Artificial Sequence
  Description of Artificial Sequence: Synthetic oligonucleotide
acaccucgcuccauccaga

SEQ ID NO: 1124955 - RNA, 19 nt, Artificial Sequence
  Description of Artificial Sequence: Synthetic oligonucleotide
gccuacaaaguucgcccga

SEQ ID NO: 1124956 - RNA, 19 nt, Artificial Sequence
  Description of Artificial Sequence: Synthetic oligonucleotide
gcggguguagauggcauca

SEQ ID NO: 1124957 - RNA, 19 nt, Artificial Sequence
  Description of Artificial Sequence: Synthetic oligonucleotide
gcauguaugugggacauuu

SEQ ID NO: 1124958 - RNA, 19 nt, Artificial Sequence
  Description of Artificial Sequence: Synthetic oligonucleotide
cacccucugguggccaaug

SEQ ID NO: 1124959 - RNA, 19 nt, Artificial Sequence
  Description of Artificial Sequence: Synthetic oligonucleotide
agcugucucugagguacau

SEQ ID NO: 1124960 - RNA, 19 nt, Artificial Sequence
  Description of Artificial Sequence: Synthetic oligonucleotide
cgacgugcugcgaaugcac

SEQ ID NO: 1124961 - RNA, 19 nt, Artificial Sequence
  Description of Artificial Sequence: Synthetic oligonucleotide
accccgagucgcggacagc

SEQ ID NO: 1124962 - RNA, 19 nt, Artificial Sequence
  Description of Artificial Sequence: Synthetic oligonucleotide
cgcgccuacaaaguucgcc

SEQ ID NO: 1124963 - RNA, 19 nt, Artificial Sequence
  Description of Artificial Sequence: Synthetic oligonucleotide
acgcgccuacaaaguucgc

SEQ ID NO: 1124964 - RNA, 19 nt, Artificial Sequence
  Description of Artificial Sequence: Synthetic oligonucleotide
caccucgcuccauccagaa

SEQ ID NO: 1124965 - RNA, 19 nt, Artificial Sequence
  Description of Artificial Sequence: Synthetic oligonucleotide
gacacgggagcuggggcgu

SEQ ID NO: 1124966 - RNA, 19 nt, Artificial Sequence
  Description of Artificial Sequence: Synthetic oligonucleotide
ggggagacgcgccuacaaa

SEQ ID NO: 1124967 - RNA, 19 nt, Artificial Sequence
  Description of Artificial Sequence: Synthetic oligonucleotide
gugccggccggucacggcu

SEQ ID NO: 1124968 - RNA, 19 nt, Artificial Sequence
  Description of Artificial Sequence: Synthetic oligonucleotide
agggugccggccggucacg

SEQ ID NO: 1124969 - RNA, 19 nt, Artificial Sequence
  Description of Artificial Sequence: Synthetic oligonucleotide
gggauucccggcagucgcc

SEQ ID NO: 1124970 - RNA, 19 nt, Artificial Sequence
  Description of Artificial Sequence: Synthetic oligonucleotide
ggccggucacggcuguggc

SEQ ID NO: 1124971 - RNA, 19 nt, Artificial Sequence
  Description of Artificial Sequence: Synthetic oligonucleotide
cgagucgcggacagcgccc

SEQ ID NO: 1124972 - RNA, 19 nt, Artificial Sequence
  Description of Artificial Sequence: Synthetic oligonucleotide
gccucacacggacccgcag

SEQ ID NO: 1124973 - RNA, 19 nt, Artificial Sequence
  Description of Artificial Sequence: Synthetic oligonucleotide
cacggacccgcagcuccgc

SEQ ID NO: 1124974 - RNA, 19 nt, Artificial Sequence
  Description of Artificial Sequence: Synthetic oligonucleotide
cgugcugcgaaugcacgug

SEQ ID NO: 1124975 - RNA, 19 nt, Artificial Sequence
  Description of Artificial Sequence: Synthetic oligonucleotide
gcgugaguccccagaaguc

SEQ ID NO: 1124976 - RNA, 19 nt, Artificial Sequence
  Description of Artificial Sequence: Synthetic oligonucleotide
ggagacgcgccuacaaagu

SEQ ID NO: 1124977 - RNA, 19 nt, Artificial Sequence
  Description of Artificial Sequence: Synthetic oligonucleotide
ccacgcaccccgagucgcg

SEQ ID NO: 1124978 - RNA, 19 nt, Artificial Sequence
  Description of Artificial Sequence: Synthetic oligonucleotide
ggcgaucucccugcucccc

SEQ ID NO: 1124979 - RNA, 19 nt, Artificial Sequence
  Description of Artificial Sequence: Synthetic oligonucleotide
gccgggugacaaagcagag

SEQ ID NO: 1124980 - RNA, 19 nt, Artificial Sequence
  Description of Artificial Sequence: Synthetic oligonucleotide
auguccauguggagcuguu

SEQ ID NO: 1124981 - RNA, 19 nt, Artificial Sequence
  Description of Artificial Sequence: Synthetic oligonucleotide
gccacgcaccccgagucgc

SEQ ID NO: 1124982 - RNA, 19 nt, Artificial Sequence
  Description of Artificial Sequence: Synthetic oligonucleotide
uguccacaccucgcuccau

SEQ ID NO: 1124983 - RNA, 19 nt, Artificial Sequence
  Description of Artificial Sequence: Synthetic oligonucleotide
gugacaaagcagagccccu

SEQ ID NO: 1124984 - RNA, 19 nt, Artificial Sequence
  Description of Artificial Sequence: Synthetic oligonucleotide
gaucagccacgcaccccga

SEQ ID NO: 1124985 - RNA, 19 nt, Artificial Sequence
  Description of Artificial Sequence: Synthetic oligonucleotide
gcgaucucccugcucccca

SEQ ID NO: 1124986 - RNA, 19 nt, Artificial Sequence
  Description of Artificial Sequence: Synthetic oligonucleotide
gcuccggaugccacacuug

SEQ ID NO: 1124987 - RNA, 19 nt, Artificial Sequence
  Description of Artificial Sequence: Synthetic oligonucleotide
gcacgugggccacgaucag

SEQ ID NO: 1124988 - RNA, 19 nt, Artificial Sequence
  Description of Artificial Sequence: Synthetic oligonucleotide
ggucucaagggcggcgauc

SEQ ID NO: 1124989 - RNA, 19 nt, Artificial Sequence
  Description of Artificial Sequence: Synthetic oligonucleotide
cagcugucucugagguaca

SEQ ID NO: 1124990 - RNA, 19 nt, Artificial Sequence
  Description of Artificial Sequence: Synthetic oligonucleotide
gcgaaugcacgugggccac

SEQ ID NO: 1124991 - RNA, 19 nt, Artificial Sequence
  Description of Artificial Sequence: Synthetic oligonucleotide
cuguccgccugcaggcucu

SEQ ID NO: 1124992 - RNA, 19 nt, Artificial Sequence
  Description of Artificial Sequence: Synthetic oligonucleotide
gccuccucaagaggggaga

SEQ ID NO: 1124993 - RNA, 19 nt, Artificial Sequence
  Description of Artificial Sequence: Synthetic oligonucleotide
ggacgucgcagcggccggg

SEQ ID NO: 1124994 - RNA, 19 nt, Artificial Sequence
  Description of Artificial Sequence: Synthetic oligonucleotide
gcugggugauauccuuuua

SEQ ID NO: 1124995 - RNA, 19 nt, Artificial Sequence
  Description of Artificial Sequence: Synthetic oligonucleotide
ccuacaaaguucgcccgaa

SEQ ID NO: 1124996 - RNA, 19 nt, Artificial Sequence
  Description of Artificial Sequence: Synthetic oligonucleotide
cauuguggugcagccgggu

SEQ ID NO: 1124997 - RNA, 19 nt, Artificial Sequence
  Description of Artificial Sequence: Synthetic oligonucleotide
cuguagcggcaggcacagg

SEQ ID NO: 1124998 - RNA, 19 nt, Artificial Sequence
  Description of Artificial Sequence: Synthetic oligonucleotide
cccgagucgcggacagcgc

SEQ ID NO: 1124999 - RNA, 19 nt, Artificial Sequence
  Description of Artificial Sequence: Synthetic oligonucleotide
ggguccgguucagggauuc

SEQ ID NO: 1125000 - RNA, 19 nt, Artificial Sequence
  Description of Artificial Sequence: Synthetic oligonucleotide
gguccgguucagggauucc

SEQ ID NO: 1125001 - RNA, 19 nt, Artificial Sequence
  Description of Artificial Sequence: Synthetic oligonucleotide
uccccacgacgugcugcga

SEQ ID NO: 1125002 - RNA, 19 nt, Artificial Sequence
  Description of Artificial Sequence: Synthetic oligonucleotide
ccccuaggaucagggcucg

SEQ ID NO: 1125003 - RNA, 19 nt, Artificial Sequence
  Description of Artificial Sequence: Synthetic oligonucleotide
ccacgacgugcugcgaaug

SEQ ID NO: 1125004 - RNA, 19 nt, Artificial Sequence
  Description of Artificial Sequence: Synthetic oligonucleotide
gccggucacggcuguggca

SEQ ID NO: 1125005 - RNA, 19 nt, Artificial Sequence
  Description of Artificial Sequence: Synthetic oligonucleotide
gcucgaggcugaugcuguc

SEQ ID NO: 1125006 - RNA, 19 nt, Artificial Sequence
  Description of Artificial Sequence: Synthetic oligonucleotide
ggguccaaagccguucuuu

SEQ ID NO: 1125007 - RNA, 19 nt, Artificial Sequence
  Description of Artificial Sequence: Synthetic oligonucleotide
gcccgaaguuagggguccg

SEQ ID NO: 1125008 - RNA, 19 nt, Artificial Sequence
  Description of Artificial Sequence: Synthetic oligonucleotide
ccgcggugaaggagaugag

SEQ ID NO: 1125009 - RNA, 19 nt, Artificial Sequence
  Description of Artificial Sequence: Synthetic oligonucleotide
ggggccccagcgcgccgcg

SEQ ID NO: 1125010 - RNA, 19 nt, Artificial Sequence
  Description of Artificial Sequence: Synthetic oligonucleotide
gccgucggguuugcgcagc

SEQ ID NO: 1125011 - RNA, 19 nt, Artificial Sequence
  Description of Artificial Sequence: Synthetic oligonucleotide
ggcggcgaucucccugcuc

SEQ ID NO: 1125012 - RNA, 19 nt, Artificial Sequence
  Description of Artificial Sequence: Synthetic oligonucleotide
cacggcuguggcaguacuu

SEQ ID NO: 1125013 - RNA, 19 nt, Artificial Sequence
  Description of Artificial Sequence: Synthetic oligonucleotide
ggauucccggcagucgccu

SEQ ID NO: 1125014 - RNA, 19 nt, Artificial Sequence
  Description of Artificial Sequence: Synthetic oligonucleotide
cgcccgaaguuaggggucc

SEQ ID NO: 1125015 - RNA, 19 nt, Artificial Sequence
  Description of Artificial Sequence: Synthetic oligonucleotide
cccucucuggucaaugguu

SEQ ID NO: 1125016 - RNA, 19 nt, Artificial Sequence
  Description of Artificial Sequence: Synthetic oligonucleotide
cggguuugcgcagcucgag

SEQ ID NO: 1125017 - RNA, 19 nt, Artificial Sequence
  Description of Artificial Sequence: Synthetic oligonucleotide
gggccacgaucagccacgc

SEQ ID NO: 1125018 - RNA, 19 nt, Artificial Sequence
  Description of Artificial Sequence: Synthetic oligonucleotide
gugaagaggggaggcuguu

SEQ ID NO: 1125019 - RNA, 19 nt, Artificial Sequence
  Description of Artificial Sequence: Synthetic oligonucleotide
gcagcucgaggcugaugcu

SEQ ID NO: 1125020 - RNA, 19 nt, Artificial Sequence
  Description of Artificial Sequence: Synthetic oligonucleotide
cccaaaaguugucccugcu

SEQ ID NO: 1125021 - RNA, 19 nt, Artificial Sequence
  Description of Artificial Sequence: Synthetic oligonucleotide
cacgggagcuggggcguga

SEQ ID NO: 1125022 - RNA, 19 nt, Artificial Sequence
  Description of Artificial Sequence: Synthetic oligonucleotide
cgaaugcacgugggccacg

SEQ ID NO: 1125023 - RNA, 19 nt, Artificial Sequence
  Description of Artificial Sequence: Synthetic oligonucleotide
gcgcgccgaggggacgucg

SEQ ID NO: 1125024 - RNA, 19 nt, Artificial Sequence
  Description of Artificial Sequence: Synthetic oligonucleotide
cgcaccccgagucgcggac

SEQ ID NO: 1125025 - RNA, 19 nt, Artificial Sequence
  Description of Artificial Sequence: Synthetic oligonucleotide
cggcgaucucccugcuccc

SEQ ID NO: 1125026 - RNA, 19 nt, Artificial Sequence
  Description of Artificial Sequence: Synthetic oligonucleotide
gggcugcccaaaaguuguc

SEQ ID NO: 1125027 - RNA, 19 nt, Artificial Sequence
  Description of Artificial Sequence: Synthetic oligonucleotide
caagggcggcgaucucccu

SEQ ID NO: 1125028 - RNA, 19 nt, Artificial Sequence
  Description of Artificial Sequence: Synthetic oligonucleotide
gcgccgaggggacgucgca

SEQ ID NO: 1125029 - RNA, 19 nt, Artificial Sequence
  Description of Artificial Sequence: Synthetic oligonucleotide
cgccgaggggacgucgcag

SEQ ID NO: 1125030 - RNA, 19 nt, Artificial Sequence
  Description of Artificial Sequence: Synthetic oligonucleotide
ccgaaguuagggguccggu

SEQ ID NO: 1125031 - RNA, 19 nt, Artificial Sequence
  Description of Artificial Sequence: Synthetic oligonucleotide
cgaaguuagggguccgguu

SEQ ID NO: 1125032 - RNA, 19 nt, Artificial Sequence
  Description of Artificial Sequence: Synthetic oligonucleotide
cccugcugggugauauccu

SEQ ID NO: 1125033 - RNA, 19 nt, Artificial Sequence
  Description of Artificial Sequence: Synthetic oligonucleotide
gcaccccgagucgcggaca

SEQ ID NO: 1125034 - RNA, 19 nt, Artificial Sequence
  Description of Artificial Sequence: Synthetic oligonucleotide
gcgcagcucgaggcugaug

SEQ ID NO: 1125035 - RNA, 19 nt, Artificial Sequence
  Description of Artificial Sequence: Synthetic oligonucleotide
cgcggcgccccaagcagca

SEQ ID NO: 1125036 - RNA, 19 nt, Artificial Sequence
  Description of Artificial Sequence: Synthetic oligonucleotide
cccacgacgugcugcgaau

SEQ ID NO: 1125037 - RNA, 19 nt, Artificial Sequence
  Description of Artificial Sequence: Synthetic oligonucleotide
cagcuccggaugccacacu

SEQ ID NO: 1125038 - RNA, 19 nt, Artificial Sequence
  Description of Artificial Sequence: Synthetic oligonucleotide
ccccugugcguguccccga

SEQ ID NO: 1125039 - RNA, 19 nt, Artificial Sequence
  Description of Artificial Sequence: Synthetic oligonucleotide
gcggcaggcacagggcuuu

SEQ ID NO: 1125040 - RNA, 19 nt, Artificial Sequence
  Description of Artificial Sequence: Synthetic oligonucleotide
cgcagacauuguggagaug

SEQ ID NO: 1125041 - RNA, 19 nt, Artificial Sequence
  Description of Artificial Sequence: Synthetic oligonucleotide
cgucggguuugcgcagcuc

SEQ ID NO: 1125042 - RNA, 19 nt, Artificial Sequence
  Description of Artificial Sequence: Synthetic oligonucleotide
ggcgcgccgaggggacguc

SEQ ID NO: 1125043 - RNA, 19 nt, Artificial Sequence
  Description of Artificial Sequence: Synthetic oligonucleotide
ccgcgcccacgccgcgcgg

SEQ ID NO: 1125044 - RNA, 19 nt, Artificial Sequence
  Description of Artificial Sequence: Synthetic oligonucleotide
ccggccggucacggcugug

SEQ ID NO: 1125045 - RNA, 19 nt, Artificial Sequence
  Description of Artificial Sequence: Synthetic oligonucleotide
gccggccggucacggcugu

SEQ ID NO: 1125046 - RNA, 19 nt, Artificial Sequence
  Description of Artificial Sequence: Synthetic oligonucleotide
gggcggcgaucucccugcu

SEQ ID NO: 1125047 - RNA, 19 nt, Artificial Sequence
  Description of Artificial Sequence: Synthetic oligonucleotide
cggucacggcuguggcagu

SEQ ID NO: 1125048 - RNA, 19 nt, Artificial Sequence
  Description of Artificial Sequence: Synthetic oligonucleotide
gggccccagcgcgccgcgu

SEQ ID NO: 1125049 - RNA, 19 nt, Artificial Sequence
  Description of Artificial Sequence: Synthetic oligonucleotide
aguguuuacagucaggugg

SEQ ID NO: 1125050 - RNA, 19 nt, Artificial Sequence
  Description of Artificial Sequence: Synthetic oligonucleotide
ucaugguuagccaagaagg

SEQ ID NO: 1125051 - RNA, 19 nt, Artificial Sequence
  Description of Artificial Sequence: Synthetic oligonucleotide
aaaugugccccacaugugc

SEQ ID NO: 1125052 - RNA, 19 nt, Artificial Sequence
  Description of Artificial Sequence: Synthetic oligonucleotide
aagcguauacaguagcgcc

SEQ ID NO: 1125053 - RNA, 19 nt, Artificial Sequence
  Description of Artificial Sequence: Synthetic oligonucleotide
aacgcuaugaaggaacagc

SEQ ID NO: 1125054 - RNA, 19 nt, Artificial Sequence
  Description of Artificial Sequence: Synthetic oligonucleotide
uccaagaaaaguuacaauc

SEQ ID NO: 1125055 - RNA, 19 nt, Artificial Sequence
  Description of Artificial Sequence: Synthetic oligonucleotide
aguuuugccuuucaccucc

SEQ ID NO: 1125056 - RNA, 19 nt, Artificial Sequence
  Description of Artificial Sequence: Synthetic oligonucleotide
ugcuauacugaaaugcagg

SEQ ID NO: 1125057 - RNA, 19 nt, Artificial Sequence
  Description of Artificial Sequence: Synthetic oligonucleotide
gacaacugaacacaguucc

SEQ ID NO: 1125058 - RNA, 19 nt, Artificial Sequence
  Description of Artificial Sequence: Synthetic oligonucleotide
auuagggagagacuuagag

SEQ ID NO: 1125059 - RNA, 19 nt, Artificial Sequence
  Description of Artificial Sequence: Synthetic oligonucleotide
agaucucugagauauaugu

SEQ ID NO: 1125060 - RNA, 19 nt, Artificial Sequence
  Description of Artificial Sequence: Synthetic oligonucleotide
uuucucgagccacaaaagg

SEQ ID NO: 1125061 - RNA, 19 nt, Artificial Sequence
  Description of Artificial Sequence: Synthetic oligonucleotide
aguagcgccaccaauagac

SEQ ID NO: 1125062 - RNA, 19 nt, Artificial Sequence
  Description of Artificial Sequence: Synthetic oligonucleotide
uaauaaugcaagaaugaaa

SEQ ID NO: 1125063 - RNA, 19 nt, Artificial Sequence
  Description of Artificial Sequence: Synthetic oligonucleotide
uguccauaacuuaagcugc

SEQ ID NO: 1125064 - RNA, 19 nt, Artificial Sequence
  Description of Artificial Sequence: Synthetic oligonucleotide
agcaauuauggguuaagag

SEQ ID NO: 1125065 - RNA, 19 nt, Artificial Sequence
  Description of Artificial Sequence: Synthetic oligonucleotide
ugguuagccaagaagguca

SEQ ID NO: 1125066 - RNA, 19 nt, Artificial Sequence
  Description of Artificial Sequence: Synthetic oligonucleotide
gcaauuauggguuaagagc

SEQ ID NO: 1125067 - RNA, 19 nt, Artificial Sequence
  Description of Artificial Sequence: Synthetic oligonucleotide
aucaugguuagccaagaag

SEQ ID NO: 1125068 - RNA, 19 nt, Artificial Sequence
  Description of Artificial Sequence: Synthetic oligonucleotide
acuuaagcugcuucuuggc

SEQ ID NO: 1125069 - RNA, 19 nt, Artificial Sequence
  Description of Artificial Sequence: Synthetic oligonucleotide
gauauaugugggcagucgc

SEQ ID NO: 1125070 - RNA, 19 nt, Artificial Sequence
  Description of Artificial Sequence: Synthetic oligonucleotide
ugaucugacagaagcuggg

SEQ ID NO: 1125071 - RNA, 19 nt, Artificial Sequence
  Description of Artificial Sequence: Synthetic oligonucleotide
aagaauuagggagagacuu

SEQ ID NO: 1125072 - RNA, 19 nt, Artificial Sequence
  Description of Artificial Sequence: Synthetic oligonucleotide
ugcucagaagcucacagcu

SEQ ID NO: 1125073 - RNA, 19 nt, Artificial Sequence
  Description of Artificial Sequence: Synthetic oligonucleotide
auuccagacaacccgugac

SEQ ID NO: 1125074 - RNA, 19 nt, Artificial Sequence
  Description of Artificial Sequence: Synthetic oligonucleotide
ugacaaguggugaaggaac

SEQ ID NO: 1125075 - RNA, 19 nt, Artificial Sequence
  Description of Artificial Sequence: Synthetic oligonucleotide
aacaaagaauuagggagag

SEQ ID NO: 1125076 - RNA, 19 nt, Artificial Sequence
  Description of Artificial Sequence: Synthetic oligonucleotide
guuucgggacgauagaugc

SEQ ID NO: 1125077 - RNA, 19 nt, Artificial Sequence
  Description of Artificial Sequence: Synthetic oligonucleotide
uucucgagccacaaaagga

SEQ ID NO: 1125078 - RNA, 19 nt, Artificial Sequence
  Description of Artificial Sequence: Synthetic oligonucleotide
acugagauuuaauaaugca

SEQ ID NO: 1125079 - RNA, 19 nt, Artificial Sequence
  Description of Artificial Sequence: Synthetic oligonucleotide
ugguuugggugucugacag

SEQ ID NO: 1125080 - RNA, 19 nt, Artificial Sequence
  Description of Artificial Sequence: Synthetic oligonucleotide
gacgauagaugccuucgcg

SEQ ID NO: 1125081 - RNA, 19 nt, Artificial Sequence
  Description of Artificial Sequence: Synthetic oligonucleotide
cuaacagugacaaguggug

SEQ ID NO: 1125082 - RNA, 19 nt, Artificial Sequence
  Description of Artificial Sequence: Synthetic oligonucleotide
ugcacuugugguuugggug

SEQ ID NO: 1125083 - RNA, 19 nt, Artificial Sequence
  Description of Artificial Sequence: Synthetic oligonucleotide
gaugcugguggcuaaucag

SEQ ID NO: 1125084 - RNA, 19 nt, Artificial Sequence
  Description of Artificial Sequence: Synthetic oligonucleotide
gauagaugccuucgcgucg

SEQ ID NO: 1125085 - RNA, 19 nt, Artificial Sequence
  Description of Artificial Sequence: Synthetic oligonucleotide
caucgggucucucaaaacg

SEQ ID NO: 1125086 - RNA, 19 nt, Artificial Sequence
  Description of Artificial Sequence: Synthetic oligonucleotide
agaaaucuuucaaagagcu

SEQ ID NO: 1125087 - RNA, 19 nt, Artificial Sequence
  Description of Artificial Sequence: Synthetic oligonucleotide
uauaugugggcagucgcgg

SEQ ID NO: 1125088 - RNA, 19 nt, Artificial Sequence
  Description of Artificial Sequence: Synthetic oligonucleotide
uucccgguggacaucagag

SEQ ID NO: 1125089 - RNA, 19 nt, Artificial Sequence
  Description of Artificial Sequence: Synthetic oligonucleotide
uuaggugagucuuccaaga

SEQ ID NO: 1125090 - RNA, 19 nt, Artificial Sequence
  Description of Artificial Sequence: Synthetic oligonucleotide
aacgaaaugugccccacau

SEQ ID NO: 1125091 - RNA, 19 nt, Artificial Sequence
  Description of Artificial Sequence: Synthetic oligonucleotide
uaacuuaagcugcuucuug

SEQ ID NO: 1125092 - RNA, 19 nt, Artificial Sequence
  Description of Artificial Sequence: Synthetic oligonucleotide
aaugugccccacaugugcc

SEQ ID NO: 1125093 - RNA, 19 nt, Artificial Sequence
  Description of Artificial Sequence: Synthetic oligonucleotide
ugaccagagaccgugacca

SEQ ID NO: 1125094 - RNA, 19 nt, Artificial Sequence
  Description of Artificial Sequence: Synthetic oligonucleotide
ugggauccggacaucaaag

SEQ ID NO: 1125095 - RNA, 19 nt, Artificial Sequence
  Description of Artificial Sequence: Synthetic oligonucleotide
ucaaaacgaaaugugcccc

SEQ ID NO: 1125096 - RNA, 19 nt, Artificial Sequence
  Description of Artificial Sequence: Synthetic oligonucleotide
cagggaaacaggacgaccc

SEQ ID NO: 1125097 - RNA, 19 nt, Artificial Sequence
  Description of Artificial Sequence: Synthetic oligonucleotide
uacaaucucccuccaaaca

SEQ ID NO: 1125098 - RNA, 19 nt, Artificial Sequence
  Description of Artificial Sequence: Synthetic oligonucleotide
ugauccguggaaguguagg

SEQ ID NO: 1125099 - RNA, 19 nt, Artificial Sequence
  Description of Artificial Sequence: Synthetic oligonucleotide
cuuggauaacacugguucc

SEQ ID NO: 1125100 - RNA, 19 nt, Artificial Sequence
  Description of Artificial Sequence: Synthetic oligonucleotide
aaacaggacgaccccucgg

SEQ ID NO: 1125101 - RNA, 19 nt, Artificial Sequence
  Description of Artificial Sequence: Synthetic oligonucleotide
ugagcacugguuuauugac

SEQ ID NO: 1125102 - RNA, 19 nt, Artificial Sequence
  Description of Artificial Sequence: Synthetic oligonucleotide
aacaggacgaccccucggu

SEQ ID NO: 1125103 - RNA, 19 nt, Artificial Sequence
  Description of Artificial Sequence: Synthetic oligonucleotide
acgugguguaggcagggcc

SEQ ID NO: 1125104 - RNA, 19 nt, Artificial Sequence
  Description of Artificial Sequence: Synthetic oligonucleotide
aaccugacugguuuugccu

SEQ ID NO: 1125105 - RNA, 19 nt, Artificial Sequence
  Description of Artificial Sequence: Synthetic oligonucleotide
aacccgugacaacugaaca

SEQ ID NO: 1125106 - RNA, 19 nt, Artificial Sequence
  Description of Artificial Sequence: Synthetic oligonucleotide
cacgguuucgggacgauag

SEQ ID NO: 1125107 - RNA, 19 nt, Artificial Sequence
  Description of Artificial Sequence: Synthetic oligonucleotide
uccaagcguauacaguagc

SEQ ID NO: 1125108 - RNA, 19 nt, Artificial Sequence
  Description of Artificial Sequence: Synthetic oligonucleotide
caauuauggguuaagagcu

SEQ ID NO: 1125109 - RNA, 19 nt, Artificial Sequence
  Description of Artificial Sequence: Synthetic oligonucleotide
agucuuaggugagucuucc

SEQ ID NO: 1125110 - RNA, 19 nt, Artificial Sequence
  Description of Artificial Sequence: Synthetic oligonucleotide
ugcccauauagaaagggau

SEQ ID NO: 1125111 - RNA, 19 nt, Artificial Sequence
  Description of Artificial Sequence: Synthetic oligonucleotide
ugugacacggauguucuca

SEQ ID NO: 1125112 - RNA, 19 nt, Artificial Sequence
  Description of Artificial Sequence: Synthetic oligonucleotide
accgaccgcacacagcggc

SEQ ID NO: 1125113 - RNA, 19 nt, Artificial Sequence
  Description of Artificial Sequence: Synthetic oligonucleotide
agauauaugugggcagucg

SEQ ID NO: 1125114 - RNA, 19 nt, Artificial Sequence
  Description of Artificial Sequence: Synthetic oligonucleotide
gaugccuucgcgucgucgc

SEQ ID NO: 1125115 - RNA, 19 nt, Artificial Sequence
  Description of Artificial Sequence: Synthetic oligonucleotide
acugguuuauugaccaugg

SEQ ID NO: 1125116 - RNA, 19 nt, Artificial Sequence
  Description of Artificial Sequence: Synthetic oligonucleotide
uuugccucacucuucucca

SEQ ID NO: 1125117 - RNA, 19 nt, Artificial Sequence
  Description of Artificial Sequence: Synthetic oligonucleotide
aucccggucauacagucug

SEQ ID NO: 1125118 - RNA, 19 nt, Artificial Sequence
  Description of Artificial Sequence: Synthetic oligonucleotide
agacuuuugcucaaugcuc

SEQ ID NO: 1125119 - RNA, 19 nt, Artificial Sequence
  Description of Artificial Sequence: Synthetic oligonucleotide
cacacagcggccucaaccc

SEQ ID NO: 1125120 - RNA, 19 nt, Artificial Sequence
  Description of Artificial Sequence: Synthetic oligonucleotide
aagaaggucacagcuucug

SEQ ID NO: 1125121 - RNA, 19 nt, Artificial Sequence
  Description of Artificial Sequence: Synthetic oligonucleotide
uccucgaacugucuccaag

SEQ ID NO: 1125122 - RNA, 19 nt, Artificial Sequence
  Description of Artificial Sequence: Synthetic oligonucleotide
ucaugcccauauagaaagg

SEQ ID NO: 1125123 - RNA, 19 nt, Artificial Sequence
  Description of Artificial Sequence: Synthetic oligonucleotide
auauaugugggcagucgcg

SEQ ID NO: 1125124 - RNA, 19 nt, Artificial Sequence
  Description of Artificial Sequence: Synthetic oligonucleotide
ggcuaaucaguguuuacag

SEQ ID NO: 1125125 - RNA, 19 nt, Artificial Sequence
  Description of Artificial Sequence: Synthetic oligonucleotide
aaagaauuagggagagacu

SEQ ID NO: 1125126 - RNA, 19 nt, Artificial Sequence
  Description of Artificial Sequence: Synthetic oligonucleotide
ugaaaugcaggcugcuccu

SEQ ID NO: 1125127 - RNA, 19 nt, Artificial Sequence
  Description of Artificial Sequence: Synthetic oligonucleotide
uuccagacaacccgugaca

SEQ ID NO: 1125128 - RNA, 19 nt, Artificial Sequence
  Description of Artificial Sequence: Synthetic oligonucleotide
uauacaguagcgccaccaa

SEQ ID NO: 1125129 - RNA, 19 nt, Artificial Sequence
  Description of Artificial Sequence: Synthetic oligonucleotide
ucguaguguuucucgagcc

SEQ ID NO: 1125130 - RNA, 19 nt, Artificial Sequence
  Description of Artificial Sequence: Synthetic oligonucleotide
agucagguggccaagugag

SEQ ID NO: 1125131 - RNA, 19 nt, Artificial Sequence
  Description of Artificial Sequence: Synthetic oligonucleotide
ucaguuguuucccggugga

SEQ ID NO: 1125132 - RNA, 19 nt, Artificial Sequence
  Description of Artificial Sequence: Synthetic oligonucleotide
uucugcacgguuucgggac

SEQ ID NO: 1125133 - RNA, 19 nt, Artificial Sequence
  Description of Artificial Sequence: Synthetic oligonucleotide
auacugaaaugcaggcugc

SEQ ID NO: 1125134 - RNA, 19 nt, Artificial Sequence
  Description of Artificial Sequence: Synthetic oligonucleotide
agaagcucacagcuccggg

SEQ ID NO: 1125135 - RNA, 19 nt, Artificial Sequence
  Description of Artificial Sequence: Synthetic oligonucleotide
aaaacgcuaugaaggaaca

SEQ ID NO: 1125136 - RNA, 19 nt, Artificial Sequence
  Description of Artificial Sequence: Synthetic oligonucleotide
cucuaacagugacaagugg

SEQ ID NO: 1125137 - RNA, 19 nt, Artificial Sequence
  Description of Artificial Sequence: Synthetic oligonucleotide
gcuauacugaaaugcaggc

SEQ ID NO: 1125138 - RNA, 19 nt, Artificial Sequence
  Description of Artificial Sequence: Synthetic oligonucleotide
ugugguuugggugucugac

SEQ ID NO: 1125139 - RNA, 19 nt, Artificial Sequence
  Description of Artificial Sequence: Synthetic oligonucleotide
uucgggacgauagaugccu

SEQ ID NO: 1125140 - RNA, 19 nt, Artificial Sequence
  Description of Artificial Sequence: Synthetic oligonucleotide
guuggaacgugguguaggc

SEQ ID NO: 1125141 - RNA, 19 nt, Artificial Sequence
  Description of Artificial Sequence: Synthetic oligonucleotide
aaggaacccugagaacugg

SEQ ID NO: 1125142 - RNA, 19 nt, Artificial Sequence
  Description of Artificial Sequence: Synthetic oligonucleotide
aagaagccacaucccgguc

SEQ ID NO: 1125143 - RNA, 19 nt, Artificial Sequence
  Description of Artificial Sequence: Synthetic oligonucleotide
caagcguauacaguagcgc

SEQ ID NO: 1125144 - RNA, 19 nt, Artificial Sequence
  Description of Artificial Sequence: Synthetic oligonucleotide
aaacgaaaugugccccaca

SEQ ID NO: 1125145 - RNA, 19 nt, Artificial Sequence
  Description of Artificial Sequence: Synthetic oligonucleotide
aagggaugacugugacacg

SEQ ID NO: 1125146 - RNA, 19 nt, Artificial Sequence
  Description of Artificial Sequence: Synthetic oligonucleotide
aaacgcuaugaaggaacag

SEQ ID NO: 1125147 - RNA, 19 nt, Artificial Sequence
  Description of Artificial Sequence: Synthetic oligonucleotide
uuucgggacgauagaugcc

SEQ ID NO: 1125148 - RNA, 19 nt, Artificial Sequence
  Description of Artificial Sequence: Synthetic oligonucleotide
aggugcuuuugucugguca

SEQ ID NO: 1125149 - RNA, 19 nt, Artificial Sequence
  Description of Artificial Sequence: Synthetic oligonucleotide
agcaccugauaguaagugu

SEQ ID NO: 1125150 - RNA, 19 nt, Artificial Sequence
  Description of Artificial Sequence: Synthetic oligonucleotide
acacggauguucucaguug

SEQ ID NO: 1125151 - RNA, 19 nt, Artificial Sequence
  Description of Artificial Sequence: Synthetic oligonucleotide
aguuguuucccgguggaca

SEQ ID NO: 1125152 - RNA, 19 nt, Artificial Sequence
  Description of Artificial Sequence: Synthetic oligonucleotide
uucgcgucgucgcuguggc

SEQ ID NO: 1125153 - RNA, 19 nt, Artificial Sequence
  Description of Artificial Sequence: Synthetic oligonucleotide
auccggacaucaaaguggg

SEQ ID NO: 1125154 - RNA, 19 nt, Artificial Sequence
  Description of Artificial Sequence: Synthetic oligonucleotide
uaacagugacaagugguga

SEQ ID NO: 1125155 - RNA, 19 nt, Artificial Sequence
  Description of Artificial Sequence: Synthetic oligonucleotide
ugaccauggcucacauucc

SEQ ID NO: 1125156 - RNA, 19 nt, Artificial Sequence
  Description of Artificial Sequence: Synthetic oligonucleotide
caacccgugacaacugaac

SEQ ID NO: 1125157 - RNA, 19 nt, Artificial Sequence
  Description of Artificial Sequence: Synthetic oligonucleotide
ggcugcuauacugaaaugc

SEQ ID NO: 1125158 - RNA, 19 nt, Artificial Sequence
  Description of Artificial Sequence: Synthetic oligonucleotide
gacugguuuugccucacuc

SEQ ID NO: 1125159 - RNA, 19 nt, Artificial Sequence
  Description of Artificial Sequence: Synthetic oligonucleotide
gauaguaagugugaguuuu

SEQ ID NO: 1125160 - RNA, 19 nt, Artificial Sequence
  Description of Artificial Sequence: Synthetic oligonucleotide
gaaaaguuacaaucucccu

SEQ ID NO: 1125161 - RNA, 19 nt, Artificial Sequence
  Description of Artificial Sequence: Synthetic oligonucleotide
uguuucccgguggacauca

SEQ ID NO: 1125162 - RNA, 19 nt, Artificial Sequence
  Description of Artificial Sequence: Synthetic oligonucleotide
guuucucgagccacaaaag

SEQ ID NO: 1125163 - RNA, 19 nt, Artificial Sequence
  Description of Artificial Sequence: Synthetic oligonucleotide
auauccgccagugccuuuc

SEQ ID NO: 1125164 - RNA, 19 nt, Artificial Sequence
  Description of Artificial Sequence: Synthetic oligonucleotide
uuucccgguggacaucaga

SEQ ID NO: 1125165 - RNA, 19 nt, Artificial Sequence
  Description of Artificial Sequence: Synthetic oligonucleotide
aaccugauccguggaagug

SEQ ID NO: 1125166 - RNA, 19 nt, Artificial Sequence
  Description of Artificial Sequence: Synthetic oligonucleotide
aauagacgugggaauucug

SEQ ID NO: 1125167 - RNA, 19 nt, Artificial Sequence
  Description of Artificial Sequence: Synthetic oligonucleotide
ggucauacagucuggccug

SEQ ID NO: 1125168 - RNA, 19 nt, Artificial Sequence
  Description of Artificial Sequence: Synthetic oligonucleotide
gaagaagccacaucccggu

SEQ ID NO: 1125169 - RNA, 19 nt, Artificial Sequence
  Description of Artificial Sequence: Synthetic oligonucleotide
uauugaccauggcucacau

SEQ ID NO: 1125170 - RNA, 19 nt, Artificial Sequence
  Description of Artificial Sequence: Synthetic oligonucleotide
aggugagucuuccaagaaa

SEQ ID NO: 1125171 - RNA, 19 nt, Artificial Sequence
  Description of Artificial Sequence: Synthetic oligonucleotide
ggagacauggcugcuauac

SEQ ID NO: 1125172 - RNA, 19 nt, Artificial Sequence
  Description of Artificial Sequence: Synthetic oligonucleotide
agugggagccaucgggucu

SEQ ID NO: 1125173 - RNA, 19 nt, Artificial Sequence
  Description of Artificial Sequence: Synthetic oligonucleotide
ggaaguguaggggaggaug

SEQ ID NO: 1125174 - RNA, 19 nt, Artificial Sequence
  Description of Artificial Sequence: Synthetic oligonucleotide
gugacacggauguucucag

SEQ ID NO: 1125175 - RNA, 19 nt, Artificial Sequence
  Description of Artificial Sequence: Synthetic oligonucleotide
cacugguuuauugaccaug

SEQ ID NO: 1125176 - RNA, 19 nt, Artificial Sequence
  Description of Artificial Sequence: Synthetic oligonucleotide
auggcucacauuccagaca

SEQ ID NO: 1125177 - RNA, 19 nt, Artificial Sequence
  Description of Artificial Sequence: Synthetic oligonucleotide
cuccaagcguauacaguag

SEQ ID NO: 1125178 - RNA, 19 nt, Artificial Sequence
  Description of Artificial Sequence: Synthetic oligonucleotide
ccaagcguauacaguagcg

SEQ ID NO: 1125179 - RNA, 19 nt, Artificial Sequence
  Description of Artificial Sequence: Synthetic oligonucleotide
caggacgaccccucgguag

SEQ ID NO: 1125180 - RNA, 19 nt, Artificial Sequence
  Description of Artificial Sequence: Synthetic oligonucleotide
gacgugggaauucugggcu

SEQ ID NO: 1125181 - RNA, 19 nt, Artificial Sequence
  Description of Artificial Sequence: Synthetic oligonucleotide
acgaaaugugccccacaug

SEQ ID NO: 1125182 - RNA, 19 nt, Artificial Sequence
  Description of Artificial Sequence: Synthetic oligonucleotide
uagcgccaccaauagacgu

SEQ ID NO: 1125183 - RNA, 19 nt, Artificial Sequence
  Description of Artificial Sequence: Synthetic oligonucleotide
cagugacaaguggugaagg

SEQ ID NO: 1125184 - RNA, 19 nt, Artificial Sequence
  Description of Artificial Sequence: Synthetic oligonucleotide
ucgggucucucaaaacgaa

SEQ ID NO: 1125185 - RNA, 19 nt, Artificial Sequence
  Description of Artificial Sequence: Synthetic oligonucleotide
aacccucgggccgugacca

SEQ ID NO: 1125186 - RNA, 19 nt, Artificial Sequence
  Description of Artificial Sequence: Synthetic oligonucleotide
auaacuuaagcugcuucuu

SEQ ID NO: 1125187 - RNA, 19 nt, Artificial Sequence
  Description of Artificial Sequence: Synthetic oligonucleotide
acgcuaugaaggaacagcu

SEQ ID NO: 1125188 - RNA, 19 nt, Artificial Sequence
  Description of Artificial Sequence: Synthetic oligonucleotide
caaaacgaaaugugcccca

SEQ ID NO: 1125189 - RNA, 19 nt, Artificial Sequence
  Description of Artificial Sequence: Synthetic oligonucleotide
gaccauggcucacauucca

SEQ ID NO: 1125190 - RNA, 19 nt, Artificial Sequence
  Description of Artificial Sequence: Synthetic oligonucleotide
agcccggcugucaucaugg

SEQ ID NO: 1125191 - RNA, 19 nt, Artificial Sequence
  Description of Artificial Sequence: Synthetic oligonucleotide
uuauggguuaagagcuguu

SEQ ID NO: 1125192 - RNA, 19 nt, Artificial Sequence
  Description of Artificial Sequence: Synthetic oligonucleotide
ucccggucauacagucugg

SEQ ID NO: 1125193 - RNA, 19 nt, Artificial Sequence
  Description of Artificial Sequence: Synthetic oligonucleotide
gggacgauagaugccuucg

SEQ ID NO: 1125194 - RNA, 19 nt, Artificial Sequence
  Description of Artificial Sequence: Synthetic oligonucleotide
guagcgccaccaauagacg

SEQ ID NO: 1125195 - RNA, 19 nt, Artificial Sequence
  Description of Artificial Sequence: Synthetic oligonucleotide
acacugguucccugcccac

SEQ ID NO: 1125196 - RNA, 19 nt, Artificial Sequence
  Description of Artificial Sequence: Synthetic oligonucleotide
ggaaccugauccguggaag

SEQ ID NO: 1125197 - RNA, 19 nt, Artificial Sequence
  Description of Artificial Sequence: Synthetic oligonucleotide
uuacagucagguggccaag

SEQ ID NO: 1125198 - RNA, 19 nt, Artificial Sequence
  Description of Artificial Sequence: Synthetic oligonucleotide
cugauaguaagugugaguu

SEQ ID NO: 1125199 - RNA, 19 nt, Artificial Sequence
  Description of Artificial Sequence: Synthetic oligonucleotide
ccggacaucaaagugggag

SEQ ID NO: 1125200 - RNA, 19 nt, Artificial Sequence
  Description of Artificial Sequence: Synthetic oligonucleotide
auagaugccuucgcgucgu

SEQ ID NO: 1125201 - RNA, 19 nt, Artificial Sequence
  Description of Artificial Sequence: Synthetic oligonucleotide
guuggaugggaaccugauc

SEQ ID NO: 1125202 - RNA, 19 nt, Artificial Sequence
  Description of Artificial Sequence: Synthetic oligonucleotide
agagcucuagccaggggug

SEQ ID NO: 1125203 - RNA, 19 nt, Artificial Sequence
  Description of Artificial Sequence: Synthetic oligonucleotide
cuucgcgucgucgcugugg

SEQ ID NO: 1125204 - RNA, 19 nt, Artificial Sequence
  Description of Artificial Sequence: Synthetic oligonucleotide
agcguauacaguagcgcca

SEQ ID NO: 1125205 - RNA, 19 nt, Artificial Sequence
  Description of Artificial Sequence: Synthetic oligonucleotide
aucgggucucucaaaacga

SEQ ID NO: 1125206 - RNA, 19 nt, Artificial Sequence
  Description of Artificial Sequence: Synthetic oligonucleotide
ucccgguggacaucagaga

SEQ ID NO: 1125207 - RNA, 19 nt, Artificial Sequence
  Description of Artificial Sequence: Synthetic oligonucleotide
cagaagcucacagcuccgg

SEQ ID NO: 1125208 - RNA, 19 nt, Artificial Sequence
  Description of Artificial Sequence: Synthetic oligonucleotide
agaugccuucgcgucgucg

SEQ ID NO: 1125209 - RNA, 19 nt, Artificial Sequence
  Description of Artificial Sequence: Synthetic oligonucleotide
ccucuaacagugacaagug

SEQ ID NO: 1125210 - RNA, 19 nt, Artificial Sequence
  Description of Artificial Sequence: Synthetic oligonucleotide
aggccuagugaagccagag

SEQ ID NO: 1125211 - RNA, 19 nt, Artificial Sequence
  Description of Artificial Sequence: Synthetic oligonucleotide
uauccgccagugccuuucc

SEQ ID NO: 1125212 - RNA, 19 nt, Artificial Sequence
  Description of Artificial Sequence: Synthetic oligonucleotide
caccugauaguaaguguga

SEQ ID NO: 1125213 - RNA, 19 nt, Artificial Sequence
  Description of Artificial Sequence: Synthetic oligonucleotide
guuuacagucagguggcca

SEQ ID NO: 1125214 - RNA, 19 nt, Artificial Sequence
  Description of Artificial Sequence: Synthetic oligonucleotide
agcgccaccaauagacgug

SEQ ID NO: 1125215 - RNA, 19 nt, Artificial Sequence
  Description of Artificial Sequence: Synthetic oligonucleotide
gaccucuaacagugacaag

SEQ ID NO: 1125216 - RNA, 19 nt, Artificial Sequence
  Description of Artificial Sequence: Synthetic oligonucleotide
gguuucgggacgauagaug

SEQ ID NO: 1125217 - RNA, 19 nt, Artificial Sequence
  Description of Artificial Sequence: Synthetic oligonucleotide
gcuuuguuggaacguggug

SEQ ID NO: 1125218 - RNA, 19 nt, Artificial Sequence
  Description of Artificial Sequence: Synthetic oligonucleotide
ugcagcaauuauggguuaa

SEQ ID NO: 1125219 - RNA, 19 nt, Artificial Sequence
  Description of Artificial Sequence: Synthetic oligonucleotide
cauaguccaagccugggau

SEQ ID NO: 1125220 - RNA, 19 nt, Artificial Sequence
  Description of Artificial Sequence: Synthetic oligonucleotide
ccauaacuuaagcugcuuc

SEQ ID NO: 1125221 - RNA, 19 nt, Artificial Sequence
  Description of Artificial Sequence: Synthetic oligonucleotide
aaaggaccucuaacaguga

SEQ ID NO: 1125222 - RNA, 19 nt, Artificial Sequence
  Description of Artificial Sequence: Synthetic oligonucleotide
cauguuggaugggaaccug

SEQ ID NO: 1125223 - RNA, 19 nt, Artificial Sequence
  Description of Artificial Sequence: Synthetic oligonucleotide
gaaccugauccguggaagu

SEQ ID NO: 1125224 - RNA, 19 nt, Artificial Sequence
  Description of Artificial Sequence: Synthetic oligonucleotide
gcucauguuggaugggaac

SEQ ID NO: 1125225 - RNA, 19 nt, Artificial Sequence
  Description of Artificial Sequence: Synthetic oligonucleotide
uuggaacgugguguaggca

SEQ ID NO: 1125226 - RNA, 19 nt, Artificial Sequence
  Description of Artificial Sequence: Synthetic oligonucleotide
caugguuagccaagaaggu

SEQ ID NO: 1125227 - RNA, 19 nt, Artificial Sequence
  Description of Artificial Sequence: Synthetic oligonucleotide
ggaccucuaacagugacaa

SEQ ID NO: 1125228 - RNA, 19 nt, Artificial Sequence
  Description of Artificial Sequence: Synthetic oligonucleotide
acgguuucgggacgauaga

SEQ ID NO: 1125229 - RNA, 19 nt, Artificial Sequence
  Description of Artificial Sequence: Synthetic oligonucleotide
ugguggcuaaucaguguuu

SEQ ID NO: 1125230 - RNA, 19 nt, Artificial Sequence
  Description of Artificial Sequence: Synthetic oligonucleotide
cauuccagacaacccguga

SEQ ID NO: 1125231 - RNA, 19 nt, Artificial Sequence
  Description of Artificial Sequence: Synthetic oligonucleotide
aauauccgccagugccuuu

SEQ ID NO: 1125232 - RNA, 19 nt, Artificial Sequence
  Description of Artificial Sequence: Synthetic oligonucleotide
agaauuagggagagacuua

SEQ ID NO: 1125233 - RNA, 19 nt, Artificial Sequence
  Description of Artificial Sequence: Synthetic oligonucleotide
caacccucgggccgugacc

SEQ ID NO: 1125234 - RNA, 19 nt, Artificial Sequence
  Description of Artificial Sequence: Synthetic oligonucleotide
cuucugcacgguuucggga

SEQ ID NO: 1125235 - RNA, 19 nt, Artificial Sequence
  Description of Artificial Sequence: Synthetic oligonucleotide
gcccauauagaaagggaug

SEQ ID NO: 1125236 - RNA, 19 nt, Artificial Sequence
  Description of Artificial Sequence: Synthetic oligonucleotide
cuuagagccguggccagca

SEQ ID NO: 1125237 - RNA, 19 nt, Artificial Sequence
  Description of Artificial Sequence: Synthetic oligonucleotide
cgugguguaggcagggccg

SEQ ID NO: 1125238 - RNA, 19 nt, Artificial Sequence
  Description of Artificial Sequence: Synthetic oligonucleotide
gcggccucaacccucgggc

SEQ ID NO: 1125239 - RNA, 19 nt, Artificial Sequence
  Description of Artificial Sequence: Synthetic oligonucleotide
cacagcggccucaacccuc

SEQ ID NO: 1125240 - RNA, 19 nt, Artificial Sequence
  Description of Artificial Sequence: Synthetic oligonucleotide
accauggcucacauuccag

SEQ ID NO: 1125241 - RNA, 19 nt, Artificial Sequence
  Description of Artificial Sequence: Synthetic oligonucleotide
ggacgauagaugccuucgc

SEQ ID NO: 1125242 - RNA, 19 nt, Artificial Sequence
  Description of Artificial Sequence: Synthetic oligonucleotide
uggagccgaagaagccaca

SEQ ID NO: 1125243 - RNA, 19 nt, Artificial Sequence
  Description of Artificial Sequence: Synthetic oligonucleotide
uggcugaauuccugcacuu

SEQ ID NO: 1125244 - RNA, 19 nt, Artificial Sequence
  Description of Artificial Sequence: Synthetic oligonucleotide
ggccucaacccucgggccg

SEQ ID NO: 1125245 - RNA, 19 nt, Artificial Sequence
  Description of Artificial Sequence: Synthetic oligonucleotide
cugauccguggaaguguag

SEQ ID NO: 1125246 - RNA, 19 nt, Artificial Sequence
  Description of Artificial Sequence: Synthetic oligonucleotide
cagcaauuauggguuaaga

SEQ ID NO: 1125247 - RNA, 19 nt, Artificial Sequence
  Description of Artificial Sequence: Synthetic oligonucleotide
gccuagugaagccagagau

SEQ ID NO: 1125248 - RNA, 19 nt, Artificial Sequence
  Description of Artificial Sequence: Synthetic oligonucleotide
cccauauagaaagggauga

SEQ ID NO: 1125249 - RNA, 19 nt, Artificial Sequence
  Description of Artificial Sequence: Synthetic oligonucleotide
agacaacccgugacaacug

SEQ ID NO: 1125250 - RNA, 19 nt, Artificial Sequence
  Description of Artificial Sequence: Synthetic oligonucleotide
acacagcggccucaacccu

SEQ ID NO: 1125251 - RNA, 19 nt, Artificial Sequence
  Description of Artificial Sequence: Synthetic oligonucleotide
cacauuccagacaacccgu

SEQ ID NO: 1125252 - RNA, 19 nt, Artificial Sequence
  Description of Artificial Sequence: Synthetic oligonucleotide
cgauagaugccuucgcguc

SEQ ID NO: 1125253 - RNA, 19 nt, Artificial Sequence
  Description of Artificial Sequence: Synthetic oligonucleotide
cuauacugaaaugcaggcu

SEQ ID NO: 1125254 - RNA, 19 nt, Artificial Sequence
  Description of Artificial Sequence: Synthetic oligonucleotide
uccggacaucaaaguggga

SEQ ID NO: 1125255 - RNA, 19 nt, Artificial Sequence
  Description of Artificial Sequence: Synthetic oligonucleotide
augccuucgcgucgucgcu

SEQ ID NO: 1125256 - RNA, 19 nt, Artificial Sequence
  Description of Artificial Sequence: Synthetic oligonucleotide
ugacagacuuuugcucaau

SEQ ID NO: 1125257 - RNA, 19 nt, Artificial Sequence
  Description of Artificial Sequence: Synthetic oligonucleotide
cacggauguucucaguugu

SEQ ID NO: 1125258 - RNA, 19 nt, Artificial Sequence
  Description of Artificial Sequence: Synthetic oligonucleotide
cauagagagcccggcuguc

SEQ ID NO: 1125259 - RNA, 19 nt, Artificial Sequence
  Description of Artificial Sequence: Synthetic oligonucleotide
ggcggggcugaccuuggag

SEQ ID NO: 1125260 - RNA, 19 nt, Artificial Sequence
  Description of Artificial Sequence: Synthetic oligonucleotide
gucauacagucuggccugc

SEQ ID NO: 1125261 - RNA, 19 nt, Artificial Sequence
  Description of Artificial Sequence: Synthetic oligonucleotide
ccauauagaaagggaugac

SEQ ID NO: 1125262 - RNA, 19 nt, Artificial Sequence
  Description of Artificial Sequence: Synthetic oligonucleotide
ugccuucgcgucgucgcug

SEQ ID NO: 1125263 - RNA, 19 nt, Artificial Sequence
  Description of Artificial Sequence: Synthetic oligonucleotide
gcgccaccaauagacgugg

SEQ ID NO: 1125264 - RNA, 19 nt, Artificial Sequence
  Description of Artificial Sequence: Synthetic oligonucleotide
cagucgcgggcaucaauca

SEQ ID NO: 1125265 - RNA, 19 nt, Artificial Sequence
  Description of Artificial Sequence: Synthetic oligonucleotide
caccuccuuagagccgugg

SEQ ID NO: 1125266 - RNA, 19 nt, Artificial Sequence
  Description of Artificial Sequence: Synthetic oligonucleotide
ccggucauacagucuggcc

SEQ ID NO: 1125267 - RNA, 19 nt, Artificial Sequence
  Description of Artificial Sequence: Synthetic oligonucleotide
gcagucgcgggcaucaauc

SEQ ID NO: 1125268 - RNA, 19 nt, Artificial Sequence
  Description of Artificial Sequence: Synthetic oligonucleotide
gcuaaucaguguuuacagu

SEQ ID NO: 1125269 - RNA, 19 nt, Artificial Sequence
  Description of Artificial Sequence: Synthetic oligonucleotide
acaggacgaccccucggua

SEQ ID NO: 1125270 - RNA, 19 nt, Artificial Sequence
  Description of Artificial Sequence: Synthetic oligonucleotide
ccgaagcuguaccacauca

SEQ ID NO: 1125271 - RNA, 19 nt, Artificial Sequence
  Description of Artificial Sequence: Synthetic oligonucleotide
ccgugacaacugaacacag

SEQ ID NO: 1125272 - RNA, 19 nt, Artificial Sequence
  Description of Artificial Sequence: Synthetic oligonucleotide
agccguggccagcaggguu

SEQ ID NO: 1125273 - RNA, 19 nt, Artificial Sequence
  Description of Artificial Sequence: Synthetic oligonucleotide
ggcugaauuccugcacuug

SEQ ID NO: 1125274 - RNA, 19 nt, Artificial Sequence
  Description of Artificial Sequence: Synthetic oligonucleotide
gccaccaauagacguggga

SEQ ID NO: 1125275 - RNA, 19 nt, Artificial Sequence
  Description of Artificial Sequence: Synthetic oligonucleotide
caauagacgugggaauucu

SEQ ID NO: 1125276 - RNA, 19 nt, Artificial Sequence
  Description of Artificial Sequence: Synthetic oligonucleotide
cugacugguuuugccucac

SEQ ID NO: 1125277 - RNA, 19 nt, Artificial Sequence
  Description of Artificial Sequence: Synthetic oligonucleotide
gcguauacaguagcgccac

SEQ ID NO: 1125278 - RNA, 19 nt, Artificial Sequence
  Description of Artificial Sequence: Synthetic oligonucleotide
cugugacacggauguucuc

SEQ ID NO: 1125279 - RNA, 19 nt, Artificial Sequence
  Description of Artificial Sequence: Synthetic oligonucleotide
ccagggaaacaggacgacc

SEQ ID NO: 1125280 - RNA, 19 nt, Artificial Sequence
  Description of Artificial Sequence: Synthetic oligonucleotide
gguuagccaagaaggucac

SEQ ID NO: 1125281 - RNA, 19 nt, Artificial Sequence
  Description of Artificial Sequence: Synthetic oligonucleotide
ccaauagacgugggaauuc

SEQ ID NO: 1125282 - RNA, 19 nt, Artificial Sequence
  Description of Artificial Sequence: Synthetic oligonucleotide
agccaggggugauucuuuu

SEQ ID NO: 1125283 - RNA, 19 nt, Artificial Sequence
  Description of Artificial Sequence: Synthetic oligonucleotide
caccgaccgcacacagcgg

SEQ ID NO: 1125284 - RNA, 19 nt, Artificial Sequence
  Description of Artificial Sequence: Synthetic oligonucleotide
gccaucgggucucucaaaa

SEQ ID NO: 1125285 - RNA, 19 nt, Artificial Sequence
  Description of Artificial Sequence: Synthetic oligonucleotide
ccguggaaguguaggggag

SEQ ID NO: 1125286 - RNA, 19 nt, Artificial Sequence
  Description of Artificial Sequence: Synthetic oligonucleotide
ucgggacgauagaugccuu

SEQ ID NO: 1125287 - RNA, 19 nt, Artificial Sequence
  Description of Artificial Sequence: Synthetic oligonucleotide
cagagaccgugaccaccag

SEQ ID NO: 1125288 - RNA, 19 nt, Artificial Sequence
  Description of Artificial Sequence: Synthetic oligonucleotide
auggugggauccggacauc

SEQ ID NO: 1125289 - RNA, 19 nt, Artificial Sequence
  Description of Artificial Sequence: Synthetic oligonucleotide
ccaccaauagacgugggaa

SEQ ID NO: 1125290 - RNA, 19 nt, Artificial Sequence
  Description of Artificial Sequence: Synthetic oligonucleotide
caggcucguaguguuucuc

SEQ ID NO: 1125291 - RNA, 19 nt, Artificial Sequence
  Description of Artificial Sequence: Synthetic oligonucleotide
ggccuagugaagccagaga

SEQ ID NO: 1125292 - RNA, 19 nt, Artificial Sequence
  Description of Artificial Sequence: Synthetic oligonucleotide
acgaccccucgguagccaa

SEQ ID NO: 1125293 - RNA, 19 nt, Artificial Sequence
  Description of Artificial Sequence: Synthetic oligonucleotide
cagcuggccuaccagugaa

SEQ ID NO: 1125294 - RNA, 19 nt, Artificial Sequence
  Description of Artificial Sequence: Synthetic oligonucleotide
cccgugacaacugaacaca

SEQ ID NO: 1125295 - RNA, 19 nt, Artificial Sequence
  Description of Artificial Sequence: Synthetic oligonucleotide
gaccccucgguagccaaaa

SEQ ID NO: 1125296 - RNA, 19 nt, Artificial Sequence
  Description of Artificial Sequence: Synthetic oligonucleotide
agccaucgggucucucaaa

SEQ ID NO: 1125297 - RNA, 19 nt, Artificial Sequence
  Description of Artificial Sequence: Synthetic oligonucleotide
ccucaugcccauauagaaa

SEQ ID NO: 1125298 - RNA, 19 nt, Artificial Sequence
  Description of Artificial Sequence: Synthetic oligonucleotide
caguagcgccaccaauaga

SEQ ID NO: 1125299 - RNA, 19 nt, Artificial Sequence
  Description of Artificial Sequence: Synthetic oligonucleotide
ccagcggaagggucccugc

SEQ ID NO: 1125300 - RNA, 19 nt, Artificial Sequence
  Description of Artificial Sequence: Synthetic oligonucleotide
gggaaccugauccguggaa

SEQ ID NO: 1125301 - RNA, 19 nt, Artificial Sequence
  Description of Artificial Sequence: Synthetic oligonucleotide
ggcccgucgggccgcacag

SEQ ID NO: 1125302 - RNA, 19 nt, Artificial Sequence
  Description of Artificial Sequence: Synthetic oligonucleotide
cguggaaguguaggggagg

SEQ ID NO: 1125303 - RNA, 19 nt, Artificial Sequence
  Description of Artificial Sequence: Synthetic oligonucleotide
cacaucccggucauacagu

SEQ ID NO: 1125304 - RNA, 19 nt, Artificial Sequence
  Description of Artificial Sequence: Synthetic oligonucleotide
gcagcccaauucugccucc

SEQ ID NO: 1125305 - RNA, 19 nt, Artificial Sequence
  Description of Artificial Sequence: Synthetic oligonucleotide
ggucccugcuccaccgacc

SEQ ID NO: 1125306 - RNA, 19 nt, Artificial Sequence
  Description of Artificial Sequence: Synthetic oligonucleotide
ggaaagcggcuaggcuugg

SEQ ID NO: 1125307 - RNA, 19 nt, Artificial Sequence
  Description of Artificial Sequence: Synthetic oligonucleotide
gacgaccccucgguagcca

SEQ ID NO: 1125308 - RNA, 19 nt, Artificial Sequence
  Description of Artificial Sequence: Synthetic oligonucleotide
gccaggggugauucuuuuc

SEQ ID NO: 1125309 - RNA, 19 nt, Artificial Sequence
  Description of Artificial Sequence: Synthetic oligonucleotide
gguggccaagugagcacug

SEQ ID NO: 1125310 - RNA, 19 nt, Artificial Sequence
  Description of Artificial Sequence: Synthetic oligonucleotide
ccgaccgcacacagcggcc

SEQ ID NO: 1125311 - RNA, 19 nt, Artificial Sequence
  Description of Artificial Sequence: Synthetic oligonucleotide
ugcacgguuucgggacgau

SEQ ID NO: 1125312 - RNA, 19 nt, Artificial Sequence
  Description of Artificial Sequence: Synthetic oligonucleotide
cccggucauacagucuggc

SEQ ID NO: 1125313 - RNA, 19 nt, Artificial Sequence
  Description of Artificial Sequence: Synthetic oligonucleotide
cguaguguuucucgagcca

SEQ ID NO: 1125314 - RNA, 19 nt, Artificial Sequence
  Description of Artificial Sequence: Synthetic oligonucleotide
caucccggucauacagucu

SEQ ID NO: 1125315 - RNA, 19 nt, Artificial Sequence
  Description of Artificial Sequence: Synthetic oligonucleotide
gccguggccagcaggguuc

SEQ ID NO: 1125316 - RNA, 19 nt, Artificial Sequence
  Description of Artificial Sequence: Synthetic oligonucleotide
gccagggaaacaggacgac

SEQ ID NO: 1125317 - RNA, 19 nt, Artificial Sequence
  Description of Artificial Sequence: Synthetic oligonucleotide
ccaccagcggaaggguccc

SEQ ID NO: 1125318 - RNA, 19 nt, Artificial Sequence
  Description of Artificial Sequence: Synthetic oligonucleotide
ggacgaccccucgguagcc

SEQ ID NO: 1125319 - RNA, 19 nt, Artificial Sequence
  Description of Artificial Sequence: Synthetic oligonucleotide
guccucgaacugucuccaa

SEQ ID NO: 1125320 - RNA, 19 nt, Artificial Sequence
  Description of Artificial Sequence: Synthetic oligonucleotide
cguauacaguagcgccacc

SEQ ID NO: 1125321 - RNA, 19 nt, Artificial Sequence
  Description of Artificial Sequence: Synthetic oligonucleotide
cgggacgauagaugccuuc

SEQ ID NO: 1125322 - RNA, 19 nt, Artificial Sequence
  Description of Artificial Sequence: Synthetic oligonucleotide
cagguucuccaagcguaua

SEQ ID NO: 1125323 - RNA, 19 nt, Artificial Sequence
  Description of Artificial Sequence: Synthetic oligonucleotide
cagcggaagggucccugcu

SEQ ID NO: 1125324 - RNA, 19 nt, Artificial Sequence
  Description of Artificial Sequence: Synthetic oligonucleotide
ccuaccagugaaggccuga

SEQ ID NO: 1125325 - RNA, 19 nt, Artificial Sequence
  Description of Artificial Sequence: Synthetic oligonucleotide
ccgggcggggcugaccuug

SEQ ID NO: 1125326 - RNA, 19 nt, Artificial Sequence
  Description of Artificial Sequence: Synthetic oligonucleotide
ggccuaccagugaaggccu

SEQ ID NO: 1125327 - RNA, 19 nt, Artificial Sequence
  Description of Artificial Sequence: Synthetic oligonucleotide
gcuccaccgaccgcacaca

SEQ ID NO: 1125328 - RNA, 19 nt, Artificial Sequence
  Description of Artificial Sequence: Synthetic oligonucleotide
gggcccgucgggccgcaca

SEQ ID NO: 1125329 - RNA, 19 nt, Artificial Sequence
  Description of Artificial Sequence: Synthetic oligonucleotide
gggagacauggcugcuaua

SEQ ID NO: 1125330 - RNA, 19 nt, Artificial Sequence
  Description of Artificial Sequence: Synthetic oligonucleotide
cgccaccaauagacguggg

SEQ ID NO: 1125331 - RNA, 19 nt, Artificial Sequence
  Description of Artificial Sequence: Synthetic oligonucleotide
gccuaccagugaaggccug

SEQ ID NO: 1125332 - RNA, 19 nt, Artificial Sequence
  Description of Artificial Sequence: Synthetic oligonucleotide
ggcagucgcgggcaucaau

SEQ ID NO: 1125333 - RNA, 19 nt, Artificial Sequence
  Description of Artificial Sequence: Synthetic oligonucleotide
cucaacccucgggccguga

SEQ ID NO: 1125334 - RNA, 19 nt, Artificial Sequence
  Description of Artificial Sequence: Synthetic oligonucleotide
gccuucgcgucgucgcugu

SEQ ID NO: 1125335 - RNA, 19 nt, Artificial Sequence
  Description of Artificial Sequence: Synthetic oligonucleotide
cguccucgaacugucucca

SEQ ID NO: 1125336 - RNA, 19 nt, Artificial Sequence
  Description of Artificial Sequence: Synthetic oligonucleotide
cgggaaaccugacugguuu

SEQ ID NO: 1125337 - RNA, 19 nt, Artificial Sequence
  Description of Artificial Sequence: Synthetic oligonucleotide
gcacgguuucgggacgaua

SEQ ID NO: 1125338 - RNA, 19 nt, Artificial Sequence
  Description of Artificial Sequence: Synthetic oligonucleotide
ccugaggguggugucuucu

SEQ ID NO: 1125339 - RNA, 19 nt, Artificial Sequence
  Description of Artificial Sequence: Synthetic oligonucleotide
gcccgucgggccgcacagg

SEQ ID NO: 1125340 - RNA, 19 nt, Artificial Sequence
  Description of Artificial Sequence: Synthetic oligonucleotide
ccaggcucguaguguuucu

SEQ ID NO: 1125341 - RNA, 19 nt, Artificial Sequence
  Description of Artificial Sequence: Synthetic oligonucleotide
ccuucgcgucgucgcugug

SEQ ID NO: 1125342 - RNA, 19 nt, Artificial Sequence
  Description of Artificial Sequence: Synthetic oligonucleotide
gcggcuaggcuuggucacu

SEQ ID NO: 1125343 - RNA, 19 nt, Artificial Sequence
  Description of Artificial Sequence: Synthetic oligonucleotide
ccucaacccucgggccgug

SEQ ID NO: 1125344 - RNA, 19 nt, Artificial Sequence
  Description of Artificial Sequence: Synthetic oligonucleotide
ccgggaaaccugacugguu

SEQ ID NO: 1125345 - RNA, 19 nt, Artificial Sequence
  Description of Artificial Sequence: Synthetic oligonucleotide
cgguuucgggacgauagau

SEQ ID NO: 1125346 - RNA, 19 nt, Artificial Sequence
  Description of Artificial Sequence: Synthetic oligonucleotide
cgaccccucgguagccaaa

SEQ ID NO: 1125347 - RNA, 19 nt, Artificial Sequence
  Description of Artificial Sequence: Synthetic oligonucleotide
gggcagucgcgggcaucaa

SEQ ID NO: 1125348 - RNA, 19 nt, Artificial Sequence
  Description of Artificial Sequence: Synthetic oligonucleotide
ccgcacacagcggccucaa

SEQ ID NO: 1125349 - RNA, 19 nt, Artificial Sequence
  Description of Artificial Sequence: Synthetic oligonucleotide
caccagcggaagggucccu

SEQ ID NO: 1125350 - RNA, 19 nt, Artificial Sequence
  Description of Artificial Sequence: Synthetic oligonucleotide
gccgggcggggcugaccuu

SEQ ID NO: 1125351 - RNA, 19 nt, Artificial Sequence
  Description of Artificial Sequence: Synthetic oligonucleotide
aaacaucugaucaacaucc

SEQ ID NO: 1125352 - RNA, 19 nt, Artificial Sequence
  Description of Artificial Sequence: Synthetic oligonucleotide
ucggaaauaaauauuaacc

SEQ ID NO: 1125353 - RNA, 19 nt, Artificial Sequence
  Description of Artificial Sequence: Synthetic oligonucleotide
aaucgaaugggcuguagcc

SEQ ID NO: 1125354 - RNA, 19 nt, Artificial Sequence
  Description of Artificial Sequence: Synthetic oligonucleotide
aaagaucuaaggcauuagc

SEQ ID NO: 1125355 - RNA, 19 nt, Artificial Sequence
  Description of Artificial Sequence: Synthetic oligonucleotide
aguaauaguugcuugaguc

SEQ ID NO: 1125356 - RNA, 19 nt, Artificial Sequence
  Description of Artificial Sequence: Synthetic oligonucleotide
aaugcuauaugccauguca

SEQ ID NO: 1125357 - RNA, 19 nt, Artificial Sequence
  Description of Artificial Sequence: Synthetic oligonucleotide
uuuaauucugugcuuacag

SEQ ID NO: 1125358 - RNA, 19 nt, Artificial Sequence
  Description of Artificial Sequence: Synthetic oligonucleotide
uccuguaucugcaaaaggg

SEQ ID NO: 1125359 - RNA, 19 nt, Artificial Sequence
  Description of Artificial Sequence: Synthetic oligonucleotide
uguguaagaggacagaagu

SEQ ID NO: 1125360 - RNA, 19 nt, Artificial Sequence
  Description of Artificial Sequence: Synthetic oligonucleotide
aaggcauuagccuggagag

SEQ ID NO: 1125361 - RNA, 19 nt, Artificial Sequence
  Description of Artificial Sequence: Synthetic oligonucleotide
agagcuaaggaagagacac

SEQ ID NO: 1125362 - RNA, 19 nt, Artificial Sequence
  Description of Artificial Sequence: Synthetic oligonucleotide
guagauaacacuuggggag

SEQ ID NO: 1125363 - RNA, 19 nt, Artificial Sequence
  Description of Artificial Sequence: Synthetic oligonucleotide
aguuuaaacgccuagggga

SEQ ID NO: 1125364 - RNA, 19 nt, Artificial Sequence
  Description of Artificial Sequence: Synthetic oligonucleotide
cugaauucauuauacagag

SEQ ID NO: 1125365 - RNA, 19 nt, Artificial Sequence
  Description of Artificial Sequence: Synthetic oligonucleotide
aacuacuacugccuucugc

SEQ ID NO: 1125366 - RNA, 19 nt, Artificial Sequence
  Description of Artificial Sequence: Synthetic oligonucleotide
uuuuauuccuuguaugccc

SEQ ID NO: 1125367 - RNA, 19 nt, Artificial Sequence
  Description of Artificial Sequence: Synthetic oligonucleotide
agaaauauaguaauaguug

SEQ ID NO: 1125368 - RNA, 19 nt, Artificial Sequence
  Description of Artificial Sequence: Synthetic oligonucleotide
uaaggcauuagccuggaga

SEQ ID NO: 1125369 - RNA, 19 nt, Artificial Sequence
  Description of Artificial Sequence: Synthetic oligonucleotide
auccauuguaggcucaucc

SEQ ID NO: 1125370 - RNA, 19 nt, Artificial Sequence
  Description of Artificial Sequence: Synthetic oligonucleotide
uuugcgaauguuaaacaug

SEQ ID NO: 1125371 - RNA, 19 nt, Artificial Sequence
  Description of Artificial Sequence: Synthetic oligonucleotide
aaguacgucaauuuucccu

SEQ ID NO: 1125372 - RNA, 19 nt, Artificial Sequence
  Description of Artificial Sequence: Synthetic oligonucleotide
caugucagagcuaaggaag

SEQ ID NO: 1125373 - RNA, 19 nt, Artificial Sequence
  Description of Artificial Sequence: Synthetic oligonucleotide
gauaaaucggccucuuugc

SEQ ID NO: 1125374 - RNA, 19 nt, Artificial Sequence
  Description of Artificial Sequence: Synthetic oligonucleotide
aaacgugacaggcuauccg

SEQ ID NO: 1125375 - RNA, 19 nt, Artificial Sequence
  Description of Artificial Sequence: Synthetic oligonucleotide
auaucuuccugauagauuu

SEQ ID NO: 1125376 - RNA, 19 nt, Artificial Sequence
  Description of Artificial Sequence: Synthetic oligonucleotide
aguuuugccaaugacaucu

SEQ ID NO: 1125377 - RNA, 19 nt, Artificial Sequence
  Description of Artificial Sequence: Synthetic oligonucleotide
agaaaggacauguucuauc

SEQ ID NO: 1125378 - RNA, 19 nt, Artificial Sequence
  Description of Artificial Sequence: Synthetic oligonucleotide
ucuaacuuccagaacagau

SEQ ID NO: 1125379 - RNA, 19 nt, Artificial Sequence
  Description of Artificial Sequence: Synthetic oligonucleotide
ucuccgcacaguuuaaacg

SEQ ID NO: 1125380 - RNA, 19 nt, Artificial Sequence
  Description of Artificial Sequence: Synthetic oligonucleotide
agaucugaauucauuauac

SEQ ID NO: 1125381 - RNA, 19 nt, Artificial Sequence
  Description of Artificial Sequence: Synthetic oligonucleotide
aggcuauccguacucaacc

SEQ ID NO: 1125382 - RNA, 19 nt, Artificial Sequence
  Description of Artificial Sequence: Synthetic oligonucleotide
acuacuacugccuucugca

SEQ ID NO: 1125383 - RNA, 19 nt, Artificial Sequence
  Description of Artificial Sequence: Synthetic oligonucleotide
uuuauuccuuguaugcccc

SEQ ID NO: 1125384 - RNA, 19 nt, Artificial Sequence
  Description of Artificial Sequence: Synthetic oligonucleotide
uguaucugcaaaagggaga

SEQ ID NO: 1125385 - RNA, 19 nt, Artificial Sequence
  Description of Artificial Sequence: Synthetic oligonucleotide
auuguaggcucauccuucc

SEQ ID NO: 1125386 - RNA, 19 nt, Artificial Sequence
  Description of Artificial Sequence: Synthetic oligonucleotide
ugcugaauauaucggaugu

SEQ ID NO: 1125387 - RNA, 19 nt, Artificial Sequence
  Description of Artificial Sequence: Synthetic oligonucleotide
aaaucggccucuuugcagu

SEQ ID NO: 1125388 - RNA, 19 nt, Artificial Sequence
  Description of Artificial Sequence: Synthetic oligonucleotide
guaauaguugcuugagucc

SEQ ID NO: 1125389 - RNA, 19 nt, Artificial Sequence
  Description of Artificial Sequence: Synthetic oligonucleotide
ugcagucuuuuacaagugg

SEQ ID NO: 1125390 - RNA, 19 nt, Artificial Sequence
  Description of Artificial Sequence: Synthetic oligonucleotide
gaauauaucggauguaugu

SEQ ID NO: 1125391 - RNA, 19 nt, Artificial Sequence
  Description of Artificial Sequence: Synthetic oligonucleotide
aaugcggccacuucagccu

SEQ ID NO: 1125392 - RNA, 19 nt, Artificial Sequence
  Description of Artificial Sequence: Synthetic oligonucleotide
ugaauauaucggauguaug

SEQ ID NO: 1125393 - RNA, 19 nt, Artificial Sequence
  Description of Artificial Sequence: Synthetic oligonucleotide
uguuguuucacaagucccu

SEQ ID NO: 1125394 - RNA, 19 nt, Artificial Sequence
  Description of Artificial Sequence: Synthetic oligonucleotide
ugucuaagaaaggacaugu

SEQ ID NO: 1125395 - RNA, 19 nt, Artificial Sequence
  Description of Artificial Sequence: Synthetic oligonucleotide
aagaucugaauucauuaua

SEQ ID NO: 1125396 - RNA, 19 nt, Artificial Sequence
  Description of Artificial Sequence: Synthetic oligonucleotide
cuuucaaccuuucguagcc

SEQ ID NO: 1125397 - RNA, 19 nt, Artificial Sequence
  Description of Artificial Sequence: Synthetic oligonucleotide
aacgugacaggcuauccgu

SEQ ID NO: 1125398 - RNA, 19 nt, Artificial Sequence
  Description of Artificial Sequence: Synthetic oligonucleotide
aaauauaguaauaguugcu

SEQ ID NO: 1125399 - RNA, 19 nt, Artificial Sequence
  Description of Artificial Sequence: Synthetic oligonucleotide
uccucggaaauaaauauua

SEQ ID NO: 1125400 - RNA, 19 nt, Artificial Sequence
  Description of Artificial Sequence: Synthetic oligonucleotide
uuugucuaagaaaggacau

SEQ ID NO: 1125401 - RNA, 19 nt, Artificial Sequence
  Description of Artificial Sequence: Synthetic oligonucleotide
aaguggcuguaucacauug

SEQ ID NO: 1125402 - RNA, 19 nt, Artificial Sequence
  Description of Artificial Sequence: Synthetic oligonucleotide
aguuuaauucugugcuuac

SEQ ID NO: 1125403 - RNA, 19 nt, Artificial Sequence
  Description of Artificial Sequence: Synthetic oligonucleotide
aacugcauaauuucccaaa

SEQ ID NO: 1125404 - RNA, 19 nt, Artificial Sequence
  Description of Artificial Sequence: Synthetic oligonucleotide
ucucuaacuuccagaacag

SEQ ID NO: 1125405 - RNA, 19 nt, Artificial Sequence
  Description of Artificial Sequence: Synthetic oligonucleotide
uuuugcgaauguuaaacau

SEQ ID NO: 1125406 - RNA, 19 nt, Artificial Sequence
  Description of Artificial Sequence: Synthetic oligonucleotide
cauguucuauccauuguag

SEQ ID NO: 1125407 - RNA, 19 nt, Artificial Sequence
  Description of Artificial Sequence: Synthetic oligonucleotide
cuccgcacaguuuaaacgc

SEQ ID NO: 1125408 - RNA, 19 nt, Artificial Sequence
  Description of Artificial Sequence: Synthetic oligonucleotide
aaucgcagcacuucuuagu

SEQ ID NO: 1125409 - RNA, 19 nt, Artificial Sequence
  Description of Artificial Sequence: Synthetic oligonucleotide
uucaaugcggccacuucag

SEQ ID NO: 1125410 - RNA, 19 nt, Artificial Sequence
  Description of Artificial Sequence: Synthetic oligonucleotide
aaaucgcagcacuucuuag

SEQ ID NO: 1125411 - RNA, 19 nt, Artificial Sequence
  Description of Artificial Sequence: Synthetic oligonucleotide
auguucuauccauuguagg

SEQ ID NO: 1125412 - RNA, 19 nt, Artificial Sequence
  Description of Artificial Sequence: Synthetic oligonucleotide
ugauagauuuugucuaaga

SEQ ID NO: 1125413 - RNA, 19 nt, Artificial Sequence
  Description of Artificial Sequence: Synthetic oligonucleotide
uguuaaacauggaaagaua

SEQ ID NO: 1125414 - RNA, 19 nt, Artificial Sequence
  Description of Artificial Sequence: Synthetic oligonucleotide
uuucacgaaucgaaugggc

SEQ ID NO: 1125415 - RNA, 19 nt, Artificial Sequence
  Description of Artificial Sequence: Synthetic oligonucleotide
aauguguaagaggacagaa

SEQ ID NO: 1125416 - RNA, 19 nt, Artificial Sequence
  Description of Artificial Sequence: Synthetic oligonucleotide
aauaguugcuugagucccc

SEQ ID NO: 1125417 - RNA, 19 nt, Artificial Sequence
  Description of Artificial Sequence: Synthetic oligonucleotide
uucauccuaaaacagucua

SEQ ID NO: 1125418 - RNA, 19 nt, Artificial Sequence
  Description of Artificial Sequence: Synthetic oligonucleotide
gaaucgaaugggcuguagc

SEQ ID NO: 1125419 - RNA, 19 nt, Artificial Sequence
  Description of Artificial Sequence: Synthetic oligonucleotide
ugacauuugcuucucucac

SEQ ID NO: 1125420 - RNA, 19 nt, Artificial Sequence
  Description of Artificial Sequence: Synthetic oligonucleotide
aguugcuugaguccccuag

SEQ ID NO: 1125421 - RNA, 19 nt, Artificial Sequence
  Description of Artificial Sequence: Synthetic oligonucleotide
aauauaucggauguaugua

SEQ ID NO: 1125422 - RNA, 19 nt, Artificial Sequence
  Description of Artificial Sequence: Synthetic oligonucleotide
aucgaaugggcuguagccc

SEQ ID NO: 1125423 - RNA, 19 nt, Artificial Sequence
  Description of Artificial Sequence: Synthetic oligonucleotide
uagauaacacuuggggagg

SEQ ID NO: 1125424 - RNA, 19 nt, Artificial Sequence
  Description of Artificial Sequence: Synthetic oligonucleotide
cuguaucugcaaaagggag

SEQ ID NO: 1125425 - RNA, 19 nt, Artificial Sequence
  Description of Artificial Sequence: Synthetic oligonucleotide
aucuccgcacaguuuaaac

SEQ ID NO: 1125426 - RNA, 19 nt, Artificial Sequence
  Description of Artificial Sequence: Synthetic oligonucleotide
acuacugccuucugcaaug

SEQ ID NO: 1125427 - RNA, 19 nt, Artificial Sequence
  Description of Artificial Sequence: Synthetic oligonucleotide
caguuuaaacgccuagggg

SEQ ID NO: 1125428 - RNA, 19 nt, Artificial Sequence
  Description of Artificial Sequence: Synthetic oligonucleotide
gauguuagguaucuccgca

SEQ ID NO: 1125429 - RNA, 19 nt, Artificial Sequence
  Description of Artificial Sequence: Synthetic oligonucleotide
uguaacgguagcacccugc

SEQ ID NO: 1125430 - RNA, 19 nt, Artificial Sequence
  Description of Artificial Sequence: Synthetic oligonucleotide
uaugccaugucagagcuaa

SEQ ID NO: 1125431 - RNA, 19 nt, Artificial Sequence
  Description of Artificial Sequence: Synthetic oligonucleotide
cauccuaaaacagucuaag

SEQ ID NO: 1125432 - RNA, 19 nt, Artificial Sequence
  Description of Artificial Sequence: Synthetic oligonucleotide
cauggaagccuuccaaggg

SEQ ID NO: 1125433 - RNA, 19 nt, Artificial Sequence
  Description of Artificial Sequence: Synthetic oligonucleotide
auauaucggauguauguaa

SEQ ID NO: 1125434 - RNA, 19 nt, Artificial Sequence
  Description of Artificial Sequence: Synthetic oligonucleotide
ugccaugucagagcuaagg

SEQ ID NO: 1125435 - RNA, 19 nt, Artificial Sequence
  Description of Artificial Sequence: Synthetic oligonucleotide
uugugugggaagaucagaa

SEQ ID NO: 1125436 - RNA, 19 nt, Artificial Sequence
  Description of Artificial Sequence: Synthetic oligonucleotide
aguacgucaauuuucccuu

SEQ ID NO: 1125437 - RNA, 19 nt, Artificial Sequence
  Description of Artificial Sequence: Synthetic oligonucleotide
uggguccggaacaugaaug

SEQ ID NO: 1125438 - RNA, 19 nt, Artificial Sequence
  Description of Artificial Sequence: Synthetic oligonucleotide
ugauguuagguaucuccgc

SEQ ID NO: 1125439 - RNA, 19 nt, Artificial Sequence
  Description of Artificial Sequence: Synthetic oligonucleotide
acauucuacagccgaagcu

SEQ ID NO: 1125440 - RNA, 19 nt, Artificial Sequence
  Description of Artificial Sequence: Synthetic oligonucleotide
gaagcuuucacgaaucgaa

SEQ ID NO: 1125441 - RNA, 19 nt, Artificial Sequence
  Description of Artificial Sequence: Synthetic oligonucleotide
uccaaguuuugccaaugac

SEQ ID NO: 1125442 - RNA, 19 nt, Artificial Sequence
  Description of Artificial Sequence: Synthetic oligonucleotide
uacagccgaagcuuucacg

SEQ ID NO: 1125443 - RNA, 19 nt, Artificial Sequence
  Description of Artificial Sequence: Synthetic oligonucleotide
auaggguacagugugaaaa

SEQ ID NO: 1125444 - RNA, 19 nt, Artificial Sequence
  Description of Artificial Sequence: Synthetic oligonucleotide
uuuugccaaugacaucucc

SEQ ID NO: 1125445 - RNA, 19 nt, Artificial Sequence
  Description of Artificial Sequence: Synthetic oligonucleotide
aucgcagcacuucuuagug

SEQ ID NO: 1125446 - RNA, 19 nt, Artificial Sequence
  Description of Artificial Sequence: Synthetic oligonucleotide
uccguacucaacccaaaga

SEQ ID NO: 1125447 - RNA, 19 nt, Artificial Sequence
  Description of Artificial Sequence: Synthetic oligonucleotide
ucauccuaaaacagucuaa

SEQ ID NO: 1125448 - RNA, 19 nt, Artificial Sequence
  Description of Artificial Sequence: Synthetic oligonucleotide
ucgaaugggcuguagcccc

SEQ ID NO: 1125449 - RNA, 19 nt, Artificial Sequence
  Description of Artificial Sequence: Synthetic oligonucleotide
uuacaggacuuacucuggc

SEQ ID NO: 1125450 - RNA, 19 nt, Artificial Sequence
  Description of Artificial Sequence: Synthetic oligonucleotide
ugaauccccaucacuggca

SEQ ID NO: 1125451 - RNA, 19 nt, Artificial Sequence
  Description of Artificial Sequence: Synthetic oligonucleotide
gaagguccggagaaguagg

SEQ ID NO: 1125452 - RNA, 19 nt, Artificial Sequence
  Description of Artificial Sequence: Synthetic oligonucleotide
caaugcggccacuucagcc

SEQ ID NO: 1125453 - RNA, 19 nt, Artificial Sequence
  Description of Artificial Sequence: Synthetic oligonucleotide
cacaguuuaaacgccuagg

SEQ ID NO: 1125454 - RNA, 19 nt, Artificial Sequence
  Description of Artificial Sequence: Synthetic oligonucleotide
accggcucgaugcuuagag

SEQ ID NO: 1125455 - RNA, 19 nt, Artificial Sequence
  Description of Artificial Sequence: Synthetic oligonucleotide
acgagugucuucaaugcgg

SEQ ID NO: 1125456 - RNA, 19 nt, Artificial Sequence
  Description of Artificial Sequence: Synthetic oligonucleotide
agaagguccggagaaguag

SEQ ID NO: 1125457 - RNA, 19 nt, Artificial Sequence
  Description of Artificial Sequence: Synthetic oligonucleotide
acuucuuaguguaaugugu

SEQ ID NO: 1125458 - RNA, 19 nt, Artificial Sequence
  Description of Artificial Sequence: Synthetic oligonucleotide
uccauucagggacaggcaa

SEQ ID NO: 1125459 - RNA, 19 nt, Artificial Sequence
  Description of Artificial Sequence: Synthetic oligonucleotide
agcuucgugagucccacug

SEQ ID NO: 1125460 - RNA, 19 nt, Artificial Sequence
  Description of Artificial Sequence: Synthetic oligonucleotide
agucuuuuacaaguggcug

SEQ ID NO: 1125461 - RNA, 19 nt, Artificial Sequence
  Description of Artificial Sequence: Synthetic oligonucleotide
ugaaaacuacuacugccuu

SEQ ID NO: 1125462 - RNA, 19 nt, Artificial Sequence
  Description of Artificial Sequence: Synthetic oligonucleotide
uuacaaguggcuguaucac

SEQ ID NO: 1125463 - RNA, 19 nt, Artificial Sequence
  Description of Artificial Sequence: Synthetic oligonucleotide
uggcuguaucacauugagg

SEQ ID NO: 1125464 - RNA, 19 nt, Artificial Sequence
  Description of Artificial Sequence: Synthetic oligonucleotide
auaaaucggccucuuugca

SEQ ID NO: 1125465 - RNA, 19 nt, Artificial Sequence
  Description of Artificial Sequence: Synthetic oligonucleotide
aguccccuaguuuaauucu

SEQ ID NO: 1125466 - RNA, 19 nt, Artificial Sequence
  Description of Artificial Sequence: Synthetic oligonucleotide
uacaaguggcuguaucaca

SEQ ID NO: 1125467 - RNA, 19 nt, Artificial Sequence
  Description of Artificial Sequence: Synthetic oligonucleotide
gguagauaacacuugggga

SEQ ID NO: 1125468 - RNA, 19 nt, Artificial Sequence
  Description of Artificial Sequence: Synthetic oligonucleotide
uuaaacgccuaggggauga

SEQ ID NO: 1125469 - RNA, 19 nt, Artificial Sequence
  Description of Artificial Sequence: Synthetic oligonucleotide
cugcugaauauaucggaug

SEQ ID NO: 1125470 - RNA, 19 nt, Artificial Sequence
  Description of Artificial Sequence: Synthetic oligonucleotide
cuccguaaacgugacaggc

SEQ ID NO: 1125471 - RNA, 19 nt, Artificial Sequence
  Description of Artificial Sequence: Synthetic oligonucleotide
uccguaaacgugacaggcu

SEQ ID NO: 1125472 - RNA, 19 nt, Artificial Sequence
  Description of Artificial Sequence: Synthetic oligonucleotide
gugcuuacaggacuuacuc

SEQ ID NO: 1125473 - RNA, 19 nt, Artificial Sequence
  Description of Artificial Sequence: Synthetic oligonucleotide
uaaacgugacaggcuaucc

SEQ ID NO: 1125474 - RNA, 19 nt, Artificial Sequence
  Description of Artificial Sequence: Synthetic oligonucleotide
uccgcacaguuuaaacgcc

SEQ ID NO: 1125475 - RNA, 19 nt, Artificial Sequence
  Description of Artificial Sequence: Synthetic oligonucleotide
cuuucguagcccuuuucuc

SEQ ID NO: 1125476 - RNA, 19 nt, Artificial Sequence
  Description of Artificial Sequence: Synthetic oligonucleotide
cuucuuucaaccuuucgua

SEQ ID NO: 1125477 - RNA, 19 nt, Artificial Sequence
  Description of Artificial Sequence: Synthetic oligonucleotide
aaucggccucuuugcaguc

SEQ ID NO: 1125478 - RNA, 19 nt, Artificial Sequence
  Description of Artificial Sequence: Synthetic oligonucleotide
gaaguacgucaauuuuccc

SEQ ID NO: 1125479 - RNA, 19 nt, Artificial Sequence
  Description of Artificial Sequence: Synthetic oligonucleotide
gcuuuaaaggaaaucgcag

SEQ ID NO: 1125480 - RNA, 19 nt, Artificial Sequence
  Description of Artificial Sequence: Synthetic oligonucleotide
cacauucuacagccgaagc

SEQ ID NO: 1125481 - RNA, 19 nt, Artificial Sequence
  Description of Artificial Sequence: Synthetic oligonucleotide
caauuuucccuugagccuc

SEQ ID NO: 1125482 - RNA, 19 nt, Artificial Sequence
  Description of Artificial Sequence: Synthetic oligonucleotide
ucccaaaacaucugaucaa

SEQ ID NO: 1125483 - RNA, 19 nt, Artificial Sequence
  Description of Artificial Sequence: Synthetic oligonucleotide
gaacagaugggcuccguaa

SEQ ID NO: 1125484 - RNA, 19 nt, Artificial Sequence
  Description of Artificial Sequence: Synthetic oligonucleotide
ugcuuacaggacuuacucu

SEQ ID NO: 1125485 - RNA, 19 nt, Artificial Sequence
  Description of Artificial Sequence: Synthetic oligonucleotide
auccguacucaacccaaag

SEQ ID NO: 1125486 - RNA, 19 nt, Artificial Sequence
  Description of Artificial Sequence: Synthetic oligonucleotide
ucgugagucccacugccac

SEQ ID NO: 1125487 - RNA, 19 nt, Artificial Sequence
  Description of Artificial Sequence: Synthetic oligonucleotide
uggccgguagauaacacuu

SEQ ID NO: 1125488 - RNA, 19 nt, Artificial Sequence
  Description of Artificial Sequence: Synthetic oligonucleotide
acgucaauuuucccuugag

SEQ ID NO: 1125489 - RNA, 19 nt, Artificial Sequence
  Description of Artificial Sequence: Synthetic oligonucleotide
gaggucgucugcucuuggg

SEQ ID NO: 1125490 - RNA, 19 nt, Artificial Sequence
  Description of Artificial Sequence: Synthetic oligonucleotide
acgccuaggggaugaguac

SEQ ID NO: 1125491 - RNA, 19 nt, Artificial Sequence
  Description of Artificial Sequence: Synthetic oligonucleotide
agauaucuuccugauagau

SEQ ID NO: 1125492 - RNA, 19 nt, Artificial Sequence
  Description of Artificial Sequence: Synthetic oligonucleotide
cugggucacacacaccaag

SEQ ID NO: 1125493 - RNA, 19 nt, Artificial Sequence
  Description of Artificial Sequence: Synthetic oligonucleotide
ucuuuuacaaguggcugua

SEQ ID NO: 1125494 - RNA, 19 nt, Artificial Sequence
  Description of Artificial Sequence: Synthetic oligonucleotide
aacuuccagaacagauggg

SEQ ID NO: 1125495 - RNA, 19 nt, Artificial Sequence
  Description of Artificial Sequence: Synthetic oligonucleotide
gaauccccaucacuggcac

SEQ ID NO: 1125496 - RNA, 19 nt, Artificial Sequence
  Description of Artificial Sequence: Synthetic oligonucleotide
ugguacuuuuauuccuugu

SEQ ID NO: 1125497 - RNA, 19 nt, Artificial Sequence
  Description of Artificial Sequence: Synthetic oligonucleotide
gaggaguagagcacaaaga

SEQ ID NO: 1125498 - RNA, 19 nt, Artificial Sequence
  Description of Artificial Sequence: Synthetic oligonucleotide
gaaugcugauguuagguau

SEQ ID NO: 1125499 - RNA, 19 nt, Artificial Sequence
  Description of Artificial Sequence: Synthetic oligonucleotide
augcuauaugccaugucag

SEQ ID NO: 1125500 - RNA, 19 nt, Artificial Sequence
  Description of Artificial Sequence: Synthetic oligonucleotide
agaaagaucuaaggcauua

SEQ ID NO: 1125501 - RNA, 19 nt, Artificial Sequence
  Description of Artificial Sequence: Synthetic oligonucleotide
auguguaagaggacagaag

SEQ ID NO: 1125502 - RNA, 19 nt, Artificial Sequence
  Description of Artificial Sequence: Synthetic oligonucleotide
guacucaacccaaagaugu

SEQ ID NO: 1125503 - RNA, 19 nt, Artificial Sequence
  Description of Artificial Sequence: Synthetic oligonucleotide
uaacacuuggggaggucgu

SEQ ID NO: 1125504 - RNA, 19 nt, Artificial Sequence
  Description of Artificial Sequence: Synthetic oligonucleotide
agggcugaauccccaucac

SEQ ID NO: 1125505 - RNA, 19 nt, Artificial Sequence
  Description of Artificial Sequence: Synthetic oligonucleotide
gaggagcacacauggcccc

SEQ ID NO: 1125506 - RNA, 19 nt, Artificial Sequence
  Description of Artificial Sequence: Synthetic oligonucleotide
ggacauguucuauccauug

SEQ ID NO: 1125507 - RNA, 19 nt, Artificial Sequence
  Description of Artificial Sequence: Synthetic oligonucleotide
aucuugugagcuucccucu

SEQ ID NO: 1125508 - RNA, 19 nt, Artificial Sequence
  Description of Artificial Sequence: Synthetic oligonucleotide
ugggaagaucagaaagauc

SEQ ID NO: 1125509 - RNA, 19 nt, Artificial Sequence
  Description of Artificial Sequence: Synthetic oligonucleotide
ugaucaacauccuguuguu

SEQ ID NO: 1125510 - RNA, 19 nt, Artificial Sequence
  Description of Artificial Sequence: Synthetic oligonucleotide
caggcuauccguacucaac

SEQ ID NO: 1125511 - RNA, 19 nt, Artificial Sequence
  Description of Artificial Sequence: Synthetic oligonucleotide
uuagcuucgugagucccac

SEQ ID NO: 1125512 - RNA, 19 nt, Artificial Sequence
  Description of Artificial Sequence: Synthetic oligonucleotide
aguuguucagggaggagca

SEQ ID NO: 1125513 - RNA, 19 nt, Artificial Sequence
  Description of Artificial Sequence: Synthetic oligonucleotide
auauccaaguuuugccaau

SEQ ID NO: 1125514 - RNA, 19 nt, Artificial Sequence
  Description of Artificial Sequence: Synthetic oligonucleotide
ccaaguuuugccaaugaca

SEQ ID NO: 1125515 - RNA, 19 nt, Artificial Sequence
  Description of Artificial Sequence: Synthetic oligonucleotide
aacgccuaggggaugagua

SEQ ID NO: 1125516 - RNA, 19 nt, Artificial Sequence
  Description of Artificial Sequence: Synthetic oligonucleotide
ucccucucugcauugccga

SEQ ID NO: 1125517 - RNA, 19 nt, Artificial Sequence
  Description of Artificial Sequence: Synthetic oligonucleotide
uucagccacucuucaguug

SEQ ID NO: 1125518 - RNA, 19 nt, Artificial Sequence
  Description of Artificial Sequence: Synthetic oligonucleotide
uacucaacccaaagauguc

SEQ ID NO: 1125519 - RNA, 19 nt, Artificial Sequence
  Description of Artificial Sequence: Synthetic oligonucleotide
ucuguaacgguagcacccu

SEQ ID NO: 1125520 - RNA, 19 nt, Artificial Sequence
  Description of Artificial Sequence: Synthetic oligonucleotide
gccgguagauaacacuugg

SEQ ID NO: 1125521 - RNA, 19 nt, Artificial Sequence
  Description of Artificial Sequence: Synthetic oligonucleotide
aguuccucuuugaaauauc

SEQ ID NO: 1125522 - RNA, 19 nt, Artificial Sequence
  Description of Artificial Sequence: Synthetic oligonucleotide
gguaucuccgcacaguuua

SEQ ID NO: 1125523 - RNA, 19 nt, Artificial Sequence
  Description of Artificial Sequence: Synthetic oligonucleotide
ucgaugcuuagaguguugu

SEQ ID NO: 1125524 - RNA, 19 nt, Artificial Sequence
  Description of Artificial Sequence: Synthetic oligonucleotide
ccugugucggugauguugg

SEQ ID NO: 1125525 - RNA, 19 nt, Artificial Sequence
  Description of Artificial Sequence: Synthetic oligonucleotide
uucgugagucccacugcca

SEQ ID NO: 1125526 - RNA, 19 nt, Artificial Sequence
  Description of Artificial Sequence: Synthetic oligonucleotide
gcgaauguuaaacauggaa

SEQ ID NO: 1125527 - RNA, 19 nt, Artificial Sequence
  Description of Artificial Sequence: Synthetic oligonucleotide
cugauagauuuugucuaag

SEQ ID NO: 1125528 - RNA, 19 nt, Artificial Sequence
  Description of Artificial Sequence: Synthetic oligonucleotide
guaacgguagcacccugca

SEQ ID NO: 1125529 - RNA, 19 nt, Artificial Sequence
  Description of Artificial Sequence: Synthetic oligonucleotide
aggucgucugcucuugggu

SEQ ID NO: 1125530 - RNA, 19 nt, Artificial Sequence
  Description of Artificial Sequence: Synthetic oligonucleotide
caagguucacuucauggaa

SEQ ID NO: 1125531 - RNA, 19 nt, Artificial Sequence
  Description of Artificial Sequence: Synthetic oligonucleotide
agucuugggccucucuccu

SEQ ID NO: 1125532 - RNA, 19 nt, Artificial Sequence
  Description of Artificial Sequence: Synthetic oligonucleotide
acaaguggcuguaucacau

SEQ ID NO: 1125533 - RNA, 19 nt, Artificial Sequence
  Description of Artificial Sequence: Synthetic oligonucleotide
uuucaaccuuucguagccc

SEQ ID NO: 1125534 - RNA, 19 nt, Artificial Sequence
  Description of Artificial Sequence: Synthetic oligonucleotide
accuuucguagcccuuuuc

SEQ ID NO: 1125535 - RNA, 19 nt, Artificial Sequence
  Description of Artificial Sequence: Synthetic oligonucleotide
ggagaaauauaguaauagu

SEQ ID NO: 1125536 - RNA, 19 nt, Artificial Sequence
  Description of Artificial Sequence: Synthetic oligonucleotide
gcaagguucacuucaugga

SEQ ID NO: 1125537 - RNA, 19 nt, Artificial Sequence
  Description of Artificial Sequence: Synthetic oligonucleotide
cagugugaaaacuacuacu

SEQ ID NO: 1125538 - RNA, 19 nt, Artificial Sequence
  Description of Artificial Sequence: Synthetic oligonucleotide
ucucaccaucuugugagcu

SEQ ID NO: 1125539 - RNA, 19 nt, Artificial Sequence
  Description of Artificial Sequence: Synthetic oligonucleotide
uguggccgguagauaacac

SEQ ID NO: 1125540 - RNA, 19 nt, Artificial Sequence
  Description of Artificial Sequence: Synthetic oligonucleotide
uauccguacucaacccaaa

SEQ ID NO: 1125541 - RNA, 19 nt, Artificial Sequence
  Description of Artificial Sequence: Synthetic oligonucleotide
aagucccugcugaauauau

SEQ ID NO: 1125542 - RNA, 19 nt, Artificial Sequence
  Description of Artificial Sequence: Synthetic oligonucleotide
ugcuugaguccccuaguuu

SEQ ID NO: 1125543 - RNA, 19 nt, Artificial Sequence
  Description of Artificial Sequence: Synthetic oligonucleotide
cacuccagagguaacagcu

SEQ ID NO: 1125544 - RNA, 19 nt, Artificial Sequence
  Description of Artificial Sequence: Synthetic oligonucleotide
uugcuugaguccccuaguu

SEQ ID NO: 1125545 - RNA, 19 nt, Artificial Sequence
  Description of Artificial Sequence: Synthetic oligonucleotide
guaaacgugacaggcuauc

SEQ ID NO: 1125546 - RNA, 19 nt, Artificial Sequence
  Description of Artificial Sequence: Synthetic oligonucleotide
uuguuucccauaggguaca

SEQ ID NO: 1125547 - RNA, 19 nt, Artificial Sequence
  Description of Artificial Sequence: Synthetic oligonucleotide
cuauccguacucaacccaa

SEQ ID NO: 1125548 - RNA, 19 nt, Artificial Sequence
  Description of Artificial Sequence: Synthetic oligonucleotide
ggaguagagcacaaagaug

SEQ ID NO: 1125549 - RNA, 19 nt, Artificial Sequence
  Description of Artificial Sequence: Synthetic oligonucleotide
ggguccggaacaugaaugc

SEQ ID NO: 1125550 - RNA, 19 nt, Artificial Sequence
  Description of Artificial Sequence: Synthetic oligonucleotide
gucuuuuacaaguggcugu

SEQ ID NO: 1125551 - RNA, 19 nt, Artificial Sequence
  Description of Artificial Sequence: Synthetic oligonucleotide
agccgaagcuuucacgaau

SEQ ID NO: 1125552 - RNA, 19 nt, Artificial Sequence
  Description of Artificial Sequence: Synthetic oligonucleotide
ggauguggccgguagauaa

SEQ ID NO: 1125553 - RNA, 19 nt, Artificial Sequence
  Description of Artificial Sequence: Synthetic oligonucleotide
aagcuuucacgaaucgaau

SEQ ID NO: 1125554 - RNA, 19 nt, Artificial Sequence
  Description of Artificial Sequence: Synthetic oligonucleotide
augggcuccguaaacguga

SEQ ID NO: 1125555 - RNA, 19 nt, Artificial Sequence
  Description of Artificial Sequence: Synthetic oligonucleotide
agaacagaugggcuccgua

SEQ ID NO: 1125556 - RNA, 19 nt, Artificial Sequence
  Description of Artificial Sequence: Synthetic oligonucleotide
guguaagaggacagaaguc

SEQ ID NO: 1125557 - RNA, 19 nt, Artificial Sequence
  Description of Artificial Sequence: Synthetic oligonucleotide
gcuuagaguguuguucucc

SEQ ID NO: 1125558 - RNA, 19 nt, Artificial Sequence
  Description of Artificial Sequence: Synthetic oligonucleotide
gauguggccgguagauaac

SEQ ID NO: 1125559 - RNA, 19 nt, Artificial Sequence
  Description of Artificial Sequence: Synthetic oligonucleotide
aaacgccuaggggaugagu

SEQ ID NO: 1125560 - RNA, 19 nt, Artificial Sequence
  Description of Artificial Sequence: Synthetic oligonucleotide
uguuggagagcuggacaac

SEQ ID NO: 1125561 - RNA, 19 nt, Artificial Sequence
  Description of Artificial Sequence: Synthetic oligonucleotide
auaguugcuugaguccccu

SEQ ID NO: 1125562 - RNA, 19 nt, Artificial Sequence
  Description of Artificial Sequence: Synthetic oligonucleotide
aggguacagugugaaaacu

SEQ ID NO: 1125563 - RNA, 19 nt, Artificial Sequence
  Description of Artificial Sequence: Synthetic oligonucleotide
gcacaguuuaaacgccuag

SEQ ID NO: 1125564 - RNA, 19 nt, Artificial Sequence
  Description of Artificial Sequence: Synthetic oligonucleotide
cucgaugcuuagaguguug

SEQ ID NO: 1125565 - RNA, 19 nt, Artificial Sequence
  Description of Artificial Sequence: Synthetic oligonucleotide
agucccugcugaauauauc

SEQ ID NO: 1125566 - RNA, 19 nt, Artificial Sequence
  Description of Artificial Sequence: Synthetic oligonucleotide
uaacgguagcacccugcaa

SEQ ID NO: 1125567 - RNA, 19 nt, Artificial Sequence
  Description of Artificial Sequence: Synthetic oligonucleotide
cuacagccgaagcuuucac

SEQ ID NO: 1125568 - RNA, 19 nt, Artificial Sequence
  Description of Artificial Sequence: Synthetic oligonucleotide
aaccuuucguagcccuuuu

SEQ ID NO: 1125569 - RNA, 19 nt, Artificial Sequence
  Description of Artificial Sequence: Synthetic oligonucleotide
ugcuuagaguguuguucuc

SEQ ID NO: 1125570 - RNA, 19 nt, Artificial Sequence
  Description of Artificial Sequence: Synthetic oligonucleotide
cacaagucccugcugaaua

SEQ ID NO: 1125571 - RNA, 19 nt, Artificial Sequence
  Description of Artificial Sequence: Synthetic oligonucleotide
ucgcagcacuucuuagugu

SEQ ID NO: 1125572 - RNA, 19 nt, Artificial Sequence
  Description of Artificial Sequence: Synthetic oligonucleotide
cugaauauaucggauguau

SEQ ID NO: 1125573 - RNA, 19 nt, Artificial Sequence
  Description of Artificial Sequence: Synthetic oligonucleotide
ggcuauccguacucaaccc

SEQ ID NO: 1125574 - RNA, 19 nt, Artificial Sequence
  Description of Artificial Sequence: Synthetic oligonucleotide
aguggcuguaucacauuga

SEQ ID NO: 1125575 - RNA, 19 nt, Artificial Sequence
  Description of Artificial Sequence: Synthetic oligonucleotide
gcuccguaaacgugacagg

SEQ ID NO: 1125576 - RNA, 19 nt, Artificial Sequence
  Description of Artificial Sequence: Synthetic oligonucleotide
cagucuuuuacaaguggcu

SEQ ID NO: 1125577 - RNA, 19 nt, Artificial Sequence
  Description of Artificial Sequence: Synthetic oligonucleotide
ugggcuccguaaacgugac

SEQ ID NO: 1125578 - RNA, 19 nt, Artificial Sequence
  Description of Artificial Sequence: Synthetic oligonucleotide
aagaagguccggagaagua

SEQ ID NO: 1125579 - RNA, 19 nt, Artificial Sequence
  Description of Artificial Sequence: Synthetic oligonucleotide
ggcucauccuuccaagauc

SEQ ID NO: 1125580 - RNA, 19 nt, Artificial Sequence
  Description of Artificial Sequence: Synthetic oligonucleotide
uaucuccgcacaguuuaaa

SEQ ID NO: 1125581 - RNA, 19 nt, Artificial Sequence
  Description of Artificial Sequence: Synthetic oligonucleotide
ucacaagucccugcugaau

SEQ ID NO: 1125582 - RNA, 19 nt, Artificial Sequence
  Description of Artificial Sequence: Synthetic oligonucleotide
auguggccgguagauaaca

SEQ ID NO: 1125583 - RNA, 19 nt, Artificial Sequence
  Description of Artificial Sequence: Synthetic oligonucleotide
agauaacacuuggggaggu

SEQ ID NO: 1125584 - RNA, 19 nt, Artificial Sequence
  Description of Artificial Sequence: Synthetic oligonucleotide
ccgguagauaacacuuggg

SEQ ID NO: 1125585 - RNA, 19 nt, Artificial Sequence
  Description of Artificial Sequence: Synthetic oligonucleotide
uaaacgccuaggggaugag

SEQ ID NO: 1125586 - RNA, 19 nt, Artificial Sequence
  Description of Artificial Sequence: Synthetic oligonucleotide
ggugaagcaagguucacuu

SEQ ID NO: 1125587 - RNA, 19 nt, Artificial Sequence
  Description of Artificial Sequence: Synthetic oligonucleotide
guuagcuucgugaguccca

SEQ ID NO: 1125588 - RNA, 19 nt, Artificial Sequence
  Description of Artificial Sequence: Synthetic oligonucleotide
gaggcuccugugucgguga

SEQ ID NO: 1125589 - RNA, 19 nt, Artificial Sequence
  Description of Artificial Sequence: Synthetic oligonucleotide
ucggccucuuugcagucuu

SEQ ID NO: 1125590 - RNA, 19 nt, Artificial Sequence
  Description of Artificial Sequence: Synthetic oligonucleotide
cuggacaacacgagugucu

SEQ ID NO: 1125591 - RNA, 19 nt, Artificial Sequence
  Description of Artificial Sequence: Synthetic oligonucleotide
uauccauuguaggcucauc

SEQ ID NO: 1125592 - RNA, 19 nt, Artificial Sequence
  Description of Artificial Sequence: Synthetic oligonucleotide
gcuauccguacucaaccca

SEQ ID NO: 1125593 - RNA, 19 nt, Artificial Sequence
  Description of Artificial Sequence: Synthetic oligonucleotide
guguaauguguaagaggac

SEQ ID NO: 1125594 - RNA, 19 nt, Artificial Sequence
  Description of Artificial Sequence: Synthetic oligonucleotide
cagguugugugggaagauc

SEQ ID NO: 1125595 - RNA, 19 nt, Artificial Sequence
  Description of Artificial Sequence: Synthetic oligonucleotide
gagcuaaggaagagacaca

SEQ ID NO: 1125596 - RNA, 19 nt, Artificial Sequence
  Description of Artificial Sequence: Synthetic oligonucleotide
gcuguaucacauugagguc

SEQ ID NO: 1125597 - RNA, 19 nt, Artificial Sequence
  Description of Artificial Sequence: Synthetic oligonucleotide
uuuuccgccguggccugcu

SEQ ID NO: 1125598 - RNA, 19 nt, Artificial Sequence
  Description of Artificial Sequence: Synthetic oligonucleotide
acaacacgagugucuucaa

SEQ ID NO: 1125599 - RNA, 19 nt, Artificial Sequence
  Description of Artificial Sequence: Synthetic oligonucleotide
cuaaggcauuagccuggag

SEQ ID NO: 1125600 - RNA, 19 nt, Artificial Sequence
  Description of Artificial Sequence: Synthetic oligonucleotide
agguccggagaaguaggug

SEQ ID NO: 1125601 - RNA, 19 nt, Artificial Sequence
  Description of Artificial Sequence: Synthetic oligonucleotide
ugcuugacauuugcuucuc

SEQ ID NO: 1125602 - RNA, 19 nt, Artificial Sequence
  Description of Artificial Sequence: Synthetic oligonucleotide
gggucauuagccauagcaa

SEQ ID NO: 1125603 - RNA, 19 nt, Artificial Sequence
  Description of Artificial Sequence: Synthetic oligonucleotide
ucguagcccuuuucucuaa

SEQ ID NO: 1125604 - RNA, 19 nt, Artificial Sequence
  Description of Artificial Sequence: Synthetic oligonucleotide
cuguaacgguagcacccug

SEQ ID NO: 1125605 - RNA, 19 nt, Artificial Sequence
  Description of Artificial Sequence: Synthetic oligonucleotide
ccgaagcuuucacgaaucg

SEQ ID NO: 1125606 - RNA, 19 nt, Artificial Sequence
  Description of Artificial Sequence: Synthetic oligonucleotide
guggccgguagauaacacu

SEQ ID NO: 1125607 - RNA, 19 nt, Artificial Sequence
  Description of Artificial Sequence: Synthetic oligonucleotide
gcauugccgauguccuucc

SEQ ID NO: 1125608 - RNA, 19 nt, Artificial Sequence
  Description of Artificial Sequence: Synthetic oligonucleotide
caagaagguccggagaagu

SEQ ID NO: 1125609 - RNA, 19 nt, Artificial Sequence
  Description of Artificial Sequence: Synthetic oligonucleotide
ggaggucgucugcucuugg

SEQ ID NO: 1125610 - RNA, 19 nt, Artificial Sequence
  Description of Artificial Sequence: Synthetic oligonucleotide
ccaugucagagcuaaggaa

SEQ ID NO: 1125611 - RNA, 19 nt, Artificial Sequence
  Description of Artificial Sequence: Synthetic oligonucleotide
cuacuacugccuucugcaa

SEQ ID NO: 1125612 - RNA, 19 nt, Artificial Sequence
  Description of Artificial Sequence: Synthetic oligonucleotide
gccacuccagagguaacag

SEQ ID NO: 1125613 - RNA, 19 nt, Artificial Sequence
  Description of Artificial Sequence: Synthetic oligonucleotide
caucacuggcacaccugca

SEQ ID NO: 1125614 - RNA, 19 nt, Artificial Sequence
  Description of Artificial Sequence: Synthetic oligonucleotide
ccacuccagagguaacagc

SEQ ID NO: 1125615 - RNA, 19 nt, Artificial Sequence
  Description of Artificial Sequence: Synthetic oligonucleotide
uaucugcaaaagggagaaa

SEQ ID NO: 1125616 - RNA, 19 nt, Artificial Sequence
  Description of Artificial Sequence: Synthetic oligonucleotide
guuguucagggaggagcac

SEQ ID NO: 1125617 - RNA, 19 nt, Artificial Sequence
  Description of Artificial Sequence: Synthetic oligonucleotide
guuuugccaaugacaucuc

SEQ ID NO: 1125618 - RNA, 19 nt, Artificial Sequence
  Description of Artificial Sequence: Synthetic oligonucleotide
gaagcaagguucacuucau

SEQ ID NO: 1125619 - RNA, 19 nt, Artificial Sequence
  Description of Artificial Sequence: Synthetic oligonucleotide
cacgaaucgaaugggcugu

SEQ ID NO: 1125620 - RNA, 19 nt, Artificial Sequence
  Description of Artificial Sequence: Synthetic oligonucleotide
cgugacaggcuauccguac

SEQ ID NO: 1125621 - RNA, 19 nt, Artificial Sequence
  Description of Artificial Sequence: Synthetic oligonucleotide
aggagcacacauggcccca

SEQ ID NO: 1125622 - RNA, 19 nt, Artificial Sequence
  Description of Artificial Sequence: Synthetic oligonucleotide
gagauaaaucggccucuuu

SEQ ID NO: 1125623 - RNA, 19 nt, Artificial Sequence
  Description of Artificial Sequence: Synthetic oligonucleotide
ggguacagugugaaaacua

SEQ ID NO: 1125624 - RNA, 19 nt, Artificial Sequence
  Description of Artificial Sequence: Synthetic oligonucleotide
uagcuucgugagucccacu

SEQ ID NO: 1125625 - RNA, 19 nt, Artificial Sequence
  Description of Artificial Sequence: Synthetic oligonucleotide
uaguugcuugaguccccua

SEQ ID NO: 1125626 - RNA, 19 nt, Artificial Sequence
  Description of Artificial Sequence: Synthetic oligonucleotide
ccguacucaacccaaagau

SEQ ID NO: 1125627 - RNA, 19 nt, Artificial Sequence
  Description of Artificial Sequence: Synthetic oligonucleotide
aggagccucuguaacggua

SEQ ID NO: 1125628 - RNA, 19 nt, Artificial Sequence
  Description of Artificial Sequence: Synthetic oligonucleotide
acgcagggugucagaguuc

SEQ ID NO: 1125629 - RNA, 19 nt, Artificial Sequence
  Description of Artificial Sequence: Synthetic oligonucleotide
ccuugauguuagcuucgug

SEQ ID NO: 1125630 - RNA, 19 nt, Artificial Sequence
  Description of Artificial Sequence: Synthetic oligonucleotide
guccggagaaguaggugaa

SEQ ID NO: 1125631 - RNA, 19 nt, Artificial Sequence
  Description of Artificial Sequence: Synthetic oligonucleotide
ggccgguagauaacacuug

SEQ ID NO: 1125632 - RNA, 19 nt, Artificial Sequence
  Description of Artificial Sequence: Synthetic oligonucleotide
ccucggaaauaaauauuaa

SEQ ID NO: 1125633 - RNA, 19 nt, Artificial Sequence
  Description of Artificial Sequence: Synthetic oligonucleotide
gccgaagcuuucacgaauc

SEQ ID NO: 1125634 - RNA, 19 nt, Artificial Sequence
  Description of Artificial Sequence: Synthetic oligonucleotide
ccguaaacgugacaggcua

SEQ ID NO: 1125635 - RNA, 19 nt, Artificial Sequence
  Description of Artificial Sequence: Synthetic oligonucleotide
cauuagccuggagaggagu

SEQ ID NO: 1125636 - RNA, 19 nt, Artificial Sequence
  Description of Artificial Sequence: Synthetic oligonucleotide
gcauuagccuggagaggag

SEQ ID NO: 1125637 - RNA, 19 nt, Artificial Sequence
  Description of Artificial Sequence: Synthetic oligonucleotide
guaucacauugagguccug

SEQ ID NO: 1125638 - RNA, 19 nt, Artificial Sequence
  Description of Artificial Sequence: Synthetic oligonucleotide
guaucuccgcacaguuuaa

SEQ ID NO: 1125639 - RNA, 19 nt, Artificial Sequence
  Description of Artificial Sequence: Synthetic oligonucleotide
cagccgaagcuuucacgaa

SEQ ID NO: 1125640 - RNA, 19 nt, Artificial Sequence
  Description of Artificial Sequence: Synthetic oligonucleotide
cccacgcagggugucagag

SEQ ID NO: 1125641 - RNA, 19 nt, Artificial Sequence
  Description of Artificial Sequence: Synthetic oligonucleotide
ggaugaguacacagguugu

SEQ ID NO: 1125642 - RNA, 19 nt, Artificial Sequence
  Description of Artificial Sequence: Synthetic oligonucleotide
gcugaauauaucggaugua

SEQ ID NO: 1125643 - RNA, 19 nt, Artificial Sequence
  Description of Artificial Sequence: Synthetic oligonucleotide
gggaggucgucugcucuug

SEQ ID NO: 1125644 - RNA, 19 nt, Artificial Sequence
  Description of Artificial Sequence: Synthetic oligonucleotide
augccaugucagagcuaag

SEQ ID NO: 1125645 - RNA, 19 nt, Artificial Sequence
  Description of Artificial Sequence: Synthetic oligonucleotide
caacacgagugucuucaau

SEQ ID NO: 1125646 - RNA, 19 nt, Artificial Sequence
  Description of Artificial Sequence: Synthetic oligonucleotide
cuggguccggaacaugaau

SEQ ID NO: 1125647 - RNA, 19 nt, Artificial Sequence
  Description of Artificial Sequence: Synthetic oligonucleotide
caguugcuuuaaaggaaau

SEQ ID NO: 1125648 - RNA, 19 nt, Artificial Sequence
  Description of Artificial Sequence: Synthetic oligonucleotide
auaugccaugucagagcua

SEQ ID NO: 1125649 - RNA, 19 nt, Artificial Sequence
  Description of Artificial Sequence: Synthetic oligonucleotide
acgaaucgaaugggcugua

SEQ ID NO: 1125650 - RNA, 19 nt, Artificial Sequence
  Description of Artificial Sequence: Synthetic oligonucleotide
ggucgucugcucuuggguu

SEQ ID NO: 1125651 - RNA, 19 nt, Artificial Sequence
  Description of Artificial Sequence: Synthetic oligonucleotide
caaguggcuguaucacauu

SEQ ID NO: 1125652 - RNA, 19 nt, Artificial Sequence
  Description of Artificial Sequence: Synthetic oligonucleotide
gguccggaacaugaaugcu

SEQ ID NO: 1125653 - RNA, 19 nt, Artificial Sequence
  Description of Artificial Sequence: Synthetic oligonucleotide
cgaaucgaaugggcuguag

SEQ ID NO: 1125654 - RNA, 19 nt, Artificial Sequence
  Description of Artificial Sequence: Synthetic oligonucleotide
cgaagcuuucacgaaucga

SEQ ID NO: 1125655 - RNA, 19 nt, Artificial Sequence
  Description of Artificial Sequence: Synthetic oligonucleotide
gcuugacauuugcuucucu

SEQ ID NO: 1125656 - RNA, 19 nt, Artificial Sequence
  Description of Artificial Sequence: Synthetic oligonucleotide
cuucggagugugcuccauu

SEQ ID NO: 1125657 - RNA, 19 nt, Artificial Sequence
  Description of Artificial Sequence: Synthetic oligonucleotide
gccccacgcagggugucag

SEQ ID NO: 1125658 - RNA, 19 nt, Artificial Sequence
  Description of Artificial Sequence: Synthetic oligonucleotide
gcagcacuucuuaguguaa

SEQ ID NO: 1125659 - RNA, 19 nt, Artificial Sequence
  Description of Artificial Sequence: Synthetic oligonucleotide
cauugagguccugguggcu

SEQ ID NO: 1125660 - RNA, 19 nt, Artificial Sequence
  Description of Artificial Sequence: Synthetic oligonucleotide
caggagccucuguaacggu

SEQ ID NO: 1125661 - RNA, 19 nt, Artificial Sequence
  Description of Artificial Sequence: Synthetic oligonucleotide
cccaccggcucgaugcuua

SEQ ID NO: 1125662 - RNA, 19 nt, Artificial Sequence
  Description of Artificial Sequence: Synthetic oligonucleotide
gggcuccguaaacgugaca

SEQ ID NO: 1125663 - RNA, 19 nt, Artificial Sequence
  Description of Artificial Sequence: Synthetic oligonucleotide
ccgcacaguuuaaacgccu

SEQ ID NO: 1125664 - RNA, 19 nt, Artificial Sequence
  Description of Artificial Sequence: Synthetic oligonucleotide
cgcacaguuuaaacgccua

SEQ ID NO: 1125665 - RNA, 19 nt, Artificial Sequence
  Description of Artificial Sequence: Synthetic oligonucleotide
caccggcucgaugcuuaga

SEQ ID NO: 1125666 - RNA, 19 nt, Artificial Sequence
  Description of Artificial Sequence: Synthetic oligonucleotide
gcucgaugcuuagaguguu

SEQ ID NO: 1125667 - RNA, 19 nt, Artificial Sequence
  Description of Artificial Sequence: Synthetic oligonucleotide
cugcauugccgauguccuu

SEQ ID NO: 1125668 - RNA, 19 nt, Artificial Sequence
  Description of Artificial Sequence: Synthetic oligonucleotide
cagaacagaugggcuccgu

SEQ ID NO: 1125669 - RNA, 19 nt, Artificial Sequence
  Description of Artificial Sequence: Synthetic oligonucleotide
gccuuccaaggggucauua

SEQ ID NO: 1125670 - RNA, 19 nt, Artificial Sequence
  Description of Artificial Sequence: Synthetic oligonucleotide
cgccuaggggaugaguaca

SEQ ID NO: 1125671 - RNA, 19 nt, Artificial Sequence
  Description of Artificial Sequence: Synthetic oligonucleotide
ggggaggucgucugcucuu

SEQ ID NO: 1125672 - RNA, 19 nt, Artificial Sequence
  Description of Artificial Sequence: Synthetic oligonucleotide
cguaaacgugacaggcuau

SEQ ID NO: 1125673 - RNA, 19 nt, Artificial Sequence
  Description of Artificial Sequence: Synthetic oligonucleotide
ggccccacgcaggguguca

SEQ ID NO: 1125674 - RNA, 19 nt, Artificial Sequence
  Description of Artificial Sequence: Synthetic oligonucleotide
ccggcucgaugcuuagagu

SEQ ID NO: 1125675 - RNA, 19 nt, Artificial Sequence
  Description of Artificial Sequence: Synthetic oligonucleotide
ccacgcagggugucagagu

SEQ ID NO: 1125676 - RNA, 19 nt, Artificial Sequence
  Description of Artificial Sequence: Synthetic oligonucleotide
ccccacgcagggugucaga

SEQ ID NO: 1125677 - RNA, 19 nt, Artificial Sequence
  Description of Artificial Sequence: Synthetic oligonucleotide
guagccccaccggcucgau

SEQ ID NO: 1125678 - RNA, 19 nt, Artificial Sequence
  Description of Artificial Sequence: Synthetic oligonucleotide
ccggaacaugaaugcugau

SEQ ID NO: 1125679 - RNA, 19 nt, Artificial Sequence
  Description of Artificial Sequence: Synthetic oligonucleotide
ccguggccugcuugacauu

SEQ ID NO: 1125680 - RNA, 19 nt, Artificial Sequence
  Description of Artificial Sequence: Synthetic oligonucleotide
uguuguacuucuuagaagg

SEQ ID NO: 1125681 - RNA, 19 nt, Artificial Sequence
  Description of Artificial Sequence: Synthetic oligonucleotide
ugaucuaggauguaguugc

SEQ ID NO: 1125682 - RNA, 19 nt, Artificial Sequence
  Description of Artificial Sequence: Synthetic oligonucleotide
auuacaauagcuuuccgcu

SEQ ID NO: 1125683 - RNA, 19 nt, Artificial Sequence
  Description of Artificial Sequence: Synthetic oligonucleotide
ugcuugauggcccaugugg

SEQ ID NO: 1125684 - RNA, 19 nt, Artificial Sequence
  Description of Artificial Sequence: Synthetic oligonucleotide
uucuaagaccgcaugaucc

SEQ ID NO: 1125685 - RNA, 19 nt, Artificial Sequence
  Description of Artificial Sequence: Synthetic oligonucleotide
gauuacaauagcuuuccgc

SEQ ID NO: 1125686 - RNA, 19 nt, Artificial Sequence
  Description of Artificial Sequence: Synthetic oligonucleotide
uacaauagcuuuccgcugg

SEQ ID NO: 1125687 - RNA, 19 nt, Artificial Sequence
  Description of Artificial Sequence: Synthetic oligonucleotide
ugauacugguuauagcugg

SEQ ID NO: 1125688 - RNA, 19 nt, Artificial Sequence
  Description of Artificial Sequence: Synthetic oligonucleotide
aauagcuuuccgcuggaag

SEQ ID NO: 1125689 - RNA, 19 nt, Artificial Sequence
  Description of Artificial Sequence: Synthetic oligonucleotide
ugugcggucuuuuaggucc

SEQ ID NO: 1125690 - RNA, 19 nt, Artificial Sequence
  Description of Artificial Sequence: Synthetic oligonucleotide
ucuuagaaggguuggaggc

SEQ ID NO: 1125691 - RNA, 19 nt, Artificial Sequence
  Description of Artificial Sequence: Synthetic oligonucleotide
auaaacguucgucugaucu

SEQ ID NO: 1125692 - RNA, 19 nt, Artificial Sequence
  Description of Artificial Sequence: Synthetic oligonucleotide
uauugugcggucuuuuagg

SEQ ID NO: 1125693 - RNA, 19 nt, Artificial Sequence
  Description of Artificial Sequence: Synthetic oligonucleotide
guuauagcugggcugaggg

SEQ ID NO: 1125694 - RNA, 19 nt, Artificial Sequence
  Description of Artificial Sequence: Synthetic oligonucleotide
aguuaaauuccacagcaca

SEQ ID NO: 1125695 - RNA, 19 nt, Artificial Sequence
  Description of Artificial Sequence: Synthetic oligonucleotide
ugcccuaaaguuaaauucc

SEQ ID NO: 1125696 - RNA, 19 nt, Artificial Sequence
  Description of Artificial Sequence: Synthetic oligonucleotide
uuugguuguagccaccgcc

SEQ ID NO: 1125697 - RNA, 19 nt, Artificial Sequence
  Description of Artificial Sequence: Synthetic oligonucleotide
ucuaagaccgcaugauccg

SEQ ID NO: 1125698 - RNA, 19 nt, Artificial Sequence
  Description of Artificial Sequence: Synthetic oligonucleotide
gacaucuuucccuucuucg

SEQ ID NO: 1125699 - RNA, 19 nt, Artificial Sequence
  Description of Artificial Sequence: Synthetic oligonucleotide
uucuuagaaggguuggagg

SEQ ID NO: 1125700 - RNA, 19 nt, Artificial Sequence
  Description of Artificial Sequence: Synthetic oligonucleotide
auuguacugccucaccagc

SEQ ID NO: 1125701 - RNA, 19 nt, Artificial Sequence
  Description of Artificial Sequence: Synthetic oligonucleotide
aguugcguuucuuucgggc

SEQ ID NO: 1125702 - RNA, 19 nt, Artificial Sequence
  Description of Artificial Sequence: Synthetic oligonucleotide
agcgguuuugguuguagcc

SEQ ID NO: 1125703 - RNA, 19 nt, Artificial Sequence
  Description of Artificial Sequence: Synthetic oligonucleotide
uuauugugcggucuuuuag

SEQ ID NO: 1125704 - RNA, 19 nt, Artificial Sequence
  Description of Artificial Sequence: Synthetic oligonucleotide
uuagguccucaucaguugg

SEQ ID NO: 1125705 - RNA, 19 nt, Artificial Sequence
  Description of Artificial Sequence: Synthetic oligonucleotide
ucguaguucccguaguacg

SEQ ID NO: 1125706 - RNA, 19 nt, Artificial Sequence
  Description of Artificial Sequence: Synthetic oligonucleotide
ucaucagaaucucacacuc

SEQ ID NO: 1125707 - RNA, 19 nt, Artificial Sequence
  Description of Artificial Sequence: Synthetic oligonucleotide
ugcgguugaagccuccucg

SEQ ID NO: 1125708 - RNA, 19 nt, Artificial Sequence
  Description of Artificial Sequence: Synthetic oligonucleotide
guuguuguuaucccgguug

SEQ ID NO: 1125709 - RNA, 19 nt, Artificial Sequence
  Description of Artificial Sequence: Synthetic oligonucleotide
uggacagauuacaauagcu

SEQ ID NO: 1125710 - RNA, 19 nt, Artificial Sequence
  Description of Artificial Sequence: Synthetic oligonucleotide
uguaugaagggagaagccc

SEQ ID NO: 1125711 - RNA, 19 nt, Artificial Sequence
  Description of Artificial Sequence: Synthetic oligonucleotide
aguuggacagauuacaaua

SEQ ID NO: 1125712 - RNA, 19 nt, Artificial Sequence
  Description of Artificial Sequence: Synthetic oligonucleotide
ucgguugucguaucgcugg

SEQ ID NO: 1125713 - RNA, 19 nt, Artificial Sequence
  Description of Artificial Sequence: Synthetic oligonucleotide
cucacugaggggaaggugc

SEQ ID NO: 1125714 - RNA, 19 nt, Artificial Sequence
  Description of Artificial Sequence: Synthetic oligonucleotide
agaauagagcaguagggcu

SEQ ID NO: 1125715 - RNA, 19 nt, Artificial Sequence
  Description of Artificial Sequence: Synthetic oligonucleotide
guucgucugaucuaggaug

SEQ ID NO: 1125716 - RNA, 19 nt, Artificial Sequence
  Description of Artificial Sequence: Synthetic oligonucleotide
ucauuguacugccucacca

SEQ ID NO: 1125717 - RNA, 19 nt, Artificial Sequence
  Description of Artificial Sequence: Synthetic oligonucleotide
cauaguuccgcugucgacg

SEQ ID NO: 1125718 - RNA, 19 nt, Artificial Sequence
  Description of Artificial Sequence: Synthetic oligonucleotide
auaguuccgcugucgacgc

SEQ ID NO: 1125719 - RNA, 19 nt, Artificial Sequence
  Description of Artificial Sequence: Synthetic oligonucleotide
ucgucaguucucuuuauug

SEQ ID NO: 1125720 - RNA, 19 nt, Artificial Sequence
  Description of Artificial Sequence: Synthetic oligonucleotide
guuauagcugccucgguug

SEQ ID NO: 1125721 - RNA, 19 nt, Artificial Sequence
  Description of Artificial Sequence: Synthetic oligonucleotide
aaacguucgucugaucuag

SEQ ID NO: 1125722 - RNA, 19 nt, Artificial Sequence
  Description of Artificial Sequence: Synthetic oligonucleotide
cugcccuaaaguuaaauuc

SEQ ID NO: 1125723 - RNA, 19 nt, Artificial Sequence
  Description of Artificial Sequence: Synthetic oligonucleotide
gguucugaaagccuccucg

SEQ ID NO: 1125724 - RNA, 19 nt, Artificial Sequence
  Description of Artificial Sequence: Synthetic oligonucleotide
guuggaguuguuguuaucc

SEQ ID NO: 1125725 - RNA, 19 nt, Artificial Sequence
  Description of Artificial Sequence: Synthetic oligonucleotide
aauggugccccggauccgc

SEQ ID NO: 1125726 - RNA, 19 nt, Artificial Sequence
  Description of Artificial Sequence: Synthetic oligonucleotide
uuuagguccucaucaguug

SEQ ID NO: 1125727 - RNA, 19 nt, Artificial Sequence
  Description of Artificial Sequence: Synthetic oligonucleotide
aaggguuggaggcugcgug

SEQ ID NO: 1125728 - RNA, 19 nt, Artificial Sequence
  Description of Artificial Sequence: Synthetic oligonucleotide
guugaagccuccucgguag

SEQ ID NO: 1125729 - RNA, 19 nt, Artificial Sequence
  Description of Artificial Sequence: Synthetic oligonucleotide
uuguuguuaccccagcggu

SEQ ID NO: 1125730 - RNA, 19 nt, Artificial Sequence
  Description of Artificial Sequence: Synthetic oligonucleotide
auagucguaguucccguag

SEQ ID NO: 1125731 - RNA, 19 nt, Artificial Sequence
  Description of Artificial Sequence: Synthetic oligonucleotide
guaguugcguuucuuucgg

SEQ ID NO: 1125732 - RNA, 19 nt, Artificial Sequence
  Description of Artificial Sequence: Synthetic oligonucleotide
aaguuaaauuccacagcac

SEQ ID NO: 1125733 - RNA, 19 nt, Artificial Sequence
  Description of Artificial Sequence: Synthetic oligonucleotide
acagauuacaauagcuuuc

SEQ ID NO: 1125734 - RNA, 19 nt, Artificial Sequence
  Description of Artificial Sequence: Synthetic oligonucleotide
ugucguaucgcuggaaacc

SEQ ID NO: 1125735 - RNA, 19 nt, Artificial Sequence
  Description of Artificial Sequence: Synthetic oligonucleotide
aaaagggucacggucgccu

SEQ ID NO: 1125736 - RNA, 19 nt, Artificial Sequence
  Description of Artificial Sequence: Synthetic oligonucleotide
uggcuuucauuucuaagac

SEQ ID NO: 1125737 - RNA, 19 nt, Artificial Sequence
  Description of Artificial Sequence: Synthetic oligonucleotide
acggucgccuguuugaauc

SEQ ID NO: 1125738 - RNA, 19 nt, Artificial Sequence
  Description of Artificial Sequence: Synthetic oligonucleotide
ugggcugacccauaaacgu

SEQ ID NO: 1125739 - RNA, 19 nt, Artificial Sequence
  Description of Artificial Sequence: Synthetic oligonucleotide
cagauuacaauagcuuucc

SEQ ID NO: 1125740 - RNA, 19 nt, Artificial Sequence
  Description of Artificial Sequence: Synthetic oligonucleotide
gagcucgaugaacugaacc

SEQ ID NO: 1125741 - RNA, 19 nt, Artificial Sequence
  Description of Artificial Sequence: Synthetic oligonucleotide
uucgucugaucuaggaugu

SEQ ID NO: 1125742 - RNA, 19 nt, Artificial Sequence
  Description of Artificial Sequence: Synthetic oligonucleotide
gaauguuguacuucuuaga

SEQ ID NO: 1125743 - RNA, 19 nt, Artificial Sequence
  Description of Artificial Sequence: Synthetic oligonucleotide
uuucuaagaccgcaugauc

SEQ ID NO: 1125744 - RNA, 19 nt, Artificial Sequence
  Description of Artificial Sequence: Synthetic oligonucleotide
uuacaauagcuuuccgcug

SEQ ID NO: 1125745 - RNA, 19 nt, Artificial Sequence
  Description of Artificial Sequence: Synthetic oligonucleotide
ugauccgggacaucuuucc

SEQ ID NO: 1125746 - RNA, 19 nt, Artificial Sequence
  Description of Artificial Sequence: Synthetic oligonucleotide
gucaaagcgcuucucuggg

SEQ ID NO: 1125747 - RNA, 19 nt, Artificial Sequence
  Description of Artificial Sequence: Synthetic oligonucleotide
cauuguacugccucaccag

SEQ ID NO: 1125748 - RNA, 19 nt, Artificial Sequence
  Description of Artificial Sequence: Synthetic oligonucleotide
ggagaauagagcaguaggg

SEQ ID NO: 1125749 - RNA, 19 nt, Artificial Sequence
  Description of Artificial Sequence: Synthetic oligonucleotide
cugggcugacccauaaacg

SEQ ID NO: 1125750 - RNA, 19 nt, Artificial Sequence
  Description of Artificial Sequence: Synthetic oligonucleotide
ucuucgucaguucucuuua

SEQ ID NO: 1125751 - RNA, 19 nt, Artificial Sequence
  Description of Artificial Sequence: Synthetic oligonucleotide
cugauacugguuauagcug

SEQ ID NO: 1125752 - RNA, 19 nt, Artificial Sequence
  Description of Artificial Sequence: Synthetic oligonucleotide
guaugaagggagaagcccc

SEQ ID NO: 1125753 - RNA, 19 nt, Artificial Sequence
  Description of Artificial Sequence: Synthetic oligonucleotide
uacugguuauagcugggcu

SEQ ID NO: 1125754 - RNA, 19 nt, Artificial Sequence
  Description of Artificial Sequence: Synthetic oligonucleotide
gcuacugugugcuugugcc

SEQ ID NO: 1125755 - RNA, 19 nt, Artificial Sequence
  Description of Artificial Sequence: Synthetic oligonucleotide
ugggauaacucugucccag

SEQ ID NO: 1125756 - RNA, 19 nt, Artificial Sequence
  Description of Artificial Sequence: Synthetic oligonucleotide
cuggccuguaugaagggag

SEQ ID NO: 1125757 - RNA, 19 nt, Artificial Sequence
  Description of Artificial Sequence: Synthetic oligonucleotide
cuguaugaagggagaagcc

SEQ ID NO: 1125758 - RNA, 19 nt, Artificial Sequence
  Description of Artificial Sequence: Synthetic oligonucleotide
agauuacaauagcuuuccg

SEQ ID NO: 1125759 - RNA, 19 nt, Artificial Sequence
  Description of Artificial Sequence: Synthetic oligonucleotide
cgcaucuuauccaugaugg

SEQ ID NO: 1125760 - RNA, 19 nt, Artificial Sequence
  Description of Artificial Sequence: Synthetic oligonucleotide
cuucuuagaaggguuggag

SEQ ID NO: 1125761 - RNA, 19 nt, Artificial Sequence
  Description of Artificial Sequence: Synthetic oligonucleotide
gaauagagcaguagggcuc

SEQ ID NO: 1125762 - RNA, 19 nt, Artificial Sequence
  Description of Artificial Sequence: Synthetic oligonucleotide
guuuugguuguagccaccg

SEQ ID NO: 1125763 - RNA, 19 nt, Artificial Sequence
  Description of Artificial Sequence: Synthetic oligonucleotide
uuguuguuaucccgguugu

SEQ ID NO: 1125764 - RNA, 19 nt, Artificial Sequence
  Description of Artificial Sequence: Synthetic oligonucleotide
uuugcucuuugguccaaug

SEQ ID NO: 1125765 - RNA, 19 nt, Artificial Sequence
  Description of Artificial Sequence: Synthetic oligonucleotide
uaguacggcggccacgggc

SEQ ID NO: 1125766 - RNA, 19 nt, Artificial Sequence
  Description of Artificial Sequence: Synthetic oligonucleotide
accccagcgguuuugguug

SEQ ID NO: 1125767 - RNA, 19 nt, Artificial Sequence
  Description of Artificial Sequence: Synthetic oligonucleotide
uaaacguucgucugaucua

SEQ ID NO: 1125768 - RNA, 19 nt, Artificial Sequence
  Description of Artificial Sequence: Synthetic oligonucleotide
agcacgggcuacugugugc

SEQ ID NO: 1125769 - RNA, 19 nt, Artificial Sequence
  Description of Artificial Sequence: Synthetic oligonucleotide
gaaguccccaacaucgggc

SEQ ID NO: 1125770 - RNA, 19 nt, Artificial Sequence
  Description of Artificial Sequence: Synthetic oligonucleotide
auuucuaagaccgcaugau

SEQ ID NO: 1125771 - RNA, 19 nt, Artificial Sequence
  Description of Artificial Sequence: Synthetic oligonucleotide
ugacccauaaacguucguc

SEQ ID NO: 1125772 - RNA, 19 nt, Artificial Sequence
  Description of Artificial Sequence: Synthetic oligonucleotide
gucguaucgcuggaaaccg

SEQ ID NO: 1125773 - RNA, 19 nt, Artificial Sequence
  Description of Artificial Sequence: Synthetic oligonucleotide
ucugaucuaggauguaguu

SEQ ID NO: 1125774 - RNA, 19 nt, Artificial Sequence
  Description of Artificial Sequence: Synthetic oligonucleotide
gacgcagaggggcugcaag

SEQ ID NO: 1125775 - RNA, 19 nt, Artificial Sequence
  Description of Artificial Sequence: Synthetic oligonucleotide
ugggagaauagagcaguag

SEQ ID NO: 1125776 - RNA, 19 nt, Artificial Sequence
  Description of Artificial Sequence: Synthetic oligonucleotide
agaagugggcuagaaggag

SEQ ID NO: 1125777 - RNA, 19 nt, Artificial Sequence
  Description of Artificial Sequence: Synthetic oligonucleotide
gcugauacugguuauagcu

SEQ ID NO: 1125778 - RNA, 19 nt, Artificial Sequence
  Description of Artificial Sequence: Synthetic oligonucleotide
uaguucccguaguacggcg

SEQ ID NO: 1125779 - RNA, 19 nt, Artificial Sequence
  Description of Artificial Sequence: Synthetic oligonucleotide
acccauaaacguucgucug

SEQ ID NO: 1125780 - RNA, 19 nt, Artificial Sequence
  Description of Artificial Sequence: Synthetic oligonucleotide
guacuggcuccacugcugg

SEQ ID NO: 1125781 - RNA, 19 nt, Artificial Sequence
  Description of Artificial Sequence: Synthetic oligonucleotide
aggauuguaggggccauag

SEQ ID NO: 1125782 - RNA, 19 nt, Artificial Sequence
  Description of Artificial Sequence: Synthetic oligonucleotide
cugaucuaggauguaguug

SEQ ID NO: 1125783 - RNA, 19 nt, Artificial Sequence
  Description of Artificial Sequence: Synthetic oligonucleotide
gguuguuguuaccccagcg

SEQ ID NO: 1125784 - RNA, 19 nt, Artificial Sequence
  Description of Artificial Sequence: Synthetic oligonucleotide
uugucguaucgcuggaaac

SEQ ID NO: 1125785 - RNA, 19 nt, Artificial Sequence
  Description of Artificial Sequence: Synthetic oligonucleotide
cauuucuaagaccgcauga

SEQ ID NO: 1125786 - RNA, 19 nt, Artificial Sequence
  Description of Artificial Sequence: Synthetic oligonucleotide
agcauaguuccgcugucga

SEQ ID NO: 1125787 - RNA, 19 nt, Artificial Sequence
  Description of Artificial Sequence: Synthetic oligonucleotide
uggaaaccgccacuacccc

SEQ ID NO: 1125788 - RNA, 19 nt, Artificial Sequence
  Description of Artificial Sequence: Synthetic oligonucleotide
cugggcguacugcugauac

SEQ ID NO: 1125789 - RNA, 19 nt, Artificial Sequence
  Description of Artificial Sequence: Synthetic oligonucleotide
acgcagaggggcugcaagg

SEQ ID NO: 1125790 - RNA, 19 nt, Artificial Sequence
  Description of Artificial Sequence: Synthetic oligonucleotide
cuuugguccaauggugccc

SEQ ID NO: 1125791 - RNA, 19 nt, Artificial Sequence
  Description of Artificial Sequence: Synthetic oligonucleotide
uuccgagcagggcuguagc

SEQ ID NO: 1125792 - RNA, 19 nt, Artificial Sequence
  Description of Artificial Sequence: Synthetic oligonucleotide
gacccauaaacguucgucu

SEQ ID NO: 1125793 - RNA, 19 nt, Artificial Sequence
  Description of Artificial Sequence: Synthetic oligonucleotide
cucgguaguugccuccucc

SEQ ID NO: 1125794 - RNA, 19 nt, Artificial Sequence
  Description of Artificial Sequence: Synthetic oligonucleotide
gauccgggacaucuuuccc

SEQ ID NO: 1125795 - RNA, 19 nt, Artificial Sequence
  Description of Artificial Sequence: Synthetic oligonucleotide
uuauagcugggcugagggu

SEQ ID NO: 1125796 - RNA, 19 nt, Artificial Sequence
  Description of Artificial Sequence: Synthetic oligonucleotide
aggcgguugaggcacugag

SEQ ID NO: 1125797 - RNA, 19 nt, Artificial Sequence
  Description of Artificial Sequence: Synthetic oligonucleotide
gcccauguggucuugccgg

SEQ ID NO: 1125798 - RNA, 19 nt, Artificial Sequence
  Description of Artificial Sequence: Synthetic oligonucleotide
uuaucccgguuguuguuac

SEQ ID NO: 1125799 - RNA, 19 nt, Artificial Sequence
  Description of Artificial Sequence: Synthetic oligonucleotide
cuaagaccgcaugauccgg

SEQ ID NO: 1125800 - RNA, 19 nt, Artificial Sequence
  Description of Artificial Sequence: Synthetic oligonucleotide
cuguaacuaggcuguggag

SEQ ID NO: 1125801 - RNA, 19 nt, Artificial Sequence
  Description of Artificial Sequence: Synthetic oligonucleotide
cccaacaucgggcaaagug

SEQ ID NO: 1125802 - RNA, 19 nt, Artificial Sequence
  Description of Artificial Sequence: Synthetic oligonucleotide
ggaaguccccaacaucggg

SEQ ID NO: 1125803 - RNA, 19 nt, Artificial Sequence
  Description of Artificial Sequence: Synthetic oligonucleotide
uaguugcguuucuuucggg

SEQ ID NO: 1125804 - RNA, 19 nt, Artificial Sequence
  Description of Artificial Sequence: Synthetic oligonucleotide
uguuguuaccccagcgguu

SEQ ID NO: 1125805 - RNA, 19 nt, Artificial Sequence
  Description of Artificial Sequence: Synthetic oligonucleotide
aguuccgcugucgacgcag

SEQ ID NO: 1125806 - RNA, 19 nt, Artificial Sequence
  Description of Artificial Sequence: Synthetic oligonucleotide
uagucguaguucccguagu

SEQ ID NO: 1125807 - RNA, 19 nt, Artificial Sequence
  Description of Artificial Sequence: Synthetic oligonucleotide
acguucgucugaucuagga

SEQ ID NO: 1125808 - RNA, 19 nt, Artificial Sequence
  Description of Artificial Sequence: Synthetic oligonucleotide
cuugauggcccaugugguc

SEQ ID NO: 1125809 - RNA, 19 nt, Artificial Sequence
  Description of Artificial Sequence: Synthetic oligonucleotide
uagcucccauaguuguagg

SEQ ID NO: 1125810 - RNA, 19 nt, Artificial Sequence
  Description of Artificial Sequence: Synthetic oligonucleotide
agaccgcaugauccgggac

SEQ ID NO: 1125811 - RNA, 19 nt, Artificial Sequence
  Description of Artificial Sequence: Synthetic oligonucleotide
ugucgacgcaggcccauca

SEQ ID NO: 1125812 - RNA, 19 nt, Artificial Sequence
  Description of Artificial Sequence: Synthetic oligonucleotide
gcuggaaaccgccacuacc

SEQ ID NO: 1125813 - RNA, 19 nt, Artificial Sequence
  Description of Artificial Sequence: Synthetic oligonucleotide
guugucguaucgcuggaaa

SEQ ID NO: 1125814 - RNA, 19 nt, Artificial Sequence
  Description of Artificial Sequence: Synthetic oligonucleotide
ucgguaguugccuccuccu

SEQ ID NO: 1125815 - RNA, 19 nt, Artificial Sequence
  Description of Artificial Sequence: Synthetic oligonucleotide
ucgccuguuugaauccaga

SEQ ID NO: 1125816 - RNA, 19 nt, Artificial Sequence
  Description of Artificial Sequence: Synthetic oligonucleotide
ccuccuugguuguagggcg

SEQ ID NO: 1125817 - RNA, 19 nt, Artificial Sequence
  Description of Artificial Sequence: Synthetic oligonucleotide
ugcccucugcccuaaaguu

SEQ ID NO: 1125818 - RNA, 19 nt, Artificial Sequence
  Description of Artificial Sequence: Synthetic oligonucleotide
ugugaacccugggagaaua

SEQ ID NO: 1125819 - RNA, 19 nt, Artificial Sequence
  Description of Artificial Sequence: Synthetic oligonucleotide
gcuguaacuaggcugugga

SEQ ID NO: 1125820 - RNA, 19 nt, Artificial Sequence
  Description of Artificial Sequence: Synthetic oligonucleotide
gauguaguugcguuucuuu

SEQ ID NO: 1125821 - RNA, 19 nt, Artificial Sequence
  Description of Artificial Sequence: Synthetic oligonucleotide
guucccguaguacggcggc

SEQ ID NO: 1125822 - RNA, 19 nt, Artificial Sequence
  Description of Artificial Sequence: Synthetic oligonucleotide
ucgaugaacugaaccucau

SEQ ID NO: 1125823 - RNA, 19 nt, Artificial Sequence
  Description of Artificial Sequence: Synthetic oligonucleotide
ucguaucgcuggaaaccgc

SEQ ID NO: 1125824 - RNA, 19 nt, Artificial Sequence
  Description of Artificial Sequence: Synthetic oligonucleotide
cucgguugucguaucgcug

SEQ ID NO: 1125825 - RNA, 19 nt, Artificial Sequence
  Description of Artificial Sequence: Synthetic oligonucleotide
uuguagggcggcuggcugu

SEQ ID NO: 1125826 - RNA, 19 nt, Artificial Sequence
  Description of Artificial Sequence: Synthetic oligonucleotide
acaauagcuuuccgcugga

SEQ ID NO: 1125827 - RNA, 19 nt, Artificial Sequence
  Description of Artificial Sequence: Synthetic oligonucleotide
ccaacaucgggcaaaguga

SEQ ID NO: 1125828 - RNA, 19 nt, Artificial Sequence
  Description of Artificial Sequence: Synthetic oligonucleotide
ucccgguuguuguuacccc

SEQ ID NO: 1125829 - RNA, 19 nt, Artificial Sequence
  Description of Artificial Sequence: Synthetic oligonucleotide
aguucccguaguacggcgg

SEQ ID NO: 1125830 - RNA, 19 nt, Artificial Sequence
  Description of Artificial Sequence: Synthetic oligonucleotide
uaccccagcgguuuugguu

SEQ ID NO: 1125831 - RNA, 19 nt, Artificial Sequence
  Description of Artificial Sequence: Synthetic oligonucleotide
aacguucgucugaucuagg

SEQ ID NO: 1125832 - RNA, 19 nt, Artificial Sequence
  Description of Artificial Sequence: Synthetic oligonucleotide
cuccuugguuguagggcgg

SEQ ID NO: 1125833 - RNA, 19 nt, Artificial Sequence
  Description of Artificial Sequence: Synthetic oligonucleotide
guaguucccguaguacggc

SEQ ID NO: 1125834 - RNA, 19 nt, Artificial Sequence
  Description of Artificial Sequence: Synthetic oligonucleotide
aagggucacggucgccugu

SEQ ID NO: 1125835 - RNA, 19 nt, Artificial Sequence
  Description of Artificial Sequence: Synthetic oligonucleotide
gucacggucgccuguuuga

SEQ ID NO: 1125836 - RNA, 19 nt, Artificial Sequence
  Description of Artificial Sequence: Synthetic oligonucleotide
aguacggcggccacgggcu

SEQ ID NO: 1125837 - RNA, 19 nt, Artificial Sequence
  Description of Artificial Sequence: Synthetic oligonucleotide
cguaguucccguaguacgg

SEQ ID NO: 1125838 - RNA, 19 nt, Artificial Sequence
  Description of Artificial Sequence: Synthetic oligonucleotide
cagcgguuuugguuguagc

SEQ ID NO: 1125839 - RNA, 19 nt, Artificial Sequence
  Description of Artificial Sequence: Synthetic oligonucleotide
augauccgggacaucuuuc

SEQ ID NO: 1125840 - RNA, 19 nt, Artificial Sequence
  Description of Artificial Sequence: Synthetic oligonucleotide
guauuggcgcuggagccag

SEQ ID NO: 1125841 - RNA, 19 nt, Artificial Sequence
  Description of Artificial Sequence: Synthetic oligonucleotide
ggcagcaaucugaaugagg

SEQ ID NO: 1125842 - RNA, 19 nt, Artificial Sequence
  Description of Artificial Sequence: Synthetic oligonucleotide
uggggagcccgguuauagc

SEQ ID NO: 1125843 - RNA, 19 nt, Artificial Sequence
  Description of Artificial Sequence: Synthetic oligonucleotide
gagcacgggcuacugugug

SEQ ID NO: 1125844 - RNA, 19 nt, Artificial Sequence
  Description of Artificial Sequence: Synthetic oligonucleotide
uagagcaguagggcucugc

SEQ ID NO: 1125845 - RNA, 19 nt, Artificial Sequence
  Description of Artificial Sequence: Synthetic oligonucleotide
guuguuggaguuguuguua

SEQ ID NO: 1125846 - RNA, 19 nt, Artificial Sequence
  Description of Artificial Sequence: Synthetic oligonucleotide
uacugcugauacugguuau

SEQ ID NO: 1125847 - RNA, 19 nt, Artificial Sequence
  Description of Artificial Sequence: Synthetic oligonucleotide
uccgggacaucuuucccuu

SEQ ID NO: 1125848 - RNA, 19 nt, Artificial Sequence
  Description of Artificial Sequence: Synthetic oligonucleotide
uaucccgguuguuguuacc

SEQ ID NO: 1125849 - RNA, 19 nt, Artificial Sequence
  Description of Artificial Sequence: Synthetic oligonucleotide
gucguaguucccguaguac

SEQ ID NO: 1125850 - RNA, 19 nt, Artificial Sequence
  Description of Artificial Sequence: Synthetic oligonucleotide
cuggggagcccgguuauag

SEQ ID NO: 1125851 - RNA, 19 nt, Artificial Sequence
  Description of Artificial Sequence: Synthetic oligonucleotide
aguucuucaccaggacaug

SEQ ID NO: 1125852 - RNA, 19 nt, Artificial Sequence
  Description of Artificial Sequence: Synthetic oligonucleotide
uccgagcagggcuguagcu

SEQ ID NO: 1125853 - RNA, 19 nt, Artificial Sequence
  Description of Artificial Sequence: Synthetic oligonucleotide
aguuguuguuaucccgguu

SEQ ID NO: 1125854 - RNA, 19 nt, Artificial Sequence
  Description of Artificial Sequence: Synthetic oligonucleotide
uccccgguucugaaagccu

SEQ ID NO: 1125855 - RNA, 19 nt, Artificial Sequence
  Description of Artificial Sequence: Synthetic oligonucleotide
uccccaacaucgggcaaag

SEQ ID NO: 1125856 - RNA, 19 nt, Artificial Sequence
  Description of Artificial Sequence: Synthetic oligonucleotide
gggcguacugcugauacug

SEQ ID NO: 1125857 - RNA, 19 nt, Artificial Sequence
  Description of Artificial Sequence: Synthetic oligonucleotide
ggggcaggauuguaggggc

SEQ ID NO: 1125858 - RNA, 19 nt, Artificial Sequence
  Description of Artificial Sequence: Synthetic oligonucleotide
gguuauagcugggcugagg

SEQ ID NO: 1125859 - RNA, 19 nt, Artificial Sequence
  Description of Artificial Sequence: Synthetic oligonucleotide
cuccccgguucugaaagcc

SEQ ID NO: 1125860 - RNA, 19 nt, Artificial Sequence
  Description of Artificial Sequence: Synthetic oligonucleotide
cauaaacguucgucugauc

SEQ ID NO: 1125861 - RNA, 19 nt, Artificial Sequence
  Description of Artificial Sequence: Synthetic oligonucleotide
uugaagccuccucgguagu

SEQ ID NO: 1125862 - RNA, 19 nt, Artificial Sequence
  Description of Artificial Sequence: Synthetic oligonucleotide
ggagcccgguuauagcugc

SEQ ID NO: 1125863 - RNA, 19 nt, Artificial Sequence
  Description of Artificial Sequence: Synthetic oligonucleotide
gagccagggauguugcugu

SEQ ID NO: 1125864 - RNA, 19 nt, Artificial Sequence
  Description of Artificial Sequence: Synthetic oligonucleotide
ggauaacucugucccagca

SEQ ID NO: 1125865 - RNA, 19 nt, Artificial Sequence
  Description of Artificial Sequence: Synthetic oligonucleotide
gcgguugaagccuccucgg

SEQ ID NO: 1125866 - RNA, 19 nt, Artificial Sequence
  Description of Artificial Sequence: Synthetic oligonucleotide
uccuugguuguagggcggc

SEQ ID NO: 1125867 - RNA, 19 nt, Artificial Sequence
  Description of Artificial Sequence: Synthetic oligonucleotide
cccauagucguaguucccg

SEQ ID NO: 1125868 - RNA, 19 nt, Artificial Sequence
  Description of Artificial Sequence: Synthetic oligonucleotide
gcuggaucaggacauccca

SEQ ID NO: 1125869 - RNA, 19 nt, Artificial Sequence
  Description of Artificial Sequence: Synthetic oligonucleotide
acgggcuacugugugcuug

SEQ ID NO: 1125870 - RNA, 19 nt, Artificial Sequence
  Description of Artificial Sequence: Synthetic oligonucleotide
cguaucgcuggaaaccgcc

SEQ ID NO: 1125871 - RNA, 19 nt, Artificial Sequence
  Description of Artificial Sequence: Synthetic oligonucleotide
ugggcguacugcugauacu

SEQ ID NO: 1125872 - RNA, 19 nt, Artificial Sequence
  Description of Artificial Sequence: Synthetic oligonucleotide
gcugccucgguuguuggag

SEQ ID NO: 1125873 - RNA, 19 nt, Artificial Sequence
  Description of Artificial Sequence: Synthetic oligonucleotide
aggcugcgugcuugauggc

SEQ ID NO: 1125874 - RNA, 19 nt, Artificial Sequence
  Description of Artificial Sequence: Synthetic oligonucleotide
acugcugauacugguuaua

SEQ ID NO: 1125875 - RNA, 19 nt, Artificial Sequence
  Description of Artificial Sequence: Synthetic oligonucleotide
ggcuguaacuaggcugugg

SEQ ID NO: 1125876 - RNA, 19 nt, Artificial Sequence
  Description of Artificial Sequence: Synthetic oligonucleotide
gggauaacucugucccagc

SEQ ID NO: 1125877 - RNA, 19 nt, Artificial Sequence
  Description of Artificial Sequence: Synthetic oligonucleotide
uuaccccagcgguuuuggu

SEQ ID NO: 1125878 - RNA, 19 nt, Artificial Sequence
  Description of Artificial Sequence: Synthetic oligonucleotide
ccgagcacgggcuacugug

SEQ ID NO: 1125879 - RNA, 19 nt, Artificial Sequence
  Description of Artificial Sequence: Synthetic oligonucleotide
gaguuguuguuaucccggu

SEQ ID NO: 1125880 - RNA, 19 nt, Artificial Sequence
  Description of Artificial Sequence: Synthetic oligonucleotide
ugguuauagcugggcugag

SEQ ID NO: 1125881 - RNA, 19 nt, Artificial Sequence
  Description of Artificial Sequence: Synthetic oligonucleotide
gugcuugauggcccaugug

SEQ ID NO: 1125882 - RNA, 19 nt, Artificial Sequence
  Description of Artificial Sequence: Synthetic oligonucleotide
ggauuguaggggccauagc

SEQ ID NO: 1125883 - RNA, 19 nt, Artificial Sequence
  Description of Artificial Sequence: Synthetic oligonucleotide
cacugaguggccugcugga

SEQ ID NO: 1125884 - RNA, 19 nt, Artificial Sequence
  Description of Artificial Sequence: Synthetic oligonucleotide
gccuguaugaagggagaag

SEQ ID NO: 1125885 - RNA, 19 nt, Artificial Sequence
  Description of Artificial Sequence: Synthetic oligonucleotide
guuaucccgguuguuguua

SEQ ID NO: 1125886 - RNA, 19 nt, Artificial Sequence
  Description of Artificial Sequence: Synthetic oligonucleotide
ccgguuauagcugccucgg

SEQ ID NO: 1125887 - RNA, 19 nt, Artificial Sequence
  Description of Artificial Sequence: Synthetic oligonucleotide
gcucccauaguuguaggca

SEQ ID NO: 1125888 - RNA, 19 nt, Artificial Sequence
  Description of Artificial Sequence: Synthetic oligonucleotide
gggugggccggccuugcgg

SEQ ID NO: 1125889 - RNA, 19 nt, Artificial Sequence
  Description of Artificial Sequence: Synthetic oligonucleotide
ucacggucgccuguuugaa

SEQ ID NO: 1125890 - RNA, 19 nt, Artificial Sequence
  Description of Artificial Sequence: Synthetic oligonucleotide
ggggauuccgagcagggcu

SEQ ID NO: 1125891 - RNA, 19 nt, Artificial Sequence
  Description of Artificial Sequence: Synthetic oligonucleotide
ggucacggucgccuguuug

SEQ ID NO: 1125892 - RNA, 19 nt, Artificial Sequence
  Description of Artificial Sequence: Synthetic oligonucleotide
ucgcuggaaaccgccacua

SEQ ID NO: 1125893 - RNA, 19 nt, Artificial Sequence
  Description of Artificial Sequence: Synthetic oligonucleotide
gcugacccauaaacguucg

SEQ ID NO: 1125894 - RNA, 19 nt, Artificial Sequence
  Description of Artificial Sequence: Synthetic oligonucleotide
uccgcucacugaggggaag

SEQ ID NO: 1125895 - RNA, 19 nt, Artificial Sequence
  Description of Artificial Sequence: Synthetic oligonucleotide
cguaguacggcggccacgg

SEQ ID NO: 1125896 - RNA, 19 nt, Artificial Sequence
  Description of Artificial Sequence: Synthetic oligonucleotide
ggccuugcggccuuccuca

SEQ ID NO: 1125897 - RNA, 19 nt, Artificial Sequence
  Description of Artificial Sequence: Synthetic oligonucleotide
ggcggcuggcuguaacuag

SEQ ID NO: 1125898 - RNA, 19 nt, Artificial Sequence
  Description of Artificial Sequence: Synthetic oligonucleotide
cauagucguaguucccgua

SEQ ID NO: 1125899 - RNA, 19 nt, Artificial Sequence
  Description of Artificial Sequence: Synthetic oligonucleotide
caauggugccccggauccg

SEQ ID NO: 1125900 - RNA, 19 nt, Artificial Sequence
  Description of Artificial Sequence: Synthetic oligonucleotide
gcauaguuccgcugucgac

SEQ ID NO: 1125901 - RNA, 19 nt, Artificial Sequence
  Description of Artificial Sequence: Synthetic oligonucleotide
gucugaucuaggauguagu

SEQ ID NO: 1125902 - RNA, 19 nt, Artificial Sequence
  Description of Artificial Sequence: Synthetic oligonucleotide
cugggauaacucuguccca

SEQ ID NO: 1125903 - RNA, 19 nt, Artificial Sequence
  Description of Artificial Sequence: Synthetic oligonucleotide
gucgacgcaggcccaucac

SEQ ID NO: 1125904 - RNA, 19 nt, Artificial Sequence
  Description of Artificial Sequence: Synthetic oligonucleotide
guuccgcugucgacgcagg

SEQ ID NO: 1125905 - RNA, 19 nt, Artificial Sequence
  Description of Artificial Sequence: Synthetic oligonucleotide
guaguacggcggccacggg

SEQ ID NO: 1125906 - RNA, 19 nt, Artificial Sequence
  Description of Artificial Sequence: Synthetic oligonucleotide
ccuccgcugcgguugaagc

SEQ ID NO: 1125907 - RNA, 19 nt, Artificial Sequence
  Description of Artificial Sequence: Synthetic oligonucleotide
ccuggguguagccuccuug

SEQ ID NO: 1125908 - RNA, 19 nt, Artificial Sequence
  Description of Artificial Sequence: Synthetic oligonucleotide
ggcguacugcugauacugg

SEQ ID NO: 1125909 - RNA, 19 nt, Artificial Sequence
  Description of Artificial Sequence: Synthetic oligonucleotide
uguagggcggcuggcugua

SEQ ID NO: 1125910 - RNA, 19 nt, Artificial Sequence
  Description of Artificial Sequence: Synthetic oligonucleotide
gcugcgugcuugauggccc

SEQ ID NO: 1125911 - RNA, 19 nt, Artificial Sequence
  Description of Artificial Sequence: Synthetic oligonucleotide
guuguuaccccagcgguuu

SEQ ID NO: 1125912 - RNA, 19 nt, Artificial Sequence
  Description of Artificial Sequence: Synthetic oligonucleotide
caguuggacagauuacaau

SEQ ID NO: 1125913 - RNA, 19 nt, Artificial Sequence
  Description of Artificial Sequence: Synthetic oligonucleotide
ccgguuguuguuaccccag

SEQ ID NO: 1125914 - RNA, 19 nt, Artificial Sequence
  Description of Artificial Sequence: Synthetic oligonucleotide
guaucgcuggaaaccgcca

SEQ ID NO: 1125915 - RNA, 19 nt, Artificial Sequence
  Description of Artificial Sequence: Synthetic oligonucleotide
gggauuccgagcagggcug

SEQ ID NO: 1125916 - RNA, 19 nt, Artificial Sequence
  Description of Artificial Sequence: Synthetic oligonucleotide
ggccucgguugucguaucg

SEQ ID NO: 1125917 - RNA, 19 nt, Artificial Sequence
  Description of Artificial Sequence: Synthetic oligonucleotide
cugcgguugaagccuccuc

SEQ ID NO: 1125918 - RNA, 19 nt, Artificial Sequence
  Description of Artificial Sequence: Synthetic oligonucleotide
uuguuaccccagcgguuuu

SEQ ID NO: 1125919 - RNA, 19 nt, Artificial Sequence
  Description of Artificial Sequence: Synthetic oligonucleotide
gguccaauggugccccgga

SEQ ID NO: 1125920 - RNA, 19 nt, Artificial Sequence
  Description of Artificial Sequence: Synthetic oligonucleotide
cuaggauguaguugcguuu

SEQ ID NO: 1125921 - RNA, 19 nt, Artificial Sequence
  Description of Artificial Sequence: Synthetic oligonucleotide
gguuauagcugccucgguu

SEQ ID NO: 1125922 - RNA, 19 nt, Artificial Sequence
  Description of Artificial Sequence: Synthetic oligonucleotide
uaguuccgcugucgacgca

SEQ ID NO: 1125923 - RNA, 19 nt, Artificial Sequence
  Description of Artificial Sequence: Synthetic oligonucleotide
aggcgggccucgguugucg

SEQ ID NO: 1125924 - RNA, 19 nt, Artificial Sequence
  Description of Artificial Sequence: Synthetic oligonucleotide
guaggggccauagcuccca

SEQ ID NO: 1125925 - RNA, 19 nt, Artificial Sequence
  Description of Artificial Sequence: Synthetic oligonucleotide
gguuuugguuguagccacc

SEQ ID NO: 1125926 - RNA, 19 nt, Artificial Sequence
  Description of Artificial Sequence: Synthetic oligonucleotide
ccggaagccaccaccucug

SEQ ID NO: 1125927 - RNA, 19 nt, Artificial Sequence
  Description of Artificial Sequence: Synthetic oligonucleotide
agcccgguuauagcugccu

SEQ ID NO: 1125928 - RNA, 19 nt, Artificial Sequence
  Description of Artificial Sequence: Synthetic oligonucleotide
ggacagauuacaauagcuu

SEQ ID NO: 1125929 - RNA, 19 nt, Artificial Sequence
  Description of Artificial Sequence: Synthetic oligonucleotide
gccagcauaguuccgcugu

SEQ ID NO: 1125930 - RNA, 19 nt, Artificial Sequence
  Description of Artificial Sequence: Synthetic oligonucleotide
gcggccagcauaguuccgc

SEQ ID NO: 1125931 - RNA, 19 nt, Artificial Sequence
  Description of Artificial Sequence: Synthetic oligonucleotide
ugcugggcguacugcugau

SEQ ID NO: 1125932 - RNA, 19 nt, Artificial Sequence
  Description of Artificial Sequence: Synthetic oligonucleotide
gagacagcccugggauaac

SEQ ID NO: 1125933 - RNA, 19 nt, Artificial Sequence
  Description of Artificial Sequence: Synthetic oligonucleotide
ggggccacggcagcgcuag

SEQ ID NO: 1125934 - RNA, 19 nt, Artificial Sequence
  Description of Artificial Sequence: Synthetic oligonucleotide
ggcgcuggagccagggaug

SEQ ID NO: 1125935 - RNA, 19 nt, Artificial Sequence
  Description of Artificial Sequence: Synthetic oligonucleotide
ggcaggauuguaggggcca

SEQ ID NO: 1125936 - RNA, 19 nt, Artificial Sequence
  Description of Artificial Sequence: Synthetic oligonucleotide
cuuuauugugcggucuuuu

SEQ ID NO: 1125937 - RNA, 19 nt, Artificial Sequence
  Description of Artificial Sequence: Synthetic oligonucleotide
agcacccgagcacgggcua

SEQ ID NO: 1125938 - RNA, 19 nt, Artificial Sequence
  Description of Artificial Sequence: Synthetic oligonucleotide
uggugccccggauccgcuc

SEQ ID NO: 1125939 - RNA, 19 nt, Artificial Sequence
  Description of Artificial Sequence: Synthetic oligonucleotide
gagcccgguuauagcugcc

SEQ ID NO: 1125940 - RNA, 19 nt, Artificial Sequence
  Description of Artificial Sequence: Synthetic oligonucleotide
ccagcgguuuugguuguag

SEQ ID NO: 1125941 - RNA, 19 nt, Artificial Sequence
  Description of Artificial Sequence: Synthetic oligonucleotide
gaggcgguugaggcacuga

SEQ ID NO: 1125942 - RNA, 19 nt, Artificial Sequence
  Description of Artificial Sequence: Synthetic oligonucleotide
gccucgguugucguaucgc

SEQ ID NO: 1125943 - RNA, 19 nt, Artificial Sequence
  Description of Artificial Sequence: Synthetic oligonucleotide
auagagcaguagggcucug

SEQ ID NO: 1125944 - RNA, 19 nt, Artificial Sequence
  Description of Artificial Sequence: Synthetic oligonucleotide
agcggccagcauaguuccg

SEQ ID NO: 1125945 - RNA, 19 nt, Artificial Sequence
  Description of Artificial Sequence: Synthetic oligonucleotide
cugcgugcuugauggccca

SEQ ID NO: 1125946 - RNA, 19 nt, Artificial Sequence
  Description of Artificial Sequence: Synthetic oligonucleotide
caucgggcaaagugaaguu

SEQ ID NO: 1125947 - RNA, 19 nt, Artificial Sequence
  Description of Artificial Sequence: Synthetic oligonucleotide
ucgucugaucuaggaugua

SEQ ID NO: 1125948 - RNA, 19 nt, Artificial Sequence
  Description of Artificial Sequence: Synthetic oligonucleotide
aggggccauagcucccaua

SEQ ID NO: 1125949 - RNA, 19 nt, Artificial Sequence
  Description of Artificial Sequence: Synthetic oligonucleotide
agggucacggucgccuguu

SEQ ID NO: 1125950 - RNA, 19 nt, Artificial Sequence
  Description of Artificial Sequence: Synthetic oligonucleotide
gugggccggccuugcggcc

SEQ ID NO: 1125951 - RNA, 19 nt, Artificial Sequence
  Description of Artificial Sequence: Synthetic oligonucleotide
cccgguuguuguuacccca

SEQ ID NO: 1125952 - RNA, 19 nt, Artificial Sequence
  Description of Artificial Sequence: Synthetic oligonucleotide
cuggaagaagugggcuaga

SEQ ID NO: 1125953 - RNA, 19 nt, Artificial Sequence
  Description of Artificial Sequence: Synthetic oligonucleotide
cggucgccuguuugaaucc

SEQ ID NO: 1125954 - RNA, 19 nt, Artificial Sequence
  Description of Artificial Sequence: Synthetic oligonucleotide
cauugguacccagaauguu

SEQ ID NO: 1125955 - RNA, 19 nt, Artificial Sequence
  Description of Artificial Sequence: Synthetic oligonucleotide
ccgcucacugaggggaagg

SEQ ID NO: 1125956 - RNA, 19 nt, Artificial Sequence
  Description of Artificial Sequence: Synthetic oligonucleotide
cgucaguucucuuuauugu

SEQ ID NO: 1125957 - RNA, 19 nt, Artificial Sequence
  Description of Artificial Sequence: Synthetic oligonucleotide
ggagcucgaugaacugaac

SEQ ID NO: 1125958 - RNA, 19 nt, Artificial Sequence
  Description of Artificial Sequence: Synthetic oligonucleotide
ccuccccgguucugaaagc

SEQ ID NO: 1125959 - RNA, 19 nt, Artificial Sequence
  Description of Artificial Sequence: Synthetic oligonucleotide
caauagcuuuccgcuggaa

SEQ ID NO: 1125960 - RNA, 19 nt, Artificial Sequence
  Description of Artificial Sequence: Synthetic oligonucleotide
gcccgguuauagcugccuc

SEQ ID NO: 1125961 - RNA, 19 nt, Artificial Sequence
  Description of Artificial Sequence: Synthetic oligonucleotide
gcguacugcugauacuggu

SEQ ID NO: 1125962 - RNA, 19 nt, Artificial Sequence
  Description of Artificial Sequence: Synthetic oligonucleotide
cuucgucaguucucuuuau

SEQ ID NO: 1125963 - RNA, 19 nt, Artificial Sequence
  Description of Artificial Sequence: Synthetic oligonucleotide
gguugccuccaggcgggcc

SEQ ID NO: 1125964 - RNA, 19 nt, Artificial Sequence
  Description of Artificial Sequence: Synthetic oligonucleotide
cugucgacgcaggcccauc

SEQ ID NO: 1125965 - RNA, 19 nt, Artificial Sequence
  Description of Artificial Sequence: Synthetic oligonucleotide
ggucgccuguuugaaucca

SEQ ID NO: 1125966 - RNA, 19 nt, Artificial Sequence
  Description of Artificial Sequence: Synthetic oligonucleotide
gccuccgcugcgguugaag

SEQ ID NO: 1125967 - RNA, 19 nt, Artificial Sequence
  Description of Artificial Sequence: Synthetic oligonucleotide
ugcgugcuugauggcccau

SEQ ID NO: 1125968 - RNA, 19 nt, Artificial Sequence
  Description of Artificial Sequence: Synthetic oligonucleotide
aggcacugaguggccugcu

SEQ ID NO: 1125969 - RNA, 19 nt, Artificial Sequence
  Description of Artificial Sequence: Synthetic oligonucleotide
cgguuguuguuaccccagc

SEQ ID NO: 1125970 - RNA, 19 nt, Artificial Sequence
  Description of Artificial Sequence: Synthetic oligonucleotide
gcgugcuugauggcccaug

SEQ ID NO: 1125971 - RNA, 19 nt, Artificial Sequence
  Description of Artificial Sequence: Synthetic oligonucleotide
cuccuccccgguucugaaa

SEQ ID NO: 1125972 - RNA, 19 nt, Artificial Sequence
  Description of Artificial Sequence: Synthetic oligonucleotide
gauuccgagcagggcugua

SEQ ID NO: 1125973 - RNA, 19 nt, Artificial Sequence
  Description of Artificial Sequence: Synthetic oligonucleotide
ggguguagccuccuugguu

SEQ ID NO: 1125974 - RNA, 19 nt, Artificial Sequence
  Description of Artificial Sequence: Synthetic oligonucleotide
ccguaguacggcggccacg

SEQ ID NO: 1125975 - RNA, 19 nt, Artificial Sequence
  Description of Artificial Sequence: Synthetic oligonucleotide
ggggugggccggccuugcg

SEQ ID NO: 1125976 - RNA, 19 nt, Artificial Sequence
  Description of Artificial Sequence: Synthetic oligonucleotide
cagcacccgagcacgggcu

SEQ ID NO: 1125977 - RNA, 19 nt, Artificial Sequence
  Description of Artificial Sequence: Synthetic oligonucleotide
gguugucguaucgcuggaa

SEQ ID NO: 1125978 - RNA, 19 nt, Artificial Sequence
  Description of Artificial Sequence: Synthetic oligonucleotide
cugccucaccagcuugucu

SEQ ID NO: 1125979 - RNA, 19 nt, Artificial Sequence
  Description of Artificial Sequence: Synthetic oligonucleotide
guccaauggugccccggau

SEQ ID NO: 1125980 - RNA, 19 nt, Artificial Sequence
  Description of Artificial Sequence: Synthetic oligonucleotide
gcacgggcuacugugugcu

SEQ ID NO: 1125981 - RNA, 19 nt, Artificial Sequence
  Description of Artificial Sequence: Synthetic oligonucleotide
ggcggcgguggcugcugug

SEQ ID NO: 1125982 - RNA, 19 nt, Artificial Sequence
  Description of Artificial Sequence: Synthetic oligonucleotide
cccguaguacggcggccac

SEQ ID NO: 1125983 - RNA, 19 nt, Artificial Sequence
  Description of Artificial Sequence: Synthetic oligonucleotide
gcccugggauaacucuguc

SEQ ID NO: 1125984 - RNA, 19 nt, Artificial Sequence
  Description of Artificial Sequence: Synthetic oligonucleotide
ccucgguugucguaucgcu

SEQ ID NO: 1125985 - RNA, 19 nt, Artificial Sequence
  Description of Artificial Sequence: Synthetic oligonucleotide
ccauagucguaguucccgu

SEQ ID NO: 1125986 - RNA, 19 nt, Artificial Sequence
  Description of Artificial Sequence: Synthetic oligonucleotide
ccauaaacguucgucugau

SEQ ID NO: 1125987 - RNA, 19 nt, Artificial Sequence
  Description of Artificial Sequence: Synthetic oligonucleotide
caaucugaaugaggcgguu

SEQ ID NO: 1125988 - RNA, 19 nt, Artificial Sequence
  Description of Artificial Sequence: Synthetic oligonucleotide
cacggucgccuguuugaau

SEQ ID NO: 1125989 - RNA, 19 nt, Artificial Sequence
  Description of Artificial Sequence: Synthetic oligonucleotide
ggcgguugaggcacugagu

SEQ ID NO: 1125990 - RNA, 19 nt, Artificial Sequence
  Description of Artificial Sequence: Synthetic oligonucleotide
gugcggucuuuuagguccu

SEQ ID NO: 1125991 - RNA, 19 nt, Artificial Sequence
  Description of Artificial Sequence: Synthetic oligonucleotide
cggccuugcggccuuccuc

SEQ ID NO: 1125992 - RNA, 19 nt, Artificial Sequence
  Description of Artificial Sequence: Synthetic oligonucleotide
cguucgucugaucuaggau

SEQ ID NO: 1125993 - RNA, 19 nt, Artificial Sequence
  Description of Artificial Sequence: Synthetic oligonucleotide
gcgcuagcagcggcagcug

SEQ ID NO: 1125994 - RNA, 19 nt, Artificial Sequence
  Description of Artificial Sequence: Synthetic oligonucleotide
cacgggcucugguucugau

SEQ ID NO: 1125995 - RNA, 19 nt, Artificial Sequence
  Description of Artificial Sequence: Synthetic oligonucleotide
ccgcugcgguugaagccuc

SEQ ID NO: 1125996 - RNA, 19 nt, Artificial Sequence
  Description of Artificial Sequence: Synthetic oligonucleotide
guagggcggcuggcuguaa

SEQ ID NO: 1125997 - RNA, 19 nt, Artificial Sequence
  Description of Artificial Sequence: Synthetic oligonucleotide
cacccgagcacgggcuacu

SEQ ID NO: 1125998 - RNA, 19 nt, Artificial Sequence
  Description of Artificial Sequence: Synthetic oligonucleotide
gcggccacgggcucugguu

SEQ ID NO: 1125999 - RNA, 19 nt, Artificial Sequence
  Description of Artificial Sequence: Synthetic oligonucleotide
aggggccacggcagcgcua

SEQ ID NO: 1126000 - RNA, 19 nt, Artificial Sequence
  Description of Artificial Sequence: Synthetic oligonucleotide
ccucaucaguuggacagau

SEQ ID NO: 1126001 - RNA, 19 nt, Artificial Sequence
  Description of Artificial Sequence: Synthetic oligonucleotide
gccggccuugcggccuucc

SEQ ID NO: 1126002 - RNA, 19 nt, Artificial Sequence
  Description of Artificial Sequence: Synthetic oligonucleotide
cgguugucguaucgcugga

SEQ ID NO: 1126003 - RNA, 19 nt, Artificial Sequence
  Description of Artificial Sequence: Synthetic oligonucleotide
gcgcuggagccagggaugu

SEQ ID NO: 1126004 - RNA, 19 nt, Artificial Sequence
  Description of Artificial Sequence: Synthetic oligonucleotide
ccucugcccuaaaguuaaa

SEQ ID NO: 1126005 - RNA, 19 nt, Artificial Sequence
  Description of Artificial Sequence: Synthetic oligonucleotide
cgggcuacugugugcuugu

SEQ ID NO: 1126006 - RNA, 19 nt, Artificial Sequence
  Description of Artificial Sequence: Synthetic oligonucleotide
gcugucgacgcaggcccau

SEQ ID NO: 1126007 - RNA, 19 nt, Artificial Sequence
  Description of Artificial Sequence: Synthetic oligonucleotide
cacgggcuacugugugcuu

SEQ ID NO: 1126008 - RNA, 19 nt, Artificial Sequence
  Description of Artificial Sequence: Synthetic oligonucleotide
ccaggcgggccucgguugu

SEQ ID NO: 1126009 - RNA, 19 nt, Artificial Sequence
  Description of Artificial Sequence: Synthetic oligonucleotide
cgguugaagccuccucggu

SEQ ID NO: 1126010 - RNA, 19 nt, Artificial Sequence
  Description of Artificial Sequence: Synthetic oligonucleotide
ccuugguuguagggcggcu

SEQ ID NO: 1126011 - RNA, 19 nt, Artificial Sequence
  Description of Artificial Sequence: Synthetic oligonucleotide
cccgagcacgggcuacugu

SEQ ID NO: 1126012 - RNA, 19 nt, Artificial Sequence
  Description of Artificial Sequence: Synthetic oligonucleotide
cgcugucgacgcaggccca

SEQ ID NO: 1126013 - RNA, 19 nt, Artificial Sequence
  Description of Artificial Sequence: Synthetic oligonucleotide
gggucacggucgccuguuu

SEQ ID NO: 1126014 - RNA, 19 nt, Artificial Sequence
  Description of Artificial Sequence: Synthetic oligonucleotide
ccccagcgguuuugguugu

SEQ ID NO: 1126015 - RNA, 19 nt, Artificial Sequence
  Description of Artificial Sequence: Synthetic oligonucleotide
cgggccucgguugucguau

SEQ ID NO: 1126016 - RNA, 19 nt, Artificial Sequence
  Description of Artificial Sequence: Synthetic oligonucleotide
ccuugcggccuuccucauu

SEQ ID NO: 1126017 - RNA, 19 nt, Artificial Sequence
  Description of Artificial Sequence: Synthetic oligonucleotide
ccggccuugcggccuuccu

SEQ ID NO: 1126018 - RNA, 19 nt, Artificial Sequence
  Description of Artificial Sequence: Synthetic oligonucleotide
cgguugccuccaggcgggc

SEQ ID NO: 1126019 - RNA, 19 nt, Artificial Sequence
  Description of Artificial Sequence: Synthetic oligonucleotide
cccagcgguuuugguugua

SEQ ID NO: 1126020 - RNA, 19 nt, Artificial Sequence
  Description of Artificial Sequence: Synthetic oligonucleotide
ccccaacaucgggcaaagu

SEQ ID NO: 1126021 - RNA, 19 nt, Artificial Sequence
  Description of Artificial Sequence: Synthetic oligonucleotide
aauaguuuaguuaugaugg

SEQ ID NO: 1126022 - RNA, 19 nt, Artificial Sequence
  Description of Artificial Sequence: Synthetic oligonucleotide
uuuauuguaagccugaacc

SEQ ID NO: 1126023 - RNA, 19 nt, Artificial Sequence
  Description of Artificial Sequence: Synthetic oligonucleotide
aaaauucaaacgcugagac

SEQ ID NO: 1126024 - RNA, 19 nt, Artificial Sequence
  Description of Artificial Sequence: Synthetic oligonucleotide
aauguagggcuuuuguugc

SEQ ID NO: 1126025 - RNA, 19 nt, Artificial Sequence
  Description of Artificial Sequence: Synthetic oligonucleotide
  modified_base (4)..(4): a, c, u, g, unknown or other
aacngcaugguguagcugg

SEQ ID NO: 1126026 - RNA, 19 nt, Artificial Sequence
  Description of Artificial Sequence: Synthetic oligonucleotide
cuuagaaccauaaacuagg

SEQ ID NO: 1126027 - RNA, 19 nt, Artificial Sequence
  Description of Artificial Sequence: Synthetic oligonucleotide
cauaauuuccacauaaggc

SEQ ID NO: 1126028 - RNA, 19 nt, Artificial Sequence
  Description of Artificial Sequence: Synthetic oligonucleotide
ugaucuuagaaccauaaac

SEQ ID NO: 1126029 - RNA, 19 nt, Artificial Sequence
  Description of Artificial Sequence: Synthetic oligonucleotide
auaauuuccacauaaggca

SEQ ID NO: 1126030 - RNA, 19 nt, Artificial Sequence
  Description of Artificial Sequence: Synthetic oligonucleotide
auugugggaacccagauag

SEQ ID NO: 1126031 - RNA, 19 nt, Artificial Sequence
  Description of Artificial Sequence: Synthetic oligonucleotide
ugcauaaaguguaacagcc

SEQ ID NO: 1126032 - RNA, 19 nt, Artificial Sequence
  Description of Artificial Sequence: Synthetic oligonucleotide
uaauaguuuaguuaugaug

SEQ ID NO: 1126033 - RNA, 19 nt, Artificial Sequence
  Description of Artificial Sequence: Synthetic oligonucleotide
aauggcacaguguuuauug

SEQ ID NO: 1126034 - RNA, 19 nt, Artificial Sequence
  Description of Artificial Sequence: Synthetic oligonucleotide
aaauucaaacgcugagacc

SEQ ID NO: 1126035 - RNA, 19 nt, Artificial Sequence
  Description of Artificial Sequence: Synthetic oligonucleotide
aagacaaugguguucauaa

SEQ ID NO: 1126036 - RNA, 19 nt, Artificial Sequence
  Description of Artificial Sequence: Synthetic oligonucleotide
agauuaauaguuuaguuau

SEQ ID NO: 1126037 - RNA, 19 nt, Artificial Sequence
  Description of Artificial Sequence: Synthetic oligonucleotide
aauucaacacguucaaaug

SEQ ID NO: 1126038 - RNA, 19 nt, Artificial Sequence
  Description of Artificial Sequence: Synthetic oligonucleotide
ucuuagaaccauaaacuag

SEQ ID NO: 1126039 - RNA, 19 nt, Artificial Sequence
  Description of Artificial Sequence: Synthetic oligonucleotide
ggcaauuucagauuaauag

SEQ ID NO: 1126040 - RNA, 19 nt, Artificial Sequence
  Description of Artificial Sequence: Synthetic oligonucleotide
uucauaaggacagacauca

SEQ ID NO: 1126041 - RNA, 19 nt, Artificial Sequence
  Description of Artificial Sequence: Synthetic oligonucleotide
auagacuggaaacauguuc

SEQ ID NO: 1126042 - RNA, 19 nt, Artificial Sequence
  Description of Artificial Sequence: Synthetic oligonucleotide
auucaacacguucaaaugg

SEQ ID NO: 1126043 - RNA, 19 nt, Artificial Sequence
  Description of Artificial Sequence: Synthetic oligonucleotide
agaggauacaucaaaauuc

SEQ ID NO: 1126044 - RNA, 19 nt, Artificial Sequence
  Description of Artificial Sequence: Synthetic oligonucleotide
uuaagauaggaguaguaca

SEQ ID NO: 1126045 - RNA, 19 nt, Artificial Sequence
  Description of Artificial Sequence: Synthetic oligonucleotide
ugaagucucaauccaacag

SEQ ID NO: 1126046 - RNA, 19 nt, Artificial Sequence
  Description of Artificial Sequence: Synthetic oligonucleotide
caaccuugaucuuagaacc

SEQ ID NO: 1126047 - RNA, 19 nt, Artificial Sequence
  Description of Artificial Sequence: Synthetic oligonucleotide
aagccugaaccacacagac

SEQ ID NO: 1126048 - RNA, 19 nt, Artificial Sequence
  Description of Artificial Sequence: Synthetic oligonucleotide
uaugaugggucacaaacug

SEQ ID NO: 1126049 - RNA, 19 nt, Artificial Sequence
  Description of Artificial Sequence: Synthetic oligonucleotide
uguucauaaggacagacau

SEQ ID NO: 1126050 - RNA, 19 nt, Artificial Sequence
  Description of Artificial Sequence: Synthetic oligonucleotide
uuuauaauuaggucagacu

SEQ ID NO: 1126051 - RNA, 19 nt, Artificial Sequence
  Description of Artificial Sequence: Synthetic oligonucleotide
gaacuacuaauucaacacg

SEQ ID NO: 1126052 - RNA, 19 nt, Artificial Sequence
  Description of Artificial Sequence: Synthetic oligonucleotide
auuuacaugguaugugcac

SEQ ID NO: 1126053 - RNA, 19 nt, Artificial Sequence
  Description of Artificial Sequence: Synthetic oligonucleotide
uucaaauugacaaccuuga

SEQ ID NO: 1126054 - RNA, 19 nt, Artificial Sequence
  Description of Artificial Sequence: Synthetic oligonucleotide
agauuugagagcugaauag

SEQ ID NO: 1126055 - RNA, 19 nt, Artificial Sequence
  Description of Artificial Sequence: Synthetic oligonucleotide
cauaccaucgcucaauagc

SEQ ID NO: 1126056 - RNA, 19 nt, Artificial Sequence
  Description of Artificial Sequence: Synthetic oligonucleotide
aagccuguuugacaguggc

SEQ ID NO: 1126057 - RNA, 19 nt, Artificial Sequence
  Description of Artificial Sequence: Synthetic oligonucleotide
ucuuaucagaaauaauggc

SEQ ID NO: 1126058 - RNA, 19 nt, Artificial Sequence
  Description of Artificial Sequence: Synthetic oligonucleotide
ucugccaaaaguuuaagau

SEQ ID NO: 1126059 - RNA, 19 nt, Artificial Sequence
  Description of Artificial Sequence: Synthetic oligonucleotide
aagaauuccguuaggagag

SEQ ID NO: 1126060 - RNA, 19 nt, Artificial Sequence
  Description of Artificial Sequence: Synthetic oligonucleotide
uuuggaugaagucucaauc

SEQ ID NO: 1126061 - RNA, 19 nt, Artificial Sequence
  Description of Artificial Sequence: Synthetic oligonucleotide
uuaggucagacuuauaaaa

SEQ ID NO: 1126062 - RNA, 19 nt, Artificial Sequence
  Description of Artificial Sequence: Synthetic oligonucleotide
uuuaauuguguuacugucu

SEQ ID NO: 1126063 - RNA, 19 nt, Artificial Sequence
  Description of Artificial Sequence: Synthetic oligonucleotide
uuaagaguguggaaggcug

SEQ ID NO: 1126064 - RNA, 19 nt, Artificial Sequence
  Description of Artificial Sequence: Synthetic oligonucleotide
ucuuagacgccaaagcuga

SEQ ID NO: 1126065 - RNA, 19 nt, Artificial Sequence
  Description of Artificial Sequence: Synthetic oligonucleotide
uguuacauucuucugggcu

SEQ ID NO: 1126066 - RNA, 19 nt, Artificial Sequence
  Description of Artificial Sequence: Synthetic oligonucleotide
ucuaaaugcccacagccca

SEQ ID NO: 1126067 - RNA, 19 nt, Artificial Sequence
  Description of Artificial Sequence: Synthetic oligonucleotide
uuaauuguguuacugucuc

SEQ ID NO: 1126068 - RNA, 19 nt, Artificial Sequence
  Description of Artificial Sequence: Synthetic oligonucleotide
uuuaagauaggaguaguac

SEQ ID NO: 1126069 - RNA, 19 nt, Artificial Sequence
  Description of Artificial Sequence: Synthetic oligonucleotide
ucaacuuuaucagauguug

SEQ ID NO: 1126070 - RNA, 19 nt, Artificial Sequence
  Description of Artificial Sequence: Synthetic oligonucleotide
uguuuaucaggcuugcucu

SEQ ID NO: 1126071 - RNA, 19 nt, Artificial Sequence
  Description of Artificial Sequence: Synthetic oligonucleotide
uucaacacguucaaauggc

SEQ ID NO: 1126072 - RNA, 19 nt, Artificial Sequence
  Description of Artificial Sequence: Synthetic oligonucleotide
uaaauauaguuuccagacc

SEQ ID NO: 1126073 - RNA, 19 nt, Artificial Sequence
  Description of Artificial Sequence: Synthetic oligonucleotide
agauguaagaacuacuaau

SEQ ID NO: 1126074 - RNA, 19 nt, Artificial Sequence
  Description of Artificial Sequence: Synthetic oligonucleotide
uuuccguaagugcaaauca

SEQ ID NO: 1126075 - RNA, 19 nt, Artificial Sequence
  Description of Artificial Sequence: Synthetic oligonucleotide
uuggaugaagucucaaucc

SEQ ID NO: 1126076 - RNA, 19 nt, Artificial Sequence
  Description of Artificial Sequence: Synthetic oligonucleotide
ucuagacugagccacuuca

SEQ ID NO: 1126077 - RNA, 19 nt, Artificial Sequence
  Description of Artificial Sequence: Synthetic oligonucleotide
aauaauggcacaguguuua

SEQ ID NO: 1126078 - RNA, 19 nt, Artificial Sequence
  Description of Artificial Sequence: Synthetic oligonucleotide
guugcauaaaguguaacag

SEQ ID NO: 1126079 - RNA, 19 nt, Artificial Sequence
  Description of Artificial Sequence: Synthetic oligonucleotide
guaagccugaaccacacag

SEQ ID NO: 1126080 - RNA, 19 nt, Artificial Sequence
  Description of Artificial Sequence: Synthetic oligonucleotide
guuaggagaggauacauca

SEQ ID NO: 1126081 - RNA, 19 nt, Artificial Sequence
  Description of Artificial Sequence: Synthetic oligonucleotide
aaacauuguuuguaaguca

SEQ ID NO: 1126082 - RNA, 19 nt, Artificial Sequence
  Description of Artificial Sequence: Synthetic oligonucleotide
uucuuagacgccaaagcug

SEQ ID NO: 1126083 - RNA, 19 nt, Artificial Sequence
  Description of Artificial Sequence: Synthetic oligonucleotide
gauacugaccacugguucc

SEQ ID NO: 1126084 - RNA, 19 nt, Artificial Sequence
  Description of Artificial Sequence: Synthetic oligonucleotide
ugggaacccagauagacug

SEQ ID NO: 1126085 - RNA, 19 nt, Artificial Sequence
  Description of Artificial Sequence: Synthetic oligonucleotide
gagauaggaagccuguuug

SEQ ID NO: 1126086 - RNA, 19 nt, Artificial Sequence
  Description of Artificial Sequence: Synthetic oligonucleotide
uucuauguuuggaugaagu

SEQ ID NO: 1126087 - RNA, 19 nt, Artificial Sequence
  Description of Artificial Sequence: Synthetic oligonucleotide
uuauuguaagccugaacca

SEQ ID NO: 1126088 - RNA, 19 nt, Artificial Sequence
  Description of Artificial Sequence: Synthetic oligonucleotide
acaaaagccgcacagcaca

SEQ ID NO: 1126089 - RNA, 19 nt, Artificial Sequence
  Description of Artificial Sequence: Synthetic oligonucleotide
aguuuaguuaugauggguc

SEQ ID NO: 1126090 - RNA, 19 nt, Artificial Sequence
  Description of Artificial Sequence: Synthetic oligonucleotide
uuuuauaauuaggucagac

SEQ ID NO: 1126091 - RNA, 19 nt, Artificial Sequence
  Description of Artificial Sequence: Synthetic oligonucleotide
  modified_base (7)..(7): a, c, u, g, unknown or other
ucaaacngcaugguguagc

SEQ ID NO: 1126092 - RNA, 19 nt, Artificial Sequence
  Description of Artificial Sequence: Synthetic oligonucleotide
caguggaaagcaaacauug

SEQ ID NO: 1126093 - RNA, 19 nt, Artificial Sequence
  Description of Artificial Sequence: Synthetic oligonucleotide
  modified_base (14)..(14): a, c, u, g, unknown or other
cauccagucaaacngcaug

SEQ ID NO: 1126094 - RNA, 19 nt, Artificial Sequence
  Description of Artificial Sequence: Synthetic oligonucleotide
uacugaauuuacaugguau

SEQ ID NO: 1126095 - RNA, 19 nt, Artificial Sequence
  Description of Artificial Sequence: Synthetic oligonucleotide
auaugcuggauacauccag

SEQ ID NO: 1126096 - RNA, 19 nt, Artificial Sequence
  Description of Artificial Sequence: Synthetic oligonucleotide
aacauguucugcuuugaau

SEQ ID NO: 1126097 - RNA, 19 nt, Artificial Sequence
  Description of Artificial Sequence: Synthetic oligonucleotide
auaaggacagacaucaucu

SEQ ID NO: 1126098 - RNA, 19 nt, Artificial Sequence
  Description of Artificial Sequence: Synthetic oligonucleotide
auaguuuaguuaugauggg

SEQ ID NO: 1126099 - RNA, 19 nt, Artificial Sequence
  Description of Artificial Sequence: Synthetic oligonucleotide
aaagccgcacagcacaugu

SEQ ID NO: 1126100 - RNA, 19 nt, Artificial Sequence
  Description of Artificial Sequence: Synthetic oligonucleotide
cauaaaguguaacagccuc

SEQ ID NO: 1126101 - RNA, 19 nt, Artificial Sequence
  Description of Artificial Sequence: Synthetic oligonucleotide
agcuugguuuauuauguuc

SEQ ID NO: 1126102 - RNA, 19 nt, Artificial Sequence
  Description of Artificial Sequence: Synthetic oligonucleotide
acauguucugcuuugaaua

SEQ ID NO: 1126103 - RNA, 19 nt, Artificial Sequence
  Description of Artificial Sequence: Synthetic oligonucleotide
uauaauuaggucagacuua

SEQ ID NO: 1126104 - RNA, 19 nt, Artificial Sequence
  Description of Artificial Sequence: Synthetic oligonucleotide
cucaauagcucucugaaga

SEQ ID NO: 1126105 - RNA, 19 nt, Artificial Sequence
  Description of Artificial Sequence: Synthetic oligonucleotide
agagucaggaucugauuuc

SEQ ID NO: 1126106 - RNA, 19 nt, Artificial Sequence
  Description of Artificial Sequence: Synthetic oligonucleotide
aagcacuucuugcuugggg

SEQ ID NO: 1126107 - RNA, 19 nt, Artificial Sequence
  Description of Artificial Sequence: Synthetic oligonucleotide
auuuccguaagugcaaauc

SEQ ID NO: 1126108 - RNA, 19 nt, Artificial Sequence
  Description of Artificial Sequence: Synthetic oligonucleotide
gugguuaagaguguggaag

SEQ ID NO: 1126109 - RNA, 19 nt, Artificial Sequence
  Description of Artificial Sequence: Synthetic oligonucleotide
acuugucucaacccaggac

SEQ ID NO: 1126110 - RNA, 19 nt, Artificial Sequence
  Description of Artificial Sequence: Synthetic oligonucleotide
aacuacuaauucaacacgu

SEQ ID NO: 1126111 - RNA, 19 nt, Artificial Sequence
  Description of Artificial Sequence: Synthetic oligonucleotide
uugagagcugaauagcaga

SEQ ID NO: 1126112 - RNA, 19 nt, Artificial Sequence
  Description of Artificial Sequence: Synthetic oligonucleotide
gauuugagagcugaauagc

SEQ ID NO: 1126113 - RNA, 19 nt, Artificial Sequence
  Description of Artificial Sequence: Synthetic oligonucleotide
agucgcuugacaaaagccg

SEQ ID NO: 1126114 - RNA, 19 nt, Artificial Sequence
  Description of Artificial Sequence: Synthetic oligonucleotide
gguuuuauagcguucccag

SEQ ID NO: 1126115 - RNA, 19 nt, Artificial Sequence
  Description of Artificial Sequence: Synthetic oligonucleotide
uucagauuaauaguuuagu

SEQ ID NO: 1126116 - RNA, 19 nt, Artificial Sequence
  Description of Artificial Sequence: Synthetic oligonucleotide
uauuauguucuuugguuaa

SEQ ID NO: 1126117 - RNA, 19 nt, Artificial Sequence
  Description of Artificial Sequence: Synthetic oligonucleotide
uccuucuaaaugcccacag

SEQ ID NO: 1126118 - RNA, 19 nt, Artificial Sequence
  Description of Artificial Sequence: Synthetic oligonucleotide
ugggagauaugcuggauac

SEQ ID NO: 1126119 - RNA, 19 nt, Artificial Sequence
  Description of Artificial Sequence: Synthetic oligonucleotide
cugucucuguucuugacag

SEQ ID NO: 1126120 - RNA, 19 nt, Artificial Sequence
  Description of Artificial Sequence: Synthetic oligonucleotide
aguccuaaagacaucuuuc

SEQ ID NO: 1126121 - RNA, 19 nt, Artificial Sequence
  Description of Artificial Sequence: Synthetic oligonucleotide
ucaacauacgcuucacuuc

SEQ ID NO: 1126122 - RNA, 19 nt, Artificial Sequence
  Description of Artificial Sequence: Synthetic oligonucleotide
uauuggggcauuuuccaga

SEQ ID NO: 1126123 - RNA, 19 nt, Artificial Sequence
  Description of Artificial Sequence: Synthetic oligonucleotide
cauaaggacagacaucauc

SEQ ID NO: 1126124 - RNA, 19 nt, Artificial Sequence
  Description of Artificial Sequence: Synthetic oligonucleotide
acaugcugguucuccauac

SEQ ID NO: 1126125 - RNA, 19 nt, Artificial Sequence
  Description of Artificial Sequence: Synthetic oligonucleotide
ugugcacuaucauacauuu

SEQ ID NO: 1126126 - RNA, 19 nt, Artificial Sequence
  Description of Artificial Sequence: Synthetic oligonucleotide
uauagcguucccaggcucc

SEQ ID NO: 1126127 - RNA, 19 nt, Artificial Sequence
  Description of Artificial Sequence: Synthetic oligonucleotide
uaggagaggauacaucaaa

SEQ ID NO: 1126128 - RNA, 19 nt, Artificial Sequence
  Description of Artificial Sequence: Synthetic oligonucleotide
auuucagauuaauaguuua

SEQ ID NO: 1126129 - RNA, 19 nt, Artificial Sequence
  Description of Artificial Sequence: Synthetic oligonucleotide
uauuguaagccugaaccac

SEQ ID NO: 1126130 - RNA, 19 nt, Artificial Sequence
  Description of Artificial Sequence: Synthetic oligonucleotide
gaucugauuuccguaagug

SEQ ID NO: 1126131 - RNA, 19 nt, Artificial Sequence
  Description of Artificial Sequence: Synthetic oligonucleotide
gguuuauuauguucuuugg

SEQ ID NO: 1126132 - RNA, 19 nt, Artificial Sequence
  Description of Artificial Sequence: Synthetic oligonucleotide
uguguucagugcaaaggca

SEQ ID NO: 1126133 - RNA, 19 nt, Artificial Sequence
  Description of Artificial Sequence: Synthetic oligonucleotide
  modified_base (17)..(17): a, c, u, g, unknown or other
auacauccagucaaacngc

SEQ ID NO: 1126134 - RNA, 19 nt, Artificial Sequence
  Description of Artificial Sequence: Synthetic oligonucleotide
guuuuauagcguucccagg

SEQ ID NO: 1126135 - RNA, 19 nt, Artificial Sequence
  Description of Artificial Sequence: Synthetic oligonucleotide
uuaauaguuuaguuaugau

SEQ ID NO: 1126136 - RNA, 19 nt, Artificial Sequence
  Description of Artificial Sequence: Synthetic oligonucleotide
uguguuacugucucucaac

SEQ ID NO: 1126137 - RNA, 19 nt, Artificial Sequence
  Description of Artificial Sequence: Synthetic oligonucleotide
gguaugugcacuaucauac

SEQ ID NO: 1126138 - RNA, 19 nt, Artificial Sequence
  Description of Artificial Sequence: Synthetic oligonucleotide
aauagcagauggagaugcc

SEQ ID NO: 1126139 - RNA, 19 nt, Artificial Sequence
  Description of Artificial Sequence: Synthetic oligonucleotide
aagucucaauccaacagug

SEQ ID NO: 1126140 - RNA, 19 nt, Artificial Sequence
  Description of Artificial Sequence: Synthetic oligonucleotide
uuaguuaugaugggucaca

SEQ ID NO: 1126141 - RNA, 19 nt, Artificial Sequence
  Description of Artificial Sequence: Synthetic oligonucleotide
acagcuuaauucuucuaga

SEQ ID NO: 1126142 - RNA, 19 nt, Artificial Sequence
  Description of Artificial Sequence: Synthetic oligonucleotide
uaugugcacuaucauacau

SEQ ID NO: 1126143 - RNA, 19 nt, Artificial Sequence
  Description of Artificial Sequence: Synthetic oligonucleotide
uuagaaccauaaacuaggu

SEQ ID NO: 1126144 - RNA, 19 nt, Artificial Sequence
  Description of Artificial Sequence: Synthetic oligonucleotide
caaccacacagcuuaauuc

SEQ ID NO: 1126145 - RNA, 19 nt, Artificial Sequence
  Description of Artificial Sequence: Synthetic oligonucleotide
caucgaagcggcuucuuag

SEQ ID NO: 1126146 - RNA, 19 nt, Artificial Sequence
  Description of Artificial Sequence: Synthetic oligonucleotide
aucuuagaaccauaaacua

SEQ ID NO: 1126147 - RNA, 19 nt, Artificial Sequence
  Description of Artificial Sequence: Synthetic oligonucleotide
ucaacacguucaaauggca

SEQ ID NO: 1126148 - RNA, 19 nt, Artificial Sequence
  Description of Artificial Sequence: Synthetic oligonucleotide
uuacauucuucugggcugg

SEQ ID NO: 1126149 - RNA, 19 nt, Artificial Sequence
  Description of Artificial Sequence: Synthetic oligonucleotide
uuaucaggcuugcucucag

SEQ ID NO: 1126150 - RNA, 19 nt, Artificial Sequence
  Description of Artificial Sequence: Synthetic oligonucleotide
agccgcacagcacauguuc

SEQ ID NO: 1126151 - RNA, 19 nt, Artificial Sequence
  Description of Artificial Sequence: Synthetic oligonucleotide
augcuggauacauccaguc

SEQ ID NO: 1126152 - RNA, 19 nt, Artificial Sequence
  Description of Artificial Sequence: Synthetic oligonucleotide
ugagauaggaagccuguuu

SEQ ID NO: 1126153 - RNA, 19 nt, Artificial Sequence
  Description of Artificial Sequence: Synthetic oligonucleotide
cagcacauguucaggagcc

SEQ ID NO: 1126154 - RNA, 19 nt, Artificial Sequence
  Description of Artificial Sequence: Synthetic oligonucleotide
cacuucagauuuaugccag

SEQ ID NO: 1126155 - RNA, 19 nt, Artificial Sequence
  Description of Artificial Sequence: Synthetic oligonucleotide
cauguucugcuuugaauac

SEQ ID NO: 1126156 - RNA, 19 nt, Artificial Sequence
  Description of Artificial Sequence: Synthetic oligonucleotide
cagucgcuugacaaaagcc

SEQ ID NO: 1126157 - RNA, 19 nt, Artificial Sequence
  Description of Artificial Sequence: Synthetic oligonucleotide
uuccguuaggagaggauac

SEQ ID NO: 1126158 - RNA, 19 nt, Artificial Sequence
  Description of Artificial Sequence: Synthetic oligonucleotide
agauuuaugccaguggaaa

SEQ ID NO: 1126159 - RNA, 19 nt, Artificial Sequence
  Description of Artificial Sequence: Synthetic oligonucleotide
uuuaguuaugaugggucac

SEQ ID NO: 1126160 - RNA, 19 nt, Artificial Sequence
  Description of Artificial Sequence: Synthetic oligonucleotide
uugucucaacccaggaccc

SEQ ID NO: 1126161 - RNA, 19 nt, Artificial Sequence
  Description of Artificial Sequence: Synthetic oligonucleotide
guuuaguuaugauggguca

SEQ ID NO: 1126162 - RNA, 19 nt, Artificial Sequence
  Description of Artificial Sequence: Synthetic oligonucleotide
ucagaaauaauggcacagu

SEQ ID NO: 1126163 - RNA, 19 nt, Artificial Sequence
  Description of Artificial Sequence: Synthetic oligonucleotide
ugaagagaagaauuccguu

SEQ ID NO: 1126164 - RNA, 19 nt, Artificial Sequence
  Description of Artificial Sequence: Synthetic oligonucleotide
aauuucagauuaauaguuu

SEQ ID NO: 1126165 - RNA, 19 nt, Artificial Sequence
  Description of Artificial Sequence: Synthetic oligonucleotide
ugggcaagcacuucuugcu

SEQ ID NO: 1126166 - RNA, 19 nt, Artificial Sequence
  Description of Artificial Sequence: Synthetic oligonucleotide
uugcucgcuucucugaaga

SEQ ID NO: 1126167 - RNA, 19 nt, Artificial Sequence
  Description of Artificial Sequence: Synthetic oligonucleotide
acaugguaugugcacuauc

SEQ ID NO: 1126168 - RNA, 19 nt, Artificial Sequence
  Description of Artificial Sequence: Synthetic oligonucleotide
accauaaacuaggugcuag

SEQ ID NO: 1126169 - RNA, 19 nt, Artificial Sequence
  Description of Artificial Sequence: Synthetic oligonucleotide
uugaucuuagaaccauaaa

SEQ ID NO: 1126170 - RNA, 19 nt, Artificial Sequence
  Description of Artificial Sequence: Synthetic oligonucleotide
uagacgccaaagcugacau

SEQ ID NO: 1126171 - RNA, 19 nt, Artificial Sequence
  Description of Artificial Sequence: Synthetic oligonucleotide
ugaguuucauuggauaaau

SEQ ID NO: 1126172 - RNA, 19 nt, Artificial Sequence
  Description of Artificial Sequence: Synthetic oligonucleotide
cacauaaggcagauuugag

SEQ ID NO: 1126173 - RNA, 19 nt, Artificial Sequence
  Description of Artificial Sequence: Synthetic oligonucleotide
ugcuggauacauccaguca

SEQ ID NO: 1126174 - RNA, 19 nt, Artificial Sequence
  Description of Artificial Sequence: Synthetic oligonucleotide
uggcuguuuaucaggcuug

SEQ ID NO: 1126175 - RNA, 19 nt, Artificial Sequence
  Description of Artificial Sequence: Synthetic oligonucleotide
cagcuuaauucuucuagac

SEQ ID NO: 1126176 - RNA, 19 nt, Artificial Sequence
  Description of Artificial Sequence: Synthetic oligonucleotide
guuuauuguaagccugaac

SEQ ID NO: 1126177 - RNA, 19 nt, Artificial Sequence
  Description of Artificial Sequence: Synthetic oligonucleotide
aaacuguaaaggucuucau

SEQ ID NO: 1126178 - RNA, 19 nt, Artificial Sequence
  Description of Artificial Sequence: Synthetic oligonucleotide
aaauggcacuugucucaac

SEQ ID NO: 1126179 - RNA, 19 nt, Artificial Sequence
  Description of Artificial Sequence: Synthetic oligonucleotide
ucauuggauaaaucugauc

SEQ ID NO: 1126180 - RNA, 19 nt, Artificial Sequence
  Description of Artificial Sequence: Synthetic oligonucleotide
gacgccaaagcugacauaa

SEQ ID NO: 1126181 - RNA, 19 nt, Artificial Sequence
  Description of Artificial Sequence: Synthetic oligonucleotide
cuaaaugcccacagcccag

SEQ ID NO: 1126182 - RNA, 19 nt, Artificial Sequence
  Description of Artificial Sequence: Synthetic oligonucleotide
uuuugcucgcuucucugaa

SEQ ID NO: 1126183 - RNA, 19 nt, Artificial Sequence
  Description of Artificial Sequence: Synthetic oligonucleotide
auaccaucgcucaauagcu

SEQ ID NO: 1126184 - RNA, 19 nt, Artificial Sequence
  Description of Artificial Sequence: Synthetic oligonucleotide
ugguaugugcacuaucaua

SEQ ID NO: 1126185 - RNA, 19 nt, Artificial Sequence
  Description of Artificial Sequence: Synthetic oligonucleotide
aaacuaggugcuagcuugg

SEQ ID NO: 1126186 - RNA, 19 nt, Artificial Sequence
  Description of Artificial Sequence: Synthetic oligonucleotide
cuugaucuuagaaccauaa

SEQ ID NO: 1126187 - RNA, 19 nt, Artificial Sequence
  Description of Artificial Sequence: Synthetic oligonucleotide
uaguuuaguuaugaugggu

SEQ ID NO: 1126188 - RNA, 19 nt, Artificial Sequence
  Description of Artificial Sequence: Synthetic oligonucleotide
auacugaccacugguuccg

SEQ ID NO: 1126189 - RNA, 19 nt, Artificial Sequence
  Description of Artificial Sequence: Synthetic oligonucleotide
auuugagagcugaauagca

SEQ ID NO: 1126190 - RNA, 19 nt, Artificial Sequence
  Description of Artificial Sequence: Synthetic oligonucleotide
accaucgcucaauagcucu

SEQ ID NO: 1126191 - RNA, 19 nt, Artificial Sequence
  Description of Artificial Sequence: Synthetic oligonucleotide
ucucaauccaacagugguu

SEQ ID NO: 1126192 - RNA, 19 nt, Artificial Sequence
  Description of Artificial Sequence: Synthetic oligonucleotide
cuugcuuggggagaggcug

SEQ ID NO: 1126193 - RNA, 19 nt, Artificial Sequence
  Description of Artificial Sequence: Synthetic oligonucleotide
uuugcucgcuucucugaag

SEQ ID NO: 1126194 - RNA, 19 nt, Artificial Sequence
  Description of Artificial Sequence: Synthetic oligonucleotide
agagacucccaagagucag

SEQ ID NO: 1126195 - RNA, 19 nt, Artificial Sequence
  Description of Artificial Sequence: Synthetic oligonucleotide
aguuuaagauaggaguagu

SEQ ID NO: 1126196 - RNA, 19 nt, Artificial Sequence
  Description of Artificial Sequence: Synthetic oligonucleotide
gcuucuuagacgccaaagc

SEQ ID NO: 1126197 - RNA, 19 nt, Artificial Sequence
  Description of Artificial Sequence: Synthetic oligonucleotide
uuccguaagugcaaaucau

SEQ ID NO: 1126198 - RNA, 19 nt, Artificial Sequence
  Description of Artificial Sequence: Synthetic oligonucleotide
auuuugcucgcuucucuga

SEQ ID NO: 1126199 - RNA, 19 nt, Artificial Sequence
  Description of Artificial Sequence: Synthetic oligonucleotide
uugcucucagcucauugaa

SEQ ID NO: 1126200 - RNA, 19 nt, Artificial Sequence
  Description of Artificial Sequence: Synthetic oligonucleotide
uuagacgccaaagcugaca

SEQ ID NO: 1126201 - RNA, 19 nt, Artificial Sequence
  Description of Artificial Sequence: Synthetic oligonucleotide
uugaguuucauuggauaaa

SEQ ID NO: 1126202 - RNA, 19 nt, Artificial Sequence
  Description of Artificial Sequence: Synthetic oligonucleotide
  modified_base (9)..(9): a, c, u, g, unknown or other
agucaaacngcauggugua

SEQ ID NO: 1126203 - RNA, 19 nt, Artificial Sequence
  Description of Artificial Sequence: Synthetic oligonucleotide
caacauugugggaacccag

SEQ ID NO: 1126204 - RNA, 19 nt, Artificial Sequence
  Description of Artificial Sequence: Synthetic oligonucleotide
uuauagcguucccaggcuc

SEQ ID NO: 1126205 - RNA, 19 nt, Artificial Sequence
  Description of Artificial Sequence: Synthetic oligonucleotide
ugcuuguuacauucuucug

SEQ ID NO: 1126206 - RNA, 19 nt, Artificial Sequence
  Description of Artificial Sequence: Synthetic oligonucleotide
aacauugugggaacccaga

SEQ ID NO: 1126207 - RNA, 19 nt, Artificial Sequence
  Description of Artificial Sequence: Synthetic oligonucleotide
uaguacaugcugguucucc

SEQ ID NO: 1126208 - RNA, 19 nt, Artificial Sequence
  Description of Artificial Sequence: Synthetic oligonucleotide
agacaaugguguucauaag

SEQ ID NO: 1126209 - RNA, 19 nt, Artificial Sequence
  Description of Artificial Sequence: Synthetic oligonucleotide
aggaucugauuuccguaag

SEQ ID NO: 1126210 - RNA, 19 nt, Artificial Sequence
  Description of Artificial Sequence: Synthetic oligonucleotide
gagaggauacaucaaaauu

SEQ ID NO: 1126211 - RNA, 19 nt, Artificial Sequence
  Description of Artificial Sequence: Synthetic oligonucleotide
gauguaagaacuacuaauu

SEQ ID NO: 1126212 - RNA, 19 nt, Artificial Sequence
  Description of Artificial Sequence: Synthetic oligonucleotide
uggauaaaucugaucuuuu

SEQ ID NO: 1126213 - RNA, 19 nt, Artificial Sequence
  Description of Artificial Sequence: Synthetic oligonucleotide
uuacaugguaugugcacua

SEQ ID NO: 1126214 - RNA, 19 nt, Artificial Sequence
  Description of Artificial Sequence: Synthetic oligonucleotide
cagauagacuggaaacaug

SEQ ID NO: 1126215 - RNA, 19 nt, Artificial Sequence
  Description of Artificial Sequence: Synthetic oligonucleotide
auacugaauuuacauggua

SEQ ID NO: 1126216 - RNA, 19 nt, Artificial Sequence
  Description of Artificial Sequence: Synthetic oligonucleotide
gagguuuuauagcguuccc

SEQ ID NO: 1126217 - RNA, 19 nt, Artificial Sequence
  Description of Artificial Sequence: Synthetic oligonucleotide
ucucuguucuugacagaca

SEQ ID NO: 1126218 - RNA, 19 nt, Artificial Sequence
  Description of Artificial Sequence: Synthetic oligonucleotide
auuggggcauuuuccagau

SEQ ID NO: 1126219 - RNA, 19 nt, Artificial Sequence
  Description of Artificial Sequence: Synthetic oligonucleotide
ucuucuagacugagccacu

SEQ ID NO: 1126220 - RNA, 19 nt, Artificial Sequence
  Description of Artificial Sequence: Synthetic oligonucleotide
caauccaacagugguuaag

SEQ ID NO: 1126221 - RNA, 19 nt, Artificial Sequence
  Description of Artificial Sequence: Synthetic oligonucleotide
ucgaagcggcuucuuagac

SEQ ID NO: 1126222 - RNA, 19 nt, Artificial Sequence
  Description of Artificial Sequence: Synthetic oligonucleotide
caauuucagauuaauaguu

SEQ ID NO: 1126223 - RNA, 19 nt, Artificial Sequence
  Description of Artificial Sequence: Synthetic oligonucleotide
ucgcuugacaaaagccgca

SEQ ID NO: 1126224 - RNA, 19 nt, Artificial Sequence
  Description of Artificial Sequence: Synthetic oligonucleotide
uggauacugaccacugguu

SEQ ID NO: 1126225 - RNA, 19 nt, Artificial Sequence
  Description of Artificial Sequence: Synthetic oligonucleotide
auuguaagccugaaccaca

SEQ ID NO: 1126226 - RNA, 19 nt, Artificial Sequence
  Description of Artificial Sequence: Synthetic oligonucleotide
ucgcucaauagcucucuga

SEQ ID NO: 1126227 - RNA, 19 nt, Artificial Sequence
  Description of Artificial Sequence: Synthetic oligonucleotide
uccuuacuggggcuuccag

SEQ ID NO: 1126228 - RNA, 19 nt, Artificial Sequence
  Description of Artificial Sequence: Synthetic oligonucleotide
augccaguggaaagcaaac

SEQ ID NO: 1126229 - RNA, 19 nt, Artificial Sequence
  Description of Artificial Sequence: Synthetic oligonucleotide
ugcagucgcuugacaaaag

SEQ ID NO: 1126230 - RNA, 19 nt, Artificial Sequence
  Description of Artificial Sequence: Synthetic oligonucleotide
guuacugucucucaacuuu

SEQ ID NO: 1126231 - RNA, 19 nt, Artificial Sequence
  Description of Artificial Sequence: Synthetic oligonucleotide
aggcaaucccugaagaucu

SEQ ID NO: 1126232 - RNA, 19 nt, Artificial Sequence
  Description of Artificial Sequence: Synthetic oligonucleotide
gucgcuugacaaaagccgc

SEQ ID NO: 1126233 - RNA, 19 nt, Artificial Sequence
  Description of Artificial Sequence: Synthetic oligonucleotide
uguaagccugaaccacaca

SEQ ID NO: 1126234 - RNA, 19 nt, Artificial Sequence
  Description of Artificial Sequence: Synthetic oligonucleotide
agugguuaagaguguggaa

SEQ ID NO: 1126235 - RNA, 19 nt, Artificial Sequence
  Description of Artificial Sequence: Synthetic oligonucleotide
acguucaaauggcacuugu

SEQ ID NO: 1126236 - RNA, 19 nt, Artificial Sequence
  Description of Artificial Sequence: Synthetic oligonucleotide
agucucaauccaacagugg

SEQ ID NO: 1126237 - RNA, 19 nt, Artificial Sequence
  Description of Artificial Sequence: Synthetic oligonucleotide
caggcuccuucuaaaugcc

SEQ ID NO: 1126238 - RNA, 19 nt, Artificial Sequence
  Description of Artificial Sequence: Synthetic oligonucleotide
cuauguuuggaugaagucu

SEQ ID NO: 1126239 - RNA, 19 nt, Artificial Sequence
  Description of Artificial Sequence: Synthetic oligonucleotide
cagauuugagagcugaaua

SEQ ID NO: 1126240 - RNA, 19 nt, Artificial Sequence
  Description of Artificial Sequence: Synthetic oligonucleotide
aauauaguuuccagaccuu

SEQ ID NO: 1126241 - RNA, 19 nt, Artificial Sequence
  Description of Artificial Sequence: Synthetic oligonucleotide
ccagaguccuuauuggggc

SEQ ID NO: 1126242 - RNA, 19 nt, Artificial Sequence
  Description of Artificial Sequence: Synthetic oligonucleotide
agguuuuauagcguuccca

SEQ ID NO: 1126243 - RNA, 19 nt, Artificial Sequence
  Description of Artificial Sequence: Synthetic oligonucleotide
cuucuuagacgccaaagcu

SEQ ID NO: 1126244 - RNA, 19 nt, Artificial Sequence
  Description of Artificial Sequence: Synthetic oligonucleotide
  modified_base (5)..(5): a, c, u, g, unknown or other
aaacngcaugguguagcug

SEQ ID NO: 1126245 - RNA, 19 nt, Artificial Sequence
  Description of Artificial Sequence: Synthetic oligonucleotide
cugccaaaaguuuaagaua

SEQ ID NO: 1126246 - RNA, 19 nt, Artificial Sequence
  Description of Artificial Sequence: Synthetic oligonucleotide
uggugcacccagaacuccu

SEQ ID NO: 1126247 - RNA, 19 nt, Artificial Sequence
  Description of Artificial Sequence: Synthetic oligonucleotide
uguuuauuguaagccugaa

SEQ ID NO: 1126248 - RNA, 19 nt, Artificial Sequence
  Description of Artificial Sequence: Synthetic oligonucleotide
gaccuguuugcaucaguuc

SEQ ID NO: 1126249 - RNA, 19 nt, Artificial Sequence
  Description of Artificial Sequence: Synthetic oligonucleotide
caugcugguucuccauacc

SEQ ID NO: 1126250 - RNA, 19 nt, Artificial Sequence
  Description of Artificial Sequence: Synthetic oligonucleotide
uccauaccaucgcucaaua

SEQ ID NO: 1126251 - RNA, 19 nt, Artificial Sequence
  Description of Artificial Sequence: Synthetic oligonucleotide
aaaagccgcacagcacaug

SEQ ID NO: 1126252 - RNA, 19 nt, Artificial Sequence
  Description of Artificial Sequence: Synthetic oligonucleotide
gaagccuguuugacagugg

SEQ ID NO: 1126253 - RNA, 19 nt, Artificial Sequence
  Description of Artificial Sequence: Synthetic oligonucleotide
auuccguuaggagaggaua

SEQ ID NO: 1126254 - RNA, 19 nt, Artificial Sequence
  Description of Artificial Sequence: Synthetic oligonucleotide
agcccgaucaacauacgcu

SEQ ID NO: 1126255 - RNA, 19 nt, Artificial Sequence
  Description of Artificial Sequence: Synthetic oligonucleotide
aauugacaaccuugaucuu

SEQ ID NO: 1126256 - RNA, 19 nt, Artificial Sequence
  Description of Artificial Sequence: Synthetic oligonucleotide
auagacucucugcaucgaa

SEQ ID NO: 1126257 - RNA, 19 nt, Artificial Sequence
  Description of Artificial Sequence: Synthetic oligonucleotide
aucucuugccagcccgauc

SEQ ID NO: 1126258 - RNA, 19 nt, Artificial Sequence
  Description of Artificial Sequence: Synthetic oligonucleotide
gaaccauaaacuaggugcu

SEQ ID NO: 1126259 - RNA, 19 nt, Artificial Sequence
  Description of Artificial Sequence: Synthetic oligonucleotide
uugcagucgcuugacaaaa

SEQ ID NO: 1126260 - RNA, 19 nt, Artificial Sequence
  Description of Artificial Sequence: Synthetic oligonucleotide
aauuccguuaggagaggau

SEQ ID NO: 1126261 - RNA, 19 nt, Artificial Sequence
  Description of Artificial Sequence: Synthetic oligonucleotide
aaccuugaucuuagaacca

SEQ ID NO: 1126262 - RNA, 19 nt, Artificial Sequence
  Description of Artificial Sequence: Synthetic oligonucleotide
ugcuagcuugguuuauuau

SEQ ID NO: 1126263 - RNA, 19 nt, Artificial Sequence
  Description of Artificial Sequence: Synthetic oligonucleotide
auggcacaguguuuauugu

SEQ ID NO: 1126264 - RNA, 19 nt, Artificial Sequence
  Description of Artificial Sequence: Synthetic oligonucleotide
auauaguuuccagaccuuu

SEQ ID NO: 1126265 - RNA, 19 nt, Artificial Sequence
  Description of Artificial Sequence: Synthetic oligonucleotide
augguaugugcacuaucau

SEQ ID NO: 1126266 - RNA, 19 nt, Artificial Sequence
  Description of Artificial Sequence: Synthetic oligonucleotide
guagggcuuuuguugcuug

SEQ ID NO: 1126267 - RNA, 19 nt, Artificial Sequence
  Description of Artificial Sequence: Synthetic oligonucleotide
acugagauaggaagccugu

SEQ ID NO: 1126268 - RNA, 19 nt, Artificial Sequence
  Description of Artificial Sequence: Synthetic oligonucleotide
ugcucgcuucucugaagag

SEQ ID NO: 1126269 - RNA, 19 nt, Artificial Sequence
  Description of Artificial Sequence: Synthetic oligonucleotide
gguguagcuggucuuugug

SEQ ID NO: 1126270 - RNA, 19 nt, Artificial Sequence
  Description of Artificial Sequence: Synthetic oligonucleotide
auguccaggcugcauaguu

SEQ ID NO: 1126271 - RNA, 19 nt, Artificial Sequence
  Description of Artificial Sequence: Synthetic oligonucleotide
cagcccgaucaacauacgc

SEQ ID NO: 1126272 - RNA, 19 nt, Artificial Sequence
  Description of Artificial Sequence: Synthetic oligonucleotide
gcugagaccuguuugcauc

SEQ ID NO: 1126273 - RNA, 19 nt, Artificial Sequence
  Description of Artificial Sequence: Synthetic oligonucleotide
uguucuugacagacagguu

SEQ ID NO: 1126274 - RNA, 19 nt, Artificial Sequence
  Description of Artificial Sequence: Synthetic oligonucleotide
agaauuccguuaggagagg

SEQ ID NO: 1126275 - RNA, 19 nt, Artificial Sequence
  Description of Artificial Sequence: Synthetic oligonucleotide
guucauaaggacagacauc

SEQ ID NO: 1126276 - RNA, 19 nt, Artificial Sequence
  Description of Artificial Sequence: Synthetic oligonucleotide
cugaagagaagaauuccgu

SEQ ID NO: 1126277 - RNA, 19 nt, Artificial Sequence
  Description of Artificial Sequence: Synthetic oligonucleotide
caucaguucugccaaaagu

SEQ ID NO: 1126278 - RNA, 19 nt, Artificial Sequence
  Description of Artificial Sequence: Synthetic oligonucleotide
uaaaugcccacagcccaga

SEQ ID NO: 1126279 - RNA, 19 nt, Artificial Sequence
  Description of Artificial Sequence: Synthetic oligonucleotide
aucagauguugcugaggca

SEQ ID NO: 1126280 - RNA, 19 nt, Artificial Sequence
  Description of Artificial Sequence: Synthetic oligonucleotide
aguggaaagcaaacauugu

SEQ ID NO: 1126281 - RNA, 19 nt, Artificial Sequence
  Description of Artificial Sequence: Synthetic oligonucleotide
caacauacgcuucacuucu

SEQ ID NO: 1126282 - RNA, 19 nt, Artificial Sequence
  Description of Artificial Sequence: Synthetic oligonucleotide
gguguucauaaggacagac

SEQ ID NO: 1126283 - RNA, 19 nt, Artificial Sequence
  Description of Artificial Sequence: Synthetic oligonucleotide
gcaaacauuguuuguaagu

SEQ ID NO: 1126284 - RNA, 19 nt, Artificial Sequence
  Description of Artificial Sequence: Synthetic oligonucleotide
auuauguucuuugguuaaa

SEQ ID NO: 1126285 - RNA, 19 nt, Artificial Sequence
  Description of Artificial Sequence: Synthetic oligonucleotide
acuccuuacuggggcuucc

SEQ ID NO: 1126286 - RNA, 19 nt, Artificial Sequence
  Description of Artificial Sequence: Synthetic oligonucleotide
ugauuuccguaagugcaaa

SEQ ID NO: 1126287 - RNA, 19 nt, Artificial Sequence
  Description of Artificial Sequence: Synthetic oligonucleotide
uaguuaugaugggucacaa

SEQ ID NO: 1126288 - RNA, 19 nt, Artificial Sequence
  Description of Artificial Sequence: Synthetic oligonucleotide
cuaggugcuagcuugguuu

SEQ ID NO: 1126289 - RNA, 19 nt, Artificial Sequence
  Description of Artificial Sequence: Synthetic oligonucleotide
cagauguaagaacuacuaa

SEQ ID NO: 1126290 - RNA, 19 nt, Artificial Sequence
  Description of Artificial Sequence: Synthetic oligonucleotide
gaguccuaaagacaucuuu

SEQ ID NO: 1126291 - RNA, 19 nt, Artificial Sequence
  Description of Artificial Sequence: Synthetic oligonucleotide
guggaaagcaaacauuguu

SEQ ID NO: 1126292 - RNA, 19 nt, Artificial Sequence
  Description of Artificial Sequence: Synthetic oligonucleotide
gguucuguuccacuccuuc

SEQ ID NO: 1126293 - RNA, 19 nt, Artificial Sequence
  Description of Artificial Sequence: Synthetic oligonucleotide
guguuuauuguaagccuga

SEQ ID NO: 1126294 - RNA, 19 nt, Artificial Sequence
  Description of Artificial Sequence: Synthetic oligonucleotide
ucaauccaacagugguuaa

SEQ ID NO: 1126295 - RNA, 19 nt, Artificial Sequence
  Description of Artificial Sequence: Synthetic oligonucleotide
uaccaucgcucaauagcuc

SEQ ID NO: 1126296 - RNA, 19 nt, Artificial Sequence
  Description of Artificial Sequence: Synthetic oligonucleotide
ucauaaggacagacaucau

SEQ ID NO: 1126297 - RNA, 19 nt, Artificial Sequence
  Description of Artificial Sequence: Synthetic oligonucleotide
uaggugcuagcuugguuua

SEQ ID NO: 1126298 - RNA, 19 nt, Artificial Sequence
  Description of Artificial Sequence: Synthetic oligonucleotide
gcucaucauguccaggcug

SEQ ID NO: 1126299 - RNA, 19 nt, Artificial Sequence
  Description of Artificial Sequence: Synthetic oligonucleotide
auaguucugcauggccauc

SEQ ID NO: 1126300 - RNA, 19 nt, Artificial Sequence
  Description of Artificial Sequence: Synthetic oligonucleotide
aacuaggugcuagcuuggu

SEQ ID NO: 1126301 - RNA, 19 nt, Artificial Sequence
  Description of Artificial Sequence: Synthetic oligonucleotide
gaauuccguuaggagagga

SEQ ID NO: 1126302 - RNA, 19 nt, Artificial Sequence
  Description of Artificial Sequence: Synthetic oligonucleotide
cagauuuaugccaguggaa

SEQ ID NO: 1126303 - RNA, 19 nt, Artificial Sequence
  Description of Artificial Sequence: Synthetic oligonucleotide
aucgcucaauagcucucug

SEQ ID NO: 1126304 - RNA, 19 nt, Artificial Sequence
  Description of Artificial Sequence: Synthetic oligonucleotide
aggagaggauacaucaaaa

SEQ ID NO: 1126305 - RNA, 19 nt, Artificial Sequence
  Description of Artificial Sequence: Synthetic oligonucleotide
acuacuaauucaacacguu

SEQ ID NO: 1126306 - RNA, 19 nt, Artificial Sequence
  Description of Artificial Sequence: Synthetic oligonucleotide
acuaggugcuagcuugguu

SEQ ID NO: 1126307 - RNA, 19 nt, Artificial Sequence
  Description of Artificial Sequence: Synthetic oligonucleotide
ggucacaaacuguaaaggu

SEQ ID NO: 1126308 - RNA, 19 nt, Artificial Sequence
  Description of Artificial Sequence: Synthetic oligonucleotide
cagugguuaagagugugga

SEQ ID NO: 1126309 - RNA, 19 nt, Artificial Sequence
  Description of Artificial Sequence: Synthetic oligonucleotide
gucaggaucugauuuccgu

SEQ ID NO: 1126310 - RNA, 19 nt, Artificial Sequence
  Description of Artificial Sequence: Synthetic oligonucleotide
gaucaacauacgcuucacu

SEQ ID NO: 1126311 - RNA, 19 nt, Artificial Sequence
  Description of Artificial Sequence: Synthetic oligonucleotide
guuuggaugaagucucaau

SEQ ID NO: 1126312 - RNA, 19 nt, Artificial Sequence
  Description of Artificial Sequence: Synthetic oligonucleotide
gaguuucauuggauaaauc

SEQ ID NO: 1126313 - RNA, 19 nt, Artificial Sequence
  Description of Artificial Sequence: Synthetic oligonucleotide
agccaggucagcucaucau

SEQ ID NO: 1126314 - RNA, 19 nt, Artificial Sequence
  Description of Artificial Sequence: Synthetic oligonucleotide
aaccauaaacuaggugcua

SEQ ID NO: 1126315 - RNA, 19 nt, Artificial Sequence
  Description of Artificial Sequence: Synthetic oligonucleotide
gcuugcucucagcucauug

SEQ ID NO: 1126316 - RNA, 19 nt, Artificial Sequence
  Description of Artificial Sequence: Synthetic oligonucleotide
cuuagacgccaaagcugac

SEQ ID NO: 1126317 - RNA, 19 nt, Artificial Sequence
  Description of Artificial Sequence: Synthetic oligonucleotide
gagccaggucagcucauca

SEQ ID NO: 1126318 - RNA, 19 nt, Artificial Sequence
  Description of Artificial Sequence: Synthetic oligonucleotide
gguuccgacagucuucaaa

SEQ ID NO: 1126319 - RNA, 19 nt, Artificial Sequence
  Description of Artificial Sequence: Synthetic oligonucleotide
uaauggcacaguguuuauu

SEQ ID NO: 1126320 - RNA, 19 nt, Artificial Sequence
  Description of Artificial Sequence: Synthetic oligonucleotide
  modified_base (8)..(8): a, c, u, g, unknown or other
gucaaacngcaugguguag

SEQ ID NO: 1126321 - RNA, 19 nt, Artificial Sequence
  Description of Artificial Sequence: Synthetic oligonucleotide
augaugggucacaaacugu

SEQ ID NO: 1126322 - RNA, 19 nt, Artificial Sequence
  Description of Artificial Sequence: Synthetic oligonucleotide
ccagauguaagaacuacua

SEQ ID NO: 1126323 - RNA, 19 nt, Artificial Sequence
  Description of Artificial Sequence: Synthetic oligonucleotide
ggcacuugucucaacccag

SEQ ID NO: 1126324 - RNA, 19 nt, Artificial Sequence
  Description of Artificial Sequence: Synthetic oligonucleotide
uagcuugguuuauuauguu

SEQ ID NO: 1126325 - RNA, 19 nt, Artificial Sequence
  Description of Artificial Sequence: Synthetic oligonucleotide
  modified_base (6)..(6): a, c, u, g, unknown or other
caaacngcaugguguagcu

SEQ ID NO: 1126326 - RNA, 19 nt, Artificial Sequence
  Description of Artificial Sequence: Synthetic oligonucleotide
gacugagccacuucagauu

SEQ ID NO: 1126327 - RNA, 19 nt, Artificial Sequence
  Description of Artificial Sequence: Synthetic oligonucleotide
ugucucaacccaggaccca

SEQ ID NO: 1126328 - RNA, 19 nt, Artificial Sequence
  Description of Artificial Sequence: Synthetic oligonucleotide
aagcggcuucuuagacgcc

SEQ ID NO: 1126329 - RNA, 19 nt, Artificial Sequence
  Description of Artificial Sequence: Synthetic oligonucleotide
agccugcauagacucucug

SEQ ID NO: 1126330 - RNA, 19 nt, Artificial Sequence
  Description of Artificial Sequence: Synthetic oligonucleotide
caucuuucugcaggcagca

SEQ ID NO: 1126331 - RNA, 19 nt, Artificial Sequence
  Description of Artificial Sequence: Synthetic oligonucleotide
caucacuucgcagggccuc

SEQ ID NO: 1126332 - RNA, 19 nt, Artificial Sequence
  Description of Artificial Sequence: Synthetic oligonucleotide
cgaagcggcuucuuagacg

SEQ ID NO: 1126333 - RNA, 19 nt, Artificial Sequence
  Description of Artificial Sequence: Synthetic oligonucleotide
gucucaacccaggacccac

SEQ ID NO: 1126334 - RNA, 19 nt, Artificial Sequence
  Description of Artificial Sequence: Synthetic oligonucleotide
caguggcaauuucagauua

SEQ ID NO: 1126335 - RNA, 19 nt, Artificial Sequence
  Description of Artificial Sequence: Synthetic oligonucleotide
gcugaauagcagauggaga

SEQ ID NO: 1126336 - RNA, 19 nt, Artificial Sequence
  Description of Artificial Sequence: Synthetic oligonucleotide
cagaguccuaaagacaucu

SEQ ID NO: 1126337 - RNA, 19 nt, Artificial Sequence
  Description of Artificial Sequence: Synthetic oligonucleotide
cacacagcuuaauucuucu

SEQ ID NO: 1126338 - RNA, 19 nt, Artificial Sequence
  Description of Artificial Sequence: Synthetic oligonucleotide
cugggagauaugcuggaua

SEQ ID NO: 1126339 - RNA, 19 nt, Artificial Sequence
  Description of Artificial Sequence: Synthetic oligonucleotide
ggagauaugcuggauacau

SEQ ID NO: 1126340 - RNA, 19 nt, Artificial Sequence
  Description of Artificial Sequence: Synthetic oligonucleotide
auagcguucccaggcuccu

SEQ ID NO: 1126341 - RNA, 19 nt, Artificial Sequence
  Description of Artificial Sequence: Synthetic oligonucleotide
ugguguucauaaggacaga

SEQ ID NO: 1126342 - RNA, 19 nt, Artificial Sequence
  Description of Artificial Sequence: Synthetic oligonucleotide
cagauguugcugaggcaga

SEQ ID NO: 1126343 - RNA, 19 nt, Artificial Sequence
  Description of Artificial Sequence: Synthetic oligonucleotide
ccacaucucuucugaagac

SEQ ID NO: 1126344 - RNA, 19 nt, Artificial Sequence
  Description of Artificial Sequence: Synthetic oligonucleotide
gugcuagcuugguuuauua

SEQ ID NO: 1126345 - RNA, 19 nt, Artificial Sequence
  Description of Artificial Sequence: Synthetic oligonucleotide
gauuuccguaagugcaaau

SEQ ID NO: 1126346 - RNA, 19 nt, Artificial Sequence
  Description of Artificial Sequence: Synthetic oligonucleotide
cucagcucauugaaauacu

SEQ ID NO: 1126347 - RNA, 19 nt, Artificial Sequence
  Description of Artificial Sequence: Synthetic oligonucleotide
ccacacagcuuaauucuuc

SEQ ID NO: 1126348 - RNA, 19 nt, Artificial Sequence
  Description of Artificial Sequence: Synthetic oligonucleotide
gggcugcaucuucaaauug

SEQ ID NO: 1126349 - RNA, 19 nt, Artificial Sequence
  Description of Artificial Sequence: Synthetic oligonucleotide
cagaguccuuauuggggca

SEQ ID NO: 1126350 - RNA, 19 nt, Artificial Sequence
  Description of Artificial Sequence: Synthetic oligonucleotide
ccauaccaucgcucaauag

SEQ ID NO: 1126351 - RNA, 19 nt, Artificial Sequence
  Description of Artificial Sequence: Synthetic oligonucleotide
caguccgggacccaggccu

SEQ ID NO: 1126352 - RNA, 19 nt, Artificial Sequence
  Description of Artificial Sequence: Synthetic oligonucleotide
cacguucaaauggcacuug

SEQ ID NO: 1126353 - RNA, 19 nt, Artificial Sequence
  Description of Artificial Sequence: Synthetic oligonucleotide
  modified_base (3)..(3): a, c, u, g, unknown or other
acngcaugguguagcuggu

SEQ ID NO: 1126354 - RNA, 19 nt, Artificial Sequence
  Description of Artificial Sequence: Synthetic oligonucleotide
gggaacccagauagacugg

SEQ ID NO: 1126355 - RNA, 19 nt, Artificial Sequence
  Description of Artificial Sequence: Synthetic oligonucleotide
ggcuguuuaucaggcuugc

SEQ ID NO: 1126356 - RNA, 19 nt, Artificial Sequence
  Description of Artificial Sequence: Synthetic oligonucleotide
ucucugcaucgaagcggcu

SEQ ID NO: 1126357 - RNA, 19 nt, Artificial Sequence
  Description of Artificial Sequence: Synthetic oligonucleotide
cguuaggagaggauacauc

SEQ ID NO: 1126358 - RNA, 19 nt, Artificial Sequence
  Description of Artificial Sequence: Synthetic oligonucleotide
agcaaccacacagcuuaau

SEQ ID NO: 1126359 - RNA, 19 nt, Artificial Sequence
  Description of Artificial Sequence: Synthetic oligonucleotide
aacauacgcuucacuucuu

SEQ ID NO: 1126360 - RNA, 19 nt, Artificial Sequence
  Description of Artificial Sequence: Synthetic oligonucleotide
cauagacucucugcaucga

SEQ ID NO: 1126361 - RNA, 19 nt, Artificial Sequence
  Description of Artificial Sequence: Synthetic oligonucleotide
uccuuccaucaaguuccug

SEQ ID NO: 1126362 - RNA, 19 nt, Artificial Sequence
  Description of Artificial Sequence: Synthetic oligonucleotide
ucacuucgcagggccucug

SEQ ID NO: 1126363 - RNA, 19 nt, Artificial Sequence
  Description of Artificial Sequence: Synthetic oligonucleotide
aggcugcauaguucugcau

SEQ ID NO: 1126364 - RNA, 19 nt, Artificial Sequence
  Description of Artificial Sequence: Synthetic oligonucleotide
gaugcccuugaguuucauu

SEQ ID NO: 1126365 - RNA, 19 nt, Artificial Sequence
  Description of Artificial Sequence: Synthetic oligonucleotide
ccgaucaacauacgcuuca

SEQ ID NO: 1126366 - RNA, 19 nt, Artificial Sequence
  Description of Artificial Sequence: Synthetic oligonucleotide
ggaucugauuuccguaagu

SEQ ID NO: 1126367 - RNA, 19 nt, Artificial Sequence
  Description of Artificial Sequence: Synthetic oligonucleotide
ccuuacuggggcuuccaga

SEQ ID NO: 1126368 - RNA, 19 nt, Artificial Sequence
  Description of Artificial Sequence: Synthetic oligonucleotide
uacugaccacugguuccga

SEQ ID NO: 1126369 - RNA, 19 nt, Artificial Sequence
  Description of Artificial Sequence: Synthetic oligonucleotide
agacgccaaagcugacaua

SEQ ID NO: 1126370 - RNA, 19 nt, Artificial Sequence
  Description of Artificial Sequence: Synthetic oligonucleotide
agaguccuaaagacaucuu

SEQ ID NO: 1126371 - RNA, 19 nt, Artificial Sequence
  Description of Artificial Sequence: Synthetic oligonucleotide
gcaaccacacagcuuaauu

SEQ ID NO: 1126372 - RNA, 19 nt, Artificial Sequence
  Description of Artificial Sequence: Synthetic oligonucleotide
gugggaacccagauagacu

SEQ ID NO: 1126373 - RNA, 19 nt, Artificial Sequence
  Description of Artificial Sequence: Synthetic oligonucleotide
ccaucgcucaauagcucuc

SEQ ID NO: 1126374 - RNA, 19 nt, Artificial Sequence
  Description of Artificial Sequence: Synthetic oligonucleotide
ugcaucgaagcggcuucuu

SEQ ID NO: 1126375 - RNA, 19 nt, Artificial Sequence
  Description of Artificial Sequence: Synthetic oligonucleotide
caaacgcugagaccuguuu

SEQ ID NO: 1126376 - RNA, 19 nt, Artificial Sequence
  Description of Artificial Sequence: Synthetic oligonucleotide
ccagaguccuaaagacauc

SEQ ID NO: 1126377 - RNA, 19 nt, Artificial Sequence
  Description of Artificial Sequence: Synthetic oligonucleotide
cccgaucaacauacgcuuc

SEQ ID NO: 1126378 - RNA, 19 nt, Artificial Sequence
  Description of Artificial Sequence: Synthetic oligonucleotide
  modified_base (2)..(2): a, c, u, g, unknown or other
cngcaugguguagcugguc

SEQ ID NO: 1126379 - RNA, 19 nt, Artificial Sequence
  Description of Artificial Sequence: Synthetic oligonucleotide
cgcacagcacauguucagg

SEQ ID NO: 1126380 - RNA, 19 nt, Artificial Sequence
  Description of Artificial Sequence: Synthetic oligonucleotide
ccagcccgaucaacauacg

SEQ ID NO: 1126381 - RNA, 19 nt, Artificial Sequence
  Description of Artificial Sequence: Synthetic oligonucleotide
gggagauaugcuggauaca

SEQ ID NO: 1126382 - RNA, 19 nt, Artificial Sequence
  Description of Artificial Sequence: Synthetic oligonucleotide
gcaucgaagcggcuucuua

SEQ ID NO: 1126383 - RNA, 19 nt, Artificial Sequence
  Description of Artificial Sequence: Synthetic oligonucleotide
caucgcucaauagcucucu

SEQ ID NO: 1126384 - RNA, 19 nt, Artificial Sequence
  Description of Artificial Sequence: Synthetic oligonucleotide
gcccgaucaacauacgcuu

SEQ ID NO: 1126385 - RNA, 19 nt, Artificial Sequence
  Description of Artificial Sequence: Synthetic oligonucleotide
ugguuccgacagucuucaa

SEQ ID NO: 1126386 - RNA, 19 nt, Artificial Sequence
  Description of Artificial Sequence: Synthetic oligonucleotide
ccguaagugcaaaucauuu

SEQ ID NO: 1126387 - RNA, 19 nt, Artificial Sequence
  Description of Artificial Sequence: Synthetic oligonucleotide
caugguguagcuggucuuu

SEQ ID NO: 1126388 - RNA, 19 nt, Artificial Sequence
  Description of Artificial Sequence: Synthetic oligonucleotide
gccgcacagcacauguuca

SEQ ID NO: 1126389 - RNA, 19 nt, Artificial Sequence
  Description of Artificial Sequence: Synthetic oligonucleotide
acgccaaagcugacauaau

SEQ ID NO: 1126390 - RNA, 19 nt, Artificial Sequence
  Description of Artificial Sequence: Synthetic oligonucleotide
cgcuugacaaaagccgcac

SEQ ID NO: 1126391 - RNA, 19 nt, Artificial Sequence
  Description of Artificial Sequence: Synthetic oligonucleotide
cucugcaucgaagcggcuu

SEQ ID NO: 1126392 - RNA, 19 nt, Artificial Sequence
  Description of Artificial Sequence: Synthetic oligonucleotide
ccagauagacuggaaacau

SEQ ID NO: 1126393 - RNA, 19 nt, Artificial Sequence
  Description of Artificial Sequence: Synthetic oligonucleotide
gcaaucccugaagaucucu

SEQ ID NO: 1126394 - RNA, 19 nt, Artificial Sequence
  Description of Artificial Sequence: Synthetic oligonucleotide
ggcaaucccugaagaucuc

SEQ ID NO: 1126395 - RNA, 19 nt, Artificial Sequence
  Description of Artificial Sequence: Synthetic oligonucleotide
cuucuagacugagccacuu

SEQ ID NO: 1126396 - RNA, 19 nt, Artificial Sequence
  Description of Artificial Sequence: Synthetic oligonucleotide
cccaagagucaggaucuga

SEQ ID NO: 1126397 - RNA, 19 nt, Artificial Sequence
  Description of Artificial Sequence: Synthetic oligonucleotide
ggugcuagcuugguuuauu

SEQ ID NO: 1126398 - RNA, 19 nt, Artificial Sequence
  Description of Artificial Sequence: Synthetic oligonucleotide
cugagauaggaagccuguu

SEQ ID NO: 1126399 - RNA, 19 nt, Artificial Sequence
  Description of Artificial Sequence: Synthetic oligonucleotide
gaguccuuauuggggcauu

SEQ ID NO: 1126400 - RNA, 19 nt, Artificial Sequence
  Description of Artificial Sequence: Synthetic oligonucleotide
cauguccaggcugcauagu

SEQ ID NO: 1126401 - RNA, 19 nt, Artificial Sequence
  Description of Artificial Sequence: Synthetic oligonucleotide
gcaaaucauuuugcucgcu

SEQ ID NO: 1126402 - RNA, 19 nt, Artificial Sequence
  Description of Artificial Sequence: Synthetic oligonucleotide
gcuguuuaucaggcuugcu

SEQ ID NO: 1126403 - RNA, 19 nt, Artificial Sequence
  Description of Artificial Sequence: Synthetic oligonucleotide
gcggcuucuuagacgccaa

SEQ ID NO: 1126404 - RNA, 19 nt, Artificial Sequence
  Description of Artificial Sequence: Synthetic oligonucleotide
ggugcacccagaacuccuu

SEQ ID NO: 1126405 - RNA, 19 nt, Artificial Sequence
  Description of Artificial Sequence: Synthetic oligonucleotide
ccacuccuuccaucaaguu

SEQ ID NO: 1126406 - RNA, 19 nt, Artificial Sequence
  Description of Artificial Sequence: Synthetic oligonucleotide
ggcuugcucucagcucauu

SEQ ID NO: 1126407 - RNA, 19 nt, Artificial Sequence
  Description of Artificial Sequence: Synthetic oligonucleotide
ucuaauaacauaaaggcug

SEQ ID NO: 1126408 - RNA, 19 nt, Artificial Sequence
  Description of Artificial Sequence: Synthetic oligonucleotide
aaaaccaccaaaucaaugg

SEQ ID NO: 1126409 - RNA, 19 nt, Artificial Sequence
  Description of Artificial Sequence: Synthetic oligonucleotide
agagauaagaaauaaccac

SEQ ID NO: 1126410 - RNA, 19 nt, Artificial Sequence
  Description of Artificial Sequence: Synthetic oligonucleotide
agagagauaagaaauaacc

SEQ ID NO: 1126411 - RNA, 19 nt, Artificial Sequence
  Description of Artificial Sequence: Synthetic oligonucleotide
guuaucuggacccauaacc

SEQ ID NO: 1126412 - RNA, 19 nt, Artificial Sequence
  Description of Artificial Sequence: Synthetic oligonucleotide
gagauaagaaauaaccacg

SEQ ID NO: 1126413 - RNA, 19 nt, Artificial Sequence
  Description of Artificial Sequence: Synthetic oligonucleotide
auaaccacgacccuaaagu

SEQ ID NO: 1126414 - RNA, 19 nt, Artificial Sequence
  Description of Artificial Sequence: Synthetic oligonucleotide
cauaacaaucaaaagcggg

SEQ ID NO: 1126415 - RNA, 19 nt, Artificial Sequence
  Description of Artificial Sequence: Synthetic oligonucleotide
aaagcacugggcuacugcg

SEQ ID NO: 1126416 - RNA, 19 nt, Artificial Sequence
  Description of Artificial Sequence: Synthetic oligonucleotide
ccuaaaguaaccuauagag

SEQ ID NO: 1126417 - RNA, 19 nt, Artificial Sequence
  Description of Artificial Sequence: Synthetic oligonucleotide
ugugauagggcacagcuaa

SEQ ID NO: 1126418 - RNA, 19 nt, Artificial Sequence
  Description of Artificial Sequence: Synthetic oligonucleotide
agaguucugaugcacaguc

SEQ ID NO: 1126419 - RNA, 19 nt, Artificial Sequence
  Description of Artificial Sequence: Synthetic oligonucleotide
uuaucuggacccauaaccc

SEQ ID NO: 1126420 - RNA, 19 nt, Artificial Sequence
  Description of Artificial Sequence: Synthetic oligonucleotide
acuagcacguucuugagug

SEQ ID NO: 1126421 - RNA, 19 nt, Artificial Sequence
  Description of Artificial Sequence: Synthetic oligonucleotide
aauaaccacgacccuaaag

SEQ ID NO: 1126422 - RNA, 19 nt, Artificial Sequence
  Description of Artificial Sequence: Synthetic oligonucleotide
ucuuuggacagucugacaa

SEQ ID NO: 1126423 - RNA, 19 nt, Artificial Sequence
  Description of Artificial Sequence: Synthetic oligonucleotide
uuucccaaaggguuguugg

SEQ ID NO: 1126424 - RNA, 19 nt, Artificial Sequence
  Description of Artificial Sequence: Synthetic oligonucleotide
aacaaucaaaagcggguuc

SEQ ID NO: 1126425 - RNA, 19 nt, Artificial Sequence
  Description of Artificial Sequence: Synthetic oligonucleotide
aggaguagaaugaaagucc

SEQ ID NO: 1126426 - RNA, 19 nt, Artificial Sequence
  Description of Artificial Sequence: Synthetic oligonucleotide
gucaccuucauccacgagg

SEQ ID NO: 1126427 - RNA, 19 nt, Artificial Sequence
  Description of Artificial Sequence: Synthetic oligonucleotide
uaaccaaaugccauggugu

SEQ ID NO: 1126428 - RNA, 19 nt, Artificial Sequence
  Description of Artificial Sequence: Synthetic oligonucleotide
gaaugaaaguccccaaucc

SEQ ID NO: 1126429 - RNA, 19 nt, Artificial Sequence
  Description of Artificial Sequence: Synthetic oligonucleotide
uguagggcgggauugaggc

SEQ ID NO: 1126430 - RNA, 19 nt, Artificial Sequence
  Description of Artificial Sequence: Synthetic oligonucleotide
ugauacuccauccugcacu

SEQ ID NO: 1126431 - RNA, 19 nt, Artificial Sequence
  Description of Artificial Sequence: Synthetic oligonucleotide
ucaaaagcggguucuauga

SEQ ID NO: 1126432 - RNA, 19 nt, Artificial Sequence
  Description of Artificial Sequence: Synthetic oligonucleotide
uccaucuuagagaacaccu

SEQ ID NO: 1126433 - RNA, 19 nt, Artificial Sequence
  Description of Artificial Sequence: Synthetic oligonucleotide
aaaagcggguucuaugaug

SEQ ID NO: 1126434 - RNA, 19 nt, Artificial Sequence
  Description of Artificial Sequence: Synthetic oligonucleotide
ucauagaccagccacuggu

SEQ ID NO: 1126435 - RNA, 19 nt, Artificial Sequence
  Description of Artificial Sequence: Synthetic oligonucleotide
ugcaugcccagucacagag

SEQ ID NO: 1126436 - RNA, 19 nt, Artificial Sequence
  Description of Artificial Sequence: Synthetic oligonucleotide
uuccaauugucccuuagga

SEQ ID NO: 1126437 - RNA, 19 nt, Artificial Sequence
  Description of Artificial Sequence: Synthetic oligonucleotide
uucuaugaugaugaccucg

SEQ ID NO: 1126438 - RNA, 19 nt, Artificial Sequence
  Description of Artificial Sequence: Synthetic oligonucleotide
aacaccgggugagugaggc

SEQ ID NO: 1126439 - RNA, 19 nt, Artificial Sequence
  Description of Artificial Sequence: Synthetic oligonucleotide
gacaucauacucuuuggac

SEQ ID NO: 1126440 - RNA, 19 nt, Artificial Sequence
  Description of Artificial Sequence: Synthetic oligonucleotide
agcagcuugccaaagaaac

SEQ ID NO: 1126441 - RNA, 19 nt, Artificial Sequence
  Description of Artificial Sequence: Synthetic oligonucleotide
gcaaugaggaaauagcugc

SEQ ID NO: 1126442 - RNA, 19 nt, Artificial Sequence
  Description of Artificial Sequence: Synthetic oligonucleotide
aaguucacgacaucauacu

SEQ ID NO: 1126443 - RNA, 19 nt, Artificial Sequence
  Description of Artificial Sequence: Synthetic oligonucleotide
gaucauguggucucuguug

SEQ ID NO: 1126444 - RNA, 19 nt, Artificial Sequence
  Description of Artificial Sequence: Synthetic oligonucleotide
uccaauugucccuuaggag

SEQ ID NO: 1126445 - RNA, 19 nt, Artificial Sequence
  Description of Artificial Sequence: Synthetic oligonucleotide
guaaccaaaugccauggug

SEQ ID NO: 1126446 - RNA, 19 nt, Artificial Sequence
  Description of Artificial Sequence: Synthetic oligonucleotide
agagaugcacaggacaucg

SEQ ID NO: 1126447 - RNA, 19 nt, Artificial Sequence
  Description of Artificial Sequence: Synthetic oligonucleotide
aaagcuugcacggcgaagu

SEQ ID NO: 1126448 - RNA, 19 nt, Artificial Sequence
  Description of Artificial Sequence: Synthetic oligonucleotide
aguagaaugaaagucccca

SEQ ID NO: 1126449 - RNA, 19 nt, Artificial Sequence
  Description of Artificial Sequence: Synthetic oligonucleotide
aaaguaaccuauagaggag

SEQ ID NO: 1126450 - RNA, 19 nt, Artificial Sequence
  Description of Artificial Sequence: Synthetic oligonucleotide
uccacgagggccuggaaag

SEQ ID NO: 1126451 - RNA, 19 nt, Artificial Sequence
  Description of Artificial Sequence: Synthetic oligonucleotide
uaaccuauagaggaguaga

SEQ ID NO: 1126452 - RNA, 19 nt, Artificial Sequence
  Description of Artificial Sequence: Synthetic oligonucleotide
ucccguucaaagcacuggg

SEQ ID NO: 1126453 - RNA, 19 nt, Artificial Sequence
  Description of Artificial Sequence: Synthetic oligonucleotide
acaaacacgggccgacccc

SEQ ID NO: 1126454 - RNA, 19 nt, Artificial Sequence
  Description of Artificial Sequence: Synthetic oligonucleotide
cugaaaagcuugcacggcg

SEQ ID NO: 1126455 - RNA, 19 nt, Artificial Sequence
  Description of Artificial Sequence: Synthetic oligonucleotide
uggacagucugacaaacuc

SEQ ID NO: 1126456 - RNA, 19 nt, Artificial Sequence
  Description of Artificial Sequence: Synthetic oligonucleotide
ucauggguucauaacaauc

SEQ ID NO: 1126457 - RNA, 19 nt, Artificial Sequence
  Description of Artificial Sequence: Synthetic oligonucleotide
acaaaacagaagcggaugu

SEQ ID NO: 1126458 - RNA, 19 nt, Artificial Sequence
  Description of Artificial Sequence: Synthetic oligonucleotide
gggaucaagggcuugaggc

SEQ ID NO: 1126459 - RNA, 19 nt, Artificial Sequence
  Description of Artificial Sequence: Synthetic oligonucleotide
aaagcggguucuaugauga

SEQ ID NO: 1126460 - RNA, 19 nt, Artificial Sequence
  Description of Artificial Sequence: Synthetic oligonucleotide
cuuagagaacaccuuuccc

SEQ ID NO: 1126461 - RNA, 19 nt, Artificial Sequence
  Description of Artificial Sequence: Synthetic oligonucleotide
agcuuuugccugcacugcc

SEQ ID NO: 1126462 - RNA, 19 nt, Artificial Sequence
  Description of Artificial Sequence: Synthetic oligonucleotide
cauggguucauaacaauca

SEQ ID NO: 1126463 - RNA, 19 nt, Artificial Sequence
  Description of Artificial Sequence: Synthetic oligonucleotide
gagagauaagaaauaacca

SEQ ID NO: 1126464 - RNA, 19 nt, Artificial Sequence
  Description of Artificial Sequence: Synthetic oligonucleotide
cuauagaggaguagaauga

SEQ ID NO: 1126465 - RNA, 19 nt, Artificial Sequence
  Description of Artificial Sequence: Synthetic oligonucleotide
aagucgggaaagcccuggc

SEQ ID NO: 1126466 - RNA, 19 nt, Artificial Sequence
  Description of Artificial Sequence: Synthetic oligonucleotide
acgacaucauacucuuugg

SEQ ID NO: 1126467 - RNA, 19 nt, Artificial Sequence
  Description of Artificial Sequence: Synthetic oligonucleotide
ugcuagccaguucuguggg

SEQ ID NO: 1126468 - RNA, 19 nt, Artificial Sequence
  Description of Artificial Sequence: Synthetic oligonucleotide
caugccugauacuccaucc

SEQ ID NO: 1126469 - RNA, 19 nt, Artificial Sequence
  Description of Artificial Sequence: Synthetic oligonucleotide
ccuauagaggaguagaaug

SEQ ID NO: 1126470 - RNA, 19 nt, Artificial Sequence
  Description of Artificial Sequence: Synthetic oligonucleotide
aguggguccaacuccuguc

SEQ ID NO: 1126471 - RNA, 19 nt, Artificial Sequence
  Description of Artificial Sequence: Synthetic oligonucleotide
ugaaaagcuugcacggcga

SEQ ID NO: 1126472 - RNA, 19 nt, Artificial Sequence
  Description of Artificial Sequence: Synthetic oligonucleotide
caagaaguaacugcugggc

SEQ ID NO: 1126473 - RNA, 19 nt, Artificial Sequence
  Description of Artificial Sequence: Synthetic oligonucleotide
gucacuagcacguucuuga

SEQ ID NO: 1126474 - RNA, 19 nt, Artificial Sequence
  Description of Artificial Sequence: Synthetic oligonucleotide
gacaucgugcugcugacac

SEQ ID NO: 1126475 - RNA, 19 nt, Artificial Sequence
  Description of Artificial Sequence: Synthetic oligonucleotide
auagaccagccacugguag

SEQ ID NO: 1126476 - RNA, 19 nt, Artificial Sequence
  Description of Artificial Sequence: Synthetic oligonucleotide
cucauccuucacaaaacag

SEQ ID NO: 1126477 - RNA, 19 nt, Artificial Sequence
  Description of Artificial Sequence: Synthetic oligonucleotide
uacaaacacgggccgaccc

SEQ ID NO: 1126478 - RNA, 19 nt, Artificial Sequence
  Description of Artificial Sequence: Synthetic oligonucleotide
ugaggaaauagcugcccug

SEQ ID NO: 1126479 - RNA, 19 nt, Artificial Sequence
  Description of Artificial Sequence: Synthetic oligonucleotide
agucgggaaagcccuggcc

SEQ ID NO: 1126480 - RNA, 19 nt, Artificial Sequence
  Description of Artificial Sequence: Synthetic oligonucleotide
aaguaaccuauagaggagu

SEQ ID NO: 1126481 - RNA, 19 nt, Artificial Sequence
  Description of Artificial Sequence: Synthetic oligonucleotide
gugugaacuugcuagccag

SEQ ID NO: 1126482 - RNA, 19 nt, Artificial Sequence
  Description of Artificial Sequence: Synthetic oligonucleotide
cuaauaacauaaaggcuga

SEQ ID NO: 1126483 - RNA, 19 nt, Artificial Sequence
  Description of Artificial Sequence: Synthetic oligonucleotide
ugucguagggcucauccuc

SEQ ID NO: 1126484 - RNA, 19 nt, Artificial Sequence
  Description of Artificial Sequence: Synthetic oligonucleotide
uggguaaccaaaugccaug

SEQ ID NO: 1126485 - RNA, 19 nt, Artificial Sequence
  Description of Artificial Sequence: Synthetic oligonucleotide
agauaagaaauaaccacga

SEQ ID NO: 1126486 - RNA, 19 nt, Artificial Sequence
  Description of Artificial Sequence: Synthetic oligonucleotide
acccuaaaguaaccuauag

SEQ ID NO: 1126487 - RNA, 19 nt, Artificial Sequence
  Description of Artificial Sequence: Synthetic oligonucleotide
cucgucaccuucauccacg

SEQ ID NO: 1126488 - RNA, 19 nt, Artificial Sequence
  Description of Artificial Sequence: Synthetic oligonucleotide
accacgacccuaaaguaac

SEQ ID NO: 1126489 - RNA, 19 nt, Artificial Sequence
  Description of Artificial Sequence: Synthetic oligonucleotide
cuugguacgaggugugaac

SEQ ID NO: 1126490 - RNA, 19 nt, Artificial Sequence
  Description of Artificial Sequence: Synthetic oligonucleotide
uguaggcuacggaucaugu

SEQ ID NO: 1126491 - RNA, 19 nt, Artificial Sequence
  Description of Artificial Sequence: Synthetic oligonucleotide
ugauagggcacagcuaagc

SEQ ID NO: 1126492 - RNA, 19 nt, Artificial Sequence
  Description of Artificial Sequence: Synthetic oligonucleotide
uguagcucucuuuuccacu

SEQ ID NO: 1126493 - RNA, 19 nt, Artificial Sequence
  Description of Artificial Sequence: Synthetic oligonucleotide
uguuaucuggacccauaac

SEQ ID NO: 1126494 - RNA, 19 nt, Artificial Sequence
  Description of Artificial Sequence: Synthetic oligonucleotide
cuugcuagccaguucugug

SEQ ID NO: 1126495 - RNA, 19 nt, Artificial Sequence
  Description of Artificial Sequence: Synthetic oligonucleotide
ugccugauacuccauccug

SEQ ID NO: 1126496 - RNA, 19 nt, Artificial Sequence
  Description of Artificial Sequence: Synthetic oligonucleotide
gucgggaaagcccuggccc

SEQ ID NO: 1126497 - RNA, 19 nt, Artificial Sequence
  Description of Artificial Sequence: Synthetic oligonucleotide
aaaagcuugcacggcgaag

SEQ ID NO: 1126498 - RNA, 19 nt, Artificial Sequence
  Description of Artificial Sequence: Synthetic oligonucleotide
aggguccguucccacaugc

SEQ ID NO: 1126499 - RNA, 19 nt, Artificial Sequence
  Description of Artificial Sequence: Synthetic oligonucleotide
aaccaaaugccauggugua

SEQ ID NO: 1126500 - RNA, 19 nt, Artificial Sequence
  Description of Artificial Sequence: Synthetic oligonucleotide
uugucccuuaggagcaggg

SEQ ID NO: 1126501 - RNA, 19 nt, Artificial Sequence
  Description of Artificial Sequence: Synthetic oligonucleotide
uucacgacaucauacucuu

SEQ ID NO: 1126502 - RNA, 19 nt, Artificial Sequence
  Description of Artificial Sequence: Synthetic oligonucleotide
gggaaagauugccaaaacc

SEQ ID NO: 1126503 - RNA, 19 nt, Artificial Sequence
  Description of Artificial Sequence: Synthetic oligonucleotide
uggguucauaacaaucaaa

SEQ ID NO: 1126504 - RNA, 19 nt, Artificial Sequence
  Description of Artificial Sequence: Synthetic oligonucleotide
gguucuaugaugaugaccu

SEQ ID NO: 1126505 - RNA, 19 nt, Artificial Sequence
  Description of Artificial Sequence: Synthetic oligonucleotide
aacccagcccaccuuccag

SEQ ID NO: 1126506 - RNA, 19 nt, Artificial Sequence
  Description of Artificial Sequence: Synthetic oligonucleotide
ucccuuaggagcagggcac

SEQ ID NO: 1126507 - RNA, 19 nt, Artificial Sequence
  Description of Artificial Sequence: Synthetic oligonucleotide
augaggcugacugaagaag

SEQ ID NO: 1126508 - RNA, 19 nt, Artificial Sequence
  Description of Artificial Sequence: Synthetic oligonucleotide
gcaagaaguaacugcuggg

SEQ ID NO: 1126509 - RNA, 19 nt, Artificial Sequence
  Description of Artificial Sequence: Synthetic oligonucleotide
cacccagggguugugaucg

SEQ ID NO: 1126510 - RNA, 19 nt, Artificial Sequence
  Description of Artificial Sequence: Synthetic oligonucleotide
ugcacggcgaagucuggag

SEQ ID NO: 1126511 - RNA, 19 nt, Artificial Sequence
  Description of Artificial Sequence: Synthetic oligonucleotide
aggacaucgugcugcugac

SEQ ID NO: 1126512 - RNA, 19 nt, Artificial Sequence
  Description of Artificial Sequence: Synthetic oligonucleotide
uccguucccacaugccagg

SEQ ID NO: 1126513 - RNA, 19 nt, Artificial Sequence
  Description of Artificial Sequence: Synthetic oligonucleotide
gccaaagaaacuugccagg

SEQ ID NO: 1126514 - RNA, 19 nt, Artificial Sequence
  Description of Artificial Sequence: Synthetic oligonucleotide
uggugcccgucauagacca

SEQ ID NO: 1126515 - RNA, 19 nt, Artificial Sequence
  Description of Artificial Sequence: Synthetic oligonucleotide
cgaggugugaacuugcuag

SEQ ID NO: 1126516 - RNA, 19 nt, Artificial Sequence
  Description of Artificial Sequence: Synthetic oligonucleotide
agggguugugaucgauccc

SEQ ID NO: 1126517 - RNA, 19 nt, Artificial Sequence
  Description of Artificial Sequence: Synthetic oligonucleotide
gaagucgggaaagcccugg

SEQ ID NO: 1126518 - RNA, 19 nt, Artificial Sequence
  Description of Artificial Sequence: Synthetic oligonucleotide
uggaugcaugcccagucac

SEQ ID NO: 1126519 - RNA, 19 nt, Artificial Sequence
  Description of Artificial Sequence: Synthetic oligonucleotide
cauaacccagcccaccuuc

SEQ ID NO: 1126520 - RNA, 19 nt, Artificial Sequence
  Description of Artificial Sequence: Synthetic oligonucleotide
caaacaccgggugagugag

SEQ ID NO: 1126521 - RNA, 19 nt, Artificial Sequence
  Description of Artificial Sequence: Synthetic oligonucleotide
uaauaacauaaaggcugag

SEQ ID NO: 1126522 - RNA, 19 nt, Artificial Sequence
  Description of Artificial Sequence: Synthetic oligonucleotide
auacaaacacgggccgacc

SEQ ID NO: 1126523 - RNA, 19 nt, Artificial Sequence
  Description of Artificial Sequence: Synthetic oligonucleotide
caauugucccuuaggagca

SEQ ID NO: 1126524 - RNA, 19 nt, Artificial Sequence
  Description of Artificial Sequence: Synthetic oligonucleotide
ucacuagcacguucuugag

SEQ ID NO: 1126525 - RNA, 19 nt, Artificial Sequence
  Description of Artificial Sequence: Synthetic oligonucleotide
ugagagucuggugcaaaca

SEQ ID NO: 1126526 - RNA, 19 nt, Artificial Sequence
  Description of Artificial Sequence: Synthetic oligonucleotide
cuacggaucauguggucuc

SEQ ID NO: 1126527 - RNA, 19 nt, Artificial Sequence
  Description of Artificial Sequence: Synthetic oligonucleotide
ugugaacuugcuagccagu

SEQ ID NO: 1126528 - RNA, 19 nt, Artificial Sequence
  Description of Artificial Sequence: Synthetic oligonucleotide
uguucccguucaaagcacu

SEQ ID NO: 1126529 - RNA, 19 nt, Artificial Sequence
  Description of Artificial Sequence: Synthetic oligonucleotide
auguuaucuggacccauaa

SEQ ID NO: 1126530 - RNA, 19 nt, Artificial Sequence
  Description of Artificial Sequence: Synthetic oligonucleotide
accgagauggcugcugcac

SEQ ID NO: 1126531 - RNA, 19 nt, Artificial Sequence
  Description of Artificial Sequence: Synthetic oligonucleotide
uaaccacgacccuaaagua

SEQ ID NO: 1126532 - RNA, 19 nt, Artificial Sequence
  Description of Artificial Sequence: Synthetic oligonucleotide
accaccaaaucaauggccu

SEQ ID NO: 1126533 - RNA, 19 nt, Artificial Sequence
  Description of Artificial Sequence: Synthetic oligonucleotide
uugagcugcauggccuucg

SEQ ID NO: 1126534 - RNA, 19 nt, Artificial Sequence
  Description of Artificial Sequence: Synthetic oligonucleotide
uuggacagucugacaaacu

SEQ ID NO: 1126535 - RNA, 19 nt, Artificial Sequence
  Description of Artificial Sequence: Synthetic oligonucleotide
ggaucaagggcuugaggcc

SEQ ID NO: 1126536 - RNA, 19 nt, Artificial Sequence
  Description of Artificial Sequence: Synthetic oligonucleotide
uugguacgaggugugaacu

SEQ ID NO: 1126537 - RNA, 19 nt, Artificial Sequence
  Description of Artificial Sequence: Synthetic oligonucleotide
uguauuccaauugucccuu

SEQ ID NO: 1126538 - RNA, 19 nt, Artificial Sequence
  Description of Artificial Sequence: Synthetic oligonucleotide
acugacuguaggcuacgga

SEQ ID NO: 1126539 - RNA, 19 nt, Artificial Sequence
  Description of Artificial Sequence: Synthetic oligonucleotide
auggguucauaacaaucaa

SEQ ID NO: 1126540 - RNA, 19 nt, Artificial Sequence
  Description of Artificial Sequence: Synthetic oligonucleotide
gaugcacaguccgaaggug

SEQ ID NO: 1126541 - RNA, 19 nt, Artificial Sequence
  Description of Artificial Sequence: Synthetic oligonucleotide
ggaguagaaugaaaguccc

SEQ ID NO: 1126542 - RNA, 19 nt, Artificial Sequence
  Description of Artificial Sequence: Synthetic oligonucleotide
agucugagaugucugcaau

SEQ ID NO: 1126543 - RNA, 19 nt, Artificial Sequence
  Description of Artificial Sequence: Synthetic oligonucleotide
auaacccagcccaccuucc

SEQ ID NO: 1126544 - RNA, 19 nt, Artificial Sequence
  Description of Artificial Sequence: Synthetic oligonucleotide
agggcuugaggccuacuga

SEQ ID NO: 1126545 - RNA, 19 nt, Artificial Sequence
  Description of Artificial Sequence: Synthetic oligonucleotide
uguuggguguguugaggac

SEQ ID NO: 1126546 - RNA, 19 nt, Artificial Sequence
  Description of Artificial Sequence: Synthetic oligonucleotide
cuagcacguucuugagugg

SEQ ID NO: 1126547 - RNA, 19 nt, Artificial Sequence
  Description of Artificial Sequence: Synthetic oligonucleotide
ugaggcgucucagggaugu

SEQ ID NO: 1126548 - RNA, 19 nt, Artificial Sequence
  Description of Artificial Sequence: Synthetic oligonucleotide
guccgaaggugcuucauga

SEQ ID NO: 1126549 - RNA, 19 nt, Artificial Sequence
  Description of Artificial Sequence: Synthetic oligonucleotide
guaggcuacggaucaugug

SEQ ID NO: 1126550 - RNA, 19 nt, Artificial Sequence
  Description of Artificial Sequence: Synthetic oligonucleotide
aaccacgacccuaaaguaa

SEQ ID NO: 1126551 - RNA, 19 nt, Artificial Sequence
  Description of Artificial Sequence: Synthetic oligonucleotide
aaccuauagaggaguagaa

SEQ ID NO: 1126552 - RNA, 19 nt, Artificial Sequence
  Description of Artificial Sequence: Synthetic oligonucleotide
gaguagaaugaaagucccc

SEQ ID NO: 1126553 - RNA, 19 nt, Artificial Sequence
  Description of Artificial Sequence: Synthetic oligonucleotide
aggugagaagucgggaaag

SEQ ID NO: 1126554 - RNA, 19 nt, Artificial Sequence
  Description of Artificial Sequence: Synthetic oligonucleotide
cuccaucuuagagaacacc

SEQ ID NO: 1126555 - RNA, 19 nt, Artificial Sequence
  Description of Artificial Sequence: Synthetic oligonucleotide
aaauaaccacgacccuaaa

SEQ ID NO: 1126556 - RNA, 19 nt, Artificial Sequence
  Description of Artificial Sequence: Synthetic oligonucleotide
ugcacaggacaucgugcug

SEQ ID NO: 1126557 - RNA, 19 nt, Artificial Sequence
  Description of Artificial Sequence: Synthetic oligonucleotide
uacgaggugugaacuugcu

SEQ ID NO: 1126558 - RNA, 19 nt, Artificial Sequence
  Description of Artificial Sequence: Synthetic oligonucleotide
acccauaacccagcccacc

SEQ ID NO: 1126559 - RNA, 19 nt, Artificial Sequence
  Description of Artificial Sequence: Synthetic oligonucleotide
ucuuugucaguggugggua

SEQ ID NO: 1126560 - RNA, 19 nt, Artificial Sequence
  Description of Artificial Sequence: Synthetic oligonucleotide
gcuauuucugugauagggc

SEQ ID NO: 1126561 - RNA, 19 nt, Artificial Sequence
  Description of Artificial Sequence: Synthetic oligonucleotide
ucgagccugcagcuguuug

SEQ ID NO: 1126562 - RNA, 19 nt, Artificial Sequence
  Description of Artificial Sequence: Synthetic oligonucleotide
ucccaaaggguuguugggu

SEQ ID NO: 1126563 - RNA, 19 nt, Artificial Sequence
  Description of Artificial Sequence: Synthetic oligonucleotide
uggguccaacuccuguccc

SEQ ID NO: 1126564 - RNA, 19 nt, Artificial Sequence
  Description of Artificial Sequence: Synthetic oligonucleotide
uguguagggcgggauugag

SEQ ID NO: 1126565 - RNA, 19 nt, Artificial Sequence
  Description of Artificial Sequence: Synthetic oligonucleotide
gaucauccacuuggcaaag

SEQ ID NO: 1126566 - RNA, 19 nt, Artificial Sequence
  Description of Artificial Sequence: Synthetic oligonucleotide
augccugauacuccauccu

SEQ ID NO: 1126567 - RNA, 19 nt, Artificial Sequence
  Description of Artificial Sequence: Synthetic oligonucleotide
gcuugaggccuacugacug

SEQ ID NO: 1126568 - RNA, 19 nt, Artificial Sequence
  Description of Artificial Sequence: Synthetic oligonucleotide
agcggguucuaugaugaug

SEQ ID NO: 1126569 - RNA, 19 nt, Artificial Sequence
  Description of Artificial Sequence: Synthetic oligonucleotide
cuccauccugcacuguccc

SEQ ID NO: 1126570 - RNA, 19 nt, Artificial Sequence
  Description of Artificial Sequence: Synthetic oligonucleotide
ugcccgucauagaccagcc

SEQ ID NO: 1126571 - RNA, 19 nt, Artificial Sequence
  Description of Artificial Sequence: Synthetic oligonucleotide
cugcaagaaguaacugcug

SEQ ID NO: 1126572 - RNA, 19 nt, Artificial Sequence
  Description of Artificial Sequence: Synthetic oligonucleotide
cuuaggagcagggcacggc

SEQ ID NO: 1126573 - RNA, 19 nt, Artificial Sequence
  Description of Artificial Sequence: Synthetic oligonucleotide
ggcaaagcaucugucguag

SEQ ID NO: 1126574 - RNA, 19 nt, Artificial Sequence
  Description of Artificial Sequence: Synthetic oligonucleotide
aagcggauguaguggucaa

SEQ ID NO: 1126575 - RNA, 19 nt, Artificial Sequence
  Description of Artificial Sequence: Synthetic oligonucleotide
accuauagaggaguagaau

SEQ ID NO: 1126576 - RNA, 19 nt, Artificial Sequence
  Description of Artificial Sequence: Synthetic oligonucleotide
cuucgggagcugcaagaag

SEQ ID NO: 1126577 - RNA, 19 nt, Artificial Sequence
  Description of Artificial Sequence: Synthetic oligonucleotide
gucccaggcagagagauaa

SEQ ID NO: 1126578 - RNA, 19 nt, Artificial Sequence
  Description of Artificial Sequence: Synthetic oligonucleotide
acgacccuaaaguaaccua

SEQ ID NO: 1126579 - RNA, 19 nt, Artificial Sequence
  Description of Artificial Sequence: Synthetic oligonucleotide
gguacgaggugugaacuug

SEQ ID NO: 1126580 - RNA, 19 nt, Artificial Sequence
  Description of Artificial Sequence: Synthetic oligonucleotide
ggacagucugacaaacucc

SEQ ID NO: 1126581 - RNA, 19 nt, Artificial Sequence
  Description of Artificial Sequence: Synthetic oligonucleotide
guagggcgggauugaggcg

SEQ ID NO: 1126582 - RNA, 19 nt, Artificial Sequence
  Description of Artificial Sequence: Synthetic oligonucleotide
cuguucccguucaaagcac

SEQ ID NO: 1126583 - RNA, 19 nt, Artificial Sequence
  Description of Artificial Sequence: Synthetic oligonucleotide
ugggacaguggaagacaga

SEQ ID NO: 1126584 - RNA, 19 nt, Artificial Sequence
  Description of Artificial Sequence: Synthetic oligonucleotide
cugauacuccauccugcac

SEQ ID NO: 1126585 - RNA, 19 nt, Artificial Sequence
  Description of Artificial Sequence: Synthetic oligonucleotide
cccauucagccuucgagcc

SEQ ID NO: 1126586 - RNA, 19 nt, Artificial Sequence
  Description of Artificial Sequence: Synthetic oligonucleotide
cccgucauagaccagccac

SEQ ID NO: 1126587 - RNA, 19 nt, Artificial Sequence
  Description of Artificial Sequence: Synthetic oligonucleotide
ugaguggguccaacuccug

SEQ ID NO: 1126588 - RNA, 19 nt, Artificial Sequence
  Description of Artificial Sequence: Synthetic oligonucleotide
aggugcaccgagauggcug

SEQ ID NO: 1126589 - RNA, 19 nt, Artificial Sequence
  Description of Artificial Sequence: Synthetic oligonucleotide
accaaaucaauggccuccu

SEQ ID NO: 1126590 - RNA, 19 nt, Artificial Sequence
  Description of Artificial Sequence: Synthetic oligonucleotide
ggcuacugcggccuggccc

SEQ ID NO: 1126591 - RNA, 19 nt, Artificial Sequence
  Description of Artificial Sequence: Synthetic oligonucleotide
ccuacugacuguaggcuac

SEQ ID NO: 1126592 - RNA, 19 nt, Artificial Sequence
  Description of Artificial Sequence: Synthetic oligonucleotide
cuacugacuguaggcuacg

SEQ ID NO: 1126593 - RNA, 19 nt, Artificial Sequence
  Description of Artificial Sequence: Synthetic oligonucleotide
cuugcacggcgaagucugg

SEQ ID NO: 1126594 - RNA, 19 nt, Artificial Sequence
  Description of Artificial Sequence: Synthetic oligonucleotide
gauguuaucuggacccaua

SEQ ID NO: 1126595 - RNA, 19 nt, Artificial Sequence
  Description of Artificial Sequence: Synthetic oligonucleotide
aacuugcuagccaguucug

SEQ ID NO: 1126596 - RNA, 19 nt, Artificial Sequence
  Description of Artificial Sequence: Synthetic oligonucleotide
acuugcuagccaguucugu

SEQ ID NO: 1126597 - RNA, 19 nt, Artificial Sequence
  Description of Artificial Sequence: Synthetic oligonucleotide
guacgaggugugaacuugc

SEQ ID NO: 1126598 - RNA, 19 nt, Artificial Sequence
  Description of Artificial Sequence: Synthetic oligonucleotide
gaugugcuggugcccguca

SEQ ID NO: 1126599 - RNA, 19 nt, Artificial Sequence
  Description of Artificial Sequence: Synthetic oligonucleotide
cuuuggacagucugacaaa

SEQ ID NO: 1126600 - RNA, 19 nt, Artificial Sequence
  Description of Artificial Sequence: Synthetic oligonucleotide
ugauguuaucuggacccau

SEQ ID NO: 1126601 - RNA, 19 nt, Artificial Sequence
  Description of Artificial Sequence: Synthetic oligonucleotide
acguucuugagugggucca

SEQ ID NO: 1126602 - RNA, 19 nt, Artificial Sequence
  Description of Artificial Sequence: Synthetic oligonucleotide
ggguucuaugaugaugacc

SEQ ID NO: 1126603 - RNA, 19 nt, Artificial Sequence
  Description of Artificial Sequence: Synthetic oligonucleotide
gcacaggacaucgugcugc

SEQ ID NO: 1126604 - RNA, 19 nt, Artificial Sequence
  Description of Artificial Sequence: Synthetic oligonucleotide
gcggguucuaugaugauga

SEQ ID NO: 1126605 - RNA, 19 nt, Artificial Sequence
  Description of Artificial Sequence: Synthetic oligonucleotide
augauguuaucuggaccca

SEQ ID NO: 1126606 - RNA, 19 nt, Artificial Sequence
  Description of Artificial Sequence: Synthetic oligonucleotide
gcuugcacggcgaagucug

SEQ ID NO: 1126607 - RNA, 19 nt, Artificial Sequence
  Description of Artificial Sequence: Synthetic oligonucleotide
caccgggugagugaggcuc

SEQ ID NO: 1126608 - RNA, 19 nt, Artificial Sequence
  Description of Artificial Sequence: Synthetic oligonucleotide
cacaguccgaaggugcuuc

SEQ ID NO: 1126609 - RNA, 19 nt, Artificial Sequence
  Description of Artificial Sequence: Synthetic oligonucleotide
gggagcugcaagaaguaac

SEQ ID NO: 1126610 - RNA, 19 nt, Artificial Sequence
  Description of Artificial Sequence: Synthetic oligonucleotide
gguccguucccacaugcca

SEQ ID NO: 1126611 - RNA, 19 nt, Artificial Sequence
  Description of Artificial Sequence: Synthetic oligonucleotide
ugguacgaggugugaacuu

SEQ ID NO: 1126612 - RNA, 19 nt, Artificial Sequence
  Description of Artificial Sequence: Synthetic oligonucleotide
ugccagucauugcuguauu

SEQ ID NO: 1126613 - RNA, 19 nt, Artificial Sequence
  Description of Artificial Sequence: Synthetic oligonucleotide
ugcugaugugcuggugccc

SEQ ID NO: 1126614 - RNA, 19 nt, Artificial Sequence
  Description of Artificial Sequence: Synthetic oligonucleotide
augaugaccucgucaccuu

SEQ ID NO: 1126615 - RNA, 19 nt, Artificial Sequence
  Description of Artificial Sequence: Synthetic oligonucleotide
gggguugugaucgauccca

SEQ ID NO: 1126616 - RNA, 19 nt, Artificial Sequence
  Description of Artificial Sequence: Synthetic oligonucleotide
uugaggcgucucagggaug

SEQ ID NO: 1126617 - RNA, 19 nt, Artificial Sequence
  Description of Artificial Sequence: Synthetic oligonucleotide
ggggaaagauugccaaaac

SEQ ID NO: 1126618 - RNA, 19 nt, Artificial Sequence
  Description of Artificial Sequence: Synthetic oligonucleotide
guucccguucaaagcacug

SEQ ID NO: 1126619 - RNA, 19 nt, Artificial Sequence
  Description of Artificial Sequence: Synthetic oligonucleotide
acgaggugugaacuugcua

SEQ ID NO: 1126620 - RNA, 19 nt, Artificial Sequence
  Description of Artificial Sequence: Synthetic oligonucleotide
acaguccgaaggugcuuca

SEQ ID NO: 1126621 - RNA, 19 nt, Artificial Sequence
  Description of Artificial Sequence: Synthetic oligonucleotide
gagcugggcccuccagugc

SEQ ID NO: 1126622 - RNA, 19 nt, Artificial Sequence
  Description of Artificial Sequence: Synthetic oligonucleotide
ugccgauggucaggguccg

SEQ ID NO: 1126623 - RNA, 19 nt, Artificial Sequence
  Description of Artificial Sequence: Synthetic oligonucleotide
cuggaugcaugcccaguca

SEQ ID NO: 1126624 - RNA, 19 nt, Artificial Sequence
  Description of Artificial Sequence: Synthetic oligonucleotide
uccuuccuggaugcaugcc

SEQ ID NO: 1126625 - RNA, 19 nt, Artificial Sequence
  Description of Artificial Sequence: Synthetic oligonucleotide
uugcacggcgaagucugga

SEQ ID NO: 1126626 - RNA, 19 nt, Artificial Sequence
  Description of Artificial Sequence: Synthetic oligonucleotide
aagcggguucuaugaugau

SEQ ID NO: 1126627 - RNA, 19 nt, Artificial Sequence
  Description of Artificial Sequence: Synthetic oligonucleotide
gugauagggcacagcuaag

SEQ ID NO: 1126628 - RNA, 19 nt, Artificial Sequence
  Description of Artificial Sequence: Synthetic oligonucleotide
gcaaagcaucugucguagg

SEQ ID NO: 1126629 - RNA, 19 nt, Artificial Sequence
  Description of Artificial Sequence: Synthetic oligonucleotide
gacccuaaaguaaccuaua

SEQ ID NO: 1126630 - RNA, 19 nt, Artificial Sequence
  Description of Artificial Sequence: Synthetic oligonucleotide
cauagaccagccacuggua

SEQ ID NO: 1126631 - RNA, 19 nt, Artificial Sequence
  Description of Artificial Sequence: Synthetic oligonucleotide
cccuaaaguaaccuauaga

SEQ ID NO: 1126632 - RNA, 19 nt, Artificial Sequence
  Description of Artificial Sequence: Synthetic oligonucleotide
aggcuacggaucauguggu

SEQ ID NO: 1126633 - RNA, 19 nt, Artificial Sequence
  Description of Artificial Sequence: Synthetic oligonucleotide
ucguagggcucauccucaa

SEQ ID NO: 1126634 - RNA, 19 nt, Artificial Sequence
  Description of Artificial Sequence: Synthetic oligonucleotide
gccugauacuccauccugc

SEQ ID NO: 1126635 - RNA, 19 nt, Artificial Sequence
  Description of Artificial Sequence: Synthetic oligonucleotide
gaguggguccaacuccugu

SEQ ID NO: 1126636 - RNA, 19 nt, Artificial Sequence
  Description of Artificial Sequence: Synthetic oligonucleotide
aucauacucuuuggacagu

SEQ ID NO: 1126637 - RNA, 19 nt, Artificial Sequence
  Description of Artificial Sequence: Synthetic oligonucleotide
ucgaucccauucagccuuc

SEQ ID NO: 1126638 - RNA, 19 nt, Artificial Sequence
  Description of Artificial Sequence: Synthetic oligonucleotide
gucguagggcucauccuca

SEQ ID NO: 1126639 - RNA, 19 nt, Artificial Sequence
  Description of Artificial Sequence: Synthetic oligonucleotide
cccguucaaagcacugggc

SEQ ID NO: 1126640 - RNA, 19 nt, Artificial Sequence
  Description of Artificial Sequence: Synthetic oligonucleotide
cuuugucagugguggguaa

SEQ ID NO: 1126641 - RNA, 19 nt, Artificial Sequence
  Description of Artificial Sequence: Synthetic oligonucleotide
ccccaauccaagacagcag

SEQ ID NO: 1126642 - RNA, 19 nt, Artificial Sequence
  Description of Artificial Sequence: Synthetic oligonucleotide
ucacuguguagggcgggau

SEQ ID NO: 1126643 - RNA, 19 nt, Artificial Sequence
  Description of Artificial Sequence: Synthetic oligonucleotide
acgagggccuggaaagcug

SEQ ID NO: 1126644 - RNA, 19 nt, Artificial Sequence
  Description of Artificial Sequence: Synthetic oligonucleotide
gcacugccgauggucaggg

SEQ ID NO: 1126645 - RNA, 19 nt, Artificial Sequence
  Description of Artificial Sequence: Synthetic oligonucleotide
acggcgaagucuggaggug

SEQ ID NO: 1126646 - RNA, 19 nt, Artificial Sequence
  Description of Artificial Sequence: Synthetic oligonucleotide
ccugauacuccauccugca

SEQ ID NO: 1126647 - RNA, 19 nt, Artificial Sequence
  Description of Artificial Sequence: Synthetic oligonucleotide
cugugauagggcacagcua

SEQ ID NO: 1126648 - RNA, 19 nt, Artificial Sequence
  Description of Artificial Sequence: Synthetic oligonucleotide
ucacgacaucauacucuuu

SEQ ID NO: 1126649 - RNA, 19 nt, Artificial Sequence
  Description of Artificial Sequence: Synthetic oligonucleotide
ccaggcagagagauaagaa

SEQ ID NO: 1126650 - RNA, 19 nt, Artificial Sequence
  Description of Artificial Sequence: Synthetic oligonucleotide
gcccaaguucacgacauca

SEQ ID NO: 1126651 - RNA, 19 nt, Artificial Sequence
  Description of Artificial Sequence: Synthetic oligonucleotide
cacggcgaagucuggaggu

SEQ ID NO: 1126652 - RNA, 19 nt, Artificial Sequence
  Description of Artificial Sequence: Synthetic oligonucleotide
uggugagagucuggugcaa

SEQ ID NO: 1126653 - RNA, 19 nt, Artificial Sequence
  Description of Artificial Sequence: Synthetic oligonucleotide
cugggcuacugcggccugg

SEQ ID NO: 1126654 - RNA, 19 nt, Artificial Sequence
  Description of Artificial Sequence: Synthetic oligonucleotide
aucugucguagggcucauc

SEQ ID NO: 1126655 - RNA, 19 nt, Artificial Sequence
  Description of Artificial Sequence: Synthetic oligonucleotide
ggcgaagucuggaggugag

SEQ ID NO: 1126656 - RNA, 19 nt, Artificial Sequence
  Description of Artificial Sequence: Synthetic oligonucleotide
ggcacggccucagggauac

SEQ ID NO: 1126657 - RNA, 19 nt, Artificial Sequence
  Description of Artificial Sequence: Synthetic oligonucleotide
ggauacaaacacgggccga

SEQ ID NO: 1126658 - RNA, 19 nt, Artificial Sequence
  Description of Artificial Sequence: Synthetic oligonucleotide
gcuacugcggccuggcccu

SEQ ID NO: 1126659 - RNA, 19 nt, Artificial Sequence
  Description of Artificial Sequence: Synthetic oligonucleotide
uggccuucgggagcugcaa

SEQ ID NO: 1126660 - RNA, 19 nt, Artificial Sequence
  Description of Artificial Sequence: Synthetic oligonucleotide
ccacgacccuaaaguaacc

SEQ ID NO: 1126661 - RNA, 19 nt, Artificial Sequence
  Description of Artificial Sequence: Synthetic oligonucleotide
ccaccaaaucaauggccuc

SEQ ID NO: 1126662 - RNA, 19 nt, Artificial Sequence
  Description of Artificial Sequence: Synthetic oligonucleotide
ggccuucgggagcugcaag

SEQ ID NO: 1126663 - RNA, 19 nt, Artificial Sequence
  Description of Artificial Sequence: Synthetic oligonucleotide
ggaugcaugcccagucaca

SEQ ID NO: 1126664 - RNA, 19 nt, Artificial Sequence
  Description of Artificial Sequence: Synthetic oligonucleotide
cacggccucagggauacaa

SEQ ID NO: 1126665 - RNA, 19 nt, Artificial Sequence
  Description of Artificial Sequence: Synthetic oligonucleotide
caaaagcggguucuaugau

SEQ ID NO: 1126666 - RNA, 19 nt, Artificial Sequence
  Description of Artificial Sequence: Synthetic oligonucleotide
acuguaggcuacggaucau

SEQ ID NO: 1126667 - RNA, 19 nt, Artificial Sequence
  Description of Artificial Sequence: Synthetic oligonucleotide
cacuagcacguucuugagu

SEQ ID NO: 1126668 - RNA, 19 nt, Artificial Sequence
  Description of Artificial Sequence: Synthetic oligonucleotide
gccacugguagaccucauc

SEQ ID NO: 1126669 - RNA, 19 nt, Artificial Sequence
  Description of Artificial Sequence: Synthetic oligonucleotide
cucacuguguagggcggga

SEQ ID NO: 1126670 - RNA, 19 nt, Artificial Sequence
  Description of Artificial Sequence: Synthetic oligonucleotide
ccaaguucacgacaucaua

SEQ ID NO: 1126671 - RNA, 19 nt, Artificial Sequence
  Description of Artificial Sequence: Synthetic oligonucleotide
cagguccggcaucuuucuc

SEQ ID NO: 1126672 - RNA, 19 nt, Artificial Sequence
  Description of Artificial Sequence: Synthetic oligonucleotide
caggguccguucccacaug

SEQ ID NO: 1126673 - RNA, 19 nt, Artificial Sequence
  Description of Artificial Sequence: Synthetic oligonucleotide
gguaaccaaaugccauggu

SEQ ID NO: 1126674 - RNA, 19 nt, Artificial Sequence
  Description of Artificial Sequence: Synthetic oligonucleotide
cacgacccuaaaguaaccu

SEQ ID NO: 1126675 - RNA, 19 nt, Artificial Sequence
  Description of Artificial Sequence: Synthetic oligonucleotide
gcuacggaucauguggucu

SEQ ID NO: 1126676 - RNA, 19 nt, Artificial Sequence
  Description of Artificial Sequence: Synthetic oligonucleotide
cugucguagggcucauccu

SEQ ID NO: 1126677 - RNA, 19 nt, Artificial Sequence
  Description of Artificial Sequence: Synthetic oligonucleotide
gcgggauugaggcgucuca

SEQ ID NO: 1126678 - RNA, 19 nt, Artificial Sequence
  Description of Artificial Sequence: Synthetic oligonucleotide
guccggcaucuuucucuug

SEQ ID NO: 1126679 - RNA, 19 nt, Artificial Sequence
  Description of Artificial Sequence: Synthetic oligonucleotide
acggccucagggauacaaa

SEQ ID NO: 1126680 - RNA, 19 nt, Artificial Sequence
  Description of Artificial Sequence: Synthetic oligonucleotide
cuguguagggcgggauuga

SEQ ID NO: 1126681 - RNA, 19 nt, Artificial Sequence
  Description of Artificial Sequence: Synthetic oligonucleotide
ggcuacggaucaugugguc

SEQ ID NO: 1126682 - RNA, 19 nt, Artificial Sequence
  Description of Artificial Sequence: Synthetic oligonucleotide
ccguucaaagcacugggcu

SEQ ID NO: 1126683 - RNA, 19 nt, Artificial Sequence
  Description of Artificial Sequence: Synthetic oligonucleotide
uucgagccugcagcuguuu

SEQ ID NO: 1126684 - RNA, 19 nt, Artificial Sequence
  Description of Artificial Sequence: Synthetic oligonucleotide
gcuccaucuuagagaacac

SEQ ID NO: 1126685 - RNA, 19 nt, Artificial Sequence
  Description of Artificial Sequence: Synthetic oligonucleotide
cacaggacaucgugcugcu

SEQ ID NO: 1126686 - RNA, 19 nt, Artificial Sequence
  Description of Artificial Sequence: Synthetic oligonucleotide
cguaggcacccacugucac

SEQ ID NO: 1126687 - RNA, 19 nt, Artificial Sequence
  Description of Artificial Sequence: Synthetic oligonucleotide
ggguccguucccacaugcc

SEQ ID NO: 1126688 - RNA, 19 nt, Artificial Sequence
  Description of Artificial Sequence: Synthetic oligonucleotide
cccaggcagagagauaaga

SEQ ID NO: 1126689 - RNA, 19 nt, Artificial Sequence
  Description of Artificial Sequence: Synthetic oligonucleotide
ccucacuguguagggcggg

SEQ ID NO: 1126690 - RNA, 19 nt, Artificial Sequence
  Description of Artificial Sequence: Synthetic oligonucleotide
cgaagucuggaggugagaa

SEQ ID NO: 1126691 - RNA, 19 nt, Artificial Sequence
  Description of Artificial Sequence: Synthetic oligonucleotide
cacgagggccuggaaagcu

SEQ ID NO: 1126692 - RNA, 19 nt, Artificial Sequence
  Description of Artificial Sequence: Synthetic oligonucleotide
ugggcccuccagugcuauu

SEQ ID NO: 1126693 - RNA, 19 nt, Artificial Sequence
  Description of Artificial Sequence: Synthetic oligonucleotide
ccaucuuagagaacaccuu

SEQ ID NO: 1126694 - RNA, 19 nt, Artificial Sequence
  Description of Artificial Sequence: Synthetic oligonucleotide
ccguaggcacccacuguca

SEQ ID NO: 1126695 - RNA, 19 nt, Artificial Sequence
  Description of Artificial Sequence: Synthetic oligonucleotide
ggaaagcccuggcccaagu

SEQ ID NO: 1126696 - RNA, 19 nt, Artificial Sequence
  Description of Artificial Sequence: Synthetic oligonucleotide
gcgucucagggauguagcu

SEQ ID NO: 1126697 - RNA, 19 nt, Artificial Sequence
  Description of Artificial Sequence: Synthetic oligonucleotide
ccuugguacgaggugugaa

SEQ ID NO: 1126698 - RNA, 19 nt, Artificial Sequence
  Description of Artificial Sequence: Synthetic oligonucleotide
cuccacccagggguuguga

SEQ ID NO: 1126699 - RNA, 19 nt, Artificial Sequence
  Description of Artificial Sequence: Synthetic oligonucleotide
gguccggcaucuuucucuu

SEQ ID NO: 1126700 - RNA, 19 nt, Artificial Sequence
  Description of Artificial Sequence: Synthetic oligonucleotide
ccguucccacaugccaggg

SEQ ID NO: 1126701 - RNA, 19 nt, Artificial Sequence
  Description of Artificial Sequence: Synthetic oligonucleotide
ccgucauagaccagccacu

SEQ ID NO: 1126702 - RNA, 19 nt, Artificial Sequence
  Description of Artificial Sequence: Synthetic oligonucleotide
cccauaacccagcccaccu

SEQ ID NO: 1126703 - RNA, 19 nt, Artificial Sequence
  Description of Artificial Sequence: Synthetic oligonucleotide
ggugcccgucauagaccag

SEQ ID NO: 1126704 - RNA, 19 nt, Artificial Sequence
  Description of Artificial Sequence: Synthetic oligonucleotide
cggguucuaugaugaugac

SEQ ID NO: 1126705 - RNA, 19 nt, Artificial Sequence
  Description of Artificial Sequence: Synthetic oligonucleotide
gguugugaucgaucccauu

SEQ ID NO: 1126706 - RNA, 19 nt, Artificial Sequence
  Description of Artificial Sequence: Synthetic oligonucleotide
gcccgucauagaccagcca

SEQ ID NO: 1126707 - RNA, 19 nt, Artificial Sequence
  Description of Artificial Sequence: Synthetic oligonucleotide
gugaggcuccagccuuccu

SEQ ID NO: 1126708 - RNA, 19 nt, Artificial Sequence
  Description of Artificial Sequence: Synthetic oligonucleotide
cgucaccuucauccacgag

SEQ ID NO: 1126709 - RNA, 19 nt, Artificial Sequence
  Description of Artificial Sequence: Synthetic oligonucleotide
gcgaugcugaugugcuggu

SEQ ID NO: 1126710 - RNA, 19 nt, Artificial Sequence
  Description of Artificial Sequence: Synthetic oligonucleotide
ccggcaucuuucucuugaa

SEQ ID NO: 1126711 - RNA, 19 nt, Artificial Sequence
  Description of Artificial Sequence: Synthetic oligonucleotide
gccuugguacgagguguga

SEQ ID NO: 1126712 - RNA, 19 nt, Artificial Sequence
  Description of Artificial Sequence: Synthetic oligonucleotide
cgaucccauucagccuucg

SEQ ID NO: 1126713 - RNA, 19 nt, Artificial Sequence
  Description of Artificial Sequence: Synthetic oligonucleotide
caggugcaccgagauggcu

SEQ ID NO: 1126714 - RNA, 19 nt, Artificial Sequence
  Description of Artificial Sequence: Synthetic oligonucleotide
gaggcgucucagggaugua

SEQ ID NO: 1126715 - RNA, 19 nt, Artificial Sequence
  Description of Artificial Sequence: Synthetic oligonucleotide
gggcccuccagugcuauuu

SEQ ID NO: 1126716 - RNA, 19 nt, Artificial Sequence
  Description of Artificial Sequence: Synthetic oligonucleotide
cguucccacaugccaggga

SEQ ID NO: 1126717 - RNA, 19 nt, Artificial Sequence
  Description of Artificial Sequence: Synthetic oligonucleotide
ccgagauggcugcugcacu

SEQ ID NO: 1126718 - RNA, 19 nt, Artificial Sequence
  Description of Artificial Sequence: Synthetic oligonucleotide
ggguugugaucgaucccau

SEQ ID NO: 1126719 - RNA, 19 nt, Artificial Sequence
  Description of Artificial Sequence: Synthetic oligonucleotide
ccgguggcacugaagcuuu

SEQ ID NO: 1126720 - RNA, 19 nt, Artificial Sequence
  Description of Artificial Sequence: Synthetic oligonucleotide
cgggagcugcaagaaguaa

SEQ ID NO: 1126721 - RNA, 19 nt, Artificial Sequence
  Description of Artificial Sequence: Synthetic oligonucleotide
gcacaguccgaaggugcuu

SEQ ID NO: 1126722 - RNA, 19 nt, Artificial Sequence
  Description of Artificial Sequence: Synthetic oligonucleotide
ccccguaggcacccacugu

SEQ ID NO: 1126723 - RNA, 19 nt, Artificial Sequence
  Description of Artificial Sequence: Synthetic oligonucleotide
ccgggugagugaggcucca

SEQ ID NO: 1126724 - RNA, 19 nt, Artificial Sequence
  Description of Artificial Sequence: Synthetic oligonucleotide
ucaaucugggaacagaagg

SEQ ID NO: 1126725 - RNA, 19 nt, Artificial Sequence
  Description of Artificial Sequence: Synthetic oligonucleotide
uuuaugaacacuuucggga

SEQ ID NO: 1126726 - RNA, 19 nt, Artificial Sequence
  Description of Artificial Sequence: Synthetic oligonucleotide
aagucuuguagauuugggc

SEQ ID NO: 1126727 - RNA, 19 nt, Artificial Sequence
  Description of Artificial Sequence: Synthetic oligonucleotide
agagauuuaagucuuguag

SEQ ID NO: 1126728 - RNA, 19 nt, Artificial Sequence
  Description of Artificial Sequence: Synthetic oligonucleotide
aauacccauuauuuggccc

SEQ ID NO: 1126729 - RNA, 19 nt, Artificial Sequence
  Description of Artificial Sequence: Synthetic oligonucleotide
uuuaugauuguagugacag

SEQ ID NO: 1126730 - RNA, 19 nt, Artificial Sequence
  Description of Artificial Sequence: Synthetic oligonucleotide
uguaaucugguacaguuag

SEQ ID NO: 1126731 - RNA, 19 nt, Artificial Sequence
  Description of Artificial Sequence: Synthetic oligonucleotide
uaaagcauaccacugacca

SEQ ID NO: 1126732 - RNA, 19 nt, Artificial Sequence
  Description of Artificial Sequence: Synthetic oligonucleotide
ucuaauauacaauuauuga

SEQ ID NO: 1126733 - RNA, 19 nt, Artificial Sequence
  Description of Artificial Sequence: Synthetic oligonucleotide
guugaaugagcucauaggg

SEQ ID NO: 1126734 - RNA, 19 nt, Artificial Sequence
  Description of Artificial Sequence: Synthetic oligonucleotide
uagauuugggcacauuucg

SEQ ID NO: 1126735 - RNA, 19 nt, Artificial Sequence
  Description of Artificial Sequence: Synthetic oligonucleotide
uccuaauauauccaguugc

SEQ ID NO: 1126736 - RNA, 19 nt, Artificial Sequence
  Description of Artificial Sequence: Synthetic oligonucleotide
uguaggauauaccuguugc

SEQ ID NO: 1126737 - RNA, 19 nt, Artificial Sequence
  Description of Artificial Sequence: Synthetic oligonucleotide
uuaagaaaguggcugcacg

SEQ ID NO: 1126738 - RNA, 19 nt, Artificial Sequence
  Description of Artificial Sequence: Synthetic oligonucleotide
uuuacuuccagucguauaa

SEQ ID NO: 1126739 - RNA, 19 nt, Artificial Sequence
  Description of Artificial Sequence: Synthetic oligonucleotide
ucggaaauaaccuccaagc

SEQ ID NO: 1126740 - RNA, 19 nt, Artificial Sequence
  Description of Artificial Sequence: Synthetic oligonucleotide
agaaugagccgccuaaggc

SEQ ID NO: 1126741 - RNA, 19 nt, Artificial Sequence
  Description of Artificial Sequence: Synthetic oligonucleotide
aaaccugcuaaauccuggc

SEQ ID NO: 1126742 - RNA, 19 nt, Artificial Sequence
  Description of Artificial Sequence: Synthetic oligonucleotide
aaggcguaccaauucagac

SEQ ID NO: 1126743 - RNA, 19 nt, Artificial Sequence
  Description of Artificial Sequence: Synthetic oligonucleotide
aagaaagaguuucugcaag

SEQ ID NO: 1126744 - RNA, 19 nt, Artificial Sequence
  Description of Artificial Sequence: Synthetic oligonucleotide
aguugaaugagcucauagg

SEQ ID NO: 1126745 - RNA, 19 nt, Artificial Sequence
  Description of Artificial Sequence: Synthetic oligonucleotide
aguugcuguaaucugguac

SEQ ID NO: 1126746 - RNA, 19 nt, Artificial Sequence
  Description of Artificial Sequence: Synthetic oligonucleotide
aaucaguugaaugagcuca

SEQ ID NO: 1126747 - RNA, 19 nt, Artificial Sequence
  Description of Artificial Sequence: Synthetic oligonucleotide
ugcuaaucuacacaggucu

SEQ ID NO: 1126748 - RNA, 19 nt, Artificial Sequence
  Description of Artificial Sequence: Synthetic oligonucleotide
uuugcucuacuuuuguccg

SEQ ID NO: 1126749 - RNA, 19 nt, Artificial Sequence
  Description of Artificial Sequence: Synthetic oligonucleotide
aggaugagagauuuaaguc

SEQ ID NO: 1126750 - RNA, 19 nt, Artificial Sequence
  Description of Artificial Sequence: Synthetic oligonucleotide
ugugcuaaucuacacaggu

SEQ ID NO: 1126751 - RNA, 19 nt, Artificial Sequence
  Description of Artificial Sequence: Synthetic oligonucleotide
aacacuuucgggaagcuag

SEQ ID NO: 1126752 - RNA, 19 nt, Artificial Sequence
  Description of Artificial Sequence: Synthetic oligonucleotide
uaugauuguagugacagga

SEQ ID NO: 1126753 - RNA, 19 nt, Artificial Sequence
  Description of Artificial Sequence: Synthetic oligonucleotide
uucgcaaugacgcuggacu

SEQ ID NO: 1126754 - RNA, 19 nt, Artificial Sequence
  Description of Artificial Sequence: Synthetic oligonucleotide
uguggggaaauuuaucugc

SEQ ID NO: 1126755 - RNA, 19 nt, Artificial Sequence
  Description of Artificial Sequence: Synthetic oligonucleotide
uuuagaaaccugcuaaauc

SEQ ID NO: 1126756 - RNA, 19 nt, Artificial Sequence
  Description of Artificial Sequence: Synthetic oligonucleotide
aagucugcaagucugugcu

SEQ ID NO: 1126757 - RNA, 19 nt, Artificial Sequence
  Description of Artificial Sequence: Synthetic oligonucleotide
gucguauaagauuuguggg

SEQ ID NO: 1126758 - RNA, 19 nt, Artificial Sequence
  Description of Artificial Sequence: Synthetic oligonucleotide
ugaguucuaacacagcccu

SEQ ID NO: 1126759 - RNA, 19 nt, Artificial Sequence
  Description of Artificial Sequence: Synthetic oligonucleotide
aagguuuaaacuggcgagc

SEQ ID NO: 1126760 - RNA, 19 nt, Artificial Sequence
  Description of Artificial Sequence: Synthetic oligonucleotide
ugauuaaagcauaccacug

SEQ ID NO: 1126761 - RNA, 19 nt, Artificial Sequence
  Description of Artificial Sequence: Synthetic oligonucleotide
uguuaagaccaucuauucc

SEQ ID NO: 1126762 - RNA, 19 nt, Artificial Sequence
  Description of Artificial Sequence: Synthetic oligonucleotide
ucuguaauauucuugcauc

SEQ ID NO: 1126763 - RNA, 19 nt, Artificial Sequence
  Description of Artificial Sequence: Synthetic oligonucleotide
acuuuuguccgauagagaa

SEQ ID NO: 1126764 - RNA, 19 nt, Artificial Sequence
  Description of Artificial Sequence: Synthetic oligonucleotide
uuggcaaugugaccgaaag

SEQ ID NO: 1126765 - RNA, 19 nt, Artificial Sequence
  Description of Artificial Sequence: Synthetic oligonucleotide
aguaucgucuagcuuugcc

SEQ ID NO: 1126766 - RNA, 19 nt, Artificial Sequence
  Description of Artificial Sequence: Synthetic oligonucleotide
aacugcaucuaauucggug

SEQ ID NO: 1126767 - RNA, 19 nt, Artificial Sequence
  Description of Artificial Sequence: Synthetic oligonucleotide
acuauuuacuuccagucgu

SEQ ID NO: 1126768 - RNA, 19 nt, Artificial Sequence
  Description of Artificial Sequence: Synthetic oligonucleotide
acauuuagaaaccugcuaa

SEQ ID NO: 1126769 - RNA, 19 nt, Artificial Sequence
  Description of Artificial Sequence: Synthetic oligonucleotide
guuugcucuacuuuugucc

SEQ ID NO: 1126770 - RNA, 19 nt, Artificial Sequence
  Description of Artificial Sequence: Synthetic oligonucleotide
auaccuguugcucaaaggu

SEQ ID NO: 1126771 - RNA, 19 nt, Artificial Sequence
  Description of Artificial Sequence: Synthetic oligonucleotide
aggcguaccaauucagacc

SEQ ID NO: 1126772 - RNA, 19 nt, Artificial Sequence
  Description of Artificial Sequence: Synthetic oligonucleotide
caagguuuaaacuggcgag

SEQ ID NO: 1126773 - RNA, 19 nt, Artificial Sequence
  Description of Artificial Sequence: Synthetic oligonucleotide
uguccgauagagaaugagc

SEQ ID NO: 1126774 - RNA, 19 nt, Artificial Sequence
  Description of Artificial Sequence: Synthetic oligonucleotide
ugccgaacaagccagaauc

SEQ ID NO: 1126775 - RNA, 19 nt, Artificial Sequence
  Description of Artificial Sequence: Synthetic oligonucleotide
uauaccuguugcucaaagg

SEQ ID NO: 1126776 - RNA, 19 nt, Artificial Sequence
  Description of Artificial Sequence: Synthetic oligonucleotide
uuaagucuuguagauuugg

SEQ ID NO: 1126777 - RNA, 19 nt, Artificial Sequence
  Description of Artificial Sequence: Synthetic oligonucleotide
uguagauuugggcacauuu

SEQ ID NO: 1126778 - RNA, 19 nt, Artificial Sequence
  Description of Artificial Sequence: Synthetic oligonucleotide
aaguauuccuuuaaaauaa

SEQ ID NO: 1126779 - RNA, 19 nt, Artificial Sequence
  Description of Artificial Sequence: Synthetic oligonucleotide
accugcuaaauccuggcac

SEQ ID NO: 1126780 - RNA, 19 nt, Artificial Sequence
  Description of Artificial Sequence: Synthetic oligonucleotide
uucgguguaauaauccaga

SEQ ID NO: 1126781 - RNA, 19 nt, Artificial Sequence
  Description of Artificial Sequence: Synthetic oligonucleotide
gauauacuguagaggaucg

SEQ ID NO: 1126782 - RNA, 19 nt, Artificial Sequence
  Description of Artificial Sequence: Synthetic oligonucleotide
ugauuguagugacaggaca

SEQ ID NO: 1126783 - RNA, 19 nt, Artificial Sequence
  Description of Artificial Sequence: Synthetic oligonucleotide
aucuauuccacagccgucc

SEQ ID NO: 1126784 - RNA, 19 nt, Artificial Sequence
  Description of Artificial Sequence: Synthetic oligonucleotide
ucguaggucucucugacca

SEQ ID NO: 1126785 - RNA, 19 nt, Artificial Sequence
  Description of Artificial Sequence: Synthetic oligonucleotide
ucuaauucgguguaauaau

SEQ ID NO: 1126786 - RNA, 19 nt, Artificial Sequence
  Description of Artificial Sequence: Synthetic oligonucleotide
agggauuugccgaacaagc

SEQ ID NO: 1126787 - RNA, 19 nt, Artificial Sequence
  Description of Artificial Sequence: Synthetic oligonucleotide
gauuguagugacaggacag

SEQ ID NO: 1126788 - RNA, 19 nt, Artificial Sequence
  Description of Artificial Sequence: Synthetic oligonucleotide
ucuagaucauucaugucaa

SEQ ID NO: 1126789 - RNA, 19 nt, Artificial Sequence
  Description of Artificial Sequence: Synthetic oligonucleotide
uuaaagcauaccacugacc

SEQ ID NO: 1126790 - RNA, 19 nt, Artificial Sequence
  Description of Artificial Sequence: Synthetic oligonucleotide
ugaaugagcucauagggua

SEQ ID NO: 1126791 - RNA, 19 nt, Artificial Sequence
  Description of Artificial Sequence: Synthetic oligonucleotide
acugcaucuaauucggugu

SEQ ID NO: 1126792 - RNA, 19 nt, Artificial Sequence
  Description of Artificial Sequence: Synthetic oligonucleotide
uuguuccuaauauauccag

SEQ ID NO: 1126793 - RNA, 19 nt, Artificial Sequence
  Description of Artificial Sequence: Synthetic oligonucleotide
gauuaaagcauaccacuga

SEQ ID NO: 1126794 - RNA, 19 nt, Artificial Sequence
  Description of Artificial Sequence: Synthetic oligonucleotide
uccgauagagaaugagccg

SEQ ID NO: 1126795 - RNA, 19 nt, Artificial Sequence
  Description of Artificial Sequence: Synthetic oligonucleotide
aagccaacucugcuauccc

SEQ ID NO: 1126796 - RNA, 19 nt, Artificial Sequence
  Description of Artificial Sequence: Synthetic oligonucleotide
uaccaauucagacccacac

SEQ ID NO: 1126797 - RNA, 19 nt, Artificial Sequence
  Description of Artificial Sequence: Synthetic oligonucleotide
uuauuccucuaauauacaa

SEQ ID NO: 1126798 - RNA, 19 nt, Artificial Sequence
  Description of Artificial Sequence: Synthetic oligonucleotide
uccuaaaagaaaagugccu

SEQ ID NO: 1126799 - RNA, 19 nt, Artificial Sequence
  Description of Artificial Sequence: Synthetic oligonucleotide
acggcuguaggauauaccu

SEQ ID NO: 1126800 - RNA, 19 nt, Artificial Sequence
  Description of Artificial Sequence: Synthetic oligonucleotide
guaucgucuagcuuugccc

SEQ ID NO: 1126801 - RNA, 19 nt, Artificial Sequence
  Description of Artificial Sequence: Synthetic oligonucleotide
uuaugauuguagugacagg

SEQ ID NO: 1126802 - RNA, 19 nt, Artificial Sequence
  Description of Artificial Sequence: Synthetic oligonucleotide
ccuguuagcuguaagaaag

SEQ ID NO: 1126803 - RNA, 19 nt, Artificial Sequence
  Description of Artificial Sequence: Synthetic oligonucleotide
uacauaacuuggcaaugug

SEQ ID NO: 1126804 - RNA, 19 nt, Artificial Sequence
  Description of Artificial Sequence: Synthetic oligonucleotide
gagaaugagccgccuaagg

SEQ ID NO: 1126805 - RNA, 19 nt, Artificial Sequence
  Description of Artificial Sequence: Synthetic oligonucleotide
gaaaccugcuaaauccugg

SEQ ID NO: 1126806 - RNA, 19 nt, Artificial Sequence
  Description of Artificial Sequence: Synthetic oligonucleotide
uuaugaacacuuucgggaa

SEQ ID NO: 1126807 - RNA, 19 nt, Artificial Sequence
  Description of Artificial Sequence: Synthetic oligonucleotide
aaguuugggagcuggcgug

SEQ ID NO: 1126808 - RNA, 19 nt, Artificial Sequence
  Description of Artificial Sequence: Synthetic oligonucleotide
aauuauugauuaaagcaua

SEQ ID NO: 1126809 - RNA, 19 nt, Artificial Sequence
  Description of Artificial Sequence: Synthetic oligonucleotide
gaccaucuauuccacagcc

SEQ ID NO: 1126810 - RNA, 19 nt, Artificial Sequence
  Description of Artificial Sequence: Synthetic oligonucleotide
ggagcuuucgcaaugacgc

SEQ ID NO: 1126811 - RNA, 19 nt, Artificial Sequence
  Description of Artificial Sequence: Synthetic oligonucleotide
gauuugccgaacaagccag

SEQ ID NO: 1126812 - RNA, 19 nt, Artificial Sequence
  Description of Artificial Sequence: Synthetic oligonucleotide
cuaauucgguguaauaauc

SEQ ID NO: 1126813 - RNA, 19 nt, Artificial Sequence
  Description of Artificial Sequence: Synthetic oligonucleotide
uuccagucguauaagauuu

SEQ ID NO: 1126814 - RNA, 19 nt, Artificial Sequence
  Description of Artificial Sequence: Synthetic oligonucleotide
gauaacucaaggcguacca

SEQ ID NO: 1126815 - RNA, 19 nt, Artificial Sequence
  Description of Artificial Sequence: Synthetic oligonucleotide
agguuuaaacuggcgagcc

SEQ ID NO: 1126816 - RNA, 19 nt, Artificial Sequence
  Description of Artificial Sequence: Synthetic oligonucleotide
augucaacaagugaagucu

SEQ ID NO: 1126817 - RNA, 19 nt, Artificial Sequence
  Description of Artificial Sequence: Synthetic oligonucleotide
ucaaggcguaccaauucag

SEQ ID NO: 1126818 - RNA, 19 nt, Artificial Sequence
  Description of Artificial Sequence: Synthetic oligonucleotide
caugucaacaagugaaguc

SEQ ID NO: 1126819 - RNA, 19 nt, Artificial Sequence
  Description of Artificial Sequence: Synthetic oligonucleotide
ugagguggcaguuuaucac

SEQ ID NO: 1126820 - RNA, 19 nt, Artificial Sequence
  Description of Artificial Sequence: Synthetic oligonucleotide
auuaagaaaguggcugcac

SEQ ID NO: 1126821 - RNA, 19 nt, Artificial Sequence
  Description of Artificial Sequence: Synthetic oligonucleotide
gaagcuagcauugaguucu

SEQ ID NO: 1126822 - RNA, 19 nt, Artificial Sequence
  Description of Artificial Sequence: Synthetic oligonucleotide
auacccauuauuuggccca

SEQ ID NO: 1126823 - RNA, 19 nt, Artificial Sequence
  Description of Artificial Sequence: Synthetic oligonucleotide
aaaugcucagcagugcugu

SEQ ID NO: 1126824 - RNA, 19 nt, Artificial Sequence
  Description of Artificial Sequence: Synthetic oligonucleotide
ugagguggauauacuguag

SEQ ID NO: 1126825 - RNA, 19 nt, Artificial Sequence
  Description of Artificial Sequence: Synthetic oligonucleotide
gauuugggcacauuucgga

SEQ ID NO: 1126826 - RNA, 19 nt, Artificial Sequence
  Description of Artificial Sequence: Synthetic oligonucleotide
auauaccuguugcucaaag

SEQ ID NO: 1126827 - RNA, 19 nt, Artificial Sequence
  Description of Artificial Sequence: Synthetic oligonucleotide
cuaauauacaauuauugau

SEQ ID NO: 1126828 - RNA, 19 nt, Artificial Sequence
  Description of Artificial Sequence: Synthetic oligonucleotide
uaucugcuuaauacaaggu

SEQ ID NO: 1126829 - RNA, 19 nt, Artificial Sequence
  Description of Artificial Sequence: Synthetic oligonucleotide
cucuacuuuuguccgauag

SEQ ID NO: 1126830 - RNA, 19 nt, Artificial Sequence
  Description of Artificial Sequence: Synthetic oligonucleotide
guccgauagagaaugagcc

SEQ ID NO: 1126831 - RNA, 19 nt, Artificial Sequence
  Description of Artificial Sequence: Synthetic oligonucleotide
agaaacuccagugaaguau

SEQ ID NO: 1126832 - RNA, 19 nt, Artificial Sequence
  Description of Artificial Sequence: Synthetic oligonucleotide
uaaucugguacaguuagau

SEQ ID NO: 1126833 - RNA, 19 nt, Artificial Sequence
  Description of Artificial Sequence: Synthetic oligonucleotide
cuaaucuacacaggucugg

SEQ ID NO: 1126834 - RNA, 19 nt, Artificial Sequence
  Description of Artificial Sequence: Synthetic oligonucleotide
accaaagaaucucccaucu

SEQ ID NO: 1126835 - RNA, 19 nt, Artificial Sequence
  Description of Artificial Sequence: Synthetic oligonucleotide
uuaucaaucugggaacaga

SEQ ID NO: 1126836 - RNA, 19 nt, Artificial Sequence
  Description of Artificial Sequence: Synthetic oligonucleotide
uccauauuauuccucuaau

SEQ ID NO: 1126837 - RNA, 19 nt, Artificial Sequence
  Description of Artificial Sequence: Synthetic oligonucleotide
uuaagaccaucuauuccac

SEQ ID NO: 1126838 - RNA, 19 nt, Artificial Sequence
  Description of Artificial Sequence: Synthetic oligonucleotide
aucuaauucgguguaauaa

SEQ ID NO: 1126839 - RNA, 19 nt, Artificial Sequence
  Description of Artificial Sequence: Synthetic oligonucleotide
uacaguuagaugccaguuc

SEQ ID NO: 1126840 - RNA, 19 nt, Artificial Sequence
  Description of Artificial Sequence: Synthetic oligonucleotide
aggauauaccuguugcuca

SEQ ID NO: 1126841 - RNA, 19 nt, Artificial Sequence
  Description of Artificial Sequence: Synthetic oligonucleotide
uggcgugccagucugguga

SEQ ID NO: 1126842 - RNA, 19 nt, Artificial Sequence
  Description of Artificial Sequence: Synthetic oligonucleotide
uaaauccuggcacggagau

SEQ ID NO: 1126843 - RNA, 19 nt, Artificial Sequence
  Description of Artificial Sequence: Synthetic oligonucleotide
aacggcuguaggauauacc

SEQ ID NO: 1126844 - RNA, 19 nt, Artificial Sequence
  Description of Artificial Sequence: Synthetic oligonucleotide
caguugaaugagcucauag

SEQ ID NO: 1126845 - RNA, 19 nt, Artificial Sequence
  Description of Artificial Sequence: Synthetic oligonucleotide
agaaucaguugaaugagcu

SEQ ID NO: 1126846 - RNA, 19 nt, Artificial Sequence
  Description of Artificial Sequence: Synthetic oligonucleotide
uguagugacaggacaguua

SEQ ID NO: 1126847 - RNA, 19 nt, Artificial Sequence
  Description of Artificial Sequence: Synthetic oligonucleotide
agcccuguuaucaaucugg

SEQ ID NO: 1126848 - RNA, 19 nt, Artificial Sequence
  Description of Artificial Sequence: Synthetic oligonucleotide
agcacagcgagccuguaga

SEQ ID NO: 1126849 - RNA, 19 nt, Artificial Sequence
  Description of Artificial Sequence: Synthetic oligonucleotide
ugauucagaaucaguugaa

SEQ ID NO: 1126850 - RNA, 19 nt, Artificial Sequence
  Description of Artificial Sequence: Synthetic oligonucleotide
caaugugaccgaaagccug

SEQ ID NO: 1126851 - RNA, 19 nt, Artificial Sequence
  Description of Artificial Sequence: Synthetic oligonucleotide
agaaucucccaucuuacuu

SEQ ID NO: 1126852 - RNA, 19 nt, Artificial Sequence
  Description of Artificial Sequence: Synthetic oligonucleotide
ggcguaccaauucagaccc

SEQ ID NO: 1126853 - RNA, 19 nt, Artificial Sequence
  Description of Artificial Sequence: Synthetic oligonucleotide
caauuauugauuaaagcau

SEQ ID NO: 1126854 - RNA, 19 nt, Artificial Sequence
  Description of Artificial Sequence: Synthetic oligonucleotide
aucgaggagggaaagaucu

SEQ ID NO: 1126855 - RNA, 19 nt, Artificial Sequence
  Description of Artificial Sequence: Synthetic oligonucleotide
uagaggaucgcagcaaugu

SEQ ID NO: 1126856 - RNA, 19 nt, Artificial Sequence
  Description of Artificial Sequence: Synthetic oligonucleotide
agaaggacacaucgaggag

SEQ ID NO: 1126857 - RNA, 19 nt, Artificial Sequence
  Description of Artificial Sequence: Synthetic oligonucleotide
ugguacaguuagaugccag

SEQ ID NO: 1126858 - RNA, 19 nt, Artificial Sequence
  Description of Artificial Sequence: Synthetic oligonucleotide
aaaaugcucagcagugcug

SEQ ID NO: 1126859 - RNA, 19 nt, Artificial Sequence
  Description of Artificial Sequence: Synthetic oligonucleotide
aguucuaacacagcccugu

SEQ ID NO: 1126860 - RNA, 19 nt, Artificial Sequence
  Description of Artificial Sequence: Synthetic oligonucleotide
gguggauauacuguagagg

SEQ ID NO: 1126861 - RNA, 19 nt, Artificial Sequence
  Description of Artificial Sequence: Synthetic oligonucleotide
caucacgagucacacauuc

SEQ ID NO: 1126862 - RNA, 19 nt, Artificial Sequence
  Description of Artificial Sequence: Synthetic oligonucleotide
uguuaucaaucugggaaca

SEQ ID NO: 1126863 - RNA, 19 nt, Artificial Sequence
  Description of Artificial Sequence: Synthetic oligonucleotide
uauaagauuuguggggaaa

SEQ ID NO: 1126864 - RNA, 19 nt, Artificial Sequence
  Description of Artificial Sequence: Synthetic oligonucleotide
augauuguagugacaggac

SEQ ID NO: 1126865 - RNA, 19 nt, Artificial Sequence
  Description of Artificial Sequence: Synthetic oligonucleotide
cugcacgauaacucaaggc

SEQ ID NO: 1126866 - RNA, 19 nt, Artificial Sequence
  Description of Artificial Sequence: Synthetic oligonucleotide
uguaauauucuugcaucuc

SEQ ID NO: 1126867 - RNA, 19 nt, Artificial Sequence
  Description of Artificial Sequence: Synthetic oligonucleotide
ucgggaagcuagcauugag

SEQ ID NO: 1126868 - RNA, 19 nt, Artificial Sequence
  Description of Artificial Sequence: Synthetic oligonucleotide
ugugaccgaaagccugagg

SEQ ID NO: 1126869 - RNA, 19 nt, Artificial Sequence
  Description of Artificial Sequence: Synthetic oligonucleotide
cagaaucaguugaaugagc

SEQ ID NO: 1126870 - RNA, 19 nt, Artificial Sequence
  Description of Artificial Sequence: Synthetic oligonucleotide
gaggaucgcagcaauguug

SEQ ID NO: 1126871 - RNA, 19 nt, Artificial Sequence
  Description of Artificial Sequence: Synthetic oligonucleotide
gaaucaguugaaugagcuc

SEQ ID NO: 1126872 - RNA, 19 nt, Artificial Sequence
  Description of Artificial Sequence: Synthetic oligonucleotide
uauuuggcccauccccgag

SEQ ID NO: 1126873 - RNA, 19 nt, Artificial Sequence
  Description of Artificial Sequence: Synthetic oligonucleotide
agcacaacugcaucuaauu

SEQ ID NO: 1126874 - RNA, 19 nt, Artificial Sequence
  Description of Artificial Sequence: Synthetic oligonucleotide
ugaccgaaagccugaggug

SEQ ID NO: 1126875 - RNA, 19 nt, Artificial Sequence
  Description of Artificial Sequence: Synthetic oligonucleotide
aaugugaccgaaagccuga

SEQ ID NO: 1126876 - RNA, 19 nt, Artificial Sequence
  Description of Artificial Sequence: Synthetic oligonucleotide
ucucugaccaaagaaucuc

SEQ ID NO: 1126877 - RNA, 19 nt, Artificial Sequence
  Description of Artificial Sequence: Synthetic oligonucleotide
ggaaauaaccuccaagcaa

SEQ ID NO: 1126878 - RNA, 19 nt, Artificial Sequence
  Description of Artificial Sequence: Synthetic oligonucleotide
ccaauucagacccacacac

SEQ ID NO: 1126879 - RNA, 19 nt, Artificial Sequence
  Description of Artificial Sequence: Synthetic oligonucleotide
gaaacuccagugaaguauc

SEQ ID NO: 1126880 - RNA, 19 nt, Artificial Sequence
  Description of Artificial Sequence: Synthetic oligonucleotide
aaccugcuaaauccuggca

SEQ ID NO: 1126881 - RNA, 19 nt, Artificial Sequence
  Description of Artificial Sequence: Synthetic oligonucleotide
accaauucagacccacaca

SEQ ID NO: 1126882 - RNA, 19 nt, Artificial Sequence
  Description of Artificial Sequence: Synthetic oligonucleotide
gaaugagcucauaggguag

SEQ ID NO: 1126883 - RNA, 19 nt, Artificial Sequence
  Description of Artificial Sequence: Synthetic oligonucleotide
uccuugguaccaugaagca

SEQ ID NO: 1126884 - RNA, 19 nt, Artificial Sequence
  Description of Artificial Sequence: Synthetic oligonucleotide
gaccaaagaaucucccauc

SEQ ID NO: 1126885 - RNA, 19 nt, Artificial Sequence
  Description of Artificial Sequence: Synthetic oligonucleotide
agauuugggcacauuucgg

SEQ ID NO: 1126886 - RNA, 19 nt, Artificial Sequence
  Description of Artificial Sequence: Synthetic oligonucleotide
gauagggauuugccgaaca

SEQ ID NO: 1126887 - RNA, 19 nt, Artificial Sequence
  Description of Artificial Sequence: Synthetic oligonucleotide
cuucguaggucucucugac

SEQ ID NO: 1126888 - RNA, 19 nt, Artificial Sequence
  Description of Artificial Sequence: Synthetic oligonucleotide
uuauuuggcccauccccga

SEQ ID NO: 1126889 - RNA, 19 nt, Artificial Sequence
  Description of Artificial Sequence: Synthetic oligonucleotide
gaaguaucgucuagcuuug

SEQ ID NO: 1126890 - RNA, 19 nt, Artificial Sequence
  Description of Artificial Sequence: Synthetic oligonucleotide
aaacuccagugaaguaucg

SEQ ID NO: 1126891 - RNA, 19 nt, Artificial Sequence
  Description of Artificial Sequence: Synthetic oligonucleotide
aggagcuuucgcaaugacg

SEQ ID NO: 1126892 - RNA, 19 nt, Artificial Sequence
  Description of Artificial Sequence: Synthetic oligonucleotide
uaaucuacacaggucuggu

SEQ ID NO: 1126893 - RNA, 19 nt, Artificial Sequence
  Description of Artificial Sequence: Synthetic oligonucleotide
cccaucuuacuucagcugg

SEQ ID NO: 1126894 - RNA, 19 nt, Artificial Sequence
  Description of Artificial Sequence: Synthetic oligonucleotide
ugcuaucccauucucugua

SEQ ID NO: 1126895 - RNA, 19 nt, Artificial Sequence
  Description of Artificial Sequence: Synthetic oligonucleotide
uggcaaugugaccgaaagc

SEQ ID NO: 1126896 - RNA, 19 nt, Artificial Sequence
  Description of Artificial Sequence: Synthetic oligonucleotide
uguugcucaaagguaaguu

SEQ ID NO: 1126897 - RNA, 19 nt, Artificial Sequence
  Description of Artificial Sequence: Synthetic oligonucleotide
auuugggcacauuucggaa

SEQ ID NO: 1126898 - RNA, 19 nt, Artificial Sequence
  Description of Artificial Sequence: Synthetic oligonucleotide
uguuugcucuacuuuuguc

SEQ ID NO: 1126899 - RNA, 19 nt, Artificial Sequence
  Description of Artificial Sequence: Synthetic oligonucleotide
acgagucacacauuccuaa

SEQ ID NO: 1126900 - RNA, 19 nt, Artificial Sequence
  Description of Artificial Sequence: Synthetic oligonucleotide
gcuaaauccuggcacggag

SEQ ID NO: 1126901 - RNA, 19 nt, Artificial Sequence
  Description of Artificial Sequence: Synthetic oligonucleotide
aucacgagucacacauucc

SEQ ID NO: 1126902 - RNA, 19 nt, Artificial Sequence
  Description of Artificial Sequence: Synthetic oligonucleotide
cagguugagguggauauac

SEQ ID NO: 1126903 - RNA, 19 nt, Artificial Sequence
  Description of Artificial Sequence: Synthetic oligonucleotide
uuacuuccagucguauaag

SEQ ID NO: 1126904 - RNA, 19 nt, Artificial Sequence
  Description of Artificial Sequence: Synthetic oligonucleotide
aagaaaguggcugcacgau

SEQ ID NO: 1126905 - RNA, 19 nt, Artificial Sequence
  Description of Artificial Sequence: Synthetic oligonucleotide
ggaugagagauuuaagucu

SEQ ID NO: 1126906 - RNA, 19 nt, Artificial Sequence
  Description of Artificial Sequence: Synthetic oligonucleotide
cagucguauaagauuugug

SEQ ID NO: 1126907 - RNA, 19 nt, Artificial Sequence
  Description of Artificial Sequence: Synthetic oligonucleotide
gugaccgaaagccugaggu

SEQ ID NO: 1126908 - RNA, 19 nt, Artificial Sequence
  Description of Artificial Sequence: Synthetic oligonucleotide
ccugcuaaauccuggcacg

SEQ ID NO: 1126909 - RNA, 19 nt, Artificial Sequence
  Description of Artificial Sequence: Synthetic oligonucleotide
gccuguagaaacuccagug

SEQ ID NO: 1126910 - RNA, 19 nt, Artificial Sequence
  Description of Artificial Sequence: Synthetic oligonucleotide
aacuggcgagccugggaag

SEQ ID NO: 1126911 - RNA, 19 nt, Artificial Sequence
  Description of Artificial Sequence: Synthetic oligonucleotide
accuucguaggucucucug

SEQ ID NO: 1126912 - RNA, 19 nt, Artificial Sequence
  Description of Artificial Sequence: Synthetic oligonucleotide
auuuacuuccagucguaua

SEQ ID NO: 1126913 - RNA, 19 nt, Artificial Sequence
  Description of Artificial Sequence: Synthetic oligonucleotide
acaucgaggagggaaagau

SEQ ID NO: 1126914 - RNA, 19 nt, Artificial Sequence
  Description of Artificial Sequence: Synthetic oligonucleotide
cugugcuaaucuacacagg

SEQ ID NO: 1126915 - RNA, 19 nt, Artificial Sequence
  Description of Artificial Sequence: Synthetic oligonucleotide
gguagugaaagaugauuca

SEQ ID NO: 1126916 - RNA, 19 nt, Artificial Sequence
  Description of Artificial Sequence: Synthetic oligonucleotide
aaguaucgucuagcuuugc

SEQ ID NO: 1126917 - RNA, 19 nt, Artificial Sequence
  Description of Artificial Sequence: Synthetic oligonucleotide
auagggauuugccgaacaa

SEQ ID NO: 1126918 - RNA, 19 nt, Artificial Sequence
  Description of Artificial Sequence: Synthetic oligonucleotide
guuaucaaucugggaacag

SEQ ID NO: 1126919 - RNA, 19 nt, Artificial Sequence
  Description of Artificial Sequence: Synthetic oligonucleotide
aguuuaucacaggaugaga

SEQ ID NO: 1126920 - RNA, 19 nt, Artificial Sequence
  Description of Artificial Sequence: Synthetic oligonucleotide
uuuguccgauagagaauga

SEQ ID NO: 1126921 - RNA, 19 nt, Artificial Sequence
  Description of Artificial Sequence: Synthetic oligonucleotide
aaguggcugcacgauaacu

SEQ ID NO: 1126922 - RNA, 19 nt, Artificial Sequence
  Description of Artificial Sequence: Synthetic oligonucleotide
uccagucguauaagauuug

SEQ ID NO: 1126923 - RNA, 19 nt, Artificial Sequence
  Description of Artificial Sequence: Synthetic oligonucleotide
auaggguaguuuaucaaaa

SEQ ID NO: 1126924 - RNA, 19 nt, Artificial Sequence
  Description of Artificial Sequence: Synthetic oligonucleotide
ucuauuccacagccguccu

SEQ ID NO: 1126925 - RNA, 19 nt, Artificial Sequence
  Description of Artificial Sequence: Synthetic oligonucleotide
acaugaacggcuguaggau

SEQ ID NO: 1126926 - RNA, 19 nt, Artificial Sequence
  Description of Artificial Sequence: Synthetic oligonucleotide
acggagauggaaccucugu

SEQ ID NO: 1126927 - RNA, 19 nt, Artificial Sequence
  Description of Artificial Sequence: Synthetic oligonucleotide
uucguaggucucucugacc

SEQ ID NO: 1126928 - RNA, 19 nt, Artificial Sequence
  Description of Artificial Sequence: Synthetic oligonucleotide
acacuuucgggaagcuagc

SEQ ID NO: 1126929 - RNA, 19 nt, Artificial Sequence
  Description of Artificial Sequence: Synthetic oligonucleotide
acgauaacucaaggcguac

SEQ ID NO: 1126930 - RNA, 19 nt, Artificial Sequence
  Description of Artificial Sequence: Synthetic oligonucleotide
gagagauuuaagucuugua

SEQ ID NO: 1126931 - RNA, 19 nt, Artificial Sequence
  Description of Artificial Sequence: Synthetic oligonucleotide
cuuuaugauuguagugaca

SEQ ID NO: 1126932 - RNA, 19 nt, Artificial Sequence
  Description of Artificial Sequence: Synthetic oligonucleotide
uggcccauccccgagggca

SEQ ID NO: 1126933 - RNA, 19 nt, Artificial Sequence
  Description of Artificial Sequence: Synthetic oligonucleotide
gcuagcauugaguucuaac

SEQ ID NO: 1126934 - RNA, 19 nt, Artificial Sequence
  Description of Artificial Sequence: Synthetic oligonucleotide
uggacuuaccauucuuguu

SEQ ID NO: 1126935 - RNA, 19 nt, Artificial Sequence
  Description of Artificial Sequence: Synthetic oligonucleotide
cauaccacugaccaacaua

SEQ ID NO: 1126936 - RNA, 19 nt, Artificial Sequence
  Description of Artificial Sequence: Synthetic oligonucleotide
agauuuguggggaaauuua

SEQ ID NO: 1126937 - RNA, 19 nt, Artificial Sequence
  Description of Artificial Sequence: Synthetic oligonucleotide
agaaaguggcugcacgaua

SEQ ID NO: 1126938 - RNA, 19 nt, Artificial Sequence
  Description of Artificial Sequence: Synthetic oligonucleotide
aucgucuagcuuugcccag

SEQ ID NO: 1126939 - RNA, 19 nt, Artificial Sequence
  Description of Artificial Sequence: Synthetic oligonucleotide
guggcugcacgauaacuca

SEQ ID NO: 1126940 - RNA, 19 nt, Artificial Sequence
  Description of Artificial Sequence: Synthetic oligonucleotide
cucaaggcguaccaauuca

SEQ ID NO: 1126941 - RNA, 19 nt, Artificial Sequence
  Description of Artificial Sequence: Synthetic oligonucleotide
cuggacaagagcacagcga

SEQ ID NO: 1126942 - RNA, 19 nt, Artificial Sequence
  Description of Artificial Sequence: Synthetic oligonucleotide
uaagauuuguggggaaauu

SEQ ID NO: 1126943 - RNA, 19 nt, Artificial Sequence
  Description of Artificial Sequence: Synthetic oligonucleotide
cugagguggcaguuuauca

SEQ ID NO: 1126944 - RNA, 19 nt, Artificial Sequence
  Description of Artificial Sequence: Synthetic oligonucleotide
ugggaacagaaggacacau

SEQ ID NO: 1126945 - RNA, 19 nt, Artificial Sequence
  Description of Artificial Sequence: Synthetic oligonucleotide
uugggagcuggcgugccag

SEQ ID NO: 1126946 - RNA, 19 nt, Artificial Sequence
  Description of Artificial Sequence: Synthetic oligonucleotide
caucgaggagggaaagauc

SEQ ID NO: 1126947 - RNA, 19 nt, Artificial Sequence
  Description of Artificial Sequence: Synthetic oligonucleotide
aacucaaggcguaccaauu

SEQ ID NO: 1126948 - RNA, 19 nt, Artificial Sequence
  Description of Artificial Sequence: Synthetic oligonucleotide
gcaaguuugggagcuggcg

SEQ ID NO: 1126949 - RNA, 19 nt, Artificial Sequence
  Description of Artificial Sequence: Synthetic oligonucleotide
ccgauagagaaugagccgc

SEQ ID NO: 1126950 - RNA, 19 nt, Artificial Sequence
  Description of Artificial Sequence: Synthetic oligonucleotide
aaauccuggcacggagaug

SEQ ID NO: 1126951 - RNA, 19 nt, Artificial Sequence
  Description of Artificial Sequence: Synthetic oligonucleotide
uuugggagcuggcgugcca

SEQ ID NO: 1126952 - RNA, 19 nt, Artificial Sequence
  Description of Artificial Sequence: Synthetic oligonucleotide
gaugagagauuuaagucuu

SEQ ID NO: 1126953 - RNA, 19 nt, Artificial Sequence
  Description of Artificial Sequence: Synthetic oligonucleotide
ugcuuaauacaagguuuaa

SEQ ID NO: 1126954 - RNA, 19 nt, Artificial Sequence
  Description of Artificial Sequence: Synthetic oligonucleotide
accagccaagguccaguuc

SEQ ID NO: 1126955 - RNA, 19 nt, Artificial Sequence
  Description of Artificial Sequence: Synthetic oligonucleotide
gggaaauuuaucugcuuaa

SEQ ID NO: 1126956 - RNA, 19 nt, Artificial Sequence
  Description of Artificial Sequence: Synthetic oligonucleotide
cugcuuaauacaagguuua

SEQ ID NO: 1126957 - RNA, 19 nt, Artificial Sequence
  Description of Artificial Sequence: Synthetic oligonucleotide
aagcacaacugcaucuaau

SEQ ID NO: 1126958 - RNA, 19 nt, Artificial Sequence
  Description of Artificial Sequence: Synthetic oligonucleotide
guaggauauaccuguugcu

SEQ ID NO: 1126959 - RNA, 19 nt, Artificial Sequence
  Description of Artificial Sequence: Synthetic oligonucleotide
caaggcguaccaauucaga

SEQ ID NO: 1126960 - RNA, 19 nt, Artificial Sequence
  Description of Artificial Sequence: Synthetic oligonucleotide
caggaugguaggucuccag

SEQ ID NO: 1126961 - RNA, 19 nt, Artificial Sequence
  Description of Artificial Sequence: Synthetic oligonucleotide
gaacggcuguaggauauac

SEQ ID NO: 1126962 - RNA, 19 nt, Artificial Sequence
  Description of Artificial Sequence: Synthetic oligonucleotide
cuguuagcuguaagaaaga

SEQ ID NO: 1126963 - RNA, 19 nt, Artificial Sequence
  Description of Artificial Sequence: Synthetic oligonucleotide
agaggaucgcagcaauguu

SEQ ID NO: 1126964 - RNA, 19 nt, Artificial Sequence
  Description of Artificial Sequence: Synthetic oligonucleotide
cuguaauauucuugcaucu

SEQ ID NO: 1126965 - RNA, 19 nt, Artificial Sequence
  Description of Artificial Sequence: Synthetic oligonucleotide
caguccaagacagguuaag

SEQ ID NO: 1126966 - RNA, 19 nt, Artificial Sequence
  Description of Artificial Sequence: Synthetic oligonucleotide
ggcuguaggauauaccugu

SEQ ID NO: 1126967 - RNA, 19 nt, Artificial Sequence
  Description of Artificial Sequence: Synthetic oligonucleotide
guauaagauuuguggggaa

SEQ ID NO: 1126968 - RNA, 19 nt, Artificial Sequence
  Description of Artificial Sequence: Synthetic oligonucleotide
cuggcuaucacaucauaau

SEQ ID NO: 1126969 - RNA, 19 nt, Artificial Sequence
  Description of Artificial Sequence: Synthetic oligonucleotide
uugcucuacuuuuguccga

SEQ ID NO: 1126970 - RNA, 19 nt, Artificial Sequence
  Description of Artificial Sequence: Synthetic oligonucleotide
ggggaaauuuaucugcuua

SEQ ID NO: 1126971 - RNA, 19 nt, Artificial Sequence
  Description of Artificial Sequence: Synthetic oligonucleotide
ccaucuuacuucagcuggg

SEQ ID NO: 1126972 - RNA, 19 nt, Artificial Sequence
  Description of Artificial Sequence: Synthetic oligonucleotide
agccacuggacaagagcac

SEQ ID NO: 1126973 - RNA, 19 nt, Artificial Sequence
  Description of Artificial Sequence: Synthetic oligonucleotide
cuauuuacuuccagucgua

SEQ ID NO: 1126974 - RNA, 19 nt, Artificial Sequence
  Description of Artificial Sequence: Synthetic oligonucleotide
cuuucgggaagcuagcauu

SEQ ID NO: 1126975 - RNA, 19 nt, Artificial Sequence
  Description of Artificial Sequence: Synthetic oligonucleotide
augaacggcuguaggauau

SEQ ID NO: 1126976 - RNA, 19 nt, Artificial Sequence
  Description of Artificial Sequence: Synthetic oligonucleotide
acuuaccauucuuguuccu

SEQ ID NO: 1126977 - RNA, 19 nt, Artificial Sequence
  Description of Artificial Sequence: Synthetic oligonucleotide
agugaagucuugagagaga

SEQ ID NO: 1126978 - RNA, 19 nt, Artificial Sequence
  Description of Artificial Sequence: Synthetic oligonucleotide
gcuggacuuaccauucuug

SEQ ID NO: 1126979 - RNA, 19 nt, Artificial Sequence
  Description of Artificial Sequence: Synthetic oligonucleotide
gggauuugccgaacaagcc

SEQ ID NO: 1126980 - RNA, 19 nt, Artificial Sequence
  Description of Artificial Sequence: Synthetic oligonucleotide
gccgccuaaggcuacauaa

SEQ ID NO: 1126981 - RNA, 19 nt, Artificial Sequence
  Description of Artificial Sequence: Synthetic oligonucleotide
ugcaucuaauucgguguaa

SEQ ID NO: 1126982 - RNA, 19 nt, Artificial Sequence
  Description of Artificial Sequence: Synthetic oligonucleotide
ucgcaaugacgcuggacuu

SEQ ID NO: 1126983 - RNA, 19 nt, Artificial Sequence
  Description of Artificial Sequence: Synthetic oligonucleotide
cacgauaacucaaggcgua

SEQ ID NO: 1126984 - RNA, 19 nt, Artificial Sequence
  Description of Artificial Sequence: Synthetic oligonucleotide
ggaagcuagcauugaguuc

SEQ ID NO: 1126985 - RNA, 19 nt, Artificial Sequence
  Description of Artificial Sequence: Synthetic oligonucleotide
ugagcucauaggguaguuu

SEQ ID NO: 1126986 - RNA, 19 nt, Artificial Sequence
  Description of Artificial Sequence: Synthetic oligonucleotide
cuggacuuaccauucuugu

SEQ ID NO: 1126987 - RNA, 19 nt, Artificial Sequence
  Description of Artificial Sequence: Synthetic oligonucleotide
caucuaauucgguguaaua

SEQ ID NO: 1126988 - RNA, 19 nt, Artificial Sequence
  Description of Artificial Sequence: Synthetic oligonucleotide
caaguuugggagcuggcgu

SEQ ID NO: 1126989 - RNA, 19 nt, Artificial Sequence
  Description of Artificial Sequence: Synthetic oligonucleotide
ggcuaucacaucauaaucu

SEQ ID NO: 1126990 - RNA, 19 nt, Artificial Sequence
  Description of Artificial Sequence: Synthetic oligonucleotide
ggauauaccuguugcucaa

SEQ ID NO: 1126991 - RNA, 19 nt, Artificial Sequence
  Description of Artificial Sequence: Synthetic oligonucleotide
ucgaggagggaaagaucuu

SEQ ID NO: 1126992 - RNA, 19 nt, Artificial Sequence
  Description of Artificial Sequence: Synthetic oligonucleotide
gaguucuaacacagcccug

SEQ ID NO: 1126993 - RNA, 19 nt, Artificial Sequence
  Description of Artificial Sequence: Synthetic oligonucleotide
cugcaagucugugcuaauc

SEQ ID NO: 1126994 - RNA, 19 nt, Artificial Sequence
  Description of Artificial Sequence: Synthetic oligonucleotide
ucgucuagcuuugcccagu

SEQ ID NO: 1126995 - RNA, 19 nt, Artificial Sequence
  Description of Artificial Sequence: Synthetic oligonucleotide
cuuggcaaugugaccgaaa

SEQ ID NO: 1126996 - RNA, 19 nt, Artificial Sequence
  Description of Artificial Sequence: Synthetic oligonucleotide
caugaacggcuguaggaua

SEQ ID NO: 1126997 - RNA, 19 nt, Artificial Sequence
  Description of Artificial Sequence: Synthetic oligonucleotide
cacggagauggaaccucug

SEQ ID NO: 1126998 - RNA, 19 nt, Artificial Sequence
  Description of Artificial Sequence: Synthetic oligonucleotide
ggcugcacgauaacucaag

SEQ ID NO: 1126999 - RNA, 19 nt, Artificial Sequence
  Description of Artificial Sequence: Synthetic oligonucleotide
ucacugaguaaagcucuuu

SEQ ID NO: 1127000 - RNA, 19 nt, Artificial Sequence
  Description of Artificial Sequence: Synthetic oligonucleotide
gcuaaucuacacaggucug

SEQ ID NO: 1127001 - RNA, 19 nt, Artificial Sequence
  Description of Artificial Sequence: Synthetic oligonucleotide
gcuuaauacaagguuuaaa

SEQ ID NO: 1127002 - RNA, 19 nt, Artificial Sequence
  Description of Artificial Sequence: Synthetic oligonucleotide
ggaagcauucaccuucgua

SEQ ID NO: 1127003 - RNA, 19 nt, Artificial Sequence
  Description of Artificial Sequence: Synthetic oligonucleotide
caaugacgcuggacuuacc

SEQ ID NO: 1127004 - RNA, 19 nt, Artificial Sequence
  Description of Artificial Sequence: Synthetic oligonucleotide
gguacaguuagaugccagu

SEQ ID NO: 1127005 - RNA, 19 nt, Artificial Sequence
  Description of Artificial Sequence: Synthetic oligonucleotide
gauauaccuguugcucaaa

SEQ ID NO: 1127006 - RNA, 19 nt, Artificial Sequence
  Description of Artificial Sequence: Synthetic oligonucleotide
ccuaauauauccaguugcu

SEQ ID NO: 1127007 - RNA, 19 nt, Artificial Sequence
  Description of Artificial Sequence: Synthetic oligonucleotide
gcaaugacgcuggacuuac

SEQ ID NO: 1127008 - RNA, 19 nt, Artificial Sequence
  Description of Artificial Sequence: Synthetic oligonucleotide
gggaagcuagcauugaguu

SEQ ID NO: 1127009 - RNA, 19 nt, Artificial Sequence
  Description of Artificial Sequence: Synthetic oligonucleotide
cgauagagaaugagccgcc

SEQ ID NO: 1127010 - RNA, 19 nt, Artificial Sequence
  Description of Artificial Sequence: Synthetic oligonucleotide
gauagagaaugagccgccu

SEQ ID NO: 1127011 - RNA, 19 nt, Artificial Sequence
  Description of Artificial Sequence: Synthetic oligonucleotide
uggcacggagauggaaccu

SEQ ID NO: 1127012 - RNA, 19 nt, Artificial Sequence
  Description of Artificial Sequence: Synthetic oligonucleotide
guaccaauucagacccaca

SEQ ID NO: 1127013 - RNA, 19 nt, Artificial Sequence
  Description of Artificial Sequence: Synthetic oligonucleotide
uuggcccauccccgagggc

SEQ ID NO: 1127014 - RNA, 19 nt, Artificial Sequence
  Description of Artificial Sequence: Synthetic oligonucleotide
gccgaacaagccagaaucc

SEQ ID NO: 1127015 - RNA, 19 nt, Artificial Sequence
  Description of Artificial Sequence: Synthetic oligonucleotide
acgcuggacuuaccauucu

SEQ ID NO: 1127016 - RNA, 19 nt, Artificial Sequence
  Description of Artificial Sequence: Synthetic oligonucleotide
cugcaucuaauucggugua

SEQ ID NO: 1127017 - RNA, 19 nt, Artificial Sequence
  Description of Artificial Sequence: Synthetic oligonucleotide
cacgagucacacauuccua

SEQ ID NO: 1127018 - RNA, 19 nt, Artificial Sequence
  Description of Artificial Sequence: Synthetic oligonucleotide
cuggcgugccagucuggug

SEQ ID NO: 1127019 - RNA, 19 nt, Artificial Sequence
  Description of Artificial Sequence: Synthetic oligonucleotide
ugaacggcuguaggauaua

SEQ ID NO: 1127020 - RNA, 19 nt, Artificial Sequence
  Description of Artificial Sequence: Synthetic oligonucleotide
uacccauuauuuggcccau

SEQ ID NO: 1127021 - RNA, 19 nt, Artificial Sequence
  Description of Artificial Sequence: Synthetic oligonucleotide
ccgccuaaggcuacauaac

SEQ ID NO: 1127022 - RNA, 19 nt, Artificial Sequence
  Description of Artificial Sequence: Synthetic oligonucleotide
gcucaaagguaaguuccac

SEQ ID NO: 1127023 - RNA, 19 nt, Artificial Sequence
  Description of Artificial Sequence: Synthetic oligonucleotide
gagcuuucgcaaugacgcu

SEQ ID NO: 1127024 - RNA, 19 nt, Artificial Sequence
  Description of Artificial Sequence: Synthetic oligonucleotide
uccuaucaugcuggcuauc

SEQ ID NO: 1127025 - RNA, 19 nt, Artificial Sequence
  Description of Artificial Sequence: Synthetic oligonucleotide
gugaaguaucgucuagcuu

SEQ ID NO: 1127026 - RNA, 19 nt, Artificial Sequence
  Description of Artificial Sequence: Synthetic oligonucleotide
cguaccaauucagacccac

SEQ ID NO: 1127027 - RNA, 19 nt, Artificial Sequence
  Description of Artificial Sequence: Synthetic oligonucleotide
ccuucguaggucucucuga

SEQ ID NO: 1127028 - RNA, 19 nt, Artificial Sequence
  Description of Artificial Sequence: Synthetic oligonucleotide
cugaugacugcuccaggau

SEQ ID NO: 1127029 - RNA, 19 nt, Artificial Sequence
  Description of Artificial Sequence: Synthetic oligonucleotide
cgauaacucaaggcguacc

SEQ ID NO: 1127030 - RNA, 19 nt, Artificial Sequence
  Description of Artificial Sequence: Synthetic oligonucleotide
gccacuggacaagagcaca

SEQ ID NO: 1127031 - RNA, 19 nt, Artificial Sequence
  Description of Artificial Sequence: Synthetic oligonucleotide
cacuuucgggaagcuagca

SEQ ID NO: 1127032 - RNA, 19 nt, Artificial Sequence
  Description of Artificial Sequence: Synthetic oligonucleotide
gguuuaaacuggcgagccu

SEQ ID NO: 1127033 - RNA, 19 nt, Artificial Sequence
  Description of Artificial Sequence: Synthetic oligonucleotide
agccgccuaaggcuacaua

SEQ ID NO: 1127034 - RNA, 19 nt, Artificial Sequence
  Description of Artificial Sequence: Synthetic oligonucleotide
aagcuagcauugaguucua

SEQ ID NO: 1127035 - RNA, 19 nt, Artificial Sequence
  Description of Artificial Sequence: Synthetic oligonucleotide
uggcgagccugggaagcau

SEQ ID NO: 1127036 - RNA, 19 nt, Artificial Sequence
  Description of Artificial Sequence: Synthetic oligonucleotide
agcuggcgugccagucugg

SEQ ID NO: 1127037 - RNA, 19 nt, Artificial Sequence
  Description of Artificial Sequence: Synthetic oligonucleotide
agcuagcauugaguucuaa

SEQ ID NO: 1127038 - RNA, 19 nt, Artificial Sequence
  Description of Artificial Sequence: Synthetic oligonucleotide
cacccagugcugcucugaa

SEQ ID NO: 1127039 - RNA, 19 nt, Artificial Sequence
  Description of Artificial Sequence: Synthetic oligonucleotide
guucuaacacagcccuguu

SEQ ID NO: 1127040 - RNA, 19 nt, Artificial Sequence
  Description of Artificial Sequence: Synthetic oligonucleotide
acaucacgagucacacauu

SEQ ID NO: 1127041 - RNA, 19 nt, Artificial Sequence
  Description of Artificial Sequence: Synthetic oligonucleotide
cagugcugcucugaagugu

SEQ ID NO: 1127042 - RNA, 19 nt, Artificial Sequence
  Description of Artificial Sequence: Synthetic oligonucleotide
cagcgagccuguagaaacu

SEQ ID NO: 1127043 - RNA, 19 nt, Artificial Sequence
  Description of Artificial Sequence: Synthetic oligonucleotide
gcaucuaauucgguguaau

SEQ ID NO: 1127044 - RNA, 19 nt, Artificial Sequence
  Description of Artificial Sequence: Synthetic oligonucleotide
gcacagcgagccuguagaa

SEQ ID NO: 1127045 - RNA, 19 nt, Artificial Sequence
  Description of Artificial Sequence: Synthetic oligonucleotide
cuuguagauuugggcacau

SEQ ID NO: 1127046 - RNA, 19 nt, Artificial Sequence
  Description of Artificial Sequence: Synthetic oligonucleotide
ccagucguauaagauuugu

SEQ ID NO: 1127047 - RNA, 19 nt, Artificial Sequence
  Description of Artificial Sequence: Synthetic oligonucleotide
ggcgugccagucuggugaa

SEQ ID NO: 1127048 - RNA, 19 nt, Artificial Sequence
  Description of Artificial Sequence: Synthetic oligonucleotide
gccuaaggcuacauaacuu

SEQ ID NO: 1127049 - RNA, 19 nt, Artificial Sequence
  Description of Artificial Sequence: Synthetic oligonucleotide
caccuucguaggucucucu

SEQ ID NO: 1127050 - RNA, 19 nt, Artificial Sequence
  Description of Artificial Sequence: Synthetic oligonucleotide
cgccuaaggcuacauaacu

SEQ ID NO: 1127051 - RNA, 19 nt, Artificial Sequence
  Description of Artificial Sequence: Synthetic oligonucleotide
ccgaacaagccagaauccu

SEQ ID NO: 1127052 - RNA, 19 nt, Artificial Sequence
  Description of Artificial Sequence: Synthetic oligonucleotide
gcauaccacugaccaacau

SEQ ID NO: 1127053 - RNA, 19 nt, Artificial Sequence
  Description of Artificial Sequence: Synthetic oligonucleotide
gcucuacuuuuguccgaua

SEQ ID NO: 1127054 - RNA, 19 nt, Artificial Sequence
  Description of Artificial Sequence: Synthetic oligonucleotide
ggaucgcagcaauguuggu

SEQ ID NO: 1127055 - RNA, 19 nt, Artificial Sequence
  Description of Artificial Sequence: Synthetic oligonucleotide
gcuggcgugccagucuggu

SEQ ID NO: 1127056 - RNA, 19 nt, Artificial Sequence
  Description of Artificial Sequence: Synthetic oligonucleotide
cguaggucucucugaccaa

SEQ ID NO: 1127057 - RNA, 19 nt, Artificial Sequence
  Description of Artificial Sequence: Synthetic oligonucleotide
ggcuccuaucaugcuggcu

SEQ ID NO: 1127058 - RNA, 19 nt, Artificial Sequence
  Description of Artificial Sequence: Synthetic oligonucleotide
gcuguaggauauaccuguu

SEQ ID NO: 1127059 - RNA, 19 nt, Artificial Sequence
  Description of Artificial Sequence: Synthetic oligonucleotide
gcguaccaauucagaccca

SEQ ID NO: 1127060 - RNA, 19 nt, Artificial Sequence
  Description of Artificial Sequence: Synthetic oligonucleotide
cgcaaugacgcuggacuua

SEQ ID NO: 1127061 - RNA, 19 nt, Artificial Sequence
  Description of Artificial Sequence: Synthetic oligonucleotide
aauuuguccagauuggugg

SEQ ID NO: 1127062 - RNA, 19 nt, Artificial Sequence
  Description of Artificial Sequence: Synthetic oligonucleotide
aaugacggcugcuucaugc

SEQ ID NO: 1127063 - RNA, 19 nt, Artificial Sequence
  Description of Artificial Sequence: Synthetic oligonucleotide
uuuagcaagucaaagacga

SEQ ID NO: 1127064 - RNA, 19 nt, Artificial Sequence
  Description of Artificial Sequence: Synthetic oligonucleotide
uaaggauccacaaacacug

SEQ ID NO: 1127065 - RNA, 19 nt, Artificial Sequence
  Description of Artificial Sequence: Synthetic oligonucleotide
acauauacacacuuccucc

SEQ ID NO: 1127066 - RNA, 19 nt, Artificial Sequence
  Description of Artificial Sequence: Synthetic oligonucleotide
caaguaauaagaugggucc

SEQ ID NO: 1127067 - RNA, 19 nt, Artificial Sequence
  Description of Artificial Sequence: Synthetic oligonucleotide
ugugguugcacauauacac

SEQ ID NO: 1127068 - RNA, 19 nt, Artificial Sequence
  Description of Artificial Sequence: Synthetic oligonucleotide
uugccuguuguccugaugg

SEQ ID NO: 1127069 - RNA, 19 nt, Artificial Sequence
  Description of Artificial Sequence: Synthetic oligonucleotide
ucaaagacgacaccuuccg

SEQ ID NO: 1127070 - RNA, 19 nt, Artificial Sequence
  Description of Artificial Sequence: Synthetic oligonucleotide
ucaaguaauaagauggguc

SEQ ID NO: 1127071 - RNA, 19 nt, Artificial Sequence
  Description of Artificial Sequence: Synthetic oligonucleotide
uuaaggucgcccuuguugg

SEQ ID NO: 1127072 - RNA, 19 nt, Artificial Sequence
  Description of Artificial Sequence: Synthetic oligonucleotide
uggaacaauguuuagcaag

SEQ ID NO: 1127073 - RNA, 19 nt, Artificial Sequence
  Description of Artificial Sequence: Synthetic oligonucleotide
uuucccguggaauaguggg

SEQ ID NO: 1127074 - RNA, 19 nt, Artificial Sequence
  Description of Artificial Sequence: Synthetic oligonucleotide
uggucaaaagguaagcggc

SEQ ID NO: 1127075 - RNA, 19 nt, Artificial Sequence
  Description of Artificial Sequence: Synthetic oligonucleotide
uucucaggugccuucaugg

SEQ ID NO: 1127076 - RNA, 19 nt, Artificial Sequence
  Description of Artificial Sequence: Synthetic oligonucleotide
ucaucagucaauagguccc

SEQ ID NO: 1127077 - RNA, 19 nt, Artificial Sequence
  Description of Artificial Sequence: Synthetic oligonucleotide
aaauccaagugucauuacu

SEQ ID NO: 1127078 - RNA, 19 nt, Artificial Sequence
  Description of Artificial Sequence: Synthetic oligonucleotide
gucauuacugccuaaaaca

SEQ ID NO: 1127079 - RNA, 19 nt, Artificial Sequence
  Description of Artificial Sequence: Synthetic oligonucleotide
ugucuugccuggaaaaggg

SEQ ID NO: 1127080 - RNA, 19 nt, Artificial Sequence
  Description of Artificial Sequence: Synthetic oligonucleotide
uaugugagagguuggggcg

SEQ ID NO: 1127081 - RNA, 19 nt, Artificial Sequence
  Description of Artificial Sequence: Synthetic oligonucleotide
acuucuuaagccauggaac

SEQ ID NO: 1127082 - RNA, 19 nt, Artificial Sequence
  Description of Artificial Sequence: Synthetic oligonucleotide
aggacggucaguuuugggg

SEQ ID NO: 1127083 - RNA, 19 nt, Artificial Sequence
  Description of Artificial Sequence: Synthetic oligonucleotide
aauauguguguugucagug

SEQ ID NO: 1127084 - RNA, 19 nt, Artificial Sequence
  Description of Artificial Sequence: Synthetic oligonucleotide
ugucagugaacacagagua

SEQ ID NO: 1127085 - RNA, 19 nt, Artificial Sequence
  Description of Artificial Sequence: Synthetic oligonucleotide
aagugaguguacuccgcgc

SEQ ID NO: 1127086 - RNA, 19 nt, Artificial Sequence
  Description of Artificial Sequence: Synthetic oligonucleotide
aaaauccaagugucauuac

SEQ ID NO: 1127087 - RNA, 19 nt, Artificial Sequence
  Description of Artificial Sequence: Synthetic oligonucleotide
ugucauuacugccuaaaac

SEQ ID NO: 1127088 - RNA, 19 nt, Artificial Sequence
  Description of Artificial Sequence: Synthetic oligonucleotide
uuggugucaggucacagug

SEQ ID NO: 1127089 - RNA, 19 nt, Artificial Sequence
  Description of Artificial Sequence: Synthetic oligonucleotide
guuaaggucgcccuuguug

SEQ ID NO: 1127090 - RNA, 19 nt, Artificial Sequence
  Description of Artificial Sequence: Synthetic oligonucleotide
ugugauaucuggcuuccug

SEQ ID NO: 1127091 - RNA, 19 nt, Artificial Sequence
  Description of Artificial Sequence: Synthetic oligonucleotide
uacuucuuaagccauggaa

SEQ ID NO: 1127092 - RNA, 19 nt, Artificial Sequence
  Description of Artificial Sequence: Synthetic oligonucleotide
agcuugaucagggauuucc

SEQ ID NO: 1127093 - RNA, 19 nt, Artificial Sequence
  Description of Artificial Sequence: Synthetic oligonucleotide
cauggaacaauguuuagca

SEQ ID NO: 1127094 - RNA, 19 nt, Artificial Sequence
  Description of Artificial Sequence: Synthetic oligonucleotide
aaacugguagcgcaguaca

SEQ ID NO: 1127095 - RNA, 19 nt, Artificial Sequence
  Description of Artificial Sequence: Synthetic oligonucleotide
aauccaagugucauuacug

SEQ ID NO: 1127096 - RNA, 19 nt, Artificial Sequence
  Description of Artificial Sequence: Synthetic oligonucleotide
auaauacuguuucuugcag

SEQ ID NO: 1127097 - RNA, 19 nt, Artificial Sequence
  Description of Artificial Sequence: Synthetic oligonucleotide
accugugaaagauggugcc

SEQ ID NO: 1127098 - RNA, 19 nt, Artificial Sequence
  Description of Artificial Sequence: Synthetic oligonucleotide
aucucaucuccuuugaacu

SEQ ID NO: 1127099 - RNA, 19 nt, Artificial Sequence
  Description of Artificial Sequence: Synthetic oligonucleotide
uucuccauagcugucagug

SEQ ID NO: 1127100 - RNA, 19 nt, Artificial Sequence
  Description of Artificial Sequence: Synthetic oligonucleotide
acaauauguguguugucag

SEQ ID NO: 1127101 - RNA, 19 nt, Artificial Sequence
  Description of Artificial Sequence: Synthetic oligonucleotide
gaagugaguguacuccgcg

SEQ ID NO: 1127102 - RNA, 19 nt, Artificial Sequence
  Description of Artificial Sequence: Synthetic oligonucleotide
acuacaguggucaaaaggu

SEQ ID NO: 1127103 - RNA, 19 nt, Artificial Sequence
  Description of Artificial Sequence: Synthetic oligonucleotide
aagauagugugcuucuuau

SEQ ID NO: 1127104 - RNA, 19 nt, Artificial Sequence
  Description of Artificial Sequence: Synthetic oligonucleotide
acugccuaaaacaggauuc

SEQ ID NO: 1127105 - RNA, 19 nt, Artificial Sequence
  Description of Artificial Sequence: Synthetic oligonucleotide
gauggugccgucauaauac

SEQ ID NO: 1127106 - RNA, 19 nt, Artificial Sequence
  Description of Artificial Sequence: Synthetic oligonucleotide
auguuuagcaagucaaaga

SEQ ID NO: 1127107 - RNA, 19 nt, Artificial Sequence
  Description of Artificial Sequence: Synthetic oligonucleotide
agucaaagacgacaccuuc

SEQ ID NO: 1127108 - RNA, 19 nt, Artificial Sequence
  Description of Artificial Sequence: Synthetic oligonucleotide
aggugaaggacgcacugac

SEQ ID NO: 1127109 - RNA, 19 nt, Artificial Sequence
  Description of Artificial Sequence: Synthetic oligonucleotide
cauaaggauccacaaacac

SEQ ID NO: 1127110 - RNA, 19 nt, Artificial Sequence
  Description of Artificial Sequence: Synthetic oligonucleotide
gaccuuagccucuggaucc

SEQ ID NO: 1127111 - RNA, 19 nt, Artificial Sequence
  Description of Artificial Sequence: Synthetic oligonucleotide
ggauucaugagccagccug

SEQ ID NO: 1127112 - RNA, 19 nt, Artificial Sequence
  Description of Artificial Sequence: Synthetic oligonucleotide
agcaagucaaagacgacac

SEQ ID NO: 1127113 - RNA, 19 nt, Artificial Sequence
  Description of Artificial Sequence: Synthetic oligonucleotide
aaaagggcucaucagucaa

SEQ ID NO: 1127114 - RNA, 19 nt, Artificial Sequence
  Description of Artificial Sequence: Synthetic oligonucleotide
ucuagguuaaggucgcccu

SEQ ID NO: 1127115 - RNA, 19 nt, Artificial Sequence
  Description of Artificial Sequence: Synthetic oligonucleotide
aguggucaaaagguaagcg

SEQ ID NO: 1127116 - RNA, 19 nt, Artificial Sequence
  Description of Artificial Sequence: Synthetic oligonucleotide
ucagcuugaccuuagccuc

SEQ ID NO: 1127117 - RNA, 19 nt, Artificial Sequence
  Description of Artificial Sequence: Synthetic oligonucleotide
caaaguucagcuugaucag

SEQ ID NO: 1127118 - RNA, 19 nt, Artificial Sequence
  Description of Artificial Sequence: Synthetic oligonucleotide
gaucacaaaguuccugaug

SEQ ID NO: 1127119 - RNA, 19 nt, Artificial Sequence
  Description of Artificial Sequence: Synthetic oligonucleotide
cauacuucuuaagccaugg

SEQ ID NO: 1127120 - RNA, 19 nt, Artificial Sequence
  Description of Artificial Sequence: Synthetic oligonucleotide
ugauaucuggcuuccugcc

SEQ ID NO: 1127121 - RNA, 19 nt, Artificial Sequence
  Description of Artificial Sequence: Synthetic oligonucleotide
agacuuguugguguugggc

SEQ ID NO: 1127122 - RNA, 19 nt, Artificial Sequence
  Description of Artificial Sequence: Synthetic oligonucleotide
gguguguagccucacauag

SEQ ID NO: 1127123 - RNA, 19 nt, Artificial Sequence
  Description of Artificial Sequence: Synthetic oligonucleotide
uguaugugagagguugggg

SEQ ID NO: 1127124 - RNA, 19 nt, Artificial Sequence
  Description of Artificial Sequence: Synthetic oligonucleotide
ugguugcacauauacacac

SEQ ID NO: 1127125 - RNA, 19 nt, Artificial Sequence
  Description of Artificial Sequence: Synthetic oligonucleotide
uguugucgcuuccccaugg

SEQ ID NO: 1127126 - RNA, 19 nt, Artificial Sequence
  Description of Artificial Sequence: Synthetic oligonucleotide
cauaauacuguuucuugca

SEQ ID NO: 1127127 - RNA, 19 nt, Artificial Sequence
  Description of Artificial Sequence: Synthetic oligonucleotide
ugucaggucacagugcagc

SEQ ID NO: 1127128 - RNA, 19 nt, Artificial Sequence
  Description of Artificial Sequence: Synthetic oligonucleotide
agagagagacuacaguggu

SEQ ID NO: 1127129 - RNA, 19 nt, Artificial Sequence
  Description of Artificial Sequence: Synthetic oligonucleotide
uucaaaauccaagugucau

SEQ ID NO: 1127130 - RNA, 19 nt, Artificial Sequence
  Description of Artificial Sequence: Synthetic oligonucleotide
cacauauacacacuuccuc

SEQ ID NO: 1127131 - RNA, 19 nt, Artificial Sequence
  Description of Artificial Sequence: Synthetic oligonucleotide
uagcaagucaaagacgaca

SEQ ID NO: 1127132 - RNA, 19 nt, Artificial Sequence
  Description of Artificial Sequence: Synthetic oligonucleotide
uguaccuguggggucaccg

SEQ ID NO: 1127133 - RNA, 19 nt, Artificial Sequence
  Description of Artificial Sequence: Synthetic oligonucleotide
ugcuucuuauccagguaag

SEQ ID NO: 1127134 - RNA, 19 nt, Artificial Sequence
  Description of Artificial Sequence: Synthetic oligonucleotide
auggaccugugaaagaugg

SEQ ID NO: 1127135 - RNA, 19 nt, Artificial Sequence
  Description of Artificial Sequence: Synthetic oligonucleotide
acaaacacugugguugcac

SEQ ID NO: 1127136 - RNA, 19 nt, Artificial Sequence
  Description of Artificial Sequence: Synthetic oligonucleotide
agauagugugcuucuuauc

SEQ ID NO: 1127137 - RNA, 19 nt, Artificial Sequence
  Description of Artificial Sequence: Synthetic oligonucleotide
cuucuuaagccauggaaca

SEQ ID NO: 1127138 - RNA, 19 nt, Artificial Sequence
  Description of Artificial Sequence: Synthetic oligonucleotide
auaaggauccacaaacacu

SEQ ID NO: 1127139 - RNA, 19 nt, Artificial Sequence
  Description of Artificial Sequence: Synthetic oligonucleotide
caugcguggucucagguac

SEQ ID NO: 1127140 - RNA, 19 nt, Artificial Sequence
  Description of Artificial Sequence: Synthetic oligonucleotide
gaugucuugccuggaaaag

SEQ ID NO: 1127141 - RNA, 19 nt, Artificial Sequence
  Description of Artificial Sequence: Synthetic oligonucleotide
aacccguccgaagauagug

SEQ ID NO: 1127142 - RNA, 19 nt, Artificial Sequence
  Description of Artificial Sequence: Synthetic oligonucleotide
ucagucaauaggucccuca

SEQ ID NO: 1127143 - RNA, 19 nt, Artificial Sequence
  Description of Artificial Sequence: Synthetic oligonucleotide
uccuguagugucucucggg

SEQ ID NO: 1127144 - RNA, 19 nt, Artificial Sequence
  Description of Artificial Sequence: Synthetic oligonucleotide
agcgcaguacaucuucauc

SEQ ID NO: 1127145 - RNA, 19 nt, Artificial Sequence
  Description of Artificial Sequence: Synthetic oligonucleotide
cuuaggacggucaguuuug

SEQ ID NO: 1127146 - RNA, 19 nt, Artificial Sequence
  Description of Artificial Sequence: Synthetic oligonucleotide
agaguacagcacuggacag

SEQ ID NO: 1127147 - RNA, 19 nt, Artificial Sequence
  Description of Artificial Sequence: Synthetic oligonucleotide
gggcucaucagucaauagg

SEQ ID NO: 1127148 - RNA, 19 nt, Artificial Sequence
  Description of Artificial Sequence: Synthetic oligonucleotide
aguaauaagauggguccug

SEQ ID NO: 1127149 - RNA, 19 nt, Artificial Sequence
  Description of Artificial Sequence: Synthetic oligonucleotide
ugaugucuugccuggaaaa

SEQ ID NO: 1127150 - RNA, 19 nt, Artificial Sequence
  Description of Artificial Sequence: Synthetic oligonucleotide
auacacacuuccuccuuag

SEQ ID NO: 1127151 - RNA, 19 nt, Artificial Sequence
  Description of Artificial Sequence: Synthetic oligonucleotide
ugggauuggucccauacuu

SEQ ID NO: 1127152 - RNA, 19 nt, Artificial Sequence
  Description of Artificial Sequence: Synthetic oligonucleotide
uugaucagggauuucccau

SEQ ID NO: 1127153 - RNA, 19 nt, Artificial Sequence
  Description of Artificial Sequence: Synthetic oligonucleotide
agucaauaggucccucaag

SEQ ID NO: 1127154 - RNA, 19 nt, Artificial Sequence
  Description of Artificial Sequence: Synthetic oligonucleotide
auagguguagacauugccu

SEQ ID NO: 1127155 - RNA, 19 nt, Artificial Sequence
  Description of Artificial Sequence: Synthetic oligonucleotide
agugaguguacuccgcgca

SEQ ID NO: 1127156 - RNA, 19 nt, Artificial Sequence
  Description of Artificial Sequence: Synthetic oligonucleotide
accgcccuggaucacaaag

SEQ ID NO: 1127157 - RNA, 19 nt, Artificial Sequence
  Description of Artificial Sequence: Synthetic oligonucleotide
augucuugccuggaaaagg

SEQ ID NO: 1127158 - RNA, 19 nt, Artificial Sequence
  Description of Artificial Sequence: Synthetic oligonucleotide
auggccacaauaugugugu

SEQ ID NO: 1127159 - RNA, 19 nt, Artificial Sequence
  Description of Artificial Sequence: Synthetic oligonucleotide
acaggauucaugagccagc

SEQ ID NO: 1127160 - RNA, 19 nt, Artificial Sequence
  Description of Artificial Sequence: Synthetic oligonucleotide
auagugugcuucuuaucca

SEQ ID NO: 1127161 - RNA, 19 nt, Artificial Sequence
  Description of Artificial Sequence: Synthetic oligonucleotide
guuguucuucacauggaag

SEQ ID NO: 1127162 - RNA, 19 nt, Artificial Sequence
  Description of Artificial Sequence: Synthetic oligonucleotide
uacugccuaaaacaggauu

SEQ ID NO: 1127163 - RNA, 19 nt, Artificial Sequence
  Description of Artificial Sequence: Synthetic oligonucleotide
acugguagcgcaguacauc

SEQ ID NO: 1127164 - RNA, 19 nt, Artificial Sequence
  Description of Artificial Sequence: Synthetic oligonucleotide
augacggcugcuucaugcg

SEQ ID NO: 1127165 - RNA, 19 nt, Artificial Sequence
  Description of Artificial Sequence: Synthetic oligonucleotide
uggaauagugggcagcauu

SEQ ID NO: 1127166 - RNA, 19 nt, Artificial Sequence
  Description of Artificial Sequence: Synthetic oligonucleotide
acgaacccaagucggcccc

SEQ ID NO: 1127167 - RNA, 19 nt, Artificial Sequence
  Description of Artificial Sequence: Synthetic oligonucleotide
cucguuucguggcugcugg

SEQ ID NO: 1127168 - RNA, 19 nt, Artificial Sequence
  Description of Artificial Sequence: Synthetic oligonucleotide
agcgaaaugugaugaagaa

SEQ ID NO: 1127169 - RNA, 19 nt, Artificial Sequence
  Description of Artificial Sequence: Synthetic oligonucleotide
ugaauuuguccagauuggu

SEQ ID NO: 1127170 - RNA, 19 nt, Artificial Sequence
  Description of Artificial Sequence: Synthetic oligonucleotide
acaggagcgaaaugugaug

SEQ ID NO: 1127171 - RNA, 19 nt, Artificial Sequence
  Description of Artificial Sequence: Synthetic oligonucleotide
auauguguguugucaguga

SEQ ID NO: 1127172 - RNA, 19 nt, Artificial Sequence
  Description of Artificial Sequence: Synthetic oligonucleotide
ucaaaagguaagcggcgaa

SEQ ID NO: 1127173 - RNA, 19 nt, Artificial Sequence
  Description of Artificial Sequence: Synthetic oligonucleotide
gaaaagggcucaucaguca

SEQ ID NO: 1127174 - RNA, 19 nt, Artificial Sequence
  Description of Artificial Sequence: Synthetic oligonucleotide
ugauggaccugugaaagau

SEQ ID NO: 1127175 - RNA, 19 nt, Artificial Sequence
  Description of Artificial Sequence: Synthetic oligonucleotide
ucccucaaguucuuggccu

SEQ ID NO: 1127176 - RNA, 19 nt, Artificial Sequence
  Description of Artificial Sequence: Synthetic oligonucleotide
caucagccuccucauaagg

SEQ ID NO: 1127177 - RNA, 19 nt, Artificial Sequence
  Description of Artificial Sequence: Synthetic oligonucleotide
acuugucugugugauaucu

SEQ ID NO: 1127178 - RNA, 19 nt, Artificial Sequence
  Description of Artificial Sequence: Synthetic oligonucleotide
gacgaacccaagucggccc

SEQ ID NO: 1127179 - RNA, 19 nt, Artificial Sequence
  Description of Artificial Sequence: Synthetic oligonucleotide
ucuuaagccauggaacaau

SEQ ID NO: 1127180 - RNA, 19 nt, Artificial Sequence
  Description of Artificial Sequence: Synthetic oligonucleotide
gauucaugagccagccugc

SEQ ID NO: 1127181 - RNA, 19 nt, Artificial Sequence
  Description of Artificial Sequence: Synthetic oligonucleotide
cacaauauguguguuguca

SEQ ID NO: 1127182 - RNA, 19 nt, Artificial Sequence
  Description of Artificial Sequence: Synthetic oligonucleotide
agacauugccuguuguccu

SEQ ID NO: 1127183 - RNA, 19 nt, Artificial Sequence
  Description of Artificial Sequence: Synthetic oligonucleotide
uaagcacaggagcgaaaug

SEQ ID NO: 1127184 - RNA, 19 nt, Artificial Sequence
  Description of Artificial Sequence: Synthetic oligonucleotide
ccagguaagcacaggagcg

SEQ ID NO: 1127185 - RNA, 19 nt, Artificial Sequence
  Description of Artificial Sequence: Synthetic oligonucleotide
gaaauuggaaacauugaau

SEQ ID NO: 1127186 - RNA, 19 nt, Artificial Sequence
  Description of Artificial Sequence: Synthetic oligonucleotide
auggaagaaauuggaaaca

SEQ ID NO: 1127187 - RNA, 19 nt, Artificial Sequence
  Description of Artificial Sequence: Synthetic oligonucleotide
ugaguguacuccgcgcagg

SEQ ID NO: 1127188 - RNA, 19 nt, Artificial Sequence
  Description of Artificial Sequence: Synthetic oligonucleotide
gauuggugggguccugcag

SEQ ID NO: 1127189 - RNA, 19 nt, Artificial Sequence
  Description of Artificial Sequence: Synthetic oligonucleotide
cuugccuggaaaagggcuc

SEQ ID NO: 1127190 - RNA, 19 nt, Artificial Sequence
  Description of Artificial Sequence: Synthetic oligonucleotide
uuucguggcugcuggguug

SEQ ID NO: 1127191 - RNA, 19 nt, Artificial Sequence
  Description of Artificial Sequence: Synthetic oligonucleotide
gagacuacaguggucaaaa

SEQ ID NO: 1127192 - RNA, 19 nt, Artificial Sequence
  Description of Artificial Sequence: Synthetic oligonucleotide
gaagauagugugcuucuua

SEQ ID NO: 1127193 - RNA, 19 nt, Artificial Sequence
  Description of Artificial Sequence: Synthetic oligonucleotide
gucaauaggucccucaagu

SEQ ID NO: 1127194 - RNA, 19 nt, Artificial Sequence
  Description of Artificial Sequence: Synthetic oligonucleotide
uguagagcuccuguagugu

SEQ ID NO: 1127195 - RNA, 19 nt, Artificial Sequence
  Description of Artificial Sequence: Synthetic oligonucleotide
uccgaagauagugugcuuc

SEQ ID NO: 1127196 - RNA, 19 nt, Artificial Sequence
  Description of Artificial Sequence: Synthetic oligonucleotide
cugcgacgaacccaagucg

SEQ ID NO: 1127197 - RNA, 19 nt, Artificial Sequence
  Description of Artificial Sequence: Synthetic oligonucleotide
guagacauugccuguuguc

SEQ ID NO: 1127198 - RNA, 19 nt, Artificial Sequence
  Description of Artificial Sequence: Synthetic oligonucleotide
gugguacugcccuucacug

SEQ ID NO: 1127199 - RNA, 19 nt, Artificial Sequence
  Description of Artificial Sequence: Synthetic oligonucleotide
guugauggcucuuccucug

SEQ ID NO: 1127200 - RNA, 19 nt, Artificial Sequence
  Description of Artificial Sequence: Synthetic oligonucleotide
uucaugguggcugcuaaaa

SEQ ID NO: 1127201 - RNA, 19 nt, Artificial Sequence
  Description of Artificial Sequence: Synthetic oligonucleotide
uucccguggaauagugggc

SEQ ID NO: 1127202 - RNA, 19 nt, Artificial Sequence
  Description of Artificial Sequence: Synthetic oligonucleotide
ucaauaggucccucaaguu

SEQ ID NO: 1127203 - RNA, 19 nt, Artificial Sequence
  Description of Artificial Sequence: Synthetic oligonucleotide
gcaguagaggugaaggacg

SEQ ID NO: 1127204 - RNA, 19 nt, Artificial Sequence
  Description of Artificial Sequence: Synthetic oligonucleotide
uagguuaaggucgcccuug

SEQ ID NO: 1127205 - RNA, 19 nt, Artificial Sequence
  Description of Artificial Sequence: Synthetic oligonucleotide
aacccaagucggccccagc

SEQ ID NO: 1127206 - RNA, 19 nt, Artificial Sequence
  Description of Artificial Sequence: Synthetic oligonucleotide
agcucuagguuaaggucgc

SEQ ID NO: 1127207 - RNA, 19 nt, Artificial Sequence
  Description of Artificial Sequence: Synthetic oligonucleotide
cuguaugugagagguuggg

SEQ ID NO: 1127208 - RNA, 19 nt, Artificial Sequence
  Description of Artificial Sequence: Synthetic oligonucleotide
gagcgaaaugugaugaaga

SEQ ID NO: 1127209 - RNA, 19 nt, Artificial Sequence
  Description of Artificial Sequence: Synthetic oligonucleotide
gagacuuguugguguuggg

SEQ ID NO: 1127210 - RNA, 19 nt, Artificial Sequence
  Description of Artificial Sequence: Synthetic oligonucleotide
uuaggacggucaguuuugg

SEQ ID NO: 1127211 - RNA, 19 nt, Artificial Sequence
  Description of Artificial Sequence: Synthetic oligonucleotide
gccgucauaauacuguuuc

SEQ ID NO: 1127212 - RNA, 19 nt, Artificial Sequence
  Description of Artificial Sequence: Synthetic oligonucleotide
gauaucuggcuuccugcca

SEQ ID NO: 1127213 - RNA, 19 nt, Artificial Sequence
  Description of Artificial Sequence: Synthetic oligonucleotide
guguacuccgcgcagguga

SEQ ID NO: 1127214 - RNA, 19 nt, Artificial Sequence
  Description of Artificial Sequence: Synthetic oligonucleotide
uaggacggucaguuuuggg

SEQ ID NO: 1127215 - RNA, 19 nt, Artificial Sequence
  Description of Artificial Sequence: Synthetic oligonucleotide
ugaaaggcuugccccagua

SEQ ID NO: 1127216 - RNA, 19 nt, Artificial Sequence
  Description of Artificial Sequence: Synthetic oligonucleotide
ucccaucaaguuucucucc

SEQ ID NO: 1127217 - RNA, 19 nt, Artificial Sequence
  Description of Artificial Sequence: Synthetic oligonucleotide
cucuagguuaaggucgccc

SEQ ID NO: 1127218 - RNA, 19 nt, Artificial Sequence
  Description of Artificial Sequence: Synthetic oligonucleotide
acaacccguccgaagauag

SEQ ID NO: 1127219 - RNA, 19 nt, Artificial Sequence
  Description of Artificial Sequence: Synthetic oligonucleotide
ucgggucucagcauuugua

SEQ ID NO: 1127220 - RNA, 19 nt, Artificial Sequence
  Description of Artificial Sequence: Synthetic oligonucleotide
ugauggcucuuccucugcu

SEQ ID NO: 1127221 - RNA, 19 nt, Artificial Sequence
  Description of Artificial Sequence: Synthetic oligonucleotide
ucccguggaauagugggca

SEQ ID NO: 1127222 - RNA, 19 nt, Artificial Sequence
  Description of Artificial Sequence: Synthetic oligonucleotide
cccaguaggacucuccacc

SEQ ID NO: 1127223 - RNA, 19 nt, Artificial Sequence
  Description of Artificial Sequence: Synthetic oligonucleotide
uggugccgucauaauacug

SEQ ID NO: 1127224 - RNA, 19 nt, Artificial Sequence
  Description of Artificial Sequence: Synthetic oligonucleotide
ggucaaaagguaagcggcg

SEQ ID NO: 1127225 - RNA, 19 nt, Artificial Sequence
  Description of Artificial Sequence: Synthetic oligonucleotide
uugucgcuuccccauggcu

SEQ ID NO: 1127226 - RNA, 19 nt, Artificial Sequence
  Description of Artificial Sequence: Synthetic oligonucleotide
uggggcggaacucaucuuu

SEQ ID NO: 1127227 - RNA, 19 nt, Artificial Sequence
  Description of Artificial Sequence: Synthetic oligonucleotide
agccgugcugguugauggc

SEQ ID NO: 1127228 - RNA, 19 nt, Artificial Sequence
  Description of Artificial Sequence: Synthetic oligonucleotide
ucuccauagcugucagugu

SEQ ID NO: 1127229 - RNA, 19 nt, Artificial Sequence
  Description of Artificial Sequence: Synthetic oligonucleotide
gaccuuucccguggaauag

SEQ ID NO: 1127230 - RNA, 19 nt, Artificial Sequence
  Description of Artificial Sequence: Synthetic oligonucleotide
gauggaccugugaaagaug

SEQ ID NO: 1127231 - RNA, 19 nt, Artificial Sequence
  Description of Artificial Sequence: Synthetic oligonucleotide
aggacgcacugaccuuucc

SEQ ID NO: 1127232 - RNA, 19 nt, Artificial Sequence
  Description of Artificial Sequence: Synthetic oligonucleotide
acacugugguugcacauau

SEQ ID NO: 1127233 - RNA, 19 nt, Artificial Sequence
  Description of Artificial Sequence: Synthetic oligonucleotide
aaggucgcccuuguuggug

SEQ ID NO: 1127234 - RNA, 19 nt, Artificial Sequence
  Description of Artificial Sequence: Synthetic oligonucleotide
agacuacaguggucaaaag

SEQ ID NO: 1127235 - RNA, 19 nt, Artificial Sequence
  Description of Artificial Sequence: Synthetic oligonucleotide
aacacugugguugcacaua

SEQ ID NO: 1127236 - RNA, 19 nt, Artificial Sequence
  Description of Artificial Sequence: Synthetic oligonucleotide
acccaagucggccccagca

SEQ ID NO: 1127237 - RNA, 19 nt, Artificial Sequence
  Description of Artificial Sequence: Synthetic oligonucleotide
ucagcuugaucagggauuu

SEQ ID NO: 1127238 - RNA, 19 nt, Artificial Sequence
  Description of Artificial Sequence: Synthetic oligonucleotide
gcgcaguacaucuucauca

SEQ ID NO: 1127239 - RNA, 19 nt, Artificial Sequence
  Description of Artificial Sequence: Synthetic oligonucleotide
uucuuaagccauggaacaa

SEQ ID NO: 1127240 - RNA, 19 nt, Artificial Sequence
  Description of Artificial Sequence: Synthetic oligonucleotide
gugaguguacuccgcgcag

SEQ ID NO: 1127241 - RNA, 19 nt, Artificial Sequence
  Description of Artificial Sequence: Synthetic oligonucleotide
caggauucaugagccagcc

SEQ ID NO: 1127242 - RNA, 19 nt, Artificial Sequence
  Description of Artificial Sequence: Synthetic oligonucleotide
ggagcgaaaugugaugaag

SEQ ID NO: 1127243 - RNA, 19 nt, Artificial Sequence
  Description of Artificial Sequence: Synthetic oligonucleotide
caguggucaaaagguaagc

SEQ ID NO: 1127244 - RNA, 19 nt, Artificial Sequence
  Description of Artificial Sequence: Synthetic oligonucleotide
auacuucuuaagccaugga

SEQ ID NO: 1127245 - RNA, 19 nt, Artificial Sequence
  Description of Artificial Sequence: Synthetic oligonucleotide
ucaaugacggcugcuucau

SEQ ID NO: 1127246 - RNA, 19 nt, Artificial Sequence
  Description of Artificial Sequence: Synthetic oligonucleotide
ggugucaggucacagugca

SEQ ID NO: 1127247 - RNA, 19 nt, Artificial Sequence
  Description of Artificial Sequence: Synthetic oligonucleotide
ugugaaagauggugccguc

SEQ ID NO: 1127248 - RNA, 19 nt, Artificial Sequence
  Description of Artificial Sequence: Synthetic oligonucleotide
auggaacaauguuuagcaa

SEQ ID NO: 1127249 - RNA, 19 nt, Artificial Sequence
  Description of Artificial Sequence: Synthetic oligonucleotide
uacuccgcgcaggugaugu

SEQ ID NO: 1127250 - RNA, 19 nt, Artificial Sequence
  Description of Artificial Sequence: Synthetic oligonucleotide
gguagcgcaguacaucuuc

SEQ ID NO: 1127251 - RNA, 19 nt, Artificial Sequence
  Description of Artificial Sequence: Synthetic oligonucleotide
ugacggcugcuucaugcgu

SEQ ID NO: 1127252 - RNA, 19 nt, Artificial Sequence
  Description of Artificial Sequence: Synthetic oligonucleotide
ugguguguagccucacaua

SEQ ID NO: 1127253 - RNA, 19 nt, Artificial Sequence
  Description of Artificial Sequence: Synthetic oligonucleotide
aagggcucaucagucaaua

SEQ ID NO: 1127254 - RNA, 19 nt, Artificial Sequence
  Description of Artificial Sequence: Synthetic oligonucleotide
ggaauagugggcagcauuc

SEQ ID NO: 1127255 - RNA, 19 nt, Artificial Sequence
  Description of Artificial Sequence: Synthetic oligonucleotide
uaauaagauggguccuguu

SEQ ID NO: 1127256 - RNA, 19 nt, Artificial Sequence
  Description of Artificial Sequence: Synthetic oligonucleotide
gcugggauuggucccauac

SEQ ID NO: 1127257 - RNA, 19 nt, Artificial Sequence
  Description of Artificial Sequence: Synthetic oligonucleotide
cuugaccuuagccucugga

SEQ ID NO: 1127258 - RNA, 19 nt, Artificial Sequence
  Description of Artificial Sequence: Synthetic oligonucleotide
gcugcgacgaacccaaguc

SEQ ID NO: 1127259 - RNA, 19 nt, Artificial Sequence
  Description of Artificial Sequence: Synthetic oligonucleotide
gccuguaugugagagguug

SEQ ID NO: 1127260 - RNA, 19 nt, Artificial Sequence
  Description of Artificial Sequence: Synthetic oligonucleotide
guaccuguggggucaccgc

SEQ ID NO: 1127261 - RNA, 19 nt, Artificial Sequence
  Description of Artificial Sequence: Synthetic oligonucleotide
uuacugccuaaaacaggau

SEQ ID NO: 1127262 - RNA, 19 nt, Artificial Sequence
  Description of Artificial Sequence: Synthetic oligonucleotide
auugcugggauugguccca

SEQ ID NO: 1127263 - RNA, 19 nt, Artificial Sequence
  Description of Artificial Sequence: Synthetic oligonucleotide
uugaaaggcuugccccagu

SEQ ID NO: 1127264 - RNA, 19 nt, Artificial Sequence
  Description of Artificial Sequence: Synthetic oligonucleotide
gaacaauguuuagcaaguc

SEQ ID NO: 1127265 - RNA, 19 nt, Artificial Sequence
  Description of Artificial Sequence: Synthetic oligonucleotide
uccgcgcaggugauguaca

SEQ ID NO: 1127266 - RNA, 19 nt, Artificial Sequence
  Description of Artificial Sequence: Synthetic oligonucleotide
cacggccuguaugugagag

SEQ ID NO: 1127267 - RNA, 19 nt, Artificial Sequence
  Description of Artificial Sequence: Synthetic oligonucleotide
aggcuugccccaguaggac

SEQ ID NO: 1127268 - RNA, 19 nt, Artificial Sequence
  Description of Artificial Sequence: Synthetic oligonucleotide
agccauggaacaauguuua

SEQ ID NO: 1127269 - RNA, 19 nt, Artificial Sequence
  Description of Artificial Sequence: Synthetic oligonucleotide
uggcucagcuugaccuuag

SEQ ID NO: 1127270 - RNA, 19 nt, Artificial Sequence
  Description of Artificial Sequence: Synthetic oligonucleotide
gcucagcuugaccuuagcc

SEQ ID NO: 1127271 - RNA, 19 nt, Artificial Sequence
  Description of Artificial Sequence: Synthetic oligonucleotide
aaggacgcacugaccuuuc

SEQ ID NO: 1127272 - RNA, 19 nt, Artificial Sequence
  Description of Artificial Sequence: Synthetic oligonucleotide
ggcaguagaggugaaggac

SEQ ID NO: 1127273 - RNA, 19 nt, Artificial Sequence
  Description of Artificial Sequence: Synthetic oligonucleotide
ucguuucguggcugcuggg

SEQ ID NO: 1127274 - RNA, 19 nt, Artificial Sequence
  Description of Artificial Sequence: Synthetic oligonucleotide
guugucgcuuccccauggc

SEQ ID NO: 1127275 - RNA, 19 nt, Artificial Sequence
  Description of Artificial Sequence: Synthetic oligonucleotide
caggagcgaaaugugauga

SEQ ID NO: 1127276 - RNA, 19 nt, Artificial Sequence
  Description of Artificial Sequence: Synthetic oligonucleotide
aagugucauuacugccuaa

SEQ ID NO: 1127277 - RNA, 19 nt, Artificial Sequence
  Description of Artificial Sequence: Synthetic oligonucleotide
aaagggcucaucagucaau

SEQ ID NO: 1127278 - RNA, 19 nt, Artificial Sequence
  Description of Artificial Sequence: Synthetic oligonucleotide
uguugggccccgaguuggc

SEQ ID NO: 1127279 - RNA, 19 nt, Artificial Sequence
  Description of Artificial Sequence: Synthetic oligonucleotide
acaaacugguagcgcagua

SEQ ID NO: 1127280 - RNA, 19 nt, Artificial Sequence
  Description of Artificial Sequence: Synthetic oligonucleotide
aacaacccguccgaagaua

SEQ ID NO: 1127281 - RNA, 19 nt, Artificial Sequence
  Description of Artificial Sequence: Synthetic oligonucleotide
gucaaaagguaagcggcga

SEQ ID NO: 1127282 - RNA, 19 nt, Artificial Sequence
  Description of Artificial Sequence: Synthetic oligonucleotide
ugggcaaucugggcaucag

SEQ ID NO: 1127283 - RNA, 19 nt, Artificial Sequence
  Description of Artificial Sequence: Synthetic oligonucleotide
cuguagugucucucggguc

SEQ ID NO: 1127284 - RNA, 19 nt, Artificial Sequence
  Description of Artificial Sequence: Synthetic oligonucleotide
gacggucaguuuugggguc

SEQ ID NO: 1127285 - RNA, 19 nt, Artificial Sequence
  Description of Artificial Sequence: Synthetic oligonucleotide
gugucauuacugccuaaaa

SEQ ID NO: 1127286 - RNA, 19 nt, Artificial Sequence
  Description of Artificial Sequence: Synthetic oligonucleotide
uaaggucgcccuuguuggu

SEQ ID NO: 1127287 - RNA, 19 nt, Artificial Sequence
  Description of Artificial Sequence: Synthetic oligonucleotide
ggacgcacugaccuuuccc

SEQ ID NO: 1127288 - RNA, 19 nt, Artificial Sequence
  Description of Artificial Sequence: Synthetic oligonucleotide
cucugcugcucguuucgug

SEQ ID NO: 1127289 - RNA, 19 nt, Artificial Sequence
  Description of Artificial Sequence: Synthetic oligonucleotide
cuacaguggucaaaaggua

SEQ ID NO: 1127290 - RNA, 19 nt, Artificial Sequence
  Description of Artificial Sequence: Synthetic oligonucleotide
cugguagcgcaguacaucu

SEQ ID NO: 1127291 - RNA, 19 nt, Artificial Sequence
  Description of Artificial Sequence: Synthetic oligonucleotide
agagacuacaguggucaaa

SEQ ID NO: 1127292 - RNA, 19 nt, Artificial Sequence
  Description of Artificial Sequence: Synthetic oligonucleotide
uagcgcaguacaucuucau

SEQ ID NO: 1127293 - RNA, 19 nt, Artificial Sequence
  Description of Artificial Sequence: Synthetic oligonucleotide
guugguguguagccucaca

SEQ ID NO: 1127294 - RNA, 19 nt, Artificial Sequence
  Description of Artificial Sequence: Synthetic oligonucleotide
ggaacaauguuuagcaagu

SEQ ID NO: 1127295 - RNA, 19 nt, Artificial Sequence
  Description of Artificial Sequence: Synthetic oligonucleotide
aaggauccacaaacacugu

SEQ ID NO: 1127296 - RNA, 19 nt, Artificial Sequence
  Description of Artificial Sequence: Synthetic oligonucleotide
gagguuggggcggaacuca

SEQ ID NO: 1127297 - RNA, 19 nt, Artificial Sequence
  Description of Artificial Sequence: Synthetic oligonucleotide
aggagcgaaaugugaugaa

SEQ ID NO: 1127298 - RNA, 19 nt, Artificial Sequence
  Description of Artificial Sequence: Synthetic oligonucleotide
gugguugcacauauacaca

SEQ ID NO: 1127299 - RNA, 19 nt, Artificial Sequence
  Description of Artificial Sequence: Synthetic oligonucleotide
ccaacaacccguccgaaga

SEQ ID NO: 1127300 - RNA, 19 nt, Artificial Sequence
  Description of Artificial Sequence: Synthetic oligonucleotide
aggucgcccuuguuggugu

SEQ ID NO: 1127301 - RNA, 19 nt, Artificial Sequence
  Description of Artificial Sequence: Synthetic oligonucleotide
ggccacaauauguguguug

SEQ ID NO: 1127302 - RNA, 19 nt, Artificial Sequence
  Description of Artificial Sequence: Synthetic oligonucleotide
acgcacugaccuuucccgu

SEQ ID NO: 1127303 - RNA, 19 nt, Artificial Sequence
  Description of Artificial Sequence: Synthetic oligonucleotide
gagagagacuacagugguc

SEQ ID NO: 1127304 - RNA, 19 nt, Artificial Sequence
  Description of Artificial Sequence: Synthetic oligonucleotide
gaccucaucgggcaguuuu

SEQ ID NO: 1127305 - RNA, 19 nt, Artificial Sequence
  Description of Artificial Sequence: Synthetic oligonucleotide
ugccuaaaacaggauucau

SEQ ID NO: 1127306 - RNA, 19 nt, Artificial Sequence
  Description of Artificial Sequence: Synthetic oligonucleotide
caagugucauuacugccua

SEQ ID NO: 1127307 - RNA, 19 nt, Artificial Sequence
  Description of Artificial Sequence: Synthetic oligonucleotide
uggcugcuaaaaucucauc

SEQ ID NO: 1127308 - RNA, 19 nt, Artificial Sequence
  Description of Artificial Sequence: Synthetic oligonucleotide
aggauucaugagccagccu

SEQ ID NO: 1127309 - RNA, 19 nt, Artificial Sequence
  Description of Artificial Sequence: Synthetic oligonucleotide
cugccuaaaacaggauuca

SEQ ID NO: 1127310 - RNA, 19 nt, Artificial Sequence
  Description of Artificial Sequence: Synthetic oligonucleotide
ucaccgcccuggaucacaa

SEQ ID NO: 1127311 - RNA, 19 nt, Artificial Sequence
  Description of Artificial Sequence: Synthetic oligonucleotide
cugauggaccugugaaaga

SEQ ID NO: 1127312 - RNA, 19 nt, Artificial Sequence
  Description of Artificial Sequence: Synthetic oligonucleotide
gcgaaaugugaugaagaac

SEQ ID NO: 1127313 - RNA, 19 nt, Artificial Sequence
  Description of Artificial Sequence: Synthetic oligonucleotide
cugagcacuccacggccug

SEQ ID NO: 1127314 - RNA, 19 nt, Artificial Sequence
  Description of Artificial Sequence: Synthetic oligonucleotide
guaagcacaggagcgaaau

SEQ ID NO: 1127315 - RNA, 19 nt, Artificial Sequence
  Description of Artificial Sequence: Synthetic oligonucleotide
caauauguguguugucagu

SEQ ID NO: 1127316 - RNA, 19 nt, Artificial Sequence
  Description of Artificial Sequence: Synthetic oligonucleotide
agacgacaccuuccggggu

SEQ ID NO: 1127317 - RNA, 19 nt, Artificial Sequence
  Description of Artificial Sequence: Synthetic oligonucleotide
augcguggucucagguacc

SEQ ID NO: 1127318 - RNA, 19 nt, Artificial Sequence
  Description of Artificial Sequence: Synthetic oligonucleotide
ccugugaaagauggugccg

SEQ ID NO: 1127319 - RNA, 19 nt, Artificial Sequence
  Description of Artificial Sequence: Synthetic oligonucleotide
guguugucgcuuccccaug

SEQ ID NO: 1127320 - RNA, 19 nt, Artificial Sequence
  Description of Artificial Sequence: Synthetic oligonucleotide
gcggaacucaucuuugaaa

SEQ ID NO: 1127321 - RNA, 19 nt, Artificial Sequence
  Description of Artificial Sequence: Synthetic oligonucleotide
guaauaagauggguccugu

SEQ ID NO: 1127322 - RNA, 19 nt, Artificial Sequence
  Description of Artificial Sequence: Synthetic oligonucleotide
cacaggagcgaaaugugau

SEQ ID NO: 1127323 - RNA, 19 nt, Artificial Sequence
  Description of Artificial Sequence: Synthetic oligonucleotide
cauagcugucaguguguca

SEQ ID NO: 1127324 - RNA, 19 nt, Artificial Sequence
  Description of Artificial Sequence: Synthetic oligonucleotide
agugcagcucuagguuaag

SEQ ID NO: 1127325 - RNA, 19 nt, Artificial Sequence
  Description of Artificial Sequence: Synthetic oligonucleotide
cuccgcgcaggugauguac

SEQ ID NO: 1127326 - RNA, 19 nt, Artificial Sequence
  Description of Artificial Sequence: Synthetic oligonucleotide
uguuguccugauggccaca

SEQ ID NO: 1127327 - RNA, 19 nt, Artificial Sequence
  Description of Artificial Sequence: Synthetic oligonucleotide
gcgcaggugauguacaucu

SEQ ID NO: 1127328 - RNA, 19 nt, Artificial Sequence
  Description of Artificial Sequence: Synthetic oligonucleotide
ggugccgucauaauacugu

SEQ ID NO: 1127329 - RNA, 19 nt, Artificial Sequence
  Description of Artificial Sequence: Synthetic oligonucleotide
gagagacuacaguggucaa

SEQ ID NO: 1127330 - RNA, 19 nt, Artificial Sequence
  Description of Artificial Sequence: Synthetic oligonucleotide
ggugaaggacgcacugacc

SEQ ID NO: 1127331 - RNA, 19 nt, Artificial Sequence
  Description of Artificial Sequence: Synthetic oligonucleotide
ggacggucaguuuuggggu

SEQ ID NO: 1127332 - RNA, 19 nt, Artificial Sequence
  Description of Artificial Sequence: Synthetic oligonucleotide
gaguguacuccgcgcaggu

SEQ ID NO: 1127333 - RNA, 19 nt, Artificial Sequence
  Description of Artificial Sequence: Synthetic oligonucleotide
ugguagcgcaguacaucuu

SEQ ID NO: 1127334 - RNA, 19 nt, Artificial Sequence
  Description of Artificial Sequence: Synthetic oligonucleotide
cccaacaacccguccgaag

SEQ ID NO: 1127335 - RNA, 19 nt, Artificial Sequence
  Description of Artificial Sequence: Synthetic oligonucleotide
caaugacggcugcuucaug

SEQ ID NO: 1127336 - RNA, 19 nt, Artificial Sequence
  Description of Artificial Sequence: Synthetic oligonucleotide
gcuucaugcguggucucag

SEQ ID NO: 1127337 - RNA, 19 nt, Artificial Sequence
  Description of Artificial Sequence: Synthetic oligonucleotide
cugugaaagauggugccgu

SEQ ID NO: 1127338 - RNA, 19 nt, Artificial Sequence
  Description of Artificial Sequence: Synthetic oligonucleotide
caggugccuucaugguggc

SEQ ID NO: 1127339 - RNA, 19 nt, Artificial Sequence
  Description of Artificial Sequence: Synthetic oligonucleotide
cagcauucaguugguccac

SEQ ID NO: 1127340 - RNA, 19 nt, Artificial Sequence
  Description of Artificial Sequence: Synthetic oligonucleotide
acggucaguuuugggguca

SEQ ID NO: 1127341 - RNA, 19 nt, Artificial Sequence
  Description of Artificial Sequence: Synthetic oligonucleotide
uaggucccucaaguucuug

SEQ ID NO: 1127342 - RNA, 19 nt, Artificial Sequence
  Description of Artificial Sequence: Synthetic oligonucleotide
uccuuaggacggucaguuu

SEQ ID NO: 1127343 - RNA, 19 nt, Artificial Sequence
  Description of Artificial Sequence: Synthetic oligonucleotide
ugagcacuccacggccugu

SEQ ID NO: 1127344 - RNA, 19 nt, Artificial Sequence
  Description of Artificial Sequence: Synthetic oligonucleotide
cccguccgaagauagugug

SEQ ID NO: 1127345 - RNA, 19 nt, Artificial Sequence
  Description of Artificial Sequence: Synthetic oligonucleotide
gccacaauauguguguugu

SEQ ID NO: 1127346 - RNA, 19 nt, Artificial Sequence
  Description of Artificial Sequence: Synthetic oligonucleotide
ccuggcgguaugucugggg

SEQ ID NO: 1127347 - RNA, 19 nt, Artificial Sequence
  Description of Artificial Sequence: Synthetic oligonucleotide
gcccuuguugguguguagc

SEQ ID NO: 1127348 - RNA, 19 nt, Artificial Sequence
  Description of Artificial Sequence: Synthetic oligonucleotide
ccguccgaagauagugugc

SEQ ID NO: 1127349 - RNA, 19 nt, Artificial Sequence
  Description of Artificial Sequence: Synthetic oligonucleotide
gaaggacgcacugaccuuu

SEQ ID NO: 1127350 - RNA, 19 nt, Artificial Sequence
  Description of Artificial Sequence: Synthetic oligonucleotide
acccguccgaagauagugu

SEQ ID NO: 1127351 - RNA, 19 nt, Artificial Sequence
  Description of Artificial Sequence: Synthetic oligonucleotide
gguguugucgcuuccccau

SEQ ID NO: 1127352 - RNA, 19 nt, Artificial Sequence
  Description of Artificial Sequence: Synthetic oligonucleotide
gguacugcccuucacuguu

SEQ ID NO: 1127353 - RNA, 19 nt, Artificial Sequence
  Description of Artificial Sequence: Synthetic oligonucleotide
guugggccccgaguuggcc

SEQ ID NO: 1127354 - RNA, 19 nt, Artificial Sequence
  Description of Artificial Sequence: Synthetic oligonucleotide
cucaucgggcaguuuucaa

SEQ ID NO: 1127355 - RNA, 19 nt, Artificial Sequence
  Description of Artificial Sequence: Synthetic oligonucleotide
auggguccuguuuggccuu

SEQ ID NO: 1127356 - RNA, 19 nt, Artificial Sequence
  Description of Artificial Sequence: Synthetic oligonucleotide
uagugucucucgggucuca

SEQ ID NO: 1127357 - RNA, 19 nt, Artificial Sequence
  Description of Artificial Sequence: Synthetic oligonucleotide
agcacuccacggccuguau

SEQ ID NO: 1127358 - RNA, 19 nt, Artificial Sequence
  Description of Artificial Sequence: Synthetic oligonucleotide
cuuccuccuuaggacgguc

SEQ ID NO: 1127359 - RNA, 19 nt, Artificial Sequence
  Description of Artificial Sequence: Synthetic oligonucleotide
cccaucaaguuucucucca

SEQ ID NO: 1127360 - RNA, 19 nt, Artificial Sequence
  Description of Artificial Sequence: Synthetic oligonucleotide
accuuagccucuggaucca

SEQ ID NO: 1127361 - RNA, 19 nt, Artificial Sequence
  Description of Artificial Sequence: Synthetic oligonucleotide
cugcuucaugcguggucuc

SEQ ID NO: 1127362 - RNA, 19 nt, Artificial Sequence
  Description of Artificial Sequence: Synthetic oligonucleotide
gugccuguaccuguggggu

SEQ ID NO: 1127363 - RNA, 19 nt, Artificial Sequence
  Description of Artificial Sequence: Synthetic oligonucleotide
gucaccgcccuggaucaca

SEQ ID NO: 1127364 - RNA, 19 nt, Artificial Sequence
  Description of Artificial Sequence: Synthetic oligonucleotide
ggggcggaacucaucuuug

SEQ ID NO: 1127365 - RNA, 19 nt, Artificial Sequence
  Description of Artificial Sequence: Synthetic oligonucleotide
ggacucuccaccugugccu

SEQ ID NO: 1127366 - RNA, 19 nt, Artificial Sequence
  Description of Artificial Sequence: Synthetic oligonucleotide
uggccacaauauguguguu

SEQ ID NO: 1127367 - RNA, 19 nt, Artificial Sequence
  Description of Artificial Sequence: Synthetic oligonucleotide
guuucguggcugcuggguu

SEQ ID NO: 1127368 - RNA, 19 nt, Artificial Sequence
  Description of Artificial Sequence: Synthetic oligonucleotide
gcuugccccaguaggacuc

SEQ ID NO: 1127369 - RNA, 19 nt, Artificial Sequence
  Description of Artificial Sequence: Synthetic oligonucleotide
ccgaguuggccaugcugag

SEQ ID NO: 1127370 - RNA, 19 nt, Artificial Sequence
  Description of Artificial Sequence: Synthetic oligonucleotide
gcucguuucguggcugcug

SEQ ID NO: 1127371 - RNA, 19 nt, Artificial Sequence
  Description of Artificial Sequence: Synthetic oligonucleotide
uguugguguugggccccga

SEQ ID NO: 1127372 - RNA, 19 nt, Artificial Sequence
  Description of Artificial Sequence: Synthetic oligonucleotide
gcgacgaacccaagucggc

SEQ ID NO: 1127373 - RNA, 19 nt, Artificial Sequence
  Description of Artificial Sequence: Synthetic oligonucleotide
guacugcccuucacuguuc

SEQ ID NO: 1127374 - RNA, 19 nt, Artificial Sequence
  Description of Artificial Sequence: Synthetic oligonucleotide
ccguggaauagugggcagc

SEQ ID NO: 1127375 - RNA, 19 nt, Artificial Sequence
  Description of Artificial Sequence: Synthetic oligonucleotide
ccuguagugucucucgggu

SEQ ID NO: 1127376 - RNA, 19 nt, Artificial Sequence
  Description of Artificial Sequence: Synthetic oligonucleotide
cgacgaacccaagucggcc

SEQ ID NO: 1127377 - RNA, 19 nt, Artificial Sequence
  Description of Artificial Sequence: Synthetic oligonucleotide
cccguggaauagugggcag

SEQ ID NO: 1127378 - RNA, 19 nt, Artificial Sequence
  Description of Artificial Sequence: Synthetic oligonucleotide
cgcacugaccuuucccgug

SEQ ID NO: 1127379 - RNA, 19 nt, Artificial Sequence
  Description of Artificial Sequence: Synthetic oligonucleotide
cuagguuaaggucgcccuu

SEQ ID NO: 1127380 - RNA, 19 nt, Artificial Sequence
  Description of Artificial Sequence: Synthetic oligonucleotide
ugcugggauuggucccaua

SEQ ID NO: 1127381 - RNA, 19 nt, Artificial Sequence
  Description of Artificial Sequence: Synthetic oligonucleotide
caucagucaauaggucccu

SEQ ID NO: 1127382 - RNA, 19 nt, Artificial Sequence
  Description of Artificial Sequence: Synthetic oligonucleotide
cacaaacacugugguugca

SEQ ID NO: 1127383 - RNA, 19 nt, Artificial Sequence
  Description of Artificial Sequence: Synthetic oligonucleotide
ccccuggcgguaugucugg

SEQ ID NO: 1127384 - RNA, 19 nt, Artificial Sequence
  Description of Artificial Sequence: Synthetic oligonucleotide
ccuuaggacggucaguuuu

SEQ ID NO: 1127385 - RNA, 19 nt, Artificial Sequence
  Description of Artificial Sequence: Synthetic oligonucleotide
auaggucccucaaguucuu

SEQ ID NO: 1127386 - RNA, 19 nt, Artificial Sequence
  Description of Artificial Sequence: Synthetic oligonucleotide
caacaacccguccgaagau

SEQ ID NO: 1127387 - RNA, 19 nt, Artificial Sequence
  Description of Artificial Sequence: Synthetic oligonucleotide
guacuccgcgcaggugaug

SEQ ID NO: 1127388 - RNA, 19 nt, Artificial Sequence
  Description of Artificial Sequence: Synthetic oligonucleotide
gguaagcacaggagcgaaa

SEQ ID NO: 1127389 - RNA, 19 nt, Artificial Sequence
  Description of Artificial Sequence: Synthetic oligonucleotide
cuguaccuguggggucacc

SEQ ID NO: 1127390 - RNA, 19 nt, Artificial Sequence
  Description of Artificial Sequence: Synthetic oligonucleotide
uugccccaguaggacucuc

SEQ ID NO: 1127391 - RNA, 19 nt, Artificial Sequence
  Description of Artificial Sequence: Synthetic oligonucleotide
ggcugcgacgaacccaagu

SEQ ID NO: 1127392 - RNA, 19 nt, Artificial Sequence
  Description of Artificial Sequence: Synthetic oligonucleotide
cguggaauagugggcagca

SEQ ID NO: 1127393 - RNA, 19 nt, Artificial Sequence
  Description of Artificial Sequence: Synthetic oligonucleotide
cacugugguugcacauaua

SEQ ID NO: 1127394 - RNA, 19 nt, Artificial Sequence
  Description of Artificial Sequence: Synthetic oligonucleotide
agguuggggcggaacucau

SEQ ID NO: 1127395 - RNA, 19 nt, Artificial Sequence
  Description of Artificial Sequence: Synthetic oligonucleotide
gguguagacauugccuguu

SEQ ID NO: 1127396 - RNA, 19 nt, Artificial Sequence
  Description of Artificial Sequence: Synthetic oligonucleotide
ggcuugccccaguaggacu

SEQ ID NO: 1127397 - RNA, 19 nt, Artificial Sequence
  Description of Artificial Sequence: Synthetic oligonucleotide
caacccguccgaagauagu

SEQ ID NO: 1127398 - RNA, 19 nt, Artificial Sequence
  Description of Artificial Sequence: Synthetic oligonucleotide
ggcugggacuggcucagcu

SEQ ID NO: 1127399 - RNA, 19 nt, Artificial Sequence
  Description of Artificial Sequence: Synthetic oligonucleotide
gguuggggcggaacucauc

SEQ ID NO: 1127400 - RNA, 19 nt, Artificial Sequence
  Description of Artificial Sequence: Synthetic oligonucleotide
uggguccuguuuggccuuu

SEQ ID NO: 1127401 - RNA, 19 nt, Artificial Sequence
  Description of Artificial Sequence: Synthetic oligonucleotide
ccccauggcugcgacgaac

SEQ ID NO: 1127402 - RNA, 19 nt, Artificial Sequence
  Description of Artificial Sequence: Synthetic oligonucleotide
ugaccucaucgggcaguuu

SEQ ID NO: 1127403 - RNA, 19 nt, Artificial Sequence
  Description of Artificial Sequence: Synthetic oligonucleotide
caaagccccggcugggcuu

SEQ ID NO: 1127404 - RNA, 19 nt, Artificial Sequence
  Description of Artificial Sequence: Synthetic oligonucleotide
ggccccgaguuggccaugc

SEQ ID NO: 1127405 - RNA, 19 nt, Artificial Sequence
  Description of Artificial Sequence: Synthetic oligonucleotide
gcucuagguuaaggucgcc

SEQ ID NO: 1127406 - RNA, 19 nt, Artificial Sequence
  Description of Artificial Sequence: Synthetic oligonucleotide
ccggggugcagacugggua

SEQ ID NO: 1127407 - RNA, 19 nt, Artificial Sequence
  Description of Artificial Sequence: Synthetic oligonucleotide
ccucaucgggcaguuuuca

SEQ ID NO: 1127408 - RNA, 19 nt, Artificial Sequence
  Description of Artificial Sequence: Synthetic oligonucleotide
ccgucauaauacuguuucu

SEQ ID NO: 1127409 - RNA, 19 nt, Artificial Sequence
  Description of Artificial Sequence: Synthetic oligonucleotide
cguccgaagauagugugcu

SEQ ID NO: 1127410 - RNA, 19 nt, Artificial Sequence
  Description of Artificial Sequence: Synthetic oligonucleotide
guagccucacauagcccuu

SEQ ID NO: 1127411 - RNA, 19 nt, Artificial Sequence
  Description of Artificial Sequence: Synthetic oligonucleotide
guccgaagauagugugcuu

SEQ ID NO: 1127412 - RNA, 19 nt, Artificial Sequence
  Description of Artificial Sequence: Synthetic oligonucleotide
ccuuagccucuggauccac

SEQ ID NO: 1127413 - RNA, 19 nt, Artificial Sequence
  Description of Artificial Sequence: Synthetic oligonucleotide
gucgcccuuguuggugugu

SEQ ID NO: 1127414 - RNA, 19 nt, Artificial Sequence
  Description of Artificial Sequence: Synthetic oligonucleotide
cgggucucagcauuuguau

SEQ ID NO: 1127415 - RNA, 19 nt, Artificial Sequence
  Description of Artificial Sequence: Synthetic oligonucleotide
gccccggcugggcuucuuc

SEQ ID NO: 1127416 - RNA, 19 nt, Artificial Sequence
  Description of Artificial Sequence: Synthetic oligonucleotide
ucguggcugcuggguugau

SEQ ID NO: 1127417 - RNA, 19 nt, Artificial Sequence
  Description of Artificial Sequence: Synthetic oligonucleotide
gggcagcauucaguugguc

SEQ ID NO: 1127418 - RNA, 19 nt, Artificial Sequence
  Description of Artificial Sequence: Synthetic oligonucleotide
caccgcccuggaucacaaa

SEQ ID NO: 1127419 - RNA, 19 nt, Artificial Sequence
  Description of Artificial Sequence: Synthetic oligonucleotide
gacagccgugcugguugau

SEQ ID NO: 1127420 - RNA, 19 nt, Artificial Sequence
  Description of Artificial Sequence: Synthetic oligonucleotide
ggucaccgcccuggaucac

SEQ ID NO: 1127421 - RNA, 19 nt, Artificial Sequence
  Description of Artificial Sequence: Synthetic oligonucleotide
ccacggccuguaugugaga

SEQ ID NO: 1127422 - RNA, 19 nt, Artificial Sequence
  Description of Artificial Sequence: Synthetic oligonucleotide
cguuucguggcugcugggu

SEQ ID NO: 1127423 - RNA, 19 nt, Artificial Sequence
  Description of Artificial Sequence: Synthetic oligonucleotide
ccgcgcaggugauguacau

SEQ ID NO: 1127424 - RNA, 19 nt, Artificial Sequence
  Description of Artificial Sequence: Synthetic oligonucleotide
gccccgaguuggccaugcu

SEQ ID NO: 1127425 - RNA, 19 nt, Artificial Sequence
  Description of Artificial Sequence: Synthetic oligonucleotide
ggccuguaugugagagguu

SEQ ID NO: 1127426 - RNA, 19 nt, Artificial Sequence
  Description of Artificial Sequence: Synthetic oligonucleotide
gcguggucucagguaccau

SEQ ID NO: 1127427 - RNA, 19 nt, Artificial Sequence
  Description of Artificial Sequence: Synthetic oligonucleotide
aaacauacagcacaauucc

SEQ ID NO: 1127428 - RNA, 19 nt, Artificial Sequence
  Description of Artificial Sequence: Synthetic oligonucleotide
ugaucauuaguaaagagag

SEQ ID NO: 1127429 - RNA, 19 nt, Artificial Sequence
  Description of Artificial Sequence: Synthetic oligonucleotide
ugucaaauaaacaaugacc

SEQ ID NO: 1127430 - RNA, 19 nt, Artificial Sequence
  Description of Artificial Sequence: Synthetic oligonucleotide
uuauacaacacacauacaa

SEQ ID NO: 1127431 - RNA, 19 nt, Artificial Sequence
  Description of Artificial Sequence: Synthetic oligonucleotide
ucuaaaauagcauaagguc

SEQ ID NO: 1127432 - RNA, 19 nt, Artificial Sequence
  Description of Artificial Sequence: Synthetic oligonucleotide
aauagcauaaggucuaaca

SEQ ID NO: 1127433 - RNA, 19 nt, Artificial Sequence
  Description of Artificial Sequence: Synthetic oligonucleotide
aaaauggcagaguaaaucu

SEQ ID NO: 1127434 - RNA, 19 nt, Artificial Sequence
  Description of Artificial Sequence: Synthetic oligonucleotide
gaguaaaucuaauucaugc

SEQ ID NO: 1127435 - RNA, 19 nt, Artificial Sequence
  Description of Artificial Sequence: Synthetic oligonucleotide
aguuguaugaggaugaaac

SEQ ID NO: 1127436 - RNA, 19 nt, Artificial Sequence
  Description of Artificial Sequence: Synthetic oligonucleotide
gaccaugucaaauacauug

SEQ ID NO: 1127437 - RNA, 19 nt, Artificial Sequence
  Description of Artificial Sequence: Synthetic oligonucleotide
auagcauaaggucuaacac

SEQ ID NO: 1127438 - RNA, 19 nt, Artificial Sequence
  Description of Artificial Sequence: Synthetic oligonucleotide
caaagugggacuuucaugc

SEQ ID NO: 1127439 - RNA, 19 nt, Artificial Sequence
  Description of Artificial Sequence: Synthetic oligonucleotide
ucuuauucaaaauucuccc

SEQ ID NO: 1127440 - RNA, 19 nt, Artificial Sequence
  Description of Artificial Sequence: Synthetic oligonucleotide
uugaucauuaguaaagaga

SEQ ID NO: 1127441 - RNA, 19 nt, Artificial Sequence
  Description of Artificial Sequence: Synthetic oligonucleotide
uuugcgauucauaucauca

SEQ ID NO: 1127442 - RNA, 19 nt, Artificial Sequence
  Description of Artificial Sequence: Synthetic oligonucleotide
uauuacaaggaacaacacc

SEQ ID NO: 1127443 - RNA, 19 nt, Artificial Sequence
  Description of Artificial Sequence: Synthetic oligonucleotide
uccgauucagucaaaauca

SEQ ID NO: 1127444 - RNA, 19 nt, Artificial Sequence
  Description of Artificial Sequence: Synthetic oligonucleotide
aaaaucacgauuugugaga

SEQ ID NO: 1127445 - RNA, 19 nt, Artificial Sequence
  Description of Artificial Sequence: Synthetic oligonucleotide
uuuucuauguacagaguag

SEQ ID NO: 1127446 - RNA, 19 nt, Artificial Sequence
  Description of Artificial Sequence: Synthetic oligonucleotide
caugauauaaagcgaagcc

SEQ ID NO: 1127447 - RNA, 19 nt, Artificial Sequence
  Description of Artificial Sequence: Synthetic oligonucleotide
uuugggauagggcuugugg

SEQ ID NO: 1127448 - RNA, 19 nt, Artificial Sequence
  Description of Artificial Sequence: Synthetic oligonucleotide
uuaaccuggcuauuguugg

SEQ ID NO: 1127449 - RNA, 19 nt, Artificial Sequence
  Description of Artificial Sequence: Synthetic oligonucleotide
aagucaauaagcaagacua

SEQ ID NO: 1127450 - RNA, 19 nt, Artificial Sequence
  Description of Artificial Sequence: Synthetic oligonucleotide
ugauauaaagcgaagccaa

SEQ ID NO: 1127451 - RNA, 19 nt, Artificial Sequence
  Description of Artificial Sequence: Synthetic oligonucleotide
aagagaaccaguccuauaa

SEQ ID NO: 1127452 - RNA, 19 nt, Artificial Sequence
  Description of Artificial Sequence: Synthetic oligonucleotide
ucuucuaucaguguugacu

SEQ ID NO: 1127453 - RNA, 19 nt, Artificial Sequence
  Description of Artificial Sequence: Synthetic oligonucleotide
gaugauaugccuaucggug

SEQ ID NO: 1127454 - RNA, 19 nt, Artificial Sequence
  Description of Artificial Sequence: Synthetic oligonucleotide
aaauugggaauacugcuaa

SEQ ID NO: 1127455 - RNA, 19 nt, Artificial Sequence
  Description of Artificial Sequence: Synthetic oligonucleotide
uauaaagcgaagccaagaa

SEQ ID NO: 1127456 - RNA, 19 nt, Artificial Sequence
  Description of Artificial Sequence: Synthetic oligonucleotide
uagacauuacggaagcacc

SEQ ID NO: 1127457 - RNA, 19 nt, Artificial Sequence
  Description of Artificial Sequence: Synthetic oligonucleotide
agaauaagaugauggcaac

SEQ ID NO: 1127458 - RNA, 19 nt, Artificial Sequence
  Description of Artificial Sequence: Synthetic oligonucleotide
ucauuaguaaagagaggag

SEQ ID NO: 1127459 - RNA, 19 nt, Artificial Sequence
  Description of Artificial Sequence: Synthetic oligonucleotide
uccuauaauuccuugggga

SEQ ID NO: 1127460 - RNA, 19 nt, Artificial Sequence
  Description of Artificial Sequence: Synthetic oligonucleotide
ugguauuaacauuacacaa

SEQ ID NO: 1127461 - RNA, 19 nt, Artificial Sequence
  Description of Artificial Sequence: Synthetic oligonucleotide
acaagcuacacauacucca

SEQ ID NO: 1127462 - RNA, 19 nt, Artificial Sequence
  Description of Artificial Sequence: Synthetic oligonucleotide
uguugacacugauaaaugc

SEQ ID NO: 1127463 - RNA, 19 nt, Artificial Sequence
  Description of Artificial Sequence: Synthetic oligonucleotide
aguaacuguaagugacgcc

SEQ ID NO: 1127464 - RNA, 19 nt, Artificial Sequence
  Description of Artificial Sequence: Synthetic oligonucleotide
aagacuaguuguaugagga

SEQ ID NO: 1127465 - RNA, 19 nt, Artificial Sequence
  Description of Artificial Sequence: Synthetic oligonucleotide
gaaccaguccuauaauucc

SEQ ID NO: 1127466 - RNA, 19 nt, Artificial Sequence
  Description of Artificial Sequence: Synthetic oligonucleotide
ugaacaaccggcuggguga

SEQ ID NO: 1127467 - RNA, 19 nt, Artificial Sequence
  Description of Artificial Sequence: Synthetic oligonucleotide
auuccaauccagcuggaag

SEQ ID NO: 1127468 - RNA, 19 nt, Artificial Sequence
  Description of Artificial Sequence: Synthetic oligonucleotide
agucaguuuauuaaccugg

SEQ ID NO: 1127469 - RNA, 19 nt, Artificial Sequence
  Description of Artificial Sequence: Synthetic oligonucleotide
caugaagugaaagaaggag

SEQ ID NO: 1127470 - RNA, 19 nt, Artificial Sequence
  Description of Artificial Sequence: Synthetic oligonucleotide
ugauaauagggcugcauac

SEQ ID NO: 1127471 - RNA, 19 nt, Artificial Sequence
  Description of Artificial Sequence: Synthetic oligonucleotide
ucaucaauacacuuagcaa

SEQ ID NO: 1127472 - RNA, 19 nt, Artificial Sequence
  Description of Artificial Sequence: Synthetic oligonucleotide
uagagucaguuuauuaacc

SEQ ID NO: 1127473 - RNA, 19 nt, Artificial Sequence
  Description of Artificial Sequence: Synthetic oligonucleotide
acuuguuagagucaguuua

SEQ ID NO: 1127474 - RNA, 19 nt, Artificial Sequence
  Description of Artificial Sequence: Synthetic oligonucleotide
aguauagacauuacggaag

SEQ ID NO: 1127475 - RNA, 19 nt, Artificial Sequence
  Description of Artificial Sequence: Synthetic oligonucleotide
uagcauaaggucuaacaca

SEQ ID NO: 1127476 - RNA, 19 nt, Artificial Sequence
  Description of Artificial Sequence: Synthetic oligonucleotide
cuuucaugccagaaguccg

SEQ ID NO: 1127477 - RNA, 19 nt, Artificial Sequence
  Description of Artificial Sequence: Synthetic oligonucleotide
uugggaauacugcuaaugu

SEQ ID NO: 1127478 - RNA, 19 nt, Artificial Sequence
  Description of Artificial Sequence: Synthetic oligonucleotide
cauaaaaccacacaguugu

SEQ ID NO: 1127479 - RNA, 19 nt, Artificial Sequence
  Description of Artificial Sequence: Synthetic oligonucleotide
uguaguagacaaagaauaa

SEQ ID NO: 1127480 - RNA, 19 nt, Artificial Sequence
  Description of Artificial Sequence: Synthetic oligonucleotide
uugguugugauucuuggau

SEQ ID NO: 1127481 - RNA, 19 nt, Artificial Sequence
  Description of Artificial Sequence: Synthetic oligonucleotide
uauugaagccaauacuacu

SEQ ID NO: 1127482 - RNA, 19 nt, Artificial Sequence
  Description of Artificial Sequence: Synthetic oligonucleotide
ggcaguauagacauuacgg

SEQ ID NO: 1127483 - RNA, 19 nt, Artificial Sequence
  Description of Artificial Sequence: Synthetic oligonucleotide
augguauccagcucgccac

SEQ ID NO: 1127484 - RNA, 19 nt, Artificial Sequence
  Description of Artificial Sequence: Synthetic oligonucleotide
aagcuacacauacuccaac

SEQ ID NO: 1127485 - RNA, 19 nt, Artificial Sequence
  Description of Artificial Sequence: Synthetic oligonucleotide
uauuguuggaaguacggau

SEQ ID NO: 1127486 - RNA, 19 nt, Artificial Sequence
  Description of Artificial Sequence: Synthetic oligonucleotide
agcaaauuuaaagaaccag

SEQ ID NO: 1127487 - RNA, 19 nt, Artificial Sequence
  Description of Artificial Sequence: Synthetic oligonucleotide
caugccuacauaaaaccac

SEQ ID NO: 1127488 - RNA, 19 nt, Artificial Sequence
  Description of Artificial Sequence: Synthetic oligonucleotide
agcaagacuaguuguauga

SEQ ID NO: 1127489 - RNA, 19 nt, Artificial Sequence
  Description of Artificial Sequence: Synthetic oligonucleotide
ucuauguacagaguagaug

SEQ ID NO: 1127490 - RNA, 19 nt, Artificial Sequence
  Description of Artificial Sequence: Synthetic oligonucleotide
caagacuaguuguaugagg

SEQ ID NO: 1127491 - RNA, 19 nt, Artificial Sequence
  Description of Artificial Sequence: Synthetic oligonucleotide
uuauuaaccuggcuauugu

SEQ ID NO: 1127492 - RNA, 19 nt, Artificial Sequence
  Description of Artificial Sequence: Synthetic oligonucleotide
aacaauaauugcgacugcu

SEQ ID NO: 1127493 - RNA, 19 nt, Artificial Sequence
  Description of Artificial Sequence: Synthetic oligonucleotide
agaaccaguccuauaauuc

SEQ ID NO: 1127494 - RNA, 19 nt, Artificial Sequence
  Description of Artificial Sequence: Synthetic oligonucleotide
uuaguaaagagaggagaag

SEQ ID NO: 1127495 - RNA, 19 nt, Artificial Sequence
  Description of Artificial Sequence: Synthetic oligonucleotide
aauaauugcgacugcugua

SEQ ID NO: 1127496 - RNA, 19 nt, Artificial Sequence
  Description of Artificial Sequence: Synthetic oligonucleotide
gauaauagggcugcauacc

SEQ ID NO: 1127497 - RNA, 19 nt, Artificial Sequence
  Description of Artificial Sequence: Synthetic oligonucleotide
ucguaccuguaccaguugg

SEQ ID NO: 1127498 - RNA, 19 nt, Artificial Sequence
  Description of Artificial Sequence: Synthetic oligonucleotide
guaacaguggaguuguuuc

SEQ ID NO: 1127499 - RNA, 19 nt, Artificial Sequence
  Description of Artificial Sequence: Synthetic oligonucleotide
auaauagggcugcauacca

SEQ ID NO: 1127500 - RNA, 19 nt, Artificial Sequence
  Description of Artificial Sequence: Synthetic oligonucleotide
acuagggcagcaucggcac

SEQ ID NO: 1127501 - RNA, 19 nt, Artificial Sequence
  Description of Artificial Sequence: Synthetic oligonucleotide
aagccaauacuacuuagua

SEQ ID NO: 1127502 - RNA, 19 nt, Artificial Sequence
  Description of Artificial Sequence: Synthetic oligonucleotide
uuucuauguacagaguaga

SEQ ID NO: 1127503 - RNA, 19 nt, Artificial Sequence
  Description of Artificial Sequence: Synthetic oligonucleotide
cuaaaauagcauaaggucu

SEQ ID NO: 1127504 - RNA, 19 nt, Artificial Sequence
  Description of Artificial Sequence: Synthetic oligonucleotide
gugaguguaguagacaaag

SEQ ID NO: 1127505 - RNA, 19 nt, Artificial Sequence
  Description of Artificial Sequence: Synthetic oligonucleotide
uugacucaucacuuguuag

SEQ ID NO: 1127506 - RNA, 19 nt, Artificial Sequence
  Description of Artificial Sequence: Synthetic oligonucleotide
aucacgauuugugagaaca

SEQ ID NO: 1127507 - RNA, 19 nt, Artificial Sequence
  Description of Artificial Sequence: Synthetic oligonucleotide
guaguagacaaagaauaag

SEQ ID NO: 1127508 - RNA, 19 nt, Artificial Sequence
  Description of Artificial Sequence: Synthetic oligonucleotide
agcacaauuccaauccagc

SEQ ID NO: 1127509 - RNA, 19 nt, Artificial Sequence
  Description of Artificial Sequence: Synthetic oligonucleotide
agagucaguuuauuaaccu

SEQ ID NO: 1127510 - RNA, 19 nt, Artificial Sequence
  Description of Artificial Sequence: Synthetic oligonucleotide
uaucaguguugacucauca

SEQ ID NO: 1127511 - RNA, 19 nt, Artificial Sequence
  Description of Artificial Sequence: Synthetic oligonucleotide
aauugcgacugcuguagca

SEQ ID NO: 1127512 - RNA, 19 nt, Artificial Sequence
  Description of Artificial Sequence: Synthetic oligonucleotide
ugaagccaauacuacuuag

SEQ ID NO: 1127513 - RNA, 19 nt, Artificial Sequence
  Description of Artificial Sequence: Synthetic oligonucleotide
aaagcgaagccaagaaaag

SEQ ID NO: 1127514 - RNA, 19 nt, Artificial Sequence
  Description of Artificial Sequence: Synthetic oligonucleotide
guaacuguaagugacgcca

SEQ ID NO: 1127515 - RNA, 19 nt, Artificial Sequence
  Description of Artificial Sequence: Synthetic oligonucleotide
gguauuaacauuacacaag

SEQ ID NO: 1127516 - RNA, 19 nt, Artificial Sequence
  Description of Artificial Sequence: Synthetic oligonucleotide
uggauugcaauuuguuucu

SEQ ID NO: 1127517 - RNA, 19 nt, Artificial Sequence
  Description of Artificial Sequence: Synthetic oligonucleotide
uguagacuguaauuacuga

SEQ ID NO: 1127518 - RNA, 19 nt, Artificial Sequence
  Description of Artificial Sequence: Synthetic oligonucleotide
augauauaaagcgaagcca

SEQ ID NO: 1127519 - RNA, 19 nt, Artificial Sequence
  Description of Artificial Sequence: Synthetic oligonucleotide
guccgauucagucaaaauc

SEQ ID NO: 1127520 - RNA, 19 nt, Artificial Sequence
  Description of Artificial Sequence: Synthetic oligonucleotide
aaauagcauaaggucuaac

SEQ ID NO: 1127521 - RNA, 19 nt, Artificial Sequence
  Description of Artificial Sequence: Synthetic oligonucleotide
agcaccaaugcagagcaac

SEQ ID NO: 1127522 - RNA, 19 nt, Artificial Sequence
  Description of Artificial Sequence: Synthetic oligonucleotide
gccaauacuacuuaguaga

SEQ ID NO: 1127523 - RNA, 19 nt, Artificial Sequence
  Description of Artificial Sequence: Synthetic oligonucleotide
agaaguccgauucagucaa

SEQ ID NO: 1127524 - RNA, 19 nt, Artificial Sequence
  Description of Artificial Sequence: Synthetic oligonucleotide
auuguguagacuguaauua

SEQ ID NO: 1127525 - RNA, 19 nt, Artificial Sequence
  Description of Artificial Sequence: Synthetic oligonucleotide
augccuaucgguguccacc

SEQ ID NO: 1127526 - RNA, 19 nt, Artificial Sequence
  Description of Artificial Sequence: Synthetic oligonucleotide
cugguauuaacauuacaca

SEQ ID NO: 1127527 - RNA, 19 nt, Artificial Sequence
  Description of Artificial Sequence: Synthetic oligonucleotide
ggcagaguaaaucuaauuc

SEQ ID NO: 1127528 - RNA, 19 nt, Artificial Sequence
  Description of Artificial Sequence: Synthetic oligonucleotide
gacuaguuguaugaggaug

SEQ ID NO: 1127529 - RNA, 19 nt, Artificial Sequence
  Description of Artificial Sequence: Synthetic oligonucleotide
guuauguuucuaaaauagc

SEQ ID NO: 1127530 - RNA, 19 nt, Artificial Sequence
  Description of Artificial Sequence: Synthetic oligonucleotide
cacaauuccaauccagcug

SEQ ID NO: 1127531 - RNA, 19 nt, Artificial Sequence
  Description of Artificial Sequence: Synthetic oligonucleotide
gaagccaagaaaagcauga

SEQ ID NO: 1127532 - RNA, 19 nt, Artificial Sequence
  Description of Artificial Sequence: Synthetic oligonucleotide
gacucaucacuuguuagag

SEQ ID NO: 1127533 - RNA, 19 nt, Artificial Sequence
  Description of Artificial Sequence: Synthetic oligonucleotide
uuacggaagcaccaaugca

SEQ ID NO: 1127534 - RNA, 19 nt, Artificial Sequence
  Description of Artificial Sequence: Synthetic oligonucleotide
aaucacgauuugugagaac

SEQ ID NO: 1127535 - RNA, 19 nt, Artificial Sequence
  Description of Artificial Sequence: Synthetic oligonucleotide
gaaggcucguaccuguacc

SEQ ID NO: 1127536 - RNA, 19 nt, Artificial Sequence
  Description of Artificial Sequence: Synthetic oligonucleotide
uaacaguggaguuguuucc

SEQ ID NO: 1127537 - RNA, 19 nt, Artificial Sequence
  Description of Artificial Sequence: Synthetic oligonucleotide
accaacaauaauugcgacu

SEQ ID NO: 1127538 - RNA, 19 nt, Artificial Sequence
  Description of Artificial Sequence: Synthetic oligonucleotide
aacaaguggugccaccagu

SEQ ID NO: 1127539 - RNA, 19 nt, Artificial Sequence
  Description of Artificial Sequence: Synthetic oligonucleotide
acaaaaggcaccugccaug

SEQ ID NO: 1127540 - RNA, 19 nt, Artificial Sequence
  Description of Artificial Sequence: Synthetic oligonucleotide
ugccaugccuacauaaaac

SEQ ID NO: 1127541 - RNA, 19 nt, Artificial Sequence
  Description of Artificial Sequence: Synthetic oligonucleotide
ggaugcuugaauaaaacac

SEQ ID NO: 1127542 - RNA, 19 nt, Artificial Sequence
  Description of Artificial Sequence: Synthetic oligonucleotide
uuguguagacuguaauuac

SEQ ID NO: 1127543 - RNA, 19 nt, Artificial Sequence
  Description of Artificial Sequence: Synthetic oligonucleotide
uuucaugccagaaguccga

SEQ ID NO: 1127544 - RNA, 19 nt, Artificial Sequence
  Description of Artificial Sequence: Synthetic oligonucleotide
gauauaaagcgaagccaag

SEQ ID NO: 1127545 - RNA, 19 nt, Artificial Sequence
  Description of Artificial Sequence: Synthetic oligonucleotide
auuaguaaagagaggagaa

SEQ ID NO: 1127546 - RNA, 19 nt, Artificial Sequence
  Description of Artificial Sequence: Synthetic oligonucleotide
aauggcagaguaaaucuaa

SEQ ID NO: 1127547 - RNA, 19 nt, Artificial Sequence
  Description of Artificial Sequence: Synthetic oligonucleotide
uugggauagggcuuguggu

SEQ ID NO: 1127548 - RNA, 19 nt, Artificial Sequence
  Description of Artificial Sequence: Synthetic oligonucleotide
acuaaagacagcaaauaau

SEQ ID NO: 1127549 - RNA, 19 nt, Artificial Sequence
  Description of Artificial Sequence: Synthetic oligonucleotide
gaaagaaggaguaacugua

SEQ ID NO: 1127550 - RNA, 19 nt, Artificial Sequence
  Description of Artificial Sequence: Synthetic oligonucleotide
gaaccagaauccguugugg

SEQ ID NO: 1127551 - RNA, 19 nt, Artificial Sequence
  Description of Artificial Sequence: Synthetic oligonucleotide
ugcauaccaacaucuugag

SEQ ID NO: 1127552 - RNA, 19 nt, Artificial Sequence
  Description of Artificial Sequence: Synthetic oligonucleotide
ucacuuugaucauuaguaa

SEQ ID NO: 1127553 - RNA, 19 nt, Artificial Sequence
  Description of Artificial Sequence: Synthetic oligonucleotide
gaagguagaacauggccaa

SEQ ID NO: 1127554 - RNA, 19 nt, Artificial Sequence
  Description of Artificial Sequence: Synthetic oligonucleotide
aguguugacucaucacuug

SEQ ID NO: 1127555 - RNA, 19 nt, Artificial Sequence
  Description of Artificial Sequence: Synthetic oligonucleotide
aaggucuaacacaauuuug

SEQ ID NO: 1127556 - RNA, 19 nt, Artificial Sequence
  Description of Artificial Sequence: Synthetic oligonucleotide
aaaauugggaauacugcua

SEQ ID NO: 1127557 - RNA, 19 nt, Artificial Sequence
  Description of Artificial Sequence: Synthetic oligonucleotide
caucaugauauaaagcgaa

SEQ ID NO: 1127558 - RNA, 19 nt, Artificial Sequence
  Description of Artificial Sequence: Synthetic oligonucleotide
guccuauaauuccuugggg

SEQ ID NO: 1127559 - RNA, 19 nt, Artificial Sequence
  Description of Artificial Sequence: Synthetic oligonucleotide
gaauccguuguggacagug

SEQ ID NO: 1127560 - RNA, 19 nt, Artificial Sequence
  Description of Artificial Sequence: Synthetic oligonucleotide
cugcauaccaacaucuuga

SEQ ID NO: 1127561 - RNA, 19 nt, Artificial Sequence
  Description of Artificial Sequence: Synthetic oligonucleotide
auauuacaaggaacaacac

SEQ ID NO: 1127562 - RNA, 19 nt, Artificial Sequence
  Description of Artificial Sequence: Synthetic oligonucleotide
auauaaagcgaagccaaga

SEQ ID NO: 1127563 - RNA, 19 nt, Artificial Sequence
  Description of Artificial Sequence: Synthetic oligonucleotide
gaguaacuguaagugacgc

SEQ ID NO: 1127564 - RNA, 19 nt, Artificial Sequence
  Description of Artificial Sequence: Synthetic oligonucleotide
aaggcucguaccuguacca

SEQ ID NO: 1127565 - RNA, 19 nt, Artificial Sequence
  Description of Artificial Sequence: Synthetic oligonucleotide
uacacaagcuacacauacu

SEQ ID NO: 1127566 - RNA, 19 nt, Artificial Sequence
  Description of Artificial Sequence: Synthetic oligonucleotide
uccaucccugguauuaaca

SEQ ID NO: 1127567 - RNA, 19 nt, Artificial Sequence
  Description of Artificial Sequence: Synthetic oligonucleotide
aaaucacgauuugugagaa

SEQ ID NO: 1127568 - RNA, 19 nt, Artificial Sequence
  Description of Artificial Sequence: Synthetic oligonucleotide
uucaacccaugauucauuc

SEQ ID NO: 1127569 - RNA, 19 nt, Artificial Sequence
  Description of Artificial Sequence: Synthetic oligonucleotide
gugaaagaaggaguaacug

SEQ ID NO: 1127570 - RNA, 19 nt, Artificial Sequence
  Description of Artificial Sequence: Synthetic oligonucleotide
ugggaauacugcuaauguc

SEQ ID NO: 1127571 - RNA, 19 nt, Artificial Sequence
  Description of Artificial Sequence: Synthetic oligonucleotide
guuguaugaggaugaaaca

SEQ ID NO: 1127572 - RNA, 19 nt, Artificial Sequence
  Description of Artificial Sequence: Synthetic oligonucleotide
gaaugggcaaagucaauaa

SEQ ID NO: 1127573 - RNA, 19 nt, Artificial Sequence
  Description of Artificial Sequence: Synthetic oligonucleotide
aagaaagcaccaacaauaa

SEQ ID NO: 1127574 - RNA, 19 nt, Artificial Sequence
  Description of Artificial Sequence: Synthetic oligonucleotide
uucuauguacagaguagau

SEQ ID NO: 1127575 - RNA, 19 nt, Artificial Sequence
  Description of Artificial Sequence: Synthetic oligonucleotide
cucacgagaaggcucguac

SEQ ID NO: 1127576 - RNA, 19 nt, Artificial Sequence
  Description of Artificial Sequence: Synthetic oligonucleotide
caguuuauuaaccuggcua

SEQ ID NO: 1127577 - RNA, 19 nt, Artificial Sequence
  Description of Artificial Sequence: Synthetic oligonucleotide
agcauaaggucuaacacaa

SEQ ID NO: 1127578 - RNA, 19 nt, Artificial Sequence
  Description of Artificial Sequence: Synthetic oligonucleotide
aguagacuuggauugcaau

SEQ ID NO: 1127579 - RNA, 19 nt, Artificial Sequence
  Description of Artificial Sequence: Synthetic oligonucleotide
caagaaugggcaaagucaa

SEQ ID NO: 1127580 - RNA, 19 nt, Artificial Sequence
  Description of Artificial Sequence: Synthetic oligonucleotide
gacgccaucccucucauua

SEQ ID NO: 1127581 - RNA, 19 nt, Artificial Sequence
  Description of Artificial Sequence: Synthetic oligonucleotide
ucacgagaaggcucguacc

SEQ ID NO: 1127582 - RNA, 19 nt, Artificial Sequence
  Description of Artificial Sequence: Synthetic oligonucleotide
uagcugauaauagggcugc

SEQ ID NO: 1127583 - RNA, 19 nt, Artificial Sequence
  Description of Artificial Sequence: Synthetic oligonucleotide
uagacuuggauugcaauuu

SEQ ID NO: 1127584 - RNA, 19 nt, Artificial Sequence
  Description of Artificial Sequence: Synthetic oligonucleotide
caucacuuguuagagucag

SEQ ID NO: 1127585 - RNA, 19 nt, Artificial Sequence
  Description of Artificial Sequence: Synthetic oligonucleotide
aauccguuguggacagugg

SEQ ID NO: 1127586 - RNA, 19 nt, Artificial Sequence
  Description of Artificial Sequence: Synthetic oligonucleotide
uuaguagacuuggauugca

SEQ ID NO: 1127587 - RNA, 19 nt, Artificial Sequence
  Description of Artificial Sequence: Synthetic oligonucleotide
agugacgccaucccucuca

SEQ ID NO: 1127588 - RNA, 19 nt, Artificial Sequence
  Description of Artificial Sequence: Synthetic oligonucleotide
aaccaacugucaagaauuc

SEQ ID NO: 1127589 - RNA, 19 nt, Artificial Sequence
  Description of Artificial Sequence: Synthetic oligonucleotide
auugaagccaauacuacuu

SEQ ID NO: 1127590 - RNA, 19 nt, Artificial Sequence
  Description of Artificial Sequence: Synthetic oligonucleotide
ugccuuauuuucugaacaa

SEQ ID NO: 1127591 - RNA, 19 nt, Artificial Sequence
  Description of Artificial Sequence: Synthetic oligonucleotide
ucacuuguuagagucaguu

SEQ ID NO: 1127592 - RNA, 19 nt, Artificial Sequence
  Description of Artificial Sequence: Synthetic oligonucleotide
cucggugaacaucaucccc

SEQ ID NO: 1127593 - RNA, 19 nt, Artificial Sequence
  Description of Artificial Sequence: Synthetic oligonucleotide
gaaaccaacugucaagaau

SEQ ID NO: 1127594 - RNA, 19 nt, Artificial Sequence
  Description of Artificial Sequence: Synthetic oligonucleotide
accuuuccuaauuuuacua

SEQ ID NO: 1127595 - RNA, 19 nt, Artificial Sequence
  Description of Artificial Sequence: Synthetic oligonucleotide
uacaaggaacaacaccuuu

SEQ ID NO: 1127596 - RNA, 19 nt, Artificial Sequence
  Description of Artificial Sequence: Synthetic oligonucleotide
caaaaggcaccugccaugc

SEQ ID NO: 1127597 - RNA, 19 nt, Artificial Sequence
  Description of Artificial Sequence: Synthetic oligonucleotide
cuuaguagacuuggauugc

SEQ ID NO: 1127598 - RNA, 19 nt, Artificial Sequence
  Description of Artificial Sequence: Synthetic oligonucleotide
uggaagagauuuucaccca

SEQ ID NO: 1127599 - RNA, 19 nt, Artificial Sequence
  Description of Artificial Sequence: Synthetic oligonucleotide
uccguuguggacaguggcu

SEQ ID NO: 1127600 - RNA, 19 nt, Artificial Sequence
  Description of Artificial Sequence: Synthetic oligonucleotide
agagcaacauguugacacu

SEQ ID NO: 1127601 - RNA, 19 nt, Artificial Sequence
  Description of Artificial Sequence: Synthetic oligonucleotide
uauuaaccuggcuauuguu

SEQ ID NO: 1127602 - RNA, 19 nt, Artificial Sequence
  Description of Artificial Sequence: Synthetic oligonucleotide
agaguaaaucuaauucaug

SEQ ID NO: 1127603 - RNA, 19 nt, Artificial Sequence
  Description of Artificial Sequence: Synthetic oligonucleotide
caagcgauacacagcuuug

SEQ ID NO: 1127604 - RNA, 19 nt, Artificial Sequence
  Description of Artificial Sequence: Synthetic oligonucleotide
gcagcaucggcacagcaag

SEQ ID NO: 1127605 - RNA, 19 nt, Artificial Sequence
  Description of Artificial Sequence: Synthetic oligonucleotide
ugguauccagcucgccacg

SEQ ID NO: 1127606 - RNA, 19 nt, Artificial Sequence
  Description of Artificial Sequence: Synthetic oligonucleotide
aaugaccaaagugggacuu

SEQ ID NO: 1127607 - RNA, 19 nt, Artificial Sequence
  Description of Artificial Sequence: Synthetic oligonucleotide
cagcacaauuccaauccag

SEQ ID NO: 1127608 - RNA, 19 nt, Artificial Sequence
  Description of Artificial Sequence: Synthetic oligonucleotide
cacgauuugugagaacaag

SEQ ID NO: 1127609 - RNA, 19 nt, Artificial Sequence
  Description of Artificial Sequence: Synthetic oligonucleotide
gguagaacauggccaagcc

SEQ ID NO: 1127610 - RNA, 19 nt, Artificial Sequence
  Description of Artificial Sequence: Synthetic oligonucleotide
guagccaaccaaaauauua

SEQ ID NO: 1127611 - RNA, 19 nt, Artificial Sequence
  Description of Artificial Sequence: Synthetic oligonucleotide
caguauagacauuacggaa

SEQ ID NO: 1127612 - RNA, 19 nt, Artificial Sequence
  Description of Artificial Sequence: Synthetic oligonucleotide
ugcaagagauaaacaguua

SEQ ID NO: 1127613 - RNA, 19 nt, Artificial Sequence
  Description of Artificial Sequence: Synthetic oligonucleotide
gccaugccuacauaaaacc

SEQ ID NO: 1127614 - RNA, 19 nt, Artificial Sequence
  Description of Artificial Sequence: Synthetic oligonucleotide
auaaggucuaacacaauuu

SEQ ID NO: 1127615 - RNA, 19 nt, Artificial Sequence
  Description of Artificial Sequence: Synthetic oligonucleotide
gguauugaagccaauacua

SEQ ID NO: 1127616 - RNA, 19 nt, Artificial Sequence
  Description of Artificial Sequence: Synthetic oligonucleotide
ucacgauuugugagaacaa

SEQ ID NO: 1127617 - RNA, 19 nt, Artificial Sequence
  Description of Artificial Sequence: Synthetic oligonucleotide
uucaucucacgagaaggcu

SEQ ID NO: 1127618 - RNA, 19 nt, Artificial Sequence
  Description of Artificial Sequence: Synthetic oligonucleotide
aaccaguccuauaauuccu

SEQ ID NO: 1127619 - RNA, 19 nt, Artificial Sequence
  Description of Artificial Sequence: Synthetic oligonucleotide
aucuacagcucggugaaca

SEQ ID NO: 1127620 - RNA, 19 nt, Artificial Sequence
  Description of Artificial Sequence: Synthetic oligonucleotide
gcaguauagacauuacgga

SEQ ID NO: 1127621 - RNA, 19 nt, Artificial Sequence
  Description of Artificial Sequence: Synthetic oligonucleotide
caucggcacagcaagcaug

SEQ ID NO: 1127622 - RNA, 19 nt, Artificial Sequence
  Description of Artificial Sequence: Synthetic oligonucleotide
acgauuugugagaacaagu

SEQ ID NO: 1127623 - RNA, 19 nt, Artificial Sequence
  Description of Artificial Sequence: Synthetic oligonucleotide
uaauugcgacugcuguagc

SEQ ID NO: 1127624 - RNA, 19 nt, Artificial Sequence
  Description of Artificial Sequence: Synthetic oligonucleotide
caaaaggcagccauaguua

SEQ ID NO: 1127625 - RNA, 19 nt, Artificial Sequence
  Description of Artificial Sequence: Synthetic oligonucleotide
uguugacucaucacuuguu

SEQ ID NO: 1127626 - RNA, 19 nt, Artificial Sequence
  Description of Artificial Sequence: Synthetic oligonucleotide
aaaauagcauaaggucuaa

SEQ ID NO: 1127627 - RNA, 19 nt, Artificial Sequence
  Description of Artificial Sequence: Synthetic oligonucleotide
cucgccacggagcacaguc

SEQ ID NO: 1127628 - RNA, 19 nt, Artificial Sequence
  Description of Artificial Sequence: Synthetic oligonucleotide
gcgauacacagcuuuguag

SEQ ID NO: 1127629 - RNA, 19 nt, Artificial Sequence
  Description of Artificial Sequence: Synthetic oligonucleotide
auagcagaccaugucaaau

SEQ ID NO: 1127630 - RNA, 19 nt, Artificial Sequence
  Description of Artificial Sequence: Synthetic oligonucleotide
aaagcacaagcgauacaca

SEQ ID NO: 1127631 - RNA, 19 nt, Artificial Sequence
  Description of Artificial Sequence: Synthetic oligonucleotide
gauaugccuaucggugucc

SEQ ID NO: 1127632 - RNA, 19 nt, Artificial Sequence
  Description of Artificial Sequence: Synthetic oligonucleotide
cagaauccguuguggacag

SEQ ID NO: 1127633 - RNA, 19 nt, Artificial Sequence
  Description of Artificial Sequence: Synthetic oligonucleotide
uuggaucuugggcaguaua

SEQ ID NO: 1127634 - RNA, 19 nt, Artificial Sequence
  Description of Artificial Sequence: Synthetic oligonucleotide
cauguugacacugauaaau

SEQ ID NO: 1127635 - RNA, 19 nt, Artificial Sequence
  Description of Artificial Sequence: Synthetic oligonucleotide
uaguagacuuggauugcaa

SEQ ID NO: 1127636 - RNA, 19 nt, Artificial Sequence
  Description of Artificial Sequence: Synthetic oligonucleotide
aagcgauacacagcuuugu

SEQ ID NO: 1127637 - RNA, 19 nt, Artificial Sequence
  Description of Artificial Sequence: Synthetic oligonucleotide
ugaaaccaacugucaagaa

SEQ ID NO: 1127638 - RNA, 19 nt, Artificial Sequence
  Description of Artificial Sequence: Synthetic oligonucleotide
gacacugauaaaugccuua

SEQ ID NO: 1127639 - RNA, 19 nt, Artificial Sequence
  Description of Artificial Sequence: Synthetic oligonucleotide
ggcaacuaaagacagcaaa

SEQ ID NO: 1127640 - RNA, 19 nt, Artificial Sequence
  Description of Artificial Sequence: Synthetic oligonucleotide
uugcaauuuguuucugguu

SEQ ID NO: 1127641 - RNA, 19 nt, Artificial Sequence
  Description of Artificial Sequence: Synthetic oligonucleotide
cagaaguccgauucaguca

SEQ ID NO: 1127642 - RNA, 19 nt, Artificial Sequence
  Description of Artificial Sequence: Synthetic oligonucleotide
gauagggcuugugguauug

SEQ ID NO: 1127643 - RNA, 19 nt, Artificial Sequence
  Description of Artificial Sequence: Synthetic oligonucleotide
aaauggcagaguaaaucua

SEQ ID NO: 1127644 - RNA, 19 nt, Artificial Sequence
  Description of Artificial Sequence: Synthetic oligonucleotide
ggaguaacuguaagugacg

SEQ ID NO: 1127645 - RNA, 19 nt, Artificial Sequence
  Description of Artificial Sequence: Synthetic oligonucleotide
uguagccaaccaaaauauu

SEQ ID NO: 1127646 - RNA, 19 nt, Artificial Sequence
  Description of Artificial Sequence: Synthetic oligonucleotide
uggcagaguaaaucuaauu

SEQ ID NO: 1127647 - RNA, 19 nt, Artificial Sequence
  Description of Artificial Sequence: Synthetic oligonucleotide
cacuuugaucauuaguaaa

SEQ ID NO: 1127648 - RNA, 19 nt, Artificial Sequence
  Description of Artificial Sequence: Synthetic oligonucleotide
cuugugguauugaagccaa

SEQ ID NO: 1127649 - RNA, 19 nt, Artificial Sequence
  Description of Artificial Sequence: Synthetic oligonucleotide
gagcaacauguugacacug

SEQ ID NO: 1127650 - RNA, 19 nt, Artificial Sequence
  Description of Artificial Sequence: Synthetic oligonucleotide
guugacucaucacuuguua

SEQ ID NO: 1127651 - RNA, 19 nt, Artificial Sequence
  Description of Artificial Sequence: Synthetic oligonucleotide
cgauuugugagaacaagug

SEQ ID NO: 1127652 - RNA, 19 nt, Artificial Sequence
  Description of Artificial Sequence: Synthetic oligonucleotide
uaacuguaagugacgccau

SEQ ID NO: 1127653 - RNA, 19 nt, Artificial Sequence
  Description of Artificial Sequence: Synthetic oligonucleotide
ucuaggaucgcugcugcuu

SEQ ID NO: 1127654 - RNA, 19 nt, Artificial Sequence
  Description of Artificial Sequence: Synthetic oligonucleotide
cuaucgguguccaccuuuc

SEQ ID NO: 1127655 - RNA, 19 nt, Artificial Sequence
  Description of Artificial Sequence: Synthetic oligonucleotide
aguccgauucagucaaaau

SEQ ID NO: 1127656 - RNA, 19 nt, Artificial Sequence
  Description of Artificial Sequence: Synthetic oligonucleotide
ugccuaucgguguccaccu

SEQ ID NO: 1127657 - RNA, 19 nt, Artificial Sequence
  Description of Artificial Sequence: Synthetic oligonucleotide
auugcgacugcuguagcaa

SEQ ID NO: 1127658 - RNA, 19 nt, Artificial Sequence
  Description of Artificial Sequence: Synthetic oligonucleotide
caacaauaauugcgacugc

SEQ ID NO: 1127659 - RNA, 19 nt, Artificial Sequence
  Description of Artificial Sequence: Synthetic oligonucleotide
cgauucauaucaucaauac

SEQ ID NO: 1127660 - RNA, 19 nt, Artificial Sequence
  Description of Artificial Sequence: Synthetic oligonucleotide
caauaauugcgacugcugu

SEQ ID NO: 1127661 - RNA, 19 nt, Artificial Sequence
  Description of Artificial Sequence: Synthetic oligonucleotide
guaccuguaccaguuggug

SEQ ID NO: 1127662 - RNA, 19 nt, Artificial Sequence
  Description of Artificial Sequence: Synthetic oligonucleotide
aaguccgauucagucaaaa

SEQ ID NO: 1127663 - RNA, 19 nt, Artificial Sequence
  Description of Artificial Sequence: Synthetic oligonucleotide
uaucgguguccaccuuucc

SEQ ID NO: 1127664 - RNA, 19 nt, Artificial Sequence
  Description of Artificial Sequence: Synthetic oligonucleotide
accugccaugccuacauaa

SEQ ID NO: 1127665 - RNA, 19 nt, Artificial Sequence
  Description of Artificial Sequence: Synthetic oligonucleotide
gaauucuugucacuuuaau

SEQ ID NO: 1127666 - RNA, 19 nt, Artificial Sequence
  Description of Artificial Sequence: Synthetic oligonucleotide
acauuacggaagcaccaau

SEQ ID NO: 1127667 - RNA, 19 nt, Artificial Sequence
  Description of Artificial Sequence: Synthetic oligonucleotide
cauaaggucuaacacaauu

SEQ ID NO: 1127668 - RNA, 19 nt, Artificial Sequence
  Description of Artificial Sequence: Synthetic oligonucleotide
agacuaguuguaugaggau

SEQ ID NO: 1127669 - RNA, 19 nt, Artificial Sequence
  Description of Artificial Sequence: Synthetic oligonucleotide
acaaccggcugggugagug

SEQ ID NO: 1127670 - RNA, 19 nt, Artificial Sequence
  Description of Artificial Sequence: Synthetic oligonucleotide
ugagaacaaguggugccac

SEQ ID NO: 1127671 - RNA, 19 nt, Artificial Sequence
  Description of Artificial Sequence: Synthetic oligonucleotide
ugcccguccuuugggauag

SEQ ID NO: 1127672 - RNA, 19 nt, Artificial Sequence
  Description of Artificial Sequence: Synthetic oligonucleotide
agcaucggcacagcaagca

SEQ ID NO: 1127673 - RNA, 19 nt, Artificial Sequence
  Description of Artificial Sequence: Synthetic oligonucleotide
cuauuguuggaaguacgga

SEQ ID NO: 1127674 - RNA, 19 nt, Artificial Sequence
  Description of Artificial Sequence: Synthetic oligonucleotide
agcgauacacagcuuugua

SEQ ID NO: 1127675 - RNA, 19 nt, Artificial Sequence
  Description of Artificial Sequence: Synthetic oligonucleotide
gaagugaaagaaggaguaa

SEQ ID NO: 1127676 - RNA, 19 nt, Artificial Sequence
  Description of Artificial Sequence: Synthetic oligonucleotide
ugggugaguguaguagaca

SEQ ID NO: 1127677 - RNA, 19 nt, Artificial Sequence
  Description of Artificial Sequence: Synthetic oligonucleotide
cacuagggcagcaucggca

SEQ ID NO: 1127678 - RNA, 19 nt, Artificial Sequence
  Description of Artificial Sequence: Synthetic oligonucleotide
cagaguaaaucuaauucau

SEQ ID NO: 1127679 - RNA, 19 nt, Artificial Sequence
  Description of Artificial Sequence: Synthetic oligonucleotide
ucccugguauuaacauuac

SEQ ID NO: 1127680 - RNA, 19 nt, Artificial Sequence
  Description of Artificial Sequence: Synthetic oligonucleotide
gaauaagaugauggcaacu

SEQ ID NO: 1127681 - RNA, 19 nt, Artificial Sequence
  Description of Artificial Sequence: Synthetic oligonucleotide
auuuucacccagacugcug

SEQ ID NO: 1127682 - RNA, 19 nt, Artificial Sequence
  Description of Artificial Sequence: Synthetic oligonucleotide
guagacuuggauugcaauu

SEQ ID NO: 1127683 - RNA, 19 nt, Artificial Sequence
  Description of Artificial Sequence: Synthetic oligonucleotide
acuacuuaguagacuugga

SEQ ID NO: 1127684 - RNA, 19 nt, Artificial Sequence
  Description of Artificial Sequence: Synthetic oligonucleotide
auacuacuuaguagacuug

SEQ ID NO: 1127685 - RNA, 19 nt, Artificial Sequence
  Description of Artificial Sequence: Synthetic oligonucleotide
gggugaguguaguagacaa

SEQ ID NO: 1127686 - RNA, 19 nt, Artificial Sequence
  Description of Artificial Sequence: Synthetic oligonucleotide
gacauuacggaagcaccaa

SEQ ID NO: 1127687 - RNA, 19 nt, Artificial Sequence
  Description of Artificial Sequence: Synthetic oligonucleotide
gaacaaccggcugggugag

SEQ ID NO: 1127688 - RNA, 19 nt, Artificial Sequence
  Description of Artificial Sequence: Synthetic oligonucleotide
ggcuugugguauugaagcc

SEQ ID NO: 1127689 - RNA, 19 nt, Artificial Sequence
  Description of Artificial Sequence: Synthetic oligonucleotide
gguugugauucuuggaucu

SEQ ID NO: 1127690 - RNA, 19 nt, Artificial Sequence
  Description of Artificial Sequence: Synthetic oligonucleotide
gcaccaacaauaauugcga

SEQ ID NO: 1127691 - RNA, 19 nt, Artificial Sequence
  Description of Artificial Sequence: Synthetic oligonucleotide
agaggagaagguagaacau

SEQ ID NO: 1127692 - RNA, 19 nt, Artificial Sequence
  Description of Artificial Sequence: Synthetic oligonucleotide
uugcgacugcuguagcaaa

SEQ ID NO: 1127693 - RNA, 19 nt, Artificial Sequence
  Description of Artificial Sequence: Synthetic oligonucleotide
gacugcuguagcaaauuua

SEQ ID NO: 1127694 - RNA, 19 nt, Artificial Sequence
  Description of Artificial Sequence: Synthetic oligonucleotide
gcaagacuaguuguaugag

SEQ ID NO: 1127695 - RNA, 19 nt, Artificial Sequence
  Description of Artificial Sequence: Synthetic oligonucleotide
gccuacauaaaaccacaca

SEQ ID NO: 1127696 - RNA, 19 nt, Artificial Sequence
  Description of Artificial Sequence: Synthetic oligonucleotide
uaugccuaucgguguccac

SEQ ID NO: 1127697 - RNA, 19 nt, Artificial Sequence
  Description of Artificial Sequence: Synthetic oligonucleotide
ugagggucaucaugauaua

SEQ ID NO: 1127698 - RNA, 19 nt, Artificial Sequence
  Description of Artificial Sequence: Synthetic oligonucleotide
acgagaaggcucguaccug

SEQ ID NO: 1127699 - RNA, 19 nt, Artificial Sequence
  Description of Artificial Sequence: Synthetic oligonucleotide
uuguuagagucaguuuauu

SEQ ID NO: 1127700 - RNA, 19 nt, Artificial Sequence
  Description of Artificial Sequence: Synthetic oligonucleotide
guguugacucaucacuugu

SEQ ID NO: 1127701 - RNA, 19 nt, Artificial Sequence
  Description of Artificial Sequence: Synthetic oligonucleotide
auaugccuaucggugucca

SEQ ID NO: 1127702 - RNA, 19 nt, Artificial Sequence
  Description of Artificial Sequence: Synthetic oligonucleotide
cucguaccuguaccaguug

SEQ ID NO: 1127703 - RNA, 19 nt, Artificial Sequence
  Description of Artificial Sequence: Synthetic oligonucleotide
ucaugccagaaguccgauu

SEQ ID NO: 1127704 - RNA, 19 nt, Artificial Sequence
  Description of Artificial Sequence: Synthetic oligonucleotide
aggcucguaccuguaccag

SEQ ID NO: 1127705 - RNA, 19 nt, Artificial Sequence
  Description of Artificial Sequence: Synthetic oligonucleotide
uucaugccagaaguccgau

SEQ ID NO: 1127706 - RNA, 19 nt, Artificial Sequence
  Description of Artificial Sequence: Synthetic oligonucleotide
gguauccagcucgccacgg

SEQ ID NO: 1127707 - RNA, 19 nt, Artificial Sequence
  Description of Artificial Sequence: Synthetic oligonucleotide
cacgagaaggcucguaccu

SEQ ID NO: 1127708 - RNA, 19 nt, Artificial Sequence
  Description of Artificial Sequence: Synthetic oligonucleotide
cuuucaacccaugauucau

SEQ ID NO: 1127709 - RNA, 19 nt, Artificial Sequence
  Description of Artificial Sequence: Synthetic oligonucleotide
ccgauucagucaaaaucac

SEQ ID NO: 1127710 - RNA, 19 nt, Artificial Sequence
  Description of Artificial Sequence: Synthetic oligonucleotide
uugugguauugaagccaau

SEQ ID NO: 1127711 - RNA, 19 nt, Artificial Sequence
  Description of Artificial Sequence: Synthetic oligonucleotide
ccagaauccguuguggaca

SEQ ID NO: 1127712 - RNA, 19 nt, Artificial Sequence
  Description of Artificial Sequence: Synthetic oligonucleotide
ccaguccuauaauuccuug

SEQ ID NO: 1127713 - RNA, 19 nt, Artificial Sequence
  Description of Artificial Sequence: Synthetic oligonucleotide
ggaauacugcuaaugucaa

SEQ ID NO: 1127714 - RNA, 19 nt, Artificial Sequence
  Description of Artificial Sequence: Synthetic oligonucleotide
guauccagcucgccacgga

SEQ ID NO: 1127715 - RNA, 19 nt, Artificial Sequence
  Description of Artificial Sequence: Synthetic oligonucleotide
gaguucccuucuuccaucu

SEQ ID NO: 1127716 - RNA, 19 nt, Artificial Sequence
  Description of Artificial Sequence: Synthetic oligonucleotide
gccacacaaacaugguauc

SEQ ID NO: 1127717 - RNA, 19 nt, Artificial Sequence
  Description of Artificial Sequence: Synthetic oligonucleotide
acgccaucccucucauuau

SEQ ID NO: 1127718 - RNA, 19 nt, Artificial Sequence
  Description of Artificial Sequence: Synthetic oligonucleotide
gcaacuaaagacagcaaau

SEQ ID NO: 1127719 - RNA, 19 nt, Artificial Sequence
  Description of Artificial Sequence: Synthetic oligonucleotide
ggggcgcugccacacaaac

SEQ ID NO: 1127720 - RNA, 19 nt, Artificial Sequence
  Description of Artificial Sequence: Synthetic oligonucleotide
caaugaccaaagugggacu

SEQ ID NO: 1127721 - RNA, 19 nt, Artificial Sequence
  Description of Artificial Sequence: Synthetic oligonucleotide
guuggaaguacggaugcuu

SEQ ID NO: 1127722 - RNA, 19 nt, Artificial Sequence
  Description of Artificial Sequence: Synthetic oligonucleotide
ucucacgagaaggcucgua

SEQ ID NO: 1127723 - RNA, 19 nt, Artificial Sequence
  Description of Artificial Sequence: Synthetic oligonucleotide
gcgauucauaucaucaaua

SEQ ID NO: 1127724 - RNA, 19 nt, Artificial Sequence
  Description of Artificial Sequence: Synthetic oligonucleotide
caguguugacucaucacuu

SEQ ID NO: 1127725 - RNA, 19 nt, Artificial Sequence
  Description of Artificial Sequence: Synthetic oligonucleotide
augaccaaagugggacuuu

SEQ ID NO: 1127726 - RNA, 19 nt, Artificial Sequence
  Description of Artificial Sequence: Synthetic oligonucleotide
cuaguuguaugaggaugaa

SEQ ID NO: 1127727 - RNA, 19 nt, Artificial Sequence
  Description of Artificial Sequence: Synthetic oligonucleotide
ggauugcaauuuguuucug

SEQ ID NO: 1127728 - RNA, 19 nt, Artificial Sequence
  Description of Artificial Sequence: Synthetic oligonucleotide
cggaugcuugaauaaaaca

SEQ ID NO: 1127729 - RNA, 19 nt, Artificial Sequence
  Description of Artificial Sequence: Synthetic oligonucleotide
cagcucgccacggagcaca

SEQ ID NO: 1127730 - RNA, 19 nt, Artificial Sequence
  Description of Artificial Sequence: Synthetic oligonucleotide
agcugauaauagggcugca

SEQ ID NO: 1127731 - RNA, 19 nt, Artificial Sequence
  Description of Artificial Sequence: Synthetic oligonucleotide
cuaggaucgcugcugcuuu

SEQ ID NO: 1127732 - RNA, 19 nt, Artificial Sequence
  Description of Artificial Sequence: Synthetic oligonucleotide
aacaaccggcugggugagu

SEQ ID NO: 1127733 - RNA, 19 nt, Artificial Sequence
  Description of Artificial Sequence: Synthetic oligonucleotide
ccguuguggacaguggcuc

SEQ ID NO: 1127734 - RNA, 19 nt, Artificial Sequence
  Description of Artificial Sequence: Synthetic oligonucleotide
ugguaacaguggaguuguu

SEQ ID NO: 1127735 - RNA, 19 nt, Artificial Sequence
  Description of Artificial Sequence: Synthetic oligonucleotide
ggugaguguaguagacaaa

SEQ ID NO: 1127736 - RNA, 19 nt, Artificial Sequence
  Description of Artificial Sequence: Synthetic oligonucleotide
cagccauaguuauguuucu

SEQ ID NO: 1127737 - RNA, 19 nt, Artificial Sequence
  Description of Artificial Sequence: Synthetic oligonucleotide
gaaguccgauucagucaaa

SEQ ID NO: 1127738 - RNA, 19 nt, Artificial Sequence
  Description of Artificial Sequence: Synthetic oligonucleotide
guccaccuuuccuaauuuu

SEQ ID NO: 1127739 - RNA, 19 nt, Artificial Sequence
  Description of Artificial Sequence: Synthetic oligonucleotide
cccguccuuugggauaggg

SEQ ID NO: 1127740 - RNA, 19 nt, Artificial Sequence
  Description of Artificial Sequence: Synthetic oligonucleotide
gcauaccaacaucuugagu

SEQ ID NO: 1127741 - RNA, 19 nt, Artificial Sequence
  Description of Artificial Sequence: Synthetic oligonucleotide
cacugauaaaugccuuauu

SEQ ID NO: 1127742 - RNA, 19 nt, Artificial Sequence
  Description of Artificial Sequence: Synthetic oligonucleotide
ugacgccaucccucucauu

SEQ ID NO: 1127743 - RNA, 19 nt, Artificial Sequence
  Description of Artificial Sequence: Synthetic oligonucleotide
caccaaugcagagcaacau

SEQ ID NO: 1127744 - RNA, 19 nt, Artificial Sequence
  Description of Artificial Sequence: Synthetic oligonucleotide
agcucgccacggagcacag

SEQ ID NO: 1127745 - RNA, 19 nt, Artificial Sequence
  Description of Artificial Sequence: Synthetic oligonucleotide
ccaucccugguauuaacau

SEQ ID NO: 1127746 - RNA, 19 nt, Artificial Sequence
  Description of Artificial Sequence: Synthetic oligonucleotide
gcugauaauagggcugcau

SEQ ID NO: 1127747 - RNA, 19 nt, Artificial Sequence
  Description of Artificial Sequence: Synthetic oligonucleotide
gggauagggcuugugguau

SEQ ID NO: 1127748 - RNA, 19 nt, Artificial Sequence
  Description of Artificial Sequence: Synthetic oligonucleotide
cagcaagcauggggcgcug

SEQ ID NO: 1127749 - RNA, 19 nt, Artificial Sequence
  Description of Artificial Sequence: Synthetic oligonucleotide
cgccaucccucucauuauc

SEQ ID NO: 1127750 - RNA, 19 nt, Artificial Sequence
  Description of Artificial Sequence: Synthetic oligonucleotide
gcaucggcacagcaagcau

SEQ ID NO: 1127751 - RNA, 19 nt, Artificial Sequence
  Description of Artificial Sequence: Synthetic oligonucleotide
gcucguaccuguaccaguu

SEQ ID NO: 1127752 - RNA, 19 nt, Artificial Sequence
  Description of Artificial Sequence: Synthetic oligonucleotide
ccuaucgguguccaccuuu

SEQ ID NO: 1127753 - RNA, 19 nt, Artificial Sequence
  Description of Artificial Sequence: Synthetic oligonucleotide
gguguccaccuuuccuaau

SEQ ID NO: 1127754 - RNA, 19 nt, Artificial Sequence
  Description of Artificial Sequence: Synthetic oligonucleotide
ggauagggcuugugguauu

SEQ ID NO: 1127755 - RNA, 19 nt, Artificial Sequence
  Description of Artificial Sequence: Synthetic oligonucleotide
gccacggagcacaguccca

SEQ ID NO: 1127756 - RNA, 19 nt, Artificial Sequence
  Description of Artificial Sequence: Synthetic oligonucleotide
gcauaaggucuaacacaau

SEQ ID NO: 1127757 - RNA, 19 nt, Artificial Sequence
  Description of Artificial Sequence: Synthetic oligonucleotide
gcccguccuuugggauagg

SEQ ID NO: 1127758 - RNA, 19 nt, Artificial Sequence
  Description of Artificial Sequence: Synthetic oligonucleotide
gccuaucgguguccaccuu

SEQ ID NO: 1127759 - RNA, 19 nt, Artificial Sequence
  Description of Artificial Sequence: Synthetic oligonucleotide
gcucgccacggagcacagu

SEQ ID NO: 1127760 - RNA, 19 nt, Artificial Sequence
  Description of Artificial Sequence: Synthetic oligonucleotide
ugaaagaugagacagaugu

SEQ ID NO: 1127761 - RNA, 19 nt, Artificial Sequence
  Description of Artificial Sequence: Synthetic oligonucleotide
aguucaucgaguuuugucc

SEQ ID NO: 1127762 - RNA, 19 nt, Artificial Sequence
  Description of Artificial Sequence: Synthetic oligonucleotide
ucuugcauagcaauaaugc

SEQ ID NO: 1127763 - RNA, 19 nt, Artificial Sequence
  Description of Artificial Sequence: Synthetic oligonucleotide
aaucacuggauucaaaugu

SEQ ID NO: 1127764 - RNA, 19 nt, Artificial Sequence
  Description of Artificial Sequence: Synthetic oligonucleotide
aauauuacguuuuggagaa

SEQ ID NO: 1127765 - RNA, 19 nt, Artificial Sequence
  Description of Artificial Sequence: Synthetic oligonucleotide
uucaucguaguaaaguccg

SEQ ID NO: 1127766 - RNA, 19 nt, Artificial Sequence
  Description of Artificial Sequence: Synthetic oligonucleotide
ugaucuacacaauauuacg

SEQ ID NO: 1127767 - RNA, 19 nt, Artificial Sequence
  Description of Artificial Sequence: Synthetic oligonucleotide
aguccggucauauugcucc

SEQ ID NO: 1127768 - RNA, 19 nt, Artificial Sequence
  Description of Artificial Sequence: Synthetic oligonucleotide
agucauuaggguccaaucc

SEQ ID NO: 1127769 - RNA, 19 nt, Artificial Sequence
  Description of Artificial Sequence: Synthetic oligonucleotide
ugaaauguugaucuguuuc

SEQ ID NO: 1127770 - RNA, 19 nt, Artificial Sequence
  Description of Artificial Sequence: Synthetic oligonucleotide
uguuucuagaacaucaauc

SEQ ID NO: 1127771 - RNA, 19 nt, Artificial Sequence
  Description of Artificial Sequence: Synthetic oligonucleotide
acaauauuacguuuuggag

SEQ ID NO: 1127772 - RNA, 19 nt, Artificial Sequence
  Description of Artificial Sequence: Synthetic oligonucleotide
auggugacuuacuaagucc

SEQ ID NO: 1127773 - RNA, 19 nt, Artificial Sequence
  Description of Artificial Sequence: Synthetic oligonucleotide
uucuagaacaucaaucacu

SEQ ID NO: 1127774 - RNA, 19 nt, Artificial Sequence
  Description of Artificial Sequence: Synthetic oligonucleotide
gauaaaagaagggauguug

SEQ ID NO: 1127775 - RNA, 19 nt, Artificial Sequence
  Description of Artificial Sequence: Synthetic oligonucleotide
uucucuguagcucucaaga

SEQ ID NO: 1127776 - RNA, 19 nt, Artificial Sequence
  Description of Artificial Sequence: Synthetic oligonucleotide
aacucuuucuucucuguag

SEQ ID NO: 1127777 - RNA, 19 nt, Artificial Sequence
  Description of Artificial Sequence: Synthetic oligonucleotide
aagucauuaggguccaauc

SEQ ID NO: 1127778 - RNA, 19 nt, Artificial Sequence
  Description of Artificial Sequence: Synthetic oligonucleotide
ugugcuuuaaaguauuuau

SEQ ID NO: 1127779 - RNA, 19 nt, Artificial Sequence
  Description of Artificial Sequence: Synthetic oligonucleotide
augacguguucucucaucc

SEQ ID NO: 1127780 - RNA, 19 nt, Artificial Sequence
  Description of Artificial Sequence: Synthetic oligonucleotide
uuuaguugaucuuugcuuc

SEQ ID NO: 1127781 - RNA, 19 nt, Artificial Sequence
  Description of Artificial Sequence: Synthetic oligonucleotide
ucuagggguaagaugaucu

SEQ ID NO: 1127782 - RNA, 19 nt, Artificial Sequence
  Description of Artificial Sequence: Synthetic oligonucleotide
aagguuuuaccuuuguuuu

SEQ ID NO: 1127783 - RNA, 19 nt, Artificial Sequence
  Description of Artificial Sequence: Synthetic oligonucleotide
uacaucuauaggcacagcu

SEQ ID NO: 1127784 - RNA, 19 nt, Artificial Sequence
  Description of Artificial Sequence: Synthetic oligonucleotide
gguaagaugaucuacacaa

SEQ ID NO: 1127785 - RNA, 19 nt, Artificial Sequence
  Description of Artificial Sequence: Synthetic oligonucleotide
uuaaacuccaguucuccug

SEQ ID NO: 1127786 - RNA, 19 nt, Artificial Sequence
  Description of Artificial Sequence: Synthetic oligonucleotide
ucuagaacaucaaucacuu

SEQ ID NO: 1127787 - RNA, 19 nt, Artificial Sequence
  Description of Artificial Sequence: Synthetic oligonucleotide
acuuacuaaguccagcucu

SEQ ID NO: 1127788 - RNA, 19 nt, Artificial Sequence
  Description of Artificial Sequence: Synthetic oligonucleotide
uacguuuuggagaacagau

SEQ ID NO: 1127789 - RNA, 19 nt, Artificial Sequence
  Description of Artificial Sequence: Synthetic oligonucleotide
agagcaguaagcaugcacg

SEQ ID NO: 1127790 - RNA, 19 nt, Artificial Sequence
  Description of Artificial Sequence: Synthetic oligonucleotide
augaucuacacaauauuac

SEQ ID NO: 1127791 - RNA, 19 nt, Artificial Sequence
  Description of Artificial Sequence: Synthetic oligonucleotide
caauauuacguuuuggaga

SEQ ID NO: 1127792 - RNA, 19 nt, Artificial Sequence
  Description of Artificial Sequence: Synthetic oligonucleotide
uacuguagcuggaugaucu

SEQ ID NO: 1127793 - RNA, 19 nt, Artificial Sequence
  Description of Artificial Sequence: Synthetic oligonucleotide
uucuugcauagcaauaaug

SEQ ID NO: 1127794 - RNA, 19 nt, Artificial Sequence
  Description of Artificial Sequence: Synthetic oligonucleotide
uggagaacagaucuuggcu

SEQ ID NO: 1127795 - RNA, 19 nt, Artificial Sequence
  Description of Artificial Sequence: Synthetic oligonucleotide
auagcaauaaugcuuucau

SEQ ID NO: 1127796 - RNA, 19 nt, Artificial Sequence
  Description of Artificial Sequence: Synthetic oligonucleotide
aauucuuguucguccagga

SEQ ID NO: 1127797 - RNA, 19 nt, Artificial Sequence
  Description of Artificial Sequence: Synthetic oligonucleotide
gaugauugacuuuggggug

SEQ ID NO: 1127798 - RNA, 19 nt, Artificial Sequence
  Description of Artificial Sequence: Synthetic oligonucleotide
uugcauagcaauaaugcuu

SEQ ID NO: 1127799 - RNA, 19 nt, Artificial Sequence
  Description of Artificial Sequence: Synthetic oligonucleotide
cucaagaauucuuccagag

SEQ ID NO: 1127800 - RNA, 19 nt, Artificial Sequence
  Description of Artificial Sequence: Synthetic oligonucleotide
uauuacguuuuggagaaca

SEQ ID NO: 1127801 - RNA, 19 nt, Artificial Sequence
  Description of Artificial Sequence: Synthetic oligonucleotide
ucuaucaugucauccucug

SEQ ID NO: 1127802 - RNA, 19 nt, Artificial Sequence
  Description of Artificial Sequence: Synthetic oligonucleotide
auucaugacguguucucuc

SEQ ID NO: 1127803 - RNA, 19 nt, Artificial Sequence
  Description of Artificial Sequence: Synthetic oligonucleotide
aguauuuauugagugaaga

SEQ ID NO: 1127804 - RNA, 19 nt, Artificial Sequence
  Description of Artificial Sequence: Synthetic oligonucleotide
uggugacuuacuaagucca

SEQ ID NO: 1127805 - RNA, 19 nt, Artificial Sequence
  Description of Artificial Sequence: Synthetic oligonucleotide
cacaauauuacguuuugga

SEQ ID NO: 1127806 - RNA, 19 nt, Artificial Sequence
  Description of Artificial Sequence: Synthetic oligonucleotide
ucgaguuuuguccucacau

SEQ ID NO: 1127807 - RNA, 19 nt, Artificial Sequence
  Description of Artificial Sequence: Synthetic oligonucleotide
aguaagcaugcacgggacc

SEQ ID NO: 1127808 - RNA, 19 nt, Artificial Sequence
  Description of Artificial Sequence: Synthetic oligonucleotide
gagaacagaucuuggcucc

SEQ ID NO: 1127809 - RNA, 19 nt, Artificial Sequence
  Description of Artificial Sequence: Synthetic oligonucleotide
ugcgaggcuaagcugacug

SEQ ID NO: 1127810 - RNA, 19 nt, Artificial Sequence
  Description of Artificial Sequence: Synthetic oligonucleotide
aucauuguugacaucaugu

SEQ ID NO: 1127811 - RNA, 19 nt, Artificial Sequence
  Description of Artificial Sequence: Synthetic oligonucleotide
uggagcuuuucucugaaau

SEQ ID NO: 1127812 - RNA, 19 nt, Artificial Sequence
  Description of Artificial Sequence: Synthetic oligonucleotide
ucuuguucguccaggaauc

SEQ ID NO: 1127813 - RNA, 19 nt, Artificial Sequence
  Description of Artificial Sequence: Synthetic oligonucleotide
uguugaaagaugagacaga

SEQ ID NO: 1127814 - RNA, 19 nt, Artificial Sequence
  Description of Artificial Sequence: Synthetic oligonucleotide
ucguaguaaaguccggugu

SEQ ID NO: 1127815 - RNA, 19 nt, Artificial Sequence
  Description of Artificial Sequence: Synthetic oligonucleotide
uguggcuuaaacuccaguu

SEQ ID NO: 1127816 - RNA, 19 nt, Artificial Sequence
  Description of Artificial Sequence: Synthetic oligonucleotide
aagaugaucuacacaauau

SEQ ID NO: 1127817 - RNA, 19 nt, Artificial Sequence
  Description of Artificial Sequence: Synthetic oligonucleotide
uuaaacucuucaugccgag

SEQ ID NO: 1127818 - RNA, 19 nt, Artificial Sequence
  Description of Artificial Sequence: Synthetic oligonucleotide
uuacguguguggcuuaaac

SEQ ID NO: 1127819 - RNA, 19 nt, Artificial Sequence
  Description of Artificial Sequence: Synthetic oligonucleotide
ucauccuaagccuuucuuc

SEQ ID NO: 1127820 - RNA, 19 nt, Artificial Sequence
  Description of Artificial Sequence: Synthetic oligonucleotide
caucuauaggcacagcuuc

SEQ ID NO: 1127821 - RNA, 19 nt, Artificial Sequence
  Description of Artificial Sequence: Synthetic oligonucleotide
ugaauaacuguugcugccc

SEQ ID NO: 1127822 - RNA, 19 nt, Artificial Sequence
  Description of Artificial Sequence: Synthetic oligonucleotide
gauacuccuguuucugagc

SEQ ID NO: 1127823 - RNA, 19 nt, Artificial Sequence
  Description of Artificial Sequence: Synthetic oligonucleotide
gaucucuagggguaagaug

SEQ ID NO: 1127824 - RNA, 19 nt, Artificial Sequence
  Description of Artificial Sequence: Synthetic oligonucleotide
gagcaguaagcaugcacgg

SEQ ID NO: 1127825 - RNA, 19 nt, Artificial Sequence
  Description of Artificial Sequence: Synthetic oligonucleotide
uguugaguuaacaguuuuc

SEQ ID NO: 1127826 - RNA, 19 nt, Artificial Sequence
  Description of Artificial Sequence: Synthetic oligonucleotide
aacuguugcugccccaaug

SEQ ID NO: 1127827 - RNA, 19 nt, Artificial Sequence
  Description of Artificial Sequence: Synthetic oligonucleotide
agaugagacagauguugag

SEQ ID NO: 1127828 - RNA, 19 nt, Artificial Sequence
  Description of Artificial Sequence: Synthetic oligonucleotide
ucugaaauguugaucuguu

SEQ ID NO: 1127829 - RNA, 19 nt, Artificial Sequence
  Description of Artificial Sequence: Synthetic oligonucleotide
uuccagagucaccaaucgg

SEQ ID NO: 1127830 - RNA, 19 nt, Artificial Sequence
  Description of Artificial Sequence: Synthetic oligonucleotide
aucuugaagggaauccagc

SEQ ID NO: 1127831 - RNA, 19 nt, Artificial Sequence
  Description of Artificial Sequence: Synthetic oligonucleotide
uuuguccucacauggugac

SEQ ID NO: 1127832 - RNA, 19 nt, Artificial Sequence
  Description of Artificial Sequence: Synthetic oligonucleotide
auaaaagaagggauguuga

SEQ ID NO: 1127833 - RNA, 19 nt, Artificial Sequence
  Description of Artificial Sequence: Synthetic oligonucleotide
uggagcaaucccuugcuga

SEQ ID NO: 1127834 - RNA, 19 nt, Artificial Sequence
  Description of Artificial Sequence: Synthetic oligonucleotide
auauccaaaucacuggauu

SEQ ID NO: 1127835 - RNA, 19 nt, Artificial Sequence
  Description of Artificial Sequence: Synthetic oligonucleotide
ucuauccuugcacuuucca

SEQ ID NO: 1127836 - RNA, 19 nt, Artificial Sequence
  Description of Artificial Sequence: Synthetic oligonucleotide
aucuacacaauauuacguu

SEQ ID NO: 1127837 - RNA, 19 nt, Artificial Sequence
  Description of Artificial Sequence: Synthetic oligonucleotide
cuuugauuagcauauccaa

SEQ ID NO: 1127838 - RNA, 19 nt, Artificial Sequence
  Description of Artificial Sequence: Synthetic oligonucleotide
ugagguauucaucguagua

SEQ ID NO: 1127839 - RNA, 19 nt, Artificial Sequence
  Description of Artificial Sequence: Synthetic oligonucleotide
ucuacacaauauuacguuu

SEQ ID NO: 1127840 - RNA, 19 nt, Artificial Sequence
  Description of Artificial Sequence: Synthetic oligonucleotide
auguugaucuguuucuaga

SEQ ID NO: 1127841 - RNA, 19 nt, Artificial Sequence
  Description of Artificial Sequence: Synthetic oligonucleotide
aucguaguaaaguccggug

SEQ ID NO: 1127842 - RNA, 19 nt, Artificial Sequence
  Description of Artificial Sequence: Synthetic oligonucleotide
uacguguguggcuuaaacu

SEQ ID NO: 1127843 - RNA, 19 nt, Artificial Sequence
  Description of Artificial Sequence: Synthetic oligonucleotide
ucaucguaguaaaguccgg

SEQ ID NO: 1127844 - RNA, 19 nt, Artificial Sequence
  Description of Artificial Sequence: Synthetic oligonucleotide
uuuauugagugaagauaaa

SEQ ID NO: 1127845 - RNA, 19 nt, Artificial Sequence
  Description of Artificial Sequence: Synthetic oligonucleotide
uguucguccaggaauccau

SEQ ID NO: 1127846 - RNA, 19 nt, Artificial Sequence
  Description of Artificial Sequence: Synthetic oligonucleotide
agcuuugaugagcauucuc

SEQ ID NO: 1127847 - RNA, 19 nt, Artificial Sequence
  Description of Artificial Sequence: Synthetic oligonucleotide
caggacuuuacgugugugg

SEQ ID NO: 1127848 - RNA, 19 nt, Artificial Sequence
  Description of Artificial Sequence: Synthetic oligonucleotide
ugaucuuugcuuccaggau

SEQ ID NO: 1127849 - RNA, 19 nt, Artificial Sequence
  Description of Artificial Sequence: Synthetic oligonucleotide
aucuauaggcacagcuucc

SEQ ID NO: 1127850 - RNA, 19 nt, Artificial Sequence
  Description of Artificial Sequence: Synthetic oligonucleotide
guuaucaaucucauucaug

SEQ ID NO: 1127851 - RNA, 19 nt, Artificial Sequence
  Description of Artificial Sequence: Synthetic oligonucleotide
caccaaucggucuuuguug

SEQ ID NO: 1127852 - RNA, 19 nt, Artificial Sequence
  Description of Artificial Sequence: Synthetic oligonucleotide
cacgggaccaaaagaaaac

SEQ ID NO: 1127853 - RNA, 19 nt, Artificial Sequence
  Description of Artificial Sequence: Synthetic oligonucleotide
uucccaaaccucuuuuagu

SEQ ID NO: 1127854 - RNA, 19 nt, Artificial Sequence
  Description of Artificial Sequence: Synthetic oligonucleotide
aaucggucuuuguuguuau

SEQ ID NO: 1127855 - RNA, 19 nt, Artificial Sequence
  Description of Artificial Sequence: Synthetic oligonucleotide
auucucugcgcucguguuc

SEQ ID NO: 1127856 - RNA, 19 nt, Artificial Sequence
  Description of Artificial Sequence: Synthetic oligonucleotide
uuacguuuuggagaacaga

SEQ ID NO: 1127857 - RNA, 19 nt, Artificial Sequence
  Description of Artificial Sequence: Synthetic oligonucleotide
ucauuaggguccaauccau

SEQ ID NO: 1127858 - RNA, 19 nt, Artificial Sequence
  Description of Artificial Sequence: Synthetic oligonucleotide
gagguauucaucguaguaa

SEQ ID NO: 1127859 - RNA, 19 nt, Artificial Sequence
  Description of Artificial Sequence: Synthetic oligonucleotide
uagcucucaagaauucuuc

SEQ ID NO: 1127860 - RNA, 19 nt, Artificial Sequence
  Description of Artificial Sequence: Synthetic oligonucleotide
accaaucggucuuuguugu

SEQ ID NO: 1127861 - RNA, 19 nt, Artificial Sequence
  Description of Artificial Sequence: Synthetic oligonucleotide
aaauauucucugcgcucgu

SEQ ID NO: 1127862 - RNA, 19 nt, Artificial Sequence
  Description of Artificial Sequence: Synthetic oligonucleotide
ucuauaggcacagcuucca

SEQ ID NO: 1127863 - RNA, 19 nt, Artificial Sequence
  Description of Artificial Sequence: Synthetic oligonucleotide
agauguugaguuaacaguu

SEQ ID NO: 1127864 - RNA, 19 nt, Artificial Sequence
  Description of Artificial Sequence: Synthetic oligonucleotide
aauauucucugcgcucgug

SEQ ID NO: 1127865 - RNA, 19 nt, Artificial Sequence
  Description of Artificial Sequence: Synthetic oligonucleotide
uucucugcgcucguguucc

SEQ ID NO: 1127866 - RNA, 19 nt, Artificial Sequence
  Description of Artificial Sequence: Synthetic oligonucleotide
acaguacuguagcuggaug

SEQ ID NO: 1127867 - RNA, 19 nt, Artificial Sequence
  Description of Artificial Sequence: Synthetic oligonucleotide
uggugauucaugccaguau

SEQ ID NO: 1127868 - RNA, 19 nt, Artificial Sequence
  Description of Artificial Sequence: Synthetic oligonucleotide
gugguuuagguguucgaac

SEQ ID NO: 1127869 - RNA, 19 nt, Artificial Sequence
  Description of Artificial Sequence: Synthetic oligonucleotide
uucguccaggaauccauca

SEQ ID NO: 1127870 - RNA, 19 nt, Artificial Sequence
  Description of Artificial Sequence: Synthetic oligonucleotide
acucucuugugaacagugc

SEQ ID NO: 1127871 - RNA, 19 nt, Artificial Sequence
  Description of Artificial Sequence: Synthetic oligonucleotide
acucuucaugccgaguccg

SEQ ID NO: 1127872 - RNA, 19 nt, Artificial Sequence
  Description of Artificial Sequence: Synthetic oligonucleotide
uguacagccugcugauacu

SEQ ID NO: 1127873 - RNA, 19 nt, Artificial Sequence
  Description of Artificial Sequence: Synthetic oligonucleotide
ggugauucaugccaguauc

SEQ ID NO: 1127874 - RNA, 19 nt, Artificial Sequence
  Description of Artificial Sequence: Synthetic oligonucleotide
agccgcgcgaacuccaauc

SEQ ID NO: 1127875 - RNA, 19 nt, Artificial Sequence
  Description of Artificial Sequence: Synthetic oligonucleotide
caggcuaaagguuuuaccu

SEQ ID NO: 1127876 - RNA, 19 nt, Artificial Sequence
  Description of Artificial Sequence: Synthetic oligonucleotide
ucucacuuaaaaggucucu

SEQ ID NO: 1127877 - RNA, 19 nt, Artificial Sequence
  Description of Artificial Sequence: Synthetic oligonucleotide
uucucacuuaaaaggucuc

SEQ ID NO: 1127878 - RNA, 19 nt, Artificial Sequence
  Description of Artificial Sequence: Synthetic oligonucleotide
auuacguuuuggagaacag

SEQ ID NO: 1127879 - RNA, 19 nt, Artificial Sequence
  Description of Artificial Sequence: Synthetic oligonucleotide
uguguggcuuaaacuccag

SEQ ID NO: 1127880 - RNA, 19 nt, Artificial Sequence
  Description of Artificial Sequence: Synthetic oligonucleotide
cauacacuuucuccaacuc

SEQ ID NO: 1127881 - RNA, 19 nt, Artificial Sequence
  Description of Artificial Sequence: Synthetic oligonucleotide
ucgaacugcuucagaagaa

SEQ ID NO: 1127882 - RNA, 19 nt, Artificial Sequence
  Description of Artificial Sequence: Synthetic oligonucleotide
gcaguugccgcuuugauua

SEQ ID NO: 1127883 - RNA, 19 nt, Artificial Sequence
  Description of Artificial Sequence: Synthetic oligonucleotide
auaaugcuuucauauucuu

SEQ ID NO: 1127884 - RNA, 19 nt, Artificial Sequence
  Description of Artificial Sequence: Synthetic oligonucleotide
guauucaucguaguaaagu

SEQ ID NO: 1127885 - RNA, 19 nt, Artificial Sequence
  Description of Artificial Sequence: Synthetic oligonucleotide
gagacagauguugaguuaa

SEQ ID NO: 1127886 - RNA, 19 nt, Artificial Sequence
  Description of Artificial Sequence: Synthetic oligonucleotide
ugcacgggaccaaaagaaa

SEQ ID NO: 1127887 - RNA, 19 nt, Artificial Sequence
  Description of Artificial Sequence: Synthetic oligonucleotide
uuguugacaucauguaauu

SEQ ID NO: 1127888 - RNA, 19 nt, Artificial Sequence
  Description of Artificial Sequence: Synthetic oligonucleotide
gaucuacacaauauuacgu

SEQ ID NO: 1127889 - RNA, 19 nt, Artificial Sequence
  Description of Artificial Sequence: Synthetic oligonucleotide
uagggguaagaugaucuac

SEQ ID NO: 1127890 - RNA, 19 nt, Artificial Sequence
  Description of Artificial Sequence: Synthetic oligonucleotide
guugaguuaacaguuuucu

SEQ ID NO: 1127891 - RNA, 19 nt, Artificial Sequence
  Description of Artificial Sequence: Synthetic oligonucleotide
cagauguugaguuaacagu

SEQ ID NO: 1127892 - RNA, 19 nt, Artificial Sequence
  Description of Artificial Sequence: Synthetic oligonucleotide
gacuuacuaaguccagcuc

SEQ ID NO: 1127893 - RNA, 19 nt, Artificial Sequence
  Description of Artificial Sequence: Synthetic oligonucleotide
caguacuguagcuggauga

SEQ ID NO: 1127894 - RNA, 19 nt, Artificial Sequence
  Description of Artificial Sequence: Synthetic oligonucleotide
ugccgcuuugauuagcaua

SEQ ID NO: 1127895 - RNA, 19 nt, Artificial Sequence
  Description of Artificial Sequence: Synthetic oligonucleotide
acagccugcugauacuccu

SEQ ID NO: 1127896 - RNA, 19 nt, Artificial Sequence
  Description of Artificial Sequence: Synthetic oligonucleotide
guauuuauugagugaagau

SEQ ID NO: 1127897 - RNA, 19 nt, Artificial Sequence
  Description of Artificial Sequence: Synthetic oligonucleotide
gccgaguccggucauauug

SEQ ID NO: 1127898 - RNA, 19 nt, Artificial Sequence
  Description of Artificial Sequence: Synthetic oligonucleotide
cagcuuagcuuugaugagc

SEQ ID NO: 1127899 - RNA, 19 nt, Artificial Sequence
  Description of Artificial Sequence: Synthetic oligonucleotide
aacagugcuucuaauucuu

SEQ ID NO: 1127900 - RNA, 19 nt, Artificial Sequence
  Description of Artificial Sequence: Synthetic oligonucleotide
uaguaaaguccggugucug

SEQ ID NO: 1127901 - RNA, 19 nt, Artificial Sequence
  Description of Artificial Sequence: Synthetic oligonucleotide
gacugaugccagccgcgcg

SEQ ID NO: 1127902 - RNA, 19 nt, Artificial Sequence
  Description of Artificial Sequence: Synthetic oligonucleotide
aguugccgcuuugauuagc

SEQ ID NO: 1127903 - RNA, 19 nt, Artificial Sequence
  Description of Artificial Sequence: Synthetic oligonucleotide
cucuucaugccgaguccgg

SEQ ID NO: 1127904 - RNA, 19 nt, Artificial Sequence
  Description of Artificial Sequence: Synthetic oligonucleotide
caguaagcaugcacgggac

SEQ ID NO: 1127905 - RNA, 19 nt, Artificial Sequence
  Description of Artificial Sequence: Synthetic oligonucleotide
uucgccgugcucuauucua

SEQ ID NO: 1127906 - RNA, 19 nt, Artificial Sequence
  Description of Artificial Sequence: Synthetic oligonucleotide
caugcacgggaccaaaaga

SEQ ID NO: 1127907 - RNA, 19 nt, Artificial Sequence
  Description of Artificial Sequence: Synthetic oligonucleotide
ugcaguugccgcuuugauu

SEQ ID NO: 1127908 - RNA, 19 nt, Artificial Sequence
  Description of Artificial Sequence: Synthetic oligonucleotide
gacguguucucucauccua

SEQ ID NO: 1127909 - RNA, 19 nt, Artificial Sequence
  Description of Artificial Sequence: Synthetic oligonucleotide
acgggaccaaaagaaaaca

SEQ ID NO: 1127910 - RNA, 19 nt, Artificial Sequence
  Description of Artificial Sequence: Synthetic oligonucleotide
gcaguaagcaugcacggga

SEQ ID NO: 1127911 - RNA, 19 nt, Artificial Sequence
  Description of Artificial Sequence: Synthetic oligonucleotide
aguacuguagcuggaugau

SEQ ID NO: 1127912 - RNA, 19 nt, Artificial Sequence
  Description of Artificial Sequence: Synthetic oligonucleotide
uggggugauuuucaugcuu

SEQ ID NO: 1127913 - RNA, 19 nt, Artificial Sequence
  Description of Artificial Sequence: Synthetic oligonucleotide
cuagaacaucaaucacuug

SEQ ID NO: 1127914 - RNA, 19 nt, Artificial Sequence
  Description of Artificial Sequence: Synthetic oligonucleotide
agcuuagcuuugaugagca

SEQ ID NO: 1127915 - RNA, 19 nt, Artificial Sequence
  Description of Artificial Sequence: Synthetic oligonucleotide
acugacucuuggauucuuc

SEQ ID NO: 1127916 - RNA, 19 nt, Artificial Sequence
  Description of Artificial Sequence: Synthetic oligonucleotide
cuucaugccgaguccgguc

SEQ ID NO: 1127917 - RNA, 19 nt, Artificial Sequence
  Description of Artificial Sequence: Synthetic oligonucleotide
uuuuccgcgugcgaggcua

SEQ ID NO: 1127918 - RNA, 19 nt, Artificial Sequence
  Description of Artificial Sequence: Synthetic oligonucleotide
augcacgggaccaaaagaa

SEQ ID NO: 1127919 - RNA, 19 nt, Artificial Sequence
  Description of Artificial Sequence: Synthetic oligonucleotide
ugacguguucucucauccu

SEQ ID NO: 1127920 - RNA, 19 nt, Artificial Sequence
  Description of Artificial Sequence: Synthetic oligonucleotide
gacaggcuaaagguuuuac

SEQ ID NO: 1127921 - RNA, 19 nt, Artificial Sequence
  Description of Artificial Sequence: Synthetic oligonucleotide
uccuugcacuuuccacggg

SEQ ID NO: 1127922 - RNA, 19 nt, Artificial Sequence
  Description of Artificial Sequence: Synthetic oligonucleotide
uccggugucuggugggucu

SEQ ID NO: 1127923 - RNA, 19 nt, Artificial Sequence
  Description of Artificial Sequence: Synthetic oligonucleotide
agacagauguugaguuaac

SEQ ID NO: 1127924 - RNA, 19 nt, Artificial Sequence
  Description of Artificial Sequence: Synthetic oligonucleotide
cauuaggguccaauccauc

SEQ ID NO: 1127925 - RNA, 19 nt, Artificial Sequence
  Description of Artificial Sequence: Synthetic oligonucleotide
uucaucgaguuuuguccuc

SEQ ID NO: 1127926 - RNA, 19 nt, Artificial Sequence
  Description of Artificial Sequence: Synthetic oligonucleotide
uaaacucuucaugccgagu

SEQ ID NO: 1127927 - RNA, 19 nt, Artificial Sequence
  Description of Artificial Sequence: Synthetic oligonucleotide
aucgaguuuuguccucaca

SEQ ID NO: 1127928 - RNA, 19 nt, Artificial Sequence
  Description of Artificial Sequence: Synthetic oligonucleotide
cuguagcucucaagaauuc

SEQ ID NO: 1127929 - RNA, 19 nt, Artificial Sequence
  Description of Artificial Sequence: Synthetic oligonucleotide
gggauguugaaagaugaga

SEQ ID NO: 1127930 - RNA, 19 nt, Artificial Sequence
  Description of Artificial Sequence: Synthetic oligonucleotide
agaucucuagggguaagau

SEQ ID NO: 1127931 - RNA, 19 nt, Artificial Sequence
  Description of Artificial Sequence: Synthetic oligonucleotide
uuguucguccaggaaucca

SEQ ID NO: 1127932 - RNA, 19 nt, Artificial Sequence
  Description of Artificial Sequence: Synthetic oligonucleotide
ggauucaaaugugucagga

SEQ ID NO: 1127933 - RNA, 19 nt, Artificial Sequence
  Description of Artificial Sequence: Synthetic oligonucleotide
uguugacaucauguaauuu

SEQ ID NO: 1127934 - RNA, 19 nt, Artificial Sequence
  Description of Artificial Sequence: Synthetic oligonucleotide
cagcccacggcccuucgcc

SEQ ID NO: 1127935 - RNA, 19 nt, Artificial Sequence
  Description of Artificial Sequence: Synthetic oligonucleotide
uuggggugauuuucaugcu

SEQ ID NO: 1127936 - RNA, 19 nt, Artificial Sequence
  Description of Artificial Sequence: Synthetic oligonucleotide
agggauguugaaagaugag

SEQ ID NO: 1127937 - RNA, 19 nt, Artificial Sequence
  Description of Artificial Sequence: Synthetic oligonucleotide
agauaaaagaagggauguu

SEQ ID NO: 1127938 - RNA, 19 nt, Artificial Sequence
  Description of Artificial Sequence: Synthetic oligonucleotide
ugccaguaucuugaaggga

SEQ ID NO: 1127939 - RNA, 19 nt, Artificial Sequence
  Description of Artificial Sequence: Synthetic oligonucleotide
auauuacguuuuggagaac

SEQ ID NO: 1127940 - RNA, 19 nt, Artificial Sequence
  Description of Artificial Sequence: Synthetic oligonucleotide
gggguaagaugaucuacac

SEQ ID NO: 1127941 - RNA, 19 nt, Artificial Sequence
  Description of Artificial Sequence: Synthetic oligonucleotide
gaacagaucuuggcuccug

SEQ ID NO: 1127942 - RNA, 19 nt, Artificial Sequence
  Description of Artificial Sequence: Synthetic oligonucleotide
gguauucaucguaguaaag

SEQ ID NO: 1127943 - RNA, 19 nt, Artificial Sequence
  Description of Artificial Sequence: Synthetic oligonucleotide
gcuaagcugacugaugcca

SEQ ID NO: 1127944 - RNA, 19 nt, Artificial Sequence
  Description of Artificial Sequence: Synthetic oligonucleotide
caaucucauucaugacgug

SEQ ID NO: 1127945 - RNA, 19 nt, Artificial Sequence
  Description of Artificial Sequence: Synthetic oligonucleotide
uuccucuaugucugcuuuc

SEQ ID NO: 1127946 - RNA, 19 nt, Artificial Sequence
  Description of Artificial Sequence: Synthetic oligonucleotide
gagaucucuagggguaaga

SEQ ID NO: 1127947 - RNA, 19 nt, Artificial Sequence
  Description of Artificial Sequence: Synthetic oligonucleotide
guugccgcuuugauuagca

SEQ ID NO: 1127948 - RNA, 19 nt, Artificial Sequence
  Description of Artificial Sequence: Synthetic oligonucleotide
cuccaaucuugcccagccc

SEQ ID NO: 1127949 - RNA, 19 nt, Artificial Sequence
  Description of Artificial Sequence: Synthetic oligonucleotide
cuuaaacuccaguucuccu

SEQ ID NO: 1127950 - RNA, 19 nt, Artificial Sequence
  Description of Artificial Sequence: Synthetic oligonucleotide
acauggugacuuacuaagu

SEQ ID NO: 1127951 - RNA, 19 nt, Artificial Sequence
  Description of Artificial Sequence: Synthetic oligonucleotide
gcuuucauauucuuuuagu

SEQ ID NO: 1127952 - RNA, 19 nt, Artificial Sequence
  Description of Artificial Sequence: Synthetic oligonucleotide
cuuuccacgggcucagugu

SEQ ID NO: 1127953 - RNA, 19 nt, Artificial Sequence
  Description of Artificial Sequence: Synthetic oligonucleotide
ugggucuauccuugcacuu

SEQ ID NO: 1127954 - RNA, 19 nt, Artificial Sequence
  Description of Artificial Sequence: Synthetic oligonucleotide
cuuguguuccagcugcugu

SEQ ID NO: 1127955 - RNA, 19 nt, Artificial Sequence
  Description of Artificial Sequence: Synthetic oligonucleotide
cguguguggcuuaaacucc

SEQ ID NO: 1127956 - RNA, 19 nt, Artificial Sequence
  Description of Artificial Sequence: Synthetic oligonucleotide
ucaugcuggcgcugcaauu

SEQ ID NO: 1127957 - RNA, 19 nt, Artificial Sequence
  Description of Artificial Sequence: Synthetic oligonucleotide
ggguaagaugaucuacaca

SEQ ID NO: 1127958 - RNA, 19 nt, Artificial Sequence
  Description of Artificial Sequence: Synthetic oligonucleotide
gugaacagugcuucuaauu

SEQ ID NO: 1127959 - RNA, 19 nt, Artificial Sequence
  Description of Artificial Sequence: Synthetic oligonucleotide
uuuacguguguggcuuaaa

SEQ ID NO: 1127960 - RNA, 19 nt, Artificial Sequence
  Description of Artificial Sequence: Synthetic oligonucleotide
uucuggugguuuagguguu

SEQ ID NO: 1127961 - RNA, 19 nt, Artificial Sequence
  Description of Artificial Sequence: Synthetic oligonucleotide
gccaguaucuugaagggaa

SEQ ID NO: 1127962 - RNA, 19 nt, Artificial Sequence
  Description of Artificial Sequence: Synthetic oligonucleotide
ggagcaaucccuugcugaa

SEQ ID NO: 1127963 - RNA, 19 nt, Artificial Sequence
  Description of Artificial Sequence: Synthetic oligonucleotide
ggcuaagcugacugaugcc

SEQ ID NO: 1127964 - RNA, 19 nt, Artificial Sequence
  Description of Artificial Sequence: Synthetic oligonucleotide
guaaaguccggugucuggu

SEQ ID NO: 1127965 - RNA, 19 nt, Artificial Sequence
  Description of Artificial Sequence: Synthetic oligonucleotide
aaaaugucuuggggucaaa

SEQ ID NO: 1127966 - RNA, 19 nt, Artificial Sequence
  Description of Artificial Sequence: Synthetic oligonucleotide
uccgcgugcgaggcuaagc

SEQ ID NO: 1127967 - RNA, 19 nt, Artificial Sequence
  Description of Artificial Sequence: Synthetic oligonucleotide
gacuuuacguguguggcuu

SEQ ID NO: 1127968 - RNA, 19 nt, Artificial Sequence
  Description of Artificial Sequence: Synthetic oligonucleotide
cuugugaacagugcuucua

SEQ ID NO: 1127969 - RNA, 19 nt, Artificial Sequence
  Description of Artificial Sequence: Synthetic oligonucleotide
ggugguuuagguguucgaa

SEQ ID NO: 1127970 - RNA, 19 nt, Artificial Sequence
  Description of Artificial Sequence: Synthetic oligonucleotide
ccgaguccggucauauugc

SEQ ID NO: 1127971 - RNA, 19 nt, Artificial Sequence
  Description of Artificial Sequence: Synthetic oligonucleotide
gguuuuccgcgugcgaggc

SEQ ID NO: 1127972 - RNA, 19 nt, Artificial Sequence
  Description of Artificial Sequence: Synthetic oligonucleotide
uagcuuugaugagcauucu

SEQ ID NO: 1127973 - RNA, 19 nt, Artificial Sequence
  Description of Artificial Sequence: Synthetic oligonucleotide
guaguaaaguccggugucu

SEQ ID NO: 1127974 - RNA, 19 nt, Artificial Sequence
  Description of Artificial Sequence: Synthetic oligonucleotide
cauauccaaaucacuggau

SEQ ID NO: 1127975 - RNA, 19 nt, Artificial Sequence
  Description of Artificial Sequence: Synthetic oligonucleotide
gggaccaaaagaaaacagu

SEQ ID NO: 1127976 - RNA, 19 nt, Artificial Sequence
  Description of Artificial Sequence: Synthetic oligonucleotide
gccgugcucuauucuacag

SEQ ID NO: 1127977 - RNA, 19 nt, Artificial Sequence
  Description of Artificial Sequence: Synthetic oligonucleotide
ccgugcucuauucuacagc

SEQ ID NO: 1127978 - RNA, 19 nt, Artificial Sequence
  Description of Artificial Sequence: Synthetic oligonucleotide
ccaggaugauugacuuugg

SEQ ID NO: 1127979 - RNA, 19 nt, Artificial Sequence
  Description of Artificial Sequence: Synthetic oligonucleotide
cccaaaccucuuuuaguug

SEQ ID NO: 1127980 - RNA, 19 nt, Artificial Sequence
  Description of Artificial Sequence: Synthetic oligonucleotide
caaucggucuuuguuguua

SEQ ID NO: 1127981 - RNA, 19 nt, Artificial Sequence
  Description of Artificial Sequence: Synthetic oligonucleotide
cgaguuuuguccucacaug

SEQ ID NO: 1127982 - RNA, 19 nt, Artificial Sequence
  Description of Artificial Sequence: Synthetic oligonucleotide
guacuguagcuggaugauc

SEQ ID NO: 1127983 - RNA, 19 nt, Artificial Sequence
  Description of Artificial Sequence: Synthetic oligonucleotide
caguugccgcuuugauuag

SEQ ID NO: 1127984 - RNA, 19 nt, Artificial Sequence
  Description of Artificial Sequence: Synthetic oligonucleotide
gaguccggucauauugcuc

SEQ ID NO: 1127985 - RNA, 19 nt, Artificial Sequence
  Description of Artificial Sequence: Synthetic oligonucleotide
ccucaagguggucaugcug

SEQ ID NO: 1127986 - RNA, 19 nt, Artificial Sequence
  Description of Artificial Sequence: Synthetic oligonucleotide
acuuuacguguguggcuua

SEQ ID NO: 1127987 - RNA, 19 nt, Artificial Sequence
  Description of Artificial Sequence: Synthetic oligonucleotide
uugccgcuuugauuagcau

SEQ ID NO: 1127988 - RNA, 19 nt, Artificial Sequence
  Description of Artificial Sequence: Synthetic oligonucleotide
cuuccaccucaucuugaga

SEQ ID NO: 1127989 - RNA, 19 nt, Artificial Sequence
  Description of Artificial Sequence: Synthetic oligonucleotide
agccucccacuccuuauuu

SEQ ID NO: 1127990 - RNA, 19 nt, Artificial Sequence
  Description of Artificial Sequence: Synthetic oligonucleotide
gugauucaugccaguaucu

SEQ ID NO: 1127991 - RNA, 19 nt, Artificial Sequence
  Description of Artificial Sequence: Synthetic oligonucleotide
agucaccaaucggucuuug

SEQ ID NO: 1127992 - RNA, 19 nt, Artificial Sequence
  Description of Artificial Sequence: Synthetic oligonucleotide
cuugaagggaauccagcuu

SEQ ID NO: 1127993 - RNA, 19 nt, Artificial Sequence
  Description of Artificial Sequence: Synthetic oligonucleotide
acguguucucucauccuaa

SEQ ID NO: 1127994 - RNA, 19 nt, Artificial Sequence
  Description of Artificial Sequence: Synthetic oligonucleotide
cgcgcgaacuccaaucuug

SEQ ID NO: 1127995 - RNA, 19 nt, Artificial Sequence
  Description of Artificial Sequence: Synthetic oligonucleotide
gaaagaugagacagauguu

SEQ ID NO: 1127996 - RNA, 19 nt, Artificial Sequence
  Description of Artificial Sequence: Synthetic oligonucleotide
cuguuucuagaacaucaau

SEQ ID NO: 1127997 - RNA, 19 nt, Artificial Sequence
  Description of Artificial Sequence: Synthetic oligonucleotide
gugcuuuaaaguauuuauu

SEQ ID NO: 1127998 - RNA, 19 nt, Artificial Sequence
  Description of Artificial Sequence: Synthetic oligonucleotide
caucguaguaaaguccggu

SEQ ID NO: 1127999 - RNA, 19 nt, Artificial Sequence
  Description of Artificial Sequence: Synthetic oligonucleotide
ugcgcucguguuccuucau

SEQ ID NO: 1128000 - RNA, 19 nt, Artificial Sequence
  Description of Artificial Sequence: Synthetic oligonucleotide
guggugauucaugccagua

SEQ ID NO: 1128001 - RNA, 19 nt, Artificial Sequence
  Description of Artificial Sequence: Synthetic oligonucleotide
ugaugccagccgcgcgaac

SEQ ID NO: 1128002 - RNA, 19 nt, Artificial Sequence
  Description of Artificial Sequence: Synthetic oligonucleotide
aguccggugucuggugggu

SEQ ID NO: 1128003 - RNA, 19 nt, Artificial Sequence
  Description of Artificial Sequence: Synthetic oligonucleotide
augccgaguccggucauau

SEQ ID NO: 1128004 - RNA, 19 nt, Artificial Sequence
  Description of Artificial Sequence: Synthetic oligonucleotide
ggucuugucuacaucuaua

SEQ ID NO: 1128005 - RNA, 19 nt, Artificial Sequence
  Description of Artificial Sequence: Synthetic oligonucleotide
cuuuacguguguggcuuaa

SEQ ID NO: 1128006 - RNA, 19 nt, Artificial Sequence
  Description of Artificial Sequence: Synthetic oligonucleotide
gcacgggaccaaaagaaaa

SEQ ID NO: 1128007 - RNA, 19 nt, Artificial Sequence
  Description of Artificial Sequence: Synthetic oligonucleotide
gucaccaaucggucuuugu

SEQ ID NO: 1128008 - RNA, 19 nt, Artificial Sequence
  Description of Artificial Sequence: Synthetic oligonucleotide
gcgugcgaggcuaagcuga

SEQ ID NO: 1128009 - RNA, 19 nt, Artificial Sequence
  Description of Artificial Sequence: Synthetic oligonucleotide
gccgcuuugauuagcauau

SEQ ID NO: 1128010 - RNA, 19 nt, Artificial Sequence
  Description of Artificial Sequence: Synthetic oligonucleotide
agacaggcuaaagguuuua

SEQ ID NO: 1128011 - RNA, 19 nt, Artificial Sequence
  Description of Artificial Sequence: Synthetic oligonucleotide
guguggcuuaaacuccagu

SEQ ID NO: 1128012 - RNA, 19 nt, Artificial Sequence
  Description of Artificial Sequence: Synthetic oligonucleotide
guccggucauauugcucca

SEQ ID NO: 1128013 - RNA, 19 nt, Artificial Sequence
  Description of Artificial Sequence: Synthetic oligonucleotide
gugucaggauucugguggu

SEQ ID NO: 1128014 - RNA, 19 nt, Artificial Sequence
  Description of Artificial Sequence: Synthetic oligonucleotide
acggcccuucgccgugcuc

SEQ ID NO: 1128015 - RNA, 19 nt, Artificial Sequence
  Description of Artificial Sequence: Synthetic oligonucleotide
ggacuuuacguguguggcu

SEQ ID NO: 1128016 - RNA, 19 nt, Artificial Sequence
  Description of Artificial Sequence: Synthetic oligonucleotide
gagccucaagguggucaug

SEQ ID NO: 1128017 - RNA, 19 nt, Artificial Sequence
  Description of Artificial Sequence: Synthetic oligonucleotide
gcgcgaacuccaaucuugc

SEQ ID NO: 1128018 - RNA, 19 nt, Artificial Sequence
  Description of Artificial Sequence: Synthetic oligonucleotide
ccuucgccgugcucuauuc

SEQ ID NO: 1128019 - RNA, 19 nt, Artificial Sequence
  Description of Artificial Sequence: Synthetic oligonucleotide
gcuggcgcugcaauucuuc

SEQ ID NO: 1128020 - RNA, 19 nt, Artificial Sequence
  Description of Artificial Sequence: Synthetic oligonucleotide
ugccgaguccggucauauu

SEQ ID NO: 1128021 - RNA, 19 nt, Artificial Sequence
  Description of Artificial Sequence: Synthetic oligonucleotide
gcgaggcuaagcugacuga

SEQ ID NO: 1128022 - RNA, 19 nt, Artificial Sequence
  Description of Artificial Sequence: Synthetic oligonucleotide
cgcgaacuccaaucuugcc

SEQ ID NO: 1128023 - RNA, 19 nt, Artificial Sequence
  Description of Artificial Sequence: Synthetic oligonucleotide
guccucacauggugacuua

SEQ ID NO: 1128024 - RNA, 19 nt, Artificial Sequence
  Description of Artificial Sequence: Synthetic oligonucleotide
cccugauggagcaaucccu

SEQ ID NO: 1128025 - RNA, 19 nt, Artificial Sequence
  Description of Artificial Sequence: Synthetic oligonucleotide
cacgggcucaguguugugu

SEQ ID NO: 1128026 - RNA, 19 nt, Artificial Sequence
  Description of Artificial Sequence: Synthetic oligonucleotide
cuucgccgugcucuauucu

SEQ ID NO: 1128027 - RNA, 19 nt, Artificial Sequence
  Description of Artificial Sequence: Synthetic oligonucleotide
guuuuccgcgugcgaggcu

SEQ ID NO: 1128028 - RNA, 19 nt, Artificial Sequence
  Description of Artificial Sequence: Synthetic oligonucleotide
cgugcgaggcuaagcugac

SEQ ID NO: 1128029 - RNA, 19 nt, Artificial Sequence
  Description of Artificial Sequence: Synthetic oligonucleotide
gcgcugcaauucuuccuuc

SEQ ID NO: 1128030 - RNA, 19 nt, Artificial Sequence
  Description of Artificial Sequence: Synthetic oligonucleotide
gccgcgcgaacuccaaucu

SEQ ID NO: 1128031 - RNA, 19 nt, Artificial Sequence
  Description of Artificial Sequence: Synthetic oligonucleotide
guccggugucugguggguc

SEQ ID NO: 1128032 - RNA, 19 nt, Artificial Sequence
  Description of Artificial Sequence: Synthetic oligonucleotide
ccucacauggugacuuacu

SEQ ID NO: 1128033 - RNA, 19 nt, Artificial Sequence
  Description of Artificial Sequence: Synthetic oligonucleotide
ggucaugcuggcgcugcaa

SEQ ID NO: 1128034 - RNA, 19 nt, Artificial Sequence
  Description of Artificial Sequence: Synthetic oligonucleotide
gagucaccaaucggucuuu

SEQ ID NO: 1128035 - RNA, 19 nt, Artificial Sequence
  Description of Artificial Sequence: Synthetic oligonucleotide
cgcgugcgaggcuaagcug

SEQ ID NO: 1128036 - RNA, 19 nt, Artificial Sequence
  Description of Artificial Sequence: Synthetic oligonucleotide
caugccgaguccggucaua

SEQ ID NO: 1128037 - RNA, 19 nt, Artificial Sequence
  Description of Artificial Sequence: Synthetic oligonucleotide
gggucuauccuugcacuuu

SEQ ID NO: 1128038 - RNA, 19 nt, Artificial Sequence
  Description of Artificial Sequence: Synthetic oligonucleotide
gccucaagguggucaugcu

SEQ ID NO: 1128039 - RNA, 19 nt, Artificial Sequence
  Description of Artificial Sequence: Synthetic oligonucleotide
cccacggcccuucgccgug

SEQ ID NO: 1128040 - RNA, 19 nt, Artificial Sequence
  Description of Artificial Sequence: Synthetic oligonucleotide
ccgcgugcgaggcuaagcu

SEQ ID NO: 1128041 - RNA, 19 nt, Artificial Sequence
  Description of Artificial Sequence: Synthetic oligonucleotide
gcaaucccuugcugaaauu

SEQ ID NO: 1128042 - RNA, 19 nt, Artificial Sequence
  Description of Artificial Sequence: Synthetic oligonucleotide
gcuguacagccugcugaua

SEQ ID NO: 1128043 - RNA, 19 nt, Artificial Sequence
  Description of Artificial Sequence: Synthetic oligonucleotide
ccgcuuugauuagcauauc

SEQ ID NO: 1128044 - RNA, 19 nt, Artificial Sequence
  Description of Artificial Sequence: Synthetic oligonucleotide
ccacgggcucaguguugug

SEQ ID NO: 1128045 - RNA, 19 nt, Artificial Sequence
  Description of Artificial Sequence: Synthetic oligonucleotide
gugcgaggcuaagcugacu

SEQ ID NO: 1128046 - RNA, 19 nt, Artificial Sequence
  Description of Artificial Sequence: Synthetic oligonucleotide
cguccaggaauccaucauu

SEQ ID NO: 1128047 - RNA, 19 nt, Artificial Sequence
  Description of Artificial Sequence: Synthetic oligonucleotide
ggcccuucgccgugcucua

SEQ ID NO: 1128048 - RNA, 19 nt, Artificial Sequence
  Description of Artificial Sequence: Synthetic oligonucleotide
ccagccgcgcgaacuccaa

SEQ ID NO: 1128049 - RNA, 19 nt, Artificial Sequence
  Description of Artificial Sequence: Synthetic oligonucleotide
cgaguccggucauauugcu

SEQ ID NO: 1128050 - RNA, 19 nt, Artificial Sequence
  Description of Artificial Sequence: Synthetic oligonucleotide
cggucauauugcuccagau

SEQ ID NO: 1128051 - RNA, 19 nt, Artificial Sequence
  Description of Artificial Sequence: Synthetic oligonucleotide
cgaggcuaagcugacugau

SEQ ID NO: 1128052 - RNA, 19 nt, Artificial Sequence
  Description of Artificial Sequence: Synthetic oligonucleotide
ccacggcccuucgccgugc

SEQ ID NO: 1128053 - RNA, 19 nt, Artificial Sequence
  Description of Artificial Sequence: Synthetic oligonucleotide
cagccgcgcgaacuccaau

SEQ ID NO: 1128054 - RNA, 19 nt, Artificial Sequence
  Description of Artificial Sequence: Synthetic oligonucleotide
ccaaucggucuuuguuguu

SEQ ID NO: 1128055 - RNA, 19 nt, Artificial Sequence
  Description of Artificial Sequence: Synthetic oligonucleotide
cacggcccuucgccgugcu

SEQ ID NO: 1128056 - RNA, 19 nt, Artificial Sequence
  Description of Artificial Sequence: Synthetic oligonucleotide
cccuucgccgugcucuauu

SEQ ID NO: 1128057 - RNA, 19 nt, Artificial Sequence
  Description of Artificial Sequence: Synthetic oligonucleotide
ccggugucuggugggucua

SEQ ID NO: 1128058 - RNA, 19 nt, Artificial Sequence
  Description of Artificial Sequence: Synthetic oligonucleotide
ccgcgcgaacuccaaucuu

SEQ ID NO: 1128059 - RNA, 19 nt, Artificial Sequence
  Description of Artificial Sequence: Synthetic oligonucleotide
gcccuucgccgugcucuau

SEQ ID NO: 1128060 - RNA, 19 nt, Artificial Sequence
  Description of Artificial Sequence: Synthetic oligonucleotide
acaauuuuaauguaaggcc

SEQ ID NO: 1128061 - RNA, 19 nt, Artificial Sequence
  Description of Artificial Sequence: Synthetic oligonucleotide
uugaauaacaaaaugcucc

SEQ ID NO: 1128062 - RNA, 19 nt, Artificial Sequence
  Description of Artificial Sequence: Synthetic oligonucleotide
aacucacacuucuagaucc

SEQ ID NO: 1128063 - RNA, 19 nt, Artificial Sequence
  Description of Artificial Sequence: Synthetic oligonucleotide
aaagcucaggcuuaaaagg

SEQ ID NO: 1128064 - RNA, 19 nt, Artificial Sequence
  Description of Artificial Sequence: Synthetic oligonucleotide
auuuugucgauucauaauc

SEQ ID NO: 1128065 - RNA, 19 nt, Artificial Sequence
  Description of Artificial Sequence: Synthetic oligonucleotide
aaucacaguggauagcagc

SEQ ID NO: 1128066 - RNA, 19 nt, Artificial Sequence
  Description of Artificial Sequence: Synthetic oligonucleotide
aacuaaaauaguuauggca

SEQ ID NO: 1128067 - RNA, 19 nt, Artificial Sequence
  Description of Artificial Sequence: Synthetic oligonucleotide
ugugcuuuaaugcauaaga

SEQ ID NO: 1128068 - RNA, 19 nt, Artificial Sequence
  Description of Artificial Sequence: Synthetic oligonucleotide
uaaagugugagacugaaaa

SEQ ID NO: 1128069 - RNA, 19 nt, Artificial Sequence
  Description of Artificial Sequence: Synthetic oligonucleotide
uguuuauucaauuggacca

SEQ ID NO: 1128070 - RNA, 19 nt, Artificial Sequence
  Description of Artificial Sequence: Synthetic oligonucleotide
uuaaccaagauuuugucga

SEQ ID NO: 1128071 - RNA, 19 nt, Artificial Sequence
  Description of Artificial Sequence: Synthetic oligonucleotide
uuuaacugaaacaaucucu

SEQ ID NO: 1128072 - RNA, 19 nt, Artificial Sequence
  Description of Artificial Sequence: Synthetic oligonucleotide
uguucguaaaagcugaacc

SEQ ID NO: 1128073 - RNA, 19 nt, Artificial Sequence
  Description of Artificial Sequence: Synthetic oligonucleotide
ugacguauaacaaagcgac

SEQ ID NO: 1128074 - RNA, 19 nt, Artificial Sequence
  Description of Artificial Sequence: Synthetic oligonucleotide
uuaaugacagaaaaggcaa

SEQ ID NO: 1128075 - RNA, 19 nt, Artificial Sequence
  Description of Artificial Sequence: Synthetic oligonucleotide
uuagaaaaguguuauacaa

SEQ ID NO: 1128076 - RNA, 19 nt, Artificial Sequence
  Description of Artificial Sequence: Synthetic oligonucleotide
acuaaaauaguuauggcag

SEQ ID NO: 1128077 - RNA, 19 nt, Artificial Sequence
  Description of Artificial Sequence: Synthetic oligonucleotide
aaagugugagacugaaaac

SEQ ID NO: 1128078 - RNA, 19 nt, Artificial Sequence
  Description of Artificial Sequence: Synthetic oligonucleotide
auuaagucuauucuggugu

SEQ ID NO: 1128079 - RNA, 19 nt, Artificial Sequence
  Description of Artificial Sequence: Synthetic oligonucleotide
auauguaauauuuauccca

SEQ ID NO: 1128080 - RNA, 19 nt, Artificial Sequence
  Description of Artificial Sequence: Synthetic oligonucleotide
auuaaccaagauuuugucg

SEQ ID NO: 1128081 - RNA, 19 nt, Artificial Sequence
  Description of Artificial Sequence: Synthetic oligonucleotide
aacugaaacaaucucucug

SEQ ID NO: 1128082 - RNA, 19 nt, Artificial Sequence
  Description of Artificial Sequence: Synthetic oligonucleotide
aaauucaaaugacagcgca

SEQ ID NO: 1128083 - RNA, 19 nt, Artificial Sequence
  Description of Artificial Sequence: Synthetic oligonucleotide
aauuaagucuauucuggug

SEQ ID NO: 1128084 - RNA, 19 nt, Artificial Sequence
  Description of Artificial Sequence: Synthetic oligonucleotide
uuuacuuaggguugaauac

SEQ ID NO: 1128085 - RNA, 19 nt, Artificial Sequence
  Description of Artificial Sequence: Synthetic oligonucleotide
ucgauuaagucaacuauag

SEQ ID NO: 1128086 - RNA, 19 nt, Artificial Sequence
  Description of Artificial Sequence: Synthetic oligonucleotide
ucuaacaaugguuugggcu

SEQ ID NO: 1128087 - RNA, 19 nt, Artificial Sequence
  Description of Artificial Sequence: Synthetic oligonucleotide
uuaucaaaggagacaaacc

SEQ ID NO: 1128088 - RNA, 19 nt, Artificial Sequence
  Description of Artificial Sequence: Synthetic oligonucleotide
uauaacaaagcgacacagg

SEQ ID NO: 1128089 - RNA, 19 nt, Artificial Sequence
  Description of Artificial Sequence: Synthetic oligonucleotide
uuaacugaaacaaucucuc

SEQ ID NO: 1128090 - RNA, 19 nt, Artificial Sequence
  Description of Artificial Sequence: Synthetic oligonucleotide
uuuggauuggguuauucug

SEQ ID NO: 1128091 - RNA, 19 nt, Artificial Sequence
  Description of Artificial Sequence: Synthetic oligonucleotide
auaacaaagcgacacaggu

SEQ ID NO: 1128092 - RNA, 19 nt, Artificial Sequence
  Description of Artificial Sequence: Synthetic oligonucleotide
aaaguguuauacaagauau

SEQ ID NO: 1128093 - RNA, 19 nt, Artificial Sequence
  Description of Artificial Sequence: Synthetic oligonucleotide
ucuuauguuucauucaacu

SEQ ID NO: 1128094 - RNA, 19 nt, Artificial Sequence
  Description of Artificial Sequence: Synthetic oligonucleotide
uucaauuggaccauuuaac

SEQ ID NO: 1128095 - RNA, 19 nt, Artificial Sequence
  Description of Artificial Sequence: Synthetic oligonucleotide
gauuaagucaacuauagau

SEQ ID NO: 1128096 - RNA, 19 nt, Artificial Sequence
  Description of Artificial Sequence: Synthetic oligonucleotide
ucaauuggaccauuuaaca

SEQ ID NO: 1128097 - RNA, 19 nt, Artificial Sequence
  Description of Artificial Sequence: Synthetic oligonucleotide
agggcuuuaaauuaugcca

SEQ ID NO: 1128098 - RNA, 19 nt, Artificial Sequence
  Description of Artificial Sequence: Synthetic oligonucleotide
acaauuaucacauccuuaa

SEQ ID NO: 1128099 - RNA, 19 nt, Artificial Sequence
  Description of Artificial Sequence: Synthetic oligonucleotide
uuuuacuuaggguugaaua

SEQ ID NO: 1128100 - RNA, 19 nt, Artificial Sequence
  Description of Artificial Sequence: Synthetic oligonucleotide
uaagaaucacaguggauag

SEQ ID NO: 1128101 - RNA, 19 nt, Artificial Sequence
  Description of Artificial Sequence: Synthetic oligonucleotide
ugaauaacaaaaugcucca

SEQ ID NO: 1128102 - RNA, 19 nt, Artificial Sequence
  Description of Artificial Sequence: Synthetic oligonucleotide
aagugugagacugaaaaca

SEQ ID NO: 1128103 - RNA, 19 nt, Artificial Sequence
  Description of Artificial Sequence: Synthetic oligonucleotide
uuuugucgauucauaaucc

SEQ ID NO: 1128104 - RNA, 19 nt, Artificial Sequence
  Description of Artificial Sequence: Synthetic oligonucleotide
acguauaacaaagcgacac

SEQ ID NO: 1128105 - RNA, 19 nt, Artificial Sequence
  Description of Artificial Sequence: Synthetic oligonucleotide
ugugagacugaaaacaaau

SEQ ID NO: 1128106 - RNA, 19 nt, Artificial Sequence
  Description of Artificial Sequence: Synthetic oligonucleotide
ugucgauucauaauccuga

SEQ ID NO: 1128107 - RNA, 19 nt, Artificial Sequence
  Description of Artificial Sequence: Synthetic oligonucleotide
uuuacagggcuuuaaauua

SEQ ID NO: 1128108 - RNA, 19 nt, Artificial Sequence
  Description of Artificial Sequence: Synthetic oligonucleotide
uguaaggccauuuaucaaa

SEQ ID NO: 1128109 - RNA, 19 nt, Artificial Sequence
  Description of Artificial Sequence: Synthetic oligonucleotide
agauaacucacacuucuag

SEQ ID NO: 1128110 - RNA, 19 nt, Artificial Sequence
  Description of Artificial Sequence: Synthetic oligonucleotide
ugaaugcucgauuaaguca

SEQ ID NO: 1128111 - RNA, 19 nt, Artificial Sequence
  Description of Artificial Sequence: Synthetic oligonucleotide
aaugacagcgcacgcuuuc

SEQ ID NO: 1128112 - RNA, 19 nt, Artificial Sequence
  Description of Artificial Sequence: Synthetic oligonucleotide
ugaaccuaccauucgagug

SEQ ID NO: 1128113 - RNA, 19 nt, Artificial Sequence
  Description of Artificial Sequence: Synthetic oligonucleotide
cacgcuuucagccaugugc

SEQ ID NO: 1128114 - RNA, 19 nt, Artificial Sequence
  Description of Artificial Sequence: Synthetic oligonucleotide
uuggauuggguuauucugc

SEQ ID NO: 1128115 - RNA, 19 nt, Artificial Sequence
  Description of Artificial Sequence: Synthetic oligonucleotide
uguacugacguauaacaaa

SEQ ID NO: 1128116 - RNA, 19 nt, Artificial Sequence
  Description of Artificial Sequence: Synthetic oligonucleotide
agucugaccggguaagucg

SEQ ID NO: 1128117 - RNA, 19 nt, Artificial Sequence
  Description of Artificial Sequence: Synthetic oligonucleotide
ugaauacacaggaaaugug

SEQ ID NO: 1128118 - RNA, 19 nt, Artificial Sequence
  Description of Artificial Sequence: Synthetic oligonucleotide
gaaccuaccauucgagugc

SEQ ID NO: 1128119 - RNA, 19 nt, Artificial Sequence
  Description of Artificial Sequence: Synthetic oligonucleotide
guuacggagaaucugguca

SEQ ID NO: 1128120 - RNA, 19 nt, Artificial Sequence
  Description of Artificial Sequence: Synthetic oligonucleotide
uuugccaugggagcgaaag

SEQ ID NO: 1128121 - RNA, 19 nt, Artificial Sequence
  Description of Artificial Sequence: Synthetic oligonucleotide
agacuugucacaaccaugg

SEQ ID NO: 1128122 - RNA, 19 nt, Artificial Sequence
  Description of Artificial Sequence: Synthetic oligonucleotide
ucuagugugaaguguuuug

SEQ ID NO: 1128123 - RNA, 19 nt, Artificial Sequence
  Description of Artificial Sequence: Synthetic oligonucleotide
aguaccaccccuguuuugc

SEQ ID NO: 1128124 - RNA, 19 nt, Artificial Sequence
  Description of Artificial Sequence: Synthetic oligonucleotide
guaauauuuaucccaugug

SEQ ID NO: 1128125 - RNA, 19 nt, Artificial Sequence
  Description of Artificial Sequence: Synthetic oligonucleotide
aaagcgacacagguacugc

SEQ ID NO: 1128126 - RNA, 19 nt, Artificial Sequence
  Description of Artificial Sequence: Synthetic oligonucleotide
aaacucaagacaccuugca

SEQ ID NO: 1128127 - RNA, 19 nt, Artificial Sequence
  Description of Artificial Sequence: Synthetic oligonucleotide
aguuguucaccgaagaauc

SEQ ID NO: 1128128 - RNA, 19 nt, Artificial Sequence
  Description of Artificial Sequence: Synthetic oligonucleotide
gauugaaugcucgauuaag

SEQ ID NO: 1128129 - RNA, 19 nt, Artificial Sequence
  Description of Artificial Sequence: Synthetic oligonucleotide
auaacucacacuucuagau

SEQ ID NO: 1128130 - RNA, 19 nt, Artificial Sequence
  Description of Artificial Sequence: Synthetic oligonucleotide
cucacacacacacacauac

SEQ ID NO: 1128131 - RNA, 19 nt, Artificial Sequence
  Description of Artificial Sequence: Synthetic oligonucleotide
cacacacacacauacacug

SEQ ID NO: 1128132 - RNA, 19 nt, Artificial Sequence
  Description of Artificial Sequence: Synthetic oligonucleotide
uguaugcccuucuacaucu

SEQ ID NO: 1128133 - RNA, 19 nt, Artificial Sequence
  Description of Artificial Sequence: Synthetic oligonucleotide
agaacuaucccgaacaaga

SEQ ID NO: 1128134 - RNA, 19 nt, Artificial Sequence
  Description of Artificial Sequence: Synthetic oligonucleotide
aaacaauuaucacauccuu

SEQ ID NO: 1128135 - RNA, 19 nt, Artificial Sequence
  Description of Artificial Sequence: Synthetic oligonucleotide
agauguaugcccuucuaca

SEQ ID NO: 1128136 - RNA, 19 nt, Artificial Sequence
  Description of Artificial Sequence: Synthetic oligonucleotide
ugcacugagucauaaacuc

SEQ ID NO: 1128137 - RNA, 19 nt, Artificial Sequence
  Description of Artificial Sequence: Synthetic oligonucleotide
uuaaugcauaagaaucaca

SEQ ID NO: 1128138 - RNA, 19 nt, Artificial Sequence
  Description of Artificial Sequence: Synthetic oligonucleotide
caauuuuaauguaaggcca

SEQ ID NO: 1128139 - RNA, 19 nt, Artificial Sequence
  Description of Artificial Sequence: Synthetic oligonucleotide
aagaaucacaguggauagc

SEQ ID NO: 1128140 - RNA, 19 nt, Artificial Sequence
  Description of Artificial Sequence: Synthetic oligonucleotide
uugucgauucauaauccug

SEQ ID NO: 1128141 - RNA, 19 nt, Artificial Sequence
  Description of Artificial Sequence: Synthetic oligonucleotide
gaccuugaauaacaaaaug

SEQ ID NO: 1128142 - RNA, 19 nt, Artificial Sequence
  Description of Artificial Sequence: Synthetic oligonucleotide
ugagaggccgcuaaaguuc

SEQ ID NO: 1128143 - RNA, 19 nt, Artificial Sequence
  Description of Artificial Sequence: Synthetic oligonucleotide
auuggguuauucugcauug

SEQ ID NO: 1128144 - RNA, 19 nt, Artificial Sequence
  Description of Artificial Sequence: Synthetic oligonucleotide
uuuaaugcauaagaaucac

SEQ ID NO: 1128145 - RNA, 19 nt, Artificial Sequence
  Description of Artificial Sequence: Synthetic oligonucleotide
accaaaacaauuaucacau

SEQ ID NO: 1128146 - RNA, 19 nt, Artificial Sequence
  Description of Artificial Sequence: Synthetic oligonucleotide
ucccgaacaagaaaagaac

SEQ ID NO: 1128147 - RNA, 19 nt, Artificial Sequence
  Description of Artificial Sequence: Synthetic oligonucleotide
aauauuuaucccauguguu

SEQ ID NO: 1128148 - RNA, 19 nt, Artificial Sequence
  Description of Artificial Sequence: Synthetic oligonucleotide
gauaacucacacuucuaga

SEQ ID NO: 1128149 - RNA, 19 nt, Artificial Sequence
  Description of Artificial Sequence: Synthetic oligonucleotide
cacacacacacacauacac

SEQ ID NO: 1128150 - RNA, 19 nt, Artificial Sequence
  Description of Artificial Sequence: Synthetic oligonucleotide
ucaccgaagaauccacaag

SEQ ID NO: 1128151 - RNA, 19 nt, Artificial Sequence
  Description of Artificial Sequence: Synthetic oligonucleotide
uugaaugcucgauuaaguc

SEQ ID NO: 1128152 - RNA, 19 nt, Artificial Sequence
  Description of Artificial Sequence: Synthetic oligonucleotide
aaguuguucaccgaagaau

SEQ ID NO: 1128153 - RNA, 19 nt, Artificial Sequence
  Description of Artificial Sequence: Synthetic oligonucleotide
ucugcaacaugacuccugu

SEQ ID NO: 1128154 - RNA, 19 nt, Artificial Sequence
  Description of Artificial Sequence: Synthetic oligonucleotide
acaaccauggggccacuac

SEQ ID NO: 1128155 - RNA, 19 nt, Artificial Sequence
  Description of Artificial Sequence: Synthetic oligonucleotide
guacugacguauaacaaag

SEQ ID NO: 1128156 - RNA, 19 nt, Artificial Sequence
  Description of Artificial Sequence: Synthetic oligonucleotide
uaaacucuugcaaccccag

SEQ ID NO: 1128157 - RNA, 19 nt, Artificial Sequence
  Description of Artificial Sequence: Synthetic oligonucleotide
uucgagugcucaauucuag

SEQ ID NO: 1128158 - RNA, 19 nt, Artificial Sequence
  Description of Artificial Sequence: Synthetic oligonucleotide
uaagacuugucacaaccau

SEQ ID NO: 1128159 - RNA, 19 nt, Artificial Sequence
  Description of Artificial Sequence: Synthetic oligonucleotide
uuacuuaggguugaauaca

SEQ ID NO: 1128160 - RNA, 19 nt, Artificial Sequence
  Description of Artificial Sequence: Synthetic oligonucleotide
uagauccucaagauauccc

SEQ ID NO: 1128161 - RNA, 19 nt, Artificial Sequence
  Description of Artificial Sequence: Synthetic oligonucleotide
auuuauaccagaguuuaau

SEQ ID NO: 1128162 - RNA, 19 nt, Artificial Sequence
  Description of Artificial Sequence: Synthetic oligonucleotide
uagauguaugcccuucuac

SEQ ID NO: 1128163 - RNA, 19 nt, Artificial Sequence
  Description of Artificial Sequence: Synthetic oligonucleotide
uuugucgauucauaauccu

SEQ ID NO: 1128164 - RNA, 19 nt, Artificial Sequence
  Description of Artificial Sequence: Synthetic oligonucleotide
uuaucucacuguucuaaca

SEQ ID NO: 1128165 - RNA, 19 nt, Artificial Sequence
  Description of Artificial Sequence: Synthetic oligonucleotide
cucucucacacacacacac

SEQ ID NO: 1128166 - RNA, 19 nt, Artificial Sequence
  Description of Artificial Sequence: Synthetic oligonucleotide
cagggcuuuaaauuaugcc

SEQ ID NO: 1128167 - RNA, 19 nt, Artificial Sequence
  Description of Artificial Sequence: Synthetic oligonucleotide
agauuuugucgauucauaa

SEQ ID NO: 1128168 - RNA, 19 nt, Artificial Sequence
  Description of Artificial Sequence: Synthetic oligonucleotide
ucguaaaagcugaaccuac

SEQ ID NO: 1128169 - RNA, 19 nt, Artificial Sequence
  Description of Artificial Sequence: Synthetic oligonucleotide
guagcaacggcgaggaggg

SEQ ID NO: 1128170 - RNA, 19 nt, Artificial Sequence
  Description of Artificial Sequence: Synthetic oligonucleotide
caacuuuuacuuaggguug

SEQ ID NO: 1128171 - RNA, 19 nt, Artificial Sequence
  Description of Artificial Sequence: Synthetic oligonucleotide
auguaugcccuucuacauc

SEQ ID NO: 1128172 - RNA, 19 nt, Artificial Sequence
  Description of Artificial Sequence: Synthetic oligonucleotide
uggcuguucguaaaagcug

SEQ ID NO: 1128173 - RNA, 19 nt, Artificial Sequence
  Description of Artificial Sequence: Synthetic oligonucleotide
gagucauaaacucuugcaa

SEQ ID NO: 1128174 - RNA, 19 nt, Artificial Sequence
  Description of Artificial Sequence: Synthetic oligonucleotide
aauucuagugugaaguguu

SEQ ID NO: 1128175 - RNA, 19 nt, Artificial Sequence
  Description of Artificial Sequence: Synthetic oligonucleotide
aggcuuaaaagguaacggu

SEQ ID NO: 1128176 - RNA, 19 nt, Artificial Sequence
  Description of Artificial Sequence: Synthetic oligonucleotide
uggguuauucugcauugga

SEQ ID NO: 1128177 - RNA, 19 nt, Artificial Sequence
  Description of Artificial Sequence: Synthetic oligonucleotide
ucacuguucuaacaauggu

SEQ ID NO: 1128178 - RNA, 19 nt, Artificial Sequence
  Description of Artificial Sequence: Synthetic oligonucleotide
ggaaaugugcuuuaaugca

SEQ ID NO: 1128179 - RNA, 19 nt, Artificial Sequence
  Description of Artificial Sequence: Synthetic oligonucleotide
caagauaucccuuuccaaa

SEQ ID NO: 1128180 - RNA, 19 nt, Artificial Sequence
  Description of Artificial Sequence: Synthetic oligonucleotide
ugcagaguugggaucaaaa

SEQ ID NO: 1128181 - RNA, 19 nt, Artificial Sequence
  Description of Artificial Sequence: Synthetic oligonucleotide
gaaugcucgauuaagucaa

SEQ ID NO: 1128182 - RNA, 19 nt, Artificial Sequence
  Description of Artificial Sequence: Synthetic oligonucleotide
gaaguguuuugccauggga

SEQ ID NO: 1128183 - RNA, 19 nt, Artificial Sequence
  Description of Artificial Sequence: Synthetic oligonucleotide
uaacucacacuucuagauc

SEQ ID NO: 1128184 - RNA, 19 nt, Artificial Sequence
  Description of Artificial Sequence: Synthetic oligonucleotide
ugugauggggccccaguac

SEQ ID NO: 1128185 - RNA, 19 nt, Artificial Sequence
  Description of Artificial Sequence: Synthetic oligonucleotide
ucuuaaagugugagacuga

SEQ ID NO: 1128186 - RNA, 19 nt, Artificial Sequence
  Description of Artificial Sequence: Synthetic oligonucleotide
ucuuguaucugaaccccaa

SEQ ID NO: 1128187 - RNA, 19 nt, Artificial Sequence
  Description of Artificial Sequence: Synthetic oligonucleotide
gguguacugacguauaaca

SEQ ID NO: 1128188 - RNA, 19 nt, Artificial Sequence
  Description of Artificial Sequence: Synthetic oligonucleotide
uauuuaucccauguguuua

SEQ ID NO: 1128189 - RNA, 19 nt, Artificial Sequence
  Description of Artificial Sequence: Synthetic oligonucleotide
aaccgagaccuugaauaac

SEQ ID NO: 1128190 - RNA, 19 nt, Artificial Sequence
  Description of Artificial Sequence: Synthetic oligonucleotide
cuauucugguguacugacg

SEQ ID NO: 1128191 - RNA, 19 nt, Artificial Sequence
  Description of Artificial Sequence: Synthetic oligonucleotide
cugacguauaacaaagcga

SEQ ID NO: 1128192 - RNA, 19 nt, Artificial Sequence
  Description of Artificial Sequence: Synthetic oligonucleotide
aggccauuuaucaaaggag

SEQ ID NO: 1128193 - RNA, 19 nt, Artificial Sequence
  Description of Artificial Sequence: Synthetic oligonucleotide
uacugacguauaacaaagc

SEQ ID NO: 1128194 - RNA, 19 nt, Artificial Sequence
  Description of Artificial Sequence: Synthetic oligonucleotide
ugauugaaugcucgauuaa

SEQ ID NO: 1128195 - RNA, 19 nt, Artificial Sequence
  Description of Artificial Sequence: Synthetic oligonucleotide
cucucaguagugcuucucc

SEQ ID NO: 1128196 - RNA, 19 nt, Artificial Sequence
  Description of Artificial Sequence: Synthetic oligonucleotide
cauggggccacuacucugc

SEQ ID NO: 1128197 - RNA, 19 nt, Artificial Sequence
  Description of Artificial Sequence: Synthetic oligonucleotide
uucaccgaagaauccacaa

SEQ ID NO: 1128198 - RNA, 19 nt, Artificial Sequence
  Description of Artificial Sequence: Synthetic oligonucleotide
uaagucgcagaucccggca

SEQ ID NO: 1128199 - RNA, 19 nt, Artificial Sequence
  Description of Artificial Sequence: Synthetic oligonucleotide
aaccauggggccacuacuc

SEQ ID NO: 1128200 - RNA, 19 nt, Artificial Sequence
  Description of Artificial Sequence: Synthetic oligonucleotide
auugaaugcucgauuaagu

SEQ ID NO: 1128201 - RNA, 19 nt, Artificial Sequence
  Description of Artificial Sequence: Synthetic oligonucleotide
cacuggauuggucagucug

SEQ ID NO: 1128202 - RNA, 19 nt, Artificial Sequence
  Description of Artificial Sequence: Synthetic oligonucleotide
uuauucaauuggaccauuu

SEQ ID NO: 1128203 - RNA, 19 nt, Artificial Sequence
  Description of Artificial Sequence: Synthetic oligonucleotide
ugcucgauuaagucaacua

SEQ ID NO: 1128204 - RNA, 19 nt, Artificial Sequence
  Description of Artificial Sequence: Synthetic oligonucleotide
ugaaccccaaagugcaaga

SEQ ID NO: 1128205 - RNA, 19 nt, Artificial Sequence
  Description of Artificial Sequence: Synthetic oligonucleotide
guuaucucacuguucuaac

SEQ ID NO: 1128206 - RNA, 19 nt, Artificial Sequence
  Description of Artificial Sequence: Synthetic oligonucleotide
uuaaagugugagacugaaa

SEQ ID NO: 1128207 - RNA, 19 nt, Artificial Sequence
  Description of Artificial Sequence: Synthetic oligonucleotide
uugugauuauucugcacau

SEQ ID NO: 1128208 - RNA, 19 nt, Artificial Sequence
  Description of Artificial Sequence: Synthetic oligonucleotide
uucguaaaagcugaaccua

SEQ ID NO: 1128209 - RNA, 19 nt, Artificial Sequence
  Description of Artificial Sequence: Synthetic oligonucleotide
uaucccgaacaagaaaaga

SEQ ID NO: 1128210 - RNA, 19 nt, Artificial Sequence
  Description of Artificial Sequence: Synthetic oligonucleotide
acuguucuaacaaugguuu

SEQ ID NO: 1128211 - RNA, 19 nt, Artificial Sequence
  Description of Artificial Sequence: Synthetic oligonucleotide
aacaauuaucacauccuua

SEQ ID NO: 1128212 - RNA, 19 nt, Artificial Sequence
  Description of Artificial Sequence: Synthetic oligonucleotide
ugccaugggagcgaaagcu

SEQ ID NO: 1128213 - RNA, 19 nt, Artificial Sequence
  Description of Artificial Sequence: Synthetic oligonucleotide
ucuacaucuggcuguucgu

SEQ ID NO: 1128214 - RNA, 19 nt, Artificial Sequence
  Description of Artificial Sequence: Synthetic oligonucleotide
aaccacaagaugaaaugaa

SEQ ID NO: 1128215 - RNA, 19 nt, Artificial Sequence
  Description of Artificial Sequence: Synthetic oligonucleotide
ucuagauccucaagauauc

SEQ ID NO: 1128216 - RNA, 19 nt, Artificial Sequence
  Description of Artificial Sequence: Synthetic oligonucleotide
aacuuuuacuuaggguuga

SEQ ID NO: 1128217 - RNA, 19 nt, Artificial Sequence
  Description of Artificial Sequence: Synthetic oligonucleotide
ucagaacuaucccgaacaa

SEQ ID NO: 1128218 - RNA, 19 nt, Artificial Sequence
  Description of Artificial Sequence: Synthetic oligonucleotide
cucaagauaucccuuucca

SEQ ID NO: 1128219 - RNA, 19 nt, Artificial Sequence
  Description of Artificial Sequence: Synthetic oligonucleotide
caccgaagaauccacaaga

SEQ ID NO: 1128220 - RNA, 19 nt, Artificial Sequence
  Description of Artificial Sequence: Synthetic oligonucleotide
acguuagccagcuuccccu

SEQ ID NO: 1128221 - RNA, 19 nt, Artificial Sequence
  Description of Artificial Sequence: Synthetic oligonucleotide
guaaggccauuuaucaaag

SEQ ID NO: 1128222 - RNA, 19 nt, Artificial Sequence
  Description of Artificial Sequence: Synthetic oligonucleotide
uaagucaacuauagaugua

SEQ ID NO: 1128223 - RNA, 19 nt, Artificial Sequence
  Description of Artificial Sequence: Synthetic oligonucleotide
guucguaaaagcugaaccu

SEQ ID NO: 1128224 - RNA, 19 nt, Artificial Sequence
  Description of Artificial Sequence: Synthetic oligonucleotide
ucacacacacacacauaca

SEQ ID NO: 1128225 - RNA, 19 nt, Artificial Sequence
  Description of Artificial Sequence: Synthetic oligonucleotide
cauugugauuauucugcac

SEQ ID NO: 1128226 - RNA, 19 nt, Artificial Sequence
  Description of Artificial Sequence: Synthetic oligonucleotide
uuaagucuauucuggugua

SEQ ID NO: 1128227 - RNA, 19 nt, Artificial Sequence
  Description of Artificial Sequence: Synthetic oligonucleotide
cucaguagugcuucuccug

SEQ ID NO: 1128228 - RNA, 19 nt, Artificial Sequence
  Description of Artificial Sequence: Synthetic oligonucleotide
ccgaacaaacugaugaccc

SEQ ID NO: 1128229 - RNA, 19 nt, Artificial Sequence
  Description of Artificial Sequence: Synthetic oligonucleotide
uuacggagaaucuggucau

SEQ ID NO: 1128230 - RNA, 19 nt, Artificial Sequence
  Description of Artificial Sequence: Synthetic oligonucleotide
uuggguuauucugcauugg

SEQ ID NO: 1128231 - RNA, 19 nt, Artificial Sequence
  Description of Artificial Sequence: Synthetic oligonucleotide
agaucccggcaaccgagac

SEQ ID NO: 1128232 - RNA, 19 nt, Artificial Sequence
  Description of Artificial Sequence: Synthetic oligonucleotide
cauuggagguagcaacggc

SEQ ID NO: 1128233 - RNA, 19 nt, Artificial Sequence
  Description of Artificial Sequence: Synthetic oligonucleotide
cguaagacuugucacaacc

SEQ ID NO: 1128234 - RNA, 19 nt, Artificial Sequence
  Description of Artificial Sequence: Synthetic oligonucleotide
aucccggcaaccgagaccu

SEQ ID NO: 1128235 - RNA, 19 nt, Artificial Sequence
  Description of Artificial Sequence: Synthetic oligonucleotide
cucuugcaaccccaggugc

SEQ ID NO: 1128236 - RNA, 19 nt, Artificial Sequence
  Description of Artificial Sequence: Synthetic oligonucleotide
ucucucacacacacacaca

SEQ ID NO: 1128237 - RNA, 19 nt, Artificial Sequence
  Description of Artificial Sequence: Synthetic oligonucleotide
gaaucucuggggcuacaac

SEQ ID NO: 1128238 - RNA, 19 nt, Artificial Sequence
  Description of Artificial Sequence: Synthetic oligonucleotide
ucccauguguuuauucaau

SEQ ID NO: 1128239 - RNA, 19 nt, Artificial Sequence
  Description of Artificial Sequence: Synthetic oligonucleotide
gacagcgcacgcuuucagc

SEQ ID NO: 1128240 - RNA, 19 nt, Artificial Sequence
  Description of Artificial Sequence: Synthetic oligonucleotide
auaaacucuugcaacccca

SEQ ID NO: 1128241 - RNA, 19 nt, Artificial Sequence
  Description of Artificial Sequence: Synthetic oligonucleotide
aaugcucgauuaagucaac

SEQ ID NO: 1128242 - RNA, 19 nt, Artificial Sequence
  Description of Artificial Sequence: Synthetic oligonucleotide
ggcguuacggagaaucugg

SEQ ID NO: 1128243 - RNA, 19 nt, Artificial Sequence
  Description of Artificial Sequence: Synthetic oligonucleotide
aacggcgaggaggggaggg

SEQ ID NO: 1128244 - RNA, 19 nt, Artificial Sequence
  Description of Artificial Sequence: Synthetic oligonucleotide
aucccgaacaagaaaagaa

SEQ ID NO: 1128245 - RNA, 19 nt, Artificial Sequence
  Description of Artificial Sequence: Synthetic oligonucleotide
ucgauucauaauccugaau

SEQ ID NO: 1128246 - RNA, 19 nt, Artificial Sequence
  Description of Artificial Sequence: Synthetic oligonucleotide
uccguaagacuugucacaa

SEQ ID NO: 1128247 - RNA, 19 nt, Artificial Sequence
  Description of Artificial Sequence: Synthetic oligonucleotide
guaagucgcagaucccggc

SEQ ID NO: 1128248 - RNA, 19 nt, Artificial Sequence
  Description of Artificial Sequence: Synthetic oligonucleotide
ccggguaagucgcagaucc

SEQ ID NO: 1128249 - RNA, 19 nt, Artificial Sequence
  Description of Artificial Sequence: Synthetic oligonucleotide
caaagcgacacagguacug

SEQ ID NO: 1128250 - RNA, 19 nt, Artificial Sequence
  Description of Artificial Sequence: Synthetic oligonucleotide
auaagaaaccaggguuauc

SEQ ID NO: 1128251 - RNA, 19 nt, Artificial Sequence
  Description of Artificial Sequence: Synthetic oligonucleotide
ugcucaauucuagugugaa

SEQ ID NO: 1128252 - RNA, 19 nt, Artificial Sequence
  Description of Artificial Sequence: Synthetic oligonucleotide
ugacagcgcacgcuuucag

SEQ ID NO: 1128253 - RNA, 19 nt, Artificial Sequence
  Description of Artificial Sequence: Synthetic oligonucleotide
agcgcaccugcaugaaccg

SEQ ID NO: 1128254 - RNA, 19 nt, Artificial Sequence
  Description of Artificial Sequence: Synthetic oligonucleotide
cugauugaaugcucgauua

SEQ ID NO: 1128255 - RNA, 19 nt, Artificial Sequence
  Description of Artificial Sequence: Synthetic oligonucleotide
cucgauuaagucaacuaua

SEQ ID NO: 1128256 - RNA, 19 nt, Artificial Sequence
  Description of Artificial Sequence: Synthetic oligonucleotide
gaucccggcaaccgagacc

SEQ ID NO: 1128257 - RNA, 19 nt, Artificial Sequence
  Description of Artificial Sequence: Synthetic oligonucleotide
gagugcucaauucuagugu

SEQ ID NO: 1128258 - RNA, 19 nt, Artificial Sequence
  Description of Artificial Sequence: Synthetic oligonucleotide
ucgagugcucaauucuagu

SEQ ID NO: 1128259 - RNA, 19 nt, Artificial Sequence
  Description of Artificial Sequence: Synthetic oligonucleotide
aucgucaugaccugcucua

SEQ ID NO: 1128260 - RNA, 19 nt, Artificial Sequence
  Description of Artificial Sequence: Synthetic oligonucleotide
gccgcuaaaguuccuuugg

SEQ ID NO: 1128261 - RNA, 19 nt, Artificial Sequence
  Description of Artificial Sequence: Synthetic oligonucleotide
gauuggguuauucugcauu

SEQ ID NO: 1128262 - RNA, 19 nt, Artificial Sequence
  Description of Artificial Sequence: Synthetic oligonucleotide
auguaaggccauuuaucaa

SEQ ID NO: 1128263 - RNA, 19 nt, Artificial Sequence
  Description of Artificial Sequence: Synthetic oligonucleotide
cugaaccccaaagugcaag

SEQ ID NO: 1128264 - RNA, 19 nt, Artificial Sequence
  Description of Artificial Sequence: Synthetic oligonucleotide
ugguguacugacguauaac

SEQ ID NO: 1128265 - RNA, 19 nt, Artificial Sequence
  Description of Artificial Sequence: Synthetic oligonucleotide
aagucgcagaucccggcaa

SEQ ID NO: 1128266 - RNA, 19 nt, Artificial Sequence
  Description of Artificial Sequence: Synthetic oligonucleotide
ucucucucacacacacaca

SEQ ID NO: 1128267 - RNA, 19 nt, Artificial Sequence
  Description of Artificial Sequence: Synthetic oligonucleotide
gugccaaucagcaaguugu

SEQ ID NO: 1128268 - RNA, 19 nt, Artificial Sequence
  Description of Artificial Sequence: Synthetic oligonucleotide
gauguaugcccuucuacau

SEQ ID NO: 1128269 - RNA, 19 nt, Artificial Sequence
  Description of Artificial Sequence: Synthetic oligonucleotide
ggguugaauacacaggaaa

SEQ ID NO: 1128270 - RNA, 19 nt, Artificial Sequence
  Description of Artificial Sequence: Synthetic oligonucleotide
agaccuugaauaacaaaau

SEQ ID NO: 1128271 - RNA, 19 nt, Artificial Sequence
  Description of Artificial Sequence: Synthetic oligonucleotide
auagauguaugcccuucua

SEQ ID NO: 1128272 - RNA, 19 nt, Artificial Sequence
  Description of Artificial Sequence: Synthetic oligonucleotide
agguaacggucaucagaac

SEQ ID NO: 1128273 - RNA, 19 nt, Artificial Sequence
  Description of Artificial Sequence: Synthetic oligonucleotide
ucgcagaucccggcaaccg

SEQ ID NO: 1128274 - RNA, 19 nt, Artificial Sequence
  Description of Artificial Sequence: Synthetic oligonucleotide
gcauaagaaucacagugga

SEQ ID NO: 1128275 - RNA, 19 nt, Artificial Sequence
  Description of Artificial Sequence: Synthetic oligonucleotide
gagaggccgcuaaaguucc

SEQ ID NO: 1128276 - RNA, 19 nt, Artificial Sequence
  Description of Artificial Sequence: Synthetic oligonucleotide
ugucacaaccauggggcca

SEQ ID NO: 1128277 - RNA, 19 nt, Artificial Sequence
  Description of Artificial Sequence: Synthetic oligonucleotide
gcauguccgggccugagag

SEQ ID NO: 1128278 - RNA, 19 nt, Artificial Sequence
  Description of Artificial Sequence: Synthetic oligonucleotide
cuuaaagugugagacugaa

SEQ ID NO: 1128279 - RNA, 19 nt, Artificial Sequence
  Description of Artificial Sequence: Synthetic oligonucleotide
cagaacuaucccgaacaag

SEQ ID NO: 1128280 - RNA, 19 nt, Artificial Sequence
  Description of Artificial Sequence: Synthetic oligonucleotide
cuccguaagacuugucaca

SEQ ID NO: 1128281 - RNA, 19 nt, Artificial Sequence
  Description of Artificial Sequence: Synthetic oligonucleotide
caauggcgauguaagucug

SEQ ID NO: 1128282 - RNA, 19 nt, Artificial Sequence
  Description of Artificial Sequence: Synthetic oligonucleotide
uaagucuauucugguguac

SEQ ID NO: 1128283 - RNA, 19 nt, Artificial Sequence
  Description of Artificial Sequence: Synthetic oligonucleotide
aacggucaucagaacuauc

SEQ ID NO: 1128284 - RNA, 19 nt, Artificial Sequence
  Description of Artificial Sequence: Synthetic oligonucleotide
aaccuaccauucgagugcu

SEQ ID NO: 1128285 - RNA, 19 nt, Artificial Sequence
  Description of Artificial Sequence: Synthetic oligonucleotide
guaagacuugucacaacca

SEQ ID NO: 1128286 - RNA, 19 nt, Artificial Sequence
  Description of Artificial Sequence: Synthetic oligonucleotide
gacacuggauuggucaguc

SEQ ID NO: 1128287 - RNA, 19 nt, Artificial Sequence
  Description of Artificial Sequence: Synthetic oligonucleotide
ggcuuaaaagguaacgguc

SEQ ID NO: 1128288 - RNA, 19 nt, Artificial Sequence
  Description of Artificial Sequence: Synthetic oligonucleotide
ucucacacacacacacaua

SEQ ID NO: 1128289 - RNA, 19 nt, Artificial Sequence
  Description of Artificial Sequence: Synthetic oligonucleotide
aaguguuauacaagauaua

SEQ ID NO: 1128290 - RNA, 19 nt, Artificial Sequence
  Description of Artificial Sequence: Synthetic oligonucleotide
aauggcgauguaagucugu

SEQ ID NO: 1128291 - RNA, 19 nt, Artificial Sequence
  Description of Artificial Sequence: Synthetic oligonucleotide
gguaacggucaucagaacu

SEQ ID NO: 1128292 - RNA, 19 nt, Artificial Sequence
  Description of Artificial Sequence: Synthetic oligonucleotide
gccaauuuauaccagaguu

SEQ ID NO: 1128293 - RNA, 19 nt, Artificial Sequence
  Description of Artificial Sequence: Synthetic oligonucleotide
acgcuuucagccaugugca

SEQ ID NO: 1128294 - RNA, 19 nt, Artificial Sequence
  Description of Artificial Sequence: Synthetic oligonucleotide
cauguccgggccugagagg

SEQ ID NO: 1128295 - RNA, 19 nt, Artificial Sequence
  Description of Artificial Sequence: Synthetic oligonucleotide
gguaagucgcagaucccgg

SEQ ID NO: 1128296 - RNA, 19 nt, Artificial Sequence
  Description of Artificial Sequence: Synthetic oligonucleotide
cauucgagugcucaauucu

SEQ ID NO: 1128297 - RNA, 19 nt, Artificial Sequence
  Description of Artificial Sequence: Synthetic oligonucleotide
ggccauuuaucaaaggaga

SEQ ID NO: 1128298 - RNA, 19 nt, Artificial Sequence
  Description of Artificial Sequence: Synthetic oligonucleotide
uucuagugugaaguguuuu

SEQ ID NO: 1128299 - RNA, 19 nt, Artificial Sequence
  Description of Artificial Sequence: Synthetic oligonucleotide
accagaguuuaaugacaga

SEQ ID NO: 1128300 - RNA, 19 nt, Artificial Sequence
  Description of Artificial Sequence: Synthetic oligonucleotide
ugaccggguaagucgcaga

SEQ ID NO: 1128301 - RNA, 19 nt, Artificial Sequence
  Description of Artificial Sequence: Synthetic oligonucleotide
gucuauucugguguacuga

SEQ ID NO: 1128302 - RNA, 19 nt, Artificial Sequence
  Description of Artificial Sequence: Synthetic oligonucleotide
acacacacacacauacacu

SEQ ID NO: 1128303 - RNA, 19 nt, Artificial Sequence
  Description of Artificial Sequence: Synthetic oligonucleotide
uaacggucaucagaacuau

SEQ ID NO: 1128304 - RNA, 19 nt, Artificial Sequence
  Description of Artificial Sequence: Synthetic oligonucleotide
accauucgagugcucaauu

SEQ ID NO: 1128305 - RNA, 19 nt, Artificial Sequence
  Description of Artificial Sequence: Synthetic oligonucleotide
gguuaucucacuguucuaa

SEQ ID NO: 1128306 - RNA, 19 nt, Artificial Sequence
  Description of Artificial Sequence: Synthetic oligonucleotide
caaguuguucaccgaagaa

SEQ ID NO: 1128307 - RNA, 19 nt, Artificial Sequence
  Description of Artificial Sequence: Synthetic oligonucleotide
caauuggaccauuuaacau

SEQ ID NO: 1128308 - RNA, 19 nt, Artificial Sequence
  Description of Artificial Sequence: Synthetic oligonucleotide
gcaaguuguucaccgaaga

SEQ ID NO: 1128309 - RNA, 19 nt, Artificial Sequence
  Description of Artificial Sequence: Synthetic oligonucleotide
ugugauuauucugcacauu

SEQ ID NO: 1128310 - RNA, 19 nt, Artificial Sequence
  Description of Artificial Sequence: Synthetic oligonucleotide
ucugaccggguaagucgca

SEQ ID NO: 1128311 - RNA, 19 nt, Artificial Sequence
  Description of Artificial Sequence: Synthetic oligonucleotide
ccuccguaagacuugucac

SEQ ID NO: 1128312 - RNA, 19 nt, Artificial Sequence
  Description of Artificial Sequence: Synthetic oligonucleotide
uaccauucgagugcucaau

SEQ ID NO: 1128313 - RNA, 19 nt, Artificial Sequence
  Description of Artificial Sequence: Synthetic oligonucleotide
gacguauaacaaagcgaca

SEQ ID NO: 1128314 - RNA, 19 nt, Artificial Sequence
  Description of Artificial Sequence: Synthetic oligonucleotide
gucgauucauaauccugaa

SEQ ID NO: 1128315 - RNA, 19 nt, Artificial Sequence
  Description of Artificial Sequence: Synthetic oligonucleotide
caaccgagaccuugaauaa

SEQ ID NO: 1128316 - RNA, 19 nt, Artificial Sequence
  Description of Artificial Sequence: Synthetic oligonucleotide
ugccaaucagcaaguuguu

SEQ ID NO: 1128317 - RNA, 19 nt, Artificial Sequence
  Description of Artificial Sequence: Synthetic oligonucleotide
ugacacuggauuggucagu

SEQ ID NO: 1128318 - RNA, 19 nt, Artificial Sequence
  Description of Artificial Sequence: Synthetic oligonucleotide
gcauuggagguagcaacgg

SEQ ID NO: 1128319 - RNA, 19 nt, Artificial Sequence
  Description of Artificial Sequence: Synthetic oligonucleotide
gcucccaaucucucaguag

SEQ ID NO: 1128320 - RNA, 19 nt, Artificial Sequence
  Description of Artificial Sequence: Synthetic oligonucleotide
gcuaaaguuccuuuggauu

SEQ ID NO: 1128321 - RNA, 19 nt, Artificial Sequence
  Description of Artificial Sequence: Synthetic oligonucleotide
accgaagaauccacaagaa

SEQ ID NO: 1128322 - RNA, 19 nt, Artificial Sequence
  Description of Artificial Sequence: Synthetic oligonucleotide
guguacugacguauaacaa

SEQ ID NO: 1128323 - RNA, 19 nt, Artificial Sequence
  Description of Artificial Sequence: Synthetic oligonucleotide
cucucacacacacacacau

SEQ ID NO: 1128324 - RNA, 19 nt, Artificial Sequence
  Description of Artificial Sequence: Synthetic oligonucleotide
gugcaagaagcagggcucc

SEQ ID NO: 1128325 - RNA, 19 nt, Artificial Sequence
  Description of Artificial Sequence: Synthetic oligonucleotide
augcucgauuaagucaacu

SEQ ID NO: 1128326 - RNA, 19 nt, Artificial Sequence
  Description of Artificial Sequence: Synthetic oligonucleotide
gauggggccccaguaccac

SEQ ID NO: 1128327 - RNA, 19 nt, Artificial Sequence
  Description of Artificial Sequence: Synthetic oligonucleotide
gacaccuugcagacacuuc

SEQ ID NO: 1128328 - RNA, 19 nt, Artificial Sequence
  Description of Artificial Sequence: Synthetic oligonucleotide
cgaacaaacugaugacccc

SEQ ID NO: 1128329 - RNA, 19 nt, Artificial Sequence
  Description of Artificial Sequence: Synthetic oligonucleotide
ggcacguuagccagcuucc

SEQ ID NO: 1128330 - RNA, 19 nt, Artificial Sequence
  Description of Artificial Sequence: Synthetic oligonucleotide
agcgcacgcuuucagccau

SEQ ID NO: 1128331 - RNA, 19 nt, Artificial Sequence
  Description of Artificial Sequence: Synthetic oligonucleotide
uaccaccccuguuuugcaa

SEQ ID NO: 1128332 - RNA, 19 nt, Artificial Sequence
  Description of Artificial Sequence: Synthetic oligonucleotide
ggagcgaaagcucaggcuu

SEQ ID NO: 1128333 - RNA, 19 nt, Artificial Sequence
  Description of Artificial Sequence: Synthetic oligonucleotide
gcucgauuaagucaacuau

SEQ ID NO: 1128334 - RNA, 19 nt, Artificial Sequence
  Description of Artificial Sequence: Synthetic oligonucleotide
aaaugacagcgcacgcuuu

SEQ ID NO: 1128335 - RNA, 19 nt, Artificial Sequence
  Description of Artificial Sequence: Synthetic oligonucleotide
agacaccuugcagacacuu

SEQ ID NO: 1128336 - RNA, 19 nt, Artificial Sequence
  Description of Artificial Sequence: Synthetic oligonucleotide
caaaugacagcgcacgcuu

SEQ ID NO: 1128337 - RNA, 19 nt, Artificial Sequence
  Description of Artificial Sequence: Synthetic oligonucleotide
ggccgcuaaaguuccuuug

SEQ ID NO: 1128338 - RNA, 19 nt, Artificial Sequence
  Description of Artificial Sequence: Synthetic oligonucleotide
cagucugaccggguaaguc

SEQ ID NO: 1128339 - RNA, 19 nt, Artificial Sequence
  Description of Artificial Sequence: Synthetic oligonucleotide
cugaccggguaagucgcag

SEQ ID NO: 1128340 - RNA, 19 nt, Artificial Sequence
  Description of Artificial Sequence: Synthetic oligonucleotide
gccaugugcauguccgggc

SEQ ID NO: 1128341 - RNA, 19 nt, Artificial Sequence
  Description of Artificial Sequence: Synthetic oligonucleotide
gcagaucccggcaaccgag

SEQ ID NO: 1128342 - RNA, 19 nt, Artificial Sequence
  Description of Artificial Sequence: Synthetic oligonucleotide
augacagcgcacgcuuuca

SEQ ID NO: 1128343 - RNA, 19 nt, Artificial Sequence
  Description of Artificial Sequence: Synthetic oligonucleotide
gagucccugauugaaugcu

SEQ ID NO: 1128344 - RNA, 19 nt, Artificial Sequence
  Description of Artificial Sequence: Synthetic oligonucleotide
ccauucgagugcucaauuc

SEQ ID NO: 1128345 - RNA, 19 nt, Artificial Sequence
  Description of Artificial Sequence: Synthetic oligonucleotide
uuuugccaugggagcgaaa

SEQ ID NO: 1128346 - RNA, 19 nt, Artificial Sequence
  Description of Artificial Sequence: Synthetic oligonucleotide
cuaccauucgagugcucaa

SEQ ID NO: 1128347 - RNA, 19 nt, Artificial Sequence
  Description of Artificial Sequence: Synthetic oligonucleotide
caagaagcagggcucccaa

SEQ ID NO: 1128348 - RNA, 19 nt, Artificial Sequence
  Description of Artificial Sequence: Synthetic oligonucleotide
caauucuagugugaagugu

SEQ ID NO: 1128349 - RNA, 19 nt, Artificial Sequence
  Description of Artificial Sequence: Synthetic oligonucleotide
ugaccugcucuagggcucu

SEQ ID NO: 1128350 - RNA, 19 nt, Artificial Sequence
  Description of Artificial Sequence: Synthetic oligonucleotide
gucgcagaucccggcaacc

SEQ ID NO: 1128351 - RNA, 19 nt, Artificial Sequence
  Description of Artificial Sequence: Synthetic oligonucleotide
gguugaauacacaggaaau

SEQ ID NO: 1128352 - RNA, 19 nt, Artificial Sequence
  Description of Artificial Sequence: Synthetic oligonucleotide
guucaccgaagaauccaca

SEQ ID NO: 1128353 - RNA, 19 nt, Artificial Sequence
  Description of Artificial Sequence: Synthetic oligonucleotide
acucacacuucuagauccu

SEQ ID NO: 1128354 - RNA, 19 nt, Artificial Sequence
  Description of Artificial Sequence: Synthetic oligonucleotide
auucuagugugaaguguuu

SEQ ID NO: 1128355 - RNA, 19 nt, Artificial Sequence
  Description of Artificial Sequence: Synthetic oligonucleotide
aggccgcuaaaguuccuuu

SEQ ID NO: 1128356 - RNA, 19 nt, Artificial Sequence
  Description of Artificial Sequence: Synthetic oligonucleotide
agcuccuccguaagacuug

SEQ ID NO: 1128357 - RNA, 19 nt, Artificial Sequence
  Description of Artificial Sequence: Synthetic oligonucleotide
acuuuuacuuaggguugaa

SEQ ID NO: 1128358 - RNA, 19 nt, Artificial Sequence
  Description of Artificial Sequence: Synthetic oligonucleotide
cugguguacugacguauaa

SEQ ID NO: 1128359 - RNA, 19 nt, Artificial Sequence
  Description of Artificial Sequence: Synthetic oligonucleotide
cugaaccuaccauucgagu

SEQ ID NO: 1128360 - RNA, 19 nt, Artificial Sequence
  Description of Artificial Sequence: Synthetic oligonucleotide
guaccaccccuguuuugca

SEQ ID NO: 1128361 - RNA, 19 nt, Artificial Sequence
  Description of Artificial Sequence: Synthetic oligonucleotide
cugagaggccgcuaaaguu

SEQ ID NO: 1128362 - RNA, 19 nt, Artificial Sequence
  Description of Artificial Sequence: Synthetic oligonucleotide
ggauagcagcaaaggacug

SEQ ID NO: 1128363 - RNA, 19 nt, Artificial Sequence
  Description of Artificial Sequence: Synthetic oligonucleotide
aagacaccuugcagacacu

SEQ ID NO: 1128364 - RNA, 19 nt, Artificial Sequence
  Description of Artificial Sequence: Synthetic oligonucleotide
acucugcacugagucauaa

SEQ ID NO: 1128365 - RNA, 19 nt, Artificial Sequence
  Description of Artificial Sequence: Synthetic oligonucleotide
cuacucugcacugagucau

SEQ ID NO: 1128366 - RNA, 19 nt, Artificial Sequence
  Description of Artificial Sequence: Synthetic oligonucleotide
gucuuguaucugaacccca

SEQ ID NO: 1128367 - RNA, 19 nt, Artificial Sequence
  Description of Artificial Sequence: Synthetic oligonucleotide
agcgaaagcucaggcuuaa

SEQ ID NO: 1128368 - RNA, 19 nt, Artificial Sequence
  Description of Artificial Sequence: Synthetic oligonucleotide
caucgucaugaccugcucu

SEQ ID NO: 1128369 - RNA, 19 nt, Artificial Sequence
  Description of Artificial Sequence: Synthetic oligonucleotide
cccagcgugugauggggcc

SEQ ID NO: 1128370 - RNA, 19 nt, Artificial Sequence
  Description of Artificial Sequence: Synthetic oligonucleotide
gggcguuacggagaaucug

SEQ ID NO: 1128371 - RNA, 19 nt, Artificial Sequence
  Description of Artificial Sequence: Synthetic oligonucleotide
cagaucccggcaaccgaga

SEQ ID NO: 1128372 - RNA, 19 nt, Artificial Sequence
  Description of Artificial Sequence: Synthetic oligonucleotide
ccaauuuauaccagaguuu

SEQ ID NO: 1128373 - RNA, 19 nt, Artificial Sequence
  Description of Artificial Sequence: Synthetic oligonucleotide
guaugcccuucuacaucug

SEQ ID NO: 1128374 - RNA, 19 nt, Artificial Sequence
  Description of Artificial Sequence: Synthetic oligonucleotide
cagcgcacgcuuucagcca

SEQ ID NO: 1128375 - RNA, 19 nt, Artificial Sequence
  Description of Artificial Sequence: Synthetic oligonucleotide
caccugcaugaaccgugac

SEQ ID NO: 1128376 - RNA, 19 nt, Artificial Sequence
  Description of Artificial Sequence: Synthetic oligonucleotide
uacggagaaucuggucauu

SEQ ID NO: 1128377 - RNA, 19 nt, Artificial Sequence
  Description of Artificial Sequence: Synthetic oligonucleotide
gggccacuacucugcacug

SEQ ID NO: 1128378 - RNA, 19 nt, Artificial Sequence
  Description of Artificial Sequence: Synthetic oligonucleotide
ccuuuggauuggguuauuc

SEQ ID NO: 1128379 - RNA, 19 nt, Artificial Sequence
  Description of Artificial Sequence: Synthetic oligonucleotide
cguuacggagaaucugguc

SEQ ID NO: 1128380 - RNA, 19 nt, Artificial Sequence
  Description of Artificial Sequence: Synthetic oligonucleotide
cuggggcuacaaccagguc

SEQ ID NO: 1128381 - RNA, 19 nt, Artificial Sequence
  Description of Artificial Sequence: Synthetic oligonucleotide
auguuucauucaacuuuua

SEQ ID NO: 1128382 - RNA, 19 nt, Artificial Sequence
  Description of Artificial Sequence: Synthetic oligonucleotide
ccguaagacuugucacaac

SEQ ID NO: 1128383 - RNA, 19 nt, Artificial Sequence
  Description of Artificial Sequence: Synthetic oligonucleotide
accuaccauucgagugcuc

SEQ ID NO: 1128384 - RNA, 19 nt, Artificial Sequence
  Description of Artificial Sequence: Synthetic oligonucleotide
ccgcuaaaguuccuuugga

SEQ ID NO: 1128385 - RNA, 19 nt, Artificial Sequence
  Description of Artificial Sequence: Synthetic oligonucleotide
ccagcgugugauggggccc

SEQ ID NO: 1128386 - RNA, 19 nt, Artificial Sequence
  Description of Artificial Sequence: Synthetic oligonucleotide
cccuucuacaucuggcugu

SEQ ID NO: 1128387 - RNA, 19 nt, Artificial Sequence
  Description of Artificial Sequence: Synthetic oligonucleotide
ccugauugaaugcucgauu

SEQ ID NO: 1128388 - RNA, 19 nt, Artificial Sequence
  Description of Artificial Sequence: Synthetic oligonucleotide
gcacgcuuucagccaugug

SEQ ID NO: 1128389 - RNA, 19 nt, Artificial Sequence
  Description of Artificial Sequence: Synthetic oligonucleotide
ggcaucgucaugaccugcu

SEQ ID NO: 1128390 - RNA, 19 nt, Artificial Sequence
  Description of Artificial Sequence: Synthetic oligonucleotide
ggguuaucucacuguucua

SEQ ID NO: 1128391 - RNA, 19 nt, Artificial Sequence
  Description of Artificial Sequence: Synthetic oligonucleotide
agaggccgcuaaaguuccu

SEQ ID NO: 1128392 - RNA, 19 nt, Artificial Sequence
  Description of Artificial Sequence: Synthetic oligonucleotide
ccgaagaauccacaagaau

SEQ ID NO: 1128393 - RNA, 19 nt, Artificial Sequence
  Description of Artificial Sequence: Synthetic oligonucleotide
ggccacuacucugcacuga

SEQ ID NO: 1128394 - RNA, 19 nt, Artificial Sequence
  Description of Artificial Sequence: Synthetic oligonucleotide
ccgugacacuggauugguc

SEQ ID NO: 1128395 - RNA, 19 nt, Artificial Sequence
  Description of Artificial Sequence: Synthetic oligonucleotide
cccauguguuuauucaauu

SEQ ID NO: 1128396 - RNA, 19 nt, Artificial Sequence
  Description of Artificial Sequence: Synthetic oligonucleotide
ggggcguuacggagaaucu

SEQ ID NO: 1128397 - RNA, 19 nt, Artificial Sequence
  Description of Artificial Sequence: Synthetic oligonucleotide
cgcuaaaguuccuuuggau

SEQ ID NO: 1128398 - RNA, 19 nt, Artificial Sequence
  Description of Artificial Sequence: Synthetic oligonucleotide
cacaaccauggggccacua

SEQ ID NO: 1128399 - RNA, 19 nt, Artificial Sequence
  Description of Artificial Sequence: Synthetic oligonucleotide
gcgugugauggggccccag

SEQ ID NO: 1128400 - RNA, 19 nt, Artificial Sequence
  Description of Artificial Sequence: Synthetic oligonucleotide
gcguuacggagaaucuggu

SEQ ID NO: 1128401 - RNA, 19 nt, Artificial Sequence
  Description of Artificial Sequence: Synthetic oligonucleotide
gcuccuccguaagacuugu

SEQ ID NO: 1128402 - RNA, 19 nt, Artificial Sequence
  Description of Artificial Sequence: Synthetic oligonucleotide
ucccggcaaccgagaccuu

SEQ ID NO: 1128403 - RNA, 19 nt, Artificial Sequence
  Description of Artificial Sequence: Synthetic oligonucleotide
ccacuacucugcacugagu

SEQ ID NO: 1128404 - RNA, 19 nt, Artificial Sequence
  Description of Artificial Sequence: Synthetic oligonucleotide
gcgcacgcuuucagccaug

SEQ ID NO: 1128405 - RNA, 19 nt, Artificial Sequence
  Description of Artificial Sequence: Synthetic oligonucleotide
gcgaaagcucaggcuuaaa

SEQ ID NO: 1128406 - RNA, 19 nt, Artificial Sequence
  Description of Artificial Sequence: Synthetic oligonucleotide
gcgcaccugcaugaaccgu

SEQ ID NO: 1128407 - RNA, 19 nt, Artificial Sequence
  Description of Artificial Sequence: Synthetic oligonucleotide
cgcacgcuuucagccaugu

SEQ ID NO: 1128408 - RNA, 19 nt, Artificial Sequence
  Description of Artificial Sequence: Synthetic oligonucleotide
aaauccauaggaucuaugg

SEQ ID NO: 1128409 - RNA, 19 nt, Artificial Sequence
  Description of Artificial Sequence: Synthetic oligonucleotide
aaagguuucaaccuugcuc

SEQ ID NO: 1128410 - RNA, 19 nt, Artificial Sequence
  Description of Artificial Sequence: Synthetic oligonucleotide
uacuuaacaacauacaaag

SEQ ID NO: 1128411 - RNA, 19 nt, Artificial Sequence
  Description of Artificial Sequence: Synthetic oligonucleotide
aaggaguauauacauaaac

SEQ ID NO: 1128412 - RNA, 19 nt, Artificial Sequence
  Description of Artificial Sequence: Synthetic oligonucleotide
ucugaaaugaacuucaccu

SEQ ID NO: 1128413 - RNA, 19 nt, Artificial Sequence
  Description of Artificial Sequence: Synthetic oligonucleotide
aaguuuagaaguugaagac

SEQ ID NO: 1128414 - RNA, 19 nt, Artificial Sequence
  Description of Artificial Sequence: Synthetic oligonucleotide
aagauuuuauuugugacac

SEQ ID NO: 1128415 - RNA, 19 nt, Artificial Sequence
  Description of Artificial Sequence: Synthetic oligonucleotide
ugugaacuaauucugaagc

SEQ ID NO: 1128416 - RNA, 19 nt, Artificial Sequence
  Description of Artificial Sequence: Synthetic oligonucleotide
aauuguuugacuccaagga

SEQ ID NO: 1128417 - RNA, 19 nt, Artificial Sequence
  Description of Artificial Sequence: Synthetic oligonucleotide
aaugaucacacuuccuccc

SEQ ID NO: 1128418 - RNA, 19 nt, Artificial Sequence
  Description of Artificial Sequence: Synthetic oligonucleotide
aacaggauuaauaagcaac

SEQ ID NO: 1128419 - RNA, 19 nt, Artificial Sequence
  Description of Artificial Sequence: Synthetic oligonucleotide
aauccauaggaucuauggc

SEQ ID NO: 1128420 - RNA, 19 nt, Artificial Sequence
  Description of Artificial Sequence: Synthetic oligonucleotide
caaaguaccaagcagauac

SEQ ID NO: 1128421 - RNA, 19 nt, Artificial Sequence
  Description of Artificial Sequence: Synthetic oligonucleotide
aggaaacuggcucacaucc

SEQ ID NO: 1128422 - RNA, 19 nt, Artificial Sequence
  Description of Artificial Sequence: Synthetic oligonucleotide
aagguuucaaccuugcucu

SEQ ID NO: 1128423 - RNA, 19 nt, Artificial Sequence
  Description of Artificial Sequence: Synthetic oligonucleotide
caauagaagagucaguagg

SEQ ID NO: 1128424 - RNA, 19 nt, Artificial Sequence
  Description of Artificial Sequence: Synthetic oligonucleotide
aguaggaaccacaagaggc

SEQ ID NO: 1128425 - RNA, 19 nt, Artificial Sequence
  Description of Artificial Sequence: Synthetic oligonucleotide
guaaacaggauuaauaagc

SEQ ID NO: 1128426 - RNA, 19 nt, Artificial Sequence
  Description of Artificial Sequence: Synthetic oligonucleotide
uguaacucaagggaaaagg

SEQ ID NO: 1128427 - RNA, 19 nt, Artificial Sequence
  Description of Artificial Sequence: Synthetic oligonucleotide
ugauguuccagguugcugg

SEQ ID NO: 1128428 - RNA, 19 nt, Artificial Sequence
  Description of Artificial Sequence: Synthetic oligonucleotide
aaguugaagacugauguuc

SEQ ID NO: 1128429 - RNA, 19 nt, Artificial Sequence
  Description of Artificial Sequence: Synthetic oligonucleotide
acauaccuuaccaagaggc

SEQ ID NO: 1128430 - RNA, 19 nt, Artificial Sequence
  Description of Artificial Sequence: Synthetic oligonucleotide
ugucccuagagucacacag

SEQ ID NO: 1128431 - RNA, 19 nt, Artificial Sequence
  Description of Artificial Sequence: Synthetic oligonucleotide
ugugacacuaaucuagucu

SEQ ID NO: 1128432 - RNA, 19 nt, Artificial Sequence
  Description of Artificial Sequence: Synthetic oligonucleotide
uacuuacuuaacaacauac

SEQ ID NO: 1128433 - RNA, 19 nt, Artificial Sequence
  Description of Artificial Sequence: Synthetic oligonucleotide
uguaaacaggauuaauaag

SEQ ID NO: 1128434 - RNA, 19 nt, Artificial Sequence
  Description of Artificial Sequence: Synthetic oligonucleotide
uuacuuaacaacauacaaa

SEQ ID NO: 1128435 - RNA, 19 nt, Artificial Sequence
  Description of Artificial Sequence: Synthetic oligonucleotide
uguguaaacaggauuaaua

SEQ ID NO: 1128436 - RNA, 19 nt, Artificial Sequence
  Description of Artificial Sequence: Synthetic oligonucleotide
acuugugccaaggaaaggc

SEQ ID NO: 1128437 - RNA, 19 nt, Artificial Sequence
  Description of Artificial Sequence: Synthetic oligonucleotide
aaguagaacucaaagaacu

SEQ ID NO: 1128438 - RNA, 19 nt, Artificial Sequence
  Description of Artificial Sequence: Synthetic oligonucleotide
aaaagguuacaguucaaaa

SEQ ID NO: 1128439 - RNA, 19 nt, Artificial Sequence
  Description of Artificial Sequence: Synthetic oligonucleotide
aggacuuguaacucaaggg

SEQ ID NO: 1128440 - RNA, 19 nt, Artificial Sequence
  Description of Artificial Sequence: Synthetic oligonucleotide
acaagaggcggguacaaac

SEQ ID NO: 1128441 - RNA, 19 nt, Artificial Sequence
  Description of Artificial Sequence: Synthetic oligonucleotide
uguaccagaagcacccagg

SEQ ID NO: 1128442 - RNA, 19 nt, Artificial Sequence
  Description of Artificial Sequence: Synthetic oligonucleotide
acagaugggacuauugggc

SEQ ID NO: 1128443 - RNA, 19 nt, Artificial Sequence
  Description of Artificial Sequence: Synthetic oligonucleotide
ucaguugacagaacaggag

SEQ ID NO: 1128444 - RNA, 19 nt, Artificial Sequence
  Description of Artificial Sequence: Synthetic oligonucleotide
aaccacaagaggcggguac

SEQ ID NO: 1128445 - RNA, 19 nt, Artificial Sequence
  Description of Artificial Sequence: Synthetic oligonucleotide
uauacauaaacagguaaac

SEQ ID NO: 1128446 - RNA, 19 nt, Artificial Sequence
  Description of Artificial Sequence: Synthetic oligonucleotide
uuguuugacuccaaggacu

SEQ ID NO: 1128447 - RNA, 19 nt, Artificial Sequence
  Description of Artificial Sequence: Synthetic oligonucleotide
ugcaagcuguaccagaagc

SEQ ID NO: 1128448 - RNA, 19 nt, Artificial Sequence
  Description of Artificial Sequence: Synthetic oligonucleotide
agagugagaaccucaguag

SEQ ID NO: 1128449 - RNA, 19 nt, Artificial Sequence
  Description of Artificial Sequence: Synthetic oligonucleotide
agacugauguuccagguug

SEQ ID NO: 1128450 - RNA, 19 nt, Artificial Sequence
  Description of Artificial Sequence: Synthetic oligonucleotide
uucaguugacagaacagga

SEQ ID NO: 1128451 - RNA, 19 nt, Artificial Sequence
  Description of Artificial Sequence: Synthetic oligonucleotide
uuaggacuaucccaggaca

SEQ ID NO: 1128452 - RNA, 19 nt, Artificial Sequence
  Description of Artificial Sequence: Synthetic oligonucleotide
guaguacccacccugcugg

SEQ ID NO: 1128453 - RNA, 19 nt, Artificial Sequence
  Description of Artificial Sequence: Synthetic oligonucleotide
aauagaagagucaguagga

SEQ ID NO: 1128454 - RNA, 19 nt, Artificial Sequence
  Description of Artificial Sequence: Synthetic oligonucleotide
acacuaaucuagucugagc

SEQ ID NO: 1128455 - RNA, 19 nt, Artificial Sequence
  Description of Artificial Sequence: Synthetic oligonucleotide
uuugcaugccuccugggca

SEQ ID NO: 1128456 - RNA, 19 nt, Artificial Sequence
  Description of Artificial Sequence: Synthetic oligonucleotide
agaaguuuagaaguugaag

SEQ ID NO: 1128457 - RNA, 19 nt, Artificial Sequence
  Description of Artificial Sequence: Synthetic oligonucleotide
gugacacuaaucuagucug

SEQ ID NO: 1128458 - RNA, 19 nt, Artificial Sequence
  Description of Artificial Sequence: Synthetic oligonucleotide
aggauuaauaagcaacaga

SEQ ID NO: 1128459 - RNA, 19 nt, Artificial Sequence
  Description of Artificial Sequence: Synthetic oligonucleotide
agagaccaaauccauagga

SEQ ID NO: 1128460 - RNA, 19 nt, Artificial Sequence
  Description of Artificial Sequence: Synthetic oligonucleotide
aggguguaaaagcaucugg

SEQ ID NO: 1128461 - RNA, 19 nt, Artificial Sequence
  Description of Artificial Sequence: Synthetic oligonucleotide
gaaagcucagccccauugg

SEQ ID NO: 1128462 - RNA, 19 nt, Artificial Sequence
  Description of Artificial Sequence: Synthetic oligonucleotide
aguaccuccaugcucuaag

SEQ ID NO: 1128463 - RNA, 19 nt, Artificial Sequence
  Description of Artificial Sequence: Synthetic oligonucleotide
accuacagagaacuguggg

SEQ ID NO: 1128464 - RNA, 19 nt, Artificial Sequence
  Description of Artificial Sequence: Synthetic oligonucleotide
cacagaugggacuauuggg

SEQ ID NO: 1128465 - RNA, 19 nt, Artificial Sequence
  Description of Artificial Sequence: Synthetic oligonucleotide
cuucaguugacagaacagg

SEQ ID NO: 1128466 - RNA, 19 nt, Artificial Sequence
  Description of Artificial Sequence: Synthetic oligonucleotide
cuuaccaagaggccaaaac

SEQ ID NO: 1128467 - RNA, 19 nt, Artificial Sequence
  Description of Artificial Sequence: Synthetic oligonucleotide
uuugugacacuaaucuagu

SEQ ID NO: 1128468 - RNA, 19 nt, Artificial Sequence
  Description of Artificial Sequence: Synthetic oligonucleotide
ugcucuaaggggcaagggc

SEQ ID NO: 1128469 - RNA, 19 nt, Artificial Sequence
  Description of Artificial Sequence: Synthetic oligonucleotide
cucaaggugggguggaugg

SEQ ID NO: 1128470 - RNA, 19 nt, Artificial Sequence
  Description of Artificial Sequence: Synthetic oligonucleotide
uaccaagaggccaaaacuc

SEQ ID NO: 1128471 - RNA, 19 nt, Artificial Sequence
  Description of Artificial Sequence: Synthetic oligonucleotide
agauacuuacuuaacaaca

SEQ ID NO: 1128472 - RNA, 19 nt, Artificial Sequence
  Description of Artificial Sequence: Synthetic oligonucleotide
agucugagcuuguagagca

SEQ ID NO: 1128473 - RNA, 19 nt, Artificial Sequence
  Description of Artificial Sequence: Synthetic oligonucleotide
ugugggaagagaccaaauc

SEQ ID NO: 1128474 - RNA, 19 nt, Artificial Sequence
  Description of Artificial Sequence: Synthetic oligonucleotide
caggacuuguaacucaagg

SEQ ID NO: 1128475 - RNA, 19 nt, Artificial Sequence
  Description of Artificial Sequence: Synthetic oligonucleotide
caggacauaccuuaccaag

SEQ ID NO: 1128476 - RNA, 19 nt, Artificial Sequence
  Description of Artificial Sequence: Synthetic oligonucleotide
cuuacuuaacaacauacaa

SEQ ID NO: 1128477 - RNA, 19 nt, Artificial Sequence
  Description of Artificial Sequence: Synthetic oligonucleotide
uccuauuuccucagaaaac

SEQ ID NO: 1128478 - RNA, 19 nt, Artificial Sequence
  Description of Artificial Sequence: Synthetic oligonucleotide
acuaggacgugugaucagc

SEQ ID NO: 1128479 - RNA, 19 nt, Artificial Sequence
  Description of Artificial Sequence: Synthetic oligonucleotide
aggaguauauacauaaaca

SEQ ID NO: 1128480 - RNA, 19 nt, Artificial Sequence
  Description of Artificial Sequence: Synthetic oligonucleotide
gacuauugggccuucucug

SEQ ID NO: 1128481 - RNA, 19 nt, Artificial Sequence
  Description of Artificial Sequence: Synthetic oligonucleotide
uuguauggcucugaaauga

SEQ ID NO: 1128482 - RNA, 19 nt, Artificial Sequence
  Description of Artificial Sequence: Synthetic oligonucleotide
ugaaccuacagagaacugu

SEQ ID NO: 1128483 - RNA, 19 nt, Artificial Sequence
  Description of Artificial Sequence: Synthetic oligonucleotide
ccauacugaaccuacagag

SEQ ID NO: 1128484 - RNA, 19 nt, Artificial Sequence
  Description of Artificial Sequence: Synthetic oligonucleotide
aaaaguuagccaguucccu

SEQ ID NO: 1128485 - RNA, 19 nt, Artificial Sequence
  Description of Artificial Sequence: Synthetic oligonucleotide
ugaauggcccauucggcag

SEQ ID NO: 1128486 - RNA, 19 nt, Artificial Sequence
  Description of Artificial Sequence: Synthetic oligonucleotide
gacauaccuuaccaagagg

SEQ ID NO: 1128487 - RNA, 19 nt, Artificial Sequence
  Description of Artificial Sequence: Synthetic oligonucleotide
uaucccaggacauaccuua

SEQ ID NO: 1128488 - RNA, 19 nt, Artificial Sequence
  Description of Artificial Sequence: Synthetic oligonucleotide
gagugagaaccucaguagc

SEQ ID NO: 1128489 - RNA, 19 nt, Artificial Sequence
  Description of Artificial Sequence: Synthetic oligonucleotide
gugugaacuaauucugaag

SEQ ID NO: 1128490 - RNA, 19 nt, Artificial Sequence
  Description of Artificial Sequence: Synthetic oligonucleotide
cuaaucuagucugagcuug

SEQ ID NO: 1128491 - RNA, 19 nt, Artificial Sequence
  Description of Artificial Sequence: Synthetic oligonucleotide
ugcucuuaugaagaaagga

SEQ ID NO: 1128492 - RNA, 19 nt, Artificial Sequence
  Description of Artificial Sequence: Synthetic oligonucleotide
uagaagagucaguaggaac

SEQ ID NO: 1128493 - RNA, 19 nt, Artificial Sequence
  Description of Artificial Sequence: Synthetic oligonucleotide
aaacaagagugagaaccuc

SEQ ID NO: 1128494 - RNA, 19 nt, Artificial Sequence
  Description of Artificial Sequence: Synthetic oligonucleotide
cauucggcagggaacacag

SEQ ID NO: 1128495 - RNA, 19 nt, Artificial Sequence
  Description of Artificial Sequence: Synthetic oligonucleotide
caccuuaggacuaucccag

SEQ ID NO: 1128496 - RNA, 19 nt, Artificial Sequence
  Description of Artificial Sequence: Synthetic oligonucleotide
cauaccuuaccaagaggcc

SEQ ID NO: 1128497 - RNA, 19 nt, Artificial Sequence
  Description of Artificial Sequence: Synthetic oligonucleotide
uauuuuguauggcucugaa

SEQ ID NO: 1128498 - RNA, 19 nt, Artificial Sequence
  Description of Artificial Sequence: Synthetic oligonucleotide
caauaaugucccagaaagc

SEQ ID NO: 1128499 - RNA, 19 nt, Artificial Sequence
  Description of Artificial Sequence: Synthetic oligonucleotide
caauguguaaacaggauua

SEQ ID NO: 1128500 - RNA, 19 nt, Artificial Sequence
  Description of Artificial Sequence: Synthetic oligonucleotide
uaccuccaugcucuaaggg

SEQ ID NO: 1128501 - RNA, 19 nt, Artificial Sequence
  Description of Artificial Sequence: Synthetic oligonucleotide
caaagaacucaaacuugcc

SEQ ID NO: 1128502 - RNA, 19 nt, Artificial Sequence
  Description of Artificial Sequence: Synthetic oligonucleotide
cuuaggacuaucccaggac

SEQ ID NO: 1128503 - RNA, 19 nt, Artificial Sequence
  Description of Artificial Sequence: Synthetic oligonucleotide
aaagcaucugggcacucaa

SEQ ID NO: 1128504 - RNA, 19 nt, Artificial Sequence
  Description of Artificial Sequence: Synthetic oligonucleotide
agaaaggaaacuggcucac

SEQ ID NO: 1128505 - RNA, 19 nt, Artificial Sequence
  Description of Artificial Sequence: Synthetic oligonucleotide
aacaagagugagaaccuca

SEQ ID NO: 1128506 - RNA, 19 nt, Artificial Sequence
  Description of Artificial Sequence: Synthetic oligonucleotide
auacauaaacagguaaaca

SEQ ID NO: 1128507 - RNA, 19 nt, Artificial Sequence
  Description of Artificial Sequence: Synthetic oligonucleotide
ucccaaugucccuagaguc

SEQ ID NO: 1128508 - RNA, 19 nt, Artificial Sequence
  Description of Artificial Sequence: Synthetic oligonucleotide
cucuugguuccccagguag

SEQ ID NO: 1128509 - RNA, 19 nt, Artificial Sequence
  Description of Artificial Sequence: Synthetic oligonucleotide
gacacuaaucuagucugag

SEQ ID NO: 1128510 - RNA, 19 nt, Artificial Sequence
  Description of Artificial Sequence: Synthetic oligonucleotide
cauaaacagguaaacaucu

SEQ ID NO: 1128511 - RNA, 19 nt, Artificial Sequence
  Description of Artificial Sequence: Synthetic oligonucleotide
ggcggguacaaacaagugg

SEQ ID NO: 1128512 - RNA, 19 nt, Artificial Sequence
  Description of Artificial Sequence: Synthetic oligonucleotide
aaccuugcucuuaugaaga

SEQ ID NO: 1128513 - RNA, 19 nt, Artificial Sequence
  Description of Artificial Sequence: Synthetic oligonucleotide
ugagaaccucaguagcuug

SEQ ID NO: 1128514 - RNA, 19 nt, Artificial Sequence
  Description of Artificial Sequence: Synthetic oligonucleotide
uguucccugaauuguuuga

SEQ ID NO: 1128515 - RNA, 19 nt, Artificial Sequence
  Description of Artificial Sequence: Synthetic oligonucleotide
uuuggggauuauuuuguau

SEQ ID NO: 1128516 - RNA, 19 nt, Artificial Sequence
  Description of Artificial Sequence: Synthetic oligonucleotide
gaauggcccauucggcagg

SEQ ID NO: 1128517 - RNA, 19 nt, Artificial Sequence
  Description of Artificial Sequence: Synthetic oligonucleotide
uauuugugacacuaaucua

SEQ ID NO: 1128518 - RNA, 19 nt, Artificial Sequence
  Description of Artificial Sequence: Synthetic oligonucleotide
aauguguaaacaggauuaa

SEQ ID NO: 1128519 - RNA, 19 nt, Artificial Sequence
  Description of Artificial Sequence: Synthetic oligonucleotide
ggacuuguaacucaaggga

SEQ ID NO: 1128520 - RNA, 19 nt, Artificial Sequence
  Description of Artificial Sequence: Synthetic oligonucleotide
aaggguguaaaagcaucug

SEQ ID NO: 1128521 - RNA, 19 nt, Artificial Sequence
  Description of Artificial Sequence: Synthetic oligonucleotide
gcuauggacagccucuggg

SEQ ID NO: 1128522 - RNA, 19 nt, Artificial Sequence
  Description of Artificial Sequence: Synthetic oligonucleotide
gauucugaauggcccauuc

SEQ ID NO: 1128523 - RNA, 19 nt, Artificial Sequence
  Description of Artificial Sequence: Synthetic oligonucleotide
acucaagggaaaagguuac

SEQ ID NO: 1128524 - RNA, 19 nt, Artificial Sequence
  Description of Artificial Sequence: Synthetic oligonucleotide
cuggguaguacccacccug

SEQ ID NO: 1128525 - RNA, 19 nt, Artificial Sequence
  Description of Artificial Sequence: Synthetic oligonucleotide
aaggcucuugguuccccag

SEQ ID NO: 1128526 - RNA, 19 nt, Artificial Sequence
  Description of Artificial Sequence: Synthetic oligonucleotide
aagaggcggguacaaacaa

SEQ ID NO: 1128527 - RNA, 19 nt, Artificial Sequence
  Description of Artificial Sequence: Synthetic oligonucleotide
acuauugggccuucucugu

SEQ ID NO: 1128528 - RNA, 19 nt, Artificial Sequence
  Description of Artificial Sequence: Synthetic oligonucleotide
ggguguaaaagcaucuggg

SEQ ID NO: 1128529 - RNA, 19 nt, Artificial Sequence
  Description of Artificial Sequence: Synthetic oligonucleotide
agagucacacagcugcaca

SEQ ID NO: 1128530 - RNA, 19 nt, Artificial Sequence
  Description of Artificial Sequence: Synthetic oligonucleotide
accugagugccuuuguggu

SEQ ID NO: 1128531 - RNA, 19 nt, Artificial Sequence
  Description of Artificial Sequence: Synthetic oligonucleotide
ggacauaccuuaccaagag

SEQ ID NO: 1128532 - RNA, 19 nt, Artificial Sequence
  Description of Artificial Sequence: Synthetic oligonucleotide
auaccuuaccaagaggcca

SEQ ID NO: 1128533 - RNA, 19 nt, Artificial Sequence
  Description of Artificial Sequence: Synthetic oligonucleotide
agcugauucaugaccacag

SEQ ID NO: 1128534 - RNA, 19 nt, Artificial Sequence
  Description of Artificial Sequence: Synthetic oligonucleotide
uacaaacaagugguggggc

SEQ ID NO: 1128535 - RNA, 19 nt, Artificial Sequence
  Description of Artificial Sequence: Synthetic oligonucleotide
aaaggcucuugguucccca

SEQ ID NO: 1128536 - RNA, 19 nt, Artificial Sequence
  Description of Artificial Sequence: Synthetic oligonucleotide
cucaguagcuugacauggg

SEQ ID NO: 1128537 - RNA, 19 nt, Artificial Sequence
  Description of Artificial Sequence: Synthetic oligonucleotide
uaccuuaccaagaggccaa

SEQ ID NO: 1128538 - RNA, 19 nt, Artificial Sequence
  Description of Artificial Sequence: Synthetic oligonucleotide
cacuaaucuagucugagcu

SEQ ID NO: 1128539 - RNA, 19 nt, Artificial Sequence
  Description of Artificial Sequence: Synthetic oligonucleotide
uggguaguacccacccugc

SEQ ID NO: 1128540 - RNA, 19 nt, Artificial Sequence
  Description of Artificial Sequence: Synthetic oligonucleotide
guaccuccaugcucuaagg

SEQ ID NO: 1128541 - RNA, 19 nt, Artificial Sequence
  Description of Artificial Sequence: Synthetic oligonucleotide
gaaaggagcuugcacccuc

SEQ ID NO: 1128542 - RNA, 19 nt, Artificial Sequence
  Description of Artificial Sequence: Synthetic oligonucleotide
cauguagaggggaagaccu

SEQ ID NO: 1128543 - RNA, 19 nt, Artificial Sequence
  Description of Artificial Sequence: Synthetic oligonucleotide
gggugcaggcacuaggacg

SEQ ID NO: 1128544 - RNA, 19 nt, Artificial Sequence
  Description of Artificial Sequence: Synthetic oligonucleotide
uagucugagcuuguagagc

SEQ ID NO: 1128545 - RNA, 19 nt, Artificial Sequence
  Description of Artificial Sequence: Synthetic oligonucleotide
uaccaagcagauacuuacu

SEQ ID NO: 1128546 - RNA, 19 nt, Artificial Sequence
  Description of Artificial Sequence: Synthetic oligonucleotide
accucaguagcuugacaug

SEQ ID NO: 1128547 - RNA, 19 nt, Artificial Sequence
  Description of Artificial Sequence: Synthetic oligonucleotide
uaggacuaucccaggacau

SEQ ID NO: 1128548 - RNA, 19 nt, Artificial Sequence
  Description of Artificial Sequence: Synthetic oligonucleotide
caugcucuaaggggcaagg

SEQ ID NO: 1128549 - RNA, 19 nt, Artificial Sequence
  Description of Artificial Sequence: Synthetic oligonucleotide
gcaauagaagagucaguag

SEQ ID NO: 1128550 - RNA, 19 nt, Artificial Sequence
  Description of Artificial Sequence: Synthetic oligonucleotide
acuaaucuagucugagcuu

SEQ ID NO: 1128551 - RNA, 19 nt, Artificial Sequence
  Description of Artificial Sequence: Synthetic oligonucleotide
uuccuuugcaugccuccug

SEQ ID NO: 1128552 - RNA, 19 nt, Artificial Sequence
  Description of Artificial Sequence: Synthetic oligonucleotide
ugaccacagugaacaauga

SEQ ID NO: 1128553 - RNA, 19 nt, Artificial Sequence
  Description of Artificial Sequence: Synthetic oligonucleotide
caggauuaauaagcaacag

SEQ ID NO: 1128554 - RNA, 19 nt, Artificial Sequence
  Description of Artificial Sequence: Synthetic oligonucleotide
agugagaaccucaguagcu

SEQ ID NO: 1128555 - RNA, 19 nt, Artificial Sequence
  Description of Artificial Sequence: Synthetic oligonucleotide
aaaguaccaagcagauacu

SEQ ID NO: 1128556 - RNA, 19 nt, Artificial Sequence
  Description of Artificial Sequence: Synthetic oligonucleotide
cuugcaugggcccaaccca

SEQ ID NO: 1128557 - RNA, 19 nt, Artificial Sequence
  Description of Artificial Sequence: Synthetic oligonucleotide
auaaacagguaaacaucug

SEQ ID NO: 1128558 - RNA, 19 nt, Artificial Sequence
  Description of Artificial Sequence: Synthetic oligonucleotide
agaugggacuauugggccu

SEQ ID NO: 1128559 - RNA, 19 nt, Artificial Sequence
  Description of Artificial Sequence: Synthetic oligonucleotide
gaccaaauccauaggaucu

SEQ ID NO: 1128560 - RNA, 19 nt, Artificial Sequence
  Description of Artificial Sequence: Synthetic oligonucleotide
aacuggcucacaucccaaa

SEQ ID NO: 1128561 - RNA, 19 nt, Artificial Sequence
  Description of Artificial Sequence: Synthetic oligonucleotide
gacuuguaacucaagggaa

SEQ ID NO: 1128562 - RNA, 19 nt, Artificial Sequence
  Description of Artificial Sequence: Synthetic oligonucleotide
aaguaccaagcagauacuu

SEQ ID NO: 1128563 - RNA, 19 nt, Artificial Sequence
  Description of Artificial Sequence: Synthetic oligonucleotide
gaccccuucaccaccugag

SEQ ID NO: 1128564 - RNA, 19 nt, Artificial Sequence
  Description of Artificial Sequence: Synthetic oligonucleotide
uaggacgugugaucagcug

SEQ ID NO: 1128565 - RNA, 19 nt, Artificial Sequence
  Description of Artificial Sequence: Synthetic oligonucleotide
gauuuggggauuauuuugu

SEQ ID NO: 1128566 - RNA, 19 nt, Artificial Sequence
  Description of Artificial Sequence: Synthetic oligonucleotide
caagaggcggguacaaaca

SEQ ID NO: 1128567 - RNA, 19 nt, Artificial Sequence
  Description of Artificial Sequence: Synthetic oligonucleotide
aggcauggaaaggagcuug

SEQ ID NO: 1128568 - RNA, 19 nt, Artificial Sequence
  Description of Artificial Sequence: Synthetic oligonucleotide
accuuaggacuaucccagg

SEQ ID NO: 1128569 - RNA, 19 nt, Artificial Sequence
  Description of Artificial Sequence: Synthetic oligonucleotide
acaagcacccauguuugca

SEQ ID NO: 1128570 - RNA, 19 nt, Artificial Sequence
  Description of Artificial Sequence: Synthetic oligonucleotide
gacuugugccaaggaaagg

SEQ ID NO: 1128571 - RNA, 19 nt, Artificial Sequence
  Description of Artificial Sequence: Synthetic oligonucleotide
agagucaguaggaaccaca

SEQ ID NO: 1128572 - RNA, 19 nt, Artificial Sequence
  Description of Artificial Sequence: Synthetic oligonucleotide
ggccauacugaaccuacag

SEQ ID NO: 1128573 - RNA, 19 nt, Artificial Sequence
  Description of Artificial Sequence: Synthetic oligonucleotide
uagaggggaagaccuuccu

SEQ ID NO: 1128574 - RNA, 19 nt, Artificial Sequence
  Description of Artificial Sequence: Synthetic oligonucleotide
ggauuauuuuguauggcuc

SEQ ID NO: 1128575 - RNA, 19 nt, Artificial Sequence
  Description of Artificial Sequence: Synthetic oligonucleotide
uugugacacuaaucuaguc

SEQ ID NO: 1128576 - RNA, 19 nt, Artificial Sequence
  Description of Artificial Sequence: Synthetic oligonucleotide
aggacauaccuuaccaaga

SEQ ID NO: 1128577 - RNA, 19 nt, Artificial Sequence
  Description of Artificial Sequence: Synthetic oligonucleotide
ucuggguaguacccacccu

SEQ ID NO: 1128578 - RNA, 19 nt, Artificial Sequence
  Description of Artificial Sequence: Synthetic oligonucleotide
agcacccauguuugcaugu

SEQ ID NO: 1128579 - RNA, 19 nt, Artificial Sequence
  Description of Artificial Sequence: Synthetic oligonucleotide
aacuaauucugaagcugau

SEQ ID NO: 1128580 - RNA, 19 nt, Artificial Sequence
  Description of Artificial Sequence: Synthetic oligonucleotide
acuuguaacucaagggaaa

SEQ ID NO: 1128581 - RNA, 19 nt, Artificial Sequence
  Description of Artificial Sequence: Synthetic oligonucleotide
ggacuugugccaaggaaag

SEQ ID NO: 1128582 - RNA, 19 nt, Artificial Sequence
  Description of Artificial Sequence: Synthetic oligonucleotide
auuuggggauuauuuugua

SEQ ID NO: 1128583 - RNA, 19 nt, Artificial Sequence
  Description of Artificial Sequence: Synthetic oligonucleotide
gggacacugggaaugagug

SEQ ID NO: 1128584 - RNA, 19 nt, Artificial Sequence
  Description of Artificial Sequence: Synthetic oligonucleotide
guacccacccugcugguuc

SEQ ID NO: 1128585 - RNA, 19 nt, Artificial Sequence
  Description of Artificial Sequence: Synthetic oligonucleotide
ccucaguagcuugacaugg

SEQ ID NO: 1128586 - RNA, 19 nt, Artificial Sequence
  Description of Artificial Sequence: Synthetic oligonucleotide
ugggcacucaagguggggu

SEQ ID NO: 1128587 - RNA, 19 nt, Artificial Sequence
  Description of Artificial Sequence: Synthetic oligonucleotide
ccuugcaugggcccaaccc

SEQ ID NO: 1128588 - RNA, 19 nt, Artificial Sequence
  Description of Artificial Sequence: Synthetic oligonucleotide
aaacaagugguggggcaaa

SEQ ID NO: 1128589 - RNA, 19 nt, Artificial Sequence
  Description of Artificial Sequence: Synthetic oligonucleotide
gacugauguuccagguugc

SEQ ID NO: 1128590 - RNA, 19 nt, Artificial Sequence
  Description of Artificial Sequence: Synthetic oligonucleotide
cccauguuugcauguagag

SEQ ID NO: 1128591 - RNA, 19 nt, Artificial Sequence
  Description of Artificial Sequence: Synthetic oligonucleotide
gacaaagccuucaguugac

SEQ ID NO: 1128592 - RNA, 19 nt, Artificial Sequence
  Description of Artificial Sequence: Synthetic oligonucleotide
gacagccccuugcaugggc

SEQ ID NO: 1128593 - RNA, 19 nt, Artificial Sequence
  Description of Artificial Sequence: Synthetic oligonucleotide
guucucccaaugucccuag

SEQ ID NO: 1128594 - RNA, 19 nt, Artificial Sequence
  Description of Artificial Sequence: Synthetic oligonucleotide
acgugugaucagcugggcu

SEQ ID NO: 1128595 - RNA, 19 nt, Artificial Sequence
  Description of Artificial Sequence: Synthetic oligonucleotide
gggauuauuuuguauggcu

SEQ ID NO: 1128596 - RNA, 19 nt, Artificial Sequence
  Description of Artificial Sequence: Synthetic oligonucleotide
acuaauucugaagcugauu

SEQ ID NO: 1128597 - RNA, 19 nt, Artificial Sequence
  Description of Artificial Sequence: Synthetic oligonucleotide
caaggacucuggccuagag

SEQ ID NO: 1128598 - RNA, 19 nt, Artificial Sequence
  Description of Artificial Sequence: Synthetic oligonucleotide
uggggcaaaugaucacacu

SEQ ID NO: 1128599 - RNA, 19 nt, Artificial Sequence
  Description of Artificial Sequence: Synthetic oligonucleotide
agccccauuggggugcagg

SEQ ID NO: 1128600 - RNA, 19 nt, Artificial Sequence
  Description of Artificial Sequence: Synthetic oligonucleotide
uucaccaccugagugccuu

SEQ ID NO: 1128601 - RNA, 19 nt, Artificial Sequence
  Description of Artificial Sequence: Synthetic oligonucleotide
gagaaccucaguagcuuga

SEQ ID NO: 1128602 - RNA, 19 nt, Artificial Sequence
  Description of Artificial Sequence: Synthetic oligonucleotide
agaggcggguacaaacaag

SEQ ID NO: 1128603 - RNA, 19 nt, Artificial Sequence
  Description of Artificial Sequence: Synthetic oligonucleotide
augcucuaaggggcaaggg

SEQ ID NO: 1128604 - RNA, 19 nt, Artificial Sequence
  Description of Artificial Sequence: Synthetic oligonucleotide
aguaccaagcagauacuua

SEQ ID NO: 1128605 - RNA, 19 nt, Artificial Sequence
  Description of Artificial Sequence: Synthetic oligonucleotide
gaccccugguuccugcuca

SEQ ID NO: 1128606 - RNA, 19 nt, Artificial Sequence
  Description of Artificial Sequence: Synthetic oligonucleotide
gaggcggguacaaacaagu

SEQ ID NO: 1128607 - RNA, 19 nt, Artificial Sequence
  Description of Artificial Sequence: Synthetic oligonucleotide
ggcacuaggacgugugauc

SEQ ID NO: 1128608 - RNA, 19 nt, Artificial Sequence
  Description of Artificial Sequence: Synthetic oligonucleotide
cacuaggacgugugaucag

SEQ ID NO: 1128609 - RNA, 19 nt, Artificial Sequence
  Description of Artificial Sequence: Synthetic oligonucleotide
ugguggggcaaaugaucac

SEQ ID NO: 1128610 - RNA, 19 nt, Artificial Sequence
  Description of Artificial Sequence: Synthetic oligonucleotide
gggagaaguuuagaaguug

SEQ ID NO: 1128611 - RNA, 19 nt, Artificial Sequence
  Description of Artificial Sequence: Synthetic oligonucleotide
uccuuccuggauucugaau

SEQ ID NO: 1128612 - RNA, 19 nt, Artificial Sequence
  Description of Artificial Sequence: Synthetic oligonucleotide
guagcuugacaugggguga

SEQ ID NO: 1128613 - RNA, 19 nt, Artificial Sequence
  Description of Artificial Sequence: Synthetic oligonucleotide
uagcuugacauggggugac

SEQ ID NO: 1128614 - RNA, 19 nt, Artificial Sequence
  Description of Artificial Sequence: Synthetic oligonucleotide
caaggguguaaaagcaucu

SEQ ID NO: 1128615 - RNA, 19 nt, Artificial Sequence
  Description of Artificial Sequence: Synthetic oligonucleotide
agaccccuucaccaccuga

SEQ ID NO: 1128616 - RNA, 19 nt, Artificial Sequence
  Description of Artificial Sequence: Synthetic oligonucleotide
gacuggggucugcacucag

SEQ ID NO: 1128617 - RNA, 19 nt, Artificial Sequence
  Description of Artificial Sequence: Synthetic oligonucleotide
ggacuaucccaggacauac

SEQ ID NO: 1128618 - RNA, 19 nt, Artificial Sequence
  Description of Artificial Sequence: Synthetic oligonucleotide
accacaagaggcggguaca

SEQ ID NO: 1128619 - RNA, 19 nt, Artificial Sequence
  Description of Artificial Sequence: Synthetic oligonucleotide
gaaaggaaacuggcucaca

SEQ ID NO: 1128620 - RNA, 19 nt, Artificial Sequence
  Description of Artificial Sequence: Synthetic oligonucleotide
ucuaaggggcaagggcuaa

SEQ ID NO: 1128621 - RNA, 19 nt, Artificial Sequence
  Description of Artificial Sequence: Synthetic oligonucleotide
cgugugaucagcugggcuc

SEQ ID NO: 1128622 - RNA, 19 nt, Artificial Sequence
  Description of Artificial Sequence: Synthetic oligonucleotide
uggauucugaauggcccau

SEQ ID NO: 1128623 - RNA, 19 nt, Artificial Sequence
  Description of Artificial Sequence: Synthetic oligonucleotide
agcaaggguguaaaagcau

SEQ ID NO: 1128624 - RNA, 19 nt, Artificial Sequence
  Description of Artificial Sequence: Synthetic oligonucleotide
gccauacugaaccuacaga

SEQ ID NO: 1128625 - RNA, 19 nt, Artificial Sequence
  Description of Artificial Sequence: Synthetic oligonucleotide
uucucccaaugucccuaga

SEQ ID NO: 1128626 - RNA, 19 nt, Artificial Sequence
  Description of Artificial Sequence: Synthetic oligonucleotide
gcaaggguguaaaagcauc

SEQ ID NO: 1128627 - RNA, 19 nt, Artificial Sequence
  Description of Artificial Sequence: Synthetic oligonucleotide
augugucaauaauguccca

SEQ ID NO: 1128628 - RNA, 19 nt, Artificial Sequence
  Description of Artificial Sequence: Synthetic oligonucleotide
gggcaaaugaucacacuuc

SEQ ID NO: 1128629 - RNA, 19 nt, Artificial Sequence
  Description of Artificial Sequence: Synthetic oligonucleotide
gggacuugugccaaggaaa

SEQ ID NO: 1128630 - RNA, 19 nt, Artificial Sequence
  Description of Artificial Sequence: Synthetic oligonucleotide
gacgugugaucagcugggc

SEQ ID NO: 1128631 - RNA, 19 nt, Artificial Sequence
  Description of Artificial Sequence: Synthetic oligonucleotide
auucggcagggaacacagc

SEQ ID NO: 1128632 - RNA, 19 nt, Artificial Sequence
  Description of Artificial Sequence: Synthetic oligonucleotide
ggacuucuggguaguaccc

SEQ ID NO: 1128633 - RNA, 19 nt, Artificial Sequence
  Description of Artificial Sequence: Synthetic oligonucleotide
aagaggcaccuuaggacua

SEQ ID NO: 1128634 - RNA, 19 nt, Artificial Sequence
  Description of Artificial Sequence: Synthetic oligonucleotide
cuacagguuccacacagau

SEQ ID NO: 1128635 - RNA, 19 nt, Artificial Sequence
  Description of Artificial Sequence: Synthetic oligonucleotide
uccugacuggggucugcac

SEQ ID NO: 1128636 - RNA, 19 nt, Artificial Sequence
  Description of Artificial Sequence: Synthetic oligonucleotide
caaacaagugguggggcaa

SEQ ID NO: 1128637 - RNA, 19 nt, Artificial Sequence
  Description of Artificial Sequence: Synthetic oligonucleotide
ggacuauugggccuucucu

SEQ ID NO: 1128638 - RNA, 19 nt, Artificial Sequence
  Description of Artificial Sequence: Synthetic oligonucleotide
uacccacccugcugguucu

SEQ ID NO: 1128639 - RNA, 19 nt, Artificial Sequence
  Description of Artificial Sequence: Synthetic oligonucleotide
guaaaagcaucugggcacu

SEQ ID NO: 1128640 - RNA, 19 nt, Artificial Sequence
  Description of Artificial Sequence: Synthetic oligonucleotide
cucaaggcccaauguguaa

SEQ ID NO: 1128641 - RNA, 19 nt, Artificial Sequence
  Description of Artificial Sequence: Synthetic oligonucleotide
aggcacuaggacgugugau

SEQ ID NO: 1128642 - RNA, 19 nt, Artificial Sequence
  Description of Artificial Sequence: Synthetic oligonucleotide
gcggguacaaacaaguggu

SEQ ID NO: 1128643 - RNA, 19 nt, Artificial Sequence
  Description of Artificial Sequence: Synthetic oligonucleotide
ugggcccaacccaggucca

SEQ ID NO: 1128644 - RNA, 19 nt, Artificial Sequence
  Description of Artificial Sequence: Synthetic oligonucleotide
aggacuaucccaggacaua

SEQ ID NO: 1128645 - RNA, 19 nt, Artificial Sequence
  Description of Artificial Sequence: Synthetic oligonucleotide
uaaaagcaucugggcacuc

SEQ ID NO: 1128646 - RNA, 19 nt, Artificial Sequence
  Description of Artificial Sequence: Synthetic oligonucleotide
accugggacuugugccaag

SEQ ID NO: 1128647 - RNA, 19 nt, Artificial Sequence
  Description of Artificial Sequence: Synthetic oligonucleotide
gggacuauugggccuucuc

SEQ ID NO: 1128648 - RNA, 19 nt, Artificial Sequence
  Description of Artificial Sequence: Synthetic oligonucleotide
gggaaugaguggugugaac

SEQ ID NO: 1128649 - RNA, 19 nt, Artificial Sequence
  Description of Artificial Sequence: Synthetic oligonucleotide
gagcuacagguuccacaca

SEQ ID NO: 1128650 - RNA, 19 nt, Artificial Sequence
  Description of Artificial Sequence: Synthetic oligonucleotide
ugacuggggucugcacuca

SEQ ID NO: 1128651 - RNA, 19 nt, Artificial Sequence
  Description of Artificial Sequence: Synthetic oligonucleotide
acuggccauacugaaccua

SEQ ID NO: 1128652 - RNA, 19 nt, Artificial Sequence
  Description of Artificial Sequence: Synthetic oligonucleotide
cucaagggaaaagguuaca

SEQ ID NO: 1128653 - RNA, 19 nt, Artificial Sequence
  Description of Artificial Sequence: Synthetic oligonucleotide
aggcggguacaaacaagug

SEQ ID NO: 1128654 - RNA, 19 nt, Artificial Sequence
  Description of Artificial Sequence: Synthetic oligonucleotide
cuaggacgugugaucagcu

SEQ ID NO: 1128655 - RNA, 19 nt, Artificial Sequence
  Description of Artificial Sequence: Synthetic oligonucleotide
ggcauggaaaggagcuugc

SEQ ID NO: 1128656 - RNA, 19 nt, Artificial Sequence
  Description of Artificial Sequence: Synthetic oligonucleotide
gguaaacaucugccagaac

SEQ ID NO: 1128657 - RNA, 19 nt, Artificial Sequence
  Description of Artificial Sequence: Synthetic oligonucleotide
caagcacccauguuugcau

SEQ ID NO: 1128658 - RNA, 19 nt, Artificial Sequence
  Description of Artificial Sequence: Synthetic oligonucleotide
uugguuccccagguaggaa

SEQ ID NO: 1128659 - RNA, 19 nt, Artificial Sequence
  Description of Artificial Sequence: Synthetic oligonucleotide
gcucuaaggggcaagggcu

SEQ ID NO: 1128660 - RNA, 19 nt, Artificial Sequence
  Description of Artificial Sequence: Synthetic oligonucleotide
agaggcaccuuaggacuau

SEQ ID NO: 1128661 - RNA, 19 nt, Artificial Sequence
  Description of Artificial Sequence: Synthetic oligonucleotide
uccacacagaugggacuau

SEQ ID NO: 1128662 - RNA, 19 nt, Artificial Sequence
  Description of Artificial Sequence: Synthetic oligonucleotide
agccuucaguugacagaac

SEQ ID NO: 1128663 - RNA, 19 nt, Artificial Sequence
  Description of Artificial Sequence: Synthetic oligonucleotide
agguuucaaccuugcucuu

SEQ ID NO: 1128664 - RNA, 19 nt, Artificial Sequence
  Description of Artificial Sequence: Synthetic oligonucleotide
ggagggguccugacugggg

SEQ ID NO: 1128665 - RNA, 19 nt, Artificial Sequence
  Description of Artificial Sequence: Synthetic oligonucleotide
cugggacuugugccaagga

SEQ ID NO: 1128666 - RNA, 19 nt, Artificial Sequence
  Description of Artificial Sequence: Synthetic oligonucleotide
guugacagaacaggagguu

SEQ ID NO: 1128667 - RNA, 19 nt, Artificial Sequence
  Description of Artificial Sequence: Synthetic oligonucleotide
ccaauguguaaacaggauu

SEQ ID NO: 1128668 - RNA, 19 nt, Artificial Sequence
  Description of Artificial Sequence: Synthetic oligonucleotide
ccaacccagguccaugaga

SEQ ID NO: 1128669 - RNA, 19 nt, Artificial Sequence
  Description of Artificial Sequence: Synthetic oligonucleotide
ccagguaggaagauuuuau

SEQ ID NO: 1128670 - RNA, 19 nt, Artificial Sequence
  Description of Artificial Sequence: Synthetic oligonucleotide
gcccauucggcagggaaca

SEQ ID NO: 1128671 - RNA, 19 nt, Artificial Sequence
  Description of Artificial Sequence: Synthetic oligonucleotide
gggcaggcauggaaaggag

SEQ ID NO: 1128672 - RNA, 19 nt, Artificial Sequence
  Description of Artificial Sequence: Synthetic oligonucleotide
gcacauaacaggacuugua

SEQ ID NO: 1128673 - RNA, 19 nt, Artificial Sequence
  Description of Artificial Sequence: Synthetic oligonucleotide
gcccaacccagguccauga

SEQ ID NO: 1128674 - RNA, 19 nt, Artificial Sequence
  Description of Artificial Sequence: Synthetic oligonucleotide
gguuucaaccuugcucuua

SEQ ID NO: 1128675 - RNA, 19 nt, Artificial Sequence
  Description of Artificial Sequence: Synthetic oligonucleotide
accccugguuccugcucaa

SEQ ID NO: 1128676 - RNA, 19 nt, Artificial Sequence
  Description of Artificial Sequence: Synthetic oligonucleotide
gcauggaaaggagcuugca

SEQ ID NO: 1128677 - RNA, 19 nt, Artificial Sequence
  Description of Artificial Sequence: Synthetic oligonucleotide
ggaaaagguuacaguucaa

SEQ ID NO: 1128678 - RNA, 19 nt, Artificial Sequence
  Description of Artificial Sequence: Synthetic oligonucleotide
cuaaggggcaagggcuaaa

SEQ ID NO: 1128679 - RNA, 19 nt, Artificial Sequence
  Description of Artificial Sequence: Synthetic oligonucleotide
cacaagaggcggguacaaa

SEQ ID NO: 1128680 - RNA, 19 nt, Artificial Sequence
  Description of Artificial Sequence: Synthetic oligonucleotide
accuuaccaagaggccaaa

SEQ ID NO: 1128681 - RNA, 19 nt, Artificial Sequence
  Description of Artificial Sequence: Synthetic oligonucleotide
ccuagaggacagccccuug

SEQ ID NO: 1128682 - RNA, 19 nt, Artificial Sequence
  Description of Artificial Sequence: Synthetic oligonucleotide
cggguacaaacaaguggug

SEQ ID NO: 1128683 - RNA, 19 nt, Artificial Sequence
  Description of Artificial Sequence: Synthetic oligonucleotide
ggcccaacccagguccaug

SEQ ID NO: 1128684 - RNA, 19 nt, Artificial Sequence
  Description of Artificial Sequence: Synthetic oligonucleotide
gcucaaggcccaaugugua

SEQ ID NO: 1128685 - RNA, 19 nt, Artificial Sequence
  Description of Artificial Sequence: Synthetic oligonucleotide
guuugacuccaaggacucu

SEQ ID NO: 1128686 - RNA, 19 nt, Artificial Sequence
  Description of Artificial Sequence: Synthetic oligonucleotide
cauuggggugcaggcacua

SEQ ID NO: 1128687 - RNA, 19 nt, Artificial Sequence
  Description of Artificial Sequence: Synthetic oligonucleotide
ccauucggcagggaacaca

SEQ ID NO: 1128688 - RNA, 19 nt, Artificial Sequence
  Description of Artificial Sequence: Synthetic oligonucleotide
ccuugcucuuaugaagaaa

SEQ ID NO: 1128689 - RNA, 19 nt, Artificial Sequence
  Description of Artificial Sequence: Synthetic oligonucleotide
caccugggacuugugccaa

SEQ ID NO: 1128690 - RNA, 19 nt, Artificial Sequence
  Description of Artificial Sequence: Synthetic oligonucleotide
gcaugggcccaacccaggu

SEQ ID NO: 1128691 - RNA, 19 nt, Artificial Sequence
  Description of Artificial Sequence: Synthetic oligonucleotide
ggguaguacccacccugcu

SEQ ID NO: 1128692 - RNA, 19 nt, Artificial Sequence
  Description of Artificial Sequence: Synthetic oligonucleotide
gcacucaagguggggugga

SEQ ID NO: 1128693 - RNA, 19 nt, Artificial Sequence
  Description of Artificial Sequence: Synthetic oligonucleotide
ggggagaaguuuagaaguu

SEQ ID NO: 1128694 - RNA, 19 nt, Artificial Sequence
  Description of Artificial Sequence: Synthetic oligonucleotide
caguaccuccaugcucuaa

SEQ ID NO: 1128695 - RNA, 19 nt, Artificial Sequence
  Description of Artificial Sequence: Synthetic oligonucleotide
cccagguaggaagauuuua

SEQ ID NO: 1128696 - RNA, 19 nt, Artificial Sequence
  Description of Artificial Sequence: Synthetic oligonucleotide
gugccaaggaaaggcucuu

SEQ ID NO: 1128697 - RNA, 19 nt, Artificial Sequence
  Description of Artificial Sequence: Synthetic oligonucleotide
gcccaagacaugugucaau

SEQ ID NO: 1128698 - RNA, 19 nt, Artificial Sequence
  Description of Artificial Sequence: Synthetic oligonucleotide
ccacaagaggcggguacaa

SEQ ID NO: 1128699 - RNA, 19 nt, Artificial Sequence
  Description of Artificial Sequence: Synthetic oligonucleotide
ccuuaccaagaggccaaaa

SEQ ID NO: 1128700 - RNA, 19 nt, Artificial Sequence
  Description of Artificial Sequence: Synthetic oligonucleotide
ccaaauccauaggaucuau

SEQ ID NO: 1128701 - RNA, 19 nt, Artificial Sequence
  Description of Artificial Sequence: Synthetic oligonucleotide
cacucaaggugggguggau

SEQ ID NO: 1128702 - RNA, 19 nt, Artificial Sequence
  Description of Artificial Sequence: Synthetic oligonucleotide
cagccccauuggggugcag

SEQ ID NO: 1128703 - RNA, 19 nt, Artificial Sequence
  Description of Artificial Sequence: Synthetic oligonucleotide
ggugggcuauggacagccu

SEQ ID NO: 1128704 - RNA, 19 nt, Artificial Sequence
  Description of Artificial Sequence: Synthetic oligonucleotide
ccccuugcaugggcccaac

SEQ ID NO: 1128705 - RNA, 19 nt, Artificial Sequence
  Description of Artificial Sequence: Synthetic oligonucleotide
gggcccaacccagguccau

SEQ ID NO: 1128706 - RNA, 19 nt, Artificial Sequence
  Description of Artificial Sequence: Synthetic oligonucleotide
aaacaaaucuuccacgcgc

SEQ ID NO: 1128707 - RNA, 19 nt, Artificial Sequence
  Description of Artificial Sequence: Synthetic oligonucleotide
aaugcaguaccccauagac

SEQ ID NO: 1128708 - RNA, 19 nt, Artificial Sequence
  Description of Artificial Sequence: Synthetic oligonucleotide
aauaaacuggaucacuucg

SEQ ID NO: 1128709 - RNA, 19 nt, Artificial Sequence
  Description of Artificial Sequence: Synthetic oligonucleotide
ugaauagcuauuaagaucu

SEQ ID NO: 1128710 - RNA, 19 nt, Artificial Sequence
  Description of Artificial Sequence: Synthetic oligonucleotide
augcaaaagaaucagggcc

SEQ ID NO: 1128711 - RNA, 19 nt, Artificial Sequence
  Description of Artificial Sequence: Synthetic oligonucleotide
uuaguuauaguaaauccag

SEQ ID NO: 1128712 - RNA, 19 nt, Artificial Sequence
  Description of Artificial Sequence: Synthetic oligonucleotide
uucaacauuaacccgaucc

SEQ ID NO: 1128713 - RNA, 19 nt, Artificial Sequence
  Description of Artificial Sequence: Synthetic oligonucleotide
uucguuuuaccaaagauug

SEQ ID NO: 1128714 - RNA, 19 nt, Artificial Sequence
  Description of Artificial Sequence: Synthetic oligonucleotide
uuuaaaaucuccauggcaa

SEQ ID NO: 1128715 - RNA, 19 nt, Artificial Sequence
  Description of Artificial Sequence: Synthetic oligonucleotide
uaacauauguaauaguugc

SEQ ID NO: 1128716 - RNA, 19 nt, Artificial Sequence
  Description of Artificial Sequence: Synthetic oligonucleotide
cuaucugucccaaagacgg

SEQ ID NO: 1128717 - RNA, 19 nt, Artificial Sequence
  Description of Artificial Sequence: Synthetic oligonucleotide
uuuccuacugcccagcugg

SEQ ID NO: 1128718 - RNA, 19 nt, Artificial Sequence
  Description of Artificial Sequence: Synthetic oligonucleotide
uaucaaacggucuugguag

SEQ ID NO: 1128719 - RNA, 19 nt, Artificial Sequence
  Description of Artificial Sequence: Synthetic oligonucleotide
uaucauuauacucaggcac

SEQ ID NO: 1128720 - RNA, 19 nt, Artificial Sequence
  Description of Artificial Sequence: Synthetic oligonucleotide
guuaacuagaagcugagcc

SEQ ID NO: 1128721 - RNA, 19 nt, Artificial Sequence
  Description of Artificial Sequence: Synthetic oligonucleotide
ucuguaguguuaauuaucc

SEQ ID NO: 1128722 - RNA, 19 nt, Artificial Sequence
  Description of Artificial Sequence: Synthetic oligonucleotide
ucuaacauauguaauaguu

SEQ ID NO: 1128723 - RNA, 19 nt, Artificial Sequence
  Description of Artificial Sequence: Synthetic oligonucleotide
ucuuaggacguaaaugccg

SEQ ID NO: 1128724 - RNA, 19 nt, Artificial Sequence
  Description of Artificial Sequence: Synthetic oligonucleotide
aaagauugcucugaggguc

SEQ ID NO: 1128725 - RNA, 19 nt, Artificial Sequence
  Description of Artificial Sequence: Synthetic oligonucleotide
uguguauugguccccauag

SEQ ID NO: 1128726 - RNA, 19 nt, Artificial Sequence
  Description of Artificial Sequence: Synthetic oligonucleotide
aacagaagcucguagcguc

SEQ ID NO: 1128727 - RNA, 19 nt, Artificial Sequence
  Description of Artificial Sequence: Synthetic oligonucleotide
agcuauuaagaucuuuccc

SEQ ID NO: 1128728 - RNA, 19 nt, Artificial Sequence
  Description of Artificial Sequence: Synthetic oligonucleotide
ucagguuaaaacaacggac

SEQ ID NO: 1128729 - RNA, 19 nt, Artificial Sequence
  Description of Artificial Sequence: Synthetic oligonucleotide
aaaagcaaugcaguacccc

SEQ ID NO: 1128730 - RNA, 19 nt, Artificial Sequence
  Description of Artificial Sequence: Synthetic oligonucleotide
agaguaugcaguuaacuag

SEQ ID NO: 1128731 - RNA, 19 nt, Artificial Sequence
  Description of Artificial Sequence: Synthetic oligonucleotide
gacaucuauuaucaaacgg

SEQ ID NO: 1128732 - RNA, 19 nt, Artificial Sequence
  Description of Artificial Sequence: Synthetic oligonucleotide
ugcuaaaacacagagaccu

SEQ ID NO: 1128733 - RNA, 19 nt, Artificial Sequence
  Description of Artificial Sequence: Synthetic oligonucleotide
ugcgggguaaaacagaagc

SEQ ID NO: 1128734 - RNA, 19 nt, Artificial Sequence
  Description of Artificial Sequence: Synthetic oligonucleotide
uguuaaauguugucuacag

SEQ ID NO: 1128735 - RNA, 19 nt, Artificial Sequence
  Description of Artificial Sequence: Synthetic oligonucleotide
aaagugucaucauucggag

SEQ ID NO: 1128736 - RNA, 19 nt, Artificial Sequence
  Description of Artificial Sequence: Synthetic oligonucleotide
ugagauuucaaaacaugca

SEQ ID NO: 1128737 - RNA, 19 nt, Artificial Sequence
  Description of Artificial Sequence: Synthetic oligonucleotide
aguuauaguaaauccagcu

SEQ ID NO: 1128738 - RNA, 19 nt, Artificial Sequence
  Description of Artificial Sequence: Synthetic oligonucleotide
gacuuuguugccuauaaac

SEQ ID NO: 1128739 - RNA, 19 nt, Artificial Sequence
  Description of Artificial Sequence: Synthetic oligonucleotide
aucuguaugagcuagguua

SEQ ID NO: 1128740 - RNA, 19 nt, Artificial Sequence
  Description of Artificial Sequence: Synthetic oligonucleotide
auacuggaccucuaggagc

SEQ ID NO: 1128741 - RNA, 19 nt, Artificial Sequence
  Description of Artificial Sequence: Synthetic oligonucleotide
aaauuuagcaguguuugcu

SEQ ID NO: 1128742 - RNA, 19 nt, Artificial Sequence
  Description of Artificial Sequence: Synthetic oligonucleotide
auaauuccauuucucuggc

SEQ ID NO: 1128743 - RNA, 19 nt, Artificial Sequence
  Description of Artificial Sequence: Synthetic oligonucleotide
acaucaugcauuucaacag

SEQ ID NO: 1128744 - RNA, 19 nt, Artificial Sequence
  Description of Artificial Sequence: Synthetic oligonucleotide
aaaucuuccacgcgcaggu

SEQ ID NO: 1128745 - RNA, 19 nt, Artificial Sequence
  Description of Artificial Sequence: Synthetic oligonucleotide
ugagugguggucuacaaga

SEQ ID NO: 1128746 - RNA, 19 nt, Artificial Sequence
  Description of Artificial Sequence: Synthetic oligonucleotide
ucuauuaucaaacggucuu

SEQ ID NO: 1128747 - RNA, 19 nt, Artificial Sequence
  Description of Artificial Sequence: Synthetic oligonucleotide
ugucagucagguuaaaaca

SEQ ID NO: 1128748 - RNA, 19 nt, Artificial Sequence
  Description of Artificial Sequence: Synthetic oligonucleotide
cuuuuccacucacagaucg

SEQ ID NO: 1128749 - RNA, 19 nt, Artificial Sequence
  Description of Artificial Sequence: Synthetic oligonucleotide
uugaauagcuauuaagauc

SEQ ID NO: 1128750 - RNA, 19 nt, Artificial Sequence
  Description of Artificial Sequence: Synthetic oligonucleotide
cuaacauauguaauaguug

SEQ ID NO: 1128751 - RNA, 19 nt, Artificial Sequence
  Description of Artificial Sequence: Synthetic oligonucleotide
ucaacauuaacccgaucca

SEQ ID NO: 1128752 - RNA, 19 nt, Artificial Sequence
  Description of Artificial Sequence: Synthetic oligonucleotide
cuuaggacguaaaugccgg

SEQ ID NO: 1128753 - RNA, 19 nt, Artificial Sequence
  Description of Artificial Sequence: Synthetic oligonucleotide
auagcuauuaagaucuuuc

SEQ ID NO: 1128754 - RNA, 19 nt, Artificial Sequence
  Description of Artificial Sequence: Synthetic oligonucleotide
aacccgauccauauuaaac

SEQ ID NO: 1128755 - RNA, 19 nt, Artificial Sequence
  Description of Artificial Sequence: Synthetic oligonucleotide
ucuguaugagcuagguuag

SEQ ID NO: 1128756 - RNA, 19 nt, Artificial Sequence
  Description of Artificial Sequence: Synthetic oligonucleotide
agaguuugcggguccaagc

SEQ ID NO: 1128757 - RNA, 19 nt, Artificial Sequence
  Description of Artificial Sequence: Synthetic oligonucleotide
acgacgauucuuuacauca

SEQ ID NO: 1128758 - RNA, 19 nt, Artificial Sequence
  Description of Artificial Sequence: Synthetic oligonucleotide
ggucuuaggacguaaaugc

SEQ ID NO: 1128759 - RNA, 19 nt, Artificial Sequence
  Description of Artificial Sequence: Synthetic oligonucleotide
aguacagugcucuuguuga

SEQ ID NO: 1128760 - RNA, 19 nt, Artificial Sequence
  Description of Artificial Sequence: Synthetic oligonucleotide
gauuccgucaguguugagg

SEQ ID NO: 1128761 - RNA, 19 nt, Artificial Sequence
  Description of Artificial Sequence: Synthetic oligonucleotide
uugucgagaaaagacauug

SEQ ID NO: 1128762 - RNA, 19 nt, Artificial Sequence
  Description of Artificial Sequence: Synthetic oligonucleotide
uguuggaucuccauugcca

SEQ ID NO: 1128763 - RNA, 19 nt, Artificial Sequence
  Description of Artificial Sequence: Synthetic oligonucleotide
gucgguaugaggcugcacg

SEQ ID NO: 1128764 - RNA, 19 nt, Artificial Sequence
  Description of Artificial Sequence: Synthetic oligonucleotide
ucuacagugcaaauccaug

SEQ ID NO: 1128765 - RNA, 19 nt, Artificial Sequence
  Description of Artificial Sequence: Synthetic oligonucleotide
auuuagcaguguuugcugg

SEQ ID NO: 1128766 - RNA, 19 nt, Artificial Sequence
  Description of Artificial Sequence: Synthetic oligonucleotide
uaugagcuagguuagaguu

SEQ ID NO: 1128767 - RNA, 19 nt, Artificial Sequence
  Description of Artificial Sequence: Synthetic oligonucleotide
aagcucguagcgucggagc

SEQ ID NO: 1128768 - RNA, 19 nt, Artificial Sequence
  Description of Artificial Sequence: Synthetic oligonucleotide
uucuuaugcuaucuguccc

SEQ ID NO: 1128769 - RNA, 19 nt, Artificial Sequence
  Description of Artificial Sequence: Synthetic oligonucleotide
auuaacccgauccauauua

SEQ ID NO: 1128770 - RNA, 19 nt, Artificial Sequence
  Description of Artificial Sequence: Synthetic oligonucleotide
uugccuauaaacaaaucuu

SEQ ID NO: 1128771 - RNA, 19 nt, Artificial Sequence
  Description of Artificial Sequence: Synthetic oligonucleotide
ugagccgcguuucuuaugc

SEQ ID NO: 1128772 - RNA, 19 nt, Artificial Sequence
  Description of Artificial Sequence: Synthetic oligonucleotide
aaugcaacagguacaguug

SEQ ID NO: 1128773 - RNA, 19 nt, Artificial Sequence
  Description of Artificial Sequence: Synthetic oligonucleotide
gcuuuaagaagguacgacg

SEQ ID NO: 1128774 - RNA, 19 nt, Artificial Sequence
  Description of Artificial Sequence: Synthetic oligonucleotide
guaguguuaauuauccaag

SEQ ID NO: 1128775 - RNA, 19 nt, Artificial Sequence
  Description of Artificial Sequence: Synthetic oligonucleotide
ugcaagauacagaguagcc

SEQ ID NO: 1128776 - RNA, 19 nt, Artificial Sequence
  Description of Artificial Sequence: Synthetic oligonucleotide
acaucuauuaucaaacggu

SEQ ID NO: 1128777 - RNA, 19 nt, Artificial Sequence
  Description of Artificial Sequence: Synthetic oligonucleotide
aaugccgggcgauuucagg

SEQ ID NO: 1128778 - RNA, 19 nt, Artificial Sequence
  Description of Artificial Sequence: Synthetic oligonucleotide
ccaaagacggcucugaugc

SEQ ID NO: 1128779 - RNA, 19 nt, Artificial Sequence
  Description of Artificial Sequence: Synthetic oligonucleotide
ugcuaucugucccaaagac

SEQ ID NO: 1128780 - RNA, 19 nt, Artificial Sequence
  Description of Artificial Sequence: Synthetic oligonucleotide
acugguguuaaauguuguc

SEQ ID NO: 1128781 - RNA, 19 nt, Artificial Sequence
  Description of Artificial Sequence: Synthetic oligonucleotide
cucugagggucuuaggacg

SEQ ID NO: 1128782 - RNA, 19 nt, Artificial Sequence
  Description of Artificial Sequence: Synthetic oligonucleotide
ucgucuuuauucucuguag

SEQ ID NO: 1128783 - RNA, 19 nt, Artificial Sequence
  Description of Artificial Sequence: Synthetic oligonucleotide
ucugguuugaucagggcua

SEQ ID NO: 1128784 - RNA, 19 nt, Artificial Sequence
  Description of Artificial Sequence: Synthetic oligonucleotide
agacauugacuuuguugcc

SEQ ID NO: 1128785 - RNA, 19 nt, Artificial Sequence
  Description of Artificial Sequence: Synthetic oligonucleotide
ugagcuagguuagaguuug

SEQ ID NO: 1128786 - RNA, 19 nt, Artificial Sequence
  Description of Artificial Sequence: Synthetic oligonucleotide
aucaacagcaguugucgag

SEQ ID NO: 1128787 - RNA, 19 nt, Artificial Sequence
  Description of Artificial Sequence: Synthetic oligonucleotide
ucaccauaucauuauacuc

SEQ ID NO: 1128788 - RNA, 19 nt, Artificial Sequence
  Description of Artificial Sequence: Synthetic oligonucleotide
auagucaaucaacagcagu

SEQ ID NO: 1128789 - RNA, 19 nt, Artificial Sequence
  Description of Artificial Sequence: Synthetic oligonucleotide
ucauucggaguuuaguuau

SEQ ID NO: 1128790 - RNA, 19 nt, Artificial Sequence
  Description of Artificial Sequence: Synthetic oligonucleotide
gaucgcaucaucuuuuaaa

SEQ ID NO: 1128791 - RNA, 19 nt, Artificial Sequence
  Description of Artificial Sequence: Synthetic oligonucleotide
cuugguaggcgaugcaagg

SEQ ID NO: 1128792 - RNA, 19 nt, Artificial Sequence
  Description of Artificial Sequence: Synthetic oligonucleotide
cuuuaagaagguacgacga

SEQ ID NO: 1128793 - RNA, 19 nt, Artificial Sequence
  Description of Artificial Sequence: Synthetic oligonucleotide
cauguucuaacauauguaa

SEQ ID NO: 1128794 - RNA, 19 nt, Artificial Sequence
  Description of Artificial Sequence: Synthetic oligonucleotide
gcuauuaagaucuuuccca

SEQ ID NO: 1128795 - RNA, 19 nt, Artificial Sequence
  Description of Artificial Sequence: Synthetic oligonucleotide
aggcacuacaccuuuauaa

SEQ ID NO: 1128796 - RNA, 19 nt, Artificial Sequence
  Description of Artificial Sequence: Synthetic oligonucleotide
ucuuaugcuaucuguccca

SEQ ID NO: 1128797 - RNA, 19 nt, Artificial Sequence
  Description of Artificial Sequence: Synthetic oligonucleotide
aguguuaauuauccaagau

SEQ ID NO: 1128798 - RNA, 19 nt, Artificial Sequence
  Description of Artificial Sequence: Synthetic oligonucleotide
caccucgucgguaugaggc

SEQ ID NO: 1128799 - RNA, 19 nt, Artificial Sequence
  Description of Artificial Sequence: Synthetic oligonucleotide
uaauaaacuggaucacuuc

SEQ ID NO: 1128800 - RNA, 19 nt, Artificial Sequence
  Description of Artificial Sequence: Synthetic oligonucleotide
gucgagaaaagacauugac

SEQ ID NO: 1128801 - RNA, 19 nt, Artificial Sequence
  Description of Artificial Sequence: Synthetic oligonucleotide
aacggacaauaaaagaaug

SEQ ID NO: 1128802 - RNA, 19 nt, Artificial Sequence
  Description of Artificial Sequence: Synthetic oligonucleotide
ucgcugagauuucaaaaca

SEQ ID NO: 1128803 - RNA, 19 nt, Artificial Sequence
  Description of Artificial Sequence: Synthetic oligonucleotide
guugccuauaaacaaaucu

SEQ ID NO: 1128804 - RNA, 19 nt, Artificial Sequence
  Description of Artificial Sequence: Synthetic oligonucleotide
uauugguccccauagucaa

SEQ ID NO: 1128805 - RNA, 19 nt, Artificial Sequence
  Description of Artificial Sequence: Synthetic oligonucleotide
uuccucacguguaugacuc

SEQ ID NO: 1128806 - RNA, 19 nt, Artificial Sequence
  Description of Artificial Sequence: Synthetic oligonucleotide
uugagugguggucuacaag

SEQ ID NO: 1128807 - RNA, 19 nt, Artificial Sequence
  Description of Artificial Sequence: Synthetic oligonucleotide
uagaauuguuguucuguug

SEQ ID NO: 1128808 - RNA, 19 nt, Artificial Sequence
  Description of Artificial Sequence: Synthetic oligonucleotide
gacgauucuuuacaucaug

SEQ ID NO: 1128809 - RNA, 19 nt, Artificial Sequence
  Description of Artificial Sequence: Synthetic oligonucleotide
aucuuccacgcgcaggucg

SEQ ID NO: 1128810 - RNA, 19 nt, Artificial Sequence
  Description of Artificial Sequence: Synthetic oligonucleotide
agucagguuaaaacaacgg

SEQ ID NO: 1128811 - RNA, 19 nt, Artificial Sequence
  Description of Artificial Sequence: Synthetic oligonucleotide
agguacgacgauucuuuac

SEQ ID NO: 1128812 - RNA, 19 nt, Artificial Sequence
  Description of Artificial Sequence: Synthetic oligonucleotide
cagguuaaaacaacggaca

SEQ ID NO: 1128813 - RNA, 19 nt, Artificial Sequence
  Description of Artificial Sequence: Synthetic oligonucleotide
gagaguaugcaguuaacua

SEQ ID NO: 1128814 - RNA, 19 nt, Artificial Sequence
  Description of Artificial Sequence: Synthetic oligonucleotide
acauuaacccgauccauau

SEQ ID NO: 1128815 - RNA, 19 nt, Artificial Sequence
  Description of Artificial Sequence: Synthetic oligonucleotide
gucagguuaaaacaacgga

SEQ ID NO: 1128816 - RNA, 19 nt, Artificial Sequence
  Description of Artificial Sequence: Synthetic oligonucleotide
acuuuguugccuauaaaca

SEQ ID NO: 1128817 - RNA, 19 nt, Artificial Sequence
  Description of Artificial Sequence: Synthetic oligonucleotide
ucugcgggguaaaacagaa

SEQ ID NO: 1128818 - RNA, 19 nt, Artificial Sequence
  Description of Artificial Sequence: Synthetic oligonucleotide
uuaaaaucuccauggcaau

SEQ ID NO: 1128819 - RNA, 19 nt, Artificial Sequence
  Description of Artificial Sequence: Synthetic oligonucleotide
agcgucggagcagugaggc

SEQ ID NO: 1128820 - RNA, 19 nt, Artificial Sequence
  Description of Artificial Sequence: Synthetic oligonucleotide
aguguugaggcaccaccuc

SEQ ID NO: 1128821 - RNA, 19 nt, Artificial Sequence
  Description of Artificial Sequence: Synthetic oligonucleotide
ucggauuccgucaguguug

SEQ ID NO: 1128822 - RNA, 19 nt, Artificial Sequence
  Description of Artificial Sequence: Synthetic oligonucleotide
uuguugccuauaaacaaau

SEQ ID NO: 1128823 - RNA, 19 nt, Artificial Sequence
  Description of Artificial Sequence: Synthetic oligonucleotide
ugguaggcgaugcaaggca

SEQ ID NO: 1128824 - RNA, 19 nt, Artificial Sequence
  Description of Artificial Sequence: Synthetic oligonucleotide
ugguaaauuuagcaguguu

SEQ ID NO: 1128825 - RNA, 19 nt, Artificial Sequence
  Description of Artificial Sequence: Synthetic oligonucleotide
ugguguuaaauguugucua

SEQ ID NO: 1128826 - RNA, 19 nt, Artificial Sequence
  Description of Artificial Sequence: Synthetic oligonucleotide
cuugguccgcuuuaagaag

SEQ ID NO: 1128827 - RNA, 19 nt, Artificial Sequence
  Description of Artificial Sequence: Synthetic oligonucleotide
aaacggucuugguaggcga

SEQ ID NO: 1128828 - RNA, 19 nt, Artificial Sequence
  Description of Artificial Sequence: Synthetic oligonucleotide
guagcgucggagcagugag

SEQ ID NO: 1128829 - RNA, 19 nt, Artificial Sequence
  Description of Artificial Sequence: Synthetic oligonucleotide
uugggaucguaccacucug

SEQ ID NO: 1128830 - RNA, 19 nt, Artificial Sequence
  Description of Artificial Sequence: Synthetic oligonucleotide
gcuagguuagaguuugcgg

SEQ ID NO: 1128831 - RNA, 19 nt, Artificial Sequence
  Description of Artificial Sequence: Synthetic oligonucleotide
uuuccacucacagaucgca

SEQ ID NO: 1128832 - RNA, 19 nt, Artificial Sequence
  Description of Artificial Sequence: Synthetic oligonucleotide
uuucauacugccagaugau

SEQ ID NO: 1128833 - RNA, 19 nt, Artificial Sequence
  Description of Artificial Sequence: Synthetic oligonucleotide
ugaccagcuuucauacugc

SEQ ID NO: 1128834 - RNA, 19 nt, Artificial Sequence
  Description of Artificial Sequence: Synthetic oligonucleotide
uggaacuucuucccugcug

SEQ ID NO: 1128835 - RNA, 19 nt, Artificial Sequence
  Description of Artificial Sequence: Synthetic oligonucleotide
uuuagcaguguuugcuggu

SEQ ID NO: 1128836 - RNA, 19 nt, Artificial Sequence
  Description of Artificial Sequence: Synthetic oligonucleotide
auaacaggcccacuuguaa

SEQ ID NO: 1128837 - RNA, 19 nt, Artificial Sequence
  Description of Artificial Sequence: Synthetic oligonucleotide
auugccacgcaagagccag

SEQ ID NO: 1128838 - RNA, 19 nt, Artificial Sequence
  Description of Artificial Sequence: Synthetic oligonucleotide
ucguuuuaccaaagauugc

SEQ ID NO: 1128839 - RNA, 19 nt, Artificial Sequence
  Description of Artificial Sequence: Synthetic oligonucleotide
ugcacgcauaguuugugga

SEQ ID NO: 1128840 - RNA, 19 nt, Artificial Sequence
  Description of Artificial Sequence: Synthetic oligonucleotide
uaaacuggaucacuucguu

SEQ ID NO: 1128841 - RNA, 19 nt, Artificial Sequence
  Description of Artificial Sequence: Synthetic oligonucleotide
ugucgagaaaagacauuga

SEQ ID NO: 1128842 - RNA, 19 nt, Artificial Sequence
  Description of Artificial Sequence: Synthetic oligonucleotide
ccagcuuucauacugccag

SEQ ID NO: 1128843 - RNA, 19 nt, Artificial Sequence
  Description of Artificial Sequence: Synthetic oligonucleotide
aagaagguacgacgauucu

SEQ ID NO: 1128844 - RNA, 19 nt, Artificial Sequence
  Description of Artificial Sequence: Synthetic oligonucleotide
guaugcaguuaacuagaag

SEQ ID NO: 1128845 - RNA, 19 nt, Artificial Sequence
  Description of Artificial Sequence: Synthetic oligonucleotide
gguacgacgauucuuuaca

SEQ ID NO: 1128846 - RNA, 19 nt, Artificial Sequence
  Description of Artificial Sequence: Synthetic oligonucleotide
auaguugccaggaguacag

SEQ ID NO: 1128847 - RNA, 19 nt, Artificial Sequence
  Description of Artificial Sequence: Synthetic oligonucleotide
uagccaaacuggaacuucu

SEQ ID NO: 1128848 - RNA, 19 nt, Artificial Sequence
  Description of Artificial Sequence: Synthetic oligonucleotide
auuaucaaacggucuuggu

SEQ ID NO: 1128849 - RNA, 19 nt, Artificial Sequence
  Description of Artificial Sequence: Synthetic oligonucleotide
uuaggacguaaaugccggg

SEQ ID NO: 1128850 - RNA, 19 nt, Artificial Sequence
  Description of Artificial Sequence: Synthetic oligonucleotide
gaggcguugggaucguacc

SEQ ID NO: 1128851 - RNA, 19 nt, Artificial Sequence
  Description of Artificial Sequence: Synthetic oligonucleotide
aacaaaucuuccacgcgca

SEQ ID NO: 1128852 - RNA, 19 nt, Artificial Sequence
  Description of Artificial Sequence: Synthetic oligonucleotide
agcuagguuagaguuugcg

SEQ ID NO: 1128853 - RNA, 19 nt, Artificial Sequence
  Description of Artificial Sequence: Synthetic oligonucleotide
aaacagaagcucguagcgu

SEQ ID NO: 1128854 - RNA, 19 nt, Artificial Sequence
  Description of Artificial Sequence: Synthetic oligonucleotide
aauagcuauuaagaucuuu

SEQ ID NO: 1128855 - RNA, 19 nt, Artificial Sequence
  Description of Artificial Sequence: Synthetic oligonucleotide
aucauucggaguuuaguua

SEQ ID NO: 1128856 - RNA, 19 nt, Artificial Sequence
  Description of Artificial Sequence: Synthetic oligonucleotide
auuaaacaucugcaucgcu

SEQ ID NO: 1128857 - RNA, 19 nt, Artificial Sequence
  Description of Artificial Sequence: Synthetic oligonucleotide
aacaggcccacuuguaaua

SEQ ID NO: 1128858 - RNA, 19 nt, Artificial Sequence
  Description of Artificial Sequence: Synthetic oligonucleotide
acuacaccuuuauaaacuu

SEQ ID NO: 1128859 - RNA, 19 nt, Artificial Sequence
  Description of Artificial Sequence: Synthetic oligonucleotide
auucggaguuuaguuauag

SEQ ID NO: 1128860 - RNA, 19 nt, Artificial Sequence
  Description of Artificial Sequence: Synthetic oligonucleotide
aucguaccacucuguaagg

SEQ ID NO: 1128861 - RNA, 19 nt, Artificial Sequence
  Description of Artificial Sequence: Synthetic oligonucleotide
gacucuucguuuuaccaaa

SEQ ID NO: 1128862 - RNA, 19 nt, Artificial Sequence
  Description of Artificial Sequence: Synthetic oligonucleotide
ucaggcacuacaccuuuau

SEQ ID NO: 1128863 - RNA, 19 nt, Artificial Sequence
  Description of Artificial Sequence: Synthetic oligonucleotide
uucauacugccagaugaug

SEQ ID NO: 1128864 - RNA, 19 nt, Artificial Sequence
  Description of Artificial Sequence: Synthetic oligonucleotide
gauggcauggggcuucaca

SEQ ID NO: 1128865 - RNA, 19 nt, Artificial Sequence
  Description of Artificial Sequence: Synthetic oligonucleotide
acucgcuugucugaguguc

SEQ ID NO: 1128866 - RNA, 19 nt, Artificial Sequence
  Description of Artificial Sequence: Synthetic oligonucleotide
ucgguaugaggcugcacgc

SEQ ID NO: 1128867 - RNA, 19 nt, Artificial Sequence
  Description of Artificial Sequence: Synthetic oligonucleotide
uuaacccgauccauauuaa

SEQ ID NO: 1128868 - RNA, 19 nt, Artificial Sequence
  Description of Artificial Sequence: Synthetic oligonucleotide
caucugcgggguaaaacag

SEQ ID NO: 1128869 - RNA, 19 nt, Artificial Sequence
  Description of Artificial Sequence: Synthetic oligonucleotide
aucauuauacucaggcacu

SEQ ID NO: 1128870 - RNA, 19 nt, Artificial Sequence
  Description of Artificial Sequence: Synthetic oligonucleotide
ugaggcguugggaucguac

SEQ ID NO: 1128871 - RNA, 19 nt, Artificial Sequence
  Description of Artificial Sequence: Synthetic oligonucleotide
cauacugccagaugaugca

SEQ ID NO: 1128872 - RNA, 19 nt, Artificial Sequence
  Description of Artificial Sequence: Synthetic oligonucleotide
gaguuugcggguccaagca

SEQ ID NO: 1128873 - RNA, 19 nt, Artificial Sequence
  Description of Artificial Sequence: Synthetic oligonucleotide
caguugucgagaaaagaca

SEQ ID NO: 1128874 - RNA, 19 nt, Artificial Sequence
  Description of Artificial Sequence: Synthetic oligonucleotide
ucccaacaguccuucacug

SEQ ID NO: 1128875 - RNA, 19 nt, Artificial Sequence
  Description of Artificial Sequence: Synthetic oligonucleotide
aagugucaucauucggagu

SEQ ID NO: 1128876 - RNA, 19 nt, Artificial Sequence
  Description of Artificial Sequence: Synthetic oligonucleotide
uacugcaucugguuugauc

SEQ ID NO: 1128877 - RNA, 19 nt, Artificial Sequence
  Description of Artificial Sequence: Synthetic oligonucleotide
aguguucagggagacucgg

SEQ ID NO: 1128878 - RNA, 19 nt, Artificial Sequence
  Description of Artificial Sequence: Synthetic oligonucleotide
aacauuaacccgauccaua

SEQ ID NO: 1128879 - RNA, 19 nt, Artificial Sequence
  Description of Artificial Sequence: Synthetic oligonucleotide
augcaguuaacuagaagcu

SEQ ID NO: 1128880 - RNA, 19 nt, Artificial Sequence
  Description of Artificial Sequence: Synthetic oligonucleotide
uaaaugccgggcgauuuca

SEQ ID NO: 1128881 - RNA, 19 nt, Artificial Sequence
  Description of Artificial Sequence: Synthetic oligonucleotide
uguugccuauaaacaaauc

SEQ ID NO: 1128882 - RNA, 19 nt, Artificial Sequence
  Description of Artificial Sequence: Synthetic oligonucleotide
cugcuaaaacacagagacc

SEQ ID NO: 1128883 - RNA, 19 nt, Artificial Sequence
  Description of Artificial Sequence: Synthetic oligonucleotide
auaaacuggaucacuucgu

SEQ ID NO: 1128884 - RNA, 19 nt, Artificial Sequence
  Description of Artificial Sequence: Synthetic oligonucleotide
agggcuaauguuuucucuu

SEQ ID NO: 1128885 - RNA, 19 nt, Artificial Sequence
  Description of Artificial Sequence: Synthetic oligonucleotide
aguugucgagaaaagacau

SEQ ID NO: 1128886 - RNA, 19 nt, Artificial Sequence
  Description of Artificial Sequence: Synthetic oligonucleotide
uugguaggcgaugcaaggc

SEQ ID NO: 1128887 - RNA, 19 nt, Artificial Sequence
  Description of Artificial Sequence: Synthetic oligonucleotide
cugcacgcauaguuugugg

SEQ ID NO: 1128888 - RNA, 19 nt, Artificial Sequence
  Description of Artificial Sequence: Synthetic oligonucleotide
gaagcucguagcgucggag

SEQ ID NO: 1128889 - RNA, 19 nt, Artificial Sequence
  Description of Artificial Sequence: Synthetic oligonucleotide
ucuuccacgcgcaggucgu

SEQ ID NO: 1128890 - RNA, 19 nt, Artificial Sequence
  Description of Artificial Sequence: Synthetic oligonucleotide
agacugguguuaaauguug

SEQ ID NO: 1128891 - RNA, 19 nt, Artificial Sequence
  Description of Artificial Sequence: Synthetic oligonucleotide
uacgacgauucuuuacauc

SEQ ID NO: 1128892 - RNA, 19 nt, Artificial Sequence
  Description of Artificial Sequence: Synthetic oligonucleotide
aaccucucacucugauucu

SEQ ID NO: 1128893 - RNA, 19 nt, Artificial Sequence
  Description of Artificial Sequence: Synthetic oligonucleotide
augccgggcgauuucagga

SEQ ID NO: 1128894 - RNA, 19 nt, Artificial Sequence
  Description of Artificial Sequence: Synthetic oligonucleotide
cuacaccuuuauaaacuuc

SEQ ID NO: 1128895 - RNA, 19 nt, Artificial Sequence
  Description of Artificial Sequence: Synthetic oligonucleotide
uaacccgauccauauuaaa

SEQ ID NO: 1128896 - RNA, 19 nt, Artificial Sequence
  Description of Artificial Sequence: Synthetic oligonucleotide
aucuauuaucaaacggucu

SEQ ID NO: 1128897 - RNA, 19 nt, Artificial Sequence
  Description of Artificial Sequence: Synthetic oligonucleotide
gucaccauaucauuauacu

SEQ ID NO: 1128898 - RNA, 19 nt, Artificial Sequence
  Description of Artificial Sequence: Synthetic oligonucleotide
ggcgauuucaggaucagca

SEQ ID NO: 1128899 - RNA, 19 nt, Artificial Sequence
  Description of Artificial Sequence: Synthetic oligonucleotide
cacguguaugacucgcuug

SEQ ID NO: 1128900 - RNA, 19 nt, Artificial Sequence
  Description of Artificial Sequence: Synthetic oligonucleotide
uggagaguaugcaguuaac

SEQ ID NO: 1128901 - RNA, 19 nt, Artificial Sequence
  Description of Artificial Sequence: Synthetic oligonucleotide
guuauaguaaauccagcuu

SEQ ID NO: 1128902 - RNA, 19 nt, Artificial Sequence
  Description of Artificial Sequence: Synthetic oligonucleotide
gcuaucugucccaaagacg

SEQ ID NO: 1128903 - RNA, 19 nt, Artificial Sequence
  Description of Artificial Sequence: Synthetic oligonucleotide
uaauuccauuucucuggca

SEQ ID NO: 1128904 - RNA, 19 nt, Artificial Sequence
  Description of Artificial Sequence: Synthetic oligonucleotide
agugguggucuacaagaaa

SEQ ID NO: 1128905 - RNA, 19 nt, Artificial Sequence
  Description of Artificial Sequence: Synthetic oligonucleotide
agcaguguuugcuggucca

SEQ ID NO: 1128906 - RNA, 19 nt, Artificial Sequence
  Description of Artificial Sequence: Synthetic oligonucleotide
acagguacaguugguaaau

SEQ ID NO: 1128907 - RNA, 19 nt, Artificial Sequence
  Description of Artificial Sequence: Synthetic oligonucleotide
caucgcugagauuucaaaa

SEQ ID NO: 1128908 - RNA, 19 nt, Artificial Sequence
  Description of Artificial Sequence: Synthetic oligonucleotide
guccccauagucaaucaac

SEQ ID NO: 1128909 - RNA, 19 nt, Artificial Sequence
  Description of Artificial Sequence: Synthetic oligonucleotide
ucacguguaugacucgcuu

SEQ ID NO: 1128910 - RNA, 19 nt, Artificial Sequence
  Description of Artificial Sequence: Synthetic oligonucleotide
gucuuaggacguaaaugcc

SEQ ID NO: 1128911 - RNA, 19 nt, Artificial Sequence
  Description of Artificial Sequence: Synthetic oligonucleotide
ggucgucauacuugguccg

SEQ ID NO: 1128912 - RNA, 19 nt, Artificial Sequence
  Description of Artificial Sequence: Synthetic oligonucleotide
uuugcggguccaagcaauc

SEQ ID NO: 1128913 - RNA, 19 nt, Artificial Sequence
  Description of Artificial Sequence: Synthetic oligonucleotide
agacggcucugaugcuucc

SEQ ID NO: 1128914 - RNA, 19 nt, Artificial Sequence
  Description of Artificial Sequence: Synthetic oligonucleotide
uuagcaguguuugcugguc

SEQ ID NO: 1128915 - RNA, 19 nt, Artificial Sequence
  Description of Artificial Sequence: Synthetic oligonucleotide
cacgcaagagccagagcac

SEQ ID NO: 1128916 - RNA, 19 nt, Artificial Sequence
  Description of Artificial Sequence: Synthetic oligonucleotide
ugcaucgcugagauuucaa

SEQ ID NO: 1128917 - RNA, 19 nt, Artificial Sequence
  Description of Artificial Sequence: Synthetic oligonucleotide
uagcgucggagcagugagg

SEQ ID NO: 1128918 - RNA, 19 nt, Artificial Sequence
  Description of Artificial Sequence: Synthetic oligonucleotide
ucgcaucaucuuuuaaaau

SEQ ID NO: 1128919 - RNA, 19 nt, Artificial Sequence
  Description of Artificial Sequence: Synthetic oligonucleotide
ugggaucguaccacucugu

SEQ ID NO: 1128920 - RNA, 19 nt, Artificial Sequence
  Description of Artificial Sequence: Synthetic oligonucleotide
ugccacgcaagagccagag

SEQ ID NO: 1128921 - RNA, 19 nt, Artificial Sequence
  Description of Artificial Sequence: Synthetic oligonucleotide
uccucacguguaugacucg

SEQ ID NO: 1128922 - RNA, 19 nt, Artificial Sequence
  Description of Artificial Sequence: Synthetic oligonucleotide
agguuagaguuugcggguc

SEQ ID NO: 1128923 - RNA, 19 nt, Artificial Sequence
  Description of Artificial Sequence: Synthetic oligonucleotide
agagcucggccacuuguga

SEQ ID NO: 1128924 - RNA, 19 nt, Artificial Sequence
  Description of Artificial Sequence: Synthetic oligonucleotide
caugcauuuugaauagcua

SEQ ID NO: 1128925 - RNA, 19 nt, Artificial Sequence
  Description of Artificial Sequence: Synthetic oligonucleotide
ugcggguccaagcaaucuu

SEQ ID NO: 1128926 - RNA, 19 nt, Artificial Sequence
  Description of Artificial Sequence: Synthetic oligonucleotide
gugucgucuuuauucucug

SEQ ID NO: 1128927 - RNA, 19 nt, Artificial Sequence
  Description of Artificial Sequence: Synthetic oligonucleotide
cuuugauuaucauuucaau

SEQ ID NO: 1128928 - RNA, 19 nt, Artificial Sequence
  Description of Artificial Sequence: Synthetic oligonucleotide
ugucgucuuuauucucugu

SEQ ID NO: 1128929 - RNA, 19 nt, Artificial Sequence
  Description of Artificial Sequence: Synthetic oligonucleotide
cuggcgagcuguguauugg

SEQ ID NO: 1128930 - RNA, 19 nt, Artificial Sequence
  Description of Artificial Sequence: Synthetic oligonucleotide
gcgauuucaggaucagcag

SEQ ID NO: 1128931 - RNA, 19 nt, Artificial Sequence
  Description of Artificial Sequence: Synthetic oligonucleotide
cucgucgguaugaggcugc

SEQ ID NO: 1128932 - RNA, 19 nt, Artificial Sequence
  Description of Artificial Sequence: Synthetic oligonucleotide
aaaugccgggcgauuucag

SEQ ID NO: 1128933 - RNA, 19 nt, Artificial Sequence
  Description of Artificial Sequence: Synthetic oligonucleotide
aagguacgacgauucuuua

SEQ ID NO: 1128934 - RNA, 19 nt, Artificial Sequence
  Description of Artificial Sequence: Synthetic oligonucleotide
gcacuacaccuuuauaaac

SEQ ID NO: 1128935 - RNA, 19 nt, Artificial Sequence
  Description of Artificial Sequence: Synthetic oligonucleotide
ggcgaugcaaggcagagcu

SEQ ID NO: 1128936 - RNA, 19 nt, Artificial Sequence
  Description of Artificial Sequence: Synthetic oligonucleotide
ccacgcaagagccagagca

SEQ ID NO: 1128937 - RNA, 19 nt, Artificial Sequence
  Description of Artificial Sequence: Synthetic oligonucleotide
auguucuaacauauguaau

SEQ ID NO: 1128938 - RNA, 19 nt, Artificial Sequence
  Description of Artificial Sequence: Synthetic oligonucleotide
ugguccgcuuuaagaaggu

SEQ ID NO: 1128939 - RNA, 19 nt, Artificial Sequence
  Description of Artificial Sequence: Synthetic oligonucleotide
guaugagcuagguuagagu

SEQ ID NO: 1128940 - RNA, 19 nt, Artificial Sequence
  Description of Artificial Sequence: Synthetic oligonucleotide
ggugcaagauacagaguag

SEQ ID NO: 1128941 - RNA, 19 nt, Artificial Sequence
  Description of Artificial Sequence: Synthetic oligonucleotide
uccuacugcccagcuggcg

SEQ ID NO: 1128942 - RNA, 19 nt, Artificial Sequence
  Description of Artificial Sequence: Synthetic oligonucleotide
aggcguugggaucguacca

SEQ ID NO: 1128943 - RNA, 19 nt, Artificial Sequence
  Description of Artificial Sequence: Synthetic oligonucleotide
uuccacucacagaucgcau

SEQ ID NO: 1128944 - RNA, 19 nt, Artificial Sequence
  Description of Artificial Sequence: Synthetic oligonucleotide
gaucagggcuaauguuuuc

SEQ ID NO: 1128945 - RNA, 19 nt, Artificial Sequence
  Description of Artificial Sequence: Synthetic oligonucleotide
agcaaugcaguaccccaua

SEQ ID NO: 1128946 - RNA, 19 nt, Artificial Sequence
  Description of Artificial Sequence: Synthetic oligonucleotide
gguuagaguuugcgggucc

SEQ ID NO: 1128947 - RNA, 19 nt, Artificial Sequence
  Description of Artificial Sequence: Synthetic oligonucleotide
gcaaauccauguucuaaca

SEQ ID NO: 1128948 - RNA, 19 nt, Artificial Sequence
  Description of Artificial Sequence: Synthetic oligonucleotide
cagcagguccacagaauuc

SEQ ID NO: 1128949 - RNA, 19 nt, Artificial Sequence
  Description of Artificial Sequence: Synthetic oligonucleotide
cacagaauucucgaaaagu

SEQ ID NO: 1128950 - RNA, 19 nt, Artificial Sequence
  Description of Artificial Sequence: Synthetic oligonucleotide
guugggaucguaccacucu

SEQ ID NO: 1128951 - RNA, 19 nt, Artificial Sequence
  Description of Artificial Sequence: Synthetic oligonucleotide
aggcgaugcaaggcagagc

SEQ ID NO: 1128952 - RNA, 19 nt, Artificial Sequence
  Description of Artificial Sequence: Synthetic oligonucleotide
caucauucggaguuuaguu

SEQ ID NO: 1128953 - RNA, 19 nt, Artificial Sequence
  Description of Artificial Sequence: Synthetic oligonucleotide
accucgucgguaugaggcu

SEQ ID NO: 1128954 - RNA, 19 nt, Artificial Sequence
  Description of Artificial Sequence: Synthetic oligonucleotide
uggcgagcuguguauuggu

SEQ ID NO: 1128955 - RNA, 19 nt, Artificial Sequence
  Description of Artificial Sequence: Synthetic oligonucleotide
acucaggcacuacaccuuu

SEQ ID NO: 1128956 - RNA, 19 nt, Artificial Sequence
  Description of Artificial Sequence: Synthetic oligonucleotide
cagaagcucguagcgucgg

SEQ ID NO: 1128957 - RNA, 19 nt, Artificial Sequence
  Description of Artificial Sequence: Synthetic oligonucleotide
uuccuacugcccagcuggc

SEQ ID NO: 1128958 - RNA, 19 nt, Artificial Sequence
  Description of Artificial Sequence: Synthetic oligonucleotide
agaucgcaucaucuuuuaa

SEQ ID NO: 1128959 - RNA, 19 nt, Artificial Sequence
  Description of Artificial Sequence: Synthetic oligonucleotide
ccaucugcgggguaaaaca

SEQ ID NO: 1128960 - RNA, 19 nt, Artificial Sequence
  Description of Artificial Sequence: Synthetic oligonucleotide
augagccgcguuucuuaug

SEQ ID NO: 1128961 - RNA, 19 nt, Artificial Sequence
  Description of Artificial Sequence: Synthetic oligonucleotide
cucuucguuuuaccaaaga

SEQ ID NO: 1128962 - RNA, 19 nt, Artificial Sequence
  Description of Artificial Sequence: Synthetic oligonucleotide
aguagccaaacuggaacuu

SEQ ID NO: 1128963 - RNA, 19 nt, Artificial Sequence
  Description of Artificial Sequence: Synthetic oligonucleotide
ucgcuugucugagugucuc

SEQ ID NO: 1128964 - RNA, 19 nt, Artificial Sequence
  Description of Artificial Sequence: Synthetic oligonucleotide
guguaugacucgcuugucu

SEQ ID NO: 1128965 - RNA, 19 nt, Artificial Sequence
  Description of Artificial Sequence: Synthetic oligonucleotide
ucgucauacuugguccgcu

SEQ ID NO: 1128966 - RNA, 19 nt, Artificial Sequence
  Description of Artificial Sequence: Synthetic oligonucleotide
cugcgggguaaaacagaag

SEQ ID NO: 1128967 - RNA, 19 nt, Artificial Sequence
  Description of Artificial Sequence: Synthetic oligonucleotide
ucucagucugugucgucuu

SEQ ID NO: 1128968 - RNA, 19 nt, Artificial Sequence
  Description of Artificial Sequence: Synthetic oligonucleotide
caucaugcauuucaacagu

SEQ ID NO: 1128969 - RNA, 19 nt, Artificial Sequence
  Description of Artificial Sequence: Synthetic oligonucleotide
agaagcucguagcgucgga

SEQ ID NO: 1128970 - RNA, 19 nt, Artificial Sequence
  Description of Artificial Sequence: Synthetic oligonucleotide
accaccucgucgguaugag

SEQ ID NO: 1128971 - RNA, 19 nt, Artificial Sequence
  Description of Artificial Sequence: Synthetic oligonucleotide
agccgcguuucuuaugcua

SEQ ID NO: 1128972 - RNA, 19 nt, Artificial Sequence
  Description of Artificial Sequence: Synthetic oligonucleotide
cgcaggucgucauacuugg

SEQ ID NO: 1128973 - RNA, 19 nt, Artificial Sequence
  Description of Artificial Sequence: Synthetic oligonucleotide
gguaggcgaugcaaggcag

SEQ ID NO: 1128974 - RNA, 19 nt, Artificial Sequence
  Description of Artificial Sequence: Synthetic oligonucleotide
ugccgggcgauuucaggau

SEQ ID NO: 1128975 - RNA, 19 nt, Artificial Sequence
  Description of Artificial Sequence: Synthetic oligonucleotide
acgcaagagccagagcaca

SEQ ID NO: 1128976 - RNA, 19 nt, Artificial Sequence
  Description of Artificial Sequence: Synthetic oligonucleotide
guuagaguuugcgggucca

SEQ ID NO: 1128977 - RNA, 19 nt, Artificial Sequence
  Description of Artificial Sequence: Synthetic oligonucleotide
uggaccucuaggagcccau

SEQ ID NO: 1128978 - RNA, 19 nt, Artificial Sequence
  Description of Artificial Sequence: Synthetic oligonucleotide
aucugcgggguaaaacaga

SEQ ID NO: 1128979 - RNA, 19 nt, Artificial Sequence
  Description of Artificial Sequence: Synthetic oligonucleotide
ggggcuucacaaugcaaca

SEQ ID NO: 1128980 - RNA, 19 nt, Artificial Sequence
  Description of Artificial Sequence: Synthetic oligonucleotide
aacggucuugguaggcgau

SEQ ID NO: 1128981 - RNA, 19 nt, Artificial Sequence
  Description of Artificial Sequence: Synthetic oligonucleotide
guaccccauagacuggugu

SEQ ID NO: 1128982 - RNA, 19 nt, Artificial Sequence
  Description of Artificial Sequence: Synthetic oligonucleotide
acaggcccacuuguaauaa

SEQ ID NO: 1128983 - RNA, 19 nt, Artificial Sequence
  Description of Artificial Sequence: Synthetic oligonucleotide
ccgauccauauuaaacauc

SEQ ID NO: 1128984 - RNA, 19 nt, Artificial Sequence
  Description of Artificial Sequence: Synthetic oligonucleotide
ggagaguaugcaguuaacu

SEQ ID NO: 1128985 - RNA, 19 nt, Artificial Sequence
  Description of Artificial Sequence: Synthetic oligonucleotide
augagcuagguuagaguuu

SEQ ID NO: 1128986 - RNA, 19 nt, Artificial Sequence
  Description of Artificial Sequence: Synthetic oligonucleotide
cuuaugcuaucugucccaa

SEQ ID NO: 1128987 - RNA, 19 nt, Artificial Sequence
  Description of Artificial Sequence: Synthetic oligonucleotide
gguaaaacagaagcucgua

SEQ ID NO: 1128988 - RNA, 19 nt, Artificial Sequence
  Description of Artificial Sequence: Synthetic oligonucleotide
ggacguaaaugccgggcga

SEQ ID NO: 1128989 - RNA, 19 nt, Artificial Sequence
  Description of Artificial Sequence: Synthetic oligonucleotide
gacugguguuaaauguugu

SEQ ID NO: 1128990 - RNA, 19 nt, Artificial Sequence
  Description of Artificial Sequence: Synthetic oligonucleotide
gcuggcgagcuguguauug

SEQ ID NO: 1128991 - RNA, 19 nt, Artificial Sequence
  Description of Artificial Sequence: Synthetic oligonucleotide
cauugccacgcaagagcca

SEQ ID NO: 1128992 - RNA, 19 nt, Artificial Sequence
  Description of Artificial Sequence: Synthetic oligonucleotide
acaaugcaacagguacagu

SEQ ID NO: 1128993 - RNA, 19 nt, Artificial Sequence
  Description of Artificial Sequence: Synthetic oligonucleotide
gucuacaagaaagucuguu

SEQ ID NO: 1128994 - RNA, 19 nt, Artificial Sequence
  Description of Artificial Sequence: Synthetic oligonucleotide
ggguccaagcaaucuuuuc

SEQ ID NO: 1128995 - RNA, 19 nt, Artificial Sequence
  Description of Artificial Sequence: Synthetic oligonucleotide
cagggcuaauguuuucucu

SEQ ID NO: 1128996 - RNA, 19 nt, Artificial Sequence
  Description of Artificial Sequence: Synthetic oligonucleotide
ggcguugggaucguaccac

SEQ ID NO: 1128997 - RNA, 19 nt, Artificial Sequence
  Description of Artificial Sequence: Synthetic oligonucleotide
ccauauuaaacaucugcau

SEQ ID NO: 1128998 - RNA, 19 nt, Artificial Sequence
  Description of Artificial Sequence: Synthetic oligonucleotide
guaggcgaugcaaggcaga

SEQ ID NO: 1128999 - RNA, 19 nt, Artificial Sequence
  Description of Artificial Sequence: Synthetic oligonucleotide
cgauucuuuacaucaugca

SEQ ID NO: 1129000 - RNA, 19 nt, Artificial Sequence
  Description of Artificial Sequence: Synthetic oligonucleotide
cucggauuccgucaguguu

SEQ ID NO: 1129001 - RNA, 19 nt, Artificial Sequence
  Description of Artificial Sequence: Synthetic oligonucleotide
ccucacguguaugacucgc

SEQ ID NO: 1129002 - RNA, 19 nt, Artificial Sequence
  Description of Artificial Sequence: Synthetic oligonucleotide
cagaucgcaucaucuuuua

SEQ ID NO: 1129003 - RNA, 19 nt, Artificial Sequence
  Description of Artificial Sequence: Synthetic oligonucleotide
ucguagcgucggagcagug

SEQ ID NO: 1129004 - RNA, 19 nt, Artificial Sequence
  Description of Artificial Sequence: Synthetic oligonucleotide
gcugcacgcauaguuugug

SEQ ID NO: 1129005 - RNA, 19 nt, Artificial Sequence
  Description of Artificial Sequence: Synthetic oligonucleotide
guacgacgauucuuuacau

SEQ ID NO: 1129006 - RNA, 19 nt, Artificial Sequence
  Description of Artificial Sequence: Synthetic oligonucleotide
cauucggaguuuaguuaua

SEQ ID NO: 1129007 - RNA, 19 nt, Artificial Sequence
  Description of Artificial Sequence: Synthetic oligonucleotide
gucuacagugcaaauccau

SEQ ID NO: 1129008 - RNA, 19 nt, Artificial Sequence
  Description of Artificial Sequence: Synthetic oligonucleotide
cgcuuuaagaagguacgac

SEQ ID NO: 1129009 - RNA, 19 nt, Artificial Sequence
  Description of Artificial Sequence: Synthetic oligonucleotide
cugucaccauaucauuaua

SEQ ID NO: 1129010 - RNA, 19 nt, Artificial Sequence
  Description of Artificial Sequence: Synthetic oligonucleotide
ucgucgguaugaggcugca

SEQ ID NO: 1129011 - RNA, 19 nt, Artificial Sequence
  Description of Artificial Sequence: Synthetic oligonucleotide
caguguuugcugguccaca

SEQ ID NO: 1129012 - RNA, 19 nt, Artificial Sequence
  Description of Artificial Sequence: Synthetic oligonucleotide
gacguaaaugccgggcgau

SEQ ID NO: 1129013 - RNA, 19 nt, Artificial Sequence
  Description of Artificial Sequence: Synthetic oligonucleotide
uggcaauaacaggcccacu

SEQ ID NO: 1129014 - RNA, 19 nt, Artificial Sequence
  Description of Artificial Sequence: Synthetic oligonucleotide
gcaacagguacaguuggua

SEQ ID NO: 1129015 - RNA, 19 nt, Artificial Sequence
  Description of Artificial Sequence: Synthetic oligonucleotide
guuugcggguccaagcaau

SEQ ID NO: 1129016 - RNA, 19 nt, Artificial Sequence
  Description of Artificial Sequence: Synthetic oligonucleotide
caacauuaacccgauccau

SEQ ID NO: 1129017 - RNA, 19 nt, Artificial Sequence
  Description of Artificial Sequence: Synthetic oligonucleotide
gguaugaggcugcacgcau

SEQ ID NO: 1129018 - RNA, 19 nt, Artificial Sequence
  Description of Artificial Sequence: Synthetic oligonucleotide
ccgucaguguugaggcacc

SEQ ID NO: 1129019 - RNA, 19 nt, Artificial Sequence
  Description of Artificial Sequence: Synthetic oligonucleotide
cucacguguaugacucgcu

SEQ ID NO: 1129020 - RNA, 19 nt, Artificial Sequence
  Description of Artificial Sequence: Synthetic oligonucleotide
gggaucguaccacucugua

SEQ ID NO: 1129021 - RNA, 19 nt, Artificial Sequence
  Description of Artificial Sequence: Synthetic oligonucleotide
gcucguagcgucggagcag

SEQ ID NO: 1129022 - RNA, 19 nt, Artificial Sequence
  Description of Artificial Sequence: Synthetic oligonucleotide
acguaaaugccgggcgauu

SEQ ID NO: 1129023 - RNA, 19 nt, Artificial Sequence
  Description of Artificial Sequence: Synthetic oligonucleotide
ccaccucgucgguaugagg

SEQ ID NO: 1129024 - RNA, 19 nt, Artificial Sequence
  Description of Artificial Sequence: Synthetic oligonucleotide
cuggaccucuaggagccca

SEQ ID NO: 1129025 - RNA, 19 nt, Artificial Sequence
  Description of Artificial Sequence: Synthetic oligonucleotide
caugagccgcguuucuuau

SEQ ID NO: 1129026 - RNA, 19 nt, Artificial Sequence
  Description of Artificial Sequence: Synthetic oligonucleotide
gcgucggagcagugaggcg

SEQ ID NO: 1129027 - RNA, 19 nt, Artificial Sequence
  Description of Artificial Sequence: Synthetic oligonucleotide
ucggagcagugaggcguug

SEQ ID NO: 1129028 - RNA, 19 nt, Artificial Sequence
  Description of Artificial Sequence: Synthetic oligonucleotide
guugucgagaaaagacauu

SEQ ID NO: 1129029 - RNA, 19 nt, Artificial Sequence
  Description of Artificial Sequence: Synthetic oligonucleotide
gggcgauuucaggaucagc

SEQ ID NO: 1129030 - RNA, 19 nt, Artificial Sequence
  Description of Artificial Sequence: Synthetic oligonucleotide
ggcgagcuguguauugguc

SEQ ID NO: 1129031 - RNA, 19 nt, Artificial Sequence
  Description of Artificial Sequence: Synthetic oligonucleotide
caucuguaugagcuagguu

SEQ ID NO: 1129032 - RNA, 19 nt, Artificial Sequence
  Description of Artificial Sequence: Synthetic oligonucleotide
agcuggcgagcuguguauu

SEQ ID NO: 1129033 - RNA, 19 nt, Artificial Sequence
  Description of Artificial Sequence: Synthetic oligonucleotide
ccaugagccgcguuucuua

SEQ ID NO: 1129034 - RNA, 19 nt, Artificial Sequence
  Description of Artificial Sequence: Synthetic oligonucleotide
cauuaacccgauccauauu

SEQ ID NO: 1129035 - RNA, 19 nt, Artificial Sequence
  Description of Artificial Sequence: Synthetic oligonucleotide
ggauuccgucaguguugag

SEQ ID NO: 1129036 - RNA, 19 nt, Artificial Sequence
  Description of Artificial Sequence: Synthetic oligonucleotide
cucguagcgucggagcagu

SEQ ID NO: 1129037 - RNA, 19 nt, Artificial Sequence
  Description of Artificial Sequence: Synthetic oligonucleotide
cucgcuugucugagugucu

SEQ ID NO: 1129038 - RNA, 19 nt, Artificial Sequence
  Description of Artificial Sequence: Synthetic oligonucleotide
caaagacggcucugaugcu

SEQ ID NO: 1129039 - RNA, 19 nt, Artificial Sequence
  Description of Artificial Sequence: Synthetic oligonucleotide
gaauagcuauuaagaucuu

SEQ ID NO: 1129040 - RNA, 19 nt, Artificial Sequence
  Description of Artificial Sequence: Synthetic oligonucleotide
cccgauccauauuaaacau

SEQ ID NO: 1129041 - RNA, 19 nt, Artificial Sequence
  Description of Artificial Sequence: Synthetic oligonucleotide
cguugggaucguaccacuc

SEQ ID NO: 1129042 - RNA, 19 nt, Artificial Sequence
  Description of Artificial Sequence: Synthetic oligonucleotide
gccgggcgauuucaggauc

SEQ ID NO: 1129043 - RNA, 19 nt, Artificial Sequence
  Description of Artificial Sequence: Synthetic oligonucleotide
ccucgucgguaugaggcug

SEQ ID NO: 1129044 - RNA, 19 nt, Artificial Sequence
  Description of Artificial Sequence: Synthetic oligonucleotide
ccgcguuucuuaugcuauc

SEQ ID NO: 1129045 - RNA, 19 nt, Artificial Sequence
  Description of Artificial Sequence: Synthetic oligonucleotide
cuuccacgcgcaggucguc

SEQ ID NO: 1129046 - RNA, 19 nt, Artificial Sequence
  Description of Artificial Sequence: Synthetic oligonucleotide
ccgggcgauuucaggauca

SEQ ID NO: 1129047 - RNA, 19 nt, Artificial Sequence
  Description of Artificial Sequence: Synthetic oligonucleotide
gagccgcguuucuuaugcu

SEQ ID NO: 1129048 - RNA, 19 nt, Artificial Sequence
  Description of Artificial Sequence: Synthetic oligonucleotide
gaggcaccaccucgucggu

SEQ ID NO: 1129049 - RNA, 19 nt, Artificial Sequence
  Description of Artificial Sequence: Synthetic oligonucleotide
gggccaugagccgcguuuc

SEQ ID NO: 1129050 - RNA, 19 nt, Artificial Sequence
  Description of Artificial Sequence: Synthetic oligonucleotide
cagcuggcgagcuguguau

SEQ ID NO: 1129051 - RNA, 19 nt, Artificial Sequence
  Description of Artificial Sequence: Synthetic oligonucleotide
ccgcuuuaagaagguacga

SEQ ID NO: 1129052 - RNA, 19 nt, Artificial Sequence
  Description of Artificial Sequence: Synthetic oligonucleotide
gccgcguuucuuaugcuau

SEQ ID NO: 1129053 - RNA, 19 nt, Artificial Sequence
  Description of Artificial Sequence: Synthetic oligonucleotide
gcguugggaucguaccacu

SEQ ID NO: 1129054 - RNA, 19 nt, Artificial Sequence
  Description of Artificial Sequence: Synthetic oligonucleotide
gguccgcuuuaagaaggua

SEQ ID NO: 1129055 - RNA, 19 nt, Artificial Sequence
  Description of Artificial Sequence: Synthetic oligonucleotide
ccccauagacugguguuaa

SEQ ID NO: 1129056 - RNA, 19 nt, Artificial Sequence
  Description of Artificial Sequence: Synthetic oligonucleotide
cccauagacugguguuaaa

SEQ ID NO: 1129057 - RNA, 19 nt, Artificial Sequence
  Description of Artificial Sequence: Synthetic oligonucleotide
ggcugcacgcauaguuugu

SEQ ID NO: 1129058 - RNA, 19 nt, Artificial Sequence
  Description of Artificial Sequence: Synthetic oligonucleotide
cgucggagcagugaggcgu

SEQ ID NO: 1129059 - RNA, 19 nt, Artificial Sequence
  Description of Artificial Sequence: Synthetic oligonucleotide
gcgaugcaaggcagagcuc

SEQ ID NO: 1129060 - RNA, 19 nt, Artificial Sequence
  Description of Artificial Sequence: Synthetic oligonucleotide
ggccaugagccgcguuucu

SEQ ID NO: 1129061 - RNA, 19 nt, Artificial Sequence
  Description of Artificial Sequence: Synthetic oligonucleotide
gcggguccaagcaaucuuu

SEQ ID NO: 1129062 - RNA, 19 nt, Artificial Sequence
  Description of Artificial Sequence: Synthetic oligonucleotide
cgguaugaggcugcacgca

SEQ ID NO: 1129063 - RNA, 19 nt, Artificial Sequence
  Description of Artificial Sequence: Synthetic oligonucleotide
cgcguuucuuaugcuaucu

SEQ ID NO: 1129064 - RNA, 19 nt, Artificial Sequence
  Description of Artificial Sequence: Synthetic oligonucleotide
cgacgauucuuuacaucau

SEQ ID NO: 1129065 - RNA, 19 nt, Artificial Sequence
  Description of Artificial Sequence: Synthetic oligonucleotide
gcaggucgucauacuuggu

SEQ ID NO: 1129066 - RNA, 19 nt, Artificial Sequence
  Description of Artificial Sequence: Synthetic oligonucleotide
cggguccaagcaaucuuuu

SEQ ID NO: 1129067 - RNA, 19 nt, Artificial Sequence
  Description of Artificial Sequence: Synthetic oligonucleotide
acuguaagaauccagaggc

SEQ ID NO: 1129068 - RNA, 19 nt, Artificial Sequence
  Description of Artificial Sequence: Synthetic oligonucleotide
uuuggaaucgacuucagcg

SEQ ID NO: 1129069 - RNA, 19 nt, Artificial Sequence
  Description of Artificial Sequence: Synthetic oligonucleotide
agaauaagaaaauacagug

SEQ ID NO: 1129070 - RNA, 19 nt, Artificial Sequence
  Description of Artificial Sequence: Synthetic oligonucleotide
uguauaaucguagagggcg

SEQ ID NO: 1129071 - RNA, 19 nt, Artificial Sequence
  Description of Artificial Sequence: Synthetic oligonucleotide
aaaguguaguuucaggugg

SEQ ID NO: 1129072 - RNA, 19 nt, Artificial Sequence
  Description of Artificial Sequence: Synthetic oligonucleotide
guuguauaaucguagaggg

SEQ ID NO: 1129073 - RNA, 19 nt, Artificial Sequence
  Description of Artificial Sequence: Synthetic oligonucleotide
uauuacaacuguaagaauc

SEQ ID NO: 1129074 - RNA, 19 nt, Artificial Sequence
  Description of Artificial Sequence: Synthetic oligonucleotide
  modified_base (13)..(13): a, c, u, g, unknown or other
ucuuggacaagunagggug

SEQ ID NO: 1129075 - RNA, 19 nt, Artificial Sequence
  Description of Artificial Sequence: Synthetic oligonucleotide
ugagacuucaagaagguca

SEQ ID NO: 1129076 - RNA, 19 nt, Artificial Sequence
  Description of Artificial Sequence: Synthetic oligonucleotide
aacaaaagcuggaauaggc

SEQ ID NO: 1129077 - RNA, 19 nt, Artificial Sequence
  Description of Artificial Sequence: Synthetic oligonucleotide
aacuguaagaauccagagg

SEQ ID NO: 1129078 - RNA, 19 nt, Artificial Sequence
  Description of Artificial Sequence: Synthetic oligonucleotide
aaggauuucacuguaauca

SEQ ID NO: 1129079 - RNA, 19 nt, Artificial Sequence
  Description of Artificial Sequence: Synthetic oligonucleotide
uguugacuacguuagaggg

SEQ ID NO: 1129080 - RNA, 19 nt, Artificial Sequence
  Description of Artificial Sequence: Synthetic oligonucleotide
  modified_base (17)..(17): a, c, u, g, unknown or other
ugagucuuggacaagunag

SEQ ID NO: 1129081 - RNA, 19 nt, Artificial Sequence
  Description of Artificial Sequence: Synthetic oligonucleotide
gaauaucuagagcacaggg

SEQ ID NO: 1129082 - RNA, 19 nt, Artificial Sequence
  Description of Artificial Sequence: Synthetic oligonucleotide
aacacuauguucuuuaaua

SEQ ID NO: 1129083 - RNA, 19 nt, Artificial Sequence
  Description of Artificial Sequence: Synthetic oligonucleotide
  modified_base (5)..(5): a, c, u, g, unknown or other
aagunagggugacagcacc

SEQ ID NO: 1129084 - RNA, 19 nt, Artificial Sequence
  Description of Artificial Sequence: Synthetic oligonucleotide
ucuguaguuugcuaaaugc

SEQ ID NO: 1129085 - RNA, 19 nt, Artificial Sequence
  Description of Artificial Sequence: Synthetic oligonucleotide
uguaguuugcuaaaugcug

SEQ ID NO: 1129086 - RNA, 19 nt, Artificial Sequence
  Description of Artificial Sequence: Synthetic oligonucleotide
auuacagccauuucuaugu

SEQ ID NO: 1129087 - RNA, 19 nt, Artificial Sequence
  Description of Artificial Sequence: Synthetic oligonucleotide
uuucuugaugugaagaugu

SEQ ID NO: 1129088 - RNA, 19 nt, Artificial Sequence
  Description of Artificial Sequence: Synthetic oligonucleotide
aauguguaucuuuaaagau

SEQ ID NO: 1129089 - RNA, 19 nt, Artificial Sequence
  Description of Artificial Sequence: Synthetic oligonucleotide
cucauaaucuaccagacuc

SEQ ID NO: 1129090 - RNA, 19 nt, Artificial Sequence
  Description of Artificial Sequence: Synthetic oligonucleotide
aaccaauuuccuuuuaaca

SEQ ID NO: 1129091 - RNA, 19 nt, Artificial Sequence
  Description of Artificial Sequence: Synthetic oligonucleotide
ucggaggaaaucaagaagu

SEQ ID NO: 1129092 - RNA, 19 nt, Artificial Sequence
  Description of Artificial Sequence: Synthetic oligonucleotide
agaagugucauccuguccu

SEQ ID NO: 1129093 - RNA, 19 nt, Artificial Sequence
  Description of Artificial Sequence: Synthetic oligonucleotide
acuguaaucaagcuugcug

SEQ ID NO: 1129094 - RNA, 19 nt, Artificial Sequence
  Description of Artificial Sequence: Synthetic oligonucleotide
gaauguguaucuuuaaaga

SEQ ID NO: 1129095 - RNA, 19 nt, Artificial Sequence
  Description of Artificial Sequence: Synthetic oligonucleotide
aauacaguguggauuacag

SEQ ID NO: 1129096 - RNA, 19 nt, Artificial Sequence
  Description of Artificial Sequence: Synthetic oligonucleotide
acuauaaccaauuuccuuu

SEQ ID NO: 1129097 - RNA, 19 nt, Artificial Sequence
  Description of Artificial Sequence: Synthetic oligonucleotide
uuggaaucgacuucagcgg

SEQ ID NO: 1129098 - RNA, 19 nt, Artificial Sequence
  Description of Artificial Sequence: Synthetic oligonucleotide
agaacuguagaaucaaaca

SEQ ID NO: 1129099 - RNA, 19 nt, Artificial Sequence
  Description of Artificial Sequence: Synthetic oligonucleotide
cauccuuuggcucuuaaag

SEQ ID NO: 1129100 - RNA, 19 nt, Artificial Sequence
  Description of Artificial Sequence: Synthetic oligonucleotide
ugcaucaaagaacuugcag

SEQ ID NO: 1129101 - RNA, 19 nt, Artificial Sequence
  Description of Artificial Sequence: Synthetic oligonucleotide
auucugacuuguucuaggc

SEQ ID NO: 1129102 - RNA, 19 nt, Artificial Sequence
  Description of Artificial Sequence: Synthetic oligonucleotide
gaugagaggcacuuggcag

SEQ ID NO: 1129103 - RNA, 19 nt, Artificial Sequence
  Description of Artificial Sequence: Synthetic oligonucleotide
cauuuuaccuagaaggcac

SEQ ID NO: 1129104 - RNA, 19 nt, Artificial Sequence
  Description of Artificial Sequence: Synthetic oligonucleotide
aaauggucaggugacauca

SEQ ID NO: 1129105 - RNA, 19 nt, Artificial Sequence
  Description of Artificial Sequence: Synthetic oligonucleotide
aaauagaggagcgaugaga

SEQ ID NO: 1129106 - RNA, 19 nt, Artificial Sequence
  Description of Artificial Sequence: Synthetic oligonucleotide
uucgauucugacuuguucu

SEQ ID NO: 1129107 - RNA, 19 nt, Artificial Sequence
  Description of Artificial Sequence: Synthetic oligonucleotide
ugacguacaguucuggaac

SEQ ID NO: 1129108 - RNA, 19 nt, Artificial Sequence
  Description of Artificial Sequence: Synthetic oligonucleotide
aucuaccagacucaguggg

SEQ ID NO: 1129109 - RNA, 19 nt, Artificial Sequence
  Description of Artificial Sequence: Synthetic oligonucleotide
uacaacuguaagaauccag

SEQ ID NO: 1129110 - RNA, 19 nt, Artificial Sequence
  Description of Artificial Sequence: Synthetic oligonucleotide
  modified_base (7)..(7): a, c, u, g, unknown or other
acaagunagggugacagca

SEQ ID NO: 1129111 - RNA, 19 nt, Artificial Sequence
  Description of Artificial Sequence: Synthetic oligonucleotide
uuugaugacuauaaccaau

SEQ ID NO: 1129112 - RNA, 19 nt, Artificial Sequence
  Description of Artificial Sequence: Synthetic oligonucleotide
cuauguguguaguggaucc

SEQ ID NO: 1129113 - RNA, 19 nt, Artificial Sequence
  Description of Artificial Sequence: Synthetic oligonucleotide
aacuguagaaucaaacacu

SEQ ID NO: 1129114 - RNA, 19 nt, Artificial Sequence
  Description of Artificial Sequence: Synthetic oligonucleotide
cuugucggaauucuggagc

SEQ ID NO: 1129115 - RNA, 19 nt, Artificial Sequence
  Description of Artificial Sequence: Synthetic oligonucleotide
ucagcggacugcaaaaggc

SEQ ID NO: 1129116 - RNA, 19 nt, Artificial Sequence
  Description of Artificial Sequence: Synthetic oligonucleotide
auaucuagagcacaggguu

SEQ ID NO: 1129117 - RNA, 19 nt, Artificial Sequence
  Description of Artificial Sequence: Synthetic oligonucleotide
gguuguauaaucguagagg

SEQ ID NO: 1129118 - RNA, 19 nt, Artificial Sequence
  Description of Artificial Sequence: Synthetic oligonucleotide
acguaaucagggccaaucc

SEQ ID NO: 1129119 - RNA, 19 nt, Artificial Sequence
  Description of Artificial Sequence: Synthetic oligonucleotide
uuugcuaaaugcugauuug

SEQ ID NO: 1129120 - RNA, 19 nt, Artificial Sequence
  Description of Artificial Sequence: Synthetic oligonucleotide
uucagcggacugcaaaagg

SEQ ID NO: 1129121 - RNA, 19 nt, Artificial Sequence
  Description of Artificial Sequence: Synthetic oligonucleotide
cuguugacuacguuagagg

SEQ ID NO: 1129122 - RNA, 19 nt, Artificial Sequence
  Description of Artificial Sequence: Synthetic oligonucleotide
ucuaccagacucagugggg

SEQ ID NO: 1129123 - RNA, 19 nt, Artificial Sequence
  Description of Artificial Sequence: Synthetic oligonucleotide
cagggugacguaaucaggg

SEQ ID NO: 1129124 - RNA, 19 nt, Artificial Sequence
  Description of Artificial Sequence: Synthetic oligonucleotide
uguauuguguggcuggcuc

SEQ ID NO: 1129125 - RNA, 19 nt, Artificial Sequence
  Description of Artificial Sequence: Synthetic oligonucleotide
aauaucuagagcacagggu

SEQ ID NO: 1129126 - RNA, 19 nt, Artificial Sequence
  Description of Artificial Sequence: Synthetic oligonucleotide
acuuguucuaggcaggccu

SEQ ID NO: 1129127 - RNA, 19 nt, Artificial Sequence
  Description of Artificial Sequence: Synthetic oligonucleotide
ugcaagucagcucucauuu

SEQ ID NO: 1129128 - RNA, 19 nt, Artificial Sequence
  Description of Artificial Sequence: Synthetic oligonucleotide
uugauuucuaaggauuuca

SEQ ID NO: 1129129 - RNA, 19 nt, Artificial Sequence
  Description of Artificial Sequence: Synthetic oligonucleotide
uucauccccuccaaagcgg

SEQ ID NO: 1129130 - RNA, 19 nt, Artificial Sequence
  Description of Artificial Sequence: Synthetic oligonucleotide
cacauggguuguauaaucg

SEQ ID NO: 1129131 - RNA, 19 nt, Artificial Sequence
  Description of Artificial Sequence: Synthetic oligonucleotide
ucguagagggcgccgaagg

SEQ ID NO: 1129132 - RNA, 19 nt, Artificial Sequence
  Description of Artificial Sequence: Synthetic oligonucleotide
ugauuucuaaggauuucac

SEQ ID NO: 1129133 - RNA, 19 nt, Artificial Sequence
  Description of Artificial Sequence: Synthetic oligonucleotide
cagaaaauggucaggugac

SEQ ID NO: 1129134 - RNA, 19 nt, Artificial Sequence
  Description of Artificial Sequence: Synthetic oligonucleotide
uaacaaaagcuggaauagg

SEQ ID NO: 1129135 - RNA, 19 nt, Artificial Sequence
  Description of Artificial Sequence: Synthetic oligonucleotide
gacacagacaaguccuucc

SEQ ID NO: 1129136 - RNA, 19 nt, Artificial Sequence
  Description of Artificial Sequence: Synthetic oligonucleotide
aagugagacaucaacuugu

SEQ ID NO: 1129137 - RNA, 19 nt, Artificial Sequence
  Description of Artificial Sequence: Synthetic oligonucleotide
ucuuaaaguguaguuucag

SEQ ID NO: 1129138 - RNA, 19 nt, Artificial Sequence
  Description of Artificial Sequence: Synthetic oligonucleotide
auuucggcggcugacguac

SEQ ID NO: 1129139 - RNA, 19 nt, Artificial Sequence
  Description of Artificial Sequence: Synthetic oligonucleotide
gcuaaaugcugauuugugg

SEQ ID NO: 1129140 - RNA, 19 nt, Artificial Sequence
  Description of Artificial Sequence: Synthetic oligonucleotide
aggugagacuucaagaagg

SEQ ID NO: 1129141 - RNA, 19 nt, Artificial Sequence
  Description of Artificial Sequence: Synthetic oligonucleotide
uuucgauucugacuuguuc

SEQ ID NO: 1129142 - RNA, 19 nt, Artificial Sequence
  Description of Artificial Sequence: Synthetic oligonucleotide
ugcaaaaggccuucaguca

SEQ ID NO: 1129143 - RNA, 19 nt, Artificial Sequence
  Description of Artificial Sequence: Synthetic oligonucleotide
uuguauaaucguagagggc

SEQ ID NO: 1129144 - RNA, 19 nt, Artificial Sequence
  Description of Artificial Sequence: Synthetic oligonucleotide
agucagcucucauuucggc

SEQ ID NO: 1129145 - RNA, 19 nt, Artificial Sequence
  Description of Artificial Sequence: Synthetic oligonucleotide
uaaucagggccaauccuug

SEQ ID NO: 1129146 - RNA, 19 nt, Artificial Sequence
  Description of Artificial Sequence: Synthetic oligonucleotide
uuaccuagaaggcacuuuu

SEQ ID NO: 1129147 - RNA, 19 nt, Artificial Sequence
  Description of Artificial Sequence: Synthetic oligonucleotide
aaagugauccagggauuac

SEQ ID NO: 1129148 - RNA, 19 nt, Artificial Sequence
  Description of Artificial Sequence: Synthetic oligonucleotide
ucaacuugucggaauucug

SEQ ID NO: 1129149 - RNA, 19 nt, Artificial Sequence
  Description of Artificial Sequence: Synthetic oligonucleotide
uguguaguggauccaugcu

SEQ ID NO: 1129150 - RNA, 19 nt, Artificial Sequence
  Description of Artificial Sequence: Synthetic oligonucleotide
agcaccaugaguauguacu

SEQ ID NO: 1129151 - RNA, 19 nt, Artificial Sequence
  Description of Artificial Sequence: Synthetic oligonucleotide
gagacuucaagaaggucag

SEQ ID NO: 1129152 - RNA, 19 nt, Artificial Sequence
  Description of Artificial Sequence: Synthetic oligonucleotide
ucaccguccagaaaauggu

SEQ ID NO: 1129153 - RNA, 19 nt, Artificial Sequence
  Description of Artificial Sequence: Synthetic oligonucleotide
ugacuauaaccaauuuccu

SEQ ID NO: 1129154 - RNA, 19 nt, Artificial Sequence
  Description of Artificial Sequence: Synthetic oligonucleotide
uacucaaugccaucuucgc

SEQ ID NO: 1129155 - RNA, 19 nt, Artificial Sequence
  Description of Artificial Sequence: Synthetic oligonucleotide
acaacuguaagaauccaga

SEQ ID NO: 1129156 - RNA, 19 nt, Artificial Sequence
  Description of Artificial Sequence: Synthetic oligonucleotide
  modified_base (18)..(18): a, c, u, g, unknown or other
uugagucuuggacaaguna

SEQ ID NO: 1129157 - RNA, 19 nt, Artificial Sequence
  Description of Artificial Sequence: Synthetic oligonucleotide
aaucaagcuugcugcucuc

SEQ ID NO: 1129158 - RNA, 19 nt, Artificial Sequence
  Description of Artificial Sequence: Synthetic oligonucleotide
gucaagaagaacuguagaa

SEQ ID NO: 1129159 - RNA, 19 nt, Artificial Sequence
  Description of Artificial Sequence: Synthetic oligonucleotide
ugaguuucccugcucauuu

SEQ ID NO: 1129160 - RNA, 19 nt, Artificial Sequence
  Description of Artificial Sequence: Synthetic oligonucleotide
aaauacaguguggauuaca

SEQ ID NO: 1129161 - RNA, 19 nt, Artificial Sequence
  Description of Artificial Sequence: Synthetic oligonucleotide
agggugacguaaucagggc

SEQ ID NO: 1129162 - RNA, 19 nt, Artificial Sequence
  Description of Artificial Sequence: Synthetic oligonucleotide
gaaauagaggagcgaugag

SEQ ID NO: 1129163 - RNA, 19 nt, Artificial Sequence
  Description of Artificial Sequence: Synthetic oligonucleotide
ucauccccuccaaagcggg

SEQ ID NO: 1129164 - RNA, 19 nt, Artificial Sequence
  Description of Artificial Sequence: Synthetic oligonucleotide
uugacuacguuagagggau

SEQ ID NO: 1129165 - RNA, 19 nt, Artificial Sequence
  Description of Artificial Sequence: Synthetic oligonucleotide
cucucauaaucuaccagac

SEQ ID NO: 1129166 - RNA, 19 nt, Artificial Sequence
  Description of Artificial Sequence: Synthetic oligonucleotide
ucaucguccugcucuauga

SEQ ID NO: 1129167 - RNA, 19 nt, Artificial Sequence
  Description of Artificial Sequence: Synthetic oligonucleotide
uguaaucaagcuugcugcu

SEQ ID NO: 1129168 - RNA, 19 nt, Artificial Sequence
  Description of Artificial Sequence: Synthetic oligonucleotide
gagcaugcuguauugugug

SEQ ID NO: 1129169 - RNA, 19 nt, Artificial Sequence
  Description of Artificial Sequence: Synthetic oligonucleotide
agauccacggcagaggucu

SEQ ID NO: 1129170 - RNA, 19 nt, Artificial Sequence
  Description of Artificial Sequence: Synthetic oligonucleotide
uggcucuugagucuuggac

SEQ ID NO: 1129171 - RNA, 19 nt, Artificial Sequence
  Description of Artificial Sequence: Synthetic oligonucleotide
gaauccagaggcaaugcac

SEQ ID NO: 1129172 - RNA, 19 nt, Artificial Sequence
  Description of Artificial Sequence: Synthetic oligonucleotide
  modified_base (15)..(15): a, c, u, g, unknown or other
agucuuggacaagunaggg

SEQ ID NO: 1129173 - RNA, 19 nt, Artificial Sequence
  Description of Artificial Sequence: Synthetic oligonucleotide
uguaccccuccuuugcgag

SEQ ID NO: 1129174 - RNA, 19 nt, Artificial Sequence
  Description of Artificial Sequence: Synthetic oligonucleotide
uuuucuugggucagucuuc

SEQ ID NO: 1129175 - RNA, 19 nt, Artificial Sequence
  Description of Artificial Sequence: Synthetic oligonucleotide
aauaggccaggcaagaaua

SEQ ID NO: 1129176 - RNA, 19 nt, Artificial Sequence
  Description of Artificial Sequence: Synthetic oligonucleotide
cugugagaaguucaagcag

SEQ ID NO: 1129177 - RNA, 19 nt, Artificial Sequence
  Description of Artificial Sequence: Synthetic oligonucleotide
ucacauggguuguauaauc

SEQ ID NO: 1129178 - RNA, 19 nt, Artificial Sequence
  Description of Artificial Sequence: Synthetic oligonucleotide
cagccauucacauggguug

SEQ ID NO: 1129179 - RNA, 19 nt, Artificial Sequence
  Description of Artificial Sequence: Synthetic oligonucleotide
uucgcucucagcuggaaau

SEQ ID NO: 1129180 - RNA, 19 nt, Artificial Sequence
  Description of Artificial Sequence: Synthetic oligonucleotide
aucgacuucagcggacugc

SEQ ID NO: 1129181 - RNA, 19 nt, Artificial Sequence
  Description of Artificial Sequence: Synthetic oligonucleotide
cauccaucacuguuaacug

SEQ ID NO: 1129182 - RNA, 19 nt, Artificial Sequence
  Description of Artificial Sequence: Synthetic oligonucleotide
uggaaucgacuucagcgga

SEQ ID NO: 1129183 - RNA, 19 nt, Artificial Sequence
  Description of Artificial Sequence: Synthetic oligonucleotide
ucuugagucuuggacaagu

SEQ ID NO: 1129184 - RNA, 19 nt, Artificial Sequence
  Description of Artificial Sequence: Synthetic oligonucleotide
uucugacuuguucuaggca

SEQ ID NO: 1129185 - RNA, 19 nt, Artificial Sequence
  Description of Artificial Sequence: Synthetic oligonucleotide
guguguaguggauccaugc

SEQ ID NO: 1129186 - RNA, 19 nt, Artificial Sequence
  Description of Artificial Sequence: Synthetic oligonucleotide
acuguuaacugaaggagcu

SEQ ID NO: 1129187 - RNA, 19 nt, Artificial Sequence
  Description of Artificial Sequence: Synthetic oligonucleotide
uugucggaauucuggagca

SEQ ID NO: 1129188 - RNA, 19 nt, Artificial Sequence
  Description of Artificial Sequence: Synthetic oligonucleotide
ucuaaggauuucacuguaa

SEQ ID NO: 1129189 - RNA, 19 nt, Artificial Sequence
  Description of Artificial Sequence: Synthetic oligonucleotide
  modified_base (9)..(9): a, c, u, g, unknown or other
ggacaagunagggugacag

SEQ ID NO: 1129190 - RNA, 19 nt, Artificial Sequence
  Description of Artificial Sequence: Synthetic oligonucleotide
cugacuuguucuaggcagg

SEQ ID NO: 1129191 - RNA, 19 nt, Artificial Sequence
  Description of Artificial Sequence: Synthetic oligonucleotide
aagugauccagggauuacu

SEQ ID NO: 1129192 - RNA, 19 nt, Artificial Sequence
  Description of Artificial Sequence: Synthetic oligonucleotide
auagaggagcgaugagagg

SEQ ID NO: 1129193 - RNA, 19 nt, Artificial Sequence
  Description of Artificial Sequence: Synthetic oligonucleotide
uccagggauuacucaaugc

SEQ ID NO: 1129194 - RNA, 19 nt, Artificial Sequence
  Description of Artificial Sequence: Synthetic oligonucleotide
auggguuguauaaucguag

SEQ ID NO: 1129195 - RNA, 19 nt, Artificial Sequence
  Description of Artificial Sequence: Synthetic oligonucleotide
aucuagagcacaggguuuc

SEQ ID NO: 1129196 - RNA, 19 nt, Artificial Sequence
  Description of Artificial Sequence: Synthetic oligonucleotide
ugcucauuucuugauguga

SEQ ID NO: 1129197 - RNA, 19 nt, Artificial Sequence
  Description of Artificial Sequence: Synthetic oligonucleotide
gacaguacucggcucagca

SEQ ID NO: 1129198 - RNA, 19 nt, Artificial Sequence
  Description of Artificial Sequence: Synthetic oligonucleotide
uucuaggcaggccuugagu

SEQ ID NO: 1129199 - RNA, 19 nt, Artificial Sequence
  Description of Artificial Sequence: Synthetic oligonucleotide
agggccaauccuugguugg

SEQ ID NO: 1129200 - RNA, 19 nt, Artificial Sequence
  Description of Artificial Sequence: Synthetic oligonucleotide
cauuucuauguguguagug

SEQ ID NO: 1129201 - RNA, 19 nt, Artificial Sequence
  Description of Artificial Sequence: Synthetic oligonucleotide
cuggaauaggccaggcaag

SEQ ID NO: 1129202 - RNA, 19 nt, Artificial Sequence
  Description of Artificial Sequence: Synthetic oligonucleotide
caggccuugaguuucccug

SEQ ID NO: 1129203 - RNA, 19 nt, Artificial Sequence
  Description of Artificial Sequence: Synthetic oligonucleotide
ugggccaugagcuggcacu

SEQ ID NO: 1129204 - RNA, 19 nt, Artificial Sequence
  Description of Artificial Sequence: Synthetic oligonucleotide
aagucagcucucauuucgg

SEQ ID NO: 1129205 - RNA, 19 nt, Artificial Sequence
  Description of Artificial Sequence: Synthetic oligonucleotide
cagguugaacuucaucccc

SEQ ID NO: 1129206 - RNA, 19 nt, Artificial Sequence
  Description of Artificial Sequence: Synthetic oligonucleotide
gcuacguucuuuucgauuc

SEQ ID NO: 1129207 - RNA, 19 nt, Artificial Sequence
  Description of Artificial Sequence: Synthetic oligonucleotide
agugauccagggauuacuc

SEQ ID NO: 1129208 - RNA, 19 nt, Artificial Sequence
  Description of Artificial Sequence: Synthetic oligonucleotide
aucguccugcucuaugaag

SEQ ID NO: 1129209 - RNA, 19 nt, Artificial Sequence
  Description of Artificial Sequence: Synthetic oligonucleotide
ccagggauuacucaaugcc

SEQ ID NO: 1129210 - RNA, 19 nt, Artificial Sequence
  Description of Artificial Sequence: Synthetic oligonucleotide
  modified_base (2)..(2): a, c, u, g, unknown or other
unagggugacagcaccaug

SEQ ID NO: 1129211 - RNA, 19 nt, Artificial Sequence
  Description of Artificial Sequence: Synthetic oligonucleotide
caaugcacugcuucucuac

SEQ ID NO: 1129212 - RNA, 19 nt, Artificial Sequence
  Description of Artificial Sequence: Synthetic oligonucleotide
uauaaucguagagggcgcc

SEQ ID NO: 1129213 - RNA, 19 nt, Artificial Sequence
  Description of Artificial Sequence: Synthetic oligonucleotide
gucaguaacucggacauga

SEQ ID NO: 1129214 - RNA, 19 nt, Artificial Sequence
  Description of Artificial Sequence: Synthetic oligonucleotide
  modified_base (8)..(8): a, c, u, g, unknown or other
gacaagunagggugacagc

SEQ ID NO: 1129215 - RNA, 19 nt, Artificial Sequence
  Description of Artificial Sequence: Synthetic oligonucleotide
acucaaggaaacagguuuc

SEQ ID NO: 1129216 - RNA, 19 nt, Artificial Sequence
  Description of Artificial Sequence: Synthetic oligonucleotide
guagaaucaaacacuaugu

SEQ ID NO: 1129217 - RNA, 19 nt, Artificial Sequence
  Description of Artificial Sequence: Synthetic oligonucleotide
guggauuacagccauuucu

SEQ ID NO: 1129218 - RNA, 19 nt, Artificial Sequence
  Description of Artificial Sequence: Synthetic oligonucleotide
gacguaaucagggccaauc

SEQ ID NO: 1129219 - RNA, 19 nt, Artificial Sequence
  Description of Artificial Sequence: Synthetic oligonucleotide
aaucgacuucagcggacug

SEQ ID NO: 1129220 - RNA, 19 nt, Artificial Sequence
  Description of Artificial Sequence: Synthetic oligonucleotide
  modified_base (6)..(6): a, c, u, g, unknown or other
caagunagggugacagcac

SEQ ID NO: 1129221 - RNA, 19 nt, Artificial Sequence
  Description of Artificial Sequence: Synthetic oligonucleotide
ucauuucggcggcugacgu

SEQ ID NO: 1129222 - RNA, 19 nt, Artificial Sequence
  Description of Artificial Sequence: Synthetic oligonucleotide
ugugugagcuugccuggcc

SEQ ID NO: 1129223 - RNA, 19 nt, Artificial Sequence
  Description of Artificial Sequence: Synthetic oligonucleotide
cacgucaccguccagaaaa

SEQ ID NO: 1129224 - RNA, 19 nt, Artificial Sequence
  Description of Artificial Sequence: Synthetic oligonucleotide
cuucucuacucucagggga

SEQ ID NO: 1129225 - RNA, 19 nt, Artificial Sequence
  Description of Artificial Sequence: Synthetic oligonucleotide
gcucucauaaucuaccaga

SEQ ID NO: 1129226 - RNA, 19 nt, Artificial Sequence
  Description of Artificial Sequence: Synthetic oligonucleotide
uuugcgagggccucaguuu

SEQ ID NO: 1129227 - RNA, 19 nt, Artificial Sequence
  Description of Artificial Sequence: Synthetic oligonucleotide
cagcggacugcaaaaggcc

SEQ ID NO: 1129228 - RNA, 19 nt, Artificial Sequence
  Description of Artificial Sequence: Synthetic oligonucleotide
ccacauuguaauuuggcug

SEQ ID NO: 1129229 - RNA, 19 nt, Artificial Sequence
  Description of Artificial Sequence: Synthetic oligonucleotide
caguacucggcucagcauc

SEQ ID NO: 1129230 - RNA, 19 nt, Artificial Sequence
  Description of Artificial Sequence: Synthetic oligonucleotide
auaaucguagagggcgccg

SEQ ID NO: 1129231 - RNA, 19 nt, Artificial Sequence
  Description of Artificial Sequence: Synthetic oligonucleotide
gacuacguuagagggauuc

SEQ ID NO: 1129232 - RNA, 19 nt, Artificial Sequence
  Description of Artificial Sequence: Synthetic oligonucleotide
cauccuguccucuggucag

SEQ ID NO: 1129233 - RNA, 19 nt, Artificial Sequence
  Description of Artificial Sequence: Synthetic oligonucleotide
aguuucagguggauucugg

SEQ ID NO: 1129234 - RNA, 19 nt, Artificial Sequence
  Description of Artificial Sequence: Synthetic oligonucleotide
ggaaauagaggagcgauga

SEQ ID NO: 1129235 - RNA, 19 nt, Artificial Sequence
  Description of Artificial Sequence: Synthetic oligonucleotide
ggaauucuggagcauccag

SEQ ID NO: 1129236 - RNA, 19 nt, Artificial Sequence
  Description of Artificial Sequence: Synthetic oligonucleotide
aggaaaucaagaagucaag

SEQ ID NO: 1129237 - RNA, 19 nt, Artificial Sequence
  Description of Artificial Sequence: Synthetic oligonucleotide
aucaacuugucggaauucu

SEQ ID NO: 1129238 - RNA, 19 nt, Artificial Sequence
  Description of Artificial Sequence: Synthetic oligonucleotide
uguggauuacagccauuuc

SEQ ID NO: 1129239 - RNA, 19 nt, Artificial Sequence
  Description of Artificial Sequence: Synthetic oligonucleotide
cccauuuuaccuagaaggc

SEQ ID NO: 1129240 - RNA, 19 nt, Artificial Sequence
  Description of Artificial Sequence: Synthetic oligonucleotide
caguaacucggacaugaac

SEQ ID NO: 1129241 - RNA, 19 nt, Artificial Sequence
  Description of Artificial Sequence: Synthetic oligonucleotide
auccagggauuacucaaug

SEQ ID NO: 1129242 - RNA, 19 nt, Artificial Sequence
  Description of Artificial Sequence: Synthetic oligonucleotide
acuguagaaucaaacacua

SEQ ID NO: 1129243 - RNA, 19 nt, Artificial Sequence
  Description of Artificial Sequence: Synthetic oligonucleotide
aggcuguugacuacguuag

SEQ ID NO: 1129244 - RNA, 19 nt, Artificial Sequence
  Description of Artificial Sequence: Synthetic oligonucleotide
acguuagagggauucugga

SEQ ID NO: 1129245 - RNA, 19 nt, Artificial Sequence
  Description of Artificial Sequence: Synthetic oligonucleotide
uucuugaugugaagauguc

SEQ ID NO: 1129246 - RNA, 19 nt, Artificial Sequence
  Description of Artificial Sequence: Synthetic oligonucleotide
ucaggggauucagagagau

SEQ ID NO: 1129247 - RNA, 19 nt, Artificial Sequence
  Description of Artificial Sequence: Synthetic oligonucleotide
gcugugagaaguucaagca

SEQ ID NO: 1129248 - RNA, 19 nt, Artificial Sequence
  Description of Artificial Sequence: Synthetic oligonucleotide
cugaacagccauucacaug

SEQ ID NO: 1129249 - RNA, 19 nt, Artificial Sequence
  Description of Artificial Sequence: Synthetic oligonucleotide
uaucuagagcacaggguuu

SEQ ID NO: 1129250 - RNA, 19 nt, Artificial Sequence
  Description of Artificial Sequence: Synthetic oligonucleotide
cagggauuacucaaugcca

SEQ ID NO: 1129251 - RNA, 19 nt, Artificial Sequence
  Description of Artificial Sequence: Synthetic oligonucleotide
ucgauucugacuuguucua

SEQ ID NO: 1129252 - RNA, 19 nt, Artificial Sequence
  Description of Artificial Sequence: Synthetic oligonucleotide
cucauuucggcggcugacg

SEQ ID NO: 1129253 - RNA, 19 nt, Artificial Sequence
  Description of Artificial Sequence: Synthetic oligonucleotide
ucuacucucaggggauuca

SEQ ID NO: 1129254 - RNA, 19 nt, Artificial Sequence
  Description of Artificial Sequence: Synthetic oligonucleotide
cuacguuagagggauucug

SEQ ID NO: 1129255 - RNA, 19 nt, Artificial Sequence
  Description of Artificial Sequence: Synthetic oligonucleotide
uugcgagggccucaguuuc

SEQ ID NO: 1129256 - RNA, 19 nt, Artificial Sequence
  Description of Artificial Sequence: Synthetic oligonucleotide
aggcauuggaagcccagga

SEQ ID NO: 1129257 - RNA, 19 nt, Artificial Sequence
  Description of Artificial Sequence: Synthetic oligonucleotide
guaauuuggcugcaucaaa

SEQ ID NO: 1129258 - RNA, 19 nt, Artificial Sequence
  Description of Artificial Sequence: Synthetic oligonucleotide
gacuucagcggacugcaaa

SEQ ID NO: 1129259 - RNA, 19 nt, Artificial Sequence
  Description of Artificial Sequence: Synthetic oligonucleotide
agucagcuuucuguacccc

SEQ ID NO: 1129260 - RNA, 19 nt, Artificial Sequence
  Description of Artificial Sequence: Synthetic oligonucleotide
cuugggucagucuuccaga

SEQ ID NO: 1129261 - RNA, 19 nt, Artificial Sequence
  Description of Artificial Sequence: Synthetic oligonucleotide
guauaaucguagagggcgc

SEQ ID NO: 1129262 - RNA, 19 nt, Artificial Sequence
  Description of Artificial Sequence: Synthetic oligonucleotide
gaugcucagggacgcuuug

SEQ ID NO: 1129263 - RNA, 19 nt, Artificial Sequence
  Description of Artificial Sequence: Synthetic oligonucleotide
aggccaggcaagaauaucu

SEQ ID NO: 1129264 - RNA, 19 nt, Artificial Sequence
  Description of Artificial Sequence: Synthetic oligonucleotide
uaaucguagagggcgccga

SEQ ID NO: 1129265 - RNA, 19 nt, Artificial Sequence
  Description of Artificial Sequence: Synthetic oligonucleotide
uccaaagcgggaaggcuuu

SEQ ID NO: 1129266 - RNA, 19 nt, Artificial Sequence
  Description of Artificial Sequence: Synthetic oligonucleotide
aguauguacuccacauugu

SEQ ID NO: 1129267 - RNA, 19 nt, Artificial Sequence
  Description of Artificial Sequence: Synthetic oligonucleotide
caagaauaucuagagcaca

SEQ ID NO: 1129268 - RNA, 19 nt, Artificial Sequence
  Description of Artificial Sequence: Synthetic oligonucleotide
uuuaccuagaaggcacuuu

SEQ ID NO: 1129269 - RNA, 19 nt, Artificial Sequence
  Description of Artificial Sequence: Synthetic oligonucleotide
aauggucaggugacaucag

SEQ ID NO: 1129270 - RNA, 19 nt, Artificial Sequence
  Description of Artificial Sequence: Synthetic oligonucleotide
gaagugucauccuguccuc

SEQ ID NO: 1129271 - RNA, 19 nt, Artificial Sequence
  Description of Artificial Sequence: Synthetic oligonucleotide
cacggcagaggucuucccc

SEQ ID NO: 1129272 - RNA, 19 nt, Artificial Sequence
  Description of Artificial Sequence: Synthetic oligonucleotide
uggcucuuaaaguguaguu

SEQ ID NO: 1129273 - RNA, 19 nt, Artificial Sequence
  Description of Artificial Sequence: Synthetic oligonucleotide
gaauaggccaggcaagaau

SEQ ID NO: 1129274 - RNA, 19 nt, Artificial Sequence
  Description of Artificial Sequence: Synthetic oligonucleotide
  modified_base (10)..(10): a, c, u, g, unknown or other
uggacaagunagggugaca

SEQ ID NO: 1129275 - RNA, 19 nt, Artificial Sequence
  Description of Artificial Sequence: Synthetic oligonucleotide
guagagggcgccgaaggug

SEQ ID NO: 1129276 - RNA, 19 nt, Artificial Sequence
  Description of Artificial Sequence: Synthetic oligonucleotide
aaucguagagggcgccgaa

SEQ ID NO: 1129277 - RNA, 19 nt, Artificial Sequence
  Description of Artificial Sequence: Synthetic oligonucleotide
uauguguguaguggaucca

SEQ ID NO: 1129278 - RNA, 19 nt, Artificial Sequence
  Description of Artificial Sequence: Synthetic oligonucleotide
aaguguaguuucaggugga

SEQ ID NO: 1129279 - RNA, 19 nt, Artificial Sequence
  Description of Artificial Sequence: Synthetic oligonucleotide
gacuauaaccaauuuccuu

SEQ ID NO: 1129280 - RNA, 19 nt, Artificial Sequence
  Description of Artificial Sequence: Synthetic oligonucleotide
cauggguuguauaaucgua

SEQ ID NO: 1129281 - RNA, 19 nt, Artificial Sequence
  Description of Artificial Sequence: Synthetic oligonucleotide
uucggcggcugacguacag

SEQ ID NO: 1129282 - RNA, 19 nt, Artificial Sequence
  Description of Artificial Sequence: Synthetic oligonucleotide
caggcuguugacuacguua

SEQ ID NO: 1129283 - RNA, 19 nt, Artificial Sequence
  Description of Artificial Sequence: Synthetic oligonucleotide
cacggcaugcagaagugca

SEQ ID NO: 1129284 - RNA, 19 nt, Artificial Sequence
  Description of Artificial Sequence: Synthetic oligonucleotide
  modified_base (12)..(12): a, c, u, g, unknown or other
cuuggacaagunaggguga

SEQ ID NO: 1129285 - RNA, 19 nt, Artificial Sequence
  Description of Artificial Sequence: Synthetic oligonucleotide
cugacguacaguucuggaa

SEQ ID NO: 1129286 - RNA, 19 nt, Artificial Sequence
  Description of Artificial Sequence: Synthetic oligonucleotide
uucuggaggcugugagaag

SEQ ID NO: 1129287 - RNA, 19 nt, Artificial Sequence
  Description of Artificial Sequence: Synthetic oligonucleotide
cucggacaugaacuucugc

SEQ ID NO: 1129288 - RNA, 19 nt, Artificial Sequence
  Description of Artificial Sequence: Synthetic oligonucleotide
  modified_base (11)..(11): a, c, u, g, unknown or other
uuggacaagunagggugac

SEQ ID NO: 1129289 - RNA, 19 nt, Artificial Sequence
  Description of Artificial Sequence: Synthetic oligonucleotide
gggugacguaaucagggcc

SEQ ID NO: 1129290 - RNA, 19 nt, Artificial Sequence
  Description of Artificial Sequence: Synthetic oligonucleotide
agggauuacucaaugccau

SEQ ID NO: 1129291 - RNA, 19 nt, Artificial Sequence
  Description of Artificial Sequence: Synthetic oligonucleotide
accguccagaaaaugguca

SEQ ID NO: 1129292 - RNA, 19 nt, Artificial Sequence
  Description of Artificial Sequence: Synthetic oligonucleotide
cauuucuugaugugaagau

SEQ ID NO: 1129293 - RNA, 19 nt, Artificial Sequence
  Description of Artificial Sequence: Synthetic oligonucleotide
guugacuacguuagaggga

SEQ ID NO: 1129294 - RNA, 19 nt, Artificial Sequence
  Description of Artificial Sequence: Synthetic oligonucleotide
ugggguucagaggaggcau

SEQ ID NO: 1129295 - RNA, 19 nt, Artificial Sequence
  Description of Artificial Sequence: Synthetic oligonucleotide
cugcucauuucuugaugug

SEQ ID NO: 1129296 - RNA, 19 nt, Artificial Sequence
  Description of Artificial Sequence: Synthetic oligonucleotide
uguucuaggcaggccuuga

SEQ ID NO: 1129297 - RNA, 19 nt, Artificial Sequence
  Description of Artificial Sequence: Synthetic oligonucleotide
acuacguuagagggauucu

SEQ ID NO: 1129298 - RNA, 19 nt, Artificial Sequence
  Description of Artificial Sequence: Synthetic oligonucleotide
agaccugugggcaagcauu

SEQ ID NO: 1129299 - RNA, 19 nt, Artificial Sequence
  Description of Artificial Sequence: Synthetic oligonucleotide
auuuuaccuagaaggcacu

SEQ ID NO: 1129300 - RNA, 19 nt, Artificial Sequence
  Description of Artificial Sequence: Synthetic oligonucleotide
guaaucaagcuugcugcuc

SEQ ID NO: 1129301 - RNA, 19 nt, Artificial Sequence
  Description of Artificial Sequence: Synthetic oligonucleotide
gaaaauggucaggugacau

SEQ ID NO: 1129302 - RNA, 19 nt, Artificial Sequence
  Description of Artificial Sequence: Synthetic oligonucleotide
uuuuaccuagaaggcacuu

SEQ ID NO: 1129303 - RNA, 19 nt, Artificial Sequence
  Description of Artificial Sequence: Synthetic oligonucleotide
uuguucuaggcaggccuug

SEQ ID NO: 1129304 - RNA, 19 nt, Artificial Sequence
  Description of Artificial Sequence: Synthetic oligonucleotide
cuugccuggccaucaccac

SEQ ID NO: 1129305 - RNA, 19 nt, Artificial Sequence
  Description of Artificial Sequence: Synthetic oligonucleotide
ugcucucagggugacguaa

SEQ ID NO: 1129306 - RNA, 19 nt, Artificial Sequence
  Description of Artificial Sequence: Synthetic oligonucleotide
guaccccuccuuugcgagg

SEQ ID NO: 1129307 - RNA, 19 nt, Artificial Sequence
  Description of Artificial Sequence: Synthetic oligonucleotide
gacuuguucuaggcaggcc

SEQ ID NO: 1129308 - RNA, 19 nt, Artificial Sequence
  Description of Artificial Sequence: Synthetic oligonucleotide
agccauuucuaugugugua

SEQ ID NO: 1129309 - RNA, 19 nt, Artificial Sequence
  Description of Artificial Sequence: Synthetic oligonucleotide
caccaggcuguugacuacg

SEQ ID NO: 1129310 - RNA, 19 nt, Artificial Sequence
  Description of Artificial Sequence: Synthetic oligonucleotide
caccguccagaaaaugguc

SEQ ID NO: 1129311 - RNA, 19 nt, Artificial Sequence
  Description of Artificial Sequence: Synthetic oligonucleotide
agguugaacuucauccccu

SEQ ID NO: 1129312 - RNA, 19 nt, Artificial Sequence
  Description of Artificial Sequence: Synthetic oligonucleotide
ccaggcaagaauaucuaga

SEQ ID NO: 1129313 - RNA, 19 nt, Artificial Sequence
  Description of Artificial Sequence: Synthetic oligonucleotide
aacuugcagauggccagaa

SEQ ID NO: 1129314 - RNA, 19 nt, Artificial Sequence
  Description of Artificial Sequence: Synthetic oligonucleotide
ugcgagggccucaguuuca

SEQ ID NO: 1129315 - RNA, 19 nt, Artificial Sequence
  Description of Artificial Sequence: Synthetic oligonucleotide
aucguagagggcgccgaag

SEQ ID NO: 1129316 - RNA, 19 nt, Artificial Sequence
  Description of Artificial Sequence: Synthetic oligonucleotide
gcaugcuguauuguguggc

SEQ ID NO: 1129317 - RNA, 19 nt, Artificial Sequence
  Description of Artificial Sequence: Synthetic oligonucleotide
gaguuucccugcucauuuc

SEQ ID NO: 1129318 - RNA, 19 nt, Artificial Sequence
  Description of Artificial Sequence: Synthetic oligonucleotide
caggugacaucagggcagg

SEQ ID NO: 1129319 - RNA, 19 nt, Artificial Sequence
  Description of Artificial Sequence: Synthetic oligonucleotide
gucggaauucuggagcauc

SEQ ID NO: 1129320 - RNA, 19 nt, Artificial Sequence
  Description of Artificial Sequence: Synthetic oligonucleotide
augcuguauuguguggcug

SEQ ID NO: 1129321 - RNA, 19 nt, Artificial Sequence
  Description of Artificial Sequence: Synthetic oligonucleotide
guaguggauccaugcuuca

SEQ ID NO: 1129322 - RNA, 19 nt, Artificial Sequence
  Description of Artificial Sequence: Synthetic oligonucleotide
gguucagaggaggcauugg

SEQ ID NO: 1129323 - RNA, 19 nt, Artificial Sequence
  Description of Artificial Sequence: Synthetic oligonucleotide
uaccagacucagugggguc

SEQ ID NO: 1129324 - RNA, 19 nt, Artificial Sequence
  Description of Artificial Sequence: Synthetic oligonucleotide
aguuugcuaaaugcugauu

SEQ ID NO: 1129325 - RNA, 19 nt, Artificial Sequence
  Description of Artificial Sequence: Synthetic oligonucleotide
ccguccagaaaauggucag

SEQ ID NO: 1129326 - RNA, 19 nt, Artificial Sequence
  Description of Artificial Sequence: Synthetic oligonucleotide
  modified_base (19)..(19): a, c, u, g, unknown or other
cuugagucuuggacaagun

SEQ ID NO: 1129327 - RNA, 19 nt, Artificial Sequence
  Description of Artificial Sequence: Synthetic oligonucleotide
auacucaaggaaacagguu

SEQ ID NO: 1129328 - RNA, 19 nt, Artificial Sequence
  Description of Artificial Sequence: Synthetic oligonucleotide
gaacuugcagauggccaga

SEQ ID NO: 1129329 - RNA, 19 nt, Artificial Sequence
  Description of Artificial Sequence: Synthetic oligonucleotide
uggauccaugcuucauuuu

SEQ ID NO: 1129330 - RNA, 19 nt, Artificial Sequence
  Description of Artificial Sequence: Synthetic oligonucleotide
gcucuugagucuuggacaa

SEQ ID NO: 1129331 - RNA, 19 nt, Artificial Sequence
  Description of Artificial Sequence: Synthetic oligonucleotide
acguucuuuucgauucuga

SEQ ID NO: 1129332 - RNA, 19 nt, Artificial Sequence
  Description of Artificial Sequence: Synthetic oligonucleotide
gugaccccagucccucugc

SEQ ID NO: 1129333 - RNA, 19 nt, Artificial Sequence
  Description of Artificial Sequence: Synthetic oligonucleotide
aguguaguuucagguggau

SEQ ID NO: 1129334 - RNA, 19 nt, Artificial Sequence
  Description of Artificial Sequence: Synthetic oligonucleotide
guguaguggauccaugcuu

SEQ ID NO: 1129335 - RNA, 19 nt, Artificial Sequence
  Description of Artificial Sequence: Synthetic oligonucleotide
gaaucgacuucagcggacu

SEQ ID NO: 1129336 - RNA, 19 nt, Artificial Sequence
  Description of Artificial Sequence: Synthetic oligonucleotide
cugcucuaugaagacccug

SEQ ID NO: 1129337 - RNA, 19 nt, Artificial Sequence
  Description of Artificial Sequence: Synthetic oligonucleotide
caggagaccugugggcaag

SEQ ID NO: 1129338 - RNA, 19 nt, Artificial Sequence
  Description of Artificial Sequence: Synthetic oligonucleotide
ccagaucaguuuggaaucg

SEQ ID NO: 1129339 - RNA, 19 nt, Artificial Sequence
  Description of Artificial Sequence: Synthetic oligonucleotide
cuggaaauagaggagcgau

SEQ ID NO: 1129340 - RNA, 19 nt, Artificial Sequence
  Description of Artificial Sequence: Synthetic oligonucleotide
cauccagaucaguuuggaa

SEQ ID NO: 1129341 - RNA, 19 nt, Artificial Sequence
  Description of Artificial Sequence: Synthetic oligonucleotide
cuauaaccaauuuccuuuu

SEQ ID NO: 1129342 - RNA, 19 nt, Artificial Sequence
  Description of Artificial Sequence: Synthetic oligonucleotide
gucagcuuucuguaccccu

SEQ ID NO: 1129343 - RNA, 19 nt, Artificial Sequence
  Description of Artificial Sequence: Synthetic oligonucleotide
auaggccaggcaagaauau

SEQ ID NO: 1129344 - RNA, 19 nt, Artificial Sequence
  Description of Artificial Sequence: Synthetic oligonucleotide
cuguaccccuccuuugcga

SEQ ID NO: 1129345 - RNA, 19 nt, Artificial Sequence
  Description of Artificial Sequence: Synthetic oligonucleotide
gcugacguacaguucugga

SEQ ID NO: 1129346 - RNA, 19 nt, Artificial Sequence
  Description of Artificial Sequence: Synthetic oligonucleotide
caugcuguauuguguggcu

SEQ ID NO: 1129347 - RNA, 19 nt, Artificial Sequence
  Description of Artificial Sequence: Synthetic oligonucleotide
cugugugagcuugccuggc

SEQ ID NO: 1129348 - RNA, 19 nt, Artificial Sequence
  Description of Artificial Sequence: Synthetic oligonucleotide
gcugaauguguaucuuuaa

SEQ ID NO: 1129349 - RNA, 19 nt, Artificial Sequence
  Description of Artificial Sequence: Synthetic oligonucleotide
ggcugacguacaguucugg

SEQ ID NO: 1129350 - RNA, 19 nt, Artificial Sequence
  Description of Artificial Sequence: Synthetic oligonucleotide
ccaugaguauguacuccac

SEQ ID NO: 1129351 - RNA, 19 nt, Artificial Sequence
  Description of Artificial Sequence: Synthetic oligonucleotide
uuucggcggcugacguaca

SEQ ID NO: 1129352 - RNA, 19 nt, Artificial Sequence
  Description of Artificial Sequence: Synthetic oligonucleotide
accugugggcaagcauuuc

SEQ ID NO: 1129353 - RNA, 19 nt, Artificial Sequence
  Description of Artificial Sequence: Synthetic oligonucleotide
guggauccaugcuucauuu

SEQ ID NO: 1129354 - RNA, 19 nt, Artificial Sequence
  Description of Artificial Sequence: Synthetic oligonucleotide
cagauccacggcagagguc

SEQ ID NO: 1129355 - RNA, 19 nt, Artificial Sequence
  Description of Artificial Sequence: Synthetic oligonucleotide
guaagaauccagaggcaau

SEQ ID NO: 1129356 - RNA, 19 nt, Artificial Sequence
  Description of Artificial Sequence: Synthetic oligonucleotide
cuuuucgauucugacuugu

SEQ ID NO: 1129357 - RNA, 19 nt, Artificial Sequence
  Description of Artificial Sequence: Synthetic oligonucleotide
guggauucuggaggcugug

SEQ ID NO: 1129358 - RNA, 19 nt, Artificial Sequence
  Description of Artificial Sequence: Synthetic oligonucleotide
ucgcucucagcuggaaaua

SEQ ID NO: 1129359 - RNA, 19 nt, Artificial Sequence
  Description of Artificial Sequence: Synthetic oligonucleotide
ccauuuuaccuagaaggca

SEQ ID NO: 1129360 - RNA, 19 nt, Artificial Sequence
  Description of Artificial Sequence: Synthetic oligonucleotide
cuuugcgagggccucaguu

SEQ ID NO: 1129361 - RNA, 19 nt, Artificial Sequence
  Description of Artificial Sequence: Synthetic oligonucleotide
cagcacgucaccguccaga

SEQ ID NO: 1129362 - RNA, 19 nt, Artificial Sequence
  Description of Artificial Sequence: Synthetic oligonucleotide
ugucggaauucuggagcau

SEQ ID NO: 1129363 - RNA, 19 nt, Artificial Sequence
  Description of Artificial Sequence: Synthetic oligonucleotide
ucggcggcugacguacagu

SEQ ID NO: 1129364 - RNA, 19 nt, Artificial Sequence
  Description of Artificial Sequence: Synthetic oligonucleotide
gcggcugacguacaguucu

SEQ ID NO: 1129365 - RNA, 19 nt, Artificial Sequence
  Description of Artificial Sequence: Synthetic oligonucleotide
auagcauccuuuggcucuu

SEQ ID NO: 1129366 - RNA, 19 nt, Artificial Sequence
  Description of Artificial Sequence: Synthetic oligonucleotide
ggagcauccagaucaguuu

SEQ ID NO: 1129367 - RNA, 19 nt, Artificial Sequence
  Description of Artificial Sequence: Synthetic oligonucleotide
gcuugccuggccaucacca

SEQ ID NO: 1129368 - RNA, 19 nt, Artificial Sequence
  Description of Artificial Sequence: Synthetic oligonucleotide
gagaccugugggcaagcau

SEQ ID NO: 1129369 - RNA, 19 nt, Artificial Sequence
  Description of Artificial Sequence: Synthetic oligonucleotide
ggaaucgacuucagcggac

SEQ ID NO: 1129370 - RNA, 19 nt, Artificial Sequence
  Description of Artificial Sequence: Synthetic oligonucleotide
gcuguauuguguggcuggc

SEQ ID NO: 1129371 - RNA, 19 nt, Artificial Sequence
  Description of Artificial Sequence: Synthetic oligonucleotide
guguggauuacagccauuu

SEQ ID NO: 1129372 - RNA, 19 nt, Artificial Sequence
  Description of Artificial Sequence: Synthetic oligonucleotide
cuucgcucucagcuggaaa

SEQ ID NO: 1129373 - RNA, 19 nt, Artificial Sequence
  Description of Artificial Sequence: Synthetic oligonucleotide
ucucuacucucaggggauu

SEQ ID NO: 1129374 - RNA, 19 nt, Artificial Sequence
  Description of Artificial Sequence: Synthetic oligonucleotide
cucaggggauucagagaga

SEQ ID NO: 1129375 - RNA, 19 nt, Artificial Sequence
  Description of Artificial Sequence: Synthetic oligonucleotide
cagaucaguuuggaaucga

SEQ ID NO: 1129376 - RNA, 19 nt, Artificial Sequence
  Description of Artificial Sequence: Synthetic oligonucleotide
agacuucaagaaggucagu

SEQ ID NO: 1129377 - RNA, 19 nt, Artificial Sequence
  Description of Artificial Sequence: Synthetic oligonucleotide
  modified_base (3)..(3): a, c, u, g, unknown or other
gunagggugacagcaccau

SEQ ID NO: 1129378 - RNA, 19 nt, Artificial Sequence
  Description of Artificial Sequence: Synthetic oligonucleotide
ccaauccuugguuggcauc

SEQ ID NO: 1129379 - RNA, 19 nt, Artificial Sequence
  Description of Artificial Sequence: Synthetic oligonucleotide
gcgaugagaggcacuuggc

SEQ ID NO: 1129380 - RNA, 19 nt, Artificial Sequence
  Description of Artificial Sequence: Synthetic oligonucleotide
acguacaguucuggaacuu

SEQ ID NO: 1129381 - RNA, 19 nt, Artificial Sequence
  Description of Artificial Sequence: Synthetic oligonucleotide
ugacuacguuagagggauu

SEQ ID NO: 1129382 - RNA, 19 nt, Artificial Sequence
  Description of Artificial Sequence: Synthetic oligonucleotide
cggaggaaaucaagaaguc

SEQ ID NO: 1129383 - RNA, 19 nt, Artificial Sequence
  Description of Artificial Sequence: Synthetic oligonucleotide
gcucagggacgcuuuggca

SEQ ID NO: 1129384 - RNA, 19 nt, Artificial Sequence
  Description of Artificial Sequence: Synthetic oligonucleotide
ggcucuuaaaguguaguuu

SEQ ID NO: 1129385 - RNA, 19 nt, Artificial Sequence
  Description of Artificial Sequence: Synthetic oligonucleotide
ugacguaaucagggccaau

SEQ ID NO: 1129386 - RNA, 19 nt, Artificial Sequence
  Description of Artificial Sequence: Synthetic oligonucleotide
cauuucggcggcugacgua

SEQ ID NO: 1129387 - RNA, 19 nt, Artificial Sequence
  Description of Artificial Sequence: Synthetic oligonucleotide
ggacgcuuuggcagccucc

SEQ ID NO: 1129388 - RNA, 19 nt, Artificial Sequence
  Description of Artificial Sequence: Synthetic oligonucleotide
cuacguucuuuucgauucu

SEQ ID NO: 1129389 - RNA, 19 nt, Artificial Sequence
  Description of Artificial Sequence: Synthetic oligonucleotide
aggagcgaugagaggcacu

SEQ ID NO: 1129390 - RNA, 19 nt, Artificial Sequence
  Description of Artificial Sequence: Synthetic oligonucleotide
ccuugguuggcauccaggu

SEQ ID NO: 1129391 - RNA, 19 nt, Artificial Sequence
  Description of Artificial Sequence: Synthetic oligonucleotide
ggcacagauccacggcaga

SEQ ID NO: 1129392 - RNA, 19 nt, Artificial Sequence
  Description of Artificial Sequence: Synthetic oligonucleotide
ggauuacagccauuucuau

SEQ ID NO: 1129393 - RNA, 19 nt, Artificial Sequence
  Description of Artificial Sequence: Synthetic oligonucleotide
cugcaagucagcucucauu

SEQ ID NO: 1129394 - RNA, 19 nt, Artificial Sequence
  Description of Artificial Sequence: Synthetic oligonucleotide
caguguggauuacagccau

SEQ ID NO: 1129395 - RNA, 19 nt, Artificial Sequence
  Description of Artificial Sequence: Synthetic oligonucleotide
gugacguaaucagggccaa

SEQ ID NO: 1129396 - RNA, 19 nt, Artificial Sequence
  Description of Artificial Sequence: Synthetic oligonucleotide
cgaugagaggcacuuggca

SEQ ID NO: 1129397 - RNA, 19 nt, Artificial Sequence
  Description of Artificial Sequence: Synthetic oligonucleotide
gggccaauccuugguuggc

SEQ ID NO: 1129398 - RNA, 19 nt, Artificial Sequence
  Description of Artificial Sequence: Synthetic oligonucleotide
uggcugcaucaaagaacuu

SEQ ID NO: 1129399 - RNA, 19 nt, Artificial Sequence
  Description of Artificial Sequence: Synthetic oligonucleotide
cauccccuccaaagcggga

SEQ ID NO: 1129400 - RNA, 19 nt, Artificial Sequence
  Description of Artificial Sequence: Synthetic oligonucleotide
gagggcgccgaaggugaga

SEQ ID NO: 1129401 - RNA, 19 nt, Artificial Sequence
  Description of Artificial Sequence: Synthetic oligonucleotide
ggucaguaacucggacaug

SEQ ID NO: 1129402 - RNA, 19 nt, Artificial Sequence
  Description of Artificial Sequence: Synthetic oligonucleotide
guacucggcucagcaucac

SEQ ID NO: 1129403 - RNA, 19 nt, Artificial Sequence
  Description of Artificial Sequence: Synthetic oligonucleotide
aguguggauuacagccauu

SEQ ID NO: 1129404 - RNA, 19 nt, Artificial Sequence
  Description of Artificial Sequence: Synthetic oligonucleotide
gcgagggccucaguuucag

SEQ ID NO: 1129405 - RNA, 19 nt, Artificial Sequence
  Description of Artificial Sequence: Synthetic oligonucleotide
gcucucagcuggaaauaga

SEQ ID NO: 1129406 - RNA, 19 nt, Artificial Sequence
  Description of Artificial Sequence: Synthetic oligonucleotide
gggacgcuuuggcagccuc

SEQ ID NO: 1129407 - RNA, 19 nt, Artificial Sequence
  Description of Artificial Sequence: Synthetic oligonucleotide
ggcuguugacuacguuaga

SEQ ID NO: 1129408 - RNA, 19 nt, Artificial Sequence
  Description of Artificial Sequence: Synthetic oligonucleotide
ggcuacguucuuuucgauu

SEQ ID NO: 1129409 - RNA, 19 nt, Artificial Sequence
  Description of Artificial Sequence: Synthetic oligonucleotide
ggccaauccuugguuggca

SEQ ID NO: 1129410 - RNA, 19 nt, Artificial Sequence
  Description of Artificial Sequence: Synthetic oligonucleotide
gaccugugggcaagcauuu

SEQ ID NO: 1129411 - RNA, 19 nt, Artificial Sequence
  Description of Artificial Sequence: Synthetic oligonucleotide
agggacgcuuuggcagccu

SEQ ID NO: 1129412 - RNA, 19 nt, Artificial Sequence
  Description of Artificial Sequence: Synthetic oligonucleotide
ggcgccgaaggugagacuu

SEQ ID NO: 1129413 - RNA, 19 nt, Artificial Sequence
  Description of Artificial Sequence: Synthetic oligonucleotide
gggauucagagagaugcuu

SEQ ID NO: 1129414 - RNA, 19 nt, Artificial Sequence
  Description of Artificial Sequence: Synthetic oligonucleotide
cucuggucagcuggaggua

SEQ ID NO: 1129415 - RNA, 19 nt, Artificial Sequence
  Description of Artificial Sequence: Synthetic oligonucleotide
cuguauuguguggcuggcu

SEQ ID NO: 1129416 - RNA, 19 nt, Artificial Sequence
  Description of Artificial Sequence: Synthetic oligonucleotide
gggugacagcaccaugagu

SEQ ID NO: 1129417 - RNA, 19 nt, Artificial Sequence
  Description of Artificial Sequence: Synthetic oligonucleotide
guagaugcucagggacgcu

SEQ ID NO: 1129418 - RNA, 19 nt, Artificial Sequence
  Description of Artificial Sequence: Synthetic oligonucleotide
cugcucucagggugacgua

SEQ ID NO: 1129419 - RNA, 19 nt, Artificial Sequence
  Description of Artificial Sequence: Synthetic oligonucleotide
gccaauccuugguuggcau

SEQ ID NO: 1129420 - RNA, 19 nt, Artificial Sequence
  Description of Artificial Sequence: Synthetic oligonucleotide
ggcggcugacguacaguuc

SEQ ID NO: 1129421 - RNA, 19 nt, Artificial Sequence
  Description of Artificial Sequence: Synthetic oligonucleotide
ccuccuuugcgagggccuc

SEQ ID NO: 1129422 - RNA, 19 nt, Artificial Sequence
  Description of Artificial Sequence: Synthetic oligonucleotide
ccauuucuauguguguagu

SEQ ID NO: 1129423 - RNA, 19 nt, Artificial Sequence
  Description of Artificial Sequence: Synthetic oligonucleotide
ggggauucagagagaugcu

SEQ ID NO: 1129424 - RNA, 19 nt, Artificial Sequence
  Description of Artificial Sequence: Synthetic oligonucleotide
cggcugacguacaguucug

SEQ ID NO: 1129425 - RNA, 19 nt, Artificial Sequence
  Description of Artificial Sequence: Synthetic oligonucleotide
gcacgucaccguccagaaa

SEQ ID NO: 1129426 - RNA, 19 nt, Artificial Sequence
  Description of Artificial Sequence: Synthetic oligonucleotide
gcgccgaaggugagacuuc

SEQ ID NO: 1129427 - RNA, 19 nt, Artificial Sequence
  Description of Artificial Sequence: Synthetic oligonucleotide
ccugcucuaugaagacccu

SEQ ID NO: 1129428 - RNA, 19 nt, Artificial Sequence
  Description of Artificial Sequence: Synthetic oligonucleotide
gccgaaggugagacuucaa

SEQ ID NO: 1129429 - RNA, 19 nt, Artificial Sequence
  Description of Artificial Sequence: Synthetic oligonucleotide
gauccacggcagaggucuu

SEQ ID NO: 1129430 - RNA, 19 nt, Artificial Sequence
  Description of Artificial Sequence: Synthetic oligonucleotide
ccuuugcgagggccucagu

SEQ ID NO: 1129431 - RNA, 19 nt, Artificial Sequence
  Description of Artificial Sequence: Synthetic oligonucleotide
aaaacuaucauuugacaac

SEQ ID NO: 1129432 - RNA, 19 nt, Artificial Sequence
  Description of Artificial Sequence: Synthetic oligonucleotide
ucuuuauggacauagaucc

SEQ ID NO: 1129433 - RNA, 19 nt, Artificial Sequence
  Description of Artificial Sequence: Synthetic oligonucleotide
aacuacacgacacacagag

SEQ ID NO: 1129434 - RNA, 19 nt, Artificial Sequence
  Description of Artificial Sequence: Synthetic oligonucleotide
ucaaugaggacucauuugg

SEQ ID NO: 1129435 - RNA, 19 nt, Artificial Sequence
  Description of Artificial Sequence: Synthetic oligonucleotide
uuuauuacuuuacucauga

SEQ ID NO: 1129436 - RNA, 19 nt, Artificial Sequence
  Description of Artificial Sequence: Synthetic oligonucleotide
uggauaauauuucugaagu

SEQ ID NO: 1129437 - RNA, 19 nt, Artificial Sequence
  Description of Artificial Sequence: Synthetic oligonucleotide
aauacuuacaccaacuaca

SEQ ID NO: 1129438 - RNA, 19 nt, Artificial Sequence
  Description of Artificial Sequence: Synthetic oligonucleotide
aaauuugauaugcugagaa

SEQ ID NO: 1129439 - RNA, 19 nt, Artificial Sequence
  Description of Artificial Sequence: Synthetic oligonucleotide
accauuaaaacuugaagag

SEQ ID NO: 1129440 - RNA, 19 nt, Artificial Sequence
  Description of Artificial Sequence: Synthetic oligonucleotide
aagucuagccgguugaagg

SEQ ID NO: 1129441 - RNA, 19 nt, Artificial Sequence
  Description of Artificial Sequence: Synthetic oligonucleotide
uaucauuugacaacuaaga

SEQ ID NO: 1129442 - RNA, 19 nt, Artificial Sequence
  Description of Artificial Sequence: Synthetic oligonucleotide
auuacuuuacucaugaaag

SEQ ID NO: 1129443 - RNA, 19 nt, Artificial Sequence
  Description of Artificial Sequence: Synthetic oligonucleotide
ucugaaaggaucaaguguc

SEQ ID NO: 1129444 - RNA, 19 nt, Artificial Sequence
  Description of Artificial Sequence: Synthetic oligonucleotide
ugguuuauuacuuuacuca

SEQ ID NO: 1129445 - RNA, 19 nt, Artificial Sequence
  Description of Artificial Sequence: Synthetic oligonucleotide
uuugauaugcugagaagag

SEQ ID NO: 1129446 - RNA, 19 nt, Artificial Sequence
  Description of Artificial Sequence: Synthetic oligonucleotide
ugcauauucacacucauua

SEQ ID NO: 1129447 - RNA, 19 nt, Artificial Sequence
  Description of Artificial Sequence: Synthetic oligonucleotide
ugcaaauuugauaugcuga

SEQ ID NO: 1129448 - RNA, 19 nt, Artificial Sequence
  Description of Artificial Sequence: Synthetic oligonucleotide
cuaacaaggaugcaaagug

SEQ ID NO: 1129449 - RNA, 19 nt, Artificial Sequence
  Description of Artificial Sequence: Synthetic oligonucleotide
aaguguagagcucaagucu

SEQ ID NO: 1129450 - RNA, 19 nt, Artificial Sequence
  Description of Artificial Sequence: Synthetic oligonucleotide
aauuugauaugcugagaag

SEQ ID NO: 1129451 - RNA, 19 nt, Artificial Sequence
  Description of Artificial Sequence: Synthetic oligonucleotide
ugcauaauguauuuacaag

SEQ ID NO: 1129452 - RNA, 19 nt, Artificial Sequence
  Description of Artificial Sequence: Synthetic oligonucleotide
uuuacaaggaccaacuguu

SEQ ID NO: 1129453 - RNA, 19 nt, Artificial Sequence
  Description of Artificial Sequence: Synthetic oligonucleotide
ugagaacaguuucuaagcg

SEQ ID NO: 1129454 - RNA, 19 nt, Artificial Sequence
  Description of Artificial Sequence: Synthetic oligonucleotide
uuuugcacgauuuuaucca

SEQ ID NO: 1129455 - RNA, 19 nt, Artificial Sequence
  Description of Artificial Sequence: Synthetic oligonucleotide
ucauuugacaacuaagaaa

SEQ ID NO: 1129456 - RNA, 19 nt, Artificial Sequence
  Description of Artificial Sequence: Synthetic oligonucleotide
cuacacgacacacagagag

SEQ ID NO: 1129457 - RNA, 19 nt, Artificial Sequence
  Description of Artificial Sequence: Synthetic oligonucleotide
uauuagaagauggaaaacu

SEQ ID NO: 1129458 - RNA, 19 nt, Artificial Sequence
  Description of Artificial Sequence: Synthetic oligonucleotide
agaagggccgcacagguac

SEQ ID NO: 1129459 - RNA, 19 nt, Artificial Sequence
  Description of Artificial Sequence: Synthetic oligonucleotide
aauguggggcugaauaucc

SEQ ID NO: 1129460 - RNA, 19 nt, Artificial Sequence
  Description of Artificial Sequence: Synthetic oligonucleotide
acaagagucacaucuuuuc

SEQ ID NO: 1129461 - RNA, 19 nt, Artificial Sequence
  Description of Artificial Sequence: Synthetic oligonucleotide
aguuggauaauauuucuga

SEQ ID NO: 1129462 - RNA, 19 nt, Artificial Sequence
  Description of Artificial Sequence: Synthetic oligonucleotide
agaacaguuucuaagcggc

SEQ ID NO: 1129463 - RNA, 19 nt, Artificial Sequence
  Description of Artificial Sequence: Synthetic oligonucleotide
ugauguuucccacuaagac

SEQ ID NO: 1129464 - RNA, 19 nt, Artificial Sequence
  Description of Artificial Sequence: Synthetic oligonucleotide
aauuauuagaagauggaaa

SEQ ID NO: 1129465 - RNA, 19 nt, Artificial Sequence
  Description of Artificial Sequence: Synthetic oligonucleotide
aguuugaccacguauguga

SEQ ID NO: 1129466 - RNA, 19 nt, Artificial Sequence
  Description of Artificial Sequence: Synthetic oligonucleotide
uucugaaaggaucaagugu

SEQ ID NO: 1129467 - RNA, 19 nt, Artificial Sequence
  Description of Artificial Sequence: Synthetic oligonucleotide
augguuuauuacuuuacuc

SEQ ID NO: 1129468 - RNA, 19 nt, Artificial Sequence
  Description of Artificial Sequence: Synthetic oligonucleotide
gagaacaguuucuaagcgg

SEQ ID NO: 1129469 - RNA, 19 nt, Artificial Sequence
  Description of Artificial Sequence: Synthetic oligonucleotide
cacgauuuuauccaggaug

SEQ ID NO: 1129470 - RNA, 19 nt, Artificial Sequence
  Description of Artificial Sequence: Synthetic oligonucleotide
uuugugucaaagaauacuu

SEQ ID NO: 1129471 - RNA, 19 nt, Artificial Sequence
  Description of Artificial Sequence: Synthetic oligonucleotide
uuugugucaguucaacaca

SEQ ID NO: 1129472 - RNA, 19 nt, Artificial Sequence
  Description of Artificial Sequence: Synthetic oligonucleotide
cauguaaggauguaugaug

SEQ ID NO: 1129473 - RNA, 19 nt, Artificial Sequence
  Description of Artificial Sequence: Synthetic oligonucleotide
uuggcaaucagcugcagca

SEQ ID NO: 1129474 - RNA, 19 nt, Artificial Sequence
  Description of Artificial Sequence: Synthetic oligonucleotide
uagaagauggaaaacuauc

SEQ ID NO: 1129475 - RNA, 19 nt, Artificial Sequence
  Description of Artificial Sequence: Synthetic oligonucleotide
uuucuaagcggcaaaucca

SEQ ID NO: 1129476 - RNA, 19 nt, Artificial Sequence
  Description of Artificial Sequence: Synthetic oligonucleotide
guuugugucaguucaacac

SEQ ID NO: 1129477 - RNA, 19 nt, Artificial Sequence
  Description of Artificial Sequence: Synthetic oligonucleotide
ucugagaaacgguacagga

SEQ ID NO: 1129478 - RNA, 19 nt, Artificial Sequence
  Description of Artificial Sequence: Synthetic oligonucleotide
uaagcggcaaauccaaaug

SEQ ID NO: 1129479 - RNA, 19 nt, Artificial Sequence
  Description of Artificial Sequence: Synthetic oligonucleotide
uuugagauguccacucuca

SEQ ID NO: 1129480 - RNA, 19 nt, Artificial Sequence
  Description of Artificial Sequence: Synthetic oligonucleotide
uccacucucacugaugccg

SEQ ID NO: 1129481 - RNA, 19 nt, Artificial Sequence
  Description of Artificial Sequence: Synthetic oligonucleotide
ugauaugcugagaagaguu

SEQ ID NO: 1129482 - RNA, 19 nt, Artificial Sequence
  Description of Artificial Sequence: Synthetic oligonucleotide
gaaguaguucuucugcgcc

SEQ ID NO: 1129483 - RNA, 19 nt, Artificial Sequence
  Description of Artificial Sequence: Synthetic oligonucleotide
aaggauguaugauggccuc

SEQ ID NO: 1129484 - RNA, 19 nt, Artificial Sequence
  Description of Artificial Sequence: Synthetic oligonucleotide
uugaccacguaugugaacc

SEQ ID NO: 1129485 - RNA, 19 nt, Artificial Sequence
  Description of Artificial Sequence: Synthetic oligonucleotide
aauguugauguuucccacu

SEQ ID NO: 1129486 - RNA, 19 nt, Artificial Sequence
  Description of Artificial Sequence: Synthetic oligonucleotide
uaaggauguaugauggccu

SEQ ID NO: 1129487 - RNA, 19 nt, Artificial Sequence
  Description of Artificial Sequence: Synthetic oligonucleotide
gaaaggaucaagugucuac

SEQ ID NO: 1129488 - RNA, 19 nt, Artificial Sequence
  Description of Artificial Sequence: Synthetic oligonucleotide
uucaucccaauuauuagaa

SEQ ID NO: 1129489 - RNA, 19 nt, Artificial Sequence
  Description of Artificial Sequence: Synthetic oligonucleotide
guugauguuucccacuaag

SEQ ID NO: 1129490 - RNA, 19 nt, Artificial Sequence
  Description of Artificial Sequence: Synthetic oligonucleotide
ucugcauaauguauuuaca

SEQ ID NO: 1129491 - RNA, 19 nt, Artificial Sequence
  Description of Artificial Sequence: Synthetic oligonucleotide
accauuauucaaaauaaug

SEQ ID NO: 1129492 - RNA, 19 nt, Artificial Sequence
  Description of Artificial Sequence: Synthetic oligonucleotide
uugcaaauuugauaugcug

SEQ ID NO: 1129493 - RNA, 19 nt, Artificial Sequence
  Description of Artificial Sequence: Synthetic oligonucleotide
uucaaugaggacucauuug

SEQ ID NO: 1129494 - RNA, 19 nt, Artificial Sequence
  Description of Artificial Sequence: Synthetic oligonucleotide
auguaaggauguaugaugg

SEQ ID NO: 1129495 - RNA, 19 nt, Artificial Sequence
  Description of Artificial Sequence: Synthetic oligonucleotide
uuagaagauggaaaacuau

SEQ ID NO: 1129496 - RNA, 19 nt, Artificial Sequence
  Description of Artificial Sequence: Synthetic oligonucleotide
uucacacucauuauugaau

SEQ ID NO: 1129497 - RNA, 19 nt, Artificial Sequence
  Description of Artificial Sequence: Synthetic oligonucleotide
aaaggaucaagugucuaca

SEQ ID NO: 1129498 - RNA, 19 nt, Artificial Sequence
  Description of Artificial Sequence: Synthetic oligonucleotide
uucugaaguguaaaauaca

SEQ ID NO: 1129499 - RNA, 19 nt, Artificial Sequence
  Description of Artificial Sequence: Synthetic oligonucleotide
uguaaagugucuccauacu

SEQ ID NO: 1129500 - RNA, 19 nt, Artificial Sequence
  Description of Artificial Sequence: Synthetic oligonucleotide
uuacucaugaaaguaauuu

SEQ ID NO: 1129501 - RNA, 19 nt, Artificial Sequence
  Description of Artificial Sequence: Synthetic oligonucleotide
caucugguauucaaugagg

SEQ ID NO: 1129502 - RNA, 19 nt, Artificial Sequence
  Description of Artificial Sequence: Synthetic oligonucleotide
acaagggacaacugcggac

SEQ ID NO: 1129503 - RNA, 19 nt, Artificial Sequence
  Description of Artificial Sequence: Synthetic oligonucleotide
auauucacacucauuauug

SEQ ID NO: 1129504 - RNA, 19 nt, Artificial Sequence
  Description of Artificial Sequence: Synthetic oligonucleotide
uccugaauugcacuugaga

SEQ ID NO: 1129505 - RNA, 19 nt, Artificial Sequence
  Description of Artificial Sequence: Synthetic oligonucleotide
guaaagugucuccauacug

SEQ ID NO: 1129506 - RNA, 19 nt, Artificial Sequence
  Description of Artificial Sequence: Synthetic oligonucleotide
aaacuugaagaggucaaug

SEQ ID NO: 1129507 - RNA, 19 nt, Artificial Sequence
  Description of Artificial Sequence: Synthetic oligonucleotide
agauaaacaugguuuauua

SEQ ID NO: 1129508 - RNA, 19 nt, Artificial Sequence
  Description of Artificial Sequence: Synthetic oligonucleotide
gugucuacaaaacugcuuc

SEQ ID NO: 1129509 - RNA, 19 nt, Artificial Sequence
  Description of Artificial Sequence: Synthetic oligonucleotide
ugaaguaguucuucugcgc

SEQ ID NO: 1129510 - RNA, 19 nt, Artificial Sequence
  Description of Artificial Sequence: Synthetic oligonucleotide
aguagauaaacaugguuua

SEQ ID NO: 1129511 - RNA, 19 nt, Artificial Sequence
  Description of Artificial Sequence: Synthetic oligonucleotide
cacuugagaagucuagccg

SEQ ID NO: 1129512 - RNA, 19 nt, Artificial Sequence
  Description of Artificial Sequence: Synthetic oligonucleotide
ucuaacaaggaugcaaagu

SEQ ID NO: 1129513 - RNA, 19 nt, Artificial Sequence
  Description of Artificial Sequence: Synthetic oligonucleotide
cccaauuauuagaagaugg

SEQ ID NO: 1129514 - RNA, 19 nt, Artificial Sequence
  Description of Artificial Sequence: Synthetic oligonucleotide
cuacaaaacugcuucucag

SEQ ID NO: 1129515 - RNA, 19 nt, Artificial Sequence
  Description of Artificial Sequence: Synthetic oligonucleotide
aaauguaaagugucuccau

SEQ ID NO: 1129516 - RNA, 19 nt, Artificial Sequence
  Description of Artificial Sequence: Synthetic oligonucleotide
auacuuacaccaacuacac

SEQ ID NO: 1129517 - RNA, 19 nt, Artificial Sequence
  Description of Artificial Sequence: Synthetic oligonucleotide
gacaacugcggacaagggc

SEQ ID NO: 1129518 - RNA, 19 nt, Artificial Sequence
  Description of Artificial Sequence: Synthetic oligonucleotide
uuugcacgauuuuauccag

SEQ ID NO: 1129519 - RNA, 19 nt, Artificial Sequence
  Description of Artificial Sequence: Synthetic oligonucleotide
uaacaaggaugcaaagugu

SEQ ID NO: 1129520 - RNA, 19 nt, Artificial Sequence
  Description of Artificial Sequence: Synthetic oligonucleotide
agcgugacaaugucccagc

SEQ ID NO: 1129521 - RNA, 19 nt, Artificial Sequence
  Description of Artificial Sequence: Synthetic oligonucleotide
ugcuuagucaucugaagau

SEQ ID NO: 1129522 - RNA, 19 nt, Artificial Sequence
  Description of Artificial Sequence: Synthetic oligonucleotide
ugcacgauuuuauccagga

SEQ ID NO: 1129523 - RNA, 19 nt, Artificial Sequence
  Description of Artificial Sequence: Synthetic oligonucleotide
aauugcacuugagaagucu

SEQ ID NO: 1129524 - RNA, 19 nt, Artificial Sequence
  Description of Artificial Sequence: Synthetic oligonucleotide
aggaaagaagcgugagugg

SEQ ID NO: 1129525 - RNA, 19 nt, Artificial Sequence
  Description of Artificial Sequence: Synthetic oligonucleotide
uauucacacucauuauuga

SEQ ID NO: 1129526 - RNA, 19 nt, Artificial Sequence
  Description of Artificial Sequence: Synthetic oligonucleotide
ugcagugccgacagaaaug

SEQ ID NO: 1129527 - RNA, 19 nt, Artificial Sequence
  Description of Artificial Sequence: Synthetic oligonucleotide
agaagauggaaaacuauca

SEQ ID NO: 1129528 - RNA, 19 nt, Artificial Sequence
  Description of Artificial Sequence: Synthetic oligonucleotide
uauucaaugaggacucauu

SEQ ID NO: 1129529 - RNA, 19 nt, Artificial Sequence
  Description of Artificial Sequence: Synthetic oligonucleotide
uuuauggacauagauccau

SEQ ID NO: 1129530 - RNA, 19 nt, Artificial Sequence
  Description of Artificial Sequence: Synthetic oligonucleotide
uucuaagcggcaaauccaa

SEQ ID NO: 1129531 - RNA, 19 nt, Artificial Sequence
  Description of Artificial Sequence: Synthetic oligonucleotide
acucaugaaaguaauuucu

SEQ ID NO: 1129532 - RNA, 19 nt, Artificial Sequence
  Description of Artificial Sequence: Synthetic oligonucleotide
ugacauaguuucuuccaca

SEQ ID NO: 1129533 - RNA, 19 nt, Artificial Sequence
  Description of Artificial Sequence: Synthetic oligonucleotide
gaaauguaaagugucucca

SEQ ID NO: 1129534 - RNA, 19 nt, Artificial Sequence
  Description of Artificial Sequence: Synthetic oligonucleotide
ugucaguucaacacagaau

SEQ ID NO: 1129535 - RNA, 19 nt, Artificial Sequence
  Description of Artificial Sequence: Synthetic oligonucleotide
agagcucaagucuuggaga

SEQ ID NO: 1129536 - RNA, 19 nt, Artificial Sequence
  Description of Artificial Sequence: Synthetic oligonucleotide
acguaugugaaccuucuaa

SEQ ID NO: 1129537 - RNA, 19 nt, Artificial Sequence
  Description of Artificial Sequence: Synthetic oligonucleotide
uguaaggauguaugauggc

SEQ ID NO: 1129538 - RNA, 19 nt, Artificial Sequence
  Description of Artificial Sequence: Synthetic oligonucleotide
accccucuaacaaggaugc

SEQ ID NO: 1129539 - RNA, 19 nt, Artificial Sequence
  Description of Artificial Sequence: Synthetic oligonucleotide
cuuacaccaacuacacgac

SEQ ID NO: 1129540 - RNA, 19 nt, Artificial Sequence
  Description of Artificial Sequence: Synthetic oligonucleotide
ucacuuugugucaaagaau

SEQ ID NO: 1129541 - RNA, 19 nt, Artificial Sequence
  Description of Artificial Sequence: Synthetic oligonucleotide
gaucaagugucuacaaaac

SEQ ID NO: 1129542 - RNA, 19 nt, Artificial Sequence
  Description of Artificial Sequence: Synthetic oligonucleotide
caaugaggacucauuuggg

SEQ ID NO: 1129543 - RNA, 19 nt, Artificial Sequence
  Description of Artificial Sequence: Synthetic oligonucleotide
aguuucaggaaagaagcgu

SEQ ID NO: 1129544 - RNA, 19 nt, Artificial Sequence
  Description of Artificial Sequence: Synthetic oligonucleotide
aguucaggccucucuggac

SEQ ID NO: 1129545 - RNA, 19 nt, Artificial Sequence
  Description of Artificial Sequence: Synthetic oligonucleotide
ucuuugauaaggcgaggau

SEQ ID NO: 1129546 - RNA, 19 nt, Artificial Sequence
  Description of Artificial Sequence: Synthetic oligonucleotide
auacaaaauugcaaauuug

SEQ ID NO: 1129547 - RNA, 19 nt, Artificial Sequence
  Description of Artificial Sequence: Synthetic oligonucleotide
aaacgguacaggauguugu

SEQ ID NO: 1129548 - RNA, 19 nt, Artificial Sequence
  Description of Artificial Sequence: Synthetic oligonucleotide
uacuuuacucaugaaagua

SEQ ID NO: 1129549 - RNA, 19 nt, Artificial Sequence
  Description of Artificial Sequence: Synthetic oligonucleotide
ugcgccacuccacucagug

SEQ ID NO: 1129550 - RNA, 19 nt, Artificial Sequence
  Description of Artificial Sequence: Synthetic oligonucleotide
uuugugcuuucuuuaugga

SEQ ID NO: 1129551 - RNA, 19 nt, Artificial Sequence
  Description of Artificial Sequence: Synthetic oligonucleotide
ucaucccaauuauuagaag

SEQ ID NO: 1129552 - RNA, 19 nt, Artificial Sequence
  Description of Artificial Sequence: Synthetic oligonucleotide
gaaacgguacaggauguug

SEQ ID NO: 1129553 - RNA, 19 nt, Artificial Sequence
  Description of Artificial Sequence: Synthetic oligonucleotide
gcaccauuaaaacuugaag

SEQ ID NO: 1129554 - RNA, 19 nt, Artificial Sequence
  Description of Artificial Sequence: Synthetic oligonucleotide
aaacaugguuuauuacuuu

SEQ ID NO: 1129555 - RNA, 19 nt, Artificial Sequence
  Description of Artificial Sequence: Synthetic oligonucleotide
agcaguuugaccacguaug

SEQ ID NO: 1129556 - RNA, 19 nt, Artificial Sequence
  Description of Artificial Sequence: Synthetic oligonucleotide
acgauuuuauccaggaugu

SEQ ID NO: 1129557 - RNA, 19 nt, Artificial Sequence
  Description of Artificial Sequence: Synthetic oligonucleotide
auacaucaacuuccauucg

SEQ ID NO: 1129558 - RNA, 19 nt, Artificial Sequence
  Description of Artificial Sequence: Synthetic oligonucleotide
uucaggaaagaagcgugag

SEQ ID NO: 1129559 - RNA, 19 nt, Artificial Sequence
  Description of Artificial Sequence: Synthetic oligonucleotide
gggcugaauauccaaaacc

SEQ ID NO: 1129560 - RNA, 19 nt, Artificial Sequence
  Description of Artificial Sequence: Synthetic oligonucleotide
agaauacuuacaccaacua

SEQ ID NO: 1129561 - RNA, 19 nt, Artificial Sequence
  Description of Artificial Sequence: Synthetic oligonucleotide
uuuacucaugaaaguaauu

SEQ ID NO: 1129562 - RNA, 19 nt, Artificial Sequence
  Description of Artificial Sequence: Synthetic oligonucleotide
aaauccaaauguugauguu

SEQ ID NO: 1129563 - RNA, 19 nt, Artificial Sequence
  Description of Artificial Sequence: Synthetic oligonucleotide
ccaacuacacgacacacag

SEQ ID NO: 1129564 - RNA, 19 nt, Artificial Sequence
  Description of Artificial Sequence: Synthetic oligonucleotide
cugaaguguaaaauacauc

SEQ ID NO: 1129565 - RNA, 19 nt, Artificial Sequence
  Description of Artificial Sequence: Synthetic oligonucleotide
uaaggcgaggauucugaug

SEQ ID NO: 1129566 - RNA, 19 nt, Artificial Sequence
  Description of Artificial Sequence: Synthetic oligonucleotide
caccccucuaacaaggaug

SEQ ID NO: 1129567 - RNA, 19 nt, Artificial Sequence
  Description of Artificial Sequence: Synthetic oligonucleotide
guugaugguguacuggcca

SEQ ID NO: 1129568 - RNA, 19 nt, Artificial Sequence
  Description of Artificial Sequence: Synthetic oligonucleotide
gauaaggcgaggauucuga

SEQ ID NO: 1129569 - RNA, 19 nt, Artificial Sequence
  Description of Artificial Sequence: Synthetic oligonucleotide
gaguuucaggaaagaagcg

SEQ ID NO: 1129570 - RNA, 19 nt, Artificial Sequence
  Description of Artificial Sequence: Synthetic oligonucleotide
auaguuucuuccacagccg

SEQ ID NO: 1129571 - RNA, 19 nt, Artificial Sequence
  Description of Artificial Sequence: Synthetic oligonucleotide
acugccagagcgucuuccg

SEQ ID NO: 1129572 - RNA, 19 nt, Artificial Sequence
  Description of Artificial Sequence: Synthetic oligonucleotide
uucucagcaaagugguacu

SEQ ID NO: 1129573 - RNA, 19 nt, Artificial Sequence
  Description of Artificial Sequence: Synthetic oligonucleotide
auuuccccaccccucuaac

SEQ ID NO: 1129574 - RNA, 19 nt, Artificial Sequence
  Description of Artificial Sequence: Synthetic oligonucleotide
aguuucuaagcggcaaauc

SEQ ID NO: 1129575 - RNA, 19 nt, Artificial Sequence
  Description of Artificial Sequence: Synthetic oligonucleotide
uuggagcccacauccaugu

SEQ ID NO: 1129576 - RNA, 19 nt, Artificial Sequence
  Description of Artificial Sequence: Synthetic oligonucleotide
guuuauuacuuuacucaug

SEQ ID NO: 1129577 - RNA, 19 nt, Artificial Sequence
  Description of Artificial Sequence: Synthetic oligonucleotide
ugugguugaugguguacug

SEQ ID NO: 1129578 - RNA, 19 nt, Artificial Sequence
  Description of Artificial Sequence: Synthetic oligonucleotide
aaccuucuaauauccugaa

SEQ ID NO: 1129579 - RNA, 19 nt, Artificial Sequence
  Description of Artificial Sequence: Synthetic oligonucleotide
cugacauaguuucuuccac

SEQ ID NO: 1129580 - RNA, 19 nt, Artificial Sequence
  Description of Artificial Sequence: Synthetic oligonucleotide
aacaguuucuaagcggcaa

SEQ ID NO: 1129581 - RNA, 19 nt, Artificial Sequence
  Description of Artificial Sequence: Synthetic oligonucleotide
ggaucaagugucuacaaaa

SEQ ID NO: 1129582 - RNA, 19 nt, Artificial Sequence
  Description of Artificial Sequence: Synthetic oligonucleotide
gguguaaagcagcugucag

SEQ ID NO: 1129583 - RNA, 19 nt, Artificial Sequence
  Description of Artificial Sequence: Synthetic oligonucleotide
uccaaauguugauguuucc

SEQ ID NO: 1129584 - RNA, 19 nt, Artificial Sequence
  Description of Artificial Sequence: Synthetic oligonucleotide
auccauguaaggauguaug

SEQ ID NO: 1129585 - RNA, 19 nt, Artificial Sequence
  Description of Artificial Sequence: Synthetic oligonucleotide
acacgacacacagagagca

SEQ ID NO: 1129586 - RNA, 19 nt, Artificial Sequence
  Description of Artificial Sequence: Synthetic oligonucleotide
uauggacauagauccauuu

SEQ ID NO: 1129587 - RNA, 19 nt, Artificial Sequence
  Description of Artificial Sequence: Synthetic oligonucleotide
ccgacagaaauguaaagug

SEQ ID NO: 1129588 - RNA, 19 nt, Artificial Sequence
  Description of Artificial Sequence: Synthetic oligonucleotide
auuagaagauggaaaacua

SEQ ID NO: 1129589 - RNA, 19 nt, Artificial Sequence
  Description of Artificial Sequence: Synthetic oligonucleotide
cccacuaagacagauuucc

SEQ ID NO: 1129590 - RNA, 19 nt, Artificial Sequence
  Description of Artificial Sequence: Synthetic oligonucleotide
guaugauggccucauggca

SEQ ID NO: 1129591 - RNA, 19 nt, Artificial Sequence
  Description of Artificial Sequence: Synthetic oligonucleotide
auaauauuucugaagugua

SEQ ID NO: 1129592 - RNA, 19 nt, Artificial Sequence
  Description of Artificial Sequence: Synthetic oligonucleotide
ucgggguucuuccggaaga

SEQ ID NO: 1129593 - RNA, 19 nt, Artificial Sequence
  Description of Artificial Sequence: Synthetic oligonucleotide
uugauaugcugagaagagu

SEQ ID NO: 1129594 - RNA, 19 nt, Artificial Sequence
  Description of Artificial Sequence: Synthetic oligonucleotide
gagaagucuagccgguuga

SEQ ID NO: 1129595 - RNA, 19 nt, Artificial Sequence
  Description of Artificial Sequence: Synthetic oligonucleotide
ugccgacagaaauguaaag

SEQ ID NO: 1129596 - RNA, 19 nt, Artificial Sequence
  Description of Artificial Sequence: Synthetic oligonucleotide
aacgguacaggauguuguu

SEQ ID NO: 1129597 - RNA, 19 nt, Artificial Sequence
  Description of Artificial Sequence: Synthetic oligonucleotide
ggaaagaagcgugaguggc

SEQ ID NO: 1129598 - RNA, 19 nt, Artificial Sequence
  Description of Artificial Sequence: Synthetic oligonucleotide
caggguuggugucaccugg

SEQ ID NO: 1129599 - RNA, 19 nt, Artificial Sequence
  Description of Artificial Sequence: Synthetic oligonucleotide
aaagaagcgugaguggcuu

SEQ ID NO: 1129600 - RNA, 19 nt, Artificial Sequence
  Description of Artificial Sequence: Synthetic oligonucleotide
caucugagaaacgguacag

SEQ ID NO: 1129601 - RNA, 19 nt, Artificial Sequence
  Description of Artificial Sequence: Synthetic oligonucleotide
ugccgcacaacugccagag

SEQ ID NO: 1129602 - RNA, 19 nt, Artificial Sequence
  Description of Artificial Sequence: Synthetic oligonucleotide
acaaggaugcaaaguguag

SEQ ID NO: 1129603 - RNA, 19 nt, Artificial Sequence
  Description of Artificial Sequence: Synthetic oligonucleotide
agugccgacagaaauguaa

SEQ ID NO: 1129604 - RNA, 19 nt, Artificial Sequence
  Description of Artificial Sequence: Synthetic oligonucleotide
uuauggacauagauccauu

SEQ ID NO: 1129605 - RNA, 19 nt, Artificial Sequence
  Description of Artificial Sequence: Synthetic oligonucleotide
uuguuugugucaguucaac

SEQ ID NO: 1129606 - RNA, 19 nt, Artificial Sequence
  Description of Artificial Sequence: Synthetic oligonucleotide
auauccugaauugcacuug

SEQ ID NO: 1129607 - RNA, 19 nt, Artificial Sequence
  Description of Artificial Sequence: Synthetic oligonucleotide
ccauuaaaacuugaagagg

SEQ ID NO: 1129608 - RNA, 19 nt, Artificial Sequence
  Description of Artificial Sequence: Synthetic oligonucleotide
uuugaccacguaugugaac

SEQ ID NO: 1129609 - RNA, 19 nt, Artificial Sequence
  Description of Artificial Sequence: Synthetic oligonucleotide
aagugucuacaaaacugcu

SEQ ID NO: 1129610 - RNA, 19 nt, Artificial Sequence
  Description of Artificial Sequence: Synthetic oligonucleotide
caaagaauacuuacaccaa

SEQ ID NO: 1129611 - RNA, 19 nt, Artificial Sequence
  Description of Artificial Sequence: Synthetic oligonucleotide
aucugguauucaaugagga

SEQ ID NO: 1129612 - RNA, 19 nt, Artificial Sequence
  Description of Artificial Sequence: Synthetic oligonucleotide
ucucuggacuguuuccaac

SEQ ID NO: 1129613 - RNA, 19 nt, Artificial Sequence
  Description of Artificial Sequence: Synthetic oligonucleotide
gcacuugagaagucuagcc

SEQ ID NO: 1129614 - RNA, 19 nt, Artificial Sequence
  Description of Artificial Sequence: Synthetic oligonucleotide
agcgugaguggcuuugaga

SEQ ID NO: 1129615 - RNA, 19 nt, Artificial Sequence
  Description of Artificial Sequence: Synthetic oligonucleotide
cagaauguggggcugaaua

SEQ ID NO: 1129616 - RNA, 19 nt, Artificial Sequence
  Description of Artificial Sequence: Synthetic oligonucleotide
caaaguguagagcucaagu

SEQ ID NO: 1129617 - RNA, 19 nt, Artificial Sequence
  Description of Artificial Sequence: Synthetic oligonucleotide
agugguacugacauaguuu

SEQ ID NO: 1129618 - RNA, 19 nt, Artificial Sequence
  Description of Artificial Sequence: Synthetic oligonucleotide
agacccugucaucacuuug

SEQ ID NO: 1129619 - RNA, 19 nt, Artificial Sequence
  Description of Artificial Sequence: Synthetic oligonucleotide
cccagcgugacaauguccc

SEQ ID NO: 1129620 - RNA, 19 nt, Artificial Sequence
  Description of Artificial Sequence: Synthetic oligonucleotide
gugucaguucaacacagaa

SEQ ID NO: 1129621 - RNA, 19 nt, Artificial Sequence
  Description of Artificial Sequence: Synthetic oligonucleotide
guacugacauaguuucuuc

SEQ ID NO: 1129622 - RNA, 19 nt, Artificial Sequence
  Description of Artificial Sequence: Synthetic oligonucleotide
ccaucugguauucaaugag

SEQ ID NO: 1129623 - RNA, 19 nt, Artificial Sequence
  Description of Artificial Sequence: Synthetic oligonucleotide
cugaauauccaaaaccuuu

SEQ ID NO: 1129624 - RNA, 19 nt, Artificial Sequence
  Description of Artificial Sequence: Synthetic oligonucleotide
gguugaaggcuucucccag

SEQ ID NO: 1129625 - RNA, 19 nt, Artificial Sequence
  Description of Artificial Sequence: Synthetic oligonucleotide
ugaugccgcacaacugcca

SEQ ID NO: 1129626 - RNA, 19 nt, Artificial Sequence
  Description of Artificial Sequence: Synthetic oligonucleotide
uguugauguuucccacuaa

SEQ ID NO: 1129627 - RNA, 19 nt, Artificial Sequence
  Description of Artificial Sequence: Synthetic oligonucleotide
cugaugccgcacaacugcc

SEQ ID NO: 1129628 - RNA, 19 nt, Artificial Sequence
  Description of Artificial Sequence: Synthetic oligonucleotide
gaagaagggccgcacaggu

SEQ ID NO: 1129629 - RNA, 19 nt, Artificial Sequence
  Description of Artificial Sequence: Synthetic oligonucleotide
uguacaggguuggugucac

SEQ ID NO: 1129630 - RNA, 19 nt, Artificial Sequence
  Description of Artificial Sequence: Synthetic oligonucleotide
agaagcgugaguggcuuug

SEQ ID NO: 1129631 - RNA, 19 nt, Artificial Sequence
  Description of Artificial Sequence: Synthetic oligonucleotide
uugaugguguacuggccau

SEQ ID NO: 1129632 - RNA, 19 nt, Artificial Sequence
  Description of Artificial Sequence: Synthetic oligonucleotide
ccgcacaacugccagagcg

SEQ ID NO: 1129633 - RNA, 19 nt, Artificial Sequence
  Description of Artificial Sequence: Synthetic oligonucleotide
ucuaagcggcaaauccaaa

SEQ ID NO: 1129634 - RNA, 19 nt, Artificial Sequence
  Description of Artificial Sequence: Synthetic oligonucleotide
ggugucaccuggcccagcg

SEQ ID NO: 1129635 - RNA, 19 nt, Artificial Sequence
  Description of Artificial Sequence: Synthetic oligonucleotide
cuuugugucaaagaauacu

SEQ ID NO: 1129636 - RNA, 19 nt, Artificial Sequence
  Description of Artificial Sequence: Synthetic oligonucleotide
caaaagaggaugcugcagu

SEQ ID NO: 1129637 - RNA, 19 nt, Artificial Sequence
  Description of Artificial Sequence: Synthetic oligonucleotide
caaggaugcaaaguguaga

SEQ ID NO: 1129638 - RNA, 19 nt, Artificial Sequence
  Description of Artificial Sequence: Synthetic oligonucleotide
uuacaaggaccaacuguuu

SEQ ID NO: 1129639 - RNA, 19 nt, Artificial Sequence
  Description of Artificial Sequence: Synthetic oligonucleotide
uuccauucgauaugaccuu

SEQ ID NO: 1129640 - RNA, 19 nt, Artificial Sequence
  Description of Artificial Sequence: Synthetic oligonucleotide
ugcaggggugucccgaguc

SEQ ID NO: 1129641 - RNA, 19 nt, Artificial Sequence
  Description of Artificial Sequence: Synthetic oligonucleotide
gagggcaccauuaaaacuu

SEQ ID NO: 1129642 - RNA, 19 nt, Artificial Sequence
  Description of Artificial Sequence: Synthetic oligonucleotide
guacagucagucacagacc

SEQ ID NO: 1129643 - RNA, 19 nt, Artificial Sequence
  Description of Artificial Sequence: Synthetic oligonucleotide
ugaaaggaucaagugucua

SEQ ID NO: 1129644 - RNA, 19 nt, Artificial Sequence
  Description of Artificial Sequence: Synthetic oligonucleotide
ucucacugaugccgcacaa

SEQ ID NO: 1129645 - RNA, 19 nt, Artificial Sequence
  Description of Artificial Sequence: Synthetic oligonucleotide
gucuuugauaaggcgagga

SEQ ID NO: 1129646 - RNA, 19 nt, Artificial Sequence
  Description of Artificial Sequence: Synthetic oligonucleotide
ccaauuauuagaagaugga

SEQ ID NO: 1129647 - RNA, 19 nt, Artificial Sequence
  Description of Artificial Sequence: Synthetic oligonucleotide
cucccaggguacaguagcc

SEQ ID NO: 1129648 - RNA, 19 nt, Artificial Sequence
  Description of Artificial Sequence: Synthetic oligonucleotide
aguguagagcucaagucuu

SEQ ID NO: 1129649 - RNA, 19 nt, Artificial Sequence
  Description of Artificial Sequence: Synthetic oligonucleotide
auaaggcgaggauucugau

SEQ ID NO: 1129650 - RNA, 19 nt, Artificial Sequence
  Description of Artificial Sequence: Synthetic oligonucleotide
agugugaggccagaguuua

SEQ ID NO: 1129651 - RNA, 19 nt, Artificial Sequence
  Description of Artificial Sequence: Synthetic oligonucleotide
ugucaucacuuugugucaa

SEQ ID NO: 1129652 - RNA, 19 nt, Artificial Sequence
  Description of Artificial Sequence: Synthetic oligonucleotide
gucuacaaaacugcuucuc

SEQ ID NO: 1129653 - RNA, 19 nt, Artificial Sequence
  Description of Artificial Sequence: Synthetic oligonucleotide
cauauucacacucauuauu

SEQ ID NO: 1129654 - RNA, 19 nt, Artificial Sequence
  Description of Artificial Sequence: Synthetic oligonucleotide
ugaccacguaugugaaccu

SEQ ID NO: 1129655 - RNA, 19 nt, Artificial Sequence
  Description of Artificial Sequence: Synthetic oligonucleotide
guagagcucaagucuugga

SEQ ID NO: 1129656 - RNA, 19 nt, Artificial Sequence
  Description of Artificial Sequence: Synthetic oligonucleotide
uugauaaggcgaggauucu

SEQ ID NO: 1129657 - RNA, 19 nt, Artificial Sequence
  Description of Artificial Sequence: Synthetic oligonucleotide
acagguacagucagucaca

SEQ ID NO: 1129658 - RNA, 19 nt, Artificial Sequence
  Description of Artificial Sequence: Synthetic oligonucleotide
ggcuuugagauguccacuc

SEQ ID NO: 1129659 - RNA, 19 nt, Artificial Sequence
  Description of Artificial Sequence: Synthetic oligonucleotide
aagggccgcacagguacag

SEQ ID NO: 1129660 - RNA, 19 nt, Artificial Sequence
  Description of Artificial Sequence: Synthetic oligonucleotide
ucuagccgguugaaggcuu

SEQ ID NO: 1129661 - RNA, 19 nt, Artificial Sequence
  Description of Artificial Sequence: Synthetic oligonucleotide
cagcgugacaaugucccag

SEQ ID NO: 1129662 - RNA, 19 nt, Artificial Sequence
  Description of Artificial Sequence: Synthetic oligonucleotide
gguuuauuacuuuacucau

SEQ ID NO: 1129663 - RNA, 19 nt, Artificial Sequence
  Description of Artificial Sequence: Synthetic oligonucleotide
auggcagggguuccaucug

SEQ ID NO: 1129664 - RNA, 19 nt, Artificial Sequence
  Description of Artificial Sequence: Synthetic oligonucleotide
agugucuacaaaacugcuu

SEQ ID NO: 1129665 - RNA, 19 nt, Artificial Sequence
  Description of Artificial Sequence: Synthetic oligonucleotide
caaauuugauaugcugaga

SEQ ID NO: 1129666 - RNA, 19 nt, Artificial Sequence
  Description of Artificial Sequence: Synthetic oligonucleotide
cuguugccagcugagaaca

SEQ ID NO: 1129667 - RNA, 19 nt, Artificial Sequence
  Description of Artificial Sequence: Synthetic oligonucleotide
ggcugaauauccaaaaccu

SEQ ID NO: 1129668 - RNA, 19 nt, Artificial Sequence
  Description of Artificial Sequence: Synthetic oligonucleotide
gugguuuggagcccacauc

SEQ ID NO: 1129669 - RNA, 19 nt, Artificial Sequence
  Description of Artificial Sequence: Synthetic oligonucleotide
cucgggguucuuccggaag

SEQ ID NO: 1129670 - RNA, 19 nt, Artificial Sequence
  Description of Artificial Sequence: Synthetic oligonucleotide
cuaagcggcaaauccaaau

SEQ ID NO: 1129671 - RNA, 19 nt, Artificial Sequence
  Description of Artificial Sequence: Synthetic oligonucleotide
caguuugaccacguaugug

SEQ ID NO: 1129672 - RNA, 19 nt, Artificial Sequence
  Description of Artificial Sequence: Synthetic oligonucleotide
caacugcggacaagggcac

SEQ ID NO: 1129673 - RNA, 19 nt, Artificial Sequence
  Description of Artificial Sequence: Synthetic oligonucleotide
ggggcugaauauccaaaac

SEQ ID NO: 1129674 - RNA, 19 nt, Artificial Sequence
  Description of Artificial Sequence: Synthetic oligonucleotide
gcggcaaauccaaauguug

SEQ ID NO: 1129675 - RNA, 19 nt, Artificial Sequence
  Description of Artificial Sequence: Synthetic oligonucleotide
cacgacacacagagagcac

SEQ ID NO: 1129676 - RNA, 19 nt, Artificial Sequence
  Description of Artificial Sequence: Synthetic oligonucleotide
agcgucuuccguguccucu

SEQ ID NO: 1129677 - RNA, 19 nt, Artificial Sequence
  Description of Artificial Sequence: Synthetic oligonucleotide
ccgguugaaggcuucuccc

SEQ ID NO: 1129678 - RNA, 19 nt, Artificial Sequence
  Description of Artificial Sequence: Synthetic oligonucleotide
gaaagaagcgugaguggcu

SEQ ID NO: 1129679 - RNA, 19 nt, Artificial Sequence
  Description of Artificial Sequence: Synthetic oligonucleotide
gaacaguuucuaagcggca

SEQ ID NO: 1129680 - RNA, 19 nt, Artificial Sequence
  Description of Artificial Sequence: Synthetic oligonucleotide
aagaagcgugaguggcuuu

SEQ ID NO: 1129681 - RNA, 19 nt, Artificial Sequence
  Description of Artificial Sequence: Synthetic oligonucleotide
cacaagggacaacugcgga

SEQ ID NO: 1129682 - RNA, 19 nt, Artificial Sequence
  Description of Artificial Sequence: Synthetic oligonucleotide
ggguacaguagccaugucu

SEQ ID NO: 1129683 - RNA, 19 nt, Artificial Sequence
  Description of Artificial Sequence: Synthetic oligonucleotide
uccauucgauaugaccuuu

SEQ ID NO: 1129684 - RNA, 19 nt, Artificial Sequence
  Description of Artificial Sequence: Synthetic oligonucleotide
gacccugucaucacuuugu

SEQ ID NO: 1129685 - RNA, 19 nt, Artificial Sequence
  Description of Artificial Sequence: Synthetic oligonucleotide
accugcuuagucaucugaa

SEQ ID NO: 1129686 - RNA, 19 nt, Artificial Sequence
  Description of Artificial Sequence: Synthetic oligonucleotide
gauguccacucucacugau

SEQ ID NO: 1129687 - RNA, 19 nt, Artificial Sequence
  Description of Artificial Sequence: Synthetic oligonucleotide
cuagccgguugaaggcuuc

SEQ ID NO: 1129688 - RNA, 19 nt, Artificial Sequence
  Description of Artificial Sequence: Synthetic oligonucleotide
gaauugcacuugagaaguc

SEQ ID NO: 1129689 - RNA, 19 nt, Artificial Sequence
  Description of Artificial Sequence: Synthetic oligonucleotide
aacuaucauuugacaacua

SEQ ID NO: 1129690 - RNA, 19 nt, Artificial Sequence
  Description of Artificial Sequence: Synthetic oligonucleotide
auguauuuacaaggaccaa

SEQ ID NO: 1129691 - RNA, 19 nt, Artificial Sequence
  Description of Artificial Sequence: Synthetic oligonucleotide
cuugagaagucuagccggu

SEQ ID NO: 1129692 - RNA, 19 nt, Artificial Sequence
  Description of Artificial Sequence: Synthetic oligonucleotide
uccggaagaagggccgcac

SEQ ID NO: 1129693 - RNA, 19 nt, Artificial Sequence
  Description of Artificial Sequence: Synthetic oligonucleotide
aggauguaugauggccuca

SEQ ID NO: 1129694 - RNA, 19 nt, Artificial Sequence
  Description of Artificial Sequence: Synthetic oligonucleotide
cuuugauaaggcgaggauu

SEQ ID NO: 1129695 - RNA, 19 nt, Artificial Sequence
  Description of Artificial Sequence: Synthetic oligonucleotide
uguccucucgggguucuuc

SEQ ID NO: 1129696 - RNA, 19 nt, Artificial Sequence
  Description of Artificial Sequence: Synthetic oligonucleotide
gccacagagguugugaaaa

SEQ ID NO: 1129697 - RNA, 19 nt, Artificial Sequence
  Description of Artificial Sequence: Synthetic oligonucleotide
cacuuuggagcucuuggcu

SEQ ID NO: 1129698 - RNA, 19 nt, Artificial Sequence
  Description of Artificial Sequence: Synthetic oligonucleotide
aggguacaguagccauguc

SEQ ID NO: 1129699 - RNA, 19 nt, Artificial Sequence
  Description of Artificial Sequence: Synthetic oligonucleotide
cugagaaacgguacaggau

SEQ ID NO: 1129700 - RNA, 19 nt, Artificial Sequence
  Description of Artificial Sequence: Synthetic oligonucleotide
auguccacucucacugaug

SEQ ID NO: 1129701 - RNA, 19 nt, Artificial Sequence
  Description of Artificial Sequence: Synthetic oligonucleotide
gugccgacagaaauguaaa

SEQ ID NO: 1129702 - RNA, 19 nt, Artificial Sequence
  Description of Artificial Sequence: Synthetic oligonucleotide
ggucacugagugugaggcc

SEQ ID NO: 1129703 - RNA, 19 nt, Artificial Sequence
  Description of Artificial Sequence: Synthetic oligonucleotide
agaagucuagccgguugaa

SEQ ID NO: 1129704 - RNA, 19 nt, Artificial Sequence
  Description of Artificial Sequence: Synthetic oligonucleotide
acugcggacaagggcacau

SEQ ID NO: 1129705 - RNA, 19 nt, Artificial Sequence
  Description of Artificial Sequence: Synthetic oligonucleotide
auccugaauugcacuugag

SEQ ID NO: 1129706 - RNA, 19 nt, Artificial Sequence
  Description of Artificial Sequence: Synthetic oligonucleotide
guuugaccacguaugugaa

SEQ ID NO: 1129707 - RNA, 19 nt, Artificial Sequence
  Description of Artificial Sequence: Synthetic oligonucleotide
gcaaaguguagagcucaag

SEQ ID NO: 1129708 - RNA, 19 nt, Artificial Sequence
  Description of Artificial Sequence: Synthetic oligonucleotide
guuuggagcccacauccau

SEQ ID NO: 1129709 - RNA, 19 nt, Artificial Sequence
  Description of Artificial Sequence: Synthetic oligonucleotide
agccgguugaaggcuucuc

SEQ ID NO: 1129710 - RNA, 19 nt, Artificial Sequence
  Description of Artificial Sequence: Synthetic oligonucleotide
gguacaguagccaugucuu

SEQ ID NO: 1129711 - RNA, 19 nt, Artificial Sequence
  Description of Artificial Sequence: Synthetic oligonucleotide
ucaccuggcccagcgugac

SEQ ID NO: 1129712 - RNA, 19 nt, Artificial Sequence
  Description of Artificial Sequence: Synthetic oligonucleotide
gaagcgugaguggcuuuga

SEQ ID NO: 1129713 - RNA, 19 nt, Artificial Sequence
  Description of Artificial Sequence: Synthetic oligonucleotide
aacugcggacaagggcaca

SEQ ID NO: 1129714 - RNA, 19 nt, Artificial Sequence
  Description of Artificial Sequence: Synthetic oligonucleotide
ggacaacugcggacaaggg

SEQ ID NO: 1129715 - RNA, 19 nt, Artificial Sequence
  Description of Artificial Sequence: Synthetic oligonucleotide
acuacacgacacacagaga

SEQ ID NO: 1129716 - RNA, 19 nt, Artificial Sequence
  Description of Artificial Sequence: Synthetic oligonucleotide
uugagaagucuagccgguu

SEQ ID NO: 1129717 - RNA, 19 nt, Artificial Sequence
  Description of Artificial Sequence: Synthetic oligonucleotide
augccgcacaacugccaga

SEQ ID NO: 1129718 - RNA, 19 nt, Artificial Sequence
  Description of Artificial Sequence: Synthetic oligonucleotide
aagaagggccgcacaggua

SEQ ID NO: 1129719 - RNA, 19 nt, Artificial Sequence
  Description of Artificial Sequence: Synthetic oligonucleotide
cuacaagagucacaucuuu

SEQ ID NO: 1129720 - RNA, 19 nt, Artificial Sequence
  Description of Artificial Sequence: Synthetic oligonucleotide
gccgacagaaauguaaagu

SEQ ID NO: 1129721 - RNA, 19 nt, Artificial Sequence
  Description of Artificial Sequence: Synthetic oligonucleotide
gcgaggauucugaugguca

SEQ ID NO: 1129722 - RNA, 19 nt, Artificial Sequence
  Description of Artificial Sequence: Synthetic oligonucleotide
guauucaaugaggacucau

SEQ ID NO: 1129723 - RNA, 19 nt, Artificial Sequence
  Description of Artificial Sequence: Synthetic oligonucleotide
caaggaccaacuguuuugu

SEQ ID NO: 1129724 - RNA, 19 nt, Artificial Sequence
  Description of Artificial Sequence: Synthetic oligonucleotide
cagcaguuugaccacguau

SEQ ID NO: 1129725 - RNA, 19 nt, Artificial Sequence
  Description of Artificial Sequence: Synthetic oligonucleotide
uggcuacaagagucacauc

SEQ ID NO: 1129726 - RNA, 19 nt, Artificial Sequence
  Description of Artificial Sequence: Synthetic oligonucleotide
gggccgcacagguacaguc

SEQ ID NO: 1129727 - RNA, 19 nt, Artificial Sequence
  Description of Artificial Sequence: Synthetic oligonucleotide
agucagucacagacccugu

SEQ ID NO: 1129728 - RNA, 19 nt, Artificial Sequence
  Description of Artificial Sequence: Synthetic oligonucleotide
aggcgaggauucugauggu

SEQ ID NO: 1129729 - RNA, 19 nt, Artificial Sequence
  Description of Artificial Sequence: Synthetic oligonucleotide
uagccgguugaaggcuucu

SEQ ID NO: 1129730 - RNA, 19 nt, Artificial Sequence
  Description of Artificial Sequence: Synthetic oligonucleotide
cuguggugguuuggagccc

SEQ ID NO: 1129731 - RNA, 19 nt, Artificial Sequence
  Description of Artificial Sequence: Synthetic oligonucleotide
auguggggcugaauaucca

SEQ ID NO: 1129732 - RNA, 19 nt, Artificial Sequence
  Description of Artificial Sequence: Synthetic oligonucleotide
cugcagugccgacagaaau

SEQ ID NO: 1129733 - RNA, 19 nt, Artificial Sequence
  Description of Artificial Sequence: Synthetic oligonucleotide
cauccauguaaggauguau

SEQ ID NO: 1129734 - RNA, 19 nt, Artificial Sequence
  Description of Artificial Sequence: Synthetic oligonucleotide
uggagcccacauccaugua

SEQ ID NO: 1129735 - RNA, 19 nt, Artificial Sequence
  Description of Artificial Sequence: Synthetic oligonucleotide
gcgugacaaugucccagcc

SEQ ID NO: 1129736 - RNA, 19 nt, Artificial Sequence
  Description of Artificial Sequence: Synthetic oligonucleotide
ggauguuguucagcaugug

SEQ ID NO: 1129737 - RNA, 19 nt, Artificial Sequence
  Description of Artificial Sequence: Synthetic oligonucleotide
gguugugaaaauacauuuu

SEQ ID NO: 1129738 - RNA, 19 nt, Artificial Sequence
  Description of Artificial Sequence: Synthetic oligonucleotide
gcagugccgacagaaaugu

SEQ ID NO: 1129739 - RNA, 19 nt, Artificial Sequence
  Description of Artificial Sequence: Synthetic oligonucleotide
gaagggccgcacagguaca

SEQ ID NO: 1129740 - RNA, 19 nt, Artificial Sequence
  Description of Artificial Sequence: Synthetic oligonucleotide
ggcgaggauucugaugguc

SEQ ID NO: 1129741 - RNA, 19 nt, Artificial Sequence
  Description of Artificial Sequence: Synthetic oligonucleotide
cugcggacaagggcacaug

SEQ ID NO: 1129742 - RNA, 19 nt, Artificial Sequence
  Description of Artificial Sequence: Synthetic oligonucleotide
gguauucaaugaggacuca

SEQ ID NO: 1129743 - RNA, 19 nt, Artificial Sequence
  Description of Artificial Sequence: Synthetic oligonucleotide
cagaguuuaccugcuuagu

SEQ ID NO: 1129744 - RNA, 19 nt, Artificial Sequence
  Description of Artificial Sequence: Synthetic oligonucleotide
gcacaacugccagagcguc

SEQ ID NO: 1129745 - RNA, 19 nt, Artificial Sequence
  Description of Artificial Sequence: Synthetic oligonucleotide
gucuagccgguugaaggcu

SEQ ID NO: 1129746 - RNA, 19 nt, Artificial Sequence
  Description of Artificial Sequence: Synthetic oligonucleotide
cacguaugugaaccuucua

SEQ ID NO: 1129747 - RNA, 19 nt, Artificial Sequence
  Description of Artificial Sequence: Synthetic oligonucleotide
gguuuggagcccacaucca

SEQ ID NO: 1129748 - RNA, 19 nt, Artificial Sequence
  Description of Artificial Sequence: Synthetic oligonucleotide
cgacagaaauguaaagugu

SEQ ID NO: 1129749 - RNA, 19 nt, Artificial Sequence
  Description of Artificial Sequence: Synthetic oligonucleotide
gugucccgaguccuuccaa

SEQ ID NO: 1129750 - RNA, 19 nt, Artificial Sequence
  Description of Artificial Sequence: Synthetic oligonucleotide
guacaguagccaugucuuu

SEQ ID NO: 1129751 - RNA, 19 nt, Artificial Sequence
  Description of Artificial Sequence: Synthetic oligonucleotide
gcuuugagauguccacucu

SEQ ID NO: 1129752 - RNA, 19 nt, Artificial Sequence
  Description of Artificial Sequence: Synthetic oligonucleotide
cacaacugccagagcgucu

SEQ ID NO: 1129753 - RNA, 19 nt, Artificial Sequence
  Description of Artificial Sequence: Synthetic oligonucleotide
ggauguaugauggccucau

SEQ ID NO: 1129754 - RNA, 19 nt, Artificial Sequence
  Description of Artificial Sequence: Synthetic oligonucleotide
ggacucauuugggcacagc

SEQ ID NO: 1129755 - RNA, 19 nt, Artificial Sequence
  Description of Artificial Sequence: Synthetic oligonucleotide
cccagccaucugagaaacg

SEQ ID NO: 1129756 - RNA, 19 nt, Artificial Sequence
  Description of Artificial Sequence: Synthetic oligonucleotide
agggccgcacagguacagu

SEQ ID NO: 1129757 - RNA, 19 nt, Artificial Sequence
  Description of Artificial Sequence: Synthetic oligonucleotide
gagcgucuuccguguccuc

SEQ ID NO: 1129758 - RNA, 19 nt, Artificial Sequence
  Description of Artificial Sequence: Synthetic oligonucleotide
caguuucuaagcggcaaau

SEQ ID NO: 1129759 - RNA, 19 nt, Artificial Sequence
  Description of Artificial Sequence: Synthetic oligonucleotide
gcccagcgugacaaugucc

SEQ ID NO: 1129760 - RNA, 19 nt, Artificial Sequence
  Description of Artificial Sequence: Synthetic oligonucleotide
cacagaauguggggcugaa

SEQ ID NO: 1129761 - RNA, 19 nt, Artificial Sequence
  Description of Artificial Sequence: Synthetic oligonucleotide
ggccgcacagguacaguca

SEQ ID NO: 1129762 - RNA, 19 nt, Artificial Sequence
  Description of Artificial Sequence: Synthetic oligonucleotide
cgucuuccguguccucucg

SEQ ID NO: 1129763 - RNA, 19 nt, Artificial Sequence
  Description of Artificial Sequence: Synthetic oligonucleotide
gcuacaagagucacaucuu

SEQ ID NO: 1129764 - RNA, 19 nt, Artificial Sequence
  Description of Artificial Sequence: Synthetic oligonucleotide
ccacguaugugaaccuucu

SEQ ID NO: 1129765 - RNA, 19 nt, Artificial Sequence
  Description of Artificial Sequence: Synthetic oligonucleotide
cugccagagcgucuuccgu

SEQ ID NO: 1129766 - RNA, 19 nt, Artificial Sequence
  Description of Artificial Sequence: Synthetic oligonucleotide
gggcaccauuaaaacuuga

SEQ ID NO: 1129767 - RNA, 19 nt, Artificial Sequence
  Description of Artificial Sequence: Synthetic oligonucleotide
gcacgauuuuauccaggau

SEQ ID NO: 1129768 - RNA, 19 nt, Artificial Sequence
  Description of Artificial Sequence: Synthetic oligonucleotide
gcggugcaggggugucccg

SEQ ID NO: 1129769 - RNA, 19 nt, Artificial Sequence
  Description of Artificial Sequence: Synthetic oligonucleotide
cuuccacagccgccugucu

SEQ ID NO: 1129770 - RNA, 19 nt, Artificial Sequence
  Description of Artificial Sequence: Synthetic oligonucleotide
cagugccgacagaaaugua

SEQ ID NO: 1129771 - RNA, 19 nt, Artificial Sequence
  Description of Artificial Sequence: Synthetic oligonucleotide
ccagcgugacaauguccca

SEQ ID NO: 1129772 - RNA, 19 nt, Artificial Sequence
  Description of Artificial Sequence: Synthetic oligonucleotide
cagacccugucaucacuuu

SEQ ID NO: 1129773 - RNA, 19 nt, Artificial Sequence
  Description of Artificial Sequence: Synthetic oligonucleotide
ccagagcgucuuccguguc

SEQ ID NO: 1129774 - RNA, 19 nt, Artificial Sequence
  Description of Artificial Sequence: Synthetic oligonucleotide
ggguuccaucugguauuca

SEQ ID NO: 1129775 - RNA, 19 nt, Artificial Sequence
  Description of Artificial Sequence: Synthetic oligonucleotide
ggcagggguuccaucuggu

SEQ ID NO: 1129776 - RNA, 19 nt, Artificial Sequence
  Description of Artificial Sequence: Synthetic oligonucleotide
ccauucgauaugaccuuuu

SEQ ID NO: 1129777 - RNA, 19 nt, Artificial Sequence
  Description of Artificial Sequence: Synthetic oligonucleotide
cugcgccacuccacucagu

SEQ ID NO: 1129778 - RNA, 19 nt, Artificial Sequence
  Description of Artificial Sequence: Synthetic oligonucleotide
ggacuguuuccaacuccuu

SEQ ID NO: 1129779 - RNA, 19 nt, Artificial Sequence
  Description of Artificial Sequence: Synthetic oligonucleotide
ccccucuaacaaggaugca

SEQ ID NO: 1129780 - RNA, 19 nt, Artificial Sequence
  Description of Artificial Sequence: Synthetic oligonucleotide
cgauuuuauccaggauguu

SEQ ID NO: 1129781 - RNA, 19 nt, Artificial Sequence
  Description of Artificial Sequence: Synthetic oligonucleotide
aauauuuucuuucagcuac

SEQ ID NO: 1129782 - RNA, 19 nt, Artificial Sequence
  Description of Artificial Sequence: Synthetic oligonucleotide
aaccauauaaaauucugcc

SEQ ID NO: 1129783 - RNA, 19 nt, Artificial Sequence
  Description of Artificial Sequence: Synthetic oligonucleotide
uuuaauauaaaugaacuag

SEQ ID NO: 1129784 - RNA, 19 nt, Artificial Sequence
  Description of Artificial Sequence: Synthetic oligonucleotide
uauaaaugaacuagaaugg

SEQ ID NO: 1129785 - RNA, 19 nt, Artificial Sequence
  Description of Artificial Sequence: Synthetic oligonucleotide
uaguuaaugacaaagacug

SEQ ID NO: 1129786 - RNA, 19 nt, Artificial Sequence
  Description of Artificial Sequence: Synthetic oligonucleotide
cauuaaucaauucagaccc

SEQ ID NO: 1129787 - RNA, 19 nt, Artificial Sequence
  Description of Artificial Sequence: Synthetic oligonucleotide
aaaguauuggaacuguuag

SEQ ID NO: 1129788 - RNA, 19 nt, Artificial Sequence
  Description of Artificial Sequence: Synthetic oligonucleotide
guaaguaacguucaaaucc

SEQ ID NO: 1129789 - RNA, 19 nt, Artificial Sequence
  Description of Artificial Sequence: Synthetic oligonucleotide
uaagaaaugauuaggaagu

SEQ ID NO: 1129790 - RNA, 19 nt, Artificial Sequence
  Description of Artificial Sequence: Synthetic oligonucleotide
ucaguuuacacaaauaagu

SEQ ID NO: 1129791 - RNA, 19 nt, Artificial Sequence
  Description of Artificial Sequence: Synthetic oligonucleotide
uuuaaugacuaauaugucc

SEQ ID NO: 1129792 - RNA, 19 nt, Artificial Sequence
  Description of Artificial Sequence: Synthetic oligonucleotide
aguaggaaugaauagcagc

SEQ ID NO: 1129793 - RNA, 19 nt, Artificial Sequence
  Description of Artificial Sequence: Synthetic oligonucleotide
acugcuucaauucagaaca

SEQ ID NO: 1129794 - RNA, 19 nt, Artificial Sequence
  Description of Artificial Sequence: Synthetic oligonucleotide
aguuuaaugacuaauaugu

SEQ ID NO: 1129795 - RNA, 19 nt, Artificial Sequence
  Description of Artificial Sequence: Synthetic oligonucleotide
uuaaugacuaauauguccu

SEQ ID NO: 1129796 - RNA, 19 nt, Artificial Sequence
  Description of Artificial Sequence: Synthetic oligonucleotide
agaauuauccauugcauag

SEQ ID NO: 1129797 - RNA, 19 nt, Artificial Sequence
  Description of Artificial Sequence: Synthetic oligonucleotide
uuaauauaaaugaacuaga

SEQ ID NO: 1129798 - RNA, 19 nt, Artificial Sequence
  Description of Artificial Sequence: Synthetic oligonucleotide
ucauuaaucaauucagacc

SEQ ID NO: 1129799 - RNA, 19 nt, Artificial Sequence
  Description of Artificial Sequence: Synthetic oligonucleotide
ucaacaguuauuaaauaug

SEQ ID NO: 1129800 - RNA, 19 nt, Artificial Sequence
  Description of Artificial Sequence: Synthetic oligonucleotide
uguaugaaugugcacaaag

SEQ ID NO: 1129801 - RNA, 19 nt, Artificial Sequence
  Description of Artificial Sequence: Synthetic oligonucleotide
uucauuaucccgcauguag

SEQ ID NO: 1129802 - RNA, 19 nt, Artificial Sequence
  Description of Artificial Sequence: Synthetic oligonucleotide
uuugagagaaccaucucag

SEQ ID NO: 1129803 - RNA, 19 nt, Artificial Sequence
  Description of Artificial Sequence: Synthetic oligonucleotide
ugaaucagcaacaaccuga

SEQ ID NO: 1129804 - RNA, 19 nt, Artificial Sequence
  Description of Artificial Sequence: Synthetic oligonucleotide
aaugaacuagaauggugac

SEQ ID NO: 1129805 - RNA, 19 nt, Artificial Sequence
  Description of Artificial Sequence: Synthetic oligonucleotide
ucuguauaagaaaugauua

SEQ ID NO: 1129806 - RNA, 19 nt, Artificial Sequence
  Description of Artificial Sequence: Synthetic oligonucleotide
auaacuaaagaucaacagu

SEQ ID NO: 1129807 - RNA, 19 nt, Artificial Sequence
  Description of Artificial Sequence: Synthetic oligonucleotide
aggacaauuugagagaacc

SEQ ID NO: 1129808 - RNA, 19 nt, Artificial Sequence
  Description of Artificial Sequence: Synthetic oligonucleotide
aguuauuaaauaugauuuc

SEQ ID NO: 1129809 - RNA, 19 nt, Artificial Sequence
  Description of Artificial Sequence: Synthetic oligonucleotide
uaacuaaagaucaacaguu

SEQ ID NO: 1129810 - RNA, 19 nt, Artificial Sequence
  Description of Artificial Sequence: Synthetic oligonucleotide
aaagggauaacaucuuuga

SEQ ID NO: 1129811 - RNA, 19 nt, Artificial Sequence
  Description of Artificial Sequence: Synthetic oligonucleotide
aacuguuagaucucuagcu

SEQ ID NO: 1129812 - RNA, 19 nt, Artificial Sequence
  Description of Artificial Sequence: Synthetic oligonucleotide
gagagaaccaucucagugg

SEQ ID NO: 1129813 - RNA, 19 nt, Artificial Sequence
  Description of Artificial Sequence: Synthetic oligonucleotide
ugaacuagaauggugacug

SEQ ID NO: 1129814 - RNA, 19 nt, Artificial Sequence
  Description of Artificial Sequence: Synthetic oligonucleotide
ugcuuuaagauuucaacug

SEQ ID NO: 1129815 - RNA, 19 nt, Artificial Sequence
  Description of Artificial Sequence: Synthetic oligonucleotide
uaaguaacguucaaauccc

SEQ ID NO: 1129816 - RNA, 19 nt, Artificial Sequence
  Description of Artificial Sequence: Synthetic oligonucleotide
cuagauuacaccacacugg

SEQ ID NO: 1129817 - RNA, 19 nt, Artificial Sequence
  Description of Artificial Sequence: Synthetic oligonucleotide
uguccuuaaaguaggaaug

SEQ ID NO: 1129818 - RNA, 19 nt, Artificial Sequence
  Description of Artificial Sequence: Synthetic oligonucleotide
uggagaauuauccauugca

SEQ ID NO: 1129819 - RNA, 19 nt, Artificial Sequence
  Description of Artificial Sequence: Synthetic oligonucleotide
aaaggcuugagugcuaacg

SEQ ID NO: 1129820 - RNA, 19 nt, Artificial Sequence
  Description of Artificial Sequence: Synthetic oligonucleotide
auguagaaaggcuugagug

SEQ ID NO: 1129821 - RNA, 19 nt, Artificial Sequence
  Description of Artificial Sequence: Synthetic oligonucleotide
cauucuacuagauuacacc

SEQ ID NO: 1129822 - RNA, 19 nt, Artificial Sequence
  Description of Artificial Sequence: Synthetic oligonucleotide
gauuacaccacacuggaga

SEQ ID NO: 1129823 - RNA, 19 nt, Artificial Sequence
  Description of Artificial Sequence: Synthetic oligonucleotide
accaaagguaaauacuugg

SEQ ID NO: 1129824 - RNA, 19 nt, Artificial Sequence
  Description of Artificial Sequence: Synthetic oligonucleotide
ugagagaaccaucucagug

SEQ ID NO: 1129825 - RNA, 19 nt, Artificial Sequence
  Description of Artificial Sequence: Synthetic oligonucleotide
acuaucaaagcuugaauca

SEQ ID NO: 1129826 - RNA, 19 nt, Artificial Sequence
  Description of Artificial Sequence: Synthetic oligonucleotide
uaagauuucaacugccucu

SEQ ID NO: 1129827 - RNA, 19 nt, Artificial Sequence
  Description of Artificial Sequence: Synthetic oligonucleotide
uaaaggugaaguucugggg

SEQ ID NO: 1129828 - RNA, 19 nt, Artificial Sequence
  Description of Artificial Sequence: Synthetic oligonucleotide
uuauccauugcauagguuu

SEQ ID NO: 1129829 - RNA, 19 nt, Artificial Sequence
  Description of Artificial Sequence: Synthetic oligonucleotide
ucuacuagauuacaccaca

SEQ ID NO: 1129830 - RNA, 19 nt, Artificial Sequence
  Description of Artificial Sequence: Synthetic oligonucleotide
ugauccaaacugacgaagg

SEQ ID NO: 1129831 - RNA, 19 nt, Artificial Sequence
  Description of Artificial Sequence: Synthetic oligonucleotide
aucucuagcucccaaauug

SEQ ID NO: 1129832 - RNA, 19 nt, Artificial Sequence
  Description of Artificial Sequence: Synthetic oligonucleotide
aauuauccauugcauaggu

SEQ ID NO: 1129833 - RNA, 19 nt, Artificial Sequence
  Description of Artificial Sequence: Synthetic oligonucleotide
gaguuuaaugacuaauaug

SEQ ID NO: 1129834 - RNA, 19 nt, Artificial Sequence
  Description of Artificial Sequence: Synthetic oligonucleotide
uuagcauauguucuagucu

SEQ ID NO: 1129835 - RNA, 19 nt, Artificial Sequence
  Description of Artificial Sequence: Synthetic oligonucleotide
uagcauauguucuagucug

SEQ ID NO: 1129836 - RNA, 19 nt, Artificial Sequence
  Description of Artificial Sequence: Synthetic oligonucleotide
ucuuggauuaaagauaccu

SEQ ID NO: 1129837 - RNA, 19 nt, Artificial Sequence
  Description of Artificial Sequence: Synthetic oligonucleotide
agaaaauugaugcuucagu

SEQ ID NO: 1129838 - RNA, 19 nt, Artificial Sequence
  Description of Artificial Sequence: Synthetic oligonucleotide
uacuaucaaagcuugaauc

SEQ ID NO: 1129839 - RNA, 19 nt, Artificial Sequence
  Description of Artificial Sequence: Synthetic oligonucleotide
uuuagcauauguucuaguc

SEQ ID NO: 1129840 - RNA, 19 nt, Artificial Sequence
  Description of Artificial Sequence: Synthetic oligonucleotide
ggagccgucauuuacaugc

SEQ ID NO: 1129841 - RNA, 19 nt, Artificial Sequence
  Description of Artificial Sequence: Synthetic oligonucleotide
uuuaagauuucaacugccu

SEQ ID NO: 1129842 - RNA, 19 nt, Artificial Sequence
  Description of Artificial Sequence: Synthetic oligonucleotide
auucuacuagauuacacca

SEQ ID NO: 1129843 - RNA, 19 nt, Artificial Sequence
  Description of Artificial Sequence: Synthetic oligonucleotide
uagauuacaccacacugga

SEQ ID NO: 1129844 - RNA, 19 nt, Artificial Sequence
  Description of Artificial Sequence: Synthetic oligonucleotide
auauguucuagucuguccu

SEQ ID NO: 1129845 - RNA, 19 nt, Artificial Sequence
  Description of Artificial Sequence: Synthetic oligonucleotide
ucggcuuugagaauucuca

SEQ ID NO: 1129846 - RNA, 19 nt, Artificial Sequence
  Description of Artificial Sequence: Synthetic oligonucleotide
cauuggaugugauuacugg

SEQ ID NO: 1129847 - RNA, 19 nt, Artificial Sequence
  Description of Artificial Sequence: Synthetic oligonucleotide
acuugucucauucuacuag

SEQ ID NO: 1129848 - RNA, 19 nt, Artificial Sequence
  Description of Artificial Sequence: Synthetic oligonucleotide
agacaguuaagaaagcagg

SEQ ID NO: 1129849 - RNA, 19 nt, Artificial Sequence
  Description of Artificial Sequence: Synthetic oligonucleotide
uaacguucaaaucccauuc

SEQ ID NO: 1129850 - RNA, 19 nt, Artificial Sequence
  Description of Artificial Sequence: Synthetic oligonucleotide
uaauauguccuuaacuuuu

SEQ ID NO: 1129851 - RNA, 19 nt, Artificial Sequence
  Description of Artificial Sequence: Synthetic oligonucleotide
uagaucaacaccccacuug

SEQ ID NO: 1129852 - RNA, 19 nt, Artificial Sequence
  Description of Artificial Sequence: Synthetic oligonucleotide
ucucuagcucccaaauugg

SEQ ID NO: 1129853 - RNA, 19 nt, Artificial Sequence
  Description of Artificial Sequence: Synthetic oligonucleotide
uucaacauccucaggacaa

SEQ ID NO: 1129854 - RNA, 19 nt, Artificial Sequence
  Description of Artificial Sequence: Synthetic oligonucleotide
ugugacacaguucaacauc

SEQ ID NO: 1129855 - RNA, 19 nt, Artificial Sequence
  Description of Artificial Sequence: Synthetic oligonucleotide
gauuacugguguaugaaug

SEQ ID NO: 1129856 - RNA, 19 nt, Artificial Sequence
  Description of Artificial Sequence: Synthetic oligonucleotide
agugcuaacggguaguuaa

SEQ ID NO: 1129857 - RNA, 19 nt, Artificial Sequence
  Description of Artificial Sequence: Synthetic oligonucleotide
aagaaaauugaugcuucag

SEQ ID NO: 1129858 - RNA, 19 nt, Artificial Sequence
  Description of Artificial Sequence: Synthetic oligonucleotide
gaauuauccauugcauagg

SEQ ID NO: 1129859 - RNA, 19 nt, Artificial Sequence
  Description of Artificial Sequence: Synthetic oligonucleotide
auagguuuggccauauuuc

SEQ ID NO: 1129860 - RNA, 19 nt, Artificial Sequence
  Description of Artificial Sequence: Synthetic oligonucleotide
gcuugaaucagcaacaacc

SEQ ID NO: 1129861 - RNA, 19 nt, Artificial Sequence
  Description of Artificial Sequence: Synthetic oligonucleotide
uuggauuaaagauaccuuu

SEQ ID NO: 1129862 - RNA, 19 nt, Artificial Sequence
  Description of Artificial Sequence: Synthetic oligonucleotide
aaucaauucagacccugaa

SEQ ID NO: 1129863 - RNA, 19 nt, Artificial Sequence
  Description of Artificial Sequence: Synthetic oligonucleotide
uguuagaucucuagcuccc

SEQ ID NO: 1129864 - RNA, 19 nt, Artificial Sequence
  Description of Artificial Sequence: Synthetic oligonucleotide
uaaaauucugccagguguc

SEQ ID NO: 1129865 - RNA, 19 nt, Artificial Sequence
  Description of Artificial Sequence: Synthetic oligonucleotide
uaacggguaguuaaugaca

SEQ ID NO: 1129866 - RNA, 19 nt, Artificial Sequence
  Description of Artificial Sequence: Synthetic oligonucleotide
uguaaaggugaaguucugg

SEQ ID NO: 1129867 - RNA, 19 nt, Artificial Sequence
  Description of Artificial Sequence: Synthetic oligonucleotide
uaggaugugguaccguucc

SEQ ID NO: 1129868 - RNA, 19 nt, Artificial Sequence
  Description of Artificial Sequence: Synthetic oligonucleotide
augaauuugugacacaguu

SEQ ID NO: 1129869 - RNA, 19 nt, Artificial Sequence
  Description of Artificial Sequence: Synthetic oligonucleotide
aaguauuggaacuguuaga

SEQ ID NO: 1129870 - RNA, 19 nt, Artificial Sequence
  Description of Artificial Sequence: Synthetic oligonucleotide
ucauuaucccgcauguaga

SEQ ID NO: 1129871 - RNA, 19 nt, Artificial Sequence
  Description of Artificial Sequence: Synthetic oligonucleotide
agaguuuaaugacuaauau

SEQ ID NO: 1129872 - RNA, 19 nt, Artificial Sequence
  Description of Artificial Sequence: Synthetic oligonucleotide
uagaauggugacugaagag

SEQ ID NO: 1129873 - RNA, 19 nt, Artificial Sequence
  Description of Artificial Sequence: Synthetic oligonucleotide
gaaugaauagcagcuguag

SEQ ID NO: 1129874 - RNA, 19 nt, Artificial Sequence
  Description of Artificial Sequence: Synthetic oligonucleotide
ccuuuauuuugcuugaagg

SEQ ID NO: 1129875 - RNA, 19 nt, Artificial Sequence
  Description of Artificial Sequence: Synthetic oligonucleotide
gaacuguuagaucucuagc

SEQ ID NO: 1129876 - RNA, 19 nt, Artificial Sequence
  Description of Artificial Sequence: Synthetic oligonucleotide
aagaguuccuccauaaccu

SEQ ID NO: 1129877 - RNA, 19 nt, Artificial Sequence
  Description of Artificial Sequence: Synthetic oligonucleotide
aaacugacgaagguccagg

SEQ ID NO: 1129878 - RNA, 19 nt, Artificial Sequence
  Description of Artificial Sequence: Synthetic oligonucleotide
auuacugguguaugaaugu

SEQ ID NO: 1129879 - RNA, 19 nt, Artificial Sequence
  Description of Artificial Sequence: Synthetic oligonucleotide
ugacugaacggacccaucc

SEQ ID NO: 1129880 - RNA, 19 nt, Artificial Sequence
  Description of Artificial Sequence: Synthetic oligonucleotide
ugaagacugcuucaauuca

SEQ ID NO: 1129881 - RNA, 19 nt, Artificial Sequence
  Description of Artificial Sequence: Synthetic oligonucleotide
ucggguaccuuuauuuugc

SEQ ID NO: 1129882 - RNA, 19 nt, Artificial Sequence
  Description of Artificial Sequence: Synthetic oligonucleotide
aguauuggaacuguuagau

SEQ ID NO: 1129883 - RNA, 19 nt, Artificial Sequence
  Description of Artificial Sequence: Synthetic oligonucleotide
uuuuauaacuaaagaucaa

SEQ ID NO: 1129884 - RNA, 19 nt, Artificial Sequence
  Description of Artificial Sequence: Synthetic oligonucleotide
ucauuggaugugauuacug

SEQ ID NO: 1129885 - RNA, 19 nt, Artificial Sequence
  Description of Artificial Sequence: Synthetic oligonucleotide
agucauuggaugugauuac

SEQ ID NO: 1129886 - RNA, 19 nt, Artificial Sequence
  Description of Artificial Sequence: Synthetic oligonucleotide
uugagaauucucagcucgg

SEQ ID NO: 1129887 - RNA, 19 nt, Artificial Sequence
  Description of Artificial Sequence: Synthetic oligonucleotide
guaaauacuuggguaaaag

SEQ ID NO: 1129888 - RNA, 19 nt, Artificial Sequence
  Description of Artificial Sequence: Synthetic oligonucleotide
ugugauuacugguguauga

SEQ ID NO: 1129889 - RNA, 19 nt, Artificial Sequence
  Description of Artificial Sequence: Synthetic oligonucleotide
cuaacggguaguuaaugac

SEQ ID NO: 1129890 - RNA, 19 nt, Artificial Sequence
  Description of Artificial Sequence: Synthetic oligonucleotide
cauauguucuagucugucc

SEQ ID NO: 1129891 - RNA, 19 nt, Artificial Sequence
  Description of Artificial Sequence: Synthetic oligonucleotide
ugaucuggcuagucgaugc

SEQ ID NO: 1129892 - RNA, 19 nt, Artificial Sequence
  Description of Artificial Sequence: Synthetic oligonucleotide
uguccugagacaguuaaga

SEQ ID NO: 1129893 - RNA, 19 nt, Artificial Sequence
  Description of Artificial Sequence: Synthetic oligonucleotide
cuguuagaucucuagcucc

SEQ ID NO: 1129894 - RNA, 19 nt, Artificial Sequence
  Description of Artificial Sequence: Synthetic oligonucleotide
uugacuauuacaguauuua

SEQ ID NO: 1129895 - RNA, 19 nt, Artificial Sequence
  Description of Artificial Sequence: Synthetic oligonucleotide
gucucauucuacuagauua

SEQ ID NO: 1129896 - RNA, 19 nt, Artificial Sequence
  Description of Artificial Sequence: Synthetic oligonucleotide
auuggaugugauuacuggu

SEQ ID NO: 1129897 - RNA, 19 nt, Artificial Sequence
  Description of Artificial Sequence: Synthetic oligonucleotide
uuaaucaauucagacccug

SEQ ID NO: 1129898 - RNA, 19 nt, Artificial Sequence
  Description of Artificial Sequence: Synthetic oligonucleotide
caaaucccauuccaaagcc

SEQ ID NO: 1129899 - RNA, 19 nt, Artificial Sequence
  Description of Artificial Sequence: Synthetic oligonucleotide
uccuaggaugcauuguaag

SEQ ID NO: 1129900 - RNA, 19 nt, Artificial Sequence
  Description of Artificial Sequence: Synthetic oligonucleotide
gaugugguaccguuccucc

SEQ ID NO: 1129901 - RNA, 19 nt, Artificial Sequence
  Description of Artificial Sequence: Synthetic oligonucleotide
guauaagaaaugauuagga

SEQ ID NO: 1129902 - RNA, 19 nt, Artificial Sequence
  Description of Artificial Sequence: Synthetic oligonucleotide
aguuaagaaagcaggaaca

SEQ ID NO: 1129903 - RNA, 19 nt, Artificial Sequence
  Description of Artificial Sequence: Synthetic oligonucleotide
agaauucucagcucggaau

SEQ ID NO: 1129904 - RNA, 19 nt, Artificial Sequence
  Description of Artificial Sequence: Synthetic oligonucleotide
ggugaaguuguccugagac

SEQ ID NO: 1129905 - RNA, 19 nt, Artificial Sequence
  Description of Artificial Sequence: Synthetic oligonucleotide
ugagacaguuaagaaagca

SEQ ID NO: 1129906 - RNA, 19 nt, Artificial Sequence
  Description of Artificial Sequence: Synthetic oligonucleotide
caucacccaaugaagacug

SEQ ID NO: 1129907 - RNA, 19 nt, Artificial Sequence
  Description of Artificial Sequence: Synthetic oligonucleotide
agaucaacaguuauuaaau

SEQ ID NO: 1129908 - RNA, 19 nt, Artificial Sequence
  Description of Artificial Sequence: Synthetic oligonucleotide
uucuacuagauuacaccac

SEQ ID NO: 1129909 - RNA, 19 nt, Artificial Sequence
  Description of Artificial Sequence: Synthetic oligonucleotide
uaagugguuuuguccaaag

SEQ ID NO: 1129910 - RNA, 19 nt, Artificial Sequence
  Description of Artificial Sequence: Synthetic oligonucleotide
uuggguaaaagcuccugac

SEQ ID NO: 1129911 - RNA, 19 nt, Artificial Sequence
  Description of Artificial Sequence: Synthetic oligonucleotide
guggcacugauccaaacug

SEQ ID NO: 1129912 - RNA, 19 nt, Artificial Sequence
  Description of Artificial Sequence: Synthetic oligonucleotide
ucaacugccucuguauaag

SEQ ID NO: 1129913 - RNA, 19 nt, Artificial Sequence
  Description of Artificial Sequence: Synthetic oligonucleotide
aacggacccaucccugcac

SEQ ID NO: 1129914 - RNA, 19 nt, Artificial Sequence
  Description of Artificial Sequence: Synthetic oligonucleotide
uaaucaauucagacccuga

SEQ ID NO: 1129915 - RNA, 19 nt, Artificial Sequence
  Description of Artificial Sequence: Synthetic oligonucleotide
ugcucuaggaugugguacc

SEQ ID NO: 1129916 - RNA, 19 nt, Artificial Sequence
  Description of Artificial Sequence: Synthetic oligonucleotide
ucuguagaucaacacccca

SEQ ID NO: 1129917 - RNA, 19 nt, Artificial Sequence
  Description of Artificial Sequence: Synthetic oligonucleotide
aagaguuuaaugacuaaua

SEQ ID NO: 1129918 - RNA, 19 nt, Artificial Sequence
  Description of Artificial Sequence: Synthetic oligonucleotide
ucuagucuguccuucugac

SEQ ID NO: 1129919 - RNA, 19 nt, Artificial Sequence
  Description of Artificial Sequence: Synthetic oligonucleotide
uuuccuaaguccugaucug

SEQ ID NO: 1129920 - RNA, 19 nt, Artificial Sequence
  Description of Artificial Sequence: Synthetic oligonucleotide
ucuauccccaucuuggauu

SEQ ID NO: 1129921 - RNA, 19 nt, Artificial Sequence
  Description of Artificial Sequence: Synthetic oligonucleotide
gaagacugcuucaauucag

SEQ ID NO: 1129922 - RNA, 19 nt, Artificial Sequence
  Description of Artificial Sequence: Synthetic oligonucleotide
aauaagugguuuuguccaa

SEQ ID NO: 1129923 - RNA, 19 nt, Artificial Sequence
  Description of Artificial Sequence: Synthetic oligonucleotide
aggaaugaguaaaucuugg

SEQ ID NO: 1129924 - RNA, 19 nt, Artificial Sequence
  Description of Artificial Sequence: Synthetic oligonucleotide
cacugauccaaacugacga

SEQ ID NO: 1129925 - RNA, 19 nt, Artificial Sequence
  Description of Artificial Sequence: Synthetic oligonucleotide
ugacuauuacaguauuuau

SEQ ID NO: 1129926 - RNA, 19 nt, Artificial Sequence
  Description of Artificial Sequence: Synthetic oligonucleotide
uccugaucuggcuagucga

SEQ ID NO: 1129927 - RNA, 19 nt, Artificial Sequence
  Description of Artificial Sequence: Synthetic oligonucleotide
ucuggcuagucgaugcucu

SEQ ID NO: 1129928 - RNA, 19 nt, Artificial Sequence
  Description of Artificial Sequence: Synthetic oligonucleotide
gaaaauugaugcuucaguu

SEQ ID NO: 1129929 - RNA, 19 nt, Artificial Sequence
  Description of Artificial Sequence: Synthetic oligonucleotide
caguucaacauccucagga

SEQ ID NO: 1129930 - RNA, 19 nt, Artificial Sequence
  Description of Artificial Sequence: Synthetic oligonucleotide
agcuugaaucagcaacaac

SEQ ID NO: 1129931 - RNA, 19 nt, Artificial Sequence
  Description of Artificial Sequence: Synthetic oligonucleotide
cuagaauggugacugaaga

SEQ ID NO: 1129932 - RNA, 19 nt, Artificial Sequence
  Description of Artificial Sequence: Synthetic oligonucleotide
agaaaugauuaggaaguug

SEQ ID NO: 1129933 - RNA, 19 nt, Artificial Sequence
  Description of Artificial Sequence: Synthetic oligonucleotide
aaagccuccguguggcacu

SEQ ID NO: 1129934 - RNA, 19 nt, Artificial Sequence
  Description of Artificial Sequence: Synthetic oligonucleotide
uaggaugcauuguaaguaa

SEQ ID NO: 1129935 - RNA, 19 nt, Artificial Sequence
  Description of Artificial Sequence: Synthetic oligonucleotide
agagaaccaucucaguggu

SEQ ID NO: 1129936 - RNA, 19 nt, Artificial Sequence
  Description of Artificial Sequence: Synthetic oligonucleotide
gacuaauauguccuuaacu

SEQ ID NO: 1129937 - RNA, 19 nt, Artificial Sequence
  Description of Artificial Sequence: Synthetic oligonucleotide
uuuacacaaauaagugguu

SEQ ID NO: 1129938 - RNA, 19 nt, Artificial Sequence
  Description of Artificial Sequence: Synthetic oligonucleotide
caaauuggcacuugucuca

SEQ ID NO: 1129939 - RNA, 19 nt, Artificial Sequence
  Description of Artificial Sequence: Synthetic oligonucleotide
cucagugguagccuugaag

SEQ ID NO: 1129940 - RNA, 19 nt, Artificial Sequence
  Description of Artificial Sequence: Synthetic oligonucleotide
uuacgcacuccccacucgc

SEQ ID NO: 1129941 - RNA, 19 nt, Artificial Sequence
  Description of Artificial Sequence: Synthetic oligonucleotide
gaauguuggaccaaaggua

SEQ ID NO: 1129942 - RNA, 19 nt, Artificial Sequence
  Description of Artificial Sequence: Synthetic oligonucleotide
aggcuugagugcuaacggg

SEQ ID NO: 1129943 - RNA, 19 nt, Artificial Sequence
  Description of Artificial Sequence: Synthetic oligonucleotide
ugggauguugccacagugu

SEQ ID NO: 1129944 - RNA, 19 nt, Artificial Sequence
  Description of Artificial Sequence: Synthetic oligonucleotide
ugauuacugguguaugaau

SEQ ID NO: 1129945 - RNA, 19 nt, Artificial Sequence
  Description of Artificial Sequence: Synthetic oligonucleotide
cuuuccuaaguccugaucu

SEQ ID NO: 1129946 - RNA, 19 nt, Artificial Sequence
  Description of Artificial Sequence: Synthetic oligonucleotide
uucucagcucggaauguug

SEQ ID NO: 1129947 - RNA, 19 nt, Artificial Sequence
  Description of Artificial Sequence: Synthetic oligonucleotide
uucaacugccucuguauaa

SEQ ID NO: 1129948 - RNA, 19 nt, Artificial Sequence
  Description of Artificial Sequence: Synthetic oligonucleotide
acugaacggacccaucccu

SEQ ID NO: 1129949 - RNA, 19 nt, Artificial Sequence
  Description of Artificial Sequence: Synthetic oligonucleotide
accguuacgcacuccccac

SEQ ID NO: 1129950 - RNA, 19 nt, Artificial Sequence
  Description of Artificial Sequence: Synthetic oligonucleotide
ugaaggcuccacuuggaaa

SEQ ID NO: 1129951 - RNA, 19 nt, Artificial Sequence
  Description of Artificial Sequence: Synthetic oligonucleotide
caucccugcaccguuacgc

SEQ ID NO: 1129952 - RNA, 19 nt, Artificial Sequence
  Description of Artificial Sequence: Synthetic oligonucleotide
aacuagaauggugacugaa

SEQ ID NO: 1129953 - RNA, 19 nt, Artificial Sequence
  Description of Artificial Sequence: Synthetic oligonucleotide
guccugaucuggcuagucg

SEQ ID NO: 1129954 - RNA, 19 nt, Artificial Sequence
  Description of Artificial Sequence: Synthetic oligonucleotide
auuguaaguaacguucaaa

SEQ ID NO: 1129955 - RNA, 19 nt, Artificial Sequence
  Description of Artificial Sequence: Synthetic oligonucleotide
uggggugcuugcuuuaaga

SEQ ID NO: 1129956 - RNA, 19 nt, Artificial Sequence
  Description of Artificial Sequence: Synthetic oligonucleotide
ugaacggacccaucccugc

SEQ ID NO: 1129957 - RNA, 19 nt, Artificial Sequence
  Description of Artificial Sequence: Synthetic oligonucleotide
aacggguaguuaaugacaa

SEQ ID NO: 1129958 - RNA, 19 nt, Artificial Sequence
  Description of Artificial Sequence: Synthetic oligonucleotide
agaucucuagcucccaaau

SEQ ID NO: 1129959 - RNA, 19 nt, Artificial Sequence
  Description of Artificial Sequence: Synthetic oligonucleotide
ugggaucugacugaacgga

SEQ ID NO: 1129960 - RNA, 19 nt, Artificial Sequence
  Description of Artificial Sequence: Synthetic oligonucleotide
uuacugguguaugaaugug

SEQ ID NO: 1129961 - RNA, 19 nt, Artificial Sequence
  Description of Artificial Sequence: Synthetic oligonucleotide
cucggguaccuuuauuuug

SEQ ID NO: 1129962 - RNA, 19 nt, Artificial Sequence
  Description of Artificial Sequence: Synthetic oligonucleotide
guaaaucuuggaaaaggga

SEQ ID NO: 1129963 - RNA, 19 nt, Artificial Sequence
  Description of Artificial Sequence: Synthetic oligonucleotide
cuugagugcuaacggguag

SEQ ID NO: 1129964 - RNA, 19 nt, Artificial Sequence
  Description of Artificial Sequence: Synthetic oligonucleotide
agcaggaacauugaagaaa

SEQ ID NO: 1129965 - RNA, 19 nt, Artificial Sequence
  Description of Artificial Sequence: Synthetic oligonucleotide
aacugacgaagguccaggu

SEQ ID NO: 1129966 - RNA, 19 nt, Artificial Sequence
  Description of Artificial Sequence: Synthetic oligonucleotide
aucacuucuaggugaaguu

SEQ ID NO: 1129967 - RNA, 19 nt, Artificial Sequence
  Description of Artificial Sequence: Synthetic oligonucleotide
uguuggaccaaagguaaau

SEQ ID NO: 1129968 - RNA, 19 nt, Artificial Sequence
  Description of Artificial Sequence: Synthetic oligonucleotide
ucaacuccuaggaugcauu

SEQ ID NO: 1129969 - RNA, 19 nt, Artificial Sequence
  Description of Artificial Sequence: Synthetic oligonucleotide
cuacuagauuacaccacac

SEQ ID NO: 1129970 - RNA, 19 nt, Artificial Sequence
  Description of Artificial Sequence: Synthetic oligonucleotide
guaggaaugaauagcagcu

SEQ ID NO: 1129971 - RNA, 19 nt, Artificial Sequence
  Description of Artificial Sequence: Synthetic oligonucleotide
acggacccaucccugcacc

SEQ ID NO: 1129972 - RNA, 19 nt, Artificial Sequence
  Description of Artificial Sequence: Synthetic oligonucleotide
cugauccaaacugacgaag

SEQ ID NO: 1129973 - RNA, 19 nt, Artificial Sequence
  Description of Artificial Sequence: Synthetic oligonucleotide
uucggcuuugagaauucuc

SEQ ID NO: 1129974 - RNA, 19 nt, Artificial Sequence
  Description of Artificial Sequence: Synthetic oligonucleotide
cuagucuguccuucugacc

SEQ ID NO: 1129975 - RNA, 19 nt, Artificial Sequence
  Description of Artificial Sequence: Synthetic oligonucleotide
acuccuaggaugcauugua

SEQ ID NO: 1129976 - RNA, 19 nt, Artificial Sequence
  Description of Artificial Sequence: Synthetic oligonucleotide
aagauaccuuucuuccaaa

SEQ ID NO: 1129977 - RNA, 19 nt, Artificial Sequence
  Description of Artificial Sequence: Synthetic oligonucleotide
ugucucauucuacuagauu

SEQ ID NO: 1129978 - RNA, 19 nt, Artificial Sequence
  Description of Artificial Sequence: Synthetic oligonucleotide
ucggaauguuggaccaaag

SEQ ID NO: 1129979 - RNA, 19 nt, Artificial Sequence
  Description of Artificial Sequence: Synthetic oligonucleotide
ugaauagcagcuguagcuu

SEQ ID NO: 1129980 - RNA, 19 nt, Artificial Sequence
  Description of Artificial Sequence: Synthetic oligonucleotide
acucgcguccuguaccccg

SEQ ID NO: 1129981 - RNA, 19 nt, Artificial Sequence
  Description of Artificial Sequence: Synthetic oligonucleotide
uacgcacuccccacucgcg

SEQ ID NO: 1129982 - RNA, 19 nt, Artificial Sequence
  Description of Artificial Sequence: Synthetic oligonucleotide
ugguaggcuuuccuaaguc

SEQ ID NO: 1129983 - RNA, 19 nt, Artificial Sequence
  Description of Artificial Sequence: Synthetic oligonucleotide
gguaggcuuuccuaagucc

SEQ ID NO: 1129984 - RNA, 19 nt, Artificial Sequence
  Description of Artificial Sequence: Synthetic oligonucleotide
ugcuucaauucagaacagc

SEQ ID NO: 1129985 - RNA, 19 nt, Artificial Sequence
  Description of Artificial Sequence: Synthetic oligonucleotide
cuugaaucagcaacaaccu

SEQ ID NO: 1129986 - RNA, 19 nt, Artificial Sequence
  Description of Artificial Sequence: Synthetic oligonucleotide
ugagaauucucagcucgga

SEQ ID NO: 1129987 - RNA, 19 nt, Artificial Sequence
  Description of Artificial Sequence: Synthetic oligonucleotide
ucgaugcucuaggaugugg

SEQ ID NO: 1129988 - RNA, 19 nt, Artificial Sequence
  Description of Artificial Sequence: Synthetic oligonucleotide
caacugugugcugaggagc

SEQ ID NO: 1129989 - RNA, 19 nt, Artificial Sequence
  Description of Artificial Sequence: Synthetic oligonucleotide
auguucuagucuguccuuc

SEQ ID NO: 1129990 - RNA, 19 nt, Artificial Sequence
  Description of Artificial Sequence: Synthetic oligonucleotide
guaacagcucugaagaaaa

SEQ ID NO: 1129991 - RNA, 19 nt, Artificial Sequence
  Description of Artificial Sequence: Synthetic oligonucleotide
guuacgcacuccccacucg

SEQ ID NO: 1129992 - RNA, 19 nt, Artificial Sequence
  Description of Artificial Sequence: Synthetic oligonucleotide
gcuucaaccauauaaaauu

SEQ ID NO: 1129993 - RNA, 19 nt, Artificial Sequence
  Description of Artificial Sequence: Synthetic oligonucleotide
cuccugacaucacuucuag

SEQ ID NO: 1129994 - RNA, 19 nt, Artificial Sequence
  Description of Artificial Sequence: Synthetic oligonucleotide
ucccaaauuggcacuuguc

SEQ ID NO: 1129995 - RNA, 19 nt, Artificial Sequence
  Description of Artificial Sequence: Synthetic oligonucleotide
cuuggguaaaagcuccuga

SEQ ID NO: 1129996 - RNA, 19 nt, Artificial Sequence
  Description of Artificial Sequence: Synthetic oligonucleotide
uugagagaaccaucucagu

SEQ ID NO: 1129997 - RNA, 19 nt, Artificial Sequence
  Description of Artificial Sequence: Synthetic oligonucleotide
augaacuagaauggugacu

SEQ ID NO: 1129998 - RNA, 19 nt, Artificial Sequence
  Description of Artificial Sequence: Synthetic oligonucleotide
cugagacaguuaagaaagc

SEQ ID NO: 1129999 - RNA, 19 nt, Artificial Sequence
  Description of Artificial Sequence: Synthetic oligonucleotide
agcucggaauguuggacca

SEQ ID NO: 1130000 - RNA, 19 nt, Artificial Sequence
  Description of Artificial Sequence: Synthetic oligonucleotide
augcauuguaaguaacguu

SEQ ID NO: 1130001 - RNA, 19 nt, Artificial Sequence
  Description of Artificial Sequence: Synthetic oligonucleotide
gaggagacgccaggcaccg

SEQ ID NO: 1130002 - RNA, 19 nt, Artificial Sequence
  Description of Artificial Sequence: Synthetic oligonucleotide
aagaaaugauuaggaaguu

SEQ ID NO: 1130003 - RNA, 19 nt, Artificial Sequence
  Description of Artificial Sequence: Synthetic oligonucleotide
aguuuggcagacgcgcggg

SEQ ID NO: 1130004 - RNA, 19 nt, Artificial Sequence
  Description of Artificial Sequence: Synthetic oligonucleotide
ucacccaaugaagacugcu

SEQ ID NO: 1130005 - RNA, 19 nt, Artificial Sequence
  Description of Artificial Sequence: Synthetic oligonucleotide
ggugucuucggcuuugaga

SEQ ID NO: 1130006 - RNA, 19 nt, Artificial Sequence
  Description of Artificial Sequence: Synthetic oligonucleotide
ugcuaacggguaguuaaug

SEQ ID NO: 1130007 - RNA, 19 nt, Artificial Sequence
  Description of Artificial Sequence: Synthetic oligonucleotide
gaaccaucucagugguagc

SEQ ID NO: 1130008 - RNA, 19 nt, Artificial Sequence
  Description of Artificial Sequence: Synthetic oligonucleotide
agaagaucaacagcagcaa

SEQ ID NO: 1130009 - RNA, 19 nt, Artificial Sequence
  Description of Artificial Sequence: Synthetic oligonucleotide
cagagcgccgaggagacgc

SEQ ID NO: 1130010 - RNA, 19 nt, Artificial Sequence
  Description of Artificial Sequence: Synthetic oligonucleotide
uugucucauucuacuagau

SEQ ID NO: 1130011 - RNA, 19 nt, Artificial Sequence
  Description of Artificial Sequence: Synthetic oligonucleotide
cuaggaugugguaccguuc

SEQ ID NO: 1130012 - RNA, 19 nt, Artificial Sequence
  Description of Artificial Sequence: Synthetic oligonucleotide
caaagguaaauacuugggu

SEQ ID NO: 1130013 - RNA, 19 nt, Artificial Sequence
  Description of Artificial Sequence: Synthetic oligonucleotide
aggaugcauuguaaguaac

SEQ ID NO: 1130014 - RNA, 19 nt, Artificial Sequence
  Description of Artificial Sequence: Synthetic oligonucleotide
aacuccuaggaugcauugu

SEQ ID NO: 1130015 - RNA, 19 nt, Artificial Sequence
  Description of Artificial Sequence: Synthetic oligonucleotide
cagucauuggaugugauua

SEQ ID NO: 1130016 - RNA, 19 nt, Artificial Sequence
  Description of Artificial Sequence: Synthetic oligonucleotide
caguuuggcagacgcgcgg

SEQ ID NO: 1130017 - RNA, 19 nt, Artificial Sequence
  Description of Artificial Sequence: Synthetic oligonucleotide
cuucugaccaggagcuaug

SEQ ID NO: 1130018 - RNA, 19 nt, Artificial Sequence
  Description of Artificial Sequence: Synthetic oligonucleotide
uugagugcuaacggguagu

SEQ ID NO: 1130019 - RNA, 19 nt, Artificial Sequence
  Description of Artificial Sequence: Synthetic oligonucleotide
cuaggaugcauuguaagua

SEQ ID NO: 1130020 - RNA, 19 nt, Artificial Sequence
  Description of Artificial Sequence: Synthetic oligonucleotide
gagaauucucagcucggaa

SEQ ID NO: 1130021 - RNA, 19 nt, Artificial Sequence
  Description of Artificial Sequence: Synthetic oligonucleotide
caacuccuaggaugcauug

SEQ ID NO: 1130022 - RNA, 19 nt, Artificial Sequence
  Description of Artificial Sequence: Synthetic oligonucleotide
ucuucggcuuugagaauuc

SEQ ID NO: 1130023 - RNA, 19 nt, Artificial Sequence
  Description of Artificial Sequence: Synthetic oligonucleotide
ggaaugaguaaaucuugga

SEQ ID NO: 1130024 - RNA, 19 nt, Artificial Sequence
  Description of Artificial Sequence: Synthetic oligonucleotide
uauguucuagucuguccuu

SEQ ID NO: 1130025 - RNA, 19 nt, Artificial Sequence
  Description of Artificial Sequence: Synthetic oligonucleotide
ccaaauuggcacuugucuc

SEQ ID NO: 1130026 - RNA, 19 nt, Artificial Sequence
  Description of Artificial Sequence: Synthetic oligonucleotide
ugcuacuaucaaagcuuga

SEQ ID NO: 1130027 - RNA, 19 nt, Artificial Sequence
  Description of Artificial Sequence: Synthetic oligonucleotide
acuucuaggugaaguuguc

SEQ ID NO: 1130028 - RNA, 19 nt, Artificial Sequence
  Description of Artificial Sequence: Synthetic oligonucleotide
cauagguuuggccauauuu

SEQ ID NO: 1130029 - RNA, 19 nt, Artificial Sequence
  Description of Artificial Sequence: Synthetic oligonucleotide
gauccaaacugacgaaggu

SEQ ID NO: 1130030 - RNA, 19 nt, Artificial Sequence
  Description of Artificial Sequence: Synthetic oligonucleotide
uuggcagacgcgcgggccu

SEQ ID NO: 1130031 - RNA, 19 nt, Artificial Sequence
  Description of Artificial Sequence: Synthetic oligonucleotide
uguugccacaguguuucac

SEQ ID NO: 1130032 - RNA, 19 nt, Artificial Sequence
  Description of Artificial Sequence: Synthetic oligonucleotide
gcguccuguaccccgaggg

SEQ ID NO: 1130033 - RNA, 19 nt, Artificial Sequence
  Description of Artificial Sequence: Synthetic oligonucleotide
uggcuagucgaugcucuag

SEQ ID NO: 1130034 - RNA, 19 nt, Artificial Sequence
  Description of Artificial Sequence: Synthetic oligonucleotide
aucuuggauuaaagauacc

SEQ ID NO: 1130035 - RNA, 19 nt, Artificial Sequence
  Description of Artificial Sequence: Synthetic oligonucleotide
gcuaacggguaguuaauga

SEQ ID NO: 1130036 - RNA, 19 nt, Artificial Sequence
  Description of Artificial Sequence: Synthetic oligonucleotide
aaguaacguucaaauccca

SEQ ID NO: 1130037 - RNA, 19 nt, Artificial Sequence
  Description of Artificial Sequence: Synthetic oligonucleotide
guagaaaggcuugagugcu

SEQ ID NO: 1130038 - RNA, 19 nt, Artificial Sequence
  Description of Artificial Sequence: Synthetic oligonucleotide
gaugugauuacugguguau

SEQ ID NO: 1130039 - RNA, 19 nt, Artificial Sequence
  Description of Artificial Sequence: Synthetic oligonucleotide
aagcuugaaucagcaacaa

SEQ ID NO: 1130040 - RNA, 19 nt, Artificial Sequence
  Description of Artificial Sequence: Synthetic oligonucleotide
cugcuucaauucagaacag

SEQ ID NO: 1130041 - RNA, 19 nt, Artificial Sequence
  Description of Artificial Sequence: Synthetic oligonucleotide
guccuuaaaguaggaauga

SEQ ID NO: 1130042 - RNA, 19 nt, Artificial Sequence
  Description of Artificial Sequence: Synthetic oligonucleotide
cuucacugcuacuaucaaa

SEQ ID NO: 1130043 - RNA, 19 nt, Artificial Sequence
  Description of Artificial Sequence: Synthetic oligonucleotide
auuaaucaauucagacccu

SEQ ID NO: 1130044 - RNA, 19 nt, Artificial Sequence
  Description of Artificial Sequence: Synthetic oligonucleotide
cauuccaaagccuccgugu

SEQ ID NO: 1130045 - RNA, 19 nt, Artificial Sequence
  Description of Artificial Sequence: Synthetic oligonucleotide
gaugcucuaggauguggua

SEQ ID NO: 1130046 - RNA, 19 nt, Artificial Sequence
  Description of Artificial Sequence: Synthetic oligonucleotide
agccgucauuuacaugcag

SEQ ID NO: 1130047 - RNA, 19 nt, Artificial Sequence
  Description of Artificial Sequence: Synthetic oligonucleotide
guaacguucaaaucccauu

SEQ ID NO: 1130048 - RNA, 19 nt, Artificial Sequence
  Description of Artificial Sequence: Synthetic oligonucleotide
ccugacaucacuucuaggu

SEQ ID NO: 1130049 - RNA, 19 nt, Artificial Sequence
  Description of Artificial Sequence: Synthetic oligonucleotide
cuuggauuaaagauaccuu

SEQ ID NO: 1130050 - RNA, 19 nt, Artificial Sequence
  Description of Artificial Sequence: Synthetic oligonucleotide
auaaccugcaugagauccu

SEQ ID NO: 1130051 - RNA, 19 nt, Artificial Sequence
  Description of Artificial Sequence: Synthetic oligonucleotide
gugauuacugguguaugaa

SEQ ID NO: 1130052 - RNA, 19 nt, Artificial Sequence
  Description of Artificial Sequence: Synthetic oligonucleotide
uggugacugaagaguuuaa

SEQ ID NO: 1130053 - RNA, 19 nt, Artificial Sequence
  Description of Artificial Sequence: Synthetic oligonucleotide
aucccugcaccguuacgca

SEQ ID NO: 1130054 - RNA, 19 nt, Artificial Sequence
  Description of Artificial Sequence: Synthetic oligonucleotide
agguaaauacuuggguaaa

SEQ ID NO: 1130055 - RNA, 19 nt, Artificial Sequence
  Description of Artificial Sequence: Synthetic oligonucleotide
caggagcuaugaauuugug

SEQ ID NO: 1130056 - RNA, 19 nt, Artificial Sequence
  Description of Artificial Sequence: Synthetic oligonucleotide
acugacgaagguccaggua

SEQ ID NO: 1130057 - RNA, 19 nt, Artificial Sequence
  Description of Artificial Sequence: Synthetic oligonucleotide
ggguguaaaggugaaguuc

SEQ ID NO: 1130058 - RNA, 19 nt, Artificial Sequence
  Description of Artificial Sequence: Synthetic oligonucleotide
gcuacuaucaaagcuugaa

SEQ ID NO: 1130059 - RNA, 19 nt, Artificial Sequence
  Description of Artificial Sequence: Synthetic oligonucleotide
aguccugaucuggcuaguc

SEQ ID NO: 1130060 - RNA, 19 nt, Artificial Sequence
  Description of Artificial Sequence: Synthetic oligonucleotide
auaagugguuuuguccaaa

SEQ ID NO: 1130061 - RNA, 19 nt, Artificial Sequence
  Description of Artificial Sequence: Synthetic oligonucleotide
uaacaucuuugauguuguc

SEQ ID NO: 1130062 - RNA, 19 nt, Artificial Sequence
  Description of Artificial Sequence: Synthetic oligonucleotide
caaagccuccguguggcac

SEQ ID NO: 1130063 - RNA, 19 nt, Artificial Sequence
  Description of Artificial Sequence: Synthetic oligonucleotide
cacugguaggcuuuccuaa

SEQ ID NO: 1130064 - RNA, 19 nt, Artificial Sequence
  Description of Artificial Sequence: Synthetic oligonucleotide
agauuacaccacacuggag

SEQ ID NO: 1130065 - RNA, 19 nt, Artificial Sequence
  Description of Artificial Sequence: Synthetic oligonucleotide
gacaucacuucuaggugaa

SEQ ID NO: 1130066 - RNA, 19 nt, Artificial Sequence
  Description of Artificial Sequence: Synthetic oligonucleotide
aucacccaaugaagacugc

SEQ ID NO: 1130067 - RNA, 19 nt, Artificial Sequence
  Description of Artificial Sequence: Synthetic oligonucleotide
uguaccccgagggcguccc

SEQ ID NO: 1130068 - RNA, 19 nt, Artificial Sequence
  Description of Artificial Sequence: Synthetic oligonucleotide
uagaaaggcuugagugcua

SEQ ID NO: 1130069 - RNA, 19 nt, Artificial Sequence
  Description of Artificial Sequence: Synthetic oligonucleotide
gaacggacccaucccugca

SEQ ID NO: 1130070 - RNA, 19 nt, Artificial Sequence
  Description of Artificial Sequence: Synthetic oligonucleotide
gccucuguauaagaaauga

SEQ ID NO: 1130071 - RNA, 19 nt, Artificial Sequence
  Description of Artificial Sequence: Synthetic oligonucleotide
gaggagcaucuucauuauc

SEQ ID NO: 1130072 - RNA, 19 nt, Artificial Sequence
  Description of Artificial Sequence: Synthetic oligonucleotide
cuauccccaucuuggauua

SEQ ID NO: 1130073 - RNA, 19 nt, Artificial Sequence
  Description of Artificial Sequence: Synthetic oligonucleotide
cugaucuggcuagucgaug

SEQ ID NO: 1130074 - RNA, 19 nt, Artificial Sequence
  Description of Artificial Sequence: Synthetic oligonucleotide
guuuggcagacgcgcgggc

SEQ ID NO: 1130075 - RNA, 19 nt, Artificial Sequence
  Description of Artificial Sequence: Synthetic oligonucleotide
cuacuaucaaagcuugaau

SEQ ID NO: 1130076 - RNA, 19 nt, Artificial Sequence
  Description of Artificial Sequence: Synthetic oligonucleotide
ccuauuuuguugacuauua

SEQ ID NO: 1130077 - RNA, 19 nt, Artificial Sequence
  Description of Artificial Sequence: Synthetic oligonucleotide
cugccucuguauaagaaau

SEQ ID NO: 1130078 - RNA, 19 nt, Artificial Sequence
  Description of Artificial Sequence: Synthetic oligonucleotide
gcauguagaaaggcuugag

SEQ ID NO: 1130079 - RNA, 19 nt, Artificial Sequence
  Description of Artificial Sequence: Synthetic oligonucleotide
ugagugcuaacggguaguu

SEQ ID NO: 1130080 - RNA, 19 nt, Artificial Sequence
  Description of Artificial Sequence: Synthetic oligonucleotide
guuggaccaaagguaaaua

SEQ ID NO: 1130081 - RNA, 19 nt, Artificial Sequence
  Description of Artificial Sequence: Synthetic oligonucleotide
cuuuccaaagaggagccgu

SEQ ID NO: 1130082 - RNA, 19 nt, Artificial Sequence
  Description of Artificial Sequence: Synthetic oligonucleotide
ucccugcaccguuacgcac

SEQ ID NO: 1130083 - RNA, 19 nt, Artificial Sequence
  Description of Artificial Sequence: Synthetic oligonucleotide
aggaugugguaccguuccu

SEQ ID NO: 1130084 - RNA, 19 nt, Artificial Sequence
  Description of Artificial Sequence: Synthetic oligonucleotide
uccguguggcacugaucca

SEQ ID NO: 1130085 - RNA, 19 nt, Artificial Sequence
  Description of Artificial Sequence: Synthetic oligonucleotide
uucucauguucagucugua

SEQ ID NO: 1130086 - RNA, 19 nt, Artificial Sequence
  Description of Artificial Sequence: Synthetic oligonucleotide
acgcacuccccacucgcgu

SEQ ID NO: 1130087 - RNA, 19 nt, Artificial Sequence
  Description of Artificial Sequence: Synthetic oligonucleotide
aggcuuuccuaaguccuga

SEQ ID NO: 1130088 - RNA, 19 nt, Artificial Sequence
  Description of Artificial Sequence: Synthetic oligonucleotide
ccgucauuuacaugcagga

SEQ ID NO: 1130089 - RNA, 19 nt, Artificial Sequence
  Description of Artificial Sequence: Synthetic oligonucleotide
ggcacugauccaaacugac

SEQ ID NO: 1130090 - RNA, 19 nt, Artificial Sequence
  Description of Artificial Sequence: Synthetic oligonucleotide
aaguccugaucuggcuagu

SEQ ID NO: 1130091 - RNA, 19 nt, Artificial Sequence
  Description of Artificial Sequence: Synthetic oligonucleotide
caccguuacgcacucccca

SEQ ID NO: 1130092 - RNA, 19 nt, Artificial Sequence
  Description of Artificial Sequence: Synthetic oligonucleotide
gagauccugaaggcuuuca

SEQ ID NO: 1130093 - RNA, 19 nt, Artificial Sequence
  Description of Artificial Sequence: Synthetic oligonucleotide
caucacuucuaggugaagu

SEQ ID NO: 1130094 - RNA, 19 nt, Artificial Sequence
  Description of Artificial Sequence: Synthetic oligonucleotide
agguaccacugguaggcuu

SEQ ID NO: 1130095 - RNA, 19 nt, Artificial Sequence
  Description of Artificial Sequence: Synthetic oligonucleotide
auuauccauugcauagguu

SEQ ID NO: 1130096 - RNA, 19 nt, Artificial Sequence
  Description of Artificial Sequence: Synthetic oligonucleotide
cuccuaggaugcauuguaa

SEQ ID NO: 1130097 - RNA, 19 nt, Artificial Sequence
  Description of Artificial Sequence: Synthetic oligonucleotide
acggguaguuaaugacaaa

SEQ ID NO: 1130098 - RNA, 19 nt, Artificial Sequence
  Description of Artificial Sequence: Synthetic oligonucleotide
gaucuggcuagucgaugcu

SEQ ID NO: 1130099 - RNA, 19 nt, Artificial Sequence
  Description of Artificial Sequence: Synthetic oligonucleotide
gaucucuagcucccaaauu

SEQ ID NO: 1130100 - RNA, 19 nt, Artificial Sequence
  Description of Artificial Sequence: Synthetic oligonucleotide
cacuugucucauucuacua

SEQ ID NO: 1130101 - RNA, 19 nt, Artificial Sequence
  Description of Artificial Sequence: Synthetic oligonucleotide
ggagaauuauccauugcau

SEQ ID NO: 1130102 - RNA, 19 nt, Artificial Sequence
  Description of Artificial Sequence: Synthetic oligonucleotide
gucauuggaugugauuacu

SEQ ID NO: 1130103 - RNA, 19 nt, Artificial Sequence
  Description of Artificial Sequence: Synthetic oligonucleotide
ggaccaaagguaaauacuu

SEQ ID NO: 1130104 - RNA, 19 nt, Artificial Sequence
  Description of Artificial Sequence: Synthetic oligonucleotide
ccgcauguagaaaggcuug

SEQ ID NO: 1130105 - RNA, 19 nt, Artificial Sequence
  Description of Artificial Sequence: Synthetic oligonucleotide
cccacucgcguccuguacc

SEQ ID NO: 1130106 - RNA, 19 nt, Artificial Sequence
  Description of Artificial Sequence: Synthetic oligonucleotide
ucgcguccuguaccccgag

SEQ ID NO: 1130107 - RNA, 19 nt, Artificial Sequence
  Description of Artificial Sequence: Synthetic oligonucleotide
ggaugugguaccguuccuc

SEQ ID NO: 1130108 - RNA, 19 nt, Artificial Sequence
  Description of Artificial Sequence: Synthetic oligonucleotide
cgcgcaguuuggcagacgc

SEQ ID NO: 1130109 - RNA, 19 nt, Artificial Sequence
  Description of Artificial Sequence: Synthetic oligonucleotide
caacaccccacuugggugu

SEQ ID NO: 1130110 - RNA, 19 nt, Artificial Sequence
  Description of Artificial Sequence: Synthetic oligonucleotide
cucggaauguuggaccaaa

SEQ ID NO: 1130111 - RNA, 19 nt, Artificial Sequence
  Description of Artificial Sequence: Synthetic oligonucleotide
ccuuaaaguaggaaugaau

SEQ ID NO: 1130112 - RNA, 19 nt, Artificial Sequence
  Description of Artificial Sequence: Synthetic oligonucleotide
ccacucgcguccuguaccc

SEQ ID NO: 1130113 - RNA, 19 nt, Artificial Sequence
  Description of Artificial Sequence: Synthetic oligonucleotide
ugguagccuugaagaguuc

SEQ ID NO: 1130114 - RNA, 19 nt, Artificial Sequence
  Description of Artificial Sequence: Synthetic oligonucleotide
ggaaugaauagcagcugua

SEQ ID NO: 1130115 - RNA, 19 nt, Artificial Sequence
  Description of Artificial Sequence: Synthetic oligonucleotide
guugacuauuacaguauuu

SEQ ID NO: 1130116 - RNA, 19 nt, Artificial Sequence
  Description of Artificial Sequence: Synthetic oligonucleotide
gugguagccuugaagaguu

SEQ ID NO: 1130117 - RNA, 19 nt, Artificial Sequence
  Description of Artificial Sequence: Synthetic oligonucleotide
cacaguguuucaccaggua

SEQ ID NO: 1130118 - RNA, 19 nt, Artificial Sequence
  Description of Artificial Sequence: Synthetic oligonucleotide
ccuaggaugcauuguaagu

SEQ ID NO: 1130119 - RNA, 19 nt, Artificial Sequence
  Description of Artificial Sequence: Synthetic oligonucleotide
cgcacgcgcaguuuggcag

SEQ ID NO: 1130120 - RNA, 19 nt, Artificial Sequence
  Description of Artificial Sequence: Synthetic oligonucleotide
gagccgucauuuacaugca

SEQ ID NO: 1130121 - RNA, 19 nt, Artificial Sequence
  Description of Artificial Sequence: Synthetic oligonucleotide
agcgccgaggagacgccag

SEQ ID NO: 1130122 - RNA, 19 nt, Artificial Sequence
  Description of Artificial Sequence: Synthetic oligonucleotide
guagaucaacaccccacuu

SEQ ID NO: 1130123 - RNA, 19 nt, Artificial Sequence
  Description of Artificial Sequence: Synthetic oligonucleotide
ggaugugauuacuggugua

SEQ ID NO: 1130124 - RNA, 19 nt, Artificial Sequence
  Description of Artificial Sequence: Synthetic oligonucleotide
aacaccccacuugggugua

SEQ ID NO: 1130125 - RNA, 19 nt, Artificial Sequence
  Description of Artificial Sequence: Synthetic oligonucleotide
cugguaggcuuuccuaagu

SEQ ID NO: 1130126 - RNA, 19 nt, Artificial Sequence
  Description of Artificial Sequence: Synthetic oligonucleotide
auguuggaccaaagguaaa

SEQ ID NO: 1130127 - RNA, 19 nt, Artificial Sequence
  Description of Artificial Sequence: Synthetic oligonucleotide
ccccaucuuggauuaaaga

SEQ ID NO: 1130128 - RNA, 19 nt, Artificial Sequence
  Description of Artificial Sequence: Synthetic oligonucleotide
uggcagacgcgcgggccug

SEQ ID NO: 1130129 - RNA, 19 nt, Artificial Sequence
  Description of Artificial Sequence: Synthetic oligonucleotide
cucgcguccuguaccccga

SEQ ID NO: 1130130 - RNA, 19 nt, Artificial Sequence
  Description of Artificial Sequence: Synthetic oligonucleotide
cucccaaauuggcacuugu

SEQ ID NO: 1130131 - RNA, 19 nt, Artificial Sequence
  Description of Artificial Sequence: Synthetic oligonucleotide
gagugcuaacggguaguua

SEQ ID NO: 1130132 - RNA, 19 nt, Artificial Sequence
  Description of Artificial Sequence: Synthetic oligonucleotide
ggcgcagagcgccgaggag

SEQ ID NO: 1130133 - RNA, 19 nt, Artificial Sequence
  Description of Artificial Sequence: Synthetic oligonucleotide
gucaacuccuaggaugcau

SEQ ID NO: 1130134 - RNA, 19 nt, Artificial Sequence
  Description of Artificial Sequence: Synthetic oligonucleotide
cuucauuaucccgcaugua

SEQ ID NO: 1130135 - RNA, 19 nt, Artificial Sequence
  Description of Artificial Sequence: Synthetic oligonucleotide
gcgccgaggagacgccagg

SEQ ID NO: 1130136 - RNA, 19 nt, Artificial Sequence
  Description of Artificial Sequence: Synthetic oligonucleotide
guaccccgagggcgucccg

SEQ ID NO: 1130137 - RNA, 19 nt, Artificial Sequence
  Description of Artificial Sequence: Synthetic oligonucleotide
cuguaccccgagggcgucc

SEQ ID NO: 1130138 - RNA, 19 nt, Artificial Sequence
  Description of Artificial Sequence: Synthetic oligonucleotide
cacgcgcaguuuggcagac

SEQ ID NO: 1130139 - RNA, 19 nt, Artificial Sequence
  Description of Artificial Sequence: Synthetic oligonucleotide
acgcgcaguuuggcagacg

SEQ ID NO: 1130140 - RNA, 19 nt, Artificial Sequence
  Description of Artificial Sequence: Synthetic oligonucleotide
cacucgcguccuguacccc

SEQ ID NO: 1130141 - RNA, 19 nt, Artificial Sequence
  Description of Artificial Sequence: Synthetic oligonucleotide
cguccuguaccccgagggc

SEQ ID NO: 1130142 - RNA, 19 nt, Artificial Sequence
  Description of Artificial Sequence: Synthetic oligonucleotide
cuggcuagucgaugcucua

SEQ ID NO: 1130143 - RNA, 19 nt, Artificial Sequence
  Description of Artificial Sequence: Synthetic oligonucleotide
ccucacagucauuggaugu

SEQ ID NO: 1130144 - RNA, 19 nt, Artificial Sequence
  Description of Artificial Sequence: Synthetic oligonucleotide
gcacgcgcaguuuggcaga

SEQ ID NO: 1130145 - RNA, 19 nt, Artificial Sequence
  Description of Artificial Sequence: Synthetic oligonucleotide
cguuacgcacuccccacuc

SEQ ID NO: 1130146 - RNA, 19 nt, Artificial Sequence
  Description of Artificial Sequence: Synthetic oligonucleotide
gcaccguuacgcacucccc

SEQ ID NO: 1130147 - RNA, 19 nt, Artificial Sequence
  Description of Artificial Sequence: Synthetic oligonucleotide
cgcagagcgccgaggagac

SEQ ID NO: 1130148 - RNA, 19 nt, Artificial Sequence
  Description of Artificial Sequence: Synthetic oligonucleotide
gcuccugacaucacuucua

SEQ ID NO: 1130149 - RNA, 19 nt, Artificial Sequence
  Description of Artificial Sequence: Synthetic oligonucleotide
ccgagggcgucccgcacgc

SEQ ID NO: 1130150 - RNA, 19 nt, Artificial Sequence
  Description of Artificial Sequence: Synthetic oligonucleotide
gacgccaggcaccgagcau

SEQ ID NO: 1130151 - RNA, 19 nt, Artificial Sequence
  Description of Artificial Sequence: Synthetic oligonucleotide
gguaccacugguaggcuuu

SEQ ID NO: 1130152 - RNA, 19 nt, Artificial Sequence
  Description of Artificial Sequence: Synthetic oligonucleotide
cccaucccugcaccguuac

SEQ ID NO: 1130153 - RNA, 19 nt, Artificial Sequence
  Description of Artificial Sequence: Synthetic oligonucleotide
gagcgccgaggagacgcca

SEQ ID NO: 1130154 - RNA, 19 nt, Artificial Sequence
  Description of Artificial Sequence: Synthetic oligonucleotide
cggacccaucccugcaccg

SEQ ID NO: 1130155 - RNA, 19 nt, Artificial Sequence
  Description of Artificial Sequence: Synthetic oligonucleotide
gugcuaacggguaguuaau

SEQ ID NO: 1130156 - RNA, 19 nt, Artificial Sequence
  Description of Artificial Sequence: Synthetic oligonucleotide
cuucggcuuugagaauucu

SEQ ID NO: 1130157 - RNA, 19 nt, Artificial Sequence
  Description of Artificial Sequence: Synthetic oligonucleotide
ccguguggcacugauccaa

SEQ ID NO: 1130158 - RNA, 19 nt, Artificial Sequence
  Description of Artificial Sequence: Synthetic oligonucleotide
ccccacucgcguccuguac

SEQ ID NO: 1130159 - RNA, 19 nt, Artificial Sequence
  Description of Artificial Sequence: Synthetic oligonucleotide
caucuucauuaucccgcau

SEQ ID NO: 1130160 - RNA, 19 nt, Artificial Sequence
  Description of Artificial Sequence: Synthetic oligonucleotide
ggguaccuuuauuuugcuu

SEQ ID NO: 1130161 - RNA, 19 nt, Artificial Sequence
  Description of Artificial Sequence: Synthetic oligonucleotide
cgaugcucuaggauguggu

SEQ ID NO: 1130162 - RNA, 19 nt, Artificial Sequence
  Description of Artificial Sequence: Synthetic oligonucleotide
ccaaaguauuggaacuguu

SEQ ID NO: 1130163 - RNA, 19 nt, Artificial Sequence
  Description of Artificial Sequence: Synthetic oligonucleotide
ggcagacgcgcgggccugg

SEQ ID NO: 1130164 - RNA, 19 nt, Artificial Sequence
  Description of Artificial Sequence: Synthetic oligonucleotide
gcagacgcgcgggccuggg

SEQ ID NO: 1130165 - RNA, 19 nt, Artificial Sequence
  Description of Artificial Sequence: Synthetic oligonucleotide
cccugcaccguuacgcacu

SEQ ID NO: 1130166 - RNA, 19 nt, Artificial Sequence
  Description of Artificial Sequence: Synthetic oligonucleotide
caacauccucaggacaauu

SEQ ID NO: 1130167 - RNA, 19 nt, Artificial Sequence
  Description of Artificial Sequence: Synthetic oligonucleotide
cgcacuccccacucgcguc

SEQ ID NO: 1130168 - RNA, 19 nt, Artificial Sequence
  Description of Artificial Sequence: Synthetic oligonucleotide
ggauaacaucuuugauguu

SEQ ID NO: 1130169 - RNA, 19 nt, Artificial Sequence
  Description of Artificial Sequence: Synthetic oligonucleotide
ccugaucuggcuagucgau

SEQ ID NO: 1130170 - RNA, 19 nt, Artificial Sequence
  Description of Artificial Sequence: Synthetic oligonucleotide
cgcauguagaaaggcuuga

SEQ ID NO: 1130171 - RNA, 19 nt, Artificial Sequence
  Description of Artificial Sequence: Synthetic oligonucleotide
acaccccacuuggguguaa

SEQ ID NO: 1130172 - RNA, 19 nt, Artificial Sequence
  Description of Artificial Sequence: Synthetic oligonucleotide
ccucggguaccuuuauuuu

SEQ ID NO: 1130173 - RNA, 19 nt, Artificial Sequence
  Description of Artificial Sequence: Synthetic oligonucleotide
ccgcacgcgcaguuuggca

SEQ ID NO: 1130174 - RNA, 19 nt, Artificial Sequence
  Description of Artificial Sequence: Synthetic oligonucleotide
agccuccguguggcacuga

SEQ ID NO: 1130175 - RNA, 19 nt, Artificial Sequence
  Description of Artificial Sequence: Synthetic oligonucleotide
ccuguaccccgagggcguc

SEQ ID NO: 1130176 - RNA, 19 nt, Artificial Sequence
  Description of Artificial Sequence: Synthetic oligonucleotide
ccguuacgcacuccccacu

SEQ ID NO: 1130177 - RNA, 19 nt, Artificial Sequence
  Description of Artificial Sequence: Synthetic oligonucleotide
gcgucccgcacgcgcaguu

SEQ ID NO: 1130178 - RNA, 19 nt, Artificial Sequence
  Description of Artificial Sequence: Synthetic oligonucleotide
cgagggcgucccgcacgcg

SEQ ID NO: 1130179 - RNA, 19 nt, Artificial Sequence
  Description of Artificial Sequence: Synthetic oligonucleotide
ggcgucccgcacgcgcagu

SEQ ID NO: 1130180 - RNA, 19 nt, Artificial Sequence
  Description of Artificial Sequence: Synthetic oligonucleotide
uuuaaguugcccaacaucu

SEQ ID NO: 1130181 - RNA, 19 nt, Artificial Sequence
  Description of Artificial Sequence: Synthetic oligonucleotide
auaguaugagcugaaaucc

SEQ ID NO: 1130182 - RNA, 19 nt, Artificial Sequence
  Description of Artificial Sequence: Synthetic oligonucleotide
ucugauagcacagagagca

SEQ ID NO: 1130183 - RNA, 19 nt, Artificial Sequence
  Description of Artificial Sequence: Synthetic oligonucleotide
aauuaaguucugcaagcac

SEQ ID NO: 1130184 - RNA, 19 nt, Artificial Sequence
  Description of Artificial Sequence: Synthetic oligonucleotide
uauaguaugagcugaaauc

SEQ ID NO: 1130185 - RNA, 19 nt, Artificial Sequence
  Description of Artificial Sequence: Synthetic oligonucleotide
caaacaguugucuaugccg

SEQ ID NO: 1130186 - RNA, 19 nt, Artificial Sequence
  Description of Artificial Sequence: Synthetic oligonucleotide
acugagcgcacacauaccc

SEQ ID NO: 1130187 - RNA, 19 nt, Artificial Sequence
  Description of Artificial Sequence: Synthetic oligonucleotide
uguacuaguuccuucagac

SEQ ID NO: 1130188 - RNA, 19 nt, Artificial Sequence
  Description of Artificial Sequence: Synthetic oligonucleotide
agguacaccagcuacuuuc

SEQ ID NO: 1130189 - RNA, 19 nt, Artificial Sequence
  Description of Artificial Sequence: Synthetic oligonucleotide
cauguuucagugcugaggc

SEQ ID NO: 1130190 - RNA, 19 nt, Artificial Sequence
  Description of Artificial Sequence: Synthetic oligonucleotide
gaacacuucacguaccgcc

SEQ ID NO: 1130191 - RNA, 19 nt, Artificial Sequence
  Description of Artificial Sequence: Synthetic oligonucleotide
uguggaacacuucacguac

SEQ ID NO: 1130192 - RNA, 19 nt, Artificial Sequence
  Description of Artificial Sequence: Synthetic oligonucleotide
uuccuucagacacagccgg

SEQ ID NO: 1130193 - RNA, 19 nt, Artificial Sequence
  Description of Artificial Sequence: Synthetic oligonucleotide
uuaaguucugcaagcacac

SEQ ID NO: 1130194 - RNA, 19 nt, Artificial Sequence
  Description of Artificial Sequence: Synthetic oligonucleotide
acucgguuauaguaugagc

SEQ ID NO: 1130195 - RNA, 19 nt, Artificial Sequence
  Description of Artificial Sequence: Synthetic oligonucleotide
cuguuuguaacccucgaag

SEQ ID NO: 1130196 - RNA, 19 nt, Artificial Sequence
  Description of Artificial Sequence: Synthetic oligonucleotide
guuuguaacccucgaagag

SEQ ID NO: 1130197 - RNA, 19 nt, Artificial Sequence
  Description of Artificial Sequence: Synthetic oligonucleotide
aaugcagaacaagucgcgg

SEQ ID NO: 1130198 - RNA, 19 nt, Artificial Sequence
  Description of Artificial Sequence: Synthetic oligonucleotide
cuuaguagcuguaggcggg

SEQ ID NO: 1130199 - RNA, 19 nt, Artificial Sequence
  Description of Artificial Sequence: Synthetic oligonucleotide
cugagcauaucugagcucg

SEQ ID NO: 1130200 - RNA, 19 nt, Artificial Sequence
  Description of Artificial Sequence: Synthetic oligonucleotide
gaagaguguggcaaggcgg

SEQ ID NO: 1130201 - RNA, 19 nt, Artificial Sequence
  Description of Artificial Sequence: Synthetic oligonucleotide
augauuuuguaaacauucc

SEQ ID NO: 1130202 - RNA, 19 nt, Artificial Sequence
  Description of Artificial Sequence: Synthetic oligonucleotide
aacacuucacguaccgccc

SEQ ID NO: 1130203 - RNA, 19 nt, Artificial Sequence
  Description of Artificial Sequence: Synthetic oligonucleotide
aacuggagcgauaaacccg

SEQ ID NO: 1130204 - RNA, 19 nt, Artificial Sequence
  Description of Artificial Sequence: Synthetic oligonucleotide
cuuagauguggcucagugg

SEQ ID NO: 1130205 - RNA, 19 nt, Artificial Sequence
  Description of Artificial Sequence: Synthetic oligonucleotide
ugcggggcaaugcagaaca

SEQ ID NO: 1130206 - RNA, 19 nt, Artificial Sequence
  Description of Artificial Sequence: Synthetic oligonucleotide
ucagucgaggugcucuucg

SEQ ID NO: 1130207 - RNA, 19 nt, Artificial Sequence
  Description of Artificial Sequence: Synthetic oligonucleotide
agaagucucggacacgcag

SEQ ID NO: 1130208 - RNA, 19 nt, Artificial Sequence
  Description of Artificial Sequence: Synthetic oligonucleotide
ugugcacucgguuauagua

SEQ ID NO: 1130209 - RNA, 19 nt, Artificial Sequence
  Description of Artificial Sequence: Synthetic oligonucleotide
aggccuuacacaccugagc

SEQ ID NO: 1130210 - RNA, 19 nt, Artificial Sequence
  Description of Artificial Sequence: Synthetic oligonucleotide
aaagagguguggccgaggu

SEQ ID NO: 1130211 - RNA, 19 nt, Artificial Sequence
  Description of Artificial Sequence: Synthetic oligonucleotide
acugaacacgcguuccggc

SEQ ID NO: 1130212 - RNA, 19 nt, Artificial Sequence
  Description of Artificial Sequence: Synthetic oligonucleotide
ugauguggagcccuggggu

SEQ ID NO: 1130213 - RNA, 19 nt, Artificial Sequence
  Description of Artificial Sequence: Synthetic oligonucleotide
uuuguaacccucgaagagu

SEQ ID NO: 1130214 - RNA, 19 nt, Artificial Sequence
  Description of Artificial Sequence: Synthetic oligonucleotide
ucuuugugcccuuugugga

SEQ ID NO: 1130215 - RNA, 19 nt, Artificial Sequence
  Description of Artificial Sequence: Synthetic oligonucleotide
ucgguuauaguaugagcug

SEQ ID NO: 1130216 - RNA, 19 nt, Artificial Sequence
  Description of Artificial Sequence: Synthetic oligonucleotide
cacccgaaguuucugaagg

SEQ ID NO: 1130217 - RNA, 19 nt, Artificial Sequence
  Description of Artificial Sequence: Synthetic oligonucleotide
uuaaguugcccaacaucug

SEQ ID NO: 1130218 - RNA, 19 nt, Artificial Sequence
  Description of Artificial Sequence: Synthetic oligonucleotide
caaugcagaacaagucgcg

SEQ ID NO: 1130219 - RNA, 19 nt, Artificial Sequence
  Description of Artificial Sequence: Synthetic oligonucleotide
uaugccggggucauagccc

SEQ ID NO: 1130220 - RNA, 19 nt, Artificial Sequence
  Description of Artificial Sequence: Synthetic oligonucleotide
aacuugcacaccauuuccg

SEQ ID NO: 1130221 - RNA, 19 nt, Artificial Sequence
  Description of Artificial Sequence: Synthetic oligonucleotide
agcauaucugagcucguag

SEQ ID NO: 1130222 - RNA, 19 nt, Artificial Sequence
  Description of Artificial Sequence: Synthetic oligonucleotide
agugcgcucggguugcagc

SEQ ID NO: 1130223 - RNA, 19 nt, Artificial Sequence
  Description of Artificial Sequence: Synthetic oligonucleotide
aguuacugggcccuuagau

SEQ ID NO: 1130224 - RNA, 19 nt, Artificial Sequence
  Description of Artificial Sequence: Synthetic oligonucleotide
gaaauccaugcugaguugc

SEQ ID NO: 1130225 - RNA, 19 nt, Artificial Sequence
  Description of Artificial Sequence: Synthetic oligonucleotide
ggagcgauaaacccgcggg

SEQ ID NO: 1130226 - RNA, 19 nt, Artificial Sequence
  Description of Artificial Sequence: Synthetic oligonucleotide
auacagaccucguuccauc

SEQ ID NO: 1130227 - RNA, 19 nt, Artificial Sequence
  Description of Artificial Sequence: Synthetic oligonucleotide
aacccucgaagaguguggc

SEQ ID NO: 1130228 - RNA, 19 nt, Artificial Sequence
  Description of Artificial Sequence: Synthetic oligonucleotide
ugaggccuuacacaccuga

SEQ ID NO: 1130229 - RNA, 19 nt, Artificial Sequence
  Description of Artificial Sequence: Synthetic oligonucleotide
agaaugugcacucgguuau

SEQ ID NO: 1130230 - RNA, 19 nt, Artificial Sequence
  Description of Artificial Sequence: Synthetic oligonucleotide
acguaccgcccuuaguagc

SEQ ID NO: 1130231 - RNA, 19 nt, Artificial Sequence
  Description of Artificial Sequence: Synthetic oligonucleotide
uggagcgauaaacccgcgg

SEQ ID NO: 1130232 - RNA, 19 nt, Artificial Sequence
  Description of Artificial Sequence: Synthetic oligonucleotide
aaacccgcggguguuggcg

SEQ ID NO: 1130233 - RNA, 19 nt, Artificial Sequence
  Description of Artificial Sequence: Synthetic oligonucleotide
ugcacucgguuauaguaug

SEQ ID NO: 1130234 - RNA, 19 nt, Artificial Sequence
  Description of Artificial Sequence: Synthetic oligonucleotide
aacccgcggguguuggcgc

SEQ ID NO: 1130235 - RNA, 19 nt, Artificial Sequence
  Description of Artificial Sequence: Synthetic oligonucleotide
cucgguuauaguaugagcu

SEQ ID NO: 1130236 - RNA, 19 nt, Artificial Sequence
  Description of Artificial Sequence: Synthetic oligonucleotide
acaacucaccacaugaaca

SEQ ID NO: 1130237 - RNA, 19 nt, Artificial Sequence
  Description of Artificial Sequence: Synthetic oligonucleotide
cuaugccggggucauagcc

SEQ ID NO: 1130238 - RNA, 19 nt, Artificial Sequence
  Description of Artificial Sequence: Synthetic oligonucleotide
cacacgcucgaagacagcg

SEQ ID NO: 1130239 - RNA, 19 nt, Artificial Sequence
  Description of Artificial Sequence: Synthetic oligonucleotide
acuugcacaccauuuccgu

SEQ ID NO: 1130240 - RNA, 19 nt, Artificial Sequence
  Description of Artificial Sequence: Synthetic oligonucleotide
cacgcucgaagacagcggg

SEQ ID NO: 1130241 - RNA, 19 nt, Artificial Sequence
  Description of Artificial Sequence: Synthetic oligonucleotide
uggguagccgcccucuggc

SEQ ID NO: 1130242 - RNA, 19 nt, Artificial Sequence
  Description of Artificial Sequence: Synthetic oligonucleotide
gauguggagcccuggggug

SEQ ID NO: 1130243 - RNA, 19 nt, Artificial Sequence
  Description of Artificial Sequence: Synthetic oligonucleotide
gaagcgcgccuguagcgcg

SEQ ID NO: 1130244 - RNA, 19 nt, Artificial Sequence
  Description of Artificial Sequence: Synthetic oligonucleotide
caggugaccgcacugaaca

SEQ ID NO: 1130245 - RNA, 19 nt, Artificial Sequence
  Description of Artificial Sequence: Synthetic oligonucleotide
acacauaccccgugagcuc

SEQ ID NO: 1130246 - RNA, 19 nt, Artificial Sequence
  Description of Artificial Sequence: Synthetic oligonucleotide
uguagcgcgcuccgcggcg

SEQ ID NO: 1130247 - RNA, 19 nt, Artificial Sequence
  Description of Artificial Sequence: Synthetic oligonucleotide
uacagaccucguuccaucc

SEQ ID NO: 1130248 - RNA, 19 nt, Artificial Sequence
  Description of Artificial Sequence: Synthetic oligonucleotide
ggcacaguuauacaugaca

SEQ ID NO: 1130249 - RNA, 19 nt, Artificial Sequence
  Description of Artificial Sequence: Synthetic oligonucleotide
augccggggucauagcccg

SEQ ID NO: 1130250 - RNA, 19 nt, Artificial Sequence
  Description of Artificial Sequence: Synthetic oligonucleotide
guaacccucgaagagugug

SEQ ID NO: 1130251 - RNA, 19 nt, Artificial Sequence
  Description of Artificial Sequence: Synthetic oligonucleotide
caaauuugaugguggccac

SEQ ID NO: 1130252 - RNA, 19 nt, Artificial Sequence
  Description of Artificial Sequence: Synthetic oligonucleotide
cugaagcgcgccuguagcg

SEQ ID NO: 1130253 - RNA, 19 nt, Artificial Sequence
  Description of Artificial Sequence: Synthetic oligonucleotide
guugcccaacaucugugag

SEQ ID NO: 1130254 - RNA, 19 nt, Artificial Sequence
  Description of Artificial Sequence: Synthetic oligonucleotide
gcguuaagggccuccagcg

SEQ ID NO: 1130255 - RNA, 19 nt, Artificial Sequence
  Description of Artificial Sequence: Synthetic oligonucleotide
agucgaggugcucuucgag

SEQ ID NO: 1130256 - RNA, 19 nt, Artificial Sequence
  Description of Artificial Sequence: Synthetic oligonucleotide
aaauuugaugguggccaca

SEQ ID NO: 1130257 - RNA, 19 nt, Artificial Sequence
  Description of Artificial Sequence: Synthetic oligonucleotide
uccgcguuaggugaucggc

SEQ ID NO: 1130258 - RNA, 19 nt, Artificial Sequence
  Description of Artificial Sequence: Synthetic oligonucleotide
gcgggaguagcguaggagg

SEQ ID NO: 1130259 - RNA, 19 nt, Artificial Sequence
  Description of Artificial Sequence: Synthetic oligonucleotide
aaguugcccaacaucugug

SEQ ID NO: 1130260 - RNA, 19 nt, Artificial Sequence
  Description of Artificial Sequence: Synthetic oligonucleotide
gcguucguuuccuugaacc

SEQ ID NO: 1130261 - RNA, 19 nt, Artificial Sequence
  Description of Artificial Sequence: Synthetic oligonucleotide
ccgagguuccccuagaaug

SEQ ID NO: 1130262 - RNA, 19 nt, Artificial Sequence
  Description of Artificial Sequence: Synthetic oligonucleotide
caccgcggcguuaagggcc

SEQ ID NO: 1130263 - RNA, 19 nt, Artificial Sequence
  Description of Artificial Sequence: Synthetic oligonucleotide
cacauaccccgugagcucg

SEQ ID NO: 1130264 - RNA, 19 nt, Artificial Sequence
  Description of Artificial Sequence: Synthetic oligonucleotide
cauauccucagucaccaaa

SEQ ID NO: 1130265 - RNA, 19 nt, Artificial Sequence
  Description of Artificial Sequence: Synthetic oligonucleotide
ggaacuugcacaccauuuc

SEQ ID NO: 1130266 - RNA, 19 nt, Artificial Sequence
  Description of Artificial Sequence: Synthetic oligonucleotide
uuaggugaucggccacgag

SEQ ID NO: 1130267 - RNA, 19 nt, Artificial Sequence
  Description of Artificial Sequence: Synthetic oligonucleotide
cucugauagcacagagagc

SEQ ID NO: 1130268 - RNA, 19 nt, Artificial Sequence
  Description of Artificial Sequence: Synthetic oligonucleotide
auaaacccgcggguguugg

SEQ ID NO: 1130269 - RNA, 19 nt, Artificial Sequence
  Description of Artificial Sequence: Synthetic oligonucleotide
uccgugcggacagugaugu

SEQ ID NO: 1130270 - RNA, 19 nt, Artificial Sequence
  Description of Artificial Sequence: Synthetic oligonucleotide
agcgauaaacccgcgggug

SEQ ID NO: 1130271 - RNA, 19 nt, Artificial Sequence
  Description of Artificial Sequence: Synthetic oligonucleotide
aacuuuugccaaagcagau

SEQ ID NO: 1130272 - RNA, 19 nt, Artificial Sequence
  Description of Artificial Sequence: Synthetic oligonucleotide
cacguaccgcccuuaguag

SEQ ID NO: 1130273 - RNA, 19 nt, Artificial Sequence
  Description of Artificial Sequence: Synthetic oligonucleotide
agcacacgcucgaagacag

SEQ ID NO: 1130274 - RNA, 19 nt, Artificial Sequence
  Description of Artificial Sequence: Synthetic oligonucleotide
agcggggcgcuguaacugg

SEQ ID NO: 1130275 - RNA, 19 nt, Artificial Sequence
  Description of Artificial Sequence: Synthetic oligonucleotide
gguuuuaaguugcccaaca

SEQ ID NO: 1130276 - RNA, 19 nt, Artificial Sequence
  Description of Artificial Sequence: Synthetic oligonucleotide
cugcccguccccugaagcg

SEQ ID NO: 1130277 - RNA, 19 nt, Artificial Sequence
  Description of Artificial Sequence: Synthetic oligonucleotide
cacucgguuauaguaugag

SEQ ID NO: 1130278 - RNA, 19 nt, Artificial Sequence
  Description of Artificial Sequence: Synthetic oligonucleotide
ucgaagaguguggcaaggc

SEQ ID NO: 1130279 - RNA, 19 nt, Artificial Sequence
  Description of Artificial Sequence: Synthetic oligonucleotide
guugcagcgcagugcgggg

SEQ ID NO: 1130280 - RNA, 19 nt, Artificial Sequence
  Description of Artificial Sequence: Synthetic oligonucleotide
uucacguaccgcccuuagu

SEQ ID NO: 1130281 - RNA, 19 nt, Artificial Sequence
  Description of Artificial Sequence: Synthetic oligonucleotide
uuccgugcggacagugaug

SEQ ID NO: 1130282 - RNA, 19 nt, Artificial Sequence
  Description of Artificial Sequence: Synthetic oligonucleotide
cuguaggcgggcaaacauc

SEQ ID NO: 1130283 - RNA, 19 nt, Artificial Sequence
  Description of Artificial Sequence: Synthetic oligonucleotide
aggugaccgcacugaacac

SEQ ID NO: 1130284 - RNA, 19 nt, Artificial Sequence
  Description of Artificial Sequence: Synthetic oligonucleotide
ggcguuaagggccuccagc

SEQ ID NO: 1130285 - RNA, 19 nt, Artificial Sequence
  Description of Artificial Sequence: Synthetic oligonucleotide
aagucgcgggccuggcgag

SEQ ID NO: 1130286 - RNA, 19 nt, Artificial Sequence
  Description of Artificial Sequence: Synthetic oligonucleotide
ugcugaguugcaccaggaa

SEQ ID NO: 1130287 - RNA, 19 nt, Artificial Sequence
  Description of Artificial Sequence: Synthetic oligonucleotide
gugcgcucggguugcagcg

SEQ ID NO: 1130288 - RNA, 19 nt, Artificial Sequence
  Description of Artificial Sequence: Synthetic oligonucleotide
gaacacgcguuccggcacc

SEQ ID NO: 1130289 - RNA, 19 nt, Artificial Sequence
  Description of Artificial Sequence: Synthetic oligonucleotide
aguagcguaggaggccagg

SEQ ID NO: 1130290 - RNA, 19 nt, Artificial Sequence
  Description of Artificial Sequence: Synthetic oligonucleotide
gugaccgcacugaacacgc

SEQ ID NO: 1130291 - RNA, 19 nt, Artificial Sequence
  Description of Artificial Sequence: Synthetic oligonucleotide
acaagucgcgggccuggcg

SEQ ID NO: 1130292 - RNA, 19 nt, Artificial Sequence
  Description of Artificial Sequence: Synthetic oligonucleotide
guacuaguuccuucagaca

SEQ ID NO: 1130293 - RNA, 19 nt, Artificial Sequence
  Description of Artificial Sequence: Synthetic oligonucleotide
ccuuagauguggcucagug

SEQ ID NO: 1130294 - RNA, 19 nt, Artificial Sequence
  Description of Artificial Sequence: Synthetic oligonucleotide
gauaaacccgcggguguug

SEQ ID NO: 1130295 - RNA, 19 nt, Artificial Sequence
  Description of Artificial Sequence: Synthetic oligonucleotide
ggugaccgcacugaacacg

SEQ ID NO: 1130296 - RNA, 19 nt, Artificial Sequence
  Description of Artificial Sequence: Synthetic oligonucleotide
ucuaugccggggucauagc

SEQ ID NO: 1130297 - RNA, 19 nt, Artificial Sequence
  Description of Artificial Sequence: Synthetic oligonucleotide
ccauguuucagugcugagg

SEQ ID NO: 1130298 - RNA, 19 nt, Artificial Sequence
  Description of Artificial Sequence: Synthetic oligonucleotide
uguaacccucgaagagugu

SEQ ID NO: 1130299 - RNA, 19 nt, Artificial Sequence
  Description of Artificial Sequence: Synthetic oligonucleotide
cauaucugagcucguagua

SEQ ID NO: 1130300 - RNA, 19 nt, Artificial Sequence
  Description of Artificial Sequence: Synthetic oligonucleotide
cucuucgaggcggugggcc

SEQ ID NO: 1130301 - RNA, 19 nt, Artificial Sequence
  Description of Artificial Sequence: Synthetic oligonucleotide
ugagcauaucugagcucgu

SEQ ID NO: 1130302 - RNA, 19 nt, Artificial Sequence
  Description of Artificial Sequence: Synthetic oligonucleotide
ugaccgcacugaacacgcg

SEQ ID NO: 1130303 - RNA, 19 nt, Artificial Sequence
  Description of Artificial Sequence: Synthetic oligonucleotide
gcccuuaguagcuguaggc

SEQ ID NO: 1130304 - RNA, 19 nt, Artificial Sequence
  Description of Artificial Sequence: Synthetic oligonucleotide
cuucacguaccgcccuuag

SEQ ID NO: 1130305 - RNA, 19 nt, Artificial Sequence
  Description of Artificial Sequence: Synthetic oligonucleotide
uuccccgguuugaugauuu

SEQ ID NO: 1130306 - RNA, 19 nt, Artificial Sequence
  Description of Artificial Sequence: Synthetic oligonucleotide
cacagcacgcagcuggcuc

SEQ ID NO: 1130307 - RNA, 19 nt, Artificial Sequence
  Description of Artificial Sequence: Synthetic oligonucleotide
gguguuggcgcgcagcgca

SEQ ID NO: 1130308 - RNA, 19 nt, Artificial Sequence
  Description of Artificial Sequence: Synthetic oligonucleotide
acacuucacguaccgcccu

SEQ ID NO: 1130309 - RNA, 19 nt, Artificial Sequence
  Description of Artificial Sequence: Synthetic oligonucleotide
guguggaacacuucacgua

SEQ ID NO: 1130310 - RNA, 19 nt, Artificial Sequence
  Description of Artificial Sequence: Synthetic oligonucleotide
cccuuaguagcuguaggcg

SEQ ID NO: 1130311 - RNA, 19 nt, Artificial Sequence
  Description of Artificial Sequence: Synthetic oligonucleotide
agcgcacacauaccccgug

SEQ ID NO: 1130312 - RNA, 19 nt, Artificial Sequence
  Description of Artificial Sequence: Synthetic oligonucleotide
uuuuccccgguuugaugau

SEQ ID NO: 1130313 - RNA, 19 nt, Artificial Sequence
  Description of Artificial Sequence: Synthetic oligonucleotide
guugucuaugccgggguca

SEQ ID NO: 1130314 - RNA, 19 nt, Artificial Sequence
  Description of Artificial Sequence: Synthetic oligonucleotide
guuucagucgaggugcucu

SEQ ID NO: 1130315 - RNA, 19 nt, Artificial Sequence
  Description of Artificial Sequence: Synthetic oligonucleotide
uaaacccgcggguguuggc

SEQ ID NO: 1130316 - RNA, 19 nt, Artificial Sequence
  Description of Artificial Sequence: Synthetic oligonucleotide
agaacaagucgcgggccug

SEQ ID NO: 1130317 - RNA, 19 nt, Artificial Sequence
  Description of Artificial Sequence: Synthetic oligonucleotide
acacgcucgaagacagcgg

SEQ ID NO: 1130318 - RNA, 19 nt, Artificial Sequence
  Description of Artificial Sequence: Synthetic oligonucleotide
guggccgagguuccccuag

SEQ ID NO: 1130319 - RNA, 19 nt, Artificial Sequence
  Description of Artificial Sequence: Synthetic oligonucleotide
gagcacacgcucgaagaca

SEQ ID NO: 1130320 - RNA, 19 nt, Artificial Sequence
  Description of Artificial Sequence: Synthetic oligonucleotide
gcgggcaaacaucugacca

SEQ ID NO: 1130321 - RNA, 19 nt, Artificial Sequence
  Description of Artificial Sequence: Synthetic oligonucleotide
cuguacuaguuccuucaga

SEQ ID NO: 1130322 - RNA, 19 nt, Artificial Sequence
  Description of Artificial Sequence: Synthetic oligonucleotide
gccuguagcgcgcuccgcg

SEQ ID NO: 1130323 - RNA, 19 nt, Artificial Sequence
  Description of Artificial Sequence: Synthetic oligonucleotide
caaagagguguggccgagg

SEQ ID NO: 1130324 - RNA, 19 nt, Artificial Sequence
  Description of Artificial Sequence: Synthetic oligonucleotide
gcuguacuaguuccuucag

SEQ ID NO: 1130325 - RNA, 19 nt, Artificial Sequence
  Description of Artificial Sequence: Synthetic oligonucleotide
accacacggggcugccagg

SEQ ID NO: 1130326 - RNA, 19 nt, Artificial Sequence
  Description of Artificial Sequence: Synthetic oligonucleotide
cauuuccgugcggacagug

SEQ ID NO: 1130327 - RNA, 19 nt, Artificial Sequence
  Description of Artificial Sequence: Synthetic oligonucleotide
ugcccguccccugaagcgc

SEQ ID NO: 1130328 - RNA, 19 nt, Artificial Sequence
  Description of Artificial Sequence: Synthetic oligonucleotide
guuuuaaguugcccaacau

SEQ ID NO: 1130329 - RNA, 19 nt, Artificial Sequence
  Description of Artificial Sequence: Synthetic oligonucleotide
ccugaagcgcgccuguagc

SEQ ID NO: 1130330 - RNA, 19 nt, Artificial Sequence
  Description of Artificial Sequence: Synthetic oligonucleotide
ugcggacagugauguggag

SEQ ID NO: 1130331 - RNA, 19 nt, Artificial Sequence
  Description of Artificial Sequence: Synthetic oligonucleotide
cgugcggacagugaugugg

SEQ ID NO: 1130332 - RNA, 19 nt, Artificial Sequence
  Description of Artificial Sequence: Synthetic oligonucleotide
cccuagaaugugcacucgg

SEQ ID NO: 1130333 - RNA, 19 nt, Artificial Sequence
  Description of Artificial Sequence: Synthetic oligonucleotide
guccgcguuaggugaucgg

SEQ ID NO: 1130334 - RNA, 19 nt, Artificial Sequence
  Description of Artificial Sequence: Synthetic oligonucleotide
uucagugcugaggccuuac

SEQ ID NO: 1130335 - RNA, 19 nt, Artificial Sequence
  Description of Artificial Sequence: Synthetic oligonucleotide
uuacacaccugagcauauc

SEQ ID NO: 1130336 - RNA, 19 nt, Artificial Sequence
  Description of Artificial Sequence: Synthetic oligonucleotide
ggucauagcccgcgacagg

SEQ ID NO: 1130337 - RNA, 19 nt, Artificial Sequence
  Description of Artificial Sequence: Synthetic oligonucleotide
uccgcggcgccaagaaguc

SEQ ID NO: 1130338 - RNA, 19 nt, Artificial Sequence
  Description of Artificial Sequence: Synthetic oligonucleotide
aggucuccgcuguacuagu

SEQ ID NO: 1130339 - RNA, 19 nt, Artificial Sequence
  Description of Artificial Sequence: Synthetic oligonucleotide
auccccuguuuguaacccu

SEQ ID NO: 1130340 - RNA, 19 nt, Artificial Sequence
  Description of Artificial Sequence: Synthetic oligonucleotide
auaccccgugagcucgcag

SEQ ID NO: 1130341 - RNA, 19 nt, Artificial Sequence
  Description of Artificial Sequence: Synthetic oligonucleotide
cucgcagcguccgcguuag

SEQ ID NO: 1130342 - RNA, 19 nt, Artificial Sequence
  Description of Artificial Sequence: Synthetic oligonucleotide
gggucauagcccgcgacag

SEQ ID NO: 1130343 - RNA, 19 nt, Artificial Sequence
  Description of Artificial Sequence: Synthetic oligonucleotide
gcacacauaccccgugagc

SEQ ID NO: 1130344 - RNA, 19 nt, Artificial Sequence
  Description of Artificial Sequence: Synthetic oligonucleotide
cuggagcgauaaacccgcg

SEQ ID NO: 1130345 - RNA, 19 nt, Artificial Sequence
  Description of Artificial Sequence: Synthetic oligonucleotide
gauacagaccucguuccau

SEQ ID NO: 1130346 - RNA, 19 nt, Artificial Sequence
  Description of Artificial Sequence: Synthetic oligonucleotide
uucuugguccaugcuggau

SEQ ID NO: 1130347 - RNA, 19 nt, Artificial Sequence
  Description of Artificial Sequence: Synthetic oligonucleotide
cugugcuuagcaucucaaa

SEQ ID NO: 1130348 - RNA, 19 nt, Artificial Sequence
  Description of Artificial Sequence: Synthetic oligonucleotide
auuuccgugcggacaguga

SEQ ID NO: 1130349 - RNA, 19 nt, Artificial Sequence
  Description of Artificial Sequence: Synthetic oligonucleotide
aguccacccgaaguuucug

SEQ ID NO: 1130350 - RNA, 19 nt, Artificial Sequence
  Description of Artificial Sequence: Synthetic oligonucleotide
acauaccccgugagcucgc

SEQ ID NO: 1130351 - RNA, 19 nt, Artificial Sequence
  Description of Artificial Sequence: Synthetic oligonucleotide
cuguagcgcgcuccgcggc

SEQ ID NO: 1130352 - RNA, 19 nt, Artificial Sequence
  Description of Artificial Sequence: Synthetic oligonucleotide
uaccgcccuuaguagcugu

SEQ ID NO: 1130353 - RNA, 19 nt, Artificial Sequence
  Description of Artificial Sequence: Synthetic oligonucleotide
acccaccgcggcguuaagg

SEQ ID NO: 1130354 - RNA, 19 nt, Artificial Sequence
  Description of Artificial Sequence: Synthetic oligonucleotide
gaccgcacugaacacgcgu

SEQ ID NO: 1130355 - RNA, 19 nt, Artificial Sequence
  Description of Artificial Sequence: Synthetic oligonucleotide
uagcccgcgacaggucucc

SEQ ID NO: 1130356 - RNA, 19 nt, Artificial Sequence
  Description of Artificial Sequence: Synthetic oligonucleotide
gucauagcccgcgacaggu

SEQ ID NO: 1130357 - RNA, 19 nt, Artificial Sequence
  Description of Artificial Sequence: Synthetic oligonucleotide
cagugcggggcaaugcaga

SEQ ID NO: 1130358 - RNA, 19 nt, Artificial Sequence
  Description of Artificial Sequence: Synthetic oligonucleotide
gagcgauaaacccgcgggu

SEQ ID NO: 1130359 - RNA, 19 nt, Artificial Sequence
  Description of Artificial Sequence: Synthetic oligonucleotide
auagcccgcgacaggucuc

SEQ ID NO: 1130360 - RNA, 19 nt, Artificial Sequence
  Description of Artificial Sequence: Synthetic oligonucleotide
gcucgaagacagcggggcg

SEQ ID NO: 1130361 - RNA, 19 nt, Artificial Sequence
  Description of Artificial Sequence: Synthetic oligonucleotide
ggcccuuagauguggcuca

SEQ ID NO: 1130362 - RNA, 19 nt, Artificial Sequence
  Description of Artificial Sequence: Synthetic oligonucleotide
ugccaugugcgggucccgc

SEQ ID NO: 1130363 - RNA, 19 nt, Artificial Sequence
  Description of Artificial Sequence: Synthetic oligonucleotide
uggccgagguuccccuaga

SEQ ID NO: 1130364 - RNA, 19 nt, Artificial Sequence
  Description of Artificial Sequence: Synthetic oligonucleotide
agggaaggacacuguugaa

SEQ ID NO: 1130365 - RNA, 19 nt, Artificial Sequence
  Description of Artificial Sequence: Synthetic oligonucleotide
cuccgcggcgccaagaagu

SEQ ID NO: 1130366 - RNA, 19 nt, Artificial Sequence
  Description of Artificial Sequence: Synthetic oligonucleotide
uagcuguaggcgggcaaac

SEQ ID NO: 1130367 - RNA, 19 nt, Artificial Sequence
  Description of Artificial Sequence: Synthetic oligonucleotide
acacgcaggugccgggcgu

SEQ ID NO: 1130368 - RNA, 19 nt, Artificial Sequence
  Description of Artificial Sequence: Synthetic oligonucleotide
ggcgggcaaacaucugacc

SEQ ID NO: 1130369 - RNA, 19 nt, Artificial Sequence
  Description of Artificial Sequence: Synthetic oligonucleotide
ggcgggaguagcguaggag

SEQ ID NO: 1130370 - RNA, 19 nt, Artificial Sequence
  Description of Artificial Sequence: Synthetic oligonucleotide
acccgcggguguuggcgcg

SEQ ID NO: 1130371 - RNA, 19 nt, Artificial Sequence
  Description of Artificial Sequence: Synthetic oligonucleotide
uguuggcgcgcagcgcagc

SEQ ID NO: 1130372 - RNA, 19 nt, Artificial Sequence
  Description of Artificial Sequence: Synthetic oligonucleotide
aacacgcguuccggcaccu

SEQ ID NO: 1130373 - RNA, 19 nt, Artificial Sequence
  Description of Artificial Sequence: Synthetic oligonucleotide
uggcgggaguagcguagga

SEQ ID NO: 1130374 - RNA, 19 nt, Artificial Sequence
  Description of Artificial Sequence: Synthetic oligonucleotide
gguacaccagcuacuuuca

SEQ ID NO: 1130375 - RNA, 19 nt, Artificial Sequence
  Description of Artificial Sequence: Synthetic oligonucleotide
uucagucgaggugcucuuc

SEQ ID NO: 1130376 - RNA, 19 nt, Artificial Sequence
  Description of Artificial Sequence: Synthetic oligonucleotide
ccuguagcgcgcuccgcgg

SEQ ID NO: 1130377 - RNA, 19 nt, Artificial Sequence
  Description of Artificial Sequence: Synthetic oligonucleotide
ggaaugccuccucacaacu

SEQ ID NO: 1130378 - RNA, 19 nt, Artificial Sequence
  Description of Artificial Sequence: Synthetic oligonucleotide
gggaguagcguaggaggcc

SEQ ID NO: 1130379 - RNA, 19 nt, Artificial Sequence
  Description of Artificial Sequence: Synthetic oligonucleotide
ggaguagcguaggaggcca

SEQ ID NO: 1130380 - RNA, 19 nt, Artificial Sequence
  Description of Artificial Sequence: Synthetic oligonucleotide
cuucgaggcggugggccag

SEQ ID NO: 1130381 - RNA, 19 nt, Artificial Sequence
  Description of Artificial Sequence: Synthetic oligonucleotide
gguuauaguaugagcugaa

SEQ ID NO: 1130382 - RNA, 19 nt, Artificial Sequence
  Description of Artificial Sequence: Synthetic oligonucleotide
ccacccgaaguuucugaag

SEQ ID NO: 1130383 - RNA, 19 nt, Artificial Sequence
  Description of Artificial Sequence: Synthetic oligonucleotide
ccucgaagaguguggcaag

SEQ ID NO: 1130384 - RNA, 19 nt, Artificial Sequence
  Description of Artificial Sequence: Synthetic oligonucleotide
gugcggacagugaugugga

SEQ ID NO: 1130385 - RNA, 19 nt, Artificial Sequence
  Description of Artificial Sequence: Synthetic oligonucleotide
cuguggagcugugcuuagc

SEQ ID NO: 1130386 - RNA, 19 nt, Artificial Sequence
  Description of Artificial Sequence: Synthetic oligonucleotide
gaguagcguaggaggccag

SEQ ID NO: 1130387 - RNA, 19 nt, Artificial Sequence
  Description of Artificial Sequence: Synthetic oligonucleotide
cagcggggcgcuguaacug

SEQ ID NO: 1130388 - RNA, 19 nt, Artificial Sequence
  Description of Artificial Sequence: Synthetic oligonucleotide
ggcgccaagaagucucgga

SEQ ID NO: 1130389 - RNA, 19 nt, Artificial Sequence
  Description of Artificial Sequence: Synthetic oligonucleotide
ccgcguuaggugaucggcc

SEQ ID NO: 1130390 - RNA, 19 nt, Artificial Sequence
  Description of Artificial Sequence: Synthetic oligonucleotide
aggcgggcacaguuauaca

SEQ ID NO: 1130391 - RNA, 19 nt, Artificial Sequence
  Description of Artificial Sequence: Synthetic oligonucleotide
cucggacacgcaggugccg

SEQ ID NO: 1130392 - RNA, 19 nt, Artificial Sequence
  Description of Artificial Sequence: Synthetic oligonucleotide
gugccgggcguucguuucc

SEQ ID NO: 1130393 - RNA, 19 nt, Artificial Sequence
  Description of Artificial Sequence: Synthetic oligonucleotide
gugcgggucccgcaccgug

SEQ ID NO: 1130394 - RNA, 19 nt, Artificial Sequence
  Description of Artificial Sequence: Synthetic oligonucleotide
ucccgcaccgugggcacug

SEQ ID NO: 1130395 - RNA, 19 nt, Artificial Sequence
  Description of Artificial Sequence: Synthetic oligonucleotide
gagcauaucugagcucgua

SEQ ID NO: 1130396 - RNA, 19 nt, Artificial Sequence
  Description of Artificial Sequence: Synthetic oligonucleotide
augcugaguugcaccagga

SEQ ID NO: 1130397 - RNA, 19 nt, Artificial Sequence
  Description of Artificial Sequence: Synthetic oligonucleotide
ugcgcucggguugcagcgc

SEQ ID NO: 1130398 - RNA, 19 nt, Artificial Sequence
  Description of Artificial Sequence: Synthetic oligonucleotide
cuuacacaccugagcauau

SEQ ID NO: 1130399 - RNA, 19 nt, Artificial Sequence
  Description of Artificial Sequence: Synthetic oligonucleotide
gagugcgcucggguugcag

SEQ ID NO: 1130400 - RNA, 19 nt, Artificial Sequence
  Description of Artificial Sequence: Synthetic oligonucleotide
cgggaguagcguaggaggc

SEQ ID NO: 1130401 - RNA, 19 nt, Artificial Sequence
  Description of Artificial Sequence: Synthetic oligonucleotide
ggcgcuguaacuggagcga

SEQ ID NO: 1130402 - RNA, 19 nt, Artificial Sequence
  Description of Artificial Sequence: Synthetic oligonucleotide
gugagcucgcagcguccgc

SEQ ID NO: 1130403 - RNA, 19 nt, Artificial Sequence
  Description of Artificial Sequence: Synthetic oligonucleotide
cacucuuugugcccuuugu

SEQ ID NO: 1130404 - RNA, 19 nt, Artificial Sequence
  Description of Artificial Sequence: Synthetic oligonucleotide
guaggcgggcaaacaucug

SEQ ID NO: 1130405 - RNA, 19 nt, Artificial Sequence
  Description of Artificial Sequence: Synthetic oligonucleotide
gggcccuuagauguggcuc

SEQ ID NO: 1130406 - RNA, 19 nt, Artificial Sequence
  Description of Artificial Sequence: Synthetic oligonucleotide
accgcacugaacacgcguu

SEQ ID NO: 1130407 - RNA, 19 nt, Artificial Sequence
  Description of Artificial Sequence: Synthetic oligonucleotide
uguggccgagguuccccua

SEQ ID NO: 1130408 - RNA, 19 nt, Artificial Sequence
  Description of Artificial Sequence: Synthetic oligonucleotide
gaaugugcacucgguuaua

SEQ ID NO: 1130409 - RNA, 19 nt, Artificial Sequence
  Description of Artificial Sequence: Synthetic oligonucleotide
gcugucggccaggaggagc

SEQ ID NO: 1130410 - RNA, 19 nt, Artificial Sequence
  Description of Artificial Sequence: Synthetic oligonucleotide
gggcuuggcgggaguagcg

SEQ ID NO: 1130411 - RNA, 19 nt, Artificial Sequence
  Description of Artificial Sequence: Synthetic oligonucleotide
guaccgcccuuaguagcug

SEQ ID NO: 1130412 - RNA, 19 nt, Artificial Sequence
  Description of Artificial Sequence: Synthetic oligonucleotide
ggcgggcacaguuauacau

SEQ ID NO: 1130413 - RNA, 19 nt, Artificial Sequence
  Description of Artificial Sequence: Synthetic oligonucleotide
cagaacaagucgcgggccu

SEQ ID NO: 1130414 - RNA, 19 nt, Artificial Sequence
  Description of Artificial Sequence: Synthetic oligonucleotide
gcaucucaaauuugauggu

SEQ ID NO: 1130415 - RNA, 19 nt, Artificial Sequence
  Description of Artificial Sequence: Synthetic oligonucleotide
ggcguucguuuccuugaac

SEQ ID NO: 1130416 - RNA, 19 nt, Artificial Sequence
  Description of Artificial Sequence: Synthetic oligonucleotide
gugcacucgguuauaguau

SEQ ID NO: 1130417 - RNA, 19 nt, Artificial Sequence
  Description of Artificial Sequence: Synthetic oligonucleotide
agcgggauacagaccucgu

SEQ ID NO: 1130418 - RNA, 19 nt, Artificial Sequence
  Description of Artificial Sequence: Synthetic oligonucleotide
gcuguaggcgggcaaacau

SEQ ID NO: 1130419 - RNA, 19 nt, Artificial Sequence
  Description of Artificial Sequence: Synthetic oligonucleotide
cccgguuugaugauuuugu

SEQ ID NO: 1130420 - RNA, 19 nt, Artificial Sequence
  Description of Artificial Sequence: Synthetic oligonucleotide
gcgggucccgcaccguggg

SEQ ID NO: 1130421 - RNA, 19 nt, Artificial Sequence
  Description of Artificial Sequence: Synthetic oligonucleotide
gggcaaacaucugaccaaa

SEQ ID NO: 1130422 - RNA, 19 nt, Artificial Sequence
  Description of Artificial Sequence: Synthetic oligonucleotide
cgcuguacuaguuccuuca

SEQ ID NO: 1130423 - RNA, 19 nt, Artificial Sequence
  Description of Artificial Sequence: Synthetic oligonucleotide
ggugggccaguccacccga

SEQ ID NO: 1130424 - RNA, 19 nt, Artificial Sequence
  Description of Artificial Sequence: Synthetic oligonucleotide
guguuggcgcgcagcgcag

SEQ ID NO: 1130425 - RNA, 19 nt, Artificial Sequence
  Description of Artificial Sequence: Synthetic oligonucleotide
uccccgguuugaugauuuu

SEQ ID NO: 1130426 - RNA, 19 nt, Artificial Sequence
  Description of Artificial Sequence: Synthetic oligonucleotide
ugccggggucauagcccgc

SEQ ID NO: 1130427 - RNA, 19 nt, Artificial Sequence
  Description of Artificial Sequence: Synthetic oligonucleotide
ugccgggcguucguuuccu

SEQ ID NO: 1130428 - RNA, 19 nt, Artificial Sequence
  Description of Artificial Sequence: Synthetic oligonucleotide
gcgccuguagcgcgcuccg

SEQ ID NO: 1130429 - RNA, 19 nt, Artificial Sequence
  Description of Artificial Sequence: Synthetic oligonucleotide
gcguuccggcaccugcccg

SEQ ID NO: 1130430 - RNA, 19 nt, Artificial Sequence
  Description of Artificial Sequence: Synthetic oligonucleotide
uucgaggcggugggccagu

SEQ ID NO: 1130431 - RNA, 19 nt, Artificial Sequence
  Description of Artificial Sequence: Synthetic oligonucleotide
ggugaucggccacgagcac

SEQ ID NO: 1130432 - RNA, 19 nt, Artificial Sequence
  Description of Artificial Sequence: Synthetic oligonucleotide
cggguguuggcgcgcagcg

SEQ ID NO: 1130433 - RNA, 19 nt, Artificial Sequence
  Description of Artificial Sequence: Synthetic oligonucleotide
guagcgcgcuccgcggcgc

SEQ ID NO: 1130434 - RNA, 19 nt, Artificial Sequence
  Description of Artificial Sequence: Synthetic oligonucleotide
ccuagaaugugcacucggu

SEQ ID NO: 1130435 - RNA, 19 nt, Artificial Sequence
  Description of Artificial Sequence: Synthetic oligonucleotide
gugcggggcaaugcagaac

SEQ ID NO: 1130436 - RNA, 19 nt, Artificial Sequence
  Description of Artificial Sequence: Synthetic oligonucleotide
ucgcagcguccgcguuagg

SEQ ID NO: 1130437 - RNA, 19 nt, Artificial Sequence
  Description of Artificial Sequence: Synthetic oligonucleotide
ggguagccgcccucuggcc

SEQ ID NO: 1130438 - RNA, 19 nt, Artificial Sequence
  Description of Artificial Sequence: Synthetic oligonucleotide
gcguuaggugaucggccac

SEQ ID NO: 1130439 - RNA, 19 nt, Artificial Sequence
  Description of Artificial Sequence: Synthetic oligonucleotide
accgcggcguuaagggccu

SEQ ID NO: 1130440 - RNA, 19 nt, Artificial Sequence
  Description of Artificial Sequence: Synthetic oligonucleotide
gacccaccgcggcguuaag

SEQ ID NO: 1130441 - RNA, 19 nt, Artificial Sequence
  Description of Artificial Sequence: Synthetic oligonucleotide
gcgauaaacccgcgggugu

SEQ ID NO: 1130442 - RNA, 19 nt, Artificial Sequence
  Description of Artificial Sequence: Synthetic oligonucleotide
ccccgguuugaugauuuug

SEQ ID NO: 1130443 - RNA, 19 nt, Artificial Sequence
  Description of Artificial Sequence: Synthetic oligonucleotide
gaaccacacggggcugcca

SEQ ID NO: 1130444 - RNA, 19 nt, Artificial Sequence
  Description of Artificial Sequence: Synthetic oligonucleotide
cgcggcgccaagaagucuc

SEQ ID NO: 1130445 - RNA, 19 nt, Artificial Sequence
  Description of Artificial Sequence: Synthetic oligonucleotide
gcacaccauuuccgugcgg

SEQ ID NO: 1130446 - RNA, 19 nt, Artificial Sequence
  Description of Artificial Sequence: Synthetic oligonucleotide
ccaccgcggcguuaagggc

SEQ ID NO: 1130447 - RNA, 19 nt, Artificial Sequence
  Description of Artificial Sequence: Synthetic oligonucleotide
cuacuuucacugggccaca

SEQ ID NO: 1130448 - RNA, 19 nt, Artificial Sequence
  Description of Artificial Sequence: Synthetic oligonucleotide
gaucggccacgagcacagc

SEQ ID NO: 1130449 - RNA, 19 nt, Artificial Sequence
  Description of Artificial Sequence: Synthetic oligonucleotide
gcgcacacauaccccguga

SEQ ID NO: 1130450 - RNA, 19 nt, Artificial Sequence
  Description of Artificial Sequence: Synthetic oligonucleotide
ugucuaugccggggucaua

SEQ ID NO: 1130451 - RNA, 19 nt, Artificial Sequence
  Description of Artificial Sequence: Synthetic oligonucleotide
cgugagcucgcagcguccg

SEQ ID NO: 1130452 - RNA, 19 nt, Artificial Sequence
  Description of Artificial Sequence: Synthetic oligonucleotide
agcucgcagcguccgcguu

SEQ ID NO: 1130453 - RNA, 19 nt, Artificial Sequence
  Description of Artificial Sequence: Synthetic oligonucleotide
gcaaggcgggcacaguuau

SEQ ID NO: 1130454 - RNA, 19 nt, Artificial Sequence
  Description of Artificial Sequence: Synthetic oligonucleotide
ggauccccauccaggccug

SEQ ID NO: 1130455 - RNA, 19 nt, Artificial Sequence
  Description of Artificial Sequence: Synthetic oligonucleotide
cugauagcacagagagcau

SEQ ID NO: 1130456 - RNA, 19 nt, Artificial Sequence
  Description of Artificial Sequence: Synthetic oligonucleotide
ccgcacugaacacgcguuc

SEQ ID NO: 1130457 - RNA, 19 nt, Artificial Sequence
  Description of Artificial Sequence: Synthetic oligonucleotide
ccccuagaaugugcacucg

SEQ ID NO: 1130458 - RNA, 19 nt, Artificial Sequence
  Description of Artificial Sequence: Synthetic oligonucleotide
cccaacaucugugagguuu

SEQ ID NO: 1130459 - RNA, 19 nt, Artificial Sequence
  Description of Artificial Sequence: Synthetic oligonucleotide
gcacucgguuauaguauga

SEQ ID NO: 1130460 - RNA, 19 nt, Artificial Sequence
  Description of Artificial Sequence: Synthetic oligonucleotide
gggcacaguuauacaugac

SEQ ID NO: 1130461 - RNA, 19 nt, Artificial Sequence
  Description of Artificial Sequence: Synthetic oligonucleotide
ccgcccuuaguagcuguag

SEQ ID NO: 1130462 - RNA, 19 nt, Artificial Sequence
  Description of Artificial Sequence: Synthetic oligonucleotide
cgcguuaggugaucggcca

SEQ ID NO: 1130463 - RNA, 19 nt, Artificial Sequence
  Description of Artificial Sequence: Synthetic oligonucleotide
caaggcgggcacaguuaua

SEQ ID NO: 1130464 - RNA, 19 nt, Artificial Sequence
  Description of Artificial Sequence: Synthetic oligonucleotide
gcccuuagauguggcucag

SEQ ID NO: 1130465 - RNA, 19 nt, Artificial Sequence
  Description of Artificial Sequence: Synthetic oligonucleotide
uugguccaugcuggaucuu

SEQ ID NO: 1130466 - RNA, 19 nt, Artificial Sequence
  Description of Artificial Sequence: Synthetic oligonucleotide
gguuucagucgaggugcuc

SEQ ID NO: 1130467 - RNA, 19 nt, Artificial Sequence
  Description of Artificial Sequence: Synthetic oligonucleotide
gccaugugcgggucccgca

SEQ ID NO: 1130468 - RNA, 19 nt, Artificial Sequence
  Description of Artificial Sequence: Synthetic oligonucleotide
cauaccccgugagcucgca

SEQ ID NO: 1130469 - RNA, 19 nt, Artificial Sequence
  Description of Artificial Sequence: Synthetic oligonucleotide
agcccgcgacaggucuccg

SEQ ID NO: 1130470 - RNA, 19 nt, Artificial Sequence
  Description of Artificial Sequence: Synthetic oligonucleotide
cgggcaaacaucugaccaa

SEQ ID NO: 1130471 - RNA, 19 nt, Artificial Sequence
  Description of Artificial Sequence: Synthetic oligonucleotide
ggccaguccacccgaaguu

SEQ ID NO: 1130472 - RNA, 19 nt, Artificial Sequence
  Description of Artificial Sequence: Synthetic oligonucleotide
gcccgcgacaggucuccgc

SEQ ID NO: 1130473 - RNA, 19 nt, Artificial Sequence
  Description of Artificial Sequence: Synthetic oligonucleotide
cccuguuuguaacccucga

SEQ ID NO: 1130474 - RNA, 19 nt, Artificial Sequence
  Description of Artificial Sequence: Synthetic oligonucleotide
gcgggcuuggcgggaguag

SEQ ID NO: 1130475 - RNA, 19 nt, Artificial Sequence
  Description of Artificial Sequence: Synthetic oligonucleotide
ggacccaccgcggcguuaa

SEQ ID NO: 1130476 - RNA, 19 nt, Artificial Sequence
  Description of Artificial Sequence: Synthetic oligonucleotide
gggcguucguuuccuugaa

SEQ ID NO: 1130477 - RNA, 19 nt, Artificial Sequence
  Description of Artificial Sequence: Synthetic oligonucleotide
cguccgcguuaggugaucg

SEQ ID NO: 1130478 - RNA, 19 nt, Artificial Sequence
  Description of Artificial Sequence: Synthetic oligonucleotide
accgcccuuaguagcugua

SEQ ID NO: 1130479 - RNA, 19 nt, Artificial Sequence
  Description of Artificial Sequence: Synthetic oligonucleotide
ggguugcagcgcagugcgg

SEQ ID NO: 1130480 - RNA, 19 nt, Artificial Sequence
  Description of Artificial Sequence: Synthetic oligonucleotide
gccccgagcacacgcucga

SEQ ID NO: 1130481 - RNA, 19 nt, Artificial Sequence
  Description of Artificial Sequence: Synthetic oligonucleotide
gcgcagugcggggcaaugc

SEQ ID NO: 1130482 - RNA, 19 nt, Artificial Sequence
  Description of Artificial Sequence: Synthetic oligonucleotide
ccuggcgaggcgggcuugg

SEQ ID NO: 1130483 - RNA, 19 nt, Artificial Sequence
  Description of Artificial Sequence: Synthetic oligonucleotide
ggccgagguuccccuagaa

SEQ ID NO: 1130484 - RNA, 19 nt, Artificial Sequence
  Description of Artificial Sequence: Synthetic oligonucleotide
ucgaggcggugggccaguc

SEQ ID NO: 1130485 - RNA, 19 nt, Artificial Sequence
  Description of Artificial Sequence: Synthetic oligonucleotide
cggacacgcaggugccggg

SEQ ID NO: 1130486 - RNA, 19 nt, Artificial Sequence
  Description of Artificial Sequence: Synthetic oligonucleotide
cgcagugcggggcaaugca

SEQ ID NO: 1130487 - RNA, 19 nt, Artificial Sequence
  Description of Artificial Sequence: Synthetic oligonucleotide
gcauauccucagucaccaa

SEQ ID NO: 1130488 - RNA, 19 nt, Artificial Sequence
  Description of Artificial Sequence: Synthetic oligonucleotide
gcucgcagcguccgcguua

SEQ ID NO: 1130489 - RNA, 19 nt, Artificial Sequence
  Description of Artificial Sequence: Synthetic oligonucleotide
cgcguuccggcaccugccc

SEQ ID NO: 1130490 - RNA, 19 nt, Artificial Sequence
  Description of Artificial Sequence: Synthetic oligonucleotide
gcgcucggguugcagcgca

SEQ ID NO: 1130491 - RNA, 19 nt, Artificial Sequence
  Description of Artificial Sequence: Synthetic oligonucleotide
cguaccgcccuuaguagcu

SEQ ID NO: 1130492 - RNA, 19 nt, Artificial Sequence
  Description of Artificial Sequence: Synthetic oligonucleotide
gccgagguuccccuagaau

SEQ ID NO: 1130493 - RNA, 19 nt, Artificial Sequence
  Description of Artificial Sequence: Synthetic oligonucleotide
cucguuccauccccuguuu

SEQ ID NO: 1130494 - RNA, 19 nt, Artificial Sequence
  Description of Artificial Sequence: Synthetic oligonucleotide
gcggcguuaagggccucca

SEQ ID NO: 1130495 - RNA, 19 nt, Artificial Sequence
  Description of Artificial Sequence: Synthetic oligonucleotide
ggcggagugcgcucggguu

SEQ ID NO: 1130496 - RNA, 19 nt, Artificial Sequence
  Description of Artificial Sequence: Synthetic oligonucleotide
cacuucacguaccgcccuu

SEQ ID NO: 1130497 - RNA, 19 nt, Artificial Sequence
  Description of Artificial Sequence: Synthetic oligonucleotide
ccgcgacaggucuccgcug

SEQ ID NO: 1130498 - RNA, 19 nt, Artificial Sequence
  Description of Artificial Sequence: Synthetic oligonucleotide
aggacccaccgcggcguua

SEQ ID NO: 1130499 - RNA, 19 nt, Artificial Sequence
  Description of Artificial Sequence: Synthetic oligonucleotide
gcgggauacagaccucguu

SEQ ID NO: 1130500 - RNA, 19 nt, Artificial Sequence
  Description of Artificial Sequence: Synthetic oligonucleotide
cccgcgacaggucuccgcu

SEQ ID NO: 1130501 - RNA, 19 nt, Artificial Sequence
  Description of Artificial Sequence: Synthetic oligonucleotide
ggccuggguagccgcccuc

SEQ ID NO: 1130502 - RNA, 19 nt, Artificial Sequence
  Description of Artificial Sequence: Synthetic oligonucleotide
cccguccccugaagcgcgc

SEQ ID NO: 1130503 - RNA, 19 nt, Artificial Sequence
  Description of Artificial Sequence: Synthetic oligonucleotide
cggcguuaagggccuccag

SEQ ID NO: 1130504 - RNA, 19 nt, Artificial Sequence
  Description of Artificial Sequence: Synthetic oligonucleotide
gugggccaguccacccgaa

SEQ ID NO: 1130505 - RNA, 19 nt, Artificial Sequence
  Description of Artificial Sequence: Synthetic oligonucleotide
ccgugcggacagugaugug

SEQ ID NO: 1130506 - RNA, 19 nt, Artificial Sequence
  Description of Artificial Sequence: Synthetic oligonucleotide
cgcggcguuaagggccucc

SEQ ID NO: 1130507 - RNA, 19 nt, Artificial Sequence
  Description of Artificial Sequence: Synthetic oligonucleotide
ccguccccugaagcgcgcc

SEQ ID NO: 1130508 - RNA, 19 nt, Artificial Sequence
  Description of Artificial Sequence: Synthetic oligonucleotide
gcgacaggucuccgcugua

SEQ ID NO: 1130509 - RNA, 19 nt, Artificial Sequence
  Description of Artificial Sequence: Synthetic oligonucleotide
ggguuucagucgaggugcu

SEQ ID NO: 1130510 - RNA, 19 nt, Artificial Sequence
  Description of Artificial Sequence: Synthetic oligonucleotide
gcggggcgcuguaacugga

SEQ ID NO: 1130511 - RNA, 19 nt, Artificial Sequence
  Description of Artificial Sequence: Synthetic oligonucleotide
cguuaagggccuccagcgu

SEQ ID NO: 1130512 - RNA, 19 nt, Artificial Sequence
  Description of Artificial Sequence: Synthetic oligonucleotide
ggcgggcuuggcgggagua

SEQ ID NO: 1130513 - RNA, 19 nt, Artificial Sequence
  Description of Artificial Sequence: Synthetic oligonucleotide
cccgcggguguuggcgcgc

SEQ ID NO: 1130514 - RNA, 19 nt, Artificial Sequence
  Description of Artificial Sequence: Synthetic oligonucleotide
gcguccgcguuaggugauc

SEQ ID NO: 1130515 - RNA, 19 nt, Artificial Sequence
  Description of Artificial Sequence: Synthetic oligonucleotide
cgcgacaggucuccgcugu

SEQ ID NO: 1130516 - RNA, 19 nt, Artificial Sequence
  Description of Artificial Sequence: Synthetic oligonucleotide
ggagugcgcucggguugca

SEQ ID NO: 1130517 - RNA, 19 nt, Artificial Sequence
  Description of Artificial Sequence: Synthetic oligonucleotide
gcgcuguaacuggagcgau

SEQ ID NO: 1130518 - RNA, 19 nt, Artificial Sequence
  Description of Artificial Sequence: Synthetic oligonucleotide
gcggggcaaugcagaacaa

SEQ ID NO: 1130519 - RNA, 19 nt, Artificial Sequence
  Description of Artificial Sequence: Synthetic oligonucleotide
ccggggucauagcccgcga

SEQ ID NO: 1130520 - RNA, 19 nt, Artificial Sequence
  Description of Artificial Sequence: Synthetic oligonucleotide
ggucuccgcuguacuaguu

SEQ ID NO: 1130521 - RNA, 19 nt, Artificial Sequence
  Description of Artificial Sequence: Synthetic oligonucleotide
cccaguuacugggcccuua

SEQ ID NO: 1130522 - RNA, 19 nt, Artificial Sequence
  Description of Artificial Sequence: Synthetic oligonucleotide
cgcggguguuggcgcgcag

SEQ ID NO: 1130523 - RNA, 19 nt, Artificial Sequence
  Description of Artificial Sequence: Synthetic oligonucleotide
cgauaaacccgcggguguu

SEQ ID NO: 1130524 - RNA, 19 nt, Artificial Sequence
  Description of Artificial Sequence: Synthetic oligonucleotide
gcgcgccuguagcgcgcuc

SEQ ID NO: 1130525 - RNA, 19 nt, Artificial Sequence
  Description of Artificial Sequence: Synthetic oligonucleotide
cgcgcuccgcggcgccaag

SEQ ID NO: 1130526 - RNA, 19 nt, Artificial Sequence
  Description of Artificial Sequence: Synthetic oligonucleotide
cccuuagauguggcucagu

SEQ ID NO: 1130527 - RNA, 19 nt, Artificial Sequence
  Description of Artificial Sequence: Synthetic oligonucleotide
ccgcggguguuggcgcgca

SEQ ID NO: 1130528 - RNA, 19 nt, Artificial Sequence
  Description of Artificial Sequence: Synthetic oligonucleotide
cccgcaccgugggcacuga

SEQ ID NO: 1130529 - RNA, 19 nt, Artificial Sequence
  Description of Artificial Sequence: Synthetic oligonucleotide
ccgcggcgccaagaagucu

SEQ ID NO: 1130530 - RNA, 19 nt, Artificial Sequence
  Description of Artificial Sequence: Synthetic oligonucleotide
ccgcggcguuaagggccuc

SEQ ID NO: 1130531 - RNA, 19 nt, Artificial Sequence
  Description of Artificial Sequence: Synthetic oligonucleotide
ugaucuuaaagaaauagcc

SEQ ID NO: 1130532 - RNA, 19 nt, Artificial Sequence
  Description of Artificial Sequence: Synthetic oligonucleotide
uuaggcaucagccaaagcc

SEQ ID NO: 1130533 - RNA, 19 nt, Artificial Sequence
  Description of Artificial Sequence: Synthetic oligonucleotide
ucagagauuagcuagacca

SEQ ID NO: 1130534 - RNA, 19 nt, Artificial Sequence
  Description of Artificial Sequence: Synthetic oligonucleotide
gaguuugggauuuaaagcg

SEQ ID NO: 1130535 - RNA, 19 nt, Artificial Sequence
  Description of Artificial Sequence: Synthetic oligonucleotide
aaggauuguagucuugagc

SEQ ID NO: 1130536 - RNA, 19 nt, Artificial Sequence
  Description of Artificial Sequence: Synthetic oligonucleotide
uucaagucauaccauaugg

SEQ ID NO: 1130537 - RNA, 19 nt, Artificial Sequence
  Description of Artificial Sequence: Synthetic oligonucleotide
auuagcuagaccaucaugc

SEQ ID NO: 1130538 - RNA, 19 nt, Artificial Sequence
  Description of Artificial Sequence: Synthetic oligonucleotide
aagaucuuguaccagagug

SEQ ID NO: 1130539 - RNA, 19 nt, Artificial Sequence
  Description of Artificial Sequence: Synthetic oligonucleotide
ugaaacaaccauuuuacag

SEQ ID NO: 1130540 - RNA, 19 nt, Artificial Sequence
  Description of Artificial Sequence: Synthetic oligonucleotide
ucugaaacaaccauuuuac

SEQ ID NO: 1130541 - RNA, 19 nt, Artificial Sequence
  Description of Artificial Sequence: Synthetic oligonucleotide
aacugauucaagucauacc

SEQ ID NO: 1130542 - RNA, 19 nt, Artificial Sequence
  Description of Artificial Sequence: Synthetic oligonucleotide
aguccaaaucauuaaagcg

SEQ ID NO: 1130543 - RNA, 19 nt, Artificial Sequence
  Description of Artificial Sequence: Synthetic oligonucleotide
uucaggauugcucugacgc

SEQ ID NO: 1130544 - RNA, 19 nt, Artificial Sequence
  Description of Artificial Sequence: Synthetic oligonucleotide
aacaauaacggugaguuug

SEQ ID NO: 1130545 - RNA, 19 nt, Artificial Sequence
  Description of Artificial Sequence: Synthetic oligonucleotide
gagaguacccuccaaaggg

SEQ ID NO: 1130546 - RNA, 19 nt, Artificial Sequence
  Description of Artificial Sequence: Synthetic oligonucleotide
agaucguauauucacagag

SEQ ID NO: 1130547 - RNA, 19 nt, Artificial Sequence
  Description of Artificial Sequence: Synthetic oligonucleotide
aaaucauuaaagcgcagca

SEQ ID NO: 1130548 - RNA, 19 nt, Artificial Sequence
  Description of Artificial Sequence: Synthetic oligonucleotide
ugaguuugggauuuaaagc

SEQ ID NO: 1130549 - RNA, 19 nt, Artificial Sequence
  Description of Artificial Sequence: Synthetic oligonucleotide
gaaaauggagaguugugag

SEQ ID NO: 1130550 - RNA, 19 nt, Artificial Sequence
  Description of Artificial Sequence: Synthetic oligonucleotide
aaggaaagagaucaauaug

SEQ ID NO: 1130551 - RNA, 19 nt, Artificial Sequence
  Description of Artificial Sequence: Synthetic oligonucleotide
uuuacaggaagucacugac

SEQ ID NO: 1130552 - RNA, 19 nt, Artificial Sequence
  Description of Artificial Sequence: Synthetic oligonucleotide
aggacuaggccccaugucc

SEQ ID NO: 1130553 - RNA, 19 nt, Artificial Sequence
  Description of Artificial Sequence: Synthetic oligonucleotide
acaaccauuuuacaggaag

SEQ ID NO: 1130554 - RNA, 19 nt, Artificial Sequence
  Description of Artificial Sequence: Synthetic oligonucleotide
ucuggaacaauaacgguga

SEQ ID NO: 1130555 - RNA, 19 nt, Artificial Sequence
  Description of Artificial Sequence: Synthetic oligonucleotide
gaaauuuaccagcaagaag

SEQ ID NO: 1130556 - RNA, 19 nt, Artificial Sequence
  Description of Artificial Sequence: Synthetic oligonucleotide
acauacuucaaacacagaa

SEQ ID NO: 1130557 - RNA, 19 nt, Artificial Sequence
  Description of Artificial Sequence: Synthetic oligonucleotide
ucuuaaagaaauagcccag

SEQ ID NO: 1130558 - RNA, 19 nt, Artificial Sequence
  Description of Artificial Sequence: Synthetic oligonucleotide
augaaaaccaccaagggug

SEQ ID NO: 1130559 - RNA, 19 nt, Artificial Sequence
  Description of Artificial Sequence: Synthetic oligonucleotide
agaaaaguauuccaguccu

SEQ ID NO: 1130560 - RNA, 19 nt, Artificial Sequence
  Description of Artificial Sequence: Synthetic oligonucleotide
caucacaggaccaauuucc

SEQ ID NO: 1130561 - RNA, 19 nt, Artificial Sequence
  Description of Artificial Sequence: Synthetic oligonucleotide
uauugauggggccugauuc

SEQ ID NO: 1130562 - RNA, 19 nt, Artificial Sequence
  Description of Artificial Sequence: Synthetic oligonucleotide
aauggcucccuuauaacac

SEQ ID NO: 1130563 - RNA, 19 nt, Artificial Sequence
  Description of Artificial Sequence: Synthetic oligonucleotide
aacauuguuaucaccauca

SEQ ID NO: 1130564 - RNA, 19 nt, Artificial Sequence
  Description of Artificial Sequence: Synthetic oligonucleotide
aagcgugguagacuuuucc

SEQ ID NO: 1130565 - RNA, 19 nt, Artificial Sequence
  Description of Artificial Sequence: Synthetic oligonucleotide
aaacaaccauuuuacagga

SEQ ID NO: 1130566 - RNA, 19 nt, Artificial Sequence
  Description of Artificial Sequence: Synthetic oligonucleotide
auagggucaggcugcaucc

SEQ ID NO: 1130567 - RNA, 19 nt, Artificial Sequence
  Description of Artificial Sequence: Synthetic oligonucleotide
auaacggugaguuugggau

SEQ ID NO: 1130568 - RNA, 19 nt, Artificial Sequence
  Description of Artificial Sequence: Synthetic oligonucleotide
uccuugaucuuaaagaaau

SEQ ID NO: 1130569 - RNA, 19 nt, Artificial Sequence
  Description of Artificial Sequence: Synthetic oligonucleotide
uguuuauaaauauguacaa

SEQ ID NO: 1130570 - RNA, 19 nt, Artificial Sequence
  Description of Artificial Sequence: Synthetic oligonucleotide
aaaauggagaguugugaga

SEQ ID NO: 1130571 - RNA, 19 nt, Artificial Sequence
  Description of Artificial Sequence: Synthetic oligonucleotide
gacuuaaucuccuugaucu

SEQ ID NO: 1130572 - RNA, 19 nt, Artificial Sequence
  Description of Artificial Sequence: Synthetic oligonucleotide
ugcaagaucguauauucac

SEQ ID NO: 1130573 - RNA, 19 nt, Artificial Sequence
  Description of Artificial Sequence: Synthetic oligonucleotide
caggcaaugaucaugguuc

SEQ ID NO: 1130574 - RNA, 19 nt, Artificial Sequence
  Description of Artificial Sequence: Synthetic oligonucleotide
uaaagaaauagcccagggu

SEQ ID NO: 1130575 - RNA, 19 nt, Artificial Sequence
  Description of Artificial Sequence: Synthetic oligonucleotide
ugcuguaugugucagggac

SEQ ID NO: 1130576 - RNA, 19 nt, Artificial Sequence
  Description of Artificial Sequence: Synthetic oligonucleotide
ucuuguaccagaguguagc

SEQ ID NO: 1130577 - RNA, 19 nt, Artificial Sequence
  Description of Artificial Sequence: Synthetic oligonucleotide
ucguauauucacagagugg

SEQ ID NO: 1130578 - RNA, 19 nt, Artificial Sequence
  Description of Artificial Sequence: Synthetic oligonucleotide
auuaaagcgcagcagaaaa

SEQ ID NO: 1130579 - RNA, 19 nt, Artificial Sequence
  Description of Artificial Sequence: Synthetic oligonucleotide
auaacugcguagcaaaaca

SEQ ID NO: 1130580 - RNA, 19 nt, Artificial Sequence
  Description of Artificial Sequence: Synthetic oligonucleotide
ugguagacuuuuccaaugg

SEQ ID NO: 1130581 - RNA, 19 nt, Artificial Sequence
  Description of Artificial Sequence: Synthetic oligonucleotide
aacccaacauugcaagauc

SEQ ID NO: 1130582 - RNA, 19 nt, Artificial Sequence
  Description of Artificial Sequence: Synthetic oligonucleotide
caagucauaccauauggug

SEQ ID NO: 1130583 - RNA, 19 nt, Artificial Sequence
  Description of Artificial Sequence: Synthetic oligonucleotide
aauaacggugaguuuggga

SEQ ID NO: 1130584 - RNA, 19 nt, Artificial Sequence
  Description of Artificial Sequence: Synthetic oligonucleotide
aggaaagagaucaauauga

SEQ ID NO: 1130585 - RNA, 19 nt, Artificial Sequence
  Description of Artificial Sequence: Synthetic oligonucleotide
gauguagagcuucagguuc

SEQ ID NO: 1130586 - RNA, 19 nt, Artificial Sequence
  Description of Artificial Sequence: Synthetic oligonucleotide
caaguccaaaucauuaaag

SEQ ID NO: 1130587 - RNA, 19 nt, Artificial Sequence
  Description of Artificial Sequence: Synthetic oligonucleotide
guccaaaucauuaaagcgc

SEQ ID NO: 1130588 - RNA, 19 nt, Artificial Sequence
  Description of Artificial Sequence: Synthetic oligonucleotide
ugaaaaccaccaagggugg

SEQ ID NO: 1130589 - RNA, 19 nt, Artificial Sequence
  Description of Artificial Sequence: Synthetic oligonucleotide
gauuaaugaacggucauca

SEQ ID NO: 1130590 - RNA, 19 nt, Artificial Sequence
  Description of Artificial Sequence: Synthetic oligonucleotide
caagaucguauauucacag

SEQ ID NO: 1130591 - RNA, 19 nt, Artificial Sequence
  Description of Artificial Sequence: Synthetic oligonucleotide
ugagcauauuuuguguugg

SEQ ID NO: 1130592 - RNA, 19 nt, Artificial Sequence
  Description of Artificial Sequence: Synthetic oligonucleotide
auugcucugacgcaauuug

SEQ ID NO: 1130593 - RNA, 19 nt, Artificial Sequence
  Description of Artificial Sequence: Synthetic oligonucleotide
ugaucaugguucuuggucu

SEQ ID NO: 1130594 - RNA, 19 nt, Artificial Sequence
  Description of Artificial Sequence: Synthetic oligonucleotide
uguuaucaccaucacaaaa

SEQ ID NO: 1130595 - RNA, 19 nt, Artificial Sequence
  Description of Artificial Sequence: Synthetic oligonucleotide
uauauucacagaguggcca

SEQ ID NO: 1130596 - RNA, 19 nt, Artificial Sequence
  Description of Artificial Sequence: Synthetic oligonucleotide
caaagcacgugcaucacag

SEQ ID NO: 1130597 - RNA, 19 nt, Artificial Sequence
  Description of Artificial Sequence: Synthetic oligonucleotide
aguuacaggcacuugaaau

SEQ ID NO: 1130598 - RNA, 19 nt, Artificial Sequence
  Description of Artificial Sequence: Synthetic oligonucleotide
uugauaacugcguagcaaa

SEQ ID NO: 1130599 - RNA, 19 nt, Artificial Sequence
  Description of Artificial Sequence: Synthetic oligonucleotide
uugaaaugucuuuggcugg

SEQ ID NO: 1130600 - RNA, 19 nt, Artificial Sequence
  Description of Artificial Sequence: Synthetic oligonucleotide
ucaucggcauuccaggcag

SEQ ID NO: 1130601 - RNA, 19 nt, Artificial Sequence
  Description of Artificial Sequence: Synthetic oligonucleotide
aacauugcaagaucguaua

SEQ ID NO: 1130602 - RNA, 19 nt, Artificial Sequence
  Description of Artificial Sequence: Synthetic oligonucleotide
ucaauaugaucugaaacaa

SEQ ID NO: 1130603 - RNA, 19 nt, Artificial Sequence
  Description of Artificial Sequence: Synthetic oligonucleotide
aucagagauuagcuagacc

SEQ ID NO: 1130604 - RNA, 19 nt, Artificial Sequence
  Description of Artificial Sequence: Synthetic oligonucleotide
auggcgcuaacacugauca

SEQ ID NO: 1130605 - RNA, 19 nt, Artificial Sequence
  Description of Artificial Sequence: Synthetic oligonucleotide
ucaagucauaccauauggu

SEQ ID NO: 1130606 - RNA, 19 nt, Artificial Sequence
  Description of Artificial Sequence: Synthetic oligonucleotide
gugagauuaggcaucagcc

SEQ ID NO: 1130607 - RNA, 19 nt, Artificial Sequence
  Description of Artificial Sequence: Synthetic oligonucleotide
gauuagcuagaccaucaug

SEQ ID NO: 1130608 - RNA, 19 nt, Artificial Sequence
  Description of Artificial Sequence: Synthetic oligonucleotide
uugagcauauuuuguguug

SEQ ID NO: 1130609 - RNA, 19 nt, Artificial Sequence
  Description of Artificial Sequence: Synthetic oligonucleotide
caaaucauuaaagcgcagc

SEQ ID NO: 1130610 - RNA, 19 nt, Artificial Sequence
  Description of Artificial Sequence: Synthetic oligonucleotide
gugugugacguuucgagag

SEQ ID NO: 1130611 - RNA, 19 nt, Artificial Sequence
  Description of Artificial Sequence: Synthetic oligonucleotide
uguagucuugagcauauuu

SEQ ID NO: 1130612 - RNA, 19 nt, Artificial Sequence
  Description of Artificial Sequence: Synthetic oligonucleotide
cucugacgcaauuugcugg

SEQ ID NO: 1130613 - RNA, 19 nt, Artificial Sequence
  Description of Artificial Sequence: Synthetic oligonucleotide
ucgagaguacccuccaaag

SEQ ID NO: 1130614 - RNA, 19 nt, Artificial Sequence
  Description of Artificial Sequence: Synthetic oligonucleotide
uuaccagcaagaagcagcu

SEQ ID NO: 1130615 - RNA, 19 nt, Artificial Sequence
  Description of Artificial Sequence: Synthetic oligonucleotide
cuuauaacaccagaaagga

SEQ ID NO: 1130616 - RNA, 19 nt, Artificial Sequence
  Description of Artificial Sequence: Synthetic oligonucleotide
ugaaauuuaccagcaagaa

SEQ ID NO: 1130617 - RNA, 19 nt, Artificial Sequence
  Description of Artificial Sequence: Synthetic oligonucleotide
gauagggucaggcugcauc

SEQ ID NO: 1130618 - RNA, 19 nt, Artificial Sequence
  Description of Artificial Sequence: Synthetic oligonucleotide
gaugcagguugauuaauga

SEQ ID NO: 1130619 - RNA, 19 nt, Artificial Sequence
  Description of Artificial Sequence: Synthetic oligonucleotide
gucuugagcauauuuugug

SEQ ID NO: 1130620 - RNA, 19 nt, Artificial Sequence
  Description of Artificial Sequence: Synthetic oligonucleotide
auguugaucucuucgugug

SEQ ID NO: 1130621 - RNA, 19 nt, Artificial Sequence
  Description of Artificial Sequence: Synthetic oligonucleotide
ucccuuauaacaccagaaa

SEQ ID NO: 1130622 - RNA, 19 nt, Artificial Sequence
  Description of Artificial Sequence: Synthetic oligonucleotide
aaugaucaugguucuuggu

SEQ ID NO: 1130623 - RNA, 19 nt, Artificial Sequence
  Description of Artificial Sequence: Synthetic oligonucleotide
aaauagcccagggugagga

SEQ ID NO: 1130624 - RNA, 19 nt, Artificial Sequence
  Description of Artificial Sequence: Synthetic oligonucleotide
uuugauaacugcguagcaa

SEQ ID NO: 1130625 - RNA, 19 nt, Artificial Sequence
  Description of Artificial Sequence: Synthetic oligonucleotide
aaagcacgugcaucacagg

SEQ ID NO: 1130626 - RNA, 19 nt, Artificial Sequence
  Description of Artificial Sequence: Synthetic oligonucleotide
uguaccagaguguagcguu

SEQ ID NO: 1130627 - RNA, 19 nt, Artificial Sequence
  Description of Artificial Sequence: Synthetic oligonucleotide
cagcagaaaaguauuccag

SEQ ID NO: 1130628 - RNA, 19 nt, Artificial Sequence
  Description of Artificial Sequence: Synthetic oligonucleotide
aaaccaccaaggguggccg

SEQ ID NO: 1130629 - RNA, 19 nt, Artificial Sequence
  Description of Artificial Sequence: Synthetic oligonucleotide
ugauucaagucauaccaua

SEQ ID NO: 1130630 - RNA, 19 nt, Artificial Sequence
  Description of Artificial Sequence: Synthetic oligonucleotide
uugauuaaugaacggucau

SEQ ID NO: 1130631 - RNA, 19 nt, Artificial Sequence
  Description of Artificial Sequence: Synthetic oligonucleotide
ucaguuacaggcacuugaa

SEQ ID NO: 1130632 - RNA, 19 nt, Artificial Sequence
  Description of Artificial Sequence: Synthetic oligonucleotide
agaguccaaucugaugucc

SEQ ID NO: 1130633 - RNA, 19 nt, Artificial Sequence
  Description of Artificial Sequence: Synthetic oligonucleotide
ugcucugacgcaauuugcu

SEQ ID NO: 1130634 - RNA, 19 nt, Artificial Sequence
  Description of Artificial Sequence: Synthetic oligonucleotide
aaacccuagauguuuuauu

SEQ ID NO: 1130635 - RNA, 19 nt, Artificial Sequence
  Description of Artificial Sequence: Synthetic oligonucleotide
gggauuuaaagcgugguag

SEQ ID NO: 1130636 - RNA, 19 nt, Artificial Sequence
  Description of Artificial Sequence: Synthetic oligonucleotide
cagucugacacuccagucc

SEQ ID NO: 1130637 - RNA, 19 nt, Artificial Sequence
  Description of Artificial Sequence: Synthetic oligonucleotide
gagauuaggcaucagccaa

SEQ ID NO: 1130638 - RNA, 19 nt, Artificial Sequence
  Description of Artificial Sequence: Synthetic oligonucleotide
agucuaggacaccugagga

SEQ ID NO: 1130639 - RNA, 19 nt, Artificial Sequence
  Description of Artificial Sequence: Synthetic oligonucleotide
cuuguaccagaguguagcg

SEQ ID NO: 1130640 - RNA, 19 nt, Artificial Sequence
  Description of Artificial Sequence: Synthetic oligonucleotide
uucgagaguacccuccaaa

SEQ ID NO: 1130641 - RNA, 19 nt, Artificial Sequence
  Description of Artificial Sequence: Synthetic oligonucleotide
aguugugagauuaggcauc

SEQ ID NO: 1130642 - RNA, 19 nt, Artificial Sequence
  Description of Artificial Sequence: Synthetic oligonucleotide
caguccugaaauuuaccag

SEQ ID NO: 1130643 - RNA, 19 nt, Artificial Sequence
  Description of Artificial Sequence: Synthetic oligonucleotide
aagaaauagcccaggguga

SEQ ID NO: 1130644 - RNA, 19 nt, Artificial Sequence
  Description of Artificial Sequence: Synthetic oligonucleotide
aagguaauggccacugaga

SEQ ID NO: 1130645 - RNA, 19 nt, Artificial Sequence
  Description of Artificial Sequence: Synthetic oligonucleotide
uuacaggcacuugaaaugu

SEQ ID NO: 1130646 - RNA, 19 nt, Artificial Sequence
  Description of Artificial Sequence: Synthetic oligonucleotide
uguugaucucuucgugugc

SEQ ID NO: 1130647 - RNA, 19 nt, Artificial Sequence
  Description of Artificial Sequence: Synthetic oligonucleotide
auuaggcaucagccaaagc

SEQ ID NO: 1130648 - RNA, 19 nt, Artificial Sequence
  Description of Artificial Sequence: Synthetic oligonucleotide
agaucaauaugaucugaaa

SEQ ID NO: 1130649 - RNA, 19 nt, Artificial Sequence
  Description of Artificial Sequence: Synthetic oligonucleotide
agaguacccuccaaagggc

SEQ ID NO: 1130650 - RNA, 19 nt, Artificial Sequence
  Description of Artificial Sequence: Synthetic oligonucleotide
acugcguagcaaaacauug

SEQ ID NO: 1130651 - RNA, 19 nt, Artificial Sequence
  Description of Artificial Sequence: Synthetic oligonucleotide
aaaucaguuacaggcacuu

SEQ ID NO: 1130652 - RNA, 19 nt, Artificial Sequence
  Description of Artificial Sequence: Synthetic oligonucleotide
ugaucaugaaaaccaccaa

SEQ ID NO: 1130653 - RNA, 19 nt, Artificial Sequence
  Description of Artificial Sequence: Synthetic oligonucleotide
uggggacuuaaucuccuug

SEQ ID NO: 1130654 - RNA, 19 nt, Artificial Sequence
  Description of Artificial Sequence: Synthetic oligonucleotide
ugauuaaugaacggucauc

SEQ ID NO: 1130655 - RNA, 19 nt, Artificial Sequence
  Description of Artificial Sequence: Synthetic oligonucleotide
ugcguagcaaaacauuguu

SEQ ID NO: 1130656 - RNA, 19 nt, Artificial Sequence
  Description of Artificial Sequence: Synthetic oligonucleotide
acaauaacggugaguuugg

SEQ ID NO: 1130657 - RNA, 19 nt, Artificial Sequence
  Description of Artificial Sequence: Synthetic oligonucleotide
aaggaugguggaguacagg

SEQ ID NO: 1130658 - RNA, 19 nt, Artificial Sequence
  Description of Artificial Sequence: Synthetic oligonucleotide
gcagguugauuaaugaacg

SEQ ID NO: 1130659 - RNA, 19 nt, Artificial Sequence
  Description of Artificial Sequence: Synthetic oligonucleotide
cugaacagugacagggaag

SEQ ID NO: 1130660 - RNA, 19 nt, Artificial Sequence
  Description of Artificial Sequence: Synthetic oligonucleotide
auaacaccagaaaggauug

SEQ ID NO: 1130661 - RNA, 19 nt, Artificial Sequence
  Description of Artificial Sequence: Synthetic oligonucleotide
uuauaacaccagaaaggau

SEQ ID NO: 1130662 - RNA, 19 nt, Artificial Sequence
  Description of Artificial Sequence: Synthetic oligonucleotide
uguagcguugcuguaugug

SEQ ID NO: 1130663 - RNA, 19 nt, Artificial Sequence
  Description of Artificial Sequence: Synthetic oligonucleotide
ucuaggacaccugaggaua

SEQ ID NO: 1130664 - RNA, 19 nt, Artificial Sequence
  Description of Artificial Sequence: Synthetic oligonucleotide
auuuuacaggaagucacug

SEQ ID NO: 1130665 - RNA, 19 nt, Artificial Sequence
  Description of Artificial Sequence: Synthetic oligonucleotide
agguaauggccacugagau

SEQ ID NO: 1130666 - RNA, 19 nt, Artificial Sequence
  Description of Artificial Sequence: Synthetic oligonucleotide
ugcaucacaggaccaauuu

SEQ ID NO: 1130667 - RNA, 19 nt, Artificial Sequence
  Description of Artificial Sequence: Synthetic oligonucleotide
aguguagcguugcuguaug

SEQ ID NO: 1130668 - RNA, 19 nt, Artificial Sequence
  Description of Artificial Sequence: Synthetic oligonucleotide
acagucaucggcauuccag

SEQ ID NO: 1130669 - RNA, 19 nt, Artificial Sequence
  Description of Artificial Sequence: Synthetic oligonucleotide
uccaguccugaaauuuacc

SEQ ID NO: 1130670 - RNA, 19 nt, Artificial Sequence
  Description of Artificial Sequence: Synthetic oligonucleotide
uacuucaaacacagaaaau

SEQ ID NO: 1130671 - RNA, 19 nt, Artificial Sequence
  Description of Artificial Sequence: Synthetic oligonucleotide
guaauggccacugagauau

SEQ ID NO: 1130672 - RNA, 19 nt, Artificial Sequence
  Description of Artificial Sequence: Synthetic oligonucleotide
gauuaggcaucagccaaag

SEQ ID NO: 1130673 - RNA, 19 nt, Artificial Sequence
  Description of Artificial Sequence: Synthetic oligonucleotide
agaaauagcccagggugag

SEQ ID NO: 1130674 - RNA, 19 nt, Artificial Sequence
  Description of Artificial Sequence: Synthetic oligonucleotide
ugagaugcagguugauuaa

SEQ ID NO: 1130675 - RNA, 19 nt, Artificial Sequence
  Description of Artificial Sequence: Synthetic oligonucleotide
aaagggacgggagauggau

SEQ ID NO: 1130676 - RNA, 19 nt, Artificial Sequence
  Description of Artificial Sequence: Synthetic oligonucleotide
uugcaagaucguauauuca

SEQ ID NO: 1130677 - RNA, 19 nt, Artificial Sequence
  Description of Artificial Sequence: Synthetic oligonucleotide
aucaugcagaaagggacgg

SEQ ID NO: 1130678 - RNA, 19 nt, Artificial Sequence
  Description of Artificial Sequence: Synthetic oligonucleotide
ccaucaugcagaaagggac

SEQ ID NO: 1130679 - RNA, 19 nt, Artificial Sequence
  Description of Artificial Sequence: Synthetic oligonucleotide
agcuagaccaucaugcaga

SEQ ID NO: 1130680 - RNA, 19 nt, Artificial Sequence
  Description of Artificial Sequence: Synthetic oligonucleotide
ugugugacguuucgagagu

SEQ ID NO: 1130681 - RNA, 19 nt, Artificial Sequence
  Description of Artificial Sequence: Synthetic oligonucleotide
guugauuaaugaacgguca

SEQ ID NO: 1130682 - RNA, 19 nt, Artificial Sequence
  Description of Artificial Sequence: Synthetic oligonucleotide
ggguuaaugcugaacaugc

SEQ ID NO: 1130683 - RNA, 19 nt, Artificial Sequence
  Description of Artificial Sequence: Synthetic oligonucleotide
ugacacuccaguccugaaa

SEQ ID NO: 1130684 - RNA, 19 nt, Artificial Sequence
  Description of Artificial Sequence: Synthetic oligonucleotide
uuuuccaauggcucccuua

SEQ ID NO: 1130685 - RNA, 19 nt, Artificial Sequence
  Description of Artificial Sequence: Synthetic oligonucleotide
acccaacauugcaagaucg

SEQ ID NO: 1130686 - RNA, 19 nt, Artificial Sequence
  Description of Artificial Sequence: Synthetic oligonucleotide
ucaggauugcucugacgca

SEQ ID NO: 1130687 - RNA, 19 nt, Artificial Sequence
  Description of Artificial Sequence: Synthetic oligonucleotide
cccuuauaacaccagaaag

SEQ ID NO: 1130688 - RNA, 19 nt, Artificial Sequence
  Description of Artificial Sequence: Synthetic oligonucleotide
ugguggugucauuggagag

SEQ ID NO: 1130689 - RNA, 19 nt, Artificial Sequence
  Description of Artificial Sequence: Synthetic oligonucleotide
guaacuggugugcaugaga

SEQ ID NO: 1130690 - RNA, 19 nt, Artificial Sequence
  Description of Artificial Sequence: Synthetic oligonucleotide
ucgugugcuucccugccug

SEQ ID NO: 1130691 - RNA, 19 nt, Artificial Sequence
  Description of Artificial Sequence: Synthetic oligonucleotide
auuaaugaacggucaucau

SEQ ID NO: 1130692 - RNA, 19 nt, Artificial Sequence
  Description of Artificial Sequence: Synthetic oligonucleotide
accuucucaggacaaaauu

SEQ ID NO: 1130693 - RNA, 19 nt, Artificial Sequence
  Description of Artificial Sequence: Synthetic oligonucleotide
uaaagcgugguagacuuuu

SEQ ID NO: 1130694 - RNA, 19 nt, Artificial Sequence
  Description of Artificial Sequence: Synthetic oligonucleotide
gucuuuggcuggaauaacc

SEQ ID NO: 1130695 - RNA, 19 nt, Artificial Sequence
  Description of Artificial Sequence: Synthetic oligonucleotide
gguugauuaaugaacgguc

SEQ ID NO: 1130696 - RNA, 19 nt, Artificial Sequence
  Description of Artificial Sequence: Synthetic oligonucleotide
agcacgugcaucacaggac

SEQ ID NO: 1130697 - RNA, 19 nt, Artificial Sequence
  Description of Artificial Sequence: Synthetic oligonucleotide
ugguucuuggucucucaga

SEQ ID NO: 1130698 - RNA, 19 nt, Artificial Sequence
  Description of Artificial Sequence: Synthetic oligonucleotide
ugugacguuucgagaguac

SEQ ID NO: 1130699 - RNA, 19 nt, Artificial Sequence
  Description of Artificial Sequence: Synthetic oligonucleotide
uaaacccuagauguuuuau

SEQ ID NO: 1130700 - RNA, 19 nt, Artificial Sequence
  Description of Artificial Sequence: Synthetic oligonucleotide
augagaacuuacaaauaga

SEQ ID NO: 1130701 - RNA, 19 nt, Artificial Sequence
  Description of Artificial Sequence: Synthetic oligonucleotide
cugagaguccaaucugaug

SEQ ID NO: 1130702 - RNA, 19 nt, Artificial Sequence
  Description of Artificial Sequence: Synthetic oligonucleotide
ggcgcuaacacugaucaug

SEQ ID NO: 1130703 - RNA, 19 nt, Artificial Sequence
  Description of Artificial Sequence: Synthetic oligonucleotide
gcagaaaaguauuccaguc

SEQ ID NO: 1130704 - RNA, 19 nt, Artificial Sequence
  Description of Artificial Sequence: Synthetic oligonucleotide
gaaauagcccagggugagg

SEQ ID NO: 1130705 - RNA, 19 nt, Artificial Sequence
  Description of Artificial Sequence: Synthetic oligonucleotide
gcaaugaucaugguucuug

SEQ ID NO: 1130706 - RNA, 19 nt, Artificial Sequence
  Description of Artificial Sequence: Synthetic oligonucleotide
uggaacaauaacggugagu

SEQ ID NO: 1130707 - RNA, 19 nt, Artificial Sequence
  Description of Artificial Sequence: Synthetic oligonucleotide
agaccaucaugcagaaagg

SEQ ID NO: 1130708 - RNA, 19 nt, Artificial Sequence
  Description of Artificial Sequence: Synthetic oligonucleotide
aaagcgugguagacuuuuc

SEQ ID NO: 1130709 - RNA, 19 nt, Artificial Sequence
  Description of Artificial Sequence: Synthetic oligonucleotide
gucaagguaauggccacug

SEQ ID NO: 1130710 - RNA, 19 nt, Artificial Sequence
  Description of Artificial Sequence: Synthetic oligonucleotide
uagcguugcuguauguguc

SEQ ID NO: 1130711 - RNA, 19 nt, Artificial Sequence
  Description of Artificial Sequence: Synthetic oligonucleotide
ugacgcaauuugcuggguc

SEQ ID NO: 1130712 - RNA, 19 nt, Artificial Sequence
  Description of Artificial Sequence: Synthetic oligonucleotide
guucagcaggcaaugauca

SEQ ID NO: 1130713 - RNA, 19 nt, Artificial Sequence
  Description of Artificial Sequence: Synthetic oligonucleotide
cuggcaguugugaagaucu

SEQ ID NO: 1130714 - RNA, 19 nt, Artificial Sequence
  Description of Artificial Sequence: Synthetic oligonucleotide
aaucaguuacaggcacuug

SEQ ID NO: 1130715 - RNA, 19 nt, Artificial Sequence
  Description of Artificial Sequence: Synthetic oligonucleotide
caugaaaaccaccaagggu

SEQ ID NO: 1130716 - RNA, 19 nt, Artificial Sequence
  Description of Artificial Sequence: Synthetic oligonucleotide
auuuaccagcaagaagcag

SEQ ID NO: 1130717 - RNA, 19 nt, Artificial Sequence
  Description of Artificial Sequence: Synthetic oligonucleotide
agagaucaauaugaucuga

SEQ ID NO: 1130718 - RNA, 19 nt, Artificial Sequence
  Description of Artificial Sequence: Synthetic oligonucleotide
agggucaagguaauggcca

SEQ ID NO: 1130719 - RNA, 19 nt, Artificial Sequence
  Description of Artificial Sequence: Synthetic oligonucleotide
gugacguuucgagaguacc

SEQ ID NO: 1130720 - RNA, 19 nt, Artificial Sequence
  Description of Artificial Sequence: Synthetic oligonucleotide
ccuuugauaacugcguagc

SEQ ID NO: 1130721 - RNA, 19 nt, Artificial Sequence
  Description of Artificial Sequence: Synthetic oligonucleotide
gaguugugagauuaggcau

SEQ ID NO: 1130722 - RNA, 19 nt, Artificial Sequence
  Description of Artificial Sequence: Synthetic oligonucleotide
gguagacuuuuccaauggc

SEQ ID NO: 1130723 - RNA, 19 nt, Artificial Sequence
  Description of Artificial Sequence: Synthetic oligonucleotide
cuucgugugcuucccugcc

SEQ ID NO: 1130724 - RNA, 19 nt, Artificial Sequence
  Description of Artificial Sequence: Synthetic oligonucleotide
gccugauuccuccagggcc

SEQ ID NO: 1130725 - RNA, 19 nt, Artificial Sequence
  Description of Artificial Sequence: Synthetic oligonucleotide
auggagaguugugagauua

SEQ ID NO: 1130726 - RNA, 19 nt, Artificial Sequence
  Description of Artificial Sequence: Synthetic oligonucleotide
gaucuuguaccagagugua

SEQ ID NO: 1130727 - RNA, 19 nt, Artificial Sequence
  Description of Artificial Sequence: Synthetic oligonucleotide
cugcccaauggucauggug

SEQ ID NO: 1130728 - RNA, 19 nt, Artificial Sequence
  Description of Artificial Sequence: Synthetic oligonucleotide
agauuagcuagaccaucau

SEQ ID NO: 1130729 - RNA, 19 nt, Artificial Sequence
  Description of Artificial Sequence: Synthetic oligonucleotide
aacggugaguuugggauuu

SEQ ID NO: 1130730 - RNA, 19 nt, Artificial Sequence
  Description of Artificial Sequence: Synthetic oligonucleotide
ugccuuugauaacugcgua

SEQ ID NO: 1130731 - RNA, 19 nt, Artificial Sequence
  Description of Artificial Sequence: Synthetic oligonucleotide
uggcucccuuauaacacca

SEQ ID NO: 1130732 - RNA, 19 nt, Artificial Sequence
  Description of Artificial Sequence: Synthetic oligonucleotide
acacaaguccaaaucauua

SEQ ID NO: 1130733 - RNA, 19 nt, Artificial Sequence
  Description of Artificial Sequence: Synthetic oligonucleotide
cauggcgcuaacacugauc

SEQ ID NO: 1130734 - RNA, 19 nt, Artificial Sequence
  Description of Artificial Sequence: Synthetic oligonucleotide
acauugcaagaucguauau

SEQ ID NO: 1130735 - RNA, 19 nt, Artificial Sequence
  Description of Artificial Sequence: Synthetic oligonucleotide
ggaacaauaacggugaguu

SEQ ID NO: 1130736 - RNA, 19 nt, Artificial Sequence
  Description of Artificial Sequence: Synthetic oligonucleotide
gguucuuggucucucagaa

SEQ ID NO: 1130737 - RNA, 19 nt, Artificial Sequence
  Description of Artificial Sequence: Synthetic oligonucleotide
aguccaaucugauguccaa

SEQ ID NO: 1130738 - RNA, 19 nt, Artificial Sequence
  Description of Artificial Sequence: Synthetic oligonucleotide
gccuuugauaacugcguag

SEQ ID NO: 1130739 - RNA, 19 nt, Artificial Sequence
  Description of Artificial Sequence: Synthetic oligonucleotide
ucaaugagggagggaugcc

SEQ ID NO: 1130740 - RNA, 19 nt, Artificial Sequence
  Description of Artificial Sequence: Synthetic oligonucleotide
aggcaaugaucaugguucu

SEQ ID NO: 1130741 - RNA, 19 nt, Artificial Sequence
  Description of Artificial Sequence: Synthetic oligonucleotide
aguaacuggugugcaugag

SEQ ID NO: 1130742 - RNA, 19 nt, Artificial Sequence
  Description of Artificial Sequence: Synthetic oligonucleotide
gagggcacagucaucggca

SEQ ID NO: 1130743 - RNA, 19 nt, Artificial Sequence
  Description of Artificial Sequence: Synthetic oligonucleotide
uuguaccagaguguagcgu

SEQ ID NO: 1130744 - RNA, 19 nt, Artificial Sequence
  Description of Artificial Sequence: Synthetic oligonucleotide
gcacgugcaucacaggacc

SEQ ID NO: 1130745 - RNA, 19 nt, Artificial Sequence
  Description of Artificial Sequence: Synthetic oligonucleotide
cuuugauaacugcguagca

SEQ ID NO: 1130746 - RNA, 19 nt, Artificial Sequence
  Description of Artificial Sequence: Synthetic oligonucleotide
gucaucggcauuccaggca

SEQ ID NO: 1130747 - RNA, 19 nt, Artificial Sequence
  Description of Artificial Sequence: Synthetic oligonucleotide
caucagagauuagcuagac

SEQ ID NO: 1130748 - RNA, 19 nt, Artificial Sequence
  Description of Artificial Sequence: Synthetic oligonucleotide
uugauggggccugauuccu

SEQ ID NO: 1130749 - RNA, 19 nt, Artificial Sequence
  Description of Artificial Sequence: Synthetic oligonucleotide
gggguuaaugcugaacaug

SEQ ID NO: 1130750 - RNA, 19 nt, Artificial Sequence
  Description of Artificial Sequence: Synthetic oligonucleotide
ggugaagggacaaaaggaa

SEQ ID NO: 1130751 - RNA, 19 nt, Artificial Sequence
  Description of Artificial Sequence: Synthetic oligonucleotide
gauucaagucauaccauau

SEQ ID NO: 1130752 - RNA, 19 nt, Artificial Sequence
  Description of Artificial Sequence: Synthetic oligonucleotide
uaccagaguguagcguugc

SEQ ID NO: 1130753 - RNA, 19 nt, Artificial Sequence
  Description of Artificial Sequence: Synthetic oligonucleotide
uacaggcacuugaaauguc

SEQ ID NO: 1130754 - RNA, 19 nt, Artificial Sequence
  Description of Artificial Sequence: Synthetic oligonucleotide
uauuuuguguuggcaucuc

SEQ ID NO: 1130755 - RNA, 19 nt, Artificial Sequence
  Description of Artificial Sequence: Synthetic oligonucleotide
uaacggugaguuugggauu

SEQ ID NO: 1130756 - RNA, 19 nt, Artificial Sequence
  Description of Artificial Sequence: Synthetic oligonucleotide
gaggacuaggccccauguc

SEQ ID NO: 1130757 - RNA, 19 nt, Artificial Sequence
  Description of Artificial Sequence: Synthetic oligonucleotide
caauaacggugaguuuggg

SEQ ID NO: 1130758 - RNA, 19 nt, Artificial Sequence
  Description of Artificial Sequence: Synthetic oligonucleotide
ggggacuuaaucuccuuga

SEQ ID NO: 1130759 - RNA, 19 nt, Artificial Sequence
  Description of Artificial Sequence: Synthetic oligonucleotide
acacacaaguccaaaucau

SEQ ID NO: 1130760 - RNA, 19 nt, Artificial Sequence
  Description of Artificial Sequence: Synthetic oligonucleotide
aucacaggaccaauuucca

SEQ ID NO: 1130761 - RNA, 19 nt, Artificial Sequence
  Description of Artificial Sequence: Synthetic oligonucleotide
uugcuguaugugucaggga

SEQ ID NO: 1130762 - RNA, 19 nt, Artificial Sequence
  Description of Artificial Sequence: Synthetic oligonucleotide
uaggacaccugaggauaag

SEQ ID NO: 1130763 - RNA, 19 nt, Artificial Sequence
  Description of Artificial Sequence: Synthetic oligonucleotide
ggacuaggccccauguccg

SEQ ID NO: 1130764 - RNA, 19 nt, Artificial Sequence
  Description of Artificial Sequence: Synthetic oligonucleotide
uuaaagcgugguagacuuu

SEQ ID NO: 1130765 - RNA, 19 nt, Artificial Sequence
  Description of Artificial Sequence: Synthetic oligonucleotide
acgggagauggaucugcug

SEQ ID NO: 1130766 - RNA, 19 nt, Artificial Sequence
  Description of Artificial Sequence: Synthetic oligonucleotide
gacguuucgagaguacccu

SEQ ID NO: 1130767 - RNA, 19 nt, Artificial Sequence
  Description of Artificial Sequence: Synthetic oligonucleotide
guagucuugagcauauuuu

SEQ ID NO: 1130768 - RNA, 19 nt, Artificial Sequence
  Description of Artificial Sequence: Synthetic oligonucleotide
ucaugguucuuggucucuc

SEQ ID NO: 1130769 - RNA, 19 nt, Artificial Sequence
  Description of Artificial Sequence: Synthetic oligonucleotide
gaacggucaucaucuggaa

SEQ ID NO: 1130770 - RNA, 19 nt, Artificial Sequence
  Description of Artificial Sequence: Synthetic oligonucleotide
agcgcagcagaaaaguauu

SEQ ID NO: 1130771 - RNA, 19 nt, Artificial Sequence
  Description of Artificial Sequence: Synthetic oligonucleotide
cugaggacuaggccccaug

SEQ ID NO: 1130772 - RNA, 19 nt, Artificial Sequence
  Description of Artificial Sequence: Synthetic oligonucleotide
uccaaggaugguggaguac

SEQ ID NO: 1130773 - RNA, 19 nt, Artificial Sequence
  Description of Artificial Sequence: Synthetic oligonucleotide
uccaguggcccagucugac

SEQ ID NO: 1130774 - RNA, 19 nt, Artificial Sequence
  Description of Artificial Sequence: Synthetic oligonucleotide
cauuaaagcgcagcagaaa

SEQ ID NO: 1130775 - RNA, 19 nt, Artificial Sequence
  Description of Artificial Sequence: Synthetic oligonucleotide
ggugugugacguuucgaga

SEQ ID NO: 1130776 - RNA, 19 nt, Artificial Sequence
  Description of Artificial Sequence: Synthetic oligonucleotide
uaacaccagaaaggauugu

SEQ ID NO: 1130777 - RNA, 19 nt, Artificial Sequence
  Description of Artificial Sequence: Synthetic oligonucleotide
ugggucugccuuugauaac

SEQ ID NO: 1130778 - RNA, 19 nt, Artificial Sequence
  Description of Artificial Sequence: Synthetic oligonucleotide
cuugagcauauuuuguguu

SEQ ID NO: 1130779 - RNA, 19 nt, Artificial Sequence
  Description of Artificial Sequence: Synthetic oligonucleotide
acgcaauuugcugggucug

SEQ ID NO: 1130780 - RNA, 19 nt, Artificial Sequence
  Description of Artificial Sequence: Synthetic oligonucleotide
agauuaggcaucagccaaa

SEQ ID NO: 1130781 - RNA, 19 nt, Artificial Sequence
  Description of Artificial Sequence: Synthetic oligonucleotide
guaccagaguguagcguug

SEQ ID NO: 1130782 - RNA, 19 nt, Artificial Sequence
  Description of Artificial Sequence: Synthetic oligonucleotide
gcaagaucguauauucaca

SEQ ID NO: 1130783 - RNA, 19 nt, Artificial Sequence
  Description of Artificial Sequence: Synthetic oligonucleotide
agaguguagcguugcugua

SEQ ID NO: 1130784 - RNA, 19 nt, Artificial Sequence
  Description of Artificial Sequence: Synthetic oligonucleotide
cugccuuugauaacugcgu

SEQ ID NO: 1130785 - RNA, 19 nt, Artificial Sequence
  Description of Artificial Sequence: Synthetic oligonucleotide
ccaauggcucccuuauaac

SEQ ID NO: 1130786 - RNA, 19 nt, Artificial Sequence
  Description of Artificial Sequence: Synthetic oligonucleotide
ccugaggauaagccagugc

SEQ ID NO: 1130787 - RNA, 19 nt, Artificial Sequence
  Description of Artificial Sequence: Synthetic oligonucleotide
aaagugccugcaggagggu

SEQ ID NO: 1130788 - RNA, 19 nt, Artificial Sequence
  Description of Artificial Sequence: Synthetic oligonucleotide
cugccugagaguccaaucu

SEQ ID NO: 1130789 - RNA, 19 nt, Artificial Sequence
  Description of Artificial Sequence: Synthetic oligonucleotide
agauauugauggggccuga

SEQ ID NO: 1130790 - RNA, 19 nt, Artificial Sequence
  Description of Artificial Sequence: Synthetic oligonucleotide
cugcguagcaaaacauugu

SEQ ID NO: 1130791 - RNA, 19 nt, Artificial Sequence
  Description of Artificial Sequence: Synthetic oligonucleotide
ccaaaucauuaaagcgcag

SEQ ID NO: 1130792 - RNA, 19 nt, Artificial Sequence
  Description of Artificial Sequence: Synthetic oligonucleotide
ggguccagggucaagguaa

SEQ ID NO: 1130793 - RNA, 19 nt, Artificial Sequence
  Description of Artificial Sequence: Synthetic oligonucleotide
gggucaagguaauggccac

SEQ ID NO: 1130794 - RNA, 19 nt, Artificial Sequence
  Description of Artificial Sequence: Synthetic oligonucleotide
acuaggccccauguccgug

SEQ ID NO: 1130795 - RNA, 19 nt, Artificial Sequence
  Description of Artificial Sequence: Synthetic oligonucleotide
agggaugccaucagagauu

SEQ ID NO: 1130796 - RNA, 19 nt, Artificial Sequence
  Description of Artificial Sequence: Synthetic oligonucleotide
caucggcauuccaggcagc

SEQ ID NO: 1130797 - RNA, 19 nt, Artificial Sequence
  Description of Artificial Sequence: Synthetic oligonucleotide
caggauugcucugacgcaa

SEQ ID NO: 1130798 - RNA, 19 nt, Artificial Sequence
  Description of Artificial Sequence: Synthetic oligonucleotide
ugcucacaauggccaugga

SEQ ID NO: 1130799 - RNA, 19 nt, Artificial Sequence
  Description of Artificial Sequence: Synthetic oligonucleotide
gaaaugucuuuggcuggaa

SEQ ID NO: 1130800 - RNA, 19 nt, Artificial Sequence
  Description of Artificial Sequence: Synthetic oligonucleotide
cgcagcagaaaaguauucc

SEQ ID NO: 1130801 - RNA, 19 nt, Artificial Sequence
  Description of Artificial Sequence: Synthetic oligonucleotide
acgugcaucacaggaccaa

SEQ ID NO: 1130802 - RNA, 19 nt, Artificial Sequence
  Description of Artificial Sequence: Synthetic oligonucleotide
gucuaggacaccugaggau

SEQ ID NO: 1130803 - RNA, 19 nt, Artificial Sequence
  Description of Artificial Sequence: Synthetic oligonucleotide
caguuacaggcacuugaaa

SEQ ID NO: 1130804 - RNA, 19 nt, Artificial Sequence
  Description of Artificial Sequence: Synthetic oligonucleotide
gguaauggccacugagaua

SEQ ID NO: 1130805 - RNA, 19 nt, Artificial Sequence
  Description of Artificial Sequence: Synthetic oligonucleotide
auggaucugcuguccucaa

SEQ ID NO: 1130806 - RNA, 19 nt, Artificial Sequence
  Description of Artificial Sequence: Synthetic oligonucleotide
ggccugauuccuccagggc

SEQ ID NO: 1130807 - RNA, 19 nt, Artificial Sequence
  Description of Artificial Sequence: Synthetic oligonucleotide
cugauucaagucauaccau

SEQ ID NO: 1130808 - RNA, 19 nt, Artificial Sequence
  Description of Artificial Sequence: Synthetic oligonucleotide
ccagucugacacuccaguc

SEQ ID NO: 1130809 - RNA, 19 nt, Artificial Sequence
  Description of Artificial Sequence: Synthetic oligonucleotide
ccaucagagauuagcuaga

SEQ ID NO: 1130810 - RNA, 19 nt, Artificial Sequence
  Description of Artificial Sequence: Synthetic oligonucleotide
cagagauuagcuagaccau

SEQ ID NO: 1130811 - RNA, 19 nt, Artificial Sequence
  Description of Artificial Sequence: Synthetic oligonucleotide
cauugcaagaucguauauu

SEQ ID NO: 1130812 - RNA, 19 nt, Artificial Sequence
  Description of Artificial Sequence: Synthetic oligonucleotide
ccugccugagaguccaauc

SEQ ID NO: 1130813 - RNA, 19 nt, Artificial Sequence
  Description of Artificial Sequence: Synthetic oligonucleotide
guggcccagucugacacuc

SEQ ID NO: 1130814 - RNA, 19 nt, Artificial Sequence
  Description of Artificial Sequence: Synthetic oligonucleotide
gaguguagcguugcuguau

SEQ ID NO: 1130815 - RNA, 19 nt, Artificial Sequence
  Description of Artificial Sequence: Synthetic oligonucleotide
gcuguaugugucagggaca

SEQ ID NO: 1130816 - RNA, 19 nt, Artificial Sequence
  Description of Artificial Sequence: Synthetic oligonucleotide
gcuagaccaucaugcagaa

SEQ ID NO: 1130817 - RNA, 19 nt, Artificial Sequence
  Description of Artificial Sequence: Synthetic oligonucleotide
caguucagcaggcaaugau

SEQ ID NO: 1130818 - RNA, 19 nt, Artificial Sequence
  Description of Artificial Sequence: Synthetic oligonucleotide
ggcccagucugacacucca

SEQ ID NO: 1130819 - RNA, 19 nt, Artificial Sequence
  Description of Artificial Sequence: Synthetic oligonucleotide
aguacccuccaaagggcuu

SEQ ID NO: 1130820 - RNA, 19 nt, Artificial Sequence
  Description of Artificial Sequence: Synthetic oligonucleotide
gggucugccuuugauaacu

SEQ ID NO: 1130821 - RNA, 19 nt, Artificial Sequence
  Description of Artificial Sequence: Synthetic oligonucleotide
uggcgcuaacacugaucau

SEQ ID NO: 1130822 - RNA, 19 nt, Artificial Sequence
  Description of Artificial Sequence: Synthetic oligonucleotide
cacagucaucggcauucca

SEQ ID NO: 1130823 - RNA, 19 nt, Artificial Sequence
  Description of Artificial Sequence: Synthetic oligonucleotide
cccaaagugccugcaggag

SEQ ID NO: 1130824 - RNA, 19 nt, Artificial Sequence
  Description of Artificial Sequence: Synthetic oligonucleotide
aggauugcucugacgcaau

SEQ ID NO: 1130825 - RNA, 19 nt, Artificial Sequence
  Description of Artificial Sequence: Synthetic oligonucleotide
gacuaggccccauguccgu

SEQ ID NO: 1130826 - RNA, 19 nt, Artificial Sequence
  Description of Artificial Sequence: Synthetic oligonucleotide
gugugacguuucgagagua

SEQ ID NO: 1130827 - RNA, 19 nt, Artificial Sequence
  Description of Artificial Sequence: Synthetic oligonucleotide
uuguagucuugagcauauu

SEQ ID NO: 1130828 - RNA, 19 nt, Artificial Sequence
  Description of Artificial Sequence: Synthetic oligonucleotide
gcguugcuguaugugucag

SEQ ID NO: 1130829 - RNA, 19 nt, Artificial Sequence
  Description of Artificial Sequence: Synthetic oligonucleotide
cugacacuccaguccugaa

SEQ ID NO: 1130830 - RNA, 19 nt, Artificial Sequence
  Description of Artificial Sequence: Synthetic oligonucleotide
ggucugccuuugauaacug

SEQ ID NO: 1130831 - RNA, 19 nt, Artificial Sequence
  Description of Artificial Sequence: Synthetic oligonucleotide
ccaacauugcaagaucgua

SEQ ID NO: 1130832 - RNA, 19 nt, Artificial Sequence
  Description of Artificial Sequence: Synthetic oligonucleotide
ggauuguagucuugagcau

SEQ ID NO: 1130833 - RNA, 19 nt, Artificial Sequence
  Description of Artificial Sequence: Synthetic oligonucleotide
guggcuggguggacgaucu

SEQ ID NO: 1130834 - RNA, 19 nt, Artificial Sequence
  Description of Artificial Sequence: Synthetic oligonucleotide
ggguuccuugcacugccaa

SEQ ID NO: 1130835 - RNA, 19 nt, Artificial Sequence
  Description of Artificial Sequence: Synthetic oligonucleotide
ccuugaucuuaaagaaaua

SEQ ID NO: 1130836 - RNA, 19 nt, Artificial Sequence
  Description of Artificial Sequence: Synthetic oligonucleotide
caccugaggauaagccagu

SEQ ID NO: 1130837 - RNA, 19 nt, Artificial Sequence
  Description of Artificial Sequence: Synthetic oligonucleotide
gcguagcaaaacauuguua

SEQ ID NO: 1130838 - RNA, 19 nt, Artificial Sequence
  Description of Artificial Sequence: Synthetic oligonucleotide
cgcaauuugcugggucugc

SEQ ID NO: 1130839 - RNA, 19 nt, Artificial Sequence
  Description of Artificial Sequence: Synthetic oligonucleotide
gcgcagcagaaaaguauuc

SEQ ID NO: 1130840 - RNA, 19 nt, Artificial Sequence
  Description of Artificial Sequence: Synthetic oligonucleotide
gggacgggagauggaucug

SEQ ID NO: 1130841 - RNA, 19 nt, Artificial Sequence
  Description of Artificial Sequence: Synthetic oligonucleotide
cagggcaaagcacgugcau

SEQ ID NO: 1130842 - RNA, 19 nt, Artificial Sequence
  Description of Artificial Sequence: Synthetic oligonucleotide
gcgauggccauggcgcuaa

SEQ ID NO: 1130843 - RNA, 19 nt, Artificial Sequence
  Description of Artificial Sequence: Synthetic oligonucleotide
gcccaauggucauggugcu

SEQ ID NO: 1130844 - RNA, 19 nt, Artificial Sequence
  Description of Artificial Sequence: Synthetic oligonucleotide
ggauugcucugacgcaauu

SEQ ID NO: 1130845 - RNA, 19 nt, Artificial Sequence
  Description of Artificial Sequence: Synthetic oligonucleotide
ggccugcccaauggucaug

SEQ ID NO: 1130846 - RNA, 19 nt, Artificial Sequence
  Description of Artificial Sequence: Synthetic oligonucleotide
ggguggccggcugcugaug

SEQ ID NO: 1130847 - RNA, 19 nt, Artificial Sequence
  Description of Artificial Sequence: Synthetic oligonucleotide
cugacgcaauuugcugggu

SEQ ID NO: 1130848 - RNA, 19 nt, Artificial Sequence
  Description of Artificial Sequence: Synthetic oligonucleotide
cgugugcuucccugccuga

SEQ ID NO: 1130849 - RNA, 19 nt, Artificial Sequence
  Description of Artificial Sequence: Synthetic oligonucleotide
ggcaaugaucaugguucuu

SEQ ID NO: 1130850 - RNA, 19 nt, Artificial Sequence
  Description of Artificial Sequence: Synthetic oligonucleotide
cgcuaacacugaucaugaa

SEQ ID NO: 1130851 - RNA, 19 nt, Artificial Sequence
  Description of Artificial Sequence: Synthetic oligonucleotide
cggugaguuugggauuuaa

SEQ ID NO: 1130852 - RNA, 19 nt, Artificial Sequence
  Description of Artificial Sequence: Synthetic oligonucleotide
ccauggcgcuaacacugau

SEQ ID NO: 1130853 - RNA, 19 nt, Artificial Sequence
  Description of Artificial Sequence: Synthetic oligonucleotide
cgugcaucacaggaccaau

SEQ ID NO: 1130854 - RNA, 19 nt, Artificial Sequence
  Description of Artificial Sequence: Synthetic oligonucleotide
cccugccugagaguccaau

SEQ ID NO: 1130855 - RNA, 19 nt, Artificial Sequence
  Description of Artificial Sequence: Synthetic oligonucleotide
auggcuacuaguuacaagc

SEQ ID NO: 1130856 - RNA, 19 nt, Artificial Sequence
  Description of Artificial Sequence: Synthetic oligonucleotide
aaauugugcagcuuggcuc

SEQ ID NO: 1130857 - RNA, 19 nt, Artificial Sequence
  Description of Artificial Sequence: Synthetic oligonucleotide
agauaaaccaagcaccacc

SEQ ID NO: 1130858 - RNA, 19 nt, Artificial Sequence
  Description of Artificial Sequence: Synthetic oligonucleotide
ugcacauagacacucaggc

SEQ ID NO: 1130859 - RNA, 19 nt, Artificial Sequence
  Description of Artificial Sequence: Synthetic oligonucleotide
aaagcauugugcccgugac

SEQ ID NO: 1130860 - RNA, 19 nt, Artificial Sequence
  Description of Artificial Sequence: Synthetic oligonucleotide
uaacacacuccauucaacg

SEQ ID NO: 1130861 - RNA, 19 nt, Artificial Sequence
  Description of Artificial Sequence: Synthetic oligonucleotide
aaaacacucugguuugggg

SEQ ID NO: 1130862 - RNA, 19 nt, Artificial Sequence
  Description of Artificial Sequence: Synthetic oligonucleotide
ucagcgaaagcaaaagacc

SEQ ID NO: 1130863 - RNA, 19 nt, Artificial Sequence
  Description of Artificial Sequence: Synthetic oligonucleotide
ucuagaacauggcaggcag

SEQ ID NO: 1130864 - RNA, 19 nt, Artificial Sequence
  Description of Artificial Sequence: Synthetic oligonucleotide
uuauucaugaaaacacucu

SEQ ID NO: 1130865 - RNA, 19 nt, Artificial Sequence
  Description of Artificial Sequence: Synthetic oligonucleotide
aauggugccaaaguaucgg

SEQ ID NO: 1130866 - RNA, 19 nt, Artificial Sequence
  Description of Artificial Sequence: Synthetic oligonucleotide
uauauuaaauugugcagcu

SEQ ID NO: 1130867 - RNA, 19 nt, Artificial Sequence
  Description of Artificial Sequence: Synthetic oligonucleotide
uucaugaaaacacucuggu

SEQ ID NO: 1130868 - RNA, 19 nt, Artificial Sequence
  Description of Artificial Sequence: Synthetic oligonucleotide
uguucuuggcuucacacca

SEQ ID NO: 1130869 - RNA, 19 nt, Artificial Sequence
  Description of Artificial Sequence: Synthetic oligonucleotide
acuaguuacaagcucuaag

SEQ ID NO: 1130870 - RNA, 19 nt, Artificial Sequence
  Description of Artificial Sequence: Synthetic oligonucleotide
gugaaggacgccuuuaggg

SEQ ID NO: 1130871 - RNA, 19 nt, Artificial Sequence
  Description of Artificial Sequence: Synthetic oligonucleotide
cuagagaaagccaagguca

SEQ ID NO: 1130872 - RNA, 19 nt, Artificial Sequence
  Description of Artificial Sequence: Synthetic oligonucleotide
aguuguguggacccuggcc

SEQ ID NO: 1130873 - RNA, 19 nt, Artificial Sequence
  Description of Artificial Sequence: Synthetic oligonucleotide
ugcauauauuaaauugugc

SEQ ID NO: 1130874 - RNA, 19 nt, Artificial Sequence
  Description of Artificial Sequence: Synthetic oligonucleotide
uauuugagggucuuucuca

SEQ ID NO: 1130875 - RNA, 19 nt, Artificial Sequence
  Description of Artificial Sequence: Synthetic oligonucleotide
uaaauugugcagcuuggcu

SEQ ID NO: 1130876 - RNA, 19 nt, Artificial Sequence
  Description of Artificial Sequence: Synthetic oligonucleotide
ucgucgaacagccaugggc

SEQ ID NO: 1130877 - RNA, 19 nt, Artificial Sequence
  Description of Artificial Sequence: Synthetic oligonucleotide
caggugauggagauaaacc

SEQ ID NO: 1130878 - RNA, 19 nt, Artificial Sequence
  Description of Artificial Sequence: Synthetic oligonucleotide
aggugauggagauaaacca

SEQ ID NO: 1130879 - RNA, 19 nt, Artificial Sequence
  Description of Artificial Sequence: Synthetic oligonucleotide
ugugaaggacgccuuuagg

SEQ ID NO: 1130880 - RNA, 19 nt, Artificial Sequence
  Description of Artificial Sequence: Synthetic oligonucleotide
aggauguucuuucuucuuc

SEQ ID NO: 1130881 - RNA, 19 nt, Artificial Sequence
  Description of Artificial Sequence: Synthetic oligonucleotide
ugaaggacgccuuuaggga

SEQ ID NO: 1130882 - RNA, 19 nt, Artificial Sequence
  Description of Artificial Sequence: Synthetic oligonucleotide
gacgcuauagcugaagcac

SEQ ID NO: 1130883 - RNA, 19 nt, Artificial Sequence
  Description of Artificial Sequence: Synthetic oligonucleotide
gaaugggagcuagagaaag

SEQ ID NO: 1130884 - RNA, 19 nt, Artificial Sequence
  Description of Artificial Sequence: Synthetic oligonucleotide
agcccuaguguuaaagugc

SEQ ID NO: 1130885 - RNA, 19 nt, Artificial Sequence
  Description of Artificial Sequence: Synthetic oligonucleotide
cuuguccggaaacagggcc

SEQ ID NO: 1130886 - RNA, 19 nt, Artificial Sequence
  Description of Artificial Sequence: Synthetic oligonucleotide
aacauggcaggcagagugc

SEQ ID NO: 1130887 - RNA, 19 nt, Artificial Sequence
  Description of Artificial Sequence: Synthetic oligonucleotide
ucggggaucccacacccgg

SEQ ID NO: 1130888 - RNA, 19 nt, Artificial Sequence
  Description of Artificial Sequence: Synthetic oligonucleotide
uuggggacgcuauagcuga

SEQ ID NO: 1130889 - RNA, 19 nt, Artificial Sequence
  Description of Artificial Sequence: Synthetic oligonucleotide
acccaaagcauugugcccg

SEQ ID NO: 1130890 - RNA, 19 nt, Artificial Sequence
  Description of Artificial Sequence: Synthetic oligonucleotide
uguggggugugaaggacgc

SEQ ID NO: 1130891 - RNA, 19 nt, Artificial Sequence
  Description of Artificial Sequence: Synthetic oligonucleotide
gugccaaaggggaugaggg

SEQ ID NO: 1130892 - RNA, 19 nt, Artificial Sequence
  Description of Artificial Sequence: Synthetic oligonucleotide
ucccacauggacugcgccg

SEQ ID NO: 1130893 - RNA, 19 nt, Artificial Sequence
  Description of Artificial Sequence: Synthetic oligonucleotide
cauugaagguauuuauuca

SEQ ID NO: 1130894 - RNA, 19 nt, Artificial Sequence
  Description of Artificial Sequence: Synthetic oligonucleotide
acuccuaacacacuccauu

SEQ ID NO: 1130895 - RNA, 19 nt, Artificial Sequence
  Description of Artificial Sequence: Synthetic oligonucleotide
aggacccaaagcauugugc

SEQ ID NO: 1130896 - RNA, 19 nt, Artificial Sequence
  Description of Artificial Sequence: Synthetic oligonucleotide
agaucucugaggaaggaug

SEQ ID NO: 1130897 - RNA, 19 nt, Artificial Sequence
  Description of Artificial Sequence: Synthetic oligonucleotide
aaccgggcagcauuccaag

SEQ ID NO: 1130898 - RNA, 19 nt, Artificial Sequence
  Description of Artificial Sequence: Synthetic oligonucleotide
uccuaacacacuccauuca

SEQ ID NO: 1130899 - RNA, 19 nt, Artificial Sequence
  Description of Artificial Sequence: Synthetic oligonucleotide
gagcuagagaaagccaagg

SEQ ID NO: 1130900 - RNA, 19 nt, Artificial Sequence
  Description of Artificial Sequence: Synthetic oligonucleotide
cuauuugagggucuuucuc

SEQ ID NO: 1130901 - RNA, 19 nt, Artificial Sequence
  Description of Artificial Sequence: Synthetic oligonucleotide
cugcacauagacacucagg

SEQ ID NO: 1130902 - RNA, 19 nt, Artificial Sequence
  Description of Artificial Sequence: Synthetic oligonucleotide
ggagauggcuacuaguuac

SEQ ID NO: 1130903 - RNA, 19 nt, Artificial Sequence
  Description of Artificial Sequence: Synthetic oligonucleotide
agcuagagaaagccaaggu

SEQ ID NO: 1130904 - RNA, 19 nt, Artificial Sequence
  Description of Artificial Sequence: Synthetic oligonucleotide
ggacccaaagcauugugcc

SEQ ID NO: 1130905 - RNA, 19 nt, Artificial Sequence
  Description of Artificial Sequence: Synthetic oligonucleotide
acacccgggguccuugggc

SEQ ID NO: 1130906 - RNA, 19 nt, Artificial Sequence
  Description of Artificial Sequence: Synthetic oligonucleotide
augcuuuuccuggaugugg

SEQ ID NO: 1130907 - RNA, 19 nt, Artificial Sequence
  Description of Artificial Sequence: Synthetic oligonucleotide
ugcgugauguucuuggcuu

SEQ ID NO: 1130908 - RNA, 19 nt, Artificial Sequence
  Description of Artificial Sequence: Synthetic oligonucleotide
uccaugacaaccgggcagc

SEQ ID NO: 1130909 - RNA, 19 nt, Artificial Sequence
  Description of Artificial Sequence: Synthetic oligonucleotide
gugacugggcuccuugccg

SEQ ID NO: 1130910 - RNA, 19 nt, Artificial Sequence
  Description of Artificial Sequence: Synthetic oligonucleotide
uugggcuggagugaccccg

SEQ ID NO: 1130911 - RNA, 19 nt, Artificial Sequence
  Description of Artificial Sequence: Synthetic oligonucleotide
cagcgaaagcaaaagacca

SEQ ID NO: 1130912 - RNA, 19 nt, Artificial Sequence
  Description of Artificial Sequence: Synthetic oligonucleotide
agagaccuggaacgcgcgc

SEQ ID NO: 1130913 - RNA, 19 nt, Artificial Sequence
  Description of Artificial Sequence: Synthetic oligonucleotide
aucccuggggauccugccc

SEQ ID NO: 1130914 - RNA, 19 nt, Artificial Sequence
  Description of Artificial Sequence: Synthetic oligonucleotide
augacaaccgggcagcauu

SEQ ID NO: 1130915 - RNA, 19 nt, Artificial Sequence
  Description of Artificial Sequence: Synthetic oligonucleotide
ucuuguccggaaacagggc

SEQ ID NO: 1130916 - RNA, 19 nt, Artificial Sequence
  Description of Artificial Sequence: Synthetic oligonucleotide
gagaccuggaacgcgcgcg

SEQ ID NO: 1130917 - RNA, 19 nt, Artificial Sequence
  Description of Artificial Sequence: Synthetic oligonucleotide
auggacugcgccggcaugc

SEQ ID NO: 1130918 - RNA, 19 nt, Artificial Sequence
  Description of Artificial Sequence: Synthetic oligonucleotide
cauccagugccaaagggga

SEQ ID NO: 1130919 - RNA, 19 nt, Artificial Sequence
  Description of Artificial Sequence: Synthetic oligonucleotide
ucaacgggaugcuuuuccu

SEQ ID NO: 1130920 - RNA, 19 nt, Artificial Sequence
  Description of Artificial Sequence: Synthetic oligonucleotide
uuacaagcucuaaggcucu

SEQ ID NO: 1130921 - RNA, 19 nt, Artificial Sequence
  Description of Artificial Sequence: Synthetic oligonucleotide
cuccuaacacacuccauuc

SEQ ID NO: 1130922 - RNA, 19 nt, Artificial Sequence
  Description of Artificial Sequence: Synthetic oligonucleotide
ugaguaagcgggguccugc

SEQ ID NO: 1130923 - RNA, 19 nt, Artificial Sequence
  Description of Artificial Sequence: Synthetic oligonucleotide
gucagcaggggcccuaugc

SEQ ID NO: 1130924 - RNA, 19 nt, Artificial Sequence
  Description of Artificial Sequence: Synthetic oligonucleotide
gacccaaagcauugugccc

SEQ ID NO: 1130925 - RNA, 19 nt, Artificial Sequence
  Description of Artificial Sequence: Synthetic oligonucleotide
uguuaaagugcagccggga

SEQ ID NO: 1130926 - RNA, 19 nt, Artificial Sequence
  Description of Artificial Sequence: Synthetic oligonucleotide
uggcuacuaguuacaagcu

SEQ ID NO: 1130927 - RNA, 19 nt, Artificial Sequence
  Description of Artificial Sequence: Synthetic oligonucleotide
ucaugaaaacacucugguu

SEQ ID NO: 1130928 - RNA, 19 nt, Artificial Sequence
  Description of Artificial Sequence: Synthetic oligonucleotide
gacacucaggcccucguga

SEQ ID NO: 1130929 - RNA, 19 nt, Artificial Sequence
  Description of Artificial Sequence: Synthetic oligonucleotide
cacgcccuguucuggaugg

SEQ ID NO: 1130930 - RNA, 19 nt, Artificial Sequence
  Description of Artificial Sequence: Synthetic oligonucleotide
ugggacccaacauuccaca

SEQ ID NO: 1130931 - RNA, 19 nt, Artificial Sequence
  Description of Artificial Sequence: Synthetic oligonucleotide
caccaggcacucuuguccg

SEQ ID NO: 1130932 - RNA, 19 nt, Artificial Sequence
  Description of Artificial Sequence: Synthetic oligonucleotide
uccagagaccuggaacgcg

SEQ ID NO: 1130933 - RNA, 19 nt, Artificial Sequence
  Description of Artificial Sequence: Synthetic oligonucleotide
ggacccaacauuccacagg

SEQ ID NO: 1130934 - RNA, 19 nt, Artificial Sequence
  Description of Artificial Sequence: Synthetic oligonucleotide
uggagugaccccgcgaggc

SEQ ID NO: 1130935 - RNA, 19 nt, Artificial Sequence
  Description of Artificial Sequence: Synthetic oligonucleotide
gacugcgccggcaugcagg

SEQ ID NO: 1130936 - RNA, 19 nt, Artificial Sequence
  Description of Artificial Sequence: Synthetic oligonucleotide
ccuaguguuaaagugcagc

SEQ ID NO: 1130937 - RNA, 19 nt, Artificial Sequence
  Description of Artificial Sequence: Synthetic oligonucleotide
acaagcucuaaggcucucg

SEQ ID NO: 1130938 - RNA, 19 nt, Artificial Sequence
  Description of Artificial Sequence: Synthetic oligonucleotide
ccauccagugccaaagggg

SEQ ID NO: 1130939 - RNA, 19 nt, Artificial Sequence
  Description of Artificial Sequence: Synthetic oligonucleotide
acugcgggaagguguuggg

SEQ ID NO: 1130940 - RNA, 19 nt, Artificial Sequence
  Description of Artificial Sequence: Synthetic oligonucleotide
guuguguggacccuggccu

SEQ ID NO: 1130941 - RNA, 19 nt, Artificial Sequence
  Description of Artificial Sequence: Synthetic oligonucleotide
gaaggacgccuuuagggaa

SEQ ID NO: 1130942 - RNA, 19 nt, Artificial Sequence
  Description of Artificial Sequence: Synthetic oligonucleotide
agcauuccaaguccaucca

SEQ ID NO: 1130943 - RNA, 19 nt, Artificial Sequence
  Description of Artificial Sequence: Synthetic oligonucleotide
guuaaagugcagccgggaa

SEQ ID NO: 1130944 - RNA, 19 nt, Artificial Sequence
  Description of Artificial Sequence: Synthetic oligonucleotide
ucuaaggcucucgucgaac

SEQ ID NO: 1130945 - RNA, 19 nt, Artificial Sequence
  Description of Artificial Sequence: Synthetic oligonucleotide
gcuggagugaccccgcgag

SEQ ID NO: 1130946 - RNA, 19 nt, Artificial Sequence
  Description of Artificial Sequence: Synthetic oligonucleotide
gaguaagcgggguccugcc

SEQ ID NO: 1130947 - RNA, 19 nt, Artificial Sequence
  Description of Artificial Sequence: Synthetic oligonucleotide
agggaaaccuacaggguug

SEQ ID NO: 1130948 - RNA, 19 nt, Artificial Sequence
  Description of Artificial Sequence: Synthetic oligonucleotide
gcaggagucacagugcacc

SEQ ID NO: 1130949 - RNA, 19 nt, Artificial Sequence
  Description of Artificial Sequence: Synthetic oligonucleotide
uacaggguuggagauuccu

SEQ ID NO: 1130950 - RNA, 19 nt, Artificial Sequence
  Description of Artificial Sequence: Synthetic oligonucleotide
gaucccacacccggggucc

SEQ ID NO: 1130951 - RNA, 19 nt, Artificial Sequence
  Description of Artificial Sequence: Synthetic oligonucleotide
cauuccacaggggacaaga

SEQ ID NO: 1130952 - RNA, 19 nt, Artificial Sequence
  Description of Artificial Sequence: Synthetic oligonucleotide
ugacaaccgggcagcauuc

SEQ ID NO: 1130953 - RNA, 19 nt, Artificial Sequence
  Description of Artificial Sequence: Synthetic oligonucleotide
ccuuuagggaaaccuacag

SEQ ID NO: 1130954 - RNA, 19 nt, Artificial Sequence
  Description of Artificial Sequence: Synthetic oligonucleotide
agagugccaagaucucuga

SEQ ID NO: 1130955 - RNA, 19 nt, Artificial Sequence
  Description of Artificial Sequence: Synthetic oligonucleotide
gagauaaaccaagcaccac

SEQ ID NO: 1130956 - RNA, 19 nt, Artificial Sequence
  Description of Artificial Sequence: Synthetic oligonucleotide
gauggguggaggggcagcc

SEQ ID NO: 1130957 - RNA, 19 nt, Artificial Sequence
  Description of Artificial Sequence: Synthetic oligonucleotide
cucguggccaggacacucc

SEQ ID NO: 1130958 - RNA, 19 nt, Artificial Sequence
  Description of Artificial Sequence: Synthetic oligonucleotide
cucucgucgaacagccaug

SEQ ID NO: 1130959 - RNA, 19 nt, Artificial Sequence
  Description of Artificial Sequence: Synthetic oligonucleotide
guguuaaagugcagccggg

SEQ ID NO: 1130960 - RNA, 19 nt, Artificial Sequence
  Description of Artificial Sequence: Synthetic oligonucleotide
aaucugcgugauguucuug

SEQ ID NO: 1130961 - RNA, 19 nt, Artificial Sequence
  Description of Artificial Sequence: Synthetic oligonucleotide
accuggaacgcgcgcggcg

SEQ ID NO: 1130962 - RNA, 19 nt, Artificial Sequence
  Description of Artificial Sequence: Synthetic oligonucleotide
ucuucacccugcacauaga

SEQ ID NO: 1130963 - RNA, 19 nt, Artificial Sequence
  Description of Artificial Sequence: Synthetic oligonucleotide
ccaacauuccacaggggac

SEQ ID NO: 1130964 - RNA, 19 nt, Artificial Sequence
  Description of Artificial Sequence: Synthetic oligonucleotide
acaaccgggcagcauucca

SEQ ID NO: 1130965 - RNA, 19 nt, Artificial Sequence
  Description of Artificial Sequence: Synthetic oligonucleotide
cacuguccuaggcacgccc

SEQ ID NO: 1130966 - RNA, 19 nt, Artificial Sequence
  Description of Artificial Sequence: Synthetic oligonucleotide
agggacucuguggacugcg

SEQ ID NO: 1130967 - RNA, 19 nt, Artificial Sequence
  Description of Artificial Sequence: Synthetic oligonucleotide
gacccuccggcugccaugg

SEQ ID NO: 1130968 - RNA, 19 nt, Artificial Sequence
  Description of Artificial Sequence: Synthetic oligonucleotide
cagagaccuggaacgcgcg

SEQ ID NO: 1130969 - RNA, 19 nt, Artificial Sequence
  Description of Artificial Sequence: Synthetic oligonucleotide
caacauuccacaggggaca

SEQ ID NO: 1130970 - RNA, 19 nt, Artificial Sequence
  Description of Artificial Sequence: Synthetic oligonucleotide
cuaggcacgcccuguucug

SEQ ID NO: 1130971 - RNA, 19 nt, Artificial Sequence
  Description of Artificial Sequence: Synthetic oligonucleotide
aggaaggauguucuuucuu

SEQ ID NO: 1130972 - RNA, 19 nt, Artificial Sequence
  Description of Artificial Sequence: Synthetic oligonucleotide
gggauccugccccaugagg

SEQ ID NO: 1130973 - RNA, 19 nt, Artificial Sequence
  Description of Artificial Sequence: Synthetic oligonucleotide
agcuuguugauggguggag

SEQ ID NO: 1130974 - RNA, 19 nt, Artificial Sequence
  Description of Artificial Sequence: Synthetic oligonucleotide
gacgccuuuagggaaaccu

SEQ ID NO: 1130975 - RNA, 19 nt, Artificial Sequence
  Description of Artificial Sequence: Synthetic oligonucleotide
uggacugcgggaagguguu

SEQ ID NO: 1130976 - RNA, 19 nt, Artificial Sequence
  Description of Artificial Sequence: Synthetic oligonucleotide
ccuucuugcauauauuaaa

SEQ ID NO: 1130977 - RNA, 19 nt, Artificial Sequence
  Description of Artificial Sequence: Synthetic oligonucleotide
uaggcacgcccuguucugg

SEQ ID NO: 1130978 - RNA, 19 nt, Artificial Sequence
  Description of Artificial Sequence: Synthetic oligonucleotide
ugugcccgugaccuccaga

SEQ ID NO: 1130979 - RNA, 19 nt, Artificial Sequence
  Description of Artificial Sequence: Synthetic oligonucleotide
cuucccuggagggugggac

SEQ ID NO: 1130980 - RNA, 19 nt, Artificial Sequence
  Description of Artificial Sequence: Synthetic oligonucleotide
auucaacgggaugcuuuuc

SEQ ID NO: 1130981 - RNA, 19 nt, Artificial Sequence
  Description of Artificial Sequence: Synthetic oligonucleotide
cacuccaaggucacaaucu

SEQ ID NO: 1130982 - RNA, 19 nt, Artificial Sequence
  Description of Artificial Sequence: Synthetic oligonucleotide
uacuaguuacaagcucuaa

SEQ ID NO: 1130983 - RNA, 19 nt, Artificial Sequence
  Description of Artificial Sequence: Synthetic oligonucleotide
acugcgccggcaugcagga

SEQ ID NO: 1130984 - RNA, 19 nt, Artificial Sequence
  Description of Artificial Sequence: Synthetic oligonucleotide
ggcacucuuguccggaaac

SEQ ID NO: 1130985 - RNA, 19 nt, Artificial Sequence
  Description of Artificial Sequence: Synthetic oligonucleotide
auauuaaauugugcagcuu

SEQ ID NO: 1130986 - RNA, 19 nt, Artificial Sequence
  Description of Artificial Sequence: Synthetic oligonucleotide
acauggacugcgccggcau

SEQ ID NO: 1130987 - RNA, 19 nt, Artificial Sequence
  Description of Artificial Sequence: Synthetic oligonucleotide
auggucccaggugauggag

SEQ ID NO: 1130988 - RNA, 19 nt, Artificial Sequence
  Description of Artificial Sequence: Synthetic oligonucleotide
ucuucgggcucuggggucu

SEQ ID NO: 1130989 - RNA, 19 nt, Artificial Sequence
  Description of Artificial Sequence: Synthetic oligonucleotide
uaagcgggguccugcccca

SEQ ID NO: 1130990 - RNA, 19 nt, Artificial Sequence
  Description of Artificial Sequence: Synthetic oligonucleotide
cuggaccugcccuauuuga

SEQ ID NO: 1130991 - RNA, 19 nt, Artificial Sequence
  Description of Artificial Sequence: Synthetic oligonucleotide
gguuggagauuccugccuc

SEQ ID NO: 1130992 - RNA, 19 nt, Artificial Sequence
  Description of Artificial Sequence: Synthetic oligonucleotide
acuaccugcccagcccuag

SEQ ID NO: 1130993 - RNA, 19 nt, Artificial Sequence
  Description of Artificial Sequence: Synthetic oligonucleotide
cacucuggcaccugaguaa

SEQ ID NO: 1130994 - RNA, 19 nt, Artificial Sequence
  Description of Artificial Sequence: Synthetic oligonucleotide
ggauccugccccaugagga

SEQ ID NO: 1130995 - RNA, 19 nt, Artificial Sequence
  Description of Artificial Sequence: Synthetic oligonucleotide
aaccaagcaccaccucguu

SEQ ID NO: 1130996 - RNA, 19 nt, Artificial Sequence
  Description of Artificial Sequence: Synthetic oligonucleotide
cuggagugaccccgcgagg

SEQ ID NO: 1130997 - RNA, 19 nt, Artificial Sequence
  Description of Artificial Sequence: Synthetic oligonucleotide
uucuucgggcucugggguc

SEQ ID NO: 1130998 - RNA, 19 nt, Artificial Sequence
  Description of Artificial Sequence: Synthetic oligonucleotide
cuugggcuggagugacccc

SEQ ID NO: 1130999 - RNA, 19 nt, Artificial Sequence
  Description of Artificial Sequence: Synthetic oligonucleotide
ugguacccacccucugccc

SEQ ID NO: 1131000 - RNA, 19 nt, Artificial Sequence
  Description of Artificial Sequence: Synthetic oligonucleotide
cuacuaguuacaagcucua

SEQ ID NO: 1131001 - RNA, 19 nt, Artificial Sequence
  Description of Artificial Sequence: Synthetic oligonucleotide
gugacacucuggcaccuga

SEQ ID NO: 1131002 - RNA, 19 nt, Artificial Sequence
  Description of Artificial Sequence: Synthetic oligonucleotide
gcccgugaccuccagagac

SEQ ID NO: 1131003 - RNA, 19 nt, Artificial Sequence
  Description of Artificial Sequence: Synthetic oligonucleotide
gggaaaccuacaggguugg

SEQ ID NO: 1131004 - RNA, 19 nt, Artificial Sequence
  Description of Artificial Sequence: Synthetic oligonucleotide
aggucacaaucucccacau

SEQ ID NO: 1131005 - RNA, 19 nt, Artificial Sequence
  Description of Artificial Sequence: Synthetic oligonucleotide
ccuacaggguuggagauuc

SEQ ID NO: 1131006 - RNA, 19 nt, Artificial Sequence
  Description of Artificial Sequence: Synthetic oligonucleotide
gaagguguuggggacgcua

SEQ ID NO: 1131007 - RNA, 19 nt, Artificial Sequence
  Description of Artificial Sequence: Synthetic oligonucleotide
cuagaacauggcaggcaga

SEQ ID NO: 1131008 - RNA, 19 nt, Artificial Sequence
  Description of Artificial Sequence: Synthetic oligonucleotide
accgccucguggccaggac

SEQ ID NO: 1131009 - RNA, 19 nt, Artificial Sequence
  Description of Artificial Sequence: Synthetic oligonucleotide
ggggacagagggcucuucc

SEQ ID NO: 1131010 - RNA, 19 nt, Artificial Sequence
  Description of Artificial Sequence: Synthetic oligonucleotide
cucggggaucccacacccg

SEQ ID NO: 1131011 - RNA, 19 nt, Artificial Sequence
  Description of Artificial Sequence: Synthetic oligonucleotide
cugcgggaagguguugggg

SEQ ID NO: 1131012 - RNA, 19 nt, Artificial Sequence
  Description of Artificial Sequence: Synthetic oligonucleotide
gggacccaacauuccacag

SEQ ID NO: 1131013 - RNA, 19 nt, Artificial Sequence
  Description of Artificial Sequence: Synthetic oligonucleotide
cauccucagcgaaagcaaa

SEQ ID NO: 1131014 - RNA, 19 nt, Artificial Sequence
  Description of Artificial Sequence: Synthetic oligonucleotide
acgcuauagcugaagcacu

SEQ ID NO: 1131015 - RNA, 19 nt, Artificial Sequence
  Description of Artificial Sequence: Synthetic oligonucleotide
ugcccgugaccuccagaga

SEQ ID NO: 1131016 - RNA, 19 nt, Artificial Sequence
  Description of Artificial Sequence: Synthetic oligonucleotide
ugccaagaucucugaggaa

SEQ ID NO: 1131017 - RNA, 19 nt, Artificial Sequence
  Description of Artificial Sequence: Synthetic oligonucleotide
ugcccagcccuaguguuaa

SEQ ID NO: 1131018 - RNA, 19 nt, Artificial Sequence
  Description of Artificial Sequence: Synthetic oligonucleotide
cauggacugcgccggcaug

SEQ ID NO: 1131019 - RNA, 19 nt, Artificial Sequence
  Description of Artificial Sequence: Synthetic oligonucleotide
caaccgggcagcauuccaa

SEQ ID NO: 1131020 - RNA, 19 nt, Artificial Sequence
  Description of Artificial Sequence: Synthetic oligonucleotide
ggucacaaucucccacaug

SEQ ID NO: 1131021 - RNA, 19 nt, Artificial Sequence
  Description of Artificial Sequence: Synthetic oligonucleotide
cccacauggacugcgccgg

SEQ ID NO: 1131022 - RNA, 19 nt, Artificial Sequence
  Description of Artificial Sequence: Synthetic oligonucleotide
acuguccuaggcacgcccu

SEQ ID NO: 1131023 - RNA, 19 nt, Artificial Sequence
  Description of Artificial Sequence: Synthetic oligonucleotide
uugugcccgugaccuccag

SEQ ID NO: 1131024 - RNA, 19 nt, Artificial Sequence
  Description of Artificial Sequence: Synthetic oligonucleotide
uccucacuaccugcccagc

SEQ ID NO: 1131025 - RNA, 19 nt, Artificial Sequence
  Description of Artificial Sequence: Synthetic oligonucleotide
cacacccgggguccuuggg

SEQ ID NO: 1131026 - RNA, 19 nt, Artificial Sequence
  Description of Artificial Sequence: Synthetic oligonucleotide
cccuauuugagggucuuuc

SEQ ID NO: 1131027 - RNA, 19 nt, Artificial Sequence
  Description of Artificial Sequence: Synthetic oligonucleotide
caagcucuaaggcucucgu

SEQ ID NO: 1131028 - RNA, 19 nt, Artificial Sequence
  Description of Artificial Sequence: Synthetic oligonucleotide
aggcacgcccuguucugga

SEQ ID NO: 1131029 - RNA, 19 nt, Artificial Sequence
  Description of Artificial Sequence: Synthetic oligonucleotide
aggcacucuuguccggaaa

SEQ ID NO: 1131030 - RNA, 19 nt, Artificial Sequence
  Description of Artificial Sequence: Synthetic oligonucleotide
cuccggcugccaugguacc

SEQ ID NO: 1131031 - RNA, 19 nt, Artificial Sequence
  Description of Artificial Sequence: Synthetic oligonucleotide
ggccucacagccgcugugg

SEQ ID NO: 1131032 - RNA, 19 nt, Artificial Sequence
  Description of Artificial Sequence: Synthetic oligonucleotide
cauucaacgggaugcuuuu

SEQ ID NO: 1131033 - RNA, 19 nt, Artificial Sequence
  Description of Artificial Sequence: Synthetic oligonucleotide
acauuccacaggggacaag

SEQ ID NO: 1131034 - RNA, 19 nt, Artificial Sequence
  Description of Artificial Sequence: Synthetic oligonucleotide
uggacugcgccggcaugca

SEQ ID NO: 1131035 - RNA, 19 nt, Artificial Sequence
  Description of Artificial Sequence: Synthetic oligonucleotide
gagugaccccgcgaggcuc

SEQ ID NO: 1131036 - RNA, 19 nt, Artificial Sequence
  Description of Artificial Sequence: Synthetic oligonucleotide
ggaucccacacccgggguc

SEQ ID NO: 1131037 - RNA, 19 nt, Artificial Sequence
  Description of Artificial Sequence: Synthetic oligonucleotide
guggacugcgggaaggugu

SEQ ID NO: 1131038 - RNA, 19 nt, Artificial Sequence
  Description of Artificial Sequence: Synthetic oligonucleotide
acccaacauuccacagggg

SEQ ID NO: 1131039 - RNA, 19 nt, Artificial Sequence
  Description of Artificial Sequence: Synthetic oligonucleotide
acgccuuuagggaaaccua

SEQ ID NO: 1131040 - RNA, 19 nt, Artificial Sequence
  Description of Artificial Sequence: Synthetic oligonucleotide
cuggaacgcgcgcggcggc

SEQ ID NO: 1131041 - RNA, 19 nt, Artificial Sequence
  Description of Artificial Sequence: Synthetic oligonucleotide
gcccuaguguuaaagugca

SEQ ID NO: 1131042 - RNA, 19 nt, Artificial Sequence
  Description of Artificial Sequence: Synthetic oligonucleotide
cugaguaagcgggguccug

SEQ ID NO: 1131043 - RNA, 19 nt, Artificial Sequence
  Description of Artificial Sequence: Synthetic oligonucleotide
gaacgcgcgcggcggcagc

SEQ ID NO: 1131044 - RNA, 19 nt, Artificial Sequence
  Description of Artificial Sequence: Synthetic oligonucleotide
aacgcgcgcggcggcagca

SEQ ID NO: 1131045 - RNA, 19 nt, Artificial Sequence
  Description of Artificial Sequence: Synthetic oligonucleotide
gcccucaguccucagcaac

SEQ ID NO: 1131046 - RNA, 19 nt, Artificial Sequence
  Description of Artificial Sequence: Synthetic oligonucleotide
ugcccuauuugagggucuu

SEQ ID NO: 1131047 - RNA, 19 nt, Artificial Sequence
  Description of Artificial Sequence: Synthetic oligonucleotide
ccucacagccgcuguggcc

SEQ ID NO: 1131048 - RNA, 19 nt, Artificial Sequence
  Description of Artificial Sequence: Synthetic oligonucleotide
ggggacgcuauagcugaag

SEQ ID NO: 1131049 - RNA, 19 nt, Artificial Sequence
  Description of Artificial Sequence: Synthetic oligonucleotide
cccagcccuaguguuaaag

SEQ ID NO: 1131050 - RNA, 19 nt, Artificial Sequence
  Description of Artificial Sequence: Synthetic oligonucleotide
uggggacgcuauagcugaa

SEQ ID NO: 1131051 - RNA, 19 nt, Artificial Sequence
  Description of Artificial Sequence: Synthetic oligonucleotide
ccuggaacgcgcgcggcgg

SEQ ID NO: 1131052 - RNA, 19 nt, Artificial Sequence
  Description of Artificial Sequence: Synthetic oligonucleotide
ccuggaccugcccuauuug

SEQ ID NO: 1131053 - RNA, 19 nt, Artificial Sequence
  Description of Artificial Sequence: Synthetic oligonucleotide
gaccccgcgaggcucggcu

SEQ ID NO: 1131054 - RNA, 19 nt, Artificial Sequence
  Description of Artificial Sequence: Synthetic oligonucleotide
cccuucuugcauauauuaa

SEQ ID NO: 1131055 - RNA, 19 nt, Artificial Sequence
  Description of Artificial Sequence: Synthetic oligonucleotide
ccucagcgaaagcaaaaga

SEQ ID NO: 1131056 - RNA, 19 nt, Artificial Sequence
  Description of Artificial Sequence: Synthetic oligonucleotide
ccccuucuugcauauauua

SEQ ID NO: 1131057 - RNA, 19 nt, Artificial Sequence
  Description of Artificial Sequence: Synthetic oligonucleotide
ccaaagggucuagaacaug

SEQ ID NO: 1131058 - RNA, 19 nt, Artificial Sequence
  Description of Artificial Sequence: Synthetic oligonucleotide
gcucucgucgaacagccau

SEQ ID NO: 1131059 - RNA, 19 nt, Artificial Sequence
  Description of Artificial Sequence: Synthetic oligonucleotide
ggccucggggaucccacac

SEQ ID NO: 1131060 - RNA, 19 nt, Artificial Sequence
  Description of Artificial Sequence: Synthetic oligonucleotide
cgucgaacagccaugggcu

SEQ ID NO: 1131061 - RNA, 19 nt, Artificial Sequence
  Description of Artificial Sequence: Synthetic oligonucleotide
ggguuggagauuccugccu

SEQ ID NO: 1131062 - RNA, 19 nt, Artificial Sequence
  Description of Artificial Sequence: Synthetic oligonucleotide
gcgaggcucggcugggcug

SEQ ID NO: 1131063 - RNA, 19 nt, Artificial Sequence
  Description of Artificial Sequence: Synthetic oligonucleotide
ggggagauggcuacuaguu

SEQ ID NO: 1131064 - RNA, 19 nt, Artificial Sequence
  Description of Artificial Sequence: Synthetic oligonucleotide
ggacugcgccggcaugcag

SEQ ID NO: 1131065 - RNA, 19 nt, Artificial Sequence
  Description of Artificial Sequence: Synthetic oligonucleotide
gggacagagggcucuuccu

SEQ ID NO: 1131066 - RNA, 19 nt, Artificial Sequence
  Description of Artificial Sequence: Synthetic oligonucleotide
gggcuggagugaccccgcg

SEQ ID NO: 1131067 - RNA, 19 nt, Artificial Sequence
  Description of Artificial Sequence: Synthetic oligonucleotide
cacccgggguccuugggcu

SEQ ID NO: 1131068 - RNA, 19 nt, Artificial Sequence
  Description of Artificial Sequence: Synthetic oligonucleotide
uggccuggaccugcccuau

SEQ ID NO: 1131069 - RNA, 19 nt, Artificial Sequence
  Description of Artificial Sequence: Synthetic oligonucleotide
caaguccauccagugccaa

SEQ ID NO: 1131070 - RNA, 19 nt, Artificial Sequence
  Description of Artificial Sequence: Synthetic oligonucleotide
gacuccuaacacacuccau

SEQ ID NO: 1131071 - RNA, 19 nt, Artificial Sequence
  Description of Artificial Sequence: Synthetic oligonucleotide
ggcuggagugaccccgcga

SEQ ID NO: 1131072 - RNA, 19 nt, Artificial Sequence
  Description of Artificial Sequence: Synthetic oligonucleotide
ggaacgcgcgcggcggcag

SEQ ID NO: 1131073 - RNA, 19 nt, Artificial Sequence
  Description of Artificial Sequence: Synthetic oligonucleotide
ccagcccuaguguuaaagu

SEQ ID NO: 1131074 - RNA, 19 nt, Artificial Sequence
  Description of Artificial Sequence: Synthetic oligonucleotide
ccccgcgaggcucggcugg

SEQ ID NO: 1131075 - RNA, 19 nt, Artificial Sequence
  Description of Artificial Sequence: Synthetic oligonucleotide
ccacacccgggguccuugg

SEQ ID NO: 1131076 - RNA, 19 nt, Artificial Sequence
  Description of Artificial Sequence: Synthetic oligonucleotide
ugaccccgcgaggcucggc

SEQ ID NO: 1131077 - RNA, 19 nt, Artificial Sequence
  Description of Artificial Sequence: Synthetic oligonucleotide
ccuaggcacgcccuguucu

SEQ ID NO: 1131078 - RNA, 19 nt, Artificial Sequence
  Description of Artificial Sequence: Synthetic oligonucleotide
gugaccccgcgaggcucgg

SEQ ID NO: 1131079 - RNA, 19 nt, Artificial Sequence
  Description of Artificial Sequence: Synthetic oligonucleotide
ccucguggccaggacacuc

SEQ ID NO: 1131080 - RNA, 19 nt, Artificial Sequence
  Description of Artificial Sequence: Synthetic oligonucleotide
gcuauagcugaagcacugu

SEQ ID NO: 1131081 - RNA, 19 nt, Artificial Sequence
  Description of Artificial Sequence: Synthetic oligonucleotide
cugcccuauuugagggucu

SEQ ID NO: 1131082 - RNA, 19 nt, Artificial Sequence
  Description of Artificial Sequence: Synthetic oligonucleotide
cacccugcacauagacacu

SEQ ID NO: 1131083 - RNA, 19 nt, Artificial Sequence
  Description of Artificial Sequence: Synthetic oligonucleotide
cuucgggcucuggggucug

SEQ ID NO: 1131084 - RNA, 19 nt, Artificial Sequence
  Description of Artificial Sequence: Synthetic oligonucleotide
gcgcggcgcguccuccugg

SEQ ID NO: 1131085 - RNA, 19 nt, Artificial Sequence
  Description of Artificial Sequence: Synthetic oligonucleotide
cccgggguccuugggcugg

SEQ ID NO: 1131086 - RNA, 19 nt, Artificial Sequence
  Description of Artificial Sequence: Synthetic oligonucleotide
ccacauggacugcgccggc

SEQ ID NO: 1131087 - RNA, 19 nt, Artificial Sequence
  Description of Artificial Sequence: Synthetic oligonucleotide
ggacgccuuuagggaaacc

SEQ ID NO: 1131088 - RNA, 19 nt, Artificial Sequence
  Description of Artificial Sequence: Synthetic oligonucleotide
cuaccugcccagcccuagu

SEQ ID NO: 1131089 - RNA, 19 nt, Artificial Sequence
  Description of Artificial Sequence: Synthetic oligonucleotide
gcacuguccuaggcacgcc

SEQ ID NO: 1131090 - RNA, 19 nt, Artificial Sequence
  Description of Artificial Sequence: Synthetic oligonucleotide
cccaaagggucuagaacau

SEQ ID NO: 1131091 - RNA, 19 nt, Artificial Sequence
  Description of Artificial Sequence: Synthetic oligonucleotide
ccucaaccugaggggcucc

SEQ ID NO: 1131092 - RNA, 19 nt, Artificial Sequence
  Description of Artificial Sequence: Synthetic oligonucleotide
acgcccuguucuggaugga

SEQ ID NO: 1131093 - RNA, 19 nt, Artificial Sequence
  Description of Artificial Sequence: Synthetic oligonucleotide
ggacugcgggaagguguug

SEQ ID NO: 1131094 - RNA, 19 nt, Artificial Sequence
  Description of Artificial Sequence: Synthetic oligonucleotide
gagcgcggcgcguccuccu

SEQ ID NO: 1131095 - RNA, 19 nt, Artificial Sequence
  Description of Artificial Sequence: Synthetic oligonucleotide
gccuggaccugcccuauuu

SEQ ID NO: 1131096 - RNA, 19 nt, Artificial Sequence
  Description of Artificial Sequence: Synthetic oligonucleotide
gcccuguucuggauggacu

SEQ ID NO: 1131097 - RNA, 19 nt, Artificial Sequence
  Description of Artificial Sequence: Synthetic oligonucleotide
ccaaagcauugugcccgug

SEQ ID NO: 1131098 - RNA, 19 nt, Artificial Sequence
  Description of Artificial Sequence: Synthetic oligonucleotide
cagugacacucuggcaccu

SEQ ID NO: 1131099 - RNA, 19 nt, Artificial Sequence
  Description of Artificial Sequence: Synthetic oligonucleotide
cccacacccgggguccuug

SEQ ID NO: 1131100 - RNA, 19 nt, Artificial Sequence
  Description of Artificial Sequence: Synthetic oligonucleotide
cugcgccggcaugcaggag

SEQ ID NO: 1131101 - RNA, 19 nt, Artificial Sequence
  Description of Artificial Sequence: Synthetic oligonucleotide
acccuccggcugccauggu

SEQ ID NO: 1131102 - RNA, 19 nt, Artificial Sequence
  Description of Artificial Sequence: Synthetic oligonucleotide
cgugaccuccagagaccug

SEQ ID NO: 1131103 - RNA, 19 nt, Artificial Sequence
  Description of Artificial Sequence: Synthetic oligonucleotide
caccgccucguggccagga

SEQ ID NO: 1131104 - RNA, 19 nt, Artificial Sequence
  Description of Artificial Sequence: Synthetic oligonucleotide
ccgccucguggccaggaca

SEQ ID NO: 1131105 - RNA, 19 nt, Artificial Sequence
  Description of Artificial Sequence: Synthetic oligonucleotide
gcgccggcaugcaggaguc

SEQ ID NO: 1131106 - RNA, 19 nt, Artificial Sequence
  Description of Artificial Sequence: Synthetic oligonucleotide
cugccccaugaggaguugu

SEQ ID NO: 1131107 - RNA, 19 nt, Artificial Sequence
  Description of Artificial Sequence: Synthetic oligonucleotide
cccaucccuggggauccug

SEQ ID NO: 1131108 - RNA, 19 nt, Artificial Sequence
  Description of Artificial Sequence: Synthetic oligonucleotide
ggcucucgucgaacagcca

SEQ ID NO: 1131109 - RNA, 19 nt, Artificial Sequence
  Description of Artificial Sequence: Synthetic oligonucleotide
ccugccccaugaggaguug

SEQ ID NO: 1131110 - RNA, 19 nt, Artificial Sequence
  Description of Artificial Sequence: Synthetic oligonucleotide
ggcacgcccuguucuggau

SEQ ID NO: 1131111 - RNA, 19 nt, Artificial Sequence
  Description of Artificial Sequence: Synthetic oligonucleotide
ccaugacaaccgggcagca

SEQ ID NO: 1131112 - RNA, 19 nt, Artificial Sequence
  Description of Artificial Sequence: Synthetic oligonucleotide
cccaaagcauugugcccgu

SEQ ID NO: 1131113 - RNA, 19 nt, Artificial Sequence
  Description of Artificial Sequence: Synthetic oligonucleotide
ccugaguaagcgggguccu

SEQ ID NO: 1131114 - RNA, 19 nt, Artificial Sequence
  Description of Artificial Sequence: Synthetic oligonucleotide
gccccuggacacaaacaau

SEQ ID NO: 1131115 - RNA, 19 nt, Artificial Sequence
  Description of Artificial Sequence: Synthetic oligonucleotide
ggaagguguuggggacgcu

SEQ ID NO: 1131116 - RNA, 19 nt, Artificial Sequence
  Description of Artificial Sequence: Synthetic oligonucleotide
ccggaaacagggccagcuu

SEQ ID NO: 1131117 - RNA, 19 nt, Artificial Sequence
  Description of Artificial Sequence: Synthetic oligonucleotide
gcccagcccuaguguuaaa

SEQ ID NO: 1131118 - RNA, 19 nt, Artificial Sequence
  Description of Artificial Sequence: Synthetic oligonucleotide
gcccuauuugagggucuuu

SEQ ID NO: 1131119 - RNA, 19 nt, Artificial Sequence
  Description of Artificial Sequence: Synthetic oligonucleotide
cgcgaggcucggcugggcu

SEQ ID NO: 1131120 - RNA, 19 nt, Artificial Sequence
  Description of Artificial Sequence: Synthetic oligonucleotide
gccucguggccaggacacu

SEQ ID NO: 1131121 - RNA, 19 nt, Artificial Sequence
  Description of Artificial Sequence: Synthetic oligonucleotide
ggccuggaccugcccuauu

SEQ ID NO: 1131122 - RNA, 19 nt, Artificial Sequence
  Description of Artificial Sequence: Synthetic oligonucleotide
cgccggcaugcaggaguca

SEQ ID NO: 1131123 - RNA, 19 nt, Artificial Sequence
  Description of Artificial Sequence: Synthetic oligonucleotide
aaugauaauacaccaaaca

SEQ ID NO: 1131124 - RNA, 19 nt, Artificial Sequence
  Description of Artificial Sequence: Synthetic oligonucleotide
gacaagauggcuuugauca

SEQ ID NO: 1131125 - RNA, 19 nt, Artificial Sequence
  Description of Artificial Sequence: Synthetic oligonucleotide
gauaauacaccaaacacug

SEQ ID NO: 1131126 - RNA, 19 nt, Artificial Sequence
  Description of Artificial Sequence: Synthetic oligonucleotide
ugaaaugcuauccaccucc

SEQ ID NO: 1131127 - RNA, 19 nt, Artificial Sequence
  Description of Artificial Sequence: Synthetic oligonucleotide
uuugauuccaaaagguggc

SEQ ID NO: 1131128 - RNA, 19 nt, Artificial Sequence
  Description of Artificial Sequence: Synthetic oligonucleotide
guucauacugcucaggccg

SEQ ID NO: 1131129 - RNA, 19 nt, Artificial Sequence
  Description of Artificial Sequence: Synthetic oligonucleotide
auagucgucaauucgugac

SEQ ID NO: 1131130 - RNA, 19 nt, Artificial Sequence
  Description of Artificial Sequence: Synthetic oligonucleotide
aguccugccauuugaagcc

SEQ ID NO: 1131131 - RNA, 19 nt, Artificial Sequence
  Description of Artificial Sequence: Synthetic oligonucleotide
aaugcuauccaccucccug

SEQ ID NO: 1131132 - RNA, 19 nt, Artificial Sequence
  Description of Artificial Sequence: Synthetic oligonucleotide
uguaucaugagcuggagau

SEQ ID NO: 1131133 - RNA, 19 nt, Artificial Sequence
  Description of Artificial Sequence: Synthetic oligonucleotide
cacgaaaugauaauacacc

SEQ ID NO: 1131134 - RNA, 19 nt, Artificial Sequence
  Description of Artificial Sequence: Synthetic oligonucleotide
uuuuccuuagguucagggg

SEQ ID NO: 1131135 - RNA, 19 nt, Artificial Sequence
  Description of Artificial Sequence: Synthetic oligonucleotide
ucacgaaaugauaauacac

SEQ ID NO: 1131136 - RNA, 19 nt, Artificial Sequence
  Description of Artificial Sequence: Synthetic oligonucleotide
ugugacaucuuauuuaaaa

SEQ ID NO: 1131137 - RNA, 19 nt, Artificial Sequence
  Description of Artificial Sequence: Synthetic oligonucleotide
gaaaugauaauacaccaaa

SEQ ID NO: 1131138 - RNA, 19 nt, Artificial Sequence
  Description of Artificial Sequence: Synthetic oligonucleotide
aaaugauaauacaccaaac

SEQ ID NO: 1131139 - RNA, 19 nt, Artificial Sequence
  Description of Artificial Sequence: Synthetic oligonucleotide
cuuaggucagugaugacgc

SEQ ID NO: 1131140 - RNA, 19 nt, Artificial Sequence
  Description of Artificial Sequence: Synthetic oligonucleotide
gaaguauggauugaggaug

SEQ ID NO: 1131141 - RNA, 19 nt, Artificial Sequence
  Description of Artificial Sequence: Synthetic oligonucleotide
uguaaugccauggucacug

SEQ ID NO: 1131142 - RNA, 19 nt, Artificial Sequence
  Description of Artificial Sequence: Synthetic oligonucleotide
aaagggauggcucuggguu

SEQ ID NO: 1131143 - RNA, 19 nt, Artificial Sequence
  Description of Artificial Sequence: Synthetic oligonucleotide
auacaccaaacacugauug

SEQ ID NO: 1131144 - RNA, 19 nt, Artificial Sequence
  Description of Artificial Sequence: Synthetic oligonucleotide
aguuucauaguaguguagg

SEQ ID NO: 1131145 - RNA, 19 nt, Artificial Sequence
  Description of Artificial Sequence: Synthetic oligonucleotide
uauggauugaggaugcgaa

SEQ ID NO: 1131146 - RNA, 19 nt, Artificial Sequence
  Description of Artificial Sequence: Synthetic oligonucleotide
aaacucccggauccuagcc

SEQ ID NO: 1131147 - RNA, 19 nt, Artificial Sequence
  Description of Artificial Sequence: Synthetic oligonucleotide
auucacgaaaugauaauac

SEQ ID NO: 1131148 - RNA, 19 nt, Artificial Sequence
  Description of Artificial Sequence: Synthetic oligonucleotide
uugaggaugcgaauccacg

SEQ ID NO: 1131149 - RNA, 19 nt, Artificial Sequence
  Description of Artificial Sequence: Synthetic oligonucleotide
ucgaaaggagucaucuagg

SEQ ID NO: 1131150 - RNA, 19 nt, Artificial Sequence
  Description of Artificial Sequence: Synthetic oligonucleotide
gaugacgcgagcuuucacc

SEQ ID NO: 1131151 - RNA, 19 nt, Artificial Sequence
  Description of Artificial Sequence: Synthetic oligonucleotide
guugggcccauucagaugc

SEQ ID NO: 1131152 - RNA, 19 nt, Artificial Sequence
  Description of Artificial Sequence: Synthetic oligonucleotide
aacucccggauccuagccc

SEQ ID NO: 1131153 - RNA, 19 nt, Artificial Sequence
  Description of Artificial Sequence: Synthetic oligonucleotide
aaguauggauugaggaugc

SEQ ID NO: 1131154 - RNA, 19 nt, Artificial Sequence
  Description of Artificial Sequence: Synthetic oligonucleotide
auaaauuaucccuccccuc

SEQ ID NO: 1131155 - RNA, 19 nt, Artificial Sequence
  Description of Artificial Sequence: Synthetic oligonucleotide
aggacaaagagagagucuc

SEQ ID NO: 1131156 - RNA, 19 nt, Artificial Sequence
  Description of Artificial Sequence: Synthetic oligonucleotide
aaauucacgaaaugauaau

SEQ ID NO: 1131157 - RNA, 19 nt, Artificial Sequence
  Description of Artificial Sequence: Synthetic oligonucleotide
acgaaaugauaauacacca

SEQ ID NO: 1131158 - RNA, 19 nt, Artificial Sequence
  Description of Artificial Sequence: Synthetic oligonucleotide
uucacgaaaugauaauaca

SEQ ID NO: 1131159 - RNA, 19 nt, Artificial Sequence
  Description of Artificial Sequence: Synthetic oligonucleotide
ugaaguauggauugaggau

SEQ ID NO: 1131160 - RNA, 19 nt, Artificial Sequence
  Description of Artificial Sequence: Synthetic oligonucleotide
gagagagucucguucauac

SEQ ID NO: 1131161 - RNA, 19 nt, Artificial Sequence
  Description of Artificial Sequence: Synthetic oligonucleotide
ucguucauacugcucaggc

SEQ ID NO: 1131162 - RNA, 19 nt, Artificial Sequence
  Description of Artificial Sequence: Synthetic oligonucleotide
aaaaugauucuggcagcac

SEQ ID NO: 1131163 - RNA, 19 nt, Artificial Sequence
  Description of Artificial Sequence: Synthetic oligonucleotide
uuaaagggauggcucuggg

SEQ ID NO: 1131164 - RNA, 19 nt, Artificial Sequence
  Description of Artificial Sequence: Synthetic oligonucleotide
guguguucaugucauagcc

SEQ ID NO: 1131165 - RNA, 19 nt, Artificial Sequence
  Description of Artificial Sequence: Synthetic oligonucleotide
cuggaugaaguauggauug

SEQ ID NO: 1131166 - RNA, 19 nt, Artificial Sequence
  Description of Artificial Sequence: Synthetic oligonucleotide
cuggguaggacccauggag

SEQ ID NO: 1131167 - RNA, 19 nt, Artificial Sequence
  Description of Artificial Sequence: Synthetic oligonucleotide
ucaggauaggugaugcgca

SEQ ID NO: 1131168 - RNA, 19 nt, Artificial Sequence
  Description of Artificial Sequence: Synthetic oligonucleotide
agugaaggcggccuccugg

SEQ ID NO: 1131169 - RNA, 19 nt, Artificial Sequence
  Description of Artificial Sequence: Synthetic oligonucleotide
auaggugaugcgcagggug

SEQ ID NO: 1131170 - RNA, 19 nt, Artificial Sequence
  Description of Artificial Sequence: Synthetic oligonucleotide
ugaagcauggucuggcacu

SEQ ID NO: 1131171 - RNA, 19 nt, Artificial Sequence
  Description of Artificial Sequence: Synthetic oligonucleotide
ucauagucgucaauucgug

SEQ ID NO: 1131172 - RNA, 19 nt, Artificial Sequence
  Description of Artificial Sequence: Synthetic oligonucleotide
uguaggggugcauugggug

SEQ ID NO: 1131173 - RNA, 19 nt, Artificial Sequence
  Description of Artificial Sequence: Synthetic oligonucleotide
aaaugucccaccuccugca

SEQ ID NO: 1131174 - RNA, 19 nt, Artificial Sequence
  Description of Artificial Sequence: Synthetic oligonucleotide
ugaggaugcgaauccacgc

SEQ ID NO: 1131175 - RNA, 19 nt, Artificial Sequence
  Description of Artificial Sequence: Synthetic oligonucleotide
ucaauucgugaccccagag

SEQ ID NO: 1131176 - RNA, 19 nt, Artificial Sequence
  Description of Artificial Sequence: Synthetic oligonucleotide
aguguaggggugcauuggg

SEQ ID NO: 1131177 - RNA, 19 nt, Artificial Sequence
  Description of Artificial Sequence: Synthetic oligonucleotide
uacaaugaugcagcggcgg

SEQ ID NO: 1131178 - RNA, 19 nt, Artificial Sequence
  Description of Artificial Sequence: Synthetic oligonucleotide
cauguaaugccauggucac

SEQ ID NO: 1131179 - RNA, 19 nt, Artificial Sequence
  Description of Artificial Sequence: Synthetic oligonucleotide
uguguucaugucauagcca

SEQ ID NO: 1131180 - RNA, 19 nt, Artificial Sequence
  Description of Artificial Sequence: Synthetic oligonucleotide
ucauaguaguguaggggug

SEQ ID NO: 1131181 - RNA, 19 nt, Artificial Sequence
  Description of Artificial Sequence: Synthetic oligonucleotide
aagggcaguccaaugagag

SEQ ID NO: 1131182 - RNA, 19 nt, Artificial Sequence
  Description of Artificial Sequence: Synthetic oligonucleotide
agucgucaauucgugaccc

SEQ ID NO: 1131183 - RNA, 19 nt, Artificial Sequence
  Description of Artificial Sequence: Synthetic oligonucleotide
aggugcugaauucagucug

SEQ ID NO: 1131184 - RNA, 19 nt, Artificial Sequence
  Description of Artificial Sequence: Synthetic oligonucleotide
aggaugcgaauccacgcac

SEQ ID NO: 1131185 - RNA, 19 nt, Artificial Sequence
  Description of Artificial Sequence: Synthetic oligonucleotide
gagggaguacuccaucucc

SEQ ID NO: 1131186 - RNA, 19 nt, Artificial Sequence
  Description of Artificial Sequence: Synthetic oligonucleotide
uagucgucaauucgugacc

SEQ ID NO: 1131187 - RNA, 19 nt, Artificial Sequence
  Description of Artificial Sequence: Synthetic oligonucleotide
cucaggauaggugaugcgc

SEQ ID NO: 1131188 - RNA, 19 nt, Artificial Sequence
  Description of Artificial Sequence: Synthetic oligonucleotide
auacugcucaggccgcugc

SEQ ID NO: 1131189 - RNA, 19 nt, Artificial Sequence
  Description of Artificial Sequence: Synthetic oligonucleotide
auguugugcguccaggacu

SEQ ID NO: 1131190 - RNA, 19 nt, Artificial Sequence
  Description of Artificial Sequence: Synthetic oligonucleotide
uguugugcguccaggacuc

SEQ ID NO: 1131191 - RNA, 19 nt, Artificial Sequence
  Description of Artificial Sequence: Synthetic oligonucleotide
ugucauagccaaagccugc

SEQ ID NO: 1131192 - RNA, 19 nt, Artificial Sequence
  Description of Artificial Sequence: Synthetic oligonucleotide
uggguaggacccauggagc

SEQ ID NO: 1131193 - RNA, 19 nt, Artificial Sequence
  Description of Artificial Sequence: Synthetic oligonucleotide
gaggccauuguugaagggc

SEQ ID NO: 1131194 - RNA, 19 nt, Artificial Sequence
  Description of Artificial Sequence: Synthetic oligonucleotide
cacucuuuccuuguagacg

SEQ ID NO: 1131195 - RNA, 19 nt, Artificial Sequence
  Description of Artificial Sequence: Synthetic oligonucleotide
uguggaccaaaugugacau

SEQ ID NO: 1131196 - RNA, 19 nt, Artificial Sequence
  Description of Artificial Sequence: Synthetic oligonucleotide
gcuuaggucagugaugacg

SEQ ID NO: 1131197 - RNA, 19 nt, Artificial Sequence
  Description of Artificial Sequence: Synthetic oligonucleotide
ccaaugagagugaaggcgg

SEQ ID NO: 1131198 - RNA, 19 nt, Artificial Sequence
  Description of Artificial Sequence: Synthetic oligonucleotide
ugucuugaccuuugauucc

SEQ ID NO: 1131199 - RNA, 19 nt, Artificial Sequence
  Description of Artificial Sequence: Synthetic oligonucleotide
uccuuuucucgcuggaugu

SEQ ID NO: 1131200 - RNA, 19 nt, Artificial Sequence
  Description of Artificial Sequence: Synthetic oligonucleotide
uggcagacuagaugaaaug

SEQ ID NO: 1131201 - RNA, 19 nt, Artificial Sequence
  Description of Artificial Sequence: Synthetic oligonucleotide
cauaguaguguaggggugc

SEQ ID NO: 1131202 - RNA, 19 nt, Artificial Sequence
  Description of Artificial Sequence: Synthetic oligonucleotide
uccaagagcuguccuguug

SEQ ID NO: 1131203 - RNA, 19 nt, Artificial Sequence
  Description of Artificial Sequence: Synthetic oligonucleotide
agaaacccagaccaccuga

SEQ ID NO: 1131204 - RNA, 19 nt, Artificial Sequence
  Description of Artificial Sequence: Synthetic oligonucleotide
cuagaugaaaugcuaucca

SEQ ID NO: 1131205 - RNA, 19 nt, Artificial Sequence
  Description of Artificial Sequence: Synthetic oligonucleotide
aaagccugcgacugccacu

SEQ ID NO: 1131206 - RNA, 19 nt, Artificial Sequence
  Description of Artificial Sequence: Synthetic oligonucleotide
cuaggaacaugggugcugg

SEQ ID NO: 1131207 - RNA, 19 nt, Artificial Sequence
  Description of Artificial Sequence: Synthetic oligonucleotide
gacagcuauggagaggagc

SEQ ID NO: 1131208 - RNA, 19 nt, Artificial Sequence
  Description of Artificial Sequence: Synthetic oligonucleotide
uuuucucgcuggauguugu

SEQ ID NO: 1131209 - RNA, 19 nt, Artificial Sequence
  Description of Artificial Sequence: Synthetic oligonucleotide
agucucaucaagaaaccca

SEQ ID NO: 1131210 - RNA, 19 nt, Artificial Sequence
  Description of Artificial Sequence: Synthetic oligonucleotide
uggugugagccucuauggc

SEQ ID NO: 1131211 - RNA, 19 nt, Artificial Sequence
  Description of Artificial Sequence: Synthetic oligonucleotide
aaguguaucaugagcugga

SEQ ID NO: 1131212 - RNA, 19 nt, Artificial Sequence
  Description of Artificial Sequence: Synthetic oligonucleotide
gacgcgagcuuucaccagc

SEQ ID NO: 1131213 - RNA, 19 nt, Artificial Sequence
  Description of Artificial Sequence: Synthetic oligonucleotide
guagacgauguacuucagc

SEQ ID NO: 1131214 - RNA, 19 nt, Artificial Sequence
  Description of Artificial Sequence: Synthetic oligonucleotide
acccaaauucacgaaauga

SEQ ID NO: 1131215 - RNA, 19 nt, Artificial Sequence
  Description of Artificial Sequence: Synthetic oligonucleotide
auguggaccaaaugugaca

SEQ ID NO: 1131216 - RNA, 19 nt, Artificial Sequence
  Description of Artificial Sequence: Synthetic oligonucleotide
guaguguaggggugcauug

SEQ ID NO: 1131217 - RNA, 19 nt, Artificial Sequence
  Description of Artificial Sequence: Synthetic oligonucleotide
ugcgaauccacgcacucuu

SEQ ID NO: 1131218 - RNA, 19 nt, Artificial Sequence
  Description of Artificial Sequence: Synthetic oligonucleotide
agcauguggaccaaaugug

SEQ ID NO: 1131219 - RNA, 19 nt, Artificial Sequence
  Description of Artificial Sequence: Synthetic oligonucleotide
augacgcgagcuuucacca

SEQ ID NO: 1131220 - RNA, 19 nt, Artificial Sequence
  Description of Artificial Sequence: Synthetic oligonucleotide
ggugugagccucuauggcc

SEQ ID NO: 1131221 - RNA, 19 nt, Artificial Sequence
  Description of Artificial Sequence: Synthetic oligonucleotide
gaucucacugguaccacug

SEQ ID NO: 1131222 - RNA, 19 nt, Artificial Sequence
  Description of Artificial Sequence: Synthetic oligonucleotide
uucgguugccuugccaagg

SEQ ID NO: 1131223 - RNA, 19 nt, Artificial Sequence
  Description of Artificial Sequence: Synthetic oligonucleotide
cuacaaugaugcagcggcg

SEQ ID NO: 1131224 - RNA, 19 nt, Artificial Sequence
  Description of Artificial Sequence: Synthetic oligonucleotide
guguucaugucauagccaa

SEQ ID NO: 1131225 - RNA, 19 nt, Artificial Sequence
  Description of Artificial Sequence: Synthetic oligonucleotide
agggaguacuccaucuccc

SEQ ID NO: 1131226 - RNA, 19 nt, Artificial Sequence
  Description of Artificial Sequence: Synthetic oligonucleotide
ucuaggaacaugggugcug

SEQ ID NO: 1131227 - RNA, 19 nt, Artificial Sequence
  Description of Artificial Sequence: Synthetic oligonucleotide
gccaaaguguaucaugagc

SEQ ID NO: 1131228 - RNA, 19 nt, Artificial Sequence
  Description of Artificial Sequence: Synthetic oligonucleotide
gauccuagcccacuuucga

SEQ ID NO: 1131229 - RNA, 19 nt, Artificial Sequence
  Description of Artificial Sequence: Synthetic oligonucleotide
uguccaagagcuguccugu

SEQ ID NO: 1131230 - RNA, 19 nt, Artificial Sequence
  Description of Artificial Sequence: Synthetic oligonucleotide
uaaagggauggcucugggu

SEQ ID NO: 1131231 - RNA, 19 nt, Artificial Sequence
  Description of Artificial Sequence: Synthetic oligonucleotide
augcuauccaccucccugu

SEQ ID NO: 1131232 - RNA, 19 nt, Artificial Sequence
  Description of Artificial Sequence: Synthetic oligonucleotide
uguagacgauguacuucag

SEQ ID NO: 1131233 - RNA, 19 nt, Artificial Sequence
  Description of Artificial Sequence: Synthetic oligonucleotide
uucgugaccccagagacuu

SEQ ID NO: 1131234 - RNA, 19 nt, Artificial Sequence
  Description of Artificial Sequence: Synthetic oligonucleotide
ggaucagggacagcuaugg

SEQ ID NO: 1131235 - RNA, 19 nt, Artificial Sequence
  Description of Artificial Sequence: Synthetic oligonucleotide
gaggaugcgaauccacgca

SEQ ID NO: 1131236 - RNA, 19 nt, Artificial Sequence
  Description of Artificial Sequence: Synthetic oligonucleotide
guugaagggcaguccaaug

SEQ ID NO: 1131237 - RNA, 19 nt, Artificial Sequence
  Description of Artificial Sequence: Synthetic oligonucleotide
uccuagcccacuuucgaaa

SEQ ID NO: 1131238 - RNA, 19 nt, Artificial Sequence
  Description of Artificial Sequence: Synthetic oligonucleotide
accuuugauuccaaaaggu

SEQ ID NO: 1131239 - RNA, 19 nt, Artificial Sequence
  Description of Artificial Sequence: Synthetic oligonucleotide
gaugcgaauccacgcacuc

SEQ ID NO: 1131240 - RNA, 19 nt, Artificial Sequence
  Description of Artificial Sequence: Synthetic oligonucleotide
ugcucaggccgcugcauag

SEQ ID NO: 1131241 - RNA, 19 nt, Artificial Sequence
  Description of Artificial Sequence: Synthetic oligonucleotide
caaggguugggauguuccc

SEQ ID NO: 1131242 - RNA, 19 nt, Artificial Sequence
  Description of Artificial Sequence: Synthetic oligonucleotide
ucuuuccuuguagacgaug

SEQ ID NO: 1131243 - RNA, 19 nt, Artificial Sequence
  Description of Artificial Sequence: Synthetic oligonucleotide
gaccaaaugugacaucuua

SEQ ID NO: 1131244 - RNA, 19 nt, Artificial Sequence
  Description of Artificial Sequence: Synthetic oligonucleotide
caaacucccggauccuagc

SEQ ID NO: 1131245 - RNA, 19 nt, Artificial Sequence
  Description of Artificial Sequence: Synthetic oligonucleotide
gguguguucaugucauagc

SEQ ID NO: 1131246 - RNA, 19 nt, Artificial Sequence
  Description of Artificial Sequence: Synthetic oligonucleotide
ugcgcacaguuucauagua

SEQ ID NO: 1131247 - RNA, 19 nt, Artificial Sequence
  Description of Artificial Sequence: Synthetic oligonucleotide
caguuucauaguaguguag

SEQ ID NO: 1131248 - RNA, 19 nt, Artificial Sequence
  Description of Artificial Sequence: Synthetic oligonucleotide
uggcuuuaaagggauggcu

SEQ ID NO: 1131249 - RNA, 19 nt, Artificial Sequence
  Description of Artificial Sequence: Synthetic oligonucleotide
aggggagagcuuuauugcu

SEQ ID NO: 1131250 - RNA, 19 nt, Artificial Sequence
  Description of Artificial Sequence: Synthetic oligonucleotide
uguugggcccauucagaug

SEQ ID NO: 1131251 - RNA, 19 nt, Artificial Sequence
  Description of Artificial Sequence: Synthetic oligonucleotide
guaggacccauggagccgg

SEQ ID NO: 1131252 - RNA, 19 nt, Artificial Sequence
  Description of Artificial Sequence: Synthetic oligonucleotide
aggcgguacucuuugguga

SEQ ID NO: 1131253 - RNA, 19 nt, Artificial Sequence
  Description of Artificial Sequence: Synthetic oligonucleotide
gaugcagcggcggcagugg

SEQ ID NO: 1131254 - RNA, 19 nt, Artificial Sequence
  Description of Artificial Sequence: Synthetic oligonucleotide
aaggacaaagagagagucu

SEQ ID NO: 1131255 - RNA, 19 nt, Artificial Sequence
  Description of Artificial Sequence: Synthetic oligonucleotide
ucucaucaagaaacccaga

SEQ ID NO: 1131256 - RNA, 19 nt, Artificial Sequence
  Description of Artificial Sequence: Synthetic oligonucleotide
ugauuccaaaagguggcac

SEQ ID NO: 1131257 - RNA, 19 nt, Artificial Sequence
  Description of Artificial Sequence: Synthetic oligonucleotide
ucgucaauucgugacccca

SEQ ID NO: 1131258 - RNA, 19 nt, Artificial Sequence
  Description of Artificial Sequence: Synthetic oligonucleotide
acggacccaggcuuugagg

SEQ ID NO: 1131259 - RNA, 19 nt, Artificial Sequence
  Description of Artificial Sequence: Synthetic oligonucleotide
ccaagagcuguccuguugg

SEQ ID NO: 1131260 - RNA, 19 nt, Artificial Sequence
  Description of Artificial Sequence: Synthetic oligonucleotide
cuagcccacuuucgaaagg

SEQ ID NO: 1131261 - RNA, 19 nt, Artificial Sequence
  Description of Artificial Sequence: Synthetic oligonucleotide
cagccauguaaugccaugg

SEQ ID NO: 1131262 - RNA, 19 nt, Artificial Sequence
  Description of Artificial Sequence: Synthetic oligonucleotide
agugaugacgcgagcuuuc

SEQ ID NO: 1131263 - RNA, 19 nt, Artificial Sequence
  Description of Artificial Sequence: Synthetic oligonucleotide
aagagagagucucguucau

SEQ ID NO: 1131264 - RNA, 19 nt, Artificial Sequence
  Description of Artificial Sequence: Synthetic oligonucleotide
uagcccacuuucgaaagga

SEQ ID NO: 1131265 - RNA, 19 nt, Artificial Sequence
  Description of Artificial Sequence: Synthetic oligonucleotide
cugccaugcgcacaguuuc

SEQ ID NO: 1131266 - RNA, 19 nt, Artificial Sequence
  Description of Artificial Sequence: Synthetic oligonucleotide
ccauguaaugccaugguca

SEQ ID NO: 1131267 - RNA, 19 nt, Artificial Sequence
  Description of Artificial Sequence: Synthetic oligonucleotide
cuguccaagagcuguccug

SEQ ID NO: 1131268 - RNA, 19 nt, Artificial Sequence
  Description of Artificial Sequence: Synthetic oligonucleotide
accaccugacaguuuguca

SEQ ID NO: 1131269 - RNA, 19 nt, Artificial Sequence
  Description of Artificial Sequence: Synthetic oligonucleotide
uuuccuuguagacgaugua

SEQ ID NO: 1131270 - RNA, 19 nt, Artificial Sequence
  Description of Artificial Sequence: Synthetic oligonucleotide
uuucgaaaggagucaucua

SEQ ID NO: 1131271 - RNA, 19 nt, Artificial Sequence
  Description of Artificial Sequence: Synthetic oligonucleotide
gcuggucacagccaguggc

SEQ ID NO: 1131272 - RNA, 19 nt, Artificial Sequence
  Description of Artificial Sequence: Synthetic oligonucleotide
acaaacucccggauccuag

SEQ ID NO: 1131273 - RNA, 19 nt, Artificial Sequence
  Description of Artificial Sequence: Synthetic oligonucleotide
ggagccggcagucucauca

SEQ ID NO: 1131274 - RNA, 19 nt, Artificial Sequence
  Description of Artificial Sequence: Synthetic oligonucleotide
caggcgguacucuuuggug

SEQ ID NO: 1131275 - RNA, 19 nt, Artificial Sequence
  Description of Artificial Sequence: Synthetic oligonucleotide
cccacuuucgaaaggaguc

SEQ ID NO: 1131276 - RNA, 19 nt, Artificial Sequence
  Description of Artificial Sequence: Synthetic oligonucleotide
ucugggucggaagacuccu

SEQ ID NO: 1131277 - RNA, 19 nt, Artificial Sequence
  Description of Artificial Sequence: Synthetic oligonucleotide
acugacaagauggcuuuga

SEQ ID NO: 1131278 - RNA, 19 nt, Artificial Sequence
  Description of Artificial Sequence: Synthetic oligonucleotide
cugaagcauggucuggcac

SEQ ID NO: 1131279 - RNA, 19 nt, Artificial Sequence
  Description of Artificial Sequence: Synthetic oligonucleotide
agagagucucguucauacu

SEQ ID NO: 1131280 - RNA, 19 nt, Artificial Sequence
  Description of Artificial Sequence: Synthetic oligonucleotide
aggauaggugaugcgcagg

SEQ ID NO: 1131281 - RNA, 19 nt, Artificial Sequence
  Description of Artificial Sequence: Synthetic oligonucleotide
aggucagugaugacgcgag

SEQ ID NO: 1131282 - RNA, 19 nt, Artificial Sequence
  Description of Artificial Sequence: Synthetic oligonucleotide
cuucgguugccuugccaag

SEQ ID NO: 1131283 - RNA, 19 nt, Artificial Sequence
  Description of Artificial Sequence: Synthetic oligonucleotide
ugugcguccaggacucuuu

SEQ ID NO: 1131284 - RNA, 19 nt, Artificial Sequence
  Description of Artificial Sequence: Synthetic oligonucleotide
cagacuagaugaaaugcua

SEQ ID NO: 1131285 - RNA, 19 nt, Artificial Sequence
  Description of Artificial Sequence: Synthetic oligonucleotide
cugcuuaggucagugauga

SEQ ID NO: 1131286 - RNA, 19 nt, Artificial Sequence
  Description of Artificial Sequence: Synthetic oligonucleotide
aaugucccaccuccugcau

SEQ ID NO: 1131287 - RNA, 19 nt, Artificial Sequence
  Description of Artificial Sequence: Synthetic oligonucleotide
uggagagggaguacuccau

SEQ ID NO: 1131288 - RNA, 19 nt, Artificial Sequence
  Description of Artificial Sequence: Synthetic oligonucleotide
cagucucaucaagaaaccc

SEQ ID NO: 1131289 - RNA, 19 nt, Artificial Sequence
  Description of Artificial Sequence: Synthetic oligonucleotide
aguaguguaggggugcauu

SEQ ID NO: 1131290 - RNA, 19 nt, Artificial Sequence
  Description of Artificial Sequence: Synthetic oligonucleotide
guauggauugaggaugcga

SEQ ID NO: 1131291 - RNA, 19 nt, Artificial Sequence
  Description of Artificial Sequence: Synthetic oligonucleotide
ggcaaggaccccuccauug

SEQ ID NO: 1131292 - RNA, 19 nt, Artificial Sequence
  Description of Artificial Sequence: Synthetic oligonucleotide
ccaaggguugggauguucc

SEQ ID NO: 1131293 - RNA, 19 nt, Artificial Sequence
  Description of Artificial Sequence: Synthetic oligonucleotide
ggugcugguuuggagaacc

SEQ ID NO: 1131294 - RNA, 19 nt, Artificial Sequence
  Description of Artificial Sequence: Synthetic oligonucleotide
cuauggagaggagccauuc

SEQ ID NO: 1131295 - RNA, 19 nt, Artificial Sequence
  Description of Artificial Sequence: Synthetic oligonucleotide
agacuagaugaaaugcuau

SEQ ID NO: 1131296 - RNA, 19 nt, Artificial Sequence
  Description of Artificial Sequence: Synthetic oligonucleotide
gagagcuuuauugcuucca

SEQ ID NO: 1131297 - RNA, 19 nt, Artificial Sequence
  Description of Artificial Sequence: Synthetic oligonucleotide
aguauggauugaggaugcg

SEQ ID NO: 1131298 - RNA, 19 nt, Artificial Sequence
  Description of Artificial Sequence: Synthetic oligonucleotide
ugcuauccaccucccugug

SEQ ID NO: 1131299 - RNA, 19 nt, Artificial Sequence
  Description of Artificial Sequence: Synthetic oligonucleotide
ugccaugcgcacaguuuca

SEQ ID NO: 1131300 - RNA, 19 nt, Artificial Sequence
  Description of Artificial Sequence: Synthetic oligonucleotide
ggguguguucaugucauag

SEQ ID NO: 1131301 - RNA, 19 nt, Artificial Sequence
  Description of Artificial Sequence: Synthetic oligonucleotide
cauagucgucaauucguga

SEQ ID NO: 1131302 - RNA, 19 nt, Artificial Sequence
  Description of Artificial Sequence: Synthetic oligonucleotide
caaagccugcgacugccac

SEQ ID NO: 1131303 - RNA, 19 nt, Artificial Sequence
  Description of Artificial Sequence: Synthetic oligonucleotide
ccaaaguguaucaugagcu

SEQ ID NO: 1131304 - RNA, 19 nt, Artificial Sequence
  Description of Artificial Sequence: Synthetic oligonucleotide
ugacgcgagcuuucaccag

SEQ ID NO: 1131305 - RNA, 19 nt, Artificial Sequence
  Description of Artificial Sequence: Synthetic oligonucleotide
accaaaugugacaucuuau

SEQ ID NO: 1131306 - RNA, 19 nt, Artificial Sequence
  Description of Artificial Sequence: Synthetic oligonucleotide
augcgcaggguggucuugc

SEQ ID NO: 1131307 - RNA, 19 nt, Artificial Sequence
  Description of Artificial Sequence: Synthetic oligonucleotide
gacaaagagagagucucgu

SEQ ID NO: 1131308 - RNA, 19 nt, Artificial Sequence
  Description of Artificial Sequence: Synthetic oligonucleotide
ccuggugugagccucuaug

SEQ ID NO: 1131309 - RNA, 19 nt, Artificial Sequence
  Description of Artificial Sequence: Synthetic oligonucleotide
aggccauuguugaagggca

SEQ ID NO: 1131310 - RNA, 19 nt, Artificial Sequence
  Description of Artificial Sequence: Synthetic oligonucleotide
agggcaguccaaugagagu

SEQ ID NO: 1131311 - RNA, 19 nt, Artificial Sequence
  Description of Artificial Sequence: Synthetic oligonucleotide
aaggccucacuggcccucg

SEQ ID NO: 1131312 - RNA, 19 nt, Artificial Sequence
  Description of Artificial Sequence: Synthetic oligonucleotide
cauuugaagccagcaagga

SEQ ID NO: 1131313 - RNA, 19 nt, Artificial Sequence
  Description of Artificial Sequence: Synthetic oligonucleotide
auccuagcccacuuucgaa

SEQ ID NO: 1131314 - RNA, 19 nt, Artificial Sequence
  Description of Artificial Sequence: Synthetic oligonucleotide
cacgucccucucaaagccc

SEQ ID NO: 1131315 - RNA, 19 nt, Artificial Sequence
  Description of Artificial Sequence: Synthetic oligonucleotide
cacacccaaauucacgaaa

SEQ ID NO: 1131316 - RNA, 19 nt, Artificial Sequence
  Description of Artificial Sequence: Synthetic oligonucleotide
uuguuggcaaggaccccuc

SEQ ID NO: 1131317 - RNA, 19 nt, Artificial Sequence
  Description of Artificial Sequence: Synthetic oligonucleotide
ugguggagagggaguacuc

SEQ ID NO: 1131318 - RNA, 19 nt, Artificial Sequence
  Description of Artificial Sequence: Synthetic oligonucleotide
gguggcacaaacucccgga

SEQ ID NO: 1131319 - RNA, 19 nt, Artificial Sequence
  Description of Artificial Sequence: Synthetic oligonucleotide
auaguaguguaggggugca

SEQ ID NO: 1131320 - RNA, 19 nt, Artificial Sequence
  Description of Artificial Sequence: Synthetic oligonucleotide
uucaggggagagcuuuauu

SEQ ID NO: 1131321 - RNA, 19 nt, Artificial Sequence
  Description of Artificial Sequence: Synthetic oligonucleotide
ggacaaagagagagucucg

SEQ ID NO: 1131322 - RNA, 19 nt, Artificial Sequence
  Description of Artificial Sequence: Synthetic oligonucleotide
ggauccuagcccacuuucg

SEQ ID NO: 1131323 - RNA, 19 nt, Artificial Sequence
  Description of Artificial Sequence: Synthetic oligonucleotide
aaggaccccuccauugccu

SEQ ID NO: 1131324 - RNA, 19 nt, Artificial Sequence
  Description of Artificial Sequence: Synthetic oligonucleotide
gcgacugccacuucaucac

SEQ ID NO: 1131325 - RNA, 19 nt, Artificial Sequence
  Description of Artificial Sequence: Synthetic oligonucleotide
ggucaggcgguacucuuug

SEQ ID NO: 1131326 - RNA, 19 nt, Artificial Sequence
  Description of Artificial Sequence: Synthetic oligonucleotide
gcaaggaccccuccauugc

SEQ ID NO: 1131327 - RNA, 19 nt, Artificial Sequence
  Description of Artificial Sequence: Synthetic oligonucleotide
ugcguccaggacucuuuga

SEQ ID NO: 1131328 - RNA, 19 nt, Artificial Sequence
  Description of Artificial Sequence: Synthetic oligonucleotide
gggaguacuccaucucccc

SEQ ID NO: 1131329 - RNA, 19 nt, Artificial Sequence
  Description of Artificial Sequence: Synthetic oligonucleotide
gucgucaauucgugacccc

SEQ ID NO: 1131330 - RNA, 19 nt, Artificial Sequence
  Description of Artificial Sequence: Synthetic oligonucleotide
ggccaaaguguaucaugag

SEQ ID NO: 1131331 - RNA, 19 nt, Artificial Sequence
  Description of Artificial Sequence: Synthetic oligonucleotide
ccuagcccacuuucgaaag

SEQ ID NO: 1131332 - RNA, 19 nt, Artificial Sequence
  Description of Artificial Sequence: Synthetic oligonucleotide
cacggacccaggcuuugag

SEQ ID NO: 1131333 - RNA, 19 nt, Artificial Sequence
  Description of Artificial Sequence: Synthetic oligonucleotide
agcuauggagaggagccau

SEQ ID NO: 1131334 - RNA, 19 nt, Artificial Sequence
  Description of Artificial Sequence: Synthetic oligonucleotide
gagccucuauggcccagug

SEQ ID NO: 1131335 - RNA, 19 nt, Artificial Sequence
  Description of Artificial Sequence: Synthetic oligonucleotide
gaauucagucugaccacaa

SEQ ID NO: 1131336 - RNA, 19 nt, Artificial Sequence
  Description of Artificial Sequence: Synthetic oligonucleotide
auagcacccucaggauagg

SEQ ID NO: 1131337 - RNA, 19 nt, Artificial Sequence
  Description of Artificial Sequence: Synthetic oligonucleotide
agcuucgguugccuugcca

SEQ ID NO: 1131338 - RNA, 19 nt, Artificial Sequence
  Description of Artificial Sequence: Synthetic oligonucleotide
ccaaauucacgaaaugaua

SEQ ID NO: 1131339 - RNA, 19 nt, Artificial Sequence
  Description of Artificial Sequence: Synthetic oligonucleotide
gcacucuugcucccaaaug

SEQ ID NO: 1131340 - RNA, 19 nt, Artificial Sequence
  Description of Artificial Sequence: Synthetic oligonucleotide
gcuuuaaagggauggcucu

SEQ ID NO: 1131341 - RNA, 19 nt, Artificial Sequence
  Description of Artificial Sequence: Synthetic oligonucleotide
ucucucugcuccuguccaa

SEQ ID NO: 1131342 - RNA, 19 nt, Artificial Sequence
  Description of Artificial Sequence: Synthetic oligonucleotide
agccucuauggcccagugu

SEQ ID NO: 1131343 - RNA, 19 nt, Artificial Sequence
  Description of Artificial Sequence: Synthetic oligonucleotide
gcuucgguugccuugccaa

SEQ ID NO: 1131344 - RNA, 19 nt, Artificial Sequence
  Description of Artificial Sequence: Synthetic oligonucleotide
cuugaccuuugauuccaaa

SEQ ID NO: 1131345 - RNA, 19 nt, Artificial Sequence
  Description of Artificial Sequence: Synthetic oligonucleotide
ugagccucuauggcccagu

SEQ ID NO: 1131346 - RNA, 19 nt, Artificial Sequence
  Description of Artificial Sequence: Synthetic oligonucleotide
uugggcccauucagaugcc

SEQ ID NO: 1131347 - RNA, 19 nt, Artificial Sequence
  Description of Artificial Sequence: Synthetic oligonucleotide
auucgugaccccagagacu

SEQ ID NO: 1131348 - RNA, 19 nt, Artificial Sequence
  Description of Artificial Sequence: Synthetic oligonucleotide
augcgaauccacgcacucu

SEQ ID NO: 1131349 - RNA, 19 nt, Artificial Sequence
  Description of Artificial Sequence: Synthetic oligonucleotide
ggcgguacucuuuggugac

SEQ ID NO: 1131350 - RNA, 19 nt, Artificial Sequence
  Description of Artificial Sequence: Synthetic oligonucleotide
auccacgcacucuuuccuu

SEQ ID NO: 1131351 - RNA, 19 nt, Artificial Sequence
  Description of Artificial Sequence: Synthetic oligonucleotide
aggccgcugcauagcaccc

SEQ ID NO: 1131352 - RNA, 19 nt, Artificial Sequence
  Description of Artificial Sequence: Synthetic oligonucleotide
ggagagggaguacuccauc

SEQ ID NO: 1131353 - RNA, 19 nt, Artificial Sequence
  Description of Artificial Sequence: Synthetic oligonucleotide
acgucccucucaaagcccu

SEQ ID NO: 1131354 - RNA, 19 nt, Artificial Sequence
  Description of Artificial Sequence: Synthetic oligonucleotide
auguaaugccauggucacu

SEQ ID NO: 1131355 - RNA, 19 nt, Artificial Sequence
  Description of Artificial Sequence: Synthetic oligonucleotide
ugcuuaggucagugaugac

SEQ ID NO: 1131356 - RNA, 19 nt, Artificial Sequence
  Description of Artificial Sequence: Synthetic oligonucleotide
ugaugcgcaggguggucuu

SEQ ID NO: 1131357 - RNA, 19 nt, Artificial Sequence
  Description of Artificial Sequence: Synthetic oligonucleotide
gcauguggaccaaauguga

SEQ ID NO: 1131358 - RNA, 19 nt, Artificial Sequence
  Description of Artificial Sequence: Synthetic oligonucleotide
caaugaugcagcggcggca

SEQ ID NO: 1131359 - RNA, 19 nt, Artificial Sequence
  Description of Artificial Sequence: Synthetic oligonucleotide
cugccauuugaagccagca

SEQ ID NO: 1131360 - RNA, 19 nt, Artificial Sequence
  Description of Artificial Sequence: Synthetic oligonucleotide
ucgcuggauguugugcguc

SEQ ID NO: 1131361 - RNA, 19 nt, Artificial Sequence
  Description of Artificial Sequence: Synthetic oligonucleotide
ccucuagugggccucuuuc

SEQ ID NO: 1131362 - RNA, 19 nt, Artificial Sequence
  Description of Artificial Sequence: Synthetic oligonucleotide
acccucaggauaggugaug

SEQ ID NO: 1131363 - RNA, 19 nt, Artificial Sequence
  Description of Artificial Sequence: Synthetic oligonucleotide
guuugucaggaaggagcac

SEQ ID NO: 1131364 - RNA, 19 nt, Artificial Sequence
  Description of Artificial Sequence: Synthetic oligonucleotide
agcuuccguagaaacuccu

SEQ ID NO: 1131365 - RNA, 19 nt, Artificial Sequence
  Description of Artificial Sequence: Synthetic oligonucleotide
cugggucggaagacuccug

SEQ ID NO: 1131366 - RNA, 19 nt, Artificial Sequence
  Description of Artificial Sequence: Synthetic oligonucleotide
cauugccuacaaugaugca

SEQ ID NO: 1131367 - RNA, 19 nt, Artificial Sequence
  Description of Artificial Sequence: Synthetic oligonucleotide
ccucaggauaggugaugcg

SEQ ID NO: 1131368 - RNA, 19 nt, Artificial Sequence
  Description of Artificial Sequence: Synthetic oligonucleotide
ugccuugccaaggccucac

SEQ ID NO: 1131369 - RNA, 19 nt, Artificial Sequence
  Description of Artificial Sequence: Synthetic oligonucleotide
cccucaggauaggugaugc

SEQ ID NO: 1131370 - RNA, 19 nt, Artificial Sequence
  Description of Artificial Sequence: Synthetic oligonucleotide
gggucggaagacuccugug

SEQ ID NO: 1131371 - RNA, 19 nt, Artificial Sequence
  Description of Artificial Sequence: Synthetic oligonucleotide
aggaccccuccauugccua

SEQ ID NO: 1131372 - RNA, 19 nt, Artificial Sequence
  Description of Artificial Sequence: Synthetic oligonucleotide
acgauguacuucagccacu

SEQ ID NO: 1131373 - RNA, 19 nt, Artificial Sequence
  Description of Artificial Sequence: Synthetic oligonucleotide
cucuagugggccucuuucu

SEQ ID NO: 1131374 - RNA, 19 nt, Artificial Sequence
  Description of Artificial Sequence: Synthetic oligonucleotide
gugaugacgcgagcuuuca

SEQ ID NO: 1131375 - RNA, 19 nt, Artificial Sequence
  Description of Artificial Sequence: Synthetic oligonucleotide
uccuggugugagccucuau

SEQ ID NO: 1131376 - RNA, 19 nt, Artificial Sequence
  Description of Artificial Sequence: Synthetic oligonucleotide
gcagacuagaugaaaugcu

SEQ ID NO: 1131377 - RNA, 19 nt, Artificial Sequence
  Description of Artificial Sequence: Synthetic oligonucleotide
uagcacccucaggauaggu

SEQ ID NO: 1131378 - RNA, 19 nt, Artificial Sequence
  Description of Artificial Sequence: Synthetic oligonucleotide
ucacuucccucugguccug

SEQ ID NO: 1131379 - RNA, 19 nt, Artificial Sequence
  Description of Artificial Sequence: Synthetic oligonucleotide
cgaaaugauaauacaccaa

SEQ ID NO: 1131380 - RNA, 19 nt, Artificial Sequence
  Description of Artificial Sequence: Synthetic oligonucleotide
gcgcacaguuucauaguag

SEQ ID NO: 1131381 - RNA, 19 nt, Artificial Sequence
  Description of Artificial Sequence: Synthetic oligonucleotide
ugugucccugaagcauggu

SEQ ID NO: 1131382 - RNA, 19 nt, Artificial Sequence
  Description of Artificial Sequence: Synthetic oligonucleotide
cgucaauucgugaccccag

SEQ ID NO: 1131383 - RNA, 19 nt, Artificial Sequence
  Description of Artificial Sequence: Synthetic oligonucleotide
ggugcugaauucagucuga

SEQ ID NO: 1131384 - RNA, 19 nt, Artificial Sequence
  Description of Artificial Sequence: Synthetic oligonucleotide
cccugaagcauggucuggc

SEQ ID NO: 1131385 - RNA, 19 nt, Artificial Sequence
  Description of Artificial Sequence: Synthetic oligonucleotide
uugugcguccaggacucuu

SEQ ID NO: 1131386 - RNA, 19 nt, Artificial Sequence
  Description of Artificial Sequence: Synthetic oligonucleotide
gagccggcagucucaucaa

SEQ ID NO: 1131387 - RNA, 19 nt, Artificial Sequence
  Description of Artificial Sequence: Synthetic oligonucleotide
ccuuagguucaggggagag

SEQ ID NO: 1131388 - RNA, 19 nt, Artificial Sequence
  Description of Artificial Sequence: Synthetic oligonucleotide
ucccggauccuagcccacu

SEQ ID NO: 1131389 - RNA, 19 nt, Artificial Sequence
  Description of Artificial Sequence: Synthetic oligonucleotide
cauucagaugccacugcuu

SEQ ID NO: 1131390 - RNA, 19 nt, Artificial Sequence
  Description of Artificial Sequence: Synthetic oligonucleotide
ccuggaugaaguauggauu

SEQ ID NO: 1131391 - RNA, 19 nt, Artificial Sequence
  Description of Artificial Sequence: Synthetic oligonucleotide
ccaaaagguggcacaaacu

SEQ ID NO: 1131392 - RNA, 19 nt, Artificial Sequence
  Description of Artificial Sequence: Synthetic oligonucleotide
cucccggauccuagcccac

SEQ ID NO: 1131393 - RNA, 19 nt, Artificial Sequence
  Description of Artificial Sequence: Synthetic oligonucleotide
acgcgagcuuucaccagcu

SEQ ID NO: 1131394 - RNA, 19 nt, Artificial Sequence
  Description of Artificial Sequence: Synthetic oligonucleotide
gguugccuugccaaggccu

SEQ ID NO: 1131395 - RNA, 19 nt, Artificial Sequence
  Description of Artificial Sequence: Synthetic oligonucleotide
cacuuccauccuucaggga

SEQ ID NO: 1131396 - RNA, 19 nt, Artificial Sequence
  Description of Artificial Sequence: Synthetic oligonucleotide
cccucgggccccuuggcac

SEQ ID NO: 1131397 - RNA, 19 nt, Artificial Sequence
  Description of Artificial Sequence: Synthetic oligonucleotide
agaccaccugacaguuugu

SEQ ID NO: 1131398 - RNA, 19 nt, Artificial Sequence
  Description of Artificial Sequence: Synthetic oligonucleotide
ggaucucacugguaccacu

SEQ ID NO: 1131399 - RNA, 19 nt, Artificial Sequence
  Description of Artificial Sequence: Synthetic oligonucleotide
gguuuccccugugggacac

SEQ ID NO: 1131400 - RNA, 19 nt, Artificial Sequence
  Description of Artificial Sequence: Synthetic oligonucleotide
gugaugcgcaggguggucu

SEQ ID NO: 1131401 - RNA, 19 nt, Artificial Sequence
  Description of Artificial Sequence: Synthetic oligonucleotide
cgcuggauguugugcgucc

SEQ ID NO: 1131402 - RNA, 19 nt, Artificial Sequence
  Description of Artificial Sequence: Synthetic oligonucleotide
gaggcagagugcuggucuu

SEQ ID NO: 1131403 - RNA, 19 nt, Artificial Sequence
  Description of Artificial Sequence: Synthetic oligonucleotide
cggauccuagcccacuuuc

SEQ ID NO: 1131404 - RNA, 19 nt, Artificial Sequence
  Description of Artificial Sequence: Synthetic oligonucleotide
guccugccauuugaagcca

SEQ ID NO: 1131405 - RNA, 19 nt, Artificial Sequence
  Description of Artificial Sequence: Synthetic oligonucleotide
agccugcgacugccacuuc

SEQ ID NO: 1131406 - RNA, 19 nt, Artificial Sequence
  Description of Artificial Sequence: Synthetic oligonucleotide
ccacuuucgaaaggaguca

SEQ ID NO: 1131407 - RNA, 19 nt, Artificial Sequence
  Description of Artificial Sequence: Synthetic oligonucleotide
cagcuucgguugccuugcc

SEQ ID NO: 1131408 - RNA, 19 nt, Artificial Sequence
  Description of Artificial Sequence: Synthetic oligonucleotide
gccgcugcauagcacccuc

SEQ ID NO: 1131409 - RNA, 19 nt, Artificial Sequence
  Description of Artificial Sequence: Synthetic oligonucleotide
ggcaguccaaugagaguga

SEQ ID NO: 1131410 - RNA, 19 nt, Artificial Sequence
  Description of Artificial Sequence: Synthetic oligonucleotide
gccggcagucucaucaaga

SEQ ID NO: 1131411 - RNA, 19 nt, Artificial Sequence
  Description of Artificial Sequence: Synthetic oligonucleotide
cauuccccucaggcugggc

SEQ ID NO: 1131412 - RNA, 19 nt, Artificial Sequence
  Description of Artificial Sequence: Synthetic oligonucleotide
cucgcuggauguugugcgu

SEQ ID NO: 1131413 - RNA, 19 nt, Artificial Sequence
  Description of Artificial Sequence: Synthetic oligonucleotide
cgcacaguuucauaguagu

SEQ ID NO: 1131414 - RNA, 19 nt, Artificial Sequence
  Description of Artificial Sequence: Synthetic oligonucleotide
guguaggggugcauugggu

SEQ ID NO: 1131415 - RNA, 19 nt, Artificial Sequence
  Description of Artificial Sequence: Synthetic oligonucleotide
caaugucauagucgucaau

SEQ ID NO: 1131416 - RNA, 19 nt, Artificial Sequence
  Description of Artificial Sequence: Synthetic oligonucleotide
cacuuucgaaaggagucau

SEQ ID NO: 1131417 - RNA, 19 nt, Artificial Sequence
  Description of Artificial Sequence: Synthetic oligonucleotide
aggacccauggagccggca

SEQ ID NO: 1131418 - RNA, 19 nt, Artificial Sequence
  Description of Artificial Sequence: Synthetic oligonucleotide
ggugggcccucuagugggc

SEQ ID NO: 1131419 - RNA, 19 nt, Artificial Sequence
  Description of Artificial Sequence: Synthetic oligonucleotide
ggacagcuauggagaggag

SEQ ID NO: 1131420 - RNA, 19 nt, Artificial Sequence
  Description of Artificial Sequence: Synthetic oligonucleotide
ccguagaaacuccuuuucu

SEQ ID NO: 1131421 - RNA, 19 nt, Artificial Sequence
  Description of Artificial Sequence: Synthetic oligonucleotide
gugcauuggguguguucau

SEQ ID NO: 1131422 - RNA, 19 nt, Artificial Sequence
  Description of Artificial Sequence: Synthetic oligonucleotide
gcuguccaaggcagggguc

SEQ ID NO: 1131423 - RNA, 19 nt, Artificial Sequence
  Description of Artificial Sequence: Synthetic oligonucleotide
ggaugcgaauccacgcacu

SEQ ID NO: 1131424 - RNA, 19 nt, Artificial Sequence
  Description of Artificial Sequence: Synthetic oligonucleotide
gcccacuuucgaaaggagu

SEQ ID NO: 1131425 - RNA, 19 nt, Artificial Sequence
  Description of Artificial Sequence: Synthetic oligonucleotide
gcuauccaccucccugugu

SEQ ID NO: 1131426 - RNA, 19 nt, Artificial Sequence
  Description of Artificial Sequence: Synthetic oligonucleotide
cgguugccuugccaaggcc

SEQ ID NO: 1131427 - RNA, 19 nt, Artificial Sequence
  Description of Artificial Sequence: Synthetic oligonucleotide
cucuuuccuuguagacgau

SEQ ID NO: 1131428 - RNA, 19 nt, Artificial Sequence
  Description of Artificial Sequence: Synthetic oligonucleotide
gcugccaugcgcacaguuu

SEQ ID NO: 1131429 - RNA, 19 nt, Artificial Sequence
  Description of Artificial Sequence: Synthetic oligonucleotide
ccuguccaagagcuguccu

SEQ ID NO: 1131430 - RNA, 19 nt, Artificial Sequence
  Description of Artificial Sequence: Synthetic oligonucleotide
cgacugccacuucaucaca

SEQ ID NO: 1131431 - RNA, 19 nt, Artificial Sequence
  Description of Artificial Sequence: Synthetic oligonucleotide
gcuauggagaggagccauu

SEQ ID NO: 1131432 - RNA, 19 nt, Artificial Sequence
  Description of Artificial Sequence: Synthetic oligonucleotide
cggcagucucaucaagaaa

SEQ ID NO: 1131433 - RNA, 19 nt, Artificial Sequence
  Description of Artificial Sequence: Synthetic oligonucleotide
guugugcguccaggacucu

SEQ ID NO: 1131434 - RNA, 19 nt, Artificial Sequence
  Description of Artificial Sequence: Synthetic oligonucleotide
ggcggcaguggaggcuguc

SEQ ID NO: 1131435 - RNA, 19 nt, Artificial Sequence
  Description of Artificial Sequence: Synthetic oligonucleotide
ccgcugcauagcacccuca

SEQ ID NO: 1131436 - RNA, 19 nt, Artificial Sequence
  Description of Artificial Sequence: Synthetic oligonucleotide
gggucaggcgguacucuuu

SEQ ID NO: 1131437 - RNA, 19 nt, Artificial Sequence
  Description of Artificial Sequence: Synthetic oligonucleotide
gcgguacucuuuggugacu

SEQ ID NO: 1131438 - RNA, 19 nt, Artificial Sequence
  Description of Artificial Sequence: Synthetic oligonucleotide
ccuagcccucuggcuucac

SEQ ID NO: 1131439 - RNA, 19 nt, Artificial Sequence
  Description of Artificial Sequence: Synthetic oligonucleotide
aggcggccuccuggaugaa

SEQ ID NO: 1131440 - RNA, 19 nt, Artificial Sequence
  Description of Artificial Sequence: Synthetic oligonucleotide
cccggauccuagcccacuu

SEQ ID NO: 1131441 - RNA, 19 nt, Artificial Sequence
  Description of Artificial Sequence: Synthetic oligonucleotide
ccggauccuagcccacuuu

SEQ ID NO: 1131442 - RNA, 19 nt, Artificial Sequence
  Description of Artificial Sequence: Synthetic oligonucleotide
cgggccccuuggcacuguc

SEQ ID NO: 1131443 - RNA, 19 nt, Artificial Sequence
  Description of Artificial Sequence: Synthetic oligonucleotide
ggggugcauuggguguguu

SEQ ID NO: 1131444 - RNA, 19 nt, Artificial Sequence
  Description of Artificial Sequence: Synthetic oligonucleotide
gcccucuagugggccucuu

SEQ ID NO: 1131445 - RNA, 19 nt, Artificial Sequence
  Description of Artificial Sequence: Synthetic oligonucleotide
cccugcccaugaggccauu

SEQ ID NO: 1131446 - RNA, 19 nt, Artificial Sequence
  Description of Artificial Sequence: Synthetic oligonucleotide
aguggaauaauucugaaag

SEQ ID NO: 1131447 - RNA, 19 nt, Artificial Sequence
  Description of Artificial Sequence: Synthetic oligonucleotide
uaagauaucagccaauuug

SEQ ID NO: 1131448 - RNA, 19 nt, Artificial Sequence
  Description of Artificial Sequence: Synthetic oligonucleotide
aucaguuuaagauaucagc

SEQ ID NO: 1131449 - RNA, 19 nt, Artificial Sequence
  Description of Artificial Sequence: Synthetic oligonucleotide
uaugcuuggaaucauuugg

SEQ ID NO: 1131450 - RNA, 19 nt, Artificial Sequence
  Description of Artificial Sequence: Synthetic oligonucleotide
aaauugagguuuuccagcc

SEQ ID NO: 1131451 - RNA, 19 nt, Artificial Sequence
  Description of Artificial Sequence: Synthetic oligonucleotide
acaacuuagaaggagagcc

SEQ ID NO: 1131452 - RNA, 19 nt, Artificial Sequence
  Description of Artificial Sequence: Synthetic oligonucleotide
uuaaccuaggccaugauug

SEQ ID NO: 1131453 - RNA, 19 nt, Artificial Sequence
  Description of Artificial Sequence: Synthetic oligonucleotide
aauauguuuacucaucaga

SEQ ID NO: 1131454 - RNA, 19 nt, Artificial Sequence
  Description of Artificial Sequence: Synthetic oligonucleotide
uuagcuaaaauacacuuga

SEQ ID NO: 1131455 - RNA, 19 nt, Artificial Sequence
  Description of Artificial Sequence: Synthetic oligonucleotide
uaugaaaucuugcagaagu

SEQ ID NO: 1131456 - RNA, 19 nt, Artificial Sequence
  Description of Artificial Sequence: Synthetic oligonucleotide
ucaguuuaagauaucagcc

SEQ ID NO: 1131457 - RNA, 19 nt, Artificial Sequence
  Description of Artificial Sequence: Synthetic oligonucleotide
auaucagccaauuuguuuc

SEQ ID NO: 1131458 - RNA, 19 nt, Artificial Sequence
  Description of Artificial Sequence: Synthetic oligonucleotide
uacauagucccuucgaucg

SEQ ID NO: 1131459 - RNA, 19 nt, Artificial Sequence
  Description of Artificial Sequence: Synthetic oligonucleotide
auaaguaacuguuaugaag

SEQ ID NO: 1131460 - RNA, 19 nt, Artificial Sequence
  Description of Artificial Sequence: Synthetic oligonucleotide
aaucauuuggaucaauaca

SEQ ID NO: 1131461 - RNA, 19 nt, Artificial Sequence
  Description of Artificial Sequence: Synthetic oligonucleotide
aaaccagacaacuuagaag

SEQ ID NO: 1131462 - RNA, 19 nt, Artificial Sequence
  Description of Artificial Sequence: Synthetic oligonucleotide
aaggauauugccuuagcug

SEQ ID NO: 1131463 - RNA, 19 nt, Artificial Sequence
  Description of Artificial Sequence: Synthetic oligonucleotide
uaaauugccccauacaaug

SEQ ID NO: 1131464 - RNA, 19 nt, Artificial Sequence
  Description of Artificial Sequence: Synthetic oligonucleotide
uaguguauuaacauuuucc

SEQ ID NO: 1131465 - RNA, 19 nt, Artificial Sequence
  Description of Artificial Sequence: Synthetic oligonucleotide
aaucuggucuaacauguac

SEQ ID NO: 1131466 - RNA, 19 nt, Artificial Sequence
  Description of Artificial Sequence: Synthetic oligonucleotide
ucuaaaacuaguucuuucc

SEQ ID NO: 1131467 - RNA, 19 nt, Artificial Sequence
  Description of Artificial Sequence: Synthetic oligonucleotide
uuauuagaaagaauguaga

SEQ ID NO: 1131468 - RNA, 19 nt, Artificial Sequence
  Description of Artificial Sequence: Synthetic oligonucleotide
agcuaaaauacacuugaac

SEQ ID NO: 1131469 - RNA, 19 nt, Artificial Sequence
  Description of Artificial Sequence: Synthetic oligonucleotide
uaagagauguaagagauca

SEQ ID NO: 1131470 - RNA, 19 nt, Artificial Sequence
  Description of Artificial Sequence: Synthetic oligonucleotide
uaaaauuaucacuuccucc

SEQ ID NO: 1131471 - RNA, 19 nt, Artificial Sequence
  Description of Artificial Sequence: Synthetic oligonucleotide
cauuccuuacuccagaucc

SEQ ID NO: 1131472 - RNA, 19 nt, Artificial Sequence
  Description of Artificial Sequence: Synthetic oligonucleotide
caaugguacauuaucaacc

SEQ ID NO: 1131473 - RNA, 19 nt, Artificial Sequence
  Description of Artificial Sequence: Synthetic oligonucleotide
uggaucaauacaaugaaaa

SEQ ID NO: 1131474 - RNA, 19 nt, Artificial Sequence
  Description of Artificial Sequence: Synthetic oligonucleotide
agccaauugagcuuugccc

SEQ ID NO: 1131475 - RNA, 19 nt, Artificial Sequence
  Description of Artificial Sequence: Synthetic oligonucleotide
aaccaucuaaguuagggca

SEQ ID NO: 1131476 - RNA, 19 nt, Artificial Sequence
  Description of Artificial Sequence: Synthetic oligonucleotide
caaaauuggacauaucuuc

SEQ ID NO: 1131477 - RNA, 19 nt, Artificial Sequence
  Description of Artificial Sequence: Synthetic oligonucleotide
aguguauuaacauuuucca

SEQ ID NO: 1131478 - RNA, 19 nt, Artificial Sequence
  Description of Artificial Sequence: Synthetic oligonucleotide
aguuuuagcuaaaauacac

SEQ ID NO: 1131479 - RNA, 19 nt, Artificial Sequence
  Description of Artificial Sequence: Synthetic oligonucleotide
aaacggucaaaauuggaca

SEQ ID NO: 1131480 - RNA, 19 nt, Artificial Sequence
  Description of Artificial Sequence: Synthetic oligonucleotide
acaaugguacauuaucaac

SEQ ID NO: 1131481 - RNA, 19 nt, Artificial Sequence
  Description of Artificial Sequence: Synthetic oligonucleotide
agugcaaauacaaaucugg

SEQ ID NO: 1131482 - RNA, 19 nt, Artificial Sequence
  Description of Artificial Sequence: Synthetic oligonucleotide
aaagaauguagacauuuaa

SEQ ID NO: 1131483 - RNA, 19 nt, Artificial Sequence
  Description of Artificial Sequence: Synthetic oligonucleotide
aggaucuaaaacuaguucu

SEQ ID NO: 1131484 - RNA, 19 nt, Artificial Sequence
  Description of Artificial Sequence: Synthetic oligonucleotide
ucaugcauaaggauauugc

SEQ ID NO: 1131485 - RNA, 19 nt, Artificial Sequence
  Description of Artificial Sequence: Synthetic oligonucleotide
caugaaaucacagcaaacc

SEQ ID NO: 1131486 - RNA, 19 nt, Artificial Sequence
  Description of Artificial Sequence: Synthetic oligonucleotide
acccauaugauccaucauc

SEQ ID NO: 1131487 - RNA, 19 nt, Artificial Sequence
  Description of Artificial Sequence: Synthetic oligonucleotide
aggugaaauauguuuacuc

SEQ ID NO: 1131488 - RNA, 19 nt, Artificial Sequence
  Description of Artificial Sequence: Synthetic oligonucleotide
aaauugaucuguccguucu

SEQ ID NO: 1131489 - RNA, 19 nt, Artificial Sequence
  Description of Artificial Sequence: Synthetic oligonucleotide
ucucaagcaacaauguaca

SEQ ID NO: 1131490 - RNA, 19 nt, Artificial Sequence
  Description of Artificial Sequence: Synthetic oligonucleotide
uuuggaucaauacaaugaa

SEQ ID NO: 1131491 - RNA, 19 nt, Artificial Sequence
  Description of Artificial Sequence: Synthetic oligonucleotide
uccgcaaacaacauaaaau

SEQ ID NO: 1131492 - RNA, 19 nt, Artificial Sequence
  Description of Artificial Sequence: Synthetic oligonucleotide
uccuuuguuaaccuaggcc

SEQ ID NO: 1131493 - RNA, 19 nt, Artificial Sequence
  Description of Artificial Sequence: Synthetic oligonucleotide
ugguaaauacaugaaauca

SEQ ID NO: 1131494 - RNA, 19 nt, Artificial Sequence
  Description of Artificial Sequence: Synthetic oligonucleotide
uaucaguuuaagauaucag

SEQ ID NO: 1131495 - RNA, 19 nt, Artificial Sequence
  Description of Artificial Sequence: Synthetic oligonucleotide
aauacaaaucuggucuaac

SEQ ID NO: 1131496 - RNA, 19 nt, Artificial Sequence
  Description of Artificial Sequence: Synthetic oligonucleotide
acuuuaguggaauaauucu

SEQ ID NO: 1131497 - RNA, 19 nt, Artificial Sequence
  Description of Artificial Sequence: Synthetic oligonucleotide
ucuaggaucuaaaacuagu

SEQ ID NO: 1131498 - RNA, 19 nt, Artificial Sequence
  Description of Artificial Sequence: Synthetic oligonucleotide
uuuuagcuaaaauacacuu

SEQ ID NO: 1131499 - RNA, 19 nt, Artificial Sequence
  Description of Artificial Sequence: Synthetic oligonucleotide
acgggcucgaccucgaugc

SEQ ID NO: 1131500 - RNA, 19 nt, Artificial Sequence
  Description of Artificial Sequence: Synthetic oligonucleotide
uaaguuagggcauucacua

SEQ ID NO: 1131501 - RNA, 19 nt, Artificial Sequence
  Description of Artificial Sequence: Synthetic oligonucleotide
cuuuaguggaauaauucug

SEQ ID NO: 1131502 - RNA, 19 nt, Artificial Sequence
  Description of Artificial Sequence: Synthetic oligonucleotide
aggauauugccuuagcuga

SEQ ID NO: 1131503 - RNA, 19 nt, Artificial Sequence
  Description of Artificial Sequence: Synthetic oligonucleotide
auauguuuacucaucagag

SEQ ID NO: 1131504 - RNA, 19 nt, Artificial Sequence
  Description of Artificial Sequence: Synthetic oligonucleotide
uuaucaacccuuagugaag

SEQ ID NO: 1131505 - RNA, 19 nt, Artificial Sequence
  Description of Artificial Sequence: Synthetic oligonucleotide
aaaacuaguucuuucccua

SEQ ID NO: 1131506 - RNA, 19 nt, Artificial Sequence
  Description of Artificial Sequence: Synthetic oligonucleotide
auaauucugaaagguacac

SEQ ID NO: 1131507 - RNA, 19 nt, Artificial Sequence
  Description of Artificial Sequence: Synthetic oligonucleotide
auacaauaauguaaaguac

SEQ ID NO: 1131508 - RNA, 19 nt, Artificial Sequence
  Description of Artificial Sequence: Synthetic oligonucleotide
ucuaaguuagggcauucac

SEQ ID NO: 1131509 - RNA, 19 nt, Artificial Sequence
  Description of Artificial Sequence: Synthetic oligonucleotide
uccaauaguguauuaacau

SEQ ID NO: 1131510 - RNA, 19 nt, Artificial Sequence
  Description of Artificial Sequence: Synthetic oligonucleotide
auaguguauuaacauuuuc

SEQ ID NO: 1131511 - RNA, 19 nt, Artificial Sequence
  Description of Artificial Sequence: Synthetic oligonucleotide
uuccaauaguguauuaaca

SEQ ID NO: 1131512 - RNA, 19 nt, Artificial Sequence
  Description of Artificial Sequence: Synthetic oligonucleotide
uggaauaauucugaaaggu

SEQ ID NO: 1131513 - RNA, 19 nt, Artificial Sequence
  Description of Artificial Sequence: Synthetic oligonucleotide
gaaacggucaaaauuggac

SEQ ID NO: 1131514 - RNA, 19 nt, Artificial Sequence
  Description of Artificial Sequence: Synthetic oligonucleotide
uaaggauauugccuuagcu

SEQ ID NO: 1131515 - RNA, 19 nt, Artificial Sequence
  Description of Artificial Sequence: Synthetic oligonucleotide
agagauguaagagaucaag

SEQ ID NO: 1131516 - RNA, 19 nt, Artificial Sequence
  Description of Artificial Sequence: Synthetic oligonucleotide
agagcuaucaacucaggaa

SEQ ID NO: 1131517 - RNA, 19 nt, Artificial Sequence
  Description of Artificial Sequence: Synthetic oligonucleotide
uuucccuaagcugagagcu

SEQ ID NO: 1131518 - RNA, 19 nt, Artificial Sequence
  Description of Artificial Sequence: Synthetic oligonucleotide
aauggguuaaagaaggcaa

SEQ ID NO: 1131519 - RNA, 19 nt, Artificial Sequence
  Description of Artificial Sequence: Synthetic oligonucleotide
agcaucugccuuuagagcu

SEQ ID NO: 1131520 - RNA, 19 nt, Artificial Sequence
  Description of Artificial Sequence: Synthetic oligonucleotide
ugacagugcaaauacaaau

SEQ ID NO: 1131521 - RNA, 19 nt, Artificial Sequence
  Description of Artificial Sequence: Synthetic oligonucleotide
uaaaacuaguucuuucccu

SEQ ID NO: 1131522 - RNA, 19 nt, Artificial Sequence
  Description of Artificial Sequence: Synthetic oligonucleotide
cacaaaauucaaugaauac

SEQ ID NO: 1131523 - RNA, 19 nt, Artificial Sequence
  Description of Artificial Sequence: Synthetic oligonucleotide
aaauggguuaaagaaggca

SEQ ID NO: 1131524 - RNA, 19 nt, Artificial Sequence
  Description of Artificial Sequence: Synthetic oligonucleotide
ucuaacauguacagacucu

SEQ ID NO: 1131525 - RNA, 19 nt, Artificial Sequence
  Description of Artificial Sequence: Synthetic oligonucleotide
cuuaaauugccccauacaa

SEQ ID NO: 1131526 - RNA, 19 nt, Artificial Sequence
  Description of Artificial Sequence: Synthetic oligonucleotide
agccaauuuguuucagccc

SEQ ID NO: 1131527 - RNA, 19 nt, Artificial Sequence
  Description of Artificial Sequence: Synthetic oligonucleotide
caucaucucagagaaacgg

SEQ ID NO: 1131528 - RNA, 19 nt, Artificial Sequence
  Description of Artificial Sequence: Synthetic oligonucleotide
aaaauacacuugaacacug

SEQ ID NO: 1131529 - RNA, 19 nt, Artificial Sequence
  Description of Artificial Sequence: Synthetic oligonucleotide
augaaaucacagcaaacca

SEQ ID NO: 1131530 - RNA, 19 nt, Artificial Sequence
  Description of Artificial Sequence: Synthetic oligonucleotide
cugaaagguacacuggaag

SEQ ID NO: 1131531 - RNA, 19 nt, Artificial Sequence
  Description of Artificial Sequence: Synthetic oligonucleotide
aaaauuggacauaucuuca

SEQ ID NO: 1131532 - RNA, 19 nt, Artificial Sequence
  Description of Artificial Sequence: Synthetic oligonucleotide
uuaggugaaauauguuuac

SEQ ID NO: 1131533 - RNA, 19 nt, Artificial Sequence
  Description of Artificial Sequence: Synthetic oligonucleotide
uuugccauacugacagugc

SEQ ID NO: 1131534 - RNA, 19 nt, Artificial Sequence
  Description of Artificial Sequence: Synthetic oligonucleotide
ucuccuuuguuaaccuagg

SEQ ID NO: 1131535 - RNA, 19 nt, Artificial Sequence
  Description of Artificial Sequence: Synthetic oligonucleotide
augaauacauagucccuuc

SEQ ID NO: 1131536 - RNA, 19 nt, Artificial Sequence
  Description of Artificial Sequence: Synthetic oligonucleotide
ugcaaauacaaaucugguc

SEQ ID NO: 1131537 - RNA, 19 nt, Artificial Sequence
  Description of Artificial Sequence: Synthetic oligonucleotide
ugcauaaggauauugccuu

SEQ ID NO: 1131538 - RNA, 19 nt, Artificial Sequence
  Description of Artificial Sequence: Synthetic oligonucleotide
ugaaagugaguuuggauuu

SEQ ID NO: 1131539 - RNA, 19 nt, Artificial Sequence
  Description of Artificial Sequence: Synthetic oligonucleotide
uuaugcuuggaaucauuug

SEQ ID NO: 1131540 - RNA, 19 nt, Artificial Sequence
  Description of Artificial Sequence: Synthetic oligonucleotide
cuuuccgcaaacaacauaa

SEQ ID NO: 1131541 - RNA, 19 nt, Artificial Sequence
  Description of Artificial Sequence: Synthetic oligonucleotide
ugacaagugaucacauaca

SEQ ID NO: 1131542 - RNA, 19 nt, Artificial Sequence
  Description of Artificial Sequence: Synthetic oligonucleotide
cagccaauuuguuucagcc

SEQ ID NO: 1131543 - RNA, 19 nt, Artificial Sequence
  Description of Artificial Sequence: Synthetic oligonucleotide
ugcuucauggaauccuggg

SEQ ID NO: 1131544 - RNA, 19 nt, Artificial Sequence
  Description of Artificial Sequence: Synthetic oligonucleotide
guggaauaauucugaaagg

SEQ ID NO: 1131545 - RNA, 19 nt, Artificial Sequence
  Description of Artificial Sequence: Synthetic oligonucleotide
acauguacagacucucaag

SEQ ID NO: 1131546 - RNA, 19 nt, Artificial Sequence
  Description of Artificial Sequence: Synthetic oligonucleotide
agugaguuuggauuucuca

SEQ ID NO: 1131547 - RNA, 19 nt, Artificial Sequence
  Description of Artificial Sequence: Synthetic oligonucleotide
cauuuggaucaauacaaug

SEQ ID NO: 1131548 - RNA, 19 nt, Artificial Sequence
  Description of Artificial Sequence: Synthetic oligonucleotide
aagacuuaggugaaauaug

SEQ ID NO: 1131549 - RNA, 19 nt, Artificial Sequence
  Description of Artificial Sequence: Synthetic oligonucleotide
aucacauacaauaauguaa

SEQ ID NO: 1131550 - RNA, 19 nt, Artificial Sequence
  Description of Artificial Sequence: Synthetic oligonucleotide
aagcugaaaucaaaauagg

SEQ ID NO: 1131551 - RNA, 19 nt, Artificial Sequence
  Description of Artificial Sequence: Synthetic oligonucleotide
cauaugauccaucaucuca

SEQ ID NO: 1131552 - RNA, 19 nt, Artificial Sequence
  Description of Artificial Sequence: Synthetic oligonucleotide
uaucaacucaggaauuuuc

SEQ ID NO: 1131553 - RNA, 19 nt, Artificial Sequence
  Description of Artificial Sequence: Synthetic oligonucleotide
auaccaaauguauaggcuu

SEQ ID NO: 1131554 - RNA, 19 nt, Artificial Sequence
  Description of Artificial Sequence: Synthetic oligonucleotide
aaggagagccaagaaaucu

SEQ ID NO: 1131555 - RNA, 19 nt, Artificial Sequence
  Description of Artificial Sequence: Synthetic oligonucleotide
aaugaauacauagucccuu

SEQ ID NO: 1131556 - RNA, 19 nt, Artificial Sequence
  Description of Artificial Sequence: Synthetic oligonucleotide
cuggcgaugacaacauucc

SEQ ID NO: 1131557 - RNA, 19 nt, Artificial Sequence
  Description of Artificial Sequence: Synthetic oligonucleotide
aguuagggcauucacuagu

SEQ ID NO: 1131558 - RNA, 19 nt, Artificial Sequence
  Description of Artificial Sequence: Synthetic oligonucleotide
gagaucaagggccaaacaa

SEQ ID NO: 1131559 - RNA, 19 nt, Artificial Sequence
  Description of Artificial Sequence: Synthetic oligonucleotide
gugaucacauacaauaaug

SEQ ID NO: 1131560 - RNA, 19 nt, Artificial Sequence
  Description of Artificial Sequence: Synthetic oligonucleotide
auuucaacugcuucaugga

SEQ ID NO: 1131561 - RNA, 19 nt, Artificial Sequence
  Description of Artificial Sequence: Synthetic oligonucleotide
augaacauaaauugagguu

SEQ ID NO: 1131562 - RNA, 19 nt, Artificial Sequence
  Description of Artificial Sequence: Synthetic oligonucleotide
ugguacauuaucaacccuu

SEQ ID NO: 1131563 - RNA, 19 nt, Artificial Sequence
  Description of Artificial Sequence: Synthetic oligonucleotide
ucagguaaaucuacauccu

SEQ ID NO: 1131564 - RNA, 19 nt, Artificial Sequence
  Description of Artificial Sequence: Synthetic oligonucleotide
uagagcuaucaacucagga

SEQ ID NO: 1131565 - RNA, 19 nt, Artificial Sequence
  Description of Artificial Sequence: Synthetic oligonucleotide
aaguuauuucucugucuca

SEQ ID NO: 1131566 - RNA, 19 nt, Artificial Sequence
  Description of Artificial Sequence: Synthetic oligonucleotide
agugaucacauacaauaau

SEQ ID NO: 1131567 - RNA, 19 nt, Artificial Sequence
  Description of Artificial Sequence: Synthetic oligonucleotide
ccuuagcugacuuaaauug

SEQ ID NO: 1131568 - RNA, 19 nt, Artificial Sequence
  Description of Artificial Sequence: Synthetic oligonucleotide
ucaacccuuagugaagacc

SEQ ID NO: 1131569 - RNA, 19 nt, Artificial Sequence
  Description of Artificial Sequence: Synthetic oligonucleotide
ucuguccguucuuuuaugc

SEQ ID NO: 1131570 - RNA, 19 nt, Artificial Sequence
  Description of Artificial Sequence: Synthetic oligonucleotide
auaaacuuuaguggaauaa

SEQ ID NO: 1131571 - RNA, 19 nt, Artificial Sequence
  Description of Artificial Sequence: Synthetic oligonucleotide
agagccaagaaaucuucca

SEQ ID NO: 1131572 - RNA, 19 nt, Artificial Sequence
  Description of Artificial Sequence: Synthetic oligonucleotide
uuuaagauaucagccaauu

SEQ ID NO: 1131573 - RNA, 19 nt, Artificial Sequence
  Description of Artificial Sequence: Synthetic oligonucleotide
ggugaaauauguuuacuca

SEQ ID NO: 1131574 - RNA, 19 nt, Artificial Sequence
  Description of Artificial Sequence: Synthetic oligonucleotide
uucaugcauaaggauauug

SEQ ID NO: 1131575 - RNA, 19 nt, Artificial Sequence
  Description of Artificial Sequence: Synthetic oligonucleotide
agcaacaauguacagcuuu

SEQ ID NO: 1131576 - RNA, 19 nt, Artificial Sequence
  Description of Artificial Sequence: Synthetic oligonucleotide
cuuaggugaaauauguuua

SEQ ID NO: 1131577 - RNA, 19 nt, Artificial Sequence
  Description of Artificial Sequence: Synthetic oligonucleotide
aucagagcugcucuaucag

SEQ ID NO: 1131578 - RNA, 19 nt, Artificial Sequence
  Description of Artificial Sequence: Synthetic oligonucleotide
gccaauuuguuucagcccc

SEQ ID NO: 1131579 - RNA, 19 nt, Artificial Sequence
  Description of Artificial Sequence: Synthetic oligonucleotide
acauuccuuacuccagauc

SEQ ID NO: 1131580 - RNA, 19 nt, Artificial Sequence
  Description of Artificial Sequence: Synthetic oligonucleotide
ucgaucguaccacuuugca

SEQ ID NO: 1131581 - RNA, 19 nt, Artificial Sequence
  Description of Artificial Sequence: Synthetic oligonucleotide
cuuuagagcuaucaacuca

SEQ ID NO: 1131582 - RNA, 19 nt, Artificial Sequence
  Description of Artificial Sequence: Synthetic oligonucleotide
acaugaaaucacagcaaac

SEQ ID NO: 1131583 - RNA, 19 nt, Artificial Sequence
  Description of Artificial Sequence: Synthetic oligonucleotide
aaagguacacuggaagaau

SEQ ID NO: 1131584 - RNA, 19 nt, Artificial Sequence
  Description of Artificial Sequence: Synthetic oligonucleotide
aauugagguuuuccagcca

SEQ ID NO: 1131585 - RNA, 19 nt, Artificial Sequence
  Description of Artificial Sequence: Synthetic oligonucleotide
uuccuuacuccagauccgg

SEQ ID NO: 1131586 - RNA, 19 nt, Artificial Sequence
  Description of Artificial Sequence: Synthetic oligonucleotide
aacauuccuuacuccagau

SEQ ID NO: 1131587 - RNA, 19 nt, Artificial Sequence
  Description of Artificial Sequence: Synthetic oligonucleotide
aauguacagcuuucuucgu

SEQ ID NO: 1131588 - RNA, 19 nt, Artificial Sequence
  Description of Artificial Sequence: Synthetic oligonucleotide
uucgaucguaccacuuugc

SEQ ID NO: 1131589 - RNA, 19 nt, Artificial Sequence
  Description of Artificial Sequence: Synthetic oligonucleotide
ucugaaucauccucccagu

SEQ ID NO: 1131590 - RNA, 19 nt, Artificial Sequence
  Description of Artificial Sequence: Synthetic oligonucleotide
caugaacauaaauugaggu

SEQ ID NO: 1131591 - RNA, 19 nt, Artificial Sequence
  Description of Artificial Sequence: Synthetic oligonucleotide
cuuucccuaagcugagagc

SEQ ID NO: 1131592 - RNA, 19 nt, Artificial Sequence
  Description of Artificial Sequence: Synthetic oligonucleotide
caguuuaagauaucagcca

SEQ ID NO: 1131593 - RNA, 19 nt, Artificial Sequence
  Description of Artificial Sequence: Synthetic oligonucleotide
ccuuuguuaaccuaggcca

SEQ ID NO: 1131594 - RNA, 19 nt, Artificial Sequence
  Description of Artificial Sequence: Synthetic oligonucleotide
aggguaucaguuuaagaua

SEQ ID NO: 1131595 - RNA, 19 nt, Artificial Sequence
  Description of Artificial Sequence: Synthetic oligonucleotide
gaauccugggaaauguuca

SEQ ID NO: 1131596 - RNA, 19 nt, Artificial Sequence
  Description of Artificial Sequence: Synthetic oligonucleotide
aacuuagaaggagagccaa

SEQ ID NO: 1131597 - RNA, 19 nt, Artificial Sequence
  Description of Artificial Sequence: Synthetic oligonucleotide
auugccuuagcugacuuaa

SEQ ID NO: 1131598 - RNA, 19 nt, Artificial Sequence
  Description of Artificial Sequence: Synthetic oligonucleotide
gcaaacaacauaaaauuga

SEQ ID NO: 1131599 - RNA, 19 nt, Artificial Sequence
  Description of Artificial Sequence: Synthetic oligonucleotide
gucuaacauguacagacuc

SEQ ID NO: 1131600 - RNA, 19 nt, Artificial Sequence
  Description of Artificial Sequence: Synthetic oligonucleotide
cauaaggauauugccuuag

SEQ ID NO: 1131601 - RNA, 19 nt, Artificial Sequence
  Description of Artificial Sequence: Synthetic oligonucleotide
ugccuuagcugacuuaaau

SEQ ID NO: 1131602 - RNA, 19 nt, Artificial Sequence
  Description of Artificial Sequence: Synthetic oligonucleotide
aauaguguauuaacauuuu

SEQ ID NO: 1131603 - RNA, 19 nt, Artificial Sequence
  Description of Artificial Sequence: Synthetic oligonucleotide
caaugcaccgcgcggagag

SEQ ID NO: 1131604 - RNA, 19 nt, Artificial Sequence
  Description of Artificial Sequence: Synthetic oligonucleotide
agucccuucgaucguacca

SEQ ID NO: 1131605 - RNA, 19 nt, Artificial Sequence
  Description of Artificial Sequence: Synthetic oligonucleotide
gacuccggcguuuucugcc

SEQ ID NO: 1131606 - RNA, 19 nt, Artificial Sequence
  Description of Artificial Sequence: Synthetic oligonucleotide
uugccccauacaaugguac

SEQ ID NO: 1131607 - RNA, 19 nt, Artificial Sequence
  Description of Artificial Sequence: Synthetic oligonucleotide
aaauacaaaucuggucuaa

SEQ ID NO: 1131608 - RNA, 19 nt, Artificial Sequence
  Description of Artificial Sequence: Synthetic oligonucleotide
acuccggcguuuucugccc

SEQ ID NO: 1131609 - RNA, 19 nt, Artificial Sequence
  Description of Artificial Sequence: Synthetic oligonucleotide
cuucgaucguaccacuuug

SEQ ID NO: 1131610 - RNA, 19 nt, Artificial Sequence
  Description of Artificial Sequence: Synthetic oligonucleotide
acugacagugcaaauacaa

SEQ ID NO: 1131611 - RNA, 19 nt, Artificial Sequence
  Description of Artificial Sequence: Synthetic oligonucleotide
uuuguuaaccuaggccaug

SEQ ID NO: 1131612 - RNA, 19 nt, Artificial Sequence
  Description of Artificial Sequence: Synthetic oligonucleotide
aacugaaagugaguuugga

SEQ ID NO: 1131613 - RNA, 19 nt, Artificial Sequence
  Description of Artificial Sequence: Synthetic oligonucleotide
aagacaacugaaagugagu

SEQ ID NO: 1131614 - RNA, 19 nt, Artificial Sequence
  Description of Artificial Sequence: Synthetic oligonucleotide
augcauaaggauauugccu

SEQ ID NO: 1131615 - RNA, 19 nt, Artificial Sequence
  Description of Artificial Sequence: Synthetic oligonucleotide
cauuaucaacccuuaguga

SEQ ID NO: 1131616 - RNA, 19 nt, Artificial Sequence
  Description of Artificial Sequence: Synthetic oligonucleotide
uuugcccucuccuuuguua

SEQ ID NO: 1131617 - RNA, 19 nt, Artificial Sequence
  Description of Artificial Sequence: Synthetic oligonucleotide
cagacaacuuagaaggaga

SEQ ID NO: 1131618 - RNA, 19 nt, Artificial Sequence
  Description of Artificial Sequence: Synthetic oligonucleotide
agcaaaccagacaacuuag

SEQ ID NO: 1131619 - RNA, 19 nt, Artificial Sequence
  Description of Artificial Sequence: Synthetic oligonucleotide
gagcuaucaacucaggaau

SEQ ID NO: 1131620 - RNA, 19 nt, Artificial Sequence
  Description of Artificial Sequence: Synthetic oligonucleotide
aacacauaaguaacuguua

SEQ ID NO: 1131621 - RNA, 19 nt, Artificial Sequence
  Description of Artificial Sequence: Synthetic oligonucleotide
agguacacuggaagaaugg

SEQ ID NO: 1131622 - RNA, 19 nt, Artificial Sequence
  Description of Artificial Sequence: Synthetic oligonucleotide
guacauuaucaacccuuag

SEQ ID NO: 1131623 - RNA, 19 nt, Artificial Sequence
  Description of Artificial Sequence: Synthetic oligonucleotide
ggccaaacaauaccaaaug

SEQ ID NO: 1131624 - RNA, 19 nt, Artificial Sequence
  Description of Artificial Sequence: Synthetic oligonucleotide
ggcguuuucugcccggucg

SEQ ID NO: 1131625 - RNA, 19 nt, Artificial Sequence
  Description of Artificial Sequence: Synthetic oligonucleotide
acacugacaagugaucaca

SEQ ID NO: 1131626 - RNA, 19 nt, Artificial Sequence
  Description of Artificial Sequence: Synthetic oligonucleotide
aauugaucuguccguucuu

SEQ ID NO: 1131627 - RNA, 19 nt, Artificial Sequence
  Description of Artificial Sequence: Synthetic oligonucleotide
uuguuaaccuaggccauga

SEQ ID NO: 1131628 - RNA, 19 nt, Artificial Sequence
  Description of Artificial Sequence: Synthetic oligonucleotide
cuaagagauguaagagauc

SEQ ID NO: 1131629 - RNA, 19 nt, Artificial Sequence
  Description of Artificial Sequence: Synthetic oligonucleotide
caauaguguauuaacauuu

SEQ ID NO: 1131630 - RNA, 19 nt, Artificial Sequence
  Description of Artificial Sequence: Synthetic oligonucleotide
cacucauuugccauacuga

SEQ ID NO: 1131631 - RNA, 19 nt, Artificial Sequence
  Description of Artificial Sequence: Synthetic oligonucleotide
agacaacugaaagugaguu

SEQ ID NO: 1131632 - RNA, 19 nt, Artificial Sequence
  Description of Artificial Sequence: Synthetic oligonucleotide
uacugacagugcaaauaca

SEQ ID NO: 1131633 - RNA, 19 nt, Artificial Sequence
  Description of Artificial Sequence: Synthetic oligonucleotide
aguaagugguaaauacaug

SEQ ID NO: 1131634 - RNA, 19 nt, Artificial Sequence
  Description of Artificial Sequence: Synthetic oligonucleotide
uccguucuuuuaugcuugg

SEQ ID NO: 1131635 - RNA, 19 nt, Artificial Sequence
  Description of Artificial Sequence: Synthetic oligonucleotide
uuacucaucagagcugcuc

SEQ ID NO: 1131636 - RNA, 19 nt, Artificial Sequence
  Description of Artificial Sequence: Synthetic oligonucleotide
auggaauccugggaaaugu

SEQ ID NO: 1131637 - RNA, 19 nt, Artificial Sequence
  Description of Artificial Sequence: Synthetic oligonucleotide
cagccaauugagcuuugcc

SEQ ID NO: 1131638 - RNA, 19 nt, Artificial Sequence
  Description of Artificial Sequence: Synthetic oligonucleotide
cugaaagugaguuuggauu

SEQ ID NO: 1131639 - RNA, 19 nt, Artificial Sequence
  Description of Artificial Sequence: Synthetic oligonucleotide
auuccuuacuccagauccg

SEQ ID NO: 1131640 - RNA, 19 nt, Artificial Sequence
  Description of Artificial Sequence: Synthetic oligonucleotide
agaucaagggccaaacaau

SEQ ID NO: 1131641 - RNA, 19 nt, Artificial Sequence
  Description of Artificial Sequence: Synthetic oligonucleotide
uccaucuacuucagguaaa

SEQ ID NO: 1131642 - RNA, 19 nt, Artificial Sequence
  Description of Artificial Sequence: Synthetic oligonucleotide
aucaguugcugccuaggau

SEQ ID NO: 1131643 - RNA, 19 nt, Artificial Sequence
  Description of Artificial Sequence: Synthetic oligonucleotide
aaugcaccgcgcggagagc

SEQ ID NO: 1131644 - RNA, 19 nt, Artificial Sequence
  Description of Artificial Sequence: Synthetic oligonucleotide
caacccuuagugaagaccu

SEQ ID NO: 1131645 - RNA, 19 nt, Artificial Sequence
  Description of Artificial Sequence: Synthetic oligonucleotide
aucuggucuaacauguaca

SEQ ID NO: 1131646 - RNA, 19 nt, Artificial Sequence
  Description of Artificial Sequence: Synthetic oligonucleotide
cuaaguuagggcauucacu

SEQ ID NO: 1131647 - RNA, 19 nt, Artificial Sequence
  Description of Artificial Sequence: Synthetic oligonucleotide
agucgacuccucuccggcg

SEQ ID NO: 1131648 - RNA, 19 nt, Artificial Sequence
  Description of Artificial Sequence: Synthetic oligonucleotide
caucagagcugcucuauca

SEQ ID NO: 1131649 - RNA, 19 nt, Artificial Sequence
  Description of Artificial Sequence: Synthetic oligonucleotide
ugccccauacaaugguaca

SEQ ID NO: 1131650 - RNA, 19 nt, Artificial Sequence
  Description of Artificial Sequence: Synthetic oligonucleotide
gagagccaagaaaucuucc

SEQ ID NO: 1131651 - RNA, 19 nt, Artificial Sequence
  Description of Artificial Sequence: Synthetic oligonucleotide
uccuuacuccagauccggc

SEQ ID NO: 1131652 - RNA, 19 nt, Artificial Sequence
  Description of Artificial Sequence: Synthetic oligonucleotide
uuuccacucauuugccaua

SEQ ID NO: 1131653 - RNA, 19 nt, Artificial Sequence
  Description of Artificial Sequence: Synthetic oligonucleotide
cuccuuuguuaaccuaggc

SEQ ID NO: 1131654 - RNA, 19 nt, Artificial Sequence
  Description of Artificial Sequence: Synthetic oligonucleotide
ugccauacugacagugcaa

SEQ ID NO: 1131655 - RNA, 19 nt, Artificial Sequence
  Description of Artificial Sequence: Synthetic oligonucleotide
aucuguccguucuuuuaug

SEQ ID NO: 1131656 - RNA, 19 nt, Artificial Sequence
  Description of Artificial Sequence: Synthetic oligonucleotide
aguccauggucuaggaucu

SEQ ID NO: 1131657 - RNA, 19 nt, Artificial Sequence
  Description of Artificial Sequence: Synthetic oligonucleotide
uccaauuguugaaguccac

SEQ ID NO: 1131658 - RNA, 19 nt, Artificial Sequence
  Description of Artificial Sequence: Synthetic oligonucleotide
caugauuggccagauucuc

SEQ ID NO: 1131659 - RNA, 19 nt, Artificial Sequence
  Description of Artificial Sequence: Synthetic oligonucleotide
gaucaagggccaaacaaua

SEQ ID NO: 1131660 - RNA, 19 nt, Artificial Sequence
  Description of Artificial Sequence: Synthetic oligonucleotide
acucucaagcaacaaugua

SEQ ID NO: 1131661 - RNA, 19 nt, Artificial Sequence
  Description of Artificial Sequence: Synthetic oligonucleotide
gccagauucuccuuuccgc

SEQ ID NO: 1131662 - RNA, 19 nt, Artificial Sequence
  Description of Artificial Sequence: Synthetic oligonucleotide
cacuugaacacugacaagu

SEQ ID NO: 1131663 - RNA, 19 nt, Artificial Sequence
  Description of Artificial Sequence: Synthetic oligonucleotide
cauacugacagugcaaaua

SEQ ID NO: 1131664 - RNA, 19 nt, Artificial Sequence
  Description of Artificial Sequence: Synthetic oligonucleotide
cauucacuaguuuuagcua

SEQ ID NO: 1131665 - RNA, 19 nt, Artificial Sequence
  Description of Artificial Sequence: Synthetic oligonucleotide
cuaacacauaaguaacugu

SEQ ID NO: 1131666 - RNA, 19 nt, Artificial Sequence
  Description of Artificial Sequence: Synthetic oligonucleotide
ccuaacacauaaguaacug

SEQ ID NO: 1131667 - RNA, 19 nt, Artificial Sequence
  Description of Artificial Sequence: Synthetic oligonucleotide
augguacauuaucaacccu

SEQ ID NO: 1131668 - RNA, 19 nt, Artificial Sequence
  Description of Artificial Sequence: Synthetic oligonucleotide
uggcgaugacaacauuccu

SEQ ID NO: 1131669 - RNA, 19 nt, Artificial Sequence
  Description of Artificial Sequence: Synthetic oligonucleotide
ugacuuaaauugccccaua

SEQ ID NO: 1131670 - RNA, 19 nt, Artificial Sequence
  Description of Artificial Sequence: Synthetic oligonucleotide
uggccagauucuccuuucc

SEQ ID NO: 1131671 - RNA, 19 nt, Artificial Sequence
  Description of Artificial Sequence: Synthetic oligonucleotide
cagucgacuccucuccggc

SEQ ID NO: 1131672 - RNA, 19 nt, Artificial Sequence
  Description of Artificial Sequence: Synthetic oligonucleotide
caacuuagaaggagagcca

SEQ ID NO: 1131673 - RNA, 19 nt, Artificial Sequence
  Description of Artificial Sequence: Synthetic oligonucleotide
agaaacggucaaaauugga

SEQ ID NO: 1131674 - RNA, 19 nt, Artificial Sequence
  Description of Artificial Sequence: Synthetic oligonucleotide
guccguucuuuuaugcuug

SEQ ID NO: 1131675 - RNA, 19 nt, Artificial Sequence
  Description of Artificial Sequence: Synthetic oligonucleotide
uauugccuuagcugacuua

SEQ ID NO: 1131676 - RNA, 19 nt, Artificial Sequence
  Description of Artificial Sequence: Synthetic oligonucleotide
gcugacuuaaauugcccca

SEQ ID NO: 1131677 - RNA, 19 nt, Artificial Sequence
  Description of Artificial Sequence: Synthetic oligonucleotide
augcuuggaaucauuugga

SEQ ID NO: 1131678 - RNA, 19 nt, Artificial Sequence
  Description of Artificial Sequence: Synthetic oligonucleotide
cugaaucauccucccaguc

SEQ ID NO: 1131679 - RNA, 19 nt, Artificial Sequence
  Description of Artificial Sequence: Synthetic oligonucleotide
auagucccuucgaucguac

SEQ ID NO: 1131680 - RNA, 19 nt, Artificial Sequence
  Description of Artificial Sequence: Synthetic oligonucleotide
ucacuaguuuuagcuaaaa

SEQ ID NO: 1131681 - RNA, 19 nt, Artificial Sequence
  Description of Artificial Sequence: Synthetic oligonucleotide
auauugccuuagcugacuu

SEQ ID NO: 1131682 - RNA, 19 nt, Artificial Sequence
  Description of Artificial Sequence: Synthetic oligonucleotide
cugacagugcaaauacaaa

SEQ ID NO: 1131683 - RNA, 19 nt, Artificial Sequence
  Description of Artificial Sequence: Synthetic oligonucleotide
augcaccgcgcggagagcg

SEQ ID NO: 1131684 - RNA, 19 nt, Artificial Sequence
  Description of Artificial Sequence: Synthetic oligonucleotide
uguuaaccuaggccaugau

SEQ ID NO: 1131685 - RNA, 19 nt, Artificial Sequence
  Description of Artificial Sequence: Synthetic oligonucleotide
uuccaguaagugguaaaua

SEQ ID NO: 1131686 - RNA, 19 nt, Artificial Sequence
  Description of Artificial Sequence: Synthetic oligonucleotide
uccauggucuaggaucuaa

SEQ ID NO: 1131687 - RNA, 19 nt, Artificial Sequence
  Description of Artificial Sequence: Synthetic oligonucleotide
aucuaaguuagggcauuca

SEQ ID NO: 1131688 - RNA, 19 nt, Artificial Sequence
  Description of Artificial Sequence: Synthetic oligonucleotide
gaucuguccguucuuuuau

SEQ ID NO: 1131689 - RNA, 19 nt, Artificial Sequence
  Description of Artificial Sequence: Synthetic oligonucleotide
cuaguucuuucccuaagcu

SEQ ID NO: 1131690 - RNA, 19 nt, Artificial Sequence
  Description of Artificial Sequence: Synthetic oligonucleotide
cuaggccaugauuggccag

SEQ ID NO: 1131691 - RNA, 19 nt, Artificial Sequence
  Description of Artificial Sequence: Synthetic oligonucleotide
uccuuuccgcaaacaacau

SEQ ID NO: 1131692 - RNA, 19 nt, Artificial Sequence
  Description of Artificial Sequence: Synthetic oligonucleotide
auugaucuguccguucuuu

SEQ ID NO: 1131693 - RNA, 19 nt, Artificial Sequence
  Description of Artificial Sequence: Synthetic oligonucleotide
uccggcguuuucugcccgg

SEQ ID NO: 1131694 - RNA, 19 nt, Artificial Sequence
  Description of Artificial Sequence: Synthetic oligonucleotide
uagucccuucgaucguacc

SEQ ID NO: 1131695 - RNA, 19 nt, Artificial Sequence
  Description of Artificial Sequence: Synthetic oligonucleotide
uuucuucguccuccaugcu

SEQ ID NO: 1131696 - RNA, 19 nt, Artificial Sequence
  Description of Artificial Sequence: Synthetic oligonucleotide
gcugccuaggauuucaacu

SEQ ID NO: 1131697 - RNA, 19 nt, Artificial Sequence
  Description of Artificial Sequence: Synthetic oligonucleotide
acaagugaucacauacaau

SEQ ID NO: 1131698 - RNA, 19 nt, Artificial Sequence
  Description of Artificial Sequence: Synthetic oligonucleotide
cuaggaucuaaaacuaguu

SEQ ID NO: 1131699 - RNA, 19 nt, Artificial Sequence
  Description of Artificial Sequence: Synthetic oligonucleotide
aagagauguaagagaucaa

SEQ ID NO: 1131700 - RNA, 19 nt, Artificial Sequence
  Description of Artificial Sequence: Synthetic oligonucleotide
gcgaugacaacauuccuua

SEQ ID NO: 1131701 - RNA, 19 nt, Artificial Sequence
  Description of Artificial Sequence: Synthetic oligonucleotide
gagcuuccuaacacauaag

SEQ ID NO: 1131702 - RNA, 19 nt, Artificial Sequence
  Description of Artificial Sequence: Synthetic oligonucleotide
auggguuaaagaaggcaaa

SEQ ID NO: 1131703 - RNA, 19 nt, Artificial Sequence
  Description of Artificial Sequence: Synthetic oligonucleotide
aucguaccacuuugcagaa

SEQ ID NO: 1131704 - RNA, 19 nt, Artificial Sequence
  Description of Artificial Sequence: Synthetic oligonucleotide
gucccuucgaucguaccac

SEQ ID NO: 1131705 - RNA, 19 nt, Artificial Sequence
  Description of Artificial Sequence: Synthetic oligonucleotide
ggaagaauggcaggguauc

SEQ ID NO: 1131706 - RNA, 19 nt, Artificial Sequence
  Description of Artificial Sequence: Synthetic oligonucleotide
gcuaagagauguaagagau

SEQ ID NO: 1131707 - RNA, 19 nt, Artificial Sequence
  Description of Artificial Sequence: Synthetic oligonucleotide
gauauugccuuagcugacu

SEQ ID NO: 1131708 - RNA, 19 nt, Artificial Sequence
  Description of Artificial Sequence: Synthetic oligonucleotide
agggcauucacuaguuuua

SEQ ID NO: 1131709 - RNA, 19 nt, Artificial Sequence
  Description of Artificial Sequence: Synthetic oligonucleotide
gccaauugagcuuugcccu

SEQ ID NO: 1131710 - RNA, 19 nt, Artificial Sequence
  Description of Artificial Sequence: Synthetic oligonucleotide
guuaaccuaggccaugauu

SEQ ID NO: 1131711 - RNA, 19 nt, Artificial Sequence
  Description of Artificial Sequence: Synthetic oligonucleotide
gacauaucuucaucugaau

SEQ ID NO: 1131712 - RNA, 19 nt, Artificial Sequence
  Description of Artificial Sequence: Synthetic oligonucleotide
uggaggaaaaggggcgcga

SEQ ID NO: 1131713 - RNA, 19 nt, Artificial Sequence
  Description of Artificial Sequence: Synthetic oligonucleotide
aucagccaauuuguuucag

SEQ ID NO: 1131714 - RNA, 19 nt, Artificial Sequence
  Description of Artificial Sequence: Synthetic oligonucleotide
uugccuuagcugacuuaaa

SEQ ID NO: 1131715 - RNA, 19 nt, Artificial Sequence
  Description of Artificial Sequence: Synthetic oligonucleotide
ccuuuagagcuaucaacuc

SEQ ID NO: 1131716 - RNA, 19 nt, Artificial Sequence
  Description of Artificial Sequence: Synthetic oligonucleotide
accaucuaaguuagggcau

SEQ ID NO: 1131717 - RNA, 19 nt, Artificial Sequence
  Description of Artificial Sequence: Synthetic oligonucleotide
aggagagccaagaaaucuu

SEQ ID NO: 1131718 - RNA, 19 nt, Artificial Sequence
  Description of Artificial Sequence: Synthetic oligonucleotide
accacccauaugauccauc

SEQ ID NO: 1131719 - RNA, 19 nt, Artificial Sequence
  Description of Artificial Sequence: Synthetic oligonucleotide
gacaacugaaagugaguuu

SEQ ID NO: 1131720 - RNA, 19 nt, Artificial Sequence
  Description of Artificial Sequence: Synthetic oligonucleotide
gacucucaagcaacaaugu

SEQ ID NO: 1131721 - RNA, 19 nt, Artificial Sequence
  Description of Artificial Sequence: Synthetic oligonucleotide
ucccuucgaucguaccacu

SEQ ID NO: 1131722 - RNA, 19 nt, Artificial Sequence
  Description of Artificial Sequence: Synthetic oligonucleotide
uucccuaagcugagagcuu

SEQ ID NO: 1131723 - RNA, 19 nt, Artificial Sequence
  Description of Artificial Sequence: Synthetic oligonucleotide
uucuuucccuaagcugaga

SEQ ID NO: 1131724 - RNA, 19 nt, Artificial Sequence
  Description of Artificial Sequence: Synthetic oligonucleotide
cuuuguuaaccuaggccau

SEQ ID NO: 1131725 - RNA, 19 nt, Artificial Sequence
  Description of Artificial Sequence: Synthetic oligonucleotide
ggaggaaaaggggcgcgag

SEQ ID NO: 1131726 - RNA, 19 nt, Artificial Sequence
  Description of Artificial Sequence: Synthetic oligonucleotide
acagacucucaagcaacaa

SEQ ID NO: 1131727 - RNA, 19 nt, Artificial Sequence
  Description of Artificial Sequence: Synthetic oligonucleotide
cuucguccuccaugcuaag

SEQ ID NO: 1131728 - RNA, 19 nt, Artificial Sequence
  Description of Artificial Sequence: Synthetic oligonucleotide
gucucaaaauccuggcgau

SEQ ID NO: 1131729 - RNA, 19 nt, Artificial Sequence
  Description of Artificial Sequence: Synthetic oligonucleotide
uggaaucauuuggaucaau

SEQ ID NO: 1131730 - RNA, 19 nt, Artificial Sequence
  Description of Artificial Sequence: Synthetic oligonucleotide
cucaggaauuuucucaauu

SEQ ID NO: 1131731 - RNA, 19 nt, Artificial Sequence
  Description of Artificial Sequence: Synthetic oligonucleotide
cagauucuccuuuccgcaa

SEQ ID NO: 1131732 - RNA, 19 nt, Artificial Sequence
  Description of Artificial Sequence: Synthetic oligonucleotide
gguacauuaucaacccuua

SEQ ID NO: 1131733 - RNA, 19 nt, Artificial Sequence
  Description of Artificial Sequence: Synthetic oligonucleotide
auugccccauacaauggua

SEQ ID NO: 1131734 - RNA, 19 nt, Artificial Sequence
  Description of Artificial Sequence: Synthetic oligonucleotide
gaacauaaauugagguuuu

SEQ ID NO: 1131735 - RNA, 19 nt, Artificial Sequence
  Description of Artificial Sequence: Synthetic oligonucleotide
ccacccauaugauccauca

SEQ ID NO: 1131736 - RNA, 19 nt, Artificial Sequence
  Description of Artificial Sequence: Synthetic oligonucleotide
ccagucgacuccucuccgg

SEQ ID NO: 1131737 - RNA, 19 nt, Artificial Sequence
  Description of Artificial Sequence: Synthetic oligonucleotide
cccauaugauccaucaucu

SEQ ID NO: 1131738 - RNA, 19 nt, Artificial Sequence
  Description of Artificial Sequence: Synthetic oligonucleotide
cuccggcguuuucugcccg

SEQ ID NO: 1131739 - RNA, 19 nt, Artificial Sequence
  Description of Artificial Sequence: Synthetic oligonucleotide
ccgcaaacaacauaaaauu

SEQ ID NO: 1131740 - RNA, 19 nt, Artificial Sequence
  Description of Artificial Sequence: Synthetic oligonucleotide
ggugggcgggccucacugg

SEQ ID NO: 1131741 - RNA, 19 nt, Artificial Sequence
  Description of Artificial Sequence: Synthetic oligonucleotide
gccagucgacuccucuccg

SEQ ID NO: 1131742 - RNA, 19 nt, Artificial Sequence
  Description of Artificial Sequence: Synthetic oligonucleotide
gcagcgacgggcucgaccu

SEQ ID NO: 1131743 - RNA, 19 nt, Artificial Sequence
  Description of Artificial Sequence: Synthetic oligonucleotide
ggguaucaguuuaagauau

SEQ ID NO: 1131744 - RNA, 19 nt, Artificial Sequence
  Description of Artificial Sequence: Synthetic oligonucleotide
cuguccguucuuuuaugcu

SEQ ID NO: 1131745 - RNA, 19 nt, Artificial Sequence
  Description of Artificial Sequence: Synthetic oligonucleotide
cuggucuaacauguacaga

SEQ ID NO: 1131746 - RNA, 19 nt, Artificial Sequence
  Description of Artificial Sequence: Synthetic oligonucleotide
ccauaugauccaucaucuc

SEQ ID NO: 1131747 - RNA, 19 nt, Artificial Sequence
  Description of Artificial Sequence: Synthetic oligonucleotide
guaccacuuugcagaagca

SEQ ID NO: 1131748 - RNA, 19 nt, Artificial Sequence
  Description of Artificial Sequence: Synthetic oligonucleotide
acaaugcaccgcgcggaga

SEQ ID NO: 1131749 - RNA, 19 nt, Artificial Sequence
  Description of Artificial Sequence: Synthetic oligonucleotide
aacccuuagugaagaccuu

SEQ ID NO: 1131750 - RNA, 19 nt, Artificial Sequence
  Description of Artificial Sequence: Synthetic oligonucleotide
ccaagacaacugaaaguga

SEQ ID NO: 1131751 - RNA, 19 nt, Artificial Sequence
  Description of Artificial Sequence: Synthetic oligonucleotide
aacgggugggcgggccuca

SEQ ID NO: 1131752 - RNA, 19 nt, Artificial Sequence
  Description of Artificial Sequence: Synthetic oligonucleotide
cauagucccuucgaucgua

SEQ ID NO: 1131753 - RNA, 19 nt, Artificial Sequence
  Description of Artificial Sequence: Synthetic oligonucleotide
guaagagaucaagggccaa

SEQ ID NO: 1131754 - RNA, 19 nt, Artificial Sequence
  Description of Artificial Sequence: Synthetic oligonucleotide
cugacuuaaauugccccau

SEQ ID NO: 1131755 - RNA, 19 nt, Artificial Sequence
  Description of Artificial Sequence: Synthetic oligonucleotide
ccaauaguguauuaacauu

SEQ ID NO: 1131756 - RNA, 19 nt, Artificial Sequence
  Description of Artificial Sequence: Synthetic oligonucleotide
gcaaaccagacaacuuaga

SEQ ID NO: 1131757 - RNA, 19 nt, Artificial Sequence
  Description of Artificial Sequence: Synthetic oligonucleotide
ggccaggcgaacggguggg

SEQ ID NO: 1131758 - RNA, 19 nt, Artificial Sequence
  Description of Artificial Sequence: Synthetic oligonucleotide
gaacgggugggcgggccuc

SEQ ID NO: 1131759 - RNA, 19 nt, Artificial Sequence
  Description of Artificial Sequence: Synthetic oligonucleotide
gggccaaacaauaccaaau

SEQ ID NO: 1131760 - RNA, 19 nt, Artificial Sequence
  Description of Artificial Sequence: Synthetic oligonucleotide
cacucagccaauugagcuu

SEQ ID NO: 1131761 - RNA, 19 nt, Artificial Sequence
  Description of Artificial Sequence: Synthetic oligonucleotide
cacugacaagugaucacau

SEQ ID NO: 1131762 - RNA, 19 nt, Artificial Sequence
  Description of Artificial Sequence: Synthetic oligonucleotide
gccuuagcugacuuaaauu

SEQ ID NO: 1131763 - RNA, 19 nt, Artificial Sequence
  Description of Artificial Sequence: Synthetic oligonucleotide
aguccacacucagccaauu

SEQ ID NO: 1131764 - RNA, 19 nt, Artificial Sequence
  Description of Artificial Sequence: Synthetic oligonucleotide
cuaucaacucaggaauuuu

SEQ ID NO: 1131765 - RNA, 19 nt, Artificial Sequence
  Description of Artificial Sequence: Synthetic oligonucleotide
gcauaaggauauugccuua

SEQ ID NO: 1131766 - RNA, 19 nt, Artificial Sequence
  Description of Artificial Sequence: Synthetic oligonucleotide
uucugcccggucgcagccu

SEQ ID NO: 1131767 - RNA, 19 nt, Artificial Sequence
  Description of Artificial Sequence: Synthetic oligonucleotide
cccauacaaugguacauua

SEQ ID NO: 1131768 - RNA, 19 nt, Artificial Sequence
  Description of Artificial Sequence: Synthetic oligonucleotide
ggucuaacauguacagacu

SEQ ID NO: 1131769 - RNA, 19 nt, Artificial Sequence
  Description of Artificial Sequence: Synthetic oligonucleotide
gacuccucuccggcggcga

SEQ ID NO: 1131770 - RNA, 19 nt, Artificial Sequence
  Description of Artificial Sequence: Synthetic oligonucleotide
gcggagagcggcucccuca

SEQ ID NO: 1131771 - RNA, 19 nt, Artificial Sequence
  Description of Artificial Sequence: Synthetic oligonucleotide
ccaugauuggccagauucu

SEQ ID NO: 1131772 - RNA, 19 nt, Artificial Sequence
  Description of Artificial Sequence: Synthetic oligonucleotide
gggcucgaccucgaugccc

SEQ ID NO: 1131773 - RNA, 19 nt, Artificial Sequence
  Description of Artificial Sequence: Synthetic oligonucleotide
ggcgaugacaacauuccuu

SEQ ID NO: 1131774 - RNA, 19 nt, Artificial Sequence
  Description of Artificial Sequence: Synthetic oligonucleotide
ccuuagugaagaccuuaaa

SEQ ID NO: 1131775 - RNA, 19 nt, Artificial Sequence
  Description of Artificial Sequence: Synthetic oligonucleotide
gcgggccucacuggggcgg

SEQ ID NO: 1131776 - RNA, 19 nt, Artificial Sequence
  Description of Artificial Sequence: Synthetic oligonucleotide
gcuaucaacucaggaauuu

SEQ ID NO: 1131777 - RNA, 19 nt, Artificial Sequence
  Description of Artificial Sequence: Synthetic oligonucleotide
cauuugccauacugacagu

SEQ ID NO: 1131778 - RNA, 19 nt, Artificial Sequence
  Description of Artificial Sequence: Synthetic oligonucleotide
acgggugggcgggccucac

SEQ ID NO: 1131779 - RNA, 19 nt, Artificial Sequence
  Description of Artificial Sequence: Synthetic oligonucleotide
ccauacaaugguacauuau

SEQ ID NO: 1131780 - RNA, 19 nt, Artificial Sequence
  Description of Artificial Sequence: Synthetic oligonucleotide
ccuuuccgcaaacaacaua

SEQ ID NO: 1131781 - RNA, 19 nt, Artificial Sequence
  Description of Artificial Sequence: Synthetic oligonucleotide
ugcccggucgcagccucuu

SEQ ID NO: 1131782 - RNA, 19 nt, Artificial Sequence
  Description of Artificial Sequence: Synthetic oligonucleotide
cgacuccggcguuuucugc

SEQ ID NO: 1131783 - RNA, 19 nt, Artificial Sequence
  Description of Artificial Sequence: Synthetic oligonucleotide
cacccauaugauccaucau

SEQ ID NO: 1131784 - RNA, 19 nt, Artificial Sequence
  Description of Artificial Sequence: Synthetic oligonucleotide
gcggcgggccagucgacuc

SEQ ID NO: 1131785 - RNA, 19 nt, Artificial Sequence
  Description of Artificial Sequence: Synthetic oligonucleotide
gcaccgcgcggagagcggc

SEQ ID NO: 1131786 - RNA, 19 nt, Artificial Sequence
  Description of Artificial Sequence: Synthetic oligonucleotide
ccuaggauuucaacugcuu

SEQ ID NO: 1131787 - RNA, 19 nt, Artificial Sequence
  Description of Artificial Sequence: Synthetic oligonucleotide
caucugccuuuagagcuau

SEQ ID NO: 1131788 - RNA, 19 nt, Artificial Sequence
  Description of Artificial Sequence: Synthetic oligonucleotide
gcgaacgggugggcgggcc

SEQ ID NO: 1131789 - RNA, 19 nt, Artificial Sequence
  Description of Artificial Sequence: Synthetic oligonucleotide
ccucuccuuuguuaaccua

SEQ ID NO: 1131790 - RNA, 19 nt, Artificial Sequence
  Description of Artificial Sequence: Synthetic oligonucleotide
cccucuccuuuguuaaccu

SEQ ID NO: 1131791 - RNA, 19 nt, Artificial Sequence
  Description of Artificial Sequence: Synthetic oligonucleotide
cggucgcagccucuucuug

SEQ ID NO: 1131792 - RNA, 19 nt, Artificial Sequence
  Description of Artificial Sequence: Synthetic oligonucleotide
gccaggcgaacgggugggc

SEQ ID NO: 1131793 - RNA, 19 nt, Artificial Sequence
  Description of Artificial Sequence: Synthetic oligonucleotide
guccauggucuaggaucua

SEQ ID NO: 1131794 - RNA, 19 nt, Artificial Sequence
  Description of Artificial Sequence: Synthetic oligonucleotide
gcgacggcagcgacgggcu

SEQ ID NO: 1131795 - RNA, 19 nt, Artificial Sequence
  Description of Artificial Sequence: Synthetic oligonucleotide
cgggcucgaccucgaugcc

SEQ ID NO: 1131796 - RNA, 19 nt, Artificial Sequence
  Description of Artificial Sequence: Synthetic oligonucleotide
caccgcgcggagagcggcu

SEQ ID NO: 1131797 - RNA, 19 nt, Artificial Sequence
  Description of Artificial Sequence: Synthetic oligonucleotide
caccacccauaugauccau

SEQ ID NO: 1131798 - RNA, 19 nt, Artificial Sequence
  Description of Artificial Sequence: Synthetic oligonucleotide
ccaucuaaguuagggcauu

SEQ ID NO: 1131799 - RNA, 19 nt, Artificial Sequence
  Description of Artificial Sequence: Synthetic oligonucleotide
ccccauacaaugguacauu

SEQ ID NO: 1131800 - RNA, 19 nt, Artificial Sequence
  Description of Artificial Sequence: Synthetic oligonucleotide
gcccggucgcagccucuuc

SEQ ID NO: 1131801 - RNA, 19 nt, Artificial Sequence
  Description of Artificial Sequence: Synthetic oligonucleotide
cggcguuuucugcccgguc

SEQ ID NO: 1131802 - RNA, 19 nt, Artificial Sequence
  Description of Artificial Sequence: Synthetic oligonucleotide
cugcccggucgcagccucu

SEQ ID NO: 1131803 - RNA, 19 nt, Artificial Sequence
  Description of Artificial Sequence: Synthetic oligonucleotide
ggcgggccagucgacuccu

SEQ ID NO: 1131804 - RNA, 19 nt, Artificial Sequence
  Description of Artificial Sequence: Synthetic oligonucleotide
gcgacgggcucgaccucga

SEQ ID NO: 1131805 - RNA, 19 nt, Artificial Sequence
  Description of Artificial Sequence: Synthetic oligonucleotide
cccuucgaucguaccacuu

SEQ ID NO: 1131806 - RNA, 19 nt, Artificial Sequence
  Description of Artificial Sequence: Synthetic oligonucleotide
cgggccucacuggggcggc

SEQ ID NO: 1131807 - RNA, 19 nt, Artificial Sequence
  Description of Artificial Sequence: Synthetic oligonucleotide
ccggucgcagccucuucuu

SEQ ID NO: 1131808 - RNA, 19 nt, Artificial Sequence
  Description of Artificial Sequence: Synthetic oligonucleotide
cgaacgggugggcgggccu

SEQ ID NO: 1131809 - RNA, 19 nt, Artificial Sequence
  Description of Artificial Sequence: Synthetic oligonucleotide
gcgggccagucgacuccuc

SEQ ID NO: 1131810 - RNA, 19 nt, Artificial Sequence
  Description of Artificial Sequence: Synthetic oligonucleotide
ccggcguuuucugcccggu

SEQ ID NO: 1131811 - RNA, 19 nt, Artificial Sequence
  Description of Artificial Sequence: Synthetic oligonucleotide
gcggcgacuccggcguuuu

SEQ ID NO: 1131812 - RNA, 19 nt, Artificial Sequence
  Description of Artificial Sequence: Synthetic oligonucleotide
cggcgacuccggcguuuuc

SEQ ID NO: 1131813 - RNA, 19 nt, Artificial Sequence
  Description of Artificial Sequence: Synthetic oligonucleotide
cgacgggcucgaccucgau

SEQ ID NO: 1131814 - RNA, 19 nt, Artificial Sequence
  Description of Artificial Sequence: Synthetic oligonucleotide
uguacuaccucaaagagcu

SEQ ID NO: 1131815 - RNA, 19 nt, Artificial Sequence
  Description of Artificial Sequence: Synthetic oligonucleotide
accauaaugguucggaugc

SEQ ID NO: 1131816 - RNA, 19 nt, Artificial Sequence
  Description of Artificial Sequence: Synthetic oligonucleotide
auugauaguauagagaauc

SEQ ID NO: 1131817 - RNA, 19 nt, Artificial Sequence
  Description of Artificial Sequence: Synthetic oligonucleotide
uccccugucaccauaaugg

SEQ ID NO: 1131818 - RNA, 19 nt, Artificial Sequence
  Description of Artificial Sequence: Synthetic oligonucleotide
gauaguauagagaaucagg

SEQ ID NO: 1131819 - RNA, 19 nt, Artificial Sequence
  Description of Artificial Sequence: Synthetic oligonucleotide
aguauagagaaucaggacu

SEQ ID NO: 1131820 - RNA, 19 nt, Artificial Sequence
  Description of Artificial Sequence: Synthetic oligonucleotide
aacuugaaggaacuguccg

SEQ ID NO: 1131821 - RNA, 19 nt, Artificial Sequence
  Description of Artificial Sequence: Synthetic oligonucleotide
gauggcaagaacugcaggg

SEQ ID NO: 1131822 - RNA, 19 nt, Artificial Sequence
  Description of Artificial Sequence: Synthetic oligonucleotide
ucaguagugccccuggugg

SEQ ID NO: 1131823 - RNA, 19 nt, Artificial Sequence
  Description of Artificial Sequence: Synthetic oligonucleotide
cuagauaaagagaagacca

SEQ ID NO: 1131824 - RNA, 19 nt, Artificial Sequence
  Description of Artificial Sequence: Synthetic oligonucleotide
uguucagaggcacaaacca

SEQ ID NO: 1131825 - RNA, 19 nt, Artificial Sequence
  Description of Artificial Sequence: Synthetic oligonucleotide
acaacagccaacuuaggag

SEQ ID NO: 1131826 - RNA, 19 nt, Artificial Sequence
  Description of Artificial Sequence: Synthetic oligonucleotide
uugaagacgcugaaagacg

SEQ ID NO: 1131827 - RNA, 19 nt, Artificial Sequence
  Description of Artificial Sequence: Synthetic oligonucleotide
agggagagaccacugaagc

SEQ ID NO: 1131828 - RNA, 19 nt, Artificial Sequence
  Description of Artificial Sequence: Synthetic oligonucleotide
guuuguauaacuggagucg

SEQ ID NO: 1131829 - RNA, 19 nt, Artificial Sequence
  Description of Artificial Sequence: Synthetic oligonucleotide
aguacuguagcuucugcag

SEQ ID NO: 1131830 - RNA, 19 nt, Artificial Sequence
  Description of Artificial Sequence: Synthetic oligonucleotide
cuggaagcuagauaaagag

SEQ ID NO: 1131831 - RNA, 19 nt, Artificial Sequence
  Description of Artificial Sequence: Synthetic oligonucleotide
ugguauugauaguauagag

SEQ ID NO: 1131832 - RNA, 19 nt, Artificial Sequence
  Description of Artificial Sequence: Synthetic oligonucleotide
uuuuaggccggacccaccg

SEQ ID NO: 1131833 - RNA, 19 nt, Artificial Sequence
  Description of Artificial Sequence: Synthetic oligonucleotide
aaugugacaacagccaacu

SEQ ID NO: 1131834 - RNA, 19 nt, Artificial Sequence
  Description of Artificial Sequence: Synthetic oligonucleotide
cuaaugucagugcagggcc

SEQ ID NO: 1131835 - RNA, 19 nt, Artificial Sequence
  Description of Artificial Sequence: Synthetic oligonucleotide
cacuguucuguucagaggc

SEQ ID NO: 1131836 - RNA, 19 nt, Artificial Sequence
  Description of Artificial Sequence: Synthetic oligonucleotide
cucaugagcacugcgaucg

SEQ ID NO: 1131837 - RNA, 19 nt, Artificial Sequence
  Description of Artificial Sequence: Synthetic oligonucleotide
uggaugauaaccaggugcu

SEQ ID NO: 1131838 - RNA, 19 nt, Artificial Sequence
  Description of Artificial Sequence: Synthetic oligonucleotide
ucuuggagacccuuuuagg

SEQ ID NO: 1131839 - RNA, 19 nt, Artificial Sequence
  Description of Artificial Sequence: Synthetic oligonucleotide
auaguauagagaaucagga

SEQ ID NO: 1131840 - RNA, 19 nt, Artificial Sequence
  Description of Artificial Sequence: Synthetic oligonucleotide
gguacuggaagcuagauaa

SEQ ID NO: 1131841 - RNA, 19 nt, Artificial Sequence
  Description of Artificial Sequence: Synthetic oligonucleotide
uugauaguauagagaauca

SEQ ID NO: 1131842 - RNA, 19 nt, Artificial Sequence
  Description of Artificial Sequence: Synthetic oligonucleotide
acuuaggagaugugggagg

SEQ ID NO: 1131843 - RNA, 19 nt, Artificial Sequence
  Description of Artificial Sequence: Synthetic oligonucleotide
aacuuaggagaugugggag

SEQ ID NO: 1131844 - RNA, 19 nt, Artificial Sequence
  Description of Artificial Sequence: Synthetic oligonucleotide
accugcaacagcaaacugc

SEQ ID NO: 1131845 - RNA, 19 nt, Artificial Sequence
  Description of Artificial Sequence: Synthetic oligonucleotide
ugauaguauagagaaucag

SEQ ID NO: 1131846 - RNA, 19 nt, Artificial Sequence
  Description of Artificial Sequence: Synthetic oligonucleotide
aguacaggcacacucagua

SEQ ID NO: 1131847 - RNA, 19 nt, Artificial Sequence
  Description of Artificial Sequence: Synthetic oligonucleotide
uuagccccauucaugacug

SEQ ID NO: 1131848 - RNA, 19 nt, Artificial Sequence
  Description of Artificial Sequence: Synthetic oligonucleotide
uauaacuggagucgucugu

SEQ ID NO: 1131849 - RNA, 19 nt, Artificial Sequence
  Description of Artificial Sequence: Synthetic oligonucleotide
uguugagcggccucaaggc

SEQ ID NO: 1131850 - RNA, 19 nt, Artificial Sequence
  Description of Artificial Sequence: Synthetic oligonucleotide
cucaauacuggccaugcug

SEQ ID NO: 1131851 - RNA, 19 nt, Artificial Sequence
  Description of Artificial Sequence: Synthetic oligonucleotide
uccgcaauguuccucaguc

SEQ ID NO: 1131852 - RNA, 19 nt, Artificial Sequence
  Description of Artificial Sequence: Synthetic oligonucleotide
guauagagaaucaggacug

SEQ ID NO: 1131853 - RNA, 19 nt, Artificial Sequence
  Description of Artificial Sequence: Synthetic oligonucleotide
ugaagacgcugaaagacgu

SEQ ID NO: 1131854 - RNA, 19 nt, Artificial Sequence
  Description of Artificial Sequence: Synthetic oligonucleotide
uguauaacuggagucgucu

SEQ ID NO: 1131855 - RNA, 19 nt, Artificial Sequence
  Description of Artificial Sequence: Synthetic oligonucleotide
uggaagcuagauaaagaga

SEQ ID NO: 1131856 - RNA, 19 nt, Artificial Sequence
  Description of Artificial Sequence: Synthetic oligonucleotide
agggccacgacucgguagc

SEQ ID NO: 1131857 - RNA, 19 nt, Artificial Sequence
  Description of Artificial Sequence: Synthetic oligonucleotide
aacugcgucaggcuguaca

SEQ ID NO: 1131858 - RNA, 19 nt, Artificial Sequence
  Description of Artificial Sequence: Synthetic oligonucleotide
uucaugacugcagaggacu

SEQ ID NO: 1131859 - RNA, 19 nt, Artificial Sequence
  Description of Artificial Sequence: Synthetic oligonucleotide
uaguauagagaaucaggac

SEQ ID NO: 1131860 - RNA, 19 nt, Artificial Sequence
  Description of Artificial Sequence: Synthetic oligonucleotide
aaagacguguccagagaac

SEQ ID NO: 1131861 - RNA, 19 nt, Artificial Sequence
  Description of Artificial Sequence: Synthetic oligonucleotide
aggucgauggccaagaacu

SEQ ID NO: 1131862 - RNA, 19 nt, Artificial Sequence
  Description of Artificial Sequence: Synthetic oligonucleotide
uacuggaagcuagauaaag

SEQ ID NO: 1131863 - RNA, 19 nt, Artificial Sequence
  Description of Artificial Sequence: Synthetic oligonucleotide
agagaagaccacuguguuc

SEQ ID NO: 1131864 - RNA, 19 nt, Artificial Sequence
  Description of Artificial Sequence: Synthetic oligonucleotide
gaacuguccgcaauguucc

SEQ ID NO: 1131865 - RNA, 19 nt, Artificial Sequence
  Description of Artificial Sequence: Synthetic oligonucleotide
cuguacuaccucaaagagc

SEQ ID NO: 1131866 - RNA, 19 nt, Artificial Sequence
  Description of Artificial Sequence: Synthetic oligonucleotide
ucggauggcaagaacugca

SEQ ID NO: 1131867 - RNA, 19 nt, Artificial Sequence
  Description of Artificial Sequence: Synthetic oligonucleotide
aagacguguccagagaaca

SEQ ID NO: 1131868 - RNA, 19 nt, Artificial Sequence
  Description of Artificial Sequence: Synthetic oligonucleotide
cugaaagacguguccagag

SEQ ID NO: 1131869 - RNA, 19 nt, Artificial Sequence
  Description of Artificial Sequence: Synthetic oligonucleotide
gacgcugaaagacgugucc

SEQ ID NO: 1131870 - RNA, 19 nt, Artificial Sequence
  Description of Artificial Sequence: Synthetic oligonucleotide
uagaguggcuggcggaagg

SEQ ID NO: 1131871 - RNA, 19 nt, Artificial Sequence
  Description of Artificial Sequence: Synthetic oligonucleotide
aagacgcugaaagacgugu

SEQ ID NO: 1131872 - RNA, 19 nt, Artificial Sequence
  Description of Artificial Sequence: Synthetic oligonucleotide
gaaagacguguccagagaa

SEQ ID NO: 1131873 - RNA, 19 nt, Artificial Sequence
  Description of Artificial Sequence: Synthetic oligonucleotide
uacuaccucaaagagcuga

SEQ ID NO: 1131874 - RNA, 19 nt, Artificial Sequence
  Description of Artificial Sequence: Synthetic oligonucleotide
uuuguauaacuggagucgu

SEQ ID NO: 1131875 - RNA, 19 nt, Artificial Sequence
  Description of Artificial Sequence: Synthetic oligonucleotide
agaacagcggcccucccug

SEQ ID NO: 1131876 - RNA, 19 nt, Artificial Sequence
  Description of Artificial Sequence: Synthetic oligonucleotide
agauaaagagaagaccacu

SEQ ID NO: 1131877 - RNA, 19 nt, Artificial Sequence
  Description of Artificial Sequence: Synthetic oligonucleotide
ugggcacacacucaauacu

SEQ ID NO: 1131878 - RNA, 19 nt, Artificial Sequence
  Description of Artificial Sequence: Synthetic oligonucleotide
ccaacuuaggagauguggg

SEQ ID NO: 1131879 - RNA, 19 nt, Artificial Sequence
  Description of Artificial Sequence: Synthetic oligonucleotide
gaagcuagauaaagagaag

SEQ ID NO: 1131880 - RNA, 19 nt, Artificial Sequence
  Description of Artificial Sequence: Synthetic oligonucleotide
gauggguccaguuacaguu

SEQ ID NO: 1131881 - RNA, 19 nt, Artificial Sequence
  Description of Artificial Sequence: Synthetic oligonucleotide
ucgcacuaaugucagugca

SEQ ID NO: 1131882 - RNA, 19 nt, Artificial Sequence
  Description of Artificial Sequence: Synthetic oligonucleotide
gacccuuuuaggccggacc

SEQ ID NO: 1131883 - RNA, 19 nt, Artificial Sequence
  Description of Artificial Sequence: Synthetic oligonucleotide
ggaagcuagauaaagagaa

SEQ ID NO: 1131884 - RNA, 19 nt, Artificial Sequence
  Description of Artificial Sequence: Synthetic oligonucleotide
agucauuggcuccgucccc

SEQ ID NO: 1131885 - RNA, 19 nt, Artificial Sequence
  Description of Artificial Sequence: Synthetic oligonucleotide
gcuagauaaagagaagacc

SEQ ID NO: 1131886 - RNA, 19 nt, Artificial Sequence
  Description of Artificial Sequence: Synthetic oligonucleotide
caccauaaugguucggaug

SEQ ID NO: 1131887 - RNA, 19 nt, Artificial Sequence
  Description of Artificial Sequence: Synthetic oligonucleotide
uaaugguucggaugccugu

SEQ ID NO: 1131888 - RNA, 19 nt, Artificial Sequence
  Description of Artificial Sequence: Synthetic oligonucleotide
aacagcaaacugccaagua

SEQ ID NO: 1131889 - RNA, 19 nt, Artificial Sequence
  Description of Artificial Sequence: Synthetic oligonucleotide
gacguguccagagaacagc

SEQ ID NO: 1131890 - RNA, 19 nt, Artificial Sequence
  Description of Artificial Sequence: Synthetic oligonucleotide
augagcacugcgaucgugg

SEQ ID NO: 1131891 - RNA, 19 nt, Artificial Sequence
  Description of Artificial Sequence: Synthetic oligonucleotide
gaaugugacaacagccaac

SEQ ID NO: 1131892 - RNA, 19 nt, Artificial Sequence
  Description of Artificial Sequence: Synthetic oligonucleotide
cucgcacuaaugucagugc

SEQ ID NO: 1131893 - RNA, 19 nt, Artificial Sequence
  Description of Artificial Sequence: Synthetic oligonucleotide
ucgauggccaagaacugua

SEQ ID NO: 1131894 - RNA, 19 nt, Artificial Sequence
  Description of Artificial Sequence: Synthetic oligonucleotide
auagagaaucaggacugag

SEQ ID NO: 1131895 - RNA, 19 nt, Artificial Sequence
  Description of Artificial Sequence: Synthetic oligonucleotide
gaagggagagaccacugaa

SEQ ID NO: 1131896 - RNA, 19 nt, Artificial Sequence
  Description of Artificial Sequence: Synthetic oligonucleotide
acggcuguucagcaagcuc

SEQ ID NO: 1131897 - RNA, 19 nt, Artificial Sequence
  Description of Artificial Sequence: Synthetic oligonucleotide
gguauugauaguauagaga

SEQ ID NO: 1131898 - RNA, 19 nt, Artificial Sequence
  Description of Artificial Sequence: Synthetic oligonucleotide
gccaacuuaggagaugugg

SEQ ID NO: 1131899 - RNA, 19 nt, Artificial Sequence
  Description of Artificial Sequence: Synthetic oligonucleotide
uggguccaguuacaguuca

SEQ ID NO: 1131900 - RNA, 19 nt, Artificial Sequence
  Description of Artificial Sequence: Synthetic oligonucleotide
agaggacucggauggcaag

SEQ ID NO: 1131901 - RNA, 19 nt, Artificial Sequence
  Description of Artificial Sequence: Synthetic oligonucleotide
acacacuagcucugucuuc

SEQ ID NO: 1131902 - RNA, 19 nt, Artificial Sequence
  Description of Artificial Sequence: Synthetic oligonucleotide
auucaugacugcagaggac

SEQ ID NO: 1131903 - RNA, 19 nt, Artificial Sequence
  Description of Artificial Sequence: Synthetic oligonucleotide
uauagagaaucaggacuga

SEQ ID NO: 1131904 - RNA, 19 nt, Artificial Sequence
  Description of Artificial Sequence: Synthetic oligonucleotide
ucgguagccagcagcugug

SEQ ID NO: 1131905 - RNA, 19 nt, Artificial Sequence
  Description of Artificial Sequence: Synthetic oligonucleotide
uuguauaacuggagucguc

SEQ ID NO: 1131906 - RNA, 19 nt, Artificial Sequence
  Description of Artificial Sequence: Synthetic oligonucleotide
gagauggguccaguuacag

SEQ ID NO: 1131907 - RNA, 19 nt, Artificial Sequence
  Description of Artificial Sequence: Synthetic oligonucleotide
ccuguacuaccucaaagag

SEQ ID NO: 1131908 - RNA, 19 nt, Artificial Sequence
  Description of Artificial Sequence: Synthetic oligonucleotide
cugucaccauaaugguucg

SEQ ID NO: 1131909 - RNA, 19 nt, Artificial Sequence
  Description of Artificial Sequence: Synthetic oligonucleotide
acguguccagagaacagcg

SEQ ID NO: 1131910 - RNA, 19 nt, Artificial Sequence
  Description of Artificial Sequence: Synthetic oligonucleotide
cucaguagugccccuggug

SEQ ID NO: 1131911 - RNA, 19 nt, Artificial Sequence
  Description of Artificial Sequence: Synthetic oligonucleotide
guucggaugccugucuucc

SEQ ID NO: 1131912 - RNA, 19 nt, Artificial Sequence
  Description of Artificial Sequence: Synthetic oligonucleotide
aauguuccucaguccuagu

SEQ ID NO: 1131913 - RNA, 19 nt, Artificial Sequence
  Description of Artificial Sequence: Synthetic oligonucleotide
aguuacaguucagggcggg

SEQ ID NO: 1131914 - RNA, 19 nt, Artificial Sequence
  Description of Artificial Sequence: Synthetic oligonucleotide
augcgugcaaagacggugg

SEQ ID NO: 1131915 - RNA, 19 nt, Artificial Sequence
  Description of Artificial Sequence: Synthetic oligonucleotide
cacgucagcugccuucagg

SEQ ID NO: 1131916 - RNA, 19 nt, Artificial Sequence
  Description of Artificial Sequence: Synthetic oligonucleotide
ucaccauaaugguucggau

SEQ ID NO: 1131917 - RNA, 19 nt, Artificial Sequence
  Description of Artificial Sequence: Synthetic oligonucleotide
auaaugguucggaugccug

SEQ ID NO: 1131918 - RNA, 19 nt, Artificial Sequence
  Description of Artificial Sequence: Synthetic oligonucleotide
uguagaguggcuggcggaa

SEQ ID NO: 1131919 - RNA, 19 nt, Artificial Sequence
  Description of Artificial Sequence: Synthetic oligonucleotide
gucaccauaaugguucgga

SEQ ID NO: 1131920 - RNA, 19 nt, Artificial Sequence
  Description of Artificial Sequence: Synthetic oligonucleotide
uuccucaguccuaguggcc

SEQ ID NO: 1131921 - RNA, 19 nt, Artificial Sequence
  Description of Artificial Sequence: Synthetic oligonucleotide
uuaggccggacccaccgua

SEQ ID NO: 1131922 - RNA, 19 nt, Artificial Sequence
  Description of Artificial Sequence: Synthetic oligonucleotide
agcaaaagugggcccgcug

SEQ ID NO: 1131923 - RNA, 19 nt, Artificial Sequence
  Description of Artificial Sequence: Synthetic oligonucleotide
acucggauggcaagaacug

SEQ ID NO: 1131924 - RNA, 19 nt, Artificial Sequence
  Description of Artificial Sequence: Synthetic oligonucleotide
gagaugcccacgucagcug

SEQ ID NO: 1131925 - RNA, 19 nt, Artificial Sequence
  Description of Artificial Sequence: Synthetic oligonucleotide
gcagaggcuggccacaagc

SEQ ID NO: 1131926 - RNA, 19 nt, Artificial Sequence
  Description of Artificial Sequence: Synthetic oligonucleotide
ugcgugcaaagacgguggc

SEQ ID NO: 1131927 - RNA, 19 nt, Artificial Sequence
  Description of Artificial Sequence: Synthetic oligonucleotide
ggauggcaagaacugcagg

SEQ ID NO: 1131928 - RNA, 19 nt, Artificial Sequence
  Description of Artificial Sequence: Synthetic oligonucleotide
acaaggucgauggccaaga

SEQ ID NO: 1131929 - RNA, 19 nt, Artificial Sequence
  Description of Artificial Sequence: Synthetic oligonucleotide
acuguccgcaauguuccuc

SEQ ID NO: 1131930 - RNA, 19 nt, Artificial Sequence
  Description of Artificial Sequence: Synthetic oligonucleotide
ugagcacugcgaucguggu

SEQ ID NO: 1131931 - RNA, 19 nt, Artificial Sequence
  Description of Artificial Sequence: Synthetic oligonucleotide
uaggccggacccaccguag

SEQ ID NO: 1131932 - RNA, 19 nt, Artificial Sequence
  Description of Artificial Sequence: Synthetic oligonucleotide
gccuguacuaccucaaaga

SEQ ID NO: 1131933 - RNA, 19 nt, Artificial Sequence
  Description of Artificial Sequence: Synthetic oligonucleotide
gacucggauggcaagaacu

SEQ ID NO: 1131934 - RNA, 19 nt, Artificial Sequence
  Description of Artificial Sequence: Synthetic oligonucleotide
cuuuuaggccggacccacc

SEQ ID NO: 1131935 - RNA, 19 nt, Artificial Sequence
  Description of Artificial Sequence: Synthetic oligonucleotide
aaagucgcguggguacugu

SEQ ID NO: 1131936 - RNA, 19 nt, Artificial Sequence
  Description of Artificial Sequence: Synthetic oligonucleotide
aagggcacguugguguaga

SEQ ID NO: 1131937 - RNA, 19 nt, Artificial Sequence
  Description of Artificial Sequence: Synthetic oligonucleotide
guuacaguucagggcgggg

SEQ ID NO: 1131938 - RNA, 19 nt, Artificial Sequence
  Description of Artificial Sequence: Synthetic oligonucleotide
ugucaccauaaugguucgg

SEQ ID NO: 1131939 - RNA, 19 nt, Artificial Sequence
  Description of Artificial Sequence: Synthetic oligonucleotide
uuuaggccggacccaccgu

SEQ ID NO: 1131940 - RNA, 19 nt, Artificial Sequence
  Description of Artificial Sequence: Synthetic oligonucleotide
ugggcagguugucgggugc

SEQ ID NO: 1131941 - RNA, 19 nt, Artificial Sequence
  Description of Artificial Sequence: Synthetic oligonucleotide
cugagggccaggugacggg

SEQ ID NO: 1131942 - RNA, 19 nt, Artificial Sequence
  Description of Artificial Sequence: Synthetic oligonucleotide
caguagugccccugguggc

SEQ ID NO: 1131943 - RNA, 19 nt, Artificial Sequence
  Description of Artificial Sequence: Synthetic oligonucleotide
uaaagucgcguggguacug

SEQ ID NO: 1131944 - RNA, 19 nt, Artificial Sequence
  Description of Artificial Sequence: Synthetic oligonucleotide
gucgcguggguacuguuuc

SEQ ID NO: 1131945 - RNA, 19 nt, Artificial Sequence
  Description of Artificial Sequence: Synthetic oligonucleotide
ugugggccacggcuguuca

SEQ ID NO: 1131946 - RNA, 19 nt, Artificial Sequence
  Description of Artificial Sequence: Synthetic oligonucleotide
cuguccgcaauguuccuca

SEQ ID NO: 1131947 - RNA, 19 nt, Artificial Sequence
  Description of Artificial Sequence: Synthetic oligonucleotide
gcacuguucuguucagagg

SEQ ID NO: 1131948 - RNA, 19 nt, Artificial Sequence
  Description of Artificial Sequence: Synthetic oligonucleotide
cucggauggcaagaacugc

SEQ ID NO: 1131949 - RNA, 19 nt, Artificial Sequence
  Description of Artificial Sequence: Synthetic oligonucleotide
gaagacgcugaaagacgug

SEQ ID NO: 1131950 - RNA, 19 nt, Artificial Sequence
  Description of Artificial Sequence: Synthetic oligonucleotide
gcggccucaaggcugggcg

SEQ ID NO: 1131951 - RNA, 19 nt, Artificial Sequence
  Description of Artificial Sequence: Synthetic oligonucleotide
gcucgcacuaaugucagug

SEQ ID NO: 1131952 - RNA, 19 nt, Artificial Sequence
  Description of Artificial Sequence: Synthetic oligonucleotide
gcaaaagugggcccgcuga

SEQ ID NO: 1131953 - RNA, 19 nt, Artificial Sequence
  Description of Artificial Sequence: Synthetic oligonucleotide
aaguacaggcacacucagu

SEQ ID NO: 1131954 - RNA, 19 nt, Artificial Sequence
  Description of Artificial Sequence: Synthetic oligonucleotide
gccacggcuguucagcaag

SEQ ID NO: 1131955 - RNA, 19 nt, Artificial Sequence
  Description of Artificial Sequence: Synthetic oligonucleotide
agacgcugaaagacguguc

SEQ ID NO: 1131956 - RNA, 19 nt, Artificial Sequence
  Description of Artificial Sequence: Synthetic oligonucleotide
uuggcuccguccccgcaca

SEQ ID NO: 1131957 - RNA, 19 nt, Artificial Sequence
  Description of Artificial Sequence: Synthetic oligonucleotide
gccugugcggcucaugagc

SEQ ID NO: 1131958 - RNA, 19 nt, Artificial Sequence
  Description of Artificial Sequence: Synthetic oligonucleotide
cuguacagggccauguacu

SEQ ID NO: 1131959 - RNA, 19 nt, Artificial Sequence
  Description of Artificial Sequence: Synthetic oligonucleotide
ccuggguaaagucgcgugg

SEQ ID NO: 1131960 - RNA, 19 nt, Artificial Sequence
  Description of Artificial Sequence: Synthetic oligonucleotide
gccaugcgugcaaagacgg

SEQ ID NO: 1131961 - RNA, 19 nt, Artificial Sequence
  Description of Artificial Sequence: Synthetic oligonucleotide
agacguguccagagaacag

SEQ ID NO: 1131962 - RNA, 19 nt, Artificial Sequence
  Description of Artificial Sequence: Synthetic oligonucleotide
guggccuuagccccauuca

SEQ ID NO: 1131963 - RNA, 19 nt, Artificial Sequence
  Description of Artificial Sequence: Synthetic oligonucleotide
acgcugaaagacgugucca

SEQ ID NO: 1131964 - RNA, 19 nt, Artificial Sequence
  Description of Artificial Sequence: Synthetic oligonucleotide
agcuagggccacgacucgg

SEQ ID NO: 1131965 - RNA, 19 nt, Artificial Sequence
  Description of Artificial Sequence: Synthetic oligonucleotide
auggguccaguuacaguuc

SEQ ID NO: 1131966 - RNA, 19 nt, Artificial Sequence
  Description of Artificial Sequence: Synthetic oligonucleotide
gcccacacaguacuguagc

SEQ ID NO: 1131967 - RNA, 19 nt, Artificial Sequence
  Description of Artificial Sequence: Synthetic oligonucleotide
ggccaugcgugcaaagacg

SEQ ID NO: 1131968 - RNA, 19 nt, Artificial Sequence
  Description of Artificial Sequence: Synthetic oligonucleotide
aacagcggcccucccugau

SEQ ID NO: 1131969 - RNA, 19 nt, Artificial Sequence
  Description of Artificial Sequence: Synthetic oligonucleotide
cagguugguauugauagua

SEQ ID NO: 1131970 - RNA, 19 nt, Artificial Sequence
  Description of Artificial Sequence: Synthetic oligonucleotide
uguccgcaauguuccucag

SEQ ID NO: 1131971 - RNA, 19 nt, Artificial Sequence
  Description of Artificial Sequence: Synthetic oligonucleotide
cugccaaguacaggcacac

SEQ ID NO: 1131972 - RNA, 19 nt, Artificial Sequence
  Description of Artificial Sequence: Synthetic oligonucleotide
gcuccguccccgcacaugc

SEQ ID NO: 1131973 - RNA, 19 nt, Artificial Sequence
  Description of Artificial Sequence: Synthetic oligonucleotide
ucaugagcacugcgaucgu

SEQ ID NO: 1131974 - RNA, 19 nt, Artificial Sequence
  Description of Artificial Sequence: Synthetic oligonucleotide
ggugcugucucuagagaug

SEQ ID NO: 1131975 - RNA, 19 nt, Artificial Sequence
  Description of Artificial Sequence: Synthetic oligonucleotide
cagggccccacagucauug

SEQ ID NO: 1131976 - RNA, 19 nt, Artificial Sequence
  Description of Artificial Sequence: Synthetic oligonucleotide
gccacgacucgguagccag

SEQ ID NO: 1131977 - RNA, 19 nt, Artificial Sequence
  Description of Artificial Sequence: Synthetic oligonucleotide
uucggaugccugucuuccu

SEQ ID NO: 1131978 - RNA, 19 nt, Artificial Sequence
  Description of Artificial Sequence: Synthetic oligonucleotide
gacagcgagaugcccacgu

SEQ ID NO: 1131979 - RNA, 19 nt, Artificial Sequence
  Description of Artificial Sequence: Synthetic oligonucleotide
aggccggacccaccguagg

SEQ ID NO: 1131980 - RNA, 19 nt, Artificial Sequence
  Description of Artificial Sequence: Synthetic oligonucleotide
ugguucggaugccugucuu

SEQ ID NO: 1131981 - RNA, 19 nt, Artificial Sequence
  Description of Artificial Sequence: Synthetic oligonucleotide
agccccauucaugacugca

SEQ ID NO: 1131982 - RNA, 19 nt, Artificial Sequence
  Description of Artificial Sequence: Synthetic oligonucleotide
acuaccucaaagagcugau

SEQ ID NO: 1131983 - RNA, 19 nt, Artificial Sequence
  Description of Artificial Sequence: Synthetic oligonucleotide
ugucagugcagggccugug

SEQ ID NO: 1131984 - RNA, 19 nt, Artificial Sequence
  Description of Artificial Sequence: Synthetic oligonucleotide
guguagaguggcuggcgga

SEQ ID NO: 1131985 - RNA, 19 nt, Artificial Sequence
  Description of Artificial Sequence: Synthetic oligonucleotide
agacccuuuuaggccggac

SEQ ID NO: 1131986 - RNA, 19 nt, Artificial Sequence
  Description of Artificial Sequence: Synthetic oligonucleotide
guggcuggcggaagggugc

SEQ ID NO: 1131987 - RNA, 19 nt, Artificial Sequence
  Description of Artificial Sequence: Synthetic oligonucleotide
gacgggacugggguuccag

SEQ ID NO: 1131988 - RNA, 19 nt, Artificial Sequence
  Description of Artificial Sequence: Synthetic oligonucleotide
ccaaguacaggcacacuca

SEQ ID NO: 1131989 - RNA, 19 nt, Artificial Sequence
  Description of Artificial Sequence: Synthetic oligonucleotide
augcccacacaguacugua

SEQ ID NO: 1131990 - RNA, 19 nt, Artificial Sequence
  Description of Artificial Sequence: Synthetic oligonucleotide
cccaccguaggcaggcugg

SEQ ID NO: 1131991 - RNA, 19 nt, Artificial Sequence
  Description of Artificial Sequence: Synthetic oligonucleotide
guagaguggcuggcggaag

SEQ ID NO: 1131992 - RNA, 19 nt, Artificial Sequence
  Description of Artificial Sequence: Synthetic oligonucleotide
acccaccguaggcaggcug

SEQ ID NO: 1131993 - RNA, 19 nt, Artificial Sequence
  Description of Artificial Sequence: Synthetic oligonucleotide
caugagcacugcgaucgug

SEQ ID NO: 1131994 - RNA, 19 nt, Artificial Sequence
  Description of Artificial Sequence: Synthetic oligonucleotide
agagauggguccaguuaca

SEQ ID NO: 1131995 - RNA, 19 nt, Artificial Sequence
  Description of Artificial Sequence: Synthetic oligonucleotide
uucucguaguugggcaggu

SEQ ID NO: 1131996 - RNA, 19 nt, Artificial Sequence
  Description of Artificial Sequence: Synthetic oligonucleotide
acuguucuguucagaggca

SEQ ID NO: 1131997 - RNA, 19 nt, Artificial Sequence
  Description of Artificial Sequence: Synthetic oligonucleotide
uccccgcacaugcccacac

SEQ ID NO: 1131998 - RNA, 19 nt, Artificial Sequence
  Description of Artificial Sequence: Synthetic oligonucleotide
ucgcguggguacuguuuca

SEQ ID NO: 1131999 - RNA, 19 nt, Artificial Sequence
  Description of Artificial Sequence: Synthetic oligonucleotide
ugaacugcgucaggcugua

SEQ ID NO: 1132000 - RNA, 19 nt, Artificial Sequence
  Description of Artificial Sequence: Synthetic oligonucleotide
caccugcaacagcaaacug

SEQ ID NO: 1132001 - RNA, 19 nt, Artificial Sequence
  Description of Artificial Sequence: Synthetic oligonucleotide
aagucgcguggguacuguu

SEQ ID NO: 1132002 - RNA, 19 nt, Artificial Sequence
  Description of Artificial Sequence: Synthetic oligonucleotide
gagaacagcggcccucccu

SEQ ID NO: 1132003 - RNA, 19 nt, Artificial Sequence
  Description of Artificial Sequence: Synthetic oligonucleotide
gacucgguagccagcagcu

SEQ ID NO: 1132004 - RNA, 19 nt, Artificial Sequence
  Description of Artificial Sequence: Synthetic oligonucleotide
agguugguauugauaguau

SEQ ID NO: 1132005 - RNA, 19 nt, Artificial Sequence
  Description of Artificial Sequence: Synthetic oligonucleotide
aggccggggaccaggauga

SEQ ID NO: 1132006 - RNA, 19 nt, Artificial Sequence
  Description of Artificial Sequence: Synthetic oligonucleotide
gcguggguacuguuucagg

SEQ ID NO: 1132007 - RNA, 19 nt, Artificial Sequence
  Description of Artificial Sequence: Synthetic oligonucleotide
gcgaucgugguggugauga

SEQ ID NO: 1132008 - RNA, 19 nt, Artificial Sequence
  Description of Artificial Sequence: Synthetic oligonucleotide
cagaggacucggauggcaa

SEQ ID NO: 1132009 - RNA, 19 nt, Artificial Sequence
  Description of Artificial Sequence: Synthetic oligonucleotide
cagcuagggccacgacucg

SEQ ID NO: 1132010 - RNA, 19 nt, Artificial Sequence
  Description of Artificial Sequence: Synthetic oligonucleotide
acgacucgguagccagcag

SEQ ID NO: 1132011 - RNA, 19 nt, Artificial Sequence
  Description of Artificial Sequence: Synthetic oligonucleotide
ccaagaacuguaggucucc

SEQ ID NO: 1132012 - RNA, 19 nt, Artificial Sequence
  Description of Artificial Sequence: Synthetic oligonucleotide
agggcacguugguguagag

SEQ ID NO: 1132013 - RNA, 19 nt, Artificial Sequence
  Description of Artificial Sequence: Synthetic oligonucleotide
cccgcacaugcccacacag

SEQ ID NO: 1132014 - RNA, 19 nt, Artificial Sequence
  Description of Artificial Sequence: Synthetic oligonucleotide
gguucggaugccugucuuc

SEQ ID NO: 1132015 - RNA, 19 nt, Artificial Sequence
  Description of Artificial Sequence: Synthetic oligonucleotide
aggccuguacuaccucaaa

SEQ ID NO: 1132016 - RNA, 19 nt, Artificial Sequence
  Description of Artificial Sequence: Synthetic oligonucleotide
ggugacgggacugggguuc

SEQ ID NO: 1132017 - RNA, 19 nt, Artificial Sequence
  Description of Artificial Sequence: Synthetic oligonucleotide
gcggcucaugagcacugcg

SEQ ID NO: 1132018 - RNA, 19 nt, Artificial Sequence
  Description of Artificial Sequence: Synthetic oligonucleotide
cauaaugguucggaugccu

SEQ ID NO: 1132019 - RNA, 19 nt, Artificial Sequence
  Description of Artificial Sequence: Synthetic oligonucleotide
ugcggcucaugagcacugc

SEQ ID NO: 1132020 - RNA, 19 nt, Artificial Sequence
  Description of Artificial Sequence: Synthetic oligonucleotide
guugagcggccucaaggcu

SEQ ID NO: 1132021 - RNA, 19 nt, Artificial Sequence
  Description of Artificial Sequence: Synthetic oligonucleotide
caggugacgggacuggggu

SEQ ID NO: 1132022 - RNA, 19 nt, Artificial Sequence
  Description of Artificial Sequence: Synthetic oligonucleotide
aaaccagggcugggcuaug

SEQ ID NO: 1132023 - RNA, 19 nt, Artificial Sequence
  Description of Artificial Sequence: Synthetic oligonucleotide
ggccuuagccccauucaug

SEQ ID NO: 1132024 - RNA, 19 nt, Artificial Sequence
  Description of Artificial Sequence: Synthetic oligonucleotide
ggacccaccguaggcaggc

SEQ ID NO: 1132025 - RNA, 19 nt, Artificial Sequence
  Description of Artificial Sequence: Synthetic oligonucleotide
cacgacucgguagccagca

SEQ ID NO: 1132026 - RNA, 19 nt, Artificial Sequence
  Description of Artificial Sequence: Synthetic oligonucleotide
cugggcgcaaugggcagug

SEQ ID NO: 1132027 - RNA, 19 nt, Artificial Sequence
  Description of Artificial Sequence: Synthetic oligonucleotide
agaccacuguguucucgua

SEQ ID NO: 1132028 - RNA, 19 nt, Artificial Sequence
  Description of Artificial Sequence: Synthetic oligonucleotide
ggggcgauccaguguccag

SEQ ID NO: 1132029 - RNA, 19 nt, Artificial Sequence
  Description of Artificial Sequence: Synthetic oligonucleotide
caaagacgguggccugcac

SEQ ID NO: 1132030 - RNA, 19 nt, Artificial Sequence
  Description of Artificial Sequence: Synthetic oligonucleotide
ggucgauggccaagaacug

SEQ ID NO: 1132031 - RNA, 19 nt, Artificial Sequence
  Description of Artificial Sequence: Synthetic oligonucleotide
ugcgaucgugguggugaug

SEQ ID NO: 1132032 - RNA, 19 nt, Artificial Sequence
  Description of Artificial Sequence: Synthetic oligonucleotide
gggccugugcggcucauga

SEQ ID NO: 1132033 - RNA, 19 nt, Artificial Sequence
  Description of Artificial Sequence: Synthetic oligonucleotide
ugccaaguacaggcacacu

SEQ ID NO: 1132034 - RNA, 19 nt, Artificial Sequence
  Description of Artificial Sequence: Synthetic oligonucleotide
cgacucgguagccagcagc

SEQ ID NO: 1132035 - RNA, 19 nt, Artificial Sequence
  Description of Artificial Sequence: Synthetic oligonucleotide
ccacaaaguugaaggcgac

SEQ ID NO: 1132036 - RNA, 19 nt, Artificial Sequence
  Description of Artificial Sequence: Synthetic oligonucleotide
cacagucauuggcuccguc

SEQ ID NO: 1132037 - RNA, 19 nt, Artificial Sequence
  Description of Artificial Sequence: Synthetic oligonucleotide
ccuuuuaggccggacccac

SEQ ID NO: 1132038 - RNA, 19 nt, Artificial Sequence
  Description of Artificial Sequence: Synthetic oligonucleotide
agguuccgcaugaccagca

SEQ ID NO: 1132039 - RNA, 19 nt, Artificial Sequence
  Description of Artificial Sequence: Synthetic oligonucleotide
cuccguccccgcacaugcc

SEQ ID NO: 1132040 - RNA, 19 nt, Artificial Sequence
  Description of Artificial Sequence: Synthetic oligonucleotide
ccgcaauguuccucagucc

SEQ ID NO: 1132041 - RNA, 19 nt, Artificial Sequence
  Description of Artificial Sequence: Synthetic oligonucleotide
gugggccacggcuguucag

SEQ ID NO: 1132042 - RNA, 19 nt, Artificial Sequence
  Description of Artificial Sequence: Synthetic oligonucleotide
ggacucggauggcaagaac

SEQ ID NO: 1132043 - RNA, 19 nt, Artificial Sequence
  Description of Artificial Sequence: Synthetic oligonucleotide
cgcugaaagacguguccag

SEQ ID NO: 1132044 - RNA, 19 nt, Artificial Sequence
  Description of Artificial Sequence: Synthetic oligonucleotide
guaaagucgcguggguacu

SEQ ID NO: 1132045 - RNA, 19 nt, Artificial Sequence
  Description of Artificial Sequence: Synthetic oligonucleotide
gaaucaggacugagaugaa

SEQ ID NO: 1132046 - RNA, 19 nt, Artificial Sequence
  Description of Artificial Sequence: Synthetic oligonucleotide
agucgcguggguacuguuu

SEQ ID NO: 1132047 - RNA, 19 nt, Artificial Sequence
  Description of Artificial Sequence: Synthetic oligonucleotide
ggagacccuuuuaggccgg

SEQ ID NO: 1132048 - RNA, 19 nt, Artificial Sequence
  Description of Artificial Sequence: Synthetic oligonucleotide
gucgauggccaagaacugu

SEQ ID NO: 1132049 - RNA, 19 nt, Artificial Sequence
  Description of Artificial Sequence: Synthetic oligonucleotide
ggccggacccaccguaggc

SEQ ID NO: 1132050 - RNA, 19 nt, Artificial Sequence
  Description of Artificial Sequence: Synthetic oligonucleotide
ugggcgcaaugggcagugg

SEQ ID NO: 1132051 - RNA, 19 nt, Artificial Sequence
  Description of Artificial Sequence: Synthetic oligonucleotide
aggugacgggacugggguu

SEQ ID NO: 1132052 - RNA, 19 nt, Artificial Sequence
  Description of Artificial Sequence: Synthetic oligonucleotide
ccugugcggcucaugagca

SEQ ID NO: 1132053 - RNA, 19 nt, Artificial Sequence
  Description of Artificial Sequence: Synthetic oligonucleotide
cccaagagcgccagggcca

SEQ ID NO: 1132054 - RNA, 19 nt, Artificial Sequence
  Description of Artificial Sequence: Synthetic oligonucleotide
guacuaccucaaagagcug

SEQ ID NO: 1132055 - RNA, 19 nt, Artificial Sequence
  Description of Artificial Sequence: Synthetic oligonucleotide
agccaacuuaggagaugug

SEQ ID NO: 1132056 - RNA, 19 nt, Artificial Sequence
  Description of Artificial Sequence: Synthetic oligonucleotide
cgcgcucgcacuaauguca

SEQ ID NO: 1132057 - RNA, 19 nt, Artificial Sequence
  Description of Artificial Sequence: Synthetic oligonucleotide
ccauaaugguucggaugcc

SEQ ID NO: 1132058 - RNA, 19 nt, Artificial Sequence
  Description of Artificial Sequence: Synthetic oligonucleotide
gggcagguugucgggugcg

SEQ ID NO: 1132059 - RNA, 19 nt, Artificial Sequence
  Description of Artificial Sequence: Synthetic oligonucleotide
caaaccagggcugggcuau

SEQ ID NO: 1132060 - RNA, 19 nt, Artificial Sequence
  Description of Artificial Sequence: Synthetic oligonucleotide
gugugggccacggcuguuc

SEQ ID NO: 1132061 - RNA, 19 nt, Artificial Sequence
  Description of Artificial Sequence: Synthetic oligonucleotide
ggaugagguacuggaagcu

SEQ ID NO: 1132062 - RNA, 19 nt, Artificial Sequence
  Description of Artificial Sequence: Synthetic oligonucleotide
ccggacccaccguaggcag

SEQ ID NO: 1132063 - RNA, 19 nt, Artificial Sequence
  Description of Artificial Sequence: Synthetic oligonucleotide
gcccacgucagcugccuuc

SEQ ID NO: 1132064 - RNA, 19 nt, Artificial Sequence
  Description of Artificial Sequence: Synthetic oligonucleotide
gccagcuagggccacgacu

SEQ ID NO: 1132065 - RNA, 19 nt, Artificial Sequence
  Description of Artificial Sequence: Synthetic oligonucleotide
ucucguaguugggcagguu

SEQ ID NO: 1132066 - RNA, 19 nt, Artificial Sequence
  Description of Artificial Sequence: Synthetic oligonucleotide
ccacggcuguucagcaagc

SEQ ID NO: 1132067 - RNA, 19 nt, Artificial Sequence
  Description of Artificial Sequence: Synthetic oligonucleotide
ugucgggugcgggcacugu

SEQ ID NO: 1132068 - RNA, 19 nt, Artificial Sequence
  Description of Artificial Sequence: Synthetic oligonucleotide
caaggucgauggccaagaa

SEQ ID NO: 1132069 - RNA, 19 nt, Artificial Sequence
  Description of Artificial Sequence: Synthetic oligonucleotide
gcgcucgcacuaaugucag

SEQ ID NO: 1132070 - RNA, 19 nt, Artificial Sequence
  Description of Artificial Sequence: Synthetic oligonucleotide
gccaggugacgggacuggg

SEQ ID NO: 1132071 - RNA, 19 nt, Artificial Sequence
  Description of Artificial Sequence: Synthetic oligonucleotide
gcaugaaggcucccacaaa

SEQ ID NO: 1132072 - RNA, 19 nt, Artificial Sequence
  Description of Artificial Sequence: Synthetic oligonucleotide
gccgcgcucgcacuaaugu

SEQ ID NO: 1132073 - RNA, 19 nt, Artificial Sequence
  Description of Artificial Sequence: Synthetic oligonucleotide
ccacgacucgguagccagc

SEQ ID NO: 1132074 - RNA, 19 nt, Artificial Sequence
  Description of Artificial Sequence: Synthetic oligonucleotide
uggccgcgcucgcacuaau

SEQ ID NO: 1132075 - RNA, 19 nt, Artificial Sequence
  Description of Artificial Sequence: Synthetic oligonucleotide
cacacucaauacuggccau

SEQ ID NO: 1132076 - RNA, 19 nt, Artificial Sequence
  Description of Artificial Sequence: Synthetic oligonucleotide
gcuccggggccaugcgugc

SEQ ID NO: 1132077 - RNA, 19 nt, Artificial Sequence
  Description of Artificial Sequence: Synthetic oligonucleotide
cugccugggacagcgagau

SEQ ID NO: 1132078 - RNA, 19 nt, Artificial Sequence
  Description of Artificial Sequence: Synthetic oligonucleotide
guacuguuucagggcugca

SEQ ID NO: 1132079 - RNA, 19 nt, Artificial Sequence
  Description of Artificial Sequence: Synthetic oligonucleotide
ugacgggacugggguucca

SEQ ID NO: 1132080 - RNA, 19 nt, Artificial Sequence
  Description of Artificial Sequence: Synthetic oligonucleotide
ugcccacgucagcugccuu

SEQ ID NO: 1132081 - RNA, 19 nt, Artificial Sequence
  Description of Artificial Sequence: Synthetic oligonucleotide
gagacccuuuuaggccgga

SEQ ID NO: 1132082 - RNA, 19 nt, Artificial Sequence
  Description of Artificial Sequence: Synthetic oligonucleotide
ccgcugagggccaggugac

SEQ ID NO: 1132083 - RNA, 19 nt, Artificial Sequence
  Description of Artificial Sequence: Synthetic oligonucleotide
cuagggccacgacucggua

SEQ ID NO: 1132084 - RNA, 19 nt, Artificial Sequence
  Description of Artificial Sequence: Synthetic oligonucleotide
ggcgcaaugggcaguggcu

SEQ ID NO: 1132085 - RNA, 19 nt, Artificial Sequence
  Description of Artificial Sequence: Synthetic oligonucleotide
cacugcgaucgugguggug

SEQ ID NO: 1132086 - RNA, 19 nt, Artificial Sequence
  Description of Artificial Sequence: Synthetic oligonucleotide
ccgcgcucgcacuaauguc

SEQ ID NO: 1132087 - RNA, 19 nt, Artificial Sequence
  Description of Artificial Sequence: Synthetic oligonucleotide
gaacugcgucaggcuguac

SEQ ID NO: 1132088 - RNA, 19 nt, Artificial Sequence
  Description of Artificial Sequence: Synthetic oligonucleotide
gccggacccaccguaggca

SEQ ID NO: 1132089 - RNA, 19 nt, Artificial Sequence
  Description of Artificial Sequence: Synthetic oligonucleotide
ccaccguaggcaggcuggg

SEQ ID NO: 1132090 - RNA, 19 nt, Artificial Sequence
  Description of Artificial Sequence: Synthetic oligonucleotide
cggcucaugagcacugcga

SEQ ID NO: 1132091 - RNA, 19 nt, Artificial Sequence
  Description of Artificial Sequence: Synthetic oligonucleotide
cgcguggguacuguuucag

SEQ ID NO: 1132092 - RNA, 19 nt, Artificial Sequence
  Description of Artificial Sequence: Synthetic oligonucleotide
ggcuccguccccgcacaug

SEQ ID NO: 1132093 - RNA, 19 nt, Artificial Sequence
  Description of Artificial Sequence: Synthetic oligonucleotide
cacacucaguagugccccu

SEQ ID NO: 1132094 - RNA, 19 nt, Artificial Sequence
  Description of Artificial Sequence: Synthetic oligonucleotide
gucgggugcgggcacuguu

SEQ ID NO: 1132095 - RNA, 19 nt, Artificial Sequence
  Description of Artificial Sequence: Synthetic oligonucleotide
gguggccgcgcucgcacua

SEQ ID NO: 1132096 - RNA, 19 nt, Artificial Sequence
  Description of Artificial Sequence: Synthetic oligonucleotide
ggccgcgcucgcacuaaug

SEQ ID NO: 1132097 - RNA, 19 nt, Artificial Sequence
  Description of Artificial Sequence: Synthetic oligonucleotide
caccguaggcaggcuggga

SEQ ID NO: 1132098 - RNA, 19 nt, Artificial Sequence
  Description of Artificial Sequence: Synthetic oligonucleotide
gcuagggccacgacucggu

SEQ ID NO: 1132099 - RNA, 19 nt, Artificial Sequence
  Description of Artificial Sequence: Synthetic oligonucleotide
gguuccgcaugaccagcau

SEQ ID NO: 1132100 - RNA, 19 nt, Artificial Sequence
  Description of Artificial Sequence: Synthetic oligonucleotide
guccccgcacaugcccaca

SEQ ID NO: 1132101 - RNA, 19 nt, Artificial Sequence
  Description of Artificial Sequence: Synthetic oligonucleotide
ggccacgacucgguagcca

SEQ ID NO: 1132102 - RNA, 19 nt, Artificial Sequence
  Description of Artificial Sequence: Synthetic oligonucleotide
ccagguugguauugauagu

SEQ ID NO: 1132103 - RNA, 19 nt, Artificial Sequence
  Description of Artificial Sequence: Synthetic oligonucleotide
cucaguccuaguggccccu

SEQ ID NO: 1132104 - RNA, 19 nt, Artificial Sequence
  Description of Artificial Sequence: Synthetic oligonucleotide
guggccgcgcucgcacuaa

SEQ ID NO: 1132105 - RNA, 19 nt, Artificial Sequence
  Description of Artificial Sequence: Synthetic oligonucleotide
cuccggggccaugcgugca

SEQ ID NO: 1132106 - RNA, 19 nt, Artificial Sequence
  Description of Artificial Sequence: Synthetic oligonucleotide
cguccccgcacaugcccac

SEQ ID NO: 1132107 - RNA, 19 nt, Artificial Sequence
  Description of Artificial Sequence: Synthetic oligonucleotide
cggggccaugcgugcaaag

SEQ ID NO: 1132108 - RNA, 19 nt, Artificial Sequence
  Description of Artificial Sequence: Synthetic oligonucleotide
cagcaaaagugggcccgcu

SEQ ID NO: 1132109 - RNA, 19 nt, Artificial Sequence
  Description of Artificial Sequence: Synthetic oligonucleotide
cccugucaccauaaugguu

SEQ ID NO: 1132110 - RNA, 19 nt, Artificial Sequence
  Description of Artificial Sequence: Synthetic oligonucleotide
gcgcaaugggcaguggcuu

SEQ ID NO: 1132111 - RNA, 19 nt, Artificial Sequence
  Description of Artificial Sequence: Synthetic oligonucleotide
gacccaccguaggcaggcu

SEQ ID NO: 1132112 - RNA, 19 nt, Artificial Sequence
  Description of Artificial Sequence: Synthetic oligonucleotide
ggccggggaccaggaugag

SEQ ID NO: 1132113 - RNA, 19 nt, Artificial Sequence
  Description of Artificial Sequence: Synthetic oligonucleotide
ccccgcacaugcccacaca

SEQ ID NO: 1132114 - RNA, 19 nt, Artificial Sequence
  Description of Artificial Sequence: Synthetic oligonucleotide
gcugggcgcaaugggcagu

SEQ ID NO: 1132115 - RNA, 19 nt, Artificial Sequence
  Description of Artificial Sequence: Synthetic oligonucleotide
ccguucuagcugcuugaau

SEQ ID NO: 1132116 - RNA, 19 nt, Artificial Sequence
  Description of Artificial Sequence: Synthetic oligonucleotide
gcacgcucuccagcaugaa

SEQ ID NO: 1132117 - RNA, 19 nt, Artificial Sequence
  Description of Artificial Sequence: Synthetic oligonucleotide
ggcccucccugaugacagu

SEQ ID NO: 1132118 - RNA, 19 nt, Artificial Sequence
  Description of Artificial Sequence: Synthetic oligonucleotide
ccucaaggcugggcgcaau

SEQ ID NO: 1132119 - RNA, 19 nt, Artificial Sequence
  Description of Artificial Sequence: Synthetic oligonucleotide
cgcucgcacuaaugucagu

SEQ ID NO: 1132120 - RNA, 19 nt, Artificial Sequence
  Description of Artificial Sequence: Synthetic oligonucleotide
uaaguagucguacucaucg

SEQ ID NO: 1132121 - RNA, 19 nt, Artificial Sequence
  Description of Artificial Sequence: Synthetic oligonucleotide
gagaauaagaguucgagag

SEQ ID NO: 1132122 - RNA, 19 nt, Artificial Sequence
  Description of Artificial Sequence: Synthetic oligonucleotide
uuaguaacgggcaacagug

SEQ ID NO: 1132123 - RNA, 19 nt, Artificial Sequence
  Description of Artificial Sequence: Synthetic oligonucleotide
guagacaagacagagaagg

SEQ ID NO: 1132124 - RNA, 19 nt, Artificial Sequence
  Description of Artificial Sequence: Synthetic oligonucleotide
auacauuuuaguaacgggc

SEQ ID NO: 1132125 - RNA, 19 nt, Artificial Sequence
  Description of Artificial Sequence: Synthetic oligonucleotide
aaccaaaggcuacaagagc

SEQ ID NO: 1132126 - RNA, 19 nt, Artificial Sequence
  Description of Artificial Sequence: Synthetic oligonucleotide
uuuggcguaaauuuuacaa

SEQ ID NO: 1132127 - RNA, 19 nt, Artificial Sequence
  Description of Artificial Sequence: Synthetic oligonucleotide
agaauaagaguucgagagc

SEQ ID NO: 1132128 - RNA, 19 nt, Artificial Sequence
  Description of Artificial Sequence: Synthetic oligonucleotide
auugguagaauccaaggcu

SEQ ID NO: 1132129 - RNA, 19 nt, Artificial Sequence
  Description of Artificial Sequence: Synthetic oligonucleotide
caagaugcccacaauaccc

SEQ ID NO: 1132130 - RNA, 19 nt, Artificial Sequence
  Description of Artificial Sequence: Synthetic oligonucleotide
uauugcuucacuugcagac

SEQ ID NO: 1132131 - RNA, 19 nt, Artificial Sequence
  Description of Artificial Sequence: Synthetic oligonucleotide
uuuaguaacgggcaacagu

SEQ ID NO: 1132132 - RNA, 19 nt, Artificial Sequence
  Description of Artificial Sequence: Synthetic oligonucleotide
uggcguaaauuuuacaaag

SEQ ID NO: 1132133 - RNA, 19 nt, Artificial Sequence
  Description of Artificial Sequence: Synthetic oligonucleotide
ucggguaucagcuuaguga

SEQ ID NO: 1132134 - RNA, 19 nt, Artificial Sequence
  Description of Artificial Sequence: Synthetic oligonucleotide
uacagggagaauaagaguu

SEQ ID NO: 1132135 - RNA, 19 nt, Artificial Sequence
  Description of Artificial Sequence: Synthetic oligonucleotide
aaucgugacagcagguugc

SEQ ID NO: 1132136 - RNA, 19 nt, Artificial Sequence
  Description of Artificial Sequence: Synthetic oligonucleotide
acauugguagaauccaagg

SEQ ID NO: 1132137 - RNA, 19 nt, Artificial Sequence
  Description of Artificial Sequence: Synthetic oligonucleotide
aaaucuacaggcaggagca

SEQ ID NO: 1132138 - RNA, 19 nt, Artificial Sequence
  Description of Artificial Sequence: Synthetic oligonucleotide
acuuugaauaaguagucgu

SEQ ID NO: 1132139 - RNA, 19 nt, Artificial Sequence
  Description of Artificial Sequence: Synthetic oligonucleotide
aauaaguagucguacucau

SEQ ID NO: 1132140 - RNA, 19 nt, Artificial Sequence
  Description of Artificial Sequence: Synthetic oligonucleotide
ugaauaaguagucguacuc

SEQ ID NO: 1132141 - RNA, 19 nt, Artificial Sequence
  Description of Artificial Sequence: Synthetic oligonucleotide
gaggagcucacuuggaggg

SEQ ID NO: 1132142 - RNA, 19 nt, Artificial Sequence
  Description of Artificial Sequence: Synthetic oligonucleotide
uacauugguagaauccaag

SEQ ID NO: 1132143 - RNA, 19 nt, Artificial Sequence
  Description of Artificial Sequence: Synthetic oligonucleotide
uacaaaguguauaaagaau

SEQ ID NO: 1132144 - RNA, 19 nt, Artificial Sequence
  Description of Artificial Sequence: Synthetic oligonucleotide
ucaagguugaacucguuuc

SEQ ID NO: 1132145 - RNA, 19 nt, Artificial Sequence
  Description of Artificial Sequence: Synthetic oligonucleotide
cucuacauugguagaaucc

SEQ ID NO: 1132146 - RNA, 19 nt, Artificial Sequence
  Description of Artificial Sequence: Synthetic oligonucleotide
uucucguaagucaagugcu

SEQ ID NO: 1132147 - RNA, 19 nt, Artificial Sequence
  Description of Artificial Sequence: Synthetic oligonucleotide
ucuacauugguagaaucca

SEQ ID NO: 1132148 - RNA, 19 nt, Artificial Sequence
  Description of Artificial Sequence: Synthetic oligonucleotide
agaaucuguguuucucuac

SEQ ID NO: 1132149 - RNA, 19 nt, Artificial Sequence
  Description of Artificial Sequence: Synthetic oligonucleotide
guuguauauacaaaacaug

SEQ ID NO: 1132150 - RNA, 19 nt, Artificial Sequence
  Description of Artificial Sequence: Synthetic oligonucleotide
auaagaguucgagagcugg

SEQ ID NO: 1132151 - RNA, 19 nt, Artificial Sequence
  Description of Artificial Sequence: Synthetic oligonucleotide
aggagaggccacuugacuc

SEQ ID NO: 1132152 - RNA, 19 nt, Artificial Sequence
  Description of Artificial Sequence: Synthetic oligonucleotide
uaagaguucgagagcuggg

SEQ ID NO: 1132153 - RNA, 19 nt, Artificial Sequence
  Description of Artificial Sequence: Synthetic oligonucleotide
aguuguauauacaaaacau

SEQ ID NO: 1132154 - RNA, 19 nt, Artificial Sequence
  Description of Artificial Sequence: Synthetic oligonucleotide
ucguaagucaagugcuugg

SEQ ID NO: 1132155 - RNA, 19 nt, Artificial Sequence
  Description of Artificial Sequence: Synthetic oligonucleotide
aagaguucgagagcugggg

SEQ ID NO: 1132156 - RNA, 19 nt, Artificial Sequence
  Description of Artificial Sequence: Synthetic oligonucleotide
cacaauacccaagagcagg

SEQ ID NO: 1132157 - RNA, 19 nt, Artificial Sequence
  Description of Artificial Sequence: Synthetic oligonucleotide
aacucguuucuggugaauc

SEQ ID NO: 1132158 - RNA, 19 nt, Artificial Sequence
  Description of Artificial Sequence: Synthetic oligonucleotide
acucguuucuggugaaucg

SEQ ID NO: 1132159 - RNA, 19 nt, Artificial Sequence
  Description of Artificial Sequence: Synthetic oligonucleotide
gcuuauacauuuuaguaac

SEQ ID NO: 1132160 - RNA, 19 nt, Artificial Sequence
  Description of Artificial Sequence: Synthetic oligonucleotide
cuucucuugagcaggcagg

SEQ ID NO: 1132161 - RNA, 19 nt, Artificial Sequence
  Description of Artificial Sequence: Synthetic oligonucleotide
agccuugauagucuugccg

SEQ ID NO: 1132162 - RNA, 19 nt, Artificial Sequence
  Description of Artificial Sequence: Synthetic oligonucleotide
aaugcugcggguagcgaac

SEQ ID NO: 1132163 - RNA, 19 nt, Artificial Sequence
  Description of Artificial Sequence: Synthetic oligonucleotide
aguguauaaagaaucugug

SEQ ID NO: 1132164 - RNA, 19 nt, Artificial Sequence
  Description of Artificial Sequence: Synthetic oligonucleotide
uaguacgcagagguaaugg

SEQ ID NO: 1132165 - RNA, 19 nt, Artificial Sequence
  Description of Artificial Sequence: Synthetic oligonucleotide
ggugaaucgugacagcagg

SEQ ID NO: 1132166 - RNA, 19 nt, Artificial Sequence
  Description of Artificial Sequence: Synthetic oligonucleotide
gauguucuugaaugcuucc

SEQ ID NO: 1132167 - RNA, 19 nt, Artificial Sequence
  Description of Artificial Sequence: Synthetic oligonucleotide
gaauaaguagucguacuca

SEQ ID NO: 1132168 - RNA, 19 nt, Artificial Sequence
  Description of Artificial Sequence: Synthetic oligonucleotide
uggugaaucgugacagcag

SEQ ID NO: 1132169 - RNA, 19 nt, Artificial Sequence
  Description of Artificial Sequence: Synthetic oligonucleotide
uacucaucgucccgggucc

SEQ ID NO: 1132170 - RNA, 19 nt, Artificial Sequence
  Description of Artificial Sequence: Synthetic oligonucleotide
auuuuaguaacgggcaaca

SEQ ID NO: 1132171 - RNA, 19 nt, Artificial Sequence
  Description of Artificial Sequence: Synthetic oligonucleotide
ucuucggguaucagcuuag

SEQ ID NO: 1132172 - RNA, 19 nt, Artificial Sequence
  Description of Artificial Sequence: Synthetic oligonucleotide
aagaaucuguguuucucua

SEQ ID NO: 1132173 - RNA, 19 nt, Artificial Sequence
  Description of Artificial Sequence: Synthetic oligonucleotide
agggaaaacagaagccggc

SEQ ID NO: 1132174 - RNA, 19 nt, Artificial Sequence
  Description of Artificial Sequence: Synthetic oligonucleotide
agucaagaugcccacaaua

SEQ ID NO: 1132175 - RNA, 19 nt, Artificial Sequence
  Description of Artificial Sequence: Synthetic oligonucleotide
gcugaggucucaaugaagg

SEQ ID NO: 1132176 - RNA, 19 nt, Artificial Sequence
  Description of Artificial Sequence: Synthetic oligonucleotide
acgccgauggugcucuugc

SEQ ID NO: 1132177 - RNA, 19 nt, Artificial Sequence
  Description of Artificial Sequence: Synthetic oligonucleotide
caguuguauauacaaaaca

SEQ ID NO: 1132178 - RNA, 19 nt, Artificial Sequence
  Description of Artificial Sequence: Synthetic oligonucleotide
agcagguacauaagcaagg

SEQ ID NO: 1132179 - RNA, 19 nt, Artificial Sequence
  Description of Artificial Sequence: Synthetic oligonucleotide
agagguaauggcacgguag

SEQ ID NO: 1132180 - RNA, 19 nt, Artificial Sequence
  Description of Artificial Sequence: Synthetic oligonucleotide
auaaagaaucuguguuucu

SEQ ID NO: 1132181 - RNA, 19 nt, Artificial Sequence
  Description of Artificial Sequence: Synthetic oligonucleotide
gucaagaugcccacaauac

SEQ ID NO: 1132182 - RNA, 19 nt, Artificial Sequence
  Description of Artificial Sequence: Synthetic oligonucleotide
ggugguauaggcaggaggc

SEQ ID NO: 1132183 - RNA, 19 nt, Artificial Sequence
  Description of Artificial Sequence: Synthetic oligonucleotide
accacgguaguacgcagag

SEQ ID NO: 1132184 - RNA, 19 nt, Artificial Sequence
  Description of Artificial Sequence: Synthetic oligonucleotide
uggcuauggugguauaggc

SEQ ID NO: 1132185 - RNA, 19 nt, Artificial Sequence
  Description of Artificial Sequence: Synthetic oligonucleotide
uuagugaggguuuggggua

SEQ ID NO: 1132186 - RNA, 19 nt, Artificial Sequence
  Description of Artificial Sequence: Synthetic oligonucleotide
gauagucuugccguccacc

SEQ ID NO: 1132187 - RNA, 19 nt, Artificial Sequence
  Description of Artificial Sequence: Synthetic oligonucleotide
uuuuaguaacgggcaacag

SEQ ID NO: 1132188 - RNA, 19 nt, Artificial Sequence
  Description of Artificial Sequence: Synthetic oligonucleotide
caccacaaacacccgacgg

SEQ ID NO: 1132189 - RNA, 19 nt, Artificial Sequence
  Description of Artificial Sequence: Synthetic oligonucleotide
uucggguaucagcuuagug

SEQ ID NO: 1132190 - RNA, 19 nt, Artificial Sequence
  Description of Artificial Sequence: Synthetic oligonucleotide
aggaggagcucacuuggag

SEQ ID NO: 1132191 - RNA, 19 nt, Artificial Sequence
  Description of Artificial Sequence: Synthetic oligonucleotide
guagaucucugugaggaug

SEQ ID NO: 1132192 - RNA, 19 nt, Artificial Sequence
  Description of Artificial Sequence: Synthetic oligonucleotide
caagugcuuggcaauauca

SEQ ID NO: 1132193 - RNA, 19 nt, Artificial Sequence
  Description of Artificial Sequence: Synthetic oligonucleotide
aggacgugcacgcacgcug

SEQ ID NO: 1132194 - RNA, 19 nt, Artificial Sequence
  Description of Artificial Sequence: Synthetic oligonucleotide
agcuuagugaggguuuggg

SEQ ID NO: 1132195 - RNA, 19 nt, Artificial Sequence
  Description of Artificial Sequence: Synthetic oligonucleotide
cuggcuauggugguauagg

SEQ ID NO: 1132196 - RNA, 19 nt, Artificial Sequence
  Description of Artificial Sequence: Synthetic oligonucleotide
cauuuuaguaacgggcaac

SEQ ID NO: 1132197 - RNA, 19 nt, Artificial Sequence
  Description of Artificial Sequence: Synthetic oligonucleotide
cuuagugaggguuuggggu

SEQ ID NO: 1132198 - RNA, 19 nt, Artificial Sequence
  Description of Artificial Sequence: Synthetic oligonucleotide
cuauggugguauaggcagg

SEQ ID NO: 1132199 - RNA, 19 nt, Artificial Sequence
  Description of Artificial Sequence: Synthetic oligonucleotide
cauucucguaagucaagug

SEQ ID NO: 1132200 - RNA, 19 nt, Artificial Sequence
  Description of Artificial Sequence: Synthetic oligonucleotide
aaaggcccgggccucguca

SEQ ID NO: 1132201 - RNA, 19 nt, Artificial Sequence
  Description of Artificial Sequence: Synthetic oligonucleotide
cagguacauaagcaagggg

SEQ ID NO: 1132202 - RNA, 19 nt, Artificial Sequence
  Description of Artificial Sequence: Synthetic oligonucleotide
ggaggagcucacuuggagg

SEQ ID NO: 1132203 - RNA, 19 nt, Artificial Sequence
  Description of Artificial Sequence: Synthetic oligonucleotide
ggcuuauacauuuuaguaa

SEQ ID NO: 1132204 - RNA, 19 nt, Artificial Sequence
  Description of Artificial Sequence: Synthetic oligonucleotide
cuuugaauaaguagucgua

SEQ ID NO: 1132205 - RNA, 19 nt, Artificial Sequence
  Description of Artificial Sequence: Synthetic oligonucleotide
cacgguagcgcuccugucc

SEQ ID NO: 1132206 - RNA, 19 nt, Artificial Sequence
  Description of Artificial Sequence: Synthetic oligonucleotide
uuuuggcagguuucuguac

SEQ ID NO: 1132207 - RNA, 19 nt, Artificial Sequence
  Description of Artificial Sequence: Synthetic oligonucleotide
gggagaauaagaguucgag

SEQ ID NO: 1132208 - RNA, 19 nt, Artificial Sequence
  Description of Artificial Sequence: Synthetic oligonucleotide
gcauaaaucuacaggcagg

SEQ ID NO: 1132209 - RNA, 19 nt, Artificial Sequence
  Description of Artificial Sequence: Synthetic oligonucleotide
accagcagugcgcccaccg

SEQ ID NO: 1132210 - RNA, 19 nt, Artificial Sequence
  Description of Artificial Sequence: Synthetic oligonucleotide
aucuacaggcaggagcagg

SEQ ID NO: 1132211 - RNA, 19 nt, Artificial Sequence
  Description of Artificial Sequence: Synthetic oligonucleotide
uacauaagcaaggggcuuc

SEQ ID NO: 1132212 - RNA, 19 nt, Artificial Sequence
  Description of Artificial Sequence: Synthetic oligonucleotide
aacgggcaacagugcaggg

SEQ ID NO: 1132213 - RNA, 19 nt, Artificial Sequence
  Description of Artificial Sequence: Synthetic oligonucleotide
ucccggguccccauugucc

SEQ ID NO: 1132214 - RNA, 19 nt, Artificial Sequence
  Description of Artificial Sequence: Synthetic oligonucleotide
gcuuagugaggguuugggg

SEQ ID NO: 1132215 - RNA, 19 nt, Artificial Sequence
  Description of Artificial Sequence: Synthetic oligonucleotide
ucggcgacuccgcagcccc

SEQ ID NO: 1132216 - RNA, 19 nt, Artificial Sequence
  Description of Artificial Sequence: Synthetic oligonucleotide
guguauaaagaaucugugu

SEQ ID NO: 1132217 - RNA, 19 nt, Artificial Sequence
  Description of Artificial Sequence: Synthetic oligonucleotide
ggagaauaagaguucgaga

SEQ ID NO: 1132218 - RNA, 19 nt, Artificial Sequence
  Description of Artificial Sequence: Synthetic oligonucleotide
accgcaccacgguaguacg

SEQ ID NO: 1132219 - RNA, 19 nt, Artificial Sequence
  Description of Artificial Sequence: Synthetic oligonucleotide
gguaauggcacgguagcgc

SEQ ID NO: 1132220 - RNA, 19 nt, Artificial Sequence
  Description of Artificial Sequence: Synthetic oligonucleotide
caggggacucaucaugggc

SEQ ID NO: 1132221 - RNA, 19 nt, Artificial Sequence
  Description of Artificial Sequence: Synthetic oligonucleotide
gacgauguugcugucugca

SEQ ID NO: 1132222 - RNA, 19 nt, Artificial Sequence
  Description of Artificial Sequence: Synthetic oligonucleotide
augcgguagaucucuguga

SEQ ID NO: 1132223 - RNA, 19 nt, Artificial Sequence
  Description of Artificial Sequence: Synthetic oligonucleotide
gcucucaagguugaacucg

SEQ ID NO: 1132224 - RNA, 19 nt, Artificial Sequence
  Description of Artificial Sequence: Synthetic oligonucleotide
guaagucaagugcuuggca

SEQ ID NO: 1132225 - RNA, 19 nt, Artificial Sequence
  Description of Artificial Sequence: Synthetic oligonucleotide
ugaaucgugacagcagguu

SEQ ID NO: 1132226 - RNA, 19 nt, Artificial Sequence
  Description of Artificial Sequence: Synthetic oligonucleotide
guauaaagaaucuguguuu

SEQ ID NO: 1132227 - RNA, 19 nt, Artificial Sequence
  Description of Artificial Sequence: Synthetic oligonucleotide
agggucuucucccagcaua

SEQ ID NO: 1132228 - RNA, 19 nt, Artificial Sequence
  Description of Artificial Sequence: Synthetic oligonucleotide
acgcagagguaauggcacg

SEQ ID NO: 1132229 - RNA, 19 nt, Artificial Sequence
  Description of Artificial Sequence: Synthetic oligonucleotide
cagacagguagacaagaca

SEQ ID NO: 1132230 - RNA, 19 nt, Artificial Sequence
  Description of Artificial Sequence: Synthetic oligonucleotide
agguaauggcacgguagcg

SEQ ID NO: 1132231 - RNA, 19 nt, Artificial Sequence
  Description of Artificial Sequence: Synthetic oligonucleotide
gacacuggagggguuggcc

SEQ ID NO: 1132232 - RNA, 19 nt, Artificial Sequence
  Description of Artificial Sequence: Synthetic oligonucleotide
uguacagaaguuggcuuau

SEQ ID NO: 1132233 - RNA, 19 nt, Artificial Sequence
  Description of Artificial Sequence: Synthetic oligonucleotide
guccauccuaccaaccucc

SEQ ID NO: 1132234 - RNA, 19 nt, Artificial Sequence
  Description of Artificial Sequence: Synthetic oligonucleotide
aaucuacaggcaggagcag

SEQ ID NO: 1132235 - RNA, 19 nt, Artificial Sequence
  Description of Artificial Sequence: Synthetic oligonucleotide
cacgguaguacgcagaggu

SEQ ID NO: 1132236 - RNA, 19 nt, Artificial Sequence
  Description of Artificial Sequence: Synthetic oligonucleotide
ugcucucaagguugaacuc

SEQ ID NO: 1132237 - RNA, 19 nt, Artificial Sequence
  Description of Artificial Sequence: Synthetic oligonucleotide
ucucguaagucaagugcuu

SEQ ID NO: 1132238 - RNA, 19 nt, Artificial Sequence
  Description of Artificial Sequence: Synthetic oligonucleotide
acgggcaacagugcagggg

SEQ ID NO: 1132239 - RNA, 19 nt, Artificial Sequence
  Description of Artificial Sequence: Synthetic oligonucleotide
uccauccuaccaaccuccc

SEQ ID NO: 1132240 - RNA, 19 nt, Artificial Sequence
  Description of Artificial Sequence: Synthetic oligonucleotide
gguuucuguccauccgugg

SEQ ID NO: 1132241 - RNA, 19 nt, Artificial Sequence
  Description of Artificial Sequence: Synthetic oligonucleotide
aggggacucaucaugggcu

SEQ ID NO: 1132242 - RNA, 19 nt, Artificial Sequence
  Description of Artificial Sequence: Synthetic oligonucleotide
cucguaagucaagugcuug

SEQ ID NO: 1132243 - RNA, 19 nt, Artificial Sequence
  Description of Artificial Sequence: Synthetic oligonucleotide
gccacuugacuccugcucc

SEQ ID NO: 1132244 - RNA, 19 nt, Artificial Sequence
  Description of Artificial Sequence: Synthetic oligonucleotide
cugcgugcagaggagaaug

SEQ ID NO: 1132245 - RNA, 19 nt, Artificial Sequence
  Description of Artificial Sequence: Synthetic oligonucleotide
gacagguuccugaccagac

SEQ ID NO: 1132246 - RNA, 19 nt, Artificial Sequence
  Description of Artificial Sequence: Synthetic oligonucleotide
ucaugggcugcgcggucag

SEQ ID NO: 1132247 - RNA, 19 nt, Artificial Sequence
  Description of Artificial Sequence: Synthetic oligonucleotide
uauuggguuucuguccauc

SEQ ID NO: 1132248 - RNA, 19 nt, Artificial Sequence
  Description of Artificial Sequence: Synthetic oligonucleotide
agggccgaggacgugcacg

SEQ ID NO: 1132249 - RNA, 19 nt, Artificial Sequence
  Description of Artificial Sequence: Synthetic oligonucleotide
uagggaugcauggccagcu

SEQ ID NO: 1132250 - RNA, 19 nt, Artificial Sequence
  Description of Artificial Sequence: Synthetic oligonucleotide
aggcuacaagagcaguugu

SEQ ID NO: 1132251 - RNA, 19 nt, Artificial Sequence
  Description of Artificial Sequence: Synthetic oligonucleotide
cggguaucagcuuagugag

SEQ ID NO: 1132252 - RNA, 19 nt, Artificial Sequence
  Description of Artificial Sequence: Synthetic oligonucleotide
ugaacucguuucuggugaa

SEQ ID NO: 1132253 - RNA, 19 nt, Artificial Sequence
  Description of Artificial Sequence: Synthetic oligonucleotide
ggaucggcgacuccgcagc

SEQ ID NO: 1132254 - RNA, 19 nt, Artificial Sequence
  Description of Artificial Sequence: Synthetic oligonucleotide
gggguagggaugcauggcc

SEQ ID NO: 1132255 - RNA, 19 nt, Artificial Sequence
  Description of Artificial Sequence: Synthetic oligonucleotide
ugacgauguugcugucugc

SEQ ID NO: 1132256 - RNA, 19 nt, Artificial Sequence
  Description of Artificial Sequence: Synthetic oligonucleotide
auuguugccaggggacuca

SEQ ID NO: 1132257 - RNA, 19 nt, Artificial Sequence
  Description of Artificial Sequence: Synthetic oligonucleotide
uagugaggguuugggguag

SEQ ID NO: 1132258 - RNA, 19 nt, Artificial Sequence
  Description of Artificial Sequence: Synthetic oligonucleotide
cuguacagaaguuggcuua

SEQ ID NO: 1132259 - RNA, 19 nt, Artificial Sequence
  Description of Artificial Sequence: Synthetic oligonucleotide
gugaucgcucccuggaguc

SEQ ID NO: 1132260 - RNA, 19 nt, Artificial Sequence
  Description of Artificial Sequence: Synthetic oligonucleotide
caauaagcaccacuuugaa

SEQ ID NO: 1132261 - RNA, 19 nt, Artificial Sequence
  Description of Artificial Sequence: Synthetic oligonucleotide
guuucuguccauccguggu

SEQ ID NO: 1132262 - RNA, 19 nt, Artificial Sequence
  Description of Artificial Sequence: Synthetic oligonucleotide
cuuggagggugggagcagc

SEQ ID NO: 1132263 - RNA, 19 nt, Artificial Sequence
  Description of Artificial Sequence: Synthetic oligonucleotide
aggggcuacagggagaaua

SEQ ID NO: 1132264 - RNA, 19 nt, Artificial Sequence
  Description of Artificial Sequence: Synthetic oligonucleotide
guaguacgcagagguaaug

SEQ ID NO: 1132265 - RNA, 19 nt, Artificial Sequence
  Description of Artificial Sequence: Synthetic oligonucleotide
gacggggcggaaccggcgc

SEQ ID NO: 1132266 - RNA, 19 nt, Artificial Sequence
  Description of Artificial Sequence: Synthetic oligonucleotide
uggcgcaggucacucuugu

SEQ ID NO: 1132267 - RNA, 19 nt, Artificial Sequence
  Description of Artificial Sequence: Synthetic oligonucleotide
uucgagagcugggguuugg

SEQ ID NO: 1132268 - RNA, 19 nt, Artificial Sequence
  Description of Artificial Sequence: Synthetic oligonucleotide
cuggugaaucgugacagca

SEQ ID NO: 1132269 - RNA, 19 nt, Artificial Sequence
  Description of Artificial Sequence: Synthetic oligonucleotide
gagcucacuuggagggugg

SEQ ID NO: 1132270 - RNA, 19 nt, Artificial Sequence
  Description of Artificial Sequence: Synthetic oligonucleotide
ggaggugaucgcucccugg

SEQ ID NO: 1132271 - RNA, 19 nt, Artificial Sequence
  Description of Artificial Sequence: Synthetic oligonucleotide
acauaagcaaggggcuucu

SEQ ID NO: 1132272 - RNA, 19 nt, Artificial Sequence
  Description of Artificial Sequence: Synthetic oligonucleotide
cacccgacggggcggaacc

SEQ ID NO: 1132273 - RNA, 19 nt, Artificial Sequence
  Description of Artificial Sequence: Synthetic oligonucleotide
acggggcggaaccggcgcc

SEQ ID NO: 1132274 - RNA, 19 nt, Artificial Sequence
  Description of Artificial Sequence: Synthetic oligonucleotide
cacccgaguccccaauaag

SEQ ID NO: 1132275 - RNA, 19 nt, Artificial Sequence
  Description of Artificial Sequence: Synthetic oligonucleotide
uccacgccgauggugcucu

SEQ ID NO: 1132276 - RNA, 19 nt, Artificial Sequence
  Description of Artificial Sequence: Synthetic oligonucleotide
ccuaccaaccuccccacac

SEQ ID NO: 1132277 - RNA, 19 nt, Artificial Sequence
  Description of Artificial Sequence: Synthetic oligonucleotide
aggaggugaucgcucccug

SEQ ID NO: 1132278 - RNA, 19 nt, Artificial Sequence
  Description of Artificial Sequence: Synthetic oligonucleotide
guagcgaacuccacgccga

SEQ ID NO: 1132279 - RNA, 19 nt, Artificial Sequence
  Description of Artificial Sequence: Synthetic oligonucleotide
agugcgcccaccgcaccac

SEQ ID NO: 1132280 - RNA, 19 nt, Artificial Sequence
  Description of Artificial Sequence: Synthetic oligonucleotide
agacagguuccugaccaga

SEQ ID NO: 1132281 - RNA, 19 nt, Artificial Sequence
  Description of Artificial Sequence: Synthetic oligonucleotide
ggcuacagggagaauaaga

SEQ ID NO: 1132282 - RNA, 19 nt, Artificial Sequence
  Description of Artificial Sequence: Synthetic oligonucleotide
uauaggcaggaggcagagc

SEQ ID NO: 1132283 - RNA, 19 nt, Artificial Sequence
  Description of Artificial Sequence: Synthetic oligonucleotide
cuacaagagcaguuguaua

SEQ ID NO: 1132284 - RNA, 19 nt, Artificial Sequence
  Description of Artificial Sequence: Synthetic oligonucleotide
caccgcaccacgguaguac

SEQ ID NO: 1132285 - RNA, 19 nt, Artificial Sequence
  Description of Artificial Sequence: Synthetic oligonucleotide
uuauuggguuucuguccau

SEQ ID NO: 1132286 - RNA, 19 nt, Artificial Sequence
  Description of Artificial Sequence: Synthetic oligonucleotide
ucgagagcugggguuuggc

SEQ ID NO: 1132287 - RNA, 19 nt, Artificial Sequence
  Description of Artificial Sequence: Synthetic oligonucleotide
ugaaugcugcggguagcga

SEQ ID NO: 1132288 - RNA, 19 nt, Artificial Sequence
  Description of Artificial Sequence: Synthetic oligonucleotide
uguccggcagugucccaga

SEQ ID NO: 1132289 - RNA, 19 nt, Artificial Sequence
  Description of Artificial Sequence: Synthetic oligonucleotide
aggauguucuugaaugcuu

SEQ ID NO: 1132290 - RNA, 19 nt, Artificial Sequence
  Description of Artificial Sequence: Synthetic oligonucleotide
gguuuggcguaaauuuuac

SEQ ID NO: 1132291 - RNA, 19 nt, Artificial Sequence
  Description of Artificial Sequence: Synthetic oligonucleotide
gguagacaagacagagaag

SEQ ID NO: 1132292 - RNA, 19 nt, Artificial Sequence
  Description of Artificial Sequence: Synthetic oligonucleotide
gaggccgugcuggcgcugg

SEQ ID NO: 1132293 - RNA, 19 nt, Artificial Sequence
  Description of Artificial Sequence: Synthetic oligonucleotide
acucaucgucccggguccc

SEQ ID NO: 1132294 - RNA, 19 nt, Artificial Sequence
  Description of Artificial Sequence: Synthetic oligonucleotide
aaacacccgacggggcgga

SEQ ID NO: 1132295 - RNA, 19 nt, Artificial Sequence
  Description of Artificial Sequence: Synthetic oligonucleotide
ccagacagguagacaagac

SEQ ID NO: 1132296 - RNA, 19 nt, Artificial Sequence
  Description of Artificial Sequence: Synthetic oligonucleotide
ugcggguagcgaacuccac

SEQ ID NO: 1132297 - RNA, 19 nt, Artificial Sequence
  Description of Artificial Sequence: Synthetic oligonucleotide
cauuguccuggcgcuuccg

SEQ ID NO: 1132298 - RNA, 19 nt, Artificial Sequence
  Description of Artificial Sequence: Synthetic oligonucleotide
cagcuuauuggguuucugu

SEQ ID NO: 1132299 - RNA, 19 nt, Artificial Sequence
  Description of Artificial Sequence: Synthetic oligonucleotide
gguacauaagcaaggggcu

SEQ ID NO: 1132300 - RNA, 19 nt, Artificial Sequence
  Description of Artificial Sequence: Synthetic oligonucleotide
cggguagcgaacuccacgc

SEQ ID NO: 1132301 - RNA, 19 nt, Artificial Sequence
  Description of Artificial Sequence: Synthetic oligonucleotide
ugaucgcucccuggagucu

SEQ ID NO: 1132302 - RNA, 19 nt, Artificial Sequence
  Description of Artificial Sequence: Synthetic oligonucleotide
cucuucggguaucagcuua

SEQ ID NO: 1132303 - RNA, 19 nt, Artificial Sequence
  Description of Artificial Sequence: Synthetic oligonucleotide
gggaucggcgacuccgcag

SEQ ID NO: 1132304 - RNA, 19 nt, Artificial Sequence
  Description of Artificial Sequence: Synthetic oligonucleotide
agggagaauaagaguucga

SEQ ID NO: 1132305 - RNA, 19 nt, Artificial Sequence
  Description of Artificial Sequence: Synthetic oligonucleotide
ugcgcaggccugggaaugc

SEQ ID NO: 1132306 - RNA, 19 nt, Artificial Sequence
  Description of Artificial Sequence: Synthetic oligonucleotide
cagcuuagugaggguuugg

SEQ ID NO: 1132307 - RNA, 19 nt, Artificial Sequence
  Description of Artificial Sequence: Synthetic oligonucleotide
ccacaauacccaagagcag

SEQ ID NO: 1132308 - RNA, 19 nt, Artificial Sequence
  Description of Artificial Sequence: Synthetic oligonucleotide
cugcggguagcgaacucca

SEQ ID NO: 1132309 - RNA, 19 nt, Artificial Sequence
  Description of Artificial Sequence: Synthetic oligonucleotide
ggagcucacuuggagggug

SEQ ID NO: 1132310 - RNA, 19 nt, Artificial Sequence
  Description of Artificial Sequence: Synthetic oligonucleotide
cucucaagguugaacucgu

SEQ ID NO: 1132311 - RNA, 19 nt, Artificial Sequence
  Description of Artificial Sequence: Synthetic oligonucleotide
ggacgugcacgcacgcugg

SEQ ID NO: 1132312 - RNA, 19 nt, Artificial Sequence
  Description of Artificial Sequence: Synthetic oligonucleotide
gcgguagaucucugugagg

SEQ ID NO: 1132313 - RNA, 19 nt, Artificial Sequence
  Description of Artificial Sequence: Synthetic oligonucleotide
aucgcucccuggagucugc

SEQ ID NO: 1132314 - RNA, 19 nt, Artificial Sequence
  Description of Artificial Sequence: Synthetic oligonucleotide
gggccgaggacgugcacgc

SEQ ID NO: 1132315 - RNA, 19 nt, Artificial Sequence
  Description of Artificial Sequence: Synthetic oligonucleotide
uguugccaggggacucauc

SEQ ID NO: 1132316 - RNA, 19 nt, Artificial Sequence
  Description of Artificial Sequence: Synthetic oligonucleotide
cucaagguugaacucguuu

SEQ ID NO: 1132317 - RNA, 19 nt, Artificial Sequence
  Description of Artificial Sequence: Synthetic oligonucleotide
uagcgaacuccacgccgau

SEQ ID NO: 1132318 - RNA, 19 nt, Artificial Sequence
  Description of Artificial Sequence: Synthetic oligonucleotide
ggccucgucagugggcacg

SEQ ID NO: 1132319 - RNA, 19 nt, Artificial Sequence
  Description of Artificial Sequence: Synthetic oligonucleotide
ugcugcggguagcgaacuc

SEQ ID NO: 1132320 - RNA, 19 nt, Artificial Sequence
  Description of Artificial Sequence: Synthetic oligonucleotide
acuccacgccgauggugcu

SEQ ID NO: 1132321 - RNA, 19 nt, Artificial Sequence
  Description of Artificial Sequence: Synthetic oligonucleotide
cauccgugguggguggcac

SEQ ID NO: 1132322 - RNA, 19 nt, Artificial Sequence
  Description of Artificial Sequence: Synthetic oligonucleotide
gccgauggugcucuugcuc

SEQ ID NO: 1132323 - RNA, 19 nt, Artificial Sequence
  Description of Artificial Sequence: Synthetic oligonucleotide
ugggcugcgcggucagcaa

SEQ ID NO: 1132324 - RNA, 19 nt, Artificial Sequence
  Description of Artificial Sequence: Synthetic oligonucleotide
ggguaucagcuuagugagg

SEQ ID NO: 1132325 - RNA, 19 nt, Artificial Sequence
  Description of Artificial Sequence: Synthetic oligonucleotide
ccacauucucguaagucaa

SEQ ID NO: 1132326 - RNA, 19 nt, Artificial Sequence
  Description of Artificial Sequence: Synthetic oligonucleotide
gcuacaagagcaguuguau

SEQ ID NO: 1132327 - RNA, 19 nt, Artificial Sequence
  Description of Artificial Sequence: Synthetic oligonucleotide
aggccgugcuggcgcuggc

SEQ ID NO: 1132328 - RNA, 19 nt, Artificial Sequence
  Description of Artificial Sequence: Synthetic oligonucleotide
agcgaacuccacgccgaug

SEQ ID NO: 1132329 - RNA, 19 nt, Artificial Sequence
  Description of Artificial Sequence: Synthetic oligonucleotide
ggguagcgaacuccacgcc

SEQ ID NO: 1132330 - RNA, 19 nt, Artificial Sequence
  Description of Artificial Sequence: Synthetic oligonucleotide
guagcgcuccuguccggca

SEQ ID NO: 1132331 - RNA, 19 nt, Artificial Sequence
  Description of Artificial Sequence: Synthetic oligonucleotide
cgugcacgcacgcuggggc

SEQ ID NO: 1132332 - RNA, 19 nt, Artificial Sequence
  Description of Artificial Sequence: Synthetic oligonucleotide
cagagguaauggcacggua

SEQ ID NO: 1132333 - RNA, 19 nt, Artificial Sequence
  Description of Artificial Sequence: Synthetic oligonucleotide
ggugaucgcucccuggagu

SEQ ID NO: 1132334 - RNA, 19 nt, Artificial Sequence
  Description of Artificial Sequence: Synthetic oligonucleotide
uccauccgugguggguggc

SEQ ID NO: 1132335 - RNA, 19 nt, Artificial Sequence
  Description of Artificial Sequence: Synthetic oligonucleotide
cucguuucuggugaaucgu

SEQ ID NO: 1132336 - RNA, 19 nt, Artificial Sequence
  Description of Artificial Sequence: Synthetic oligonucleotide
aggagcucacuuggagggu

SEQ ID NO: 1132337 - RNA, 19 nt, Artificial Sequence
  Description of Artificial Sequence: Synthetic oligonucleotide
cgguagaucucugugagga

SEQ ID NO: 1132338 - RNA, 19 nt, Artificial Sequence
  Description of Artificial Sequence: Synthetic oligonucleotide
ccauccuaccaaccucccc

SEQ ID NO: 1132339 - RNA, 19 nt, Artificial Sequence
  Description of Artificial Sequence: Synthetic oligonucleotide
gcaccacgguaguacgcag

SEQ ID NO: 1132340 - RNA, 19 nt, Artificial Sequence
  Description of Artificial Sequence: Synthetic oligonucleotide
gugcgcccaccgcaccacg

SEQ ID NO: 1132341 - RNA, 19 nt, Artificial Sequence
  Description of Artificial Sequence: Synthetic oligonucleotide
ggcguaaauuuuacaaagu

SEQ ID NO: 1132342 - RNA, 19 nt, Artificial Sequence
  Description of Artificial Sequence: Synthetic oligonucleotide
cugcgcggucagcaauuug

SEQ ID NO: 1132343 - RNA, 19 nt, Artificial Sequence
  Description of Artificial Sequence: Synthetic oligonucleotide
uggcacgguagcgcuccug

SEQ ID NO: 1132344 - RNA, 19 nt, Artificial Sequence
  Description of Artificial Sequence: Synthetic oligonucleotide
guggcgcaggucacucuug

SEQ ID NO: 1132345 - RNA, 19 nt, Artificial Sequence
  Description of Artificial Sequence: Synthetic oligonucleotide
gugaaucgugacagcaggu

SEQ ID NO: 1132346 - RNA, 19 nt, Artificial Sequence
  Description of Artificial Sequence: Synthetic oligonucleotide
gccucgucagugggcacgg

SEQ ID NO: 1132347 - RNA, 19 nt, Artificial Sequence
  Description of Artificial Sequence: Synthetic oligonucleotide
acccgacggggcggaaccg

SEQ ID NO: 1132348 - RNA, 19 nt, Artificial Sequence
  Description of Artificial Sequence: Synthetic oligonucleotide
cagugcgcccaccgcacca

SEQ ID NO: 1132349 - RNA, 19 nt, Artificial Sequence
  Description of Artificial Sequence: Synthetic oligonucleotide
gcccaccagcaugaugacg

SEQ ID NO: 1132350 - RNA, 19 nt, Artificial Sequence
  Description of Artificial Sequence: Synthetic oligonucleotide
ggcuacaagagcaguugua

SEQ ID NO: 1132351 - RNA, 19 nt, Artificial Sequence
  Description of Artificial Sequence: Synthetic oligonucleotide
agaucucugugaggauguu

SEQ ID NO: 1132352 - RNA, 19 nt, Artificial Sequence
  Description of Artificial Sequence: Synthetic oligonucleotide
cagugggcacggcccgcag

SEQ ID NO: 1132353 - RNA, 19 nt, Artificial Sequence
  Description of Artificial Sequence: Synthetic oligonucleotide
caugggcugcgcggucagc

SEQ ID NO: 1132354 - RNA, 19 nt, Artificial Sequence
  Description of Artificial Sequence: Synthetic oligonucleotide
cuccacgccgauggugcuc

SEQ ID NO: 1132355 - RNA, 19 nt, Artificial Sequence
  Description of Artificial Sequence: Synthetic oligonucleotide
ccgcagguggcgcagguca

SEQ ID NO: 1132356 - RNA, 19 nt, Artificial Sequence
  Description of Artificial Sequence: Synthetic oligonucleotide
ccgauggugcucuugcucu

SEQ ID NO: 1132357 - RNA, 19 nt, Artificial Sequence
  Description of Artificial Sequence: Synthetic oligonucleotide
gcccaccgcaccacgguag

SEQ ID NO: 1132358 - RNA, 19 nt, Artificial Sequence
  Description of Artificial Sequence: Synthetic oligonucleotide
caccugaaugcugcgggua

SEQ ID NO: 1132359 - RNA, 19 nt, Artificial Sequence
  Description of Artificial Sequence: Synthetic oligonucleotide
gcgcuccacauucucguaa

SEQ ID NO: 1132360 - RNA, 19 nt, Artificial Sequence
  Description of Artificial Sequence: Synthetic oligonucleotide
auggcacgguagcgcuccu

SEQ ID NO: 1132361 - RNA, 19 nt, Artificial Sequence
  Description of Artificial Sequence: Synthetic oligonucleotide
gguaguacgcagagguaau

SEQ ID NO: 1132362 - RNA, 19 nt, Artificial Sequence
  Description of Artificial Sequence: Synthetic oligonucleotide
gaacucguuucuggugaau

SEQ ID NO: 1132363 - RNA, 19 nt, Artificial Sequence
  Description of Artificial Sequence: Synthetic oligonucleotide
gugguggguggcacacuga

SEQ ID NO: 1132364 - RNA, 19 nt, Artificial Sequence
  Description of Artificial Sequence: Synthetic oligonucleotide
gcagugcgcccaccgcacc

SEQ ID NO: 1132365 - RNA, 19 nt, Artificial Sequence
  Description of Artificial Sequence: Synthetic oligonucleotide
gcgugcagaggagaaugga

SEQ ID NO: 1132366 - RNA, 19 nt, Artificial Sequence
  Description of Artificial Sequence: Synthetic oligonucleotide
ccgacggggcggaaccggc

SEQ ID NO: 1132367 - RNA, 19 nt, Artificial Sequence
  Description of Artificial Sequence: Synthetic oligonucleotide
gaggacgugcacgcacgcu

SEQ ID NO: 1132368 - RNA, 19 nt, Artificial Sequence
  Description of Artificial Sequence: Synthetic oligonucleotide
gguagaucucugugaggau

SEQ ID NO: 1132369 - RNA, 19 nt, Artificial Sequence
  Description of Artificial Sequence: Synthetic oligonucleotide
ggccgggaggacacuggag

SEQ ID NO: 1132370 - RNA, 19 nt, Artificial Sequence
  Description of Artificial Sequence: Synthetic oligonucleotide
gcaccacuuugaauaagua

SEQ ID NO: 1132371 - RNA, 19 nt, Artificial Sequence
  Description of Artificial Sequence: Synthetic oligonucleotide
ggcaacagugcaggggcua

SEQ ID NO: 1132372 - RNA, 19 nt, Artificial Sequence
  Description of Artificial Sequence: Synthetic oligonucleotide
ggcgacuccgcagccccac

SEQ ID NO: 1132373 - RNA, 19 nt, Artificial Sequence
  Description of Artificial Sequence: Synthetic oligonucleotide
aacacccgacggggcggaa

SEQ ID NO: 1132374 - RNA, 19 nt, Artificial Sequence
  Description of Artificial Sequence: Synthetic oligonucleotide
gggcggaaccggcgccgcg

SEQ ID NO: 1132375 - RNA, 19 nt, Artificial Sequence
  Description of Artificial Sequence: Synthetic oligonucleotide
ggagagcgcugcgugcaga

SEQ ID NO: 1132376 - RNA, 19 nt, Artificial Sequence
  Description of Artificial Sequence: Synthetic oligonucleotide
cuguccauccguggugggu

SEQ ID NO: 1132377 - RNA, 19 nt, Artificial Sequence
  Description of Artificial Sequence: Synthetic oligonucleotide
gccguccaccugaaugcug

SEQ ID NO: 1132378 - RNA, 19 nt, Artificial Sequence
  Description of Artificial Sequence: Synthetic oligonucleotide
cauaagcaaggggcuucua

SEQ ID NO: 1132379 - RNA, 19 nt, Artificial Sequence
  Description of Artificial Sequence: Synthetic oligonucleotide
gggguuuggcguaaauuuu

SEQ ID NO: 1132380 - RNA, 19 nt, Artificial Sequence
  Description of Artificial Sequence: Synthetic oligonucleotide
cgaggacgugcacgcacgc

SEQ ID NO: 1132381 - RNA, 19 nt, Artificial Sequence
  Description of Artificial Sequence: Synthetic oligonucleotide
cgacggggcggaaccggcg

SEQ ID NO: 1132382 - RNA, 19 nt, Artificial Sequence
  Description of Artificial Sequence: Synthetic oligonucleotide
gcgacuccgcagccccacc

SEQ ID NO: 1132383 - RNA, 19 nt, Artificial Sequence
  Description of Artificial Sequence: Synthetic oligonucleotide
cuucggguaucagcuuagu

SEQ ID NO: 1132384 - RNA, 19 nt, Artificial Sequence
  Description of Artificial Sequence: Synthetic oligonucleotide
acgcuggggcagggugguc

SEQ ID NO: 1132385 - RNA, 19 nt, Artificial Sequence
  Description of Artificial Sequence: Synthetic oligonucleotide
cgcaccacgguaguacgca

SEQ ID NO: 1132386 - RNA, 19 nt, Artificial Sequence
  Description of Artificial Sequence: Synthetic oligonucleotide
cccggguccccauuguccu

SEQ ID NO: 1132387 - RNA, 19 nt, Artificial Sequence
  Description of Artificial Sequence: Synthetic oligonucleotide
ccacuugacuccugcuccu

SEQ ID NO: 1132388 - RNA, 19 nt, Artificial Sequence
  Description of Artificial Sequence: Synthetic oligonucleotide
ccggcuccuuccacucauc

SEQ ID NO: 1132389 - RNA, 19 nt, Artificial Sequence
  Description of Artificial Sequence: Synthetic oligonucleotide
gcugggguuuggcguaaau

SEQ ID NO: 1132390 - RNA, 19 nt, Artificial Sequence
  Description of Artificial Sequence: Synthetic oligonucleotide
ggaggccgugcuggcgcug

SEQ ID NO: 1132391 - RNA, 19 nt, Artificial Sequence
  Description of Artificial Sequence: Synthetic oligonucleotide
gggccucgucagugggcac

SEQ ID NO: 1132392 - RNA, 19 nt, Artificial Sequence
  Description of Artificial Sequence: Synthetic oligonucleotide
gccaagggccgaggacgug

SEQ ID NO: 1132393 - RNA, 19 nt, Artificial Sequence
  Description of Artificial Sequence: Synthetic oligonucleotide
ccauccgugguggguggca

SEQ ID NO: 1132394 - RNA, 19 nt, Artificial Sequence
  Description of Artificial Sequence: Synthetic oligonucleotide
caucgucccggguccccau

SEQ ID NO: 1132395 - RNA, 19 nt, Artificial Sequence
  Description of Artificial Sequence: Synthetic oligonucleotide
gcugcgugcagaggagaau

SEQ ID NO: 1132396 - RNA, 19 nt, Artificial Sequence
  Description of Artificial Sequence: Synthetic oligonucleotide
cggggcggaaccggcgccg

SEQ ID NO: 1132397 - RNA, 19 nt, Artificial Sequence
  Description of Artificial Sequence: Synthetic oligonucleotide
gcgcccaccgcaccacggu

SEQ ID NO: 1132398 - RNA, 19 nt, Artificial Sequence
  Description of Artificial Sequence: Synthetic oligonucleotide
gcagguggcgcaggucacu

SEQ ID NO: 1132399 - RNA, 19 nt, Artificial Sequence
  Description of Artificial Sequence: Synthetic oligonucleotide
cauggucccguagcuccuu

SEQ ID NO: 1132400 - RNA, 19 nt, Artificial Sequence
  Description of Artificial Sequence: Synthetic oligonucleotide
gccuggcucuucggguauc

SEQ ID NO: 1132401 - RNA, 19 nt, Artificial Sequence
  Description of Artificial Sequence: Synthetic oligonucleotide
ccucgucagugggcacggc

SEQ ID NO: 1132402 - RNA, 19 nt, Artificial Sequence
  Description of Artificial Sequence: Synthetic oligonucleotide
ggccgaggacgugcacgca

SEQ ID NO: 1132403 - RNA, 19 nt, Artificial Sequence
  Description of Artificial Sequence: Synthetic oligonucleotide
cgggaucggcgacuccgca

SEQ ID NO: 1132404 - RNA, 19 nt, Artificial Sequence
  Description of Artificial Sequence: Synthetic oligonucleotide
gcugcgcggucagcaauuu

SEQ ID NO: 1132405 - RNA, 19 nt, Artificial Sequence
  Description of Artificial Sequence: Synthetic oligonucleotide
cgcuuccggcgggaucggc

SEQ ID NO: 1132406 - RNA, 19 nt, Artificial Sequence
  Description of Artificial Sequence: Synthetic oligonucleotide
cgaacuccacgccgauggu

SEQ ID NO: 1132407 - RNA, 19 nt, Artificial Sequence
  Description of Artificial Sequence: Synthetic oligonucleotide
cuggcgcuuccggcgggau

SEQ ID NO: 1132408 - RNA, 19 nt, Artificial Sequence
  Description of Artificial Sequence: Synthetic oligonucleotide
ccgugcuggcgcuggcuau

SEQ ID NO: 1132409 - RNA, 19 nt, Artificial Sequence
  Description of Artificial Sequence: Synthetic oligonucleotide
cgcccaccgcaccacggua

SEQ ID NO: 1132410 - RNA, 19 nt, Artificial Sequence
  Description of Artificial Sequence: Synthetic oligonucleotide
ccaccgcaccacgguagua

SEQ ID NO: 1132411 - RNA, 19 nt, Artificial Sequence
  Description of Artificial Sequence: Synthetic oligonucleotide
cgucccggguccccauugu

SEQ ID NO: 1132412 - RNA, 19 nt, Artificial Sequence
  Description of Artificial Sequence: Synthetic oligonucleotide
cgcuggcuauggugguaua

SEQ ID NO: 1132413 - RNA, 19 nt, Artificial Sequence
  Description of Artificial Sequence: Synthetic oligonucleotide
ccgugguggguggcacacu

SEQ ID NO: 1132414 - RNA, 19 nt, Artificial Sequence
  Description of Artificial Sequence: Synthetic oligonucleotide
auuaccaagggacagagac

SEQ ID NO: 1132415 - RNA, 19 nt, Artificial Sequence
  Description of Artificial Sequence: Synthetic oligonucleotide
aacaaauagucauugggac

SEQ ID NO: 1132416 - RNA, 19 nt, Artificial Sequence
  Description of Artificial Sequence: Synthetic oligonucleotide
uuuagcuggauauacagcc

SEQ ID NO: 1132417 - RNA, 19 nt, Artificial Sequence
  Description of Artificial Sequence: Synthetic oligonucleotide
uucuucgaaagccugaggg

SEQ ID NO: 1132418 - RNA, 19 nt, Artificial Sequence
  Description of Artificial Sequence: Synthetic oligonucleotide
uguuccacaacaaauaguc

SEQ ID NO: 1132419 - RNA, 19 nt, Artificial Sequence
  Description of Artificial Sequence: Synthetic oligonucleotide
acaucugaucauuagcucc

SEQ ID NO: 1132420 - RNA, 19 nt, Artificial Sequence
  Description of Artificial Sequence: Synthetic oligonucleotide
ugaccuugugaacugaucg

SEQ ID NO: 1132421 - RNA, 19 nt, Artificial Sequence
  Description of Artificial Sequence: Synthetic oligonucleotide
aauuauguaggaccuagga

SEQ ID NO: 1132422 - RNA, 19 nt, Artificial Sequence
  Description of Artificial Sequence: Synthetic oligonucleotide
uuagcagucacuugugggg

SEQ ID NO: 1132423 - RNA, 19 nt, Artificial Sequence
  Description of Artificial Sequence: Synthetic oligonucleotide
aaauguguuagacccuaac

SEQ ID NO: 1132424 - RNA, 19 nt, Artificial Sequence
  Description of Artificial Sequence: Synthetic oligonucleotide
aacugaucgacccaggccu

SEQ ID NO: 1132425 - RNA, 19 nt, Artificial Sequence
  Description of Artificial Sequence: Synthetic oligonucleotide
aauguguuagacccuaaca

SEQ ID NO: 1132426 - RNA, 19 nt, Artificial Sequence
  Description of Artificial Sequence: Synthetic oligonucleotide
ugaugccuagguuauagcg

SEQ ID NO: 1132427 - RNA, 19 nt, Artificial Sequence
  Description of Artificial Sequence: Synthetic oligonucleotide
acagugaacccucuuacac

SEQ ID NO: 1132428 - RNA, 19 nt, Artificial Sequence
  Description of Artificial Sequence: Synthetic oligonucleotide
agugaacccucuuacacac

SEQ ID NO: 1132429 - RNA, 19 nt, Artificial Sequence
  Description of Artificial Sequence: Synthetic oligonucleotide
cucccuacaauuauguagg

SEQ ID NO: 1132430 - RNA, 19 nt, Artificial Sequence
  Description of Artificial Sequence: Synthetic oligonucleotide
agcgggaccggauauaccc

SEQ ID NO: 1132431 - RNA, 19 nt, Artificial Sequence
  Description of Artificial Sequence: Synthetic oligonucleotide
acucccuacaauuauguag

SEQ ID NO: 1132432 - RNA, 19 nt, Artificial Sequence
  Description of Artificial Sequence: Synthetic oligonucleotide
acuaugcaccccuacaucg

SEQ ID NO: 1132433 - RNA, 19 nt, Artificial Sequence
  Description of Artificial Sequence: Synthetic oligonucleotide
auaaauggcagcugaugac

SEQ ID NO: 1132434 - RNA, 19 nt, Artificial Sequence
  Description of Artificial Sequence: Synthetic oligonucleotide
ucuuacacacgacugcccg

SEQ ID NO: 1132435 - RNA, 19 nt, Artificial Sequence
  Description of Artificial Sequence: Synthetic oligonucleotide
aaagaggcuuagcagucac

SEQ ID NO: 1132436 - RNA, 19 nt, Artificial Sequence
  Description of Artificial Sequence: Synthetic oligonucleotide
ugugucuccccacacagag

SEQ ID NO: 1132437 - RNA, 19 nt, Artificial Sequence
  Description of Artificial Sequence: Synthetic oligonucleotide
ugaucauuagcuccugaag

SEQ ID NO: 1132438 - RNA, 19 nt, Artificial Sequence
  Description of Artificial Sequence: Synthetic oligonucleotide
uuagacccuaacauaaaug

SEQ ID NO: 1132439 - RNA, 19 nt, Artificial Sequence
  Description of Artificial Sequence: Synthetic oligonucleotide
cacuucaagaaacagggag

SEQ ID NO: 1132440 - RNA, 19 nt, Artificial Sequence
  Description of Artificial Sequence: Synthetic oligonucleotide
aauaaauugauggaaccuu

SEQ ID NO: 1132441 - RNA, 19 nt, Artificial Sequence
  Description of Artificial Sequence: Synthetic oligonucleotide
uaguucaagggcucuacgg

SEQ ID NO: 1132442 - RNA, 19 nt, Artificial Sequence
  Description of Artificial Sequence: Synthetic oligonucleotide
gaucauuagcuccugaaga

SEQ ID NO: 1132443 - RNA, 19 nt, Artificial Sequence
  Description of Artificial Sequence: Synthetic oligonucleotide
agcgagaaccccucuaggc

SEQ ID NO: 1132444 - RNA, 19 nt, Artificial Sequence
  Description of Artificial Sequence: Synthetic oligonucleotide
gauguucucuuacauggcc

SEQ ID NO: 1132445 - RNA, 19 nt, Artificial Sequence
  Description of Artificial Sequence: Synthetic oligonucleotide
auaggcgucacucuggccu

SEQ ID NO: 1132446 - RNA, 19 nt, Artificial Sequence
  Description of Artificial Sequence: Synthetic oligonucleotide
ucuauagcugacuuggcuc

SEQ ID NO: 1132447 - RNA, 19 nt, Artificial Sequence
  Description of Artificial Sequence: Synthetic oligonucleotide
gaugccuagguuauagcgg

SEQ ID NO: 1132448 - RNA, 19 nt, Artificial Sequence
  Description of Artificial Sequence: Synthetic oligonucleotide
uuccacaacaaauagucau

SEQ ID NO: 1132449 - RNA, 19 nt, Artificial Sequence
  Description of Artificial Sequence: Synthetic oligonucleotide
augccuagguuauagcggg

SEQ ID NO: 1132450 - RNA, 19 nt, Artificial Sequence
  Description of Artificial Sequence: Synthetic oligonucleotide
uuggguccuacccaaaaug

SEQ ID NO: 1132451 - RNA, 19 nt, Artificial Sequence
  Description of Artificial Sequence: Synthetic oligonucleotide
aaugcagcaccaagaaagg

SEQ ID NO: 1132452 - RNA, 19 nt, Artificial Sequence
  Description of Artificial Sequence: Synthetic oligonucleotide
cuuguggaggcaauauggg

SEQ ID NO: 1132453 - RNA, 19 nt, Artificial Sequence
  Description of Artificial Sequence: Synthetic oligonucleotide
agaugugaggucaucauag

SEQ ID NO: 1132454 - RNA, 19 nt, Artificial Sequence
  Description of Artificial Sequence: Synthetic oligonucleotide
uauguaggaccuaggacac

SEQ ID NO: 1132455 - RNA, 19 nt, Artificial Sequence
  Description of Artificial Sequence: Synthetic oligonucleotide
uguaggaccuaggacacag

SEQ ID NO: 1132456 - RNA, 19 nt, Artificial Sequence
  Description of Artificial Sequence: Synthetic oligonucleotide
aaagccugaggguggucac

SEQ ID NO: 1132457 - RNA, 19 nt, Artificial Sequence
  Description of Artificial Sequence: Synthetic oligonucleotide
uucccuaugucauuggguc

SEQ ID NO: 1132458 - RNA, 19 nt, Artificial Sequence
  Description of Artificial Sequence: Synthetic oligonucleotide
accggauauacccaggcug

SEQ ID NO: 1132459 - RNA, 19 nt, Artificial Sequence
  Description of Artificial Sequence: Synthetic oligonucleotide
uaaauggcagcugaugaca

SEQ ID NO: 1132460 - RNA, 19 nt, Artificial Sequence
  Description of Artificial Sequence: Synthetic oligonucleotide
aacccucuuacacacgacu

SEQ ID NO: 1132461 - RNA, 19 nt, Artificial Sequence
  Description of Artificial Sequence: Synthetic oligonucleotide
cuagguuauagcgggaccg

SEQ ID NO: 1132462 - RNA, 19 nt, Artificial Sequence
  Description of Artificial Sequence: Synthetic oligonucleotide
gacucuuaccaauucccag

SEQ ID NO: 1132463 - RNA, 19 nt, Artificial Sequence
  Description of Artificial Sequence: Synthetic oligonucleotide
ccagaaaucgacaucagac

SEQ ID NO: 1132464 - RNA, 19 nt, Artificial Sequence
  Description of Artificial Sequence: Synthetic oligonucleotide
uggguccuacccaaaaugc

SEQ ID NO: 1132465 - RNA, 19 nt, Artificial Sequence
  Description of Artificial Sequence: Synthetic oligonucleotide
ugagaggucguaccgcuug

SEQ ID NO: 1132466 - RNA, 19 nt, Artificial Sequence
  Description of Artificial Sequence: Synthetic oligonucleotide
uuagcuggauauacagccc

SEQ ID NO: 1132467 - RNA, 19 nt, Artificial Sequence
  Description of Artificial Sequence: Synthetic oligonucleotide
caggcuguaguucaagggc

SEQ ID NO: 1132468 - RNA, 19 nt, Artificial Sequence
  Description of Artificial Sequence: Synthetic oligonucleotide
acucuuaccaauucccagu

SEQ ID NO: 1132469 - RNA, 19 nt, Artificial Sequence
  Description of Artificial Sequence: Synthetic oligonucleotide
aguucaagggcucuacggu

SEQ ID NO: 1132470 - RNA, 19 nt, Artificial Sequence
  Description of Artificial Sequence: Synthetic oligonucleotide
agaaagggcaugaugagca

SEQ ID NO: 1132471 - RNA, 19 nt, Artificial Sequence
  Description of Artificial Sequence: Synthetic oligonucleotide
gacccuaacauaaauggca

SEQ ID NO: 1132472 - RNA, 19 nt, Artificial Sequence
  Description of Artificial Sequence: Synthetic oligonucleotide
gaucccaagacacgcuugc

SEQ ID NO: 1132473 - RNA, 19 nt, Artificial Sequence
  Description of Artificial Sequence: Synthetic oligonucleotide
gaucuuuagcuggauauac

SEQ ID NO: 1132474 - RNA, 19 nt, Artificial Sequence
  Description of Artificial Sequence: Synthetic oligonucleotide
aggcuuagcagucacuugu

SEQ ID NO: 1132475 - RNA, 19 nt, Artificial Sequence
  Description of Artificial Sequence: Synthetic oligonucleotide
uaugcaccccuacaucgag

SEQ ID NO: 1132476 - RNA, 19 nt, Artificial Sequence
  Description of Artificial Sequence: Synthetic oligonucleotide
acagacuaugcaccccuac

SEQ ID NO: 1132477 - RNA, 19 nt, Artificial Sequence
  Description of Artificial Sequence: Synthetic oligonucleotide
ccuuguggaggcaauaugg

SEQ ID NO: 1132478 - RNA, 19 nt, Artificial Sequence
  Description of Artificial Sequence: Synthetic oligonucleotide
uucccguuggccagugugg

SEQ ID NO: 1132479 - RNA, 19 nt, Artificial Sequence
  Description of Artificial Sequence: Synthetic oligonucleotide
caaauagucauugggacga

SEQ ID NO: 1132480 - RNA, 19 nt, Artificial Sequence
  Description of Artificial Sequence: Synthetic oligonucleotide
acgguacgcagccacugcc

SEQ ID NO: 1132481 - RNA, 19 nt, Artificial Sequence
  Description of Artificial Sequence: Synthetic oligonucleotide
ucuucgaaagccugagggu

SEQ ID NO: 1132482 - RNA, 19 nt, Artificial Sequence
  Description of Artificial Sequence: Synthetic oligonucleotide
ugcaccccuacaucgaggc

SEQ ID NO: 1132483 - RNA, 19 nt, Artificial Sequence
  Description of Artificial Sequence: Synthetic oligonucleotide
uucaagggcucuacgguac

SEQ ID NO: 1132484 - RNA, 19 nt, Artificial Sequence
  Description of Artificial Sequence: Synthetic oligonucleotide
caauuauguaggaccuagg

SEQ ID NO: 1132485 - RNA, 19 nt, Artificial Sequence
  Description of Artificial Sequence: Synthetic oligonucleotide
ccuaacauagacaaggcca

SEQ ID NO: 1132486 - RNA, 19 nt, Artificial Sequence
  Description of Artificial Sequence: Synthetic oligonucleotide
auagacaaggccaaccgca

SEQ ID NO: 1132487 - RNA, 19 nt, Artificial Sequence
  Description of Artificial Sequence: Synthetic oligonucleotide
uggauauacagcccuugaa

SEQ ID NO: 1132488 - RNA, 19 nt, Artificial Sequence
  Description of Artificial Sequence: Synthetic oligonucleotide
agauacugcagcagcacgg

SEQ ID NO: 1132489 - RNA, 19 nt, Artificial Sequence
  Description of Artificial Sequence: Synthetic oligonucleotide
acacaucugaucauuagcu

SEQ ID NO: 1132490 - RNA, 19 nt, Artificial Sequence
  Description of Artificial Sequence: Synthetic oligonucleotide
ugaauuaccaagggacaga

SEQ ID NO: 1132491 - RNA, 19 nt, Artificial Sequence
  Description of Artificial Sequence: Synthetic oligonucleotide
cuugaauuaccaagggaca

SEQ ID NO: 1132492 - RNA, 19 nt, Artificial Sequence
  Description of Artificial Sequence: Synthetic oligonucleotide
caaaagaggcuuagcaguc

SEQ ID NO: 1132493 - RNA, 19 nt, Artificial Sequence
  Description of Artificial Sequence: Synthetic oligonucleotide
gagacuuacaaauguguua

SEQ ID NO: 1132494 - RNA, 19 nt, Artificial Sequence
  Description of Artificial Sequence: Synthetic oligonucleotide
uuacacacgacugcccgag

SEQ ID NO: 1132495 - RNA, 19 nt, Artificial Sequence
  Description of Artificial Sequence: Synthetic oligonucleotide
acauaaauggcagcugaug

SEQ ID NO: 1132496 - RNA, 19 nt, Artificial Sequence
  Description of Artificial Sequence: Synthetic oligonucleotide
uccacaacaaauagucauu

SEQ ID NO: 1132497 - RNA, 19 nt, Artificial Sequence
  Description of Artificial Sequence: Synthetic oligonucleotide
auagcgggaccggauauac

SEQ ID NO: 1132498 - RNA, 19 nt, Artificial Sequence
  Description of Artificial Sequence: Synthetic oligonucleotide
ucguacuccccacucaggu

SEQ ID NO: 1132499 - RNA, 19 nt, Artificial Sequence
  Description of Artificial Sequence: Synthetic oligonucleotide
aacauagcuaggagggcag

SEQ ID NO: 1132500 - RNA, 19 nt, Artificial Sequence
  Description of Artificial Sequence: Synthetic oligonucleotide
cauagacaaggccaaccgc

SEQ ID NO: 1132501 - RNA, 19 nt, Artificial Sequence
  Description of Artificial Sequence: Synthetic oligonucleotide
ccuacaucgaggcagcucc

SEQ ID NO: 1132502 - RNA, 19 nt, Artificial Sequence
  Description of Artificial Sequence: Synthetic oligonucleotide
ucaagggcucuacgguacg

SEQ ID NO: 1132503 - RNA, 19 nt, Artificial Sequence
  Description of Artificial Sequence: Synthetic oligonucleotide
guaggguccagacgcacag

SEQ ID NO: 1132504 - RNA, 19 nt, Artificial Sequence
  Description of Artificial Sequence: Synthetic oligonucleotide
ucucuuacauggccgcccc

SEQ ID NO: 1132505 - RNA, 19 nt, Artificial Sequence
  Description of Artificial Sequence: Synthetic oligonucleotide
aggggugcgccucagcauc

SEQ ID NO: 1132506 - RNA, 19 nt, Artificial Sequence
  Description of Artificial Sequence: Synthetic oligonucleotide
aaacaacacaucugaucau

SEQ ID NO: 1132507 - RNA, 19 nt, Artificial Sequence
  Description of Artificial Sequence: Synthetic oligonucleotide
cuucgaaagccugagggug

SEQ ID NO: 1132508 - RNA, 19 nt, Artificial Sequence
  Description of Artificial Sequence: Synthetic oligonucleotide
agacacgcuugcugggacc

SEQ ID NO: 1132509 - RNA, 19 nt, Artificial Sequence
  Description of Artificial Sequence: Synthetic oligonucleotide
cagcccaaccccuugguag

SEQ ID NO: 1132510 - RNA, 19 nt, Artificial Sequence
  Description of Artificial Sequence: Synthetic oligonucleotide
gaagacuccagcuguucca

SEQ ID NO: 1132511 - RNA, 19 nt, Artificial Sequence
  Description of Artificial Sequence: Synthetic oligonucleotide
guaguucaagggcucuacg

SEQ ID NO: 1132512 - RNA, 19 nt, Artificial Sequence
  Description of Artificial Sequence: Synthetic oligonucleotide
aguaagagaagggcaagga

SEQ ID NO: 1132513 - RNA, 19 nt, Artificial Sequence
  Description of Artificial Sequence: Synthetic oligonucleotide
agacuaugcaccccuacau

SEQ ID NO: 1132514 - RNA, 19 nt, Artificial Sequence
  Description of Artificial Sequence: Synthetic oligonucleotide
ucauuagcuccugaagaca

SEQ ID NO: 1132515 - RNA, 19 nt, Artificial Sequence
  Description of Artificial Sequence: Synthetic oligonucleotide
auguucucuuacauggccg

SEQ ID NO: 1132516 - RNA, 19 nt, Artificial Sequence
  Description of Artificial Sequence: Synthetic oligonucleotide
uagguuauagcgggaccgg

SEQ ID NO: 1132517 - RNA, 19 nt, Artificial Sequence
  Description of Artificial Sequence: Synthetic oligonucleotide
uguaggguccagacgcaca

SEQ ID NO: 1132518 - RNA, 19 nt, Artificial Sequence
  Description of Artificial Sequence: Synthetic oligonucleotide
auucccaguaagagaaggg

SEQ ID NO: 1132519 - RNA, 19 nt, Artificial Sequence
  Description of Artificial Sequence: Synthetic oligonucleotide
cuaacauaaauggcagcug

SEQ ID NO: 1132520 - RNA, 19 nt, Artificial Sequence
  Description of Artificial Sequence: Synthetic oligonucleotide
caucagacucuauagcuga

SEQ ID NO: 1132521 - RNA, 19 nt, Artificial Sequence
  Description of Artificial Sequence: Synthetic oligonucleotide
uguaguucaagggcucuac

SEQ ID NO: 1132522 - RNA, 19 nt, Artificial Sequence
  Description of Artificial Sequence: Synthetic oligonucleotide
uuauagcgggaccggauau

SEQ ID NO: 1132523 - RNA, 19 nt, Artificial Sequence
  Description of Artificial Sequence: Synthetic oligonucleotide
ggaccuaggacacagacua

SEQ ID NO: 1132524 - RNA, 19 nt, Artificial Sequence
  Description of Artificial Sequence: Synthetic oligonucleotide
guucccguuggccagugug

SEQ ID NO: 1132525 - RNA, 19 nt, Artificial Sequence
  Description of Artificial Sequence: Synthetic oligonucleotide
uccuacccaaaaugcagca

SEQ ID NO: 1132526 - RNA, 19 nt, Artificial Sequence
  Description of Artificial Sequence: Synthetic oligonucleotide
uugugaacugaucgaccca

SEQ ID NO: 1132527 - RNA, 19 nt, Artificial Sequence
  Description of Artificial Sequence: Synthetic oligonucleotide
uucucuuacauggccgccc

SEQ ID NO: 1132528 - RNA, 19 nt, Artificial Sequence
  Description of Artificial Sequence: Synthetic oligonucleotide
guaacagugaacccucuua

SEQ ID NO: 1132529 - RNA, 19 nt, Artificial Sequence
  Description of Artificial Sequence: Synthetic oligonucleotide
aagccgacgaagcccuucu

SEQ ID NO: 1132530 - RNA, 19 nt, Artificial Sequence
  Description of Artificial Sequence: Synthetic oligonucleotide
gucccagaaaucgacauca

SEQ ID NO: 1132531 - RNA, 19 nt, Artificial Sequence
  Description of Artificial Sequence: Synthetic oligonucleotide
gagcgagaaccccucuagg

SEQ ID NO: 1132532 - RNA, 19 nt, Artificial Sequence
  Description of Artificial Sequence: Synthetic oligonucleotide
acccuaacauaaauggcag

SEQ ID NO: 1132533 - RNA, 19 nt, Artificial Sequence
  Description of Artificial Sequence: Synthetic oligonucleotide
gacuaugcaccccuacauc

SEQ ID NO: 1132534 - RNA, 19 nt, Artificial Sequence
  Description of Artificial Sequence: Synthetic oligonucleotide
gacaacaauuucccuaugu

SEQ ID NO: 1132535 - RNA, 19 nt, Artificial Sequence
  Description of Artificial Sequence: Synthetic oligonucleotide
uccccuacaaauguuucaa

SEQ ID NO: 1132536 - RNA, 19 nt, Artificial Sequence
  Description of Artificial Sequence: Synthetic oligonucleotide
caagaaggcuuaugguaac

SEQ ID NO: 1132537 - RNA, 19 nt, Artificial Sequence
  Description of Artificial Sequence: Synthetic oligonucleotide
caguaagagaagggcaagg

SEQ ID NO: 1132538 - RNA, 19 nt, Artificial Sequence
  Description of Artificial Sequence: Synthetic oligonucleotide
gaccuugugaacugaucga

SEQ ID NO: 1132539 - RNA, 19 nt, Artificial Sequence
  Description of Artificial Sequence: Synthetic oligonucleotide
uauacccaggcuguaguuc

SEQ ID NO: 1132540 - RNA, 19 nt, Artificial Sequence
  Description of Artificial Sequence: Synthetic oligonucleotide
uguccccuacaaauguuuc

SEQ ID NO: 1132541 - RNA, 19 nt, Artificial Sequence
  Description of Artificial Sequence: Synthetic oligonucleotide
gacguguuuccugaccuug

SEQ ID NO: 1132542 - RNA, 19 nt, Artificial Sequence
  Description of Artificial Sequence: Synthetic oligonucleotide
caccccuacaucgaggcag

SEQ ID NO: 1132543 - RNA, 19 nt, Artificial Sequence
  Description of Artificial Sequence: Synthetic oligonucleotide
auuggguccuacccaaaau

SEQ ID NO: 1132544 - RNA, 19 nt, Artificial Sequence
  Description of Artificial Sequence: Synthetic oligonucleotide
ucuacgguacgcagccacu

SEQ ID NO: 1132545 - RNA, 19 nt, Artificial Sequence
  Description of Artificial Sequence: Synthetic oligonucleotide
cucuuacacacgacugccc

SEQ ID NO: 1132546 - RNA, 19 nt, Artificial Sequence
  Description of Artificial Sequence: Synthetic oligonucleotide
agucauugggacgaacacu

SEQ ID NO: 1132547 - RNA, 19 nt, Artificial Sequence
  Description of Artificial Sequence: Synthetic oligonucleotide
ucccuaugucauugggucc

SEQ ID NO: 1132548 - RNA, 19 nt, Artificial Sequence
  Description of Artificial Sequence: Synthetic oligonucleotide
cauuagcuccugaagacaa

SEQ ID NO: 1132549 - RNA, 19 nt, Artificial Sequence
  Description of Artificial Sequence: Synthetic oligonucleotide
cuugucguacuccccacuc

SEQ ID NO: 1132550 - RNA, 19 nt, Artificial Sequence
  Description of Artificial Sequence: Synthetic oligonucleotide
cucuacgguacgcagccac

SEQ ID NO: 1132551 - RNA, 19 nt, Artificial Sequence
  Description of Artificial Sequence: Synthetic oligonucleotide
gcagccguaaaacagucca

SEQ ID NO: 1132552 - RNA, 19 nt, Artificial Sequence
  Description of Artificial Sequence: Synthetic oligonucleotide
gaggcuuagcagucacuug

SEQ ID NO: 1132553 - RNA, 19 nt, Artificial Sequence
  Description of Artificial Sequence: Synthetic oligonucleotide
cuacaauuauguaggaccu

SEQ ID NO: 1132554 - RNA, 19 nt, Artificial Sequence
  Description of Artificial Sequence: Synthetic oligonucleotide
cugaugccuagguuauagc

SEQ ID NO: 1132555 - RNA, 19 nt, Artificial Sequence
  Description of Artificial Sequence: Synthetic oligonucleotide
ugguacccagauacugcag

SEQ ID NO: 1132556 - RNA, 19 nt, Artificial Sequence
  Description of Artificial Sequence: Synthetic oligonucleotide
caggccaaacauagcuagg

SEQ ID NO: 1132557 - RNA, 19 nt, Artificial Sequence
  Description of Artificial Sequence: Synthetic oligonucleotide
aggucguaccgcuuguggu

SEQ ID NO: 1132558 - RNA, 19 nt, Artificial Sequence
  Description of Artificial Sequence: Synthetic oligonucleotide
agccguaaaacaguccaca

SEQ ID NO: 1132559 - RNA, 19 nt, Artificial Sequence
  Description of Artificial Sequence: Synthetic oligonucleotide
agggcagacguguuuccug

SEQ ID NO: 1132560 - RNA, 19 nt, Artificial Sequence
  Description of Artificial Sequence: Synthetic oligonucleotide
gcaaaagaggcuuagcagu

SEQ ID NO: 1132561 - RNA, 19 nt, Artificial Sequence
  Description of Artificial Sequence: Synthetic oligonucleotide
caaacauagcuaggagggc

SEQ ID NO: 1132562 - RNA, 19 nt, Artificial Sequence
  Description of Artificial Sequence: Synthetic oligonucleotide
acacacgacugcccgagga

SEQ ID NO: 1132563 - RNA, 19 nt, Artificial Sequence
  Description of Artificial Sequence: Synthetic oligonucleotide
agacacucacagggcagcc

SEQ ID NO: 1132564 - RNA, 19 nt, Artificial Sequence
  Description of Artificial Sequence: Synthetic oligonucleotide
ucuuaccaauucccaguaa

SEQ ID NO: 1132565 - RNA, 19 nt, Artificial Sequence
  Description of Artificial Sequence: Synthetic oligonucleotide
ugguaucccuugucauagg

SEQ ID NO: 1132566 - RNA, 19 nt, Artificial Sequence
  Description of Artificial Sequence: Synthetic oligonucleotide
gucagaaagccaggggugc

SEQ ID NO: 1132567 - RNA, 19 nt, Artificial Sequence
  Description of Artificial Sequence: Synthetic oligonucleotide
uccagagcgagaaccccuc

SEQ ID NO: 1132568 - RNA, 19 nt, Artificial Sequence
  Description of Artificial Sequence: Synthetic oligonucleotide
cacgacugcccgaggaagc

SEQ ID NO: 1132569 - RNA, 19 nt, Artificial Sequence
  Description of Artificial Sequence: Synthetic oligonucleotide
aagccugaggguggucacg

SEQ ID NO: 1132570 - RNA, 19 nt, Artificial Sequence
  Description of Artificial Sequence: Synthetic oligonucleotide
acucuauagcugacuuggc

SEQ ID NO: 1132571 - RNA, 19 nt, Artificial Sequence
  Description of Artificial Sequence: Synthetic oligonucleotide
acagggaucccaagacacg

SEQ ID NO: 1132572 - RNA, 19 nt, Artificial Sequence
  Description of Artificial Sequence: Synthetic oligonucleotide
agacagcucacucccuaca

SEQ ID NO: 1132573 - RNA, 19 nt, Artificial Sequence
  Description of Artificial Sequence: Synthetic oligonucleotide
gaaggcuuaugguaacagu

SEQ ID NO: 1132574 - RNA, 19 nt, Artificial Sequence
  Description of Artificial Sequence: Synthetic oligonucleotide
gcugaugccuagguuauag

SEQ ID NO: 1132575 - RNA, 19 nt, Artificial Sequence
  Description of Artificial Sequence: Synthetic oligonucleotide
cagaaaucgacaucagacu

SEQ ID NO: 1132576 - RNA, 19 nt, Artificial Sequence
  Description of Artificial Sequence: Synthetic oligonucleotide
caaguuuguuccacaacaa

SEQ ID NO: 1132577 - RNA, 19 nt, Artificial Sequence
  Description of Artificial Sequence: Synthetic oligonucleotide
gucauuggguccuacccaa

SEQ ID NO: 1132578 - RNA, 19 nt, Artificial Sequence
  Description of Artificial Sequence: Synthetic oligonucleotide
caauucccaguaagagaag

SEQ ID NO: 1132579 - RNA, 19 nt, Artificial Sequence
  Description of Artificial Sequence: Synthetic oligonucleotide
guuauagcgggaccggaua

SEQ ID NO: 1132580 - RNA, 19 nt, Artificial Sequence
  Description of Artificial Sequence: Synthetic oligonucleotide
gcuuagcagucacuugugg

SEQ ID NO: 1132581 - RNA, 19 nt, Artificial Sequence
  Description of Artificial Sequence: Synthetic oligonucleotide
agagacagcucacucccua

SEQ ID NO: 1132582 - RNA, 19 nt, Artificial Sequence
  Description of Artificial Sequence: Synthetic oligonucleotide
acaucgaggcagcuccuga

SEQ ID NO: 1132583 - RNA, 19 nt, Artificial Sequence
  Description of Artificial Sequence: Synthetic oligonucleotide
ccaauaggcgucacucugg

SEQ ID NO: 1132584 - RNA, 19 nt, Artificial Sequence
  Description of Artificial Sequence: Synthetic oligonucleotide
uucaccuuguggaggcaau

SEQ ID NO: 1132585 - RNA, 19 nt, Artificial Sequence
  Description of Artificial Sequence: Synthetic oligonucleotide
cuaggacacagacuaugca

SEQ ID NO: 1132586 - RNA, 19 nt, Artificial Sequence
  Description of Artificial Sequence: Synthetic oligonucleotide
auguaggguccagacgcac

SEQ ID NO: 1132587 - RNA, 19 nt, Artificial Sequence
  Description of Artificial Sequence: Synthetic oligonucleotide
ggacucccaagccacacug

SEQ ID NO: 1132588 - RNA, 19 nt, Artificial Sequence
  Description of Artificial Sequence: Synthetic oligonucleotide
cugcacgucagggucaaug

SEQ ID NO: 1132589 - RNA, 19 nt, Artificial Sequence
  Description of Artificial Sequence: Synthetic oligonucleotide
acacgacugcccgaggaag

SEQ ID NO: 1132590 - RNA, 19 nt, Artificial Sequence
  Description of Artificial Sequence: Synthetic oligonucleotide
agcugacuuggcucguuca

SEQ ID NO: 1132591 - RNA, 19 nt, Artificial Sequence
  Description of Artificial Sequence: Synthetic oligonucleotide
cagacuaugcaccccuaca

SEQ ID NO: 1132592 - RNA, 19 nt, Artificial Sequence
  Description of Artificial Sequence: Synthetic oligonucleotide
gccguaaaacaguccacag

SEQ ID NO: 1132593 - RNA, 19 nt, Artificial Sequence
  Description of Artificial Sequence: Synthetic oligonucleotide
ucccuacaauuauguagga

SEQ ID NO: 1132594 - RNA, 19 nt, Artificial Sequence
  Description of Artificial Sequence: Synthetic oligonucleotide
uacuccagauguucucuua

SEQ ID NO: 1132595 - RNA, 19 nt, Artificial Sequence
  Description of Artificial Sequence: Synthetic oligonucleotide
ccguaaaacaguccacagc

SEQ ID NO: 1132596 - RNA, 19 nt, Artificial Sequence
  Description of Artificial Sequence: Synthetic oligonucleotide
caggguacuccagauguuc

SEQ ID NO: 1132597 - RNA, 19 nt, Artificial Sequence
  Description of Artificial Sequence: Synthetic oligonucleotide
ugggugguacccagauacu

SEQ ID NO: 1132598 - RNA, 19 nt, Artificial Sequence
  Description of Artificial Sequence: Synthetic oligonucleotide
ggaccggauauacccaggc

SEQ ID NO: 1132599 - RNA, 19 nt, Artificial Sequence
  Description of Artificial Sequence: Synthetic oligonucleotide
agaucuuuagcuggauaua

SEQ ID NO: 1132600 - RNA, 19 nt, Artificial Sequence
  Description of Artificial Sequence: Synthetic oligonucleotide
guccccuacaaauguuuca

SEQ ID NO: 1132601 - RNA, 19 nt, Artificial Sequence
  Description of Artificial Sequence: Synthetic oligonucleotide
agaucccgagcaucagcug

SEQ ID NO: 1132602 - RNA, 19 nt, Artificial Sequence
  Description of Artificial Sequence: Synthetic oligonucleotide
agacgcacagcugccagga

SEQ ID NO: 1132603 - RNA, 19 nt, Artificial Sequence
  Description of Artificial Sequence: Synthetic oligonucleotide
uacaucgaggcagcuccug

SEQ ID NO: 1132604 - RNA, 19 nt, Artificial Sequence
  Description of Artificial Sequence: Synthetic oligonucleotide
uagcugacuuggcucguuc

SEQ ID NO: 1132605 - RNA, 19 nt, Artificial Sequence
  Description of Artificial Sequence: Synthetic oligonucleotide
guucaagggcucuacggua

SEQ ID NO: 1132606 - RNA, 19 nt, Artificial Sequence
  Description of Artificial Sequence: Synthetic oligonucleotide
ggauauacccaggcuguag

SEQ ID NO: 1132607 - RNA, 19 nt, Artificial Sequence
  Description of Artificial Sequence: Synthetic oligonucleotide
gacacucacagggcagccc

SEQ ID NO: 1132608 - RNA, 19 nt, Artificial Sequence
  Description of Artificial Sequence: Synthetic oligonucleotide
acccucuuacacacgacug

SEQ ID NO: 1132609 - RNA, 19 nt, Artificial Sequence
  Description of Artificial Sequence: Synthetic oligonucleotide
aucagcccaaccccuuggu

SEQ ID NO: 1132610 - RNA, 19 nt, Artificial Sequence
  Description of Artificial Sequence: Synthetic oligonucleotide
cagccguaaaacaguccac

SEQ ID NO: 1132611 - RNA, 19 nt, Artificial Sequence
  Description of Artificial Sequence: Synthetic oligonucleotide
acgucagggucaauggaug

SEQ ID NO: 1132612 - RNA, 19 nt, Artificial Sequence
  Description of Artificial Sequence: Synthetic oligonucleotide
gcccuugaauuaccaaggg

SEQ ID NO: 1132613 - RNA, 19 nt, Artificial Sequence
  Description of Artificial Sequence: Synthetic oligonucleotide
cuuacacacgacugcccga

SEQ ID NO: 1132614 - RNA, 19 nt, Artificial Sequence
  Description of Artificial Sequence: Synthetic oligonucleotide
uagcgggaccggauauacc

SEQ ID NO: 1132615 - RNA, 19 nt, Artificial Sequence
  Description of Artificial Sequence: Synthetic oligonucleotide
agggcagccguaaaacagu

SEQ ID NO: 1132616 - RNA, 19 nt, Artificial Sequence
  Description of Artificial Sequence: Synthetic oligonucleotide
ggucguaccgcuugugguc

SEQ ID NO: 1132617 - RNA, 19 nt, Artificial Sequence
  Description of Artificial Sequence: Synthetic oligonucleotide
cuacgguacgcagccacug

SEQ ID NO: 1132618 - RNA, 19 nt, Artificial Sequence
  Description of Artificial Sequence: Synthetic oligonucleotide
uauagcgggaccggauaua

SEQ ID NO: 1132619 - RNA, 19 nt, Artificial Sequence
  Description of Artificial Sequence: Synthetic oligonucleotide
accgcaggguacuccagau

SEQ ID NO: 1132620 - RNA, 19 nt, Artificial Sequence
  Description of Artificial Sequence: Synthetic oligonucleotide
acagcggagaagacuccag

SEQ ID NO: 1132621 - RNA, 19 nt, Artificial Sequence
  Description of Artificial Sequence: Synthetic oligonucleotide
cccucuuacacacgacugc

SEQ ID NO: 1132622 - RNA, 19 nt, Artificial Sequence
  Description of Artificial Sequence: Synthetic oligonucleotide
cccaauaggcgucacucug

SEQ ID NO: 1132623 - RNA, 19 nt, Artificial Sequence
  Description of Artificial Sequence: Synthetic oligonucleotide
guuccacaacaaauaguca

SEQ ID NO: 1132624 - RNA, 19 nt, Artificial Sequence
  Description of Artificial Sequence: Synthetic oligonucleotide
ugccccaauaggcgucacu

SEQ ID NO: 1132625 - RNA, 19 nt, Artificial Sequence
  Description of Artificial Sequence: Synthetic oligonucleotide
ugccuagguuauagcggga

SEQ ID NO: 1132626 - RNA, 19 nt, Artificial Sequence
  Description of Artificial Sequence: Synthetic oligonucleotide
guucucuuacauggccgcc

SEQ ID NO: 1132627 - RNA, 19 nt, Artificial Sequence
  Description of Artificial Sequence: Synthetic oligonucleotide
ccuagguuauagcgggacc

SEQ ID NO: 1132628 - RNA, 19 nt, Artificial Sequence
  Description of Artificial Sequence: Synthetic oligonucleotide
gucguacuccccacucagg

SEQ ID NO: 1132629 - RNA, 19 nt, Artificial Sequence
  Description of Artificial Sequence: Synthetic oligonucleotide
gccacacugcacgucaggg

SEQ ID NO: 1132630 - RNA, 19 nt, Artificial Sequence
  Description of Artificial Sequence: Synthetic oligonucleotide
gcgagaaccccucuaggca

SEQ ID NO: 1132631 - RNA, 19 nt, Artificial Sequence
  Description of Artificial Sequence: Synthetic oligonucleotide
acugaucgacccaggccuc

SEQ ID NO: 1132632 - RNA, 19 nt, Artificial Sequence
  Description of Artificial Sequence: Synthetic oligonucleotide
cauuggguccuacccaaaa

SEQ ID NO: 1132633 - RNA, 19 nt, Artificial Sequence
  Description of Artificial Sequence: Synthetic oligonucleotide
gacucccaagccacacugc

SEQ ID NO: 1132634 - RNA, 19 nt, Artificial Sequence
  Description of Artificial Sequence: Synthetic oligonucleotide
gugugugucuccccacaca

SEQ ID NO: 1132635 - RNA, 19 nt, Artificial Sequence
  Description of Artificial Sequence: Synthetic oligonucleotide
cucuaggcagacacucaca

SEQ ID NO: 1132636 - RNA, 19 nt, Artificial Sequence
  Description of Artificial Sequence: Synthetic oligonucleotide
cagccucacggugagcccc

SEQ ID NO: 1132637 - RNA, 19 nt, Artificial Sequence
  Description of Artificial Sequence: Synthetic oligonucleotide
ugaucgacccaggccucug

SEQ ID NO: 1132638 - RNA, 19 nt, Artificial Sequence
  Description of Artificial Sequence: Synthetic oligonucleotide
ccaagacacgcuugcuggg

SEQ ID NO: 1132639 - RNA, 19 nt, Artificial Sequence
  Description of Artificial Sequence: Synthetic oligonucleotide
cgagaaccccucuaggcag

SEQ ID NO: 1132640 - RNA, 19 nt, Artificial Sequence
  Description of Artificial Sequence: Synthetic oligonucleotide
cagaugugaggucaucaua

SEQ ID NO: 1132641 - RNA, 19 nt, Artificial Sequence
  Description of Artificial Sequence: Synthetic oligonucleotide
agagggagucacauccaga

SEQ ID NO: 1132642 - RNA, 19 nt, Artificial Sequence
  Description of Artificial Sequence: Synthetic oligonucleotide
augcaccccuacaucgagg

SEQ ID NO: 1132643 - RNA, 19 nt, Artificial Sequence
  Description of Artificial Sequence: Synthetic oligonucleotide
caagggcucuacgguacgc

SEQ ID NO: 1132644 - RNA, 19 nt, Artificial Sequence
  Description of Artificial Sequence: Synthetic oligonucleotide
gaucgacccaggccucuga

SEQ ID NO: 1132645 - RNA, 19 nt, Artificial Sequence
  Description of Artificial Sequence: Synthetic oligonucleotide
gaacccucuuacacacgac

SEQ ID NO: 1132646 - RNA, 19 nt, Artificial Sequence
  Description of Artificial Sequence: Synthetic oligonucleotide
cccuaacauaaauggcagc

SEQ ID NO: 1132647 - RNA, 19 nt, Artificial Sequence
  Description of Artificial Sequence: Synthetic oligonucleotide
gugaacccucuuacacacg

SEQ ID NO: 1132648 - RNA, 19 nt, Artificial Sequence
  Description of Artificial Sequence: Synthetic oligonucleotide
ccuaacauaaauggcagcu

SEQ ID NO: 1132649 - RNA, 19 nt, Artificial Sequence
  Description of Artificial Sequence: Synthetic oligonucleotide
ccgagguugaugcagcuga

SEQ ID NO: 1132650 - RNA, 19 nt, Artificial Sequence
  Description of Artificial Sequence: Synthetic oligonucleotide
agguuauagcgggaccgga

SEQ ID NO: 1132651 - RNA, 19 nt, Artificial Sequence
  Description of Artificial Sequence: Synthetic oligonucleotide
acgacugcccgaggaagcu

SEQ ID NO: 1132652 - RNA, 19 nt, Artificial Sequence
  Description of Artificial Sequence: Synthetic oligonucleotide
agacguguuuccugaccuu

SEQ ID NO: 1132653 - RNA, 19 nt, Artificial Sequence
  Description of Artificial Sequence: Synthetic oligonucleotide
cacgucagggucaauggau

SEQ ID NO: 1132654 - RNA, 19 nt, Artificial Sequence
  Description of Artificial Sequence: Synthetic oligonucleotide
gacgaacacugagggcagc

SEQ ID NO: 1132655 - RNA, 19 nt, Artificial Sequence
  Description of Artificial Sequence: Synthetic oligonucleotide
gucguaccgcuugugguca

SEQ ID NO: 1132656 - RNA, 19 nt, Artificial Sequence
  Description of Artificial Sequence: Synthetic oligonucleotide
gggaucauggcaguuuaaa

SEQ ID NO: 1132657 - RNA, 19 nt, Artificial Sequence
  Description of Artificial Sequence: Synthetic oligonucleotide
caagacacgcuugcuggga

SEQ ID NO: 1132658 - RNA, 19 nt, Artificial Sequence
  Description of Artificial Sequence: Synthetic oligonucleotide
uacccaggcuguaguucaa

SEQ ID NO: 1132659 - RNA, 19 nt, Artificial Sequence
  Description of Artificial Sequence: Synthetic oligonucleotide
cuaugucauuggguccuac

SEQ ID NO: 1132660 - RNA, 19 nt, Artificial Sequence
  Description of Artificial Sequence: Synthetic oligonucleotide
acauagcuaggagggcaga

SEQ ID NO: 1132661 - RNA, 19 nt, Artificial Sequence
  Description of Artificial Sequence: Synthetic oligonucleotide
uaggguccagacgcacagc

SEQ ID NO: 1132662 - RNA, 19 nt, Artificial Sequence
  Description of Artificial Sequence: Synthetic oligonucleotide
guaccgcuuguggucauca

SEQ ID NO: 1132663 - RNA, 19 nt, Artificial Sequence
  Description of Artificial Sequence: Synthetic oligonucleotide
ccaguaagagaagggcaag

SEQ ID NO: 1132664 - RNA, 19 nt, Artificial Sequence
  Description of Artificial Sequence: Synthetic oligonucleotide
cccaaguuuguuccacaac

SEQ ID NO: 1132665 - RNA, 19 nt, Artificial Sequence
  Description of Artificial Sequence: Synthetic oligonucleotide
gggcagacguguuuccuga

SEQ ID NO: 1132666 - RNA, 19 nt, Artificial Sequence
  Description of Artificial Sequence: Synthetic oligonucleotide
ggacucuuaccaauuccca

SEQ ID NO: 1132667 - RNA, 19 nt, Artificial Sequence
  Description of Artificial Sequence: Synthetic oligonucleotide
gccccaauaggcgucacuc

SEQ ID NO: 1132668 - RNA, 19 nt, Artificial Sequence
  Description of Artificial Sequence: Synthetic oligonucleotide
acguguuuccugaccuugu

SEQ ID NO: 1132669 - RNA, 19 nt, Artificial Sequence
  Description of Artificial Sequence: Synthetic oligonucleotide
ggugcgccucagcaucccg

SEQ ID NO: 1132670 - RNA, 19 nt, Artificial Sequence
  Description of Artificial Sequence: Synthetic oligonucleotide
ggaucccaagacacgcuug

SEQ ID NO: 1132671 - RNA, 19 nt, Artificial Sequence
  Description of Artificial Sequence: Synthetic oligonucleotide
gccgacgaagcccuucuuc

SEQ ID NO: 1132672 - RNA, 19 nt, Artificial Sequence
  Description of Artificial Sequence: Synthetic oligonucleotide
acacugagggcagccguaa

SEQ ID NO: 1132673 - RNA, 19 nt, Artificial Sequence
  Description of Artificial Sequence: Synthetic oligonucleotide
cacacgacugcccgaggaa

SEQ ID NO: 1132674 - RNA, 19 nt, Artificial Sequence
  Description of Artificial Sequence: Synthetic oligonucleotide
agccucacggugagccccg

SEQ ID NO: 1132675 - RNA, 19 nt, Artificial Sequence
  Description of Artificial Sequence: Synthetic oligonucleotide
acaaggcaaaagaggcuua

SEQ ID NO: 1132676 - RNA, 19 nt, Artificial Sequence
  Description of Artificial Sequence: Synthetic oligonucleotide
gccuagguuauagcgggac

SEQ ID NO: 1132677 - RNA, 19 nt, Artificial Sequence
  Description of Artificial Sequence: Synthetic oligonucleotide
cccuacaauuauguaggac

SEQ ID NO: 1132678 - RNA, 19 nt, Artificial Sequence
  Description of Artificial Sequence: Synthetic oligonucleotide
agcuggacucuuaccaauu

SEQ ID NO: 1132679 - RNA, 19 nt, Artificial Sequence
  Description of Artificial Sequence: Synthetic oligonucleotide
ggucacgcagggguucucc

SEQ ID NO: 1132680 - RNA, 19 nt, Artificial Sequence
  Description of Artificial Sequence: Synthetic oligonucleotide
gcccgaggaagcuggacuc

SEQ ID NO: 1132681 - RNA, 19 nt, Artificial Sequence
  Description of Artificial Sequence: Synthetic oligonucleotide
auagcugacuuggcucguu

SEQ ID NO: 1132682 - RNA, 19 nt, Artificial Sequence
  Description of Artificial Sequence: Synthetic oligonucleotide
gugagccccgagguugaug

SEQ ID NO: 1132683 - RNA, 19 nt, Artificial Sequence
  Description of Artificial Sequence: Synthetic oligonucleotide
cacucccuacaauuaugua

SEQ ID NO: 1132684 - RNA, 19 nt, Artificial Sequence
  Description of Artificial Sequence: Synthetic oligonucleotide
acgcagggguucuccuccu

SEQ ID NO: 1132685 - RNA, 19 nt, Artificial Sequence
  Description of Artificial Sequence: Synthetic oligonucleotide
gcacgucagggucaaugga

SEQ ID NO: 1132686 - RNA, 19 nt, Artificial Sequence
  Description of Artificial Sequence: Synthetic oligonucleotide
guaggcccacuggaggaga

SEQ ID NO: 1132687 - RNA, 19 nt, Artificial Sequence
  Description of Artificial Sequence: Synthetic oligonucleotide
cagagcgagaaccccucua

SEQ ID NO: 1132688 - RNA, 19 nt, Artificial Sequence
  Description of Artificial Sequence: Synthetic oligonucleotide
guaggaccuaggacacaga

SEQ ID NO: 1132689 - RNA, 19 nt, Artificial Sequence
  Description of Artificial Sequence: Synthetic oligonucleotide
agcuggauauacagcccuu

SEQ ID NO: 1132690 - RNA, 19 nt, Artificial Sequence
  Description of Artificial Sequence: Synthetic oligonucleotide
guacgcagccacugccucu

SEQ ID NO: 1132691 - RNA, 19 nt, Artificial Sequence
  Description of Artificial Sequence: Synthetic oligonucleotide
gguggucacgcagggguuc

SEQ ID NO: 1132692 - RNA, 19 nt, Artificial Sequence
  Description of Artificial Sequence: Synthetic oligonucleotide
agggcaugaugagcagaaa

SEQ ID NO: 1132693 - RNA, 19 nt, Artificial Sequence
  Description of Artificial Sequence: Synthetic oligonucleotide
cgaacacugagggcagccg

SEQ ID NO: 1132694 - RNA, 19 nt, Artificial Sequence
  Description of Artificial Sequence: Synthetic oligonucleotide
ucguaccgcuuguggucau

SEQ ID NO: 1132695 - RNA, 19 nt, Artificial Sequence
  Description of Artificial Sequence: Synthetic oligonucleotide
gccuugucguacuccccac

SEQ ID NO: 1132696 - RNA, 19 nt, Artificial Sequence
  Description of Artificial Sequence: Synthetic oligonucleotide
gucacgcagggguucuccu

SEQ ID NO: 1132697 - RNA, 19 nt, Artificial Sequence
  Description of Artificial Sequence: Synthetic oligonucleotide
gagccccgagguugaugca

SEQ ID NO: 1132698 - RNA, 19 nt, Artificial Sequence
  Description of Artificial Sequence: Synthetic oligonucleotide
gucagacaacagggauccc

SEQ ID NO: 1132699 - RNA, 19 nt, Artificial Sequence
  Description of Artificial Sequence: Synthetic oligonucleotide
gccaaccgcaggguacucc

SEQ ID NO: 1132700 - RNA, 19 nt, Artificial Sequence
  Description of Artificial Sequence: Synthetic oligonucleotide
ggacagcggagaagacucc

SEQ ID NO: 1132701 - RNA, 19 nt, Artificial Sequence
  Description of Artificial Sequence: Synthetic oligonucleotide
cacagacuaugcaccccua

SEQ ID NO: 1132702 - RNA, 19 nt, Artificial Sequence
  Description of Artificial Sequence: Synthetic oligonucleotide
gcucacucccuacaauuau

SEQ ID NO: 1132703 - RNA, 19 nt, Artificial Sequence
  Description of Artificial Sequence: Synthetic oligonucleotide
gucacuggggcaggccaaa

SEQ ID NO: 1132704 - RNA, 19 nt, Artificial Sequence
  Description of Artificial Sequence: Synthetic oligonucleotide
ccacucgccccuucuucac

SEQ ID NO: 1132705 - RNA, 19 nt, Artificial Sequence
  Description of Artificial Sequence: Synthetic oligonucleotide
gguuauagcgggaccggau

SEQ ID NO: 1132706 - RNA, 19 nt, Artificial Sequence
  Description of Artificial Sequence: Synthetic oligonucleotide
cuacaucgaggcagcuccu

SEQ ID NO: 1132707 - RNA, 19 nt, Artificial Sequence
  Description of Artificial Sequence: Synthetic oligonucleotide
gcgucacucuggccuaaca

SEQ ID NO: 1132708 - RNA, 19 nt, Artificial Sequence
  Description of Artificial Sequence: Synthetic oligonucleotide
cccucccucaagccgacga

SEQ ID NO: 1132709 - RNA, 19 nt, Artificial Sequence
  Description of Artificial Sequence: Synthetic oligonucleotide
ggggugcgccucagcaucc

SEQ ID NO: 1132710 - RNA, 19 nt, Artificial Sequence
  Description of Artificial Sequence: Synthetic oligonucleotide
cccgagguugaugcagcug

SEQ ID NO: 1132711 - RNA, 19 nt, Artificial Sequence
  Description of Artificial Sequence: Synthetic oligonucleotide
ccucaaacugguaucccuu

SEQ ID NO: 1132712 - RNA, 19 nt, Artificial Sequence
  Description of Artificial Sequence: Synthetic oligonucleotide
caggggugcgccucagcau

SEQ ID NO: 1132713 - RNA, 19 nt, Artificial Sequence
  Description of Artificial Sequence: Synthetic oligonucleotide
gccaggggugcgccucagc

SEQ ID NO: 1132714 - RNA, 19 nt, Artificial Sequence
  Description of Artificial Sequence: Synthetic oligonucleotide
gugcgccucagcaucccgu

SEQ ID NO: 1132715 - RNA, 19 nt, Artificial Sequence
  Description of Artificial Sequence: Synthetic oligonucleotide
gucaucagcccaaccccuu

SEQ ID NO: 1132716 - RNA, 19 nt, Artificial Sequence
  Description of Artificial Sequence: Synthetic oligonucleotide
gcaccccuacaucgaggca

SEQ ID NO: 1132717 - RNA, 19 nt, Artificial Sequence
  Description of Artificial Sequence: Synthetic oligonucleotide
gcgggaccggauauaccca

SEQ ID NO: 1132718 - RNA, 19 nt, Artificial Sequence
  Description of Artificial Sequence: Synthetic oligonucleotide
gggugcgccucagcauccc

SEQ ID NO: 1132719 - RNA, 19 nt, Artificial Sequence
  Description of Artificial Sequence: Synthetic oligonucleotide
ccucacggugagccccgag

SEQ ID NO: 1132720 - RNA, 19 nt, Artificial Sequence
  Description of Artificial Sequence: Synthetic oligonucleotide
cugagaggucguaccgcuu

SEQ ID NO: 1132721 - RNA, 19 nt, Artificial Sequence
  Description of Artificial Sequence: Synthetic oligonucleotide
ggcgucacucuggccuaac

SEQ ID NO: 1132722 - RNA, 19 nt, Artificial Sequence
  Description of Artificial Sequence: Synthetic oligonucleotide
acugcacgucagggucaau

SEQ ID NO: 1132723 - RNA, 19 nt, Artificial Sequence
  Description of Artificial Sequence: Synthetic oligonucleotide
ccccaauaggcgucacucu

SEQ ID NO: 1132724 - RNA, 19 nt, Artificial Sequence
  Description of Artificial Sequence: Synthetic oligonucleotide
cacggugagccccgagguu

SEQ ID NO: 1132725 - RNA, 19 nt, Artificial Sequence
  Description of Artificial Sequence: Synthetic oligonucleotide
ccuugucguacuccccacu

SEQ ID NO: 1132726 - RNA, 19 nt, Artificial Sequence
  Description of Artificial Sequence: Synthetic oligonucleotide
gcucuacgguacgcagcca

SEQ ID NO: 1132727 - RNA, 19 nt, Artificial Sequence
  Description of Artificial Sequence: Synthetic oligonucleotide
cgacugcccgaggaagcug

SEQ ID NO: 1132728 - RNA, 19 nt, Artificial Sequence
  Description of Artificial Sequence: Synthetic oligonucleotide
cguaccgcuuguggucauc

SEQ ID NO: 1132729 - RNA, 19 nt, Artificial Sequence
  Description of Artificial Sequence: Synthetic oligonucleotide
ggccaaccgcaggguacuc

SEQ ID NO: 1132730 - RNA, 19 nt, Artificial Sequence
  Description of Artificial Sequence: Synthetic oligonucleotide
cgguacgcagccacugccu

SEQ ID NO: 1132731 - RNA, 19 nt, Artificial Sequence
  Description of Artificial Sequence: Synthetic oligonucleotide
ccagagcgagaaccccucu

SEQ ID NO: 1132732 - RNA, 19 nt, Artificial Sequence
  Description of Artificial Sequence: Synthetic oligonucleotide
guguggccccaaguuuguu

SEQ ID NO: 1132733 - RNA, 19 nt, Artificial Sequence
  Description of Artificial Sequence: Synthetic oligonucleotide
cguacuccccacucagguu

SEQ ID NO: 1132734 - RNA, 19 nt, Artificial Sequence
  Description of Artificial Sequence: Synthetic oligonucleotide
ccccucccucaagccgacg

SEQ ID NO: 1132735 - RNA, 19 nt, Artificial Sequence
  Description of Artificial Sequence: Synthetic oligonucleotide
cccgaggaagcuggacucu

SEQ ID NO: 1132736 - RNA, 19 nt, Artificial Sequence
  Description of Artificial Sequence: Synthetic oligonucleotide
gccucacggugagccccga

SEQ ID NO: 1132737 - RNA, 19 nt, Artificial Sequence
  Description of Artificial Sequence: Synthetic oligonucleotide
ggugagccccgagguugau

SEQ ID NO: 1132738 - RNA, 19 nt, Artificial Sequence
  Description of Artificial Sequence: Synthetic oligonucleotide
ccccuacaucgaggcagcu

SEQ ID NO: 1132739 - RNA, 19 nt, Artificial Sequence
  Description of Artificial Sequence: Synthetic oligonucleotide
uauucaaucaauuagcuca

SEQ ID NO: 1132740 - RNA, 19 nt, Artificial Sequence
  Description of Artificial Sequence: Synthetic oligonucleotide
uuuaaauagagauucacag

SEQ ID NO: 1132741 - RNA, 19 nt, Artificial Sequence
  Description of Artificial Sequence: Synthetic oligonucleotide
uuagcauacaauuacaggc

SEQ ID NO: 1132742 - RNA, 19 nt, Artificial Sequence
  Description of Artificial Sequence: Synthetic oligonucleotide
aaucuuguuucuaacaucc

SEQ ID NO: 1132743 - RNA, 19 nt, Artificial Sequence
  Description of Artificial Sequence: Synthetic oligonucleotide
agguacaucacauugcagc

SEQ ID NO: 1132744 - RNA, 19 nt, Artificial Sequence
  Description of Artificial Sequence: Synthetic oligonucleotide
aaaauuuugacaauuccag

SEQ ID NO: 1132745 - RNA, 19 nt, Artificial Sequence
  Description of Artificial Sequence: Synthetic oligonucleotide
ucuaacauccgccacaaug

SEQ ID NO: 1132746 - RNA, 19 nt, Artificial Sequence
  Description of Artificial Sequence: Synthetic oligonucleotide
acuuuuacugcacauuagc

SEQ ID NO: 1132747 - RNA, 19 nt, Artificial Sequence
  Description of Artificial Sequence: Synthetic oligonucleotide
auacuauucaaucaauuag

SEQ ID NO: 1132748 - RNA, 19 nt, Artificial Sequence
  Description of Artificial Sequence: Synthetic oligonucleotide
aucucacccacucauaugc

SEQ ID NO: 1132749 - RNA, 19 nt, Artificial Sequence
  Description of Artificial Sequence: Synthetic oligonucleotide
uuuuauggaaguaaauaca

SEQ ID NO: 1132750 - RNA, 19 nt, Artificial Sequence
  Description of Artificial Sequence: Synthetic oligonucleotide
agaacuaaauuucaauauc

SEQ ID NO: 1132751 - RNA, 19 nt, Artificial Sequence
  Description of Artificial Sequence: Synthetic oligonucleotide
aauacuauucaaucaauua

SEQ ID NO: 1132752 - RNA, 19 nt, Artificial Sequence
  Description of Artificial Sequence: Synthetic oligonucleotide
uuuacugcacauuagcuga

SEQ ID NO: 1132753 - RNA, 19 nt, Artificial Sequence
  Description of Artificial Sequence: Synthetic oligonucleotide
uacaauuacaggcauagaa

SEQ ID NO: 1132754 - RNA, 19 nt, Artificial Sequence
  Description of Artificial Sequence: Synthetic oligonucleotide
ugagaaaucuuguaaaggu

SEQ ID NO: 1132755 - RNA, 19 nt, Artificial Sequence
  Description of Artificial Sequence: Synthetic oligonucleotide
uacauaugcauacugcugc

SEQ ID NO: 1132756 - RNA, 19 nt, Artificial Sequence
  Description of Artificial Sequence: Synthetic oligonucleotide
cucacaaucaagauaacug

SEQ ID NO: 1132757 - RNA, 19 nt, Artificial Sequence
  Description of Artificial Sequence: Synthetic oligonucleotide
cuaacauccgccacaaugg

SEQ ID NO: 1132758 - RNA, 19 nt, Artificial Sequence
  Description of Artificial Sequence: Synthetic oligonucleotide
uagaaugucagauucacaa

SEQ ID NO: 1132759 - RNA, 19 nt, Artificial Sequence
  Description of Artificial Sequence: Synthetic oligonucleotide
ugacagauuacacagggcu

SEQ ID NO: 1132760 - RNA, 19 nt, Artificial Sequence
  Description of Artificial Sequence: Synthetic oligonucleotide
cucaugacagauuacacag

SEQ ID NO: 1132761 - RNA, 19 nt, Artificial Sequence
  Description of Artificial Sequence: Synthetic oligonucleotide
agguaugcaaucuuguuuc

SEQ ID NO: 1132762 - RNA, 19 nt, Artificial Sequence
  Description of Artificial Sequence: Synthetic oligonucleotide
aauugaagugauucuaggu

SEQ ID NO: 1132763 - RNA, 19 nt, Artificial Sequence
  Description of Artificial Sequence: Synthetic oligonucleotide
uaaauuuucguaugguuac

SEQ ID NO: 1132764 - RNA, 19 nt, Artificial Sequence
  Description of Artificial Sequence: Synthetic oligonucleotide
ucaaccauggucuaaugca

SEQ ID NO: 1132765 - RNA, 19 nt, Artificial Sequence
  Description of Artificial Sequence: Synthetic oligonucleotide
aucucuacgacacuguaag

SEQ ID NO: 1132766 - RNA, 19 nt, Artificial Sequence
  Description of Artificial Sequence: Synthetic oligonucleotide
aaaauugagacuguaaaua

SEQ ID NO: 1132767 - RNA, 19 nt, Artificial Sequence
  Description of Artificial Sequence: Synthetic oligonucleotide
uuagguauagcuaccugcc

SEQ ID NO: 1132768 - RNA, 19 nt, Artificial Sequence
  Description of Artificial Sequence: Synthetic oligonucleotide
uauucauccuuucucacca

SEQ ID NO: 1132769 - RNA, 19 nt, Artificial Sequence
  Description of Artificial Sequence: Synthetic oligonucleotide
ucacaaucaagauaacugc

SEQ ID NO: 1132770 - RNA, 19 nt, Artificial Sequence
  Description of Artificial Sequence: Synthetic oligonucleotide
uuaaaauucgaauucugau

SEQ ID NO: 1132771 - RNA, 19 nt, Artificial Sequence
  Description of Artificial Sequence: Synthetic oligonucleotide
ucaguuuguuuaaauacgc

SEQ ID NO: 1132772 - RNA, 19 nt, Artificial Sequence
  Description of Artificial Sequence: Synthetic oligonucleotide
ucuaaugcacugagaaugg

SEQ ID NO: 1132773 - RNA, 19 nt, Artificial Sequence
  Description of Artificial Sequence: Synthetic oligonucleotide
uguugcaucaaccaugguc

SEQ ID NO: 1132774 - RNA, 19 nt, Artificial Sequence
  Description of Artificial Sequence: Synthetic oligonucleotide
ugggucuaaagaaagauuc

SEQ ID NO: 1132775 - RNA, 19 nt, Artificial Sequence
  Description of Artificial Sequence: Synthetic oligonucleotide
uuaacuugcuccuaaauuu

SEQ ID NO: 1132776 - RNA, 19 nt, Artificial Sequence
  Description of Artificial Sequence: Synthetic oligonucleotide
aaauugagacuguaaauau

SEQ ID NO: 1132777 - RNA, 19 nt, Artificial Sequence
  Description of Artificial Sequence: Synthetic oligonucleotide
uaaaauucgaauucugauc

SEQ ID NO: 1132778 - RNA, 19 nt, Artificial Sequence
  Description of Artificial Sequence: Synthetic oligonucleotide
auaguugcugagucaaacc

SEQ ID NO: 1132779 - RNA, 19 nt, Artificial Sequence
  Description of Artificial Sequence: Synthetic oligonucleotide
cuuguuucuaacauccgcc

SEQ ID NO: 1132780 - RNA, 19 nt, Artificial Sequence
  Description of Artificial Sequence: Synthetic oligonucleotide
uaauugaagugauucuagg

SEQ ID NO: 1132781 - RNA, 19 nt, Artificial Sequence
  Description of Artificial Sequence: Synthetic oligonucleotide
guaaguaugggucuaaaga

SEQ ID NO: 1132782 - RNA, 19 nt, Artificial Sequence
  Description of Artificial Sequence: Synthetic oligonucleotide
uaaguaugggucuaaagaa

SEQ ID NO: 1132783 - RNA, 19 nt, Artificial Sequence
  Description of Artificial Sequence: Synthetic oligonucleotide
guuaauuccagagacauca

SEQ ID NO: 1132784 - RNA, 19 nt, Artificial Sequence
  Description of Artificial Sequence: Synthetic oligonucleotide
ucuuauaucagugucaguu

SEQ ID NO: 1132785 - RNA, 19 nt, Artificial Sequence
  Description of Artificial Sequence: Synthetic oligonucleotide
ugcauaauacuauucaauc

SEQ ID NO: 1132786 - RNA, 19 nt, Artificial Sequence
  Description of Artificial Sequence: Synthetic oligonucleotide
aguaaaccaaaaucucuac

SEQ ID NO: 1132787 - RNA, 19 nt, Artificial Sequence
  Description of Artificial Sequence: Synthetic oligonucleotide
aucaaccauggucuaaugc

SEQ ID NO: 1132788 - RNA, 19 nt, Artificial Sequence
  Description of Artificial Sequence: Synthetic oligonucleotide
uugaagugauucuagguug

SEQ ID NO: 1132789 - RNA, 19 nt, Artificial Sequence
  Description of Artificial Sequence: Synthetic oligonucleotide
uuuucguaugguuacauau

SEQ ID NO: 1132790 - RNA, 19 nt, Artificial Sequence
  Description of Artificial Sequence: Synthetic oligonucleotide
uucacaagaacgcucacaa

SEQ ID NO: 1132791 - RNA, 19 nt, Artificial Sequence
  Description of Artificial Sequence: Synthetic oligonucleotide
cacaaggcaaaacugaaag

SEQ ID NO: 1132792 - RNA, 19 nt, Artificial Sequence
  Description of Artificial Sequence: Synthetic oligonucleotide
cauacaauuacaggcauag

SEQ ID NO: 1132793 - RNA, 19 nt, Artificial Sequence
  Description of Artificial Sequence: Synthetic oligonucleotide
ugugguagaaucuugugau

SEQ ID NO: 1132794 - RNA, 19 nt, Artificial Sequence
  Description of Artificial Sequence: Synthetic oligonucleotide
cuguaaauaugaaccaagg

SEQ ID NO: 1132795 - RNA, 19 nt, Artificial Sequence
  Description of Artificial Sequence: Synthetic oligonucleotide
uuaaauacgcuuuaaccuu

SEQ ID NO: 1132796 - RNA, 19 nt, Artificial Sequence
  Description of Artificial Sequence: Synthetic oligonucleotide
guaucucaggacuuggugg

SEQ ID NO: 1132797 - RNA, 19 nt, Artificial Sequence
  Description of Artificial Sequence: Synthetic oligonucleotide
ucgaauucugaucuuauau

SEQ ID NO: 1132798 - RNA, 19 nt, Artificial Sequence
  Description of Artificial Sequence: Synthetic oligonucleotide
gauucuagguugcuugccg

SEQ ID NO: 1132799 - RNA, 19 nt, Artificial Sequence
  Description of Artificial Sequence: Synthetic oligonucleotide
guaaaccaaaaucucuacg

SEQ ID NO: 1132800 - RNA, 19 nt, Artificial Sequence
  Description of Artificial Sequence: Synthetic oligonucleotide
uaaagguuauaccaggcau

SEQ ID NO: 1132801 - RNA, 19 nt, Artificial Sequence
  Description of Artificial Sequence: Synthetic oligonucleotide
ugaucuuauaucaguguca

SEQ ID NO: 1132802 - RNA, 19 nt, Artificial Sequence
  Description of Artificial Sequence: Synthetic oligonucleotide
gucaguuaauuccagagac

SEQ ID NO: 1132803 - RNA, 19 nt, Artificial Sequence
  Description of Artificial Sequence: Synthetic oligonucleotide
aaucaagauaacugcaaau

SEQ ID NO: 1132804 - RNA, 19 nt, Artificial Sequence
  Description of Artificial Sequence: Synthetic oligonucleotide
auuugagaaaucuuguaaa

SEQ ID NO: 1132805 - RNA, 19 nt, Artificial Sequence
  Description of Artificial Sequence: Synthetic oligonucleotide
auagaaguuuuaaauagag

SEQ ID NO: 1132806 - RNA, 19 nt, Artificial Sequence
  Description of Artificial Sequence: Synthetic oligonucleotide
uaaaauugagacuguaaau

SEQ ID NO: 1132807 - RNA, 19 nt, Artificial Sequence
  Description of Artificial Sequence: Synthetic oligonucleotide
aaagguuauaccaggcauc

SEQ ID NO: 1132808 - RNA, 19 nt, Artificial Sequence
  Description of Artificial Sequence: Synthetic oligonucleotide
gaucuuauaucagugucag

SEQ ID NO: 1132809 - RNA, 19 nt, Artificial Sequence
  Description of Artificial Sequence: Synthetic oligonucleotide
aucuuuacaggccaugugu

SEQ ID NO: 1132810 - RNA, 19 nt, Artificial Sequence
  Description of Artificial Sequence: Synthetic oligonucleotide
auugaagugauucuagguu

SEQ ID NO: 1132811 - RNA, 19 nt, Artificial Sequence
  Description of Artificial Sequence: Synthetic oligonucleotide
ccaaggaucaucuuuacag

SEQ ID NO: 1132812 - RNA, 19 nt, Artificial Sequence
  Description of Artificial Sequence: Synthetic oligonucleotide
agacaaauucucaugacag

SEQ ID NO: 1132813 - RNA, 19 nt, Artificial Sequence
  Description of Artificial Sequence: Synthetic oligonucleotide
uauugauuuguucauugua

SEQ ID NO: 1132814 - RNA, 19 nt, Artificial Sequence
  Description of Artificial Sequence: Synthetic oligonucleotide
gagaauggaauuugugagc

SEQ ID NO: 1132815 - RNA, 19 nt, Artificial Sequence
  Description of Artificial Sequence: Synthetic oligonucleotide
aaucccuuauaguugguau

SEQ ID NO: 1132816 - RNA, 19 nt, Artificial Sequence
  Description of Artificial Sequence: Synthetic oligonucleotide
acaauuacaggcauagaag

SEQ ID NO: 1132817 - RNA, 19 nt, Artificial Sequence
  Description of Artificial Sequence: Synthetic oligonucleotide
auugagacuguaaauauga

SEQ ID NO: 1132818 - RNA, 19 nt, Artificial Sequence
  Description of Artificial Sequence: Synthetic oligonucleotide
ucaauaucuaaaacugauc

SEQ ID NO: 1132819 - RNA, 19 nt, Artificial Sequence
  Description of Artificial Sequence: Synthetic oligonucleotide
cauaauacuauucaaucaa

SEQ ID NO: 1132820 - RNA, 19 nt, Artificial Sequence
  Description of Artificial Sequence: Synthetic oligonucleotide
ugaaccaaggaucaucuuu

SEQ ID NO: 1132821 - RNA, 19 nt, Artificial Sequence
  Description of Artificial Sequence: Synthetic oligonucleotide
gugucaguuaauuccagag

SEQ ID NO: 1132822 - RNA, 19 nt, Artificial Sequence
  Description of Artificial Sequence: Synthetic oligonucleotide
aguaaguaugggucuaaag

SEQ ID NO: 1132823 - RNA, 19 nt, Artificial Sequence
  Description of Artificial Sequence: Synthetic oligonucleotide
ugagucaaaccuuucauuu

SEQ ID NO: 1132824 - RNA, 19 nt, Artificial Sequence
  Description of Artificial Sequence: Synthetic oligonucleotide
uguaucaguaucucaggac

SEQ ID NO: 1132825 - RNA, 19 nt, Artificial Sequence
  Description of Artificial Sequence: Synthetic oligonucleotide
uucguaugguuacauauuc

SEQ ID NO: 1132826 - RNA, 19 nt, Artificial Sequence
  Description of Artificial Sequence: Synthetic oligonucleotide
uuauaguugguauucuuua

SEQ ID NO: 1132827 - RNA, 19 nt, Artificial Sequence
  Description of Artificial Sequence: Synthetic oligonucleotide
caaggaucaucuuuacagg

SEQ ID NO: 1132828 - RNA, 19 nt, Artificial Sequence
  Description of Artificial Sequence: Synthetic oligonucleotide
ugucaguuaauuccagaga

SEQ ID NO: 1132829 - RNA, 19 nt, Artificial Sequence
  Description of Artificial Sequence: Synthetic oligonucleotide
auucuagguugcuugccgc

SEQ ID NO: 1132830 - RNA, 19 nt, Artificial Sequence
  Description of Artificial Sequence: Synthetic oligonucleotide
aaacugaucuuagguauag

SEQ ID NO: 1132831 - RNA, 19 nt, Artificial Sequence
  Description of Artificial Sequence: Synthetic oligonucleotide
gcuguuaaggcucuauugg

SEQ ID NO: 1132832 - RNA, 19 nt, Artificial Sequence
  Description of Artificial Sequence: Synthetic oligonucleotide
aguaucucaggacuuggug

SEQ ID NO: 1132833 - RNA, 19 nt, Artificial Sequence
  Description of Artificial Sequence: Synthetic oligonucleotide
uacgcuuuaaccuuuuguu

SEQ ID NO: 1132834 - RNA, 19 nt, Artificial Sequence
  Description of Artificial Sequence: Synthetic oligonucleotide
gagacaaauucucaugaca

SEQ ID NO: 1132835 - RNA, 19 nt, Artificial Sequence
  Description of Artificial Sequence: Synthetic oligonucleotide
uuucuggagacaaauucuc

SEQ ID NO: 1132836 - RNA, 19 nt, Artificial Sequence
  Description of Artificial Sequence: Synthetic oligonucleotide
ugcaguaaaccaaaaucuc

SEQ ID NO: 1132837 - RNA, 19 nt, Artificial Sequence
  Description of Artificial Sequence: Synthetic oligonucleotide
ggugcaguaaaccaaaauc

SEQ ID NO: 1132838 - RNA, 19 nt, Artificial Sequence
  Description of Artificial Sequence: Synthetic oligonucleotide
agaaugucagauucacaag

SEQ ID NO: 1132839 - RNA, 19 nt, Artificial Sequence
  Description of Artificial Sequence: Synthetic oligonucleotide
ugcagauuuuccuucacuc

SEQ ID NO: 1132840 - RNA, 19 nt, Artificial Sequence
  Description of Artificial Sequence: Synthetic oligonucleotide
uaauacuauucaaucaauu

SEQ ID NO: 1132841 - RNA, 19 nt, Artificial Sequence
  Description of Artificial Sequence: Synthetic oligonucleotide
aaccaaggaucaucuuuac

SEQ ID NO: 1132842 - RNA, 19 nt, Artificial Sequence
  Description of Artificial Sequence: Synthetic oligonucleotide
ugcaaucuuguuucuaaca

SEQ ID NO: 1132843 - RNA, 19 nt, Artificial Sequence
  Description of Artificial Sequence: Synthetic oligonucleotide
ugugaguuacccuggcaag

SEQ ID NO: 1132844 - RNA, 19 nt, Artificial Sequence
  Description of Artificial Sequence: Synthetic oligonucleotide
uguaucagaucuuggguaa

SEQ ID NO: 1132845 - RNA, 19 nt, Artificial Sequence
  Description of Artificial Sequence: Synthetic oligonucleotide
guuuacauaugcauacugc

SEQ ID NO: 1132846 - RNA, 19 nt, Artificial Sequence
  Description of Artificial Sequence: Synthetic oligonucleotide
ucaguuaauuccagagaca

SEQ ID NO: 1132847 - RNA, 19 nt, Artificial Sequence
  Description of Artificial Sequence: Synthetic oligonucleotide
ucagggugggucuaggcug

SEQ ID NO: 1132848 - RNA, 19 nt, Artificial Sequence
  Description of Artificial Sequence: Synthetic oligonucleotide
agcuguuaaggcucuauug

SEQ ID NO: 1132849 - RNA, 19 nt, Artificial Sequence
  Description of Artificial Sequence: Synthetic oligonucleotide
aagguuauaccaggcauca

SEQ ID NO: 1132850 - RNA, 19 nt, Artificial Sequence
  Description of Artificial Sequence: Synthetic oligonucleotide
ugcuccuaaauuuucguau

SEQ ID NO: 1132851 - RNA, 19 nt, Artificial Sequence
  Description of Artificial Sequence: Synthetic oligonucleotide
aacgcucacaaucaagaua

SEQ ID NO: 1132852 - RNA, 19 nt, Artificial Sequence
  Description of Artificial Sequence: Synthetic oligonucleotide
aguaugggucuaaagaaag

SEQ ID NO: 1132853 - RNA, 19 nt, Artificial Sequence
  Description of Artificial Sequence: Synthetic oligonucleotide
uuguaucagaucuugggua

SEQ ID NO: 1132854 - RNA, 19 nt, Artificial Sequence
  Description of Artificial Sequence: Synthetic oligonucleotide
auagcuaccugccuuguau

SEQ ID NO: 1132855 - RNA, 19 nt, Artificial Sequence
  Description of Artificial Sequence: Synthetic oligonucleotide
uaucucaggacuugguggu

SEQ ID NO: 1132856 - RNA, 19 nt, Artificial Sequence
  Description of Artificial Sequence: Synthetic oligonucleotide
auacgcuuuaaccuuuugu

SEQ ID NO: 1132857 - RNA, 19 nt, Artificial Sequence
  Description of Artificial Sequence: Synthetic oligonucleotide
ucuccuucccaugugguag

SEQ ID NO: 1132858 - RNA, 19 nt, Artificial Sequence
  Description of Artificial Sequence: Synthetic oligonucleotide
uaugggucuaaagaaagau

SEQ ID NO: 1132859 - RNA, 19 nt, Artificial Sequence
  Description of Artificial Sequence: Synthetic oligonucleotide
caaaaucucuacgacacug

SEQ ID NO: 1132860 - RNA, 19 nt, Artificial Sequence
  Description of Artificial Sequence: Synthetic oligonucleotide
uacaucacauugcagcauc

SEQ ID NO: 1132861 - RNA, 19 nt, Artificial Sequence
  Description of Artificial Sequence: Synthetic oligonucleotide
caaggcaaauccuugcuuc

SEQ ID NO: 1132862 - RNA, 19 nt, Artificial Sequence
  Description of Artificial Sequence: Synthetic oligonucleotide
uucucaugacagauuacac

SEQ ID NO: 1132863 - RNA, 19 nt, Artificial Sequence
  Description of Artificial Sequence: Synthetic oligonucleotide
agauaacuccaggacaaac

SEQ ID NO: 1132864 - RNA, 19 nt, Artificial Sequence
  Description of Artificial Sequence: Synthetic oligonucleotide
caccuuauugauuuguuca

SEQ ID NO: 1132865 - RNA, 19 nt, Artificial Sequence
  Description of Artificial Sequence: Synthetic oligonucleotide
aaggcaaauccuugcuuca

SEQ ID NO: 1132866 - RNA, 19 nt, Artificial Sequence
  Description of Artificial Sequence: Synthetic oligonucleotide
aauacgcuuuaaccuuuug

SEQ ID NO: 1132867 - RNA, 19 nt, Artificial Sequence
  Description of Artificial Sequence: Synthetic oligonucleotide
ucuauugguuucugcauuc

SEQ ID NO: 1132868 - RNA, 19 nt, Artificial Sequence
  Description of Artificial Sequence: Synthetic oligonucleotide
uguuaacuugcuccuaaau

SEQ ID NO: 1132869 - RNA, 19 nt, Artificial Sequence
  Description of Artificial Sequence: Synthetic oligonucleotide
cauggucuaaugcacugag

SEQ ID NO: 1132870 - RNA, 19 nt, Artificial Sequence
  Description of Artificial Sequence: Synthetic oligonucleotide
gauuccuucacaagggguc

SEQ ID NO: 1132871 - RNA, 19 nt, Artificial Sequence
  Description of Artificial Sequence: Synthetic oligonucleotide
agaucuuggguaacugccc

SEQ ID NO: 1132872 - RNA, 19 nt, Artificial Sequence
  Description of Artificial Sequence: Synthetic oligonucleotide
uuucguaugguuacauauu

SEQ ID NO: 1132873 - RNA, 19 nt, Artificial Sequence
  Description of Artificial Sequence: Synthetic oligonucleotide
acgcuuuaaccuuuuguug

SEQ ID NO: 1132874 - RNA, 19 nt, Artificial Sequence
  Description of Artificial Sequence: Synthetic oligonucleotide
uuccuucacucucagauuu

SEQ ID NO: 1132875 - RNA, 19 nt, Artificial Sequence
  Description of Artificial Sequence: Synthetic oligonucleotide
aacuuuuacugcacauuag

SEQ ID NO: 1132876 - RNA, 19 nt, Artificial Sequence
  Description of Artificial Sequence: Synthetic oligonucleotide
cauuugagaaaucuuguaa

SEQ ID NO: 1132877 - RNA, 19 nt, Artificial Sequence
  Description of Artificial Sequence: Synthetic oligonucleotide
agaacgcucacaaucaaga

SEQ ID NO: 1132878 - RNA, 19 nt, Artificial Sequence
  Description of Artificial Sequence: Synthetic oligonucleotide
uguuaaggcucuauugguu

SEQ ID NO: 1132879 - RNA, 19 nt, Artificial Sequence
  Description of Artificial Sequence: Synthetic oligonucleotide
auccuuaccaugucaccag

SEQ ID NO: 1132880 - RNA, 19 nt, Artificial Sequence
  Description of Artificial Sequence: Synthetic oligonucleotide
uaacauccgccacaauggc

SEQ ID NO: 1132881 - RNA, 19 nt, Artificial Sequence
  Description of Artificial Sequence: Synthetic oligonucleotide
acacuguaagaaguacacc

SEQ ID NO: 1132882 - RNA, 19 nt, Artificial Sequence
  Description of Artificial Sequence: Synthetic oligonucleotide
agcauccuuaccaugucac

SEQ ID NO: 1132883 - RNA, 19 nt, Artificial Sequence
  Description of Artificial Sequence: Synthetic oligonucleotide
gauugaggcacuccuuuuc

SEQ ID NO: 1132884 - RNA, 19 nt, Artificial Sequence
  Description of Artificial Sequence: Synthetic oligonucleotide
guaaagguuauaccaggca

SEQ ID NO: 1132885 - RNA, 19 nt, Artificial Sequence
  Description of Artificial Sequence: Synthetic oligonucleotide
ucguaugguuacauauuca

SEQ ID NO: 1132886 - RNA, 19 nt, Artificial Sequence
  Description of Artificial Sequence: Synthetic oligonucleotide
uuugucuccuucccaugug

SEQ ID NO: 1132887 - RNA, 19 nt, Artificial Sequence
  Description of Artificial Sequence: Synthetic oligonucleotide
agcugauugaggcacuccu

SEQ ID NO: 1132888 - RNA, 19 nt, Artificial Sequence
  Description of Artificial Sequence: Synthetic oligonucleotide
uaaauacgcuuuaaccuuu

SEQ ID NO: 1132889 - RNA, 19 nt, Artificial Sequence
  Description of Artificial Sequence: Synthetic oligonucleotide
gacaaauucucaugacaga

SEQ ID NO: 1132890 - RNA, 19 nt, Artificial Sequence
  Description of Artificial Sequence: Synthetic oligonucleotide
aaugucagauucacaagaa

SEQ ID NO: 1132891 - RNA, 19 nt, Artificial Sequence
  Description of Artificial Sequence: Synthetic oligonucleotide
guaucaguaucucaggacu

SEQ ID NO: 1132892 - RNA, 19 nt, Artificial Sequence
  Description of Artificial Sequence: Synthetic oligonucleotide
ucaccuuauugauuuguuc

SEQ ID NO: 1132893 - RNA, 19 nt, Artificial Sequence
  Description of Artificial Sequence: Synthetic oligonucleotide
uguguccugagguaugcaa

SEQ ID NO: 1132894 - RNA, 19 nt, Artificial Sequence
  Description of Artificial Sequence: Synthetic oligonucleotide
ucuuuacaggccauguguu

SEQ ID NO: 1132895 - RNA, 19 nt, Artificial Sequence
  Description of Artificial Sequence: Synthetic oligonucleotide
acuugcuccuaaauuuucg

SEQ ID NO: 1132896 - RNA, 19 nt, Artificial Sequence
  Description of Artificial Sequence: Synthetic oligonucleotide
cauuguacuguguccugag

SEQ ID NO: 1132897 - RNA, 19 nt, Artificial Sequence
  Description of Artificial Sequence: Synthetic oligonucleotide
gucuaggcuguacagcugc

SEQ ID NO: 1132898 - RNA, 19 nt, Artificial Sequence
  Description of Artificial Sequence: Synthetic oligonucleotide
uguacuguguccugaggua

SEQ ID NO: 1132899 - RNA, 19 nt, Artificial Sequence
  Description of Artificial Sequence: Synthetic oligonucleotide
agauucacaagaacgcuca

SEQ ID NO: 1132900 - RNA, 19 nt, Artificial Sequence
  Description of Artificial Sequence: Synthetic oligonucleotide
acaagaacgcucacaauca

SEQ ID NO: 1132901 - RNA, 19 nt, Artificial Sequence
  Description of Artificial Sequence: Synthetic oligonucleotide
cagauucacaagaacgcuc

SEQ ID NO: 1132902 - RNA, 19 nt, Artificial Sequence
  Description of Artificial Sequence: Synthetic oligonucleotide
caugugguagaaucuugug

SEQ ID NO: 1132903 - RNA, 19 nt, Artificial Sequence
  Description of Artificial Sequence: Synthetic oligonucleotide
agugucaguuaauuccaga

SEQ ID NO: 1132904 - RNA, 19 nt, Artificial Sequence
  Description of Artificial Sequence: Synthetic oligonucleotide
uucuagguugcuugccgcc

SEQ ID NO: 1132905 - RNA, 19 nt, Artificial Sequence
  Description of Artificial Sequence: Synthetic oligonucleotide
uuuacaggccauguguuua

SEQ ID NO: 1132906 - RNA, 19 nt, Artificial Sequence
  Description of Artificial Sequence: Synthetic oligonucleotide
caggcuuugcaacaagcac

SEQ ID NO: 1132907 - RNA, 19 nt, Artificial Sequence
  Description of Artificial Sequence: Synthetic oligonucleotide
aaguaugggucuaaagaaa

SEQ ID NO: 1132908 - RNA, 19 nt, Artificial Sequence
  Description of Artificial Sequence: Synthetic oligonucleotide
uuaggcugugaugaagugu

SEQ ID NO: 1132909 - RNA, 19 nt, Artificial Sequence
  Description of Artificial Sequence: Synthetic oligonucleotide
acgacacuguaagaaguac

SEQ ID NO: 1132910 - RNA, 19 nt, Artificial Sequence
  Description of Artificial Sequence: Synthetic oligonucleotide
accuuauugauuuguucau

SEQ ID NO: 1132911 - RNA, 19 nt, Artificial Sequence
  Description of Artificial Sequence: Synthetic oligonucleotide
agcaaaacauggagucugc

SEQ ID NO: 1132912 - RNA, 19 nt, Artificial Sequence
  Description of Artificial Sequence: Synthetic oligonucleotide
uacgacacuguaagaagua

SEQ ID NO: 1132913 - RNA, 19 nt, Artificial Sequence
  Description of Artificial Sequence: Synthetic oligonucleotide
aauuacaggcauagaaguu

SEQ ID NO: 1132914 - RNA, 19 nt, Artificial Sequence
  Description of Artificial Sequence: Synthetic oligonucleotide
agauaacugcaaauggucu

SEQ ID NO: 1132915 - RNA, 19 nt, Artificial Sequence
  Description of Artificial Sequence: Synthetic oligonucleotide
cauaugcugacauuuuaaa

SEQ ID NO: 1132916 - RNA, 19 nt, Artificial Sequence
  Description of Artificial Sequence: Synthetic oligonucleotide
gcauaauacuauucaauca

SEQ ID NO: 1132917 - RNA, 19 nt, Artificial Sequence
  Description of Artificial Sequence: Synthetic oligonucleotide
gguauagcuaccugccuug

SEQ ID NO: 1132918 - RNA, 19 nt, Artificial Sequence
  Description of Artificial Sequence: Synthetic oligonucleotide
auuugugagcacaaggcaa

SEQ ID NO: 1132919 - RNA, 19 nt, Artificial Sequence
  Description of Artificial Sequence: Synthetic oligonucleotide
uucaccuuauugauuuguu

SEQ ID NO: 1132920 - RNA, 19 nt, Artificial Sequence
  Description of Artificial Sequence: Synthetic oligonucleotide
ugagguaugcaaucuuguu

SEQ ID NO: 1132921 - RNA, 19 nt, Artificial Sequence
  Description of Artificial Sequence: Synthetic oligonucleotide
gauaacuccaggacaaacu

SEQ ID NO: 1132922 - RNA, 19 nt, Artificial Sequence
  Description of Artificial Sequence: Synthetic oligonucleotide
acauaugcauacugcugca

SEQ ID NO: 1132923 - RNA, 19 nt, Artificial Sequence
  Description of Artificial Sequence: Synthetic oligonucleotide
uuauaccaggcaucagggu

SEQ ID NO: 1132924 - RNA, 19 nt, Artificial Sequence
  Description of Artificial Sequence: Synthetic oligonucleotide
gugauucuagguugcuugc

SEQ ID NO: 1132925 - RNA, 19 nt, Artificial Sequence
  Description of Artificial Sequence: Synthetic oligonucleotide
ugauucuagguugcuugcc

SEQ ID NO: 1132926 - RNA, 19 nt, Artificial Sequence
  Description of Artificial Sequence: Synthetic oligonucleotide
ugccuuguaucagaucuug

SEQ ID NO: 1132927 - RNA, 19 nt, Artificial Sequence
  Description of Artificial Sequence: Synthetic oligonucleotide
uccuuaccaugucaccagc

SEQ ID NO: 1132928 - RNA, 19 nt, Artificial Sequence
  Description of Artificial Sequence: Synthetic oligonucleotide
ucauuguacuguguccuga

SEQ ID NO: 1132929 - RNA, 19 nt, Artificial Sequence
  Description of Artificial Sequence: Synthetic oligonucleotide
aaauucgaauucugaucuu

SEQ ID NO: 1132930 - RNA, 19 nt, Artificial Sequence
  Description of Artificial Sequence: Synthetic oligonucleotide
acaucacauugcagcaucc

SEQ ID NO: 1132931 - RNA, 19 nt, Artificial Sequence
  Description of Artificial Sequence: Synthetic oligonucleotide
gaaccaaggaucaucuuua

SEQ ID NO: 1132932 - RNA, 19 nt, Artificial Sequence
  Description of Artificial Sequence: Synthetic oligonucleotide
aaucucuacgacacuguaa

SEQ ID NO: 1132933 - RNA, 19 nt, Artificial Sequence
  Description of Artificial Sequence: Synthetic oligonucleotide
uagguauagcuaccugccu

SEQ ID NO: 1132934 - RNA, 19 nt, Artificial Sequence
  Description of Artificial Sequence: Synthetic oligonucleotide
aucaguaucucaggacuug

SEQ ID NO: 1132935 - RNA, 19 nt, Artificial Sequence
  Description of Artificial Sequence: Synthetic oligonucleotide
guuaacuugcuccuaaauu

SEQ ID NO: 1132936 - RNA, 19 nt, Artificial Sequence
  Description of Artificial Sequence: Synthetic oligonucleotide
uucgaauucugaucuuaua

SEQ ID NO: 1132937 - RNA, 19 nt, Artificial Sequence
  Description of Artificial Sequence: Synthetic oligonucleotide
agguauagcuaccugccuu

SEQ ID NO: 1132938 - RNA, 19 nt, Artificial Sequence
  Description of Artificial Sequence: Synthetic oligonucleotide
auucacaagaacgcucaca

SEQ ID NO: 1132939 - RNA, 19 nt, Artificial Sequence
  Description of Artificial Sequence: Synthetic oligonucleotide
cuuguuaacuugcuccuaa

SEQ ID NO: 1132940 - RNA, 19 nt, Artificial Sequence
  Description of Artificial Sequence: Synthetic oligonucleotide
acaaaauuuuauggaagua

SEQ ID NO: 1132941 - RNA, 19 nt, Artificial Sequence
  Description of Artificial Sequence: Synthetic oligonucleotide
aggcauuugaggaacagua

SEQ ID NO: 1132942 - RNA, 19 nt, Artificial Sequence
  Description of Artificial Sequence: Synthetic oligonucleotide
aaaucuuguaaagguuaua

SEQ ID NO: 1132943 - RNA, 19 nt, Artificial Sequence
  Description of Artificial Sequence: Synthetic oligonucleotide
accaaggaucaucuuuaca

SEQ ID NO: 1132944 - RNA, 19 nt, Artificial Sequence
  Description of Artificial Sequence: Synthetic oligonucleotide
auuuucguaugguuacaua

SEQ ID NO: 1132945 - RNA, 19 nt, Artificial Sequence
  Description of Artificial Sequence: Synthetic oligonucleotide
uuccuaagaacugcuguau

SEQ ID NO: 1132946 - RNA, 19 nt, Artificial Sequence
  Description of Artificial Sequence: Synthetic oligonucleotide
gugggucuaggcuguacag

SEQ ID NO: 1132947 - RNA, 19 nt, Artificial Sequence
  Description of Artificial Sequence: Synthetic oligonucleotide
guacaccucagcuguuaag

SEQ ID NO: 1132948 - RNA, 19 nt, Artificial Sequence
  Description of Artificial Sequence: Synthetic oligonucleotide
aacugcaaauggucuguuu

SEQ ID NO: 1132949 - RNA, 19 nt, Artificial Sequence
  Description of Artificial Sequence: Synthetic oligonucleotide
gacagauuacacagggcuc

SEQ ID NO: 1132950 - RNA, 19 nt, Artificial Sequence
  Description of Artificial Sequence: Synthetic oligonucleotide
uugcuccuaaauuuucgua

SEQ ID NO: 1132951 - RNA, 19 nt, Artificial Sequence
  Description of Artificial Sequence: Synthetic oligonucleotide
aggugcaguaaaccaaaau

SEQ ID NO: 1132952 - RNA, 19 nt, Artificial Sequence
  Description of Artificial Sequence: Synthetic oligonucleotide
gcuccuaaauuuucguaug

SEQ ID NO: 1132953 - RNA, 19 nt, Artificial Sequence
  Description of Artificial Sequence: Synthetic oligonucleotide
agcuaccugccuuguauca

SEQ ID NO: 1132954 - RNA, 19 nt, Artificial Sequence
  Description of Artificial Sequence: Synthetic oligonucleotide
ugggucuaggcuguacagc

SEQ ID NO: 1132955 - RNA, 19 nt, Artificial Sequence
  Description of Artificial Sequence: Synthetic oligonucleotide
aggggucuuccuaagaacu

SEQ ID NO: 1132956 - RNA, 19 nt, Artificial Sequence
  Description of Artificial Sequence: Synthetic oligonucleotide
ucuagguugcuugccgcca

SEQ ID NO: 1132957 - RNA, 19 nt, Artificial Sequence
  Description of Artificial Sequence: Synthetic oligonucleotide
aggcaaauccuugcuucac

SEQ ID NO: 1132958 - RNA, 19 nt, Artificial Sequence
  Description of Artificial Sequence: Synthetic oligonucleotide
aucagaucuuggguaacug

SEQ ID NO: 1132959 - RNA, 19 nt, Artificial Sequence
  Description of Artificial Sequence: Synthetic oligonucleotide
gagguaugcaaucuuguuu

SEQ ID NO: 1132960 - RNA, 19 nt, Artificial Sequence
  Description of Artificial Sequence: Synthetic oligonucleotide
uccagcuauccacggcagc

SEQ ID NO: 1132961 - RNA, 19 nt, Artificial Sequence
  Description of Artificial Sequence: Synthetic oligonucleotide
gauucacaagaacgcucac

SEQ ID NO: 1132962 - RNA, 19 nt, Artificial Sequence
  Description of Artificial Sequence: Synthetic oligonucleotide
ucuaggcuguacagcugca

SEQ ID NO: 1132963 - RNA, 19 nt, Artificial Sequence
  Description of Artificial Sequence: Synthetic oligonucleotide
gugaguuacccuggcaagc

SEQ ID NO: 1132964 - RNA, 19 nt, Artificial Sequence
  Description of Artificial Sequence: Synthetic oligonucleotide
aucccuuauaguugguauu

SEQ ID NO: 1132965 - RNA, 19 nt, Artificial Sequence
  Description of Artificial Sequence: Synthetic oligonucleotide
uuacugcacauuagcugaa

SEQ ID NO: 1132966 - RNA, 19 nt, Artificial Sequence
  Description of Artificial Sequence: Synthetic oligonucleotide
cuuccuaagaacugcugua

SEQ ID NO: 1132967 - RNA, 19 nt, Artificial Sequence
  Description of Artificial Sequence: Synthetic oligonucleotide
cuguaucaguaucucagga

SEQ ID NO: 1132968 - RNA, 19 nt, Artificial Sequence
  Description of Artificial Sequence: Synthetic oligonucleotide
acaaggggucuuccuaaga

SEQ ID NO: 1132969 - RNA, 19 nt, Artificial Sequence
  Description of Artificial Sequence: Synthetic oligonucleotide
uaacugcccguuggggugg

SEQ ID NO: 1132970 - RNA, 19 nt, Artificial Sequence
  Description of Artificial Sequence: Synthetic oligonucleotide
ucucuacgacacuguaaga

SEQ ID NO: 1132971 - RNA, 19 nt, Artificial Sequence
  Description of Artificial Sequence: Synthetic oligonucleotide
uccgccacaauggcauucc

SEQ ID NO: 1132972 - RNA, 19 nt, Artificial Sequence
  Description of Artificial Sequence: Synthetic oligonucleotide
ucucacccacucauaugcu

SEQ ID NO: 1132973 - RNA, 19 nt, Artificial Sequence
  Description of Artificial Sequence: Synthetic oligonucleotide
auucaaucaauuagcucau

SEQ ID NO: 1132974 - RNA, 19 nt, Artificial Sequence
  Description of Artificial Sequence: Synthetic oligonucleotide
cacaaggggucuuccuaag

SEQ ID NO: 1132975 - RNA, 19 nt, Artificial Sequence
  Description of Artificial Sequence: Synthetic oligonucleotide
ggagacaaauucucaugac

SEQ ID NO: 1132976 - RNA, 19 nt, Artificial Sequence
  Description of Artificial Sequence: Synthetic oligonucleotide
uauagcuaccugccuugua

SEQ ID NO: 1132977 - RNA, 19 nt, Artificial Sequence
  Description of Artificial Sequence: Synthetic oligonucleotide
cuccaggugcaguaaacca

SEQ ID NO: 1132978 - RNA, 19 nt, Artificial Sequence
  Description of Artificial Sequence: Synthetic oligonucleotide
ugauugaggcacuccuuuu

SEQ ID NO: 1132979 - RNA, 19 nt, Artificial Sequence
  Description of Artificial Sequence: Synthetic oligonucleotide
aauccuugcuucaccuuau

SEQ ID NO: 1132980 - RNA, 19 nt, Artificial Sequence
  Description of Artificial Sequence: Synthetic oligonucleotide
aagugauucuagguugcuu

SEQ ID NO: 1132981 - RNA, 19 nt, Artificial Sequence
  Description of Artificial Sequence: Synthetic oligonucleotide
cagugucaguuaauuccag

SEQ ID NO: 1132982 - RNA, 19 nt, Artificial Sequence
  Description of Artificial Sequence: Synthetic oligonucleotide
gaguuacccuggcaagcug

SEQ ID NO: 1132983 - RNA, 19 nt, Artificial Sequence
  Description of Artificial Sequence: Synthetic oligonucleotide
aguuacccuggcaagcuga

SEQ ID NO: 1132984 - RNA, 19 nt, Artificial Sequence
  Description of Artificial Sequence: Synthetic oligonucleotide
cacggcagccuuuaauuga

SEQ ID NO: 1132985 - RNA, 19 nt, Artificial Sequence
  Description of Artificial Sequence: Synthetic oligonucleotide
cugcauaauacuauucaau

SEQ ID NO: 1132986 - RNA, 19 nt, Artificial Sequence
  Description of Artificial Sequence: Synthetic oligonucleotide
ggcaagcugauugaggcac

SEQ ID NO: 1132987 - RNA, 19 nt, Artificial Sequence
  Description of Artificial Sequence: Synthetic oligonucleotide
aaguacaccucagcuguua

SEQ ID NO: 1132988 - RNA, 19 nt, Artificial Sequence
  Description of Artificial Sequence: Synthetic oligonucleotide
auucgaauucugaucuuau

SEQ ID NO: 1132989 - RNA, 19 nt, Artificial Sequence
  Description of Artificial Sequence: Synthetic oligonucleotide
ccuggcaagcugauugagg

SEQ ID NO: 1132990 - RNA, 19 nt, Artificial Sequence
  Description of Artificial Sequence: Synthetic oligonucleotide
aucuuauaucagugucagu

SEQ ID NO: 1132991 - RNA, 19 nt, Artificial Sequence
  Description of Artificial Sequence: Synthetic oligonucleotide
cucauaugcugacauuuua

SEQ ID NO: 1132992 - RNA, 19 nt, Artificial Sequence
  Description of Artificial Sequence: Synthetic oligonucleotide
guaugggucuaaagaaaga

SEQ ID NO: 1132993 - RNA, 19 nt, Artificial Sequence
  Description of Artificial Sequence: Synthetic oligonucleotide
cuugcuccuaaauuuucgu

SEQ ID NO: 1132994 - RNA, 19 nt, Artificial Sequence
  Description of Artificial Sequence: Synthetic oligonucleotide
agauuacacagggcuccuc

SEQ ID NO: 1132995 - RNA, 19 nt, Artificial Sequence
  Description of Artificial Sequence: Synthetic oligonucleotide
gcacauccuucuuucaaac

SEQ ID NO: 1132996 - RNA, 19 nt, Artificial Sequence
  Description of Artificial Sequence: Synthetic oligonucleotide
ucccaugugguagaaucuu

SEQ ID NO: 1132997 - RNA, 19 nt, Artificial Sequence
  Description of Artificial Sequence: Synthetic oligonucleotide
cacauccuucuuucaaaca

SEQ ID NO: 1132998 - RNA, 19 nt, Artificial Sequence
  Description of Artificial Sequence: Synthetic oligonucleotide
ugaugaaguguggcugggu

SEQ ID NO: 1132999 - RNA, 19 nt, Artificial Sequence
  Description of Artificial Sequence: Synthetic oligonucleotide
auccgccacaauggcauuc

SEQ ID NO: 1133000 - RNA, 19 nt, Artificial Sequence
  Description of Artificial Sequence: Synthetic oligonucleotide
ucuuguuaacuugcuccua

SEQ ID NO: 1133001 - RNA, 19 nt, Artificial Sequence
  Description of Artificial Sequence: Synthetic oligonucleotide
cacccacucauaugcugac

SEQ ID NO: 1133002 - RNA, 19 nt, Artificial Sequence
  Description of Artificial Sequence: Synthetic oligonucleotide
auacaauuacaggcauaga

SEQ ID NO: 1133003 - RNA, 19 nt, Artificial Sequence
  Description of Artificial Sequence: Synthetic oligonucleotide
gggucuuccuaagaacugc

SEQ ID NO: 1133004 - RNA, 19 nt, Artificial Sequence
  Description of Artificial Sequence: Synthetic oligonucleotide
augggucuaaagaaagauu

SEQ ID NO: 1133005 - RNA, 19 nt, Artificial Sequence
  Description of Artificial Sequence: Synthetic oligonucleotide
gcauccuuaccaugucacc

SEQ ID NO: 1133006 - RNA, 19 nt, Artificial Sequence
  Description of Artificial Sequence: Synthetic oligonucleotide
uugcugagucaaaccuuuc

SEQ ID NO: 1133007 - RNA, 19 nt, Artificial Sequence
  Description of Artificial Sequence: Synthetic oligonucleotide
aguugcugagucaaaccuu

SEQ ID NO: 1133008 - RNA, 19 nt, Artificial Sequence
  Description of Artificial Sequence: Synthetic oligonucleotide
caugugaguuacccuggca

SEQ ID NO: 1133009 - RNA, 19 nt, Artificial Sequence
  Description of Artificial Sequence: Synthetic oligonucleotide
gcacugagaauggaauuug

SEQ ID NO: 1133010 - RNA, 19 nt, Artificial Sequence
  Description of Artificial Sequence: Synthetic oligonucleotide
guaucagaucuuggguaac

SEQ ID NO: 1133011 - RNA, 19 nt, Artificial Sequence
  Description of Artificial Sequence: Synthetic oligonucleotide
cuuugucuccuucccaugu

SEQ ID NO: 1133012 - RNA, 19 nt, Artificial Sequence
  Description of Artificial Sequence: Synthetic oligonucleotide
uacugcacauuagcugaaa

SEQ ID NO: 1133013 - RNA, 19 nt, Artificial Sequence
  Description of Artificial Sequence: Synthetic oligonucleotide
gccgccaugugaguuaccc

SEQ ID NO: 1133014 - RNA, 19 nt, Artificial Sequence
  Description of Artificial Sequence: Synthetic oligonucleotide
ggcaagguacucaaggcaa

SEQ ID NO: 1133015 - RNA, 19 nt, Artificial Sequence
  Description of Artificial Sequence: Synthetic oligonucleotide
cuugccgccaugugaguua

SEQ ID NO: 1133016 - RNA, 19 nt, Artificial Sequence
  Description of Artificial Sequence: Synthetic oligonucleotide
cuauugguuucugcauuca

SEQ ID NO: 1133017 - RNA, 19 nt, Artificial Sequence
  Description of Artificial Sequence: Synthetic oligonucleotide
augaaccaaggaucaucuu

SEQ ID NO: 1133018 - RNA, 19 nt, Artificial Sequence
  Description of Artificial Sequence: Synthetic oligonucleotide
gcuaccugccuuguaucag

SEQ ID NO: 1133019 - RNA, 19 nt, Artificial Sequence
  Description of Artificial Sequence: Synthetic oligonucleotide
caagaacgcucacaaucaa

SEQ ID NO: 1133020 - RNA, 19 nt, Artificial Sequence
  Description of Artificial Sequence: Synthetic oligonucleotide
agguuauaccaggcaucag

SEQ ID NO: 1133021 - RNA, 19 nt, Artificial Sequence
  Description of Artificial Sequence: Synthetic oligonucleotide
uugccgccaugugaguuac

SEQ ID NO: 1133022 - RNA, 19 nt, Artificial Sequence
  Description of Artificial Sequence: Synthetic oligonucleotide
cuaaugcacugagaaugga

SEQ ID NO: 1133023 - RNA, 19 nt, Artificial Sequence
  Description of Artificial Sequence: Synthetic oligonucleotide
auggucuaaugcacugaga

SEQ ID NO: 1133024 - RNA, 19 nt, Artificial Sequence
  Description of Artificial Sequence: Synthetic oligonucleotide
cugagucaaaccuuucauu

SEQ ID NO: 1133025 - RNA, 19 nt, Artificial Sequence
  Description of Artificial Sequence: Synthetic oligonucleotide
cugcccguuggggugggcc

SEQ ID NO: 1133026 - RNA, 19 nt, Artificial Sequence
  Description of Artificial Sequence: Synthetic oligonucleotide
cuucaccuuauugauuugu

SEQ ID NO: 1133027 - RNA, 19 nt, Artificial Sequence
  Description of Artificial Sequence: Synthetic oligonucleotide
uaacugcaaauggucuguu

SEQ ID NO: 1133028 - RNA, 19 nt, Artificial Sequence
  Description of Artificial Sequence: Synthetic oligonucleotide
cugauugaggcacuccuuu

SEQ ID NO: 1133029 - RNA, 19 nt, Artificial Sequence
  Description of Artificial Sequence: Synthetic oligonucleotide
guaugcaaucuuguuucua

SEQ ID NO: 1133030 - RNA, 19 nt, Artificial Sequence
  Description of Artificial Sequence: Synthetic oligonucleotide
gguugcuugccgccaugug

SEQ ID NO: 1133031 - RNA, 19 nt, Artificial Sequence
  Description of Artificial Sequence: Synthetic oligonucleotide
gguacucaaggcaaauccu

SEQ ID NO: 1133032 - RNA, 19 nt, Artificial Sequence
  Description of Artificial Sequence: Synthetic oligonucleotide
ugcuugccgccaugugagu

SEQ ID NO: 1133033 - RNA, 19 nt, Artificial Sequence
  Description of Artificial Sequence: Synthetic oligonucleotide
ggcauuugaggaacaguaa

SEQ ID NO: 1133034 - RNA, 19 nt, Artificial Sequence
  Description of Artificial Sequence: Synthetic oligonucleotide
gcucacaaucaagauaacu

SEQ ID NO: 1133035 - RNA, 19 nt, Artificial Sequence
  Description of Artificial Sequence: Synthetic oligonucleotide
ggucuaaugcacugagaau

SEQ ID NO: 1133036 - RNA, 19 nt, Artificial Sequence
  Description of Artificial Sequence: Synthetic oligonucleotide
caguaucucaggacuuggu

SEQ ID NO: 1133037 - RNA, 19 nt, Artificial Sequence
  Description of Artificial Sequence: Synthetic oligonucleotide
cguaugguuacauauucau

SEQ ID NO: 1133038 - RNA, 19 nt, Artificial Sequence
  Description of Artificial Sequence: Synthetic oligonucleotide
cgcuuuaaccuuuuguugu

SEQ ID NO: 1133039 - RNA, 19 nt, Artificial Sequence
  Description of Artificial Sequence: Synthetic oligonucleotide
gcaaaacauggagucugca

SEQ ID NO: 1133040 - RNA, 19 nt, Artificial Sequence
  Description of Artificial Sequence: Synthetic oligonucleotide
ggucuaggcuguacagcug

SEQ ID NO: 1133041 - RNA, 19 nt, Artificial Sequence
  Description of Artificial Sequence: Synthetic oligonucleotide
gguaugcaaucuuguuucu

SEQ ID NO: 1133042 - RNA, 19 nt, Artificial Sequence
  Description of Artificial Sequence: Synthetic oligonucleotide
ccuuaccaugucaccagca

SEQ ID NO: 1133043 - RNA, 19 nt, Artificial Sequence
  Description of Artificial Sequence: Synthetic oligonucleotide
ugccgccaugugaguuacc

SEQ ID NO: 1133044 - RNA, 19 nt, Artificial Sequence
  Description of Artificial Sequence: Synthetic oligonucleotide
uuacccuggcaagcugauu

SEQ ID NO: 1133045 - RNA, 19 nt, Artificial Sequence
  Description of Artificial Sequence: Synthetic oligonucleotide
gcuguacagcugcagagau

SEQ ID NO: 1133046 - RNA, 19 nt, Artificial Sequence
  Description of Artificial Sequence: Synthetic oligonucleotide
guguccugagguaugcaau

SEQ ID NO: 1133047 - RNA, 19 nt, Artificial Sequence
  Description of Artificial Sequence: Synthetic oligonucleotide
caucacauugcagcauccu

SEQ ID NO: 1133048 - RNA, 19 nt, Artificial Sequence
  Description of Artificial Sequence: Synthetic oligonucleotide
guccugagguaugcaaucu

SEQ ID NO: 1133049 - RNA, 19 nt, Artificial Sequence
  Description of Artificial Sequence: Synthetic oligonucleotide
ccaugugguagaaucuugu

SEQ ID NO: 1133050 - RNA, 19 nt, Artificial Sequence
  Description of Artificial Sequence: Synthetic oligonucleotide
guacaucacauugcagcau

SEQ ID NO: 1133051 - RNA, 19 nt, Artificial Sequence
  Description of Artificial Sequence: Synthetic oligonucleotide
guauagcuaccugccuugu

SEQ ID NO: 1133052 - RNA, 19 nt, Artificial Sequence
  Description of Artificial Sequence: Synthetic oligonucleotide
cagggugggucuaggcugu

SEQ ID NO: 1133053 - RNA, 19 nt, Artificial Sequence
  Description of Artificial Sequence: Synthetic oligonucleotide
gcauacaauuacaggcaua

SEQ ID NO: 1133054 - RNA, 19 nt, Artificial Sequence
  Description of Artificial Sequence: Synthetic oligonucleotide
ccagggaaaucuucuggua

SEQ ID NO: 1133055 - RNA, 19 nt, Artificial Sequence
  Description of Artificial Sequence: Synthetic oligonucleotide
cauaugcauacugcugcau

SEQ ID NO: 1133056 - RNA, 19 nt, Artificial Sequence
  Description of Artificial Sequence: Synthetic oligonucleotide
ccacuucaaacaaaauuuu

SEQ ID NO: 1133057 - RNA, 19 nt, Artificial Sequence
  Description of Artificial Sequence: Synthetic oligonucleotide
cuagguugcuugccgccau

SEQ ID NO: 1133058 - RNA, 19 nt, Artificial Sequence
  Description of Artificial Sequence: Synthetic oligonucleotide
guuacccuggcaagcugau

SEQ ID NO: 1133059 - RNA, 19 nt, Artificial Sequence
  Description of Artificial Sequence: Synthetic oligonucleotide
cagcuguuaaggcucuauu

SEQ ID NO: 1133060 - RNA, 19 nt, Artificial Sequence
  Description of Artificial Sequence: Synthetic oligonucleotide
cuguguccugagguaugca

SEQ ID NO: 1133061 - RNA, 19 nt, Artificial Sequence
  Description of Artificial Sequence: Synthetic oligonucleotide
cccacucauaugcugacau

SEQ ID NO: 1133062 - RNA, 19 nt, Artificial Sequence
  Description of Artificial Sequence: Synthetic oligonucleotide
ccauggucuaaugcacuga

SEQ ID NO: 1133063 - RNA, 19 nt, Artificial Sequence
  Description of Artificial Sequence: Synthetic oligonucleotide
gggagccuuaggcugugau

SEQ ID NO: 1133064 - RNA, 19 nt, Artificial Sequence
  Description of Artificial Sequence: Synthetic oligonucleotide
gcccguuggggugggccag

SEQ ID NO: 1133065 - RNA, 19 nt, Artificial Sequence
  Description of Artificial Sequence: Synthetic oligonucleotide
cgcucacaaucaagauaac

SEQ ID NO: 1133066 - RNA, 19 nt, Artificial Sequence
  Description of Artificial Sequence: Synthetic oligonucleotide
ccacuaaaacucugaucau

SEQ ID NO: 1133067 - RNA, 19 nt, Artificial Sequence
  Description of Artificial Sequence: Synthetic oligonucleotide
gcuggacuggaggcaaggu

SEQ ID NO: 1133068 - RNA, 19 nt, Artificial Sequence
  Description of Artificial Sequence: Synthetic oligonucleotide
cccguuggggugggccagg

SEQ ID NO: 1133069 - RNA, 19 nt, Artificial Sequence
  Description of Artificial Sequence: Synthetic oligonucleotide
gcaagcugauugaggcacu

SEQ ID NO: 1133070 - RNA, 19 nt, Artificial Sequence
  Description of Artificial Sequence: Synthetic oligonucleotide
gcugggugaugcacucuua

SEQ ID NO: 1133071 - RNA, 19 nt, Artificial Sequence
  Description of Artificial Sequence: Synthetic oligonucleotide
gcuugccgccaugugaguu

SEQ ID NO: 1133072 - RNA, 19 nt, Artificial Sequence
  Description of Artificial Sequence: Synthetic oligonucleotide
agggugggucuaggcugua

SEQ ID NO: 1133073 - RNA, 19 nt, Artificial Sequence
  Description of Artificial Sequence: Synthetic oligonucleotide
ccacucauaugcugacauu

SEQ ID NO: 1133074 - RNA, 19 nt, Artificial Sequence
  Description of Artificial Sequence: Synthetic oligonucleotide
ccgccacaauggcauucca

SEQ ID NO: 1133075 - RNA, 19 nt, Artificial Sequence
  Description of Artificial Sequence: Synthetic oligonucleotide
uuauauauggcaaagacca

SEQ ID NO: 1133076 - RNA, 19 nt, Artificial Sequence
  Description of Artificial Sequence: Synthetic oligonucleotide
auugaauauucauugaacc

SEQ ID NO: 1133077 - RNA, 19 nt, Artificial Sequence
  Description of Artificial Sequence: Synthetic oligonucleotide
gauacauucagacuguugg

SEQ ID NO: 1133078 - RNA, 19 nt, Artificial Sequence
  Description of Artificial Sequence: Synthetic oligonucleotide
aaaauggggagaaagauac

SEQ ID NO: 1133079 - RNA, 19 nt, Artificial Sequence
  Description of Artificial Sequence: Synthetic oligonucleotide
agagauagcagucagguag

SEQ ID NO: 1133080 - RNA, 19 nt, Artificial Sequence
  Description of Artificial Sequence: Synthetic oligonucleotide
gauacuauccaucagcagc

SEQ ID NO: 1133081 - RNA, 19 nt, Artificial Sequence
  Description of Artificial Sequence: Synthetic oligonucleotide
aagaaaacguucuugauaa

SEQ ID NO: 1133082 - RNA, 19 nt, Artificial Sequence
  Description of Artificial Sequence: Synthetic oligonucleotide
aaaguggaggacuagcuuc

SEQ ID NO: 1133083 - RNA, 19 nt, Artificial Sequence
  Description of Artificial Sequence: Synthetic oligonucleotide
uuuuacuucaaccuggacu

SEQ ID NO: 1133084 - RNA, 19 nt, Artificial Sequence
  Description of Artificial Sequence: Synthetic oligonucleotide
uggacuuuaagccaggcug

SEQ ID NO: 1133085 - RNA, 19 nt, Artificial Sequence
  Description of Artificial Sequence: Synthetic oligonucleotide
gaugguauaaccuuccuuc

SEQ ID NO: 1133086 - RNA, 19 nt, Artificial Sequence
  Description of Artificial Sequence: Synthetic oligonucleotide
ugaauauucauugaaccag

SEQ ID NO: 1133087 - RNA, 19 nt, Artificial Sequence
  Description of Artificial Sequence: Synthetic oligonucleotide
uguagaagugcuuauauau

SEQ ID NO: 1133088 - RNA, 19 nt, Artificial Sequence
  Description of Artificial Sequence: Synthetic oligonucleotide
cuuauauauggcaaagacc

SEQ ID NO: 1133089 - RNA, 19 nt, Artificial Sequence
  Description of Artificial Sequence: Synthetic oligonucleotide
aaacacaccugcuugagga

SEQ ID NO: 1133090 - RNA, 19 nt, Artificial Sequence
  Description of Artificial Sequence: Synthetic oligonucleotide
aaguaaggagccuggcucc

SEQ ID NO: 1133091 - RNA, 19 nt, Artificial Sequence
  Description of Artificial Sequence: Synthetic oligonucleotide
uacgcuuagagaaggaucc

SEQ ID NO: 1133092 - RNA, 19 nt, Artificial Sequence
  Description of Artificial Sequence: Synthetic oligonucleotide
aagccuauggcagugcugc

SEQ ID NO: 1133093 - RNA, 19 nt, Artificial Sequence
  Description of Artificial Sequence: Synthetic oligonucleotide
uuuacuucaaccuggacuu

SEQ ID NO: 1133094 - RNA, 19 nt, Artificial Sequence
  Description of Artificial Sequence: Synthetic oligonucleotide
gaugacauugagcugcucc

SEQ ID NO: 1133095 - RNA, 19 nt, Artificial Sequence
  Description of Artificial Sequence: Synthetic oligonucleotide
caaagaccaaguaaggagc

SEQ ID NO: 1133096 - RNA, 19 nt, Artificial Sequence
  Description of Artificial Sequence: Synthetic oligonucleotide
ugcaaacuaucuuuugggg

SEQ ID NO: 1133097 - RNA, 19 nt, Artificial Sequence
  Description of Artificial Sequence: Synthetic oligonucleotide
cuagguuuugcccaccugg

SEQ ID NO: 1133098 - RNA, 19 nt, Artificial Sequence
  Description of Artificial Sequence: Synthetic oligonucleotide
aaaacguucuugauaacug

SEQ ID NO: 1133099 - RNA, 19 nt, Artificial Sequence
  Description of Artificial Sequence: Synthetic oligonucleotide
agcugcgucuuguagaugg

SEQ ID NO: 1133100 - RNA, 19 nt, Artificial Sequence
  Description of Artificial Sequence: Synthetic oligonucleotide
cuuuaagccaggcuggacc

SEQ ID NO: 1133101 - RNA, 19 nt, Artificial Sequence
  Description of Artificial Sequence: Synthetic oligonucleotide
uccagcaaaaccccaagca

SEQ ID NO: 1133102 - RNA, 19 nt, Artificial Sequence
  Description of Artificial Sequence: Synthetic oligonucleotide
ugagaaaucgcaucugcac

SEQ ID NO: 1133103 - RNA, 19 nt, Artificial Sequence
  Description of Artificial Sequence: Synthetic oligonucleotide
uuccaaugugaaaugaaga

SEQ ID NO: 1133104 - RNA, 19 nt, Artificial Sequence
  Description of Artificial Sequence: Synthetic oligonucleotide
ucuucaauuaggccucugc

SEQ ID NO: 1133105 - RNA, 19 nt, Artificial Sequence
  Description of Artificial Sequence: Synthetic oligonucleotide
uaucccuguacgcuuagag

SEQ ID NO: 1133106 - RNA, 19 nt, Artificial Sequence
  Description of Artificial Sequence: Synthetic oligonucleotide
uucccuuugaaacaagguc

SEQ ID NO: 1133107 - RNA, 19 nt, Artificial Sequence
  Description of Artificial Sequence: Synthetic oligonucleotide
ucgucucccaaucugcagg

SEQ ID NO: 1133108 - RNA, 19 nt, Artificial Sequence
  Description of Artificial Sequence: Synthetic oligonucleotide
uuaaaauggggagaaagau

SEQ ID NO: 1133109 - RNA, 19 nt, Artificial Sequence
  Description of Artificial Sequence: Synthetic oligonucleotide
aaacguucuugauaacugu

SEQ ID NO: 1133110 - RNA, 19 nt, Artificial Sequence
  Description of Artificial Sequence: Synthetic oligonucleotide
cuacagguaggccaggucc

SEQ ID NO: 1133111 - RNA, 19 nt, Artificial Sequence
  Description of Artificial Sequence: Synthetic oligonucleotide
uguagaugguauaaccuuc

SEQ ID NO: 1133112 - RNA, 19 nt, Artificial Sequence
  Description of Artificial Sequence: Synthetic oligonucleotide
aauggggagaaagauacau

SEQ ID NO: 1133113 - RNA, 19 nt, Artificial Sequence
  Description of Artificial Sequence: Synthetic oligonucleotide
ucaaaggguggccaucucc

SEQ ID NO: 1133114 - RNA, 19 nt, Artificial Sequence
  Description of Artificial Sequence: Synthetic oligonucleotide
aaggguggaaaguggagga

SEQ ID NO: 1133115 - RNA, 19 nt, Artificial Sequence
  Description of Artificial Sequence: Synthetic oligonucleotide
ucaauuaggccucugcauu

SEQ ID NO: 1133116 - RNA, 19 nt, Artificial Sequence
  Description of Artificial Sequence: Synthetic oligonucleotide
uuaaggggugggauguuag

SEQ ID NO: 1133117 - RNA, 19 nt, Artificial Sequence
  Description of Artificial Sequence: Synthetic oligonucleotide
ucccuguacgcuuagagaa

SEQ ID NO: 1133118 - RNA, 19 nt, Artificial Sequence
  Description of Artificial Sequence: Synthetic oligonucleotide
uagguuuugcccaccuggg

SEQ ID NO: 1133119 - RNA, 19 nt, Artificial Sequence
  Description of Artificial Sequence: Synthetic oligonucleotide
cauucccuuugaaacaagg

SEQ ID NO: 1133120 - RNA, 19 nt, Artificial Sequence
  Description of Artificial Sequence: Synthetic oligonucleotide
ugaaccagugcaaacuauc

SEQ ID NO: 1133121 - RNA, 19 nt, Artificial Sequence
  Description of Artificial Sequence: Synthetic oligonucleotide
gaagugcuuauauauggca

SEQ ID NO: 1133122 - RNA, 19 nt, Artificial Sequence
  Description of Artificial Sequence: Synthetic oligonucleotide
ucagccuuaucccuguuuc

SEQ ID NO: 1133123 - RNA, 19 nt, Artificial Sequence
  Description of Artificial Sequence: Synthetic oligonucleotide
uggguaauggggcugcuga

SEQ ID NO: 1133124 - RNA, 19 nt, Artificial Sequence
  Description of Artificial Sequence: Synthetic oligonucleotide
caaaaccccaagcaggggc

SEQ ID NO: 1133125 - RNA, 19 nt, Artificial Sequence
  Description of Artificial Sequence: Synthetic oligonucleotide
ugcauuaggcagcucaggu

SEQ ID NO: 1133126 - RNA, 19 nt, Artificial Sequence
  Description of Artificial Sequence: Synthetic oligonucleotide
uggaggacuagcuucgucu

SEQ ID NO: 1133127 - RNA, 19 nt, Artificial Sequence
  Description of Artificial Sequence: Synthetic oligonucleotide
agcccugucaccccagagc

SEQ ID NO: 1133128 - RNA, 19 nt, Artificial Sequence
  Description of Artificial Sequence: Synthetic oligonucleotide
ucucaugguccucaccuag

SEQ ID NO: 1133129 - RNA, 19 nt, Artificial Sequence
  Description of Artificial Sequence: Synthetic oligonucleotide
caagucaaagccuauggca

SEQ ID NO: 1133130 - RNA, 19 nt, Artificial Sequence
  Description of Artificial Sequence: Synthetic oligonucleotide
aaugaccugagaaaucgca

SEQ ID NO: 1133131 - RNA, 19 nt, Artificial Sequence
  Description of Artificial Sequence: Synthetic oligonucleotide
aaaugaccugagaaaucgc

SEQ ID NO: 1133132 - RNA, 19 nt, Artificial Sequence
  Description of Artificial Sequence: Synthetic oligonucleotide
ggcauuugccccuagcugg

SEQ ID NO: 1133133 - RNA, 19 nt, Artificial Sequence
  Description of Artificial Sequence: Synthetic oligonucleotide
aacuuaaggggugggaugu

SEQ ID NO: 1133134 - RNA, 19 nt, Artificial Sequence
  Description of Artificial Sequence: Synthetic oligonucleotide
uggacagauacuauccauc

SEQ ID NO: 1133135 - RNA, 19 nt, Artificial Sequence
  Description of Artificial Sequence: Synthetic oligonucleotide
gguccaaucacaguaaagc

SEQ ID NO: 1133136 - RNA, 19 nt, Artificial Sequence
  Description of Artificial Sequence: Synthetic oligonucleotide
uugauaacuguggggaugc

SEQ ID NO: 1133137 - RNA, 19 nt, Artificial Sequence
  Description of Artificial Sequence: Synthetic oligonucleotide
uugaugccuacacacuuca

SEQ ID NO: 1133138 - RNA, 19 nt, Artificial Sequence
  Description of Artificial Sequence: Synthetic oligonucleotide
ucugccuagaacagcuccc

SEQ ID NO: 1133139 - RNA, 19 nt, Artificial Sequence
  Description of Artificial Sequence: Synthetic oligonucleotide
acgucauccucucacaacu

SEQ ID NO: 1133140 - RNA, 19 nt, Artificial Sequence
  Description of Artificial Sequence: Synthetic oligonucleotide
gaacuuaaggggugggaug

SEQ ID NO: 1133141 - RNA, 19 nt, Artificial Sequence
  Description of Artificial Sequence: Synthetic oligonucleotide
uucaauuaggccucugcau

SEQ ID NO: 1133142 - RNA, 19 nt, Artificial Sequence
  Description of Artificial Sequence: Synthetic oligonucleotide
gaaggacggagcaagacac

SEQ ID NO: 1133143 - RNA, 19 nt, Artificial Sequence
  Description of Artificial Sequence: Synthetic oligonucleotide
guccaaucacaguaaagcc

SEQ ID NO: 1133144 - RNA, 19 nt, Artificial Sequence
  Description of Artificial Sequence: Synthetic oligonucleotide
caugcuaggagcugugaac

SEQ ID NO: 1133145 - RNA, 19 nt, Artificial Sequence
  Description of Artificial Sequence: Synthetic oligonucleotide
aaguggaggacuagcuucg

SEQ ID NO: 1133146 - RNA, 19 nt, Artificial Sequence
  Description of Artificial Sequence: Synthetic oligonucleotide
cuggcuuacgcccauuccc

SEQ ID NO: 1133147 - RNA, 19 nt, Artificial Sequence
  Description of Artificial Sequence: Synthetic oligonucleotide
aagacgugaugguuuaaaa

SEQ ID NO: 1133148 - RNA, 19 nt, Artificial Sequence
  Description of Artificial Sequence: Synthetic oligonucleotide
agaagcaacgcaggcaggg

SEQ ID NO: 1133149 - RNA, 19 nt, Artificial Sequence
  Description of Artificial Sequence: Synthetic oligonucleotide
ucugucugcaucacugggu

SEQ ID NO: 1133150 - RNA, 19 nt, Artificial Sequence
  Description of Artificial Sequence: Synthetic oligonucleotide
agugcuuauauauggcaaa

SEQ ID NO: 1133151 - RNA, 19 nt, Artificial Sequence
  Description of Artificial Sequence: Synthetic oligonucleotide
aggacuagcuucgucuccc

SEQ ID NO: 1133152 - RNA, 19 nt, Artificial Sequence
  Description of Artificial Sequence: Synthetic oligonucleotide
aggacggagcaagacaccc

SEQ ID NO: 1133153 - RNA, 19 nt, Artificial Sequence
  Description of Artificial Sequence: Synthetic oligonucleotide
uuauuccaaugugaaauga

SEQ ID NO: 1133154 - RNA, 19 nt, Artificial Sequence
  Description of Artificial Sequence: Synthetic oligonucleotide
uccucucacaacugacugg

SEQ ID NO: 1133155 - RNA, 19 nt, Artificial Sequence
  Description of Artificial Sequence: Synthetic oligonucleotide
ggcaagucaaagccuaugg

SEQ ID NO: 1133156 - RNA, 19 nt, Artificial Sequence
  Description of Artificial Sequence: Synthetic oligonucleotide
gaauccaugaucagcccug

SEQ ID NO: 1133157 - RNA, 19 nt, Artificial Sequence
  Description of Artificial Sequence: Synthetic oligonucleotide
guuaaaauggggagaaaga

SEQ ID NO: 1133158 - RNA, 19 nt, Artificial Sequence
  Description of Artificial Sequence: Synthetic oligonucleotide
agccucuuuguagaagugc

SEQ ID NO: 1133159 - RNA, 19 nt, Artificial Sequence
  Description of Artificial Sequence: Synthetic oligonucleotide
aacguucuugauaacugug

SEQ ID NO: 1133160 - RNA, 19 nt, Artificial Sequence
  Description of Artificial Sequence: Synthetic oligonucleotide
gacagauacuauccaucag

SEQ ID NO: 1133161 - RNA, 19 nt, Artificial Sequence
  Description of Artificial Sequence: Synthetic oligonucleotide
ucacaacugacugggcugg

SEQ ID NO: 1133162 - RNA, 19 nt, Artificial Sequence
  Description of Artificial Sequence: Synthetic oligonucleotide
cucacaacugacugggcug

SEQ ID NO: 1133163 - RNA, 19 nt, Artificial Sequence
  Description of Artificial Sequence: Synthetic oligonucleotide
aacgcaggcagggagagau

SEQ ID NO: 1133164 - RNA, 19 nt, Artificial Sequence
  Description of Artificial Sequence: Synthetic oligonucleotide
agauacuauccaucagcag

SEQ ID NO: 1133165 - RNA, 19 nt, Artificial Sequence
  Description of Artificial Sequence: Synthetic oligonucleotide
ggguauaggagcaggaagg

SEQ ID NO: 1133166 - RNA, 19 nt, Artificial Sequence
  Description of Artificial Sequence: Synthetic oligonucleotide
ugaccugagaaaucgcauc

SEQ ID NO: 1133167 - RNA, 19 nt, Artificial Sequence
  Description of Artificial Sequence: Synthetic oligonucleotide
caugaucagcccugggucc

SEQ ID NO: 1133168 - RNA, 19 nt, Artificial Sequence
  Description of Artificial Sequence: Synthetic oligonucleotide
ugaacuuaaggggugggau

SEQ ID NO: 1133169 - RNA, 19 nt, Artificial Sequence
  Description of Artificial Sequence: Synthetic oligonucleotide
ugcgcugcaaggcuacagc

SEQ ID NO: 1133170 - RNA, 19 nt, Artificial Sequence
  Description of Artificial Sequence: Synthetic oligonucleotide
agaaaacguucuugauaac

SEQ ID NO: 1133171 - RNA, 19 nt, Artificial Sequence
  Description of Artificial Sequence: Synthetic oligonucleotide
ugugcauggcacuuucccu

SEQ ID NO: 1133172 - RNA, 19 nt, Artificial Sequence
  Description of Artificial Sequence: Synthetic oligonucleotide
ucaugguccucaccuagcu

SEQ ID NO: 1133173 - RNA, 19 nt, Artificial Sequence
  Description of Artificial Sequence: Synthetic oligonucleotide
gggauguuagcacuggagc

SEQ ID NO: 1133174 - RNA, 19 nt, Artificial Sequence
  Description of Artificial Sequence: Synthetic oligonucleotide
caggucuuaccuugcaccc

SEQ ID NO: 1133175 - RNA, 19 nt, Artificial Sequence
  Description of Artificial Sequence: Synthetic oligonucleotide
uuuaucccuguacgcuuag

SEQ ID NO: 1133176 - RNA, 19 nt, Artificial Sequence
  Description of Artificial Sequence: Synthetic oligonucleotide
gcagcucagguuaaaaugg

SEQ ID NO: 1133177 - RNA, 19 nt, Artificial Sequence
  Description of Artificial Sequence: Synthetic oligonucleotide
aggcacauagauguauggg

SEQ ID NO: 1133178 - RNA, 19 nt, Artificial Sequence
  Description of Artificial Sequence: Synthetic oligonucleotide
caauuaggccucugcauug

SEQ ID NO: 1133179 - RNA, 19 nt, Artificial Sequence
  Description of Artificial Sequence: Synthetic oligonucleotide
ugcgucuuguagaugguau

SEQ ID NO: 1133180 - RNA, 19 nt, Artificial Sequence
  Description of Artificial Sequence: Synthetic oligonucleotide
gacggagcaagacacccac

SEQ ID NO: 1133181 - RNA, 19 nt, Artificial Sequence
  Description of Artificial Sequence: Synthetic oligonucleotide
aagugcuuauauauggcaa

SEQ ID NO: 1133182 - RNA, 19 nt, Artificial Sequence
  Description of Artificial Sequence: Synthetic oligonucleotide
ugcgguagaucucauucau

SEQ ID NO: 1133183 - RNA, 19 nt, Artificial Sequence
  Description of Artificial Sequence: Synthetic oligonucleotide
gguauaaccuuccuucuca

SEQ ID NO: 1133184 - RNA, 19 nt, Artificial Sequence
  Description of Artificial Sequence: Synthetic oligonucleotide
uuagagaaggauccuccuu

SEQ ID NO: 1133185 - RNA, 19 nt, Artificial Sequence
  Description of Artificial Sequence: Synthetic oligonucleotide
auacuauccaucagcagcu

SEQ ID NO: 1133186 - RNA, 19 nt, Artificial Sequence
  Description of Artificial Sequence: Synthetic oligonucleotide
uuuuaucccuguacgcuua

SEQ ID NO: 1133187 - RNA, 19 nt, Artificial Sequence
  Description of Artificial Sequence: Synthetic oligonucleotide
augguauaaccuuccuucu

SEQ ID NO: 1133188 - RNA, 19 nt, Artificial Sequence
  Description of Artificial Sequence: Synthetic oligonucleotide
gugcauggcacuuucccug

SEQ ID NO: 1133189 - RNA, 19 nt, Artificial Sequence
  Description of Artificial Sequence: Synthetic oligonucleotide
caagaaaacguucuugaua

SEQ ID NO: 1133190 - RNA, 19 nt, Artificial Sequence
  Description of Artificial Sequence: Synthetic oligonucleotide
ccaaugugaaaugaagacg

SEQ ID NO: 1133191 - RNA, 19 nt, Artificial Sequence
  Description of Artificial Sequence: Synthetic oligonucleotide
cagauacuauccaucagca

SEQ ID NO: 1133192 - RNA, 19 nt, Artificial Sequence
  Description of Artificial Sequence: Synthetic oligonucleotide
agcuucgucucccaaucug

SEQ ID NO: 1133193 - RNA, 19 nt, Artificial Sequence
  Description of Artificial Sequence: Synthetic oligonucleotide
cagcucagguuaaaauggg

SEQ ID NO: 1133194 - RNA, 19 nt, Artificial Sequence
  Description of Artificial Sequence: Synthetic oligonucleotide
caaacacaccugcuugagg

SEQ ID NO: 1133195 - RNA, 19 nt, Artificial Sequence
  Description of Artificial Sequence: Synthetic oligonucleotide
cacugcaggucuuaccuug

SEQ ID NO: 1133196 - RNA, 19 nt, Artificial Sequence
  Description of Artificial Sequence: Synthetic oligonucleotide
augaucagcccuggguccc

SEQ ID NO: 1133197 - RNA, 19 nt, Artificial Sequence
  Description of Artificial Sequence: Synthetic oligonucleotide
uggcuuacgcccauucccu

SEQ ID NO: 1133198 - RNA, 19 nt, Artificial Sequence
  Description of Artificial Sequence: Synthetic oligonucleotide
agguuuugcccaccugggg

SEQ ID NO: 1133199 - RNA, 19 nt, Artificial Sequence
  Description of Artificial Sequence: Synthetic oligonucleotide
cauuaggcagcucagguua

SEQ ID NO: 1133200 - RNA, 19 nt, Artificial Sequence
  Description of Artificial Sequence: Synthetic oligonucleotide
guacucagagcucucccug

SEQ ID NO: 1133201 - RNA, 19 nt, Artificial Sequence
  Description of Artificial Sequence: Synthetic oligonucleotide
aauuaggccucugcauuga

SEQ ID NO: 1133202 - RNA, 19 nt, Artificial Sequence
  Description of Artificial Sequence: Synthetic oligonucleotide
cugugcauuaggcagcuca

SEQ ID NO: 1133203 - RNA, 19 nt, Artificial Sequence
  Description of Artificial Sequence: Synthetic oligonucleotide
cuugaggacgggaggcggg

SEQ ID NO: 1133204 - RNA, 19 nt, Artificial Sequence
  Description of Artificial Sequence: Synthetic oligonucleotide
agucagguaguaggagccc

SEQ ID NO: 1133205 - RNA, 19 nt, Artificial Sequence
  Description of Artificial Sequence: Synthetic oligonucleotide
ugguccucaccuagcugcg

SEQ ID NO: 1133206 - RNA, 19 nt, Artificial Sequence
  Description of Artificial Sequence: Synthetic oligonucleotide
aucccuguacgcuuagaga

SEQ ID NO: 1133207 - RNA, 19 nt, Artificial Sequence
  Description of Artificial Sequence: Synthetic oligonucleotide
gggguauaggagcaggaag

SEQ ID NO: 1133208 - RNA, 19 nt, Artificial Sequence
  Description of Artificial Sequence: Synthetic oligonucleotide
agucaaagccuauggcagu

SEQ ID NO: 1133209 - RNA, 19 nt, Artificial Sequence
  Description of Artificial Sequence: Synthetic oligonucleotide
acaacugacugggcugggc

SEQ ID NO: 1133210 - RNA, 19 nt, Artificial Sequence
  Description of Artificial Sequence: Synthetic oligonucleotide
uguacgcuuagagaaggau

SEQ ID NO: 1133211 - RNA, 19 nt, Artificial Sequence
  Description of Artificial Sequence: Synthetic oligonucleotide
uugaaccagugcaaacuau

SEQ ID NO: 1133212 - RNA, 19 nt, Artificial Sequence
  Description of Artificial Sequence: Synthetic oligonucleotide
cuuacgcccauucccuuug

SEQ ID NO: 1133213 - RNA, 19 nt, Artificial Sequence
  Description of Artificial Sequence: Synthetic oligonucleotide
augcuaggagcugugaacu

SEQ ID NO: 1133214 - RNA, 19 nt, Artificial Sequence
  Description of Artificial Sequence: Synthetic oligonucleotide
ugacauugagcugcuccag

SEQ ID NO: 1133215 - RNA, 19 nt, Artificial Sequence
  Description of Artificial Sequence: Synthetic oligonucleotide
uggaauccaugaucagccc

SEQ ID NO: 1133216 - RNA, 19 nt, Artificial Sequence
  Description of Artificial Sequence: Synthetic oligonucleotide
cucaugguccucaccuagc

SEQ ID NO: 1133217 - RNA, 19 nt, Artificial Sequence
  Description of Artificial Sequence: Synthetic oligonucleotide
aucgcaucugcacgucauc

SEQ ID NO: 1133218 - RNA, 19 nt, Artificial Sequence
  Description of Artificial Sequence: Synthetic oligonucleotide
gcagcuguaaugucaaaca

SEQ ID NO: 1133219 - RNA, 19 nt, Artificial Sequence
  Description of Artificial Sequence: Synthetic oligonucleotide
cugcacgucauccucucac

SEQ ID NO: 1133220 - RNA, 19 nt, Artificial Sequence
  Description of Artificial Sequence: Synthetic oligonucleotide
acuuuaagccaggcuggac

SEQ ID NO: 1133221 - RNA, 19 nt, Artificial Sequence
  Description of Artificial Sequence: Synthetic oligonucleotide
accggaaauucagcuuugc

SEQ ID NO: 1133222 - RNA, 19 nt, Artificial Sequence
  Description of Artificial Sequence: Synthetic oligonucleotide
aaagccuauggcagugcug

SEQ ID NO: 1133223 - RNA, 19 nt, Artificial Sequence
  Description of Artificial Sequence: Synthetic oligonucleotide
agcugugaacuuaaggggu

SEQ ID NO: 1133224 - RNA, 19 nt, Artificial Sequence
  Description of Artificial Sequence: Synthetic oligonucleotide
ugcacgucauccucucaca

SEQ ID NO: 1133225 - RNA, 19 nt, Artificial Sequence
  Description of Artificial Sequence: Synthetic oligonucleotide
accuagcugcgucuuguag

SEQ ID NO: 1133226 - RNA, 19 nt, Artificial Sequence
  Description of Artificial Sequence: Synthetic oligonucleotide
aaggauccuccuuggcagu

SEQ ID NO: 1133227 - RNA, 19 nt, Artificial Sequence
  Description of Artificial Sequence: Synthetic oligonucleotide
ggacagauacuauccauca

SEQ ID NO: 1133228 - RNA, 19 nt, Artificial Sequence
  Description of Artificial Sequence: Synthetic oligonucleotide
cacccuaccagggauccgg

SEQ ID NO: 1133229 - RNA, 19 nt, Artificial Sequence
  Description of Artificial Sequence: Synthetic oligonucleotide
ucgcaucugcacgucaucc

SEQ ID NO: 1133230 - RNA, 19 nt, Artificial Sequence
  Description of Artificial Sequence: Synthetic oligonucleotide
ggacuuuaagccaggcugg

SEQ ID NO: 1133231 - RNA, 19 nt, Artificial Sequence
  Description of Artificial Sequence: Synthetic oligonucleotide
gcagucagguaguaggagc

SEQ ID NO: 1133232 - RNA, 19 nt, Artificial Sequence
  Description of Artificial Sequence: Synthetic oligonucleotide
gaggacuagcuucgucucc

SEQ ID NO: 1133233 - RNA, 19 nt, Artificial Sequence
  Description of Artificial Sequence: Synthetic oligonucleotide
gaaccggaaauucagcuuu

SEQ ID NO: 1133234 - RNA, 19 nt, Artificial Sequence
  Description of Artificial Sequence: Synthetic oligonucleotide
auaacuguggggaugccuu

SEQ ID NO: 1133235 - RNA, 19 nt, Artificial Sequence
  Description of Artificial Sequence: Synthetic oligonucleotide
augaagacgugaugguuua

SEQ ID NO: 1133236 - RNA, 19 nt, Artificial Sequence
  Description of Artificial Sequence: Synthetic oligonucleotide
guacgcuuagagaaggauc

SEQ ID NO: 1133237 - RNA, 19 nt, Artificial Sequence
  Description of Artificial Sequence: Synthetic oligonucleotide
cugagaaaucgcaucugca

SEQ ID NO: 1133238 - RNA, 19 nt, Artificial Sequence
  Description of Artificial Sequence: Synthetic oligonucleotide
acugcaggucuuaccuugc

SEQ ID NO: 1133239 - RNA, 19 nt, Artificial Sequence
  Description of Artificial Sequence: Synthetic oligonucleotide
caaccuggacuuuaagcca

SEQ ID NO: 1133240 - RNA, 19 nt, Artificial Sequence
  Description of Artificial Sequence: Synthetic oligonucleotide
gaagacgugaugguuuaaa

SEQ ID NO: 1133241 - RNA, 19 nt, Artificial Sequence
  Description of Artificial Sequence: Synthetic oligonucleotide
ucugcaucacuggguaaug

SEQ ID NO: 1133242 - RNA, 19 nt, Artificial Sequence
  Description of Artificial Sequence: Synthetic oligonucleotide
agauacauucagacuguug

SEQ ID NO: 1133243 - RNA, 19 nt, Artificial Sequence
  Description of Artificial Sequence: Synthetic oligonucleotide
gaauauucauugaaccagu

SEQ ID NO: 1133244 - RNA, 19 nt, Artificial Sequence
  Description of Artificial Sequence: Synthetic oligonucleotide
accaucacuccugugcaug

SEQ ID NO: 1133245 - RNA, 19 nt, Artificial Sequence
  Description of Artificial Sequence: Synthetic oligonucleotide
gaccugagaaaucgcaucu

SEQ ID NO: 1133246 - RNA, 19 nt, Artificial Sequence
  Description of Artificial Sequence: Synthetic oligonucleotide
aggccgcauccccucaccc

SEQ ID NO: 1133247 - RNA, 19 nt, Artificial Sequence
  Description of Artificial Sequence: Synthetic oligonucleotide
ugcacccuaccagggaucc

SEQ ID NO: 1133248 - RNA, 19 nt, Artificial Sequence
  Description of Artificial Sequence: Synthetic oligonucleotide
gcuuagagaaggauccucc

SEQ ID NO: 1133249 - RNA, 19 nt, Artificial Sequence
  Description of Artificial Sequence: Synthetic oligonucleotide
uccugugcauggcacuuuc

SEQ ID NO: 1133250 - RNA, 19 nt, Artificial Sequence
  Description of Artificial Sequence: Synthetic oligonucleotide
ggaaggacggagcaagaca

SEQ ID NO: 1133251 - RNA, 19 nt, Artificial Sequence
  Description of Artificial Sequence: Synthetic oligonucleotide
uggaaggacggagcaagac

SEQ ID NO: 1133252 - RNA, 19 nt, Artificial Sequence
  Description of Artificial Sequence: Synthetic oligonucleotide
aacugacugggcugggcua

SEQ ID NO: 1133253 - RNA, 19 nt, Artificial Sequence
  Description of Artificial Sequence: Synthetic oligonucleotide
aaaccccaagcaggggcuc

SEQ ID NO: 1133254 - RNA, 19 nt, Artificial Sequence
  Description of Artificial Sequence: Synthetic oligonucleotide
agcagucagguaguaggag

SEQ ID NO: 1133255 - RNA, 19 nt, Artificial Sequence
  Description of Artificial Sequence: Synthetic oligonucleotide
gucauccucucacaacuga

SEQ ID NO: 1133256 - RNA, 19 nt, Artificial Sequence
  Description of Artificial Sequence: Synthetic oligonucleotide
agccuauggcagugcugcc

SEQ ID NO: 1133257 - RNA, 19 nt, Artificial Sequence
  Description of Artificial Sequence: Synthetic oligonucleotide
ggcugaaccggaaauucag

SEQ ID NO: 1133258 - RNA, 19 nt, Artificial Sequence
  Description of Artificial Sequence: Synthetic oligonucleotide
gguauaggagcaggaaggc

SEQ ID NO: 1133259 - RNA, 19 nt, Artificial Sequence
  Description of Artificial Sequence: Synthetic oligonucleotide
uauguacaucuggaaggac

SEQ ID NO: 1133260 - RNA, 19 nt, Artificial Sequence
  Description of Artificial Sequence: Synthetic oligonucleotide
aggaucagucagccuuauc

SEQ ID NO: 1133261 - RNA, 19 nt, Artificial Sequence
  Description of Artificial Sequence: Synthetic oligonucleotide
cucaggaucagucagccuu

SEQ ID NO: 1133262 - RNA, 19 nt, Artificial Sequence
  Description of Artificial Sequence: Synthetic oligonucleotide
agguccaaucacaguaaag

SEQ ID NO: 1133263 - RNA, 19 nt, Artificial Sequence
  Description of Artificial Sequence: Synthetic oligonucleotide
cugccuagaacagcucccc

SEQ ID NO: 1133264 - RNA, 19 nt, Artificial Sequence
  Description of Artificial Sequence: Synthetic oligonucleotide
cugcaucacuggguaaugg

SEQ ID NO: 1133265 - RNA, 19 nt, Artificial Sequence
  Description of Artificial Sequence: Synthetic oligonucleotide
cugaaccggaaauucagcu

SEQ ID NO: 1133266 - RNA, 19 nt, Artificial Sequence
  Description of Artificial Sequence: Synthetic oligonucleotide
guaggccagguccaaucac

SEQ ID NO: 1133267 - RNA, 19 nt, Artificial Sequence
  Description of Artificial Sequence: Synthetic oligonucleotide
gcccugucaccccagagcc

SEQ ID NO: 1133268 - RNA, 19 nt, Artificial Sequence
  Description of Artificial Sequence: Synthetic oligonucleotide
uccucaccuagcugcgucu

SEQ ID NO: 1133269 - RNA, 19 nt, Artificial Sequence
  Description of Artificial Sequence: Synthetic oligonucleotide
acgcccauucccuuugaaa

SEQ ID NO: 1133270 - RNA, 19 nt, Artificial Sequence
  Description of Artificial Sequence: Synthetic oligonucleotide
ucugcacgucauccucuca

SEQ ID NO: 1133271 - RNA, 19 nt, Artificial Sequence
  Description of Artificial Sequence: Synthetic oligonucleotide
aagauacauucagacuguu

SEQ ID NO: 1133272 - RNA, 19 nt, Artificial Sequence
  Description of Artificial Sequence: Synthetic oligonucleotide
gaaaguggaggacuagcuu

SEQ ID NO: 1133273 - RNA, 19 nt, Artificial Sequence
  Description of Artificial Sequence: Synthetic oligonucleotide
uaauggggcugcugacugu

SEQ ID NO: 1133274 - RNA, 19 nt, Artificial Sequence
  Description of Artificial Sequence: Synthetic oligonucleotide
gggcauuugccccuagcug

SEQ ID NO: 1133275 - RNA, 19 nt, Artificial Sequence
  Description of Artificial Sequence: Synthetic oligonucleotide
ccaugaucagcccuggguc

SEQ ID NO: 1133276 - RNA, 19 nt, Artificial Sequence
  Description of Artificial Sequence: Synthetic oligonucleotide
uggugcgcugcaaggcuac

SEQ ID NO: 1133277 - RNA, 19 nt, Artificial Sequence
  Description of Artificial Sequence: Synthetic oligonucleotide
gaaaucgcaucugcacguc

SEQ ID NO: 1133278 - RNA, 19 nt, Artificial Sequence
  Description of Artificial Sequence: Synthetic oligonucleotide
ccuguacgcuuagagaagg

SEQ ID NO: 1133279 - RNA, 19 nt, Artificial Sequence
  Description of Artificial Sequence: Synthetic oligonucleotide
guaaagccacugcaggucu

SEQ ID NO: 1133280 - RNA, 19 nt, Artificial Sequence
  Description of Artificial Sequence: Synthetic oligonucleotide
uagcuucgucucccaaucu

SEQ ID NO: 1133281 - RNA, 19 nt, Artificial Sequence
  Description of Artificial Sequence: Synthetic oligonucleotide
cuucgucucccaaucugca

SEQ ID NO: 1133282 - RNA, 19 nt, Artificial Sequence
  Description of Artificial Sequence: Synthetic oligonucleotide
guaggagcccugucacccc

SEQ ID NO: 1133283 - RNA, 19 nt, Artificial Sequence
  Description of Artificial Sequence: Synthetic oligonucleotide
augaccugagaaaucgcau

SEQ ID NO: 1133284 - RNA, 19 nt, Artificial Sequence
  Description of Artificial Sequence: Synthetic oligonucleotide
uugcacccuaccagggauc

SEQ ID NO: 1133285 - RNA, 19 nt, Artificial Sequence
  Description of Artificial Sequence: Synthetic oligonucleotide
guuuugcccaccuggggua

SEQ ID NO: 1133286 - RNA, 19 nt, Artificial Sequence
  Description of Artificial Sequence: Synthetic oligonucleotide
uugcccaccugggguauag

SEQ ID NO: 1133287 - RNA, 19 nt, Artificial Sequence
  Description of Artificial Sequence: Synthetic oligonucleotide
cacuggguaauggggcugc

SEQ ID NO: 1133288 - RNA, 19 nt, Artificial Sequence
  Description of Artificial Sequence: Synthetic oligonucleotide
ggcaaagaccaaguaagga

SEQ ID NO: 1133289 - RNA, 19 nt, Artificial Sequence
  Description of Artificial Sequence: Synthetic oligonucleotide
guauaggagcaggaaggca

SEQ ID NO: 1133290 - RNA, 19 nt, Artificial Sequence
  Description of Artificial Sequence: Synthetic oligonucleotide
auuaggccucugcauugaa

SEQ ID NO: 1133291 - RNA, 19 nt, Artificial Sequence
  Description of Artificial Sequence: Synthetic oligonucleotide
uuacgcccauucccuuuga

SEQ ID NO: 1133292 - RNA, 19 nt, Artificial Sequence
  Description of Artificial Sequence: Synthetic oligonucleotide
guggggcaaggguggaaag

SEQ ID NO: 1133293 - RNA, 19 nt, Artificial Sequence
  Description of Artificial Sequence: Synthetic oligonucleotide
gacuuuaagccaggcugga

SEQ ID NO: 1133294 - RNA, 19 nt, Artificial Sequence
  Description of Artificial Sequence: Synthetic oligonucleotide
cucucacaacugacugggc

SEQ ID NO: 1133295 - RNA, 19 nt, Artificial Sequence
  Description of Artificial Sequence: Synthetic oligonucleotide
ugccccuagcuggaguuga

SEQ ID NO: 1133296 - RNA, 19 nt, Artificial Sequence
  Description of Artificial Sequence: Synthetic oligonucleotide
gcuucgucucccaaucugc

SEQ ID NO: 1133297 - RNA, 19 nt, Artificial Sequence
  Description of Artificial Sequence: Synthetic oligonucleotide
uacgcccauucccuuugaa

SEQ ID NO: 1133298 - RNA, 19 nt, Artificial Sequence
  Description of Artificial Sequence: Synthetic oligonucleotide
ccacugugcauuaggcagc

SEQ ID NO: 1133299 - RNA, 19 nt, Artificial Sequence
  Description of Artificial Sequence: Synthetic oligonucleotide
aguaaggagccuggcucca

SEQ ID NO: 1133300 - RNA, 19 nt, Artificial Sequence
  Description of Artificial Sequence: Synthetic oligonucleotide
guccucaccuagcugcguc

SEQ ID NO: 1133301 - RNA, 19 nt, Artificial Sequence
  Description of Artificial Sequence: Synthetic oligonucleotide
gguuuugcccaccuggggu

SEQ ID NO: 1133302 - RNA, 19 nt, Artificial Sequence
  Description of Artificial Sequence: Synthetic oligonucleotide
caucacuccugugcauggc

SEQ ID NO: 1133303 - RNA, 19 nt, Artificial Sequence
  Description of Artificial Sequence: Synthetic oligonucleotide
ccuagcugcgucuuguaga

SEQ ID NO: 1133304 - RNA, 19 nt, Artificial Sequence
  Description of Artificial Sequence: Synthetic oligonucleotide
aaggcaagucaaagccuau

SEQ ID NO: 1133305 - RNA, 19 nt, Artificial Sequence
  Description of Artificial Sequence: Synthetic oligonucleotide
cggagcaagacacccacag

SEQ ID NO: 1133306 - RNA, 19 nt, Artificial Sequence
  Description of Artificial Sequence: Synthetic oligonucleotide
cuagcugcgucuuguagau

SEQ ID NO: 1133307 - RNA, 19 nt, Artificial Sequence
  Description of Artificial Sequence: Synthetic oligonucleotide
gagauagcagucagguagu

SEQ ID NO: 1133308 - RNA, 19 nt, Artificial Sequence
  Description of Artificial Sequence: Synthetic oligonucleotide
ggguccaccacugcaggcc

SEQ ID NO: 1133309 - RNA, 19 nt, Artificial Sequence
  Description of Artificial Sequence: Synthetic oligonucleotide
ugcuaggagcugugaacuu

SEQ ID NO: 1133310 - RNA, 19 nt, Artificial Sequence
  Description of Artificial Sequence: Synthetic oligonucleotide
gcugaaccggaaauucagc

SEQ ID NO: 1133311 - RNA, 19 nt, Artificial Sequence
  Description of Artificial Sequence: Synthetic oligonucleotide
cuggugucgccgugccacc

SEQ ID NO: 1133312 - RNA, 19 nt, Artificial Sequence
  Description of Artificial Sequence: Synthetic oligonucleotide
acccuaccagggauccggc

SEQ ID NO: 1133313 - RNA, 19 nt, Artificial Sequence
  Description of Artificial Sequence: Synthetic oligonucleotide
guggaggacuagcuucguc

SEQ ID NO: 1133314 - RNA, 19 nt, Artificial Sequence
  Description of Artificial Sequence: Synthetic oligonucleotide
aggucuuaccuugcacccu

SEQ ID NO: 1133315 - RNA, 19 nt, Artificial Sequence
  Description of Artificial Sequence: Synthetic oligonucleotide
gccgcauccccucacccug

SEQ ID NO: 1133316 - RNA, 19 nt, Artificial Sequence
  Description of Artificial Sequence: Synthetic oligonucleotide
caggccgcauccccucacc

SEQ ID NO: 1133317 - RNA, 19 nt, Artificial Sequence
  Description of Artificial Sequence: Synthetic oligonucleotide
gugcgcugcaaggcuacag

SEQ ID NO: 1133318 - RNA, 19 nt, Artificial Sequence
  Description of Artificial Sequence: Synthetic oligonucleotide
uugccccuagcuggaguug

SEQ ID NO: 1133319 - RNA, 19 nt, Artificial Sequence
  Description of Artificial Sequence: Synthetic oligonucleotide
cuguacgcuuagagaagga

SEQ ID NO: 1133320 - RNA, 19 nt, Artificial Sequence
  Description of Artificial Sequence: Synthetic oligonucleotide
cuugcacccuaccagggau

SEQ ID NO: 1133321 - RNA, 19 nt, Artificial Sequence
  Description of Artificial Sequence: Synthetic oligonucleotide
acuccugugcauggcacuu

SEQ ID NO: 1133322 - RNA, 19 nt, Artificial Sequence
  Description of Artificial Sequence: Synthetic oligonucleotide
gcaacgcaggcagggagag

SEQ ID NO: 1133323 - RNA, 19 nt, Artificial Sequence
  Description of Artificial Sequence: Synthetic oligonucleotide
ugucgccgugccaccucug

SEQ ID NO: 1133324 - RNA, 19 nt, Artificial Sequence
  Description of Artificial Sequence: Synthetic oligonucleotide
auuaggcagcucagguuaa

SEQ ID NO: 1133325 - RNA, 19 nt, Artificial Sequence
  Description of Artificial Sequence: Synthetic oligonucleotide
cuuaaggggugggauguua

SEQ ID NO: 1133326 - RNA, 19 nt, Artificial Sequence
  Description of Artificial Sequence: Synthetic oligonucleotide
gcaaaaccccaagcagggg

SEQ ID NO: 1133327 - RNA, 19 nt, Artificial Sequence
  Description of Artificial Sequence: Synthetic oligonucleotide
caacugacugggcugggcu

SEQ ID NO: 1133328 - RNA, 19 nt, Artificial Sequence
  Description of Artificial Sequence: Synthetic oligonucleotide
ugcccaccugggguauagg

SEQ ID NO: 1133329 - RNA, 19 nt, Artificial Sequence
  Description of Artificial Sequence: Synthetic oligonucleotide
acgcuuagagaaggauccu

SEQ ID NO: 1133330 - RNA, 19 nt, Artificial Sequence
  Description of Artificial Sequence: Synthetic oligonucleotide
cagguccaaucacaguaaa

SEQ ID NO: 1133331 - RNA, 19 nt, Artificial Sequence
  Description of Artificial Sequence: Synthetic oligonucleotide
ugaucagcccugggucccu

SEQ ID NO: 1133332 - RNA, 19 nt, Artificial Sequence
  Description of Artificial Sequence: Synthetic oligonucleotide
cagcuguaaugucaaacau

SEQ ID NO: 1133333 - RNA, 19 nt, Artificial Sequence
  Description of Artificial Sequence: Synthetic oligonucleotide
cugaagggcugaaccggaa

SEQ ID NO: 1133334 - RNA, 19 nt, Artificial Sequence
  Description of Artificial Sequence: Synthetic oligonucleotide
ggcacuugagguacucaga

SEQ ID NO: 1133335 - RNA, 19 nt, Artificial Sequence
  Description of Artificial Sequence: Synthetic oligonucleotide
ccauucccuuugaaacaag

SEQ ID NO: 1133336 - RNA, 19 nt, Artificial Sequence
  Description of Artificial Sequence: Synthetic oligonucleotide
ccuagguuuugcccaccug

SEQ ID NO: 1133337 - RNA, 19 nt, Artificial Sequence
  Description of Artificial Sequence: Synthetic oligonucleotide
uagcugcgucuuguagaug

SEQ ID NO: 1133338 - RNA, 19 nt, Artificial Sequence
  Description of Artificial Sequence: Synthetic oligonucleotide
uggugucgccgugccaccu

SEQ ID NO: 1133339 - RNA, 19 nt, Artificial Sequence
  Description of Artificial Sequence: Synthetic oligonucleotide
gcccaccugggguauagga

SEQ ID NO: 1133340 - RNA, 19 nt, Artificial Sequence
  Description of Artificial Sequence: Synthetic oligonucleotide
gcgguagaucucauucaug

SEQ ID NO: 1133341 - RNA, 19 nt, Artificial Sequence
  Description of Artificial Sequence: Synthetic oligonucleotide
acuuaaggggugggauguu

SEQ ID NO: 1133342 - RNA, 19 nt, Artificial Sequence
  Description of Artificial Sequence: Synthetic oligonucleotide
gcaagacacccacaggcau

SEQ ID NO: 1133343 - RNA, 19 nt, Artificial Sequence
  Description of Artificial Sequence: Synthetic oligonucleotide
gucuuaccuugcacccuac

SEQ ID NO: 1133344 - RNA, 19 nt, Artificial Sequence
  Description of Artificial Sequence: Synthetic oligonucleotide
gggcugaaccggaaauuca

SEQ ID NO: 1133345 - RNA, 19 nt, Artificial Sequence
  Description of Artificial Sequence: Synthetic oligonucleotide
uuugcccaccugggguaua

SEQ ID NO: 1133346 - RNA, 19 nt, Artificial Sequence
  Description of Artificial Sequence: Synthetic oligonucleotide
acggagcaagacacccaca

SEQ ID NO: 1133347 - RNA, 19 nt, Artificial Sequence
  Description of Artificial Sequence: Synthetic oligonucleotide
ggacuagcuucgucuccca

SEQ ID NO: 1133348 - RNA, 19 nt, Artificial Sequence
  Description of Artificial Sequence: Synthetic oligonucleotide
ggugucgccgugccaccuc

SEQ ID NO: 1133349 - RNA, 19 nt, Artificial Sequence
  Description of Artificial Sequence: Synthetic oligonucleotide
ggacggagcaagacaccca

SEQ ID NO: 1133350 - RNA, 19 nt, Artificial Sequence
  Description of Artificial Sequence: Synthetic oligonucleotide
cauugcgguagaucucauu

SEQ ID NO: 1133351 - RNA, 19 nt, Artificial Sequence
  Description of Artificial Sequence: Synthetic oligonucleotide
cccauucccuuugaaacaa

SEQ ID NO: 1133352 - RNA, 19 nt, Artificial Sequence
  Description of Artificial Sequence: Synthetic oligonucleotide
ccuuaucccuguuucugcu

SEQ ID NO: 1133353 - RNA, 19 nt, Artificial Sequence
  Description of Artificial Sequence: Synthetic oligonucleotide
gugucgccgugccaccucu

SEQ ID NO: 1133354 - RNA, 19 nt, Artificial Sequence
  Description of Artificial Sequence: Synthetic oligonucleotide
cugcgucuuguagauggua

SEQ ID NO: 1133355 - RNA, 19 nt, Artificial Sequence
  Description of Artificial Sequence: Synthetic oligonucleotide
cgcuuagagaaggauccuc

SEQ ID NO: 1133356 - RNA, 19 nt, Artificial Sequence
  Description of Artificial Sequence: Synthetic oligonucleotide
ccuugcacccuaccaggga

SEQ ID NO: 1133357 - RNA, 19 nt, Artificial Sequence
  Description of Artificial Sequence: Synthetic oligonucleotide
cucaugcugaagggcugaa

SEQ ID NO: 1133358 - RNA, 19 nt, Artificial Sequence
  Description of Artificial Sequence: Synthetic oligonucleotide
ggagcccugucaccccaga

SEQ ID NO: 1133359 - RNA, 19 nt, Artificial Sequence
  Description of Artificial Sequence: Synthetic oligonucleotide
cagguaguaggagcccugu

SEQ ID NO: 1133360 - RNA, 19 nt, Artificial Sequence
  Description of Artificial Sequence: Synthetic oligonucleotide
gcaggccgcauccccucac

SEQ ID NO: 1133361 - RNA, 19 nt, Artificial Sequence
  Description of Artificial Sequence: Synthetic oligonucleotide
gcacccuaccagggauccg

SEQ ID NO: 1133362 - RNA, 19 nt, Artificial Sequence
  Description of Artificial Sequence: Synthetic oligonucleotide
gcuuacgcccauucccuuu

SEQ ID NO: 1133363 - RNA, 19 nt, Artificial Sequence
  Description of Artificial Sequence: Synthetic oligonucleotide
ccagagccucuuuguagaa

SEQ ID NO: 1133364 - RNA, 19 nt, Artificial Sequence
  Description of Artificial Sequence: Synthetic oligonucleotide
ggccgcauccccucacccu

SEQ ID NO: 1133365 - RNA, 19 nt, Artificial Sequence
  Description of Artificial Sequence: Synthetic oligonucleotide
caacgcaggcagggagaga

SEQ ID NO: 1133366 - RNA, 19 nt, Artificial Sequence
  Description of Artificial Sequence: Synthetic oligonucleotide
ccccuagguuuugcccacc

SEQ ID NO: 1133367 - RNA, 19 nt, Artificial Sequence
  Description of Artificial Sequence: Synthetic oligonucleotide
ggcuuacgcccauucccuu

SEQ ID NO: 1133368 - RNA, 19 nt, Artificial Sequence
  Description of Artificial Sequence: Synthetic oligonucleotide
caggaucagucagccuuau

SEQ ID NO: 1133369 - RNA, 19 nt, Artificial Sequence
  Description of Artificial Sequence: Synthetic oligonucleotide
cccuagguuuugcccaccu

SEQ ID NO: 1133370 - RNA, 19 nt, Artificial Sequence
  Description of Artificial Sequence: Synthetic oligonucleotide
cagguaggccagguccaau

SEQ ID NO: 1133371 - RNA, 19 nt, Artificial Sequence
  Description of Artificial Sequence: Synthetic oligonucleotide
ccgcauccccucacccuga

SEQ ID NO: 1133372 - RNA, 19 nt, Artificial Sequence
  Description of Artificial Sequence: Synthetic oligonucleotide
gguccucaccuagcugcgu

SEQ ID NO: 1133373 - RNA, 19 nt, Artificial Sequence
  Description of Artificial Sequence: Synthetic oligonucleotide
ccauugcgguagaucucau

SEQ ID NO: 1133374 - RNA, 19 nt, Artificial Sequence
  Description of Artificial Sequence: Synthetic oligonucleotide
aauaguuauaaauacaucc

SEQ ID NO: 1133375 - RNA, 19 nt, Artificial Sequence
  Description of Artificial Sequence: Synthetic oligonucleotide
uauuauaaaucacaaaccg

SEQ ID NO: 1133376 - RNA, 19 nt, Artificial Sequence
  Description of Artificial Sequence: Synthetic oligonucleotide
aauggaauaacgcaggguc

SEQ ID NO: 1133377 - RNA, 19 nt, Artificial Sequence
  Description of Artificial Sequence: Synthetic oligonucleotide
aaauuccuuaaucagcacc

SEQ ID NO: 1133378 - RNA, 19 nt, Artificial Sequence
  Description of Artificial Sequence: Synthetic oligonucleotide
uauaaauacauccagaguu

SEQ ID NO: 1133379 - RNA, 19 nt, Artificial Sequence
  Description of Artificial Sequence: Synthetic oligonucleotide
ucaugaaacaccaaggagc

SEQ ID NO: 1133380 - RNA, 19 nt, Artificial Sequence
  Description of Artificial Sequence: Synthetic oligonucleotide
ugcacaaccgacaauaccg

SEQ ID NO: 1133381 - RNA, 19 nt, Artificial Sequence
  Description of Artificial Sequence: Synthetic oligonucleotide
aacagaguaaagcuaguac

SEQ ID NO: 1133382 - RNA, 19 nt, Artificial Sequence
  Description of Artificial Sequence: Synthetic oligonucleotide
cuuuacuugacagauaucg

SEQ ID NO: 1133383 - RNA, 19 nt, Artificial Sequence
  Description of Artificial Sequence: Synthetic oligonucleotide
uuugcauguacauauauac

SEQ ID NO: 1133384 - RNA, 19 nt, Artificial Sequence
  Description of Artificial Sequence: Synthetic oligonucleotide
ugcauguacauauauacag

SEQ ID NO: 1133385 - RNA, 19 nt, Artificial Sequence
  Description of Artificial Sequence: Synthetic oligonucleotide
aaauauccgcuuuucuugc

SEQ ID NO: 1133386 - RNA, 19 nt, Artificial Sequence
  Description of Artificial Sequence: Synthetic oligonucleotide
uauucauucguuacaauug

SEQ ID NO: 1133387 - RNA, 19 nt, Artificial Sequence
  Description of Artificial Sequence: Synthetic oligonucleotide
uguuugcuuaaccagagcc

SEQ ID NO: 1133388 - RNA, 19 nt, Artificial Sequence
  Description of Artificial Sequence: Synthetic oligonucleotide
gaguuuacuuuccagaucc

SEQ ID NO: 1133389 - RNA, 19 nt, Artificial Sequence
  Description of Artificial Sequence: Synthetic oligonucleotide
cauguuucaauuuugauga

SEQ ID NO: 1133390 - RNA, 19 nt, Artificial Sequence
  Description of Artificial Sequence: Synthetic oligonucleotide
aaccaaaggcuacacacac

SEQ ID NO: 1133391 - RNA, 19 nt, Artificial Sequence
  Description of Artificial Sequence: Synthetic oligonucleotide
aauuguucuacaguagggg

SEQ ID NO: 1133392 - RNA, 19 nt, Artificial Sequence
  Description of Artificial Sequence: Synthetic oligonucleotide
uucgacuugacuucgaucu

SEQ ID NO: 1133393 - RNA, 19 nt, Artificial Sequence
  Description of Artificial Sequence: Synthetic oligonucleotide
auaagguucauucuucaag

SEQ ID NO: 1133394 - RNA, 19 nt, Artificial Sequence
  Description of Artificial Sequence: Synthetic oligonucleotide
ugaauuacaagugaaugug

SEQ ID NO: 1133395 - RNA, 19 nt, Artificial Sequence
  Description of Artificial Sequence: Synthetic oligonucleotide
aauuacaagugaauguggg

SEQ ID NO: 1133396 - RNA, 19 nt, Artificial Sequence
  Description of Artificial Sequence: Synthetic oligonucleotide
uggaucuaagccaugaaca

SEQ ID NO: 1133397 - RNA, 19 nt, Artificial Sequence
  Description of Artificial Sequence: Synthetic oligonucleotide
aaugucucugaccuacagg

SEQ ID NO: 1133398 - RNA, 19 nt, Artificial Sequence
  Description of Artificial Sequence: Synthetic oligonucleotide
ucacaaaccgucaucacug

SEQ ID NO: 1133399 - RNA, 19 nt, Artificial Sequence
  Description of Artificial Sequence: Synthetic oligonucleotide
gaugaauuacaagugaaug

SEQ ID NO: 1133400 - RNA, 19 nt, Artificial Sequence
  Description of Artificial Sequence: Synthetic oligonucleotide
agaaacauaaccaaaggcu

SEQ ID NO: 1133401 - RNA, 19 nt, Artificial Sequence
  Description of Artificial Sequence: Synthetic oligonucleotide
uauacaggcacacaccgga

SEQ ID NO: 1133402 - RNA, 19 nt, Artificial Sequence
  Description of Artificial Sequence: Synthetic oligonucleotide
gaugggaugaauuacaagu

SEQ ID NO: 1133403 - RNA, 19 nt, Artificial Sequence
  Description of Artificial Sequence: Synthetic oligonucleotide
aaaggcuacacacacuggu

SEQ ID NO: 1133404 - RNA, 19 nt, Artificial Sequence
  Description of Artificial Sequence: Synthetic oligonucleotide
auaucguuggauuuggcug

SEQ ID NO: 1133405 - RNA, 19 nt, Artificial Sequence
  Description of Artificial Sequence: Synthetic oligonucleotide
uaaagcuaguaccaaaccu

SEQ ID NO: 1133406 - RNA, 19 nt, Artificial Sequence
  Description of Artificial Sequence: Synthetic oligonucleotide
ugaagauagguacagcacu

SEQ ID NO: 1133407 - RNA, 19 nt, Artificial Sequence
  Description of Artificial Sequence: Synthetic oligonucleotide
uuugcuagauuugauguag

SEQ ID NO: 1133408 - RNA, 19 nt, Artificial Sequence
  Description of Artificial Sequence: Synthetic oligonucleotide
caugaaacaccaaggagcc

SEQ ID NO: 1133409 - RNA, 19 nt, Artificial Sequence
  Description of Artificial Sequence: Synthetic oligonucleotide
uaucguuggauuuggcugg

SEQ ID NO: 1133410 - RNA, 19 nt, Artificial Sequence
  Description of Artificial Sequence: Synthetic oligonucleotide
aggugguaaauuuuguggg

SEQ ID NO: 1133411 - RNA, 19 nt, Artificial Sequence
  Description of Artificial Sequence: Synthetic oligonucleotide
ugauuauuaaaaucuguuc

SEQ ID NO: 1133412 - RNA, 19 nt, Artificial Sequence
  Description of Artificial Sequence: Synthetic oligonucleotide
aacauggcaaaaccacacg

SEQ ID NO: 1133413 - RNA, 19 nt, Artificial Sequence
  Description of Artificial Sequence: Synthetic oligonucleotide
ucauauauucauucguuac

SEQ ID NO: 1133414 - RNA, 19 nt, Artificial Sequence
  Description of Artificial Sequence: Synthetic oligonucleotide
uccguagacaguuugaaaa

SEQ ID NO: 1133415 - RNA, 19 nt, Artificial Sequence
  Description of Artificial Sequence: Synthetic oligonucleotide
uacuugacagauaucguug

SEQ ID NO: 1133416 - RNA, 19 nt, Artificial Sequence
  Description of Artificial Sequence: Synthetic oligonucleotide
uguaguaucuaagaaugug

SEQ ID NO: 1133417 - RNA, 19 nt, Artificial Sequence
  Description of Artificial Sequence: Synthetic oligonucleotide
ucucuaauguuccuaaguc

SEQ ID NO: 1133418 - RNA, 19 nt, Artificial Sequence
  Description of Artificial Sequence: Synthetic oligonucleotide
auggucaccagcuuauagg

SEQ ID NO: 1133419 - RNA, 19 nt, Artificial Sequence
  Description of Artificial Sequence: Synthetic oligonucleotide
aaacauaaccaaaggcuac

SEQ ID NO: 1133420 - RNA, 19 nt, Artificial Sequence
  Description of Artificial Sequence: Synthetic oligonucleotide
ucaauccaacaaaagagcu

SEQ ID NO: 1133421 - RNA, 19 nt, Artificial Sequence
  Description of Artificial Sequence: Synthetic oligonucleotide
aacaaaagagcugucgaug

SEQ ID NO: 1133422 - RNA, 19 nt, Artificial Sequence
  Description of Artificial Sequence: Synthetic oligonucleotide
caucuuaggacagucaggg

SEQ ID NO: 1133423 - RNA, 19 nt, Artificial Sequence
  Description of Artificial Sequence: Synthetic oligonucleotide
ugucuaguguuuauuauaa

SEQ ID NO: 1133424 - RNA, 19 nt, Artificial Sequence
  Description of Artificial Sequence: Synthetic oligonucleotide
ugacugaauggaauaacgc

SEQ ID NO: 1133425 - RNA, 19 nt, Artificial Sequence
  Description of Artificial Sequence: Synthetic oligonucleotide
ucaacaguuuuccacgugu

SEQ ID NO: 1133426 - RNA, 19 nt, Artificial Sequence
  Description of Artificial Sequence: Synthetic oligonucleotide
cuuaggacagucaggggcg

SEQ ID NO: 1133427 - RNA, 19 nt, Artificial Sequence
  Description of Artificial Sequence: Synthetic oligonucleotide
accgacaauaccgugaggg

SEQ ID NO: 1133428 - RNA, 19 nt, Artificial Sequence
  Description of Artificial Sequence: Synthetic oligonucleotide
uuauaggcacacaucuuag

SEQ ID NO: 1133429 - RNA, 19 nt, Artificial Sequence
  Description of Artificial Sequence: Synthetic oligonucleotide
acgaaauuccuuaaucagc

SEQ ID NO: 1133430 - RNA, 19 nt, Artificial Sequence
  Description of Artificial Sequence: Synthetic oligonucleotide
caaaaccacacgaaauucc

SEQ ID NO: 1133431 - RNA, 19 nt, Artificial Sequence
  Description of Artificial Sequence: Synthetic oligonucleotide
aggcuacacacacuggucc

SEQ ID NO: 1133432 - RNA, 19 nt, Artificial Sequence
  Description of Artificial Sequence: Synthetic oligonucleotide
aauuuuguggguguacugu

SEQ ID NO: 1133433 - RNA, 19 nt, Artificial Sequence
  Description of Artificial Sequence: Synthetic oligonucleotide
uuggaucuaagccaugaac

SEQ ID NO: 1133434 - RNA, 19 nt, Artificial Sequence
  Description of Artificial Sequence: Synthetic oligonucleotide
uuccaguuaggucccaggg

SEQ ID NO: 1133435 - RNA, 19 nt, Artificial Sequence
  Description of Artificial Sequence: Synthetic oligonucleotide
accugaauacuccugaaca

SEQ ID NO: 1133436 - RNA, 19 nt, Artificial Sequence
  Description of Artificial Sequence: Synthetic oligonucleotide
auauucauucguuacaauu

SEQ ID NO: 1133437 - RNA, 19 nt, Artificial Sequence
  Description of Artificial Sequence: Synthetic oligonucleotide
cacgaaauuccuuaaucag

SEQ ID NO: 1133438 - RNA, 19 nt, Artificial Sequence
  Description of Artificial Sequence: Synthetic oligonucleotide
uccacuguaguaucuaaga

SEQ ID NO: 1133439 - RNA, 19 nt, Artificial Sequence
  Description of Artificial Sequence: Synthetic oligonucleotide
ucuauguggacaauuucaa

SEQ ID NO: 1133440 - RNA, 19 nt, Artificial Sequence
  Description of Artificial Sequence: Synthetic oligonucleotide
uaacgcagggucuucauca

SEQ ID NO: 1133441 - RNA, 19 nt, Artificial Sequence
  Description of Artificial Sequence: Synthetic oligonucleotide
uccaacaaaagagcugucg

SEQ ID NO: 1133442 - RNA, 19 nt, Artificial Sequence
  Description of Artificial Sequence: Synthetic oligonucleotide
uuuuccacguguuuggauc

SEQ ID NO: 1133443 - RNA, 19 nt, Artificial Sequence
  Description of Artificial Sequence: Synthetic oligonucleotide
uguaaauauccgcuuuucu

SEQ ID NO: 1133444 - RNA, 19 nt, Artificial Sequence
  Description of Artificial Sequence: Synthetic oligonucleotide
uuaaccagagccugaauau

SEQ ID NO: 1133445 - RNA, 19 nt, Artificial Sequence
  Description of Artificial Sequence: Synthetic oligonucleotide
uuuuacucuuuacuugaca

SEQ ID NO: 1133446 - RNA, 19 nt, Artificial Sequence
  Description of Artificial Sequence: Synthetic oligonucleotide
uauaggcacacaucuuagg

SEQ ID NO: 1133447 - RNA, 19 nt, Artificial Sequence
  Description of Artificial Sequence: Synthetic oligonucleotide
uucguuacaauuguucuac

SEQ ID NO: 1133448 - RNA, 19 nt, Artificial Sequence
  Description of Artificial Sequence: Synthetic oligonucleotide
acuugacagauaucguugg

SEQ ID NO: 1133449 - RNA, 19 nt, Artificial Sequence
  Description of Artificial Sequence: Synthetic oligonucleotide
aauaccgugaggguguacu

SEQ ID NO: 1133450 - RNA, 19 nt, Artificial Sequence
  Description of Artificial Sequence: Synthetic oligonucleotide
acacgaaauuccuuaauca

SEQ ID NO: 1133451 - RNA, 19 nt, Artificial Sequence
  Description of Artificial Sequence: Synthetic oligonucleotide
gacggaacccuucuuacgc

SEQ ID NO: 1133452 - RNA, 19 nt, Artificial Sequence
  Description of Artificial Sequence: Synthetic oligonucleotide
aacuuuugcucuucaggug

SEQ ID NO: 1133453 - RNA, 19 nt, Artificial Sequence
  Description of Artificial Sequence: Synthetic oligonucleotide
uguuucaauuuugaugaag

SEQ ID NO: 1133454 - RNA, 19 nt, Artificial Sequence
  Description of Artificial Sequence: Synthetic oligonucleotide
cagguuuguagucugcugg

SEQ ID NO: 1133455 - RNA, 19 nt, Artificial Sequence
  Description of Artificial Sequence: Synthetic oligonucleotide
ucaggugguaaauuuugug

SEQ ID NO: 1133456 - RNA, 19 nt, Artificial Sequence
  Description of Artificial Sequence: Synthetic oligonucleotide
ucucauaagguucauucuu

SEQ ID NO: 1133457 - RNA, 19 nt, Artificial Sequence
  Description of Artificial Sequence: Synthetic oligonucleotide
ucuacaguagggguaagca

SEQ ID NO: 1133458 - RNA, 19 nt, Artificial Sequence
  Description of Artificial Sequence: Synthetic oligonucleotide
uaccaaaccugaauacucc

SEQ ID NO: 1133459 - RNA, 19 nt, Artificial Sequence
  Description of Artificial Sequence: Synthetic oligonucleotide
cucaugaaacaccaaggag

SEQ ID NO: 1133460 - RNA, 19 nt, Artificial Sequence
  Description of Artificial Sequence: Synthetic oligonucleotide
accggaaacaucaacacug

SEQ ID NO: 1133461 - RNA, 19 nt, Artificial Sequence
  Description of Artificial Sequence: Synthetic oligonucleotide
auuguucuacaguaggggu

SEQ ID NO: 1133462 - RNA, 19 nt, Artificial Sequence
  Description of Artificial Sequence: Synthetic oligonucleotide
ugucaggucaauccacuug

SEQ ID NO: 1133463 - RNA, 19 nt, Artificial Sequence
  Description of Artificial Sequence: Synthetic oligonucleotide
guguacuucuuuuaucacc

SEQ ID NO: 1133464 - RNA, 19 nt, Artificial Sequence
  Description of Artificial Sequence: Synthetic oligonucleotide
aucacaaaccgucaucacu

SEQ ID NO: 1133465 - RNA, 19 nt, Artificial Sequence
  Description of Artificial Sequence: Synthetic oligonucleotide
uucgauuccuucuccacca

SEQ ID NO: 1133466 - RNA, 19 nt, Artificial Sequence
  Description of Artificial Sequence: Synthetic oligonucleotide
aaccacacgaaauuccuua

SEQ ID NO: 1133467 - RNA, 19 nt, Artificial Sequence
  Description of Artificial Sequence: Synthetic oligonucleotide
ucuuacucgcuucugcaac

SEQ ID NO: 1133468 - RNA, 19 nt, Artificial Sequence
  Description of Artificial Sequence: Synthetic oligonucleotide
gaacauucucuaauguucc

SEQ ID NO: 1133469 - RNA, 19 nt, Artificial Sequence
  Description of Artificial Sequence: Synthetic oligonucleotide
uagggguaagcauuccagg

SEQ ID NO: 1133470 - RNA, 19 nt, Artificial Sequence
  Description of Artificial Sequence: Synthetic oligonucleotide
gauggucaccagcuuauag

SEQ ID NO: 1133471 - RNA, 19 nt, Artificial Sequence
  Description of Artificial Sequence: Synthetic oligonucleotide
uacgcauuguuucuaguuc

SEQ ID NO: 1133472 - RNA, 19 nt, Artificial Sequence
  Description of Artificial Sequence: Synthetic oligonucleotide
ucuucaagacuucgauucc

SEQ ID NO: 1133473 - RNA, 19 nt, Artificial Sequence
  Description of Artificial Sequence: Synthetic oligonucleotide
uuggccuugacuccguaga

SEQ ID NO: 1133474 - RNA, 19 nt, Artificial Sequence
  Description of Artificial Sequence: Synthetic oligonucleotide
cuaauguuccuaagucagg

SEQ ID NO: 1133475 - RNA, 19 nt, Artificial Sequence
  Description of Artificial Sequence: Synthetic oligonucleotide
uucauauauucauucguua

SEQ ID NO: 1133476 - RNA, 19 nt, Artificial Sequence
  Description of Artificial Sequence: Synthetic oligonucleotide
uaauguuccuaagucaggu

SEQ ID NO: 1133477 - RNA, 19 nt, Artificial Sequence
  Description of Artificial Sequence: Synthetic oligonucleotide
augucuuccauugucaggu

SEQ ID NO: 1133478 - RNA, 19 nt, Artificial Sequence
  Description of Artificial Sequence: Synthetic oligonucleotide
cauucuuacucgcuucugc

SEQ ID NO: 1133479 - RNA, 19 nt, Artificial Sequence
  Description of Artificial Sequence: Synthetic oligonucleotide
ucagguuugugccauguuu

SEQ ID NO: 1133480 - RNA, 19 nt, Artificial Sequence
  Description of Artificial Sequence: Synthetic oligonucleotide
cuacaggggacucaucuag

SEQ ID NO: 1133481 - RNA, 19 nt, Artificial Sequence
  Description of Artificial Sequence: Synthetic oligonucleotide
cugaagauagguacagcac

SEQ ID NO: 1133482 - RNA, 19 nt, Artificial Sequence
  Description of Artificial Sequence: Synthetic oligonucleotide
agaaugugaagacaucuuu

SEQ ID NO: 1133483 - RNA, 19 nt, Artificial Sequence
  Description of Artificial Sequence: Synthetic oligonucleotide
gacucaucuaggcaucggc

SEQ ID NO: 1133484 - RNA, 19 nt, Artificial Sequence
  Description of Artificial Sequence: Synthetic oligonucleotide
ccauguuucaauuuugaug

SEQ ID NO: 1133485 - RNA, 19 nt, Artificial Sequence
  Description of Artificial Sequence: Synthetic oligonucleotide
acauggcaaaaccacacga

SEQ ID NO: 1133486 - RNA, 19 nt, Artificial Sequence
  Description of Artificial Sequence: Synthetic oligonucleotide
ugagucucaucuuccauuc

SEQ ID NO: 1133487 - RNA, 19 nt, Artificial Sequence
  Description of Artificial Sequence: Synthetic oligonucleotide
ugcugguucgacuugacuu

SEQ ID NO: 1133488 - RNA, 19 nt, Artificial Sequence
  Description of Artificial Sequence: Synthetic oligonucleotide
agauagguacagcacuuug

SEQ ID NO: 1133489 - RNA, 19 nt, Artificial Sequence
  Description of Artificial Sequence: Synthetic oligonucleotide
cacacgaaauuccuuaauc

SEQ ID NO: 1133490 - RNA, 19 nt, Artificial Sequence
  Description of Artificial Sequence: Synthetic oligonucleotide
auaacgcagggucuucauc

SEQ ID NO: 1133491 - RNA, 19 nt, Artificial Sequence
  Description of Artificial Sequence: Synthetic oligonucleotide
ucuguugcugaugggauga

SEQ ID NO: 1133492 - RNA, 19 nt, Artificial Sequence
  Description of Artificial Sequence: Synthetic oligonucleotide
uacaggggacucaucuagg

SEQ ID NO: 1133493 - RNA, 19 nt, Artificial Sequence
  Description of Artificial Sequence: Synthetic oligonucleotide
agcaaucauccuuacaaau

SEQ ID NO: 1133494 - RNA, 19 nt, Artificial Sequence
  Description of Artificial Sequence: Synthetic oligonucleotide
aaccagagccugaauauug

SEQ ID NO: 1133495 - RNA, 19 nt, Artificial Sequence
  Description of Artificial Sequence: Synthetic oligonucleotide
aaggcuacacacacugguc

SEQ ID NO: 1133496 - RNA, 19 nt, Artificial Sequence
  Description of Artificial Sequence: Synthetic oligonucleotide
gaacccuucuuacgcauug

SEQ ID NO: 1133497 - RNA, 19 nt, Artificial Sequence
  Description of Artificial Sequence: Synthetic oligonucleotide
aguaccaaaccugaauacu

SEQ ID NO: 1133498 - RNA, 19 nt, Artificial Sequence
  Description of Artificial Sequence: Synthetic oligonucleotide
cagaguaaagcuaguacca

SEQ ID NO: 1133499 - RNA, 19 nt, Artificial Sequence
  Description of Artificial Sequence: Synthetic oligonucleotide
ugucuauguggacaauuuc

SEQ ID NO: 1133500 - RNA, 19 nt, Artificial Sequence
  Description of Artificial Sequence: Synthetic oligonucleotide
aagccaugaacauucucua

SEQ ID NO: 1133501 - RNA, 19 nt, Artificial Sequence
  Description of Artificial Sequence: Synthetic oligonucleotide
cuagggcaaacuagcaaag

SEQ ID NO: 1133502 - RNA, 19 nt, Artificial Sequence
  Description of Artificial Sequence: Synthetic oligonucleotide
ugacagauaucguuggauu

SEQ ID NO: 1133503 - RNA, 19 nt, Artificial Sequence
  Description of Artificial Sequence: Synthetic oligonucleotide
aauaacgcagggucuucau

SEQ ID NO: 1133504 - RNA, 19 nt, Artificial Sequence
  Description of Artificial Sequence: Synthetic oligonucleotide
uggcaaaaccacacgaaau

SEQ ID NO: 1133505 - RNA, 19 nt, Artificial Sequence
  Description of Artificial Sequence: Synthetic oligonucleotide
ccauuuauccaccaagggc

SEQ ID NO: 1133506 - RNA, 19 nt, Artificial Sequence
  Description of Artificial Sequence: Synthetic oligonucleotide
gauaucguuggauuuggcu

SEQ ID NO: 1133507 - RNA, 19 nt, Artificial Sequence
  Description of Artificial Sequence: Synthetic oligonucleotide
acacaccggaaacaucaac

SEQ ID NO: 1133508 - RNA, 19 nt, Artificial Sequence
  Description of Artificial Sequence: Synthetic oligonucleotide
uucaugaagcacgccagcc

SEQ ID NO: 1133509 - RNA, 19 nt, Artificial Sequence
  Description of Artificial Sequence: Synthetic oligonucleotide
aauauccgcuuuucuugcu

SEQ ID NO: 1133510 - RNA, 19 nt, Artificial Sequence
  Description of Artificial Sequence: Synthetic oligonucleotide
uccagauccacuguaguau

SEQ ID NO: 1133511 - RNA, 19 nt, Artificial Sequence
  Description of Artificial Sequence: Synthetic oligonucleotide
uuuugcuagauuugaugua

SEQ ID NO: 1133512 - RNA, 19 nt, Artificial Sequence
  Description of Artificial Sequence: Synthetic oligonucleotide
auguaaguuuguaaauauc

SEQ ID NO: 1133513 - RNA, 19 nt, Artificial Sequence
  Description of Artificial Sequence: Synthetic oligonucleotide
uguucuacaguagggguaa

SEQ ID NO: 1133514 - RNA, 19 nt, Artificial Sequence
  Description of Artificial Sequence: Synthetic oligonucleotide
caaccgacaauaccgugag

SEQ ID NO: 1133515 - RNA, 19 nt, Artificial Sequence
  Description of Artificial Sequence: Synthetic oligonucleotide
uuguucuacaguaggggua

SEQ ID NO: 1133516 - RNA, 19 nt, Artificial Sequence
  Description of Artificial Sequence: Synthetic oligonucleotide
uucacucgucaccugcugc

SEQ ID NO: 1133517 - RNA, 19 nt, Artificial Sequence
  Description of Artificial Sequence: Synthetic oligonucleotide
cacaccggaaacaucaaca

SEQ ID NO: 1133518 - RNA, 19 nt, Artificial Sequence
  Description of Artificial Sequence: Synthetic oligonucleotide
uugcugaagauagguacag

SEQ ID NO: 1133519 - RNA, 19 nt, Artificial Sequence
  Description of Artificial Sequence: Synthetic oligonucleotide
cauugucaggucaauccac

SEQ ID NO: 1133520 - RNA, 19 nt, Artificial Sequence
  Description of Artificial Sequence: Synthetic oligonucleotide
auggcaaaaccacacgaaa

SEQ ID NO: 1133521 - RNA, 19 nt, Artificial Sequence
  Description of Artificial Sequence: Synthetic oligonucleotide
aggggcgcuugccagcucc

SEQ ID NO: 1133522 - RNA, 19 nt, Artificial Sequence
  Description of Artificial Sequence: Synthetic oligonucleotide
uuuggaucuaagccaugaa

SEQ ID NO: 1133523 - RNA, 19 nt, Artificial Sequence
  Description of Artificial Sequence: Synthetic oligonucleotide
ugaauguggggcgacuuga

SEQ ID NO: 1133524 - RNA, 19 nt, Artificial Sequence
  Description of Artificial Sequence: Synthetic oligonucleotide
cagguuugugccauguuuc

SEQ ID NO: 1133525 - RNA, 19 nt, Artificial Sequence
  Description of Artificial Sequence: Synthetic oligonucleotide
ggauuuggcuggaagauag

SEQ ID NO: 1133526 - RNA, 19 nt, Artificial Sequence
  Description of Artificial Sequence: Synthetic oligonucleotide
uggacaauuucaacaguuu

SEQ ID NO: 1133527 - RNA, 19 nt, Artificial Sequence
  Description of Artificial Sequence: Synthetic oligonucleotide
gaaguccucugcacaaccg

SEQ ID NO: 1133528 - RNA, 19 nt, Artificial Sequence
  Description of Artificial Sequence: Synthetic oligonucleotide
cuuaaccagagccugaaua

SEQ ID NO: 1133529 - RNA, 19 nt, Artificial Sequence
  Description of Artificial Sequence: Synthetic oligonucleotide
acucgcuucugcaacagag

SEQ ID NO: 1133530 - RNA, 19 nt, Artificial Sequence
  Description of Artificial Sequence: Synthetic oligonucleotide
aauguuccuaagucagguu

SEQ ID NO: 1133531 - RNA, 19 nt, Artificial Sequence
  Description of Artificial Sequence: Synthetic oligonucleotide
cucuaauguuccuaaguca

SEQ ID NO: 1133532 - RNA, 19 nt, Artificial Sequence
  Description of Artificial Sequence: Synthetic oligonucleotide
ugcuagauuugauguagaa

SEQ ID NO: 1133533 - RNA, 19 nt, Artificial Sequence
  Description of Artificial Sequence: Synthetic oligonucleotide
acucaucuaggcaucggcg

SEQ ID NO: 1133534 - RNA, 19 nt, Artificial Sequence
  Description of Artificial Sequence: Synthetic oligonucleotide
agagcugucgauguaaguu

SEQ ID NO: 1133535 - RNA, 19 nt, Artificial Sequence
  Description of Artificial Sequence: Synthetic oligonucleotide
auguggggcgacuugaaaa

SEQ ID NO: 1133536 - RNA, 19 nt, Artificial Sequence
  Description of Artificial Sequence: Synthetic oligonucleotide
cuaguaccaaaccugaaua

SEQ ID NO: 1133537 - RNA, 19 nt, Artificial Sequence
  Description of Artificial Sequence: Synthetic oligonucleotide
gaaauuccuuaaucagcac

SEQ ID NO: 1133538 - RNA, 19 nt, Artificial Sequence
  Description of Artificial Sequence: Synthetic oligonucleotide
gaugauuauuaaaaucugu

SEQ ID NO: 1133539 - RNA, 19 nt, Artificial Sequence
  Description of Artificial Sequence: Synthetic oligonucleotide
aauguggggcgacuugaaa

SEQ ID NO: 1133540 - RNA, 19 nt, Artificial Sequence
  Description of Artificial Sequence: Synthetic oligonucleotide
acgugccucggacggaacc

SEQ ID NO: 1133541 - RNA, 19 nt, Artificial Sequence
  Description of Artificial Sequence: Synthetic oligonucleotide
uugacagauaucguuggau

SEQ ID NO: 1133542 - RNA, 19 nt, Artificial Sequence
  Description of Artificial Sequence: Synthetic oligonucleotide
aagcuaguaccaaaccuga

SEQ ID NO: 1133543 - RNA, 19 nt, Artificial Sequence
  Description of Artificial Sequence: Synthetic oligonucleotide
uauauucauucguuacaau

SEQ ID NO: 1133544 - RNA, 19 nt, Artificial Sequence
  Description of Artificial Sequence: Synthetic oligonucleotide
auucguuacaauuguucua

SEQ ID NO: 1133545 - RNA, 19 nt, Artificial Sequence
  Description of Artificial Sequence: Synthetic oligonucleotide
ggguguacuucuuuuauca

SEQ ID NO: 1133546 - RNA, 19 nt, Artificial Sequence
  Description of Artificial Sequence: Synthetic oligonucleotide
ucugcacaaccgacaauac

SEQ ID NO: 1133547 - RNA, 19 nt, Artificial Sequence
  Description of Artificial Sequence: Synthetic oligonucleotide
uugcugaugggaugaauua

SEQ ID NO: 1133548 - RNA, 19 nt, Artificial Sequence
  Description of Artificial Sequence: Synthetic oligonucleotide
ucgcuucugcaacagagua

SEQ ID NO: 1133549 - RNA, 19 nt, Artificial Sequence
  Description of Artificial Sequence: Synthetic oligonucleotide
guaccaaaccugaauacuc

SEQ ID NO: 1133550 - RNA, 19 nt, Artificial Sequence
  Description of Artificial Sequence: Synthetic oligonucleotide
cugcacaaccgacaauacc

SEQ ID NO: 1133551 - RNA, 19 nt, Artificial Sequence
  Description of Artificial Sequence: Synthetic oligonucleotide
aucaccuuguuugcuuaac

SEQ ID NO: 1133552 - RNA, 19 nt, Artificial Sequence
  Description of Artificial Sequence: Synthetic oligonucleotide
aucuuaggacagucagggg

SEQ ID NO: 1133553 - RNA, 19 nt, Artificial Sequence
  Description of Artificial Sequence: Synthetic oligonucleotide
uucuacaguagggguaagc

SEQ ID NO: 1133554 - RNA, 19 nt, Artificial Sequence
  Description of Artificial Sequence: Synthetic oligonucleotide
accgugaggguguacuucu

SEQ ID NO: 1133555 - RNA, 19 nt, Artificial Sequence
  Description of Artificial Sequence: Synthetic oligonucleotide
caccccuagggcaaacuag

SEQ ID NO: 1133556 - RNA, 19 nt, Artificial Sequence
  Description of Artificial Sequence: Synthetic oligonucleotide
acaaccgacaauaccguga

SEQ ID NO: 1133557 - RNA, 19 nt, Artificial Sequence
  Description of Artificial Sequence: Synthetic oligonucleotide
uucuuacucgcuucugcaa

SEQ ID NO: 1133558 - RNA, 19 nt, Artificial Sequence
  Description of Artificial Sequence: Synthetic oligonucleotide
ugcugaugggaugaauuac

SEQ ID NO: 1133559 - RNA, 19 nt, Artificial Sequence
  Description of Artificial Sequence: Synthetic oligonucleotide
cauucguuacaauuguucu

SEQ ID NO: 1133560 - RNA, 19 nt, Artificial Sequence
  Description of Artificial Sequence: Synthetic oligonucleotide
ucuaagccaugaacauucu

SEQ ID NO: 1133561 - RNA, 19 nt, Artificial Sequence
  Description of Artificial Sequence: Synthetic oligonucleotide
uucaagacuucgauuccuu

SEQ ID NO: 1133562 - RNA, 19 nt, Artificial Sequence
  Description of Artificial Sequence: Synthetic oligonucleotide
ucgacuugacuucgaucug

SEQ ID NO: 1133563 - RNA, 19 nt, Artificial Sequence
  Description of Artificial Sequence: Synthetic oligonucleotide
ucggacggaacccuucuua

SEQ ID NO: 1133564 - RNA, 19 nt, Artificial Sequence
  Description of Artificial Sequence: Synthetic oligonucleotide
ugaggguguacuucuuuua

SEQ ID NO: 1133565 - RNA, 19 nt, Artificial Sequence
  Description of Artificial Sequence: Synthetic oligonucleotide
aaccgacaauaccgugagg

SEQ ID NO: 1133566 - RNA, 19 nt, Artificial Sequence
  Description of Artificial Sequence: Synthetic oligonucleotide
ucuuuacuugacagauauc

SEQ ID NO: 1133567 - RNA, 19 nt, Artificial Sequence
  Description of Artificial Sequence: Synthetic oligonucleotide
cucuuuacuugacagauau

SEQ ID NO: 1133568 - RNA, 19 nt, Artificial Sequence
  Description of Artificial Sequence: Synthetic oligonucleotide
cuuggccuugacuccguag

SEQ ID NO: 1133569 - RNA, 19 nt, Artificial Sequence
  Description of Artificial Sequence: Synthetic oligonucleotide
uuacucgcuucugcaacag

SEQ ID NO: 1133570 - RNA, 19 nt, Artificial Sequence
  Description of Artificial Sequence: Synthetic oligonucleotide
caccuuguuugcuuaacca

SEQ ID NO: 1133571 - RNA, 19 nt, Artificial Sequence
  Description of Artificial Sequence: Synthetic oligonucleotide
uccuaaugucuuccauugu

SEQ ID NO: 1133572 - RNA, 19 nt, Artificial Sequence
  Description of Artificial Sequence: Synthetic oligonucleotide
agauaucguuggauuuggc

SEQ ID NO: 1133573 - RNA, 19 nt, Artificial Sequence
  Description of Artificial Sequence: Synthetic oligonucleotide
ucauucuuacucgcuucug

SEQ ID NO: 1133574 - RNA, 19 nt, Artificial Sequence
  Description of Artificial Sequence: Synthetic oligonucleotide
agauaguggccacccagaa

SEQ ID NO: 1133575 - RNA, 19 nt, Artificial Sequence
  Description of Artificial Sequence: Synthetic oligonucleotide
gugaauguggggcgacuug

SEQ ID NO: 1133576 - RNA, 19 nt, Artificial Sequence
  Description of Artificial Sequence: Synthetic oligonucleotide
ccaugaacauucucuaaug

SEQ ID NO: 1133577 - RNA, 19 nt, Artificial Sequence
  Description of Artificial Sequence: Synthetic oligonucleotide
cugaauacuccugaacaga

SEQ ID NO: 1133578 - RNA, 19 nt, Artificial Sequence
  Description of Artificial Sequence: Synthetic oligonucleotide
gauccacuguaguaucuaa

SEQ ID NO: 1133579 - RNA, 19 nt, Artificial Sequence
  Description of Artificial Sequence: Synthetic oligonucleotide
uggaauaacgcagggucuu

SEQ ID NO: 1133580 - RNA, 19 nt, Artificial Sequence
  Description of Artificial Sequence: Synthetic oligonucleotide
cuuacucgcuucugcaaca

SEQ ID NO: 1133581 - RNA, 19 nt, Artificial Sequence
  Description of Artificial Sequence: Synthetic oligonucleotide
cuaagccaugaacauucuc

SEQ ID NO: 1133582 - RNA, 19 nt, Artificial Sequence
  Description of Artificial Sequence: Synthetic oligonucleotide
auccacuguaguaucuaag

SEQ ID NO: 1133583 - RNA, 19 nt, Artificial Sequence
  Description of Artificial Sequence: Synthetic oligonucleotide
gacaauaccgugagggugu

SEQ ID NO: 1133584 - RNA, 19 nt, Artificial Sequence
  Description of Artificial Sequence: Synthetic oligonucleotide
aagauagguacagcacuuu

SEQ ID NO: 1133585 - RNA, 19 nt, Artificial Sequence
  Description of Artificial Sequence: Synthetic oligonucleotide
guucgacuugacuucgauc

SEQ ID NO: 1133586 - RNA, 19 nt, Artificial Sequence
  Description of Artificial Sequence: Synthetic oligonucleotide
cuaagucagguuugugcca

SEQ ID NO: 1133587 - RNA, 19 nt, Artificial Sequence
  Description of Artificial Sequence: Synthetic oligonucleotide
cucugcacaaccgacaaua

SEQ ID NO: 1133588 - RNA, 19 nt, Artificial Sequence
  Description of Artificial Sequence: Synthetic oligonucleotide
uaggcaucggcggccgacg

SEQ ID NO: 1133589 - RNA, 19 nt, Artificial Sequence
  Description of Artificial Sequence: Synthetic oligonucleotide
ggacggaacccuucuuacg

SEQ ID NO: 1133590 - RNA, 19 nt, Artificial Sequence
  Description of Artificial Sequence: Synthetic oligonucleotide
auauccgcuuuucuugcuu

SEQ ID NO: 1133591 - RNA, 19 nt, Artificial Sequence
  Description of Artificial Sequence: Synthetic oligonucleotide
accacacgaaauuccuuaa

SEQ ID NO: 1133592 - RNA, 19 nt, Artificial Sequence
  Description of Artificial Sequence: Synthetic oligonucleotide
gaauaacgcagggucuuca

SEQ ID NO: 1133593 - RNA, 19 nt, Artificial Sequence
  Description of Artificial Sequence: Synthetic oligonucleotide
cugguucgacuugacuucg

SEQ ID NO: 1133594 - RNA, 19 nt, Artificial Sequence
  Description of Artificial Sequence: Synthetic oligonucleotide
aggagcaaucauccuuaca

SEQ ID NO: 1133595 - RNA, 19 nt, Artificial Sequence
  Description of Artificial Sequence: Synthetic oligonucleotide
cacaaccgacaauaccgug

SEQ ID NO: 1133596 - RNA, 19 nt, Artificial Sequence
  Description of Artificial Sequence: Synthetic oligonucleotide
auggaauaacgcagggucu

SEQ ID NO: 1133597 - RNA, 19 nt, Artificial Sequence
  Description of Artificial Sequence: Synthetic oligonucleotide
ugaccuacaggggacucau

SEQ ID NO: 1133598 - RNA, 19 nt, Artificial Sequence
  Description of Artificial Sequence: Synthetic oligonucleotide
ccagaguuuacuuuccaga

SEQ ID NO: 1133599 - RNA, 19 nt, Artificial Sequence
  Description of Artificial Sequence: Synthetic oligonucleotide
aaucuguuccagguauaua

SEQ ID NO: 1133600 - RNA, 19 nt, Artificial Sequence
  Description of Artificial Sequence: Synthetic oligonucleotide
guuuugcauguacauauau

SEQ ID NO: 1133601 - RNA, 19 nt, Artificial Sequence
  Description of Artificial Sequence: Synthetic oligonucleotide
uguagucugcugguucgac

SEQ ID NO: 1133602 - RNA, 19 nt, Artificial Sequence
  Description of Artificial Sequence: Synthetic oligonucleotide
cugaugggaugaauuacaa

SEQ ID NO: 1133603 - RNA, 19 nt, Artificial Sequence
  Description of Artificial Sequence: Synthetic oligonucleotide
cuucacucgucaccugcug

SEQ ID NO: 1133604 - RNA, 19 nt, Artificial Sequence
  Description of Artificial Sequence: Synthetic oligonucleotide
acauucucuaauguuccua

SEQ ID NO: 1133605 - RNA, 19 nt, Artificial Sequence
  Description of Artificial Sequence: Synthetic oligonucleotide
augaagcacgccagccggc

SEQ ID NO: 1133606 - RNA, 19 nt, Artificial Sequence
  Description of Artificial Sequence: Synthetic oligonucleotide
gguguacuucuuuuaucac

SEQ ID NO: 1133607 - RNA, 19 nt, Artificial Sequence
  Description of Artificial Sequence: Synthetic oligonucleotide
acggaacccuucuuacgca

SEQ ID NO: 1133608 - RNA, 19 nt, Artificial Sequence
  Description of Artificial Sequence: Synthetic oligonucleotide
uacucgcuucugcaacaga

SEQ ID NO: 1133609 - RNA, 19 nt, Artificial Sequence
  Description of Artificial Sequence: Synthetic oligonucleotide
caccaaggagcccucagga

SEQ ID NO: 1133610 - RNA, 19 nt, Artificial Sequence
  Description of Artificial Sequence: Synthetic oligonucleotide
cuucugcaacagaguaaag

SEQ ID NO: 1133611 - RNA, 19 nt, Artificial Sequence
  Description of Artificial Sequence: Synthetic oligonucleotide
gguucauucuucaagacuu

SEQ ID NO: 1133612 - RNA, 19 nt, Artificial Sequence
  Description of Artificial Sequence: Synthetic oligonucleotide
agcugucgauguaaguuug

SEQ ID NO: 1133613 - RNA, 19 nt, Artificial Sequence
  Description of Artificial Sequence: Synthetic oligonucleotide
gcuucugcaacagaguaaa

SEQ ID NO: 1133614 - RNA, 19 nt, Artificial Sequence
  Description of Artificial Sequence: Synthetic oligonucleotide
ccuuguuugcuuaaccaga

SEQ ID NO: 1133615 - RNA, 19 nt, Artificial Sequence
  Description of Artificial Sequence: Synthetic oligonucleotide
uggauuuggcuggaagaua

SEQ ID NO: 1133616 - RNA, 19 nt, Artificial Sequence
  Description of Artificial Sequence: Synthetic oligonucleotide
aacccuucuuacgcauugu

SEQ ID NO: 1133617 - RNA, 19 nt, Artificial Sequence
  Description of Artificial Sequence: Synthetic oligonucleotide
cagaguuuacuuuccagau

SEQ ID NO: 1133618 - RNA, 19 nt, Artificial Sequence
  Description of Artificial Sequence: Synthetic oligonucleotide
uugucaggucaauccacuu

SEQ ID NO: 1133619 - RNA, 19 nt, Artificial Sequence
  Description of Artificial Sequence: Synthetic oligonucleotide
caaaccgucaucacuguuu

SEQ ID NO: 1133620 - RNA, 19 nt, Artificial Sequence
  Description of Artificial Sequence: Synthetic oligonucleotide
aguggccacccagaaauaa

SEQ ID NO: 1133621 - RNA, 19 nt, Artificial Sequence
  Description of Artificial Sequence: Synthetic oligonucleotide
aguuuuccacguguuugga

SEQ ID NO: 1133622 - RNA, 19 nt, Artificial Sequence
  Description of Artificial Sequence: Synthetic oligonucleotide
acauggcaguccauuuauc

SEQ ID NO: 1133623 - RNA, 19 nt, Artificial Sequence
  Description of Artificial Sequence: Synthetic oligonucleotide
gcugaugggaugaauuaca

SEQ ID NO: 1133624 - RNA, 19 nt, Artificial Sequence
  Description of Artificial Sequence: Synthetic oligonucleotide
uaccgugaggguguacuuc

SEQ ID NO: 1133625 - RNA, 19 nt, Artificial Sequence
  Description of Artificial Sequence: Synthetic oligonucleotide
ugguucgacuugacuucga

SEQ ID NO: 1133626 - RNA, 19 nt, Artificial Sequence
  Description of Artificial Sequence: Synthetic oligonucleotide
gagcugucgauguaaguuu

SEQ ID NO: 1133627 - RNA, 19 nt, Artificial Sequence
  Description of Artificial Sequence: Synthetic oligonucleotide
gaagauagguacagcacuu

SEQ ID NO: 1133628 - RNA, 19 nt, Artificial Sequence
  Description of Artificial Sequence: Synthetic oligonucleotide
gucaggggcgcuugccagc

SEQ ID NO: 1133629 - RNA, 19 nt, Artificial Sequence
  Description of Artificial Sequence: Synthetic oligonucleotide
acaaaccgucaucacuguu

SEQ ID NO: 1133630 - RNA, 19 nt, Artificial Sequence
  Description of Artificial Sequence: Synthetic oligonucleotide
gucuaguguuuauuauaaa

SEQ ID NO: 1133631 - RNA, 19 nt, Artificial Sequence
  Description of Artificial Sequence: Synthetic oligonucleotide
cugcaacagaguaaagcua

SEQ ID NO: 1133632 - RNA, 19 nt, Artificial Sequence
  Description of Artificial Sequence: Synthetic oligonucleotide
agauccacuguaguaucua

SEQ ID NO: 1133633 - RNA, 19 nt, Artificial Sequence
  Description of Artificial Sequence: Synthetic oligonucleotide
uugacuccguagacaguuu

SEQ ID NO: 1133634 - RNA, 19 nt, Artificial Sequence
  Description of Artificial Sequence: Synthetic oligonucleotide
gcuagauuugauguagaaa

SEQ ID NO: 1133635 - RNA, 19 nt, Artificial Sequence
  Description of Artificial Sequence: Synthetic oligonucleotide
ggcaaaaccacacgaaauu

SEQ ID NO: 1133636 - RNA, 19 nt, Artificial Sequence
  Description of Artificial Sequence: Synthetic oligonucleotide
uuuauccaccaagggcauc

SEQ ID NO: 1133637 - RNA, 19 nt, Artificial Sequence
  Description of Artificial Sequence: Synthetic oligonucleotide
auaccgugaggguguacuu

SEQ ID NO: 1133638 - RNA, 19 nt, Artificial Sequence
  Description of Artificial Sequence: Synthetic oligonucleotide
caacaaaagagcugucgau

SEQ ID NO: 1133639 - RNA, 19 nt, Artificial Sequence
  Description of Artificial Sequence: Synthetic oligonucleotide
gggaugaauuacaagugaa

SEQ ID NO: 1133640 - RNA, 19 nt, Artificial Sequence
  Description of Artificial Sequence: Synthetic oligonucleotide
gcuaguaccaaaccugaau

SEQ ID NO: 1133641 - RNA, 19 nt, Artificial Sequence
  Description of Artificial Sequence: Synthetic oligonucleotide
ggugguaaauuuugugggu

SEQ ID NO: 1133642 - RNA, 19 nt, Artificial Sequence
  Description of Artificial Sequence: Synthetic oligonucleotide
caggagcaaucauccuuac

SEQ ID NO: 1133643 - RNA, 19 nt, Artificial Sequence
  Description of Artificial Sequence: Synthetic oligonucleotide
gaagcacgccagccggcac

SEQ ID NO: 1133644 - RNA, 19 nt, Artificial Sequence
  Description of Artificial Sequence: Synthetic oligonucleotide
gaaacuguacugaucccuu

SEQ ID NO: 1133645 - RNA, 19 nt, Artificial Sequence
  Description of Artificial Sequence: Synthetic oligonucleotide
ggaucuaagccaugaacau

SEQ ID NO: 1133646 - RNA, 19 nt, Artificial Sequence
  Description of Artificial Sequence: Synthetic oligonucleotide
caggggacucaucuaggca

SEQ ID NO: 1133647 - RNA, 19 nt, Artificial Sequence
  Description of Artificial Sequence: Synthetic oligonucleotide
guggguguacugucccuuc

SEQ ID NO: 1133648 - RNA, 19 nt, Artificial Sequence
  Description of Artificial Sequence: Synthetic oligonucleotide
cuccguagacaguuugaaa

SEQ ID NO: 1133649 - RNA, 19 nt, Artificial Sequence
  Description of Artificial Sequence: Synthetic oligonucleotide
aguuuacuuuccagaucca

SEQ ID NO: 1133650 - RNA, 19 nt, Artificial Sequence
  Description of Artificial Sequence: Synthetic oligonucleotide
guagucugcugguucgacu

SEQ ID NO: 1133651 - RNA, 19 nt, Artificial Sequence
  Description of Artificial Sequence: Synthetic oligonucleotide
cugagucucaucuuccauu

SEQ ID NO: 1133652 - RNA, 19 nt, Artificial Sequence
  Description of Artificial Sequence: Synthetic oligonucleotide
cguuggauuuggcuggaag

SEQ ID NO: 1133653 - RNA, 19 nt, Artificial Sequence
  Description of Artificial Sequence: Synthetic oligonucleotide
gcaucggcggccgacgugc

SEQ ID NO: 1133654 - RNA, 19 nt, Artificial Sequence
  Description of Artificial Sequence: Synthetic oligonucleotide
ggacaauuucaacaguuuu

SEQ ID NO: 1133655 - RNA, 19 nt, Artificial Sequence
  Description of Artificial Sequence: Synthetic oligonucleotide
gccaugaacauucucuaau

SEQ ID NO: 1133656 - RNA, 19 nt, Artificial Sequence
  Description of Artificial Sequence: Synthetic oligonucleotide
uaguggccacccagaaaua

SEQ ID NO: 1133657 - RNA, 19 nt, Artificial Sequence
  Description of Artificial Sequence: Synthetic oligonucleotide
gaauguggggcgacuugaa

SEQ ID NO: 1133658 - RNA, 19 nt, Artificial Sequence
  Description of Artificial Sequence: Synthetic oligonucleotide
ccagccggcaccacauggc

SEQ ID NO: 1133659 - RNA, 19 nt, Artificial Sequence
  Description of Artificial Sequence: Synthetic oligonucleotide
ucuaggcaucggcggccga

SEQ ID NO: 1133660 - RNA, 19 nt, Artificial Sequence
  Description of Artificial Sequence: Synthetic oligonucleotide
cuuacgcauuguuucuagu

SEQ ID NO: 1133661 - RNA, 19 nt, Artificial Sequence
  Description of Artificial Sequence: Synthetic oligonucleotide
uggcaccacauggcagucc

SEQ ID NO: 1133662 - RNA, 19 nt, Artificial Sequence
  Description of Artificial Sequence: Synthetic oligonucleotide
guguuuggaucuaagccau

SEQ ID NO: 1133663 - RNA, 19 nt, Artificial Sequence
  Description of Artificial Sequence: Synthetic oligonucleotide
cguagacaguuugaaaaug

SEQ ID NO: 1133664 - RNA, 19 nt, Artificial Sequence
  Description of Artificial Sequence: Synthetic oligonucleotide
ucgucaccugcugcacuug

SEQ ID NO: 1133665 - RNA, 19 nt, Artificial Sequence
  Description of Artificial Sequence: Synthetic oligonucleotide
cuucaagacuucgauuccu

SEQ ID NO: 1133666 - RNA, 19 nt, Artificial Sequence
  Description of Artificial Sequence: Synthetic oligonucleotide
ggucaauccacuugucaau

SEQ ID NO: 1133667 - RNA, 19 nt, Artificial Sequence
  Description of Artificial Sequence: Synthetic oligonucleotide
cucgcuucugcaacagagu

SEQ ID NO: 1133668 - RNA, 19 nt, Artificial Sequence
  Description of Artificial Sequence: Synthetic oligonucleotide
ugauggucaccagcuuaua

SEQ ID NO: 1133669 - RNA, 19 nt, Artificial Sequence
  Description of Artificial Sequence: Synthetic oligonucleotide
gguaaauuuugugggugua

SEQ ID NO: 1133670 - RNA, 19 nt, Artificial Sequence
  Description of Artificial Sequence: Synthetic oligonucleotide
ggaugaauuacaagugaau

SEQ ID NO: 1133671 - RNA, 19 nt, Artificial Sequence
  Description of Artificial Sequence: Synthetic oligonucleotide
ccacguguuuggaucuaag

SEQ ID NO: 1133672 - RNA, 19 nt, Artificial Sequence
  Description of Artificial Sequence: Synthetic oligonucleotide
cacucgucaccugcugcac

SEQ ID NO: 1133673 - RNA, 19 nt, Artificial Sequence
  Description of Artificial Sequence: Synthetic oligonucleotide
cgacaauaccgugagggug

SEQ ID NO: 1133674 - RNA, 19 nt, Artificial Sequence
  Description of Artificial Sequence: Synthetic oligonucleotide
cugaccuacaggggacuca

SEQ ID NO: 1133675 - RNA, 19 nt, Artificial Sequence
  Description of Artificial Sequence: Synthetic oligonucleotide
ggaauaacgcagggucuuc

SEQ ID NO: 1133676 - RNA, 19 nt, Artificial Sequence
  Description of Artificial Sequence: Synthetic oligonucleotide
cagauccacuguaguaucu

SEQ ID NO: 1133677 - RNA, 19 nt, Artificial Sequence
  Description of Artificial Sequence: Synthetic oligonucleotide
ggccgacgugccucggacg

SEQ ID NO: 1133678 - RNA, 19 nt, Artificial Sequence
  Description of Artificial Sequence: Synthetic oligonucleotide
cacacaccggaaacaucaa

SEQ ID NO: 1133679 - RNA, 19 nt, Artificial Sequence
  Description of Artificial Sequence: Synthetic oligonucleotide
caucacaaugaugauuauu

SEQ ID NO: 1133680 - RNA, 19 nt, Artificial Sequence
  Description of Artificial Sequence: Synthetic oligonucleotide
caucggcggccgacgugcc

SEQ ID NO: 1133681 - RNA, 19 nt, Artificial Sequence
  Description of Artificial Sequence: Synthetic oligonucleotide
ccggaaacaucaacacuga

SEQ ID NO: 1133682 - RNA, 19 nt, Artificial Sequence
  Description of Artificial Sequence: Synthetic oligonucleotide
ggcgcuugccagcuccuuc

SEQ ID NO: 1133683 - RNA, 19 nt, Artificial Sequence
  Description of Artificial Sequence: Synthetic oligonucleotide
cacaaaccgucaucacugu

SEQ ID NO: 1133684 - RNA, 19 nt, Artificial Sequence
  Description of Artificial Sequence: Synthetic oligonucleotide
ugccucggacggaacccuu

SEQ ID NO: 1133685 - RNA, 19 nt, Artificial Sequence
  Description of Artificial Sequence: Synthetic oligonucleotide
aucggcggccgacgugccu

SEQ ID NO: 1133686 - RNA, 19 nt, Artificial Sequence
  Description of Artificial Sequence: Synthetic oligonucleotide
acaauaccgugagggugua

SEQ ID NO: 1133687 - RNA, 19 nt, Artificial Sequence
  Description of Artificial Sequence: Synthetic oligonucleotide
cggaaacaucaacacugag

SEQ ID NO: 1133688 - RNA, 19 nt, Artificial Sequence
  Description of Artificial Sequence: Synthetic oligonucleotide
caauaccgugaggguguac

SEQ ID NO: 1133689 - RNA, 19 nt, Artificial Sequence
  Description of Artificial Sequence: Synthetic oligonucleotide
gguucgacuugacuucgau

SEQ ID NO: 1133690 - RNA, 19 nt, Artificial Sequence
  Description of Artificial Sequence: Synthetic oligonucleotide
cucgucaccugcugcacuu

SEQ ID NO: 1133691 - RNA, 19 nt, Artificial Sequence
  Description of Artificial Sequence: Synthetic oligonucleotide
cgugccucggacggaaccc

SEQ ID NO: 1133692 - RNA, 19 nt, Artificial Sequence
  Description of Artificial Sequence: Synthetic oligonucleotide
cccuagggcaaacuagcaa

SEQ ID NO: 1133693 - RNA, 19 nt, Artificial Sequence
  Description of Artificial Sequence: Synthetic oligonucleotide
gacgugccucggacggaac

SEQ ID NO: 1133694 - RNA, 19 nt, Artificial Sequence
  Description of Artificial Sequence: Synthetic oligonucleotide
gaccuacaggggacucauc

SEQ ID NO: 1133695 - RNA, 19 nt, Artificial Sequence
  Description of Artificial Sequence: Synthetic oligonucleotide
gccucucuuggucuugacu

SEQ ID NO: 1133696 - RNA, 19 nt, Artificial Sequence
  Description of Artificial Sequence: Synthetic oligonucleotide
ccuacaggggacucaucua

SEQ ID NO: 1133697 - RNA, 19 nt, Artificial Sequence
  Description of Artificial Sequence: Synthetic oligonucleotide
ccguagacaguuugaaaau

SEQ ID NO: 1133698 - RNA, 19 nt, Artificial Sequence
  Description of Artificial Sequence: Synthetic oligonucleotide
gucagguuugugccauguu

SEQ ID NO: 1133699 - RNA, 19 nt, Artificial Sequence
  Description of Artificial Sequence: Synthetic oligonucleotide
gcacaaccgacaauaccgu

SEQ ID NO: 1133700 - RNA, 19 nt, Artificial Sequence
  Description of Artificial Sequence: Synthetic oligonucleotide
ccgacaauaccgugagggu

SEQ ID NO: 1133701 - RNA, 19 nt, Artificial Sequence
  Description of Artificial Sequence: Synthetic oligonucleotide
cgcuucugcaacagaguaa

SEQ ID NO: 1133702 - RNA, 19 nt, Artificial Sequence
  Description of Artificial Sequence: Synthetic oligonucleotide
gcuuauaggcacacaucuu

SEQ ID NO: 1133703 - RNA, 19 nt, Artificial Sequence
  Description of Artificial Sequence: Synthetic oligonucleotide
gugccucggacggaacccu

SEQ ID NO: 1133704 - RNA, 19 nt, Artificial Sequence
  Description of Artificial Sequence: Synthetic oligonucleotide
cccuucuuacgcauuguuu

SEQ ID NO: 1133705 - RNA, 19 nt, Artificial Sequence
  Description of Artificial Sequence: Synthetic oligonucleotide
ccuuaaucagcaccaucuu

SEQ ID NO: 1133706 - RNA, 19 nt, Artificial Sequence
  Description of Artificial Sequence: Synthetic oligonucleotide
gccucggacggaacccuuc

SEQ ID NO: 1133707 - RNA, 19 nt, Artificial Sequence
  Description of Artificial Sequence: Synthetic oligonucleotide
cggccgacgugccucggac

SEQ ID NO: 1133708 - RNA, 19 nt, Artificial Sequence
  Description of Artificial Sequence: Synthetic oligonucleotide
caaugucuauguggacaau

SEQ ID NO: 1133709 - RNA, 19 nt, Artificial Sequence
  Description of Artificial Sequence: Synthetic oligonucleotide
caggggcgcuugccagcuc

SEQ ID NO: 1133710 - RNA, 19 nt, Artificial Sequence
  Description of Artificial Sequence: Synthetic oligonucleotide
gcggccgacgugccucgga

SEQ ID NO: 1133711 - RNA, 19 nt, Artificial Sequence
  Description of Artificial Sequence: Synthetic oligonucleotide
cucggacggaacccuucuu

SEQ ID NO: 1133712 - RNA, 19 nt, Artificial Sequence
  Description of Artificial Sequence: Synthetic oligonucleotide
ccccucacuuggccuugac

SEQ ID NO: 1133713 - RNA, 19 nt, Artificial Sequence
  Description of Artificial Sequence: Synthetic oligonucleotide
ccucggacggaacccuucu

SEQ ID NO: 1133714 - RNA, 19 nt, Artificial Sequence
  Description of Artificial Sequence: Synthetic oligonucleotide
ggaacccuucuuacgcauu

SEQ ID NO: 1133715 - RNA, 19 nt, Artificial Sequence
  Description of Artificial Sequence: Synthetic oligonucleotide
ccuugacuccguagacagu

SEQ ID NO: 1133716 - RNA, 19 nt, Artificial Sequence
  Description of Artificial Sequence: Synthetic oligonucleotide
ggcggccgacgugccucgg

SEQ ID NO: 1133717 - RNA, 19 nt, Artificial Sequence
  Description of Artificial Sequence: Synthetic oligonucleotide
cggaacccuucuuacgcau

SEQ ID NO: 1133718 - RNA, 19 nt, Artificial Sequence
  Description of Artificial Sequence: Synthetic oligonucleotide
cgacgugccucggacggaa

SEQ ID NO: 1133719 - RNA, 19 nt, Artificial Sequence
  Description of Artificial Sequence: Synthetic oligonucleotide
ccccaccccuagggcaaac

SEQ ID NO: 1133720 - RNA, 19 nt, Artificial Sequence
  Description of Artificial Sequence: Synthetic oligonucleotide
ccgacgugccucggacgga

SEQ ID NO: 1133721 - RNA, 19 nt, Artificial Sequence
  Description of Artificial Sequence: Synthetic oligonucleotide
cccaccccuagggcaaacu

SEQ ID NO: 1133722 - RNA, 19 nt, Artificial Sequence
  Description of Artificial Sequence: Synthetic oligonucleotide
ccgugaggguguacuucuu

SEQ ID NO: 1133723 - RNA, 19 nt, Artificial Sequence
  Description of Artificial Sequence: Synthetic oligonucleotide
aaguuuauaaauuuccgac

SEQ ID NO: 1133724 - RNA, 19 nt, Artificial Sequence
  Description of Artificial Sequence: Synthetic oligonucleotide
aauacacaaccauaagacc

SEQ ID NO: 1133725 - RNA, 19 nt, Artificial Sequence
  Description of Artificial Sequence: Synthetic oligonucleotide
acuacuaaaccucaaaauc

SEQ ID NO: 1133726 - RNA, 19 nt, Artificial Sequence
  Description of Artificial Sequence: Synthetic oligonucleotide
uagcagauaaggaagaggg

SEQ ID NO: 1133727 - RNA, 19 nt, Artificial Sequence
  Description of Artificial Sequence: Synthetic oligonucleotide
cauaccaagggucagaugg

SEQ ID NO: 1133728 - RNA, 19 nt, Artificial Sequence
  Description of Artificial Sequence: Synthetic oligonucleotide
aauacaugaucucugccgg

SEQ ID NO: 1133729 - RNA, 19 nt, Artificial Sequence
  Description of Artificial Sequence: Synthetic oligonucleotide
uaaaguuuauaaauuuccg

SEQ ID NO: 1133730 - RNA, 19 nt, Artificial Sequence
  Description of Artificial Sequence: Synthetic oligonucleotide
ugcuuuaugaccuauguca

SEQ ID NO: 1133731 - RNA, 19 nt, Artificial Sequence
  Description of Artificial Sequence: Synthetic oligonucleotide
aacacauaauacuuucccg

SEQ ID NO: 1133732 - RNA, 19 nt, Artificial Sequence
  Description of Artificial Sequence: Synthetic oligonucleotide
aacauggaguggcugaacc

SEQ ID NO: 1133733 - RNA, 19 nt, Artificial Sequence
  Description of Artificial Sequence: Synthetic oligonucleotide
uauguguacacacacacac

SEQ ID NO: 1133734 - RNA, 19 nt, Artificial Sequence
  Description of Artificial Sequence: Synthetic oligonucleotide
cacauuauaaggauaaaac

SEQ ID NO: 1133735 - RNA, 19 nt, Artificial Sequence
  Description of Artificial Sequence: Synthetic oligonucleotide
aaugaggcagagaaaauac

SEQ ID NO: 1133736 - RNA, 19 nt, Artificial Sequence
  Description of Artificial Sequence: Synthetic oligonucleotide
aauacugcauaccucccuc

SEQ ID NO: 1133737 - RNA, 19 nt, Artificial Sequence
  Description of Artificial Sequence: Synthetic oligonucleotide
accuacuacagcuagcuac

SEQ ID NO: 1133738 - RNA, 19 nt, Artificial Sequence
  Description of Artificial Sequence: Synthetic oligonucleotide
uggaagaacaaccaugcug

SEQ ID NO: 1133739 - RNA, 19 nt, Artificial Sequence
  Description of Artificial Sequence: Synthetic oligonucleotide
aaugcuuuaugaccuaugu

SEQ ID NO: 1133740 - RNA, 19 nt, Artificial Sequence
  Description of Artificial Sequence: Synthetic oligonucleotide
uguacacacacacacacac

SEQ ID NO: 1133741 - RNA, 19 nt, Artificial Sequence
  Description of Artificial Sequence: Synthetic oligonucleotide
acauuauaaggauaaaaca

SEQ ID NO: 1133742 - RNA, 19 nt, Artificial Sequence
  Description of Artificial Sequence: Synthetic oligonucleotide
aacuacaggacgcuacaac

SEQ ID NO: 1133743 - RNA, 19 nt, Artificial Sequence
  Description of Artificial Sequence: Synthetic oligonucleotide
uaguguacagucuaugugc

SEQ ID NO: 1133744 - RNA, 19 nt, Artificial Sequence
  Description of Artificial Sequence: Synthetic oligonucleotide
cuagcuacuacuacuaaac

SEQ ID NO: 1133745 - RNA, 19 nt, Artificial Sequence
  Description of Artificial Sequence: Synthetic oligonucleotide
ucaaaaggcuccauuagga

SEQ ID NO: 1133746 - RNA, 19 nt, Artificial Sequence
  Description of Artificial Sequence: Synthetic oligonucleotide
aauacccaaacaccuauga

SEQ ID NO: 1133747 - RNA, 19 nt, Artificial Sequence
  Description of Artificial Sequence: Synthetic oligonucleotide
aguaccaagucaucaaguc

SEQ ID NO: 1133748 - RNA, 19 nt, Artificial Sequence
  Description of Artificial Sequence: Synthetic oligonucleotide
uguguacacacacacacac

SEQ ID NO: 1133749 - RNA, 19 nt, Artificial Sequence
  Description of Artificial Sequence: Synthetic oligonucleotide
ugcuaugaaacacauaaua

SEQ ID NO: 1133750 - RNA, 19 nt, Artificial Sequence
  Description of Artificial Sequence: Synthetic oligonucleotide
cuuaggacggcugagagag

SEQ ID NO: 1133751 - RNA, 19 nt, Artificial Sequence
  Description of Artificial Sequence: Synthetic oligonucleotide
uuuaugaccuaugucaaug

SEQ ID NO: 1133752 - RNA, 19 nt, Artificial Sequence
  Description of Artificial Sequence: Synthetic oligonucleotide
aaagcgaggcucucgggcg

SEQ ID NO: 1133753 - RNA, 19 nt, Artificial Sequence
  Description of Artificial Sequence: Synthetic oligonucleotide
ucugcaauccccaugcuaa

SEQ ID NO: 1133754 - RNA, 19 nt, Artificial Sequence
  Description of Artificial Sequence: Synthetic oligonucleotide
uacacacacacacacacac

SEQ ID NO: 1133755 - RNA, 19 nt, Artificial Sequence
  Description of Artificial Sequence: Synthetic oligonucleotide
ugggucuacaagaauacug

SEQ ID NO: 1133756 - RNA, 19 nt, Artificial Sequence
  Description of Artificial Sequence: Synthetic oligonucleotide
gacaaugagcaguugagac

SEQ ID NO: 1133757 - RNA, 19 nt, Artificial Sequence
  Description of Artificial Sequence: Synthetic oligonucleotide
aguuuauaaauuuccgacu

SEQ ID NO: 1133758 - RNA, 19 nt, Artificial Sequence
  Description of Artificial Sequence: Synthetic oligonucleotide
guuacugaagcgcagagga

SEQ ID NO: 1133759 - RNA, 19 nt, Artificial Sequence
  Description of Artificial Sequence: Synthetic oligonucleotide
gacaaugagacuagcauug

SEQ ID NO: 1133760 - RNA, 19 nt, Artificial Sequence
  Description of Artificial Sequence: Synthetic oligonucleotide
augauuccgucucaccugc

SEQ ID NO: 1133761 - RNA, 19 nt, Artificial Sequence
  Description of Artificial Sequence: Synthetic oligonucleotide
agugggaccuacuacagcu

SEQ ID NO: 1133762 - RNA, 19 nt, Artificial Sequence
  Description of Artificial Sequence: Synthetic oligonucleotide
acuacagcuagcuacuacu

SEQ ID NO: 1133763 - RNA, 19 nt, Artificial Sequence
  Description of Artificial Sequence: Synthetic oligonucleotide
uuugaaacuccaaugcuuu

SEQ ID NO: 1133764 - RNA, 19 nt, Artificial Sequence
  Description of Artificial Sequence: Synthetic oligonucleotide
cuacuaaaccucaaaauca

SEQ ID NO: 1133765 - RNA, 19 nt, Artificial Sequence
  Description of Artificial Sequence: Synthetic oligonucleotide
augagacuagcauuguauc

SEQ ID NO: 1133766 - RNA, 19 nt, Artificial Sequence
  Description of Artificial Sequence: Synthetic oligonucleotide
agguuuguggacaaugagc

SEQ ID NO: 1133767 - RNA, 19 nt, Artificial Sequence
  Description of Artificial Sequence: Synthetic oligonucleotide
aaugagacuagcauuguau

SEQ ID NO: 1133768 - RNA, 19 nt, Artificial Sequence
  Description of Artificial Sequence: Synthetic oligonucleotide
uuaggaauguggcacccgc

SEQ ID NO: 1133769 - RNA, 19 nt, Artificial Sequence
  Description of Artificial Sequence: Synthetic oligonucleotide
agcuauagcagauaaggaa

SEQ ID NO: 1133770 - RNA, 19 nt, Artificial Sequence
  Description of Artificial Sequence: Synthetic oligonucleotide
acuacaggacgcuacaaca

SEQ ID NO: 1133771 - RNA, 19 nt, Artificial Sequence
  Description of Artificial Sequence: Synthetic oligonucleotide
uaugugcgcaggaacgacg

SEQ ID NO: 1133772 - RNA, 19 nt, Artificial Sequence
  Description of Artificial Sequence: Synthetic oligonucleotide
gcagcuauagcagauaagg

SEQ ID NO: 1133773 - RNA, 19 nt, Artificial Sequence
  Description of Artificial Sequence: Synthetic oligonucleotide
ucacaggucaaaaggcucc

SEQ ID NO: 1133774 - RNA, 19 nt, Artificial Sequence
  Description of Artificial Sequence: Synthetic oligonucleotide
acacauucaguaaagcuuc

SEQ ID NO: 1133775 - RNA, 19 nt, Artificial Sequence
  Description of Artificial Sequence: Synthetic oligonucleotide
agcuacuacuacuaaaccu

SEQ ID NO: 1133776 - RNA, 19 nt, Artificial Sequence
  Description of Artificial Sequence: Synthetic oligonucleotide
aaagaacuaugucucucca

SEQ ID NO: 1133777 - RNA, 19 nt, Artificial Sequence
  Description of Artificial Sequence: Synthetic oligonucleotide
ugucugaaccaccuuggag

SEQ ID NO: 1133778 - RNA, 19 nt, Artificial Sequence
  Description of Artificial Sequence: Synthetic oligonucleotide
cauaagaccacccacaacu

SEQ ID NO: 1133779 - RNA, 19 nt, Artificial Sequence
  Description of Artificial Sequence: Synthetic oligonucleotide
uacuacuaaaccucaaaau

SEQ ID NO: 1133780 - RNA, 19 nt, Artificial Sequence
  Description of Artificial Sequence: Synthetic oligonucleotide
aacaccuaugaagggaauc

SEQ ID NO: 1133781 - RNA, 19 nt, Artificial Sequence
  Description of Artificial Sequence: Synthetic oligonucleotide
gcugcuaugaaacacauaa

SEQ ID NO: 1133782 - RNA, 19 nt, Artificial Sequence
  Description of Artificial Sequence: Synthetic oligonucleotide
aggugguccccuuaggacg

SEQ ID NO: 1133783 - RNA, 19 nt, Artificial Sequence
  Description of Artificial Sequence: Synthetic oligonucleotide
aagauccugacgaggaagg

SEQ ID NO: 1133784 - RNA, 19 nt, Artificial Sequence
  Description of Artificial Sequence: Synthetic oligonucleotide
agggucaugggcugauucc

SEQ ID NO: 1133785 - RNA, 19 nt, Artificial Sequence
  Description of Artificial Sequence: Synthetic oligonucleotide
uguacagucuaugugcgca

SEQ ID NO: 1133786 - RNA, 19 nt, Artificial Sequence
  Description of Artificial Sequence: Synthetic oligonucleotide
auaauacuuucccguuccc

SEQ ID NO: 1133787 - RNA, 19 nt, Artificial Sequence
  Description of Artificial Sequence: Synthetic oligonucleotide
cauuauaaggauaaaacau

SEQ ID NO: 1133788 - RNA, 19 nt, Artificial Sequence
  Description of Artificial Sequence: Synthetic oligonucleotide
acagcuagcuacuacuacu

SEQ ID NO: 1133789 - RNA, 19 nt, Artificial Sequence
  Description of Artificial Sequence: Synthetic oligonucleotide
gacgcuacaacagaagcac

SEQ ID NO: 1133790 - RNA, 19 nt, Artificial Sequence
  Description of Artificial Sequence: Synthetic oligonucleotide
aacgacgcggcuccuggcg

SEQ ID NO: 1133791 - RNA, 19 nt, Artificial Sequence
  Description of Artificial Sequence: Synthetic oligonucleotide
acgaggaagggucauggag

SEQ ID NO: 1133792 - RNA, 19 nt, Artificial Sequence
  Description of Artificial Sequence: Synthetic oligonucleotide
acaaugagcaguugagaca

SEQ ID NO: 1133793 - RNA, 19 nt, Artificial Sequence
  Description of Artificial Sequence: Synthetic oligonucleotide
gaaccaaggggaaaccagg

SEQ ID NO: 1133794 - RNA, 19 nt, Artificial Sequence
  Description of Artificial Sequence: Synthetic oligonucleotide
agaggccagacacccaggc

SEQ ID NO: 1133795 - RNA, 19 nt, Artificial Sequence
  Description of Artificial Sequence: Synthetic oligonucleotide
uguuaggugcccacaacac

SEQ ID NO: 1133796 - RNA, 19 nt, Artificial Sequence
  Description of Artificial Sequence: Synthetic oligonucleotide
aaugucuccccucccgucu

SEQ ID NO: 1133797 - RNA, 19 nt, Artificial Sequence
  Description of Artificial Sequence: Synthetic oligonucleotide
auauacagagcacaucaaa

SEQ ID NO: 1133798 - RNA, 19 nt, Artificial Sequence
  Description of Artificial Sequence: Synthetic oligonucleotide
ccauuauucacauuauaag

SEQ ID NO: 1133799 - RNA, 19 nt, Artificial Sequence
  Description of Artificial Sequence: Synthetic oligonucleotide
auacugcauaccucccucc

SEQ ID NO: 1133800 - RNA, 19 nt, Artificial Sequence
  Description of Artificial Sequence: Synthetic oligonucleotide
aagaacaaccaugcugcuc

SEQ ID NO: 1133801 - RNA, 19 nt, Artificial Sequence
  Description of Artificial Sequence: Synthetic oligonucleotide
gaagauccugacgaggaag

SEQ ID NO: 1133802 - RNA, 19 nt, Artificial Sequence
  Description of Artificial Sequence: Synthetic oligonucleotide
acuacuacuaaaccucaaa

SEQ ID NO: 1133803 - RNA, 19 nt, Artificial Sequence
  Description of Artificial Sequence: Synthetic oligonucleotide
uguuacugaagcgcagagg

SEQ ID NO: 1133804 - RNA, 19 nt, Artificial Sequence
  Description of Artificial Sequence: Synthetic oligonucleotide
uggaggcaauacaugaucu

SEQ ID NO: 1133805 - RNA, 19 nt, Artificial Sequence
  Description of Artificial Sequence: Synthetic oligonucleotide
uacaacagaagcaccgguc

SEQ ID NO: 1133806 - RNA, 19 nt, Artificial Sequence
  Description of Artificial Sequence: Synthetic oligonucleotide
agcgcagaggaaauaaaac

SEQ ID NO: 1133807 - RNA, 19 nt, Artificial Sequence
  Description of Artificial Sequence: Synthetic oligonucleotide
gcuauagcagauaaggaag

SEQ ID NO: 1133808 - RNA, 19 nt, Artificial Sequence
  Description of Artificial Sequence: Synthetic oligonucleotide
ccuaaugggagccagcagg

SEQ ID NO: 1133809 - RNA, 19 nt, Artificial Sequence
  Description of Artificial Sequence: Synthetic oligonucleotide
ucuucaaauuugagauaag

SEQ ID NO: 1133810 - RNA, 19 nt, Artificial Sequence
  Description of Artificial Sequence: Synthetic oligonucleotide
uagcuacuacuacuaaacc

SEQ ID NO: 1133811 - RNA, 19 nt, Artificial Sequence
  Description of Artificial Sequence: Synthetic oligonucleotide
ucgggcgucagcaaucucu

SEQ ID NO: 1133812 - RNA, 19 nt, Artificial Sequence
  Description of Artificial Sequence: Synthetic oligonucleotide
ugacaaugagacuagcauu

SEQ ID NO: 1133813 - RNA, 19 nt, Artificial Sequence
  Description of Artificial Sequence: Synthetic oligonucleotide
auauugugcaagguuuccg

SEQ ID NO: 1133814 - RNA, 19 nt, Artificial Sequence
  Description of Artificial Sequence: Synthetic oligonucleotide
uacaggacgcuacaacaga

SEQ ID NO: 1133815 - RNA, 19 nt, Artificial Sequence
  Description of Artificial Sequence: Synthetic oligonucleotide
cuacaggacgcuacaacag

SEQ ID NO: 1133816 - RNA, 19 nt, Artificial Sequence
  Description of Artificial Sequence: Synthetic oligonucleotide
auacuggagguuuguggac

SEQ ID NO: 1133817 - RNA, 19 nt, Artificial Sequence
  Description of Artificial Sequence: Synthetic oligonucleotide
agaaagucucauuugccaa

SEQ ID NO: 1133818 - RNA, 19 nt, Artificial Sequence
  Description of Artificial Sequence: Synthetic oligonucleotide
aauuugagauaagugcaaa

SEQ ID NO: 1133819 - RNA, 19 nt, Artificial Sequence
  Description of Artificial Sequence: Synthetic oligonucleotide
ugggaccuacuacagcuag

SEQ ID NO: 1133820 - RNA, 19 nt, Artificial Sequence
  Description of Artificial Sequence: Synthetic oligonucleotide
aaauuugagauaagugcaa

SEQ ID NO: 1133821 - RNA, 19 nt, Artificial Sequence
  Description of Artificial Sequence: Synthetic oligonucleotide
aagaggugguccccuuagg

SEQ ID NO: 1133822 - RNA, 19 nt, Artificial Sequence
  Description of Artificial Sequence: Synthetic oligonucleotide
caugauuccgucucaccug

SEQ ID NO: 1133823 - RNA, 19 nt, Artificial Sequence
  Description of Artificial Sequence: Synthetic oligonucleotide
acuaugucucuccauugcu

SEQ ID NO: 1133824 - RNA, 19 nt, Artificial Sequence
  Description of Artificial Sequence: Synthetic oligonucleotide
gagagaaccaaggggaaac

SEQ ID NO: 1133825 - RNA, 19 nt, Artificial Sequence
  Description of Artificial Sequence: Synthetic oligonucleotide
uaugaccuaugucaauguc

SEQ ID NO: 1133826 - RNA, 19 nt, Artificial Sequence
  Description of Artificial Sequence: Synthetic oligonucleotide
aagaccacccacaacuaca

SEQ ID NO: 1133827 - RNA, 19 nt, Artificial Sequence
  Description of Artificial Sequence: Synthetic oligonucleotide
aggcacauauugugcaagg

SEQ ID NO: 1133828 - RNA, 19 nt, Artificial Sequence
  Description of Artificial Sequence: Synthetic oligonucleotide
uccauugcuucuuucuuaa

SEQ ID NO: 1133829 - RNA, 19 nt, Artificial Sequence
  Description of Artificial Sequence: Synthetic oligonucleotide
aguguacagucuaugugcg

SEQ ID NO: 1133830 - RNA, 19 nt, Artificial Sequence
  Description of Artificial Sequence: Synthetic oligonucleotide
guuaggugcccacaacacc

SEQ ID NO: 1133831 - RNA, 19 nt, Artificial Sequence
  Description of Artificial Sequence: Synthetic oligonucleotide
aagaacuaugucucuccau

SEQ ID NO: 1133832 - RNA, 19 nt, Artificial Sequence
  Description of Artificial Sequence: Synthetic oligonucleotide
ucauaguguacagucuaug

SEQ ID NO: 1133833 - RNA, 19 nt, Artificial Sequence
  Description of Artificial Sequence: Synthetic oligonucleotide
gaggaagauccugacgagg

SEQ ID NO: 1133834 - RNA, 19 nt, Artificial Sequence
  Description of Artificial Sequence: Synthetic oligonucleotide
agugguacaggaaacaauu

SEQ ID NO: 1133835 - RNA, 19 nt, Artificial Sequence
  Description of Artificial Sequence: Synthetic oligonucleotide
uaagaccacccacaacuac

SEQ ID NO: 1133836 - RNA, 19 nt, Artificial Sequence
  Description of Artificial Sequence: Synthetic oligonucleotide
caggagccgaccuaauggg

SEQ ID NO: 1133837 - RNA, 19 nt, Artificial Sequence
  Description of Artificial Sequence: Synthetic oligonucleotide
uacagcuagcuacuacuac

SEQ ID NO: 1133838 - RNA, 19 nt, Artificial Sequence
  Description of Artificial Sequence: Synthetic oligonucleotide
agagaaccaaggggaaacc

SEQ ID NO: 1133839 - RNA, 19 nt, Artificial Sequence
  Description of Artificial Sequence: Synthetic oligonucleotide
ugcgggauuugaaacucca

SEQ ID NO: 1133840 - RNA, 19 nt, Artificial Sequence
  Description of Artificial Sequence: Synthetic oligonucleotide
ugaagcgcagaggaaauaa

SEQ ID NO: 1133841 - RNA, 19 nt, Artificial Sequence
  Description of Artificial Sequence: Synthetic oligonucleotide
auccugacgaggaaggguc

SEQ ID NO: 1133842 - RNA, 19 nt, Artificial Sequence
  Description of Artificial Sequence: Synthetic oligonucleotide
aauuuccgacuggaagaac

SEQ ID NO: 1133843 - RNA, 19 nt, Artificial Sequence
  Description of Artificial Sequence: Synthetic oligonucleotide
caaccauaagaccacccac

SEQ ID NO: 1133844 - RNA, 19 nt, Artificial Sequence
  Description of Artificial Sequence: Synthetic oligonucleotide
acaccuaugaagggaauca

SEQ ID NO: 1133845 - RNA, 19 nt, Artificial Sequence
  Description of Artificial Sequence: Synthetic oligonucleotide
uacuacagcuagcuacuac

SEQ ID NO: 1133846 - RNA, 19 nt, Artificial Sequence
  Description of Artificial Sequence: Synthetic oligonucleotide
ugccaagcaccgcugcagg

SEQ ID NO: 1133847 - RNA, 19 nt, Artificial Sequence
  Description of Artificial Sequence: Synthetic oligonucleotide
aggucaaaaggcuccauua

SEQ ID NO: 1133848 - RNA, 19 nt, Artificial Sequence
  Description of Artificial Sequence: Synthetic oligonucleotide
uaugucaaugucuccccuc

SEQ ID NO: 1133849 - RNA, 19 nt, Artificial Sequence
  Description of Artificial Sequence: Synthetic oligonucleotide
gguuuguggacaaugagca

SEQ ID NO: 1133850 - RNA, 19 nt, Artificial Sequence
  Description of Artificial Sequence: Synthetic oligonucleotide
guugagacaugauuccguc

SEQ ID NO: 1133851 - RNA, 19 nt, Artificial Sequence
  Description of Artificial Sequence: Synthetic oligonucleotide
uuuccgacuggaagaacaa

SEQ ID NO: 1133852 - RNA, 19 nt, Artificial Sequence
  Description of Artificial Sequence: Synthetic oligonucleotide
uagcauuguaucugcccag

SEQ ID NO: 1133853 - RNA, 19 nt, Artificial Sequence
  Description of Artificial Sequence: Synthetic oligonucleotide
uucauaguguacagucuau

SEQ ID NO: 1133854 - RNA, 19 nt, Artificial Sequence
  Description of Artificial Sequence: Synthetic oligonucleotide
cuauagcagauaaggaaga

SEQ ID NO: 1133855 - RNA, 19 nt, Artificial Sequence
  Description of Artificial Sequence: Synthetic oligonucleotide
cauuguaucugcccagguc

SEQ ID NO: 1133856 - RNA, 19 nt, Artificial Sequence
  Description of Artificial Sequence: Synthetic oligonucleotide
acggaggaagauccugacg

SEQ ID NO: 1133857 - RNA, 19 nt, Artificial Sequence
  Description of Artificial Sequence: Synthetic oligonucleotide
uugugcaagguuuccguuc

SEQ ID NO: 1133858 - RNA, 19 nt, Artificial Sequence
  Description of Artificial Sequence: Synthetic oligonucleotide
gaggugguccccuuaggac

SEQ ID NO: 1133859 - RNA, 19 nt, Artificial Sequence
  Description of Artificial Sequence: Synthetic oligonucleotide
uaauacuuucccguucccu

SEQ ID NO: 1133860 - RNA, 19 nt, Artificial Sequence
  Description of Artificial Sequence: Synthetic oligonucleotide
auaccucccuccugaagag

SEQ ID NO: 1133861 - RNA, 19 nt, Artificial Sequence
  Description of Artificial Sequence: Synthetic oligonucleotide
augugcgcaggaacgacgc

SEQ ID NO: 1133862 - RNA, 19 nt, Artificial Sequence
  Description of Artificial Sequence: Synthetic oligonucleotide
cuacuacuaaaccucaaaa

SEQ ID NO: 1133863 - RNA, 19 nt, Artificial Sequence
  Description of Artificial Sequence: Synthetic oligonucleotide
ucuaugugcgcaggaacga

SEQ ID NO: 1133864 - RNA, 19 nt, Artificial Sequence
  Description of Artificial Sequence: Synthetic oligonucleotide
auacuuucccguucccuca

SEQ ID NO: 1133865 - RNA, 19 nt, Artificial Sequence
  Description of Artificial Sequence: Synthetic oligonucleotide
gaagagcaugcacuggaga

SEQ ID NO: 1133866 - RNA, 19 nt, Artificial Sequence
  Description of Artificial Sequence: Synthetic oligonucleotide
gucucaccugcucaacagg

SEQ ID NO: 1133867 - RNA, 19 nt, Artificial Sequence
  Description of Artificial Sequence: Synthetic oligonucleotide
ugcgcaggaacgacgcggc

SEQ ID NO: 1133868 - RNA, 19 nt, Artificial Sequence
  Description of Artificial Sequence: Synthetic oligonucleotide
gggucuacaagaauacugc

SEQ ID NO: 1133869 - RNA, 19 nt, Artificial Sequence
  Description of Artificial Sequence: Synthetic oligonucleotide
acacaucucucacacgcgu

SEQ ID NO: 1133870 - RNA, 19 nt, Artificial Sequence
  Description of Artificial Sequence: Synthetic oligonucleotide
ggcaauacaugaucucugc

SEQ ID NO: 1133871 - RNA, 19 nt, Artificial Sequence
  Description of Artificial Sequence: Synthetic oligonucleotide
auuaggaauguggcacccg

SEQ ID NO: 1133872 - RNA, 19 nt, Artificial Sequence
  Description of Artificial Sequence: Synthetic oligonucleotide
agacaugauuccgucucac

SEQ ID NO: 1133873 - RNA, 19 nt, Artificial Sequence
  Description of Artificial Sequence: Synthetic oligonucleotide
aagcgcagaggaaauaaaa

SEQ ID NO: 1133874 - RNA, 19 nt, Artificial Sequence
  Description of Artificial Sequence: Synthetic oligonucleotide
acauggaguggcugaacca

SEQ ID NO: 1133875 - RNA, 19 nt, Artificial Sequence
  Description of Artificial Sequence: Synthetic oligonucleotide
gaggugacaaugagacuag

SEQ ID NO: 1133876 - RNA, 19 nt, Artificial Sequence
  Description of Artificial Sequence: Synthetic oligonucleotide
ccuggcgggaggaugaugg

SEQ ID NO: 1133877 - RNA, 19 nt, Artificial Sequence
  Description of Artificial Sequence: Synthetic oligonucleotide
ugccauuauucacauuaua

SEQ ID NO: 1133878 - RNA, 19 nt, Artificial Sequence
  Description of Artificial Sequence: Synthetic oligonucleotide
cuauuucggcagcuguuag

SEQ ID NO: 1133879 - RNA, 19 nt, Artificial Sequence
  Description of Artificial Sequence: Synthetic oligonucleotide
augagcaguugagacauga

SEQ ID NO: 1133880 - RNA, 19 nt, Artificial Sequence
  Description of Artificial Sequence: Synthetic oligonucleotide
caggacgcuacaacagaag

SEQ ID NO: 1133881 - RNA, 19 nt, Artificial Sequence
  Description of Artificial Sequence: Synthetic oligonucleotide
cuguuaggugcccacaaca

SEQ ID NO: 1133882 - RNA, 19 nt, Artificial Sequence
  Description of Artificial Sequence: Synthetic oligonucleotide
ugugcgcaggaacgacgcg

SEQ ID NO: 1133883 - RNA, 19 nt, Artificial Sequence
  Description of Artificial Sequence: Synthetic oligonucleotide
caugaucucugccgggcag

SEQ ID NO: 1133884 - RNA, 19 nt, Artificial Sequence
  Description of Artificial Sequence: Synthetic oligonucleotide
guacagucuaugugcgcag

SEQ ID NO: 1133885 - RNA, 19 nt, Artificial Sequence
  Description of Artificial Sequence: Synthetic oligonucleotide
cacccacaacuacaggacg

SEQ ID NO: 1133886 - RNA, 19 nt, Artificial Sequence
  Description of Artificial Sequence: Synthetic oligonucleotide
cacacacacacacacaucu

SEQ ID NO: 1133887 - RNA, 19 nt, Artificial Sequence
  Description of Artificial Sequence: Synthetic oligonucleotide
aguugagacaugauuccgu

SEQ ID NO: 1133888 - RNA, 19 nt, Artificial Sequence
  Description of Artificial Sequence: Synthetic oligonucleotide
guaucugcccaggucauac

SEQ ID NO: 1133889 - RNA, 19 nt, Artificial Sequence
  Description of Artificial Sequence: Synthetic oligonucleotide
accucaaaaucagaacaca

SEQ ID NO: 1133890 - RNA, 19 nt, Artificial Sequence
  Description of Artificial Sequence: Synthetic oligonucleotide
acacacacacacaucucuc

SEQ ID NO: 1133891 - RNA, 19 nt, Artificial Sequence
  Description of Artificial Sequence: Synthetic oligonucleotide
ugucuuggacaggugcucc

SEQ ID NO: 1133892 - RNA, 19 nt, Artificial Sequence
  Description of Artificial Sequence: Synthetic oligonucleotide
gagccgaccuaaugggagc

SEQ ID NO: 1133893 - RNA, 19 nt, Artificial Sequence
  Description of Artificial Sequence: Synthetic oligonucleotide
cauuaggaauguggcaccc

SEQ ID NO: 1133894 - RNA, 19 nt, Artificial Sequence
  Description of Artificial Sequence: Synthetic oligonucleotide
cagaugguaacagaauaca

SEQ ID NO: 1133895 - RNA, 19 nt, Artificial Sequence
  Description of Artificial Sequence: Synthetic oligonucleotide
uuacugaagcgcagaggaa

SEQ ID NO: 1133896 - RNA, 19 nt, Artificial Sequence
  Description of Artificial Sequence: Synthetic oligonucleotide
gauaaggaagagggcugcc

SEQ ID NO: 1133897 - RNA, 19 nt, Artificial Sequence
  Description of Artificial Sequence: Synthetic oligonucleotide
gcgcagaggaaauaaaaca

SEQ ID NO: 1133898 - RNA, 19 nt, Artificial Sequence
  Description of Artificial Sequence: Synthetic oligonucleotide
gacggaggaagauccugac

SEQ ID NO: 1133899 - RNA, 19 nt, Artificial Sequence
  Description of Artificial Sequence: Synthetic oligonucleotide
ugagcaguugagacaugau

SEQ ID NO: 1133900 - RNA, 19 nt, Artificial Sequence
  Description of Artificial Sequence: Synthetic oligonucleotide
agggucauggaggugacaa

SEQ ID NO: 1133901 - RNA, 19 nt, Artificial Sequence
  Description of Artificial Sequence: Synthetic oligonucleotide
ugaucucugccgggcaggg

SEQ ID NO: 1133902 - RNA, 19 nt, Artificial Sequence
  Description of Artificial Sequence: Synthetic oligonucleotide
aaccaaggggaaaccagga

SEQ ID NO: 1133903 - RNA, 19 nt, Artificial Sequence
  Description of Artificial Sequence: Synthetic oligonucleotide
ggaacgacgcggcuccugg

SEQ ID NO: 1133904 - RNA, 19 nt, Artificial Sequence
  Description of Artificial Sequence: Synthetic oligonucleotide
cauaguguacagucuaugu

SEQ ID NO: 1133905 - RNA, 19 nt, Artificial Sequence
  Description of Artificial Sequence: Synthetic oligonucleotide
gacuguggagggacggagg

SEQ ID NO: 1133906 - RNA, 19 nt, Artificial Sequence
  Description of Artificial Sequence: Synthetic oligonucleotide
gaccuaaugggagccagca

SEQ ID NO: 1133907 - RNA, 19 nt, Artificial Sequence
  Description of Artificial Sequence: Synthetic oligonucleotide
accuaaugggagccagcag

SEQ ID NO: 1133908 - RNA, 19 nt, Artificial Sequence
  Description of Artificial Sequence: Synthetic oligonucleotide
gaggcaauacaugaucucu

SEQ ID NO: 1133909 - RNA, 19 nt, Artificial Sequence
  Description of Artificial Sequence: Synthetic oligonucleotide
gugcgcaggaacgacgcgg

SEQ ID NO: 1133910 - RNA, 19 nt, Artificial Sequence
  Description of Artificial Sequence: Synthetic oligonucleotide
ucauaccaagggucagaug

SEQ ID NO: 1133911 - RNA, 19 nt, Artificial Sequence
  Description of Artificial Sequence: Synthetic oligonucleotide
agggcugcgggauuugaaa

SEQ ID NO: 1133912 - RNA, 19 nt, Artificial Sequence
  Description of Artificial Sequence: Synthetic oligonucleotide
gagacaagagguggucccc

SEQ ID NO: 1133913 - RNA, 19 nt, Artificial Sequence
  Description of Artificial Sequence: Synthetic oligonucleotide
augaucucugccgggcagg

SEQ ID NO: 1133914 - RNA, 19 nt, Artificial Sequence
  Description of Artificial Sequence: Synthetic oligonucleotide
uuaggacggcugagagagg

SEQ ID NO: 1133915 - RNA, 19 nt, Artificial Sequence
  Description of Artificial Sequence: Synthetic oligonucleotide
caggucauaccaaggguca

SEQ ID NO: 1133916 - RNA, 19 nt, Artificial Sequence
  Description of Artificial Sequence: Synthetic oligonucleotide
aagagggcugccaggaaaa

SEQ ID NO: 1133917 - RNA, 19 nt, Artificial Sequence
  Description of Artificial Sequence: Synthetic oligonucleotide
accuaugaagggaaucaug

SEQ ID NO: 1133918 - RNA, 19 nt, Artificial Sequence
  Description of Artificial Sequence: Synthetic oligonucleotide
gccauuauucacauuauaa

SEQ ID NO: 1133919 - RNA, 19 nt, Artificial Sequence
  Description of Artificial Sequence: Synthetic oligonucleotide
gcaauacaugaucucugcc

SEQ ID NO: 1133920 - RNA, 19 nt, Artificial Sequence
  Description of Artificial Sequence: Synthetic oligonucleotide
uuguaucugcccaggucau

SEQ ID NO: 1133921 - RNA, 19 nt, Artificial Sequence
  Description of Artificial Sequence: Synthetic oligonucleotide
uuccggaaguggggaaucg

SEQ ID NO: 1133922 - RNA, 19 nt, Artificial Sequence
  Description of Artificial Sequence: Synthetic oligonucleotide
aggcaauacaugaucucug

SEQ ID NO: 1133923 - RNA, 19 nt, Artificial Sequence
  Description of Artificial Sequence: Synthetic oligonucleotide
gcuacaacagaagcaccgg

SEQ ID NO: 1133924 - RNA, 19 nt, Artificial Sequence
  Description of Artificial Sequence: Synthetic oligonucleotide
uggcugcuaugaaacacau

SEQ ID NO: 1133925 - RNA, 19 nt, Artificial Sequence
  Description of Artificial Sequence: Synthetic oligonucleotide
augggcugauuccggaagu

SEQ ID NO: 1133926 - RNA, 19 nt, Artificial Sequence
  Description of Artificial Sequence: Synthetic oligonucleotide
ucaugggcugauuccggaa

SEQ ID NO: 1133927 - RNA, 19 nt, Artificial Sequence
  Description of Artificial Sequence: Synthetic oligonucleotide
cacacacacacaucucuca

SEQ ID NO: 1133928 - RNA, 19 nt, Artificial Sequence
  Description of Artificial Sequence: Synthetic oligonucleotide
uugaaacuccaaugcuuua

SEQ ID NO: 1133929 - RNA, 19 nt, Artificial Sequence
  Description of Artificial Sequence: Synthetic oligonucleotide
ggcgucagcaaucucuuca

SEQ ID NO: 1133930 - RNA, 19 nt, Artificial Sequence
  Description of Artificial Sequence: Synthetic oligonucleotide
guaccaagucaucaagucu

SEQ ID NO: 1133931 - RNA, 19 nt, Artificial Sequence
  Description of Artificial Sequence: Synthetic oligonucleotide
gaaaauacuggagguuugu

SEQ ID NO: 1133932 - RNA, 19 nt, Artificial Sequence
  Description of Artificial Sequence: Synthetic oligonucleotide
cacauauacagagcacauc

SEQ ID NO: 1133933 - RNA, 19 nt, Artificial Sequence
  Description of Artificial Sequence: Synthetic oligonucleotide
acuaaaccucaaaaucaga

SEQ ID NO: 1133934 - RNA, 19 nt, Artificial Sequence
  Description of Artificial Sequence: Synthetic oligonucleotide
aauccccaugcuaaauaaa

SEQ ID NO: 1133935 - RNA, 19 nt, Artificial Sequence
  Description of Artificial Sequence: Synthetic oligonucleotide
acaugaucucugccgggca

SEQ ID NO: 1133936 - RNA, 19 nt, Artificial Sequence
  Description of Artificial Sequence: Synthetic oligonucleotide
gcaggaacgacgcggcucc

SEQ ID NO: 1133937 - RNA, 19 nt, Artificial Sequence
  Description of Artificial Sequence: Synthetic oligonucleotide
accgcugcaggagccgacc

SEQ ID NO: 1133938 - RNA, 19 nt, Artificial Sequence
  Description of Artificial Sequence: Synthetic oligonucleotide
ccaggucauaccaaggguc

SEQ ID NO: 1133939 - RNA, 19 nt, Artificial Sequence
  Description of Artificial Sequence: Synthetic oligonucleotide
cauauacagagcacaucaa

SEQ ID NO: 1133940 - RNA, 19 nt, Artificial Sequence
  Description of Artificial Sequence: Synthetic oligonucleotide
caagucaucaagucuuccu

SEQ ID NO: 1133941 - RNA, 19 nt, Artificial Sequence
  Description of Artificial Sequence: Synthetic oligonucleotide
cugcauaccucccuccuga

SEQ ID NO: 1133942 - RNA, 19 nt, Artificial Sequence
  Description of Artificial Sequence: Synthetic oligonucleotide
acgcuacaacagaagcacc

SEQ ID NO: 1133943 - RNA, 19 nt, Artificial Sequence
  Description of Artificial Sequence: Synthetic oligonucleotide
ggaaucggagcagugguac

SEQ ID NO: 1133944 - RNA, 19 nt, Artificial Sequence
  Description of Artificial Sequence: Synthetic oligonucleotide
gaaucggagcagugguaca

SEQ ID NO: 1133945 - RNA, 19 nt, Artificial Sequence
  Description of Artificial Sequence: Synthetic oligonucleotide
aagcgaggcucucgggcgu

SEQ ID NO: 1133946 - RNA, 19 nt, Artificial Sequence
  Description of Artificial Sequence: Synthetic oligonucleotide
gggucaugggcugauuccg

SEQ ID NO: 1133947 - RNA, 19 nt, Artificial Sequence
  Description of Artificial Sequence: Synthetic oligonucleotide
caucucucacacgcgugcg

SEQ ID NO: 1133948 - RNA, 19 nt, Artificial Sequence
  Description of Artificial Sequence: Synthetic oligonucleotide
ucucacacgcgugcgugca

SEQ ID NO: 1133949 - RNA, 19 nt, Artificial Sequence
  Description of Artificial Sequence: Synthetic oligonucleotide
guguacagucuaugugcgc

SEQ ID NO: 1133950 - RNA, 19 nt, Artificial Sequence
  Description of Artificial Sequence: Synthetic oligonucleotide
ccaagggucagaugguaac

SEQ ID NO: 1133951 - RNA, 19 nt, Artificial Sequence
  Description of Artificial Sequence: Synthetic oligonucleotide
acacacacacacacacauc

SEQ ID NO: 1133952 - RNA, 19 nt, Artificial Sequence
  Description of Artificial Sequence: Synthetic oligonucleotide
ccauuaggaauguggcacc

SEQ ID NO: 1133953 - RNA, 19 nt, Artificial Sequence
  Description of Artificial Sequence: Synthetic oligonucleotide
acacacacacacacaucuc

SEQ ID NO: 1133954 - RNA, 19 nt, Artificial Sequence
  Description of Artificial Sequence: Synthetic oligonucleotide
acaaugagacuagcauugu

SEQ ID NO: 1133955 - RNA, 19 nt, Artificial Sequence
  Description of Artificial Sequence: Synthetic oligonucleotide
uggaggugacaaugagacu

SEQ ID NO: 1133956 - RNA, 19 nt, Artificial Sequence
  Description of Artificial Sequence: Synthetic oligonucleotide
caaccaugcugcuccccag

SEQ ID NO: 1133957 - RNA, 19 nt, Artificial Sequence
  Description of Artificial Sequence: Synthetic oligonucleotide
cugcgggauuugaaacucc

SEQ ID NO: 1133958 - RNA, 19 nt, Artificial Sequence
  Description of Artificial Sequence: Synthetic oligonucleotide
gacuagcauuguaucugcc

SEQ ID NO: 1133959 - RNA, 19 nt, Artificial Sequence
  Description of Artificial Sequence: Synthetic oligonucleotide
ggagccgaccuaaugggag

SEQ ID NO: 1133960 - RNA, 19 nt, Artificial Sequence
  Description of Artificial Sequence: Synthetic oligonucleotide
aggacgggcagcaaccacu

SEQ ID NO: 1133961 - RNA, 19 nt, Artificial Sequence
  Description of Artificial Sequence: Synthetic oligonucleotide
cuaugugcgcaggaacgac

SEQ ID NO: 1133962 - RNA, 19 nt, Artificial Sequence
  Description of Artificial Sequence: Synthetic oligonucleotide
gagcagugguacaggaaac

SEQ ID NO: 1133963 - RNA, 19 nt, Artificial Sequence
  Description of Artificial Sequence: Synthetic oligonucleotide
aucucucacacgcgugcgu

SEQ ID NO: 1133964 - RNA, 19 nt, Artificial Sequence
  Description of Artificial Sequence: Synthetic oligonucleotide
cacacacacacacacacau

SEQ ID NO: 1133965 - RNA, 19 nt, Artificial Sequence
  Description of Artificial Sequence: Synthetic oligonucleotide
cacacacacacacaucucu

SEQ ID NO: 1133966 - RNA, 19 nt, Artificial Sequence
  Description of Artificial Sequence: Synthetic oligonucleotide
gcuagcuacuacuacuaaa

SEQ ID NO: 1133967 - RNA, 19 nt, Artificial Sequence
  Description of Artificial Sequence: Synthetic oligonucleotide
caaugucuccccucccguc

SEQ ID NO: 1133968 - RNA, 19 nt, Artificial Sequence
  Description of Artificial Sequence: Synthetic oligonucleotide
ggaggcaauacaugaucuc

SEQ ID NO: 1133969 - RNA, 19 nt, Artificial Sequence
  Description of Artificial Sequence: Synthetic oligonucleotide
cucucgggcgucagcaauc

SEQ ID NO: 1133970 - RNA, 19 nt, Artificial Sequence
  Description of Artificial Sequence: Synthetic oligonucleotide
agcuagcuacuacuacuaa

SEQ ID NO: 1133971 - RNA, 19 nt, Artificial Sequence
  Description of Artificial Sequence: Synthetic oligonucleotide
ggugguccccuuaggacgg

SEQ ID NO: 1133972 - RNA, 19 nt, Artificial Sequence
  Description of Artificial Sequence: Synthetic oligonucleotide
ugcaauccccaugcuaaau

SEQ ID NO: 1133973 - RNA, 19 nt, Artificial Sequence
  Description of Artificial Sequence: Synthetic oligonucleotide
uuccgacuggaagaacaac

SEQ ID NO: 1133974 - RNA, 19 nt, Artificial Sequence
  Description of Artificial Sequence: Synthetic oligonucleotide
auguguacacacacacaca

SEQ ID NO: 1133975 - RNA, 19 nt, Artificial Sequence
  Description of Artificial Sequence: Synthetic oligonucleotide
aggucauaccaagggucag

SEQ ID NO: 1133976 - RNA, 19 nt, Artificial Sequence
  Description of Artificial Sequence: Synthetic oligonucleotide
gaagcgcagaggaaauaaa

SEQ ID NO: 1133977 - RNA, 19 nt, Artificial Sequence
  Description of Artificial Sequence: Synthetic oligonucleotide
gcucccugggucuugucug

SEQ ID NO: 1133978 - RNA, 19 nt, Artificial Sequence
  Description of Artificial Sequence: Synthetic oligonucleotide
auaccaagggucagauggu

SEQ ID NO: 1133979 - RNA, 19 nt, Artificial Sequence
  Description of Artificial Sequence: Synthetic oligonucleotide
gaacgacgcggcuccuggc

SEQ ID NO: 1133980 - RNA, 19 nt, Artificial Sequence
  Description of Artificial Sequence: Synthetic oligonucleotide
acugaagcgcagaggaaau

SEQ ID NO: 1133981 - RNA, 19 nt, Artificial Sequence
  Description of Artificial Sequence: Synthetic oligonucleotide
ucucgggcgucagcaaucu

SEQ ID NO: 1133982 - RNA, 19 nt, Artificial Sequence
  Description of Artificial Sequence: Synthetic oligonucleotide
uccccuuaggacggcugag

SEQ ID NO: 1133983 - RNA, 19 nt, Artificial Sequence
  Description of Artificial Sequence: Synthetic oligonucleotide
cagaagcaccggucagugc

SEQ ID NO: 1133984 - RNA, 19 nt, Artificial Sequence
  Description of Artificial Sequence: Synthetic oligonucleotide
gauccugacgaggaagggu

SEQ ID NO: 1133985 - RNA, 19 nt, Artificial Sequence
  Description of Artificial Sequence: Synthetic oligonucleotide
cugauuccggaagugggga

SEQ ID NO: 1133986 - RNA, 19 nt, Artificial Sequence
  Description of Artificial Sequence: Synthetic oligonucleotide
cagcuagcuacuacuacua

SEQ ID NO: 1133987 - RNA, 19 nt, Artificial Sequence
  Description of Artificial Sequence: Synthetic oligonucleotide
acccaggccaaagaacuau

SEQ ID NO: 1133988 - RNA, 19 nt, Artificial Sequence
  Description of Artificial Sequence: Synthetic oligonucleotide
ccaaggcacauauugugca

SEQ ID NO: 1133989 - RNA, 19 nt, Artificial Sequence
  Description of Artificial Sequence: Synthetic oligonucleotide
uaccaagggucagauggua

SEQ ID NO: 1133990 - RNA, 19 nt, Artificial Sequence
  Description of Artificial Sequence: Synthetic oligonucleotide
ggagguuuguggacaauga

SEQ ID NO: 1133991 - RNA, 19 nt, Artificial Sequence
  Description of Artificial Sequence: Synthetic oligonucleotide
gaaagcuauuucggcagcu

SEQ ID NO: 1133992 - RNA, 19 nt, Artificial Sequence
  Description of Artificial Sequence: Synthetic oligonucleotide
caaugagacuagcauugua

SEQ ID NO: 1133993 - RNA, 19 nt, Artificial Sequence
  Description of Artificial Sequence: Synthetic oligonucleotide
ugcauaccucccuccugaa

SEQ ID NO: 1133994 - RNA, 19 nt, Artificial Sequence
  Description of Artificial Sequence: Synthetic oligonucleotide
ugauuccgucucaccugcu

SEQ ID NO: 1133995 - RNA, 19 nt, Artificial Sequence
  Description of Artificial Sequence: Synthetic oligonucleotide
auaagaccacccacaacua

SEQ ID NO: 1133996 - RNA, 19 nt, Artificial Sequence
  Description of Artificial Sequence: Synthetic oligonucleotide
gaggcucucgggcgucagc

SEQ ID NO: 1133997 - RNA, 19 nt, Artificial Sequence
  Description of Artificial Sequence: Synthetic oligonucleotide
guacacacacacacacaca

SEQ ID NO: 1133998 - RNA, 19 nt, Artificial Sequence
  Description of Artificial Sequence: Synthetic oligonucleotide
ggacgcuacaacagaagca

SEQ ID NO: 1133999 - RNA, 19 nt, Artificial Sequence
  Description of Artificial Sequence: Synthetic oligonucleotide
gcaugcacuggagacaaga

SEQ ID NO: 1134000 - RNA, 19 nt, Artificial Sequence
  Description of Artificial Sequence: Synthetic oligonucleotide
acacacacacacacacaca

SEQ ID NO: 1134001 - RNA, 19 nt, Artificial Sequence
  Description of Artificial Sequence: Synthetic oligonucleotide
gggucagaugguaacagaa

SEQ ID NO: 1134002 - RNA, 19 nt, Artificial Sequence
  Description of Artificial Sequence: Synthetic oligonucleotide
gggcugcgggauuugaaac

SEQ ID NO: 1134003 - RNA, 19 nt, Artificial Sequence
  Description of Artificial Sequence: Synthetic oligonucleotide
cugacgaggaagggucaug

SEQ ID NO: 1134004 - RNA, 19 nt, Artificial Sequence
  Description of Artificial Sequence: Synthetic oligonucleotide
cuccguuuucuucaacucu

SEQ ID NO: 1134005 - RNA, 19 nt, Artificial Sequence
  Description of Artificial Sequence: Synthetic oligonucleotide
gcuuuaugaccuaugucaa

SEQ ID NO: 1134006 - RNA, 19 nt, Artificial Sequence
  Description of Artificial Sequence: Synthetic oligonucleotide
uaccucccuccugaagagc

SEQ ID NO: 1134007 - RNA, 19 nt, Artificial Sequence
  Description of Artificial Sequence: Synthetic oligonucleotide
gcuguuaggugcccacaac

SEQ ID NO: 1134008 - RNA, 19 nt, Artificial Sequence
  Description of Artificial Sequence: Synthetic oligonucleotide
guguacacacacacacaca

SEQ ID NO: 1134009 - RNA, 19 nt, Artificial Sequence
  Description of Artificial Sequence: Synthetic oligonucleotide
cccuuaggacggcugagag

SEQ ID NO: 1134010 - RNA, 19 nt, Artificial Sequence
  Description of Artificial Sequence: Synthetic oligonucleotide
gcaauccccaugcuaaaua

SEQ ID NO: 1134011 - RNA, 19 nt, Artificial Sequence
  Description of Artificial Sequence: Synthetic oligonucleotide
cacagguggcugcccuccg

SEQ ID NO: 1134012 - RNA, 19 nt, Artificial Sequence
  Description of Artificial Sequence: Synthetic oligonucleotide
cuuuaugaccuaugucaau

SEQ ID NO: 1134013 - RNA, 19 nt, Artificial Sequence
  Description of Artificial Sequence: Synthetic oligonucleotide
cuacaacagaagcaccggu

SEQ ID NO: 1134014 - RNA, 19 nt, Artificial Sequence
  Description of Artificial Sequence: Synthetic oligonucleotide
uccgucucaccugcucaac

SEQ ID NO: 1134015 - RNA, 19 nt, Artificial Sequence
  Description of Artificial Sequence: Synthetic oligonucleotide
ggaccuacuacagcuagcu

SEQ ID NO: 1134016 - RNA, 19 nt, Artificial Sequence
  Description of Artificial Sequence: Synthetic oligonucleotide
ccaagcaccgcugcaggag

SEQ ID NO: 1134017 - RNA, 19 nt, Artificial Sequence
  Description of Artificial Sequence: Synthetic oligonucleotide
cgugcgugcacacagugca

SEQ ID NO: 1134018 - RNA, 19 nt, Artificial Sequence
  Description of Artificial Sequence: Synthetic oligonucleotide
gauuccggaaguggggaau

SEQ ID NO: 1134019 - RNA, 19 nt, Artificial Sequence
  Description of Artificial Sequence: Synthetic oligonucleotide
gcugcgggauuugaaacuc

SEQ ID NO: 1134020 - RNA, 19 nt, Artificial Sequence
  Description of Artificial Sequence: Synthetic oligonucleotide
ugucuccccucccgucuuc

SEQ ID NO: 1134021 - RNA, 19 nt, Artificial Sequence
  Description of Artificial Sequence: Synthetic oligonucleotide
ggagggacggaggaagauc

SEQ ID NO: 1134022 - RNA, 19 nt, Artificial Sequence
  Description of Artificial Sequence: Synthetic oligonucleotide
ggucauaccaagggucaga

SEQ ID NO: 1134023 - RNA, 19 nt, Artificial Sequence
  Description of Artificial Sequence: Synthetic oligonucleotide
ccuacuacagcuagcuacu

SEQ ID NO: 1134024 - RNA, 19 nt, Artificial Sequence
  Description of Artificial Sequence: Synthetic oligonucleotide
ccauaagaccacccacaac

SEQ ID NO: 1134025 - RNA, 19 nt, Artificial Sequence
  Description of Artificial Sequence: Synthetic oligonucleotide
ugcccuccguuuucuucaa

SEQ ID NO: 1134026 - RNA, 19 nt, Artificial Sequence
  Description of Artificial Sequence: Synthetic oligonucleotide
ggucacucugcaaucccca

SEQ ID NO: 1134027 - RNA, 19 nt, Artificial Sequence
  Description of Artificial Sequence: Synthetic oligonucleotide
gaccuacuacagcuagcua

SEQ ID NO: 1134028 - RNA, 19 nt, Artificial Sequence
  Description of Artificial Sequence: Synthetic oligonucleotide
gucauaccaagggucagau

SEQ ID NO: 1134029 - RNA, 19 nt, Artificial Sequence
  Description of Artificial Sequence: Synthetic oligonucleotide
gcuauuucggcagcuguua

SEQ ID NO: 1134030 - RNA, 19 nt, Artificial Sequence
  Description of Artificial Sequence: Synthetic oligonucleotide
cucacacgcgugcgugcac

SEQ ID NO: 1134031 - RNA, 19 nt, Artificial Sequence
  Description of Artificial Sequence: Synthetic oligonucleotide
cucccugggucuugucuga

SEQ ID NO: 1134032 - RNA, 19 nt, Artificial Sequence
  Description of Artificial Sequence: Synthetic oligonucleotide
accacagagcgggguugag

SEQ ID NO: 1134033 - RNA, 19 nt, Artificial Sequence
  Description of Artificial Sequence: Synthetic oligonucleotide
gcagugguacaggaaacaa

SEQ ID NO: 1134034 - RNA, 19 nt, Artificial Sequence
  Description of Artificial Sequence: Synthetic oligonucleotide
cugcaauccccaugcuaaa

SEQ ID NO: 1134035 - RNA, 19 nt, Artificial Sequence
  Description of Artificial Sequence: Synthetic oligonucleotide
gggaccuacuacagcuagc

SEQ ID NO: 1134036 - RNA, 19 nt, Artificial Sequence
  Description of Artificial Sequence: Synthetic oligonucleotide
ggcugccaagcaccgcugc

SEQ ID NO: 1134037 - RNA, 19 nt, Artificial Sequence
  Description of Artificial Sequence: Synthetic oligonucleotide
ggcugcgggauuugaaacu

SEQ ID NO: 1134038 - RNA, 19 nt, Artificial Sequence
  Description of Artificial Sequence: Synthetic oligonucleotide
ggucuugucugaaccaccu

SEQ ID NO: 1134039 - RNA, 19 nt, Artificial Sequence
  Description of Artificial Sequence: Synthetic oligonucleotide
caacuacaggacgcuacaa

SEQ ID NO: 1134040 - RNA, 19 nt, Artificial Sequence
  Description of Artificial Sequence: Synthetic oligonucleotide
ccgaccuaaugggagccag

SEQ ID NO: 1134041 - RNA, 19 nt, Artificial Sequence
  Description of Artificial Sequence: Synthetic oligonucleotide
cagggcugcgggauuugaa

SEQ ID NO: 1134042 - RNA, 19 nt, Artificial Sequence
  Description of Artificial Sequence: Synthetic oligonucleotide
ccuuaggacggcugagaga

SEQ ID NO: 1134043 - RNA, 19 nt, Artificial Sequence
  Description of Artificial Sequence: Synthetic oligonucleotide
gugcaagguuuccguucca

SEQ ID NO: 1134044 - RNA, 19 nt, Artificial Sequence
  Description of Artificial Sequence: Synthetic oligonucleotide
gugcgugcacacagugcac

SEQ ID NO: 1134045 - RNA, 19 nt, Artificial Sequence
  Description of Artificial Sequence: Synthetic oligonucleotide
gguccccuuaggacggcug

SEQ ID NO: 1134046 - RNA, 19 nt, Artificial Sequence
  Description of Artificial Sequence: Synthetic oligonucleotide
agggacggaggaagauccu

SEQ ID NO: 1134047 - RNA, 19 nt, Artificial Sequence
  Description of Artificial Sequence: Synthetic oligonucleotide
ucccugggucuugucugaa

SEQ ID NO: 1134048 - RNA, 19 nt, Artificial Sequence
  Description of Artificial Sequence: Synthetic oligonucleotide
ggucagaugguaacagaau

SEQ ID NO: 1134049 - RNA, 19 nt, Artificial Sequence
  Description of Artificial Sequence: Synthetic oligonucleotide
cgaccuaaugggagccagc

SEQ ID NO: 1134050 - RNA, 19 nt, Artificial Sequence
  Description of Artificial Sequence: Synthetic oligonucleotide
ggcacauauugugcaaggu

SEQ ID NO: 1134051 - RNA, 19 nt, Artificial Sequence
  Description of Artificial Sequence: Synthetic oligonucleotide
cugaagcgcagaggaaaua

SEQ ID NO: 1134052 - RNA, 19 nt, Artificial Sequence
  Description of Artificial Sequence: Synthetic oligonucleotide
cccuccguuuucuucaacu

SEQ ID NO: 1134053 - RNA, 19 nt, Artificial Sequence
  Description of Artificial Sequence: Synthetic oligonucleotide
cugggucuacaagaauacu

SEQ ID NO: 1134054 - RNA, 19 nt, Artificial Sequence
  Description of Artificial Sequence: Synthetic oligonucleotide
cucgggcgucagcaaucuc

SEQ ID NO: 1134055 - RNA, 19 nt, Artificial Sequence
  Description of Artificial Sequence: Synthetic oligonucleotide
ggaggacgggcagcaacca

SEQ ID NO: 1134056 - RNA, 19 nt, Artificial Sequence
  Description of Artificial Sequence: Synthetic oligonucleotide
cuacuacagcuagcuacua

SEQ ID NO: 1134057 - RNA, 19 nt, Artificial Sequence
  Description of Artificial Sequence: Synthetic oligonucleotide
ucugccgggcagggccuuc

SEQ ID NO: 1134058 - RNA, 19 nt, Artificial Sequence
  Description of Artificial Sequence: Synthetic oligonucleotide
agcaccggucagugccauu

SEQ ID NO: 1134059 - RNA, 19 nt, Artificial Sequence
  Description of Artificial Sequence: Synthetic oligonucleotide
gacgcggcuccuggcggga

SEQ ID NO: 1134060 - RNA, 19 nt, Artificial Sequence
  Description of Artificial Sequence: Synthetic oligonucleotide
agcaaccacuggaggcaau

SEQ ID NO: 1134061 - RNA, 19 nt, Artificial Sequence
  Description of Artificial Sequence: Synthetic oligonucleotide
cgcgugcgugcacacagug

SEQ ID NO: 1134062 - RNA, 19 nt, Artificial Sequence
  Description of Artificial Sequence: Synthetic oligonucleotide
ccgucucaccugcucaaca

SEQ ID NO: 1134063 - RNA, 19 nt, Artificial Sequence
  Description of Artificial Sequence: Synthetic oligonucleotide
gugguccccuuaggacggc

SEQ ID NO: 1134064 - RNA, 19 nt, Artificial Sequence
  Description of Artificial Sequence: Synthetic oligonucleotide
gggaaucggagcaguggua

SEQ ID NO: 1134065 - RNA, 19 nt, Artificial Sequence
  Description of Artificial Sequence: Synthetic oligonucleotide
cgacgcggcuccuggcggg

SEQ ID NO: 1134066 - RNA, 19 nt, Artificial Sequence
  Description of Artificial Sequence: Synthetic oligonucleotide
gggcgucagcaaucucuuc

SEQ ID NO: 1134067 - RNA, 19 nt, Artificial Sequence
  Description of Artificial Sequence: Synthetic oligonucleotide
cgcaggaacgacgcggcuc

SEQ ID NO: 1134068 - RNA, 19 nt, Artificial Sequence
  Description of Artificial Sequence: Synthetic oligonucleotide
cugcuccccagugggcaga

SEQ ID NO: 1134069 - RNA, 19 nt, Artificial Sequence
  Description of Artificial Sequence: Synthetic oligonucleotide
gcucucgggcgucagcaau

SEQ ID NO: 1134070 - RNA, 19 nt, Artificial Sequence
  Description of Artificial Sequence: Synthetic oligonucleotide
ggcugcuaugaaacacaua

SEQ ID NO: 1134071 - RNA, 19 nt, Artificial Sequence
  Description of Artificial Sequence: Synthetic oligonucleotide
cugccgggcagggccuuca

SEQ ID NO: 1134072 - RNA, 19 nt, Artificial Sequence
  Description of Artificial Sequence: Synthetic oligonucleotide
gcccuccguuuucuucaac

SEQ ID NO: 1134073 - RNA, 19 nt, Artificial Sequence
  Description of Artificial Sequence: Synthetic oligonucleotide
ccccuuaggacggcugaga

SEQ ID NO: 1134074 - RNA, 19 nt, Artificial Sequence
  Description of Artificial Sequence: Synthetic oligonucleotide
cccacaacuacaggacgcu

SEQ ID NO: 1134075 - RNA, 19 nt, Artificial Sequence
  Description of Artificial Sequence: Synthetic oligonucleotide
gccgaccuaaugggagcca

SEQ ID NO: 1134076 - RNA, 19 nt, Artificial Sequence
  Description of Artificial Sequence: Synthetic oligonucleotide
gcggcuccuggcgggagga

SEQ ID NO: 1134077 - RNA, 19 nt, Artificial Sequence
  Description of Artificial Sequence: Synthetic oligonucleotide
gcaccgcugcaggagccga

SEQ ID NO: 1134078 - RNA, 19 nt, Artificial Sequence
  Description of Artificial Sequence: Synthetic oligonucleotide
caccggucagugccauuau

SEQ ID NO: 1134079 - RNA, 19 nt, Artificial Sequence
  Description of Artificial Sequence: Synthetic oligonucleotide
ccacaacuacaggacgcua

SEQ ID NO: 1134080 - RNA, 19 nt, Artificial Sequence
  Description of Artificial Sequence: Synthetic oligonucleotide
cgacuggaagaacaaccau

SEQ ID NO: 1134081 - RNA, 19 nt, Artificial Sequence
  Description of Artificial Sequence: Synthetic oligonucleotide
gcgaggcucucgggcguca

SEQ ID NO: 1134082 - RNA, 19 nt, Artificial Sequence
  Description of Artificial Sequence: Synthetic oligonucleotide
gcgcaggaacgacgcggcu

SEQ ID NO: 1134083 - RNA, 19 nt, Artificial Sequence
  Description of Artificial Sequence: Synthetic oligonucleotide
ugugcuaucacucugagca

SEQ ID NO: 1134084 - RNA, 19 nt, Artificial Sequence
  Description of Artificial Sequence: Synthetic oligonucleotide
aaguauaugguaaacauac

SEQ ID NO: 1134085 - RNA, 19 nt, Artificial Sequence
  Description of Artificial Sequence: Synthetic oligonucleotide
auuaaaaccgucucaacac

SEQ ID NO: 1134086 - RNA, 19 nt, Artificial Sequence
  Description of Artificial Sequence: Synthetic oligonucleotide
uguaacaugagacauuccc

SEQ ID NO: 1134087 - RNA, 19 nt, Artificial Sequence
  Description of Artificial Sequence: Synthetic oligonucleotide
guaacuauuuagcugaagg

SEQ ID NO: 1134088 - RNA, 19 nt, Artificial Sequence
  Description of Artificial Sequence: Synthetic oligonucleotide
uguccuagaaauauaagug

SEQ ID NO: 1134089 - RNA, 19 nt, Artificial Sequence
  Description of Artificial Sequence: Synthetic oligonucleotide
acauagauuggcuuaaaac

SEQ ID NO: 1134090 - RNA, 19 nt, Artificial Sequence
  Description of Artificial Sequence: Synthetic oligonucleotide
aaauauaaguggccuuucc

SEQ ID NO: 1134091 - RNA, 19 nt, Artificial Sequence
  Description of Artificial Sequence: Synthetic oligonucleotide
aauuuaauaauguggucca

SEQ ID NO: 1134092 - RNA, 19 nt, Artificial Sequence
  Description of Artificial Sequence: Synthetic oligonucleotide
uguugcaugccauaguugg

SEQ ID NO: 1134093 - RNA, 19 nt, Artificial Sequence
  Description of Artificial Sequence: Synthetic oligonucleotide
uaaacgguuauaaaaguga

SEQ ID NO: 1134094 - RNA, 19 nt, Artificial Sequence
  Description of Artificial Sequence: Synthetic oligonucleotide
uguugauuggccuccaugg

SEQ ID NO: 1134095 - RNA, 19 nt, Artificial Sequence
  Description of Artificial Sequence: Synthetic oligonucleotide
ugguaaacgguuauaaaag

SEQ ID NO: 1134096 - RNA, 19 nt, Artificial Sequence
  Description of Artificial Sequence: Synthetic oligonucleotide
  modified_base (3)..(3): a, c, u, g, unknown or other
canaagaaccacaaggacc

SEQ ID NO: 1134097 - RNA, 19 nt, Artificial Sequence
  Description of Artificial Sequence: Synthetic oligonucleotide
  modified_base (2)..(2): a, c, u, g, unknown or other
anaagaaccacaaggaccu

SEQ ID NO: 1134098 - RNA, 19 nt, Artificial Sequence
  Description of Artificial Sequence: Synthetic oligonucleotide
cacaauuguaacaugagac

SEQ ID NO: 1134099 - RNA, 19 nt, Artificial Sequence
  Description of Artificial Sequence: Synthetic oligonucleotide
caauuuaauaauguggucc

SEQ ID NO: 1134100 - RNA, 19 nt, Artificial Sequence
  Description of Artificial Sequence: Synthetic oligonucleotide
caacguaucauuagaaggg

SEQ ID NO: 1134101 - RNA, 19 nt, Artificial Sequence
  Description of Artificial Sequence: Synthetic oligonucleotide
ugaugauacauccaaucgc

SEQ ID NO: 1134102 - RNA, 19 nt, Artificial Sequence
  Description of Artificial Sequence: Synthetic oligonucleotide
cauagauuggcuuaaaaca

SEQ ID NO: 1134103 - RNA, 19 nt, Artificial Sequence
  Description of Artificial Sequence: Synthetic oligonucleotide
acugaugauacauccaauc

SEQ ID NO: 1134104 - RNA, 19 nt, Artificial Sequence
  Description of Artificial Sequence: Synthetic oligonucleotide
cagcauuaaacuuagugcc

SEQ ID NO: 1134105 - RNA, 19 nt, Artificial Sequence
  Description of Artificial Sequence: Synthetic oligonucleotide
uaaacuuagugccaugaca

SEQ ID NO: 1134106 - RNA, 19 nt, Artificial Sequence
  Description of Artificial Sequence: Synthetic oligonucleotide
auaaaguacaccuggcaag

SEQ ID NO: 1134107 - RNA, 19 nt, Artificial Sequence
  Description of Artificial Sequence: Synthetic oligonucleotide
aaggaguuggcuuccauug

SEQ ID NO: 1134108 - RNA, 19 nt, Artificial Sequence
  Description of Artificial Sequence: Synthetic oligonucleotide
gagaagguaacacaccucc

SEQ ID NO: 1134109 - RNA, 19 nt, Artificial Sequence
  Description of Artificial Sequence: Synthetic oligonucleotide
auaugguaaacauacaaau

SEQ ID NO: 1134110 - RNA, 19 nt, Artificial Sequence
  Description of Artificial Sequence: Synthetic oligonucleotide
auuguaacaugagacauuc

SEQ ID NO: 1134111 - RNA, 19 nt, Artificial Sequence
  Description of Artificial Sequence: Synthetic oligonucleotide
gauuaaaaccgucucaaca

SEQ ID NO: 1134112 - RNA, 19 nt, Artificial Sequence
  Description of Artificial Sequence: Synthetic oligonucleotide
ggugcuagaaauauaaacg

SEQ ID NO: 1134113 - RNA, 19 nt, Artificial Sequence
  Description of Artificial Sequence: Synthetic oligonucleotide
uguaagaugugcuaucacu

SEQ ID NO: 1134114 - RNA, 19 nt, Artificial Sequence
  Description of Artificial Sequence: Synthetic oligonucleotide
uuuacagucuugugcauag

SEQ ID NO: 1134115 - RNA, 19 nt, Artificial Sequence
  Description of Artificial Sequence: Synthetic oligonucleotide
uccuagaaauauaaguggc

SEQ ID NO: 1134116 - RNA, 19 nt, Artificial Sequence
  Description of Artificial Sequence: Synthetic oligonucleotide
acuuuugaaguguugaacu

SEQ ID NO: 1134117 - RNA, 19 nt, Artificial Sequence
  Description of Artificial Sequence: Synthetic oligonucleotide
gaugauacauccaaucgcc

SEQ ID NO: 1134118 - RNA, 19 nt, Artificial Sequence
  Description of Artificial Sequence: Synthetic oligonucleotide
uccgcuuacaccacaauug

SEQ ID NO: 1134119 - RNA, 19 nt, Artificial Sequence
  Description of Artificial Sequence: Synthetic oligonucleotide
aaauacccagaucaaauaa

SEQ ID NO: 1134120 - RNA, 19 nt, Artificial Sequence
  Description of Artificial Sequence: Synthetic oligonucleotide
guccuagaaauauaagugg

SEQ ID NO: 1134121 - RNA, 19 nt, Artificial Sequence
  Description of Artificial Sequence: Synthetic oligonucleotide
acaugauuaaaaccgucuc

SEQ ID NO: 1134122 - RNA, 19 nt, Artificial Sequence
  Description of Artificial Sequence: Synthetic oligonucleotide
aauccaacguaucauuaga

SEQ ID NO: 1134123 - RNA, 19 nt, Artificial Sequence
  Description of Artificial Sequence: Synthetic oligonucleotide
aaacgguuauaaaagugac

SEQ ID NO: 1134124 - RNA, 19 nt, Artificial Sequence
  Description of Artificial Sequence: Synthetic oligonucleotide
aguacauaacauuucaaau

SEQ ID NO: 1134125 - RNA, 19 nt, Artificial Sequence
  Description of Artificial Sequence: Synthetic oligonucleotide
ugcuaugagacacagguua

SEQ ID NO: 1134126 - RNA, 19 nt, Artificial Sequence
  Description of Artificial Sequence: Synthetic oligonucleotide
uaaacgcuacuuuugaagu

SEQ ID NO: 1134127 - RNA, 19 nt, Artificial Sequence
  Description of Artificial Sequence: Synthetic oligonucleotide
cauuggauugggauaauag

SEQ ID NO: 1134128 - RNA, 19 nt, Artificial Sequence
  Description of Artificial Sequence: Synthetic oligonucleotide
uauaaaagugacuuugcua

SEQ ID NO: 1134129 - RNA, 19 nt, Artificial Sequence
  Description of Artificial Sequence: Synthetic oligonucleotide
uuaauaaugugguccaaaa

SEQ ID NO: 1134130 - RNA, 19 nt, Artificial Sequence
  Description of Artificial Sequence: Synthetic oligonucleotide
  modified_base (3)..(3): a, c, u, g, unknown or other
canagcugcaccuucgccc

SEQ ID NO: 1134131 - RNA, 19 nt, Artificial Sequence
  Description of Artificial Sequence: Synthetic oligonucleotide
gaaauuuaggaaauguaca

SEQ ID NO: 1134132 - RNA, 19 nt, Artificial Sequence
  Description of Artificial Sequence: Synthetic oligonucleotide
uguaacaggagcaucgcau

SEQ ID NO: 1134133 - RNA, 19 nt, Artificial Sequence
  Description of Artificial Sequence: Synthetic oligonucleotide
acaauuuaauaaugugguc

SEQ ID NO: 1134134 - RNA, 19 nt, Artificial Sequence
  Description of Artificial Sequence: Synthetic oligonucleotide
gguaaacauacaaauaagg

SEQ ID NO: 1134135 - RNA, 19 nt, Artificial Sequence
  Description of Artificial Sequence: Synthetic oligonucleotide
aauccaaucuguccuagaa

SEQ ID NO: 1134136 - RNA, 19 nt, Artificial Sequence
  Description of Artificial Sequence: Synthetic oligonucleotide
gaauccaacguaucauuag

SEQ ID NO: 1134137 - RNA, 19 nt, Artificial Sequence
  Description of Artificial Sequence: Synthetic oligonucleotide
aacguaucauuagaagggg

SEQ ID NO: 1134138 - RNA, 19 nt, Artificial Sequence
  Description of Artificial Sequence: Synthetic oligonucleotide
uaacuauuuagcugaaggu

SEQ ID NO: 1134139 - RNA, 19 nt, Artificial Sequence
  Description of Artificial Sequence: Synthetic oligonucleotide
uugcuguuaauuacaagga

SEQ ID NO: 1134140 - RNA, 19 nt, Artificial Sequence
  Description of Artificial Sequence: Synthetic oligonucleotide
uccaacguaucauuagaag

SEQ ID NO: 1134141 - RNA, 19 nt, Artificial Sequence
  Description of Artificial Sequence: Synthetic oligonucleotide
uuaaaaccgucucaacaca

SEQ ID NO: 1134142 - RNA, 19 nt, Artificial Sequence
  Description of Artificial Sequence: Synthetic oligonucleotide
aaacuuagugccaugacaa

SEQ ID NO: 1134143 - RNA, 19 nt, Artificial Sequence
  Description of Artificial Sequence: Synthetic oligonucleotide
ucucacaaugucaggugcg

SEQ ID NO: 1134144 - RNA, 19 nt, Artificial Sequence
  Description of Artificial Sequence: Synthetic oligonucleotide
caagugagucacaacaggc

SEQ ID NO: 1134145 - RNA, 19 nt, Artificial Sequence
  Description of Artificial Sequence: Synthetic oligonucleotide
auauaaacgcuacuuuuga

SEQ ID NO: 1134146 - RNA, 19 nt, Artificial Sequence
  Description of Artificial Sequence: Synthetic oligonucleotide
cauaguguccgcuuacacc

SEQ ID NO: 1134147 - RNA, 19 nt, Artificial Sequence
  Description of Artificial Sequence: Synthetic oligonucleotide
  modified_base (6)..(6): a, c, u, g, unknown or other
gcccanaagaaccacaagg

SEQ ID NO: 1134148 - RNA, 19 nt, Artificial Sequence
  Description of Artificial Sequence: Synthetic oligonucleotide
gcagcauuaaacuuagugc

SEQ ID NO: 1134149 - RNA, 19 nt, Artificial Sequence
  Description of Artificial Sequence: Synthetic oligonucleotide
aaauggauggcagagugaa

SEQ ID NO: 1134150 - RNA, 19 nt, Artificial Sequence
  Description of Artificial Sequence: Synthetic oligonucleotide
  modified_base (2)..(2): a, c, u, g, unknown or other
anagcugcaccuucgccca

SEQ ID NO: 1134151 - RNA, 19 nt, Artificial Sequence
  Description of Artificial Sequence: Synthetic oligonucleotide
aaagucucagaauguacau

SEQ ID NO: 1134152 - RNA, 19 nt, Artificial Sequence
  Description of Artificial Sequence: Synthetic oligonucleotide
acaaauaaggagaagguaa

SEQ ID NO: 1134153 - RNA, 19 nt, Artificial Sequence
  Description of Artificial Sequence: Synthetic oligonucleotide
ugcuagaaauauaaacgcu

SEQ ID NO: 1134154 - RNA, 19 nt, Artificial Sequence
  Description of Artificial Sequence: Synthetic oligonucleotide
guucagaugugacagacca

SEQ ID NO: 1134155 - RNA, 19 nt, Artificial Sequence
  Description of Artificial Sequence: Synthetic oligonucleotide
aaacgcuacuuuugaagug

SEQ ID NO: 1134156 - RNA, 19 nt, Artificial Sequence
  Description of Artificial Sequence: Synthetic oligonucleotide
ugaacaacucaaccgcagc

SEQ ID NO: 1134157 - RNA, 19 nt, Artificial Sequence
  Description of Artificial Sequence: Synthetic oligonucleotide
aacgaugggacucgguaca

SEQ ID NO: 1134158 - RNA, 19 nt, Artificial Sequence
  Description of Artificial Sequence: Synthetic oligonucleotide
cacuauggucccauuagcg

SEQ ID NO: 1134159 - RNA, 19 nt, Artificial Sequence
  Description of Artificial Sequence: Synthetic oligonucleotide
ugcuggauauacaggauac

SEQ ID NO: 1134160 - RNA, 19 nt, Artificial Sequence
  Description of Artificial Sequence: Synthetic oligonucleotide
  modified_base (12)..(12): a, c, u, g, unknown or other
accuucgcccanaagaacc

SEQ ID NO: 1134161 - RNA, 19 nt, Artificial Sequence
  Description of Artificial Sequence: Synthetic oligonucleotide
ccaacguaucauuagaagg

SEQ ID NO: 1134162 - RNA, 19 nt, Artificial Sequence
  Description of Artificial Sequence: Synthetic oligonucleotide
uacauuaggugcuggauau

SEQ ID NO: 1134163 - RNA, 19 nt, Artificial Sequence
  Description of Artificial Sequence: Synthetic oligonucleotide
uguacaaggcuuagguacu

SEQ ID NO: 1134164 - RNA, 19 nt, Artificial Sequence
  Description of Artificial Sequence: Synthetic oligonucleotide
uauaaguggccuuuccagu

SEQ ID NO: 1134165 - RNA, 19 nt, Artificial Sequence
  Description of Artificial Sequence: Synthetic oligonucleotide
uaacaugagacauucccau

SEQ ID NO: 1134166 - RNA, 19 nt, Artificial Sequence
  Description of Artificial Sequence: Synthetic oligonucleotide
auaaccucagugcacuuca

SEQ ID NO: 1134167 - RNA, 19 nt, Artificial Sequence
  Description of Artificial Sequence: Synthetic oligonucleotide
ucuguugcaugccauaguu

SEQ ID NO: 1134168 - RNA, 19 nt, Artificial Sequence
  Description of Artificial Sequence: Synthetic oligonucleotide
ugggucaugcaccagucca

SEQ ID NO: 1134169 - RNA, 19 nt, Artificial Sequence
  Description of Artificial Sequence: Synthetic oligonucleotide
gucccauuagcguucgucg

SEQ ID NO: 1134170 - RNA, 19 nt, Artificial Sequence
  Description of Artificial Sequence: Synthetic oligonucleotide
uagaaauauaaacgcuacu

SEQ ID NO: 1134171 - RNA, 19 nt, Artificial Sequence
  Description of Artificial Sequence: Synthetic oligonucleotide
aacucaaccgcagcuuaac

SEQ ID NO: 1134172 - RNA, 19 nt, Artificial Sequence
  Description of Artificial Sequence: Synthetic oligonucleotide
uccauaaaguacaccuggc

SEQ ID NO: 1134173 - RNA, 19 nt, Artificial Sequence
  Description of Artificial Sequence: Synthetic oligonucleotide
aacgcuacuuuugaagugu

SEQ ID NO: 1134174 - RNA, 19 nt, Artificial Sequence
  Description of Artificial Sequence: Synthetic oligonucleotide
aacuacauuaggugcugga

SEQ ID NO: 1134175 - RNA, 19 nt, Artificial Sequence
  Description of Artificial Sequence: Synthetic oligonucleotide
uggcaacuacauuaggugc

SEQ ID NO: 1134176 - RNA, 19 nt, Artificial Sequence
  Description of Artificial Sequence: Synthetic oligonucleotide
uuugucucacaaugucagg

SEQ ID NO: 1134177 - RNA, 19 nt, Artificial Sequence
  Description of Artificial Sequence: Synthetic oligonucleotide
uaaaaccgucucaacacac

SEQ ID NO: 1134178 - RNA, 19 nt, Artificial Sequence
  Description of Artificial Sequence: Synthetic oligonucleotide
uaagaugugcuaucacucu

SEQ ID NO: 1134179 - RNA, 19 nt, Artificial Sequence
  Description of Artificial Sequence: Synthetic oligonucleotide
acgguuauaaaagugacuu

SEQ ID NO: 1134180 - RNA, 19 nt, Artificial Sequence
  Description of Artificial Sequence: Synthetic oligonucleotide
gagugcauuaaguaggcaa

SEQ ID NO: 1134181 - RNA, 19 nt, Artificial Sequence
  Description of Artificial Sequence: Synthetic oligonucleotide
uauuuuggacauugguaca

SEQ ID NO: 1134182 - RNA, 19 nt, Artificial Sequence
  Description of Artificial Sequence: Synthetic oligonucleotide
acuauggucccauuagcgu

SEQ ID NO: 1134183 - RNA, 19 nt, Artificial Sequence
  Description of Artificial Sequence: Synthetic oligonucleotide
auugggauaauaguaacua

SEQ ID NO: 1134184 - RNA, 19 nt, Artificial Sequence
  Description of Artificial Sequence: Synthetic oligonucleotide
uccuauguacaguacagua

SEQ ID NO: 1134185 - RNA, 19 nt, Artificial Sequence
  Description of Artificial Sequence: Synthetic oligonucleotide
auuagcguucgucguuccc

SEQ ID NO: 1134186 - RNA, 19 nt, Artificial Sequence
  Description of Artificial Sequence: Synthetic oligonucleotide
auuuuggacauugguacag

SEQ ID NO: 1134187 - RNA, 19 nt, Artificial Sequence
  Description of Artificial Sequence: Synthetic oligonucleotide
ucaaccgcagcuuaacaau

SEQ ID NO: 1134188 - RNA, 19 nt, Artificial Sequence
  Description of Artificial Sequence: Synthetic oligonucleotide
uggauauacaggauacaau

SEQ ID NO: 1134189 - RNA, 19 nt, Artificial Sequence
  Description of Artificial Sequence: Synthetic oligonucleotide
auugcaaauggauggcaga

SEQ ID NO: 1134190 - RNA, 19 nt, Artificial Sequence
  Description of Artificial Sequence: Synthetic oligonucleotide
acaaggcuuagguacucuc

SEQ ID NO: 1134191 - RNA, 19 nt, Artificial Sequence
  Description of Artificial Sequence: Synthetic oligonucleotide
uuaguacauagauuggcuu

SEQ ID NO: 1134192 - RNA, 19 nt, Artificial Sequence
  Description of Artificial Sequence: Synthetic oligonucleotide
gguugcauaaaauccaauc

SEQ ID NO: 1134193 - RNA, 19 nt, Artificial Sequence
  Description of Artificial Sequence: Synthetic oligonucleotide
uagauuggcuuaaaacaaa

SEQ ID NO: 1134194 - RNA, 19 nt, Artificial Sequence
  Description of Artificial Sequence: Synthetic oligonucleotide
augauuaaaaccgucucaa

SEQ ID NO: 1134195 - RNA, 19 nt, Artificial Sequence
  Description of Artificial Sequence: Synthetic oligonucleotide
uuagcguucgucguucccc

SEQ ID NO: 1134196 - RNA, 19 nt, Artificial Sequence
  Description of Artificial Sequence: Synthetic oligonucleotide
acauuauaaucaagcauag

SEQ ID NO: 1134197 - RNA, 19 nt, Artificial Sequence
  Description of Artificial Sequence: Synthetic oligonucleotide
uaaaagugacuuugcuaug

SEQ ID NO: 1134198 - RNA, 19 nt, Artificial Sequence
  Description of Artificial Sequence: Synthetic oligonucleotide
auagauuggcuuaaaacaa

SEQ ID NO: 1134199 - RNA, 19 nt, Artificial Sequence
  Description of Artificial Sequence: Synthetic oligonucleotide
aaaguauaugguaaacaua

SEQ ID NO: 1134200 - RNA, 19 nt, Artificial Sequence
  Description of Artificial Sequence: Synthetic oligonucleotide
uacauagauuggcuuaaaa

SEQ ID NO: 1134201 - RNA, 19 nt, Artificial Sequence
  Description of Artificial Sequence: Synthetic oligonucleotide
  modified_base (6)..(6): a, c, u, g, unknown or other
ucccanagcugcaccuucg

SEQ ID NO: 1134202 - RNA, 19 nt, Artificial Sequence
  Description of Artificial Sequence: Synthetic oligonucleotide
gaugugcuaucacucugag

SEQ ID NO: 1134203 - RNA, 19 nt, Artificial Sequence
  Description of Artificial Sequence: Synthetic oligonucleotide
ugauguaagaugugcuauc

SEQ ID NO: 1134204 - RNA, 19 nt, Artificial Sequence
  Description of Artificial Sequence: Synthetic oligonucleotide
ugguacagagaaugaaaac

SEQ ID NO: 1134205 - RNA, 19 nt, Artificial Sequence
  Description of Artificial Sequence: Synthetic oligonucleotide
aaaccgucucaacacacuu

SEQ ID NO: 1134206 - RNA, 19 nt, Artificial Sequence
  Description of Artificial Sequence: Synthetic oligonucleotide
ucucaacacacuuggaauu

SEQ ID NO: 1134207 - RNA, 19 nt, Artificial Sequence
  Description of Artificial Sequence: Synthetic oligonucleotide
agaaauauaaguggccuuu

SEQ ID NO: 1134208 - RNA, 19 nt, Artificial Sequence
  Description of Artificial Sequence: Synthetic oligonucleotide
guaagaugugcuaucacuc

SEQ ID NO: 1134209 - RNA, 19 nt, Artificial Sequence
  Description of Artificial Sequence: Synthetic oligonucleotide
ugauuaaaaccgucucaac

SEQ ID NO: 1134210 - RNA, 19 nt, Artificial Sequence
  Description of Artificial Sequence: Synthetic oligonucleotide
cugaacaacucaaccgcag

SEQ ID NO: 1134211 - RNA, 19 nt, Artificial Sequence
  Description of Artificial Sequence: Synthetic oligonucleotide
gauguaagaugugcuauca

SEQ ID NO: 1134212 - RNA, 19 nt, Artificial Sequence
  Description of Artificial Sequence: Synthetic oligonucleotide
ugucuacccggucacacuc

SEQ ID NO: 1134213 - RNA, 19 nt, Artificial Sequence
  Description of Artificial Sequence: Synthetic oligonucleotide
cauuaggugcuggauauac

SEQ ID NO: 1134214 - RNA, 19 nt, Artificial Sequence
  Description of Artificial Sequence: Synthetic oligonucleotide
gcaaauggauggcagagug

SEQ ID NO: 1134215 - RNA, 19 nt, Artificial Sequence
  Description of Artificial Sequence: Synthetic oligonucleotide
ucguucagucugcagaauc

SEQ ID NO: 1134216 - RNA, 19 nt, Artificial Sequence
  Description of Artificial Sequence: Synthetic oligonucleotide
uuggcuuggcuccccauga

SEQ ID NO: 1134217 - RNA, 19 nt, Artificial Sequence
  Description of Artificial Sequence: Synthetic oligonucleotide
aagcauagugguaaacggu

SEQ ID NO: 1134218 - RNA, 19 nt, Artificial Sequence
  Description of Artificial Sequence: Synthetic oligonucleotide
uccaaucgcccagauaacc

SEQ ID NO: 1134219 - RNA, 19 nt, Artificial Sequence
  Description of Artificial Sequence: Synthetic oligonucleotide
aggugcguaucucagucug

SEQ ID NO: 1134220 - RNA, 19 nt, Artificial Sequence
  Description of Artificial Sequence: Synthetic oligonucleotide
  modified_base (9)..(9): a, c, u, g, unknown or other
uucgcccanaagaaccaca

SEQ ID NO: 1134221 - RNA, 19 nt, Artificial Sequence
  Description of Artificial Sequence: Synthetic oligonucleotide
acuccccgcacuugagugc

SEQ ID NO: 1134222 - RNA, 19 nt, Artificial Sequence
  Description of Artificial Sequence: Synthetic oligonucleotide
ugacuguuuacagucuugu

SEQ ID NO: 1134223 - RNA, 19 nt, Artificial Sequence
  Description of Artificial Sequence: Synthetic oligonucleotide
accccugaaagucucagaa

SEQ ID NO: 1134224 - RNA, 19 nt, Artificial Sequence
  Description of Artificial Sequence: Synthetic oligonucleotide
gucucacaaugucaggugc

SEQ ID NO: 1134225 - RNA, 19 nt, Artificial Sequence
  Description of Artificial Sequence: Synthetic oligonucleotide
  modified_base (8)..(8): a, c, u, g, unknown or other
ucgcccanaagaaccacaa

SEQ ID NO: 1134226 - RNA, 19 nt, Artificial Sequence
  Description of Artificial Sequence: Synthetic oligonucleotide
aacgguuauaaaagugacu

SEQ ID NO: 1134227 - RNA, 19 nt, Artificial Sequence
  Description of Artificial Sequence: Synthetic oligonucleotide
ggcacuauggucccauuag

SEQ ID NO: 1134228 - RNA, 19 nt, Artificial Sequence
  Description of Artificial Sequence: Synthetic oligonucleotide
gaagguaacacaccuccua

SEQ ID NO: 1134229 - RNA, 19 nt, Artificial Sequence
  Description of Artificial Sequence: Synthetic oligonucleotide
uuugucuacccggucacac

SEQ ID NO: 1134230 - RNA, 19 nt, Artificial Sequence
  Description of Artificial Sequence: Synthetic oligonucleotide
accuccuauguacaguaca

SEQ ID NO: 1134231 - RNA, 19 nt, Artificial Sequence
  Description of Artificial Sequence: Synthetic oligonucleotide
gauuggcuuaaaacaaaac

SEQ ID NO: 1134232 - RNA, 19 nt, Artificial Sequence
  Description of Artificial Sequence: Synthetic oligonucleotide
acuauuuagcugaagguuu

SEQ ID NO: 1134233 - RNA, 19 nt, Artificial Sequence
  Description of Artificial Sequence: Synthetic oligonucleotide
gacuccccgcacuugagug

SEQ ID NO: 1134234 - RNA, 19 nt, Artificial Sequence
  Description of Artificial Sequence: Synthetic oligonucleotide
aaaaccgucucaacacacu

SEQ ID NO: 1134235 - RNA, 19 nt, Artificial Sequence
  Description of Artificial Sequence: Synthetic oligonucleotide
auuaaguaggcaagcuuug

SEQ ID NO: 1134236 - RNA, 19 nt, Artificial Sequence
  Description of Artificial Sequence: Synthetic oligonucleotide
aauuguaacaugagacauu

SEQ ID NO: 1134237 - RNA, 19 nt, Artificial Sequence
  Description of Artificial Sequence: Synthetic oligonucleotide
aucggugcuagaaauauaa

SEQ ID NO: 1134238 - RNA, 19 nt, Artificial Sequence
  Description of Artificial Sequence: Synthetic oligonucleotide
auaaguggccuuuccagua

SEQ ID NO: 1134239 - RNA, 19 nt, Artificial Sequence
  Description of Artificial Sequence: Synthetic oligonucleotide
cugaagguuuccauugguc

SEQ ID NO: 1134240 - RNA, 19 nt, Artificial Sequence
  Description of Artificial Sequence: Synthetic oligonucleotide
uagaaauauaaguggccuu

SEQ ID NO: 1134241 - RNA, 19 nt, Artificial Sequence
  Description of Artificial Sequence: Synthetic oligonucleotide
ugugcauaguguccgcuua

SEQ ID NO: 1134242 - RNA, 19 nt, Artificial Sequence
  Description of Artificial Sequence: Synthetic oligonucleotide
augauacauccaaucgccc

SEQ ID NO: 1134243 - RNA, 19 nt, Artificial Sequence
  Description of Artificial Sequence: Synthetic oligonucleotide
aacuuagugccaugacaau

SEQ ID NO: 1134244 - RNA, 19 nt, Artificial Sequence
  Description of Artificial Sequence: Synthetic oligonucleotide
ugucaggugcggcagucac

SEQ ID NO: 1134245 - RNA, 19 nt, Artificial Sequence
  Description of Artificial Sequence: Synthetic oligonucleotide
uuagguacucuccccugaa

SEQ ID NO: 1134246 - RNA, 19 nt, Artificial Sequence
  Description of Artificial Sequence: Synthetic oligonucleotide
guaacaugagacauuccca

SEQ ID NO: 1134247 - RNA, 19 nt, Artificial Sequence
  Description of Artificial Sequence: Synthetic oligonucleotide
guaucucagucuguaagug

SEQ ID NO: 1134248 - RNA, 19 nt, Artificial Sequence
  Description of Artificial Sequence: Synthetic oligonucleotide
uagugccaugacaaugaca

SEQ ID NO: 1134249 - RNA, 19 nt, Artificial Sequence
  Description of Artificial Sequence: Synthetic oligonucleotide
cuguucagaugugacagac

SEQ ID NO: 1134250 - RNA, 19 nt, Artificial Sequence
  Description of Artificial Sequence: Synthetic oligonucleotide
cauuaaacuuagugccaug

SEQ ID NO: 1134251 - RNA, 19 nt, Artificial Sequence
  Description of Artificial Sequence: Synthetic oligonucleotide
gguacagagaaugaaaacu

SEQ ID NO: 1134252 - RNA, 19 nt, Artificial Sequence
  Description of Artificial Sequence: Synthetic oligonucleotide
cauuaaguaggcaagcuuu

SEQ ID NO: 1134253 - RNA, 19 nt, Artificial Sequence
  Description of Artificial Sequence: Synthetic oligonucleotide
uuuuggacauugguacaga

SEQ ID NO: 1134254 - RNA, 19 nt, Artificial Sequence
  Description of Artificial Sequence: Synthetic oligonucleotide
caaucgcccagauaaccuc

SEQ ID NO: 1134255 - RNA, 19 nt, Artificial Sequence
  Description of Artificial Sequence: Synthetic oligonucleotide
uacaucggugcuagaaaua

SEQ ID NO: 1134256 - RNA, 19 nt, Artificial Sequence
  Description of Artificial Sequence: Synthetic oligonucleotide
acaucggugcuagaaauau

SEQ ID NO: 1134257 - RNA, 19 nt, Artificial Sequence
  Description of Artificial Sequence: Synthetic oligonucleotide
guuggcuuggcuccccaug

SEQ ID NO: 1134258 - RNA, 19 nt, Artificial Sequence
  Description of Artificial Sequence: Synthetic oligonucleotide
  modified_base (4)..(4): a, c, u, g, unknown or other
ccanaagaaccacaaggac

SEQ ID NO: 1134259 - RNA, 19 nt, Artificial Sequence
  Description of Artificial Sequence: Synthetic oligonucleotide
aucgcauucuguguuauuu

SEQ ID NO: 1134260 - RNA, 19 nt, Artificial Sequence
  Description of Artificial Sequence: Synthetic oligonucleotide
acaccuccuauguacagua

SEQ ID NO: 1134261 - RNA, 19 nt, Artificial Sequence
  Description of Artificial Sequence: Synthetic oligonucleotide
aaucgcccagauaaccuca

SEQ ID NO: 1134262 - RNA, 19 nt, Artificial Sequence
  Description of Artificial Sequence: Synthetic oligonucleotide
cuagaaauauaaguggccu

SEQ ID NO: 1134263 - RNA, 19 nt, Artificial Sequence
  Description of Artificial Sequence: Synthetic oligonucleotide
acuacauuaggugcuggau

SEQ ID NO: 1134264 - RNA, 19 nt, Artificial Sequence
  Description of Artificial Sequence: Synthetic oligonucleotide
ucuugugcauaguguccgc

SEQ ID NO: 1134265 - RNA, 19 nt, Artificial Sequence
  Description of Artificial Sequence: Synthetic oligonucleotide
gguacauugguccaggcau

SEQ ID NO: 1134266 - RNA, 19 nt, Artificial Sequence
  Description of Artificial Sequence: Synthetic oligonucleotide
ugcuaucacucugagcagu

SEQ ID NO: 1134267 - RNA, 19 nt, Artificial Sequence
  Description of Artificial Sequence: Synthetic oligonucleotide
ucagugcacuucaggaaau

SEQ ID NO: 1134268 - RNA, 19 nt, Artificial Sequence
  Description of Artificial Sequence: Synthetic oligonucleotide
agugcacuucaggaaauca

SEQ ID NO: 1134269 - RNA, 19 nt, Artificial Sequence
  Description of Artificial Sequence: Synthetic oligonucleotide
ccuccuauguacaguacag

SEQ ID NO: 1134270 - RNA, 19 nt, Artificial Sequence
  Description of Artificial Sequence: Synthetic oligonucleotide
auaguuggcuuggcucccc

SEQ ID NO: 1134271 - RNA, 19 nt, Artificial Sequence
  Description of Artificial Sequence: Synthetic oligonucleotide
  modified_base (5)..(5): a, c, u, g, unknown or other
cccanaagaaccacaagga

SEQ ID NO: 1134272 - RNA, 19 nt, Artificial Sequence
  Description of Artificial Sequence: Synthetic oligonucleotide
cuggauauacaggauacaa

SEQ ID NO: 1134273 - RNA, 19 nt, Artificial Sequence
  Description of Artificial Sequence: Synthetic oligonucleotide
agcauagugguaaacgguu

SEQ ID NO: 1134274 - RNA, 19 nt, Artificial Sequence
  Description of Artificial Sequence: Synthetic oligonucleotide
aaguguugaacuagcuuuu

SEQ ID NO: 1134275 - RNA, 19 nt, Artificial Sequence
  Description of Artificial Sequence: Synthetic oligonucleotide
  modified_base (9)..(9): a, c, u, g, unknown or other
uggucccanagcugcaccu

SEQ ID NO: 1134276 - RNA, 19 nt, Artificial Sequence
  Description of Artificial Sequence: Synthetic oligonucleotide
uugucuacccggucacacu

SEQ ID NO: 1134277 - RNA, 19 nt, Artificial Sequence
  Description of Artificial Sequence: Synthetic oligonucleotide
agagagcagaccccugccu

SEQ ID NO: 1134278 - RNA, 19 nt, Artificial Sequence
  Description of Artificial Sequence: Synthetic oligonucleotide
agauuggcuuaaaacaaaa

SEQ ID NO: 1134279 - RNA, 19 nt, Artificial Sequence
  Description of Artificial Sequence: Synthetic oligonucleotide
cucaaccgcagcuuaacaa

SEQ ID NO: 1134280 - RNA, 19 nt, Artificial Sequence
  Description of Artificial Sequence: Synthetic oligonucleotide
cuguugcaugccauaguug

SEQ ID NO: 1134281 - RNA, 19 nt, Artificial Sequence
  Description of Artificial Sequence: Synthetic oligonucleotide
cucccaacugcauagaaau

SEQ ID NO: 1134282 - RNA, 19 nt, Artificial Sequence
  Description of Artificial Sequence: Synthetic oligonucleotide
ugcaaauggauggcagagu

SEQ ID NO: 1134283 - RNA, 19 nt, Artificial Sequence
  Description of Artificial Sequence: Synthetic oligonucleotide
ucggugcuagaaauauaaa

SEQ ID NO: 1134284 - RNA, 19 nt, Artificial Sequence
  Description of Artificial Sequence: Synthetic oligonucleotide
acucaaccgcagcuuaaca

SEQ ID NO: 1134285 - RNA, 19 nt, Artificial Sequence
  Description of Artificial Sequence: Synthetic oligonucleotide
cacacuuggaauucagucu

SEQ ID NO: 1134286 - RNA, 19 nt, Artificial Sequence
  Description of Artificial Sequence: Synthetic oligonucleotide
cauugauguaagaugugcu

SEQ ID NO: 1134287 - RNA, 19 nt, Artificial Sequence
  Description of Artificial Sequence: Synthetic oligonucleotide
aguauaugguaaacauaca

SEQ ID NO: 1134288 - RNA, 19 nt, Artificial Sequence
  Description of Artificial Sequence: Synthetic oligonucleotide
aggcauuggauugggauaa

SEQ ID NO: 1134289 - RNA, 19 nt, Artificial Sequence
  Description of Artificial Sequence: Synthetic oligonucleotide
gauugggauaauaguaacu

SEQ ID NO: 1134290 - RNA, 19 nt, Artificial Sequence
  Description of Artificial Sequence: Synthetic oligonucleotide
guugauuggccuccaugga

SEQ ID NO: 1134291 - RNA, 19 nt, Artificial Sequence
  Description of Artificial Sequence: Synthetic oligonucleotide
ugcauaguguccgcuuaca

SEQ ID NO: 1134292 - RNA, 19 nt, Artificial Sequence
  Description of Artificial Sequence: Synthetic oligonucleotide
ggaggugcguaucucaguc

SEQ ID NO: 1134293 - RNA, 19 nt, Artificial Sequence
  Description of Artificial Sequence: Synthetic oligonucleotide
aggauacaaucucccaaau

SEQ ID NO: 1134294 - RNA, 19 nt, Artificial Sequence
  Description of Artificial Sequence: Synthetic oligonucleotide
gcuagaaauauaaacgcua

SEQ ID NO: 1134295 - RNA, 19 nt, Artificial Sequence
  Description of Artificial Sequence: Synthetic oligonucleotide
aggggaggugcguaucuca

SEQ ID NO: 1134296 - RNA, 19 nt, Artificial Sequence
  Description of Artificial Sequence: Synthetic oligonucleotide
uggcacuauggucccauua

SEQ ID NO: 1134297 - RNA, 19 nt, Artificial Sequence
  Description of Artificial Sequence: Synthetic oligonucleotide
ucacaaugucaggugcggc

SEQ ID NO: 1134298 - RNA, 19 nt, Artificial Sequence
  Description of Artificial Sequence: Synthetic oligonucleotide
gguaacacaccuccuaugu

SEQ ID NO: 1134299 - RNA, 19 nt, Artificial Sequence
  Description of Artificial Sequence: Synthetic oligonucleotide
gcagcuuaacaauuuaaua

SEQ ID NO: 1134300 - RNA, 19 nt, Artificial Sequence
  Description of Artificial Sequence: Synthetic oligonucleotide
cauuagcguucgucguucc

SEQ ID NO: 1134301 - RNA, 19 nt, Artificial Sequence
  Description of Artificial Sequence: Synthetic oligonucleotide
aaacucccaacugcauaga

SEQ ID NO: 1134302 - RNA, 19 nt, Artificial Sequence
  Description of Artificial Sequence: Synthetic oligonucleotide
uugugcauaguguccgcuu

SEQ ID NO: 1134303 - RNA, 19 nt, Artificial Sequence
  Description of Artificial Sequence: Synthetic oligonucleotide
ucgcauucuguguuauuuu

SEQ ID NO: 1134304 - RNA, 19 nt, Artificial Sequence
  Description of Artificial Sequence: Synthetic oligonucleotide
augacuguuuacagucuug

SEQ ID NO: 1134305 - RNA, 19 nt, Artificial Sequence
  Description of Artificial Sequence: Synthetic oligonucleotide
acaccccaugacuccccgc

SEQ ID NO: 1134306 - RNA, 19 nt, Artificial Sequence
  Description of Artificial Sequence: Synthetic oligonucleotide
gcaguacugugugucaagg

SEQ ID NO: 1134307 - RNA, 19 nt, Artificial Sequence
  Description of Artificial Sequence: Synthetic oligonucleotide
gguaaacgguuauaaaagu

SEQ ID NO: 1134308 - RNA, 19 nt, Artificial Sequence
  Description of Artificial Sequence: Synthetic oligonucleotide
cauaguuggcuuggcuccc

SEQ ID NO: 1134309 - RNA, 19 nt, Artificial Sequence
  Description of Artificial Sequence: Synthetic oligonucleotide
caccuggcaagugagucac

SEQ ID NO: 1134310 - RNA, 19 nt, Artificial Sequence
  Description of Artificial Sequence: Synthetic oligonucleotide
acauugguccaggcauugg

SEQ ID NO: 1134311 - RNA, 19 nt, Artificial Sequence
  Description of Artificial Sequence: Synthetic oligonucleotide
cguucagucugcagaaucc

SEQ ID NO: 1134312 - RNA, 19 nt, Artificial Sequence
  Description of Artificial Sequence: Synthetic oligonucleotide
  modified_base (7)..(7): a, c, u, g, unknown or other
gucccanagcugcaccuuc

SEQ ID NO: 1134313 - RNA, 19 nt, Artificial Sequence
  Description of Artificial Sequence: Synthetic oligonucleotide
ugcguaucucagucuguaa

SEQ ID NO: 1134314 - RNA, 19 nt, Artificial Sequence
  Description of Artificial Sequence: Synthetic oligonucleotide
gugagucacaacaggccug

SEQ ID NO: 1134315 - RNA, 19 nt, Artificial Sequence
  Description of Artificial Sequence: Synthetic oligonucleotide
accccaugacuccccgcac

SEQ ID NO: 1134316 - RNA, 19 nt, Artificial Sequence
  Description of Artificial Sequence: Synthetic oligonucleotide
gaugacuguuuacagucuu

SEQ ID NO: 1134317 - RNA, 19 nt, Artificial Sequence
  Description of Artificial Sequence: Synthetic oligonucleotide
auccaaucgcccagauaac

SEQ ID NO: 1134318 - RNA, 19 nt, Artificial Sequence
  Description of Artificial Sequence: Synthetic oligonucleotide
ucgguacauugguccaggc

SEQ ID NO: 1134319 - RNA, 19 nt, Artificial Sequence
  Description of Artificial Sequence: Synthetic oligonucleotide
caauuguaacaugagacau

SEQ ID NO: 1134320 - RNA, 19 nt, Artificial Sequence
  Description of Artificial Sequence: Synthetic oligonucleotide
auuugcauauggagucuga

SEQ ID NO: 1134321 - RNA, 19 nt, Artificial Sequence
  Description of Artificial Sequence: Synthetic oligonucleotide
cugggucaugcaccagucc

SEQ ID NO: 1134322 - RNA, 19 nt, Artificial Sequence
  Description of Artificial Sequence: Synthetic oligonucleotide
ugagugcauuaaguaggca

SEQ ID NO: 1134323 - RNA, 19 nt, Artificial Sequence
  Description of Artificial Sequence: Synthetic oligonucleotide
ugcccaccccugaaagucu

SEQ ID NO: 1134324 - RNA, 19 nt, Artificial Sequence
  Description of Artificial Sequence: Synthetic oligonucleotide
guacucuccccugaacaac

SEQ ID NO: 1134325 - RNA, 19 nt, Artificial Sequence
  Description of Artificial Sequence: Synthetic oligonucleotide
auccaacguaucauuagaa

SEQ ID NO: 1134326 - RNA, 19 nt, Artificial Sequence
  Description of Artificial Sequence: Synthetic oligonucleotide
cacugguauuggcaacuac

SEQ ID NO: 1134327 - RNA, 19 nt, Artificial Sequence
  Description of Artificial Sequence: Synthetic oligonucleotide
uguccgcuuacaccacaau

SEQ ID NO: 1134328 - RNA, 19 nt, Artificial Sequence
  Description of Artificial Sequence: Synthetic oligonucleotide
gugcauaguguccgcuuac

SEQ ID NO: 1134329 - RNA, 19 nt, Artificial Sequence
  Description of Artificial Sequence: Synthetic oligonucleotide
auagugguaaacgguuaua

SEQ ID NO: 1134330 - RNA, 19 nt, Artificial Sequence
  Description of Artificial Sequence: Synthetic oligonucleotide
cugacgcccaucugcugug

SEQ ID NO: 1134331 - RNA, 19 nt, Artificial Sequence
  Description of Artificial Sequence: Synthetic oligonucleotide
agaagguaacacaccuccu

SEQ ID NO: 1134332 - RNA, 19 nt, Artificial Sequence
  Description of Artificial Sequence: Synthetic oligonucleotide
gguacucuccccugaacaa

SEQ ID NO: 1134333 - RNA, 19 nt, Artificial Sequence
  Description of Artificial Sequence: Synthetic oligonucleotide
acccagcagcauuaaacuu

SEQ ID NO: 1134334 - RNA, 19 nt, Artificial Sequence
  Description of Artificial Sequence: Synthetic oligonucleotide
agcaucgcauucuguguua

SEQ ID NO: 1134335 - RNA, 19 nt, Artificial Sequence
  Description of Artificial Sequence: Synthetic oligonucleotide
aaccgcagcuuaacaauuu

SEQ ID NO: 1134336 - RNA, 19 nt, Artificial Sequence
  Description of Artificial Sequence: Synthetic oligonucleotide
acucccaacugcauagaaa

SEQ ID NO: 1134337 - RNA, 19 nt, Artificial Sequence
  Description of Artificial Sequence: Synthetic oligonucleotide
agcguucgucguuccccac

SEQ ID NO: 1134338 - RNA, 19 nt, Artificial Sequence
  Description of Artificial Sequence: Synthetic oligonucleotide
cuaugagacacagguuaga

SEQ ID NO: 1134339 - RNA, 19 nt, Artificial Sequence
  Description of Artificial Sequence: Synthetic oligonucleotide
caccccaugacuccccgca

SEQ ID NO: 1134340 - RNA, 19 nt, Artificial Sequence
  Description of Artificial Sequence: Synthetic oligonucleotide
  modified_base (4)..(4): a, c, u, g, unknown or other
ccanagcugcaccuucgcc

SEQ ID NO: 1134341 - RNA, 19 nt, Artificial Sequence
  Description of Artificial Sequence: Synthetic oligonucleotide
gcauaguguccgcuuacac

SEQ ID NO: 1134342 - RNA, 19 nt, Artificial Sequence
  Description of Artificial Sequence: Synthetic oligonucleotide
uuacagucuugugcauagu

SEQ ID NO: 1134343 - RNA, 19 nt, Artificial Sequence
  Description of Artificial Sequence: Synthetic oligonucleotide
aggaccugacgcccaucug

SEQ ID NO: 1134344 - RNA, 19 nt, Artificial Sequence
  Description of Artificial Sequence: Synthetic oligonucleotide
  modified_base (12)..(12): a, c, u, g, unknown or other
cauuggucccanagcugca

SEQ ID NO: 1134345 - RNA, 19 nt, Artificial Sequence
  Description of Artificial Sequence: Synthetic oligonucleotide
cauagugguaaacgguuau

SEQ ID NO: 1134346 - RNA, 19 nt, Artificial Sequence
  Description of Artificial Sequence: Synthetic oligonucleotide
cgcauucuguguuauuuug

SEQ ID NO: 1134347 - RNA, 19 nt, Artificial Sequence
  Description of Artificial Sequence: Synthetic oligonucleotide
cagauaaccucagugcacu

SEQ ID NO: 1134348 - RNA, 19 nt, Artificial Sequence
  Description of Artificial Sequence: Synthetic oligonucleotide
ucgcccagauaaccucagu

SEQ ID NO: 1134349 - RNA, 19 nt, Artificial Sequence
  Description of Artificial Sequence: Synthetic oligonucleotide
cuacccggucacacucccc

SEQ ID NO: 1134350 - RNA, 19 nt, Artificial Sequence
  Description of Artificial Sequence: Synthetic oligonucleotide
  modified_base (14)..(14): a, c, u, g, unknown or other
gcaccuucgcccanaagaa

SEQ ID NO: 1134351 - RNA, 19 nt, Artificial Sequence
  Description of Artificial Sequence: Synthetic oligonucleotide
caccuccuauguacaguac

SEQ ID NO: 1134352 - RNA, 19 nt, Artificial Sequence
  Description of Artificial Sequence: Synthetic oligonucleotide
aucgcccagauaaccucag

SEQ ID NO: 1134353 - RNA, 19 nt, Artificial Sequence
  Description of Artificial Sequence: Synthetic oligonucleotide
gcucguucagucugcagaa

SEQ ID NO: 1134354 - RNA, 19 nt, Artificial Sequence
  Description of Artificial Sequence: Synthetic oligonucleotide
cgcacuugagugcauuaag

SEQ ID NO: 1134355 - RNA, 19 nt, Artificial Sequence
  Description of Artificial Sequence: Synthetic oligonucleotide
  modified_base (5)..(5): a, c, u, g, unknown or other
cccanagcugcaccuucgc

SEQ ID NO: 1134356 - RNA, 19 nt, Artificial Sequence
  Description of Artificial Sequence: Synthetic oligonucleotide
ggagaagguaacacaccuc

SEQ ID NO: 1134357 - RNA, 19 nt, Artificial Sequence
  Description of Artificial Sequence: Synthetic oligonucleotide
ggcaacuacauuaggugcu

SEQ ID NO: 1134358 - RNA, 19 nt, Artificial Sequence
  Description of Artificial Sequence: Synthetic oligonucleotide
gaggugcguaucucagucu

SEQ ID NO: 1134359 - RNA, 19 nt, Artificial Sequence
  Description of Artificial Sequence: Synthetic oligonucleotide
guccgcuuacaccacaauu

SEQ ID NO: 1134360 - RNA, 19 nt, Artificial Sequence
  Description of Artificial Sequence: Synthetic oligonucleotide
ggagcaucgcauucugugu

SEQ ID NO: 1134361 - RNA, 19 nt, Artificial Sequence
  Description of Artificial Sequence: Synthetic oligonucleotide
guucgucguuccccacagc

SEQ ID NO: 1134362 - RNA, 19 nt, Artificial Sequence
  Description of Artificial Sequence: Synthetic oligonucleotide
gugcguaucucagucugua

SEQ ID NO: 1134363 - RNA, 19 nt, Artificial Sequence
  Description of Artificial Sequence: Synthetic oligonucleotide
agcagaccccugccuucug

SEQ ID NO: 1134364 - RNA, 19 nt, Artificial Sequence
  Description of Artificial Sequence: Synthetic oligonucleotide
caucggugcuagaaauaua

SEQ ID NO: 1134365 - RNA, 19 nt, Artificial Sequence
  Description of Artificial Sequence: Synthetic oligonucleotide
gaccugacgcccaucugcu

SEQ ID NO: 1134366 - RNA, 19 nt, Artificial Sequence
  Description of Artificial Sequence: Synthetic oligonucleotide
cguucgucguuccccacag

SEQ ID NO: 1134367 - RNA, 19 nt, Artificial Sequence
  Description of Artificial Sequence: Synthetic oligonucleotide
ccauuagcguucgucguuc

SEQ ID NO: 1134368 - RNA, 19 nt, Artificial Sequence
  Description of Artificial Sequence: Synthetic oligonucleotide
gcuggauauacaggauaca

SEQ ID NO: 1134369 - RNA, 19 nt, Artificial Sequence
  Description of Artificial Sequence: Synthetic oligonucleotide
acauuaggugcuggauaua

SEQ ID NO: 1134370 - RNA, 19 nt, Artificial Sequence
  Description of Artificial Sequence: Synthetic oligonucleotide
cuccccgcacuugagugca

SEQ ID NO: 1134371 - RNA, 19 nt, Artificial Sequence
  Description of Artificial Sequence: Synthetic oligonucleotide
cuuugucuacccggucaca

SEQ ID NO: 1134372 - RNA, 19 nt, Artificial Sequence
  Description of Artificial Sequence: Synthetic oligonucleotide
cacugaugauacauccaau

SEQ ID NO: 1134373 - RNA, 19 nt, Artificial Sequence
  Description of Artificial Sequence: Synthetic oligonucleotide
gcauuaaacuuagugccau

SEQ ID NO: 1134374 - RNA, 19 nt, Artificial Sequence
  Description of Artificial Sequence: Synthetic oligonucleotide
caaccgcagcuuaacaauu

SEQ ID NO: 1134375 - RNA, 19 nt, Artificial Sequence
  Description of Artificial Sequence: Synthetic oligonucleotide
cuugugcauaguguccgcu

SEQ ID NO: 1134376 - RNA, 19 nt, Artificial Sequence
  Description of Artificial Sequence: Synthetic oligonucleotide
cuccuauguacaguacagu

SEQ ID NO: 1134377 - RNA, 19 nt, Artificial Sequence
  Description of Artificial Sequence: Synthetic oligonucleotide
ccaaucgcccagauaaccu

SEQ ID NO: 1134378 - RNA, 19 nt, Artificial Sequence
  Description of Artificial Sequence: Synthetic oligonucleotide
  modified_base (7)..(7): a, c, u, g, unknown or other
cgcccanaagaaccacaag

SEQ ID NO: 1134379 - RNA, 19 nt, Artificial Sequence
  Description of Artificial Sequence: Synthetic oligonucleotide
gcguucgucguuccccaca

SEQ ID NO: 1134380 - RNA, 19 nt, Artificial Sequence
  Description of Artificial Sequence: Synthetic oligonucleotide
cacaccuccuauguacagu

SEQ ID NO: 1134381 - RNA, 19 nt, Artificial Sequence
  Description of Artificial Sequence: Synthetic oligonucleotide
gacagaccacacacaugua

SEQ ID NO: 1134382 - RNA, 19 nt, Artificial Sequence
  Description of Artificial Sequence: Synthetic oligonucleotide
acgcuacuuuugaaguguu

SEQ ID NO: 1134383 - RNA, 19 nt, Artificial Sequence
  Description of Artificial Sequence: Synthetic oligonucleotide
cuguaagugccuccuuguu

SEQ ID NO: 1134384 - RNA, 19 nt, Artificial Sequence
  Description of Artificial Sequence: Synthetic oligonucleotide
gucaugcaccaguccauuu

SEQ ID NO: 1134385 - RNA, 19 nt, Artificial Sequence
  Description of Artificial Sequence: Synthetic oligonucleotide
guacauugguccaggcauu

SEQ ID NO: 1134386 - RNA, 19 nt, Artificial Sequence
  Description of Artificial Sequence: Synthetic oligonucleotide
cgcagcuuaacaauuuaau

SEQ ID NO: 1134387 - RNA, 19 nt, Artificial Sequence
  Description of Artificial Sequence: Synthetic oligonucleotide
caaugucaggugcggcagu

SEQ ID NO: 1134388 - RNA, 19 nt, Artificial Sequence
  Description of Artificial Sequence: Synthetic oligonucleotide
ccugacgcccaucugcugu

SEQ ID NO: 1134389 - RNA, 19 nt, Artificial Sequence
  Description of Artificial Sequence: Synthetic oligonucleotide
cuuguugauuggccuccau

SEQ ID NO: 1134390 - RNA, 19 nt, Artificial Sequence
  Description of Artificial Sequence: Synthetic oligonucleotide
uccccgcacuugagugcau

SEQ ID NO: 1134391 - RNA, 19 nt, Artificial Sequence
  Description of Artificial Sequence: Synthetic oligonucleotide
cgguacauugguccaggca

SEQ ID NO: 1134392 - RNA, 19 nt, Artificial Sequence
  Description of Artificial Sequence: Synthetic oligonucleotide
gggaggugcguaucucagu

SEQ ID NO: 1134393 - RNA, 19 nt, Artificial Sequence
  Description of Artificial Sequence: Synthetic oligonucleotide
ccaugacuccccgcacuug

SEQ ID NO: 1134394 - RNA, 19 nt, Artificial Sequence
  Description of Artificial Sequence: Synthetic oligonucleotide
caucgcauucuguguuauu

SEQ ID NO: 1134395 - RNA, 19 nt, Artificial Sequence
  Description of Artificial Sequence: Synthetic oligonucleotide
gcagaccccugccuucugu

SEQ ID NO: 1134396 - RNA, 19 nt, Artificial Sequence
  Description of Artificial Sequence: Synthetic oligonucleotide
ggugcguaucucagucugu

SEQ ID NO: 1134397 - RNA, 19 nt, Artificial Sequence
  Description of Artificial Sequence: Synthetic oligonucleotide
gggucaugcaccaguccau

SEQ ID NO: 1134398 - RNA, 19 nt, Artificial Sequence
  Description of Artificial Sequence: Synthetic oligonucleotide
ccgucucaacacacuugga

SEQ ID NO: 1134399 - RNA, 19 nt, Artificial Sequence
  Description of Artificial Sequence: Synthetic oligonucleotide
ccgcacuugagugcauuaa

SEQ ID NO: 1134400 - RNA, 19 nt, Artificial Sequence
  Description of Artificial Sequence: Synthetic oligonucleotide
cucguucagucugcagaau

SEQ ID NO: 1134401 - RNA, 19 nt, Artificial Sequence
  Description of Artificial Sequence: Synthetic oligonucleotide
gcaucgcauucuguguuau

SEQ ID NO: 1134402 - RNA, 19 nt, Artificial Sequence
  Description of Artificial Sequence: Synthetic oligonucleotide
cgucguuccccacagcauu

SEQ ID NO: 1134403 - RNA, 19 nt, Artificial Sequence
  Description of Artificial Sequence: Synthetic oligonucleotide
cgguuauaaaagugacuuu

SEQ ID NO: 1134404 - RNA, 19 nt, Artificial Sequence
  Description of Artificial Sequence: Synthetic oligonucleotide
ccccaugacuccccgcacu

SEQ ID NO: 1134405 - RNA, 19 nt, Artificial Sequence
  Description of Artificial Sequence: Synthetic oligonucleotide
ggcauuggauugggauaau

SEQ ID NO: 1134406 - RNA, 19 nt, Artificial Sequence
  Description of Artificial Sequence: Synthetic oligonucleotide
ccccgcacuugagugcauu

SEQ ID NO: 1134407 - RNA, 19 nt, Artificial Sequence
  Description of Artificial Sequence: Synthetic oligonucleotide
aauaaaaucagccuuaggc

SEQ ID NO: 1134408 - RNA, 19 nt, Artificial Sequence
  Description of Artificial Sequence: Synthetic oligonucleotide
aauauuacaauuuacggug

SEQ ID NO: 1134409 - RNA, 19 nt, Artificial Sequence
  Description of Artificial Sequence: Synthetic oligonucleotide
uaucuaauuaaauagguag

SEQ ID NO: 1134410 - RNA, 19 nt, Artificial Sequence
  Description of Artificial Sequence: Synthetic oligonucleotide
uuuaauauggacaccagcc

SEQ ID NO: 1134411 - RNA, 19 nt, Artificial Sequence
  Description of Artificial Sequence: Synthetic oligonucleotide
aacauuagaucacuguacc

SEQ ID NO: 1134412 - RNA, 19 nt, Artificial Sequence
  Description of Artificial Sequence: Synthetic oligonucleotide
aaaacuauaauucaugauu

SEQ ID NO: 1134413 - RNA, 19 nt, Artificial Sequence
  Description of Artificial Sequence: Synthetic oligonucleotide
aaauauuacaauuuacggu

SEQ ID NO: 1134414 - RNA, 19 nt, Artificial Sequence
  Description of Artificial Sequence: Synthetic oligonucleotide
aauaacucugaucuauaac

SEQ ID NO: 1134415 - RNA, 19 nt, Artificial Sequence
  Description of Artificial Sequence: Synthetic oligonucleotide
aagccuaaaacauauggag

SEQ ID NO: 1134416 - RNA, 19 nt, Artificial Sequence
  Description of Artificial Sequence: Synthetic oligonucleotide
auaagccuaaaacauaugg

SEQ ID NO: 1134417 - RNA, 19 nt, Artificial Sequence
  Description of Artificial Sequence: Synthetic oligonucleotide
aaaccauaagguaaggugc

SEQ ID NO: 1134418 - RNA, 19 nt, Artificial Sequence
  Description of Artificial Sequence: Synthetic oligonucleotide
uuugauguaaaaucggcag

SEQ ID NO: 1134419 - RNA, 19 nt, Artificial Sequence
  Description of Artificial Sequence: Synthetic oligonucleotide
uuccaaauaaauaagcaga

SEQ ID NO: 1134420 - RNA, 19 nt, Artificial Sequence
  Description of Artificial Sequence: Synthetic oligonucleotide
ucuaauuaaauagguagcg

SEQ ID NO: 1134421 - RNA, 19 nt, Artificial Sequence
  Description of Artificial Sequence: Synthetic oligonucleotide
gaaaccauaagguaaggug

SEQ ID NO: 1134422 - RNA, 19 nt, Artificial Sequence
  Description of Artificial Sequence: Synthetic oligonucleotide
ucauucaacaaaguaaggg

SEQ ID NO: 1134423 - RNA, 19 nt, Artificial Sequence
  Description of Artificial Sequence: Synthetic oligonucleotide
gauaggaacacauagucca

SEQ ID NO: 1134424 - RNA, 19 nt, Artificial Sequence
  Description of Artificial Sequence: Synthetic oligonucleotide
agucucucaauucaaggcc

SEQ ID NO: 1134425 - RNA, 19 nt, Artificial Sequence
  Description of Artificial Sequence: Synthetic oligonucleotide
acaauuuacggugacaugg

SEQ ID NO: 1134426 - RNA, 19 nt, Artificial Sequence
  Description of Artificial Sequence: Synthetic oligonucleotide
uccacgagcacccauacag

SEQ ID NO: 1134427 - RNA, 19 nt, Artificial Sequence
  Description of Artificial Sequence: Synthetic oligonucleotide
aacaaaguaaggguucacc

SEQ ID NO: 1134428 - RNA, 19 nt, Artificial Sequence
  Description of Artificial Sequence: Synthetic oligonucleotide
auuccuacaguuuaucuag

SEQ ID NO: 1134429 - RNA, 19 nt, Artificial Sequence
  Description of Artificial Sequence: Synthetic oligonucleotide
ucagacauaacacgcaccc

SEQ ID NO: 1134430 - RNA, 19 nt, Artificial Sequence
  Description of Artificial Sequence: Synthetic oligonucleotide
uuuaagcaaaacaagguau

SEQ ID NO: 1134431 - RNA, 19 nt, Artificial Sequence
  Description of Artificial Sequence: Synthetic oligonucleotide
uuauaauagggcauuaaaa

SEQ ID NO: 1134432 - RNA, 19 nt, Artificial Sequence
  Description of Artificial Sequence: Synthetic oligonucleotide
aacacuaaguaucuaauua

SEQ ID NO: 1134433 - RNA, 19 nt, Artificial Sequence
  Description of Artificial Sequence: Synthetic oligonucleotide
cuuaguguaauagaagucc

SEQ ID NO: 1134434 - RNA, 19 nt, Artificial Sequence
  Description of Artificial Sequence: Synthetic oligonucleotide
aaaugauucuaacaggaaa

SEQ ID NO: 1134435 - RNA, 19 nt, Artificial Sequence
  Description of Artificial Sequence: Synthetic oligonucleotide
aaacauuagaucacuguac

SEQ ID NO: 1134436 - RNA, 19 nt, Artificial Sequence
  Description of Artificial Sequence: Synthetic oligonucleotide
aauacaugcucagcaacgc

SEQ ID NO: 1134437 - RNA, 19 nt, Artificial Sequence
  Description of Artificial Sequence: Synthetic oligonucleotide
uaaggaaucuaaauuucag

SEQ ID NO: 1134438 - RNA, 19 nt, Artificial Sequence
  Description of Artificial Sequence: Synthetic oligonucleotide
uguugaaaccauaagguaa

SEQ ID NO: 1134439 - RNA, 19 nt, Artificial Sequence
  Description of Artificial Sequence: Synthetic oligonucleotide
aaguaucuaauuaaauagg

SEQ ID NO: 1134440 - RNA, 19 nt, Artificial Sequence
  Description of Artificial Sequence: Synthetic oligonucleotide
ucaucuuuuacucuauacu

SEQ ID NO: 1134441 - RNA, 19 nt, Artificial Sequence
  Description of Artificial Sequence: Synthetic oligonucleotide
aaaaucggcagaaacgggg

SEQ ID NO: 1134442 - RNA, 19 nt, Artificial Sequence
  Description of Artificial Sequence: Synthetic oligonucleotide
aaccauugaaaauauuaca

SEQ ID NO: 1134443 - RNA, 19 nt, Artificial Sequence
  Description of Artificial Sequence: Synthetic oligonucleotide
uuuacggugacaugguaag

SEQ ID NO: 1134444 - RNA, 19 nt, Artificial Sequence
  Description of Artificial Sequence: Synthetic oligonucleotide
uuaauauggacaccagccc

SEQ ID NO: 1134445 - RNA, 19 nt, Artificial Sequence
  Description of Artificial Sequence: Synthetic oligonucleotide
gaaaucacgaaaauggaac

SEQ ID NO: 1134446 - RNA, 19 nt, Artificial Sequence
  Description of Artificial Sequence: Synthetic oligonucleotide
aaauacaugcucagcaacg

SEQ ID NO: 1134447 - RNA, 19 nt, Artificial Sequence
  Description of Artificial Sequence: Synthetic oligonucleotide
uccaaagcuaaaauuacac

SEQ ID NO: 1134448 - RNA, 19 nt, Artificial Sequence
  Description of Artificial Sequence: Synthetic oligonucleotide
uuaaauagguagcgguggg

SEQ ID NO: 1134449 - RNA, 19 nt, Artificial Sequence
  Description of Artificial Sequence: Synthetic oligonucleotide
acgaaaauggaacaugucu

SEQ ID NO: 1134450 - RNA, 19 nt, Artificial Sequence
  Description of Artificial Sequence: Synthetic oligonucleotide
uucuaacaggaaaagagga

SEQ ID NO: 1134451 - RNA, 19 nt, Artificial Sequence
  Description of Artificial Sequence: Synthetic oligonucleotide
aucuaauuaaauagguagc

SEQ ID NO: 1134452 - RNA, 19 nt, Artificial Sequence
  Description of Artificial Sequence: Synthetic oligonucleotide
accguaaauaaggaaaggc

SEQ ID NO: 1134453 - RNA, 19 nt, Artificial Sequence
  Description of Artificial Sequence: Synthetic oligonucleotide
caucuuuuacucuauacug

SEQ ID NO: 1134454 - RNA, 19 nt, Artificial Sequence
  Description of Artificial Sequence: Synthetic oligonucleotide
uaagccuaaaacauaugga

SEQ ID NO: 1134455 - RNA, 19 nt, Artificial Sequence
  Description of Artificial Sequence: Synthetic oligonucleotide
ugcaguagagugcaguucc

SEQ ID NO: 1134456 - RNA, 19 nt, Artificial Sequence
  Description of Artificial Sequence: Synthetic oligonucleotide
auuaaauagguagcggugg

SEQ ID NO: 1134457 - RNA, 19 nt, Artificial Sequence
  Description of Artificial Sequence: Synthetic oligonucleotide
ucuaaauuucaguauucug

SEQ ID NO: 1134458 - RNA, 19 nt, Artificial Sequence
  Description of Artificial Sequence: Synthetic oligonucleotide
uucuaauaaaaucagccuu

SEQ ID NO: 1134459 - RNA, 19 nt, Artificial Sequence
  Description of Artificial Sequence: Synthetic oligonucleotide
uacaguaggaacuaccccu

SEQ ID NO: 1134460 - RNA, 19 nt, Artificial Sequence
  Description of Artificial Sequence: Synthetic oligonucleotide
cuguguaucaugaggaggc

SEQ ID NO: 1134461 - RNA, 19 nt, Artificial Sequence
  Description of Artificial Sequence: Synthetic oligonucleotide
guaauagaaguccacguug

SEQ ID NO: 1134462 - RNA, 19 nt, Artificial Sequence
  Description of Artificial Sequence: Synthetic oligonucleotide
auagaaguccacguugucc

SEQ ID NO: 1134463 - RNA, 19 nt, Artificial Sequence
  Description of Artificial Sequence: Synthetic oligonucleotide
ugucuuaguguaauagaag

SEQ ID NO: 1134464 - RNA, 19 nt, Artificial Sequence
  Description of Artificial Sequence: Synthetic oligonucleotide
uacucuauacuggauaucc

SEQ ID NO: 1134465 - RNA, 19 nt, Artificial Sequence
  Description of Artificial Sequence: Synthetic oligonucleotide
auacaguaggaacuacccc

SEQ ID NO: 1134466 - RNA, 19 nt, Artificial Sequence
  Description of Artificial Sequence: Synthetic oligonucleotide
ccuaaugacagauuuaagc

SEQ ID NO: 1134467 - RNA, 19 nt, Artificial Sequence
  Description of Artificial Sequence: Synthetic oligonucleotide
uguuucauucaacaaagua

SEQ ID NO: 1134468 - RNA, 19 nt, Artificial Sequence
  Description of Artificial Sequence: Synthetic oligonucleotide
aaccauaagguaaggugcc

SEQ ID NO: 1134469 - RNA, 19 nt, Artificial Sequence
  Description of Artificial Sequence: Synthetic oligonucleotide
aaucuaaauuucaguauuc

SEQ ID NO: 1134470 - RNA, 19 nt, Artificial Sequence
  Description of Artificial Sequence: Synthetic oligonucleotide
acuacucagucucaugagg

SEQ ID NO: 1134471 - RNA, 19 nt, Artificial Sequence
  Description of Artificial Sequence: Synthetic oligonucleotide
gaugggacccauuuuacac

SEQ ID NO: 1134472 - RNA, 19 nt, Artificial Sequence
  Description of Artificial Sequence: Synthetic oligonucleotide
aucuaguucacagguaagc

SEQ ID NO: 1134473 - RNA, 19 nt, Artificial Sequence
  Description of Artificial Sequence: Synthetic oligonucleotide
ugauaggaacacauagucc

SEQ ID NO: 1134474 - RNA, 19 nt, Artificial Sequence
  Description of Artificial Sequence: Synthetic oligonucleotide
ucuauuuccuggaaucgca

SEQ ID NO: 1134475 - RNA, 19 nt, Artificial Sequence
  Description of Artificial Sequence: Synthetic oligonucleotide
gguaugauugaauaucugc

SEQ ID NO: 1134476 - RNA, 19 nt, Artificial Sequence
  Description of Artificial Sequence: Synthetic oligonucleotide
ugauugaauaucugcuucc

SEQ ID NO: 1134477 - RNA, 19 nt, Artificial Sequence
  Description of Artificial Sequence: Synthetic oligonucleotide
uaaaaucggcagaaacggg

SEQ ID NO: 1134478 - RNA, 19 nt, Artificial Sequence
  Description of Artificial Sequence: Synthetic oligonucleotide
aauggaacaugucugugua

SEQ ID NO: 1134479 - RNA, 19 nt, Artificial Sequence
  Description of Artificial Sequence: Synthetic oligonucleotide
uaauagaaguccacguugu

SEQ ID NO: 1134480 - RNA, 19 nt, Artificial Sequence
  Description of Artificial Sequence: Synthetic oligonucleotide
aggaaucuaaauuucagua

SEQ ID NO: 1134481 - RNA, 19 nt, Artificial Sequence
  Description of Artificial Sequence: Synthetic oligonucleotide
uagaaaucacgaaaaugga

SEQ ID NO: 1134482 - RNA, 19 nt, Artificial Sequence
  Description of Artificial Sequence: Synthetic oligonucleotide
ucuauacuggauauccacu

SEQ ID NO: 1134483 - RNA, 19 nt, Artificial Sequence
  Description of Artificial Sequence: Synthetic oligonucleotide
ugugucuuaguguaauaga

SEQ ID NO: 1134484 - RNA, 19 nt, Artificial Sequence
  Description of Artificial Sequence: Synthetic oligonucleotide
cuaauuaaauagguagcgg

SEQ ID NO: 1134485 - RNA, 19 nt, Artificial Sequence
  Description of Artificial Sequence: Synthetic oligonucleotide
uucaacaaaguaaggguuc

SEQ ID NO: 1134486 - RNA, 19 nt, Artificial Sequence
  Description of Artificial Sequence: Synthetic oligonucleotide
aaauuuauaauagggcauu

SEQ ID NO: 1134487 - RNA, 19 nt, Artificial Sequence
  Description of Artificial Sequence: Synthetic oligonucleotide
cuagaauaauguccaaagc

SEQ ID NO: 1134488 - RNA, 19 nt, Artificial Sequence
  Description of Artificial Sequence: Synthetic oligonucleotide
acuagcgccuuccacagag

SEQ ID NO: 1134489 - RNA, 19 nt, Artificial Sequence
  Description of Artificial Sequence: Synthetic oligonucleotide
auaaauaacucugaucuau

SEQ ID NO: 1134490 - RNA, 19 nt, Artificial Sequence
  Description of Artificial Sequence: Synthetic oligonucleotide
uuacaauuuacggugacau

SEQ ID NO: 1134491 - RNA, 19 nt, Artificial Sequence
  Description of Artificial Sequence: Synthetic oligonucleotide
aguaggaacuaccccuuac

SEQ ID NO: 1134492 - RNA, 19 nt, Artificial Sequence
  Description of Artificial Sequence: Synthetic oligonucleotide
uguaauagaaguccacguu

SEQ ID NO: 1134493 - RNA, 19 nt, Artificial Sequence
  Description of Artificial Sequence: Synthetic oligonucleotide
agauaagccacacaguguu

SEQ ID NO: 1134494 - RNA, 19 nt, Artificial Sequence
  Description of Artificial Sequence: Synthetic oligonucleotide
acauuagaucacuguaccg

SEQ ID NO: 1134495 - RNA, 19 nt, Artificial Sequence
  Description of Artificial Sequence: Synthetic oligonucleotide
ggaacuaccccuuacucag

SEQ ID NO: 1134496 - RNA, 19 nt, Artificial Sequence
  Description of Artificial Sequence: Synthetic oligonucleotide
ucuaguucacagguaagcc

SEQ ID NO: 1134497 - RNA, 19 nt, Artificial Sequence
  Description of Artificial Sequence: Synthetic oligonucleotide
uuacacaggaugugaauac

SEQ ID NO: 1134498 - RNA, 19 nt, Artificial Sequence
  Description of Artificial Sequence: Synthetic oligonucleotide
aguaucuaauuaaauaggu

SEQ ID NO: 1134499 - RNA, 19 nt, Artificial Sequence
  Description of Artificial Sequence: Synthetic oligonucleotide
cagucucucaauucaaggc

SEQ ID NO: 1134500 - RNA, 19 nt, Artificial Sequence
  Description of Artificial Sequence: Synthetic oligonucleotide
aaacacuaaguaucuaauu

SEQ ID NO: 1134501 - RNA, 19 nt, Artificial Sequence
  Description of Artificial Sequence: Synthetic oligonucleotide
auaaggaaaggccaccuaa

SEQ ID NO: 1134502 - RNA, 19 nt, Artificial Sequence
  Description of Artificial Sequence: Synthetic oligonucleotide
cucuauacuggauauccac

SEQ ID NO: 1134503 - RNA, 19 nt, Artificial Sequence
  Description of Artificial Sequence: Synthetic oligonucleotide
uaaauaaggaaaggccacc

SEQ ID NO: 1134504 - RNA, 19 nt, Artificial Sequence
  Description of Artificial Sequence: Synthetic oligonucleotide
acauaacacgcacccacac

SEQ ID NO: 1134505 - RNA, 19 nt, Artificial Sequence
  Description of Artificial Sequence: Synthetic oligonucleotide
uaggcaaccucacuagcgc

SEQ ID NO: 1134506 - RNA, 19 nt, Artificial Sequence
  Description of Artificial Sequence: Synthetic oligonucleotide
aaaggucaucuuuuacucu

SEQ ID NO: 1134507 - RNA, 19 nt, Artificial Sequence
  Description of Artificial Sequence: Synthetic oligonucleotide
uacggugacaugguaagag

SEQ ID NO: 1134508 - RNA, 19 nt, Artificial Sequence
  Description of Artificial Sequence: Synthetic oligonucleotide
ugggaguucugucauggug

SEQ ID NO: 1134509 - RNA, 19 nt, Artificial Sequence
  Description of Artificial Sequence: Synthetic oligonucleotide
aauagguagcggugggaug

SEQ ID NO: 1134510 - RNA, 19 nt, Artificial Sequence
  Description of Artificial Sequence: Synthetic oligonucleotide
ugaggguauagccugcgac

SEQ ID NO: 1134511 - RNA, 19 nt, Artificial Sequence
  Description of Artificial Sequence: Synthetic oligonucleotide
cuuaagguaugauugaaua

SEQ ID NO: 1134512 - RNA, 19 nt, Artificial Sequence
  Description of Artificial Sequence: Synthetic oligonucleotide
ugauccaugauaggaacac

SEQ ID NO: 1134513 - RNA, 19 nt, Artificial Sequence
  Description of Artificial Sequence: Synthetic oligonucleotide
uucagacauaacacgcacc

SEQ ID NO: 1134514 - RNA, 19 nt, Artificial Sequence
  Description of Artificial Sequence: Synthetic oligonucleotide
uaucuaguucacagguaag

SEQ ID NO: 1134515 - RNA, 19 nt, Artificial Sequence
  Description of Artificial Sequence: Synthetic oligonucleotide
guaaauaaggaaaggccac

SEQ ID NO: 1134516 - RNA, 19 nt, Artificial Sequence
  Description of Artificial Sequence: Synthetic oligonucleotide
ggaaaggccaccuaaugac

SEQ ID NO: 1134517 - RNA, 19 nt, Artificial Sequence
  Description of Artificial Sequence: Synthetic oligonucleotide
guaccguaaauaaggaaag

SEQ ID NO: 1134518 - RNA, 19 nt, Artificial Sequence
  Description of Artificial Sequence: Synthetic oligonucleotide
auaguccacaccccugagg

SEQ ID NO: 1134519 - RNA, 19 nt, Artificial Sequence
  Description of Artificial Sequence: Synthetic oligonucleotide
aaauagguagcggugggau

SEQ ID NO: 1134520 - RNA, 19 nt, Artificial Sequence
  Description of Artificial Sequence: Synthetic oligonucleotide
cauaagguaaggugccuac

SEQ ID NO: 1134521 - RNA, 19 nt, Artificial Sequence
  Description of Artificial Sequence: Synthetic oligonucleotide
ccguaaauaaggaaaggcc

SEQ ID NO: 1134522 - RNA, 19 nt, Artificial Sequence
  Description of Artificial Sequence: Synthetic oligonucleotide
auaggcaaccucacuagcg

SEQ ID NO: 1134523 - RNA, 19 nt, Artificial Sequence
  Description of Artificial Sequence: Synthetic oligonucleotide
agaauaauguccaaagcua

SEQ ID NO: 1134524 - RNA, 19 nt, Artificial Sequence
  Description of Artificial Sequence: Synthetic oligonucleotide
agcaacgcacucucaacuc

SEQ ID NO: 1134525 - RNA, 19 nt, Artificial Sequence
  Description of Artificial Sequence: Synthetic oligonucleotide
ucaacaaaguaaggguuca

SEQ ID NO: 1134526 - RNA, 19 nt, Artificial Sequence
  Description of Artificial Sequence: Synthetic oligonucleotide
ugaauacaaggucuucaaa

SEQ ID NO: 1134527 - RNA, 19 nt, Artificial Sequence
  Description of Artificial Sequence: Synthetic oligonucleotide
uggaaucgcacucuccgcu

SEQ ID NO: 1134528 - RNA, 19 nt, Artificial Sequence
  Description of Artificial Sequence: Synthetic oligonucleotide
ucacuagcgccuuccacag

SEQ ID NO: 1134529 - RNA, 19 nt, Artificial Sequence
  Description of Artificial Sequence: Synthetic oligonucleotide
uuuaucuaguucacaggua

SEQ ID NO: 1134530 - RNA, 19 nt, Artificial Sequence
  Description of Artificial Sequence: Synthetic oligonucleotide
aggaagacaguggcuacgc

SEQ ID NO: 1134531 - RNA, 19 nt, Artificial Sequence
  Description of Artificial Sequence: Synthetic oligonucleotide
gacuacucagucucaugag

SEQ ID NO: 1134532 - RNA, 19 nt, Artificial Sequence
  Description of Artificial Sequence: Synthetic oligonucleotide
cuucagacauaacacgcac

SEQ ID NO: 1134533 - RNA, 19 nt, Artificial Sequence
  Description of Artificial Sequence: Synthetic oligonucleotide
aggaacuaccccuuacuca

SEQ ID NO: 1134534 - RNA, 19 nt, Artificial Sequence
  Description of Artificial Sequence: Synthetic oligonucleotide
aguaacaacuacaaagcaa

SEQ ID NO: 1134535 - RNA, 19 nt, Artificial Sequence
  Description of Artificial Sequence: Synthetic oligonucleotide
aucacgaaaauggaacaug

SEQ ID NO: 1134536 - RNA, 19 nt, Artificial Sequence
  Description of Artificial Sequence: Synthetic oligonucleotide
gucuuaguguaauagaagu

SEQ ID NO: 1134537 - RNA, 19 nt, Artificial Sequence
  Description of Artificial Sequence: Synthetic oligonucleotide
uacaauuuacggugacaug

SEQ ID NO: 1134538 - RNA, 19 nt, Artificial Sequence
  Description of Artificial Sequence: Synthetic oligonucleotide
ccaugauaggaacacauag

SEQ ID NO: 1134539 - RNA, 19 nt, Artificial Sequence
  Description of Artificial Sequence: Synthetic oligonucleotide
uaggcauaaggaaucuaaa

SEQ ID NO: 1134540 - RNA, 19 nt, Artificial Sequence
  Description of Artificial Sequence: Synthetic oligonucleotide
uaccguaaauaaggaaagg

SEQ ID NO: 1134541 - RNA, 19 nt, Artificial Sequence
  Description of Artificial Sequence: Synthetic oligonucleotide
aggcaaccucacuagcgcc

SEQ ID NO: 1134542 - RNA, 19 nt, Artificial Sequence
  Description of Artificial Sequence: Synthetic oligonucleotide
agucucaugagguggccug

SEQ ID NO: 1134543 - RNA, 19 nt, Artificial Sequence
  Description of Artificial Sequence: Synthetic oligonucleotide
aauaagccuaaaacauaug

SEQ ID NO: 1134544 - RNA, 19 nt, Artificial Sequence
  Description of Artificial Sequence: Synthetic oligonucleotide
agucaaaugaggcuuccua

SEQ ID NO: 1134545 - RNA, 19 nt, Artificial Sequence
  Description of Artificial Sequence: Synthetic oligonucleotide
aucuaaauuucaguauucu

SEQ ID NO: 1134546 - RNA, 19 nt, Artificial Sequence
  Description of Artificial Sequence: Synthetic oligonucleotide
aggcauaaggaaucuaaau

SEQ ID NO: 1134547 - RNA, 19 nt, Artificial Sequence
  Description of Artificial Sequence: Synthetic oligonucleotide
uggacaccagcccuucugc

SEQ ID NO: 1134548 - RNA, 19 nt, Artificial Sequence
  Description of Artificial Sequence: Synthetic oligonucleotide
aaucgcacucuccgcuuag

SEQ ID NO: 1134549 - RNA, 19 nt, Artificial Sequence
  Description of Artificial Sequence: Synthetic oligonucleotide
auuagaucacuguaccgua

SEQ ID NO: 1134550 - RNA, 19 nt, Artificial Sequence
  Description of Artificial Sequence: Synthetic oligonucleotide
acgguguugaaaccauaag

SEQ ID NO: 1134551 - RNA, 19 nt, Artificial Sequence
  Description of Artificial Sequence: Synthetic oligonucleotide
uaccccuuacucagcacag

SEQ ID NO: 1134552 - RNA, 19 nt, Artificial Sequence
  Description of Artificial Sequence: Synthetic oligonucleotide
uucaggccugucaaauuca

SEQ ID NO: 1134553 - RNA, 19 nt, Artificial Sequence
  Description of Artificial Sequence: Synthetic oligonucleotide
gacugcaugucgcccacag

SEQ ID NO: 1134554 - RNA, 19 nt, Artificial Sequence
  Description of Artificial Sequence: Synthetic oligonucleotide
uagaucacuguaccguaaa

SEQ ID NO: 1134555 - RNA, 19 nt, Artificial Sequence
  Description of Artificial Sequence: Synthetic oligonucleotide
uccuaaacauuagaucacu

SEQ ID NO: 1134556 - RNA, 19 nt, Artificial Sequence
  Description of Artificial Sequence: Synthetic oligonucleotide
ugcaugucgcccacagugc

SEQ ID NO: 1134557 - RNA, 19 nt, Artificial Sequence
  Description of Artificial Sequence: Synthetic oligonucleotide
aauuuacggugacauggua

SEQ ID NO: 1134558 - RNA, 19 nt, Artificial Sequence
  Description of Artificial Sequence: Synthetic oligonucleotide
uacucagucucaugaggug

SEQ ID NO: 1134559 - RNA, 19 nt, Artificial Sequence
  Description of Artificial Sequence: Synthetic oligonucleotide
uccccuauugugucauucc

SEQ ID NO: 1134560 - RNA, 19 nt, Artificial Sequence
  Description of Artificial Sequence: Synthetic oligonucleotide
uuagaucacuguaccguaa

SEQ ID NO: 1134561 - RNA, 19 nt, Artificial Sequence
  Description of Artificial Sequence: Synthetic oligonucleotide
aaaacauauggagcugaaa

SEQ ID NO: 1134562 - RNA, 19 nt, Artificial Sequence
  Description of Artificial Sequence: Synthetic oligonucleotide
ugagacuugggaguucugu

SEQ ID NO: 1134563 - RNA, 19 nt, Artificial Sequence
  Description of Artificial Sequence: Synthetic oligonucleotide
cauuugggcaggguggucc

SEQ ID NO: 1134564 - RNA, 19 nt, Artificial Sequence
  Description of Artificial Sequence: Synthetic oligonucleotide
aaucuagaauaauguccaa

SEQ ID NO: 1134565 - RNA, 19 nt, Artificial Sequence
  Description of Artificial Sequence: Synthetic oligonucleotide
aaaacgguguugaaaccau

SEQ ID NO: 1134566 - RNA, 19 nt, Artificial Sequence
  Description of Artificial Sequence: Synthetic oligonucleotide
auaggaacacauaguccac

SEQ ID NO: 1134567 - RNA, 19 nt, Artificial Sequence
  Description of Artificial Sequence: Synthetic oligonucleotide
aacgguguugaaaccauaa

SEQ ID NO: 1134568 - RNA, 19 nt, Artificial Sequence
  Description of Artificial Sequence: Synthetic oligonucleotide
aaggugccuacaucugugu

SEQ ID NO: 1134569 - RNA, 19 nt, Artificial Sequence
  Description of Artificial Sequence: Synthetic oligonucleotide
cuauuuccuggaaucgcac

SEQ ID NO: 1134570 - RNA, 19 nt, Artificial Sequence
  Description of Artificial Sequence: Synthetic oligonucleotide
auagggcauuaaaauaauc

SEQ ID NO: 1134571 - RNA, 19 nt, Artificial Sequence
  Description of Artificial Sequence: Synthetic oligonucleotide
uacuuaagguaugauugaa

SEQ ID NO: 1134572 - RNA, 19 nt, Artificial Sequence
  Description of Artificial Sequence: Synthetic oligonucleotide
uaaauagguagcgguggga

SEQ ID NO: 1134573 - RNA, 19 nt, Artificial Sequence
  Description of Artificial Sequence: Synthetic oligonucleotide
uuguccgcaaagucuguac

SEQ ID NO: 1134574 - RNA, 19 nt, Artificial Sequence
  Description of Artificial Sequence: Synthetic oligonucleotide
gucaaaugaggcuuccuaa

SEQ ID NO: 1134575 - RNA, 19 nt, Artificial Sequence
  Description of Artificial Sequence: Synthetic oligonucleotide
ccaaaugauucuaacagga

SEQ ID NO: 1134576 - RNA, 19 nt, Artificial Sequence
  Description of Artificial Sequence: Synthetic oligonucleotide
cuacuuaagguaugauuga

SEQ ID NO: 1134577 - RNA, 19 nt, Artificial Sequence
  Description of Artificial Sequence: Synthetic oligonucleotide
auuacacagcucccaagau

SEQ ID NO: 1134578 - RNA, 19 nt, Artificial Sequence
  Description of Artificial Sequence: Synthetic oligonucleotide
uugugguuacugcuucaga

SEQ ID NO: 1134579 - RNA, 19 nt, Artificial Sequence
  Description of Artificial Sequence: Synthetic oligonucleotide
cauuccuacaguuuaucua

SEQ ID NO: 1134580 - RNA, 19 nt, Artificial Sequence
  Description of Artificial Sequence: Synthetic oligonucleotide
uagccugcgacuacucagu

SEQ ID NO: 1134581 - RNA, 19 nt, Artificial Sequence
  Description of Artificial Sequence: Synthetic oligonucleotide
caaauuuauaauagggcau

SEQ ID NO: 1134582 - RNA, 19 nt, Artificial Sequence
  Description of Artificial Sequence: Synthetic oligonucleotide
uccgcaaagucuguacaca

SEQ ID NO: 1134583 - RNA, 19 nt, Artificial Sequence
  Description of Artificial Sequence: Synthetic oligonucleotide
gauauccacuugugguuac

SEQ ID NO: 1134584 - RNA, 19 nt, Artificial Sequence
  Description of Artificial Sequence: Synthetic oligonucleotide
auacaugcucagcaacgca

SEQ ID NO: 1134585 - RNA, 19 nt, Artificial Sequence
  Description of Artificial Sequence: Synthetic oligonucleotide
agcuagaaaucacgaaaau

SEQ ID NO: 1134586 - RNA, 19 nt, Artificial Sequence
  Description of Artificial Sequence: Synthetic oligonucleotide
agcuaaaauuacacagcuc

SEQ ID NO: 1134587 - RNA, 19 nt, Artificial Sequence
  Description of Artificial Sequence: Synthetic oligonucleotide
auuuacggugacaugguaa

SEQ ID NO: 1134588 - RNA, 19 nt, Artificial Sequence
  Description of Artificial Sequence: Synthetic oligonucleotide
gugucuuaguguaauagaa

SEQ ID NO: 1134589 - RNA, 19 nt, Artificial Sequence
  Description of Artificial Sequence: Synthetic oligonucleotide
uacccugaugaugggaccc

SEQ ID NO: 1134590 - RNA, 19 nt, Artificial Sequence
  Description of Artificial Sequence: Synthetic oligonucleotide
cagaaguacccugaugaug

SEQ ID NO: 1134591 - RNA, 19 nt, Artificial Sequence
  Description of Artificial Sequence: Synthetic oligonucleotide
guaaggguucaccuuccac

SEQ ID NO: 1134592 - RNA, 19 nt, Artificial Sequence
  Description of Artificial Sequence: Synthetic oligonucleotide
agcagcuagaaaucacgaa

SEQ ID NO: 1134593 - RNA, 19 nt, Artificial Sequence
  Description of Artificial Sequence: Synthetic oligonucleotide
augugaauacaaggucuuc

SEQ ID NO: 1134594 - RNA, 19 nt, Artificial Sequence
  Description of Artificial Sequence: Synthetic oligonucleotide
cguaaauaaggaaaggcca

SEQ ID NO: 1134595 - RNA, 19 nt, Artificial Sequence
  Description of Artificial Sequence: Synthetic oligonucleotide
auauuacaauuuacgguga

SEQ ID NO: 1134596 - RNA, 19 nt, Artificial Sequence
  Description of Artificial Sequence: Synthetic oligonucleotide
agacaguggcuacgcacag

SEQ ID NO: 1134597 - RNA, 19 nt, Artificial Sequence
  Description of Artificial Sequence: Synthetic oligonucleotide
cuaccccuuacucagcaca

SEQ ID NO: 1134598 - RNA, 19 nt, Artificial Sequence
  Description of Artificial Sequence: Synthetic oligonucleotide
guaucuaauuaaauaggua

SEQ ID NO: 1134599 - RNA, 19 nt, Artificial Sequence
  Description of Artificial Sequence: Synthetic oligonucleotide
aaguacccugaugauggga

SEQ ID NO: 1134600 - RNA, 19 nt, Artificial Sequence
  Description of Artificial Sequence: Synthetic oligonucleotide
caccuaaugacagauuuaa

SEQ ID NO: 1134601 - RNA, 19 nt, Artificial Sequence
  Description of Artificial Sequence: Synthetic oligonucleotide
gaggguauagccugcgacu

SEQ ID NO: 1134602 - RNA, 19 nt, Artificial Sequence
  Description of Artificial Sequence: Synthetic oligonucleotide
ucaggccugucaaauucau

SEQ ID NO: 1134603 - RNA, 19 nt, Artificial Sequence
  Description of Artificial Sequence: Synthetic oligonucleotide
caacucauacaaaagcccu

SEQ ID NO: 1134604 - RNA, 19 nt, Artificial Sequence
  Description of Artificial Sequence: Synthetic oligonucleotide
gcauaaggaaucuaaauuu

SEQ ID NO: 1134605 - RNA, 19 nt, Artificial Sequence
  Description of Artificial Sequence: Synthetic oligonucleotide
guccgcaaagucuguacac

SEQ ID NO: 1134606 - RNA, 19 nt, Artificial Sequence
  Description of Artificial Sequence: Synthetic oligonucleotide
ucgcacucuccgcuuagcu

SEQ ID NO: 1134607 - RNA, 19 nt, Artificial Sequence
  Description of Artificial Sequence: Synthetic oligonucleotide
agaucacuguaccguaaau

SEQ ID NO: 1134608 - RNA, 19 nt, Artificial Sequence
  Description of Artificial Sequence: Synthetic oligonucleotide
acuuaagguaugauugaau

SEQ ID NO: 1134609 - RNA, 19 nt, Artificial Sequence
  Description of Artificial Sequence: Synthetic oligonucleotide
cauugccucagaucuguca

SEQ ID NO: 1134610 - RNA, 19 nt, Artificial Sequence
  Description of Artificial Sequence: Synthetic oligonucleotide
cacaguguuguaaguaaaa

SEQ ID NO: 1134611 - RNA, 19 nt, Artificial Sequence
  Description of Artificial Sequence: Synthetic oligonucleotide
ucugugucuuaguguaaua

SEQ ID NO: 1134612 - RNA, 19 nt, Artificial Sequence
  Description of Artificial Sequence: Synthetic oligonucleotide
auaagguaaggugccuaca

SEQ ID NO: 1134613 - RNA, 19 nt, Artificial Sequence
  Description of Artificial Sequence: Synthetic oligonucleotide
cuuccacgagcacccauac

SEQ ID NO: 1134614 - RNA, 19 nt, Artificial Sequence
  Description of Artificial Sequence: Synthetic oligonucleotide
caugucgcccacagugcag

SEQ ID NO: 1134615 - RNA, 19 nt, Artificial Sequence
  Description of Artificial Sequence: Synthetic oligonucleotide
guacccugaugaugggacc

SEQ ID NO: 1134616 - RNA, 19 nt, Artificial Sequence
  Description of Artificial Sequence: Synthetic oligonucleotide
ggcauaaggaaucuaaauu

SEQ ID NO: 1134617 - RNA, 19 nt, Artificial Sequence
  Description of Artificial Sequence: Synthetic oligonucleotide
uuacucuauacuggauauc

SEQ ID NO: 1134618 - RNA, 19 nt, Artificial Sequence
  Description of Artificial Sequence: Synthetic oligonucleotide
guaggaacuaccccuuacu

SEQ ID NO: 1134619 - RNA, 19 nt, Artificial Sequence
  Description of Artificial Sequence: Synthetic oligonucleotide
gagauuugugccugcacau

SEQ ID NO: 1134620 - RNA, 19 nt, Artificial Sequence
  Description of Artificial Sequence: Synthetic oligonucleotide
ggaaucuaaauuucaguau

SEQ ID NO: 1134621 - RNA, 19 nt, Artificial Sequence
  Description of Artificial Sequence: Synthetic oligonucleotide
acgagcacccauacaguag

SEQ ID NO: 1134622 - RNA, 19 nt, Artificial Sequence
  Description of Artificial Sequence: Synthetic oligonucleotide
accuaaugacagauuuaag

SEQ ID NO: 1134623 - RNA, 19 nt, Artificial Sequence
  Description of Artificial Sequence: Synthetic oligonucleotide
aucgcacucuccgcuuagc

SEQ ID NO: 1134624 - RNA, 19 nt, Artificial Sequence
  Description of Artificial Sequence: Synthetic oligonucleotide
gguaagagauaagccacac

SEQ ID NO: 1134625 - RNA, 19 nt, Artificial Sequence
  Description of Artificial Sequence: Synthetic oligonucleotide
cgagcacccauacaguagg

SEQ ID NO: 1134626 - RNA, 19 nt, Artificial Sequence
  Description of Artificial Sequence: Synthetic oligonucleotide
uuacggugacaugguaaga

SEQ ID NO: 1134627 - RNA, 19 nt, Artificial Sequence
  Description of Artificial Sequence: Synthetic oligonucleotide
uuccacgagcacccauaca

SEQ ID NO: 1134628 - RNA, 19 nt, Artificial Sequence
  Description of Artificial Sequence: Synthetic oligonucleotide
guaaggugccuacaucugu

SEQ ID NO: 1134629 - RNA, 19 nt, Artificial Sequence
  Description of Artificial Sequence: Synthetic oligonucleotide
ugucuacuuaagguaugau

SEQ ID NO: 1134630 - RNA, 19 nt, Artificial Sequence
  Description of Artificial Sequence: Synthetic oligonucleotide
cacagcucccaagauuaac

SEQ ID NO: 1134631 - RNA, 19 nt, Artificial Sequence
  Description of Artificial Sequence: Synthetic oligonucleotide
cuagcgccuuccacagagc

SEQ ID NO: 1134632 - RNA, 19 nt, Artificial Sequence
  Description of Artificial Sequence: Synthetic oligonucleotide
gccuacaucugugucuuag

SEQ ID NO: 1134633 - RNA, 19 nt, Artificial Sequence
  Description of Artificial Sequence: Synthetic oligonucleotide
gguaaggugccuacaucug

SEQ ID NO: 1134634 - RNA, 19 nt, Artificial Sequence
  Description of Artificial Sequence: Synthetic oligonucleotide
caauuuacggugacauggu

SEQ ID NO: 1134635 - RNA, 19 nt, Artificial Sequence
  Description of Artificial Sequence: Synthetic oligonucleotide
caacaaaguaaggguucac

SEQ ID NO: 1134636 - RNA, 19 nt, Artificial Sequence
  Description of Artificial Sequence: Synthetic oligonucleotide
ggcuacgcacagcaggaug

SEQ ID NO: 1134637 - RNA, 19 nt, Artificial Sequence
  Description of Artificial Sequence: Synthetic oligonucleotide
acugcaugucgcccacagu

SEQ ID NO: 1134638 - RNA, 19 nt, Artificial Sequence
  Description of Artificial Sequence: Synthetic oligonucleotide
agacauugccuagaauaua

SEQ ID NO: 1134639 - RNA, 19 nt, Artificial Sequence
  Description of Artificial Sequence: Synthetic oligonucleotide
gaacuaccccuuacucagc

SEQ ID NO: 1134640 - RNA, 19 nt, Artificial Sequence
  Description of Artificial Sequence: Synthetic oligonucleotide
accauaagguaaggugccu

SEQ ID NO: 1134641 - RNA, 19 nt, Artificial Sequence
  Description of Artificial Sequence: Synthetic oligonucleotide
cacacaggagacugcaugu

SEQ ID NO: 1134642 - RNA, 19 nt, Artificial Sequence
  Description of Artificial Sequence: Synthetic oligonucleotide
cuacgcacagcaggaugag

SEQ ID NO: 1134643 - RNA, 19 nt, Artificial Sequence
  Description of Artificial Sequence: Synthetic oligonucleotide
aggccaccuaaugacagau

SEQ ID NO: 1134644 - RNA, 19 nt, Artificial Sequence
  Description of Artificial Sequence: Synthetic oligonucleotide
ggugccuacaucugugucu

SEQ ID NO: 1134645 - RNA, 19 nt, Artificial Sequence
  Description of Artificial Sequence: Synthetic oligonucleotide
ggugguccccuauuguguc

SEQ ID NO: 1134646 - RNA, 19 nt, Artificial Sequence
  Description of Artificial Sequence: Synthetic oligonucleotide
aaacgguguugaaaccaua

SEQ ID NO: 1134647 - RNA, 19 nt, Artificial Sequence
  Description of Artificial Sequence: Synthetic oligonucleotide
caaauucauugccucagau

SEQ ID NO: 1134648 - RNA, 19 nt, Artificial Sequence
  Description of Artificial Sequence: Synthetic oligonucleotide
caguagagugcaguuccuc

SEQ ID NO: 1134649 - RNA, 19 nt, Artificial Sequence
  Description of Artificial Sequence: Synthetic oligonucleotide
agauuugugccugcacauu

SEQ ID NO: 1134650 - RNA, 19 nt, Artificial Sequence
  Description of Artificial Sequence: Synthetic oligonucleotide
gcuacgcacagcaggauga

SEQ ID NO: 1134651 - RNA, 19 nt, Artificial Sequence
  Description of Artificial Sequence: Synthetic oligonucleotide
cacgagcacccauacagua

SEQ ID NO: 1134652 - RNA, 19 nt, Artificial Sequence
  Description of Artificial Sequence: Synthetic oligonucleotide
gcaacgcacucucaacuca

SEQ ID NO: 1134653 - RNA, 19 nt, Artificial Sequence
  Description of Artificial Sequence: Synthetic oligonucleotide
guccccuauugugucauuc

SEQ ID NO: 1134654 - RNA, 19 nt, Artificial Sequence
  Description of Artificial Sequence: Synthetic oligonucleotide
ccgcaaagucuguacacac

SEQ ID NO: 1134655 - RNA, 19 nt, Artificial Sequence
  Description of Artificial Sequence: Synthetic oligonucleotide
ugguccccuauugugucau

SEQ ID NO: 1134656 - RNA, 19 nt, Artificial Sequence
  Description of Artificial Sequence: Synthetic oligonucleotide
aaucagccuuaggcauaag

SEQ ID NO: 1134657 - RNA, 19 nt, Artificial Sequence
  Description of Artificial Sequence: Synthetic oligonucleotide
acauugccuagaauauaaa

SEQ ID NO: 1134658 - RNA, 19 nt, Artificial Sequence
  Description of Artificial Sequence: Synthetic oligonucleotide
guagcggugggaugaccaa

SEQ ID NO: 1134659 - RNA, 19 nt, Artificial Sequence
  Description of Artificial Sequence: Synthetic oligonucleotide
uagcggugggaugaccaaa

SEQ ID NO: 1134660 - RNA, 19 nt, Artificial Sequence
  Description of Artificial Sequence: Synthetic oligonucleotide
agguggccuguuucauuca

SEQ ID NO: 1134661 - RNA, 19 nt, Artificial Sequence
  Description of Artificial Sequence: Synthetic oligonucleotide
agcggugggaugaccaaau

SEQ ID NO: 1134662 - RNA, 19 nt, Artificial Sequence
  Description of Artificial Sequence: Synthetic oligonucleotide
cagcaacgcacucucaacu

SEQ ID NO: 1134663 - RNA, 19 nt, Artificial Sequence
  Description of Artificial Sequence: Synthetic oligonucleotide
cccuucugcgggaacggcc

SEQ ID NO: 1134664 - RNA, 19 nt, Artificial Sequence
  Description of Artificial Sequence: Synthetic oligonucleotide
guauagccugcgacuacuc

SEQ ID NO: 1134665 - RNA, 19 nt, Artificial Sequence
  Description of Artificial Sequence: Synthetic oligonucleotide
gcgacuacucagucucaug

SEQ ID NO: 1134666 - RNA, 19 nt, Artificial Sequence
  Description of Artificial Sequence: Synthetic oligonucleotide
cgacuacucagucucauga

SEQ ID NO: 1134667 - RNA, 19 nt, Artificial Sequence
  Description of Artificial Sequence: Synthetic oligonucleotide
gugggaugaccaaauacau

SEQ ID NO: 1134668 - RNA, 19 nt, Artificial Sequence
  Description of Artificial Sequence: Synthetic oligonucleotide
aacgcacucucaacucaua

SEQ ID NO: 1134669 - RNA, 19 nt, Artificial Sequence
  Description of Artificial Sequence: Synthetic oligonucleotide
ugcugcauuugggcagggu

SEQ ID NO: 1134670 - RNA, 19 nt, Artificial Sequence
  Description of Artificial Sequence: Synthetic oligonucleotide
uagguagcggugggaugac

SEQ ID NO: 1134671 - RNA, 19 nt, Artificial Sequence
  Description of Artificial Sequence: Synthetic oligonucleotide
cacaccccugaggguauag

SEQ ID NO: 1134672 - RNA, 19 nt, Artificial Sequence
  Description of Artificial Sequence: Synthetic oligonucleotide
ggauauccacuugugguua

SEQ ID NO: 1134673 - RNA, 19 nt, Artificial Sequence
  Description of Artificial Sequence: Synthetic oligonucleotide
cuuaggcauaaggaaucua

SEQ ID NO: 1134674 - RNA, 19 nt, Artificial Sequence
  Description of Artificial Sequence: Synthetic oligonucleotide
gguauagccugcgacuacu

SEQ ID NO: 1134675 - RNA, 19 nt, Artificial Sequence
  Description of Artificial Sequence: Synthetic oligonucleotide
gguggccuguuucauucaa

SEQ ID NO: 1134676 - RNA, 19 nt, Artificial Sequence
  Description of Artificial Sequence: Synthetic oligonucleotide
guuguccgcaaagucugua

SEQ ID NO: 1134677 - RNA, 19 nt, Artificial Sequence
  Description of Artificial Sequence: Synthetic oligonucleotide
ugucgcccacagugcagua

SEQ ID NO: 1134678 - RNA, 19 nt, Artificial Sequence
  Description of Artificial Sequence: Synthetic oligonucleotide
caacgcacucucaacucau

SEQ ID NO: 1134679 - RNA, 19 nt, Artificial Sequence
  Description of Artificial Sequence: Synthetic oligonucleotide
cuucugcgggaacggccuc

SEQ ID NO: 1134680 - RNA, 19 nt, Artificial Sequence
  Description of Artificial Sequence: Synthetic oligonucleotide
ggucaucuuuuacucuaua

SEQ ID NO: 1134681 - RNA, 19 nt, Artificial Sequence
  Description of Artificial Sequence: Synthetic oligonucleotide
uggcuacgcacagcaggau

SEQ ID NO: 1134682 - RNA, 19 nt, Artificial Sequence
  Description of Artificial Sequence: Synthetic oligonucleotide
cacgcacccacacaaccau

SEQ ID NO: 1134683 - RNA, 19 nt, Artificial Sequence
  Description of Artificial Sequence: Synthetic oligonucleotide
cgcacucucaacucauaca

SEQ ID NO: 1134684 - RNA, 19 nt, Artificial Sequence
  Description of Artificial Sequence: Synthetic oligonucleotide
cugcgacuacucagucuca

SEQ ID NO: 1134685 - RNA, 19 nt, Artificial Sequence
  Description of Artificial Sequence: Synthetic oligonucleotide
cccugaggguauagccugc

SEQ ID NO: 1134686 - RNA, 19 nt, Artificial Sequence
  Description of Artificial Sequence: Synthetic oligonucleotide
ccuuccacgagcacccaua

SEQ ID NO: 1134687 - RNA, 19 nt, Artificial Sequence
  Description of Artificial Sequence: Synthetic oligonucleotide
ggaugaccaaauacaugcu

SEQ ID NO: 1134688 - RNA, 19 nt, Artificial Sequence
  Description of Artificial Sequence: Synthetic oligonucleotide
ugccuacaucugugucuua

SEQ ID NO: 1134689 - RNA, 19 nt, Artificial Sequence
  Description of Artificial Sequence: Synthetic oligonucleotide
ccuucugcgggaacggccu

SEQ ID NO: 1134690 - RNA, 19 nt, Artificial Sequence
  Description of Artificial Sequence: Synthetic oligonucleotide
ggcaaccucacuagcgccu

SEQ ID NO: 1134691 - RNA, 19 nt, Artificial Sequence
  Description of Artificial Sequence: Synthetic oligonucleotide
caucugagacuugggaguu

SEQ ID NO: 1134692 - RNA, 19 nt, Artificial Sequence
  Description of Artificial Sequence: Synthetic oligonucleotide
gucucaugagguggccugu

SEQ ID NO: 1134693 - RNA, 19 nt, Artificial Sequence
  Description of Artificial Sequence: Synthetic oligonucleotide
gguuacugcuucagacaua

SEQ ID NO: 1134694 - RNA, 19 nt, Artificial Sequence
  Description of Artificial Sequence: Synthetic oligonucleotide
cacuagcgccuuccacaga

SEQ ID NO: 1134695 - RNA, 19 nt, Artificial Sequence
  Description of Artificial Sequence: Synthetic oligonucleotide
gccaacauuccuacaguuu

SEQ ID NO: 1134696 - RNA, 19 nt, Artificial Sequence
  Description of Artificial Sequence: Synthetic oligonucleotide
ccccuauugugucauuccu

SEQ ID NO: 1134697 - RNA, 19 nt, Artificial Sequence
  Description of Artificial Sequence: Synthetic oligonucleotide
acgcacccacacaaccauu

SEQ ID NO: 1134698 - RNA, 19 nt, Artificial Sequence
  Description of Artificial Sequence: Synthetic oligonucleotide
caggccugucaaauucauu

SEQ ID NO: 1134699 - RNA, 19 nt, Artificial Sequence
  Description of Artificial Sequence: Synthetic oligonucleotide
cucuccgcuuagcuggcuu

SEQ ID NO: 1134700 - RNA, 19 nt, Artificial Sequence
  Description of Artificial Sequence: Synthetic oligonucleotide
ccuuaggcauaaggaaucu

SEQ ID NO: 1134701 - RNA, 19 nt, Artificial Sequence
  Description of Artificial Sequence: Synthetic oligonucleotide
gcauuugggcagggugguc

SEQ ID NO: 1134702 - RNA, 19 nt, Artificial Sequence
  Description of Artificial Sequence: Synthetic oligonucleotide
gcggugggaugaccaaaua

SEQ ID NO: 1134703 - RNA, 19 nt, Artificial Sequence
  Description of Artificial Sequence: Synthetic oligonucleotide
ccacgagcacccauacagu

SEQ ID NO: 1134704 - RNA, 19 nt, Artificial Sequence
  Description of Artificial Sequence: Synthetic oligonucleotide
gcaguagagugcaguuccu

SEQ ID NO: 1134705 - RNA, 19 nt, Artificial Sequence
  Description of Artificial Sequence: Synthetic oligonucleotide
ggccaccuaaugacagauu

SEQ ID NO: 1134706 - RNA, 19 nt, Artificial Sequence
  Description of Artificial Sequence: Synthetic oligonucleotide
gguccccuauugugucauu

SEQ ID NO: 1134707 - RNA, 19 nt, Artificial Sequence
  Description of Artificial Sequence: Synthetic oligonucleotide
cguuguccgcaaagucugu

SEQ ID NO: 1134708 - RNA, 19 nt, Artificial Sequence
  Description of Artificial Sequence: Synthetic oligonucleotide
aauuccaucucuucugggc

SEQ ID NO: 1134709 - RNA, 19 nt, Artificial Sequence
  Description of Artificial Sequence: Synthetic oligonucleotide
gaagaaaaccuuuuaaugc

SEQ ID NO: 1134710 - RNA, 19 nt, Artificial Sequence
  Description of Artificial Sequence: Synthetic oligonucleotide
aguucaauuaacuucaaca

SEQ ID NO: 1134711 - RNA, 19 nt, Artificial Sequence
  Description of Artificial Sequence: Synthetic oligonucleotide
gauuuauaguccuugagug

SEQ ID NO: 1134712 - RNA, 19 nt, Artificial Sequence
  Description of Artificial Sequence: Synthetic oligonucleotide
uuaauuugaacaagcgaag

SEQ ID NO: 1134713 - RNA, 19 nt, Artificial Sequence
  Description of Artificial Sequence: Synthetic oligonucleotide
auagcuuucuuaugguugc

SEQ ID NO: 1134714 - RNA, 19 nt, Artificial Sequence
  Description of Artificial Sequence: Synthetic oligonucleotide
aagggccuggacuaaaggc

SEQ ID NO: 1134715 - RNA, 19 nt, Artificial Sequence
  Description of Artificial Sequence: Synthetic oligonucleotide
auuuauaguccuugagugc

SEQ ID NO: 1134716 - RNA, 19 nt, Artificial Sequence
  Description of Artificial Sequence: Synthetic oligonucleotide
ugaagugcaaucuuugaug

SEQ ID NO: 1134717 - RNA, 19 nt, Artificial Sequence
  Description of Artificial Sequence: Synthetic oligonucleotide
uuaucaaucugcagcacag

SEQ ID NO: 1134718 - RNA, 19 nt, Artificial Sequence
  Description of Artificial Sequence: Synthetic oligonucleotide
cuagugauucuguugaugc

SEQ ID NO: 1134719 - RNA, 19 nt, Artificial Sequence
  Description of Artificial Sequence: Synthetic oligonucleotide
uuuauaguccuugagugcc

SEQ ID NO: 1134720 - RNA, 19 nt, Artificial Sequence
  Description of Artificial Sequence: Synthetic oligonucleotide
uggggcucaacacaggacg

SEQ ID NO: 1134721 - RNA, 19 nt, Artificial Sequence
  Description of Artificial Sequence: Synthetic oligonucleotide
acgguuggaguacagaacg

SEQ ID NO: 1134722 - RNA, 19 nt, Artificial Sequence
  Description of Artificial Sequence: Synthetic oligonucleotide
aggaccaaauggcagagcg

SEQ ID NO: 1134723 - RNA, 19 nt, Artificial Sequence
  Description of Artificial Sequence: Synthetic oligonucleotide
gaagugcaaucuuugaugc

SEQ ID NO: 1134724 - RNA, 19 nt, Artificial Sequence
  Description of Artificial Sequence: Synthetic oligonucleotide
cuuuuaaugcaacagcaac

SEQ ID NO: 1134725 - RNA, 19 nt, Artificial Sequence
  Description of Artificial Sequence: Synthetic oligonucleotide
cuuauacuguuucaggacc

SEQ ID NO: 1134726 - RNA, 19 nt, Artificial Sequence
  Description of Artificial Sequence: Synthetic oligonucleotide
uucuuuacaagcucauugc

SEQ ID NO: 1134727 - RNA, 19 nt, Artificial Sequence
  Description of Artificial Sequence: Synthetic oligonucleotide
ucuuccuucagaacucggg

SEQ ID NO: 1134728 - RNA, 19 nt, Artificial Sequence
  Description of Artificial Sequence: Synthetic oligonucleotide
aaggccagcgcugaagugc

SEQ ID NO: 1134729 - RNA, 19 nt, Artificial Sequence
  Description of Artificial Sequence: Synthetic oligonucleotide
uuuaaugcaacagcaacac

SEQ ID NO: 1134730 - RNA, 19 nt, Artificial Sequence
  Description of Artificial Sequence: Synthetic oligonucleotide
uggacuaaaggcacugggg

SEQ ID NO: 1134731 - RNA, 19 nt, Artificial Sequence
  Description of Artificial Sequence: Synthetic oligonucleotide
uuuauugccuccuuauacu

SEQ ID NO: 1134732 - RNA, 19 nt, Artificial Sequence
  Description of Artificial Sequence: Synthetic oligonucleotide
aauuaacuucaacauauua

SEQ ID NO: 1134733 - RNA, 19 nt, Artificial Sequence
  Description of Artificial Sequence: Synthetic oligonucleotide
agcauagguagcuccauac

SEQ ID NO: 1134734 - RNA, 19 nt, Artificial Sequence
  Description of Artificial Sequence: Synthetic oligonucleotide
aaacgacaaacaacaaagc

SEQ ID NO: 1134735 - RNA, 19 nt, Artificial Sequence
  Description of Artificial Sequence: Synthetic oligonucleotide
aggcuacuaaacaagaggc

SEQ ID NO: 1134736 - RNA, 19 nt, Artificial Sequence
  Description of Artificial Sequence: Synthetic oligonucleotide
uucucaauagcuuucuuau

SEQ ID NO: 1134737 - RNA, 19 nt, Artificial Sequence
  Description of Artificial Sequence: Synthetic oligonucleotide
uuugugauucuccgaaggc

SEQ ID NO: 1134738 - RNA, 19 nt, Artificial Sequence
  Description of Artificial Sequence: Synthetic oligonucleotide
ucccuuaggggcaugcugg

SEQ ID NO: 1134739 - RNA, 19 nt, Artificial Sequence
  Description of Artificial Sequence: Synthetic oligonucleotide
uggagggacacuaaucuca

SEQ ID NO: 1134740 - RNA, 19 nt, Artificial Sequence
  Description of Artificial Sequence: Synthetic oligonucleotide
uggauuuauaguccuugag

SEQ ID NO: 1134741 - RNA, 19 nt, Artificial Sequence
  Description of Artificial Sequence: Synthetic oligonucleotide
agcacuuuagccugucaac

SEQ ID NO: 1134742 - RNA, 19 nt, Artificial Sequence
  Description of Artificial Sequence: Synthetic oligonucleotide
agaaccucgcgccugcagc

SEQ ID NO: 1134743 - RNA, 19 nt, Artificial Sequence
  Description of Artificial Sequence: Synthetic oligonucleotide
cuuugugauucuccgaagg

SEQ ID NO: 1134744 - RNA, 19 nt, Artificial Sequence
  Description of Artificial Sequence: Synthetic oligonucleotide
uccuugagugccuuguagg

SEQ ID NO: 1134745 - RNA, 19 nt, Artificial Sequence
  Description of Artificial Sequence: Synthetic oligonucleotide
aacaagcgaagcuucucag

SEQ ID NO: 1134746 - RNA, 19 nt, Artificial Sequence
  Description of Artificial Sequence: Synthetic oligonucleotide
ugugccaaggacagggugc

SEQ ID NO: 1134747 - RNA, 19 nt, Artificial Sequence
  Description of Artificial Sequence: Synthetic oligonucleotide
gcugcuaauaucuguaagg

SEQ ID NO: 1134748 - RNA, 19 nt, Artificial Sequence
  Description of Artificial Sequence: Synthetic oligonucleotide
auuaacuucaacauauuaa

SEQ ID NO: 1134749 - RNA, 19 nt, Artificial Sequence
  Description of Artificial Sequence: Synthetic oligonucleotide
guucccauccuucaaguag

SEQ ID NO: 1134750 - RNA, 19 nt, Artificial Sequence
  Description of Artificial Sequence: Synthetic oligonucleotide
uaugcagaugcucuucgca

SEQ ID NO: 1134751 - RNA, 19 nt, Artificial Sequence
  Description of Artificial Sequence: Synthetic oligonucleotide
uuccaggcuacuaaacaag

SEQ ID NO: 1134752 - RNA, 19 nt, Artificial Sequence
  Description of Artificial Sequence: Synthetic oligonucleotide
ucugguugccggcagcgcg

SEQ ID NO: 1134753 - RNA, 19 nt, Artificial Sequence
  Description of Artificial Sequence: Synthetic oligonucleotide
uuauacuguuucaggacca

SEQ ID NO: 1134754 - RNA, 19 nt, Artificial Sequence
  Description of Artificial Sequence: Synthetic oligonucleotide
cuaaacaagaggcucucac

SEQ ID NO: 1134755 - RNA, 19 nt, Artificial Sequence
  Description of Artificial Sequence: Synthetic oligonucleotide
uaauuugaacaagcgaagc

SEQ ID NO: 1134756 - RNA, 19 nt, Artificial Sequence
  Description of Artificial Sequence: Synthetic oligonucleotide
uuauugccuccuuauacug

SEQ ID NO: 1134757 - RNA, 19 nt, Artificial Sequence
  Description of Artificial Sequence: Synthetic oligonucleotide
auaugcagaugcucuucgc

SEQ ID NO: 1134758 - RNA, 19 nt, Artificial Sequence
  Description of Artificial Sequence: Synthetic oligonucleotide
ugucucuuugugauucucc

SEQ ID NO: 1134759 - RNA, 19 nt, Artificial Sequence
  Description of Artificial Sequence: Synthetic oligonucleotide
uauagucaacauaggccag

SEQ ID NO: 1134760 - RNA, 19 nt, Artificial Sequence
  Description of Artificial Sequence: Synthetic oligonucleotide
auggacuuaauuugaacaa

SEQ ID NO: 1134761 - RNA, 19 nt, Artificial Sequence
  Description of Artificial Sequence: Synthetic oligonucleotide
uggacuuaauuugaacaag

SEQ ID NO: 1134762 - RNA, 19 nt, Artificial Sequence
  Description of Artificial Sequence: Synthetic oligonucleotide
cuuccuucagaacucgggc

SEQ ID NO: 1134763 - RNA, 19 nt, Artificial Sequence
  Description of Artificial Sequence: Synthetic oligonucleotide
cugcuaauaucuguaaggc

SEQ ID NO: 1134764 - RNA, 19 nt, Artificial Sequence
  Description of Artificial Sequence: Synthetic oligonucleotide
ugcuaccucuccaaggggc

SEQ ID NO: 1134765 - RNA, 19 nt, Artificial Sequence
  Description of Artificial Sequence: Synthetic oligonucleotide
cuccaaggggccaaagugg

SEQ ID NO: 1134766 - RNA, 19 nt, Artificial Sequence
  Description of Artificial Sequence: Synthetic oligonucleotide
ugcagauagcagcuguacc

SEQ ID NO: 1134767 - RNA, 19 nt, Artificial Sequence
  Description of Artificial Sequence: Synthetic oligonucleotide
caucccaggaggaauucgg

SEQ ID NO: 1134768 - RNA, 19 nt, Artificial Sequence
  Description of Artificial Sequence: Synthetic oligonucleotide
guacguggcagauuccagg

SEQ ID NO: 1134769 - RNA, 19 nt, Artificial Sequence
  Description of Artificial Sequence: Synthetic oligonucleotide
acuaaaggcacuggggcuc

SEQ ID NO: 1134770 - RNA, 19 nt, Artificial Sequence
  Description of Artificial Sequence: Synthetic oligonucleotide
uguaggaggcugcuaauau

SEQ ID NO: 1134771 - RNA, 19 nt, Artificial Sequence
  Description of Artificial Sequence: Synthetic oligonucleotide
uaaaacgccuucacauucu

SEQ ID NO: 1134772 - RNA, 19 nt, Artificial Sequence
  Description of Artificial Sequence: Synthetic oligonucleotide
gaggaauucgggcucuuug

SEQ ID NO: 1134773 - RNA, 19 nt, Artificial Sequence
  Description of Artificial Sequence: Synthetic oligonucleotide
ugcuugucuguaauggacu

SEQ ID NO: 1134774 - RNA, 19 nt, Artificial Sequence
  Description of Artificial Sequence: Synthetic oligonucleotide
guaaaacgccuucacauuc

SEQ ID NO: 1134775 - RNA, 19 nt, Artificial Sequence
  Description of Artificial Sequence: Synthetic oligonucleotide
cuggacuaaaggcacuggg

SEQ ID NO: 1134776 - RNA, 19 nt, Artificial Sequence
  Description of Artificial Sequence: Synthetic oligonucleotide
auagcagcuguacccuugg

SEQ ID NO: 1134777 - RNA, 19 nt, Artificial Sequence
  Description of Artificial Sequence: Synthetic oligonucleotide
guaagccagcacuuuagcc

SEQ ID NO: 1134778 - RNA, 19 nt, Artificial Sequence
  Description of Artificial Sequence: Synthetic oligonucleotide
uucuccgaaggcaaggaau

SEQ ID NO: 1134779 - RNA, 19 nt, Artificial Sequence
  Description of Artificial Sequence: Synthetic oligonucleotide
uacguggcagauuccaggc

SEQ ID NO: 1134780 - RNA, 19 nt, Artificial Sequence
  Description of Artificial Sequence: Synthetic oligonucleotide
gaaggcaacagcacagagc

SEQ ID NO: 1134781 - RNA, 19 nt, Artificial Sequence
  Description of Artificial Sequence: Synthetic oligonucleotide
gcagauagcagcuguaccc

SEQ ID NO: 1134782 - RNA, 19 nt, Artificial Sequence
  Description of Artificial Sequence: Synthetic oligonucleotide
uccuucaaguagcaugcug

SEQ ID NO: 1134783 - RNA, 19 nt, Artificial Sequence
  Description of Artificial Sequence: Synthetic oligonucleotide
uagcaugcugcacgguugg

SEQ ID NO: 1134784 - RNA, 19 nt, Artificial Sequence
  Description of Artificial Sequence: Synthetic oligonucleotide
auagucaacauaggccagg

SEQ ID NO: 1134785 - RNA, 19 nt, Artificial Sequence
  Description of Artificial Sequence: Synthetic oligonucleotide
acauucuuuccauccagcu

SEQ ID NO: 1134786 - RNA, 19 nt, Artificial Sequence
  Description of Artificial Sequence: Synthetic oligonucleotide
ucguuacagacgccgaggc

SEQ ID NO: 1134787 - RNA, 19 nt, Artificial Sequence
  Description of Artificial Sequence: Synthetic oligonucleotide
ucuuugugauucuccgaag

SEQ ID NO: 1134788 - RNA, 19 nt, Artificial Sequence
  Description of Artificial Sequence: Synthetic oligonucleotide
ugcuaauaucuguaaggcu

SEQ ID NO: 1134789 - RNA, 19 nt, Artificial Sequence
  Description of Artificial Sequence: Synthetic oligonucleotide
uuaugguugcccuucuuua

SEQ ID NO: 1134790 - RNA, 19 nt, Artificial Sequence
  Description of Artificial Sequence: Synthetic oligonucleotide
gaacaagcgaagcuucuca

SEQ ID NO: 1134791 - RNA, 19 nt, Artificial Sequence
  Description of Artificial Sequence: Synthetic oligonucleotide
ugcucuucgcagcaagggc

SEQ ID NO: 1134792 - RNA, 19 nt, Artificial Sequence
  Description of Artificial Sequence: Synthetic oligonucleotide
uugugauucuccgaaggca

SEQ ID NO: 1134793 - RNA, 19 nt, Artificial Sequence
  Description of Artificial Sequence: Synthetic oligonucleotide
uaucuguaaggcuggauuu

SEQ ID NO: 1134794 - RNA, 19 nt, Artificial Sequence
  Description of Artificial Sequence: Synthetic oligonucleotide
ggacuaaaggcacuggggc

SEQ ID NO: 1134795 - RNA, 19 nt, Artificial Sequence
  Description of Artificial Sequence: Synthetic oligonucleotide
ugagcccgucuguaaaacg

SEQ ID NO: 1134796 - RNA, 19 nt, Artificial Sequence
  Description of Artificial Sequence: Synthetic oligonucleotide
agugaguccaugagagccc

SEQ ID NO: 1134797 - RNA, 19 nt, Artificial Sequence
  Description of Artificial Sequence: Synthetic oligonucleotide
ucucaauagcuuucuuaug

SEQ ID NO: 1134798 - RNA, 19 nt, Artificial Sequence
  Description of Artificial Sequence: Synthetic oligonucleotide
uuaaugcaacagcaacaca

SEQ ID NO: 1134799 - RNA, 19 nt, Artificial Sequence
  Description of Artificial Sequence: Synthetic oligonucleotide
ugugcuugucuguaaugga

SEQ ID NO: 1134800 - RNA, 19 nt, Artificial Sequence
  Description of Artificial Sequence: Synthetic oligonucleotide
uagucaacauaggccaggg

SEQ ID NO: 1134801 - RNA, 19 nt, Artificial Sequence
  Description of Artificial Sequence: Synthetic oligonucleotide
acagaacgcuuucuucuuc

SEQ ID NO: 1134802 - RNA, 19 nt, Artificial Sequence
  Description of Artificial Sequence: Synthetic oligonucleotide
aggaauucgggcucuuuga

SEQ ID NO: 1134803 - RNA, 19 nt, Artificial Sequence
  Description of Artificial Sequence: Synthetic oligonucleotide
gacgcugugccaaggacag

SEQ ID NO: 1134804 - RNA, 19 nt, Artificial Sequence
  Description of Artificial Sequence: Synthetic oligonucleotide
uccuucagaacucgggcuc

SEQ ID NO: 1134805 - RNA, 19 nt, Artificial Sequence
  Description of Artificial Sequence: Synthetic oligonucleotide
ucuccgaaggcaaggaauu

SEQ ID NO: 1134806 - RNA, 19 nt, Artificial Sequence
  Description of Artificial Sequence: Synthetic oligonucleotide
uugaacaagcgaagcuucu

SEQ ID NO: 1134807 - RNA, 19 nt, Artificial Sequence
  Description of Artificial Sequence: Synthetic oligonucleotide
ggguucaauuuguaggagg

SEQ ID NO: 1134808 - RNA, 19 nt, Artificial Sequence
  Description of Artificial Sequence: Synthetic oligonucleotide
aagcgaagcuucucaggug

SEQ ID NO: 1134809 - RNA, 19 nt, Artificial Sequence
  Description of Artificial Sequence: Synthetic oligonucleotide
uucuuccuucagaacucgg

SEQ ID NO: 1134810 - RNA, 19 nt, Artificial Sequence
  Description of Artificial Sequence: Synthetic oligonucleotide
uuggaguacagaacgcuuu

SEQ ID NO: 1134811 - RNA, 19 nt, Artificial Sequence
  Description of Artificial Sequence: Synthetic oligonucleotide
agcaacacacaguucaaua

SEQ ID NO: 1134812 - RNA, 19 nt, Artificial Sequence
  Description of Artificial Sequence: Synthetic oligonucleotide
cuggguucaauuuguagga

SEQ ID NO: 1134813 - RNA, 19 nt, Artificial Sequence
  Description of Artificial Sequence: Synthetic oligonucleotide
uggccauugcggaaguucu

SEQ ID NO: 1134814 - RNA, 19 nt, Artificial Sequence
  Description of Artificial Sequence: Synthetic oligonucleotide
aggccggcucguuacagac

SEQ ID NO: 1134815 - RNA, 19 nt, Artificial Sequence
  Description of Artificial Sequence: Synthetic oligonucleotide
gguagagggguccuguugc

SEQ ID NO: 1134816 - RNA, 19 nt, Artificial Sequence
  Description of Artificial Sequence: Synthetic oligonucleotide
uggaguacagaacgcuuuc

SEQ ID NO: 1134817 - RNA, 19 nt, Artificial Sequence
  Description of Artificial Sequence: Synthetic oligonucleotide
uuccuucagaacucgggcu

SEQ ID NO: 1134818 - RNA, 19 nt, Artificial Sequence
  Description of Artificial Sequence: Synthetic oligonucleotide
ugacgccacauuguuauca

SEQ ID NO: 1134819 - RNA, 19 nt, Artificial Sequence
  Description of Artificial Sequence: Synthetic oligonucleotide
aagugcaaucuuugaugca

SEQ ID NO: 1134820 - RNA, 19 nt, Artificial Sequence
  Description of Artificial Sequence: Synthetic oligonucleotide
agcgcucuguugcuguacg

SEQ ID NO: 1134821 - RNA, 19 nt, Artificial Sequence
  Description of Artificial Sequence: Synthetic oligonucleotide
ucgggcucuuugaacagca

SEQ ID NO: 1134822 - RNA, 19 nt, Artificial Sequence
  Description of Artificial Sequence: Synthetic oligonucleotide
gagcccgucuguaaaacgc

SEQ ID NO: 1134823 - RNA, 19 nt, Artificial Sequence
  Description of Artificial Sequence: Synthetic oligonucleotide
uuauaguccuugagugccu

SEQ ID NO: 1134824 - RNA, 19 nt, Artificial Sequence
  Description of Artificial Sequence: Synthetic oligonucleotide
ucguacagcgccgaggccu

SEQ ID NO: 1134825 - RNA, 19 nt, Artificial Sequence
  Description of Artificial Sequence: Synthetic oligonucleotide
ugccuuccagggcugacgc

SEQ ID NO: 1134826 - RNA, 19 nt, Artificial Sequence
  Description of Artificial Sequence: Synthetic oligonucleotide
agaacucgggcucucucca

SEQ ID NO: 1134827 - RNA, 19 nt, Artificial Sequence
  Description of Artificial Sequence: Synthetic oligonucleotide
ggacuuaauuugaacaagc

SEQ ID NO: 1134828 - RNA, 19 nt, Artificial Sequence
  Description of Artificial Sequence: Synthetic oligonucleotide
acuguacuucucaauagcu

SEQ ID NO: 1134829 - RNA, 19 nt, Artificial Sequence
  Description of Artificial Sequence: Synthetic oligonucleotide
aauaucuguaaggcuggau

SEQ ID NO: 1134830 - RNA, 19 nt, Artificial Sequence
  Description of Artificial Sequence: Synthetic oligonucleotide
agcccuagugauucuguug

SEQ ID NO: 1134831 - RNA, 19 nt, Artificial Sequence
  Description of Artificial Sequence: Synthetic oligonucleotide
gauagcagcuguacccuug

SEQ ID NO: 1134832 - RNA, 19 nt, Artificial Sequence
  Description of Artificial Sequence: Synthetic oligonucleotide
uccauacagaaggcaacag

SEQ ID NO: 1134833 - RNA, 19 nt, Artificial Sequence
  Description of Artificial Sequence: Synthetic oligonucleotide
cucguuacagacgccgagg

SEQ ID NO: 1134834 - RNA, 19 nt, Artificial Sequence
  Description of Artificial Sequence: Synthetic oligonucleotide
aaaacgccuucacauucuu

SEQ ID NO: 1134835 - RNA, 19 nt, Artificial Sequence
  Description of Artificial Sequence: Synthetic oligonucleotide
agaacgcuuucuucuucag

SEQ ID NO: 1134836 - RNA, 19 nt, Artificial Sequence
  Description of Artificial Sequence: Synthetic oligonucleotide
cuguaaaacgccuucacau

SEQ ID NO: 1134837 - RNA, 19 nt, Artificial Sequence
  Description of Artificial Sequence: Synthetic oligonucleotide
aggcccguagcuucucugg

SEQ ID NO: 1134838 - RNA, 19 nt, Artificial Sequence
  Description of Artificial Sequence: Synthetic oligonucleotide
ucagacuggagggacacua

SEQ ID NO: 1134839 - RNA, 19 nt, Artificial Sequence
  Description of Artificial Sequence: Synthetic oligonucleotide
cacgguuggaguacagaac

SEQ ID NO: 1134840 - RNA, 19 nt, Artificial Sequence
  Description of Artificial Sequence: Synthetic oligonucleotide
caaagggccuggacuaaag

SEQ ID NO: 1134841 - RNA, 19 nt, Artificial Sequence
  Description of Artificial Sequence: Synthetic oligonucleotide
auagguagcuccauacaga

SEQ ID NO: 1134842 - RNA, 19 nt, Artificial Sequence
  Description of Artificial Sequence: Synthetic oligonucleotide
agggaaccaaggccagcgc

SEQ ID NO: 1134843 - RNA, 19 nt, Artificial Sequence
  Description of Artificial Sequence: Synthetic oligonucleotide
ggauuuauaguccuugagu

SEQ ID NO: 1134844 - RNA, 19 nt, Artificial Sequence
  Description of Artificial Sequence: Synthetic oligonucleotide
ugcagaaccucgcgccugc

SEQ ID NO: 1134845 - RNA, 19 nt, Artificial Sequence
  Description of Artificial Sequence: Synthetic oligonucleotide
agcucaacaggccgcuuug

SEQ ID NO: 1134846 - RNA, 19 nt, Artificial Sequence
  Description of Artificial Sequence: Synthetic oligonucleotide
ccuuauacuguuucaggac

SEQ ID NO: 1134847 - RNA, 19 nt, Artificial Sequence
  Description of Artificial Sequence: Synthetic oligonucleotide
uacaagcucauugccuucu

SEQ ID NO: 1134848 - RNA, 19 nt, Artificial Sequence
  Description of Artificial Sequence: Synthetic oligonucleotide
agcccgucuguaaaacgcc

SEQ ID NO: 1134849 - RNA, 19 nt, Artificial Sequence
  Description of Artificial Sequence: Synthetic oligonucleotide
ggcaccacaggaauagggg

SEQ ID NO: 1134850 - RNA, 19 nt, Artificial Sequence
  Description of Artificial Sequence: Synthetic oligonucleotide
ugaacaagcgaagcuucuc

SEQ ID NO: 1134851 - RNA, 19 nt, Artificial Sequence
  Description of Artificial Sequence: Synthetic oligonucleotide
uuuguaggaggcugcuaau

SEQ ID NO: 1134852 - RNA, 19 nt, Artificial Sequence
  Description of Artificial Sequence: Synthetic oligonucleotide
guugacuuccugccguaac

SEQ ID NO: 1134853 - RNA, 19 nt, Artificial Sequence
  Description of Artificial Sequence: Synthetic oligonucleotide
guuacagacgccgaggccu

SEQ ID NO: 1134854 - RNA, 19 nt, Artificial Sequence
  Description of Artificial Sequence: Synthetic oligonucleotide
guuucaggaccaaauggca

SEQ ID NO: 1134855 - RNA, 19 nt, Artificial Sequence
  Description of Artificial Sequence: Synthetic oligonucleotide
guaggaggcugcuaauauc

SEQ ID NO: 1134856 - RNA, 19 nt, Artificial Sequence
  Description of Artificial Sequence: Synthetic oligonucleotide
cuucaaguagcaugcugca

SEQ ID NO: 1134857 - RNA, 19 nt, Artificial Sequence
  Description of Artificial Sequence: Synthetic oligonucleotide
uacuaaacaagaggcucuc

SEQ ID NO: 1134858 - RNA, 19 nt, Artificial Sequence
  Description of Artificial Sequence: Synthetic oligonucleotide
gaccaaauggcagagcgcu

SEQ ID NO: 1134859 - RNA, 19 nt, Artificial Sequence
  Description of Artificial Sequence: Synthetic oligonucleotide
uggguucaauuuguaggag

SEQ ID NO: 1134860 - RNA, 19 nt, Artificial Sequence
  Description of Artificial Sequence: Synthetic oligonucleotide
cugucaacacuaaauuaaa

SEQ ID NO: 1134861 - RNA, 19 nt, Artificial Sequence
  Description of Artificial Sequence: Synthetic oligonucleotide
ugggucuagguaagccagc

SEQ ID NO: 1134862 - RNA, 19 nt, Artificial Sequence
  Description of Artificial Sequence: Synthetic oligonucleotide
aguucauguucugguugac

SEQ ID NO: 1134863 - RNA, 19 nt, Artificial Sequence
  Description of Artificial Sequence: Synthetic oligonucleotide
guagcaugcugcacgguug

SEQ ID NO: 1134864 - RNA, 19 nt, Artificial Sequence
  Description of Artificial Sequence: Synthetic oligonucleotide
auggcagagcgcucuguug

SEQ ID NO: 1134865 - RNA, 19 nt, Artificial Sequence
  Description of Artificial Sequence: Synthetic oligonucleotide
ggcugcuaauaucuguaag

SEQ ID NO: 1134866 - RNA, 19 nt, Artificial Sequence
  Description of Artificial Sequence: Synthetic oligonucleotide
gguaagccagcacuuuagc

SEQ ID NO: 1134867 - RNA, 19 nt, Artificial Sequence
  Description of Artificial Sequence: Synthetic oligonucleotide
uauacuguuucaggaccaa

SEQ ID NO: 1134868 - RNA, 19 nt, Artificial Sequence
  Description of Artificial Sequence: Synthetic oligonucleotide
uguaggcuugagcccgucu

SEQ ID NO: 1134869 - RNA, 19 nt, Artificial Sequence
  Description of Artificial Sequence: Synthetic oligonucleotide
ugaacagcauagguagcuc

SEQ ID NO: 1134870 - RNA, 19 nt, Artificial Sequence
  Description of Artificial Sequence: Synthetic oligonucleotide
cacagagucugagaccuug

SEQ ID NO: 1134871 - RNA, 19 nt, Artificial Sequence
  Description of Artificial Sequence: Synthetic oligonucleotide
gugccuuguaggcuugagc

SEQ ID NO: 1134872 - RNA, 19 nt, Artificial Sequence
  Description of Artificial Sequence: Synthetic oligonucleotide
gauucuccgaaggcaagga

SEQ ID NO: 1134873 - RNA, 19 nt, Artificial Sequence
  Description of Artificial Sequence: Synthetic oligonucleotide
ugcaggggaggcccguagc

SEQ ID NO: 1134874 - RNA, 19 nt, Artificial Sequence
  Description of Artificial Sequence: Synthetic oligonucleotide
cucccuuaggggcaugcug

SEQ ID NO: 1134875 - RNA, 19 nt, Artificial Sequence
  Description of Artificial Sequence: Synthetic oligonucleotide
cuggauuuauaguccuuga

SEQ ID NO: 1134876 - RNA, 19 nt, Artificial Sequence
  Description of Artificial Sequence: Synthetic oligonucleotide
uccugccguaacuucugug

SEQ ID NO: 1134877 - RNA, 19 nt, Artificial Sequence
  Description of Artificial Sequence: Synthetic oligonucleotide
uaucaaucugcagcacagu

SEQ ID NO: 1134878 - RNA, 19 nt, Artificial Sequence
  Description of Artificial Sequence: Synthetic oligonucleotide
uuacagacgccgaggccuc

SEQ ID NO: 1134879 - RNA, 19 nt, Artificial Sequence
  Description of Artificial Sequence: Synthetic oligonucleotide
gacuaaaggcacuggggcu

SEQ ID NO: 1134880 - RNA, 19 nt, Artificial Sequence
  Description of Artificial Sequence: Synthetic oligonucleotide
ugaugcugaagggaaccaa

SEQ ID NO: 1134881 - RNA, 19 nt, Artificial Sequence
  Description of Artificial Sequence: Synthetic oligonucleotide
guagcuccauacagaaggc

SEQ ID NO: 1134882 - RNA, 19 nt, Artificial Sequence
  Description of Artificial Sequence: Synthetic oligonucleotide
ccuuguaggcuugagcccg

SEQ ID NO: 1134883 - RNA, 19 nt, Artificial Sequence
  Description of Artificial Sequence: Synthetic oligonucleotide
agacuggagggacacuaau

SEQ ID NO: 1134884 - RNA, 19 nt, Artificial Sequence
  Description of Artificial Sequence: Synthetic oligonucleotide
gaaccucgcgccugcagca

SEQ ID NO: 1134885 - RNA, 19 nt, Artificial Sequence
  Description of Artificial Sequence: Synthetic oligonucleotide
auaggccaggguguacuuc

SEQ ID NO: 1134886 - RNA, 19 nt, Artificial Sequence
  Description of Artificial Sequence: Synthetic oligonucleotide
uugagcccgucuguaaaac

SEQ ID NO: 1134887 - RNA, 19 nt, Artificial Sequence
  Description of Artificial Sequence: Synthetic oligonucleotide
auaguccuugagugccuug

SEQ ID NO: 1134888 - RNA, 19 nt, Artificial Sequence
  Description of Artificial Sequence: Synthetic oligonucleotide
ugcacgguuggaguacaga

SEQ ID NO: 1134889 - RNA, 19 nt, Artificial Sequence
  Description of Artificial Sequence: Synthetic oligonucleotide
gcccuagugauucuguuga

SEQ ID NO: 1134890 - RNA, 19 nt, Artificial Sequence
  Description of Artificial Sequence: Synthetic oligonucleotide
uuguaggaggcugcuaaua

SEQ ID NO: 1134891 - RNA, 19 nt, Artificial Sequence
  Description of Artificial Sequence: Synthetic oligonucleotide
gacgccacauuguuaucaa

SEQ ID NO: 1134892 - RNA, 19 nt, Artificial Sequence
  Description of Artificial Sequence: Synthetic oligonucleotide
cuuaggggcaugcugggua

SEQ ID NO: 1134893 - RNA, 19 nt, Artificial Sequence
  Description of Artificial Sequence: Synthetic oligonucleotide
aggggcaugcuggguaugg

SEQ ID NO: 1134894 - RNA, 19 nt, Artificial Sequence
  Description of Artificial Sequence: Synthetic oligonucleotide
auucuccgaaggcaaggaa

SEQ ID NO: 1134895 - RNA, 19 nt, Artificial Sequence
  Description of Artificial Sequence: Synthetic oligonucleotide
ccaagggucaggcuuugcc

SEQ ID NO: 1134896 - RNA, 19 nt, Artificial Sequence
  Description of Artificial Sequence: Synthetic oligonucleotide
gccggcucguuacagacgc

SEQ ID NO: 1134897 - RNA, 19 nt, Artificial Sequence
  Description of Artificial Sequence: Synthetic oligonucleotide
gaggcugcuaauaucugua

SEQ ID NO: 1134898 - RNA, 19 nt, Artificial Sequence
  Description of Artificial Sequence: Synthetic oligonucleotide
uccccgggaggccggcucg

SEQ ID NO: 1134899 - RNA, 19 nt, Artificial Sequence
  Description of Artificial Sequence: Synthetic oligonucleotide
cugcuaccucuccaagggg

SEQ ID NO: 1134900 - RNA, 19 nt, Artificial Sequence
  Description of Artificial Sequence: Synthetic oligonucleotide
gccguaacuucugugcagg

SEQ ID NO: 1134901 - RNA, 19 nt, Artificial Sequence
  Description of Artificial Sequence: Synthetic oligonucleotide
guugccggcagcgcggagc

SEQ ID NO: 1134902 - RNA, 19 nt, Artificial Sequence
  Description of Artificial Sequence: Synthetic oligonucleotide
ucuuaugguugcccuucuu

SEQ ID NO: 1134903 - RNA, 19 nt, Artificial Sequence
  Description of Artificial Sequence: Synthetic oligonucleotide
agacgccgaggccucgccg

SEQ ID NO: 1134904 - RNA, 19 nt, Artificial Sequence
  Description of Artificial Sequence: Synthetic oligonucleotide
acagacgccgaggccucgc

SEQ ID NO: 1134905 - RNA, 19 nt, Artificial Sequence
  Description of Artificial Sequence: Synthetic oligonucleotide
gcagauuccaggcuacuaa

SEQ ID NO: 1134906 - RNA, 19 nt, Artificial Sequence
  Description of Artificial Sequence: Synthetic oligonucleotide
ggcacuggggcucaacaca

SEQ ID NO: 1134907 - RNA, 19 nt, Artificial Sequence
  Description of Artificial Sequence: Synthetic oligonucleotide
uaaucucaaggaggccucu

SEQ ID NO: 1134908 - RNA, 19 nt, Artificial Sequence
  Description of Artificial Sequence: Synthetic oligonucleotide
uucaggcgccacucaggcc

SEQ ID NO: 1134909 - RNA, 19 nt, Artificial Sequence
  Description of Artificial Sequence: Synthetic oligonucleotide
cagcacuuuagccugucaa

SEQ ID NO: 1134910 - RNA, 19 nt, Artificial Sequence
  Description of Artificial Sequence: Synthetic oligonucleotide
aguucccauccuucaagua

SEQ ID NO: 1134911 - RNA, 19 nt, Artificial Sequence
  Description of Artificial Sequence: Synthetic oligonucleotide
aacuucugugcagggccgu

SEQ ID NO: 1134912 - RNA, 19 nt, Artificial Sequence
  Description of Artificial Sequence: Synthetic oligonucleotide
aggcugcuaauaucuguaa

SEQ ID NO: 1134913 - RNA, 19 nt, Artificial Sequence
  Description of Artificial Sequence: Synthetic oligonucleotide
cuguugcuguacguggcag

SEQ ID NO: 1134914 - RNA, 19 nt, Artificial Sequence
  Description of Artificial Sequence: Synthetic oligonucleotide
ugcugcacgguuggaguac

SEQ ID NO: 1134915 - RNA, 19 nt, Artificial Sequence
  Description of Artificial Sequence: Synthetic oligonucleotide
auccccgggaggccggcuc

SEQ ID NO: 1134916 - RNA, 19 nt, Artificial Sequence
  Description of Artificial Sequence: Synthetic oligonucleotide
cuugagcccgucuguaaaa

SEQ ID NO: 1134917 - RNA, 19 nt, Artificial Sequence
  Description of Artificial Sequence: Synthetic oligonucleotide
ugacuuccugccguaacuu

SEQ ID NO: 1134918 - RNA, 19 nt, Artificial Sequence
  Description of Artificial Sequence: Synthetic oligonucleotide
cuguacguggcagauucca

SEQ ID NO: 1134919 - RNA, 19 nt, Artificial Sequence
  Description of Artificial Sequence: Synthetic oligonucleotide
agcgccgaggccucgccgu

SEQ ID NO: 1134920 - RNA, 19 nt, Artificial Sequence
  Description of Artificial Sequence: Synthetic oligonucleotide
gcugaagugcaaucuuuga

SEQ ID NO: 1134921 - RNA, 19 nt, Artificial Sequence
  Description of Artificial Sequence: Synthetic oligonucleotide
acaggacgcugugccaagg

SEQ ID NO: 1134922 - RNA, 19 nt, Artificial Sequence
  Description of Artificial Sequence: Synthetic oligonucleotide
gaguacagaacgcuuucuu

SEQ ID NO: 1134923 - RNA, 19 nt, Artificial Sequence
  Description of Artificial Sequence: Synthetic oligonucleotide
gcucguuacagacgccgag

SEQ ID NO: 1134924 - RNA, 19 nt, Artificial Sequence
  Description of Artificial Sequence: Synthetic oligonucleotide
cagaaccucgcgccugcag

SEQ ID NO: 1134925 - RNA, 19 nt, Artificial Sequence
  Description of Artificial Sequence: Synthetic oligonucleotide
ugagagcccuagugauucu

SEQ ID NO: 1134926 - RNA, 19 nt, Artificial Sequence
  Description of Artificial Sequence: Synthetic oligonucleotide
gaacucgggcucucuccac

SEQ ID NO: 1134927 - RNA, 19 nt, Artificial Sequence
  Description of Artificial Sequence: Synthetic oligonucleotide
uguacucccuuaggggcau

SEQ ID NO: 1134928 - RNA, 19 nt, Artificial Sequence
  Description of Artificial Sequence: Synthetic oligonucleotide
gcacgguuggaguacagaa

SEQ ID NO: 1134929 - RNA, 19 nt, Artificial Sequence
  Description of Artificial Sequence: Synthetic oligonucleotide
caaggccagcgcugaagug

SEQ ID NO: 1134930 - RNA, 19 nt, Artificial Sequence
  Description of Artificial Sequence: Synthetic oligonucleotide
cuuggagaaccagcucaac

SEQ ID NO: 1134931 - RNA, 19 nt, Artificial Sequence
  Description of Artificial Sequence: Synthetic oligonucleotide
caagggucaggcuuugccu

SEQ ID NO: 1134932 - RNA, 19 nt, Artificial Sequence
  Description of Artificial Sequence: Synthetic oligonucleotide
aaccucgcgccugcagcag

SEQ ID NO: 1134933 - RNA, 19 nt, Artificial Sequence
  Description of Artificial Sequence: Synthetic oligonucleotide
acguggcagauuccaggcu

SEQ ID NO: 1134934 - RNA, 19 nt, Artificial Sequence
  Description of Artificial Sequence: Synthetic oligonucleotide
agagcccuagugauucugu

SEQ ID NO: 1134935 - RNA, 19 nt, Artificial Sequence
  Description of Artificial Sequence: Synthetic oligonucleotide
gcacuuuagccugucaaca

SEQ ID NO: 1134936 - RNA, 19 nt, Artificial Sequence
  Description of Artificial Sequence: Synthetic oligonucleotide
ggaauucgggcucuuugaa

SEQ ID NO: 1134937 - RNA, 19 nt, Artificial Sequence
  Description of Artificial Sequence: Synthetic oligonucleotide
accaaauggcagagcgcuc

SEQ ID NO: 1134938 - RNA, 19 nt, Artificial Sequence
  Description of Artificial Sequence: Synthetic oligonucleotide
agggcugacgccacauugu

SEQ ID NO: 1134939 - RNA, 19 nt, Artificial Sequence
  Description of Artificial Sequence: Synthetic oligonucleotide
gccguacuggccauugcgg

SEQ ID NO: 1134940 - RNA, 19 nt, Artificial Sequence
  Description of Artificial Sequence: Synthetic oligonucleotide
ucgccguacuggccauugc

SEQ ID NO: 1134941 - RNA, 19 nt, Artificial Sequence
  Description of Artificial Sequence: Synthetic oligonucleotide
aguccuugagugccuugua

SEQ ID NO: 1134942 - RNA, 19 nt, Artificial Sequence
  Description of Artificial Sequence: Synthetic oligonucleotide
ucuucgcagcaagggcuug

SEQ ID NO: 1134943 - RNA, 19 nt, Artificial Sequence
  Description of Artificial Sequence: Synthetic oligonucleotide
uacagacgccgaggccucg

SEQ ID NO: 1134944 - RNA, 19 nt, Artificial Sequence
  Description of Artificial Sequence: Synthetic oligonucleotide
aaacgccuucacauucuuu

SEQ ID NO: 1134945 - RNA, 19 nt, Artificial Sequence
  Description of Artificial Sequence: Synthetic oligonucleotide
cucgccguacuggccauug

SEQ ID NO: 1134946 - RNA, 19 nt, Artificial Sequence
  Description of Artificial Sequence: Synthetic oligonucleotide
ggaccaaauggcagagcgc

SEQ ID NO: 1134947 - RNA, 19 nt, Artificial Sequence
  Description of Artificial Sequence: Synthetic oligonucleotide
guggcagauuccaggcuac

SEQ ID NO: 1134948 - RNA, 19 nt, Artificial Sequence
  Description of Artificial Sequence: Synthetic oligonucleotide
ggcaaggaauuccaucucu

SEQ ID NO: 1134949 - RNA, 19 nt, Artificial Sequence
  Description of Artificial Sequence: Synthetic oligonucleotide
gcuaccucuccaaggggcc

SEQ ID NO: 1134950 - RNA, 19 nt, Artificial Sequence
  Description of Artificial Sequence: Synthetic oligonucleotide
aaccaaggccagcgcugaa

SEQ ID NO: 1134951 - RNA, 19 nt, Artificial Sequence
  Description of Artificial Sequence: Synthetic oligonucleotide
agcgcggagcugcuccaca

SEQ ID NO: 1134952 - RNA, 19 nt, Artificial Sequence
  Description of Artificial Sequence: Synthetic oligonucleotide
gccugucaacacuaaauua

SEQ ID NO: 1134953 - RNA, 19 nt, Artificial Sequence
  Description of Artificial Sequence: Synthetic oligonucleotide
acgccacauuguuaucaau

SEQ ID NO: 1134954 - RNA, 19 nt, Artificial Sequence
  Description of Artificial Sequence: Synthetic oligonucleotide
uacagcgccgaggccucgc

SEQ ID NO: 1134955 - RNA, 19 nt, Artificial Sequence
  Description of Artificial Sequence: Synthetic oligonucleotide
cuccgaaggcaaggaauuc

SEQ ID NO: 1134956 - RNA, 19 nt, Artificial Sequence
  Description of Artificial Sequence: Synthetic oligonucleotide
ggacgcugugccaaggaca

SEQ ID NO: 1134957 - RNA, 19 nt, Artificial Sequence
  Description of Artificial Sequence: Synthetic oligonucleotide
cugcacgguuggaguacag

SEQ ID NO: 1134958 - RNA, 19 nt, Artificial Sequence
  Description of Artificial Sequence: Synthetic oligonucleotide
ggcccaagugaguccauga

SEQ ID NO: 1134959 - RNA, 19 nt, Artificial Sequence
  Description of Artificial Sequence: Synthetic oligonucleotide
cagacgccgaggccucgcc

SEQ ID NO: 1134960 - RNA, 19 nt, Artificial Sequence
  Description of Artificial Sequence: Synthetic oligonucleotide
gcuugagcccgucuguaaa

SEQ ID NO: 1134961 - RNA, 19 nt, Artificial Sequence
  Description of Artificial Sequence: Synthetic oligonucleotide
gacgccgaggccucgccgu

SEQ ID NO: 1134962 - RNA, 19 nt, Artificial Sequence
  Description of Artificial Sequence: Synthetic oligonucleotide
uccaagggucaggcuuugc

SEQ ID NO: 1134963 - RNA, 19 nt, Artificial Sequence
  Description of Artificial Sequence: Synthetic oligonucleotide
gccgcuuugggucuaggua

SEQ ID NO: 1134964 - RNA, 19 nt, Artificial Sequence
  Description of Artificial Sequence: Synthetic oligonucleotide
ccgucuguaaaacgccuuc

SEQ ID NO: 1134965 - RNA, 19 nt, Artificial Sequence
  Description of Artificial Sequence: Synthetic oligonucleotide
cugcagaaccucgcgccug

SEQ ID NO: 1134966 - RNA, 19 nt, Artificial Sequence
  Description of Artificial Sequence: Synthetic oligonucleotide
gcaguccuuuauugccucc

SEQ ID NO: 1134967 - RNA, 19 nt, Artificial Sequence
  Description of Artificial Sequence: Synthetic oligonucleotide
gcggaaguucugguugccg

SEQ ID NO: 1134968 - RNA, 19 nt, Artificial Sequence
  Description of Artificial Sequence: Synthetic oligonucleotide
cgccguacuggccauugcg

SEQ ID NO: 1134969 - RNA, 19 nt, Artificial Sequence
  Description of Artificial Sequence: Synthetic oligonucleotide
gguuggaguacagaacgcu

SEQ ID NO: 1134970 - RNA, 19 nt, Artificial Sequence
  Description of Artificial Sequence: Synthetic oligonucleotide
ccgcuuugggucuagguaa

SEQ ID NO: 1134971 - RNA, 19 nt, Artificial Sequence
  Description of Artificial Sequence: Synthetic oligonucleotide
guucauguucugguugacu

SEQ ID NO: 1134972 - RNA, 19 nt, Artificial Sequence
  Description of Artificial Sequence: Synthetic oligonucleotide
cagacuggagggacacuaa

SEQ ID NO: 1134973 - RNA, 19 nt, Artificial Sequence
  Description of Artificial Sequence: Synthetic oligonucleotide
cuugagugccuuguaggcu

SEQ ID NO: 1134974 - RNA, 19 nt, Artificial Sequence
  Description of Artificial Sequence: Synthetic oligonucleotide
caguucccauccuucaagu

SEQ ID NO: 1134975 - RNA, 19 nt, Artificial Sequence
  Description of Artificial Sequence: Synthetic oligonucleotide
ccagcgcugaagugcaauc

SEQ ID NO: 1134976 - RNA, 19 nt, Artificial Sequence
  Description of Artificial Sequence: Synthetic oligonucleotide
caggacgcugugccaagga

SEQ ID NO: 1134977 - RNA, 19 nt, Artificial Sequence
  Description of Artificial Sequence: Synthetic oligonucleotide
gggccuggacuaaaggcac

SEQ ID NO: 1134978 - RNA, 19 nt, Artificial Sequence
  Description of Artificial Sequence: Synthetic oligonucleotide
guuggaguacagaacgcuu

SEQ ID NO: 1134979 - RNA, 19 nt, Artificial Sequence
  Description of Artificial Sequence: Synthetic oligonucleotide
ggggcucaacacaggacgc

SEQ ID NO: 1134980 - RNA, 19 nt, Artificial Sequence
  Description of Artificial Sequence: Synthetic oligonucleotide
gcucaacaggccgcuuugg

SEQ ID NO: 1134981 - RNA, 19 nt, Artificial Sequence
  Description of Artificial Sequence: Synthetic oligonucleotide
cagcgccgaggccucgccg

SEQ ID NO: 1134982 - RNA, 19 nt, Artificial Sequence
  Description of Artificial Sequence: Synthetic oligonucleotide
gcuugaugcugaagggaac

SEQ ID NO: 1134983 - RNA, 19 nt, Artificial Sequence
  Description of Artificial Sequence: Synthetic oligonucleotide
ugguugccggcagcgcgga

SEQ ID NO: 1134984 - RNA, 19 nt, Artificial Sequence
  Description of Artificial Sequence: Synthetic oligonucleotide
gcgcggagcugcuccacag

SEQ ID NO: 1134985 - RNA, 19 nt, Artificial Sequence
  Description of Artificial Sequence: Synthetic oligonucleotide
ggaggccggcucguuacag

SEQ ID NO: 1134986 - RNA, 19 nt, Artificial Sequence
  Description of Artificial Sequence: Synthetic oligonucleotide
cagcauagguagcuccaua

SEQ ID NO: 1134987 - RNA, 19 nt, Artificial Sequence
  Description of Artificial Sequence: Synthetic oligonucleotide
uuguaggcuugagcccguc

SEQ ID NO: 1134988 - RNA, 19 nt, Artificial Sequence
  Description of Artificial Sequence: Synthetic oligonucleotide
cggcucguuacagacgccg

SEQ ID NO: 1134989 - RNA, 19 nt, Artificial Sequence
  Description of Artificial Sequence: Synthetic oligonucleotide
cgcuuugggucuagguaag

SEQ ID NO: 1134990 - RNA, 19 nt, Artificial Sequence
  Description of Artificial Sequence: Synthetic oligonucleotide
cuaccucuccaaggggcca

SEQ ID NO: 1134991 - RNA, 19 nt, Artificial Sequence
  Description of Artificial Sequence: Synthetic oligonucleotide
gagcccuagugauucuguu

SEQ ID NO: 1134992 - RNA, 19 nt, Artificial Sequence
  Description of Artificial Sequence: Synthetic oligonucleotide
ggucaggcuuugccuuccc

SEQ ID NO: 1134993 - RNA, 19 nt, Artificial Sequence
  Description of Artificial Sequence: Synthetic oligonucleotide
gggugcagauagcagcugu

SEQ ID NO: 1134994 - RNA, 19 nt, Artificial Sequence
  Description of Artificial Sequence: Synthetic oligonucleotide
gugcaaucuuugaugcagu

SEQ ID NO: 1134995 - RNA, 19 nt, Artificial Sequence
  Description of Artificial Sequence: Synthetic oligonucleotide
ccguacuggccauugcgga

SEQ ID NO: 1134996 - RNA, 19 nt, Artificial Sequence
  Description of Artificial Sequence: Synthetic oligonucleotide
agcaugcugcacgguugga

SEQ ID NO: 1134997 - RNA, 19 nt, Artificial Sequence
  Description of Artificial Sequence: Synthetic oligonucleotide
ccguagcuucucugggaag

SEQ ID NO: 1134998 - RNA, 19 nt, Artificial Sequence
  Description of Artificial Sequence: Synthetic oligonucleotide
gaugcaggggaggcccgua

SEQ ID NO: 1134999 - RNA, 19 nt, Artificial Sequence
  Description of Artificial Sequence: Synthetic oligonucleotide
guacagcgccgaggccucg

SEQ ID NO: 1135000 - RNA, 19 nt, Artificial Sequence
  Description of Artificial Sequence: Synthetic oligonucleotide
ggugcagauagcagcugua

SEQ ID NO: 1135001 - RNA, 19 nt, Artificial Sequence
  Description of Artificial Sequence: Synthetic oligonucleotide
aggccgcuuugggucuagg

SEQ ID NO: 1135002 - RNA, 19 nt, Artificial Sequence
  Description of Artificial Sequence: Synthetic oligonucleotide
cuuguaggcuugagcccgu

SEQ ID NO: 1135003 - RNA, 19 nt, Artificial Sequence
  Description of Artificial Sequence: Synthetic oligonucleotide
cucuucgcagcaagggcuu

SEQ ID NO: 1135004 - RNA, 19 nt, Artificial Sequence
  Description of Artificial Sequence: Synthetic oligonucleotide
ggaguacagaacgcuuucu

SEQ ID NO: 1135005 - RNA, 19 nt, Artificial Sequence
  Description of Artificial Sequence: Synthetic oligonucleotide
cuagguaagccagcacuuu

SEQ ID NO: 1135006 - RNA, 19 nt, Artificial Sequence
  Description of Artificial Sequence: Synthetic oligonucleotide
ccaaauggcagagcgcucu

SEQ ID NO: 1135007 - RNA, 19 nt, Artificial Sequence
  Description of Artificial Sequence: Synthetic oligonucleotide
cgaggccucgccguacugg

SEQ ID NO: 1135008 - RNA, 19 nt, Artificial Sequence
  Description of Artificial Sequence: Synthetic oligonucleotide
gccuuccagggcugacgcc

SEQ ID NO: 1135009 - RNA, 19 nt, Artificial Sequence
  Description of Artificial Sequence: Synthetic oligonucleotide
ggcucguuacagacgccga

SEQ ID NO: 1135010 - RNA, 19 nt, Artificial Sequence
  Description of Artificial Sequence: Synthetic oligonucleotide
cugugcaguucccauccuu

SEQ ID NO: 1135011 - RNA, 19 nt, Artificial Sequence
  Description of Artificial Sequence: Synthetic oligonucleotide
gcugcacgguuggaguaca

SEQ ID NO: 1135012 - RNA, 19 nt, Artificial Sequence
  Description of Artificial Sequence: Synthetic oligonucleotide
caggccgcuuugggucuag

SEQ ID NO: 1135013 - RNA, 19 nt, Artificial Sequence
  Description of Artificial Sequence: Synthetic oligonucleotide
gguugacuuccugccguaa

SEQ ID NO: 1135014 - RNA, 19 nt, Artificial Sequence
  Description of Artificial Sequence: Synthetic oligonucleotide
acgccgaggccucgccgua

SEQ ID NO: 1135015 - RNA, 19 nt, Artificial Sequence
  Description of Artificial Sequence: Synthetic oligonucleotide
aggaggaauucgggcucuu

SEQ ID NO: 1135016 - RNA, 19 nt, Artificial Sequence
  Description of Artificial Sequence: Synthetic oligonucleotide
ggccgcuuugggucuaggu

SEQ ID NO: 1135017 - RNA, 19 nt, Artificial Sequence
  Description of Artificial Sequence: Synthetic oligonucleotide
gguugccggcagcgcggag

SEQ ID NO: 1135018 - RNA, 19 nt, Artificial Sequence
  Description of Artificial Sequence: Synthetic oligonucleotide
cgucuguaaaacgccuuca

SEQ ID NO: 1135019 - RNA, 19 nt, Artificial Sequence
  Description of Artificial Sequence: Synthetic oligonucleotide
ggcgccacucaggcccaag

SEQ ID NO: 1135020 - RNA, 19 nt, Artificial Sequence
  Description of Artificial Sequence: Synthetic oligonucleotide
ccagcacuuuagccuguca

SEQ ID NO: 1135021 - RNA, 19 nt, Artificial Sequence
  Description of Artificial Sequence: Synthetic oligonucleotide
gcucaacacaggacgcugu

SEQ ID NO: 1135022 - RNA, 19 nt, Artificial Sequence
  Description of Artificial Sequence: Synthetic oligonucleotide
ccggcucguuacagacgcc

SEQ ID NO: 1135023 - RNA, 19 nt, Artificial Sequence
  Description of Artificial Sequence: Synthetic oligonucleotide
gcgcucguacagcgccgag

SEQ ID NO: 1135024 - RNA, 19 nt, Artificial Sequence
  Description of Artificial Sequence: Synthetic oligonucleotide
gggcugacgccacauuguu

SEQ ID NO: 1135025 - RNA, 19 nt, Artificial Sequence
  Description of Artificial Sequence: Synthetic oligonucleotide
cuguacccuuggggagaug

SEQ ID NO: 1135026 - RNA, 19 nt, Artificial Sequence
  Description of Artificial Sequence: Synthetic oligonucleotide
gccagcacuuuagccuguc

SEQ ID NO: 1135027 - RNA, 19 nt, Artificial Sequence
  Description of Artificial Sequence: Synthetic oligonucleotide
gggcucaacacaggacgcu

SEQ ID NO: 1135028 - RNA, 19 nt, Artificial Sequence
  Description of Artificial Sequence: Synthetic oligonucleotide
ggcugacgccacauuguua

SEQ ID NO: 1135029 - RNA, 19 nt, Artificial Sequence
  Description of Artificial Sequence: Synthetic oligonucleotide
gccguuccuggguucaauu

SEQ ID NO: 1135030 - RNA, 19 nt, Artificial Sequence
  Description of Artificial Sequence: Synthetic oligonucleotide
gcgccacucaggcccaagu

SEQ ID NO: 1135031 - RNA, 19 nt, Artificial Sequence
  Description of Artificial Sequence: Synthetic oligonucleotide
gcccgucuguaaaacgccu

SEQ ID NO: 1135032 - RNA, 19 nt, Artificial Sequence
  Description of Artificial Sequence: Synthetic oligonucleotide
gcgcugaagugcaaucuuu

SEQ ID NO: 1135033 - RNA, 19 nt, Artificial Sequence
  Description of Artificial Sequence: Synthetic oligonucleotide
ccgaggccucgccguacug

SEQ ID NO: 1135034 - RNA, 19 nt, Artificial Sequence
  Description of Artificial Sequence: Synthetic oligonucleotide
gcgcucuguugcuguacgu

SEQ ID NO: 1135035 - RNA, 19 nt, Artificial Sequence
  Description of Artificial Sequence: Synthetic oligonucleotide
ggaggaauucgggcucuuu

SEQ ID NO: 1135036 - RNA, 19 nt, Artificial Sequence
  Description of Artificial Sequence: Synthetic oligonucleotide
gcagggccguuccuggguu

SEQ ID NO: 1135037 - RNA, 19 nt, Artificial Sequence
  Description of Artificial Sequence: Synthetic oligonucleotide
gcagaaccucgcgccugca

SEQ ID NO: 1135038 - RNA, 19 nt, Artificial Sequence
  Description of Artificial Sequence: Synthetic oligonucleotide
gccgaggccucgccguacu

SEQ ID NO: 1135039 - RNA, 19 nt, Artificial Sequence
  Description of Artificial Sequence: Synthetic oligonucleotide
caggggaggcccguagcuu

SEQ ID NO: 1135040 - RNA, 19 nt, Artificial Sequence
  Description of Artificial Sequence: Synthetic oligonucleotide
ggccuggacuaaaggcacu

SEQ ID NO: 1135041 - RNA, 19 nt, Artificial Sequence
  Description of Artificial Sequence: Synthetic oligonucleotide
cccgucuguaaaacgccuu

SEQ ID NO: 1135042 - RNA, 19 nt, Artificial Sequence
  Description of Artificial Sequence: Synthetic oligonucleotide
gccgcagugcgcgcucgua

SEQ ID NO: 1135043 - RNA, 19 nt, Artificial Sequence
  Description of Artificial Sequence: Synthetic oligonucleotide
ccuuaggggcaugcugggu

SEQ ID NO: 1135044 - RNA, 19 nt, Artificial Sequence
  Description of Artificial Sequence: Synthetic oligonucleotide
ccgggaggccggcucguua

SEQ ID NO: 1135045 - RNA, 19 nt, Artificial Sequence
  Description of Artificial Sequence: Synthetic oligonucleotide
gcgccgaggccucgccgua

SEQ ID NO: 1135046 - RNA, 19 nt, Artificial Sequence
  Description of Artificial Sequence: Synthetic oligonucleotide
gggccguuccuggguucaa

SEQ ID NO: 1135047 - RNA, 19 nt, Artificial Sequence
  Description of Artificial Sequence: Synthetic oligonucleotide
gccucgccguacuggccau

SEQ ID NO: 1135048 - RNA, 19 nt, Artificial Sequence
  Description of Artificial Sequence: Synthetic oligonucleotide
cauccccgggaggccggcu

SEQ ID NO: 1135049 - RNA, 19 nt, Artificial Sequence
  Description of Artificial Sequence: Synthetic oligonucleotide
cgcgcucguacagcgccga

SEQ ID NO: 1135050 - RNA, 19 nt, Artificial Sequence
  Description of Artificial Sequence: Synthetic oligonucleotide
ccucgccguacuggccauu

SEQ ID NO: 1135051 - RNA, 19 nt, Artificial Sequence
  Description of Artificial Sequence: Synthetic oligonucleotide
uuuguuuccguauugagcc

SEQ ID NO: 1135052 - RNA, 19 nt, Artificial Sequence
  Description of Artificial Sequence: Synthetic oligonucleotide
aaauuaaucauguuuuacu

SEQ ID NO: 1135053 - RNA, 19 nt, Artificial Sequence
  Description of Artificial Sequence: Synthetic oligonucleotide
auaaaggggaacuuaaaac

SEQ ID NO: 1135054 - RNA, 19 nt, Artificial Sequence
  Description of Artificial Sequence: Synthetic oligonucleotide
uguagaauauccaucaucu

SEQ ID NO: 1135055 - RNA, 19 nt, Artificial Sequence
  Description of Artificial Sequence: Synthetic oligonucleotide
ucugccaacacgaucacgg

SEQ ID NO: 1135056 - RNA, 19 nt, Artificial Sequence
  Description of Artificial Sequence: Synthetic oligonucleotide
aaaauuaaucauguuuuac

SEQ ID NO: 1135057 - RNA, 19 nt, Artificial Sequence
  Description of Artificial Sequence: Synthetic oligonucleotide
cucauguuaaaguucaugg

SEQ ID NO: 1135058 - RNA, 19 nt, Artificial Sequence
  Description of Artificial Sequence: Synthetic oligonucleotide
uuucuuugaaugaagaccu

SEQ ID NO: 1135059 - RNA, 19 nt, Artificial Sequence
  Description of Artificial Sequence: Synthetic oligonucleotide
aaggcguugaucuuuucgg

SEQ ID NO: 1135060 - RNA, 19 nt, Artificial Sequence
  Description of Artificial Sequence: Synthetic oligonucleotide
auaaacaucucuacgagac

SEQ ID NO: 1135061 - RNA, 19 nt, Artificial Sequence
  Description of Artificial Sequence: Synthetic oligonucleotide
uagaauauccaucaucucu

SEQ ID NO: 1135062 - RNA, 19 nt, Artificial Sequence
  Description of Artificial Sequence: Synthetic oligonucleotide
aauuaaucauguuuuacuu

SEQ ID NO: 1135063 - RNA, 19 nt, Artificial Sequence
  Description of Artificial Sequence: Synthetic oligonucleotide
aaaaugauaaaggggaacu

SEQ ID NO: 1135064 - RNA, 19 nt, Artificial Sequence
  Description of Artificial Sequence: Synthetic oligonucleotide
aggacuacugcacacgagc

SEQ ID NO: 1135065 - RNA, 19 nt, Artificial Sequence
  Description of Artificial Sequence: Synthetic oligonucleotide
aaacaucucuacgagacgg

SEQ ID NO: 1135066 - RNA, 19 nt, Artificial Sequence
  Description of Artificial Sequence: Synthetic oligonucleotide
aucaaaauuaaucauguuu

SEQ ID NO: 1135067 - RNA, 19 nt, Artificial Sequence
  Description of Artificial Sequence: Synthetic oligonucleotide
uugaaugaagaccuugacc

SEQ ID NO: 1135068 - RNA, 19 nt, Artificial Sequence
  Description of Artificial Sequence: Synthetic oligonucleotide
uugaccaaagucuuguuug

SEQ ID NO: 1135069 - RNA, 19 nt, Artificial Sequence
  Description of Artificial Sequence: Synthetic oligonucleotide
aagacuuuccaucuuuugu

SEQ ID NO: 1135070 - RNA, 19 nt, Artificial Sequence
  Description of Artificial Sequence: Synthetic oligonucleotide
guuucuuugaaugaagacc

SEQ ID NO: 1135071 - RNA, 19 nt, Artificial Sequence
  Description of Artificial Sequence: Synthetic oligonucleotide
ugaagagcuucccugggcg

SEQ ID NO: 1135072 - RNA, 19 nt, Artificial Sequence
  Description of Artificial Sequence: Synthetic oligonucleotide
uuucuuaguaguccuuggg

SEQ ID NO: 1135073 - RNA, 19 nt, Artificial Sequence
  Description of Artificial Sequence: Synthetic oligonucleotide
uguugaaagcaauucauaa

SEQ ID NO: 1135074 - RNA, 19 nt, Artificial Sequence
  Description of Artificial Sequence: Synthetic oligonucleotide
uccuccauaagauggaggc

SEQ ID NO: 1135075 - RNA, 19 nt, Artificial Sequence
  Description of Artificial Sequence: Synthetic oligonucleotide
caaauaaacaucucuacga

SEQ ID NO: 1135076 - RNA, 19 nt, Artificial Sequence
  Description of Artificial Sequence: Synthetic oligonucleotide
gacaaauaaacaucucuac

SEQ ID NO: 1135077 - RNA, 19 nt, Artificial Sequence
  Description of Artificial Sequence: Synthetic oligonucleotide
auguuuuacuuuuauccuc

SEQ ID NO: 1135078 - RNA, 19 nt, Artificial Sequence
  Description of Artificial Sequence: Synthetic oligonucleotide
auuuguugguuucacgguc

SEQ ID NO: 1135079 - RNA, 19 nt, Artificial Sequence
  Description of Artificial Sequence: Synthetic oligonucleotide
aguuggaggggauugugac

SEQ ID NO: 1135080 - RNA, 19 nt, Artificial Sequence
  Description of Artificial Sequence: Synthetic oligonucleotide
gaaggcguugaucuuuucg

SEQ ID NO: 1135081 - RNA, 19 nt, Artificial Sequence
  Description of Artificial Sequence: Synthetic oligonucleotide
uuggaggggauugugaccg

SEQ ID NO: 1135082 - RNA, 19 nt, Artificial Sequence
  Description of Artificial Sequence: Synthetic oligonucleotide
aaaggggaacuuaaaacag

SEQ ID NO: 1135083 - RNA, 19 nt, Artificial Sequence
  Description of Artificial Sequence: Synthetic oligonucleotide
auacuugccaaauacugcu

SEQ ID NO: 1135084 - RNA, 19 nt, Artificial Sequence
  Description of Artificial Sequence: Synthetic oligonucleotide
auggcuuucccauccaagg

SEQ ID NO: 1135085 - RNA, 19 nt, Artificial Sequence
  Description of Artificial Sequence: Synthetic oligonucleotide
uguauccuccacgugaagg

SEQ ID NO: 1135086 - RNA, 19 nt, Artificial Sequence
  Description of Artificial Sequence: Synthetic oligonucleotide
acccucuuuccauagacgg

SEQ ID NO: 1135087 - RNA, 19 nt, Artificial Sequence
  Description of Artificial Sequence: Synthetic oligonucleotide
uaaacaucucuacgagacg

SEQ ID NO: 1135088 - RNA, 19 nt, Artificial Sequence
  Description of Artificial Sequence: Synthetic oligonucleotide
ugaguagucacgaucccga

SEQ ID NO: 1135089 - RNA, 19 nt, Artificial Sequence
  Description of Artificial Sequence: Synthetic oligonucleotide
auaaucucuggugucacgg

SEQ ID NO: 1135090 - RNA, 19 nt, Artificial Sequence
  Description of Artificial Sequence: Synthetic oligonucleotide
auugugaccgucucaagcu

SEQ ID NO: 1135091 - RNA, 19 nt, Artificial Sequence
  Description of Artificial Sequence: Synthetic oligonucleotide
uuacuuuuauccucacaag

SEQ ID NO: 1135092 - RNA, 19 nt, Artificial Sequence
  Description of Artificial Sequence: Synthetic oligonucleotide
ucauguuaaaguucaugga

SEQ ID NO: 1135093 - RNA, 19 nt, Artificial Sequence
  Description of Artificial Sequence: Synthetic oligonucleotide
aucucuacgagacggcagg

SEQ ID NO: 1135094 - RNA, 19 nt, Artificial Sequence
  Description of Artificial Sequence: Synthetic oligonucleotide
aguagucacgaucccgacc

SEQ ID NO: 1135095 - RNA, 19 nt, Artificial Sequence
  Description of Artificial Sequence: Synthetic oligonucleotide
cuuuuguagaauauccauc

SEQ ID NO: 1135096 - RNA, 19 nt, Artificial Sequence
  Description of Artificial Sequence: Synthetic oligonucleotide
guauccuccacgugaaggg

SEQ ID NO: 1135097 - RNA, 19 nt, Artificial Sequence
  Description of Artificial Sequence: Synthetic oligonucleotide
ugcaucuuuagcaucugcu

SEQ ID NO: 1135098 - RNA, 19 nt, Artificial Sequence
  Description of Artificial Sequence: Synthetic oligonucleotide
ugggcgaucugcuucaacc

SEQ ID NO: 1135099 - RNA, 19 nt, Artificial Sequence
  Description of Artificial Sequence: Synthetic oligonucleotide
uucuuaguaguccuugggu

SEQ ID NO: 1135100 - RNA, 19 nt, Artificial Sequence
  Description of Artificial Sequence: Synthetic oligonucleotide
uguuucuuugaaugaagac

SEQ ID NO: 1135101 - RNA, 19 nt, Artificial Sequence
  Description of Artificial Sequence: Synthetic oligonucleotide
cuuuuauccucacaagaac

SEQ ID NO: 1135102 - RNA, 19 nt, Artificial Sequence
  Description of Artificial Sequence: Synthetic oligonucleotide
uugauuuguugguuucacg

SEQ ID NO: 1135103 - RNA, 19 nt, Artificial Sequence
  Description of Artificial Sequence: Synthetic oligonucleotide
uacgacagaagacuuucca

SEQ ID NO: 1135104 - RNA, 19 nt, Artificial Sequence
  Description of Artificial Sequence: Synthetic oligonucleotide
acucggaugaucugaguag

SEQ ID NO: 1135105 - RNA, 19 nt, Artificial Sequence
  Description of Artificial Sequence: Synthetic oligonucleotide
ucaaccaucuuuccuucca

SEQ ID NO: 1135106 - RNA, 19 nt, Artificial Sequence
  Description of Artificial Sequence: Synthetic oligonucleotide
aaugauaaaggggaacuua

SEQ ID NO: 1135107 - RNA, 19 nt, Artificial Sequence
  Description of Artificial Sequence: Synthetic oligonucleotide
gaugaucugaguagucacg

SEQ ID NO: 1135108 - RNA, 19 nt, Artificial Sequence
  Description of Artificial Sequence: Synthetic oligonucleotide
uuuguugguuucacggucu

SEQ ID NO: 1135109 - RNA, 19 nt, Artificial Sequence
  Description of Artificial Sequence: Synthetic oligonucleotide
ucuuugaaugaagaccuug

SEQ ID NO: 1135110 - RNA, 19 nt, Artificial Sequence
  Description of Artificial Sequence: Synthetic oligonucleotide
acaacuuuucuuaguaguc

SEQ ID NO: 1135111 - RNA, 19 nt, Artificial Sequence
  Description of Artificial Sequence: Synthetic oligonucleotide
uagaagcucgcugaagggg

SEQ ID NO: 1135112 - RNA, 19 nt, Artificial Sequence
  Description of Artificial Sequence: Synthetic oligonucleotide
ucuacgagacggcaggggu

SEQ ID NO: 1135113 - RNA, 19 nt, Artificial Sequence
  Description of Artificial Sequence: Synthetic oligonucleotide
ucgagucuuacacauuuaa

SEQ ID NO: 1135114 - RNA, 19 nt, Artificial Sequence
  Description of Artificial Sequence: Synthetic oligonucleotide
agaagcucgcugaaggggc

SEQ ID NO: 1135115 - RNA, 19 nt, Artificial Sequence
  Description of Artificial Sequence: Synthetic oligonucleotide
gaucugaguagucacgauc

SEQ ID NO: 1135116 - RNA, 19 nt, Artificial Sequence
  Description of Artificial Sequence: Synthetic oligonucleotide
ucaccauagccucuugaug

SEQ ID NO: 1135117 - RNA, 19 nt, Artificial Sequence
  Description of Artificial Sequence: Synthetic oligonucleotide
uguuuccguauugagcccg

SEQ ID NO: 1135118 - RNA, 19 nt, Artificial Sequence
  Description of Artificial Sequence: Synthetic oligonucleotide
aucccgaccauauccaucu

SEQ ID NO: 1135119 - RNA, 19 nt, Artificial Sequence
  Description of Artificial Sequence: Synthetic oligonucleotide
uggguaguuacgacagaag

SEQ ID NO: 1135120 - RNA, 19 nt, Artificial Sequence
  Description of Artificial Sequence: Synthetic oligonucleotide
cuagaagcucgcugaaggg

SEQ ID NO: 1135121 - RNA, 19 nt, Artificial Sequence
  Description of Artificial Sequence: Synthetic oligonucleotide
uacccucuuuccauagacg

SEQ ID NO: 1135122 - RNA, 19 nt, Artificial Sequence
  Description of Artificial Sequence: Synthetic oligonucleotide
cuuggguaaucucugcuug

SEQ ID NO: 1135123 - RNA, 19 nt, Artificial Sequence
  Description of Artificial Sequence: Synthetic oligonucleotide
uucacggucuuucaucaaa

SEQ ID NO: 1135124 - RNA, 19 nt, Artificial Sequence
  Description of Artificial Sequence: Synthetic oligonucleotide
ucucagaagagaacagaaa

SEQ ID NO: 1135125 - RNA, 19 nt, Artificial Sequence
  Description of Artificial Sequence: Synthetic oligonucleotide
ucccauucauaucucuggc

SEQ ID NO: 1135126 - RNA, 19 nt, Artificial Sequence
  Description of Artificial Sequence: Synthetic oligonucleotide
ucguggagggccuccauag

SEQ ID NO: 1135127 - RNA, 19 nt, Artificial Sequence
  Description of Artificial Sequence: Synthetic oligonucleotide
acacaacuuuucuuaguag

SEQ ID NO: 1135128 - RNA, 19 nt, Artificial Sequence
  Description of Artificial Sequence: Synthetic oligonucleotide
caucucgaucaccauagcc

SEQ ID NO: 1135129 - RNA, 19 nt, Artificial Sequence
  Description of Artificial Sequence: Synthetic oligonucleotide
ugagaguuggaggggauug

SEQ ID NO: 1135130 - RNA, 19 nt, Artificial Sequence
  Description of Artificial Sequence: Synthetic oligonucleotide
gaagugguccccuggaaga

SEQ ID NO: 1135131 - RNA, 19 nt, Artificial Sequence
  Description of Artificial Sequence: Synthetic oligonucleotide
gguaacacaacuuuucuua

SEQ ID NO: 1135132 - RNA, 19 nt, Artificial Sequence
  Description of Artificial Sequence: Synthetic oligonucleotide
uccuuggguaguuacgaca

SEQ ID NO: 1135133 - RNA, 19 nt, Artificial Sequence
  Description of Artificial Sequence: Synthetic oligonucleotide
aaugaagaccuugaccaaa

SEQ ID NO: 1135134 - RNA, 19 nt, Artificial Sequence
  Description of Artificial Sequence: Synthetic oligonucleotide
ugauaaaggggaacuuaaa

SEQ ID NO: 1135135 - RNA, 19 nt, Artificial Sequence
  Description of Artificial Sequence: Synthetic oligonucleotide
ugugaccgucucaagcucc

SEQ ID NO: 1135136 - RNA, 19 nt, Artificial Sequence
  Description of Artificial Sequence: Synthetic oligonucleotide
ucauuuguuuccguauuga

SEQ ID NO: 1135137 - RNA, 19 nt, Artificial Sequence
  Description of Artificial Sequence: Synthetic oligonucleotide
agucgagucuuacacauuu

SEQ ID NO: 1135138 - RNA, 19 nt, Artificial Sequence
  Description of Artificial Sequence: Synthetic oligonucleotide
uugagcccgccaaugaaga

SEQ ID NO: 1135139 - RNA, 19 nt, Artificial Sequence
  Description of Artificial Sequence: Synthetic oligonucleotide
ccuagaagcucgcugaagg

SEQ ID NO: 1135140 - RNA, 19 nt, Artificial Sequence
  Description of Artificial Sequence: Synthetic oligonucleotide
uccguauugagcccgccaa

SEQ ID NO: 1135141 - RNA, 19 nt, Artificial Sequence
  Description of Artificial Sequence: Synthetic oligonucleotide
agucuuguuuguuucuagu

SEQ ID NO: 1135142 - RNA, 19 nt, Artificial Sequence
  Description of Artificial Sequence: Synthetic oligonucleotide
accauagccucuugauggg

SEQ ID NO: 1135143 - RNA, 19 nt, Artificial Sequence
  Description of Artificial Sequence: Synthetic oligonucleotide
auccauguauccuccacgu

SEQ ID NO: 1135144 - RNA, 19 nt, Artificial Sequence
  Description of Artificial Sequence: Synthetic oligonucleotide
ugccaacacgaucacggcc

SEQ ID NO: 1135145 - RNA, 19 nt, Artificial Sequence
  Description of Artificial Sequence: Synthetic oligonucleotide
aucaccauagccucuugau

SEQ ID NO: 1135146 - RNA, 19 nt, Artificial Sequence
  Description of Artificial Sequence: Synthetic oligonucleotide
guuacgacagaagacuuuc

SEQ ID NO: 1135147 - RNA, 19 nt, Artificial Sequence
  Description of Artificial Sequence: Synthetic oligonucleotide
guuucacggucuuucauca

SEQ ID NO: 1135148 - RNA, 19 nt, Artificial Sequence
  Description of Artificial Sequence: Synthetic oligonucleotide
uucccauccaaggacuucc

SEQ ID NO: 1135149 - RNA, 19 nt, Artificial Sequence
  Description of Artificial Sequence: Synthetic oligonucleotide
cucgaagaccucugggagg

SEQ ID NO: 1135150 - RNA, 19 nt, Artificial Sequence
  Description of Artificial Sequence: Synthetic oligonucleotide
aacacgaucacggccacuu

SEQ ID NO: 1135151 - RNA, 19 nt, Artificial Sequence
  Description of Artificial Sequence: Synthetic oligonucleotide
acuuuuauccucacaagaa

SEQ ID NO: 1135152 - RNA, 19 nt, Artificial Sequence
  Description of Artificial Sequence: Synthetic oligonucleotide
ugaaggggccuuccaguag

SEQ ID NO: 1135153 - RNA, 19 nt, Artificial Sequence
  Description of Artificial Sequence: Synthetic oligonucleotide
ugcuuguugaaagcaauuc

SEQ ID NO: 1135154 - RNA, 19 nt, Artificial Sequence
  Description of Artificial Sequence: Synthetic oligonucleotide
uuuguagaauauccaucau

SEQ ID NO: 1135155 - RNA, 19 nt, Artificial Sequence
  Description of Artificial Sequence: Synthetic oligonucleotide
uuacgacagaagacuuucc

SEQ ID NO: 1135156 - RNA, 19 nt, Artificial Sequence
  Description of Artificial Sequence: Synthetic oligonucleotide
ugucacgggagcuugggua

SEQ ID NO: 1135157 - RNA, 19 nt, Artificial Sequence
  Description of Artificial Sequence: Synthetic oligonucleotide
cuaacgcuuccccaacuag

SEQ ID NO: 1135158 - RNA, 19 nt, Artificial Sequence
  Description of Artificial Sequence: Synthetic oligonucleotide
guaguuacgacagaagacu

SEQ ID NO: 1135159 - RNA, 19 nt, Artificial Sequence
  Description of Artificial Sequence: Synthetic oligonucleotide
uauuuccacuauucgucca

SEQ ID NO: 1135160 - RNA, 19 nt, Artificial Sequence
  Description of Artificial Sequence: Synthetic oligonucleotide
guugguuucacggucuuuc

SEQ ID NO: 1135161 - RNA, 19 nt, Artificial Sequence
  Description of Artificial Sequence: Synthetic oligonucleotide
aaaugauaaaggggaacuu

SEQ ID NO: 1135162 - RNA, 19 nt, Artificial Sequence
  Description of Artificial Sequence: Synthetic oligonucleotide
acaagucgagucuuacaca

SEQ ID NO: 1135163 - RNA, 19 nt, Artificial Sequence
  Description of Artificial Sequence: Synthetic oligonucleotide
acgccugccacucucaaau

SEQ ID NO: 1135164 - RNA, 19 nt, Artificial Sequence
  Description of Artificial Sequence: Synthetic oligonucleotide
aacgcuuccccaacuagga

SEQ ID NO: 1135165 - RNA, 19 nt, Artificial Sequence
  Description of Artificial Sequence: Synthetic oligonucleotide
uauccuccacgugaagggg

SEQ ID NO: 1135166 - RNA, 19 nt, Artificial Sequence
  Description of Artificial Sequence: Synthetic oligonucleotide
ucacggucuuucaucaaaa

SEQ ID NO: 1135167 - RNA, 19 nt, Artificial Sequence
  Description of Artificial Sequence: Synthetic oligonucleotide
uuggguaguuacgacagaa

SEQ ID NO: 1135168 - RNA, 19 nt, Artificial Sequence
  Description of Artificial Sequence: Synthetic oligonucleotide
ucuugauuuguugguuuca

SEQ ID NO: 1135169 - RNA, 19 nt, Artificial Sequence
  Description of Artificial Sequence: Synthetic oligonucleotide
uaggacuacugcacacgag

SEQ ID NO: 1135170 - RNA, 19 nt, Artificial Sequence
  Description of Artificial Sequence: Synthetic oligonucleotide
gaccgucucaagcuccuag

SEQ ID NO: 1135171 - RNA, 19 nt, Artificial Sequence
  Description of Artificial Sequence: Synthetic oligonucleotide
uuccccaacuaggaagccg

SEQ ID NO: 1135172 - RNA, 19 nt, Artificial Sequence
  Description of Artificial Sequence: Synthetic oligonucleotide
gaucucagaagagaacaga

SEQ ID NO: 1135173 - RNA, 19 nt, Artificial Sequence
  Description of Artificial Sequence: Synthetic oligonucleotide
guuggaggggauugugacc

SEQ ID NO: 1135174 - RNA, 19 nt, Artificial Sequence
  Description of Artificial Sequence: Synthetic oligonucleotide
auguuaaaguucauggaau

SEQ ID NO: 1135175 - RNA, 19 nt, Artificial Sequence
  Description of Artificial Sequence: Synthetic oligonucleotide
uuggguaaucucugcuuga

SEQ ID NO: 1135176 - RNA, 19 nt, Artificial Sequence
  Description of Artificial Sequence: Synthetic oligonucleotide
caucucuacgagacggcag

SEQ ID NO: 1135177 - RNA, 19 nt, Artificial Sequence
  Description of Artificial Sequence: Synthetic oligonucleotide
aagauggaggcggcccucg

SEQ ID NO: 1135178 - RNA, 19 nt, Artificial Sequence
  Description of Artificial Sequence: Synthetic oligonucleotide
augauaaaggggaacuuaa

SEQ ID NO: 1135179 - RNA, 19 nt, Artificial Sequence
  Description of Artificial Sequence: Synthetic oligonucleotide
cuuguugaaagcaauucau

SEQ ID NO: 1135180 - RNA, 19 nt, Artificial Sequence
  Description of Artificial Sequence: Synthetic oligonucleotide
gauuuguugguuucacggu

SEQ ID NO: 1135181 - RNA, 19 nt, Artificial Sequence
  Description of Artificial Sequence: Synthetic oligonucleotide
cuugucugccaacacgauc

SEQ ID NO: 1135182 - RNA, 19 nt, Artificial Sequence
  Description of Artificial Sequence: Synthetic oligonucleotide
aggggauugugaccgucuc

SEQ ID NO: 1135183 - RNA, 19 nt, Artificial Sequence
  Description of Artificial Sequence: Synthetic oligonucleotide
gacuacugcacacgagcac

SEQ ID NO: 1135184 - RNA, 19 nt, Artificial Sequence
  Description of Artificial Sequence: Synthetic oligonucleotide
uuccguauugagcccgcca

SEQ ID NO: 1135185 - RNA, 19 nt, Artificial Sequence
  Description of Artificial Sequence: Synthetic oligonucleotide
ccauucauaucucuggcug

SEQ ID NO: 1135186 - RNA, 19 nt, Artificial Sequence
  Description of Artificial Sequence: Synthetic oligonucleotide
acuucccauucauaucucu

SEQ ID NO: 1135187 - RNA, 19 nt, Artificial Sequence
  Description of Artificial Sequence: Synthetic oligonucleotide
aguccuuggguaguuacga

SEQ ID NO: 1135188 - RNA, 19 nt, Artificial Sequence
  Description of Artificial Sequence: Synthetic oligonucleotide
ggaagugguccccuggaag

SEQ ID NO: 1135189 - RNA, 19 nt, Artificial Sequence
  Description of Artificial Sequence: Synthetic oligonucleotide
gguaguuacgacagaagac

SEQ ID NO: 1135190 - RNA, 19 nt, Artificial Sequence
  Description of Artificial Sequence: Synthetic oligonucleotide
uugguuucacggucuuuca

SEQ ID NO: 1135191 - RNA, 19 nt, Artificial Sequence
  Description of Artificial Sequence: Synthetic oligonucleotide
ggguaguuacgacagaaga

SEQ ID NO: 1135192 - RNA, 19 nt, Artificial Sequence
  Description of Artificial Sequence: Synthetic oligonucleotide
uccauguauccuccacgug

SEQ ID NO: 1135193 - RNA, 19 nt, Artificial Sequence
  Description of Artificial Sequence: Synthetic oligonucleotide
gaagaccucugggagggcc

SEQ ID NO: 1135194 - RNA, 19 nt, Artificial Sequence
  Description of Artificial Sequence: Synthetic oligonucleotide
aauacugcuuccagggcuu

SEQ ID NO: 1135195 - RNA, 19 nt, Artificial Sequence
  Description of Artificial Sequence: Synthetic oligonucleotide
cacaacuuuucuuaguagu

SEQ ID NO: 1135196 - RNA, 19 nt, Artificial Sequence
  Description of Artificial Sequence: Synthetic oligonucleotide
uaguuacgacagaagacuu

SEQ ID NO: 1135197 - RNA, 19 nt, Artificial Sequence
  Description of Artificial Sequence: Synthetic oligonucleotide
cuacugcacacgagcaccc

SEQ ID NO: 1135198 - RNA, 19 nt, Artificial Sequence
  Description of Artificial Sequence: Synthetic oligonucleotide
ccucuuuccauagacggcg

SEQ ID NO: 1135199 - RNA, 19 nt, Artificial Sequence
  Description of Artificial Sequence: Synthetic oligonucleotide
uuguuuccguauugagccc

SEQ ID NO: 1135200 - RNA, 19 nt, Artificial Sequence
  Description of Artificial Sequence: Synthetic oligonucleotide
accaucauccauguauccu

SEQ ID NO: 1135201 - RNA, 19 nt, Artificial Sequence
  Description of Artificial Sequence: Synthetic oligonucleotide
guagaauauccaucaucuc

SEQ ID NO: 1135202 - RNA, 19 nt, Artificial Sequence
  Description of Artificial Sequence: Synthetic oligonucleotide
acggcagggguucccuucg

SEQ ID NO: 1135203 - RNA, 19 nt, Artificial Sequence
  Description of Artificial Sequence: Synthetic oligonucleotide
gaagccgcuuucccgcgcc

SEQ ID NO: 1135204 - RNA, 19 nt, Artificial Sequence
  Description of Artificial Sequence: Synthetic oligonucleotide
accguagccaucacgugag

SEQ ID NO: 1135205 - RNA, 19 nt, Artificial Sequence
  Description of Artificial Sequence: Synthetic oligonucleotide
cucuuuccauagacggcgg

SEQ ID NO: 1135206 - RNA, 19 nt, Artificial Sequence
  Description of Artificial Sequence: Synthetic oligonucleotide
uugugaccgucucaagcuc

SEQ ID NO: 1135207 - RNA, 19 nt, Artificial Sequence
  Description of Artificial Sequence: Synthetic oligonucleotide
caccaucauccauguaucc

SEQ ID NO: 1135208 - RNA, 19 nt, Artificial Sequence
  Description of Artificial Sequence: Synthetic oligonucleotide
ggcguugaucuuuucggag

SEQ ID NO: 1135209 - RNA, 19 nt, Artificial Sequence
  Description of Artificial Sequence: Synthetic oligonucleotide
ugagcccgccaaugaagag

SEQ ID NO: 1135210 - RNA, 19 nt, Artificial Sequence
  Description of Artificial Sequence: Synthetic oligonucleotide
accgucucaagcuccuaga

SEQ ID NO: 1135211 - RNA, 19 nt, Artificial Sequence
  Description of Artificial Sequence: Synthetic oligonucleotide
gauggaggcggcccucgug

SEQ ID NO: 1135212 - RNA, 19 nt, Artificial Sequence
  Description of Artificial Sequence: Synthetic oligonucleotide
uccuagaagcucgcugaag

SEQ ID NO: 1135213 - RNA, 19 nt, Artificial Sequence
  Description of Artificial Sequence: Synthetic oligonucleotide
ucucuacgagacggcaggg

SEQ ID NO: 1135214 - RNA, 19 nt, Artificial Sequence
  Description of Artificial Sequence: Synthetic oligonucleotide
agaguuggaggggauugug

SEQ ID NO: 1135215 - RNA, 19 nt, Artificial Sequence
  Description of Artificial Sequence: Synthetic oligonucleotide
cauguauccuccacgugaa

SEQ ID NO: 1135216 - RNA, 19 nt, Artificial Sequence
  Description of Artificial Sequence: Synthetic oligonucleotide
cauauccaucucgaucacc

SEQ ID NO: 1135217 - RNA, 19 nt, Artificial Sequence
  Description of Artificial Sequence: Synthetic oligonucleotide
agggguucccuucguggag

SEQ ID NO: 1135218 - RNA, 19 nt, Artificial Sequence
  Description of Artificial Sequence: Synthetic oligonucleotide
ucggaugaucugaguaguc

SEQ ID NO: 1135219 - RNA, 19 nt, Artificial Sequence
  Description of Artificial Sequence: Synthetic oligonucleotide
ugaucugaguagucacgau

SEQ ID NO: 1135220 - RNA, 19 nt, Artificial Sequence
  Description of Artificial Sequence: Synthetic oligonucleotide
cuaggacuacugcacacga

SEQ ID NO: 1135221 - RNA, 19 nt, Artificial Sequence
  Description of Artificial Sequence: Synthetic oligonucleotide
uggugucacgggagcuugg

SEQ ID NO: 1135222 - RNA, 19 nt, Artificial Sequence
  Description of Artificial Sequence: Synthetic oligonucleotide
uacgagacggcagggguuc

SEQ ID NO: 1135223 - RNA, 19 nt, Artificial Sequence
  Description of Artificial Sequence: Synthetic oligonucleotide
acacgcgucugccgccgcc

SEQ ID NO: 1135224 - RNA, 19 nt, Artificial Sequence
  Description of Artificial Sequence: Synthetic oligonucleotide
uggagggccuccauagcua

SEQ ID NO: 1135225 - RNA, 19 nt, Artificial Sequence
  Description of Artificial Sequence: Synthetic oligonucleotide
cugccaacacgaucacggc

SEQ ID NO: 1135226 - RNA, 19 nt, Artificial Sequence
  Description of Artificial Sequence: Synthetic oligonucleotide
caagucgagucuuacacau

SEQ ID NO: 1135227 - RNA, 19 nt, Artificial Sequence
  Description of Artificial Sequence: Synthetic oligonucleotide
acaucucuacgagacggca

SEQ ID NO: 1135228 - RNA, 19 nt, Artificial Sequence
  Description of Artificial Sequence: Synthetic oligonucleotide
gaguagucacgaucccgac

SEQ ID NO: 1135229 - RNA, 19 nt, Artificial Sequence
  Description of Artificial Sequence: Synthetic oligonucleotide
cucuacgagacggcagggg

SEQ ID NO: 1135230 - RNA, 19 nt, Artificial Sequence
  Description of Artificial Sequence: Synthetic oligonucleotide
ccauguauccuccacguga

SEQ ID NO: 1135231 - RNA, 19 nt, Artificial Sequence
  Description of Artificial Sequence: Synthetic oligonucleotide
ugucugccaacacgaucac

SEQ ID NO: 1135232 - RNA, 19 nt, Artificial Sequence
  Description of Artificial Sequence: Synthetic oligonucleotide
aagccgcuuucccgcgccg

SEQ ID NO: 1135233 - RNA, 19 nt, Artificial Sequence
  Description of Artificial Sequence: Synthetic oligonucleotide
acagaagacuuuccaucuu

SEQ ID NO: 1135234 - RNA, 19 nt, Artificial Sequence
  Description of Artificial Sequence: Synthetic oligonucleotide
auguauccuccacgugaag

SEQ ID NO: 1135235 - RNA, 19 nt, Artificial Sequence
  Description of Artificial Sequence: Synthetic oligonucleotide
gaagcucgcugaaggggcc

SEQ ID NO: 1135236 - RNA, 19 nt, Artificial Sequence
  Description of Artificial Sequence: Synthetic oligonucleotide
gacggcagggguucccuuc

SEQ ID NO: 1135237 - RNA, 19 nt, Artificial Sequence
  Description of Artificial Sequence: Synthetic oligonucleotide
caccguagccaucacguga

SEQ ID NO: 1135238 - RNA, 19 nt, Artificial Sequence
  Description of Artificial Sequence: Synthetic oligonucleotide
ccucgaagaccucugggag

SEQ ID NO: 1135239 - RNA, 19 nt, Artificial Sequence
  Description of Artificial Sequence: Synthetic oligonucleotide
ccuuccaguagcacaccgg

SEQ ID NO: 1135240 - RNA, 19 nt, Artificial Sequence
  Description of Artificial Sequence: Synthetic oligonucleotide
cacucggaugaucugagua

SEQ ID NO: 1135241 - RNA, 19 nt, Artificial Sequence
  Description of Artificial Sequence: Synthetic oligonucleotide
gaucccgaccauauccauc

SEQ ID NO: 1135242 - RNA, 19 nt, Artificial Sequence
  Description of Artificial Sequence: Synthetic oligonucleotide
cuuuccauagacggcggga

SEQ ID NO: 1135243 - RNA, 19 nt, Artificial Sequence
  Description of Artificial Sequence: Synthetic oligonucleotide
uuucacggucuuucaucaa

SEQ ID NO: 1135244 - RNA, 19 nt, Artificial Sequence
  Description of Artificial Sequence: Synthetic oligonucleotide
accggugacagcugcugau

SEQ ID NO: 1135245 - RNA, 19 nt, Artificial Sequence
  Description of Artificial Sequence: Synthetic oligonucleotide
ucgccacacgcgucugccg

SEQ ID NO: 1135246 - RNA, 19 nt, Artificial Sequence
  Description of Artificial Sequence: Synthetic oligonucleotide
gaguuggaggggauuguga

SEQ ID NO: 1135247 - RNA, 19 nt, Artificial Sequence
  Description of Artificial Sequence: Synthetic oligonucleotide
cuuccaguagcacaccggu

SEQ ID NO: 1135248 - RNA, 19 nt, Artificial Sequence
  Description of Artificial Sequence: Synthetic oligonucleotide
cacgaucacggccacuuga

SEQ ID NO: 1135249 - RNA, 19 nt, Artificial Sequence
  Description of Artificial Sequence: Synthetic oligonucleotide
cgacagaagacuuuccauc

SEQ ID NO: 1135250 - RNA, 19 nt, Artificial Sequence
  Description of Artificial Sequence: Synthetic oligonucleotide
cggucuuucaucaaaagua

SEQ ID NO: 1135251 - RNA, 19 nt, Artificial Sequence
  Description of Artificial Sequence: Synthetic oligonucleotide
gccacuaggacuacugcac

SEQ ID NO: 1135252 - RNA, 19 nt, Artificial Sequence
  Description of Artificial Sequence: Synthetic oligonucleotide
uuguugguuucacggucuu

SEQ ID NO: 1135253 - RNA, 19 nt, Artificial Sequence
  Description of Artificial Sequence: Synthetic oligonucleotide
acaccggugacagcugcug

SEQ ID NO: 1135254 - RNA, 19 nt, Artificial Sequence
  Description of Artificial Sequence: Synthetic oligonucleotide
gaccuugaccaaagucuug

SEQ ID NO: 1135255 - RNA, 19 nt, Artificial Sequence
  Description of Artificial Sequence: Synthetic oligonucleotide
cccgaccauauccaucucg

SEQ ID NO: 1135256 - RNA, 19 nt, Artificial Sequence
  Description of Artificial Sequence: Synthetic oligonucleotide
aguuacgacagaagacuuu

SEQ ID NO: 1135257 - RNA, 19 nt, Artificial Sequence
  Description of Artificial Sequence: Synthetic oligonucleotide
uuuccguauugagcccgcc

SEQ ID NO: 1135258 - RNA, 19 nt, Artificial Sequence
  Description of Artificial Sequence: Synthetic oligonucleotide
ggugucacgggagcuuggg

SEQ ID NO: 1135259 - RNA, 19 nt, Artificial Sequence
  Description of Artificial Sequence: Synthetic oligonucleotide
ucgcugaaggggccuucca

SEQ ID NO: 1135260 - RNA, 19 nt, Artificial Sequence
  Description of Artificial Sequence: Synthetic oligonucleotide
cauagacggcgggagcccc

SEQ ID NO: 1135261 - RNA, 19 nt, Artificial Sequence
  Description of Artificial Sequence: Synthetic oligonucleotide
cugcugaucucagaagaga

SEQ ID NO: 1135262 - RNA, 19 nt, Artificial Sequence
  Description of Artificial Sequence: Synthetic oligonucleotide
gccaacacgaucacggcca

SEQ ID NO: 1135263 - RNA, 19 nt, Artificial Sequence
  Description of Artificial Sequence: Synthetic oligonucleotide
gucugccaacacgaucacg

SEQ ID NO: 1135264 - RNA, 19 nt, Artificial Sequence
  Description of Artificial Sequence: Synthetic oligonucleotide
cuggugucacgggagcuug

SEQ ID NO: 1135265 - RNA, 19 nt, Artificial Sequence
  Description of Artificial Sequence: Synthetic oligonucleotide
acacgaucacggccacuug

SEQ ID NO: 1135266 - RNA, 19 nt, Artificial Sequence
  Description of Artificial Sequence: Synthetic oligonucleotide
gcugcugaucucagaagag

SEQ ID NO: 1135267 - RNA, 19 nt, Artificial Sequence
  Description of Artificial Sequence: Synthetic oligonucleotide
ugguccacgccugccacuc

SEQ ID NO: 1135268 - RNA, 19 nt, Artificial Sequence
  Description of Artificial Sequence: Synthetic oligonucleotide
cgagucuuacacauuuaac

SEQ ID NO: 1135269 - RNA, 19 nt, Artificial Sequence
  Description of Artificial Sequence: Synthetic oligonucleotide
cagggguucccuucgugga

SEQ ID NO: 1135270 - RNA, 19 nt, Artificial Sequence
  Description of Artificial Sequence: Synthetic oligonucleotide
gggauugugaccgucucaa

SEQ ID NO: 1135271 - RNA, 19 nt, Artificial Sequence
  Description of Artificial Sequence: Synthetic oligonucleotide
gucgccacacgcgucugcc

SEQ ID NO: 1135272 - RNA, 19 nt, Artificial Sequence
  Description of Artificial Sequence: Synthetic oligonucleotide
gaaaagccacuaggacuac

SEQ ID NO: 1135273 - RNA, 19 nt, Artificial Sequence
  Description of Artificial Sequence: Synthetic oligonucleotide
ggauugugaccgucucaag

SEQ ID NO: 1135274 - RNA, 19 nt, Artificial Sequence
  Description of Artificial Sequence: Synthetic oligonucleotide
aacucauguuaaaguucau

SEQ ID NO: 1135275 - RNA, 19 nt, Artificial Sequence
  Description of Artificial Sequence: Synthetic oligonucleotide
cucgcugaaggggccuucc

SEQ ID NO: 1135276 - RNA, 19 nt, Artificial Sequence
  Description of Artificial Sequence: Synthetic oligonucleotide
ugggagggccucugcuucu

SEQ ID NO: 1135277 - RNA, 19 nt, Artificial Sequence
  Description of Artificial Sequence: Synthetic oligonucleotide
cuugaccaaagucuuguuu

SEQ ID NO: 1135278 - RNA, 19 nt, Artificial Sequence
  Description of Artificial Sequence: Synthetic oligonucleotide
cuccacucggaugaucuga

SEQ ID NO: 1135279 - RNA, 19 nt, Artificial Sequence
  Description of Artificial Sequence: Synthetic oligonucleotide
ugaaggcguugaucuuuuc

SEQ ID NO: 1135280 - RNA, 19 nt, Artificial Sequence
  Description of Artificial Sequence: Synthetic oligonucleotide
aagcucgcugaaggggccu

SEQ ID NO: 1135281 - RNA, 19 nt, Artificial Sequence
  Description of Artificial Sequence: Synthetic oligonucleotide
cugaaggggccuuccagua

SEQ ID NO: 1135282 - RNA, 19 nt, Artificial Sequence
  Description of Artificial Sequence: Synthetic oligonucleotide
gggguucccuucguggagg

SEQ ID NO: 1135283 - RNA, 19 nt, Artificial Sequence
  Description of Artificial Sequence: Synthetic oligonucleotide
acgggagcuuggguaaucu

SEQ ID NO: 1135284 - RNA, 19 nt, Artificial Sequence
  Description of Artificial Sequence: Synthetic oligonucleotide
gacuucccauucauaucuc

SEQ ID NO: 1135285 - RNA, 19 nt, Artificial Sequence
  Description of Artificial Sequence: Synthetic oligonucleotide
guagcacaccggugacagc

SEQ ID NO: 1135286 - RNA, 19 nt, Artificial Sequence
  Description of Artificial Sequence: Synthetic oligonucleotide
cauuccacugcugcuucga

SEQ ID NO: 1135287 - RNA, 19 nt, Artificial Sequence
  Description of Artificial Sequence: Synthetic oligonucleotide
gggccuuccaguagcacac

SEQ ID NO: 1135288 - RNA, 19 nt, Artificial Sequence
  Description of Artificial Sequence: Synthetic oligonucleotide
aagcuccuagaagcucgcu

SEQ ID NO: 1135289 - RNA, 19 nt, Artificial Sequence
  Description of Artificial Sequence: Synthetic oligonucleotide
gggcgaucugcuucaacca

SEQ ID NO: 1135290 - RNA, 19 nt, Artificial Sequence
  Description of Artificial Sequence: Synthetic oligonucleotide
cuuggguaguuacgacaga

SEQ ID NO: 1135291 - RNA, 19 nt, Artificial Sequence
  Description of Artificial Sequence: Synthetic oligonucleotide
ggggcuaacgcuuccccaa

SEQ ID NO: 1135292 - RNA, 19 nt, Artificial Sequence
  Description of Artificial Sequence: Synthetic oligonucleotide
ccuccauaagauggaggcg

SEQ ID NO: 1135293 - RNA, 19 nt, Artificial Sequence
  Description of Artificial Sequence: Synthetic oligonucleotide
ccgaccauauccaucucga

SEQ ID NO: 1135294 - RNA, 19 nt, Artificial Sequence
  Description of Artificial Sequence: Synthetic oligonucleotide
cacgcgucugccgccgccg

SEQ ID NO: 1135295 - RNA, 19 nt, Artificial Sequence
  Description of Artificial Sequence: Synthetic oligonucleotide
ggguucccuucguggaggg

SEQ ID NO: 1135296 - RNA, 19 nt, Artificial Sequence
  Description of Artificial Sequence: Synthetic oligonucleotide
aagucgagucuuacacauu

SEQ ID NO: 1135297 - RNA, 19 nt, Artificial Sequence
  Description of Artificial Sequence: Synthetic oligonucleotide
agauggaggcggcccucgu

SEQ ID NO: 1135298 - RNA, 19 nt, Artificial Sequence
  Description of Artificial Sequence: Synthetic oligonucleotide
acgagacggcagggguucc

SEQ ID NO: 1135299 - RNA, 19 nt, Artificial Sequence
  Description of Artificial Sequence: Synthetic oligonucleotide
cgucucaagcuccuagaag

SEQ ID NO: 1135300 - RNA, 19 nt, Artificial Sequence
  Description of Artificial Sequence: Synthetic oligonucleotide
ggucuuucaucaaaaguau

SEQ ID NO: 1135301 - RNA, 19 nt, Artificial Sequence
  Description of Artificial Sequence: Synthetic oligonucleotide
gccugccacucucaaauga

SEQ ID NO: 1135302 - RNA, 19 nt, Artificial Sequence
  Description of Artificial Sequence: Synthetic oligonucleotide
aacugguccugaaggcguu

SEQ ID NO: 1135303 - RNA, 19 nt, Artificial Sequence
  Description of Artificial Sequence: Synthetic oligonucleotide
cagaagacuuuccaucuuu

SEQ ID NO: 1135304 - RNA, 19 nt, Artificial Sequence
  Description of Artificial Sequence: Synthetic oligonucleotide
gcauaaucucuggugucac

SEQ ID NO: 1135305 - RNA, 19 nt, Artificial Sequence
  Description of Artificial Sequence: Synthetic oligonucleotide
acgcuuccccaacuaggaa

SEQ ID NO: 1135306 - RNA, 19 nt, Artificial Sequence
  Description of Artificial Sequence: Synthetic oligonucleotide
agccgcuuucccgcgccgg

SEQ ID NO: 1135307 - RNA, 19 nt, Artificial Sequence
  Description of Artificial Sequence: Synthetic oligonucleotide
gggagcuuggguaaucucu

SEQ ID NO: 1135308 - RNA, 19 nt, Artificial Sequence
  Description of Artificial Sequence: Synthetic oligonucleotide
gcugaaggggccuuccagu

SEQ ID NO: 1135309 - RNA, 19 nt, Artificial Sequence
  Description of Artificial Sequence: Synthetic oligonucleotide
gcacaccggugacagcugc

SEQ ID NO: 1135310 - RNA, 19 nt, Artificial Sequence
  Description of Artificial Sequence: Synthetic oligonucleotide
cucggaugaucugaguagu

SEQ ID NO: 1135311 - RNA, 19 nt, Artificial Sequence
  Description of Artificial Sequence: Synthetic oligonucleotide
ucguagcgacugcuuccuc

SEQ ID NO: 1135312 - RNA, 19 nt, Artificial Sequence
  Description of Artificial Sequence: Synthetic oligonucleotide
ggggauugugaccgucuca

SEQ ID NO: 1135313 - RNA, 19 nt, Artificial Sequence
  Description of Artificial Sequence: Synthetic oligonucleotide
gcuaacgcuuccccaacua

SEQ ID NO: 1135314 - RNA, 19 nt, Artificial Sequence
  Description of Artificial Sequence: Synthetic oligonucleotide
ggcagggguucccuucgug

SEQ ID NO: 1135315 - RNA, 19 nt, Artificial Sequence
  Description of Artificial Sequence: Synthetic oligonucleotide
gagaguuggaggggauugu

SEQ ID NO: 1135316 - RNA, 19 nt, Artificial Sequence
  Description of Artificial Sequence: Synthetic oligonucleotide
cuuucccgcgccggucgcc

SEQ ID NO: 1135317 - RNA, 19 nt, Artificial Sequence
  Description of Artificial Sequence: Synthetic oligonucleotide
ccaguagcacaccggugac

SEQ ID NO: 1135318 - RNA, 19 nt, Artificial Sequence
  Description of Artificial Sequence: Synthetic oligonucleotide
agcacaccggugacagcug

SEQ ID NO: 1135319 - RNA, 19 nt, Artificial Sequence
  Description of Artificial Sequence: Synthetic oligonucleotide
ucccgaccauauccaucuc

SEQ ID NO: 1135320 - RNA, 19 nt, Artificial Sequence
  Description of Artificial Sequence: Synthetic oligonucleotide
cuccuagaagcucgcugaa

SEQ ID NO: 1135321 - RNA, 19 nt, Artificial Sequence
  Description of Artificial Sequence: Synthetic oligonucleotide
ccccgcuucgugguggugg

SEQ ID NO: 1135322 - RNA, 19 nt, Artificial Sequence
  Description of Artificial Sequence: Synthetic oligonucleotide
gggcuaacgcuuccccaac

SEQ ID NO: 1135323 - RNA, 19 nt, Artificial Sequence
  Description of Artificial Sequence: Synthetic oligonucleotide
gcgaucugcuucaaccauc

SEQ ID NO: 1135324 - RNA, 19 nt, Artificial Sequence
  Description of Artificial Sequence: Synthetic oligonucleotide
ucacgggagcuuggguaau

SEQ ID NO: 1135325 - RNA, 19 nt, Artificial Sequence
  Description of Artificial Sequence: Synthetic oligonucleotide
cacgggagcuuggguaauc

SEQ ID NO: 1135326 - RNA, 19 nt, Artificial Sequence
  Description of Artificial Sequence: Synthetic oligonucleotide
ccauagacggcgggagccc

SEQ ID NO: 1135327 - RNA, 19 nt, Artificial Sequence
  Description of Artificial Sequence: Synthetic oligonucleotide
gugguccccuggaagaacu

SEQ ID NO: 1135328 - RNA, 19 nt, Artificial Sequence
  Description of Artificial Sequence: Synthetic oligonucleotide
caccggugacagcugcuga

SEQ ID NO: 1135329 - RNA, 19 nt, Artificial Sequence
  Description of Artificial Sequence: Synthetic oligonucleotide
ggucgccacacgcgucugc

SEQ ID NO: 1135330 - RNA, 19 nt, Artificial Sequence
  Description of Artificial Sequence: Synthetic oligonucleotide
ggggaacuuaaaacagaaa

SEQ ID NO: 1135331 - RNA, 19 nt, Artificial Sequence
  Description of Artificial Sequence: Synthetic oligonucleotide
cugaaggcguugaucuuuu

SEQ ID NO: 1135332 - RNA, 19 nt, Artificial Sequence
  Description of Artificial Sequence: Synthetic oligonucleotide
gucgagucuuacacauuua

SEQ ID NO: 1135333 - RNA, 19 nt, Artificial Sequence
  Description of Artificial Sequence: Synthetic oligonucleotide
agacggcagggguucccuu

SEQ ID NO: 1135334 - RNA, 19 nt, Artificial Sequence
  Description of Artificial Sequence: Synthetic oligonucleotide
ccggggcuaacgcuucccc

SEQ ID NO: 1135335 - RNA, 19 nt, Artificial Sequence
  Description of Artificial Sequence: Synthetic oligonucleotide
gaccaaagucuuguuuguu

SEQ ID NO: 1135336 - RNA, 19 nt, Artificial Sequence
  Description of Artificial Sequence: Synthetic oligonucleotide
gagacggcagggguucccu

SEQ ID NO: 1135337 - RNA, 19 nt, Artificial Sequence
  Description of Artificial Sequence: Synthetic oligonucleotide
ccacuaggacuacugcaca

SEQ ID NO: 1135338 - RNA, 19 nt, Artificial Sequence
  Description of Artificial Sequence: Synthetic oligonucleotide
cacgccugccacucucaaa

SEQ ID NO: 1135339 - RNA, 19 nt, Artificial Sequence
  Description of Artificial Sequence: Synthetic oligonucleotide
ccaccguagccaucacgug

SEQ ID NO: 1135340 - RNA, 19 nt, Artificial Sequence
  Description of Artificial Sequence: Synthetic oligonucleotide
cuacgagacggcagggguu

SEQ ID NO: 1135341 - RNA, 19 nt, Artificial Sequence
  Description of Artificial Sequence: Synthetic oligonucleotide
cacacgcgucugccgccgc

SEQ ID NO: 1135342 - RNA, 19 nt, Artificial Sequence
  Description of Artificial Sequence: Synthetic oligonucleotide
gagggccuccauagcuauc

SEQ ID NO: 1135343 - RNA, 19 nt, Artificial Sequence
  Description of Artificial Sequence: Synthetic oligonucleotide
cgcuuucccgcgccggucg

SEQ ID NO: 1135344 - RNA, 19 nt, Artificial Sequence
  Description of Artificial Sequence: Synthetic oligonucleotide
cgccacacgcgucugccgc

SEQ ID NO: 1135345 - RNA, 19 nt, Artificial Sequence
  Description of Artificial Sequence: Synthetic oligonucleotide
cccguucuugucugccaac

SEQ ID NO: 1135346 - RNA, 19 nt, Artificial Sequence
  Description of Artificial Sequence: Synthetic oligonucleotide
ggcgaucugcuucaaccau

SEQ ID NO: 1135347 - RNA, 19 nt, Artificial Sequence
  Description of Artificial Sequence: Synthetic oligonucleotide
gugaccgucucaagcuccu

SEQ ID NO: 1135348 - RNA, 19 nt, Artificial Sequence
  Description of Artificial Sequence: Synthetic oligonucleotide
auacugcuuccagggcuuu

SEQ ID NO: 1135349 - RNA, 19 nt, Artificial Sequence
  Description of Artificial Sequence: Synthetic oligonucleotide
cguggagggccuccauagc

SEQ ID NO: 1135350 - RNA, 19 nt, Artificial Sequence
  Description of Artificial Sequence: Synthetic oligonucleotide
ggagggccuccauagcuau

SEQ ID NO: 1135351 - RNA, 19 nt, Artificial Sequence
  Description of Artificial Sequence: Synthetic oligonucleotide
cacaccggugacagcugcu

SEQ ID NO: 1135352 - RNA, 19 nt, Artificial Sequence
  Description of Artificial Sequence: Synthetic oligonucleotide
ccacacgcgucugccgccg

SEQ ID NO: 1135353 - RNA, 19 nt, Artificial Sequence
  Description of Artificial Sequence: Synthetic oligonucleotide
ccgucucaagcuccuagaa

SEQ ID NO: 1135354 - RNA, 19 nt, Artificial Sequence
  Description of Artificial Sequence: Synthetic oligonucleotide
agcucgcugaaggggccuu

SEQ ID NO: 1135355 - RNA, 19 nt, Artificial Sequence
  Description of Artificial Sequence: Synthetic oligonucleotide
ggcuaacgcuuccccaacu

SEQ ID NO: 1135356 - RNA, 19 nt, Artificial Sequence
  Description of Artificial Sequence: Synthetic oligonucleotide
ccccuggaagaacucaugu

SEQ ID NO: 1135357 - RNA, 19 nt, Artificial Sequence
  Description of Artificial Sequence: Synthetic oligonucleotide
cccauccaaggacuuccca

SEQ ID NO: 1135358 - RNA, 19 nt, Artificial Sequence
  Description of Artificial Sequence: Synthetic oligonucleotide
ccguagccaucacgugagc

SEQ ID NO: 1135359 - RNA, 19 nt, Artificial Sequence
  Description of Artificial Sequence: Synthetic oligonucleotide
cgggagcuuggguaaucuc

SEQ ID NO: 1135360 - RNA, 19 nt, Artificial Sequence
  Description of Artificial Sequence: Synthetic oligonucleotide
cgaucaccauagccucuug

SEQ ID NO: 1135361 - RNA, 19 nt, Artificial Sequence
  Description of Artificial Sequence: Synthetic oligonucleotide
cgccugccacucucaaaug

SEQ ID NO: 1135362 - RNA, 19 nt, Artificial Sequence
  Description of Artificial Sequence: Synthetic oligonucleotide
cggggcuaacgcuucccca

SEQ ID NO: 1135363 - RNA, 19 nt, Artificial Sequence
  Description of Artificial Sequence: Synthetic oligonucleotide
ccccggggcuaacgcuucc

SEQ ID NO: 1135364 - RNA, 19 nt, Artificial Sequence
  Description of Artificial Sequence: Synthetic oligonucleotide
caacacgaucacggccacu

SEQ ID NO: 1135365 - RNA, 19 nt, Artificial Sequence
  Description of Artificial Sequence: Synthetic oligonucleotide
gccgcuuucccgcgccggu

SEQ ID NO: 1135366 - RNA, 19 nt, Artificial Sequence
  Description of Artificial Sequence: Synthetic oligonucleotide
gcugagaguuggaggggau

SEQ ID NO: 1135367 - RNA, 19 nt, Artificial Sequence
  Description of Artificial Sequence: Synthetic oligonucleotide
ccggucgccacacgcgucu

SEQ ID NO: 1135368 - RNA, 19 nt, Artificial Sequence
  Description of Artificial Sequence: Synthetic oligonucleotide
cgucugccgccgccgcucc

SEQ ID NO: 1135369 - RNA, 19 nt, Artificial Sequence
  Description of Artificial Sequence: Synthetic oligonucleotide
cccgcgccggucgccacac

SEQ ID NO: 1135370 - RNA, 19 nt, Artificial Sequence
  Description of Artificial Sequence: Synthetic oligonucleotide
gccggucgccacacgcguc

SEQ ID NO: 1135371 - RNA, 19 nt, Artificial Sequence
  Description of Artificial Sequence: Synthetic oligonucleotide
ccguauugagcccgccaau

SEQ ID NO: 1135372 - RNA, 19 nt, Artificial Sequence
  Description of Artificial Sequence: Synthetic oligonucleotide
ccacgccugccacucucaa

SEQ ID NO: 1135373 - RNA, 19 nt, Artificial Sequence
  Description of Artificial Sequence: Synthetic oligonucleotide
gguccacgccugccacucu

SEQ ID NO: 1135374 - RNA, 19 nt, Artificial Sequence
  Description of Artificial Sequence: Synthetic oligonucleotide
ccccaacuaggaagccgcu

SEQ ID NO: 1135375 - RNA, 19 nt, Artificial Sequence
  Description of Artificial Sequence: Synthetic oligonucleotide
cgaucccgaccauauccau

SEQ ID NO: 1135376 - RNA, 19 nt, Artificial Sequence
  Description of Artificial Sequence: Synthetic oligonucleotide
cccaacuaggaagccgcuu

SEQ ID NO: 1135377 - RNA, 19 nt, Artificial Sequence
  Description of Artificial Sequence: Synthetic oligonucleotide
ccgcgccggucgccacacg

SEQ ID NO: 1135378 - RNA, 19 nt, Artificial Sequence
  Description of Artificial Sequence: Synthetic oligonucleotide
cggucgccacacgcgucug

SEQ ID NO: 1135379 - RNA, 19 nt, Artificial Sequence
  Description of Artificial Sequence: Synthetic oligonucleotide
cgccggucgccacacgcgu

SEQ ID NO: 1135380 - RNA, 19 nt, Artificial Sequence
  Description of Artificial Sequence: Synthetic oligonucleotide
cggcagggguucccuucgu

SEQ ID NO: 1135381 - RNA, 19 nt, Artificial Sequence
  Description of Artificial Sequence: Synthetic oligonucleotide
aaggcaaucagaucggggc

SEQ ID NO: 1135382 - RNA, 19 nt, Artificial Sequence
  Description of Artificial Sequence: Synthetic oligonucleotide
uguggaaaaucaaucaugg

SEQ ID NO: 1135383 - RNA, 19 nt, Artificial Sequence
  Description of Artificial Sequence: Synthetic oligonucleotide
guagaguucacuuucauag

SEQ ID NO: 1135384 - RNA, 19 nt, Artificial Sequence
  Description of Artificial Sequence: Synthetic oligonucleotide
ucaauaagcuccaugauca

SEQ ID NO: 1135385 - RNA, 19 nt, Artificial Sequence
  Description of Artificial Sequence: Synthetic oligonucleotide
agucgagauaaauaaagcc

SEQ ID NO: 1135386 - RNA, 19 nt, Artificial Sequence
  Description of Artificial Sequence: Synthetic oligonucleotide
aaugccuucauauaggcaa

SEQ ID NO: 1135387 - RNA, 19 nt, Artificial Sequence
  Description of Artificial Sequence: Synthetic oligonucleotide
aagccaagaaacauuaugc

SEQ ID NO: 1135388 - RNA, 19 nt, Artificial Sequence
  Description of Artificial Sequence: Synthetic oligonucleotide
uuugcaacaauguaaauau

SEQ ID NO: 1135389 - RNA, 19 nt, Artificial Sequence
  Description of Artificial Sequence: Synthetic oligonucleotide
uauaaugccuucauauagg

SEQ ID NO: 1135390 - RNA, 19 nt, Artificial Sequence
  Description of Artificial Sequence: Synthetic oligonucleotide
gacgcaaucaaacugcagg

SEQ ID NO: 1135391 - RNA, 19 nt, Artificial Sequence
  Description of Artificial Sequence: Synthetic oligonucleotide
aaaucaaucauggugauau

SEQ ID NO: 1135392 - RNA, 19 nt, Artificial Sequence
  Description of Artificial Sequence: Synthetic oligonucleotide
cuucauauaggcaaauucc

SEQ ID NO: 1135393 - RNA, 19 nt, Artificial Sequence
  Description of Artificial Sequence: Synthetic oligonucleotide
auauaaugccuucauauag

SEQ ID NO: 1135394 - RNA, 19 nt, Artificial Sequence
  Description of Artificial Sequence: Synthetic oligonucleotide
ucgauuguaaucaauuggc

SEQ ID NO: 1135395 - RNA, 19 nt, Artificial Sequence
  Description of Artificial Sequence: Synthetic oligonucleotide
ugugcuuaugguaaucacg

SEQ ID NO: 1135396 - RNA, 19 nt, Artificial Sequence
  Description of Artificial Sequence: Synthetic oligonucleotide
ucauauaaugccuucauau

SEQ ID NO: 1135397 - RNA, 19 nt, Artificial Sequence
  Description of Artificial Sequence: Synthetic oligonucleotide
uucauuugcaacaauguaa

SEQ ID NO: 1135398 - RNA, 19 nt, Artificial Sequence
  Description of Artificial Sequence: Synthetic oligonucleotide
ucaacuaccugucuagaag

SEQ ID NO: 1135399 - RNA, 19 nt, Artificial Sequence
  Description of Artificial Sequence: Synthetic oligonucleotide
aacgucaagagaauccucc

SEQ ID NO: 1135400 - RNA, 19 nt, Artificial Sequence
  Description of Artificial Sequence: Synthetic oligonucleotide
aaaacccaguaacagaacu

SEQ ID NO: 1135401 - RNA, 19 nt, Artificial Sequence
  Description of Artificial Sequence: Synthetic oligonucleotide
uuuuaguacguucccaagc

SEQ ID NO: 1135402 - RNA, 19 nt, Artificial Sequence
  Description of Artificial Sequence: Synthetic oligonucleotide
acuggauuuaauauucugc

SEQ ID NO: 1135403 - RNA, 19 nt, Artificial Sequence
  Description of Artificial Sequence: Synthetic oligonucleotide
uaauggauggagcaguuca

SEQ ID NO: 1135404 - RNA, 19 nt, Artificial Sequence
  Description of Artificial Sequence: Synthetic oligonucleotide
agaaauacauuagucuccc

SEQ ID NO: 1135405 - RNA, 19 nt, Artificial Sequence
  Description of Artificial Sequence: Synthetic oligonucleotide
uauaaguuuaugcuucacu

SEQ ID NO: 1135406 - RNA, 19 nt, Artificial Sequence
  Description of Artificial Sequence: Synthetic oligonucleotide
uuuaguacguucccaagcu

SEQ ID NO: 1135407 - RNA, 19 nt, Artificial Sequence
  Description of Artificial Sequence: Synthetic oligonucleotide
agauguaacacucaggguu

SEQ ID NO: 1135408 - RNA, 19 nt, Artificial Sequence
  Description of Artificial Sequence: Synthetic oligonucleotide
auagacgcaaucaaacugc

SEQ ID NO: 1135409 - RNA, 19 nt, Artificial Sequence
  Description of Artificial Sequence: Synthetic oligonucleotide
uucauugacgacaaggcaa

SEQ ID NO: 1135410 - RNA, 19 nt, Artificial Sequence
  Description of Artificial Sequence: Synthetic oligonucleotide
gucgauuguaaucaauugg

SEQ ID NO: 1135411 - RNA, 19 nt, Artificial Sequence
  Description of Artificial Sequence: Synthetic oligonucleotide
aaggagguucuucccagcc

SEQ ID NO: 1135412 - RNA, 19 nt, Artificial Sequence
  Description of Artificial Sequence: Synthetic oligonucleotide
uucauauaggcaaauuccu

SEQ ID NO: 1135413 - RNA, 19 nt, Artificial Sequence
  Description of Artificial Sequence: Synthetic oligonucleotide
cauuugucaaccgauagcc

SEQ ID NO: 1135414 - RNA, 19 nt, Artificial Sequence
  Description of Artificial Sequence: Synthetic oligonucleotide
uguucuaugcugaggaaca

SEQ ID NO: 1135415 - RNA, 19 nt, Artificial Sequence
  Description of Artificial Sequence: Synthetic oligonucleotide
cuuaugguaaucacgcuug

SEQ ID NO: 1135416 - RNA, 19 nt, Artificial Sequence
  Description of Artificial Sequence: Synthetic oligonucleotide
ucgagauaaauaaagccaa

SEQ ID NO: 1135417 - RNA, 19 nt, Artificial Sequence
  Description of Artificial Sequence: Synthetic oligonucleotide
uucauugaaaucuccguga

SEQ ID NO: 1135418 - RNA, 19 nt, Artificial Sequence
  Description of Artificial Sequence: Synthetic oligonucleotide
cuaccugucuagaagacag

SEQ ID NO: 1135419 - RNA, 19 nt, Artificial Sequence
  Description of Artificial Sequence: Synthetic oligonucleotide
ucuuuguucauugacgaca

SEQ ID NO: 1135420 - RNA, 19 nt, Artificial Sequence
  Description of Artificial Sequence: Synthetic oligonucleotide
ucugucaaaauaccauuca

SEQ ID NO: 1135421 - RNA, 19 nt, Artificial Sequence
  Description of Artificial Sequence: Synthetic oligonucleotide
caucauaaacagaugcagg

SEQ ID NO: 1135422 - RNA, 19 nt, Artificial Sequence
  Description of Artificial Sequence: Synthetic oligonucleotide
ugauuuaucuccuggguuc

SEQ ID NO: 1135423 - RNA, 19 nt, Artificial Sequence
  Description of Artificial Sequence: Synthetic oligonucleotide
aaucuccgugaaucaaccc

SEQ ID NO: 1135424 - RNA, 19 nt, Artificial Sequence
  Description of Artificial Sequence: Synthetic oligonucleotide
agauugaauucauugaaau

SEQ ID NO: 1135425 - RNA, 19 nt, Artificial Sequence
  Description of Artificial Sequence: Synthetic oligonucleotide
auuaugccugugcuuaugg

SEQ ID NO: 1135426 - RNA, 19 nt, Artificial Sequence
  Description of Artificial Sequence: Synthetic oligonucleotide
uuagucuccccaaaagcug

SEQ ID NO: 1135427 - RNA, 19 nt, Artificial Sequence
  Description of Artificial Sequence: Synthetic oligonucleotide
aaucaacccaugauuuccc

SEQ ID NO: 1135428 - RNA, 19 nt, Artificial Sequence
  Description of Artificial Sequence: Synthetic oligonucleotide
uuaucaucuggaccuaaug

SEQ ID NO: 1135429 - RNA, 19 nt, Artificial Sequence
  Description of Artificial Sequence: Synthetic oligonucleotide
ugcaugucgauuguaauca

SEQ ID NO: 1135430 - RNA, 19 nt, Artificial Sequence
  Description of Artificial Sequence: Synthetic oligonucleotide
ugacguuuuaccuucugcu

SEQ ID NO: 1135431 - RNA, 19 nt, Artificial Sequence
  Description of Artificial Sequence: Synthetic oligonucleotide
ucuaugcugaggaacacuc

SEQ ID NO: 1135432 - RNA, 19 nt, Artificial Sequence
  Description of Artificial Sequence: Synthetic oligonucleotide
cuauuaguuccauagcuuc

SEQ ID NO: 1135433 - RNA, 19 nt, Artificial Sequence
  Description of Artificial Sequence: Synthetic oligonucleotide
cauuagucuccccaaaagc

SEQ ID NO: 1135434 - RNA, 19 nt, Artificial Sequence
  Description of Artificial Sequence: Synthetic oligonucleotide
uguggguaagaaccugugg

SEQ ID NO: 1135435 - RNA, 19 nt, Artificial Sequence
  Description of Artificial Sequence: Synthetic oligonucleotide
uucucucaaaacuuuauua

SEQ ID NO: 1135436 - RNA, 19 nt, Artificial Sequence
  Description of Artificial Sequence: Synthetic oligonucleotide
ugucgauuguaaucaauug

SEQ ID NO: 1135437 - RNA, 19 nt, Artificial Sequence
  Description of Artificial Sequence: Synthetic oligonucleotide
uccaacagacucaacuacc

SEQ ID NO: 1135438 - RNA, 19 nt, Artificial Sequence
  Description of Artificial Sequence: Synthetic oligonucleotide
acguuuuaccuucugcuuc

SEQ ID NO: 1135439 - RNA, 19 nt, Artificial Sequence
  Description of Artificial Sequence: Synthetic oligonucleotide
uagucuccccaaaagcugg

SEQ ID NO: 1135440 - RNA, 19 nt, Artificial Sequence
  Description of Artificial Sequence: Synthetic oligonucleotide
gacucaacuaccugucuag

SEQ ID NO: 1135441 - RNA, 19 nt, Artificial Sequence
  Description of Artificial Sequence: Synthetic oligonucleotide
cucuaaugcauuuaacauc

SEQ ID NO: 1135442 - RNA, 19 nt, Artificial Sequence
  Description of Artificial Sequence: Synthetic oligonucleotide
acgcaaucaaacugcaggg

SEQ ID NO: 1135443 - RNA, 19 nt, Artificial Sequence
  Description of Artificial Sequence: Synthetic oligonucleotide
uccuuuacuugcuuaaagu

SEQ ID NO: 1135444 - RNA, 19 nt, Artificial Sequence
  Description of Artificial Sequence: Synthetic oligonucleotide
aacauuaugccugugcuua

SEQ ID NO: 1135445 - RNA, 19 nt, Artificial Sequence
  Description of Artificial Sequence: Synthetic oligonucleotide
aaugagaagucagauuccu

SEQ ID NO: 1135446 - RNA, 19 nt, Artificial Sequence
  Description of Artificial Sequence: Synthetic oligonucleotide
ucaaccgcggucaggaccc

SEQ ID NO: 1135447 - RNA, 19 nt, Artificial Sequence
  Description of Artificial Sequence: Synthetic oligonucleotide
uuuauccaauaggagauug

SEQ ID NO: 1135448 - RNA, 19 nt, Artificial Sequence
  Description of Artificial Sequence: Synthetic oligonucleotide
gauuguugaacagcugagg

SEQ ID NO: 1135449 - RNA, 19 nt, Artificial Sequence
  Description of Artificial Sequence: Synthetic oligonucleotide
uauuaguuccauagcuuca

SEQ ID NO: 1135450 - RNA, 19 nt, Artificial Sequence
  Description of Artificial Sequence: Synthetic oligonucleotide
aaccgauagcccuggacag

SEQ ID NO: 1135451 - RNA, 19 nt, Artificial Sequence
  Description of Artificial Sequence: Synthetic oligonucleotide
gauuuaauauucugcaugu

SEQ ID NO: 1135452 - RNA, 19 nt, Artificial Sequence
  Description of Artificial Sequence: Synthetic oligonucleotide
ucuccuuuguguaaccacu

SEQ ID NO: 1135453 - RNA, 19 nt, Artificial Sequence
  Description of Artificial Sequence: Synthetic oligonucleotide
aacucucuaaugcauuuaa

SEQ ID NO: 1135454 - RNA, 19 nt, Artificial Sequence
  Description of Artificial Sequence: Synthetic oligonucleotide
aggccuaaacucuuuguuc

SEQ ID NO: 1135455 - RNA, 19 nt, Artificial Sequence
  Description of Artificial Sequence: Synthetic oligonucleotide
aggagauugaauucauuga

SEQ ID NO: 1135456 - RNA, 19 nt, Artificial Sequence
  Description of Artificial Sequence: Synthetic oligonucleotide
aagcuauaaguuuaugcuu

SEQ ID NO: 1135457 - RNA, 19 nt, Artificial Sequence
  Description of Artificial Sequence: Synthetic oligonucleotide
ugacuauuaguuccauagc

SEQ ID NO: 1135458 - RNA, 19 nt, Artificial Sequence
  Description of Artificial Sequence: Synthetic oligonucleotide
aagagaauccucccuccug

SEQ ID NO: 1135459 - RNA, 19 nt, Artificial Sequence
  Description of Artificial Sequence: Synthetic oligonucleotide
cuggauuuaauauucugca

SEQ ID NO: 1135460 - RNA, 19 nt, Artificial Sequence
  Description of Artificial Sequence: Synthetic oligonucleotide
ugaggauacugccuguaga

SEQ ID NO: 1135461 - RNA, 19 nt, Artificial Sequence
  Description of Artificial Sequence: Synthetic oligonucleotide
uaaguuuaugcuucacuaa

SEQ ID NO: 1135462 - RNA, 19 nt, Artificial Sequence
  Description of Artificial Sequence: Synthetic oligonucleotide
aauuccuucauagccgaga

SEQ ID NO: 1135463 - RNA, 19 nt, Artificial Sequence
  Description of Artificial Sequence: Synthetic oligonucleotide
gucgagauaaauaaagcca

SEQ ID NO: 1135464 - RNA, 19 nt, Artificial Sequence
  Description of Artificial Sequence: Synthetic oligonucleotide
ggaaaaucaaucaugguga

SEQ ID NO: 1135465 - RNA, 19 nt, Artificial Sequence
  Description of Artificial Sequence: Synthetic oligonucleotide
uuccaacagacucaacuac

SEQ ID NO: 1135466 - RNA, 19 nt, Artificial Sequence
  Description of Artificial Sequence: Synthetic oligonucleotide
aguuuuaguacguucccaa

SEQ ID NO: 1135467 - RNA, 19 nt, Artificial Sequence
  Description of Artificial Sequence: Synthetic oligonucleotide
uuauccaauaggagauuga

SEQ ID NO: 1135468 - RNA, 19 nt, Artificial Sequence
  Description of Artificial Sequence: Synthetic oligonucleotide
ugcauuuaacaucucuguc

SEQ ID NO: 1135469 - RNA, 19 nt, Artificial Sequence
  Description of Artificial Sequence: Synthetic oligonucleotide
gugcuuaugguaaucacgc

SEQ ID NO: 1135470 - RNA, 19 nt, Artificial Sequence
  Description of Artificial Sequence: Synthetic oligonucleotide
caagcuauaaguuuaugcu

SEQ ID NO: 1135471 - RNA, 19 nt, Artificial Sequence
  Description of Artificial Sequence: Synthetic oligonucleotide
gacuauuaguuccauagcu

SEQ ID NO: 1135472 - RNA, 19 nt, Artificial Sequence
  Description of Artificial Sequence: Synthetic oligonucleotide
uuaccuucugcuucaccag

SEQ ID NO: 1135473 - RNA, 19 nt, Artificial Sequence
  Description of Artificial Sequence: Synthetic oligonucleotide
ugcuuaaagucuccagaug

SEQ ID NO: 1135474 - RNA, 19 nt, Artificial Sequence
  Description of Artificial Sequence: Synthetic oligonucleotide
uucaaagcuagguaaucau

SEQ ID NO: 1135475 - RNA, 19 nt, Artificial Sequence
  Description of Artificial Sequence: Synthetic oligonucleotide
ucaacgucaagagaauccu

SEQ ID NO: 1135476 - RNA, 19 nt, Artificial Sequence
  Description of Artificial Sequence: Synthetic oligonucleotide
auuucaaccgcggucagga

SEQ ID NO: 1135477 - RNA, 19 nt, Artificial Sequence
  Description of Artificial Sequence: Synthetic oligonucleotide
cugacgucaaaacuuggug

SEQ ID NO: 1135478 - RNA, 19 nt, Artificial Sequence
  Description of Artificial Sequence: Synthetic oligonucleotide
uacguucccaagcuauaag

SEQ ID NO: 1135479 - RNA, 19 nt, Artificial Sequence
  Description of Artificial Sequence: Synthetic oligonucleotide
agagaauccucccuccuga

SEQ ID NO: 1135480 - RNA, 19 nt, Artificial Sequence
  Description of Artificial Sequence: Synthetic oligonucleotide
aaucaaucauggugauaug

SEQ ID NO: 1135481 - RNA, 19 nt, Artificial Sequence
  Description of Artificial Sequence: Synthetic oligonucleotide
uaguacguucccaagcuau

SEQ ID NO: 1135482 - RNA, 19 nt, Artificial Sequence
  Description of Artificial Sequence: Synthetic oligonucleotide
aacuaccugucuagaagac

SEQ ID NO: 1135483 - RNA, 19 nt, Artificial Sequence
  Description of Artificial Sequence: Synthetic oligonucleotide
uuguucuaugcugaggaac

SEQ ID NO: 1135484 - RNA, 19 nt, Artificial Sequence
  Description of Artificial Sequence: Synthetic oligonucleotide
ugaaucaacccaugauuuc

SEQ ID NO: 1135485 - RNA, 19 nt, Artificial Sequence
  Description of Artificial Sequence: Synthetic oligonucleotide
uucugacgucaaaacuugg

SEQ ID NO: 1135486 - RNA, 19 nt, Artificial Sequence
  Description of Artificial Sequence: Synthetic oligonucleotide
ucaaccgauagcccuggac

SEQ ID NO: 1135487 - RNA, 19 nt, Artificial Sequence
  Description of Artificial Sequence: Synthetic oligonucleotide
gccaaaacguuucaugaag

SEQ ID NO: 1135488 - RNA, 19 nt, Artificial Sequence
  Description of Artificial Sequence: Synthetic oligonucleotide
cugacguuuuaccuucugc

SEQ ID NO: 1135489 - RNA, 19 nt, Artificial Sequence
  Description of Artificial Sequence: Synthetic oligonucleotide
acguucccaagcuauaagu

SEQ ID NO: 1135490 - RNA, 19 nt, Artificial Sequence
  Description of Artificial Sequence: Synthetic oligonucleotide
gaauccucccuccugaugu

SEQ ID NO: 1135491 - RNA, 19 nt, Artificial Sequence
  Description of Artificial Sequence: Synthetic oligonucleotide
caugauuucccaguuugac

SEQ ID NO: 1135492 - RNA, 19 nt, Artificial Sequence
  Description of Artificial Sequence: Synthetic oligonucleotide
ucauguaucucagcuuggc

SEQ ID NO: 1135493 - RNA, 19 nt, Artificial Sequence
  Description of Artificial Sequence: Synthetic oligonucleotide
ugauauggucaucuuuauc

SEQ ID NO: 1135494 - RNA, 19 nt, Artificial Sequence
  Description of Artificial Sequence: Synthetic oligonucleotide
ucuccgugaaucaacccau

SEQ ID NO: 1135495 - RNA, 19 nt, Artificial Sequence
  Description of Artificial Sequence: Synthetic oligonucleotide
ggggauaaccaucaauaag

SEQ ID NO: 1135496 - RNA, 19 nt, Artificial Sequence
  Description of Artificial Sequence: Synthetic oligonucleotide
caggguucuuguucuaugc

SEQ ID NO: 1135497 - RNA, 19 nt, Artificial Sequence
  Description of Artificial Sequence: Synthetic oligonucleotide
gaucggggcauuuauccuc

SEQ ID NO: 1135498 - RNA, 19 nt, Artificial Sequence
  Description of Artificial Sequence: Synthetic oligonucleotide
cauguaucucagcuuggcc

SEQ ID NO: 1135499 - RNA, 19 nt, Artificial Sequence
  Description of Artificial Sequence: Synthetic oligonucleotide
acugcagggaacaauuuca

SEQ ID NO: 1135500 - RNA, 19 nt, Artificial Sequence
  Description of Artificial Sequence: Synthetic oligonucleotide
cuuuacuugcuuaaagucu

SEQ ID NO: 1135501 - RNA, 19 nt, Artificial Sequence
  Description of Artificial Sequence: Synthetic oligonucleotide
uuuucaaagcuagguaauc

SEQ ID NO: 1135502 - RNA, 19 nt, Artificial Sequence
  Description of Artificial Sequence: Synthetic oligonucleotide
ucgaaaggagguucuuccc

SEQ ID NO: 1135503 - RNA, 19 nt, Artificial Sequence
  Description of Artificial Sequence: Synthetic oligonucleotide
ucagcugacguuuuaccuu

SEQ ID NO: 1135504 - RNA, 19 nt, Artificial Sequence
  Description of Artificial Sequence: Synthetic oligonucleotide
aauaggagauugaauucau

SEQ ID NO: 1135505 - RNA, 19 nt, Artificial Sequence
  Description of Artificial Sequence: Synthetic oligonucleotide
agagaccucaacgucaaga

SEQ ID NO: 1135506 - RNA, 19 nt, Artificial Sequence
  Description of Artificial Sequence: Synthetic oligonucleotide
cugcaugucgauuguaauc

SEQ ID NO: 1135507 - RNA, 19 nt, Artificial Sequence
  Description of Artificial Sequence: Synthetic oligonucleotide
uggcuauagacgcaaucaa

SEQ ID NO: 1135508 - RNA, 19 nt, Artificial Sequence
  Description of Artificial Sequence: Synthetic oligonucleotide
cccaguaacagaacugugg

SEQ ID NO: 1135509 - RNA, 19 nt, Artificial Sequence
  Description of Artificial Sequence: Synthetic oligonucleotide
uagccgagagucgagauaa

SEQ ID NO: 1135510 - RNA, 19 nt, Artificial Sequence
  Description of Artificial Sequence: Synthetic oligonucleotide
caggggauaaccaucaaua

SEQ ID NO: 1135511 - RNA, 19 nt, Artificial Sequence
  Description of Artificial Sequence: Synthetic oligonucleotide
uagacgcaaucaaacugca

SEQ ID NO: 1135512 - RNA, 19 nt, Artificial Sequence
  Description of Artificial Sequence: Synthetic oligonucleotide
augagcggugacaacaguc

SEQ ID NO: 1135513 - RNA, 19 nt, Artificial Sequence
  Description of Artificial Sequence: Synthetic oligonucleotide
caaccgauagcccuggaca

SEQ ID NO: 1135514 - RNA, 19 nt, Artificial Sequence
  Description of Artificial Sequence: Synthetic oligonucleotide
uguaucugacacaggggau

SEQ ID NO: 1135515 - RNA, 19 nt, Artificial Sequence
  Description of Artificial Sequence: Synthetic oligonucleotide
aucaauuggcuuaggaacu

SEQ ID NO: 1135516 - RNA, 19 nt, Artificial Sequence
  Description of Artificial Sequence: Synthetic oligonucleotide
aagucuccagaugagcggu

SEQ ID NO: 1135517 - RNA, 19 nt, Artificial Sequence
  Description of Artificial Sequence: Synthetic oligonucleotide
ggagauugaauucauugaa

SEQ ID NO: 1135518 - RNA, 19 nt, Artificial Sequence
  Description of Artificial Sequence: Synthetic oligonucleotide
uuaugguaaucacgcuugu

SEQ ID NO: 1135519 - RNA, 19 nt, Artificial Sequence
  Description of Artificial Sequence: Synthetic oligonucleotide
uagauguaacacucagggu

SEQ ID NO: 1135520 - RNA, 19 nt, Artificial Sequence
  Description of Artificial Sequence: Synthetic oligonucleotide
caacuaccugucuagaaga

SEQ ID NO: 1135521 - RNA, 19 nt, Artificial Sequence
  Description of Artificial Sequence: Synthetic oligonucleotide
gauuguaaucaauuggcuu

SEQ ID NO: 1135522 - RNA, 19 nt, Artificial Sequence
  Description of Artificial Sequence: Synthetic oligonucleotide
gcuauagacgcaaucaaac

SEQ ID NO: 1135523 - RNA, 19 nt, Artificial Sequence
  Description of Artificial Sequence: Synthetic oligonucleotide
caauaggagauugaauuca

SEQ ID NO: 1135524 - RNA, 19 nt, Artificial Sequence
  Description of Artificial Sequence: Synthetic oligonucleotide
cauauaaugccuucauaua

SEQ ID NO: 1135525 - RNA, 19 nt, Artificial Sequence
  Description of Artificial Sequence: Synthetic oligonucleotide
caugcccauuucaaccgcg

SEQ ID NO: 1135526 - RNA, 19 nt, Artificial Sequence
  Description of Artificial Sequence: Synthetic oligonucleotide
ugaaaucuccgugaaucaa

SEQ ID NO: 1135527 - RNA, 19 nt, Artificial Sequence
  Description of Artificial Sequence: Synthetic oligonucleotide
aucagaucggggcauuuau

SEQ ID NO: 1135528 - RNA, 19 nt, Artificial Sequence
  Description of Artificial Sequence: Synthetic oligonucleotide
ucaugcccauuucaaccgc

SEQ ID NO: 1135529 - RNA, 19 nt, Artificial Sequence
  Description of Artificial Sequence: Synthetic oligonucleotide
aauuggcuuaggaacugga

SEQ ID NO: 1135530 - RNA, 19 nt, Artificial Sequence
  Description of Artificial Sequence: Synthetic oligonucleotide
gggauuguugaacagcuga

SEQ ID NO: 1135531 - RNA, 19 nt, Artificial Sequence
  Description of Artificial Sequence: Synthetic oligonucleotide
cugccuguagauguaacac

SEQ ID NO: 1135532 - RNA, 19 nt, Artificial Sequence
  Description of Artificial Sequence: Synthetic oligonucleotide
ucacuaaagguuggguaga

SEQ ID NO: 1135533 - RNA, 19 nt, Artificial Sequence
  Description of Artificial Sequence: Synthetic oligonucleotide
acucucuaaugcauuuaac

SEQ ID NO: 1135534 - RNA, 19 nt, Artificial Sequence
  Description of Artificial Sequence: Synthetic oligonucleotide
ugcaaccggcgucuggcag

SEQ ID NO: 1135535 - RNA, 19 nt, Artificial Sequence
  Description of Artificial Sequence: Synthetic oligonucleotide
ucagaucggggcauuuauc

SEQ ID NO: 1135536 - RNA, 19 nt, Artificial Sequence
  Description of Artificial Sequence: Synthetic oligonucleotide
uggguagaguucacuuuca

SEQ ID NO: 1135537 - RNA, 19 nt, Artificial Sequence
  Description of Artificial Sequence: Synthetic oligonucleotide
gaccuaauggauggagcag

SEQ ID NO: 1135538 - RNA, 19 nt, Artificial Sequence
  Description of Artificial Sequence: Synthetic oligonucleotide
uggguaagaaccugugguu

SEQ ID NO: 1135539 - RNA, 19 nt, Artificial Sequence
  Description of Artificial Sequence: Synthetic oligonucleotide
aggggauaaccaucaauaa

SEQ ID NO: 1135540 - RNA, 19 nt, Artificial Sequence
  Description of Artificial Sequence: Synthetic oligonucleotide
acugcaugucgauuguaau

SEQ ID NO: 1135541 - RNA, 19 nt, Artificial Sequence
  Description of Artificial Sequence: Synthetic oligonucleotide
cuggcuauagacgcaauca

SEQ ID NO: 1135542 - RNA, 19 nt, Artificial Sequence
  Description of Artificial Sequence: Synthetic oligonucleotide
cugugcuuaugguaaucac

SEQ ID NO: 1135543 - RNA, 19 nt, Artificial Sequence
  Description of Artificial Sequence: Synthetic oligonucleotide
aguucuggagggauuguug

SEQ ID NO: 1135544 - RNA, 19 nt, Artificial Sequence
  Description of Artificial Sequence: Synthetic oligonucleotide
cugaggauacugccuguag

SEQ ID NO: 1135545 - RNA, 19 nt, Artificial Sequence
  Description of Artificial Sequence: Synthetic oligonucleotide
accuaauggauggagcagu

SEQ ID NO: 1135546 - RNA, 19 nt, Artificial Sequence
  Description of Artificial Sequence: Synthetic oligonucleotide
uuaguacguucccaagcua

SEQ ID NO: 1135547 - RNA, 19 nt, Artificial Sequence
  Description of Artificial Sequence: Synthetic oligonucleotide
ugaaaggccuaaacucuuu

SEQ ID NO: 1135548 - RNA, 19 nt, Artificial Sequence
  Description of Artificial Sequence: Synthetic oligonucleotide
cauuuggaugggaaguaga

SEQ ID NO: 1135549 - RNA, 19 nt, Artificial Sequence
  Description of Artificial Sequence: Synthetic oligonucleotide
uucuaugcugaggaacacu

SEQ ID NO: 1135550 - RNA, 19 nt, Artificial Sequence
  Description of Artificial Sequence: Synthetic oligonucleotide
ggagcaguucaucauccgc

SEQ ID NO: 1135551 - RNA, 19 nt, Artificial Sequence
  Description of Artificial Sequence: Synthetic oligonucleotide
cagcugacguuuuaccuuc

SEQ ID NO: 1135552 - RNA, 19 nt, Artificial Sequence
  Description of Artificial Sequence: Synthetic oligonucleotide
ggaccuaauggauggagca

SEQ ID NO: 1135553 - RNA, 19 nt, Artificial Sequence
  Description of Artificial Sequence: Synthetic oligonucleotide
ccuggacaguuuuaguacg

SEQ ID NO: 1135554 - RNA, 19 nt, Artificial Sequence
  Description of Artificial Sequence: Synthetic oligonucleotide
aggcaaucagaucggggca

SEQ ID NO: 1135555 - RNA, 19 nt, Artificial Sequence
  Description of Artificial Sequence: Synthetic oligonucleotide
augucgauuguaaucaauu

SEQ ID NO: 1135556 - RNA, 19 nt, Artificial Sequence
  Description of Artificial Sequence: Synthetic oligonucleotide
acaaggcaaucagaucggg

SEQ ID NO: 1135557 - RNA, 19 nt, Artificial Sequence
  Description of Artificial Sequence: Synthetic oligonucleotide
cagaugagcggugacaaca

SEQ ID NO: 1135558 - RNA, 19 nt, Artificial Sequence
  Description of Artificial Sequence: Synthetic oligonucleotide
agaccucaacgucaagaga

SEQ ID NO: 1135559 - RNA, 19 nt, Artificial Sequence
  Description of Artificial Sequence: Synthetic oligonucleotide
ucucuccgcugcuugguga

SEQ ID NO: 1135560 - RNA, 19 nt, Artificial Sequence
  Description of Artificial Sequence: Synthetic oligonucleotide
ucauagccgagagucgaga

SEQ ID NO: 1135561 - RNA, 19 nt, Artificial Sequence
  Description of Artificial Sequence: Synthetic oligonucleotide
ggugauauggucaucuuua

SEQ ID NO: 1135562 - RNA, 19 nt, Artificial Sequence
  Description of Artificial Sequence: Synthetic oligonucleotide
cuauagacgcaaucaaacu

SEQ ID NO: 1135563 - RNA, 19 nt, Artificial Sequence
  Description of Artificial Sequence: Synthetic oligonucleotide
cauaaccagcauuugucaa

SEQ ID NO: 1135564 - RNA, 19 nt, Artificial Sequence
  Description of Artificial Sequence: Synthetic oligonucleotide
aagcuugauuuaauucagu

SEQ ID NO: 1135565 - RNA, 19 nt, Artificial Sequence
  Description of Artificial Sequence: Synthetic oligonucleotide
ggagggauuguugaacagc

SEQ ID NO: 1135566 - RNA, 19 nt, Artificial Sequence
  Description of Artificial Sequence: Synthetic oligonucleotide
ugcucugauaaaccaucuu

SEQ ID NO: 1135567 - RNA, 19 nt, Artificial Sequence
  Description of Artificial Sequence: Synthetic oligonucleotide
ucccaagcuauaaguuuau

SEQ ID NO: 1135568 - RNA, 19 nt, Artificial Sequence
  Description of Artificial Sequence: Synthetic oligonucleotide
aagguuggguagaguucac

SEQ ID NO: 1135569 - RNA, 19 nt, Artificial Sequence
  Description of Artificial Sequence: Synthetic oligonucleotide
agcggugacaacagucauc

SEQ ID NO: 1135570 - RNA, 19 nt, Artificial Sequence
  Description of Artificial Sequence: Synthetic oligonucleotide
auagccgagagucgagaua

SEQ ID NO: 1135571 - RNA, 19 nt, Artificial Sequence
  Description of Artificial Sequence: Synthetic oligonucleotide
cuucauagccgagagucga

SEQ ID NO: 1135572 - RNA, 19 nt, Artificial Sequence
  Description of Artificial Sequence: Synthetic oligonucleotide
cauuucaaccgcggucagg

SEQ ID NO: 1135573 - RNA, 19 nt, Artificial Sequence
  Description of Artificial Sequence: Synthetic oligonucleotide
ggauacugccuguagaugu

SEQ ID NO: 1135574 - RNA, 19 nt, Artificial Sequence
  Description of Artificial Sequence: Synthetic oligonucleotide
ugcccauuucaaccgcggu

SEQ ID NO: 1135575 - RNA, 19 nt, Artificial Sequence
  Description of Artificial Sequence: Synthetic oligonucleotide
uaaacagaugcagggucuu

SEQ ID NO: 1135576 - RNA, 19 nt, Artificial Sequence
  Description of Artificial Sequence: Synthetic oligonucleotide
cauuaugccugugcuuaug

SEQ ID NO: 1135577 - RNA, 19 nt, Artificial Sequence
  Description of Artificial Sequence: Synthetic oligonucleotide
caacgucaagagaauccuc

SEQ ID NO: 1135578 - RNA, 19 nt, Artificial Sequence
  Description of Artificial Sequence: Synthetic oligonucleotide
cacuaaagguuggguagag

SEQ ID NO: 1135579 - RNA, 19 nt, Artificial Sequence
  Description of Artificial Sequence: Synthetic oligonucleotide
ugccuugucagcugacguu

SEQ ID NO: 1135580 - RNA, 19 nt, Artificial Sequence
  Description of Artificial Sequence: Synthetic oligonucleotide
accggcgucuggcagcuga

SEQ ID NO: 1135581 - RNA, 19 nt, Artificial Sequence
  Description of Artificial Sequence: Synthetic oligonucleotide
cgagagucgagauaaauaa

SEQ ID NO: 1135582 - RNA, 19 nt, Artificial Sequence
  Description of Artificial Sequence: Synthetic oligonucleotide
gagagucgagauaaauaaa

SEQ ID NO: 1135583 - RNA, 19 nt, Artificial Sequence
  Description of Artificial Sequence: Synthetic oligonucleotide
cuaauggauggagcaguuc

SEQ ID NO: 1135584 - RNA, 19 nt, Artificial Sequence
  Description of Artificial Sequence: Synthetic oligonucleotide
guaucugacacaggggaua

SEQ ID NO: 1135585 - RNA, 19 nt, Artificial Sequence
  Description of Artificial Sequence: Synthetic oligonucleotide
uaugguaaucacgcuuguu

SEQ ID NO: 1135586 - RNA, 19 nt, Artificial Sequence
  Description of Artificial Sequence: Synthetic oligonucleotide
acauuaugccugugcuuau

SEQ ID NO: 1135587 - RNA, 19 nt, Artificial Sequence
  Description of Artificial Sequence: Synthetic oligonucleotide
uccgcugcuuggugaacac

SEQ ID NO: 1135588 - RNA, 19 nt, Artificial Sequence
  Description of Artificial Sequence: Synthetic oligonucleotide
agcauuuggaugggaagua

SEQ ID NO: 1135589 - RNA, 19 nt, Artificial Sequence
  Description of Artificial Sequence: Synthetic oligonucleotide
gacguuuuaccuucugcuu

SEQ ID NO: 1135590 - RNA, 19 nt, Artificial Sequence
  Description of Artificial Sequence: Synthetic oligonucleotide
uuucaaccgcggucaggac

SEQ ID NO: 1135591 - RNA, 19 nt, Artificial Sequence
  Description of Artificial Sequence: Synthetic oligonucleotide
ugaucacugcaugucgauu

SEQ ID NO: 1135592 - RNA, 19 nt, Artificial Sequence
  Description of Artificial Sequence: Synthetic oligonucleotide
cuuguucuaugcugaggaa

SEQ ID NO: 1135593 - RNA, 19 nt, Artificial Sequence
  Description of Artificial Sequence: Synthetic oligonucleotide
uggacaguuuuaguacguu

SEQ ID NO: 1135594 - RNA, 19 nt, Artificial Sequence
  Description of Artificial Sequence: Synthetic oligonucleotide
ccaacacccaucugguuuc

SEQ ID NO: 1135595 - RNA, 19 nt, Artificial Sequence
  Description of Artificial Sequence: Synthetic oligonucleotide
agacgcaaucaaacugcag

SEQ ID NO: 1135596 - RNA, 19 nt, Artificial Sequence
  Description of Artificial Sequence: Synthetic oligonucleotide
guucuaugcugaggaacac

SEQ ID NO: 1135597 - RNA, 19 nt, Artificial Sequence
  Description of Artificial Sequence: Synthetic oligonucleotide
ggcagagaccucaacguca

SEQ ID NO: 1135598 - RNA, 19 nt, Artificial Sequence
  Description of Artificial Sequence: Synthetic oligonucleotide
gcaaccggcgucuggcagc

SEQ ID NO: 1135599 - RNA, 19 nt, Artificial Sequence
  Description of Artificial Sequence: Synthetic oligonucleotide
agcuccggcgcggacgcuc

SEQ ID NO: 1135600 - RNA, 19 nt, Artificial Sequence
  Description of Artificial Sequence: Synthetic oligonucleotide
gaugggaaguagaaaccau

SEQ ID NO: 1135601 - RNA, 19 nt, Artificial Sequence
  Description of Artificial Sequence: Synthetic oligonucleotide
guacguucccaagcuauaa

SEQ ID NO: 1135602 - RNA, 19 nt, Artificial Sequence
  Description of Artificial Sequence: Synthetic oligonucleotide
agguuggguagaguucacu

SEQ ID NO: 1135603 - RNA, 19 nt, Artificial Sequence
  Description of Artificial Sequence: Synthetic oligonucleotide
ucccuccugaugucacuaa

SEQ ID NO: 1135604 - RNA, 19 nt, Artificial Sequence
  Description of Artificial Sequence: Synthetic oligonucleotide
auguaacacucaggguucu

SEQ ID NO: 1135605 - RNA, 19 nt, Artificial Sequence
  Description of Artificial Sequence: Synthetic oligonucleotide
aacacccaucugguuucca

SEQ ID NO: 1135606 - RNA, 19 nt, Artificial Sequence
  Description of Artificial Sequence: Synthetic oligonucleotide
acccaguaacagaacugug

SEQ ID NO: 1135607 - RNA, 19 nt, Artificial Sequence
  Description of Artificial Sequence: Synthetic oligonucleotide
aguacguucccaagcuaua

SEQ ID NO: 1135608 - RNA, 19 nt, Artificial Sequence
  Description of Artificial Sequence: Synthetic oligonucleotide
cccaaaagcuggcugcuuc

SEQ ID NO: 1135609 - RNA, 19 nt, Artificial Sequence
  Description of Artificial Sequence: Synthetic oligonucleotide
gcccauuucaaccgcgguc

SEQ ID NO: 1135610 - RNA, 19 nt, Artificial Sequence
  Description of Artificial Sequence: Synthetic oligonucleotide
agggauuguugaacagcug

SEQ ID NO: 1135611 - RNA, 19 nt, Artificial Sequence
  Description of Artificial Sequence: Synthetic oligonucleotide
gcuuaugguaaucacgcuu

SEQ ID NO: 1135612 - RNA, 19 nt, Artificial Sequence
  Description of Artificial Sequence: Synthetic oligonucleotide
uuccccaugcuggcucagc

SEQ ID NO: 1135613 - RNA, 19 nt, Artificial Sequence
  Description of Artificial Sequence: Synthetic oligonucleotide
cccauuucaaccgcgguca

SEQ ID NO: 1135614 - RNA, 19 nt, Artificial Sequence
  Description of Artificial Sequence: Synthetic oligonucleotide
cagcauuugucaaccgaua

SEQ ID NO: 1135615 - RNA, 19 nt, Artificial Sequence
  Description of Artificial Sequence: Synthetic oligonucleotide
caugucgauuguaaucaau

SEQ ID NO: 1135616 - RNA, 19 nt, Artificial Sequence
  Description of Artificial Sequence: Synthetic oligonucleotide
gcugacguuuuaccuucug

SEQ ID NO: 1135617 - RNA, 19 nt, Artificial Sequence
  Description of Artificial Sequence: Synthetic oligonucleotide
accgauagcccuggacagu

SEQ ID NO: 1135618 - RNA, 19 nt, Artificial Sequence
  Description of Artificial Sequence: Synthetic oligonucleotide
ggcuauagacgcaaucaaa

SEQ ID NO: 1135619 - RNA, 19 nt, Artificial Sequence
  Description of Artificial Sequence: Synthetic oligonucleotide
uguaacacucaggguucuu

SEQ ID NO: 1135620 - RNA, 19 nt, Artificial Sequence
  Description of Artificial Sequence: Synthetic oligonucleotide
gggucuucaacaugaugua

SEQ ID NO: 1135621 - RNA, 19 nt, Artificial Sequence
  Description of Artificial Sequence: Synthetic oligonucleotide
ggauaaccaucaauaagcu

SEQ ID NO: 1135622 - RNA, 19 nt, Artificial Sequence
  Description of Artificial Sequence: Synthetic oligonucleotide
gucgccgcggcucauguau

SEQ ID NO: 1135623 - RNA, 19 nt, Artificial Sequence
  Description of Artificial Sequence: Synthetic oligonucleotide
gcggugacaacagucaucu

SEQ ID NO: 1135624 - RNA, 19 nt, Artificial Sequence
  Description of Artificial Sequence: Synthetic oligonucleotide
acgucaaaacuugguguuu

SEQ ID NO: 1135625 - RNA, 19 nt, Artificial Sequence
  Description of Artificial Sequence: Synthetic oligonucleotide
cuggacaguuuuaguacgu

SEQ ID NO: 1135626 - RNA, 19 nt, Artificial Sequence
  Description of Artificial Sequence: Synthetic oligonucleotide
aaccaucaauaagcuccau

SEQ ID NO: 1135627 - RNA, 19 nt, Artificial Sequence
  Description of Artificial Sequence: Synthetic oligonucleotide
caacacccaucugguuucc

SEQ ID NO: 1135628 - RNA, 19 nt, Artificial Sequence
  Description of Artificial Sequence: Synthetic oligonucleotide
ccgagagucgagauaaaua

SEQ ID NO: 1135629 - RNA, 19 nt, Artificial Sequence
  Description of Artificial Sequence: Synthetic oligonucleotide
cauugacgacaaggcaauc

SEQ ID NO: 1135630 - RNA, 19 nt, Artificial Sequence
  Description of Artificial Sequence: Synthetic oligonucleotide
gguaagaaccugugguuuu

SEQ ID NO: 1135631 - RNA, 19 nt, Artificial Sequence
  Description of Artificial Sequence: Synthetic oligonucleotide
ucgccgcggcucauguauc

SEQ ID NO: 1135632 - RNA, 19 nt, Artificial Sequence
  Description of Artificial Sequence: Synthetic oligonucleotide
cuucccagccugugaagcu

SEQ ID NO: 1135633 - RNA, 19 nt, Artificial Sequence
  Description of Artificial Sequence: Synthetic oligonucleotide
cauagccgagagucgagau

SEQ ID NO: 1135634 - RNA, 19 nt, Artificial Sequence
  Description of Artificial Sequence: Synthetic oligonucleotide
cauugaaaucuccgugaau

SEQ ID NO: 1135635 - RNA, 19 nt, Artificial Sequence
  Description of Artificial Sequence: Synthetic oligonucleotide
gagcggugacaacagucau

SEQ ID NO: 1135636 - RNA, 19 nt, Artificial Sequence
  Description of Artificial Sequence: Synthetic oligonucleotide
cgaaaggagguucuuccca

SEQ ID NO: 1135637 - RNA, 19 nt, Artificial Sequence
  Description of Artificial Sequence: Synthetic oligonucleotide
cuggauacaucagcacucu

SEQ ID NO: 1135638 - RNA, 19 nt, Artificial Sequence
  Description of Artificial Sequence: Synthetic oligonucleotide
gagaauccucccuccugau

SEQ ID NO: 1135639 - RNA, 19 nt, Artificial Sequence
  Description of Artificial Sequence: Synthetic oligonucleotide
ucggggcauuuauccucac

SEQ ID NO: 1135640 - RNA, 19 nt, Artificial Sequence
  Description of Artificial Sequence: Synthetic oligonucleotide
guaucucagcuuggccaca

SEQ ID NO: 1135641 - RNA, 19 nt, Artificial Sequence
  Description of Artificial Sequence: Synthetic oligonucleotide
ccagaugagcggugacaac

SEQ ID NO: 1135642 - RNA, 19 nt, Artificial Sequence
  Description of Artificial Sequence: Synthetic oligonucleotide
aucucagcuuggccacauu

SEQ ID NO: 1135643 - RNA, 19 nt, Artificial Sequence
  Description of Artificial Sequence: Synthetic oligonucleotide
gcagagaccucaacgucaa

SEQ ID NO: 1135644 - RNA, 19 nt, Artificial Sequence
  Description of Artificial Sequence: Synthetic oligonucleotide
cugcaaccggcgucuggca

SEQ ID NO: 1135645 - RNA, 19 nt, Artificial Sequence
  Description of Artificial Sequence: Synthetic oligonucleotide
guuugacuauuaguuccau

SEQ ID NO: 1135646 - RNA, 19 nt, Artificial Sequence
  Description of Artificial Sequence: Synthetic oligonucleotide
ccauuucaaccgcggucag

SEQ ID NO: 1135647 - RNA, 19 nt, Artificial Sequence
  Description of Artificial Sequence: Synthetic oligonucleotide
cagacucaacuaccugucu

SEQ ID NO: 1135648 - RNA, 19 nt, Artificial Sequence
  Description of Artificial Sequence: Synthetic oligonucleotide
gcaugucgauuguaaucaa

SEQ ID NO: 1135649 - RNA, 19 nt, Artificial Sequence
  Description of Artificial Sequence: Synthetic oligonucleotide
cagauuucgaaaggagguu

SEQ ID NO: 1135650 - RNA, 19 nt, Artificial Sequence
  Description of Artificial Sequence: Synthetic oligonucleotide
gucaaccgauagcccugga

SEQ ID NO: 1135651 - RNA, 19 nt, Artificial Sequence
  Description of Artificial Sequence: Synthetic oligonucleotide
cccaagcuauaaguuuaug

SEQ ID NO: 1135652 - RNA, 19 nt, Artificial Sequence
  Description of Artificial Sequence: Synthetic oligonucleotide
cgauuguaaucaauuggcu

SEQ ID NO: 1135653 - RNA, 19 nt, Artificial Sequence
  Description of Artificial Sequence: Synthetic oligonucleotide
gcugaggauacugccugua

SEQ ID NO: 1135654 - RNA, 19 nt, Artificial Sequence
  Description of Artificial Sequence: Synthetic oligonucleotide
gccugugcuuaugguaauc

SEQ ID NO: 1135655 - RNA, 19 nt, Artificial Sequence
  Description of Artificial Sequence: Synthetic oligonucleotide
ccgugaaucaacccaugau

SEQ ID NO: 1135656 - RNA, 19 nt, Artificial Sequence
  Description of Artificial Sequence: Synthetic oligonucleotide
ggcgucuggcagcugacuu

SEQ ID NO: 1135657 - RNA, 19 nt, Artificial Sequence
  Description of Artificial Sequence: Synthetic oligonucleotide
cgcaaucaaacugcaggga

SEQ ID NO: 1135658 - RNA, 19 nt, Artificial Sequence
  Description of Artificial Sequence: Synthetic oligonucleotide
gccuugucagcugacguuu

SEQ ID NO: 1135659 - RNA, 19 nt, Artificial Sequence
  Description of Artificial Sequence: Synthetic oligonucleotide
cccuccugaugucacuaaa

SEQ ID NO: 1135660 - RNA, 19 nt, Artificial Sequence
  Description of Artificial Sequence: Synthetic oligonucleotide
caaccggcgucuggcagcu

SEQ ID NO: 1135661 - RNA, 19 nt, Artificial Sequence
  Description of Artificial Sequence: Synthetic oligonucleotide
gccgagagucgagauaaau

SEQ ID NO: 1135662 - RNA, 19 nt, Artificial Sequence
  Description of Artificial Sequence: Synthetic oligonucleotide
agccgagagucgagauaaa

SEQ ID NO: 1135663 - RNA, 19 nt, Artificial Sequence
  Description of Artificial Sequence: Synthetic oligonucleotide
aaccggcgucuggcagcug

SEQ ID NO: 1135664 - RNA, 19 nt, Artificial Sequence
  Description of Artificial Sequence: Synthetic oligonucleotide
ccuaaacucuuuguucauu

SEQ ID NO: 1135665 - RNA, 19 nt, Artificial Sequence
  Description of Artificial Sequence: Synthetic oligonucleotide
cgucaaaacuugguguuuu

SEQ ID NO: 1135666 - RNA, 19 nt, Artificial Sequence
  Description of Artificial Sequence: Synthetic oligonucleotide
ccgauagcccuggacaguu

SEQ ID NO: 1135667 - RNA, 19 nt, Artificial Sequence
  Description of Artificial Sequence: Synthetic oligonucleotide
ccgcugcuuggugaacaca

SEQ ID NO: 1135668 - RNA, 19 nt, Artificial Sequence
  Description of Artificial Sequence: Synthetic oligonucleotide
ccgcggucaggacccugaa

SEQ ID NO: 1135669 - RNA, 19 nt, Artificial Sequence
  Description of Artificial Sequence: Synthetic oligonucleotide
cgccgcggcucauguaucu

SEQ ID NO: 1135670 - RNA, 19 nt, Artificial Sequence
  Description of Artificial Sequence: Synthetic oligonucleotide
caaccgcggucaggacccu

SEQ ID NO: 1135671 - RNA, 19 nt, Artificial Sequence
  Description of Artificial Sequence: Synthetic oligonucleotide
cgauagcccuggacaguuu

SEQ ID NO: 1135672 - RNA, 19 nt, Artificial Sequence
  Description of Artificial Sequence: Synthetic oligonucleotide
cagcuccggcgcggacgcu

SEQ ID NO: 1135673 - RNA, 19 nt, Artificial Sequence
  Description of Artificial Sequence: Synthetic oligonucleotide
cggcgucuggcagcugacu

SEQ ID NO: 1135674 - RNA, 19 nt, Artificial Sequence
  Description of Artificial Sequence: Synthetic oligonucleotide
aagauuucagcauacaucg

SEQ ID NO: 1135675 - RNA, 19 nt, Artificial Sequence
  Description of Artificial Sequence: Synthetic oligonucleotide
ucugauuuaaguaauuuag

SEQ ID NO: 1135676 - RNA, 19 nt, Artificial Sequence
  Description of Artificial Sequence: Synthetic oligonucleotide
aaaagaagugucauuaucc

SEQ ID NO: 1135677 - RNA, 19 nt, Artificial Sequence
  Description of Artificial Sequence: Synthetic oligonucleotide
uuaaucauuaauuagccca

SEQ ID NO: 1135678 - RNA, 19 nt, Artificial Sequence
  Description of Artificial Sequence: Synthetic oligonucleotide
agugauaacaagcaaaguc

SEQ ID NO: 1135679 - RNA, 19 nt, Artificial Sequence
  Description of Artificial Sequence: Synthetic oligonucleotide
acuaccauuucguaaaugg

SEQ ID NO: 1135680 - RNA, 19 nt, Artificial Sequence
  Description of Artificial Sequence: Synthetic oligonucleotide
agaacuagugauaacaagc

SEQ ID NO: 1135681 - RNA, 19 nt, Artificial Sequence
  Description of Artificial Sequence: Synthetic oligonucleotide
aacacguuugcgcaugacc

SEQ ID NO: 1135682 - RNA, 19 nt, Artificial Sequence
  Description of Artificial Sequence: Synthetic oligonucleotide
auaacuguuucuuugggag

SEQ ID NO: 1135683 - RNA, 19 nt, Artificial Sequence
  Description of Artificial Sequence: Synthetic oligonucleotide
uucugaauagcacugccgg

SEQ ID NO: 1135684 - RNA, 19 nt, Artificial Sequence
  Description of Artificial Sequence: Synthetic oligonucleotide
uggauauacauuaggauca

SEQ ID NO: 1135685 - RNA, 19 nt, Artificial Sequence
  Description of Artificial Sequence: Synthetic oligonucleotide
aguguaugaagacuuugcc

SEQ ID NO: 1135686 - RNA, 19 nt, Artificial Sequence
  Description of Artificial Sequence: Synthetic oligonucleotide
aacucacugauccaaauca

SEQ ID NO: 1135687 - RNA, 19 nt, Artificial Sequence
  Description of Artificial Sequence: Synthetic oligonucleotide
auuaaucauuaauuagccc

SEQ ID NO: 1135688 - RNA, 19 nt, Artificial Sequence
  Description of Artificial Sequence: Synthetic oligonucleotide
uaguugagcagcauaaucc

SEQ ID NO: 1135689 - RNA, 19 nt, Artificial Sequence
  Description of Artificial Sequence: Synthetic oligonucleotide
uugacuagggugaugauga

SEQ ID NO: 1135690 - RNA, 19 nt, Artificial Sequence
  Description of Artificial Sequence: Synthetic oligonucleotide
uguuggaguaaugagaucc

SEQ ID NO: 1135691 - RNA, 19 nt, Artificial Sequence
  Description of Artificial Sequence: Synthetic oligonucleotide
aaggugguaacgaauaagg

SEQ ID NO: 1135692 - RNA, 19 nt, Artificial Sequence
  Description of Artificial Sequence: Synthetic oligonucleotide
ugguauuuugacuagggug

SEQ ID NO: 1135693 - RNA, 19 nt, Artificial Sequence
  Description of Artificial Sequence: Synthetic oligonucleotide
gaacaauacauccacuacc

SEQ ID NO: 1135694 - RNA, 19 nt, Artificial Sequence
  Description of Artificial Sequence: Synthetic oligonucleotide
auccuuuugccacaguacc

SEQ ID NO: 1135695 - RNA, 19 nt, Artificial Sequence
  Description of Artificial Sequence: Synthetic oligonucleotide
uuugcauauagccaccaca

SEQ ID NO: 1135696 - RNA, 19 nt, Artificial Sequence
  Description of Artificial Sequence: Synthetic oligonucleotide
aucauuaauuagcccaccc

SEQ ID NO: 1135697 - RNA, 19 nt, Artificial Sequence
  Description of Artificial Sequence: Synthetic oligonucleotide
gugguaacgaauaaggcgg

SEQ ID NO: 1135698 - RNA, 19 nt, Artificial Sequence
  Description of Artificial Sequence: Synthetic oligonucleotide
uauccauauagaacucucg

SEQ ID NO: 1135699 - RNA, 19 nt, Artificial Sequence
  Description of Artificial Sequence: Synthetic oligonucleotide
uuuguacuccacaaaaccu

SEQ ID NO: 1135700 - RNA, 19 nt, Artificial Sequence
  Description of Artificial Sequence: Synthetic oligonucleotide
uauauaccugauaaucacc

SEQ ID NO: 1135701 - RNA, 19 nt, Artificial Sequence
  Description of Artificial Sequence: Synthetic oligonucleotide
auccauauagaacucucgg

SEQ ID NO: 1135702 - RNA, 19 nt, Artificial Sequence
  Description of Artificial Sequence: Synthetic oligonucleotide
gugauaacaagcaaagucc

SEQ ID NO: 1135703 - RNA, 19 nt, Artificial Sequence
  Description of Artificial Sequence: Synthetic oligonucleotide
ggugguaacgaauaaggcg

SEQ ID NO: 1135704 - RNA, 19 nt, Artificial Sequence
  Description of Artificial Sequence: Synthetic oligonucleotide
acuagggugaugaugaagg

SEQ ID NO: 1135705 - RNA, 19 nt, Artificial Sequence
  Description of Artificial Sequence: Synthetic oligonucleotide
ucauuaauuagcccacccc

SEQ ID NO: 1135706 - RNA, 19 nt, Artificial Sequence
  Description of Artificial Sequence: Synthetic oligonucleotide
gaaucguuaagauccacac

SEQ ID NO: 1135707 - RNA, 19 nt, Artificial Sequence
  Description of Artificial Sequence: Synthetic oligonucleotide
ucccuaguaaaauaguaug

SEQ ID NO: 1135708 - RNA, 19 nt, Artificial Sequence
  Description of Artificial Sequence: Synthetic oligonucleotide
caacguggaacaaaggcgg

SEQ ID NO: 1135709 - RNA, 19 nt, Artificial Sequence
  Description of Artificial Sequence: Synthetic oligonucleotide
aagaagugucauuauccag

SEQ ID NO: 1135710 - RNA, 19 nt, Artificial Sequence
  Description of Artificial Sequence: Synthetic oligonucleotide
uggcaugcaagaaugaacu

SEQ ID NO: 1135711 - RNA, 19 nt, Artificial Sequence
  Description of Artificial Sequence: Synthetic oligonucleotide
aagacuuugccagccaacg

SEQ ID NO: 1135712 - RNA, 19 nt, Artificial Sequence
  Description of Artificial Sequence: Synthetic oligonucleotide
uaaucauuaauuagcccac

SEQ ID NO: 1135713 - RNA, 19 nt, Artificial Sequence
  Description of Artificial Sequence: Synthetic oligonucleotide
cuugguauuuugacuaggg

SEQ ID NO: 1135714 - RNA, 19 nt, Artificial Sequence
  Description of Artificial Sequence: Synthetic oligonucleotide
auuacuccacuaaucagcc

SEQ ID NO: 1135715 - RNA, 19 nt, Artificial Sequence
  Description of Artificial Sequence: Synthetic oligonucleotide
ugaaggauccuuuugccac

SEQ ID NO: 1135716 - RNA, 19 nt, Artificial Sequence
  Description of Artificial Sequence: Synthetic oligonucleotide
caaugagcgacuaggaaag

SEQ ID NO: 1135717 - RNA, 19 nt, Artificial Sequence
  Description of Artificial Sequence: Synthetic oligonucleotide
aaucauuaauuagcccacc

SEQ ID NO: 1135718 - RNA, 19 nt, Artificial Sequence
  Description of Artificial Sequence: Synthetic oligonucleotide
gagagcaacacguuugcgc

SEQ ID NO: 1135719 - RNA, 19 nt, Artificial Sequence
  Description of Artificial Sequence: Synthetic oligonucleotide
agcaacgugaaguuugaag

SEQ ID NO: 1135720 - RNA, 19 nt, Artificial Sequence
  Description of Artificial Sequence: Synthetic oligonucleotide
uauacauuaggaucauccu

SEQ ID NO: 1135721 - RNA, 19 nt, Artificial Sequence
  Description of Artificial Sequence: Synthetic oligonucleotide
aacaauacauccacuacca

SEQ ID NO: 1135722 - RNA, 19 nt, Artificial Sequence
  Description of Artificial Sequence: Synthetic oligonucleotide
gaugaaggauccuuuugcc

SEQ ID NO: 1135723 - RNA, 19 nt, Artificial Sequence
  Description of Artificial Sequence: Synthetic oligonucleotide
aaauaguaugucaccacag

SEQ ID NO: 1135724 - RNA, 19 nt, Artificial Sequence
  Description of Artificial Sequence: Synthetic oligonucleotide
ucgugcacaagcauuuucc

SEQ ID NO: 1135725 - RNA, 19 nt, Artificial Sequence
  Description of Artificial Sequence: Synthetic oligonucleotide
uuaggaucauccuugguau

SEQ ID NO: 1135726 - RNA, 19 nt, Artificial Sequence
  Description of Artificial Sequence: Synthetic oligonucleotide
uaucaauggcaaaacacaa

SEQ ID NO: 1135727 - RNA, 19 nt, Artificial Sequence
  Description of Artificial Sequence: Synthetic oligonucleotide
ucccaauauaauuucuuug

SEQ ID NO: 1135728 - RNA, 19 nt, Artificial Sequence
  Description of Artificial Sequence: Synthetic oligonucleotide
uugccuaggaauagcauga

SEQ ID NO: 1135729 - RNA, 19 nt, Artificial Sequence
  Description of Artificial Sequence: Synthetic oligonucleotide
caugcaagaaugaacucac

SEQ ID NO: 1135730 - RNA, 19 nt, Artificial Sequence
  Description of Artificial Sequence: Synthetic oligonucleotide
uccauauagaacucucggc

SEQ ID NO: 1135731 - RNA, 19 nt, Artificial Sequence
  Description of Artificial Sequence: Synthetic oligonucleotide
uaaggcgguucacugaugc

SEQ ID NO: 1135732 - RNA, 19 nt, Artificial Sequence
  Description of Artificial Sequence: Synthetic oligonucleotide
cuugccuaggaauagcaug

SEQ ID NO: 1135733 - RNA, 19 nt, Artificial Sequence
  Description of Artificial Sequence: Synthetic oligonucleotide
acccaguaugaccagaauc

SEQ ID NO: 1135734 - RNA, 19 nt, Artificial Sequence
  Description of Artificial Sequence: Synthetic oligonucleotide
ucggcuuuagcucucuggc

SEQ ID NO: 1135735 - RNA, 19 nt, Artificial Sequence
  Description of Artificial Sequence: Synthetic oligonucleotide
auuuugacuagggugauga

SEQ ID NO: 1135736 - RNA, 19 nt, Artificial Sequence
  Description of Artificial Sequence: Synthetic oligonucleotide
acauuacaaggccagaaga

SEQ ID NO: 1135737 - RNA, 19 nt, Artificial Sequence
  Description of Artificial Sequence: Synthetic oligonucleotide
ucauuacuccacuaaucag

SEQ ID NO: 1135738 - RNA, 19 nt, Artificial Sequence
  Description of Artificial Sequence: Synthetic oligonucleotide
ucgcaaagcauucuccacc

SEQ ID NO: 1135739 - RNA, 19 nt, Artificial Sequence
  Description of Artificial Sequence: Synthetic oligonucleotide
uggcaaauccguuuggcug

SEQ ID NO: 1135740 - RNA, 19 nt, Artificial Sequence
  Description of Artificial Sequence: Synthetic oligonucleotide
uaagauccacacaagcacu

SEQ ID NO: 1135741 - RNA, 19 nt, Artificial Sequence
  Description of Artificial Sequence: Synthetic oligonucleotide
cuauugauagcuguggcug

SEQ ID NO: 1135742 - RNA, 19 nt, Artificial Sequence
  Description of Artificial Sequence: Synthetic oligonucleotide
acugacaaaggugaucagg

SEQ ID NO: 1135743 - RNA, 19 nt, Artificial Sequence
  Description of Artificial Sequence: Synthetic oligonucleotide
ugaauagcacugccgguag

SEQ ID NO: 1135744 - RNA, 19 nt, Artificial Sequence
  Description of Artificial Sequence: Synthetic oligonucleotide
agagcaacacguuugcgca

SEQ ID NO: 1135745 - RNA, 19 nt, Artificial Sequence
  Description of Artificial Sequence: Synthetic oligonucleotide
aaucguuaagauccacaca

SEQ ID NO: 1135746 - RNA, 19 nt, Artificial Sequence
  Description of Artificial Sequence: Synthetic oligonucleotide
uauccaguaagcccaaaau

SEQ ID NO: 1135747 - RNA, 19 nt, Artificial Sequence
  Description of Artificial Sequence: Synthetic oligonucleotide
accuagugaacccaguaug

SEQ ID NO: 1135748 - RNA, 19 nt, Artificial Sequence
  Description of Artificial Sequence: Synthetic oligonucleotide
auauagaacucucggccag

SEQ ID NO: 1135749 - RNA, 19 nt, Artificial Sequence
  Description of Artificial Sequence: Synthetic oligonucleotide
aaauccguuuggcuguuca

SEQ ID NO: 1135750 - RNA, 19 nt, Artificial Sequence
  Description of Artificial Sequence: Synthetic oligonucleotide
cucacugauccaaaucagg

SEQ ID NO: 1135751 - RNA, 19 nt, Artificial Sequence
  Description of Artificial Sequence: Synthetic oligonucleotide
aaaaccuuguucguucuga

SEQ ID NO: 1135752 - RNA, 19 nt, Artificial Sequence
  Description of Artificial Sequence: Synthetic oligonucleotide
agcauaaucccagccaaac

SEQ ID NO: 1135753 - RNA, 19 nt, Artificial Sequence
  Description of Artificial Sequence: Synthetic oligonucleotide
ugcacaagcauuuuccuuu

SEQ ID NO: 1135754 - RNA, 19 nt, Artificial Sequence
  Description of Artificial Sequence: Synthetic oligonucleotide
uuaccggcuucuuucauug

SEQ ID NO: 1135755 - RNA, 19 nt, Artificial Sequence
  Description of Artificial Sequence: Synthetic oligonucleotide
auuuuguacuccacaaaac

SEQ ID NO: 1135756 - RNA, 19 nt, Artificial Sequence
  Description of Artificial Sequence: Synthetic oligonucleotide
uguucguucugaauagcac

SEQ ID NO: 1135757 - RNA, 19 nt, Artificial Sequence
  Description of Artificial Sequence: Synthetic oligonucleotide
aggugugaauggcaaauuc

SEQ ID NO: 1135758 - RNA, 19 nt, Artificial Sequence
  Description of Artificial Sequence: Synthetic oligonucleotide
uagugaacccaguaugacc

SEQ ID NO: 1135759 - RNA, 19 nt, Artificial Sequence
  Description of Artificial Sequence: Synthetic oligonucleotide
aguaagcccaaaauaggac

SEQ ID NO: 1135760 - RNA, 19 nt, Artificial Sequence
  Description of Artificial Sequence: Synthetic oligonucleotide
aagcuguucaggaauaacu

SEQ ID NO: 1135761 - RNA, 19 nt, Artificial Sequence
  Description of Artificial Sequence: Synthetic oligonucleotide
uaucccuaguaaaauagua

SEQ ID NO: 1135762 - RNA, 19 nt, Artificial Sequence
  Description of Artificial Sequence: Synthetic oligonucleotide
uuguucguucugaauagca

SEQ ID NO: 1135763 - RNA, 19 nt, Artificial Sequence
  Description of Artificial Sequence: Synthetic oligonucleotide
agacacgucaccuuuuccu

SEQ ID NO: 1135764 - RNA, 19 nt, Artificial Sequence
  Description of Artificial Sequence: Synthetic oligonucleotide
acaugguaccaccacaugu

SEQ ID NO: 1135765 - RNA, 19 nt, Artificial Sequence
  Description of Artificial Sequence: Synthetic oligonucleotide
aacgugaaguuugaagaug

SEQ ID NO: 1135766 - RNA, 19 nt, Artificial Sequence
  Description of Artificial Sequence: Synthetic oligonucleotide
aaggcgguucacugaugcc

SEQ ID NO: 1135767 - RNA, 19 nt, Artificial Sequence
  Description of Artificial Sequence: Synthetic oligonucleotide
agacacuauugucacugac

SEQ ID NO: 1135768 - RNA, 19 nt, Artificial Sequence
  Description of Artificial Sequence: Synthetic oligonucleotide
agcacucucgauauauacc

SEQ ID NO: 1135769 - RNA, 19 nt, Artificial Sequence
  Description of Artificial Sequence: Synthetic oligonucleotide
ugguuggagaaccuucuug

SEQ ID NO: 1135770 - RNA, 19 nt, Artificial Sequence
  Description of Artificial Sequence: Synthetic oligonucleotide
auccaaaucaggccaacca

SEQ ID NO: 1135771 - RNA, 19 nt, Artificial Sequence
  Description of Artificial Sequence: Synthetic oligonucleotide
guaaaauaguaugucacca

SEQ ID NO: 1135772 - RNA, 19 nt, Artificial Sequence
  Description of Artificial Sequence: Synthetic oligonucleotide
uuauccaguaagcccaaaa

SEQ ID NO: 1135773 - RNA, 19 nt, Artificial Sequence
  Description of Artificial Sequence: Synthetic oligonucleotide
ccauauagaacucucggcc

SEQ ID NO: 1135774 - RNA, 19 nt, Artificial Sequence
  Description of Artificial Sequence: Synthetic oligonucleotide
uccuuuuaucccuaguaaa

SEQ ID NO: 1135775 - RNA, 19 nt, Artificial Sequence
  Description of Artificial Sequence: Synthetic oligonucleotide
guauuuuguaucaauggca

SEQ ID NO: 1135776 - RNA, 19 nt, Artificial Sequence
  Description of Artificial Sequence: Synthetic oligonucleotide
gaacuagugauaacaagca

SEQ ID NO: 1135777 - RNA, 19 nt, Artificial Sequence
  Description of Artificial Sequence: Synthetic oligonucleotide
auauaccugauaaucacca

SEQ ID NO: 1135778 - RNA, 19 nt, Artificial Sequence
  Description of Artificial Sequence: Synthetic oligonucleotide
acugacuguggauauacau

SEQ ID NO: 1135779 - RNA, 19 nt, Artificial Sequence
  Description of Artificial Sequence: Synthetic oligonucleotide
aacuagugauaacaagcaa

SEQ ID NO: 1135780 - RNA, 19 nt, Artificial Sequence
  Description of Artificial Sequence: Synthetic oligonucleotide
ucaugguuggagaaccuuc

SEQ ID NO: 1135781 - RNA, 19 nt, Artificial Sequence
  Description of Artificial Sequence: Synthetic oligonucleotide
uugguauuuugacuagggu

SEQ ID NO: 1135782 - RNA, 19 nt, Artificial Sequence
  Description of Artificial Sequence: Synthetic oligonucleotide
acucucgauauauaccuga

SEQ ID NO: 1135783 - RNA, 19 nt, Artificial Sequence
  Description of Artificial Sequence: Synthetic oligonucleotide
acuagugauaacaagcaaa

SEQ ID NO: 1135784 - RNA, 19 nt, Artificial Sequence
  Description of Artificial Sequence: Synthetic oligonucleotide
ccaacguggaacaaaggcg

SEQ ID NO: 1135785 - RNA, 19 nt, Artificial Sequence
  Description of Artificial Sequence: Synthetic oligonucleotide
gcaacgugaaguuugaaga

SEQ ID NO: 1135786 - RNA, 19 nt, Artificial Sequence
  Description of Artificial Sequence: Synthetic oligonucleotide
cuggcaugcaagaaugaac

SEQ ID NO: 1135787 - RNA, 19 nt, Artificial Sequence
  Description of Artificial Sequence: Synthetic oligonucleotide
ugcaaggcagauuacuauc

SEQ ID NO: 1135788 - RNA, 19 nt, Artificial Sequence
  Description of Artificial Sequence: Synthetic oligonucleotide
auuacaaggccagaagaga

SEQ ID NO: 1135789 - RNA, 19 nt, Artificial Sequence
  Description of Artificial Sequence: Synthetic oligonucleotide
uaaucagccuguguaagac

SEQ ID NO: 1135790 - RNA, 19 nt, Artificial Sequence
  Description of Artificial Sequence: Synthetic oligonucleotide
ugugccaccuagugaaccc

SEQ ID NO: 1135791 - RNA, 19 nt, Artificial Sequence
  Description of Artificial Sequence: Synthetic oligonucleotide
gguauuuugacuaggguga

SEQ ID NO: 1135792 - RNA, 19 nt, Artificial Sequence
  Description of Artificial Sequence: Synthetic oligonucleotide
uuuaggcacuuuucaagac

SEQ ID NO: 1135793 - RNA, 19 nt, Artificial Sequence
  Description of Artificial Sequence: Synthetic oligonucleotide
aacgaauaaggcgguucac

SEQ ID NO: 1135794 - RNA, 19 nt, Artificial Sequence
  Description of Artificial Sequence: Synthetic oligonucleotide
aaugagcgacuaggaaagc

SEQ ID NO: 1135795 - RNA, 19 nt, Artificial Sequence
  Description of Artificial Sequence: Synthetic oligonucleotide
uuagcucucuggcauccgc

SEQ ID NO: 1135796 - RNA, 19 nt, Artificial Sequence
  Description of Artificial Sequence: Synthetic oligonucleotide
augcauucugauuuaagua

SEQ ID NO: 1135797 - RNA, 19 nt, Artificial Sequence
  Description of Artificial Sequence: Synthetic oligonucleotide
guaguugagcagcauaauc

SEQ ID NO: 1135798 - RNA, 19 nt, Artificial Sequence
  Description of Artificial Sequence: Synthetic oligonucleotide
aucgugcacaagcauuuuc

SEQ ID NO: 1135799 - RNA, 19 nt, Artificial Sequence
  Description of Artificial Sequence: Synthetic oligonucleotide
gauggugagagcaacacgu

SEQ ID NO: 1135800 - RNA, 19 nt, Artificial Sequence
  Description of Artificial Sequence: Synthetic oligonucleotide
ucguuaagauccacacaag

SEQ ID NO: 1135801 - RNA, 19 nt, Artificial Sequence
  Description of Artificial Sequence: Synthetic oligonucleotide
uacaucgugcacaagcauu

SEQ ID NO: 1135802 - RNA, 19 nt, Artificial Sequence
  Description of Artificial Sequence: Synthetic oligonucleotide
caaaauaggacaagagcaa

SEQ ID NO: 1135803 - RNA, 19 nt, Artificial Sequence
  Description of Artificial Sequence: Synthetic oligonucleotide
guguaagacacuauuguca

SEQ ID NO: 1135804 - RNA, 19 nt, Artificial Sequence
  Description of Artificial Sequence: Synthetic oligonucleotide
aguaccaaggugguaacga

SEQ ID NO: 1135805 - RNA, 19 nt, Artificial Sequence
  Description of Artificial Sequence: Synthetic oligonucleotide
uuacuaucaaaugcuucug

SEQ ID NO: 1135806 - RNA, 19 nt, Artificial Sequence
  Description of Artificial Sequence: Synthetic oligonucleotide
gaggagggcccgcagauug

SEQ ID NO: 1135807 - RNA, 19 nt, Artificial Sequence
  Description of Artificial Sequence: Synthetic oligonucleotide
uucagcauacaucgugcac

SEQ ID NO: 1135808 - RNA, 19 nt, Artificial Sequence
  Description of Artificial Sequence: Synthetic oligonucleotide
aguaugaccagaaucguua

SEQ ID NO: 1135809 - RNA, 19 nt, Artificial Sequence
  Description of Artificial Sequence: Synthetic oligonucleotide
gauccucguguaaacagcc

SEQ ID NO: 1135810 - RNA, 19 nt, Artificial Sequence
  Description of Artificial Sequence: Synthetic oligonucleotide
gaacucacugauccaaauc

SEQ ID NO: 1135811 - RNA, 19 nt, Artificial Sequence
  Description of Artificial Sequence: Synthetic oligonucleotide
cagaauaggugugaauggc

SEQ ID NO: 1135812 - RNA, 19 nt, Artificial Sequence
  Description of Artificial Sequence: Synthetic oligonucleotide
uccuuuugccacaguacca

SEQ ID NO: 1135813 - RNA, 19 nt, Artificial Sequence
  Description of Artificial Sequence: Synthetic oligonucleotide
uauagaacucucggccagg

SEQ ID NO: 1135814 - RNA, 19 nt, Artificial Sequence
  Description of Artificial Sequence: Synthetic oligonucleotide
cauuucguaaauggacagg

SEQ ID NO: 1135815 - RNA, 19 nt, Artificial Sequence
  Description of Artificial Sequence: Synthetic oligonucleotide
uggucauuacuccacuaau

SEQ ID NO: 1135816 - RNA, 19 nt, Artificial Sequence
  Description of Artificial Sequence: Synthetic oligonucleotide
uccucguguaaacagccuc

SEQ ID NO: 1135817 - RNA, 19 nt, Artificial Sequence
  Description of Artificial Sequence: Synthetic oligonucleotide
acucgcaaagcauucucca

SEQ ID NO: 1135818 - RNA, 19 nt, Artificial Sequence
  Description of Artificial Sequence: Synthetic oligonucleotide
gccaacguggaacaaaggc

SEQ ID NO: 1135819 - RNA, 19 nt, Artificial Sequence
  Description of Artificial Sequence: Synthetic oligonucleotide
ugaaugggcgauccucgug

SEQ ID NO: 1135820 - RNA, 19 nt, Artificial Sequence
  Description of Artificial Sequence: Synthetic oligonucleotide
ugaccagaaucguuaagau

SEQ ID NO: 1135821 - RNA, 19 nt, Artificial Sequence
  Description of Artificial Sequence: Synthetic oligonucleotide
uccacaaaaccuuguucgu

SEQ ID NO: 1135822 - RNA, 19 nt, Artificial Sequence
  Description of Artificial Sequence: Synthetic oligonucleotide
auagcacugccgguagugc

SEQ ID NO: 1135823 - RNA, 19 nt, Artificial Sequence
  Description of Artificial Sequence: Synthetic oligonucleotide
ucccuuaccggcuucuuuc

SEQ ID NO: 1135824 - RNA, 19 nt, Artificial Sequence
  Description of Artificial Sequence: Synthetic oligonucleotide
aaaccuuguucguucugaa

SEQ ID NO: 1135825 - RNA, 19 nt, Artificial Sequence
  Description of Artificial Sequence: Synthetic oligonucleotide
uucaacugacuguggauau

SEQ ID NO: 1135826 - RNA, 19 nt, Artificial Sequence
  Description of Artificial Sequence: Synthetic oligonucleotide
aucauggacagaacuagug

SEQ ID NO: 1135827 - RNA, 19 nt, Artificial Sequence
  Description of Artificial Sequence: Synthetic oligonucleotide
acuuugccagccaacgugg

SEQ ID NO: 1135828 - RNA, 19 nt, Artificial Sequence
  Description of Artificial Sequence: Synthetic oligonucleotide
caguaagcccaaaauagga

SEQ ID NO: 1135829 - RNA, 19 nt, Artificial Sequence
  Description of Artificial Sequence: Synthetic oligonucleotide
uuugggagaccgucuuugc

SEQ ID NO: 1135830 - RNA, 19 nt, Artificial Sequence
  Description of Artificial Sequence: Synthetic oligonucleotide
uggugcuauugauagcugu

SEQ ID NO: 1135831 - RNA, 19 nt, Artificial Sequence
  Description of Artificial Sequence: Synthetic oligonucleotide
uugauggcagccacucgca

SEQ ID NO: 1135832 - RNA, 19 nt, Artificial Sequence
  Description of Artificial Sequence: Synthetic oligonucleotide
aggcagauuacuaucaaau

SEQ ID NO: 1135833 - RNA, 19 nt, Artificial Sequence
  Description of Artificial Sequence: Synthetic oligonucleotide
aggcagacgaugaucagag

SEQ ID NO: 1135834 - RNA, 19 nt, Artificial Sequence
  Description of Artificial Sequence: Synthetic oligonucleotide
acacguuugcgcaugacca

SEQ ID NO: 1135835 - RNA, 19 nt, Artificial Sequence
  Description of Artificial Sequence: Synthetic oligonucleotide
uccacuaaucagccugugu

SEQ ID NO: 1135836 - RNA, 19 nt, Artificial Sequence
  Description of Artificial Sequence: Synthetic oligonucleotide
aagguccagaaauuuugua

SEQ ID NO: 1135837 - RNA, 19 nt, Artificial Sequence
  Description of Artificial Sequence: Synthetic oligonucleotide
uuucguaaauggacaggaa

SEQ ID NO: 1135838 - RNA, 19 nt, Artificial Sequence
  Description of Artificial Sequence: Synthetic oligonucleotide
gacacgucaccuuuuccuc

SEQ ID NO: 1135839 - RNA, 19 nt, Artificial Sequence
  Description of Artificial Sequence: Synthetic oligonucleotide
gaaguuugaagauguggcu

SEQ ID NO: 1135840 - RNA, 19 nt, Artificial Sequence
  Description of Artificial Sequence: Synthetic oligonucleotide
ucugaauagcacugccggu

SEQ ID NO: 1135841 - RNA, 19 nt, Artificial Sequence
  Description of Artificial Sequence: Synthetic oligonucleotide
ccaguaagcccaaaauagg

SEQ ID NO: 1135842 - RNA, 19 nt, Artificial Sequence
  Description of Artificial Sequence: Synthetic oligonucleotide
acaaaaccuuguucguucu

SEQ ID NO: 1135843 - RNA, 19 nt, Artificial Sequence
  Description of Artificial Sequence: Synthetic oligonucleotide
aaucuugcugguaguugag

SEQ ID NO: 1135844 - RNA, 19 nt, Artificial Sequence
  Description of Artificial Sequence: Synthetic oligonucleotide
uccuuucaacugacugugg

SEQ ID NO: 1135845 - RNA, 19 nt, Artificial Sequence
  Description of Artificial Sequence: Synthetic oligonucleotide
ggaguaaugagauccuguc

SEQ ID NO: 1135846 - RNA, 19 nt, Artificial Sequence
  Description of Artificial Sequence: Synthetic oligonucleotide
acgguggcaaauccguuug

SEQ ID NO: 1135847 - RNA, 19 nt, Artificial Sequence
  Description of Artificial Sequence: Synthetic oligonucleotide
gugucauuauccaguaagc

SEQ ID NO: 1135848 - RNA, 19 nt, Artificial Sequence
  Description of Artificial Sequence: Synthetic oligonucleotide
aaucauggacagaacuagu

SEQ ID NO: 1135849 - RNA, 19 nt, Artificial Sequence
  Description of Artificial Sequence: Synthetic oligonucleotide
ugcauauagccaccacagu

SEQ ID NO: 1135850 - RNA, 19 nt, Artificial Sequence
  Description of Artificial Sequence: Synthetic oligonucleotide
auagaacucucggccaggg

SEQ ID NO: 1135851 - RNA, 19 nt, Artificial Sequence
  Description of Artificial Sequence: Synthetic oligonucleotide
guaugcauucugauuuaag

SEQ ID NO: 1135852 - RNA, 19 nt, Artificial Sequence
  Description of Artificial Sequence: Synthetic oligonucleotide
agcaaugagcgacuaggaa

SEQ ID NO: 1135853 - RNA, 19 nt, Artificial Sequence
  Description of Artificial Sequence: Synthetic oligonucleotide
gaagugucauuauccagua

SEQ ID NO: 1135854 - RNA, 19 nt, Artificial Sequence
  Description of Artificial Sequence: Synthetic oligonucleotide
gguagugccaaggaaaaga

SEQ ID NO: 1135855 - RNA, 19 nt, Artificial Sequence
  Description of Artificial Sequence: Synthetic oligonucleotide
cuuuagcucucuggcaucc

SEQ ID NO: 1135856 - RNA, 19 nt, Artificial Sequence
  Description of Artificial Sequence: Synthetic oligonucleotide
aaccuuguucguucugaau

SEQ ID NO: 1135857 - RNA, 19 nt, Artificial Sequence
  Description of Artificial Sequence: Synthetic oligonucleotide
accgucuuugcuuugcaua

SEQ ID NO: 1135858 - RNA, 19 nt, Artificial Sequence
  Description of Artificial Sequence: Synthetic oligonucleotide
agaauaggugugaauggca

SEQ ID NO: 1135859 - RNA, 19 nt, Artificial Sequence
  Description of Artificial Sequence: Synthetic oligonucleotide
ggugagagcaacacguuug

SEQ ID NO: 1135860 - RNA, 19 nt, Artificial Sequence
  Description of Artificial Sequence: Synthetic oligonucleotide
acgaauaaggcgguucacu

SEQ ID NO: 1135861 - RNA, 19 nt, Artificial Sequence
  Description of Artificial Sequence: Synthetic oligonucleotide
gaaggauccuuuugccaca

SEQ ID NO: 1135862 - RNA, 19 nt, Artificial Sequence
  Description of Artificial Sequence: Synthetic oligonucleotide
uuggaguaaugagauccug

SEQ ID NO: 1135863 - RNA, 19 nt, Artificial Sequence
  Description of Artificial Sequence: Synthetic oligonucleotide
cucgcaaagcauucuccac

SEQ ID NO: 1135864 - RNA, 19 nt, Artificial Sequence
  Description of Artificial Sequence: Synthetic oligonucleotide
cuagugaacccaguaugac

SEQ ID NO: 1135865 - RNA, 19 nt, Artificial Sequence
  Description of Artificial Sequence: Synthetic oligonucleotide
gaaugggcgauccucgugu

SEQ ID NO: 1135866 - RNA, 19 nt, Artificial Sequence
  Description of Artificial Sequence: Synthetic oligonucleotide
auuuuguaucaauggcaaa

SEQ ID NO: 1135867 - RNA, 19 nt, Artificial Sequence
  Description of Artificial Sequence: Synthetic oligonucleotide
uuugccagccaacguggaa

SEQ ID NO: 1135868 - RNA, 19 nt, Artificial Sequence
  Description of Artificial Sequence: Synthetic oligonucleotide
agcugaaauggcauagaug

SEQ ID NO: 1135869 - RNA, 19 nt, Artificial Sequence
  Description of Artificial Sequence: Synthetic oligonucleotide
ugcaaagguccagaaauuu

SEQ ID NO: 1135870 - RNA, 19 nt, Artificial Sequence
  Description of Artificial Sequence: Synthetic oligonucleotide
ugguaacgaauaaggcggu

SEQ ID NO: 1135871 - RNA, 19 nt, Artificial Sequence
  Description of Artificial Sequence: Synthetic oligonucleotide
ugccaccuagugaacccag

SEQ ID NO: 1135872 - RNA, 19 nt, Artificial Sequence
  Description of Artificial Sequence: Synthetic oligonucleotide
ugcaagauuucagcauaca

SEQ ID NO: 1135873 - RNA, 19 nt, Artificial Sequence
  Description of Artificial Sequence: Synthetic oligonucleotide
uauuuugacuagggugaug

SEQ ID NO: 1135874 - RNA, 19 nt, Artificial Sequence
  Description of Artificial Sequence: Synthetic oligonucleotide
aucccuaguaaaauaguau

SEQ ID NO: 1135875 - RNA, 19 nt, Artificial Sequence
  Description of Artificial Sequence: Synthetic oligonucleotide
uuuagcucucuggcauccg

SEQ ID NO: 1135876 - RNA, 19 nt, Artificial Sequence
  Description of Artificial Sequence: Synthetic oligonucleotide
ccuguguaagacacuauug

SEQ ID NO: 1135877 - RNA, 19 nt, Artificial Sequence
  Description of Artificial Sequence: Synthetic oligonucleotide
ugcuggucauuacuccacu

SEQ ID NO: 1135878 - RNA, 19 nt, Artificial Sequence
  Description of Artificial Sequence: Synthetic oligonucleotide
ccuuguucguucugaauag

SEQ ID NO: 1135879 - RNA, 19 nt, Artificial Sequence
  Description of Artificial Sequence: Synthetic oligonucleotide
auccguuuggcuguucaug

SEQ ID NO: 1135880 - RNA, 19 nt, Artificial Sequence
  Description of Artificial Sequence: Synthetic oligonucleotide
cacguuugcgcaugaccag

SEQ ID NO: 1135881 - RNA, 19 nt, Artificial Sequence
  Description of Artificial Sequence: Synthetic oligonucleotide
uguaugcauucugauuuaa

SEQ ID NO: 1135882 - RNA, 19 nt, Artificial Sequence
  Description of Artificial Sequence: Synthetic oligonucleotide
uggugagagcaacacguuu

SEQ ID NO: 1135883 - RNA, 19 nt, Artificial Sequence
  Description of Artificial Sequence: Synthetic oligonucleotide
agcgacuaggaaagcaaag

SEQ ID NO: 1135884 - RNA, 19 nt, Artificial Sequence
  Description of Artificial Sequence: Synthetic oligonucleotide
uagugauaacaagcaaagu

SEQ ID NO: 1135885 - RNA, 19 nt, Artificial Sequence
  Description of Artificial Sequence: Synthetic oligonucleotide
cuuguucguucugaauagc

SEQ ID NO: 1135886 - RNA, 19 nt, Artificial Sequence
  Description of Artificial Sequence: Synthetic oligonucleotide
auacaucgugcacaagcau

SEQ ID NO: 1135887 - RNA, 19 nt, Artificial Sequence
  Description of Artificial Sequence: Synthetic oligonucleotide
aacccaguaugaccagaau

SEQ ID NO: 1135888 - RNA, 19 nt, Artificial Sequence
  Description of Artificial Sequence: Synthetic oligonucleotide
cguuaagauccacacaagc

SEQ ID NO: 1135889 - RNA, 19 nt, Artificial Sequence
  Description of Artificial Sequence: Synthetic oligonucleotide
ucguucugaauagcacugc

SEQ ID NO: 1135890 - RNA, 19 nt, Artificial Sequence
  Description of Artificial Sequence: Synthetic oligonucleotide
acacgucaccuuuuccuca

SEQ ID NO: 1135891 - RNA, 19 nt, Artificial Sequence
  Description of Artificial Sequence: Synthetic oligonucleotide
gagaccgucuuugcuuugc

SEQ ID NO: 1135892 - RNA, 19 nt, Artificial Sequence
  Description of Artificial Sequence: Synthetic oligonucleotide
ggugcuauugauagcugug

SEQ ID NO: 1135893 - RNA, 19 nt, Artificial Sequence
  Description of Artificial Sequence: Synthetic oligonucleotide
ucguguaaacagccucuuc

SEQ ID NO: 1135894 - RNA, 19 nt, Artificial Sequence
  Description of Artificial Sequence: Synthetic oligonucleotide
ccuaggaauagcaugaagu

SEQ ID NO: 1135895 - RNA, 19 nt, Artificial Sequence
  Description of Artificial Sequence: Synthetic oligonucleotide
agcaacacguuugcgcaug

SEQ ID NO: 1135896 - RNA, 19 nt, Artificial Sequence
  Description of Artificial Sequence: Synthetic oligonucleotide
caguggcaaguguaugaag

SEQ ID NO: 1135897 - RNA, 19 nt, Artificial Sequence
  Description of Artificial Sequence: Synthetic oligonucleotide
ugggcgauccucguguaaa

SEQ ID NO: 1135898 - RNA, 19 nt, Artificial Sequence
  Description of Artificial Sequence: Synthetic oligonucleotide
gauauacauuaggaucauc

SEQ ID NO: 1135899 - RNA, 19 nt, Artificial Sequence
  Description of Artificial Sequence: Synthetic oligonucleotide
gcaugcaagaaugaacuca

SEQ ID NO: 1135900 - RNA, 19 nt, Artificial Sequence
  Description of Artificial Sequence: Synthetic oligonucleotide
cgcaugaccagcauuauca

SEQ ID NO: 1135901 - RNA, 19 nt, Artificial Sequence
  Description of Artificial Sequence: Synthetic oligonucleotide
cacuaaucagccuguguaa

SEQ ID NO: 1135902 - RNA, 19 nt, Artificial Sequence
  Description of Artificial Sequence: Synthetic oligonucleotide
accaaggugguaacgaaua

SEQ ID NO: 1135903 - RNA, 19 nt, Artificial Sequence
  Description of Artificial Sequence: Synthetic oligonucleotide
gcacucucgauauauaccu

SEQ ID NO: 1135904 - RNA, 19 nt, Artificial Sequence
  Description of Artificial Sequence: Synthetic oligonucleotide
uuuugacuagggugaugau

SEQ ID NO: 1135905 - RNA, 19 nt, Artificial Sequence
  Description of Artificial Sequence: Synthetic oligonucleotide
cacucucgauauauaccug

SEQ ID NO: 1135906 - RNA, 19 nt, Artificial Sequence
  Description of Artificial Sequence: Synthetic oligonucleotide
uucaugguuggagaaccuu

SEQ ID NO: 1135907 - RNA, 19 nt, Artificial Sequence
  Description of Artificial Sequence: Synthetic oligonucleotide
aaugggcgauccucgugua

SEQ ID NO: 1135908 - RNA, 19 nt, Artificial Sequence
  Description of Artificial Sequence: Synthetic oligonucleotide
aggaucauccuugguauuu

SEQ ID NO: 1135909 - RNA, 19 nt, Artificial Sequence
  Description of Artificial Sequence: Synthetic oligonucleotide
ugccgguagugccaaggaa

SEQ ID NO: 1135910 - RNA, 19 nt, Artificial Sequence
  Description of Artificial Sequence: Synthetic oligonucleotide
acaucgugcacaagcauuu

SEQ ID NO: 1135911 - RNA, 19 nt, Artificial Sequence
  Description of Artificial Sequence: Synthetic oligonucleotide
guaugaccagaaucguuaa

SEQ ID NO: 1135912 - RNA, 19 nt, Artificial Sequence
  Description of Artificial Sequence: Synthetic oligonucleotide
cugugccaccuagugaacc

SEQ ID NO: 1135913 - RNA, 19 nt, Artificial Sequence
  Description of Artificial Sequence: Synthetic oligonucleotide
ucuuugggagaccgucuuu

SEQ ID NO: 1135914 - RNA, 19 nt, Artificial Sequence
  Description of Artificial Sequence: Synthetic oligonucleotide
gaacccaguaugaccagaa

SEQ ID NO: 1135915 - RNA, 19 nt, Artificial Sequence
  Description of Artificial Sequence: Synthetic oligonucleotide
gcguccuuugcugaggugc

SEQ ID NO: 1135916 - RNA, 19 nt, Artificial Sequence
  Description of Artificial Sequence: Synthetic oligonucleotide
guaccaaggugguaacgaa

SEQ ID NO: 1135917 - RNA, 19 nt, Artificial Sequence
  Description of Artificial Sequence: Synthetic oligonucleotide
cugaugccagaauaggugu

SEQ ID NO: 1135918 - RNA, 19 nt, Artificial Sequence
  Description of Artificial Sequence: Synthetic oligonucleotide
ugauggcagccacucgcaa

SEQ ID NO: 1135919 - RNA, 19 nt, Artificial Sequence
  Description of Artificial Sequence: Synthetic oligonucleotide
cuagggugaugaugaagga

SEQ ID NO: 1135920 - RNA, 19 nt, Artificial Sequence
  Description of Artificial Sequence: Synthetic oligonucleotide
ucucccucgcagacgcaac

SEQ ID NO: 1135921 - RNA, 19 nt, Artificial Sequence
  Description of Artificial Sequence: Synthetic oligonucleotide
ggucauuacuccacuaauc

SEQ ID NO: 1135922 - RNA, 19 nt, Artificial Sequence
  Description of Artificial Sequence: Synthetic oligonucleotide
aacugacuguggauauaca

SEQ ID NO: 1135923 - RNA, 19 nt, Artificial Sequence
  Description of Artificial Sequence: Synthetic oligonucleotide
ucccucgcagacgcaacag

SEQ ID NO: 1135924 - RNA, 19 nt, Artificial Sequence
  Description of Artificial Sequence: Synthetic oligonucleotide
aacguggaacaaaggcgga

SEQ ID NO: 1135925 - RNA, 19 nt, Artificial Sequence
  Description of Artificial Sequence: Synthetic oligonucleotide
gaacucucggccagggcuc

SEQ ID NO: 1135926 - RNA, 19 nt, Artificial Sequence
  Description of Artificial Sequence: Synthetic oligonucleotide
gguggcaaauccguuuggc

SEQ ID NO: 1135927 - RNA, 19 nt, Artificial Sequence
  Description of Artificial Sequence: Synthetic oligonucleotide
acaaaggcggauggugaga

SEQ ID NO: 1135928 - RNA, 19 nt, Artificial Sequence
  Description of Artificial Sequence: Synthetic oligonucleotide
caugguuggagaaccuucu

SEQ ID NO: 1135929 - RNA, 19 nt, Artificial Sequence
  Description of Artificial Sequence: Synthetic oligonucleotide
caaaggcguccuuugcuga

SEQ ID NO: 1135930 - RNA, 19 nt, Artificial Sequence
  Description of Artificial Sequence: Synthetic oligonucleotide
uccuacuguuuuccacaaa

SEQ ID NO: 1135931 - RNA, 19 nt, Artificial Sequence
  Description of Artificial Sequence: Synthetic oligonucleotide
ucaacugacuguggauaua

SEQ ID NO: 1135932 - RNA, 19 nt, Artificial Sequence
  Description of Artificial Sequence: Synthetic oligonucleotide
agcacccauacuguguaau

SEQ ID NO: 1135933 - RNA, 19 nt, Artificial Sequence
  Description of Artificial Sequence: Synthetic oligonucleotide
gcagacuaucagcaccuug

SEQ ID NO: 1135934 - RNA, 19 nt, Artificial Sequence
  Description of Artificial Sequence: Synthetic oligonucleotide
gccuaggaauagcaugaag

SEQ ID NO: 1135935 - RNA, 19 nt, Artificial Sequence
  Description of Artificial Sequence: Synthetic oligonucleotide
ccuagugaacccaguauga

SEQ ID NO: 1135936 - RNA, 19 nt, Artificial Sequence
  Description of Artificial Sequence: Synthetic oligonucleotide
cagcgccucccuuaccggc

SEQ ID NO: 1135937 - RNA, 19 nt, Artificial Sequence
  Description of Artificial Sequence: Synthetic oligonucleotide
ggcuguucaugguuggaga

SEQ ID NO: 1135938 - RNA, 19 nt, Artificial Sequence
  Description of Artificial Sequence: Synthetic oligonucleotide
cacuaccauuucguaaaug

SEQ ID NO: 1135939 - RNA, 19 nt, Artificial Sequence
  Description of Artificial Sequence: Synthetic oligonucleotide
gcgacuaggaaagcaaaga

SEQ ID NO: 1135940 - RNA, 19 nt, Artificial Sequence
  Description of Artificial Sequence: Synthetic oligonucleotide
gucccaauauaauuucuuu

SEQ ID NO: 1135941 - RNA, 19 nt, Artificial Sequence
  Description of Artificial Sequence: Synthetic oligonucleotide
guggcaaauccguuuggcu

SEQ ID NO: 1135942 - RNA, 19 nt, Artificial Sequence
  Description of Artificial Sequence: Synthetic oligonucleotide
aggcguccuuugcugaggu

SEQ ID NO: 1135943 - RNA, 19 nt, Artificial Sequence
  Description of Artificial Sequence: Synthetic oligonucleotide
ccacuaaucagccugugua

SEQ ID NO: 1135944 - RNA, 19 nt, Artificial Sequence
  Description of Artificial Sequence: Synthetic oligonucleotide
gcuauugauagcuguggcu

SEQ ID NO: 1135945 - RNA, 19 nt, Artificial Sequence
  Description of Artificial Sequence: Synthetic oligonucleotide
guaccaccacauguacugc

SEQ ID NO: 1135946 - RNA, 19 nt, Artificial Sequence
  Description of Artificial Sequence: Synthetic oligonucleotide
uaccggcuucuuucauugc

SEQ ID NO: 1135947 - RNA, 19 nt, Artificial Sequence
  Description of Artificial Sequence: Synthetic oligonucleotide
augguuggagaaccuucuu

SEQ ID NO: 1135948 - RNA, 19 nt, Artificial Sequence
  Description of Artificial Sequence: Synthetic oligonucleotide
guacugcaaagguccagaa

SEQ ID NO: 1135949 - RNA, 19 nt, Artificial Sequence
  Description of Artificial Sequence: Synthetic oligonucleotide
cagcauacaucgugcacaa

SEQ ID NO: 1135950 - RNA, 19 nt, Artificial Sequence
  Description of Artificial Sequence: Synthetic oligonucleotide
cgauccucguguaaacagc

SEQ ID NO: 1135951 - RNA, 19 nt, Artificial Sequence
  Description of Artificial Sequence: Synthetic oligonucleotide
cagaaucguuaagauccac

SEQ ID NO: 1135952 - RNA, 19 nt, Artificial Sequence
  Description of Artificial Sequence: Synthetic oligonucleotide
ggaauagcaugaagucccc

SEQ ID NO: 1135953 - RNA, 19 nt, Artificial Sequence
  Description of Artificial Sequence: Synthetic oligonucleotide
gagcgacuaggaaagcaaa

SEQ ID NO: 1135954 - RNA, 19 nt, Artificial Sequence
  Description of Artificial Sequence: Synthetic oligonucleotide
agccaacguggaacaaagg

SEQ ID NO: 1135955 - RNA, 19 nt, Artificial Sequence
  Description of Artificial Sequence: Synthetic oligonucleotide
ggcagacgaugaucagagg

SEQ ID NO: 1135956 - RNA, 19 nt, Artificial Sequence
  Description of Artificial Sequence: Synthetic oligonucleotide
ugccuaggaauagcaugaa

SEQ ID NO: 1135957 - RNA, 19 nt, Artificial Sequence
  Description of Artificial Sequence: Synthetic oligonucleotide
guuggaguaaugagauccu

SEQ ID NO: 1135958 - RNA, 19 nt, Artificial Sequence
  Description of Artificial Sequence: Synthetic oligonucleotide
ggcaugcaagaaugaacuc

SEQ ID NO: 1135959 - RNA, 19 nt, Artificial Sequence
  Description of Artificial Sequence: Synthetic oligonucleotide
cuuugccagccaacgugga

SEQ ID NO: 1135960 - RNA, 19 nt, Artificial Sequence
  Description of Artificial Sequence: Synthetic oligonucleotide
acguggaacaaaggcggau

SEQ ID NO: 1135961 - RNA, 19 nt, Artificial Sequence
  Description of Artificial Sequence: Synthetic oligonucleotide
auccgcagcgccucccuua

SEQ ID NO: 1135962 - RNA, 19 nt, Artificial Sequence
  Description of Artificial Sequence: Synthetic oligonucleotide
auaaggcgguucacugaug

SEQ ID NO: 1135963 - RNA, 19 nt, Artificial Sequence
  Description of Artificial Sequence: Synthetic oligonucleotide
uggcugcaaggcagauuac

SEQ ID NO: 1135964 - RNA, 19 nt, Artificial Sequence
  Description of Artificial Sequence: Synthetic oligonucleotide
cugcaaggcagauuacuau

SEQ ID NO: 1135965 - RNA, 19 nt, Artificial Sequence
  Description of Artificial Sequence: Synthetic oligonucleotide
ccagaaugacaaaggcguc

SEQ ID NO: 1135966 - RNA, 19 nt, Artificial Sequence
  Description of Artificial Sequence: Synthetic oligonucleotide
gacuagcaguggcaagugu

SEQ ID NO: 1135967 - RNA, 19 nt, Artificial Sequence
  Description of Artificial Sequence: Synthetic oligonucleotide
augggcgauccucguguaa

SEQ ID NO: 1135968 - RNA, 19 nt, Artificial Sequence
  Description of Artificial Sequence: Synthetic oligonucleotide
cccuaguaaaauaguaugu

SEQ ID NO: 1135969 - RNA, 19 nt, Artificial Sequence
  Description of Artificial Sequence: Synthetic oligonucleotide
gccgguagugccaaggaaa

SEQ ID NO: 1135970 - RNA, 19 nt, Artificial Sequence
  Description of Artificial Sequence: Synthetic oligonucleotide
ugcgcaugaccagcauuau

SEQ ID NO: 1135971 - RNA, 19 nt, Artificial Sequence
  Description of Artificial Sequence: Synthetic oligonucleotide
cucucgauauauaccugau

SEQ ID NO: 1135972 - RNA, 19 nt, Artificial Sequence
  Description of Artificial Sequence: Synthetic oligonucleotide
cagcuaucugaagcuguuc

SEQ ID NO: 1135973 - RNA, 19 nt, Artificial Sequence
  Description of Artificial Sequence: Synthetic oligonucleotide
ugucucccucgcagacgca

SEQ ID NO: 1135974 - RNA, 19 nt, Artificial Sequence
  Description of Artificial Sequence: Synthetic oligonucleotide
caacacguuugcgcaugac

SEQ ID NO: 1135975 - RNA, 19 nt, Artificial Sequence
  Description of Artificial Sequence: Synthetic oligonucleotide
cucccucgcagacgcaaca

SEQ ID NO: 1135976 - RNA, 19 nt, Artificial Sequence
  Description of Artificial Sequence: Synthetic oligonucleotide
caucagcacuuuauccaua

SEQ ID NO: 1135977 - RNA, 19 nt, Artificial Sequence
  Description of Artificial Sequence: Synthetic oligonucleotide
cagcaucggcuuuagcucu

SEQ ID NO: 1135978 - RNA, 19 nt, Artificial Sequence
  Description of Artificial Sequence: Synthetic oligonucleotide
caccuagugaacccaguau

SEQ ID NO: 1135979 - RNA, 19 nt, Artificial Sequence
  Description of Artificial Sequence: Synthetic oligonucleotide
agugaacacuguagcugaa

SEQ ID NO: 1135980 - RNA, 19 nt, Artificial Sequence
  Description of Artificial Sequence: Synthetic oligonucleotide
cccgcagauugucuucagc

SEQ ID NO: 1135981 - RNA, 19 nt, Artificial Sequence
  Description of Artificial Sequence: Synthetic oligonucleotide
agcgccucccuuaccggcu

SEQ ID NO: 1135982 - RNA, 19 nt, Artificial Sequence
  Description of Artificial Sequence: Synthetic oligonucleotide
ggcggauggugagagcaac

SEQ ID NO: 1135983 - RNA, 19 nt, Artificial Sequence
  Description of Artificial Sequence: Synthetic oligonucleotide
gggcuggaagacuagcagu

SEQ ID NO: 1135984 - RNA, 19 nt, Artificial Sequence
  Description of Artificial Sequence: Synthetic oligonucleotide
gugccaccuagugaaccca

SEQ ID NO: 1135985 - RNA, 19 nt, Artificial Sequence
  Description of Artificial Sequence: Synthetic oligonucleotide
caguaugaccagaaucguu

SEQ ID NO: 1135986 - RNA, 19 nt, Artificial Sequence
  Description of Artificial Sequence: Synthetic oligonucleotide
gcaguggcaaguguaugaa

SEQ ID NO: 1135987 - RNA, 19 nt, Artificial Sequence
  Description of Artificial Sequence: Synthetic oligonucleotide
gaccgucuuugcuuugcau

SEQ ID NO: 1135988 - RNA, 19 nt, Artificial Sequence
  Description of Artificial Sequence: Synthetic oligonucleotide
ggagaccgucuuugcuuug

SEQ ID NO: 1135989 - RNA, 19 nt, Artificial Sequence
  Description of Artificial Sequence: Synthetic oligonucleotide
cacgguggcaaauccguuu

SEQ ID NO: 1135990 - RNA, 19 nt, Artificial Sequence
  Description of Artificial Sequence: Synthetic oligonucleotide
guauuuugacuagggugau

SEQ ID NO: 1135991 - RNA, 19 nt, Artificial Sequence
  Description of Artificial Sequence: Synthetic oligonucleotide
cugaaugggcgauccucgu

SEQ ID NO: 1135992 - RNA, 19 nt, Artificial Sequence
  Description of Artificial Sequence: Synthetic oligonucleotide
gcauucugauuuaaguaau

SEQ ID NO: 1135993 - RNA, 19 nt, Artificial Sequence
  Description of Artificial Sequence: Synthetic oligonucleotide
ccgguagugccaaggaaaa

SEQ ID NO: 1135994 - RNA, 19 nt, Artificial Sequence
  Description of Artificial Sequence: Synthetic oligonucleotide
caaauccguuuggcuguuc

SEQ ID NO: 1135995 - RNA, 19 nt, Artificial Sequence
  Description of Artificial Sequence: Synthetic oligonucleotide
gcaacacguuugcgcauga

SEQ ID NO: 1135996 - RNA, 19 nt, Artificial Sequence
  Description of Artificial Sequence: Synthetic oligonucleotide
ccucguguaaacagccucu

SEQ ID NO: 1135997 - RNA, 19 nt, Artificial Sequence
  Description of Artificial Sequence: Synthetic oligonucleotide
guuugcgcaugaccagcau

SEQ ID NO: 1135998 - RNA, 19 nt, Artificial Sequence
  Description of Artificial Sequence: Synthetic oligonucleotide
ggcguccuuugcugaggug

SEQ ID NO: 1135999 - RNA, 19 nt, Artificial Sequence
  Description of Artificial Sequence: Synthetic oligonucleotide
ggauauacauuaggaucau

SEQ ID NO: 1136000 - RNA, 19 nt, Artificial Sequence
  Description of Artificial Sequence: Synthetic oligonucleotide
gcccgcagauugucuucag

SEQ ID NO: 1136001 - RNA, 19 nt, Artificial Sequence
  Description of Artificial Sequence: Synthetic oligonucleotide
ccgucuuugcuuugcauau

SEQ ID NO: 1136002 - RNA, 19 nt, Artificial Sequence
  Description of Artificial Sequence: Synthetic oligonucleotide
cccuuaccggcuucuuuca

SEQ ID NO: 1136003 - RNA, 19 nt, Artificial Sequence
  Description of Artificial Sequence: Synthetic oligonucleotide
gcggauggugagagcaaca

SEQ ID NO: 1136004 - RNA, 19 nt, Artificial Sequence
  Description of Artificial Sequence: Synthetic oligonucleotide
cguccuuugcugaggugca

SEQ ID NO: 1136005 - RNA, 19 nt, Artificial Sequence
  Description of Artificial Sequence: Synthetic oligonucleotide
cucguguaaacagccucuu

SEQ ID NO: 1136006 - RNA, 19 nt, Artificial Sequence
  Description of Artificial Sequence: Synthetic oligonucleotide
cucccuuaccggcuucuuu

SEQ ID NO: 1136007 - RNA, 19 nt, Artificial Sequence
  Description of Artificial Sequence: Synthetic oligonucleotide
cgaugaucagaggcagcac

SEQ ID NO: 1136008 - RNA, 19 nt, Artificial Sequence
  Description of Artificial Sequence: Synthetic oligonucleotide
cgugcacaagcauuuuccu

SEQ ID NO: 1136009 - RNA, 19 nt, Artificial Sequence
  Description of Artificial Sequence: Synthetic oligonucleotide
cgguagugccaaggaaaag

SEQ ID NO: 1136010 - RNA, 19 nt, Artificial Sequence
  Description of Artificial Sequence: Synthetic oligonucleotide
gcgguucacugaugccaga

SEQ ID NO: 1136011 - RNA, 19 nt, Artificial Sequence
  Description of Artificial Sequence: Synthetic oligonucleotide
gguaacgaauaaggcgguu

SEQ ID NO: 1136012 - RNA, 19 nt, Artificial Sequence
  Description of Artificial Sequence: Synthetic oligonucleotide
cugcugaaugggcgauccu

SEQ ID NO: 1136013 - RNA, 19 nt, Artificial Sequence
  Description of Artificial Sequence: Synthetic oligonucleotide
gccacucgcaaagcauucu

SEQ ID NO: 1136014 - RNA, 19 nt, Artificial Sequence
  Description of Artificial Sequence: Synthetic oligonucleotide
caucgugcacaagcauuuu

SEQ ID NO: 1136015 - RNA, 19 nt, Artificial Sequence
  Description of Artificial Sequence: Synthetic oligonucleotide
ggcucccaucauuguauuu

SEQ ID NO: 1136016 - RNA, 19 nt, Artificial Sequence
  Description of Artificial Sequence: Synthetic oligonucleotide
gccaccuagugaacccagu

SEQ ID NO: 1136017 - RNA, 19 nt, Artificial Sequence
  Description of Artificial Sequence: Synthetic oligonucleotide
gcaucggcuuuagcucucu

SEQ ID NO: 1136018 - RNA, 19 nt, Artificial Sequence
  Description of Artificial Sequence: Synthetic oligonucleotide
ccacuaccauuucguaaau

SEQ ID NO: 1136019 - RNA, 19 nt, Artificial Sequence
  Description of Artificial Sequence: Synthetic oligonucleotide
ccuuaccggcuucuuucau

SEQ ID NO: 1136020 - RNA, 19 nt, Artificial Sequence
  Description of Artificial Sequence: Synthetic oligonucleotide
gcgccucccuuaccggcuu

SEQ ID NO: 1136021 - RNA, 19 nt, Artificial Sequence
  Description of Artificial Sequence: Synthetic oligonucleotide
uuuagagccaaauauuugg

SEQ ID NO: 1136022 - RNA, 19 nt, Artificial Sequence
  Description of Artificial Sequence: Synthetic oligonucleotide
aaauaggcaccacagaagg

SEQ ID NO: 1136023 - RNA, 19 nt, Artificial Sequence
  Description of Artificial Sequence: Synthetic oligonucleotide
aacacgaccauccuuggac

SEQ ID NO: 1136024 - RNA, 19 nt, Artificial Sequence
  Description of Artificial Sequence: Synthetic oligonucleotide
ugggagaacagcuaguugg

SEQ ID NO: 1136025 - RNA, 19 nt, Artificial Sequence
  Description of Artificial Sequence: Synthetic oligonucleotide
uggaauuuguagcuggucg

SEQ ID NO: 1136026 - RNA, 19 nt, Artificial Sequence
  Description of Artificial Sequence: Synthetic oligonucleotide
aaccccuggaauuuguagc

SEQ ID NO: 1136027 - RNA, 19 nt, Artificial Sequence
  Description of Artificial Sequence: Synthetic oligonucleotide
gauggcaaaagugaaauag

SEQ ID NO: 1136028 - RNA, 19 nt, Artificial Sequence
  Description of Artificial Sequence: Synthetic oligonucleotide
auacacauggcccucacgg

SEQ ID NO: 1136029 - RNA, 19 nt, Artificial Sequence
  Description of Artificial Sequence: Synthetic oligonucleotide
uggcaaauaacucaggcac

SEQ ID NO: 1136030 - RNA, 19 nt, Artificial Sequence
  Description of Artificial Sequence: Synthetic oligonucleotide
auaacucaggcacacggcc

SEQ ID NO: 1136031 - RNA, 19 nt, Artificial Sequence
  Description of Artificial Sequence: Synthetic oligonucleotide
uuagcuaugcgcuugggug

SEQ ID NO: 1136032 - RNA, 19 nt, Artificial Sequence
  Description of Artificial Sequence: Synthetic oligonucleotide
uuuccuguugugaaguggg

SEQ ID NO: 1136033 - RNA, 19 nt, Artificial Sequence
  Description of Artificial Sequence: Synthetic oligonucleotide
ucaucauugcagccgaagg

SEQ ID NO: 1136034 - RNA, 19 nt, Artificial Sequence
  Description of Artificial Sequence: Synthetic oligonucleotide
agaacgguuaccaaggccg

SEQ ID NO: 1136035 - RNA, 19 nt, Artificial Sequence
  Description of Artificial Sequence: Synthetic oligonucleotide
agacacacgguaugcaugc

SEQ ID NO: 1136036 - RNA, 19 nt, Artificial Sequence
  Description of Artificial Sequence: Synthetic oligonucleotide
ugacaacuggaucugauga

SEQ ID NO: 1136037 - RNA, 19 nt, Artificial Sequence
  Description of Artificial Sequence: Synthetic oligonucleotide
cagcauaucccacagaagc

SEQ ID NO: 1136038 - RNA, 19 nt, Artificial Sequence
  Description of Artificial Sequence: Synthetic oligonucleotide
cuuaguggaauucuugaag

SEQ ID NO: 1136039 - RNA, 19 nt, Artificial Sequence
  Description of Artificial Sequence: Synthetic oligonucleotide
uggacuccuguuuagagcc

SEQ ID NO: 1136040 - RNA, 19 nt, Artificial Sequence
  Description of Artificial Sequence: Synthetic oligonucleotide
uggcaaaagugaaauaggc

SEQ ID NO: 1136041 - RNA, 19 nt, Artificial Sequence
  Description of Artificial Sequence: Synthetic oligonucleotide
auuauugucccggaaagag

SEQ ID NO: 1136042 - RNA, 19 nt, Artificial Sequence
  Description of Artificial Sequence: Synthetic oligonucleotide
uuguccuuaacuaguaaga

SEQ ID NO: 1136043 - RNA, 19 nt, Artificial Sequence
  Description of Artificial Sequence: Synthetic oligonucleotide
acuaguaagacugugugcu

SEQ ID NO: 1136044 - RNA, 19 nt, Artificial Sequence
  Description of Artificial Sequence: Synthetic oligonucleotide
uugaacaggaaccaugcuc

SEQ ID NO: 1136045 - RNA, 19 nt, Artificial Sequence
  Description of Artificial Sequence: Synthetic oligonucleotide
caaaagugaaauaggcacc

SEQ ID NO: 1136046 - RNA, 19 nt, Artificial Sequence
  Description of Artificial Sequence: Synthetic oligonucleotide
aguuaagaccacucgguuc

SEQ ID NO: 1136047 - RNA, 19 nt, Artificial Sequence
  Description of Artificial Sequence: Synthetic oligonucleotide
gauuguauggugcuggcca

SEQ ID NO: 1136048 - RNA, 19 nt, Artificial Sequence
  Description of Artificial Sequence: Synthetic oligonucleotide
auggacuccuguuuagagc

SEQ ID NO: 1136049 - RNA, 19 nt, Artificial Sequence
  Description of Artificial Sequence: Synthetic oligonucleotide
aagugaaauaggcaccaca

SEQ ID NO: 1136050 - RNA, 19 nt, Artificial Sequence
  Description of Artificial Sequence: Synthetic oligonucleotide
aaaacacgaccauccuugg

SEQ ID NO: 1136051 - RNA, 19 nt, Artificial Sequence
  Description of Artificial Sequence: Synthetic oligonucleotide
gaugugucccuucccaagg

SEQ ID NO: 1136052 - RNA, 19 nt, Artificial Sequence
  Description of Artificial Sequence: Synthetic oligonucleotide
agugaaauaggcaccacag

SEQ ID NO: 1136053 - RNA, 19 nt, Artificial Sequence
  Description of Artificial Sequence: Synthetic oligonucleotide
aucaccaaauggucauucc

SEQ ID NO: 1136054 - RNA, 19 nt, Artificial Sequence
  Description of Artificial Sequence: Synthetic oligonucleotide
aaccaggagucgcucaagg

SEQ ID NO: 1136055 - RNA, 19 nt, Artificial Sequence
  Description of Artificial Sequence: Synthetic oligonucleotide
uuauugucccggaaagagc

SEQ ID NO: 1136056 - RNA, 19 nt, Artificial Sequence
  Description of Artificial Sequence: Synthetic oligonucleotide
agaacagcuaguuggauuu

SEQ ID NO: 1136057 - RNA, 19 nt, Artificial Sequence
  Description of Artificial Sequence: Synthetic oligonucleotide
acaguggggugcuuugugc

SEQ ID NO: 1136058 - RNA, 19 nt, Artificial Sequence
  Description of Artificial Sequence: Synthetic oligonucleotide
acacacgguaugcaugccc

SEQ ID NO: 1136059 - RNA, 19 nt, Artificial Sequence
  Description of Artificial Sequence: Synthetic oligonucleotide
uaguaagacugugugcugg

SEQ ID NO: 1136060 - RNA, 19 nt, Artificial Sequence
  Description of Artificial Sequence: Synthetic oligonucleotide
uagcuaugcgcuugggugg

SEQ ID NO: 1136061 - RNA, 19 nt, Artificial Sequence
  Description of Artificial Sequence: Synthetic oligonucleotide
auuguauggugcuggccac

SEQ ID NO: 1136062 - RNA, 19 nt, Artificial Sequence
  Description of Artificial Sequence: Synthetic oligonucleotide
caaauggucauucccugag

SEQ ID NO: 1136063 - RNA, 19 nt, Artificial Sequence
  Description of Artificial Sequence: Synthetic oligonucleotide
gccacuuuggcucagacac

SEQ ID NO: 1136064 - RNA, 19 nt, Artificial Sequence
  Description of Artificial Sequence: Synthetic oligonucleotide
gaaugcacaggugaugccc

SEQ ID NO: 1136065 - RNA, 19 nt, Artificial Sequence
  Description of Artificial Sequence: Synthetic oligonucleotide
aucauugcagccgaaggag

SEQ ID NO: 1136066 - RNA, 19 nt, Artificial Sequence
  Description of Artificial Sequence: Synthetic oligonucleotide
caaagccauacacauggcc

SEQ ID NO: 1136067 - RNA, 19 nt, Artificial Sequence
  Description of Artificial Sequence: Synthetic oligonucleotide
agcauaucccacagaagcc

SEQ ID NO: 1136068 - RNA, 19 nt, Artificial Sequence
  Description of Artificial Sequence: Synthetic oligonucleotide
ugucaaguucugaggaaug

SEQ ID NO: 1136069 - RNA, 19 nt, Artificial Sequence
  Description of Artificial Sequence: Synthetic oligonucleotide
acgucaucagcucuguucu

SEQ ID NO: 1136070 - RNA, 19 nt, Artificial Sequence
  Description of Artificial Sequence: Synthetic oligonucleotide
cuuuucagaguaugggcac

SEQ ID NO: 1136071 - RNA, 19 nt, Artificial Sequence
  Description of Artificial Sequence: Synthetic oligonucleotide
acugauguuaggaacagaa

SEQ ID NO: 1136072 - RNA, 19 nt, Artificial Sequence
  Description of Artificial Sequence: Synthetic oligonucleotide
aaagacgucaucagcucug

SEQ ID NO: 1136073 - RNA, 19 nt, Artificial Sequence
  Description of Artificial Sequence: Synthetic oligonucleotide
aagcuggugauaguuggag

SEQ ID NO: 1136074 - RNA, 19 nt, Artificial Sequence
  Description of Artificial Sequence: Synthetic oligonucleotide
uuaggaucaccccagccuu

SEQ ID NO: 1136075 - RNA, 19 nt, Artificial Sequence
  Description of Artificial Sequence: Synthetic oligonucleotide
ucucccuaggcaugggucc

SEQ ID NO: 1136076 - RNA, 19 nt, Artificial Sequence
  Description of Artificial Sequence: Synthetic oligonucleotide
uucucuugcaguuccacuu

SEQ ID NO: 1136077 - RNA, 19 nt, Artificial Sequence
  Description of Artificial Sequence: Synthetic oligonucleotide
uggucauucccugaggcca

SEQ ID NO: 1136078 - RNA, 19 nt, Artificial Sequence
  Description of Artificial Sequence: Synthetic oligonucleotide
acaggugaugcccaagaga

SEQ ID NO: 1136079 - RNA, 19 nt, Artificial Sequence
  Description of Artificial Sequence: Synthetic oligonucleotide
uggugauaguuggagaggc

SEQ ID NO: 1136080 - RNA, 19 nt, Artificial Sequence
  Description of Artificial Sequence: Synthetic oligonucleotide
caggagucgcucaaggccc

SEQ ID NO: 1136081 - RNA, 19 nt, Artificial Sequence
  Description of Artificial Sequence: Synthetic oligonucleotide
gaaaugaggguggguaugc

SEQ ID NO: 1136082 - RNA, 19 nt, Artificial Sequence
  Description of Artificial Sequence: Synthetic oligonucleotide
uaacucaggcacacggccc

SEQ ID NO: 1136083 - RNA, 19 nt, Artificial Sequence
  Description of Artificial Sequence: Synthetic oligonucleotide
cugacggccaccucgguug

SEQ ID NO: 1136084 - RNA, 19 nt, Artificial Sequence
  Description of Artificial Sequence: Synthetic oligonucleotide
uauagaggucuccuucagu

SEQ ID NO: 1136085 - RNA, 19 nt, Artificial Sequence
  Description of Artificial Sequence: Synthetic oligonucleotide
gaagacccggccaucuucg

SEQ ID NO: 1136086 - RNA, 19 nt, Artificial Sequence
  Description of Artificial Sequence: Synthetic oligonucleotide
aucugaugacuguaccauc

SEQ ID NO: 1136087 - RNA, 19 nt, Artificial Sequence
  Description of Artificial Sequence: Synthetic oligonucleotide
uaguggaauucuugaagga

SEQ ID NO: 1136088 - RNA, 19 nt, Artificial Sequence
  Description of Artificial Sequence: Synthetic oligonucleotide
ggugaugcccaagagacag

SEQ ID NO: 1136089 - RNA, 19 nt, Artificial Sequence
  Description of Artificial Sequence: Synthetic oligonucleotide
agauuguauggugcuggcc

SEQ ID NO: 1136090 - RNA, 19 nt, Artificial Sequence
  Description of Artificial Sequence: Synthetic oligonucleotide
uguuugccagucauuucca

SEQ ID NO: 1136091 - RNA, 19 nt, Artificial Sequence
  Description of Artificial Sequence: Synthetic oligonucleotide
agcaucaccaaauggucau

SEQ ID NO: 1136092 - RNA, 19 nt, Artificial Sequence
  Description of Artificial Sequence: Synthetic oligonucleotide
ucguuuuccuguugugaag

SEQ ID NO: 1136093 - RNA, 19 nt, Artificial Sequence
  Description of Artificial Sequence: Synthetic oligonucleotide
cauaucccacagaagcccc

SEQ ID NO: 1136094 - RNA, 19 nt, Artificial Sequence
  Description of Artificial Sequence: Synthetic oligonucleotide
aguagaccuggccacuuug

SEQ ID NO: 1136095 - RNA, 19 nt, Artificial Sequence
  Description of Artificial Sequence: Synthetic oligonucleotide
agaggucuccuucagucgu

SEQ ID NO: 1136096 - RNA, 19 nt, Artificial Sequence
  Description of Artificial Sequence: Synthetic oligonucleotide
ucgucagcaucaccaaaug

SEQ ID NO: 1136097 - RNA, 19 nt, Artificial Sequence
  Description of Artificial Sequence: Synthetic oligonucleotide
uucgguaagggcugcugug

SEQ ID NO: 1136098 - RNA, 19 nt, Artificial Sequence
  Description of Artificial Sequence: Synthetic oligonucleotide
acuuaguggaauucuugaa

SEQ ID NO: 1136099 - RNA, 19 nt, Artificial Sequence
  Description of Artificial Sequence: Synthetic oligonucleotide
cuagccgcccauauucagc

SEQ ID NO: 1136100 - RNA, 19 nt, Artificial Sequence
  Description of Artificial Sequence: Synthetic oligonucleotide
aacgguuaccaaggccggc

SEQ ID NO: 1136101 - RNA, 19 nt, Artificial Sequence
  Description of Artificial Sequence: Synthetic oligonucleotide
ugcugugugacugucuccu

SEQ ID NO: 1136102 - RNA, 19 nt, Artificial Sequence
  Description of Artificial Sequence: Synthetic oligonucleotide
cacagcauaucccacagaa

SEQ ID NO: 1136103 - RNA, 19 nt, Artificial Sequence
  Description of Artificial Sequence: Synthetic oligonucleotide
guauagaggucuccuucag

SEQ ID NO: 1136104 - RNA, 19 nt, Artificial Sequence
  Description of Artificial Sequence: Synthetic oligonucleotide
acaacuggaucugaugacu

SEQ ID NO: 1136105 - RNA, 19 nt, Artificial Sequence
  Description of Artificial Sequence: Synthetic oligonucleotide
uccuguuuagagccaaaua

SEQ ID NO: 1136106 - RNA, 19 nt, Artificial Sequence
  Description of Artificial Sequence: Synthetic oligonucleotide
ucucuuagcuaugcgcuug

SEQ ID NO: 1136107 - RNA, 19 nt, Artificial Sequence
  Description of Artificial Sequence: Synthetic oligonucleotide
agaccugugugagacuuuc

SEQ ID NO: 1136108 - RNA, 19 nt, Artificial Sequence
  Description of Artificial Sequence: Synthetic oligonucleotide
cucgguuggcaaauaacuc

SEQ ID NO: 1136109 - RNA, 19 nt, Artificial Sequence
  Description of Artificial Sequence: Synthetic oligonucleotide
aaacacgaccauccuugga

SEQ ID NO: 1136110 - RNA, 19 nt, Artificial Sequence
  Description of Artificial Sequence: Synthetic oligonucleotide
accccuggaauuuguagcu

SEQ ID NO: 1136111 - RNA, 19 nt, Artificial Sequence
  Description of Artificial Sequence: Synthetic oligonucleotide
ugugucccuucccaaggca

SEQ ID NO: 1136112 - RNA, 19 nt, Artificial Sequence
  Description of Artificial Sequence: Synthetic oligonucleotide
agccuuuguccagaucucc

SEQ ID NO: 1136113 - RNA, 19 nt, Artificial Sequence
  Description of Artificial Sequence: Synthetic oligonucleotide
cagaguaugggcaccaaaa

SEQ ID NO: 1136114 - RNA, 19 nt, Artificial Sequence
  Description of Artificial Sequence: Synthetic oligonucleotide
gcuccaacaacccaaucac

SEQ ID NO: 1136115 - RNA, 19 nt, Artificial Sequence
  Description of Artificial Sequence: Synthetic oligonucleotide
cagaacgguuaccaaggcc

SEQ ID NO: 1136116 - RNA, 19 nt, Artificial Sequence
  Description of Artificial Sequence: Synthetic oligonucleotide
gaaugaagcaagaugcagu

SEQ ID NO: 1136117 - RNA, 19 nt, Artificial Sequence
  Description of Artificial Sequence: Synthetic oligonucleotide
cuggaucugaugacuguac

SEQ ID NO: 1136118 - RNA, 19 nt, Artificial Sequence
  Description of Artificial Sequence: Synthetic oligonucleotide
cuaggcauggguccaugac

SEQ ID NO: 1136119 - RNA, 19 nt, Artificial Sequence
  Description of Artificial Sequence: Synthetic oligonucleotide
gaugucaaguucugaggaa

SEQ ID NO: 1136120 - RNA, 19 nt, Artificial Sequence
  Description of Artificial Sequence: Synthetic oligonucleotide
uuucagaguaugggcacca

SEQ ID NO: 1136121 - RNA, 19 nt, Artificial Sequence
  Description of Artificial Sequence: Synthetic oligonucleotide
gcagauuguauggugcugg

SEQ ID NO: 1136122 - RNA, 19 nt, Artificial Sequence
  Description of Artificial Sequence: Synthetic oligonucleotide
gaggagacgaugggcagcc

SEQ ID NO: 1136123 - RNA, 19 nt, Artificial Sequence
  Description of Artificial Sequence: Synthetic oligonucleotide
uuaugagaccugugugaga

SEQ ID NO: 1136124 - RNA, 19 nt, Artificial Sequence
  Description of Artificial Sequence: Synthetic oligonucleotide
augcagugcccggaguucc

SEQ ID NO: 1136125 - RNA, 19 nt, Artificial Sequence
  Description of Artificial Sequence: Synthetic oligonucleotide
agucgcucaaggcccugac

SEQ ID NO: 1136126 - RNA, 19 nt, Artificial Sequence
  Description of Artificial Sequence: Synthetic oligonucleotide
caucauugcagccgaagga

SEQ ID NO: 1136127 - RNA, 19 nt, Artificial Sequence
  Description of Artificial Sequence: Synthetic oligonucleotide
aagacccggccaucuucgg

SEQ ID NO: 1136128 - RNA, 19 nt, Artificial Sequence
  Description of Artificial Sequence: Synthetic oligonucleotide
cuggugauaguuggagagg

SEQ ID NO: 1136129 - RNA, 19 nt, Artificial Sequence
  Description of Artificial Sequence: Synthetic oligonucleotide
gaacgguuaccaaggccgg

SEQ ID NO: 1136130 - RNA, 19 nt, Artificial Sequence
  Description of Artificial Sequence: Synthetic oligonucleotide
gagccaaauauuuggcuua

SEQ ID NO: 1136131 - RNA, 19 nt, Artificial Sequence
  Description of Artificial Sequence: Synthetic oligonucleotide
augaggguggguaugcucu

SEQ ID NO: 1136132 - RNA, 19 nt, Artificial Sequence
  Description of Artificial Sequence: Synthetic oligonucleotide
gugauaguuggagaggcca

SEQ ID NO: 1136133 - RNA, 19 nt, Artificial Sequence
  Description of Artificial Sequence: Synthetic oligonucleotide
cuucucuuagcuaugcgcu

SEQ ID NO: 1136134 - RNA, 19 nt, Artificial Sequence
  Description of Artificial Sequence: Synthetic oligonucleotide
cucuuagcuaugcgcuugg

SEQ ID NO: 1136135 - RNA, 19 nt, Artificial Sequence
  Description of Artificial Sequence: Synthetic oligonucleotide
accucgguuggcaaauaac

SEQ ID NO: 1136136 - RNA, 19 nt, Artificial Sequence
  Description of Artificial Sequence: Synthetic oligonucleotide
gguggguaugcucuucucc

SEQ ID NO: 1136137 - RNA, 19 nt, Artificial Sequence
  Description of Artificial Sequence: Synthetic oligonucleotide
agcuaugcgcuuggguggc

SEQ ID NO: 1136138 - RNA, 19 nt, Artificial Sequence
  Description of Artificial Sequence: Synthetic oligonucleotide
cagauuguauggugcuggc

SEQ ID NO: 1136139 - RNA, 19 nt, Artificial Sequence
  Description of Artificial Sequence: Synthetic oligonucleotide
cuuaggaucaccccagccu

SEQ ID NO: 1136140 - RNA, 19 nt, Artificial Sequence
  Description of Artificial Sequence: Synthetic oligonucleotide
ggcuccaacaacccaauca

SEQ ID NO: 1136141 - RNA, 19 nt, Artificial Sequence
  Description of Artificial Sequence: Synthetic oligonucleotide
cacuuuggcucagacacac

SEQ ID NO: 1136142 - RNA, 19 nt, Artificial Sequence
  Description of Artificial Sequence: Synthetic oligonucleotide
uguauggugcuggccacca

SEQ ID NO: 1136143 - RNA, 19 nt, Artificial Sequence
  Description of Artificial Sequence: Synthetic oligonucleotide
ugagaccugugugagacuu

SEQ ID NO: 1136144 - RNA, 19 nt, Artificial Sequence
  Description of Artificial Sequence: Synthetic oligonucleotide
aucucccuaggcauggguc

SEQ ID NO: 1136145 - RNA, 19 nt, Artificial Sequence
  Description of Artificial Sequence: Synthetic oligonucleotide
uggaaccgcacacggcccc

SEQ ID NO: 1136146 - RNA, 19 nt, Artificial Sequence
  Description of Artificial Sequence: Synthetic oligonucleotide
acacgaccauccuuggaca

SEQ ID NO: 1136147 - RNA, 19 nt, Artificial Sequence
  Description of Artificial Sequence: Synthetic oligonucleotide
augucaaguucugaggaau

SEQ ID NO: 1136148 - RNA, 19 nt, Artificial Sequence
  Description of Artificial Sequence: Synthetic oligonucleotide
cacacaccugggaaccagg

SEQ ID NO: 1136149 - RNA, 19 nt, Artificial Sequence
  Description of Artificial Sequence: Synthetic oligonucleotide
gguauagaggucuccuuca

SEQ ID NO: 1136150 - RNA, 19 nt, Artificial Sequence
  Description of Artificial Sequence: Synthetic oligonucleotide
gugugagacuuucacuuuc

SEQ ID NO: 1136151 - RNA, 19 nt, Artificial Sequence
  Description of Artificial Sequence: Synthetic oligonucleotide
ugugugagacuuucacuuu

SEQ ID NO: 1136152 - RNA, 19 nt, Artificial Sequence
  Description of Artificial Sequence: Synthetic oligonucleotide
gugcuuuugggagaacagc

SEQ ID NO: 1136153 - RNA, 19 nt, Artificial Sequence
  Description of Artificial Sequence: Synthetic oligonucleotide
uugucccggaaagagcccc

SEQ ID NO: 1136154 - RNA, 19 nt, Artificial Sequence
  Description of Artificial Sequence: Synthetic oligonucleotide
ucuucgguaagggcugcug

SEQ ID NO: 1136155 - RNA, 19 nt, Artificial Sequence
  Description of Artificial Sequence: Synthetic oligonucleotide
ggcuuuuagcagcacacac

SEQ ID NO: 1136156 - RNA, 19 nt, Artificial Sequence
  Description of Artificial Sequence: Synthetic oligonucleotide
ucacgggagauggcaaaag

SEQ ID NO: 1136157 - RNA, 19 nt, Artificial Sequence
  Description of Artificial Sequence: Synthetic oligonucleotide
agaccacucgguucuccag

SEQ ID NO: 1136158 - RNA, 19 nt, Artificial Sequence
  Description of Artificial Sequence: Synthetic oligonucleotide
ugcccggaguuccaagcug

SEQ ID NO: 1136159 - RNA, 19 nt, Artificial Sequence
  Description of Artificial Sequence: Synthetic oligonucleotide
ccugcugacacuuggacca

SEQ ID NO: 1136160 - RNA, 19 nt, Artificial Sequence
  Description of Artificial Sequence: Synthetic oligonucleotide
uggguccaugacaacugga

SEQ ID NO: 1136161 - RNA, 19 nt, Artificial Sequence
  Description of Artificial Sequence: Synthetic oligonucleotide
cagaucucccuaggcaugg

SEQ ID NO: 1136162 - RNA, 19 nt, Artificial Sequence
  Description of Artificial Sequence: Synthetic oligonucleotide
aucuugcagaacgguuacc

SEQ ID NO: 1136163 - RNA, 19 nt, Artificial Sequence
  Description of Artificial Sequence: Synthetic oligonucleotide
ucuuagcuaugcgcuuggg

SEQ ID NO: 1136164 - RNA, 19 nt, Artificial Sequence
  Description of Artificial Sequence: Synthetic oligonucleotide
gacauccccuggcuuuuag

SEQ ID NO: 1136165 - RNA, 19 nt, Artificial Sequence
  Description of Artificial Sequence: Synthetic oligonucleotide
gcuuuuagcagcacacacc

SEQ ID NO: 1136166 - RNA, 19 nt, Artificial Sequence
  Description of Artificial Sequence: Synthetic oligonucleotide
uccuggaaccgcacacggc

SEQ ID NO: 1136167 - RNA, 19 nt, Artificial Sequence
  Description of Artificial Sequence: Synthetic oligonucleotide
uccaugcagauuguauggu

SEQ ID NO: 1136168 - RNA, 19 nt, Artificial Sequence
  Description of Artificial Sequence: Synthetic oligonucleotide
aaaugaggguggguaugcu

SEQ ID NO: 1136169 - RNA, 19 nt, Artificial Sequence
  Description of Artificial Sequence: Synthetic oligonucleotide
ugcuggccaccagagaagc

SEQ ID NO: 1136170 - RNA, 19 nt, Artificial Sequence
  Description of Artificial Sequence: Synthetic oligonucleotide
aagacgucaucagcucugu

SEQ ID NO: 1136171 - RNA, 19 nt, Artificial Sequence
  Description of Artificial Sequence: Synthetic oligonucleotide
gcauaucccacagaagccc

SEQ ID NO: 1136172 - RNA, 19 nt, Artificial Sequence
  Description of Artificial Sequence: Synthetic oligonucleotide
gucgcucaaggcccugacg

SEQ ID NO: 1136173 - RNA, 19 nt, Artificial Sequence
  Description of Artificial Sequence: Synthetic oligonucleotide
gcaaauaacucaggcacac

SEQ ID NO: 1136174 - RNA, 19 nt, Artificial Sequence
  Description of Artificial Sequence: Synthetic oligonucleotide
ugacggccaccucgguugg

SEQ ID NO: 1136175 - RNA, 19 nt, Artificial Sequence
  Description of Artificial Sequence: Synthetic oligonucleotide
guccuuaacuaguaagacu

SEQ ID NO: 1136176 - RNA, 19 nt, Artificial Sequence
  Description of Artificial Sequence: Synthetic oligonucleotide
agggaccaucucugagccc

SEQ ID NO: 1136177 - RNA, 19 nt, Artificial Sequence
  Description of Artificial Sequence: Synthetic oligonucleotide
cuguugugaagugggguug

SEQ ID NO: 1136178 - RNA, 19 nt, Artificial Sequence
  Description of Artificial Sequence: Synthetic oligonucleotide
uggcuuuuagcagcacaca

SEQ ID NO: 1136179 - RNA, 19 nt, Artificial Sequence
  Description of Artificial Sequence: Synthetic oligonucleotide
ggccuagccgcccauauuc

SEQ ID NO: 1136180 - RNA, 19 nt, Artificial Sequence
  Description of Artificial Sequence: Synthetic oligonucleotide
uucucuuagcuaugcgcuu

SEQ ID NO: 1136181 - RNA, 19 nt, Artificial Sequence
  Description of Artificial Sequence: Synthetic oligonucleotide
cugauguuaggaacagaaa

SEQ ID NO: 1136182 - RNA, 19 nt, Artificial Sequence
  Description of Artificial Sequence: Synthetic oligonucleotide
cuggaaccgcacacggccc

SEQ ID NO: 1136183 - RNA, 19 nt, Artificial Sequence
  Description of Artificial Sequence: Synthetic oligonucleotide
gaaggaugucaaguucuga

SEQ ID NO: 1136184 - RNA, 19 nt, Artificial Sequence
  Description of Artificial Sequence: Synthetic oligonucleotide
uuguauggugcuggccacc

SEQ ID NO: 1136185 - RNA, 19 nt, Artificial Sequence
  Description of Artificial Sequence: Synthetic oligonucleotide
gagaacagcuaguuggauu

SEQ ID NO: 1136186 - RNA, 19 nt, Artificial Sequence
  Description of Artificial Sequence: Synthetic oligonucleotide
gaugcagugcccggaguuc

SEQ ID NO: 1136187 - RNA, 19 nt, Artificial Sequence
  Description of Artificial Sequence: Synthetic oligonucleotide
cagccgggaaaugagggug

SEQ ID NO: 1136188 - RNA, 19 nt, Artificial Sequence
  Description of Artificial Sequence: Synthetic oligonucleotide
ugucccggaaagagcccca

SEQ ID NO: 1136189 - RNA, 19 nt, Artificial Sequence
  Description of Artificial Sequence: Synthetic oligonucleotide
gcacccucaucauugcagc

SEQ ID NO: 1136190 - RNA, 19 nt, Artificial Sequence
  Description of Artificial Sequence: Synthetic oligonucleotide
uaucccacagaagccccac

SEQ ID NO: 1136191 - RNA, 19 nt, Artificial Sequence
  Description of Artificial Sequence: Synthetic oligonucleotide
aaaaccccuggaauuugua

SEQ ID NO: 1136192 - RNA, 19 nt, Artificial Sequence
  Description of Artificial Sequence: Synthetic oligonucleotide
uaccaucugucuccuuuua

SEQ ID NO: 1136193 - RNA, 19 nt, Artificial Sequence
  Description of Artificial Sequence: Synthetic oligonucleotide
ccaucuucgguaagggcug

SEQ ID NO: 1136194 - RNA, 19 nt, Artificial Sequence
  Description of Artificial Sequence: Synthetic oligonucleotide
gcuuaggaucaccccagcc

SEQ ID NO: 1136195 - RNA, 19 nt, Artificial Sequence
  Description of Artificial Sequence: Synthetic oligonucleotide
cauuauugucccggaaaga

SEQ ID NO: 1136196 - RNA, 19 nt, Artificial Sequence
  Description of Artificial Sequence: Synthetic oligonucleotide
cauugcagccgaaggagua

SEQ ID NO: 1136197 - RNA, 19 nt, Artificial Sequence
  Description of Artificial Sequence: Synthetic oligonucleotide
ccaugcagauuguauggug

SEQ ID NO: 1136198 - RNA, 19 nt, Artificial Sequence
  Description of Artificial Sequence: Synthetic oligonucleotide
aggcuguaugcuuuuccuu

SEQ ID NO: 1136199 - RNA, 19 nt, Artificial Sequence
  Description of Artificial Sequence: Synthetic oligonucleotide
agacccggccaucuucggu

SEQ ID NO: 1136200 - RNA, 19 nt, Artificial Sequence
  Description of Artificial Sequence: Synthetic oligonucleotide
agcccgguucuguuuuaug

SEQ ID NO: 1136201 - RNA, 19 nt, Artificial Sequence
  Description of Artificial Sequence: Synthetic oligonucleotide
caacccaaucacaccauua

SEQ ID NO: 1136202 - RNA, 19 nt, Artificial Sequence
  Description of Artificial Sequence: Synthetic oligonucleotide
guucccaacuuuucagagu

SEQ ID NO: 1136203 - RNA, 19 nt, Artificial Sequence
  Description of Artificial Sequence: Synthetic oligonucleotide
gauggaguucccaacuuuu

SEQ ID NO: 1136204 - RNA, 19 nt, Artificial Sequence
  Description of Artificial Sequence: Synthetic oligonucleotide
cuccaacaacccaaucaca

SEQ ID NO: 1136205 - RNA, 19 nt, Artificial Sequence
  Description of Artificial Sequence: Synthetic oligonucleotide
ccggaaagagccccagagg

SEQ ID NO: 1136206 - RNA, 19 nt, Artificial Sequence
  Description of Artificial Sequence: Synthetic oligonucleotide
ugacugucuccugcugaca

SEQ ID NO: 1136207 - RNA, 19 nt, Artificial Sequence
  Description of Artificial Sequence: Synthetic oligonucleotide
augagaccugugugagacu

SEQ ID NO: 1136208 - RNA, 19 nt, Artificial Sequence
  Description of Artificial Sequence: Synthetic oligonucleotide
ggggugaccuucucuuagc

SEQ ID NO: 1136209 - RNA, 19 nt, Artificial Sequence
  Description of Artificial Sequence: Synthetic oligonucleotide
ugcugacacuuggaccacc

SEQ ID NO: 1136210 - RNA, 19 nt, Artificial Sequence
  Description of Artificial Sequence: Synthetic oligonucleotide
cccaacuuuucagaguaug

SEQ ID NO: 1136211 - RNA, 19 nt, Artificial Sequence
  Description of Artificial Sequence: Synthetic oligonucleotide
ucccaacuuuucagaguau

SEQ ID NO: 1136212 - RNA, 19 nt, Artificial Sequence
  Description of Artificial Sequence: Synthetic oligonucleotide
aggaucaccccagccuugu

SEQ ID NO: 1136213 - RNA, 19 nt, Artificial Sequence
  Description of Artificial Sequence: Synthetic oligonucleotide
ggucguuuuccuguuguga

SEQ ID NO: 1136214 - RNA, 19 nt, Artificial Sequence
  Description of Artificial Sequence: Synthetic oligonucleotide
gacacacgguaugcaugcc

SEQ ID NO: 1136215 - RNA, 19 nt, Artificial Sequence
  Description of Artificial Sequence: Synthetic oligonucleotide
accaagcccgguucuguuu

SEQ ID NO: 1136216 - RNA, 19 nt, Artificial Sequence
  Description of Artificial Sequence: Synthetic oligonucleotide
ucgcccuggcccaguguca

SEQ ID NO: 1136217 - RNA, 19 nt, Artificial Sequence
  Description of Artificial Sequence: Synthetic oligonucleotide
ggugauaguuggagaggcc

SEQ ID NO: 1136218 - RNA, 19 nt, Artificial Sequence
  Description of Artificial Sequence: Synthetic oligonucleotide
ugaggguggguaugcucuu

SEQ ID NO: 1136219 - RNA, 19 nt, Artificial Sequence
  Description of Artificial Sequence: Synthetic oligonucleotide
gacgaugggcagccgggaa

SEQ ID NO: 1136220 - RNA, 19 nt, Artificial Sequence
  Description of Artificial Sequence: Synthetic oligonucleotide
gaaccaugcucuucuucau

SEQ ID NO: 1136221 - RNA, 19 nt, Artificial Sequence
  Description of Artificial Sequence: Synthetic oligonucleotide
auaucccacagaagcccca

SEQ ID NO: 1136222 - RNA, 19 nt, Artificial Sequence
  Description of Artificial Sequence: Synthetic oligonucleotide
uaugcgcuuggguggcauu

SEQ ID NO: 1136223 - RNA, 19 nt, Artificial Sequence
  Description of Artificial Sequence: Synthetic oligonucleotide
gaauuuguagcuggucguu

SEQ ID NO: 1136224 - RNA, 19 nt, Artificial Sequence
  Description of Artificial Sequence: Synthetic oligonucleotide
aucccacagaagccccaca

SEQ ID NO: 1136225 - RNA, 19 nt, Artificial Sequence
  Description of Artificial Sequence: Synthetic oligonucleotide
ccagaucucccuaggcaug

SEQ ID NO: 1136226 - RNA, 19 nt, Artificial Sequence
  Description of Artificial Sequence: Synthetic oligonucleotide
uuaagaccacucgguucuc

SEQ ID NO: 1136227 - RNA, 19 nt, Artificial Sequence
  Description of Artificial Sequence: Synthetic oligonucleotide
aagcccgguucuguuuuau

SEQ ID NO: 1136228 - RNA, 19 nt, Artificial Sequence
  Description of Artificial Sequence: Synthetic oligonucleotide
ccucgguuggcaaauaacu

SEQ ID NO: 1136229 - RNA, 19 nt, Artificial Sequence
  Description of Artificial Sequence: Synthetic oligonucleotide
caucuucgguaagggcugc

SEQ ID NO: 1136230 - RNA, 19 nt, Artificial Sequence
  Description of Artificial Sequence: Synthetic oligonucleotide
ccuagccgcccauauucag

SEQ ID NO: 1136231 - RNA, 19 nt, Artificial Sequence
  Description of Artificial Sequence: Synthetic oligonucleotide
caucucugagcccucggcu

SEQ ID NO: 1136232 - RNA, 19 nt, Artificial Sequence
  Description of Artificial Sequence: Synthetic oligonucleotide
acggccaccucgguuggca

SEQ ID NO: 1136233 - RNA, 19 nt, Artificial Sequence
  Description of Artificial Sequence: Synthetic oligonucleotide
cuucgguaagggcugcugu

SEQ ID NO: 1136234 - RNA, 19 nt, Artificial Sequence
  Description of Artificial Sequence: Synthetic oligonucleotide
gguuaccaaggccggcuuc

SEQ ID NO: 1136235 - RNA, 19 nt, Artificial Sequence
  Description of Artificial Sequence: Synthetic oligonucleotide
cuugaacaggaaccaugcu

SEQ ID NO: 1136236 - RNA, 19 nt, Artificial Sequence
  Description of Artificial Sequence: Synthetic oligonucleotide
ccggccaucuucgguaagg

SEQ ID NO: 1136237 - RNA, 19 nt, Artificial Sequence
  Description of Artificial Sequence: Synthetic oligonucleotide
gaggaagacccggccaucu

SEQ ID NO: 1136238 - RNA, 19 nt, Artificial Sequence
  Description of Artificial Sequence: Synthetic oligonucleotide
cacgggagauggcaaaagu

SEQ ID NO: 1136239 - RNA, 19 nt, Artificial Sequence
  Description of Artificial Sequence: Synthetic oligonucleotide
aggugaugcccaagagaca

SEQ ID NO: 1136240 - RNA, 19 nt, Artificial Sequence
  Description of Artificial Sequence: Synthetic oligonucleotide
ggugaccuucucuuagcua

SEQ ID NO: 1136241 - RNA, 19 nt, Artificial Sequence
  Description of Artificial Sequence: Synthetic oligonucleotide
ggucuccuucagucgucag

SEQ ID NO: 1136242 - RNA, 19 nt, Artificial Sequence
  Description of Artificial Sequence: Synthetic oligonucleotide
agcccucggcugauguguc

SEQ ID NO: 1136243 - RNA, 19 nt, Artificial Sequence
  Description of Artificial Sequence: Synthetic oligonucleotide
gcaagaugcagugcccgga

SEQ ID NO: 1136244 - RNA, 19 nt, Artificial Sequence
  Description of Artificial Sequence: Synthetic oligonucleotide
uuaccaaggccggcuucuu

SEQ ID NO: 1136245 - RNA, 19 nt, Artificial Sequence
  Description of Artificial Sequence: Synthetic oligonucleotide
gaccugugugagacuuuca

SEQ ID NO: 1136246 - RNA, 19 nt, Artificial Sequence
  Description of Artificial Sequence: Synthetic oligonucleotide
aggccuagccgcccauauu

SEQ ID NO: 1136247 - RNA, 19 nt, Artificial Sequence
  Description of Artificial Sequence: Synthetic oligonucleotide
aucuucgguaagggcugcu

SEQ ID NO: 1136248 - RNA, 19 nt, Artificial Sequence
  Description of Artificial Sequence: Synthetic oligonucleotide
acgucgcccuggcccagug

SEQ ID NO: 1136249 - RNA, 19 nt, Artificial Sequence
  Description of Artificial Sequence: Synthetic oligonucleotide
gcuggucguuuuccuguug

SEQ ID NO: 1136250 - RNA, 19 nt, Artificial Sequence
  Description of Artificial Sequence: Synthetic oligonucleotide
ccaggacuuaguggaauuc

SEQ ID NO: 1136251 - RNA, 19 nt, Artificial Sequence
  Description of Artificial Sequence: Synthetic oligonucleotide
caggcauguccagcugcac

SEQ ID NO: 1136252 - RNA, 19 nt, Artificial Sequence
  Description of Artificial Sequence: Synthetic oligonucleotide
cugcugacacuuggaccac

SEQ ID NO: 1136253 - RNA, 19 nt, Artificial Sequence
  Description of Artificial Sequence: Synthetic oligonucleotide
ccauacacauggcccucac

SEQ ID NO: 1136254 - RNA, 19 nt, Artificial Sequence
  Description of Artificial Sequence: Synthetic oligonucleotide
gccgggaaaugaggguggg

SEQ ID NO: 1136255 - RNA, 19 nt, Artificial Sequence
  Description of Artificial Sequence: Synthetic oligonucleotide
aggagucgcucaaggcccu

SEQ ID NO: 1136256 - RNA, 19 nt, Artificial Sequence
  Description of Artificial Sequence: Synthetic oligonucleotide
gugcccggaguuccaagcu

SEQ ID NO: 1136257 - RNA, 19 nt, Artificial Sequence
  Description of Artificial Sequence: Synthetic oligonucleotide
acuccuguuuagagccaaa

SEQ ID NO: 1136258 - RNA, 19 nt, Artificial Sequence
  Description of Artificial Sequence: Synthetic oligonucleotide
gaguagaccuggccacuuu

SEQ ID NO: 1136259 - RNA, 19 nt, Artificial Sequence
  Description of Artificial Sequence: Synthetic oligonucleotide
gggugaccuucucuuagcu

SEQ ID NO: 1136260 - RNA, 19 nt, Artificial Sequence
  Description of Artificial Sequence: Synthetic oligonucleotide
cacccaggacuuaguggaa

SEQ ID NO: 1136261 - RNA, 19 nt, Artificial Sequence
  Description of Artificial Sequence: Synthetic oligonucleotide
gcccucacgggagauggca

SEQ ID NO: 1136262 - RNA, 19 nt, Artificial Sequence
  Description of Artificial Sequence: Synthetic oligonucleotide
ccuaggcauggguccauga

SEQ ID NO: 1136263 - RNA, 19 nt, Artificial Sequence
  Description of Artificial Sequence: Synthetic oligonucleotide
gacggccaccucgguuggc

SEQ ID NO: 1136264 - RNA, 19 nt, Artificial Sequence
  Description of Artificial Sequence: Synthetic oligonucleotide
gccgcccauauucagcccu

SEQ ID NO: 1136265 - RNA, 19 nt, Artificial Sequence
  Description of Artificial Sequence: Synthetic oligonucleotide
gcagccgggaaaugagggu

SEQ ID NO: 1136266 - RNA, 19 nt, Artificial Sequence
  Description of Artificial Sequence: Synthetic oligonucleotide
ccgcccauauucagcccug

SEQ ID NO: 1136267 - RNA, 19 nt, Artificial Sequence
  Description of Artificial Sequence: Synthetic oligonucleotide
gcccucggcugaugugucc

SEQ ID NO: 1136268 - RNA, 19 nt, Artificial Sequence
  Description of Artificial Sequence: Synthetic oligonucleotide
ggggcuugauggaguuccc

SEQ ID NO: 1136269 - RNA, 19 nt, Artificial Sequence
  Description of Artificial Sequence: Synthetic oligonucleotide
ccagcuguuugccagucau

SEQ ID NO: 1136270 - RNA, 19 nt, Artificial Sequence
  Description of Artificial Sequence: Synthetic oligonucleotide
gggcuugauggaguuccca

SEQ ID NO: 1136271 - RNA, 19 nt, Artificial Sequence
  Description of Artificial Sequence: Synthetic oligonucleotide
gggcaccaaaaccccugga

SEQ ID NO: 1136272 - RNA, 19 nt, Artificial Sequence
  Description of Artificial Sequence: Synthetic oligonucleotide
gaacagcuaguuggauuuu

SEQ ID NO: 1136273 - RNA, 19 nt, Artificial Sequence
  Description of Artificial Sequence: Synthetic oligonucleotide
caagcccgguucuguuuua

SEQ ID NO: 1136274 - RNA, 19 nt, Artificial Sequence
  Description of Artificial Sequence: Synthetic oligonucleotide
cgggaaaugagggugggua

SEQ ID NO: 1136275 - RNA, 19 nt, Artificial Sequence
  Description of Artificial Sequence: Synthetic oligonucleotide
cacccuccccaaggccuag

SEQ ID NO: 1136276 - RNA, 19 nt, Artificial Sequence
  Description of Artificial Sequence: Synthetic oligonucleotide
ccacuuuggcucagacaca

SEQ ID NO: 1136277 - RNA, 19 nt, Artificial Sequence
  Description of Artificial Sequence: Synthetic oligonucleotide
ccucacgggagauggcaaa

SEQ ID NO: 1136278 - RNA, 19 nt, Artificial Sequence
  Description of Artificial Sequence: Synthetic oligonucleotide
ccuucccaaggcacccuca

SEQ ID NO: 1136279 - RNA, 19 nt, Artificial Sequence
  Description of Artificial Sequence: Synthetic oligonucleotide
gggcuccaacaacccaauc

SEQ ID NO: 1136280 - RNA, 19 nt, Artificial Sequence
  Description of Artificial Sequence: Synthetic oligonucleotide
cacggccccgacauccccu

SEQ ID NO: 1136281 - RNA, 19 nt, Artificial Sequence
  Description of Artificial Sequence: Synthetic oligonucleotide
ggacuccuguuuagagcca

SEQ ID NO: 1136282 - RNA, 19 nt, Artificial Sequence
  Description of Artificial Sequence: Synthetic oligonucleotide
gccuagccgcccauauuca

SEQ ID NO: 1136283 - RNA, 19 nt, Artificial Sequence
  Description of Artificial Sequence: Synthetic oligonucleotide
gugaugcccaagagacagu

SEQ ID NO: 1136284 - RNA, 19 nt, Artificial Sequence
  Description of Artificial Sequence: Synthetic oligonucleotide
ggagucgcucaaggcccug

SEQ ID NO: 1136285 - RNA, 19 nt, Artificial Sequence
  Description of Artificial Sequence: Synthetic oligonucleotide
gagaccugugugagacuuu

SEQ ID NO: 1136286 - RNA, 19 nt, Artificial Sequence
  Description of Artificial Sequence: Synthetic oligonucleotide
cuaugcgcuuggguggcau

SEQ ID NO: 1136287 - RNA, 19 nt, Artificial Sequence
  Description of Artificial Sequence: Synthetic oligonucleotide
caccaagcccgguucuguu

SEQ ID NO: 1136288 - RNA, 19 nt, Artificial Sequence
  Description of Artificial Sequence: Synthetic oligonucleotide
ccaugacaacuggaucuga

SEQ ID NO: 1136289 - RNA, 19 nt, Artificial Sequence
  Description of Artificial Sequence: Synthetic oligonucleotide
cccucacgggagauggcaa

SEQ ID NO: 1136290 - RNA, 19 nt, Artificial Sequence
  Description of Artificial Sequence: Synthetic oligonucleotide
cuccuucagucgucagcau

SEQ ID NO: 1136291 - RNA, 19 nt, Artificial Sequence
  Description of Artificial Sequence: Synthetic oligonucleotide
cccgacauccccuggcuuu

SEQ ID NO: 1136292 - RNA, 19 nt, Artificial Sequence
  Description of Artificial Sequence: Synthetic oligonucleotide
ggcccucacgggagauggc

SEQ ID NO: 1136293 - RNA, 19 nt, Artificial Sequence
  Description of Artificial Sequence: Synthetic oligonucleotide
ccaagcccgguucuguuuu

SEQ ID NO: 1136294 - RNA, 19 nt, Artificial Sequence
  Description of Artificial Sequence: Synthetic oligonucleotide
ccgcacacggccccgacau

SEQ ID NO: 1136295 - RNA, 19 nt, Artificial Sequence
  Description of Artificial Sequence: Synthetic oligonucleotide
gcuaugcgcuuggguggca

SEQ ID NO: 1136296 - RNA, 19 nt, Artificial Sequence
  Description of Artificial Sequence: Synthetic oligonucleotide
ccaaggcacccucaucauu

SEQ ID NO: 1136297 - RNA, 19 nt, Artificial Sequence
  Description of Artificial Sequence: Synthetic oligonucleotide
ccugacggccaccucgguu

SEQ ID NO: 1136298 - RNA, 19 nt, Artificial Sequence
  Description of Artificial Sequence: Synthetic oligonucleotide
ccucggcugaugugucccu

SEQ ID NO: 1136299 - RNA, 19 nt, Artificial Sequence
  Description of Artificial Sequence: Synthetic oligonucleotide
cacgucgcccuggcccagu

SEQ ID NO: 1136300 - RNA, 19 nt, Artificial Sequence
  Description of Artificial Sequence: Synthetic oligonucleotide
ccgacauccccuggcuuuu

SEQ ID NO: 1136301 - RNA, 19 nt, Artificial Sequence
  Description of Artificial Sequence: Synthetic oligonucleotide
cggccaccucgguuggcaa

SEQ ID NO: 1136302 - RNA, 19 nt, Artificial Sequence
  Description of Artificial Sequence: Synthetic oligonucleotide
cgguuaccaaggccggcuu

SEQ ID NO: 1136303 - RNA, 19 nt, Artificial Sequence
  Description of Artificial Sequence: Synthetic oligonucleotide
ccccgacauccccuggcuu

SEQ ID NO: 1136304 - RNA, 19 nt, Artificial Sequence
  Description of Artificial Sequence: Synthetic oligonucleotide
cccugacggccaccucggu

SEQ ID NO: 1136305 - RNA, 19 nt, Artificial Sequence
  Description of Artificial Sequence: Synthetic oligonucleotide
aaauucaugaaacuggccc

SEQ ID NO: 1136306 - RNA, 19 nt, Artificial Sequence
  Description of Artificial Sequence: Synthetic oligonucleotide
aguauuagaaacuugauuc

SEQ ID NO: 1136307 - RNA, 19 nt, Artificial Sequence
  Description of Artificial Sequence: Synthetic oligonucleotide
aaauaauaaacauggagac

SEQ ID NO: 1136308 - RNA, 19 nt, Artificial Sequence
  Description of Artificial Sequence: Synthetic oligonucleotide
uuuuauaccacuuuauucc

SEQ ID NO: 1136309 - RNA, 19 nt, Artificial Sequence
  Description of Artificial Sequence: Synthetic oligonucleotide
aaaauuaagcucaaaacac

SEQ ID NO: 1136310 - RNA, 19 nt, Artificial Sequence
  Description of Artificial Sequence: Synthetic oligonucleotide
uguagugucaucaagacac

SEQ ID NO: 1136311 - RNA, 19 nt, Artificial Sequence
  Description of Artificial Sequence: Synthetic oligonucleotide
uauguaauggccaacagug

SEQ ID NO: 1136312 - RNA, 19 nt, Artificial Sequence
  Description of Artificial Sequence: Synthetic oligonucleotide
uuuauuaugguucuagcca

SEQ ID NO: 1136313 - RNA, 19 nt, Artificial Sequence
  Description of Artificial Sequence: Synthetic oligonucleotide
aaauaccuaaaauaauuag

SEQ ID NO: 1136314 - RNA, 19 nt, Artificial Sequence
  Description of Artificial Sequence: Synthetic oligonucleotide
aacagauuaaaucaucuga

SEQ ID NO: 1136315 - RNA, 19 nt, Artificial Sequence
  Description of Artificial Sequence: Synthetic oligonucleotide
agcagauugacacuuaaac

SEQ ID NO: 1136316 - RNA, 19 nt, Artificial Sequence
  Description of Artificial Sequence: Synthetic oligonucleotide
agauuaaaucaucugacac

SEQ ID NO: 1136317 - RNA, 19 nt, Artificial Sequence
  Description of Artificial Sequence: Synthetic oligonucleotide
aauuccuaaaugaacuucc

SEQ ID NO: 1136318 - RNA, 19 nt, Artificial Sequence
  Description of Artificial Sequence: Synthetic oligonucleotide
uccuaaaugaacuuccagg

SEQ ID NO: 1136319 - RNA, 19 nt, Artificial Sequence
  Description of Artificial Sequence: Synthetic oligonucleotide
cagauugacacuuaaacag

SEQ ID NO: 1136320 - RNA, 19 nt, Artificial Sequence
  Description of Artificial Sequence: Synthetic oligonucleotide
ucugcuagcagauugacac

SEQ ID NO: 1136321 - RNA, 19 nt, Artificial Sequence
  Description of Artificial Sequence: Synthetic oligonucleotide
uuaaaaugcauucaucagu

SEQ ID NO: 1136322 - RNA, 19 nt, Artificial Sequence
  Description of Artificial Sequence: Synthetic oligonucleotide
aaauaauuagcuguuuuag

SEQ ID NO: 1136323 - RNA, 19 nt, Artificial Sequence
  Description of Artificial Sequence: Synthetic oligonucleotide
caaauuugaaagaaguccc

SEQ ID NO: 1136324 - RNA, 19 nt, Artificial Sequence
  Description of Artificial Sequence: Synthetic oligonucleotide
aaaugaacuuccaggaugc

SEQ ID NO: 1136325 - RNA, 19 nt, Artificial Sequence
  Description of Artificial Sequence: Synthetic oligonucleotide
uagugcaacauacugauca

SEQ ID NO: 1136326 - RNA, 19 nt, Artificial Sequence
  Description of Artificial Sequence: Synthetic oligonucleotide
uuuucacucaaauuuuagg

SEQ ID NO: 1136327 - RNA, 19 nt, Artificial Sequence
  Description of Artificial Sequence: Synthetic oligonucleotide
accacuauccauuaaaaug

SEQ ID NO: 1136328 - RNA, 19 nt, Artificial Sequence
  Description of Artificial Sequence: Synthetic oligonucleotide
uuucacucaaauuuuagga

SEQ ID NO: 1136329 - RNA, 19 nt, Artificial Sequence
  Description of Artificial Sequence: Synthetic oligonucleotide
aaugguacucucuugaaau

SEQ ID NO: 1136330 - RNA, 19 nt, Artificial Sequence
  Description of Artificial Sequence: Synthetic oligonucleotide
auuguaauacuuauguuac

SEQ ID NO: 1136331 - RNA, 19 nt, Artificial Sequence
  Description of Artificial Sequence: Synthetic oligonucleotide
acaaauuguagguacagug

SEQ ID NO: 1136332 - RNA, 19 nt, Artificial Sequence
  Description of Artificial Sequence: Synthetic oligonucleotide
aaauuuuaggaguaaugga

SEQ ID NO: 1136333 - RNA, 19 nt, Artificial Sequence
  Description of Artificial Sequence: Synthetic oligonucleotide
uuuguauacgcuuaggcaa

SEQ ID NO: 1136334 - RNA, 19 nt, Artificial Sequence
  Description of Artificial Sequence: Synthetic oligonucleotide
uuacuaauaacauuguaau

SEQ ID NO: 1136335 - RNA, 19 nt, Artificial Sequence
  Description of Artificial Sequence: Synthetic oligonucleotide
uguugaagagcucacacga

SEQ ID NO: 1136336 - RNA, 19 nt, Artificial Sequence
  Description of Artificial Sequence: Synthetic oligonucleotide
uuaguaacuguacauuuug

SEQ ID NO: 1136337 - RNA, 19 nt, Artificial Sequence
  Description of Artificial Sequence: Synthetic oligonucleotide
accuaaaauaauuagugca

SEQ ID NO: 1136338 - RNA, 19 nt, Artificial Sequence
  Description of Artificial Sequence: Synthetic oligonucleotide
aauaccuaaaauaauuagu

SEQ ID NO: 1136339 - RNA, 19 nt, Artificial Sequence
  Description of Artificial Sequence: Synthetic oligonucleotide
cuuuauuccaaccugagca

SEQ ID NO: 1136340 - RNA, 19 nt, Artificial Sequence
  Description of Artificial Sequence: Synthetic oligonucleotide
uugaguuauuguaaaaugu

SEQ ID NO: 1136341 - RNA, 19 nt, Artificial Sequence
  Description of Artificial Sequence: Synthetic oligonucleotide
uucacucaaauuuuaggag

SEQ ID NO: 1136342 - RNA, 19 nt, Artificial Sequence
  Description of Artificial Sequence: Synthetic oligonucleotide
uccaugaauaauaaacugu

SEQ ID NO: 1136343 - RNA, 19 nt, Artificial Sequence
  Description of Artificial Sequence: Synthetic oligonucleotide
uguuacaaauuguagguac

SEQ ID NO: 1136344 - RNA, 19 nt, Artificial Sequence
  Description of Artificial Sequence: Synthetic oligonucleotide
aauucaugaaacuggcccu

SEQ ID NO: 1136345 - RNA, 19 nt, Artificial Sequence
  Description of Artificial Sequence: Synthetic oligonucleotide
uaauacuuauguuacaaau

SEQ ID NO: 1136346 - RNA, 19 nt, Artificial Sequence
  Description of Artificial Sequence: Synthetic oligonucleotide
uugacacuuaaacagauua

SEQ ID NO: 1136347 - RNA, 19 nt, Artificial Sequence
  Description of Artificial Sequence: Synthetic oligonucleotide
aaagagaaaucagacaccu

SEQ ID NO: 1136348 - RNA, 19 nt, Artificial Sequence
  Description of Artificial Sequence: Synthetic oligonucleotide
aagcuaucacaauauuagg

SEQ ID NO: 1136349 - RNA, 19 nt, Artificial Sequence
  Description of Artificial Sequence: Synthetic oligonucleotide
ucuuucuggagaaaauacc

SEQ ID NO: 1136350 - RNA, 19 nt, Artificial Sequence
  Description of Artificial Sequence: Synthetic oligonucleotide
uaauuuugaguuauuguaa

SEQ ID NO: 1136351 - RNA, 19 nt, Artificial Sequence
  Description of Artificial Sequence: Synthetic oligonucleotide
aaaacuaaacccuggugaa

SEQ ID NO: 1136352 - RNA, 19 nt, Artificial Sequence
  Description of Artificial Sequence: Synthetic oligonucleotide
ugcaguacucuauuuacag

SEQ ID NO: 1136353 - RNA, 19 nt, Artificial Sequence
  Description of Artificial Sequence: Synthetic oligonucleotide
agucccuaauuucaaauuc

SEQ ID NO: 1136354 - RNA, 19 nt, Artificial Sequence
  Description of Artificial Sequence: Synthetic oligonucleotide
auaccuaaaauaauuagug

SEQ ID NO: 1136355 - RNA, 19 nt, Artificial Sequence
  Description of Artificial Sequence: Synthetic oligonucleotide
aaaacaagguuucaagauu

SEQ ID NO: 1136356 - RNA, 19 nt, Artificial Sequence
  Description of Artificial Sequence: Synthetic oligonucleotide
uaugguucuagccauguaa

SEQ ID NO: 1136357 - RNA, 19 nt, Artificial Sequence
  Description of Artificial Sequence: Synthetic oligonucleotide
ugaauguacauaauuguua

SEQ ID NO: 1136358 - RNA, 19 nt, Artificial Sequence
  Description of Artificial Sequence: Synthetic oligonucleotide
ucuaccauaagucucuuuu

SEQ ID NO: 1136359 - RNA, 19 nt, Artificial Sequence
  Description of Artificial Sequence: Synthetic oligonucleotide
acagauuaaaucaucugac

SEQ ID NO: 1136360 - RNA, 19 nt, Artificial Sequence
  Description of Artificial Sequence: Synthetic oligonucleotide
auaauuagcuguuuuagua

SEQ ID NO: 1136361 - RNA, 19 nt, Artificial Sequence
  Description of Artificial Sequence: Synthetic oligonucleotide
acuaauuuugaguuauugu

SEQ ID NO: 1136362 - RNA, 19 nt, Artificial Sequence
  Description of Artificial Sequence: Synthetic oligonucleotide
accaaucauguccaaaagg

SEQ ID NO: 1136363 - RNA, 19 nt, Artificial Sequence
  Description of Artificial Sequence: Synthetic oligonucleotide
ugaguuauuguaaaaugua

SEQ ID NO: 1136364 - RNA, 19 nt, Artificial Sequence
  Description of Artificial Sequence: Synthetic oligonucleotide
uaucccauauuucaaauuu

SEQ ID NO: 1136365 - RNA, 19 nt, Artificial Sequence
  Description of Artificial Sequence: Synthetic oligonucleotide
uucauauaauggaaauacc

SEQ ID NO: 1136366 - RNA, 19 nt, Artificial Sequence
  Description of Artificial Sequence: Synthetic oligonucleotide
uguacauuuuguauacgcu

SEQ ID NO: 1136367 - RNA, 19 nt, Artificial Sequence
  Description of Artificial Sequence: Synthetic oligonucleotide
caucaagacacacaguuug

SEQ ID NO: 1136368 - RNA, 19 nt, Artificial Sequence
  Description of Artificial Sequence: Synthetic oligonucleotide
aaauuguagguacaguguu

SEQ ID NO: 1136369 - RNA, 19 nt, Artificial Sequence
  Description of Artificial Sequence: Synthetic oligonucleotide
uccuagaaguaccaguuug

SEQ ID NO: 1136370 - RNA, 19 nt, Artificial Sequence
  Description of Artificial Sequence: Synthetic oligonucleotide
auuacuaauaacauuguaa

SEQ ID NO: 1136371 - RNA, 19 nt, Artificial Sequence
  Description of Artificial Sequence: Synthetic oligonucleotide
uacuguagugucaucaaga

SEQ ID NO: 1136372 - RNA, 19 nt, Artificial Sequence
  Description of Artificial Sequence: Synthetic oligonucleotide
aacacaugcauguuauuaa

SEQ ID NO: 1136373 - RNA, 19 nt, Artificial Sequence
  Description of Artificial Sequence: Synthetic oligonucleotide
caguauuuggcccauuggg

SEQ ID NO: 1136374 - RNA, 19 nt, Artificial Sequence
  Description of Artificial Sequence: Synthetic oligonucleotide
uuccuuacuaauuuugagu

SEQ ID NO: 1136375 - RNA, 19 nt, Artificial Sequence
  Description of Artificial Sequence: Synthetic oligonucleotide
cuaauuuugaguuauugua

SEQ ID NO: 1136376 - RNA, 19 nt, Artificial Sequence
  Description of Artificial Sequence: Synthetic oligonucleotide
cauugggccggcuaaaugc

SEQ ID NO: 1136377 - RNA, 19 nt, Artificial Sequence
  Description of Artificial Sequence: Synthetic oligonucleotide
uccucgacuagccaugucc

SEQ ID NO: 1136378 - RNA, 19 nt, Artificial Sequence
  Description of Artificial Sequence: Synthetic oligonucleotide
aauuagugcaacauacuga

SEQ ID NO: 1136379 - RNA, 19 nt, Artificial Sequence
  Description of Artificial Sequence: Synthetic oligonucleotide
uuuggaagucacauugggc

SEQ ID NO: 1136380 - RNA, 19 nt, Artificial Sequence
  Description of Artificial Sequence: Synthetic oligonucleotide
uaccuaaaauaauuagugc

SEQ ID NO: 1136381 - RNA, 19 nt, Artificial Sequence
  Description of Artificial Sequence: Synthetic oligonucleotide
ucacucaaauuuuaggagu

SEQ ID NO: 1136382 - RNA, 19 nt, Artificial Sequence
  Description of Artificial Sequence: Synthetic oligonucleotide
agaaacuugauucuaccau

SEQ ID NO: 1136383 - RNA, 19 nt, Artificial Sequence
  Description of Artificial Sequence: Synthetic oligonucleotide
gguagauuucauauaaugg

SEQ ID NO: 1136384 - RNA, 19 nt, Artificial Sequence
  Description of Artificial Sequence: Synthetic oligonucleotide
uguuuccugacaaagcuau

SEQ ID NO: 1136385 - RNA, 19 nt, Artificial Sequence
  Description of Artificial Sequence: Synthetic oligonucleotide
ucugaaguucuuuaaccca

SEQ ID NO: 1136386 - RNA, 19 nt, Artificial Sequence
  Description of Artificial Sequence: Synthetic oligonucleotide
uguuuauuaugguucuagc

SEQ ID NO: 1136387 - RNA, 19 nt, Artificial Sequence
  Description of Artificial Sequence: Synthetic oligonucleotide
uaauuguuagugcacugac

SEQ ID NO: 1136388 - RNA, 19 nt, Artificial Sequence
  Description of Artificial Sequence: Synthetic oligonucleotide
agcucuuuuauuugcuagg

SEQ ID NO: 1136389 - RNA, 19 nt, Artificial Sequence
  Description of Artificial Sequence: Synthetic oligonucleotide
uuuuaggaguaauggaaga

SEQ ID NO: 1136390 - RNA, 19 nt, Artificial Sequence
  Description of Artificial Sequence: Synthetic oligonucleotide
auaccacuuuauuccaacc

SEQ ID NO: 1136391 - RNA, 19 nt, Artificial Sequence
  Description of Artificial Sequence: Synthetic oligonucleotide
uacauaauuguuagugcac

SEQ ID NO: 1136392 - RNA, 19 nt, Artificial Sequence
  Description of Artificial Sequence: Synthetic oligonucleotide
caagauuauuacuaauaac

SEQ ID NO: 1136393 - RNA, 19 nt, Artificial Sequence
  Description of Artificial Sequence: Synthetic oligonucleotide
uugauucuaccauaagucu

SEQ ID NO: 1136394 - RNA, 19 nt, Artificial Sequence
  Description of Artificial Sequence: Synthetic oligonucleotide
uaucacaauauuaggacuu

SEQ ID NO: 1136395 - RNA, 19 nt, Artificial Sequence
  Description of Artificial Sequence: Synthetic oligonucleotide
aacuauggcugcuugugcu

SEQ ID NO: 1136396 - RNA, 19 nt, Artificial Sequence
  Description of Artificial Sequence: Synthetic oligonucleotide
uccuuacuaauuuugaguu

SEQ ID NO: 1136397 - RNA, 19 nt, Artificial Sequence
  Description of Artificial Sequence: Synthetic oligonucleotide
aguacauuggugcuaggcu

SEQ ID NO: 1136398 - RNA, 19 nt, Artificial Sequence
  Description of Artificial Sequence: Synthetic oligonucleotide
ugacaaagcuaucacaaua

SEQ ID NO: 1136399 - RNA, 19 nt, Artificial Sequence
  Description of Artificial Sequence: Synthetic oligonucleotide
auuaaaucaucugacacau

SEQ ID NO: 1136400 - RNA, 19 nt, Artificial Sequence
  Description of Artificial Sequence: Synthetic oligonucleotide
acuugcuugccucugaagu

SEQ ID NO: 1136401 - RNA, 19 nt, Artificial Sequence
  Description of Artificial Sequence: Synthetic oligonucleotide
uuuggguuagaaaggcagc

SEQ ID NO: 1136402 - RNA, 19 nt, Artificial Sequence
  Description of Artificial Sequence: Synthetic oligonucleotide
acaagaugggguuacacau

SEQ ID NO: 1136403 - RNA, 19 nt, Artificial Sequence
  Description of Artificial Sequence: Synthetic oligonucleotide
uucuagccauguaagaaca

SEQ ID NO: 1136404 - RNA, 19 nt, Artificial Sequence
  Description of Artificial Sequence: Synthetic oligonucleotide
cugaaguucuuuaacccag

SEQ ID NO: 1136405 - RNA, 19 nt, Artificial Sequence
  Description of Artificial Sequence: Synthetic oligonucleotide
ugauucuaccauaagucuc

SEQ ID NO: 1136406 - RNA, 19 nt, Artificial Sequence
  Description of Artificial Sequence: Synthetic oligonucleotide
uugaauguacauaauuguu

SEQ ID NO: 1136407 - RNA, 19 nt, Artificial Sequence
  Description of Artificial Sequence: Synthetic oligonucleotide
uuauuaugguucuagccau

SEQ ID NO: 1136408 - RNA, 19 nt, Artificial Sequence
  Description of Artificial Sequence: Synthetic oligonucleotide
uuacuguagugucaucaag

SEQ ID NO: 1136409 - RNA, 19 nt, Artificial Sequence
  Description of Artificial Sequence: Synthetic oligonucleotide
uuuauuccaaccugagcac

SEQ ID NO: 1136410 - RNA, 19 nt, Artificial Sequence
  Description of Artificial Sequence: Synthetic oligonucleotide
cuuuucacucaaauuuuag

SEQ ID NO: 1136411 - RNA, 19 nt, Artificial Sequence
  Description of Artificial Sequence: Synthetic oligonucleotide
aguuugaauguacauaauu

SEQ ID NO: 1136412 - RNA, 19 nt, Artificial Sequence
  Description of Artificial Sequence: Synthetic oligonucleotide
ugauaucauacacaacuau

SEQ ID NO: 1136413 - RNA, 19 nt, Artificial Sequence
  Description of Artificial Sequence: Synthetic oligonucleotide
cuugauuugccaacagcag

SEQ ID NO: 1136414 - RNA, 19 nt, Artificial Sequence
  Description of Artificial Sequence: Synthetic oligonucleotide
uacuaauuuugaguuauug

SEQ ID NO: 1136415 - RNA, 19 nt, Artificial Sequence
  Description of Artificial Sequence: Synthetic oligonucleotide
uuaggaaguucacacugga

SEQ ID NO: 1136416 - RNA, 19 nt, Artificial Sequence
  Description of Artificial Sequence: Synthetic oligonucleotide
guacauaauuguuagugca

SEQ ID NO: 1136417 - RNA, 19 nt, Artificial Sequence
  Description of Artificial Sequence: Synthetic oligonucleotide
cacgaagggaccacuaucc

SEQ ID NO: 1136418 - RNA, 19 nt, Artificial Sequence
  Description of Artificial Sequence: Synthetic oligonucleotide
guuuggguuagaaaggcag

SEQ ID NO: 1136419 - RNA, 19 nt, Artificial Sequence
  Description of Artificial Sequence: Synthetic oligonucleotide
uauacgcuuaggcaauucu

SEQ ID NO: 1136420 - RNA, 19 nt, Artificial Sequence
  Description of Artificial Sequence: Synthetic oligonucleotide
aaagaaauaauuagcuguu

SEQ ID NO: 1136421 - RNA, 19 nt, Artificial Sequence
  Description of Artificial Sequence: Synthetic oligonucleotide
uaaggucuacuccucgucc

SEQ ID NO: 1136422 - RNA, 19 nt, Artificial Sequence
  Description of Artificial Sequence: Synthetic oligonucleotide
aauguacauaauuguuagu

SEQ ID NO: 1136423 - RNA, 19 nt, Artificial Sequence
  Description of Artificial Sequence: Synthetic oligonucleotide
aaacuaaacccuggugaac

SEQ ID NO: 1136424 - RNA, 19 nt, Artificial Sequence
  Description of Artificial Sequence: Synthetic oligonucleotide
uagaaacuugauucuacca

SEQ ID NO: 1136425 - RNA, 19 nt, Artificial Sequence
  Description of Artificial Sequence: Synthetic oligonucleotide
aguuauuguaaaauguaca

SEQ ID NO: 1136426 - RNA, 19 nt, Artificial Sequence
  Description of Artificial Sequence: Synthetic oligonucleotide
uuaggaguaauggaagaac

SEQ ID NO: 1136427 - RNA, 19 nt, Artificial Sequence
  Description of Artificial Sequence: Synthetic oligonucleotide
uaccacuuuauuccaaccu

SEQ ID NO: 1136428 - RNA, 19 nt, Artificial Sequence
  Description of Artificial Sequence: Synthetic oligonucleotide
agagcucacacgaagggac

SEQ ID NO: 1136429 - RNA, 19 nt, Artificial Sequence
  Description of Artificial Sequence: Synthetic oligonucleotide
ucugugguucauucuuugg

SEQ ID NO: 1136430 - RNA, 19 nt, Artificial Sequence
  Description of Artificial Sequence: Synthetic oligonucleotide
ucaaguuugaauguacaua

SEQ ID NO: 1136431 - RNA, 19 nt, Artificial Sequence
  Description of Artificial Sequence: Synthetic oligonucleotide
acuggaguucaguuacuac

SEQ ID NO: 1136432 - RNA, 19 nt, Artificial Sequence
  Description of Artificial Sequence: Synthetic oligonucleotide
ucuccuagaaguaccaguu

SEQ ID NO: 1136433 - RNA, 19 nt, Artificial Sequence
  Description of Artificial Sequence: Synthetic oligonucleotide
auaggacugugcuuccugg

SEQ ID NO: 1136434 - RNA, 19 nt, Artificial Sequence
  Description of Artificial Sequence: Synthetic oligonucleotide
ugacacaugguagauuuca

SEQ ID NO: 1136435 - RNA, 19 nt, Artificial Sequence
  Description of Artificial Sequence: Synthetic oligonucleotide
acauuuuguauacgcuuag

SEQ ID NO: 1136436 - RNA, 19 nt, Artificial Sequence
  Description of Artificial Sequence: Synthetic oligonucleotide
aaauuuuacuguaguguca

SEQ ID NO: 1136437 - RNA, 19 nt, Artificial Sequence
  Description of Artificial Sequence: Synthetic oligonucleotide
uuacaguacagcugaagau

SEQ ID NO: 1136438 - RNA, 19 nt, Artificial Sequence
  Description of Artificial Sequence: Synthetic oligonucleotide
ugacacuuaaacagauuaa

SEQ ID NO: 1136439 - RNA, 19 nt, Artificial Sequence
  Description of Artificial Sequence: Synthetic oligonucleotide
aguuugaacuggcaaauuu

SEQ ID NO: 1136440 - RNA, 19 nt, Artificial Sequence
  Description of Artificial Sequence: Synthetic oligonucleotide
ucaguauuagaaacuugau

SEQ ID NO: 1136441 - RNA, 19 nt, Artificial Sequence
  Description of Artificial Sequence: Synthetic oligonucleotide
guuacuacaacacuggcuu

SEQ ID NO: 1136442 - RNA, 19 nt, Artificial Sequence
  Description of Artificial Sequence: Synthetic oligonucleotide
uaauaaacauggagacuac

SEQ ID NO: 1136443 - RNA, 19 nt, Artificial Sequence
  Description of Artificial Sequence: Synthetic oligonucleotide
acuacaaugcaguacucua

SEQ ID NO: 1136444 - RNA, 19 nt, Artificial Sequence
  Description of Artificial Sequence: Synthetic oligonucleotide
uuucaagauuauuacuaau

SEQ ID NO: 1136445 - RNA, 19 nt, Artificial Sequence
  Description of Artificial Sequence: Synthetic oligonucleotide
acaguuuggguuagaaagg

SEQ ID NO: 1136446 - RNA, 19 nt, Artificial Sequence
  Description of Artificial Sequence: Synthetic oligonucleotide
aguacucuauuuacaguac

SEQ ID NO: 1136447 - RNA, 19 nt, Artificial Sequence
  Description of Artificial Sequence: Synthetic oligonucleotide
uuuaggaguaauggaagaa

SEQ ID NO: 1136448 - RNA, 19 nt, Artificial Sequence
  Description of Artificial Sequence: Synthetic oligonucleotide
agacaccugguuuguuucc

SEQ ID NO: 1136449 - RNA, 19 nt, Artificial Sequence
  Description of Artificial Sequence: Synthetic oligonucleotide
uauuccaaccugagcaccu

SEQ ID NO: 1136450 - RNA, 19 nt, Artificial Sequence
  Description of Artificial Sequence: Synthetic oligonucleotide
uacgcuuaggcaauucuua

SEQ ID NO: 1136451 - RNA, 19 nt, Artificial Sequence
  Description of Artificial Sequence: Synthetic oligonucleotide
auaauuguuagugcacuga

SEQ ID NO: 1136452 - RNA, 19 nt, Artificial Sequence
  Description of Artificial Sequence: Synthetic oligonucleotide
acaacuauggcugcuugug

SEQ ID NO: 1136453 - RNA, 19 nt, Artificial Sequence
  Description of Artificial Sequence: Synthetic oligonucleotide
uaguacauuggugcuaggc

SEQ ID NO: 1136454 - RNA, 19 nt, Artificial Sequence
  Description of Artificial Sequence: Synthetic oligonucleotide
gcacugaccaaucaugucc

SEQ ID NO: 1136455 - RNA, 19 nt, Artificial Sequence
  Description of Artificial Sequence: Synthetic oligonucleotide
ugcuaggucagcuuuguuu

SEQ ID NO: 1136456 - RNA, 19 nt, Artificial Sequence
  Description of Artificial Sequence: Synthetic oligonucleotide
aaagcgaagcacaaggcuu

SEQ ID NO: 1136457 - RNA, 19 nt, Artificial Sequence
  Description of Artificial Sequence: Synthetic oligonucleotide
ucuagccauguaagaacag

SEQ ID NO: 1136458 - RNA, 19 nt, Artificial Sequence
  Description of Artificial Sequence: Synthetic oligonucleotide
agacucuccuagaaguacc

SEQ ID NO: 1136459 - RNA, 19 nt, Artificial Sequence
  Description of Artificial Sequence: Synthetic oligonucleotide
gaaaauaccuggggcgcgg

SEQ ID NO: 1136460 - RNA, 19 nt, Artificial Sequence
  Description of Artificial Sequence: Synthetic oligonucleotide
uacuaauaacauuguaaua

SEQ ID NO: 1136461 - RNA, 19 nt, Artificial Sequence
  Description of Artificial Sequence: Synthetic oligonucleotide
uccauuuaggaaguucaca

SEQ ID NO: 1136462 - RNA, 19 nt, Artificial Sequence
  Description of Artificial Sequence: Synthetic oligonucleotide
uuccugacaaagcuaucac

SEQ ID NO: 1136463 - RNA, 19 nt, Artificial Sequence
  Description of Artificial Sequence: Synthetic oligonucleotide
uccugacaaagcuaucaca

SEQ ID NO: 1136464 - RNA, 19 nt, Artificial Sequence
  Description of Artificial Sequence: Synthetic oligonucleotide
uaccaguuugaacuggcaa

SEQ ID NO: 1136465 - RNA, 19 nt, Artificial Sequence
  Description of Artificial Sequence: Synthetic oligonucleotide
auuuugaguuauuguaaaa

SEQ ID NO: 1136466 - RNA, 19 nt, Artificial Sequence
  Description of Artificial Sequence: Synthetic oligonucleotide
cagugauuaaagagaaauc

SEQ ID NO: 1136467 - RNA, 19 nt, Artificial Sequence
  Description of Artificial Sequence: Synthetic oligonucleotide
cagcucuuuuauuugcuag

SEQ ID NO: 1136468 - RNA, 19 nt, Artificial Sequence
  Description of Artificial Sequence: Synthetic oligonucleotide
uuguauacgcuuaggcaau

SEQ ID NO: 1136469 - RNA, 19 nt, Artificial Sequence
  Description of Artificial Sequence: Synthetic oligonucleotide
uuauuccaaccugagcacc

SEQ ID NO: 1136470 - RNA, 19 nt, Artificial Sequence
  Description of Artificial Sequence: Synthetic oligonucleotide
gaugggguuacacaugacu

SEQ ID NO: 1136471 - RNA, 19 nt, Artificial Sequence
  Description of Artificial Sequence: Synthetic oligonucleotide
auauuaggacuugcuugcc

SEQ ID NO: 1136472 - RNA, 19 nt, Artificial Sequence
  Description of Artificial Sequence: Synthetic oligonucleotide
aaccagagcucccucccug

SEQ ID NO: 1136473 - RNA, 19 nt, Artificial Sequence
  Description of Artificial Sequence: Synthetic oligonucleotide
uugaacuggcaaauuuuau

SEQ ID NO: 1136474 - RNA, 19 nt, Artificial Sequence
  Description of Artificial Sequence: Synthetic oligonucleotide
guaaaauguacaaguucug

SEQ ID NO: 1136475 - RNA, 19 nt, Artificial Sequence
  Description of Artificial Sequence: Synthetic oligonucleotide
caguacucuauuuacagua

SEQ ID NO: 1136476 - RNA, 19 nt, Artificial Sequence
  Description of Artificial Sequence: Synthetic oligonucleotide
auaauuagugcaacauacu

SEQ ID NO: 1136477 - RNA, 19 nt, Artificial Sequence
  Description of Artificial Sequence: Synthetic oligonucleotide
ccaaucauguccaaaagga

SEQ ID NO: 1136478 - RNA, 19 nt, Artificial Sequence
  Description of Artificial Sequence: Synthetic oligonucleotide
uuauaccacuuuauuccaa

SEQ ID NO: 1136479 - RNA, 19 nt, Artificial Sequence
  Description of Artificial Sequence: Synthetic oligonucleotide
uacauuggugcuaggcuau

SEQ ID NO: 1136480 - RNA, 19 nt, Artificial Sequence
  Description of Artificial Sequence: Synthetic oligonucleotide
aguauuuggcccauugggu

SEQ ID NO: 1136481 - RNA, 19 nt, Artificial Sequence
  Description of Artificial Sequence: Synthetic oligonucleotide
aagcgaagcacaaggcuug

SEQ ID NO: 1136482 - RNA, 19 nt, Artificial Sequence
  Description of Artificial Sequence: Synthetic oligonucleotide
agaaaauaccuggggcgcg

SEQ ID NO: 1136483 - RNA, 19 nt, Artificial Sequence
  Description of Artificial Sequence: Synthetic oligonucleotide
gcuaugguaccguucuugg

SEQ ID NO: 1136484 - RNA, 19 nt, Artificial Sequence
  Description of Artificial Sequence: Synthetic oligonucleotide
cagauuaaaucaucugaca

SEQ ID NO: 1136485 - RNA, 19 nt, Artificial Sequence
  Description of Artificial Sequence: Synthetic oligonucleotide
cuaauaacauuguaauacu

SEQ ID NO: 1136486 - RNA, 19 nt, Artificial Sequence
  Description of Artificial Sequence: Synthetic oligonucleotide
augguucuagccauguaag

SEQ ID NO: 1136487 - RNA, 19 nt, Artificial Sequence
  Description of Artificial Sequence: Synthetic oligonucleotide
uucugcuagcagauugaca

SEQ ID NO: 1136488 - RNA, 19 nt, Artificial Sequence
  Description of Artificial Sequence: Synthetic oligonucleotide
aucaagacacacaguuugg

SEQ ID NO: 1136489 - RNA, 19 nt, Artificial Sequence
  Description of Artificial Sequence: Synthetic oligonucleotide
ugggccggcuaaaugcucc

SEQ ID NO: 1136490 - RNA, 19 nt, Artificial Sequence
  Description of Artificial Sequence: Synthetic oligonucleotide
acuagccauguccaaauuu

SEQ ID NO: 1136491 - RNA, 19 nt, Artificial Sequence
  Description of Artificial Sequence: Synthetic oligonucleotide
ugcuccucgacuagccaug

SEQ ID NO: 1136492 - RNA, 19 nt, Artificial Sequence
  Description of Artificial Sequence: Synthetic oligonucleotide
ccuaaaugaacuuccagga

SEQ ID NO: 1136493 - RNA, 19 nt, Artificial Sequence
  Description of Artificial Sequence: Synthetic oligonucleotide
agauugacacuuaaacaga

SEQ ID NO: 1136494 - RNA, 19 nt, Artificial Sequence
  Description of Artificial Sequence: Synthetic oligonucleotide
auuguaaaauguacaaguu

SEQ ID NO: 1136495 - RNA, 19 nt, Artificial Sequence
  Description of Artificial Sequence: Synthetic oligonucleotide
guacaaguucugcuagcag

SEQ ID NO: 1136496 - RNA, 19 nt, Artificial Sequence
  Description of Artificial Sequence: Synthetic oligonucleotide
cuaugguaccguucuuggc

SEQ ID NO: 1136497 - RNA, 19 nt, Artificial Sequence
  Description of Artificial Sequence: Synthetic oligonucleotide
ugguucuagccauguaaga

SEQ ID NO: 1136498 - RNA, 19 nt, Artificial Sequence
  Description of Artificial Sequence: Synthetic oligonucleotide
auuaugguucuagccaugu

SEQ ID NO: 1136499 - RNA, 19 nt, Artificial Sequence
  Description of Artificial Sequence: Synthetic oligonucleotide
agauuucauauaauggaaa

SEQ ID NO: 1136500 - RNA, 19 nt, Artificial Sequence
  Description of Artificial Sequence: Synthetic oligonucleotide
uuaggacuugcuugccucu

SEQ ID NO: 1136501 - RNA, 19 nt, Artificial Sequence
  Description of Artificial Sequence: Synthetic oligonucleotide
uuguuuccugacaaagcua

SEQ ID NO: 1136502 - RNA, 19 nt, Artificial Sequence
  Description of Artificial Sequence: Synthetic oligonucleotide
gguuucaagauuauuacua

SEQ ID NO: 1136503 - RNA, 19 nt, Artificial Sequence
  Description of Artificial Sequence: Synthetic oligonucleotide
aucacaauauuaggacuug

SEQ ID NO: 1136504 - RNA, 19 nt, Artificial Sequence
  Description of Artificial Sequence: Synthetic oligonucleotide
aagaaauaauuagcuguuu

SEQ ID NO: 1136505 - RNA, 19 nt, Artificial Sequence
  Description of Artificial Sequence: Synthetic oligonucleotide
cucaguaaggucuacuccu

SEQ ID NO: 1136506 - RNA, 19 nt, Artificial Sequence
  Description of Artificial Sequence: Synthetic oligonucleotide
cauguccaaauuugaaaga

SEQ ID NO: 1136507 - RNA, 19 nt, Artificial Sequence
  Description of Artificial Sequence: Synthetic oligonucleotide
caguaaggucuacuccucg

SEQ ID NO: 1136508 - RNA, 19 nt, Artificial Sequence
  Description of Artificial Sequence: Synthetic oligonucleotide
agugcaacauacugaucaa

SEQ ID NO: 1136509 - RNA, 19 nt, Artificial Sequence
  Description of Artificial Sequence: Synthetic oligonucleotide
uggguuagaaaggcagccc

SEQ ID NO: 1136510 - RNA, 19 nt, Artificial Sequence
  Description of Artificial Sequence: Synthetic oligonucleotide
gacuugcuugccucugaag

SEQ ID NO: 1136511 - RNA, 19 nt, Artificial Sequence
  Description of Artificial Sequence: Synthetic oligonucleotide
caguuacuacaacacuggc

SEQ ID NO: 1136512 - RNA, 19 nt, Artificial Sequence
  Description of Artificial Sequence: Synthetic oligonucleotide
ugcucuugcaaaggacucc

SEQ ID NO: 1136513 - RNA, 19 nt, Artificial Sequence
  Description of Artificial Sequence: Synthetic oligonucleotide
acauugggccggcuaaaug

SEQ ID NO: 1136514 - RNA, 19 nt, Artificial Sequence
  Description of Artificial Sequence: Synthetic oligonucleotide
guaaggucuacuccucguc

SEQ ID NO: 1136515 - RNA, 19 nt, Artificial Sequence
  Description of Artificial Sequence: Synthetic oligonucleotide
acacaacuauggcugcuug

SEQ ID NO: 1136516 - RNA, 19 nt, Artificial Sequence
  Description of Artificial Sequence: Synthetic oligonucleotide
acuguacauuuuguauacg

SEQ ID NO: 1136517 - RNA, 19 nt, Artificial Sequence
  Description of Artificial Sequence: Synthetic oligonucleotide
guacauuggugcuaggcua

SEQ ID NO: 1136518 - RNA, 19 nt, Artificial Sequence
  Description of Artificial Sequence: Synthetic oligonucleotide
agaagucccuaauuucaaa

SEQ ID NO: 1136519 - RNA, 19 nt, Artificial Sequence
  Description of Artificial Sequence: Synthetic oligonucleotide
aggcaauucuuaaauauua

SEQ ID NO: 1136520 - RNA, 19 nt, Artificial Sequence
  Description of Artificial Sequence: Synthetic oligonucleotide
auggccaacagugauuaaa

SEQ ID NO: 1136521 - RNA, 19 nt, Artificial Sequence
  Description of Artificial Sequence: Synthetic oligonucleotide
acacaugguagauuucaua

SEQ ID NO: 1136522 - RNA, 19 nt, Artificial Sequence
  Description of Artificial Sequence: Synthetic oligonucleotide
uuagaaaggcagccccaau

SEQ ID NO: 1136523 - RNA, 19 nt, Artificial Sequence
  Description of Artificial Sequence: Synthetic oligonucleotide
uuggugcuaggcuauggua

SEQ ID NO: 1136524 - RNA, 19 nt, Artificial Sequence
  Description of Artificial Sequence: Synthetic oligonucleotide
cuaucacaauauuaggacu

SEQ ID NO: 1136525 - RNA, 19 nt, Artificial Sequence
  Description of Artificial Sequence: Synthetic oligonucleotide
ggaguaauggaagaacaca

SEQ ID NO: 1136526 - RNA, 19 nt, Artificial Sequence
  Description of Artificial Sequence: Synthetic oligonucleotide
cuaggcuaugguaccguuc

SEQ ID NO: 1136527 - RNA, 19 nt, Artificial Sequence
  Description of Artificial Sequence: Synthetic oligonucleotide
cucuauguaauggccaaca

SEQ ID NO: 1136528 - RNA, 19 nt, Artificial Sequence
  Description of Artificial Sequence: Synthetic oligonucleotide
uuacuaauuuugaguuauu

SEQ ID NO: 1136529 - RNA, 19 nt, Artificial Sequence
  Description of Artificial Sequence: Synthetic oligonucleotide
uugcuccucgacuagccau

SEQ ID NO: 1136530 - RNA, 19 nt, Artificial Sequence
  Description of Artificial Sequence: Synthetic oligonucleotide
ugcuagcagauugacacuu

SEQ ID NO: 1136531 - RNA, 19 nt, Artificial Sequence
  Description of Artificial Sequence: Synthetic oligonucleotide
gcucaguaaggucuacucc

SEQ ID NO: 1136532 - RNA, 19 nt, Artificial Sequence
  Description of Artificial Sequence: Synthetic oligonucleotide
cauuggugcuaggcuaugg

SEQ ID NO: 1136533 - RNA, 19 nt, Artificial Sequence
  Description of Artificial Sequence: Synthetic oligonucleotide
aaagccccuuccuuucaua

SEQ ID NO: 1136534 - RNA, 19 nt, Artificial Sequence
  Description of Artificial Sequence: Synthetic oligonucleotide
uuaugguucuagccaugua

SEQ ID NO: 1136535 - RNA, 19 nt, Artificial Sequence
  Description of Artificial Sequence: Synthetic oligonucleotide
agacagaccucuauguaau

SEQ ID NO: 1136536 - RNA, 19 nt, Artificial Sequence
  Description of Artificial Sequence: Synthetic oligonucleotide
cuuaggcaauucuuaaaua

SEQ ID NO: 1136537 - RNA, 19 nt, Artificial Sequence
  Description of Artificial Sequence: Synthetic oligonucleotide
aacuuccaggaugcaaggu

SEQ ID NO: 1136538 - RNA, 19 nt, Artificial Sequence
  Description of Artificial Sequence: Synthetic oligonucleotide
uuacuacaacacuggcuuc

SEQ ID NO: 1136539 - RNA, 19 nt, Artificial Sequence
  Description of Artificial Sequence: Synthetic oligonucleotide
acgcuuaggcaauucuuaa

SEQ ID NO: 1136540 - RNA, 19 nt, Artificial Sequence
  Description of Artificial Sequence: Synthetic oligonucleotide
cacucaaauuuuaggagua

SEQ ID NO: 1136541 - RNA, 19 nt, Artificial Sequence
  Description of Artificial Sequence: Synthetic oligonucleotide
aaugaacuuccaggaugca

SEQ ID NO: 1136542 - RNA, 19 nt, Artificial Sequence
  Description of Artificial Sequence: Synthetic oligonucleotide
acagcucuuuuauuugcua

SEQ ID NO: 1136543 - RNA, 19 nt, Artificial Sequence
  Description of Artificial Sequence: Synthetic oligonucleotide
uccuggaagucaacagcuc

SEQ ID NO: 1136544 - RNA, 19 nt, Artificial Sequence
  Description of Artificial Sequence: Synthetic oligonucleotide
ggcccauugggucuuguug

SEQ ID NO: 1136545 - RNA, 19 nt, Artificial Sequence
  Description of Artificial Sequence: Synthetic oligonucleotide
aguacagcugaagaucaua

SEQ ID NO: 1136546 - RNA, 19 nt, Artificial Sequence
  Description of Artificial Sequence: Synthetic oligonucleotide
ggcuaaaugcucccacacc

SEQ ID NO: 1136547 - RNA, 19 nt, Artificial Sequence
  Description of Artificial Sequence: Synthetic oligonucleotide
aggcuugauuugccaacag

SEQ ID NO: 1136548 - RNA, 19 nt, Artificial Sequence
  Description of Artificial Sequence: Synthetic oligonucleotide
augggguuacacaugacuu

SEQ ID NO: 1136549 - RNA, 19 nt, Artificial Sequence
  Description of Artificial Sequence: Synthetic oligonucleotide
ggcaauucuuaaauauuac

SEQ ID NO: 1136550 - RNA, 19 nt, Artificial Sequence
  Description of Artificial Sequence: Synthetic oligonucleotide
acgaagggaccacuaucca

SEQ ID NO: 1136551 - RNA, 19 nt, Artificial Sequence
  Description of Artificial Sequence: Synthetic oligonucleotide
ggagacuacaaugcaguac

SEQ ID NO: 1136552 - RNA, 19 nt, Artificial Sequence
  Description of Artificial Sequence: Synthetic oligonucleotide
ggcucaguaaggucuacuc

SEQ ID NO: 1136553 - RNA, 19 nt, Artificial Sequence
  Description of Artificial Sequence: Synthetic oligonucleotide
gggaccacuauccauuaaa

SEQ ID NO: 1136554 - RNA, 19 nt, Artificial Sequence
  Description of Artificial Sequence: Synthetic oligonucleotide
cuagcagauugacacuuaa

SEQ ID NO: 1136555 - RNA, 19 nt, Artificial Sequence
  Description of Artificial Sequence: Synthetic oligonucleotide
gauugacacuuaaacagau

SEQ ID NO: 1136556 - RNA, 19 nt, Artificial Sequence
  Description of Artificial Sequence: Synthetic oligonucleotide
agucacauugggccggcua

SEQ ID NO: 1136557 - RNA, 19 nt, Artificial Sequence
  Description of Artificial Sequence: Synthetic oligonucleotide
gacuccucauuugugauau

SEQ ID NO: 1136558 - RNA, 19 nt, Artificial Sequence
  Description of Artificial Sequence: Synthetic oligonucleotide
cuguagugucaucaagaca

SEQ ID NO: 1136559 - RNA, 19 nt, Artificial Sequence
  Description of Artificial Sequence: Synthetic oligonucleotide
auugggccggcuaaaugcu

SEQ ID NO: 1136560 - RNA, 19 nt, Artificial Sequence
  Description of Artificial Sequence: Synthetic oligonucleotide
gacuacaaugcaguacucu

SEQ ID NO: 1136561 - RNA, 19 nt, Artificial Sequence
  Description of Artificial Sequence: Synthetic oligonucleotide
acucaaauuuuaggaguaa

SEQ ID NO: 1136562 - RNA, 19 nt, Artificial Sequence
  Description of Artificial Sequence: Synthetic oligonucleotide
gagcucacacgaagggacc

SEQ ID NO: 1136563 - RNA, 19 nt, Artificial Sequence
  Description of Artificial Sequence: Synthetic oligonucleotide
cuagaaguaccaguuugaa

SEQ ID NO: 1136564 - RNA, 19 nt, Artificial Sequence
  Description of Artificial Sequence: Synthetic oligonucleotide
acucuccuagaaguaccag

SEQ ID NO: 1136565 - RNA, 19 nt, Artificial Sequence
  Description of Artificial Sequence: Synthetic oligonucleotide
auacgcuuaggcaauucuu

SEQ ID NO: 1136566 - RNA, 19 nt, Artificial Sequence
  Description of Artificial Sequence: Synthetic oligonucleotide
gguacucucuugaaauuca

SEQ ID NO: 1136567 - RNA, 19 nt, Artificial Sequence
  Description of Artificial Sequence: Synthetic oligonucleotide
auucaugaaacuggcccuu

SEQ ID NO: 1136568 - RNA, 19 nt, Artificial Sequence
  Description of Artificial Sequence: Synthetic oligonucleotide
guuagaaaggcagccccaa

SEQ ID NO: 1136569 - RNA, 19 nt, Artificial Sequence
  Description of Artificial Sequence: Synthetic oligonucleotide
auacacaacuauggcugcu

SEQ ID NO: 1136570 - RNA, 19 nt, Artificial Sequence
  Description of Artificial Sequence: Synthetic oligonucleotide
aguuuggguuagaaaggca

SEQ ID NO: 1136571 - RNA, 19 nt, Artificial Sequence
  Description of Artificial Sequence: Synthetic oligonucleotide
caguauuagaaacuugauu

SEQ ID NO: 1136572 - RNA, 19 nt, Artificial Sequence
  Description of Artificial Sequence: Synthetic oligonucleotide
ugcuaggcuaugguaccgu

SEQ ID NO: 1136573 - RNA, 19 nt, Artificial Sequence
  Description of Artificial Sequence: Synthetic oligonucleotide
gugcuaggcuaugguaccg

SEQ ID NO: 1136574 - RNA, 19 nt, Artificial Sequence
  Description of Artificial Sequence: Synthetic oligonucleotide
acuauccauuaaaaugcau

SEQ ID NO: 1136575 - RNA, 19 nt, Artificial Sequence
  Description of Artificial Sequence: Synthetic oligonucleotide
caguguuuauuaugguucu

SEQ ID NO: 1136576 - RNA, 19 nt, Artificial Sequence
  Description of Artificial Sequence: Synthetic oligonucleotide
guugcuccucgacuagcca

SEQ ID NO: 1136577 - RNA, 19 nt, Artificial Sequence
  Description of Artificial Sequence: Synthetic oligonucleotide
caaauuccuaaaugaacuu

SEQ ID NO: 1136578 - RNA, 19 nt, Artificial Sequence
  Description of Artificial Sequence: Synthetic oligonucleotide
ccucuguaguacauuggug

SEQ ID NO: 1136579 - RNA, 19 nt, Artificial Sequence
  Description of Artificial Sequence: Synthetic oligonucleotide
cuacaaugcaguacucuau

SEQ ID NO: 1136580 - RNA, 19 nt, Artificial Sequence
  Description of Artificial Sequence: Synthetic oligonucleotide
cuaaaacaagaugggguua

SEQ ID NO: 1136581 - RNA, 19 nt, Artificial Sequence
  Description of Artificial Sequence: Synthetic oligonucleotide
uugggccggcuaaaugcuc

SEQ ID NO: 1136582 - RNA, 19 nt, Artificial Sequence
  Description of Artificial Sequence: Synthetic oligonucleotide
agcucacacgaagggacca

SEQ ID NO: 1136583 - RNA, 19 nt, Artificial Sequence
  Description of Artificial Sequence: Synthetic oligonucleotide
aggaugcaagguaucaauu

SEQ ID NO: 1136584 - RNA, 19 nt, Artificial Sequence
  Description of Artificial Sequence: Synthetic oligonucleotide
agccauguccaaauuugaa

SEQ ID NO: 1136585 - RNA, 19 nt, Artificial Sequence
  Description of Artificial Sequence: Synthetic oligonucleotide
augguagauuucauauaau

SEQ ID NO: 1136586 - RNA, 19 nt, Artificial Sequence
  Description of Artificial Sequence: Synthetic oligonucleotide
caggaugcaagguaucaau

SEQ ID NO: 1136587 - RNA, 19 nt, Artificial Sequence
  Description of Artificial Sequence: Synthetic oligonucleotide
uguauacgcuuaggcaauu

SEQ ID NO: 1136588 - RNA, 19 nt, Artificial Sequence
  Description of Artificial Sequence: Synthetic oligonucleotide
ucguccucuggcagaguuu

SEQ ID NO: 1136589 - RNA, 19 nt, Artificial Sequence
  Description of Artificial Sequence: Synthetic oligonucleotide
acugaccaaucauguccaa

SEQ ID NO: 1136590 - RNA, 19 nt, Artificial Sequence
  Description of Artificial Sequence: Synthetic oligonucleotide
aaacccuggugaacuguuu

SEQ ID NO: 1136591 - RNA, 19 nt, Artificial Sequence
  Description of Artificial Sequence: Synthetic oligonucleotide
ggaugcaagguaucaauuu

SEQ ID NO: 1136592 - RNA, 19 nt, Artificial Sequence
  Description of Artificial Sequence: Synthetic oligonucleotide
aggcucaguaaggucuacu

SEQ ID NO: 1136593 - RNA, 19 nt, Artificial Sequence
  Description of Artificial Sequence: Synthetic oligonucleotide
guaccaguuugaacuggca

SEQ ID NO: 1136594 - RNA, 19 nt, Artificial Sequence
  Description of Artificial Sequence: Synthetic oligonucleotide
cucaaauuuuaggaguaau

SEQ ID NO: 1136595 - RNA, 19 nt, Artificial Sequence
  Description of Artificial Sequence: Synthetic oligonucleotide
ccuaaaacaagaugggguu

SEQ ID NO: 1136596 - RNA, 19 nt, Artificial Sequence
  Description of Artificial Sequence: Synthetic oligonucleotide
cucuugcaaaggacuccuc

SEQ ID NO: 1136597 - RNA, 19 nt, Artificial Sequence
  Description of Artificial Sequence: Synthetic oligonucleotide
gguuagaaaggcagcccca

SEQ ID NO: 1136598 - RNA, 19 nt, Artificial Sequence
  Description of Artificial Sequence: Synthetic oligonucleotide
ggaccacuauccauuaaaa

SEQ ID NO: 1136599 - RNA, 19 nt, Artificial Sequence
  Description of Artificial Sequence: Synthetic oligonucleotide
cugaccaaucauguccaaa

SEQ ID NO: 1136600 - RNA, 19 nt, Artificial Sequence
  Description of Artificial Sequence: Synthetic oligonucleotide
cacaacuauggcugcuugu

SEQ ID NO: 1136601 - RNA, 19 nt, Artificial Sequence
  Description of Artificial Sequence: Synthetic oligonucleotide
guaauggccaacagugauu

SEQ ID NO: 1136602 - RNA, 19 nt, Artificial Sequence
  Description of Artificial Sequence: Synthetic oligonucleotide
agcgaagcacaaggcuuga

SEQ ID NO: 1136603 - RNA, 19 nt, Artificial Sequence
  Description of Artificial Sequence: Synthetic oligonucleotide
cuggaagucaacagcucuu

SEQ ID NO: 1136604 - RNA, 19 nt, Artificial Sequence
  Description of Artificial Sequence: Synthetic oligonucleotide
ccucgacuagccaugucca

SEQ ID NO: 1136605 - RNA, 19 nt, Artificial Sequence
  Description of Artificial Sequence: Synthetic oligonucleotide
cucgacuagccauguccaa

SEQ ID NO: 1136606 - RNA, 19 nt, Artificial Sequence
  Description of Artificial Sequence: Synthetic oligonucleotide
gugaacuguuuuccuuacu

SEQ ID NO: 1136607 - RNA, 19 nt, Artificial Sequence
  Description of Artificial Sequence: Synthetic oligonucleotide
cucccggcagcgaggccac

SEQ ID NO: 1136608 - RNA, 19 nt, Artificial Sequence
  Description of Artificial Sequence: Synthetic oligonucleotide
ggauucugugguucauucu

SEQ ID NO: 1136609 - RNA, 19 nt, Artificial Sequence
  Description of Artificial Sequence: Synthetic oligonucleotide
ccuuacuaauuuugaguua

SEQ ID NO: 1136610 - RNA, 19 nt, Artificial Sequence
  Description of Artificial Sequence: Synthetic oligonucleotide
gggccggcuaaaugcuccc

SEQ ID NO: 1136611 - RNA, 19 nt, Artificial Sequence
  Description of Artificial Sequence: Synthetic oligonucleotide
ggcccuucacaaagcgaag

SEQ ID NO: 1136612 - RNA, 19 nt, Artificial Sequence
  Description of Artificial Sequence: Synthetic oligonucleotide
cacacgaagggaccacuau

SEQ ID NO: 1136613 - RNA, 19 nt, Artificial Sequence
  Description of Artificial Sequence: Synthetic oligonucleotide
cagccccaaugguacucuc

SEQ ID NO: 1136614 - RNA, 19 nt, Artificial Sequence
  Description of Artificial Sequence: Synthetic oligonucleotide
cugcuagcagauugacacu

SEQ ID NO: 1136615 - RNA, 19 nt, Artificial Sequence
  Description of Artificial Sequence: Synthetic oligonucleotide
cuccucgacuagccauguc

SEQ ID NO: 1136616 - RNA, 19 nt, Artificial Sequence
  Description of Artificial Sequence: Synthetic oligonucleotide
accuggggcgcggcucccg

SEQ ID NO: 1136617 - RNA, 19 nt, Artificial Sequence
  Description of Artificial Sequence: Synthetic oligonucleotide
gcucuugcaaaggacuccu

SEQ ID NO: 1136618 - RNA, 19 nt, Artificial Sequence
  Description of Artificial Sequence: Synthetic oligonucleotide
ccggcuaaaugcucccaca

SEQ ID NO: 1136619 - RNA, 19 nt, Artificial Sequence
  Description of Artificial Sequence: Synthetic oligonucleotide
gcucacacgaagggaccac

SEQ ID NO: 1136620 - RNA, 19 nt, Artificial Sequence
  Description of Artificial Sequence: Synthetic oligonucleotide
cuccuagaaguaccaguuu

SEQ ID NO: 1136621 - RNA, 19 nt, Artificial Sequence
  Description of Artificial Sequence: Synthetic oligonucleotide
gcuccagacagaccucuau

SEQ ID NO: 1136622 - RNA, 19 nt, Artificial Sequence
  Description of Artificial Sequence: Synthetic oligonucleotide
ccuggggcgcggcucccgg

SEQ ID NO: 1136623 - RNA, 19 nt, Artificial Sequence
  Description of Artificial Sequence: Synthetic oligonucleotide
caguacagcugaagaucau

SEQ ID NO: 1136624 - RNA, 19 nt, Artificial Sequence
  Description of Artificial Sequence: Synthetic oligonucleotide
cgcuuaggcaauucuuaaa

SEQ ID NO: 1136625 - RNA, 19 nt, Artificial Sequence
  Description of Artificial Sequence: Synthetic oligonucleotide
ccaggaugcaagguaucaa

SEQ ID NO: 1136626 - RNA, 19 nt, Artificial Sequence
  Description of Artificial Sequence: Synthetic oligonucleotide
ucccggcagcgaggccacg

SEQ ID NO: 1136627 - RNA, 19 nt, Artificial Sequence
  Description of Artificial Sequence: Synthetic oligonucleotide
ggggcgcggcucccggcag

SEQ ID NO: 1136628 - RNA, 19 nt, Artificial Sequence
  Description of Artificial Sequence: Synthetic oligonucleotide
gcuaggcuaugguaccguu

SEQ ID NO: 1136629 - RNA, 19 nt, Artificial Sequence
  Description of Artificial Sequence: Synthetic oligonucleotide
cccauugggucuuguugcu

SEQ ID NO: 1136630 - RNA, 19 nt, Artificial Sequence
  Description of Artificial Sequence: Synthetic oligonucleotide
cgacuagccauguccaaau

SEQ ID NO: 1136631 - RNA, 19 nt, Artificial Sequence
  Description of Artificial Sequence: Synthetic oligonucleotide
ggccggcuaaaugcuccca

SEQ ID NO: 1136632 - RNA, 19 nt, Artificial Sequence
  Description of Artificial Sequence: Synthetic oligonucleotide
ggcucccggcagcgaggcc

SEQ ID NO: 1136633 - RNA, 19 nt, Artificial Sequence
  Description of Artificial Sequence: Synthetic oligonucleotide
gcuccucgacuagccaugu

SEQ ID NO: 1136634 - RNA, 19 nt, Artificial Sequence
  Description of Artificial Sequence: Synthetic oligonucleotide
aauagugucauuuauauuu

SEQ ID NO: 1136635 - RNA, 19 nt, Artificial Sequence
  Description of Artificial Sequence: Synthetic oligonucleotide
aauacagaaggccugcacc

SEQ ID NO: 1136636 - RNA, 19 nt, Artificial Sequence
  Description of Artificial Sequence: Synthetic oligonucleotide
acguuaauaauuuuguuac

SEQ ID NO: 1136637 - RNA, 19 nt, Artificial Sequence
  Description of Artificial Sequence: Synthetic oligonucleotide
ugauuuaucccacugaaug

SEQ ID NO: 1136638 - RNA, 19 nt, Artificial Sequence
  Description of Artificial Sequence: Synthetic oligonucleotide
uuuccaacauccaucaacg

SEQ ID NO: 1136639 - RNA, 19 nt, Artificial Sequence
  Description of Artificial Sequence: Synthetic oligonucleotide
uccauauugaccaggacag

SEQ ID NO: 1136640 - RNA, 19 nt, Artificial Sequence
  Description of Artificial Sequence: Synthetic oligonucleotide
cuauucuuaacacacauug

SEQ ID NO: 1136641 - RNA, 19 nt, Artificial Sequence
  Description of Artificial Sequence: Synthetic oligonucleotide
ucuauagcgacuaaagggu

SEQ ID NO: 1136642 - RNA, 19 nt, Artificial Sequence
  Description of Artificial Sequence: Synthetic oligonucleotide
uccaacauccaucaacgcg

SEQ ID NO: 1136643 - RNA, 19 nt, Artificial Sequence
  Description of Artificial Sequence: Synthetic oligonucleotide
ugcaguuugauauguaaag

SEQ ID NO: 1136644 - RNA, 19 nt, Artificial Sequence
  Description of Artificial Sequence: Synthetic oligonucleotide
uauguaaaggugaauaaau

SEQ ID NO: 1136645 - RNA, 19 nt, Artificial Sequence
  Description of Artificial Sequence: Synthetic oligonucleotide
agugcuauucuuaacacac

SEQ ID NO: 1136646 - RNA, 19 nt, Artificial Sequence
  Description of Artificial Sequence: Synthetic oligonucleotide
uguaaaggugaauaaauuc

SEQ ID NO: 1136647 - RNA, 19 nt, Artificial Sequence
  Description of Artificial Sequence: Synthetic oligonucleotide
uguuacggaucaaagacug

SEQ ID NO: 1136648 - RNA, 19 nt, Artificial Sequence
  Description of Artificial Sequence: Synthetic oligonucleotide
aacccaaauacaguugagc

SEQ ID NO: 1136649 - RNA, 19 nt, Artificial Sequence
  Description of Artificial Sequence: Synthetic oligonucleotide
uguuaagcaggcucgagag

SEQ ID NO: 1136650 - RNA, 19 nt, Artificial Sequence
  Description of Artificial Sequence: Synthetic oligonucleotide
auucgcuugaucuccacac

SEQ ID NO: 1136651 - RNA, 19 nt, Artificial Sequence
  Description of Artificial Sequence: Synthetic oligonucleotide
ucucuauagcgacuaaagg

SEQ ID NO: 1136652 - RNA, 19 nt, Artificial Sequence
  Description of Artificial Sequence: Synthetic oligonucleotide
uauccuacuaaauucaaua

SEQ ID NO: 1136653 - RNA, 19 nt, Artificial Sequence
  Description of Artificial Sequence: Synthetic oligonucleotide
aacagcuguaguuagucga

SEQ ID NO: 1136654 - RNA, 19 nt, Artificial Sequence
  Description of Artificial Sequence: Synthetic oligonucleotide
accggaauaggccugcagc

SEQ ID NO: 1136655 - RNA, 19 nt, Artificial Sequence
  Description of Artificial Sequence: Synthetic oligonucleotide
ugcacguuaauaauuuugu

SEQ ID NO: 1136656 - RNA, 19 nt, Artificial Sequence
  Description of Artificial Sequence: Synthetic oligonucleotide
uccuacuaaauucaauaca

SEQ ID NO: 1136657 - RNA, 19 nt, Artificial Sequence
  Description of Artificial Sequence: Synthetic oligonucleotide
uuuacaacuuccauugaau

SEQ ID NO: 1136658 - RNA, 19 nt, Artificial Sequence
  Description of Artificial Sequence: Synthetic oligonucleotide
uuugauauguaaaggugaa

SEQ ID NO: 1136659 - RNA, 19 nt, Artificial Sequence
  Description of Artificial Sequence: Synthetic oligonucleotide
uguaaggacauauccauau

SEQ ID NO: 1136660 - RNA, 19 nt, Artificial Sequence
  Description of Artificial Sequence: Synthetic oligonucleotide
auacaagacgcaccaaacg

SEQ ID NO: 1136661 - RNA, 19 nt, Artificial Sequence
  Description of Artificial Sequence: Synthetic oligonucleotide
uagucgauuuacaacuucc

SEQ ID NO: 1136662 - RNA, 19 nt, Artificial Sequence
  Description of Artificial Sequence: Synthetic oligonucleotide
ucaauaggcgguuuuaguc

SEQ ID NO: 1136663 - RNA, 19 nt, Artificial Sequence
  Description of Artificial Sequence: Synthetic oligonucleotide
aacgaacccaaauacaguu

SEQ ID NO: 1136664 - RNA, 19 nt, Artificial Sequence
  Description of Artificial Sequence: Synthetic oligonucleotide
uuacaacuuccauugaaug

SEQ ID NO: 1136665 - RNA, 19 nt, Artificial Sequence
  Description of Artificial Sequence: Synthetic oligonucleotide
aagggguuuccccaguauc

SEQ ID NO: 1136666 - RNA, 19 nt, Artificial Sequence
  Description of Artificial Sequence: Synthetic oligonucleotide
ugauauguaaaggugaaua

SEQ ID NO: 1136667 - RNA, 19 nt, Artificial Sequence
  Description of Artificial Sequence: Synthetic oligonucleotide
uaggauuuagccaggccag

SEQ ID NO: 1136668 - RNA, 19 nt, Artificial Sequence
  Description of Artificial Sequence: Synthetic oligonucleotide
auugauuuaucccacugaa

SEQ ID NO: 1136669 - RNA, 19 nt, Artificial Sequence
  Description of Artificial Sequence: Synthetic oligonucleotide
uacuccgugaucuggcucg

SEQ ID NO: 1136670 - RNA, 19 nt, Artificial Sequence
  Description of Artificial Sequence: Synthetic oligonucleotide
ugccaaggcuaacugaagg

SEQ ID NO: 1136671 - RNA, 19 nt, Artificial Sequence
  Description of Artificial Sequence: Synthetic oligonucleotide
caauaggcgguuuuagucc

SEQ ID NO: 1136672 - RNA, 19 nt, Artificial Sequence
  Description of Artificial Sequence: Synthetic oligonucleotide
aguaaggccaaugugauaa

SEQ ID NO: 1136673 - RNA, 19 nt, Artificial Sequence
  Description of Artificial Sequence: Synthetic oligonucleotide
uguaguuagucgauuuaca

SEQ ID NO: 1136674 - RNA, 19 nt, Artificial Sequence
  Description of Artificial Sequence: Synthetic oligonucleotide
uuucugguggaguuauagg

SEQ ID NO: 1136675 - RNA, 19 nt, Artificial Sequence
  Description of Artificial Sequence: Synthetic oligonucleotide
uauucuuaacacacauuga

SEQ ID NO: 1136676 - RNA, 19 nt, Artificial Sequence
  Description of Artificial Sequence: Synthetic oligonucleotide
aauaggcgguuuuagucca

SEQ ID NO: 1136677 - RNA, 19 nt, Artificial Sequence
  Description of Artificial Sequence: Synthetic oligonucleotide
uuccauugaauguaaggac

SEQ ID NO: 1136678 - RNA, 19 nt, Artificial Sequence
  Description of Artificial Sequence: Synthetic oligonucleotide
acccaaauacaguugagca

SEQ ID NO: 1136679 - RNA, 19 nt, Artificial Sequence
  Description of Artificial Sequence: Synthetic oligonucleotide
gauccgagaggcaacagag

SEQ ID NO: 1136680 - RNA, 19 nt, Artificial Sequence
  Description of Artificial Sequence: Synthetic oligonucleotide
gugauaaacaaguuuggga

SEQ ID NO: 1136681 - RNA, 19 nt, Artificial Sequence
  Description of Artificial Sequence: Synthetic oligonucleotide
aaguggucggccuugcuga

SEQ ID NO: 1136682 - RNA, 19 nt, Artificial Sequence
  Description of Artificial Sequence: Synthetic oligonucleotide
uagauaaagcaagcaaucc

SEQ ID NO: 1136683 - RNA, 19 nt, Artificial Sequence
  Description of Artificial Sequence: Synthetic oligonucleotide
auuuacaacuuccauugaa

SEQ ID NO: 1136684 - RNA, 19 nt, Artificial Sequence
  Description of Artificial Sequence: Synthetic oligonucleotide
cuagcuuuacucuggguug

SEQ ID NO: 1136685 - RNA, 19 nt, Artificial Sequence
  Description of Artificial Sequence: Synthetic oligonucleotide
ugcgguacaucucccacag

SEQ ID NO: 1136686 - RNA, 19 nt, Artificial Sequence
  Description of Artificial Sequence: Synthetic oligonucleotide
acuaauguccacagacugc

SEQ ID NO: 1136687 - RNA, 19 nt, Artificial Sequence
  Description of Artificial Sequence: Synthetic oligonucleotide
uccaucaacgcgaucuggc

SEQ ID NO: 1136688 - RNA, 19 nt, Artificial Sequence
  Description of Artificial Sequence: Synthetic oligonucleotide
augauguuaagcaggcucg

SEQ ID NO: 1136689 - RNA, 19 nt, Artificial Sequence
  Description of Artificial Sequence: Synthetic oligonucleotide
ucgauuuacaacuuccauu

SEQ ID NO: 1136690 - RNA, 19 nt, Artificial Sequence
  Description of Artificial Sequence: Synthetic oligonucleotide
uuacggaucaaagacugga

SEQ ID NO: 1136691 - RNA, 19 nt, Artificial Sequence
  Description of Artificial Sequence: Synthetic oligonucleotide
acauugauuuaucccacug

SEQ ID NO: 1136692 - RNA, 19 nt, Artificial Sequence
  Description of Artificial Sequence: Synthetic oligonucleotide
acugacguucugccaaggc

SEQ ID NO: 1136693 - RNA, 19 nt, Artificial Sequence
  Description of Artificial Sequence: Synthetic oligonucleotide
uacggaucaaagacuggag

SEQ ID NO: 1136694 - RNA, 19 nt, Artificial Sequence
  Description of Artificial Sequence: Synthetic oligonucleotide
uuguuacggaucaaagacu

SEQ ID NO: 1136695 - RNA, 19 nt, Artificial Sequence
  Description of Artificial Sequence: Synthetic oligonucleotide
uuucaauaggcgguuuuag

SEQ ID NO: 1136696 - RNA, 19 nt, Artificial Sequence
  Description of Artificial Sequence: Synthetic oligonucleotide
uagaucaacagcuguaguu

SEQ ID NO: 1136697 - RNA, 19 nt, Artificial Sequence
  Description of Artificial Sequence: Synthetic oligonucleotide
gaauguaaggacauaucca

SEQ ID NO: 1136698 - RNA, 19 nt, Artificial Sequence
  Description of Artificial Sequence: Synthetic oligonucleotide
cugcacguuaauaauuuug

SEQ ID NO: 1136699 - RNA, 19 nt, Artificial Sequence
  Description of Artificial Sequence: Synthetic oligonucleotide
acauacaagacgcaccaaa

SEQ ID NO: 1136700 - RNA, 19 nt, Artificial Sequence
  Description of Artificial Sequence: Synthetic oligonucleotide
aucucuauagcgacuaaag

SEQ ID NO: 1136701 - RNA, 19 nt, Artificial Sequence
  Description of Artificial Sequence: Synthetic oligonucleotide
aauacuccgugaucuggcu

SEQ ID NO: 1136702 - RNA, 19 nt, Artificial Sequence
  Description of Artificial Sequence: Synthetic oligonucleotide
gauaaacucuggccggaag

SEQ ID NO: 1136703 - RNA, 19 nt, Artificial Sequence
  Description of Artificial Sequence: Synthetic oligonucleotide
auacagaaggccugcaccu

SEQ ID NO: 1136704 - RNA, 19 nt, Artificial Sequence
  Description of Artificial Sequence: Synthetic oligonucleotide
guauccagugucuucagca

SEQ ID NO: 1136705 - RNA, 19 nt, Artificial Sequence
  Description of Artificial Sequence: Synthetic oligonucleotide
guuugauauguaaagguga

SEQ ID NO: 1136706 - RNA, 19 nt, Artificial Sequence
  Description of Artificial Sequence: Synthetic oligonucleotide
aacggguuggcggcgagcg

SEQ ID NO: 1136707 - RNA, 19 nt, Artificial Sequence
  Description of Artificial Sequence: Synthetic oligonucleotide
uucaauaggcgguuuuagu

SEQ ID NO: 1136708 - RNA, 19 nt, Artificial Sequence
  Description of Artificial Sequence: Synthetic oligonucleotide
aaggcuaacugaaggccac

SEQ ID NO: 1136709 - RNA, 19 nt, Artificial Sequence
  Description of Artificial Sequence: Synthetic oligonucleotide
cuuccauugaauguaagga

SEQ ID NO: 1136710 - RNA, 19 nt, Artificial Sequence
  Description of Artificial Sequence: Synthetic oligonucleotide
aaauagugucauuuauauu

SEQ ID NO: 1136711 - RNA, 19 nt, Artificial Sequence
  Description of Artificial Sequence: Synthetic oligonucleotide
uucuuaacacacauugauu

SEQ ID NO: 1136712 - RNA, 19 nt, Artificial Sequence
  Description of Artificial Sequence: Synthetic oligonucleotide
ugacguucugccaaggcua

SEQ ID NO: 1136713 - RNA, 19 nt, Artificial Sequence
  Description of Artificial Sequence: Synthetic oligonucleotide
ugaucuccacaccagugcu

SEQ ID NO: 1136714 - RNA, 19 nt, Artificial Sequence
  Description of Artificial Sequence: Synthetic oligonucleotide
uuagucgauuuacaacuuc

SEQ ID NO: 1136715 - RNA, 19 nt, Artificial Sequence
  Description of Artificial Sequence: Synthetic oligonucleotide
aggccaaugugauaaacaa

SEQ ID NO: 1136716 - RNA, 19 nt, Artificial Sequence
  Description of Artificial Sequence: Synthetic oligonucleotide
auguuaagcaggcucgaga

SEQ ID NO: 1136717 - RNA, 19 nt, Artificial Sequence
  Description of Artificial Sequence: Synthetic oligonucleotide
agcaucaccaagaccgagc

SEQ ID NO: 1136718 - RNA, 19 nt, Artificial Sequence
  Description of Artificial Sequence: Synthetic oligonucleotide
cacguuaauaauuuuguua

SEQ ID NO: 1136719 - RNA, 19 nt, Artificial Sequence
  Description of Artificial Sequence: Synthetic oligonucleotide
cgauuuacaacuuccauug

SEQ ID NO: 1136720 - RNA, 19 nt, Artificial Sequence
  Description of Artificial Sequence: Synthetic oligonucleotide
cucuauaaacaaguccugc

SEQ ID NO: 1136721 - RNA, 19 nt, Artificial Sequence
  Description of Artificial Sequence: Synthetic oligonucleotide
caugcucggguucuguagg

SEQ ID NO: 1136722 - RNA, 19 nt, Artificial Sequence
  Description of Artificial Sequence: Synthetic oligonucleotide
aagacgcaccaaacgauuc

SEQ ID NO: 1136723 - RNA, 19 nt, Artificial Sequence
  Description of Artificial Sequence: Synthetic oligonucleotide
ucgcuugaucuccacacca

SEQ ID NO: 1136724 - RNA, 19 nt, Artificial Sequence
  Description of Artificial Sequence: Synthetic oligonucleotide
guaguuagucgauuuacaa

SEQ ID NO: 1136725 - RNA, 19 nt, Artificial Sequence
  Description of Artificial Sequence: Synthetic oligonucleotide
gguuuuaguccacugacca

SEQ ID NO: 1136726 - RNA, 19 nt, Artificial Sequence
  Description of Artificial Sequence: Synthetic oligonucleotide
ucccguauccuacuaaauu

SEQ ID NO: 1136727 - RNA, 19 nt, Artificial Sequence
  Description of Artificial Sequence: Synthetic oligonucleotide
uccugcacguuaauaauuu

SEQ ID NO: 1136728 - RNA, 19 nt, Artificial Sequence
  Description of Artificial Sequence: Synthetic oligonucleotide
aauggcaugcucggguucu

SEQ ID NO: 1136729 - RNA, 19 nt, Artificial Sequence
  Description of Artificial Sequence: Synthetic oligonucleotide
ggacauauccauauugacc

SEQ ID NO: 1136730 - RNA, 19 nt, Artificial Sequence
  Description of Artificial Sequence: Synthetic oligonucleotide
ugggcggauaaacucuggc

SEQ ID NO: 1136731 - RNA, 19 nt, Artificial Sequence
  Description of Artificial Sequence: Synthetic oligonucleotide
uugauuuaucccacugaau

SEQ ID NO: 1136732 - RNA, 19 nt, Artificial Sequence
  Description of Artificial Sequence: Synthetic oligonucleotide
ucuggcucgacugcauuag

SEQ ID NO: 1136733 - RNA, 19 nt, Artificial Sequence
  Description of Artificial Sequence: Synthetic oligonucleotide
uggugggcggauaaacucu

SEQ ID NO: 1136734 - RNA, 19 nt, Artificial Sequence
  Description of Artificial Sequence: Synthetic oligonucleotide
aaccggaauaggccugcag

SEQ ID NO: 1136735 - RNA, 19 nt, Artificial Sequence
  Description of Artificial Sequence: Synthetic oligonucleotide
uuaaguaaauagugucauu

SEQ ID NO: 1136736 - RNA, 19 nt, Artificial Sequence
  Description of Artificial Sequence: Synthetic oligonucleotide
aggcucgagaguuccuucg

SEQ ID NO: 1136737 - RNA, 19 nt, Artificial Sequence
  Description of Artificial Sequence: Synthetic oligonucleotide
gcaguuugauauguaaagg

SEQ ID NO: 1136738 - RNA, 19 nt, Artificial Sequence
  Description of Artificial Sequence: Synthetic oligonucleotide
ccagaagccggccagacgc

SEQ ID NO: 1136739 - RNA, 19 nt, Artificial Sequence
  Description of Artificial Sequence: Synthetic oligonucleotide
agaucaacagcuguaguua

SEQ ID NO: 1136740 - RNA, 19 nt, Artificial Sequence
  Description of Artificial Sequence: Synthetic oligonucleotide
auacuccgugaucuggcuc

SEQ ID NO: 1136741 - RNA, 19 nt, Artificial Sequence
  Description of Artificial Sequence: Synthetic oligonucleotide
uuaguccacugaccaaaga

SEQ ID NO: 1136742 - RNA, 19 nt, Artificial Sequence
  Description of Artificial Sequence: Synthetic oligonucleotide
gauguuaagcaggcucgag

SEQ ID NO: 1136743 - RNA, 19 nt, Artificial Sequence
  Description of Artificial Sequence: Synthetic oligonucleotide
uugggaagcuagcuuuacu

SEQ ID NO: 1136744 - RNA, 19 nt, Artificial Sequence
  Description of Artificial Sequence: Synthetic oligonucleotide
aacgcgaucuggcgaggug

SEQ ID NO: 1136745 - RNA, 19 nt, Artificial Sequence
  Description of Artificial Sequence: Synthetic oligonucleotide
uuaguuuaagcagcaucuc

SEQ ID NO: 1136746 - RNA, 19 nt, Artificial Sequence
  Description of Artificial Sequence: Synthetic oligonucleotide
agcaggugcgcgaagcugg

SEQ ID NO: 1136747 - RNA, 19 nt, Artificial Sequence
  Description of Artificial Sequence: Synthetic oligonucleotide
auauccauauugaccagga

SEQ ID NO: 1136748 - RNA, 19 nt, Artificial Sequence
  Description of Artificial Sequence: Synthetic oligonucleotide
ccccauguuuccaacaucc

SEQ ID NO: 1136749 - RNA, 19 nt, Artificial Sequence
  Description of Artificial Sequence: Synthetic oligonucleotide
aacauccaucaacgcgauc

SEQ ID NO: 1136750 - RNA, 19 nt, Artificial Sequence
  Description of Artificial Sequence: Synthetic oligonucleotide
agacgcaccaaacgauucu

SEQ ID NO: 1136751 - RNA, 19 nt, Artificial Sequence
  Description of Artificial Sequence: Synthetic oligonucleotide
aggccacuaauguccacag

SEQ ID NO: 1136752 - RNA, 19 nt, Artificial Sequence
  Description of Artificial Sequence: Synthetic oligonucleotide
auagcgacuaaaggguugu

SEQ ID NO: 1136753 - RNA, 19 nt, Artificial Sequence
  Description of Artificial Sequence: Synthetic oligonucleotide
ccaacauccaucaacgcga

SEQ ID NO: 1136754 - RNA, 19 nt, Artificial Sequence
  Description of Artificial Sequence: Synthetic oligonucleotide
agggccgucagacgcugcg

SEQ ID NO: 1136755 - RNA, 19 nt, Artificial Sequence
  Description of Artificial Sequence: Synthetic oligonucleotide
aggauacuugggaagcuag

SEQ ID NO: 1136756 - RNA, 19 nt, Artificial Sequence
  Description of Artificial Sequence: Synthetic oligonucleotide
aacaaguccugcacguuaa

SEQ ID NO: 1136757 - RNA, 19 nt, Artificial Sequence
  Description of Artificial Sequence: Synthetic oligonucleotide
aaacgauucugcauauauu

SEQ ID NO: 1136758 - RNA, 19 nt, Artificial Sequence
  Description of Artificial Sequence: Synthetic oligonucleotide
agaggcaacagagcuguca

SEQ ID NO: 1136759 - RNA, 19 nt, Artificial Sequence
  Description of Artificial Sequence: Synthetic oligonucleotide
gugaauaaauucaggaggu

SEQ ID NO: 1136760 - RNA, 19 nt, Artificial Sequence
  Description of Artificial Sequence: Synthetic oligonucleotide
agacugacguucugccaag

SEQ ID NO: 1136761 - RNA, 19 nt, Artificial Sequence
  Description of Artificial Sequence: Synthetic oligonucleotide
auaggccugcagcuucccg

SEQ ID NO: 1136762 - RNA, 19 nt, Artificial Sequence
  Description of Artificial Sequence: Synthetic oligonucleotide
gacgcaccaaacgauucug

SEQ ID NO: 1136763 - RNA, 19 nt, Artificial Sequence
  Description of Artificial Sequence: Synthetic oligonucleotide
ugccccauguuuccaacau

SEQ ID NO: 1136764 - RNA, 19 nt, Artificial Sequence
  Description of Artificial Sequence: Synthetic oligonucleotide
ccgggcaucaacuucgccc

SEQ ID NO: 1136765 - RNA, 19 nt, Artificial Sequence
  Description of Artificial Sequence: Synthetic oligonucleotide
agcuguaguuagucgauuu

SEQ ID NO: 1136766 - RNA, 19 nt, Artificial Sequence
  Description of Artificial Sequence: Synthetic oligonucleotide
guuacggaucaaagacugg

SEQ ID NO: 1136767 - RNA, 19 nt, Artificial Sequence
  Description of Artificial Sequence: Synthetic oligonucleotide
cauauugaccaggacagaa

SEQ ID NO: 1136768 - RNA, 19 nt, Artificial Sequence
  Description of Artificial Sequence: Synthetic oligonucleotide
cccguauccuacuaaauuc

SEQ ID NO: 1136769 - RNA, 19 nt, Artificial Sequence
  Description of Artificial Sequence: Synthetic oligonucleotide
cucgaaagugcugccgccg

SEQ ID NO: 1136770 - RNA, 19 nt, Artificial Sequence
  Description of Artificial Sequence: Synthetic oligonucleotide
ugaauaaauucaggaggua

SEQ ID NO: 1136771 - RNA, 19 nt, Artificial Sequence
  Description of Artificial Sequence: Synthetic oligonucleotide
ugauguuaagcaggcucga

SEQ ID NO: 1136772 - RNA, 19 nt, Artificial Sequence
  Description of Artificial Sequence: Synthetic oligonucleotide
caaacgauucugcauauau

SEQ ID NO: 1136773 - RNA, 19 nt, Artificial Sequence
  Description of Artificial Sequence: Synthetic oligonucleotide
auguaaaggugaauaaauu

SEQ ID NO: 1136774 - RNA, 19 nt, Artificial Sequence
  Description of Artificial Sequence: Synthetic oligonucleotide
gccaaugugauaaacaagu

SEQ ID NO: 1136775 - RNA, 19 nt, Artificial Sequence
  Description of Artificial Sequence: Synthetic oligonucleotide
agucgauuuacaacuucca

SEQ ID NO: 1136776 - RNA, 19 nt, Artificial Sequence
  Description of Artificial Sequence: Synthetic oligonucleotide
auccgagaggcaacagagc

SEQ ID NO: 1136777 - RNA, 19 nt, Artificial Sequence
  Description of Artificial Sequence: Synthetic oligonucleotide
uccggaacgccgccgccag

SEQ ID NO: 1136778 - RNA, 19 nt, Artificial Sequence
  Description of Artificial Sequence: Synthetic oligonucleotide
gcgguuuuaguccacugac

SEQ ID NO: 1136779 - RNA, 19 nt, Artificial Sequence
  Description of Artificial Sequence: Synthetic oligonucleotide
uugauauguaaaggugaau

SEQ ID NO: 1136780 - RNA, 19 nt, Artificial Sequence
  Description of Artificial Sequence: Synthetic oligonucleotide
guucacaaguagaaaugca

SEQ ID NO: 1136781 - RNA, 19 nt, Artificial Sequence
  Description of Artificial Sequence: Synthetic oligonucleotide
cuccgcucgagcccgcugg

SEQ ID NO: 1136782 - RNA, 19 nt, Artificial Sequence
  Description of Artificial Sequence: Synthetic oligonucleotide
gggcggauaaacucuggcc

SEQ ID NO: 1136783 - RNA, 19 nt, Artificial Sequence
  Description of Artificial Sequence: Synthetic oligonucleotide
acgcaccaaacgauucugc

SEQ ID NO: 1136784 - RNA, 19 nt, Artificial Sequence
  Description of Artificial Sequence: Synthetic oligonucleotide
cucggccuccgcucgagcc

SEQ ID NO: 1136785 - RNA, 19 nt, Artificial Sequence
  Description of Artificial Sequence: Synthetic oligonucleotide
guuggcggcgagcggcucg

SEQ ID NO: 1136786 - RNA, 19 nt, Artificial Sequence
  Description of Artificial Sequence: Synthetic oligonucleotide
gccaugauucgcuugaucu

SEQ ID NO: 1136787 - RNA, 19 nt, Artificial Sequence
  Description of Artificial Sequence: Synthetic oligonucleotide
agcaucucuauagcgacua

SEQ ID NO: 1136788 - RNA, 19 nt, Artificial Sequence
  Description of Artificial Sequence: Synthetic oligonucleotide
ccaucaacgcgaucuggcg

SEQ ID NO: 1136789 - RNA, 19 nt, Artificial Sequence
  Description of Artificial Sequence: Synthetic oligonucleotide
gguagagggccgucagacg

SEQ ID NO: 1136790 - RNA, 19 nt, Artificial Sequence
  Description of Artificial Sequence: Synthetic oligonucleotide
gaauggcaugcucggguuc

SEQ ID NO: 1136791 - RNA, 19 nt, Artificial Sequence
  Description of Artificial Sequence: Synthetic oligonucleotide
uggcucgacugcauuaguu

SEQ ID NO: 1136792 - RNA, 19 nt, Artificial Sequence
  Description of Artificial Sequence: Synthetic oligonucleotide
cagugcuauucuuaacaca

SEQ ID NO: 1136793 - RNA, 19 nt, Artificial Sequence
  Description of Artificial Sequence: Synthetic oligonucleotide
aagccggccagacgccgug

SEQ ID NO: 1136794 - RNA, 19 nt, Artificial Sequence
  Description of Artificial Sequence: Synthetic oligonucleotide
uccacuaggucuggaaguu

SEQ ID NO: 1136795 - RNA, 19 nt, Artificial Sequence
  Description of Artificial Sequence: Synthetic oligonucleotide
cuaacugaaggccacuaau

SEQ ID NO: 1136796 - RNA, 19 nt, Artificial Sequence
  Description of Artificial Sequence: Synthetic oligonucleotide
acgaacccaaauacaguug

SEQ ID NO: 1136797 - RNA, 19 nt, Artificial Sequence
  Description of Artificial Sequence: Synthetic oligonucleotide
gcaugcucggguucuguag

SEQ ID NO: 1136798 - RNA, 19 nt, Artificial Sequence
  Description of Artificial Sequence: Synthetic oligonucleotide
guugagcaauagaagggga

SEQ ID NO: 1136799 - RNA, 19 nt, Artificial Sequence
  Description of Artificial Sequence: Synthetic oligonucleotide
ccagugcuauucuuaacac

SEQ ID NO: 1136800 - RNA, 19 nt, Artificial Sequence
  Description of Artificial Sequence: Synthetic oligonucleotide
caucaacgcgaucuggcga

SEQ ID NO: 1136801 - RNA, 19 nt, Artificial Sequence
  Description of Artificial Sequence: Synthetic oligonucleotide
ucgggcuccuguccgccgc

SEQ ID NO: 1136802 - RNA, 19 nt, Artificial Sequence
  Description of Artificial Sequence: Synthetic oligonucleotide
gacugacguucugccaagg

SEQ ID NO: 1136803 - RNA, 19 nt, Artificial Sequence
  Description of Artificial Sequence: Synthetic oligonucleotide
ucaacgcgaucuggcgagg

SEQ ID NO: 1136804 - RNA, 19 nt, Artificial Sequence
  Description of Artificial Sequence: Synthetic oligonucleotide
ggcucgagaguuccuucgg

SEQ ID NO: 1136805 - RNA, 19 nt, Artificial Sequence
  Description of Artificial Sequence: Synthetic oligonucleotide
cucgacugcauuaguuuaa

SEQ ID NO: 1136806 - RNA, 19 nt, Artificial Sequence
  Description of Artificial Sequence: Synthetic oligonucleotide
aagcuggcggcgaacgggu

SEQ ID NO: 1136807 - RNA, 19 nt, Artificial Sequence
  Description of Artificial Sequence: Synthetic oligonucleotide
gcucgagaguuccuucggg

SEQ ID NO: 1136808 - RNA, 19 nt, Artificial Sequence
  Description of Artificial Sequence: Synthetic oligonucleotide
aucuggcucgacugcauua

SEQ ID NO: 1136809 - RNA, 19 nt, Artificial Sequence
  Description of Artificial Sequence: Synthetic oligonucleotide
ugcugaaguagugguggaa

SEQ ID NO: 1136810 - RNA, 19 nt, Artificial Sequence
  Description of Artificial Sequence: Synthetic oligonucleotide
ggccaaugugauaaacaag

SEQ ID NO: 1136811 - RNA, 19 nt, Artificial Sequence
  Description of Artificial Sequence: Synthetic oligonucleotide
aggcgguuuuaguccacug

SEQ ID NO: 1136812 - RNA, 19 nt, Artificial Sequence
  Description of Artificial Sequence: Synthetic oligonucleotide
ccucuauaaacaaguccug

SEQ ID NO: 1136813 - RNA, 19 nt, Artificial Sequence
  Description of Artificial Sequence: Synthetic oligonucleotide
ggaguuauaggaggcaaaa

SEQ ID NO: 1136814 - RNA, 19 nt, Artificial Sequence
  Description of Artificial Sequence: Synthetic oligonucleotide
acagcuguaguuagucgau

SEQ ID NO: 1136815 - RNA, 19 nt, Artificial Sequence
  Description of Artificial Sequence: Synthetic oligonucleotide
guggcuuucaauaggcggu

SEQ ID NO: 1136816 - RNA, 19 nt, Artificial Sequence
  Description of Artificial Sequence: Synthetic oligonucleotide
agcgacuaaaggguuguuu

SEQ ID NO: 1136817 - RNA, 19 nt, Artificial Sequence
  Description of Artificial Sequence: Synthetic oligonucleotide
cagaagccggccagacgcc

SEQ ID NO: 1136818 - RNA, 19 nt, Artificial Sequence
  Description of Artificial Sequence: Synthetic oligonucleotide
gucgauuuacaacuuccau

SEQ ID NO: 1136819 - RNA, 19 nt, Artificial Sequence
  Description of Artificial Sequence: Synthetic oligonucleotide
aguucuggugagguauuau

SEQ ID NO: 1136820 - RNA, 19 nt, Artificial Sequence
  Description of Artificial Sequence: Synthetic oligonucleotide
cuuucaauaggcgguuuua

SEQ ID NO: 1136821 - RNA, 19 nt, Artificial Sequence
  Description of Artificial Sequence: Synthetic oligonucleotide
aucaacagcuguaguuagu

SEQ ID NO: 1136822 - RNA, 19 nt, Artificial Sequence
  Description of Artificial Sequence: Synthetic oligonucleotide
ggcgguuuuaguccacuga

SEQ ID NO: 1136823 - RNA, 19 nt, Artificial Sequence
  Description of Artificial Sequence: Synthetic oligonucleotide
gcaacagagcugucaaauc

SEQ ID NO: 1136824 - RNA, 19 nt, Artificial Sequence
  Description of Artificial Sequence: Synthetic oligonucleotide
cugacguucugccaaggcu

SEQ ID NO: 1136825 - RNA, 19 nt, Artificial Sequence
  Description of Artificial Sequence: Synthetic oligonucleotide
acgcgaucuggcgaggugu

SEQ ID NO: 1136826 - RNA, 19 nt, Artificial Sequence
  Description of Artificial Sequence: Synthetic oligonucleotide
ggauacuugggaagcuagc

SEQ ID NO: 1136827 - RNA, 19 nt, Artificial Sequence
  Description of Artificial Sequence: Synthetic oligonucleotide
uaggcgguuuuaguccacu

SEQ ID NO: 1136828 - RNA, 19 nt, Artificial Sequence
  Description of Artificial Sequence: Synthetic oligonucleotide
ccgccgggcaucaacuucg

SEQ ID NO: 1136829 - RNA, 19 nt, Artificial Sequence
  Description of Artificial Sequence: Synthetic oligonucleotide
auaggcgguuuuaguccac

SEQ ID NO: 1136830 - RNA, 19 nt, Artificial Sequence
  Description of Artificial Sequence: Synthetic oligonucleotide
caucucuauagcgacuaaa

SEQ ID NO: 1136831 - RNA, 19 nt, Artificial Sequence
  Description of Artificial Sequence: Synthetic oligonucleotide
caggcucgagaguuccuuc

SEQ ID NO: 1136832 - RNA, 19 nt, Artificial Sequence
  Description of Artificial Sequence: Synthetic oligonucleotide
ccaagaccgagcccaggcg

SEQ ID NO: 1136833 - RNA, 19 nt, Artificial Sequence
  Description of Artificial Sequence: Synthetic oligonucleotide
ccguauccuacuaaauuca

SEQ ID NO: 1136834 - RNA, 19 nt, Artificial Sequence
  Description of Artificial Sequence: Synthetic oligonucleotide
agcaaccggaauaggccug

SEQ ID NO: 1136835 - RNA, 19 nt, Artificial Sequence
  Description of Artificial Sequence: Synthetic oligonucleotide
ggaaguucuggugagguau

SEQ ID NO: 1136836 - RNA, 19 nt, Artificial Sequence
  Description of Artificial Sequence: Synthetic oligonucleotide
cccucgaaagugcugccgc

SEQ ID NO: 1136837 - RNA, 19 nt, Artificial Sequence
  Description of Artificial Sequence: Synthetic oligonucleotide
cggaaguggcuuucaauag

SEQ ID NO: 1136838 - RNA, 19 nt, Artificial Sequence
  Description of Artificial Sequence: Synthetic oligonucleotide
aggauuuagccaggccagu

SEQ ID NO: 1136839 - RNA, 19 nt, Artificial Sequence
  Description of Artificial Sequence: Synthetic oligonucleotide
gugaucuggcucgacugca

SEQ ID NO: 1136840 - RNA, 19 nt, Artificial Sequence
  Description of Artificial Sequence: Synthetic oligonucleotide
gaccgcuccggaacgccgc

SEQ ID NO: 1136841 - RNA, 19 nt, Artificial Sequence
  Description of Artificial Sequence: Synthetic oligonucleotide
gugggcggauaaacucugg

SEQ ID NO: 1136842 - RNA, 19 nt, Artificial Sequence
  Description of Artificial Sequence: Synthetic oligonucleotide
ccaguauccagugucuuca

SEQ ID NO: 1136843 - RNA, 19 nt, Artificial Sequence
  Description of Artificial Sequence: Synthetic oligonucleotide
gaacggguuggcggcgagc

SEQ ID NO: 1136844 - RNA, 19 nt, Artificial Sequence
  Description of Artificial Sequence: Synthetic oligonucleotide
acgccgugcucgccccgcc

SEQ ID NO: 1136845 - RNA, 19 nt, Artificial Sequence
  Description of Artificial Sequence: Synthetic oligonucleotide
agcggcucggugcgguaca

SEQ ID NO: 1136846 - RNA, 19 nt, Artificial Sequence
  Description of Artificial Sequence: Synthetic oligonucleotide
ggugcgcgaagcuggcggc

SEQ ID NO: 1136847 - RNA, 19 nt, Artificial Sequence
  Description of Artificial Sequence: Synthetic oligonucleotide
ggccgucagacgcugcgcc

SEQ ID NO: 1136848 - RNA, 19 nt, Artificial Sequence
  Description of Artificial Sequence: Synthetic oligonucleotide
ccaaauacaguugagcaau

SEQ ID NO: 1136849 - RNA, 19 nt, Artificial Sequence
  Description of Artificial Sequence: Synthetic oligonucleotide
agagggccgucagacgcug

SEQ ID NO: 1136850 - RNA, 19 nt, Artificial Sequence
  Description of Artificial Sequence: Synthetic oligonucleotide
gacguucugccaaggcuaa

SEQ ID NO: 1136851 - RNA, 19 nt, Artificial Sequence
  Description of Artificial Sequence: Synthetic oligonucleotide
gcuaacugaaggccacuaa

SEQ ID NO: 1136852 - RNA, 19 nt, Artificial Sequence
  Description of Artificial Sequence: Synthetic oligonucleotide
acguucugccaaggcuaac

SEQ ID NO: 1136853 - RNA, 19 nt, Artificial Sequence
  Description of Artificial Sequence: Synthetic oligonucleotide
cagcaaccggaauaggccu

SEQ ID NO: 1136854 - RNA, 19 nt, Artificial Sequence
  Description of Artificial Sequence: Synthetic oligonucleotide
ccagacgccgugcucgccc

SEQ ID NO: 1136855 - RNA, 19 nt, Artificial Sequence
  Description of Artificial Sequence: Synthetic oligonucleotide
caagacgcaccaaacgauu

SEQ ID NO: 1136856 - RNA, 19 nt, Artificial Sequence
  Description of Artificial Sequence: Synthetic oligonucleotide
gcgacuaaaggguuguuuu

SEQ ID NO: 1136857 - RNA, 19 nt, Artificial Sequence
  Description of Artificial Sequence: Synthetic oligonucleotide
ccucgaaagugcugccgcc

SEQ ID NO: 1136858 - RNA, 19 nt, Artificial Sequence
  Description of Artificial Sequence: Synthetic oligonucleotide
agcuucccguauccuacua

SEQ ID NO: 1136859 - RNA, 19 nt, Artificial Sequence
  Description of Artificial Sequence: Synthetic oligonucleotide
gcucgacugcauuaguuua

SEQ ID NO: 1136860 - RNA, 19 nt, Artificial Sequence
  Description of Artificial Sequence: Synthetic oligonucleotide
cucggguucuguaggauuu

SEQ ID NO: 1136861 - RNA, 19 nt, Artificial Sequence
  Description of Artificial Sequence: Synthetic oligonucleotide
gccgucagacgcugcgccg

SEQ ID NO: 1136862 - RNA, 19 nt, Artificial Sequence
  Description of Artificial Sequence: Synthetic oligonucleotide
ccgagaggcaacagagcug

SEQ ID NO: 1136863 - RNA, 19 nt, Artificial Sequence
  Description of Artificial Sequence: Synthetic oligonucleotide
cuauagcgacuaaaggguu

SEQ ID NO: 1136864 - RNA, 19 nt, Artificial Sequence
  Description of Artificial Sequence: Synthetic oligonucleotide
gcaaccggaauaggccugc

SEQ ID NO: 1136865 - RNA, 19 nt, Artificial Sequence
  Description of Artificial Sequence: Synthetic oligonucleotide
cgacuaaaggguuguuuuc

SEQ ID NO: 1136866 - RNA, 19 nt, Artificial Sequence
  Description of Artificial Sequence: Synthetic oligonucleotide
agccggccagacgccgugc

SEQ ID NO: 1136867 - RNA, 19 nt, Artificial Sequence
  Description of Artificial Sequence: Synthetic oligonucleotide
ggaguaaggccaaugugau

SEQ ID NO: 1136868 - RNA, 19 nt, Artificial Sequence
  Description of Artificial Sequence: Synthetic oligonucleotide
ggaccgcuccggaacgccg

SEQ ID NO: 1136869 - RNA, 19 nt, Artificial Sequence
  Description of Artificial Sequence: Synthetic oligonucleotide
gcccucgaaagugcugccg

SEQ ID NO: 1136870 - RNA, 19 nt, Artificial Sequence
  Description of Artificial Sequence: Synthetic oligonucleotide
gaucuggcgaggugucuuu

SEQ ID NO: 1136871 - RNA, 19 nt, Artificial Sequence
  Description of Artificial Sequence: Synthetic oligonucleotide
cuggccggaaguggcuuuc

SEQ ID NO: 1136872 - RNA, 19 nt, Artificial Sequence
  Description of Artificial Sequence: Synthetic oligonucleotide
caggugcgcgaagcuggcg

SEQ ID NO: 1136873 - RNA, 19 nt, Artificial Sequence
  Description of Artificial Sequence: Synthetic oligonucleotide
ggcucgacugcauuaguuu

SEQ ID NO: 1136874 - RNA, 19 nt, Artificial Sequence
  Description of Artificial Sequence: Synthetic oligonucleotide
uccgccgcgggcgggcggc

SEQ ID NO: 1136875 - RNA, 19 nt, Artificial Sequence
  Description of Artificial Sequence: Synthetic oligonucleotide
ccggucgggcuccuguccg

SEQ ID NO: 1136876 - RNA, 19 nt, Artificial Sequence
  Description of Artificial Sequence: Synthetic oligonucleotide
cgagaguuccuucgggcuc

SEQ ID NO: 1136877 - RNA, 19 nt, Artificial Sequence
  Description of Artificial Sequence: Synthetic oligonucleotide
ucuccacaccagugcuauu

SEQ ID NO: 1136878 - RNA, 19 nt, Artificial Sequence
  Description of Artificial Sequence: Synthetic oligonucleotide
cucgagcccgcuggaccgc

SEQ ID NO: 1136879 - RNA, 19 nt, Artificial Sequence
  Description of Artificial Sequence: Synthetic oligonucleotide
gcacguuaauaauuuuguu

SEQ ID NO: 1136880 - RNA, 19 nt, Artificial Sequence
  Description of Artificial Sequence: Synthetic oligonucleotide
cguauccuacuaaauucaa

SEQ ID NO: 1136881 - RNA, 19 nt, Artificial Sequence
  Description of Artificial Sequence: Synthetic oligonucleotide
gcuuucaauaggcgguuuu

SEQ ID NO: 1136882 - RNA, 19 nt, Artificial Sequence
  Description of Artificial Sequence: Synthetic oligonucleotide
gccgccgggcaucaacuuc

SEQ ID NO: 1136883 - RNA, 19 nt, Artificial Sequence
  Description of Artificial Sequence: Synthetic oligonucleotide
ggauaaacucuggccggaa

SEQ ID NO: 1136884 - RNA, 19 nt, Artificial Sequence
  Description of Artificial Sequence: Synthetic oligonucleotide
ccggaauaggccugcagcu

SEQ ID NO: 1136885 - RNA, 19 nt, Artificial Sequence
  Description of Artificial Sequence: Synthetic oligonucleotide
ccgucagacgcugcgccgc

SEQ ID NO: 1136886 - RNA, 19 nt, Artificial Sequence
  Description of Artificial Sequence: Synthetic oligonucleotide
ggccacuaauguccacaga

SEQ ID NO: 1136887 - RNA, 19 nt, Artificial Sequence
  Description of Artificial Sequence: Synthetic oligonucleotide
gccgugcucgccccgccgc

SEQ ID NO: 1136888 - RNA, 19 nt, Artificial Sequence
  Description of Artificial Sequence: Synthetic oligonucleotide
cacauacaagacgcaccaa

SEQ ID NO: 1136889 - RNA, 19 nt, Artificial Sequence
  Description of Artificial Sequence: Synthetic oligonucleotide
cuccggaacgccgccgcca

SEQ ID NO: 1136890 - RNA, 19 nt, Artificial Sequence
  Description of Artificial Sequence: Synthetic oligonucleotide
ggcggcgagcggcucggug

SEQ ID NO: 1136891 - RNA, 19 nt, Artificial Sequence
  Description of Artificial Sequence: Synthetic oligonucleotide
ggcaguucagacugacguu

SEQ ID NO: 1136892 - RNA, 19 nt, Artificial Sequence
  Description of Artificial Sequence: Synthetic oligonucleotide
gggcaucaacuucgcccgc

SEQ ID NO: 1136893 - RNA, 19 nt, Artificial Sequence
  Description of Artificial Sequence: Synthetic oligonucleotide
cggguugagcaggugcgcg

SEQ ID NO: 1136894 - RNA, 19 nt, Artificial Sequence
  Description of Artificial Sequence: Synthetic oligonucleotide
gaagccggccagacgccgu

SEQ ID NO: 1136895 - RNA, 19 nt, Artificial Sequence
  Description of Artificial Sequence: Synthetic oligonucleotide
gcaucucuauagcgacuaa

SEQ ID NO: 1136896 - RNA, 19 nt, Artificial Sequence
  Description of Artificial Sequence: Synthetic oligonucleotide
guccgccgcgggcgggcgg

SEQ ID NO: 1136897 - RNA, 19 nt, Artificial Sequence
  Description of Artificial Sequence: Synthetic oligonucleotide
cuccgugaucuggcucgac

SEQ ID NO: 1136898 - RNA, 19 nt, Artificial Sequence
  Description of Artificial Sequence: Synthetic oligonucleotide
gccgggcaucaacuucgcc

SEQ ID NO: 1136899 - RNA, 19 nt, Artificial Sequence
  Description of Artificial Sequence: Synthetic oligonucleotide
ccaacucaccaaggagcug

SEQ ID NO: 1136900 - RNA, 19 nt, Artificial Sequence
  Description of Artificial Sequence: Synthetic oligonucleotide
gggccgucagacgcugcgc

SEQ ID NO: 1136901 - RNA, 19 nt, Artificial Sequence
  Description of Artificial Sequence: Synthetic oligonucleotide
cuggcucgacugcauuagu

SEQ ID NO: 1136902 - RNA, 19 nt, Artificial Sequence
  Description of Artificial Sequence: Synthetic oligonucleotide
gcggcgccggguugagcag

SEQ ID NO: 1136903 - RNA, 19 nt, Artificial Sequence
  Description of Artificial Sequence: Synthetic oligonucleotide
uggcggcgaacggguuggc

SEQ ID NO: 1136904 - RNA, 19 nt, Artificial Sequence
  Description of Artificial Sequence: Synthetic oligonucleotide
cgucagacgcugcgccgcg

SEQ ID NO: 1136905 - RNA, 19 nt, Artificial Sequence
  Description of Artificial Sequence: Synthetic oligonucleotide
ggccggaaguggcuuucaa

SEQ ID NO: 1136906 - RNA, 19 nt, Artificial Sequence
  Description of Artificial Sequence: Synthetic oligonucleotide
cugcgccgcgcugggcagc

SEQ ID NO: 1136907 - RNA, 19 nt, Artificial Sequence
  Description of Artificial Sequence: Synthetic oligonucleotide
ccauauugaccaggacaga

SEQ ID NO: 1136908 - RNA, 19 nt, Artificial Sequence
  Description of Artificial Sequence: Synthetic oligonucleotide
gcgguggacaggcccucga

SEQ ID NO: 1136909 - RNA, 19 nt, Artificial Sequence
  Description of Artificial Sequence: Synthetic oligonucleotide
cgcgaucuggcgagguguc

SEQ ID NO: 1136910 - RNA, 19 nt, Artificial Sequence
  Description of Artificial Sequence: Synthetic oligonucleotide
gcauuaguuuaagcagcau

SEQ ID NO: 1136911 - RNA, 19 nt, Artificial Sequence
  Description of Artificial Sequence: Synthetic oligonucleotide
caacgcgaucuggcgaggu

SEQ ID NO: 1136912 - RNA, 19 nt, Artificial Sequence
  Description of Artificial Sequence: Synthetic oligonucleotide
cgaacggguuggcggcgag

SEQ ID NO: 1136913 - RNA, 19 nt, Artificial Sequence
  Description of Artificial Sequence: Synthetic oligonucleotide
ccuccgcucgagcccgcug

SEQ ID NO: 1136914 - RNA, 19 nt, Artificial Sequence
  Description of Artificial Sequence: Synthetic oligonucleotide
gcggggccuccacucccug

SEQ ID NO: 1136915 - RNA, 19 nt, Artificial Sequence
  Description of Artificial Sequence: Synthetic oligonucleotide
ccugcacguuaauaauuuu

SEQ ID NO: 1136916 - RNA, 19 nt, Artificial Sequence
  Description of Artificial Sequence: Synthetic oligonucleotide
ccaaacgauucugcauaua

SEQ ID NO: 1136917 - RNA, 19 nt, Artificial Sequence
  Description of Artificial Sequence: Synthetic oligonucleotide
cggucgggcuccuguccgc

SEQ ID NO: 1136918 - RNA, 19 nt, Artificial Sequence
  Description of Artificial Sequence: Synthetic oligonucleotide
cggaacgccgccgccagaa

SEQ ID NO: 1136919 - RNA, 19 nt, Artificial Sequence
  Description of Artificial Sequence: Synthetic oligonucleotide
ggcuuucaauaggcgguuu

SEQ ID NO: 1136920 - RNA, 19 nt, Artificial Sequence
  Description of Artificial Sequence: Synthetic oligonucleotide
ccgcucgagcccgcuggac

SEQ ID NO: 1136921 - RNA, 19 nt, Artificial Sequence
  Description of Artificial Sequence: Synthetic oligonucleotide
gccgcgcugggcagcaggu

SEQ ID NO: 1136922 - RNA, 19 nt, Artificial Sequence
  Description of Artificial Sequence: Synthetic oligonucleotide
ccgcuggaccgcuccggaa

SEQ ID NO: 1136923 - RNA, 19 nt, Artificial Sequence
  Description of Artificial Sequence: Synthetic oligonucleotide
ccgccagaagccggccaga

SEQ ID NO: 1136924 - RNA, 19 nt, Artificial Sequence
  Description of Artificial Sequence: Synthetic oligonucleotide
cgagcccgcuggaccgcuc

SEQ ID NO: 1136925 - RNA, 19 nt, Artificial Sequence
  Description of Artificial Sequence: Synthetic oligonucleotide
cggcucggugcgguacauc

SEQ ID NO: 1136926 - RNA, 19 nt, Artificial Sequence
  Description of Artificial Sequence: Synthetic oligonucleotide
gcggcucggugcgguacau

SEQ ID NO: 1136927 - RNA, 19 nt, Artificial Sequence
  Description of Artificial Sequence: Synthetic oligonucleotide
ccgggucacugaggauacu

SEQ ID NO: 1136928 - RNA, 19 nt, Artificial Sequence
  Description of Artificial Sequence: Synthetic oligonucleotide
aaaugaacugacuuaaugg

SEQ ID NO: 1136929 - RNA, 19 nt, Artificial Sequence
  Description of Artificial Sequence: Synthetic oligonucleotide
aaugaacugacuuaauggg

SEQ ID NO: 1136930 - RNA, 19 nt, Artificial Sequence
  Description of Artificial Sequence: Synthetic oligonucleotide
auagucaucagauaaaauc

SEQ ID NO: 1136931 - RNA, 19 nt, Artificial Sequence
  Description of Artificial Sequence: Synthetic oligonucleotide
cuuaauuaaacuucaaugc

SEQ ID NO: 1136932 - RNA, 19 nt, Artificial Sequence
  Description of Artificial Sequence: Synthetic oligonucleotide
aaugauaacugauaggugu

SEQ ID NO: 1136933 - RNA, 19 nt, Artificial Sequence
  Description of Artificial Sequence: Synthetic oligonucleotide
cuucaauuaauuuaagagc

SEQ ID NO: 1136934 - RNA, 19 nt, Artificial Sequence
  Description of Artificial Sequence: Synthetic oligonucleotide
aauuuguaaaaccggaaug

SEQ ID NO: 1136935 - RNA, 19 nt, Artificial Sequence
  Description of Artificial Sequence: Synthetic oligonucleotide
aauucuggagucugaagac

SEQ ID NO: 1136936 - RNA, 19 nt, Artificial Sequence
  Description of Artificial Sequence: Synthetic oligonucleotide
agaauccaugcauauaugc

SEQ ID NO: 1136937 - RNA, 19 nt, Artificial Sequence
  Description of Artificial Sequence: Synthetic oligonucleotide
uucaaugcagagauggugg

SEQ ID NO: 1136938 - RNA, 19 nt, Artificial Sequence
  Description of Artificial Sequence: Synthetic oligonucleotide
gauaaaaucucaaagguga

SEQ ID NO: 1136939 - RNA, 19 nt, Artificial Sequence
  Description of Artificial Sequence: Synthetic oligonucleotide
ucaucugugaggauauucg

SEQ ID NO: 1136940 - RNA, 19 nt, Artificial Sequence
  Description of Artificial Sequence: Synthetic oligonucleotide
cuucugucgaauuuuaucc

SEQ ID NO: 1136941 - RNA, 19 nt, Artificial Sequence
  Description of Artificial Sequence: Synthetic oligonucleotide
uguaaaaccggaauguagu

SEQ ID NO: 1136942 - RNA, 19 nt, Artificial Sequence
  Description of Artificial Sequence: Synthetic oligonucleotide
aaauuuguaaaaccggaau

SEQ ID NO: 1136943 - RNA, 19 nt, Artificial Sequence
  Description of Artificial Sequence: Synthetic oligonucleotide
agugguguccgauacauuc

SEQ ID NO: 1136944 - RNA, 19 nt, Artificial Sequence
  Description of Artificial Sequence: Synthetic oligonucleotide
aaaaccggaauguaguaga

SEQ ID NO: 1136945 - RNA, 19 nt, Artificial Sequence
  Description of Artificial Sequence: Synthetic oligonucleotide
uuaugcaagaagacgaucu

SEQ ID NO: 1136946 - RNA, 19 nt, Artificial Sequence
  Description of Artificial Sequence: Synthetic oligonucleotide
uugugagugaaauucaaug

SEQ ID NO: 1136947 - RNA, 19 nt, Artificial Sequence
  Description of Artificial Sequence: Synthetic oligonucleotide
gaaaugaacugacuuaaug

SEQ ID NO: 1136948 - RNA, 19 nt, Artificial Sequence
  Description of Artificial Sequence: Synthetic oligonucleotide
uccuuguuaacuuugggca

SEQ ID NO: 1136949 - RNA, 19 nt, Artificial Sequence
  Description of Artificial Sequence: Synthetic oligonucleotide
cugauauccaugaagaauc

SEQ ID NO: 1136950 - RNA, 19 nt, Artificial Sequence
  Description of Artificial Sequence: Synthetic oligonucleotide
uuaaucuauacacuucaga

SEQ ID NO: 1136951 - RNA, 19 nt, Artificial Sequence
  Description of Artificial Sequence: Synthetic oligonucleotide
uccgauacauucaacgucc

SEQ ID NO: 1136952 - RNA, 19 nt, Artificial Sequence
  Description of Artificial Sequence: Synthetic oligonucleotide
uguucagaccucuugagug

SEQ ID NO: 1136953 - RNA, 19 nt, Artificial Sequence
  Description of Artificial Sequence: Synthetic oligonucleotide
aaucuaaugaauccuggaa

SEQ ID NO: 1136954 - RNA, 19 nt, Artificial Sequence
  Description of Artificial Sequence: Synthetic oligonucleotide
aguuuuguucaucagucuc

SEQ ID NO: 1136955 - RNA, 19 nt, Artificial Sequence
  Description of Artificial Sequence: Synthetic oligonucleotide
gaucucauagaacuggggc

SEQ ID NO: 1136956 - RNA, 19 nt, Artificial Sequence
  Description of Artificial Sequence: Synthetic oligonucleotide
ucuuugaauagucaucaga

SEQ ID NO: 1136957 - RNA, 19 nt, Artificial Sequence
  Description of Artificial Sequence: Synthetic oligonucleotide
gacaaauuuguaaaaccgg

SEQ ID NO: 1136958 - RNA, 19 nt, Artificial Sequence
  Description of Artificial Sequence: Synthetic oligonucleotide
uucaaugauaacugauagg

SEQ ID NO: 1136959 - RNA, 19 nt, Artificial Sequence
  Description of Artificial Sequence: Synthetic oligonucleotide
ugaagacaagaccaaaucu

SEQ ID NO: 1136960 - RNA, 19 nt, Artificial Sequence
  Description of Artificial Sequence: Synthetic oligonucleotide
guucauaacaccgaacccg

SEQ ID NO: 1136961 - RNA, 19 nt, Artificial Sequence
  Description of Artificial Sequence: Synthetic oligonucleotide
uaagcgaauggauuuacca

SEQ ID NO: 1136962 - RNA, 19 nt, Artificial Sequence
  Description of Artificial Sequence: Synthetic oligonucleotide
ugugagugaaauucaaugu

SEQ ID NO: 1136963 - RNA, 19 nt, Artificial Sequence
  Description of Artificial Sequence: Synthetic oligonucleotide
aaaucuaaugaauccugga

SEQ ID NO: 1136964 - RNA, 19 nt, Artificial Sequence
  Description of Artificial Sequence: Synthetic oligonucleotide
cuucaaugauaacugauag

SEQ ID NO: 1136965 - RNA, 19 nt, Artificial Sequence
  Description of Artificial Sequence: Synthetic oligonucleotide
agcgaauggauuuaccauc

SEQ ID NO: 1136966 - RNA, 19 nt, Artificial Sequence
  Description of Artificial Sequence: Synthetic oligonucleotide
cauuuugacaauucuggag

SEQ ID NO: 1136967 - RNA, 19 nt, Artificial Sequence
  Description of Artificial Sequence: Synthetic oligonucleotide
cacuauuuaaugcacaguc

SEQ ID NO: 1136968 - RNA, 19 nt, Artificial Sequence
  Description of Artificial Sequence: Synthetic oligonucleotide
ucaagaguuuuguucauca

SEQ ID NO: 1136969 - RNA, 19 nt, Artificial Sequence
  Description of Artificial Sequence: Synthetic oligonucleotide
gagucugauauccaugaag

SEQ ID NO: 1136970 - RNA, 19 nt, Artificial Sequence
  Description of Artificial Sequence: Synthetic oligonucleotide
uuaacuuugggcaguuucu

SEQ ID NO: 1136971 - RNA, 19 nt, Artificial Sequence
  Description of Artificial Sequence: Synthetic oligonucleotide
uuuuauccuuccuauauuc

SEQ ID NO: 1136972 - RNA, 19 nt, Artificial Sequence
  Description of Artificial Sequence: Synthetic oligonucleotide
agugaaauucaauguaucu

SEQ ID NO: 1136973 - RNA, 19 nt, Artificial Sequence
  Description of Artificial Sequence: Synthetic oligonucleotide
gaccaaaucuaaugaaucc

SEQ ID NO: 1136974 - RNA, 19 nt, Artificial Sequence
  Description of Artificial Sequence: Synthetic oligonucleotide
auagguguucauaacaccg

SEQ ID NO: 1136975 - RNA, 19 nt, Artificial Sequence
  Description of Artificial Sequence: Synthetic oligonucleotide
uuccuuguuaacuuugggc

SEQ ID NO: 1136976 - RNA, 19 nt, Artificial Sequence
  Description of Artificial Sequence: Synthetic oligonucleotide
ugcuucaaguuucaaacga

SEQ ID NO: 1136977 - RNA, 19 nt, Artificial Sequence
  Description of Artificial Sequence: Synthetic oligonucleotide
uaaugaauccuggaaauga

SEQ ID NO: 1136978 - RNA, 19 nt, Artificial Sequence
  Description of Artificial Sequence: Synthetic oligonucleotide
agaguuuuguucaucaguc

SEQ ID NO: 1136979 - RNA, 19 nt, Artificial Sequence
  Description of Artificial Sequence: Synthetic oligonucleotide
ugaacugacuuaaugggaa

SEQ ID NO: 1136980 - RNA, 19 nt, Artificial Sequence
  Description of Artificial Sequence: Synthetic oligonucleotide
uuuaaugcacaguccaaca

SEQ ID NO: 1136981 - RNA, 19 nt, Artificial Sequence
  Description of Artificial Sequence: Synthetic oligonucleotide
aacugauagguguucauaa

SEQ ID NO: 1136982 - RNA, 19 nt, Artificial Sequence
  Description of Artificial Sequence: Synthetic oligonucleotide
ucuaaugaauccuggaaau

SEQ ID NO: 1136983 - RNA, 19 nt, Artificial Sequence
  Description of Artificial Sequence: Synthetic oligonucleotide
ugaguccuaaauuuucaag

SEQ ID NO: 1136984 - RNA, 19 nt, Artificial Sequence
  Description of Artificial Sequence: Synthetic oligonucleotide
auaacuuuaaaccggucau

SEQ ID NO: 1136985 - RNA, 19 nt, Artificial Sequence
  Description of Artificial Sequence: Synthetic oligonucleotide
uuuaaaccggucaucugug

SEQ ID NO: 1136986 - RNA, 19 nt, Artificial Sequence
  Description of Artificial Sequence: Synthetic oligonucleotide
acuauuuaaugcacagucc

SEQ ID NO: 1136987 - RNA, 19 nt, Artificial Sequence
  Description of Artificial Sequence: Synthetic oligonucleotide
gaacuuuccgcaucacugg

SEQ ID NO: 1136988 - RNA, 19 nt, Artificial Sequence
  Description of Artificial Sequence: Synthetic oligonucleotide
acaaacauuguucuccgca

SEQ ID NO: 1136989 - RNA, 19 nt, Artificial Sequence
  Description of Artificial Sequence: Synthetic oligonucleotide
ugaguguaaaugucaacug

SEQ ID NO: 1136990 - RNA, 19 nt, Artificial Sequence
  Description of Artificial Sequence: Synthetic oligonucleotide
ugagugaaauucaauguau

SEQ ID NO: 1136991 - RNA, 19 nt, Artificial Sequence
  Description of Artificial Sequence: Synthetic oligonucleotide
acugauagguguucauaac

SEQ ID NO: 1136992 - RNA, 19 nt, Artificial Sequence
  Description of Artificial Sequence: Synthetic oligonucleotide
uagagucugauauccauga

SEQ ID NO: 1136993 - RNA, 19 nt, Artificial Sequence
  Description of Artificial Sequence: Synthetic oligonucleotide
guaucugucguuaugcaag

SEQ ID NO: 1136994 - RNA, 19 nt, Artificial Sequence
  Description of Artificial Sequence: Synthetic oligonucleotide
ugcauauaugcccggagga

SEQ ID NO: 1136995 - RNA, 19 nt, Artificial Sequence
  Description of Artificial Sequence: Synthetic oligonucleotide
uuaagagccaguuccuugu

SEQ ID NO: 1136996 - RNA, 19 nt, Artificial Sequence
  Description of Artificial Sequence: Synthetic oligonucleotide
ugugaguccuaaauuuuca

SEQ ID NO: 1136997 - RNA, 19 nt, Artificial Sequence
  Description of Artificial Sequence: Synthetic oligonucleotide
uucauaagcgaauggauuu

SEQ ID NO: 1136998 - RNA, 19 nt, Artificial Sequence
  Description of Artificial Sequence: Synthetic oligonucleotide
uuaaugcacaguccaacac

SEQ ID NO: 1136999 - RNA, 19 nt, Artificial Sequence
  Description of Artificial Sequence: Synthetic oligonucleotide
aagcccguacuggugaucc

SEQ ID NO: 1137000 - RNA, 19 nt, Artificial Sequence
  Description of Artificial Sequence: Synthetic oligonucleotide
ucgaauuuuauccuuccua

SEQ ID NO: 1137001 - RNA, 19 nt, Artificial Sequence
  Description of Artificial Sequence: Synthetic oligonucleotide
uggcaaacaagccaugcac

SEQ ID NO: 1137002 - RNA, 19 nt, Artificial Sequence
  Description of Artificial Sequence: Synthetic oligonucleotide
uucauaacaccgaacccga

SEQ ID NO: 1137003 - RNA, 19 nt, Artificial Sequence
  Description of Artificial Sequence: Synthetic oligonucleotide
ucuucauaagcgaauggau

SEQ ID NO: 1137004 - RNA, 19 nt, Artificial Sequence
  Description of Artificial Sequence: Synthetic oligonucleotide
auagaggcaaacaucguuc

SEQ ID NO: 1137005 - RNA, 19 nt, Artificial Sequence
  Description of Artificial Sequence: Synthetic oligonucleotide
augcauauaugcccggagg

SEQ ID NO: 1137006 - RNA, 19 nt, Artificial Sequence
  Description of Artificial Sequence: Synthetic oligonucleotide
uaaaccggucaucugugag

SEQ ID NO: 1137007 - RNA, 19 nt, Artificial Sequence
  Description of Artificial Sequence: Synthetic oligonucleotide
cauaacaccgaacccgagg

SEQ ID NO: 1137008 - RNA, 19 nt, Artificial Sequence
  Description of Artificial Sequence: Synthetic oligonucleotide
aacuugggaauucugguuu

SEQ ID NO: 1137009 - RNA, 19 nt, Artificial Sequence
  Description of Artificial Sequence: Synthetic oligonucleotide
aguccuaaauuuucaaggu

SEQ ID NO: 1137010 - RNA, 19 nt, Artificial Sequence
  Description of Artificial Sequence: Synthetic oligonucleotide
ugagaagcauuccugaguu

SEQ ID NO: 1137011 - RNA, 19 nt, Artificial Sequence
  Description of Artificial Sequence: Synthetic oligonucleotide
ucccgcuuugaucucauag

SEQ ID NO: 1137012 - RNA, 19 nt, Artificial Sequence
  Description of Artificial Sequence: Synthetic oligonucleotide
auuaauuuaagagccaguu

SEQ ID NO: 1137013 - RNA, 19 nt, Artificial Sequence
  Description of Artificial Sequence: Synthetic oligonucleotide
aacuggacucucugugcgc

SEQ ID NO: 1137014 - RNA, 19 nt, Artificial Sequence
  Description of Artificial Sequence: Synthetic oligonucleotide
ucugaauccaagcaccuuu

SEQ ID NO: 1137015 - RNA, 19 nt, Artificial Sequence
  Description of Artificial Sequence: Synthetic oligonucleotide
uguuccggcuccaaugaag

SEQ ID NO: 1137016 - RNA, 19 nt, Artificial Sequence
  Description of Artificial Sequence: Synthetic oligonucleotide
ugggcaguuucuuuaacug

SEQ ID NO: 1137017 - RNA, 19 nt, Artificial Sequence
  Description of Artificial Sequence: Synthetic oligonucleotide
uuuauccuuccuauauucu

SEQ ID NO: 1137018 - RNA, 19 nt, Artificial Sequence
  Description of Artificial Sequence: Synthetic oligonucleotide
uuaaugggaagcccguacu

SEQ ID NO: 1137019 - RNA, 19 nt, Artificial Sequence
  Description of Artificial Sequence: Synthetic oligonucleotide
agaccaaaucuaaugaauc

SEQ ID NO: 1137020 - RNA, 19 nt, Artificial Sequence
  Description of Artificial Sequence: Synthetic oligonucleotide
uugggauagaggcaaacau

SEQ ID NO: 1137021 - RNA, 19 nt, Artificial Sequence
  Description of Artificial Sequence: Synthetic oligonucleotide
aagcgaauggauuuaccau

SEQ ID NO: 1137022 - RNA, 19 nt, Artificial Sequence
  Description of Artificial Sequence: Synthetic oligonucleotide
gugaaauucaauguaucug

SEQ ID NO: 1137023 - RNA, 19 nt, Artificial Sequence
  Description of Artificial Sequence: Synthetic oligonucleotide
gaugcaguuucucagccuc

SEQ ID NO: 1137024 - RNA, 19 nt, Artificial Sequence
  Description of Artificial Sequence: Synthetic oligonucleotide
aagacgaucuuugaauagu

SEQ ID NO: 1137025 - RNA, 19 nt, Artificial Sequence
  Description of Artificial Sequence: Synthetic oligonucleotide
gggauagaggcaaacaucg

SEQ ID NO: 1137026 - RNA, 19 nt, Artificial Sequence
  Description of Artificial Sequence: Synthetic oligonucleotide
uggugauccuuaauuaaac

SEQ ID NO: 1137027 - RNA, 19 nt, Artificial Sequence
  Description of Artificial Sequence: Synthetic oligonucleotide
guaguagaugcccaucuug

SEQ ID NO: 1137028 - RNA, 19 nt, Artificial Sequence
  Description of Artificial Sequence: Synthetic oligonucleotide
uggaaaugaacugacuuaa

SEQ ID NO: 1137029 - RNA, 19 nt, Artificial Sequence
  Description of Artificial Sequence: Synthetic oligonucleotide
aucguucaggucauguucc

SEQ ID NO: 1137030 - RNA, 19 nt, Artificial Sequence
  Description of Artificial Sequence: Synthetic oligonucleotide
uauuuaaugcacaguccaa

SEQ ID NO: 1137031 - RNA, 19 nt, Artificial Sequence
  Description of Artificial Sequence: Synthetic oligonucleotide
cuauacacuucagagcuag

SEQ ID NO: 1137032 - RNA, 19 nt, Artificial Sequence
  Description of Artificial Sequence: Synthetic oligonucleotide
ugucgaauuuuauccuucc

SEQ ID NO: 1137033 - RNA, 19 nt, Artificial Sequence
  Description of Artificial Sequence: Synthetic oligonucleotide
ugcugugacacuauuuaau

SEQ ID NO: 1137034 - RNA, 19 nt, Artificial Sequence
  Description of Artificial Sequence: Synthetic oligonucleotide
ugggauagaggcaaacauc

SEQ ID NO: 1137035 - RNA, 19 nt, Artificial Sequence
  Description of Artificial Sequence: Synthetic oligonucleotide
cugugacacuauuuaaugc

SEQ ID NO: 1137036 - RNA, 19 nt, Artificial Sequence
  Description of Artificial Sequence: Synthetic oligonucleotide
auacauucaacgucccgug

SEQ ID NO: 1137037 - RNA, 19 nt, Artificial Sequence
  Description of Artificial Sequence: Synthetic oligonucleotide
ucuauuguuccuguggcaa

SEQ ID NO: 1137038 - RNA, 19 nt, Artificial Sequence
  Description of Artificial Sequence: Synthetic oligonucleotide
gagacaaguggguugagaa

SEQ ID NO: 1137039 - RNA, 19 nt, Artificial Sequence
  Description of Artificial Sequence: Synthetic oligonucleotide
cuuaaugggaagcccguac

SEQ ID NO: 1137040 - RNA, 19 nt, Artificial Sequence
  Description of Artificial Sequence: Synthetic oligonucleotide
augcacggcauuuauguca

SEQ ID NO: 1137041 - RNA, 19 nt, Artificial Sequence
  Description of Artificial Sequence: Synthetic oligonucleotide
aaaaccugauugugaguga

SEQ ID NO: 1137042 - RNA, 19 nt, Artificial Sequence
  Description of Artificial Sequence: Synthetic oligonucleotide
gauccucgagacaaguggg

SEQ ID NO: 1137043 - RNA, 19 nt, Artificial Sequence
  Description of Artificial Sequence: Synthetic oligonucleotide
augugugaguccuaaauuu

SEQ ID NO: 1137044 - RNA, 19 nt, Artificial Sequence
  Description of Artificial Sequence: Synthetic oligonucleotide
auucgggaggcucuuaacu

SEQ ID NO: 1137045 - RNA, 19 nt, Artificial Sequence
  Description of Artificial Sequence: Synthetic oligonucleotide
uagguguucauaacaccga

SEQ ID NO: 1137046 - RNA, 19 nt, Artificial Sequence
  Description of Artificial Sequence: Synthetic oligonucleotide
uuauccuuccuauauucuu

SEQ ID NO: 1137047 - RNA, 19 nt, Artificial Sequence
  Description of Artificial Sequence: Synthetic oligonucleotide
caguccaacacuccgacuc

SEQ ID NO: 1137048 - RNA, 19 nt, Artificial Sequence
  Description of Artificial Sequence: Synthetic oligonucleotide
ucucacugauccucgagac

SEQ ID NO: 1137049 - RNA, 19 nt, Artificial Sequence
  Description of Artificial Sequence: Synthetic oligonucleotide
cuuugaauagucaucagau

SEQ ID NO: 1137050 - RNA, 19 nt, Artificial Sequence
  Description of Artificial Sequence: Synthetic oligonucleotide
ugagaagucggaacucuuc

SEQ ID NO: 1137051 - RNA, 19 nt, Artificial Sequence
  Description of Artificial Sequence: Synthetic oligonucleotide
uugcucuaaauuuaaucua

SEQ ID NO: 1137052 - RNA, 19 nt, Artificial Sequence
  Description of Artificial Sequence: Synthetic oligonucleotide
cauauaugcccggaggaag

SEQ ID NO: 1137053 - RNA, 19 nt, Artificial Sequence
  Description of Artificial Sequence: Synthetic oligonucleotide
aggugaccacuucugaauc

SEQ ID NO: 1137054 - RNA, 19 nt, Artificial Sequence
  Description of Artificial Sequence: Synthetic oligonucleotide
gugguagagucugauaucc

SEQ ID NO: 1137055 - RNA, 19 nt, Artificial Sequence
  Description of Artificial Sequence: Synthetic oligonucleotide
auucagguaccgcccuugc

SEQ ID NO: 1137056 - RNA, 19 nt, Artificial Sequence
  Description of Artificial Sequence: Synthetic oligonucleotide
auaagcgaauggauuuacc

SEQ ID NO: 1137057 - RNA, 19 nt, Artificial Sequence
  Description of Artificial Sequence: Synthetic oligonucleotide
acauucaacgucccgugcu

SEQ ID NO: 1137058 - RNA, 19 nt, Artificial Sequence
  Description of Artificial Sequence: Synthetic oligonucleotide
cuuucaaacuucaaugaua

SEQ ID NO: 1137059 - RNA, 19 nt, Artificial Sequence
  Description of Artificial Sequence: Synthetic oligonucleotide
ugcacggcauuuaugucac

SEQ ID NO: 1137060 - RNA, 19 nt, Artificial Sequence
  Description of Artificial Sequence: Synthetic oligonucleotide
gcaaacaagccaugcacgg

SEQ ID NO: 1137061 - RNA, 19 nt, Artificial Sequence
  Description of Artificial Sequence: Synthetic oligonucleotide
gagaagucggaacucuuca

SEQ ID NO: 1137062 - RNA, 19 nt, Artificial Sequence
  Description of Artificial Sequence: Synthetic oligonucleotide
cuucaaugcagagauggug

SEQ ID NO: 1137063 - RNA, 19 nt, Artificial Sequence
  Description of Artificial Sequence: Synthetic oligonucleotide
caaugauaacugauaggug

SEQ ID NO: 1137064 - RNA, 19 nt, Artificial Sequence
  Description of Artificial Sequence: Synthetic oligonucleotide
uagaggcaaacaucguuca

SEQ ID NO: 1137065 - RNA, 19 nt, Artificial Sequence
  Description of Artificial Sequence: Synthetic oligonucleotide
acuggugauccuuaauuaa

SEQ ID NO: 1137066 - RNA, 19 nt, Artificial Sequence
  Description of Artificial Sequence: Synthetic oligonucleotide
gauacauucaacgucccgu

SEQ ID NO: 1137067 - RNA, 19 nt, Artificial Sequence
  Description of Artificial Sequence: Synthetic oligonucleotide
uggguugagaagucggaac

SEQ ID NO: 1137068 - RNA, 19 nt, Artificial Sequence
  Description of Artificial Sequence: Synthetic oligonucleotide
augaagaauccaugcauau

SEQ ID NO: 1137069 - RNA, 19 nt, Artificial Sequence
  Description of Artificial Sequence: Synthetic oligonucleotide
cugauagguguucauaaca

SEQ ID NO: 1137070 - RNA, 19 nt, Artificial Sequence
  Description of Artificial Sequence: Synthetic oligonucleotide
uaucugucguuaugcaaga

SEQ ID NO: 1137071 - RNA, 19 nt, Artificial Sequence
  Description of Artificial Sequence: Synthetic oligonucleotide
auccaugcauauaugcccg

SEQ ID NO: 1137072 - RNA, 19 nt, Artificial Sequence
  Description of Artificial Sequence: Synthetic oligonucleotide
caugcauauaugcccggag

SEQ ID NO: 1137073 - RNA, 19 nt, Artificial Sequence
  Description of Artificial Sequence: Synthetic oligonucleotide
uucaacccaggccuucuca

SEQ ID NO: 1137074 - RNA, 19 nt, Artificial Sequence
  Description of Artificial Sequence: Synthetic oligonucleotide
uaugcaagaagacgaucuu

SEQ ID NO: 1137075 - RNA, 19 nt, Artificial Sequence
  Description of Artificial Sequence: Synthetic oligonucleotide
uacauucaacgucccgugc

SEQ ID NO: 1137076 - RNA, 19 nt, Artificial Sequence
  Description of Artificial Sequence: Synthetic oligonucleotide
cuuuaaaccggucaucugu

SEQ ID NO: 1137077 - RNA, 19 nt, Artificial Sequence
  Description of Artificial Sequence: Synthetic oligonucleotide
ugugguagagucugauauc

SEQ ID NO: 1137078 - RNA, 19 nt, Artificial Sequence
  Description of Artificial Sequence: Synthetic oligonucleotide
gauaacugauagguguuca

SEQ ID NO: 1137079 - RNA, 19 nt, Artificial Sequence
  Description of Artificial Sequence: Synthetic oligonucleotide
caauguaucugucguuaug

SEQ ID NO: 1137080 - RNA, 19 nt, Artificial Sequence
  Description of Artificial Sequence: Synthetic oligonucleotide
acuuuaaaccggucaucug

SEQ ID NO: 1137081 - RNA, 19 nt, Artificial Sequence
  Description of Artificial Sequence: Synthetic oligonucleotide
gauggguagugguaagaga

SEQ ID NO: 1137082 - RNA, 19 nt, Artificial Sequence
  Description of Artificial Sequence: Synthetic oligonucleotide
aguugggauagaggcaaac

SEQ ID NO: 1137083 - RNA, 19 nt, Artificial Sequence
  Description of Artificial Sequence: Synthetic oligonucleotide
uuugacaauucuggagucu

SEQ ID NO: 1137084 - RNA, 19 nt, Artificial Sequence
  Description of Artificial Sequence: Synthetic oligonucleotide
agacgaucuuugaauaguc

SEQ ID NO: 1137085 - RNA, 19 nt, Artificial Sequence
  Description of Artificial Sequence: Synthetic oligonucleotide
cuccugacgaugcaguuuc

SEQ ID NO: 1137086 - RNA, 19 nt, Artificial Sequence
  Description of Artificial Sequence: Synthetic oligonucleotide
gugagugaaauucaaugua

SEQ ID NO: 1137087 - RNA, 19 nt, Artificial Sequence
  Description of Artificial Sequence: Synthetic oligonucleotide
aaaccugauugugagugaa

SEQ ID NO: 1137088 - RNA, 19 nt, Artificial Sequence
  Description of Artificial Sequence: Synthetic oligonucleotide
cuaaugaauccuggaaaug

SEQ ID NO: 1137089 - RNA, 19 nt, Artificial Sequence
  Description of Artificial Sequence: Synthetic oligonucleotide
uccacucgacccucuauug

SEQ ID NO: 1137090 - RNA, 19 nt, Artificial Sequence
  Description of Artificial Sequence: Synthetic oligonucleotide
caaauuuguaaaaccggaa

SEQ ID NO: 1137091 - RNA, 19 nt, Artificial Sequence
  Description of Artificial Sequence: Synthetic oligonucleotide
uuaaaccggucaucuguga

SEQ ID NO: 1137092 - RNA, 19 nt, Artificial Sequence
  Description of Artificial Sequence: Synthetic oligonucleotide
acuggacucucugugcgcg

SEQ ID NO: 1137093 - RNA, 19 nt, Artificial Sequence
  Description of Artificial Sequence: Synthetic oligonucleotide
ucguucaggucauguuccg

SEQ ID NO: 1137094 - RNA, 19 nt, Artificial Sequence
  Description of Artificial Sequence: Synthetic oligonucleotide
aggacugucuccugguccu

SEQ ID NO: 1137095 - RNA, 19 nt, Artificial Sequence
  Description of Artificial Sequence: Synthetic oligonucleotide
gaggauucagguaccgccc

SEQ ID NO: 1137096 - RNA, 19 nt, Artificial Sequence
  Description of Artificial Sequence: Synthetic oligonucleotide
cugacuuaaugggaagccc

SEQ ID NO: 1137097 - RNA, 19 nt, Artificial Sequence
  Description of Artificial Sequence: Synthetic oligonucleotide
guccgauacauucaacguc

SEQ ID NO: 1137098 - RNA, 19 nt, Artificial Sequence
  Description of Artificial Sequence: Synthetic oligonucleotide
gagugaaauucaauguauc

SEQ ID NO: 1137099 - RNA, 19 nt, Artificial Sequence
  Description of Artificial Sequence: Synthetic oligonucleotide
ccaaaucuaaugaauccug

SEQ ID NO: 1137100 - RNA, 19 nt, Artificial Sequence
  Description of Artificial Sequence: Synthetic oligonucleotide
gaauggauuuaccaucagu

SEQ ID NO: 1137101 - RNA, 19 nt, Artificial Sequence
  Description of Artificial Sequence: Synthetic oligonucleotide
uauacacuucagagcuagc

SEQ ID NO: 1137102 - RNA, 19 nt, Artificial Sequence
  Description of Artificial Sequence: Synthetic oligonucleotide
uucaacgucccgugcuuug

SEQ ID NO: 1137103 - RNA, 19 nt, Artificial Sequence
  Description of Artificial Sequence: Synthetic oligonucleotide
uuugggcaguuucuuuaac

SEQ ID NO: 1137104 - RNA, 19 nt, Artificial Sequence
  Description of Artificial Sequence: Synthetic oligonucleotide
guccuaaauuuucaagguc

SEQ ID NO: 1137105 - RNA, 19 nt, Artificial Sequence
  Description of Artificial Sequence: Synthetic oligonucleotide
gcuagcaccaacgaaguac

SEQ ID NO: 1137106 - RNA, 19 nt, Artificial Sequence
  Description of Artificial Sequence: Synthetic oligonucleotide
auguaucugucguuaugca

SEQ ID NO: 1137107 - RNA, 19 nt, Artificial Sequence
  Description of Artificial Sequence: Synthetic oligonucleotide
ucucauagaacuggggcuu

SEQ ID NO: 1137108 - RNA, 19 nt, Artificial Sequence
  Description of Artificial Sequence: Synthetic oligonucleotide
gauagaggcaaacaucguu

SEQ ID NO: 1137109 - RNA, 19 nt, Artificial Sequence
  Description of Artificial Sequence: Synthetic oligonucleotide
agucggaacucuucacucu

SEQ ID NO: 1137110 - RNA, 19 nt, Artificial Sequence
  Description of Artificial Sequence: Synthetic oligonucleotide
cugugaggauauucgggag

SEQ ID NO: 1137111 - RNA, 19 nt, Artificial Sequence
  Description of Artificial Sequence: Synthetic oligonucleotide
cugaauccaagcaccuuuc

SEQ ID NO: 1137112 - RNA, 19 nt, Artificial Sequence
  Description of Artificial Sequence: Synthetic oligonucleotide
auauucgggaggcucuuaa

SEQ ID NO: 1137113 - RNA, 19 nt, Artificial Sequence
  Description of Artificial Sequence: Synthetic oligonucleotide
gauucagguaccgcccuug

SEQ ID NO: 1137114 - RNA, 19 nt, Artificial Sequence
  Description of Artificial Sequence: Synthetic oligonucleotide
ugggcaagcuguuuaucuc

SEQ ID NO: 1137115 - RNA, 19 nt, Artificial Sequence
  Description of Artificial Sequence: Synthetic oligonucleotide
caucugaacucucugaacu

SEQ ID NO: 1137116 - RNA, 19 nt, Artificial Sequence
  Description of Artificial Sequence: Synthetic oligonucleotide
uaacugauagguguucaua

SEQ ID NO: 1137117 - RNA, 19 nt, Artificial Sequence
  Description of Artificial Sequence: Synthetic oligonucleotide
uuucuuacucuuggauccc

SEQ ID NO: 1137118 - RNA, 19 nt, Artificial Sequence
  Description of Artificial Sequence: Synthetic oligonucleotide
ggcaaacaagccaugcacg

SEQ ID NO: 1137119 - RNA, 19 nt, Artificial Sequence
  Description of Artificial Sequence: Synthetic oligonucleotide
cuggaaaugaacugacuua

SEQ ID NO: 1137120 - RNA, 19 nt, Artificial Sequence
  Description of Artificial Sequence: Synthetic oligonucleotide
uucgggaggcucuuaacuu

SEQ ID NO: 1137121 - RNA, 19 nt, Artificial Sequence
  Description of Artificial Sequence: Synthetic oligonucleotide
uauucgggaggcucuuaac

SEQ ID NO: 1137122 - RNA, 19 nt, Artificial Sequence
  Description of Artificial Sequence: Synthetic oligonucleotide
augaacugacuuaauggga

SEQ ID NO: 1137123 - RNA, 19 nt, Artificial Sequence
  Description of Artificial Sequence: Synthetic oligonucleotide
cauaagcgaauggauuuac

SEQ ID NO: 1137124 - RNA, 19 nt, Artificial Sequence
  Description of Artificial Sequence: Synthetic oligonucleotide
ugauaacugauagguguuc

SEQ ID NO: 1137125 - RNA, 19 nt, Artificial Sequence
  Description of Artificial Sequence: Synthetic oligonucleotide
uuccugaguugggauagag

SEQ ID NO: 1137126 - RNA, 19 nt, Artificial Sequence
  Description of Artificial Sequence: Synthetic oligonucleotide
ugguagagucugauaucca

SEQ ID NO: 1137127 - RNA, 19 nt, Artificial Sequence
  Description of Artificial Sequence: Synthetic oligonucleotide
gauugugagugaaauucaa

SEQ ID NO: 1137128 - RNA, 19 nt, Artificial Sequence
  Description of Artificial Sequence: Synthetic oligonucleotide
cuggugauccuuaauuaaa

SEQ ID NO: 1137129 - RNA, 19 nt, Artificial Sequence
  Description of Artificial Sequence: Synthetic oligonucleotide
ugggaagcccguacuggug

SEQ ID NO: 1137130 - RNA, 19 nt, Artificial Sequence
  Description of Artificial Sequence: Synthetic oligonucleotide
ucaacccaggccuucucau

SEQ ID NO: 1137131 - RNA, 19 nt, Artificial Sequence
  Description of Artificial Sequence: Synthetic oligonucleotide
ucauaagcgaauggauuua

SEQ ID NO: 1137132 - RNA, 19 nt, Artificial Sequence
  Description of Artificial Sequence: Synthetic oligonucleotide
accugauugugagugaaau

SEQ ID NO: 1137133 - RNA, 19 nt, Artificial Sequence
  Description of Artificial Sequence: Synthetic oligonucleotide
ucugaacucucugaacuuu

SEQ ID NO: 1137134 - RNA, 19 nt, Artificial Sequence
  Description of Artificial Sequence: Synthetic oligonucleotide
aguccaacacuccgacucu

SEQ ID NO: 1137135 - RNA, 19 nt, Artificial Sequence
  Description of Artificial Sequence: Synthetic oligonucleotide
cauguuccggcuccaauga

SEQ ID NO: 1137136 - RNA, 19 nt, Artificial Sequence
  Description of Artificial Sequence: Synthetic oligonucleotide
aguguggccuucuguuucu

SEQ ID NO: 1137137 - RNA, 19 nt, Artificial Sequence
  Description of Artificial Sequence: Synthetic oligonucleotide
cccucuauuguuccugugg

SEQ ID NO: 1137138 - RNA, 19 nt, Artificial Sequence
  Description of Artificial Sequence: Synthetic oligonucleotide
guaaaaccggaauguagua

SEQ ID NO: 1137139 - RNA, 19 nt, Artificial Sequence
  Description of Artificial Sequence: Synthetic oligonucleotide
acacuauuuaaugcacagu

SEQ ID NO: 1137140 - RNA, 19 nt, Artificial Sequence
  Description of Artificial Sequence: Synthetic oligonucleotide
ucaacgucccgugcuuugc

SEQ ID NO: 1137141 - RNA, 19 nt, Artificial Sequence
  Description of Artificial Sequence: Synthetic oligonucleotide
ccucuauuguuccuguggc

SEQ ID NO: 1137142 - RNA, 19 nt, Artificial Sequence
  Description of Artificial Sequence: Synthetic oligonucleotide
acaucguucaggucauguu

SEQ ID NO: 1137143 - RNA, 19 nt, Artificial Sequence
  Description of Artificial Sequence: Synthetic oligonucleotide
uugagaagucggaacucuu

SEQ ID NO: 1137144 - RNA, 19 nt, Artificial Sequence
  Description of Artificial Sequence: Synthetic oligonucleotide
ugguggcagacucuuugaa

SEQ ID NO: 1137145 - RNA, 19 nt, Artificial Sequence
  Description of Artificial Sequence: Synthetic oligonucleotide
ucggaacucuucacucucu

SEQ ID NO: 1137146 - RNA, 19 nt, Artificial Sequence
  Description of Artificial Sequence: Synthetic oligonucleotide
agucgggguucucaaacau

SEQ ID NO: 1137147 - RNA, 19 nt, Artificial Sequence
  Description of Artificial Sequence: Synthetic oligonucleotide
agggccggccucuucuggg

SEQ ID NO: 1137148 - RNA, 19 nt, Artificial Sequence
  Description of Artificial Sequence: Synthetic oligonucleotide
aucugaacucucugaacuu

SEQ ID NO: 1137149 - RNA, 19 nt, Artificial Sequence
  Description of Artificial Sequence: Synthetic oligonucleotide
guuaugcaagaagacgauc

SEQ ID NO: 1137150 - RNA, 19 nt, Artificial Sequence
  Description of Artificial Sequence: Synthetic oligonucleotide
gaggaaggugauccaauua

SEQ ID NO: 1137151 - RNA, 19 nt, Artificial Sequence
  Description of Artificial Sequence: Synthetic oligonucleotide
aggauucagguaccgcccu

SEQ ID NO: 1137152 - RNA, 19 nt, Artificial Sequence
  Description of Artificial Sequence: Synthetic oligonucleotide
ggauggguagugguaagag

SEQ ID NO: 1137153 - RNA, 19 nt, Artificial Sequence
  Description of Artificial Sequence: Synthetic oligonucleotide
gagaggauucagguaccgc

SEQ ID NO: 1137154 - RNA, 19 nt, Artificial Sequence
  Description of Artificial Sequence: Synthetic oligonucleotide
cacaaacauuguucuccgc

SEQ ID NO: 1137155 - RNA, 19 nt, Artificial Sequence
  Description of Artificial Sequence: Synthetic oligonucleotide
uuugcuguucagaccucuu

SEQ ID NO: 1137156 - RNA, 19 nt, Artificial Sequence
  Description of Artificial Sequence: Synthetic oligonucleotide
agugaaagggccggccucu

SEQ ID NO: 1137157 - RNA, 19 nt, Artificial Sequence
  Description of Artificial Sequence: Synthetic oligonucleotide
acggcauuuaugucacaaa

SEQ ID NO: 1137158 - RNA, 19 nt, Artificial Sequence
  Description of Artificial Sequence: Synthetic oligonucleotide
uauaugcccggaggaaggu

SEQ ID NO: 1137159 - RNA, 19 nt, Artificial Sequence
  Description of Artificial Sequence: Synthetic oligonucleotide
ucgcaggauggguaguggu

SEQ ID NO: 1137160 - RNA, 19 nt, Artificial Sequence
  Description of Artificial Sequence: Synthetic oligonucleotide
agcauuccacucgacccuc

SEQ ID NO: 1137161 - RNA, 19 nt, Artificial Sequence
  Description of Artificial Sequence: Synthetic oligonucleotide
ucugcgcugcuuccugacu

SEQ ID NO: 1137162 - RNA, 19 nt, Artificial Sequence
  Description of Artificial Sequence: Synthetic oligonucleotide
aaaccggaauguaguagau

SEQ ID NO: 1137163 - RNA, 19 nt, Artificial Sequence
  Description of Artificial Sequence: Synthetic oligonucleotide
uuccgcaucacuggguuuu

SEQ ID NO: 1137164 - RNA, 19 nt, Artificial Sequence
  Description of Artificial Sequence: Synthetic oligonucleotide
ucccgugcuuugcuucaag

SEQ ID NO: 1137165 - RNA, 19 nt, Artificial Sequence
  Description of Artificial Sequence: Synthetic oligonucleotide
cuucauaagcgaauggauu

SEQ ID NO: 1137166 - RNA, 19 nt, Artificial Sequence
  Description of Artificial Sequence: Synthetic oligonucleotide
ccaacgaaguacaggucgc

SEQ ID NO: 1137167 - RNA, 19 nt, Artificial Sequence
  Description of Artificial Sequence: Synthetic oligonucleotide
gaauguaguagaugcccau

SEQ ID NO: 1137168 - RNA, 19 nt, Artificial Sequence
  Description of Artificial Sequence: Synthetic oligonucleotide
augauaacugauagguguu

SEQ ID NO: 1137169 - RNA, 19 nt, Artificial Sequence
  Description of Artificial Sequence: Synthetic oligonucleotide
caggauggguagugguaag

SEQ ID NO: 1137170 - RNA, 19 nt, Artificial Sequence
  Description of Artificial Sequence: Synthetic oligonucleotide
uucuccgcagcauccguuu

SEQ ID NO: 1137171 - RNA, 19 nt, Artificial Sequence
  Description of Artificial Sequence: Synthetic oligonucleotide
acuugggaauucugguuuu

SEQ ID NO: 1137172 - RNA, 19 nt, Artificial Sequence
  Description of Artificial Sequence: Synthetic oligonucleotide
agucucugcuugguggcag

SEQ ID NO: 1137173 - RNA, 19 nt, Artificial Sequence
  Description of Artificial Sequence: Synthetic oligonucleotide
gaccucaggugaccagcag

SEQ ID NO: 1137174 - RNA, 19 nt, Artificial Sequence
  Description of Artificial Sequence: Synthetic oligonucleotide
ucagaccucuugaguguaa

SEQ ID NO: 1137175 - RNA, 19 nt, Artificial Sequence
  Description of Artificial Sequence: Synthetic oligonucleotide
agagucugauauccaugaa

SEQ ID NO: 1137176 - RNA, 19 nt, Artificial Sequence
  Description of Artificial Sequence: Synthetic oligonucleotide
aacgucccgugcuuugcuu

SEQ ID NO: 1137177 - RNA, 19 nt, Artificial Sequence
  Description of Artificial Sequence: Synthetic oligonucleotide
uagaugugugaguccuaaa

SEQ ID NO: 1137178 - RNA, 19 nt, Artificial Sequence
  Description of Artificial Sequence: Synthetic oligonucleotide
cucuauuguuccuguggca

SEQ ID NO: 1137179 - RNA, 19 nt, Artificial Sequence
  Description of Artificial Sequence: Synthetic oligonucleotide
cuugggaauucugguuuug

SEQ ID NO: 1137180 - RNA, 19 nt, Artificial Sequence
  Description of Artificial Sequence: Synthetic oligonucleotide
uccgcagcauccguuugga

SEQ ID NO: 1137181 - RNA, 19 nt, Artificial Sequence
  Description of Artificial Sequence: Synthetic oligonucleotide
ugcgcguguuucuucuauc

SEQ ID NO: 1137182 - RNA, 19 nt, Artificial Sequence
  Description of Artificial Sequence: Synthetic oligonucleotide
auuguuccuguggcaaaca

SEQ ID NO: 1137183 - RNA, 19 nt, Artificial Sequence
  Description of Artificial Sequence: Synthetic oligonucleotide
uccaacacuccgacucuuu

SEQ ID NO: 1137184 - RNA, 19 nt, Artificial Sequence
  Description of Artificial Sequence: Synthetic oligonucleotide
uggugggcaagcuguuuau

SEQ ID NO: 1137185 - RNA, 19 nt, Artificial Sequence
  Description of Artificial Sequence: Synthetic oligonucleotide
cucgagacaaguggguuga

SEQ ID NO: 1137186 - RNA, 19 nt, Artificial Sequence
  Description of Artificial Sequence: Synthetic oligonucleotide
uggacucucugugcgcgug

SEQ ID NO: 1137187 - RNA, 19 nt, Artificial Sequence
  Description of Artificial Sequence: Synthetic oligonucleotide
gcugccaacaguggugucc

SEQ ID NO: 1137188 - RNA, 19 nt, Artificial Sequence
  Description of Artificial Sequence: Synthetic oligonucleotide
ucugccgaacuugggaauu

SEQ ID NO: 1137189 - RNA, 19 nt, Artificial Sequence
  Description of Artificial Sequence: Synthetic oligonucleotide
guuucaccuugugguagag

SEQ ID NO: 1137190 - RNA, 19 nt, Artificial Sequence
  Description of Artificial Sequence: Synthetic oligonucleotide
guucagaccucuugagugu

SEQ ID NO: 1137191 - RNA, 19 nt, Artificial Sequence
  Description of Artificial Sequence: Synthetic oligonucleotide
cacugauccucgagacaag

SEQ ID NO: 1137192 - RNA, 19 nt, Artificial Sequence
  Description of Artificial Sequence: Synthetic oligonucleotide
ggugauccaauuagaugug

SEQ ID NO: 1137193 - RNA, 19 nt, Artificial Sequence
  Description of Artificial Sequence: Synthetic oligonucleotide
gucgcaggauggguagugg

SEQ ID NO: 1137194 - RNA, 19 nt, Artificial Sequence
  Description of Artificial Sequence: Synthetic oligonucleotide
acaguccaacacuccgacu

SEQ ID NO: 1137195 - RNA, 19 nt, Artificial Sequence
  Description of Artificial Sequence: Synthetic oligonucleotide
ucuccugacgaugcaguuu

SEQ ID NO: 1137196 - RNA, 19 nt, Artificial Sequence
  Description of Artificial Sequence: Synthetic oligonucleotide
cggaauguaguagaugccc

SEQ ID NO: 1137197 - RNA, 19 nt, Artificial Sequence
  Description of Artificial Sequence: Synthetic oligonucleotide
cuauuguuccuguggcaaa

SEQ ID NO: 1137198 - RNA, 19 nt, Artificial Sequence
  Description of Artificial Sequence: Synthetic oligonucleotide
cggcauuuaugucacaaac

SEQ ID NO: 1137199 - RNA, 19 nt, Artificial Sequence
  Description of Artificial Sequence: Synthetic oligonucleotide
agucugaagacaagaccaa

SEQ ID NO: 1137200 - RNA, 19 nt, Artificial Sequence
  Description of Artificial Sequence: Synthetic oligonucleotide
ggugauccuuaauuaaacu

SEQ ID NO: 1137201 - RNA, 19 nt, Artificial Sequence
  Description of Artificial Sequence: Synthetic oligonucleotide
guugagaagucggaacucu

SEQ ID NO: 1137202 - RNA, 19 nt, Artificial Sequence
  Description of Artificial Sequence: Synthetic oligonucleotide
cccagcauuccacucgacc

SEQ ID NO: 1137203 - RNA, 19 nt, Artificial Sequence
  Description of Artificial Sequence: Synthetic oligonucleotide
ugcgcugcuuccugacuuc

SEQ ID NO: 1137204 - RNA, 19 nt, Artificial Sequence
  Description of Artificial Sequence: Synthetic oligonucleotide
gucaacugcuugcugccaa

SEQ ID NO: 1137205 - RNA, 19 nt, Artificial Sequence
  Description of Artificial Sequence: Synthetic oligonucleotide
auaugcccggaggaaggug

SEQ ID NO: 1137206 - RNA, 19 nt, Artificial Sequence
  Description of Artificial Sequence: Synthetic oligonucleotide
aaccugauugugagugaaa

SEQ ID NO: 1137207 - RNA, 19 nt, Artificial Sequence
  Description of Artificial Sequence: Synthetic oligonucleotide
uccucgagacaaguggguu

SEQ ID NO: 1137208 - RNA, 19 nt, Artificial Sequence
  Description of Artificial Sequence: Synthetic oligonucleotide
gccucauuggcagugagaa

SEQ ID NO: 1137209 - RNA, 19 nt, Artificial Sequence
  Description of Artificial Sequence: Synthetic oligonucleotide
caccaacgaaguacagguc

SEQ ID NO: 1137210 - RNA, 19 nt, Artificial Sequence
  Description of Artificial Sequence: Synthetic oligonucleotide
aacaagccaugcacggcau

SEQ ID NO: 1137211 - RNA, 19 nt, Artificial Sequence
  Description of Artificial Sequence: Synthetic oligonucleotide
agucugcgcugcuuccuga

SEQ ID NO: 1137212 - RNA, 19 nt, Artificial Sequence
  Description of Artificial Sequence: Synthetic oligonucleotide
cucacugauccucgagaca

SEQ ID NO: 1137213 - RNA, 19 nt, Artificial Sequence
  Description of Artificial Sequence: Synthetic oligonucleotide
acccucuauuguuccugug

SEQ ID NO: 1137214 - RNA, 19 nt, Artificial Sequence
  Description of Artificial Sequence: Synthetic oligonucleotide
agucucugccgaacuuggg

SEQ ID NO: 1137215 - RNA, 19 nt, Artificial Sequence
  Description of Artificial Sequence: Synthetic oligonucleotide
aaacaucguucaggucaug

SEQ ID NO: 1137216 - RNA, 19 nt, Artificial Sequence
  Description of Artificial Sequence: Synthetic oligonucleotide
agcauccguuuggagagga

SEQ ID NO: 1137217 - RNA, 19 nt, Artificial Sequence
  Description of Artificial Sequence: Synthetic oligonucleotide
cacggcauuuaugucacaa

SEQ ID NO: 1137218 - RNA, 19 nt, Artificial Sequence
  Description of Artificial Sequence: Synthetic oligonucleotide
ccggaauguaguagaugcc

SEQ ID NO: 1137219 - RNA, 19 nt, Artificial Sequence
  Description of Artificial Sequence: Synthetic oligonucleotide
gacuuaaugggaagcccgu

SEQ ID NO: 1137220 - RNA, 19 nt, Artificial Sequence
  Description of Artificial Sequence: Synthetic oligonucleotide
gucgaauuuuauccuuccu

SEQ ID NO: 1137221 - RNA, 19 nt, Artificial Sequence
  Description of Artificial Sequence: Synthetic oligonucleotide
gggaagcccguacugguga

SEQ ID NO: 1137222 - RNA, 19 nt, Artificial Sequence
  Description of Artificial Sequence: Synthetic oligonucleotide
gucugcgcugcuuccugac

SEQ ID NO: 1137223 - RNA, 19 nt, Artificial Sequence
  Description of Artificial Sequence: Synthetic oligonucleotide
acuuuccgcaucacugggu

SEQ ID NO: 1137224 - RNA, 19 nt, Artificial Sequence
  Description of Artificial Sequence: Synthetic oligonucleotide
gcgaauggauuuaccauca

SEQ ID NO: 1137225 - RNA, 19 nt, Artificial Sequence
  Description of Artificial Sequence: Synthetic oligonucleotide
uuuccgcaucacuggguuu

SEQ ID NO: 1137226 - RNA, 19 nt, Artificial Sequence
  Description of Artificial Sequence: Synthetic oligonucleotide
uccugacgaugcaguuucu

SEQ ID NO: 1137227 - RNA, 19 nt, Artificial Sequence
  Description of Artificial Sequence: Synthetic oligonucleotide
cucauagaacuggggcuuc

SEQ ID NO: 1137228 - RNA, 19 nt, Artificial Sequence
  Description of Artificial Sequence: Synthetic oligonucleotide
acuuaaugggaagcccgua

SEQ ID NO: 1137229 - RNA, 19 nt, Artificial Sequence
  Description of Artificial Sequence: Synthetic oligonucleotide
auccucgagacaagugggu

SEQ ID NO: 1137230 - RNA, 19 nt, Artificial Sequence
  Description of Artificial Sequence: Synthetic oligonucleotide
auguuccggcuccaaugaa

SEQ ID NO: 1137231 - RNA, 19 nt, Artificial Sequence
  Description of Artificial Sequence: Synthetic oligonucleotide
cccgcuuugaucucauaga

SEQ ID NO: 1137232 - RNA, 19 nt, Artificial Sequence
  Description of Artificial Sequence: Synthetic oligonucleotide
gagcuagcaccaacgaagu

SEQ ID NO: 1137233 - RNA, 19 nt, Artificial Sequence
  Description of Artificial Sequence: Synthetic oligonucleotide
ucgagacaaguggguugag

SEQ ID NO: 1137234 - RNA, 19 nt, Artificial Sequence
  Description of Artificial Sequence: Synthetic oligonucleotide
acaggucgcaggaugggua

SEQ ID NO: 1137235 - RNA, 19 nt, Artificial Sequence
  Description of Artificial Sequence: Synthetic oligonucleotide
cgauacauucaacgucccg

SEQ ID NO: 1137236 - RNA, 19 nt, Artificial Sequence
  Description of Artificial Sequence: Synthetic oligonucleotide
gacccucuauuguuccugu

SEQ ID NO: 1137237 - RNA, 19 nt, Artificial Sequence
  Description of Artificial Sequence: Synthetic oligonucleotide
ugcgcucuuuccuccuguu

SEQ ID NO: 1137238 - RNA, 19 nt, Artificial Sequence
  Description of Artificial Sequence: Synthetic oligonucleotide
cuuuccgcaucacuggguu

SEQ ID NO: 1137239 - RNA, 19 nt, Artificial Sequence
  Description of Artificial Sequence: Synthetic oligonucleotide
gaagcccguacuggugauc

SEQ ID NO: 1137240 - RNA, 19 nt, Artificial Sequence
  Description of Artificial Sequence: Synthetic oligonucleotide
ggucgcaggauggguagug

SEQ ID NO: 1137241 - RNA, 19 nt, Artificial Sequence
  Description of Artificial Sequence: Synthetic oligonucleotide
agcuagcaccaacgaagua

SEQ ID NO: 1137242 - RNA, 19 nt, Artificial Sequence
  Description of Artificial Sequence: Synthetic oligonucleotide
ccgauacauucaacguccc

SEQ ID NO: 1137243 - RNA, 19 nt, Artificial Sequence
  Description of Artificial Sequence: Synthetic oligonucleotide
auucaacgucccgugcuuu

SEQ ID NO: 1137244 - RNA, 19 nt, Artificial Sequence
  Description of Artificial Sequence: Synthetic oligonucleotide
acuucagagcuagcaccaa

SEQ ID NO: 1137245 - RNA, 19 nt, Artificial Sequence
  Description of Artificial Sequence: Synthetic oligonucleotide
gauauucgggaggcucuua

SEQ ID NO: 1137246 - RNA, 19 nt, Artificial Sequence
  Description of Artificial Sequence: Synthetic oligonucleotide
cgcuuugaucucauagaac

SEQ ID NO: 1137247 - RNA, 19 nt, Artificial Sequence
  Description of Artificial Sequence: Synthetic oligonucleotide
ucccagcauuccacucgac

SEQ ID NO: 1137248 - RNA, 19 nt, Artificial Sequence
  Description of Artificial Sequence: Synthetic oligonucleotide
cgaauuuuauccuuccuau

SEQ ID NO: 1137249 - RNA, 19 nt, Artificial Sequence
  Description of Artificial Sequence: Synthetic oligonucleotide
gcauuccugaguugggaua

SEQ ID NO: 1137250 - RNA, 19 nt, Artificial Sequence
  Description of Artificial Sequence: Synthetic oligonucleotide
gcauauaugcccggaggaa

SEQ ID NO: 1137251 - RNA, 19 nt, Artificial Sequence
  Description of Artificial Sequence: Synthetic oligonucleotide
acucucugugcgcguguuu

SEQ ID NO: 1137252 - RNA, 19 nt, Artificial Sequence
  Description of Artificial Sequence: Synthetic oligonucleotide
guguaaaugucaacugcuu

SEQ ID NO: 1137253 - RNA, 19 nt, Artificial Sequence
  Description of Artificial Sequence: Synthetic oligonucleotide
cacucgacccucuauuguu

SEQ ID NO: 1137254 - RNA, 19 nt, Artificial Sequence
  Description of Artificial Sequence: Synthetic oligonucleotide
cagcauccguuuggagagg

SEQ ID NO: 1137255 - RNA, 19 nt, Artificial Sequence
  Description of Artificial Sequence: Synthetic oligonucleotide
cagguaccgcccuugcucu

SEQ ID NO: 1137256 - RNA, 19 nt, Artificial Sequence
  Description of Artificial Sequence: Synthetic oligonucleotide
agcccguacuggugauccu

SEQ ID NO: 1137257 - RNA, 19 nt, Artificial Sequence
  Description of Artificial Sequence: Synthetic oligonucleotide
uccgcaucacuggguuuuc

SEQ ID NO: 1137258 - RNA, 19 nt, Artificial Sequence
  Description of Artificial Sequence: Synthetic oligonucleotide
cagaccucuugaguguaaa

SEQ ID NO: 1137259 - RNA, 19 nt, Artificial Sequence
  Description of Artificial Sequence: Synthetic oligonucleotide
gccgcugcgcucuuuccuc

SEQ ID NO: 1137260 - RNA, 19 nt, Artificial Sequence
  Description of Artificial Sequence: Synthetic oligonucleotide
cauucaacgucccgugcuu

SEQ ID NO: 1137261 - RNA, 19 nt, Artificial Sequence
  Description of Artificial Sequence: Synthetic oligonucleotide
gguguccgauacauucaac

SEQ ID NO: 1137262 - RNA, 19 nt, Artificial Sequence
  Description of Artificial Sequence: Synthetic oligonucleotide
gcacaguccaacacuccga

SEQ ID NO: 1137263 - RNA, 19 nt, Artificial Sequence
  Description of Artificial Sequence: Synthetic oligonucleotide
gccgaacuugggaauucug

SEQ ID NO: 1137264 - RNA, 19 nt, Artificial Sequence
  Description of Artificial Sequence: Synthetic oligonucleotide
cauuccacucgacccucua

SEQ ID NO: 1137265 - RNA, 19 nt, Artificial Sequence
  Description of Artificial Sequence: Synthetic oligonucleotide
cauccguuuggagaggauu

SEQ ID NO: 1137266 - RNA, 19 nt, Artificial Sequence
  Description of Artificial Sequence: Synthetic oligonucleotide
cgaauggauuuaccaucag

SEQ ID NO: 1137267 - RNA, 19 nt, Artificial Sequence
  Description of Artificial Sequence: Synthetic oligonucleotide
ccugacgaugcaguuucuc

SEQ ID NO: 1137268 - RNA, 19 nt, Artificial Sequence
  Description of Artificial Sequence: Synthetic oligonucleotide
gcgcguguuucuucuaucu

SEQ ID NO: 1137269 - RNA, 19 nt, Artificial Sequence
  Description of Artificial Sequence: Synthetic oligonucleotide
aggucgcaggauggguagu

SEQ ID NO: 1137270 - RNA, 19 nt, Artificial Sequence
  Description of Artificial Sequence: Synthetic oligonucleotide
gaguugggauagaggcaaa

SEQ ID NO: 1137271 - RNA, 19 nt, Artificial Sequence
  Description of Artificial Sequence: Synthetic oligonucleotide
guaccgcccuugcucuaaa

SEQ ID NO: 1137272 - RNA, 19 nt, Artificial Sequence
  Description of Artificial Sequence: Synthetic oligonucleotide
cgacccucuauuguuccug

SEQ ID NO: 1137273 - RNA, 19 nt, Artificial Sequence
  Description of Artificial Sequence: Synthetic oligonucleotide
gguaccgcccuugcucuaa

SEQ ID NO: 1137274 - RNA, 19 nt, Artificial Sequence
  Description of Artificial Sequence: Synthetic oligonucleotide
caacgucccgugcuuugcu

SEQ ID NO: 1137275 - RNA, 19 nt, Artificial Sequence
  Description of Artificial Sequence: Synthetic oligonucleotide
agguaccgcccuugcucua

SEQ ID NO: 1137276 - RNA, 19 nt, Artificial Sequence
  Description of Artificial Sequence: Synthetic oligonucleotide
ccgcugcgcucuuuccucc

SEQ ID NO: 1137277 - RNA, 19 nt, Artificial Sequence
  Description of Artificial Sequence: Synthetic oligonucleotide
cuggggcuucaggacuguc

SEQ ID NO: 1137278 - RNA, 19 nt, Artificial Sequence
  Description of Artificial Sequence: Synthetic oligonucleotide
ggauagaggcaaacaucgu

SEQ ID NO: 1137279 - RNA, 19 nt, Artificial Sequence
  Description of Artificial Sequence: Synthetic oligonucleotide
gcccuugcucuaaauuuaa

SEQ ID NO: 1137280 - RNA, 19 nt, Artificial Sequence
  Description of Artificial Sequence: Synthetic oligonucleotide
ccgcccuugcucuaaauuu

SEQ ID NO: 1137281 - RNA, 19 nt, Artificial Sequence
  Description of Artificial Sequence: Synthetic oligonucleotide
gacucucugugcgcguguu

SEQ ID NO: 1137282 - RNA, 19 nt, Artificial Sequence
  Description of Artificial Sequence: Synthetic oligonucleotide
guucuccgcagcauccguu

SEQ ID NO: 1137283 - RNA, 19 nt, Artificial Sequence
  Description of Artificial Sequence: Synthetic oligonucleotide
cuggacucucugugcgcgu

SEQ ID NO: 1137284 - RNA, 19 nt, Artificial Sequence
  Description of Artificial Sequence: Synthetic oligonucleotide
cguuaugcaagaagacgau

SEQ ID NO: 1137285 - RNA, 19 nt, Artificial Sequence
  Description of Artificial Sequence: Synthetic oligonucleotide
ggaagcccguacuggugau

SEQ ID NO: 1137286 - RNA, 19 nt, Artificial Sequence
  Description of Artificial Sequence: Synthetic oligonucleotide
ggacucucugugcgcgugu

SEQ ID NO: 1137287 - RNA, 19 nt, Artificial Sequence
  Description of Artificial Sequence: Synthetic oligonucleotide
cccguacuggugauccuua

SEQ ID NO: 1137288 - RNA, 19 nt, Artificial Sequence
  Description of Artificial Sequence: Synthetic oligonucleotide
ccgugcuuugcuucaaguu

SEQ ID NO: 1137289 - RNA, 19 nt, Artificial Sequence
  Description of Artificial Sequence: Synthetic oligonucleotide
ccgccgcugcgcucuuucc

SEQ ID NO: 1137290 - RNA, 19 nt, Artificial Sequence
  Description of Artificial Sequence: Synthetic oligonucleotide
ccacucgacccucuauugu

SEQ ID NO: 1137291 - RNA, 19 nt, Artificial Sequence
  Description of Artificial Sequence: Synthetic oligonucleotide
cccggaggaaggugaucca

SEQ ID NO: 1137292 - RNA, 19 nt, Artificial Sequence
  Description of Artificial Sequence: Synthetic oligonucleotide
ggauucagguaccgcccuu

SEQ ID NO: 1137293 - RNA, 19 nt, Artificial Sequence
  Description of Artificial Sequence: Synthetic oligonucleotide
cccgugcuuugcuucaagu

SEQ ID NO: 1137294 - RNA, 19 nt, Artificial Sequence
  Description of Artificial Sequence: Synthetic oligonucleotide
ggauauucgggaggcucuu

SEQ ID NO: 1137295 - RNA, 19 nt, Artificial Sequence
  Description of Artificial Sequence: Synthetic oligonucleotide
ccguacuggugauccuuaa

SEQ ID NO: 1137296 - RNA, 19 nt, Artificial Sequence
  Description of Artificial Sequence: Synthetic oligonucleotide
guccaacacuccgacucuu

SEQ ID NO: 1137297 - RNA, 19 nt, Artificial Sequence
  Description of Artificial Sequence: Synthetic oligonucleotide
gggccggccucuucugggu

SEQ ID NO: 1137298 - RNA, 19 nt, Artificial Sequence
  Description of Artificial Sequence: Synthetic oligonucleotide
ccuugugguagagucugau

SEQ ID NO: 1137299 - RNA, 19 nt, Artificial Sequence
  Description of Artificial Sequence: Synthetic oligonucleotide
cguacuggugauccuuaau

SEQ ID NO: 1137300 - RNA, 19 nt, Artificial Sequence
  Description of Artificial Sequence: Synthetic oligonucleotide
gcccguacuggugauccuu

SEQ ID NO: 1137301 - RNA, 19 nt, Artificial Sequence
  Description of Artificial Sequence: Synthetic oligonucleotide
gugaaagggccggccucuu

SEQ ID NO: 1137302 - RNA, 19 nt, Artificial Sequence
  Description of Artificial Sequence: Synthetic oligonucleotide
gcauccguuuggagaggau

SEQ ID NO: 1137303 - RNA, 19 nt, Artificial Sequence
  Description of Artificial Sequence: Synthetic oligonucleotide
cgcguguuucuucuaucuu

SEQ ID NO: 1137304 - RNA, 19 nt, Artificial Sequence
  Description of Artificial Sequence: Synthetic oligonucleotide
cgccgcugcgcucuuuccu

SEQ ID NO: 1137305 - RNA, 19 nt, Artificial Sequence
  Description of Artificial Sequence: Synthetic oligonucleotide
gcagaccgucgcagcuuuu

SEQ ID NO: 1137306 - RNA, 19 nt, Artificial Sequence
  Description of Artificial Sequence: Synthetic oligonucleotide
ugagcuaucugacucaucg

SEQ ID NO: 1137307 - RNA, 19 nt, Artificial Sequence
  Description of Artificial Sequence: Synthetic oligonucleotide
ugagugaagauauaguagg

SEQ ID NO: 1137308 - RNA, 19 nt, Artificial Sequence
  Description of Artificial Sequence: Synthetic oligonucleotide
auuagcauuacucuuugag

SEQ ID NO: 1137309 - RNA, 19 nt, Artificial Sequence
  Description of Artificial Sequence: Synthetic oligonucleotide
aaagccauuauguuguacu

SEQ ID NO: 1137310 - RNA, 19 nt, Artificial Sequence
  Description of Artificial Sequence: Synthetic oligonucleotide
agcggugugaaauuguacc

SEQ ID NO: 1137311 - RNA, 19 nt, Artificial Sequence
  Description of Artificial Sequence: Synthetic oligonucleotide
uuagcauuacucuuugagg

SEQ ID NO: 1137312 - RNA, 19 nt, Artificial Sequence
  Description of Artificial Sequence: Synthetic oligonucleotide
aguuacguugguaugaucc

SEQ ID NO: 1137313 - RNA, 19 nt, Artificial Sequence
  Description of Artificial Sequence: Synthetic oligonucleotide
uguugcaugaugcugaagu

SEQ ID NO: 1137314 - RNA, 19 nt, Artificial Sequence
  Description of Artificial Sequence: Synthetic oligonucleotide
uucgguuaaauucacugcc

SEQ ID NO: 1137315 - RNA, 19 nt, Artificial Sequence
  Description of Artificial Sequence: Synthetic oligonucleotide
ucaccaaucaucuugcgcu

SEQ ID NO: 1137316 - RNA, 19 nt, Artificial Sequence
  Description of Artificial Sequence: Synthetic oligonucleotide
cuuucgguuaaauucacug

SEQ ID NO: 1137317 - RNA, 19 nt, Artificial Sequence
  Description of Artificial Sequence: Synthetic oligonucleotide
gauccgaugcucuucgugg

SEQ ID NO: 1137318 - RNA, 19 nt, Artificial Sequence
  Description of Artificial Sequence: Synthetic oligonucleotide
uuuucugcguuucuucucc

SEQ ID NO: 1137319 - RNA, 19 nt, Artificial Sequence
  Description of Artificial Sequence: Synthetic oligonucleotide
agaacuaccgcccgacggc

SEQ ID NO: 1137320 - RNA, 19 nt, Artificial Sequence
  Description of Artificial Sequence: Synthetic oligonucleotide
aaaguugacuuuaucagcu

SEQ ID NO: 1137321 - RNA, 19 nt, Artificial Sequence
  Description of Artificial Sequence: Synthetic oligonucleotide
uuacgagucagguagcggc

SEQ ID NO: 1137322 - RNA, 19 nt, Artificial Sequence
  Description of Artificial Sequence: Synthetic oligonucleotide
uagaacuaccgcccgacgg

SEQ ID NO: 1137323 - RNA, 19 nt, Artificial Sequence
  Description of Artificial Sequence: Synthetic oligonucleotide
uacccuuagaacuaccgcc

SEQ ID NO: 1137324 - RNA, 19 nt, Artificial Sequence
  Description of Artificial Sequence: Synthetic oligonucleotide
acucggacgacauacucgg

SEQ ID NO: 1137325 - RNA, 19 nt, Artificial Sequence
  Description of Artificial Sequence: Synthetic oligonucleotide
ugaaauuguaccaguucug

SEQ ID NO: 1137326 - RNA, 19 nt, Artificial Sequence
  Description of Artificial Sequence: Synthetic oligonucleotide
ugaagauauaguaggcugu

SEQ ID NO: 1137327 - RNA, 19 nt, Artificial Sequence
  Description of Artificial Sequence: Synthetic oligonucleotide
uuucgguuaaauucacugc

SEQ ID NO: 1137328 - RNA, 19 nt, Artificial Sequence
  Description of Artificial Sequence: Synthetic oligonucleotide
gugaagauauaguaggcug

SEQ ID NO: 1137329 - RNA, 19 nt, Artificial Sequence
  Description of Artificial Sequence: Synthetic oligonucleotide
ucuucuucgccaugaagag

SEQ ID NO: 1137330 - RNA, 19 nt, Artificial Sequence
  Description of Artificial Sequence: Synthetic oligonucleotide
uguacuaggagucccuggu

SEQ ID NO: 1137331 - RNA, 19 nt, Artificial Sequence
  Description of Artificial Sequence: Synthetic oligonucleotide
ggagcuuucgguuaaauuc

SEQ ID NO: 1137332 - RNA, 19 nt, Artificial Sequence
  Description of Artificial Sequence: Synthetic oligonucleotide
gcaaaguugacuuuaucag

SEQ ID NO: 1137333 - RNA, 19 nt, Artificial Sequence
  Description of Artificial Sequence: Synthetic oligonucleotide
gauauaguaggcuguguuc

SEQ ID NO: 1137334 - RNA, 19 nt, Artificial Sequence
  Description of Artificial Sequence: Synthetic oligonucleotide
guguggacuucccagauag

SEQ ID NO: 1137335 - RNA, 19 nt, Artificial Sequence
  Description of Artificial Sequence: Synthetic oligonucleotide
ucgacugguacccuuagaa

SEQ ID NO: 1137336 - RNA, 19 nt, Artificial Sequence
  Description of Artificial Sequence: Synthetic oligonucleotide
gagaagugcaucuuaucac

SEQ ID NO: 1137337 - RNA, 19 nt, Artificial Sequence
  Description of Artificial Sequence: Synthetic oligonucleotide
augaagagugcagaggagg

SEQ ID NO: 1137338 - RNA, 19 nt, Artificial Sequence
  Description of Artificial Sequence: Synthetic oligonucleotide
ugcaugaugcugaaguggu

SEQ ID NO: 1137339 - RNA, 19 nt, Artificial Sequence
  Description of Artificial Sequence: Synthetic oligonucleotide
cagguagcggcguacagcg

SEQ ID NO: 1137340 - RNA, 19 nt, Artificial Sequence
  Description of Artificial Sequence: Synthetic oligonucleotide
ugcugaagugguuuaagac

SEQ ID NO: 1137341 - RNA, 19 nt, Artificial Sequence
  Description of Artificial Sequence: Synthetic oligonucleotide
cuaucugacucaucgcugc

SEQ ID NO: 1137342 - RNA, 19 nt, Artificial Sequence
  Description of Artificial Sequence: Synthetic oligonucleotide
acuccgcccuucuuuaugc

SEQ ID NO: 1137343 - RNA, 19 nt, Artificial Sequence
  Description of Artificial Sequence: Synthetic oligonucleotide
uucgccaugaagagugcag

SEQ ID NO: 1137344 - RNA, 19 nt, Artificial Sequence
  Description of Artificial Sequence: Synthetic oligonucleotide
ucugacauguaguccaccu

SEQ ID NO: 1137345 - RNA, 19 nt, Artificial Sequence
  Description of Artificial Sequence: Synthetic oligonucleotide
aaggcaacuugcccgggag

SEQ ID NO: 1137346 - RNA, 19 nt, Artificial Sequence
  Description of Artificial Sequence: Synthetic oligonucleotide
auggccguugcucaagcgg

SEQ ID NO: 1137347 - RNA, 19 nt, Artificial Sequence
  Description of Artificial Sequence: Synthetic oligonucleotide
cagaucucgcucuagccgg

SEQ ID NO: 1137348 - RNA, 19 nt, Artificial Sequence
  Description of Artificial Sequence: Synthetic oligonucleotide
aacuuccugcccgauuugc

SEQ ID NO: 1137349 - RNA, 19 nt, Artificial Sequence
  Description of Artificial Sequence: Synthetic oligonucleotide
aagaggugcuugcugcguc

SEQ ID NO: 1137350 - RNA, 19 nt, Artificial Sequence
  Description of Artificial Sequence: Synthetic oligonucleotide
gggcuuacgagucagguag

SEQ ID NO: 1137351 - RNA, 19 nt, Artificial Sequence
  Description of Artificial Sequence: Synthetic oligonucleotide
accgucggcacacugagug

SEQ ID NO: 1137352 - RNA, 19 nt, Artificial Sequence
  Description of Artificial Sequence: Synthetic oligonucleotide
uguucucugucacuccgcc

SEQ ID NO: 1137353 - RNA, 19 nt, Artificial Sequence
  Description of Artificial Sequence: Synthetic oligonucleotide
uacucggugacguucuggc

SEQ ID NO: 1137354 - RNA, 19 nt, Artificial Sequence
  Description of Artificial Sequence: Synthetic oligonucleotide
uacgagucagguagcggcg

SEQ ID NO: 1137355 - RNA, 19 nt, Artificial Sequence
  Description of Artificial Sequence: Synthetic oligonucleotide
gaagauauaguaggcugug

SEQ ID NO: 1137356 - RNA, 19 nt, Artificial Sequence
  Description of Artificial Sequence: Synthetic oligonucleotide
uuagaacuaccgcccgacg

SEQ ID NO: 1137357 - RNA, 19 nt, Artificial Sequence
  Description of Artificial Sequence: Synthetic oligonucleotide
uccguaagcgcuuggcugc

SEQ ID NO: 1137358 - RNA, 19 nt, Artificial Sequence
  Description of Artificial Sequence: Synthetic oligonucleotide
aaguugacuuuaucagcug

SEQ ID NO: 1137359 - RNA, 19 nt, Artificial Sequence
  Description of Artificial Sequence: Synthetic oligonucleotide
ugauccgaugcucuucgug

SEQ ID NO: 1137360 - RNA, 19 nt, Artificial Sequence
  Description of Artificial Sequence: Synthetic oligonucleotide
ucggaggacauuuccaggu

SEQ ID NO: 1137361 - RNA, 19 nt, Artificial Sequence
  Description of Artificial Sequence: Synthetic oligonucleotide
uaugauccuguguuuugug

SEQ ID NO: 1137362 - RNA, 19 nt, Artificial Sequence
  Description of Artificial Sequence: Synthetic oligonucleotide
gacucggacgacauacucg

SEQ ID NO: 1137363 - RNA, 19 nt, Artificial Sequence
  Description of Artificial Sequence: Synthetic oligonucleotide
acccuuagaacuaccgccc

SEQ ID NO: 1137364 - RNA, 19 nt, Artificial Sequence
  Description of Artificial Sequence: Synthetic oligonucleotide
auccguaagcgcuuggcug

SEQ ID NO: 1137365 - RNA, 19 nt, Artificial Sequence
  Description of Artificial Sequence: Synthetic oligonucleotide
cuccaaacccuuaagucuc

SEQ ID NO: 1137366 - RNA, 19 nt, Artificial Sequence
  Description of Artificial Sequence: Synthetic oligonucleotide
agugaagauauaguaggcu

SEQ ID NO: 1137367 - RNA, 19 nt, Artificial Sequence
  Description of Artificial Sequence: Synthetic oligonucleotide
gacugguacccuuagaacu

SEQ ID NO: 1137368 - RNA, 19 nt, Artificial Sequence
  Description of Artificial Sequence: Synthetic oligonucleotide
uacguugguaugauccugu

SEQ ID NO: 1137369 - RNA, 19 nt, Artificial Sequence
  Description of Artificial Sequence: Synthetic oligonucleotide
ucgguuaaauucacugccu

SEQ ID NO: 1137370 - RNA, 19 nt, Artificial Sequence
  Description of Artificial Sequence: Synthetic oligonucleotide
uugcccgggaguuacguug

SEQ ID NO: 1137371 - RNA, 19 nt, Artificial Sequence
  Description of Artificial Sequence: Synthetic oligonucleotide
cucagaucucgcucuagcc

SEQ ID NO: 1137372 - RNA, 19 nt, Artificial Sequence
  Description of Artificial Sequence: Synthetic oligonucleotide
aucuuaucaccaaucaucu

SEQ ID NO: 1137373 - RNA, 19 nt, Artificial Sequence
  Description of Artificial Sequence: Synthetic oligonucleotide
ggagaagugcaucuuauca

SEQ ID NO: 1137374 - RNA, 19 nt, Artificial Sequence
  Description of Artificial Sequence: Synthetic oligonucleotide
aucggaggacauuuccagg

SEQ ID NO: 1137375 - RNA, 19 nt, Artificial Sequence
  Description of Artificial Sequence: Synthetic oligonucleotide
ucuucgugguaucccucgg

SEQ ID NO: 1137376 - RNA, 19 nt, Artificial Sequence
  Description of Artificial Sequence: Synthetic oligonucleotide
ugcucuguuuauuagcauu

SEQ ID NO: 1137377 - RNA, 19 nt, Artificial Sequence
  Description of Artificial Sequence: Synthetic oligonucleotide
agcauccauccguaagcgc

SEQ ID NO: 1137378 - RNA, 19 nt, Artificial Sequence
  Description of Artificial Sequence: Synthetic oligonucleotide
uucaggacgaugccauacu

SEQ ID NO: 1137379 - RNA, 19 nt, Artificial Sequence
  Description of Artificial Sequence: Synthetic oligonucleotide
guugguaugauccuguguu

SEQ ID NO: 1137380 - RNA, 19 nt, Artificial Sequence
  Description of Artificial Sequence: Synthetic oligonucleotide
guacccuuagaacuaccgc

SEQ ID NO: 1137381 - RNA, 19 nt, Artificial Sequence
  Description of Artificial Sequence: Synthetic oligonucleotide
cuuguugcucagaucucgc

SEQ ID NO: 1137382 - RNA, 19 nt, Artificial Sequence
  Description of Artificial Sequence: Synthetic oligonucleotide
gugacguucuggcugccgg

SEQ ID NO: 1137383 - RNA, 19 nt, Artificial Sequence
  Description of Artificial Sequence: Synthetic oligonucleotide
guaagcgcuuggcugcugg

SEQ ID NO: 1137384 - RNA, 19 nt, Artificial Sequence
  Description of Artificial Sequence: Synthetic oligonucleotide
agcauuacucuuugaggga

SEQ ID NO: 1137385 - RNA, 19 nt, Artificial Sequence
  Description of Artificial Sequence: Synthetic oligonucleotide
acuuguccgcuucccuugc

SEQ ID NO: 1137386 - RNA, 19 nt, Artificial Sequence
  Description of Artificial Sequence: Synthetic oligonucleotide
gguuaaauucacugccugc

SEQ ID NO: 1137387 - RNA, 19 nt, Artificial Sequence
  Description of Artificial Sequence: Synthetic oligonucleotide
agugcaucuuaucaccaau

SEQ ID NO: 1137388 - RNA, 19 nt, Artificial Sequence
  Description of Artificial Sequence: Synthetic oligonucleotide
cuuagaacuaccgcccgac

SEQ ID NO: 1137389 - RNA, 19 nt, Artificial Sequence
  Description of Artificial Sequence: Synthetic oligonucleotide
ggaugcgaagcucacuggg

SEQ ID NO: 1137390 - RNA, 19 nt, Artificial Sequence
  Description of Artificial Sequence: Synthetic oligonucleotide
uaucccucggucccgggga

SEQ ID NO: 1137391 - RNA, 19 nt, Artificial Sequence
  Description of Artificial Sequence: Synthetic oligonucleotide
cuugcgcucccucuugggg

SEQ ID NO: 1137392 - RNA, 19 nt, Artificial Sequence
  Description of Artificial Sequence: Synthetic oligonucleotide
cagauaggcucugaggggc

SEQ ID NO: 1137393 - RNA, 19 nt, Artificial Sequence
  Description of Artificial Sequence: Synthetic oligonucleotide
guguuuugugucuccaaac

SEQ ID NO: 1137394 - RNA, 19 nt, Artificial Sequence
  Description of Artificial Sequence: Synthetic oligonucleotide
uucgugguaucccucgguc

SEQ ID NO: 1137395 - RNA, 19 nt, Artificial Sequence
  Description of Artificial Sequence: Synthetic oligonucleotide
uugcucaagcgguuccggg

SEQ ID NO: 1137396 - RNA, 19 nt, Artificial Sequence
  Description of Artificial Sequence: Synthetic oligonucleotide
gagcuuucgguuaaauuca

SEQ ID NO: 1137397 - RNA, 19 nt, Artificial Sequence
  Description of Artificial Sequence: Synthetic oligonucleotide
ggaggacauuuccaggucg

SEQ ID NO: 1137398 - RNA, 19 nt, Artificial Sequence
  Description of Artificial Sequence: Synthetic oligonucleotide
ugcugcgucuguacuagga

SEQ ID NO: 1137399 - RNA, 19 nt, Artificial Sequence
  Description of Artificial Sequence: Synthetic oligonucleotide
uuacguugguaugauccug

SEQ ID NO: 1137400 - RNA, 19 nt, Artificial Sequence
  Description of Artificial Sequence: Synthetic oligonucleotide
uuagagucgccauggccgu

SEQ ID NO: 1137401 - RNA, 19 nt, Artificial Sequence
  Description of Artificial Sequence: Synthetic oligonucleotide
cuguacuaggagucccugg

SEQ ID NO: 1137402 - RNA, 19 nt, Artificial Sequence
  Description of Artificial Sequence: Synthetic oligonucleotide
auugacccgaagcagccaa

SEQ ID NO: 1137403 - RNA, 19 nt, Artificial Sequence
  Description of Artificial Sequence: Synthetic oligonucleotide
ugcccgggaguuacguugg

SEQ ID NO: 1137404 - RNA, 19 nt, Artificial Sequence
  Description of Artificial Sequence: Synthetic oligonucleotide
ugacguucuggcugccggg

SEQ ID NO: 1137405 - RNA, 19 nt, Artificial Sequence
  Description of Artificial Sequence: Synthetic oligonucleotide
gaugcgaagcucacugggc

SEQ ID NO: 1137406 - RNA, 19 nt, Artificial Sequence
  Description of Artificial Sequence: Synthetic oligonucleotide
ucaaaggcaccgucggcac

SEQ ID NO: 1137407 - RNA, 19 nt, Artificial Sequence
  Description of Artificial Sequence: Synthetic oligonucleotide
gagugugcggugucgggcc

SEQ ID NO: 1137408 - RNA, 19 nt, Artificial Sequence
  Description of Artificial Sequence: Synthetic oligonucleotide
augcgaagcucacugggcu

SEQ ID NO: 1137409 - RNA, 19 nt, Artificial Sequence
  Description of Artificial Sequence: Synthetic oligonucleotide
gacauacucggugacguuc

SEQ ID NO: 1137410 - RNA, 19 nt, Artificial Sequence
  Description of Artificial Sequence: Synthetic oligonucleotide
ugcucuucgugguaucccu

SEQ ID NO: 1137411 - RNA, 19 nt, Artificial Sequence
  Description of Artificial Sequence: Synthetic oligonucleotide
uauaguaggcuguguucuc

SEQ ID NO: 1137412 - RNA, 19 nt, Artificial Sequence
  Description of Artificial Sequence: Synthetic oligonucleotide
ugcggugucgggccagcgg

SEQ ID NO: 1137413 - RNA, 19 nt, Artificial Sequence
  Description of Artificial Sequence: Synthetic oligonucleotide
agcccggucuucuuggucu

SEQ ID NO: 1137414 - RNA, 19 nt, Artificial Sequence
  Description of Artificial Sequence: Synthetic oligonucleotide
ucaugggcuuacgagucag

SEQ ID NO: 1137415 - RNA, 19 nt, Artificial Sequence
  Description of Artificial Sequence: Synthetic oligonucleotide
aagauauaguaggcugugu

SEQ ID NO: 1137416 - RNA, 19 nt, Artificial Sequence
  Description of Artificial Sequence: Synthetic oligonucleotide
gacauuuccaggucguccu

SEQ ID NO: 1137417 - RNA, 19 nt, Artificial Sequence
  Description of Artificial Sequence: Synthetic oligonucleotide
uuagccuuagaggcucugc

SEQ ID NO: 1137418 - RNA, 19 nt, Artificial Sequence
  Description of Artificial Sequence: Synthetic oligonucleotide
ugcccgauuugccauugac

SEQ ID NO: 1137419 - RNA, 19 nt, Artificial Sequence
  Description of Artificial Sequence: Synthetic oligonucleotide
gguacccuuagaacuaccg

SEQ ID NO: 1137420 - RNA, 19 nt, Artificial Sequence
  Description of Artificial Sequence: Synthetic oligonucleotide
ucgugguaucccucggucc

SEQ ID NO: 1137421 - RNA, 19 nt, Artificial Sequence
  Description of Artificial Sequence: Synthetic oligonucleotide
ugagugugcggugucgggc

SEQ ID NO: 1137422 - RNA, 19 nt, Artificial Sequence
  Description of Artificial Sequence: Synthetic oligonucleotide
cuuacgagucagguagcgg

SEQ ID NO: 1137423 - RNA, 19 nt, Artificial Sequence
  Description of Artificial Sequence: Synthetic oligonucleotide
uaagcgcuuggcugcuggg

SEQ ID NO: 1137424 - RNA, 19 nt, Artificial Sequence
  Description of Artificial Sequence: Synthetic oligonucleotide
acgacauacucggugacgu

SEQ ID NO: 1137425 - RNA, 19 nt, Artificial Sequence
  Description of Artificial Sequence: Synthetic oligonucleotide
uggggucucacuuguccgc

SEQ ID NO: 1137426 - RNA, 19 nt, Artificial Sequence
  Description of Artificial Sequence: Synthetic oligonucleotide
cugcucgcugcucagcccg

SEQ ID NO: 1137427 - RNA, 19 nt, Artificial Sequence
  Description of Artificial Sequence: Synthetic oligonucleotide
uacagcguccucugucacc

SEQ ID NO: 1137428 - RNA, 19 nt, Artificial Sequence
  Description of Artificial Sequence: Synthetic oligonucleotide
caccuggacaucaccgccg

SEQ ID NO: 1137429 - RNA, 19 nt, Artificial Sequence
  Description of Artificial Sequence: Synthetic oligonucleotide
gagcuaucugacucaucgc

SEQ ID NO: 1137430 - RNA, 19 nt, Artificial Sequence
  Description of Artificial Sequence: Synthetic oligonucleotide
uuuguggucaugggcuuac

SEQ ID NO: 1137431 - RNA, 19 nt, Artificial Sequence
  Description of Artificial Sequence: Synthetic oligonucleotide
ucccuggucgacugguacc

SEQ ID NO: 1137432 - RNA, 19 nt, Artificial Sequence
  Description of Artificial Sequence: Synthetic oligonucleotide
cuucaggacgaugccauac

SEQ ID NO: 1137433 - RNA, 19 nt, Artificial Sequence
  Description of Artificial Sequence: Synthetic oligonucleotide
ucucgcucuagccgggccu

SEQ ID NO: 1137434 - RNA, 19 nt, Artificial Sequence
  Description of Artificial Sequence: Synthetic oligonucleotide
gcugccggggcuuagaguc

SEQ ID NO: 1137435 - RNA, 19 nt, Artificial Sequence
  Description of Artificial Sequence: Synthetic oligonucleotide
guaucccucggucccgggg

SEQ ID NO: 1137436 - RNA, 19 nt, Artificial Sequence
  Description of Artificial Sequence: Synthetic oligonucleotide
acagcguccucugucaccu

SEQ ID NO: 1137437 - RNA, 19 nt, Artificial Sequence
  Description of Artificial Sequence: Synthetic oligonucleotide
cacuuguccgcuucccuug

SEQ ID NO: 1137438 - RNA, 19 nt, Artificial Sequence
  Description of Artificial Sequence: Synthetic oligonucleotide
cucagcagugagugugcgg

SEQ ID NO: 1137439 - RNA, 19 nt, Artificial Sequence
  Description of Artificial Sequence: Synthetic oligonucleotide
uuccggggcggcgugaucc

SEQ ID NO: 1137440 - RNA, 19 nt, Artificial Sequence
  Description of Artificial Sequence: Synthetic oligonucleotide
auacucggugacguucugg

SEQ ID NO: 1137441 - RNA, 19 nt, Artificial Sequence
  Description of Artificial Sequence: Synthetic oligonucleotide
ucaggacgaugccauacuu

SEQ ID NO: 1137442 - RNA, 19 nt, Artificial Sequence
  Description of Artificial Sequence: Synthetic oligonucleotide
gccuuagaggcucugcugc

SEQ ID NO: 1137443 - RNA, 19 nt, Artificial Sequence
  Description of Artificial Sequence: Synthetic oligonucleotide
uccauccguaagcgcuugg

SEQ ID NO: 1137444 - RNA, 19 nt, Artificial Sequence
  Description of Artificial Sequence: Synthetic oligonucleotide
ucgccaugaagagugcaga

SEQ ID NO: 1137445 - RNA, 19 nt, Artificial Sequence
  Description of Artificial Sequence: Synthetic oligonucleotide
guugcucaagcgguuccgg

SEQ ID NO: 1137446 - RNA, 19 nt, Artificial Sequence
  Description of Artificial Sequence: Synthetic oligonucleotide
caugggcuuacgagucagg

SEQ ID NO: 1137447 - RNA, 19 nt, Artificial Sequence
  Description of Artificial Sequence: Synthetic oligonucleotide
acuaccgcccgacggcuug

SEQ ID NO: 1137448 - RNA, 19 nt, Artificial Sequence
  Description of Artificial Sequence: Synthetic oligonucleotide
ccaucugacauguagucca

SEQ ID NO: 1137449 - RNA, 19 nt, Artificial Sequence
  Description of Artificial Sequence: Synthetic oligonucleotide
uucuccuguggagugggga

SEQ ID NO: 1137450 - RNA, 19 nt, Artificial Sequence
  Description of Artificial Sequence: Synthetic oligonucleotide
gcuuagagucgccauggcc

SEQ ID NO: 1137451 - RNA, 19 nt, Artificial Sequence
  Description of Artificial Sequence: Synthetic oligonucleotide
auuacucuuugagggagaa

SEQ ID NO: 1137452 - RNA, 19 nt, Artificial Sequence
  Description of Artificial Sequence: Synthetic oligonucleotide
ggcaucggaggacauuucc

SEQ ID NO: 1137453 - RNA, 19 nt, Artificial Sequence
  Description of Artificial Sequence: Synthetic oligonucleotide
gugagugugcggugucggg

SEQ ID NO: 1137454 - RNA, 19 nt, Artificial Sequence
  Description of Artificial Sequence: Synthetic oligonucleotide
agcuuucgguuaaauucac

SEQ ID NO: 1137455 - RNA, 19 nt, Artificial Sequence
  Description of Artificial Sequence: Synthetic oligonucleotide
gcauuacucuuugagggag

SEQ ID NO: 1137456 - RNA, 19 nt, Artificial Sequence
  Description of Artificial Sequence: Synthetic oligonucleotide
cugacauguaguccaccuc

SEQ ID NO: 1137457 - RNA, 19 nt, Artificial Sequence
  Description of Artificial Sequence: Synthetic oligonucleotide
cauggccguugcucaagcg

SEQ ID NO: 1137458 - RNA, 19 nt, Artificial Sequence
  Description of Artificial Sequence: Synthetic oligonucleotide
cucucuucacugcucucac

SEQ ID NO: 1137459 - RNA, 19 nt, Artificial Sequence
  Description of Artificial Sequence: Synthetic oligonucleotide
uuguccgcuucccuugcuc

SEQ ID NO: 1137460 - RNA, 19 nt, Artificial Sequence
  Description of Artificial Sequence: Synthetic oligonucleotide
ucgcugcucagcccggucu

SEQ ID NO: 1137461 - RNA, 19 nt, Artificial Sequence
  Description of Artificial Sequence: Synthetic oligonucleotide
ucggcacacugagugaaga

SEQ ID NO: 1137462 - RNA, 19 nt, Artificial Sequence
  Description of Artificial Sequence: Synthetic oligonucleotide
gaacuuccugcccgauuug

SEQ ID NO: 1137463 - RNA, 19 nt, Artificial Sequence
  Description of Artificial Sequence: Synthetic oligonucleotide
guuacguugguaugauccu

SEQ ID NO: 1137464 - RNA, 19 nt, Artificial Sequence
  Description of Artificial Sequence: Synthetic oligonucleotide
cucuguuuauuagcauuac

SEQ ID NO: 1137465 - RNA, 19 nt, Artificial Sequence
  Description of Artificial Sequence: Synthetic oligonucleotide
auccgaugcucuucguggu

SEQ ID NO: 1137466 - RNA, 19 nt, Artificial Sequence
  Description of Artificial Sequence: Synthetic oligonucleotide
aggcgcuugaggaucugcg

SEQ ID NO: 1137467 - RNA, 19 nt, Artificial Sequence
  Description of Artificial Sequence: Synthetic oligonucleotide
uuggggacucggacgacau

SEQ ID NO: 1137468 - RNA, 19 nt, Artificial Sequence
  Description of Artificial Sequence: Synthetic oligonucleotide
gaaggcaacuugcccggga

SEQ ID NO: 1137469 - RNA, 19 nt, Artificial Sequence
  Description of Artificial Sequence: Synthetic oligonucleotide
ugggcuuacgagucaggua

SEQ ID NO: 1137470 - RNA, 19 nt, Artificial Sequence
  Description of Artificial Sequence: Synthetic oligonucleotide
acguugguaugauccugug

SEQ ID NO: 1137471 - RNA, 19 nt, Artificial Sequence
  Description of Artificial Sequence: Synthetic oligonucleotide
caaucaucuugcgcucagg

SEQ ID NO: 1137472 - RNA, 19 nt, Artificial Sequence
  Description of Artificial Sequence: Synthetic oligonucleotide
ucuuaucaccaaucaucuu

SEQ ID NO: 1137473 - RNA, 19 nt, Artificial Sequence
  Description of Artificial Sequence: Synthetic oligonucleotide
gggcuuagagucgccaugg

SEQ ID NO: 1137474 - RNA, 19 nt, Artificial Sequence
  Description of Artificial Sequence: Synthetic oligonucleotide
gguagcggcguacagcguc

SEQ ID NO: 1137475 - RNA, 19 nt, Artificial Sequence
  Description of Artificial Sequence: Synthetic oligonucleotide
cagcggugugaaauuguac

SEQ ID NO: 1137476 - RNA, 19 nt, Artificial Sequence
  Description of Artificial Sequence: Synthetic oligonucleotide
guuguguucuuggggacuc

SEQ ID NO: 1137477 - RNA, 19 nt, Artificial Sequence
  Description of Artificial Sequence: Synthetic oligonucleotide
acggucugcucgcugcuca

SEQ ID NO: 1137478 - RNA, 19 nt, Artificial Sequence
  Description of Artificial Sequence: Synthetic oligonucleotide
gagggagaagugcaucuua

SEQ ID NO: 1137479 - RNA, 19 nt, Artificial Sequence
  Description of Artificial Sequence: Synthetic oligonucleotide
gucagguagcggcguacag

SEQ ID NO: 1137480 - RNA, 19 nt, Artificial Sequence
  Description of Artificial Sequence: Synthetic oligonucleotide
gcucagaucucgcucuagc

SEQ ID NO: 1137481 - RNA, 19 nt, Artificial Sequence
  Description of Artificial Sequence: Synthetic oligonucleotide
acugguacccuuagaacua

SEQ ID NO: 1137482 - RNA, 19 nt, Artificial Sequence
  Description of Artificial Sequence: Synthetic oligonucleotide
cagguagcaaaguugacuu

SEQ ID NO: 1137483 - RNA, 19 nt, Artificial Sequence
  Description of Artificial Sequence: Synthetic oligonucleotide
uuccugcccgauuugccau

SEQ ID NO: 1137484 - RNA, 19 nt, Artificial Sequence
  Description of Artificial Sequence: Synthetic oligonucleotide
ggggacucggacgacauac

SEQ ID NO: 1137485 - RNA, 19 nt, Artificial Sequence
  Description of Artificial Sequence: Synthetic oligonucleotide
cucaagcgguuccggggcg

SEQ ID NO: 1137486 - RNA, 19 nt, Artificial Sequence
  Description of Artificial Sequence: Synthetic oligonucleotide
caccaaucaucuugcgcuc

SEQ ID NO: 1137487 - RNA, 19 nt, Artificial Sequence
  Description of Artificial Sequence: Synthetic oligonucleotide
cauuacucuuugagggaga

SEQ ID NO: 1137488 - RNA, 19 nt, Artificial Sequence
  Description of Artificial Sequence: Synthetic oligonucleotide
gugcaucuuaucaccaauc

SEQ ID NO: 1137489 - RNA, 19 nt, Artificial Sequence
  Description of Artificial Sequence: Synthetic oligonucleotide
uugcugcgucuguacuagg

SEQ ID NO: 1137490 - RNA, 19 nt, Artificial Sequence
  Description of Artificial Sequence: Synthetic oligonucleotide
cacuccgcccuucuuuaug

SEQ ID NO: 1137491 - RNA, 19 nt, Artificial Sequence
  Description of Artificial Sequence: Synthetic oligonucleotide
ugguaucccucggucccgg

SEQ ID NO: 1137492 - RNA, 19 nt, Artificial Sequence
  Description of Artificial Sequence: Synthetic oligonucleotide
uugugucuccaaacccuua

SEQ ID NO: 1137493 - RNA, 19 nt, Artificial Sequence
  Description of Artificial Sequence: Synthetic oligonucleotide
gaguuacguugguaugauc

SEQ ID NO: 1137494 - RNA, 19 nt, Artificial Sequence
  Description of Artificial Sequence: Synthetic oligonucleotide
ugcucgcugcucagcccgg

SEQ ID NO: 1137495 - RNA, 19 nt, Artificial Sequence
  Description of Artificial Sequence: Synthetic oligonucleotide
gcuuacgagucagguagcg

SEQ ID NO: 1137496 - RNA, 19 nt, Artificial Sequence
  Description of Artificial Sequence: Synthetic oligonucleotide
gcgcuugaggaucugcgcc

SEQ ID NO: 1137497 - RNA, 19 nt, Artificial Sequence
  Description of Artificial Sequence: Synthetic oligonucleotide
gcucaagcgguuccggggc

SEQ ID NO: 1137498 - RNA, 19 nt, Artificial Sequence
  Description of Artificial Sequence: Synthetic oligonucleotide
guacuaggagucccugguc

SEQ ID NO: 1137499 - RNA, 19 nt, Artificial Sequence
  Description of Artificial Sequence: Synthetic oligonucleotide
gcuguguucucugucacuc

SEQ ID NO: 1137500 - RNA, 19 nt, Artificial Sequence
  Description of Artificial Sequence: Synthetic oligonucleotide
uccggggcggcgugauccg

SEQ ID NO: 1137501 - RNA, 19 nt, Artificial Sequence
  Description of Artificial Sequence: Synthetic oligonucleotide
gcugcauuaaaagccauua

SEQ ID NO: 1137502 - RNA, 19 nt, Artificial Sequence
  Description of Artificial Sequence: Synthetic oligonucleotide
gcaccgucggcacacugag

SEQ ID NO: 1137503 - RNA, 19 nt, Artificial Sequence
  Description of Artificial Sequence: Synthetic oligonucleotide
cgugauccgaugcucuucg

SEQ ID NO: 1137504 - RNA, 19 nt, Artificial Sequence
  Description of Artificial Sequence: Synthetic oligonucleotide
ucugcgccagcacguucac

SEQ ID NO: 1137505 - RNA, 19 nt, Artificial Sequence
  Description of Artificial Sequence: Synthetic oligonucleotide
gcuaucugacucaucgcug

SEQ ID NO: 1137506 - RNA, 19 nt, Artificial Sequence
  Description of Artificial Sequence: Synthetic oligonucleotide
ucccggagcuuucgguuaa

SEQ ID NO: 1137507 - RNA, 19 nt, Artificial Sequence
  Description of Artificial Sequence: Synthetic oligonucleotide
guagcggcguacagcgucc

SEQ ID NO: 1137508 - RNA, 19 nt, Artificial Sequence
  Description of Artificial Sequence: Synthetic oligonucleotide
ggggcuuagagucgccaug

SEQ ID NO: 1137509 - RNA, 19 nt, Artificial Sequence
  Description of Artificial Sequence: Synthetic oligonucleotide
agagugcagaggaggucuc

SEQ ID NO: 1137510 - RNA, 19 nt, Artificial Sequence
  Description of Artificial Sequence: Synthetic oligonucleotide
agucagguagcggcguaca

SEQ ID NO: 1137511 - RNA, 19 nt, Artificial Sequence
  Description of Artificial Sequence: Synthetic oligonucleotide
gcggugugaaauuguacca

SEQ ID NO: 1137512 - RNA, 19 nt, Artificial Sequence
  Description of Artificial Sequence: Synthetic oligonucleotide
cuaggagucccuggucgac

SEQ ID NO: 1137513 - RNA, 19 nt, Artificial Sequence
  Description of Artificial Sequence: Synthetic oligonucleotide
ugucgggccagcgguguga

SEQ ID NO: 1137514 - RNA, 19 nt, Artificial Sequence
  Description of Artificial Sequence: Synthetic oligonucleotide
cgugguaucccucgguccc

SEQ ID NO: 1137515 - RNA, 19 nt, Artificial Sequence
  Description of Artificial Sequence: Synthetic oligonucleotide
gggaguuacguugguauga

SEQ ID NO: 1137516 - RNA, 19 nt, Artificial Sequence
  Description of Artificial Sequence: Synthetic oligonucleotide
ugucucauccggggagcug

SEQ ID NO: 1137517 - RNA, 19 nt, Artificial Sequence
  Description of Artificial Sequence: Synthetic oligonucleotide
ccgauuugccauugacccg

SEQ ID NO: 1137518 - RNA, 19 nt, Artificial Sequence
  Description of Artificial Sequence: Synthetic oligonucleotide
cugccggggcuuagagucg

SEQ ID NO: 1137519 - RNA, 19 nt, Artificial Sequence
  Description of Artificial Sequence: Synthetic oligonucleotide
ggccucaaaggcaccgucg

SEQ ID NO: 1137520 - RNA, 19 nt, Artificial Sequence
  Description of Artificial Sequence: Synthetic oligonucleotide
acuugcccgggaguuacgu

SEQ ID NO: 1137521 - RNA, 19 nt, Artificial Sequence
  Description of Artificial Sequence: Synthetic oligonucleotide
gaucugcgccagcacguuc

SEQ ID NO: 1137522 - RNA, 19 nt, Artificial Sequence
  Description of Artificial Sequence: Synthetic oligonucleotide
gagucagguagcggcguac

SEQ ID NO: 1137523 - RNA, 19 nt, Artificial Sequence
  Description of Artificial Sequence: Synthetic oligonucleotide
aggcaacuugcccgggagu

SEQ ID NO: 1137524 - RNA, 19 nt, Artificial Sequence
  Description of Artificial Sequence: Synthetic oligonucleotide
accaaucaucuugcgcuca

SEQ ID NO: 1137525 - RNA, 19 nt, Artificial Sequence
  Description of Artificial Sequence: Synthetic oligonucleotide
guacagcguccucugucac

SEQ ID NO: 1137526 - RNA, 19 nt, Artificial Sequence
  Description of Artificial Sequence: Synthetic oligonucleotide
gggagaagugcaucuuauc

SEQ ID NO: 1137527 - RNA, 19 nt, Artificial Sequence
  Description of Artificial Sequence: Synthetic oligonucleotide
gucacuccgcccuucuuua

SEQ ID NO: 1137528 - RNA, 19 nt, Artificial Sequence
  Description of Artificial Sequence: Synthetic oligonucleotide
accgcccgacggcuugcgc

SEQ ID NO: 1137529 - RNA, 19 nt, Artificial Sequence
  Description of Artificial Sequence: Synthetic oligonucleotide
ggucaugggcuuacgaguc

SEQ ID NO: 1137530 - RNA, 19 nt, Artificial Sequence
  Description of Artificial Sequence: Synthetic oligonucleotide
ccuuagaggcucugcugcc

SEQ ID NO: 1137531 - RNA, 19 nt, Artificial Sequence
  Description of Artificial Sequence: Synthetic oligonucleotide
gucaugggcuuacgaguca

SEQ ID NO: 1137532 - RNA, 19 nt, Artificial Sequence
  Description of Artificial Sequence: Synthetic oligonucleotide
caaaguccccaucaucacu

SEQ ID NO: 1137533 - RNA, 19 nt, Artificial Sequence
  Description of Artificial Sequence: Synthetic oligonucleotide
gcccgauuugccauugacc

SEQ ID NO: 1137534 - RNA, 19 nt, Artificial Sequence
  Description of Artificial Sequence: Synthetic oligonucleotide
cccggggaaggcaacuugc

SEQ ID NO: 1137535 - RNA, 19 nt, Artificial Sequence
  Description of Artificial Sequence: Synthetic oligonucleotide
agugugcggugucgggcca

SEQ ID NO: 1137536 - RNA, 19 nt, Artificial Sequence
  Description of Artificial Sequence: Synthetic oligonucleotide
gcucugaggggcagcaucc

SEQ ID NO: 1137537 - RNA, 19 nt, Artificial Sequence
  Description of Artificial Sequence: Synthetic oligonucleotide
cuuccucgccacuggcauc

SEQ ID NO: 1137538 - RNA, 19 nt, Artificial Sequence
  Description of Artificial Sequence: Synthetic oligonucleotide
agcggcguacagcguccuc

SEQ ID NO: 1137539 - RNA, 19 nt, Artificial Sequence
  Description of Artificial Sequence: Synthetic oligonucleotide
gacaucaccgccgcugggu

SEQ ID NO: 1137540 - RNA, 19 nt, Artificial Sequence
  Description of Artificial Sequence: Synthetic oligonucleotide
cugagcuaucugacucauc

SEQ ID NO: 1137541 - RNA, 19 nt, Artificial Sequence
  Description of Artificial Sequence: Synthetic oligonucleotide
gaggacauuuccaggucgu

SEQ ID NO: 1137542 - RNA, 19 nt, Artificial Sequence
  Description of Artificial Sequence: Synthetic oligonucleotide
ugugcggugucgggccagc

SEQ ID NO: 1137543 - RNA, 19 nt, Artificial Sequence
  Description of Artificial Sequence: Synthetic oligonucleotide
gguuuaagaccuuguuccu

SEQ ID NO: 1137544 - RNA, 19 nt, Artificial Sequence
  Description of Artificial Sequence: Synthetic oligonucleotide
ggucucacuuguccgcuuc

SEQ ID NO: 1137545 - RNA, 19 nt, Artificial Sequence
  Description of Artificial Sequence: Synthetic oligonucleotide
cccuuagaacuaccgcccg

SEQ ID NO: 1137546 - RNA, 19 nt, Artificial Sequence
  Description of Artificial Sequence: Synthetic oligonucleotide
gcauccauccguaagcgcu

SEQ ID NO: 1137547 - RNA, 19 nt, Artificial Sequence
  Description of Artificial Sequence: Synthetic oligonucleotide
cugcgucuguacuaggagu

SEQ ID NO: 1137548 - RNA, 19 nt, Artificial Sequence
  Description of Artificial Sequence: Synthetic oligonucleotide
cgguuaaauucacugccug

SEQ ID NO: 1137549 - RNA, 19 nt, Artificial Sequence
  Description of Artificial Sequence: Synthetic oligonucleotide
uggggaccuucuucucuuc

SEQ ID NO: 1137550 - RNA, 19 nt, Artificial Sequence
  Description of Artificial Sequence: Synthetic oligonucleotide
gucgacugguacccuuaga

SEQ ID NO: 1137551 - RNA, 19 nt, Artificial Sequence
  Description of Artificial Sequence: Synthetic oligonucleotide
agauaggcucugaggggca

SEQ ID NO: 1137552 - RNA, 19 nt, Artificial Sequence
  Description of Artificial Sequence: Synthetic oligonucleotide
gcguacagcguccucuguc

SEQ ID NO: 1137553 - RNA, 19 nt, Artificial Sequence
  Description of Artificial Sequence: Synthetic oligonucleotide
ucacuccgcccuucuuuau

SEQ ID NO: 1137554 - RNA, 19 nt, Artificial Sequence
  Description of Artificial Sequence: Synthetic oligonucleotide
ggugacguucuggcugccg

SEQ ID NO: 1137555 - RNA, 19 nt, Artificial Sequence
  Description of Artificial Sequence: Synthetic oligonucleotide
gacggcuugcgcucccucu

SEQ ID NO: 1137556 - RNA, 19 nt, Artificial Sequence
  Description of Artificial Sequence: Synthetic oligonucleotide
gacucaucgcugcugucuu

SEQ ID NO: 1137557 - RNA, 19 nt, Artificial Sequence
  Description of Artificial Sequence: Synthetic oligonucleotide
gagugcagaggaggucuca

SEQ ID NO: 1137558 - RNA, 19 nt, Artificial Sequence
  Description of Artificial Sequence: Synthetic oligonucleotide
cuguugcaugaugcugaag

SEQ ID NO: 1137559 - RNA, 19 nt, Artificial Sequence
  Description of Artificial Sequence: Synthetic oligonucleotide
ccauccguaagcgcuuggc

SEQ ID NO: 1137560 - RNA, 19 nt, Artificial Sequence
  Description of Artificial Sequence: Synthetic oligonucleotide
cgacugguacccuuagaac

SEQ ID NO: 1137561 - RNA, 19 nt, Artificial Sequence
  Description of Artificial Sequence: Synthetic oligonucleotide
ugcggcacuuuggguuugc

SEQ ID NO: 1137562 - RNA, 19 nt, Artificial Sequence
  Description of Artificial Sequence: Synthetic oligonucleotide
cuucgccaugaagagugca

SEQ ID NO: 1137563 - RNA, 19 nt, Artificial Sequence
  Description of Artificial Sequence: Synthetic oligonucleotide
aggcaccgucggcacacug

SEQ ID NO: 1137564 - RNA, 19 nt, Artificial Sequence
  Description of Artificial Sequence: Synthetic oligonucleotide
ggcuuagagucgccauggc

SEQ ID NO: 1137565 - RNA, 19 nt, Artificial Sequence
  Description of Artificial Sequence: Synthetic oligonucleotide
ggacaucaccgccgcuggg

SEQ ID NO: 1137566 - RNA, 19 nt, Artificial Sequence
  Description of Artificial Sequence: Synthetic oligonucleotide
uggggacucggacgacaua

SEQ ID NO: 1137567 - RNA, 19 nt, Artificial Sequence
  Description of Artificial Sequence: Synthetic oligonucleotide
gguaucccucggucccggg

SEQ ID NO: 1137568 - RNA, 19 nt, Artificial Sequence
  Description of Artificial Sequence: Synthetic oligonucleotide
cccuggucgacugguaccc

SEQ ID NO: 1137569 - RNA, 19 nt, Artificial Sequence
  Description of Artificial Sequence: Synthetic oligonucleotide
uccugcccgauuugccauu

SEQ ID NO: 1137570 - RNA, 19 nt, Artificial Sequence
  Description of Artificial Sequence: Synthetic oligonucleotide
gcacuuuggguuugcccuc

SEQ ID NO: 1137571 - RNA, 19 nt, Artificial Sequence
  Description of Artificial Sequence: Synthetic oligonucleotide
gaacuaccgcccgacggcu

SEQ ID NO: 1137572 - RNA, 19 nt, Artificial Sequence
  Description of Artificial Sequence: Synthetic oligonucleotide
cgauuugccauugacccga

SEQ ID NO: 1137573 - RNA, 19 nt, Artificial Sequence
  Description of Artificial Sequence: Synthetic oligonucleotide
cguacagcguccucuguca

SEQ ID NO: 1137574 - RNA, 19 nt, Artificial Sequence
  Description of Artificial Sequence: Synthetic oligonucleotide
ccauggccguugcucaagc

SEQ ID NO: 1137575 - RNA, 19 nt, Artificial Sequence
  Description of Artificial Sequence: Synthetic oligonucleotide
gcgucuguacuaggagucc

SEQ ID NO: 1137576 - RNA, 19 nt, Artificial Sequence
  Description of Artificial Sequence: Synthetic oligonucleotide
cagcccggucuucuugguc

SEQ ID NO: 1137577 - RNA, 19 nt, Artificial Sequence
  Description of Artificial Sequence: Synthetic oligonucleotide
aaggcaccgucggcacacu

SEQ ID NO: 1137578 - RNA, 19 nt, Artificial Sequence
  Description of Artificial Sequence: Synthetic oligonucleotide
cuucgugguaucccucggu

SEQ ID NO: 1137579 - RNA, 19 nt, Artificial Sequence
  Description of Artificial Sequence: Synthetic oligonucleotide
cauugacccgaagcagcca

SEQ ID NO: 1137580 - RNA, 19 nt, Artificial Sequence
  Description of Artificial Sequence: Synthetic oligonucleotide
agcccgcaggguggaagag

SEQ ID NO: 1137581 - RNA, 19 nt, Artificial Sequence
  Description of Artificial Sequence: Synthetic oligonucleotide
gugucgggccagcggugug

SEQ ID NO: 1137582 - RNA, 19 nt, Artificial Sequence
  Description of Artificial Sequence: Synthetic oligonucleotide
aucccucggucccggggaa

SEQ ID NO: 1137583 - RNA, 19 nt, Artificial Sequence
  Description of Artificial Sequence: Synthetic oligonucleotide
cggcacuuuggguuugccc

SEQ ID NO: 1137584 - RNA, 19 nt, Artificial Sequence
  Description of Artificial Sequence: Synthetic oligonucleotide
ucaccgccgcugggugugg

SEQ ID NO: 1137585 - RNA, 19 nt, Artificial Sequence
  Description of Artificial Sequence: Synthetic oligonucleotide
cuaccgcccgacggcuugc

SEQ ID NO: 1137586 - RNA, 19 nt, Artificial Sequence
  Description of Artificial Sequence: Synthetic oligonucleotide
gucuguacuaggagucccu

SEQ ID NO: 1137587 - RNA, 19 nt, Artificial Sequence
  Description of Artificial Sequence: Synthetic oligonucleotide
ggcuuacgagucagguagc

SEQ ID NO: 1137588 - RNA, 19 nt, Artificial Sequence
  Description of Artificial Sequence: Synthetic oligonucleotide
cugcgccagcacguucacg

SEQ ID NO: 1137589 - RNA, 19 nt, Artificial Sequence
  Description of Artificial Sequence: Synthetic oligonucleotide
aggucguccuccaggucau

SEQ ID NO: 1137590 - RNA, 19 nt, Artificial Sequence
  Description of Artificial Sequence: Synthetic oligonucleotide
ccagguagcaaaguugacu

SEQ ID NO: 1137591 - RNA, 19 nt, Artificial Sequence
  Description of Artificial Sequence: Synthetic oligonucleotide
gauuugccauugacccgaa

SEQ ID NO: 1137592 - RNA, 19 nt, Artificial Sequence
  Description of Artificial Sequence: Synthetic oligonucleotide
gccauggccguugcucaag

SEQ ID NO: 1137593 - RNA, 19 nt, Artificial Sequence
  Description of Artificial Sequence: Synthetic oligonucleotide
ggcaccgucggcacacuga

SEQ ID NO: 1137594 - RNA, 19 nt, Artificial Sequence
  Description of Artificial Sequence: Synthetic oligonucleotide
cgggaguuacguugguaug

SEQ ID NO: 1137595 - RNA, 19 nt, Artificial Sequence
  Description of Artificial Sequence: Synthetic oligonucleotide
gggcggcgugauccgaugc

SEQ ID NO: 1137596 - RNA, 19 nt, Artificial Sequence
  Description of Artificial Sequence: Synthetic oligonucleotide
gugugcggugucgggccag

SEQ ID NO: 1137597 - RNA, 19 nt, Artificial Sequence
  Description of Artificial Sequence: Synthetic oligonucleotide
ccucagcagugagugugcg

SEQ ID NO: 1137598 - RNA, 19 nt, Artificial Sequence
  Description of Artificial Sequence: Synthetic oligonucleotide
aacuaccgcccgacggcuu

SEQ ID NO: 1137599 - RNA, 19 nt, Artificial Sequence
  Description of Artificial Sequence: Synthetic oligonucleotide
ccuuagaacuaccgcccga

SEQ ID NO: 1137600 - RNA, 19 nt, Artificial Sequence
  Description of Artificial Sequence: Synthetic oligonucleotide
cauccauccguaagcgcuu

SEQ ID NO: 1137601 - RNA, 19 nt, Artificial Sequence
  Description of Artificial Sequence: Synthetic oligonucleotide
ggaaggccucaaaggcacc

SEQ ID NO: 1137602 - RNA, 19 nt, Artificial Sequence
  Description of Artificial Sequence: Synthetic oligonucleotide
ggggcggcgugauccgaug

SEQ ID NO: 1137603 - RNA, 19 nt, Artificial Sequence
  Description of Artificial Sequence: Synthetic oligonucleotide
cauggaugcgaagcucacu

SEQ ID NO: 1137604 - RNA, 19 nt, Artificial Sequence
  Description of Artificial Sequence: Synthetic oligonucleotide
ccgggaguuacguugguau

SEQ ID NO: 1137605 - RNA, 19 nt, Artificial Sequence
  Description of Artificial Sequence: Synthetic oligonucleotide
ccgcuguugcaugaugcug

SEQ ID NO: 1137606 - RNA, 19 nt, Artificial Sequence
  Description of Artificial Sequence: Synthetic oligonucleotide
cucugaggggcagcaucca

SEQ ID NO: 1137607 - RNA, 19 nt, Artificial Sequence
  Description of Artificial Sequence: Synthetic oligonucleotide
ggaguuacguugguaugau

SEQ ID NO: 1137608 - RNA, 19 nt, Artificial Sequence
  Description of Artificial Sequence: Synthetic oligonucleotide
cacggucugcucgcugcuc

SEQ ID NO: 1137609 - RNA, 19 nt, Artificial Sequence
  Description of Artificial Sequence: Synthetic oligonucleotide
caucugagcccuucuucuu

SEQ ID NO: 1137610 - RNA, 19 nt, Artificial Sequence
  Description of Artificial Sequence: Synthetic oligonucleotide
gcagccaaggcugguccuc

SEQ ID NO: 1137611 - RNA, 19 nt, Artificial Sequence
  Description of Artificial Sequence: Synthetic oligonucleotide
gcggugucgggccagcggu

SEQ ID NO: 1137612 - RNA, 19 nt, Artificial Sequence
  Description of Artificial Sequence: Synthetic oligonucleotide
gcgugauccgaugcucuuc

SEQ ID NO: 1137613 - RNA, 19 nt, Artificial Sequence
  Description of Artificial Sequence: Synthetic oligonucleotide
uagagucgccauggccguu

SEQ ID NO: 1137614 - RNA, 19 nt, Artificial Sequence
  Description of Artificial Sequence: Synthetic oligonucleotide
ggcuguguucucugucacu

SEQ ID NO: 1137615 - RNA, 19 nt, Artificial Sequence
  Description of Artificial Sequence: Synthetic oligonucleotide
guuccggggcggcgugauc

SEQ ID NO: 1137616 - RNA, 19 nt, Artificial Sequence
  Description of Artificial Sequence: Synthetic oligonucleotide
agucccuggucgacuggua

SEQ ID NO: 1137617 - RNA, 19 nt, Artificial Sequence
  Description of Artificial Sequence: Synthetic oligonucleotide
cagcguccucugucaccug

SEQ ID NO: 1137618 - RNA, 19 nt, Artificial Sequence
  Description of Artificial Sequence: Synthetic oligonucleotide
ggcaacuugcccgggaguu

SEQ ID NO: 1137619 - RNA, 19 nt, Artificial Sequence
  Description of Artificial Sequence: Synthetic oligonucleotide
gccguugcucaagcgguuc

SEQ ID NO: 1137620 - RNA, 19 nt, Artificial Sequence
  Description of Artificial Sequence: Synthetic oligonucleotide
ccugcccgauuugccauug

SEQ ID NO: 1137621 - RNA, 19 nt, Artificial Sequence
  Description of Artificial Sequence: Synthetic oligonucleotide
cuccggacucuggcauuuc

SEQ ID NO: 1137622 - RNA, 19 nt, Artificial Sequence
  Description of Artificial Sequence: Synthetic oligonucleotide
cuggucgacugguacccuu

SEQ ID NO: 1137623 - RNA, 19 nt, Artificial Sequence
  Description of Artificial Sequence: Synthetic oligonucleotide
caucaccgccgcugggugu

SEQ ID NO: 1137624 - RNA, 19 nt, Artificial Sequence
  Description of Artificial Sequence: Synthetic oligonucleotide
cacuuuggguuugcccucu

SEQ ID NO: 1137625 - RNA, 19 nt, Artificial Sequence
  Description of Artificial Sequence: Synthetic oligonucleotide
gcuuucgguuaaauucacu

SEQ ID NO: 1137626 - RNA, 19 nt, Artificial Sequence
  Description of Artificial Sequence: Synthetic oligonucleotide
cuugcccgggaguuacguu

SEQ ID NO: 1137627 - RNA, 19 nt, Artificial Sequence
  Description of Artificial Sequence: Synthetic oligonucleotide
gcggcguacagcguccucu

SEQ ID NO: 1137628 - RNA, 19 nt, Artificial Sequence
  Description of Artificial Sequence: Synthetic oligonucleotide
uccucgccacuggcaucac

SEQ ID NO: 1137629 - RNA, 19 nt, Artificial Sequence
  Description of Artificial Sequence: Synthetic oligonucleotide
cuugaacuuccugcccgau

SEQ ID NO: 1137630 - RNA, 19 nt, Artificial Sequence
  Description of Artificial Sequence: Synthetic oligonucleotide
gcggcacuuuggguuugcc

SEQ ID NO: 1137631 - RNA, 19 nt, Artificial Sequence
  Description of Artificial Sequence: Synthetic oligonucleotide
cccggucuucuuggucugg

SEQ ID NO: 1137632 - RNA, 19 nt, Artificial Sequence
  Description of Artificial Sequence: Synthetic oligonucleotide
ccgucggcacacugaguga

SEQ ID NO: 1137633 - RNA, 19 nt, Artificial Sequence
  Description of Artificial Sequence: Synthetic oligonucleotide
cgucuugcuuccucccgga

SEQ ID NO: 1137634 - RNA, 19 nt, Artificial Sequence
  Description of Artificial Sequence: Synthetic oligonucleotide
ggcgugauccgaugcucuu

SEQ ID NO: 1137635 - RNA, 19 nt, Artificial Sequence
  Description of Artificial Sequence: Synthetic oligonucleotide
ccucggucccggggaaggc

SEQ ID NO: 1137636 - RNA, 19 nt, Artificial Sequence
  Description of Artificial Sequence: Synthetic oligonucleotide
ggcugccggggcuuagagu

SEQ ID NO: 1137637 - RNA, 19 nt, Artificial Sequence
  Description of Artificial Sequence: Synthetic oligonucleotide
cugcagcccgcagggugga

SEQ ID NO: 1137638 - RNA, 19 nt, Artificial Sequence
  Description of Artificial Sequence: Synthetic oligonucleotide
gccagcggugugaaauugu

SEQ ID NO: 1137639 - RNA, 19 nt, Artificial Sequence
  Description of Artificial Sequence: Synthetic oligonucleotide
gggacucggacgacauacu

SEQ ID NO: 1137640 - RNA, 19 nt, Artificial Sequence
  Description of Artificial Sequence: Synthetic oligonucleotide
ccgcaggguggaagaggug

SEQ ID NO: 1137641 - RNA, 19 nt, Artificial Sequence
  Description of Artificial Sequence: Synthetic oligonucleotide
gaagcucacugggcuucuu

SEQ ID NO: 1137642 - RNA, 19 nt, Artificial Sequence
  Description of Artificial Sequence: Synthetic oligonucleotide
ccggucuucuuggucugga

SEQ ID NO: 1137643 - RNA, 19 nt, Artificial Sequence
  Description of Artificial Sequence: Synthetic oligonucleotide
ggucccggggaaggcaacu

SEQ ID NO: 1137644 - RNA, 19 nt, Artificial Sequence
  Description of Artificial Sequence: Synthetic oligonucleotide
cggcuugcgcucccucuug

SEQ ID NO: 1137645 - RNA, 19 nt, Artificial Sequence
  Description of Artificial Sequence: Synthetic oligonucleotide
caccgucggcacacugagu

SEQ ID NO: 1137646 - RNA, 19 nt, Artificial Sequence
  Description of Artificial Sequence: Synthetic oligonucleotide
ccgcccgacggcuugcgcu

SEQ ID NO: 1137647 - RNA, 19 nt, Artificial Sequence
  Description of Artificial Sequence: Synthetic oligonucleotide
ggaucugcgccagcacguu

SEQ ID NO: 1137648 - RNA, 19 nt, Artificial Sequence
  Description of Artificial Sequence: Synthetic oligonucleotide
ccgaugcucuucgugguau

SEQ ID NO: 1137649 - RNA, 19 nt, Artificial Sequence
  Description of Artificial Sequence: Synthetic oligonucleotide
gcuccggacucuggcauuu

SEQ ID NO: 1137650 - RNA, 19 nt, Artificial Sequence
  Description of Artificial Sequence: Synthetic oligonucleotide
caccgccgcugggugugga

SEQ ID NO: 1137651 - RNA, 19 nt, Artificial Sequence
  Description of Artificial Sequence: Synthetic oligonucleotide
cgacggcuugcgcucccuc

SEQ ID NO: 1137652 - RNA, 19 nt, Artificial Sequence
  Description of Artificial Sequence: Synthetic oligonucleotide
cccgggaguuacguuggua

SEQ ID NO: 1137653 - RNA, 19 nt, Artificial Sequence
  Description of Artificial Sequence: Synthetic oligonucleotide
cggcgugauccgaugcucu

SEQ ID NO: 1137654 - RNA, 19 nt, Artificial Sequence
  Description of Artificial Sequence: Synthetic oligonucleotide
cggggcuuagagucgccau

SEQ ID NO: 1137655 - RNA, 19 nt, Artificial Sequence
  Description of Artificial Sequence: Synthetic oligonucleotide
ggccguugcucaagcgguu

SEQ ID NO: 1137656 - RNA, 19 nt, Artificial Sequence
  Description of Artificial Sequence: Synthetic oligonucleotide
cgccauggccguugcucaa

SEQ ID NO: 1137657 - RNA, 19 nt, Artificial Sequence
  Description of Artificial Sequence: Synthetic oligonucleotide
gcccgggaguuacguuggu

SEQ ID NO: 1137658 - RNA, 19 nt, Artificial Sequence
  Description of Artificial Sequence: Synthetic oligonucleotide
gcucgcugcucagcccggu

SEQ ID NO: 1137659 - RNA, 19 nt, Artificial Sequence
  Description of Artificial Sequence: Synthetic oligonucleotide
gccuccgcuguugcaugau

SEQ ID NO: 1137660 - RNA, 19 nt, Artificial Sequence
  Description of Artificial Sequence: Synthetic oligonucleotide
ccguaagcgcuuggcugcu

SEQ ID NO: 1137661 - RNA, 19 nt, Artificial Sequence
  Description of Artificial Sequence: Synthetic oligonucleotide
cgacauacucggugacguu

SEQ ID NO: 1137662 - RNA, 19 nt, Artificial Sequence
  Description of Artificial Sequence: Synthetic oligonucleotide
cccggagcuuucgguuaaa

SEQ ID NO: 1137663 - RNA, 19 nt, Artificial Sequence
  Description of Artificial Sequence: Synthetic oligonucleotide
ccuggucgacugguacccu

SEQ ID NO: 1137664 - RNA, 19 nt, Artificial Sequence
  Description of Artificial Sequence: Synthetic oligonucleotide
ccgacggcuugcgcucccu

SEQ ID NO: 1137665 - RNA, 19 nt, Artificial Sequence
  Description of Artificial Sequence: Synthetic oligonucleotide
aauauucugauucacaccg

SEQ ID NO: 1137666 - RNA, 19 nt, Artificial Sequence
  Description of Artificial Sequence: Synthetic oligonucleotide
agaaacuuuacucagguuc

SEQ ID NO: 1137667 - RNA, 19 nt, Artificial Sequence
  Description of Artificial Sequence: Synthetic oligonucleotide
uuuugugcaaaucaaaacc

SEQ ID NO: 1137668 - RNA, 19 nt, Artificial Sequence
  Description of Artificial Sequence: Synthetic oligonucleotide
uagagaaucacacauagcu

SEQ ID NO: 1137669 - RNA, 19 nt, Artificial Sequence
  Description of Artificial Sequence: Synthetic oligonucleotide
aaauauaaaaguagagggc

SEQ ID NO: 1137670 - RNA, 19 nt, Artificial Sequence
  Description of Artificial Sequence: Synthetic oligonucleotide
aucaaaaccgccuugcccc

SEQ ID NO: 1137671 - RNA, 19 nt, Artificial Sequence
  Description of Artificial Sequence: Synthetic oligonucleotide
ucaaguaacugcaugauga

SEQ ID NO: 1137672 - RNA, 19 nt, Artificial Sequence
  Description of Artificial Sequence: Synthetic oligonucleotide
uuuagauuggcaaacgggc

SEQ ID NO: 1137673 - RNA, 19 nt, Artificial Sequence
  Description of Artificial Sequence: Synthetic oligonucleotide
uguaauuuggaauauucug

SEQ ID NO: 1137674 - RNA, 19 nt, Artificial Sequence
  Description of Artificial Sequence: Synthetic oligonucleotide
aaggguaucagacacauaa

SEQ ID NO: 1137675 - RNA, 19 nt, Artificial Sequence
  Description of Artificial Sequence: Synthetic oligonucleotide
aaguauucccaucaguuuc

SEQ ID NO: 1137676 - RNA, 19 nt, Artificial Sequence
  Description of Artificial Sequence: Synthetic oligonucleotide
ugugugaauaguaugauuc

SEQ ID NO: 1137677 - RNA, 19 nt, Artificial Sequence
  Description of Artificial Sequence: Synthetic oligonucleotide
aauguaucgaagcauguca

SEQ ID NO: 1137678 - RNA, 19 nt, Artificial Sequence
  Description of Artificial Sequence: Synthetic oligonucleotide
aacacuuccgccuuuacca

SEQ ID NO: 1137679 - RNA, 19 nt, Artificial Sequence
  Description of Artificial Sequence: Synthetic oligonucleotide
uuugugaccucucagcuag

SEQ ID NO: 1137680 - RNA, 19 nt, Artificial Sequence
  Description of Artificial Sequence: Synthetic oligonucleotide
uuuucaacguccaucagca

SEQ ID NO: 1137681 - RNA, 19 nt, Artificial Sequence
  Description of Artificial Sequence: Synthetic oligonucleotide
agugagauaguacuuccgc

SEQ ID NO: 1137682 - RNA, 19 nt, Artificial Sequence
  Description of Artificial Sequence: Synthetic oligonucleotide
aaaugcuacugagugaccc

SEQ ID NO: 1137683 - RNA, 19 nt, Artificial Sequence
  Description of Artificial Sequence: Synthetic oligonucleotide
accgcuuuaauguacugcc

SEQ ID NO: 1137684 - RNA, 19 nt, Artificial Sequence
  Description of Artificial Sequence: Synthetic oligonucleotide
ugaaguacugucaggaacc

SEQ ID NO: 1137685 - RNA, 19 nt, Artificial Sequence
  Description of Artificial Sequence: Synthetic oligonucleotide
uaucuuguuggcuagucgg

SEQ ID NO: 1137686 - RNA, 19 nt, Artificial Sequence
  Description of Artificial Sequence: Synthetic oligonucleotide
aaugcauuaucaauggcuc

SEQ ID NO: 1137687 - RNA, 19 nt, Artificial Sequence
  Description of Artificial Sequence: Synthetic oligonucleotide
uaauguacugcccacggag

SEQ ID NO: 1137688 - RNA, 19 nt, Artificial Sequence
  Description of Artificial Sequence: Synthetic oligonucleotide
aaaucaaaaccgccuugcc

SEQ ID NO: 1137689 - RNA, 19 nt, Artificial Sequence
  Description of Artificial Sequence: Synthetic oligonucleotide
aucaauggcuccuucagac

SEQ ID NO: 1137690 - RNA, 19 nt, Artificial Sequence
  Description of Artificial Sequence: Synthetic oligonucleotide
guuagagaaucacacauag

SEQ ID NO: 1137691 - RNA, 19 nt, Artificial Sequence
  Description of Artificial Sequence: Synthetic oligonucleotide
uguguauggauccugagau

SEQ ID NO: 1137692 - RNA, 19 nt, Artificial Sequence
  Description of Artificial Sequence: Synthetic oligonucleotide
acuuuacucagguucaagg

SEQ ID NO: 1137693 - RNA, 19 nt, Artificial Sequence
  Description of Artificial Sequence: Synthetic oligonucleotide
uucaauugaacagaguccc

SEQ ID NO: 1137694 - RNA, 19 nt, Artificial Sequence
  Description of Artificial Sequence: Synthetic oligonucleotide
uuaucaauggcuccuucag

SEQ ID NO: 1137695 - RNA, 19 nt, Artificial Sequence
  Description of Artificial Sequence: Synthetic oligonucleotide
gauaguuugaaggcgaagc

SEQ ID NO: 1137696 - RNA, 19 nt, Artificial Sequence
  Description of Artificial Sequence: Synthetic oligonucleotide
ugaccucucagcuagaaac

SEQ ID NO: 1137697 - RNA, 19 nt, Artificial Sequence
  Description of Artificial Sequence: Synthetic oligonucleotide
aaacugacagaccucauaa

SEQ ID NO: 1137698 - RNA, 19 nt, Artificial Sequence
  Description of Artificial Sequence: Synthetic oligonucleotide
ucuuuccuuacucucauga

SEQ ID NO: 1137699 - RNA, 19 nt, Artificial Sequence
  Description of Artificial Sequence: Synthetic oligonucleotide
aguaugauucuucugaaau

SEQ ID NO: 1137700 - RNA, 19 nt, Artificial Sequence
  Description of Artificial Sequence: Synthetic oligonucleotide
uucugauucacaccgcucc

SEQ ID NO: 1137701 - RNA, 19 nt, Artificial Sequence
  Description of Artificial Sequence: Synthetic oligonucleotide
aagucaagggaaaugcuac

SEQ ID NO: 1137702 - RNA, 19 nt, Artificial Sequence
  Description of Artificial Sequence: Synthetic oligonucleotide
gauuaaggcaacuccaaac

SEQ ID NO: 1137703 - RNA, 19 nt, Artificial Sequence
  Description of Artificial Sequence: Synthetic oligonucleotide
auaaggaagugguucagag

SEQ ID NO: 1137704 - RNA, 19 nt, Artificial Sequence
  Description of Artificial Sequence: Synthetic oligonucleotide
uuccuuacucucaugaaug

SEQ ID NO: 1137705 - RNA, 19 nt, Artificial Sequence
  Description of Artificial Sequence: Synthetic oligonucleotide
agggaaaugcuacugagug

SEQ ID NO: 1137706 - RNA, 19 nt, Artificial Sequence
  Description of Artificial Sequence: Synthetic oligonucleotide
aucguagcgaguuugcuag

SEQ ID NO: 1137707 - RNA, 19 nt, Artificial Sequence
  Description of Artificial Sequence: Synthetic oligonucleotide
cuagcaacugaauaaauca

SEQ ID NO: 1137708 - RNA, 19 nt, Artificial Sequence
  Description of Artificial Sequence: Synthetic oligonucleotide
ugugcaaaucaaaaccgcc

SEQ ID NO: 1137709 - RNA, 19 nt, Artificial Sequence
  Description of Artificial Sequence: Synthetic oligonucleotide
cucaugaauguaucgaagc

SEQ ID NO: 1137710 - RNA, 19 nt, Artificial Sequence
  Description of Artificial Sequence: Synthetic oligonucleotide
uguucugaauccucuaacc

SEQ ID NO: 1137711 - RNA, 19 nt, Artificial Sequence
  Description of Artificial Sequence: Synthetic oligonucleotide
ucaugaauguaucgaagca

SEQ ID NO: 1137712 - RNA, 19 nt, Artificial Sequence
  Description of Artificial Sequence: Synthetic oligonucleotide
aguuuagauuggcaaacgg

SEQ ID NO: 1137713 - RNA, 19 nt, Artificial Sequence
  Description of Artificial Sequence: Synthetic oligonucleotide
aauuguucccagcaacucu

SEQ ID NO: 1137714 - RNA, 19 nt, Artificial Sequence
  Description of Artificial Sequence: Synthetic oligonucleotide
cugaaggcaagugagauag

SEQ ID NO: 1137715 - RNA, 19 nt, Artificial Sequence
  Description of Artificial Sequence: Synthetic oligonucleotide
aaccgcuuuaauguacugc

SEQ ID NO: 1137716 - RNA, 19 nt, Artificial Sequence
  Description of Artificial Sequence: Synthetic oligonucleotide
gauccugagaugcaucuag

SEQ ID NO: 1137717 - RNA, 19 nt, Artificial Sequence
  Description of Artificial Sequence: Synthetic oligonucleotide
uucugaauccucuaaccgc

SEQ ID NO: 1137718 - RNA, 19 nt, Artificial Sequence
  Description of Artificial Sequence: Synthetic oligonucleotide
acggaguucuuccaaggcc

SEQ ID NO: 1137719 - RNA, 19 nt, Artificial Sequence
  Description of Artificial Sequence: Synthetic oligonucleotide
agaaauguuucaauugaac

SEQ ID NO: 1137720 - RNA, 19 nt, Artificial Sequence
  Description of Artificial Sequence: Synthetic oligonucleotide
guuuagauuggcaaacggg

SEQ ID NO: 1137721 - RNA, 19 nt, Artificial Sequence
  Description of Artificial Sequence: Synthetic oligonucleotide
guucugaauccucuaaccg

SEQ ID NO: 1137722 - RNA, 19 nt, Artificial Sequence
  Description of Artificial Sequence: Synthetic oligonucleotide
aguacugucaggaaccggg

SEQ ID NO: 1137723 - RNA, 19 nt, Artificial Sequence
  Description of Artificial Sequence: Synthetic oligonucleotide
cucacacauacuuuugggg

SEQ ID NO: 1137724 - RNA, 19 nt, Artificial Sequence
  Description of Artificial Sequence: Synthetic oligonucleotide
uuuaauacaucagggcuca

SEQ ID NO: 1137725 - RNA, 19 nt, Artificial Sequence
  Description of Artificial Sequence: Synthetic oligonucleotide
uguaucgaagcaugucacg

SEQ ID NO: 1137726 - RNA, 19 nt, Artificial Sequence
  Description of Artificial Sequence: Synthetic oligonucleotide
uggaacaaacucaggagca

SEQ ID NO: 1137727 - RNA, 19 nt, Artificial Sequence
  Description of Artificial Sequence: Synthetic oligonucleotide
aaaguauucccaucaguuu

SEQ ID NO: 1137728 - RNA, 19 nt, Artificial Sequence
  Description of Artificial Sequence: Synthetic oligonucleotide
augauuguccccgagucac

SEQ ID NO: 1137729 - RNA, 19 nt, Artificial Sequence
  Description of Artificial Sequence: Synthetic oligonucleotide
uuuccuuacucucaugaau

SEQ ID NO: 1137730 - RNA, 19 nt, Artificial Sequence
  Description of Artificial Sequence: Synthetic oligonucleotide
uaaggcaacuccaaacuuc

SEQ ID NO: 1137731 - RNA, 19 nt, Artificial Sequence
  Description of Artificial Sequence: Synthetic oligonucleotide
ugcaauuguucccagcaac

SEQ ID NO: 1137732 - RNA, 19 nt, Artificial Sequence
  Description of Artificial Sequence: Synthetic oligonucleotide
agcuagaaacaacacagca

SEQ ID NO: 1137733 - RNA, 19 nt, Artificial Sequence
  Description of Artificial Sequence: Synthetic oligonucleotide
uucaaguaacugcaugaug

SEQ ID NO: 1137734 - RNA, 19 nt, Artificial Sequence
  Description of Artificial Sequence: Synthetic oligonucleotide
uucaacguccaucagcauc

SEQ ID NO: 1137735 - RNA, 19 nt, Artificial Sequence
  Description of Artificial Sequence: Synthetic oligonucleotide
uugugcaaaucaaaaccgc

SEQ ID NO: 1137736 - RNA, 19 nt, Artificial Sequence
  Description of Artificial Sequence: Synthetic oligonucleotide
ugacagaccucauaauuga

SEQ ID NO: 1137737 - RNA, 19 nt, Artificial Sequence
  Description of Artificial Sequence: Synthetic oligonucleotide
auacuuuugggguauaguu

SEQ ID NO: 1137738 - RNA, 19 nt, Artificial Sequence
  Description of Artificial Sequence: Synthetic oligonucleotide
cugacagaccucauaauug

SEQ ID NO: 1137739 - RNA, 19 nt, Artificial Sequence
  Description of Artificial Sequence: Synthetic oligonucleotide
gaucaguuuagauuggcaa

SEQ ID NO: 1137740 - RNA, 19 nt, Artificial Sequence
  Description of Artificial Sequence: Synthetic oligonucleotide
aaaacugacagaccucaua

SEQ ID NO: 1137741 - RNA, 19 nt, Artificial Sequence
  Description of Artificial Sequence: Synthetic oligonucleotide
uagauuggcaaacgggcug

SEQ ID NO: 1137742 - RNA, 19 nt, Artificial Sequence
  Description of Artificial Sequence: Synthetic oligonucleotide
uucuugugugaauaguaug

SEQ ID NO: 1137743 - RNA, 19 nt, Artificial Sequence
  Description of Artificial Sequence: Synthetic oligonucleotide
uuagauuggcaaacgggcu

SEQ ID NO: 1137744 - RNA, 19 nt, Artificial Sequence
  Description of Artificial Sequence: Synthetic oligonucleotide
ucuguuagagaaucacaca

SEQ ID NO: 1137745 - RNA, 19 nt, Artificial Sequence
  Description of Artificial Sequence: Synthetic oligonucleotide
auuaucaauggcuccuuca

SEQ ID NO: 1137746 - RNA, 19 nt, Artificial Sequence
  Description of Artificial Sequence: Synthetic oligonucleotide
caaacgggcugucaaagcc

SEQ ID NO: 1137747 - RNA, 19 nt, Artificial Sequence
  Description of Artificial Sequence: Synthetic oligonucleotide
uccuuugugaccucucagc

SEQ ID NO: 1137748 - RNA, 19 nt, Artificial Sequence
  Description of Artificial Sequence: Synthetic oligonucleotide
ugagauaguacuuccgcau

SEQ ID NO: 1137749 - RNA, 19 nt, Artificial Sequence
  Description of Artificial Sequence: Synthetic oligonucleotide
ugcgacacaguccuccucc

SEQ ID NO: 1137750 - RNA, 19 nt, Artificial Sequence
  Description of Artificial Sequence: Synthetic oligonucleotide
uccgccuuuaccauuucug

SEQ ID NO: 1137751 - RNA, 19 nt, Artificial Sequence
  Description of Artificial Sequence: Synthetic oligonucleotide
ucugacucugcaauuguuc

SEQ ID NO: 1137752 - RNA, 19 nt, Artificial Sequence
  Description of Artificial Sequence: Synthetic oligonucleotide
guaaaugcgacacaguccu

SEQ ID NO: 1137753 - RNA, 19 nt, Artificial Sequence
  Description of Artificial Sequence: Synthetic oligonucleotide
cugaauaaggaagugguuc

SEQ ID NO: 1137754 - RNA, 19 nt, Artificial Sequence
  Description of Artificial Sequence: Synthetic oligonucleotide
ucaguuuagauuggcaaac

SEQ ID NO: 1137755 - RNA, 19 nt, Artificial Sequence
  Description of Artificial Sequence: Synthetic oligonucleotide
cugacucugcaauuguucc

SEQ ID NO: 1137756 - RNA, 19 nt, Artificial Sequence
  Description of Artificial Sequence: Synthetic oligonucleotide
uuagagaaucacacauagc

SEQ ID NO: 1137757 - RNA, 19 nt, Artificial Sequence
  Description of Artificial Sequence: Synthetic oligonucleotide
ggagcagcuaacuuucucg

SEQ ID NO: 1137758 - RNA, 19 nt, Artificial Sequence
  Description of Artificial Sequence: Synthetic oligonucleotide
ugaucaguuuagauuggca

SEQ ID NO: 1137759 - RNA, 19 nt, Artificial Sequence
  Description of Artificial Sequence: Synthetic oligonucleotide
caaaucaaaaccgccuugc

SEQ ID NO: 1137760 - RNA, 19 nt, Artificial Sequence
  Description of Artificial Sequence: Synthetic oligonucleotide
ugagugacccgccugugca

SEQ ID NO: 1137761 - RNA, 19 nt, Artificial Sequence
  Description of Artificial Sequence: Synthetic oligonucleotide
agcuaacuuucucgaaggc

SEQ ID NO: 1137762 - RNA, 19 nt, Artificial Sequence
  Description of Artificial Sequence: Synthetic oligonucleotide
cagcuaacuuucucgaagg

SEQ ID NO: 1137763 - RNA, 19 nt, Artificial Sequence
  Description of Artificial Sequence: Synthetic oligonucleotide
aagccacuaucuuguuggc

SEQ ID NO: 1137764 - RNA, 19 nt, Artificial Sequence
  Description of Artificial Sequence: Synthetic oligonucleotide
aaucacacauagcugcuuu

SEQ ID NO: 1137765 - RNA, 19 nt, Artificial Sequence
  Description of Artificial Sequence: Synthetic oligonucleotide
caagauuaaggcaacucca

SEQ ID NO: 1137766 - RNA, 19 nt, Artificial Sequence
  Description of Artificial Sequence: Synthetic oligonucleotide
aaauacuuuaacacugcaa

SEQ ID NO: 1137767 - RNA, 19 nt, Artificial Sequence
  Description of Artificial Sequence: Synthetic oligonucleotide
uuacucagguucaagggua

SEQ ID NO: 1137768 - RNA, 19 nt, Artificial Sequence
  Description of Artificial Sequence: Synthetic oligonucleotide
gaaacuuuacucagguuca

SEQ ID NO: 1137769 - RNA, 19 nt, Artificial Sequence
  Description of Artificial Sequence: Synthetic oligonucleotide
agggcuagcaacugaauaa

SEQ ID NO: 1137770 - RNA, 19 nt, Artificial Sequence
  Description of Artificial Sequence: Synthetic oligonucleotide
ucucccacguccuuuguga

SEQ ID NO: 1137771 - RNA, 19 nt, Artificial Sequence
  Description of Artificial Sequence: Synthetic oligonucleotide
cuaucuuguuggcuagucg

SEQ ID NO: 1137772 - RNA, 19 nt, Artificial Sequence
  Description of Artificial Sequence: Synthetic oligonucleotide
aacucugccaucguagcga

SEQ ID NO: 1137773 - RNA, 19 nt, Artificial Sequence
  Description of Artificial Sequence: Synthetic oligonucleotide
aauaaggaagugguucaga

SEQ ID NO: 1137774 - RNA, 19 nt, Artificial Sequence
  Description of Artificial Sequence: Synthetic oligonucleotide
guguggaacaaacucagga

SEQ ID NO: 1137775 - RNA, 19 nt, Artificial Sequence
  Description of Artificial Sequence: Synthetic oligonucleotide
aaggcuuguguguauggau

SEQ ID NO: 1137776 - RNA, 19 nt, Artificial Sequence
  Description of Artificial Sequence: Synthetic oligonucleotide
cucucagcuagaaacaaca

SEQ ID NO: 1137777 - RNA, 19 nt, Artificial Sequence
  Description of Artificial Sequence: Synthetic oligonucleotide
uacuuccgcaucuuccggg

SEQ ID NO: 1137778 - RNA, 19 nt, Artificial Sequence
  Description of Artificial Sequence: Synthetic oligonucleotide
ugcaaaucaaaaccgccuu

SEQ ID NO: 1137779 - RNA, 19 nt, Artificial Sequence
  Description of Artificial Sequence: Synthetic oligonucleotide
agauaguacuuccgcaucu

SEQ ID NO: 1137780 - RNA, 19 nt, Artificial Sequence
  Description of Artificial Sequence: Synthetic oligonucleotide
uuaauguacugcccacgga

SEQ ID NO: 1137781 - RNA, 19 nt, Artificial Sequence
  Description of Artificial Sequence: Synthetic oligonucleotide
uacuuuugggguauaguuu

SEQ ID NO: 1137782 - RNA, 19 nt, Artificial Sequence
  Description of Artificial Sequence: Synthetic oligonucleotide
cuaaggcuuguguguaugg

SEQ ID NO: 1137783 - RNA, 19 nt, Artificial Sequence
  Description of Artificial Sequence: Synthetic oligonucleotide
ugagaugauuguccccgag

SEQ ID NO: 1137784 - RNA, 19 nt, Artificial Sequence
  Description of Artificial Sequence: Synthetic oligonucleotide
ggaaaugcuacugagugac

SEQ ID NO: 1137785 - RNA, 19 nt, Artificial Sequence
  Description of Artificial Sequence: Synthetic oligonucleotide
aagugguucagagccagcu

SEQ ID NO: 1137786 - RNA, 19 nt, Artificial Sequence
  Description of Artificial Sequence: Synthetic oligonucleotide
uguguguauggauccugag

SEQ ID NO: 1137787 - RNA, 19 nt, Artificial Sequence
  Description of Artificial Sequence: Synthetic oligonucleotide
uguuucaauugaacagagu

SEQ ID NO: 1137788 - RNA, 19 nt, Artificial Sequence
  Description of Artificial Sequence: Synthetic oligonucleotide
caugaucaguuuagauugg

SEQ ID NO: 1137789 - RNA, 19 nt, Artificial Sequence
  Description of Artificial Sequence: Synthetic oligonucleotide
uggauccugagaugcaucu

SEQ ID NO: 1137790 - RNA, 19 nt, Artificial Sequence
  Description of Artificial Sequence: Synthetic oligonucleotide
uuguguguauggauccuga

SEQ ID NO: 1137791 - RNA, 19 nt, Artificial Sequence
  Description of Artificial Sequence: Synthetic oligonucleotide
uagcgaguuugcuagcagc

SEQ ID NO: 1137792 - RNA, 19 nt, Artificial Sequence
  Description of Artificial Sequence: Synthetic oligonucleotide
auuacuuuccugggcaucu

SEQ ID NO: 1137793 - RNA, 19 nt, Artificial Sequence
  Description of Artificial Sequence: Synthetic oligonucleotide
ucaaggguaucagacacau

SEQ ID NO: 1137794 - RNA, 19 nt, Artificial Sequence
  Description of Artificial Sequence: Synthetic oligonucleotide
acuaucuuguuggcuaguc

SEQ ID NO: 1137795 - RNA, 19 nt, Artificial Sequence
  Description of Artificial Sequence: Synthetic oligonucleotide
aagccgaggaagccacggg

SEQ ID NO: 1137796 - RNA, 19 nt, Artificial Sequence
  Description of Artificial Sequence: Synthetic oligonucleotide
acaagccauauuacuuucc

SEQ ID NO: 1137797 - RNA, 19 nt, Artificial Sequence
  Description of Artificial Sequence: Synthetic oligonucleotide
aacgggcugucaaagccac

SEQ ID NO: 1137798 - RNA, 19 nt, Artificial Sequence
  Description of Artificial Sequence: Synthetic oligonucleotide
aagauuaaggcaacuccaa

SEQ ID NO: 1137799 - RNA, 19 nt, Artificial Sequence
  Description of Artificial Sequence: Synthetic oligonucleotide
cacugauaguuugaaggcg

SEQ ID NO: 1137800 - RNA, 19 nt, Artificial Sequence
  Description of Artificial Sequence: Synthetic oligonucleotide
cuaaccgccucuguaaaug

SEQ ID NO: 1137801 - RNA, 19 nt, Artificial Sequence
  Description of Artificial Sequence: Synthetic oligonucleotide
ucuaaggcuuguguguaug

SEQ ID NO: 1137802 - RNA, 19 nt, Artificial Sequence
  Description of Artificial Sequence: Synthetic oligonucleotide
uucaaggguaucagacaca

SEQ ID NO: 1137803 - RNA, 19 nt, Artificial Sequence
  Description of Artificial Sequence: Synthetic oligonucleotide
gcagcuaacuuucucgaag

SEQ ID NO: 1137804 - RNA, 19 nt, Artificial Sequence
  Description of Artificial Sequence: Synthetic oligonucleotide
auuguccccgagucacacc

SEQ ID NO: 1137805 - RNA, 19 nt, Artificial Sequence
  Description of Artificial Sequence: Synthetic oligonucleotide
agcaacugaauaaaucaca

SEQ ID NO: 1137806 - RNA, 19 nt, Artificial Sequence
  Description of Artificial Sequence: Synthetic oligonucleotide
augcuacugagugacccgc

SEQ ID NO: 1137807 - RNA, 19 nt, Artificial Sequence
  Description of Artificial Sequence: Synthetic oligonucleotide
gaauguaucgaagcauguc

SEQ ID NO: 1137808 - RNA, 19 nt, Artificial Sequence
  Description of Artificial Sequence: Synthetic oligonucleotide
ugugccacucagcuuucug

SEQ ID NO: 1137809 - RNA, 19 nt, Artificial Sequence
  Description of Artificial Sequence: Synthetic oligonucleotide
acugauaguuugaaggcga

SEQ ID NO: 1137810 - RNA, 19 nt, Artificial Sequence
  Description of Artificial Sequence: Synthetic oligonucleotide
ugauaguuugaaggcgaag

SEQ ID NO: 1137811 - RNA, 19 nt, Artificial Sequence
  Description of Artificial Sequence: Synthetic oligonucleotide
ucacacauagcugcuuuga

SEQ ID NO: 1137812 - RNA, 19 nt, Artificial Sequence
  Description of Artificial Sequence: Synthetic oligonucleotide
aauccucuaaccgccucug

SEQ ID NO: 1137813 - RNA, 19 nt, Artificial Sequence
  Description of Artificial Sequence: Synthetic oligonucleotide
ucugccaucguagcgaguu

SEQ ID NO: 1137814 - RNA, 19 nt, Artificial Sequence
  Description of Artificial Sequence: Synthetic oligonucleotide
uaaccgccucuguaaaugc

SEQ ID NO: 1137815 - RNA, 19 nt, Artificial Sequence
  Description of Artificial Sequence: Synthetic oligonucleotide
acacugcaaaauaagucag

SEQ ID NO: 1137816 - RNA, 19 nt, Artificial Sequence
  Description of Artificial Sequence: Synthetic oligonucleotide
agauuaaggcaacuccaaa

SEQ ID NO: 1137817 - RNA, 19 nt, Artificial Sequence
  Description of Artificial Sequence: Synthetic oligonucleotide
aaaaccgccuugccccugu

SEQ ID NO: 1137818 - RNA, 19 nt, Artificial Sequence
  Description of Artificial Sequence: Synthetic oligonucleotide
agaucuggcuuuaauacau

SEQ ID NO: 1137819 - RNA, 19 nt, Artificial Sequence
  Description of Artificial Sequence: Synthetic oligonucleotide
ugugaauaguaugauucuu

SEQ ID NO: 1137820 - RNA, 19 nt, Artificial Sequence
  Description of Artificial Sequence: Synthetic oligonucleotide
aguuucuugugugaauagu

SEQ ID NO: 1137821 - RNA, 19 nt, Artificial Sequence
  Description of Artificial Sequence: Synthetic oligonucleotide
guagccaccccaacaagcc

SEQ ID NO: 1137822 - RNA, 19 nt, Artificial Sequence
  Description of Artificial Sequence: Synthetic oligonucleotide
gaugauuguccccgaguca

SEQ ID NO: 1137823 - RNA, 19 nt, Artificial Sequence
  Description of Artificial Sequence: Synthetic oligonucleotide
agcugcuuugagccuuggc

SEQ ID NO: 1137824 - RNA, 19 nt, Artificial Sequence
  Description of Artificial Sequence: Synthetic oligonucleotide
auguuucaauugaacagag

SEQ ID NO: 1137825 - RNA, 19 nt, Artificial Sequence
  Description of Artificial Sequence: Synthetic oligonucleotide
uuuccugccguucccgcaa

SEQ ID NO: 1137826 - RNA, 19 nt, Artificial Sequence
  Description of Artificial Sequence: Synthetic oligonucleotide
gaagucaagggaaaugcua

SEQ ID NO: 1137827 - RNA, 19 nt, Artificial Sequence
  Description of Artificial Sequence: Synthetic oligonucleotide
aggcuuguguguauggauc

SEQ ID NO: 1137828 - RNA, 19 nt, Artificial Sequence
  Description of Artificial Sequence: Synthetic oligonucleotide
aucacacauagcugcuuug

SEQ ID NO: 1137829 - RNA, 19 nt, Artificial Sequence
  Description of Artificial Sequence: Synthetic oligonucleotide
caacucugccaucguagcg

SEQ ID NO: 1137830 - RNA, 19 nt, Artificial Sequence
  Description of Artificial Sequence: Synthetic oligonucleotide
uuugagccuuggcacuuca

SEQ ID NO: 1137831 - RNA, 19 nt, Artificial Sequence
  Description of Artificial Sequence: Synthetic oligonucleotide
gugagauaguacuuccgca

SEQ ID NO: 1137832 - RNA, 19 nt, Artificial Sequence
  Description of Artificial Sequence: Synthetic oligonucleotide
guguguauggauccugaga

SEQ ID NO: 1137833 - RNA, 19 nt, Artificial Sequence
  Description of Artificial Sequence: Synthetic oligonucleotide
caguuuagauuggcaaacg

SEQ ID NO: 1137834 - RNA, 19 nt, Artificial Sequence
  Description of Artificial Sequence: Synthetic oligonucleotide
aaacgggcugucaaagcca

SEQ ID NO: 1137835 - RNA, 19 nt, Artificial Sequence
  Description of Artificial Sequence: Synthetic oligonucleotide
gagcagcuaacuuucucga

SEQ ID NO: 1137836 - RNA, 19 nt, Artificial Sequence
  Description of Artificial Sequence: Synthetic oligonucleotide
cuaacuuucucgaaggcuu

SEQ ID NO: 1137837 - RNA, 19 nt, Artificial Sequence
  Description of Artificial Sequence: Synthetic oligonucleotide
uauggauccugagaugcau

SEQ ID NO: 1137838 - RNA, 19 nt, Artificial Sequence
  Description of Artificial Sequence: Synthetic oligonucleotide
cacggaguucuuccaaggc

SEQ ID NO: 1137839 - RNA, 19 nt, Artificial Sequence
  Description of Artificial Sequence: Synthetic oligonucleotide
aguauucccaucaguuucu

SEQ ID NO: 1137840 - RNA, 19 nt, Artificial Sequence
  Description of Artificial Sequence: Synthetic oligonucleotide
cacggggugaaguacuguc

SEQ ID NO: 1137841 - RNA, 19 nt, Artificial Sequence
  Description of Artificial Sequence: Synthetic oligonucleotide
auauuacuuuccugggcau

SEQ ID NO: 1137842 - RNA, 19 nt, Artificial Sequence
  Description of Artificial Sequence: Synthetic oligonucleotide
gaaggcaagugagauagua

SEQ ID NO: 1137843 - RNA, 19 nt, Artificial Sequence
  Description of Artificial Sequence: Synthetic oligonucleotide
auucugauucacaccgcuc

SEQ ID NO: 1137844 - RNA, 19 nt, Artificial Sequence
  Description of Artificial Sequence: Synthetic oligonucleotide
acgggcuuuaucucucugu

SEQ ID NO: 1137845 - RNA, 19 nt, Artificial Sequence
  Description of Artificial Sequence: Synthetic oligonucleotide
cucucaugaauguaucgaa

SEQ ID NO: 1137846 - RNA, 19 nt, Artificial Sequence
  Description of Artificial Sequence: Synthetic oligonucleotide
uaucgaagcaugucacguu

SEQ ID NO: 1137847 - RNA, 19 nt, Artificial Sequence
  Description of Artificial Sequence: Synthetic oligonucleotide
uaaccgcuuuaauguacug

SEQ ID NO: 1137848 - RNA, 19 nt, Artificial Sequence
  Description of Artificial Sequence: Synthetic oligonucleotide
gaaccgggccuggagagcc

SEQ ID NO: 1137849 - RNA, 19 nt, Artificial Sequence
  Description of Artificial Sequence: Synthetic oligonucleotide
uauuacuuuccugggcauc

SEQ ID NO: 1137850 - RNA, 19 nt, Artificial Sequence
  Description of Artificial Sequence: Synthetic oligonucleotide
gagggcuagcaacugaaua

SEQ ID NO: 1137851 - RNA, 19 nt, Artificial Sequence
  Description of Artificial Sequence: Synthetic oligonucleotide
ugccacggggugaaguacu

SEQ ID NO: 1137852 - RNA, 19 nt, Artificial Sequence
  Description of Artificial Sequence: Synthetic oligonucleotide
ugccaucguagcgaguuug

SEQ ID NO: 1137853 - RNA, 19 nt, Artificial Sequence
  Description of Artificial Sequence: Synthetic oligonucleotide
ugcuacugagugacccgcc

SEQ ID NO: 1137854 - RNA, 19 nt, Artificial Sequence
  Description of Artificial Sequence: Synthetic oligonucleotide
ucaaaaccgccuugccccu

SEQ ID NO: 1137855 - RNA, 19 nt, Artificial Sequence
  Description of Artificial Sequence: Synthetic oligonucleotide
gauuguccccgagucacac

SEQ ID NO: 1137856 - RNA, 19 nt, Artificial Sequence
  Description of Artificial Sequence: Synthetic oligonucleotide
ugauuguccccgagucaca

SEQ ID NO: 1137857 - RNA, 19 nt, Artificial Sequence
  Description of Artificial Sequence: Synthetic oligonucleotide
uucacgggaggguccugag

SEQ ID NO: 1137858 - RNA, 19 nt, Artificial Sequence
  Description of Artificial Sequence: Synthetic oligonucleotide
ucuaaccgccucuguaaau

SEQ ID NO: 1137859 - RNA, 19 nt, Artificial Sequence
  Description of Artificial Sequence: Synthetic oligonucleotide
cccauuauccugcaggauc

SEQ ID NO: 1137860 - RNA, 19 nt, Artificial Sequence
  Description of Artificial Sequence: Synthetic oligonucleotide
agauuggcaaacgggcugu

SEQ ID NO: 1137861 - RNA, 19 nt, Artificial Sequence
  Description of Artificial Sequence: Synthetic oligonucleotide
ugggguguagccaccccaa

SEQ ID NO: 1137862 - RNA, 19 nt, Artificial Sequence
  Description of Artificial Sequence: Synthetic oligonucleotide
gcaaaucaaaaccgccuug

SEQ ID NO: 1137863 - RNA, 19 nt, Artificial Sequence
  Description of Artificial Sequence: Synthetic oligonucleotide
gguucaaggguaucagaca

SEQ ID NO: 1137864 - RNA, 19 nt, Artificial Sequence
  Description of Artificial Sequence: Synthetic oligonucleotide
cauuaucaauggcuccuuc

SEQ ID NO: 1137865 - RNA, 19 nt, Artificial Sequence
  Description of Artificial Sequence: Synthetic oligonucleotide
cuccuaggaacuugcucac

SEQ ID NO: 1137866 - RNA, 19 nt, Artificial Sequence
  Description of Artificial Sequence: Synthetic oligonucleotide
caucuuccgggcaguuucc

SEQ ID NO: 1137867 - RNA, 19 nt, Artificial Sequence
  Description of Artificial Sequence: Synthetic oligonucleotide
agaaucacacauagcugcu

SEQ ID NO: 1137868 - RNA, 19 nt, Artificial Sequence
  Description of Artificial Sequence: Synthetic oligonucleotide
cugagugacccgccugugc

SEQ ID NO: 1137869 - RNA, 19 nt, Artificial Sequence
  Description of Artificial Sequence: Synthetic oligonucleotide
gauucacaccgcuccuuuc

SEQ ID NO: 1137870 - RNA, 19 nt, Artificial Sequence
  Description of Artificial Sequence: Synthetic oligonucleotide
agcgaguuugcuagcagca

SEQ ID NO: 1137871 - RNA, 19 nt, Artificial Sequence
  Description of Artificial Sequence: Synthetic oligonucleotide
uuccgccuuuaccauuucu

SEQ ID NO: 1137872 - RNA, 19 nt, Artificial Sequence
  Description of Artificial Sequence: Synthetic oligonucleotide
uguacugcccacggaguuc

SEQ ID NO: 1137873 - RNA, 19 nt, Artificial Sequence
  Description of Artificial Sequence: Synthetic oligonucleotide
ccuaggaacuugcucacac

SEQ ID NO: 1137874 - RNA, 19 nt, Artificial Sequence
  Description of Artificial Sequence: Synthetic oligonucleotide
gugccacucagcuuucuga

SEQ ID NO: 1137875 - RNA, 19 nt, Artificial Sequence
  Description of Artificial Sequence: Synthetic oligonucleotide
ggaagugguucagagccag

SEQ ID NO: 1137876 - RNA, 19 nt, Artificial Sequence
  Description of Artificial Sequence: Synthetic oligonucleotide
ccugccuacugcauggcag

SEQ ID NO: 1137877 - RNA, 19 nt, Artificial Sequence
  Description of Artificial Sequence: Synthetic oligonucleotide
gugugaauaguaugauucu

SEQ ID NO: 1137878 - RNA, 19 nt, Artificial Sequence
  Description of Artificial Sequence: Synthetic oligonucleotide
cuuuccuuacucucaugaa

SEQ ID NO: 1137879 - RNA, 19 nt, Artificial Sequence
  Description of Artificial Sequence: Synthetic oligonucleotide
cuaggaacuugcucacaca

SEQ ID NO: 1137880 - RNA, 19 nt, Artificial Sequence
  Description of Artificial Sequence: Synthetic oligonucleotide
gaauccucuaaccgccucu

SEQ ID NO: 1137881 - RNA, 19 nt, Artificial Sequence
  Description of Artificial Sequence: Synthetic oligonucleotide
guagagggcuagcaacuga

SEQ ID NO: 1137882 - RNA, 19 nt, Artificial Sequence
  Description of Artificial Sequence: Synthetic oligonucleotide
gaccucucagcuagaaaca

SEQ ID NO: 1137883 - RNA, 19 nt, Artificial Sequence
  Description of Artificial Sequence: Synthetic oligonucleotide
aggcgaagccgaggaagcc

SEQ ID NO: 1137884 - RNA, 19 nt, Artificial Sequence
  Description of Artificial Sequence: Synthetic oligonucleotide
ugugaccucucagcuagaa

SEQ ID NO: 1137885 - RNA, 19 nt, Artificial Sequence
  Description of Artificial Sequence: Synthetic oligonucleotide
cagaccucauaauugauuu

SEQ ID NO: 1137886 - RNA, 19 nt, Artificial Sequence
  Description of Artificial Sequence: Synthetic oligonucleotide
uggcaaacgggcugucaaa

SEQ ID NO: 1137887 - RNA, 19 nt, Artificial Sequence
  Description of Artificial Sequence: Synthetic oligonucleotide
gcaagugagauaguacuuc

SEQ ID NO: 1137888 - RNA, 19 nt, Artificial Sequence
  Description of Artificial Sequence: Synthetic oligonucleotide
acacauacuuuugggguau

SEQ ID NO: 1137889 - RNA, 19 nt, Artificial Sequence
  Description of Artificial Sequence: Synthetic oligonucleotide
cauccucccuggcugggag

SEQ ID NO: 1137890 - RNA, 19 nt, Artificial Sequence
  Description of Artificial Sequence: Synthetic oligonucleotide
cugaguguccacacccuga

SEQ ID NO: 1137891 - RNA, 19 nt, Artificial Sequence
  Description of Artificial Sequence: Synthetic oligonucleotide
agcagcuaacuuucucgaa

SEQ ID NO: 1137892 - RNA, 19 nt, Artificial Sequence
  Description of Artificial Sequence: Synthetic oligonucleotide
uucccgcaacacuuccgcc

SEQ ID NO: 1137893 - RNA, 19 nt, Artificial Sequence
  Description of Artificial Sequence: Synthetic oligonucleotide
guaucgaagcaugucacgu

SEQ ID NO: 1137894 - RNA, 19 nt, Artificial Sequence
  Description of Artificial Sequence: Synthetic oligonucleotide
ggcaaacgggcugucaaag

SEQ ID NO: 1137895 - RNA, 19 nt, Artificial Sequence
  Description of Artificial Sequence: Synthetic oligonucleotide
uugagccuuggcacuucac

SEQ ID NO: 1137896 - RNA, 19 nt, Artificial Sequence
  Description of Artificial Sequence: Synthetic oligonucleotide
agaccucauaauugauuuu

SEQ ID NO: 1137897 - RNA, 19 nt, Artificial Sequence
  Description of Artificial Sequence: Synthetic oligonucleotide
agcacgacugccacggggu

SEQ ID NO: 1137898 - RNA, 19 nt, Artificial Sequence
  Description of Artificial Sequence: Synthetic oligonucleotide
caagccauauuacuuuccu

SEQ ID NO: 1137899 - RNA, 19 nt, Artificial Sequence
  Description of Artificial Sequence: Synthetic oligonucleotide
aaccgccuugccccugugu

SEQ ID NO: 1137900 - RNA, 19 nt, Artificial Sequence
  Description of Artificial Sequence: Synthetic oligonucleotide
ccgccuuuaccauuucugc

SEQ ID NO: 1137901 - RNA, 19 nt, Artificial Sequence
  Description of Artificial Sequence: Synthetic oligonucleotide
caacuccaaacuucaagua

SEQ ID NO: 1137902 - RNA, 19 nt, Artificial Sequence
  Description of Artificial Sequence: Synthetic oligonucleotide
cuacugcauggcagcaaug

SEQ ID NO: 1137903 - RNA, 19 nt, Artificial Sequence
  Description of Artificial Sequence: Synthetic oligonucleotide
guacugucaggaaccgggc

SEQ ID NO: 1137904 - RNA, 19 nt, Artificial Sequence
  Description of Artificial Sequence: Synthetic oligonucleotide
cgagucacacccauccucc

SEQ ID NO: 1137905 - RNA, 19 nt, Artificial Sequence
  Description of Artificial Sequence: Synthetic oligonucleotide
acacuuccgccuuuaccau

SEQ ID NO: 1137906 - RNA, 19 nt, Artificial Sequence
  Description of Artificial Sequence: Synthetic oligonucleotide
uggggcucucaguuucugu

SEQ ID NO: 1137907 - RNA, 19 nt, Artificial Sequence
  Description of Artificial Sequence: Synthetic oligonucleotide
gcaaacgggcugucaaagc

SEQ ID NO: 1137908 - RNA, 19 nt, Artificial Sequence
  Description of Artificial Sequence: Synthetic oligonucleotide
cagcacuuccgaggaaggg

SEQ ID NO: 1137909 - RNA, 19 nt, Artificial Sequence
  Description of Artificial Sequence: Synthetic oligonucleotide
ucguagcgaguuugcuagc

SEQ ID NO: 1137910 - RNA, 19 nt, Artificial Sequence
  Description of Artificial Sequence: Synthetic oligonucleotide
gaagugguucagagccagc

SEQ ID NO: 1137911 - RNA, 19 nt, Artificial Sequence
  Description of Artificial Sequence: Synthetic oligonucleotide
cuuugugaccucucagcua

SEQ ID NO: 1137912 - RNA, 19 nt, Artificial Sequence
  Description of Artificial Sequence: Synthetic oligonucleotide
cugauaguuugaaggcgaa

SEQ ID NO: 1137913 - RNA, 19 nt, Artificial Sequence
  Description of Artificial Sequence: Synthetic oligonucleotide
uccuucacgggaggguccu

SEQ ID NO: 1137914 - RNA, 19 nt, Artificial Sequence
  Description of Artificial Sequence: Synthetic oligonucleotide
ugcccacggaguucuucca

SEQ ID NO: 1137915 - RNA, 19 nt, Artificial Sequence
  Description of Artificial Sequence: Synthetic oligonucleotide
uuucaacguccaucagcau

SEQ ID NO: 1137916 - RNA, 19 nt, Artificial Sequence
  Description of Artificial Sequence: Synthetic oligonucleotide
aaaccgccuugccccugug

SEQ ID NO: 1137917 - RNA, 19 nt, Artificial Sequence
  Description of Artificial Sequence: Synthetic oligonucleotide
cuugccccuguguggaaca

SEQ ID NO: 1137918 - RNA, 19 nt, Artificial Sequence
  Description of Artificial Sequence: Synthetic oligonucleotide
uuucugagaucuggcuuua

SEQ ID NO: 1137919 - RNA, 19 nt, Artificial Sequence
  Description of Artificial Sequence: Synthetic oligonucleotide
cucgaaggcuucuggcaca

SEQ ID NO: 1137920 - RNA, 19 nt, Artificial Sequence
  Description of Artificial Sequence: Synthetic oligonucleotide
acuuccgccuuuaccauuu

SEQ ID NO: 1137921 - RNA, 19 nt, Artificial Sequence
  Description of Artificial Sequence: Synthetic oligonucleotide
acuucacuggggccucuaa

SEQ ID NO: 1137922 - RNA, 19 nt, Artificial Sequence
  Description of Artificial Sequence: Synthetic oligonucleotide
cucacuuugcagucugacu

SEQ ID NO: 1137923 - RNA, 19 nt, Artificial Sequence
  Description of Artificial Sequence: Synthetic oligonucleotide
agacaaggggcugcugaga

SEQ ID NO: 1137924 - RNA, 19 nt, Artificial Sequence
  Description of Artificial Sequence: Synthetic oligonucleotide
acggggugaaguacuguca

SEQ ID NO: 1137925 - RNA, 19 nt, Artificial Sequence
  Description of Artificial Sequence: Synthetic oligonucleotide
gcaguuuccugccguuccc

SEQ ID NO: 1137926 - RNA, 19 nt, Artificial Sequence
  Description of Artificial Sequence: Synthetic oligonucleotide
auccucuaaccgccucugu

SEQ ID NO: 1137927 - RNA, 19 nt, Artificial Sequence
  Description of Artificial Sequence: Synthetic oligonucleotide
cucuaaccgccucuguaaa

SEQ ID NO: 1137928 - RNA, 19 nt, Artificial Sequence
  Description of Artificial Sequence: Synthetic oligonucleotide
ggguguagccaccccaaca

SEQ ID NO: 1137929 - RNA, 19 nt, Artificial Sequence
  Description of Artificial Sequence: Synthetic oligonucleotide
ugccuacugcauggcagca

SEQ ID NO: 1137930 - RNA, 19 nt, Artificial Sequence
  Description of Artificial Sequence: Synthetic oligonucleotide
acguccuuugugaccucuc

SEQ ID NO: 1137931 - RNA, 19 nt, Artificial Sequence
  Description of Artificial Sequence: Synthetic oligonucleotide
acgacugccacggggugaa

SEQ ID NO: 1137932 - RNA, 19 nt, Artificial Sequence
  Description of Artificial Sequence: Synthetic oligonucleotide
agccaccccaacaagccau

SEQ ID NO: 1137933 - RNA, 19 nt, Artificial Sequence
  Description of Artificial Sequence: Synthetic oligonucleotide
cacgggcuuuaucucucug

SEQ ID NO: 1137934 - RNA, 19 nt, Artificial Sequence
  Description of Artificial Sequence: Synthetic oligonucleotide
ccgcuuuaauguacugccc

SEQ ID NO: 1137935 - RNA, 19 nt, Artificial Sequence
  Description of Artificial Sequence: Synthetic oligonucleotide
cacccugacucuucucaga

SEQ ID NO: 1137936 - RNA, 19 nt, Artificial Sequence
  Description of Artificial Sequence: Synthetic oligonucleotide
cugagaugauuguccccga

SEQ ID NO: 1137937 - RNA, 19 nt, Artificial Sequence
  Description of Artificial Sequence: Synthetic oligonucleotide
cuugugugaauaguaugau

SEQ ID NO: 1137938 - RNA, 19 nt, Artificial Sequence
  Description of Artificial Sequence: Synthetic oligonucleotide
ccgagucacacccauccuc

SEQ ID NO: 1137939 - RNA, 19 nt, Artificial Sequence
  Description of Artificial Sequence: Synthetic oligonucleotide
cugcaauuguucccagcaa

SEQ ID NO: 1137940 - RNA, 19 nt, Artificial Sequence
  Description of Artificial Sequence: Synthetic oligonucleotide
gagaugcaucuaggugaag

SEQ ID NO: 1137941 - RNA, 19 nt, Artificial Sequence
  Description of Artificial Sequence: Synthetic oligonucleotide
ugacccgccugugcacacc

SEQ ID NO: 1137942 - RNA, 19 nt, Artificial Sequence
  Description of Artificial Sequence: Synthetic oligonucleotide
cuuugagccuuggcacuuc

SEQ ID NO: 1137943 - RNA, 19 nt, Artificial Sequence
  Description of Artificial Sequence: Synthetic oligonucleotide
gcuaacuuucucgaaggcu

SEQ ID NO: 1137944 - RNA, 19 nt, Artificial Sequence
  Description of Artificial Sequence: Synthetic oligonucleotide
cugccacggggugaaguac

SEQ ID NO: 1137945 - RNA, 19 nt, Artificial Sequence
  Description of Artificial Sequence: Synthetic oligonucleotide
aggaacuugcucacacaua

SEQ ID NO: 1137946 - RNA, 19 nt, Artificial Sequence
  Description of Artificial Sequence: Synthetic oligonucleotide
gauuggcaaacgggcuguc

SEQ ID NO: 1137947 - RNA, 19 nt, Artificial Sequence
  Description of Artificial Sequence: Synthetic oligonucleotide
cuucacgggaggguccuga

SEQ ID NO: 1137948 - RNA, 19 nt, Artificial Sequence
  Description of Artificial Sequence: Synthetic oligonucleotide
cggggugaaguacugucag

SEQ ID NO: 1137949 - RNA, 19 nt, Artificial Sequence
  Description of Artificial Sequence: Synthetic oligonucleotide
gaagcaugucacguuuaau

SEQ ID NO: 1137950 - RNA, 19 nt, Artificial Sequence
  Description of Artificial Sequence: Synthetic oligonucleotide
cgcuuuaauguacugccca

SEQ ID NO: 1137951 - RNA, 19 nt, Artificial Sequence
  Description of Artificial Sequence: Synthetic oligonucleotide
caucuaggugaagauuucu

SEQ ID NO: 1137952 - RNA, 19 nt, Artificial Sequence
  Description of Artificial Sequence: Synthetic oligonucleotide
gggcuagcaacugaauaaa

SEQ ID NO: 1137953 - RNA, 19 nt, Artificial Sequence
  Description of Artificial Sequence: Synthetic oligonucleotide
gcuuucugagaucuggcuu

SEQ ID NO: 1137954 - RNA, 19 nt, Artificial Sequence
  Description of Artificial Sequence: Synthetic oligonucleotide
cguucccgcaacacuuccg

SEQ ID NO: 1137955 - RNA, 19 nt, Artificial Sequence
  Description of Artificial Sequence: Synthetic oligonucleotide
gugacccgccugugcacac

SEQ ID NO: 1137956 - RNA, 19 nt, Artificial Sequence
  Description of Artificial Sequence: Synthetic oligonucleotide
caccgcuccuuucugauuu

SEQ ID NO: 1137957 - RNA, 19 nt, Artificial Sequence
  Description of Artificial Sequence: Synthetic oligonucleotide
gcaugucacguuuaauuuu

SEQ ID NO: 1137958 - RNA, 19 nt, Artificial Sequence
  Description of Artificial Sequence: Synthetic oligonucleotide
ggcgaagccgaggaagcca

SEQ ID NO: 1137959 - RNA, 19 nt, Artificial Sequence
  Description of Artificial Sequence: Synthetic oligonucleotide
caaaaccgccuugccccug

SEQ ID NO: 1137960 - RNA, 19 nt, Artificial Sequence
  Description of Artificial Sequence: Synthetic oligonucleotide
gcacaugaucaguuuagau

SEQ ID NO: 1137961 - RNA, 19 nt, Artificial Sequence
  Description of Artificial Sequence: Synthetic oligonucleotide
cuuccgccuuuaccauuuc

SEQ ID NO: 1137962 - RNA, 19 nt, Artificial Sequence
  Description of Artificial Sequence: Synthetic oligonucleotide
gcgaagccgaggaagccac

SEQ ID NO: 1137963 - RNA, 19 nt, Artificial Sequence
  Description of Artificial Sequence: Synthetic oligonucleotide
ccgccucuguaaaugcgac

SEQ ID NO: 1137964 - RNA, 19 nt, Artificial Sequence
  Description of Artificial Sequence: Synthetic oligonucleotide
ccuuugugaccucucagcu

SEQ ID NO: 1137965 - RNA, 19 nt, Artificial Sequence
  Description of Artificial Sequence: Synthetic oligonucleotide
ccguucccgcaacacuucc

SEQ ID NO: 1137966 - RNA, 19 nt, Artificial Sequence
  Description of Artificial Sequence: Synthetic oligonucleotide
gacuuggggcucucaguuu

SEQ ID NO: 1137967 - RNA, 19 nt, Artificial Sequence
  Description of Artificial Sequence: Synthetic oligonucleotide
gcuacugagugacccgccu

SEQ ID NO: 1137968 - RNA, 19 nt, Artificial Sequence
  Description of Artificial Sequence: Synthetic oligonucleotide
cacgacugccacgggguga

SEQ ID NO: 1137969 - RNA, 19 nt, Artificial Sequence
  Description of Artificial Sequence: Synthetic oligonucleotide
gggguguagccaccccaac

SEQ ID NO: 1137970 - RNA, 19 nt, Artificial Sequence
  Description of Artificial Sequence: Synthetic oligonucleotide
caaggguaucagacacaua

SEQ ID NO: 1137971 - RNA, 19 nt, Artificial Sequence
  Description of Artificial Sequence: Synthetic oligonucleotide
gcacgacugccacggggug

SEQ ID NO: 1137972 - RNA, 19 nt, Artificial Sequence
  Description of Artificial Sequence: Synthetic oligonucleotide
gcacaucauuccaggcccc

SEQ ID NO: 1137973 - RNA, 19 nt, Artificial Sequence
  Description of Artificial Sequence: Synthetic oligonucleotide
cugccguucccgcaacacu

SEQ ID NO: 1137974 - RNA, 19 nt, Artificial Sequence
  Description of Artificial Sequence: Synthetic oligonucleotide
cgccuuuaccauuucugca

SEQ ID NO: 1137975 - RNA, 19 nt, Artificial Sequence
  Description of Artificial Sequence: Synthetic oligonucleotide
cucuaaggcuuguguguau

SEQ ID NO: 1137976 - RNA, 19 nt, Artificial Sequence
  Description of Artificial Sequence: Synthetic oligonucleotide
caacguccaucagcaucuc

SEQ ID NO: 1137977 - RNA, 19 nt, Artificial Sequence
  Description of Artificial Sequence: Synthetic oligonucleotide
gccacggggugaaguacug

SEQ ID NO: 1137978 - RNA, 19 nt, Artificial Sequence
  Description of Artificial Sequence: Synthetic oligonucleotide
ggggccucuaaggcuugug

SEQ ID NO: 1137979 - RNA, 19 nt, Artificial Sequence
  Description of Artificial Sequence: Synthetic oligonucleotide
gccacgggcuuuaucucuc

SEQ ID NO: 1137980 - RNA, 19 nt, Artificial Sequence
  Description of Artificial Sequence: Synthetic oligonucleotide
ccuacugcauggcagcaau

SEQ ID NO: 1137981 - RNA, 19 nt, Artificial Sequence
  Description of Artificial Sequence: Synthetic oligonucleotide
cacugggugggucuuucuu

SEQ ID NO: 1137982 - RNA, 19 nt, Artificial Sequence
  Description of Artificial Sequence: Synthetic oligonucleotide
cgaagcaugucacguuuaa

SEQ ID NO: 1137983 - RNA, 19 nt, Artificial Sequence
  Description of Artificial Sequence: Synthetic oligonucleotide
gccugugcacaccucacuu

SEQ ID NO: 1137984 - RNA, 19 nt, Artificial Sequence
  Description of Artificial Sequence: Synthetic oligonucleotide
ccuuacucucaugaaugua

SEQ ID NO: 1137985 - RNA, 19 nt, Artificial Sequence
  Description of Artificial Sequence: Synthetic oligonucleotide
ggauccugagaugcaucua

SEQ ID NO: 1137986 - RNA, 19 nt, Artificial Sequence
  Description of Artificial Sequence: Synthetic oligonucleotide
gcugaauaaggaagugguu

SEQ ID NO: 1137987 - RNA, 19 nt, Artificial Sequence
  Description of Artificial Sequence: Synthetic oligonucleotide
ccucuaaggcuugugugua

SEQ ID NO: 1137988 - RNA, 19 nt, Artificial Sequence
  Description of Artificial Sequence: Synthetic oligonucleotide
cugauucacaccgcuccuu

SEQ ID NO: 1137989 - RNA, 19 nt, Artificial Sequence
  Description of Artificial Sequence: Synthetic oligonucleotide
gagagccgccagggacccc

SEQ ID NO: 1137990 - RNA, 19 nt, Artificial Sequence
  Description of Artificial Sequence: Synthetic oligonucleotide
caccccaacaagccauauu

SEQ ID NO: 1137991 - RNA, 19 nt, Artificial Sequence
  Description of Artificial Sequence: Synthetic oligonucleotide
gccguucccgcaacacuuc

SEQ ID NO: 1137992 - RNA, 19 nt, Artificial Sequence
  Description of Artificial Sequence: Synthetic oligonucleotide
ggcuagcaacugaauaaau

SEQ ID NO: 1137993 - RNA, 19 nt, Artificial Sequence
  Description of Artificial Sequence: Synthetic oligonucleotide
cacuuccgccuuuaccauu

SEQ ID NO: 1137994 - RNA, 19 nt, Artificial Sequence
  Description of Artificial Sequence: Synthetic oligonucleotide
ggccugccuacugcauggc

SEQ ID NO: 1137995 - RNA, 19 nt, Artificial Sequence
  Description of Artificial Sequence: Synthetic oligonucleotide
cacauacuuuugggguaua

SEQ ID NO: 1137996 - RNA, 19 nt, Artificial Sequence
  Description of Artificial Sequence: Synthetic oligonucleotide
cugcagcucuuuccuuacu

SEQ ID NO: 1137997 - RNA, 19 nt, Artificial Sequence
  Description of Artificial Sequence: Synthetic oligonucleotide
caacuccccucuccacacu

SEQ ID NO: 1137998 - RNA, 19 nt, Artificial Sequence
  Description of Artificial Sequence: Synthetic oligonucleotide
gccuacugcauggcagcaa

SEQ ID NO: 1137999 - RNA, 19 nt, Artificial Sequence
  Description of Artificial Sequence: Synthetic oligonucleotide
ggguuucucugggcagauc

SEQ ID NO: 1138000 - RNA, 19 nt, Artificial Sequence
  Description of Artificial Sequence: Synthetic oligonucleotide
cacuucacuggggccucua

SEQ ID NO: 1138001 - RNA, 19 nt, Artificial Sequence
  Description of Artificial Sequence: Synthetic oligonucleotide
cgggcugucaaagccacua

SEQ ID NO: 1138002 - RNA, 19 nt, Artificial Sequence
  Description of Artificial Sequence: Synthetic oligonucleotide
cgccucuguaaaugcgaca

SEQ ID NO: 1138003 - RNA, 19 nt, Artificial Sequence
  Description of Artificial Sequence: Synthetic oligonucleotide
ccucccuggcugggagugc

SEQ ID NO: 1138004 - RNA, 19 nt, Artificial Sequence
  Description of Artificial Sequence: Synthetic oligonucleotide
cugccaucguagcgaguuu

SEQ ID NO: 1138005 - RNA, 19 nt, Artificial Sequence
  Description of Artificial Sequence: Synthetic oligonucleotide
ggccugcaacuccccucuc

SEQ ID NO: 1138006 - RNA, 19 nt, Artificial Sequence
  Description of Artificial Sequence: Synthetic oligonucleotide
ccccuguguggaacaaacu

SEQ ID NO: 1138007 - RNA, 19 nt, Artificial Sequence
  Description of Artificial Sequence: Synthetic oligonucleotide
gccaccccaacaagccaua

SEQ ID NO: 1138008 - RNA, 19 nt, Artificial Sequence
  Description of Artificial Sequence: Synthetic oligonucleotide
ccuucacgggaggguccug

SEQ ID NO: 1138009 - RNA, 19 nt, Artificial Sequence
  Description of Artificial Sequence: Synthetic oligonucleotide
cccgcaacacuuccgccuu

SEQ ID NO: 1138010 - RNA, 19 nt, Artificial Sequence
  Description of Artificial Sequence: Synthetic oligonucleotide
ccacgggcuuuaucucucu

SEQ ID NO: 1138011 - RNA, 19 nt, Artificial Sequence
  Description of Artificial Sequence: Synthetic oligonucleotide
cccgagucacacccauccu

SEQ ID NO: 1138012 - RNA, 19 nt, Artificial Sequence
  Description of Artificial Sequence: Synthetic oligonucleotide
gcccugugccacucagcuu

SEQ ID NO: 1138013 - RNA, 19 nt, Artificial Sequence
  Description of Artificial Sequence: Synthetic oligonucleotide
ccacggggugaaguacugu

SEQ ID NO: 1138014 - RNA, 19 nt, Artificial Sequence
  Description of Artificial Sequence: Synthetic oligonucleotide
ccgcaacacuuccgccuuu

SEQ ID NO: 1138015 - RNA, 19 nt, Artificial Sequence
  Description of Artificial Sequence: Synthetic oligonucleotide
aaagcugcgaaccacauua

SEQ ID NO: 1138016 - RNA, 19 nt, Artificial Sequence
  Description of Artificial Sequence: Synthetic oligonucleotide
aagaaugcacauccggcgc

SEQ ID NO: 1138017 - RNA, 19 nt, Artificial Sequence
  Description of Artificial Sequence: Synthetic oligonucleotide
aggacuugguacuuuaggc

SEQ ID NO: 1138018 - RNA, 19 nt, Artificial Sequence
  Description of Artificial Sequence: Synthetic oligonucleotide
agagaaguugaccacucgc

SEQ ID NO: 1138019 - RNA, 19 nt, Artificial Sequence
  Description of Artificial Sequence: Synthetic oligonucleotide
ugguucuuuauuucuaggg

SEQ ID NO: 1138020 - RNA, 19 nt, Artificial Sequence
  Description of Artificial Sequence: Synthetic oligonucleotide
aacgguaguguucuccucg

SEQ ID NO: 1138021 - RNA, 19 nt, Artificial Sequence
  Description of Artificial Sequence: Synthetic oligonucleotide
aguaaaugaaagcgagggc

SEQ ID NO: 1138022 - RNA, 19 nt, Artificial Sequence
  Description of Artificial Sequence: Synthetic oligonucleotide
aucacggguacgcugagcc

SEQ ID NO: 1138023 - RNA, 19 nt, Artificial Sequence
  Description of Artificial Sequence: Synthetic oligonucleotide
guaaaugaaagcgagggcc

SEQ ID NO: 1138024 - RNA, 19 nt, Artificial Sequence
  Description of Artificial Sequence: Synthetic oligonucleotide
agagauaaggcacggccgc

SEQ ID NO: 1138025 - RNA, 19 nt, Artificial Sequence
  Description of Artificial Sequence: Synthetic oligonucleotide
aaccacauuagccagucca

SEQ ID NO: 1138026 - RNA, 19 nt, Artificial Sequence
  Description of Artificial Sequence: Synthetic oligonucleotide
ugaagaaugcacauccggc

SEQ ID NO: 1138027 - RNA, 19 nt, Artificial Sequence
  Description of Artificial Sequence: Synthetic oligonucleotide
aaagaauaccagaucugcc

SEQ ID NO: 1138028 - RNA, 19 nt, Artificial Sequence
  Description of Artificial Sequence: Synthetic oligonucleotide
aagauuguuggaguauagc

SEQ ID NO: 1138029 - RNA, 19 nt, Artificial Sequence
  Description of Artificial Sequence: Synthetic oligonucleotide
agauuguuggaguauagcu

SEQ ID NO: 1138030 - RNA, 19 nt, Artificial Sequence
  Description of Artificial Sequence: Synthetic oligonucleotide
ugcaucaucgaaacaagca

SEQ ID NO: 1138031 - RNA, 19 nt, Artificial Sequence
  Description of Artificial Sequence: Synthetic oligonucleotide
aauucgcuugcguauccac

SEQ ID NO: 1138032 - RNA, 19 nt, Artificial Sequence
  Description of Artificial Sequence: Synthetic oligonucleotide
auuagggcugguuguaccc

SEQ ID NO: 1138033 - RNA, 19 nt, Artificial Sequence
  Description of Artificial Sequence: Synthetic oligonucleotide
ugaagaucagccaacgaaa

SEQ ID NO: 1138034 - RNA, 19 nt, Artificial Sequence
  Description of Artificial Sequence: Synthetic oligonucleotide
uaagccaucggguugggca

SEQ ID NO: 1138035 - RNA, 19 nt, Artificial Sequence
  Description of Artificial Sequence: Synthetic oligonucleotide
uggugauacuuccaaaggc

SEQ ID NO: 1138036 - RNA, 19 nt, Artificial Sequence
  Description of Artificial Sequence: Synthetic oligonucleotide
gagcuuacccgccaggugg

SEQ ID NO: 1138037 - RNA, 19 nt, Artificial Sequence
  Description of Artificial Sequence: Synthetic oligonucleotide
uucaugaccugccuggagc

SEQ ID NO: 1138038 - RNA, 19 nt, Artificial Sequence
  Description of Artificial Sequence: Synthetic oligonucleotide
aaaaggaucugcagucccc

SEQ ID NO: 1138039 - RNA, 19 nt, Artificial Sequence
  Description of Artificial Sequence: Synthetic oligonucleotide
ucauaguggaaguccaugc

SEQ ID NO: 1138040 - RNA, 19 nt, Artificial Sequence
  Description of Artificial Sequence: Synthetic oligonucleotide
ucuaugaagugguugcuga

SEQ ID NO: 1138041 - RNA, 19 nt, Artificial Sequence
  Description of Artificial Sequence: Synthetic oligonucleotide
gguacuuuaggccucgagg

SEQ ID NO: 1138042 - RNA, 19 nt, Artificial Sequence
  Description of Artificial Sequence: Synthetic oligonucleotide
ugauugaaugccaccaaga

SEQ ID NO: 1138043 - RNA, 19 nt, Artificial Sequence
  Description of Artificial Sequence: Synthetic oligonucleotide
uugauaaucacggguacgc

SEQ ID NO: 1138044 - RNA, 19 nt, Artificial Sequence
  Description of Artificial Sequence: Synthetic oligonucleotide
aucgaaacaagcaaggcug

SEQ ID NO: 1138045 - RNA, 19 nt, Artificial Sequence
  Description of Artificial Sequence: Synthetic oligonucleotide
ugugucuagauggaguucc

SEQ ID NO: 1138046 - RNA, 19 nt, Artificial Sequence
  Description of Artificial Sequence: Synthetic oligonucleotide
gauaaucacggguacgcug

SEQ ID NO: 1138047 - RNA, 19 nt, Artificial Sequence
  Description of Artificial Sequence: Synthetic oligonucleotide
uggaguauagcuccaggca

SEQ ID NO: 1138048 - RNA, 19 nt, Artificial Sequence
  Description of Artificial Sequence: Synthetic oligonucleotide
uugcguauccaccacuugc

SEQ ID NO: 1138049 - RNA, 19 nt, Artificial Sequence
  Description of Artificial Sequence: Synthetic oligonucleotide
gauacuuccaaaggccccg

SEQ ID NO: 1138050 - RNA, 19 nt, Artificial Sequence
  Description of Artificial Sequence: Synthetic oligonucleotide
agaaugcacauccggcgcc

SEQ ID NO: 1138051 - RNA, 19 nt, Artificial Sequence
  Description of Artificial Sequence: Synthetic oligonucleotide
ggaaguaggggccaauucg

SEQ ID NO: 1138052 - RNA, 19 nt, Artificial Sequence
  Description of Artificial Sequence: Synthetic oligonucleotide
uuggaguauagcuccaggc

SEQ ID NO: 1138053 - RNA, 19 nt, Artificial Sequence
  Description of Artificial Sequence: Synthetic oligonucleotide
aagccaucggguugggcac

SEQ ID NO: 1138054 - RNA, 19 nt, Artificial Sequence
  Description of Artificial Sequence: Synthetic oligonucleotide
uaguguucuccucggaucc

SEQ ID NO: 1138055 - RNA, 19 nt, Artificial Sequence
  Description of Artificial Sequence: Synthetic oligonucleotide
ucuagggugugucuagaug

SEQ ID NO: 1138056 - RNA, 19 nt, Artificial Sequence
  Description of Artificial Sequence: Synthetic oligonucleotide
gaaggagguguucaugacc

SEQ ID NO: 1138057 - RNA, 19 nt, Artificial Sequence
  Description of Artificial Sequence: Synthetic oligonucleotide
cuggacauucuucagguac

SEQ ID NO: 1138058 - RNA, 19 nt, Artificial Sequence
  Description of Artificial Sequence: Synthetic oligonucleotide
ucgaaacaagcaaggcugg

SEQ ID NO: 1138059 - RNA, 19 nt, Artificial Sequence
  Description of Artificial Sequence: Synthetic oligonucleotide
auuaccuggaaaaggaucu

SEQ ID NO: 1138060 - RNA, 19 nt, Artificial Sequence
  Description of Artificial Sequence: Synthetic oligonucleotide
ugcguauccaccacuugcc

SEQ ID NO: 1138061 - RNA, 19 nt, Artificial Sequence
  Description of Artificial Sequence: Synthetic oligonucleotide
ucuccgagucaccagcuag

SEQ ID NO: 1138062 - RNA, 19 nt, Artificial Sequence
  Description of Artificial Sequence: Synthetic oligonucleotide
auuucuagggugugucuag

SEQ ID NO: 1138063 - RNA, 19 nt, Artificial Sequence
  Description of Artificial Sequence: Synthetic oligonucleotide
aaggagguguucaugaccu

SEQ ID NO: 1138064 - RNA, 19 nt, Artificial Sequence
  Description of Artificial Sequence: Synthetic oligonucleotide
gagagauaaggcacggccg

SEQ ID NO: 1138065 - RNA, 19 nt, Artificial Sequence
  Description of Artificial Sequence: Synthetic oligonucleotide
gacaacucgggaugugggg

SEQ ID NO: 1138066 - RNA, 19 nt, Artificial Sequence
  Description of Artificial Sequence: Synthetic oligonucleotide
gauuguuggaguauagcuc

SEQ ID NO: 1138067 - RNA, 19 nt, Artificial Sequence
  Description of Artificial Sequence: Synthetic oligonucleotide
uccggcaucggccauuccc

SEQ ID NO: 1138068 - RNA, 19 nt, Artificial Sequence
  Description of Artificial Sequence: Synthetic oligonucleotide
gauugaaugccaccaagaa

SEQ ID NO: 1138069 - RNA, 19 nt, Artificial Sequence
  Description of Artificial Sequence: Synthetic oligonucleotide
gaccugugcagguaguaag

SEQ ID NO: 1138070 - RNA, 19 nt, Artificial Sequence
  Description of Artificial Sequence: Synthetic oligonucleotide
gauuaggcccgcuccaagc

SEQ ID NO: 1138071 - RNA, 19 nt, Artificial Sequence
  Description of Artificial Sequence: Synthetic oligonucleotide
uucgcuugcguauccacca

SEQ ID NO: 1138072 - RNA, 19 nt, Artificial Sequence
  Description of Artificial Sequence: Synthetic oligonucleotide
ucguugugcucauaggucu

SEQ ID NO: 1138073 - RNA, 19 nt, Artificial Sequence
  Description of Artificial Sequence: Synthetic oligonucleotide
gaaacaagcaaggcugggc

SEQ ID NO: 1138074 - RNA, 19 nt, Artificial Sequence
  Description of Artificial Sequence: Synthetic oligonucleotide
acuuccaaaggccccguag

SEQ ID NO: 1138075 - RNA, 19 nt, Artificial Sequence
  Description of Artificial Sequence: Synthetic oligonucleotide
ugcuggacauucuucaggu

SEQ ID NO: 1138076 - RNA, 19 nt, Artificial Sequence
  Description of Artificial Sequence: Synthetic oligonucleotide
acaacguccagagagggca

SEQ ID NO: 1138077 - RNA, 19 nt, Artificial Sequence
  Description of Artificial Sequence: Synthetic oligonucleotide
cuggcugagucucauagug

SEQ ID NO: 1138078 - RNA, 19 nt, Artificial Sequence
  Description of Artificial Sequence: Synthetic oligonucleotide
guaucauguuggcacagcc

SEQ ID NO: 1138079 - RNA, 19 nt, Artificial Sequence
  Description of Artificial Sequence: Synthetic oligonucleotide
agcugcgaaccacauuagc

SEQ ID NO: 1138080 - RNA, 19 nt, Artificial Sequence
  Description of Artificial Sequence: Synthetic oligonucleotide
ugcgaaccacauuagccag

SEQ ID NO: 1138081 - RNA, 19 nt, Artificial Sequence
  Description of Artificial Sequence: Synthetic oligonucleotide
ugaguaucauguuggcaca

SEQ ID NO: 1138082 - RNA, 19 nt, Artificial Sequence
  Description of Artificial Sequence: Synthetic oligonucleotide
uuacccgccagguggauga

SEQ ID NO: 1138083 - RNA, 19 nt, Artificial Sequence
  Description of Artificial Sequence: Synthetic oligonucleotide
aguaucauguuggcacagc

SEQ ID NO: 1138084 - RNA, 19 nt, Artificial Sequence
  Description of Artificial Sequence: Synthetic oligonucleotide
guugauaaucacggguacg

SEQ ID NO: 1138085 - RNA, 19 nt, Artificial Sequence
  Description of Artificial Sequence: Synthetic oligonucleotide
guagccaugaguaucaugu

SEQ ID NO: 1138086 - RNA, 19 nt, Artificial Sequence
  Description of Artificial Sequence: Synthetic oligonucleotide
agcgauggaaccaccaggg

SEQ ID NO: 1138087 - RNA, 19 nt, Artificial Sequence
  Description of Artificial Sequence: Synthetic oligonucleotide
uggcugagucucauagugg

SEQ ID NO: 1138088 - RNA, 19 nt, Artificial Sequence
  Description of Artificial Sequence: Synthetic oligonucleotide
guagguugauaaucacggg

SEQ ID NO: 1138089 - RNA, 19 nt, Artificial Sequence
  Description of Artificial Sequence: Synthetic oligonucleotide
aagaaaggcacgagcagcu

SEQ ID NO: 1138090 - RNA, 19 nt, Artificial Sequence
  Description of Artificial Sequence: Synthetic oligonucleotide
gguauggagagauaaggca

SEQ ID NO: 1138091 - RNA, 19 nt, Artificial Sequence
  Description of Artificial Sequence: Synthetic oligonucleotide
ccgaggaacaggaagaaag

SEQ ID NO: 1138092 - RNA, 19 nt, Artificial Sequence
  Description of Artificial Sequence: Synthetic oligonucleotide
gauggugagccaguucagg

SEQ ID NO: 1138093 - RNA, 19 nt, Artificial Sequence
  Description of Artificial Sequence: Synthetic oligonucleotide
aauccucaaguuggagugg

SEQ ID NO: 1138094 - RNA, 19 nt, Artificial Sequence
  Description of Artificial Sequence: Synthetic oligonucleotide
auucccgagucuuaaagua

SEQ ID NO: 1138095 - RNA, 19 nt, Artificial Sequence
  Description of Artificial Sequence: Synthetic oligonucleotide
ggugauacuuccaaaggcc

SEQ ID NO: 1138096 - RNA, 19 nt, Artificial Sequence
  Description of Artificial Sequence: Synthetic oligonucleotide
cugaagaucagccaacgaa

SEQ ID NO: 1138097 - RNA, 19 nt, Artificial Sequence
  Description of Artificial Sequence: Synthetic oligonucleotide
ucugauugaaugccaccaa

SEQ ID NO: 1138098 - RNA, 19 nt, Artificial Sequence
  Description of Artificial Sequence: Synthetic oligonucleotide
aagauucccaggaauccug

SEQ ID NO: 1138099 - RNA, 19 nt, Artificial Sequence
  Description of Artificial Sequence: Synthetic oligonucleotide
ugagagaaacaggaauccc

SEQ ID NO: 1138100 - RNA, 19 nt, Artificial Sequence
  Description of Artificial Sequence: Synthetic oligonucleotide
cauuagggcugguuguacc

SEQ ID NO: 1138101 - RNA, 19 nt, Artificial Sequence
  Description of Artificial Sequence: Synthetic oligonucleotide
ugauuaggcccgcuccaag

SEQ ID NO: 1138102 - RNA, 19 nt, Artificial Sequence
  Description of Artificial Sequence: Synthetic oligonucleotide
uggaugauccagucguugu

SEQ ID NO: 1138103 - RNA, 19 nt, Artificial Sequence
  Description of Artificial Sequence: Synthetic oligonucleotide
ugcgcagccggacuggaga

SEQ ID NO: 1138104 - RNA, 19 nt, Artificial Sequence
  Description of Artificial Sequence: Synthetic oligonucleotide
aaucacggguacgcugagc

SEQ ID NO: 1138105 - RNA, 19 nt, Artificial Sequence
  Description of Artificial Sequence: Synthetic oligonucleotide
ugguacuuuaggccucgag

SEQ ID NO: 1138106 - RNA, 19 nt, Artificial Sequence
  Description of Artificial Sequence: Synthetic oligonucleotide
uaccagaucugcccuacgu

SEQ ID NO: 1138107 - RNA, 19 nt, Artificial Sequence
  Description of Artificial Sequence: Synthetic oligonucleotide
ugcagguuagguccagcca

SEQ ID NO: 1138108 - RNA, 19 nt, Artificial Sequence
  Description of Artificial Sequence: Synthetic oligonucleotide
ucaguccgauccuugguga

SEQ ID NO: 1138109 - RNA, 19 nt, Artificial Sequence
  Description of Artificial Sequence: Synthetic oligonucleotide
gucaaccagaaagugcccg

SEQ ID NO: 1138110 - RNA, 19 nt, Artificial Sequence
  Description of Artificial Sequence: Synthetic oligonucleotide
gccaugaguaucauguugg

SEQ ID NO: 1138111 - RNA, 19 nt, Artificial Sequence
  Description of Artificial Sequence: Synthetic oligonucleotide
uggaaguacugcuggacau

SEQ ID NO: 1138112 - RNA, 19 nt, Artificial Sequence
  Description of Artificial Sequence: Synthetic oligonucleotide
ucgagguccugagagaaac

SEQ ID NO: 1138113 - RNA, 19 nt, Artificial Sequence
  Description of Artificial Sequence: Synthetic oligonucleotide
auuaggcccgcuccaagca

SEQ ID NO: 1138114 - RNA, 19 nt, Artificial Sequence
  Description of Artificial Sequence: Synthetic oligonucleotide
ugucuagauggaguuccgg

SEQ ID NO: 1138115 - RNA, 19 nt, Artificial Sequence
  Description of Artificial Sequence: Synthetic oligonucleotide
aucugcccuacguugacca

SEQ ID NO: 1138116 - RNA, 19 nt, Artificial Sequence
  Description of Artificial Sequence: Synthetic oligonucleotide
ucaugaccugccuggagcu

SEQ ID NO: 1138117 - RNA, 19 nt, Artificial Sequence
  Description of Artificial Sequence: Synthetic oligonucleotide
gacuugguacuuuaggccu

SEQ ID NO: 1138118 - RNA, 19 nt, Artificial Sequence
  Description of Artificial Sequence: Synthetic oligonucleotide
ugaaccgguaacgguagug

SEQ ID NO: 1138119 - RNA, 19 nt, Artificial Sequence
  Description of Artificial Sequence: Synthetic oligonucleotide
gacaauccugaguggguug

SEQ ID NO: 1138120 - RNA, 19 nt, Artificial Sequence
  Description of Artificial Sequence: Synthetic oligonucleotide
caacgaaagccccacagga

SEQ ID NO: 1138121 - RNA, 19 nt, Artificial Sequence
  Description of Artificial Sequence: Synthetic oligonucleotide
aggacaacucgggaugugg

SEQ ID NO: 1138122 - RNA, 19 nt, Artificial Sequence
  Description of Artificial Sequence: Synthetic oligonucleotide
cacggaucuugauuaggcc

SEQ ID NO: 1138123 - RNA, 19 nt, Artificial Sequence
  Description of Artificial Sequence: Synthetic oligonucleotide
uauuucuagggugugucua

SEQ ID NO: 1138124 - RNA, 19 nt, Artificial Sequence
  Description of Artificial Sequence: Synthetic oligonucleotide
ccgugaagaaugcacaucc

SEQ ID NO: 1138125 - RNA, 19 nt, Artificial Sequence
  Description of Artificial Sequence: Synthetic oligonucleotide
cuccgagucaccagcuagg

SEQ ID NO: 1138126 - RNA, 19 nt, Artificial Sequence
  Description of Artificial Sequence: Synthetic oligonucleotide
cugcgaaccacauuagcca

SEQ ID NO: 1138127 - RNA, 19 nt, Artificial Sequence
  Description of Artificial Sequence: Synthetic oligonucleotide
guacuuuaggccucgaggu

SEQ ID NO: 1138128 - RNA, 19 nt, Artificial Sequence
  Description of Artificial Sequence: Synthetic oligonucleotide
ggugagccaguucaggaag

SEQ ID NO: 1138129 - RNA, 19 nt, Artificial Sequence
  Description of Artificial Sequence: Synthetic oligonucleotide
cagcuaggagcuuacccgc

SEQ ID NO: 1138130 - RNA, 19 nt, Artificial Sequence
  Description of Artificial Sequence: Synthetic oligonucleotide
agggaggcgggacaacguc

SEQ ID NO: 1138131 - RNA, 19 nt, Artificial Sequence
  Description of Artificial Sequence: Synthetic oligonucleotide
cuagggaggcgggacaacg

SEQ ID NO: 1138132 - RNA, 19 nt, Artificial Sequence
  Description of Artificial Sequence: Synthetic oligonucleotide
cccgcuccaagcaugaucc

SEQ ID NO: 1138133 - RNA, 19 nt, Artificial Sequence
  Description of Artificial Sequence: Synthetic oligonucleotide
uggcauuagggcugguugu

SEQ ID NO: 1138134 - RNA, 19 nt, Artificial Sequence
  Description of Artificial Sequence: Synthetic oligonucleotide
uacuuuaggccucgagguc

SEQ ID NO: 1138135 - RNA, 19 nt, Artificial Sequence
  Description of Artificial Sequence: Synthetic oligonucleotide
cagaggguagccaugagua

SEQ ID NO: 1138136 - RNA, 19 nt, Artificial Sequence
  Description of Artificial Sequence: Synthetic oligonucleotide
guaucuuggcuugggcugg

SEQ ID NO: 1138137 - RNA, 19 nt, Artificial Sequence
  Description of Artificial Sequence: Synthetic oligonucleotide
gaucccgcgggaucgcgag

SEQ ID NO: 1138138 - RNA, 19 nt, Artificial Sequence
  Description of Artificial Sequence: Synthetic oligonucleotide
agaaagugcccgugcgcag

SEQ ID NO: 1138139 - RNA, 19 nt, Artificial Sequence
  Description of Artificial Sequence: Synthetic oligonucleotide
guaucuucaggacuuggua

SEQ ID NO: 1138140 - RNA, 19 nt, Artificial Sequence
  Description of Artificial Sequence: Synthetic oligonucleotide
agguacagucugcagggca

SEQ ID NO: 1138141 - RNA, 19 nt, Artificial Sequence
  Description of Artificial Sequence: Synthetic oligonucleotide
cuugguacuuuaggccucg

SEQ ID NO: 1138142 - RNA, 19 nt, Artificial Sequence
  Description of Artificial Sequence: Synthetic oligonucleotide
cagucguugugcucauagg

SEQ ID NO: 1138143 - RNA, 19 nt, Artificial Sequence
  Description of Artificial Sequence: Synthetic oligonucleotide
gaaagugcccgugcgcagc

SEQ ID NO: 1138144 - RNA, 19 nt, Artificial Sequence
  Description of Artificial Sequence: Synthetic oligonucleotide
gguuguacccugcaggauc

SEQ ID NO: 1138145 - RNA, 19 nt, Artificial Sequence
  Description of Artificial Sequence: Synthetic oligonucleotide
gcugcgaaccacauuagcc

SEQ ID NO: 1138146 - RNA, 19 nt, Artificial Sequence
  Description of Artificial Sequence: Synthetic oligonucleotide
accgguaacgguaguguuc

SEQ ID NO: 1138147 - RNA, 19 nt, Artificial Sequence
  Description of Artificial Sequence: Synthetic oligonucleotide
gcgguagugguauggagag

SEQ ID NO: 1138148 - RNA, 19 nt, Artificial Sequence
  Description of Artificial Sequence: Synthetic oligonucleotide
agugcccgugcgcagccgg

SEQ ID NO: 1138149 - RNA, 19 nt, Artificial Sequence
  Description of Artificial Sequence: Synthetic oligonucleotide
cacgagcagcucuaugaag

SEQ ID NO: 1138150 - RNA, 19 nt, Artificial Sequence
  Description of Artificial Sequence: Synthetic oligonucleotide
ugauaaucacggguacgcu

SEQ ID NO: 1138151 - RNA, 19 nt, Artificial Sequence
  Description of Artificial Sequence: Synthetic oligonucleotide
gguaacgguaguguucucc

SEQ ID NO: 1138152 - RNA, 19 nt, Artificial Sequence
  Description of Artificial Sequence: Synthetic oligonucleotide
ccagggaucaccagguuug

SEQ ID NO: 1138153 - RNA, 19 nt, Artificial Sequence
  Description of Artificial Sequence: Synthetic oligonucleotide
uaggcccgcuccaagcaug

SEQ ID NO: 1138154 - RNA, 19 nt, Artificial Sequence
  Description of Artificial Sequence: Synthetic oligonucleotide
acaagauuguuggaguaua

SEQ ID NO: 1138155 - RNA, 19 nt, Artificial Sequence
  Description of Artificial Sequence: Synthetic oligonucleotide
augauccagucguugugcu

SEQ ID NO: 1138156 - RNA, 19 nt, Artificial Sequence
  Description of Artificial Sequence: Synthetic oligonucleotide
aaccgguaacgguaguguu

SEQ ID NO: 1138157 - RNA, 19 nt, Artificial Sequence
  Description of Artificial Sequence: Synthetic oligonucleotide
ccgaucuccaaugagggcc

SEQ ID NO: 1138158 - RNA, 19 nt, Artificial Sequence
  Description of Artificial Sequence: Synthetic oligonucleotide
gaguaucauguuggcacag

SEQ ID NO: 1138159 - RNA, 19 nt, Artificial Sequence
  Description of Artificial Sequence: Synthetic oligonucleotide
gccaacgaaagccccacag

SEQ ID NO: 1138160 - RNA, 19 nt, Artificial Sequence
  Description of Artificial Sequence: Synthetic oligonucleotide
caucgaaacaagcaaggcu

SEQ ID NO: 1138161 - RNA, 19 nt, Artificial Sequence
  Description of Artificial Sequence: Synthetic oligonucleotide
gguugauaaucacggguac

SEQ ID NO: 1138162 - RNA, 19 nt, Artificial Sequence
  Description of Artificial Sequence: Synthetic oligonucleotide
aaugcacauccggcgcccg

SEQ ID NO: 1138163 - RNA, 19 nt, Artificial Sequence
  Description of Artificial Sequence: Synthetic oligonucleotide
auaccagaucugcccuacg

SEQ ID NO: 1138164 - RNA, 19 nt, Artificial Sequence
  Description of Artificial Sequence: Synthetic oligonucleotide
agguugauaaucacgggua

SEQ ID NO: 1138165 - RNA, 19 nt, Artificial Sequence
  Description of Artificial Sequence: Synthetic oligonucleotide
ugagggucucaaagcgaug

SEQ ID NO: 1138166 - RNA, 19 nt, Artificial Sequence
  Description of Artificial Sequence: Synthetic oligonucleotide
cacggguacgcugagccag

SEQ ID NO: 1138167 - RNA, 19 nt, Artificial Sequence
  Description of Artificial Sequence: Synthetic oligonucleotide
cugguuguacccugcagga

SEQ ID NO: 1138168 - RNA, 19 nt, Artificial Sequence
  Description of Artificial Sequence: Synthetic oligonucleotide
ggccucgagguccugagag

SEQ ID NO: 1138169 - RNA, 19 nt, Artificial Sequence
  Description of Artificial Sequence: Synthetic oligonucleotide
agguuugcacuugaacuca

SEQ ID NO: 1138170 - RNA, 19 nt, Artificial Sequence
  Description of Artificial Sequence: Synthetic oligonucleotide
acagcgucaggugcacugg

SEQ ID NO: 1138171 - RNA, 19 nt, Artificial Sequence
  Description of Artificial Sequence: Synthetic oligonucleotide
ccacggaucuugauuaggc

SEQ ID NO: 1138172 - RNA, 19 nt, Artificial Sequence
  Description of Artificial Sequence: Synthetic oligonucleotide
gaaugcacauccggcgccc

SEQ ID NO: 1138173 - RNA, 19 nt, Artificial Sequence
  Description of Artificial Sequence: Synthetic oligonucleotide
ggcugagucucauagugga

SEQ ID NO: 1138174 - RNA, 19 nt, Artificial Sequence
  Description of Artificial Sequence: Synthetic oligonucleotide
acaauccugaguggguuga

SEQ ID NO: 1138175 - RNA, 19 nt, Artificial Sequence
  Description of Artificial Sequence: Synthetic oligonucleotide
gguacagucugcagggcag

SEQ ID NO: 1138176 - RNA, 19 nt, Artificial Sequence
  Description of Artificial Sequence: Synthetic oligonucleotide
guaacgguaguguucuccu

SEQ ID NO: 1138177 - RNA, 19 nt, Artificial Sequence
  Description of Artificial Sequence: Synthetic oligonucleotide
uaggggccaauucgcuugc

SEQ ID NO: 1138178 - RNA, 19 nt, Artificial Sequence
  Description of Artificial Sequence: Synthetic oligonucleotide
aggcgguagugguauggag

SEQ ID NO: 1138179 - RNA, 19 nt, Artificial Sequence
  Description of Artificial Sequence: Synthetic oligonucleotide
gauggaguuccggcaucgg

SEQ ID NO: 1138180 - RNA, 19 nt, Artificial Sequence
  Description of Artificial Sequence: Synthetic oligonucleotide
cuugcguauccaccacuug

SEQ ID NO: 1138181 - RNA, 19 nt, Artificial Sequence
  Description of Artificial Sequence: Synthetic oligonucleotide
ccauucccgagucuuaaag

SEQ ID NO: 1138182 - RNA, 19 nt, Artificial Sequence
  Description of Artificial Sequence: Synthetic oligonucleotide
ugcacauccggcgcccgag

SEQ ID NO: 1138183 - RNA, 19 nt, Artificial Sequence
  Description of Artificial Sequence: Synthetic oligonucleotide
uagggaggcgggacaacgu

SEQ ID NO: 1138184 - RNA, 19 nt, Artificial Sequence
  Description of Artificial Sequence: Synthetic oligonucleotide
aguaggggccaauucgcuu

SEQ ID NO: 1138185 - RNA, 19 nt, Artificial Sequence
  Description of Artificial Sequence: Synthetic oligonucleotide
gauaaggcacggccgccuc

SEQ ID NO: 1138186 - RNA, 19 nt, Artificial Sequence
  Description of Artificial Sequence: Synthetic oligonucleotide
cauguuugaccaguccauc

SEQ ID NO: 1138187 - RNA, 19 nt, Artificial Sequence
  Description of Artificial Sequence: Synthetic oligonucleotide
ccagucguugugcucauag

SEQ ID NO: 1138188 - RNA, 19 nt, Artificial Sequence
  Description of Artificial Sequence: Synthetic oligonucleotide
uuaggcccgcuccaagcau

SEQ ID NO: 1138189 - RNA, 19 nt, Artificial Sequence
  Description of Artificial Sequence: Synthetic oligonucleotide
gucguugugcucauagguc

SEQ ID NO: 1138190 - RNA, 19 nt, Artificial Sequence
  Description of Artificial Sequence: Synthetic oligonucleotide
gacaacguccagagagggc

SEQ ID NO: 1138191 - RNA, 19 nt, Artificial Sequence
  Description of Artificial Sequence: Synthetic oligonucleotide
ggucucaaagcgauggaac

SEQ ID NO: 1138192 - RNA, 19 nt, Artificial Sequence
  Description of Artificial Sequence: Synthetic oligonucleotide
gagauaaggcacggccgcc

SEQ ID NO: 1138193 - RNA, 19 nt, Artificial Sequence
  Description of Artificial Sequence: Synthetic oligonucleotide
ccccgaucuccaaugaggg

SEQ ID NO: 1138194 - RNA, 19 nt, Artificial Sequence
  Description of Artificial Sequence: Synthetic oligonucleotide
uccgagucaccagcuagga

SEQ ID NO: 1138195 - RNA, 19 nt, Artificial Sequence
  Description of Artificial Sequence: Synthetic oligonucleotide
acgacucuggucaaccaga

SEQ ID NO: 1138196 - RNA, 19 nt, Artificial Sequence
  Description of Artificial Sequence: Synthetic oligonucleotide
ggacaacguccagagaggg

SEQ ID NO: 1138197 - RNA, 19 nt, Artificial Sequence
  Description of Artificial Sequence: Synthetic oligonucleotide
aggcugaaccgguaacggu

SEQ ID NO: 1138198 - RNA, 19 nt, Artificial Sequence
  Description of Artificial Sequence: Synthetic oligonucleotide
agcccaacaagagcaagaa

SEQ ID NO: 1138199 - RNA, 19 nt, Artificial Sequence
  Description of Artificial Sequence: Synthetic oligonucleotide
guccgauccuuggugauac

SEQ ID NO: 1138200 - RNA, 19 nt, Artificial Sequence
  Description of Artificial Sequence: Synthetic oligonucleotide
uugauuaggcccgcuccaa

SEQ ID NO: 1138201 - RNA, 19 nt, Artificial Sequence
  Description of Artificial Sequence: Synthetic oligonucleotide
agauaaggcacggccgccu

SEQ ID NO: 1138202 - RNA, 19 nt, Artificial Sequence
  Description of Artificial Sequence: Synthetic oligonucleotide
gggacaacguccagagagg

SEQ ID NO: 1138203 - RNA, 19 nt, Artificial Sequence
  Description of Artificial Sequence: Synthetic oligonucleotide
caugaguaucauguuggca

SEQ ID NO: 1138204 - RNA, 19 nt, Artificial Sequence
  Description of Artificial Sequence: Synthetic oligonucleotide
uaacgguaguguucuccuc

SEQ ID NO: 1138205 - RNA, 19 nt, Artificial Sequence
  Description of Artificial Sequence: Synthetic oligonucleotide
ggaauccuguuuccagcag

SEQ ID NO: 1138206 - RNA, 19 nt, Artificial Sequence
  Description of Artificial Sequence: Synthetic oligonucleotide
agccggacuggagaucccg

SEQ ID NO: 1138207 - RNA, 19 nt, Artificial Sequence
  Description of Artificial Sequence: Synthetic oligonucleotide
cucgccgcaccgugcagcc

SEQ ID NO: 1138208 - RNA, 19 nt, Artificial Sequence
  Description of Artificial Sequence: Synthetic oligonucleotide
gugucuagauggaguuccg

SEQ ID NO: 1138209 - RNA, 19 nt, Artificial Sequence
  Description of Artificial Sequence: Synthetic oligonucleotide
ucacggguacgcugagcca

SEQ ID NO: 1138210 - RNA, 19 nt, Artificial Sequence
  Description of Artificial Sequence: Synthetic oligonucleotide
cagcccaacaagagcaaga

SEQ ID NO: 1138211 - RNA, 19 nt, Artificial Sequence
  Description of Artificial Sequence: Synthetic oligonucleotide
agcucagguucccacugau

SEQ ID NO: 1138212 - RNA, 19 nt, Artificial Sequence
  Description of Artificial Sequence: Synthetic oligonucleotide
gggaucgcgagcaggagug

SEQ ID NO: 1138213 - RNA, 19 nt, Artificial Sequence
  Description of Artificial Sequence: Synthetic oligonucleotide
caaccagaaagugcccgug

SEQ ID NO: 1138214 - RNA, 19 nt, Artificial Sequence
  Description of Artificial Sequence: Synthetic oligonucleotide
gaaccgguaacgguagugu

SEQ ID NO: 1138215 - RNA, 19 nt, Artificial Sequence
  Description of Artificial Sequence: Synthetic oligonucleotide
ccggcaucggccauucccg

SEQ ID NO: 1138216 - RNA, 19 nt, Artificial Sequence
  Description of Artificial Sequence: Synthetic oligonucleotide
ucggccauucccgagucuu

SEQ ID NO: 1138217 - RNA, 19 nt, Artificial Sequence
  Description of Artificial Sequence: Synthetic oligonucleotide
aacguccagagagggcaca

SEQ ID NO: 1138218 - RNA, 19 nt, Artificial Sequence
  Description of Artificial Sequence: Synthetic oligonucleotide
augaaagcgagggccugca

SEQ ID NO: 1138219 - RNA, 19 nt, Artificial Sequence
  Description of Artificial Sequence: Synthetic oligonucleotide
ugugccuagggaggcggga

SEQ ID NO: 1138220 - RNA, 19 nt, Artificial Sequence
  Description of Artificial Sequence: Synthetic oligonucleotide
ucgcuugcguauccaccac

SEQ ID NO: 1138221 - RNA, 19 nt, Artificial Sequence
  Description of Artificial Sequence: Synthetic oligonucleotide
ggugugccuagggaggcgg

SEQ ID NO: 1138222 - RNA, 19 nt, Artificial Sequence
  Description of Artificial Sequence: Synthetic oligonucleotide
ucccgcgggaucgcgagca

SEQ ID NO: 1138223 - RNA, 19 nt, Artificial Sequence
  Description of Artificial Sequence: Synthetic oligonucleotide
aguugaccacucgccgcac

SEQ ID NO: 1138224 - RNA, 19 nt, Artificial Sequence
  Description of Artificial Sequence: Synthetic oligonucleotide
auggaaccaccagggugac

SEQ ID NO: 1138225 - RNA, 19 nt, Artificial Sequence
  Description of Artificial Sequence: Synthetic oligonucleotide
gagaucccgcgggaucgcg

SEQ ID NO: 1138226 - RNA, 19 nt, Artificial Sequence
  Description of Artificial Sequence: Synthetic oligonucleotide
gugcacuggcauuagggcu

SEQ ID NO: 1138227 - RNA, 19 nt, Artificial Sequence
  Description of Artificial Sequence: Synthetic oligonucleotide
aucccgcgggaucgcgagc

SEQ ID NO: 1138228 - RNA, 19 nt, Artificial Sequence
  Description of Artificial Sequence: Synthetic oligonucleotide
gcugaaccgguaacgguag

SEQ ID NO: 1138229 - RNA, 19 nt, Artificial Sequence
  Description of Artificial Sequence: Synthetic oligonucleotide
ggagcuuacccgccaggug

SEQ ID NO: 1138230 - RNA, 19 nt, Artificial Sequence
  Description of Artificial Sequence: Synthetic oligonucleotide
caccucaguccgauccuug

SEQ ID NO: 1138231 - RNA, 19 nt, Artificial Sequence
  Description of Artificial Sequence: Synthetic oligonucleotide
gguagugguauggagagau

SEQ ID NO: 1138232 - RNA, 19 nt, Artificial Sequence
  Description of Artificial Sequence: Synthetic oligonucleotide
ggaguauagcuccaggcau

SEQ ID NO: 1138233 - RNA, 19 nt, Artificial Sequence
  Description of Artificial Sequence: Synthetic oligonucleotide
gcagccggacuggagaucc

SEQ ID NO: 1138234 - RNA, 19 nt, Artificial Sequence
  Description of Artificial Sequence: Synthetic oligonucleotide
ccagccaauccugccaugg

SEQ ID NO: 1138235 - RNA, 19 nt, Artificial Sequence
  Description of Artificial Sequence: Synthetic oligonucleotide
cugagggucucaaagcgau

SEQ ID NO: 1138236 - RNA, 19 nt, Artificial Sequence
  Description of Artificial Sequence: Synthetic oligonucleotide
ggaaguccaugcagguuag

SEQ ID NO: 1138237 - RNA, 19 nt, Artificial Sequence
  Description of Artificial Sequence: Synthetic oligonucleotide
ggcgguagugguauggaga

SEQ ID NO: 1138238 - RNA, 19 nt, Artificial Sequence
  Description of Artificial Sequence: Synthetic oligonucleotide
cagcgucaggugcacuggc

SEQ ID NO: 1138239 - RNA, 19 nt, Artificial Sequence
  Description of Artificial Sequence: Synthetic oligonucleotide
aggcacgagcagcucuaug

SEQ ID NO: 1138240 - RNA, 19 nt, Artificial Sequence
  Description of Artificial Sequence: Synthetic oligonucleotide
caucggccauucccgaguc

SEQ ID NO: 1138241 - RNA, 19 nt, Artificial Sequence
  Description of Artificial Sequence: Synthetic oligonucleotide
ccaauucgcuugcguaucc

SEQ ID NO: 1138242 - RNA, 19 nt, Artificial Sequence
  Description of Artificial Sequence: Synthetic oligonucleotide
gaggcgggacaacguccag

SEQ ID NO: 1138243 - RNA, 19 nt, Artificial Sequence
  Description of Artificial Sequence: Synthetic oligonucleotide
aucuccaaugagggccuug

SEQ ID NO: 1138244 - RNA, 19 nt, Artificial Sequence
  Description of Artificial Sequence: Synthetic oligonucleotide
uacuuccaaaggccccgua

SEQ ID NO: 1138245 - RNA, 19 nt, Artificial Sequence
  Description of Artificial Sequence: Synthetic oligonucleotide
cagggaucaccagguuugc

SEQ ID NO: 1138246 - RNA, 19 nt, Artificial Sequence
  Description of Artificial Sequence: Synthetic oligonucleotide
aguguucuccucggaucca

SEQ ID NO: 1138247 - RNA, 19 nt, Artificial Sequence
  Description of Artificial Sequence: Synthetic oligonucleotide
gcccaacaagagcaagaag

SEQ ID NO: 1138248 - RNA, 19 nt, Artificial Sequence
  Description of Artificial Sequence: Synthetic oligonucleotide
gcguauccaccacuugccc

SEQ ID NO: 1138249 - RNA, 19 nt, Artificial Sequence
  Description of Artificial Sequence: Synthetic oligonucleotide
ggcaucggccauucccgag

SEQ ID NO: 1138250 - RNA, 19 nt, Artificial Sequence
  Description of Artificial Sequence: Synthetic oligonucleotide
ugguuguacccugcaggau

SEQ ID NO: 1138251 - RNA, 19 nt, Artificial Sequence
  Description of Artificial Sequence: Synthetic oligonucleotide
agguuagguccagccagca

SEQ ID NO: 1138252 - RNA, 19 nt, Artificial Sequence
  Description of Artificial Sequence: Synthetic oligonucleotide
cacacagcgucaggugcac

SEQ ID NO: 1138253 - RNA, 19 nt, Artificial Sequence
  Description of Artificial Sequence: Synthetic oligonucleotide
acuggagaucccgcgggau

SEQ ID NO: 1138254 - RNA, 19 nt, Artificial Sequence
  Description of Artificial Sequence: Synthetic oligonucleotide
ugaccacucgccgcaccgu

SEQ ID NO: 1138255 - RNA, 19 nt, Artificial Sequence
  Description of Artificial Sequence: Synthetic oligonucleotide
gagucuuaaaguaguccuu

SEQ ID NO: 1138256 - RNA, 19 nt, Artificial Sequence
  Description of Artificial Sequence: Synthetic oligonucleotide
agccaacgaaagccccaca

SEQ ID NO: 1138257 - RNA, 19 nt, Artificial Sequence
  Description of Artificial Sequence: Synthetic oligonucleotide
aaggcacgagcagcucuau

SEQ ID NO: 1138258 - RNA, 19 nt, Artificial Sequence
  Description of Artificial Sequence: Synthetic oligonucleotide
augcacauccggcgcccga

SEQ ID NO: 1138259 - RNA, 19 nt, Artificial Sequence
  Description of Artificial Sequence: Synthetic oligonucleotide
aggcgggacaacguccaga

SEQ ID NO: 1138260 - RNA, 19 nt, Artificial Sequence
  Description of Artificial Sequence: Synthetic oligonucleotide
uggggaggcugaaccggua

SEQ ID NO: 1138261 - RNA, 19 nt, Artificial Sequence
  Description of Artificial Sequence: Synthetic oligonucleotide
gugugucuagauggaguuc

SEQ ID NO: 1138262 - RNA, 19 nt, Artificial Sequence
  Description of Artificial Sequence: Synthetic oligonucleotide
ccaggcgguagugguaugg

SEQ ID NO: 1138263 - RNA, 19 nt, Artificial Sequence
  Description of Artificial Sequence: Synthetic oligonucleotide
uccgauccuuggugauacu

SEQ ID NO: 1138264 - RNA, 19 nt, Artificial Sequence
  Description of Artificial Sequence: Synthetic oligonucleotide
aguccgauccuuggugaua

SEQ ID NO: 1138265 - RNA, 19 nt, Artificial Sequence
  Description of Artificial Sequence: Synthetic oligonucleotide
agcgucaggugcacuggca

SEQ ID NO: 1138266 - RNA, 19 nt, Artificial Sequence
  Description of Artificial Sequence: Synthetic oligonucleotide
aucggccauucccgagucu

SEQ ID NO: 1138267 - RNA, 19 nt, Artificial Sequence
  Description of Artificial Sequence: Synthetic oligonucleotide
gggaggcgggacaacgucc

SEQ ID NO: 1138268 - RNA, 19 nt, Artificial Sequence
  Description of Artificial Sequence: Synthetic oligonucleotide
gggccaauucgcuugcgua

SEQ ID NO: 1138269 - RNA, 19 nt, Artificial Sequence
  Description of Artificial Sequence: Synthetic oligonucleotide
gccccguagguguugacaa

SEQ ID NO: 1138270 - RNA, 19 nt, Artificial Sequence
  Description of Artificial Sequence: Synthetic oligonucleotide
agcuuacccgccaggugga

SEQ ID NO: 1138271 - RNA, 19 nt, Artificial Sequence
  Description of Artificial Sequence: Synthetic oligonucleotide
gugugccuagggaggcggg

SEQ ID NO: 1138272 - RNA, 19 nt, Artificial Sequence
  Description of Artificial Sequence: Synthetic oligonucleotide
cccacggaucuugauuagg

SEQ ID NO: 1138273 - RNA, 19 nt, Artificial Sequence
  Description of Artificial Sequence: Synthetic oligonucleotide
uuuaggccucgagguccug

SEQ ID NO: 1138274 - RNA, 19 nt, Artificial Sequence
  Description of Artificial Sequence: Synthetic oligonucleotide
cccgaucuccaaugagggc

SEQ ID NO: 1138275 - RNA, 19 nt, Artificial Sequence
  Description of Artificial Sequence: Synthetic oligonucleotide
auccagucguugugcucau

SEQ ID NO: 1138276 - RNA, 19 nt, Artificial Sequence
  Description of Artificial Sequence: Synthetic oligonucleotide
gcacgagcagcucuaugaa

SEQ ID NO: 1138277 - RNA, 19 nt, Artificial Sequence
  Description of Artificial Sequence: Synthetic oligonucleotide
ccaaaggccccguaggugu

SEQ ID NO: 1138278 - RNA, 19 nt, Artificial Sequence
  Description of Artificial Sequence: Synthetic oligonucleotide
gcacauccggcgcccgagg

SEQ ID NO: 1138279 - RNA, 19 nt, Artificial Sequence
  Description of Artificial Sequence: Synthetic oligonucleotide
gcccgcuccaagcaugauc

SEQ ID NO: 1138280 - RNA, 19 nt, Artificial Sequence
  Description of Artificial Sequence: Synthetic oligonucleotide
gagcacgacucuggucaac

SEQ ID NO: 1138281 - RNA, 19 nt, Artificial Sequence
  Description of Artificial Sequence: Synthetic oligonucleotide
gccgccuccagggaucacc

SEQ ID NO: 1138282 - RNA, 19 nt, Artificial Sequence
  Description of Artificial Sequence: Synthetic oligonucleotide
gggucucaaagcgauggaa

SEQ ID NO: 1138283 - RNA, 19 nt, Artificial Sequence
  Description of Artificial Sequence: Synthetic oligonucleotide
acccgccagguggaugauc

SEQ ID NO: 1138284 - RNA, 19 nt, Artificial Sequence
  Description of Artificial Sequence: Synthetic oligonucleotide
caccagcuaggagcuuacc

SEQ ID NO: 1138285 - RNA, 19 nt, Artificial Sequence
  Description of Artificial Sequence: Synthetic oligonucleotide
cucgagguccugagagaaa

SEQ ID NO: 1138286 - RNA, 19 nt, Artificial Sequence
  Description of Artificial Sequence: Synthetic oligonucleotide
gagggcgagcagggacagg

SEQ ID NO: 1138287 - RNA, 19 nt, Artificial Sequence
  Description of Artificial Sequence: Synthetic oligonucleotide
aggggccaauucgcuugcg

SEQ ID NO: 1138288 - RNA, 19 nt, Artificial Sequence
  Description of Artificial Sequence: Synthetic oligonucleotide
uuguacccugcaggaucac

SEQ ID NO: 1138289 - RNA, 19 nt, Artificial Sequence
  Description of Artificial Sequence: Synthetic oligonucleotide
uuccggcaucggccauucc

SEQ ID NO: 1138290 - RNA, 19 nt, Artificial Sequence
  Description of Artificial Sequence: Synthetic oligonucleotide
cagccggacuggagauccc

SEQ ID NO: 1138291 - RNA, 19 nt, Artificial Sequence
  Description of Artificial Sequence: Synthetic oligonucleotide
agaucccgcgggaucgcga

SEQ ID NO: 1138292 - RNA, 19 nt, Artificial Sequence
  Description of Artificial Sequence: Synthetic oligonucleotide
caggcgguagugguaugga

SEQ ID NO: 1138293 - RNA, 19 nt, Artificial Sequence
  Description of Artificial Sequence: Synthetic oligonucleotide
cacucgccgcaccgugcag

SEQ ID NO: 1138294 - RNA, 19 nt, Artificial Sequence
  Description of Artificial Sequence: Synthetic oligonucleotide
ucgccgcaccgugcagccg

SEQ ID NO: 1138295 - RNA, 19 nt, Artificial Sequence
  Description of Artificial Sequence: Synthetic oligonucleotide
gcaucggccauucccgagu

SEQ ID NO: 1138296 - RNA, 19 nt, Artificial Sequence
  Description of Artificial Sequence: Synthetic oligonucleotide
cccgugaagaaugcacauc

SEQ ID NO: 1138297 - RNA, 19 nt, Artificial Sequence
  Description of Artificial Sequence: Synthetic oligonucleotide
cgggcucugauccacaucu

SEQ ID NO: 1138298 - RNA, 19 nt, Artificial Sequence
  Description of Artificial Sequence: Synthetic oligonucleotide
aggcccgcuccaagcauga

SEQ ID NO: 1138299 - RNA, 19 nt, Artificial Sequence
  Description of Artificial Sequence: Synthetic oligonucleotide
ggccccguagguguugaca

SEQ ID NO: 1138300 - RNA, 19 nt, Artificial Sequence
  Description of Artificial Sequence: Synthetic oligonucleotide
gccucgagguccugagaga

SEQ ID NO: 1138301 - RNA, 19 nt, Artificial Sequence
  Description of Artificial Sequence: Synthetic oligonucleotide
ccguaucuuggcuugggcu

SEQ ID NO: 1138302 - RNA, 19 nt, Artificial Sequence
  Description of Artificial Sequence: Synthetic oligonucleotide
ccccacggaucuugauuag

SEQ ID NO: 1138303 - RNA, 19 nt, Artificial Sequence
  Description of Artificial Sequence: Synthetic oligonucleotide
cuacguugaccagggacau

SEQ ID NO: 1138304 - RNA, 19 nt, Artificial Sequence
  Description of Artificial Sequence: Synthetic oligonucleotide
ggagaucccgcgggaucgc

SEQ ID NO: 1138305 - RNA, 19 nt, Artificial Sequence
  Description of Artificial Sequence: Synthetic oligonucleotide
gccggacuggagaucccgc

SEQ ID NO: 1138306 - RNA, 19 nt, Artificial Sequence
  Description of Artificial Sequence: Synthetic oligonucleotide
uccagucguugugcucaua

SEQ ID NO: 1138307 - RNA, 19 nt, Artificial Sequence
  Description of Artificial Sequence: Synthetic oligonucleotide
ccgguaacgguaguguucu

SEQ ID NO: 1138308 - RNA, 19 nt, Artificial Sequence
  Description of Artificial Sequence: Synthetic oligonucleotide
caguccgauccuuggugau

SEQ ID NO: 1138309 - RNA, 19 nt, Artificial Sequence
  Description of Artificial Sequence: Synthetic oligonucleotide
cgaaagccccacaggacaa

SEQ ID NO: 1138310 - RNA, 19 nt, Artificial Sequence
  Description of Artificial Sequence: Synthetic oligonucleotide
cugaaccgguaacgguagu

SEQ ID NO: 1138311 - RNA, 19 nt, Artificial Sequence
  Description of Artificial Sequence: Synthetic oligonucleotide
gcgacgccgggcucugauc

SEQ ID NO: 1138312 - RNA, 19 nt, Artificial Sequence
  Description of Artificial Sequence: Synthetic oligonucleotide
uacccgccagguggaugau

SEQ ID NO: 1138313 - RNA, 19 nt, Artificial Sequence
  Description of Artificial Sequence: Synthetic oligonucleotide
gcuugcguauccaccacuu

SEQ ID NO: 1138314 - RNA, 19 nt, Artificial Sequence
  Description of Artificial Sequence: Synthetic oligonucleotide
caaaggccccguagguguu

SEQ ID NO: 1138315 - RNA, 19 nt, Artificial Sequence
  Description of Artificial Sequence: Synthetic oligonucleotide
ccgcgggaucgcgagcagg

SEQ ID NO: 1138316 - RNA, 19 nt, Artificial Sequence
  Description of Artificial Sequence: Synthetic oligonucleotide
ccgggcucugauccacauc

SEQ ID NO: 1138317 - RNA, 19 nt, Artificial Sequence
  Description of Artificial Sequence: Synthetic oligonucleotide
cgacucuggucaaccagaa

SEQ ID NO: 1138318 - RNA, 19 nt, Artificial Sequence
  Description of Artificial Sequence: Synthetic oligonucleotide
ggugaccugugcagguagu

SEQ ID NO: 1138319 - RNA, 19 nt, Artificial Sequence
  Description of Artificial Sequence: Synthetic oligonucleotide
gguuugcacuugaacucau

SEQ ID NO: 1138320 - RNA, 19 nt, Artificial Sequence
  Description of Artificial Sequence: Synthetic oligonucleotide
ccaucggguugggcacugg

SEQ ID NO: 1138321 - RNA, 19 nt, Artificial Sequence
  Description of Artificial Sequence: Synthetic oligonucleotide
cgaucuccaaugagggccu

SEQ ID NO: 1138322 - RNA, 19 nt, Artificial Sequence
  Description of Artificial Sequence: Synthetic oligonucleotide
gcgaaccacauuagccagu

SEQ ID NO: 1138323 - RNA, 19 nt, Artificial Sequence
  Description of Artificial Sequence: Synthetic oligonucleotide
ggcgacgccgggcucugau

SEQ ID NO: 1138324 - RNA, 19 nt, Artificial Sequence
  Description of Artificial Sequence: Synthetic oligonucleotide
uggcgacgccgggcucuga

SEQ ID NO: 1138325 - RNA, 19 nt, Artificial Sequence
  Description of Artificial Sequence: Synthetic oligonucleotide
cccgcgggaucgcgagcag

SEQ ID NO: 1138326 - RNA, 19 nt, Artificial Sequence
  Description of Artificial Sequence: Synthetic oligonucleotide
caugaccugccuggagcuu

SEQ ID NO: 1138327 - RNA, 19 nt, Artificial Sequence
  Description of Artificial Sequence: Synthetic oligonucleotide
gcgcagccggacuggagau

SEQ ID NO: 1138328 - RNA, 19 nt, Artificial Sequence
  Description of Artificial Sequence: Synthetic oligonucleotide
gccgggcucugauccacau

SEQ ID NO: 1138329 - RNA, 19 nt, Artificial Sequence
  Description of Artificial Sequence: Synthetic oligonucleotide
ccgauccuuggugauacuu

SEQ ID NO: 1138330 - RNA, 19 nt, Artificial Sequence
  Description of Artificial Sequence: Synthetic oligonucleotide
cgguaguguucuccucgga

SEQ ID NO: 1138331 - RNA, 19 nt, Artificial Sequence
  Description of Artificial Sequence: Synthetic oligonucleotide
cgggaucgcgagcaggagu

SEQ ID NO: 1138332 - RNA, 19 nt, Artificial Sequence
  Description of Artificial Sequence: Synthetic oligonucleotide
ggcgcccgaggaacaggaa

SEQ ID NO: 1138333 - RNA, 19 nt, Artificial Sequence
  Description of Artificial Sequence: Synthetic oligonucleotide
cgguaacgguaguguucuc

SEQ ID NO: 1138334 - RNA, 19 nt, Artificial Sequence
  Description of Artificial Sequence: Synthetic oligonucleotide
cgcuugcguauccaccacu

SEQ ID NO: 1138335 - RNA, 19 nt, Artificial Sequence
  Description of Artificial Sequence: Synthetic oligonucleotide
cgcagccggacuggagauc

SEQ ID NO: 1138336 - RNA, 19 nt, Artificial Sequence
  Description of Artificial Sequence: Synthetic oligonucleotide
cgguagugguauggagaga

SEQ ID NO: 1138337 - RNA, 19 nt, Artificial Sequence
  Description of Artificial Sequence: Synthetic oligonucleotide
gcuuacccgccagguggau

SEQ ID NO: 1138338 - RNA, 19 nt, Artificial Sequence
  Description of Artificial Sequence: Synthetic oligonucleotide
ggccgccuccagggaucac

SEQ ID NO: 1138339 - RNA, 19 nt, Artificial Sequence
  Description of Artificial Sequence: Synthetic oligonucleotide
ggcccgcuccaagcaugau

SEQ ID NO: 1138340 - RNA, 19 nt, Artificial Sequence
  Description of Artificial Sequence: Synthetic oligonucleotide
ccgcaccgugcagccguau

SEQ ID NO: 1138341 - RNA, 19 nt, Artificial Sequence
  Description of Artificial Sequence: Synthetic oligonucleotide
aauuauuucacauauccuc

SEQ ID NO: 1138342 - RNA, 19 nt, Artificial Sequence
  Description of Artificial Sequence: Synthetic oligonucleotide
aaaguugaaagucagccca

SEQ ID NO: 1138343 - RNA, 19 nt, Artificial Sequence
  Description of Artificial Sequence: Synthetic oligonucleotide
uguuggaaugaucaaaacc

SEQ ID NO: 1138344 - RNA, 19 nt, Artificial Sequence
  Description of Artificial Sequence: Synthetic oligonucleotide
aaugaucaaaaccuggccu

SEQ ID NO: 1138345 - RNA, 19 nt, Artificial Sequence
  Description of Artificial Sequence: Synthetic oligonucleotide
uuaaccgguggccaaagcg

SEQ ID NO: 1138346 - RNA, 19 nt, Artificial Sequence
  Description of Artificial Sequence: Synthetic oligonucleotide
ugcaauauaguuucaaagu

SEQ ID NO: 1138347 - RNA, 19 nt, Artificial Sequence
  Description of Artificial Sequence: Synthetic oligonucleotide
cauccaaagagcuggaacg

SEQ ID NO: 1138348 - RNA, 19 nt, Artificial Sequence
  Description of Artificial Sequence: Synthetic oligonucleotide
uggauugccaauuauuuca

SEQ ID NO: 1138349 - RNA, 19 nt, Artificial Sequence
  Description of Artificial Sequence: Synthetic oligonucleotide
ucuaugaucaggugggaag

SEQ ID NO: 1138350 - RNA, 19 nt, Artificial Sequence
  Description of Artificial Sequence: Synthetic oligonucleotide
ucaugagccugcaauauag

SEQ ID NO: 1138351 - RNA, 19 nt, Artificial Sequence
  Description of Artificial Sequence: Synthetic oligonucleotide
aauauaguuucaaaguuga

SEQ ID NO: 1138352 - RNA, 19 nt, Artificial Sequence
  Description of Artificial Sequence: Synthetic oligonucleotide
aauucccuuaaccgguggc

SEQ ID NO: 1138353 - RNA, 19 nt, Artificial Sequence
  Description of Artificial Sequence: Synthetic oligonucleotide
uuucaaaguugaaagucag

SEQ ID NO: 1138354 - RNA, 19 nt, Artificial Sequence
  Description of Artificial Sequence: Synthetic oligonucleotide
aaccuggccucucuaaucg

SEQ ID NO: 1138355 - RNA, 19 nt, Artificial Sequence
  Description of Artificial Sequence: Synthetic oligonucleotide
uuucacauauccuccauga

SEQ ID NO: 1138356 - RNA, 19 nt, Artificial Sequence
  Description of Artificial Sequence: Synthetic oligonucleotide
augaucaaaaccuggccuc

SEQ ID NO: 1138357 - RNA, 19 nt, Artificial Sequence
  Description of Artificial Sequence: Synthetic oligonucleotide
ucauuaugugaccaaguca

SEQ ID NO: 1138358 - RNA, 19 nt, Artificial Sequence
  Description of Artificial Sequence: Synthetic oligonucleotide
ucugcugaagucgucaggg

SEQ ID NO: 1138359 - RNA, 19 nt, Artificial Sequence
  Description of Artificial Sequence: Synthetic oligonucleotide
aacgcccggauuuuggcac

SEQ ID NO: 1138360 - RNA, 19 nt, Artificial Sequence
  Description of Artificial Sequence: Synthetic oligonucleotide
agucauggcccucacaggg

SEQ ID NO: 1138361 - RNA, 19 nt, Artificial Sequence
  Description of Artificial Sequence: Synthetic oligonucleotide
caaucauuaucccuugagg

SEQ ID NO: 1138362 - RNA, 19 nt, Artificial Sequence
  Description of Artificial Sequence: Synthetic oligonucleotide
uuaugugccuggaacaucu

SEQ ID NO: 1138363 - RNA, 19 nt, Artificial Sequence
  Description of Artificial Sequence: Synthetic oligonucleotide
augugaccaagucauggcc

SEQ ID NO: 1138364 - RNA, 19 nt, Artificial Sequence
  Description of Artificial Sequence: Synthetic oligonucleotide
gauucagucccaucagagg

SEQ ID NO: 1138365 - RNA, 19 nt, Artificial Sequence
  Description of Artificial Sequence: Synthetic oligonucleotide
ucacauauccuccaugauc

SEQ ID NO: 1138366 - RNA, 19 nt, Artificial Sequence
  Description of Artificial Sequence: Synthetic oligonucleotide
cauguuacucccucuaccc

SEQ ID NO: 1138367 - RNA, 19 nt, Artificial Sequence
  Description of Artificial Sequence: Synthetic oligonucleotide
cacgaaaauguucaugacc

SEQ ID NO: 1138368 - RNA, 19 nt, Artificial Sequence
  Description of Artificial Sequence: Synthetic oligonucleotide
aaagcguuugucagggugg

SEQ ID NO: 1138369 - RNA, 19 nt, Artificial Sequence
  Description of Artificial Sequence: Synthetic oligonucleotide
ucauguuacucccucuacc

SEQ ID NO: 1138370 - RNA, 19 nt, Artificial Sequence
  Description of Artificial Sequence: Synthetic oligonucleotide
guaggcauuuccuggaucc

SEQ ID NO: 1138371 - RNA, 19 nt, Artificial Sequence
  Description of Artificial Sequence: Synthetic oligonucleotide
agcgagggaacucaucugg

SEQ ID NO: 1138372 - RNA, 19 nt, Artificial Sequence
  Description of Artificial Sequence: Synthetic oligonucleotide
acgaaaauguucaugaccu

SEQ ID NO: 1138373 - RNA, 19 nt, Artificial Sequence
  Description of Artificial Sequence: Synthetic oligonucleotide
ugguagggaggccauaucc

SEQ ID NO: 1138374 - RNA, 19 nt, Artificial Sequence
  Description of Artificial Sequence: Synthetic oligonucleotide
ucauuaucccuugaggagc

SEQ ID NO: 1138375 - RNA, 19 nt, Artificial Sequence
  Description of Artificial Sequence: Synthetic oligonucleotide
ugugaccaagucauggccc

SEQ ID NO: 1138376 - RNA, 19 nt, Artificial Sequence
  Description of Artificial Sequence: Synthetic oligonucleotide
uucucugcgcccucgaaag

SEQ ID NO: 1138377 - RNA, 19 nt, Artificial Sequence
  Description of Artificial Sequence: Synthetic oligonucleotide
gucccugagaaguuguugg

SEQ ID NO: 1138378 - RNA, 19 nt, Artificial Sequence
  Description of Artificial Sequence: Synthetic oligonucleotide
aguuacugccacuccggcc

SEQ ID NO: 1138379 - RNA, 19 nt, Artificial Sequence
  Description of Artificial Sequence: Synthetic oligonucleotide
gaccaaagucaucaggacc

SEQ ID NO: 1138380 - RNA, 19 nt, Artificial Sequence
  Description of Artificial Sequence: Synthetic oligonucleotide
cagaguucauguuacuccc

SEQ ID NO: 1138381 - RNA, 19 nt, Artificial Sequence
  Description of Artificial Sequence: Synthetic oligonucleotide
auguuacucccucuacccc

SEQ ID NO: 1138382 - RNA, 19 nt, Artificial Sequence
  Description of Artificial Sequence: Synthetic oligonucleotide
uguuacucccucuacccca

SEQ ID NO: 1138383 - RNA, 19 nt, Artificial Sequence
  Description of Artificial Sequence: Synthetic oligonucleotide
uguuggauugccaauuauu

SEQ ID NO: 1138384 - RNA, 19 nt, Artificial Sequence
  Description of Artificial Sequence: Synthetic oligonucleotide
agggaacucaucuggagug

SEQ ID NO: 1138385 - RNA, 19 nt, Artificial Sequence
  Description of Artificial Sequence: Synthetic oligonucleotide
cugaggaccucucauuucc

SEQ ID NO: 1138386 - RNA, 19 nt, Artificial Sequence
  Description of Artificial Sequence: Synthetic oligonucleotide
auucccuuaaccgguggcc

SEQ ID NO: 1138387 - RNA, 19 nt, Artificial Sequence
  Description of Artificial Sequence: Synthetic oligonucleotide
ugagccugcaauauaguuu

SEQ ID NO: 1138388 - RNA, 19 nt, Artificial Sequence
  Description of Artificial Sequence: Synthetic oligonucleotide
aagagcccgacccaucaug

SEQ ID NO: 1138389 - RNA, 19 nt, Artificial Sequence
  Description of Artificial Sequence: Synthetic oligonucleotide
aucuugacguuguucaugu

SEQ ID NO: 1138390 - RNA, 19 nt, Artificial Sequence
  Description of Artificial Sequence: Synthetic oligonucleotide
aaagcgugggucaucaggu

SEQ ID NO: 1138391 - RNA, 19 nt, Artificial Sequence
  Description of Artificial Sequence: Synthetic oligonucleotide
cucaugacgucucucuggg

SEQ ID NO: 1138392 - RNA, 19 nt, Artificial Sequence
  Description of Artificial Sequence: Synthetic oligonucleotide
uaaccgguggccaaagcgu

SEQ ID NO: 1138393 - RNA, 19 nt, Artificial Sequence
  Description of Artificial Sequence: Synthetic oligonucleotide
aaaaccuggccucucuaau

SEQ ID NO: 1138394 - RNA, 19 nt, Artificial Sequence
  Description of Artificial Sequence: Synthetic oligonucleotide
uccuccuucgaagcgaggg

SEQ ID NO: 1138395 - RNA, 19 nt, Artificial Sequence
  Description of Artificial Sequence: Synthetic oligonucleotide
ugucauuaugugaccaagu

SEQ ID NO: 1138396 - RNA, 19 nt, Artificial Sequence
  Description of Artificial Sequence: Synthetic oligonucleotide
ccagcaauccacuuggagg

SEQ ID NO: 1138397 - RNA, 19 nt, Artificial Sequence
  Description of Artificial Sequence: Synthetic oligonucleotide
uccucgucccucaaauucc

SEQ ID NO: 1138398 - RNA, 19 nt, Artificial Sequence
  Description of Artificial Sequence: Synthetic oligonucleotide
aagcguucaucuccagguc

SEQ ID NO: 1138399 - RNA, 19 nt, Artificial Sequence
  Description of Artificial Sequence: Synthetic oligonucleotide
ucucuaaucgccuccuuau

SEQ ID NO: 1138400 - RNA, 19 nt, Artificial Sequence
  Description of Artificial Sequence: Synthetic oligonucleotide
gucauuaugugaccaaguc

SEQ ID NO: 1138401 - RNA, 19 nt, Artificial Sequence
  Description of Artificial Sequence: Synthetic oligonucleotide
gaagcguucaucuccaggu

SEQ ID NO: 1138402 - RNA, 19 nt, Artificial Sequence
  Description of Artificial Sequence: Synthetic oligonucleotide
uggaacgcccggauuuugg

SEQ ID NO: 1138403 - RNA, 19 nt, Artificial Sequence
  Description of Artificial Sequence: Synthetic oligonucleotide
uggccaaucauuaucccuu

SEQ ID NO: 1138404 - RNA, 19 nt, Artificial Sequence
  Description of Artificial Sequence: Synthetic oligonucleotide
ugccuggaacaucuugacg

SEQ ID NO: 1138405 - RNA, 19 nt, Artificial Sequence
  Description of Artificial Sequence: Synthetic oligonucleotide
uucauguuacucccucuac

SEQ ID NO: 1138406 - RNA, 19 nt, Artificial Sequence
  Description of Artificial Sequence: Synthetic oligonucleotide
ugaaccugagggcccacgc

SEQ ID NO: 1138407 - RNA, 19 nt, Artificial Sequence
  Description of Artificial Sequence: Synthetic oligonucleotide
uuaucccuugaggagcagg

SEQ ID NO: 1138408 - RNA, 19 nt, Artificial Sequence
  Description of Artificial Sequence: Synthetic oligonucleotide
cuuccgaggugguagggag

SEQ ID NO: 1138409 - RNA, 19 nt, Artificial Sequence
  Description of Artificial Sequence: Synthetic oligonucleotide
ugcuagcuggugaauggcc

SEQ ID NO: 1138410 - RNA, 19 nt, Artificial Sequence
  Description of Artificial Sequence: Synthetic oligonucleotide
aacucaucuggagugggga

SEQ ID NO: 1138411 - RNA, 19 nt, Artificial Sequence
  Description of Artificial Sequence: Synthetic oligonucleotide
gaagucgucagggaaguca

SEQ ID NO: 1138412 - RNA, 19 nt, Artificial Sequence
  Description of Artificial Sequence: Synthetic oligonucleotide
uucagaagagcccgaccca

SEQ ID NO: 1138413 - RNA, 19 nt, Artificial Sequence
  Description of Artificial Sequence: Synthetic oligonucleotide
agcgugggucaucagguuc

SEQ ID NO: 1138414 - RNA, 19 nt, Artificial Sequence
  Description of Artificial Sequence: Synthetic oligonucleotide
ugcugaagucgucagggaa

SEQ ID NO: 1138415 - RNA, 19 nt, Artificial Sequence
  Description of Artificial Sequence: Synthetic oligonucleotide
gggaguaggcauuuccugg

SEQ ID NO: 1138416 - RNA, 19 nt, Artificial Sequence
  Description of Artificial Sequence: Synthetic oligonucleotide
uggauucagucccaucaga

SEQ ID NO: 1138417 - RNA, 19 nt, Artificial Sequence
  Description of Artificial Sequence: Synthetic oligonucleotide
augucauuaugugaccaag

SEQ ID NO: 1138418 - RNA, 19 nt, Artificial Sequence
  Description of Artificial Sequence: Synthetic oligonucleotide
ucuggucugcugaagucgu

SEQ ID NO: 1138419 - RNA, 19 nt, Artificial Sequence
  Description of Artificial Sequence: Synthetic oligonucleotide
agaagagcccgacccauca

SEQ ID NO: 1138420 - RNA, 19 nt, Artificial Sequence
  Description of Artificial Sequence: Synthetic oligonucleotide
ugggguggaggucccaaag

SEQ ID NO: 1138421 - RNA, 19 nt, Artificial Sequence
  Description of Artificial Sequence: Synthetic oligonucleotide
gggagaagcguucaucucc

SEQ ID NO: 1138422 - RNA, 19 nt, Artificial Sequence
  Description of Artificial Sequence: Synthetic oligonucleotide
uggggaguaggcauuuccu

SEQ ID NO: 1138423 - RNA, 19 nt, Artificial Sequence
  Description of Artificial Sequence: Synthetic oligonucleotide
uuccucgguccuccgaggg

SEQ ID NO: 1138424 - RNA, 19 nt, Artificial Sequence
  Description of Artificial Sequence: Synthetic oligonucleotide
uucgaagcgagggaacuca

SEQ ID NO: 1138425 - RNA, 19 nt, Artificial Sequence
  Description of Artificial Sequence: Synthetic oligonucleotide
aguuguuggaaugaucaaa

SEQ ID NO: 1138426 - RNA, 19 nt, Artificial Sequence
  Description of Artificial Sequence: Synthetic oligonucleotide
acgccugucaggaggaccc

SEQ ID NO: 1138427 - RNA, 19 nt, Artificial Sequence
  Description of Artificial Sequence: Synthetic oligonucleotide
ucgagaagaugaacugcug

SEQ ID NO: 1138428 - RNA, 19 nt, Artificial Sequence
  Description of Artificial Sequence: Synthetic oligonucleotide
uuguuggaaugaucaaaac

SEQ ID NO: 1138429 - RNA, 19 nt, Artificial Sequence
  Description of Artificial Sequence: Synthetic oligonucleotide
aucugcugucaacauccac

SEQ ID NO: 1138430 - RNA, 19 nt, Artificial Sequence
  Description of Artificial Sequence: Synthetic oligonucleotide
guuguuggaaugaucaaaa

SEQ ID NO: 1138431 - RNA, 19 nt, Artificial Sequence
  Description of Artificial Sequence: Synthetic oligonucleotide
guucauguuggauugccaa

SEQ ID NO: 1138432 - RNA, 19 nt, Artificial Sequence
  Description of Artificial Sequence: Synthetic oligonucleotide
ucacgaaaauguucaugac

SEQ ID NO: 1138433 - RNA, 19 nt, Artificial Sequence
  Description of Artificial Sequence: Synthetic oligonucleotide
uucauguuggauugccaau

SEQ ID NO: 1138434 - RNA, 19 nt, Artificial Sequence
  Description of Artificial Sequence: Synthetic oligonucleotide
agagcccgacccaucaugc

SEQ ID NO: 1138435 - RNA, 19 nt, Artificial Sequence
  Description of Artificial Sequence: Synthetic oligonucleotide
ucagucccaucagaggucc

SEQ ID NO: 1138436 - RNA, 19 nt, Artificial Sequence
  Description of Artificial Sequence: Synthetic oligonucleotide
gcugucaacauccacaugu

SEQ ID NO: 1138437 - RNA, 19 nt, Artificial Sequence
  Description of Artificial Sequence: Synthetic oligonucleotide
acggccuucauugucguug

SEQ ID NO: 1138438 - RNA, 19 nt, Artificial Sequence
  Description of Artificial Sequence: Synthetic oligonucleotide
ucucgguuuccaucccagg

SEQ ID NO: 1138439 - RNA, 19 nt, Artificial Sequence
  Description of Artificial Sequence: Synthetic oligonucleotide
aucaaaaccuggccucucu

SEQ ID NO: 1138440 - RNA, 19 nt, Artificial Sequence
  Description of Artificial Sequence: Synthetic oligonucleotide
agggccaugucccagcaau

SEQ ID NO: 1138441 - RNA, 19 nt, Artificial Sequence
  Description of Artificial Sequence: Synthetic oligonucleotide
uuuucccgagguccuggag

SEQ ID NO: 1138442 - RNA, 19 nt, Artificial Sequence
  Description of Artificial Sequence: Synthetic oligonucleotide
uuccgaggugguagggagg

SEQ ID NO: 1138443 - RNA, 19 nt, Artificial Sequence
  Description of Artificial Sequence: Synthetic oligonucleotide
ucgaaagcgugggucauca

SEQ ID NO: 1138444 - RNA, 19 nt, Artificial Sequence
  Description of Artificial Sequence: Synthetic oligonucleotide
cuugaagugccucgccuug

SEQ ID NO: 1138445 - RNA, 19 nt, Artificial Sequence
  Description of Artificial Sequence: Synthetic oligonucleotide
aggaugaggcccucucauc

SEQ ID NO: 1138446 - RNA, 19 nt, Artificial Sequence
  Description of Artificial Sequence: Synthetic oligonucleotide
gaccucucauuuccugagg

SEQ ID NO: 1138447 - RNA, 19 nt, Artificial Sequence
  Description of Artificial Sequence: Synthetic oligonucleotide
aguucauguuacucccucu

SEQ ID NO: 1138448 - RNA, 19 nt, Artificial Sequence
  Description of Artificial Sequence: Synthetic oligonucleotide
auuuuggcacucucuggga

SEQ ID NO: 1138449 - RNA, 19 nt, Artificial Sequence
  Description of Artificial Sequence: Synthetic oligonucleotide
ucauguuggauugccaauu

SEQ ID NO: 1138450 - RNA, 19 nt, Artificial Sequence
  Description of Artificial Sequence: Synthetic oligonucleotide
uaucaugagccugcaauau

SEQ ID NO: 1138451 - RNA, 19 nt, Artificial Sequence
  Description of Artificial Sequence: Synthetic oligonucleotide
guggggaguaggcauuucc

SEQ ID NO: 1138452 - RNA, 19 nt, Artificial Sequence
  Description of Artificial Sequence: Synthetic oligonucleotide
caucacgaaaauguucaug

SEQ ID NO: 1138453 - RNA, 19 nt, Artificial Sequence
  Description of Artificial Sequence: Synthetic oligonucleotide
uucacauauccuccaugau

SEQ ID NO: 1138454 - RNA, 19 nt, Artificial Sequence
  Description of Artificial Sequence: Synthetic oligonucleotide
cuggugaauggccaucgug

SEQ ID NO: 1138455 - RNA, 19 nt, Artificial Sequence
  Description of Artificial Sequence: Synthetic oligonucleotide
agagccacgccugucagga

SEQ ID NO: 1138456 - RNA, 19 nt, Artificial Sequence
  Description of Artificial Sequence: Synthetic oligonucleotide
augagccugcaauauaguu

SEQ ID NO: 1138457 - RNA, 19 nt, Artificial Sequence
  Description of Artificial Sequence: Synthetic oligonucleotide
gaggagcgcucucugcuag

SEQ ID NO: 1138458 - RNA, 19 nt, Artificial Sequence
  Description of Artificial Sequence: Synthetic oligonucleotide
cucugcgcccucgaaagcg

SEQ ID NO: 1138459 - RNA, 19 nt, Artificial Sequence
  Description of Artificial Sequence: Synthetic oligonucleotide
caccccuugaagugccucg

SEQ ID NO: 1138460 - RNA, 19 nt, Artificial Sequence
  Description of Artificial Sequence: Synthetic oligonucleotide
agcuggugaauggccaucg

SEQ ID NO: 1138461 - RNA, 19 nt, Artificial Sequence
  Description of Artificial Sequence: Synthetic oligonucleotide
ggauucagucccaucagag

SEQ ID NO: 1138462 - RNA, 19 nt, Artificial Sequence
  Description of Artificial Sequence: Synthetic oligonucleotide
ucaaaaccuggccucucua

SEQ ID NO: 1138463 - RNA, 19 nt, Artificial Sequence
  Description of Artificial Sequence: Synthetic oligonucleotide
agcuggaacgcccggauuu

SEQ ID NO: 1138464 - RNA, 19 nt, Artificial Sequence
  Description of Artificial Sequence: Synthetic oligonucleotide
accacucugcucaugacgu

SEQ ID NO: 1138465 - RNA, 19 nt, Artificial Sequence
  Description of Artificial Sequence: Synthetic oligonucleotide
gugaauggccaucguggag

SEQ ID NO: 1138466 - RNA, 19 nt, Artificial Sequence
  Description of Artificial Sequence: Synthetic oligonucleotide
accuggccucucuaaucgc

SEQ ID NO: 1138467 - RNA, 19 nt, Artificial Sequence
  Description of Artificial Sequence: Synthetic oligonucleotide
uggucugcugaagucguca

SEQ ID NO: 1138468 - RNA, 19 nt, Artificial Sequence
  Description of Artificial Sequence: Synthetic oligonucleotide
cugucaacauccacauguc

SEQ ID NO: 1138469 - RNA, 19 nt, Artificial Sequence
  Description of Artificial Sequence: Synthetic oligonucleotide
guucaucucugugguaucc

SEQ ID NO: 1138470 - RNA, 19 nt, Artificial Sequence
  Description of Artificial Sequence: Synthetic oligonucleotide
gagcaucacgaaaauguuc

SEQ ID NO: 1138471 - RNA, 19 nt, Artificial Sequence
  Description of Artificial Sequence: Synthetic oligonucleotide
ucgucccuuuccucuuugg

SEQ ID NO: 1138472 - RNA, 19 nt, Artificial Sequence
  Description of Artificial Sequence: Synthetic oligonucleotide
agcccgacccaucaugcca

SEQ ID NO: 1138473 - RNA, 19 nt, Artificial Sequence
  Description of Artificial Sequence: Synthetic oligonucleotide
uguugaaccugagggccca

SEQ ID NO: 1138474 - RNA, 19 nt, Artificial Sequence
  Description of Artificial Sequence: Synthetic oligonucleotide
cuaucaugagccugcaaua

SEQ ID NO: 1138475 - RNA, 19 nt, Artificial Sequence
  Description of Artificial Sequence: Synthetic oligonucleotide
uccuucgaagcgagggaac

SEQ ID NO: 1138476 - RNA, 19 nt, Artificial Sequence
  Description of Artificial Sequence: Synthetic oligonucleotide
uucccuuaaccgguggcca

SEQ ID NO: 1138477 - RNA, 19 nt, Artificial Sequence
  Description of Artificial Sequence: Synthetic oligonucleotide
ggaccucucauuuccugag

SEQ ID NO: 1138478 - RNA, 19 nt, Artificial Sequence
  Description of Artificial Sequence: Synthetic oligonucleotide
aggagcgcucucugcuagc

SEQ ID NO: 1138479 - RNA, 19 nt, Artificial Sequence
  Description of Artificial Sequence: Synthetic oligonucleotide
augaggcccucucaucucu

SEQ ID NO: 1138480 - RNA, 19 nt, Artificial Sequence
  Description of Artificial Sequence: Synthetic oligonucleotide
ggaccaggaaagcucgucc

SEQ ID NO: 1138481 - RNA, 19 nt, Artificial Sequence
  Description of Artificial Sequence: Synthetic oligonucleotide
ucgcccucugagaucacgu

SEQ ID NO: 1138482 - RNA, 19 nt, Artificial Sequence
  Description of Artificial Sequence: Synthetic oligonucleotide
ugaggaccucucauuuccu

SEQ ID NO: 1138483 - RNA, 19 nt, Artificial Sequence
  Description of Artificial Sequence: Synthetic oligonucleotide
cucuaaucgccuccuuaug

SEQ ID NO: 1138484 - RNA, 19 nt, Artificial Sequence
  Description of Artificial Sequence: Synthetic oligonucleotide
gaaagcucgucccuuuccu

SEQ ID NO: 1138485 - RNA, 19 nt, Artificial Sequence
  Description of Artificial Sequence: Synthetic oligonucleotide
accccuugaagugccucgc

SEQ ID NO: 1138486 - RNA, 19 nt, Artificial Sequence
  Description of Artificial Sequence: Synthetic oligonucleotide
cucgagaagaugaacugcu

SEQ ID NO: 1138487 - RNA, 19 nt, Artificial Sequence
  Description of Artificial Sequence: Synthetic oligonucleotide
ccaguuacugccacuccgg

SEQ ID NO: 1138488 - RNA, 19 nt, Artificial Sequence
  Description of Artificial Sequence: Synthetic oligonucleotide
ggcuccguucuucuaaagc

SEQ ID NO: 1138489 - RNA, 19 nt, Artificial Sequence
  Description of Artificial Sequence: Synthetic oligonucleotide
ucugcgcccucgaaagcgu

SEQ ID NO: 1138490 - RNA, 19 nt, Artificial Sequence
  Description of Artificial Sequence: Synthetic oligonucleotide
cucgguuuccaucccagga

SEQ ID NO: 1138491 - RNA, 19 nt, Artificial Sequence
  Description of Artificial Sequence: Synthetic oligonucleotide
aucaugagccugcaauaua

SEQ ID NO: 1138492 - RNA, 19 nt, Artificial Sequence
  Description of Artificial Sequence: Synthetic oligonucleotide
cuuaaccgguggccaaagc

SEQ ID NO: 1138493 - RNA, 19 nt, Artificial Sequence
  Description of Artificial Sequence: Synthetic oligonucleotide
auguuggauugccaauuau

SEQ ID NO: 1138494 - RNA, 19 nt, Artificial Sequence
  Description of Artificial Sequence: Synthetic oligonucleotide
agagcuggaacgcccggau

SEQ ID NO: 1138495 - RNA, 19 nt, Artificial Sequence
  Description of Artificial Sequence: Synthetic oligonucleotide
aggggcgcuuccgaggugg

SEQ ID NO: 1138496 - RNA, 19 nt, Artificial Sequence
  Description of Artificial Sequence: Synthetic oligonucleotide
caugucauuaugugaccaa

SEQ ID NO: 1138497 - RNA, 19 nt, Artificial Sequence
  Description of Artificial Sequence: Synthetic oligonucleotide
gaacgcccggauuuuggca

SEQ ID NO: 1138498 - RNA, 19 nt, Artificial Sequence
  Description of Artificial Sequence: Synthetic oligonucleotide
caggcucucgguuuccauc

SEQ ID NO: 1138499 - RNA, 19 nt, Artificial Sequence
  Description of Artificial Sequence: Synthetic oligonucleotide
ugacguuguucauguugga

SEQ ID NO: 1138500 - RNA, 19 nt, Artificial Sequence
  Description of Artificial Sequence: Synthetic oligonucleotide
ucaucucuugaggcgggug

SEQ ID NO: 1138501 - RNA, 19 nt, Artificial Sequence
  Description of Artificial Sequence: Synthetic oligonucleotide
gugagagccacgccuguca

SEQ ID NO: 1138502 - RNA, 19 nt, Artificial Sequence
  Description of Artificial Sequence: Synthetic oligonucleotide
auuaugugaccaagucaug

SEQ ID NO: 1138503 - RNA, 19 nt, Artificial Sequence
  Description of Artificial Sequence: Synthetic oligonucleotide
caugacgucucucuggggu

SEQ ID NO: 1138504 - RNA, 19 nt, Artificial Sequence
  Description of Artificial Sequence: Synthetic oligonucleotide
caguuacugccacuccggc

SEQ ID NO: 1138505 - RNA, 19 nt, Artificial Sequence
  Description of Artificial Sequence: Synthetic oligonucleotide
cguuguucauguuggauug

SEQ ID NO: 1138506 - RNA, 19 nt, Artificial Sequence
  Description of Artificial Sequence: Synthetic oligonucleotide
cccaguuacugccacuccg

SEQ ID NO: 1138507 - RNA, 19 nt, Artificial Sequence
  Description of Artificial Sequence: Synthetic oligonucleotide
ugauuuucccgagguccug

SEQ ID NO: 1138508 - RNA, 19 nt, Artificial Sequence
  Description of Artificial Sequence: Synthetic oligonucleotide
ggggaguaggcauuuccug

SEQ ID NO: 1138509 - RNA, 19 nt, Artificial Sequence
  Description of Artificial Sequence: Synthetic oligonucleotide
ucgucccucaaauucccuu

SEQ ID NO: 1138510 - RNA, 19 nt, Artificial Sequence
  Description of Artificial Sequence: Synthetic oligonucleotide
gcguuugucaggguggaag

SEQ ID NO: 1138511 - RNA, 19 nt, Artificial Sequence
  Description of Artificial Sequence: Synthetic oligonucleotide
cuuaugugccuggaacauc

SEQ ID NO: 1138512 - RNA, 19 nt, Artificial Sequence
  Description of Artificial Sequence: Synthetic oligonucleotide
gcaauauaguuucaaaguu

SEQ ID NO: 1138513 - RNA, 19 nt, Artificial Sequence
  Description of Artificial Sequence: Synthetic oligonucleotide
agucaucuggucugcugaa

SEQ ID NO: 1138514 - RNA, 19 nt, Artificial Sequence
  Description of Artificial Sequence: Synthetic oligonucleotide
ggaguaggcauuuccugga

SEQ ID NO: 1138515 - RNA, 19 nt, Artificial Sequence
  Description of Artificial Sequence: Synthetic oligonucleotide
cacccugggguggaggucc

SEQ ID NO: 1138516 - RNA, 19 nt, Artificial Sequence
  Description of Artificial Sequence: Synthetic oligonucleotide
caugccaggggcgcuuccg

SEQ ID NO: 1138517 - RNA, 19 nt, Artificial Sequence
  Description of Artificial Sequence: Synthetic oligonucleotide
uugugguaaggguccuccu

SEQ ID NO: 1138518 - RNA, 19 nt, Artificial Sequence
  Description of Artificial Sequence: Synthetic oligonucleotide
ggaacgcccggauuuuggc

SEQ ID NO: 1138519 - RNA, 19 nt, Artificial Sequence
  Description of Artificial Sequence: Synthetic oligonucleotide
gagaagcguucaucuccag

SEQ ID NO: 1138520 - RNA, 19 nt, Artificial Sequence
  Description of Artificial Sequence: Synthetic oligonucleotide
ugguaaggguccuccucgu

SEQ ID NO: 1138521 - RNA, 19 nt, Artificial Sequence
  Description of Artificial Sequence: Synthetic oligonucleotide
gucugcggccuucccaugc

SEQ ID NO: 1138522 - RNA, 19 nt, Artificial Sequence
  Description of Artificial Sequence: Synthetic oligonucleotide
cccucucaucucuugaggc

SEQ ID NO: 1138523 - RNA, 19 nt, Artificial Sequence
  Description of Artificial Sequence: Synthetic oligonucleotide
cugcuagcuggugaauggc

SEQ ID NO: 1138524 - RNA, 19 nt, Artificial Sequence
  Description of Artificial Sequence: Synthetic oligonucleotide
uuccuccuucgaagcgagg

SEQ ID NO: 1138525 - RNA, 19 nt, Artificial Sequence
  Description of Artificial Sequence: Synthetic oligonucleotide
ggcgcuuccgaggugguag

SEQ ID NO: 1138526 - RNA, 19 nt, Artificial Sequence
  Description of Artificial Sequence: Synthetic oligonucleotide
cuaccgaccccucccacca

SEQ ID NO: 1138527 - RNA, 19 nt, Artificial Sequence
  Description of Artificial Sequence: Synthetic oligonucleotide
caggaggaccccugcaguc

SEQ ID NO: 1138528 - RNA, 19 nt, Artificial Sequence
  Description of Artificial Sequence: Synthetic oligonucleotide
ggugaauggccaucgugga

SEQ ID NO: 1138529 - RNA, 19 nt, Artificial Sequence
  Description of Artificial Sequence: Synthetic oligonucleotide
gcuccguucuucuaaagcu

SEQ ID NO: 1138530 - RNA, 19 nt, Artificial Sequence
  Description of Artificial Sequence: Synthetic oligonucleotide
agggcggggagcaucacga

SEQ ID NO: 1138531 - RNA, 19 nt, Artificial Sequence
  Description of Artificial Sequence: Synthetic oligonucleotide
gagcccgacccaucaugcc

SEQ ID NO: 1138532 - RNA, 19 nt, Artificial Sequence
  Description of Artificial Sequence: Synthetic oligonucleotide
ucucugugguauccaucau

SEQ ID NO: 1138533 - RNA, 19 nt, Artificial Sequence
  Description of Artificial Sequence: Synthetic oligonucleotide
gguggccaaucauuauccc

SEQ ID NO: 1138534 - RNA, 19 nt, Artificial Sequence
  Description of Artificial Sequence: Synthetic oligonucleotide
augacgucucucugggguu

SEQ ID NO: 1138535 - RNA, 19 nt, Artificial Sequence
  Description of Artificial Sequence: Synthetic oligonucleotide
ucccuuaaccgguggccaa

SEQ ID NO: 1138536 - RNA, 19 nt, Artificial Sequence
  Description of Artificial Sequence: Synthetic oligonucleotide
ggauugccaauuauuucac

SEQ ID NO: 1138537 - RNA, 19 nt, Artificial Sequence
  Description of Artificial Sequence: Synthetic oligonucleotide
gaccaagucauggcccuca

SEQ ID NO: 1138538 - RNA, 19 nt, Artificial Sequence
  Description of Artificial Sequence: Synthetic oligonucleotide
ucgaagcgagggaacucau

SEQ ID NO: 1138539 - RNA, 19 nt, Artificial Sequence
  Description of Artificial Sequence: Synthetic oligonucleotide
acagggcuaucaugagccu

SEQ ID NO: 1138540 - RNA, 19 nt, Artificial Sequence
  Description of Artificial Sequence: Synthetic oligonucleotide
cuaccccaguuacugccac

SEQ ID NO: 1138541 - RNA, 19 nt, Artificial Sequence
  Description of Artificial Sequence: Synthetic oligonucleotide
ucccucuaccccaguuacu

SEQ ID NO: 1138542 - RNA, 19 nt, Artificial Sequence
  Description of Artificial Sequence: Synthetic oligonucleotide
gagcaggacccugauuuuc

SEQ ID NO: 1138543 - RNA, 19 nt, Artificial Sequence
  Description of Artificial Sequence: Synthetic oligonucleotide
cucgcccucugagaucacg

SEQ ID NO: 1138544 - RNA, 19 nt, Artificial Sequence
  Description of Artificial Sequence: Synthetic oligonucleotide
cacggccucgcccucugag

SEQ ID NO: 1138545 - RNA, 19 nt, Artificial Sequence
  Description of Artificial Sequence: Synthetic oligonucleotide
aggaccccugcaguccugg

SEQ ID NO: 1138546 - RNA, 19 nt, Artificial Sequence
  Description of Artificial Sequence: Synthetic oligonucleotide
gugaucagggcggggagca

SEQ ID NO: 1138547 - RNA, 19 nt, Artificial Sequence
  Description of Artificial Sequence: Synthetic oligonucleotide
cuucgaagcgagggaacuc

SEQ ID NO: 1138548 - RNA, 19 nt, Artificial Sequence
  Description of Artificial Sequence: Synthetic oligonucleotide
agaggagcgcucucugcua

SEQ ID NO: 1138549 - RNA, 19 nt, Artificial Sequence
  Description of Artificial Sequence: Synthetic oligonucleotide
cucucuaaucgccuccuua

SEQ ID NO: 1138550 - RNA, 19 nt, Artificial Sequence
  Description of Artificial Sequence: Synthetic oligonucleotide
cacgccugucaggaggacc

SEQ ID NO: 1138551 - RNA, 19 nt, Artificial Sequence
  Description of Artificial Sequence: Synthetic oligonucleotide
cggauuuuggcacucucug

SEQ ID NO: 1138552 - RNA, 19 nt, Artificial Sequence
  Description of Artificial Sequence: Synthetic oligonucleotide
ccucgagaagaugaacugc

SEQ ID NO: 1138553 - RNA, 19 nt, Artificial Sequence
  Description of Artificial Sequence: Synthetic oligonucleotide
gguagggaggccauaucca

SEQ ID NO: 1138554 - RNA, 19 nt, Artificial Sequence
  Description of Artificial Sequence: Synthetic oligonucleotide
ugacgucucucugggguuc

SEQ ID NO: 1138555 - RNA, 19 nt, Artificial Sequence
  Description of Artificial Sequence: Synthetic oligonucleotide
aguugaaagucagcccauu

SEQ ID NO: 1138556 - RNA, 19 nt, Artificial Sequence
  Description of Artificial Sequence: Synthetic oligonucleotide
aaccgguggccaaagcguu

SEQ ID NO: 1138557 - RNA, 19 nt, Artificial Sequence
  Description of Artificial Sequence: Synthetic oligonucleotide
uucccgggagaagcguuca

SEQ ID NO: 1138558 - RNA, 19 nt, Artificial Sequence
  Description of Artificial Sequence: Synthetic oligonucleotide
ggacccugauuuucccgag

SEQ ID NO: 1138559 - RNA, 19 nt, Artificial Sequence
  Description of Artificial Sequence: Synthetic oligonucleotide
ggagaagcguucaucucca

SEQ ID NO: 1138560 - RNA, 19 nt, Artificial Sequence
  Description of Artificial Sequence: Synthetic oligonucleotide
agucgucagggaagucagg

SEQ ID NO: 1138561 - RNA, 19 nt, Artificial Sequence
  Description of Artificial Sequence: Synthetic oligonucleotide
cgacccaucaugccagggg

SEQ ID NO: 1138562 - RNA, 19 nt, Artificial Sequence
  Description of Artificial Sequence: Synthetic oligonucleotide
gucccucaaauucccuuaa

SEQ ID NO: 1138563 - RNA, 19 nt, Artificial Sequence
  Description of Artificial Sequence: Synthetic oligonucleotide
uuacucccucuaccccagu

SEQ ID NO: 1138564 - RNA, 19 nt, Artificial Sequence
  Description of Artificial Sequence: Synthetic oligonucleotide
cucuaugaucaggugggaa

SEQ ID NO: 1138565 - RNA, 19 nt, Artificial Sequence
  Description of Artificial Sequence: Synthetic oligonucleotide
ggagagaagaggagcgcuc

SEQ ID NO: 1138566 - RNA, 19 nt, Artificial Sequence
  Description of Artificial Sequence: Synthetic oligonucleotide
cugcggccuucccaugccc

SEQ ID NO: 1138567 - RNA, 19 nt, Artificial Sequence
  Description of Artificial Sequence: Synthetic oligonucleotide
caugaucugcugucaacau

SEQ ID NO: 1138568 - RNA, 19 nt, Artificial Sequence
  Description of Artificial Sequence: Synthetic oligonucleotide
ggugaucagggcggggagc

SEQ ID NO: 1138569 - RNA, 19 nt, Artificial Sequence
  Description of Artificial Sequence: Synthetic oligonucleotide
cuggucugcugaagucguc

SEQ ID NO: 1138570 - RNA, 19 nt, Artificial Sequence
  Description of Artificial Sequence: Synthetic oligonucleotide
gguauccaucaugaugguc

SEQ ID NO: 1138571 - RNA, 19 nt, Artificial Sequence
  Description of Artificial Sequence: Synthetic oligonucleotide
gagccacgccugucaggag

SEQ ID NO: 1138572 - RNA, 19 nt, Artificial Sequence
  Description of Artificial Sequence: Synthetic oligonucleotide
cuccuucgaagcgagggaa

SEQ ID NO: 1138573 - RNA, 19 nt, Artificial Sequence
  Description of Artificial Sequence: Synthetic oligonucleotide
cguugcaugccacccuggg

SEQ ID NO: 1138574 - RNA, 19 nt, Artificial Sequence
  Description of Artificial Sequence: Synthetic oligonucleotide
agggcccaacauggauccc

SEQ ID NO: 1138575 - RNA, 19 nt, Artificial Sequence
  Description of Artificial Sequence: Synthetic oligonucleotide
cuccaugaucugcugucaa

SEQ ID NO: 1138576 - RNA, 19 nt, Artificial Sequence
  Description of Artificial Sequence: Synthetic oligonucleotide
uuggagggccagaguucau

SEQ ID NO: 1138577 - RNA, 19 nt, Artificial Sequence
  Description of Artificial Sequence: Synthetic oligonucleotide
ugaccaagucauggcccuc

SEQ ID NO: 1138578 - RNA, 19 nt, Artificial Sequence
  Description of Artificial Sequence: Synthetic oligonucleotide
cugcgcccucgaaagcgug

SEQ ID NO: 1138579 - RNA, 19 nt, Artificial Sequence
  Description of Artificial Sequence: Synthetic oligonucleotide
gaguaggcauuuccuggau

SEQ ID NO: 1138580 - RNA, 19 nt, Artificial Sequence
  Description of Artificial Sequence: Synthetic oligonucleotide
gccaugucccagcaaucca

SEQ ID NO: 1138581 - RNA, 19 nt, Artificial Sequence
  Description of Artificial Sequence: Synthetic oligonucleotide
ucccgggagaagcguucau

SEQ ID NO: 1138582 - RNA, 19 nt, Artificial Sequence
  Description of Artificial Sequence: Synthetic oligonucleotide
ggggagcaucacgaaaaug

SEQ ID NO: 1138583 - RNA, 19 nt, Artificial Sequence
  Description of Artificial Sequence: Synthetic oligonucleotide
gguggcacggccucgcccu

SEQ ID NO: 1138584 - RNA, 19 nt, Artificial Sequence
  Description of Artificial Sequence: Synthetic oligonucleotide
gcgcuuccgaggugguagg

SEQ ID NO: 1138585 - RNA, 19 nt, Artificial Sequence
  Description of Artificial Sequence: Synthetic oligonucleotide
gcggggagcaucacgaaaa

SEQ ID NO: 1138586 - RNA, 19 nt, Artificial Sequence
  Description of Artificial Sequence: Synthetic oligonucleotide
ccacgcaguuccuggggag

SEQ ID NO: 1138587 - RNA, 19 nt, Artificial Sequence
  Description of Artificial Sequence: Synthetic oligonucleotide
caugcucggggccaccacu

SEQ ID NO: 1138588 - RNA, 19 nt, Artificial Sequence
  Description of Artificial Sequence: Synthetic oligonucleotide
cugagggcccacgcaguuc

SEQ ID NO: 1138589 - RNA, 19 nt, Artificial Sequence
  Description of Artificial Sequence: Synthetic oligonucleotide
gguuuccaucccaggaguc

SEQ ID NO: 1138590 - RNA, 19 nt, Artificial Sequence
  Description of Artificial Sequence: Synthetic oligonucleotide
aggcggguggccaaucauu

SEQ ID NO: 1138591 - RNA, 19 nt, Artificial Sequence
  Description of Artificial Sequence: Synthetic oligonucleotide
ccguucuucuaaagcuuuc

SEQ ID NO: 1138592 - RNA, 19 nt, Artificial Sequence
  Description of Artificial Sequence: Synthetic oligonucleotide
gggcuccguucuucuaaag

SEQ ID NO: 1138593 - RNA, 19 nt, Artificial Sequence
  Description of Artificial Sequence: Synthetic oligonucleotide
uugaggcggguggccaauc

SEQ ID NO: 1138594 - RNA, 19 nt, Artificial Sequence
  Description of Artificial Sequence: Synthetic oligonucleotide
ccuuaaccgguggccaaag

SEQ ID NO: 1138595 - RNA, 19 nt, Artificial Sequence
  Description of Artificial Sequence: Synthetic oligonucleotide
gaggcggguggccaaucau

SEQ ID NO: 1138596 - RNA, 19 nt, Artificial Sequence
  Description of Artificial Sequence: Synthetic oligonucleotide
accugagggcccacgcagu

SEQ ID NO: 1138597 - RNA, 19 nt, Artificial Sequence
  Description of Artificial Sequence: Synthetic oligonucleotide
ggcucucgguuuccauccc

SEQ ID NO: 1138598 - RNA, 19 nt, Artificial Sequence
  Description of Artificial Sequence: Synthetic oligonucleotide
gaggaccccugcaguccug

SEQ ID NO: 1138599 - RNA, 19 nt, Artificial Sequence
  Description of Artificial Sequence: Synthetic oligonucleotide
ccccucgagaagaugaacu

SEQ ID NO: 1138600 - RNA, 19 nt, Artificial Sequence
  Description of Artificial Sequence: Synthetic oligonucleotide
guugaaccugagggcccac

SEQ ID NO: 1138601 - RNA, 19 nt, Artificial Sequence
  Description of Artificial Sequence: Synthetic oligonucleotide
ucgguccuccgaggggccu

SEQ ID NO: 1138602 - RNA, 19 nt, Artificial Sequence
  Description of Artificial Sequence: Synthetic oligonucleotide
ccccgcaucuccugaggac

SEQ ID NO: 1138603 - RNA, 19 nt, Artificial Sequence
  Description of Artificial Sequence: Synthetic oligonucleotide
ccguugcaugccacccugg

SEQ ID NO: 1138604 - RNA, 19 nt, Artificial Sequence
  Description of Artificial Sequence: Synthetic oligonucleotide
ggggcuccguucuucuaaa

SEQ ID NO: 1138605 - RNA, 19 nt, Artificial Sequence
  Description of Artificial Sequence: Synthetic oligonucleotide
ccuccuucgaagcgaggga

SEQ ID NO: 1138606 - RNA, 19 nt, Artificial Sequence
  Description of Artificial Sequence: Synthetic oligonucleotide
ccgguggccaaagcguuug

SEQ ID NO: 1138607 - RNA, 19 nt, Artificial Sequence
  Description of Artificial Sequence: Synthetic oligonucleotide
ccccaguuacugccacucc

SEQ ID NO: 1138608 - RNA, 19 nt, Artificial Sequence
  Description of Artificial Sequence: Synthetic oligonucleotide
ucagggcggggagcaucac

SEQ ID NO: 1138609 - RNA, 19 nt, Artificial Sequence
  Description of Artificial Sequence: Synthetic oligonucleotide
cgaagcgagggaacucauc

SEQ ID NO: 1138610 - RNA, 19 nt, Artificial Sequence
  Description of Artificial Sequence: Synthetic oligonucleotide
uggcacggccucgcccucu

SEQ ID NO: 1138611 - RNA, 19 nt, Artificial Sequence
  Description of Artificial Sequence: Synthetic oligonucleotide
acgucucucugggguucug

SEQ ID NO: 1138612 - RNA, 19 nt, Artificial Sequence
  Description of Artificial Sequence: Synthetic oligonucleotide
ggcccucacagggcuauca

SEQ ID NO: 1138613 - RNA, 19 nt, Artificial Sequence
  Description of Artificial Sequence: Synthetic oligonucleotide
gguccuccgaggggccucc

SEQ ID NO: 1138614 - RNA, 19 nt, Artificial Sequence
  Description of Artificial Sequence: Synthetic oligonucleotide
gggagggcccaacauggau

SEQ ID NO: 1138615 - RNA, 19 nt, Artificial Sequence
  Description of Artificial Sequence: Synthetic oligonucleotide
gacgucucucugggguucu

SEQ ID NO: 1138616 - RNA, 19 nt, Artificial Sequence
  Description of Artificial Sequence: Synthetic oligonucleotide
cauggcccucacagggcua

SEQ ID NO: 1138617 - RNA, 19 nt, Artificial Sequence
  Description of Artificial Sequence: Synthetic oligonucleotide
accgguggccaaagcguuu

SEQ ID NO: 1138618 - RNA, 19 nt, Artificial Sequence
  Description of Artificial Sequence: Synthetic oligonucleotide
gagcuggaacgcccggauu

SEQ ID NO: 1138619 - RNA, 19 nt, Artificial Sequence
  Description of Artificial Sequence: Synthetic oligonucleotide
ccgacccaucaugccaggg

SEQ ID NO: 1138620 - RNA, 19 nt, Artificial Sequence
  Description of Artificial Sequence: Synthetic oligonucleotide
ccucuuggauucaguccca

SEQ ID NO: 1138621 - RNA, 19 nt, Artificial Sequence
  Description of Artificial Sequence: Synthetic oligonucleotide
gggcccaacauggaucccu

SEQ ID NO: 1138622 - RNA, 19 nt, Artificial Sequence
  Description of Artificial Sequence: Synthetic oligonucleotide
cgucccucaaauucccuua

SEQ ID NO: 1138623 - RNA, 19 nt, Artificial Sequence
  Description of Artificial Sequence: Synthetic oligonucleotide
gcaucacgaaaauguucau

SEQ ID NO: 1138624 - RNA, 19 nt, Artificial Sequence
  Description of Artificial Sequence: Synthetic oligonucleotide
cgugggguggcacggccuc

SEQ ID NO: 1138625 - RNA, 19 nt, Artificial Sequence
  Description of Artificial Sequence: Synthetic oligonucleotide
ccuccuuaugugccuggaa

SEQ ID NO: 1138626 - RNA, 19 nt, Artificial Sequence
  Description of Artificial Sequence: Synthetic oligonucleotide
ccuuaugugccuggaacau

SEQ ID NO: 1138627 - RNA, 19 nt, Artificial Sequence
  Description of Artificial Sequence: Synthetic oligonucleotide
caggaccaggaaagcucgu

SEQ ID NO: 1138628 - RNA, 19 nt, Artificial Sequence
  Description of Artificial Sequence: Synthetic oligonucleotide
ggccagaguucauguuacu

SEQ ID NO: 1138629 - RNA, 19 nt, Artificial Sequence
  Description of Artificial Sequence: Synthetic oligonucleotide
cgugggucaucagguuccc

SEQ ID NO: 1138630 - RNA, 19 nt, Artificial Sequence
  Description of Artificial Sequence: Synthetic oligonucleotide
cucaucucuugaggcgggu

SEQ ID NO: 1138631 - RNA, 19 nt, Artificial Sequence
  Description of Artificial Sequence: Synthetic oligonucleotide
gcuggugaauggccaucgu

SEQ ID NO: 1138632 - RNA, 19 nt, Artificial Sequence
  Description of Artificial Sequence: Synthetic oligonucleotide
ccuggaacaucuugacguu

SEQ ID NO: 1138633 - RNA, 19 nt, Artificial Sequence
  Description of Artificial Sequence: Synthetic oligonucleotide
cccugcauuccucuuggau

SEQ ID NO: 1138634 - RNA, 19 nt, Artificial Sequence
  Description of Artificial Sequence: Synthetic oligonucleotide
gccucucuaaucgccuccu

SEQ ID NO: 1138635 - RNA, 19 nt, Artificial Sequence
  Description of Artificial Sequence: Synthetic oligonucleotide
gggugagagccacgccugu

SEQ ID NO: 1138636 - RNA, 19 nt, Artificial Sequence
  Description of Artificial Sequence: Synthetic oligonucleotide
gggcggggagcaucacgaa

SEQ ID NO: 1138637 - RNA, 19 nt, Artificial Sequence
  Description of Artificial Sequence: Synthetic oligonucleotide
cccuuaaccgguggccaaa

SEQ ID NO: 1138638 - RNA, 19 nt, Artificial Sequence
  Description of Artificial Sequence: Synthetic oligonucleotide
gcggguggccaaucauuau

SEQ ID NO: 1138639 - RNA, 19 nt, Artificial Sequence
  Description of Artificial Sequence: Synthetic oligonucleotide
gcccugcauuccucuugga

SEQ ID NO: 1138640 - RNA, 19 nt, Artificial Sequence
  Description of Artificial Sequence: Synthetic oligonucleotide
gcccaacauggaucccugu

SEQ ID NO: 1138641 - RNA, 19 nt, Artificial Sequence
  Description of Artificial Sequence: Synthetic oligonucleotide
ccgcaucuccugaggaccu

SEQ ID NO: 1138642 - RNA, 19 nt, Artificial Sequence
  Description of Artificial Sequence: Synthetic oligonucleotide
ccacgccugucaggaggac

SEQ ID NO: 1138643 - RNA, 19 nt, Artificial Sequence
  Description of Artificial Sequence: Synthetic oligonucleotide
ccaaagcguuugucagggu

SEQ ID NO: 1138644 - RNA, 19 nt, Artificial Sequence
  Description of Artificial Sequence: Synthetic oligonucleotide
ccugagggcccacgcaguu

SEQ ID NO: 1138645 - RNA, 19 nt, Artificial Sequence
  Description of Artificial Sequence: Synthetic oligonucleotide
ccaucaugccaggggcgcu

SEQ ID NO: 1138646 - RNA, 19 nt, Artificial Sequence
  Description of Artificial Sequence: Synthetic oligonucleotide
cggggagcaucacgaaaau

SEQ ID NO: 1138647 - RNA, 19 nt, Artificial Sequence
  Description of Artificial Sequence: Synthetic oligonucleotide
gggccaccaaaagguucau

SEQ ID NO: 1138648 - RNA, 19 nt, Artificial Sequence
  Description of Artificial Sequence: Synthetic oligonucleotide
ggggcgcuuccgagguggu

SEQ ID NO: 1138649 - RNA, 19 nt, Artificial Sequence
  Description of Artificial Sequence: Synthetic oligonucleotide
ggccuccuugggccuccau

SEQ ID NO: 1138650 - RNA, 19 nt, Artificial Sequence
  Description of Artificial Sequence: Synthetic oligonucleotide
auaauuaacauuccaaacc

SEQ ID NO: 1138651 - RNA, 19 nt, Artificial Sequence
  Description of Artificial Sequence: Synthetic oligonucleotide
aacucuagaaucuggaggc

SEQ ID NO: 1138652 - RNA, 19 nt, Artificial Sequence
  Description of Artificial Sequence: Synthetic oligonucleotide
aacauuuugauucuucgcg

SEQ ID NO: 1138653 - RNA, 19 nt, Artificial Sequence
  Description of Artificial Sequence: Synthetic oligonucleotide
uauaucucuaaccaggucc

SEQ ID NO: 1138654 - RNA, 19 nt, Artificial Sequence
  Description of Artificial Sequence: Synthetic oligonucleotide
acucuuagaaaauggagcc

SEQ ID NO: 1138655 - RNA, 19 nt, Artificial Sequence
  Description of Artificial Sequence: Synthetic oligonucleotide
uaagaaucggucaauagcc

SEQ ID NO: 1138656 - RNA, 19 nt, Artificial Sequence
  Description of Artificial Sequence: Synthetic oligonucleotide
aaacaauaucuaucgaugg

SEQ ID NO: 1138657 - RNA, 19 nt, Artificial Sequence
  Description of Artificial Sequence: Synthetic oligonucleotide
ugaaaugaaaccauuguac

SEQ ID NO: 1138658 - RNA, 19 nt, Artificial Sequence
  Description of Artificial Sequence: Synthetic oligonucleotide
agaaucuggaggcaaagcc

SEQ ID NO: 1138659 - RNA, 19 nt, Artificial Sequence
  Description of Artificial Sequence: Synthetic oligonucleotide
ucggcaauaauuaacauuc

SEQ ID NO: 1138660 - RNA, 19 nt, Artificial Sequence
  Description of Artificial Sequence: Synthetic oligonucleotide
uaacucuagaaucuggagg

SEQ ID NO: 1138661 - RNA, 19 nt, Artificial Sequence
  Description of Artificial Sequence: Synthetic oligonucleotide
uguacaaacaauaucuauc

SEQ ID NO: 1138662 - RNA, 19 nt, Artificial Sequence
  Description of Artificial Sequence: Synthetic oligonucleotide
agguauuuaaaauucagga

SEQ ID NO: 1138663 - RNA, 19 nt, Artificial Sequence
  Description of Artificial Sequence: Synthetic oligonucleotide
uugaccuugagauauguug

SEQ ID NO: 1138664 - RNA, 19 nt, Artificial Sequence
  Description of Artificial Sequence: Synthetic oligonucleotide
agaacugaccgccugaggg

SEQ ID NO: 1138665 - RNA, 19 nt, Artificial Sequence
  Description of Artificial Sequence: Synthetic oligonucleotide
agaggagagagagagaggc

SEQ ID NO: 1138666 - RNA, 19 nt, Artificial Sequence
  Description of Artificial Sequence: Synthetic oligonucleotide
ucgauagccgccaugaccc

SEQ ID NO: 1138667 - RNA, 19 nt, Artificial Sequence
  Description of Artificial Sequence: Synthetic oligonucleotide
  modified_base (3)..(3): a, c, u, g, unknown or other
cunagaaacucuuagaaaa

SEQ ID NO: 1138668 - RNA, 19 nt, Artificial Sequence
  Description of Artificial Sequence: Synthetic oligonucleotide
caaacaauaucuaucgaug

SEQ ID NO: 1138669 - RNA, 19 nt, Artificial Sequence
  Description of Artificial Sequence: Synthetic oligonucleotide
ugagccacacuucucaucc

SEQ ID NO: 1138670 - RNA, 19 nt, Artificial Sequence
  Description of Artificial Sequence: Synthetic oligonucleotide
aaaacuaaugacagccugg

SEQ ID NO: 1138671 - RNA, 19 nt, Artificial Sequence
  Description of Artificial Sequence: Synthetic oligonucleotide
aaccauuguacauuguaca

SEQ ID NO: 1138672 - RNA, 19 nt, Artificial Sequence
  Description of Artificial Sequence: Synthetic oligonucleotide
aaacuaaugacagccuggg

SEQ ID NO: 1138673 - RNA, 19 nt, Artificial Sequence
  Description of Artificial Sequence: Synthetic oligonucleotide
agcauugcuaacuucaaca

SEQ ID NO: 1138674 - RNA, 19 nt, Artificial Sequence
  Description of Artificial Sequence: Synthetic oligonucleotide
  modified_base (7)..(7): a, c, u, g, unknown or other
uccccunagaaacucuuag

SEQ ID NO: 1138675 - RNA, 19 nt, Artificial Sequence
  Description of Artificial Sequence: Synthetic oligonucleotide
agagagaggagagagagag

SEQ ID NO: 1138676 - RNA, 19 nt, Artificial Sequence
  Description of Artificial Sequence: Synthetic oligonucleotide
augaugggcagucaccacc

SEQ ID NO: 1138677 - RNA, 19 nt, Artificial Sequence
  Description of Artificial Sequence: Synthetic oligonucleotide
ucuguggcggggaugaggg

SEQ ID NO: 1138678 - RNA, 19 nt, Artificial Sequence
  Description of Artificial Sequence: Synthetic oligonucleotide
aaacucuuagaaaauggag

SEQ ID NO: 1138679 - RNA, 19 nt, Artificial Sequence
  Description of Artificial Sequence: Synthetic oligonucleotide
gauauguuggaggucaugc

SEQ ID NO: 1138680 - RNA, 19 nt, Artificial Sequence
  Description of Artificial Sequence: Synthetic oligonucleotide
ucuuuauaucucuaaccag

SEQ ID NO: 1138681 - RNA, 19 nt, Artificial Sequence
  Description of Artificial Sequence: Synthetic oligonucleotide
aaauagacagcucccuuga

SEQ ID NO: 1138682 - RNA, 19 nt, Artificial Sequence
  Description of Artificial Sequence: Synthetic oligonucleotide
agaacacaguucuucauag

SEQ ID NO: 1138683 - RNA, 19 nt, Artificial Sequence
  Description of Artificial Sequence: Synthetic oligonucleotide
ugagauauguuggagguca

SEQ ID NO: 1138684 - RNA, 19 nt, Artificial Sequence
  Description of Artificial Sequence: Synthetic oligonucleotide
cuaucgauggaauaaauaa

SEQ ID NO: 1138685 - RNA, 19 nt, Artificial Sequence
  Description of Artificial Sequence: Synthetic oligonucleotide
agagaggagagagagagag

SEQ ID NO: 1138686 - RNA, 19 nt, Artificial Sequence
  Description of Artificial Sequence: Synthetic oligonucleotide
ucuuagaaaauggagccug

SEQ ID NO: 1138687 - RNA, 19 nt, Artificial Sequence
  Description of Artificial Sequence: Synthetic oligonucleotide
uucuucgcgaaguauagga

SEQ ID NO: 1138688 - RNA, 19 nt, Artificial Sequence
  Description of Artificial Sequence: Synthetic oligonucleotide
gaccauuggcuccagagag

SEQ ID NO: 1138689 - RNA, 19 nt, Artificial Sequence
  Description of Artificial Sequence: Synthetic oligonucleotide
aacuuuuggcacuuguaga

SEQ ID NO: 1138690 - RNA, 19 nt, Artificial Sequence
  Description of Artificial Sequence: Synthetic oligonucleotide
acuaaugacagccugggua

SEQ ID NO: 1138691 - RNA, 19 nt, Artificial Sequence
  Description of Artificial Sequence: Synthetic oligonucleotide
gguaccguggaccucaucg

SEQ ID NO: 1138692 - RNA, 19 nt, Artificial Sequence
  Description of Artificial Sequence: Synthetic oligonucleotide
uuacccuaacucuagaauc

SEQ ID NO: 1138693 - RNA, 19 nt, Artificial Sequence
  Description of Artificial Sequence: Synthetic oligonucleotide
cuaaugacagccuggguac

SEQ ID NO: 1138694 - RNA, 19 nt, Artificial Sequence
  Description of Artificial Sequence: Synthetic oligonucleotide
ucggucaauagccuucagg

SEQ ID NO: 1138695 - RNA, 19 nt, Artificial Sequence
  Description of Artificial Sequence: Synthetic oligonucleotide
uccucggcaauaauuaaca

SEQ ID NO: 1138696 - RNA, 19 nt, Artificial Sequence
  Description of Artificial Sequence: Synthetic oligonucleotide
gagaaagguccacacgucg

SEQ ID NO: 1138697 - RNA, 19 nt, Artificial Sequence
  Description of Artificial Sequence: Synthetic oligonucleotide
agagagagaggagagagag

SEQ ID NO: 1138698 - RNA, 19 nt, Artificial Sequence
  Description of Artificial Sequence: Synthetic oligonucleotide
acuuguagauucguuaggg

SEQ ID NO: 1138699 - RNA, 19 nt, Artificial Sequence
  Description of Artificial Sequence: Synthetic oligonucleotide
ucauucuuggugacgagcu

SEQ ID NO: 1138700 - RNA, 19 nt, Artificial Sequence
  Description of Artificial Sequence: Synthetic oligonucleotide
ucgauggaauaaauaagug

SEQ ID NO: 1138701 - RNA, 19 nt, Artificial Sequence
  Description of Artificial Sequence: Synthetic oligonucleotide
aaaauggagccuggcagac

SEQ ID NO: 1138702 - RNA, 19 nt, Artificial Sequence
  Description of Artificial Sequence: Synthetic oligonucleotide
aauguuacccuaacucuag

SEQ ID NO: 1138703 - RNA, 19 nt, Artificial Sequence
  Description of Artificial Sequence: Synthetic oligonucleotide
uaggaaauagacagcuccc

SEQ ID NO: 1138704 - RNA, 19 nt, Artificial Sequence
  Description of Artificial Sequence: Synthetic oligonucleotide
ggaacauuuugauucuucg

SEQ ID NO: 1138705 - RNA, 19 nt, Artificial Sequence
  Description of Artificial Sequence: Synthetic oligonucleotide
agcccuuuaggccaugggg

SEQ ID NO: 1138706 - RNA, 19 nt, Artificial Sequence
  Description of Artificial Sequence: Synthetic oligonucleotide
auugcuaaguacaagaauu

SEQ ID NO: 1138707 - RNA, 19 nt, Artificial Sequence
  Description of Artificial Sequence: Synthetic oligonucleotide
uuguagauucguuagggau

SEQ ID NO: 1138708 - RNA, 19 nt, Artificial Sequence
  Description of Artificial Sequence: Synthetic oligonucleotide
  modified_base (2)..(2): a, c, u, g, unknown or other
unagaaacucuuagaaaau

SEQ ID NO: 1138709 - RNA, 19 nt, Artificial Sequence
  Description of Artificial Sequence: Synthetic oligonucleotide
ucucuaaccagguccucgg

SEQ ID NO: 1138710 - RNA, 19 nt, Artificial Sequence
  Description of Artificial Sequence: Synthetic oligonucleotide
uguguauguuguaaccucu

SEQ ID NO: 1138711 - RNA, 19 nt, Artificial Sequence
  Description of Artificial Sequence: Synthetic oligonucleotide
uauguuggaggucaugcau

SEQ ID NO: 1138712 - RNA, 19 nt, Artificial Sequence
  Description of Artificial Sequence: Synthetic oligonucleotide
aguuuuggggaaguuugcc

SEQ ID NO: 1138713 - RNA, 19 nt, Artificial Sequence
  Description of Artificial Sequence: Synthetic oligonucleotide
aucauucuuggugacgagc

SEQ ID NO: 1138714 - RNA, 19 nt, Artificial Sequence
  Description of Artificial Sequence: Synthetic oligonucleotide
ucgugcauguccaucauuc

SEQ ID NO: 1138715 - RNA, 19 nt, Artificial Sequence
  Description of Artificial Sequence: Synthetic oligonucleotide
uauguuguaaccucucauu

SEQ ID NO: 1138716 - RNA, 19 nt, Artificial Sequence
  Description of Artificial Sequence: Synthetic oligonucleotide
aucgauggaauaaauaagu

SEQ ID NO: 1138717 - RNA, 19 nt, Artificial Sequence
  Description of Artificial Sequence: Synthetic oligonucleotide
uugcaugagguauuuaaaa

SEQ ID NO: 1138718 - RNA, 19 nt, Artificial Sequence
  Description of Artificial Sequence: Synthetic oligonucleotide
aaggcuuuuguggccagcg

SEQ ID NO: 1138719 - RNA, 19 nt, Artificial Sequence
  Description of Artificial Sequence: Synthetic oligonucleotide
aucaacggcccauuccuac

SEQ ID NO: 1138720 - RNA, 19 nt, Artificial Sequence
  Description of Artificial Sequence: Synthetic oligonucleotide
auuaagugccagcacuuug

SEQ ID NO: 1138721 - RNA, 19 nt, Artificial Sequence
  Description of Artificial Sequence: Synthetic oligonucleotide
cuuagaaaauggagccugg

SEQ ID NO: 1138722 - RNA, 19 nt, Artificial Sequence
  Description of Artificial Sequence: Synthetic oligonucleotide
gauucuucgcgaaguauag

SEQ ID NO: 1138723 - RNA, 19 nt, Artificial Sequence
  Description of Artificial Sequence: Synthetic oligonucleotide
gauuuugcagucugaccgc

SEQ ID NO: 1138724 - RNA, 19 nt, Artificial Sequence
  Description of Artificial Sequence: Synthetic oligonucleotide
aaggucuuuauaucucuaa

SEQ ID NO: 1138725 - RNA, 19 nt, Artificial Sequence
  Description of Artificial Sequence: Synthetic oligonucleotide
auaucuaucgauggaauaa

SEQ ID NO: 1138726 - RNA, 19 nt, Artificial Sequence
  Description of Artificial Sequence: Synthetic oligonucleotide
cauuccuaccuucaggcac

SEQ ID NO: 1138727 - RNA, 19 nt, Artificial Sequence
  Description of Artificial Sequence: Synthetic oligonucleotide
uguaaccucucauuuccca

SEQ ID NO: 1138728 - RNA, 19 nt, Artificial Sequence
  Description of Artificial Sequence: Synthetic oligonucleotide
uggagugguagccucugag

SEQ ID NO: 1138729 - RNA, 19 nt, Artificial Sequence
  Description of Artificial Sequence: Synthetic oligonucleotide
acauuuugauucuucgcga

SEQ ID NO: 1138730 - RNA, 19 nt, Artificial Sequence
  Description of Artificial Sequence: Synthetic oligonucleotide
ucuaaccagguccucggca

SEQ ID NO: 1138731 - RNA, 19 nt, Artificial Sequence
  Description of Artificial Sequence: Synthetic oligonucleotide
uggguauuaagugccagca

SEQ ID NO: 1138732 - RNA, 19 nt, Artificial Sequence
  Description of Artificial Sequence: Synthetic oligonucleotide
uugcgcacuuucucgauag

SEQ ID NO: 1138733 - RNA, 19 nt, Artificial Sequence
  Description of Artificial Sequence: Synthetic oligonucleotide
ucaugcaucugguugcuuc

SEQ ID NO: 1138734 - RNA, 19 nt, Artificial Sequence
  Description of Artificial Sequence: Synthetic oligonucleotide
gaaguuugcccugggagcc

SEQ ID NO: 1138735 - RNA, 19 nt, Artificial Sequence
  Description of Artificial Sequence: Synthetic oligonucleotide
ugucaucaacuuuuggcac

SEQ ID NO: 1138736 - RNA, 19 nt, Artificial Sequence
  Description of Artificial Sequence: Synthetic oligonucleotide
uguggauguguguagccac

SEQ ID NO: 1138737 - RNA, 19 nt, Artificial Sequence
  Description of Artificial Sequence: Synthetic oligonucleotide
acaauaucuaucgauggaa

SEQ ID NO: 1138738 - RNA, 19 nt, Artificial Sequence
  Description of Artificial Sequence: Synthetic oligonucleotide
gucuuaagauucuguggcg

SEQ ID NO: 1138739 - RNA, 19 nt, Artificial Sequence
  Description of Artificial Sequence: Synthetic oligonucleotide
ugaugaugggcagucacca

SEQ ID NO: 1138740 - RNA, 19 nt, Artificial Sequence
  Description of Artificial Sequence: Synthetic oligonucleotide
uguuggaggucaugcaucu

SEQ ID NO: 1138741 - RNA, 19 nt, Artificial Sequence
  Description of Artificial Sequence: Synthetic oligonucleotide
uucgcgaaguauaggaaau

SEQ ID NO: 1138742 - RNA, 19 nt, Artificial Sequence
  Description of Artificial Sequence: Synthetic oligonucleotide
aagaugcagaacacaguuc

SEQ ID NO: 1138743 - RNA, 19 nt, Artificial Sequence
  Description of Artificial Sequence: Synthetic oligonucleotide
ucagggacggggaccauug

SEQ ID NO: 1138744 - RNA, 19 nt, Artificial Sequence
  Description of Artificial Sequence: Synthetic oligonucleotide
uucguuagggaugugucac

SEQ ID NO: 1138745 - RNA, 19 nt, Artificial Sequence
  Description of Artificial Sequence: Synthetic oligonucleotide
gaaggaagcacauuggauu

SEQ ID NO: 1138746 - RNA, 19 nt, Artificial Sequence
  Description of Artificial Sequence: Synthetic oligonucleotide
gguuuguggguauuaagug

SEQ ID NO: 1138747 - RNA, 19 nt, Artificial Sequence
  Description of Artificial Sequence: Synthetic oligonucleotide
gguauuuaaaauucaggaa

SEQ ID NO: 1138748 - RNA, 19 nt, Artificial Sequence
  Description of Artificial Sequence: Synthetic oligonucleotide
caucuuuuaccaaaaugga

SEQ ID NO: 1138749 - RNA, 19 nt, Artificial Sequence
  Description of Artificial Sequence: Synthetic oligonucleotide
agacagcucccuugaaaac

SEQ ID NO: 1138750 - RNA, 19 nt, Artificial Sequence
  Description of Artificial Sequence: Synthetic oligonucleotide
uguuacccuaacucuagaa

SEQ ID NO: 1138751 - RNA, 19 nt, Artificial Sequence
  Description of Artificial Sequence: Synthetic oligonucleotide
ggcaaaauugcuaaguaca

SEQ ID NO: 1138752 - RNA, 19 nt, Artificial Sequence
  Description of Artificial Sequence: Synthetic oligonucleotide
uugcuaaguacaagaauuu

SEQ ID NO: 1138753 - RNA, 19 nt, Artificial Sequence
  Description of Artificial Sequence: Synthetic oligonucleotide
  modified_base (13)..(13): a, c, u, g, unknown or other
gagcucuccccunagaaac

SEQ ID NO: 1138754 - RNA, 19 nt, Artificial Sequence
  Description of Artificial Sequence: Synthetic oligonucleotide
uuauaucucuaaccagguc

SEQ ID NO: 1138755 - RNA, 19 nt, Artificial Sequence
  Description of Artificial Sequence: Synthetic oligonucleotide
uuugauucuucgcgaagua

SEQ ID NO: 1138756 - RNA, 19 nt, Artificial Sequence
  Description of Artificial Sequence: Synthetic oligonucleotide
augguccccaucaacggcc

SEQ ID NO: 1138757 - RNA, 19 nt, Artificial Sequence
  Description of Artificial Sequence: Synthetic oligonucleotide
gucugaccgcuccacaugg

SEQ ID NO: 1138758 - RNA, 19 nt, Artificial Sequence
  Description of Artificial Sequence: Synthetic oligonucleotide
aggagagagagagaggcug

SEQ ID NO: 1138759 - RNA, 19 nt, Artificial Sequence
  Description of Artificial Sequence: Synthetic oligonucleotide
aucucuaaccagguccucg

SEQ ID NO: 1138760 - RNA, 19 nt, Artificial Sequence
  Description of Artificial Sequence: Synthetic oligonucleotide
auucguuagggauguguca

SEQ ID NO: 1138761 - RNA, 19 nt, Artificial Sequence
  Description of Artificial Sequence: Synthetic oligonucleotide
aggguuuguggguauuaag

SEQ ID NO: 1138762 - RNA, 19 nt, Artificial Sequence
  Description of Artificial Sequence: Synthetic oligonucleotide
gauucguuagggauguguc

SEQ ID NO: 1138763 - RNA, 19 nt, Artificial Sequence
  Description of Artificial Sequence: Synthetic oligonucleotide
cggucaauagccuucaggg

SEQ ID NO: 1138764 - RNA, 19 nt, Artificial Sequence
  Description of Artificial Sequence: Synthetic oligonucleotide
gauucuguggcggggauga

SEQ ID NO: 1138765 - RNA, 19 nt, Artificial Sequence
  Description of Artificial Sequence: Synthetic oligonucleotide
auguuguaaccucucauuu

SEQ ID NO: 1138766 - RNA, 19 nt, Artificial Sequence
  Description of Artificial Sequence: Synthetic oligonucleotide
cacuuguagauucguuagg

SEQ ID NO: 1138767 - RNA, 19 nt, Artificial Sequence
  Description of Artificial Sequence: Synthetic oligonucleotide
ggagagagagaggagagag

SEQ ID NO: 1138768 - RNA, 19 nt, Artificial Sequence
  Description of Artificial Sequence: Synthetic oligonucleotide
ucuucgcgaaguauaggaa

SEQ ID NO: 1138769 - RNA, 19 nt, Artificial Sequence
  Description of Artificial Sequence: Synthetic oligonucleotide
ugcccgacaugguucgugg

SEQ ID NO: 1138770 - RNA, 19 nt, Artificial Sequence
  Description of Artificial Sequence: Synthetic oligonucleotide
ucaacggcccauuccuacc

SEQ ID NO: 1138771 - RNA, 19 nt, Artificial Sequence
  Description of Artificial Sequence: Synthetic oligonucleotide
gugacgagcuguucucugg

SEQ ID NO: 1138772 - RNA, 19 nt, Artificial Sequence
  Description of Artificial Sequence: Synthetic oligonucleotide
cauggugguuaggagaaag

SEQ ID NO: 1138773 - RNA, 19 nt, Artificial Sequence
  Description of Artificial Sequence: Synthetic oligonucleotide
cuugagauauguuggaggu

SEQ ID NO: 1138774 - RNA, 19 nt, Artificial Sequence
  Description of Artificial Sequence: Synthetic oligonucleotide
aaccaugacaccgucugau

SEQ ID NO: 1138775 - RNA, 19 nt, Artificial Sequence
  Description of Artificial Sequence: Synthetic oligonucleotide
cuggucucggcucgaaccg

SEQ ID NO: 1138776 - RNA, 19 nt, Artificial Sequence
  Description of Artificial Sequence: Synthetic oligonucleotide
  modified_base (18)..(18): a, c, u, g, unknown or other
aacaggagcucuccccuna

SEQ ID NO: 1138777 - RNA, 19 nt, Artificial Sequence
  Description of Artificial Sequence: Synthetic oligonucleotide
guggguauuaagugccagc

SEQ ID NO: 1138778 - RNA, 19 nt, Artificial Sequence
  Description of Artificial Sequence: Synthetic oligonucleotide
aacuaaugacagccugggu

SEQ ID NO: 1138779 - RNA, 19 nt, Artificial Sequence
  Description of Artificial Sequence: Synthetic oligonucleotide
guauaggaaauagacagcu

SEQ ID NO: 1138780 - RNA, 19 nt, Artificial Sequence
  Description of Artificial Sequence: Synthetic oligonucleotide
aaaccaugacaccgucuga

SEQ ID NO: 1138781 - RNA, 19 nt, Artificial Sequence
  Description of Artificial Sequence: Synthetic oligonucleotide
agauucguuagggaugugu

SEQ ID NO: 1138782 - RNA, 19 nt, Artificial Sequence
  Description of Artificial Sequence: Synthetic oligonucleotide
uggcucggccagaugaaag

SEQ ID NO: 1138783 - RNA, 19 nt, Artificial Sequence
  Description of Artificial Sequence: Synthetic oligonucleotide
aaucggucaauagccuuca

SEQ ID NO: 1138784 - RNA, 19 nt, Artificial Sequence
  Description of Artificial Sequence: Synthetic oligonucleotide
cugaaaugaaaccauugua

SEQ ID NO: 1138785 - RNA, 19 nt, Artificial Sequence
  Description of Artificial Sequence: Synthetic oligonucleotide
gaaucggucaauagccuuc

SEQ ID NO: 1138786 - RNA, 19 nt, Artificial Sequence
  Description of Artificial Sequence: Synthetic oligonucleotide
uucauagaacugaccgccu

SEQ ID NO: 1138787 - RNA, 19 nt, Artificial Sequence
  Description of Artificial Sequence: Synthetic oligonucleotide
aaguuugcccugggagccc

SEQ ID NO: 1138788 - RNA, 19 nt, Artificial Sequence
  Description of Artificial Sequence: Synthetic oligonucleotide
gcucgaaccgaccugcccg

SEQ ID NO: 1138789 - RNA, 19 nt, Artificial Sequence
  Description of Artificial Sequence: Synthetic oligonucleotide
gguauuaagugccagcacu

SEQ ID NO: 1138790 - RNA, 19 nt, Artificial Sequence
  Description of Artificial Sequence: Synthetic oligonucleotide
agugguagccucugagcca

SEQ ID NO: 1138791 - RNA, 19 nt, Artificial Sequence
  Description of Artificial Sequence: Synthetic oligonucleotide
agucugaccgcuccacaug

SEQ ID NO: 1138792 - RNA, 19 nt, Artificial Sequence
  Description of Artificial Sequence: Synthetic oligonucleotide
agcacuuuguggaugugug

SEQ ID NO: 1138793 - RNA, 19 nt, Artificial Sequence
  Description of Artificial Sequence: Synthetic oligonucleotide
aauagacagcucccuugaa

SEQ ID NO: 1138794 - RNA, 19 nt, Artificial Sequence
  Description of Artificial Sequence: Synthetic oligonucleotide
aagaaucggucaauagccu

SEQ ID NO: 1138795 - RNA, 19 nt, Artificial Sequence
  Description of Artificial Sequence: Synthetic oligonucleotide
gagggagagagagaggaga

SEQ ID NO: 1138796 - RNA, 19 nt, Artificial Sequence
  Description of Artificial Sequence: Synthetic oligonucleotide
gaaacaggagcucuccccu

SEQ ID NO: 1138797 - RNA, 19 nt, Artificial Sequence
  Description of Artificial Sequence: Synthetic oligonucleotide
ugguucguggcggggaggg

SEQ ID NO: 1138798 - RNA, 19 nt, Artificial Sequence
  Description of Artificial Sequence: Synthetic oligonucleotide
ggaugguccccaucaacgg

SEQ ID NO: 1138799 - RNA, 19 nt, Artificial Sequence
  Description of Artificial Sequence: Synthetic oligonucleotide
agaagaggugcaggcggcc

SEQ ID NO: 1138800 - RNA, 19 nt, Artificial Sequence
  Description of Artificial Sequence: Synthetic oligonucleotide
ucucggcucgaaccgaccu

SEQ ID NO: 1138801 - RNA, 19 nt, Artificial Sequence
  Description of Artificial Sequence: Synthetic oligonucleotide
gagagagagagaggcuggg

SEQ ID NO: 1138802 - RNA, 19 nt, Artificial Sequence
  Description of Artificial Sequence: Synthetic oligonucleotide
uggaggucaugcaucuggu

SEQ ID NO: 1138803 - RNA, 19 nt, Artificial Sequence
  Description of Artificial Sequence: Synthetic oligonucleotide
gugcaggcggcccuggccg

SEQ ID NO: 1138804 - RNA, 19 nt, Artificial Sequence
  Description of Artificial Sequence: Synthetic oligonucleotide
  modified_base (9)..(9): a, c, u, g, unknown or other
ucuccccunagaaacucuu

SEQ ID NO: 1138805 - RNA, 19 nt, Artificial Sequence
  Description of Artificial Sequence: Synthetic oligonucleotide
agaaucggucaauagccuu

SEQ ID NO: 1138806 - RNA, 19 nt, Artificial Sequence
  Description of Artificial Sequence: Synthetic oligonucleotide
acccucuaagaaucgguca

SEQ ID NO: 1138807 - RNA, 19 nt, Artificial Sequence
  Description of Artificial Sequence: Synthetic oligonucleotide
accgaccugcccgacaugg

SEQ ID NO: 1138808 - RNA, 19 nt, Artificial Sequence
  Description of Artificial Sequence: Synthetic oligonucleotide
ugaaaccauuguacauugu

SEQ ID NO: 1138809 - RNA, 19 nt, Artificial Sequence
  Description of Artificial Sequence: Synthetic oligonucleotide
cuuguagauucguuaggga

SEQ ID NO: 1138810 - RNA, 19 nt, Artificial Sequence
  Description of Artificial Sequence: Synthetic oligonucleotide
cuucgcgaaguauaggaaa

SEQ ID NO: 1138811 - RNA, 19 nt, Artificial Sequence
  Description of Artificial Sequence: Synthetic oligonucleotide
gaccuugagauauguugga

SEQ ID NO: 1138812 - RNA, 19 nt, Artificial Sequence
  Description of Artificial Sequence: Synthetic oligonucleotide
uuguggguauuaagugcca

SEQ ID NO: 1138813 - RNA, 19 nt, Artificial Sequence
  Description of Artificial Sequence: Synthetic oligonucleotide
gagcccuuuaggccauggg

SEQ ID NO: 1138814 - RNA, 19 nt, Artificial Sequence
  Description of Artificial Sequence: Synthetic oligonucleotide
ucguuagggaugugucacc

SEQ ID NO: 1138815 - RNA, 19 nt, Artificial Sequence
  Description of Artificial Sequence: Synthetic oligonucleotide
cugcucgccacacucgccc

SEQ ID NO: 1138816 - RNA, 19 nt, Artificial Sequence
  Description of Artificial Sequence: Synthetic oligonucleotide
gagaggagagagagagagg

SEQ ID NO: 1138817 - RNA, 19 nt, Artificial Sequence
  Description of Artificial Sequence: Synthetic oligonucleotide
gacgagcuguucucuggag

SEQ ID NO: 1138818 - RNA, 19 nt, Artificial Sequence
  Description of Artificial Sequence: Synthetic oligonucleotide
gacggggaccauuggcucc

SEQ ID NO: 1138819 - RNA, 19 nt, Artificial Sequence
  Description of Artificial Sequence: Synthetic oligonucleotide
ccgccuucaaguuuugggg

SEQ ID NO: 1138820 - RNA, 19 nt, Artificial Sequence
  Description of Artificial Sequence: Synthetic oligonucleotide
agagagagagaggcugggg

SEQ ID NO: 1138821 - RNA, 19 nt, Artificial Sequence
  Description of Artificial Sequence: Synthetic oligonucleotide
accuugagauauguuggag

SEQ ID NO: 1138822 - RNA, 19 nt, Artificial Sequence
  Description of Artificial Sequence: Synthetic oligonucleotide
acgagcuguucucuggagu

SEQ ID NO: 1138823 - RNA, 19 nt, Artificial Sequence
  Description of Artificial Sequence: Synthetic oligonucleotide
gaugaugggcagucaccac

SEQ ID NO: 1138824 - RNA, 19 nt, Artificial Sequence
  Description of Artificial Sequence: Synthetic oligonucleotide
cacccucuaagaaucgguc

SEQ ID NO: 1138825 - RNA, 19 nt, Artificial Sequence
  Description of Artificial Sequence: Synthetic oligonucleotide
aagauucuguggcggggau

SEQ ID NO: 1138826 - RNA, 19 nt, Artificial Sequence
  Description of Artificial Sequence: Synthetic oligonucleotide
gaggggcaaaauugcuaag

SEQ ID NO: 1138827 - RNA, 19 nt, Artificial Sequence
  Description of Artificial Sequence: Synthetic oligonucleotide
uccacauggaaggcuuuug

SEQ ID NO: 1138828 - RNA, 19 nt, Artificial Sequence
  Description of Artificial Sequence: Synthetic oligonucleotide
gggcaaaauugcuaaguac

SEQ ID NO: 1138829 - RNA, 19 nt, Artificial Sequence
  Description of Artificial Sequence: Synthetic oligonucleotide
gacagccuggguaccgugg

SEQ ID NO: 1138830 - RNA, 19 nt, Artificial Sequence
  Description of Artificial Sequence: Synthetic oligonucleotide
uccguggaugcauguguug

SEQ ID NO: 1138831 - RNA, 19 nt, Artificial Sequence
  Description of Artificial Sequence: Synthetic oligonucleotide
ggagugguagccucugagc

SEQ ID NO: 1138832 - RNA, 19 nt, Artificial Sequence
  Description of Artificial Sequence: Synthetic oligonucleotide
guccacggaaggcauuugc

SEQ ID NO: 1138833 - RNA, 19 nt, Artificial Sequence
  Description of Artificial Sequence: Synthetic oligonucleotide
ugcuaaguacaagaauuuu

SEQ ID NO: 1138834 - RNA, 19 nt, Artificial Sequence
  Description of Artificial Sequence: Synthetic oligonucleotide
ucggcucgaaccgaccugc

SEQ ID NO: 1138835 - RNA, 19 nt, Artificial Sequence
  Description of Artificial Sequence: Synthetic oligonucleotide
agggagagagagaggagag

SEQ ID NO: 1138836 - RNA, 19 nt, Artificial Sequence
  Description of Artificial Sequence: Synthetic oligonucleotide
uugauucuucgcgaaguau

SEQ ID NO: 1138837 - RNA, 19 nt, Artificial Sequence
  Description of Artificial Sequence: Synthetic oligonucleotide
gagcuguucucuggagugg

SEQ ID NO: 1138838 - RNA, 19 nt, Artificial Sequence
  Description of Artificial Sequence: Synthetic oligonucleotide
uugccuggcauggccgucg

SEQ ID NO: 1138839 - RNA, 19 nt, Artificial Sequence
  Description of Artificial Sequence: Synthetic oligonucleotide
cuaaccagguccucggcaa

SEQ ID NO: 1138840 - RNA, 19 nt, Artificial Sequence
  Description of Artificial Sequence: Synthetic oligonucleotide
ggcuuuuguggccagcgug

SEQ ID NO: 1138841 - RNA, 19 nt, Artificial Sequence
  Description of Artificial Sequence: Synthetic oligonucleotide
agaaagguccacacgucgu

SEQ ID NO: 1138842 - RNA, 19 nt, Artificial Sequence
  Description of Artificial Sequence: Synthetic oligonucleotide
ccuggucucggcucgaacc

SEQ ID NO: 1138843 - RNA, 19 nt, Artificial Sequence
  Description of Artificial Sequence: Synthetic oligonucleotide
auuccuaccuucaggcacu

SEQ ID NO: 1138844 - RNA, 19 nt, Artificial Sequence
  Description of Artificial Sequence: Synthetic oligonucleotide
acggcccauuccuaccuuc

SEQ ID NO: 1138845 - RNA, 19 nt, Artificial Sequence
  Description of Artificial Sequence: Synthetic oligonucleotide
caugguucguggcggggag

SEQ ID NO: 1138846 - RNA, 19 nt, Artificial Sequence
  Description of Artificial Sequence: Synthetic oligonucleotide
cuggcauggccgucggcgg

SEQ ID NO: 1138847 - RNA, 19 nt, Artificial Sequence
  Description of Artificial Sequence: Synthetic oligonucleotide
guucuucauagaacugacc

SEQ ID NO: 1138848 - RNA, 19 nt, Artificial Sequence
  Description of Artificial Sequence: Synthetic oligonucleotide
ggaugcauguguuggguuc

SEQ ID NO: 1138849 - RNA, 19 nt, Artificial Sequence
  Description of Artificial Sequence: Synthetic oligonucleotide
  modified_base (19)..(19): a, c, u, g, unknown or other
aaacaggagcucuccccun

SEQ ID NO: 1138850 - RNA, 19 nt, Artificial Sequence
  Description of Artificial Sequence: Synthetic oligonucleotide
uauuaagugccagcacuuu

SEQ ID NO: 1138851 - RNA, 19 nt, Artificial Sequence
  Description of Artificial Sequence: Synthetic oligonucleotide
accacccucuaagaaucgg

SEQ ID NO: 1138852 - RNA, 19 nt, Artificial Sequence
  Description of Artificial Sequence: Synthetic oligonucleotide
cauucuuggugacgagcug

SEQ ID NO: 1138853 - RNA, 19 nt, Artificial Sequence
  Description of Artificial Sequence: Synthetic oligonucleotide
uuuugcagucugaccgcuc

SEQ ID NO: 1138854 - RNA, 19 nt, Artificial Sequence
  Description of Artificial Sequence: Synthetic oligonucleotide
guucguggcggggagggag

SEQ ID NO: 1138855 - RNA, 19 nt, Artificial Sequence
  Description of Artificial Sequence: Synthetic oligonucleotide
uggauguguguagccacca

SEQ ID NO: 1138856 - RNA, 19 nt, Artificial Sequence
  Description of Artificial Sequence: Synthetic oligonucleotide
cacacgucgugcaugucca

SEQ ID NO: 1138857 - RNA, 19 nt, Artificial Sequence
  Description of Artificial Sequence: Synthetic oligonucleotide
auguuacccuaacucuaga

SEQ ID NO: 1138858 - RNA, 19 nt, Artificial Sequence
  Description of Artificial Sequence: Synthetic oligonucleotide
uugagauauguuggagguc

SEQ ID NO: 1138859 - RNA, 19 nt, Artificial Sequence
  Description of Artificial Sequence: Synthetic oligonucleotide
guccucggcaauaauuaac

SEQ ID NO: 1138860 - RNA, 19 nt, Artificial Sequence
  Description of Artificial Sequence: Synthetic oligonucleotide
ggagagagagagaggcugg

SEQ ID NO: 1138861 - RNA, 19 nt, Artificial Sequence
  Description of Artificial Sequence: Synthetic oligonucleotide
uaaugacagccuggguacc

SEQ ID NO: 1138862 - RNA, 19 nt, Artificial Sequence
  Description of Artificial Sequence: Synthetic oligonucleotide
auuuugcagucugaccgcu

SEQ ID NO: 1138863 - RNA, 19 nt, Artificial Sequence
  Description of Artificial Sequence: Synthetic oligonucleotide
uucguggcggggagggaga

SEQ ID NO: 1138864 - RNA, 19 nt, Artificial Sequence
  Description of Artificial Sequence: Synthetic oligonucleotide
ggaagcacauuggauuuug

SEQ ID NO: 1138865 - RNA, 19 nt, Artificial Sequence
  Description of Artificial Sequence: Synthetic oligonucleotide
guauguuguaaccucucau

SEQ ID NO: 1138866 - RNA, 19 nt, Artificial Sequence
  Description of Artificial Sequence: Synthetic oligonucleotide
cgauggaauaaauaaguga

SEQ ID NO: 1138867 - RNA, 19 nt, Artificial Sequence
  Description of Artificial Sequence: Synthetic oligonucleotide
  modified_base (5)..(5): a, c, u, g, unknown or other
cccunagaaacucuuagaa

SEQ ID NO: 1138868 - RNA, 19 nt, Artificial Sequence
  Description of Artificial Sequence: Synthetic oligonucleotide
  modified_base (4)..(4): a, c, u, g, unknown or other
ccunagaaacucuuagaaa

SEQ ID NO: 1138869 - RNA, 19 nt, Artificial Sequence
  Description of Artificial Sequence: Synthetic oligonucleotide
caccgucugaugaugggca

SEQ ID NO: 1138870 - RNA, 19 nt, Artificial Sequence
  Description of Artificial Sequence: Synthetic oligonucleotide
gcuuuuguggccagcgugc

SEQ ID NO: 1138871 - RNA, 19 nt, Artificial Sequence
  Description of Artificial Sequence: Synthetic oligonucleotide
ucugaccgcuccacaugga

SEQ ID NO: 1138872 - RNA, 19 nt, Artificial Sequence
  Description of Artificial Sequence: Synthetic oligonucleotide
ugacagccuggguaccgug

SEQ ID NO: 1138873 - RNA, 19 nt, Artificial Sequence
  Description of Artificial Sequence: Synthetic oligonucleotide
ccuaacucuagaaucugga

SEQ ID NO: 1138874 - RNA, 19 nt, Artificial Sequence
  Description of Artificial Sequence: Synthetic oligonucleotide
cucuaaccagguccucggc

SEQ ID NO: 1138875 - RNA, 19 nt, Artificial Sequence
  Description of Artificial Sequence: Synthetic oligonucleotide
cuuuaggccauggggccug

SEQ ID NO: 1138876 - RNA, 19 nt, Artificial Sequence
  Description of Artificial Sequence: Synthetic oligonucleotide
uaccguggaccucaucguu

SEQ ID NO: 1138877 - RNA, 19 nt, Artificial Sequence
  Description of Artificial Sequence: Synthetic oligonucleotide
  modified_base (14)..(14): a, c, u, g, unknown or other
ggagcucuccccunagaaa

SEQ ID NO: 1138878 - RNA, 19 nt, Artificial Sequence
  Description of Artificial Sequence: Synthetic oligonucleotide
caccacccucuaagaaucg

SEQ ID NO: 1138879 - RNA, 19 nt, Artificial Sequence
  Description of Artificial Sequence: Synthetic oligonucleotide
aaagccgccuugaccuuga

SEQ ID NO: 1138880 - RNA, 19 nt, Artificial Sequence
  Description of Artificial Sequence: Synthetic oligonucleotide
gccgccuugaccuugagau

SEQ ID NO: 1138881 - RNA, 19 nt, Artificial Sequence
  Description of Artificial Sequence: Synthetic oligonucleotide
acccuaacucuagaaucug

SEQ ID NO: 1138882 - RNA, 19 nt, Artificial Sequence
  Description of Artificial Sequence: Synthetic oligonucleotide
gagagagagaggagagaga

SEQ ID NO: 1138883 - RNA, 19 nt, Artificial Sequence
  Description of Artificial Sequence: Synthetic oligonucleotide
cugaggggcaaaauugcua

SEQ ID NO: 1138884 - RNA, 19 nt, Artificial Sequence
  Description of Artificial Sequence: Synthetic oligonucleotide
caauaucuaucgauggaau

SEQ ID NO: 1138885 - RNA, 19 nt, Artificial Sequence
  Description of Artificial Sequence: Synthetic oligonucleotide
uggcacuuguagauucguu

SEQ ID NO: 1138886 - RNA, 19 nt, Artificial Sequence
  Description of Artificial Sequence: Synthetic oligonucleotide
ucaggguuuguggguauua

SEQ ID NO: 1138887 - RNA, 19 nt, Artificial Sequence
  Description of Artificial Sequence: Synthetic oligonucleotide
ggugacgagcuguucucug

SEQ ID NO: 1138888 - RNA, 19 nt, Artificial Sequence
  Description of Artificial Sequence: Synthetic oligonucleotide
acaugguucguggcgggga

SEQ ID NO: 1138889 - RNA, 19 nt, Artificial Sequence
  Description of Artificial Sequence: Synthetic oligonucleotide
cucggcaauaauuaacauu

SEQ ID NO: 1138890 - RNA, 19 nt, Artificial Sequence
  Description of Artificial Sequence: Synthetic oligonucleotide
gugagggguucagggacgg

SEQ ID NO: 1138891 - RNA, 19 nt, Artificial Sequence
  Description of Artificial Sequence: Synthetic oligonucleotide
cacuuuguggaugugugua

SEQ ID NO: 1138892 - RNA, 19 nt, Artificial Sequence
  Description of Artificial Sequence: Synthetic oligonucleotide
acauuggauuuugcagucu

SEQ ID NO: 1138893 - RNA, 19 nt, Artificial Sequence
  Description of Artificial Sequence: Synthetic oligonucleotide
gaaccgaccugcccgacau

SEQ ID NO: 1138894 - RNA, 19 nt, Artificial Sequence
  Description of Artificial Sequence: Synthetic oligonucleotide
uccuggucucggcucgaac

SEQ ID NO: 1138895 - RNA, 19 nt, Artificial Sequence
  Description of Artificial Sequence: Synthetic oligonucleotide
cucggcucgaaccgaccug

SEQ ID NO: 1138896 - RNA, 19 nt, Artificial Sequence
  Description of Artificial Sequence: Synthetic oligonucleotide
gcaaaauugcuaaguacaa

SEQ ID NO: 1138897 - RNA, 19 nt, Artificial Sequence
  Description of Artificial Sequence: Synthetic oligonucleotide
ggugagggguucagggacg

SEQ ID NO: 1138898 - RNA, 19 nt, Artificial Sequence
  Description of Artificial Sequence: Synthetic oligonucleotide
aucggucaauagccuucag

SEQ ID NO: 1138899 - RNA, 19 nt, Artificial Sequence
  Description of Artificial Sequence: Synthetic oligonucleotide
augagggugagggguucag

SEQ ID NO: 1138900 - RNA, 19 nt, Artificial Sequence
  Description of Artificial Sequence: Synthetic oligonucleotide
gaccugcccgacaugguuc

SEQ ID NO: 1138901 - RNA, 19 nt, Artificial Sequence
  Description of Artificial Sequence: Synthetic oligonucleotide
aaccgaccugcccgacaug

SEQ ID NO: 1138902 - RNA, 19 nt, Artificial Sequence
  Description of Artificial Sequence: Synthetic oligonucleotide
uggugacgagcuguucucu

SEQ ID NO: 1138903 - RNA, 19 nt, Artificial Sequence
  Description of Artificial Sequence: Synthetic oligonucleotide
ucgcgaaguauaggaaaua

SEQ ID NO: 1138904 - RNA, 19 nt, Artificial Sequence
  Description of Artificial Sequence: Synthetic oligonucleotide
aggcuuuuguggccagcgu

SEQ ID NO: 1138905 - RNA, 19 nt, Artificial Sequence
  Description of Artificial Sequence: Synthetic oligonucleotide
auguccacggaaggcauuu

SEQ ID NO: 1138906 - RNA, 19 nt, Artificial Sequence
  Description of Artificial Sequence: Synthetic oligonucleotide
uccggaggcugcaguggac

SEQ ID NO: 1138907 - RNA, 19 nt, Artificial Sequence
  Description of Artificial Sequence: Synthetic oligonucleotide
gagagagaggagagagaga

SEQ ID NO: 1138908 - RNA, 19 nt, Artificial Sequence
  Description of Artificial Sequence: Synthetic oligonucleotide
caaagccgccuugaccuug

SEQ ID NO: 1138909 - RNA, 19 nt, Artificial Sequence
  Description of Artificial Sequence: Synthetic oligonucleotide
ggguuuguggguauuaagu

SEQ ID NO: 1138910 - RNA, 19 nt, Artificial Sequence
  Description of Artificial Sequence: Synthetic oligonucleotide
gauagccgccaugacccuc

SEQ ID NO: 1138911 - RNA, 19 nt, Artificial Sequence
  Description of Artificial Sequence: Synthetic oligonucleotide
agccucugagccacacuuc

SEQ ID NO: 1138912 - RNA, 19 nt, Artificial Sequence
  Description of Artificial Sequence: Synthetic oligonucleotide
ugagggguucagggacggg

SEQ ID NO: 1138913 - RNA, 19 nt, Artificial Sequence
  Description of Artificial Sequence: Synthetic oligonucleotide
uguccacggaaggcauuug

SEQ ID NO: 1138914 - RNA, 19 nt, Artificial Sequence
  Description of Artificial Sequence: Synthetic oligonucleotide
cgcgaaguauaggaaauag

SEQ ID NO: 1138915 - RNA, 19 nt, Artificial Sequence
  Description of Artificial Sequence: Synthetic oligonucleotide
cugugucaacuccucuuca

SEQ ID NO: 1138916 - RNA, 19 nt, Artificial Sequence
  Description of Artificial Sequence: Synthetic oligonucleotide
cgccugaggggcaaaauug

SEQ ID NO: 1138917 - RNA, 19 nt, Artificial Sequence
  Description of Artificial Sequence: Synthetic oligonucleotide
augguucguggcggggagg

SEQ ID NO: 1138918 - RNA, 19 nt, Artificial Sequence
  Description of Artificial Sequence: Synthetic oligonucleotide
aagccgccuugaccuugag

SEQ ID NO: 1138919 - RNA, 19 nt, Artificial Sequence
  Description of Artificial Sequence: Synthetic oligonucleotide
cucuagaaucuggaggcaa

SEQ ID NO: 1138920 - RNA, 19 nt, Artificial Sequence
  Description of Artificial Sequence: Synthetic oligonucleotide
cugcuguacaacacaccaa

SEQ ID NO: 1138921 - RNA, 19 nt, Artificial Sequence
  Description of Artificial Sequence: Synthetic oligonucleotide
cucuaagaaucggucaaua

SEQ ID NO: 1138922 - RNA, 19 nt, Artificial Sequence
  Description of Artificial Sequence: Synthetic oligonucleotide
uaucucuaaccagguccuc

SEQ ID NO: 1138923 - RNA, 19 nt, Artificial Sequence
  Description of Artificial Sequence: Synthetic oligonucleotide
cugaccgcuccacauggaa

SEQ ID NO: 1138924 - RNA, 19 nt, Artificial Sequence
  Description of Artificial Sequence: Synthetic oligonucleotide
gagagaggagagagagaga

SEQ ID NO: 1138925 - RNA, 19 nt, Artificial Sequence
  Description of Artificial Sequence: Synthetic oligonucleotide
gcgaaguauaggaaauaga

SEQ ID NO: 1138926 - RNA, 19 nt, Artificial Sequence
  Description of Artificial Sequence: Synthetic oligonucleotide
cucgaaccgaccugcccga

SEQ ID NO: 1138927 - RNA, 19 nt, Artificial Sequence
  Description of Artificial Sequence: Synthetic oligonucleotide
uucagggacggggaccauu

SEQ ID NO: 1138928 - RNA, 19 nt, Artificial Sequence
  Description of Artificial Sequence: Synthetic oligonucleotide
ggcccauuccuaccuucag

SEQ ID NO: 1138929 - RNA, 19 nt, Artificial Sequence
  Description of Artificial Sequence: Synthetic oligonucleotide
accucucauggugguuagg

SEQ ID NO: 1138930 - RNA, 19 nt, Artificial Sequence
  Description of Artificial Sequence: Synthetic oligonucleotide
cagggacggggaccauugg

SEQ ID NO: 1138931 - RNA, 19 nt, Artificial Sequence
  Description of Artificial Sequence: Synthetic oligonucleotide
guaccguggaccucaucgu

SEQ ID NO: 1138932 - RNA, 19 nt, Artificial Sequence
  Description of Artificial Sequence: Synthetic oligonucleotide
  modified_base (12)..(12): a, c, u, g, unknown or other
agcucuccccunagaaacu

SEQ ID NO: 1138933 - RNA, 19 nt, Artificial Sequence
  Description of Artificial Sequence: Synthetic oligonucleotide
ggcucgaaccgaccugccc

SEQ ID NO: 1138934 - RNA, 19 nt, Artificial Sequence
  Description of Artificial Sequence: Synthetic oligonucleotide
ggagaaagguccacacguc

SEQ ID NO: 1138935 - RNA, 19 nt, Artificial Sequence
  Description of Artificial Sequence: Synthetic oligonucleotide
gcauugcuaacuucaacau

SEQ ID NO: 1138936 - RNA, 19 nt, Artificial Sequence
  Description of Artificial Sequence: Synthetic oligonucleotide
auccccgccuucaaguuuu

SEQ ID NO: 1138937 - RNA, 19 nt, Artificial Sequence
  Description of Artificial Sequence: Synthetic oligonucleotide
cugcccgacaugguucgug

SEQ ID NO: 1138938 - RNA, 19 nt, Artificial Sequence
  Description of Artificial Sequence: Synthetic oligonucleotide
ucguggcggggagggagag

SEQ ID NO: 1138939 - RNA, 19 nt, Artificial Sequence
  Description of Artificial Sequence: Synthetic oligonucleotide
caauagccuucaggguuug

SEQ ID NO: 1138940 - RNA, 19 nt, Artificial Sequence
  Description of Artificial Sequence: Synthetic oligonucleotide
cauccggaugguccccauc

SEQ ID NO: 1138941 - RNA, 19 nt, Artificial Sequence
  Description of Artificial Sequence: Synthetic oligonucleotide
uucaggguuuguggguauu

SEQ ID NO: 1138942 - RNA, 19 nt, Artificial Sequence
  Description of Artificial Sequence: Synthetic oligonucleotide
ggucaauagccuucagggu

SEQ ID NO: 1138943 - RNA, 19 nt, Artificial Sequence
  Description of Artificial Sequence: Synthetic oligonucleotide
  modified_base (10)..(10): a, c, u, g, unknown or other
cucuccccunagaaacucu

SEQ ID NO: 1138944 - RNA, 19 nt, Artificial Sequence
  Description of Artificial Sequence: Synthetic oligonucleotide
cucgccacacucgccccgc

SEQ ID NO: 1138945 - RNA, 19 nt, Artificial Sequence
  Description of Artificial Sequence: Synthetic oligonucleotide
accucucauuucccagaaa

SEQ ID NO: 1138946 - RNA, 19 nt, Artificial Sequence
  Description of Artificial Sequence: Synthetic oligonucleotide
ggagcccuuuaggccaugg

SEQ ID NO: 1138947 - RNA, 19 nt, Artificial Sequence
  Description of Artificial Sequence: Synthetic oligonucleotide
cccucuaagaaucggucaa

SEQ ID NO: 1138948 - RNA, 19 nt, Artificial Sequence
  Description of Artificial Sequence: Synthetic oligonucleotide
  modified_base (8)..(8): a, c, u, g, unknown or other
cuccccunagaaacucuua

SEQ ID NO: 1138949 - RNA, 19 nt, Artificial Sequence
  Description of Artificial Sequence: Synthetic oligonucleotide
aggaagcacauuggauuuu

SEQ ID NO: 1138950 - RNA, 19 nt, Artificial Sequence
  Description of Artificial Sequence: Synthetic oligonucleotide
gguccucggcaauaauuaa

SEQ ID NO: 1138951 - RNA, 19 nt, Artificial Sequence
  Description of Artificial Sequence: Synthetic oligonucleotide
ccaucaacggcccauuccu

SEQ ID NO: 1138952 - RNA, 19 nt, Artificial Sequence
  Description of Artificial Sequence: Synthetic oligonucleotide
cggcaauaauuaacauucc

SEQ ID NO: 1138953 - RNA, 19 nt, Artificial Sequence
  Description of Artificial Sequence: Synthetic oligonucleotide
  modified_base (6)..(6): a, c, u, g, unknown or other
ccccunagaaacucuuaga

SEQ ID NO: 1138954 - RNA, 19 nt, Artificial Sequence
  Description of Artificial Sequence: Synthetic oligonucleotide
uccccgccuucaaguuuug

SEQ ID NO: 1138955 - RNA, 19 nt, Artificial Sequence
  Description of Artificial Sequence: Synthetic oligonucleotide
uagauucguuagggaugug

SEQ ID NO: 1138956 - RNA, 19 nt, Artificial Sequence
  Description of Artificial Sequence: Synthetic oligonucleotide
gggccugauguccacggaa

SEQ ID NO: 1138957 - RNA, 19 nt, Artificial Sequence
  Description of Artificial Sequence: Synthetic oligonucleotide
cuuugccuggcauggccgu

SEQ ID NO: 1138958 - RNA, 19 nt, Artificial Sequence
  Description of Artificial Sequence: Synthetic oligonucleotide
gucucggcucgaaccgacc

SEQ ID NO: 1138959 - RNA, 19 nt, Artificial Sequence
  Description of Artificial Sequence: Synthetic oligonucleotide
gaggagagagagagaggcu

SEQ ID NO: 1138960 - RNA, 19 nt, Artificial Sequence
  Description of Artificial Sequence: Synthetic oligonucleotide
gcauguguuggguucuccu

SEQ ID NO: 1138961 - RNA, 19 nt, Artificial Sequence
  Description of Artificial Sequence: Synthetic oligonucleotide
auucuguggcggggaugag

SEQ ID NO: 1138962 - RNA, 19 nt, Artificial Sequence
  Description of Artificial Sequence: Synthetic oligonucleotide
caggguuuguggguauuaa

SEQ ID NO: 1138963 - RNA, 19 nt, Artificial Sequence
  Description of Artificial Sequence: Synthetic oligonucleotide
agaggaccguggcggggaa

SEQ ID NO: 1138964 - RNA, 19 nt, Artificial Sequence
  Description of Artificial Sequence: Synthetic oligonucleotide
gcuccguggaugcaugugu

SEQ ID NO: 1138965 - RNA, 19 nt, Artificial Sequence
  Description of Artificial Sequence: Synthetic oligonucleotide
caucaacggcccauuccua

SEQ ID NO: 1138966 - RNA, 19 nt, Artificial Sequence
  Description of Artificial Sequence: Synthetic oligonucleotide
ccggaugguccccaucaac

SEQ ID NO: 1138967 - RNA, 19 nt, Artificial Sequence
  Description of Artificial Sequence: Synthetic oligonucleotide
ggaaggcauuugcuugaga

SEQ ID NO: 1138968 - RNA, 19 nt, Artificial Sequence
  Description of Artificial Sequence: Synthetic oligonucleotide
cagucugaccgcuccacau

SEQ ID NO: 1138969 - RNA, 19 nt, Artificial Sequence
  Description of Artificial Sequence: Synthetic oligonucleotide
caacggcccauuccuaccu

SEQ ID NO: 1138970 - RNA, 19 nt, Artificial Sequence
  Description of Artificial Sequence: Synthetic oligonucleotide
gggagagagagaggagaga

SEQ ID NO: 1138971 - RNA, 19 nt, Artificial Sequence
  Description of Artificial Sequence: Synthetic oligonucleotide
uggguaccguggaccucau

SEQ ID NO: 1138972 - RNA, 19 nt, Artificial Sequence
  Description of Artificial Sequence: Synthetic oligonucleotide
ucgaaccgaccugcccgac

SEQ ID NO: 1138973 - RNA, 19 nt, Artificial Sequence
  Description of Artificial Sequence: Synthetic oligonucleotide
cacuguccggaggcugcag

SEQ ID NO: 1138974 - RNA, 19 nt, Artificial Sequence
  Description of Artificial Sequence: Synthetic oligonucleotide
ucgccacacucgccccgcu

SEQ ID NO: 1138975 - RNA, 19 nt, Artificial Sequence
  Description of Artificial Sequence: Synthetic oligonucleotide
ccauuccuaccuucaggca

SEQ ID NO: 1138976 - RNA, 19 nt, Artificial Sequence
  Description of Artificial Sequence: Synthetic oligonucleotide
cgacaugguucguggcggg

SEQ ID NO: 1138977 - RNA, 19 nt, Artificial Sequence
  Description of Artificial Sequence: Synthetic oligonucleotide
ccuuauuucaggagauauu

SEQ ID NO: 1138978 - RNA, 19 nt, Artificial Sequence
  Description of Artificial Sequence: Synthetic oligonucleotide
uuccuaccuucaggcacuu

SEQ ID NO: 1138979 - RNA, 19 nt, Artificial Sequence
  Description of Artificial Sequence: Synthetic oligonucleotide
gagauauguuggaggucau

SEQ ID NO: 1138980 - RNA, 19 nt, Artificial Sequence
  Description of Artificial Sequence: Synthetic oligonucleotide
cgccuucaaguuuugggga

SEQ ID NO: 1138981 - RNA, 19 nt, Artificial Sequence
  Description of Artificial Sequence: Synthetic oligonucleotide
ggccagaugaaaggucuua

SEQ ID NO: 1138982 - RNA, 19 nt, Artificial Sequence
  Description of Artificial Sequence: Synthetic oligonucleotide
uccacacgucgugcauguc

SEQ ID NO: 1138983 - RNA, 19 nt, Artificial Sequence
  Description of Artificial Sequence: Synthetic oligonucleotide
uccuaccuucaggcacuuc

SEQ ID NO: 1138984 - RNA, 19 nt, Artificial Sequence
  Description of Artificial Sequence: Synthetic oligonucleotide
ccguggcggggaaggaagc

SEQ ID NO: 1138985 - RNA, 19 nt, Artificial Sequence
  Description of Artificial Sequence: Synthetic oligonucleotide
gccuugaccuugagauaug

SEQ ID NO: 1138986 - RNA, 19 nt, Artificial Sequence
  Description of Artificial Sequence: Synthetic oligonucleotide
gucgugcauguccaucauu

SEQ ID NO: 1138987 - RNA, 19 nt, Artificial Sequence
  Description of Artificial Sequence: Synthetic oligonucleotide
ggcagucaccacccucuaa

SEQ ID NO: 1138988 - RNA, 19 nt, Artificial Sequence
  Description of Artificial Sequence: Synthetic oligonucleotide
cguuagggaugugucacca

SEQ ID NO: 1138989 - RNA, 19 nt, Artificial Sequence
  Description of Artificial Sequence: Synthetic oligonucleotide
ccacccucuaagaaucggu

SEQ ID NO: 1138990 - RNA, 19 nt, Artificial Sequence
  Description of Artificial Sequence: Synthetic oligonucleotide
guccccaucaacggcccau

SEQ ID NO: 1138991 - RNA, 19 nt, Artificial Sequence
  Description of Artificial Sequence: Synthetic oligonucleotide
cugaccgccugaggggcaa

SEQ ID NO: 1138992 - RNA, 19 nt, Artificial Sequence
  Description of Artificial Sequence: Synthetic oligonucleotide
ugaccgccugaggggcaaa

SEQ ID NO: 1138993 - RNA, 19 nt, Artificial Sequence
  Description of Artificial Sequence: Synthetic oligonucleotide
ggcauccggauggucccca

SEQ ID NO: 1138994 - RNA, 19 nt, Artificial Sequence
  Description of Artificial Sequence: Synthetic oligonucleotide
ggucaugcaucugguugcu

SEQ ID NO: 1138995 - RNA, 19 nt, Artificial Sequence
  Description of Artificial Sequence: Synthetic oligonucleotide
ggcagacaccucucauggu

SEQ ID NO: 1138996 - RNA, 19 nt, Artificial Sequence
  Description of Artificial Sequence: Synthetic oligonucleotide
gggcauccggauggucccc

SEQ ID NO: 1138997 - RNA, 19 nt, Artificial Sequence
  Description of Artificial Sequence: Synthetic oligonucleotide
ccguggaccucaucguugu

SEQ ID NO: 1138998 - RNA, 19 nt, Artificial Sequence
  Description of Artificial Sequence: Synthetic oligonucleotide
cccgccggguccugcucgc

SEQ ID NO: 1138999 - RNA, 19 nt, Artificial Sequence
  Description of Artificial Sequence: Synthetic oligonucleotide
ccuugaccuugagauaugu

SEQ ID NO: 1139000 - RNA, 19 nt, Artificial Sequence
  Description of Artificial Sequence: Synthetic oligonucleotide
ggggaccauuggcuccaga

SEQ ID NO: 1139001 - RNA, 19 nt, Artificial Sequence
  Description of Artificial Sequence: Synthetic oligonucleotide
cggcccauuccuaccuuca

SEQ ID NO: 1139002 - RNA, 19 nt, Artificial Sequence
  Description of Artificial Sequence: Synthetic oligonucleotide
ggguaccguggaccucauc

SEQ ID NO: 1139003 - RNA, 19 nt, Artificial Sequence
  Description of Artificial Sequence: Synthetic oligonucleotide
ccucggcaauaauuaacau

SEQ ID NO: 1139004 - RNA, 19 nt, Artificial Sequence
  Description of Artificial Sequence: Synthetic oligonucleotide
cgugcauguccaucauucu

SEQ ID NO: 1139005 - RNA, 19 nt, Artificial Sequence
  Description of Artificial Sequence: Synthetic oligonucleotide
cgccuugaccuugagauau

SEQ ID NO: 1139006 - RNA, 19 nt, Artificial Sequence
  Description of Artificial Sequence: Synthetic oligonucleotide
gcuguucucuggaguggua

SEQ ID NO: 1139007 - RNA, 19 nt, Artificial Sequence
  Description of Artificial Sequence: Synthetic oligonucleotide
gguucguggcggggaggga

SEQ ID NO: 1139008 - RNA, 19 nt, Artificial Sequence
  Description of Artificial Sequence: Synthetic oligonucleotide
cgaaccgaccugcccgaca

SEQ ID NO: 1139009 - RNA, 19 nt, Artificial Sequence
  Description of Artificial Sequence: Synthetic oligonucleotide
cggcucgaaccgaccugcc

SEQ ID NO: 1139010 - RNA, 19 nt, Artificial Sequence
  Description of Artificial Sequence: Synthetic oligonucleotide
ccgccuugaccuugagaua

SEQ ID NO: 1139011 - RNA, 19 nt, Artificial Sequence
  Description of Artificial Sequence: Synthetic oligonucleotide
ggcggggaaggaagcacau

SEQ ID NO: 1139012 - RNA, 19 nt, Artificial Sequence
  Description of Artificial Sequence: Synthetic oligonucleotide
gucaugcaucugguugcuu

SEQ ID NO: 1139013 - RNA, 19 nt, Artificial Sequence
  Description of Artificial Sequence: Synthetic oligonucleotide
ccgccugaggggcaaaauu

SEQ ID NO: 1139014 - RNA, 19 nt, Artificial Sequence
  Description of Artificial Sequence: Synthetic oligonucleotide
gcaaagccgccuugaccuu

SEQ ID NO: 1139015 - RNA, 19 nt, Artificial Sequence
  Description of Artificial Sequence: Synthetic oligonucleotide
ccauccccgccuucaaguu

SEQ ID NO: 1139016 - RNA, 19 nt, Artificial Sequence
  Description of Artificial Sequence: Synthetic oligonucleotide
ccgucugaugaugggcagu

SEQ ID NO: 1139017 - RNA, 19 nt, Artificial Sequence
  Description of Artificial Sequence: Synthetic oligonucleotide
ccgaccugcccgacauggu

SEQ ID NO: 1139018 - RNA, 19 nt, Artificial Sequence
  Description of Artificial Sequence: Synthetic oligonucleotide
ccgccggguccugcucgcc

SEQ ID NO: 1139019 - RNA, 19 nt, Artificial Sequence
  Description of Artificial Sequence: Synthetic oligonucleotide
gcggggaaggaagcacauu

SEQ ID NO: 1139020 - RNA, 19 nt, Artificial Sequence
  Description of Artificial Sequence: Synthetic oligonucleotide
cgauagccgccaugacccu

SEQ ID NO: 1139021 - RNA, 19 nt, Artificial Sequence
  Description of Artificial Sequence: Synthetic oligonucleotide
cgucgugcauguccaucau

SEQ ID NO: 1139022 - RNA, 19 nt, Artificial Sequence
  Description of Artificial Sequence: Synthetic oligonucleotide
gcggcccuggccgccugcu

SEQ ID NO: 1139023 - RNA, 19 nt, Artificial Sequence
  Description of Artificial Sequence: Synthetic oligonucleotide
aaagacauaacaucgagcc

SEQ ID NO: 1139024 - RNA, 19 nt, Artificial Sequence
  Description of Artificial Sequence: Synthetic oligonucleotide
aaaccuuugauuuauggac

SEQ ID NO: 1139025 - RNA, 19 nt, Artificial Sequence
  Description of Artificial Sequence: Synthetic oligonucleotide
uuaaugaugaaacauuagg

SEQ ID NO: 1139026 - RNA, 19 nt, Artificial Sequence
  Description of Artificial Sequence: Synthetic oligonucleotide
aauuaaacgaaaugaacag

SEQ ID NO: 1139027 - RNA, 19 nt, Artificial Sequence
  Description of Artificial Sequence: Synthetic oligonucleotide
uuugcuagaccacacaucg

SEQ ID NO: 1139028 - RNA, 19 nt, Artificial Sequence
  Description of Artificial Sequence: Synthetic oligonucleotide
uaauuaaacgaaaugaaca

SEQ ID NO: 1139029 - RNA, 19 nt, Artificial Sequence
  Description of Artificial Sequence: Synthetic oligonucleotide
aaaucagugucauuucacc

SEQ ID NO: 1139030 - RNA, 19 nt, Artificial Sequence
  Description of Artificial Sequence: Synthetic oligonucleotide
uaugauugaauauucauca

SEQ ID NO: 1139031 - RNA, 19 nt, Artificial Sequence
  Description of Artificial Sequence: Synthetic oligonucleotide
aguuuaaucaucaaacugc

SEQ ID NO: 1139032 - RNA, 19 nt, Artificial Sequence
  Description of Artificial Sequence: Synthetic oligonucleotide
aacgaaaugaacagaagcc

SEQ ID NO: 1139033 - RNA, 19 nt, Artificial Sequence
  Description of Artificial Sequence: Synthetic oligonucleotide
augauuucgauauacaaag

SEQ ID NO: 1139034 - RNA, 19 nt, Artificial Sequence
  Description of Artificial Sequence: Synthetic oligonucleotide
aauuacaacacacaguaaa

SEQ ID NO: 1139035 - RNA, 19 nt, Artificial Sequence
  Description of Artificial Sequence: Synthetic oligonucleotide
aagacuauuuacaaugacc

SEQ ID NO: 1139036 - RNA, 19 nt, Artificial Sequence
  Description of Artificial Sequence: Synthetic oligonucleotide
aacuacaugauuucgauau

SEQ ID NO: 1139037 - RNA, 19 nt, Artificial Sequence
  Description of Artificial Sequence: Synthetic oligonucleotide
aacccaaauagccauuagc

SEQ ID NO: 1139038 - RNA, 19 nt, Artificial Sequence
  Description of Artificial Sequence: Synthetic oligonucleotide
uuucgauauacaaagauuc

SEQ ID NO: 1139039 - RNA, 19 nt, Artificial Sequence
  Description of Artificial Sequence: Synthetic oligonucleotide
aaagcaaugcauaaugaac

SEQ ID NO: 1139040 - RNA, 19 nt, Artificial Sequence
  Description of Artificial Sequence: Synthetic oligonucleotide
aauaguacuuaguaguugu

SEQ ID NO: 1139041 - RNA, 19 nt, Artificial Sequence
  Description of Artificial Sequence: Synthetic oligonucleotide
ucuaugagcacuaugauuu

SEQ ID NO: 1139042 - RNA, 19 nt, Artificial Sequence
  Description of Artificial Sequence: Synthetic oligonucleotide
agacuauuuacaaugaccc

SEQ ID NO: 1139043 - RNA, 19 nt, Artificial Sequence
  Description of Artificial Sequence: Synthetic oligonucleotide
cuaacaauguauaauuuag

SEQ ID NO: 1139044 - RNA, 19 nt, Artificial Sequence
  Description of Artificial Sequence: Synthetic oligonucleotide
aaguaagucauccugagau

SEQ ID NO: 1139045 - RNA, 19 nt, Artificial Sequence
  Description of Artificial Sequence: Synthetic oligonucleotide
gaauccacgacucugguag

SEQ ID NO: 1139046 - RNA, 19 nt, Artificial Sequence
  Description of Artificial Sequence: Synthetic oligonucleotide
ucagguuuuagauuuauca

SEQ ID NO: 1139047 - RNA, 19 nt, Artificial Sequence
  Description of Artificial Sequence: Synthetic oligonucleotide
uuugcuacugacuuaauac

SEQ ID NO: 1139048 - RNA, 19 nt, Artificial Sequence
  Description of Artificial Sequence: Synthetic oligonucleotide
aaacacgugaagguaaugc

SEQ ID NO: 1139049 - RNA, 19 nt, Artificial Sequence
  Description of Artificial Sequence: Synthetic oligonucleotide
ucuacuaaacccaaauagc

SEQ ID NO: 1139050 - RNA, 19 nt, Artificial Sequence
  Description of Artificial Sequence: Synthetic oligonucleotide
uuaaucaucaaacugcaau

SEQ ID NO: 1139051 - RNA, 19 nt, Artificial Sequence
  Description of Artificial Sequence: Synthetic oligonucleotide
aauagaugaccuuacaaaa

SEQ ID NO: 1139052 - RNA, 19 nt, Artificial Sequence
  Description of Artificial Sequence: Synthetic oligonucleotide
uagguuauaagcauagcgc

SEQ ID NO: 1139053 - RNA, 19 nt, Artificial Sequence
  Description of Artificial Sequence: Synthetic oligonucleotide
acaguaaauaaaucccucc

SEQ ID NO: 1139054 - RNA, 19 nt, Artificial Sequence
  Description of Artificial Sequence: Synthetic oligonucleotide
caaaacacguauauaaacc

SEQ ID NO: 1139055 - RNA, 19 nt, Artificial Sequence
  Description of Artificial Sequence: Synthetic oligonucleotide
guagguuauaagcauagcg

SEQ ID NO: 1139056 - RNA, 19 nt, Artificial Sequence
  Description of Artificial Sequence: Synthetic oligonucleotide
accaggauaacuaacaugg

SEQ ID NO: 1139057 - RNA, 19 nt, Artificial Sequence
  Description of Artificial Sequence: Synthetic oligonucleotide
caauuuaacauucugcuac

SEQ ID NO: 1139058 - RNA, 19 nt, Artificial Sequence
  Description of Artificial Sequence: Synthetic oligonucleotide
uuaucuuuuaaacaucuuc

SEQ ID NO: 1139059 - RNA, 19 nt, Artificial Sequence
  Description of Artificial Sequence: Synthetic oligonucleotide
auauucaucauauauguaa

SEQ ID NO: 1139060 - RNA, 19 nt, Artificial Sequence
  Description of Artificial Sequence: Synthetic oligonucleotide
aaugaugaaacauuaggua

SEQ ID NO: 1139061 - RNA, 19 nt, Artificial Sequence
  Description of Artificial Sequence: Synthetic oligonucleotide
ugugauuuuauuaaguguu

SEQ ID NO: 1139062 - RNA, 19 nt, Artificial Sequence
  Description of Artificial Sequence: Synthetic oligonucleotide
uguuugaacucucauagcu

SEQ ID NO: 1139063 - RNA, 19 nt, Artificial Sequence
  Description of Artificial Sequence: Synthetic oligonucleotide
aaaaccuuugauuuaugga

SEQ ID NO: 1139064 - RNA, 19 nt, Artificial Sequence
  Description of Artificial Sequence: Synthetic oligonucleotide
cuacuaaacccaaauagcc

SEQ ID NO: 1139065 - RNA, 19 nt, Artificial Sequence
  Description of Artificial Sequence: Synthetic oligonucleotide
cauuguuaagucuuuauug

SEQ ID NO: 1139066 - RNA, 19 nt, Artificial Sequence
  Description of Artificial Sequence: Synthetic oligonucleotide
cucuacuaaacccaaauag

SEQ ID NO: 1139067 - RNA, 19 nt, Artificial Sequence
  Description of Artificial Sequence: Synthetic oligonucleotide
aaauaaaucccucccacau

SEQ ID NO: 1139068 - RNA, 19 nt, Artificial Sequence
  Description of Artificial Sequence: Synthetic oligonucleotide
auuagguaaaguuagcuaa

SEQ ID NO: 1139069 - RNA, 19 nt, Artificial Sequence
  Description of Artificial Sequence: Synthetic oligonucleotide
uauaucuugugcuuaauuc

SEQ ID NO: 1139070 - RNA, 19 nt, Artificial Sequence
  Description of Artificial Sequence: Synthetic oligonucleotide
ucuuggauacuauugaaac

SEQ ID NO: 1139071 - RNA, 19 nt, Artificial Sequence
  Description of Artificial Sequence: Synthetic oligonucleotide
ugauuuauggacauagaaa

SEQ ID NO: 1139072 - RNA, 19 nt, Artificial Sequence
  Description of Artificial Sequence: Synthetic oligonucleotide
uuaugauugaauauucauc

SEQ ID NO: 1139073 - RNA, 19 nt, Artificial Sequence
  Description of Artificial Sequence: Synthetic oligonucleotide
aauguauaauuuaggcacc

SEQ ID NO: 1139074 - RNA, 19 nt, Artificial Sequence
  Description of Artificial Sequence: Synthetic oligonucleotide
agugucauuucaccaaagc

SEQ ID NO: 1139075 - RNA, 19 nt, Artificial Sequence
  Description of Artificial Sequence: Synthetic oligonucleotide
acagucguaguagaaaucc

SEQ ID NO: 1139076 - RNA, 19 nt, Artificial Sequence
  Description of Artificial Sequence: Synthetic oligonucleotide
uuuccuaguacugugacug

SEQ ID NO: 1139077 - RNA, 19 nt, Artificial Sequence
  Description of Artificial Sequence: Synthetic oligonucleotide
auggcaguggauuugcuac

SEQ ID NO: 1139078 - RNA, 19 nt, Artificial Sequence
  Description of Artificial Sequence: Synthetic oligonucleotide
acguauauaaaccacaauu

SEQ ID NO: 1139079 - RNA, 19 nt, Artificial Sequence
  Description of Artificial Sequence: Synthetic oligonucleotide
uuucuuacaaauuuaugau

SEQ ID NO: 1139080 - RNA, 19 nt, Artificial Sequence
  Description of Artificial Sequence: Synthetic oligonucleotide
aaaaucagugucauuucac

SEQ ID NO: 1139081 - RNA, 19 nt, Artificial Sequence
  Description of Artificial Sequence: Synthetic oligonucleotide
ucuugguagguuauaagca

SEQ ID NO: 1139082 - RNA, 19 nt, Artificial Sequence
  Description of Artificial Sequence: Synthetic oligonucleotide
uauaugcacaguauguaca

SEQ ID NO: 1139083 - RNA, 19 nt, Artificial Sequence
  Description of Artificial Sequence: Synthetic oligonucleotide
ucuaguuuauaaauucacu

SEQ ID NO: 1139084 - RNA, 19 nt, Artificial Sequence
  Description of Artificial Sequence: Synthetic oligonucleotide
ugacuguaaaauacugacg

SEQ ID NO: 1139085 - RNA, 19 nt, Artificial Sequence
  Description of Artificial Sequence: Synthetic oligonucleotide
agcacuaugauuugguuga

SEQ ID NO: 1139086 - RNA, 19 nt, Artificial Sequence
  Description of Artificial Sequence: Synthetic oligonucleotide
acaauguauaauuuaggca

SEQ ID NO: 1139087 - RNA, 19 nt, Artificial Sequence
  Description of Artificial Sequence: Synthetic oligonucleotide
ugucaucucuacuaaaccc

SEQ ID NO: 1139088 - RNA, 19 nt, Artificial Sequence
  Description of Artificial Sequence: Synthetic oligonucleotide
ugguuauagacacaguagu

SEQ ID NO: 1139089 - RNA, 19 nt, Artificial Sequence
  Description of Artificial Sequence: Synthetic oligonucleotide
gaauauucaucauauaugu

SEQ ID NO: 1139090 - RNA, 19 nt, Artificial Sequence
  Description of Artificial Sequence: Synthetic oligonucleotide
auaacuaacauggcagugg

SEQ ID NO: 1139091 - RNA, 19 nt, Artificial Sequence
  Description of Artificial Sequence: Synthetic oligonucleotide
uguaaauagaugaccuuac

SEQ ID NO: 1139092 - RNA, 19 nt, Artificial Sequence
  Description of Artificial Sequence: Synthetic oligonucleotide
caaaaccuuugauuuaugg

SEQ ID NO: 1139093 - RNA, 19 nt, Artificial Sequence
  Description of Artificial Sequence: Synthetic oligonucleotide
gaaaggucaaaagacagac

SEQ ID NO: 1139094 - RNA, 19 nt, Artificial Sequence
  Description of Artificial Sequence: Synthetic oligonucleotide
uugugcuuaauucaguaaa

SEQ ID NO: 1139095 - RNA, 19 nt, Artificial Sequence
  Description of Artificial Sequence: Synthetic oligonucleotide
auuaacagcugucuuauau

SEQ ID NO: 1139096 - RNA, 19 nt, Artificial Sequence
  Description of Artificial Sequence: Synthetic oligonucleotide
acuuaauacauuguuaagu

SEQ ID NO: 1139097 - RNA, 19 nt, Artificial Sequence
  Description of Artificial Sequence: Synthetic oligonucleotide
uuauuaaguguuugcagga

SEQ ID NO: 1139098 - RNA, 19 nt, Artificial Sequence
  Description of Artificial Sequence: Synthetic oligonucleotide
aaaccacacacacacaaaa

SEQ ID NO: 1139099 - RNA, 19 nt, Artificial Sequence
  Description of Artificial Sequence: Synthetic oligonucleotide
aaguguuugcaggagauug

SEQ ID NO: 1139100 - RNA, 19 nt, Artificial Sequence
  Description of Artificial Sequence: Synthetic oligonucleotide
uacaacacacaguaaauaa

SEQ ID NO: 1139101 - RNA, 19 nt, Artificial Sequence
  Description of Artificial Sequence: Synthetic oligonucleotide
uguaaaauacugacggaaa

SEQ ID NO: 1139102 - RNA, 19 nt, Artificial Sequence
  Description of Artificial Sequence: Synthetic oligonucleotide
aaacacguauauaaaccac

SEQ ID NO: 1139103 - RNA, 19 nt, Artificial Sequence
  Description of Artificial Sequence: Synthetic oligonucleotide
ugagacaaaggaaucuucu

SEQ ID NO: 1139104 - RNA, 19 nt, Artificial Sequence
  Description of Artificial Sequence: Synthetic oligonucleotide
ugaagguaaugcuuguuug

SEQ ID NO: 1139105 - RNA, 19 nt, Artificial Sequence
  Description of Artificial Sequence: Synthetic oligonucleotide
agugacaccagucagugau

SEQ ID NO: 1139106 - RNA, 19 nt, Artificial Sequence
  Description of Artificial Sequence: Synthetic oligonucleotide
aacacgugaagguaaugcu

SEQ ID NO: 1139107 - RNA, 19 nt, Artificial Sequence
  Description of Artificial Sequence: Synthetic oligonucleotide
aguacugugacuguaaaau

SEQ ID NO: 1139108 - RNA, 19 nt, Artificial Sequence
  Description of Artificial Sequence: Synthetic oligonucleotide
cauccugagauuaaugaug

SEQ ID NO: 1139109 - RNA, 19 nt, Artificial Sequence
  Description of Artificial Sequence: Synthetic oligonucleotide
ugauuuuagaagugcuucc

SEQ ID NO: 1139110 - RNA, 19 nt, Artificial Sequence
  Description of Artificial Sequence: Synthetic oligonucleotide
aguaaauaaaucccuccca

SEQ ID NO: 1139111 - RNA, 19 nt, Artificial Sequence
  Description of Artificial Sequence: Synthetic oligonucleotide
aaccaggauaacuaacaug

SEQ ID NO: 1139112 - RNA, 19 nt, Artificial Sequence
  Description of Artificial Sequence: Synthetic oligonucleotide
ugauugaauauucaucaua

SEQ ID NO: 1139113 - RNA, 19 nt, Artificial Sequence
  Description of Artificial Sequence: Synthetic oligonucleotide
aagcauagcgcaccagagg

SEQ ID NO: 1139114 - RNA, 19 nt, Artificial Sequence
  Description of Artificial Sequence: Synthetic oligonucleotide
auaacaucgagccaucaaa

SEQ ID NO: 1139115 - RNA, 19 nt, Artificial Sequence
  Description of Artificial Sequence: Synthetic oligonucleotide
uaagcauagcgcaccagag

SEQ ID NO: 1139116 - RNA, 19 nt, Artificial Sequence
  Description of Artificial Sequence: Synthetic oligonucleotide
uacuaaacccaaauagcca

SEQ ID NO: 1139117 - RNA, 19 nt, Artificial Sequence
  Description of Artificial Sequence: Synthetic oligonucleotide
uaaauaguuugaacuuugc

SEQ ID NO: 1139118 - RNA, 19 nt, Artificial Sequence
  Description of Artificial Sequence: Synthetic oligonucleotide
ugcuagaccacacaucgcu

SEQ ID NO: 1139119 - RNA, 19 nt, Artificial Sequence
  Description of Artificial Sequence: Synthetic oligonucleotide
gguagcuuuaauuaaacga

SEQ ID NO: 1139120 - RNA, 19 nt, Artificial Sequence
  Description of Artificial Sequence: Synthetic oligonucleotide
aacauuagguaaaguuagc

SEQ ID NO: 1139121 - RNA, 19 nt, Artificial Sequence
  Description of Artificial Sequence: Synthetic oligonucleotide
uugucaucucuacuaaacc

SEQ ID NO: 1139122 - RNA, 19 nt, Artificial Sequence
  Description of Artificial Sequence: Synthetic oligonucleotide
aggauaacuaacauggcag

SEQ ID NO: 1139123 - RNA, 19 nt, Artificial Sequence
  Description of Artificial Sequence: Synthetic oligonucleotide
cagguuacccugcaaaugg

SEQ ID NO: 1139124 - RNA, 19 nt, Artificial Sequence
  Description of Artificial Sequence: Synthetic oligonucleotide
cacacacacacaaaacacg

SEQ ID NO: 1139125 - RNA, 19 nt, Artificial Sequence
  Description of Artificial Sequence: Synthetic oligonucleotide
cuacugacuuaauacauug

SEQ ID NO: 1139126 - RNA, 19 nt, Artificial Sequence
  Description of Artificial Sequence: Synthetic oligonucleotide
gacacaguaguucagucuc

SEQ ID NO: 1139127 - RNA, 19 nt, Artificial Sequence
  Description of Artificial Sequence: Synthetic oligonucleotide
accaauagcccucuggucu

SEQ ID NO: 1139128 - RNA, 19 nt, Artificial Sequence
  Description of Artificial Sequence: Synthetic oligonucleotide
agguaaaguuagcuaagac

SEQ ID NO: 1139129 - RNA, 19 nt, Artificial Sequence
  Description of Artificial Sequence: Synthetic oligonucleotide
aaaugggaauacaugccac

SEQ ID NO: 1139130 - RNA, 19 nt, Artificial Sequence
  Description of Artificial Sequence: Synthetic oligonucleotide
ugaaaggucaaaagacaga

SEQ ID NO: 1139131 - RNA, 19 nt, Artificial Sequence
  Description of Artificial Sequence: Synthetic oligonucleotide
auucauuauaugcacagua

SEQ ID NO: 1139132 - RNA, 19 nt, Artificial Sequence
  Description of Artificial Sequence: Synthetic oligonucleotide
caguaaauaaaucccuccc

SEQ ID NO: 1139133 - RNA, 19 nt, Artificial Sequence
  Description of Artificial Sequence: Synthetic oligonucleotide
uucaguaaauaguuugaac

SEQ ID NO: 1139134 - RNA, 19 nt, Artificial Sequence
  Description of Artificial Sequence: Synthetic oligonucleotide
uauugaucagacaauugua

SEQ ID NO: 1139135 - RNA, 19 nt, Artificial Sequence
  Description of Artificial Sequence: Synthetic oligonucleotide
auaagcauagcgcaccaga

SEQ ID NO: 1139136 - RNA, 19 nt, Artificial Sequence
  Description of Artificial Sequence: Synthetic oligonucleotide
cauuucaccaaagcaaugc

SEQ ID NO: 1139137 - RNA, 19 nt, Artificial Sequence
  Description of Artificial Sequence: Synthetic oligonucleotide
auaaauucacuauuucaau

SEQ ID NO: 1139138 - RNA, 19 nt, Artificial Sequence
  Description of Artificial Sequence: Synthetic oligonucleotide
uuaaguguuugcaggagau

SEQ ID NO: 1139139 - RNA, 19 nt, Artificial Sequence
  Description of Artificial Sequence: Synthetic oligonucleotide
uuauacaaacuacaugauu

SEQ ID NO: 1139140 - RNA, 19 nt, Artificial Sequence
  Description of Artificial Sequence: Synthetic oligonucleotide
accacacacacacaaaaca

SEQ ID NO: 1139141 - RNA, 19 nt, Artificial Sequence
  Description of Artificial Sequence: Synthetic oligonucleotide
cuaugauuugguugauugg

SEQ ID NO: 1139142 - RNA, 19 nt, Artificial Sequence
  Description of Artificial Sequence: Synthetic oligonucleotide
agguuuuagauuuaucaau

SEQ ID NO: 1139143 - RNA, 19 nt, Artificial Sequence
  Description of Artificial Sequence: Synthetic oligonucleotide
ucgauauacaaagauucug

SEQ ID NO: 1139144 - RNA, 19 nt, Artificial Sequence
  Description of Artificial Sequence: Synthetic oligonucleotide
aacucucauagcucuagcu

SEQ ID NO: 1139145 - RNA, 19 nt, Artificial Sequence
  Description of Artificial Sequence: Synthetic oligonucleotide
aagucuaacagcuguuaau

SEQ ID NO: 1139146 - RNA, 19 nt, Artificial Sequence
  Description of Artificial Sequence: Synthetic oligonucleotide
uuuagaagugcuucccaga

SEQ ID NO: 1139147 - RNA, 19 nt, Artificial Sequence
  Description of Artificial Sequence: Synthetic oligonucleotide
uucgauauacaaagauucu

SEQ ID NO: 1139148 - RNA, 19 nt, Artificial Sequence
  Description of Artificial Sequence: Synthetic oligonucleotide
uggacauagaaaacacgug

SEQ ID NO: 1139149 - RNA, 19 nt, Artificial Sequence
  Description of Artificial Sequence: Synthetic oligonucleotide
acaaaccacacacacacaa

SEQ ID NO: 1139150 - RNA, 19 nt, Artificial Sequence
  Description of Artificial Sequence: Synthetic oligonucleotide
acuauaguuuaggagguag

SEQ ID NO: 1139151 - RNA, 19 nt, Artificial Sequence
  Description of Artificial Sequence: Synthetic oligonucleotide
guuauaagcauagcgcacc

SEQ ID NO: 1139152 - RNA, 19 nt, Artificial Sequence
  Description of Artificial Sequence: Synthetic oligonucleotide
aaagucuaacagcuguuaa

SEQ ID NO: 1139153 - RNA, 19 nt, Artificial Sequence
  Description of Artificial Sequence: Synthetic oligonucleotide
acugacuuaauacauuguu

SEQ ID NO: 1139154 - RNA, 19 nt, Artificial Sequence
  Description of Artificial Sequence: Synthetic oligonucleotide
uuaacagcugucuuauauc

SEQ ID NO: 1139155 - RNA, 19 nt, Artificial Sequence
  Description of Artificial Sequence: Synthetic oligonucleotide
auacuauugaaacuucaau

SEQ ID NO: 1139156 - RNA, 19 nt, Artificial Sequence
  Description of Artificial Sequence: Synthetic oligonucleotide
aacacguauauaaaccaca

SEQ ID NO: 1139157 - RNA, 19 nt, Artificial Sequence
  Description of Artificial Sequence: Synthetic oligonucleotide
cuagcugggagacaauccc

SEQ ID NO: 1139158 - RNA, 19 nt, Artificial Sequence
  Description of Artificial Sequence: Synthetic oligonucleotide
aguaguucagucucugacu

SEQ ID NO: 1139159 - RNA, 19 nt, Artificial Sequence
  Description of Artificial Sequence: Synthetic oligonucleotide
uaacaucgagccaucaaac

SEQ ID NO: 1139160 - RNA, 19 nt, Artificial Sequence
  Description of Artificial Sequence: Synthetic oligonucleotide
aguuguaaauagaugaccu

SEQ ID NO: 1139161 - RNA, 19 nt, Artificial Sequence
  Description of Artificial Sequence: Synthetic oligonucleotide
cuagaccacacaucgcugg

SEQ ID NO: 1139162 - RNA, 19 nt, Artificial Sequence
  Description of Artificial Sequence: Synthetic oligonucleotide
uccacugacaauguaacaa

SEQ ID NO: 1139163 - RNA, 19 nt, Artificial Sequence
  Description of Artificial Sequence: Synthetic oligonucleotide
uuagaagugcuucccagau

SEQ ID NO: 1139164 - RNA, 19 nt, Artificial Sequence
  Description of Artificial Sequence: Synthetic oligonucleotide
agguagcuuuaauuaaacg

SEQ ID NO: 1139165 - RNA, 19 nt, Artificial Sequence
  Description of Artificial Sequence: Synthetic oligonucleotide
ucucuucugagugacacca

SEQ ID NO: 1139166 - RNA, 19 nt, Artificial Sequence
  Description of Artificial Sequence: Synthetic oligonucleotide
cuauaguuuaggagguagc

SEQ ID NO: 1139167 - RNA, 19 nt, Artificial Sequence
  Description of Artificial Sequence: Synthetic oligonucleotide
auagcucuagcugggagac

SEQ ID NO: 1139168 - RNA, 19 nt, Artificial Sequence
  Description of Artificial Sequence: Synthetic oligonucleotide
aauaaacugccaccuuccu

SEQ ID NO: 1139169 - RNA, 19 nt, Artificial Sequence
  Description of Artificial Sequence: Synthetic oligonucleotide
auuaaguguuugcaggaga

SEQ ID NO: 1139170 - RNA, 19 nt, Artificial Sequence
  Description of Artificial Sequence: Synthetic oligonucleotide
aguacuuaguaguugucau

SEQ ID NO: 1139171 - RNA, 19 nt, Artificial Sequence
  Description of Artificial Sequence: Synthetic oligonucleotide
uuguaaauagaugaccuua

SEQ ID NO: 1139172 - RNA, 19 nt, Artificial Sequence
  Description of Artificial Sequence: Synthetic oligonucleotide
cuaacagcuguuaauauua

SEQ ID NO: 1139173 - RNA, 19 nt, Artificial Sequence
  Description of Artificial Sequence: Synthetic oligonucleotide
guuauagacacaguaguuc

SEQ ID NO: 1139174 - RNA, 19 nt, Artificial Sequence
  Description of Artificial Sequence: Synthetic oligonucleotide
ucaauaguacuuaguaguu

SEQ ID NO: 1139175 - RNA, 19 nt, Artificial Sequence
  Description of Artificial Sequence: Synthetic oligonucleotide
aggagauugguuuugucaa

SEQ ID NO: 1139176 - RNA, 19 nt, Artificial Sequence
  Description of Artificial Sequence: Synthetic oligonucleotide
guagcuuuaauuaaacgaa

SEQ ID NO: 1139177 - RNA, 19 nt, Artificial Sequence
  Description of Artificial Sequence: Synthetic oligonucleotide
agccacuauaguuuaggag

SEQ ID NO: 1139178 - RNA, 19 nt, Artificial Sequence
  Description of Artificial Sequence: Synthetic oligonucleotide
ucuaacagcuguuaauauu

SEQ ID NO: 1139179 - RNA, 19 nt, Artificial Sequence
  Description of Artificial Sequence: Synthetic oligonucleotide
aaccacacacacacaaaac

SEQ ID NO: 1139180 - RNA, 19 nt, Artificial Sequence
  Description of Artificial Sequence: Synthetic oligonucleotide
uuaguaguugucaucucua

SEQ ID NO: 1139181 - RNA, 19 nt, Artificial Sequence
  Description of Artificial Sequence: Synthetic oligonucleotide
agaccaauagcccucuggu

SEQ ID NO: 1139182 - RNA, 19 nt, Artificial Sequence
  Description of Artificial Sequence: Synthetic oligonucleotide
auuuaggcaccauucuuca

SEQ ID NO: 1139183 - RNA, 19 nt, Artificial Sequence
  Description of Artificial Sequence: Synthetic oligonucleotide
ucuuauaucuugugcuuaa

SEQ ID NO: 1139184 - RNA, 19 nt, Artificial Sequence
  Description of Artificial Sequence: Synthetic oligonucleotide
uugaucagacaauuguaaa

SEQ ID NO: 1139185 - RNA, 19 nt, Artificial Sequence
  Description of Artificial Sequence: Synthetic oligonucleotide
gaagguaaugcuuguuuga

SEQ ID NO: 1139186 - RNA, 19 nt, Artificial Sequence
  Description of Artificial Sequence: Synthetic oligonucleotide
augguuauagacacaguag

SEQ ID NO: 1139187 - RNA, 19 nt, Artificial Sequence
  Description of Artificial Sequence: Synthetic oligonucleotide
cacgugaagguaaugcuug

SEQ ID NO: 1139188 - RNA, 19 nt, Artificial Sequence
  Description of Artificial Sequence: Synthetic oligonucleotide
ugaacucucauagcucuag

SEQ ID NO: 1139189 - RNA, 19 nt, Artificial Sequence
  Description of Artificial Sequence: Synthetic oligonucleotide
guaguugucaucucuacua

SEQ ID NO: 1139190 - RNA, 19 nt, Artificial Sequence
  Description of Artificial Sequence: Synthetic oligonucleotide
gauaacuaacauggcagug

SEQ ID NO: 1139191 - RNA, 19 nt, Artificial Sequence
  Description of Artificial Sequence: Synthetic oligonucleotide
aaaguuagcuaagacuuuu

SEQ ID NO: 1139192 - RNA, 19 nt, Artificial Sequence
  Description of Artificial Sequence: Synthetic oligonucleotide
ugcuacugacuuaauacau

SEQ ID NO: 1139193 - RNA, 19 nt, Artificial Sequence
  Description of Artificial Sequence: Synthetic oligonucleotide
aacuuugcuagaccacaca

SEQ ID NO: 1139194 - RNA, 19 nt, Artificial Sequence
  Description of Artificial Sequence: Synthetic oligonucleotide
uauguacaguuuaaucauc

SEQ ID NO: 1139195 - RNA, 19 nt, Artificial Sequence
  Description of Artificial Sequence: Synthetic oligonucleotide
ucuugugcuuaauucagua

SEQ ID NO: 1139196 - RNA, 19 nt, Artificial Sequence
  Description of Artificial Sequence: Synthetic oligonucleotide
uagcuuuaauuaaacgaaa

SEQ ID NO: 1139197 - RNA, 19 nt, Artificial Sequence
  Description of Artificial Sequence: Synthetic oligonucleotide
ugauuucgauauacaaaga

SEQ ID NO: 1139198 - RNA, 19 nt, Artificial Sequence
  Description of Artificial Sequence: Synthetic oligonucleotide
acauuagguaaaguuagcu

SEQ ID NO: 1139199 - RNA, 19 nt, Artificial Sequence
  Description of Artificial Sequence: Synthetic oligonucleotide
ucauuucaccaaagcaaug

SEQ ID NO: 1139200 - RNA, 19 nt, Artificial Sequence
  Description of Artificial Sequence: Synthetic oligonucleotide
guaguucagucucugacuc

SEQ ID NO: 1139201 - RNA, 19 nt, Artificial Sequence
  Description of Artificial Sequence: Synthetic oligonucleotide
acuaacauggcaguggauu

SEQ ID NO: 1139202 - RNA, 19 nt, Artificial Sequence
  Description of Artificial Sequence: Synthetic oligonucleotide
aaccuuugauuuauggaca

SEQ ID NO: 1139203 - RNA, 19 nt, Artificial Sequence
  Description of Artificial Sequence: Synthetic oligonucleotide
acgaaaugaacagaagcca

SEQ ID NO: 1139204 - RNA, 19 nt, Artificial Sequence
  Description of Artificial Sequence: Synthetic oligonucleotide
acauuucccaacuuguguu

SEQ ID NO: 1139205 - RNA, 19 nt, Artificial Sequence
  Description of Artificial Sequence: Synthetic oligonucleotide
uuggcaagaggccacuguc

SEQ ID NO: 1139206 - RNA, 19 nt, Artificial Sequence
  Description of Artificial Sequence: Synthetic oligonucleotide
agauuaaugaugaaacauu

SEQ ID NO: 1139207 - RNA, 19 nt, Artificial Sequence
  Description of Artificial Sequence: Synthetic oligonucleotide
aaaagucuaacagcuguua

SEQ ID NO: 1139208 - RNA, 19 nt, Artificial Sequence
  Description of Artificial Sequence: Synthetic oligonucleotide
caaaugggaauacaugcca

SEQ ID NO: 1139209 - RNA, 19 nt, Artificial Sequence
  Description of Artificial Sequence: Synthetic oligonucleotide
gauacuauugaaacuucaa

SEQ ID NO: 1139210 - RNA, 19 nt, Artificial Sequence
  Description of Artificial Sequence: Synthetic oligonucleotide
gguaaaguuagcuaagacu

SEQ ID NO: 1139211 - RNA, 19 nt, Artificial Sequence
  Description of Artificial Sequence: Synthetic oligonucleotide
uuuuccuaguacugugacu

SEQ ID NO: 1139212 - RNA, 19 nt, Artificial Sequence
  Description of Artificial Sequence: Synthetic oligonucleotide
guuuaaucaucaaacugca

SEQ ID NO: 1139213 - RNA, 19 nt, Artificial Sequence
  Description of Artificial Sequence: Synthetic oligonucleotide
uugcuuaaccaggauaacu

SEQ ID NO: 1139214 - RNA, 19 nt, Artificial Sequence
  Description of Artificial Sequence: Synthetic oligonucleotide
aaaccucuuggauacuauu

SEQ ID NO: 1139215 - RNA, 19 nt, Artificial Sequence
  Description of Artificial Sequence: Synthetic oligonucleotide
aagguaaugcuuguuugaa

SEQ ID NO: 1139216 - RNA, 19 nt, Artificial Sequence
  Description of Artificial Sequence: Synthetic oligonucleotide
uuuaaucaucaaacugcaa

SEQ ID NO: 1139217 - RNA, 19 nt, Artificial Sequence
  Description of Artificial Sequence: Synthetic oligonucleotide
ugucuuauaucuugugcuu

SEQ ID NO: 1139218 - RNA, 19 nt, Artificial Sequence
  Description of Artificial Sequence: Synthetic oligonucleotide
aacuucaauaguacuuagu

SEQ ID NO: 1139219 - RNA, 19 nt, Artificial Sequence
  Description of Artificial Sequence: Synthetic oligonucleotide
uuacaacacacaguaaaua

SEQ ID NO: 1139220 - RNA, 19 nt, Artificial Sequence
  Description of Artificial Sequence: Synthetic oligonucleotide
uacugacuuaauacauugu

SEQ ID NO: 1139221 - RNA, 19 nt, Artificial Sequence
  Description of Artificial Sequence: Synthetic oligonucleotide
cuuugcuagaccacacauc

SEQ ID NO: 1139222 - RNA, 19 nt, Artificial Sequence
  Description of Artificial Sequence: Synthetic oligonucleotide
auuuaugauugaauauuca

SEQ ID NO: 1139223 - RNA, 19 nt, Artificial Sequence
  Description of Artificial Sequence: Synthetic oligonucleotide
uaguaguugucaucucuac

SEQ ID NO: 1139224 - RNA, 19 nt, Artificial Sequence
  Description of Artificial Sequence: Synthetic oligonucleotide
gaacugucugagacaaagg

SEQ ID NO: 1139225 - RNA, 19 nt, Artificial Sequence
  Description of Artificial Sequence: Synthetic oligonucleotide
auuacaacacacaguaaau

SEQ ID NO: 1139226 - RNA, 19 nt, Artificial Sequence
  Description of Artificial Sequence: Synthetic oligonucleotide
auuucgauauacaaagauu

SEQ ID NO: 1139227 - RNA, 19 nt, Artificial Sequence
  Description of Artificial Sequence: Synthetic oligonucleotide
guaaauagaugaccuuaca

SEQ ID NO: 1139228 - RNA, 19 nt, Artificial Sequence
  Description of Artificial Sequence: Synthetic oligonucleotide
uaucaaucauuugaacaaa

SEQ ID NO: 1139229 - RNA, 19 nt, Artificial Sequence
  Description of Artificial Sequence: Synthetic oligonucleotide
agucuaacagcuguuaaua

SEQ ID NO: 1139230 - RNA, 19 nt, Artificial Sequence
  Description of Artificial Sequence: Synthetic oligonucleotide
augggaauacaugccacag

SEQ ID NO: 1139231 - RNA, 19 nt, Artificial Sequence
  Description of Artificial Sequence: Synthetic oligonucleotide
gguuuuagauuuaucaauc

SEQ ID NO: 1139232 - RNA, 19 nt, Artificial Sequence
  Description of Artificial Sequence: Synthetic oligonucleotide
uguaacaaccaagacuauu

SEQ ID NO: 1139233 - RNA, 19 nt, Artificial Sequence
  Description of Artificial Sequence: Synthetic oligonucleotide
agcaaugcauaaugaacaa

SEQ ID NO: 1139234 - RNA, 19 nt, Artificial Sequence
  Description of Artificial Sequence: Synthetic oligonucleotide
uggauacuauugaaacuuc

SEQ ID NO: 1139235 - RNA, 19 nt, Artificial Sequence
  Description of Artificial Sequence: Synthetic oligonucleotide
uagaagugcuucccagaug

SEQ ID NO: 1139236 - RNA, 19 nt, Artificial Sequence
  Description of Artificial Sequence: Synthetic oligonucleotide
acaccgucagguuacccug

SEQ ID NO: 1139237 - RNA, 19 nt, Artificial Sequence
  Description of Artificial Sequence: Synthetic oligonucleotide
gguaaugcuuguuugaacu

SEQ ID NO: 1139238 - RNA, 19 nt, Artificial Sequence
  Description of Artificial Sequence: Synthetic oligonucleotide
aaaacacgugaagguaaug

SEQ ID NO: 1139239 - RNA, 19 nt, Artificial Sequence
  Description of Artificial Sequence: Synthetic oligonucleotide
guauguacaguuuaaucau

SEQ ID NO: 1139240 - RNA, 19 nt, Artificial Sequence
  Description of Artificial Sequence: Synthetic oligonucleotide
ugcauaguccgagugggcu

SEQ ID NO: 1139241 - RNA, 19 nt, Artificial Sequence
  Description of Artificial Sequence: Synthetic oligonucleotide
uucagguuuuagauuuauc

SEQ ID NO: 1139242 - RNA, 19 nt, Artificial Sequence
  Description of Artificial Sequence: Synthetic oligonucleotide
ugggaauacaugccacagu

SEQ ID NO: 1139243 - RNA, 19 nt, Artificial Sequence
  Description of Artificial Sequence: Synthetic oligonucleotide
gagguagcuuuaauuaaac

SEQ ID NO: 1139244 - RNA, 19 nt, Artificial Sequence
  Description of Artificial Sequence: Synthetic oligonucleotide
caauaguacuuaguaguug

SEQ ID NO: 1139245 - RNA, 19 nt, Artificial Sequence
  Description of Artificial Sequence: Synthetic oligonucleotide
caguggauuugcuacugac

SEQ ID NO: 1139246 - RNA, 19 nt, Artificial Sequence
  Description of Artificial Sequence: Synthetic oligonucleotide
aggagguagcuuuaauuaa

SEQ ID NO: 1139247 - RNA, 19 nt, Artificial Sequence
  Description of Artificial Sequence: Synthetic oligonucleotide
cauuagguaaaguuagcua

SEQ ID NO: 1139248 - RNA, 19 nt, Artificial Sequence
  Description of Artificial Sequence: Synthetic oligonucleotide
gaaguaagucauccugaga

SEQ ID NO: 1139249 - RNA, 19 nt, Artificial Sequence
  Description of Artificial Sequence: Synthetic oligonucleotide
cagguuuuagauuuaucaa

SEQ ID NO: 1139250 - RNA, 19 nt, Artificial Sequence
  Description of Artificial Sequence: Synthetic oligonucleotide
gaacucucauagcucuagc

SEQ ID NO: 1139251 - RNA, 19 nt, Artificial Sequence
  Description of Artificial Sequence: Synthetic oligonucleotide
guaaugcuuguuugaacuc

SEQ ID NO: 1139252 - RNA, 19 nt, Artificial Sequence
  Description of Artificial Sequence: Synthetic oligonucleotide
cugucuuauaucuugugcu

SEQ ID NO: 1139253 - RNA, 19 nt, Artificial Sequence
  Description of Artificial Sequence: Synthetic oligonucleotide
auaguacuuaguaguuguc

SEQ ID NO: 1139254 - RNA, 19 nt, Artificial Sequence
  Description of Artificial Sequence: Synthetic oligonucleotide
agcagucgcacaccgucag

SEQ ID NO: 1139255 - RNA, 19 nt, Artificial Sequence
  Description of Artificial Sequence: Synthetic oligonucleotide
guacuuaguaguugucauc

SEQ ID NO: 1139256 - RNA, 19 nt, Artificial Sequence
  Description of Artificial Sequence: Synthetic oligonucleotide
ucgcacaccgucagguuac

SEQ ID NO: 1139257 - RNA, 19 nt, Artificial Sequence
  Description of Artificial Sequence: Synthetic oligonucleotide
aguaagucauccugagauu

SEQ ID NO: 1139258 - RNA, 19 nt, Artificial Sequence
  Description of Artificial Sequence: Synthetic oligonucleotide
accuuugauuuauggacau

SEQ ID NO: 1139259 - RNA, 19 nt, Artificial Sequence
  Description of Artificial Sequence: Synthetic oligonucleotide
ugacucacagcagucgcac

SEQ ID NO: 1139260 - RNA, 19 nt, Artificial Sequence
  Description of Artificial Sequence: Synthetic oligonucleotide
cuaugagcacuaugauuug

SEQ ID NO: 1139261 - RNA, 19 nt, Artificial Sequence
  Description of Artificial Sequence: Synthetic oligonucleotide
accagaggggaauccacga

SEQ ID NO: 1139262 - RNA, 19 nt, Artificial Sequence
  Description of Artificial Sequence: Synthetic oligonucleotide
agcuuuaauuaaacgaaau

SEQ ID NO: 1139263 - RNA, 19 nt, Artificial Sequence
  Description of Artificial Sequence: Synthetic oligonucleotide
auagcccucuggucuuugg

SEQ ID NO: 1139264 - RNA, 19 nt, Artificial Sequence
  Description of Artificial Sequence: Synthetic oligonucleotide
aguggauuugcuacugacu

SEQ ID NO: 1139265 - RNA, 19 nt, Artificial Sequence
  Description of Artificial Sequence: Synthetic oligonucleotide
cuuaguaguugucaucucu

SEQ ID NO: 1139266 - RNA, 19 nt, Artificial Sequence
  Description of Artificial Sequence: Synthetic oligonucleotide
ccacacacacacaaaacac

SEQ ID NO: 1139267 - RNA, 19 nt, Artificial Sequence
  Description of Artificial Sequence: Synthetic oligonucleotide
ugagcacuaugauuugguu

SEQ ID NO: 1139268 - RNA, 19 nt, Artificial Sequence
  Description of Artificial Sequence: Synthetic oligonucleotide
uuuaggcaccauucuucac

SEQ ID NO: 1139269 - RNA, 19 nt, Artificial Sequence
  Description of Artificial Sequence: Synthetic oligonucleotide
gucaacacaggacaacugu

SEQ ID NO: 1139270 - RNA, 19 nt, Artificial Sequence
  Description of Artificial Sequence: Synthetic oligonucleotide
ucaaaccucuuggauacua

SEQ ID NO: 1139271 - RNA, 19 nt, Artificial Sequence
  Description of Artificial Sequence: Synthetic oligonucleotide
aauccacgacucugguaga

SEQ ID NO: 1139272 - RNA, 19 nt, Artificial Sequence
  Description of Artificial Sequence: Synthetic oligonucleotide
uuuuggcccugaaguaagu

SEQ ID NO: 1139273 - RNA, 19 nt, Artificial Sequence
  Description of Artificial Sequence: Synthetic oligonucleotide
uugcuagaccacacaucgc

SEQ ID NO: 1139274 - RNA, 19 nt, Artificial Sequence
  Description of Artificial Sequence: Synthetic oligonucleotide
ucguaguagaaauccuguu

SEQ ID NO: 1139275 - RNA, 19 nt, Artificial Sequence
  Description of Artificial Sequence: Synthetic oligonucleotide
uacccugcaaaugggaaua

SEQ ID NO: 1139276 - RNA, 19 nt, Artificial Sequence
  Description of Artificial Sequence: Synthetic oligonucleotide
gaacuuugcuagaccacac

SEQ ID NO: 1139277 - RNA, 19 nt, Artificial Sequence
  Description of Artificial Sequence: Synthetic oligonucleotide
acaguauguacaguuuaau

SEQ ID NO: 1139278 - RNA, 19 nt, Artificial Sequence
  Description of Artificial Sequence: Synthetic oligonucleotide
uguauaauuuaggcaccau

SEQ ID NO: 1139279 - RNA, 19 nt, Artificial Sequence
  Description of Artificial Sequence: Synthetic oligonucleotide
aggggaauccacgacucug

SEQ ID NO: 1139280 - RNA, 19 nt, Artificial Sequence
  Description of Artificial Sequence: Synthetic oligonucleotide
acaguaguucagucucuga

SEQ ID NO: 1139281 - RNA, 19 nt, Artificial Sequence
  Description of Artificial Sequence: Synthetic oligonucleotide
gcagccacuauaguuuagg

SEQ ID NO: 1139282 - RNA, 19 nt, Artificial Sequence
  Description of Artificial Sequence: Synthetic oligonucleotide
ggaauacaugccacagucg

SEQ ID NO: 1139283 - RNA, 19 nt, Artificial Sequence
  Description of Artificial Sequence: Synthetic oligonucleotide
uccacgacucugguagaag

SEQ ID NO: 1139284 - RNA, 19 nt, Artificial Sequence
  Description of Artificial Sequence: Synthetic oligonucleotide
cacagucguaguagaaauc

SEQ ID NO: 1139285 - RNA, 19 nt, Artificial Sequence
  Description of Artificial Sequence: Synthetic oligonucleotide
acacguauauaaaccacaa

SEQ ID NO: 1139286 - RNA, 19 nt, Artificial Sequence
  Description of Artificial Sequence: Synthetic oligonucleotide
gaccaauagcccucugguc

SEQ ID NO: 1139287 - RNA, 19 nt, Artificial Sequence
  Description of Artificial Sequence: Synthetic oligonucleotide
gagugggcugacugugugc

SEQ ID NO: 1139288 - RNA, 19 nt, Artificial Sequence
  Description of Artificial Sequence: Synthetic oligonucleotide
guggauuugcuacugacuu

SEQ ID NO: 1139289 - RNA, 19 nt, Artificial Sequence
  Description of Artificial Sequence: Synthetic oligonucleotide
acuacaugauuucgauaua

SEQ ID NO: 1139290 - RNA, 19 nt, Artificial Sequence
  Description of Artificial Sequence: Synthetic oligonucleotide
gacucuugguagguuauaa

SEQ ID NO: 1139291 - RNA, 19 nt, Artificial Sequence
  Description of Artificial Sequence: Synthetic oligonucleotide
cacacaucgcuggacauca

SEQ ID NO: 1139292 - RNA, 19 nt, Artificial Sequence
  Description of Artificial Sequence: Synthetic oligonucleotide
aacaaaccacacacacaca

SEQ ID NO: 1139293 - RNA, 19 nt, Artificial Sequence
  Description of Artificial Sequence: Synthetic oligonucleotide
uggucagaacugucugaga

SEQ ID NO: 1139294 - RNA, 19 nt, Artificial Sequence
  Description of Artificial Sequence: Synthetic oligonucleotide
agguuacccugcaaauggg

SEQ ID NO: 1139295 - RNA, 19 nt, Artificial Sequence
  Description of Artificial Sequence: Synthetic oligonucleotide
gguuauaagcauagcgcac

SEQ ID NO: 1139296 - RNA, 19 nt, Artificial Sequence
  Description of Artificial Sequence: Synthetic oligonucleotide
ggggaauccacgacucugg

SEQ ID NO: 1139297 - RNA, 19 nt, Artificial Sequence
  Description of Artificial Sequence: Synthetic oligonucleotide
acgugaagguaaugcuugu

SEQ ID NO: 1139298 - RNA, 19 nt, Artificial Sequence
  Description of Artificial Sequence: Synthetic oligonucleotide
cauagcgcaccagagggga

SEQ ID NO: 1139299 - RNA, 19 nt, Artificial Sequence
  Description of Artificial Sequence: Synthetic oligonucleotide
caaaccacacacacacaaa

SEQ ID NO: 1139300 - RNA, 19 nt, Artificial Sequence
  Description of Artificial Sequence: Synthetic oligonucleotide
gacauaacaucgagccauc

SEQ ID NO: 1139301 - RNA, 19 nt, Artificial Sequence
  Description of Artificial Sequence: Synthetic oligonucleotide
aggacaacugugugauuuu

SEQ ID NO: 1139302 - RNA, 19 nt, Artificial Sequence
  Description of Artificial Sequence: Synthetic oligonucleotide
cacgacucugguagaagca

SEQ ID NO: 1139303 - RNA, 19 nt, Artificial Sequence
  Description of Artificial Sequence: Synthetic oligonucleotide
agaugaccuuacaaaauua

SEQ ID NO: 1139304 - RNA, 19 nt, Artificial Sequence
  Description of Artificial Sequence: Synthetic oligonucleotide
guuacccugcaaaugggaa

SEQ ID NO: 1139305 - RNA, 19 nt, Artificial Sequence
  Description of Artificial Sequence: Synthetic oligonucleotide
ugcaggagauugguuuugu

SEQ ID NO: 1139306 - RNA, 19 nt, Artificial Sequence
  Description of Artificial Sequence: Synthetic oligonucleotide
cuaguacugugacuguaaa

SEQ ID NO: 1139307 - RNA, 19 nt, Artificial Sequence
  Description of Artificial Sequence: Synthetic oligonucleotide
uccuaguacugugacugua

SEQ ID NO: 1139308 - RNA, 19 nt, Artificial Sequence
  Description of Artificial Sequence: Synthetic oligonucleotide
ucgcuggacaucacauuuu

SEQ ID NO: 1139309 - RNA, 19 nt, Artificial Sequence
  Description of Artificial Sequence: Synthetic oligonucleotide
guuguaaauagaugaccuu

SEQ ID NO: 1139310 - RNA, 19 nt, Artificial Sequence
  Description of Artificial Sequence: Synthetic oligonucleotide
ucagaccaauagcccucug

SEQ ID NO: 1139311 - RNA, 19 nt, Artificial Sequence
  Description of Artificial Sequence: Synthetic oligonucleotide
cagucucugacucuuggua

SEQ ID NO: 1139312 - RNA, 19 nt, Artificial Sequence
  Description of Artificial Sequence: Synthetic oligonucleotide
cugcaaucuagcuuaaguu

SEQ ID NO: 1139313 - RNA, 19 nt, Artificial Sequence
  Description of Artificial Sequence: Synthetic oligonucleotide
cacaucgcuggacaucaca

SEQ ID NO: 1139314 - RNA, 19 nt, Artificial Sequence
  Description of Artificial Sequence: Synthetic oligonucleotide
gcaccauucuucacaaaug

SEQ ID NO: 1139315 - RNA, 19 nt, Artificial Sequence
  Description of Artificial Sequence: Synthetic oligonucleotide
uggcagccacuauaguuua

SEQ ID NO: 1139316 - RNA, 19 nt, Artificial Sequence
  Description of Artificial Sequence: Synthetic oligonucleotide
acauaacaucgagccauca

SEQ ID NO: 1139317 - RNA, 19 nt, Artificial Sequence
  Description of Artificial Sequence: Synthetic oligonucleotide
ggcaccauucuucacaaau

SEQ ID NO: 1139318 - RNA, 19 nt, Artificial Sequence
  Description of Artificial Sequence: Synthetic oligonucleotide
gaaaacacgugaagguaau

SEQ ID NO: 1139319 - RNA, 19 nt, Artificial Sequence
  Description of Artificial Sequence: Synthetic oligonucleotide
ggagguagcuuuaauuaaa

SEQ ID NO: 1139320 - RNA, 19 nt, Artificial Sequence
  Description of Artificial Sequence: Synthetic oligonucleotide
ggauaacuaacauggcagu

SEQ ID NO: 1139321 - RNA, 19 nt, Artificial Sequence
  Description of Artificial Sequence: Synthetic oligonucleotide
gucguaguagaaauccugu

SEQ ID NO: 1139322 - RNA, 19 nt, Artificial Sequence
  Description of Artificial Sequence: Synthetic oligonucleotide
caccgucagguuacccugc

SEQ ID NO: 1139323 - RNA, 19 nt, Artificial Sequence
  Description of Artificial Sequence: Synthetic oligonucleotide
gugcuuaauucaguaaaua

SEQ ID NO: 1139324 - RNA, 19 nt, Artificial Sequence
  Description of Artificial Sequence: Synthetic oligonucleotide
ccaggauaacuaacauggc

SEQ ID NO: 1139325 - RNA, 19 nt, Artificial Sequence
  Description of Artificial Sequence: Synthetic oligonucleotide
agcgcaccagaggggaauc

SEQ ID NO: 1139326 - RNA, 19 nt, Artificial Sequence
  Description of Artificial Sequence: Synthetic oligonucleotide
cacaccgucagguuacccu

SEQ ID NO: 1139327 - RNA, 19 nt, Artificial Sequence
  Description of Artificial Sequence: Synthetic oligonucleotide
cucuaugagcacuaugauu

SEQ ID NO: 1139328 - RNA, 19 nt, Artificial Sequence
  Description of Artificial Sequence: Synthetic oligonucleotide
gucuuauaucuugugcuua

SEQ ID NO: 1139329 - RNA, 19 nt, Artificial Sequence
  Description of Artificial Sequence: Synthetic oligonucleotide
gucgcacaccgucagguua

SEQ ID NO: 1139330 - RNA, 19 nt, Artificial Sequence
  Description of Artificial Sequence: Synthetic oligonucleotide
gucagguuacccugcaaau

SEQ ID NO: 1139331 - RNA, 19 nt, Artificial Sequence
  Description of Artificial Sequence: Synthetic oligonucleotide
uccccacaaccaccuuggc

SEQ ID NO: 1139332 - RNA, 19 nt, Artificial Sequence
  Description of Artificial Sequence: Synthetic oligonucleotide
gucuaacagcuguuaauau

SEQ ID NO: 1139333 - RNA, 19 nt, Artificial Sequence
  Description of Artificial Sequence: Synthetic oligonucleotide
uagcgcaccagaggggaau

SEQ ID NO: 1139334 - RNA, 19 nt, Artificial Sequence
  Description of Artificial Sequence: Synthetic oligonucleotide
guuuaggagguagcuuuaa

SEQ ID NO: 1139335 - RNA, 19 nt, Artificial Sequence
  Description of Artificial Sequence: Synthetic oligonucleotide
ugacucuugguagguuaua

SEQ ID NO: 1139336 - RNA, 19 nt, Artificial Sequence
  Description of Artificial Sequence: Synthetic oligonucleotide
acacaguaguucagucucu

SEQ ID NO: 1139337 - RNA, 19 nt, Artificial Sequence
  Description of Artificial Sequence: Synthetic oligonucleotide
ggagauugguuuugucaaa

SEQ ID NO: 1139338 - RNA, 19 nt, Artificial Sequence
  Description of Artificial Sequence: Synthetic oligonucleotide
cuuuggcaagaggccacug

SEQ ID NO: 1139339 - RNA, 19 nt, Artificial Sequence
  Description of Artificial Sequence: Synthetic oligonucleotide
agucgcacaccgucagguu

SEQ ID NO: 1139340 - RNA, 19 nt, Artificial Sequence
  Description of Artificial Sequence: Synthetic oligonucleotide
cguauauaaaccacaauuu

SEQ ID NO: 1139341 - RNA, 19 nt, Artificial Sequence
  Description of Artificial Sequence: Synthetic oligonucleotide
gguuacccugcaaauggga

SEQ ID NO: 1139342 - RNA, 19 nt, Artificial Sequence
  Description of Artificial Sequence: Synthetic oligonucleotide
gcauagcgcaccagagggg

SEQ ID NO: 1139343 - RNA, 19 nt, Artificial Sequence
  Description of Artificial Sequence: Synthetic oligonucleotide
auaguccgagugggcugac

SEQ ID NO: 1139344 - RNA, 19 nt, Artificial Sequence
  Description of Artificial Sequence: Synthetic oligonucleotide
gcuagaccacacaucgcug

SEQ ID NO: 1139345 - RNA, 19 nt, Artificial Sequence
  Description of Artificial Sequence: Synthetic oligonucleotide
ccuaguacugugacuguaa

SEQ ID NO: 1139346 - RNA, 19 nt, Artificial Sequence
  Description of Artificial Sequence: Synthetic oligonucleotide
caccuggucagaacugucu

SEQ ID NO: 1139347 - RNA, 19 nt, Artificial Sequence
  Description of Artificial Sequence: Synthetic oligonucleotide
gcagucgcacaccgucagg

SEQ ID NO: 1139348 - RNA, 19 nt, Artificial Sequence
  Description of Artificial Sequence: Synthetic oligonucleotide
ccagaggggaauccacgac

SEQ ID NO: 1139349 - RNA, 19 nt, Artificial Sequence
  Description of Artificial Sequence: Synthetic oligonucleotide
acacaucgcuggacaucac

SEQ ID NO: 1139350 - RNA, 19 nt, Artificial Sequence
  Description of Artificial Sequence: Synthetic oligonucleotide
cugacucuugguagguuau

SEQ ID NO: 1139351 - RNA, 19 nt, Artificial Sequence
  Description of Artificial Sequence: Synthetic oligonucleotide
cacguauauaaaccacaau

SEQ ID NO: 1139352 - RNA, 19 nt, Artificial Sequence
  Description of Artificial Sequence: Synthetic oligonucleotide
gccacagucguaguagaaa

SEQ ID NO: 1139353 - RNA, 19 nt, Artificial Sequence
  Description of Artificial Sequence: Synthetic oligonucleotide
cccaaauagccauuagccu

SEQ ID NO: 1139354 - RNA, 19 nt, Artificial Sequence
  Description of Artificial Sequence: Synthetic oligonucleotide
gccaucaaaccucuuggau

SEQ ID NO: 1139355 - RNA, 19 nt, Artificial Sequence
  Description of Artificial Sequence: Synthetic oligonucleotide
gccacauuucccaacuugu

SEQ ID NO: 1139356 - RNA, 19 nt, Artificial Sequence
  Description of Artificial Sequence: Synthetic oligonucleotide
gcaguggauuugcuacuga

SEQ ID NO: 1139357 - RNA, 19 nt, Artificial Sequence
  Description of Artificial Sequence: Synthetic oligonucleotide
ccacuauaguuuaggaggu

SEQ ID NO: 1139358 - RNA, 19 nt, Artificial Sequence
  Description of Artificial Sequence: Synthetic oligonucleotide
cuuauaucuugugcuuaau

SEQ ID NO: 1139359 - RNA, 19 nt, Artificial Sequence
  Description of Artificial Sequence: Synthetic oligonucleotide
cagucgcacaccgucaggu

SEQ ID NO: 1139360 - RNA, 19 nt, Artificial Sequence
  Description of Artificial Sequence: Synthetic oligonucleotide
guccgagugggcugacugu

SEQ ID NO: 1139361 - RNA, 19 nt, Artificial Sequence
  Description of Artificial Sequence: Synthetic oligonucleotide
cgucagguuacccugcaaa

SEQ ID NO: 1139362 - RNA, 19 nt, Artificial Sequence
  Description of Artificial Sequence: Synthetic oligonucleotide
ggcagccacuauaguuuag

SEQ ID NO: 1139363 - RNA, 19 nt, Artificial Sequence
  Description of Artificial Sequence: Synthetic oligonucleotide
cacuauaguuuaggaggua

SEQ ID NO: 1139364 - RNA, 19 nt, Artificial Sequence
  Description of Artificial Sequence: Synthetic oligonucleotide
gccugcaccuggucagaac

SEQ ID NO: 1139365 - RNA, 19 nt, Artificial Sequence
  Description of Artificial Sequence: Synthetic oligonucleotide
gggaauccacgacucuggu

SEQ ID NO: 1139366 - RNA, 19 nt, Artificial Sequence
  Description of Artificial Sequence: Synthetic oligonucleotide
cugcuacuggcagccacua

SEQ ID NO: 1139367 - RNA, 19 nt, Artificial Sequence
  Description of Artificial Sequence: Synthetic oligonucleotide
gcgcaccagaggggaaucc

SEQ ID NO: 1139368 - RNA, 19 nt, Artificial Sequence
  Description of Artificial Sequence: Synthetic oligonucleotide
ccaauagcccucuggucuu

SEQ ID NO: 1139369 - RNA, 19 nt, Artificial Sequence
  Description of Artificial Sequence: Synthetic oligonucleotide
ccuuugauuuauggacaua

SEQ ID NO: 1139370 - RNA, 19 nt, Artificial Sequence
  Description of Artificial Sequence: Synthetic oligonucleotide
cgcacaccgucagguuacc

SEQ ID NO: 1139371 - RNA, 19 nt, Artificial Sequence
  Description of Artificial Sequence: Synthetic oligonucleotide
ccgucagguuacccugcaa

SEQ ID NO: 1139372 - RNA, 19 nt, Artificial Sequence
  Description of Artificial Sequence: Synthetic oligonucleotide
gcacuaugauuugguugau

SEQ ID NO: 1139373 - RNA, 19 nt, Artificial Sequence
  Description of Artificial Sequence: Synthetic oligonucleotide
uacaaguuaacucagaugg

SEQ ID NO: 1139374 - RNA, 19 nt, Artificial Sequence
  Description of Artificial Sequence: Synthetic oligonucleotide
agaaguacccuacagacac

SEQ ID NO: 1139375 - RNA, 19 nt, Artificial Sequence
  Description of Artificial Sequence: Synthetic oligonucleotide
gauguguccaguuacacag

SEQ ID NO: 1139376 - RNA, 19 nt, Artificial Sequence
  Description of Artificial Sequence: Synthetic oligonucleotide
ucuaauuucaacuccgcag

SEQ ID NO: 1139377 - RNA, 19 nt, Artificial Sequence
  Description of Artificial Sequence: Synthetic oligonucleotide
uuuagugaaaacuaucugu

SEQ ID NO: 1139378 - RNA, 19 nt, Artificial Sequence
  Description of Artificial Sequence: Synthetic oligonucleotide
uuagugaaaacuaucugug

SEQ ID NO: 1139379 - RNA, 19 nt, Artificial Sequence
  Description of Artificial Sequence: Synthetic oligonucleotide
uucauuacagacgacacag

SEQ ID NO: 1139380 - RNA, 19 nt, Artificial Sequence
  Description of Artificial Sequence: Synthetic oligonucleotide
ugaucagauguccacaaag

SEQ ID NO: 1139381 - RNA, 19 nt, Artificial Sequence
  Description of Artificial Sequence: Synthetic oligonucleotide
aaaggcaccccauccagac

SEQ ID NO: 1139382 - RNA, 19 nt, Artificial Sequence
  Description of Artificial Sequence: Synthetic oligonucleotide
agugaaaacuaucugugag

SEQ ID NO: 1139383 - RNA, 19 nt, Artificial Sequence
  Description of Artificial Sequence: Synthetic oligonucleotide
ugagaucucacacacaaaa

SEQ ID NO: 1139384 - RNA, 19 nt, Artificial Sequence
  Description of Artificial Sequence: Synthetic oligonucleotide
aaguaaucagcuuuagggu

SEQ ID NO: 1139385 - RNA, 19 nt, Artificial Sequence
  Description of Artificial Sequence: Synthetic oligonucleotide
aaugguagcacuccacaug

SEQ ID NO: 1139386 - RNA, 19 nt, Artificial Sequence
  Description of Artificial Sequence: Synthetic oligonucleotide
accgaauuaaugucugugc

SEQ ID NO: 1139387 - RNA, 19 nt, Artificial Sequence
  Description of Artificial Sequence: Synthetic oligonucleotide
ucaacuccgcaguagaggg

SEQ ID NO: 1139388 - RNA, 19 nt, Artificial Sequence
  Description of Artificial Sequence: Synthetic oligonucleotide
aaaaggagcucucucccag

SEQ ID NO: 1139389 - RNA, 19 nt, Artificial Sequence
  Description of Artificial Sequence: Synthetic oligonucleotide
ugguuuaccaagcaaacuc

SEQ ID NO: 1139390 - RNA, 19 nt, Artificial Sequence
  Description of Artificial Sequence: Synthetic oligonucleotide
aguaaucagcuuuagggug

SEQ ID NO: 1139391 - RNA, 19 nt, Artificial Sequence
  Description of Artificial Sequence: Synthetic oligonucleotide
cauuacagacgacacagcg

SEQ ID NO: 1139392 - RNA, 19 nt, Artificial Sequence
  Description of Artificial Sequence: Synthetic oligonucleotide
acagacaccucccuggacg

SEQ ID NO: 1139393 - RNA, 19 nt, Artificial Sequence
  Description of Artificial Sequence: Synthetic oligonucleotide
ucaaaccgaauuaaugucu

SEQ ID NO: 1139394 - RNA, 19 nt, Artificial Sequence
  Description of Artificial Sequence: Synthetic oligonucleotide
aguuaacucagauggagug

SEQ ID NO: 1139395 - RNA, 19 nt, Artificial Sequence
  Description of Artificial Sequence: Synthetic oligonucleotide
agacauucauuacagacga

SEQ ID NO: 1139396 - RNA, 19 nt, Artificial Sequence
  Description of Artificial Sequence: Synthetic oligonucleotide
gaagcaugcaucgugguag

SEQ ID NO: 1139397 - RNA, 19 nt, Artificial Sequence
  Description of Artificial Sequence: Synthetic oligonucleotide
acaggugaagcaugcaucg

SEQ ID NO: 1139398 - RNA, 19 nt, Artificial Sequence
  Description of Artificial Sequence: Synthetic oligonucleotide
gugaaaacuaucugugagg

SEQ ID NO: 1139399 - RNA, 19 nt, Artificial Sequence
  Description of Artificial Sequence: Synthetic oligonucleotide
ucuuuacaaguuaacucag

SEQ ID NO: 1139400 - RNA, 19 nt, Artificial Sequence
  Description of Artificial Sequence: Synthetic oligonucleotide
agagauaccucugagacgu

SEQ ID NO: 1139401 - RNA, 19 nt, Artificial Sequence
  Description of Artificial Sequence: Synthetic oligonucleotide
aacuccaaguguacaaagc

SEQ ID NO: 1139402 - RNA, 19 nt, Artificial Sequence
  Description of Artificial Sequence: Synthetic oligonucleotide
uaaucucggacacaguaga

SEQ ID NO: 1139403 - RNA, 19 nt, Artificial Sequence
  Description of Artificial Sequence: Synthetic oligonucleotide
agcggaaacagccagggug

SEQ ID NO: 1139404 - RNA, 19 nt, Artificial Sequence
  Description of Artificial Sequence: Synthetic oligonucleotide
auuuagugaaaacuaucug

SEQ ID NO: 1139405 - RNA, 19 nt, Artificial Sequence
  Description of Artificial Sequence: Synthetic oligonucleotide
ugauaggacuucccuaggg

SEQ ID NO: 1139406 - RNA, 19 nt, Artificial Sequence
  Description of Artificial Sequence: Synthetic oligonucleotide
uggacaagacgucuggugc

SEQ ID NO: 1139407 - RNA, 19 nt, Artificial Sequence
  Description of Artificial Sequence: Synthetic oligonucleotide
agaggcacaacagggaggc

SEQ ID NO: 1139408 - RNA, 19 nt, Artificial Sequence
  Description of Artificial Sequence: Synthetic oligonucleotide
uuacaaguuaacucagaug

SEQ ID NO: 1139409 - RNA, 19 nt, Artificial Sequence
  Description of Artificial Sequence: Synthetic oligonucleotide
uauggcaaugggaaagagc

SEQ ID NO: 1139410 - RNA, 19 nt, Artificial Sequence
  Description of Artificial Sequence: Synthetic oligonucleotide
ugaaaacuaucugugaggu

SEQ ID NO: 1139411 - RNA, 19 nt, Artificial Sequence
  Description of Artificial Sequence: Synthetic oligonucleotide
uguaggacagggcaggccu

SEQ ID NO: 1139412 - RNA, 19 nt, Artificial Sequence
  Description of Artificial Sequence: Synthetic oligonucleotide
aauuucaacuccgcaguag

SEQ ID NO: 1139413 - RNA, 19 nt, Artificial Sequence
  Description of Artificial Sequence: Synthetic oligonucleotide
gaauuaaugucugugcuga

SEQ ID NO: 1139414 - RNA, 19 nt, Artificial Sequence
  Description of Artificial Sequence: Synthetic oligonucleotide
ucucugggagcacaggucc

SEQ ID NO: 1139415 - RNA, 19 nt, Artificial Sequence
  Description of Artificial Sequence: Synthetic oligonucleotide
ucugguuuaccaagcaaac

SEQ ID NO: 1139416 - RNA, 19 nt, Artificial Sequence
  Description of Artificial Sequence: Synthetic oligonucleotide
uuugagugauuccuccuug

SEQ ID NO: 1139417 - RNA, 19 nt, Artificial Sequence
  Description of Artificial Sequence: Synthetic oligonucleotide
uggugauuuagugaaaacu

SEQ ID NO: 1139418 - RNA, 19 nt, Artificial Sequence
  Description of Artificial Sequence: Synthetic oligonucleotide
uucaacuccgcaguagagg

SEQ ID NO: 1139419 - RNA, 19 nt, Artificial Sequence
  Description of Artificial Sequence: Synthetic oligonucleotide
aaacuagagcaucuuccug

SEQ ID NO: 1139420 - RNA, 19 nt, Artificial Sequence
  Description of Artificial Sequence: Synthetic oligonucleotide
ugagguauguuuugugugu

SEQ ID NO: 1139421 - RNA, 19 nt, Artificial Sequence
  Description of Artificial Sequence: Synthetic oligonucleotide
ugcaucgugguagaggucc

SEQ ID NO: 1139422 - RNA, 19 nt, Artificial Sequence
  Description of Artificial Sequence: Synthetic oligonucleotide
ugcauuucacacaggcucc

SEQ ID NO: 1139423 - RNA, 19 nt, Artificial Sequence
  Description of Artificial Sequence: Synthetic oligonucleotide
aaccgaauuaaugucugug

SEQ ID NO: 1139424 - RNA, 19 nt, Artificial Sequence
  Description of Artificial Sequence: Synthetic oligonucleotide
uguaccuuauauugguuuc

SEQ ID NO: 1139425 - RNA, 19 nt, Artificial Sequence
  Description of Artificial Sequence: Synthetic oligonucleotide
uauguuuuguguguggaaa

SEQ ID NO: 1139426 - RNA, 19 nt, Artificial Sequence
  Description of Artificial Sequence: Synthetic oligonucleotide
uguguccaguuacacaggc

SEQ ID NO: 1139427 - RNA, 19 nt, Artificial Sequence
  Description of Artificial Sequence: Synthetic oligonucleotide
auuucaacuccgcaguaga

SEQ ID NO: 1139428 - RNA, 19 nt, Artificial Sequence
  Description of Artificial Sequence: Synthetic oligonucleotide
aacuccgcaguagaggguc

SEQ ID NO: 1139429 - RNA, 19 nt, Artificial Sequence
  Description of Artificial Sequence: Synthetic oligonucleotide
uuaacucagauggagugga

SEQ ID NO: 1139430 - RNA, 19 nt, Artificial Sequence
  Description of Artificial Sequence: Synthetic oligonucleotide
gagagauaccucugagacg

SEQ ID NO: 1139431 - RNA, 19 nt, Artificial Sequence
  Description of Artificial Sequence: Synthetic oligonucleotide
ucccagacgucaaagcuug

SEQ ID NO: 1139432 - RNA, 19 nt, Artificial Sequence
  Description of Artificial Sequence: Synthetic oligonucleotide
gacgacacagcggaaacag

SEQ ID NO: 1139433 - RNA, 19 nt, Artificial Sequence
  Description of Artificial Sequence: Synthetic oligonucleotide
aacaagucaaaagcagugu

SEQ ID NO: 1139434 - RNA, 19 nt, Artificial Sequence
  Description of Artificial Sequence: Synthetic oligonucleotide
cagacuagaggaagcaaag

SEQ ID NO: 1139435 - RNA, 19 nt, Artificial Sequence
  Description of Artificial Sequence: Synthetic oligonucleotide
guacccuacagacaccucc

SEQ ID NO: 1139436 - RNA, 19 nt, Artificial Sequence
  Description of Artificial Sequence: Synthetic oligonucleotide
uuucaacuccgcaguagag

SEQ ID NO: 1139437 - RNA, 19 nt, Artificial Sequence
  Description of Artificial Sequence: Synthetic oligonucleotide
aggcacaacagggaggccc

SEQ ID NO: 1139438 - RNA, 19 nt, Artificial Sequence
  Description of Artificial Sequence: Synthetic oligonucleotide
caaaccgaauuaaugucug

SEQ ID NO: 1139439 - RNA, 19 nt, Artificial Sequence
  Description of Artificial Sequence: Synthetic oligonucleotide
ucaccuuaaggaagcaacu

SEQ ID NO: 1139440 - RNA, 19 nt, Artificial Sequence
  Description of Artificial Sequence: Synthetic oligonucleotide
guagaucuuguucucugag

SEQ ID NO: 1139441 - RNA, 19 nt, Artificial Sequence
  Description of Artificial Sequence: Synthetic oligonucleotide
cagacucaccuuaaggaag

SEQ ID NO: 1139442 - RNA, 19 nt, Artificial Sequence
  Description of Artificial Sequence: Synthetic oligonucleotide
uccaaaguaaucagcuuua

SEQ ID NO: 1139443 - RNA, 19 nt, Artificial Sequence
  Description of Artificial Sequence: Synthetic oligonucleotide
agacucaccuuaaggaagc

SEQ ID NO: 1139444 - RNA, 19 nt, Artificial Sequence
  Description of Artificial Sequence: Synthetic oligonucleotide
agaggguccaagcucagga

SEQ ID NO: 1139445 - RNA, 19 nt, Artificial Sequence
  Description of Artificial Sequence: Synthetic oligonucleotide
guuaacucagauggagugg

SEQ ID NO: 1139446 - RNA, 19 nt, Artificial Sequence
  Description of Artificial Sequence: Synthetic oligonucleotide
cuugugguaaucucggaca

SEQ ID NO: 1139447 - RNA, 19 nt, Artificial Sequence
  Description of Artificial Sequence: Synthetic oligonucleotide
agauaccucugagacgucc

SEQ ID NO: 1139448 - RNA, 19 nt, Artificial Sequence
  Description of Artificial Sequence: Synthetic oligonucleotide
guaggauguguccaguuac

SEQ ID NO: 1139449 - RNA, 19 nt, Artificial Sequence
  Description of Artificial Sequence: Synthetic oligonucleotide
gagugauuccuccuugaug

SEQ ID NO: 1139450 - RNA, 19 nt, Artificial Sequence
  Description of Artificial Sequence: Synthetic oligonucleotide
guuguaaugcaguuuucca

SEQ ID NO: 1139451 - RNA, 19 nt, Artificial Sequence
  Description of Artificial Sequence: Synthetic oligonucleotide
ucugagacguccucaggca

SEQ ID NO: 1139452 - RNA, 19 nt, Artificial Sequence
  Description of Artificial Sequence: Synthetic oligonucleotide
gugguaaucucggacacag

SEQ ID NO: 1139453 - RNA, 19 nt, Artificial Sequence
  Description of Artificial Sequence: Synthetic oligonucleotide
uagugaaaacuaucuguga

SEQ ID NO: 1139454 - RNA, 19 nt, Artificial Sequence
  Description of Artificial Sequence: Synthetic oligonucleotide
caccuugugguaaucucgg

SEQ ID NO: 1139455 - RNA, 19 nt, Artificial Sequence
  Description of Artificial Sequence: Synthetic oligonucleotide
uggaguaggauguguccag

SEQ ID NO: 1139456 - RNA, 19 nt, Artificial Sequence
  Description of Artificial Sequence: Synthetic oligonucleotide
aguggacaucaccggaugg

SEQ ID NO: 1139457 - RNA, 19 nt, Artificial Sequence
  Description of Artificial Sequence: Synthetic oligonucleotide
ugcaaacuagagcaucuuc

SEQ ID NO: 1139458 - RNA, 19 nt, Artificial Sequence
  Description of Artificial Sequence: Synthetic oligonucleotide
aaguacccuacagacaccu

SEQ ID NO: 1139459 - RNA, 19 nt, Artificial Sequence
  Description of Artificial Sequence: Synthetic oligonucleotide
uacccuacagacaccuccc

SEQ ID NO: 1139460 - RNA, 19 nt, Artificial Sequence
  Description of Artificial Sequence: Synthetic oligonucleotide
uugugugccaugugcaaac

SEQ ID NO: 1139461 - RNA, 19 nt, Artificial Sequence
  Description of Artificial Sequence: Synthetic oligonucleotide
accuuauauugguuucuuc

SEQ ID NO: 1139462 - RNA, 19 nt, Artificial Sequence
  Description of Artificial Sequence: Synthetic oligonucleotide
agguauguuuugugugugg

SEQ ID NO: 1139463 - RNA, 19 nt, Artificial Sequence
  Description of Artificial Sequence: Synthetic oligonucleotide
guaaucucggacacaguag

SEQ ID NO: 1139464 - RNA, 19 nt, Artificial Sequence
  Description of Artificial Sequence: Synthetic oligonucleotide
gaaaacaccugucggcaga

SEQ ID NO: 1139465 - RNA, 19 nt, Artificial Sequence
  Description of Artificial Sequence: Synthetic oligonucleotide
ccagaaguacccuacagac

SEQ ID NO: 1139466 - RNA, 19 nt, Artificial Sequence
  Description of Artificial Sequence: Synthetic oligonucleotide
aaguuaacucagauggagu

SEQ ID NO: 1139467 - RNA, 19 nt, Artificial Sequence
  Description of Artificial Sequence: Synthetic oligonucleotide
agcuuugagaucucacaca

SEQ ID NO: 1139468 - RNA, 19 nt, Artificial Sequence
  Description of Artificial Sequence: Synthetic oligonucleotide
ugaguccacggugaaaggc

SEQ ID NO: 1139469 - RNA, 19 nt, Artificial Sequence
  Description of Artificial Sequence: Synthetic oligonucleotide
acucagauggaguggacau

SEQ ID NO: 1139470 - RNA, 19 nt, Artificial Sequence
  Description of Artificial Sequence: Synthetic oligonucleotide
gaggguauggcaaugggaa

SEQ ID NO: 1139471 - RNA, 19 nt, Artificial Sequence
  Description of Artificial Sequence: Synthetic oligonucleotide
gugagcguccauuucuugc

SEQ ID NO: 1139472 - RNA, 19 nt, Artificial Sequence
  Description of Artificial Sequence: Synthetic oligonucleotide
uaggauguguccaguuaca

SEQ ID NO: 1139473 - RNA, 19 nt, Artificial Sequence
  Description of Artificial Sequence: Synthetic oligonucleotide
aguagaggguccaagcuca

SEQ ID NO: 1139474 - RNA, 19 nt, Artificial Sequence
  Description of Artificial Sequence: Synthetic oligonucleotide
ccuacagacaccucccugg

SEQ ID NO: 1139475 - RNA, 19 nt, Artificial Sequence
  Description of Artificial Sequence: Synthetic oligonucleotide
aggagagauaccucugaga

SEQ ID NO: 1139476 - RNA, 19 nt, Artificial Sequence
  Description of Artificial Sequence: Synthetic oligonucleotide
gcaaacuagagcaucuucc

SEQ ID NO: 1139477 - RNA, 19 nt, Artificial Sequence
  Description of Artificial Sequence: Synthetic oligonucleotide
uugagugauuccuccuuga

SEQ ID NO: 1139478 - RNA, 19 nt, Artificial Sequence
  Description of Artificial Sequence: Synthetic oligonucleotide
cugccuuaggagaggagag

SEQ ID NO: 1139479 - RNA, 19 nt, Artificial Sequence
  Description of Artificial Sequence: Synthetic oligonucleotide
cuaauuucaacuccgcagu

SEQ ID NO: 1139480 - RNA, 19 nt, Artificial Sequence
  Description of Artificial Sequence: Synthetic oligonucleotide
gauggugauuuagugaaaa

SEQ ID NO: 1139481 - RNA, 19 nt, Artificial Sequence
  Description of Artificial Sequence: Synthetic oligonucleotide
ugaagcaugcaucguggua

SEQ ID NO: 1139482 - RNA, 19 nt, Artificial Sequence
  Description of Artificial Sequence: Synthetic oligonucleotide
ugggaggacucucuuuaca

SEQ ID NO: 1139483 - RNA, 19 nt, Artificial Sequence
  Description of Artificial Sequence: Synthetic oligonucleotide
aggauguguccaguuacac

SEQ ID NO: 1139484 - RNA, 19 nt, Artificial Sequence
  Description of Artificial Sequence: Synthetic oligonucleotide
acgacccuggcccugcauc

SEQ ID NO: 1139485 - RNA, 19 nt, Artificial Sequence
  Description of Artificial Sequence: Synthetic oligonucleotide
ucauugagcucuagaccac

SEQ ID NO: 1139486 - RNA, 19 nt, Artificial Sequence
  Description of Artificial Sequence: Synthetic oligonucleotide
auaccucugagacguccuc

SEQ ID NO: 1139487 - RNA, 19 nt, Artificial Sequence
  Description of Artificial Sequence: Synthetic oligonucleotide
aguaggauguguccaguua

SEQ ID NO: 1139488 - RNA, 19 nt, Artificial Sequence
  Description of Artificial Sequence: Synthetic oligonucleotide
ccuuauauugguuucuuca

SEQ ID NO: 1139489 - RNA, 19 nt, Artificial Sequence
  Description of Artificial Sequence: Synthetic oligonucleotide
accucugagacguccucag

SEQ ID NO: 1139490 - RNA, 19 nt, Artificial Sequence
  Description of Artificial Sequence: Synthetic oligonucleotide
ugagugauuccuccuugau

SEQ ID NO: 1139491 - RNA, 19 nt, Artificial Sequence
  Description of Artificial Sequence: Synthetic oligonucleotide
cagaggcacaacagggagg

SEQ ID NO: 1139492 - RNA, 19 nt, Artificial Sequence
  Description of Artificial Sequence: Synthetic oligonucleotide
ggugaagcaugcaucgugg

SEQ ID NO: 1139493 - RNA, 19 nt, Artificial Sequence
  Description of Artificial Sequence: Synthetic oligonucleotide
gacgucuggugccugcacc

SEQ ID NO: 1139494 - RNA, 19 nt, Artificial Sequence
  Description of Artificial Sequence: Synthetic oligonucleotide
gagcucuagaccacagucc

SEQ ID NO: 1139495 - RNA, 19 nt, Artificial Sequence
  Description of Artificial Sequence: Synthetic oligonucleotide
uuuagggugagcguccauu

SEQ ID NO: 1139496 - RNA, 19 nt, Artificial Sequence
  Description of Artificial Sequence: Synthetic oligonucleotide
gguuuaccaagcaaacucc

SEQ ID NO: 1139497 - RNA, 19 nt, Artificial Sequence
  Description of Artificial Sequence: Synthetic oligonucleotide
ugccuuaggagaggagagg

SEQ ID NO: 1139498 - RNA, 19 nt, Artificial Sequence
  Description of Artificial Sequence: Synthetic oligonucleotide
ugauuccuccuugauggug

SEQ ID NO: 1139499 - RNA, 19 nt, Artificial Sequence
  Description of Artificial Sequence: Synthetic oligonucleotide
aacuaucugugagguaugu

SEQ ID NO: 1139500 - RNA, 19 nt, Artificial Sequence
  Description of Artificial Sequence: Synthetic oligonucleotide
acaccugucggcagacugc

SEQ ID NO: 1139501 - RNA, 19 nt, Artificial Sequence
  Description of Artificial Sequence: Synthetic oligonucleotide
gguaaucucggacacagua

SEQ ID NO: 1139502 - RNA, 19 nt, Artificial Sequence
  Description of Artificial Sequence: Synthetic oligonucleotide
aguguacaaagcauauaca

SEQ ID NO: 1139503 - RNA, 19 nt, Artificial Sequence
  Description of Artificial Sequence: Synthetic oligonucleotide
ugguuggaaccaagguacc

SEQ ID NO: 1139504 - RNA, 19 nt, Artificial Sequence
  Description of Artificial Sequence: Synthetic oligonucleotide
acagacuagaggaagcaaa

SEQ ID NO: 1139505 - RNA, 19 nt, Artificial Sequence
  Description of Artificial Sequence: Synthetic oligonucleotide
caugcaucgugguagaggu

SEQ ID NO: 1139506 - RNA, 19 nt, Artificial Sequence
  Description of Artificial Sequence: Synthetic oligonucleotide
aggcuacugucaguggacc

SEQ ID NO: 1139507 - RNA, 19 nt, Artificial Sequence
  Description of Artificial Sequence: Synthetic oligonucleotide
uuagggugagcguccauuu

SEQ ID NO: 1139508 - RNA, 19 nt, Artificial Sequence
  Description of Artificial Sequence: Synthetic oligonucleotide
aggcaccccauccagacau

SEQ ID NO: 1139509 - RNA, 19 nt, Artificial Sequence
  Description of Artificial Sequence: Synthetic oligonucleotide
uaaucagcuuuagggugag

SEQ ID NO: 1139510 - RNA, 19 nt, Artificial Sequence
  Description of Artificial Sequence: Synthetic oligonucleotide
ugagugauuuggugagggu

SEQ ID NO: 1139511 - RNA, 19 nt, Artificial Sequence
  Description of Artificial Sequence: Synthetic oligonucleotide
gagguauguuuugugugug

SEQ ID NO: 1139512 - RNA, 19 nt, Artificial Sequence
  Description of Artificial Sequence: Synthetic oligonucleotide
agcaccaagcaguggacaa

SEQ ID NO: 1139513 - RNA, 19 nt, Artificial Sequence
  Description of Artificial Sequence: Synthetic oligonucleotide
accccuuugcugcauuuca

SEQ ID NO: 1139514 - RNA, 19 nt, Artificial Sequence
  Description of Artificial Sequence: Synthetic oligonucleotide
cagacugcuugcaggcugc

SEQ ID NO: 1139515 - RNA, 19 nt, Artificial Sequence
  Description of Artificial Sequence: Synthetic oligonucleotide
guacccuucucacaccaca

SEQ ID NO: 1139516 - RNA, 19 nt, Artificial Sequence
  Description of Artificial Sequence: Synthetic oligonucleotide
caggcuacugucaguggac

SEQ ID NO: 1139517 - RNA, 19 nt, Artificial Sequence
  Description of Artificial Sequence: Synthetic oligonucleotide
guaagggcuucuaauuuca

SEQ ID NO: 1139518 - RNA, 19 nt, Artificial Sequence
  Description of Artificial Sequence: Synthetic oligonucleotide
uugagaucucacacacaaa

SEQ ID NO: 1139519 - RNA, 19 nt, Artificial Sequence
  Description of Artificial Sequence: Synthetic oligonucleotide
cagacgacacagcggaaac

SEQ ID NO: 1139520 - RNA, 19 nt, Artificial Sequence
  Description of Artificial Sequence: Synthetic oligonucleotide
caugaucagauguccacaa

SEQ ID NO: 1139521 - RNA, 19 nt, Artificial Sequence
  Description of Artificial Sequence: Synthetic oligonucleotide
cucuagaccacaguccuca

SEQ ID NO: 1139522 - RNA, 19 nt, Artificial Sequence
  Description of Artificial Sequence: Synthetic oligonucleotide
ggugcuagcuuugagaucu

SEQ ID NO: 1139523 - RNA, 19 nt, Artificial Sequence
  Description of Artificial Sequence: Synthetic oligonucleotide
ugauggugauuuagugaaa

SEQ ID NO: 1139524 - RNA, 19 nt, Artificial Sequence
  Description of Artificial Sequence: Synthetic oligonucleotide
cacacuuuggggccagcac

SEQ ID NO: 1139525 - RNA, 19 nt, Artificial Sequence
  Description of Artificial Sequence: Synthetic oligonucleotide
gcaguguaccuuauauugg

SEQ ID NO: 1139526 - RNA, 19 nt, Artificial Sequence
  Description of Artificial Sequence: Synthetic oligonucleotide
gacaccucccuggacgacc

SEQ ID NO: 1139527 - RNA, 19 nt, Artificial Sequence
  Description of Artificial Sequence: Synthetic oligonucleotide
caagacgucuggugccugc

SEQ ID NO: 1139528 - RNA, 19 nt, Artificial Sequence
  Description of Artificial Sequence: Synthetic oligonucleotide
uggggauccccagaaguac

SEQ ID NO: 1139529 - RNA, 19 nt, Artificial Sequence
  Description of Artificial Sequence: Synthetic oligonucleotide
ccuugauggugauuuagug

SEQ ID NO: 1139530 - RNA, 19 nt, Artificial Sequence
  Description of Artificial Sequence: Synthetic oligonucleotide
agacgucuggugccugcac

SEQ ID NO: 1139531 - RNA, 19 nt, Artificial Sequence
  Description of Artificial Sequence: Synthetic oligonucleotide
uuggugaggguauggcaau

SEQ ID NO: 1139532 - RNA, 19 nt, Artificial Sequence
  Description of Artificial Sequence: Synthetic oligonucleotide
auugagcucuagaccacag

SEQ ID NO: 1139533 - RNA, 19 nt, Artificial Sequence
  Description of Artificial Sequence: Synthetic oligonucleotide
aaggcaccccauccagaca

SEQ ID NO: 1139534 - RNA, 19 nt, Artificial Sequence
  Description of Artificial Sequence: Synthetic oligonucleotide
ugugguaaucucggacaca

SEQ ID NO: 1139535 - RNA, 19 nt, Artificial Sequence
  Description of Artificial Sequence: Synthetic oligonucleotide
gaccguccucaucauugag

SEQ ID NO: 1139536 - RNA, 19 nt, Artificial Sequence
  Description of Artificial Sequence: Synthetic oligonucleotide
cuugacauggcaggaguga

SEQ ID NO: 1139537 - RNA, 19 nt, Artificial Sequence
  Description of Artificial Sequence: Synthetic oligonucleotide
agacuagaggaagcaaaga

SEQ ID NO: 1139538 - RNA, 19 nt, Artificial Sequence
  Description of Artificial Sequence: Synthetic oligonucleotide
ggguggagcucucugggag

SEQ ID NO: 1139539 - RNA, 19 nt, Artificial Sequence
  Description of Artificial Sequence: Synthetic oligonucleotide
uccaguuacacaggcccaa

SEQ ID NO: 1139540 - RNA, 19 nt, Artificial Sequence
  Description of Artificial Sequence: Synthetic oligonucleotide
gcaugcaucgugguagagg

SEQ ID NO: 1139541 - RNA, 19 nt, Artificial Sequence
  Description of Artificial Sequence: Synthetic oligonucleotide
cugagacguccucaggcac

SEQ ID NO: 1139542 - RNA, 19 nt, Artificial Sequence
  Description of Artificial Sequence: Synthetic oligonucleotide
ggugaggguauggcaaugg

SEQ ID NO: 1139543 - RNA, 19 nt, Artificial Sequence
  Description of Artificial Sequence: Synthetic oligonucleotide
cagaaguacccuacagaca

SEQ ID NO: 1139544 - RNA, 19 nt, Artificial Sequence
  Description of Artificial Sequence: Synthetic oligonucleotide
agggucuggcaaggcaacc

SEQ ID NO: 1139545 - RNA, 19 nt, Artificial Sequence
  Description of Artificial Sequence: Synthetic oligonucleotide
uacagacaccucccuggac

SEQ ID NO: 1139546 - RNA, 19 nt, Artificial Sequence
  Description of Artificial Sequence: Synthetic oligonucleotide
uauggacccucagacucac

SEQ ID NO: 1139547 - RNA, 19 nt, Artificial Sequence
  Description of Artificial Sequence: Synthetic oligonucleotide
cagcuuuagggugagcguc

SEQ ID NO: 1139548 - RNA, 19 nt, Artificial Sequence
  Description of Artificial Sequence: Synthetic oligonucleotide
caccuuaaggaagcaacuc

SEQ ID NO: 1139549 - RNA, 19 nt, Artificial Sequence
  Description of Artificial Sequence: Synthetic oligonucleotide
cuggcaaggcaaccucacc

SEQ ID NO: 1139550 - RNA, 19 nt, Artificial Sequence
  Description of Artificial Sequence: Synthetic oligonucleotide
acaaguuaacucagaugga

SEQ ID NO: 1139551 - RNA, 19 nt, Artificial Sequence
  Description of Artificial Sequence: Synthetic oligonucleotide
aagacgucuggugccugca

SEQ ID NO: 1139552 - RNA, 19 nt, Artificial Sequence
  Description of Artificial Sequence: Synthetic oligonucleotide
acgacacagcggaaacagc

SEQ ID NO: 1139553 - RNA, 19 nt, Artificial Sequence
  Description of Artificial Sequence: Synthetic oligonucleotide
ccuugugguaaucucggac

SEQ ID NO: 1139554 - RNA, 19 nt, Artificial Sequence
  Description of Artificial Sequence: Synthetic oligonucleotide
uagggugagcguccauuuc

SEQ ID NO: 1139555 - RNA, 19 nt, Artificial Sequence
  Description of Artificial Sequence: Synthetic oligonucleotide
ccaaugucacagacuagag

SEQ ID NO: 1139556 - RNA, 19 nt, Artificial Sequence
  Description of Artificial Sequence: Synthetic oligonucleotide
agcacaggucccaggcuac

SEQ ID NO: 1139557 - RNA, 19 nt, Artificial Sequence
  Description of Artificial Sequence: Synthetic oligonucleotide
gacuugauggggagugcac

SEQ ID NO: 1139558 - RNA, 19 nt, Artificial Sequence
  Description of Artificial Sequence: Synthetic oligonucleotide
cgaauuaaugucugugcug

SEQ ID NO: 1139559 - RNA, 19 nt, Artificial Sequence
  Description of Artificial Sequence: Synthetic oligonucleotide
caguguaccuuauauuggu

SEQ ID NO: 1139560 - RNA, 19 nt, Artificial Sequence
  Description of Artificial Sequence: Synthetic oligonucleotide
ggaaaacacauggacuuga

SEQ ID NO: 1139561 - RNA, 19 nt, Artificial Sequence
  Description of Artificial Sequence: Synthetic oligonucleotide
aggcccagccucccagacg

SEQ ID NO: 1139562 - RNA, 19 nt, Artificial Sequence
  Description of Artificial Sequence: Synthetic oligonucleotide
cacggauggucucaucuga

SEQ ID NO: 1139563 - RNA, 19 nt, Artificial Sequence
  Description of Artificial Sequence: Synthetic oligonucleotide
uaccuuauauugguuucuu

SEQ ID NO: 1139564 - RNA, 19 nt, Artificial Sequence
  Description of Artificial Sequence: Synthetic oligonucleotide
gcaguuuuccauggaguag

SEQ ID NO: 1139565 - RNA, 19 nt, Artificial Sequence
  Description of Artificial Sequence: Synthetic oligonucleotide
cuuugagaucucacacaca

SEQ ID NO: 1139566 - RNA, 19 nt, Artificial Sequence
  Description of Artificial Sequence: Synthetic oligonucleotide
ugcuagcuuugagaucuca

SEQ ID NO: 1139567 - RNA, 19 nt, Artificial Sequence
  Description of Artificial Sequence: Synthetic oligonucleotide
ugguaaucucggacacagu

SEQ ID NO: 1139568 - RNA, 19 nt, Artificial Sequence
  Description of Artificial Sequence: Synthetic oligonucleotide
auauggacccucagacuca

SEQ ID NO: 1139569 - RNA, 19 nt, Artificial Sequence
  Description of Artificial Sequence: Synthetic oligonucleotide
gauccccagaaguacccua

SEQ ID NO: 1139570 - RNA, 19 nt, Artificial Sequence
  Description of Artificial Sequence: Synthetic oligonucleotide
gccuuaggagaggagaggc

SEQ ID NO: 1139571 - RNA, 19 nt, Artificial Sequence
  Description of Artificial Sequence: Synthetic oligonucleotide
guuggaaccaagguacccu

SEQ ID NO: 1139572 - RNA, 19 nt, Artificial Sequence
  Description of Artificial Sequence: Synthetic oligonucleotide
ccugucggcagacugcuug

SEQ ID NO: 1139573 - RNA, 19 nt, Artificial Sequence
  Description of Artificial Sequence: Synthetic oligonucleotide
ugugugccaugugcaaacu

SEQ ID NO: 1139574 - RNA, 19 nt, Artificial Sequence
  Description of Artificial Sequence: Synthetic oligonucleotide
ugguuucuucaaaccgaau

SEQ ID NO: 1139575 - RNA, 19 nt, Artificial Sequence
  Description of Artificial Sequence: Synthetic oligonucleotide
uggacuugauggggagugc

SEQ ID NO: 1139576 - RNA, 19 nt, Artificial Sequence
  Description of Artificial Sequence: Synthetic oligonucleotide
aggcccaaccuuguguugu

SEQ ID NO: 1139577 - RNA, 19 nt, Artificial Sequence
  Description of Artificial Sequence: Synthetic oligonucleotide
aguggacaagacgucuggu

SEQ ID NO: 1139578 - RNA, 19 nt, Artificial Sequence
  Description of Artificial Sequence: Synthetic oligonucleotide
uggugcuagcuuugagauc

SEQ ID NO: 1139579 - RNA, 19 nt, Artificial Sequence
  Description of Artificial Sequence: Synthetic oligonucleotide
gguuggaaccaagguaccc

SEQ ID NO: 1139580 - RNA, 19 nt, Artificial Sequence
  Description of Artificial Sequence: Synthetic oligonucleotide
gggaggacucucuuuacaa

SEQ ID NO: 1139581 - RNA, 19 nt, Artificial Sequence
  Description of Artificial Sequence: Synthetic oligonucleotide
uggugaggguauggcaaug

SEQ ID NO: 1139582 - RNA, 19 nt, Artificial Sequence
  Description of Artificial Sequence: Synthetic oligonucleotide
gcugccuuaggagaggaga

SEQ ID NO: 1139583 - RNA, 19 nt, Artificial Sequence
  Description of Artificial Sequence: Synthetic oligonucleotide
accuugugguaaucucgga

SEQ ID NO: 1139584 - RNA, 19 nt, Artificial Sequence
  Description of Artificial Sequence: Synthetic oligonucleotide
gaaggaugggaagcccaca

SEQ ID NO: 1139585 - RNA, 19 nt, Artificial Sequence
  Description of Artificial Sequence: Synthetic oligonucleotide
ccauggaguaggauguguc

SEQ ID NO: 1139586 - RNA, 19 nt, Artificial Sequence
  Description of Artificial Sequence: Synthetic oligonucleotide
gagacguccucaggcacuc

SEQ ID NO: 1139587 - RNA, 19 nt, Artificial Sequence
  Description of Artificial Sequence: Synthetic oligonucleotide
gauaccucugagacguccu

SEQ ID NO: 1139588 - RNA, 19 nt, Artificial Sequence
  Description of Artificial Sequence: Synthetic oligonucleotide
guugugugccaugugcaaa

SEQ ID NO: 1139589 - RNA, 19 nt, Artificial Sequence
  Description of Artificial Sequence: Synthetic oligonucleotide
aggcaaccucaccuuggug

SEQ ID NO: 1139590 - RNA, 19 nt, Artificial Sequence
  Description of Artificial Sequence: Synthetic oligonucleotide
acuccgcaguagagggucc

SEQ ID NO: 1139591 - RNA, 19 nt, Artificial Sequence
  Description of Artificial Sequence: Synthetic oligonucleotide
aguacccuacagacaccuc

SEQ ID NO: 1139592 - RNA, 19 nt, Artificial Sequence
  Description of Artificial Sequence: Synthetic oligonucleotide
caaacaccccuuugcugca

SEQ ID NO: 1139593 - RNA, 19 nt, Artificial Sequence
  Description of Artificial Sequence: Synthetic oligonucleotide
aaacaccugucggcagacu

SEQ ID NO: 1139594 - RNA, 19 nt, Artificial Sequence
  Description of Artificial Sequence: Synthetic oligonucleotide
guguaggacagggcaggcc

SEQ ID NO: 1139595 - RNA, 19 nt, Artificial Sequence
  Description of Artificial Sequence: Synthetic oligonucleotide
acucaccuuaaggaagcaa

SEQ ID NO: 1139596 - RNA, 19 nt, Artificial Sequence
  Description of Artificial Sequence: Synthetic oligonucleotide
aggacucucuuuacaaguu

SEQ ID NO: 1139597 - RNA, 19 nt, Artificial Sequence
  Description of Artificial Sequence: Synthetic oligonucleotide
cacaacacggauggucuca

SEQ ID NO: 1139598 - RNA, 19 nt, Artificial Sequence
  Description of Artificial Sequence: Synthetic oligonucleotide
ugucggcagacugcuugca

SEQ ID NO: 1139599 - RNA, 19 nt, Artificial Sequence
  Description of Artificial Sequence: Synthetic oligonucleotide
uggacgacccuggcccugc

SEQ ID NO: 1139600 - RNA, 19 nt, Artificial Sequence
  Description of Artificial Sequence: Synthetic oligonucleotide
cagacaccucccuggacga

SEQ ID NO: 1139601 - RNA, 19 nt, Artificial Sequence
  Description of Artificial Sequence: Synthetic oligonucleotide
ggugagcguccauuucuug

SEQ ID NO: 1139602 - RNA, 19 nt, Artificial Sequence
  Description of Artificial Sequence: Synthetic oligonucleotide
cauugagcucuagaccaca

SEQ ID NO: 1139603 - RNA, 19 nt, Artificial Sequence
  Description of Artificial Sequence: Synthetic oligonucleotide
caucgugguagaggucccc

SEQ ID NO: 1139604 - RNA, 19 nt, Artificial Sequence
  Description of Artificial Sequence: Synthetic oligonucleotide
ggcccugcaucccacugug

SEQ ID NO: 1139605 - RNA, 19 nt, Artificial Sequence
  Description of Artificial Sequence: Synthetic oligonucleotide
cuuguguugugugccaugu

SEQ ID NO: 1139606 - RNA, 19 nt, Artificial Sequence
  Description of Artificial Sequence: Synthetic oligonucleotide
gugccaugugcaaacuaga

SEQ ID NO: 1139607 - RNA, 19 nt, Artificial Sequence
  Description of Artificial Sequence: Synthetic oligonucleotide
ccagacgucaaagcuuggc

SEQ ID NO: 1139608 - RNA, 19 nt, Artificial Sequence
  Description of Artificial Sequence: Synthetic oligonucleotide
ggaaggaugggaagcccac

SEQ ID NO: 1139609 - RNA, 19 nt, Artificial Sequence
  Description of Artificial Sequence: Synthetic oligonucleotide
aguguaccuuauauugguu

SEQ ID NO: 1139610 - RNA, 19 nt, Artificial Sequence
  Description of Artificial Sequence: Synthetic oligonucleotide
agacaccucccuggacgac

SEQ ID NO: 1139611 - RNA, 19 nt, Artificial Sequence
  Description of Artificial Sequence: Synthetic oligonucleotide
caaccucaccuuggugggg

SEQ ID NO: 1139612 - RNA, 19 nt, Artificial Sequence
  Description of Artificial Sequence: Synthetic oligonucleotide
gggauccccagaaguaccc

SEQ ID NO: 1139613 - RNA, 19 nt, Artificial Sequence
  Description of Artificial Sequence: Synthetic oligonucleotide
guagaggguccaagcucag

SEQ ID NO: 1139614 - RNA, 19 nt, Artificial Sequence
  Description of Artificial Sequence: Synthetic oligonucleotide
gacaagacgucuggugccu

SEQ ID NO: 1139615 - RNA, 19 nt, Artificial Sequence
  Description of Artificial Sequence: Synthetic oligonucleotide
aaacaccccuuugcugcau

SEQ ID NO: 1139616 - RNA, 19 nt, Artificial Sequence
  Description of Artificial Sequence: Synthetic oligonucleotide
gcggaaacagccaggguga

SEQ ID NO: 1139617 - RNA, 19 nt, Artificial Sequence
  Description of Artificial Sequence: Synthetic oligonucleotide
aggagcucucucccagcau

SEQ ID NO: 1139618 - RNA, 19 nt, Artificial Sequence
  Description of Artificial Sequence: Synthetic oligonucleotide
agacguccucaggcacucc

SEQ ID NO: 1139619 - RNA, 19 nt, Artificial Sequence
  Description of Artificial Sequence: Synthetic oligonucleotide
ggggauccccagaaguacc

SEQ ID NO: 1139620 - RNA, 19 nt, Artificial Sequence
  Description of Artificial Sequence: Synthetic oligonucleotide
caaugguagcacuccacau

SEQ ID NO: 1139621 - RNA, 19 nt, Artificial Sequence
  Description of Artificial Sequence: Synthetic oligonucleotide
acaagacgucuggugccug

SEQ ID NO: 1139622 - RNA, 19 nt, Artificial Sequence
  Description of Artificial Sequence: Synthetic oligonucleotide
gacgcuggguaagggcuuc

SEQ ID NO: 1139623 - RNA, 19 nt, Artificial Sequence
  Description of Artificial Sequence: Synthetic oligonucleotide
ccccagaaguacccuacag

SEQ ID NO: 1139624 - RNA, 19 nt, Artificial Sequence
  Description of Artificial Sequence: Synthetic oligonucleotide
ggacucucuuuacaaguua

SEQ ID NO: 1139625 - RNA, 19 nt, Artificial Sequence
  Description of Artificial Sequence: Synthetic oligonucleotide
gacugcuugcaggcugcac

SEQ ID NO: 1139626 - RNA, 19 nt, Artificial Sequence
  Description of Artificial Sequence: Synthetic oligonucleotide
gaguaggauguguccaguu

SEQ ID NO: 1139627 - RNA, 19 nt, Artificial Sequence
  Description of Artificial Sequence: Synthetic oligonucleotide
ucccuagggccuguaggau

SEQ ID NO: 1139628 - RNA, 19 nt, Artificial Sequence
  Description of Artificial Sequence: Synthetic oligonucleotide
gaccuggugccagggucug

SEQ ID NO: 1139629 - RNA, 19 nt, Artificial Sequence
  Description of Artificial Sequence: Synthetic oligonucleotide
gacucaccuuaaggaagca

SEQ ID NO: 1139630 - RNA, 19 nt, Artificial Sequence
  Description of Artificial Sequence: Synthetic oligonucleotide
cacaggcccaaccuugugu

SEQ ID NO: 1139631 - RNA, 19 nt, Artificial Sequence
  Description of Artificial Sequence: Synthetic oligonucleotide
guccaguuacacaggccca

SEQ ID NO: 1139632 - RNA, 19 nt, Artificial Sequence
  Description of Artificial Sequence: Synthetic oligonucleotide
caacacggauggucucauc

SEQ ID NO: 1139633 - RNA, 19 nt, Artificial Sequence
  Description of Artificial Sequence: Synthetic oligonucleotide
gugaagcaugcaucguggu

SEQ ID NO: 1139634 - RNA, 19 nt, Artificial Sequence
  Description of Artificial Sequence: Synthetic oligonucleotide
cugguuuaccaagcaaacu

SEQ ID NO: 1139635 - RNA, 19 nt, Artificial Sequence
  Description of Artificial Sequence: Synthetic oligonucleotide
uccgcaguagaggguccaa

SEQ ID NO: 1139636 - RNA, 19 nt, Artificial Sequence
  Description of Artificial Sequence: Synthetic oligonucleotide
gugugccaugugcaaacua

SEQ ID NO: 1139637 - RNA, 19 nt, Artificial Sequence
  Description of Artificial Sequence: Synthetic oligonucleotide
ccgaauuaaugucugugcu

SEQ ID NO: 1139638 - RNA, 19 nt, Artificial Sequence
  Description of Artificial Sequence: Synthetic oligonucleotide
ccugagugauuuggugagg

SEQ ID NO: 1139639 - RNA, 19 nt, Artificial Sequence
  Description of Artificial Sequence: Synthetic oligonucleotide
ccucugagacguccucagg

SEQ ID NO: 1139640 - RNA, 19 nt, Artificial Sequence
  Description of Artificial Sequence: Synthetic oligonucleotide
ucccagcauauggacccuc

SEQ ID NO: 1139641 - RNA, 19 nt, Artificial Sequence
  Description of Artificial Sequence: Synthetic oligonucleotide
acguccucaggcacucccu

SEQ ID NO: 1139642 - RNA, 19 nt, Artificial Sequence
  Description of Artificial Sequence: Synthetic oligonucleotide
gaggcacaacagggaggcc

SEQ ID NO: 1139643 - RNA, 19 nt, Artificial Sequence
  Description of Artificial Sequence: Synthetic oligonucleotide
gacuaggaauggugcuggu

SEQ ID NO: 1139644 - RNA, 19 nt, Artificial Sequence
  Description of Artificial Sequence: Synthetic oligonucleotide
ccaugaucagauguccaca

SEQ ID NO: 1139645 - RNA, 19 nt, Artificial Sequence
  Description of Artificial Sequence: Synthetic oligonucleotide
uggucucaucugagcccuc

SEQ ID NO: 1139646 - RNA, 19 nt, Artificial Sequence
  Description of Artificial Sequence: Synthetic oligonucleotide
caaaagcaguguaccuuau

SEQ ID NO: 1139647 - RNA, 19 nt, Artificial Sequence
  Description of Artificial Sequence: Synthetic oligonucleotide
cgacccuggcccugcaucc

SEQ ID NO: 1139648 - RNA, 19 nt, Artificial Sequence
  Description of Artificial Sequence: Synthetic oligonucleotide
gugauuccuccuugauggu

SEQ ID NO: 1139649 - RNA, 19 nt, Artificial Sequence
  Description of Artificial Sequence: Synthetic oligonucleotide
agacugcuugcaggcugca

SEQ ID NO: 1139650 - RNA, 19 nt, Artificial Sequence
  Description of Artificial Sequence: Synthetic oligonucleotide
gagauaccucugagacguc

SEQ ID NO: 1139651 - RNA, 19 nt, Artificial Sequence
  Description of Artificial Sequence: Synthetic oligonucleotide
ccaguuacacaggcccaac

SEQ ID NO: 1139652 - RNA, 19 nt, Artificial Sequence
  Description of Artificial Sequence: Synthetic oligonucleotide
ggcaaggcaaccucaccuu

SEQ ID NO: 1139653 - RNA, 19 nt, Artificial Sequence
  Description of Artificial Sequence: Synthetic oligonucleotide
cucugaguccacggugaaa

SEQ ID NO: 1139654 - RNA, 19 nt, Artificial Sequence
  Description of Artificial Sequence: Synthetic oligonucleotide
cuccgcaguagagggucca

SEQ ID NO: 1139655 - RNA, 19 nt, Artificial Sequence
  Description of Artificial Sequence: Synthetic oligonucleotide
cccagacgucaaagcuugg

SEQ ID NO: 1139656 - RNA, 19 nt, Artificial Sequence
  Description of Artificial Sequence: Synthetic oligonucleotide
ggaguggacaucaccggau

SEQ ID NO: 1139657 - RNA, 19 nt, Artificial Sequence
  Description of Artificial Sequence: Synthetic oligonucleotide
caacuccgcaguagagggu

SEQ ID NO: 1139658 - RNA, 19 nt, Artificial Sequence
  Description of Artificial Sequence: Synthetic oligonucleotide
caccugucggcagacugcu

SEQ ID NO: 1139659 - RNA, 19 nt, Artificial Sequence
  Description of Artificial Sequence: Synthetic oligonucleotide
acgcuggguaagggcuucu

SEQ ID NO: 1139660 - RNA, 19 nt, Artificial Sequence
  Description of Artificial Sequence: Synthetic oligonucleotide
gggucuggcaaggcaaccu

SEQ ID NO: 1139661 - RNA, 19 nt, Artificial Sequence
  Description of Artificial Sequence: Synthetic oligonucleotide
gugcaaacuagagcaucuu

SEQ ID NO: 1139662 - RNA, 19 nt, Artificial Sequence
  Description of Artificial Sequence: Synthetic oligonucleotide
ggaccuggugccagggucu

SEQ ID NO: 1139663 - RNA, 19 nt, Artificial Sequence
  Description of Artificial Sequence: Synthetic oligonucleotide
ggucucaucugagcccucu

SEQ ID NO: 1139664 - RNA, 19 nt, Artificial Sequence
  Description of Artificial Sequence: Synthetic oligonucleotide
ggauccccagaaguacccu

SEQ ID NO: 1139665 - RNA, 19 nt, Artificial Sequence
  Description of Artificial Sequence: Synthetic oligonucleotide
cucccagcauauggacccu

SEQ ID NO: 1139666 - RNA, 19 nt, Artificial Sequence
  Description of Artificial Sequence: Synthetic oligonucleotide
gggugagcguccauuucuu

SEQ ID NO: 1139667 - RNA, 19 nt, Artificial Sequence
  Description of Artificial Sequence: Synthetic oligonucleotide
accugucggcagacugcuu

SEQ ID NO: 1139668 - RNA, 19 nt, Artificial Sequence
  Description of Artificial Sequence: Synthetic oligonucleotide
cagcggugaccguccucau

SEQ ID NO: 1139669 - RNA, 19 nt, Artificial Sequence
  Description of Artificial Sequence: Synthetic oligonucleotide
ggacuucccuagggccugu

SEQ ID NO: 1139670 - RNA, 19 nt, Artificial Sequence
  Description of Artificial Sequence: Synthetic oligonucleotide
gcccugcaucccacugugu

SEQ ID NO: 1139671 - RNA, 19 nt, Artificial Sequence
  Description of Artificial Sequence: Synthetic oligonucleotide
ugcagcaacguucagagcg

SEQ ID NO: 1139672 - RNA, 19 nt, Artificial Sequence
  Description of Artificial Sequence: Synthetic oligonucleotide
ugugugaaaccuaaggugg

SEQ ID NO: 1139673 - RNA, 19 nt, Artificial Sequence
  Description of Artificial Sequence: Synthetic oligonucleotide
agugagaaaugcuucagcc

SEQ ID NO: 1139674 - RNA, 19 nt, Artificial Sequence
  Description of Artificial Sequence: Synthetic oligonucleotide
uucucaacaacauaacuag

SEQ ID NO: 1139675 - RNA, 19 nt, Artificial Sequence
  Description of Artificial Sequence: Synthetic oligonucleotide
uguaggguauuuaauacag

SEQ ID NO: 1139676 - RNA, 19 nt, Artificial Sequence
  Description of Artificial Sequence: Synthetic oligonucleotide
aagugugugaaaccuaagg

SEQ ID NO: 1139677 - RNA, 19 nt, Artificial Sequence
  Description of Artificial Sequence: Synthetic oligonucleotide
ucucagaauaaucaggucu

SEQ ID NO: 1139678 - RNA, 19 nt, Artificial Sequence
  Description of Artificial Sequence: Synthetic oligonucleotide
aaacgugugcacgugagcc

SEQ ID NO: 1139679 - RNA, 19 nt, Artificial Sequence
  Description of Artificial Sequence: Synthetic oligonucleotide
aaaaucagcaagucuugag

SEQ ID NO: 1139680 - RNA, 19 nt, Artificial Sequence
  Description of Artificial Sequence: Synthetic oligonucleotide
ucuccaacguaacaggagg

SEQ ID NO: 1139681 - RNA, 19 nt, Artificial Sequence
  Description of Artificial Sequence: Synthetic oligonucleotide
agagggguccaacaaaugc

SEQ ID NO: 1139682 - RNA, 19 nt, Artificial Sequence
  Description of Artificial Sequence: Synthetic oligonucleotide
aacauaacuagcaagcucu

SEQ ID NO: 1139683 - RNA, 19 nt, Artificial Sequence
  Description of Artificial Sequence: Synthetic oligonucleotide
aaaucagcaagucuugaga

SEQ ID NO: 1139684 - RNA, 19 nt, Artificial Sequence
  Description of Artificial Sequence: Synthetic oligonucleotide
uguauugucuccaacguaa

SEQ ID NO: 1139685 - RNA, 19 nt, Artificial Sequence
  Description of Artificial Sequence: Synthetic oligonucleotide
gaugaaagcucucuuaaac

SEQ ID NO: 1139686 - RNA, 19 nt, Artificial Sequence
  Description of Artificial Sequence: Synthetic oligonucleotide
ucaauguccacuuuucgug

SEQ ID NO: 1139687 - RNA, 19 nt, Artificial Sequence
  Description of Artificial Sequence: Synthetic oligonucleotide
aaaugcacuucucagaaua

SEQ ID NO: 1139688 - RNA, 19 nt, Artificial Sequence
  Description of Artificial Sequence: Synthetic oligonucleotide
aaaagcaggucaaaugcac

SEQ ID NO: 1139689 - RNA, 19 nt, Artificial Sequence
  Description of Artificial Sequence: Synthetic oligonucleotide
aggaagcacaucucgaggc

SEQ ID NO: 1139690 - RNA, 19 nt, Artificial Sequence
  Description of Artificial Sequence: Synthetic oligonucleotide
ugagaaaugcuucagccaa

SEQ ID NO: 1139691 - RNA, 19 nt, Artificial Sequence
  Description of Artificial Sequence: Synthetic oligonucleotide
aaagcacucuaauuuucuc

SEQ ID NO: 1139692 - RNA, 19 nt, Artificial Sequence
  Description of Artificial Sequence: Synthetic oligonucleotide
ggcacuaucauccagggug

SEQ ID NO: 1139693 - RNA, 19 nt, Artificial Sequence
  Description of Artificial Sequence: Synthetic oligonucleotide
uccgcuuucagcuccauca

SEQ ID NO: 1139694 - RNA, 19 nt, Artificial Sequence
  Description of Artificial Sequence: Synthetic oligonucleotide
uguuguucagguuugacuu

SEQ ID NO: 1139695 - RNA, 19 nt, Artificial Sequence
  Description of Artificial Sequence: Synthetic oligonucleotide
ucguguauaggucugucca

SEQ ID NO: 1139696 - RNA, 19 nt, Artificial Sequence
  Description of Artificial Sequence: Synthetic oligonucleotide
ucggaagcggagcucaucg

SEQ ID NO: 1139697 - RNA, 19 nt, Artificial Sequence
  Description of Artificial Sequence: Synthetic oligonucleotide
agugugugaaaccuaaggu

SEQ ID NO: 1139698 - RNA, 19 nt, Artificial Sequence
  Description of Artificial Sequence: Synthetic oligonucleotide
aaagaagagggguccaaca

SEQ ID NO: 1139699 - RNA, 19 nt, Artificial Sequence
  Description of Artificial Sequence: Synthetic oligonucleotide
agaauaaucaggucuguau

SEQ ID NO: 1139700 - RNA, 19 nt, Artificial Sequence
  Description of Artificial Sequence: Synthetic oligonucleotide
aaucagcaagucuugagau

SEQ ID NO: 1139701 - RNA, 19 nt, Artificial Sequence
  Description of Artificial Sequence: Synthetic oligonucleotide
uauaccuccucuucuagga

SEQ ID NO: 1139702 - RNA, 19 nt, Artificial Sequence
  Description of Artificial Sequence: Synthetic oligonucleotide
aacuagcaagcucucaaug

SEQ ID NO: 1139703 - RNA, 19 nt, Artificial Sequence
  Description of Artificial Sequence: Synthetic oligonucleotide
ucagcaagucuugagauca

SEQ ID NO: 1139704 - RNA, 19 nt, Artificial Sequence
  Description of Artificial Sequence: Synthetic oligonucleotide
aagcacucuaauuuucuca

SEQ ID NO: 1139705 - RNA, 19 nt, Artificial Sequence
  Description of Artificial Sequence: Synthetic oligonucleotide
ucguuccuuagcaaaauca

SEQ ID NO: 1139706 - RNA, 19 nt, Artificial Sequence
  Description of Artificial Sequence: Synthetic oligonucleotide
ucuugaauccaaaggcagc

SEQ ID NO: 1139707 - RNA, 19 nt, Artificial Sequence
  Description of Artificial Sequence: Synthetic oligonucleotide
uggaacuuguaccugucgc

SEQ ID NO: 1139708 - RNA, 19 nt, Artificial Sequence
  Description of Artificial Sequence: Synthetic oligonucleotide
agaauuaauuucucaacaa

SEQ ID NO: 1139709 - RNA, 19 nt, Artificial Sequence
  Description of Artificial Sequence: Synthetic oligonucleotide
uccaacugugaguggaugg

SEQ ID NO: 1139710 - RNA, 19 nt, Artificial Sequence
  Description of Artificial Sequence: Synthetic oligonucleotide
gcaaaagcaggucaaaugc

SEQ ID NO: 1139711 - RNA, 19 nt, Artificial Sequence
  Description of Artificial Sequence: Synthetic oligonucleotide
aaacccugccuuuucuguc

SEQ ID NO: 1139712 - RNA, 19 nt, Artificial Sequence
  Description of Artificial Sequence: Synthetic oligonucleotide
gauaagggccaucagguga

SEQ ID NO: 1139713 - RNA, 19 nt, Artificial Sequence
  Description of Artificial Sequence: Synthetic oligonucleotide
uguucuguaggguauuuaa

SEQ ID NO: 1139714 - RNA, 19 nt, Artificial Sequence
  Description of Artificial Sequence: Synthetic oligonucleotide
uugcacuugagccaaucug

SEQ ID NO: 1139715 - RNA, 19 nt, Artificial Sequence
  Description of Artificial Sequence: Synthetic oligonucleotide
auaacuagcaagcucucaa

SEQ ID NO: 1139716 - RNA, 19 nt, Artificial Sequence
  Description of Artificial Sequence: Synthetic oligonucleotide
ugaucucccucgaagagcu

SEQ ID NO: 1139717 - RNA, 19 nt, Artificial Sequence
  Description of Artificial Sequence: Synthetic oligonucleotide
gaagucaauguuguucagg

SEQ ID NO: 1139718 - RNA, 19 nt, Artificial Sequence
  Description of Artificial Sequence: Synthetic oligonucleotide
ugggguuccguuuguacgg

SEQ ID NO: 1139719 - RNA, 19 nt, Artificial Sequence
  Description of Artificial Sequence: Synthetic oligonucleotide
aacugugaguggauggggc

SEQ ID NO: 1139720 - RNA, 19 nt, Artificial Sequence
  Description of Artificial Sequence: Synthetic oligonucleotide
augggguuccguuuguacg

SEQ ID NO: 1139721 - RNA, 19 nt, Artificial Sequence
  Description of Artificial Sequence: Synthetic oligonucleotide
acuagcaagcucucaauga

SEQ ID NO: 1139722 - RNA, 19 nt, Artificial Sequence
  Description of Artificial Sequence: Synthetic oligonucleotide
ucucgaggcuggcauagcg

SEQ ID NO: 1139723 - RNA, 19 nt, Artificial Sequence
  Description of Artificial Sequence: Synthetic oligonucleotide
cuucuggugaucucccucg

SEQ ID NO: 1139724 - RNA, 19 nt, Artificial Sequence
  Description of Artificial Sequence: Synthetic oligonucleotide
gauauaccuccucuucuag

SEQ ID NO: 1139725 - RNA, 19 nt, Artificial Sequence
  Description of Artificial Sequence: Synthetic oligonucleotide
aacaggagguagcaccaag

SEQ ID NO: 1139726 - RNA, 19 nt, Artificial Sequence
  Description of Artificial Sequence: Synthetic oligonucleotide
acuuuucguguauaggucu

SEQ ID NO: 1139727 - RNA, 19 nt, Artificial Sequence
  Description of Artificial Sequence: Synthetic oligonucleotide
ugaaaccuaaggugggcag

SEQ ID NO: 1139728 - RNA, 19 nt, Artificial Sequence
  Description of Artificial Sequence: Synthetic oligonucleotide
aggugggcagaucagcucg

SEQ ID NO: 1139729 - RNA, 19 nt, Artificial Sequence
  Description of Artificial Sequence: Synthetic oligonucleotide
cuugagaucacucuagcaa

SEQ ID NO: 1139730 - RNA, 19 nt, Artificial Sequence
  Description of Artificial Sequence: Synthetic oligonucleotide
uuugccaggaggcguaugu

SEQ ID NO: 1139731 - RNA, 19 nt, Artificial Sequence
  Description of Artificial Sequence: Synthetic oligonucleotide
uugacuucaucucuuggau

SEQ ID NO: 1139732 - RNA, 19 nt, Artificial Sequence
  Description of Artificial Sequence: Synthetic oligonucleotide
aucacgucaugccgcaggc

SEQ ID NO: 1139733 - RNA, 19 nt, Artificial Sequence
  Description of Artificial Sequence: Synthetic oligonucleotide
ugcacgugagccaucacgu

SEQ ID NO: 1139734 - RNA, 19 nt, Artificial Sequence
  Description of Artificial Sequence: Synthetic oligonucleotide
ucuugugcacugaugcccc

SEQ ID NO: 1139735 - RNA, 19 nt, Artificial Sequence
  Description of Artificial Sequence: Synthetic oligonucleotide
augaugaaagcucucuuaa

SEQ ID NO: 1139736 - RNA, 19 nt, Artificial Sequence
  Description of Artificial Sequence: Synthetic oligonucleotide
gaaugcgccguucaauuac

SEQ ID NO: 1139737 - RNA, 19 nt, Artificial Sequence
  Description of Artificial Sequence: Synthetic oligonucleotide
cagaauuaauuucucaaca

SEQ ID NO: 1139738 - RNA, 19 nt, Artificial Sequence
  Description of Artificial Sequence: Synthetic oligonucleotide
augacaauccugucggcug

SEQ ID NO: 1139739 - RNA, 19 nt, Artificial Sequence
  Description of Artificial Sequence: Synthetic oligonucleotide
uccaugauaagggccauca

SEQ ID NO: 1139740 - RNA, 19 nt, Artificial Sequence
  Description of Artificial Sequence: Synthetic oligonucleotide
uuccuuacuucucuucuac

SEQ ID NO: 1139741 - RNA, 19 nt, Artificial Sequence
  Description of Artificial Sequence: Synthetic oligonucleotide
ucucaacaacauaacuagc

SEQ ID NO: 1139742 - RNA, 19 nt, Artificial Sequence
  Description of Artificial Sequence: Synthetic oligonucleotide
agaguauccggcggcagcc

SEQ ID NO: 1139743 - RNA, 19 nt, Artificial Sequence
  Description of Artificial Sequence: Synthetic oligonucleotide
ucaucugugauaggcaaac

SEQ ID NO: 1139744 - RNA, 19 nt, Artificial Sequence
  Description of Artificial Sequence: Synthetic oligonucleotide
aucagcaagucuugagauc

SEQ ID NO: 1139745 - RNA, 19 nt, Artificial Sequence
  Description of Artificial Sequence: Synthetic oligonucleotide
uguacggcauugcacuuga

SEQ ID NO: 1139746 - RNA, 19 nt, Artificial Sequence
  Description of Artificial Sequence: Synthetic oligonucleotide
cacgcuucaaguucuggag

SEQ ID NO: 1139747 - RNA, 19 nt, Artificial Sequence
  Description of Artificial Sequence: Synthetic oligonucleotide
ucuaggaaucuguggaccu

SEQ ID NO: 1139748 - RNA, 19 nt, Artificial Sequence
  Description of Artificial Sequence: Synthetic oligonucleotide
cacucuagcaagcuuuggc

SEQ ID NO: 1139749 - RNA, 19 nt, Artificial Sequence
  Description of Artificial Sequence: Synthetic oligonucleotide
acguucagagcgcaugggg

SEQ ID NO: 1139750 - RNA, 19 nt, Artificial Sequence
  Description of Artificial Sequence: Synthetic oligonucleotide
uucaauuacuuugggguac

SEQ ID NO: 1139751 - RNA, 19 nt, Artificial Sequence
  Description of Artificial Sequence: Synthetic oligonucleotide
auacaguaucugcagugag

SEQ ID NO: 1139752 - RNA, 19 nt, Artificial Sequence
  Description of Artificial Sequence: Synthetic oligonucleotide
uugggguacaccaccaauc

SEQ ID NO: 1139753 - RNA, 19 nt, Artificial Sequence
  Description of Artificial Sequence: Synthetic oligonucleotide
gaugaugaaagcucucuua

SEQ ID NO: 1139754 - RNA, 19 nt, Artificial Sequence
  Description of Artificial Sequence: Synthetic oligonucleotide
auaagggccaucaggugac

SEQ ID NO: 1139755 - RNA, 19 nt, Artificial Sequence
  Description of Artificial Sequence: Synthetic oligonucleotide
uucaggaucgccagaguau

SEQ ID NO: 1139756 - RNA, 19 nt, Artificial Sequence
  Description of Artificial Sequence: Synthetic oligonucleotide
agcacucuaauuuucucau

SEQ ID NO: 1139757 - RNA, 19 nt, Artificial Sequence
  Description of Artificial Sequence: Synthetic oligonucleotide
uuagcaaaaucagcaaguc

SEQ ID NO: 1139758 - RNA, 19 nt, Artificial Sequence
  Description of Artificial Sequence: Synthetic oligonucleotide
uggguccaugauaagggcc

SEQ ID NO: 1139759 - RNA, 19 nt, Artificial Sequence
  Description of Artificial Sequence: Synthetic oligonucleotide
uucguguauaggucugucc

SEQ ID NO: 1139760 - RNA, 19 nt, Artificial Sequence
  Description of Artificial Sequence: Synthetic oligonucleotide
aucgccagaguauccggcg

SEQ ID NO: 1139761 - RNA, 19 nt, Artificial Sequence
  Description of Artificial Sequence: Synthetic oligonucleotide
uagcauucaggaucgccag

SEQ ID NO: 1139762 - RNA, 19 nt, Artificial Sequence
  Description of Artificial Sequence: Synthetic oligonucleotide
aacguaacaggagguagca

SEQ ID NO: 1139763 - RNA, 19 nt, Artificial Sequence
  Description of Artificial Sequence: Synthetic oligonucleotide
ugacaauccugucggcugc

SEQ ID NO: 1139764 - RNA, 19 nt, Artificial Sequence
  Description of Artificial Sequence: Synthetic oligonucleotide
uaggguuuuagcaggggau

SEQ ID NO: 1139765 - RNA, 19 nt, Artificial Sequence
  Description of Artificial Sequence: Synthetic oligonucleotide
agcguuucccaacaguggu

SEQ ID NO: 1139766 - RNA, 19 nt, Artificial Sequence
  Description of Artificial Sequence: Synthetic oligonucleotide
gaucuugaauccaaaggca

SEQ ID NO: 1139767 - RNA, 19 nt, Artificial Sequence
  Description of Artificial Sequence: Synthetic oligonucleotide
aggauuacgguguggcucu

SEQ ID NO: 1139768 - RNA, 19 nt, Artificial Sequence
  Description of Artificial Sequence: Synthetic oligonucleotide
cuggugaucucccucgaag

SEQ ID NO: 1139769 - RNA, 19 nt, Artificial Sequence
  Description of Artificial Sequence: Synthetic oligonucleotide
aacccugccuuuucuguca

SEQ ID NO: 1139770 - RNA, 19 nt, Artificial Sequence
  Description of Artificial Sequence: Synthetic oligonucleotide
caacauaacuagcaagcuc

SEQ ID NO: 1139771 - RNA, 19 nt, Artificial Sequence
  Description of Artificial Sequence: Synthetic oligonucleotide
gauccauaccugccuuugg

SEQ ID NO: 1139772 - RNA, 19 nt, Artificial Sequence
  Description of Artificial Sequence: Synthetic oligonucleotide
uuugggguacaccaccaau

SEQ ID NO: 1139773 - RNA, 19 nt, Artificial Sequence
  Description of Artificial Sequence: Synthetic oligonucleotide
caucacgucaugccgcagg

SEQ ID NO: 1139774 - RNA, 19 nt, Artificial Sequence
  Description of Artificial Sequence: Synthetic oligonucleotide
auaaucaggucuguauugu

SEQ ID NO: 1139775 - RNA, 19 nt, Artificial Sequence
  Description of Artificial Sequence: Synthetic oligonucleotide
ucuacucuacagccugagc

SEQ ID NO: 1139776 - RNA, 19 nt, Artificial Sequence
  Description of Artificial Sequence: Synthetic oligonucleotide
caacguucagagcgcaugg

SEQ ID NO: 1139777 - RNA, 19 nt, Artificial Sequence
  Description of Artificial Sequence: Synthetic oligonucleotide
ucuuaaacccugccuuuuc

SEQ ID NO: 1139778 - RNA, 19 nt, Artificial Sequence
  Description of Artificial Sequence: Synthetic oligonucleotide
uaggauuacgguguggcuc

SEQ ID NO: 1139779 - RNA, 19 nt, Artificial Sequence
  Description of Artificial Sequence: Synthetic oligonucleotide
cuuagcaaaaucagcaagu

SEQ ID NO: 1139780 - RNA, 19 nt, Artificial Sequence
  Description of Artificial Sequence: Synthetic oligonucleotide
uggugaucucccucgaaga

SEQ ID NO: 1139781 - RNA, 19 nt, Artificial Sequence
  Description of Artificial Sequence: Synthetic oligonucleotide
gcagaauuaauuucucaac

SEQ ID NO: 1139782 - RNA, 19 nt, Artificial Sequence
  Description of Artificial Sequence: Synthetic oligonucleotide
ugaaagugugugaaaccua

SEQ ID NO: 1139783 - RNA, 19 nt, Artificial Sequence
  Description of Artificial Sequence: Synthetic oligonucleotide
aacgugugcacgugagcca

SEQ ID NO: 1139784 - RNA, 19 nt, Artificial Sequence
  Description of Artificial Sequence: Synthetic oligonucleotide
gaagcggagcucaucgcgg

SEQ ID NO: 1139785 - RNA, 19 nt, Artificial Sequence
  Description of Artificial Sequence: Synthetic oligonucleotide
ugugaaaccuaaggugggc

SEQ ID NO: 1139786 - RNA, 19 nt, Artificial Sequence
  Description of Artificial Sequence: Synthetic oligonucleotide
uaccugucgcugaacagga

SEQ ID NO: 1139787 - RNA, 19 nt, Artificial Sequence
  Description of Artificial Sequence: Synthetic oligonucleotide
aucacacucccauaggguu

SEQ ID NO: 1139788 - RNA, 19 nt, Artificial Sequence
  Description of Artificial Sequence: Synthetic oligonucleotide
uccuuagcaaaaucagcaa

SEQ ID NO: 1139789 - RNA, 19 nt, Artificial Sequence
  Description of Artificial Sequence: Synthetic oligonucleotide
ugaugaaagcucucuuaaa

SEQ ID NO: 1139790 - RNA, 19 nt, Artificial Sequence
  Description of Artificial Sequence: Synthetic oligonucleotide
ggaagcggagcucaucgcg

SEQ ID NO: 1139791 - RNA, 19 nt, Artificial Sequence
  Description of Artificial Sequence: Synthetic oligonucleotide
aacguucagagcgcauggg

SEQ ID NO: 1139792 - RNA, 19 nt, Artificial Sequence
  Description of Artificial Sequence: Synthetic oligonucleotide
cacuuuucguguauagguc

SEQ ID NO: 1139793 - RNA, 19 nt, Artificial Sequence
  Description of Artificial Sequence: Synthetic oligonucleotide
agugcaaaucuugugcacu

SEQ ID NO: 1139794 - RNA, 19 nt, Artificial Sequence
  Description of Artificial Sequence: Synthetic oligonucleotide
auucaggaucgccagagua

SEQ ID NO: 1139795 - RNA, 19 nt, Artificial Sequence
  Description of Artificial Sequence: Synthetic oligonucleotide
uguuuguaugagacagggu

SEQ ID NO: 1139796 - RNA, 19 nt, Artificial Sequence
  Description of Artificial Sequence: Synthetic oligonucleotide
agucuugagaucacucuag

SEQ ID NO: 1139797 - RNA, 19 nt, Artificial Sequence
  Description of Artificial Sequence: Synthetic oligonucleotide
uuacuucucuucuacucua

SEQ ID NO: 1139798 - RNA, 19 nt, Artificial Sequence
  Description of Artificial Sequence: Synthetic oligonucleotide
acaacauaacuagcaagcu

SEQ ID NO: 1139799 - RNA, 19 nt, Artificial Sequence
  Description of Artificial Sequence: Synthetic oligonucleotide
ugcucggccagugaaagaa

SEQ ID NO: 1139800 - RNA, 19 nt, Artificial Sequence
  Description of Artificial Sequence: Synthetic oligonucleotide
auuacgguguggcucucca

SEQ ID NO: 1139801 - RNA, 19 nt, Artificial Sequence
  Description of Artificial Sequence: Synthetic oligonucleotide
cucgaggcuggcauagcgg

SEQ ID NO: 1139802 - RNA, 19 nt, Artificial Sequence
  Description of Artificial Sequence: Synthetic oligonucleotide
ucgccagaguauccggcgg

SEQ ID NO: 1139803 - RNA, 19 nt, Artificial Sequence
  Description of Artificial Sequence: Synthetic oligonucleotide
uaacuagcaagcucucaau

SEQ ID NO: 1139804 - RNA, 19 nt, Artificial Sequence
  Description of Artificial Sequence: Synthetic oligonucleotide
caggugacgggccaggcug

SEQ ID NO: 1139805 - RNA, 19 nt, Artificial Sequence
  Description of Artificial Sequence: Synthetic oligonucleotide
gaaguaggcaucugcccga

SEQ ID NO: 1139806 - RNA, 19 nt, Artificial Sequence
  Description of Artificial Sequence: Synthetic oligonucleotide
uaggucuguccagugauga

SEQ ID NO: 1139807 - RNA, 19 nt, Artificial Sequence
  Description of Artificial Sequence: Synthetic oligonucleotide
ucaauuacuuugggguaca

SEQ ID NO: 1139808 - RNA, 19 nt, Artificial Sequence
  Description of Artificial Sequence: Synthetic oligonucleotide
auagcgggacgccagggga

SEQ ID NO: 1139809 - RNA, 19 nt, Artificial Sequence
  Description of Artificial Sequence: Synthetic oligonucleotide
cacugaugccccuaagcug

SEQ ID NO: 1139810 - RNA, 19 nt, Artificial Sequence
  Description of Artificial Sequence: Synthetic oligonucleotide
ggugcguucaaaccacugc

SEQ ID NO: 1139811 - RNA, 19 nt, Artificial Sequence
  Description of Artificial Sequence: Synthetic oligonucleotide
caaaagcaggucaaaugca

SEQ ID NO: 1139812 - RNA, 19 nt, Artificial Sequence
  Description of Artificial Sequence: Synthetic oligonucleotide
uucuacucuacagccugag

SEQ ID NO: 1139813 - RNA, 19 nt, Artificial Sequence
  Description of Artificial Sequence: Synthetic oligonucleotide
aaaccuaaggugggcagau

SEQ ID NO: 1139814 - RNA, 19 nt, Artificial Sequence
  Description of Artificial Sequence: Synthetic oligonucleotide
cuacucuacagccugagcu

SEQ ID NO: 1139815 - RNA, 19 nt, Artificial Sequence
  Description of Artificial Sequence: Synthetic oligonucleotide
cuguaggguauuuaauaca

SEQ ID NO: 1139816 - RNA, 19 nt, Artificial Sequence
  Description of Artificial Sequence: Synthetic oligonucleotide
caaggugaaugaugccugc

SEQ ID NO: 1139817 - RNA, 19 nt, Artificial Sequence
  Description of Artificial Sequence: Synthetic oligonucleotide
caugggguuccguuuguac

SEQ ID NO: 1139818 - RNA, 19 nt, Artificial Sequence
  Description of Artificial Sequence: Synthetic oligonucleotide
agcaggucaaaugcacuuc

SEQ ID NO: 1139819 - RNA, 19 nt, Artificial Sequence
  Description of Artificial Sequence: Synthetic oligonucleotide
cuggaacuuguaccugucg

SEQ ID NO: 1139820 - RNA, 19 nt, Artificial Sequence
  Description of Artificial Sequence: Synthetic oligonucleotide
gugcguucaaaccacugca

SEQ ID NO: 1139821 - RNA, 19 nt, Artificial Sequence
  Description of Artificial Sequence: Synthetic oligonucleotide
ccugcuuaaccacagcagc

SEQ ID NO: 1139822 - RNA, 19 nt, Artificial Sequence
  Description of Artificial Sequence: Synthetic oligonucleotide
ccuuagcaaaaucagcaag

SEQ ID NO: 1139823 - RNA, 19 nt, Artificial Sequence
  Description of Artificial Sequence: Synthetic oligonucleotide
ucaggaucgccagaguauc

SEQ ID NO: 1139824 - RNA, 19 nt, Artificial Sequence
  Description of Artificial Sequence: Synthetic oligonucleotide
guggccaaacgugugcacg

SEQ ID NO: 1139825 - RNA, 19 nt, Artificial Sequence
  Description of Artificial Sequence: Synthetic oligonucleotide
ccgaaugcgcucuaugagg

SEQ ID NO: 1139826 - RNA, 19 nt, Artificial Sequence
  Description of Artificial Sequence: Synthetic oligonucleotide
gcugaaagugugugaaacc

SEQ ID NO: 1139827 - RNA, 19 nt, Artificial Sequence
  Description of Artificial Sequence: Synthetic oligonucleotide
accaauccuucagaaaugu

SEQ ID NO: 1139828 - RNA, 19 nt, Artificial Sequence
  Description of Artificial Sequence: Synthetic oligonucleotide
gcuaggauuacgguguggc

SEQ ID NO: 1139829 - RNA, 19 nt, Artificial Sequence
  Description of Artificial Sequence: Synthetic oligonucleotide
caccaauccuucagaaaug

SEQ ID NO: 1139830 - RNA, 19 nt, Artificial Sequence
  Description of Artificial Sequence: Synthetic oligonucleotide
uucccgaaugcgccguuca

SEQ ID NO: 1139831 - RNA, 19 nt, Artificial Sequence
  Description of Artificial Sequence: Synthetic oligonucleotide
caaacgugugcacgugagc

SEQ ID NO: 1139832 - RNA, 19 nt, Artificial Sequence
  Description of Artificial Sequence: Synthetic oligonucleotide
gaugccccuaagcuggcca

SEQ ID NO: 1139833 - RNA, 19 nt, Artificial Sequence
  Description of Artificial Sequence: Synthetic oligonucleotide
cagcuuucggacagcagug

SEQ ID NO: 1139834 - RNA, 19 nt, Artificial Sequence
  Description of Artificial Sequence: Synthetic oligonucleotide
ucgcggacacgcuucaagu

SEQ ID NO: 1139835 - RNA, 19 nt, Artificial Sequence
  Description of Artificial Sequence: Synthetic oligonucleotide
agauccauaccugccuuug

SEQ ID NO: 1139836 - RNA, 19 nt, Artificial Sequence
  Description of Artificial Sequence: Synthetic oligonucleotide
aaugcgccguucaauuacu

SEQ ID NO: 1139837 - RNA, 19 nt, Artificial Sequence
  Description of Artificial Sequence: Synthetic oligonucleotide
gcgccguucaauuacuuug

SEQ ID NO: 1139838 - RNA, 19 nt, Artificial Sequence
  Description of Artificial Sequence: Synthetic oligonucleotide
ugucgcugaacaggaagca

SEQ ID NO: 1139839 - RNA, 19 nt, Artificial Sequence
  Description of Artificial Sequence: Synthetic oligonucleotide
uggccaaacgugugcacgu

SEQ ID NO: 1139840 - RNA, 19 nt, Artificial Sequence
  Description of Artificial Sequence: Synthetic oligonucleotide
guauaggucuguccaguga

SEQ ID NO: 1139841 - RNA, 19 nt, Artificial Sequence
  Description of Artificial Sequence: Synthetic oligonucleotide
aaggugaaugaugccugca

SEQ ID NO: 1139842 - RNA, 19 nt, Artificial Sequence
  Description of Artificial Sequence: Synthetic oligonucleotide
cagaguauccggcggcagc

SEQ ID NO: 1139843 - RNA, 19 nt, Artificial Sequence
  Description of Artificial Sequence: Synthetic oligonucleotide
cucaucgcggacacgcuuc

SEQ ID NO: 1139844 - RNA, 19 nt, Artificial Sequence
  Description of Artificial Sequence: Synthetic oligonucleotide
uuguacggcauugcacuug

SEQ ID NO: 1139845 - RNA, 19 nt, Artificial Sequence
  Description of Artificial Sequence: Synthetic oligonucleotide
auaggcaaacccagggucu

SEQ ID NO: 1139846 - RNA, 19 nt, Artificial Sequence
  Description of Artificial Sequence: Synthetic oligonucleotide
aguggauggggcugaagua

SEQ ID NO: 1139847 - RNA, 19 nt, Artificial Sequence
  Description of Artificial Sequence: Synthetic oligonucleotide
uuuucguguauaggucugu

SEQ ID NO: 1139848 - RNA, 19 nt, Artificial Sequence
  Description of Artificial Sequence: Synthetic oligonucleotide
aggguauuuaauacaguau

SEQ ID NO: 1139849 - RNA, 19 nt, Artificial Sequence
  Description of Artificial Sequence: Synthetic oligonucleotide
ucacucuagcaagcuuugg

SEQ ID NO: 1139850 - RNA, 19 nt, Artificial Sequence
  Description of Artificial Sequence: Synthetic oligonucleotide
gacacgcuucaaguucugg

SEQ ID NO: 1139851 - RNA, 19 nt, Artificial Sequence
  Description of Artificial Sequence: Synthetic oligonucleotide
ugcccgaaugcgcucuaug

SEQ ID NO: 1139852 - RNA, 19 nt, Artificial Sequence
  Description of Artificial Sequence: Synthetic oligonucleotide
ucaugacaauccugucggc

SEQ ID NO: 1139853 - RNA, 19 nt, Artificial Sequence
  Description of Artificial Sequence: Synthetic oligonucleotide
uagcgggacgccaggggag

SEQ ID NO: 1139854 - RNA, 19 nt, Artificial Sequence
  Description of Artificial Sequence: Synthetic oligonucleotide
cguuccuuagcaaaaucag

SEQ ID NO: 1139855 - RNA, 19 nt, Artificial Sequence
  Description of Artificial Sequence: Synthetic oligonucleotide
gaaaccuaaggugggcaga

SEQ ID NO: 1139856 - RNA, 19 nt, Artificial Sequence
  Description of Artificial Sequence: Synthetic oligonucleotide
ccuuacuucucuucuacuc

SEQ ID NO: 1139857 - RNA, 19 nt, Artificial Sequence
  Description of Artificial Sequence: Synthetic oligonucleotide
agcaggcugaaagugugug

SEQ ID NO: 1139858 - RNA, 19 nt, Artificial Sequence
  Description of Artificial Sequence: Synthetic oligonucleotide
uggugcccuucacuccucg

SEQ ID NO: 1139859 - RNA, 19 nt, Artificial Sequence
  Description of Artificial Sequence: Synthetic oligonucleotide
cagugcaaaucuugugcac

SEQ ID NO: 1139860 - RNA, 19 nt, Artificial Sequence
  Description of Artificial Sequence: Synthetic oligonucleotide
aauguucuguaggguauuu

SEQ ID NO: 1139861 - RNA, 19 nt, Artificial Sequence
  Description of Artificial Sequence: Synthetic oligonucleotide
ugaaugaugccugcagcuu

SEQ ID NO: 1139862 - RNA, 19 nt, Artificial Sequence
  Description of Artificial Sequence: Synthetic oligonucleotide
uagcaagcucucaaugauu

SEQ ID NO: 1139863 - RNA, 19 nt, Artificial Sequence
  Description of Artificial Sequence: Synthetic oligonucleotide
ucaucgcggacacgcuuca

SEQ ID NO: 1139864 - RNA, 19 nt, Artificial Sequence
  Description of Artificial Sequence: Synthetic oligonucleotide
uucucaugacaauccuguc

SEQ ID NO: 1139865 - RNA, 19 nt, Artificial Sequence
  Description of Artificial Sequence: Synthetic oligonucleotide
aagagggguccaacaaaug

SEQ ID NO: 1139866 - RNA, 19 nt, Artificial Sequence
  Description of Artificial Sequence: Synthetic oligonucleotide
gagguccauacagagaucu

SEQ ID NO: 1139867 - RNA, 19 nt, Artificial Sequence
  Description of Artificial Sequence: Synthetic oligonucleotide
uccguuuguacggcauugc

SEQ ID NO: 1139868 - RNA, 19 nt, Artificial Sequence
  Description of Artificial Sequence: Synthetic oligonucleotide
ccguucaauuacuuugggg

SEQ ID NO: 1139869 - RNA, 19 nt, Artificial Sequence
  Description of Artificial Sequence: Synthetic oligonucleotide
augucagugcaaaucuugu

SEQ ID NO: 1139870 - RNA, 19 nt, Artificial Sequence
  Description of Artificial Sequence: Synthetic oligonucleotide
gaggcuggcauagcgggac

SEQ ID NO: 1139871 - RNA, 19 nt, Artificial Sequence
  Description of Artificial Sequence: Synthetic oligonucleotide
ggaacuagcucuguagauc

SEQ ID NO: 1139872 - RNA, 19 nt, Artificial Sequence
  Description of Artificial Sequence: Synthetic oligonucleotide
ucuggugaucucccucgaa

SEQ ID NO: 1139873 - RNA, 19 nt, Artificial Sequence
  Description of Artificial Sequence: Synthetic oligonucleotide
uccaacguaacaggaggua

SEQ ID NO: 1139874 - RNA, 19 nt, Artificial Sequence
  Description of Artificial Sequence: Synthetic oligonucleotide
uuucguguauaggucuguc

SEQ ID NO: 1139875 - RNA, 19 nt, Artificial Sequence
  Description of Artificial Sequence: Synthetic oligonucleotide
agaucacucuagcaagcuu

SEQ ID NO: 1139876 - RNA, 19 nt, Artificial Sequence
  Description of Artificial Sequence: Synthetic oligonucleotide
cucguuccuuagcaaaauc

SEQ ID NO: 1139877 - RNA, 19 nt, Artificial Sequence
  Description of Artificial Sequence: Synthetic oligonucleotide
augccccuaagcuggccag

SEQ ID NO: 1139878 - RNA, 19 nt, Artificial Sequence
  Description of Artificial Sequence: Synthetic oligonucleotide
gaucacucuagcaagcuuu

SEQ ID NO: 1139879 - RNA, 19 nt, Artificial Sequence
  Description of Artificial Sequence: Synthetic oligonucleotide
aucacucuagcaagcuuug

SEQ ID NO: 1139880 - RNA, 19 nt, Artificial Sequence
  Description of Artificial Sequence: Synthetic oligonucleotide
cuaggaaucuguggaccug

SEQ ID NO: 1139881 - RNA, 19 nt, Artificial Sequence
  Description of Artificial Sequence: Synthetic oligonucleotide
gcaaaaucagcaagucuug

SEQ ID NO: 1139882 - RNA, 19 nt, Artificial Sequence
  Description of Artificial Sequence: Synthetic oligonucleotide
gguagcauucaggaucgcc

SEQ ID NO: 1139883 - RNA, 19 nt, Artificial Sequence
  Description of Artificial Sequence: Synthetic oligonucleotide
ggaggcguaugucagugca

SEQ ID NO: 1139884 - RNA, 19 nt, Artificial Sequence
  Description of Artificial Sequence: Synthetic oligonucleotide
caggaucgccagaguaucc

SEQ ID NO: 1139885 - RNA, 19 nt, Artificial Sequence
  Description of Artificial Sequence: Synthetic oligonucleotide
gaaagcucucuuaaacccu

SEQ ID NO: 1139886 - RNA, 19 nt, Artificial Sequence
  Description of Artificial Sequence: Synthetic oligonucleotide
caguggugcccuucacucc

SEQ ID NO: 1139887 - RNA, 19 nt, Artificial Sequence
  Description of Artificial Sequence: Synthetic oligonucleotide
ccaaacgugugcacgugag

SEQ ID NO: 1139888 - RNA, 19 nt, Artificial Sequence
  Description of Artificial Sequence: Synthetic oligonucleotide
ccaacugugaguggauggg

SEQ ID NO: 1139889 - RNA, 19 nt, Artificial Sequence
  Description of Artificial Sequence: Synthetic oligonucleotide
gaagagggguccaacaaau

SEQ ID NO: 1139890 - RNA, 19 nt, Artificial Sequence
  Description of Artificial Sequence: Synthetic oligonucleotide
ggcagccauuucuaacacg

SEQ ID NO: 1139891 - RNA, 19 nt, Artificial Sequence
  Description of Artificial Sequence: Synthetic oligonucleotide
caggaggcguaugucagug

SEQ ID NO: 1139892 - RNA, 19 nt, Artificial Sequence
  Description of Artificial Sequence: Synthetic oligonucleotide
ggggauauaccuccucuuc

SEQ ID NO: 1139893 - RNA, 19 nt, Artificial Sequence
  Description of Artificial Sequence: Synthetic oligonucleotide
gauuacgguguggcucucc

SEQ ID NO: 1139894 - RNA, 19 nt, Artificial Sequence
  Description of Artificial Sequence: Synthetic oligonucleotide
agcauucaggaucgccaga

SEQ ID NO: 1139895 - RNA, 19 nt, Artificial Sequence
  Description of Artificial Sequence: Synthetic oligonucleotide
guauugucuccaacguaac

SEQ ID NO: 1139896 - RNA, 19 nt, Artificial Sequence
  Description of Artificial Sequence: Synthetic oligonucleotide
ugagcuccgcuuucagcuc

SEQ ID NO: 1139897 - RNA, 19 nt, Artificial Sequence
  Description of Artificial Sequence: Synthetic oligonucleotide
gccagugaaagaagagggg

SEQ ID NO: 1139898 - RNA, 19 nt, Artificial Sequence
  Description of Artificial Sequence: Synthetic oligonucleotide
acuaucauccagggugcgu

SEQ ID NO: 1139899 - RNA, 19 nt, Artificial Sequence
  Description of Artificial Sequence: Synthetic oligonucleotide
auguccacuuuucguguau

SEQ ID NO: 1139900 - RNA, 19 nt, Artificial Sequence
  Description of Artificial Sequence: Synthetic oligonucleotide
gugaaaccuaaggugggca

SEQ ID NO: 1139901 - RNA, 19 nt, Artificial Sequence
  Description of Artificial Sequence: Synthetic oligonucleotide
caucaggugacgggccagg

SEQ ID NO: 1139902 - RNA, 19 nt, Artificial Sequence
  Description of Artificial Sequence: Synthetic oligonucleotide
uagcaagcuuuggcaaaag

SEQ ID NO: 1139903 - RNA, 19 nt, Artificial Sequence
  Description of Artificial Sequence: Synthetic oligonucleotide
gcaacguucagagcgcaug

SEQ ID NO: 1139904 - RNA, 19 nt, Artificial Sequence
  Description of Artificial Sequence: Synthetic oligonucleotide
gcggcagccauuucuaaca

SEQ ID NO: 1139905 - RNA, 19 nt, Artificial Sequence
  Description of Artificial Sequence: Synthetic oligonucleotide
ccaguggugcccuucacuc

SEQ ID NO: 1139906 - RNA, 19 nt, Artificial Sequence
  Description of Artificial Sequence: Synthetic oligonucleotide
ccaacguaacaggagguag

SEQ ID NO: 1139907 - RNA, 19 nt, Artificial Sequence
  Description of Artificial Sequence: Synthetic oligonucleotide
cuagcaagcucucaaugau

SEQ ID NO: 1139908 - RNA, 19 nt, Artificial Sequence
  Description of Artificial Sequence: Synthetic oligonucleotide
uuacgguguggcucuccac

SEQ ID NO: 1139909 - RNA, 19 nt, Artificial Sequence
  Description of Artificial Sequence: Synthetic oligonucleotide
ccauaccugccuuugguuc

SEQ ID NO: 1139910 - RNA, 19 nt, Artificial Sequence
  Description of Artificial Sequence: Synthetic oligonucleotide
uggcacuaucauccagggu

SEQ ID NO: 1139911 - RNA, 19 nt, Artificial Sequence
  Description of Artificial Sequence: Synthetic oligonucleotide
aggcguaugucagugcaaa

SEQ ID NO: 1139912 - RNA, 19 nt, Artificial Sequence
  Description of Artificial Sequence: Synthetic oligonucleotide
aucucgaggcuggcauagc

SEQ ID NO: 1139913 - RNA, 19 nt, Artificial Sequence
  Description of Artificial Sequence: Synthetic oligonucleotide
caggcugaaagugugugaa

SEQ ID NO: 1139914 - RNA, 19 nt, Artificial Sequence
  Description of Artificial Sequence: Synthetic oligonucleotide
cauugcacuugagccaauc

SEQ ID NO: 1139915 - RNA, 19 nt, Artificial Sequence
  Description of Artificial Sequence: Synthetic oligonucleotide
ggauauaccuccucuucua

SEQ ID NO: 1139916 - RNA, 19 nt, Artificial Sequence
  Description of Artificial Sequence: Synthetic oligonucleotide
ugccgccacgucuggaacu

SEQ ID NO: 1139917 - RNA, 19 nt, Artificial Sequence
  Description of Artificial Sequence: Synthetic oligonucleotide
agcgcaugggguuccguuu

SEQ ID NO: 1139918 - RNA, 19 nt, Artificial Sequence
  Description of Artificial Sequence: Synthetic oligonucleotide
cauaacuagcaagcucuca

SEQ ID NO: 1139919 - RNA, 19 nt, Artificial Sequence
  Description of Artificial Sequence: Synthetic oligonucleotide
gacaauccugucggcugcc

SEQ ID NO: 1139920 - RNA, 19 nt, Artificial Sequence
  Description of Artificial Sequence: Synthetic oligonucleotide
cuuaaacccugccuuuucu

SEQ ID NO: 1139921 - RNA, 19 nt, Artificial Sequence
  Description of Artificial Sequence: Synthetic oligonucleotide
gcuuucggacagcaguggc

SEQ ID NO: 1139922 - RNA, 19 nt, Artificial Sequence
  Description of Artificial Sequence: Synthetic oligonucleotide
gccguucaauuacuuuggg

SEQ ID NO: 1139923 - RNA, 19 nt, Artificial Sequence
  Description of Artificial Sequence: Synthetic oligonucleotide
aggguuuuagcaggggaua

SEQ ID NO: 1139924 - RNA, 19 nt, Artificial Sequence
  Description of Artificial Sequence: Synthetic oligonucleotide
aggcuggcauagcgggacg

SEQ ID NO: 1139925 - RNA, 19 nt, Artificial Sequence
  Description of Artificial Sequence: Synthetic oligonucleotide
ggaaucuguggaccugcug

SEQ ID NO: 1139926 - RNA, 19 nt, Artificial Sequence
  Description of Artificial Sequence: Synthetic oligonucleotide
cccgaaugcgcucuaugag

SEQ ID NO: 1139927 - RNA, 19 nt, Artificial Sequence
  Description of Artificial Sequence: Synthetic oligonucleotide
gcguaugucagugcaaauc

SEQ ID NO: 1139928 - RNA, 19 nt, Artificial Sequence
  Description of Artificial Sequence: Synthetic oligonucleotide
aguauccggcggcagccau

SEQ ID NO: 1139929 - RNA, 19 nt, Artificial Sequence
  Description of Artificial Sequence: Synthetic oligonucleotide
cuagcaagcuuuggcaaaa

SEQ ID NO: 1139930 - RNA, 19 nt, Artificial Sequence
  Description of Artificial Sequence: Synthetic oligonucleotide
ucccgaaugcgccguucaa

SEQ ID NO: 1139931 - RNA, 19 nt, Artificial Sequence
  Description of Artificial Sequence: Synthetic oligonucleotide
ggguccaacaaaugcucca

SEQ ID NO: 1139932 - RNA, 19 nt, Artificial Sequence
  Description of Artificial Sequence: Synthetic oligonucleotide
ccacuuuucguguauaggu

SEQ ID NO: 1139933 - RNA, 19 nt, Artificial Sequence
  Description of Artificial Sequence: Synthetic oligonucleotide
ugagugccaguggugcccu

SEQ ID NO: 1139934 - RNA, 19 nt, Artificial Sequence
  Description of Artificial Sequence: Synthetic oligonucleotide
caauguccacuuuucgugu

SEQ ID NO: 1139935 - RNA, 19 nt, Artificial Sequence
  Description of Artificial Sequence: Synthetic oligonucleotide
ugugcacgugagccaucac

SEQ ID NO: 1139936 - RNA, 19 nt, Artificial Sequence
  Description of Artificial Sequence: Synthetic oligonucleotide
cgccguucaauuacuuugg

SEQ ID NO: 1139937 - RNA, 19 nt, Artificial Sequence
  Description of Artificial Sequence: Synthetic oligonucleotide
cacuaucauccagggugcg

SEQ ID NO: 1139938 - RNA, 19 nt, Artificial Sequence
  Description of Artificial Sequence: Synthetic oligonucleotide
ucaugccgcaggcgcuucu

SEQ ID NO: 1139939 - RNA, 19 nt, Artificial Sequence
  Description of Artificial Sequence: Synthetic oligonucleotide
cuguauugucuccaacgua

SEQ ID NO: 1139940 - RNA, 19 nt, Artificial Sequence
  Description of Artificial Sequence: Synthetic oligonucleotide
gagaucacucuagcaagcu

SEQ ID NO: 1139941 - RNA, 19 nt, Artificial Sequence
  Description of Artificial Sequence: Synthetic oligonucleotide
ggucuguauugucuccaac

SEQ ID NO: 1139942 - RNA, 19 nt, Artificial Sequence
  Description of Artificial Sequence: Synthetic oligonucleotide
acaucucgaggcuggcaua

SEQ ID NO: 1139943 - RNA, 19 nt, Artificial Sequence
  Description of Artificial Sequence: Synthetic oligonucleotide
ccagggugcguucaaacca

SEQ ID NO: 1139944 - RNA, 19 nt, Artificial Sequence
  Description of Artificial Sequence: Synthetic oligonucleotide
gcacugaugccccuaagcu

SEQ ID NO: 1139945 - RNA, 19 nt, Artificial Sequence
  Description of Artificial Sequence: Synthetic oligonucleotide
cuccacugcagaauuaauu

SEQ ID NO: 1139946 - RNA, 19 nt, Artificial Sequence
  Description of Artificial Sequence: Synthetic oligonucleotide
uggggugcucggccaguga

SEQ ID NO: 1139947 - RNA, 19 nt, Artificial Sequence
  Description of Artificial Sequence: Synthetic oligonucleotide
ggcggcagccauuucuaac

SEQ ID NO: 1139948 - RNA, 19 nt, Artificial Sequence
  Description of Artificial Sequence: Synthetic oligonucleotide
caucgccaugaugauguuc

SEQ ID NO: 1139949 - RNA, 19 nt, Artificial Sequence
  Description of Artificial Sequence: Synthetic oligonucleotide
caauuacuuugggguacac

SEQ ID NO: 1139950 - RNA, 19 nt, Artificial Sequence
  Description of Artificial Sequence: Synthetic oligonucleotide
cguguauaggucuguccag

SEQ ID NO: 1139951 - RNA, 19 nt, Artificial Sequence
  Description of Artificial Sequence: Synthetic oligonucleotide
gccugagugccaguggugc

SEQ ID NO: 1139952 - RNA, 19 nt, Artificial Sequence
  Description of Artificial Sequence: Synthetic oligonucleotide
acgugagccaucacgucau

SEQ ID NO: 1139953 - RNA, 19 nt, Artificial Sequence
  Description of Artificial Sequence: Synthetic oligonucleotide
uccgucgguuggcacuauc

SEQ ID NO: 1139954 - RNA, 19 nt, Artificial Sequence
  Description of Artificial Sequence: Synthetic oligonucleotide
ccaccaauccuucagaaau

SEQ ID NO: 1139955 - RNA, 19 nt, Artificial Sequence
  Description of Artificial Sequence: Synthetic oligonucleotide
ggugcccuucacuccucgg

SEQ ID NO: 1139956 - RNA, 19 nt, Artificial Sequence
  Description of Artificial Sequence: Synthetic oligonucleotide
auaccugccuuugguuccu

SEQ ID NO: 1139957 - RNA, 19 nt, Artificial Sequence
  Description of Artificial Sequence: Synthetic oligonucleotide
caugacaauccugucggcu

SEQ ID NO: 1139958 - RNA, 19 nt, Artificial Sequence
  Description of Artificial Sequence: Synthetic oligonucleotide
acgugugcacgugagccau

SEQ ID NO: 1139959 - RNA, 19 nt, Artificial Sequence
  Description of Artificial Sequence: Synthetic oligonucleotide
gcccgaaugcgcucuauga

SEQ ID NO: 1139960 - RNA, 19 nt, Artificial Sequence
  Description of Artificial Sequence: Synthetic oligonucleotide
cacaucucgaggcuggcau

SEQ ID NO: 1139961 - RNA, 19 nt, Artificial Sequence
  Description of Artificial Sequence: Synthetic oligonucleotide
gugugcacgugagccauca

SEQ ID NO: 1139962 - RNA, 19 nt, Artificial Sequence
  Description of Artificial Sequence: Synthetic oligonucleotide
gcagcaacguucagagcgc

SEQ ID NO: 1139963 - RNA, 19 nt, Artificial Sequence
  Description of Artificial Sequence: Synthetic oligonucleotide
ccacgucuggaacuuguac

SEQ ID NO: 1139964 - RNA, 19 nt, Artificial Sequence
  Description of Artificial Sequence: Synthetic oligonucleotide
auguucuguaggguauuua

SEQ ID NO: 1139965 - RNA, 19 nt, Artificial Sequence
  Description of Artificial Sequence: Synthetic oligonucleotide
gauccgucgguuggcacua

SEQ ID NO: 1139966 - RNA, 19 nt, Artificial Sequence
  Description of Artificial Sequence: Synthetic oligonucleotide
ggcauugcacuugagccaa

SEQ ID NO: 1139967 - RNA, 19 nt, Artificial Sequence
  Description of Artificial Sequence: Synthetic oligonucleotide
cuaggauuacgguguggcu

SEQ ID NO: 1139968 - RNA, 19 nt, Artificial Sequence
  Description of Artificial Sequence: Synthetic oligonucleotide
ucgccaugaugauguucuc

SEQ ID NO: 1139969 - RNA, 19 nt, Artificial Sequence
  Description of Artificial Sequence: Synthetic oligonucleotide
caucugcccgaaugcgcuc

SEQ ID NO: 1139970 - RNA, 19 nt, Artificial Sequence
  Description of Artificial Sequence: Synthetic oligonucleotide
cugggaaagcacucuaauu

SEQ ID NO: 1139971 - RNA, 19 nt, Artificial Sequence
  Description of Artificial Sequence: Synthetic oligonucleotide
gggacgccaggggagaaug

SEQ ID NO: 1139972 - RNA, 19 nt, Artificial Sequence
  Description of Artificial Sequence: Synthetic oligonucleotide
uugugcacugaugccccua

SEQ ID NO: 1139973 - RNA, 19 nt, Artificial Sequence
  Description of Artificial Sequence: Synthetic oligonucleotide
cagaauaaucaggucugua

SEQ ID NO: 1139974 - RNA, 19 nt, Artificial Sequence
  Description of Artificial Sequence: Synthetic oligonucleotide
gacgccaggggagaauggu

SEQ ID NO: 1139975 - RNA, 19 nt, Artificial Sequence
  Description of Artificial Sequence: Synthetic oligonucleotide
ucugcccgaaugcgcucua

SEQ ID NO: 1139976 - RNA, 19 nt, Artificial Sequence
  Description of Artificial Sequence: Synthetic oligonucleotide
guucuguaggguauuuaau

SEQ ID NO: 1139977 - RNA, 19 nt, Artificial Sequence
  Description of Artificial Sequence: Synthetic oligonucleotide
cuccaacguaacaggaggu

SEQ ID NO: 1139978 - RNA, 19 nt, Artificial Sequence
  Description of Artificial Sequence: Synthetic oligonucleotide
gcgcaugggguuccguuug

SEQ ID NO: 1139979 - RNA, 19 nt, Artificial Sequence
  Description of Artificial Sequence: Synthetic oligonucleotide
cguaugucagugcaaaucu

SEQ ID NO: 1139980 - RNA, 19 nt, Artificial Sequence
  Description of Artificial Sequence: Synthetic oligonucleotide
guaggguauuuaauacagu

SEQ ID NO: 1139981 - RNA, 19 nt, Artificial Sequence
  Description of Artificial Sequence: Synthetic oligonucleotide
caguggccaaacgugugca

SEQ ID NO: 1139982 - RNA, 19 nt, Artificial Sequence
  Description of Artificial Sequence: Synthetic oligonucleotide
gaggcguaugucagugcaa

SEQ ID NO: 1139983 - RNA, 19 nt, Artificial Sequence
  Description of Artificial Sequence: Synthetic oligonucleotide
cucccucgaagagcugcag

SEQ ID NO: 1139984 - RNA, 19 nt, Artificial Sequence
  Description of Artificial Sequence: Synthetic oligonucleotide
cuucccgaaugcgccguuc

SEQ ID NO: 1139985 - RNA, 19 nt, Artificial Sequence
  Description of Artificial Sequence: Synthetic oligonucleotide
agccugagcuccgcuuuca

SEQ ID NO: 1139986 - RNA, 19 nt, Artificial Sequence
  Description of Artificial Sequence: Synthetic oligonucleotide
gccaucacgucaugccgca

SEQ ID NO: 1139987 - RNA, 19 nt, Artificial Sequence
  Description of Artificial Sequence: Synthetic oligonucleotide
gccaaacgugugcacguga

SEQ ID NO: 1139988 - RNA, 19 nt, Artificial Sequence
  Description of Artificial Sequence: Synthetic oligonucleotide
gaguauccggcggcagcca

SEQ ID NO: 1139989 - RNA, 19 nt, Artificial Sequence
  Description of Artificial Sequence: Synthetic oligonucleotide
gggugcguucaaaccacug

SEQ ID NO: 1139990 - RNA, 19 nt, Artificial Sequence
  Description of Artificial Sequence: Synthetic oligonucleotide
gagcgcaugggguuccguu

SEQ ID NO: 1139991 - RNA, 19 nt, Artificial Sequence
  Description of Artificial Sequence: Synthetic oligonucleotide
ggggugcucggccagugaa

SEQ ID NO: 1139992 - RNA, 19 nt, Artificial Sequence
  Description of Artificial Sequence: Synthetic oligonucleotide
gugcucggccagugaaaga

SEQ ID NO: 1139993 - RNA, 19 nt, Artificial Sequence
  Description of Artificial Sequence: Synthetic oligonucleotide
ccgucgguuggcacuauca

SEQ ID NO: 1139994 - RNA, 19 nt, Artificial Sequence
  Description of Artificial Sequence: Synthetic oligonucleotide
ggacgccaggggagaaugg

SEQ ID NO: 1139995 - RNA, 19 nt, Artificial Sequence
  Description of Artificial Sequence: Synthetic oligonucleotide
cagagcgcaugggguuccg

SEQ ID NO: 1139996 - RNA, 19 nt, Artificial Sequence
  Description of Artificial Sequence: Synthetic oligonucleotide
agcucaucgcggacacgcu

SEQ ID NO: 1139997 - RNA, 19 nt, Artificial Sequence
  Description of Artificial Sequence: Synthetic oligonucleotide
ccgcuuucagcuccaucac

SEQ ID NO: 1139998 - RNA, 19 nt, Artificial Sequence
  Description of Artificial Sequence: Synthetic oligonucleotide
gggguuccguuuguacggc

SEQ ID NO: 1139999 - RNA, 19 nt, Artificial Sequence
  Description of Artificial Sequence: Synthetic oligonucleotide
gcucggccagugaaagaag

SEQ ID NO: 1140000 - RNA, 19 nt, Artificial Sequence
  Description of Artificial Sequence: Synthetic oligonucleotide
guacggcauugcacuugag

SEQ ID NO: 1140001 - RNA, 19 nt, Artificial Sequence
  Description of Artificial Sequence: Synthetic oligonucleotide
agcaacguucagagcgcau

SEQ ID NO: 1140002 - RNA, 19 nt, Artificial Sequence
  Description of Artificial Sequence: Synthetic oligonucleotide
ccguuuguacggcauugca

SEQ ID NO: 1140003 - RNA, 19 nt, Artificial Sequence
  Description of Artificial Sequence: Synthetic oligonucleotide
gugacgggccaggcugcag

SEQ ID NO: 1140004 - RNA, 19 nt, Artificial Sequence
  Description of Artificial Sequence: Synthetic oligonucleotide
agagcgcaugggguuccgu

SEQ ID NO: 1140005 - RNA, 19 nt, Artificial Sequence
  Description of Artificial Sequence: Synthetic oligonucleotide
ggccaaacgugugcacgug

SEQ ID NO: 1140006 - RNA, 19 nt, Artificial Sequence
  Description of Artificial Sequence: Synthetic oligonucleotide
auccggcggcagccauuuc

SEQ ID NO: 1140007 - RNA, 19 nt, Artificial Sequence
  Description of Artificial Sequence: Synthetic oligonucleotide
cguuucccaacagugguca

SEQ ID NO: 1140008 - RNA, 19 nt, Artificial Sequence
  Description of Artificial Sequence: Synthetic oligonucleotide
augcgcucuaugaggucau

SEQ ID NO: 1140009 - RNA, 19 nt, Artificial Sequence
  Description of Artificial Sequence: Synthetic oligonucleotide
acgccaggggagaauggua

SEQ ID NO: 1140010 - RNA, 19 nt, Artificial Sequence
  Description of Artificial Sequence: Synthetic oligonucleotide
gcaucugcccgaaugcgcu

SEQ ID NO: 1140011 - RNA, 19 nt, Artificial Sequence
  Description of Artificial Sequence: Synthetic oligonucleotide
cagcaacguucagagcgca

SEQ ID NO: 1140012 - RNA, 19 nt, Artificial Sequence
  Description of Artificial Sequence: Synthetic oligonucleotide
cgccagaguauccggcggc

SEQ ID NO: 1140013 - RNA, 19 nt, Artificial Sequence
  Description of Artificial Sequence: Synthetic oligonucleotide
ggccugagugccaguggug

SEQ ID NO: 1140014 - RNA, 19 nt, Artificial Sequence
  Description of Artificial Sequence: Synthetic oligonucleotide
gccaguggugcccuucacu

SEQ ID NO: 1140015 - RNA, 19 nt, Artificial Sequence
  Description of Artificial Sequence: Synthetic oligonucleotide
gcguuucccaacagugguc

SEQ ID NO: 1140016 - RNA, 19 nt, Artificial Sequence
  Description of Artificial Sequence: Synthetic oligonucleotide
ugcgcucuaugaggucauu

SEQ ID NO: 1140017 - RNA, 19 nt, Artificial Sequence
  Description of Artificial Sequence: Synthetic oligonucleotide
ggguuccguuuguacggca

SEQ ID NO: 1140018 - RNA, 19 nt, Artificial Sequence
  Description of Artificial Sequence: Synthetic oligonucleotide
gcacuugagccaaucugcu

SEQ ID NO: 1140019 - RNA, 19 nt, Artificial Sequence
  Description of Artificial Sequence: Synthetic oligonucleotide
gccaaacagauccgucggu

SEQ ID NO: 1140020 - RNA, 19 nt, Artificial Sequence
  Description of Artificial Sequence: Synthetic oligonucleotide
cguucagagcgcauggggu

SEQ ID NO: 1140021 - RNA, 19 nt, Artificial Sequence
  Description of Artificial Sequence: Synthetic oligonucleotide
gcggccugcugggaaagca

SEQ ID NO: 1140022 - RNA, 19 nt, Artificial Sequence
  Description of Artificial Sequence: Synthetic oligonucleotide
gucaugccgcaggcgcuuc

SEQ ID NO: 1140023 - RNA, 19 nt, Artificial Sequence
  Description of Artificial Sequence: Synthetic oligonucleotide
ccgaaugcgccguucaauu

SEQ ID NO: 1140024 - RNA, 19 nt, Artificial Sequence
  Description of Artificial Sequence: Synthetic oligonucleotide
cggcagccauuucuaacac

SEQ ID NO: 1140025 - RNA, 19 nt, Artificial Sequence
  Description of Artificial Sequence: Synthetic oligonucleotide
gccccuaagcuggccagca

SEQ ID NO: 1140026 - RNA, 19 nt, Artificial Sequence
  Description of Artificial Sequence: Synthetic oligonucleotide
guggugcccuucacuccuc

SEQ ID NO: 1140027 - RNA, 19 nt, Artificial Sequence
  Description of Artificial Sequence: Synthetic oligonucleotide
ggcguaugucagugcaaau

SEQ ID NO: 1140028 - RNA, 19 nt, Artificial Sequence
  Description of Artificial Sequence: Synthetic oligonucleotide
cuuugaccaucgccaugau

SEQ ID NO: 1140029 - RNA, 19 nt, Artificial Sequence
  Description of Artificial Sequence: Synthetic oligonucleotide
ccccuaagcuggccagcac

SEQ ID NO: 1140030 - RNA, 19 nt, Artificial Sequence
  Description of Artificial Sequence: Synthetic oligonucleotide
gcucaucgcggacacgcuu

SEQ ID NO: 1140031 - RNA, 19 nt, Artificial Sequence
  Description of Artificial Sequence: Synthetic oligonucleotide
cggacacgcuucaaguucu

SEQ ID NO: 1140032 - RNA, 19 nt, Artificial Sequence
  Description of Artificial Sequence: Synthetic oligonucleotide
ccggcggcagccauuucua

SEQ ID NO: 1140033 - RNA, 19 nt, Artificial Sequence
  Description of Artificial Sequence: Synthetic oligonucleotide
ccaaacagauccgucgguu

SEQ ID NO: 1140034 - RNA, 19 nt, Artificial Sequence
  Description of Artificial Sequence: Synthetic oligonucleotide
cgaaugcgccguucaauua

SEQ ID NO: 1140035 - RNA, 19 nt, Artificial Sequence
  Description of Artificial Sequence: Synthetic oligonucleotide
ccaucacgucaugccgcag

SEQ ID NO: 1140036 - RNA, 19 nt, Artificial Sequence
  Description of Artificial Sequence: Synthetic oligonucleotide
ggauuacgguguggcucuc

SEQ ID NO: 1140037 - RNA, 19 nt, Artificial Sequence
  Description of Artificial Sequence: Synthetic oligonucleotide
caucgcggacacgcuucaa

SEQ ID NO: 1140038 - RNA, 19 nt, Artificial Sequence
  Description of Artificial Sequence: Synthetic oligonucleotide
guauccggcggcagccauu

SEQ ID NO: 1140039 - RNA, 19 nt, Artificial Sequence
  Description of Artificial Sequence: Synthetic oligonucleotide
gccacgucuggaacuugua

SEQ ID NO: 1140040 - RNA, 19 nt, Artificial Sequence
  Description of Artificial Sequence: Synthetic oligonucleotide
ggugggcagaucagcucgu

SEQ ID NO: 1140041 - RNA, 19 nt, Artificial Sequence
  Description of Artificial Sequence: Synthetic oligonucleotide
auccgucgguuggcacuau

SEQ ID NO: 1140042 - RNA, 19 nt, Artificial Sequence
  Description of Artificial Sequence: Synthetic oligonucleotide
acacucccauaggguuuua

SEQ ID NO: 1140043 - RNA, 19 nt, Artificial Sequence
  Description of Artificial Sequence: Synthetic oligonucleotide
gugggcagaucagcucguu

SEQ ID NO: 1140044 - RNA, 19 nt, Artificial Sequence
  Description of Artificial Sequence: Synthetic oligonucleotide
cgucgguuggcacuaucau

SEQ ID NO: 1140045 - RNA, 19 nt, Artificial Sequence
  Description of Artificial Sequence: Synthetic oligonucleotide
cccgaaugcgccguucaau

SEQ ID NO: 1140046 - RNA, 19 nt, Artificial Sequence
  Description of Artificial Sequence: Synthetic oligonucleotide
cugcccgaaugcgcucuau

SEQ ID NO: 1140047 - RNA, 19 nt, Artificial Sequence
  Description of Artificial Sequence: Synthetic oligonucleotide
ccgccacgucuggaacuug

SEQ ID NO: 1140048 - RNA, 19 nt, Artificial Sequence
  Description of Artificial Sequence: Synthetic oligonucleotide
cgcggacacgcuucaaguu

SEQ ID NO: 1140049 - RNA, 19 nt, Artificial Sequence
  Description of Artificial Sequence: Synthetic oligonucleotide
gcgggacgccaggggagaa

SEQ ID NO: 1140050 - RNA, 19 nt, Artificial Sequence
  Description of Artificial Sequence: Synthetic oligonucleotide
cgcaugggguuccguuugu

SEQ ID NO: 1140051 - RNA, 19 nt, Artificial Sequence
  Description of Artificial Sequence: Synthetic oligonucleotide
gcauugcacuugagccaau

SEQ ID NO: 1140052 - RNA, 19 nt, Artificial Sequence
  Description of Artificial Sequence: Synthetic oligonucleotide
cgucaugccgcaggcgcuu

SEQ ID NO: 1140053 - RNA, 19 nt, Artificial Sequence
  Description of Artificial Sequence: Synthetic oligonucleotide
uuaggaauagcucugagag

SEQ ID NO: 1140054 - RNA, 19 nt, Artificial Sequence
  Description of Artificial Sequence: Synthetic oligonucleotide
agguaaaucauuuagauga

SEQ ID NO: 1140055 - RNA, 19 nt, Artificial Sequence
  Description of Artificial Sequence: Synthetic oligonucleotide
aaauccaaguacuaagugg

SEQ ID NO: 1140056 - RNA, 19 nt, Artificial Sequence
  Description of Artificial Sequence: Synthetic oligonucleotide
uguucauuaguacuuaggg

SEQ ID NO: 1140057 - RNA, 19 nt, Artificial Sequence
  Description of Artificial Sequence: Synthetic oligonucleotide
aaaggaauauucaaagugc

SEQ ID NO: 1140058 - RNA, 19 nt, Artificial Sequence
  Description of Artificial Sequence: Synthetic oligonucleotide
uguguuucgaccuugaaug

SEQ ID NO: 1140059 - RNA, 19 nt, Artificial Sequence
  Description of Artificial Sequence: Synthetic oligonucleotide
uaagugaaaauacugagac

SEQ ID NO: 1140060 - RNA, 19 nt, Artificial Sequence
  Description of Artificial Sequence: Synthetic oligonucleotide
ucccaugagauacagaugg

SEQ ID NO: 1140061 - RNA, 19 nt, Artificial Sequence
  Description of Artificial Sequence: Synthetic oligonucleotide
agacaugaaauuuagguag

SEQ ID NO: 1140062 - RNA, 19 nt, Artificial Sequence
  Description of Artificial Sequence: Synthetic oligonucleotide
agaccaaauaaauagaaug

SEQ ID NO: 1140063 - RNA, 19 nt, Artificial Sequence
  Description of Artificial Sequence: Synthetic oligonucleotide
uuaauauaaauaguaagug

SEQ ID NO: 1140064 - RNA, 19 nt, Artificial Sequence
  Description of Artificial Sequence: Synthetic oligonucleotide
aaagguaaaucauuuagau

SEQ ID NO: 1140065 - RNA, 19 nt, Artificial Sequence
  Description of Artificial Sequence: Synthetic oligonucleotide
uucauuaguacuuagggaa

SEQ ID NO: 1140066 - RNA, 19 nt, Artificial Sequence
  Description of Artificial Sequence: Synthetic oligonucleotide
cauaaaacggacaauacuc

SEQ ID NO: 1140067 - RNA, 19 nt, Artificial Sequence
  Description of Artificial Sequence: Synthetic oligonucleotide
aacgauuccuuucagguug

SEQ ID NO: 1140068 - RNA, 19 nt, Artificial Sequence
  Description of Artificial Sequence: Synthetic oligonucleotide
uuuauugguggauucaugc

SEQ ID NO: 1140069 - RNA, 19 nt, Artificial Sequence
  Description of Artificial Sequence: Synthetic oligonucleotide
aaugaagagagaauacuac

SEQ ID NO: 1140070 - RNA, 19 nt, Artificial Sequence
  Description of Artificial Sequence: Synthetic oligonucleotide
ucuggauuuaaacagcuga

SEQ ID NO: 1140071 - RNA, 19 nt, Artificial Sequence
  Description of Artificial Sequence: Synthetic oligonucleotide
ugaagaguuagccugacgu

SEQ ID NO: 1140072 - RNA, 19 nt, Artificial Sequence
  Description of Artificial Sequence: Synthetic oligonucleotide
uguuaauuguaccuaaaga

SEQ ID NO: 1140073 - RNA, 19 nt, Artificial Sequence
  Description of Artificial Sequence: Synthetic oligonucleotide
aaagacaugucacaacucu

SEQ ID NO: 1140074 - RNA, 19 nt, Artificial Sequence
  Description of Artificial Sequence: Synthetic oligonucleotide
aguaagugaaaauacugag

SEQ ID NO: 1140075 - RNA, 19 nt, Artificial Sequence
  Description of Artificial Sequence: Synthetic oligonucleotide
uaucauuagguacuugcgg

SEQ ID NO: 1140076 - RNA, 19 nt, Artificial Sequence
  Description of Artificial Sequence: Synthetic oligonucleotide
uaauaugaacacuuucacg

SEQ ID NO: 1140077 - RNA, 19 nt, Artificial Sequence
  Description of Artificial Sequence: Synthetic oligonucleotide
gacagcuuaaacuauucag

SEQ ID NO: 1140078 - RNA, 19 nt, Artificial Sequence
  Description of Artificial Sequence: Synthetic oligonucleotide
aacacaauauuuacugagc

SEQ ID NO: 1140079 - RNA, 19 nt, Artificial Sequence
  Description of Artificial Sequence: Synthetic oligonucleotide
aaaauuuugugacagcgua

SEQ ID NO: 1140080 - RNA, 19 nt, Artificial Sequence
  Description of Artificial Sequence: Synthetic oligonucleotide
ucuucuaaacacaauauuu

SEQ ID NO: 1140081 - RNA, 19 nt, Artificial Sequence
  Description of Artificial Sequence: Synthetic oligonucleotide
uguuuugacaaccccagug

SEQ ID NO: 1140082 - RNA, 19 nt, Artificial Sequence
  Description of Artificial Sequence: Synthetic oligonucleotide
uagaugauuaaagaaagca

SEQ ID NO: 1140083 - RNA, 19 nt, Artificial Sequence
  Description of Artificial Sequence: Synthetic oligonucleotide
uaaacuauucagaaguauc

SEQ ID NO: 1140084 - RNA, 19 nt, Artificial Sequence
  Description of Artificial Sequence: Synthetic oligonucleotide
aaacggacaauacucccuc

SEQ ID NO: 1140085 - RNA, 19 nt, Artificial Sequence
  Description of Artificial Sequence: Synthetic oligonucleotide
uuauuucaagaccaaauaa

SEQ ID NO: 1140086 - RNA, 19 nt, Artificial Sequence
  Description of Artificial Sequence: Synthetic oligonucleotide
gagaauacuacaucaaguc

SEQ ID NO: 1140087 - RNA, 19 nt, Artificial Sequence
  Description of Artificial Sequence: Synthetic oligonucleotide
aagaguuagccugacguac

SEQ ID NO: 1140088 - RNA, 19 nt, Artificial Sequence
  Description of Artificial Sequence: Synthetic oligonucleotide
caauuauauucaauugucg

SEQ ID NO: 1140089 - RNA, 19 nt, Artificial Sequence
  Description of Artificial Sequence: Synthetic oligonucleotide
agaauaauaaugcaauuua

SEQ ID NO: 1140090 - RNA, 19 nt, Artificial Sequence
  Description of Artificial Sequence: Synthetic oligonucleotide
ugauuguaaauuaauuuau

SEQ ID NO: 1140091 - RNA, 19 nt, Artificial Sequence
  Description of Artificial Sequence: Synthetic oligonucleotide
guaaaguuggccuugcuac

SEQ ID NO: 1140092 - RNA, 19 nt, Artificial Sequence
  Description of Artificial Sequence: Synthetic oligonucleotide
uugguggacaauuauauuc

SEQ ID NO: 1140093 - RNA, 19 nt, Artificial Sequence
  Description of Artificial Sequence: Synthetic oligonucleotide
uuugcuauacaugaucuug

SEQ ID NO: 1140094 - RNA, 19 nt, Artificial Sequence
  Description of Artificial Sequence: Synthetic oligonucleotide
uaauuguaccuaaagacau

SEQ ID NO: 1140095 - RNA, 19 nt, Artificial Sequence
  Description of Artificial Sequence: Synthetic oligonucleotide
agaacgauuccuuucaggu

SEQ ID NO: 1140096 - RNA, 19 nt, Artificial Sequence
  Description of Artificial Sequence: Synthetic oligonucleotide
uacuacaucaagucaacug

SEQ ID NO: 1140097 - RNA, 19 nt, Artificial Sequence
  Description of Artificial Sequence: Synthetic oligonucleotide
uugcuauacaugaucuugg

SEQ ID NO: 1140098 - RNA, 19 nt, Artificial Sequence
  Description of Artificial Sequence: Synthetic oligonucleotide
uuggccuaaugcaaaaucc

SEQ ID NO: 1140099 - RNA, 19 nt, Artificial Sequence
  Description of Artificial Sequence: Synthetic oligonucleotide
aagacaugaaauuuaggua

SEQ ID NO: 1140100 - RNA, 19 nt, Artificial Sequence
  Description of Artificial Sequence: Synthetic oligonucleotide
uaugcauccucucugacau

SEQ ID NO: 1140101 - RNA, 19 nt, Artificial Sequence
  Description of Artificial Sequence: Synthetic oligonucleotide
aauccaaguacuaagugga

SEQ ID NO: 1140102 - RNA, 19 nt, Artificial Sequence
  Description of Artificial Sequence: Synthetic oligonucleotide
auaaaacggacaauacucc

SEQ ID NO: 1140103 - RNA, 19 nt, Artificial Sequence
  Description of Artificial Sequence: Synthetic oligonucleotide
uucuaaacacaauauuuac

SEQ ID NO: 1140104 - RNA, 19 nt, Artificial Sequence
  Description of Artificial Sequence: Synthetic oligonucleotide
uaguacuuagggaagaaaa

SEQ ID NO: 1140105 - RNA, 19 nt, Artificial Sequence
  Description of Artificial Sequence: Synthetic oligonucleotide
cuuccuaccauccagcaug

SEQ ID NO: 1140106 - RNA, 19 nt, Artificial Sequence
  Description of Artificial Sequence: Synthetic oligonucleotide
uacuuagggaagaaaagac

SEQ ID NO: 1140107 - RNA, 19 nt, Artificial Sequence
  Description of Artificial Sequence: Synthetic oligonucleotide
caauugucgaagauggacc

SEQ ID NO: 1140108 - RNA, 19 nt, Artificial Sequence
  Description of Artificial Sequence: Synthetic oligonucleotide
uuguguaauuaccuuagga

SEQ ID NO: 1140109 - RNA, 19 nt, Artificial Sequence
  Description of Artificial Sequence: Synthetic oligonucleotide
uuuaagugauuguaaauua

SEQ ID NO: 1140110 - RNA, 19 nt, Artificial Sequence
  Description of Artificial Sequence: Synthetic oligonucleotide
cauuguguaauuaccuuag

SEQ ID NO: 1140111 - RNA, 19 nt, Artificial Sequence
  Description of Artificial Sequence: Synthetic oligonucleotide
aaacuauucagaaguaucu

SEQ ID NO: 1140112 - RNA, 19 nt, Artificial Sequence
  Description of Artificial Sequence: Synthetic oligonucleotide
uuauguugugagcaguggc

SEQ ID NO: 1140113 - RNA, 19 nt, Artificial Sequence
  Description of Artificial Sequence: Synthetic oligonucleotide
uacugagcaauucuaauau

SEQ ID NO: 1140114 - RNA, 19 nt, Artificial Sequence
  Description of Artificial Sequence: Synthetic oligonucleotide
uaaguggaaagcauuucug

SEQ ID NO: 1140115 - RNA, 19 nt, Artificial Sequence
  Description of Artificial Sequence: Synthetic oligonucleotide
augacuuccuuauaaucag

SEQ ID NO: 1140116 - RNA, 19 nt, Artificial Sequence
  Description of Artificial Sequence: Synthetic oligonucleotide
caaauaugcacacaagcuc

SEQ ID NO: 1140117 - RNA, 19 nt, Artificial Sequence
  Description of Artificial Sequence: Synthetic oligonucleotide
aggaauagcucugagagug

SEQ ID NO: 1140118 - RNA, 19 nt, Artificial Sequence
  Description of Artificial Sequence: Synthetic oligonucleotide
auauuuaagugauuguaaa

SEQ ID NO: 1140119 - RNA, 19 nt, Artificial Sequence
  Description of Artificial Sequence: Synthetic oligonucleotide
agaagucuauguaagaaag

SEQ ID NO: 1140120 - RNA, 19 nt, Artificial Sequence
  Description of Artificial Sequence: Synthetic oligonucleotide
ugguggacaauuauauuca

SEQ ID NO: 1140121 - RNA, 19 nt, Artificial Sequence
  Description of Artificial Sequence: Synthetic oligonucleotide
ugaaauuuagguaguuuau

SEQ ID NO: 1140122 - RNA, 19 nt, Artificial Sequence
  Description of Artificial Sequence: Synthetic oligonucleotide
aagacuuuugcuauacaug

SEQ ID NO: 1140123 - RNA, 19 nt, Artificial Sequence
  Description of Artificial Sequence: Synthetic oligonucleotide
ucaauugucgaagauggac

SEQ ID NO: 1140124 - RNA, 19 nt, Artificial Sequence
  Description of Artificial Sequence: Synthetic oligonucleotide
auaguaagugaaaauacug

SEQ ID NO: 1140125 - RNA, 19 nt, Artificial Sequence
  Description of Artificial Sequence: Synthetic oligonucleotide
aauuaccuuaggaauagcu

SEQ ID NO: 1140126 - RNA, 19 nt, Artificial Sequence
  Description of Artificial Sequence: Synthetic oligonucleotide
uggaucaaaguacauuacu

SEQ ID NO: 1140127 - RNA, 19 nt, Artificial Sequence
  Description of Artificial Sequence: Synthetic oligonucleotide
aucauuagguacuugcgga

SEQ ID NO: 1140128 - RNA, 19 nt, Artificial Sequence
  Description of Artificial Sequence: Synthetic oligonucleotide
uccagaacgauuccuuuca

SEQ ID NO: 1140129 - RNA, 19 nt, Artificial Sequence
  Description of Artificial Sequence: Synthetic oligonucleotide
uauauucaauugucgaaga

SEQ ID NO: 1140130 - RNA, 19 nt, Artificial Sequence
  Description of Artificial Sequence: Synthetic oligonucleotide
acaguaaaacugcugauau

SEQ ID NO: 1140131 - RNA, 19 nt, Artificial Sequence
  Description of Artificial Sequence: Synthetic oligonucleotide
auuaccuuaggaauagcuc

SEQ ID NO: 1140132 - RNA, 19 nt, Artificial Sequence
  Description of Artificial Sequence: Synthetic oligonucleotide
auacugagacagcuuaaac

SEQ ID NO: 1140133 - RNA, 19 nt, Artificial Sequence
  Description of Artificial Sequence: Synthetic oligonucleotide
agaauacuacaucaaguca

SEQ ID NO: 1140134 - RNA, 19 nt, Artificial Sequence
  Description of Artificial Sequence: Synthetic oligonucleotide
aacugaugaagcacuaguc

SEQ ID NO: 1140135 - RNA, 19 nt, Artificial Sequence
  Description of Artificial Sequence: Synthetic oligonucleotide
ugguuauccagaacaaaga

SEQ ID NO: 1140136 - RNA, 19 nt, Artificial Sequence
  Description of Artificial Sequence: Synthetic oligonucleotide
gucaugacccaagauaugg

SEQ ID NO: 1140137 - RNA, 19 nt, Artificial Sequence
  Description of Artificial Sequence: Synthetic oligonucleotide
augaagagagaauacuaca

SEQ ID NO: 1140138 - RNA, 19 nt, Artificial Sequence
  Description of Artificial Sequence: Synthetic oligonucleotide
aagcacuagucacuaacug

SEQ ID NO: 1140139 - RNA, 19 nt, Artificial Sequence
  Description of Artificial Sequence: Synthetic oligonucleotide
uauacaugaucuuggcaca

SEQ ID NO: 1140140 - RNA, 19 nt, Artificial Sequence
  Description of Artificial Sequence: Synthetic oligonucleotide
uuauugguggauucaugcc

SEQ ID NO: 1140141 - RNA, 19 nt, Artificial Sequence
  Description of Artificial Sequence: Synthetic oligonucleotide
uauuuacugagcaauucua

SEQ ID NO: 1140142 - RNA, 19 nt, Artificial Sequence
  Description of Artificial Sequence: Synthetic oligonucleotide
ucauuguuuugacaacccc

SEQ ID NO: 1140143 - RNA, 19 nt, Artificial Sequence
  Description of Artificial Sequence: Synthetic oligonucleotide
gugauuguaaauuaauuua

SEQ ID NO: 1140144 - RNA, 19 nt, Artificial Sequence
  Description of Artificial Sequence: Synthetic oligonucleotide
acguccaagaaucaugcug

SEQ ID NO: 1140145 - RNA, 19 nt, Artificial Sequence
  Description of Artificial Sequence: Synthetic oligonucleotide
augguuauccagaacaaag

SEQ ID NO: 1140146 - RNA, 19 nt, Artificial Sequence
  Description of Artificial Sequence: Synthetic oligonucleotide
guaauuaccuuaggaauag

SEQ ID NO: 1140147 - RNA, 19 nt, Artificial Sequence
  Description of Artificial Sequence: Synthetic oligonucleotide
agaaguaucugaaaagacu

SEQ ID NO: 1140148 - RNA, 19 nt, Artificial Sequence
  Description of Artificial Sequence: Synthetic oligonucleotide
cuggauuuaaacagcugag

SEQ ID NO: 1140149 - RNA, 19 nt, Artificial Sequence
  Description of Artificial Sequence: Synthetic oligonucleotide
augagauacagaugggugu

SEQ ID NO: 1140150 - RNA, 19 nt, Artificial Sequence
  Description of Artificial Sequence: Synthetic oligonucleotide
acuaacugacccuaggaaa

SEQ ID NO: 1140151 - RNA, 19 nt, Artificial Sequence
  Description of Artificial Sequence: Synthetic oligonucleotide
aauagcucugagagugacc

SEQ ID NO: 1140152 - RNA, 19 nt, Artificial Sequence
  Description of Artificial Sequence: Synthetic oligonucleotide
uaugaacacuuucacgagu

SEQ ID NO: 1140153 - RNA, 19 nt, Artificial Sequence
  Description of Artificial Sequence: Synthetic oligonucleotide
aacuauucagaaguaucug

SEQ ID NO: 1140154 - RNA, 19 nt, Artificial Sequence
  Description of Artificial Sequence: Synthetic oligonucleotide
uuacugagcaauucuaaua

SEQ ID NO: 1140155 - RNA, 19 nt, Artificial Sequence
  Description of Artificial Sequence: Synthetic oligonucleotide
aaaguuggccuugcuacuc

SEQ ID NO: 1140156 - RNA, 19 nt, Artificial Sequence
  Description of Artificial Sequence: Synthetic oligonucleotide
aagugaaaauacugagaca

SEQ ID NO: 1140157 - RNA, 19 nt, Artificial Sequence
  Description of Artificial Sequence: Synthetic oligonucleotide
auauggcuuauguugugag

SEQ ID NO: 1140158 - RNA, 19 nt, Artificial Sequence
  Description of Artificial Sequence: Synthetic oligonucleotide
acaagcucucucaaugugc

SEQ ID NO: 1140159 - RNA, 19 nt, Artificial Sequence
  Description of Artificial Sequence: Synthetic oligonucleotide
auagcucugagagugaccu

SEQ ID NO: 1140160 - RNA, 19 nt, Artificial Sequence
  Description of Artificial Sequence: Synthetic oligonucleotide
aguacuuagggaagaaaag

SEQ ID NO: 1140161 - RNA, 19 nt, Artificial Sequence
  Description of Artificial Sequence: Synthetic oligonucleotide
auuguguaauuaccuuagg

SEQ ID NO: 1140162 - RNA, 19 nt, Artificial Sequence
  Description of Artificial Sequence: Synthetic oligonucleotide
aagauauggcuuauguugu

SEQ ID NO: 1140163 - RNA, 19 nt, Artificial Sequence
  Description of Artificial Sequence: Synthetic oligonucleotide
gaaucaugcugccaccagc

SEQ ID NO: 1140164 - RNA, 19 nt, Artificial Sequence
  Description of Artificial Sequence: Synthetic oligonucleotide
uggccuaaugcaaaaucca

SEQ ID NO: 1140165 - RNA, 19 nt, Artificial Sequence
  Description of Artificial Sequence: Synthetic oligonucleotide
uggauuuaaacagcugagc

SEQ ID NO: 1140166 - RNA, 19 nt, Artificial Sequence
  Description of Artificial Sequence: Synthetic oligonucleotide
ugucaguaauccucauggg

SEQ ID NO: 1140167 - RNA, 19 nt, Artificial Sequence
  Description of Artificial Sequence: Synthetic oligonucleotide
auucuaauauuuaagugau

SEQ ID NO: 1140168 - RNA, 19 nt, Artificial Sequence
  Description of Artificial Sequence: Synthetic oligonucleotide
agcacuagucacuaacuga

SEQ ID NO: 1140169 - RNA, 19 nt, Artificial Sequence
  Description of Artificial Sequence: Synthetic oligonucleotide
aaaacggacaauacucccu

SEQ ID NO: 1140170 - RNA, 19 nt, Artificial Sequence
  Description of Artificial Sequence: Synthetic oligonucleotide
ugcugauauucuuuggccu

SEQ ID NO: 1140171 - RNA, 19 nt, Artificial Sequence
  Description of Artificial Sequence: Synthetic oligonucleotide
guaagaaagcuaucucagc

SEQ ID NO: 1140172 - RNA, 19 nt, Artificial Sequence
  Description of Artificial Sequence: Synthetic oligonucleotide
uguggcagguugcugacgu

SEQ ID NO: 1140173 - RNA, 19 nt, Artificial Sequence
  Description of Artificial Sequence: Synthetic oligonucleotide
auuagguacuugcggacug

SEQ ID NO: 1140174 - RNA, 19 nt, Artificial Sequence
  Description of Artificial Sequence: Synthetic oligonucleotide
uugacaaccccaguguaug

SEQ ID NO: 1140175 - RNA, 19 nt, Artificial Sequence
  Description of Artificial Sequence: Synthetic oligonucleotide
uauggcuuauguugugagc

SEQ ID NO: 1140176 - RNA, 19 nt, Artificial Sequence
  Description of Artificial Sequence: Synthetic oligonucleotide
ggacaauuauauucaauug

SEQ ID NO: 1140177 - RNA, 19 nt, Artificial Sequence
  Description of Artificial Sequence: Synthetic oligonucleotide
uaccuaaagacaugucaca

SEQ ID NO: 1140178 - RNA, 19 nt, Artificial Sequence
  Description of Artificial Sequence: Synthetic oligonucleotide
ugcuauacaugaucuuggc

SEQ ID NO: 1140179 - RNA, 19 nt, Artificial Sequence
  Description of Artificial Sequence: Synthetic oligonucleotide
uuugacaaccccaguguau

SEQ ID NO: 1140180 - RNA, 19 nt, Artificial Sequence
  Description of Artificial Sequence: Synthetic oligonucleotide
aauuaagaaagaagucuau

SEQ ID NO: 1140181 - RNA, 19 nt, Artificial Sequence
  Description of Artificial Sequence: Synthetic oligonucleotide
uaccuuaggaauagcucug

SEQ ID NO: 1140182 - RNA, 19 nt, Artificial Sequence
  Description of Artificial Sequence: Synthetic oligonucleotide
auggcuuauguugugagca

SEQ ID NO: 1140183 - RNA, 19 nt, Artificial Sequence
  Description of Artificial Sequence: Synthetic oligonucleotide
gauucaugccacccucggg

SEQ ID NO: 1140184 - RNA, 19 nt, Artificial Sequence
  Description of Artificial Sequence: Synthetic oligonucleotide
uaucucagcuccuuccuac

SEQ ID NO: 1140185 - RNA, 19 nt, Artificial Sequence
  Description of Artificial Sequence: Synthetic oligonucleotide
ugcaauuuacaaugcaauu

SEQ ID NO: 1140186 - RNA, 19 nt, Artificial Sequence
  Description of Artificial Sequence: Synthetic oligonucleotide
cugacguccaagaaucaug

SEQ ID NO: 1140187 - RNA, 19 nt, Artificial Sequence
  Description of Artificial Sequence: Synthetic oligonucleotide
uccagcaugugccaagauc

SEQ ID NO: 1140188 - RNA, 19 nt, Artificial Sequence
  Description of Artificial Sequence: Synthetic oligonucleotide
ccaaguacuaaguggaaag

SEQ ID NO: 1140189 - RNA, 19 nt, Artificial Sequence
  Description of Artificial Sequence: Synthetic oligonucleotide
guucauuaguacuuaggga

SEQ ID NO: 1140190 - RNA, 19 nt, Artificial Sequence
  Description of Artificial Sequence: Synthetic oligonucleotide
gaagucuauguaagaaagc

SEQ ID NO: 1140191 - RNA, 19 nt, Artificial Sequence
  Description of Artificial Sequence: Synthetic oligonucleotide
ucauuagguacuugcggac

SEQ ID NO: 1140192 - RNA, 19 nt, Artificial Sequence
  Description of Artificial Sequence: Synthetic oligonucleotide
acuaaguggaaagcauuuc

SEQ ID NO: 1140193 - RNA, 19 nt, Artificial Sequence
  Description of Artificial Sequence: Synthetic oligonucleotide
ugcaaaauccaaguacuaa

SEQ ID NO: 1140194 - RNA, 19 nt, Artificial Sequence
  Description of Artificial Sequence: Synthetic oligonucleotide
uugaaugucuccugaggaa

SEQ ID NO: 1140195 - RNA, 19 nt, Artificial Sequence
  Description of Artificial Sequence: Synthetic oligonucleotide
cuuauguugugagcagugg

SEQ ID NO: 1140196 - RNA, 19 nt, Artificial Sequence
  Description of Artificial Sequence: Synthetic oligonucleotide
acggacaauacucccucuc

SEQ ID NO: 1140197 - RNA, 19 nt, Artificial Sequence
  Description of Artificial Sequence: Synthetic oligonucleotide
cagcauucccaugagauac

SEQ ID NO: 1140198 - RNA, 19 nt, Artificial Sequence
  Description of Artificial Sequence: Synthetic oligonucleotide
ucgggaauaaaggggaaac

SEQ ID NO: 1140199 - RNA, 19 nt, Artificial Sequence
  Description of Artificial Sequence: Synthetic oligonucleotide
ggaucaaaguacauuacug

SEQ ID NO: 1140200 - RNA, 19 nt, Artificial Sequence
  Description of Artificial Sequence: Synthetic oligonucleotide
uaaaguuggccuugcuacu

SEQ ID NO: 1140201 - RNA, 19 nt, Artificial Sequence
  Description of Artificial Sequence: Synthetic oligonucleotide
ugagacagcuuaaacuauu

SEQ ID NO: 1140202 - RNA, 19 nt, Artificial Sequence
  Description of Artificial Sequence: Synthetic oligonucleotide
cacccucgggaauaaaggg

SEQ ID NO: 1140203 - RNA, 19 nt, Artificial Sequence
  Description of Artificial Sequence: Synthetic oligonucleotide
ucaacugaugaagcacuag

SEQ ID NO: 1140204 - RNA, 19 nt, Artificial Sequence
  Description of Artificial Sequence: Synthetic oligonucleotide
agaaucaugcugccaccag

SEQ ID NO: 1140205 - RNA, 19 nt, Artificial Sequence
  Description of Artificial Sequence: Synthetic oligonucleotide
cauuaaaggacaauauggu

SEQ ID NO: 1140206 - RNA, 19 nt, Artificial Sequence
  Description of Artificial Sequence: Synthetic oligonucleotide
guuggcggauuuuggaacc

SEQ ID NO: 1140207 - RNA, 19 nt, Artificial Sequence
  Description of Artificial Sequence: Synthetic oligonucleotide
aguugguggacaauuauau

SEQ ID NO: 1140208 - RNA, 19 nt, Artificial Sequence
  Description of Artificial Sequence: Synthetic oligonucleotide
ucacaacucucccuauucu

SEQ ID NO: 1140209 - RNA, 19 nt, Artificial Sequence
  Description of Artificial Sequence: Synthetic oligonucleotide
uugaccucugggcaacuga

SEQ ID NO: 1140210 - RNA, 19 nt, Artificial Sequence
  Description of Artificial Sequence: Synthetic oligonucleotide
ugaacacuuucacgaguug

SEQ ID NO: 1140211 - RNA, 19 nt, Artificial Sequence
  Description of Artificial Sequence: Synthetic oligonucleotide
ucgaccuugaaugucuccu

SEQ ID NO: 1140212 - RNA, 19 nt, Artificial Sequence
  Description of Artificial Sequence: Synthetic oligonucleotide
uuauaaucagaagcuaauu

SEQ ID NO: 1140213 - RNA, 19 nt, Artificial Sequence
  Description of Artificial Sequence: Synthetic oligonucleotide
uucacucucucuucuaaua

SEQ ID NO: 1140214 - RNA, 19 nt, Artificial Sequence
  Description of Artificial Sequence: Synthetic oligonucleotide
uuugcauuuauugguggau

SEQ ID NO: 1140215 - RNA, 19 nt, Artificial Sequence
  Description of Artificial Sequence: Synthetic oligonucleotide
guaagugaaaauacugaga

SEQ ID NO: 1140216 - RNA, 19 nt, Artificial Sequence
  Description of Artificial Sequence: Synthetic oligonucleotide
caaguacuaaguggaaagc

SEQ ID NO: 1140217 - RNA, 19 nt, Artificial Sequence
  Description of Artificial Sequence: Synthetic oligonucleotide
aauuaucauuagguacuug

SEQ ID NO: 1140218 - RNA, 19 nt, Artificial Sequence
  Description of Artificial Sequence: Synthetic oligonucleotide
auauucaauugucgaagau

SEQ ID NO: 1140219 - RNA, 19 nt, Artificial Sequence
  Description of Artificial Sequence: Synthetic oligonucleotide
uugucgaagauggaccaca

SEQ ID NO: 1140220 - RNA, 19 nt, Artificial Sequence
  Description of Artificial Sequence: Synthetic oligonucleotide
cacaacucucccuauucug

SEQ ID NO: 1140221 - RNA, 19 nt, Artificial Sequence
  Description of Artificial Sequence: Synthetic oligonucleotide
uugucuuagcuuuguauuu

SEQ ID NO: 1140222 - RNA, 19 nt, Artificial Sequence
  Description of Artificial Sequence: Synthetic oligonucleotide
ugacccaagauauggcuua

SEQ ID NO: 1140223 - RNA, 19 nt, Artificial Sequence
  Description of Artificial Sequence: Synthetic oligonucleotide
gaaaugaaaggucauuguu

SEQ ID NO: 1140224 - RNA, 19 nt, Artificial Sequence
  Description of Artificial Sequence: Synthetic oligonucleotide
uauuuugucuuagcuuugu

SEQ ID NO: 1140225 - RNA, 19 nt, Artificial Sequence
  Description of Artificial Sequence: Synthetic oligonucleotide
cuggguaaccuguggaaug

SEQ ID NO: 1140226 - RNA, 19 nt, Artificial Sequence
  Description of Artificial Sequence: Synthetic oligonucleotide
agacagcuuaaacuauuca

SEQ ID NO: 1140227 - RNA, 19 nt, Artificial Sequence
  Description of Artificial Sequence: Synthetic oligonucleotide
uccucaugggauuggauuu

SEQ ID NO: 1140228 - RNA, 19 nt, Artificial Sequence
  Description of Artificial Sequence: Synthetic oligonucleotide
gacagcguaugcuggucag

SEQ ID NO: 1140229 - RNA, 19 nt, Artificial Sequence
  Description of Artificial Sequence: Synthetic oligonucleotide
uggccuugcuacuccaugc

SEQ ID NO: 1140230 - RNA, 19 nt, Artificial Sequence
  Description of Artificial Sequence: Synthetic oligonucleotide
gaguuagccugacguacag

SEQ ID NO: 1140231 - RNA, 19 nt, Artificial Sequence
  Description of Artificial Sequence: Synthetic oligonucleotide
ucccuauucugauuuucac

SEQ ID NO: 1140232 - RNA, 19 nt, Artificial Sequence
  Description of Artificial Sequence: Synthetic oligonucleotide
ugugacagcguaugcuggu

SEQ ID NO: 1140233 - RNA, 19 nt, Artificial Sequence
  Description of Artificial Sequence: Synthetic oligonucleotide
aguacuaaguggaaagcau

SEQ ID NO: 1140234 - RNA, 19 nt, Artificial Sequence
  Description of Artificial Sequence: Synthetic oligonucleotide
agauauggcuuauguugug

SEQ ID NO: 1140235 - RNA, 19 nt, Artificial Sequence
  Description of Artificial Sequence: Synthetic oligonucleotide
guguaauuaccuuaggaau

SEQ ID NO: 1140236 - RNA, 19 nt, Artificial Sequence
  Description of Artificial Sequence: Synthetic oligonucleotide
ugacagcguaugcugguca

SEQ ID NO: 1140237 - RNA, 19 nt, Artificial Sequence
  Description of Artificial Sequence: Synthetic oligonucleotide
gucacaacucucccuauuc

SEQ ID NO: 1140238 - RNA, 19 nt, Artificial Sequence
  Description of Artificial Sequence: Synthetic oligonucleotide
uggcuuauguugugagcag

SEQ ID NO: 1140239 - RNA, 19 nt, Artificial Sequence
  Description of Artificial Sequence: Synthetic oligonucleotide
uuuaaacagcugagcugca

SEQ ID NO: 1140240 - RNA, 19 nt, Artificial Sequence
  Description of Artificial Sequence: Synthetic oligonucleotide
gauauggcuuauguuguga

SEQ ID NO: 1140241 - RNA, 19 nt, Artificial Sequence
  Description of Artificial Sequence: Synthetic oligonucleotide
uuuugcuauacaugaucuu

SEQ ID NO: 1140242 - RNA, 19 nt, Artificial Sequence
  Description of Artificial Sequence: Synthetic oligonucleotide
cuuauaaucagaagcuaau

SEQ ID NO: 1140243 - RNA, 19 nt, Artificial Sequence
  Description of Artificial Sequence: Synthetic oligonucleotide
auuuuggaaccagugcugu

SEQ ID NO: 1140244 - RNA, 19 nt, Artificial Sequence
  Description of Artificial Sequence: Synthetic oligonucleotide
augaaaggucauuguuuug

SEQ ID NO: 1140245 - RNA, 19 nt, Artificial Sequence
  Description of Artificial Sequence: Synthetic oligonucleotide
ugcacacaagcucucucaa

SEQ ID NO: 1140246 - RNA, 19 nt, Artificial Sequence
  Description of Artificial Sequence: Synthetic oligonucleotide
guuuugacaaccccagugu

SEQ ID NO: 1140247 - RNA, 19 nt, Artificial Sequence
  Description of Artificial Sequence: Synthetic oligonucleotide
caagcucucucaaugugca

SEQ ID NO: 1140248 - RNA, 19 nt, Artificial Sequence
  Description of Artificial Sequence: Synthetic oligonucleotide
gaauagcucugagagugac

SEQ ID NO: 1140249 - RNA, 19 nt, Artificial Sequence
  Description of Artificial Sequence: Synthetic oligonucleotide
aggacaauaugguucucua

SEQ ID NO: 1140250 - RNA, 19 nt, Artificial Sequence
  Description of Artificial Sequence: Synthetic oligonucleotide
gucuauguaagaaagcuau

SEQ ID NO: 1140251 - RNA, 19 nt, Artificial Sequence
  Description of Artificial Sequence: Synthetic oligonucleotide
gagauacagaugggugugg

SEQ ID NO: 1140252 - RNA, 19 nt, Artificial Sequence
  Description of Artificial Sequence: Synthetic oligonucleotide
cauugggacuuguguuucg

SEQ ID NO: 1140253 - RNA, 19 nt, Artificial Sequence
  Description of Artificial Sequence: Synthetic oligonucleotide
gaagaguuagccugacgua

SEQ ID NO: 1140254 - RNA, 19 nt, Artificial Sequence
  Description of Artificial Sequence: Synthetic oligonucleotide
agcguaugcuggucaggac

SEQ ID NO: 1140255 - RNA, 19 nt, Artificial Sequence
  Description of Artificial Sequence: Synthetic oligonucleotide
aacggacaauacucccucu

SEQ ID NO: 1140256 - RNA, 19 nt, Artificial Sequence
  Description of Artificial Sequence: Synthetic oligonucleotide
cuaaguggaaagcauuucu

SEQ ID NO: 1140257 - RNA, 19 nt, Artificial Sequence
  Description of Artificial Sequence: Synthetic oligonucleotide
uucacgaguugguggacaa

SEQ ID NO: 1140258 - RNA, 19 nt, Artificial Sequence
  Description of Artificial Sequence: Synthetic oligonucleotide
caugucacaacucucccua

SEQ ID NO: 1140259 - RNA, 19 nt, Artificial Sequence
  Description of Artificial Sequence: Synthetic oligonucleotide
acaacucucccuauucuga

SEQ ID NO: 1140260 - RNA, 19 nt, Artificial Sequence
  Description of Artificial Sequence: Synthetic oligonucleotide
uuguuuugacaaccccagu

SEQ ID NO: 1140261 - RNA, 19 nt, Artificial Sequence
  Description of Artificial Sequence: Synthetic oligonucleotide
uucgaccuugaaugucucc

SEQ ID NO: 1140262 - RNA, 19 nt, Artificial Sequence
  Description of Artificial Sequence: Synthetic oligonucleotide
cugaagaguuagccugacg

SEQ ID NO: 1140263 - RNA, 19 nt, Artificial Sequence
  Description of Artificial Sequence: Synthetic oligonucleotide
ucaugggauuggauuucug

SEQ ID NO: 1140264 - RNA, 19 nt, Artificial Sequence
  Description of Artificial Sequence: Synthetic oligonucleotide
ugacaaccccaguguaugc

SEQ ID NO: 1140265 - RNA, 19 nt, Artificial Sequence
  Description of Artificial Sequence: Synthetic oligonucleotide
cacaauauuuacugagcaa

SEQ ID NO: 1140266 - RNA, 19 nt, Artificial Sequence
  Description of Artificial Sequence: Synthetic oligonucleotide
gagacagcuuaaacuauuc

SEQ ID NO: 1140267 - RNA, 19 nt, Artificial Sequence
  Description of Artificial Sequence: Synthetic oligonucleotide
uacuccaugcauguuggau

SEQ ID NO: 1140268 - RNA, 19 nt, Artificial Sequence
  Description of Artificial Sequence: Synthetic oligonucleotide
gcguaugcuggucaggacc

SEQ ID NO: 1140269 - RNA, 19 nt, Artificial Sequence
  Description of Artificial Sequence: Synthetic oligonucleotide
gaugaagcacuagucacua

SEQ ID NO: 1140270 - RNA, 19 nt, Artificial Sequence
  Description of Artificial Sequence: Synthetic oligonucleotide
uucuaauauuuaagugauu

SEQ ID NO: 1140271 - RNA, 19 nt, Artificial Sequence
  Description of Artificial Sequence: Synthetic oligonucleotide
uccuuauaaucagaagcua

SEQ ID NO: 1140272 - RNA, 19 nt, Artificial Sequence
  Description of Artificial Sequence: Synthetic oligonucleotide
ucuguggcagguugcugac

SEQ ID NO: 1140273 - RNA, 19 nt, Artificial Sequence
  Description of Artificial Sequence: Synthetic oligonucleotide
auuaguacuuagggaagaa

SEQ ID NO: 1140274 - RNA, 19 nt, Artificial Sequence
  Description of Artificial Sequence: Synthetic oligonucleotide
uagucacuaacugacccua

SEQ ID NO: 1140275 - RNA, 19 nt, Artificial Sequence
  Description of Artificial Sequence: Synthetic oligonucleotide
gcacuagucacuaacugac

SEQ ID NO: 1140276 - RNA, 19 nt, Artificial Sequence
  Description of Artificial Sequence: Synthetic oligonucleotide
ugucgaagauggaccacau

SEQ ID NO: 1140277 - RNA, 19 nt, Artificial Sequence
  Description of Artificial Sequence: Synthetic oligonucleotide
ugucacaacucucccuauu

SEQ ID NO: 1140278 - RNA, 19 nt, Artificial Sequence
  Description of Artificial Sequence: Synthetic oligonucleotide
ccacccucgggaauaaagg

SEQ ID NO: 1140279 - RNA, 19 nt, Artificial Sequence
  Description of Artificial Sequence: Synthetic oligonucleotide
aguuagccugacguacagg

SEQ ID NO: 1140280 - RNA, 19 nt, Artificial Sequence
  Description of Artificial Sequence: Synthetic oligonucleotide
aacucucccuauucugauu

SEQ ID NO: 1140281 - RNA, 19 nt, Artificial Sequence
  Description of Artificial Sequence: Synthetic oligonucleotide
uuucgaccuugaaugucuc

SEQ ID NO: 1140282 - RNA, 19 nt, Artificial Sequence
  Description of Artificial Sequence: Synthetic oligonucleotide
caaaauuuugugacagcgu

SEQ ID NO: 1140283 - RNA, 19 nt, Artificial Sequence
  Description of Artificial Sequence: Synthetic oligonucleotide
acugagcaauucuaauauu

SEQ ID NO: 1140284 - RNA, 19 nt, Artificial Sequence
  Description of Artificial Sequence: Synthetic oligonucleotide
cagucaugacccaagauau

SEQ ID NO: 1140285 - RNA, 19 nt, Artificial Sequence
  Description of Artificial Sequence: Synthetic oligonucleotide
uugggacuuguguuucgac

SEQ ID NO: 1140286 - RNA, 19 nt, Artificial Sequence
  Description of Artificial Sequence: Synthetic oligonucleotide
gacuuguguuucgaccuug

SEQ ID NO: 1140287 - RNA, 19 nt, Artificial Sequence
  Description of Artificial Sequence: Synthetic oligonucleotide
gccuaaugcaaaauccaag

SEQ ID NO: 1140288 - RNA, 19 nt, Artificial Sequence
  Description of Artificial Sequence: Synthetic oligonucleotide
cacuaacugacccuaggaa

SEQ ID NO: 1140289 - RNA, 19 nt, Artificial Sequence
  Description of Artificial Sequence: Synthetic oligonucleotide
augucuccugaggaagagg

SEQ ID NO: 1140290 - RNA, 19 nt, Artificial Sequence
  Description of Artificial Sequence: Synthetic oligonucleotide
cauuaguacuuagggaaga

SEQ ID NO: 1140291 - RNA, 19 nt, Artificial Sequence
  Description of Artificial Sequence: Synthetic oligonucleotide
uugguggauucaugccacc

SEQ ID NO: 1140292 - RNA, 19 nt, Artificial Sequence
  Description of Artificial Sequence: Synthetic oligonucleotide
guacauuacugugccuuug

SEQ ID NO: 1140293 - RNA, 19 nt, Artificial Sequence
  Description of Artificial Sequence: Synthetic oligonucleotide
cacuaggcuggguaaccug

SEQ ID NO: 1140294 - RNA, 19 nt, Artificial Sequence
  Description of Artificial Sequence: Synthetic oligonucleotide
auugggacuuguguuucga

SEQ ID NO: 1140295 - RNA, 19 nt, Artificial Sequence
  Description of Artificial Sequence: Synthetic oligonucleotide
gcauaaaacggacaauacu

SEQ ID NO: 1140296 - RNA, 19 nt, Artificial Sequence
  Description of Artificial Sequence: Synthetic oligonucleotide
agaguuagccugacguaca

SEQ ID NO: 1140297 - RNA, 19 nt, Artificial Sequence
  Description of Artificial Sequence: Synthetic oligonucleotide
auacuacaucaagucaacu

SEQ ID NO: 1140298 - RNA, 19 nt, Artificial Sequence
  Description of Artificial Sequence: Synthetic oligonucleotide
ugcugacguccaagaauca

SEQ ID NO: 1140299 - RNA, 19 nt, Artificial Sequence
  Description of Artificial Sequence: Synthetic oligonucleotide
gaguugguggacaauuaua

SEQ ID NO: 1140300 - RNA, 19 nt, Artificial Sequence
  Description of Artificial Sequence: Synthetic oligonucleotide
ccuuauaaucagaagcuaa

SEQ ID NO: 1140301 - RNA, 19 nt, Artificial Sequence
  Description of Artificial Sequence: Synthetic oligonucleotide
gauuggauuucuggacaga

SEQ ID NO: 1140302 - RNA, 19 nt, Artificial Sequence
  Description of Artificial Sequence: Synthetic oligonucleotide
guuucgaccuugaaugucu

SEQ ID NO: 1140303 - RNA, 19 nt, Artificial Sequence
  Description of Artificial Sequence: Synthetic oligonucleotide
ccuugcuacuccaugcaug

SEQ ID NO: 1140304 - RNA, 19 nt, Artificial Sequence
  Description of Artificial Sequence: Synthetic oligonucleotide
gcuauacaugaucuuggca

SEQ ID NO: 1140305 - RNA, 19 nt, Artificial Sequence
  Description of Artificial Sequence: Synthetic oligonucleotide
acgauuccuuucagguugg

SEQ ID NO: 1140306 - RNA, 19 nt, Artificial Sequence
  Description of Artificial Sequence: Synthetic oligonucleotide
cuagucacuaacugacccu

SEQ ID NO: 1140307 - RNA, 19 nt, Artificial Sequence
  Description of Artificial Sequence: Synthetic oligonucleotide
uggcggauuuuggaaccag

SEQ ID NO: 1140308 - RNA, 19 nt, Artificial Sequence
  Description of Artificial Sequence: Synthetic oligonucleotide
uuggcggauuuuggaacca

SEQ ID NO: 1140309 - RNA, 19 nt, Artificial Sequence
  Description of Artificial Sequence: Synthetic oligonucleotide
ccugaauuaucauuaggua

SEQ ID NO: 1140310 - RNA, 19 nt, Artificial Sequence
  Description of Artificial Sequence: Synthetic oligonucleotide
caaccccaguguaugcauc

SEQ ID NO: 1140311 - RNA, 19 nt, Artificial Sequence
  Description of Artificial Sequence: Synthetic oligonucleotide
auacaugaucuuggcacau

SEQ ID NO: 1140312 - RNA, 19 nt, Artificial Sequence
  Description of Artificial Sequence: Synthetic oligonucleotide
agucacuaacugacccuag

SEQ ID NO: 1140313 - RNA, 19 nt, Artificial Sequence
  Description of Artificial Sequence: Synthetic oligonucleotide
cuccaugcauguuggaugu

SEQ ID NO: 1140314 - RNA, 19 nt, Artificial Sequence
  Description of Artificial Sequence: Synthetic oligonucleotide
acuugcggacugucaggca

SEQ ID NO: 1140315 - RNA, 19 nt, Artificial Sequence
  Description of Artificial Sequence: Synthetic oligonucleotide
augacccaagauauggcuu

SEQ ID NO: 1140316 - RNA, 19 nt, Artificial Sequence
  Description of Artificial Sequence: Synthetic oligonucleotide
gaacgauuccuuucagguu

SEQ ID NO: 1140317 - RNA, 19 nt, Artificial Sequence
  Description of Artificial Sequence: Synthetic oligonucleotide
cuugaccucugggcaacug

SEQ ID NO: 1140318 - RNA, 19 nt, Artificial Sequence
  Description of Artificial Sequence: Synthetic oligonucleotide
gguggacaauuauauucaa

SEQ ID NO: 1140319 - RNA, 19 nt, Artificial Sequence
  Description of Artificial Sequence: Synthetic oligonucleotide
caugacugucaguaauccu

SEQ ID NO: 1140320 - RNA, 19 nt, Artificial Sequence
  Description of Artificial Sequence: Synthetic oligonucleotide
ccugguguuaauuguaccu

SEQ ID NO: 1140321 - RNA, 19 nt, Artificial Sequence
  Description of Artificial Sequence: Synthetic oligonucleotide
cuuguguuucgaccuugaa

SEQ ID NO: 1140322 - RNA, 19 nt, Artificial Sequence
  Description of Artificial Sequence: Synthetic oligonucleotide
guggaaugaaggaaguauu

SEQ ID NO: 1140323 - RNA, 19 nt, Artificial Sequence
  Description of Artificial Sequence: Synthetic oligonucleotide
guacuaaguggaaagcauu

SEQ ID NO: 1140324 - RNA, 19 nt, Artificial Sequence
  Description of Artificial Sequence: Synthetic oligonucleotide
ggcacuaggcuggguaacc

SEQ ID NO: 1140325 - RNA, 19 nt, Artificial Sequence
  Description of Artificial Sequence: Synthetic oligonucleotide
guguuucgaccuugaaugu

SEQ ID NO: 1140326 - RNA, 19 nt, Artificial Sequence
  Description of Artificial Sequence: Synthetic oligonucleotide
cugacguacaggaggcccu

SEQ ID NO: 1140327 - RNA, 19 nt, Artificial Sequence
  Description of Artificial Sequence: Synthetic oligonucleotide
cuaucucagcuccuuccua

SEQ ID NO: 1140328 - RNA, 19 nt, Artificial Sequence
  Description of Artificial Sequence: Synthetic oligonucleotide
cucgggaauaaaggggaaa

SEQ ID NO: 1140329 - RNA, 19 nt, Artificial Sequence
  Description of Artificial Sequence: Synthetic oligonucleotide
cauuagguacuugcggacu

SEQ ID NO: 1140330 - RNA, 19 nt, Artificial Sequence
  Description of Artificial Sequence: Synthetic oligonucleotide
ccagaacgauuccuuucag

SEQ ID NO: 1140331 - RNA, 19 nt, Artificial Sequence
  Description of Artificial Sequence: Synthetic oligonucleotide
guaaaucauuuagaugauu

SEQ ID NO: 1140332 - RNA, 19 nt, Artificial Sequence
  Description of Artificial Sequence: Synthetic oligonucleotide
gacguacaggaggcccuug

SEQ ID NO: 1140333 - RNA, 19 nt, Artificial Sequence
  Description of Artificial Sequence: Synthetic oligonucleotide
ucuugaccucugggcaacu

SEQ ID NO: 1140334 - RNA, 19 nt, Artificial Sequence
  Description of Artificial Sequence: Synthetic oligonucleotide
gacguccaagaaucaugcu

SEQ ID NO: 1140335 - RNA, 19 nt, Artificial Sequence
  Description of Artificial Sequence: Synthetic oligonucleotide
ugacguacaggaggcccuu

SEQ ID NO: 1140336 - RNA, 19 nt, Artificial Sequence
  Description of Artificial Sequence: Synthetic oligonucleotide
gaaagcuaucucagcuccu

SEQ ID NO: 1140337 - RNA, 19 nt, Artificial Sequence
  Description of Artificial Sequence: Synthetic oligonucleotide
auccagcaugugccaagau

SEQ ID NO: 1140338 - RNA, 19 nt, Artificial Sequence
  Description of Artificial Sequence: Synthetic oligonucleotide
uccuuucagguuggcggau

SEQ ID NO: 1140339 - RNA, 19 nt, Artificial Sequence
  Description of Artificial Sequence: Synthetic oligonucleotide
guaugcuggucaggaccug

SEQ ID NO: 1140340 - RNA, 19 nt, Artificial Sequence
  Description of Artificial Sequence: Synthetic oligonucleotide
gucccaugacugucaguaa

SEQ ID NO: 1140341 - RNA, 19 nt, Artificial Sequence
  Description of Artificial Sequence: Synthetic oligonucleotide
ccaugcauguuggauguga

SEQ ID NO: 1140342 - RNA, 19 nt, Artificial Sequence
  Description of Artificial Sequence: Synthetic oligonucleotide
gguaaaucauuuagaugau

SEQ ID NO: 1140343 - RNA, 19 nt, Artificial Sequence
  Description of Artificial Sequence: Synthetic oligonucleotide
ggaauagcucugagaguga

SEQ ID NO: 1140344 - RNA, 19 nt, Artificial Sequence
  Description of Artificial Sequence: Synthetic oligonucleotide
cacgaguugguggacaauu

SEQ ID NO: 1140345 - RNA, 19 nt, Artificial Sequence
  Description of Artificial Sequence: Synthetic oligonucleotide
ccaaacauucacacuuagu

SEQ ID NO: 1140346 - RNA, 19 nt, Artificial Sequence
  Description of Artificial Sequence: Synthetic oligonucleotide
gacuuggaucaaaguacau

SEQ ID NO: 1140347 - RNA, 19 nt, Artificial Sequence
  Description of Artificial Sequence: Synthetic oligonucleotide
ccucaugggauuggauuuc

SEQ ID NO: 1140348 - RNA, 19 nt, Artificial Sequence
  Description of Artificial Sequence: Synthetic oligonucleotide
ggacaauacucccucucuu

SEQ ID NO: 1140349 - RNA, 19 nt, Artificial Sequence
  Description of Artificial Sequence: Synthetic oligonucleotide
cccaguguaugcauccucu

SEQ ID NO: 1140350 - RNA, 19 nt, Artificial Sequence
  Description of Artificial Sequence: Synthetic oligonucleotide
cucaugggauuggauuucu

SEQ ID NO: 1140351 - RNA, 19 nt, Artificial Sequence
  Description of Artificial Sequence: Synthetic oligonucleotide
ccaagauauggcuuauguu

SEQ ID NO: 1140352 - RNA, 19 nt, Artificial Sequence
  Description of Artificial Sequence: Synthetic oligonucleotide
ggcuuauguugugagcagu

SEQ ID NO: 1140353 - RNA, 19 nt, Artificial Sequence
  Description of Artificial Sequence: Synthetic oligonucleotide
ggaccacauuguguaauua

SEQ ID NO: 1140354 - RNA, 19 nt, Artificial Sequence
  Description of Artificial Sequence: Synthetic oligonucleotide
gucgaagauggaccacauu

SEQ ID NO: 1140355 - RNA, 19 nt, Artificial Sequence
  Description of Artificial Sequence: Synthetic oligonucleotide
gacccaagauauggcuuau

SEQ ID NO: 1140356 - RNA, 19 nt, Artificial Sequence
  Description of Artificial Sequence: Synthetic oligonucleotide
cagaaacauugggacuugu

SEQ ID NO: 1140357 - RNA, 19 nt, Artificial Sequence
  Description of Artificial Sequence: Synthetic oligonucleotide
caggugcauuuacaacagu

SEQ ID NO: 1140358 - RNA, 19 nt, Artificial Sequence
  Description of Artificial Sequence: Synthetic oligonucleotide
gcugacguccaagaaucau

SEQ ID NO: 1140359 - RNA, 19 nt, Artificial Sequence
  Description of Artificial Sequence: Synthetic oligonucleotide
ugccacccucgggaauaaa

SEQ ID NO: 1140360 - RNA, 19 nt, Artificial Sequence
  Description of Artificial Sequence: Synthetic oligonucleotide
ggcggauuuuggaaccagu

SEQ ID NO: 1140361 - RNA, 19 nt, Artificial Sequence
  Description of Artificial Sequence: Synthetic oligonucleotide
ggacuuguguuucgaccuu

SEQ ID NO: 1140362 - RNA, 19 nt, Artificial Sequence
  Description of Artificial Sequence: Synthetic oligonucleotide
ggguaaccuguggaaugaa

SEQ ID NO: 1140363 - RNA, 19 nt, Artificial Sequence
  Description of Artificial Sequence: Synthetic oligonucleotide
cggacaauacucccucucu

SEQ ID NO: 1140364 - RNA, 19 nt, Artificial Sequence
  Description of Artificial Sequence: Synthetic oligonucleotide
gcacuaggcuggguaaccu

SEQ ID NO: 1140365 - RNA, 19 nt, Artificial Sequence
  Description of Artificial Sequence: Synthetic oligonucleotide
ccuuucagguuggcggauu

SEQ ID NO: 1140366 - RNA, 19 nt, Artificial Sequence
  Description of Artificial Sequence: Synthetic oligonucleotide
aacuaaauuccacugaaac

SEQ ID NO: 1140367 - RNA, 19 nt, Artificial Sequence
  Description of Artificial Sequence: Synthetic oligonucleotide
acugagagaaaucuuauac

SEQ ID NO: 1140368 - RNA, 19 nt, Artificial Sequence
  Description of Artificial Sequence: Synthetic oligonucleotide
gaauauggguuucacaugg

SEQ ID NO: 1140369 - RNA, 19 nt, Artificial Sequence
  Description of Artificial Sequence: Synthetic oligonucleotide
aguuaacagauccaauucc

SEQ ID NO: 1140370 - RNA, 19 nt, Artificial Sequence
  Description of Artificial Sequence: Synthetic oligonucleotide
ucgaucaacagccagaacu

SEQ ID NO: 1140371 - RNA, 19 nt, Artificial Sequence
  Description of Artificial Sequence: Synthetic oligonucleotide
aaaacuaaauuccacugaa

SEQ ID NO: 1140372 - RNA, 19 nt, Artificial Sequence
  Description of Artificial Sequence: Synthetic oligonucleotide
auaguggggaaccauggcc

SEQ ID NO: 1140373 - RNA, 19 nt, Artificial Sequence
  Description of Artificial Sequence: Synthetic oligonucleotide
uuauacugaagccaguuaa

SEQ ID NO: 1140374 - RNA, 19 nt, Artificial Sequence
  Description of Artificial Sequence: Synthetic oligonucleotide
ugugauuugguugucagca

SEQ ID NO: 1140375 - RNA, 19 nt, Artificial Sequence
  Description of Artificial Sequence: Synthetic oligonucleotide
aaacaacccagacccagac

SEQ ID NO: 1140376 - RNA, 19 nt, Artificial Sequence
  Description of Artificial Sequence: Synthetic oligonucleotide
aaucuuauacugaagccag

SEQ ID NO: 1140377 - RNA, 19 nt, Artificial Sequence
  Description of Artificial Sequence: Synthetic oligonucleotide
cagucuauugcucugggcg

SEQ ID NO: 1140378 - RNA, 19 nt, Artificial Sequence
  Description of Artificial Sequence: Synthetic oligonucleotide
auauggguuucacaugggc

SEQ ID NO: 1140379 - RNA, 19 nt, Artificial Sequence
  Description of Artificial Sequence: Synthetic oligonucleotide
cacaaauggccucugaucc

SEQ ID NO: 1140380 - RNA, 19 nt, Artificial Sequence
  Description of Artificial Sequence: Synthetic oligonucleotide
uuugaggguuccaucaucc

SEQ ID NO: 1140381 - RNA, 19 nt, Artificial Sequence
  Description of Artificial Sequence: Synthetic oligonucleotide
acuaaauuccacugaaaca

SEQ ID NO: 1140382 - RNA, 19 nt, Artificial Sequence
  Description of Artificial Sequence: Synthetic oligonucleotide
uuuacugcagcagaagccc

SEQ ID NO: 1140383 - RNA, 19 nt, Artificial Sequence
  Description of Artificial Sequence: Synthetic oligonucleotide
agagucaaggccugaggcc

SEQ ID NO: 1140384 - RNA, 19 nt, Artificial Sequence
  Description of Artificial Sequence: Synthetic oligonucleotide
cuugaacugucguaggucc

SEQ ID NO: 1140385 - RNA, 19 nt, Artificial Sequence
  Description of Artificial Sequence: Synthetic oligonucleotide
ugucaaagcugagacaagg

SEQ ID NO: 1140386 - RNA, 19 nt, Artificial Sequence
  Description of Artificial Sequence: Synthetic oligonucleotide
ucugagggcguccagaggu

SEQ ID NO: 1140387 - RNA, 19 nt, Artificial Sequence
  Description of Artificial Sequence: Synthetic oligonucleotide
ugauuugguugucagcacc

SEQ ID NO: 1140388 - RNA, 19 nt, Artificial Sequence
  Description of Artificial Sequence: Synthetic oligonucleotide
cuaaauuccacugaaacaa

SEQ ID NO: 1140389 - RNA, 19 nt, Artificial Sequence
  Description of Artificial Sequence: Synthetic oligonucleotide
ugugugauuugguugucag

SEQ ID NO: 1140390 - RNA, 19 nt, Artificial Sequence
  Description of Artificial Sequence: Synthetic oligonucleotide
uuccacugaaacaacccag

SEQ ID NO: 1140391 - RNA, 19 nt, Artificial Sequence
  Description of Artificial Sequence: Synthetic oligonucleotide
gagaauauggguuucacau

SEQ ID NO: 1140392 - RNA, 19 nt, Artificial Sequence
  Description of Artificial Sequence: Synthetic oligonucleotide
aguuccguccgguugucgc

SEQ ID NO: 1140393 - RNA, 19 nt, Artificial Sequence
  Description of Artificial Sequence: Synthetic oligonucleotide
acccgaacucgguugaugc

SEQ ID NO: 1140394 - RNA, 19 nt, Artificial Sequence
  Description of Artificial Sequence: Synthetic oligonucleotide
agauccaauucccacgaag

SEQ ID NO: 1140395 - RNA, 19 nt, Artificial Sequence
  Description of Artificial Sequence: Synthetic oligonucleotide
uauacugaagccaguuaac

SEQ ID NO: 1140396 - RNA, 19 nt, Artificial Sequence
  Description of Artificial Sequence: Synthetic oligonucleotide
agaggucuaagggucaagc

SEQ ID NO: 1140397 - RNA, 19 nt, Artificial Sequence
  Description of Artificial Sequence: Synthetic oligonucleotide
ucgguugaugccaccauag

SEQ ID NO: 1140398 - RNA, 19 nt, Artificial Sequence
  Description of Artificial Sequence: Synthetic oligonucleotide
uggaucgcaggacucagcc

SEQ ID NO: 1140399 - RNA, 19 nt, Artificial Sequence
  Description of Artificial Sequence: Synthetic oligonucleotide
guuaacagauccaauuccc

SEQ ID NO: 1140400 - RNA, 19 nt, Artificial Sequence
  Description of Artificial Sequence: Synthetic oligonucleotide
ucaguuggcgaccacugca

SEQ ID NO: 1140401 - RNA, 19 nt, Artificial Sequence
  Description of Artificial Sequence: Synthetic oligonucleotide
ucucugaccauacuccaac

SEQ ID NO: 1140402 - RNA, 19 nt, Artificial Sequence
  Description of Artificial Sequence: Synthetic oligonucleotide
agcaaaggagaauaugggu

SEQ ID NO: 1140403 - RNA, 19 nt, Artificial Sequence
  Description of Artificial Sequence: Synthetic oligonucleotide
ugagagggaguuccguccg

SEQ ID NO: 1140404 - RNA, 19 nt, Artificial Sequence
  Description of Artificial Sequence: Synthetic oligonucleotide
agugccggccaccuuagac

SEQ ID NO: 1140405 - RNA, 19 nt, Artificial Sequence
  Description of Artificial Sequence: Synthetic oligonucleotide
ucgacagaggucacagggg

SEQ ID NO: 1140406 - RNA, 19 nt, Artificial Sequence
  Description of Artificial Sequence: Synthetic oligonucleotide
ucgaugguacagcacguag

SEQ ID NO: 1140407 - RNA, 19 nt, Artificial Sequence
  Description of Artificial Sequence: Synthetic oligonucleotide
acaugugcgccuccggccc

SEQ ID NO: 1140408 - RNA, 19 nt, Artificial Sequence
  Description of Artificial Sequence: Synthetic oligonucleotide
aggucuaagggucaagcca

SEQ ID NO: 1140409 - RNA, 19 nt, Artificial Sequence
  Description of Artificial Sequence: Synthetic oligonucleotide
ugaucucggacuaugucaa

SEQ ID NO: 1140410 - RNA, 19 nt, Artificial Sequence
  Description of Artificial Sequence: Synthetic oligonucleotide
agaauauggguuucacaug

SEQ ID NO: 1140411 - RNA, 19 nt, Artificial Sequence
  Description of Artificial Sequence: Synthetic oligonucleotide
ucggacuaugucaaagcug

SEQ ID NO: 1140412 - RNA, 19 nt, Artificial Sequence
  Description of Artificial Sequence: Synthetic oligonucleotide
acaacccagacccagacuu

SEQ ID NO: 1140413 - RNA, 19 nt, Artificial Sequence
  Description of Artificial Sequence: Synthetic oligonucleotide
ucucggacuaugucaaagc

SEQ ID NO: 1140414 - RNA, 19 nt, Artificial Sequence
  Description of Artificial Sequence: Synthetic oligonucleotide
gaugguucggaagacggug

SEQ ID NO: 1140415 - RNA, 19 nt, Artificial Sequence
  Description of Artificial Sequence: Synthetic oligonucleotide
uaaauuccacugaaacaac

SEQ ID NO: 1140416 - RNA, 19 nt, Artificial Sequence
  Description of Artificial Sequence: Synthetic oligonucleotide
aagacggugaagccugaca

SEQ ID NO: 1140417 - RNA, 19 nt, Artificial Sequence
  Description of Artificial Sequence: Synthetic oligonucleotide
ggugaagccugacagggcg

SEQ ID NO: 1140418 - RNA, 19 nt, Artificial Sequence
  Description of Artificial Sequence: Synthetic oligonucleotide
augaagauugugcauccga

SEQ ID NO: 1140419 - RNA, 19 nt, Artificial Sequence
  Description of Artificial Sequence: Synthetic oligonucleotide
uugugcauccgaagcauca

SEQ ID NO: 1140420 - RNA, 19 nt, Artificial Sequence
  Description of Artificial Sequence: Synthetic oligonucleotide
guucggaagacggugaagc

SEQ ID NO: 1140421 - RNA, 19 nt, Artificial Sequence
  Description of Artificial Sequence: Synthetic oligonucleotide
gacgcugaugguucggaag

SEQ ID NO: 1140422 - RNA, 19 nt, Artificial Sequence
  Description of Artificial Sequence: Synthetic oligonucleotide
acagauccaauucccacga

SEQ ID NO: 1140423 - RNA, 19 nt, Artificial Sequence
  Description of Artificial Sequence: Synthetic oligonucleotide
auccaauucccacgaagag

SEQ ID NO: 1140424 - RNA, 19 nt, Artificial Sequence
  Description of Artificial Sequence: Synthetic oligonucleotide
gugaucucggacuauguca

SEQ ID NO: 1140425 - RNA, 19 nt, Artificial Sequence
  Description of Artificial Sequence: Synthetic oligonucleotide
ucacaugugcgccuccggc

SEQ ID NO: 1140426 - RNA, 19 nt, Artificial Sequence
  Description of Artificial Sequence: Synthetic oligonucleotide
agguagaccugcgaugggc

SEQ ID NO: 1140427 - RNA, 19 nt, Artificial Sequence
  Description of Artificial Sequence: Synthetic oligonucleotide
gccaguuugcgcucgaugg

SEQ ID NO: 1140428 - RNA, 19 nt, Artificial Sequence
  Description of Artificial Sequence: Synthetic oligonucleotide
aauauggguuucacauggg

SEQ ID NO: 1140429 - RNA, 19 nt, Artificial Sequence
  Description of Artificial Sequence: Synthetic oligonucleotide
ugccacucgacagagguca

SEQ ID NO: 1140430 - RNA, 19 nt, Artificial Sequence
  Description of Artificial Sequence: Synthetic oligonucleotide
cugaccauacuccaaccac

SEQ ID NO: 1140431 - RNA, 19 nt, Artificial Sequence
  Description of Artificial Sequence: Synthetic oligonucleotide
gacaaggggcgccaguuug

SEQ ID NO: 1140432 - RNA, 19 nt, Artificial Sequence
  Description of Artificial Sequence: Synthetic oligonucleotide
gaggucuaagggucaagcc

SEQ ID NO: 1140433 - RNA, 19 nt, Artificial Sequence
  Description of Artificial Sequence: Synthetic oligonucleotide
gacggugaagccugacagg

SEQ ID NO: 1140434 - RNA, 19 nt, Artificial Sequence
  Description of Artificial Sequence: Synthetic oligonucleotide
uugccgggcagguagaccu

SEQ ID NO: 1140435 - RNA, 19 nt, Artificial Sequence
  Description of Artificial Sequence: Synthetic oligonucleotide
aggagccaccgucugaggg

SEQ ID NO: 1140436 - RNA, 19 nt, Artificial Sequence
  Description of Artificial Sequence: Synthetic oligonucleotide
ucaacugccaggucccacu

SEQ ID NO: 1140437 - RNA, 19 nt, Artificial Sequence
  Description of Artificial Sequence: Synthetic oligonucleotide
aaccccagggcacugcgga

SEQ ID NO: 1140438 - RNA, 19 nt, Artificial Sequence
  Description of Artificial Sequence: Synthetic oligonucleotide
ggcaaaacccuuaaaauuc

SEQ ID NO: 1140439 - RNA, 19 nt, Artificial Sequence
  Description of Artificial Sequence: Synthetic oligonucleotide
uucggauccuggaucgcag

SEQ ID NO: 1140440 - RNA, 19 nt, Artificial Sequence
  Description of Artificial Sequence: Synthetic oligonucleotide
guaggucccagacuuugag

SEQ ID NO: 1140441 - RNA, 19 nt, Artificial Sequence
  Description of Artificial Sequence: Synthetic oligonucleotide
gguugaugccaccauagug

SEQ ID NO: 1140442 - RNA, 19 nt, Artificial Sequence
  Description of Artificial Sequence: Synthetic oligonucleotide
ggcggugcugaucagaacc

SEQ ID NO: 1140443 - RNA, 19 nt, Artificial Sequence
  Description of Artificial Sequence: Synthetic oligonucleotide
aguggcggccccuugccgg

SEQ ID NO: 1140444 - RNA, 19 nt, Artificial Sequence
  Description of Artificial Sequence: Synthetic oligonucleotide
cuuagacgcugaugguucg

SEQ ID NO: 1140445 - RNA, 19 nt, Artificial Sequence
  Description of Artificial Sequence: Synthetic oligonucleotide
gucaaagcugagacaaggg

SEQ ID NO: 1140446 - RNA, 19 nt, Artificial Sequence
  Description of Artificial Sequence: Synthetic oligonucleotide
gcugaucagaaccccaggg

SEQ ID NO: 1140447 - RNA, 19 nt, Artificial Sequence
  Description of Artificial Sequence: Synthetic oligonucleotide
auacugaagccaguuaaca

SEQ ID NO: 1140448 - RNA, 19 nt, Artificial Sequence
  Description of Artificial Sequence: Synthetic oligonucleotide
uucggaagacggugaagcc

SEQ ID NO: 1140449 - RNA, 19 nt, Artificial Sequence
  Description of Artificial Sequence: Synthetic oligonucleotide
uucccaacguggaucccag

SEQ ID NO: 1140450 - RNA, 19 nt, Artificial Sequence
  Description of Artificial Sequence: Synthetic oligonucleotide
agccaggauacccgaacuc

SEQ ID NO: 1140451 - RNA, 19 nt, Artificial Sequence
  Description of Artificial Sequence: Synthetic oligonucleotide
uucccuucggcuccagcug

SEQ ID NO: 1140452 - RNA, 19 nt, Artificial Sequence
  Description of Artificial Sequence: Synthetic oligonucleotide
acgcugaugguucggaaga

SEQ ID NO: 1140453 - RNA, 19 nt, Artificial Sequence
  Description of Artificial Sequence: Synthetic oligonucleotide
gauacccgaacucgguuga

SEQ ID NO: 1140454 - RNA, 19 nt, Artificial Sequence
  Description of Artificial Sequence: Synthetic oligonucleotide
uuugcgcucgaugguacag

SEQ ID NO: 1140455 - RNA, 19 nt, Artificial Sequence
  Description of Artificial Sequence: Synthetic oligonucleotide
aaggggcgccaguuugcgc

SEQ ID NO: 1140456 - RNA, 19 nt, Artificial Sequence
  Description of Artificial Sequence: Synthetic oligonucleotide
aauucccacgaagagucaa

SEQ ID NO: 1140457 - RNA, 19 nt, Artificial Sequence
  Description of Artificial Sequence: Synthetic oligonucleotide
aucucggacuaugucaaag

SEQ ID NO: 1140458 - RNA, 19 nt, Artificial Sequence
  Description of Artificial Sequence: Synthetic oligonucleotide
gacuaugucaaagcugaga

SEQ ID NO: 1140459 - RNA, 19 nt, Artificial Sequence
  Description of Artificial Sequence: Synthetic oligonucleotide
gucgccagucaccaagcgg

SEQ ID NO: 1140460 - RNA, 19 nt, Artificial Sequence
  Description of Artificial Sequence: Synthetic oligonucleotide
cccacgaagagucaaggcc

SEQ ID NO: 1140461 - RNA, 19 nt, Artificial Sequence
  Description of Artificial Sequence: Synthetic oligonucleotide
cacgaacagcaacugcugg

SEQ ID NO: 1140462 - RNA, 19 nt, Artificial Sequence
  Description of Artificial Sequence: Synthetic oligonucleotide
accuuggugcacgaacagc

SEQ ID NO: 1140463 - RNA, 19 nt, Artificial Sequence
  Description of Artificial Sequence: Synthetic oligonucleotide
ugaacugucguagguccca

SEQ ID NO: 1140464 - RNA, 19 nt, Artificial Sequence
  Description of Artificial Sequence: Synthetic oligonucleotide
ggucuaagggucaagccag

SEQ ID NO: 1140465 - RNA, 19 nt, Artificial Sequence
  Description of Artificial Sequence: Synthetic oligonucleotide
aggggcgccaguuugcgcu

SEQ ID NO: 1140466 - RNA, 19 nt, Artificial Sequence
  Description of Artificial Sequence: Synthetic oligonucleotide
cagaucagucucaccuugg

SEQ ID NO: 1140467 - RNA, 19 nt, Artificial Sequence
  Description of Artificial Sequence: Synthetic oligonucleotide
agggaguuccguccgguug

SEQ ID NO: 1140468 - RNA, 19 nt, Artificial Sequence
  Description of Artificial Sequence: Synthetic oligonucleotide
agaucagucucaccuuggu

SEQ ID NO: 1140469 - RNA, 19 nt, Artificial Sequence
  Description of Artificial Sequence: Synthetic oligonucleotide
aaacuaaauuccacugaaa

SEQ ID NO: 1140470 - RNA, 19 nt, Artificial Sequence
  Description of Artificial Sequence: Synthetic oligonucleotide
uuagacgcugaugguucgg

SEQ ID NO: 1140471 - RNA, 19 nt, Artificial Sequence
  Description of Artificial Sequence: Synthetic oligonucleotide
cuguggugagcaugcaggc

SEQ ID NO: 1140472 - RNA, 19 nt, Artificial Sequence
  Description of Artificial Sequence: Synthetic oligonucleotide
ugacagucgccagucacca

SEQ ID NO: 1140473 - RNA, 19 nt, Artificial Sequence
  Description of Artificial Sequence: Synthetic oligonucleotide
uuucggauccuggaucgca

SEQ ID NO: 1140474 - RNA, 19 nt, Artificial Sequence
  Description of Artificial Sequence: Synthetic oligonucleotide
ucggaagacggugaagccu

SEQ ID NO: 1140475 - RNA, 19 nt, Artificial Sequence
  Description of Artificial Sequence: Synthetic oligonucleotide
accauacuccaaccacagg

SEQ ID NO: 1140476 - RNA, 19 nt, Artificial Sequence
  Description of Artificial Sequence: Synthetic oligonucleotide
gcagguagaccugcgaugg

SEQ ID NO: 1140477 - RNA, 19 nt, Artificial Sequence
  Description of Artificial Sequence: Synthetic oligonucleotide
augguacagcacguaggcc

SEQ ID NO: 1140478 - RNA, 19 nt, Artificial Sequence
  Description of Artificial Sequence: Synthetic oligonucleotide
caguuggcgaccacugcag

SEQ ID NO: 1140479 - RNA, 19 nt, Artificial Sequence
  Description of Artificial Sequence: Synthetic oligonucleotide
ugcgcucgaugguacagca

SEQ ID NO: 1140480 - RNA, 19 nt, Artificial Sequence
  Description of Artificial Sequence: Synthetic oligonucleotide
uucucugaccauacuccaa

SEQ ID NO: 1140481 - RNA, 19 nt, Artificial Sequence
  Description of Artificial Sequence: Synthetic oligonucleotide
gugugauuugguugucagc

SEQ ID NO: 1140482 - RNA, 19 nt, Artificial Sequence
  Description of Artificial Sequence: Synthetic oligonucleotide
gaggggaccacacacaguu

SEQ ID NO: 1140483 - RNA, 19 nt, Artificial Sequence
  Description of Artificial Sequence: Synthetic oligonucleotide
acaaggggcgccaguuugc

SEQ ID NO: 1140484 - RNA, 19 nt, Artificial Sequence
  Description of Artificial Sequence: Synthetic oligonucleotide
aguuugcgcucgaugguac

SEQ ID NO: 1140485 - RNA, 19 nt, Artificial Sequence
  Description of Artificial Sequence: Synthetic oligonucleotide
cugagagaaaucuuauacu

SEQ ID NO: 1140486 - RNA, 19 nt, Artificial Sequence
  Description of Artificial Sequence: Synthetic oligonucleotide
agucgccagucaccaagcg

SEQ ID NO: 1140487 - RNA, 19 nt, Artificial Sequence
  Description of Artificial Sequence: Synthetic oligonucleotide
ugucgcccaggugaucucg

SEQ ID NO: 1140488 - RNA, 19 nt, Artificial Sequence
  Description of Artificial Sequence: Synthetic oligonucleotide
uccgggucccguucaacug

SEQ ID NO: 1140489 - RNA, 19 nt, Artificial Sequence
  Description of Artificial Sequence: Synthetic oligonucleotide
guaguggucagcacaguga

SEQ ID NO: 1140490 - RNA, 19 nt, Artificial Sequence
  Description of Artificial Sequence: Synthetic oligonucleotide
ugagacaaggggcgccagu

SEQ ID NO: 1140491 - RNA, 19 nt, Artificial Sequence
  Description of Artificial Sequence: Synthetic oligonucleotide
accauaguggggaaccaug

SEQ ID NO: 1140492 - RNA, 19 nt, Artificial Sequence
  Description of Artificial Sequence: Synthetic oligonucleotide
ugagggcguccagaggugg

SEQ ID NO: 1140493 - RNA, 19 nt, Artificial Sequence
  Description of Artificial Sequence: Synthetic oligonucleotide
ugcgaugggcuuucggauc

SEQ ID NO: 1140494 - RNA, 19 nt, Artificial Sequence
  Description of Artificial Sequence: Synthetic oligonucleotide
uggggaaccauggccaggu

SEQ ID NO: 1140495 - RNA, 19 nt, Artificial Sequence
  Description of Artificial Sequence: Synthetic oligonucleotide
acucgaggggaccagucaa

SEQ ID NO: 1140496 - RNA, 19 nt, Artificial Sequence
  Description of Artificial Sequence: Synthetic oligonucleotide
gagucgaucaacagccaga

SEQ ID NO: 1140497 - RNA, 19 nt, Artificial Sequence
  Description of Artificial Sequence: Synthetic oligonucleotide
ucuaagggucaagccagga

SEQ ID NO: 1140498 - RNA, 19 nt, Artificial Sequence
  Description of Artificial Sequence: Synthetic oligonucleotide
agucgaucaacagccagaa

SEQ ID NO: 1140499 - RNA, 19 nt, Artificial Sequence
  Description of Artificial Sequence: Synthetic oligonucleotide
agucaacacugagagaaau

SEQ ID NO: 1140500 - RNA, 19 nt, Artificial Sequence
  Description of Artificial Sequence: Synthetic oligonucleotide
uuggcgaccacugcagauc

SEQ ID NO: 1140501 - RNA, 19 nt, Artificial Sequence
  Description of Artificial Sequence: Synthetic oligonucleotide
ccguucaacugccaggucc

SEQ ID NO: 1140502 - RNA, 19 nt, Artificial Sequence
  Description of Artificial Sequence: Synthetic oligonucleotide
gccaggauacccgaacucg

SEQ ID NO: 1140503 - RNA, 19 nt, Artificial Sequence
  Description of Artificial Sequence: Synthetic oligonucleotide
ugcucggaugucccagaug

SEQ ID NO: 1140504 - RNA, 19 nt, Artificial Sequence
  Description of Artificial Sequence: Synthetic oligonucleotide
cuucucugaccauacucca

SEQ ID NO: 1140505 - RNA, 19 nt, Artificial Sequence
  Description of Artificial Sequence: Synthetic oligonucleotide
cuucugacagucgccaguc

SEQ ID NO: 1140506 - RNA, 19 nt, Artificial Sequence
  Description of Artificial Sequence: Synthetic oligonucleotide
caccugaggcugcaaagac

SEQ ID NO: 1140507 - RNA, 19 nt, Artificial Sequence
  Description of Artificial Sequence: Synthetic oligonucleotide
agccaguuaacagauccaa

SEQ ID NO: 1140508 - RNA, 19 nt, Artificial Sequence
  Description of Artificial Sequence: Synthetic oligonucleotide
cacgaagagucaaggccug

SEQ ID NO: 1140509 - RNA, 19 nt, Artificial Sequence
  Description of Artificial Sequence: Synthetic oligonucleotide
ccaugaagauugugcaucc

SEQ ID NO: 1140510 - RNA, 19 nt, Artificial Sequence
  Description of Artificial Sequence: Synthetic oligonucleotide
guuccguccgguugucgcc

SEQ ID NO: 1140511 - RNA, 19 nt, Artificial Sequence
  Description of Artificial Sequence: Synthetic oligonucleotide
caaacaccuccaccuggcc

SEQ ID NO: 1140512 - RNA, 19 nt, Artificial Sequence
  Description of Artificial Sequence: Synthetic oligonucleotide
cacugagcaggaaggguuc

SEQ ID NO: 1140513 - RNA, 19 nt, Artificial Sequence
  Description of Artificial Sequence: Synthetic oligonucleotide
cuuauacugaagccaguua

SEQ ID NO: 1140514 - RNA, 19 nt, Artificial Sequence
  Description of Artificial Sequence: Synthetic oligonucleotide
aacugucguaggucccaga

SEQ ID NO: 1140515 - RNA, 19 nt, Artificial Sequence
  Description of Artificial Sequence: Synthetic oligonucleotide
ugaagccugacagggcggu

SEQ ID NO: 1140516 - RNA, 19 nt, Artificial Sequence
  Description of Artificial Sequence: Synthetic oligonucleotide
cagucgccagucaccaagc

SEQ ID NO: 1140517 - RNA, 19 nt, Artificial Sequence
  Description of Artificial Sequence: Synthetic oligonucleotide
uggagucgaucaacagcca

SEQ ID NO: 1140518 - RNA, 19 nt, Artificial Sequence
  Description of Artificial Sequence: Synthetic oligonucleotide
caagugccggccaccuuag

SEQ ID NO: 1140519 - RNA, 19 nt, Artificial Sequence
  Description of Artificial Sequence: Synthetic oligonucleotide
accugcgaugggcuuucgg

SEQ ID NO: 1140520 - RNA, 19 nt, Artificial Sequence
  Description of Artificial Sequence: Synthetic oligonucleotide
ccuuagacgcugaugguuc

SEQ ID NO: 1140521 - RNA, 19 nt, Artificial Sequence
  Description of Artificial Sequence: Synthetic oligonucleotide
ggcagguagaccugcgaug

SEQ ID NO: 1140522 - RNA, 19 nt, Artificial Sequence
  Description of Artificial Sequence: Synthetic oligonucleotide
ggugaucucggacuauguc

SEQ ID NO: 1140523 - RNA, 19 nt, Artificial Sequence
  Description of Artificial Sequence: Synthetic oligonucleotide
ccuuggugcacgaacagca

SEQ ID NO: 1140524 - RNA, 19 nt, Artificial Sequence
  Description of Artificial Sequence: Synthetic oligonucleotide
cggacuaugucaaagcuga

SEQ ID NO: 1140525 - RNA, 19 nt, Artificial Sequence
  Description of Artificial Sequence: Synthetic oligonucleotide
cauggguuccccaguuuca

SEQ ID NO: 1140526 - RNA, 19 nt, Artificial Sequence
  Description of Artificial Sequence: Synthetic oligonucleotide
ugcggaugccagugcagcu

SEQ ID NO: 1140527 - RNA, 19 nt, Artificial Sequence
  Description of Artificial Sequence: Synthetic oligonucleotide
caggugaucucggacuaug

SEQ ID NO: 1140528 - RNA, 19 nt, Artificial Sequence
  Description of Artificial Sequence: Synthetic oligonucleotide
cuagcuggccagaaagcaa

SEQ ID NO: 1140529 - RNA, 19 nt, Artificial Sequence
  Description of Artificial Sequence: Synthetic oligonucleotide
cuggaucgcaggacucagc

SEQ ID NO: 1140530 - RNA, 19 nt, Artificial Sequence
  Description of Artificial Sequence: Synthetic oligonucleotide
caaggggcgccaguuugcg

SEQ ID NO: 1140531 - RNA, 19 nt, Artificial Sequence
  Description of Artificial Sequence: Synthetic oligonucleotide
cgaugguacagcacguagg

SEQ ID NO: 1140532 - RNA, 19 nt, Artificial Sequence
  Description of Artificial Sequence: Synthetic oligonucleotide
cugcggaugccagugcagc

SEQ ID NO: 1140533 - RNA, 19 nt, Artificial Sequence
  Description of Artificial Sequence: Synthetic oligonucleotide
uugcgcucgaugguacagc

SEQ ID NO: 1140534 - RNA, 19 nt, Artificial Sequence
  Description of Artificial Sequence: Synthetic oligonucleotide
aggauacccgaacucgguu

SEQ ID NO: 1140535 - RNA, 19 nt, Artificial Sequence
  Description of Artificial Sequence: Synthetic oligonucleotide
gucugagggcguccagagg

SEQ ID NO: 1140536 - RNA, 19 nt, Artificial Sequence
  Description of Artificial Sequence: Synthetic oligonucleotide
caacccagacccagacuug

SEQ ID NO: 1140537 - RNA, 19 nt, Artificial Sequence
  Description of Artificial Sequence: Synthetic oligonucleotide
uccgguugucgcccaggug

SEQ ID NO: 1140538 - RNA, 19 nt, Artificial Sequence
  Description of Artificial Sequence: Synthetic oligonucleotide
gcugaugguucggaagacg

SEQ ID NO: 1140539 - RNA, 19 nt, Artificial Sequence
  Description of Artificial Sequence: Synthetic oligonucleotide
ggaccagucaagggcaaag

SEQ ID NO: 1140540 - RNA, 19 nt, Artificial Sequence
  Description of Artificial Sequence: Synthetic oligonucleotide
uucaacugccaggucccac

SEQ ID NO: 1140541 - RNA, 19 nt, Artificial Sequence
  Description of Artificial Sequence: Synthetic oligonucleotide
cuucggcuccagcugauga

SEQ ID NO: 1140542 - RNA, 19 nt, Artificial Sequence
  Description of Artificial Sequence: Synthetic oligonucleotide
caaccacaggcuccucccc

SEQ ID NO: 1140543 - RNA, 19 nt, Artificial Sequence
  Description of Artificial Sequence: Synthetic oligonucleotide
ggcuuucggauccuggauc

SEQ ID NO: 1140544 - RNA, 19 nt, Artificial Sequence
  Description of Artificial Sequence: Synthetic oligonucleotide
gugaagccugacagggcgg

SEQ ID NO: 1140545 - RNA, 19 nt, Artificial Sequence
  Description of Artificial Sequence: Synthetic oligonucleotide
cguucaacugccagguccc

SEQ ID NO: 1140546 - RNA, 19 nt, Artificial Sequence
  Description of Artificial Sequence: Synthetic oligonucleotide
gcgaugggcuuucggaucc

SEQ ID NO: 1140547 - RNA, 19 nt, Artificial Sequence
  Description of Artificial Sequence: Synthetic oligonucleotide
acucgguugaugccaccau

SEQ ID NO: 1140548 - RNA, 19 nt, Artificial Sequence
  Description of Artificial Sequence: Synthetic oligonucleotide
guucccaacguggauccca

SEQ ID NO: 1140549 - RNA, 19 nt, Artificial Sequence
  Description of Artificial Sequence: Synthetic oligonucleotide
gagcaugcaggccuugccu

SEQ ID NO: 1140550 - RNA, 19 nt, Artificial Sequence
  Description of Artificial Sequence: Synthetic oligonucleotide
uuccguccgguugucgccc

SEQ ID NO: 1140551 - RNA, 19 nt, Artificial Sequence
  Description of Artificial Sequence: Synthetic oligonucleotide
augucaaagcugagacaag

SEQ ID NO: 1140552 - RNA, 19 nt, Artificial Sequence
  Description of Artificial Sequence: Synthetic oligonucleotide
acugcggaugccagugcag

SEQ ID NO: 1140553 - RNA, 19 nt, Artificial Sequence
  Description of Artificial Sequence: Synthetic oligonucleotide
ccgguugucgcccagguga

SEQ ID NO: 1140554 - RNA, 19 nt, Artificial Sequence
  Description of Artificial Sequence: Synthetic oligonucleotide
cuugccgggcagguagacc

SEQ ID NO: 1140555 - RNA, 19 nt, Artificial Sequence
  Description of Artificial Sequence: Synthetic oligonucleotide
cagacccagacuuggccca

SEQ ID NO: 1140556 - RNA, 19 nt, Artificial Sequence
  Description of Artificial Sequence: Synthetic oligonucleotide
agaccuagcuggccagaaa

SEQ ID NO: 1140557 - RNA, 19 nt, Artificial Sequence
  Description of Artificial Sequence: Synthetic oligonucleotide
cagguagaccugcgauggg

SEQ ID NO: 1140558 - RNA, 19 nt, Artificial Sequence
  Description of Artificial Sequence: Synthetic oligonucleotide
cucggacuaugucaaagcu

SEQ ID NO: 1140559 - RNA, 19 nt, Artificial Sequence
  Description of Artificial Sequence: Synthetic oligonucleotide
cccuucucugaccauacuc

SEQ ID NO: 1140560 - RNA, 19 nt, Artificial Sequence
  Description of Artificial Sequence: Synthetic oligonucleotide
guugucgcccaggugaucu

SEQ ID NO: 1140561 - RNA, 19 nt, Artificial Sequence
  Description of Artificial Sequence: Synthetic oligonucleotide
cacugagagaaaucuuaua

SEQ ID NO: 1140562 - RNA, 19 nt, Artificial Sequence
  Description of Artificial Sequence: Synthetic oligonucleotide
ccugcgaugggcuuucgga

SEQ ID NO: 1140563 - RNA, 19 nt, Artificial Sequence
  Description of Artificial Sequence: Synthetic oligonucleotide
guuugcgcucgaugguaca

SEQ ID NO: 1140564 - RNA, 19 nt, Artificial Sequence
  Description of Artificial Sequence: Synthetic oligonucleotide
cagagguggauguucuucu

SEQ ID NO: 1140565 - RNA, 19 nt, Artificial Sequence
  Description of Artificial Sequence: Synthetic oligonucleotide
agaugcgaauggaggcauc

SEQ ID NO: 1140566 - RNA, 19 nt, Artificial Sequence
  Description of Artificial Sequence: Synthetic oligonucleotide
cuuucggauccuggaucgc

SEQ ID NO: 1140567 - RNA, 19 nt, Artificial Sequence
  Description of Artificial Sequence: Synthetic oligonucleotide
agagggaguuccguccggu

SEQ ID NO: 1140568 - RNA, 19 nt, Artificial Sequence
  Description of Artificial Sequence: Synthetic oligonucleotide
uagaccugcgaugggcuuu

SEQ ID NO: 1140569 - RNA, 19 nt, Artificial Sequence
  Description of Artificial Sequence: Synthetic oligonucleotide
gaguuccguccgguugucg

SEQ ID NO: 1140570 - RNA, 19 nt, Artificial Sequence
  Description of Artificial Sequence: Synthetic oligonucleotide
cccagacccagacuuggcc

SEQ ID NO: 1140571 - RNA, 19 nt, Artificial Sequence
  Description of Artificial Sequence: Synthetic oligonucleotide
cauccgaagcaucaucagu

SEQ ID NO: 1140572 - RNA, 19 nt, Artificial Sequence
  Description of Artificial Sequence: Synthetic oligonucleotide
uggcccuucucugaccaua

SEQ ID NO: 1140573 - RNA, 19 nt, Artificial Sequence
  Description of Artificial Sequence: Synthetic oligonucleotide
guggggaaccauggccagg

SEQ ID NO: 1140574 - RNA, 19 nt, Artificial Sequence
  Description of Artificial Sequence: Synthetic oligonucleotide
cacugcggaugccagugca

SEQ ID NO: 1140575 - RNA, 19 nt, Artificial Sequence
  Description of Artificial Sequence: Synthetic oligonucleotide
ccagccaggauacccgaac

SEQ ID NO: 1140576 - RNA, 19 nt, Artificial Sequence
  Description of Artificial Sequence: Synthetic oligonucleotide
gcggccuggucccaugaag

SEQ ID NO: 1140577 - RNA, 19 nt, Artificial Sequence
  Description of Artificial Sequence: Synthetic oligonucleotide
auccacaugccaggagcca

SEQ ID NO: 1140578 - RNA, 19 nt, Artificial Sequence
  Description of Artificial Sequence: Synthetic oligonucleotide
cacucgaggggaccaguca

SEQ ID NO: 1140579 - RNA, 19 nt, Artificial Sequence
  Description of Artificial Sequence: Synthetic oligonucleotide
gucgcccaggugaucucgg

SEQ ID NO: 1140580 - RNA, 19 nt, Artificial Sequence
  Description of Artificial Sequence: Synthetic oligonucleotide
gguucggaagacggugaag

SEQ ID NO: 1140581 - RNA, 19 nt, Artificial Sequence
  Description of Artificial Sequence: Synthetic oligonucleotide
cugcucaucucggaggaaa

SEQ ID NO: 1140582 - RNA, 19 nt, Artificial Sequence
  Description of Artificial Sequence: Synthetic oligonucleotide
gaucucggacuaugucaaa

SEQ ID NO: 1140583 - RNA, 19 nt, Artificial Sequence
  Description of Artificial Sequence: Synthetic oligonucleotide
cagaggucuaagggucaag

SEQ ID NO: 1140584 - RNA, 19 nt, Artificial Sequence
  Description of Artificial Sequence: Synthetic oligonucleotide
gaccguguguggcccacaa

SEQ ID NO: 1140585 - RNA, 19 nt, Artificial Sequence
  Description of Artificial Sequence: Synthetic oligonucleotide
aacguggaucccagccaga

SEQ ID NO: 1140586 - RNA, 19 nt, Artificial Sequence
  Description of Artificial Sequence: Synthetic oligonucleotide
aagugccggccaccuuaga

SEQ ID NO: 1140587 - RNA, 19 nt, Artificial Sequence
  Description of Artificial Sequence: Synthetic oligonucleotide
ccccuugccgggcagguag

SEQ ID NO: 1140588 - RNA, 19 nt, Artificial Sequence
  Description of Artificial Sequence: Synthetic oligonucleotide
accgucugagggcguccag

SEQ ID NO: 1140589 - RNA, 19 nt, Artificial Sequence
  Description of Artificial Sequence: Synthetic oligonucleotide
gucagaggucuaaggguca

SEQ ID NO: 1140590 - RNA, 19 nt, Artificial Sequence
  Description of Artificial Sequence: Synthetic oligonucleotide
acagaccguguguggccca

SEQ ID NO: 1140591 - RNA, 19 nt, Artificial Sequence
  Description of Artificial Sequence: Synthetic oligonucleotide
agacccagacuuggcccag

SEQ ID NO: 1140592 - RNA, 19 nt, Artificial Sequence
  Description of Artificial Sequence: Synthetic oligonucleotide
cucgguugaugccaccaua

SEQ ID NO: 1140593 - RNA, 19 nt, Artificial Sequence
  Description of Artificial Sequence: Synthetic oligonucleotide
ugacagggcggugcugauc

SEQ ID NO: 1140594 - RNA, 19 nt, Artificial Sequence
  Description of Artificial Sequence: Synthetic oligonucleotide
guuggcgaccacugcagau

SEQ ID NO: 1140595 - RNA, 19 nt, Artificial Sequence
  Description of Artificial Sequence: Synthetic oligonucleotide
cuucucccaguggcggccc

SEQ ID NO: 1140596 - RNA, 19 nt, Artificial Sequence
  Description of Artificial Sequence: Synthetic oligonucleotide
accaagcggccaggcacuc

SEQ ID NO: 1140597 - RNA, 19 nt, Artificial Sequence
  Description of Artificial Sequence: Synthetic oligonucleotide
ccgggucccguucaacugc

SEQ ID NO: 1140598 - RNA, 19 nt, Artificial Sequence
  Description of Artificial Sequence: Synthetic oligonucleotide
gagacaaggggcgccaguu

SEQ ID NO: 1140599 - RNA, 19 nt, Artificial Sequence
  Description of Artificial Sequence: Synthetic oligonucleotide
ggcugcucggaugucccag

SEQ ID NO: 1140600 - RNA, 19 nt, Artificial Sequence
  Description of Artificial Sequence: Synthetic oligonucleotide
cuuggcccagcauggcaaa

SEQ ID NO: 1140601 - RNA, 19 nt, Artificial Sequence
  Description of Artificial Sequence: Synthetic oligonucleotide
cgucugagggcguccagag

SEQ ID NO: 1140602 - RNA, 19 nt, Artificial Sequence
  Description of Artificial Sequence: Synthetic oligonucleotide
cccgaacucgguugaugcc

SEQ ID NO: 1140603 - RNA, 19 nt, Artificial Sequence
  Description of Artificial Sequence: Synthetic oligonucleotide
gcggugcugaucagaaccc

SEQ ID NO: 1140604 - RNA, 19 nt, Artificial Sequence
  Description of Artificial Sequence: Synthetic oligonucleotide
acgaagagucaaggccuga

SEQ ID NO: 1140605 - RNA, 19 nt, Artificial Sequence
  Description of Artificial Sequence: Synthetic oligonucleotide
gggucaucuaccaccugca

SEQ ID NO: 1140606 - RNA, 19 nt, Artificial Sequence
  Description of Artificial Sequence: Synthetic oligonucleotide
cagccagaccuagcuggcc

SEQ ID NO: 1140607 - RNA, 19 nt, Artificial Sequence
  Description of Artificial Sequence: Synthetic oligonucleotide
caggauacccgaacucggu

SEQ ID NO: 1140608 - RNA, 19 nt, Artificial Sequence
  Description of Artificial Sequence: Synthetic oligonucleotide
ccuagcuggccagaaagca

SEQ ID NO: 1140609 - RNA, 19 nt, Artificial Sequence
  Description of Artificial Sequence: Synthetic oligonucleotide
cuccgggucccguucaacu

SEQ ID NO: 1140610 - RNA, 19 nt, Artificial Sequence
  Description of Artificial Sequence: Synthetic oligonucleotide
gggaguuccguccgguugu

SEQ ID NO: 1140611 - RNA, 19 nt, Artificial Sequence
  Description of Artificial Sequence: Synthetic oligonucleotide
caguuugcgcucgauggua

SEQ ID NO: 1140612 - RNA, 19 nt, Artificial Sequence
  Description of Artificial Sequence: Synthetic oligonucleotide
augccaccauaguggggaa

SEQ ID NO: 1140613 - RNA, 19 nt, Artificial Sequence
  Description of Artificial Sequence: Synthetic oligonucleotide
cgaagagucaaggccugag

SEQ ID NO: 1140614 - RNA, 19 nt, Artificial Sequence
  Description of Artificial Sequence: Synthetic oligonucleotide
cugcgaugggcuuucggau

SEQ ID NO: 1140615 - RNA, 19 nt, Artificial Sequence
  Description of Artificial Sequence: Synthetic oligonucleotide
ccaagugccggccaccuua

SEQ ID NO: 1140616 - RNA, 19 nt, Artificial Sequence
  Description of Artificial Sequence: Synthetic oligonucleotide
cugccuccgggucccguuc

SEQ ID NO: 1140617 - RNA, 19 nt, Artificial Sequence
  Description of Artificial Sequence: Synthetic oligonucleotide
gacagucgccagucaccaa

SEQ ID NO: 1140618 - RNA, 19 nt, Artificial Sequence
  Description of Artificial Sequence: Synthetic oligonucleotide
gcgaccacugcagauccuc

SEQ ID NO: 1140619 - RNA, 19 nt, Artificial Sequence
  Description of Artificial Sequence: Synthetic oligonucleotide
cagaccguguguggcccac

SEQ ID NO: 1140620 - RNA, 19 nt, Artificial Sequence
  Description of Artificial Sequence: Synthetic oligonucleotide
gucuauugcucugggcgcu

SEQ ID NO: 1140621 - RNA, 19 nt, Artificial Sequence
  Description of Artificial Sequence: Synthetic oligonucleotide
gcgcucucagccuggguuc

SEQ ID NO: 1140622 - RNA, 19 nt, Artificial Sequence
  Description of Artificial Sequence: Synthetic oligonucleotide
cggaugccagugcagcucc

SEQ ID NO: 1140623 - RNA, 19 nt, Artificial Sequence
  Description of Artificial Sequence: Synthetic oligonucleotide
ccgaacucgguugaugcca

SEQ ID NO: 1140624 - RNA, 19 nt, Artificial Sequence
  Description of Artificial Sequence: Synthetic oligonucleotide
ccagaugcgaauggaggca

SEQ ID NO: 1140625 - RNA, 19 nt, Artificial Sequence
  Description of Artificial Sequence: Synthetic oligonucleotide
ccccaucaugggcaguggc

SEQ ID NO: 1140626 - RNA, 19 nt, Artificial Sequence
  Description of Artificial Sequence: Synthetic oligonucleotide
caccaagcggccaggcacu

SEQ ID NO: 1140627 - RNA, 19 nt, Artificial Sequence
  Description of Artificial Sequence: Synthetic oligonucleotide
cucgaugguacagcacgua

SEQ ID NO: 1140628 - RNA, 19 nt, Artificial Sequence
  Description of Artificial Sequence: Synthetic oligonucleotide
gguagaccugcgaugggcu

SEQ ID NO: 1140629 - RNA, 19 nt, Artificial Sequence
  Description of Artificial Sequence: Synthetic oligonucleotide
auacccgaacucgguugau

SEQ ID NO: 1140630 - RNA, 19 nt, Artificial Sequence
  Description of Artificial Sequence: Synthetic oligonucleotide
gaccugcgaugggcuuucg

SEQ ID NO: 1140631 - RNA, 19 nt, Artificial Sequence
  Description of Artificial Sequence: Synthetic oligonucleotide
gcggaugccagugcagcuc

SEQ ID NO: 1140632 - RNA, 19 nt, Artificial Sequence
  Description of Artificial Sequence: Synthetic oligonucleotide
ggcguccagagguggaugu

SEQ ID NO: 1140633 - RNA, 19 nt, Artificial Sequence
  Description of Artificial Sequence: Synthetic oligonucleotide
gcacugcggaugccagugc

SEQ ID NO: 1140634 - RNA, 19 nt, Artificial Sequence
  Description of Artificial Sequence: Synthetic oligonucleotide
gcgccuccggcccuugcgc

SEQ ID NO: 1140635 - RNA, 19 nt, Artificial Sequence
  Description of Artificial Sequence: Synthetic oligonucleotide
ugugcgccuccggcccuug

SEQ ID NO: 1140636 - RNA, 19 nt, Artificial Sequence
  Description of Artificial Sequence: Synthetic oligonucleotide
guccgguugucgcccaggu

SEQ ID NO: 1140637 - RNA, 19 nt, Artificial Sequence
  Description of Artificial Sequence: Synthetic oligonucleotide
gcccucacccauguggcca

SEQ ID NO: 1140638 - RNA, 19 nt, Artificial Sequence
  Description of Artificial Sequence: Synthetic oligonucleotide
guagaccugcgaugggcuu

SEQ ID NO: 1140639 - RNA, 19 nt, Artificial Sequence
  Description of Artificial Sequence: Synthetic oligonucleotide
gggcagguagaccugcgau

SEQ ID NO: 1140640 - RNA, 19 nt, Artificial Sequence
  Description of Artificial Sequence: Synthetic oligonucleotide
cagauccaauucccacgaa

SEQ ID NO: 1140641 - RNA, 19 nt, Artificial Sequence
  Description of Artificial Sequence: Synthetic oligonucleotide
agaccguguguggcccaca

SEQ ID NO: 1140642 - RNA, 19 nt, Artificial Sequence
  Description of Artificial Sequence: Synthetic oligonucleotide
gagggaguuccguccgguu

SEQ ID NO: 1140643 - RNA, 19 nt, Artificial Sequence
  Description of Artificial Sequence: Synthetic oligonucleotide
gggaccugggucagagguc

SEQ ID NO: 1140644 - RNA, 19 nt, Artificial Sequence
  Description of Artificial Sequence: Synthetic oligonucleotide
agcccgggaucugcuucug

SEQ ID NO: 1140645 - RNA, 19 nt, Artificial Sequence
  Description of Artificial Sequence: Synthetic oligonucleotide
ggaucgcaggacucagccu

SEQ ID NO: 1140646 - RNA, 19 nt, Artificial Sequence
  Description of Artificial Sequence: Synthetic oligonucleotide
cagcccgggaucugcuucu

SEQ ID NO: 1140647 - RNA, 19 nt, Artificial Sequence
  Description of Artificial Sequence: Synthetic oligonucleotide
caccgucugagggcgucca

SEQ ID NO: 1140648 - RNA, 19 nt, Artificial Sequence
  Description of Artificial Sequence: Synthetic oligonucleotide
gcacucgaggggaccaguc

SEQ ID NO: 1140649 - RNA, 19 nt, Artificial Sequence
  Description of Artificial Sequence: Synthetic oligonucleotide
ccaagcggccaggcacucg

SEQ ID NO: 1140650 - RNA, 19 nt, Artificial Sequence
  Description of Artificial Sequence: Synthetic oligonucleotide
cugcgguuuccgcuccucu

SEQ ID NO: 1140651 - RNA, 19 nt, Artificial Sequence
  Description of Artificial Sequence: Synthetic oligonucleotide
gggcuuucggauccuggau

SEQ ID NO: 1140652 - RNA, 19 nt, Artificial Sequence
  Description of Artificial Sequence: Synthetic oligonucleotide
cugccaggucccacugugu

SEQ ID NO: 1140653 - RNA, 19 nt, Artificial Sequence
  Description of Artificial Sequence: Synthetic oligonucleotide
cgccagucaccaagcggcc

SEQ ID NO: 1140654 - RNA, 19 nt, Artificial Sequence
  Description of Artificial Sequence: Synthetic oligonucleotide
gggcgccaguuugcgcucg

SEQ ID NO: 1140655 - RNA, 19 nt, Artificial Sequence
  Description of Artificial Sequence: Synthetic oligonucleotide
ggggcgccaguuugcgcuc

SEQ ID NO: 1140656 - RNA, 19 nt, Artificial Sequence
  Description of Artificial Sequence: Synthetic oligonucleotide
caccauaguggggaaccau

SEQ ID NO: 1140657 - RNA, 19 nt, Artificial Sequence
  Description of Artificial Sequence: Synthetic oligonucleotide
ccaguuugcgcucgauggu

SEQ ID NO: 1140658 - RNA, 19 nt, Artificial Sequence
  Description of Artificial Sequence: Synthetic oligonucleotide
uggcggccccuugccgggc

SEQ ID NO: 1140659 - RNA, 19 nt, Artificial Sequence
  Description of Artificial Sequence: Synthetic oligonucleotide
ccuucggcuccagcugaug

SEQ ID NO: 1140660 - RNA, 19 nt, Artificial Sequence
  Description of Artificial Sequence: Synthetic oligonucleotide
gccaguuaacagauccaau

SEQ ID NO: 1140661 - RNA, 19 nt, Artificial Sequence
  Description of Artificial Sequence: Synthetic oligonucleotide
ccgaagcaucaucagucua

SEQ ID NO: 1140662 - RNA, 19 nt, Artificial Sequence
  Description of Artificial Sequence: Synthetic oligonucleotide
ccuugccgggcagguagac

SEQ ID NO: 1140663 - RNA, 19 nt, Artificial Sequence
  Description of Artificial Sequence: Synthetic oligonucleotide
gguugucgcccaggugauc

SEQ ID NO: 1140664 - RNA, 19 nt, Artificial Sequence
  Description of Artificial Sequence: Synthetic oligonucleotide
ccaccgucugagggcgucc

SEQ ID NO: 1140665 - RNA, 19 nt, Artificial Sequence
  Description of Artificial Sequence: Synthetic oligonucleotide
cugcucggaugucccagau

SEQ ID NO: 1140666 - RNA, 19 nt, Artificial Sequence
  Description of Artificial Sequence: Synthetic oligonucleotide
cguccgguugucgcccagg

SEQ ID NO: 1140667 - RNA, 19 nt, Artificial Sequence
  Description of Artificial Sequence: Synthetic oligonucleotide
gggaccagucaagggcaaa

SEQ ID NO: 1140668 - RNA, 19 nt, Artificial Sequence
  Description of Artificial Sequence: Synthetic oligonucleotide
augugcgccuccggcccuu

SEQ ID NO: 1140669 - RNA, 19 nt, Artificial Sequence
  Description of Artificial Sequence: Synthetic oligonucleotide
ccgucugagggcguccaga

SEQ ID NO: 1140670 - RNA, 19 nt, Artificial Sequence
  Description of Artificial Sequence: Synthetic oligonucleotide
gcgcucgaugguacagcac

SEQ ID NO: 1140671 - RNA, 19 nt, Artificial Sequence
  Description of Artificial Sequence: Synthetic oligonucleotide
cguccauuaccagcuccuc

SEQ ID NO: 1140672 - RNA, 19 nt, Artificial Sequence
  Description of Artificial Sequence: Synthetic oligonucleotide
caugugcgccuccggcccu

SEQ ID NO: 1140673 - RNA, 19 nt, Artificial Sequence
  Description of Artificial Sequence: Synthetic oligonucleotide
caguaguggucagcacagu

SEQ ID NO: 1140674 - RNA, 19 nt, Artificial Sequence
  Description of Artificial Sequence: Synthetic oligonucleotide
ccaccauaguggggaacca

SEQ ID NO: 1140675 - RNA, 19 nt, Artificial Sequence
  Description of Artificial Sequence: Synthetic oligonucleotide
cgguuuccgcuccucuuca

SEQ ID NO: 1140676 - RNA, 19 nt, Artificial Sequence
  Description of Artificial Sequence: Synthetic oligonucleotide
ggccaagugccggccaccu

SEQ ID NO: 1140677 - RNA, 19 nt, Artificial Sequence
  Description of Artificial Sequence: Synthetic oligonucleotide
ccagaccuagcuggccaga

SEQ ID NO: 1140678 - RNA, 19 nt, Artificial Sequence
  Description of Artificial Sequence: Synthetic oligonucleotide
gcccuugcgcgccgccauc

SEQ ID NO: 1140679 - RNA, 19 nt, Artificial Sequence
  Description of Artificial Sequence: Synthetic oligonucleotide
ccguccgguugucgcccag

SEQ ID NO: 1140680 - RNA, 19 nt, Artificial Sequence
  Description of Artificial Sequence: Synthetic oligonucleotide
cgggcagguagaccugcga

SEQ ID NO: 1140681 - RNA, 19 nt, Artificial Sequence
  Description of Artificial Sequence: Synthetic oligonucleotide
cuggcccuucucugaccau

SEQ ID NO: 1140682 - RNA, 19 nt, Artificial Sequence
  Description of Artificial Sequence: Synthetic oligonucleotide
ccggcccuugcgcgccgcc

SEQ ID NO: 1140683 - RNA, 19 nt, Artificial Sequence
  Description of Artificial Sequence: Synthetic oligonucleotide
ggccaccuuagacgcugau

SEQ ID NO: 1140684 - RNA, 19 nt, Artificial Sequence
  Description of Artificial Sequence: Synthetic oligonucleotide
cgguugaugccaccauagu

SEQ ID NO: 1140685 - RNA, 19 nt, Artificial Sequence
  Description of Artificial Sequence: Synthetic oligonucleotide
ccugcucaucucggaggaa

SEQ ID NO: 1140686 - RNA, 19 nt, Artificial Sequence
  Description of Artificial Sequence: Synthetic oligonucleotide
ggcgaccacugcagauccu

SEQ ID NO: 1140687 - RNA, 19 nt, Artificial Sequence
  Description of Artificial Sequence: Synthetic oligonucleotide
gcucucagccuggguuccu

SEQ ID NO: 1140688 - RNA, 19 nt, Artificial Sequence
  Description of Artificial Sequence: Synthetic oligonucleotide
gggcgcucucagccugggu

SEQ ID NO: 1140689 - RNA, 19 nt, Artificial Sequence
  Description of Artificial Sequence: Synthetic oligonucleotide
cggccaccuuagacgcuga

SEQ ID NO: 1140690 - RNA, 19 nt, Artificial Sequence
  Description of Artificial Sequence: Synthetic oligonucleotide
gccccuugccgggcaggua

SEQ ID NO: 1140691 - RNA, 19 nt, Artificial Sequence
  Description of Artificial Sequence: Synthetic oligonucleotide
gccggccaccuuagacgcu

SEQ ID NO: 1140692 - RNA, 19 nt, Artificial Sequence
  Description of Artificial Sequence: Synthetic oligonucleotide
gcgccaguuugcgcucgau

SEQ ID NO: 1140693 - RNA, 19 nt, Artificial Sequence
  Description of Artificial Sequence: Synthetic oligonucleotide
cggcccuugcgcgccgcca

SEQ ID NO: 1140694 - RNA, 19 nt, Artificial Sequence
  Description of Artificial Sequence: Synthetic oligonucleotide
aauaugugauuucagaacg

SEQ ID NO: 1140695 - RNA, 19 nt, Artificial Sequence
  Description of Artificial Sequence: Synthetic oligonucleotide
aagaugaaaauccugcugc

SEQ ID NO: 1140696 - RNA, 19 nt, Artificial Sequence
  Description of Artificial Sequence: Synthetic oligonucleotide
ucuuaaaacagaaucaaug

SEQ ID NO: 1140697 - RNA, 19 nt, Artificial Sequence
  Description of Artificial Sequence: Synthetic oligonucleotide
ugugauuucagaacgguag

SEQ ID NO: 1140698 - RNA, 19 nt, Artificial Sequence
  Description of Artificial Sequence: Synthetic oligonucleotide
auaucuugaaaagagagcg

SEQ ID NO: 1140699 - RNA, 19 nt, Artificial Sequence
  Description of Artificial Sequence: Synthetic oligonucleotide
ucugucuuuaucaauuccg

SEQ ID NO: 1140700 - RNA, 19 nt, Artificial Sequence
  Description of Artificial Sequence: Synthetic oligonucleotide
aaaugugggaccugagugc

SEQ ID NO: 1140701 - RNA, 19 nt, Artificial Sequence
  Description of Artificial Sequence: Synthetic oligonucleotide
gauaaaaggagacuucucc

SEQ ID NO: 1140702 - RNA, 19 nt, Artificial Sequence
  Description of Artificial Sequence: Synthetic oligonucleotide
ucaaugagaacucuuagcu

SEQ ID NO: 1140703 - RNA, 19 nt, Artificial Sequence
  Description of Artificial Sequence: Synthetic oligonucleotide
uccacacucauuuagaagc

SEQ ID NO: 1140704 - RNA, 19 nt, Artificial Sequence
  Description of Artificial Sequence: Synthetic oligonucleotide
cuaaguuuucccaagauuc

SEQ ID NO: 1140705 - RNA, 19 nt, Artificial Sequence
  Description of Artificial Sequence: Synthetic oligonucleotide
ucuuccaguaucaaugucc

SEQ ID NO: 1140706 - RNA, 19 nt, Artificial Sequence
  Description of Artificial Sequence: Synthetic oligonucleotide
uuuguugacuccaaggaca

SEQ ID NO: 1140707 - RNA, 19 nt, Artificial Sequence
  Description of Artificial Sequence: Synthetic oligonucleotide
agcuagaagaugaaaaucc

SEQ ID NO: 1140708 - RNA, 19 nt, Artificial Sequence
  Description of Artificial Sequence: Synthetic oligonucleotide
gguaguuucccucagauag

SEQ ID NO: 1140709 - RNA, 19 nt, Artificial Sequence
  Description of Artificial Sequence: Synthetic oligonucleotide
gauuacuugaagcugagga

SEQ ID NO: 1140710 - RNA, 19 nt, Artificial Sequence
  Description of Artificial Sequence: Synthetic oligonucleotide
auaaaaggagacuucuccg

SEQ ID NO: 1140711 - RNA, 19 nt, Artificial Sequence
  Description of Artificial Sequence: Synthetic oligonucleotide
aagagagcgucugugaggc

SEQ ID NO: 1140712 - RNA, 19 nt, Artificial Sequence
  Description of Artificial Sequence: Synthetic oligonucleotide
gaaaugugggaccugagug

SEQ ID NO: 1140713 - RNA, 19 nt, Artificial Sequence
  Description of Artificial Sequence: Synthetic oligonucleotide
uuuucaagggacaucuuug

SEQ ID NO: 1140714 - RNA, 19 nt, Artificial Sequence
  Description of Artificial Sequence: Synthetic oligonucleotide
ucucuguuuacugaggacg

SEQ ID NO: 1140715 - RNA, 19 nt, Artificial Sequence
  Description of Artificial Sequence: Synthetic oligonucleotide
uguacagccgaaaacagaa

SEQ ID NO: 1140716 - RNA, 19 nt, Artificial Sequence
  Description of Artificial Sequence: Synthetic oligonucleotide
aauuaaaucccgguguuug

SEQ ID NO: 1140717 - RNA, 19 nt, Artificial Sequence
  Description of Artificial Sequence: Synthetic oligonucleotide
aguaaguucauugcauugc

SEQ ID NO: 1140718 - RNA, 19 nt, Artificial Sequence
  Description of Artificial Sequence: Synthetic oligonucleotide
uucagguacagaauagucc

SEQ ID NO: 1140719 - RNA, 19 nt, Artificial Sequence
  Description of Artificial Sequence: Synthetic oligonucleotide
caauuggugugauaaaagg

SEQ ID NO: 1140720 - RNA, 19 nt, Artificial Sequence
  Description of Artificial Sequence: Synthetic oligonucleotide
uuacuugaagcugaggagg

SEQ ID NO: 1140721 - RNA, 19 nt, Artificial Sequence
  Description of Artificial Sequence: Synthetic oligonucleotide
uucuguaacauccaccgac

SEQ ID NO: 1140722 - RNA, 19 nt, Artificial Sequence
  Description of Artificial Sequence: Synthetic oligonucleotide
uguugaacuucuaugucgc

SEQ ID NO: 1140723 - RNA, 19 nt, Artificial Sequence
  Description of Artificial Sequence: Synthetic oligonucleotide
gauuuguagaaucuuguca

SEQ ID NO: 1140724 - RNA, 19 nt, Artificial Sequence
  Description of Artificial Sequence: Synthetic oligonucleotide
ucuagugucaacagcgaug

SEQ ID NO: 1140725 - RNA, 19 nt, Artificial Sequence
  Description of Artificial Sequence: Synthetic oligonucleotide
uacauuaucuuccccacac

SEQ ID NO: 1140726 - RNA, 19 nt, Artificial Sequence
  Description of Artificial Sequence: Synthetic oligonucleotide
uuaaccaacuucauuaguu

SEQ ID NO: 1140727 - RNA, 19 nt, Artificial Sequence
  Description of Artificial Sequence: Synthetic oligonucleotide
uuucaagggacaucuuugg

SEQ ID NO: 1140728 - RNA, 19 nt, Artificial Sequence
  Description of Artificial Sequence: Synthetic oligonucleotide
cagacuauguuacauuucc

SEQ ID NO: 1140729 - RNA, 19 nt, Artificial Sequence
  Description of Artificial Sequence: Synthetic oligonucleotide
uacagccgaaaacagaagc

SEQ ID NO: 1140730 - RNA, 19 nt, Artificial Sequence
  Description of Artificial Sequence: Synthetic oligonucleotide
cauuucauaaugugaagac

SEQ ID NO: 1140731 - RNA, 19 nt, Artificial Sequence
  Description of Artificial Sequence: Synthetic oligonucleotide
cugaagagguucuuaauag

SEQ ID NO: 1140732 - RNA, 19 nt, Artificial Sequence
  Description of Artificial Sequence: Synthetic oligonucleotide
caauaugugauuucagaac

SEQ ID NO: 1140733 - RNA, 19 nt, Artificial Sequence
  Description of Artificial Sequence: Synthetic oligonucleotide
uaugcauuguagauuguga

SEQ ID NO: 1140734 - RNA, 19 nt, Artificial Sequence
  Description of Artificial Sequence: Synthetic oligonucleotide
agaugaaaauccugcugcc

SEQ ID NO: 1140735 - RNA, 19 nt, Artificial Sequence
  Description of Artificial Sequence: Synthetic oligonucleotide
agugucaacagcgauguuc

SEQ ID NO: 1140736 - RNA, 19 nt, Artificial Sequence
  Description of Artificial Sequence: Synthetic oligonucleotide
acuauguuacauuuccuug

SEQ ID NO: 1140737 - RNA, 19 nt, Artificial Sequence
  Description of Artificial Sequence: Synthetic oligonucleotide
auaaugugaagacauaguu

SEQ ID NO: 1140738 - RNA, 19 nt, Artificial Sequence
  Description of Artificial Sequence: Synthetic oligonucleotide
uguucuauugagaaaguuu

SEQ ID NO: 1140739 - RNA, 19 nt, Artificial Sequence
  Description of Artificial Sequence: Synthetic oligonucleotide
uauaagagccacccguaag

SEQ ID NO: 1140740 - RNA, 19 nt, Artificial Sequence
  Description of Artificial Sequence: Synthetic oligonucleotide
ugguauaagagccacccgu

SEQ ID NO: 1140741 - RNA, 19 nt, Artificial Sequence
  Description of Artificial Sequence: Synthetic oligonucleotide
ugugagguggucugaaucc

SEQ ID NO: 1140742 - RNA, 19 nt, Artificial Sequence
  Description of Artificial Sequence: Synthetic oligonucleotide
uccguaaugauuuguagaa

SEQ ID NO: 1140743 - RNA, 19 nt, Artificial Sequence
  Description of Artificial Sequence: Synthetic oligonucleotide
uguuucaccugccacgacc

SEQ ID NO: 1140744 - RNA, 19 nt, Artificial Sequence
  Description of Artificial Sequence: Synthetic oligonucleotide
ccaaagaugacuuugcaag

SEQ ID NO: 1140745 - RNA, 19 nt, Artificial Sequence
  Description of Artificial Sequence: Synthetic oligonucleotide
acagcgauguucuauugag

SEQ ID NO: 1140746 - RNA, 19 nt, Artificial Sequence
  Description of Artificial Sequence: Synthetic oligonucleotide
ucugaagagguucuuaaua

SEQ ID NO: 1140747 - RNA, 19 nt, Artificial Sequence
  Description of Artificial Sequence: Synthetic oligonucleotide
aaguuuguaagucucuguu

SEQ ID NO: 1140748 - RNA, 19 nt, Artificial Sequence
  Description of Artificial Sequence: Synthetic oligonucleotide
guuucccucagauagacuc

SEQ ID NO: 1140749 - RNA, 19 nt, Artificial Sequence
  Description of Artificial Sequence: Synthetic oligonucleotide
aaaucccgguguuugaaca

SEQ ID NO: 1140750 - RNA, 19 nt, Artificial Sequence
  Description of Artificial Sequence: Synthetic oligonucleotide
uuuccacaauuaaaucccg

SEQ ID NO: 1140751 - RNA, 19 nt, Artificial Sequence
  Description of Artificial Sequence: Synthetic oligonucleotide
uuuccgaccaauuggugug

SEQ ID NO: 1140752 - RNA, 19 nt, Artificial Sequence
  Description of Artificial Sequence: Synthetic oligonucleotide
guaacauccaccgacuuug

SEQ ID NO: 1140753 - RNA, 19 nt, Artificial Sequence
  Description of Artificial Sequence: Synthetic oligonucleotide
uuuacugacaaaggucucc

SEQ ID NO: 1140754 - RNA, 19 nt, Artificial Sequence
  Description of Artificial Sequence: Synthetic oligonucleotide
uaaaaggagacuucuccgu

SEQ ID NO: 1140755 - RNA, 19 nt, Artificial Sequence
  Description of Artificial Sequence: Synthetic oligonucleotide
gcucauuuaguucacaggc

SEQ ID NO: 1140756 - RNA, 19 nt, Artificial Sequence
  Description of Artificial Sequence: Synthetic oligonucleotide
uuccguaaugauuuguaga

SEQ ID NO: 1140757 - RNA, 19 nt, Artificial Sequence
  Description of Artificial Sequence: Synthetic oligonucleotide
uucuaugucgccuccaaaa

SEQ ID NO: 1140758 - RNA, 19 nt, Artificial Sequence
  Description of Artificial Sequence: Synthetic oligonucleotide
uuaauaggcuccaagucuu

SEQ ID NO: 1140759 - RNA, 19 nt, Artificial Sequence
  Description of Artificial Sequence: Synthetic oligonucleotide
uguacauuaucuuccccac

SEQ ID NO: 1140760 - RNA, 19 nt, Artificial Sequence
  Description of Artificial Sequence: Synthetic oligonucleotide
uuaucaauuccguaaugau

SEQ ID NO: 1140761 - RNA, 19 nt, Artificial Sequence
  Description of Artificial Sequence: Synthetic oligonucleotide
acagaagccgucucggauc

SEQ ID NO: 1140762 - RNA, 19 nt, Artificial Sequence
  Description of Artificial Sequence: Synthetic oligonucleotide
ggggccugaaaauagaucc

SEQ ID NO: 1140763 - RNA, 19 nt, Artificial Sequence
  Description of Artificial Sequence: Synthetic oligonucleotide
aacgguagccuccuucuug

SEQ ID NO: 1140764 - RNA, 19 nt, Artificial Sequence
  Description of Artificial Sequence: Synthetic oligonucleotide
guucuauugagaaaguuuc

SEQ ID NO: 1140765 - RNA, 19 nt, Artificial Sequence
  Description of Artificial Sequence: Synthetic oligonucleotide
acauccaccgacuuugugu

SEQ ID NO: 1140766 - RNA, 19 nt, Artificial Sequence
  Description of Artificial Sequence: Synthetic oligonucleotide
agcugaguauucuucgggg

SEQ ID NO: 1140767 - RNA, 19 nt, Artificial Sequence
  Description of Artificial Sequence: Synthetic oligonucleotide
uccgccacagccaaagaug

SEQ ID NO: 1140768 - RNA, 19 nt, Artificial Sequence
  Description of Artificial Sequence: Synthetic oligonucleotide
ucugaauccgccacagcca

SEQ ID NO: 1140769 - RNA, 19 nt, Artificial Sequence
  Description of Artificial Sequence: Synthetic oligonucleotide
uggugugauaaaaggagac

SEQ ID NO: 1140770 - RNA, 19 nt, Artificial Sequence
  Description of Artificial Sequence: Synthetic oligonucleotide
acgguagccuccuucuugc

SEQ ID NO: 1140771 - RNA, 19 nt, Artificial Sequence
  Description of Artificial Sequence: Synthetic oligonucleotide
uuccacaauuaaaucccgg

SEQ ID NO: 1140772 - RNA, 19 nt, Artificial Sequence
  Description of Artificial Sequence: Synthetic oligonucleotide
uggguacagacuauguuac

SEQ ID NO: 1140773 - RNA, 19 nt, Artificial Sequence
  Description of Artificial Sequence: Synthetic oligonucleotide
aaagaugacuuugcaaggu

SEQ ID NO: 1140774 - RNA, 19 nt, Artificial Sequence
  Description of Artificial Sequence: Synthetic oligonucleotide
acagccgaaaacagaagcc

SEQ ID NO: 1140775 - RNA, 19 nt, Artificial Sequence
  Description of Artificial Sequence: Synthetic oligonucleotide
cacguaagauuucagguac

SEQ ID NO: 1140776 - RNA, 19 nt, Artificial Sequence
  Description of Artificial Sequence: Synthetic oligonucleotide
guucuuaauaggcuccaag

SEQ ID NO: 1140777 - RNA, 19 nt, Artificial Sequence
  Description of Artificial Sequence: Synthetic oligonucleotide
gaguaaguucauugcauug

SEQ ID NO: 1140778 - RNA, 19 nt, Artificial Sequence
  Description of Artificial Sequence: Synthetic oligonucleotide
gaaagucuucaggagagcc

SEQ ID NO: 1140779 - RNA, 19 nt, Artificial Sequence
  Description of Artificial Sequence: Synthetic oligonucleotide
gauuucagguacagaauag

SEQ ID NO: 1140780 - RNA, 19 nt, Artificial Sequence
  Description of Artificial Sequence: Synthetic oligonucleotide
ucuguaacauccaccgacu

SEQ ID NO: 1140781 - RNA, 19 nt, Artificial Sequence
  Description of Artificial Sequence: Synthetic oligonucleotide
uguuuacugaggacgggug

SEQ ID NO: 1140782 - RNA, 19 nt, Artificial Sequence
  Description of Artificial Sequence: Synthetic oligonucleotide
agcgauguucuauugagaa

SEQ ID NO: 1140783 - RNA, 19 nt, Artificial Sequence
  Description of Artificial Sequence: Synthetic oligonucleotide
uaguguugccacugggucg

SEQ ID NO: 1140784 - RNA, 19 nt, Artificial Sequence
  Description of Artificial Sequence: Synthetic oligonucleotide
cucuguuuacugaggacgg

SEQ ID NO: 1140785 - RNA, 19 nt, Artificial Sequence
  Description of Artificial Sequence: Synthetic oligonucleotide
agcuuuacugacaaagguc

SEQ ID NO: 1140786 - RNA, 19 nt, Artificial Sequence
  Description of Artificial Sequence: Synthetic oligonucleotide
aacuaaguuuucccaagau

SEQ ID NO: 1140787 - RNA, 19 nt, Artificial Sequence
  Description of Artificial Sequence: Synthetic oligonucleotide
uuuaggguuuccacaauua

SEQ ID NO: 1140788 - RNA, 19 nt, Artificial Sequence
  Description of Artificial Sequence: Synthetic oligonucleotide
guuuacugaggacgggugg

SEQ ID NO: 1140789 - RNA, 19 nt, Artificial Sequence
  Description of Artificial Sequence: Synthetic oligonucleotide
uuaggguuuccacaauuaa

SEQ ID NO: 1140790 - RNA, 19 nt, Artificial Sequence
  Description of Artificial Sequence: Synthetic oligonucleotide
uauucuucggggcugggua

SEQ ID NO: 1140791 - RNA, 19 nt, Artificial Sequence
  Description of Artificial Sequence: Synthetic oligonucleotide
agaaagauccucaucagaa

SEQ ID NO: 1140792 - RNA, 19 nt, Artificial Sequence
  Description of Artificial Sequence: Synthetic oligonucleotide
acagaauaguccagaaaac

SEQ ID NO: 1140793 - RNA, 19 nt, Artificial Sequence
  Description of Artificial Sequence: Synthetic oligonucleotide
uaaguuuguaagucucugu

SEQ ID NO: 1140794 - RNA, 19 nt, Artificial Sequence
  Description of Artificial Sequence: Synthetic oligonucleotide
uacuggggccugaaaauag

SEQ ID NO: 1140795 - RNA, 19 nt, Artificial Sequence
  Description of Artificial Sequence: Synthetic oligonucleotide
aacagaagccgucucggau

SEQ ID NO: 1140796 - RNA, 19 nt, Artificial Sequence
  Description of Artificial Sequence: Synthetic oligonucleotide
aaagggguuaugaggguag

SEQ ID NO: 1140797 - RNA, 19 nt, Artificial Sequence
  Description of Artificial Sequence: Synthetic oligonucleotide
acagaaucaaugagaacuc

SEQ ID NO: 1140798 - RNA, 19 nt, Artificial Sequence
  Description of Artificial Sequence: Synthetic oligonucleotide
uucuauugagaaaguuucu

SEQ ID NO: 1140799 - RNA, 19 nt, Artificial Sequence
  Description of Artificial Sequence: Synthetic oligonucleotide
gagacagccaaauauggcu

SEQ ID NO: 1140800 - RNA, 19 nt, Artificial Sequence
  Description of Artificial Sequence: Synthetic oligonucleotide
gacuucuccgucauaacug

SEQ ID NO: 1140801 - RNA, 19 nt, Artificial Sequence
  Description of Artificial Sequence: Synthetic oligonucleotide
acuaaguuuucccaagauu

SEQ ID NO: 1140802 - RNA, 19 nt, Artificial Sequence
  Description of Artificial Sequence: Synthetic oligonucleotide
cuugaaaagagagcgucug

SEQ ID NO: 1140803 - RNA, 19 nt, Artificial Sequence
  Description of Artificial Sequence: Synthetic oligonucleotide
agacuucuccgucauaacu

SEQ ID NO: 1140804 - RNA, 19 nt, Artificial Sequence
  Description of Artificial Sequence: Synthetic oligonucleotide
agacagaagccguucucgg

SEQ ID NO: 1140805 - RNA, 19 nt, Artificial Sequence
  Description of Artificial Sequence: Synthetic oligonucleotide
uaugugauuucagaacggu

SEQ ID NO: 1140806 - RNA, 19 nt, Artificial Sequence
  Description of Artificial Sequence: Synthetic oligonucleotide
gacucuggcauaucucacc

SEQ ID NO: 1140807 - RNA, 19 nt, Artificial Sequence
  Description of Artificial Sequence: Synthetic oligonucleotide
uaucuugaaaagagagcgu

SEQ ID NO: 1140808 - RNA, 19 nt, Artificial Sequence
  Description of Artificial Sequence: Synthetic oligonucleotide
aggacggguggacuugugc

SEQ ID NO: 1140809 - RNA, 19 nt, Artificial Sequence
  Description of Artificial Sequence: Synthetic oligonucleotide
agaacgguagccuccuucu

SEQ ID NO: 1140810 - RNA, 19 nt, Artificial Sequence
  Description of Artificial Sequence: Synthetic oligonucleotide
aaugugggaccugagugcu

SEQ ID NO: 1140811 - RNA, 19 nt, Artificial Sequence
  Description of Artificial Sequence: Synthetic oligonucleotide
uacuugaagcugaggagga

SEQ ID NO: 1140812 - RNA, 19 nt, Artificial Sequence
  Description of Artificial Sequence: Synthetic oligonucleotide
uuuguaagucucuguuuac

SEQ ID NO: 1140813 - RNA, 19 nt, Artificial Sequence
  Description of Artificial Sequence: Synthetic oligonucleotide
ucaacagcgauguucuauu

SEQ ID NO: 1140814 - RNA, 19 nt, Artificial Sequence
  Description of Artificial Sequence: Synthetic oligonucleotide
cuuuaagaagggcaauauc

SEQ ID NO: 1140815 - RNA, 19 nt, Artificial Sequence
  Description of Artificial Sequence: Synthetic oligonucleotide
uuuacugaggacgggugga

SEQ ID NO: 1140816 - RNA, 19 nt, Artificial Sequence
  Description of Artificial Sequence: Synthetic oligonucleotide
gugauuucagaacgguagc

SEQ ID NO: 1140817 - RNA, 19 nt, Artificial Sequence
  Description of Artificial Sequence: Synthetic oligonucleotide
ugaggaggaucuaaggcuu

SEQ ID NO: 1140818 - RNA, 19 nt, Artificial Sequence
  Description of Artificial Sequence: Synthetic oligonucleotide
uugaaaagagagcgucugu

SEQ ID NO: 1140819 - RNA, 19 nt, Artificial Sequence
  Description of Artificial Sequence: Synthetic oligonucleotide
aguacagcuuuaagaaggg

SEQ ID NO: 1140820 - RNA, 19 nt, Artificial Sequence
  Description of Artificial Sequence: Synthetic oligonucleotide
gaugacuuugcaaggucug

SEQ ID NO: 1140821 - RNA, 19 nt, Artificial Sequence
  Description of Artificial Sequence: Synthetic oligonucleotide
augaaaauccugcugccuu

SEQ ID NO: 1140822 - RNA, 19 nt, Artificial Sequence
  Description of Artificial Sequence: Synthetic oligonucleotide
cuuaauaggcuccaagucu

SEQ ID NO: 1140823 - RNA, 19 nt, Artificial Sequence
  Description of Artificial Sequence: Synthetic oligonucleotide
guuaugaggguaguuuccc

SEQ ID NO: 1140824 - RNA, 19 nt, Artificial Sequence
  Description of Artificial Sequence: Synthetic oligonucleotide
auuaaaucccgguguuuga

SEQ ID NO: 1140825 - RNA, 19 nt, Artificial Sequence
  Description of Artificial Sequence: Synthetic oligonucleotide
aauuccguaaugauuugua

SEQ ID NO: 1140826 - RNA, 19 nt, Artificial Sequence
  Description of Artificial Sequence: Synthetic oligonucleotide
cuucaggagagccaagauc

SEQ ID NO: 1140827 - RNA, 19 nt, Artificial Sequence
  Description of Artificial Sequence: Synthetic oligonucleotide
ucauaacugccgcuagugu

SEQ ID NO: 1140828 - RNA, 19 nt, Artificial Sequence
  Description of Artificial Sequence: Synthetic oligonucleotide
auaugugauuucagaacgg

SEQ ID NO: 1140829 - RNA, 19 nt, Artificial Sequence
  Description of Artificial Sequence: Synthetic oligonucleotide
ugcugauuacuugaagcug

SEQ ID NO: 1140830 - RNA, 19 nt, Artificial Sequence
  Description of Artificial Sequence: Synthetic oligonucleotide
cagccgaaaacagaagccg

SEQ ID NO: 1140831 - RNA, 19 nt, Artificial Sequence
  Description of Artificial Sequence: Synthetic oligonucleotide
ugcuccacacucauuuaga

SEQ ID NO: 1140832 - RNA, 19 nt, Artificial Sequence
  Description of Artificial Sequence: Synthetic oligonucleotide
accgacuuuguguacauua

SEQ ID NO: 1140833 - RNA, 19 nt, Artificial Sequence
  Description of Artificial Sequence: Synthetic oligonucleotide
acauccucuagugucaaca

SEQ ID NO: 1140834 - RNA, 19 nt, Artificial Sequence
  Description of Artificial Sequence: Synthetic oligonucleotide
agagccacccguaaguuug

SEQ ID NO: 1140835 - RNA, 19 nt, Artificial Sequence
  Description of Artificial Sequence: Synthetic oligonucleotide
auaacugccgcuaguguug

SEQ ID NO: 1140836 - RNA, 19 nt, Artificial Sequence
  Description of Artificial Sequence: Synthetic oligonucleotide
auuucagguacagaauagu

SEQ ID NO: 1140837 - RNA, 19 nt, Artificial Sequence
  Description of Artificial Sequence: Synthetic oligonucleotide
acugggucgagacagccaa

SEQ ID NO: 1140838 - RNA, 19 nt, Artificial Sequence
  Description of Artificial Sequence: Synthetic oligonucleotide
uuacugacaaaggucucca

SEQ ID NO: 1140839 - RNA, 19 nt, Artificial Sequence
  Description of Artificial Sequence: Synthetic oligonucleotide
acccguaaguuuguaaguc

SEQ ID NO: 1140840 - RNA, 19 nt, Artificial Sequence
  Description of Artificial Sequence: Synthetic oligonucleotide
gcacacguaagauuucagg

SEQ ID NO: 1140841 - RNA, 19 nt, Artificial Sequence
  Description of Artificial Sequence: Synthetic oligonucleotide
uuucccucagauagacucu

SEQ ID NO: 1140842 - RNA, 19 nt, Artificial Sequence
  Description of Artificial Sequence: Synthetic oligonucleotide
acacguaagauuucaggua

SEQ ID NO: 1140843 - RNA, 19 nt, Artificial Sequence
  Description of Artificial Sequence: Synthetic oligonucleotide
guugccacugggucgagac

SEQ ID NO: 1140844 - RNA, 19 nt, Artificial Sequence
  Description of Artificial Sequence: Synthetic oligonucleotide
guaagucucuguuuacuga

SEQ ID NO: 1140845 - RNA, 19 nt, Artificial Sequence
  Description of Artificial Sequence: Synthetic oligonucleotide
ucaauuccguaaugauuug

SEQ ID NO: 1140846 - RNA, 19 nt, Artificial Sequence
  Description of Artificial Sequence: Synthetic oligonucleotide
aacauccaccgacuuugug

SEQ ID NO: 1140847 - RNA, 19 nt, Artificial Sequence
  Description of Artificial Sequence: Synthetic oligonucleotide
ugaguauucuucggggcug

SEQ ID NO: 1140848 - RNA, 19 nt, Artificial Sequence
  Description of Artificial Sequence: Synthetic oligonucleotide
uagauaugcauuguagauu

SEQ ID NO: 1140849 - RNA, 19 nt, Artificial Sequence
  Description of Artificial Sequence: Synthetic oligonucleotide
cauccacagacagaagccg

SEQ ID NO: 1140850 - RNA, 19 nt, Artificial Sequence
  Description of Artificial Sequence: Synthetic oligonucleotide
ucucguguacagccgaaaa

SEQ ID NO: 1140851 - RNA, 19 nt, Artificial Sequence
  Description of Artificial Sequence: Synthetic oligonucleotide
aguuugggcucauuuaguu

SEQ ID NO: 1140852 - RNA, 19 nt, Artificial Sequence
  Description of Artificial Sequence: Synthetic oligonucleotide
uucucucguguacagccga

SEQ ID NO: 1140853 - RNA, 19 nt, Artificial Sequence
  Description of Artificial Sequence: Synthetic oligonucleotide
ucagauagacucuggcaua

SEQ ID NO: 1140854 - RNA, 19 nt, Artificial Sequence
  Description of Artificial Sequence: Synthetic oligonucleotide
agaggcacacguaagauuu

SEQ ID NO: 1140855 - RNA, 19 nt, Artificial Sequence
  Description of Artificial Sequence: Synthetic oligonucleotide
aguuuguaagucucuguuu

SEQ ID NO: 1140856 - RNA, 19 nt, Artificial Sequence
  Description of Artificial Sequence: Synthetic oligonucleotide
uuaaaucccgguguuugaa

SEQ ID NO: 1140857 - RNA, 19 nt, Artificial Sequence
  Description of Artificial Sequence: Synthetic oligonucleotide
augaggguaguuucccuca

SEQ ID NO: 1140858 - RNA, 19 nt, Artificial Sequence
  Description of Artificial Sequence: Synthetic oligonucleotide
ucuaaggcuuuggaaagaa

SEQ ID NO: 1140859 - RNA, 19 nt, Artificial Sequence
  Description of Artificial Sequence: Synthetic oligonucleotide
ucuuuccgaccaauuggug

SEQ ID NO: 1140860 - RNA, 19 nt, Artificial Sequence
  Description of Artificial Sequence: Synthetic oligonucleotide
agaacucuuagcugcuuaa

SEQ ID NO: 1140861 - RNA, 19 nt, Artificial Sequence
  Description of Artificial Sequence: Synthetic oligonucleotide
uuaugaggguaguuucccu

SEQ ID NO: 1140862 - RNA, 19 nt, Artificial Sequence
  Description of Artificial Sequence: Synthetic oligonucleotide
aggguaguuucccucagau

SEQ ID NO: 1140863 - RNA, 19 nt, Artificial Sequence
  Description of Artificial Sequence: Synthetic oligonucleotide
agggcacuagcuuuacuga

SEQ ID NO: 1140864 - RNA, 19 nt, Artificial Sequence
  Description of Artificial Sequence: Synthetic oligonucleotide
aggacagugcagaaagauc

SEQ ID NO: 1140865 - RNA, 19 nt, Artificial Sequence
  Description of Artificial Sequence: Synthetic oligonucleotide
gccuuaaccaacuucauua

SEQ ID NO: 1140866 - RNA, 19 nt, Artificial Sequence
  Description of Artificial Sequence: Synthetic oligonucleotide
uaucucaccuucuccuggu

SEQ ID NO: 1140867 - RNA, 19 nt, Artificial Sequence
  Description of Artificial Sequence: Synthetic oligonucleotide
cuagauaugcauuguagau

SEQ ID NO: 1140868 - RNA, 19 nt, Artificial Sequence
  Description of Artificial Sequence: Synthetic oligonucleotide
gaaaguuucucuggcaaua

SEQ ID NO: 1140869 - RNA, 19 nt, Artificial Sequence
  Description of Artificial Sequence: Synthetic oligonucleotide
acagcccaauucaucacac

SEQ ID NO: 1140870 - RNA, 19 nt, Artificial Sequence
  Description of Artificial Sequence: Synthetic oligonucleotide
uucaucuuuccgaccaauu

SEQ ID NO: 1140871 - RNA, 19 nt, Artificial Sequence
  Description of Artificial Sequence: Synthetic oligonucleotide
uucugaagagguucuuaau

SEQ ID NO: 1140872 - RNA, 19 nt, Artificial Sequence
  Description of Artificial Sequence: Synthetic oligonucleotide
gacuauguuacauuuccuu

SEQ ID NO: 1140873 - RNA, 19 nt, Artificial Sequence
  Description of Artificial Sequence: Synthetic oligonucleotide
uggcauaucucaccuucuc

SEQ ID NO: 1140874 - RNA, 19 nt, Artificial Sequence
  Description of Artificial Sequence: Synthetic oligonucleotide
cagaagccgucucggaucc

SEQ ID NO: 1140875 - RNA, 19 nt, Artificial Sequence
  Description of Artificial Sequence: Synthetic oligonucleotide
ugguaccuuauuuucuuuu

SEQ ID NO: 1140876 - RNA, 19 nt, Artificial Sequence
  Description of Artificial Sequence: Synthetic oligonucleotide
cauaaugugaagacauagu

SEQ ID NO: 1140877 - RNA, 19 nt, Artificial Sequence
  Description of Artificial Sequence: Synthetic oligonucleotide
guuugggcucauuuaguuc

SEQ ID NO: 1140878 - RNA, 19 nt, Artificial Sequence
  Description of Artificial Sequence: Synthetic oligonucleotide
gaacuucuaugucgccucc

SEQ ID NO: 1140879 - RNA, 19 nt, Artificial Sequence
  Description of Artificial Sequence: Synthetic oligonucleotide
ccacccguaaguuuguaag

SEQ ID NO: 1140880 - RNA, 19 nt, Artificial Sequence
  Description of Artificial Sequence: Synthetic oligonucleotide
gucguugcagggcacuagc

SEQ ID NO: 1140881 - RNA, 19 nt, Artificial Sequence
  Description of Artificial Sequence: Synthetic oligonucleotide
aucuuuccgaccaauuggu

SEQ ID NO: 1140882 - RNA, 19 nt, Artificial Sequence
  Description of Artificial Sequence: Synthetic oligonucleotide
cuuuacugacaaaggucuc

SEQ ID NO: 1140883 - RNA, 19 nt, Artificial Sequence
  Description of Artificial Sequence: Synthetic oligonucleotide
ucccucagauagacucugg

SEQ ID NO: 1140884 - RNA, 19 nt, Artificial Sequence
  Description of Artificial Sequence: Synthetic oligonucleotide
acuucuaugucgccuccaa

SEQ ID NO: 1140885 - RNA, 19 nt, Artificial Sequence
  Description of Artificial Sequence: Synthetic oligonucleotide
cccuagauaugcauuguag

SEQ ID NO: 1140886 - RNA, 19 nt, Artificial Sequence
  Description of Artificial Sequence: Synthetic oligonucleotide
auugacaggcaaagcagca

SEQ ID NO: 1140887 - RNA, 19 nt, Artificial Sequence
  Description of Artificial Sequence: Synthetic oligonucleotide
aagagccacccguaaguuu

SEQ ID NO: 1140888 - RNA, 19 nt, Artificial Sequence
  Description of Artificial Sequence: Synthetic oligonucleotide
gugagguggucugaauccg

SEQ ID NO: 1140889 - RNA, 19 nt, Artificial Sequence
  Description of Artificial Sequence: Synthetic oligonucleotide
ggcauaucucaccuucucc

SEQ ID NO: 1140890 - RNA, 19 nt, Artificial Sequence
  Description of Artificial Sequence: Synthetic oligonucleotide
uucucacagcccaauucau

SEQ ID NO: 1140891 - RNA, 19 nt, Artificial Sequence
  Description of Artificial Sequence: Synthetic oligonucleotide
gagacuucuccgucauaac

SEQ ID NO: 1140892 - RNA, 19 nt, Artificial Sequence
  Description of Artificial Sequence: Synthetic oligonucleotide
guaaguucauugcauugcu

SEQ ID NO: 1140893 - RNA, 19 nt, Artificial Sequence
  Description of Artificial Sequence: Synthetic oligonucleotide
uaauaggcuccaagucuuc

SEQ ID NO: 1140894 - RNA, 19 nt, Artificial Sequence
  Description of Artificial Sequence: Synthetic oligonucleotide
cucagauagacucuggcau

SEQ ID NO: 1140895 - RNA, 19 nt, Artificial Sequence
  Description of Artificial Sequence: Synthetic oligonucleotide
uucagaacgguagccuccu

SEQ ID NO: 1140896 - RNA, 19 nt, Artificial Sequence
  Description of Artificial Sequence: Synthetic oligonucleotide
ccuuaaccaacuucauuag

SEQ ID NO: 1140897 - RNA, 19 nt, Artificial Sequence
  Description of Artificial Sequence: Synthetic oligonucleotide
gggcucauuuaguucacag

SEQ ID NO: 1140898 - RNA, 19 nt, Artificial Sequence
  Description of Artificial Sequence: Synthetic oligonucleotide
guacagaauaguccagaaa

SEQ ID NO: 1140899 - RNA, 19 nt, Artificial Sequence
  Description of Artificial Sequence: Synthetic oligonucleotide
uguagauugugaggugguc

SEQ ID NO: 1140900 - RNA, 19 nt, Artificial Sequence
  Description of Artificial Sequence: Synthetic oligonucleotide
agacucuggcauaucucac

SEQ ID NO: 1140901 - RNA, 19 nt, Artificial Sequence
  Description of Artificial Sequence: Synthetic oligonucleotide
aucacacacccugguggcc

SEQ ID NO: 1140902 - RNA, 19 nt, Artificial Sequence
  Description of Artificial Sequence: Synthetic oligonucleotide
cagaacgguagccuccuuc

SEQ ID NO: 1140903 - RNA, 19 nt, Artificial Sequence
  Description of Artificial Sequence: Synthetic oligonucleotide
uccgucauaacugccgcua

SEQ ID NO: 1140904 - RNA, 19 nt, Artificial Sequence
  Description of Artificial Sequence: Synthetic oligonucleotide
auccgccacagccaaagau

SEQ ID NO: 1140905 - RNA, 19 nt, Artificial Sequence
  Description of Artificial Sequence: Synthetic oligonucleotide
agaaucaaugagaacucuu

SEQ ID NO: 1140906 - RNA, 19 nt, Artificial Sequence
  Description of Artificial Sequence: Synthetic oligonucleotide
gucucuguuuacugaggac

SEQ ID NO: 1140907 - RNA, 19 nt, Artificial Sequence
  Description of Artificial Sequence: Synthetic oligonucleotide
ugugaggcuuucuuuccuu

SEQ ID NO: 1140908 - RNA, 19 nt, Artificial Sequence
  Description of Artificial Sequence: Synthetic oligonucleotide
cuuuccgaccaauuggugu

SEQ ID NO: 1140909 - RNA, 19 nt, Artificial Sequence
  Description of Artificial Sequence: Synthetic oligonucleotide
uuacuggggccugaaaaua

SEQ ID NO: 1140910 - RNA, 19 nt, Artificial Sequence
  Description of Artificial Sequence: Synthetic oligonucleotide
gguuaugaggguaguuucc

SEQ ID NO: 1140911 - RNA, 19 nt, Artificial Sequence
  Description of Artificial Sequence: Synthetic oligonucleotide
acugaggacggguggacuu

SEQ ID NO: 1140912 - RNA, 19 nt, Artificial Sequence
  Description of Artificial Sequence: Synthetic oligonucleotide
gguguugaacuucuauguc

SEQ ID NO: 1140913 - RNA, 19 nt, Artificial Sequence
  Description of Artificial Sequence: Synthetic oligonucleotide
ccuagauaugcauuguaga

SEQ ID NO: 1140914 - RNA, 19 nt, Artificial Sequence
  Description of Artificial Sequence: Synthetic oligonucleotide
gucaguuugggcucauuua

SEQ ID NO: 1140915 - RNA, 19 nt, Artificial Sequence
  Description of Artificial Sequence: Synthetic oligonucleotide
cccaagauuccucaggguc

SEQ ID NO: 1140916 - RNA, 19 nt, Artificial Sequence
  Description of Artificial Sequence: Synthetic oligonucleotide
cuccagaggcacacguaag

SEQ ID NO: 1140917 - RNA, 19 nt, Artificial Sequence
  Description of Artificial Sequence: Synthetic oligonucleotide
ggaccugagugcuuuugcc

SEQ ID NO: 1140918 - RNA, 19 nt, Artificial Sequence
  Description of Artificial Sequence: Synthetic oligonucleotide
ucguugcagggcacuagcu

SEQ ID NO: 1140919 - RNA, 19 nt, Artificial Sequence
  Description of Artificial Sequence: Synthetic oligonucleotide
aagccgucucggauccgcc

SEQ ID NO: 1140920 - RNA, 19 nt, Artificial Sequence
  Description of Artificial Sequence: Synthetic oligonucleotide
gaauaguccagaaaaccuu

SEQ ID NO: 1140921 - RNA, 19 nt, Artificial Sequence
  Description of Artificial Sequence: Synthetic oligonucleotide
acugccgcuaguguugcca

SEQ ID NO: 1140922 - RNA, 19 nt, Artificial Sequence
  Description of Artificial Sequence: Synthetic oligonucleotide
gagaacucuuagcugcuua

SEQ ID NO: 1140923 - RNA, 19 nt, Artificial Sequence
  Description of Artificial Sequence: Synthetic oligonucleotide
cuagugucaacagcgaugu

SEQ ID NO: 1140924 - RNA, 19 nt, Artificial Sequence
  Description of Artificial Sequence: Synthetic oligonucleotide
ggguuaugaggguaguuuc

SEQ ID NO: 1140925 - RNA, 19 nt, Artificial Sequence
  Description of Artificial Sequence: Synthetic oligonucleotide
auugugagguggucugaau

SEQ ID NO: 1140926 - RNA, 19 nt, Artificial Sequence
  Description of Artificial Sequence: Synthetic oligonucleotide
caacagcgauguucuauug

SEQ ID NO: 1140927 - RNA, 19 nt, Artificial Sequence
  Description of Artificial Sequence: Synthetic oligonucleotide
guauaagagccacccguaa

SEQ ID NO: 1140928 - RNA, 19 nt, Artificial Sequence
  Description of Artificial Sequence: Synthetic oligonucleotide
guuucaccugccacgacca

SEQ ID NO: 1140929 - RNA, 19 nt, Artificial Sequence
  Description of Artificial Sequence: Synthetic oligonucleotide
cauccaccgacuuugugua

SEQ ID NO: 1140930 - RNA, 19 nt, Artificial Sequence
  Description of Artificial Sequence: Synthetic oligonucleotide
ccagaaaaccuucaaaucu

SEQ ID NO: 1140931 - RNA, 19 nt, Artificial Sequence
  Description of Artificial Sequence: Synthetic oligonucleotide
uuacugaggacggguggac

SEQ ID NO: 1140932 - RNA, 19 nt, Artificial Sequence
  Description of Artificial Sequence: Synthetic oligonucleotide
ccaguacagcuuuaagaag

SEQ ID NO: 1140933 - RNA, 19 nt, Artificial Sequence
  Description of Artificial Sequence: Synthetic oligonucleotide
auccaccgacuuuguguac

SEQ ID NO: 1140934 - RNA, 19 nt, Artificial Sequence
  Description of Artificial Sequence: Synthetic oligonucleotide
gcuuuacugacaaaggucu

SEQ ID NO: 1140935 - RNA, 19 nt, Artificial Sequence
  Description of Artificial Sequence: Synthetic oligonucleotide
ccacccuagauaugcauug

SEQ ID NO: 1140936 - RNA, 19 nt, Artificial Sequence
  Description of Artificial Sequence: Synthetic oligonucleotide
acacucauuuagaagcaaa

SEQ ID NO: 1140937 - RNA, 19 nt, Artificial Sequence
  Description of Artificial Sequence: Synthetic oligonucleotide
gaagggcaauaucuugaaa

SEQ ID NO: 1140938 - RNA, 19 nt, Artificial Sequence
  Description of Artificial Sequence: Synthetic oligonucleotide
guaagauuucagguacaga

SEQ ID NO: 1140939 - RNA, 19 nt, Artificial Sequence
  Description of Artificial Sequence: Synthetic oligonucleotide
auaguccagaaaaccuuca

SEQ ID NO: 1140940 - RNA, 19 nt, Artificial Sequence
  Description of Artificial Sequence: Synthetic oligonucleotide
cacagcccaauucaucaca

SEQ ID NO: 1140941 - RNA, 19 nt, Artificial Sequence
  Description of Artificial Sequence: Synthetic oligonucleotide
guguuugaacacaggcagc

SEQ ID NO: 1140942 - RNA, 19 nt, Artificial Sequence
  Description of Artificial Sequence: Synthetic oligonucleotide
acucacagcugaguauucu

SEQ ID NO: 1140943 - RNA, 19 nt, Artificial Sequence
  Description of Artificial Sequence: Synthetic oligonucleotide
gaugaaaauccugcugccu

SEQ ID NO: 1140944 - RNA, 19 nt, Artificial Sequence
  Description of Artificial Sequence: Synthetic oligonucleotide
ucucucguguacagccgaa

SEQ ID NO: 1140945 - RNA, 19 nt, Artificial Sequence
  Description of Artificial Sequence: Synthetic oligonucleotide
auguucuauugagaaaguu

SEQ ID NO: 1140946 - RNA, 19 nt, Artificial Sequence
  Description of Artificial Sequence: Synthetic oligonucleotide
aagggguuaugaggguagu

SEQ ID NO: 1140947 - RNA, 19 nt, Artificial Sequence
  Description of Artificial Sequence: Synthetic oligonucleotide
guacagccgaaaacagaag

SEQ ID NO: 1140948 - RNA, 19 nt, Artificial Sequence
  Description of Artificial Sequence: Synthetic oligonucleotide
ugggucgagacagccaaau

SEQ ID NO: 1140949 - RNA, 19 nt, Artificial Sequence
  Description of Artificial Sequence: Synthetic oligonucleotide
acccuagauaugcauugua

SEQ ID NO: 1140950 - RNA, 19 nt, Artificial Sequence
  Description of Artificial Sequence: Synthetic oligonucleotide
ggaggaucuaaggcuuugg

SEQ ID NO: 1140951 - RNA, 19 nt, Artificial Sequence
  Description of Artificial Sequence: Synthetic oligonucleotide
guacagcuuuaagaagggc

SEQ ID NO: 1140952 - RNA, 19 nt, Artificial Sequence
  Description of Artificial Sequence: Synthetic oligonucleotide
agguucuuaauaggcucca

SEQ ID NO: 1140953 - RNA, 19 nt, Artificial Sequence
  Description of Artificial Sequence: Synthetic oligonucleotide
gaaaagggguuaugagggu

SEQ ID NO: 1140954 - RNA, 19 nt, Artificial Sequence
  Description of Artificial Sequence: Synthetic oligonucleotide
agacuauguuacauuuccu

SEQ ID NO: 1140955 - RNA, 19 nt, Artificial Sequence
  Description of Artificial Sequence: Synthetic oligonucleotide
gcauaucucaccuucuccu

SEQ ID NO: 1140956 - RNA, 19 nt, Artificial Sequence
  Description of Artificial Sequence: Synthetic oligonucleotide
aggaggaucuaaggcuuug

SEQ ID NO: 1140957 - RNA, 19 nt, Artificial Sequence
  Description of Artificial Sequence: Synthetic oligonucleotide
agguggucugaauccgcca

SEQ ID NO: 1140958 - RNA, 19 nt, Artificial Sequence
  Description of Artificial Sequence: Synthetic oligonucleotide
ccguaaguuuguaagucuc

SEQ ID NO: 1140959 - RNA, 19 nt, Artificial Sequence
  Description of Artificial Sequence: Synthetic oligonucleotide
gaacucuuagcugcuuaaa

SEQ ID NO: 1140960 - RNA, 19 nt, Artificial Sequence
  Description of Artificial Sequence: Synthetic oligonucleotide
gaggguaguuucccucaga

SEQ ID NO: 1140961 - RNA, 19 nt, Artificial Sequence
  Description of Artificial Sequence: Synthetic oligonucleotide
agccgaaaacagaagccgu

SEQ ID NO: 1140962 - RNA, 19 nt, Artificial Sequence
  Description of Artificial Sequence: Synthetic oligonucleotide
cuuaaccaacuucauuagu

SEQ ID NO: 1140963 - RNA, 19 nt, Artificial Sequence
  Description of Artificial Sequence: Synthetic oligonucleotide
gccaaauauggcuccaaaa

SEQ ID NO: 1140964 - RNA, 19 nt, Artificial Sequence
  Description of Artificial Sequence: Synthetic oligonucleotide
caggaaaugugggaccuga

SEQ ID NO: 1140965 - RNA, 19 nt, Artificial Sequence
  Description of Artificial Sequence: Synthetic oligonucleotide
guaguuucccucagauaga

SEQ ID NO: 1140966 - RNA, 19 nt, Artificial Sequence
  Description of Artificial Sequence: Synthetic oligonucleotide
cugaguauucuucggggcu

SEQ ID NO: 1140967 - RNA, 19 nt, Artificial Sequence
  Description of Artificial Sequence: Synthetic oligonucleotide
gauccgcccggcucucccc

SEQ ID NO: 1140968 - RNA, 19 nt, Artificial Sequence
  Description of Artificial Sequence: Synthetic oligonucleotide
cugaauccgccacagccaa

SEQ ID NO: 1140969 - RNA, 19 nt, Artificial Sequence
  Description of Artificial Sequence: Synthetic oligonucleotide
guagccuccuucuugcuuu

SEQ ID NO: 1140970 - RNA, 19 nt, Artificial Sequence
  Description of Artificial Sequence: Synthetic oligonucleotide
cugccacgaccacaacccg

SEQ ID NO: 1140971 - RNA, 19 nt, Artificial Sequence
  Description of Artificial Sequence: Synthetic oligonucleotide
caugguaccuuauuuucuu

SEQ ID NO: 1140972 - RNA, 19 nt, Artificial Sequence
  Description of Artificial Sequence: Synthetic oligonucleotide
cugccgcuaguguugccac

SEQ ID NO: 1140973 - RNA, 19 nt, Artificial Sequence
  Description of Artificial Sequence: Synthetic oligonucleotide
gggcacuagcuuuacugac

SEQ ID NO: 1140974 - RNA, 19 nt, Artificial Sequence
  Description of Artificial Sequence: Synthetic oligonucleotide
caaacucacagcugaguau

SEQ ID NO: 1140975 - RNA, 19 nt, Artificial Sequence
  Description of Artificial Sequence: Synthetic oligonucleotide
agauugugagguggucuga

SEQ ID NO: 1140976 - RNA, 19 nt, Artificial Sequence
  Description of Artificial Sequence: Synthetic oligonucleotide
guacagacuauguuacauu

SEQ ID NO: 1140977 - RNA, 19 nt, Artificial Sequence
  Description of Artificial Sequence: Synthetic oligonucleotide
ugaggacggguggacuugu

SEQ ID NO: 1140978 - RNA, 19 nt, Artificial Sequence
  Description of Artificial Sequence: Synthetic oligonucleotide
cguguacagccgaaaacag

SEQ ID NO: 1140979 - RNA, 19 nt, Artificial Sequence
  Description of Artificial Sequence: Synthetic oligonucleotide
ugaauccgccacagccaaa

SEQ ID NO: 1140980 - RNA, 19 nt, Artificial Sequence
  Description of Artificial Sequence: Synthetic oligonucleotide
cagcgauguucuauugaga

SEQ ID NO: 1140981 - RNA, 19 nt, Artificial Sequence
  Description of Artificial Sequence: Synthetic oligonucleotide
caccaugcaagccaguuuu

SEQ ID NO: 1140982 - RNA, 19 nt, Artificial Sequence
  Description of Artificial Sequence: Synthetic oligonucleotide
gcacuagcuuuacugacaa

SEQ ID NO: 1140983 - RNA, 19 nt, Artificial Sequence
  Description of Artificial Sequence: Synthetic oligonucleotide
guacuugggugugcucugc

SEQ ID NO: 1140984 - RNA, 19 nt, Artificial Sequence
  Description of Artificial Sequence: Synthetic oligonucleotide
cacauccucuagugucaac

SEQ ID NO: 1140985 - RNA, 19 nt, Artificial Sequence
  Description of Artificial Sequence: Synthetic oligonucleotide
gguacagacuauguuacau

SEQ ID NO: 1140986 - RNA, 19 nt, Artificial Sequence
  Description of Artificial Sequence: Synthetic oligonucleotide
uguugacuccaaggacagu

SEQ ID NO: 1140987 - RNA, 19 nt, Artificial Sequence
  Description of Artificial Sequence: Synthetic oligonucleotide
ggugugauaaaaggagacu

SEQ ID NO: 1140988 - RNA, 19 nt, Artificial Sequence
  Description of Artificial Sequence: Synthetic oligonucleotide
gguauaagagccacccgua

SEQ ID NO: 1140989 - RNA, 19 nt, Artificial Sequence
  Description of Artificial Sequence: Synthetic oligonucleotide
gcuccacacucauuuagaa

SEQ ID NO: 1140990 - RNA, 19 nt, Artificial Sequence
  Description of Artificial Sequence: Synthetic oligonucleotide
ccaaacucacagcugagua

SEQ ID NO: 1140991 - RNA, 19 nt, Artificial Sequence
  Description of Artificial Sequence: Synthetic oligonucleotide
ugccgcuaguguugccacu

SEQ ID NO: 1140992 - RNA, 19 nt, Artificial Sequence
  Description of Artificial Sequence: Synthetic oligonucleotide
cuucuaugucgccuccaaa

SEQ ID NO: 1140993 - RNA, 19 nt, Artificial Sequence
  Description of Artificial Sequence: Synthetic oligonucleotide
ugucaacagcgauguucua

SEQ ID NO: 1140994 - RNA, 19 nt, Artificial Sequence
  Description of Artificial Sequence: Synthetic oligonucleotide
gcuagaagaugaaaauccu

SEQ ID NO: 1140995 - RNA, 19 nt, Artificial Sequence
  Description of Artificial Sequence: Synthetic oligonucleotide
cacugggucgagacagcca

SEQ ID NO: 1140996 - RNA, 19 nt, Artificial Sequence
  Description of Artificial Sequence: Synthetic oligonucleotide
cacacccugguggccaaac

SEQ ID NO: 1140997 - RNA, 19 nt, Artificial Sequence
  Description of Artificial Sequence: Synthetic oligonucleotide
ggacggguggacuugugcu

SEQ ID NO: 1140998 - RNA, 19 nt, Artificial Sequence
  Description of Artificial Sequence: Synthetic oligonucleotide
cacccguaaguuuguaagu

SEQ ID NO: 1140999 - RNA, 19 nt, Artificial Sequence
  Description of Artificial Sequence: Synthetic oligonucleotide
gagagcgucugugaggcuu

SEQ ID NO: 1141000 - RNA, 19 nt, Artificial Sequence
  Description of Artificial Sequence: Synthetic oligonucleotide
uccuugcuccacacucauu

SEQ ID NO: 1141001 - RNA, 19 nt, Artificial Sequence
  Description of Artificial Sequence: Synthetic oligonucleotide
auccgcccggcucuccccu

SEQ ID NO: 1141002 - RNA, 19 nt, Artificial Sequence
  Description of Artificial Sequence: Synthetic oligonucleotide
ggucugaauccgccacagc

SEQ ID NO: 1141003 - RNA, 19 nt, Artificial Sequence
  Description of Artificial Sequence: Synthetic oligonucleotide
caguuugggcucauuuagu

SEQ ID NO: 1141004 - RNA, 19 nt, Artificial Sequence
  Description of Artificial Sequence: Synthetic oligonucleotide
gcgauguucuauugagaaa

SEQ ID NO: 1141005 - RNA, 19 nt, Artificial Sequence
  Description of Artificial Sequence: Synthetic oligonucleotide
cuguuucaccugccacgac

SEQ ID NO: 1141006 - RNA, 19 nt, Artificial Sequence
  Description of Artificial Sequence: Synthetic oligonucleotide
aucucaccuucuccuggua

SEQ ID NO: 1141007 - RNA, 19 nt, Artificial Sequence
  Description of Artificial Sequence: Synthetic oligonucleotide
gccgaaaacagaagccguc

SEQ ID NO: 1141008 - RNA, 19 nt, Artificial Sequence
  Description of Artificial Sequence: Synthetic oligonucleotide
cgaccaauuggugugauaa

SEQ ID NO: 1141009 - RNA, 19 nt, Artificial Sequence
  Description of Artificial Sequence: Synthetic oligonucleotide
gggacaucuuuggauuuuc

SEQ ID NO: 1141010 - RNA, 19 nt, Artificial Sequence
  Description of Artificial Sequence: Synthetic oligonucleotide
acggguggacuugugcuuu

SEQ ID NO: 1141011 - RNA, 19 nt, Artificial Sequence
  Description of Artificial Sequence: Synthetic oligonucleotide
caauuccguaaugauuugu

SEQ ID NO: 1141012 - RNA, 19 nt, Artificial Sequence
  Description of Artificial Sequence: Synthetic oligonucleotide
gacggguggacuugugcuu

SEQ ID NO: 1141013 - RNA, 19 nt, Artificial Sequence
  Description of Artificial Sequence: Synthetic oligonucleotide
ucagaacgguagccuccuu

SEQ ID NO: 1141014 - RNA, 19 nt, Artificial Sequence
  Description of Artificial Sequence: Synthetic oligonucleotide
uccgaccaauuggugugau

SEQ ID NO: 1141015 - RNA, 19 nt, Artificial Sequence
  Description of Artificial Sequence: Synthetic oligonucleotide
agaagccguucucgguguu

SEQ ID NO: 1141016 - RNA, 19 nt, Artificial Sequence
  Description of Artificial Sequence: Synthetic oligonucleotide
cacacucauuuagaagcaa

SEQ ID NO: 1141017 - RNA, 19 nt, Artificial Sequence
  Description of Artificial Sequence: Synthetic oligonucleotide
agaagccgucucggauccg

SEQ ID NO: 1141018 - RNA, 19 nt, Artificial Sequence
  Description of Artificial Sequence: Synthetic oligonucleotide
agggguuaugaggguaguu

SEQ ID NO: 1141019 - RNA, 19 nt, Artificial Sequence
  Description of Artificial Sequence: Synthetic oligonucleotide
cucuagugucaacagcgau

SEQ ID NO: 1141020 - RNA, 19 nt, Artificial Sequence
  Description of Artificial Sequence: Synthetic oligonucleotide
gaggacggguggacuugug

SEQ ID NO: 1141021 - RNA, 19 nt, Artificial Sequence
  Description of Artificial Sequence: Synthetic oligonucleotide
cucggauccgcccggcucu

SEQ ID NO: 1141022 - RNA, 19 nt, Artificial Sequence
  Description of Artificial Sequence: Synthetic oligonucleotide
agcaaggugcuggcccagu

SEQ ID NO: 1141023 - RNA, 19 nt, Artificial Sequence
  Description of Artificial Sequence: Synthetic oligonucleotide
guauucuucggggcugggu

SEQ ID NO: 1141024 - RNA, 19 nt, Artificial Sequence
  Description of Artificial Sequence: Synthetic oligonucleotide
uagugucaacagcgauguu

SEQ ID NO: 1141025 - RNA, 19 nt, Artificial Sequence
  Description of Artificial Sequence: Synthetic oligonucleotide
gccguucucgguguugaac

SEQ ID NO: 1141026 - RNA, 19 nt, Artificial Sequence
  Description of Artificial Sequence: Synthetic oligonucleotide
cagaagccguucucggugu

SEQ ID NO: 1141027 - RNA, 19 nt, Artificial Sequence
  Description of Artificial Sequence: Synthetic oligonucleotide
gggguuaugaggguaguuu

SEQ ID NO: 1141028 - RNA, 19 nt, Artificial Sequence
  Description of Artificial Sequence: Synthetic oligonucleotide
gggcuggguacagacuaug

SEQ ID NO: 1141029 - RNA, 19 nt, Artificial Sequence
  Description of Artificial Sequence: Synthetic oligonucleotide
gcuaguguugccacugggu

SEQ ID NO: 1141030 - RNA, 19 nt, Artificial Sequence
  Description of Artificial Sequence: Synthetic oligonucleotide
cagauagacucuggcauau

SEQ ID NO: 1141031 - RNA, 19 nt, Artificial Sequence
  Description of Artificial Sequence: Synthetic oligonucleotide
ggguaguuucccucagaua

SEQ ID NO: 1141032 - RNA, 19 nt, Artificial Sequence
  Description of Artificial Sequence: Synthetic oligonucleotide
ccucuagugucaacagcga

SEQ ID NO: 1141033 - RNA, 19 nt, Artificial Sequence
  Description of Artificial Sequence: Synthetic oligonucleotide
ccguucucgguguugaacu

SEQ ID NO: 1141034 - RNA, 19 nt, Artificial Sequence
  Description of Artificial Sequence: Synthetic oligonucleotide
uccgcccggcucuccccug

SEQ ID NO: 1141035 - RNA, 19 nt, Artificial Sequence
  Description of Artificial Sequence: Synthetic oligonucleotide
cucucguguacagccgaaa

SEQ ID NO: 1141036 - RNA, 19 nt, Artificial Sequence
  Description of Artificial Sequence: Synthetic oligonucleotide
gcuggguacagacuauguu

SEQ ID NO: 1141037 - RNA, 19 nt, Artificial Sequence
  Description of Artificial Sequence: Synthetic oligonucleotide
gccacccguaaguuuguaa

SEQ ID NO: 1141038 - RNA, 19 nt, Artificial Sequence
  Description of Artificial Sequence: Synthetic oligonucleotide
agccguucucgguguugaa

SEQ ID NO: 1141039 - RNA, 19 nt, Artificial Sequence
  Description of Artificial Sequence: Synthetic oligonucleotide
ccgcuaguguugccacugg

SEQ ID NO: 1141040 - RNA, 19 nt, Artificial Sequence
  Description of Artificial Sequence: Synthetic oligonucleotide
gguucuuaauaggcuccaa

SEQ ID NO: 1141041 - RNA, 19 nt, Artificial Sequence
  Description of Artificial Sequence: Synthetic oligonucleotide
cccguaaguuuguaagucu

SEQ ID NO: 1141042 - RNA, 19 nt, Artificial Sequence
  Description of Artificial Sequence: Synthetic oligonucleotide
ccucaucagaaacuaaguu

SEQ ID NO: 1141043 - RNA, 19 nt, Artificial Sequence
  Description of Artificial Sequence: Synthetic oligonucleotide
guccauucucacagcccaa

SEQ ID NO: 1141044 - RNA, 19 nt, Artificial Sequence
  Description of Artificial Sequence: Synthetic oligonucleotide
cacacacccugguggccaa

SEQ ID NO: 1141045 - RNA, 19 nt, Artificial Sequence
  Description of Artificial Sequence: Synthetic oligonucleotide
cugggucgagacagccaaa

SEQ ID NO: 1141046 - RNA, 19 nt, Artificial Sequence
  Description of Artificial Sequence: Synthetic oligonucleotide
ccgucucggauccgcccgg

SEQ ID NO: 1141047 - RNA, 19 nt, Artificial Sequence
  Description of Artificial Sequence: Synthetic oligonucleotide
cggccaguacagcuuuaag

SEQ ID NO: 1141048 - RNA, 19 nt, Artificial Sequence
  Description of Artificial Sequence: Synthetic oligonucleotide
gaggaggaucuaaggcuuu

SEQ ID NO: 1141049 - RNA, 19 nt, Artificial Sequence
  Description of Artificial Sequence: Synthetic oligonucleotide
cugucguugcagggcacua

SEQ ID NO: 1141050 - RNA, 19 nt, Artificial Sequence
  Description of Artificial Sequence: Synthetic oligonucleotide
ccccugucguugcagggca

SEQ ID NO: 1141051 - RNA, 19 nt, Artificial Sequence
  Description of Artificial Sequence: Synthetic oligonucleotide
gagccacccguaaguuugu

SEQ ID NO: 1141052 - RNA, 19 nt, Artificial Sequence
  Description of Artificial Sequence: Synthetic oligonucleotide
ggcuggguacagacuaugu

SEQ ID NO: 1141053 - RNA, 19 nt, Artificial Sequence
  Description of Artificial Sequence: Synthetic oligonucleotide
agccacccguaaguuugua

SEQ ID NO: 1141054 - RNA, 19 nt, Artificial Sequence
  Description of Artificial Sequence: Synthetic oligonucleotide
cuugggcugucuccaccau

SEQ ID NO: 1141055 - RNA, 19 nt, Artificial Sequence
  Description of Artificial Sequence: Synthetic oligonucleotide
gggcugucuccaccaugca

SEQ ID NO: 1141056 - RNA, 19 nt, Artificial Sequence
  Description of Artificial Sequence: Synthetic oligonucleotide
gcggccaguacagcuuuaa

SEQ ID NO: 1141057 - RNA, 19 nt, Artificial Sequence
  Description of Artificial Sequence: Synthetic oligonucleotide
gucucggauccgcccggcu

SEQ ID NO: 1141058 - RNA, 19 nt, Artificial Sequence
  Description of Artificial Sequence: Synthetic oligonucleotide
cccugucguugcagggcac

SEQ ID NO: 1141059 - RNA, 19 nt, Artificial Sequence
  Description of Artificial Sequence: Synthetic oligonucleotide
ggcccaguggagucaguuu

SEQ ID NO: 1141060 - RNA, 19 nt, Artificial Sequence
  Description of Artificial Sequence: Synthetic oligonucleotide
ccacgaccacaacccggug

SEQ ID NO: 1141061 - RNA, 19 nt, Artificial Sequence
  Description of Artificial Sequence: Synthetic oligonucleotide
cagcggccaguacagcuuu

SEQ ID NO: 1141062 - RNA, 19 nt, Artificial Sequence
  Description of Artificial Sequence: Synthetic oligonucleotide
ccagaggcacacguaagau

SEQ ID NO: 1141063 - RNA, 19 nt, Artificial Sequence
  Description of Artificial Sequence: Synthetic oligonucleotide
cggcucuccccugucguug

SEQ ID NO: 1141064 - RNA, 19 nt, Artificial Sequence
  Description of Artificial Sequence: Synthetic oligonucleotide
agcggccaguacagcuuua

SEQ ID NO: 1141065 - RNA, 19 nt, Artificial Sequence
  Description of Artificial Sequence: Synthetic oligonucleotide
ccgaccaauuggugugaua

SEQ ID NO: 1141066 - RNA, 19 nt, Artificial Sequence
  Description of Artificial Sequence: Synthetic oligonucleotide
ccguaaugauuuguagaau

SEQ ID NO: 1141067 - RNA, 19 nt, Artificial Sequence
  Description of Artificial Sequence: Synthetic oligonucleotide
cgucucggauccgcccggc

SEQ ID NO: 1141068 - RNA, 19 nt, Artificial Sequence
  Description of Artificial Sequence: Synthetic oligonucleotide
cugcugccuuaaccaacuu

SEQ ID NO: 1141069 - RNA, 19 nt, Artificial Sequence
  Description of Artificial Sequence: Synthetic oligonucleotide
ccggcucuccccugucguu

SEQ ID NO: 1141070 - RNA, 19 nt, Artificial Sequence
  Description of Artificial Sequence: Synthetic oligonucleotide
ccacaacccggugccuuuu

SEQ ID NO: 1141071 - RNA, 19 nt, Artificial Sequence
  Description of Artificial Sequence: Synthetic oligonucleotide
aaauggcaaaauuugauac

SEQ ID NO: 1141072 - RNA, 19 nt, Artificial Sequence
  Description of Artificial Sequence: Synthetic oligonucleotide
uaugcuagggcuuagaacc

SEQ ID NO: 1141073 - RNA, 19 nt, Artificial Sequence
  Description of Artificial Sequence: Synthetic oligonucleotide
  modified_base (16)..(16): a, c, u, g, unknown or other
uaagaauaggcuuuunuag

SEQ ID NO: 1141074 - RNA, 19 nt, Artificial Sequence
  Description of Artificial Sequence: Synthetic oligonucleotide
gauaguuaaacucuguugc

SEQ ID NO: 1141075 - RNA, 19 nt, Artificial Sequence
  Description of Artificial Sequence: Synthetic oligonucleotide
aauauuaaaacguaccuuu

SEQ ID NO: 1141076 - RNA, 19 nt, Artificial Sequence
  Description of Artificial Sequence: Synthetic oligonucleotide
uuuggauuaacuaaauaca

SEQ ID NO: 1141077 - RNA, 19 nt, Artificial Sequence
  Description of Artificial Sequence: Synthetic oligonucleotide
  modified_base (15)..(15): a, c, u, g, unknown or other
aagaauaggcuuuunuagg

SEQ ID NO: 1141078 - RNA, 19 nt, Artificial Sequence
  Description of Artificial Sequence: Synthetic oligonucleotide
aagaaauauccccaacggc

SEQ ID NO: 1141079 - RNA, 19 nt, Artificial Sequence
  Description of Artificial Sequence: Synthetic oligonucleotide
ugcuguaugaaucagacaa

SEQ ID NO: 1141080 - RNA, 19 nt, Artificial Sequence
  Description of Artificial Sequence: Synthetic oligonucleotide
ucugcaggaagaaauaucc

SEQ ID NO: 1141081 - RNA, 19 nt, Artificial Sequence
  Description of Artificial Sequence: Synthetic oligonucleotide
gaagaaauauccccaacgg

SEQ ID NO: 1141082 - RNA, 19 nt, Artificial Sequence
  Description of Artificial Sequence: Synthetic oligonucleotide
acauagaauuuauauuucc

SEQ ID NO: 1141083 - RNA, 19 nt, Artificial Sequence
  Description of Artificial Sequence: Synthetic oligonucleotide
  modified_base (5)..(5): a, c, u, g, unknown or other
uuuunuagggauuuccgcc

SEQ ID NO: 1141084 - RNA, 19 nt, Artificial Sequence
  Description of Artificial Sequence: Synthetic oligonucleotide
aaauccacuaguuuuacau

SEQ ID NO: 1141085 - RNA, 19 nt, Artificial Sequence
  Description of Artificial Sequence: Synthetic oligonucleotide
uuauguucaaauauggaaa

SEQ ID NO: 1141086 - RNA, 19 nt, Artificial Sequence
  Description of Artificial Sequence: Synthetic oligonucleotide
agcgcaaauauccacauag

SEQ ID NO: 1141087 - RNA, 19 nt, Artificial Sequence
  Description of Artificial Sequence: Synthetic oligonucleotide
aaucagacaagaccgagca

SEQ ID NO: 1141088 - RNA, 19 nt, Artificial Sequence
  Description of Artificial Sequence: Synthetic oligonucleotide
guaugaaucagacaagacc

SEQ ID NO: 1141089 - RNA, 19 nt, Artificial Sequence
  Description of Artificial Sequence: Synthetic oligonucleotide
aauccaagaagucaaaaua

SEQ ID NO: 1141090 - RNA, 19 nt, Artificial Sequence
  Description of Artificial Sequence: Synthetic oligonucleotide
uguccaaugaauauuccug

SEQ ID NO: 1141091 - RNA, 19 nt, Artificial Sequence
  Description of Artificial Sequence: Synthetic oligonucleotide
aacguaacugacuuuauaa

SEQ ID NO: 1141092 - RNA, 19 nt, Artificial Sequence
  Description of Artificial Sequence: Synthetic oligonucleotide
uguaucacagcauaugaac

SEQ ID NO: 1141093 - RNA, 19 nt, Artificial Sequence
  Description of Artificial Sequence: Synthetic oligonucleotide
aaugccauacauaaaagga

SEQ ID NO: 1141094 - RNA, 19 nt, Artificial Sequence
  Description of Artificial Sequence: Synthetic oligonucleotide
uuagaaccuaauuagaaau

SEQ ID NO: 1141095 - RNA, 19 nt, Artificial Sequence
  Description of Artificial Sequence: Synthetic oligonucleotide
aguggcaccaagaugaccc

SEQ ID NO: 1141096 - RNA, 19 nt, Artificial Sequence
  Description of Artificial Sequence: Synthetic oligonucleotide
aauaccugccauuuggggu

SEQ ID NO: 1141097 - RNA, 19 nt, Artificial Sequence
  Description of Artificial Sequence: Synthetic oligonucleotide
aaugaguaacauaauuccg

SEQ ID NO: 1141098 - RNA, 19 nt, Artificial Sequence
  Description of Artificial Sequence: Synthetic oligonucleotide
ucuuaacguccucacaugg

SEQ ID NO: 1141099 - RNA, 19 nt, Artificial Sequence
  Description of Artificial Sequence: Synthetic oligonucleotide
cuaauauuaaaguuguaca

SEQ ID NO: 1141100 - RNA, 19 nt, Artificial Sequence
  Description of Artificial Sequence: Synthetic oligonucleotide
aagaguauuaaagauacuu

SEQ ID NO: 1141101 - RNA, 19 nt, Artificial Sequence
  Description of Artificial Sequence: Synthetic oligonucleotide
aaacguaccuuuauguuuc

SEQ ID NO: 1141102 - RNA, 19 nt, Artificial Sequence
  Description of Artificial Sequence: Synthetic oligonucleotide
aaaacguaccuuuauguuu

SEQ ID NO: 1141103 - RNA, 19 nt, Artificial Sequence
  Description of Artificial Sequence: Synthetic oligonucleotide
uguguaucacagcauauga

SEQ ID NO: 1141104 - RNA, 19 nt, Artificial Sequence
  Description of Artificial Sequence: Synthetic oligonucleotide
acuagcgucauugugcagc

SEQ ID NO: 1141105 - RNA, 19 nt, Artificial Sequence
  Description of Artificial Sequence: Synthetic oligonucleotide
accuuuauguuucccaacg

SEQ ID NO: 1141106 - RNA, 19 nt, Artificial Sequence
  Description of Artificial Sequence: Synthetic oligonucleotide
uggugaaucgcacauagaa

SEQ ID NO: 1141107 - RNA, 19 nt, Artificial Sequence
  Description of Artificial Sequence: Synthetic oligonucleotide
aguaagcgcaaauauccac

SEQ ID NO: 1141108 - RNA, 19 nt, Artificial Sequence
  Description of Artificial Sequence: Synthetic oligonucleotide
cauuauagagaacagccug

SEQ ID NO: 1141109 - RNA, 19 nt, Artificial Sequence
  Description of Artificial Sequence: Synthetic oligonucleotide
accagagcgacauacauga

SEQ ID NO: 1141110 - RNA, 19 nt, Artificial Sequence
  Description of Artificial Sequence: Synthetic oligonucleotide
auauauucagaaugggucu

SEQ ID NO: 1141111 - RNA, 19 nt, Artificial Sequence
  Description of Artificial Sequence: Synthetic oligonucleotide
acgaaacacaauuuuaugu

SEQ ID NO: 1141112 - RNA, 19 nt, Artificial Sequence
  Description of Artificial Sequence: Synthetic oligonucleotide
aaaauccuaguuucuguca

SEQ ID NO: 1141113 - RNA, 19 nt, Artificial Sequence
  Description of Artificial Sequence: Synthetic oligonucleotide
  modified_base (6)..(6): a, c, u, g, unknown or other
cuuuunuagggauuuccgc

SEQ ID NO: 1141114 - RNA, 19 nt, Artificial Sequence
  Description of Artificial Sequence: Synthetic oligonucleotide
ggaagaaauauccccaacg

SEQ ID NO: 1141115 - RNA, 19 nt, Artificial Sequence
  Description of Artificial Sequence: Synthetic oligonucleotide
  modified_base (4)..(4): a, c, u, g, unknown or other
uuunuagggauuuccgccu

SEQ ID NO: 1141116 - RNA, 19 nt, Artificial Sequence
  Description of Artificial Sequence: Synthetic oligonucleotide
ucgagaauagcgcuggcug

SEQ ID NO: 1141117 - RNA, 19 nt, Artificial Sequence
  Description of Artificial Sequence: Synthetic oligonucleotide
uuggauuaacuaaauacau

SEQ ID NO: 1141118 - RNA, 19 nt, Artificial Sequence
  Description of Artificial Sequence: Synthetic oligonucleotide
aauauuccuguugccauuc

SEQ ID NO: 1141119 - RNA, 19 nt, Artificial Sequence
  Description of Artificial Sequence: Synthetic oligonucleotide
acauccguuggugaaaacc

SEQ ID NO: 1141120 - RNA, 19 nt, Artificial Sequence
  Description of Artificial Sequence: Synthetic oligonucleotide
uuauacgaaacacaauuuu

SEQ ID NO: 1141121 - RNA, 19 nt, Artificial Sequence
  Description of Artificial Sequence: Synthetic oligonucleotide
aaccaagucuucuggugac

SEQ ID NO: 1141122 - RNA, 19 nt, Artificial Sequence
  Description of Artificial Sequence: Synthetic oligonucleotide
agaaauauccccaacggcu

SEQ ID NO: 1141123 - RNA, 19 nt, Artificial Sequence
  Description of Artificial Sequence: Synthetic oligonucleotide
aauccuaguuucugucaac

SEQ ID NO: 1141124 - RNA, 19 nt, Artificial Sequence
  Description of Artificial Sequence: Synthetic oligonucleotide
uauuuguaagaauaggcuu

SEQ ID NO: 1141125 - RNA, 19 nt, Artificial Sequence
  Description of Artificial Sequence: Synthetic oligonucleotide
auaccugccauuugggguc

SEQ ID NO: 1141126 - RNA, 19 nt, Artificial Sequence
  Description of Artificial Sequence: Synthetic oligonucleotide
acgcuaguuacucaucugg

SEQ ID NO: 1141127 - RNA, 19 nt, Artificial Sequence
  Description of Artificial Sequence: Synthetic oligonucleotide
cuagacaaccagaacacac

SEQ ID NO: 1141128 - RNA, 19 nt, Artificial Sequence
  Description of Artificial Sequence: Synthetic oligonucleotide
acaauaaacugguaauacu

SEQ ID NO: 1141129 - RNA, 19 nt, Artificial Sequence
  Description of Artificial Sequence: Synthetic oligonucleotide
aaauauuaaaacguaccuu

SEQ ID NO: 1141130 - RNA, 19 nt, Artificial Sequence
  Description of Artificial Sequence: Synthetic oligonucleotide
aagaccgagcaucaauuug

SEQ ID NO: 1141131 - RNA, 19 nt, Artificial Sequence
  Description of Artificial Sequence: Synthetic oligonucleotide
aaggccgucacugaaguug

SEQ ID NO: 1141132 - RNA, 19 nt, Artificial Sequence
  Description of Artificial Sequence: Synthetic oligonucleotide
ucuaacuccagcaggcaac

SEQ ID NO: 1141133 - RNA, 19 nt, Artificial Sequence
  Description of Artificial Sequence: Synthetic oligonucleotide
uuuauacgaaacacaauuu

SEQ ID NO: 1141134 - RNA, 19 nt, Artificial Sequence
  Description of Artificial Sequence: Synthetic oligonucleotide
uacgaaacacaauuuuaug

SEQ ID NO: 1141135 - RNA, 19 nt, Artificial Sequence
  Description of Artificial Sequence: Synthetic oligonucleotide
aaauccuaguuucugucaa

SEQ ID NO: 1141136 - RNA, 19 nt, Artificial Sequence
  Description of Artificial Sequence: Synthetic oligonucleotide
uacaugcuguguaucacag

SEQ ID NO: 1141137 - RNA, 19 nt, Artificial Sequence
  Description of Artificial Sequence: Synthetic oligonucleotide
cuaaauacauuugcagggg

SEQ ID NO: 1141138 - RNA, 19 nt, Artificial Sequence
  Description of Artificial Sequence: Synthetic oligonucleotide
agaacacacaaucacguaa

SEQ ID NO: 1141139 - RNA, 19 nt, Artificial Sequence
  Description of Artificial Sequence: Synthetic oligonucleotide
uaucaguggaagucgagga

SEQ ID NO: 1141140 - RNA, 19 nt, Artificial Sequence
  Description of Artificial Sequence: Synthetic oligonucleotide
agaaacuugaaaacaccgg

SEQ ID NO: 1141141 - RNA, 19 nt, Artificial Sequence
  Description of Artificial Sequence: Synthetic oligonucleotide
ucgcacauagaauuuauau

SEQ ID NO: 1141142 - RNA, 19 nt, Artificial Sequence
  Description of Artificial Sequence: Synthetic oligonucleotide
cauacaugaacaagccagc

SEQ ID NO: 1141143 - RNA, 19 nt, Artificial Sequence
  Description of Artificial Sequence: Synthetic oligonucleotide
auaaacugguaauacuggu

SEQ ID NO: 1141144 - RNA, 19 nt, Artificial Sequence
  Description of Artificial Sequence: Synthetic oligonucleotide
uccauacacagauuuaaaa

SEQ ID NO: 1141145 - RNA, 19 nt, Artificial Sequence
  Description of Artificial Sequence: Synthetic oligonucleotide
uuaacguccucacauggau

SEQ ID NO: 1141146 - RNA, 19 nt, Artificial Sequence
  Description of Artificial Sequence: Synthetic oligonucleotide
aagccaggcuauuuguaag

SEQ ID NO: 1141147 - RNA, 19 nt, Artificial Sequence
  Description of Artificial Sequence: Synthetic oligonucleotide
aaucgcaaggccgucacug

SEQ ID NO: 1141148 - RNA, 19 nt, Artificial Sequence
  Description of Artificial Sequence: Synthetic oligonucleotide
ugaauauuccuguugccau

SEQ ID NO: 1141149 - RNA, 19 nt, Artificial Sequence
  Description of Artificial Sequence: Synthetic oligonucleotide
acagcccuaaugcaucuac

SEQ ID NO: 1141150 - RNA, 19 nt, Artificial Sequence
  Description of Artificial Sequence: Synthetic oligonucleotide
uguaugaaucagacaagac

SEQ ID NO: 1141151 - RNA, 19 nt, Artificial Sequence
  Description of Artificial Sequence: Synthetic oligonucleotide
guccuagacaaccagaaca

SEQ ID NO: 1141152 - RNA, 19 nt, Artificial Sequence
  Description of Artificial Sequence: Synthetic oligonucleotide
aaccuaauuagaaauuuau

SEQ ID NO: 1141153 - RNA, 19 nt, Artificial Sequence
  Description of Artificial Sequence: Synthetic oligonucleotide
uguaacauccguuggugaa

SEQ ID NO: 1141154 - RNA, 19 nt, Artificial Sequence
  Description of Artificial Sequence: Synthetic oligonucleotide
ugucaugccaaaacauaca

SEQ ID NO: 1141155 - RNA, 19 nt, Artificial Sequence
  Description of Artificial Sequence: Synthetic oligonucleotide
aauuagaaauuuauacgaa

SEQ ID NO: 1141156 - RNA, 19 nt, Artificial Sequence
  Description of Artificial Sequence: Synthetic oligonucleotide
ugaguaacauaauuccgaa

SEQ ID NO: 1141157 - RNA, 19 nt, Artificial Sequence
  Description of Artificial Sequence: Synthetic oligonucleotide
agggcuuagaaccuaauua

SEQ ID NO: 1141158 - RNA, 19 nt, Artificial Sequence
  Description of Artificial Sequence: Synthetic oligonucleotide
aacauaauuccgaaaccca

SEQ ID NO: 1141159 - RNA, 19 nt, Artificial Sequence
  Description of Artificial Sequence: Synthetic oligonucleotide
aacguaccuuuauguuucc

SEQ ID NO: 1141160 - RNA, 19 nt, Artificial Sequence
  Description of Artificial Sequence: Synthetic oligonucleotide
uaaaacguaccuuuauguu

SEQ ID NO: 1141161 - RNA, 19 nt, Artificial Sequence
  Description of Artificial Sequence: Synthetic oligonucleotide
auacauaaaaggacgguug

SEQ ID NO: 1141162 - RNA, 19 nt, Artificial Sequence
  Description of Artificial Sequence: Synthetic oligonucleotide
aggaagaaauauccccaac

SEQ ID NO: 1141163 - RNA, 19 nt, Artificial Sequence
  Description of Artificial Sequence: Synthetic oligonucleotide
uuacaugcuguguaucaca

SEQ ID NO: 1141164 - RNA, 19 nt, Artificial Sequence
  Description of Artificial Sequence: Synthetic oligonucleotide
aacuccagcaggcaacuaa

SEQ ID NO: 1141165 - RNA, 19 nt, Artificial Sequence
  Description of Artificial Sequence: Synthetic oligonucleotide
ugggaugucagcagcuuug

SEQ ID NO: 1141166 - RNA, 19 nt, Artificial Sequence
  Description of Artificial Sequence: Synthetic oligonucleotide
uuacucaucuggccuaucu

SEQ ID NO: 1141167 - RNA, 19 nt, Artificial Sequence
  Description of Artificial Sequence: Synthetic oligonucleotide
gaaauggcuacgaagccac

SEQ ID NO: 1141168 - RNA, 19 nt, Artificial Sequence
  Description of Artificial Sequence: Synthetic oligonucleotide
auaguuaaacucuguugca

SEQ ID NO: 1141169 - RNA, 19 nt, Artificial Sequence
  Description of Artificial Sequence: Synthetic oligonucleotide
caaaagaguauuaaagaua

SEQ ID NO: 1141170 - RNA, 19 nt, Artificial Sequence
  Description of Artificial Sequence: Synthetic oligonucleotide
gggcuuagaaccuaauuag

SEQ ID NO: 1141171 - RNA, 19 nt, Artificial Sequence
  Description of Artificial Sequence: Synthetic oligonucleotide
guaucaguggaagucgagg

SEQ ID NO: 1141172 - RNA, 19 nt, Artificial Sequence
  Description of Artificial Sequence: Synthetic oligonucleotide
uccguuggugaaaaccaag

SEQ ID NO: 1141173 - RNA, 19 nt, Artificial Sequence
  Description of Artificial Sequence: Synthetic oligonucleotide
aacggcugcauccgugauc

SEQ ID NO: 1141174 - RNA, 19 nt, Artificial Sequence
  Description of Artificial Sequence: Synthetic oligonucleotide
uuugaguguaacauccguu

SEQ ID NO: 1141175 - RNA, 19 nt, Artificial Sequence
  Description of Artificial Sequence: Synthetic oligonucleotide
uaaaaggacgguugcuuac

SEQ ID NO: 1141176 - RNA, 19 nt, Artificial Sequence
  Description of Artificial Sequence: Synthetic oligonucleotide
ucuaugcuagggcuuagaa

SEQ ID NO: 1141177 - RNA, 19 nt, Artificial Sequence
  Description of Artificial Sequence: Synthetic oligonucleotide
uaauacuggugaaucgcac

SEQ ID NO: 1141178 - RNA, 19 nt, Artificial Sequence
  Description of Artificial Sequence: Synthetic oligonucleotide
uggauuaacuaaauacauu

SEQ ID NO: 1141179 - RNA, 19 nt, Artificial Sequence
  Description of Artificial Sequence: Synthetic oligonucleotide
aaagagagcaagugcuuuu

SEQ ID NO: 1141180 - RNA, 19 nt, Artificial Sequence
  Description of Artificial Sequence: Synthetic oligonucleotide
agagcgacauacaugaaca

SEQ ID NO: 1141181 - RNA, 19 nt, Artificial Sequence
  Description of Artificial Sequence: Synthetic oligonucleotide
ucuccauacacagauuuaa

SEQ ID NO: 1141182 - RNA, 19 nt, Artificial Sequence
  Description of Artificial Sequence: Synthetic oligonucleotide
acaagccagcaguaagcgc

SEQ ID NO: 1141183 - RNA, 19 nt, Artificial Sequence
  Description of Artificial Sequence: Synthetic oligonucleotide
cuaugcuagggcuuagaac

SEQ ID NO: 1141184 - RNA, 19 nt, Artificial Sequence
  Description of Artificial Sequence: Synthetic oligonucleotide
ucacuagcgucauugugca

SEQ ID NO: 1141185 - RNA, 19 nt, Artificial Sequence
  Description of Artificial Sequence: Synthetic oligonucleotide
ugcuugucuaugcuagggc

SEQ ID NO: 1141186 - RNA, 19 nt, Artificial Sequence
  Description of Artificial Sequence: Synthetic oligonucleotide
gaugugaugguagucguga

SEQ ID NO: 1141187 - RNA, 19 nt, Artificial Sequence
  Description of Artificial Sequence: Synthetic oligonucleotide
aacacacaaucacguaacu

SEQ ID NO: 1141188 - RNA, 19 nt, Artificial Sequence
  Description of Artificial Sequence: Synthetic oligonucleotide
uucugcaggaagaaauauc

SEQ ID NO: 1141189 - RNA, 19 nt, Artificial Sequence
  Description of Artificial Sequence: Synthetic oligonucleotide
gaacacacaaucacguaac

SEQ ID NO: 1141190 - RNA, 19 nt, Artificial Sequence
  Description of Artificial Sequence: Synthetic oligonucleotide
acauaauuccgaaacccag

SEQ ID NO: 1141191 - RNA, 19 nt, Artificial Sequence
  Description of Artificial Sequence: Synthetic oligonucleotide
ugucaacugacacauuguu

SEQ ID NO: 1141192 - RNA, 19 nt, Artificial Sequence
  Description of Artificial Sequence: Synthetic oligonucleotide
  modified_base (7)..(7): a, c, u, g, unknown or other
gcuuuunuagggauuuccg

SEQ ID NO: 1141193 - RNA, 19 nt, Artificial Sequence
  Description of Artificial Sequence: Synthetic oligonucleotide
aaaaggacgguugcuuaca

SEQ ID NO: 1141194 - RNA, 19 nt, Artificial Sequence
  Description of Artificial Sequence: Synthetic oligonucleotide
uccagcaggcaacuaauau

SEQ ID NO: 1141195 - RNA, 19 nt, Artificial Sequence
  Description of Artificial Sequence: Synthetic oligonucleotide
aaugggucuuaacguccuc

SEQ ID NO: 1141196 - RNA, 19 nt, Artificial Sequence
  Description of Artificial Sequence: Synthetic oligonucleotide
uagaaccuaauuagaaauu

SEQ ID NO: 1141197 - RNA, 19 nt, Artificial Sequence
  Description of Artificial Sequence: Synthetic oligonucleotide
aauggcuacgaagccacca

SEQ ID NO: 1141198 - RNA, 19 nt, Artificial Sequence
  Description of Artificial Sequence: Synthetic oligonucleotide
auauuccuguugccauucc

SEQ ID NO: 1141199 - RNA, 19 nt, Artificial Sequence
  Description of Artificial Sequence: Synthetic oligonucleotide
ggugacacacgcuaguuac

SEQ ID NO: 1141200 - RNA, 19 nt, Artificial Sequence
  Description of Artificial Sequence: Synthetic oligonucleotide
ucuggugacacacgcuagu

SEQ ID NO: 1141201 - RNA, 19 nt, Artificial Sequence
  Description of Artificial Sequence: Synthetic oligonucleotide
ggcagagauaguuaaacuc

SEQ ID NO: 1141202 - RNA, 19 nt, Artificial Sequence
  Description of Artificial Sequence: Synthetic oligonucleotide
agucgaggaaacucagcag

SEQ ID NO: 1141203 - RNA, 19 nt, Artificial Sequence
  Description of Artificial Sequence: Synthetic oligonucleotide
aggguaucaguggaagucg

SEQ ID NO: 1141204 - RNA, 19 nt, Artificial Sequence
  Description of Artificial Sequence: Synthetic oligonucleotide
cccuaaugcaucuacaaug

SEQ ID NO: 1141205 - RNA, 19 nt, Artificial Sequence
  Description of Artificial Sequence: Synthetic oligonucleotide
caacuaauauuaaaguugu

SEQ ID NO: 1141206 - RNA, 19 nt, Artificial Sequence
  Description of Artificial Sequence: Synthetic oligonucleotide
ugaaucgcacauagaauuu

SEQ ID NO: 1141207 - RNA, 19 nt, Artificial Sequence
  Description of Artificial Sequence: Synthetic oligonucleotide
cauaauuccgaaacccaga

SEQ ID NO: 1141208 - RNA, 19 nt, Artificial Sequence
  Description of Artificial Sequence: Synthetic oligonucleotide
aacauccguuggugaaaac

SEQ ID NO: 1141209 - RNA, 19 nt, Artificial Sequence
  Description of Artificial Sequence: Synthetic oligonucleotide
cauccguuggugaaaacca

SEQ ID NO: 1141210 - RNA, 19 nt, Artificial Sequence
  Description of Artificial Sequence: Synthetic oligonucleotide
agaaccuaauuagaaauuu

SEQ ID NO: 1141211 - RNA, 19 nt, Artificial Sequence
  Description of Artificial Sequence: Synthetic oligonucleotide
acacgcuaguuacucaucu

SEQ ID NO: 1141212 - RNA, 19 nt, Artificial Sequence
  Description of Artificial Sequence: Synthetic oligonucleotide
acaccgguucaugaguggc

SEQ ID NO: 1141213 - RNA, 19 nt, Artificial Sequence
  Description of Artificial Sequence: Synthetic oligonucleotide
ggauuaacuaaauacauuu

SEQ ID NO: 1141214 - RNA, 19 nt, Artificial Sequence
  Description of Artificial Sequence: Synthetic oligonucleotide
uucuggugacacacgcuag

SEQ ID NO: 1141215 - RNA, 19 nt, Artificial Sequence
  Description of Artificial Sequence: Synthetic oligonucleotide
aagauacgccagcauggca

SEQ ID NO: 1141216 - RNA, 19 nt, Artificial Sequence
  Description of Artificial Sequence: Synthetic oligonucleotide
uuguuuggauuaacuaaau

SEQ ID NO: 1141217 - RNA, 19 nt, Artificial Sequence
  Description of Artificial Sequence: Synthetic oligonucleotide
uccucucgagaauagcgcu

SEQ ID NO: 1141218 - RNA, 19 nt, Artificial Sequence
  Description of Artificial Sequence: Synthetic oligonucleotide
gacgguugcuuacaaugac

SEQ ID NO: 1141219 - RNA, 19 nt, Artificial Sequence
  Description of Artificial Sequence: Synthetic oligonucleotide
agaaguaucccagcauucu

SEQ ID NO: 1141220 - RNA, 19 nt, Artificial Sequence
  Description of Artificial Sequence: Synthetic oligonucleotide
agaguauuaaagauacuuu

SEQ ID NO: 1141221 - RNA, 19 nt, Artificial Sequence
  Description of Artificial Sequence: Synthetic oligonucleotide
ucaugccaaaacauacaau

SEQ ID NO: 1141222 - RNA, 19 nt, Artificial Sequence
  Description of Artificial Sequence: Synthetic oligonucleotide
aaccagagcgacauacaug

SEQ ID NO: 1141223 - RNA, 19 nt, Artificial Sequence
  Description of Artificial Sequence: Synthetic oligonucleotide
ucuucuggugacacacgcu

SEQ ID NO: 1141224 - RNA, 19 nt, Artificial Sequence
  Description of Artificial Sequence: Synthetic oligonucleotide
aacugguaauacuggugaa

SEQ ID NO: 1141225 - RNA, 19 nt, Artificial Sequence
  Description of Artificial Sequence: Synthetic oligonucleotide
gcauccgugaucacuagcg

SEQ ID NO: 1141226 - RNA, 19 nt, Artificial Sequence
  Description of Artificial Sequence: Synthetic oligonucleotide
aagccaccaagccaggcua

SEQ ID NO: 1141227 - RNA, 19 nt, Artificial Sequence
  Description of Artificial Sequence: Synthetic oligonucleotide
guaagcgcaaauauccaca

SEQ ID NO: 1141228 - RNA, 19 nt, Artificial Sequence
  Description of Artificial Sequence: Synthetic oligonucleotide
uaguuaaacucuguugcau

SEQ ID NO: 1141229 - RNA, 19 nt, Artificial Sequence
  Description of Artificial Sequence: Synthetic oligonucleotide
cuguguaucacagcauaug

SEQ ID NO: 1141230 - RNA, 19 nt, Artificial Sequence
  Description of Artificial Sequence: Synthetic oligonucleotide
cuggccuaucuccauacac

SEQ ID NO: 1141231 - RNA, 19 nt, Artificial Sequence
  Description of Artificial Sequence: Synthetic oligonucleotide
ugcauccgugaucacuagc

SEQ ID NO: 1141232 - RNA, 19 nt, Artificial Sequence
  Description of Artificial Sequence: Synthetic oligonucleotide
uggcuacgaagccaccaag

SEQ ID NO: 1141233 - RNA, 19 nt, Artificial Sequence
  Description of Artificial Sequence: Synthetic oligonucleotide
gucuuaacguccucacaug

SEQ ID NO: 1141234 - RNA, 19 nt, Artificial Sequence
  Description of Artificial Sequence: Synthetic oligonucleotide
gcuaguuacucaucuggcc

SEQ ID NO: 1141235 - RNA, 19 nt, Artificial Sequence
  Description of Artificial Sequence: Synthetic oligonucleotide
agcccuaaugcaucuacaa

SEQ ID NO: 1141236 - RNA, 19 nt, Artificial Sequence
  Description of Artificial Sequence: Synthetic oligonucleotide
ugggucuuaacguccucac

SEQ ID NO: 1141237 - RNA, 19 nt, Artificial Sequence
  Description of Artificial Sequence: Synthetic oligonucleotide
aaucgcacauagaauuuau

SEQ ID NO: 1141238 - RNA, 19 nt, Artificial Sequence
  Description of Artificial Sequence: Synthetic oligonucleotide
aaauggcuacgaagccacc

SEQ ID NO: 1141239 - RNA, 19 nt, Artificial Sequence
  Description of Artificial Sequence: Synthetic oligonucleotide
caugaucaccauccaggcc

SEQ ID NO: 1141240 - RNA, 19 nt, Artificial Sequence
  Description of Artificial Sequence: Synthetic oligonucleotide
augccggcauccuuuagcu

SEQ ID NO: 1141241 - RNA, 19 nt, Artificial Sequence
  Description of Artificial Sequence: Synthetic oligonucleotide
accaagccaggcuauuugu

SEQ ID NO: 1141242 - RNA, 19 nt, Artificial Sequence
  Description of Artificial Sequence: Synthetic oligonucleotide
acauggaucaagguuuuaa

SEQ ID NO: 1141243 - RNA, 19 nt, Artificial Sequence
  Description of Artificial Sequence: Synthetic oligonucleotide
ugaucacuagcgucauugu

SEQ ID NO: 1141244 - RNA, 19 nt, Artificial Sequence
  Description of Artificial Sequence: Synthetic oligonucleotide
uuagcuccucucgagaaua

SEQ ID NO: 1141245 - RNA, 19 nt, Artificial Sequence
  Description of Artificial Sequence: Synthetic oligonucleotide
acggcugcauccgugauca

SEQ ID NO: 1141246 - RNA, 19 nt, Artificial Sequence
  Description of Artificial Sequence: Synthetic oligonucleotide
cacacaaucacguaacuuu

SEQ ID NO: 1141247 - RNA, 19 nt, Artificial Sequence
  Description of Artificial Sequence: Synthetic oligonucleotide
ugacacacgcuaguuacuc

SEQ ID NO: 1141248 - RNA, 19 nt, Artificial Sequence
  Description of Artificial Sequence: Synthetic oligonucleotide
gugcuugucuaugcuaggg

SEQ ID NO: 1141249 - RNA, 19 nt, Artificial Sequence
  Description of Artificial Sequence: Synthetic oligonucleotide
aaagaguauuaaagauacu

SEQ ID NO: 1141250 - RNA, 19 nt, Artificial Sequence
  Description of Artificial Sequence: Synthetic oligonucleotide
caagauacgccagcauggc

SEQ ID NO: 1141251 - RNA, 19 nt, Artificial Sequence
  Description of Artificial Sequence: Synthetic oligonucleotide
cuguaugaaucagacaaga

SEQ ID NO: 1141252 - RNA, 19 nt, Artificial Sequence
  Description of Artificial Sequence: Synthetic oligonucleotide
cuuaacguccucacaugga

SEQ ID NO: 1141253 - RNA, 19 nt, Artificial Sequence
  Description of Artificial Sequence: Synthetic oligonucleotide
acauaaaaggacgguugcu

SEQ ID NO: 1141254 - RNA, 19 nt, Artificial Sequence
  Description of Artificial Sequence: Synthetic oligonucleotide
agaauagcgcuggcugugg

SEQ ID NO: 1141255 - RNA, 19 nt, Artificial Sequence
  Description of Artificial Sequence: Synthetic oligonucleotide
  modified_base (3)..(3): a, c, u, g, unknown or other
uunuagggauuuccgccuu

SEQ ID NO: 1141256 - RNA, 19 nt, Artificial Sequence
  Description of Artificial Sequence: Synthetic oligonucleotide
  modified_base (2)..(2): a, c, u, g, unknown or other
unuagggauuuccgccuuc

SEQ ID NO: 1141257 - RNA, 19 nt, Artificial Sequence
  Description of Artificial Sequence: Synthetic oligonucleotide
gcuccucucgagaauagcg

SEQ ID NO: 1141258 - RNA, 19 nt, Artificial Sequence
  Description of Artificial Sequence: Synthetic oligonucleotide
aucaagguuuuaauaccug

SEQ ID NO: 1141259 - RNA, 19 nt, Artificial Sequence
  Description of Artificial Sequence: Synthetic oligonucleotide
  modified_base (8)..(8): a, c, u, g, unknown or other
ggcuuuunuagggauuucc

SEQ ID NO: 1141260 - RNA, 19 nt, Artificial Sequence
  Description of Artificial Sequence: Synthetic oligonucleotide
gagauaguuaaacucuguu

SEQ ID NO: 1141261 - RNA, 19 nt, Artificial Sequence
  Description of Artificial Sequence: Synthetic oligonucleotide
gaauagcgcuggcuguggc

SEQ ID NO: 1141262 - RNA, 19 nt, Artificial Sequence
  Description of Artificial Sequence: Synthetic oligonucleotide
ugccauuugggguccuaga

SEQ ID NO: 1141263 - RNA, 19 nt, Artificial Sequence
  Description of Artificial Sequence: Synthetic oligonucleotide
acagcagugcuugucuaug

SEQ ID NO: 1141264 - RNA, 19 nt, Artificial Sequence
  Description of Artificial Sequence: Synthetic oligonucleotide
acguaacuuugaguguaac

SEQ ID NO: 1141265 - RNA, 19 nt, Artificial Sequence
  Description of Artificial Sequence: Synthetic oligonucleotide
uaacauccguuggugaaaa

SEQ ID NO: 1141266 - RNA, 19 nt, Artificial Sequence
  Description of Artificial Sequence: Synthetic oligonucleotide
ugcuuacaaugacauuuua

SEQ ID NO: 1141267 - RNA, 19 nt, Artificial Sequence
  Description of Artificial Sequence: Synthetic oligonucleotide
uggugacacacgcuaguua

SEQ ID NO: 1141268 - RNA, 19 nt, Artificial Sequence
  Description of Artificial Sequence: Synthetic oligonucleotide
ucuggccuaucuccauaca

SEQ ID NO: 1141269 - RNA, 19 nt, Artificial Sequence
  Description of Artificial Sequence: Synthetic oligonucleotide
cuggugguggugguggugc

SEQ ID NO: 1141270 - RNA, 19 nt, Artificial Sequence
  Description of Artificial Sequence: Synthetic oligonucleotide
auggcuacgaagccaccaa

SEQ ID NO: 1141271 - RNA, 19 nt, Artificial Sequence
  Description of Artificial Sequence: Synthetic oligonucleotide
acguaccuuuauguuuccc

SEQ ID NO: 1141272 - RNA, 19 nt, Artificial Sequence
  Description of Artificial Sequence: Synthetic oligonucleotide
gaaccuaauuagaaauuua

SEQ ID NO: 1141273 - RNA, 19 nt, Artificial Sequence
  Description of Artificial Sequence: Synthetic oligonucleotide
cuucuggugacacacgcua

SEQ ID NO: 1141274 - RNA, 19 nt, Artificial Sequence
  Description of Artificial Sequence: Synthetic oligonucleotide
gaguguaacauccguuggu

SEQ ID NO: 1141275 - RNA, 19 nt, Artificial Sequence
  Description of Artificial Sequence: Synthetic oligonucleotide
cuacgaagccaccaagcca

SEQ ID NO: 1141276 - RNA, 19 nt, Artificial Sequence
  Description of Artificial Sequence: Synthetic oligonucleotide
acaagaccgagcaucaauu

SEQ ID NO: 1141277 - RNA, 19 nt, Artificial Sequence
  Description of Artificial Sequence: Synthetic oligonucleotide
caagccaggcuauuuguaa

SEQ ID NO: 1141278 - RNA, 19 nt, Artificial Sequence
  Description of Artificial Sequence: Synthetic oligonucleotide
uugucuaugcuagggcuua

SEQ ID NO: 1141279 - RNA, 19 nt, Artificial Sequence
  Description of Artificial Sequence: Synthetic oligonucleotide
ccaugaucaccauccaggc

SEQ ID NO: 1141280 - RNA, 19 nt, Artificial Sequence
  Description of Artificial Sequence: Synthetic oligonucleotide
gacaagaccgagcaucaau

SEQ ID NO: 1141281 - RNA, 19 nt, Artificial Sequence
  Description of Artificial Sequence: Synthetic oligonucleotide
auauuaaaacguaccuuua

SEQ ID NO: 1141282 - RNA, 19 nt, Artificial Sequence
  Description of Artificial Sequence: Synthetic oligonucleotide
cacgcuaguuacucaucug

SEQ ID NO: 1141283 - RNA, 19 nt, Artificial Sequence
  Description of Artificial Sequence: Synthetic oligonucleotide
ugguagucgugaugguggu

SEQ ID NO: 1141284 - RNA, 19 nt, Artificial Sequence
  Description of Artificial Sequence: Synthetic oligonucleotide
gaaucgcacauagaauuua

SEQ ID NO: 1141285 - RNA, 19 nt, Artificial Sequence
  Description of Artificial Sequence: Synthetic oligonucleotide
aucgcaaggccgucacuga

SEQ ID NO: 1141286 - RNA, 19 nt, Artificial Sequence
  Description of Artificial Sequence: Synthetic oligonucleotide
ucucgagaauagcgcuggc

SEQ ID NO: 1141287 - RNA, 19 nt, Artificial Sequence
  Description of Artificial Sequence: Synthetic oligonucleotide
cacaaucacguaacuuuga

SEQ ID NO: 1141288 - RNA, 19 nt, Artificial Sequence
  Description of Artificial Sequence: Synthetic oligonucleotide
guuuuaauaccugccauuu

SEQ ID NO: 1141289 - RNA, 19 nt, Artificial Sequence
  Description of Artificial Sequence: Synthetic oligonucleotide
aaacaucuagacagugcua

SEQ ID NO: 1141290 - RNA, 19 nt, Artificial Sequence
  Description of Artificial Sequence: Synthetic oligonucleotide
ggucuuaacguccucacau

SEQ ID NO: 1141291 - RNA, 19 nt, Artificial Sequence
  Description of Artificial Sequence: Synthetic oligonucleotide
caguaagcgcaaauaucca

SEQ ID NO: 1141292 - RNA, 19 nt, Artificial Sequence
  Description of Artificial Sequence: Synthetic oligonucleotide
accaugucaaccagagcga

SEQ ID NO: 1141293 - RNA, 19 nt, Artificial Sequence
  Description of Artificial Sequence: Synthetic oligonucleotide
acgguugcuuacaaugaca

SEQ ID NO: 1141294 - RNA, 19 nt, Artificial Sequence
  Description of Artificial Sequence: Synthetic oligonucleotide
ucgcaaggccgucacugaa

SEQ ID NO: 1141295 - RNA, 19 nt, Artificial Sequence
  Description of Artificial Sequence: Synthetic oligonucleotide
gcuuagaaccuaauuagaa

SEQ ID NO: 1141296 - RNA, 19 nt, Artificial Sequence
  Description of Artificial Sequence: Synthetic oligonucleotide
gcuguaugaaucagacaag

SEQ ID NO: 1141297 - RNA, 19 nt, Artificial Sequence
  Description of Artificial Sequence: Synthetic oligonucleotide
ggaaauggcuacgaagcca

SEQ ID NO: 1141298 - RNA, 19 nt, Artificial Sequence
  Description of Artificial Sequence: Synthetic oligonucleotide
gggcauuauagagaacagc

SEQ ID NO: 1141299 - RNA, 19 nt, Artificial Sequence
  Description of Artificial Sequence: Synthetic oligonucleotide
gcagagauaguuaaacucu

SEQ ID NO: 1141300 - RNA, 19 nt, Artificial Sequence
  Description of Artificial Sequence: Synthetic oligonucleotide
augaacaagccagcaguaa

SEQ ID NO: 1141301 - RNA, 19 nt, Artificial Sequence
  Description of Artificial Sequence: Synthetic oligonucleotide
gucuaacuccagcaggcaa

SEQ ID NO: 1141302 - RNA, 19 nt, Artificial Sequence
  Description of Artificial Sequence: Synthetic oligonucleotide
cacacgcuaguuacucauc

SEQ ID NO: 1141303 - RNA, 19 nt, Artificial Sequence
  Description of Artificial Sequence: Synthetic oligonucleotide
caugucaaccagagcgaca

SEQ ID NO: 1141304 - RNA, 19 nt, Artificial Sequence
  Description of Artificial Sequence: Synthetic oligonucleotide
ugucuaugcuagggcuuag

SEQ ID NO: 1141305 - RNA, 19 nt, Artificial Sequence
  Description of Artificial Sequence: Synthetic oligonucleotide
  modified_base (9)..(9): a, c, u, g, unknown or other
aggcuuuunuagggauuuc

SEQ ID NO: 1141306 - RNA, 19 nt, Artificial Sequence
  Description of Artificial Sequence: Synthetic oligonucleotide
cauacauaaaaggacgguu

SEQ ID NO: 1141307 - RNA, 19 nt, Artificial Sequence
  Description of Artificial Sequence: Synthetic oligonucleotide
cacuugcuguaugaaucag

SEQ ID NO: 1141308 - RNA, 19 nt, Artificial Sequence
  Description of Artificial Sequence: Synthetic oligonucleotide
ucuggugguggugguggug

SEQ ID NO: 1141309 - RNA, 19 nt, Artificial Sequence
  Description of Artificial Sequence: Synthetic oligonucleotide
guguaucacagcauaugaa

SEQ ID NO: 1141310 - RNA, 19 nt, Artificial Sequence
  Description of Artificial Sequence: Synthetic oligonucleotide
gaauauuccuguugccauu

SEQ ID NO: 1141311 - RNA, 19 nt, Artificial Sequence
  Description of Artificial Sequence: Synthetic oligonucleotide
ggcuacgaagccaccaagc

SEQ ID NO: 1141312 - RNA, 19 nt, Artificial Sequence
  Description of Artificial Sequence: Synthetic oligonucleotide
gcuuacaaugacauuuuaa

SEQ ID NO: 1141313 - RNA, 19 nt, Artificial Sequence
  Description of Artificial Sequence: Synthetic oligonucleotide
uauccccaacggcugcauc

SEQ ID NO: 1141314 - RNA, 19 nt, Artificial Sequence
  Description of Artificial Sequence: Synthetic oligonucleotide
cugccauuugggguccuag

SEQ ID NO: 1141315 - RNA, 19 nt, Artificial Sequence
  Description of Artificial Sequence: Synthetic oligonucleotide
caacguaacugacuuuaua

SEQ ID NO: 1141316 - RNA, 19 nt, Artificial Sequence
  Description of Artificial Sequence: Synthetic oligonucleotide
cagucaugccagccuuuag

SEQ ID NO: 1141317 - RNA, 19 nt, Artificial Sequence
  Description of Artificial Sequence: Synthetic oligonucleotide
cauaaaaggacgguugcuu

SEQ ID NO: 1141318 - RNA, 19 nt, Artificial Sequence
  Description of Artificial Sequence: Synthetic oligonucleotide
agugcuacagacagcccua

SEQ ID NO: 1141319 - RNA, 19 nt, Artificial Sequence
  Description of Artificial Sequence: Synthetic oligonucleotide
gguccuagacaaccagaac

SEQ ID NO: 1141320 - RNA, 19 nt, Artificial Sequence
  Description of Artificial Sequence: Synthetic oligonucleotide
cugcauccgugaucacuag

SEQ ID NO: 1141321 - RNA, 19 nt, Artificial Sequence
  Description of Artificial Sequence: Synthetic oligonucleotide
cuaguuuuacaugcugugu

SEQ ID NO: 1141322 - RNA, 19 nt, Artificial Sequence
  Description of Artificial Sequence: Synthetic oligonucleotide
aguuacucaucuggccuau

SEQ ID NO: 1141323 - RNA, 19 nt, Artificial Sequence
  Description of Artificial Sequence: Synthetic oligonucleotide
gcuugucuaugcuagggcu

SEQ ID NO: 1141324 - RNA, 19 nt, Artificial Sequence
  Description of Artificial Sequence: Synthetic oligonucleotide
ugacuggcccaggguauca

SEQ ID NO: 1141325 - RNA, 19 nt, Artificial Sequence
  Description of Artificial Sequence: Synthetic oligonucleotide
  modified_base (19)..(19): a, c, u, g, unknown or other
uuguaagaauaggcuuuun

SEQ ID NO: 1141326 - RNA, 19 nt, Artificial Sequence
  Description of Artificial Sequence: Synthetic oligonucleotide
ggcuuagaaccuaauuaga

SEQ ID NO: 1141327 - RNA, 19 nt, Artificial Sequence
  Description of Artificial Sequence: Synthetic oligonucleotide
accaaucgcaaggccguca

SEQ ID NO: 1141328 - RNA, 19 nt, Artificial Sequence
  Description of Artificial Sequence: Synthetic oligonucleotide
cguaccuuuauguuuccca

SEQ ID NO: 1141329 - RNA, 19 nt, Artificial Sequence
  Description of Artificial Sequence: Synthetic oligonucleotide
cgcuaguuacucaucuggc

SEQ ID NO: 1141330 - RNA, 19 nt, Artificial Sequence
  Description of Artificial Sequence: Synthetic oligonucleotide
cagaacacacaaucacgua

SEQ ID NO: 1141331 - RNA, 19 nt, Artificial Sequence
  Description of Artificial Sequence: Synthetic oligonucleotide
gcccaugaucaccauccag

SEQ ID NO: 1141332 - RNA, 19 nt, Artificial Sequence
  Description of Artificial Sequence: Synthetic oligonucleotide
ccaagaagucaaaauauau

SEQ ID NO: 1141333 - RNA, 19 nt, Artificial Sequence
  Description of Artificial Sequence: Synthetic oligonucleotide
caaugccggcauccuuuag

SEQ ID NO: 1141334 - RNA, 19 nt, Artificial Sequence
  Description of Artificial Sequence: Synthetic oligonucleotide
ccaaugucgcaaugccggc

SEQ ID NO: 1141335 - RNA, 19 nt, Artificial Sequence
  Description of Artificial Sequence: Synthetic oligonucleotide
uggugguggugguggugca

SEQ ID NO: 1141336 - RNA, 19 nt, Artificial Sequence
  Description of Artificial Sequence: Synthetic oligonucleotide
gccgucacugaaguugugc

SEQ ID NO: 1141337 - RNA, 19 nt, Artificial Sequence
  Description of Artificial Sequence: Synthetic oligonucleotide
cagcccuaaugcaucuaca

SEQ ID NO: 1141338 - RNA, 19 nt, Artificial Sequence
  Description of Artificial Sequence: Synthetic oligonucleotide
caccgguucaugaguggca

SEQ ID NO: 1141339 - RNA, 19 nt, Artificial Sequence
  Description of Artificial Sequence: Synthetic oligonucleotide
cagaugugaugguagucgu

SEQ ID NO: 1141340 - RNA, 19 nt, Artificial Sequence
  Description of Artificial Sequence: Synthetic oligonucleotide
ccaaucgcaaggccgucac

SEQ ID NO: 1141341 - RNA, 19 nt, Artificial Sequence
  Description of Artificial Sequence: Synthetic oligonucleotide
cacguaacuuugaguguaa

SEQ ID NO: 1141342 - RNA, 19 nt, Artificial Sequence
  Description of Artificial Sequence: Synthetic oligonucleotide
ugucaaccagagcgacaua

SEQ ID NO: 1141343 - RNA, 19 nt, Artificial Sequence
  Description of Artificial Sequence: Synthetic oligonucleotide
cuugucuaugcuagggcuu

SEQ ID NO: 1141344 - RNA, 19 nt, Artificial Sequence
  Description of Artificial Sequence: Synthetic oligonucleotide
aucgcacauagaauuuaua

SEQ ID NO: 1141345 - RNA, 19 nt, Artificial Sequence
  Description of Artificial Sequence: Synthetic oligonucleotide
cacuagcgucauugugcag

SEQ ID NO: 1141346 - RNA, 19 nt, Artificial Sequence
  Description of Artificial Sequence: Synthetic oligonucleotide
accgagcaucaauuugauu

SEQ ID NO: 1141347 - RNA, 19 nt, Artificial Sequence
  Description of Artificial Sequence: Synthetic oligonucleotide
caaugucgcaaugccggca

SEQ ID NO: 1141348 - RNA, 19 nt, Artificial Sequence
  Description of Artificial Sequence: Synthetic oligonucleotide
ggguccuagacaaccagaa

SEQ ID NO: 1141349 - RNA, 19 nt, Artificial Sequence
  Description of Artificial Sequence: Synthetic oligonucleotide
auccguuggugaaaaccaa

SEQ ID NO: 1141350 - RNA, 19 nt, Artificial Sequence
  Description of Artificial Sequence: Synthetic oligonucleotide
gucuaugcuagggcuuaga

SEQ ID NO: 1141351 - RNA, 19 nt, Artificial Sequence
  Description of Artificial Sequence: Synthetic oligonucleotide
ccaucgcccaugaucacca

SEQ ID NO: 1141352 - RNA, 19 nt, Artificial Sequence
  Description of Artificial Sequence: Synthetic oligonucleotide
gccuuuagcaaaacagcaa

SEQ ID NO: 1141353 - RNA, 19 nt, Artificial Sequence
  Description of Artificial Sequence: Synthetic oligonucleotide
augccagccuuuagcaaaa

SEQ ID NO: 1141354 - RNA, 19 nt, Artificial Sequence
  Description of Artificial Sequence: Synthetic oligonucleotide
acgaagccaccaagccagg

SEQ ID NO: 1141355 - RNA, 19 nt, Artificial Sequence
  Description of Artificial Sequence: Synthetic oligonucleotide
gggcagagauaguuaaacu

SEQ ID NO: 1141356 - RNA, 19 nt, Artificial Sequence
  Description of Artificial Sequence: Synthetic oligonucleotide
gucaacugacacauuguuu

SEQ ID NO: 1141357 - RNA, 19 nt, Artificial Sequence
  Description of Artificial Sequence: Synthetic oligonucleotide
cccaacguaacugacuuua

SEQ ID NO: 1141358 - RNA, 19 nt, Artificial Sequence
  Description of Artificial Sequence: Synthetic oligonucleotide
cccaucgcccaugaucacc

SEQ ID NO: 1141359 - RNA, 19 nt, Artificial Sequence
  Description of Artificial Sequence: Synthetic oligonucleotide
ccaugucaaccagagcgac

SEQ ID NO: 1141360 - RNA, 19 nt, Artificial Sequence
  Description of Artificial Sequence: Synthetic oligonucleotide
caagaccgagcaucaauuu

SEQ ID NO: 1141361 - RNA, 19 nt, Artificial Sequence
  Description of Artificial Sequence: Synthetic oligonucleotide
cauccgugaucacuagcgu

SEQ ID NO: 1141362 - RNA, 19 nt, Artificial Sequence
  Description of Artificial Sequence: Synthetic oligonucleotide
agacaagaccgagcaucaa

SEQ ID NO: 1141363 - RNA, 19 nt, Artificial Sequence
  Description of Artificial Sequence: Synthetic oligonucleotide
cucgagaauagcgcuggcu

SEQ ID NO: 1141364 - RNA, 19 nt, Artificial Sequence
  Description of Artificial Sequence: Synthetic oligonucleotide
cccaacggcugcauccgug

SEQ ID NO: 1141365 - RNA, 19 nt, Artificial Sequence
  Description of Artificial Sequence: Synthetic oligonucleotide
guuacucaucuggccuauc

SEQ ID NO: 1141366 - RNA, 19 nt, Artificial Sequence
  Description of Artificial Sequence: Synthetic oligonucleotide
ggucuaacuccagcaggca

SEQ ID NO: 1141367 - RNA, 19 nt, Artificial Sequence
  Description of Artificial Sequence: Synthetic oligonucleotide
gcgcaaauauccacauaga

SEQ ID NO: 1141368 - RNA, 19 nt, Artificial Sequence
  Description of Artificial Sequence: Synthetic oligonucleotide
caucugacuggcccagggu

SEQ ID NO: 1141369 - RNA, 19 nt, Artificial Sequence
  Description of Artificial Sequence: Synthetic oligonucleotide
gagcaucaauuugauugau

SEQ ID NO: 1141370 - RNA, 19 nt, Artificial Sequence
  Description of Artificial Sequence: Synthetic oligonucleotide
cgaaacccagaaguauccc

SEQ ID NO: 1141371 - RNA, 19 nt, Artificial Sequence
  Description of Artificial Sequence: Synthetic oligonucleotide
cuagggcuuagaaccuaau

SEQ ID NO: 1141372 - RNA, 19 nt, Artificial Sequence
  Description of Artificial Sequence: Synthetic oligonucleotide
gugacacacgcuaguuacu

SEQ ID NO: 1141373 - RNA, 19 nt, Artificial Sequence
  Description of Artificial Sequence: Synthetic oligonucleotide
gcccuaaugcaucuacaau

SEQ ID NO: 1141374 - RNA, 19 nt, Artificial Sequence
  Description of Artificial Sequence: Synthetic oligonucleotide
gcaaugccggcauccuuua

SEQ ID NO: 1141375 - RNA, 19 nt, Artificial Sequence
  Description of Artificial Sequence: Synthetic oligonucleotide
ccauacauaaaaggacggu

SEQ ID NO: 1141376 - RNA, 19 nt, Artificial Sequence
  Description of Artificial Sequence: Synthetic oligonucleotide
gucgcaaugccggcauccu

SEQ ID NO: 1141377 - RNA, 19 nt, Artificial Sequence
  Description of Artificial Sequence: Synthetic oligonucleotide
caaucgcaaggccgucacu

SEQ ID NO: 1141378 - RNA, 19 nt, Artificial Sequence
  Description of Artificial Sequence: Synthetic oligonucleotide
gcccaucgcccaugaucac

SEQ ID NO: 1141379 - RNA, 19 nt, Artificial Sequence
  Description of Artificial Sequence: Synthetic oligonucleotide
ccaacguaacugacuuuau

SEQ ID NO: 1141380 - RNA, 19 nt, Artificial Sequence
  Description of Artificial Sequence: Synthetic oligonucleotide
caacggcugcauccgugau

SEQ ID NO: 1141381 - RNA, 19 nt, Artificial Sequence
  Description of Artificial Sequence: Synthetic oligonucleotide
caaggccgucacugaaguu

SEQ ID NO: 1141382 - RNA, 19 nt, Artificial Sequence
  Description of Artificial Sequence: Synthetic oligonucleotide
caucgcccaugaucaccau

SEQ ID NO: 1141383 - RNA, 19 nt, Artificial Sequence
  Description of Artificial Sequence: Synthetic oligonucleotide
ccgugaucacuagcgucau

SEQ ID NO: 1141384 - RNA, 19 nt, Artificial Sequence
  Description of Artificial Sequence: Synthetic oligonucleotide
ccccaacggcugcauccgu

SEQ ID NO: 1141385 - RNA, 19 nt, Artificial Sequence
  Description of Artificial Sequence: Synthetic oligonucleotide
cgugaucacuagcgucauu

SEQ ID NO: 1141386 - RNA, 19 nt, Artificial Sequence
  Description of Artificial Sequence: Synthetic oligonucleotide
gaauucaucauacacaucc

SEQ ID NO: 1141387 - RNA, 19 nt, Artificial Sequence
  Description of Artificial Sequence: Synthetic oligonucleotide
uccgacaugaugauguugg

SEQ ID NO: 1141388 - RNA, 19 nt, Artificial Sequence
  Description of Artificial Sequence: Synthetic oligonucleotide
ucguuguuaaugaagaucu

SEQ ID NO: 1141389 - RNA, 19 nt, Artificial Sequence
  Description of Artificial Sequence: Synthetic oligonucleotide
uuucccaugguacuuauca

SEQ ID NO: 1141390 - RNA, 19 nt, Artificial Sequence
  Description of Artificial Sequence: Synthetic oligonucleotide
gaucaaguuggccacauag

SEQ ID NO: 1141391 - RNA, 19 nt, Artificial Sequence
  Description of Artificial Sequence: Synthetic oligonucleotide
auggucuugaauuugagga

SEQ ID NO: 1141392 - RNA, 19 nt, Artificial Sequence
  Description of Artificial Sequence: Synthetic oligonucleotide
caugcuugcaucaggagcg

SEQ ID NO: 1141393 - RNA, 19 nt, Artificial Sequence
  Description of Artificial Sequence: Synthetic oligonucleotide
cuuaaacugagucucgucc

SEQ ID NO: 1141394 - RNA, 19 nt, Artificial Sequence
  Description of Artificial Sequence: Synthetic oligonucleotide
uacuuaucagcccagccag

SEQ ID NO: 1141395 - RNA, 19 nt, Artificial Sequence
  Description of Artificial Sequence: Synthetic oligonucleotide
uauugaccacaccaggugg

SEQ ID NO: 1141396 - RNA, 19 nt, Artificial Sequence
  Description of Artificial Sequence: Synthetic oligonucleotide
augaucugcccacacacgc

SEQ ID NO: 1141397 - RNA, 19 nt, Artificial Sequence
  Description of Artificial Sequence: Synthetic oligonucleotide
cuugauauagccgaggauc

SEQ ID NO: 1141398 - RNA, 19 nt, Artificial Sequence
  Description of Artificial Sequence: Synthetic oligonucleotide
uccuugaucaaguuggcca

SEQ ID NO: 1141399 - RNA, 19 nt, Artificial Sequence
  Description of Artificial Sequence: Synthetic oligonucleotide
gaaguagccacggucagcg

SEQ ID NO: 1141400 - RNA, 19 nt, Artificial Sequence
  Description of Artificial Sequence: Synthetic oligonucleotide
cagguaauuggccuuaucc

SEQ ID NO: 1141401 - RNA, 19 nt, Artificial Sequence
  Description of Artificial Sequence: Synthetic oligonucleotide
ucuuucacgucuccgaaca

SEQ ID NO: 1141402 - RNA, 19 nt, Artificial Sequence
  Description of Artificial Sequence: Synthetic oligonucleotide
ucugcgaccuggcagauga

SEQ ID NO: 1141403 - RNA, 19 nt, Artificial Sequence
  Description of Artificial Sequence: Synthetic oligonucleotide
gaaugaucugcccacacac

SEQ ID NO: 1141404 - RNA, 19 nt, Artificial Sequence
  Description of Artificial Sequence: Synthetic oligonucleotide
uucacgucuccgaacacgg

SEQ ID NO: 1141405 - RNA, 19 nt, Artificial Sequence
  Description of Artificial Sequence: Synthetic oligonucleotide
gaugacauaaggcuugcca

SEQ ID NO: 1141406 - RNA, 19 nt, Artificial Sequence
  Description of Artificial Sequence: Synthetic oligonucleotide
agggccgccagguaggucc

SEQ ID NO: 1141407 - RNA, 19 nt, Artificial Sequence
  Description of Artificial Sequence: Synthetic oligonucleotide
aaucauuggcucuccccac

SEQ ID NO: 1141408 - RNA, 19 nt, Artificial Sequence
  Description of Artificial Sequence: Synthetic oligonucleotide
aguagccacggucagcggc

SEQ ID NO: 1141409 - RNA, 19 nt, Artificial Sequence
  Description of Artificial Sequence: Synthetic oligonucleotide
uccauacuuggaaucauug

SEQ ID NO: 1141410 - RNA, 19 nt, Artificial Sequence
  Description of Artificial Sequence: Synthetic oligonucleotide
agugaguggugucugcucg

SEQ ID NO: 1141411 - RNA, 19 nt, Artificial Sequence
  Description of Artificial Sequence: Synthetic oligonucleotide
gauuaggugaccaaccuca

SEQ ID NO: 1141412 - RNA, 19 nt, Artificial Sequence
  Description of Artificial Sequence: Synthetic oligonucleotide
acgaauucaucauacacau

SEQ ID NO: 1141413 - RNA, 19 nt, Artificial Sequence
  Description of Artificial Sequence: Synthetic oligonucleotide
auauugaccacaccaggug

SEQ ID NO: 1141414 - RNA, 19 nt, Artificial Sequence
  Description of Artificial Sequence: Synthetic oligonucleotide
aauauugaccacaccaggu

SEQ ID NO: 1141415 - RNA, 19 nt, Artificial Sequence
  Description of Artificial Sequence: Synthetic oligonucleotide
caauauugaccacaccagg

SEQ ID NO: 1141416 - RNA, 19 nt, Artificial Sequence
  Description of Artificial Sequence: Synthetic oligonucleotide
aggccugcaagccauacuc

SEQ ID NO: 1141417 - RNA, 19 nt, Artificial Sequence
  Description of Artificial Sequence: Synthetic oligonucleotide
auagcaguugauccauacg

SEQ ID NO: 1141418 - RNA, 19 nt, Artificial Sequence
  Description of Artificial Sequence: Synthetic oligonucleotide
uugauauagccgaggaucu

SEQ ID NO: 1141419 - RNA, 19 nt, Artificial Sequence
  Description of Artificial Sequence: Synthetic oligonucleotide
ucauuacaaccacauuucc

SEQ ID NO: 1141420 - RNA, 19 nt, Artificial Sequence
  Description of Artificial Sequence: Synthetic oligonucleotide
gauaggaaugguuuuccca

SEQ ID NO: 1141421 - RNA, 19 nt, Artificial Sequence
  Description of Artificial Sequence: Synthetic oligonucleotide
gaaucauuggcucucccca

SEQ ID NO: 1141422 - RNA, 19 nt, Artificial Sequence
  Description of Artificial Sequence: Synthetic oligonucleotide
accccugucggaugcaucc

SEQ ID NO: 1141423 - RNA, 19 nt, Artificial Sequence
  Description of Artificial Sequence: Synthetic oligonucleotide
ucaugggaagcgauggcag

SEQ ID NO: 1141424 - RNA, 19 nt, Artificial Sequence
  Description of Artificial Sequence: Synthetic oligonucleotide
gucggaugcauccaugcgg

SEQ ID NO: 1141425 - RNA, 19 nt, Artificial Sequence
  Description of Artificial Sequence: Synthetic oligonucleotide
uuucacgucuccgaacacg

SEQ ID NO: 1141426 - RNA, 19 nt, Artificial Sequence
  Description of Artificial Sequence: Synthetic oligonucleotide
aagggguucccaaccaccc

SEQ ID NO: 1141427 - RNA, 19 nt, Artificial Sequence
  Description of Artificial Sequence: Synthetic oligonucleotide
aaucgguucaacagccgac

SEQ ID NO: 1141428 - RNA, 19 nt, Artificial Sequence
  Description of Artificial Sequence: Synthetic oligonucleotide
aauccaggaacaauauuga

SEQ ID NO: 1141429 - RNA, 19 nt, Artificial Sequence
  Description of Artificial Sequence: Synthetic oligonucleotide
ucggaugcauccaugcggc

SEQ ID NO: 1141430 - RNA, 19 nt, Artificial Sequence
  Description of Artificial Sequence: Synthetic oligonucleotide
ucggcaaccuucauuacaa

SEQ ID NO: 1141431 - RNA, 19 nt, Artificial Sequence
  Description of Artificial Sequence: Synthetic oligonucleotide
gaugcauccaugcggcgcc

SEQ ID NO: 1141432 - RNA, 19 nt, Artificial Sequence
  Description of Artificial Sequence: Synthetic oligonucleotide
cucccugacaucuuauagc

SEQ ID NO: 1141433 - RNA, 19 nt, Artificial Sequence
  Description of Artificial Sequence: Synthetic oligonucleotide
acauagagugcagugagug

SEQ ID NO: 1141434 - RNA, 19 nt, Artificial Sequence
  Description of Artificial Sequence: Synthetic oligonucleotide
uugcuuacgaguucuucug

SEQ ID NO: 1141435 - RNA, 19 nt, Artificial Sequence
  Description of Artificial Sequence: Synthetic oligonucleotide
cuggauuaggugaccaacc

SEQ ID NO: 1141436 - RNA, 19 nt, Artificial Sequence
  Description of Artificial Sequence: Synthetic oligonucleotide
gaagucgccaucgauagga

SEQ ID NO: 1141437 - RNA, 19 nt, Artificial Sequence
  Description of Artificial Sequence: Synthetic oligonucleotide
ugucggaugcauccaugcg

SEQ ID NO: 1141438 - RNA, 19 nt, Artificial Sequence
  Description of Artificial Sequence: Synthetic oligonucleotide
uccuuugugaagacagcug

SEQ ID NO: 1141439 - RNA, 19 nt, Artificial Sequence
  Description of Artificial Sequence: Synthetic oligonucleotide
aacugagucucguccaccu

SEQ ID NO: 1141440 - RNA, 19 nt, Artificial Sequence
  Description of Artificial Sequence: Synthetic oligonucleotide
cacgaauucaucauacaca

SEQ ID NO: 1141441 - RNA, 19 nt, Artificial Sequence
  Description of Artificial Sequence: Synthetic oligonucleotide
uggauuaggugaccaaccu

SEQ ID NO: 1141442 - RNA, 19 nt, Artificial Sequence
  Description of Artificial Sequence: Synthetic oligonucleotide
aucgguucaacagccgacc

SEQ ID NO: 1141443 - RNA, 19 nt, Artificial Sequence
  Description of Artificial Sequence: Synthetic oligonucleotide
accaaauggggacugggcu

SEQ ID NO: 1141444 - RNA, 19 nt, Artificial Sequence
  Description of Artificial Sequence: Synthetic oligonucleotide
agcggaggcauuucaggac

SEQ ID NO: 1141445 - RNA, 19 nt, Artificial Sequence
  Description of Artificial Sequence: Synthetic oligonucleotide
uaauagcggaggcauuuca

SEQ ID NO: 1141446 - RNA, 19 nt, Artificial Sequence
  Description of Artificial Sequence: Synthetic oligonucleotide
gaaggguugacagugggga

SEQ ID NO: 1141447 - RNA, 19 nt, Artificial Sequence
  Description of Artificial Sequence: Synthetic oligonucleotide
uguuaaugaagaucugguu

SEQ ID NO: 1141448 - RNA, 19 nt, Artificial Sequence
  Description of Artificial Sequence: Synthetic oligonucleotide
uugacggugaccgucuuca

SEQ ID NO: 1141449 - RNA, 19 nt, Artificial Sequence
  Description of Artificial Sequence: Synthetic oligonucleotide
cauagcaguugauccauac

SEQ ID NO: 1141450 - RNA, 19 nt, Artificial Sequence
  Description of Artificial Sequence: Synthetic oligonucleotide
aucgauaggaaugguuuuc

SEQ ID NO: 1141451 - RNA, 19 nt, Artificial Sequence
  Description of Artificial Sequence: Synthetic oligonucleotide
ugagauugcugcucccugc

SEQ ID NO: 1141452 - RNA, 19 nt, Artificial Sequence
  Description of Artificial Sequence: Synthetic oligonucleotide
guacuuaucagcccagcca

SEQ ID NO: 1141453 - RNA, 19 nt, Artificial Sequence
  Description of Artificial Sequence: Synthetic oligonucleotide
augggaagcgauggcagcc

SEQ ID NO: 1141454 - RNA, 19 nt, Artificial Sequence
  Description of Artificial Sequence: Synthetic oligonucleotide
aggaacaauauugaccaca

SEQ ID NO: 1141455 - RNA, 19 nt, Artificial Sequence
  Description of Artificial Sequence: Synthetic oligonucleotide
ugaccucucccguggaagg

SEQ ID NO: 1141456 - RNA, 19 nt, Artificial Sequence
  Description of Artificial Sequence: Synthetic oligonucleotide
gaacagggcaaagugggcc

SEQ ID NO: 1141457 - RNA, 19 nt, Artificial Sequence
  Description of Artificial Sequence: Synthetic oligonucleotide
aguagggccgaauccagga

SEQ ID NO: 1141458 - RNA, 19 nt, Artificial Sequence
  Description of Artificial Sequence: Synthetic oligonucleotide
ugaagaagucgccaucgau

SEQ ID NO: 1141459 - RNA, 19 nt, Artificial Sequence
  Description of Artificial Sequence: Synthetic oligonucleotide
ggucaugccgucuuucacg

SEQ ID NO: 1141460 - RNA, 19 nt, Artificial Sequence
  Description of Artificial Sequence: Synthetic oligonucleotide
aguugccaaggcugggccc

SEQ ID NO: 1141461 - RNA, 19 nt, Artificial Sequence
  Description of Artificial Sequence: Synthetic oligonucleotide
ugacuugauauagccgagg

SEQ ID NO: 1141462 - RNA, 19 nt, Artificial Sequence
  Description of Artificial Sequence: Synthetic oligonucleotide
ggaucugcaucacuggucc

SEQ ID NO: 1141463 - RNA, 19 nt, Artificial Sequence
  Description of Artificial Sequence: Synthetic oligonucleotide
agcauaauagcggaggcau

SEQ ID NO: 1141464 - RNA, 19 nt, Artificial Sequence
  Description of Artificial Sequence: Synthetic oligonucleotide
ucgccaucgauaggaaugg

SEQ ID NO: 1141465 - RNA, 19 nt, Artificial Sequence
  Description of Artificial Sequence: Synthetic oligonucleotide
gauauagccgaggaucuuc

SEQ ID NO: 1141466 - RNA, 19 nt, Artificial Sequence
  Description of Artificial Sequence: Synthetic oligonucleotide
caugguacuuaucagccca

SEQ ID NO: 1141467 - RNA, 19 nt, Artificial Sequence
  Description of Artificial Sequence: Synthetic oligonucleotide
aggagcgggaaguuccacg

SEQ ID NO: 1141468 - RNA, 19 nt, Artificial Sequence
  Description of Artificial Sequence: Synthetic oligonucleotide
ugaucugcccacacacgcc

SEQ ID NO: 1141469 - RNA, 19 nt, Artificial Sequence
  Description of Artificial Sequence: Synthetic oligonucleotide
cacucguuguuaaugaaga

SEQ ID NO: 1141470 - RNA, 19 nt, Artificial Sequence
  Description of Artificial Sequence: Synthetic oligonucleotide
cuccacgaauucaucauac

SEQ ID NO: 1141471 - RNA, 19 nt, Artificial Sequence
  Description of Artificial Sequence: Synthetic oligonucleotide
ucgauaggaaugguuuucc

SEQ ID NO: 1141472 - RNA, 19 nt, Artificial Sequence
  Description of Artificial Sequence: Synthetic oligonucleotide
aacgcugcgcuccacgaau

SEQ ID NO: 1141473 - RNA, 19 nt, Artificial Sequence
  Description of Artificial Sequence: Synthetic oligonucleotide
cauuacaaccacauuucca

SEQ ID NO: 1141474 - RNA, 19 nt, Artificial Sequence
  Description of Artificial Sequence: Synthetic oligonucleotide
cugcaagccauacucgccc

SEQ ID NO: 1141475 - RNA, 19 nt, Artificial Sequence
  Description of Artificial Sequence: Synthetic oligonucleotide
cagaugaccucucccgugg

SEQ ID NO: 1141476 - RNA, 19 nt, Artificial Sequence
  Description of Artificial Sequence: Synthetic oligonucleotide
caggaccauguccaaaucc

SEQ ID NO: 1141477 - RNA, 19 nt, Artificial Sequence
  Description of Artificial Sequence: Synthetic oligonucleotide
gucgccaucgauaggaaug

SEQ ID NO: 1141478 - RNA, 19 nt, Artificial Sequence
  Description of Artificial Sequence: Synthetic oligonucleotide
uuggcucuccccacgaccu

SEQ ID NO: 1141479 - RNA, 19 nt, Artificial Sequence
  Description of Artificial Sequence: Synthetic oligonucleotide
acaaagguccgggagccgg

SEQ ID NO: 1141480 - RNA, 19 nt, Artificial Sequence
  Description of Artificial Sequence: Synthetic oligonucleotide
ugccaguccauacuuggaa

SEQ ID NO: 1141481 - RNA, 19 nt, Artificial Sequence
  Description of Artificial Sequence: Synthetic oligonucleotide
ugccacucguuguuaauga

SEQ ID NO: 1141482 - RNA, 19 nt, Artificial Sequence
  Description of Artificial Sequence: Synthetic oligonucleotide
uguggcacuuugacgguga

SEQ ID NO: 1141483 - RNA, 19 nt, Artificial Sequence
  Description of Artificial Sequence: Synthetic oligonucleotide
cacggaaugaucugcccac

SEQ ID NO: 1141484 - RNA, 19 nt, Artificial Sequence
  Description of Artificial Sequence: Synthetic oligonucleotide
aguggugagagcggcgcgc

SEQ ID NO: 1141485 - RNA, 19 nt, Artificial Sequence
  Description of Artificial Sequence: Synthetic oligonucleotide
acuuggaaucauuggcucu

SEQ ID NO: 1141486 - RNA, 19 nt, Artificial Sequence
  Description of Artificial Sequence: Synthetic oligonucleotide
uagcggaggcauuucagga

SEQ ID NO: 1141487 - RNA, 19 nt, Artificial Sequence
  Description of Artificial Sequence: Synthetic oligonucleotide
uagggccgaauccaggaac

SEQ ID NO: 1141488 - RNA, 19 nt, Artificial Sequence
  Description of Artificial Sequence: Synthetic oligonucleotide
ccuuugugaagacagcugc

SEQ ID NO: 1141489 - RNA, 19 nt, Artificial Sequence
  Description of Artificial Sequence: Synthetic oligonucleotide
uaucagcccagccagcaua

SEQ ID NO: 1141490 - RNA, 19 nt, Artificial Sequence
  Description of Artificial Sequence: Synthetic oligonucleotide
guucccaaccacccgagac

SEQ ID NO: 1141491 - RNA, 19 nt, Artificial Sequence
  Description of Artificial Sequence: Synthetic oligonucleotide
ggagcgggaaguuccacgg

SEQ ID NO: 1141492 - RNA, 19 nt, Artificial Sequence
  Description of Artificial Sequence: Synthetic oligonucleotide
ccagccagcauaauagcgg

SEQ ID NO: 1141493 - RNA, 19 nt, Artificial Sequence
  Description of Artificial Sequence: Synthetic oligonucleotide
uggucuugaauuugaggau

SEQ ID NO: 1141494 - RNA, 19 nt, Artificial Sequence
  Description of Artificial Sequence: Synthetic oligonucleotide
auaauagcggaggcauuuc

SEQ ID NO: 1141495 - RNA, 19 nt, Artificial Sequence
  Description of Artificial Sequence: Synthetic oligonucleotide
ugccuccuugaucaaguug

SEQ ID NO: 1141496 - RNA, 19 nt, Artificial Sequence
  Description of Artificial Sequence: Synthetic oligonucleotide
uccacgaauucaucauaca

SEQ ID NO: 1141497 - RNA, 19 nt, Artificial Sequence
  Description of Artificial Sequence: Synthetic oligonucleotide
caucauagcaguugaucca

SEQ ID NO: 1141498 - RNA, 19 nt, Artificial Sequence
  Description of Artificial Sequence: Synthetic oligonucleotide
ucaacagccgaccccuguc

SEQ ID NO: 1141499 - RNA, 19 nt, Artificial Sequence
  Description of Artificial Sequence: Synthetic oligonucleotide
gaccauguccaaauccacc

SEQ ID NO: 1141500 - RNA, 19 nt, Artificial Sequence
  Description of Artificial Sequence: Synthetic oligonucleotide
uccauacggugccagccug

SEQ ID NO: 1141501 - RNA, 19 nt, Artificial Sequence
  Description of Artificial Sequence: Synthetic oligonucleotide
acagguaauuggccuuauc

SEQ ID NO: 1141502 - RNA, 19 nt, Artificial Sequence
  Description of Artificial Sequence: Synthetic oligonucleotide
agaacagggcaaagugggc

SEQ ID NO: 1141503 - RNA, 19 nt, Artificial Sequence
  Description of Artificial Sequence: Synthetic oligonucleotide
cugacuugauauagccgag

SEQ ID NO: 1141504 - RNA, 19 nt, Artificial Sequence
  Description of Artificial Sequence: Synthetic oligonucleotide
cauaaggcuugccauuguc

SEQ ID NO: 1141505 - RNA, 19 nt, Artificial Sequence
  Description of Artificial Sequence: Synthetic oligonucleotide
gcugccaguccauacuugg

SEQ ID NO: 1141506 - RNA, 19 nt, Artificial Sequence
  Description of Artificial Sequence: Synthetic oligonucleotide
guagguccugucccgcucg

SEQ ID NO: 1141507 - RNA, 19 nt, Artificial Sequence
  Description of Artificial Sequence: Synthetic oligonucleotide
aggaccauguccaaaucca

SEQ ID NO: 1141508 - RNA, 19 nt, Artificial Sequence
  Description of Artificial Sequence: Synthetic oligonucleotide
gguacuuaucagcccagcc

SEQ ID NO: 1141509 - RNA, 19 nt, Artificial Sequence
  Description of Artificial Sequence: Synthetic oligonucleotide
uucaacagccgaccccugu

SEQ ID NO: 1141510 - RNA, 19 nt, Artificial Sequence
  Description of Artificial Sequence: Synthetic oligonucleotide
auagccgaggaucuucuua

SEQ ID NO: 1141511 - RNA, 19 nt, Artificial Sequence
  Description of Artificial Sequence: Synthetic oligonucleotide
acggugccagccuggaggg

SEQ ID NO: 1141512 - RNA, 19 nt, Artificial Sequence
  Description of Artificial Sequence: Synthetic oligonucleotide
ugcuuacgaguucuucugu

SEQ ID NO: 1141513 - RNA, 19 nt, Artificial Sequence
  Description of Artificial Sequence: Synthetic oligonucleotide
augagaucggccaaucggu

SEQ ID NO: 1141514 - RNA, 19 nt, Artificial Sequence
  Description of Artificial Sequence: Synthetic oligonucleotide
uggcggguguagcugaaga

SEQ ID NO: 1141515 - RNA, 19 nt, Artificial Sequence
  Description of Artificial Sequence: Synthetic oligonucleotide
agcaguagggccgaaucca

SEQ ID NO: 1141516 - RNA, 19 nt, Artificial Sequence
  Description of Artificial Sequence: Synthetic oligonucleotide
ucgguucaacagccgaccc

SEQ ID NO: 1141517 - RNA, 19 nt, Artificial Sequence
  Description of Artificial Sequence: Synthetic oligonucleotide
aggaucugcaucacugguc

SEQ ID NO: 1141518 - RNA, 19 nt, Artificial Sequence
  Description of Artificial Sequence: Synthetic oligonucleotide
gagagcggcgcgcagcaug

SEQ ID NO: 1141519 - RNA, 19 nt, Artificial Sequence
  Description of Artificial Sequence: Synthetic oligonucleotide
gccauacucgcccagcucc

SEQ ID NO: 1141520 - RNA, 19 nt, Artificial Sequence
  Description of Artificial Sequence: Synthetic oligonucleotide
uccacggaaugaucugccc

SEQ ID NO: 1141521 - RNA, 19 nt, Artificial Sequence
  Description of Artificial Sequence: Synthetic oligonucleotide
acuaccuugcuuacgaguu

SEQ ID NO: 1141522 - RNA, 19 nt, Artificial Sequence
  Description of Artificial Sequence: Synthetic oligonucleotide
caacagccgaccccugucg

SEQ ID NO: 1141523 - RNA, 19 nt, Artificial Sequence
  Description of Artificial Sequence: Synthetic oligonucleotide
gcaaccuucauuacaacca

SEQ ID NO: 1141524 - RNA, 19 nt, Artificial Sequence
  Description of Artificial Sequence: Synthetic oligonucleotide
caucuuauagccaccaaau

SEQ ID NO: 1141525 - RNA, 19 nt, Artificial Sequence
  Description of Artificial Sequence: Synthetic oligonucleotide
uggaaucauuggcucuccc

SEQ ID NO: 1141526 - RNA, 19 nt, Artificial Sequence
  Description of Artificial Sequence: Synthetic oligonucleotide
ugcggcaaccuggauuagg

SEQ ID NO: 1141527 - RNA, 19 nt, Artificial Sequence
  Description of Artificial Sequence: Synthetic oligonucleotide
agauugcugcucccugcgg

SEQ ID NO: 1141528 - RNA, 19 nt, Artificial Sequence
  Description of Artificial Sequence: Synthetic oligonucleotide
gccagcauaauagcggagg

SEQ ID NO: 1141529 - RNA, 19 nt, Artificial Sequence
  Description of Artificial Sequence: Synthetic oligonucleotide
cuugcuuacgaguucuucu

SEQ ID NO: 1141530 - RNA, 19 nt, Artificial Sequence
  Description of Artificial Sequence: Synthetic oligonucleotide
aaguagccacggucagcgg

SEQ ID NO: 1141531 - RNA, 19 nt, Artificial Sequence
  Description of Artificial Sequence: Synthetic oligonucleotide
acgucuccgaacacggugg

SEQ ID NO: 1141532 - RNA, 19 nt, Artificial Sequence
  Description of Artificial Sequence: Synthetic oligonucleotide
ccacgaauucaucauacac

SEQ ID NO: 1141533 - RNA, 19 nt, Artificial Sequence
  Description of Artificial Sequence: Synthetic oligonucleotide
guuccacggaaugaucugc

SEQ ID NO: 1141534 - RNA, 19 nt, Artificial Sequence
  Description of Artificial Sequence: Synthetic oligonucleotide
uccaugcggcgccagggug

SEQ ID NO: 1141535 - RNA, 19 nt, Artificial Sequence
  Description of Artificial Sequence: Synthetic oligonucleotide
agagcggcgcgcagcaugc

SEQ ID NO: 1141536 - RNA, 19 nt, Artificial Sequence
  Description of Artificial Sequence: Synthetic oligonucleotide
aaccuggauuaggugacca

SEQ ID NO: 1141537 - RNA, 19 nt, Artificial Sequence
  Description of Artificial Sequence: Synthetic oligonucleotide
cacauccucaugggaagcg

SEQ ID NO: 1141538 - RNA, 19 nt, Artificial Sequence
  Description of Artificial Sequence: Synthetic oligonucleotide
acgaccuccucaauggucu

SEQ ID NO: 1141539 - RNA, 19 nt, Artificial Sequence
  Description of Artificial Sequence: Synthetic oligonucleotide
ggcacuaccuugcuuacga

SEQ ID NO: 1141540 - RNA, 19 nt, Artificial Sequence
  Description of Artificial Sequence: Synthetic oligonucleotide
agcgggaaguuccacggaa

SEQ ID NO: 1141541 - RNA, 19 nt, Artificial Sequence
  Description of Artificial Sequence: Synthetic oligonucleotide
acuuaucagcccagccagc

SEQ ID NO: 1141542 - RNA, 19 nt, Artificial Sequence
  Description of Artificial Sequence: Synthetic oligonucleotide
uggaugaaguagccacggu

SEQ ID NO: 1141543 - RNA, 19 nt, Artificial Sequence
  Description of Artificial Sequence: Synthetic oligonucleotide
caguagggccgaauccagg

SEQ ID NO: 1141544 - RNA, 19 nt, Artificial Sequence
  Description of Artificial Sequence: Synthetic oligonucleotide
ggccaaucgguucaacagc

SEQ ID NO: 1141545 - RNA, 19 nt, Artificial Sequence
  Description of Artificial Sequence: Synthetic oligonucleotide
caaucgguucaacagccga

SEQ ID NO: 1141546 - RNA, 19 nt, Artificial Sequence
  Description of Artificial Sequence: Synthetic oligonucleotide
ccacucguuguuaaugaag

SEQ ID NO: 1141547 - RNA, 19 nt, Artificial Sequence
  Description of Artificial Sequence: Synthetic oligonucleotide
acucguuguuaaugaagau

SEQ ID NO: 1141548 - RNA, 19 nt, Artificial Sequence
  Description of Artificial Sequence: Synthetic oligonucleotide
uuaucagcccagccagcau

SEQ ID NO: 1141549 - RNA, 19 nt, Artificial Sequence
  Description of Artificial Sequence: Synthetic oligonucleotide
ugaguggugucugcucggc

SEQ ID NO: 1141550 - RNA, 19 nt, Artificial Sequence
  Description of Artificial Sequence: Synthetic oligonucleotide
caguuuccaugcuugcauc

SEQ ID NO: 1141551 - RNA, 19 nt, Artificial Sequence
  Description of Artificial Sequence: Synthetic oligonucleotide
uccugucccgcucgaugag

SEQ ID NO: 1141552 - RNA, 19 nt, Artificial Sequence
  Description of Artificial Sequence: Synthetic oligonucleotide
acauaaggcuugccauugu

SEQ ID NO: 1141553 - RNA, 19 nt, Artificial Sequence
  Description of Artificial Sequence: Synthetic oligonucleotide
auauagccgaggaucuucu

SEQ ID NO: 1141554 - RNA, 19 nt, Artificial Sequence
  Description of Artificial Sequence: Synthetic oligonucleotide
agcaguugauccauacggu

SEQ ID NO: 1141555 - RNA, 19 nt, Artificial Sequence
  Description of Artificial Sequence: Synthetic oligonucleotide
uugaucaaguuggccacau

SEQ ID NO: 1141556 - RNA, 19 nt, Artificial Sequence
  Description of Artificial Sequence: Synthetic oligonucleotide
ugguacuuaucagcccagc

SEQ ID NO: 1141557 - RNA, 19 nt, Artificial Sequence
  Description of Artificial Sequence: Synthetic oligonucleotide
gaaguuccacggaaugauc

SEQ ID NO: 1141558 - RNA, 19 nt, Artificial Sequence
  Description of Artificial Sequence: Synthetic oligonucleotide
cacuuugacggugaccguc

SEQ ID NO: 1141559 - RNA, 19 nt, Artificial Sequence
  Description of Artificial Sequence: Synthetic oligonucleotide
acuuugacggugaccgucu

SEQ ID NO: 1141560 - RNA, 19 nt, Artificial Sequence
  Description of Artificial Sequence: Synthetic oligonucleotide
gcgggcaguggugagagcg

SEQ ID NO: 1141561 - RNA, 19 nt, Artificial Sequence
  Description of Artificial Sequence: Synthetic oligonucleotide
caugccgucuuucacgucu

SEQ ID NO: 1141562 - RNA, 19 nt, Artificial Sequence
  Description of Artificial Sequence: Synthetic oligonucleotide
uugcuguccugacuugaua

SEQ ID NO: 1141563 - RNA, 19 nt, Artificial Sequence
  Description of Artificial Sequence: Synthetic oligonucleotide
gaccucucccguggaaggg

SEQ ID NO: 1141564 - RNA, 19 nt, Artificial Sequence
  Description of Artificial Sequence: Synthetic oligonucleotide
ucucccguggaaggguuga

SEQ ID NO: 1141565 - RNA, 19 nt, Artificial Sequence
  Description of Artificial Sequence: Synthetic oligonucleotide
uggcacuaccuugcuuacg

SEQ ID NO: 1141566 - RNA, 19 nt, Artificial Sequence
  Description of Artificial Sequence: Synthetic oligonucleotide
cagccagcauaauagcgga

SEQ ID NO: 1141567 - RNA, 19 nt, Artificial Sequence
  Description of Artificial Sequence: Synthetic oligonucleotide
guccugucccgcucgauga

SEQ ID NO: 1141568 - RNA, 19 nt, Artificial Sequence
  Description of Artificial Sequence: Synthetic oligonucleotide
uccguccggcugucaaagg

SEQ ID NO: 1141569 - RNA, 19 nt, Artificial Sequence
  Description of Artificial Sequence: Synthetic oligonucleotide
ccagcauaauagcggaggc

SEQ ID NO: 1141570 - RNA, 19 nt, Artificial Sequence
  Description of Artificial Sequence: Synthetic oligonucleotide
auacucgcccagcucccug

SEQ ID NO: 1141571 - RNA, 19 nt, Artificial Sequence
  Description of Artificial Sequence: Synthetic oligonucleotide
cugcaucacugguccaaag

SEQ ID NO: 1141572 - RNA, 19 nt, Artificial Sequence
  Description of Artificial Sequence: Synthetic oligonucleotide
ggcaacgcugcgcuccacg

SEQ ID NO: 1141573 - RNA, 19 nt, Artificial Sequence
  Description of Artificial Sequence: Synthetic oligonucleotide
gccaaucgguucaacagcc

SEQ ID NO: 1141574 - RNA, 19 nt, Artificial Sequence
  Description of Artificial Sequence: Synthetic oligonucleotide
aucugcaucacugguccaa

SEQ ID NO: 1141575 - RNA, 19 nt, Artificial Sequence
  Description of Artificial Sequence: Synthetic oligonucleotide
ucauagcaguugauccaua

SEQ ID NO: 1141576 - RNA, 19 nt, Artificial Sequence
  Description of Artificial Sequence: Synthetic oligonucleotide
gcggguguagcugaagaag

SEQ ID NO: 1141577 - RNA, 19 nt, Artificial Sequence
  Description of Artificial Sequence: Synthetic oligonucleotide
ugaucaaguuggccacaua

SEQ ID NO: 1141578 - RNA, 19 nt, Artificial Sequence
  Description of Artificial Sequence: Synthetic oligonucleotide
cuuucacgucuccgaacac

SEQ ID NO: 1141579 - RNA, 19 nt, Artificial Sequence
  Description of Artificial Sequence: Synthetic oligonucleotide
gccugcaagccauacucgc

SEQ ID NO: 1141580 - RNA, 19 nt, Artificial Sequence
  Description of Artificial Sequence: Synthetic oligonucleotide
caaauccaccagguaggag

SEQ ID NO: 1141581 - RNA, 19 nt, Artificial Sequence
  Description of Artificial Sequence: Synthetic oligonucleotide
gguccugucccgcucgaug

SEQ ID NO: 1141582 - RNA, 19 nt, Artificial Sequence
  Description of Artificial Sequence: Synthetic oligonucleotide
caguccauacuuggaauca

SEQ ID NO: 1141583 - RNA, 19 nt, Artificial Sequence
  Description of Artificial Sequence: Synthetic oligonucleotide
ggugaccaaccucagugga

SEQ ID NO: 1141584 - RNA, 19 nt, Artificial Sequence
  Description of Artificial Sequence: Synthetic oligonucleotide
agucgccaucgauaggaau

SEQ ID NO: 1141585 - RNA, 19 nt, Artificial Sequence
  Description of Artificial Sequence: Synthetic oligonucleotide
accuggauuaggugaccaa

SEQ ID NO: 1141586 - RNA, 19 nt, Artificial Sequence
  Description of Artificial Sequence: Synthetic oligonucleotide
auacggugccagccuggag

SEQ ID NO: 1141587 - RNA, 19 nt, Artificial Sequence
  Description of Artificial Sequence: Synthetic oligonucleotide
caaguuggccacauagagu

SEQ ID NO: 1141588 - RNA, 19 nt, Artificial Sequence
  Description of Artificial Sequence: Synthetic oligonucleotide
gagacuuggcccgggcaac

SEQ ID NO: 1141589 - RNA, 19 nt, Artificial Sequence
  Description of Artificial Sequence: Synthetic oligonucleotide
caggaacaauauugaccac

SEQ ID NO: 1141590 - RNA, 19 nt, Artificial Sequence
  Description of Artificial Sequence: Synthetic oligonucleotide
ccaguccauacuuggaauc

SEQ ID NO: 1141591 - RNA, 19 nt, Artificial Sequence
  Description of Artificial Sequence: Synthetic oligonucleotide
auccucaugggaagcgaug

SEQ ID NO: 1141592 - RNA, 19 nt, Artificial Sequence
  Description of Artificial Sequence: Synthetic oligonucleotide
augcuugcaucaggagcgg

SEQ ID NO: 1141593 - RNA, 19 nt, Artificial Sequence
  Description of Artificial Sequence: Synthetic oligonucleotide
cuuuggugaacaguuuucu

SEQ ID NO: 1141594 - RNA, 19 nt, Artificial Sequence
  Description of Artificial Sequence: Synthetic oligonucleotide
acagccgaccccugucgga

SEQ ID NO: 1141595 - RNA, 19 nt, Artificial Sequence
  Description of Artificial Sequence: Synthetic oligonucleotide
aguccauacuuggaaucau

SEQ ID NO: 1141596 - RNA, 19 nt, Artificial Sequence
  Description of Artificial Sequence: Synthetic oligonucleotide
gucaugccgucuuucacgu

SEQ ID NO: 1141597 - RNA, 19 nt, Artificial Sequence
  Description of Artificial Sequence: Synthetic oligonucleotide
caaccacccgagacuuggc

SEQ ID NO: 1141598 - RNA, 19 nt, Artificial Sequence
  Description of Artificial Sequence: Synthetic oligonucleotide
cuccgaacacggugggcug

SEQ ID NO: 1141599 - RNA, 19 nt, Artificial Sequence
  Description of Artificial Sequence: Synthetic oligonucleotide
agcggcgcgcagcaugcug

SEQ ID NO: 1141600 - RNA, 19 nt, Artificial Sequence
  Description of Artificial Sequence: Synthetic oligonucleotide
ccaugguacuuaucagccc

SEQ ID NO: 1141601 - RNA, 19 nt, Artificial Sequence
  Description of Artificial Sequence: Synthetic oligonucleotide
agggccgaauccaggaaca

SEQ ID NO: 1141602 - RNA, 19 nt, Artificial Sequence
  Description of Artificial Sequence: Synthetic oligonucleotide
gacggugaccgucuucacu

SEQ ID NO: 1141603 - RNA, 19 nt, Artificial Sequence
  Description of Artificial Sequence: Synthetic oligonucleotide
uauagccgaggaucuucuu

SEQ ID NO: 1141604 - RNA, 19 nt, Artificial Sequence
  Description of Artificial Sequence: Synthetic oligonucleotide
gcauccgacaugaugaugu

SEQ ID NO: 1141605 - RNA, 19 nt, Artificial Sequence
  Description of Artificial Sequence: Synthetic oligonucleotide
ggggaagguuuucuugcug

SEQ ID NO: 1141606 - RNA, 19 nt, Artificial Sequence
  Description of Artificial Sequence: Synthetic oligonucleotide
ccaaucgguucaacagccg

SEQ ID NO: 1141607 - RNA, 19 nt, Artificial Sequence
  Description of Artificial Sequence: Synthetic oligonucleotide
ugauauagccgaggaucuu

SEQ ID NO: 1141608 - RNA, 19 nt, Artificial Sequence
  Description of Artificial Sequence: Synthetic oligonucleotide
cggccaaucgguucaacag

SEQ ID NO: 1141609 - RNA, 19 nt, Artificial Sequence
  Description of Artificial Sequence: Synthetic oligonucleotide
cauuggcucuccccacgac

SEQ ID NO: 1141610 - RNA, 19 nt, Artificial Sequence
  Description of Artificial Sequence: Synthetic oligonucleotide
cacggucagcggcugcacc

SEQ ID NO: 1141611 - RNA, 19 nt, Artificial Sequence
  Description of Artificial Sequence: Synthetic oligonucleotide
cauaauagcggaggcauuu

SEQ ID NO: 1141612 - RNA, 19 nt, Artificial Sequence
  Description of Artificial Sequence: Synthetic oligonucleotide
cacuaccuugcuuacgagu

SEQ ID NO: 1141613 - RNA, 19 nt, Artificial Sequence
  Description of Artificial Sequence: Synthetic oligonucleotide
uguaggccugcaagccaua

SEQ ID NO: 1141614 - RNA, 19 nt, Artificial Sequence
  Description of Artificial Sequence: Synthetic oligonucleotide
uagguccugucccgcucga

SEQ ID NO: 1141615 - RNA, 19 nt, Artificial Sequence
  Description of Artificial Sequence: Synthetic oligonucleotide
cacuucaguguaggccugc

SEQ ID NO: 1141616 - RNA, 19 nt, Artificial Sequence
  Description of Artificial Sequence: Synthetic oligonucleotide
ggcccaguuuccaugcuug

SEQ ID NO: 1141617 - RNA, 19 nt, Artificial Sequence
  Description of Artificial Sequence: Synthetic oligonucleotide
gccgaauccaggaacaaua

SEQ ID NO: 1141618 - RNA, 19 nt, Artificial Sequence
  Description of Artificial Sequence: Synthetic oligonucleotide
cacggugggcuggaugaag

SEQ ID NO: 1141619 - RNA, 19 nt, Artificial Sequence
  Description of Artificial Sequence: Synthetic oligonucleotide
ugacggugaccgucuucac

SEQ ID NO: 1141620 - RNA, 19 nt, Artificial Sequence
  Description of Artificial Sequence: Synthetic oligonucleotide
acggugggcuggaugaagu

SEQ ID NO: 1141621 - RNA, 19 nt, Artificial Sequence
  Description of Artificial Sequence: Synthetic oligonucleotide
gggguucccaaccacccga

SEQ ID NO: 1141622 - RNA, 19 nt, Artificial Sequence
  Description of Artificial Sequence: Synthetic oligonucleotide
guaggccugcaagccauac

SEQ ID NO: 1141623 - RNA, 19 nt, Artificial Sequence
  Description of Artificial Sequence: Synthetic oligonucleotide
cuccccacgaccuccucaa

SEQ ID NO: 1141624 - RNA, 19 nt, Artificial Sequence
  Description of Artificial Sequence: Synthetic oligonucleotide
aucggccaaucgguucaac

SEQ ID NO: 1141625 - RNA, 19 nt, Artificial Sequence
  Description of Artificial Sequence: Synthetic oligonucleotide
guagggccgaauccaggaa

SEQ ID NO: 1141626 - RNA, 19 nt, Artificial Sequence
  Description of Artificial Sequence: Synthetic oligonucleotide
cugccaguccauacuugga

SEQ ID NO: 1141627 - RNA, 19 nt, Artificial Sequence
  Description of Artificial Sequence: Synthetic oligonucleotide
ccauacggugccagccugg

SEQ ID NO: 1141628 - RNA, 19 nt, Artificial Sequence
  Description of Artificial Sequence: Synthetic oligonucleotide
ccaaccucaguggagccug

SEQ ID NO: 1141629 - RNA, 19 nt, Artificial Sequence
  Description of Artificial Sequence: Synthetic oligonucleotide
cucucccguggaaggguug

SEQ ID NO: 1141630 - RNA, 19 nt, Artificial Sequence
  Description of Artificial Sequence: Synthetic oligonucleotide
cgauaggaaugguuuuccc

SEQ ID NO: 1141631 - RNA, 19 nt, Artificial Sequence
  Description of Artificial Sequence: Synthetic oligonucleotide
caugcggcgccagggugag

SEQ ID NO: 1141632 - RNA, 19 nt, Artificial Sequence
  Description of Artificial Sequence: Synthetic oligonucleotide
ugggcccaguuuccaugcu

SEQ ID NO: 1141633 - RNA, 19 nt, Artificial Sequence
  Description of Artificial Sequence: Synthetic oligonucleotide
aagucgccaucgauaggaa

SEQ ID NO: 1141634 - RNA, 19 nt, Artificial Sequence
  Description of Artificial Sequence: Synthetic oligonucleotide
ggaaguuccacggaaugau

SEQ ID NO: 1141635 - RNA, 19 nt, Artificial Sequence
  Description of Artificial Sequence: Synthetic oligonucleotide
acggaaugaucugcccaca

SEQ ID NO: 1141636 - RNA, 19 nt, Artificial Sequence
  Description of Artificial Sequence: Synthetic oligonucleotide
accucucccguggaagggu

SEQ ID NO: 1141637 - RNA, 19 nt, Artificial Sequence
  Description of Artificial Sequence: Synthetic oligonucleotide
ggccugcaagccauacucg

SEQ ID NO: 1141638 - RNA, 19 nt, Artificial Sequence
  Description of Artificial Sequence: Synthetic oligonucleotide
gagcgggaaguuccacgga

SEQ ID NO: 1141639 - RNA, 19 nt, Artificial Sequence
  Description of Artificial Sequence: Synthetic oligonucleotide
agccagcauaauagcggag

SEQ ID NO: 1141640 - RNA, 19 nt, Artificial Sequence
  Description of Artificial Sequence: Synthetic oligonucleotide
cagcggcugcaccaccgcc

SEQ ID NO: 1141641 - RNA, 19 nt, Artificial Sequence
  Description of Artificial Sequence: Synthetic oligonucleotide
gccgucuuucacgucuccg

SEQ ID NO: 1141642 - RNA, 19 nt, Artificial Sequence
  Description of Artificial Sequence: Synthetic oligonucleotide
gcacuaccuugcuuacgag

SEQ ID NO: 1141643 - RNA, 19 nt, Artificial Sequence
  Description of Artificial Sequence: Synthetic oligonucleotide
ggaccauguccaaauccac

SEQ ID NO: 1141644 - RNA, 19 nt, Artificial Sequence
  Description of Artificial Sequence: Synthetic oligonucleotide
uucugcgaccuggcagaug

SEQ ID NO: 1141645 - RNA, 19 nt, Artificial Sequence
  Description of Artificial Sequence: Synthetic oligonucleotide
cucccugcggcaaccugga

SEQ ID NO: 1141646 - RNA, 19 nt, Artificial Sequence
  Description of Artificial Sequence: Synthetic oligonucleotide
uccggcugucaaagggguu

SEQ ID NO: 1141647 - RNA, 19 nt, Artificial Sequence
  Description of Artificial Sequence: Synthetic oligonucleotide
ccaucgauaggaaugguuu

SEQ ID NO: 1141648 - RNA, 19 nt, Artificial Sequence
  Description of Artificial Sequence: Synthetic oligonucleotide
cucaggcgcggcccgcggc

SEQ ID NO: 1141649 - RNA, 19 nt, Artificial Sequence
  Description of Artificial Sequence: Synthetic oligonucleotide
cauacggugccagccugga

SEQ ID NO: 1141650 - RNA, 19 nt, Artificial Sequence
  Description of Artificial Sequence: Synthetic oligonucleotide
caucgauaggaaugguuuu

SEQ ID NO: 1141651 - RNA, 19 nt, Artificial Sequence
  Description of Artificial Sequence: Synthetic oligonucleotide
cgaugagaucggccaaucg

SEQ ID NO: 1141652 - RNA, 19 nt, Artificial Sequence
  Description of Artificial Sequence: Synthetic oligonucleotide
cacauagagugcagugagu

SEQ ID NO: 1141653 - RNA, 19 nt, Artificial Sequence
  Description of Artificial Sequence: Synthetic oligonucleotide
guagccacggucagcggcu

SEQ ID NO: 1141654 - RNA, 19 nt, Artificial Sequence
  Description of Artificial Sequence: Synthetic oligonucleotide
cgcucgaugagaucggcca

SEQ ID NO: 1141655 - RNA, 19 nt, Artificial Sequence
  Description of Artificial Sequence: Synthetic oligonucleotide
ggguguagcugaagaaguc

SEQ ID NO: 1141656 - RNA, 19 nt, Artificial Sequence
  Description of Artificial Sequence: Synthetic oligonucleotide
agccgaccccugucggaug

SEQ ID NO: 1141657 - RNA, 19 nt, Artificial Sequence
  Description of Artificial Sequence: Synthetic oligonucleotide
gucuccgaacacggugggc

SEQ ID NO: 1141658 - RNA, 19 nt, Artificial Sequence
  Description of Artificial Sequence: Synthetic oligonucleotide
gcaacgcugcgcuccacga

SEQ ID NO: 1141659 - RNA, 19 nt, Artificial Sequence
  Description of Artificial Sequence: Synthetic oligonucleotide
ccacggaaugaucugccca

SEQ ID NO: 1141660 - RNA, 19 nt, Artificial Sequence
  Description of Artificial Sequence: Synthetic oligonucleotide
gccgaccccugucggaugc

SEQ ID NO: 1141661 - RNA, 19 nt, Artificial Sequence
  Description of Artificial Sequence: Synthetic oligonucleotide
ggcggguguagcugaagaa

SEQ ID NO: 1141662 - RNA, 19 nt, Artificial Sequence
  Description of Artificial Sequence: Synthetic oligonucleotide
caccgccuuguccacaucu

SEQ ID NO: 1141663 - RNA, 19 nt, Artificial Sequence
  Description of Artificial Sequence: Synthetic oligonucleotide
ugauggcgucaugccacuc

SEQ ID NO: 1141664 - RNA, 19 nt, Artificial Sequence
  Description of Artificial Sequence: Synthetic oligonucleotide
cgggaaguuccacggaaug

SEQ ID NO: 1141665 - RNA, 19 nt, Artificial Sequence
  Description of Artificial Sequence: Synthetic oligonucleotide
cgguucaacagccgacccc

SEQ ID NO: 1141666 - RNA, 19 nt, Artificial Sequence
  Description of Artificial Sequence: Synthetic oligonucleotide
gcuguccugacuugauaua

SEQ ID NO: 1141667 - RNA, 19 nt, Artificial Sequence
  Description of Artificial Sequence: Synthetic oligonucleotide
guggugagagcggcgcgca

SEQ ID NO: 1141668 - RNA, 19 nt, Artificial Sequence
  Description of Artificial Sequence: Synthetic oligonucleotide
uagccacggucagcggcug

SEQ ID NO: 1141669 - RNA, 19 nt, Artificial Sequence
  Description of Artificial Sequence: Synthetic oligonucleotide
gcgcgcagcaugcugagcu

SEQ ID NO: 1141670 - RNA, 19 nt, Artificial Sequence
  Description of Artificial Sequence: Synthetic oligonucleotide
ggccuugguugaagaacag

SEQ ID NO: 1141671 - RNA, 19 nt, Artificial Sequence
  Description of Artificial Sequence: Synthetic oligonucleotide
ccgucuucacuucagugua

SEQ ID NO: 1141672 - RNA, 19 nt, Artificial Sequence
  Description of Artificial Sequence: Synthetic oligonucleotide
caacgcugcgcuccacgaa

SEQ ID NO: 1141673 - RNA, 19 nt, Artificial Sequence
  Description of Artificial Sequence: Synthetic oligonucleotide
cugcgaccuggcagaugac

SEQ ID NO: 1141674 - RNA, 19 nt, Artificial Sequence
  Description of Artificial Sequence: Synthetic oligonucleotide
gcucgaugagaucggccaa

SEQ ID NO: 1141675 - RNA, 19 nt, Artificial Sequence
  Description of Artificial Sequence: Synthetic oligonucleotide
gaucggccaaucgguucaa

SEQ ID NO: 1141676 - RNA, 19 nt, Artificial Sequence
  Description of Artificial Sequence: Synthetic oligonucleotide
gguucccaaccacccgaga

SEQ ID NO: 1141677 - RNA, 19 nt, Artificial Sequence
  Description of Artificial Sequence: Synthetic oligonucleotide
cugucccgcucgaugagau

SEQ ID NO: 1141678 - RNA, 19 nt, Artificial Sequence
  Description of Artificial Sequence: Synthetic oligonucleotide
gcucggcaaccuucauuac

SEQ ID NO: 1141679 - RNA, 19 nt, Artificial Sequence
  Description of Artificial Sequence: Synthetic oligonucleotide
cacaucuuccuugcucccu

SEQ ID NO: 1141680 - RNA, 19 nt, Artificial Sequence
  Description of Artificial Sequence: Synthetic oligonucleotide
cgucuccgaacacgguggg

SEQ ID NO: 1141681 - RNA, 19 nt, Artificial Sequence
  Description of Artificial Sequence: Synthetic oligonucleotide
agccggcgcagcagcacug

SEQ ID NO: 1141682 - RNA, 19 nt, Artificial Sequence
  Description of Artificial Sequence: Synthetic oligonucleotide
guccauacuuggaaucauu

SEQ ID NO: 1141683 - RNA, 19 nt, Artificial Sequence
  Description of Artificial Sequence: Synthetic oligonucleotide
guccggcugucaaaggggu

SEQ ID NO: 1141684 - RNA, 19 nt, Artificial Sequence
  Description of Artificial Sequence: Synthetic oligonucleotide
gcggcaaccuggauuaggu

SEQ ID NO: 1141685 - RNA, 19 nt, Artificial Sequence
  Description of Artificial Sequence: Synthetic oligonucleotide
ggcucguggcggguguagc

SEQ ID NO: 1141686 - RNA, 19 nt, Artificial Sequence
  Description of Artificial Sequence: Synthetic oligonucleotide
ccaccugcggccccugcuc

SEQ ID NO: 1141687 - RNA, 19 nt, Artificial Sequence
  Description of Artificial Sequence: Synthetic oligonucleotide
gcgucaugccacucguugu

SEQ ID NO: 1141688 - RNA, 19 nt, Artificial Sequence
  Description of Artificial Sequence: Synthetic oligonucleotide
cugcggcaaccuggauuag

SEQ ID NO: 1141689 - RNA, 19 nt, Artificial Sequence
  Description of Artificial Sequence: Synthetic oligonucleotide
caagugugcauggcuguuu

SEQ ID NO: 1141690 - RNA, 19 nt, Artificial Sequence
  Description of Artificial Sequence: Synthetic oligonucleotide
accuugcuuacgaguucuu

SEQ ID NO: 1141691 - RNA, 19 nt, Artificial Sequence
  Description of Artificial Sequence: Synthetic oligonucleotide
ccgaauccaggaacaauau

SEQ ID NO: 1141692 - RNA, 19 nt, Artificial Sequence
  Description of Artificial Sequence: Synthetic oligonucleotide
cggguguagcugaagaagu

SEQ ID NO: 1141693 - RNA, 19 nt, Artificial Sequence
  Description of Artificial Sequence: Synthetic oligonucleotide
augcggcgccagggugagc

SEQ ID NO: 1141694 - RNA, 19 nt, Artificial Sequence
  Description of Artificial Sequence: Synthetic oligonucleotide
ggcaauggucaugccgucu

SEQ ID NO: 1141695 - RNA, 19 nt, Artificial Sequence
  Description of Artificial Sequence: Synthetic oligonucleotide
cccgcucgaugagaucggc

SEQ ID NO: 1141696 - RNA, 19 nt, Artificial Sequence
  Description of Artificial Sequence: Synthetic oligonucleotide
acgcugcgcuccacgaauu

SEQ ID NO: 1141697 - RNA, 19 nt, Artificial Sequence
  Description of Artificial Sequence: Synthetic oligonucleotide
cauacucgcccagcucccu

SEQ ID NO: 1141698 - RNA, 19 nt, Artificial Sequence
  Description of Artificial Sequence: Synthetic oligonucleotide
caaccucaguggagccugu

SEQ ID NO: 1141699 - RNA, 19 nt, Artificial Sequence
  Description of Artificial Sequence: Synthetic oligonucleotide
cuuugacggugaccgucuu

SEQ ID NO: 1141700 - RNA, 19 nt, Artificial Sequence
  Description of Artificial Sequence: Synthetic oligonucleotide
cugccuccuugaucaaguu

SEQ ID NO: 1141701 - RNA, 19 nt, Artificial Sequence
  Description of Artificial Sequence: Synthetic oligonucleotide
ggccgaauccaggaacaau

SEQ ID NO: 1141702 - RNA, 19 nt, Artificial Sequence
  Description of Artificial Sequence: Synthetic oligonucleotide
cagccgaccccugucggau

SEQ ID NO: 1141703 - RNA, 19 nt, Artificial Sequence
  Description of Artificial Sequence: Synthetic oligonucleotide
cagggccgccagguagguc

SEQ ID NO: 1141704 - RNA, 19 nt, Artificial Sequence
  Description of Artificial Sequence: Synthetic oligonucleotide
gggccgaauccaggaacaa

SEQ ID NO: 1141705 - RNA, 19 nt, Artificial Sequence
  Description of Artificial Sequence: Synthetic oligonucleotide
cgcugcgcuccacgaauuc

SEQ ID NO: 1141706 - RNA, 19 nt, Artificial Sequence
  Description of Artificial Sequence: Synthetic oligonucleotide
cggugaccgucuucacuuc

SEQ ID NO: 1141707 - RNA, 19 nt, Artificial Sequence
  Description of Artificial Sequence: Synthetic oligonucleotide
gcacuuugacggugaccgu

SEQ ID NO: 1141708 - RNA, 19 nt, Artificial Sequence
  Description of Artificial Sequence: Synthetic oligonucleotide
gcgggaaguuccacggaau

SEQ ID NO: 1141709 - RNA, 19 nt, Artificial Sequence
  Description of Artificial Sequence: Synthetic oligonucleotide
cuucugcgaccuggcagau

SEQ ID NO: 1141710 - RNA, 19 nt, Artificial Sequence
  Description of Artificial Sequence: Synthetic oligonucleotide
cgaauccaggaacaauauu

SEQ ID NO: 1141711 - RNA, 19 nt, Artificial Sequence
  Description of Artificial Sequence: Synthetic oligonucleotide
ccugcuccguccggcuguc

SEQ ID NO: 1141712 - RNA, 19 nt, Artificial Sequence
  Description of Artificial Sequence: Synthetic oligonucleotide
cggcacggcgcugguggcg

SEQ ID NO: 1141713 - RNA, 19 nt, Artificial Sequence
  Description of Artificial Sequence: Synthetic oligonucleotide
ccacgaccuccucaauggu

SEQ ID NO: 1141714 - RNA, 19 nt, Artificial Sequence
  Description of Artificial Sequence: Synthetic oligonucleotide
gcgccagggugagcccagc

SEQ ID NO: 1141715 - RNA, 19 nt, Artificial Sequence
  Description of Artificial Sequence: Synthetic oligonucleotide
ccccugucggaugcaucca

SEQ ID NO: 1141716 - RNA, 19 nt, Artificial Sequence
  Description of Artificial Sequence: Synthetic oligonucleotide
gagcggcgcgcagcaugcu

SEQ ID NO: 1141717 - RNA, 19 nt, Artificial Sequence
  Description of Artificial Sequence: Synthetic oligonucleotide
gggcaacgcugcgcuccac

SEQ ID NO: 1141718 - RNA, 19 nt, Artificial Sequence
  Description of Artificial Sequence: Synthetic oligonucleotide
ggccgccagguagguccug

SEQ ID NO: 1141719 - RNA, 19 nt, Artificial Sequence
  Description of Artificial Sequence: Synthetic oligonucleotide
cguggcggguguagcugaa

SEQ ID NO: 1141720 - RNA, 19 nt, Artificial Sequence
  Description of Artificial Sequence: Synthetic oligonucleotide
ccucucccguggaaggguu

SEQ ID NO: 1141721 - RNA, 19 nt, Artificial Sequence
  Description of Artificial Sequence: Synthetic oligonucleotide
ccgaccccugucggaugca

SEQ ID NO: 1141722 - RNA, 19 nt, Artificial Sequence
  Description of Artificial Sequence: Synthetic oligonucleotide
cggcucaggcgcggcccgc

SEQ ID NO: 1141723 - RNA, 19 nt, Artificial Sequence
  Description of Artificial Sequence: Synthetic oligonucleotide
uaauucuucacuuucacag

SEQ ID NO: 1141724 - RNA, 19 nt, Artificial Sequence
  Description of Artificial Sequence: Synthetic oligonucleotide
ugaauguaaaucaggaugc

SEQ ID NO: 1141725 - RNA, 19 nt, Artificial Sequence
  Description of Artificial Sequence: Synthetic oligonucleotide
uuuaauagaucgcacagac

SEQ ID NO: 1141726 - RNA, 19 nt, Artificial Sequence
  Description of Artificial Sequence: Synthetic oligonucleotide
aaagcccaccccuagaggg

SEQ ID NO: 1141727 - RNA, 19 nt, Artificial Sequence
  Description of Artificial Sequence: Synthetic oligonucleotide
uacacuauguacauuguug

SEQ ID NO: 1141728 - RNA, 19 nt, Artificial Sequence
  Description of Artificial Sequence: Synthetic oligonucleotide
gaaauuggaacccuggcug

SEQ ID NO: 1141729 - RNA, 19 nt, Artificial Sequence
  Description of Artificial Sequence: Synthetic oligonucleotide
uucuacacuauguacauug

SEQ ID NO: 1141730 - RNA, 19 nt, Artificial Sequence
  Description of Artificial Sequence: Synthetic oligonucleotide
acuauguacauuguugugc

SEQ ID NO: 1141731 - RNA, 19 nt, Artificial Sequence
  Description of Artificial Sequence: Synthetic oligonucleotide
gacacaacaggcuagcgcc

SEQ ID NO: 1141732 - RNA, 19 nt, Artificial Sequence
  Description of Artificial Sequence: Synthetic oligonucleotide
cucuguaugguucugagac

SEQ ID NO: 1141733 - RNA, 19 nt, Artificial Sequence
  Description of Artificial Sequence: Synthetic oligonucleotide
auagucugaguucugaaug

SEQ ID NO: 1141734 - RNA, 19 nt, Artificial Sequence
  Description of Artificial Sequence: Synthetic oligonucleotide
aacucagcgagguuuuggg

SEQ ID NO: 1141735 - RNA, 19 nt, Artificial Sequence
  Description of Artificial Sequence: Synthetic oligonucleotide
uuaaauagcuguccccucc

SEQ ID NO: 1141736 - RNA, 19 nt, Artificial Sequence
  Description of Artificial Sequence: Synthetic oligonucleotide
agucaguccacagaggacc

SEQ ID NO: 1141737 - RNA, 19 nt, Artificial Sequence
  Description of Artificial Sequence: Synthetic oligonucleotide
aaauuggaacccuggcugg

SEQ ID NO: 1141738 - RNA, 19 nt, Artificial Sequence
  Description of Artificial Sequence: Synthetic oligonucleotide
uaggguugugcacacacgg

SEQ ID NO: 1141739 - RNA, 19 nt, Artificial Sequence
  Description of Artificial Sequence: Synthetic oligonucleotide
cacuggagaauuuacacag

SEQ ID NO: 1141740 - RNA, 19 nt, Artificial Sequence
  Description of Artificial Sequence: Synthetic oligonucleotide
agacacaacaggcuagcgc

SEQ ID NO: 1141741 - RNA, 19 nt, Artificial Sequence
  Description of Artificial Sequence: Synthetic oligonucleotide
aucaguuguucucaaagag

SEQ ID NO: 1141742 - RNA, 19 nt, Artificial Sequence
  Description of Artificial Sequence: Synthetic oligonucleotide
acauuguugugcuuuauug

SEQ ID NO: 1141743 - RNA, 19 nt, Artificial Sequence
  Description of Artificial Sequence: Synthetic oligonucleotide
ugcuuuauuguccccaccc

SEQ ID NO: 1141744 - RNA, 19 nt, Artificial Sequence
  Description of Artificial Sequence: Synthetic oligonucleotide
cauguacugguccacaucc

SEQ ID NO: 1141745 - RNA, 19 nt, Artificial Sequence
  Description of Artificial Sequence: Synthetic oligonucleotide
ugguggguguagcagaugg

SEQ ID NO: 1141746 - RNA, 19 nt, Artificial Sequence
  Description of Artificial Sequence: Synthetic oligonucleotide
accaagaguccguaggagc

SEQ ID NO: 1141747 - RNA, 19 nt, Artificial Sequence
  Description of Artificial Sequence: Synthetic oligonucleotide
aggaaauuggaacccuggc

SEQ ID NO: 1141748 - RNA, 19 nt, Artificial Sequence
  Description of Artificial Sequence: Synthetic oligonucleotide
agauugguaggacauuggg

SEQ ID NO: 1141749 - RNA, 19 nt, Artificial Sequence
  Description of Artificial Sequence: Synthetic oligonucleotide
gagacugcaaggcucaagc

SEQ ID NO: 1141750 - RNA, 19 nt, Artificial Sequence
  Description of Artificial Sequence: Synthetic oligonucleotide
caguuguucucaaagagug

SEQ ID NO: 1141751 - RNA, 19 nt, Artificial Sequence
  Description of Artificial Sequence: Synthetic oligonucleotide
uuucacagaaaagaggaac

SEQ ID NO: 1141752 - RNA, 19 nt, Artificial Sequence
  Description of Artificial Sequence: Synthetic oligonucleotide
acuuucacagaaaagagga

SEQ ID NO: 1141753 - RNA, 19 nt, Artificial Sequence
  Description of Artificial Sequence: Synthetic oligonucleotide
uuugccaguagaugcaaug

SEQ ID NO: 1141754 - RNA, 19 nt, Artificial Sequence
  Description of Artificial Sequence: Synthetic oligonucleotide
acagaaaagaggaacucgg

SEQ ID NO: 1141755 - RNA, 19 nt, Artificial Sequence
  Description of Artificial Sequence: Synthetic oligonucleotide
gauugguaggacauugggg

SEQ ID NO: 1141756 - RNA, 19 nt, Artificial Sequence
  Description of Artificial Sequence: Synthetic oligonucleotide
gauaggguugugcacacac

SEQ ID NO: 1141757 - RNA, 19 nt, Artificial Sequence
  Description of Artificial Sequence: Synthetic oligonucleotide
cacuuucacagaaaagagg

SEQ ID NO: 1141758 - RNA, 19 nt, Artificial Sequence
  Description of Artificial Sequence: Synthetic oligonucleotide
uccuuuaauagaucgcaca

SEQ ID NO: 1141759 - RNA, 19 nt, Artificial Sequence
  Description of Artificial Sequence: Synthetic oligonucleotide
aggauuuggaugguguagc

SEQ ID NO: 1141760 - RNA, 19 nt, Artificial Sequence
  Description of Artificial Sequence: Synthetic oligonucleotide
guuguucucaaagagugag

SEQ ID NO: 1141761 - RNA, 19 nt, Artificial Sequence
  Description of Artificial Sequence: Synthetic oligonucleotide
uguugugcuuuauuguccc

SEQ ID NO: 1141762 - RNA, 19 nt, Artificial Sequence
  Description of Artificial Sequence: Synthetic oligonucleotide
ucugggauaggguugugca

SEQ ID NO: 1141763 - RNA, 19 nt, Artificial Sequence
  Description of Artificial Sequence: Synthetic oligonucleotide
aguagaugcaauggccucc

SEQ ID NO: 1141764 - RNA, 19 nt, Artificial Sequence
  Description of Artificial Sequence: Synthetic oligonucleotide
ggaguccuuuaauagaucg

SEQ ID NO: 1141765 - RNA, 19 nt, Artificial Sequence
  Description of Artificial Sequence: Synthetic oligonucleotide
acacuauguacauuguugu

SEQ ID NO: 1141766 - RNA, 19 nt, Artificial Sequence
  Description of Artificial Sequence: Synthetic oligonucleotide
agaaccauucuguagcagu

SEQ ID NO: 1141767 - RNA, 19 nt, Artificial Sequence
  Description of Artificial Sequence: Synthetic oligonucleotide
gaaacagaagggucagugc

SEQ ID NO: 1141768 - RNA, 19 nt, Artificial Sequence
  Description of Artificial Sequence: Synthetic oligonucleotide
agugagagcaggucaucac

SEQ ID NO: 1141769 - RNA, 19 nt, Artificial Sequence
  Description of Artificial Sequence: Synthetic oligonucleotide
ugagucugaaagcccaccc

SEQ ID NO: 1141770 - RNA, 19 nt, Artificial Sequence
  Description of Artificial Sequence: Synthetic oligonucleotide
auuggucaguucugggagc

SEQ ID NO: 1141771 - RNA, 19 nt, Artificial Sequence
  Description of Artificial Sequence: Synthetic oligonucleotide
aacacaggaucaguuguuc

SEQ ID NO: 1141772 - RNA, 19 nt, Artificial Sequence
  Description of Artificial Sequence: Synthetic oligonucleotide
agcucaucaggauugguca

SEQ ID NO: 1141773 - RNA, 19 nt, Artificial Sequence
  Description of Artificial Sequence: Synthetic oligonucleotide
uuuacacagagcugagucu

SEQ ID NO: 1141774 - RNA, 19 nt, Artificial Sequence
  Description of Artificial Sequence: Synthetic oligonucleotide
ugaguucugaauguaaauc

SEQ ID NO: 1141775 - RNA, 19 nt, Artificial Sequence
  Description of Artificial Sequence: Synthetic oligonucleotide
ucagauugguaggacauug

SEQ ID NO: 1141776 - RNA, 19 nt, Artificial Sequence
  Description of Artificial Sequence: Synthetic oligonucleotide
ugcugacuuaaauagcugu

SEQ ID NO: 1141777 - RNA, 19 nt, Artificial Sequence
  Description of Artificial Sequence: Synthetic oligonucleotide
ucugagacugcaaggcuca

SEQ ID NO: 1141778 - RNA, 19 nt, Artificial Sequence
  Description of Artificial Sequence: Synthetic oligonucleotide
ucugaaagcccaccccuag

SEQ ID NO: 1141779 - RNA, 19 nt, Artificial Sequence
  Description of Artificial Sequence: Synthetic oligonucleotide
uggagaauuuacacagagc

SEQ ID NO: 1141780 - RNA, 19 nt, Artificial Sequence
  Description of Artificial Sequence: Synthetic oligonucleotide
aggcucaagccacuggagc

SEQ ID NO: 1141781 - RNA, 19 nt, Artificial Sequence
  Description of Artificial Sequence: Synthetic oligonucleotide
uaaauagcuguccccuccc

SEQ ID NO: 1141782 - RNA, 19 nt, Artificial Sequence
  Description of Artificial Sequence: Synthetic oligonucleotide
agaugggaaggauucuggg

SEQ ID NO: 1141783 - RNA, 19 nt, Artificial Sequence
  Description of Artificial Sequence: Synthetic oligonucleotide
ugucagauugguaggacau

SEQ ID NO: 1141784 - RNA, 19 nt, Artificial Sequence
  Description of Artificial Sequence: Synthetic oligonucleotide
ggaucaguuguucucaaag

SEQ ID NO: 1141785 - RNA, 19 nt, Artificial Sequence
  Description of Artificial Sequence: Synthetic oligonucleotide
acuuaaauagcuguccccu

SEQ ID NO: 1141786 - RNA, 19 nt, Artificial Sequence
  Description of Artificial Sequence: Synthetic oligonucleotide
aauagaucgcacagacagg

SEQ ID NO: 1141787 - RNA, 19 nt, Artificial Sequence
  Description of Artificial Sequence: Synthetic oligonucleotide
uuaauagaucgcacagaca

SEQ ID NO: 1141788 - RNA, 19 nt, Artificial Sequence
  Description of Artificial Sequence: Synthetic oligonucleotide
gaugguguagcugucuggc

SEQ ID NO: 1141789 - RNA, 19 nt, Artificial Sequence
  Description of Artificial Sequence: Synthetic oligonucleotide
uugccaguagaugcaaugg

SEQ ID NO: 1141790 - RNA, 19 nt, Artificial Sequence
  Description of Artificial Sequence: Synthetic oligonucleotide
aguccuuuaauagaucgca

SEQ ID NO: 1141791 - RNA, 19 nt, Artificial Sequence
  Description of Artificial Sequence: Synthetic oligonucleotide
cacagaaaagaggaacucg

SEQ ID NO: 1141792 - RNA, 19 nt, Artificial Sequence
  Description of Artificial Sequence: Synthetic oligonucleotide
ugaugugcaggucaggcuu

SEQ ID NO: 1141793 - RNA, 19 nt, Artificial Sequence
  Description of Artificial Sequence: Synthetic oligonucleotide
uagcagaugggaaggauuc

SEQ ID NO: 1141794 - RNA, 19 nt, Artificial Sequence
  Description of Artificial Sequence: Synthetic oligonucleotide
cugacuuaaauagcugucc

SEQ ID NO: 1141795 - RNA, 19 nt, Artificial Sequence
  Description of Artificial Sequence: Synthetic oligonucleotide
auguaaaucaggaugccca

SEQ ID NO: 1141796 - RNA, 19 nt, Artificial Sequence
  Description of Artificial Sequence: Synthetic oligonucleotide
ucaaagagugagagcaggu

SEQ ID NO: 1141797 - RNA, 19 nt, Artificial Sequence
  Description of Artificial Sequence: Synthetic oligonucleotide
agacugcaaggcucaagcc

SEQ ID NO: 1141798 - RNA, 19 nt, Artificial Sequence
  Description of Artificial Sequence: Synthetic oligonucleotide
cagugagcuugacagaggg

SEQ ID NO: 1141799 - RNA, 19 nt, Artificial Sequence
  Description of Artificial Sequence: Synthetic oligonucleotide
auagaucgcacagacagga

SEQ ID NO: 1141800 - RNA, 19 nt, Artificial Sequence
  Description of Artificial Sequence: Synthetic oligonucleotide
cagggguuaacacaggauc

SEQ ID NO: 1141801 - RNA, 19 nt, Artificial Sequence
  Description of Artificial Sequence: Synthetic oligonucleotide
ugccaguagaugcaauggc

SEQ ID NO: 1141802 - RNA, 19 nt, Artificial Sequence
  Description of Artificial Sequence: Synthetic oligonucleotide
ggaaugucagauugguagg

SEQ ID NO: 1141803 - RNA, 19 nt, Artificial Sequence
  Description of Artificial Sequence: Synthetic oligonucleotide
aggacaagcagaaacagaa

SEQ ID NO: 1141804 - RNA, 19 nt, Artificial Sequence
  Description of Artificial Sequence: Synthetic oligonucleotide
uggugaucuccucauaguc

SEQ ID NO: 1141805 - RNA, 19 nt, Artificial Sequence
  Description of Artificial Sequence: Synthetic oligonucleotide
aauuggaacccuggcuggg

SEQ ID NO: 1141806 - RNA, 19 nt, Artificial Sequence
  Description of Artificial Sequence: Synthetic oligonucleotide
agucugaaagcccaccccu

SEQ ID NO: 1141807 - RNA, 19 nt, Artificial Sequence
  Description of Artificial Sequence: Synthetic oligonucleotide
agaucgcacagacaggaga

SEQ ID NO: 1141808 - RNA, 19 nt, Artificial Sequence
  Description of Artificial Sequence: Synthetic oligonucleotide
gaaggacaagugcaaggcc

SEQ ID NO: 1141809 - RNA, 19 nt, Artificial Sequence
  Description of Artificial Sequence: Synthetic oligonucleotide
agcagugagcuugacagag

SEQ ID NO: 1141810 - RNA, 19 nt, Artificial Sequence
  Description of Artificial Sequence: Synthetic oligonucleotide
uauuguccccaccccagcc

SEQ ID NO: 1141811 - RNA, 19 nt, Artificial Sequence
  Description of Artificial Sequence: Synthetic oligonucleotide
acagcuguacuaauucuuc

SEQ ID NO: 1141812 - RNA, 19 nt, Artificial Sequence
  Description of Artificial Sequence: Synthetic oligonucleotide
ugggauaggguugugcaca

SEQ ID NO: 1141813 - RNA, 19 nt, Artificial Sequence
  Description of Artificial Sequence: Synthetic oligonucleotide
ucugugaguauguccucgc

SEQ ID NO: 1141814 - RNA, 19 nt, Artificial Sequence
  Description of Artificial Sequence: Synthetic oligonucleotide
ugaguauguccucgccagg

SEQ ID NO: 1141815 - RNA, 19 nt, Artificial Sequence
  Description of Artificial Sequence: Synthetic oligonucleotide
gauugaaggccaguucgcc

SEQ ID NO: 1141816 - RNA, 19 nt, Artificial Sequence
  Description of Artificial Sequence: Synthetic oligonucleotide
gaaccauucuguagcagug

SEQ ID NO: 1141817 - RNA, 19 nt, Artificial Sequence
  Description of Artificial Sequence: Synthetic oligonucleotide
uuauuguccccaccccagc

SEQ ID NO: 1141818 - RNA, 19 nt, Artificial Sequence
  Description of Artificial Sequence: Synthetic oligonucleotide
ccuuuaauagaucgcacag

SEQ ID NO: 1141819 - RNA, 19 nt, Artificial Sequence
  Description of Artificial Sequence: Synthetic oligonucleotide
gaauguaaaucaggaugcc

SEQ ID NO: 1141820 - RNA, 19 nt, Artificial Sequence
  Description of Artificial Sequence: Synthetic oligonucleotide
cagauugguaggacauugg

SEQ ID NO: 1141821 - RNA, 19 nt, Artificial Sequence
  Description of Artificial Sequence: Synthetic oligonucleotide
uccguaggagccagccucg

SEQ ID NO: 1141822 - RNA, 19 nt, Artificial Sequence
  Description of Artificial Sequence: Synthetic oligonucleotide
gaacucagcgagguuuugg

SEQ ID NO: 1141823 - RNA, 19 nt, Artificial Sequence
  Description of Artificial Sequence: Synthetic oligonucleotide
agcagaaacagaaggguca

SEQ ID NO: 1141824 - RNA, 19 nt, Artificial Sequence
  Description of Artificial Sequence: Synthetic oligonucleotide
ugcuugcaggcccaggcgc

SEQ ID NO: 1141825 - RNA, 19 nt, Artificial Sequence
  Description of Artificial Sequence: Synthetic oligonucleotide
gagggaguccuuuaauaga

SEQ ID NO: 1141826 - RNA, 19 nt, Artificial Sequence
  Description of Artificial Sequence: Synthetic oligonucleotide
gaucgcacagacaggagac

SEQ ID NO: 1141827 - RNA, 19 nt, Artificial Sequence
  Description of Artificial Sequence: Synthetic oligonucleotide
cuguaugguucugagacug

SEQ ID NO: 1141828 - RNA, 19 nt, Artificial Sequence
  Description of Artificial Sequence: Synthetic oligonucleotide
gaauuuacacagagcugag

SEQ ID NO: 1141829 - RNA, 19 nt, Artificial Sequence
  Description of Artificial Sequence: Synthetic oligonucleotide
augucagauugguaggaca

SEQ ID NO: 1141830 - RNA, 19 nt, Artificial Sequence
  Description of Artificial Sequence: Synthetic oligonucleotide
uguaugguucugagacugc

SEQ ID NO: 1141831 - RNA, 19 nt, Artificial Sequence
  Description of Artificial Sequence: Synthetic oligonucleotide
uacauuguugugcuuuauu

SEQ ID NO: 1141832 - RNA, 19 nt, Artificial Sequence
  Description of Artificial Sequence: Synthetic oligonucleotide
accaccaggcauccugugg

SEQ ID NO: 1141833 - RNA, 19 nt, Artificial Sequence
  Description of Artificial Sequence: Synthetic oligonucleotide
agaccaagaguccguagga

SEQ ID NO: 1141834 - RNA, 19 nt, Artificial Sequence
  Description of Artificial Sequence: Synthetic oligonucleotide
cacaggaucaguuguucuc

SEQ ID NO: 1141835 - RNA, 19 nt, Artificial Sequence
  Description of Artificial Sequence: Synthetic oligonucleotide
caugcugacuuaaauagcu

SEQ ID NO: 1141836 - RNA, 19 nt, Artificial Sequence
  Description of Artificial Sequence: Synthetic oligonucleotide
acucagcgagguuuugggg

SEQ ID NO: 1141837 - RNA, 19 nt, Artificial Sequence
  Description of Artificial Sequence: Synthetic oligonucleotide
aaauagcuguccccucccu

SEQ ID NO: 1141838 - RNA, 19 nt, Artificial Sequence
  Description of Artificial Sequence: Synthetic oligonucleotide
ugggaaggauucugggaag

SEQ ID NO: 1141839 - RNA, 19 nt, Artificial Sequence
  Description of Artificial Sequence: Synthetic oligonucleotide
agggagaaccaccaggcau

SEQ ID NO: 1141840 - RNA, 19 nt, Artificial Sequence
  Description of Artificial Sequence: Synthetic oligonucleotide
ucuguaugguucugagacu

SEQ ID NO: 1141841 - RNA, 19 nt, Artificial Sequence
  Description of Artificial Sequence: Synthetic oligonucleotide
uugaugugcaggucaggcu

SEQ ID NO: 1141842 - RNA, 19 nt, Artificial Sequence
  Description of Artificial Sequence: Synthetic oligonucleotide
ggcaugagcacaugggcag

SEQ ID NO: 1141843 - RNA, 19 nt, Artificial Sequence
  Description of Artificial Sequence: Synthetic oligonucleotide
gauuuggaugguguagcug

SEQ ID NO: 1141844 - RNA, 19 nt, Artificial Sequence
  Description of Artificial Sequence: Synthetic oligonucleotide
uguacauuguugugcuuua

SEQ ID NO: 1141845 - RNA, 19 nt, Artificial Sequence
  Description of Artificial Sequence: Synthetic oligonucleotide
gaguauguccucgccaggc

SEQ ID NO: 1141846 - RNA, 19 nt, Artificial Sequence
  Description of Artificial Sequence: Synthetic oligonucleotide
gguucugagacugcaaggc

SEQ ID NO: 1141847 - RNA, 19 nt, Artificial Sequence
  Description of Artificial Sequence: Synthetic oligonucleotide
aauagcuguccccucccuu

SEQ ID NO: 1141848 - RNA, 19 nt, Artificial Sequence
  Description of Artificial Sequence: Synthetic oligonucleotide
cagggugugugcaugagga

SEQ ID NO: 1141849 - RNA, 19 nt, Artificial Sequence
  Description of Artificial Sequence: Synthetic oligonucleotide
cacuauguacauuguugug

SEQ ID NO: 1141850 - RNA, 19 nt, Artificial Sequence
  Description of Artificial Sequence: Synthetic oligonucleotide
gaguccuuuaauagaucgc

SEQ ID NO: 1141851 - RNA, 19 nt, Artificial Sequence
  Description of Artificial Sequence: Synthetic oligonucleotide
agccucgccagccagcucu

SEQ ID NO: 1141852 - RNA, 19 nt, Artificial Sequence
  Description of Artificial Sequence: Synthetic oligonucleotide
ugggcccuguguuugguug

SEQ ID NO: 1141853 - RNA, 19 nt, Artificial Sequence
  Description of Artificial Sequence: Synthetic oligonucleotide
agagcagcucaucaggauu

SEQ ID NO: 1141854 - RNA, 19 nt, Artificial Sequence
  Description of Artificial Sequence: Synthetic oligonucleotide
cuagcgcccugcuugcagg

SEQ ID NO: 1141855 - RNA, 19 nt, Artificial Sequence
  Description of Artificial Sequence: Synthetic oligonucleotide
cagacuugucugcagucag

SEQ ID NO: 1141856 - RNA, 19 nt, Artificial Sequence
  Description of Artificial Sequence: Synthetic oligonucleotide
guaggagccagccucgcca

SEQ ID NO: 1141857 - RNA, 19 nt, Artificial Sequence
  Description of Artificial Sequence: Synthetic oligonucleotide
guaggagagcagcucauca

SEQ ID NO: 1141858 - RNA, 19 nt, Artificial Sequence
  Description of Artificial Sequence: Synthetic oligonucleotide
cugggugugggccgcaggg

SEQ ID NO: 1141859 - RNA, 19 nt, Artificial Sequence
  Description of Artificial Sequence: Synthetic oligonucleotide
uagaucgcacagacaggag

SEQ ID NO: 1141860 - RNA, 19 nt, Artificial Sequence
  Description of Artificial Sequence: Synthetic oligonucleotide
caccugaagcucagggugg

SEQ ID NO: 1141861 - RNA, 19 nt, Artificial Sequence
  Description of Artificial Sequence: Synthetic oligonucleotide
uaacacaggaucaguuguu

SEQ ID NO: 1141862 - RNA, 19 nt, Artificial Sequence
  Description of Artificial Sequence: Synthetic oligonucleotide
ccaagaguccguaggagcc

SEQ ID NO: 1141863 - RNA, 19 nt, Artificial Sequence
  Description of Artificial Sequence: Synthetic oligonucleotide
ggguguagcagaugggaag

SEQ ID NO: 1141864 - RNA, 19 nt, Artificial Sequence
  Description of Artificial Sequence: Synthetic oligonucleotide
ugugugcaugaggagauuc

SEQ ID NO: 1141865 - RNA, 19 nt, Artificial Sequence
  Description of Artificial Sequence: Synthetic oligonucleotide
aucccuggaccacauucag

SEQ ID NO: 1141866 - RNA, 19 nt, Artificial Sequence
  Description of Artificial Sequence: Synthetic oligonucleotide
gaaugucagauugguagga

SEQ ID NO: 1141867 - RNA, 19 nt, Artificial Sequence
  Description of Artificial Sequence: Synthetic oligonucleotide
auguacauuguugugcuuu

SEQ ID NO: 1141868 - RNA, 19 nt, Artificial Sequence
  Description of Artificial Sequence: Synthetic oligonucleotide
cuauguacauuguugugcu

SEQ ID NO: 1141869 - RNA, 19 nt, Artificial Sequence
  Description of Artificial Sequence: Synthetic oligonucleotide
uagaggggcugacacucca

SEQ ID NO: 1141870 - RNA, 19 nt, Artificial Sequence
  Description of Artificial Sequence: Synthetic oligonucleotide
caaagagugagagcagguc

SEQ ID NO: 1141871 - RNA, 19 nt, Artificial Sequence
  Description of Artificial Sequence: Synthetic oligonucleotide
caaggcucaagccacugga

SEQ ID NO: 1141872 - RNA, 19 nt, Artificial Sequence
  Description of Artificial Sequence: Synthetic oligonucleotide
ugagacugcaaggcucaag

SEQ ID NO: 1141873 - RNA, 19 nt, Artificial Sequence
  Description of Artificial Sequence: Synthetic oligonucleotide
agcugucugcacucaguag

SEQ ID NO: 1141874 - RNA, 19 nt, Artificial Sequence
  Description of Artificial Sequence: Synthetic oligonucleotide
uuuggaugguguagcuguc

SEQ ID NO: 1141875 - RNA, 19 nt, Artificial Sequence
  Description of Artificial Sequence: Synthetic oligonucleotide
ugggugaacucagcgaggu

SEQ ID NO: 1141876 - RNA, 19 nt, Artificial Sequence
  Description of Artificial Sequence: Synthetic oligonucleotide
auaggguugugcacacacg

SEQ ID NO: 1141877 - RNA, 19 nt, Artificial Sequence
  Description of Artificial Sequence: Synthetic oligonucleotide
acuugucugcagucaggag

SEQ ID NO: 1141878 - RNA, 19 nt, Artificial Sequence
  Description of Artificial Sequence: Synthetic oligonucleotide
cuuuaauagaucgcacaga

SEQ ID NO: 1141879 - RNA, 19 nt, Artificial Sequence
  Description of Artificial Sequence: Synthetic oligonucleotide
aggcuagcgcccugcuugc

SEQ ID NO: 1141880 - RNA, 19 nt, Artificial Sequence
  Description of Artificial Sequence: Synthetic oligonucleotide
agggcgccucgcaagaacc

SEQ ID NO: 1141881 - RNA, 19 nt, Artificial Sequence
  Description of Artificial Sequence: Synthetic oligonucleotide
cucgcaagaaccauucugu

SEQ ID NO: 1141882 - RNA, 19 nt, Artificial Sequence
  Description of Artificial Sequence: Synthetic oligonucleotide
aggguugugcacacacggc

SEQ ID NO: 1141883 - RNA, 19 nt, Artificial Sequence
  Description of Artificial Sequence: Synthetic oligonucleotide
cacaccagucaguccacag

SEQ ID NO: 1141884 - RNA, 19 nt, Artificial Sequence
  Description of Artificial Sequence: Synthetic oligonucleotide
cuggugcucuguaugguuc

SEQ ID NO: 1141885 - RNA, 19 nt, Artificial Sequence
  Description of Artificial Sequence: Synthetic oligonucleotide
gcgcuuugccaguagaugc

SEQ ID NO: 1141886 - RNA, 19 nt, Artificial Sequence
  Description of Artificial Sequence: Synthetic oligonucleotide
guagaugcaauggccuccc

SEQ ID NO: 1141887 - RNA, 19 nt, Artificial Sequence
  Description of Artificial Sequence: Synthetic oligonucleotide
cugggugaacucagcgagg

SEQ ID NO: 1141888 - RNA, 19 nt, Artificial Sequence
  Description of Artificial Sequence: Synthetic oligonucleotide
guggugauaucugugagua

SEQ ID NO: 1141889 - RNA, 19 nt, Artificial Sequence
  Description of Artificial Sequence: Synthetic oligonucleotide
agggaguccuuuaauagau

SEQ ID NO: 1141890 - RNA, 19 nt, Artificial Sequence
  Description of Artificial Sequence: Synthetic oligonucleotide
ucccuggaccacauucagc

SEQ ID NO: 1141891 - RNA, 19 nt, Artificial Sequence
  Description of Artificial Sequence: Synthetic oligonucleotide
ucuggugcucuguaugguu

SEQ ID NO: 1141892 - RNA, 19 nt, Artificial Sequence
  Description of Artificial Sequence: Synthetic oligonucleotide
caguagaugcaauggccuc

SEQ ID NO: 1141893 - RNA, 19 nt, Artificial Sequence
  Description of Artificial Sequence: Synthetic oligonucleotide
gaguccguaggagccagcc

SEQ ID NO: 1141894 - RNA, 19 nt, Artificial Sequence
  Description of Artificial Sequence: Synthetic oligonucleotide
aagcccaccccuagagggg

SEQ ID NO: 1141895 - RNA, 19 nt, Artificial Sequence
  Description of Artificial Sequence: Synthetic oligonucleotide
gagacacaacaggcuagcg

SEQ ID NO: 1141896 - RNA, 19 nt, Artificial Sequence
  Description of Artificial Sequence: Synthetic oligonucleotide
agggguuaacacaggauca

SEQ ID NO: 1141897 - RNA, 19 nt, Artificial Sequence
  Description of Artificial Sequence: Synthetic oligonucleotide
gucgauggugaucuccuca

SEQ ID NO: 1141898 - RNA, 19 nt, Artificial Sequence
  Description of Artificial Sequence: Synthetic oligonucleotide
ggggaggucagguggaccc

SEQ ID NO: 1141899 - RNA, 19 nt, Artificial Sequence
  Description of Artificial Sequence: Synthetic oligonucleotide
uccucgccaggccaggggu

SEQ ID NO: 1141900 - RNA, 19 nt, Artificial Sequence
  Description of Artificial Sequence: Synthetic oligonucleotide
ggauuggucaguucuggga

SEQ ID NO: 1141901 - RNA, 19 nt, Artificial Sequence
  Description of Artificial Sequence: Synthetic oligonucleotide
guaaaucaggaugcccagc

SEQ ID NO: 1141902 - RNA, 19 nt, Artificial Sequence
  Description of Artificial Sequence: Synthetic oligonucleotide
uggugcucuguaugguucu

SEQ ID NO: 1141903 - RNA, 19 nt, Artificial Sequence
  Description of Artificial Sequence: Synthetic oligonucleotide
ugauaucugugaguauguc

SEQ ID NO: 1141904 - RNA, 19 nt, Artificial Sequence
  Description of Artificial Sequence: Synthetic oligonucleotide
ugcggcagcgcuucagcac

SEQ ID NO: 1141905 - RNA, 19 nt, Artificial Sequence
  Description of Artificial Sequence: Synthetic oligonucleotide
gaaggcuguggugauaucu

SEQ ID NO: 1141906 - RNA, 19 nt, Artificial Sequence
  Description of Artificial Sequence: Synthetic oligonucleotide
guguuugguuggcccaggg

SEQ ID NO: 1141907 - RNA, 19 nt, Artificial Sequence
  Description of Artificial Sequence: Synthetic oligonucleotide
gcugcagaccaagaguccg

SEQ ID NO: 1141908 - RNA, 19 nt, Artificial Sequence
  Description of Artificial Sequence: Synthetic oligonucleotide
aggagacacaacaggcuag

SEQ ID NO: 1141909 - RNA, 19 nt, Artificial Sequence
  Description of Artificial Sequence: Synthetic oligonucleotide
ucgccgaugggcccugugu

SEQ ID NO: 1141910 - RNA, 19 nt, Artificial Sequence
  Description of Artificial Sequence: Synthetic oligonucleotide
aacaggcuagcgcccugcu

SEQ ID NO: 1141911 - RNA, 19 nt, Artificial Sequence
  Description of Artificial Sequence: Synthetic oligonucleotide
agagugagagcaggucauc

SEQ ID NO: 1141912 - RNA, 19 nt, Artificial Sequence
  Description of Artificial Sequence: Synthetic oligonucleotide
ugaggagauucagggagaa

SEQ ID NO: 1141913 - RNA, 19 nt, Artificial Sequence
  Description of Artificial Sequence: Synthetic oligonucleotide
cugcuugcaggcccaggcg

SEQ ID NO: 1141914 - RNA, 19 nt, Artificial Sequence
  Description of Artificial Sequence: Synthetic oligonucleotide
ccaccugaagcucagggug

SEQ ID NO: 1141915 - RNA, 19 nt, Artificial Sequence
  Description of Artificial Sequence: Synthetic oligonucleotide
agacuugucugcagucagg

SEQ ID NO: 1141916 - RNA, 19 nt, Artificial Sequence
  Description of Artificial Sequence: Synthetic oligonucleotide
gcuuuauuguccccacccc

SEQ ID NO: 1141917 - RNA, 19 nt, Artificial Sequence
  Description of Artificial Sequence: Synthetic oligonucleotide
cucugagcugucugcacuc

SEQ ID NO: 1141918 - RNA, 19 nt, Artificial Sequence
  Description of Artificial Sequence: Synthetic oligonucleotide
ccaccaggcauccuguggg

SEQ ID NO: 1141919 - RNA, 19 nt, Artificial Sequence
  Description of Artificial Sequence: Synthetic oligonucleotide
cagucaguccacagaggac

SEQ ID NO: 1141920 - RNA, 19 nt, Artificial Sequence
  Description of Artificial Sequence: Synthetic oligonucleotide
guauguccucgccaggcca

SEQ ID NO: 1141921 - RNA, 19 nt, Artificial Sequence
  Description of Artificial Sequence: Synthetic oligonucleotide
aggcaguggaaggacaagu

SEQ ID NO: 1141922 - RNA, 19 nt, Artificial Sequence
  Description of Artificial Sequence: Synthetic oligonucleotide
agcccaccccuagaggggc

SEQ ID NO: 1141923 - RNA, 19 nt, Artificial Sequence
  Description of Artificial Sequence: Synthetic oligonucleotide
guaugguucugagacugca

SEQ ID NO: 1141924 - RNA, 19 nt, Artificial Sequence
  Description of Artificial Sequence: Synthetic oligonucleotide
ucgcaagaaccauucugua

SEQ ID NO: 1141925 - RNA, 19 nt, Artificial Sequence
  Description of Artificial Sequence: Synthetic oligonucleotide
gguggacccagguaggaga

SEQ ID NO: 1141926 - RNA, 19 nt, Artificial Sequence
  Description of Artificial Sequence: Synthetic oligonucleotide
ucaucaggggcgggcagug

SEQ ID NO: 1141927 - RNA, 19 nt, Artificial Sequence
  Description of Artificial Sequence: Synthetic oligonucleotide
gagugagagcaggucauca

SEQ ID NO: 1141928 - RNA, 19 nt, Artificial Sequence
  Description of Artificial Sequence: Synthetic oligonucleotide
gaggcaaggggcagacuug

SEQ ID NO: 1141929 - RNA, 19 nt, Artificial Sequence
  Description of Artificial Sequence: Synthetic oligonucleotide
caagcagaaacagaagggu

SEQ ID NO: 1141930 - RNA, 19 nt, Artificial Sequence
  Description of Artificial Sequence: Synthetic oligonucleotide
ggucaggcuucacaggaac

SEQ ID NO: 1141931 - RNA, 19 nt, Artificial Sequence
  Description of Artificial Sequence: Synthetic oligonucleotide
gagcugagucugaaagccc

SEQ ID NO: 1141932 - RNA, 19 nt, Artificial Sequence
  Description of Artificial Sequence: Synthetic oligonucleotide
gggaaggauucugggaagg

SEQ ID NO: 1141933 - RNA, 19 nt, Artificial Sequence
  Description of Artificial Sequence: Synthetic oligonucleotide
aggucagguggacccaggu

SEQ ID NO: 1141934 - RNA, 19 nt, Artificial Sequence
  Description of Artificial Sequence: Synthetic oligonucleotide
caguaggccacaccaguca

SEQ ID NO: 1141935 - RNA, 19 nt, Artificial Sequence
  Description of Artificial Sequence: Synthetic oligonucleotide
guggacccagguaggagag

SEQ ID NO: 1141936 - RNA, 19 nt, Artificial Sequence
  Description of Artificial Sequence: Synthetic oligonucleotide
cauagucugaguucugaau

SEQ ID NO: 1141937 - RNA, 19 nt, Artificial Sequence
  Description of Artificial Sequence: Synthetic oligonucleotide
ugggccgagggcugcaauc

SEQ ID NO: 1141938 - RNA, 19 nt, Artificial Sequence
  Description of Artificial Sequence: Synthetic oligonucleotide
aggaucaguuguucucaaa

SEQ ID NO: 1141939 - RNA, 19 nt, Artificial Sequence
  Description of Artificial Sequence: Synthetic oligonucleotide
gugcuuuauuguccccacc

SEQ ID NO: 1141940 - RNA, 19 nt, Artificial Sequence
  Description of Artificial Sequence: Synthetic oligonucleotide
cugcagggcgccucgcaag

SEQ ID NO: 1141941 - RNA, 19 nt, Artificial Sequence
  Description of Artificial Sequence: Synthetic oligonucleotide
caggagacacaacaggcua

SEQ ID NO: 1141942 - RNA, 19 nt, Artificial Sequence
  Description of Artificial Sequence: Synthetic oligonucleotide
guagcugucuggccuggga

SEQ ID NO: 1141943 - RNA, 19 nt, Artificial Sequence
  Description of Artificial Sequence: Synthetic oligonucleotide
gcaggucaggcuucacagg

SEQ ID NO: 1141944 - RNA, 19 nt, Artificial Sequence
  Description of Artificial Sequence: Synthetic oligonucleotide
ggauugaaggccaguucgc

SEQ ID NO: 1141945 - RNA, 19 nt, Artificial Sequence
  Description of Artificial Sequence: Synthetic oligonucleotide
accagucaguccacagagg

SEQ ID NO: 1141946 - RNA, 19 nt, Artificial Sequence
  Description of Artificial Sequence: Synthetic oligonucleotide
guccucgccaggccagggg

SEQ ID NO: 1141947 - RNA, 19 nt, Artificial Sequence
  Description of Artificial Sequence: Synthetic oligonucleotide
cacagaggaccaugcugac

SEQ ID NO: 1141948 - RNA, 19 nt, Artificial Sequence
  Description of Artificial Sequence: Synthetic oligonucleotide
augaggagauucagggaga

SEQ ID NO: 1141949 - RNA, 19 nt, Artificial Sequence
  Description of Artificial Sequence: Synthetic oligonucleotide
ugggccgcaggguggagau

SEQ ID NO: 1141950 - RNA, 19 nt, Artificial Sequence
  Description of Artificial Sequence: Synthetic oligonucleotide
ggcaguggaaggacaagug

SEQ ID NO: 1141951 - RNA, 19 nt, Artificial Sequence
  Description of Artificial Sequence: Synthetic oligonucleotide
cgcaagaaccauucuguag

SEQ ID NO: 1141952 - RNA, 19 nt, Artificial Sequence
  Description of Artificial Sequence: Synthetic oligonucleotide
ggaccacuggccuggggcc

SEQ ID NO: 1141953 - RNA, 19 nt, Artificial Sequence
  Description of Artificial Sequence: Synthetic oligonucleotide
aggucagggugugugcaug

SEQ ID NO: 1141954 - RNA, 19 nt, Artificial Sequence
  Description of Artificial Sequence: Synthetic oligonucleotide
uucgccgaugggcccugug

SEQ ID NO: 1141955 - RNA, 19 nt, Artificial Sequence
  Description of Artificial Sequence: Synthetic oligonucleotide
uagcgcccugcuugcaggc

SEQ ID NO: 1141956 - RNA, 19 nt, Artificial Sequence
  Description of Artificial Sequence: Synthetic oligonucleotide
cccuguguuugguuggccc

SEQ ID NO: 1141957 - RNA, 19 nt, Artificial Sequence
  Description of Artificial Sequence: Synthetic oligonucleotide
caacaggcuagcgcccugc

SEQ ID NO: 1141958 - RNA, 19 nt, Artificial Sequence
  Description of Artificial Sequence: Synthetic oligonucleotide
uuucuacacuauguacauu

SEQ ID NO: 1141959 - RNA, 19 nt, Artificial Sequence
  Description of Artificial Sequence: Synthetic oligonucleotide
ggcgcuuugccaguagaug

SEQ ID NO: 1141960 - RNA, 19 nt, Artificial Sequence
  Description of Artificial Sequence: Synthetic oligonucleotide
gcuguacuaauucuucacu

SEQ ID NO: 1141961 - RNA, 19 nt, Artificial Sequence
  Description of Artificial Sequence: Synthetic oligonucleotide
acagaggaccaugcugacu

SEQ ID NO: 1141962 - RNA, 19 nt, Artificial Sequence
  Description of Artificial Sequence: Synthetic oligonucleotide
cucaguaggccacaccagu

SEQ ID NO: 1141963 - RNA, 19 nt, Artificial Sequence
  Description of Artificial Sequence: Synthetic oligonucleotide
ccaggaaauuggaacccug

SEQ ID NO: 1141964 - RNA, 19 nt, Artificial Sequence
  Description of Artificial Sequence: Synthetic oligonucleotide
ugcagaccaagaguccgua

SEQ ID NO: 1141965 - RNA, 19 nt, Artificial Sequence
  Description of Artificial Sequence: Synthetic oligonucleotide
uggggaggucagguggacc

SEQ ID NO: 1141966 - RNA, 19 nt, Artificial Sequence
  Description of Artificial Sequence: Synthetic oligonucleotide
agucugaguucugaaugua

SEQ ID NO: 1141967 - RNA, 19 nt, Artificial Sequence
  Description of Artificial Sequence: Synthetic oligonucleotide
cgagguuuugggguggugg

SEQ ID NO: 1141968 - RNA, 19 nt, Artificial Sequence
  Description of Artificial Sequence: Synthetic oligonucleotide
gccaguucgccgaugggcc

SEQ ID NO: 1141969 - RNA, 19 nt, Artificial Sequence
  Description of Artificial Sequence: Synthetic oligonucleotide
agcgcccugcuugcaggcc

SEQ ID NO: 1141970 - RNA, 19 nt, Artificial Sequence
  Description of Artificial Sequence: Synthetic oligonucleotide
gcuagcgcccugcuugcag

SEQ ID NO: 1141971 - RNA, 19 nt, Artificial Sequence
  Description of Artificial Sequence: Synthetic oligonucleotide
gucagggugugugcaugag

SEQ ID NO: 1141972 - RNA, 19 nt, Artificial Sequence
  Description of Artificial Sequence: Synthetic oligonucleotide
cuugacagagggaggcugu

SEQ ID NO: 1141973 - RNA, 19 nt, Artificial Sequence
  Description of Artificial Sequence: Synthetic oligonucleotide
cugaaagcccaccccuaga

SEQ ID NO: 1141974 - RNA, 19 nt, Artificial Sequence
  Description of Artificial Sequence: Synthetic oligonucleotide
uggccccugggugaacuca

SEQ ID NO: 1141975 - RNA, 19 nt, Artificial Sequence
  Description of Artificial Sequence: Synthetic oligonucleotide
aucgcacagacaggagaca

SEQ ID NO: 1141976 - RNA, 19 nt, Artificial Sequence
  Description of Artificial Sequence: Synthetic oligonucleotide
agaguccguaggagccagc

SEQ ID NO: 1141977 - RNA, 19 nt, Artificial Sequence
  Description of Artificial Sequence: Synthetic oligonucleotide
ccaucaugcccguggcagg

SEQ ID NO: 1141978 - RNA, 19 nt, Artificial Sequence
  Description of Artificial Sequence: Synthetic oligonucleotide
gcagaccaagaguccguag

SEQ ID NO: 1141979 - RNA, 19 nt, Artificial Sequence
  Description of Artificial Sequence: Synthetic oligonucleotide
agugagcuugacagaggga

SEQ ID NO: 1141980 - RNA, 19 nt, Artificial Sequence
  Description of Artificial Sequence: Synthetic oligonucleotide
gagagcagcucaucaggau

SEQ ID NO: 1141981 - RNA, 19 nt, Artificial Sequence
  Description of Artificial Sequence: Synthetic oligonucleotide
gaaggauucugggaagguu

SEQ ID NO: 1141982 - RNA, 19 nt, Artificial Sequence
  Description of Artificial Sequence: Synthetic oligonucleotide
ggguugugcacacacggcu

SEQ ID NO: 1141983 - RNA, 19 nt, Artificial Sequence
  Description of Artificial Sequence: Synthetic oligonucleotide
ggaggauuuggauggugua

SEQ ID NO: 1141984 - RNA, 19 nt, Artificial Sequence
  Description of Artificial Sequence: Synthetic oligonucleotide
cacacggcugcagggcgcc

SEQ ID NO: 1141985 - RNA, 19 nt, Artificial Sequence
  Description of Artificial Sequence: Synthetic oligonucleotide
auguccucgccaggccagg

SEQ ID NO: 1141986 - RNA, 19 nt, Artificial Sequence
  Description of Artificial Sequence: Synthetic oligonucleotide
gggauaggguugugcacac

SEQ ID NO: 1141987 - RNA, 19 nt, Artificial Sequence
  Description of Artificial Sequence: Synthetic oligonucleotide
agcuugacagagggaggcu

SEQ ID NO: 1141988 - RNA, 19 nt, Artificial Sequence
  Description of Artificial Sequence: Synthetic oligonucleotide
ggcucaagccacuggagcu

SEQ ID NO: 1141989 - RNA, 19 nt, Artificial Sequence
  Description of Artificial Sequence: Synthetic oligonucleotide
uuuugggguggugggugua

SEQ ID NO: 1141990 - RNA, 19 nt, Artificial Sequence
  Description of Artificial Sequence: Synthetic oligonucleotide
gcucacuggagaauuuaca

SEQ ID NO: 1141991 - RNA, 19 nt, Artificial Sequence
  Description of Artificial Sequence: Synthetic oligonucleotide
gcaugagcacaugggcagg

SEQ ID NO: 1141992 - RNA, 19 nt, Artificial Sequence
  Description of Artificial Sequence: Synthetic oligonucleotide
gcucaagccacuggagcug

SEQ ID NO: 1141993 - RNA, 19 nt, Artificial Sequence
  Description of Artificial Sequence: Synthetic oligonucleotide
ccccugggugaacucagcg

SEQ ID NO: 1141994 - RNA, 19 nt, Artificial Sequence
  Description of Artificial Sequence: Synthetic oligonucleotide
ugcuguuuguggggagguc

SEQ ID NO: 1141995 - RNA, 19 nt, Artificial Sequence
  Description of Artificial Sequence: Synthetic oligonucleotide
acaggcuagcgcccugcuu

SEQ ID NO: 1141996 - RNA, 19 nt, Artificial Sequence
  Description of Artificial Sequence: Synthetic oligonucleotide
ccccuagaggggcugacac

SEQ ID NO: 1141997 - RNA, 19 nt, Artificial Sequence
  Description of Artificial Sequence: Synthetic oligonucleotide
cagcgagguuuuggggugg

SEQ ID NO: 1141998 - RNA, 19 nt, Artificial Sequence
  Description of Artificial Sequence: Synthetic oligonucleotide
agaggaccaugcugacuua

SEQ ID NO: 1141999 - RNA, 19 nt, Artificial Sequence
  Description of Artificial Sequence: Synthetic oligonucleotide
gggcaugagcacaugggca

SEQ ID NO: 1142000 - RNA, 19 nt, Artificial Sequence
  Description of Artificial Sequence: Synthetic oligonucleotide
gggucagugcuggacagga

SEQ ID NO: 1142001 - RNA, 19 nt, Artificial Sequence
  Description of Artificial Sequence: Synthetic oligonucleotide
ggggcugccgggacggagg

SEQ ID NO: 1142002 - RNA, 19 nt, Artificial Sequence
  Description of Artificial Sequence: Synthetic oligonucleotide
gaaccaccaggcauccugu

SEQ ID NO: 1142003 - RNA, 19 nt, Artificial Sequence
  Description of Artificial Sequence: Synthetic oligonucleotide
caggcgcuuugccaguaga

SEQ ID NO: 1142004 - RNA, 19 nt, Artificial Sequence
  Description of Artificial Sequence: Synthetic oligonucleotide
acacugggcaugagcacau

SEQ ID NO: 1142005 - RNA, 19 nt, Artificial Sequence
  Description of Artificial Sequence: Synthetic oligonucleotide
cugcagucaggaggcugcc

SEQ ID NO: 1142006 - RNA, 19 nt, Artificial Sequence
  Description of Artificial Sequence: Synthetic oligonucleotide
cagggagaaccaccaggca

SEQ ID NO: 1142007 - RNA, 19 nt, Artificial Sequence
  Description of Artificial Sequence: Synthetic oligonucleotide
ggucagggugugugcauga

SEQ ID NO: 1142008 - RNA, 19 nt, Artificial Sequence
  Description of Artificial Sequence: Synthetic oligonucleotide
caggaucaguuguucucaa

SEQ ID NO: 1142009 - RNA, 19 nt, Artificial Sequence
  Description of Artificial Sequence: Synthetic oligonucleotide
ccccagucaugcugggagg

SEQ ID NO: 1142010 - RNA, 19 nt, Artificial Sequence
  Description of Artificial Sequence: Synthetic oligonucleotide
aggcgcuuugccaguagau

SEQ ID NO: 1142011 - RNA, 19 nt, Artificial Sequence
  Description of Artificial Sequence: Synthetic oligonucleotide
caucaggggcgggcagugg

SEQ ID NO: 1142012 - RNA, 19 nt, Artificial Sequence
  Description of Artificial Sequence: Synthetic oligonucleotide
gcugggguagucggcuggg

SEQ ID NO: 1142013 - RNA, 19 nt, Artificial Sequence
  Description of Artificial Sequence: Synthetic oligonucleotide
gggcugacacuccacccuc

SEQ ID NO: 1142014 - RNA, 19 nt, Artificial Sequence
  Description of Artificial Sequence: Synthetic oligonucleotide
augggcccuguguuugguu

SEQ ID NO: 1142015 - RNA, 19 nt, Artificial Sequence
  Description of Artificial Sequence: Synthetic oligonucleotide
augcccguggcaggauuga

SEQ ID NO: 1142016 - RNA, 19 nt, Artificial Sequence
  Description of Artificial Sequence: Synthetic oligonucleotide
ccaguucgccgaugggccc

SEQ ID NO: 1142017 - RNA, 19 nt, Artificial Sequence
  Description of Artificial Sequence: Synthetic oligonucleotide
cccagucaugcugggaggc

SEQ ID NO: 1142018 - RNA, 19 nt, Artificial Sequence
  Description of Artificial Sequence: Synthetic oligonucleotide
gggcucacagugcggcagc

SEQ ID NO: 1142019 - RNA, 19 nt, Artificial Sequence
  Description of Artificial Sequence: Synthetic oligonucleotide
caggucaucacugcuguuu

SEQ ID NO: 1142020 - RNA, 19 nt, Artificial Sequence
  Description of Artificial Sequence: Synthetic oligonucleotide
caguggcaggcuccagguc

SEQ ID NO: 1142021 - RNA, 19 nt, Artificial Sequence
  Description of Artificial Sequence: Synthetic oligonucleotide
aguucgccgaugggcccug

SEQ ID NO: 1142022 - RNA, 19 nt, Artificial Sequence
  Description of Artificial Sequence: Synthetic oligonucleotide
gggaggauuuggauggugu

SEQ ID NO: 1142023 - RNA, 19 nt, Artificial Sequence
  Description of Artificial Sequence: Synthetic oligonucleotide
uuggagcacacggcugcuu

SEQ ID NO: 1142024 - RNA, 19 nt, Artificial Sequence
  Description of Artificial Sequence: Synthetic oligonucleotide
agcgagguuuugggguggu

SEQ ID NO: 1142025 - RNA, 19 nt, Artificial Sequence
  Description of Artificial Sequence: Synthetic oligonucleotide
ccuuucccagcuguuagca

SEQ ID NO: 1142026 - RNA, 19 nt, Artificial Sequence
  Description of Artificial Sequence: Synthetic oligonucleotide
aggucaggcuucacaggaa

SEQ ID NO: 1142027 - RNA, 19 nt, Artificial Sequence
  Description of Artificial Sequence: Synthetic oligonucleotide
ggggaggauuuggauggug

SEQ ID NO: 1142028 - RNA, 19 nt, Artificial Sequence
  Description of Artificial Sequence: Synthetic oligonucleotide
gucugaaagcccaccccua

SEQ ID NO: 1142029 - RNA, 19 nt, Artificial Sequence
  Description of Artificial Sequence: Synthetic oligonucleotide
ccucauagucugaguucug

SEQ ID NO: 1142030 - RNA, 19 nt, Artificial Sequence
  Description of Artificial Sequence: Synthetic oligonucleotide
ggggcugacacuccacccu

SEQ ID NO: 1142031 - RNA, 19 nt, Artificial Sequence
  Description of Artificial Sequence: Synthetic oligonucleotide
ggacaagugcaaggccaug

SEQ ID NO: 1142032 - RNA, 19 nt, Artificial Sequence
  Description of Artificial Sequence: Synthetic oligonucleotide
cugcagaccaagaguccgu

SEQ ID NO: 1142033 - RNA, 19 nt, Artificial Sequence
  Description of Artificial Sequence: Synthetic oligonucleotide
ugugggccgcaggguggag

SEQ ID NO: 1142034 - RNA, 19 nt, Artificial Sequence
  Description of Artificial Sequence: Synthetic oligonucleotide
ggccccugggugaacucag

SEQ ID NO: 1142035 - RNA, 19 nt, Artificial Sequence
  Description of Artificial Sequence: Synthetic oligonucleotide
cuuugccaguagaugcaau

SEQ ID NO: 1142036 - RNA, 19 nt, Artificial Sequence
  Description of Artificial Sequence: Synthetic oligonucleotide
cagcucacuggagaauuua

SEQ ID NO: 1142037 - RNA, 19 nt, Artificial Sequence
  Description of Artificial Sequence: Synthetic oligonucleotide
ccgaugggcccuguguuug

SEQ ID NO: 1142038 - RNA, 19 nt, Artificial Sequence
  Description of Artificial Sequence: Synthetic oligonucleotide
ggggaaucccuggaccaca

SEQ ID NO: 1142039 - RNA, 19 nt, Artificial Sequence
  Description of Artificial Sequence: Synthetic oligonucleotide
cgccucgcaagaaccauuc

SEQ ID NO: 1142040 - RNA, 19 nt, Artificial Sequence
  Description of Artificial Sequence: Synthetic oligonucleotide
cagugcuggacaggaugca

SEQ ID NO: 1142041 - RNA, 19 nt, Artificial Sequence
  Description of Artificial Sequence: Synthetic oligonucleotide
cucccuuucccagcuguua

SEQ ID NO: 1142042 - RNA, 19 nt, Artificial Sequence
  Description of Artificial Sequence: Synthetic oligonucleotide
gggccgagggcugcaauca

SEQ ID NO: 1142043 - RNA, 19 nt, Artificial Sequence
  Description of Artificial Sequence: Synthetic oligonucleotide
ucccagcuguuagcauuuc

SEQ ID NO: 1142044 - RNA, 19 nt, Artificial Sequence
  Description of Artificial Sequence: Synthetic oligonucleotide
gaugggcccuguguuuggu

SEQ ID NO: 1142045 - RNA, 19 nt, Artificial Sequence
  Description of Artificial Sequence: Synthetic oligonucleotide
ggcugacacuccacccucc

SEQ ID NO: 1142046 - RNA, 19 nt, Artificial Sequence
  Description of Artificial Sequence: Synthetic oligonucleotide
aucaugcccguggcaggau

SEQ ID NO: 1142047 - RNA, 19 nt, Artificial Sequence
  Description of Artificial Sequence: Synthetic oligonucleotide
ggaaggcuguggugauauc

SEQ ID NO: 1142048 - RNA, 19 nt, Artificial Sequence
  Description of Artificial Sequence: Synthetic oligonucleotide
ggaaggauucugggaaggu

SEQ ID NO: 1142049 - RNA, 19 nt, Artificial Sequence
  Description of Artificial Sequence: Synthetic oligonucleotide
cguaggagccagccucgcc

SEQ ID NO: 1142050 - RNA, 19 nt, Artificial Sequence
  Description of Artificial Sequence: Synthetic oligonucleotide
gugggccgcaggguggaga

SEQ ID NO: 1142051 - RNA, 19 nt, Artificial Sequence
  Description of Artificial Sequence: Synthetic oligonucleotide
guacauuguugugcuuuau

SEQ ID NO: 1142052 - RNA, 19 nt, Artificial Sequence
  Description of Artificial Sequence: Synthetic oligonucleotide
gucagauugguaggacauu

SEQ ID NO: 1142053 - RNA, 19 nt, Artificial Sequence
  Description of Artificial Sequence: Synthetic oligonucleotide
gguggagaugaggugguuu

SEQ ID NO: 1142054 - RNA, 19 nt, Artificial Sequence
  Description of Artificial Sequence: Synthetic oligonucleotide
cugcuguuuguggggaggu

SEQ ID NO: 1142055 - RNA, 19 nt, Artificial Sequence
  Description of Artificial Sequence: Synthetic oligonucleotide
gccgagggcugcaaucauc

SEQ ID NO: 1142056 - RNA, 19 nt, Artificial Sequence
  Description of Artificial Sequence: Synthetic oligonucleotide
caggucagggugugugcau

SEQ ID NO: 1142057 - RNA, 19 nt, Artificial Sequence
  Description of Artificial Sequence: Synthetic oligonucleotide
cuuggagcacacggcugcu

SEQ ID NO: 1142058 - RNA, 19 nt, Artificial Sequence
  Description of Artificial Sequence: Synthetic oligonucleotide
ccagggguuaacacaggau

SEQ ID NO: 1142059 - RNA, 19 nt, Artificial Sequence
  Description of Artificial Sequence: Synthetic oligonucleotide
gggaggucagguggaccca

SEQ ID NO: 1142060 - RNA, 19 nt, Artificial Sequence
  Description of Artificial Sequence: Synthetic oligonucleotide
cugagacugcaaggcucaa

SEQ ID NO: 1142061 - RNA, 19 nt, Artificial Sequence
  Description of Artificial Sequence: Synthetic oligonucleotide
ggcccaucgggcuccuccu

SEQ ID NO: 1142062 - RNA, 19 nt, Artificial Sequence
  Description of Artificial Sequence: Synthetic oligonucleotide
caguucgccgaugggcccu

SEQ ID NO: 1142063 - RNA, 19 nt, Artificial Sequence
  Description of Artificial Sequence: Synthetic oligonucleotide
gcgagguuuugggguggug

SEQ ID NO: 1142064 - RNA, 19 nt, Artificial Sequence
  Description of Artificial Sequence: Synthetic oligonucleotide
ggaugcaggcuggguggga

SEQ ID NO: 1142065 - RNA, 19 nt, Artificial Sequence
  Description of Artificial Sequence: Synthetic oligonucleotide
gguggccccugggugaacu

SEQ ID NO: 1142066 - RNA, 19 nt, Artificial Sequence
  Description of Artificial Sequence: Synthetic oligonucleotide
gccccugggugaacucagc

SEQ ID NO: 1142067 - RNA, 19 nt, Artificial Sequence
  Description of Artificial Sequence: Synthetic oligonucleotide
ccguaggagccagccucgc

SEQ ID NO: 1142068 - RNA, 19 nt, Artificial Sequence
  Description of Artificial Sequence: Synthetic oligonucleotide
cccucccuuucccagcugu

SEQ ID NO: 1142069 - RNA, 19 nt, Artificial Sequence
  Description of Artificial Sequence: Synthetic oligonucleotide
cuugcaggcccaggcgcuu

SEQ ID NO: 1142070 - RNA, 19 nt, Artificial Sequence
  Description of Artificial Sequence: Synthetic oligonucleotide
ggcgccucgcaagaaccau

SEQ ID NO: 1142071 - RNA, 19 nt, Artificial Sequence
  Description of Artificial Sequence: Synthetic oligonucleotide
cgccagccagcucuucuga

SEQ ID NO: 1142072 - RNA, 19 nt, Artificial Sequence
  Description of Artificial Sequence: Synthetic oligonucleotide
ggcuagcgcccugcuugca

SEQ ID NO: 1142073 - RNA, 19 nt, Artificial Sequence
  Description of Artificial Sequence: Synthetic oligonucleotide
ccacaccagucaguccaca

SEQ ID NO: 1142074 - RNA, 19 nt, Artificial Sequence
  Description of Artificial Sequence: Synthetic oligonucleotide
gggugaacucagcgagguu

SEQ ID NO: 1142075 - RNA, 19 nt, Artificial Sequence
  Description of Artificial Sequence: Synthetic oligonucleotide
gggccgcaggguggagaug

SEQ ID NO: 1142076 - RNA, 19 nt, Artificial Sequence
  Description of Artificial Sequence: Synthetic oligonucleotide
gcagcucacuggagaauuu

SEQ ID NO: 1142077 - RNA, 19 nt, Artificial Sequence
  Description of Artificial Sequence: Synthetic oligonucleotide
ggccgagggcugcaaucau

SEQ ID NO: 1142078 - RNA, 19 nt, Artificial Sequence
  Description of Artificial Sequence: Synthetic oligonucleotide
ggucagugcuggacaggau

SEQ ID NO: 1142079 - RNA, 19 nt, Artificial Sequence
  Description of Artificial Sequence: Synthetic oligonucleotide
cuggcccaucgggcuccuc

SEQ ID NO: 1142080 - RNA, 19 nt, Artificial Sequence
  Description of Artificial Sequence: Synthetic oligonucleotide
ggaccacauucagcugggu

SEQ ID NO: 1142081 - RNA, 19 nt, Artificial Sequence
  Description of Artificial Sequence: Synthetic oligonucleotide
gcgccucgcaagaaccauu

SEQ ID NO: 1142082 - RNA, 19 nt, Artificial Sequence
  Description of Artificial Sequence: Synthetic oligonucleotide
guucgccgaugggcccugu

SEQ ID NO: 1142083 - RNA, 19 nt, Artificial Sequence
  Description of Artificial Sequence: Synthetic oligonucleotide
ccucgccaggccagggguu

SEQ ID NO: 1142084 - RNA, 19 nt, Artificial Sequence
  Description of Artificial Sequence: Synthetic oligonucleotide
aaagucgucauaaauaaag

SEQ ID NO: 1142085 - RNA, 19 nt, Artificial Sequence
  Description of Artificial Sequence: Synthetic oligonucleotide
aauauauuauaguauacuu

SEQ ID NO: 1142086 - RNA, 19 nt, Artificial Sequence
  Description of Artificial Sequence: Synthetic oligonucleotide
gaauuugcaaacuagggac

SEQ ID NO: 1142087 - RNA, 19 nt, Artificial Sequence
  Description of Artificial Sequence: Synthetic oligonucleotide
gauuaucucaaguucaaag

SEQ ID NO: 1142088 - RNA, 19 nt, Artificial Sequence
  Description of Artificial Sequence: Synthetic oligonucleotide
aauuugagcaccaggauuc

SEQ ID NO: 1142089 - RNA, 19 nt, Artificial Sequence
  Description of Artificial Sequence: Synthetic oligonucleotide
uauacuaagcccuaucuca

SEQ ID NO: 1142090 - RNA, 19 nt, Artificial Sequence
  Description of Artificial Sequence: Synthetic oligonucleotide
gaugaaguggcaucgagag

SEQ ID NO: 1142091 - RNA, 19 nt, Artificial Sequence
  Description of Artificial Sequence: Synthetic oligonucleotide
ucgucauaaauaaagggcc

SEQ ID NO: 1142092 - RNA, 19 nt, Artificial Sequence
  Description of Artificial Sequence: Synthetic oligonucleotide
agacgggugagucugaccc

SEQ ID NO: 1142093 - RNA, 19 nt, Artificial Sequence
  Description of Artificial Sequence: Synthetic oligonucleotide
uaagguagcaauauauuac

SEQ ID NO: 1142094 - RNA, 19 nt, Artificial Sequence
  Description of Artificial Sequence: Synthetic oligonucleotide
uuugucgaagcacaugggg

SEQ ID NO: 1142095 - RNA, 19 nt, Artificial Sequence
  Description of Artificial Sequence: Synthetic oligonucleotide
aauuccauaaaaccccaca

SEQ ID NO: 1142096 - RNA, 19 nt, Artificial Sequence
  Description of Artificial Sequence: Synthetic oligonucleotide
aagguagcaauauauuacu

SEQ ID NO: 1142097 - RNA, 19 nt, Artificial Sequence
  Description of Artificial Sequence: Synthetic oligonucleotide
cuugagaucuagcugaccc

SEQ ID NO: 1142098 - RNA, 19 nt, Artificial Sequence
  Description of Artificial Sequence: Synthetic oligonucleotide
ucuauacuaagcccuaucu

SEQ ID NO: 1142099 - RNA, 19 nt, Artificial Sequence
  Description of Artificial Sequence: Synthetic oligonucleotide
ggcauagucaucuggaucg

SEQ ID NO: 1142100 - RNA, 19 nt, Artificial Sequence
  Description of Artificial Sequence: Synthetic oligonucleotide
aacacgaaguagacgaccc

SEQ ID NO: 1142101 - RNA, 19 nt, Artificial Sequence
  Description of Artificial Sequence: Synthetic oligonucleotide
uuuuagguaccucaugaac

SEQ ID NO: 1142102 - RNA, 19 nt, Artificial Sequence
  Description of Artificial Sequence: Synthetic oligonucleotide
aacggggucucuucgaguc

SEQ ID NO: 1142103 - RNA, 19 nt, Artificial Sequence
  Description of Artificial Sequence: Synthetic oligonucleotide
aaucuaaggaaggauuauc

SEQ ID NO: 1142104 - RNA, 19 nt, Artificial Sequence
  Description of Artificial Sequence: Synthetic oligonucleotide
guauacuuaauacaguauc

SEQ ID NO: 1142105 - RNA, 19 nt, Artificial Sequence
  Description of Artificial Sequence: Synthetic oligonucleotide
aagaccgaggggucggucc

SEQ ID NO: 1142106 - RNA, 19 nt, Artificial Sequence
  Description of Artificial Sequence: Synthetic oligonucleotide
aguuuaugcuccaaaagac

SEQ ID NO: 1142107 - RNA, 19 nt, Artificial Sequence
  Description of Artificial Sequence: Synthetic oligonucleotide
cuuaggaaucuaaggaagg

SEQ ID NO: 1142108 - RNA, 19 nt, Artificial Sequence
  Description of Artificial Sequence: Synthetic oligonucleotide
gaugcgauugaagaugggg

SEQ ID NO: 1142109 - RNA, 19 nt, Artificial Sequence
  Description of Artificial Sequence: Synthetic oligonucleotide
ucggagggaaauuugagca

SEQ ID NO: 1142110 - RNA, 19 nt, Artificial Sequence
  Description of Artificial Sequence: Synthetic oligonucleotide
gaaggauuaucucaaguuc

SEQ ID NO: 1142111 - RNA, 19 nt, Artificial Sequence
  Description of Artificial Sequence: Synthetic oligonucleotide
ucagacgaguuuaugcucc

SEQ ID NO: 1142112 - RNA, 19 nt, Artificial Sequence
  Description of Artificial Sequence: Synthetic oligonucleotide
accucaugaaccaauacac

SEQ ID NO: 1142113 - RNA, 19 nt, Artificial Sequence
  Description of Artificial Sequence: Synthetic oligonucleotide
ucaugaaccaauacaccca

SEQ ID NO: 1142114 - RNA, 19 nt, Artificial Sequence
  Description of Artificial Sequence: Synthetic oligonucleotide
aaguagacgacccaauaua

SEQ ID NO: 1142115 - RNA, 19 nt, Artificial Sequence
  Description of Artificial Sequence: Synthetic oligonucleotide
uagacgacccaauauauau

SEQ ID NO: 1142116 - RNA, 19 nt, Artificial Sequence
  Description of Artificial Sequence: Synthetic oligonucleotide
cuaguuaggcauuugucac

SEQ ID NO: 1142117 - RNA, 19 nt, Artificial Sequence
  Description of Artificial Sequence: Synthetic oligonucleotide
agaucuagcugacccacac

SEQ ID NO: 1142118 - RNA, 19 nt, Artificial Sequence
  Description of Artificial Sequence: Synthetic oligonucleotide
gaacuuguggcagaguucc

SEQ ID NO: 1142119 - RNA, 19 nt, Artificial Sequence
  Description of Artificial Sequence: Synthetic oligonucleotide
ucaaagacgggugagucug

SEQ ID NO: 1142120 - RNA, 19 nt, Artificial Sequence
  Description of Artificial Sequence: Synthetic oligonucleotide
cucagaagcaacccaaaag

SEQ ID NO: 1142121 - RNA, 19 nt, Artificial Sequence
  Description of Artificial Sequence: Synthetic oligonucleotide
uugucgaagcacauggggc

SEQ ID NO: 1142122 - RNA, 19 nt, Artificial Sequence
  Description of Artificial Sequence: Synthetic oligonucleotide
cuauauaacaccaaaacuu

SEQ ID NO: 1142123 - RNA, 19 nt, Artificial Sequence
  Description of Artificial Sequence: Synthetic oligonucleotide
cuaaggaaggauuaucuca

SEQ ID NO: 1142124 - RNA, 19 nt, Artificial Sequence
  Description of Artificial Sequence: Synthetic oligonucleotide
agaaacagagaugcgauug

SEQ ID NO: 1142125 - RNA, 19 nt, Artificial Sequence
  Description of Artificial Sequence: Synthetic oligonucleotide
ugcgauugaagauggggag

SEQ ID NO: 1142126 - RNA, 19 nt, Artificial Sequence
  Description of Artificial Sequence: Synthetic oligonucleotide
agucagacgaguuuaugcu

SEQ ID NO: 1142127 - RNA, 19 nt, Artificial Sequence
  Description of Artificial Sequence: Synthetic oligonucleotide
auaaagggcccacugguug

SEQ ID NO: 1142128 - RNA, 19 nt, Artificial Sequence
  Description of Artificial Sequence: Synthetic oligonucleotide
guagcaauauauuacuuaa

SEQ ID NO: 1142129 - RNA, 19 nt, Artificial Sequence
  Description of Artificial Sequence: Synthetic oligonucleotide
agcaccaggauucuccguc

SEQ ID NO: 1142130 - RNA, 19 nt, Artificial Sequence
  Description of Artificial Sequence: Synthetic oligonucleotide
uagggguugaccuucggca

SEQ ID NO: 1142131 - RNA, 19 nt, Artificial Sequence
  Description of Artificial Sequence: Synthetic oligonucleotide
uucggagggaaauuugagc

SEQ ID NO: 1142132 - RNA, 19 nt, Artificial Sequence
  Description of Artificial Sequence: Synthetic oligonucleotide
aagacgggugagucugacc

SEQ ID NO: 1142133 - RNA, 19 nt, Artificial Sequence
  Description of Artificial Sequence: Synthetic oligonucleotide
aauagaccuguaagguagc

SEQ ID NO: 1142134 - RNA, 19 nt, Artificial Sequence
  Description of Artificial Sequence: Synthetic oligonucleotide
uggaucggaucccagggag

SEQ ID NO: 1142135 - RNA, 19 nt, Artificial Sequence
  Description of Artificial Sequence: Synthetic oligonucleotide
cuauaaaaucuuauuacaa

SEQ ID NO: 1142136 - RNA, 19 nt, Artificial Sequence
  Description of Artificial Sequence: Synthetic oligonucleotide
ugguguuagggguugaccu

SEQ ID NO: 1142137 - RNA, 19 nt, Artificial Sequence
  Description of Artificial Sequence: Synthetic oligonucleotide
acuuaggaaucuaaggaag

SEQ ID NO: 1142138 - RNA, 19 nt, Artificial Sequence
  Description of Artificial Sequence: Synthetic oligonucleotide
cuacauuuuagguaccuca

SEQ ID NO: 1142139 - RNA, 19 nt, Artificial Sequence
  Description of Artificial Sequence: Synthetic oligonucleotide
uuagggguugaccuucggc

SEQ ID NO: 1142140 - RNA, 19 nt, Artificial Sequence
  Description of Artificial Sequence: Synthetic oligonucleotide
ucgcaguaggcgaagucgg

SEQ ID NO: 1142141 - RNA, 19 nt, Artificial Sequence
  Description of Artificial Sequence: Synthetic oligonucleotide
ucuaaggaaggauuaucuc

SEQ ID NO: 1142142 - RNA, 19 nt, Artificial Sequence
  Description of Artificial Sequence: Synthetic oligonucleotide
agaccuguaagguagcaau

SEQ ID NO: 1142143 - RNA, 19 nt, Artificial Sequence
  Description of Artificial Sequence: Synthetic oligonucleotide
cugggcucuauacuaagcc

SEQ ID NO: 1142144 - RNA, 19 nt, Artificial Sequence
  Description of Artificial Sequence: Synthetic oligonucleotide
gcgcaauucacccaggccg

SEQ ID NO: 1142145 - RNA, 19 nt, Artificial Sequence
  Description of Artificial Sequence: Synthetic oligonucleotide
guagguccgacagagcucg

SEQ ID NO: 1142146 - RNA, 19 nt, Artificial Sequence
  Description of Artificial Sequence: Synthetic oligonucleotide
gaugcuuugucgaagcaca

SEQ ID NO: 1142147 - RNA, 19 nt, Artificial Sequence
  Description of Artificial Sequence: Synthetic oligonucleotide
agcaacccaaaagaguugg

SEQ ID NO: 1142148 - RNA, 19 nt, Artificial Sequence
  Description of Artificial Sequence: Synthetic oligonucleotide
uggaugaaguggcaucgag

SEQ ID NO: 1142149 - RNA, 19 nt, Artificial Sequence
  Description of Artificial Sequence: Synthetic oligonucleotide
gcuauuugcuuucggaggg

SEQ ID NO: 1142150 - RNA, 19 nt, Artificial Sequence
  Description of Artificial Sequence: Synthetic oligonucleotide
guuuaugcuccaaaagacc

SEQ ID NO: 1142151 - RNA, 19 nt, Artificial Sequence
  Description of Artificial Sequence: Synthetic oligonucleotide
ugcaugccuauauaacacc

SEQ ID NO: 1142152 - RNA, 19 nt, Artificial Sequence
  Description of Artificial Sequence: Synthetic oligonucleotide
aguuaggcauuugucacuc

SEQ ID NO: 1142153 - RNA, 19 nt, Artificial Sequence
  Description of Artificial Sequence: Synthetic oligonucleotide
aacgacaggaggcucucgu

SEQ ID NO: 1142154 - RNA, 19 nt, Artificial Sequence
  Description of Artificial Sequence: Synthetic oligonucleotide
uugaagauggggagacgcc

SEQ ID NO: 1142155 - RNA, 19 nt, Artificial Sequence
  Description of Artificial Sequence: Synthetic oligonucleotide
guaagguagcaauauauua

SEQ ID NO: 1142156 - RNA, 19 nt, Artificial Sequence
  Description of Artificial Sequence: Synthetic oligonucleotide
aaacuagggaccugcccca

SEQ ID NO: 1142157 - RNA, 19 nt, Artificial Sequence
  Description of Artificial Sequence: Synthetic oligonucleotide
caucgagagccauagggac

SEQ ID NO: 1142158 - RNA, 19 nt, Artificial Sequence
  Description of Artificial Sequence: Synthetic oligonucleotide
ucgagagccauagggacag

SEQ ID NO: 1142159 - RNA, 19 nt, Artificial Sequence
  Description of Artificial Sequence: Synthetic oligonucleotide
aaagacgggugagucugac

SEQ ID NO: 1142160 - RNA, 19 nt, Artificial Sequence
  Description of Artificial Sequence: Synthetic oligonucleotide
aaauuccauaaaaccccac

SEQ ID NO: 1142161 - RNA, 19 nt, Artificial Sequence
  Description of Artificial Sequence: Synthetic oligonucleotide
cuauacuaagcccuaucuc

SEQ ID NO: 1142162 - RNA, 19 nt, Artificial Sequence
  Description of Artificial Sequence: Synthetic oligonucleotide
uggugcaugccuauauaac

SEQ ID NO: 1142163 - RNA, 19 nt, Artificial Sequence
  Description of Artificial Sequence: Synthetic oligonucleotide
acccacacuaguuaggcau

SEQ ID NO: 1142164 - RNA, 19 nt, Artificial Sequence
  Description of Artificial Sequence: Synthetic oligonucleotide
ugucgauuggccuggcgca

SEQ ID NO: 1142165 - RNA, 19 nt, Artificial Sequence
  Description of Artificial Sequence: Synthetic oligonucleotide
ugugcagaugggcuccgag

SEQ ID NO: 1142166 - RNA, 19 nt, Artificial Sequence
  Description of Artificial Sequence: Synthetic oligonucleotide
aucuaaggaaggauuaucu

SEQ ID NO: 1142167 - RNA, 19 nt, Artificial Sequence
  Description of Artificial Sequence: Synthetic oligonucleotide
caggccgugggcaaacugg

SEQ ID NO: 1142168 - RNA, 19 nt, Artificial Sequence
  Description of Artificial Sequence: Synthetic oligonucleotide
guacuuggggugucgauug

SEQ ID NO: 1142169 - RNA, 19 nt, Artificial Sequence
  Description of Artificial Sequence: Synthetic oligonucleotide
uuuuguacuuggggugucg

SEQ ID NO: 1142170 - RNA, 19 nt, Artificial Sequence
  Description of Artificial Sequence: Synthetic oligonucleotide
gugucgauuggccuggcgc

SEQ ID NO: 1142171 - RNA, 19 nt, Artificial Sequence
  Description of Artificial Sequence: Synthetic oligonucleotide
aggauucuccgucagggga

SEQ ID NO: 1142172 - RNA, 19 nt, Artificial Sequence
  Description of Artificial Sequence: Synthetic oligonucleotide
cuuugucgaagcacauggg

SEQ ID NO: 1142173 - RNA, 19 nt, Artificial Sequence
  Description of Artificial Sequence: Synthetic oligonucleotide
gaaacagagaugcgauuga

SEQ ID NO: 1142174 - RNA, 19 nt, Artificial Sequence
  Description of Artificial Sequence: Synthetic oligonucleotide
cuuggggugucgauuggcc

SEQ ID NO: 1142175 - RNA, 19 nt, Artificial Sequence
  Description of Artificial Sequence: Synthetic oligonucleotide
uugagaucuagcugaccca

SEQ ID NO: 1142176 - RNA, 19 nt, Artificial Sequence
  Description of Artificial Sequence: Synthetic oligonucleotide
uucguugggguuguggaug

SEQ ID NO: 1142177 - RNA, 19 nt, Artificial Sequence
  Description of Artificial Sequence: Synthetic oligonucleotide
ugaaacuccgggucuagua

SEQ ID NO: 1142178 - RNA, 19 nt, Artificial Sequence
  Description of Artificial Sequence: Synthetic oligonucleotide
uucaaagacgggugagucu

SEQ ID NO: 1142179 - RNA, 19 nt, Artificial Sequence
  Description of Artificial Sequence: Synthetic oligonucleotide
agaccgaggggucgguccc

SEQ ID NO: 1142180 - RNA, 19 nt, Artificial Sequence
  Description of Artificial Sequence: Synthetic oligonucleotide
ucucagaagcaacccaaaa

SEQ ID NO: 1142181 - RNA, 19 nt, Artificial Sequence
  Description of Artificial Sequence: Synthetic oligonucleotide
aaacuccgggucuaguaaa

SEQ ID NO: 1142182 - RNA, 19 nt, Artificial Sequence
  Description of Artificial Sequence: Synthetic oligonucleotide
cuucgagucacaggggucc

SEQ ID NO: 1142183 - RNA, 19 nt, Artificial Sequence
  Description of Artificial Sequence: Synthetic oligonucleotide
ucuuguaccgggaggcggu

SEQ ID NO: 1142184 - RNA, 19 nt, Artificial Sequence
  Description of Artificial Sequence: Synthetic oligonucleotide
ugagaucuagcugacccac

SEQ ID NO: 1142185 - RNA, 19 nt, Artificial Sequence
  Description of Artificial Sequence: Synthetic oligonucleotide
agaagcaacccaaaagagu

SEQ ID NO: 1142186 - RNA, 19 nt, Artificial Sequence
  Description of Artificial Sequence: Synthetic oligonucleotide
acgaguuuaugcuccaaaa

SEQ ID NO: 1142187 - RNA, 19 nt, Artificial Sequence
  Description of Artificial Sequence: Synthetic oligonucleotide
guggguuaaugcauuuugg

SEQ ID NO: 1142188 - RNA, 19 nt, Artificial Sequence
  Description of Artificial Sequence: Synthetic oligonucleotide
acuaagcccuaucucagaa

SEQ ID NO: 1142189 - RNA, 19 nt, Artificial Sequence
  Description of Artificial Sequence: Synthetic oligonucleotide
caggggaguggguuaaugc

SEQ ID NO: 1142190 - RNA, 19 nt, Artificial Sequence
  Description of Artificial Sequence: Synthetic oligonucleotide
uaguuaggcauuugucacu

SEQ ID NO: 1142191 - RNA, 19 nt, Artificial Sequence
  Description of Artificial Sequence: Synthetic oligonucleotide
aucgacaacgcccgcucuc

SEQ ID NO: 1142192 - RNA, 19 nt, Artificial Sequence
  Description of Artificial Sequence: Synthetic oligonucleotide
ggugcaugccuauauaaca

SEQ ID NO: 1142193 - RNA, 19 nt, Artificial Sequence
  Description of Artificial Sequence: Synthetic oligonucleotide
gcacuuaagauuccaggag

SEQ ID NO: 1142194 - RNA, 19 nt, Artificial Sequence
  Description of Artificial Sequence: Synthetic oligonucleotide
auacuaagcccuaucucag

SEQ ID NO: 1142195 - RNA, 19 nt, Artificial Sequence
  Description of Artificial Sequence: Synthetic oligonucleotide
agucgcaguaggcgaaguc

SEQ ID NO: 1142196 - RNA, 19 nt, Artificial Sequence
  Description of Artificial Sequence: Synthetic oligonucleotide
cuccgaguagguccgacag

SEQ ID NO: 1142197 - RNA, 19 nt, Artificial Sequence
  Description of Artificial Sequence: Synthetic oligonucleotide
auuugcaaacuagggaccu

SEQ ID NO: 1142198 - RNA, 19 nt, Artificial Sequence
  Description of Artificial Sequence: Synthetic oligonucleotide
cugacccacacuaguuagg

SEQ ID NO: 1142199 - RNA, 19 nt, Artificial Sequence
  Description of Artificial Sequence: Synthetic oligonucleotide
agggguugaccuucggcag

SEQ ID NO: 1142200 - RNA, 19 nt, Artificial Sequence
  Description of Artificial Sequence: Synthetic oligonucleotide
caaaagaccgaggggucgg

SEQ ID NO: 1142201 - RNA, 19 nt, Artificial Sequence
  Description of Artificial Sequence: Synthetic oligonucleotide
acaacgcccgcucuccgag

SEQ ID NO: 1142202 - RNA, 19 nt, Artificial Sequence
  Description of Artificial Sequence: Synthetic oligonucleotide
uggccuggcgcaauucacc

SEQ ID NO: 1142203 - RNA, 19 nt, Artificial Sequence
  Description of Artificial Sequence: Synthetic oligonucleotide
uccguggucggaugacagg

SEQ ID NO: 1142204 - RNA, 19 nt, Artificial Sequence
  Description of Artificial Sequence: Synthetic oligonucleotide
guggcaucgagagccauag

SEQ ID NO: 1142205 - RNA, 19 nt, Artificial Sequence
  Description of Artificial Sequence: Synthetic oligonucleotide
gugggagucgcaguaggcg

SEQ ID NO: 1142206 - RNA, 19 nt, Artificial Sequence
  Description of Artificial Sequence: Synthetic oligonucleotide
uagucaucuggaucggauc

SEQ ID NO: 1142207 - RNA, 19 nt, Artificial Sequence
  Description of Artificial Sequence: Synthetic oligonucleotide
aguauacuuaauacaguau

SEQ ID NO: 1142208 - RNA, 19 nt, Artificial Sequence
  Description of Artificial Sequence: Synthetic oligonucleotide
gguuggagaagggauuugg

SEQ ID NO: 1142209 - RNA, 19 nt, Artificial Sequence
  Description of Artificial Sequence: Synthetic oligonucleotide
gguagcaauauauuacuua

SEQ ID NO: 1142210 - RNA, 19 nt, Artificial Sequence
  Description of Artificial Sequence: Synthetic oligonucleotide
acuagggaccugccccagc

SEQ ID NO: 1142211 - RNA, 19 nt, Artificial Sequence
  Description of Artificial Sequence: Synthetic oligonucleotide
uguacuuggggugucgauu

SEQ ID NO: 1142212 - RNA, 19 nt, Artificial Sequence
  Description of Artificial Sequence: Synthetic oligonucleotide
ugaccuucggcaggagggg

SEQ ID NO: 1142213 - RNA, 19 nt, Artificial Sequence
  Description of Artificial Sequence: Synthetic oligonucleotide
cucuauacuaagcccuauc

SEQ ID NO: 1142214 - RNA, 19 nt, Artificial Sequence
  Description of Artificial Sequence: Synthetic oligonucleotide
augcgauugaagaugggga

SEQ ID NO: 1142215 - RNA, 19 nt, Artificial Sequence
  Description of Artificial Sequence: Synthetic oligonucleotide
uacuaagcccuaucucaga

SEQ ID NO: 1142216 - RNA, 19 nt, Artificial Sequence
  Description of Artificial Sequence: Synthetic oligonucleotide
gacgaguuuaugcuccaaa

SEQ ID NO: 1142217 - RNA, 19 nt, Artificial Sequence
  Description of Artificial Sequence: Synthetic oligonucleotide
gauucuccgucaggggagg

SEQ ID NO: 1142218 - RNA, 19 nt, Artificial Sequence
  Description of Artificial Sequence: Synthetic oligonucleotide
aguagacgacccaauauau

SEQ ID NO: 1142219 - RNA, 19 nt, Artificial Sequence
  Description of Artificial Sequence: Synthetic oligonucleotide
ggcaaacuggcacuuggcc

SEQ ID NO: 1142220 - RNA, 19 nt, Artificial Sequence
  Description of Artificial Sequence: Synthetic oligonucleotide
aguagguccgacagagcuc

SEQ ID NO: 1142221 - RNA, 19 nt, Artificial Sequence
  Description of Artificial Sequence: Synthetic oligonucleotide
gaaauuugagcaccaggau

SEQ ID NO: 1142222 - RNA, 19 nt, Artificial Sequence
  Description of Artificial Sequence: Synthetic oligonucleotide
ugcuacauuuuagguaccu

SEQ ID NO: 1142223 - RNA, 19 nt, Artificial Sequence
  Description of Artificial Sequence: Synthetic oligonucleotide
gugcaugccuauauaacac

SEQ ID NO: 1142224 - RNA, 19 nt, Artificial Sequence
  Description of Artificial Sequence: Synthetic oligonucleotide
ucuccgaguagguccgaca

SEQ ID NO: 1142225 - RNA, 19 nt, Artificial Sequence
  Description of Artificial Sequence: Synthetic oligonucleotide
uggcgcaauucacccaggc

SEQ ID NO: 1142226 - RNA, 19 nt, Artificial Sequence
  Description of Artificial Sequence: Synthetic oligonucleotide
guaucgacaacgcccgcuc

SEQ ID NO: 1142227 - RNA, 19 nt, Artificial Sequence
  Description of Artificial Sequence: Synthetic oligonucleotide
cagaguuccguuuuguacu

SEQ ID NO: 1142228 - RNA, 19 nt, Artificial Sequence
  Description of Artificial Sequence: Synthetic oligonucleotide
gucagacgaguuuaugcuc

SEQ ID NO: 1142229 - RNA, 19 nt, Artificial Sequence
  Description of Artificial Sequence: Synthetic oligonucleotide
uggccccguaucgacaacg

SEQ ID NO: 1142230 - RNA, 19 nt, Artificial Sequence
  Description of Artificial Sequence: Synthetic oligonucleotide
ccccguaucgacaacgccc

SEQ ID NO: 1142231 - RNA, 19 nt, Artificial Sequence
  Description of Artificial Sequence: Synthetic oligonucleotide
guaccucaugaaccaauac

SEQ ID NO: 1142232 - RNA, 19 nt, Artificial Sequence
  Description of Artificial Sequence: Synthetic oligonucleotide
caauacacccaaacacuga

SEQ ID NO: 1142233 - RNA, 19 nt, Artificial Sequence
  Description of Artificial Sequence: Synthetic oligonucleotide
aagcaacccaaaagaguug

SEQ ID NO: 1142234 - RNA, 19 nt, Artificial Sequence
  Description of Artificial Sequence: Synthetic oligonucleotide
ucgacaacgcccgcucucc

SEQ ID NO: 1142235 - RNA, 19 nt, Artificial Sequence
  Description of Artificial Sequence: Synthetic oligonucleotide
auagggacagcggcccugg

SEQ ID NO: 1142236 - RNA, 19 nt, Artificial Sequence
  Description of Artificial Sequence: Synthetic oligonucleotide
acgggugagucugacccac

SEQ ID NO: 1142237 - RNA, 19 nt, Artificial Sequence
  Description of Artificial Sequence: Synthetic oligonucleotide
caugaaccaauacacccaa

SEQ ID NO: 1142238 - RNA, 19 nt, Artificial Sequence
  Description of Artificial Sequence: Synthetic oligonucleotide
ccaggauucuccgucaggg

SEQ ID NO: 1142239 - RNA, 19 nt, Artificial Sequence
  Description of Artificial Sequence: Synthetic oligonucleotide
ggguuaaugcauuuuggaa

SEQ ID NO: 1142240 - RNA, 19 nt, Artificial Sequence
  Description of Artificial Sequence: Synthetic oligonucleotide
uggucggaugacaggucug

SEQ ID NO: 1142241 - RNA, 19 nt, Artificial Sequence
  Description of Artificial Sequence: Synthetic oligonucleotide
auagucaucuggaucggau

SEQ ID NO: 1142242 - RNA, 19 nt, Artificial Sequence
  Description of Artificial Sequence: Synthetic oligonucleotide
acuuguggcagaguuccgu

SEQ ID NO: 1142243 - RNA, 19 nt, Artificial Sequence
  Description of Artificial Sequence: Synthetic oligonucleotide
agaccagaguuggggaggg

SEQ ID NO: 1142244 - RNA, 19 nt, Artificial Sequence
  Description of Artificial Sequence: Synthetic oligonucleotide
uggaacggggucucuucga

SEQ ID NO: 1142245 - RNA, 19 nt, Artificial Sequence
  Description of Artificial Sequence: Synthetic oligonucleotide
guccaugguggcgcgaacg

SEQ ID NO: 1142246 - RNA, 19 nt, Artificial Sequence
  Description of Artificial Sequence: Synthetic oligonucleotide
cccguaucgacaacgcccg

SEQ ID NO: 1142247 - RNA, 19 nt, Artificial Sequence
  Description of Artificial Sequence: Synthetic oligonucleotide
ucacagcacuuaagauucc

SEQ ID NO: 1142248 - RNA, 19 nt, Artificial Sequence
  Description of Artificial Sequence: Synthetic oligonucleotide
ucuugagaucuagcugacc

SEQ ID NO: 1142249 - RNA, 19 nt, Artificial Sequence
  Description of Artificial Sequence: Synthetic oligonucleotide
guuagggguugaccuucgg

SEQ ID NO: 1142250 - RNA, 19 nt, Artificial Sequence
  Description of Artificial Sequence: Synthetic oligonucleotide
ccucaugaaccaauacacc

SEQ ID NO: 1142251 - RNA, 19 nt, Artificial Sequence
  Description of Artificial Sequence: Synthetic oligonucleotide
gucggucccuccguggucg

SEQ ID NO: 1142252 - RNA, 19 nt, Artificial Sequence
  Description of Artificial Sequence: Synthetic oligonucleotide
cccuaucucagaagcaacc

SEQ ID NO: 1142253 - RNA, 19 nt, Artificial Sequence
  Description of Artificial Sequence: Synthetic oligonucleotide
gaugguguuagggguugac

SEQ ID NO: 1142254 - RNA, 19 nt, Artificial Sequence
  Description of Artificial Sequence: Synthetic oligonucleotide
agggaccugccccagcaca

SEQ ID NO: 1142255 - RNA, 19 nt, Artificial Sequence
  Description of Artificial Sequence: Synthetic oligonucleotide
uaucgacaacgcccgcucu

SEQ ID NO: 1142256 - RNA, 19 nt, Artificial Sequence
  Description of Artificial Sequence: Synthetic oligonucleotide
agcccuaucucagaagcaa

SEQ ID NO: 1142257 - RNA, 19 nt, Artificial Sequence
  Description of Artificial Sequence: Synthetic oligonucleotide
ggaacggggucucuucgag

SEQ ID NO: 1142258 - RNA, 19 nt, Artificial Sequence
  Description of Artificial Sequence: Synthetic oligonucleotide
uagaccuguaagguagcaa

SEQ ID NO: 1142259 - RNA, 19 nt, Artificial Sequence
  Description of Artificial Sequence: Synthetic oligonucleotide
agaguuccguuuuguacuu

SEQ ID NO: 1142260 - RNA, 19 nt, Artificial Sequence
  Description of Artificial Sequence: Synthetic oligonucleotide
uggagucagacgaguuuau

SEQ ID NO: 1142261 - RNA, 19 nt, Artificial Sequence
  Description of Artificial Sequence: Synthetic oligonucleotide
ggaaggauuaucucaaguu

SEQ ID NO: 1142262 - RNA, 19 nt, Artificial Sequence
  Description of Artificial Sequence: Synthetic oligonucleotide
ggucggaugacaggucugg

SEQ ID NO: 1142263 - RNA, 19 nt, Artificial Sequence
  Description of Artificial Sequence: Synthetic oligonucleotide
aacuuguggcagaguuccg

SEQ ID NO: 1142264 - RNA, 19 nt, Artificial Sequence
  Description of Artificial Sequence: Synthetic oligonucleotide
gguugugggagccagcucu

SEQ ID NO: 1142265 - RNA, 19 nt, Artificial Sequence
  Description of Artificial Sequence: Synthetic oligonucleotide
agggaaauuugagcaccag

SEQ ID NO: 1142266 - RNA, 19 nt, Artificial Sequence
  Description of Artificial Sequence: Synthetic oligonucleotide
aagugaccccggcugggau

SEQ ID NO: 1142267 - RNA, 19 nt, Artificial Sequence
  Description of Artificial Sequence: Synthetic oligonucleotide
acccaaccgcagcuucggc

SEQ ID NO: 1142268 - RNA, 19 nt, Artificial Sequence
  Description of Artificial Sequence: Synthetic oligonucleotide
agcccgagaagcugaugcu

SEQ ID NO: 1142269 - RNA, 19 nt, Artificial Sequence
  Description of Artificial Sequence: Synthetic oligonucleotide
ggauucuccgucaggggag

SEQ ID NO: 1142270 - RNA, 19 nt, Artificial Sequence
  Description of Artificial Sequence: Synthetic oligonucleotide
aacuagggaccugccccag

SEQ ID NO: 1142271 - RNA, 19 nt, Artificial Sequence
  Description of Artificial Sequence: Synthetic oligonucleotide
ccuggcgcaauucacccag

SEQ ID NO: 1142272 - RNA, 19 nt, Artificial Sequence
  Description of Artificial Sequence: Synthetic oligonucleotide
uggcaucgagagccauagg

SEQ ID NO: 1142273 - RNA, 19 nt, Artificial Sequence
  Description of Artificial Sequence: Synthetic oligonucleotide
auagaccuguaagguagca

SEQ ID NO: 1142274 - RNA, 19 nt, Artificial Sequence
  Description of Artificial Sequence: Synthetic oligonucleotide
caggggaggcuucaaccac

SEQ ID NO: 1142275 - RNA, 19 nt, Artificial Sequence
  Description of Artificial Sequence: Synthetic oligonucleotide
ccguuuuguacuuggggug

SEQ ID NO: 1142276 - RNA, 19 nt, Artificial Sequence
  Description of Artificial Sequence: Synthetic oligonucleotide
aagcccuaucucagaagca

SEQ ID NO: 1142277 - RNA, 19 nt, Artificial Sequence
  Description of Artificial Sequence: Synthetic oligonucleotide
ccgaguagguccgacagag

SEQ ID NO: 1142278 - RNA, 19 nt, Artificial Sequence
  Description of Artificial Sequence: Synthetic oligonucleotide
ggcgcaauucacccaggcc

SEQ ID NO: 1142279 - RNA, 19 nt, Artificial Sequence
  Description of Artificial Sequence: Synthetic oligonucleotide
aucgagagccauagggaca

SEQ ID NO: 1142280 - RNA, 19 nt, Artificial Sequence
  Description of Artificial Sequence: Synthetic oligonucleotide
aacuccgggucuaguaaaa

SEQ ID NO: 1142281 - RNA, 19 nt, Artificial Sequence
  Description of Artificial Sequence: Synthetic oligonucleotide
auuugagcaccaggauucu

SEQ ID NO: 1142282 - RNA, 19 nt, Artificial Sequence
  Description of Artificial Sequence: Synthetic oligonucleotide
cagaugguguuagggguug

SEQ ID NO: 1142283 - RNA, 19 nt, Artificial Sequence
  Description of Artificial Sequence: Synthetic oligonucleotide
guguuagggguugaccuuc

SEQ ID NO: 1142284 - RNA, 19 nt, Artificial Sequence
  Description of Artificial Sequence: Synthetic oligonucleotide
gaguugggccuggaagacc

SEQ ID NO: 1142285 - RNA, 19 nt, Artificial Sequence
  Description of Artificial Sequence: Synthetic oligonucleotide
gacaacgcccgcucuccga

SEQ ID NO: 1142286 - RNA, 19 nt, Artificial Sequence
  Description of Artificial Sequence: Synthetic oligonucleotide
gccaagggugcaaaacccg

SEQ ID NO: 1142287 - RNA, 19 nt, Artificial Sequence
  Description of Artificial Sequence: Synthetic oligonucleotide
cuuggccccguaucgacaa

SEQ ID NO: 1142288 - RNA, 19 nt, Artificial Sequence
  Description of Artificial Sequence: Synthetic oligonucleotide
uucuccgucaggggaggcu

SEQ ID NO: 1142289 - RNA, 19 nt, Artificial Sequence
  Description of Artificial Sequence: Synthetic oligonucleotide
uuugagcaccaggauucuc

SEQ ID NO: 1142290 - RNA, 19 nt, Artificial Sequence
  Description of Artificial Sequence: Synthetic oligonucleotide
ccaaaagaccgaggggucg

SEQ ID NO: 1142291 - RNA, 19 nt, Artificial Sequence
  Description of Artificial Sequence: Synthetic oligonucleotide
cauagggacagcggcccug

SEQ ID NO: 1142292 - RNA, 19 nt, Artificial Sequence
  Description of Artificial Sequence: Synthetic oligonucleotide
ggccuggcgcaauucaccc

SEQ ID NO: 1142293 - RNA, 19 nt, Artificial Sequence
  Description of Artificial Sequence: Synthetic oligonucleotide
ucccuccguggucggauga

SEQ ID NO: 1142294 - RNA, 19 nt, Artificial Sequence
  Description of Artificial Sequence: Synthetic oligonucleotide
agaugcgauugaagauggg

SEQ ID NO: 1142295 - RNA, 19 nt, Artificial Sequence
  Description of Artificial Sequence: Synthetic oligonucleotide
caccaggauucuccgucag

SEQ ID NO: 1142296 - RNA, 19 nt, Artificial Sequence
  Description of Artificial Sequence: Synthetic oligonucleotide
ggcggcgagguucugcggc

SEQ ID NO: 1142297 - RNA, 19 nt, Artificial Sequence
  Description of Artificial Sequence: Synthetic oligonucleotide
gguucugcggccagagggc

SEQ ID NO: 1142298 - RNA, 19 nt, Artificial Sequence
  Description of Artificial Sequence: Synthetic oligonucleotide
ggaugaaguggcaucgaga

SEQ ID NO: 1142299 - RNA, 19 nt, Artificial Sequence
  Description of Artificial Sequence: Synthetic oligonucleotide
gacgggugagucugaccca

SEQ ID NO: 1142300 - RNA, 19 nt, Artificial Sequence
  Description of Artificial Sequence: Synthetic oligonucleotide
cuggcgcaauucacccagg

SEQ ID NO: 1142301 - RNA, 19 nt, Artificial Sequence
  Description of Artificial Sequence: Synthetic oligonucleotide
gucgaagcacauggggcug

SEQ ID NO: 1142302 - RNA, 19 nt, Artificial Sequence
  Description of Artificial Sequence: Synthetic oligonucleotide
cacagcacuuaagauucca

SEQ ID NO: 1142303 - RNA, 19 nt, Artificial Sequence
  Description of Artificial Sequence: Synthetic oligonucleotide
agguaccucaugaaccaau

SEQ ID NO: 1142304 - RNA, 19 nt, Artificial Sequence
  Description of Artificial Sequence: Synthetic oligonucleotide
ggugucgauuggccuggcg

SEQ ID NO: 1142305 - RNA, 19 nt, Artificial Sequence
  Description of Artificial Sequence: Synthetic oligonucleotide
agggcccacugguuggaga

SEQ ID NO: 1142306 - RNA, 19 nt, Artificial Sequence
  Description of Artificial Sequence: Synthetic oligonucleotide
cagccugggcucuauacua

SEQ ID NO: 1142307 - RNA, 19 nt, Artificial Sequence
  Description of Artificial Sequence: Synthetic oligonucleotide
gcucucguagauggcagag

SEQ ID NO: 1142308 - RNA, 19 nt, Artificial Sequence
  Description of Artificial Sequence: Synthetic oligonucleotide
guagacgacccaauauaua

SEQ ID NO: 1142309 - RNA, 19 nt, Artificial Sequence
  Description of Artificial Sequence: Synthetic oligonucleotide
cagagaugcgauugaagau

SEQ ID NO: 1142310 - RNA, 19 nt, Artificial Sequence
  Description of Artificial Sequence: Synthetic oligonucleotide
acgaaguagacgacccaau

SEQ ID NO: 1142311 - RNA, 19 nt, Artificial Sequence
  Description of Artificial Sequence: Synthetic oligonucleotide
gcuuucggagggaaauuug

SEQ ID NO: 1142312 - RNA, 19 nt, Artificial Sequence
  Description of Artificial Sequence: Synthetic oligonucleotide
uccgucaggggaggcuuca

SEQ ID NO: 1142313 - RNA, 19 nt, Artificial Sequence
  Description of Artificial Sequence: Synthetic oligonucleotide
agacgacccaauauauaua

SEQ ID NO: 1142314 - RNA, 19 nt, Artificial Sequence
  Description of Artificial Sequence: Synthetic oligonucleotide
agguagcaauauauuacuu

SEQ ID NO: 1142315 - RNA, 19 nt, Artificial Sequence
  Description of Artificial Sequence: Synthetic oligonucleotide
guuaggcauuugucacuca

SEQ ID NO: 1142316 - RNA, 19 nt, Artificial Sequence
  Description of Artificial Sequence: Synthetic oligonucleotide
auacacccaaacacugaau

SEQ ID NO: 1142317 - RNA, 19 nt, Artificial Sequence
  Description of Artificial Sequence: Synthetic oligonucleotide
uugcuuucggagggaaauu

SEQ ID NO: 1142318 - RNA, 19 nt, Artificial Sequence
  Description of Artificial Sequence: Synthetic oligonucleotide
aggggucggucccuccgug

SEQ ID NO: 1142319 - RNA, 19 nt, Artificial Sequence
  Description of Artificial Sequence: Synthetic oligonucleotide
ggcgcgaacggccguggag

SEQ ID NO: 1142320 - RNA, 19 nt, Artificial Sequence
  Description of Artificial Sequence: Synthetic oligonucleotide
gaccuguaagguagcaaua

SEQ ID NO: 1142321 - RNA, 19 nt, Artificial Sequence
  Description of Artificial Sequence: Synthetic oligonucleotide
gagaucuagcugacccaca

SEQ ID NO: 1142322 - RNA, 19 nt, Artificial Sequence
  Description of Artificial Sequence: Synthetic oligonucleotide
cgauugaagauggggagac

SEQ ID NO: 1142323 - RNA, 19 nt, Artificial Sequence
  Description of Artificial Sequence: Synthetic oligonucleotide
acggggucucuucgaguca

SEQ ID NO: 1142324 - RNA, 19 nt, Artificial Sequence
  Description of Artificial Sequence: Synthetic oligonucleotide
ucggucccuccguggucgg

SEQ ID NO: 1142325 - RNA, 19 nt, Artificial Sequence
  Description of Artificial Sequence: Synthetic oligonucleotide
cgacaggaggcucucguag

SEQ ID NO: 1142326 - RNA, 19 nt, Artificial Sequence
  Description of Artificial Sequence: Synthetic oligonucleotide
gcuacauuuuagguaccuc

SEQ ID NO: 1142327 - RNA, 19 nt, Artificial Sequence
  Description of Artificial Sequence: Synthetic oligonucleotide
aggucuucguugggguugu

SEQ ID NO: 1142328 - RNA, 19 nt, Artificial Sequence
  Description of Artificial Sequence: Synthetic oligonucleotide
uuggccccguaucgacaac

SEQ ID NO: 1142329 - RNA, 19 nt, Artificial Sequence
  Description of Artificial Sequence: Synthetic oligonucleotide
ucgagucacagggguccca

SEQ ID NO: 1142330 - RNA, 19 nt, Artificial Sequence
  Description of Artificial Sequence: Synthetic oligonucleotide
gaccccggcugggauggag

SEQ ID NO: 1142331 - RNA, 19 nt, Artificial Sequence
  Description of Artificial Sequence: Synthetic oligonucleotide
gaacggggucucuucgagu

SEQ ID NO: 1142332 - RNA, 19 nt, Artificial Sequence
  Description of Artificial Sequence: Synthetic oligonucleotide
cuuguaccgggaggcggug

SEQ ID NO: 1142333 - RNA, 19 nt, Artificial Sequence
  Description of Artificial Sequence: Synthetic oligonucleotide
caaagacgggugagucuga

SEQ ID NO: 1142334 - RNA, 19 nt, Artificial Sequence
  Description of Artificial Sequence: Synthetic oligonucleotide
cauagucaucuggaucgga

SEQ ID NO: 1142335 - RNA, 19 nt, Artificial Sequence
  Description of Artificial Sequence: Synthetic oligonucleotide
gguggagcggccggucagg

SEQ ID NO: 1142336 - RNA, 19 nt, Artificial Sequence
  Description of Artificial Sequence: Synthetic oligonucleotide
ggggucggucccuccgugg

SEQ ID NO: 1142337 - RNA, 19 nt, Artificial Sequence
  Description of Artificial Sequence: Synthetic oligonucleotide
agguccgacagagcucggu

SEQ ID NO: 1142338 - RNA, 19 nt, Artificial Sequence
  Description of Artificial Sequence: Synthetic oligonucleotide
gguaccucaugaaccaaua

SEQ ID NO: 1142339 - RNA, 19 nt, Artificial Sequence
  Description of Artificial Sequence: Synthetic oligonucleotide
guccgacagagcucggucu

SEQ ID NO: 1142340 - RNA, 19 nt, Artificial Sequence
  Description of Artificial Sequence: Synthetic oligonucleotide
cccaaaagaguugggccug

SEQ ID NO: 1142341 - RNA, 19 nt, Artificial Sequence
  Description of Artificial Sequence: Synthetic oligonucleotide
ucgauuggccuggcgcaau

SEQ ID NO: 1142342 - RNA, 19 nt, Artificial Sequence
  Description of Artificial Sequence: Synthetic oligonucleotide
acgacccaauauauauaaa

SEQ ID NO: 1142343 - RNA, 19 nt, Artificial Sequence
  Description of Artificial Sequence: Synthetic oligonucleotide
accuucggcaggaggggca

SEQ ID NO: 1142344 - RNA, 19 nt, Artificial Sequence
  Description of Artificial Sequence: Synthetic oligonucleotide
gucggugagggugacaguu

SEQ ID NO: 1142345 - RNA, 19 nt, Artificial Sequence
  Description of Artificial Sequence: Synthetic oligonucleotide
cucuccgaguagguccgac

SEQ ID NO: 1142346 - RNA, 19 nt, Artificial Sequence
  Description of Artificial Sequence: Synthetic oligonucleotide
gcuucaaccaccagacacu

SEQ ID NO: 1142347 - RNA, 19 nt, Artificial Sequence
  Description of Artificial Sequence: Synthetic oligonucleotide
gucccuccguggucggaug

SEQ ID NO: 1142348 - RNA, 19 nt, Artificial Sequence
  Description of Artificial Sequence: Synthetic oligonucleotide
guucugcggccagagggca

SEQ ID NO: 1142349 - RNA, 19 nt, Artificial Sequence
  Description of Artificial Sequence: Synthetic oligonucleotide
ccgagaagcugaugcuuug

SEQ ID NO: 1142350 - RNA, 19 nt, Artificial Sequence
  Description of Artificial Sequence: Synthetic oligonucleotide
gcgauugaagauggggaga

SEQ ID NO: 1142351 - RNA, 19 nt, Artificial Sequence
  Description of Artificial Sequence: Synthetic oligonucleotide
agaugguguuagggguuga

SEQ ID NO: 1142352 - RNA, 19 nt, Artificial Sequence
  Description of Artificial Sequence: Synthetic oligonucleotide
ggcaagcccgagaagcuga

SEQ ID NO: 1142353 - RNA, 19 nt, Artificial Sequence
  Description of Artificial Sequence: Synthetic oligonucleotide
cgcucuccgaguagguccg

SEQ ID NO: 1142354 - RNA, 19 nt, Artificial Sequence
  Description of Artificial Sequence: Synthetic oligonucleotide
guggaugaaguggcaucga

SEQ ID NO: 1142355 - RNA, 19 nt, Artificial Sequence
  Description of Artificial Sequence: Synthetic oligonucleotide
caguauccauuuuaauauu

SEQ ID NO: 1142356 - RNA, 19 nt, Artificial Sequence
  Description of Artificial Sequence: Synthetic oligonucleotide
guggcgcgaacggccgugg

SEQ ID NO: 1142357 - RNA, 19 nt, Artificial Sequence
  Description of Artificial Sequence: Synthetic oligonucleotide
uggcgcgaacggccgugga

SEQ ID NO: 1142358 - RNA, 19 nt, Artificial Sequence
  Description of Artificial Sequence: Synthetic oligonucleotide
ugguggcgcgaacggccgu

SEQ ID NO: 1142359 - RNA, 19 nt, Artificial Sequence
  Description of Artificial Sequence: Synthetic oligonucleotide
cuuguggcagaguuccguu

SEQ ID NO: 1142360 - RNA, 19 nt, Artificial Sequence
  Description of Artificial Sequence: Synthetic oligonucleotide
caagcccgagaagcugaug

SEQ ID NO: 1142361 - RNA, 19 nt, Artificial Sequence
  Description of Artificial Sequence: Synthetic oligonucleotide
caaaagaguugggccugga

SEQ ID NO: 1142362 - RNA, 19 nt, Artificial Sequence
  Description of Artificial Sequence: Synthetic oligonucleotide
cuccgucaggggaggcuuc

SEQ ID NO: 1142363 - RNA, 19 nt, Artificial Sequence
  Description of Artificial Sequence: Synthetic oligonucleotide
augaaccaauacacccaaa

SEQ ID NO: 1142364 - RNA, 19 nt, Artificial Sequence
  Description of Artificial Sequence: Synthetic oligonucleotide
gccccguaucgacaacgcc

SEQ ID NO: 1142365 - RNA, 19 nt, Artificial Sequence
  Description of Artificial Sequence: Synthetic oligonucleotide
ggcucucguagauggcaga

SEQ ID NO: 1142366 - RNA, 19 nt, Artificial Sequence
  Description of Artificial Sequence: Synthetic oligonucleotide
gaguggguuaaugcauuuu

SEQ ID NO: 1142367 - RNA, 19 nt, Artificial Sequence
  Description of Artificial Sequence: Synthetic oligonucleotide
gaggggucggucccuccgu

SEQ ID NO: 1142368 - RNA, 19 nt, Artificial Sequence
  Description of Artificial Sequence: Synthetic oligonucleotide
gcccuaucucagaagcaac

SEQ ID NO: 1142369 - RNA, 19 nt, Artificial Sequence
  Description of Artificial Sequence: Synthetic oligonucleotide
ggccccguaucgacaacgc

SEQ ID NO: 1142370 - RNA, 19 nt, Artificial Sequence
  Description of Artificial Sequence: Synthetic oligonucleotide
gguggcgcgaacggccgug

SEQ ID NO: 1142371 - RNA, 19 nt, Artificial Sequence
  Description of Artificial Sequence: Synthetic oligonucleotide
cgaacggccguggagagga

SEQ ID NO: 1142372 - RNA, 19 nt, Artificial Sequence
  Description of Artificial Sequence: Synthetic oligonucleotide
ggguugaccuucggcagga

SEQ ID NO: 1142373 - RNA, 19 nt, Artificial Sequence
  Description of Artificial Sequence: Synthetic oligonucleotide
gaacggccguggagaggag

SEQ ID NO: 1142374 - RNA, 19 nt, Artificial Sequence
  Description of Artificial Sequence: Synthetic oligonucleotide
gcgcgaacggccguggaga

SEQ ID NO: 1142375 - RNA, 19 nt, Artificial Sequence
  Description of Artificial Sequence: Synthetic oligonucleotide
gucgauuggccuggcgcaa

SEQ ID NO: 1142376 - RNA, 19 nt, Artificial Sequence
  Description of Artificial Sequence: Synthetic oligonucleotide
gggaggcuucaaccaccag

SEQ ID NO: 1142377 - RNA, 19 nt, Artificial Sequence
  Description of Artificial Sequence: Synthetic oligonucleotide
ggaccugccccagcacagc

SEQ ID NO: 1142378 - RNA, 19 nt, Artificial Sequence
  Description of Artificial Sequence: Synthetic oligonucleotide
gcaauucacccaggccgug

SEQ ID NO: 1142379 - RNA, 19 nt, Artificial Sequence
  Description of Artificial Sequence: Synthetic oligonucleotide
ggcucuauacuaagcccua

SEQ ID NO: 1142380 - RNA, 19 nt, Artificial Sequence
  Description of Artificial Sequence: Synthetic oligonucleotide
ggcuggugcaugccuauau

SEQ ID NO: 1142381 - RNA, 19 nt, Artificial Sequence
  Description of Artificial Sequence: Synthetic oligonucleotide
gcuccgagccaggccaccc

SEQ ID NO: 1142382 - RNA, 19 nt, Artificial Sequence
  Description of Artificial Sequence: Synthetic oligonucleotide
gcgaacggccguggagagg

SEQ ID NO: 1142383 - RNA, 19 nt, Artificial Sequence
  Description of Artificial Sequence: Synthetic oligonucleotide
ccaacgacaggaggcucuc

SEQ ID NO: 1142384 - RNA, 19 nt, Artificial Sequence
  Description of Artificial Sequence: Synthetic oligonucleotide
ggucggucccuccgugguc

SEQ ID NO: 1142385 - RNA, 19 nt, Artificial Sequence
  Description of Artificial Sequence: Synthetic oligonucleotide
ggggcacccaaccgcagcu

SEQ ID NO: 1142386 - RNA, 19 nt, Artificial Sequence
  Description of Artificial Sequence: Synthetic oligonucleotide
gagucgcaguaggcgaagu

SEQ ID NO: 1142387 - RNA, 19 nt, Artificial Sequence
  Description of Artificial Sequence: Synthetic oligonucleotide
ggaguggguuaaugcauuu

SEQ ID NO: 1142388 - RNA, 19 nt, Artificial Sequence
  Description of Artificial Sequence: Synthetic oligonucleotide
ccgagccaggccacccaag

SEQ ID NO: 1142389 - RNA, 19 nt, Artificial Sequence
  Description of Artificial Sequence: Synthetic oligonucleotide
cgcagcuucggcccuccac

SEQ ID NO: 1142390 - RNA, 19 nt, Artificial Sequence
  Description of Artificial Sequence: Synthetic oligonucleotide
gccuggcgcaauucaccca

SEQ ID NO: 1142391 - RNA, 19 nt, Artificial Sequence
  Description of Artificial Sequence: Synthetic oligonucleotide
cguggucggaugacagguc

SEQ ID NO: 1142392 - RNA, 19 nt, Artificial Sequence
  Description of Artificial Sequence: Synthetic oligonucleotide
cgcgaacggccguggagag

SEQ ID NO: 1142393 - RNA, 19 nt, Artificial Sequence
  Description of Artificial Sequence: Synthetic oligonucleotide
gggucggucccuccguggu

SEQ ID NO: 1142394 - RNA, 19 nt, Artificial Sequence
  Description of Artificial Sequence: Synthetic oligonucleotide
accaggggaguggguuaau

SEQ ID NO: 1142395 - RNA, 19 nt, Artificial Sequence
  Description of Artificial Sequence: Synthetic oligonucleotide
ggcccaacgacaggaggcu

SEQ ID NO: 1142396 - RNA, 19 nt, Artificial Sequence
  Description of Artificial Sequence: Synthetic oligonucleotide
cgacaacgcccgcucuccg

SEQ ID NO: 1142397 - RNA, 19 nt, Artificial Sequence
  Description of Artificial Sequence: Synthetic oligonucleotide
gugugcagaugggcuccga

SEQ ID NO: 1142398 - RNA, 19 nt, Artificial Sequence
  Description of Artificial Sequence: Synthetic oligonucleotide
agcggcccuggagguagaa

SEQ ID NO: 1142399 - RNA, 19 nt, Artificial Sequence
  Description of Artificial Sequence: Synthetic oligonucleotide
guugugggagccagcucuu

SEQ ID NO: 1142400 - RNA, 19 nt, Artificial Sequence
  Description of Artificial Sequence: Synthetic oligonucleotide
gggaguggguuaaugcauu

SEQ ID NO: 1142401 - RNA, 19 nt, Artificial Sequence
  Description of Artificial Sequence: Synthetic oligonucleotide
ccgacagagcucggucuug

SEQ ID NO: 1142402 - RNA, 19 nt, Artificial Sequence
  Description of Artificial Sequence: Synthetic oligonucleotide
gccggucaggcgggaagug

SEQ ID NO: 1142403 - RNA, 19 nt, Artificial Sequence
  Description of Artificial Sequence: Synthetic oligonucleotide
ccguaucgacaacgcccgc

SEQ ID NO: 1142404 - RNA, 19 nt, Artificial Sequence
  Description of Artificial Sequence: Synthetic oligonucleotide
ccguggucggaugacaggu

SEQ ID NO: 1142405 - RNA, 19 nt, Artificial Sequence
  Description of Artificial Sequence: Synthetic oligonucleotide
ccgaggggucggucccucc

SEQ ID NO: 1142406 - RNA, 19 nt, Artificial Sequence
  Description of Artificial Sequence: Synthetic oligonucleotide
gcggcccuggagguagaac

SEQ ID NO: 1142407 - RNA, 19 nt, Artificial Sequence
  Description of Artificial Sequence: Synthetic oligonucleotide
cgggugagucugacccacc

SEQ ID NO: 1142408 - RNA, 19 nt, Artificial Sequence
  Description of Artificial Sequence: Synthetic oligonucleotide
cccuccguggucggaugac

SEQ ID NO: 1142409 - RNA, 19 nt, Artificial Sequence
  Description of Artificial Sequence: Synthetic oligonucleotide
cgcaauucacccaggccgu

SEQ ID NO: 1142410 - RNA, 19 nt, Artificial Sequence
  Description of Artificial Sequence: Synthetic oligonucleotide
ugaccccggcugggaugga

SEQ ID NO: 1142411 - RNA, 19 nt, Artificial Sequence
  Description of Artificial Sequence: Synthetic oligonucleotide
cccgagaagcugaugcuuu

SEQ ID NO: 1142412 - RNA, 19 nt, Artificial Sequence
  Description of Artificial Sequence: Synthetic oligonucleotide
ggccgugggcaaacuggca

SEQ ID NO: 1142413 - RNA, 19 nt, Artificial Sequence
  Description of Artificial Sequence: Synthetic oligonucleotide
caacgcccgcucuccgagu

SEQ ID NO: 1142414 - RNA, 19 nt, Artificial Sequence
  Description of Artificial Sequence: Synthetic oligonucleotide
gcccaacgacaggaggcuc

SEQ ID NO: 1142415 - RNA, 19 nt, Artificial Sequence
  Description of Artificial Sequence: Synthetic oligonucleotide
gggugucgauuggccuggc

SEQ ID NO: 1142416 - RNA, 19 nt, Artificial Sequence
  Description of Artificial Sequence: Synthetic oligonucleotide
cguaucgacaacgcccgcu

SEQ ID NO: 1142417 - RNA, 19 nt, Artificial Sequence
  Description of Artificial Sequence: Synthetic oligonucleotide
cagcggcccuggagguaga

SEQ ID NO: 1142418 - RNA, 19 nt, Artificial Sequence
  Description of Artificial Sequence: Synthetic oligonucleotide
cccgggcggggagccaagg

SEQ ID NO: 1142419 - RNA, 19 nt, Artificial Sequence
  Description of Artificial Sequence: Synthetic oligonucleotide
cgaagucggugagggugac

SEQ ID NO: 1142420 - RNA, 19 nt, Artificial Sequence
  Description of Artificial Sequence: Synthetic oligonucleotide
gcccgagaagcugaugcuu

SEQ ID NO: 1142421 - RNA, 19 nt, Artificial Sequence
  Description of Artificial Sequence: Synthetic oligonucleotide
cggcggcgagguucugcgg

SEQ ID NO: 1142422 - RNA, 19 nt, Artificial Sequence
  Description of Artificial Sequence: Synthetic oligonucleotide
gcaagcccgagaagcugau

SEQ ID NO: 1142423 - RNA, 19 nt, Artificial Sequence
  Description of Artificial Sequence: Synthetic oligonucleotide
cgggcggggagccaagggu

SEQ ID NO: 1142424 - RNA, 19 nt, Artificial Sequence
  Description of Artificial Sequence: Synthetic oligonucleotide
cgcaguaggcgaagucggu

SEQ ID NO: 1142425 - RNA, 19 nt, Artificial Sequence
  Description of Artificial Sequence: Synthetic oligonucleotide
gcucuccgaguagguccga

SEQ ID NO: 1142426 - RNA, 19 nt, Artificial Sequence
  Description of Artificial Sequence: Synthetic oligonucleotide
ccauagggacagcggcccu

SEQ ID NO: 1142427 - RNA, 19 nt, Artificial Sequence
  Description of Artificial Sequence: Synthetic oligonucleotide
ccacacuaguuaggcauuu

SEQ ID NO: 1142428 - RNA, 19 nt, Artificial Sequence
  Description of Artificial Sequence: Synthetic oligonucleotide
gcccgcucuccgaguaggu

SEQ ID NO: 1142429 - RNA, 19 nt, Artificial Sequence
  Description of Artificial Sequence: Synthetic oligonucleotide
ccgucaggggaggcuucaa

SEQ ID NO: 1142430 - RNA, 19 nt, Artificial Sequence
  Description of Artificial Sequence: Synthetic oligonucleotide
aauucauuaugauaggucc

SEQ ID NO: 1142431 - RNA, 19 nt, Artificial Sequence
  Description of Artificial Sequence: Synthetic oligonucleotide
uuuacuuccguccagaugc

SEQ ID NO: 1142432 - RNA, 19 nt, Artificial Sequence
  Description of Artificial Sequence: Synthetic oligonucleotide
auacauaccagguaugggc

SEQ ID NO: 1142433 - RNA, 19 nt, Artificial Sequence
  Description of Artificial Sequence: Synthetic oligonucleotide
uuaauuuuauaaaugggga

SEQ ID NO: 1142434 - RNA, 19 nt, Artificial Sequence
  Description of Artificial Sequence: Synthetic oligonucleotide
acaucuaccacauaucagg

SEQ ID NO: 1142435 - RNA, 19 nt, Artificial Sequence
  Description of Artificial Sequence: Synthetic oligonucleotide
accaguaaaauuuucacag

SEQ ID NO: 1142436 - RNA, 19 nt, Artificial Sequence
  Description of Artificial Sequence: Synthetic oligonucleotide
aguaucuuagacuuuauca

SEQ ID NO: 1142437 - RNA, 19 nt, Artificial Sequence
  Description of Artificial Sequence: Synthetic oligonucleotide
cuaaguuuccuauaggaag

SEQ ID NO: 1142438 - RNA, 19 nt, Artificial Sequence
  Description of Artificial Sequence: Synthetic oligonucleotide
uuauucuugcucaugaugu

SEQ ID NO: 1142439 - RNA, 19 nt, Artificial Sequence
  Description of Artificial Sequence: Synthetic oligonucleotide
ucugcauuaagguaacuag

SEQ ID NO: 1142440 - RNA, 19 nt, Artificial Sequence
  Description of Artificial Sequence: Synthetic oligonucleotide
uguguauugcccuaaaugu

SEQ ID NO: 1142441 - RNA, 19 nt, Artificial Sequence
  Description of Artificial Sequence: Synthetic oligonucleotide
ugugaccuaauuaaggucu

SEQ ID NO: 1142442 - RNA, 19 nt, Artificial Sequence
  Description of Artificial Sequence: Synthetic oligonucleotide
aauacaaaccaaccuucuc

SEQ ID NO: 1142443 - RNA, 19 nt, Artificial Sequence
  Description of Artificial Sequence: Synthetic oligonucleotide
guaucuuagacuuuaucag

SEQ ID NO: 1142444 - RNA, 19 nt, Artificial Sequence
  Description of Artificial Sequence: Synthetic oligonucleotide
ucagcuaaguuuccuauag

SEQ ID NO: 1142445 - RNA, 19 nt, Artificial Sequence
  Description of Artificial Sequence: Synthetic oligonucleotide
uguguacuuuuaaauauag

SEQ ID NO: 1142446 - RNA, 19 nt, Artificial Sequence
  Description of Artificial Sequence: Synthetic oligonucleotide
uuaucagcaagaauguugu

SEQ ID NO: 1142447 - RNA, 19 nt, Artificial Sequence
  Description of Artificial Sequence: Synthetic oligonucleotide
agauucgcuucuuugaggg

SEQ ID NO: 1142448 - RNA, 19 nt, Artificial Sequence
  Description of Artificial Sequence: Synthetic oligonucleotide
auugugguuugauuuauuc

SEQ ID NO: 1142449 - RNA, 19 nt, Artificial Sequence
  Description of Artificial Sequence: Synthetic oligonucleotide
uaaaugauaugcuuugacu

SEQ ID NO: 1142450 - RNA, 19 nt, Artificial Sequence
  Description of Artificial Sequence: Synthetic oligonucleotide
caugcaauggcuuugacga

SEQ ID NO: 1142451 - RNA, 19 nt, Artificial Sequence
  Description of Artificial Sequence: Synthetic oligonucleotide
uuuucuuaacccugugugg

SEQ ID NO: 1142452 - RNA, 19 nt, Artificial Sequence
  Description of Artificial Sequence: Synthetic oligonucleotide
aagucugauaccuauuggu

SEQ ID NO: 1142453 - RNA, 19 nt, Artificial Sequence
  Description of Artificial Sequence: Synthetic oligonucleotide
agagcguaagaauagaagu

SEQ ID NO: 1142454 - RNA, 19 nt, Artificial Sequence
  Description of Artificial Sequence: Synthetic oligonucleotide
agcuuaacugauuuggauc

SEQ ID NO: 1142455 - RNA, 19 nt, Artificial Sequence
  Description of Artificial Sequence: Synthetic oligonucleotide
aagcccuuaauguugacgu

SEQ ID NO: 1142456 - RNA, 19 nt, Artificial Sequence
  Description of Artificial Sequence: Synthetic oligonucleotide
ugaagaacaugcaauggcu

SEQ ID NO: 1142457 - RNA, 19 nt, Artificial Sequence
  Description of Artificial Sequence: Synthetic oligonucleotide
uguauugcccuaaaugugu

SEQ ID NO: 1142458 - RNA, 19 nt, Artificial Sequence
  Description of Artificial Sequence: Synthetic oligonucleotide
uuauacauaccagguaugg

SEQ ID NO: 1142459 - RNA, 19 nt, Artificial Sequence
  Description of Artificial Sequence: Synthetic oligonucleotide
aucaacauaaaaguaaacu

SEQ ID NO: 1142460 - RNA, 19 nt, Artificial Sequence
  Description of Artificial Sequence: Synthetic oligonucleotide
uauuguuacugucuaaauc

SEQ ID NO: 1142461 - RNA, 19 nt, Artificial Sequence
  Description of Artificial Sequence: Synthetic oligonucleotide
uuugacgauaaauuaacau

SEQ ID NO: 1142462 - RNA, 19 nt, Artificial Sequence
  Description of Artificial Sequence: Synthetic oligonucleotide
uaaucgauguauuauucac

SEQ ID NO: 1142463 - RNA, 19 nt, Artificial Sequence
  Description of Artificial Sequence: Synthetic oligonucleotide
cuaaagagcguaagaauag

SEQ ID NO: 1142464 - RNA, 19 nt, Artificial Sequence
  Description of Artificial Sequence: Synthetic oligonucleotide
uaucuuagacuuuaucagc

SEQ ID NO: 1142465 - RNA, 19 nt, Artificial Sequence
  Description of Artificial Sequence: Synthetic oligonucleotide
accuaauuaaggucuugcc

SEQ ID NO: 1142466 - RNA, 19 nt, Artificial Sequence
  Description of Artificial Sequence: Synthetic oligonucleotide
aaccaguaaaauuuucaca

SEQ ID NO: 1142467 - RNA, 19 nt, Artificial Sequence
  Description of Artificial Sequence: Synthetic oligonucleotide
uugacgauaaauuaacauu

SEQ ID NO: 1142468 - RNA, 19 nt, Artificial Sequence
  Description of Artificial Sequence: Synthetic oligonucleotide
ucgaguaaggccaugguuc

SEQ ID NO: 1142469 - RNA, 19 nt, Artificial Sequence
  Description of Artificial Sequence: Synthetic oligonucleotide
uggaguucagaauacugag

SEQ ID NO: 1142470 - RNA, 19 nt, Artificial Sequence
  Description of Artificial Sequence: Synthetic oligonucleotide
acaaaaucgaguaaggcca

SEQ ID NO: 1142471 - RNA, 19 nt, Artificial Sequence
  Description of Artificial Sequence: Synthetic oligonucleotide
gaauagaaguuccauugug

SEQ ID NO: 1142472 - RNA, 19 nt, Artificial Sequence
  Description of Artificial Sequence: Synthetic oligonucleotide
uuaaucgauguauuauuca

SEQ ID NO: 1142473 - RNA, 19 nt, Artificial Sequence
  Description of Artificial Sequence: Synthetic oligonucleotide
ucacaucuaccacauauca

SEQ ID NO: 1142474 - RNA, 19 nt, Artificial Sequence
  Description of Artificial Sequence: Synthetic oligonucleotide
uuauggcaaaagauuuugg

SEQ ID NO: 1142475 - RNA, 19 nt, Artificial Sequence
  Description of Artificial Sequence: Synthetic oligonucleotide
uggaauacaaaccaaccuu

SEQ ID NO: 1142476 - RNA, 19 nt, Artificial Sequence
  Description of Artificial Sequence: Synthetic oligonucleotide
aaagauuuuggcggcacag

SEQ ID NO: 1142477 - RNA, 19 nt, Artificial Sequence
  Description of Artificial Sequence: Synthetic oligonucleotide
aaauguguguacuuuuaaa

SEQ ID NO: 1142478 - RNA, 19 nt, Artificial Sequence
  Description of Artificial Sequence: Synthetic oligonucleotide
acaugcaauggcuuugacg

SEQ ID NO: 1142479 - RNA, 19 nt, Artificial Sequence
  Description of Artificial Sequence: Synthetic oligonucleotide
caucauuauauaaaagcuc

SEQ ID NO: 1142480 - RNA, 19 nt, Artificial Sequence
  Description of Artificial Sequence: Synthetic oligonucleotide
aaagcccuuaauguugacg

SEQ ID NO: 1142481 - RNA, 19 nt, Artificial Sequence
  Description of Artificial Sequence: Synthetic oligonucleotide
agugguuaacaugugcacc

SEQ ID NO: 1142482 - RNA, 19 nt, Artificial Sequence
  Description of Artificial Sequence: Synthetic oligonucleotide
aauguugugccacuguauu

SEQ ID NO: 1142483 - RNA, 19 nt, Artificial Sequence
  Description of Artificial Sequence: Synthetic oligonucleotide
gugugggagaccuaaagag

SEQ ID NO: 1142484 - RNA, 19 nt, Artificial Sequence
  Description of Artificial Sequence: Synthetic oligonucleotide
cugagcuuaacugauuugg

SEQ ID NO: 1142485 - RNA, 19 nt, Artificial Sequence
  Description of Artificial Sequence: Synthetic oligonucleotide
ucacagugaauauuguuac

SEQ ID NO: 1142486 - RNA, 19 nt, Artificial Sequence
  Description of Artificial Sequence: Synthetic oligonucleotide
aauagaaguuccauugugu

SEQ ID NO: 1142487 - RNA, 19 nt, Artificial Sequence
  Description of Artificial Sequence: Synthetic oligonucleotide
auucgcuucuuugaggggc

SEQ ID NO: 1142488 - RNA, 19 nt, Artificial Sequence
  Description of Artificial Sequence: Synthetic oligonucleotide
agcuaaguuuccuauagga

SEQ ID NO: 1142489 - RNA, 19 nt, Artificial Sequence
  Description of Artificial Sequence: Synthetic oligonucleotide
ugugugguaauuguaguug

SEQ ID NO: 1142490 - RNA, 19 nt, Artificial Sequence
  Description of Artificial Sequence: Synthetic oligonucleotide
ugugggagaccuaaagagc

SEQ ID NO: 1142491 - RNA, 19 nt, Artificial Sequence
  Description of Artificial Sequence: Synthetic oligonucleotide
acugugaccuaauuaaggu

SEQ ID NO: 1142492 - RNA, 19 nt, Artificial Sequence
  Description of Artificial Sequence: Synthetic oligonucleotide
aacaguguagaguaucuua

SEQ ID NO: 1142493 - RNA, 19 nt, Artificial Sequence
  Description of Artificial Sequence: Synthetic oligonucleotide
ugaccauaacaaaaucgag

SEQ ID NO: 1142494 - RNA, 19 nt, Artificial Sequence
  Description of Artificial Sequence: Synthetic oligonucleotide
aagagcguaagaauagaag

SEQ ID NO: 1142495 - RNA, 19 nt, Artificial Sequence
  Description of Artificial Sequence: Synthetic oligonucleotide
ucugauaccuauuggucca

SEQ ID NO: 1142496 - RNA, 19 nt, Artificial Sequence
  Description of Artificial Sequence: Synthetic oligonucleotide
uaauuguaguugcuguuug

SEQ ID NO: 1142497 - RNA, 19 nt, Artificial Sequence
  Description of Artificial Sequence: Synthetic oligonucleotide
guauuuuagcucuauucug

SEQ ID NO: 1142498 - RNA, 19 nt, Artificial Sequence
  Description of Artificial Sequence: Synthetic oligonucleotide
ugguuuauggcaaaagauu

SEQ ID NO: 1142499 - RNA, 19 nt, Artificial Sequence
  Description of Artificial Sequence: Synthetic oligonucleotide
uaucaggugacccugucaa

SEQ ID NO: 1142500 - RNA, 19 nt, Artificial Sequence
  Description of Artificial Sequence: Synthetic oligonucleotide
aaauuggggaugaagaaaa

SEQ ID NO: 1142501 - RNA, 19 nt, Artificial Sequence
  Description of Artificial Sequence: Synthetic oligonucleotide
guauaugagauauuuuaga

SEQ ID NO: 1142502 - RNA, 19 nt, Artificial Sequence
  Description of Artificial Sequence: Synthetic oligonucleotide
cuaaaugauaugcuuugac

SEQ ID NO: 1142503 - RNA, 19 nt, Artificial Sequence
  Description of Artificial Sequence: Synthetic oligonucleotide
cuuaaucgauguauuauuc

SEQ ID NO: 1142504 - RNA, 19 nt, Artificial Sequence
  Description of Artificial Sequence: Synthetic oligonucleotide
agcguaagaauagaaguuc

SEQ ID NO: 1142505 - RNA, 19 nt, Artificial Sequence
  Description of Artificial Sequence: Synthetic oligonucleotide
ugcauuaagguaacuagua

SEQ ID NO: 1142506 - RNA, 19 nt, Artificial Sequence
  Description of Artificial Sequence: Synthetic oligonucleotide
ugcaaguggagagaaaagc

SEQ ID NO: 1142507 - RNA, 19 nt, Artificial Sequence
  Description of Artificial Sequence: Synthetic oligonucleotide
gagaauggaguucagaaua

SEQ ID NO: 1142508 - RNA, 19 nt, Artificial Sequence
  Description of Artificial Sequence: Synthetic oligonucleotide
agucuaccgacccugcugg

SEQ ID NO: 1142509 - RNA, 19 nt, Artificial Sequence
  Description of Artificial Sequence: Synthetic oligonucleotide
acaguaugcggugucaugg

SEQ ID NO: 1142510 - RNA, 19 nt, Artificial Sequence
  Description of Artificial Sequence: Synthetic oligonucleotide
cuuaccucgcucugaaagg

SEQ ID NO: 1142511 - RNA, 19 nt, Artificial Sequence
  Description of Artificial Sequence: Synthetic oligonucleotide
uauacauaccagguauggg

SEQ ID NO: 1142512 - RNA, 19 nt, Artificial Sequence
  Description of Artificial Sequence: Synthetic oligonucleotide
agaugcacauuuucagaac

SEQ ID NO: 1142513 - RNA, 19 nt, Artificial Sequence
  Description of Artificial Sequence: Synthetic oligonucleotide
ugggaauugauaauauuuu

SEQ ID NO: 1142514 - RNA, 19 nt, Artificial Sequence
  Description of Artificial Sequence: Synthetic oligonucleotide
cugaccauaacaaaaucga

SEQ ID NO: 1142515 - RNA, 19 nt, Artificial Sequence
  Description of Artificial Sequence: Synthetic oligonucleotide
uccuauaggaaggagagau

SEQ ID NO: 1142516 - RNA, 19 nt, Artificial Sequence
  Description of Artificial Sequence: Synthetic oligonucleotide
uugugugggagaccuaaag

SEQ ID NO: 1142517 - RNA, 19 nt, Artificial Sequence
  Description of Artificial Sequence: Synthetic oligonucleotide
uaccuauugguccacgcca

SEQ ID NO: 1142518 - RNA, 19 nt, Artificial Sequence
  Description of Artificial Sequence: Synthetic oligonucleotide
auuaagguaacuaguauaa

SEQ ID NO: 1142519 - RNA, 19 nt, Artificial Sequence
  Description of Artificial Sequence: Synthetic oligonucleotide
auggggaauacaugcagag

SEQ ID NO: 1142520 - RNA, 19 nt, Artificial Sequence
  Description of Artificial Sequence: Synthetic oligonucleotide
gucugauaccuauuggucc

SEQ ID NO: 1142521 - RNA, 19 nt, Artificial Sequence
  Description of Artificial Sequence: Synthetic oligonucleotide
ugacuugugcauuaaacuu

SEQ ID NO: 1142522 - RNA, 19 nt, Artificial Sequence
  Description of Artificial Sequence: Synthetic oligonucleotide
uuacugucuaaauccaccu

SEQ ID NO: 1142523 - RNA, 19 nt, Artificial Sequence
  Description of Artificial Sequence: Synthetic oligonucleotide
ugacuuacagauucgcuuc

SEQ ID NO: 1142524 - RNA, 19 nt, Artificial Sequence
  Description of Artificial Sequence: Synthetic oligonucleotide
agcaagaauguugugccac

SEQ ID NO: 1142525 - RNA, 19 nt, Artificial Sequence
  Description of Artificial Sequence: Synthetic oligonucleotide
uuucuugucuugcacugac

SEQ ID NO: 1142526 - RNA, 19 nt, Artificial Sequence
  Description of Artificial Sequence: Synthetic oligonucleotide
ucagguguaugcugggaag

SEQ ID NO: 1142527 - RNA, 19 nt, Artificial Sequence
  Description of Artificial Sequence: Synthetic oligonucleotide
aaaagauuuuggcggcaca

SEQ ID NO: 1142528 - RNA, 19 nt, Artificial Sequence
  Description of Artificial Sequence: Synthetic oligonucleotide
uuucuuaacccuguguggu

SEQ ID NO: 1142529 - RNA, 19 nt, Artificial Sequence
  Description of Artificial Sequence: Synthetic oligonucleotide
gugggagaccuaaagagcg

SEQ ID NO: 1142530 - RNA, 19 nt, Artificial Sequence
  Description of Artificial Sequence: Synthetic oligonucleotide
uggcucuaaagccuuaccu

SEQ ID NO: 1142531 - RNA, 19 nt, Artificial Sequence
  Description of Artificial Sequence: Synthetic oligonucleotide
aagaauguugugccacugu

SEQ ID NO: 1142532 - RNA, 19 nt, Artificial Sequence
  Description of Artificial Sequence: Synthetic oligonucleotide
ugagcuuaacugauuugga

SEQ ID NO: 1142533 - RNA, 19 nt, Artificial Sequence
  Description of Artificial Sequence: Synthetic oligonucleotide
acagugaguagcuuuuaca

SEQ ID NO: 1142534 - RNA, 19 nt, Artificial Sequence
  Description of Artificial Sequence: Synthetic oligonucleotide
auguauuauucacuugugu

SEQ ID NO: 1142535 - RNA, 19 nt, Artificial Sequence
  Description of Artificial Sequence: Synthetic oligonucleotide
auuaugauagguccacaau

SEQ ID NO: 1142536 - RNA, 19 nt, Artificial Sequence
  Description of Artificial Sequence: Synthetic oligonucleotide
gacagcuggaauacaaacc

SEQ ID NO: 1142537 - RNA, 19 nt, Artificial Sequence
  Description of Artificial Sequence: Synthetic oligonucleotide
aucgauguauuauucacuu

SEQ ID NO: 1142538 - RNA, 19 nt, Artificial Sequence
  Description of Artificial Sequence: Synthetic oligonucleotide
auuuuauacauaccaggua

SEQ ID NO: 1142539 - RNA, 19 nt, Artificial Sequence
  Description of Artificial Sequence: Synthetic oligonucleotide
acgauaaauuaacauucca

SEQ ID NO: 1142540 - RNA, 19 nt, Artificial Sequence
  Description of Artificial Sequence: Synthetic oligonucleotide
uuacgaacagugguuaaca

SEQ ID NO: 1142541 - RNA, 19 nt, Artificial Sequence
  Description of Artificial Sequence: Synthetic oligonucleotide
aaagccuuaccucgcucug

SEQ ID NO: 1142542 - RNA, 19 nt, Artificial Sequence
  Description of Artificial Sequence: Synthetic oligonucleotide
auucacuugugugggagac

SEQ ID NO: 1142543 - RNA, 19 nt, Artificial Sequence
  Description of Artificial Sequence: Synthetic oligonucleotide
aaucgauguauuauucacu

SEQ ID NO: 1142544 - RNA, 19 nt, Artificial Sequence
  Description of Artificial Sequence: Synthetic oligonucleotide
acgaacagugguuaacaug

SEQ ID NO: 1142545 - RNA, 19 nt, Artificial Sequence
  Description of Artificial Sequence: Synthetic oligonucleotide
aacccugugugguaauugu

SEQ ID NO: 1142546 - RNA, 19 nt, Artificial Sequence
  Description of Artificial Sequence: Synthetic oligonucleotide
cugcuggcaagucugauac

SEQ ID NO: 1142547 - RNA, 19 nt, Artificial Sequence
  Description of Artificial Sequence: Synthetic oligonucleotide
uuuacgaacagugguuaac

SEQ ID NO: 1142548 - RNA, 19 nt, Artificial Sequence
  Description of Artificial Sequence: Synthetic oligonucleotide
agauuuuggcggcacagga

SEQ ID NO: 1142549 - RNA, 19 nt, Artificial Sequence
  Description of Artificial Sequence: Synthetic oligonucleotide
uauuaagugcaagcaaaac

SEQ ID NO: 1142550 - RNA, 19 nt, Artificial Sequence
  Description of Artificial Sequence: Synthetic oligonucleotide
aaucgaguaaggccauggu

SEQ ID NO: 1142551 - RNA, 19 nt, Artificial Sequence
  Description of Artificial Sequence: Synthetic oligonucleotide
gauguauuauucacuugug

SEQ ID NO: 1142552 - RNA, 19 nt, Artificial Sequence
  Description of Artificial Sequence: Synthetic oligonucleotide
gaagagucuaccgacccug

SEQ ID NO: 1142553 - RNA, 19 nt, Artificial Sequence
  Description of Artificial Sequence: Synthetic oligonucleotide
ugguuugauuuauucagaa

SEQ ID NO: 1142554 - RNA, 19 nt, Artificial Sequence
  Description of Artificial Sequence: Synthetic oligonucleotide
ucagugcucagguguaugc

SEQ ID NO: 1142555 - RNA, 19 nt, Artificial Sequence
  Description of Artificial Sequence: Synthetic oligonucleotide
agcucuauucugaagaaga

SEQ ID NO: 1142556 - RNA, 19 nt, Artificial Sequence
  Description of Artificial Sequence: Synthetic oligonucleotide
ucuaaagccuuaccucgcu

SEQ ID NO: 1142557 - RNA, 19 nt, Artificial Sequence
  Description of Artificial Sequence: Synthetic oligonucleotide
gaccuaauuaaggucuugc

SEQ ID NO: 1142558 - RNA, 19 nt, Artificial Sequence
  Description of Artificial Sequence: Synthetic oligonucleotide
uuaacugauuuggaucuga

SEQ ID NO: 1142559 - RNA, 19 nt, Artificial Sequence
  Description of Artificial Sequence: Synthetic oligonucleotide
uccuacauuuuaauucuau

SEQ ID NO: 1142560 - RNA, 19 nt, Artificial Sequence
  Description of Artificial Sequence: Synthetic oligonucleotide
uguggaacuguacucucau

SEQ ID NO: 1142561 - RNA, 19 nt, Artificial Sequence
  Description of Artificial Sequence: Synthetic oligonucleotide
agauuuugacagugaguag

SEQ ID NO: 1142562 - RNA, 19 nt, Artificial Sequence
  Description of Artificial Sequence: Synthetic oligonucleotide
uaaagagcguaagaauaga

SEQ ID NO: 1142563 - RNA, 19 nt, Artificial Sequence
  Description of Artificial Sequence: Synthetic oligonucleotide
accuaaagagcguaagaau

SEQ ID NO: 1142564 - RNA, 19 nt, Artificial Sequence
  Description of Artificial Sequence: Synthetic oligonucleotide
ucacuugugugggagaccu

SEQ ID NO: 1142565 - RNA, 19 nt, Artificial Sequence
  Description of Artificial Sequence: Synthetic oligonucleotide
auauuguuacugucuaaau

SEQ ID NO: 1142566 - RNA, 19 nt, Artificial Sequence
  Description of Artificial Sequence: Synthetic oligonucleotide
gagucuaccgacccugcug

SEQ ID NO: 1142567 - RNA, 19 nt, Artificial Sequence
  Description of Artificial Sequence: Synthetic oligonucleotide
aguucagaauacugaguca

SEQ ID NO: 1142568 - RNA, 19 nt, Artificial Sequence
  Description of Artificial Sequence: Synthetic oligonucleotide
uuugaggggcuuaaucgau

SEQ ID NO: 1142569 - RNA, 19 nt, Artificial Sequence
  Description of Artificial Sequence: Synthetic oligonucleotide
uauuuacgaacagugguua

SEQ ID NO: 1142570 - RNA, 19 nt, Artificial Sequence
  Description of Artificial Sequence: Synthetic oligonucleotide
agaccuaaagagcguaaga

SEQ ID NO: 1142571 - RNA, 19 nt, Artificial Sequence
  Description of Artificial Sequence: Synthetic oligonucleotide
gaaauuggggaugaagaaa

SEQ ID NO: 1142572 - RNA, 19 nt, Artificial Sequence
  Description of Artificial Sequence: Synthetic oligonucleotide
uucagaauacugagucaac

SEQ ID NO: 1142573 - RNA, 19 nt, Artificial Sequence
  Description of Artificial Sequence: Synthetic oligonucleotide
ugcauaauucugacuugcu

SEQ ID NO: 1142574 - RNA, 19 nt, Artificial Sequence
  Description of Artificial Sequence: Synthetic oligonucleotide
gagaccuaaagagcguaag

SEQ ID NO: 1142575 - RNA, 19 nt, Artificial Sequence
  Description of Artificial Sequence: Synthetic oligonucleotide
ccucaauacauuuaguuca

SEQ ID NO: 1142576 - RNA, 19 nt, Artificial Sequence
  Description of Artificial Sequence: Synthetic oligonucleotide
gacuugcugguauuuacga

SEQ ID NO: 1142577 - RNA, 19 nt, Artificial Sequence
  Description of Artificial Sequence: Synthetic oligonucleotide
aaagagcguaagaauagaa

SEQ ID NO: 1142578 - RNA, 19 nt, Artificial Sequence
  Description of Artificial Sequence: Synthetic oligonucleotide
uuaacaugugcaccucaau

SEQ ID NO: 1142579 - RNA, 19 nt, Artificial Sequence
  Description of Artificial Sequence: Synthetic oligonucleotide
agugcaagcaaaacuguga

SEQ ID NO: 1142580 - RNA, 19 nt, Artificial Sequence
  Description of Artificial Sequence: Synthetic oligonucleotide
agugaguagcuuuuacaaa

SEQ ID NO: 1142581 - RNA, 19 nt, Artificial Sequence
  Description of Artificial Sequence: Synthetic oligonucleotide
uucauugcaaguggagaga

SEQ ID NO: 1142582 - RNA, 19 nt, Artificial Sequence
  Description of Artificial Sequence: Synthetic oligonucleotide
uguugugccacuguauuuu

SEQ ID NO: 1142583 - RNA, 19 nt, Artificial Sequence
  Description of Artificial Sequence: Synthetic oligonucleotide
gacagugaguagcuuuuac

SEQ ID NO: 1142584 - RNA, 19 nt, Artificial Sequence
  Description of Artificial Sequence: Synthetic oligonucleotide
ugacgugacuuguguauug

SEQ ID NO: 1142585 - RNA, 19 nt, Artificial Sequence
  Description of Artificial Sequence: Synthetic oligonucleotide
ucgauguauuauucacuug

SEQ ID NO: 1142586 - RNA, 19 nt, Artificial Sequence
  Description of Artificial Sequence: Synthetic oligonucleotide
uauugguccacgccacccu

SEQ ID NO: 1142587 - RNA, 19 nt, Artificial Sequence
  Description of Artificial Sequence: Synthetic oligonucleotide
aagagucuaccgacccugc

SEQ ID NO: 1142588 - RNA, 19 nt, Artificial Sequence
  Description of Artificial Sequence: Synthetic oligonucleotide
cuuuacuuccguccagaug

SEQ ID NO: 1142589 - RNA, 19 nt, Artificial Sequence
  Description of Artificial Sequence: Synthetic oligonucleotide
aagcaaaacugugaccuaa

SEQ ID NO: 1142590 - RNA, 19 nt, Artificial Sequence
  Description of Artificial Sequence: Synthetic oligonucleotide
cucuaaagccuuaccucgc

SEQ ID NO: 1142591 - RNA, 19 nt, Artificial Sequence
  Description of Artificial Sequence: Synthetic oligonucleotide
uauucacuugugugggaga

SEQ ID NO: 1142592 - RNA, 19 nt, Artificial Sequence
  Description of Artificial Sequence: Synthetic oligonucleotide
cuuugaggggcuuaaucga

SEQ ID NO: 1142593 - RNA, 19 nt, Artificial Sequence
  Description of Artificial Sequence: Synthetic oligonucleotide
ugugcaccucaauacauuu

SEQ ID NO: 1142594 - RNA, 19 nt, Artificial Sequence
  Description of Artificial Sequence: Synthetic oligonucleotide
gcaagucugauaccuauug

SEQ ID NO: 1142595 - RNA, 19 nt, Artificial Sequence
  Description of Artificial Sequence: Synthetic oligonucleotide
auggcuuugacgauaaauu

SEQ ID NO: 1142596 - RNA, 19 nt, Artificial Sequence
  Description of Artificial Sequence: Synthetic oligonucleotide
cagugaguagcuuuuacaa

SEQ ID NO: 1142597 - RNA, 19 nt, Artificial Sequence
  Description of Artificial Sequence: Synthetic oligonucleotide
uugucaucuuuacuuccgu

SEQ ID NO: 1142598 - RNA, 19 nt, Artificial Sequence
  Description of Artificial Sequence: Synthetic oligonucleotide
ugcacauuuucagaacuuc

SEQ ID NO: 1142599 - RNA, 19 nt, Artificial Sequence
  Description of Artificial Sequence: Synthetic oligonucleotide
gguauuuacgaacaguggu

SEQ ID NO: 1142600 - RNA, 19 nt, Artificial Sequence
  Description of Artificial Sequence: Synthetic oligonucleotide
ugaguagcuuuuacaaauu

SEQ ID NO: 1142601 - RNA, 19 nt, Artificial Sequence
  Description of Artificial Sequence: Synthetic oligonucleotide
aggagagauuuugacagug

SEQ ID NO: 1142602 - RNA, 19 nt, Artificial Sequence
  Description of Artificial Sequence: Synthetic oligonucleotide
cugugaccuaauuaagguc

SEQ ID NO: 1142603 - RNA, 19 nt, Artificial Sequence
  Description of Artificial Sequence: Synthetic oligonucleotide
guucagaauacugagucaa

SEQ ID NO: 1142604 - RNA, 19 nt, Artificial Sequence
  Description of Artificial Sequence: Synthetic oligonucleotide
ggugacccugucaaaaugg

SEQ ID NO: 1142605 - RNA, 19 nt, Artificial Sequence
  Description of Artificial Sequence: Synthetic oligonucleotide
auaucaggugacccuguca

SEQ ID NO: 1142606 - RNA, 19 nt, Artificial Sequence
  Description of Artificial Sequence: Synthetic oligonucleotide
ggaaggagagauuuugaca

SEQ ID NO: 1142607 - RNA, 19 nt, Artificial Sequence
  Description of Artificial Sequence: Synthetic oligonucleotide
acucagcuaaguuuccuau

SEQ ID NO: 1142608 - RNA, 19 nt, Artificial Sequence
  Description of Artificial Sequence: Synthetic oligonucleotide
cagugguuaacaugugcac

SEQ ID NO: 1142609 - RNA, 19 nt, Artificial Sequence
  Description of Artificial Sequence: Synthetic oligonucleotide
aucuaccacauaucaggug

SEQ ID NO: 1142610 - RNA, 19 nt, Artificial Sequence
  Description of Artificial Sequence: Synthetic oligonucleotide
cauuaugauagguccacaa

SEQ ID NO: 1142611 - RNA, 19 nt, Artificial Sequence
  Description of Artificial Sequence: Synthetic oligonucleotide
gugguaauuguaguugcug

SEQ ID NO: 1142612 - RNA, 19 nt, Artificial Sequence
  Description of Artificial Sequence: Synthetic oligonucleotide
auuuugacagugaguagcu

SEQ ID NO: 1142613 - RNA, 19 nt, Artificial Sequence
  Description of Artificial Sequence: Synthetic oligonucleotide
uuaccucgcucugaaagga

SEQ ID NO: 1142614 - RNA, 19 nt, Artificial Sequence
  Description of Artificial Sequence: Synthetic oligonucleotide
guguauugcccuaaaugug

SEQ ID NO: 1142615 - RNA, 19 nt, Artificial Sequence
  Description of Artificial Sequence: Synthetic oligonucleotide
ccuuaccucgcucugaaag

SEQ ID NO: 1142616 - RNA, 19 nt, Artificial Sequence
  Description of Artificial Sequence: Synthetic oligonucleotide
ugcggugucaugguuuaug

SEQ ID NO: 1142617 - RNA, 19 nt, Artificial Sequence
  Description of Artificial Sequence: Synthetic oligonucleotide
gaggaaugugcaccuucag

SEQ ID NO: 1142618 - RNA, 19 nt, Artificial Sequence
  Description of Artificial Sequence: Synthetic oligonucleotide
uaugcggugucaugguuua

SEQ ID NO: 1142619 - RNA, 19 nt, Artificial Sequence
  Description of Artificial Sequence: Synthetic oligonucleotide
aucgaguaaggccaugguu

SEQ ID NO: 1142620 - RNA, 19 nt, Artificial Sequence
  Description of Artificial Sequence: Synthetic oligonucleotide
cagaugcacauuuucagaa

SEQ ID NO: 1142621 - RNA, 19 nt, Artificial Sequence
  Description of Artificial Sequence: Synthetic oligonucleotide
cuuugacgauaaauuaaca

SEQ ID NO: 1142622 - RNA, 19 nt, Artificial Sequence
  Description of Artificial Sequence: Synthetic oligonucleotide
uauugcccuaaaugugugu

SEQ ID NO: 1142623 - RNA, 19 nt, Artificial Sequence
  Description of Artificial Sequence: Synthetic oligonucleotide
ugauaccuauugguccacg

SEQ ID NO: 1142624 - RNA, 19 nt, Artificial Sequence
  Description of Artificial Sequence: Synthetic oligonucleotide
aaaaucgaguaaggccaug

SEQ ID NO: 1142625 - RNA, 19 nt, Artificial Sequence
  Description of Artificial Sequence: Synthetic oligonucleotide
gcuuugacgauaaauuaac

SEQ ID NO: 1142626 - RNA, 19 nt, Artificial Sequence
  Description of Artificial Sequence: Synthetic oligonucleotide
uagcucuauucugaagaag

SEQ ID NO: 1142627 - RNA, 19 nt, Artificial Sequence
  Description of Artificial Sequence: Synthetic oligonucleotide
ugucaucuuuacuuccguc

SEQ ID NO: 1142628 - RNA, 19 nt, Artificial Sequence
  Description of Artificial Sequence: Synthetic oligonucleotide
gauuuuggcggcacaggac

SEQ ID NO: 1142629 - RNA, 19 nt, Artificial Sequence
  Description of Artificial Sequence: Synthetic oligonucleotide
uccguccagaugcacauuu

SEQ ID NO: 1142630 - RNA, 19 nt, Artificial Sequence
  Description of Artificial Sequence: Synthetic oligonucleotide
ggaauugauaauauuuuaa

SEQ ID NO: 1142631 - RNA, 19 nt, Artificial Sequence
  Description of Artificial Sequence: Synthetic oligonucleotide
cuauugguccacgccaccc

SEQ ID NO: 1142632 - RNA, 19 nt, Artificial Sequence
  Description of Artificial Sequence: Synthetic oligonucleotide
cagcuaaguuuccuauagg

SEQ ID NO: 1142633 - RNA, 19 nt, Artificial Sequence
  Description of Artificial Sequence: Synthetic oligonucleotide
ugucuaaauccaccuguuu

SEQ ID NO: 1142634 - RNA, 19 nt, Artificial Sequence
  Description of Artificial Sequence: Synthetic oligonucleotide
uucgcuucuuugaggggcu

SEQ ID NO: 1142635 - RNA, 19 nt, Artificial Sequence
  Description of Artificial Sequence: Synthetic oligonucleotide
caaaagauuuuggcggcac

SEQ ID NO: 1142636 - RNA, 19 nt, Artificial Sequence
  Description of Artificial Sequence: Synthetic oligonucleotide
uugcccuaaauguguguac

SEQ ID NO: 1142637 - RNA, 19 nt, Artificial Sequence
  Description of Artificial Sequence: Synthetic oligonucleotide
gugguuaacaugugcaccu

SEQ ID NO: 1142638 - RNA, 19 nt, Artificial Sequence
  Description of Artificial Sequence: Synthetic oligonucleotide
gcuggaauacaaaccaacc

SEQ ID NO: 1142639 - RNA, 19 nt, Artificial Sequence
  Description of Artificial Sequence: Synthetic oligonucleotide
auuaaggucuugccuucau

SEQ ID NO: 1142640 - RNA, 19 nt, Artificial Sequence
  Description of Artificial Sequence: Synthetic oligonucleotide
ugucuugcacugacuuaca

SEQ ID NO: 1142641 - RNA, 19 nt, Artificial Sequence
  Description of Artificial Sequence: Synthetic oligonucleotide
acuugugugggagaccuaa

SEQ ID NO: 1142642 - RNA, 19 nt, Artificial Sequence
  Description of Artificial Sequence: Synthetic oligonucleotide
auaaaagcucugcucuguu

SEQ ID NO: 1142643 - RNA, 19 nt, Artificial Sequence
  Description of Artificial Sequence: Synthetic oligonucleotide
cuaccacauaucaggugac

SEQ ID NO: 1142644 - RNA, 19 nt, Artificial Sequence
  Description of Artificial Sequence: Synthetic oligonucleotide
uacgaacagugguuaacau

SEQ ID NO: 1142645 - RNA, 19 nt, Artificial Sequence
  Description of Artificial Sequence: Synthetic oligonucleotide
ugauuuggaucugaccaua

SEQ ID NO: 1142646 - RNA, 19 nt, Artificial Sequence
  Description of Artificial Sequence: Synthetic oligonucleotide
cacugacuuacagauucgc

SEQ ID NO: 1142647 - RNA, 19 nt, Artificial Sequence
  Description of Artificial Sequence: Synthetic oligonucleotide
cauuguguggaacuguacu

SEQ ID NO: 1142648 - RNA, 19 nt, Artificial Sequence
  Description of Artificial Sequence: Synthetic oligonucleotide
gcuuaacugauuuggaucu

SEQ ID NO: 1142649 - RNA, 19 nt, Artificial Sequence
  Description of Artificial Sequence: Synthetic oligonucleotide
auugcccuaaaugugugua

SEQ ID NO: 1142650 - RNA, 19 nt, Artificial Sequence
  Description of Artificial Sequence: Synthetic oligonucleotide
cucuauucugaagaagaca

SEQ ID NO: 1142651 - RNA, 19 nt, Artificial Sequence
  Description of Artificial Sequence: Synthetic oligonucleotide
guugacgugacuuguguau

SEQ ID NO: 1142652 - RNA, 19 nt, Artificial Sequence
  Description of Artificial Sequence: Synthetic oligonucleotide
cacaguaugcggugucaug

SEQ ID NO: 1142653 - RNA, 19 nt, Artificial Sequence
  Description of Artificial Sequence: Synthetic oligonucleotide
aaacaguguagaguaucuu

SEQ ID NO: 1142654 - RNA, 19 nt, Artificial Sequence
  Description of Artificial Sequence: Synthetic oligonucleotide
guaugggcccaucuaauua

SEQ ID NO: 1142655 - RNA, 19 nt, Artificial Sequence
  Description of Artificial Sequence: Synthetic oligonucleotide
ugaccuaauuaaggucuug

SEQ ID NO: 1142656 - RNA, 19 nt, Artificial Sequence
  Description of Artificial Sequence: Synthetic oligonucleotide
cuggaauacaaaccaaccu

SEQ ID NO: 1142657 - RNA, 19 nt, Artificial Sequence
  Description of Artificial Sequence: Synthetic oligonucleotide
acugacuuacagauucgcu

SEQ ID NO: 1142658 - RNA, 19 nt, Artificial Sequence
  Description of Artificial Sequence: Synthetic oligonucleotide
ucuaccgacccugcuggca

SEQ ID NO: 1142659 - RNA, 19 nt, Artificial Sequence
  Description of Artificial Sequence: Synthetic oligonucleotide
cagucugcauuaagguaac

SEQ ID NO: 1142660 - RNA, 19 nt, Artificial Sequence
  Description of Artificial Sequence: Synthetic oligonucleotide
uuacacuuucuugggaauu

SEQ ID NO: 1142661 - RNA, 19 nt, Artificial Sequence
  Description of Artificial Sequence: Synthetic oligonucleotide
uuccauuguguggaacugu

SEQ ID NO: 1142662 - RNA, 19 nt, Artificial Sequence
  Description of Artificial Sequence: Synthetic oligonucleotide
uguuuguggugcugacagu

SEQ ID NO: 1142663 - RNA, 19 nt, Artificial Sequence
  Description of Artificial Sequence: Synthetic oligonucleotide
cacaggacugauguuugug

SEQ ID NO: 1142664 - RNA, 19 nt, Artificial Sequence
  Description of Artificial Sequence: Synthetic oligonucleotide
cauaucaggugacccuguc

SEQ ID NO: 1142665 - RNA, 19 nt, Artificial Sequence
  Description of Artificial Sequence: Synthetic oligonucleotide
guauugcccuaaaugugug

SEQ ID NO: 1142666 - RNA, 19 nt, Artificial Sequence
  Description of Artificial Sequence: Synthetic oligonucleotide
ugacuuguguauugcccua

SEQ ID NO: 1142667 - RNA, 19 nt, Artificial Sequence
  Description of Artificial Sequence: Synthetic oligonucleotide
cuaaagccuuaccucgcuc

SEQ ID NO: 1142668 - RNA, 19 nt, Artificial Sequence
  Description of Artificial Sequence: Synthetic oligonucleotide
ucugacuugcugguauuua

SEQ ID NO: 1142669 - RNA, 19 nt, Artificial Sequence
  Description of Artificial Sequence: Synthetic oligonucleotide
uucuuguauaugagauauu

SEQ ID NO: 1142670 - RNA, 19 nt, Artificial Sequence
  Description of Artificial Sequence: Synthetic oligonucleotide
accucgcucugaaaggauc

SEQ ID NO: 1142671 - RNA, 19 nt, Artificial Sequence
  Description of Artificial Sequence: Synthetic oligonucleotide
gggaauugauaauauuuua

SEQ ID NO: 1142672 - RNA, 19 nt, Artificial Sequence
  Description of Artificial Sequence: Synthetic oligonucleotide
agcccuuaauguugacgug

SEQ ID NO: 1142673 - RNA, 19 nt, Artificial Sequence
  Description of Artificial Sequence: Synthetic oligonucleotide
guuaacaugugcaccucaa

SEQ ID NO: 1142674 - RNA, 19 nt, Artificial Sequence
  Description of Artificial Sequence: Synthetic oligonucleotide
cugacuuacagauucgcuu

SEQ ID NO: 1142675 - RNA, 19 nt, Artificial Sequence
  Description of Artificial Sequence: Synthetic oligonucleotide
cuuaacugauuuggaucug

SEQ ID NO: 1142676 - RNA, 19 nt, Artificial Sequence
  Description of Artificial Sequence: Synthetic oligonucleotide
auguugugccacuguauuu

SEQ ID NO: 1142677 - RNA, 19 nt, Artificial Sequence
  Description of Artificial Sequence: Synthetic oligonucleotide
uuccuacauuuuaauucua

SEQ ID NO: 1142678 - RNA, 19 nt, Artificial Sequence
  Description of Artificial Sequence: Synthetic oligonucleotide
aguaugcggugucaugguu

SEQ ID NO: 1142679 - RNA, 19 nt, Artificial Sequence
  Description of Artificial Sequence: Synthetic oligonucleotide
aauugugguuugauuuauu

SEQ ID NO: 1142680 - RNA, 19 nt, Artificial Sequence
  Description of Artificial Sequence: Synthetic oligonucleotide
gcguaagaauagaaguucc

SEQ ID NO: 1142681 - RNA, 19 nt, Artificial Sequence
  Description of Artificial Sequence: Synthetic oligonucleotide
cugcauuaagguaacuagu

SEQ ID NO: 1142682 - RNA, 19 nt, Artificial Sequence
  Description of Artificial Sequence: Synthetic oligonucleotide
ggaauacaugcagagucac

SEQ ID NO: 1142683 - RNA, 19 nt, Artificial Sequence
  Description of Artificial Sequence: Synthetic oligonucleotide
agccuuaccucgcucugaa

SEQ ID NO: 1142684 - RNA, 19 nt, Artificial Sequence
  Description of Artificial Sequence: Synthetic oligonucleotide
acuugguauuuuaauuuua

SEQ ID NO: 1142685 - RNA, 19 nt, Artificial Sequence
  Description of Artificial Sequence: Synthetic oligonucleotide
aagccuuaccucgcucuga

SEQ ID NO: 1142686 - RNA, 19 nt, Artificial Sequence
  Description of Artificial Sequence: Synthetic oligonucleotide
uugacgugacuuguguauu

SEQ ID NO: 1142687 - RNA, 19 nt, Artificial Sequence
  Description of Artificial Sequence: Synthetic oligonucleotide
uggugcugacaguuacacu

SEQ ID NO: 1142688 - RNA, 19 nt, Artificial Sequence
  Description of Artificial Sequence: Synthetic oligonucleotide
cacgccacccuuucaagaa

SEQ ID NO: 1142689 - RNA, 19 nt, Artificial Sequence
  Description of Artificial Sequence: Synthetic oligonucleotide
guauuuacgaacagugguu

SEQ ID NO: 1142690 - RNA, 19 nt, Artificial Sequence
  Description of Artificial Sequence: Synthetic oligonucleotide
ucgcucugaaaggaucagu

SEQ ID NO: 1142691 - RNA, 19 nt, Artificial Sequence
  Description of Artificial Sequence: Synthetic oligonucleotide
uuaacccugugugguaauu

SEQ ID NO: 1142692 - RNA, 19 nt, Artificial Sequence
  Description of Artificial Sequence: Synthetic oligonucleotide
uaccucgcucugaaaggau

SEQ ID NO: 1142693 - RNA, 19 nt, Artificial Sequence
  Description of Artificial Sequence: Synthetic oligonucleotide
uaauucugacuugcuggua

SEQ ID NO: 1142694 - RNA, 19 nt, Artificial Sequence
  Description of Artificial Sequence: Synthetic oligonucleotide
gacuuacagauucgcuucu

SEQ ID NO: 1142695 - RNA, 19 nt, Artificial Sequence
  Description of Artificial Sequence: Synthetic oligonucleotide
gguuuauggcaaaagauuu

SEQ ID NO: 1142696 - RNA, 19 nt, Artificial Sequence
  Description of Artificial Sequence: Synthetic oligonucleotide
gcuaaguuuccuauaggaa

SEQ ID NO: 1142697 - RNA, 19 nt, Artificial Sequence
  Description of Artificial Sequence: Synthetic oligonucleotide
gagcguaagaauagaaguu

SEQ ID NO: 1142698 - RNA, 19 nt, Artificial Sequence
  Description of Artificial Sequence: Synthetic oligonucleotide
ugguuaacaugugcaccuc

SEQ ID NO: 1142699 - RNA, 19 nt, Artificial Sequence
  Description of Artificial Sequence: Synthetic oligonucleotide
ccuaauuaaggucuugccu

SEQ ID NO: 1142700 - RNA, 19 nt, Artificial Sequence
  Description of Artificial Sequence: Synthetic oligonucleotide
guccacgccacccuuucaa

SEQ ID NO: 1142701 - RNA, 19 nt, Artificial Sequence
  Description of Artificial Sequence: Synthetic oligonucleotide
caucuaccacauaucaggu

SEQ ID NO: 1142702 - RNA, 19 nt, Artificial Sequence
  Description of Artificial Sequence: Synthetic oligonucleotide
uuuugacagugaguagcuu

SEQ ID NO: 1142703 - RNA, 19 nt, Artificial Sequence
  Description of Artificial Sequence: Synthetic oligonucleotide
gcuuaaucgauguauuauu

SEQ ID NO: 1142704 - RNA, 19 nt, Artificial Sequence
  Description of Artificial Sequence: Synthetic oligonucleotide
agcaaaacugugaccuaau

SEQ ID NO: 1142705 - RNA, 19 nt, Artificial Sequence
  Description of Artificial Sequence: Synthetic oligonucleotide
gucaguaauugugguuuga

SEQ ID NO: 1142706 - RNA, 19 nt, Artificial Sequence
  Description of Artificial Sequence: Synthetic oligonucleotide
cucagcuaaguuuccuaua

SEQ ID NO: 1142707 - RNA, 19 nt, Artificial Sequence
  Description of Artificial Sequence: Synthetic oligonucleotide
cacugaaucuggcucuaaa

SEQ ID NO: 1142708 - RNA, 19 nt, Artificial Sequence
  Description of Artificial Sequence: Synthetic oligonucleotide
gcucuauucugaagaagac

SEQ ID NO: 1142709 - RNA, 19 nt, Artificial Sequence
  Description of Artificial Sequence: Synthetic oligonucleotide
cgauguauuauucacuugu

SEQ ID NO: 1142710 - RNA, 19 nt, Artificial Sequence
  Description of Artificial Sequence: Synthetic oligonucleotide
cauaccagguaugggccca

SEQ ID NO: 1142711 - RNA, 19 nt, Artificial Sequence
  Description of Artificial Sequence: Synthetic oligonucleotide
ccuacauuuuaauucuaua

SEQ ID NO: 1142712 - RNA, 19 nt, Artificial Sequence
  Description of Artificial Sequence: Synthetic oligonucleotide
gacuuguguauugcccuaa

SEQ ID NO: 1142713 - RNA, 19 nt, Artificial Sequence
  Description of Artificial Sequence: Synthetic oligonucleotide
cuaccgacccugcuggcaa

SEQ ID NO: 1142714 - RNA, 19 nt, Artificial Sequence
  Description of Artificial Sequence: Synthetic oligonucleotide
cugauaccuauugguccac

SEQ ID NO: 1142715 - RNA, 19 nt, Artificial Sequence
  Description of Artificial Sequence: Synthetic oligonucleotide
cugauuuggaucugaccau

SEQ ID NO: 1142716 - RNA, 19 nt, Artificial Sequence
  Description of Artificial Sequence: Synthetic oligonucleotide
cagguguaugcugggaaga

SEQ ID NO: 1142717 - RNA, 19 nt, Artificial Sequence
  Description of Artificial Sequence: Synthetic oligonucleotide
acgccacccuuucaagaaa

SEQ ID NO: 1142718 - RNA, 19 nt, Artificial Sequence
  Description of Artificial Sequence: Synthetic oligonucleotide
agaguaucuuagacuuuau

SEQ ID NO: 1142719 - RNA, 19 nt, Artificial Sequence
  Description of Artificial Sequence: Synthetic oligonucleotide
gguuugauuuauucagaau

SEQ ID NO: 1142720 - RNA, 19 nt, Artificial Sequence
  Description of Artificial Sequence: Synthetic oligonucleotide
guguggaacuguacucuca

SEQ ID NO: 1142721 - RNA, 19 nt, Artificial Sequence
  Description of Artificial Sequence: Synthetic oligonucleotide
cucugagcuuaacugauuu

SEQ ID NO: 1142722 - RNA, 19 nt, Artificial Sequence
  Description of Artificial Sequence: Synthetic oligonucleotide
caagcaaaacugugaccua

SEQ ID NO: 1142723 - RNA, 19 nt, Artificial Sequence
  Description of Artificial Sequence: Synthetic oligonucleotide
cuugugugggagaccuaaa

SEQ ID NO: 1142724 - RNA, 19 nt, Artificial Sequence
  Description of Artificial Sequence: Synthetic oligonucleotide
cacagugaauauuguuacu

SEQ ID NO: 1142725 - RNA, 19 nt, Artificial Sequence
  Description of Artificial Sequence: Synthetic oligonucleotide
uacuuccguccagaugcac

SEQ ID NO: 1142726 - RNA, 19 nt, Artificial Sequence
  Description of Artificial Sequence: Synthetic oligonucleotide
ggagagaaaagcccuuaau

SEQ ID NO: 1142727 - RNA, 19 nt, Artificial Sequence
  Description of Artificial Sequence: Synthetic oligonucleotide
ggcuuaaucgauguauuau

SEQ ID NO: 1142728 - RNA, 19 nt, Artificial Sequence
  Description of Artificial Sequence: Synthetic oligonucleotide
cuuguguauugcccuaaau

SEQ ID NO: 1142729 - RNA, 19 nt, Artificial Sequence
  Description of Artificial Sequence: Synthetic oligonucleotide
caaaaucgaguaaggccau

SEQ ID NO: 1142730 - RNA, 19 nt, Artificial Sequence
  Description of Artificial Sequence: Synthetic oligonucleotide
ccuauugguccacgccacc

SEQ ID NO: 1142731 - RNA, 19 nt, Artificial Sequence
  Description of Artificial Sequence: Synthetic oligonucleotide
gucuaccgacccugcuggc

SEQ ID NO: 1142732 - RNA, 19 nt, Artificial Sequence
  Description of Artificial Sequence: Synthetic oligonucleotide
gggcuuaaucgauguauua

SEQ ID NO: 1142733 - RNA, 19 nt, Artificial Sequence
  Description of Artificial Sequence: Synthetic oligonucleotide
agucugcauuaagguaacu

SEQ ID NO: 1142734 - RNA, 19 nt, Artificial Sequence
  Description of Artificial Sequence: Synthetic oligonucleotide
gaggggcuuaaucgaugua

SEQ ID NO: 1142735 - RNA, 19 nt, Artificial Sequence
  Description of Artificial Sequence: Synthetic oligonucleotide
gagagaaauuggggaugaa

SEQ ID NO: 1142736 - RNA, 19 nt, Artificial Sequence
  Description of Artificial Sequence: Synthetic oligonucleotide
ggaguucagaauacugagu

SEQ ID NO: 1142737 - RNA, 19 nt, Artificial Sequence
  Description of Artificial Sequence: Synthetic oligonucleotide
ggaagagucuaccgacccu

SEQ ID NO: 1142738 - RNA, 19 nt, Artificial Sequence
  Description of Artificial Sequence: Synthetic oligonucleotide
caguaugcggugucauggu

SEQ ID NO: 1142739 - RNA, 19 nt, Artificial Sequence
  Description of Artificial Sequence: Synthetic oligonucleotide
gguaugggcccaucuaauu

SEQ ID NO: 1142740 - RNA, 19 nt, Artificial Sequence
  Description of Artificial Sequence: Synthetic oligonucleotide
acccugugugguaauugua

SEQ ID NO: 1142741 - RNA, 19 nt, Artificial Sequence
  Description of Artificial Sequence: Synthetic oligonucleotide
ggagaccuaaagagcguaa

SEQ ID NO: 1142742 - RNA, 19 nt, Artificial Sequence
  Description of Artificial Sequence: Synthetic oligonucleotide
cuuaacccugugugguaau

SEQ ID NO: 1142743 - RNA, 19 nt, Artificial Sequence
  Description of Artificial Sequence: Synthetic oligonucleotide
auaccagguaugggcccau

SEQ ID NO: 1142744 - RNA, 19 nt, Artificial Sequence
  Description of Artificial Sequence: Synthetic oligonucleotide
gggagaccuaaagagcgua

SEQ ID NO: 1142745 - RNA, 19 nt, Artificial Sequence
  Description of Artificial Sequence: Synthetic oligonucleotide
uaccagguaugggcccauc

SEQ ID NO: 1142746 - RNA, 19 nt, Artificial Sequence
  Description of Artificial Sequence: Synthetic oligonucleotide
gccacaguaugcgguguca

SEQ ID NO: 1142747 - RNA, 19 nt, Artificial Sequence
  Description of Artificial Sequence: Synthetic oligonucleotide
ccacgccacccuuucaaga

SEQ ID NO: 1142748 - RNA, 19 nt, Artificial Sequence
  Description of Artificial Sequence: Synthetic oligonucleotide
cagugcucagguguaugcu

SEQ ID NO: 1142749 - RNA, 19 nt, Artificial Sequence
  Description of Artificial Sequence: Synthetic oligonucleotide
gugaccuaauuaaggucuu

SEQ ID NO: 1142750 - RNA, 19 nt, Artificial Sequence
  Description of Artificial Sequence: Synthetic oligonucleotide
cuugugcauuaaacuucau

SEQ ID NO: 1142751 - RNA, 19 nt, Artificial Sequence
  Description of Artificial Sequence: Synthetic oligonucleotide
ggggcuuaaucgauguauu

SEQ ID NO: 1142752 - RNA, 19 nt, Artificial Sequence
  Description of Artificial Sequence: Synthetic oligonucleotide
aggccaugguucacaucua

SEQ ID NO: 1142753 - RNA, 19 nt, Artificial Sequence
  Description of Artificial Sequence: Synthetic oligonucleotide
cacuugugugggagaccua

SEQ ID NO: 1142754 - RNA, 19 nt, Artificial Sequence
  Description of Artificial Sequence: Synthetic oligonucleotide
ccuauaggaaggagagauu

SEQ ID NO: 1142755 - RNA, 19 nt, Artificial Sequence
  Description of Artificial Sequence: Synthetic oligonucleotide
ggcaagucugauaccuauu

SEQ ID NO: 1142756 - RNA, 19 nt, Artificial Sequence
  Description of Artificial Sequence: Synthetic oligonucleotide
ccacuguauuuuagcucua

SEQ ID NO: 1142757 - RNA, 19 nt, Artificial Sequence
  Description of Artificial Sequence: Synthetic oligonucleotide
ccgacccugcuggcaaguc

SEQ ID NO: 1142758 - RNA, 19 nt, Artificial Sequence
  Description of Artificial Sequence: Synthetic oligonucleotide
ccacaguaugcggugucau

SEQ ID NO: 1142759 - RNA, 19 nt, Artificial Sequence
  Description of Artificial Sequence: Synthetic oligonucleotide
ccacugaaucuggcucuaa

SEQ ID NO: 1142760 - RNA, 19 nt, Artificial Sequence
  Description of Artificial Sequence: Synthetic oligonucleotide
gcggcacaggacugauguu

SEQ ID NO: 1142761 - RNA, 19 nt, Artificial Sequence
  Description of Artificial Sequence: Synthetic oligonucleotide
ccguccagaugcacauuuu

SEQ ID NO: 1142762 - RNA, 19 nt, Artificial Sequence
  Description of Artificial Sequence: Synthetic oligonucleotide
cccugucaaaauggagaau

SEQ ID NO: 1142763 - RNA, 19 nt, Artificial Sequence
  Description of Artificial Sequence: Synthetic oligonucleotide
  modified_base (14)..(14): a, c, u, g, unknown or other
aauagauguaaaunuaaaa

SEQ ID NO: 1142764 - RNA, 19 nt, Artificial Sequence
  Description of Artificial Sequence: Synthetic oligonucleotide
  modified_base (5)..(5): a, c, u, g, unknown or other
aaacnuaaaacagacaaug

SEQ ID NO: 1142765 - RNA, 19 nt, Artificial Sequence
  Description of Artificial Sequence: Synthetic oligonucleotide
aagagcauaaagcagaagu

SEQ ID NO: 1142766 - RNA, 19 nt, Artificial Sequence
  Description of Artificial Sequence: Synthetic oligonucleotide
aaaacagacaaugcaagcg

SEQ ID NO: 1142767 - RNA, 19 nt, Artificial Sequence
  Description of Artificial Sequence: Synthetic oligonucleotide
aaggcgacggccuuggagc

SEQ ID NO: 1142768 - RNA, 19 nt, Artificial Sequence
  Description of Artificial Sequence: Synthetic oligonucleotide
  modified_base (4)..(4): a, c, u, g, unknown or other
aacnuaaaacagacaaugc

SEQ ID NO: 1142769 - RNA, 19 nt, Artificial Sequence
  Description of Artificial Sequence: Synthetic oligonucleotide
ugaaaggccauguauuagg

SEQ ID NO: 1142770 - RNA, 19 nt, Artificial Sequence
  Description of Artificial Sequence: Synthetic oligonucleotide
agcacuaacacaucagacg

SEQ ID NO: 1142771 - RNA, 19 nt, Artificial Sequence
  Description of Artificial Sequence: Synthetic oligonucleotide
  modified_base (3)..(3): a, c, u, g, unknown or other
acnuaaaacagacaaugca

SEQ ID NO: 1142772 - RNA, 19 nt, Artificial Sequence
  Description of Artificial Sequence: Synthetic oligonucleotide
aaugcaagcggacgcugcc

SEQ ID NO: 1142773 - RNA, 19 nt, Artificial Sequence
  Description of Artificial Sequence: Synthetic oligonucleotide
gacucauagagcucgacag

SEQ ID NO: 1142774 - RNA, 19 nt, Artificial Sequence
  Description of Artificial Sequence: Synthetic oligonucleotide
agauuucguacguaguccc

SEQ ID NO: 1142775 - RNA, 19 nt, Artificial Sequence
  Description of Artificial Sequence: Synthetic oligonucleotide
gacaaugacgucugcaggg

SEQ ID NO: 1142776 - RNA, 19 nt, Artificial Sequence
  Description of Artificial Sequence: Synthetic oligonucleotide
ugaguagguaaguggaugg

SEQ ID NO: 1142777 - RNA, 19 nt, Artificial Sequence
  Description of Artificial Sequence: Synthetic oligonucleotide
acuacagcaacccauccag

SEQ ID NO: 1142778 - RNA, 19 nt, Artificial Sequence
  Description of Artificial Sequence: Synthetic oligonucleotide
auccagaaaggauagagug

SEQ ID NO: 1142779 - RNA, 19 nt, Artificial Sequence
  Description of Artificial Sequence: Synthetic oligonucleotide
cauagcgcagcacagagcc

SEQ ID NO: 1142780 - RNA, 19 nt, Artificial Sequence
  Description of Artificial Sequence: Synthetic oligonucleotide
agaaaggauagagugggcc

SEQ ID NO: 1142781 - RNA, 19 nt, Artificial Sequence
  Description of Artificial Sequence: Synthetic oligonucleotide
gauacagcuagauuaucug

SEQ ID NO: 1142782 - RNA, 19 nt, Artificial Sequence
  Description of Artificial Sequence: Synthetic oligonucleotide
aaacccaccagccaggcaa

SEQ ID NO: 1142783 - RNA, 19 nt, Artificial Sequence
  Description of Artificial Sequence: Synthetic oligonucleotide
aguucuuacaccgagauuu

SEQ ID NO: 1142784 - RNA, 19 nt, Artificial Sequence
  Description of Artificial Sequence: Synthetic oligonucleotide
ugaacaaauagauguaaau

SEQ ID NO: 1142785 - RNA, 19 nt, Artificial Sequence
  Description of Artificial Sequence: Synthetic oligonucleotide
acuaacacaucagacgugg

SEQ ID NO: 1142786 - RNA, 19 nt, Artificial Sequence
  Description of Artificial Sequence: Synthetic oligonucleotide
gaaaggauagagugggccc

SEQ ID NO: 1142787 - RNA, 19 nt, Artificial Sequence
  Description of Artificial Sequence: Synthetic oligonucleotide
gucauagacaccagaaucg

SEQ ID NO: 1142788 - RNA, 19 nt, Artificial Sequence
  Description of Artificial Sequence: Synthetic oligonucleotide
ugguagugaacaaauagau

SEQ ID NO: 1142789 - RNA, 19 nt, Artificial Sequence
  Description of Artificial Sequence: Synthetic oligonucleotide
uucuuaaccagcgugugcc

SEQ ID NO: 1142790 - RNA, 19 nt, Artificial Sequence
  Description of Artificial Sequence: Synthetic oligonucleotide
  modified_base (2)..(2): a, c, u, g, unknown or other
cnuaaaacagacaaugcaa

SEQ ID NO: 1142791 - RNA, 19 nt, Artificial Sequence
  Description of Artificial Sequence: Synthetic oligonucleotide
aacacauuggccuguugca

SEQ ID NO: 1142792 - RNA, 19 nt, Artificial Sequence
  Description of Artificial Sequence: Synthetic oligonucleotide
gauagagugggcccauggg

SEQ ID NO: 1142793 - RNA, 19 nt, Artificial Sequence
  Description of Artificial Sequence: Synthetic oligonucleotide
uauuaggagcagcugggag

SEQ ID NO: 1142794 - RNA, 19 nt, Artificial Sequence
  Description of Artificial Sequence: Synthetic oligonucleotide
cuagauuaucuguccaucc

SEQ ID NO: 1142795 - RNA, 19 nt, Artificial Sequence
  Description of Artificial Sequence: Synthetic oligonucleotide
  modified_base (16)..(16): a, c, u, g, unknown or other
caaauagauguaaaunuaa

SEQ ID NO: 1142796 - RNA, 19 nt, Artificial Sequence
  Description of Artificial Sequence: Synthetic oligonucleotide
uagauuaucuguccaucca

SEQ ID NO: 1142797 - RNA, 19 nt, Artificial Sequence
  Description of Artificial Sequence: Synthetic oligonucleotide
uagguaaguggauggacag

SEQ ID NO: 1142798 - RNA, 19 nt, Artificial Sequence
  Description of Artificial Sequence: Synthetic oligonucleotide
uggugcccgacucauagag

SEQ ID NO: 1142799 - RNA, 19 nt, Artificial Sequence
  Description of Artificial Sequence: Synthetic oligonucleotide
uuacucgggucccugacgc

SEQ ID NO: 1142800 - RNA, 19 nt, Artificial Sequence
  Description of Artificial Sequence: Synthetic oligonucleotide
  modified_base (15)..(15): a, c, u, g, unknown or other
aaauagauguaaaunuaaa

SEQ ID NO: 1142801 - RNA, 19 nt, Artificial Sequence
  Description of Artificial Sequence: Synthetic oligonucleotide
ugucauagcgcacgaggag

SEQ ID NO: 1142802 - RNA, 19 nt, Artificial Sequence
  Description of Artificial Sequence: Synthetic oligonucleotide
ucuuacaccgagauuucgu

SEQ ID NO: 1142803 - RNA, 19 nt, Artificial Sequence
  Description of Artificial Sequence: Synthetic oligonucleotide
agggcaauagggugcaggg

SEQ ID NO: 1142804 - RNA, 19 nt, Artificial Sequence
  Description of Artificial Sequence: Synthetic oligonucleotide
cuguguaagagggcgaucg

SEQ ID NO: 1142805 - RNA, 19 nt, Artificial Sequence
  Description of Artificial Sequence: Synthetic oligonucleotide
  modified_base (6)..(6): a, c, u, g, unknown or other
aaaacnuaaaacagacaau

SEQ ID NO: 1142806 - RNA, 19 nt, Artificial Sequence
  Description of Artificial Sequence: Synthetic oligonucleotide
gacagguugucauagcgca

SEQ ID NO: 1142807 - RNA, 19 nt, Artificial Sequence
  Description of Artificial Sequence: Synthetic oligonucleotide
aagauguccguggugcccg

SEQ ID NO: 1142808 - RNA, 19 nt, Artificial Sequence
  Description of Artificial Sequence: Synthetic oligonucleotide
augaguggugcucaguucu

SEQ ID NO: 1142809 - RNA, 19 nt, Artificial Sequence
  Description of Artificial Sequence: Synthetic oligonucleotide
  modified_base (19)..(19): a, c, u, g, unknown or other
gaacaaauagauguaaaun

SEQ ID NO: 1142810 - RNA, 19 nt, Artificial Sequence
  Description of Artificial Sequence: Synthetic oligonucleotide
aguagguaaguggauggac

SEQ ID NO: 1142811 - RNA, 19 nt, Artificial Sequence
  Description of Artificial Sequence: Synthetic oligonucleotide
ucgccaaagagugagucag

SEQ ID NO: 1142812 - RNA, 19 nt, Artificial Sequence
  Description of Artificial Sequence: Synthetic oligonucleotide
uuuggggugaggacucucc

SEQ ID NO: 1142813 - RNA, 19 nt, Artificial Sequence
  Description of Artificial Sequence: Synthetic oligonucleotide
agggacauaaacccaccag

SEQ ID NO: 1142814 - RNA, 19 nt, Artificial Sequence
  Description of Artificial Sequence: Synthetic oligonucleotide
gaaagaacaguggcagccg

SEQ ID NO: 1142815 - RNA, 19 nt, Artificial Sequence
  Description of Artificial Sequence: Synthetic oligonucleotide
ugcgcuccuggauaggagg

SEQ ID NO: 1142816 - RNA, 19 nt, Artificial Sequence
  Description of Artificial Sequence: Synthetic oligonucleotide
gagauuucguacguagucc

SEQ ID NO: 1142817 - RNA, 19 nt, Artificial Sequence
  Description of Artificial Sequence: Synthetic oligonucleotide
agcaugggacuacagcaac

SEQ ID NO: 1142818 - RNA, 19 nt, Artificial Sequence
  Description of Artificial Sequence: Synthetic oligonucleotide
ugcccguuaagcuuacuug

SEQ ID NO: 1142819 - RNA, 19 nt, Artificial Sequence
  Description of Artificial Sequence: Synthetic oligonucleotide
agugaggacaaugacgucu

SEQ ID NO: 1142820 - RNA, 19 nt, Artificial Sequence
  Description of Artificial Sequence: Synthetic oligonucleotide
uccguguggaugaaggcga

SEQ ID NO: 1142821 - RNA, 19 nt, Artificial Sequence
  Description of Artificial Sequence: Synthetic oligonucleotide
aguggugcucaguucuuac

SEQ ID NO: 1142822 - RNA, 19 nt, Artificial Sequence
  Description of Artificial Sequence: Synthetic oligonucleotide
ugggcaggugaccugugcg

SEQ ID NO: 1142823 - RNA, 19 nt, Artificial Sequence
  Description of Artificial Sequence: Synthetic oligonucleotide
uguguaagagggcgaucgg

SEQ ID NO: 1142824 - RNA, 19 nt, Artificial Sequence
  Description of Artificial Sequence: Synthetic oligonucleotide
uccccguggagucacagca

SEQ ID NO: 1142825 - RNA, 19 nt, Artificial Sequence
  Description of Artificial Sequence: Synthetic oligonucleotide
auacagcuagauuaucugu

SEQ ID NO: 1142826 - RNA, 19 nt, Artificial Sequence
  Description of Artificial Sequence: Synthetic oligonucleotide
acaaugacgucugcagggc

SEQ ID NO: 1142827 - RNA, 19 nt, Artificial Sequence
  Description of Artificial Sequence: Synthetic oligonucleotide
auagacaccagaaucgcca

SEQ ID NO: 1142828 - RNA, 19 nt, Artificial Sequence
  Description of Artificial Sequence: Synthetic oligonucleotide
auuucguacguagucccac

SEQ ID NO: 1142829 - RNA, 19 nt, Artificial Sequence
  Description of Artificial Sequence: Synthetic oligonucleotide
ugcagggcaggauuucggg

SEQ ID NO: 1142830 - RNA, 19 nt, Artificial Sequence
  Description of Artificial Sequence: Synthetic oligonucleotide
ugugcgaaccacugccagg

SEQ ID NO: 1142831 - RNA, 19 nt, Artificial Sequence
  Description of Artificial Sequence: Synthetic oligonucleotide
gacugagggcaauagggug

SEQ ID NO: 1142832 - RNA, 19 nt, Artificial Sequence
  Description of Artificial Sequence: Synthetic oligonucleotide
agagugggcccaugggacc

SEQ ID NO: 1142833 - RNA, 19 nt, Artificial Sequence
  Description of Artificial Sequence: Synthetic oligonucleotide
acaagcuaccagcuagguc

SEQ ID NO: 1142834 - RNA, 19 nt, Artificial Sequence
  Description of Artificial Sequence: Synthetic oligonucleotide
accagaaucgccaaagagu

SEQ ID NO: 1142835 - RNA, 19 nt, Artificial Sequence
  Description of Artificial Sequence: Synthetic oligonucleotide
gaaggcgacggccuuggag

SEQ ID NO: 1142836 - RNA, 19 nt, Artificial Sequence
  Description of Artificial Sequence: Synthetic oligonucleotide
gggacauaaacccaccagc

SEQ ID NO: 1142837 - RNA, 19 nt, Artificial Sequence
  Description of Artificial Sequence: Synthetic oligonucleotide
caugugcuuacucgggucc

SEQ ID NO: 1142838 - RNA, 19 nt, Artificial Sequence
  Description of Artificial Sequence: Synthetic oligonucleotide
ucuuaaccagcgugugccg

SEQ ID NO: 1142839 - RNA, 19 nt, Artificial Sequence
  Description of Artificial Sequence: Synthetic oligonucleotide
gucauagcgcacgaggagg

SEQ ID NO: 1142840 - RNA, 19 nt, Artificial Sequence
  Description of Artificial Sequence: Synthetic oligonucleotide
uuucgggcaccaccgaagc

SEQ ID NO: 1142841 - RNA, 19 nt, Artificial Sequence
  Description of Artificial Sequence: Synthetic oligonucleotide
agauuaucuguccauccau

SEQ ID NO: 1142842 - RNA, 19 nt, Artificial Sequence
  Description of Artificial Sequence: Synthetic oligonucleotide
ugccaugugcuuacucggg

SEQ ID NO: 1142843 - RNA, 19 nt, Artificial Sequence
  Description of Artificial Sequence: Synthetic oligonucleotide
ccagaaucgccaaagagug

SEQ ID NO: 1142844 - RNA, 19 nt, Artificial Sequence
  Description of Artificial Sequence: Synthetic oligonucleotide
ugggacuacagcaacccau

SEQ ID NO: 1142845 - RNA, 19 nt, Artificial Sequence
  Description of Artificial Sequence: Synthetic oligonucleotide
gaguacaagcuguggagac

SEQ ID NO: 1142846 - RNA, 19 nt, Artificial Sequence
  Description of Artificial Sequence: Synthetic oligonucleotide
agugaaaggccauguauua

SEQ ID NO: 1142847 - RNA, 19 nt, Artificial Sequence
  Description of Artificial Sequence: Synthetic oligonucleotide
acacaucagacguggcacg

SEQ ID NO: 1142848 - RNA, 19 nt, Artificial Sequence
  Description of Artificial Sequence: Synthetic oligonucleotide
aaccgaccuucccugaugu

SEQ ID NO: 1142849 - RNA, 19 nt, Artificial Sequence
  Description of Artificial Sequence: Synthetic oligonucleotide
caugggacuacagcaaccc

SEQ ID NO: 1142850 - RNA, 19 nt, Artificial Sequence
  Description of Artificial Sequence: Synthetic oligonucleotide
cugccaugugcuuacucgg

SEQ ID NO: 1142851 - RNA, 19 nt, Artificial Sequence
  Description of Artificial Sequence: Synthetic oligonucleotide
uacacucccugcaaagcac

SEQ ID NO: 1142852 - RNA, 19 nt, Artificial Sequence
  Description of Artificial Sequence: Synthetic oligonucleotide
aguacaagcuguggagacg

SEQ ID NO: 1142853 - RNA, 19 nt, Artificial Sequence
  Description of Artificial Sequence: Synthetic oligonucleotide
caccagaaucgccaaagag

SEQ ID NO: 1142854 - RNA, 19 nt, Artificial Sequence
  Description of Artificial Sequence: Synthetic oligonucleotide
cugugaguagguaagugga

SEQ ID NO: 1142855 - RNA, 19 nt, Artificial Sequence
  Description of Artificial Sequence: Synthetic oligonucleotide
uagcgcacgaggagguacg

SEQ ID NO: 1142856 - RNA, 19 nt, Artificial Sequence
  Description of Artificial Sequence: Synthetic oligonucleotide
auagcgcacgaggagguac

SEQ ID NO: 1142857 - RNA, 19 nt, Artificial Sequence
  Description of Artificial Sequence: Synthetic oligonucleotide
agaugaguggugcucaguu

SEQ ID NO: 1142858 - RNA, 19 nt, Artificial Sequence
  Description of Artificial Sequence: Synthetic oligonucleotide
ucugcagggcaggauuucg

SEQ ID NO: 1142859 - RNA, 19 nt, Artificial Sequence
  Description of Artificial Sequence: Synthetic oligonucleotide
cuuacucgggucccugacg

SEQ ID NO: 1142860 - RNA, 19 nt, Artificial Sequence
  Description of Artificial Sequence: Synthetic oligonucleotide
aggcaagacaggaacacag

SEQ ID NO: 1142861 - RNA, 19 nt, Artificial Sequence
  Description of Artificial Sequence: Synthetic oligonucleotide
uuaaggcuuugaugaaaga

SEQ ID NO: 1142862 - RNA, 19 nt, Artificial Sequence
  Description of Artificial Sequence: Synthetic oligonucleotide
guccguguggaugaaggcg

SEQ ID NO: 1142863 - RNA, 19 nt, Artificial Sequence
  Description of Artificial Sequence: Synthetic oligonucleotide
gcccguuaagcuuacuugg

SEQ ID NO: 1142864 - RNA, 19 nt, Artificial Sequence
  Description of Artificial Sequence: Synthetic oligonucleotide
agcggacgcugccaugugc

SEQ ID NO: 1142865 - RNA, 19 nt, Artificial Sequence
  Description of Artificial Sequence: Synthetic oligonucleotide
uggggcauuguuguuggcc

SEQ ID NO: 1142866 - RNA, 19 nt, Artificial Sequence
  Description of Artificial Sequence: Synthetic oligonucleotide
guugauguguccacaccag

SEQ ID NO: 1142867 - RNA, 19 nt, Artificial Sequence
  Description of Artificial Sequence: Synthetic oligonucleotide
guguaagagggcgaucggg

SEQ ID NO: 1142868 - RNA, 19 nt, Artificial Sequence
  Description of Artificial Sequence: Synthetic oligonucleotide
agcuagauuaucuguccau

SEQ ID NO: 1142869 - RNA, 19 nt, Artificial Sequence
  Description of Artificial Sequence: Synthetic oligonucleotide
ugucuuugcgcuccuggau

SEQ ID NO: 1142870 - RNA, 19 nt, Artificial Sequence
  Description of Artificial Sequence: Synthetic oligonucleotide
uuaacacauuggccuguug

SEQ ID NO: 1142871 - RNA, 19 nt, Artificial Sequence
  Description of Artificial Sequence: Synthetic oligonucleotide
agcauaaagcagaaguuaa

SEQ ID NO: 1142872 - RNA, 19 nt, Artificial Sequence
  Description of Artificial Sequence: Synthetic oligonucleotide
ggacaaugacgucugcagg

SEQ ID NO: 1142873 - RNA, 19 nt, Artificial Sequence
  Description of Artificial Sequence: Synthetic oligonucleotide
guuacacucccugcaaagc

SEQ ID NO: 1142874 - RNA, 19 nt, Artificial Sequence
  Description of Artificial Sequence: Synthetic oligonucleotide
acguagucccacccacgcc

SEQ ID NO: 1142875 - RNA, 19 nt, Artificial Sequence
  Description of Artificial Sequence: Synthetic oligonucleotide
gaugaguggugcucaguuc

SEQ ID NO: 1142876 - RNA, 19 nt, Artificial Sequence
  Description of Artificial Sequence: Synthetic oligonucleotide
uguggagacgggacuuucu

SEQ ID NO: 1142877 - RNA, 19 nt, Artificial Sequence
  Description of Artificial Sequence: Synthetic oligonucleotide
acaggccuugccaagcaac

SEQ ID NO: 1142878 - RNA, 19 nt, Artificial Sequence
  Description of Artificial Sequence: Synthetic oligonucleotide
gagacgggacuuucuuucc

SEQ ID NO: 1142879 - RNA, 19 nt, Artificial Sequence
  Description of Artificial Sequence: Synthetic oligonucleotide
augaugguccgagacaggu

SEQ ID NO: 1142880 - RNA, 19 nt, Artificial Sequence
  Description of Artificial Sequence: Synthetic oligonucleotide
caaugcaagcggacgcugc

SEQ ID NO: 1142881 - RNA, 19 nt, Artificial Sequence
  Description of Artificial Sequence: Synthetic oligonucleotide
ggauagagugggcccaugg

SEQ ID NO: 1142882 - RNA, 19 nt, Artificial Sequence
  Description of Artificial Sequence: Synthetic oligonucleotide
guagguaaguggauggaca

SEQ ID NO: 1142883 - RNA, 19 nt, Artificial Sequence
  Description of Artificial Sequence: Synthetic oligonucleotide
uuugcgcuccuggauagga

SEQ ID NO: 1142884 - RNA, 19 nt, Artificial Sequence
  Description of Artificial Sequence: Synthetic oligonucleotide
uuggguagccuccucucuc

SEQ ID NO: 1142885 - RNA, 19 nt, Artificial Sequence
  Description of Artificial Sequence: Synthetic oligonucleotide
aucgccaaagagugaguca

SEQ ID NO: 1142886 - RNA, 19 nt, Artificial Sequence
  Description of Artificial Sequence: Synthetic oligonucleotide
cuuaaccagcgugugccgg

SEQ ID NO: 1142887 - RNA, 19 nt, Artificial Sequence
  Description of Artificial Sequence: Synthetic oligonucleotide
gaaccgaccuucccugaug

SEQ ID NO: 1142888 - RNA, 19 nt, Artificial Sequence
  Description of Artificial Sequence: Synthetic oligonucleotide
auuucgggcaccaccgaag

SEQ ID NO: 1142889 - RNA, 19 nt, Artificial Sequence
  Description of Artificial Sequence: Synthetic oligonucleotide
aacaagcuaccagcuaggu

SEQ ID NO: 1142890 - RNA, 19 nt, Artificial Sequence
  Description of Artificial Sequence: Synthetic oligonucleotide
ggacauaaacccaccagcc

SEQ ID NO: 1142891 - RNA, 19 nt, Artificial Sequence
  Description of Artificial Sequence: Synthetic oligonucleotide
cucccacaagagcauaaag

SEQ ID NO: 1142892 - RNA, 19 nt, Artificial Sequence
  Description of Artificial Sequence: Synthetic oligonucleotide
cuaacacaucagacguggc

SEQ ID NO: 1142893 - RNA, 19 nt, Artificial Sequence
  Description of Artificial Sequence: Synthetic oligonucleotide
agggugaucccucugcaua

SEQ ID NO: 1142894 - RNA, 19 nt, Artificial Sequence
  Description of Artificial Sequence: Synthetic oligonucleotide
gguagugaacaaauagaug

SEQ ID NO: 1142895 - RNA, 19 nt, Artificial Sequence
  Description of Artificial Sequence: Synthetic oligonucleotide
augugcuuacucggguccc

SEQ ID NO: 1142896 - RNA, 19 nt, Artificial Sequence
  Description of Artificial Sequence: Synthetic oligonucleotide
ggagacgggacuuucuuuc

SEQ ID NO: 1142897 - RNA, 19 nt, Artificial Sequence
  Description of Artificial Sequence: Synthetic oligonucleotide
agagcauaaagcagaaguu

SEQ ID NO: 1142898 - RNA, 19 nt, Artificial Sequence
  Description of Artificial Sequence: Synthetic oligonucleotide
uccaucugccugugaguag

SEQ ID NO: 1142899 - RNA, 19 nt, Artificial Sequence
  Description of Artificial Sequence: Synthetic oligonucleotide
auagagcucgacagugagg

SEQ ID NO: 1142900 - RNA, 19 nt, Artificial Sequence
  Description of Artificial Sequence: Synthetic oligonucleotide
ggagaaccgaccuucccug

SEQ ID NO: 1142901 - RNA, 19 nt, Artificial Sequence
  Description of Artificial Sequence: Synthetic oligonucleotide
aggcgacggccuuggagcc

SEQ ID NO: 1142902 - RNA, 19 nt, Artificial Sequence
  Description of Artificial Sequence: Synthetic oligonucleotide
acggggaccuucuguuaac

SEQ ID NO: 1142903 - RNA, 19 nt, Artificial Sequence
  Description of Artificial Sequence: Synthetic oligonucleotide
gagcucgacagugaggaca

SEQ ID NO: 1142904 - RNA, 19 nt, Artificial Sequence
  Description of Artificial Sequence: Synthetic oligonucleotide
gugagucagucugggagcg

SEQ ID NO: 1142905 - RNA, 19 nt, Artificial Sequence
  Description of Artificial Sequence: Synthetic oligonucleotide
uugcgcuccuggauaggag

SEQ ID NO: 1142906 - RNA, 19 nt, Artificial Sequence
  Description of Artificial Sequence: Synthetic oligonucleotide
aacccagagcaggccaggg

SEQ ID NO: 1142907 - RNA, 19 nt, Artificial Sequence
  Description of Artificial Sequence: Synthetic oligonucleotide
caugaugguccgagacagg

SEQ ID NO: 1142908 - RNA, 19 nt, Artificial Sequence
  Description of Artificial Sequence: Synthetic oligonucleotide
agguacggguucccguagg

SEQ ID NO: 1142909 - RNA, 19 nt, Artificial Sequence
  Description of Artificial Sequence: Synthetic oligonucleotide
caccaccgaagccaggccc

SEQ ID NO: 1142910 - RNA, 19 nt, Artificial Sequence
  Description of Artificial Sequence: Synthetic oligonucleotide
uguccguggugcccgacuc

SEQ ID NO: 1142911 - RNA, 19 nt, Artificial Sequence
  Description of Artificial Sequence: Synthetic oligonucleotide
gccauagcgcagcacagag

SEQ ID NO: 1142912 - RNA, 19 nt, Artificial Sequence
  Description of Artificial Sequence: Synthetic oligonucleotide
uggggcagagaaguugaug

SEQ ID NO: 1142913 - RNA, 19 nt, Artificial Sequence
  Description of Artificial Sequence: Synthetic oligonucleotide
cacaucagacguggcacgg

SEQ ID NO: 1142914 - RNA, 19 nt, Artificial Sequence
  Description of Artificial Sequence: Synthetic oligonucleotide
cccugauacagcuagauua

SEQ ID NO: 1142915 - RNA, 19 nt, Artificial Sequence
  Description of Artificial Sequence: Synthetic oligonucleotide
gagguacggguucccguag

SEQ ID NO: 1142916 - RNA, 19 nt, Artificial Sequence
  Description of Artificial Sequence: Synthetic oligonucleotide
agagcucgacagugaggac

SEQ ID NO: 1142917 - RNA, 19 nt, Artificial Sequence
  Description of Artificial Sequence: Synthetic oligonucleotide
gcugggaccccugauacag

SEQ ID NO: 1142918 - RNA, 19 nt, Artificial Sequence
  Description of Artificial Sequence: Synthetic oligonucleotide
gauuucgggcaccaccgaa

SEQ ID NO: 1142919 - RNA, 19 nt, Artificial Sequence
  Description of Artificial Sequence: Synthetic oligonucleotide
caugcccggggacugcccg

SEQ ID NO: 1142920 - RNA, 19 nt, Artificial Sequence
  Description of Artificial Sequence: Synthetic oligonucleotide
ugcaagcggacgcugccau

SEQ ID NO: 1142921 - RNA, 19 nt, Artificial Sequence
  Description of Artificial Sequence: Synthetic oligonucleotide
agacgggacuuucuuuccu

SEQ ID NO: 1142922 - RNA, 19 nt, Artificial Sequence
  Description of Artificial Sequence: Synthetic oligonucleotide
aggagguacggguucccgu

SEQ ID NO: 1142923 - RNA, 19 nt, Artificial Sequence
  Description of Artificial Sequence: Synthetic oligonucleotide
cucucucuggggcagagaa

SEQ ID NO: 1142924 - RNA, 19 nt, Artificial Sequence
  Description of Artificial Sequence: Synthetic oligonucleotide
acucccugcaaagcacagg

SEQ ID NO: 1142925 - RNA, 19 nt, Artificial Sequence
  Description of Artificial Sequence: Synthetic oligonucleotide
gcacuaacacaucagacgu

SEQ ID NO: 1142926 - RNA, 19 nt, Artificial Sequence
  Description of Artificial Sequence: Synthetic oligonucleotide
guacguagucccacccacg

SEQ ID NO: 1142927 - RNA, 19 nt, Artificial Sequence
  Description of Artificial Sequence: Synthetic oligonucleotide
ccuuggauccaucugccug

SEQ ID NO: 1142928 - RNA, 19 nt, Artificial Sequence
  Description of Artificial Sequence: Synthetic oligonucleotide
acgggacuuucuuuccugu

SEQ ID NO: 1142929 - RNA, 19 nt, Artificial Sequence
  Description of Artificial Sequence: Synthetic oligonucleotide
caggguuacacucccugca

SEQ ID NO: 1142930 - RNA, 19 nt, Artificial Sequence
  Description of Artificial Sequence: Synthetic oligonucleotide
ggcaauagggugcagggcu

SEQ ID NO: 1142931 - RNA, 19 nt, Artificial Sequence
  Description of Artificial Sequence: Synthetic oligonucleotide
ccguuaagcuuacuugggg

SEQ ID NO: 1142932 - RNA, 19 nt, Artificial Sequence
  Description of Artificial Sequence: Synthetic oligonucleotide
gagucagucugggagcgca

SEQ ID NO: 1142933 - RNA, 19 nt, Artificial Sequence
  Description of Artificial Sequence: Synthetic oligonucleotide
ugggugugucauagacacc

SEQ ID NO: 1142934 - RNA, 19 nt, Artificial Sequence
  Description of Artificial Sequence: Synthetic oligonucleotide
agaaccgaccuucccugau

SEQ ID NO: 1142935 - RNA, 19 nt, Artificial Sequence
  Description of Artificial Sequence: Synthetic oligonucleotide
ugaugguccgagacagguu

SEQ ID NO: 1142936 - RNA, 19 nt, Artificial Sequence
  Description of Artificial Sequence: Synthetic oligonucleotide
gauuucguacguaguccca

SEQ ID NO: 1142937 - RNA, 19 nt, Artificial Sequence
  Description of Artificial Sequence: Synthetic oligonucleotide
gcgaaccacugccaggccg

SEQ ID NO: 1142938 - RNA, 19 nt, Artificial Sequence
  Description of Artificial Sequence: Synthetic oligonucleotide
cccguuaagcuuacuuggg

SEQ ID NO: 1142939 - RNA, 19 nt, Artificial Sequence
  Description of Artificial Sequence: Synthetic oligonucleotide
caggccggguuccuggggc

SEQ ID NO: 1142940 - RNA, 19 nt, Artificial Sequence
  Description of Artificial Sequence: Synthetic oligonucleotide
gaugugcuuuccagcagca

SEQ ID NO: 1142941 - RNA, 19 nt, Artificial Sequence
  Description of Artificial Sequence: Synthetic oligonucleotide
gaguagguaaguggaugga

SEQ ID NO: 1142942 - RNA, 19 nt, Artificial Sequence
  Description of Artificial Sequence: Synthetic oligonucleotide
uuggccuguugcaggcugu

SEQ ID NO: 1142943 - RNA, 19 nt, Artificial Sequence
  Description of Artificial Sequence: Synthetic oligonucleotide
gacguggcacggcagcaca

SEQ ID NO: 1142944 - RNA, 19 nt, Artificial Sequence
  Description of Artificial Sequence: Synthetic oligonucleotide
caucagacguggcacggca

SEQ ID NO: 1142945 - RNA, 19 nt, Artificial Sequence
  Description of Artificial Sequence: Synthetic oligonucleotide
augggacuacagcaaccca

SEQ ID NO: 1142946 - RNA, 19 nt, Artificial Sequence
  Description of Artificial Sequence: Synthetic oligonucleotide
gucuuugcgcuccuggaua

SEQ ID NO: 1142947 - RNA, 19 nt, Artificial Sequence
  Description of Artificial Sequence: Synthetic oligonucleotide
cuaccagcuaggucaguga

SEQ ID NO: 1142948 - RNA, 19 nt, Artificial Sequence
  Description of Artificial Sequence: Synthetic oligonucleotide
aggucagugaaaggccaug

SEQ ID NO: 1142949 - RNA, 19 nt, Artificial Sequence
  Description of Artificial Sequence: Synthetic oligonucleotide
uggagacgggacuuucuuu

SEQ ID NO: 1142950 - RNA, 19 nt, Artificial Sequence
  Description of Artificial Sequence: Synthetic oligonucleotide
cagccgagcacuaacacau

SEQ ID NO: 1142951 - RNA, 19 nt, Artificial Sequence
  Description of Artificial Sequence: Synthetic oligonucleotide
cacucccugcaaagcacag

SEQ ID NO: 1142952 - RNA, 19 nt, Artificial Sequence
  Description of Artificial Sequence: Synthetic oligonucleotide
aagcggacgcugccaugug

SEQ ID NO: 1142953 - RNA, 19 nt, Artificial Sequence
  Description of Artificial Sequence: Synthetic oligonucleotide
cacgaggagguacggguuc

SEQ ID NO: 1142954 - RNA, 19 nt, Artificial Sequence
  Description of Artificial Sequence: Synthetic oligonucleotide
agguugucauagcgcacga

SEQ ID NO: 1142955 - RNA, 19 nt, Artificial Sequence
  Description of Artificial Sequence: Synthetic oligonucleotide
acggccuuggagccugugu

SEQ ID NO: 1142956 - RNA, 19 nt, Artificial Sequence
  Description of Artificial Sequence: Synthetic oligonucleotide
cauagucagugaggguggc

SEQ ID NO: 1142957 - RNA, 19 nt, Artificial Sequence
  Description of Artificial Sequence: Synthetic oligonucleotide
auguccguggugcccgacu

SEQ ID NO: 1142958 - RNA, 19 nt, Artificial Sequence
  Description of Artificial Sequence: Synthetic oligonucleotide
uaaccagcgugugccgggc

SEQ ID NO: 1142959 - RNA, 19 nt, Artificial Sequence
  Description of Artificial Sequence: Synthetic oligonucleotide
gcccgacucauagagcucg

SEQ ID NO: 1142960 - RNA, 19 nt, Artificial Sequence
  Description of Artificial Sequence: Synthetic oligonucleotide
ugcgaaccacugccaggcc

SEQ ID NO: 1142961 - RNA, 19 nt, Artificial Sequence
  Description of Artificial Sequence: Synthetic oligonucleotide
cgagauuucguacguaguc

SEQ ID NO: 1142962 - RNA, 19 nt, Artificial Sequence
  Description of Artificial Sequence: Synthetic oligonucleotide
cggaguacaagcuguggag

SEQ ID NO: 1142963 - RNA, 19 nt, Artificial Sequence
  Description of Artificial Sequence: Synthetic oligonucleotide
ugugcuuacucgggucccu

SEQ ID NO: 1142964 - RNA, 19 nt, Artificial Sequence
  Description of Artificial Sequence: Synthetic oligonucleotide
ggacuacagcaacccaucc

SEQ ID NO: 1142965 - RNA, 19 nt, Artificial Sequence
  Description of Artificial Sequence: Synthetic oligonucleotide
guagucccacccacgccgg

SEQ ID NO: 1142966 - RNA, 19 nt, Artificial Sequence
  Description of Artificial Sequence: Synthetic oligonucleotide
gagcaugggacuacagcaa

SEQ ID NO: 1142967 - RNA, 19 nt, Artificial Sequence
  Description of Artificial Sequence: Synthetic oligonucleotide
gaccguuggggacuggccu

SEQ ID NO: 1142968 - RNA, 19 nt, Artificial Sequence
  Description of Artificial Sequence: Synthetic oligonucleotide
gguccguguggaugaaggc

SEQ ID NO: 1142969 - RNA, 19 nt, Artificial Sequence
  Description of Artificial Sequence: Synthetic oligonucleotide
uacucgggucccugacgcc

SEQ ID NO: 1142970 - RNA, 19 nt, Artificial Sequence
  Description of Artificial Sequence: Synthetic oligonucleotide
ccgaccuucccugaugugc

SEQ ID NO: 1142971 - RNA, 19 nt, Artificial Sequence
  Description of Artificial Sequence: Synthetic oligonucleotide
cagucugggagcgcagcag

SEQ ID NO: 1142972 - RNA, 19 nt, Artificial Sequence
  Description of Artificial Sequence: Synthetic oligonucleotide
ccaggccccacccaguccc

SEQ ID NO: 1142973 - RNA, 19 nt, Artificial Sequence
  Description of Artificial Sequence: Synthetic oligonucleotide
cguggugcccgacucauag

SEQ ID NO: 1142974 - RNA, 19 nt, Artificial Sequence
  Description of Artificial Sequence: Synthetic oligonucleotide
cugggaccccugauacagc

SEQ ID NO: 1142975 - RNA, 19 nt, Artificial Sequence
  Description of Artificial Sequence: Synthetic oligonucleotide
cuuugcgcuccuggauagg

SEQ ID NO: 1142976 - RNA, 19 nt, Artificial Sequence
  Description of Artificial Sequence: Synthetic oligonucleotide
ggaguacaagcuguggaga

SEQ ID NO: 1142977 - RNA, 19 nt, Artificial Sequence
  Description of Artificial Sequence: Synthetic oligonucleotide
gccggacaccuucuuaacc

SEQ ID NO: 1142978 - RNA, 19 nt, Artificial Sequence
  Description of Artificial Sequence: Synthetic oligonucleotide
ccggacaccuucuuaacca

SEQ ID NO: 1142979 - RNA, 19 nt, Artificial Sequence
  Description of Artificial Sequence: Synthetic oligonucleotide
cucgggucccugacgccag

SEQ ID NO: 1142980 - RNA, 19 nt, Artificial Sequence
  Description of Artificial Sequence: Synthetic oligonucleotide
gucagugaaaggccaugua

SEQ ID NO: 1142981 - RNA, 19 nt, Artificial Sequence
  Description of Artificial Sequence: Synthetic oligonucleotide
acacucccugcaaagcaca

SEQ ID NO: 1142982 - RNA, 19 nt, Artificial Sequence
  Description of Artificial Sequence: Synthetic oligonucleotide
ugcccgacucauagagcuc

SEQ ID NO: 1142983 - RNA, 19 nt, Artificial Sequence
  Description of Artificial Sequence: Synthetic oligonucleotide
aggccggaguacaagcugu

SEQ ID NO: 1142984 - RNA, 19 nt, Artificial Sequence
  Description of Artificial Sequence: Synthetic oligonucleotide
aucagacguggcacggcag

SEQ ID NO: 1142985 - RNA, 19 nt, Artificial Sequence
  Description of Artificial Sequence: Synthetic oligonucleotide
uccguggugcccgacucau

SEQ ID NO: 1142986 - RNA, 19 nt, Artificial Sequence
  Description of Artificial Sequence: Synthetic oligonucleotide
ugagucagucugggagcgc

SEQ ID NO: 1142987 - RNA, 19 nt, Artificial Sequence
  Description of Artificial Sequence: Synthetic oligonucleotide
cuacagcaacccauccaga

SEQ ID NO: 1142988 - RNA, 19 nt, Artificial Sequence
  Description of Artificial Sequence: Synthetic oligonucleotide
accguuggggacuggccuu

SEQ ID NO: 1142989 - RNA, 19 nt, Artificial Sequence
  Description of Artificial Sequence: Synthetic oligonucleotide
cccagacgggccaugcccg

SEQ ID NO: 1142990 - RNA, 19 nt, Artificial Sequence
  Description of Artificial Sequence: Synthetic oligonucleotide
ccaggcaagacaggaacac

SEQ ID NO: 1142991 - RNA, 19 nt, Artificial Sequence
  Description of Artificial Sequence: Synthetic oligonucleotide
gcagccgagcacuaacaca

SEQ ID NO: 1142992 - RNA, 19 nt, Artificial Sequence
  Description of Artificial Sequence: Synthetic oligonucleotide
agccauagcgcagcacaga

SEQ ID NO: 1142993 - RNA, 19 nt, Artificial Sequence
  Description of Artificial Sequence: Synthetic oligonucleotide
ucagugaggguggccgguc

SEQ ID NO: 1142994 - RNA, 19 nt, Artificial Sequence
  Description of Artificial Sequence: Synthetic oligonucleotide
ccuguugcaggcuguagga

SEQ ID NO: 1142995 - RNA, 19 nt, Artificial Sequence
  Description of Artificial Sequence: Synthetic oligonucleotide
agcgcacgaggagguacgg

SEQ ID NO: 1142996 - RNA, 19 nt, Artificial Sequence
  Description of Artificial Sequence: Synthetic oligonucleotide
ggcagccgagcacuaacac

SEQ ID NO: 1142997 - RNA, 19 nt, Artificial Sequence
  Description of Artificial Sequence: Synthetic oligonucleotide
caaugacgucugcagggca

SEQ ID NO: 1142998 - RNA, 19 nt, Artificial Sequence
  Description of Artificial Sequence: Synthetic oligonucleotide
agccacgaggucaucccug

SEQ ID NO: 1142999 - RNA, 19 nt, Artificial Sequence
  Description of Artificial Sequence: Synthetic oligonucleotide
gggacuacagcaacccauc

SEQ ID NO: 1143000 - RNA, 19 nt, Artificial Sequence
  Description of Artificial Sequence: Synthetic oligonucleotide
cagaaucgccaaagaguga

SEQ ID NO: 1143001 - RNA, 19 nt, Artificial Sequence
  Description of Artificial Sequence: Synthetic oligonucleotide
cguacguagucccacccac

SEQ ID NO: 1143002 - RNA, 19 nt, Artificial Sequence
  Description of Artificial Sequence: Synthetic oligonucleotide
ccccagacgggccaugccc

SEQ ID NO: 1143003 - RNA, 19 nt, Artificial Sequence
  Description of Artificial Sequence: Synthetic oligonucleotide
accgaccuucccugaugug

SEQ ID NO: 1143004 - RNA, 19 nt, Artificial Sequence
  Description of Artificial Sequence: Synthetic oligonucleotide
ugguccgagacagguuguc

SEQ ID NO: 1143005 - RNA, 19 nt, Artificial Sequence
  Description of Artificial Sequence: Synthetic oligonucleotide
cacggggaccuucuguuaa

SEQ ID NO: 1143006 - RNA, 19 nt, Artificial Sequence
  Description of Artificial Sequence: Synthetic oligonucleotide
gggagaaccgaccuucccu

SEQ ID NO: 1143007 - RNA, 19 nt, Artificial Sequence
  Description of Artificial Sequence: Synthetic oligonucleotide
gccauguauuaggagcagc

SEQ ID NO: 1143008 - RNA, 19 nt, Artificial Sequence
  Description of Artificial Sequence: Synthetic oligonucleotide
ccauagcgcagcacagagc

SEQ ID NO: 1143009 - RNA, 19 nt, Artificial Sequence
  Description of Artificial Sequence: Synthetic oligonucleotide
ggggaccuucuguuaacac

SEQ ID NO: 1143010 - RNA, 19 nt, Artificial Sequence
  Description of Artificial Sequence: Synthetic oligonucleotide
ugggcccaugggaccguug

SEQ ID NO: 1143011 - RNA, 19 nt, Artificial Sequence
  Description of Artificial Sequence: Synthetic oligonucleotide
ggcccugaugggcagguga

SEQ ID NO: 1143012 - RNA, 19 nt, Artificial Sequence
  Description of Artificial Sequence: Synthetic oligonucleotide
ccauguauuaggagcagcu

SEQ ID NO: 1143013 - RNA, 19 nt, Artificial Sequence
  Description of Artificial Sequence: Synthetic oligonucleotide
ggagguacggguucccgua

SEQ ID NO: 1143014 - RNA, 19 nt, Artificial Sequence
  Description of Artificial Sequence: Synthetic oligonucleotide
aggugaccugugcgaacca

SEQ ID NO: 1143015 - RNA, 19 nt, Artificial Sequence
  Description of Artificial Sequence: Synthetic oligonucleotide
ccuggagccauagcgcagc

SEQ ID NO: 1143016 - RNA, 19 nt, Artificial Sequence
  Description of Artificial Sequence: Synthetic oligonucleotide
gcaugggacuacagcaacc

SEQ ID NO: 1143017 - RNA, 19 nt, Artificial Sequence
  Description of Artificial Sequence: Synthetic oligonucleotide
augcaagcggacgcugcca

SEQ ID NO: 1143018 - RNA, 19 nt, Artificial Sequence
  Description of Artificial Sequence: Synthetic oligonucleotide
cagugaggacaaugacguc

SEQ ID NO: 1143019 - RNA, 19 nt, Artificial Sequence
  Description of Artificial Sequence: Synthetic oligonucleotide
agcgugugccgggcagggc

SEQ ID NO: 1143020 - RNA, 19 nt, Artificial Sequence
  Description of Artificial Sequence: Synthetic oligonucleotide
gcuuggguagccuccucuc

SEQ ID NO: 1143021 - RNA, 19 nt, Artificial Sequence
  Description of Artificial Sequence: Synthetic oligonucleotide
cagcgugugccgggcaggg

SEQ ID NO: 1143022 - RNA, 19 nt, Artificial Sequence
  Description of Artificial Sequence: Synthetic oligonucleotide
aggccaugaugguccgaga

SEQ ID NO: 1143023 - RNA, 19 nt, Artificial Sequence
  Description of Artificial Sequence: Synthetic oligonucleotide
ccuucuuaaccagcgugug

SEQ ID NO: 1143024 - RNA, 19 nt, Artificial Sequence
  Description of Artificial Sequence: Synthetic oligonucleotide
gcaauagggugcagggcug

SEQ ID NO: 1143025 - RNA, 19 nt, Artificial Sequence
  Description of Artificial Sequence: Synthetic oligonucleotide
cuguggagacgggacuuuc

SEQ ID NO: 1143026 - RNA, 19 nt, Artificial Sequence
  Description of Artificial Sequence: Synthetic oligonucleotide
cugguccccguggagucac

SEQ ID NO: 1143027 - RNA, 19 nt, Artificial Sequence
  Description of Artificial Sequence: Synthetic oligonucleotide
gggcaggugaccugugcga

SEQ ID NO: 1143028 - RNA, 19 nt, Artificial Sequence
  Description of Artificial Sequence: Synthetic oligonucleotide
agauguccguggugcccga

SEQ ID NO: 1143029 - RNA, 19 nt, Artificial Sequence
  Description of Artificial Sequence: Synthetic oligonucleotide
aggauagagugggcccaug

SEQ ID NO: 1143030 - RNA, 19 nt, Artificial Sequence
  Description of Artificial Sequence: Synthetic oligonucleotide
gguccgggagguccgugug

SEQ ID NO: 1143031 - RNA, 19 nt, Artificial Sequence
  Description of Artificial Sequence: Synthetic oligonucleotide
gccggaguacaagcugugg

SEQ ID NO: 1143032 - RNA, 19 nt, Artificial Sequence
  Description of Artificial Sequence: Synthetic oligonucleotide
cgagcacuaacacaucaga

SEQ ID NO: 1143033 - RNA, 19 nt, Artificial Sequence
  Description of Artificial Sequence: Synthetic oligonucleotide
agccgagcacuaacacauc

SEQ ID NO: 1143034 - RNA, 19 nt, Artificial Sequence
  Description of Artificial Sequence: Synthetic oligonucleotide
gugcuuacucgggucccug

SEQ ID NO: 1143035 - RNA, 19 nt, Artificial Sequence
  Description of Artificial Sequence: Synthetic oligonucleotide
gcgaucggggagugccugg

SEQ ID NO: 1143036 - RNA, 19 nt, Artificial Sequence
  Description of Artificial Sequence: Synthetic oligonucleotide
ggaaggccugagagggagg

SEQ ID NO: 1143037 - RNA, 19 nt, Artificial Sequence
  Description of Artificial Sequence: Synthetic oligonucleotide
cuuggguagccuccucucu

SEQ ID NO: 1143038 - RNA, 19 nt, Artificial Sequence
  Description of Artificial Sequence: Synthetic oligonucleotide
cacggcagcacagcauaca

SEQ ID NO: 1143039 - RNA, 19 nt, Artificial Sequence
  Description of Artificial Sequence: Synthetic oligonucleotide
caagcggacgcugccaugu

SEQ ID NO: 1143040 - RNA, 19 nt, Artificial Sequence
  Description of Artificial Sequence: Synthetic oligonucleotide
ggccauguauuaggagcag

SEQ ID NO: 1143041 - RNA, 19 nt, Artificial Sequence
  Description of Artificial Sequence: Synthetic oligonucleotide
gggaccguuggggacuggc

SEQ ID NO: 1143042 - RNA, 19 nt, Artificial Sequence
  Description of Artificial Sequence: Synthetic oligonucleotide
guggagacgggacuuucuu

SEQ ID NO: 1143043 - RNA, 19 nt, Artificial Sequence
  Description of Artificial Sequence: Synthetic oligonucleotide
ggugaccugugcgaaccac

SEQ ID NO: 1143044 - RNA, 19 nt, Artificial Sequence
  Description of Artificial Sequence: Synthetic oligonucleotide
ggaccguuggggacuggcc

SEQ ID NO: 1143045 - RNA, 19 nt, Artificial Sequence
  Description of Artificial Sequence: Synthetic oligonucleotide
gaguggugcucaguucuua

SEQ ID NO: 1143046 - RNA, 19 nt, Artificial Sequence
  Description of Artificial Sequence: Synthetic oligonucleotide
ggugcccgacucauagagc

SEQ ID NO: 1143047 - RNA, 19 nt, Artificial Sequence
  Description of Artificial Sequence: Synthetic oligonucleotide
ccugauacagcuagauuau

SEQ ID NO: 1143048 - RNA, 19 nt, Artificial Sequence
  Description of Artificial Sequence: Synthetic oligonucleotide
caugggaccguuggggacu

SEQ ID NO: 1143049 - RNA, 19 nt, Artificial Sequence
  Description of Artificial Sequence: Synthetic oligonucleotide
gggcaauagggugcagggc

SEQ ID NO: 1143050 - RNA, 19 nt, Artificial Sequence
  Description of Artificial Sequence: Synthetic oligonucleotide
augggaccguuggggacug

SEQ ID NO: 1143051 - RNA, 19 nt, Artificial Sequence
  Description of Artificial Sequence: Synthetic oligonucleotide
acguggcacggcagcacag

SEQ ID NO: 1143052 - RNA, 19 nt, Artificial Sequence
  Description of Artificial Sequence: Synthetic oligonucleotide
agagggcgaucggggagug

SEQ ID NO: 1143053 - RNA, 19 nt, Artificial Sequence
  Description of Artificial Sequence: Synthetic oligonucleotide
ggguuacacucccugcaaa

SEQ ID NO: 1143054 - RNA, 19 nt, Artificial Sequence
  Description of Artificial Sequence: Synthetic oligonucleotide
gauguccguggugcccgac

SEQ ID NO: 1143055 - RNA, 19 nt, Artificial Sequence
  Description of Artificial Sequence: Synthetic oligonucleotide
auagcgcagcacagagcca

SEQ ID NO: 1143056 - RNA, 19 nt, Artificial Sequence
  Description of Artificial Sequence: Synthetic oligonucleotide
augcccggggacugcccgu

SEQ ID NO: 1143057 - RNA, 19 nt, Artificial Sequence
  Description of Artificial Sequence: Synthetic oligonucleotide
ggggacugcccguuaagcu

SEQ ID NO: 1143058 - RNA, 19 nt, Artificial Sequence
  Description of Artificial Sequence: Synthetic oligonucleotide
gacgggccaugcccgggga

SEQ ID NO: 1143059 - RNA, 19 nt, Artificial Sequence
  Description of Artificial Sequence: Synthetic oligonucleotide
gugaccugugcgaaccacu

SEQ ID NO: 1143060 - RNA, 19 nt, Artificial Sequence
  Description of Artificial Sequence: Synthetic oligonucleotide
guccguggugcccgacuca

SEQ ID NO: 1143061 - RNA, 19 nt, Artificial Sequence
  Description of Artificial Sequence: Synthetic oligonucleotide
cagagccacggggaccuuc

SEQ ID NO: 1143062 - RNA, 19 nt, Artificial Sequence
  Description of Artificial Sequence: Synthetic oligonucleotide
gacugcccguuaagcuuac

SEQ ID NO: 1143063 - RNA, 19 nt, Artificial Sequence
  Description of Artificial Sequence: Synthetic oligonucleotide
cugcccguuaagcuuacuu

SEQ ID NO: 1143064 - RNA, 19 nt, Artificial Sequence
  Description of Artificial Sequence: Synthetic oligonucleotide
ugguccccguggagucaca

SEQ ID NO: 1143065 - RNA, 19 nt, Artificial Sequence
  Description of Artificial Sequence: Synthetic oligonucleotide
gacggccuuggagccugug

SEQ ID NO: 1143066 - RNA, 19 nt, Artificial Sequence
  Description of Artificial Sequence: Synthetic oligonucleotide
gcaagcggacgcugccaug

SEQ ID NO: 1143067 - RNA, 19 nt, Artificial Sequence
  Description of Artificial Sequence: Synthetic oligonucleotide
gaccccugauacagcuaga

SEQ ID NO: 1143068 - RNA, 19 nt, Artificial Sequence
  Description of Artificial Sequence: Synthetic oligonucleotide
ggcgaucggggagugccug

SEQ ID NO: 1143069 - RNA, 19 nt, Artificial Sequence
  Description of Artificial Sequence: Synthetic oligonucleotide
ccuuggagccuguguaaga

SEQ ID NO: 1143070 - RNA, 19 nt, Artificial Sequence
  Description of Artificial Sequence: Synthetic oligonucleotide
ggucagugaaaggccaugu

SEQ ID NO: 1143071 - RNA, 19 nt, Artificial Sequence
  Description of Artificial Sequence: Synthetic oligonucleotide
gcgcagcagccguucacgc

SEQ ID NO: 1143072 - RNA, 19 nt, Artificial Sequence
  Description of Artificial Sequence: Synthetic oligonucleotide
cccuggagccauagcgcag

SEQ ID NO: 1143073 - RNA, 19 nt, Artificial Sequence
  Description of Artificial Sequence: Synthetic oligonucleotide
gagggcgaucggggagugc

SEQ ID NO: 1143074 - RNA, 19 nt, Artificial Sequence
  Description of Artificial Sequence: Synthetic oligonucleotide
ccccguggagucacagcag

SEQ ID NO: 1143075 - RNA, 19 nt, Artificial Sequence
  Description of Artificial Sequence: Synthetic oligonucleotide
gcgacggccuuggagccug

SEQ ID NO: 1143076 - RNA, 19 nt, Artificial Sequence
  Description of Artificial Sequence: Synthetic oligonucleotide
gccaugugcuuacucgggu

SEQ ID NO: 1143077 - RNA, 19 nt, Artificial Sequence
  Description of Artificial Sequence: Synthetic oligonucleotide
gcgcacgaggagguacggg

SEQ ID NO: 1143078 - RNA, 19 nt, Artificial Sequence
  Description of Artificial Sequence: Synthetic oligonucleotide
gcgugugccgggcagggcu

SEQ ID NO: 1143079 - RNA, 19 nt, Artificial Sequence
  Description of Artificial Sequence: Synthetic oligonucleotide
ugggaccguuggggacugg

SEQ ID NO: 1143080 - RNA, 19 nt, Artificial Sequence
  Description of Artificial Sequence: Synthetic oligonucleotide
ccggggacugcccguuaag

SEQ ID NO: 1143081 - RNA, 19 nt, Artificial Sequence
  Description of Artificial Sequence: Synthetic oligonucleotide
gucagugaggguggccggu

SEQ ID NO: 1143082 - RNA, 19 nt, Artificial Sequence
  Description of Artificial Sequence: Synthetic oligonucleotide
gccguucacgcucuucccu

SEQ ID NO: 1143083 - RNA, 19 nt, Artificial Sequence
  Description of Artificial Sequence: Synthetic oligonucleotide
ugcccggggacugcccguu

SEQ ID NO: 1143084 - RNA, 19 nt, Artificial Sequence
  Description of Artificial Sequence: Synthetic oligonucleotide
gacgucugcagggcaggau

SEQ ID NO: 1143085 - RNA, 19 nt, Artificial Sequence
  Description of Artificial Sequence: Synthetic oligonucleotide
ggccgguccgggagguccg

SEQ ID NO: 1143086 - RNA, 19 nt, Artificial Sequence
  Description of Artificial Sequence: Synthetic oligonucleotide
gggagcgcagcagccguuc

SEQ ID NO: 1143087 - RNA, 19 nt, Artificial Sequence
  Description of Artificial Sequence: Synthetic oligonucleotide
gccccagacgggccaugcc

SEQ ID NO: 1143088 - RNA, 19 nt, Artificial Sequence
  Description of Artificial Sequence: Synthetic oligonucleotide
ggggagugccuggugggga

SEQ ID NO: 1143089 - RNA, 19 nt, Artificial Sequence
  Description of Artificial Sequence: Synthetic oligonucleotide
caucuggccccucccugcu

SEQ ID NO: 1143090 - RNA, 19 nt, Artificial Sequence
  Description of Artificial Sequence: Synthetic oligonucleotide
cauagcgcacgaggaggua

SEQ ID NO: 1143091 - RNA, 19 nt, Artificial Sequence
  Description of Artificial Sequence: Synthetic oligonucleotide
cagaugaguggugcucagu

SEQ ID NO: 1143092 - RNA, 19 nt, Artificial Sequence
  Description of Artificial Sequence: Synthetic oligonucleotide
cgcacgaggagguacgggu

SEQ ID NO: 1143093 - RNA, 19 nt, Artificial Sequence
  Description of Artificial Sequence: Synthetic oligonucleotide
ccgagauuucguacguagu

SEQ ID NO: 1143094 - RNA, 19 nt, Artificial Sequence
  Description of Artificial Sequence: Synthetic oligonucleotide
ccgacucauagagcucgac

SEQ ID NO: 1143095 - RNA, 19 nt, Artificial Sequence
  Description of Artificial Sequence: Synthetic oligonucleotide
gcggacgcugccaugugcu

SEQ ID NO: 1143096 - RNA, 19 nt, Artificial Sequence
  Description of Artificial Sequence: Synthetic oligonucleotide
ccccaucaccucccacaag

SEQ ID NO: 1143097 - RNA, 19 nt, Artificial Sequence
  Description of Artificial Sequence: Synthetic oligonucleotide
cuccuggauaggaggccau

SEQ ID NO: 1143098 - RNA, 19 nt, Artificial Sequence
  Description of Artificial Sequence: Synthetic oligonucleotide
ccguuggggacuggccuug

SEQ ID NO: 1143099 - RNA, 19 nt, Artificial Sequence
  Description of Artificial Sequence: Synthetic oligonucleotide
cccgacucauagagcucga

SEQ ID NO: 1143100 - RNA, 19 nt, Artificial Sequence
  Description of Artificial Sequence: Synthetic oligonucleotide
ggguuccuggggcauuguu

SEQ ID NO: 1143101 - RNA, 19 nt, Artificial Sequence
  Description of Artificial Sequence: Synthetic oligonucleotide
cguuggggacuggccuugg

SEQ ID NO: 1143102 - RNA, 19 nt, Artificial Sequence
  Description of Artificial Sequence: Synthetic oligonucleotide
acagagccacggggaccuu

SEQ ID NO: 1143103 - RNA, 19 nt, Artificial Sequence
  Description of Artificial Sequence: Synthetic oligonucleotide
guggccgguccgggagguc

SEQ ID NO: 1143104 - RNA, 19 nt, Artificial Sequence
  Description of Artificial Sequence: Synthetic oligonucleotide
cccggggacugcccguuaa

SEQ ID NO: 1143105 - RNA, 19 nt, Artificial Sequence
  Description of Artificial Sequence: Synthetic oligonucleotide
gcacgaggagguacggguu

SEQ ID NO: 1143106 - RNA, 19 nt, Artificial Sequence
  Description of Artificial Sequence: Synthetic oligonucleotide
ggcgacggccuuggagccu

SEQ ID NO: 1143107 - RNA, 19 nt, Artificial Sequence
  Description of Artificial Sequence: Synthetic oligonucleotide
gggcgaucggggagugccu

SEQ ID NO: 1143108 - RNA, 19 nt, Artificial Sequence
  Description of Artificial Sequence: Synthetic oligonucleotide
ccgguccgggagguccgug

SEQ ID NO: 1143109 - RNA, 19 nt, Artificial Sequence
  Description of Artificial Sequence: Synthetic oligonucleotide
cgucugcagggcaggauuu

SEQ ID NO: 1143110 - RNA, 19 nt, Artificial Sequence
  Description of Artificial Sequence: Synthetic oligonucleotide
cgguccgggagguccgugu

SEQ ID NO: 1143111 - RNA, 19 nt, Artificial Sequence
  Description of Artificial Sequence: Synthetic oligonucleotide
gugggcccaugggaccguu

SEQ ID NO: 1143112 - RNA, 19 nt, Artificial Sequence
  Description of Artificial Sequence: Synthetic oligonucleotide
gccgguccgggagguccgu

SEQ ID NO: 1143113 - RNA, 19 nt, Artificial Sequence
  Description of Artificial Sequence: Synthetic oligonucleotide
cggacgcugccaugugcuu

SEQ ID NO: 1143114 - RNA, 19 nt, Artificial Sequence
  Description of Artificial Sequence: Synthetic oligonucleotide
cgacggccuuggagccugu

SEQ ID NO: 1143115 - RNA, 19 nt, Artificial Sequence
  Description of Artificial Sequence: Synthetic oligonucleotide
  modified_base (1)..(1): a, c, u, g, unknown or other
nuaaaacagacaaugcaag

SEQ ID NO: 1143116 - RNA, 19 nt, Artificial Sequence
  Description of Artificial Sequence: Synthetic oligonucleotide
aauacauugacacuggaaa

SEQ ID NO: 1143117 - RNA, 19 nt, Artificial Sequence
  Description of Artificial Sequence: Synthetic oligonucleotide
uaucuugcaaguuuggagg

SEQ ID NO: 1143118 - RNA, 19 nt, Artificial Sequence
  Description of Artificial Sequence: Synthetic oligonucleotide
agauguagcucauucaagc

SEQ ID NO: 1143119 - RNA, 19 nt, Artificial Sequence
  Description of Artificial Sequence: Synthetic oligonucleotide
uuggguuugagccacaugc

SEQ ID NO: 1143120 - RNA, 19 nt, Artificial Sequence
  Description of Artificial Sequence: Synthetic oligonucleotide
acauaagcgauauauuccg

SEQ ID NO: 1143121 - RNA, 19 nt, Artificial Sequence
  Description of Artificial Sequence: Synthetic oligonucleotide
aaggacgugagcucuuucc

SEQ ID NO: 1143122 - RNA, 19 nt, Artificial Sequence
  Description of Artificial Sequence: Synthetic oligonucleotide
uacauauuagcccaucacc

SEQ ID NO: 1143123 - RNA, 19 nt, Artificial Sequence
  Description of Artificial Sequence: Synthetic oligonucleotide
uuaagcaaguggcagauga

SEQ ID NO: 1143124 - RNA, 19 nt, Artificial Sequence
  Description of Artificial Sequence: Synthetic oligonucleotide
uaaaccugccgacagagag

SEQ ID NO: 1143125 - RNA, 19 nt, Artificial Sequence
  Description of Artificial Sequence: Synthetic oligonucleotide
ucaagaaagccaaugcugc

SEQ ID NO: 1143126 - RNA, 19 nt, Artificial Sequence
  Description of Artificial Sequence: Synthetic oligonucleotide
ugauucauucaucacacca

SEQ ID NO: 1143127 - RNA, 19 nt, Artificial Sequence
  Description of Artificial Sequence: Synthetic oligonucleotide
uuuggaggaucuuagaacu

SEQ ID NO: 1143128 - RNA, 19 nt, Artificial Sequence
  Description of Artificial Sequence: Synthetic oligonucleotide
uaaacaacgccugugcugg

SEQ ID NO: 1143129 - RNA, 19 nt, Artificial Sequence
  Description of Artificial Sequence: Synthetic oligonucleotide
ugguauauaaauacaauuu

SEQ ID NO: 1143130 - RNA, 19 nt, Artificial Sequence
  Description of Artificial Sequence: Synthetic oligonucleotide
agcgauauauuccgggugc

SEQ ID NO: 1143131 - RNA, 19 nt, Artificial Sequence
  Description of Artificial Sequence: Synthetic oligonucleotide
ucuaaggaagagaaaggag

SEQ ID NO: 1143132 - RNA, 19 nt, Artificial Sequence
  Description of Artificial Sequence: Synthetic oligonucleotide
aaauugaacugaaauuuuc

SEQ ID NO: 1143133 - RNA, 19 nt, Artificial Sequence
  Description of Artificial Sequence: Synthetic oligonucleotide
auaagcgauauauuccggg

SEQ ID NO: 1143134 - RNA, 19 nt, Artificial Sequence
  Description of Artificial Sequence: Synthetic oligonucleotide
agcucauucaagcacacug

SEQ ID NO: 1143135 - RNA, 19 nt, Artificial Sequence
  Description of Artificial Sequence: Synthetic oligonucleotide
aacuucauaucuugcaagu

SEQ ID NO: 1143136 - RNA, 19 nt, Artificial Sequence
  Description of Artificial Sequence: Synthetic oligonucleotide
uggacaauuugcccaacgg

SEQ ID NO: 1143137 - RNA, 19 nt, Artificial Sequence
  Description of Artificial Sequence: Synthetic oligonucleotide
uuucuauuuauacugucau

SEQ ID NO: 1143138 - RNA, 19 nt, Artificial Sequence
  Description of Artificial Sequence: Synthetic oligonucleotide
aauucuguguucagaauag

SEQ ID NO: 1143139 - RNA, 19 nt, Artificial Sequence
  Description of Artificial Sequence: Synthetic oligonucleotide
aaauauucccuagucaacu

SEQ ID NO: 1143140 - RNA, 19 nt, Artificial Sequence
  Description of Artificial Sequence: Synthetic oligonucleotide
ugauagaaauuguauaaaa

SEQ ID NO: 1143141 - RNA, 19 nt, Artificial Sequence
  Description of Artificial Sequence: Synthetic oligonucleotide
uguagcucauucaagcaca

SEQ ID NO: 1143142 - RNA, 19 nt, Artificial Sequence
  Description of Artificial Sequence: Synthetic oligonucleotide
uuuacauauuagcccauca

SEQ ID NO: 1143143 - RNA, 19 nt, Artificial Sequence
  Description of Artificial Sequence: Synthetic oligonucleotide
aagcacauaagcgauauau

SEQ ID NO: 1143144 - RNA, 19 nt, Artificial Sequence
  Description of Artificial Sequence: Synthetic oligonucleotide
aacaucgcagcagagagca

SEQ ID NO: 1143145 - RNA, 19 nt, Artificial Sequence
  Description of Artificial Sequence: Synthetic oligonucleotide
cuucuaaggaagagaaagg

SEQ ID NO: 1143146 - RNA, 19 nt, Artificial Sequence
  Description of Artificial Sequence: Synthetic oligonucleotide
uuacauauuagcccaucac

SEQ ID NO: 1143147 - RNA, 19 nt, Artificial Sequence
  Description of Artificial Sequence: Synthetic oligonucleotide
acugguuuaacccuuuuau

SEQ ID NO: 1143148 - RNA, 19 nt, Artificial Sequence
  Description of Artificial Sequence: Synthetic oligonucleotide
aauugaacugaaauuuuca

SEQ ID NO: 1143149 - RNA, 19 nt, Artificial Sequence
  Description of Artificial Sequence: Synthetic oligonucleotide
auaaacaacgccugugcug

SEQ ID NO: 1143150 - RNA, 19 nt, Artificial Sequence
  Description of Artificial Sequence: Synthetic oligonucleotide
ucaaaguaucgaaugcuga

SEQ ID NO: 1143151 - RNA, 19 nt, Artificial Sequence
  Description of Artificial Sequence: Synthetic oligonucleotide
uaugaagugccaucgcuug

SEQ ID NO: 1143152 - RNA, 19 nt, Artificial Sequence
  Description of Artificial Sequence: Synthetic oligonucleotide
gacaauuugcccaacggug

SEQ ID NO: 1143153 - RNA, 19 nt, Artificial Sequence
  Description of Artificial Sequence: Synthetic oligonucleotide
acacaaaucggauguguuc

SEQ ID NO: 1143154 - RNA, 19 nt, Artificial Sequence
  Description of Artificial Sequence: Synthetic oligonucleotide
cucagucccaccuacagac

SEQ ID NO: 1143155 - RNA, 19 nt, Artificial Sequence
  Description of Artificial Sequence: Synthetic oligonucleotide
uguucaacgacaccuccca

SEQ ID NO: 1143156 - RNA, 19 nt, Artificial Sequence
  Description of Artificial Sequence: Synthetic oligonucleotide
aagcaaguggcagaugagg

SEQ ID NO: 1143157 - RNA, 19 nt, Artificial Sequence
  Description of Artificial Sequence: Synthetic oligonucleotide
ucccuagucaacuucauau

SEQ ID NO: 1143158 - RNA, 19 nt, Artificial Sequence
  Description of Artificial Sequence: Synthetic oligonucleotide
ucaacgacaccucccacug

SEQ ID NO: 1143159 - RNA, 19 nt, Artificial Sequence
  Description of Artificial Sequence: Synthetic oligonucleotide
uuuauacugucauucuacu

SEQ ID NO: 1143160 - RNA, 19 nt, Artificial Sequence
  Description of Artificial Sequence: Synthetic oligonucleotide
uguaacccuaaaccugccg

SEQ ID NO: 1143161 - RNA, 19 nt, Artificial Sequence
  Description of Artificial Sequence: Synthetic oligonucleotide
aggacgugagcucuuuccc

SEQ ID NO: 1143162 - RNA, 19 nt, Artificial Sequence
  Description of Artificial Sequence: Synthetic oligonucleotide
caaguuuggaggaucuuag

SEQ ID NO: 1143163 - RNA, 19 nt, Artificial Sequence
  Description of Artificial Sequence: Synthetic oligonucleotide
uuuuccuaccuuuuccucu

SEQ ID NO: 1143164 - RNA, 19 nt, Artificial Sequence
  Description of Artificial Sequence: Synthetic oligonucleotide
agacccaugaugaagaaca

SEQ ID NO: 1143165 - RNA, 19 nt, Artificial Sequence
  Description of Artificial Sequence: Synthetic oligonucleotide
gauuguaacgugcggcugc

SEQ ID NO: 1143166 - RNA, 19 nt, Artificial Sequence
  Description of Artificial Sequence: Synthetic oligonucleotide
aaaauacauugacacugga

SEQ ID NO: 1143167 - RNA, 19 nt, Artificial Sequence
  Description of Artificial Sequence: Synthetic oligonucleotide
aagcgauauauuccgggug

SEQ ID NO: 1143168 - RNA, 19 nt, Artificial Sequence
  Description of Artificial Sequence: Synthetic oligonucleotide
uguaacgugcggcugccag

SEQ ID NO: 1143169 - RNA, 19 nt, Artificial Sequence
  Description of Artificial Sequence: Synthetic oligonucleotide
gauugagccgcggagcucg

SEQ ID NO: 1143170 - RNA, 19 nt, Artificial Sequence
  Description of Artificial Sequence: Synthetic oligonucleotide
aaccaacacaaaucggaug

SEQ ID NO: 1143171 - RNA, 19 nt, Artificial Sequence
  Description of Artificial Sequence: Synthetic oligonucleotide
ucugcucgggauuguaacg

SEQ ID NO: 1143172 - RNA, 19 nt, Artificial Sequence
  Description of Artificial Sequence: Synthetic oligonucleotide
cugucguacaccgauagcc

SEQ ID NO: 1143173 - RNA, 19 nt, Artificial Sequence
  Description of Artificial Sequence: Synthetic oligonucleotide
uguguucaaaguaucgaau

SEQ ID NO: 1143174 - RNA, 19 nt, Artificial Sequence
  Description of Artificial Sequence: Synthetic oligonucleotide
aucuuagaacucuucaaga

SEQ ID NO: 1143175 - RNA, 19 nt, Artificial Sequence
  Description of Artificial Sequence: Synthetic oligonucleotide
uugguaggucuuaugaagu

SEQ ID NO: 1143176 - RNA, 19 nt, Artificial Sequence
  Description of Artificial Sequence: Synthetic oligonucleotide
guuguggacagugagcucc

SEQ ID NO: 1143177 - RNA, 19 nt, Artificial Sequence
  Description of Artificial Sequence: Synthetic oligonucleotide
guaguggacaauuugccca

SEQ ID NO: 1143178 - RNA, 19 nt, Artificial Sequence
  Description of Artificial Sequence: Synthetic oligonucleotide
agugaccuccccgugacgc

SEQ ID NO: 1143179 - RNA, 19 nt, Artificial Sequence
  Description of Artificial Sequence: Synthetic oligonucleotide
uaagcgauauauuccgggu

SEQ ID NO: 1143180 - RNA, 19 nt, Artificial Sequence
  Description of Artificial Sequence: Synthetic oligonucleotide
auuccgggugcccauuccc

SEQ ID NO: 1143181 - RNA, 19 nt, Artificial Sequence
  Description of Artificial Sequence: Synthetic oligonucleotide
ucggauguguucaaaguau

SEQ ID NO: 1143182 - RNA, 19 nt, Artificial Sequence
  Description of Artificial Sequence: Synthetic oligonucleotide
caacuucauaucuugcaag

SEQ ID NO: 1143183 - RNA, 19 nt, Artificial Sequence
  Description of Artificial Sequence: Synthetic oligonucleotide
gucuuaugaagugccaucg

SEQ ID NO: 1143184 - RNA, 19 nt, Artificial Sequence
  Description of Artificial Sequence: Synthetic oligonucleotide
ugucauucuacucuaucuu

SEQ ID NO: 1143185 - RNA, 19 nt, Artificial Sequence
  Description of Artificial Sequence: Synthetic oligonucleotide
aggaucuuagaacucuuca

SEQ ID NO: 1143186 - RNA, 19 nt, Artificial Sequence
  Description of Artificial Sequence: Synthetic oligonucleotide
agcccaucaccauuuaaag

SEQ ID NO: 1143187 - RNA, 19 nt, Artificial Sequence
  Description of Artificial Sequence: Synthetic oligonucleotide
uaagcaaguggcagaugag

SEQ ID NO: 1143188 - RNA, 19 nt, Artificial Sequence
  Description of Artificial Sequence: Synthetic oligonucleotide
ucggucucucuucacaggc

SEQ ID NO: 1143189 - RNA, 19 nt, Artificial Sequence
  Description of Artificial Sequence: Synthetic oligonucleotide
gaagcuauccaucauuagu

SEQ ID NO: 1143190 - RNA, 19 nt, Artificial Sequence
  Description of Artificial Sequence: Synthetic oligonucleotide
accaagaagcuauccauca

SEQ ID NO: 1143191 - RNA, 19 nt, Artificial Sequence
  Description of Artificial Sequence: Synthetic oligonucleotide
gauccauaaacaacgccug

SEQ ID NO: 1143192 - RNA, 19 nt, Artificial Sequence
  Description of Artificial Sequence: Synthetic oligonucleotide
ucuuaugaagugccaucgc

SEQ ID NO: 1143193 - RNA, 19 nt, Artificial Sequence
  Description of Artificial Sequence: Synthetic oligonucleotide
ugcuugguaguacaaaauu

SEQ ID NO: 1143194 - RNA, 19 nt, Artificial Sequence
  Description of Artificial Sequence: Synthetic oligonucleotide
acagacaugcuuccccggg

SEQ ID NO: 1143195 - RNA, 19 nt, Artificial Sequence
  Description of Artificial Sequence: Synthetic oligonucleotide
aaaguaucgaaugcugaau

SEQ ID NO: 1143196 - RNA, 19 nt, Artificial Sequence
  Description of Artificial Sequence: Synthetic oligonucleotide
ucacccgacaguguaaacc

SEQ ID NO: 1143197 - RNA, 19 nt, Artificial Sequence
  Description of Artificial Sequence: Synthetic oligonucleotide
cccaaugacuucaugauag

SEQ ID NO: 1143198 - RNA, 19 nt, Artificial Sequence
  Description of Artificial Sequence: Synthetic oligonucleotide
uuaugaagugccaucgcuu

SEQ ID NO: 1143199 - RNA, 19 nt, Artificial Sequence
  Description of Artificial Sequence: Synthetic oligonucleotide
acauauuagcccaucacca

SEQ ID NO: 1143200 - RNA, 19 nt, Artificial Sequence
  Description of Artificial Sequence: Synthetic oligonucleotide
caucaaacuucuccgcucc

SEQ ID NO: 1143201 - RNA, 19 nt, Artificial Sequence
  Description of Artificial Sequence: Synthetic oligonucleotide
agugccaucgcuugugccu

SEQ ID NO: 1143202 - RNA, 19 nt, Artificial Sequence
  Description of Artificial Sequence: Synthetic oligonucleotide
aaaggacgugagcucuuuc

SEQ ID NO: 1143203 - RNA, 19 nt, Artificial Sequence
  Description of Artificial Sequence: Synthetic oligonucleotide
aaauacauugacacuggaa

SEQ ID NO: 1143204 - RNA, 19 nt, Artificial Sequence
  Description of Artificial Sequence: Synthetic oligonucleotide
auguguucaaaguaucgaa

SEQ ID NO: 1143205 - RNA, 19 nt, Artificial Sequence
  Description of Artificial Sequence: Synthetic oligonucleotide
aauauucccuagucaacuu

SEQ ID NO: 1143206 - RNA, 19 nt, Artificial Sequence
  Description of Artificial Sequence: Synthetic oligonucleotide
gauguguucaaaguaucga

SEQ ID NO: 1143207 - RNA, 19 nt, Artificial Sequence
  Description of Artificial Sequence: Synthetic oligonucleotide
cuuuggacuuguugguagg

SEQ ID NO: 1143208 - RNA, 19 nt, Artificial Sequence
  Description of Artificial Sequence: Synthetic oligonucleotide
cauaagcgauauauuccgg

SEQ ID NO: 1143209 - RNA, 19 nt, Artificial Sequence
  Description of Artificial Sequence: Synthetic oligonucleotide
gucaacuucauaucuugca

SEQ ID NO: 1143210 - RNA, 19 nt, Artificial Sequence
  Description of Artificial Sequence: Synthetic oligonucleotide
ugucguacaccgauagccu

SEQ ID NO: 1143211 - RNA, 19 nt, Artificial Sequence
  Description of Artificial Sequence: Synthetic oligonucleotide
uuaacuuugcuugguagua

SEQ ID NO: 1143212 - RNA, 19 nt, Artificial Sequence
  Description of Artificial Sequence: Synthetic oligonucleotide
uucccgaugggaaauugaa

SEQ ID NO: 1143213 - RNA, 19 nt, Artificial Sequence
  Description of Artificial Sequence: Synthetic oligonucleotide
guaggucuuaugaagugcc

SEQ ID NO: 1143214 - RNA, 19 nt, Artificial Sequence
  Description of Artificial Sequence: Synthetic oligonucleotide
agaagcuauccaucauuag

SEQ ID NO: 1143215 - RNA, 19 nt, Artificial Sequence
  Description of Artificial Sequence: Synthetic oligonucleotide
aaaccugccgacagagagg

SEQ ID NO: 1143216 - RNA, 19 nt, Artificial Sequence
  Description of Artificial Sequence: Synthetic oligonucleotide
auuguaacgugcggcugcc

SEQ ID NO: 1143217 - RNA, 19 nt, Artificial Sequence
  Description of Artificial Sequence: Synthetic oligonucleotide
gacacuggaaacaaugaaa

SEQ ID NO: 1143218 - RNA, 19 nt, Artificial Sequence
  Description of Artificial Sequence: Synthetic oligonucleotide
aaguuuggaggaucuuaga

SEQ ID NO: 1143219 - RNA, 19 nt, Artificial Sequence
  Description of Artificial Sequence: Synthetic oligonucleotide
guaacccuaaaccugccga

SEQ ID NO: 1143220 - RNA, 19 nt, Artificial Sequence
  Description of Artificial Sequence: Synthetic oligonucleotide
uuacuaucgagguggcaac

SEQ ID NO: 1143221 - RNA, 19 nt, Artificial Sequence
  Description of Artificial Sequence: Synthetic oligonucleotide
cacagggcuuucaacuucg

SEQ ID NO: 1143222 - RNA, 19 nt, Artificial Sequence
  Description of Artificial Sequence: Synthetic oligonucleotide
gauggagucgucucugcuc

SEQ ID NO: 1143223 - RNA, 19 nt, Artificial Sequence
  Description of Artificial Sequence: Synthetic oligonucleotide
ugguccggaaagauggaga

SEQ ID NO: 1143224 - RNA, 19 nt, Artificial Sequence
  Description of Artificial Sequence: Synthetic oligonucleotide
ugguaggucuuaugaagug

SEQ ID NO: 1143225 - RNA, 19 nt, Artificial Sequence
  Description of Artificial Sequence: Synthetic oligonucleotide
cuucggucucucuucacag

SEQ ID NO: 1143226 - RNA, 19 nt, Artificial Sequence
  Description of Artificial Sequence: Synthetic oligonucleotide
uuucccgaugggaaauuga

SEQ ID NO: 1143227 - RNA, 19 nt, Artificial Sequence
  Description of Artificial Sequence: Synthetic oligonucleotide
ccuacagacaucaaacuuc

SEQ ID NO: 1143228 - RNA, 19 nt, Artificial Sequence
  Description of Artificial Sequence: Synthetic oligonucleotide
ucgggauuguaacgugcgg

SEQ ID NO: 1143229 - RNA, 19 nt, Artificial Sequence
  Description of Artificial Sequence: Synthetic oligonucleotide
aaccugccgacagagagga

SEQ ID NO: 1143230 - RNA, 19 nt, Artificial Sequence
  Description of Artificial Sequence: Synthetic oligonucleotide
uucggucucucuucacagg

SEQ ID NO: 1143231 - RNA, 19 nt, Artificial Sequence
  Description of Artificial Sequence: Synthetic oligonucleotide
cuuagaacucuucaagaaa

SEQ ID NO: 1143232 - RNA, 19 nt, Artificial Sequence
  Description of Artificial Sequence: Synthetic oligonucleotide
uaacccuaaaccugccgac

SEQ ID NO: 1143233 - RNA, 19 nt, Artificial Sequence
  Description of Artificial Sequence: Synthetic oligonucleotide
gcaacugauucauucauca

SEQ ID NO: 1143234 - RNA, 19 nt, Artificial Sequence
  Description of Artificial Sequence: Synthetic oligonucleotide
cucugucguacaccgauag

SEQ ID NO: 1143235 - RNA, 19 nt, Artificial Sequence
  Description of Artificial Sequence: Synthetic oligonucleotide
guggacaauuugcccaacg

SEQ ID NO: 1143236 - RNA, 19 nt, Artificial Sequence
  Description of Artificial Sequence: Synthetic oligonucleotide
uguuaucagcuaccauggc

SEQ ID NO: 1143237 - RNA, 19 nt, Artificial Sequence
  Description of Artificial Sequence: Synthetic oligonucleotide
accuacagacaucaaacuu

SEQ ID NO: 1143238 - RNA, 19 nt, Artificial Sequence
  Description of Artificial Sequence: Synthetic oligonucleotide
ucugucguacaccgauagc

SEQ ID NO: 1143239 - RNA, 19 nt, Artificial Sequence
  Description of Artificial Sequence: Synthetic oligonucleotide
agcuauccaucauuagugu

SEQ ID NO: 1143240 - RNA, 19 nt, Artificial Sequence
  Description of Artificial Sequence: Synthetic oligonucleotide
gugccuacagcguuggcac

SEQ ID NO: 1143241 - RNA, 19 nt, Artificial Sequence
  Description of Artificial Sequence: Synthetic oligonucleotide
gaucuccaguccuucuaag

SEQ ID NO: 1143242 - RNA, 19 nt, Artificial Sequence
  Description of Artificial Sequence: Synthetic oligonucleotide
guacucuugguauauaaau

SEQ ID NO: 1143243 - RNA, 19 nt, Artificial Sequence
  Description of Artificial Sequence: Synthetic oligonucleotide
acaggauucucacccgaca

SEQ ID NO: 1143244 - RNA, 19 nt, Artificial Sequence
  Description of Artificial Sequence: Synthetic oligonucleotide
aucaccauuuaaaggacgu

SEQ ID NO: 1143245 - RNA, 19 nt, Artificial Sequence
  Description of Artificial Sequence: Synthetic oligonucleotide
auauuccgggugcccauuc

SEQ ID NO: 1143246 - RNA, 19 nt, Artificial Sequence
  Description of Artificial Sequence: Synthetic oligonucleotide
uauuccgggugcccauucc

SEQ ID NO: 1143247 - RNA, 19 nt, Artificial Sequence
  Description of Artificial Sequence: Synthetic oligonucleotide
cacaaaucggauguguuca

SEQ ID NO: 1143248 - RNA, 19 nt, Artificial Sequence
  Description of Artificial Sequence: Synthetic oligonucleotide
auucucacccgacagugua

SEQ ID NO: 1143249 - RNA, 19 nt, Artificial Sequence
  Description of Artificial Sequence: Synthetic oligonucleotide
ggauguguucaaaguaucg

SEQ ID NO: 1143250 - RNA, 19 nt, Artificial Sequence
  Description of Artificial Sequence: Synthetic oligonucleotide
uaggucuuaugaagugcca

SEQ ID NO: 1143251 - RNA, 19 nt, Artificial Sequence
  Description of Artificial Sequence: Synthetic oligonucleotide
ucccaagaacaucgcagca

SEQ ID NO: 1143252 - RNA, 19 nt, Artificial Sequence
  Description of Artificial Sequence: Synthetic oligonucleotide
uacaccgauagccuuucuu

SEQ ID NO: 1143253 - RNA, 19 nt, Artificial Sequence
  Description of Artificial Sequence: Synthetic oligonucleotide
gaagugccaucgcuugugc

SEQ ID NO: 1143254 - RNA, 19 nt, Artificial Sequence
  Description of Artificial Sequence: Synthetic oligonucleotide
ggcacauccccguugacac

SEQ ID NO: 1143255 - RNA, 19 nt, Artificial Sequence
  Description of Artificial Sequence: Synthetic oligonucleotide
ucccgaugggaaauugaac

SEQ ID NO: 1143256 - RNA, 19 nt, Artificial Sequence
  Description of Artificial Sequence: Synthetic oligonucleotide
uaacgugcggcugccagug

SEQ ID NO: 1143257 - RNA, 19 nt, Artificial Sequence
  Description of Artificial Sequence: Synthetic oligonucleotide
aaacaacgccugugcuggg

SEQ ID NO: 1143258 - RNA, 19 nt, Artificial Sequence
  Description of Artificial Sequence: Synthetic oligonucleotide
agggauccauaaacaacgc

SEQ ID NO: 1143259 - RNA, 19 nt, Artificial Sequence
  Description of Artificial Sequence: Synthetic oligonucleotide
uacuccgugccacuucggu

SEQ ID NO: 1143260 - RNA, 19 nt, Artificial Sequence
  Description of Artificial Sequence: Synthetic oligonucleotide
uaucgagguggcaacugau

SEQ ID NO: 1143261 - RNA, 19 nt, Artificial Sequence
  Description of Artificial Sequence: Synthetic oligonucleotide
cauucaagcacacugguuu

SEQ ID NO: 1143262 - RNA, 19 nt, Artificial Sequence
  Description of Artificial Sequence: Synthetic oligonucleotide
agcggcgaacucauggcgc

SEQ ID NO: 1143263 - RNA, 19 nt, Artificial Sequence
  Description of Artificial Sequence: Synthetic oligonucleotide
aacgccugugcugggaaca

SEQ ID NO: 1143264 - RNA, 19 nt, Artificial Sequence
  Description of Artificial Sequence: Synthetic oligonucleotide
ugccuccuggugacaaggg

SEQ ID NO: 1143265 - RNA, 19 nt, Artificial Sequence
  Description of Artificial Sequence: Synthetic oligonucleotide
ucagacuuucaaucccaaa

SEQ ID NO: 1143266 - RNA, 19 nt, Artificial Sequence
  Description of Artificial Sequence: Synthetic oligonucleotide
uccuaccuuuuccucuuca

SEQ ID NO: 1143267 - RNA, 19 nt, Artificial Sequence
  Description of Artificial Sequence: Synthetic oligonucleotide
gcuacuccgugccacuucg

SEQ ID NO: 1143268 - RNA, 19 nt, Artificial Sequence
  Description of Artificial Sequence: Synthetic oligonucleotide
aggagacccaugaugaaga

SEQ ID NO: 1143269 - RNA, 19 nt, Artificial Sequence
  Description of Artificial Sequence: Synthetic oligonucleotide
aacccuaaaccugccgaca

SEQ ID NO: 1143270 - RNA, 19 nt, Artificial Sequence
  Description of Artificial Sequence: Synthetic oligonucleotide
auauauuccgggugcccau

SEQ ID NO: 1143271 - RNA, 19 nt, Artificial Sequence
  Description of Artificial Sequence: Synthetic oligonucleotide
cacccgacaguguaaacca

SEQ ID NO: 1143272 - RNA, 19 nt, Artificial Sequence
  Description of Artificial Sequence: Synthetic oligonucleotide
caucacaccaagaagcuau

SEQ ID NO: 1143273 - RNA, 19 nt, Artificial Sequence
  Description of Artificial Sequence: Synthetic oligonucleotide
cuuaugaagugccaucgcu

SEQ ID NO: 1143274 - RNA, 19 nt, Artificial Sequence
  Description of Artificial Sequence: Synthetic oligonucleotide
ggacgugagcucuuucccg

SEQ ID NO: 1143275 - RNA, 19 nt, Artificial Sequence
  Description of Artificial Sequence: Synthetic oligonucleotide
uuaaaggacgugagcucuu

SEQ ID NO: 1143276 - RNA, 19 nt, Artificial Sequence
  Description of Artificial Sequence: Synthetic oligonucleotide
acuucgccgaugcuguuau

SEQ ID NO: 1143277 - RNA, 19 nt, Artificial Sequence
  Description of Artificial Sequence: Synthetic oligonucleotide
uccccacggagccaucgcc

SEQ ID NO: 1143278 - RNA, 19 nt, Artificial Sequence
  Description of Artificial Sequence: Synthetic oligonucleotide
guuggcacacauccuguuc

SEQ ID NO: 1143279 - RNA, 19 nt, Artificial Sequence
  Description of Artificial Sequence: Synthetic oligonucleotide
gguaggucuuaugaagugc

SEQ ID NO: 1143280 - RNA, 19 nt, Artificial Sequence
  Description of Artificial Sequence: Synthetic oligonucleotide
accauggcuuucaaauauc

SEQ ID NO: 1143281 - RNA, 19 nt, Artificial Sequence
  Description of Artificial Sequence: Synthetic oligonucleotide
ugaccuccccgugacgccg

SEQ ID NO: 1143282 - RNA, 19 nt, Artificial Sequence
  Description of Artificial Sequence: Synthetic oligonucleotide
guccuucuaaggaagagaa

SEQ ID NO: 1143283 - RNA, 19 nt, Artificial Sequence
  Description of Artificial Sequence: Synthetic oligonucleotide
ggauccauaaacaacgccu

SEQ ID NO: 1143284 - RNA, 19 nt, Artificial Sequence
  Description of Artificial Sequence: Synthetic oligonucleotide
ugcucgggauuguaacgug

SEQ ID NO: 1143285 - RNA, 19 nt, Artificial Sequence
  Description of Artificial Sequence: Synthetic oligonucleotide
cccguugacacucucaguc

SEQ ID NO: 1143286 - RNA, 19 nt, Artificial Sequence
  Description of Artificial Sequence: Synthetic oligonucleotide
uuuuacuaucgagguggca

SEQ ID NO: 1143287 - RNA, 19 nt, Artificial Sequence
  Description of Artificial Sequence: Synthetic oligonucleotide
uccgggugcccauucccag

SEQ ID NO: 1143288 - RNA, 19 nt, Artificial Sequence
  Description of Artificial Sequence: Synthetic oligonucleotide
ucgcuugugccuacagcgu

SEQ ID NO: 1143289 - RNA, 19 nt, Artificial Sequence
  Description of Artificial Sequence: Synthetic oligonucleotide
gagcacagcggaccccggg

SEQ ID NO: 1143290 - RNA, 19 nt, Artificial Sequence
  Description of Artificial Sequence: Synthetic oligonucleotide
ucguacaccgauagccuuu

SEQ ID NO: 1143291 - RNA, 19 nt, Artificial Sequence
  Description of Artificial Sequence: Synthetic oligonucleotide
caaugaaaauuuuccuuua

SEQ ID NO: 1143292 - RNA, 19 nt, Artificial Sequence
  Description of Artificial Sequence: Synthetic oligonucleotide
agagagcacagcggacccc

SEQ ID NO: 1143293 - RNA, 19 nt, Artificial Sequence
  Description of Artificial Sequence: Synthetic oligonucleotide
ggucuuaugaagugccauc

SEQ ID NO: 1143294 - RNA, 19 nt, Artificial Sequence
  Description of Artificial Sequence: Synthetic oligonucleotide
cacaggauucucacccgac

SEQ ID NO: 1143295 - RNA, 19 nt, Artificial Sequence
  Description of Artificial Sequence: Synthetic oligonucleotide
cagcggcgaacucauggcg

SEQ ID NO: 1143296 - RNA, 19 nt, Artificial Sequence
  Description of Artificial Sequence: Synthetic oligonucleotide
uucccuagucaacuucaua

SEQ ID NO: 1143297 - RNA, 19 nt, Artificial Sequence
  Description of Artificial Sequence: Synthetic oligonucleotide
uacagcguuggcacacauc

SEQ ID NO: 1143298 - RNA, 19 nt, Artificial Sequence
  Description of Artificial Sequence: Synthetic oligonucleotide
uucucacccgacaguguaa

SEQ ID NO: 1143299 - RNA, 19 nt, Artificial Sequence
  Description of Artificial Sequence: Synthetic oligonucleotide
cacucucagucccaccuac

SEQ ID NO: 1143300 - RNA, 19 nt, Artificial Sequence
  Description of Artificial Sequence: Synthetic oligonucleotide
ggagggauccauaaacaac

SEQ ID NO: 1143301 - RNA, 19 nt, Artificial Sequence
  Description of Artificial Sequence: Synthetic oligonucleotide
acaaaucggauguguucaa

SEQ ID NO: 1143302 - RNA, 19 nt, Artificial Sequence
  Description of Artificial Sequence: Synthetic oligonucleotide
uuguggacagugagcuccu

SEQ ID NO: 1143303 - RNA, 19 nt, Artificial Sequence
  Description of Artificial Sequence: Synthetic oligonucleotide
uccugcgcccuccucuccc

SEQ ID NO: 1143304 - RNA, 19 nt, Artificial Sequence
  Description of Artificial Sequence: Synthetic oligonucleotide
gcuugguaguacaaaauuc

SEQ ID NO: 1143305 - RNA, 19 nt, Artificial Sequence
  Description of Artificial Sequence: Synthetic oligonucleotide
ugcccaacggugucuacua

SEQ ID NO: 1143306 - RNA, 19 nt, Artificial Sequence
  Description of Artificial Sequence: Synthetic oligonucleotide
ucucacccgacaguguaaa

SEQ ID NO: 1143307 - RNA, 19 nt, Artificial Sequence
  Description of Artificial Sequence: Synthetic oligonucleotide
uugcccaacggugucuacu

SEQ ID NO: 1143308 - RNA, 19 nt, Artificial Sequence
  Description of Artificial Sequence: Synthetic oligonucleotide
gagacccaugaugaagaac

SEQ ID NO: 1143309 - RNA, 19 nt, Artificial Sequence
  Description of Artificial Sequence: Synthetic oligonucleotide
ugccaguguuguccggggc

SEQ ID NO: 1143310 - RNA, 19 nt, Artificial Sequence
  Description of Artificial Sequence: Synthetic oligonucleotide
ccaucauuaguguugugga

SEQ ID NO: 1143311 - RNA, 19 nt, Artificial Sequence
  Description of Artificial Sequence: Synthetic oligonucleotide
ugacacucucagucccacc

SEQ ID NO: 1143312 - RNA, 19 nt, Artificial Sequence
  Description of Artificial Sequence: Synthetic oligonucleotide
ggagaagcuccagaggcgc

SEQ ID NO: 1143313 - RNA, 19 nt, Artificial Sequence
  Description of Artificial Sequence: Synthetic oligonucleotide
gacuugugcuccacuuuug

SEQ ID NO: 1143314 - RNA, 19 nt, Artificial Sequence
  Description of Artificial Sequence: Synthetic oligonucleotide
cuaucgagguggcaacuga

SEQ ID NO: 1143315 - RNA, 19 nt, Artificial Sequence
  Description of Artificial Sequence: Synthetic oligonucleotide
ggugacaagggcccaggac

SEQ ID NO: 1143316 - RNA, 19 nt, Artificial Sequence
  Description of Artificial Sequence: Synthetic oligonucleotide
ugcuacuccgugccacuuc

SEQ ID NO: 1143317 - RNA, 19 nt, Artificial Sequence
  Description of Artificial Sequence: Synthetic oligonucleotide
aggucuuaugaagugccau

SEQ ID NO: 1143318 - RNA, 19 nt, Artificial Sequence
  Description of Artificial Sequence: Synthetic oligonucleotide
ugcugcuacuccgugccac

SEQ ID NO: 1143319 - RNA, 19 nt, Artificial Sequence
  Description of Artificial Sequence: Synthetic oligonucleotide
aucgcagcagagagcacag

SEQ ID NO: 1143320 - RNA, 19 nt, Artificial Sequence
  Description of Artificial Sequence: Synthetic oligonucleotide
cuccccgugacgccguggc

SEQ ID NO: 1143321 - RNA, 19 nt, Artificial Sequence
  Description of Artificial Sequence: Synthetic oligonucleotide
cuuucccgaugggaaauug

SEQ ID NO: 1143322 - RNA, 19 nt, Artificial Sequence
  Description of Artificial Sequence: Synthetic oligonucleotide
aguggacaauuugcccaac

SEQ ID NO: 1143323 - RNA, 19 nt, Artificial Sequence
  Description of Artificial Sequence: Synthetic oligonucleotide
aggcacauccccguugaca

SEQ ID NO: 1143324 - RNA, 19 nt, Artificial Sequence
  Description of Artificial Sequence: Synthetic oligonucleotide
cacaggcacauccccguug

SEQ ID NO: 1143325 - RNA, 19 nt, Artificial Sequence
  Description of Artificial Sequence: Synthetic oligonucleotide
agucgucucugcucgggau

SEQ ID NO: 1143326 - RNA, 19 nt, Artificial Sequence
  Description of Artificial Sequence: Synthetic oligonucleotide
uaucagcuaccauggcuuu

SEQ ID NO: 1143327 - RNA, 19 nt, Artificial Sequence
  Description of Artificial Sequence: Synthetic oligonucleotide
aacuucgccgaugcuguua

SEQ ID NO: 1143328 - RNA, 19 nt, Artificial Sequence
  Description of Artificial Sequence: Synthetic oligonucleotide
augcuguuaucagcuacca

SEQ ID NO: 1143329 - RNA, 19 nt, Artificial Sequence
  Description of Artificial Sequence: Synthetic oligonucleotide
uggagucgucucugcucgg

SEQ ID NO: 1143330 - RNA, 19 nt, Artificial Sequence
  Description of Artificial Sequence: Synthetic oligonucleotide
agauugagccgcggagcuc

SEQ ID NO: 1143331 - RNA, 19 nt, Artificial Sequence
  Description of Artificial Sequence: Synthetic oligonucleotide
gguccggaaagauggagaa

SEQ ID NO: 1143332 - RNA, 19 nt, Artificial Sequence
  Description of Artificial Sequence: Synthetic oligonucleotide
agcacauaagcgauauauu

SEQ ID NO: 1143333 - RNA, 19 nt, Artificial Sequence
  Description of Artificial Sequence: Synthetic oligonucleotide
ucaucacaccaagaagcua

SEQ ID NO: 1143334 - RNA, 19 nt, Artificial Sequence
  Description of Artificial Sequence: Synthetic oligonucleotide
cauaaacaacgccugugcu

SEQ ID NO: 1143335 - RNA, 19 nt, Artificial Sequence
  Description of Artificial Sequence: Synthetic oligonucleotide
gugcuccacuuuuguaacc

SEQ ID NO: 1143336 - RNA, 19 nt, Artificial Sequence
  Description of Artificial Sequence: Synthetic oligonucleotide
ugcgcccuccucuccccgg

SEQ ID NO: 1143337 - RNA, 19 nt, Artificial Sequence
  Description of Artificial Sequence: Synthetic oligonucleotide
caucgccgcguccugcgcc

SEQ ID NO: 1143338 - RNA, 19 nt, Artificial Sequence
  Description of Artificial Sequence: Synthetic oligonucleotide
uaaaggacgugagcucuuu

SEQ ID NO: 1143339 - RNA, 19 nt, Artificial Sequence
  Description of Artificial Sequence: Synthetic oligonucleotide
uggccgggcuucuuuggac

SEQ ID NO: 1143340 - RNA, 19 nt, Artificial Sequence
  Description of Artificial Sequence: Synthetic oligonucleotide
gcagauugagccgcggagc

SEQ ID NO: 1143341 - RNA, 19 nt, Artificial Sequence
  Description of Artificial Sequence: Synthetic oligonucleotide
cuccgugccacuucggucu

SEQ ID NO: 1143342 - RNA, 19 nt, Artificial Sequence
  Description of Artificial Sequence: Synthetic oligonucleotide
cauauuagcccaucaccau

SEQ ID NO: 1143343 - RNA, 19 nt, Artificial Sequence
  Description of Artificial Sequence: Synthetic oligonucleotide
guagcucauucaagcacac

SEQ ID NO: 1143344 - RNA, 19 nt, Artificial Sequence
  Description of Artificial Sequence: Synthetic oligonucleotide
caucucuggaagccaguca

SEQ ID NO: 1143345 - RNA, 19 nt, Artificial Sequence
  Description of Artificial Sequence: Synthetic oligonucleotide
cuacuccgugccacuucgg

SEQ ID NO: 1143346 - RNA, 19 nt, Artificial Sequence
  Description of Artificial Sequence: Synthetic oligonucleotide
cuuaagcaaguggcagaug

SEQ ID NO: 1143347 - RNA, 19 nt, Artificial Sequence
  Description of Artificial Sequence: Synthetic oligonucleotide
guucaacgacaccucccac

SEQ ID NO: 1143348 - RNA, 19 nt, Artificial Sequence
  Description of Artificial Sequence: Synthetic oligonucleotide
agcggaccccgggaguccc

SEQ ID NO: 1143349 - RNA, 19 nt, Artificial Sequence
  Description of Artificial Sequence: Synthetic oligonucleotide
cccgaugggaaauugaacu

SEQ ID NO: 1143350 - RNA, 19 nt, Artificial Sequence
  Description of Artificial Sequence: Synthetic oligonucleotide
acuuguugguaggucuuau

SEQ ID NO: 1143351 - RNA, 19 nt, Artificial Sequence
  Description of Artificial Sequence: Synthetic oligonucleotide
uuugcccaacggugucuac

SEQ ID NO: 1143352 - RNA, 19 nt, Artificial Sequence
  Description of Artificial Sequence: Synthetic oligonucleotide
gagaagcuccagaggcgcc

SEQ ID NO: 1143353 - RNA, 19 nt, Artificial Sequence
  Description of Artificial Sequence: Synthetic oligonucleotide
uauauuccgggugcccauu

SEQ ID NO: 1143354 - RNA, 19 nt, Artificial Sequence
  Description of Artificial Sequence: Synthetic oligonucleotide
gagucgucucugcucggga

SEQ ID NO: 1143355 - RNA, 19 nt, Artificial Sequence
  Description of Artificial Sequence: Synthetic oligonucleotide
ccguugacacucucagucc

SEQ ID NO: 1143356 - RNA, 19 nt, Artificial Sequence
  Description of Artificial Sequence: Synthetic oligonucleotide
guaucgaaugcugaauuuu

SEQ ID NO: 1143357 - RNA, 19 nt, Artificial Sequence
  Description of Artificial Sequence: Synthetic oligonucleotide
gccacuucggucucucuuc

SEQ ID NO: 1143358 - RNA, 19 nt, Artificial Sequence
  Description of Artificial Sequence: Synthetic oligonucleotide
cccuagucaacuucauauc

SEQ ID NO: 1143359 - RNA, 19 nt, Artificial Sequence
  Description of Artificial Sequence: Synthetic oligonucleotide
acgccugugcugggaacac

SEQ ID NO: 1143360 - RNA, 19 nt, Artificial Sequence
  Description of Artificial Sequence: Synthetic oligonucleotide
cccgacaguguaaaccaac

SEQ ID NO: 1143361 - RNA, 19 nt, Artificial Sequence
  Description of Artificial Sequence: Synthetic oligonucleotide
ggagucgucucugcucggg

SEQ ID NO: 1143362 - RNA, 19 nt, Artificial Sequence
  Description of Artificial Sequence: Synthetic oligonucleotide
gcagccgcguccugguccg

SEQ ID NO: 1143363 - RNA, 19 nt, Artificial Sequence
  Description of Artificial Sequence: Synthetic oligonucleotide
cucacccgacaguguaaac

SEQ ID NO: 1143364 - RNA, 19 nt, Artificial Sequence
  Description of Artificial Sequence: Synthetic oligonucleotide
cguugacacucucaguccc

SEQ ID NO: 1143365 - RNA, 19 nt, Artificial Sequence
  Description of Artificial Sequence: Synthetic oligonucleotide
uucuccgcuccuucugguu

SEQ ID NO: 1143366 - RNA, 19 nt, Artificial Sequence
  Description of Artificial Sequence: Synthetic oligonucleotide
ugccuacagcguuggcaca

SEQ ID NO: 1143367 - RNA, 19 nt, Artificial Sequence
  Description of Artificial Sequence: Synthetic oligonucleotide
uagcucauucaagcacacu

SEQ ID NO: 1143368 - RNA, 19 nt, Artificial Sequence
  Description of Artificial Sequence: Synthetic oligonucleotide
caacgccugugcugggaac

SEQ ID NO: 1143369 - RNA, 19 nt, Artificial Sequence
  Description of Artificial Sequence: Synthetic oligonucleotide
gggauuguaacgugcggcu

SEQ ID NO: 1143370 - RNA, 19 nt, Artificial Sequence
  Description of Artificial Sequence: Synthetic oligonucleotide
gagguggcaacugauucau

SEQ ID NO: 1143371 - RNA, 19 nt, Artificial Sequence
  Description of Artificial Sequence: Synthetic oligonucleotide
ggauuguaacgugcggcug

SEQ ID NO: 1143372 - RNA, 19 nt, Artificial Sequence
  Description of Artificial Sequence: Synthetic oligonucleotide
ggacucacaggugggcucc

SEQ ID NO: 1143373 - RNA, 19 nt, Artificial Sequence
  Description of Artificial Sequence: Synthetic oligonucleotide
aacgugcggcugccagugu

SEQ ID NO: 1143374 - RNA, 19 nt, Artificial Sequence
  Description of Artificial Sequence: Synthetic oligonucleotide
gcaaguuuggaggaucuua

SEQ ID NO: 1143375 - RNA, 19 nt, Artificial Sequence
  Description of Artificial Sequence: Synthetic oligonucleotide
caccuacagacaucaaacu

SEQ ID NO: 1143376 - RNA, 19 nt, Artificial Sequence
  Description of Artificial Sequence: Synthetic oligonucleotide
gacaagcacauaagcgaua

SEQ ID NO: 1143377 - RNA, 19 nt, Artificial Sequence
  Description of Artificial Sequence: Synthetic oligonucleotide
gccaucgccgcguccugcg

SEQ ID NO: 1143378 - RNA, 19 nt, Artificial Sequence
  Description of Artificial Sequence: Synthetic oligonucleotide
cugguuuaacccuuuuauu

SEQ ID NO: 1143379 - RNA, 19 nt, Artificial Sequence
  Description of Artificial Sequence: Synthetic oligonucleotide
caaggagacccaugaugaa

SEQ ID NO: 1143380 - RNA, 19 nt, Artificial Sequence
  Description of Artificial Sequence: Synthetic oligonucleotide
gacgccguggccgggcuuc

SEQ ID NO: 1143381 - RNA, 19 nt, Artificial Sequence
  Description of Artificial Sequence: Synthetic oligonucleotide
uccccgugacgccguggcc

SEQ ID NO: 1143382 - RNA, 19 nt, Artificial Sequence
  Description of Artificial Sequence: Synthetic oligonucleotide
ccuagucaacuucauaucu

SEQ ID NO: 1143383 - RNA, 19 nt, Artificial Sequence
  Description of Artificial Sequence: Synthetic oligonucleotide
ccgacaguguaaaccaaca

SEQ ID NO: 1143384 - RNA, 19 nt, Artificial Sequence
  Description of Artificial Sequence: Synthetic oligonucleotide
acggagccaucgccgcguc

SEQ ID NO: 1143385 - RNA, 19 nt, Artificial Sequence
  Description of Artificial Sequence: Synthetic oligonucleotide
acgugcggcugccaguguu

SEQ ID NO: 1143386 - RNA, 19 nt, Artificial Sequence
  Description of Artificial Sequence: Synthetic oligonucleotide
ggugccuccuggugacaag

SEQ ID NO: 1143387 - RNA, 19 nt, Artificial Sequence
  Description of Artificial Sequence: Synthetic oligonucleotide
guaacgugcggcugccagu

SEQ ID NO: 1143388 - RNA, 19 nt, Artificial Sequence
  Description of Artificial Sequence: Synthetic oligonucleotide
ggcaacugauucauucauc

SEQ ID NO: 1143389 - RNA, 19 nt, Artificial Sequence
  Description of Artificial Sequence: Synthetic oligonucleotide
cagauugagccgcggagcu

SEQ ID NO: 1143390 - RNA, 19 nt, Artificial Sequence
  Description of Artificial Sequence: Synthetic oligonucleotide
cgcagauugagccgcggag

SEQ ID NO: 1143391 - RNA, 19 nt, Artificial Sequence
  Description of Artificial Sequence: Synthetic oligonucleotide
gcucgggauuguaacgugc

SEQ ID NO: 1143392 - RNA, 19 nt, Artificial Sequence
  Description of Artificial Sequence: Synthetic oligonucleotide
cgggauuguaacgugcggc

SEQ ID NO: 1143393 - RNA, 19 nt, Artificial Sequence
  Description of Artificial Sequence: Synthetic oligonucleotide
acgugagcucuuucccgau

SEQ ID NO: 1143394 - RNA, 19 nt, Artificial Sequence
  Description of Artificial Sequence: Synthetic oligonucleotide
guggccgggcuucuuugga

SEQ ID NO: 1143395 - RNA, 19 nt, Artificial Sequence
  Description of Artificial Sequence: Synthetic oligonucleotide
ggcgucacaggcacauccc

SEQ ID NO: 1143396 - RNA, 19 nt, Artificial Sequence
  Description of Artificial Sequence: Synthetic oligonucleotide
gagccaucgccgcguccug

SEQ ID NO: 1143397 - RNA, 19 nt, Artificial Sequence
  Description of Artificial Sequence: Synthetic oligonucleotide
gcgauauauuccgggugcc

SEQ ID NO: 1143398 - RNA, 19 nt, Artificial Sequence
  Description of Artificial Sequence: Synthetic oligonucleotide
uccgugccacuucggucuc

SEQ ID NO: 1143399 - RNA, 19 nt, Artificial Sequence
  Description of Artificial Sequence: Synthetic oligonucleotide
uuguaacgugcggcugcca

SEQ ID NO: 1143400 - RNA, 19 nt, Artificial Sequence
  Description of Artificial Sequence: Synthetic oligonucleotide
acucucagucccaccuaca

SEQ ID NO: 1143401 - RNA, 19 nt, Artificial Sequence
  Description of Artificial Sequence: Synthetic oligonucleotide
ugccaucgcuugugccuac

SEQ ID NO: 1143402 - RNA, 19 nt, Artificial Sequence
  Description of Artificial Sequence: Synthetic oligonucleotide
ccccgugacgccguggccg

SEQ ID NO: 1143403 - RNA, 19 nt, Artificial Sequence
  Description of Artificial Sequence: Synthetic oligonucleotide
auugagccgcggagcucgg

SEQ ID NO: 1143404 - RNA, 19 nt, Artificial Sequence
  Description of Artificial Sequence: Synthetic oligonucleotide
cugcgcccuccucuccccg

SEQ ID NO: 1143405 - RNA, 19 nt, Artificial Sequence
  Description of Artificial Sequence: Synthetic oligonucleotide
aggcgccccgcagauugag

SEQ ID NO: 1143406 - RNA, 19 nt, Artificial Sequence
  Description of Artificial Sequence: Synthetic oligonucleotide
ucccaccuacagacaucaa

SEQ ID NO: 1143407 - RNA, 19 nt, Artificial Sequence
  Description of Artificial Sequence: Synthetic oligonucleotide
gcauuguuggugggugaug

SEQ ID NO: 1143408 - RNA, 19 nt, Artificial Sequence
  Description of Artificial Sequence: Synthetic oligonucleotide
cugcucgggauuguaacgu

SEQ ID NO: 1143409 - RNA, 19 nt, Artificial Sequence
  Description of Artificial Sequence: Synthetic oligonucleotide
uguggacagugagcuccuc

SEQ ID NO: 1143410 - RNA, 19 nt, Artificial Sequence
  Description of Artificial Sequence: Synthetic oligonucleotide
gucguacaccgauagccuu

SEQ ID NO: 1143411 - RNA, 19 nt, Artificial Sequence
  Description of Artificial Sequence: Synthetic oligonucleotide
cccgggaguccccacggag

SEQ ID NO: 1143412 - RNA, 19 nt, Artificial Sequence
  Description of Artificial Sequence: Synthetic oligonucleotide
gcgaacucauggcgccucc

SEQ ID NO: 1143413 - RNA, 19 nt, Artificial Sequence
  Description of Artificial Sequence: Synthetic oligonucleotide
cgggaguccccacggagcc

SEQ ID NO: 1143414 - RNA, 19 nt, Artificial Sequence
  Description of Artificial Sequence: Synthetic oligonucleotide
gcccaaugacuucaugaua

SEQ ID NO: 1143415 - RNA, 19 nt, Artificial Sequence
  Description of Artificial Sequence: Synthetic oligonucleotide
gccucugucguacaccgau

SEQ ID NO: 1143416 - RNA, 19 nt, Artificial Sequence
  Description of Artificial Sequence: Synthetic oligonucleotide
ggcucccuggggugcuagg

SEQ ID NO: 1143417 - RNA, 19 nt, Artificial Sequence
  Description of Artificial Sequence: Synthetic oligonucleotide
cccgugacgccguggccgg

SEQ ID NO: 1143418 - RNA, 19 nt, Artificial Sequence
  Description of Artificial Sequence: Synthetic oligonucleotide
guccugcgcccuccucucc

SEQ ID NO: 1143419 - RNA, 19 nt, Artificial Sequence
  Description of Artificial Sequence: Synthetic oligonucleotide
caagcacauaagcgauaua

SEQ ID NO: 1143420 - RNA, 19 nt, Artificial Sequence
  Description of Artificial Sequence: Synthetic oligonucleotide
ccgggugcccauucccagc

SEQ ID NO: 1143421 - RNA, 19 nt, Artificial Sequence
  Description of Artificial Sequence: Synthetic oligonucleotide
cagcggaccccgggagucc

SEQ ID NO: 1143422 - RNA, 19 nt, Artificial Sequence
  Description of Artificial Sequence: Synthetic oligonucleotide
cguggccgggcuucuuugg

SEQ ID NO: 1143423 - RNA, 19 nt, Artificial Sequence
  Description of Artificial Sequence: Synthetic oligonucleotide
cgcguccugguccggaaag

SEQ ID NO: 1143424 - RNA, 19 nt, Artificial Sequence
  Description of Artificial Sequence: Synthetic oligonucleotide
cgugcggcugccaguguug

SEQ ID NO: 1143425 - RNA, 19 nt, Artificial Sequence
  Description of Artificial Sequence: Synthetic oligonucleotide
ggcgccucccaagaacauc

SEQ ID NO: 1143426 - RNA, 19 nt, Artificial Sequence
  Description of Artificial Sequence: Synthetic oligonucleotide
ggcgaacucauggcgccuc

SEQ ID NO: 1143427 - RNA, 19 nt, Artificial Sequence
  Description of Artificial Sequence: Synthetic oligonucleotide
accuccccgugacgccgug

SEQ ID NO: 1143428 - RNA, 19 nt, Artificial Sequence
  Description of Artificial Sequence: Synthetic oligonucleotide
acccgacaguguaaaccaa

SEQ ID NO: 1143429 - RNA, 19 nt, Artificial Sequence
  Description of Artificial Sequence: Synthetic oligonucleotide
accugccgacagagaggac

SEQ ID NO: 1143430 - RNA, 19 nt, Artificial Sequence
  Description of Artificial Sequence: Synthetic oligonucleotide
agccgcguccugguccgga

SEQ ID NO: 1143431 - RNA, 19 nt, Artificial Sequence
  Description of Artificial Sequence: Synthetic oligonucleotide
cguacaccgauagccuuuc

SEQ ID NO: 1143432 - RNA, 19 nt, Artificial Sequence
  Description of Artificial Sequence: Synthetic oligonucleotide
cccuaaaccugccgacaga

SEQ ID NO: 1143433 - RNA, 19 nt, Artificial Sequence
  Description of Artificial Sequence: Synthetic oligonucleotide
gcguccugcgcccuccucu

SEQ ID NO: 1143434 - RNA, 19 nt, Artificial Sequence
  Description of Artificial Sequence: Synthetic oligonucleotide
gaggcgccccgcagauuga

SEQ ID NO: 1143435 - RNA, 19 nt, Artificial Sequence
  Description of Artificial Sequence: Synthetic oligonucleotide
agccucugucguacaccga

SEQ ID NO: 1143436 - RNA, 19 nt, Artificial Sequence
  Description of Artificial Sequence: Synthetic oligonucleotide
ccggggugccuccugguga

SEQ ID NO: 1143437 - RNA, 19 nt, Artificial Sequence
  Description of Artificial Sequence: Synthetic oligonucleotide
cuacagcguuggcacacau

SEQ ID NO: 1143438 - RNA, 19 nt, Artificial Sequence
  Description of Artificial Sequence: Synthetic oligonucleotide
cacagcggaccccgggagu

SEQ ID NO: 1143439 - RNA, 19 nt, Artificial Sequence
  Description of Artificial Sequence: Synthetic oligonucleotide
cccggggugccuccuggug

SEQ ID NO: 1143440 - RNA, 19 nt, Artificial Sequence
  Description of Artificial Sequence: Synthetic oligonucleotide
guacaccgauagccuuucu

SEQ ID NO: 1143441 - RNA, 19 nt, Artificial Sequence
  Description of Artificial Sequence: Synthetic oligonucleotide
ccccgcagauugagccgcg

SEQ ID NO: 1143442 - RNA, 19 nt, Artificial Sequence
  Description of Artificial Sequence: Synthetic oligonucleotide
ccaucgccgcguccugcgc

SEQ ID NO: 1143443 - RNA, 19 nt, Artificial Sequence
  Description of Artificial Sequence: Synthetic oligonucleotide
ggcgccccgcagauugagc

SEQ ID NO: 1143444 - RNA, 19 nt, Artificial Sequence
  Description of Artificial Sequence: Synthetic oligonucleotide
caacggugucuacuauuuu

SEQ ID NO: 1143445 - RNA, 19 nt, Artificial Sequence
  Description of Artificial Sequence: Synthetic oligonucleotide
cgaacucauggcgccuccc

SEQ ID NO: 1143446 - RNA, 19 nt, Artificial Sequence
  Description of Artificial Sequence: Synthetic oligonucleotide
cccgcagauugagccgcgg

SEQ ID NO: 1143447 - RNA, 19 nt, Artificial Sequence
  Description of Artificial Sequence: Synthetic oligonucleotide
ccggaaagauggagaagcu

SEQ ID NO: 1143448 - RNA, 19 nt, Artificial Sequence
  Description of Artificial Sequence: Synthetic oligonucleotide
ccaagaagcuauccaucau

SEQ ID NO: 1143449 - RNA, 19 nt, Artificial Sequence
  Description of Artificial Sequence: Synthetic oligonucleotide
caacgacaccucccacugu

SEQ ID NO: 1143450 - RNA, 19 nt, Artificial Sequence
  Description of Artificial Sequence: Synthetic oligonucleotide
ccgcagauugagccgcgga

SEQ ID NO: 1143451 - RNA, 19 nt, Artificial Sequence
  Description of Artificial Sequence: Synthetic oligonucleotide
cgccucccaagaacaucgc

SEQ ID NO: 1143452 - RNA, 19 nt, Artificial Sequence
  Description of Artificial Sequence: Synthetic oligonucleotide
gccgcguccugcgcccucc

SEQ ID NO: 1143453 - RNA, 19 nt, Artificial Sequence
  Description of Artificial Sequence: Synthetic oligonucleotide
ccucugucguacaccgaua

SEQ ID NO: 1143454 - RNA, 19 nt, Artificial Sequence
  Description of Artificial Sequence: Synthetic oligonucleotide
gaguccccacggagccauc

SEQ ID NO: 1143455 - RNA, 19 nt, Artificial Sequence
  Description of Artificial Sequence: Synthetic oligonucleotide
cgugacgccguggccgggc

SEQ ID NO: 1143456 - RNA, 19 nt, Artificial Sequence
  Description of Artificial Sequence: Synthetic oligonucleotide
ccuacagcguuggcacaca

SEQ ID NO: 1143457 - RNA, 19 nt, Artificial Sequence
  Description of Artificial Sequence: Synthetic oligonucleotide
cccaacggugucuacuauu

SEQ ID NO: 1143458 - RNA, 19 nt, Artificial Sequence
  Description of Artificial Sequence: Synthetic oligonucleotide
ggaccccgggaguccccac

SEQ ID NO: 1143459 - RNA, 19 nt, Artificial Sequence
  Description of Artificial Sequence: Synthetic oligonucleotide
gccgcguccugguccggaa

SEQ ID NO: 1143460 - RNA, 19 nt, Artificial Sequence
  Description of Artificial Sequence: Synthetic oligonucleotide
ccgaugcuguuaucagcua

SEQ ID NO: 1143461 - RNA, 19 nt, Artificial Sequence
  Description of Artificial Sequence: Synthetic oligonucleotide
ccagaggcgccccgcagau

SEQ ID NO: 1143462 - RNA, 19 nt, Artificial Sequence
  Description of Artificial Sequence: Synthetic oligonucleotide
gggccaccagcggcgaacu

SEQ ID NO: 1143463 - RNA, 19 nt, Artificial Sequence
  Description of Artificial Sequence: Synthetic oligonucleotide
gcccaacggugucuacuau

SEQ ID NO: 1143464 - RNA, 19 nt, Artificial Sequence
  Description of Artificial Sequence: Synthetic oligonucleotide
ggggugccuccuggugaca

SEQ ID NO: 1143465 - RNA, 19 nt, Artificial Sequence
  Description of Artificial Sequence: Synthetic oligonucleotide
ccccguugacacucucagu

SEQ ID NO: 1143466 - RNA, 19 nt, Artificial Sequence
  Description of Artificial Sequence: Synthetic oligonucleotide
ccgugacgccguggccggg

SEQ ID NO: 1143467 - RNA, 19 nt, Artificial Sequence
  Description of Artificial Sequence: Synthetic oligonucleotide
ccgcguccugguccggaaa

SEQ ID NO: 1143468 - RNA, 19 nt, Artificial Sequence
  Description of Artificial Sequence: Synthetic oligonucleotide
ccccgggaguccccacgga

SEQ ID NO: 1143469 - RNA, 19 nt, Artificial Sequence
  Description of Artificial Sequence: Synthetic oligonucleotide
cgcguccugcgcccuccuc

SEQ ID NO: 1143470 - RNA, 19 nt, Artificial Sequence
  Description of Artificial Sequence: Synthetic oligonucleotide
cggaccccgggagucccca

SEQ ID NO: 1143471 - RNA, 19 nt, Artificial Sequence
  Description of Artificial Sequence: Synthetic oligonucleotide
cagaggcgccccgcagauu

SEQ ID NO: 1143472 - RNA, 19 nt, Artificial Sequence
  Description of Artificial Sequence: Synthetic oligonucleotide
cgccgcguccugcgcccuc

SEQ ID NO: 1143473 - RNA, 19 nt, Artificial Sequence
  Description of Artificial Sequence: Synthetic oligonucleotide
ccgcguccugcgcccuccu

SEQ ID NO: 1143474 - RNA, 19 nt, Artificial Sequence
  Description of Artificial Sequence: Synthetic oligonucleotide
cgccguggccgggcuucuu

SEQ ID NO: 1143475 - RNA, 19 nt, Artificial Sequence
  Description of Artificial Sequence: Synthetic oligonucleotide
aauguuaagaauccuacag

SEQ ID NO: 1143476 - RNA, 19 nt, Artificial Sequence
  Description of Artificial Sequence: Synthetic oligonucleotide
acuguucuaaugcagaucc

SEQ ID NO: 1143477 - RNA, 19 nt, Artificial Sequence
  Description of Artificial Sequence: Synthetic oligonucleotide
auaauaugauuccuaaucc

SEQ ID NO: 1143478 - RNA, 19 nt, Artificial Sequence
  Description of Artificial Sequence: Synthetic oligonucleotide
aguaacucaauguauggcc

SEQ ID NO: 1143479 - RNA, 19 nt, Artificial Sequence
  Description of Artificial Sequence: Synthetic oligonucleotide
aacaauaccaguguuuagc

SEQ ID NO: 1143480 - RNA, 19 nt, Artificial Sequence
  Description of Artificial Sequence: Synthetic oligonucleotide
uuuagaacaaauaauuuaa

SEQ ID NO: 1143481 - RNA, 19 nt, Artificial Sequence
  Description of Artificial Sequence: Synthetic oligonucleotide
uuaaucaacaauaccagug

SEQ ID NO: 1143482 - RNA, 19 nt, Artificial Sequence
  Description of Artificial Sequence: Synthetic oligonucleotide
uuuagcuuaauguagccag

SEQ ID NO: 1143483 - RNA, 19 nt, Artificial Sequence
  Description of Artificial Sequence: Synthetic oligonucleotide
auaacaaccaauuaccuga

SEQ ID NO: 1143484 - RNA, 19 nt, Artificial Sequence
  Description of Artificial Sequence: Synthetic oligonucleotide
aacacaaacccuugcgucc

SEQ ID NO: 1143485 - RNA, 19 nt, Artificial Sequence
  Description of Artificial Sequence: Synthetic oligonucleotide
aaauaggauaaccuuuaac

SEQ ID NO: 1143486 - RNA, 19 nt, Artificial Sequence
  Description of Artificial Sequence: Synthetic oligonucleotide
uacaauaucguaaagcuuc

SEQ ID NO: 1143487 - RNA, 19 nt, Artificial Sequence
  Description of Artificial Sequence: Synthetic oligonucleotide
uucaauguaaauacucagg

SEQ ID NO: 1143488 - RNA, 19 nt, Artificial Sequence
  Description of Artificial Sequence: Synthetic oligonucleotide
ugagcaauccgccaggacg

SEQ ID NO: 1143489 - RNA, 19 nt, Artificial Sequence
  Description of Artificial Sequence: Synthetic oligonucleotide
guuaauuaagcuuuggcug

SEQ ID NO: 1143490 - RNA, 19 nt, Artificial Sequence
  Description of Artificial Sequence: Synthetic oligonucleotide
aaucacauaagguaugaca

SEQ ID NO: 1143491 - RNA, 19 nt, Artificial Sequence
  Description of Artificial Sequence: Synthetic oligonucleotide
uaaaagugcuguaauauug

SEQ ID NO: 1143492 - RNA, 19 nt, Artificial Sequence
  Description of Artificial Sequence: Synthetic oligonucleotide
aaagaaaugccugaacagg

SEQ ID NO: 1143493 - RNA, 19 nt, Artificial Sequence
  Description of Artificial Sequence: Synthetic oligonucleotide
aauaacaaccaauuaccug

SEQ ID NO: 1143494 - RNA, 19 nt, Artificial Sequence
  Description of Artificial Sequence: Synthetic oligonucleotide
uuaauguuaagaauccuac

SEQ ID NO: 1143495 - RNA, 19 nt, Artificial Sequence
  Description of Artificial Sequence: Synthetic oligonucleotide
ucaauguaaauacucaggu

SEQ ID NO: 1143496 - RNA, 19 nt, Artificial Sequence
  Description of Artificial Sequence: Synthetic oligonucleotide
ugauucacuaaacacaaac

SEQ ID NO: 1143497 - RNA, 19 nt, Artificial Sequence
  Description of Artificial Sequence: Synthetic oligonucleotide
uguguuuauaaucugguaa

SEQ ID NO: 1143498 - RNA, 19 nt, Artificial Sequence
  Description of Artificial Sequence: Synthetic oligonucleotide
auguuaagaauccuacagc

SEQ ID NO: 1143499 - RNA, 19 nt, Artificial Sequence
  Description of Artificial Sequence: Synthetic oligonucleotide
acaguuaaucaacaauacc

SEQ ID NO: 1143500 - RNA, 19 nt, Artificial Sequence
  Description of Artificial Sequence: Synthetic oligonucleotide
uucaauugaauucuuuaug

SEQ ID NO: 1143501 - RNA, 19 nt, Artificial Sequence
  Description of Artificial Sequence: Synthetic oligonucleotide
uaauauuguguuuauaauc

SEQ ID NO: 1143502 - RNA, 19 nt, Artificial Sequence
  Description of Artificial Sequence: Synthetic oligonucleotide
uuaauuaagcuuuggcugc

SEQ ID NO: 1143503 - RNA, 19 nt, Artificial Sequence
  Description of Artificial Sequence: Synthetic oligonucleotide
aacccuugcguccagcggc

SEQ ID NO: 1143504 - RNA, 19 nt, Artificial Sequence
  Description of Artificial Sequence: Synthetic oligonucleotide
agguuaauuaagcuuuggc

SEQ ID NO: 1143505 - RNA, 19 nt, Artificial Sequence
  Description of Artificial Sequence: Synthetic oligonucleotide
caguaaaagauucuggacc

SEQ ID NO: 1143506 - RNA, 19 nt, Artificial Sequence
  Description of Artificial Sequence: Synthetic oligonucleotide
agguaugacaaagaguucc

SEQ ID NO: 1143507 - RNA, 19 nt, Artificial Sequence
  Description of Artificial Sequence: Synthetic oligonucleotide
uuugcuaguaaauuucaca

SEQ ID NO: 1143508 - RNA, 19 nt, Artificial Sequence
  Description of Artificial Sequence: Synthetic oligonucleotide
aauguagccagucaugaau

SEQ ID NO: 1143509 - RNA, 19 nt, Artificial Sequence
  Description of Artificial Sequence: Synthetic oligonucleotide
uggaucauagguuugaaaa

SEQ ID NO: 1143510 - RNA, 19 nt, Artificial Sequence
  Description of Artificial Sequence: Synthetic oligonucleotide
uuuaauguuaagaauccua

SEQ ID NO: 1143511 - RNA, 19 nt, Artificial Sequence
  Description of Artificial Sequence: Synthetic oligonucleotide
gucacuucggacaugaugg

SEQ ID NO: 1143512 - RNA, 19 nt, Artificial Sequence
  Description of Artificial Sequence: Synthetic oligonucleotide
auacauuagaaacugcaug

SEQ ID NO: 1143513 - RNA, 19 nt, Artificial Sequence
  Description of Artificial Sequence: Synthetic oligonucleotide
caguuaaucaacaauacca

SEQ ID NO: 1143514 - RNA, 19 nt, Artificial Sequence
  Description of Artificial Sequence: Synthetic oligonucleotide
aaauggacccaauaauaug

SEQ ID NO: 1143515 - RNA, 19 nt, Artificial Sequence
  Description of Artificial Sequence: Synthetic oligonucleotide
aaaaggacggcggaacggc

SEQ ID NO: 1143516 - RNA, 19 nt, Artificial Sequence
  Description of Artificial Sequence: Synthetic oligonucleotide
cauaagguaugacaaagag

SEQ ID NO: 1143517 - RNA, 19 nt, Artificial Sequence
  Description of Artificial Sequence: Synthetic oligonucleotide
ucaaacuguucuaaugcag

SEQ ID NO: 1143518 - RNA, 19 nt, Artificial Sequence
  Description of Artificial Sequence: Synthetic oligonucleotide
aguaaaagauucuggacca

SEQ ID NO: 1143519 - RNA, 19 nt, Artificial Sequence
  Description of Artificial Sequence: Synthetic oligonucleotide
aauggacccaauaauauga

SEQ ID NO: 1143520 - RNA, 19 nt, Artificial Sequence
  Description of Artificial Sequence: Synthetic oligonucleotide
auggauaccgagaaguugc

SEQ ID NO: 1143521 - RNA, 19 nt, Artificial Sequence
  Description of Artificial Sequence: Synthetic oligonucleotide
acaaccaauuaccugacug

SEQ ID NO: 1143522 - RNA, 19 nt, Artificial Sequence
  Description of Artificial Sequence: Synthetic oligonucleotide
uuagaaacugcaugucccg

SEQ ID NO: 1143523 - RNA, 19 nt, Artificial Sequence
  Description of Artificial Sequence: Synthetic oligonucleotide
aaauaaucacauaagguau

SEQ ID NO: 1143524 - RNA, 19 nt, Artificial Sequence
  Description of Artificial Sequence: Synthetic oligonucleotide
uaaaauaggauaaccuuua

SEQ ID NO: 1143525 - RNA, 19 nt, Artificial Sequence
  Description of Artificial Sequence: Synthetic oligonucleotide
auaccgagaaguugcauuc

SEQ ID NO: 1143526 - RNA, 19 nt, Artificial Sequence
  Description of Artificial Sequence: Synthetic oligonucleotide
guaagaaccaaccuuacaa

SEQ ID NO: 1143527 - RNA, 19 nt, Artificial Sequence
  Description of Artificial Sequence: Synthetic oligonucleotide
uguucauggauaccgagaa

SEQ ID NO: 1143528 - RNA, 19 nt, Artificial Sequence
  Description of Artificial Sequence: Synthetic oligonucleotide
ugguaaauaacaaccaauu

SEQ ID NO: 1143529 - RNA, 19 nt, Artificial Sequence
  Description of Artificial Sequence: Synthetic oligonucleotide
aaaccuaacuucugcauau

SEQ ID NO: 1143530 - RNA, 19 nt, Artificial Sequence
  Description of Artificial Sequence: Synthetic oligonucleotide
aacucaauugagugaagga

SEQ ID NO: 1143531 - RNA, 19 nt, Artificial Sequence
  Description of Artificial Sequence: Synthetic oligonucleotide
uguagugguagacaguaaa

SEQ ID NO: 1143532 - RNA, 19 nt, Artificial Sequence
  Description of Artificial Sequence: Synthetic oligonucleotide
gauucacuaaacacaaacc

SEQ ID NO: 1143533 - RNA, 19 nt, Artificial Sequence
  Description of Artificial Sequence: Synthetic oligonucleotide
aauaggagugucaucuguc

SEQ ID NO: 1143534 - RNA, 19 nt, Artificial Sequence
  Description of Artificial Sequence: Synthetic oligonucleotide
gacccaauaauaugauucc

SEQ ID NO: 1143535 - RNA, 19 nt, Artificial Sequence
  Description of Artificial Sequence: Synthetic oligonucleotide
ucuucaauugaauucuuua

SEQ ID NO: 1143536 - RNA, 19 nt, Artificial Sequence
  Description of Artificial Sequence: Synthetic oligonucleotide
aguuaaucaacaauaccag

SEQ ID NO: 1143537 - RNA, 19 nt, Artificial Sequence
  Description of Artificial Sequence: Synthetic oligonucleotide
cauuagaaacugcaugucc

SEQ ID NO: 1143538 - RNA, 19 nt, Artificial Sequence
  Description of Artificial Sequence: Synthetic oligonucleotide
agugguagacaguaaaaga

SEQ ID NO: 1143539 - RNA, 19 nt, Artificial Sequence
  Description of Artificial Sequence: Synthetic oligonucleotide
auuaccugacugcagaagu

SEQ ID NO: 1143540 - RNA, 19 nt, Artificial Sequence
  Description of Artificial Sequence: Synthetic oligonucleotide
augacaaagaguuccuucu

SEQ ID NO: 1143541 - RNA, 19 nt, Artificial Sequence
  Description of Artificial Sequence: Synthetic oligonucleotide
uucaaguaagaaccaaccu

SEQ ID NO: 1143542 - RNA, 19 nt, Artificial Sequence
  Description of Artificial Sequence: Synthetic oligonucleotide
caugaaucugaauggaaug

SEQ ID NO: 1143543 - RNA, 19 nt, Artificial Sequence
  Description of Artificial Sequence: Synthetic oligonucleotide
uacacggggucuaucaaag

SEQ ID NO: 1143544 - RNA, 19 nt, Artificial Sequence
  Description of Artificial Sequence: Synthetic oligonucleotide
auaggauaaccuuuaacau

SEQ ID NO: 1143545 - RNA, 19 nt, Artificial Sequence
  Description of Artificial Sequence: Synthetic oligonucleotide
ucugguaaauaacaaccaa

SEQ ID NO: 1143546 - RNA, 19 nt, Artificial Sequence
  Description of Artificial Sequence: Synthetic oligonucleotide
aggacgacuucucagagga

SEQ ID NO: 1143547 - RNA, 19 nt, Artificial Sequence
  Description of Artificial Sequence: Synthetic oligonucleotide
cacaguaacucaauguaug

SEQ ID NO: 1143548 - RNA, 19 nt, Artificial Sequence
  Description of Artificial Sequence: Synthetic oligonucleotide
caugaauccccacuuaaac

SEQ ID NO: 1143549 - RNA, 19 nt, Artificial Sequence
  Description of Artificial Sequence: Synthetic oligonucleotide
uauauacucaggaucugaa

SEQ ID NO: 1143550 - RNA, 19 nt, Artificial Sequence
  Description of Artificial Sequence: Synthetic oligonucleotide
uaugacaaagaguuccuuc

SEQ ID NO: 1143551 - RNA, 19 nt, Artificial Sequence
  Description of Artificial Sequence: Synthetic oligonucleotide
aucugaauggaaugagauc

SEQ ID NO: 1143552 - RNA, 19 nt, Artificial Sequence
  Description of Artificial Sequence: Synthetic oligonucleotide
caaccaauuaccugacugc

SEQ ID NO: 1143553 - RNA, 19 nt, Artificial Sequence
  Description of Artificial Sequence: Synthetic oligonucleotide
cagguaacucaauugagug

SEQ ID NO: 1143554 - RNA, 19 nt, Artificial Sequence
  Description of Artificial Sequence: Synthetic oligonucleotide
uagugguagacaguaaaag

SEQ ID NO: 1143555 - RNA, 19 nt, Artificial Sequence
  Description of Artificial Sequence: Synthetic oligonucleotide
aaucugaauggaaugagau

SEQ ID NO: 1143556 - RNA, 19 nt, Artificial Sequence
  Description of Artificial Sequence: Synthetic oligonucleotide
uaucugagucuuauuauaa

SEQ ID NO: 1143557 - RNA, 19 nt, Artificial Sequence
  Description of Artificial Sequence: Synthetic oligonucleotide
uaauguuaagaauccuaca

SEQ ID NO: 1143558 - RNA, 19 nt, Artificial Sequence
  Description of Artificial Sequence: Synthetic oligonucleotide
ugaaucugaauggaaugag

SEQ ID NO: 1143559 - RNA, 19 nt, Artificial Sequence
  Description of Artificial Sequence: Synthetic oligonucleotide
gagacucgagaaaaggacg

SEQ ID NO: 1143560 - RNA, 19 nt, Artificial Sequence
  Description of Artificial Sequence: Synthetic oligonucleotide
aauguauggccauuugguu

SEQ ID NO: 1143561 - RNA, 19 nt, Artificial Sequence
  Description of Artificial Sequence: Synthetic oligonucleotide
agaaaaggacggcggaacg

SEQ ID NO: 1143562 - RNA, 19 nt, Artificial Sequence
  Description of Artificial Sequence: Synthetic oligonucleotide
aaccaaccuuacaauaucg

SEQ ID NO: 1143563 - RNA, 19 nt, Artificial Sequence
  Description of Artificial Sequence: Synthetic oligonucleotide
uagccagucaugaaucccc

SEQ ID NO: 1143564 - RNA, 19 nt, Artificial Sequence
  Description of Artificial Sequence: Synthetic oligonucleotide
cucugauucacuaaacaca

SEQ ID NO: 1143565 - RNA, 19 nt, Artificial Sequence
  Description of Artificial Sequence: Synthetic oligonucleotide
uguaucugagucuuauuau

SEQ ID NO: 1143566 - RNA, 19 nt, Artificial Sequence
  Description of Artificial Sequence: Synthetic oligonucleotide
agauuuauauacucaggau

SEQ ID NO: 1143567 - RNA, 19 nt, Artificial Sequence
  Description of Artificial Sequence: Synthetic oligonucleotide
caauccauuguagugguag

SEQ ID NO: 1143568 - RNA, 19 nt, Artificial Sequence
  Description of Artificial Sequence: Synthetic oligonucleotide
uuguucauggauaccgaga

SEQ ID NO: 1143569 - RNA, 19 nt, Artificial Sequence
  Description of Artificial Sequence: Synthetic oligonucleotide
aaacccuugcguccagcgg

SEQ ID NO: 1143570 - RNA, 19 nt, Artificial Sequence
  Description of Artificial Sequence: Synthetic oligonucleotide
cuuccucugagcaauccgc

SEQ ID NO: 1143571 - RNA, 19 nt, Artificial Sequence
  Description of Artificial Sequence: Synthetic oligonucleotide
cucgagaaaaggacggcgg

SEQ ID NO: 1143572 - RNA, 19 nt, Artificial Sequence
  Description of Artificial Sequence: Synthetic oligonucleotide
auggaaugagauccccggc

SEQ ID NO: 1143573 - RNA, 19 nt, Artificial Sequence
  Description of Artificial Sequence: Synthetic oligonucleotide
augaauccccacuuaaaca

SEQ ID NO: 1143574 - RNA, 19 nt, Artificial Sequence
  Description of Artificial Sequence: Synthetic oligonucleotide
gugcaauaacagcacaggg

SEQ ID NO: 1143575 - RNA, 19 nt, Artificial Sequence
  Description of Artificial Sequence: Synthetic oligonucleotide
aauccauuguagugguaga

SEQ ID NO: 1143576 - RNA, 19 nt, Artificial Sequence
  Description of Artificial Sequence: Synthetic oligonucleotide
aauccuucuggaucuaauu

SEQ ID NO: 1143577 - RNA, 19 nt, Artificial Sequence
  Description of Artificial Sequence: Synthetic oligonucleotide
aaaauaggauaaccuuuaa

SEQ ID NO: 1143578 - RNA, 19 nt, Artificial Sequence
  Description of Artificial Sequence: Synthetic oligonucleotide
uaagaaccaaccuuacaau

SEQ ID NO: 1143579 - RNA, 19 nt, Artificial Sequence
  Description of Artificial Sequence: Synthetic oligonucleotide
ugaaggagagcgcucugug

SEQ ID NO: 1143580 - RNA, 19 nt, Artificial Sequence
  Description of Artificial Sequence: Synthetic oligonucleotide
auauuguguuuauaaucug

SEQ ID NO: 1143581 - RNA, 19 nt, Artificial Sequence
  Description of Artificial Sequence: Synthetic oligonucleotide
acaauaucguaaagcuucc

SEQ ID NO: 1143582 - RNA, 19 nt, Artificial Sequence
  Description of Artificial Sequence: Synthetic oligonucleotide
uucuaaugcagaucccucu

SEQ ID NO: 1143583 - RNA, 19 nt, Artificial Sequence
  Description of Artificial Sequence: Synthetic oligonucleotide
uaauuguuauuuacaguua

SEQ ID NO: 1143584 - RNA, 19 nt, Artificial Sequence
  Description of Artificial Sequence: Synthetic oligonucleotide
uuaccugacugcagaagug

SEQ ID NO: 1143585 - RNA, 19 nt, Artificial Sequence
  Description of Artificial Sequence: Synthetic oligonucleotide
uaggagguuaauuaagcuu

SEQ ID NO: 1143586 - RNA, 19 nt, Artificial Sequence
  Description of Artificial Sequence: Synthetic oligonucleotide
cucaauugagugaaggaga

SEQ ID NO: 1143587 - RNA, 19 nt, Artificial Sequence
  Description of Artificial Sequence: Synthetic oligonucleotide
ugcuaguaaauuucacaga

SEQ ID NO: 1143588 - RNA, 19 nt, Artificial Sequence
  Description of Artificial Sequence: Synthetic oligonucleotide
uuaauaggagugucaucug

SEQ ID NO: 1143589 - RNA, 19 nt, Artificial Sequence
  Description of Artificial Sequence: Synthetic oligonucleotide
ugccaacaauccaaauagg

SEQ ID NO: 1143590 - RNA, 19 nt, Artificial Sequence
  Description of Artificial Sequence: Synthetic oligonucleotide
cuuguucauggauaccgag

SEQ ID NO: 1143591 - RNA, 19 nt, Artificial Sequence
  Description of Artificial Sequence: Synthetic oligonucleotide
ugucaagccggccgaagcc

SEQ ID NO: 1143592 - RNA, 19 nt, Artificial Sequence
  Description of Artificial Sequence: Synthetic oligonucleotide
guguuuauaaucugguaaa

SEQ ID NO: 1143593 - RNA, 19 nt, Artificial Sequence
  Description of Artificial Sequence: Synthetic oligonucleotide
aaccaauuaccugacugca

SEQ ID NO: 1143594 - RNA, 19 nt, Artificial Sequence
  Description of Artificial Sequence: Synthetic oligonucleotide
ucaugaauccccacuuaaa

SEQ ID NO: 1143595 - RNA, 19 nt, Artificial Sequence
  Description of Artificial Sequence: Synthetic oligonucleotide
cacggggucuaucaaaggc

SEQ ID NO: 1143596 - RNA, 19 nt, Artificial Sequence
  Description of Artificial Sequence: Synthetic oligonucleotide
ucaccaucccauacauuag

SEQ ID NO: 1143597 - RNA, 19 nt, Artificial Sequence
  Description of Artificial Sequence: Synthetic oligonucleotide
uuacaauaucguaaagcuu

SEQ ID NO: 1143598 - RNA, 19 nt, Artificial Sequence
  Description of Artificial Sequence: Synthetic oligonucleotide
aguaagaaccaaccuuaca

SEQ ID NO: 1143599 - RNA, 19 nt, Artificial Sequence
  Description of Artificial Sequence: Synthetic oligonucleotide
ugucacaagcacuuucuaa

SEQ ID NO: 1143600 - RNA, 19 nt, Artificial Sequence
  Description of Artificial Sequence: Synthetic oligonucleotide
gagacagcguuuaauagga

SEQ ID NO: 1143601 - RNA, 19 nt, Artificial Sequence
  Description of Artificial Sequence: Synthetic oligonucleotide
ugcuguaauauuguguuua

SEQ ID NO: 1143602 - RNA, 19 nt, Artificial Sequence
  Description of Artificial Sequence: Synthetic oligonucleotide
auuguagugguagacagua

SEQ ID NO: 1143603 - RNA, 19 nt, Artificial Sequence
  Description of Artificial Sequence: Synthetic oligonucleotide
ggauuaaaauaggauaacc

SEQ ID NO: 1143604 - RNA, 19 nt, Artificial Sequence
  Description of Artificial Sequence: Synthetic oligonucleotide
uuagcuuaauguagccagu

SEQ ID NO: 1143605 - RNA, 19 nt, Artificial Sequence
  Description of Artificial Sequence: Synthetic oligonucleotide
aacacggugagguggguuu

SEQ ID NO: 1143606 - RNA, 19 nt, Artificial Sequence
  Description of Artificial Sequence: Synthetic oligonucleotide
gcuaguaaauuucacagaa

SEQ ID NO: 1143607 - RNA, 19 nt, Artificial Sequence
  Description of Artificial Sequence: Synthetic oligonucleotide
caaacccuugcguccagcg

SEQ ID NO: 1143608 - RNA, 19 nt, Artificial Sequence
  Description of Artificial Sequence: Synthetic oligonucleotide
acucgagaaaaggacggcg

SEQ ID NO: 1143609 - RNA, 19 nt, Artificial Sequence
  Description of Artificial Sequence: Synthetic oligonucleotide
auaaucacauaagguauga

SEQ ID NO: 1143610 - RNA, 19 nt, Artificial Sequence
  Description of Artificial Sequence: Synthetic oligonucleotide
ucgagaaaaggacggcgga

SEQ ID NO: 1143611 - RNA, 19 nt, Artificial Sequence
  Description of Artificial Sequence: Synthetic oligonucleotide
gguuaauuaagcuuuggcu

SEQ ID NO: 1143612 - RNA, 19 nt, Artificial Sequence
  Description of Artificial Sequence: Synthetic oligonucleotide
uaacaaccaauuaccugac

SEQ ID NO: 1143613 - RNA, 19 nt, Artificial Sequence
  Description of Artificial Sequence: Synthetic oligonucleotide
cugaauggaaugagauccc

SEQ ID NO: 1143614 - RNA, 19 nt, Artificial Sequence
  Description of Artificial Sequence: Synthetic oligonucleotide
ggugcaauaacagcacagg

SEQ ID NO: 1143615 - RNA, 19 nt, Artificial Sequence
  Description of Artificial Sequence: Synthetic oligonucleotide
guguuuagcuuaauguagc

SEQ ID NO: 1143616 - RNA, 19 nt, Artificial Sequence
  Description of Artificial Sequence: Synthetic oligonucleotide
ggacccaauaauaugauuc

SEQ ID NO: 1143617 - RNA, 19 nt, Artificial Sequence
  Description of Artificial Sequence: Synthetic oligonucleotide
ucacauaagguaugacaaa

SEQ ID NO: 1143618 - RNA, 19 nt, Artificial Sequence
  Description of Artificial Sequence: Synthetic oligonucleotide
auguauggccauuugguuu

SEQ ID NO: 1143619 - RNA, 19 nt, Artificial Sequence
  Description of Artificial Sequence: Synthetic oligonucleotide
ucacuucggacaugauggg

SEQ ID NO: 1143620 - RNA, 19 nt, Artificial Sequence
  Description of Artificial Sequence: Synthetic oligonucleotide
aaggggagacucgagaaaa

SEQ ID NO: 1143621 - RNA, 19 nt, Artificial Sequence
  Description of Artificial Sequence: Synthetic oligonucleotide
agcguuuaauaggaguguc

SEQ ID NO: 1143622 - RNA, 19 nt, Artificial Sequence
  Description of Artificial Sequence: Synthetic oligonucleotide
gagaccucgccugucaagc

SEQ ID NO: 1143623 - RNA, 19 nt, Artificial Sequence
  Description of Artificial Sequence: Synthetic oligonucleotide
gaccucgccugucaagccg

SEQ ID NO: 1143624 - RNA, 19 nt, Artificial Sequence
  Description of Artificial Sequence: Synthetic oligonucleotide
uggagauuucaaguaagaa

SEQ ID NO: 1143625 - RNA, 19 nt, Artificial Sequence
  Description of Artificial Sequence: Synthetic oligonucleotide
aacugcaugucccgucagu

SEQ ID NO: 1143626 - RNA, 19 nt, Artificial Sequence
  Description of Artificial Sequence: Synthetic oligonucleotide
agcuuaauguagccaguca

SEQ ID NO: 1143627 - RNA, 19 nt, Artificial Sequence
  Description of Artificial Sequence: Synthetic oligonucleotide
caguaacucaauguauggc

SEQ ID NO: 1143628 - RNA, 19 nt, Artificial Sequence
  Description of Artificial Sequence: Synthetic oligonucleotide
uguccgacagcccggggcu

SEQ ID NO: 1143629 - RNA, 19 nt, Artificial Sequence
  Description of Artificial Sequence: Synthetic oligonucleotide
caauguauggccauuuggu

SEQ ID NO: 1143630 - RNA, 19 nt, Artificial Sequence
  Description of Artificial Sequence: Synthetic oligonucleotide
gaaucugaauggaaugaga

SEQ ID NO: 1143631 - RNA, 19 nt, Artificial Sequence
  Description of Artificial Sequence: Synthetic oligonucleotide
uuguguuuauaaucuggua

SEQ ID NO: 1143632 - RNA, 19 nt, Artificial Sequence
  Description of Artificial Sequence: Synthetic oligonucleotide
guaucugagucuuauuaua

SEQ ID NO: 1143633 - RNA, 19 nt, Artificial Sequence
  Description of Artificial Sequence: Synthetic oligonucleotide
agaccucgccugucaagcc

SEQ ID NO: 1143634 - RNA, 19 nt, Artificial Sequence
  Description of Artificial Sequence: Synthetic oligonucleotide
ugcagaagugaugaacuuc

SEQ ID NO: 1143635 - RNA, 19 nt, Artificial Sequence
  Description of Artificial Sequence: Synthetic oligonucleotide
agaaccaaccuuacaauau

SEQ ID NO: 1143636 - RNA, 19 nt, Artificial Sequence
  Description of Artificial Sequence: Synthetic oligonucleotide
aucugagucuuauuauaaa

SEQ ID NO: 1143637 - RNA, 19 nt, Artificial Sequence
  Description of Artificial Sequence: Synthetic oligonucleotide
cuuugcuucccggacuccg

SEQ ID NO: 1143638 - RNA, 19 nt, Artificial Sequence
  Description of Artificial Sequence: Synthetic oligonucleotide
cauggauaccgagaaguug

SEQ ID NO: 1143639 - RNA, 19 nt, Artificial Sequence
  Description of Artificial Sequence: Synthetic oligonucleotide
gguaacucaauugagugaa

SEQ ID NO: 1143640 - RNA, 19 nt, Artificial Sequence
  Description of Artificial Sequence: Synthetic oligonucleotide
gacagcguuuaauaggagu

SEQ ID NO: 1143641 - RNA, 19 nt, Artificial Sequence
  Description of Artificial Sequence: Synthetic oligonucleotide
uagaagggagucagcuaug

SEQ ID NO: 1143642 - RNA, 19 nt, Artificial Sequence
  Description of Artificial Sequence: Synthetic oligonucleotide
caguguuuagcuuaaugua

SEQ ID NO: 1143643 - RNA, 19 nt, Artificial Sequence
  Description of Artificial Sequence: Synthetic oligonucleotide
aacccauaaccacggcagu

SEQ ID NO: 1143644 - RNA, 19 nt, Artificial Sequence
  Description of Artificial Sequence: Synthetic oligonucleotide
gauaccgagaaguugcauu

SEQ ID NO: 1143645 - RNA, 19 nt, Artificial Sequence
  Description of Artificial Sequence: Synthetic oligonucleotide
accuuacaauaucguaaag

SEQ ID NO: 1143646 - RNA, 19 nt, Artificial Sequence
  Description of Artificial Sequence: Synthetic oligonucleotide
guaacucaauguauggcca

SEQ ID NO: 1143647 - RNA, 19 nt, Artificial Sequence
  Description of Artificial Sequence: Synthetic oligonucleotide
gauuucaaguaagaaccaa

SEQ ID NO: 1143648 - RNA, 19 nt, Artificial Sequence
  Description of Artificial Sequence: Synthetic oligonucleotide
caacaauaccaguguuuag

SEQ ID NO: 1143649 - RNA, 19 nt, Artificial Sequence
  Description of Artificial Sequence: Synthetic oligonucleotide
aggugcaauaacagcacag

SEQ ID NO: 1143650 - RNA, 19 nt, Artificial Sequence
  Description of Artificial Sequence: Synthetic oligonucleotide
ugccaugcccguacacggg

SEQ ID NO: 1143651 - RNA, 19 nt, Artificial Sequence
  Description of Artificial Sequence: Synthetic oligonucleotide
aauccgccaggacgacuuc

SEQ ID NO: 1143652 - RNA, 19 nt, Artificial Sequence
  Description of Artificial Sequence: Synthetic oligonucleotide
uggauaccgagaaguugca

SEQ ID NO: 1143653 - RNA, 19 nt, Artificial Sequence
  Description of Artificial Sequence: Synthetic oligonucleotide
aaugccugaacaggugcaa

SEQ ID NO: 1143654 - RNA, 19 nt, Artificial Sequence
  Description of Artificial Sequence: Synthetic oligonucleotide
ggagacucgagaaaaggac

SEQ ID NO: 1143655 - RNA, 19 nt, Artificial Sequence
  Description of Artificial Sequence: Synthetic oligonucleotide
ugagugaaggagagcgcuc

SEQ ID NO: 1143656 - RNA, 19 nt, Artificial Sequence
  Description of Artificial Sequence: Synthetic oligonucleotide
gacgacuucucagaggaaa

SEQ ID NO: 1143657 - RNA, 19 nt, Artificial Sequence
  Description of Artificial Sequence: Synthetic oligonucleotide
uuuguaucugagucuuauu

SEQ ID NO: 1143658 - RNA, 19 nt, Artificial Sequence
  Description of Artificial Sequence: Synthetic oligonucleotide
aauuaagcuuuggcugcca

SEQ ID NO: 1143659 - RNA, 19 nt, Artificial Sequence
  Description of Artificial Sequence: Synthetic oligonucleotide
gaauccuacagcugcuugu

SEQ ID NO: 1143660 - RNA, 19 nt, Artificial Sequence
  Description of Artificial Sequence: Synthetic oligonucleotide
guuucgcugccaacaaucc

SEQ ID NO: 1143661 - RNA, 19 nt, Artificial Sequence
  Description of Artificial Sequence: Synthetic oligonucleotide
aggccgagcgaggugaggg

SEQ ID NO: 1143662 - RNA, 19 nt, Artificial Sequence
  Description of Artificial Sequence: Synthetic oligonucleotide
acacggggucuaucaaagg

SEQ ID NO: 1143663 - RNA, 19 nt, Artificial Sequence
  Description of Artificial Sequence: Synthetic oligonucleotide
agaucccucugauucacua

SEQ ID NO: 1143664 - RNA, 19 nt, Artificial Sequence
  Description of Artificial Sequence: Synthetic oligonucleotide
guagccagucaugaauccc

SEQ ID NO: 1143665 - RNA, 19 nt, Artificial Sequence
  Description of Artificial Sequence: Synthetic oligonucleotide
ucccucugauucacuaaac

SEQ ID NO: 1143666 - RNA, 19 nt, Artificial Sequence
  Description of Artificial Sequence: Synthetic oligonucleotide
gucaagccggccgaagccg

SEQ ID NO: 1143667 - RNA, 19 nt, Artificial Sequence
  Description of Artificial Sequence: Synthetic oligonucleotide
gagcaauccgccaggacga

SEQ ID NO: 1143668 - RNA, 19 nt, Artificial Sequence
  Description of Artificial Sequence: Synthetic oligonucleotide
cugguaaauaacaaccaau

SEQ ID NO: 1143669 - RNA, 19 nt, Artificial Sequence
  Description of Artificial Sequence: Synthetic oligonucleotide
aucguaaagcuuccauuua

SEQ ID NO: 1143670 - RNA, 19 nt, Artificial Sequence
  Description of Artificial Sequence: Synthetic oligonucleotide
gaaggggagacucgagaaa

SEQ ID NO: 1143671 - RNA, 19 nt, Artificial Sequence
  Description of Artificial Sequence: Synthetic oligonucleotide
cuguucuaaugcagauccc

SEQ ID NO: 1143672 - RNA, 19 nt, Artificial Sequence
  Description of Artificial Sequence: Synthetic oligonucleotide
uggguuucgcugccaacaa

SEQ ID NO: 1143673 - RNA, 19 nt, Artificial Sequence
  Description of Artificial Sequence: Synthetic oligonucleotide
cacuucggacaugaugggg

SEQ ID NO: 1143674 - RNA, 19 nt, Artificial Sequence
  Description of Artificial Sequence: Synthetic oligonucleotide
ggggagacucgagaaaagg

SEQ ID NO: 1143675 - RNA, 19 nt, Artificial Sequence
  Description of Artificial Sequence: Synthetic oligonucleotide
auaaccacggcagucccuu

SEQ ID NO: 1143676 - RNA, 19 nt, Artificial Sequence
  Description of Artificial Sequence: Synthetic oligonucleotide
cauuugguuuggagacagc

SEQ ID NO: 1143677 - RNA, 19 nt, Artificial Sequence
  Description of Artificial Sequence: Synthetic oligonucleotide
guucuaaugcagaucccuc

SEQ ID NO: 1143678 - RNA, 19 nt, Artificial Sequence
  Description of Artificial Sequence: Synthetic oligonucleotide
gguuucgcugccaacaauc

SEQ ID NO: 1143679 - RNA, 19 nt, Artificial Sequence
  Description of Artificial Sequence: Synthetic oligonucleotide
aacucaauguauggccauu

SEQ ID NO: 1143680 - RNA, 19 nt, Artificial Sequence
  Description of Artificial Sequence: Synthetic oligonucleotide
acggggucuaucaaaggcu

SEQ ID NO: 1143681 - RNA, 19 nt, Artificial Sequence
  Description of Artificial Sequence: Synthetic oligonucleotide
accaaccuuacaauaucgu

SEQ ID NO: 1143682 - RNA, 19 nt, Artificial Sequence
  Description of Artificial Sequence: Synthetic oligonucleotide
guagugguagacaguaaaa

SEQ ID NO: 1143683 - RNA, 19 nt, Artificial Sequence
  Description of Artificial Sequence: Synthetic oligonucleotide
acaauccaaauagggaauu

SEQ ID NO: 1143684 - RNA, 19 nt, Artificial Sequence
  Description of Artificial Sequence: Synthetic oligonucleotide
ggaauuuuggagauuucaa

SEQ ID NO: 1143685 - RNA, 19 nt, Artificial Sequence
  Description of Artificial Sequence: Synthetic oligonucleotide
acacaaacccuugcgucca

SEQ ID NO: 1143686 - RNA, 19 nt, Artificial Sequence
  Description of Artificial Sequence: Synthetic oligonucleotide
uccgccaggacgacuucuc

SEQ ID NO: 1143687 - RNA, 19 nt, Artificial Sequence
  Description of Artificial Sequence: Synthetic oligonucleotide
guaacucaauugagugaag

SEQ ID NO: 1143688 - RNA, 19 nt, Artificial Sequence
  Description of Artificial Sequence: Synthetic oligonucleotide
aacauaccuuaaacacuga

SEQ ID NO: 1143689 - RNA, 19 nt, Artificial Sequence
  Description of Artificial Sequence: Synthetic oligonucleotide
ggaucugaaacaaggucca

SEQ ID NO: 1143690 - RNA, 19 nt, Artificial Sequence
  Description of Artificial Sequence: Synthetic oligonucleotide
gggaacacgcagccggcgg

SEQ ID NO: 1143691 - RNA, 19 nt, Artificial Sequence
  Description of Artificial Sequence: Synthetic oligonucleotide
ggaaggggagacucgagaa

SEQ ID NO: 1143692 - RNA, 19 nt, Artificial Sequence
  Description of Artificial Sequence: Synthetic oligonucleotide
caccaucccauacauuaga

SEQ ID NO: 1143693 - RNA, 19 nt, Artificial Sequence
  Description of Artificial Sequence: Synthetic oligonucleotide
gaagccgcagccuggaguu

SEQ ID NO: 1143694 - RNA, 19 nt, Artificial Sequence
  Description of Artificial Sequence: Synthetic oligonucleotide
ugguguccgacagcccggg

SEQ ID NO: 1143695 - RNA, 19 nt, Artificial Sequence
  Description of Artificial Sequence: Synthetic oligonucleotide
gaacacgcagccggcggag

SEQ ID NO: 1143696 - RNA, 19 nt, Artificial Sequence
  Description of Artificial Sequence: Synthetic oligonucleotide
gacggcggaacggcggcgg

SEQ ID NO: 1143697 - RNA, 19 nt, Artificial Sequence
  Description of Artificial Sequence: Synthetic oligonucleotide
aaacacggugagguggguu

SEQ ID NO: 1143698 - RNA, 19 nt, Artificial Sequence
  Description of Artificial Sequence: Synthetic oligonucleotide
aaaacacggugaggugggu

SEQ ID NO: 1143699 - RNA, 19 nt, Artificial Sequence
  Description of Artificial Sequence: Synthetic oligonucleotide
uccggccccggaacauagg

SEQ ID NO: 1143700 - RNA, 19 nt, Artificial Sequence
  Description of Artificial Sequence: Synthetic oligonucleotide
gagcaagagggucuuugcu

SEQ ID NO: 1143701 - RNA, 19 nt, Artificial Sequence
  Description of Artificial Sequence: Synthetic oligonucleotide
accucgccugucaagccgg

SEQ ID NO: 1143702 - RNA, 19 nt, Artificial Sequence
  Description of Artificial Sequence: Synthetic oligonucleotide
gccaugcccguacacgggg

SEQ ID NO: 1143703 - RNA, 19 nt, Artificial Sequence
  Description of Artificial Sequence: Synthetic oligonucleotide
augguguccgacagcccgg

SEQ ID NO: 1143704 - RNA, 19 nt, Artificial Sequence
  Description of Artificial Sequence: Synthetic oligonucleotide
caauaauaugauuccuaau

SEQ ID NO: 1143705 - RNA, 19 nt, Artificial Sequence
  Description of Artificial Sequence: Synthetic oligonucleotide
ccucugagcaauccgccag

SEQ ID NO: 1143706 - RNA, 19 nt, Artificial Sequence
  Description of Artificial Sequence: Synthetic oligonucleotide
cccauaaccacggcagucc

SEQ ID NO: 1143707 - RNA, 19 nt, Artificial Sequence
  Description of Artificial Sequence: Synthetic oligonucleotide
gcuuaauguagccagucau

SEQ ID NO: 1143708 - RNA, 19 nt, Artificial Sequence
  Description of Artificial Sequence: Synthetic oligonucleotide
cuccggccccggaacauag

SEQ ID NO: 1143709 - RNA, 19 nt, Artificial Sequence
  Description of Artificial Sequence: Synthetic oligonucleotide
acggcggaacggcggcggc

SEQ ID NO: 1143710 - RNA, 19 nt, Artificial Sequence
  Description of Artificial Sequence: Synthetic oligonucleotide
auccccacuuaaacacccg

SEQ ID NO: 1143711 - RNA, 19 nt, Artificial Sequence
  Description of Artificial Sequence: Synthetic oligonucleotide
cuaucaccaucccauacau

SEQ ID NO: 1143712 - RNA, 19 nt, Artificial Sequence
  Description of Artificial Sequence: Synthetic oligonucleotide
aggggagacucgagaaaag

SEQ ID NO: 1143713 - RNA, 19 nt, Artificial Sequence
  Description of Artificial Sequence: Synthetic oligonucleotide
accaucccauacauuagaa

SEQ ID NO: 1143714 - RNA, 19 nt, Artificial Sequence
  Description of Artificial Sequence: Synthetic oligonucleotide
agcaauccgccaggacgac

SEQ ID NO: 1143715 - RNA, 19 nt, Artificial Sequence
  Description of Artificial Sequence: Synthetic oligonucleotide
gggagacucgagaaaagga

SEQ ID NO: 1143716 - RNA, 19 nt, Artificial Sequence
  Description of Artificial Sequence: Synthetic oligonucleotide
cuugcguccagcggcagaa

SEQ ID NO: 1143717 - RNA, 19 nt, Artificial Sequence
  Description of Artificial Sequence: Synthetic oligonucleotide
caugcccguacacgggguc

SEQ ID NO: 1143718 - RNA, 19 nt, Artificial Sequence
  Description of Artificial Sequence: Synthetic oligonucleotide
acgacuucucagaggaaaa

SEQ ID NO: 1143719 - RNA, 19 nt, Artificial Sequence
  Description of Artificial Sequence: Synthetic oligonucleotide
cacggugagguggguuucg

SEQ ID NO: 1143720 - RNA, 19 nt, Artificial Sequence
  Description of Artificial Sequence: Synthetic oligonucleotide
ccuuuucauuauaauuuga

SEQ ID NO: 1143721 - RNA, 19 nt, Artificial Sequence
  Description of Artificial Sequence: Synthetic oligonucleotide
agguggguuucgcugccaa

SEQ ID NO: 1143722 - RNA, 19 nt, Artificial Sequence
  Description of Artificial Sequence: Synthetic oligonucleotide
cccaauaauaugauuccua

SEQ ID NO: 1143723 - RNA, 19 nt, Artificial Sequence
  Description of Artificial Sequence: Synthetic oligonucleotide
caggugcaauaacagcaca

SEQ ID NO: 1143724 - RNA, 19 nt, Artificial Sequence
  Description of Artificial Sequence: Synthetic oligonucleotide
ggagagcgcucuguggucc

SEQ ID NO: 1143725 - RNA, 19 nt, Artificial Sequence
  Description of Artificial Sequence: Synthetic oligonucleotide
ccccggaacauagggaagg

SEQ ID NO: 1143726 - RNA, 19 nt, Artificial Sequence
  Description of Artificial Sequence: Synthetic oligonucleotide
agagcgcucugugguccac

SEQ ID NO: 1143727 - RNA, 19 nt, Artificial Sequence
  Description of Artificial Sequence: Synthetic oligonucleotide
cugauucacuaaacacaaa

SEQ ID NO: 1143728 - RNA, 19 nt, Artificial Sequence
  Description of Artificial Sequence: Synthetic oligonucleotide
cacaaacccuugcguccag

SEQ ID NO: 1143729 - RNA, 19 nt, Artificial Sequence
  Description of Artificial Sequence: Synthetic oligonucleotide
ccggccccggaacauaggg

SEQ ID NO: 1143730 - RNA, 19 nt, Artificial Sequence
  Description of Artificial Sequence: Synthetic oligonucleotide
caauaucguaaagcuucca

SEQ ID NO: 1143731 - RNA, 19 nt, Artificial Sequence
  Description of Artificial Sequence: Synthetic oligonucleotide
ccgagaaguugcauuccug

SEQ ID NO: 1143732 - RNA, 19 nt, Artificial Sequence
  Description of Artificial Sequence: Synthetic oligonucleotide
caauccgccaggacgacuu

SEQ ID NO: 1143733 - RNA, 19 nt, Artificial Sequence
  Description of Artificial Sequence: Synthetic oligonucleotide
ggaacacgcagccggcgga

SEQ ID NO: 1143734 - RNA, 19 nt, Artificial Sequence
  Description of Artificial Sequence: Synthetic oligonucleotide
gguaugacaaagaguuccu

SEQ ID NO: 1143735 - RNA, 19 nt, Artificial Sequence
  Description of Artificial Sequence: Synthetic oligonucleotide
uggcugccaugcccguaca

SEQ ID NO: 1143736 - RNA, 19 nt, Artificial Sequence
  Description of Artificial Sequence: Synthetic oligonucleotide
augcccguacacggggucu

SEQ ID NO: 1143737 - RNA, 19 nt, Artificial Sequence
  Description of Artificial Sequence: Synthetic oligonucleotide
auccgccaggacgacuucu

SEQ ID NO: 1143738 - RNA, 19 nt, Artificial Sequence
  Description of Artificial Sequence: Synthetic oligonucleotide
gcgaggugaggggaacacg

SEQ ID NO: 1143739 - RNA, 19 nt, Artificial Sequence
  Description of Artificial Sequence: Synthetic oligonucleotide
ccguacacggggucuauca

SEQ ID NO: 1143740 - RNA, 19 nt, Artificial Sequence
  Description of Artificial Sequence: Synthetic oligonucleotide
uggucacuucggacaugau

SEQ ID NO: 1143741 - RNA, 19 nt, Artificial Sequence
  Description of Artificial Sequence: Synthetic oligonucleotide
gcuguaauauuguguuuau

SEQ ID NO: 1143742 - RNA, 19 nt, Artificial Sequence
  Description of Artificial Sequence: Synthetic oligonucleotide
aggugccucaggggcaacu

SEQ ID NO: 1143743 - RNA, 19 nt, Artificial Sequence
  Description of Artificial Sequence: Synthetic oligonucleotide
cucgccugucaagccggcc

SEQ ID NO: 1143744 - RNA, 19 nt, Artificial Sequence
  Description of Artificial Sequence: Synthetic oligonucleotide
gcuuguucauggauaccga

SEQ ID NO: 1143745 - RNA, 19 nt, Artificial Sequence
  Description of Artificial Sequence: Synthetic oligonucleotide
cauaaccacggcagucccu

SEQ ID NO: 1143746 - RNA, 19 nt, Artificial Sequence
  Description of Artificial Sequence: Synthetic oligonucleotide
ccggcggagaccucgccug

SEQ ID NO: 1143747 - RNA, 19 nt, Artificial Sequence
  Description of Artificial Sequence: Synthetic oligonucleotide
ccugagcauucucuaucac

SEQ ID NO: 1143748 - RNA, 19 nt, Artificial Sequence
  Description of Artificial Sequence: Synthetic oligonucleotide
ugcccguacacggggucua

SEQ ID NO: 1143749 - RNA, 19 nt, Artificial Sequence
  Description of Artificial Sequence: Synthetic oligonucleotide
cccggaacauagggaaggg

SEQ ID NO: 1143750 - RNA, 19 nt, Artificial Sequence
  Description of Artificial Sequence: Synthetic oligonucleotide
cagcguuuaauaggagugu

SEQ ID NO: 1143751 - RNA, 19 nt, Artificial Sequence
  Description of Artificial Sequence: Synthetic oligonucleotide
acccuugcguccagcggca

SEQ ID NO: 1143752 - RNA, 19 nt, Artificial Sequence
  Description of Artificial Sequence: Synthetic oligonucleotide
gccagucaugaauccccac

SEQ ID NO: 1143753 - RNA, 19 nt, Artificial Sequence
  Description of Artificial Sequence: Synthetic oligonucleotide
ggacugagcaagagggucu

SEQ ID NO: 1143754 - RNA, 19 nt, Artificial Sequence
  Description of Artificial Sequence: Synthetic oligonucleotide
caagccggccgaagccgca

SEQ ID NO: 1143755 - RNA, 19 nt, Artificial Sequence
  Description of Artificial Sequence: Synthetic oligonucleotide
cgacuucucagaggaaaac

SEQ ID NO: 1143756 - RNA, 19 nt, Artificial Sequence
  Description of Artificial Sequence: Synthetic oligonucleotide
gggucuaucaaaggcucau

SEQ ID NO: 1143757 - RNA, 19 nt, Artificial Sequence
  Description of Artificial Sequence: Synthetic oligonucleotide
ggggucuaucaaaggcuca

SEQ ID NO: 1143758 - RNA, 19 nt, Artificial Sequence
  Description of Artificial Sequence: Synthetic oligonucleotide
gggcgcgaccgggaggccg

SEQ ID NO: 1143759 - RNA, 19 nt, Artificial Sequence
  Description of Artificial Sequence: Synthetic oligonucleotide
aggggcaacuaaagccaua

SEQ ID NO: 1143760 - RNA, 19 nt, Artificial Sequence
  Description of Artificial Sequence: Synthetic oligonucleotide
ggacuccggccccggaaca

SEQ ID NO: 1143761 - RNA, 19 nt, Artificial Sequence
  Description of Artificial Sequence: Synthetic oligonucleotide
gccccggaacauagggaag

SEQ ID NO: 1143762 - RNA, 19 nt, Artificial Sequence
  Description of Artificial Sequence: Synthetic oligonucleotide
cccacuuaaacacccguuu

SEQ ID NO: 1143763 - RNA, 19 nt, Artificial Sequence
  Description of Artificial Sequence: Synthetic oligonucleotide
gucuguagcauggggucuu

SEQ ID NO: 1143764 - RNA, 19 nt, Artificial Sequence
  Description of Artificial Sequence: Synthetic oligonucleotide
aagccgcagccuggaguuu

SEQ ID NO: 1143765 - RNA, 19 nt, Artificial Sequence
  Description of Artificial Sequence: Synthetic oligonucleotide
caggggcaacuaaagccau

SEQ ID NO: 1143766 - RNA, 19 nt, Artificial Sequence
  Description of Artificial Sequence: Synthetic oligonucleotide
cguaaagcuuccauuuaau

SEQ ID NO: 1143767 - RNA, 19 nt, Artificial Sequence
  Description of Artificial Sequence: Synthetic oligonucleotide
cccgucaguaggagguuaa

SEQ ID NO: 1143768 - RNA, 19 nt, Artificial Sequence
  Description of Artificial Sequence: Synthetic oligonucleotide
gccgagcgaggugagggga

SEQ ID NO: 1143769 - RNA, 19 nt, Artificial Sequence
  Description of Artificial Sequence: Synthetic oligonucleotide
gacuccggccccggaacau

SEQ ID NO: 1143770 - RNA, 19 nt, Artificial Sequence
  Description of Artificial Sequence: Synthetic oligonucleotide
ggcgcgaccgggaggccga

SEQ ID NO: 1143771 - RNA, 19 nt, Artificial Sequence
  Description of Artificial Sequence: Synthetic oligonucleotide
ggguuucgcugccaacaau

SEQ ID NO: 1143772 - RNA, 19 nt, Artificial Sequence
  Description of Artificial Sequence: Synthetic oligonucleotide
ccuugcguccagcggcaga

SEQ ID NO: 1143773 - RNA, 19 nt, Artificial Sequence
  Description of Artificial Sequence: Synthetic oligonucleotide
ggauaccgagaaguugcau

SEQ ID NO: 1143774 - RNA, 19 nt, Artificial Sequence
  Description of Artificial Sequence: Synthetic oligonucleotide
cgagcgaggugaggggaac

SEQ ID NO: 1143775 - RNA, 19 nt, Artificial Sequence
  Description of Artificial Sequence: Synthetic oligonucleotide
ggcggagaccucgccuguc

SEQ ID NO: 1143776 - RNA, 19 nt, Artificial Sequence
  Description of Artificial Sequence: Synthetic oligonucleotide
ccgagcgaggugaggggaa

SEQ ID NO: 1143777 - RNA, 19 nt, Artificial Sequence
  Description of Artificial Sequence: Synthetic oligonucleotide
ggacgacuucucagaggaa

SEQ ID NO: 1143778 - RNA, 19 nt, Artificial Sequence
  Description of Artificial Sequence: Synthetic oligonucleotide
ccccacuuaaacacccguu

SEQ ID NO: 1143779 - RNA, 19 nt, Artificial Sequence
  Description of Artificial Sequence: Synthetic oligonucleotide
cccguacacggggucuauc

SEQ ID NO: 1143780 - RNA, 19 nt, Artificial Sequence
  Description of Artificial Sequence: Synthetic oligonucleotide
gcaauccgccaggacgacu

SEQ ID NO: 1143781 - RNA, 19 nt, Artificial Sequence
  Description of Artificial Sequence: Synthetic oligonucleotide
ccggacuccggccccggaa

SEQ ID NO: 1143782 - RNA, 19 nt, Artificial Sequence
  Description of Artificial Sequence: Synthetic oligonucleotide
cgggaggccgagcgaggug

SEQ ID NO: 1143783 - RNA, 19 nt, Artificial Sequence
  Description of Artificial Sequence: Synthetic oligonucleotide
gucccgucaguaggagguu

SEQ ID NO: 1143784 - RNA, 19 nt, Artificial Sequence
  Description of Artificial Sequence: Synthetic oligonucleotide
ccuaauccuucuggaucua

SEQ ID NO: 1143785 - RNA, 19 nt, Artificial Sequence
  Description of Artificial Sequence: Synthetic oligonucleotide
ccaugcccguacacggggu

SEQ ID NO: 1143786 - RNA, 19 nt, Artificial Sequence
  Description of Artificial Sequence: Synthetic oligonucleotide
cccuugcguccagcggcag

SEQ ID NO: 1143787 - RNA, 19 nt, Artificial Sequence
  Description of Artificial Sequence: Synthetic oligonucleotide
cgucaguaggagguuaauu

SEQ ID NO: 1143788 - RNA, 19 nt, Artificial Sequence
  Description of Artificial Sequence: Synthetic oligonucleotide
ccgucaguaggagguuaau

SEQ ID NO: 1143789 - RNA, 19 nt, Artificial Sequence
  Description of Artificial Sequence: Synthetic oligonucleotide
cccggacuccggccccgga

SEQ ID NO: 1143790 - RNA, 19 nt, Artificial Sequence
  Description of Artificial Sequence: Synthetic oligonucleotide
gcccguacacggggucuau

SEQ ID NO: 1143791 - RNA, 19 nt, Artificial Sequence
  Description of Artificial Sequence: Synthetic oligonucleotide
cggcggagaccucgccugu

SEQ ID NO: 1143792 - RNA, 19 nt, Artificial Sequence
  Description of Artificial Sequence: Synthetic oligonucleotide
aagaaagugacauagcaug

SEQ ID NO: 1143793 - RNA, 19 nt, Artificial Sequence
  Description of Artificial Sequence: Synthetic oligonucleotide
uuugugcaaauuaugauag

SEQ ID NO: 1143794 - RNA, 19 nt, Artificial Sequence
  Description of Artificial Sequence: Synthetic oligonucleotide
uaaaauuagucucuuuagg

SEQ ID NO: 1143795 - RNA, 19 nt, Artificial Sequence
  Description of Artificial Sequence: Synthetic oligonucleotide
aaaauuagucucuuuagga

SEQ ID NO: 1143796 - RNA, 19 nt, Artificial Sequence
  Description of Artificial Sequence: Synthetic oligonucleotide
aaauaaauagcagcugccc

SEQ ID NO: 1143797 - RNA, 19 nt, Artificial Sequence
  Description of Artificial Sequence: Synthetic oligonucleotide
auuucucuggccuaaaggg

SEQ ID NO: 1143798 - RNA, 19 nt, Artificial Sequence
  Description of Artificial Sequence: Synthetic oligonucleotide
aguugugccauucaggagg

SEQ ID NO: 1143799 - RNA, 19 nt, Artificial Sequence
  Description of Artificial Sequence: Synthetic oligonucleotide
aaaggggacauauuuuguc

SEQ ID NO: 1143800 - RNA, 19 nt, Artificial Sequence
  Description of Artificial Sequence: Synthetic oligonucleotide
ucuuuaggaaauaaauagc

SEQ ID NO: 1143801 - RNA, 19 nt, Artificial Sequence
  Description of Artificial Sequence: Synthetic oligonucleotide
acaaugagcagcuuugggg

SEQ ID NO: 1143802 - RNA, 19 nt, Artificial Sequence
  Description of Artificial Sequence: Synthetic oligonucleotide
ugaaugaaaaguugucggg

SEQ ID NO: 1143803 - RNA, 19 nt, Artificial Sequence
  Description of Artificial Sequence: Synthetic oligonucleotide
ucuacaucaaagcauaaua

SEQ ID NO: 1143804 - RNA, 19 nt, Artificial Sequence
  Description of Artificial Sequence: Synthetic oligonucleotide
ugcaaauuaugauaggcca

SEQ ID NO: 1143805 - RNA, 19 nt, Artificial Sequence
  Description of Artificial Sequence: Synthetic oligonucleotide
aauuaugauaggccagcuc

SEQ ID NO: 1143806 - RNA, 19 nt, Artificial Sequence
  Description of Artificial Sequence: Synthetic oligonucleotide
aacuuguuccuuucacgcc

SEQ ID NO: 1143807 - RNA, 19 nt, Artificial Sequence
  Description of Artificial Sequence: Synthetic oligonucleotide
uuauucauuugaagguugg

SEQ ID NO: 1143808 - RNA, 19 nt, Artificial Sequence
  Description of Artificial Sequence: Synthetic oligonucleotide
uagagaaacaaugagcagc

SEQ ID NO: 1143809 - RNA, 19 nt, Artificial Sequence
  Description of Artificial Sequence: Synthetic oligonucleotide
aaguagaggcuucucaaag

SEQ ID NO: 1143810 - RNA, 19 nt, Artificial Sequence
  Description of Artificial Sequence: Synthetic oligonucleotide
aucugagagauaaaggacc

SEQ ID NO: 1143811 - RNA, 19 nt, Artificial Sequence
  Description of Artificial Sequence: Synthetic oligonucleotide
uagacuaguaaaaggacac

SEQ ID NO: 1143812 - RNA, 19 nt, Artificial Sequence
  Description of Artificial Sequence: Synthetic oligonucleotide
aguagaggcuucucaaagc

SEQ ID NO: 1143813 - RNA, 19 nt, Artificial Sequence
  Description of Artificial Sequence: Synthetic oligonucleotide
aacaaugagcagcuuuggg

SEQ ID NO: 1143814 - RNA, 19 nt, Artificial Sequence
  Description of Artificial Sequence: Synthetic oligonucleotide
aguaaaaggacaccugucu

SEQ ID NO: 1143815 - RNA, 19 nt, Artificial Sequence
  Description of Artificial Sequence: Synthetic oligonucleotide
uaggugaaaaccagacugg

SEQ ID NO: 1143816 - RNA, 19 nt, Artificial Sequence
  Description of Artificial Sequence: Synthetic oligonucleotide
uugucucuaauuuugugca

SEQ ID NO: 1143817 - RNA, 19 nt, Artificial Sequence
  Description of Artificial Sequence: Synthetic oligonucleotide
gauacaagguaccgggcgg

SEQ ID NO: 1143818 - RNA, 19 nt, Artificial Sequence
  Description of Artificial Sequence: Synthetic oligonucleotide
uucauuugaagguugguau

SEQ ID NO: 1143819 - RNA, 19 nt, Artificial Sequence
  Description of Artificial Sequence: Synthetic oligonucleotide
ugaugcuuggcacaaggug

SEQ ID NO: 1143820 - RNA, 19 nt, Artificial Sequence
  Description of Artificial Sequence: Synthetic oligonucleotide
gaaacaaugagcagcuuug

SEQ ID NO: 1143821 - RNA, 19 nt, Artificial Sequence
  Description of Artificial Sequence: Synthetic oligonucleotide
ucuagacuaguaaaaggac

SEQ ID NO: 1143822 - RNA, 19 nt, Artificial Sequence
  Description of Artificial Sequence: Synthetic oligonucleotide
aaaugaggcugcaccaucc

SEQ ID NO: 1143823 - RNA, 19 nt, Artificial Sequence
  Description of Artificial Sequence: Synthetic oligonucleotide
guugguauaaaauuagucu

SEQ ID NO: 1143824 - RNA, 19 nt, Artificial Sequence
  Description of Artificial Sequence: Synthetic oligonucleotide
augagaguggucugcaagg

SEQ ID NO: 1143825 - RNA, 19 nt, Artificial Sequence
  Description of Artificial Sequence: Synthetic oligonucleotide
aucguaugaagaaagugac

SEQ ID NO: 1143826 - RNA, 19 nt, Artificial Sequence
  Description of Artificial Sequence: Synthetic oligonucleotide
ucucuuuaggaaauaaaua

SEQ ID NO: 1143827 - RNA, 19 nt, Artificial Sequence
  Description of Artificial Sequence: Synthetic oligonucleotide
uguccuuaucuccuucugg

SEQ ID NO: 1143828 - RNA, 19 nt, Artificial Sequence
  Description of Artificial Sequence: Synthetic oligonucleotide
ucuuucgaugugcugagga

SEQ ID NO: 1143829 - RNA, 19 nt, Artificial Sequence
  Description of Artificial Sequence: Synthetic oligonucleotide
aauuugucggucuccgccu

SEQ ID NO: 1143830 - RNA, 19 nt, Artificial Sequence
  Description of Artificial Sequence: Synthetic oligonucleotide
ucugagagauaaaggaccu

SEQ ID NO: 1143831 - RNA, 19 nt, Artificial Sequence
  Description of Artificial Sequence: Synthetic oligonucleotide
aagggagauacaagguacc

SEQ ID NO: 1143832 - RNA, 19 nt, Artificial Sequence
  Description of Artificial Sequence: Synthetic oligonucleotide
ucgguuucugcacuuagcu

SEQ ID NO: 1143833 - RNA, 19 nt, Artificial Sequence
  Description of Artificial Sequence: Synthetic oligonucleotide
caaauuaugauaggccagc

SEQ ID NO: 1143834 - RNA, 19 nt, Artificial Sequence
  Description of Artificial Sequence: Synthetic oligonucleotide
cuggaucguaugaagaaag

SEQ ID NO: 1143835 - RNA, 19 nt, Artificial Sequence
  Description of Artificial Sequence: Synthetic oligonucleotide
ugugaguuaguguucuaga

SEQ ID NO: 1143836 - RNA, 19 nt, Artificial Sequence
  Description of Artificial Sequence: Synthetic oligonucleotide
uacucuuucgaugugcuga

SEQ ID NO: 1143837 - RNA, 19 nt, Artificial Sequence
  Description of Artificial Sequence: Synthetic oligonucleotide
uacgacgcaccccuggagg

SEQ ID NO: 1143838 - RNA, 19 nt, Artificial Sequence
  Description of Artificial Sequence: Synthetic oligonucleotide
ugaggaacaagguucuggu

SEQ ID NO: 1143839 - RNA, 19 nt, Artificial Sequence
  Description of Artificial Sequence: Synthetic oligonucleotide
aguguucuagacuaguaaa

SEQ ID NO: 1143840 - RNA, 19 nt, Artificial Sequence
  Description of Artificial Sequence: Synthetic oligonucleotide
agagauaaaggaccugcug

SEQ ID NO: 1143841 - RNA, 19 nt, Artificial Sequence
  Description of Artificial Sequence: Synthetic oligonucleotide
uuugcagauggggcgaugg

SEQ ID NO: 1143842 - RNA, 19 nt, Artificial Sequence
  Description of Artificial Sequence: Synthetic oligonucleotide
aaacaaugagcagcuuugg

SEQ ID NO: 1143843 - RNA, 19 nt, Artificial Sequence
  Description of Artificial Sequence: Synthetic oligonucleotide
cugucaguuccuuucuucg

SEQ ID NO: 1143844 - RNA, 19 nt, Artificial Sequence
  Description of Artificial Sequence: Synthetic oligonucleotide
gaguuaguguucuagacua

SEQ ID NO: 1143845 - RNA, 19 nt, Artificial Sequence
  Description of Artificial Sequence: Synthetic oligonucleotide
ggauuuugcagauggggcg

SEQ ID NO: 1143846 - RNA, 19 nt, Artificial Sequence
  Description of Artificial Sequence: Synthetic oligonucleotide
agugacauagcaugagagu

SEQ ID NO: 1143847 - RNA, 19 nt, Artificial Sequence
  Description of Artificial Sequence: Synthetic oligonucleotide
uaguguucuagacuaguaa

SEQ ID NO: 1143848 - RNA, 19 nt, Artificial Sequence
  Description of Artificial Sequence: Synthetic oligonucleotide
agauaaaggaccugcuggu

SEQ ID NO: 1143849 - RNA, 19 nt, Artificial Sequence
  Description of Artificial Sequence: Synthetic oligonucleotide
ugucaguuccuuucuucgg

SEQ ID NO: 1143850 - RNA, 19 nt, Artificial Sequence
  Description of Artificial Sequence: Synthetic oligonucleotide
gugacauagcaugagagug

SEQ ID NO: 1143851 - RNA, 19 nt, Artificial Sequence
  Description of Artificial Sequence: Synthetic oligonucleotide
guaaaaggacaccugucug

SEQ ID NO: 1143852 - RNA, 19 nt, Artificial Sequence
  Description of Artificial Sequence: Synthetic oligonucleotide
agcugugugaguuaguguu

SEQ ID NO: 1143853 - RNA, 19 nt, Artificial Sequence
  Description of Artificial Sequence: Synthetic oligonucleotide
cuagacuaguaaaaggaca

SEQ ID NO: 1143854 - RNA, 19 nt, Artificial Sequence
  Description of Artificial Sequence: Synthetic oligonucleotide
cagcucuagagaaacaaug

SEQ ID NO: 1143855 - RNA, 19 nt, Artificial Sequence
  Description of Artificial Sequence: Synthetic oligonucleotide
acucacuggagccucgcgg

SEQ ID NO: 1143856 - RNA, 19 nt, Artificial Sequence
  Description of Artificial Sequence: Synthetic oligonucleotide
uguuuguucuaaucugaga

SEQ ID NO: 1143857 - RNA, 19 nt, Artificial Sequence
  Description of Artificial Sequence: Synthetic oligonucleotide
uaaaggggacauauuuugu

SEQ ID NO: 1143858 - RNA, 19 nt, Artificial Sequence
  Description of Artificial Sequence: Synthetic oligonucleotide
aaguugucgggcugaacca

SEQ ID NO: 1143859 - RNA, 19 nt, Artificial Sequence
  Description of Artificial Sequence: Synthetic oligonucleotide
agacuaguaaaaggacacc

SEQ ID NO: 1143860 - RNA, 19 nt, Artificial Sequence
  Description of Artificial Sequence: Synthetic oligonucleotide
ucguaugacuccuggccgg

SEQ ID NO: 1143861 - RNA, 19 nt, Artificial Sequence
  Description of Artificial Sequence: Synthetic oligonucleotide
ugacuugguggccagccgc

SEQ ID NO: 1143862 - RNA, 19 nt, Artificial Sequence
  Description of Artificial Sequence: Synthetic oligonucleotide
cucguaugacuccuggccg

SEQ ID NO: 1143863 - RNA, 19 nt, Artificial Sequence
  Description of Artificial Sequence: Synthetic oligonucleotide
ucaaucucucgcugcaggc

SEQ ID NO: 1143864 - RNA, 19 nt, Artificial Sequence
  Description of Artificial Sequence: Synthetic oligonucleotide
cuagagaaacaaugagcag

SEQ ID NO: 1143865 - RNA, 19 nt, Artificial Sequence
  Description of Artificial Sequence: Synthetic oligonucleotide
gguugggugucucacaaag

SEQ ID NO: 1143866 - RNA, 19 nt, Artificial Sequence
  Description of Artificial Sequence: Synthetic oligonucleotide
uaguaaaaggacaccuguc

SEQ ID NO: 1143867 - RNA, 19 nt, Artificial Sequence
  Description of Artificial Sequence: Synthetic oligonucleotide
agugccuccugaguugugc

SEQ ID NO: 1143868 - RNA, 19 nt, Artificial Sequence
  Description of Artificial Sequence: Synthetic oligonucleotide
agagaaacaaugagcagcu

SEQ ID NO: 1143869 - RNA, 19 nt, Artificial Sequence
  Description of Artificial Sequence: Synthetic oligonucleotide
uaaauagcagcugcccuug

SEQ ID NO: 1143870 - RNA, 19 nt, Artificial Sequence
  Description of Artificial Sequence: Synthetic oligonucleotide
uucgguuucugcacuuagc

SEQ ID NO: 1143871 - RNA, 19 nt, Artificial Sequence
  Description of Artificial Sequence: Synthetic oligonucleotide
guucugacucacuggagcc

SEQ ID NO: 1143872 - RNA, 19 nt, Artificial Sequence
  Description of Artificial Sequence: Synthetic oligonucleotide
gugcaaauuaugauaggcc

SEQ ID NO: 1143873 - RNA, 19 nt, Artificial Sequence
  Description of Artificial Sequence: Synthetic oligonucleotide
aaccacuugcaccgcgggg

SEQ ID NO: 1143874 - RNA, 19 nt, Artificial Sequence
  Description of Artificial Sequence: Synthetic oligonucleotide
ugcacuuagcugcugcuaa

SEQ ID NO: 1143875 - RNA, 19 nt, Artificial Sequence
  Description of Artificial Sequence: Synthetic oligonucleotide
gaagguugguauaaaauua

SEQ ID NO: 1143876 - RNA, 19 nt, Artificial Sequence
  Description of Artificial Sequence: Synthetic oligonucleotide
agaguggucugcaaggaag

SEQ ID NO: 1143877 - RNA, 19 nt, Artificial Sequence
  Description of Artificial Sequence: Synthetic oligonucleotide
acaagguggaacuucugau

SEQ ID NO: 1143878 - RNA, 19 nt, Artificial Sequence
  Description of Artificial Sequence: Synthetic oligonucleotide
uccgccugcaggaagucug

SEQ ID NO: 1143879 - RNA, 19 nt, Artificial Sequence
  Description of Artificial Sequence: Synthetic oligonucleotide
uuucgaugugcugaggaac

SEQ ID NO: 1143880 - RNA, 19 nt, Artificial Sequence
  Description of Artificial Sequence: Synthetic oligonucleotide
ucguaugaagaaagugaca

SEQ ID NO: 1143881 - RNA, 19 nt, Artificial Sequence
  Description of Artificial Sequence: Synthetic oligonucleotide
aaugaggcugcaccaucca

SEQ ID NO: 1143882 - RNA, 19 nt, Artificial Sequence
  Description of Artificial Sequence: Synthetic oligonucleotide
uucaaguacaggcccugga

SEQ ID NO: 1143883 - RNA, 19 nt, Artificial Sequence
  Description of Artificial Sequence: Synthetic oligonucleotide
acugcaauuccuggcugcc

SEQ ID NO: 1143884 - RNA, 19 nt, Artificial Sequence
  Description of Artificial Sequence: Synthetic oligonucleotide
aggaaaugaggcugcacca

SEQ ID NO: 1143885 - RNA, 19 nt, Artificial Sequence
  Description of Artificial Sequence: Synthetic oligonucleotide
ugcugcuacucuuucgaug

SEQ ID NO: 1143886 - RNA, 19 nt, Artificial Sequence
  Description of Artificial Sequence: Synthetic oligonucleotide
uggcucuacaucaaagcau

SEQ ID NO: 1143887 - RNA, 19 nt, Artificial Sequence
  Description of Artificial Sequence: Synthetic oligonucleotide
cauaauauguuuguucuaa

SEQ ID NO: 1143888 - RNA, 19 nt, Artificial Sequence
  Description of Artificial Sequence: Synthetic oligonucleotide
ucucgguacaugcccuggg

SEQ ID NO: 1143889 - RNA, 19 nt, Artificial Sequence
  Description of Artificial Sequence: Synthetic oligonucleotide
acucuuucgaugugcugag

SEQ ID NO: 1143890 - RNA, 19 nt, Artificial Sequence
  Description of Artificial Sequence: Synthetic oligonucleotide
aaaaguugucgggcugaac

SEQ ID NO: 1143891 - RNA, 19 nt, Artificial Sequence
  Description of Artificial Sequence: Synthetic oligonucleotide
acuguacuggggauaggcc

SEQ ID NO: 1143892 - RNA, 19 nt, Artificial Sequence
  Description of Artificial Sequence: Synthetic oligonucleotide
aauagcagcugcccuugau

SEQ ID NO: 1143893 - RNA, 19 nt, Artificial Sequence
  Description of Artificial Sequence: Synthetic oligonucleotide
auacaagguaccgggcggc

SEQ ID NO: 1143894 - RNA, 19 nt, Artificial Sequence
  Description of Artificial Sequence: Synthetic oligonucleotide
ucauuugaagguugguaua

SEQ ID NO: 1143895 - RNA, 19 nt, Artificial Sequence
  Description of Artificial Sequence: Synthetic oligonucleotide
uggaucguaugaagaaagu

SEQ ID NO: 1143896 - RNA, 19 nt, Artificial Sequence
  Description of Artificial Sequence: Synthetic oligonucleotide
uccgcacggaaccucacga

SEQ ID NO: 1143897 - RNA, 19 nt, Artificial Sequence
  Description of Artificial Sequence: Synthetic oligonucleotide
auaaaggaccugcugguuu

SEQ ID NO: 1143898 - RNA, 19 nt, Artificial Sequence
  Description of Artificial Sequence: Synthetic oligonucleotide
uuucuucgguuucugcacu

SEQ ID NO: 1143899 - RNA, 19 nt, Artificial Sequence
  Description of Artificial Sequence: Synthetic oligonucleotide
gcucacagggccuacgacg

SEQ ID NO: 1143900 - RNA, 19 nt, Artificial Sequence
  Description of Artificial Sequence: Synthetic oligonucleotide
caagguucuggugugcuag

SEQ ID NO: 1143901 - RNA, 19 nt, Artificial Sequence
  Description of Artificial Sequence: Synthetic oligonucleotide
aggugaaaaccagacuggg

SEQ ID NO: 1143902 - RNA, 19 nt, Artificial Sequence
  Description of Artificial Sequence: Synthetic oligonucleotide
gaaaugaggcugcaccauc

SEQ ID NO: 1143903 - RNA, 19 nt, Artificial Sequence
  Description of Artificial Sequence: Synthetic oligonucleotide
ucucuaauuuugugcaaau

SEQ ID NO: 1143904 - RNA, 19 nt, Artificial Sequence
  Description of Artificial Sequence: Synthetic oligonucleotide
uggcuggaucguaugaaga

SEQ ID NO: 1143905 - RNA, 19 nt, Artificial Sequence
  Description of Artificial Sequence: Synthetic oligonucleotide
gucggggauagccacuggg

SEQ ID NO: 1143906 - RNA, 19 nt, Artificial Sequence
  Description of Artificial Sequence: Synthetic oligonucleotide
ugggugucucacaaagcca

SEQ ID NO: 1143907 - RNA, 19 nt, Artificial Sequence
  Description of Artificial Sequence: Synthetic oligonucleotide
uccgaaugagccgcugugg

SEQ ID NO: 1143908 - RNA, 19 nt, Artificial Sequence
  Description of Artificial Sequence: Synthetic oligonucleotide
agggagauacaagguaccg

SEQ ID NO: 1143909 - RNA, 19 nt, Artificial Sequence
  Description of Artificial Sequence: Synthetic oligonucleotide
ugaucugcucacagggccu

SEQ ID NO: 1143910 - RNA, 19 nt, Artificial Sequence
  Description of Artificial Sequence: Synthetic oligonucleotide
gcucguaugacuccuggcc

SEQ ID NO: 1143911 - RNA, 19 nt, Artificial Sequence
  Description of Artificial Sequence: Synthetic oligonucleotide
uuaugauaggccagcucua

SEQ ID NO: 1143912 - RNA, 19 nt, Artificial Sequence
  Description of Artificial Sequence: Synthetic oligonucleotide
agccuuucaccucuccgag

SEQ ID NO: 1143913 - RNA, 19 nt, Artificial Sequence
  Description of Artificial Sequence: Synthetic oligonucleotide
aacaagguucuggugugcu

SEQ ID NO: 1143914 - RNA, 19 nt, Artificial Sequence
  Description of Artificial Sequence: Synthetic oligonucleotide
agcaugguuaugguccagg

SEQ ID NO: 1143915 - RNA, 19 nt, Artificial Sequence
  Description of Artificial Sequence: Synthetic oligonucleotide
gcuaggguaggugaaaacc

SEQ ID NO: 1143916 - RNA, 19 nt, Artificial Sequence
  Description of Artificial Sequence: Synthetic oligonucleotide
ugcuaacuuguuccuuuca

SEQ ID NO: 1143917 - RNA, 19 nt, Artificial Sequence
  Description of Artificial Sequence: Synthetic oligonucleotide
ucggggauagccacugggu

SEQ ID NO: 1143918 - RNA, 19 nt, Artificial Sequence
  Description of Artificial Sequence: Synthetic oligonucleotide
gaaguagaggcuucucaaa

SEQ ID NO: 1143919 - RNA, 19 nt, Artificial Sequence
  Description of Artificial Sequence: Synthetic oligonucleotide
caagguaccgggcggcagg

SEQ ID NO: 1143920 - RNA, 19 nt, Artificial Sequence
  Description of Artificial Sequence: Synthetic oligonucleotide
cauagcaugagaguggucu

SEQ ID NO: 1143921 - RNA, 19 nt, Artificial Sequence
  Description of Artificial Sequence: Synthetic oligonucleotide
cugguuuggagcaugguua

SEQ ID NO: 1143922 - RNA, 19 nt, Artificial Sequence
  Description of Artificial Sequence: Synthetic oligonucleotide
gaucuacaaagacugggcu

SEQ ID NO: 1143923 - RNA, 19 nt, Artificial Sequence
  Description of Artificial Sequence: Synthetic oligonucleotide
gaggggucgccacugcugc

SEQ ID NO: 1143924 - RNA, 19 nt, Artificial Sequence
  Description of Artificial Sequence: Synthetic oligonucleotide
uccuuaucuccuucuggga

SEQ ID NO: 1143925 - RNA, 19 nt, Artificial Sequence
  Description of Artificial Sequence: Synthetic oligonucleotide
uguggucaugagcgugggg

SEQ ID NO: 1143926 - RNA, 19 nt, Artificial Sequence
  Description of Artificial Sequence: Synthetic oligonucleotide
gguugguauaaaauuaguc

SEQ ID NO: 1143927 - RNA, 19 nt, Artificial Sequence
  Description of Artificial Sequence: Synthetic oligonucleotide
aaugagccgcugugggcug

SEQ ID NO: 1143928 - RNA, 19 nt, Artificial Sequence
  Description of Artificial Sequence: Synthetic oligonucleotide
ucggucuccgccugcagga

SEQ ID NO: 1143929 - RNA, 19 nt, Artificial Sequence
  Description of Artificial Sequence: Synthetic oligonucleotide
gacuaguaaaaggacaccu

SEQ ID NO: 1143930 - RNA, 19 nt, Artificial Sequence
  Description of Artificial Sequence: Synthetic oligonucleotide
cacugcaauuccuggcugc

SEQ ID NO: 1143931 - RNA, 19 nt, Artificial Sequence
  Description of Artificial Sequence: Synthetic oligonucleotide
ggaucuacaaagacugggc

SEQ ID NO: 1143932 - RNA, 19 nt, Artificial Sequence
  Description of Artificial Sequence: Synthetic oligonucleotide
ggaucguaugaagaaagug

SEQ ID NO: 1143933 - RNA, 19 nt, Artificial Sequence
  Description of Artificial Sequence: Synthetic oligonucleotide
cacucugcggcgcucuucc

SEQ ID NO: 1143934 - RNA, 19 nt, Artificial Sequence
  Description of Artificial Sequence: Synthetic oligonucleotide
ugcgccugagccugcgggg

SEQ ID NO: 1143935 - RNA, 19 nt, Artificial Sequence
  Description of Artificial Sequence: Synthetic oligonucleotide
gauaggccagaggucgggg

SEQ ID NO: 1143936 - RNA, 19 nt, Artificial Sequence
  Description of Artificial Sequence: Synthetic oligonucleotide
ugcugguaccaccuguguc

SEQ ID NO: 1143937 - RNA, 19 nt, Artificial Sequence
  Description of Artificial Sequence: Synthetic oligonucleotide
agcggagccuuucaccucu

SEQ ID NO: 1143938 - RNA, 19 nt, Artificial Sequence
  Description of Artificial Sequence: Synthetic oligonucleotide
cuacaucaaagcauaauau

SEQ ID NO: 1143939 - RNA, 19 nt, Artificial Sequence
  Description of Artificial Sequence: Synthetic oligonucleotide
ugguuuggagcaugguuau

SEQ ID NO: 1143940 - RNA, 19 nt, Artificial Sequence
  Description of Artificial Sequence: Synthetic oligonucleotide
gucggucuccgccugcagg

SEQ ID NO: 1143941 - RNA, 19 nt, Artificial Sequence
  Description of Artificial Sequence: Synthetic oligonucleotide
cacaagguggaacuucuga

SEQ ID NO: 1143942 - RNA, 19 nt, Artificial Sequence
  Description of Artificial Sequence: Synthetic oligonucleotide
gggauuuugcagauggggc

SEQ ID NO: 1143943 - RNA, 19 nt, Artificial Sequence
  Description of Artificial Sequence: Synthetic oligonucleotide
cucgguacaugcccugggc

SEQ ID NO: 1143944 - RNA, 19 nt, Artificial Sequence
  Description of Artificial Sequence: Synthetic oligonucleotide
gacucacuggagccucgcg

SEQ ID NO: 1143945 - RNA, 19 nt, Artificial Sequence
  Description of Artificial Sequence: Synthetic oligonucleotide
aagguaccgggcggcaggg

SEQ ID NO: 1143946 - RNA, 19 nt, Artificial Sequence
  Description of Artificial Sequence: Synthetic oligonucleotide
gucagagacggugugguca

SEQ ID NO: 1143947 - RNA, 19 nt, Artificial Sequence
  Description of Artificial Sequence: Synthetic oligonucleotide
ugcuaggguaggugaaaac

SEQ ID NO: 1143948 - RNA, 19 nt, Artificial Sequence
  Description of Artificial Sequence: Synthetic oligonucleotide
gaggcuucucaaagcuugg

SEQ ID NO: 1143949 - RNA, 19 nt, Artificial Sequence
  Description of Artificial Sequence: Synthetic oligonucleotide
uccuuucacgccucacucu

SEQ ID NO: 1143950 - RNA, 19 nt, Artificial Sequence
  Description of Artificial Sequence: Synthetic oligonucleotide
agucagagacggugugguc

SEQ ID NO: 1143951 - RNA, 19 nt, Artificial Sequence
  Description of Artificial Sequence: Synthetic oligonucleotide
uucacgccucacucugcgg

SEQ ID NO: 1143952 - RNA, 19 nt, Artificial Sequence
  Description of Artificial Sequence: Synthetic oligonucleotide
aaauagcagcugcccuuga

SEQ ID NO: 1143953 - RNA, 19 nt, Artificial Sequence
  Description of Artificial Sequence: Synthetic oligonucleotide
ggggauagccacugggucc

SEQ ID NO: 1143954 - RNA, 19 nt, Artificial Sequence
  Description of Artificial Sequence: Synthetic oligonucleotide
auuugucggucuccgccug

SEQ ID NO: 1143955 - RNA, 19 nt, Artificial Sequence
  Description of Artificial Sequence: Synthetic oligonucleotide
ucacuggagccucgcggag

SEQ ID NO: 1143956 - RNA, 19 nt, Artificial Sequence
  Description of Artificial Sequence: Synthetic oligonucleotide
ugagcagcuuuggggaccc

SEQ ID NO: 1143957 - RNA, 19 nt, Artificial Sequence
  Description of Artificial Sequence: Synthetic oligonucleotide
gacauauuuugucucuaau

SEQ ID NO: 1143958 - RNA, 19 nt, Artificial Sequence
  Description of Artificial Sequence: Synthetic oligonucleotide
ugugcuaggguaggugaaa

SEQ ID NO: 1143959 - RNA, 19 nt, Artificial Sequence
  Description of Artificial Sequence: Synthetic oligonucleotide
gaaugagccgcugugggcu

SEQ ID NO: 1143960 - RNA, 19 nt, Artificial Sequence
  Description of Artificial Sequence: Synthetic oligonucleotide
cuccgaaugagccgcugug

SEQ ID NO: 1143961 - RNA, 19 nt, Artificial Sequence
  Description of Artificial Sequence: Synthetic oligonucleotide
caggcucgauuucucgucc

SEQ ID NO: 1143962 - RNA, 19 nt, Artificial Sequence
  Description of Artificial Sequence: Synthetic oligonucleotide
cugacuugguggccagccg

SEQ ID NO: 1143963 - RNA, 19 nt, Artificial Sequence
  Description of Artificial Sequence: Synthetic oligonucleotide
ugguccgcacggaaccuca

SEQ ID NO: 1143964 - RNA, 19 nt, Artificial Sequence
  Description of Artificial Sequence: Synthetic oligonucleotide
ugcucacagggccuacgac

SEQ ID NO: 1143965 - RNA, 19 nt, Artificial Sequence
  Description of Artificial Sequence: Synthetic oligonucleotide
cauuugaagguugguauaa

SEQ ID NO: 1143966 - RNA, 19 nt, Artificial Sequence
  Description of Artificial Sequence: Synthetic oligonucleotide
aguuaguguucuagacuag

SEQ ID NO: 1143967 - RNA, 19 nt, Artificial Sequence
  Description of Artificial Sequence: Synthetic oligonucleotide
cucacuggagccucgcgga

SEQ ID NO: 1143968 - RNA, 19 nt, Artificial Sequence
  Description of Artificial Sequence: Synthetic oligonucleotide
cuuucgaugugcugaggaa

SEQ ID NO: 1143969 - RNA, 19 nt, Artificial Sequence
  Description of Artificial Sequence: Synthetic oligonucleotide
guguucuagacuaguaaaa

SEQ ID NO: 1143970 - RNA, 19 nt, Artificial Sequence
  Description of Artificial Sequence: Synthetic oligonucleotide
agagacgguguggucauga

SEQ ID NO: 1143971 - RNA, 19 nt, Artificial Sequence
  Description of Artificial Sequence: Synthetic oligonucleotide
ccgaagucucgguacaugc

SEQ ID NO: 1143972 - RNA, 19 nt, Artificial Sequence
  Description of Artificial Sequence: Synthetic oligonucleotide
cacgccucacucugcggcg

SEQ ID NO: 1143973 - RNA, 19 nt, Artificial Sequence
  Description of Artificial Sequence: Synthetic oligonucleotide
ggauuucucuggccuaaag

SEQ ID NO: 1143974 - RNA, 19 nt, Artificial Sequence
  Description of Artificial Sequence: Synthetic oligonucleotide
uggcccuagggcucguaug

SEQ ID NO: 1143975 - RNA, 19 nt, Artificial Sequence
  Description of Artificial Sequence: Synthetic oligonucleotide
agucucgguacaugcccug

SEQ ID NO: 1143976 - RNA, 19 nt, Artificial Sequence
  Description of Artificial Sequence: Synthetic oligonucleotide
gucucacaaagccaggagu

SEQ ID NO: 1143977 - RNA, 19 nt, Artificial Sequence
  Description of Artificial Sequence: Synthetic oligonucleotide
agguugguauaaaauuagu

SEQ ID NO: 1143978 - RNA, 19 nt, Artificial Sequence
  Description of Artificial Sequence: Synthetic oligonucleotide
caccugucuggguguaggg

SEQ ID NO: 1143979 - RNA, 19 nt, Artificial Sequence
  Description of Artificial Sequence: Synthetic oligonucleotide
guccgcacggaaccucacg

SEQ ID NO: 1143980 - RNA, 19 nt, Artificial Sequence
  Description of Artificial Sequence: Synthetic oligonucleotide
ugcgcggggcgaccguacg

SEQ ID NO: 1143981 - RNA, 19 nt, Artificial Sequence
  Description of Artificial Sequence: Synthetic oligonucleotide
gaacaagguucuggugugc

SEQ ID NO: 1143982 - RNA, 19 nt, Artificial Sequence
  Description of Artificial Sequence: Synthetic oligonucleotide
agggccuacgacgcacccc

SEQ ID NO: 1143983 - RNA, 19 nt, Artificial Sequence
  Description of Artificial Sequence: Synthetic oligonucleotide
aggcuucucaaagcuuggg

SEQ ID NO: 1143984 - RNA, 19 nt, Artificial Sequence
  Description of Artificial Sequence: Synthetic oligonucleotide
cugcuaacuuguuccuuuc

SEQ ID NO: 1143985 - RNA, 19 nt, Artificial Sequence
  Description of Artificial Sequence: Synthetic oligonucleotide
cacggaaccucacgacccc

SEQ ID NO: 1143986 - RNA, 19 nt, Artificial Sequence
  Description of Artificial Sequence: Synthetic oligonucleotide
acuucugaugcugggcggu

SEQ ID NO: 1143987 - RNA, 19 nt, Artificial Sequence
  Description of Artificial Sequence: Synthetic oligonucleotide
ucccgguuccccgaagucu

SEQ ID NO: 1143988 - RNA, 19 nt, Artificial Sequence
  Description of Artificial Sequence: Synthetic oligonucleotide
cuacgacgcaccccuggag

SEQ ID NO: 1143989 - RNA, 19 nt, Artificial Sequence
  Description of Artificial Sequence: Synthetic oligonucleotide
gacauagcaugagaguggu

SEQ ID NO: 1143990 - RNA, 19 nt, Artificial Sequence
  Description of Artificial Sequence: Synthetic oligonucleotide
gaccguacgcgcugccggc

SEQ ID NO: 1143991 - RNA, 19 nt, Artificial Sequence
  Description of Artificial Sequence: Synthetic oligonucleotide
acgacgcaccccuggaggu

SEQ ID NO: 1143992 - RNA, 19 nt, Artificial Sequence
  Description of Artificial Sequence: Synthetic oligonucleotide
acagggccuacgacgcacc

SEQ ID NO: 1143993 - RNA, 19 nt, Artificial Sequence
  Description of Artificial Sequence: Synthetic oligonucleotide
gucaguuccuuucuucggu

SEQ ID NO: 1143994 - RNA, 19 nt, Artificial Sequence
  Description of Artificial Sequence: Synthetic oligonucleotide
gagaguggucugcaaggaa

SEQ ID NO: 1143995 - RNA, 19 nt, Artificial Sequence
  Description of Artificial Sequence: Synthetic oligonucleotide
ugucggucuccgccugcag

SEQ ID NO: 1143996 - RNA, 19 nt, Artificial Sequence
  Description of Artificial Sequence: Synthetic oligonucleotide
ccgaaugagccgcuguggg

SEQ ID NO: 1143997 - RNA, 19 nt, Artificial Sequence
  Description of Artificial Sequence: Synthetic oligonucleotide
ccagaggucggggauagcc

SEQ ID NO: 1143998 - RNA, 19 nt, Artificial Sequence
  Description of Artificial Sequence: Synthetic oligonucleotide
aggcugcaccauccacugc

SEQ ID NO: 1143999 - RNA, 19 nt, Artificial Sequence
  Description of Artificial Sequence: Synthetic oligonucleotide
gucucgguacaugcccugg

SEQ ID NO: 1144000 - RNA, 19 nt, Artificial Sequence
  Description of Artificial Sequence: Synthetic oligonucleotide
ugacucacuggagccucgc

SEQ ID NO: 1144001 - RNA, 19 nt, Artificial Sequence
  Description of Artificial Sequence: Synthetic oligonucleotide
cugagagauaaaggaccug

SEQ ID NO: 1144002 - RNA, 19 nt, Artificial Sequence
  Description of Artificial Sequence: Synthetic oligonucleotide
uacaagguaccgggcggca

SEQ ID NO: 1144003 - RNA, 19 nt, Artificial Sequence
  Description of Artificial Sequence: Synthetic oligonucleotide
ggcuggaucguaugaagaa

SEQ ID NO: 1144004 - RNA, 19 nt, Artificial Sequence
  Description of Artificial Sequence: Synthetic oligonucleotide
gggcucguaugacuccugg

SEQ ID NO: 1144005 - RNA, 19 nt, Artificial Sequence
  Description of Artificial Sequence: Synthetic oligonucleotide
agccucgcggagucuuguc

SEQ ID NO: 1144006 - RNA, 19 nt, Artificial Sequence
  Description of Artificial Sequence: Synthetic oligonucleotide
ugugugaguuaguguucua

SEQ ID NO: 1144007 - RNA, 19 nt, Artificial Sequence
  Description of Artificial Sequence: Synthetic oligonucleotide
uugucgggcugaaccacuu

SEQ ID NO: 1144008 - RNA, 19 nt, Artificial Sequence
  Description of Artificial Sequence: Synthetic oligonucleotide
aggucggggauagccacug

SEQ ID NO: 1144009 - RNA, 19 nt, Artificial Sequence
  Description of Artificial Sequence: Synthetic oligonucleotide
ucgcagcggagccuuucac

SEQ ID NO: 1144010 - RNA, 19 nt, Artificial Sequence
  Description of Artificial Sequence: Synthetic oligonucleotide
accguacgcgcugccggcc

SEQ ID NO: 1144011 - RNA, 19 nt, Artificial Sequence
  Description of Artificial Sequence: Synthetic oligonucleotide
cuugauguggaggcuugga

SEQ ID NO: 1144012 - RNA, 19 nt, Artificial Sequence
  Description of Artificial Sequence: Synthetic oligonucleotide
gaaaaguugucgggcugaa

SEQ ID NO: 1144013 - RNA, 19 nt, Artificial Sequence
  Description of Artificial Sequence: Synthetic oligonucleotide
cacagggccuacgacgcac

SEQ ID NO: 1144014 - RNA, 19 nt, Artificial Sequence
  Description of Artificial Sequence: Synthetic oligonucleotide
ggauaggccagaggucggg

SEQ ID NO: 1144015 - RNA, 19 nt, Artificial Sequence
  Description of Artificial Sequence: Synthetic oligonucleotide
gagagauaaaggaccugcu

SEQ ID NO: 1144016 - RNA, 19 nt, Artificial Sequence
  Description of Artificial Sequence: Synthetic oligonucleotide
ggaaaaggaggcuggggua

SEQ ID NO: 1144017 - RNA, 19 nt, Artificial Sequence
  Description of Artificial Sequence: Synthetic oligonucleotide
uugucggucuccgccugca

SEQ ID NO: 1144018 - RNA, 19 nt, Artificial Sequence
  Description of Artificial Sequence: Synthetic oligonucleotide
ccauucaggaggagccugc

SEQ ID NO: 1144019 - RNA, 19 nt, Artificial Sequence
  Description of Artificial Sequence: Synthetic oligonucleotide
agguucaaguacaggcccu

SEQ ID NO: 1144020 - RNA, 19 nt, Artificial Sequence
  Description of Artificial Sequence: Synthetic oligonucleotide
ggcucuacaucaaagcaua

SEQ ID NO: 1144021 - RNA, 19 nt, Artificial Sequence
  Description of Artificial Sequence: Synthetic oligonucleotide
ggcccuagggcucguauga

SEQ ID NO: 1144022 - RNA, 19 nt, Artificial Sequence
  Description of Artificial Sequence: Synthetic oligonucleotide
aaagggagucagagacggu

SEQ ID NO: 1144023 - RNA, 19 nt, Artificial Sequence
  Description of Artificial Sequence: Synthetic oligonucleotide
gcacggaaccucacgaccc

SEQ ID NO: 1144024 - RNA, 19 nt, Artificial Sequence
  Description of Artificial Sequence: Synthetic oligonucleotide
aggcucgauuucucguccu

SEQ ID NO: 1144025 - RNA, 19 nt, Artificial Sequence
  Description of Artificial Sequence: Synthetic oligonucleotide
caagcuggcucuacaucaa

SEQ ID NO: 1144026 - RNA, 19 nt, Artificial Sequence
  Description of Artificial Sequence: Synthetic oligonucleotide
guaugacuccuggccgggg

SEQ ID NO: 1144027 - RNA, 19 nt, Artificial Sequence
  Description of Artificial Sequence: Synthetic oligonucleotide
gccuacgacgcaccccugg

SEQ ID NO: 1144028 - RNA, 19 nt, Artificial Sequence
  Description of Artificial Sequence: Synthetic oligonucleotide
ucgaugugcugaggaacaa

SEQ ID NO: 1144029 - RNA, 19 nt, Artificial Sequence
  Description of Artificial Sequence: Synthetic oligonucleotide
ggcucguaugacuccuggc

SEQ ID NO: 1144030 - RNA, 19 nt, Artificial Sequence
  Description of Artificial Sequence: Synthetic oligonucleotide
gggguagcaccagcaaggg

SEQ ID NO: 1144031 - RNA, 19 nt, Artificial Sequence
  Description of Artificial Sequence: Synthetic oligonucleotide
gcaggcucgauuucucguc

SEQ ID NO: 1144032 - RNA, 19 nt, Artificial Sequence
  Description of Artificial Sequence: Synthetic oligonucleotide
ggugaaaaccagacuggga

SEQ ID NO: 1144033 - RNA, 19 nt, Artificial Sequence
  Description of Artificial Sequence: Synthetic oligonucleotide
cugccggccccggagcucg

SEQ ID NO: 1144034 - RNA, 19 nt, Artificial Sequence
  Description of Artificial Sequence: Synthetic oligonucleotide
cgaagucucgguacaugcc

SEQ ID NO: 1144035 - RNA, 19 nt, Artificial Sequence
  Description of Artificial Sequence: Synthetic oligonucleotide
acauagcaugagagugguc

SEQ ID NO: 1144036 - RNA, 19 nt, Artificial Sequence
  Description of Artificial Sequence: Synthetic oligonucleotide
gagcugugugaguuagugu

SEQ ID NO: 1144037 - RNA, 19 nt, Artificial Sequence
  Description of Artificial Sequence: Synthetic oligonucleotide
ugggguccgcgucggcggc

SEQ ID NO: 1144038 - RNA, 19 nt, Artificial Sequence
  Description of Artificial Sequence: Synthetic oligonucleotide
uggggcgaugggcuuccaa

SEQ ID NO: 1144039 - RNA, 19 nt, Artificial Sequence
  Description of Artificial Sequence: Synthetic oligonucleotide
uaccaccuguguccuuauc

SEQ ID NO: 1144040 - RNA, 19 nt, Artificial Sequence
  Description of Artificial Sequence: Synthetic oligonucleotide
cugggaguaaagggaguca

SEQ ID NO: 1144041 - RNA, 19 nt, Artificial Sequence
  Description of Artificial Sequence: Synthetic oligonucleotide
gucgcagcggagccuuuca

SEQ ID NO: 1144042 - RNA, 19 nt, Artificial Sequence
  Description of Artificial Sequence: Synthetic oligonucleotide
ccaauuugucggucuccgc

SEQ ID NO: 1144043 - RNA, 19 nt, Artificial Sequence
  Description of Artificial Sequence: Synthetic oligonucleotide
gagcaugguuaugguccag

SEQ ID NO: 1144044 - RNA, 19 nt, Artificial Sequence
  Description of Artificial Sequence: Synthetic oligonucleotide
ugucgcagcggagccuuuc

SEQ ID NO: 1144045 - RNA, 19 nt, Artificial Sequence
  Description of Artificial Sequence: Synthetic oligonucleotide
ugcugcuaacuuguuccuu

SEQ ID NO: 1144046 - RNA, 19 nt, Artificial Sequence
  Description of Artificial Sequence: Synthetic oligonucleotide
cagggccuacgacgcaccc

SEQ ID NO: 1144047 - RNA, 19 nt, Artificial Sequence
  Description of Artificial Sequence: Synthetic oligonucleotide
cugcuacucuuucgaugug

SEQ ID NO: 1144048 - RNA, 19 nt, Artificial Sequence
  Description of Artificial Sequence: Synthetic oligonucleotide
gauaaaggaccugcugguu

SEQ ID NO: 1144049 - RNA, 19 nt, Artificial Sequence
  Description of Artificial Sequence: Synthetic oligonucleotide
ggaggggucgccacugcug

SEQ ID NO: 1144050 - RNA, 19 nt, Artificial Sequence
  Description of Artificial Sequence: Synthetic oligonucleotide
gcugaucugcucacagggc

SEQ ID NO: 1144051 - RNA, 19 nt, Artificial Sequence
  Description of Artificial Sequence: Synthetic oligonucleotide
gcagcggagccuuucaccu

SEQ ID NO: 1144052 - RNA, 19 nt, Artificial Sequence
  Description of Artificial Sequence: Synthetic oligonucleotide
cuucugaugcugggcgguc

SEQ ID NO: 1144053 - RNA, 19 nt, Artificial Sequence
  Description of Artificial Sequence: Synthetic oligonucleotide
cgaaugagccgcugugggc

SEQ ID NO: 1144054 - RNA, 19 nt, Artificial Sequence
  Description of Artificial Sequence: Synthetic oligonucleotide
ggaugcucggugggguccg

SEQ ID NO: 1144055 - RNA, 19 nt, Artificial Sequence
  Description of Artificial Sequence: Synthetic oligonucleotide
cguaugaagaaagugacau

SEQ ID NO: 1144056 - RNA, 19 nt, Artificial Sequence
  Description of Artificial Sequence: Synthetic oligonucleotide
gguaccaccuguguccuua

SEQ ID NO: 1144057 - RNA, 19 nt, Artificial Sequence
  Description of Artificial Sequence: Synthetic oligonucleotide
cucaaggcgcuccuucugu

SEQ ID NO: 1144058 - RNA, 19 nt, Artificial Sequence
  Description of Artificial Sequence: Synthetic oligonucleotide
gcuggaucguaugaagaaa

SEQ ID NO: 1144059 - RNA, 19 nt, Artificial Sequence
  Description of Artificial Sequence: Synthetic oligonucleotide
cccgguuccccgaagucuc

SEQ ID NO: 1144060 - RNA, 19 nt, Artificial Sequence
  Description of Artificial Sequence: Synthetic oligonucleotide
cauucaggaggagccugca

SEQ ID NO: 1144061 - RNA, 19 nt, Artificial Sequence
  Description of Artificial Sequence: Synthetic oligonucleotide
gugcuaggguaggugaaaa

SEQ ID NO: 1144062 - RNA, 19 nt, Artificial Sequence
  Description of Artificial Sequence: Synthetic oligonucleotide
gagugcagcucagcucauc

SEQ ID NO: 1144063 - RNA, 19 nt, Artificial Sequence
  Description of Artificial Sequence: Synthetic oligonucleotide
augcucggugggguccgcg

SEQ ID NO: 1144064 - RNA, 19 nt, Artificial Sequence
  Description of Artificial Sequence: Synthetic oligonucleotide
cgcagcggagccuuucacc

SEQ ID NO: 1144065 - RNA, 19 nt, Artificial Sequence
  Description of Artificial Sequence: Synthetic oligonucleotide
gcugugugaguuaguguuc

SEQ ID NO: 1144066 - RNA, 19 nt, Artificial Sequence
  Description of Artificial Sequence: Synthetic oligonucleotide
ggggcgaccguacgcgcug

SEQ ID NO: 1144067 - RNA, 19 nt, Artificial Sequence
  Description of Artificial Sequence: Synthetic oligonucleotide
ggcuggcuggaucguauga

SEQ ID NO: 1144068 - RNA, 19 nt, Artificial Sequence
  Description of Artificial Sequence: Synthetic oligonucleotide
cgaccguacgcgcugccgg

SEQ ID NO: 1144069 - RNA, 19 nt, Artificial Sequence
  Description of Artificial Sequence: Synthetic oligonucleotide
gggccuacgacgcaccccu

SEQ ID NO: 1144070 - RNA, 19 nt, Artificial Sequence
  Description of Artificial Sequence: Synthetic oligonucleotide
ggcucgauuucucguccuc

SEQ ID NO: 1144071 - RNA, 19 nt, Artificial Sequence
  Description of Artificial Sequence: Synthetic oligonucleotide
gguucuggugugcuagggu

SEQ ID NO: 1144072 - RNA, 19 nt, Artificial Sequence
  Description of Artificial Sequence: Synthetic oligonucleotide
ggucggggauagccacugg

SEQ ID NO: 1144073 - RNA, 19 nt, Artificial Sequence
  Description of Artificial Sequence: Synthetic oligonucleotide
guacgcgcugccggccccg

SEQ ID NO: 1144074 - RNA, 19 nt, Artificial Sequence
  Description of Artificial Sequence: Synthetic oligonucleotide
gggcgugucgcagcggagc

SEQ ID NO: 1144075 - RNA, 19 nt, Artificial Sequence
  Description of Artificial Sequence: Synthetic oligonucleotide
cacuuagcugcugcuaacu

SEQ ID NO: 1144076 - RNA, 19 nt, Artificial Sequence
  Description of Artificial Sequence: Synthetic oligonucleotide
aggauuucucuggccuaaa

SEQ ID NO: 1144077 - RNA, 19 nt, Artificial Sequence
  Description of Artificial Sequence: Synthetic oligonucleotide
guccgcgucggcggcugcg

SEQ ID NO: 1144078 - RNA, 19 nt, Artificial Sequence
  Description of Artificial Sequence: Synthetic oligonucleotide
cugcgcggggcgaccguac

SEQ ID NO: 1144079 - RNA, 19 nt, Artificial Sequence
  Description of Artificial Sequence: Synthetic oligonucleotide
gacugggcugccaggauuu

SEQ ID NO: 1144080 - RNA, 19 nt, Artificial Sequence
  Description of Artificial Sequence: Synthetic oligonucleotide
ccuugauguggaggcuugg

SEQ ID NO: 1144081 - RNA, 19 nt, Artificial Sequence
  Description of Artificial Sequence: Synthetic oligonucleotide
uagggcuggcuggaucgua

SEQ ID NO: 1144082 - RNA, 19 nt, Artificial Sequence
  Description of Artificial Sequence: Synthetic oligonucleotide
cucggucccgguuccccga

SEQ ID NO: 1144083 - RNA, 19 nt, Artificial Sequence
  Description of Artificial Sequence: Synthetic oligonucleotide
uacgcgcugccggccccgg

SEQ ID NO: 1144084 - RNA, 19 nt, Artificial Sequence
  Description of Artificial Sequence: Synthetic oligonucleotide
gaugcucggugggguccgc

SEQ ID NO: 1144085 - RNA, 19 nt, Artificial Sequence
  Description of Artificial Sequence: Synthetic oligonucleotide
ccuaaaggggacauauuuu

SEQ ID NO: 1144086 - RNA, 19 nt, Artificial Sequence
  Description of Artificial Sequence: Synthetic oligonucleotide
gggucgccacugcugcugc

SEQ ID NO: 1144087 - RNA, 19 nt, Artificial Sequence
  Description of Artificial Sequence: Synthetic oligonucleotide
agguaccgggcggcagggg

SEQ ID NO: 1144088 - RNA, 19 nt, Artificial Sequence
  Description of Artificial Sequence: Synthetic oligonucleotide
ucgcggagucuugucuuuu

SEQ ID NO: 1144089 - RNA, 19 nt, Artificial Sequence
  Description of Artificial Sequence: Synthetic oligonucleotide
ggacuguacuggggauagg

SEQ ID NO: 1144090 - RNA, 19 nt, Artificial Sequence
  Description of Artificial Sequence: Synthetic oligonucleotide
cguaugacuccuggccggg

SEQ ID NO: 1144091 - RNA, 19 nt, Artificial Sequence
  Description of Artificial Sequence: Synthetic oligonucleotide
ccuuaucuccuucugggau

SEQ ID NO: 1144092 - RNA, 19 nt, Artificial Sequence
  Description of Artificial Sequence: Synthetic oligonucleotide
ccuacgacgcaccccugga

SEQ ID NO: 1144093 - RNA, 19 nt, Artificial Sequence
  Description of Artificial Sequence: Synthetic oligonucleotide
ccgguuccccgaagucucg

SEQ ID NO: 1144094 - RNA, 19 nt, Artificial Sequence
  Description of Artificial Sequence: Synthetic oligonucleotide
guacaugcccugggcugga

SEQ ID NO: 1144095 - RNA, 19 nt, Artificial Sequence
  Description of Artificial Sequence: Synthetic oligonucleotide
ggagccucgcggagucuug

SEQ ID NO: 1144096 - RNA, 19 nt, Artificial Sequence
  Description of Artificial Sequence: Synthetic oligonucleotide
cggagcucggucccgguuc

SEQ ID NO: 1144097 - RNA, 19 nt, Artificial Sequence
  Description of Artificial Sequence: Synthetic oligonucleotide
cugcccgcuggugcugcug

SEQ ID NO: 1144098 - RNA, 19 nt, Artificial Sequence
  Description of Artificial Sequence: Synthetic oligonucleotide
cacucacagcauugaugcu

SEQ ID NO: 1144099 - RNA, 19 nt, Artificial Sequence
  Description of Artificial Sequence: Synthetic oligonucleotide
ggucccgguuccccgaagu

SEQ ID NO: 1144100 - RNA, 19 nt, Artificial Sequence
  Description of Artificial Sequence: Synthetic oligonucleotide
cgcggggcgaccguacgcg

SEQ ID NO: 1144101 - RNA, 19 nt, Artificial Sequence
  Description of Artificial Sequence: Synthetic oligonucleotide
gguuccccgaagucucggu

SEQ ID NO: 1144102 - RNA, 19 nt, Artificial Sequence
  Description of Artificial Sequence: Synthetic oligonucleotide
ccguacgcgcugccggccc

SEQ ID NO: 1144103 - RNA, 19 nt, Artificial Sequence
  Description of Artificial Sequence: Synthetic oligonucleotide
gagccucgcggagucuugu

SEQ ID NO: 1144104 - RNA, 19 nt, Artificial Sequence
  Description of Artificial Sequence: Synthetic oligonucleotide
cugcugcuacucuuucgau

SEQ ID NO: 1144105 - RNA, 19 nt, Artificial Sequence
  Description of Artificial Sequence: Synthetic oligonucleotide
gccucgcggagucuugucu

SEQ ID NO: 1144106 - RNA, 19 nt, Artificial Sequence
  Description of Artificial Sequence: Synthetic oligonucleotide
gcucuacaucaaagcauaa

SEQ ID NO: 1144107 - RNA, 19 nt, Artificial Sequence
  Description of Artificial Sequence: Synthetic oligonucleotide
gggucggaggaggggucgc

SEQ ID NO: 1144108 - RNA, 19 nt, Artificial Sequence
  Description of Artificial Sequence: Synthetic oligonucleotide
cucgcggagucuugucuuu

SEQ ID NO: 1144109 - RNA, 19 nt, Artificial Sequence
  Description of Artificial Sequence: Synthetic oligonucleotide
ggggacccaccucuccgaa

SEQ ID NO: 1144110 - RNA, 19 nt, Artificial Sequence
  Description of Artificial Sequence: Synthetic oligonucleotide
gcggggcgaccguacgcgc

SEQ ID NO: 1144111 - RNA, 19 nt, Artificial Sequence
  Description of Artificial Sequence: Synthetic oligonucleotide
guggaggcuuggauacccu

SEQ ID NO: 1144112 - RNA, 19 nt, Artificial Sequence
  Description of Artificial Sequence: Synthetic oligonucleotide
gucggcggcugcgguucug

SEQ ID NO: 1144113 - RNA, 19 nt, Artificial Sequence
  Description of Artificial Sequence: Synthetic oligonucleotide
guagggcuggcuggaucgu

SEQ ID NO: 1144114 - RNA, 19 nt, Artificial Sequence
  Description of Artificial Sequence: Synthetic oligonucleotide
ggggcgugucgcagcggag

SEQ ID NO: 1144115 - RNA, 19 nt, Artificial Sequence
  Description of Artificial Sequence: Synthetic oligonucleotide
gggcugcgcggggcgaccg

SEQ ID NO: 1144116 - RNA, 19 nt, Artificial Sequence
  Description of Artificial Sequence: Synthetic oligonucleotide
gcccuagggcucguaugac

SEQ ID NO: 1144117 - RNA, 19 nt, Artificial Sequence
  Description of Artificial Sequence: Synthetic oligonucleotide
gguccgcacggaaccucac

SEQ ID NO: 1144118 - RNA, 19 nt, Artificial Sequence
  Description of Artificial Sequence: Synthetic oligonucleotide
cagauggggcgaugggcuu

SEQ ID NO: 1144119 - RNA, 19 nt, Artificial Sequence
  Description of Artificial Sequence: Synthetic oligonucleotide
ggguccgcgucggcggcug

SEQ ID NO: 1144120 - RNA, 19 nt, Artificial Sequence
  Description of Artificial Sequence: Synthetic oligonucleotide
gcggucugcgccugagccu

SEQ ID NO: 1144121 - RNA, 19 nt, Artificial Sequence
  Description of Artificial Sequence: Synthetic oligonucleotide
cguacgcgcugccggcccc

SEQ ID NO: 1144122 - RNA, 19 nt, Artificial Sequence
  Description of Artificial Sequence: Synthetic oligonucleotide
cugcaccauccacugcaau

SEQ ID NO: 1144123 - RNA, 19 nt, Artificial Sequence
  Description of Artificial Sequence: Synthetic oligonucleotide
cgguuccccgaagucucgg

SEQ ID NO: 1144124 - RNA, 19 nt, Artificial Sequence
  Description of Artificial Sequence: Synthetic oligonucleotide
gggcgaccguacgcgcugc

SEQ ID NO: 1144125 - RNA, 19 nt, Artificial Sequence
  Description of Artificial Sequence: Synthetic oligonucleotide
cugggcggucugcgccuga

SEQ ID NO: 1144126 - RNA, 19 nt, Artificial Sequence
  Description of Artificial Sequence: Synthetic oligonucleotide
ggacaccugucugggugua

SEQ ID NO: 1144127 - RNA, 19 nt, Artificial Sequence
  Description of Artificial Sequence: Synthetic oligonucleotide
auggggcgaugggcuucca

SEQ ID NO: 1144128 - RNA, 19 nt, Artificial Sequence
  Description of Artificial Sequence: Synthetic oligonucleotide
gcccuugauguggaggcuu

SEQ ID NO: 1144129 - RNA, 19 nt, Artificial Sequence
  Description of Artificial Sequence: Synthetic oligonucleotide
ggccuacgacgcaccccug

SEQ ID NO: 1144130 - RNA, 19 nt, Artificial Sequence
  Description of Artificial Sequence: Synthetic oligonucleotide
ccccuggagguggcccuag

SEQ ID NO: 1144131 - RNA, 19 nt, Artificial Sequence
  Description of Artificial Sequence: Synthetic oligonucleotide
cucacucugcggcgcucuu

SEQ ID NO: 1144132 - RNA, 19 nt, Artificial Sequence
  Description of Artificial Sequence: Synthetic oligonucleotide
ggccuaaaggggacauauu

SEQ ID NO: 1144133 - RNA, 19 nt, Artificial Sequence
  Description of Artificial Sequence: Synthetic oligonucleotide
gcugcgcggggcgaccgua

SEQ ID NO: 1144134 - RNA, 19 nt, Artificial Sequence
  Description of Artificial Sequence: Synthetic oligonucleotide
ggcuggugggcugcccgcu

SEQ ID NO: 1144135 - RNA, 19 nt, Artificial Sequence
  Description of Artificial Sequence: Synthetic oligonucleotide
gcggagccuuucaccucuc

SEQ ID NO: 1144136 - RNA, 19 nt, Artificial Sequence
  Description of Artificial Sequence: Synthetic oligonucleotide
gcgugucgcagcggagccu

SEQ ID NO: 1144137 - RNA, 19 nt, Artificial Sequence
  Description of Artificial Sequence: Synthetic oligonucleotide
ggcugcgcggggcgaccgu

SEQ ID NO: 1144138 - RNA, 19 nt, Artificial Sequence
  Description of Artificial Sequence: Synthetic oligonucleotide
cggggcgaccguacgcgcu

SEQ ID NO: 1144139 - RNA, 19 nt, Artificial Sequence
  Description of Artificial Sequence: Synthetic oligonucleotide
gggguccgcgucggcggcu

SEQ ID NO: 1144140 - RNA, 19 nt, Artificial Sequence
  Description of Artificial Sequence: Synthetic oligonucleotide
cgcgucggcggcugcgguu

SEQ ID NO: 1144141 - RNA, 19 nt, Artificial Sequence
  Description of Artificial Sequence: Synthetic oligonucleotide
aacgugaugagaaucaacc

SEQ ID NO: 1144142 - RNA, 19 nt, Artificial Sequence
  Description of Artificial Sequence: Synthetic oligonucleotide
uucgaguacagcaaguucg

SEQ ID NO: 1144143 - RNA, 19 nt, Artificial Sequence
  Description of Artificial Sequence: Synthetic oligonucleotide
aauuaucugccguacagag

SEQ ID NO: 1144144 - RNA, 19 nt, Artificial Sequence
  Description of Artificial Sequence: Synthetic oligonucleotide
aguacagcaaguucgaguc

SEQ ID NO: 1144145 - RNA, 19 nt, Artificial Sequence
  Description of Artificial Sequence: Synthetic oligonucleotide
guuguuaugggguagccgg

SEQ ID NO: 1144146 - RNA, 19 nt, Artificial Sequence
  Description of Artificial Sequence: Synthetic oligonucleotide
aacacaauguucucagguc

SEQ ID NO: 1144147 - RNA, 19 nt, Artificial Sequence
  Description of Artificial Sequence: Synthetic oligonucleotide
auuucaagcaaguccaaag

SEQ ID NO: 1144148 - RNA, 19 nt, Artificial Sequence
  Description of Artificial Sequence: Synthetic oligonucleotide
uccucgaaaauccagcuga

SEQ ID NO: 1144149 - RNA, 19 nt, Artificial Sequence
  Description of Artificial Sequence: Synthetic oligonucleotide
uacaaucgggaccaugugg

SEQ ID NO: 1144150 - RNA, 19 nt, Artificial Sequence
  Description of Artificial Sequence: Synthetic oligonucleotide
aaccaaacagcaguagucg

SEQ ID NO: 1144151 - RNA, 19 nt, Artificial Sequence
  Description of Artificial Sequence: Synthetic oligonucleotide
agaugguucugccagcugg

SEQ ID NO: 1144152 - RNA, 19 nt, Artificial Sequence
  Description of Artificial Sequence: Synthetic oligonucleotide
ucugcuagucuguugaucu

SEQ ID NO: 1144153 - RNA, 19 nt, Artificial Sequence
  Description of Artificial Sequence: Synthetic oligonucleotide
ucucgugcaaagcagggcc

SEQ ID NO: 1144154 - RNA, 19 nt, Artificial Sequence
  Description of Artificial Sequence: Synthetic oligonucleotide
cuaagaauccuaugggcag

SEQ ID NO: 1144155 - RNA, 19 nt, Artificial Sequence
  Description of Artificial Sequence: Synthetic oligonucleotide
acaagcgugggucucuccc

SEQ ID NO: 1144156 - RNA, 19 nt, Artificial Sequence
  Description of Artificial Sequence: Synthetic oligonucleotide
ucaucucucgugcaaagca

SEQ ID NO: 1144157 - RNA, 19 nt, Artificial Sequence
  Description of Artificial Sequence: Synthetic oligonucleotide
gagaucaccagcuggagca

SEQ ID NO: 1144158 - RNA, 19 nt, Artificial Sequence
  Description of Artificial Sequence: Synthetic oligonucleotide
guagucguccacuagggcc

SEQ ID NO: 1144159 - RNA, 19 nt, Artificial Sequence
  Description of Artificial Sequence: Synthetic oligonucleotide
cucuaagaauccuaugggc

SEQ ID NO: 1144160 - RNA, 19 nt, Artificial Sequence
  Description of Artificial Sequence: Synthetic oligonucleotide
uucaagcaaguccaaaggu

SEQ ID NO: 1144161 - RNA, 19 nt, Artificial Sequence
  Description of Artificial Sequence: Synthetic oligonucleotide
uagcggaugggccugaaug

SEQ ID NO: 1144162 - RNA, 19 nt, Artificial Sequence
  Description of Artificial Sequence: Synthetic oligonucleotide
agugucugaaccgagcccg

SEQ ID NO: 1144163 - RNA, 19 nt, Artificial Sequence
  Description of Artificial Sequence: Synthetic oligonucleotide
aaaacuugcauugguggca

SEQ ID NO: 1144164 - RNA, 19 nt, Artificial Sequence
  Description of Artificial Sequence: Synthetic oligonucleotide
aggagaaaauuaucugccg

SEQ ID NO: 1144165 - RNA, 19 nt, Artificial Sequence
  Description of Artificial Sequence: Synthetic oligonucleotide
gaauccuaugggcagguug

SEQ ID NO: 1144166 - RNA, 19 nt, Artificial Sequence
  Description of Artificial Sequence: Synthetic oligonucleotide
gauggggaaucccaacagg

SEQ ID NO: 1144167 - RNA, 19 nt, Artificial Sequence
  Description of Artificial Sequence: Synthetic oligonucleotide
ugauggggaaucccaacag

SEQ ID NO: 1144168 - RNA, 19 nt, Artificial Sequence
  Description of Artificial Sequence: Synthetic oligonucleotide
ggaggagaaaauuaucugc

SEQ ID NO: 1144169 - RNA, 19 nt, Artificial Sequence
  Description of Artificial Sequence: Synthetic oligonucleotide
uggagcgucauaaggaccu

SEQ ID NO: 1144170 - RNA, 19 nt, Artificial Sequence
  Description of Artificial Sequence: Synthetic oligonucleotide
aaucgggaccauguggucg

SEQ ID NO: 1144171 - RNA, 19 nt, Artificial Sequence
  Description of Artificial Sequence: Synthetic oligonucleotide
aauggaaacgucacgccug

SEQ ID NO: 1144172 - RNA, 19 nt, Artificial Sequence
  Description of Artificial Sequence: Synthetic oligonucleotide
aaguucgagucucugucug

SEQ ID NO: 1144173 - RNA, 19 nt, Artificial Sequence
  Description of Artificial Sequence: Synthetic oligonucleotide
ugcaugagugacaccauca

SEQ ID NO: 1144174 - RNA, 19 nt, Artificial Sequence
  Description of Artificial Sequence: Synthetic oligonucleotide
aacacaugaaaggaaaauu

SEQ ID NO: 1144175 - RNA, 19 nt, Artificial Sequence
  Description of Artificial Sequence: Synthetic oligonucleotide
uagucguccacuagggccc

SEQ ID NO: 1144176 - RNA, 19 nt, Artificial Sequence
  Description of Artificial Sequence: Synthetic oligonucleotide
uccaaaggugggaugaggu

SEQ ID NO: 1144177 - RNA, 19 nt, Artificial Sequence
  Description of Artificial Sequence: Synthetic oligonucleotide
uccucuacaaucgggacca

SEQ ID NO: 1144178 - RNA, 19 nt, Artificial Sequence
  Description of Artificial Sequence: Synthetic oligonucleotide
ugucacccauccaaucugg

SEQ ID NO: 1144179 - RNA, 19 nt, Artificial Sequence
  Description of Artificial Sequence: Synthetic oligonucleotide
aguagucguccacuagggc

SEQ ID NO: 1144180 - RNA, 19 nt, Artificial Sequence
  Description of Artificial Sequence: Synthetic oligonucleotide
ucucucgugcaaagcaggg

SEQ ID NO: 1144181 - RNA, 19 nt, Artificial Sequence
  Description of Artificial Sequence: Synthetic oligonucleotide
gagaaucaaccuugggucc

SEQ ID NO: 1144182 - RNA, 19 nt, Artificial Sequence
  Description of Artificial Sequence: Synthetic oligonucleotide
ugaccuugugaccaaugug

SEQ ID NO: 1144183 - RNA, 19 nt, Artificial Sequence
  Description of Artificial Sequence: Synthetic oligonucleotide
gucauaaggaccugcagga

SEQ ID NO: 1144184 - RNA, 19 nt, Artificial Sequence
  Description of Artificial Sequence: Synthetic oligonucleotide
ugaccaauguggccauugg

SEQ ID NO: 1144185 - RNA, 19 nt, Artificial Sequence
  Description of Artificial Sequence: Synthetic oligonucleotide
cuuacaugccagcauuccc

SEQ ID NO: 1144186 - RNA, 19 nt, Artificial Sequence
  Description of Artificial Sequence: Synthetic oligonucleotide
agcggaugggccugaaugg

SEQ ID NO: 1144187 - RNA, 19 nt, Artificial Sequence
  Description of Artificial Sequence: Synthetic oligonucleotide
aaugccugggccaagcggu

SEQ ID NO: 1144188 - RNA, 19 nt, Artificial Sequence
  Description of Artificial Sequence: Synthetic oligonucleotide
agcucgaucucuugggaag

SEQ ID NO: 1144189 - RNA, 19 nt, Artificial Sequence
  Description of Artificial Sequence: Synthetic oligonucleotide
ucguagagugcagucacgg

SEQ ID NO: 1144190 - RNA, 19 nt, Artificial Sequence
  Description of Artificial Sequence: Synthetic oligonucleotide
ucucaggucaucucucgug

SEQ ID NO: 1144191 - RNA, 19 nt, Artificial Sequence
  Description of Artificial Sequence: Synthetic oligonucleotide
aaucccaacaggugucccu

SEQ ID NO: 1144192 - RNA, 19 nt, Artificial Sequence
  Description of Artificial Sequence: Synthetic oligonucleotide
ggcaaauggacccgaaggg

SEQ ID NO: 1144193 - RNA, 19 nt, Artificial Sequence
  Description of Artificial Sequence: Synthetic oligonucleotide
aaggcacacagccgcuugg

SEQ ID NO: 1144194 - RNA, 19 nt, Artificial Sequence
  Description of Artificial Sequence: Synthetic oligonucleotide
gaccauguggucgaacagg

SEQ ID NO: 1144195 - RNA, 19 nt, Artificial Sequence
  Description of Artificial Sequence: Synthetic oligonucleotide
uuguuaugggguagccggg

SEQ ID NO: 1144196 - RNA, 19 nt, Artificial Sequence
  Description of Artificial Sequence: Synthetic oligonucleotide
gggcaaauggacccgaagg

SEQ ID NO: 1144197 - RNA, 19 nt, Artificial Sequence
  Description of Artificial Sequence: Synthetic oligonucleotide
aaauggacccgaagggcgg

SEQ ID NO: 1144198 - RNA, 19 nt, Artificial Sequence
  Description of Artificial Sequence: Synthetic oligonucleotide
gaucagcccaaugaggggc

SEQ ID NO: 1144199 - RNA, 19 nt, Artificial Sequence
  Description of Artificial Sequence: Synthetic oligonucleotide
ccaggcaacagcaacuugg

SEQ ID NO: 1144200 - RNA, 19 nt, Artificial Sequence
  Description of Artificial Sequence: Synthetic oligonucleotide
aaugaggggcgugagcucu

SEQ ID NO: 1144201 - RNA, 19 nt, Artificial Sequence
  Description of Artificial Sequence: Synthetic oligonucleotide
aagauccuuuccaagguga

SEQ ID NO: 1144202 - RNA, 19 nt, Artificial Sequence
  Description of Artificial Sequence: Synthetic oligonucleotide
aaccuuggguccucgaaaa

SEQ ID NO: 1144203 - RNA, 19 nt, Artificial Sequence
  Description of Artificial Sequence: Synthetic oligonucleotide
gcaguagucguccacuagg

SEQ ID NO: 1144204 - RNA, 19 nt, Artificial Sequence
  Description of Artificial Sequence: Synthetic oligonucleotide
ucaucugaugacaggucgu

SEQ ID NO: 1144205 - RNA, 19 nt, Artificial Sequence
  Description of Artificial Sequence: Synthetic oligonucleotide
gaucucuugggaagcauug

SEQ ID NO: 1144206 - RNA, 19 nt, Artificial Sequence
  Description of Artificial Sequence: Synthetic oligonucleotide
aucacucugggacugguau

SEQ ID NO: 1144207 - RNA, 19 nt, Artificial Sequence
  Description of Artificial Sequence: Synthetic oligonucleotide
uggggaaucccaacaggug

SEQ ID NO: 1144208 - RNA, 19 nt, Artificial Sequence
  Description of Artificial Sequence: Synthetic oligonucleotide
agcgguauguggcgacugc

SEQ ID NO: 1144209 - RNA, 19 nt, Artificial Sequence
  Description of Artificial Sequence: Synthetic oligonucleotide
ugagugacaccaucacucu

SEQ ID NO: 1144210 - RNA, 19 nt, Artificial Sequence
  Description of Artificial Sequence: Synthetic oligonucleotide
cauagagaccagcuuuccc

SEQ ID NO: 1144211 - RNA, 19 nt, Artificial Sequence
  Description of Artificial Sequence: Synthetic oligonucleotide
aagcgugggucucucccuc

SEQ ID NO: 1144212 - RNA, 19 nt, Artificial Sequence
  Description of Artificial Sequence: Synthetic oligonucleotide
acaccagcggaucagccca

SEQ ID NO: 1144213 - RNA, 19 nt, Artificial Sequence
  Description of Artificial Sequence: Synthetic oligonucleotide
gaaacggggacuggcacug

SEQ ID NO: 1144214 - RNA, 19 nt, Artificial Sequence
  Description of Artificial Sequence: Synthetic oligonucleotide
cucagaagggccgaccuag

SEQ ID NO: 1144215 - RNA, 19 nt, Artificial Sequence
  Description of Artificial Sequence: Synthetic oligonucleotide
caguagaucacaggcgucc

SEQ ID NO: 1144216 - RNA, 19 nt, Artificial Sequence
  Description of Artificial Sequence: Synthetic oligonucleotide
agccccauaggcgaguggg

SEQ ID NO: 1144217 - RNA, 19 nt, Artificial Sequence
  Description of Artificial Sequence: Synthetic oligonucleotide
cuccucuacaaucgggacc

SEQ ID NO: 1144218 - RNA, 19 nt, Artificial Sequence
  Description of Artificial Sequence: Synthetic oligonucleotide
acaaucgggaccauguggu

SEQ ID NO: 1144219 - RNA, 19 nt, Artificial Sequence
  Description of Artificial Sequence: Synthetic oligonucleotide
aacacggggauccgacaca

SEQ ID NO: 1144220 - RNA, 19 nt, Artificial Sequence
  Description of Artificial Sequence: Synthetic oligonucleotide
uuaacauguccagguagga

SEQ ID NO: 1144221 - RNA, 19 nt, Artificial Sequence
  Description of Artificial Sequence: Synthetic oligonucleotide
cugcauacaagcguggguc

SEQ ID NO: 1144222 - RNA, 19 nt, Artificial Sequence
  Description of Artificial Sequence: Synthetic oligonucleotide
uuggcggcucagaagggcc

SEQ ID NO: 1144223 - RNA, 19 nt, Artificial Sequence
  Description of Artificial Sequence: Synthetic oligonucleotide
ggggauccgacacacagcc

SEQ ID NO: 1144224 - RNA, 19 nt, Artificial Sequence
  Description of Artificial Sequence: Synthetic oligonucleotide
ucgaacaggaugaguccca

SEQ ID NO: 1144225 - RNA, 19 nt, Artificial Sequence
  Description of Artificial Sequence: Synthetic oligonucleotide
uuaugggguagccgggaac

SEQ ID NO: 1144226 - RNA, 19 nt, Artificial Sequence
  Description of Artificial Sequence: Synthetic oligonucleotide
agaaacggggacuggcacu

SEQ ID NO: 1144227 - RNA, 19 nt, Artificial Sequence
  Description of Artificial Sequence: Synthetic oligonucleotide
uacaugccagcauucccug

SEQ ID NO: 1144228 - RNA, 19 nt, Artificial Sequence
  Description of Artificial Sequence: Synthetic oligonucleotide
ggauccgacacacagccac

SEQ ID NO: 1144229 - RNA, 19 nt, Artificial Sequence
  Description of Artificial Sequence: Synthetic oligonucleotide
aagaugguucugccagcug

SEQ ID NO: 1144230 - RNA, 19 nt, Artificial Sequence
  Description of Artificial Sequence: Synthetic oligonucleotide
cuggagcagguuguuaugg

SEQ ID NO: 1144231 - RNA, 19 nt, Artificial Sequence
  Description of Artificial Sequence: Synthetic oligonucleotide
cacaccagcggaucagccc

SEQ ID NO: 1144232 - RNA, 19 nt, Artificial Sequence
  Description of Artificial Sequence: Synthetic oligonucleotide
aguagaucacaggcguccg

SEQ ID NO: 1144233 - RNA, 19 nt, Artificial Sequence
  Description of Artificial Sequence: Synthetic oligonucleotide
agggcaaauggacccgaag

SEQ ID NO: 1144234 - RNA, 19 nt, Artificial Sequence
  Description of Artificial Sequence: Synthetic oligonucleotide
cuucgaguacagcaaguuc

SEQ ID NO: 1144235 - RNA, 19 nt, Artificial Sequence
  Description of Artificial Sequence: Synthetic oligonucleotide
cgaagggcggcuuacaugc

SEQ ID NO: 1144236 - RNA, 19 nt, Artificial Sequence
  Description of Artificial Sequence: Synthetic oligonucleotide
caagcgguccagugcaagc

SEQ ID NO: 1144237 - RNA, 19 nt, Artificial Sequence
  Description of Artificial Sequence: Synthetic oligonucleotide
ugcauacaagcgugggucu

SEQ ID NO: 1144238 - RNA, 19 nt, Artificial Sequence
  Description of Artificial Sequence: Synthetic oligonucleotide
ucuccucuacaaucgggac

SEQ ID NO: 1144239 - RNA, 19 nt, Artificial Sequence
  Description of Artificial Sequence: Synthetic oligonucleotide
uauguggcgacugcugcac

SEQ ID NO: 1144240 - RNA, 19 nt, Artificial Sequence
  Description of Artificial Sequence: Synthetic oligonucleotide
aaucaaccuuggguccucg

SEQ ID NO: 1144241 - RNA, 19 nt, Artificial Sequence
  Description of Artificial Sequence: Synthetic oligonucleotide
aucucucgugcaaagcagg

SEQ ID NO: 1144242 - RNA, 19 nt, Artificial Sequence
  Description of Artificial Sequence: Synthetic oligonucleotide
gucacgccugagaugaagg

SEQ ID NO: 1144243 - RNA, 19 nt, Artificial Sequence
  Description of Artificial Sequence: Synthetic oligonucleotide
agguuguuaugggguagcc

SEQ ID NO: 1144244 - RNA, 19 nt, Artificial Sequence
  Description of Artificial Sequence: Synthetic oligonucleotide
gaguacagcaaguucgagu

SEQ ID NO: 1144245 - RNA, 19 nt, Artificial Sequence
  Description of Artificial Sequence: Synthetic oligonucleotide
cucacgcaguagaucacag

SEQ ID NO: 1144246 - RNA, 19 nt, Artificial Sequence
  Description of Artificial Sequence: Synthetic oligonucleotide
agguuaugaacuggcagca

SEQ ID NO: 1144247 - RNA, 19 nt, Artificial Sequence
  Description of Artificial Sequence: Synthetic oligonucleotide
ucucacgcaguagaucaca

SEQ ID NO: 1144248 - RNA, 19 nt, Artificial Sequence
  Description of Artificial Sequence: Synthetic oligonucleotide
cugaaccgagcccggaacc

SEQ ID NO: 1144249 - RNA, 19 nt, Artificial Sequence
  Description of Artificial Sequence: Synthetic oligonucleotide
caacacggggauccgacac

SEQ ID NO: 1144250 - RNA, 19 nt, Artificial Sequence
  Description of Artificial Sequence: Synthetic oligonucleotide
uccuaugggcagguuggcg

SEQ ID NO: 1144251 - RNA, 19 nt, Artificial Sequence
  Description of Artificial Sequence: Synthetic oligonucleotide
gggacugguauauuuaaaa

SEQ ID NO: 1144252 - RNA, 19 nt, Artificial Sequence
  Description of Artificial Sequence: Synthetic oligonucleotide
gauccgacacacagccacg

SEQ ID NO: 1144253 - RNA, 19 nt, Artificial Sequence
  Description of Artificial Sequence: Synthetic oligonucleotide
uucucaggucaucucucgu

SEQ ID NO: 1144254 - RNA, 19 nt, Artificial Sequence
  Description of Artificial Sequence: Synthetic oligonucleotide
aagcgguccagugcaagcu

SEQ ID NO: 1144255 - RNA, 19 nt, Artificial Sequence
  Description of Artificial Sequence: Synthetic oligonucleotide
aucgggaccauguggucga

SEQ ID NO: 1144256 - RNA, 19 nt, Artificial Sequence
  Description of Artificial Sequence: Synthetic oligonucleotide
auggaaacgucacgccuga

SEQ ID NO: 1144257 - RNA, 19 nt, Artificial Sequence
  Description of Artificial Sequence: Synthetic oligonucleotide
acacggggauccgacacac

SEQ ID NO: 1144258 - RNA, 19 nt, Artificial Sequence
  Description of Artificial Sequence: Synthetic oligonucleotide
gcuagucucacgcaguaga

SEQ ID NO: 1144259 - RNA, 19 nt, Artificial Sequence
  Description of Artificial Sequence: Synthetic oligonucleotide
auggggaaucccaacaggu

SEQ ID NO: 1144260 - RNA, 19 nt, Artificial Sequence
  Description of Artificial Sequence: Synthetic oligonucleotide
ucacgccugagaugaaggu

SEQ ID NO: 1144261 - RNA, 19 nt, Artificial Sequence
  Description of Artificial Sequence: Synthetic oligonucleotide
agcgguccagugcaagcuc

SEQ ID NO: 1144262 - RNA, 19 nt, Artificial Sequence
  Description of Artificial Sequence: Synthetic oligonucleotide
gucgaacaggaugaguccc

SEQ ID NO: 1144263 - RNA, 19 nt, Artificial Sequence
  Description of Artificial Sequence: Synthetic oligonucleotide
agaaucaaccuuggguccu

SEQ ID NO: 1144264 - RNA, 19 nt, Artificial Sequence
  Description of Artificial Sequence: Synthetic oligonucleotide
cggaucagcccaaugaggg

SEQ ID NO: 1144265 - RNA, 19 nt, Artificial Sequence
  Description of Artificial Sequence: Synthetic oligonucleotide
ggucgaacaggaugagucc

SEQ ID NO: 1144266 - RNA, 19 nt, Artificial Sequence
  Description of Artificial Sequence: Synthetic oligonucleotide
cuacaaucgggaccaugug

SEQ ID NO: 1144267 - RNA, 19 nt, Artificial Sequence
  Description of Artificial Sequence: Synthetic oligonucleotide
guaggcagcgcuggguggg

SEQ ID NO: 1144268 - RNA, 19 nt, Artificial Sequence
  Description of Artificial Sequence: Synthetic oligonucleotide
ucaggucaucucucgugca

SEQ ID NO: 1144269 - RNA, 19 nt, Artificial Sequence
  Description of Artificial Sequence: Synthetic oligonucleotide
acgcaguagaucacaggcg

SEQ ID NO: 1144270 - RNA, 19 nt, Artificial Sequence
  Description of Artificial Sequence: Synthetic oligonucleotide
gguagccgggaacacaaug

SEQ ID NO: 1144271 - RNA, 19 nt, Artificial Sequence
  Description of Artificial Sequence: Synthetic oligonucleotide
ugaaccgagcccggaacca

SEQ ID NO: 1144272 - RNA, 19 nt, Artificial Sequence
  Description of Artificial Sequence: Synthetic oligonucleotide
ggucguagagugcagucac

SEQ ID NO: 1144273 - RNA, 19 nt, Artificial Sequence
  Description of Artificial Sequence: Synthetic oligonucleotide
cagaaacggggacuggcac

SEQ ID NO: 1144274 - RNA, 19 nt, Artificial Sequence
  Description of Artificial Sequence: Synthetic oligonucleotide
gucggcuuguucccuuggg

SEQ ID NO: 1144275 - RNA, 19 nt, Artificial Sequence
  Description of Artificial Sequence: Synthetic oligonucleotide
gguuguuaugggguagccg

SEQ ID NO: 1144276 - RNA, 19 nt, Artificial Sequence
  Description of Artificial Sequence: Synthetic oligonucleotide
guccucgaaaauccagcug

SEQ ID NO: 1144277 - RNA, 19 nt, Artificial Sequence
  Description of Artificial Sequence: Synthetic oligonucleotide
uagccgggaacacaauguu

SEQ ID NO: 1144278 - RNA, 19 nt, Artificial Sequence
  Description of Artificial Sequence: Synthetic oligonucleotide
cagcuucgaguacagcaag

SEQ ID NO: 1144279 - RNA, 19 nt, Artificial Sequence
  Description of Artificial Sequence: Synthetic oligonucleotide
ggcgugagcucuaagaauc

SEQ ID NO: 1144280 - RNA, 19 nt, Artificial Sequence
  Description of Artificial Sequence: Synthetic oligonucleotide
guagaucacaggcguccgc

SEQ ID NO: 1144281 - RNA, 19 nt, Artificial Sequence
  Description of Artificial Sequence: Synthetic oligonucleotide
uggcgacugcugcacuggg

SEQ ID NO: 1144282 - RNA, 19 nt, Artificial Sequence
  Description of Artificial Sequence: Synthetic oligonucleotide
uccgacacacagccacggc

SEQ ID NO: 1144283 - RNA, 19 nt, Artificial Sequence
  Description of Artificial Sequence: Synthetic oligonucleotide
cucccugucacccauccaa

SEQ ID NO: 1144284 - RNA, 19 nt, Artificial Sequence
  Description of Artificial Sequence: Synthetic oligonucleotide
ugggcccgagaucaccagc

SEQ ID NO: 1144285 - RNA, 19 nt, Artificial Sequence
  Description of Artificial Sequence: Synthetic oligonucleotide
auccgacacacagccacgg

SEQ ID NO: 1144286 - RNA, 19 nt, Artificial Sequence
  Description of Artificial Sequence: Synthetic oligonucleotide
ucguccacuagggcccugg

SEQ ID NO: 1144287 - RNA, 19 nt, Artificial Sequence
  Description of Artificial Sequence: Synthetic oligonucleotide
cauuggaaaggcaaggcuu

SEQ ID NO: 1144288 - RNA, 19 nt, Artificial Sequence
  Description of Artificial Sequence: Synthetic oligonucleotide
aacggggacuggcacugaa

SEQ ID NO: 1144289 - RNA, 19 nt, Artificial Sequence
  Description of Artificial Sequence: Synthetic oligonucleotide
cagguuguuaugggguagc

SEQ ID NO: 1144290 - RNA, 19 nt, Artificial Sequence
  Description of Artificial Sequence: Synthetic oligonucleotide
auuaucugccguacagagu

SEQ ID NO: 1144291 - RNA, 19 nt, Artificial Sequence
  Description of Artificial Sequence: Synthetic oligonucleotide
gcaaauggacccgaagggc

SEQ ID NO: 1144292 - RNA, 19 nt, Artificial Sequence
  Description of Artificial Sequence: Synthetic oligonucleotide
caggucguagagugcaguc

SEQ ID NO: 1144293 - RNA, 19 nt, Artificial Sequence
  Description of Artificial Sequence: Synthetic oligonucleotide
cgcuuggcggcucagaagg

SEQ ID NO: 1144294 - RNA, 19 nt, Artificial Sequence
  Description of Artificial Sequence: Synthetic oligonucleotide
caaggcacacagccgcuug

SEQ ID NO: 1144295 - RNA, 19 nt, Artificial Sequence
  Description of Artificial Sequence: Synthetic oligonucleotide
uggcuagucucacgcagua

SEQ ID NO: 1144296 - RNA, 19 nt, Artificial Sequence
  Description of Artificial Sequence: Synthetic oligonucleotide
guauguggcgacugcugca

SEQ ID NO: 1144297 - RNA, 19 nt, Artificial Sequence
  Description of Artificial Sequence: Synthetic oligonucleotide
ucauccggcugucgucggc

SEQ ID NO: 1144298 - RNA, 19 nt, Artificial Sequence
  Description of Artificial Sequence: Synthetic oligonucleotide
ucgugcaaagcagggcccc

SEQ ID NO: 1144299 - RNA, 19 nt, Artificial Sequence
  Description of Artificial Sequence: Synthetic oligonucleotide
ggucaucucucgugcaaag

SEQ ID NO: 1144300 - RNA, 19 nt, Artificial Sequence
  Description of Artificial Sequence: Synthetic oligonucleotide
auacaagcgugggucucuc

SEQ ID NO: 1144301 - RNA, 19 nt, Artificial Sequence
  Description of Artificial Sequence: Synthetic oligonucleotide
acuagggcccuggcuaguc

SEQ ID NO: 1144302 - RNA, 19 nt, Artificial Sequence
  Description of Artificial Sequence: Synthetic oligonucleotide
cucucgugcaaagcagggc

SEQ ID NO: 1144303 - RNA, 19 nt, Artificial Sequence
  Description of Artificial Sequence: Synthetic oligonucleotide
agccgggaacacaauguuc

SEQ ID NO: 1144304 - RNA, 19 nt, Artificial Sequence
  Description of Artificial Sequence: Synthetic oligonucleotide
uagucucacgcaguagauc

SEQ ID NO: 1144305 - RNA, 19 nt, Artificial Sequence
  Description of Artificial Sequence: Synthetic oligonucleotide
cugggacugguauauuuaa

SEQ ID NO: 1144306 - RNA, 19 nt, Artificial Sequence
  Description of Artificial Sequence: Synthetic oligonucleotide
ucugugcaugagugacacc

SEQ ID NO: 1144307 - RNA, 19 nt, Artificial Sequence
  Description of Artificial Sequence: Synthetic oligonucleotide
aggucguagagugcaguca

SEQ ID NO: 1144308 - RNA, 19 nt, Artificial Sequence
  Description of Artificial Sequence: Synthetic oligonucleotide
acggccauagagaccagcu

SEQ ID NO: 1144309 - RNA, 19 nt, Artificial Sequence
  Description of Artificial Sequence: Synthetic oligonucleotide
guggcgacugcugcacugg

SEQ ID NO: 1144310 - RNA, 19 nt, Artificial Sequence
  Description of Artificial Sequence: Synthetic oligonucleotide
agcgucauaaggaccugca

SEQ ID NO: 1144311 - RNA, 19 nt, Artificial Sequence
  Description of Artificial Sequence: Synthetic oligonucleotide
cuucacacaccagcggauc

SEQ ID NO: 1144312 - RNA, 19 nt, Artificial Sequence
  Description of Artificial Sequence: Synthetic oligonucleotide
uacaagcgugggucucucc

SEQ ID NO: 1144313 - RNA, 19 nt, Artificial Sequence
  Description of Artificial Sequence: Synthetic oligonucleotide
gagcgucauaaggaccugc

SEQ ID NO: 1144314 - RNA, 19 nt, Artificial Sequence
  Description of Artificial Sequence: Synthetic oligonucleotide
gucguagagugcagucacg

SEQ ID NO: 1144315 - RNA, 19 nt, Artificial Sequence
  Description of Artificial Sequence: Synthetic oligonucleotide
gugaccuugugaccaaugu

SEQ ID NO: 1144316 - RNA, 19 nt, Artificial Sequence
  Description of Artificial Sequence: Synthetic oligonucleotide
ccuggcuagucucacgcag

SEQ ID NO: 1144317 - RNA, 19 nt, Artificial Sequence
  Description of Artificial Sequence: Synthetic oligonucleotide
cugccguacagaguccuug

SEQ ID NO: 1144318 - RNA, 19 nt, Artificial Sequence
  Description of Artificial Sequence: Synthetic oligonucleotide
ccgacacacagccacggcc

SEQ ID NO: 1144319 - RNA, 19 nt, Artificial Sequence
  Description of Artificial Sequence: Synthetic oligonucleotide
caaccuuggguccucgaaa

SEQ ID NO: 1144320 - RNA, 19 nt, Artificial Sequence
  Description of Artificial Sequence: Synthetic oligonucleotide
gcuuacaugccagcauucc

SEQ ID NO: 1144321 - RNA, 19 nt, Artificial Sequence
  Description of Artificial Sequence: Synthetic oligonucleotide
ggguccucgaaaauccagc

SEQ ID NO: 1144322 - RNA, 19 nt, Artificial Sequence
  Description of Artificial Sequence: Synthetic oligonucleotide
caagcucgaucucuuggga

SEQ ID NO: 1144323 - RNA, 19 nt, Artificial Sequence
  Description of Artificial Sequence: Synthetic oligonucleotide
ugggguagccgggaacaca

SEQ ID NO: 1144324 - RNA, 19 nt, Artificial Sequence
  Description of Artificial Sequence: Synthetic oligonucleotide
uggcagagacacgucacau

SEQ ID NO: 1144325 - RNA, 19 nt, Artificial Sequence
  Description of Artificial Sequence: Synthetic oligonucleotide
gcucauccggcugucgucg

SEQ ID NO: 1144326 - RNA, 19 nt, Artificial Sequence
  Description of Artificial Sequence: Synthetic oligonucleotide
caaugaggggcgugagcuc

SEQ ID NO: 1144327 - RNA, 19 nt, Artificial Sequence
  Description of Artificial Sequence: Synthetic oligonucleotide
caaucgggaccaugugguc

SEQ ID NO: 1144328 - RNA, 19 nt, Artificial Sequence
  Description of Artificial Sequence: Synthetic oligonucleotide
accgagcccggaaccaaac

SEQ ID NO: 1144329 - RNA, 19 nt, Artificial Sequence
  Description of Artificial Sequence: Synthetic oligonucleotide
guagccgggaacacaaugu

SEQ ID NO: 1144330 - RNA, 19 nt, Artificial Sequence
  Description of Artificial Sequence: Synthetic oligonucleotide
augggguagccgggaacac

SEQ ID NO: 1144331 - RNA, 19 nt, Artificial Sequence
  Description of Artificial Sequence: Synthetic oligonucleotide
gaaucaaccuuggguccuc

SEQ ID NO: 1144332 - RNA, 19 nt, Artificial Sequence
  Description of Artificial Sequence: Synthetic oligonucleotide
aucugccguacagaguccu

SEQ ID NO: 1144333 - RNA, 19 nt, Artificial Sequence
  Description of Artificial Sequence: Synthetic oligonucleotide
uccggcugucgucggcuug

SEQ ID NO: 1144334 - RNA, 19 nt, Artificial Sequence
  Description of Artificial Sequence: Synthetic oligonucleotide
ggaggcauccaggcaacag

SEQ ID NO: 1144335 - RNA, 19 nt, Artificial Sequence
  Description of Artificial Sequence: Synthetic oligonucleotide
augguucugccagcuggag

SEQ ID NO: 1144336 - RNA, 19 nt, Artificial Sequence
  Description of Artificial Sequence: Synthetic oligonucleotide
cauuucaagcaaguccaaa

SEQ ID NO: 1144337 - RNA, 19 nt, Artificial Sequence
  Description of Artificial Sequence: Synthetic oligonucleotide
ggggaaucccaacaggugu

SEQ ID NO: 1144338 - RNA, 19 nt, Artificial Sequence
  Description of Artificial Sequence: Synthetic oligonucleotide
ugucugaaccgagcccgga

SEQ ID NO: 1144339 - RNA, 19 nt, Artificial Sequence
  Description of Artificial Sequence: Synthetic oligonucleotide
guuaugggguagccgggaa

SEQ ID NO: 1144340 - RNA, 19 nt, Artificial Sequence
  Description of Artificial Sequence: Synthetic oligonucleotide
agggcggcuuacaugccag

SEQ ID NO: 1144341 - RNA, 19 nt, Artificial Sequence
  Description of Artificial Sequence: Synthetic oligonucleotide
gugcaagcucgaucucuug

SEQ ID NO: 1144342 - RNA, 19 nt, Artificial Sequence
  Description of Artificial Sequence: Synthetic oligonucleotide
gaccuagcggaugggccug

SEQ ID NO: 1144343 - RNA, 19 nt, Artificial Sequence
  Description of Artificial Sequence: Synthetic oligonucleotide
caagcucauccggcugucg

SEQ ID NO: 1144344 - RNA, 19 nt, Artificial Sequence
  Description of Artificial Sequence: Synthetic oligonucleotide
ccgaccuagcggaugggcc

SEQ ID NO: 1144345 - RNA, 19 nt, Artificial Sequence
  Description of Artificial Sequence: Synthetic oligonucleotide
ggggcgugagcucuaagaa

SEQ ID NO: 1144346 - RNA, 19 nt, Artificial Sequence
  Description of Artificial Sequence: Synthetic oligonucleotide
ccaagaugguucugccagc

SEQ ID NO: 1144347 - RNA, 19 nt, Artificial Sequence
  Description of Artificial Sequence: Synthetic oligonucleotide
agcuucgaguacagcaagu

SEQ ID NO: 1144348 - RNA, 19 nt, Artificial Sequence
  Description of Artificial Sequence: Synthetic oligonucleotide
aggucaucucucgugcaaa

SEQ ID NO: 1144349 - RNA, 19 nt, Artificial Sequence
  Description of Artificial Sequence: Synthetic oligonucleotide
cugggcccgagaucaccag

SEQ ID NO: 1144350 - RNA, 19 nt, Artificial Sequence
  Description of Artificial Sequence: Synthetic oligonucleotide
gugucugaaccgagcccgg

SEQ ID NO: 1144351 - RNA, 19 nt, Artificial Sequence
  Description of Artificial Sequence: Synthetic oligonucleotide
cucgaaaauccagcugaca

SEQ ID NO: 1144352 - RNA, 19 nt, Artificial Sequence
  Description of Artificial Sequence: Synthetic oligonucleotide
cgagcccggaaccaaacag

SEQ ID NO: 1144353 - RNA, 19 nt, Artificial Sequence
  Description of Artificial Sequence: Synthetic oligonucleotide
agagcgguauguggcgacu

SEQ ID NO: 1144354 - RNA, 19 nt, Artificial Sequence
  Description of Artificial Sequence: Synthetic oligonucleotide
gaggggcgugagcucuaag

SEQ ID NO: 1144355 - RNA, 19 nt, Artificial Sequence
  Description of Artificial Sequence: Synthetic oligonucleotide
acggggacuggcacugaag

SEQ ID NO: 1144356 - RNA, 19 nt, Artificial Sequence
  Description of Artificial Sequence: Synthetic oligonucleotide
caggucaucucucgugcaa

SEQ ID NO: 1144357 - RNA, 19 nt, Artificial Sequence
  Description of Artificial Sequence: Synthetic oligonucleotide
gaagggcggcuuacaugcc

SEQ ID NO: 1144358 - RNA, 19 nt, Artificial Sequence
  Description of Artificial Sequence: Synthetic oligonucleotide
uggaaacgucacgccugag

SEQ ID NO: 1144359 - RNA, 19 nt, Artificial Sequence
  Description of Artificial Sequence: Synthetic oligonucleotide
acucccugucacccaucca

SEQ ID NO: 1144360 - RNA, 19 nt, Artificial Sequence
  Description of Artificial Sequence: Synthetic oligonucleotide
ggugaccuugugaccaaug

SEQ ID NO: 1144361 - RNA, 19 nt, Artificial Sequence
  Description of Artificial Sequence: Synthetic oligonucleotide
ccucgaaaauccagcugac

SEQ ID NO: 1144362 - RNA, 19 nt, Artificial Sequence
  Description of Artificial Sequence: Synthetic oligonucleotide
uaaggaccugcaggacgcu

SEQ ID NO: 1144363 - RNA, 19 nt, Artificial Sequence
  Description of Artificial Sequence: Synthetic oligonucleotide
gggaaucccaacagguguc

SEQ ID NO: 1144364 - RNA, 19 nt, Artificial Sequence
  Description of Artificial Sequence: Synthetic oligonucleotide
ugucgucggcuuguucccu

SEQ ID NO: 1144365 - RNA, 19 nt, Artificial Sequence
  Description of Artificial Sequence: Synthetic oligonucleotide
gguccucgaaaauccagcu

SEQ ID NO: 1144366 - RNA, 19 nt, Artificial Sequence
  Description of Artificial Sequence: Synthetic oligonucleotide
caucugaugacaggucgua

SEQ ID NO: 1144367 - RNA, 19 nt, Artificial Sequence
  Description of Artificial Sequence: Synthetic oligonucleotide
ggccauagagaccagcuuu

SEQ ID NO: 1144368 - RNA, 19 nt, Artificial Sequence
  Description of Artificial Sequence: Synthetic oligonucleotide
gccgggaacacaauguucu

SEQ ID NO: 1144369 - RNA, 19 nt, Artificial Sequence
  Description of Artificial Sequence: Synthetic oligonucleotide
ccgaagggcggcuuacaug

SEQ ID NO: 1144370 - RNA, 19 nt, Artificial Sequence
  Description of Artificial Sequence: Synthetic oligonucleotide
gcagcuucgaguacagcaa

SEQ ID NO: 1144371 - RNA, 19 nt, Artificial Sequence
  Description of Artificial Sequence: Synthetic oligonucleotide
gaaccgagcccggaaccaa

SEQ ID NO: 1144372 - RNA, 19 nt, Artificial Sequence
  Description of Artificial Sequence: Synthetic oligonucleotide
aaacggggacuggcacuga

SEQ ID NO: 1144373 - RNA, 19 nt, Artificial Sequence
  Description of Artificial Sequence: Synthetic oligonucleotide
agggccgaccuagcggaug

SEQ ID NO: 1144374 - RNA, 19 nt, Artificial Sequence
  Description of Artificial Sequence: Synthetic oligonucleotide
gcagaaacggggacuggca

SEQ ID NO: 1144375 - RNA, 19 nt, Artificial Sequence
  Description of Artificial Sequence: Synthetic oligonucleotide
cccaaugaggggcgugagc

SEQ ID NO: 1144376 - RNA, 19 nt, Artificial Sequence
  Description of Artificial Sequence: Synthetic oligonucleotide
ucagcccaaugaggggcgu

SEQ ID NO: 1144377 - RNA, 19 nt, Artificial Sequence
  Description of Artificial Sequence: Synthetic oligonucleotide
ccacuagggcccuggcuag

SEQ ID NO: 1144378 - RNA, 19 nt, Artificial Sequence
  Description of Artificial Sequence: Synthetic oligonucleotide
ugaggggcgugagcucuaa

SEQ ID NO: 1144379 - RNA, 19 nt, Artificial Sequence
  Description of Artificial Sequence: Synthetic oligonucleotide
guacagcaaguucgagucu

SEQ ID NO: 1144380 - RNA, 19 nt, Artificial Sequence
  Description of Artificial Sequence: Synthetic oligonucleotide
cauacaagcgugggucucu

SEQ ID NO: 1144381 - RNA, 19 nt, Artificial Sequence
  Description of Artificial Sequence: Synthetic oligonucleotide
ggcuagucucacgcaguag

SEQ ID NO: 1144382 - RNA, 19 nt, Artificial Sequence
  Description of Artificial Sequence: Synthetic oligonucleotide
ccagugcacucccugucac

SEQ ID NO: 1144383 - RNA, 19 nt, Artificial Sequence
  Description of Artificial Sequence: Synthetic oligonucleotide
ccaaugaggggcgugagcu

SEQ ID NO: 1144384 - RNA, 19 nt, Artificial Sequence
  Description of Artificial Sequence: Synthetic oligonucleotide
ccaaggugauggggaaucc

SEQ ID NO: 1144385 - RNA, 19 nt, Artificial Sequence
  Description of Artificial Sequence: Synthetic oligonucleotide
gcgcugggugggcagcagg

SEQ ID NO: 1144386 - RNA, 19 nt, Artificial Sequence
  Description of Artificial Sequence: Synthetic oligonucleotide
ggcggcuuacaugccagca

SEQ ID NO: 1144387 - RNA, 19 nt, Artificial Sequence
  Description of Artificial Sequence: Synthetic oligonucleotide
ccauuggaaaggcaaggcu

SEQ ID NO: 1144388 - RNA, 19 nt, Artificial Sequence
  Description of Artificial Sequence: Synthetic oligonucleotide
ggcccgagaucaccagcug

SEQ ID NO: 1144389 - RNA, 19 nt, Artificial Sequence
  Description of Artificial Sequence: Synthetic oligonucleotide
gcauacaagcgugggucuc

SEQ ID NO: 1144390 - RNA, 19 nt, Artificial Sequence
  Description of Artificial Sequence: Synthetic oligonucleotide
ccaagcgguccagugcaag

SEQ ID NO: 1144391 - RNA, 19 nt, Artificial Sequence
  Description of Artificial Sequence: Synthetic oligonucleotide
gccgaccuagcggaugggc

SEQ ID NO: 1144392 - RNA, 19 nt, Artificial Sequence
  Description of Artificial Sequence: Synthetic oligonucleotide
gccccauaggcgagugggg

SEQ ID NO: 1144393 - RNA, 19 nt, Artificial Sequence
  Description of Artificial Sequence: Synthetic oligonucleotide
auggacccgaagggcggcu

SEQ ID NO: 1144394 - RNA, 19 nt, Artificial Sequence
  Description of Artificial Sequence: Synthetic oligonucleotide
agucguccacuagggcccu

SEQ ID NO: 1144395 - RNA, 19 nt, Artificial Sequence
  Description of Artificial Sequence: Synthetic oligonucleotide
gcaguagaucacaggcguc

SEQ ID NO: 1144396 - RNA, 19 nt, Artificial Sequence
  Description of Artificial Sequence: Synthetic oligonucleotide
caucaguaccaagaugguu

SEQ ID NO: 1144397 - RNA, 19 nt, Artificial Sequence
  Description of Artificial Sequence: Synthetic oligonucleotide
gcccagugcacucccuguc

SEQ ID NO: 1144398 - RNA, 19 nt, Artificial Sequence
  Description of Artificial Sequence: Synthetic oligonucleotide
cagggcaaauggacccgaa

SEQ ID NO: 1144399 - RNA, 19 nt, Artificial Sequence
  Description of Artificial Sequence: Synthetic oligonucleotide
gccgcuuggcggcucagaa

SEQ ID NO: 1144400 - RNA, 19 nt, Artificial Sequence
  Description of Artificial Sequence: Synthetic oligonucleotide
ccgggaacacaauguucuc

SEQ ID NO: 1144401 - RNA, 19 nt, Artificial Sequence
  Description of Artificial Sequence: Synthetic oligonucleotide
auccggcugucgucggcuu

SEQ ID NO: 1144402 - RNA, 19 nt, Artificial Sequence
  Description of Artificial Sequence: Synthetic oligonucleotide
ccgagaucaccagcuggag

SEQ ID NO: 1144403 - RNA, 19 nt, Artificial Sequence
  Description of Artificial Sequence: Synthetic oligonucleotide
gcggaugggccugaaugga

SEQ ID NO: 1144404 - RNA, 19 nt, Artificial Sequence
  Description of Artificial Sequence: Synthetic oligonucleotide
uggacccgaagggcggcuu

SEQ ID NO: 1144405 - RNA, 19 nt, Artificial Sequence
  Description of Artificial Sequence: Synthetic oligonucleotide
cggaaccaaacagcaguag

SEQ ID NO: 1144406 - RNA, 19 nt, Artificial Sequence
  Description of Artificial Sequence: Synthetic oligonucleotide
agccgcuuggcggcucaga

SEQ ID NO: 1144407 - RNA, 19 nt, Artificial Sequence
  Description of Artificial Sequence: Synthetic oligonucleotide
aagggccgaccuagcggau

SEQ ID NO: 1144408 - RNA, 19 nt, Artificial Sequence
  Description of Artificial Sequence: Synthetic oligonucleotide
cgucacgccugagaugaag

SEQ ID NO: 1144409 - RNA, 19 nt, Artificial Sequence
  Description of Artificial Sequence: Synthetic oligonucleotide
ccaacacggggauccgaca

SEQ ID NO: 1144410 - RNA, 19 nt, Artificial Sequence
  Description of Artificial Sequence: Synthetic oligonucleotide
cccagugcacucccuguca

SEQ ID NO: 1144411 - RNA, 19 nt, Artificial Sequence
  Description of Artificial Sequence: Synthetic oligonucleotide
cacggggauccgacacaca

SEQ ID NO: 1144412 - RNA, 19 nt, Artificial Sequence
  Description of Artificial Sequence: Synthetic oligonucleotide
gcggcgaugggaguauuua

SEQ ID NO: 1144413 - RNA, 19 nt, Artificial Sequence
  Description of Artificial Sequence: Synthetic oligonucleotide
ccggaaccaaacagcagua

SEQ ID NO: 1144414 - RNA, 19 nt, Artificial Sequence
  Description of Artificial Sequence: Synthetic oligonucleotide
cguagagugcagucacgga

SEQ ID NO: 1144415 - RNA, 19 nt, Artificial Sequence
  Description of Artificial Sequence: Synthetic oligonucleotide
accuagcggaugggccuga

SEQ ID NO: 1144416 - RNA, 19 nt, Artificial Sequence
  Description of Artificial Sequence: Synthetic oligonucleotide
gcuagucuguugaucuccu

SEQ ID NO: 1144417 - RNA, 19 nt, Artificial Sequence
  Description of Artificial Sequence: Synthetic oligonucleotide
cauccggcugucgucggcu

SEQ ID NO: 1144418 - RNA, 19 nt, Artificial Sequence
  Description of Artificial Sequence: Synthetic oligonucleotide
gcagggcaaauggacccga

SEQ ID NO: 1144419 - RNA, 19 nt, Artificial Sequence
  Description of Artificial Sequence: Synthetic oligonucleotide
gcagcgcugggugggcagc

SEQ ID NO: 1144420 - RNA, 19 nt, Artificial Sequence
  Description of Artificial Sequence: Synthetic oligonucleotide
cgucggcuuguucccuugg

SEQ ID NO: 1144421 - RNA, 19 nt, Artificial Sequence
  Description of Artificial Sequence: Synthetic oligonucleotide
ucgggaccauguggucgaa

SEQ ID NO: 1144422 - RNA, 19 nt, Artificial Sequence
  Description of Artificial Sequence: Synthetic oligonucleotide
gcggcuuacaugccagcau

SEQ ID NO: 1144423 - RNA, 19 nt, Artificial Sequence
  Description of Artificial Sequence: Synthetic oligonucleotide
ggcugucgucggcuuguuc

SEQ ID NO: 1144424 - RNA, 19 nt, Artificial Sequence
  Description of Artificial Sequence: Synthetic oligonucleotide
aggcgcccauacagguucu

SEQ ID NO: 1144425 - RNA, 19 nt, Artificial Sequence
  Description of Artificial Sequence: Synthetic oligonucleotide
gcgcccauacagguucuuc

SEQ ID NO: 1144426 - RNA, 19 nt, Artificial Sequence
  Description of Artificial Sequence: Synthetic oligonucleotide
caccagcggaucagcccaa

SEQ ID NO: 1144427 - RNA, 19 nt, Artificial Sequence
  Description of Artificial Sequence: Synthetic oligonucleotide
cuagcggaugggccugaau

SEQ ID NO: 1144428 - RNA, 19 nt, Artificial Sequence
  Description of Artificial Sequence: Synthetic oligonucleotide
ggccgaccuagcggauggg

SEQ ID NO: 1144429 - RNA, 19 nt, Artificial Sequence
  Description of Artificial Sequence: Synthetic oligonucleotide
gucgucggcuuguucccuu

SEQ ID NO: 1144430 - RNA, 19 nt, Artificial Sequence
  Description of Artificial Sequence: Synthetic oligonucleotide
augaggggcgugagcucua

SEQ ID NO: 1144431 - RNA, 19 nt, Artificial Sequence
  Description of Artificial Sequence: Synthetic oligonucleotide
ggacccgaagggcggcuua

SEQ ID NO: 1144432 - RNA, 19 nt, Artificial Sequence
  Description of Artificial Sequence: Synthetic oligonucleotide
ccgagcccggaaccaaaca

SEQ ID NO: 1144433 - RNA, 19 nt, Artificial Sequence
  Description of Artificial Sequence: Synthetic oligonucleotide
cagccgcuuggcggcucag

SEQ ID NO: 1144434 - RNA, 19 nt, Artificial Sequence
  Description of Artificial Sequence: Synthetic oligonucleotide
gucguccacuagggcccug

SEQ ID NO: 1144435 - RNA, 19 nt, Artificial Sequence
  Description of Artificial Sequence: Synthetic oligonucleotide
gcgguauguggcgacugcu

SEQ ID NO: 1144436 - RNA, 19 nt, Artificial Sequence
  Description of Artificial Sequence: Synthetic oligonucleotide
cccuggcuagucucacgca

SEQ ID NO: 1144437 - RNA, 19 nt, Artificial Sequence
  Description of Artificial Sequence: Synthetic oligonucleotide
gggauccgacacacagcca

SEQ ID NO: 1144438 - RNA, 19 nt, Artificial Sequence
  Description of Artificial Sequence: Synthetic oligonucleotide
uggcggcgaugggaguauu

SEQ ID NO: 1144439 - RNA, 19 nt, Artificial Sequence
  Description of Artificial Sequence: Synthetic oligonucleotide
cgaccuagcggaugggccu

SEQ ID NO: 1144440 - RNA, 19 nt, Artificial Sequence
  Description of Artificial Sequence: Synthetic oligonucleotide
cggcgaugggaguauuuaa

SEQ ID NO: 1144441 - RNA, 19 nt, Artificial Sequence
  Description of Artificial Sequence: Synthetic oligonucleotide
gcguccgcuggagccagga

SEQ ID NO: 1144442 - RNA, 19 nt, Artificial Sequence
  Description of Artificial Sequence: Synthetic oligonucleotide
cggaugggccugaauggaa

SEQ ID NO: 1144443 - RNA, 19 nt, Artificial Sequence
  Description of Artificial Sequence: Synthetic oligonucleotide
cguccgcuggagccaggag

SEQ ID NO: 1144444 - RNA, 19 nt, Artificial Sequence
  Description of Artificial Sequence: Synthetic oligonucleotide
gguuggcggcgaugggagu

SEQ ID NO: 1144445 - RNA, 19 nt, Artificial Sequence
  Description of Artificial Sequence: Synthetic oligonucleotide
ggugugcccugggugugua

SEQ ID NO: 1144446 - RNA, 19 nt, Artificial Sequence
  Description of Artificial Sequence: Synthetic oligonucleotide
gugcagucacggagguuau

SEQ ID NO: 1144447 - RNA, 19 nt, Artificial Sequence
  Description of Artificial Sequence: Synthetic oligonucleotide
cgaucucuugggaagcauu

SEQ ID NO: 1144448 - RNA, 19 nt, Artificial Sequence
  Description of Artificial Sequence: Synthetic oligonucleotide
acgucacgccugagaugaa

SEQ ID NO: 1144449 - RNA, 19 nt, Artificial Sequence
  Description of Artificial Sequence: Synthetic oligonucleotide
ccccgaugccauggccacc

SEQ ID NO: 1144450 - RNA, 19 nt, Artificial Sequence
  Description of Artificial Sequence: Synthetic oligonucleotide
cacuagggcccuggcuagu

SEQ ID NO: 1144451 - RNA, 19 nt, Artificial Sequence
  Description of Artificial Sequence: Synthetic oligonucleotide
cggcuuacaugccagcauu

SEQ ID NO: 1144452 - RNA, 19 nt, Artificial Sequence
  Description of Artificial Sequence: Synthetic oligonucleotide
ggcggcgaugggaguauuu

SEQ ID NO: 1144453 - RNA, 19 nt, Artificial Sequence
  Description of Artificial Sequence: Synthetic oligonucleotide
ggguagccgggaacacaau

SEQ ID NO: 1144454 - RNA, 19 nt, Artificial Sequence
  Description of Artificial Sequence: Synthetic oligonucleotide
ccuagcggaugggccugaa

SEQ ID NO: 1144455 - RNA, 19 nt, Artificial Sequence
  Description of Artificial Sequence: Synthetic oligonucleotide
ggcgcccauacagguucuu

SEQ ID NO: 1144456 - RNA, 19 nt, Artificial Sequence
  Description of Artificial Sequence: Synthetic oligonucleotide
ccucuacaaucgggaccau

SEQ ID NO: 1144457 - RNA, 19 nt, Artificial Sequence
  Description of Artificial Sequence: Synthetic oligonucleotide
uacaauauaaguuauaugc

SEQ ID NO: 1144458 - RNA, 19 nt, Artificial Sequence
  Description of Artificial Sequence: Synthetic oligonucleotide
uauacaacaauucagucug

SEQ ID NO: 1144459 - RNA, 19 nt, Artificial Sequence
  Description of Artificial Sequence: Synthetic oligonucleotide
aaagguagugcccaguacc

SEQ ID NO: 1144460 - RNA, 19 nt, Artificial Sequence
  Description of Artificial Sequence: Synthetic oligonucleotide
uguuaaauagggaauauga

SEQ ID NO: 1144461 - RNA, 19 nt, Artificial Sequence
  Description of Artificial Sequence: Synthetic oligonucleotide
aauuggugagauuucacac

SEQ ID NO: 1144462 - RNA, 19 nt, Artificial Sequence
  Description of Artificial Sequence: Synthetic oligonucleotide
uuucuuacagcuauccagg

SEQ ID NO: 1144463 - RNA, 19 nt, Artificial Sequence
  Description of Artificial Sequence: Synthetic oligonucleotide
uuaaauagggaauaugagu

SEQ ID NO: 1144464 - RNA, 19 nt, Artificial Sequence
  Description of Artificial Sequence: Synthetic oligonucleotide
acaaaugggauccggauuc

SEQ ID NO: 1144465 - RNA, 19 nt, Artificial Sequence
  Description of Artificial Sequence: Synthetic oligonucleotide
aaacaaaacugacagcgug

SEQ ID NO: 1144466 - RNA, 19 nt, Artificial Sequence
  Description of Artificial Sequence: Synthetic oligonucleotide
auggcuuauucacaaaugg

SEQ ID NO: 1144467 - RNA, 19 nt, Artificial Sequence
  Description of Artificial Sequence: Synthetic oligonucleotide
cauucuuaaauccucacug

SEQ ID NO: 1144468 - RNA, 19 nt, Artificial Sequence
  Description of Artificial Sequence: Synthetic oligonucleotide
cuuacagcuauccagguac

SEQ ID NO: 1144469 - RNA, 19 nt, Artificial Sequence
  Description of Artificial Sequence: Synthetic oligonucleotide
auauaaguuauaugcaaug

SEQ ID NO: 1144470 - RNA, 19 nt, Artificial Sequence
  Description of Artificial Sequence: Synthetic oligonucleotide
uguacaguauuucuuacaa

SEQ ID NO: 1144471 - RNA, 19 nt, Artificial Sequence
  Description of Artificial Sequence: Synthetic oligonucleotide
aaaucuacaucuuuucuua

SEQ ID NO: 1144472 - RNA, 19 nt, Artificial Sequence
  Description of Artificial Sequence: Synthetic oligonucleotide
cuguccauucauuuuaugg

SEQ ID NO: 1144473 - RNA, 19 nt, Artificial Sequence
  Description of Artificial Sequence: Synthetic oligonucleotide
uuuaaugcaucaaaacaaa

SEQ ID NO: 1144474 - RNA, 19 nt, Artificial Sequence
  Description of Artificial Sequence: Synthetic oligonucleotide
aaggugaagagaugcggac

SEQ ID NO: 1144475 - RNA, 19 nt, Artificial Sequence
  Description of Artificial Sequence: Synthetic oligonucleotide
uccagguacaauaaagucu

SEQ ID NO: 1144476 - RNA, 19 nt, Artificial Sequence
  Description of Artificial Sequence: Synthetic oligonucleotide
aauuacagggacugguuca

SEQ ID NO: 1144477 - RNA, 19 nt, Artificial Sequence
  Description of Artificial Sequence: Synthetic oligonucleotide
aaaacugacagcgugccca

SEQ ID NO: 1144478 - RNA, 19 nt, Artificial Sequence
  Description of Artificial Sequence: Synthetic oligonucleotide
ucgacuuacacccgaaccc

SEQ ID NO: 1144479 - RNA, 19 nt, Artificial Sequence
  Description of Artificial Sequence: Synthetic oligonucleotide
ugggccucgacuuacaccc

SEQ ID NO: 1144480 - RNA, 19 nt, Artificial Sequence
  Description of Artificial Sequence: Synthetic oligonucleotide
uguccauucauuuuauggu

SEQ ID NO: 1144481 - RNA, 19 nt, Artificial Sequence
  Description of Artificial Sequence: Synthetic oligonucleotide
ucuuaaauccucacuggca

SEQ ID NO: 1144482 - RNA, 19 nt, Artificial Sequence
  Description of Artificial Sequence: Synthetic oligonucleotide
caaacauuuugcuuucugc

SEQ ID NO: 1144483 - RNA, 19 nt, Artificial Sequence
  Description of Artificial Sequence: Synthetic oligonucleotide
uucuuaaauccucacuggc

SEQ ID NO: 1144484 - RNA, 19 nt, Artificial Sequence
  Description of Artificial Sequence: Synthetic oligonucleotide
uuuaugguacaguccacag

SEQ ID NO: 1144485 - RNA, 19 nt, Artificial Sequence
  Description of Artificial Sequence: Synthetic oligonucleotide
acaacaauuacagggacug

SEQ ID NO: 1144486 - RNA, 19 nt, Artificial Sequence
  Description of Artificial Sequence: Synthetic oligonucleotide
uuauuuuggugcuucagaa

SEQ ID NO: 1144487 - RNA, 19 nt, Artificial Sequence
  Description of Artificial Sequence: Synthetic oligonucleotide
uguauaauaugaugaaaua

SEQ ID NO: 1144488 - RNA, 19 nt, Artificial Sequence
  Description of Artificial Sequence: Synthetic oligonucleotide
gauagguggugauagggug

SEQ ID NO: 1144489 - RNA, 19 nt, Artificial Sequence
  Description of Artificial Sequence: Synthetic oligonucleotide
gaaaggugaagagaugcgg

SEQ ID NO: 1144490 - RNA, 19 nt, Artificial Sequence
  Description of Artificial Sequence: Synthetic oligonucleotide
aguuauaugcaauguucag

SEQ ID NO: 1144491 - RNA, 19 nt, Artificial Sequence
  Description of Artificial Sequence: Synthetic oligonucleotide
aaaacgcaaguagaagggg

SEQ ID NO: 1144492 - RNA, 19 nt, Artificial Sequence
  Description of Artificial Sequence: Synthetic oligonucleotide
aaaauucuuggcguccuuc

SEQ ID NO: 1144493 - RNA, 19 nt, Artificial Sequence
  Description of Artificial Sequence: Synthetic oligonucleotide
aguucuuaacgcuagcagu

SEQ ID NO: 1144494 - RNA, 19 nt, Artificial Sequence
  Description of Artificial Sequence: Synthetic oligonucleotide
uaaaucuacaucuuuucuu

SEQ ID NO: 1144495 - RNA, 19 nt, Artificial Sequence
  Description of Artificial Sequence: Synthetic oligonucleotide
aauagggaauaugagucug

SEQ ID NO: 1144496 - RNA, 19 nt, Artificial Sequence
  Description of Artificial Sequence: Synthetic oligonucleotide
gugguuggaacacagacac

SEQ ID NO: 1144497 - RNA, 19 nt, Artificial Sequence
  Description of Artificial Sequence: Synthetic oligonucleotide
acaaaacugacagcgugcc

SEQ ID NO: 1144498 - RNA, 19 nt, Artificial Sequence
  Description of Artificial Sequence: Synthetic oligonucleotide
aacaauuacagggacuggu

SEQ ID NO: 1144499 - RNA, 19 nt, Artificial Sequence
  Description of Artificial Sequence: Synthetic oligonucleotide
aauauaaguuauaugcaau

SEQ ID NO: 1144500 - RNA, 19 nt, Artificial Sequence
  Description of Artificial Sequence: Synthetic oligonucleotide
guuaaauagggaauaugag

SEQ ID NO: 1144501 - RNA, 19 nt, Artificial Sequence
  Description of Artificial Sequence: Synthetic oligonucleotide
agaauuauacauacaaaca

SEQ ID NO: 1144502 - RNA, 19 nt, Artificial Sequence
  Description of Artificial Sequence: Synthetic oligonucleotide
ggaauaugagucugaaugg

SEQ ID NO: 1144503 - RNA, 19 nt, Artificial Sequence
  Description of Artificial Sequence: Synthetic oligonucleotide
agagaugcggacuggagug

SEQ ID NO: 1144504 - RNA, 19 nt, Artificial Sequence
  Description of Artificial Sequence: Synthetic oligonucleotide
aaaacacagaucugucgcu

SEQ ID NO: 1144505 - RNA, 19 nt, Artificial Sequence
  Description of Artificial Sequence: Synthetic oligonucleotide
cuuucgggcuucaugauac

SEQ ID NO: 1144506 - RNA, 19 nt, Artificial Sequence
  Description of Artificial Sequence: Synthetic oligonucleotide
uguacucgggcacguaggg

SEQ ID NO: 1144507 - RNA, 19 nt, Artificial Sequence
  Description of Artificial Sequence: Synthetic oligonucleotide
uaugcaauguucagcaaua

SEQ ID NO: 1144508 - RNA, 19 nt, Artificial Sequence
  Description of Artificial Sequence: Synthetic oligonucleotide
aucaagacuuaguuucuuc

SEQ ID NO: 1144509 - RNA, 19 nt, Artificial Sequence
  Description of Artificial Sequence: Synthetic oligonucleotide
agucuguauaauaugauga

SEQ ID NO: 1144510 - RNA, 19 nt, Artificial Sequence
  Description of Artificial Sequence: Synthetic oligonucleotide
gaauaugagucugaauggc

SEQ ID NO: 1144511 - RNA, 19 nt, Artificial Sequence
  Description of Artificial Sequence: Synthetic oligonucleotide
gaacacagacaccaccggg

SEQ ID NO: 1144512 - RNA, 19 nt, Artificial Sequence
  Description of Artificial Sequence: Synthetic oligonucleotide
acguagggcggauaggugg

SEQ ID NO: 1144513 - RNA, 19 nt, Artificial Sequence
  Description of Artificial Sequence: Synthetic oligonucleotide
auuuuggacaucaagacuu

SEQ ID NO: 1144514 - RNA, 19 nt, Artificial Sequence
  Description of Artificial Sequence: Synthetic oligonucleotide
auuggugagauuucacacu

SEQ ID NO: 1144515 - RNA, 19 nt, Artificial Sequence
  Description of Artificial Sequence: Synthetic oligonucleotide
ugacauucuuaaauccuca

SEQ ID NO: 1144516 - RNA, 19 nt, Artificial Sequence
  Description of Artificial Sequence: Synthetic oligonucleotide
gagacccuguuaaauaggg

SEQ ID NO: 1144517 - RNA, 19 nt, Artificial Sequence
  Description of Artificial Sequence: Synthetic oligonucleotide
aacgcuagcaguaaauaaa

SEQ ID NO: 1144518 - RNA, 19 nt, Artificial Sequence
  Description of Artificial Sequence: Synthetic oligonucleotide
gacccuguuaaauagggaa

SEQ ID NO: 1144519 - RNA, 19 nt, Artificial Sequence
  Description of Artificial Sequence: Synthetic oligonucleotide
cucacuggcaauuggugag

SEQ ID NO: 1144520 - RNA, 19 nt, Artificial Sequence
  Description of Artificial Sequence: Synthetic oligonucleotide
ggagacauccuucggaggg

SEQ ID NO: 1144521 - RNA, 19 nt, Artificial Sequence
  Description of Artificial Sequence: Synthetic oligonucleotide
ucgcuuucgggcuucauga

SEQ ID NO: 1144522 - RNA, 19 nt, Artificial Sequence
  Description of Artificial Sequence: Synthetic oligonucleotide
aacgcaaguagaagggguc

SEQ ID NO: 1144523 - RNA, 19 nt, Artificial Sequence
  Description of Artificial Sequence: Synthetic oligonucleotide
aggaagcggcaccugauac

SEQ ID NO: 1144524 - RNA, 19 nt, Artificial Sequence
  Description of Artificial Sequence: Synthetic oligonucleotide
uuacacccgaacccgguag

SEQ ID NO: 1144525 - RNA, 19 nt, Artificial Sequence
  Description of Artificial Sequence: Synthetic oligonucleotide
acaauauaaguuauaugca

SEQ ID NO: 1144526 - RNA, 19 nt, Artificial Sequence
  Description of Artificial Sequence: Synthetic oligonucleotide
uccucgugcauauggagca

SEQ ID NO: 1144527 - RNA, 19 nt, Artificial Sequence
  Description of Artificial Sequence: Synthetic oligonucleotide
guauaauaugaugaaauaa

SEQ ID NO: 1144528 - RNA, 19 nt, Artificial Sequence
  Description of Artificial Sequence: Synthetic oligonucleotide
cucgacuuacacccgaacc

SEQ ID NO: 1144529 - RNA, 19 nt, Artificial Sequence
  Description of Artificial Sequence: Synthetic oligonucleotide
aaaggugaagagaugcgga

SEQ ID NO: 1144530 - RNA, 19 nt, Artificial Sequence
  Description of Artificial Sequence: Synthetic oligonucleotide
auuacagggacugguucac

SEQ ID NO: 1144531 - RNA, 19 nt, Artificial Sequence
  Description of Artificial Sequence: Synthetic oligonucleotide
gauuucacacugauugccc

SEQ ID NO: 1144532 - RNA, 19 nt, Artificial Sequence
  Description of Artificial Sequence: Synthetic oligonucleotide
uaacgcuagcaguaaauaa

SEQ ID NO: 1144533 - RNA, 19 nt, Artificial Sequence
  Description of Artificial Sequence: Synthetic oligonucleotide
gguggugauagggugaugg

SEQ ID NO: 1144534 - RNA, 19 nt, Artificial Sequence
  Description of Artificial Sequence: Synthetic oligonucleotide
agggugaugggcugaggac

SEQ ID NO: 1144535 - RNA, 19 nt, Artificial Sequence
  Description of Artificial Sequence: Synthetic oligonucleotide
uccccauuagcguuccucc

SEQ ID NO: 1144536 - RNA, 19 nt, Artificial Sequence
  Description of Artificial Sequence: Synthetic oligonucleotide
agaagcaaacauuuugcuu

SEQ ID NO: 1144537 - RNA, 19 nt, Artificial Sequence
  Description of Artificial Sequence: Synthetic oligonucleotide
gacagcgugcccauuuugg

SEQ ID NO: 1144538 - RNA, 19 nt, Artificial Sequence
  Description of Artificial Sequence: Synthetic oligonucleotide
uaggugauccucccagcag

SEQ ID NO: 1144539 - RNA, 19 nt, Artificial Sequence
  Description of Artificial Sequence: Synthetic oligonucleotide
aggccuagacaugacauuc

SEQ ID NO: 1144540 - RNA, 19 nt, Artificial Sequence
  Description of Artificial Sequence: Synthetic oligonucleotide
cuucgcuugggcuugauaa

SEQ ID NO: 1144541 - RNA, 19 nt, Artificial Sequence
  Description of Artificial Sequence: Synthetic oligonucleotide
uuguggacuuggaaacucc

SEQ ID NO: 1144542 - RNA, 19 nt, Artificial Sequence
  Description of Artificial Sequence: Synthetic oligonucleotide
uucgcuugggcuugauaag

SEQ ID NO: 1144543 - RNA, 19 nt, Artificial Sequence
  Description of Artificial Sequence: Synthetic oligonucleotide
gauucagugguuggaacac

SEQ ID NO: 1144544 - RNA, 19 nt, Artificial Sequence
  Description of Artificial Sequence: Synthetic oligonucleotide
aaacgcaaguagaaggggu

SEQ ID NO: 1144545 - RNA, 19 nt, Artificial Sequence
  Description of Artificial Sequence: Synthetic oligonucleotide
aacaacaauuacagggacu

SEQ ID NO: 1144546 - RNA, 19 nt, Artificial Sequence
  Description of Artificial Sequence: Synthetic oligonucleotide
ugguacaguccacaggcgu

SEQ ID NO: 1144547 - RNA, 19 nt, Artificial Sequence
  Description of Artificial Sequence: Synthetic oligonucleotide
uacacccgaacccgguagg

SEQ ID NO: 1144548 - RNA, 19 nt, Artificial Sequence
  Description of Artificial Sequence: Synthetic oligonucleotide
gagguugccccacaguuca

SEQ ID NO: 1144549 - RNA, 19 nt, Artificial Sequence
  Description of Artificial Sequence: Synthetic oligonucleotide
cuguauaauaugaugaaau

SEQ ID NO: 1144550 - RNA, 19 nt, Artificial Sequence
  Description of Artificial Sequence: Synthetic oligonucleotide
uguggacuuggaaacuccu

SEQ ID NO: 1144551 - RNA, 19 nt, Artificial Sequence
  Description of Artificial Sequence: Synthetic oligonucleotide
ugcuaggugggaagagucc

SEQ ID NO: 1144552 - RNA, 19 nt, Artificial Sequence
  Description of Artificial Sequence: Synthetic oligonucleotide
gacuuggaaacuccucgug

SEQ ID NO: 1144553 - RNA, 19 nt, Artificial Sequence
  Description of Artificial Sequence: Synthetic oligonucleotide
cuccucgugcauauggagc

SEQ ID NO: 1144554 - RNA, 19 nt, Artificial Sequence
  Description of Artificial Sequence: Synthetic oligonucleotide
uuaacgcuagcaguaaaua

SEQ ID NO: 1144555 - RNA, 19 nt, Artificial Sequence
  Description of Artificial Sequence: Synthetic oligonucleotide
auuagcguuccuccuccag

SEQ ID NO: 1144556 - RNA, 19 nt, Artificial Sequence
  Description of Artificial Sequence: Synthetic oligonucleotide
agcgugcccauuuuggaca

SEQ ID NO: 1144557 - RNA, 19 nt, Artificial Sequence
  Description of Artificial Sequence: Synthetic oligonucleotide
auauuccuuaaaauucuug

SEQ ID NO: 1144558 - RNA, 19 nt, Artificial Sequence
  Description of Artificial Sequence: Synthetic oligonucleotide
ugauacugcuccugcaaaa

SEQ ID NO: 1144559 - RNA, 19 nt, Artificial Sequence
  Description of Artificial Sequence: Synthetic oligonucleotide
agaguccggagcuguacuc

SEQ ID NO: 1144560 - RNA, 19 nt, Artificial Sequence
  Description of Artificial Sequence: Synthetic oligonucleotide
gguucacagagcauggagg

SEQ ID NO: 1144561 - RNA, 19 nt, Artificial Sequence
  Description of Artificial Sequence: Synthetic oligonucleotide
uggugauagggugaugggc

SEQ ID NO: 1144562 - RNA, 19 nt, Artificial Sequence
  Description of Artificial Sequence: Synthetic oligonucleotide
ugggcggaaaggugaagag

SEQ ID NO: 1144563 - RNA, 19 nt, Artificial Sequence
  Description of Artificial Sequence: Synthetic oligonucleotide
auaugaugaaauaaaucua

SEQ ID NO: 1144564 - RNA, 19 nt, Artificial Sequence
  Description of Artificial Sequence: Synthetic oligonucleotide
ugaccaugcucagaccggg

SEQ ID NO: 1144565 - RNA, 19 nt, Artificial Sequence
  Description of Artificial Sequence: Synthetic oligonucleotide
caauuacagggacugguuc

SEQ ID NO: 1144566 - RNA, 19 nt, Artificial Sequence
  Description of Artificial Sequence: Synthetic oligonucleotide
acauccuucggaggggugg

SEQ ID NO: 1144567 - RNA, 19 nt, Artificial Sequence
  Description of Artificial Sequence: Synthetic oligonucleotide
gugguggucugacaguuug

SEQ ID NO: 1144568 - RNA, 19 nt, Artificial Sequence
  Description of Artificial Sequence: Synthetic oligonucleotide
gaucccgggguggacagcg

SEQ ID NO: 1144569 - RNA, 19 nt, Artificial Sequence
  Description of Artificial Sequence: Synthetic oligonucleotide
uucaugcucucaggaagcg

SEQ ID NO: 1144570 - RNA, 19 nt, Artificial Sequence
  Description of Artificial Sequence: Synthetic oligonucleotide
gucuguauaauaugaugaa

SEQ ID NO: 1144571 - RNA, 19 nt, Artificial Sequence
  Description of Artificial Sequence: Synthetic oligonucleotide
uuuguggacuuggaaacuc

SEQ ID NO: 1144572 - RNA, 19 nt, Artificial Sequence
  Description of Artificial Sequence: Synthetic oligonucleotide
ucuuaacgcuagcaguaaa

SEQ ID NO: 1144573 - RNA, 19 nt, Artificial Sequence
  Description of Artificial Sequence: Synthetic oligonucleotide
cuaggugggaagaguccgg

SEQ ID NO: 1144574 - RNA, 19 nt, Artificial Sequence
  Description of Artificial Sequence: Synthetic oligonucleotide
ucuuacagcuauccaggua

SEQ ID NO: 1144575 - RNA, 19 nt, Artificial Sequence
  Description of Artificial Sequence: Synthetic oligonucleotide
acggaaagcggccccgggg

SEQ ID NO: 1144576 - RNA, 19 nt, Artificial Sequence
  Description of Artificial Sequence: Synthetic oligonucleotide
aagacaguucuuaacgcua

SEQ ID NO: 1144577 - RNA, 19 nt, Artificial Sequence
  Description of Artificial Sequence: Synthetic oligonucleotide
guggugauagggugauggg

SEQ ID NO: 1144578 - RNA, 19 nt, Artificial Sequence
  Description of Artificial Sequence: Synthetic oligonucleotide
uugggccucgacuuacacc

SEQ ID NO: 1144579 - RNA, 19 nt, Artificial Sequence
  Description of Artificial Sequence: Synthetic oligonucleotide
cagaucugucgcuuucggg

SEQ ID NO: 1144580 - RNA, 19 nt, Artificial Sequence
  Description of Artificial Sequence: Synthetic oligonucleotide
uuacagcuauccagguaca

SEQ ID NO: 1144581 - RNA, 19 nt, Artificial Sequence
  Description of Artificial Sequence: Synthetic oligonucleotide
gaguccggagcuguacucg

SEQ ID NO: 1144582 - RNA, 19 nt, Artificial Sequence
  Description of Artificial Sequence: Synthetic oligonucleotide
agcggcaccugauacuuga

SEQ ID NO: 1144583 - RNA, 19 nt, Artificial Sequence
  Description of Artificial Sequence: Synthetic oligonucleotide
agagacccuguuaaauagg

SEQ ID NO: 1144584 - RNA, 19 nt, Artificial Sequence
  Description of Artificial Sequence: Synthetic oligonucleotide
uggaucgugccuugggccu

SEQ ID NO: 1144585 - RNA, 19 nt, Artificial Sequence
  Description of Artificial Sequence: Synthetic oligonucleotide
gucgcuuucgggcuucaug

SEQ ID NO: 1144586 - RNA, 19 nt, Artificial Sequence
  Description of Artificial Sequence: Synthetic oligonucleotide
cccaguaccaucucgucgc

SEQ ID NO: 1144587 - RNA, 19 nt, Artificial Sequence
  Description of Artificial Sequence: Synthetic oligonucleotide
gacaguucuuaacgcuagc

SEQ ID NO: 1144588 - RNA, 19 nt, Artificial Sequence
  Description of Artificial Sequence: Synthetic oligonucleotide
agcacuagagacccuguua

SEQ ID NO: 1144589 - RNA, 19 nt, Artificial Sequence
  Description of Artificial Sequence: Synthetic oligonucleotide
uucuuacagcuauccaggu

SEQ ID NO: 1144590 - RNA, 19 nt, Artificial Sequence
  Description of Artificial Sequence: Synthetic oligonucleotide
aaacugacagcgugcccau

SEQ ID NO: 1144591 - RNA, 19 nt, Artificial Sequence
  Description of Artificial Sequence: Synthetic oligonucleotide
gagacauccuucggagggg

SEQ ID NO: 1144592 - RNA, 19 nt, Artificial Sequence
  Description of Artificial Sequence: Synthetic oligonucleotide
ggaaaggugaagagaugcg

SEQ ID NO: 1144593 - RNA, 19 nt, Artificial Sequence
  Description of Artificial Sequence: Synthetic oligonucleotide
ggauucuuuguggacuugg

SEQ ID NO: 1144594 - RNA, 19 nt, Artificial Sequence
  Description of Artificial Sequence: Synthetic oligonucleotide
gauccggauucagugguug

SEQ ID NO: 1144595 - RNA, 19 nt, Artificial Sequence
  Description of Artificial Sequence: Synthetic oligonucleotide
acccgaacccgguagguga

SEQ ID NO: 1144596 - RNA, 19 nt, Artificial Sequence
  Description of Artificial Sequence: Synthetic oligonucleotide
auugcccagaucugaaauu

SEQ ID NO: 1144597 - RNA, 19 nt, Artificial Sequence
  Description of Artificial Sequence: Synthetic oligonucleotide
cugcuaggugggaagaguc

SEQ ID NO: 1144598 - RNA, 19 nt, Artificial Sequence
  Description of Artificial Sequence: Synthetic oligonucleotide
acagcgugcccauuuugga

SEQ ID NO: 1144599 - RNA, 19 nt, Artificial Sequence
  Description of Artificial Sequence: Synthetic oligonucleotide
agacuuaguuucuucugua

SEQ ID NO: 1144600 - RNA, 19 nt, Artificial Sequence
  Description of Artificial Sequence: Synthetic oligonucleotide
ccuccauacuuuauuuucc

SEQ ID NO: 1144601 - RNA, 19 nt, Artificial Sequence
  Description of Artificial Sequence: Synthetic oligonucleotide
ugugcuggaucgugccuug

SEQ ID NO: 1144602 - RNA, 19 nt, Artificial Sequence
  Description of Artificial Sequence: Synthetic oligonucleotide
guccauucauuuuauggua

SEQ ID NO: 1144603 - RNA, 19 nt, Artificial Sequence
  Description of Artificial Sequence: Synthetic oligonucleotide
caugauacugcuccugcaa

SEQ ID NO: 1144604 - RNA, 19 nt, Artificial Sequence
  Description of Artificial Sequence: Synthetic oligonucleotide
guaggugauccucccagca

SEQ ID NO: 1144605 - RNA, 19 nt, Artificial Sequence
  Description of Artificial Sequence: Synthetic oligonucleotide
uagggaauaugagucugaa

SEQ ID NO: 1144606 - RNA, 19 nt, Artificial Sequence
  Description of Artificial Sequence: Synthetic oligonucleotide
gggugaugggcugaggacg

SEQ ID NO: 1144607 - RNA, 19 nt, Artificial Sequence
  Description of Artificial Sequence: Synthetic oligonucleotide
ugguggucugacaguuugc

SEQ ID NO: 1144608 - RNA, 19 nt, Artificial Sequence
  Description of Artificial Sequence: Synthetic oligonucleotide
gcuaggugggaagaguccg

SEQ ID NO: 1144609 - RNA, 19 nt, Artificial Sequence
  Description of Artificial Sequence: Synthetic oligonucleotide
gacuuacacccgaacccgg

SEQ ID NO: 1144610 - RNA, 19 nt, Artificial Sequence
  Description of Artificial Sequence: Synthetic oligonucleotide
caaaacugacagcgugccc

SEQ ID NO: 1144611 - RNA, 19 nt, Artificial Sequence
  Description of Artificial Sequence: Synthetic oligonucleotide
uacaacaauucagucugua

SEQ ID NO: 1144612 - RNA, 19 nt, Artificial Sequence
  Description of Artificial Sequence: Synthetic oligonucleotide
auaugagucugaauggcuu

SEQ ID NO: 1144613 - RNA, 19 nt, Artificial Sequence
  Description of Artificial Sequence: Synthetic oligonucleotide
uucgggcuucaugauacug

SEQ ID NO: 1144614 - RNA, 19 nt, Artificial Sequence
  Description of Artificial Sequence: Synthetic oligonucleotide
uugcccagaucugaaauuu

SEQ ID NO: 1144615 - RNA, 19 nt, Artificial Sequence
  Description of Artificial Sequence: Synthetic oligonucleotide
gagaugcggacuggagugg

SEQ ID NO: 1144616 - RNA, 19 nt, Artificial Sequence
  Description of Artificial Sequence: Synthetic oligonucleotide
ggcggauagguggugauag

SEQ ID NO: 1144617 - RNA, 19 nt, Artificial Sequence
  Description of Artificial Sequence: Synthetic oligonucleotide
cagcuauccagguacaaua

SEQ ID NO: 1144618 - RNA, 19 nt, Artificial Sequence
  Description of Artificial Sequence: Synthetic oligonucleotide
gugaccaugcucagaccgg

SEQ ID NO: 1144619 - RNA, 19 nt, Artificial Sequence
  Description of Artificial Sequence: Synthetic oligonucleotide
uccggauucagugguugga

SEQ ID NO: 1144620 - RNA, 19 nt, Artificial Sequence
  Description of Artificial Sequence: Synthetic oligonucleotide
gacggaaagcggccccggg

SEQ ID NO: 1144621 - RNA, 19 nt, Artificial Sequence
  Description of Artificial Sequence: Synthetic oligonucleotide
uucuuaacgcuagcaguaa

SEQ ID NO: 1144622 - RNA, 19 nt, Artificial Sequence
  Description of Artificial Sequence: Synthetic oligonucleotide
cuucagaauuauacauaca

SEQ ID NO: 1144623 - RNA, 19 nt, Artificial Sequence
  Description of Artificial Sequence: Synthetic oligonucleotide
ucaucuugccuggcggagc

SEQ ID NO: 1144624 - RNA, 19 nt, Artificial Sequence
  Description of Artificial Sequence: Synthetic oligonucleotide
uggcaauuggugagauuuc

SEQ ID NO: 1144625 - RNA, 19 nt, Artificial Sequence
  Description of Artificial Sequence: Synthetic oligonucleotide
ccucucuaccccauggcgg

SEQ ID NO: 1144626 - RNA, 19 nt, Artificial Sequence
  Description of Artificial Sequence: Synthetic oligonucleotide
cagcgugcccauuuuggac

SEQ ID NO: 1144627 - RNA, 19 nt, Artificial Sequence
  Description of Artificial Sequence: Synthetic oligonucleotide
gacagcgacggggucuggg

SEQ ID NO: 1144628 - RNA, 19 nt, Artificial Sequence
  Description of Artificial Sequence: Synthetic oligonucleotide
caacaauuacagggacugg

SEQ ID NO: 1144629 - RNA, 19 nt, Artificial Sequence
  Description of Artificial Sequence: Synthetic oligonucleotide
guacaguccacaggcguug

SEQ ID NO: 1144630 - RNA, 19 nt, Artificial Sequence
  Description of Artificial Sequence: Synthetic oligonucleotide
acagcuauccagguacaau

SEQ ID NO: 1144631 - RNA, 19 nt, Artificial Sequence
  Description of Artificial Sequence: Synthetic oligonucleotide
acaucaagacuuaguuucu

SEQ ID NO: 1144632 - RNA, 19 nt, Artificial Sequence
  Description of Artificial Sequence: Synthetic oligonucleotide
gcggugaccaugcucagac

SEQ ID NO: 1144633 - RNA, 19 nt, Artificial Sequence
  Description of Artificial Sequence: Synthetic oligonucleotide
cuuaacgcuagcaguaaau

SEQ ID NO: 1144634 - RNA, 19 nt, Artificial Sequence
  Description of Artificial Sequence: Synthetic oligonucleotide
cauggaggccuagacauga

SEQ ID NO: 1144635 - RNA, 19 nt, Artificial Sequence
  Description of Artificial Sequence: Synthetic oligonucleotide
auagggaauaugagucuga

SEQ ID NO: 1144636 - RNA, 19 nt, Artificial Sequence
  Description of Artificial Sequence: Synthetic oligonucleotide
agggaauaugagucugaau

SEQ ID NO: 1144637 - RNA, 19 nt, Artificial Sequence
  Description of Artificial Sequence: Synthetic oligonucleotide
aggugaagagaugcggacu

SEQ ID NO: 1144638 - RNA, 19 nt, Artificial Sequence
  Description of Artificial Sequence: Synthetic oligonucleotide
ucacuggcaauuggugaga

SEQ ID NO: 1144639 - RNA, 19 nt, Artificial Sequence
  Description of Artificial Sequence: Synthetic oligonucleotide
acgcuagcaguaaauaaau

SEQ ID NO: 1144640 - RNA, 19 nt, Artificial Sequence
  Description of Artificial Sequence: Synthetic oligonucleotide
uggacagcgacggggucug

SEQ ID NO: 1144641 - RNA, 19 nt, Artificial Sequence
  Description of Artificial Sequence: Synthetic oligonucleotide
accggguccccauuagcgu

SEQ ID NO: 1144642 - RNA, 19 nt, Artificial Sequence
  Description of Artificial Sequence: Synthetic oligonucleotide
ugcaaagguagugcccagu

SEQ ID NO: 1144643 - RNA, 19 nt, Artificial Sequence
  Description of Artificial Sequence: Synthetic oligonucleotide
acaauuacagggacugguu

SEQ ID NO: 1144644 - RNA, 19 nt, Artificial Sequence
  Description of Artificial Sequence: Synthetic oligonucleotide
cauccuucggagggguggg

SEQ ID NO: 1144645 - RNA, 19 nt, Artificial Sequence
  Description of Artificial Sequence: Synthetic oligonucleotide
acaauucagucuguauaau

SEQ ID NO: 1144646 - RNA, 19 nt, Artificial Sequence
  Description of Artificial Sequence: Synthetic oligonucleotide
cuugggccucgacuuacac

SEQ ID NO: 1144647 - RNA, 19 nt, Artificial Sequence
  Description of Artificial Sequence: Synthetic oligonucleotide
aggguaggacggaaagcgg

SEQ ID NO: 1144648 - RNA, 19 nt, Artificial Sequence
  Description of Artificial Sequence: Synthetic oligonucleotide
ccauuagcguuccuccucc

SEQ ID NO: 1144649 - RNA, 19 nt, Artificial Sequence
  Description of Artificial Sequence: Synthetic oligonucleotide
gaaagcggccccggggagc

SEQ ID NO: 1144650 - RNA, 19 nt, Artificial Sequence
  Description of Artificial Sequence: Synthetic oligonucleotide
guaggacggaaagcggccc

SEQ ID NO: 1144651 - RNA, 19 nt, Artificial Sequence
  Description of Artificial Sequence: Synthetic oligonucleotide
uuucgggcuucaugauacu

SEQ ID NO: 1144652 - RNA, 19 nt, Artificial Sequence
  Description of Artificial Sequence: Synthetic oligonucleotide
gcguugcaaagguagugcc

SEQ ID NO: 1144653 - RNA, 19 nt, Artificial Sequence
  Description of Artificial Sequence: Synthetic oligonucleotide
gaucgugccuugggccucg

SEQ ID NO: 1144654 - RNA, 19 nt, Artificial Sequence
  Description of Artificial Sequence: Synthetic oligonucleotide
ggguaggacggaaagcggc

SEQ ID NO: 1144655 - RNA, 19 nt, Artificial Sequence
  Description of Artificial Sequence: Synthetic oligonucleotide
acccuguuaaauagggaau

SEQ ID NO: 1144656 - RNA, 19 nt, Artificial Sequence
  Description of Artificial Sequence: Synthetic oligonucleotide
cacguagggcggauaggug

SEQ ID NO: 1144657 - RNA, 19 nt, Artificial Sequence
  Description of Artificial Sequence: Synthetic oligonucleotide
acgcaaguagaagggguca

SEQ ID NO: 1144658 - RNA, 19 nt, Artificial Sequence
  Description of Artificial Sequence: Synthetic oligonucleotide
auucagugguuggaacaca

SEQ ID NO: 1144659 - RNA, 19 nt, Artificial Sequence
  Description of Artificial Sequence: Synthetic oligonucleotide
uacagcuauccagguacaa

SEQ ID NO: 1144660 - RNA, 19 nt, Artificial Sequence
  Description of Artificial Sequence: Synthetic oligonucleotide
ucuaccccauggcggugac

SEQ ID NO: 1144661 - RNA, 19 nt, Artificial Sequence
  Description of Artificial Sequence: Synthetic oligonucleotide
gugggcggaaaggugaaga

SEQ ID NO: 1144662 - RNA, 19 nt, Artificial Sequence
  Description of Artificial Sequence: Synthetic oligonucleotide
ugcggacuggaguggccug

SEQ ID NO: 1144663 - RNA, 19 nt, Artificial Sequence
  Description of Artificial Sequence: Synthetic oligonucleotide
augagucugaauggcuuau

SEQ ID NO: 1144664 - RNA, 19 nt, Artificial Sequence
  Description of Artificial Sequence: Synthetic oligonucleotide
ccucccagcaggcugcuag

SEQ ID NO: 1144665 - RNA, 19 nt, Artificial Sequence
  Description of Artificial Sequence: Synthetic oligonucleotide
ccggaacaaaugauuugcc

SEQ ID NO: 1144666 - RNA, 19 nt, Artificial Sequence
  Description of Artificial Sequence: Synthetic oligonucleotide
uuacagggacugguucaca

SEQ ID NO: 1144667 - RNA, 19 nt, Artificial Sequence
  Description of Artificial Sequence: Synthetic oligonucleotide
ggugauagggugaugggcu

SEQ ID NO: 1144668 - RNA, 19 nt, Artificial Sequence
  Description of Artificial Sequence: Synthetic oligonucleotide
gggcacguagggcggauag

SEQ ID NO: 1144669 - RNA, 19 nt, Artificial Sequence
  Description of Artificial Sequence: Synthetic oligonucleotide
cagaccggguccccauuag

SEQ ID NO: 1144670 - RNA, 19 nt, Artificial Sequence
  Description of Artificial Sequence: Synthetic oligonucleotide
acuuacacccgaacccggu

SEQ ID NO: 1144671 - RNA, 19 nt, Artificial Sequence
  Description of Artificial Sequence: Synthetic oligonucleotide
ggcaauuggugagauuuca

SEQ ID NO: 1144672 - RNA, 19 nt, Artificial Sequence
  Description of Artificial Sequence: Synthetic oligonucleotide
ucacgcacucccugccuuc

SEQ ID NO: 1144673 - RNA, 19 nt, Artificial Sequence
  Description of Artificial Sequence: Synthetic oligonucleotide
auggaggccuagacaugac

SEQ ID NO: 1144674 - RNA, 19 nt, Artificial Sequence
  Description of Artificial Sequence: Synthetic oligonucleotide
augcggacuggaguggccu

SEQ ID NO: 1144675 - RNA, 19 nt, Artificial Sequence
  Description of Artificial Sequence: Synthetic oligonucleotide
acagcccggaacaaaugau

SEQ ID NO: 1144676 - RNA, 19 nt, Artificial Sequence
  Description of Artificial Sequence: Synthetic oligonucleotide
agacccuguuaaauaggga

SEQ ID NO: 1144677 - RNA, 19 nt, Artificial Sequence
  Description of Artificial Sequence: Synthetic oligonucleotide
gcccggaacaaaugauuug

SEQ ID NO: 1144678 - RNA, 19 nt, Artificial Sequence
  Description of Artificial Sequence: Synthetic oligonucleotide
cucacagcccggaacaaau

SEQ ID NO: 1144679 - RNA, 19 nt, Artificial Sequence
  Description of Artificial Sequence: Synthetic oligonucleotide
ucucaggaagcggcaccug

SEQ ID NO: 1144680 - RNA, 19 nt, Artificial Sequence
  Description of Artificial Sequence: Synthetic oligonucleotide
cuugccuggcggagccggc

SEQ ID NO: 1144681 - RNA, 19 nt, Artificial Sequence
  Description of Artificial Sequence: Synthetic oligonucleotide
ugagucugaauggcuuauu

SEQ ID NO: 1144682 - RNA, 19 nt, Artificial Sequence
  Description of Artificial Sequence: Synthetic oligonucleotide
gaagcggcaccugauacuu

SEQ ID NO: 1144683 - RNA, 19 nt, Artificial Sequence
  Description of Artificial Sequence: Synthetic oligonucleotide
auccuucggaggggugggc

SEQ ID NO: 1144684 - RNA, 19 nt, Artificial Sequence
  Description of Artificial Sequence: Synthetic oligonucleotide
auggagcagggcucucccu

SEQ ID NO: 1144685 - RNA, 19 nt, Artificial Sequence
  Description of Artificial Sequence: Synthetic oligonucleotide
gcaauuggugagauuucac

SEQ ID NO: 1144686 - RNA, 19 nt, Artificial Sequence
  Description of Artificial Sequence: Synthetic oligonucleotide
guacucgggcacguagggc

SEQ ID NO: 1144687 - RNA, 19 nt, Artificial Sequence
  Description of Artificial Sequence: Synthetic oligonucleotide
gcggauagguggugauagg

SEQ ID NO: 1144688 - RNA, 19 nt, Artificial Sequence
  Description of Artificial Sequence: Synthetic oligonucleotide
agggcggauagguggugau

SEQ ID NO: 1144689 - RNA, 19 nt, Artificial Sequence
  Description of Artificial Sequence: Synthetic oligonucleotide
acucgggcacguagggcgg

SEQ ID NO: 1144690 - RNA, 19 nt, Artificial Sequence
  Description of Artificial Sequence: Synthetic oligonucleotide
auacaacaauucagucugu

SEQ ID NO: 1144691 - RNA, 19 nt, Artificial Sequence
  Description of Artificial Sequence: Synthetic oligonucleotide
cauauuccuuaaaauucuu

SEQ ID NO: 1144692 - RNA, 19 nt, Artificial Sequence
  Description of Artificial Sequence: Synthetic oligonucleotide
gcaaagguagugcccagua

SEQ ID NO: 1144693 - RNA, 19 nt, Artificial Sequence
  Description of Artificial Sequence: Synthetic oligonucleotide
ggcggaaaggugaagagau

SEQ ID NO: 1144694 - RNA, 19 nt, Artificial Sequence
  Description of Artificial Sequence: Synthetic oligonucleotide
acagcacuagagacccugu

SEQ ID NO: 1144695 - RNA, 19 nt, Artificial Sequence
  Description of Artificial Sequence: Synthetic oligonucleotide
ccuucggaggggugggcgg

SEQ ID NO: 1144696 - RNA, 19 nt, Artificial Sequence
  Description of Artificial Sequence: Synthetic oligonucleotide
uagugcccaguaccaucuc

SEQ ID NO: 1144697 - RNA, 19 nt, Artificial Sequence
  Description of Artificial Sequence: Synthetic oligonucleotide
ccucacuggcaauugguga

SEQ ID NO: 1144698 - RNA, 19 nt, Artificial Sequence
  Description of Artificial Sequence: Synthetic oligonucleotide
gaggccuagacaugacauu

SEQ ID NO: 1144699 - RNA, 19 nt, Artificial Sequence
  Description of Artificial Sequence: Synthetic oligonucleotide
acacccgaacccgguaggu

SEQ ID NO: 1144700 - RNA, 19 nt, Artificial Sequence
  Description of Artificial Sequence: Synthetic oligonucleotide
aagcggcaccugauacuug

SEQ ID NO: 1144701 - RNA, 19 nt, Artificial Sequence
  Description of Artificial Sequence: Synthetic oligonucleotide
ggucagagggauucuuugu

SEQ ID NO: 1144702 - RNA, 19 nt, Artificial Sequence
  Description of Artificial Sequence: Synthetic oligonucleotide
ccuucugugcuggaucgug

SEQ ID NO: 1144703 - RNA, 19 nt, Artificial Sequence
  Description of Artificial Sequence: Synthetic oligonucleotide
aucugucgcuuucgggcuu

SEQ ID NO: 1144704 - RNA, 19 nt, Artificial Sequence
  Description of Artificial Sequence: Synthetic oligonucleotide
gggauccggauucaguggu

SEQ ID NO: 1144705 - RNA, 19 nt, Artificial Sequence
  Description of Artificial Sequence: Synthetic oligonucleotide
cauuagcguuccuccucca

SEQ ID NO: 1144706 - RNA, 19 nt, Artificial Sequence
  Description of Artificial Sequence: Synthetic oligonucleotide
ggagguugccccacaguuc

SEQ ID NO: 1144707 - RNA, 19 nt, Artificial Sequence
  Description of Artificial Sequence: Synthetic oligonucleotide
ggacuuggaaacuccucgu

SEQ ID NO: 1144708 - RNA, 19 nt, Artificial Sequence
  Description of Artificial Sequence: Synthetic oligonucleotide
ccugauacuugaggcacuc

SEQ ID NO: 1144709 - RNA, 19 nt, Artificial Sequence
  Description of Artificial Sequence: Synthetic oligonucleotide
agguagugcccaguaccau

SEQ ID NO: 1144710 - RNA, 19 nt, Artificial Sequence
  Description of Artificial Sequence: Synthetic oligonucleotide
ggaagcggcaccugauacu

SEQ ID NO: 1144711 - RNA, 19 nt, Artificial Sequence
  Description of Artificial Sequence: Synthetic oligonucleotide
guagggcggauagguggug

SEQ ID NO: 1144712 - RNA, 19 nt, Artificial Sequence
  Description of Artificial Sequence: Synthetic oligonucleotide
cccgggguggacagcgacg

SEQ ID NO: 1144713 - RNA, 19 nt, Artificial Sequence
  Description of Artificial Sequence: Synthetic oligonucleotide
gcuuucgggcuucaugaua

SEQ ID NO: 1144714 - RNA, 19 nt, Artificial Sequence
  Description of Artificial Sequence: Synthetic oligonucleotide
agguugccccacaguucac

SEQ ID NO: 1144715 - RNA, 19 nt, Artificial Sequence
  Description of Artificial Sequence: Synthetic oligonucleotide
ggaggccuagacaugacau

SEQ ID NO: 1144716 - RNA, 19 nt, Artificial Sequence
  Description of Artificial Sequence: Synthetic oligonucleotide
cggauucagugguuggaac

SEQ ID NO: 1144717 - RNA, 19 nt, Artificial Sequence
  Description of Artificial Sequence: Synthetic oligonucleotide
ggacggaaagcggccccgg

SEQ ID NO: 1144718 - RNA, 19 nt, Artificial Sequence
  Description of Artificial Sequence: Synthetic oligonucleotide
gggcggaaaggugaagaga

SEQ ID NO: 1144719 - RNA, 19 nt, Artificial Sequence
  Description of Artificial Sequence: Synthetic oligonucleotide
ccucgacuuacacccgaac

SEQ ID NO: 1144720 - RNA, 19 nt, Artificial Sequence
  Description of Artificial Sequence: Synthetic oligonucleotide
gaacccgguaggugauccu

SEQ ID NO: 1144721 - RNA, 19 nt, Artificial Sequence
  Description of Artificial Sequence: Synthetic oligonucleotide
gucgccacaguggggugga

SEQ ID NO: 1144722 - RNA, 19 nt, Artificial Sequence
  Description of Artificial Sequence: Synthetic oligonucleotide
ccaguaccaucucgucgcc

SEQ ID NO: 1144723 - RNA, 19 nt, Artificial Sequence
  Description of Artificial Sequence: Synthetic oligonucleotide
cuaccccauggcggugacc

SEQ ID NO: 1144724 - RNA, 19 nt, Artificial Sequence
  Description of Artificial Sequence: Synthetic oligonucleotide
ccuagacaugacauucuua

SEQ ID NO: 1144725 - RNA, 19 nt, Artificial Sequence
  Description of Artificial Sequence: Synthetic oligonucleotide
cgaacccgguaggugaucc

SEQ ID NO: 1144726 - RNA, 19 nt, Artificial Sequence
  Description of Artificial Sequence: Synthetic oligonucleotide
gcggaaaggugaagagaug

SEQ ID NO: 1144727 - RNA, 19 nt, Artificial Sequence
  Description of Artificial Sequence: Synthetic oligonucleotide
ggcggagccggccgauccc

SEQ ID NO: 1144728 - RNA, 19 nt, Artificial Sequence
  Description of Artificial Sequence: Synthetic oligonucleotide
ccgaucccgggguggacag

SEQ ID NO: 1144729 - RNA, 19 nt, Artificial Sequence
  Description of Artificial Sequence: Synthetic oligonucleotide
ggccucgacuuacacccga

SEQ ID NO: 1144730 - RNA, 19 nt, Artificial Sequence
  Description of Artificial Sequence: Synthetic oligonucleotide
uucggaggggugggcggaa

SEQ ID NO: 1144731 - RNA, 19 nt, Artificial Sequence
  Description of Artificial Sequence: Synthetic oligonucleotide
gcacguagggcggauaggu

SEQ ID NO: 1144732 - RNA, 19 nt, Artificial Sequence
  Description of Artificial Sequence: Synthetic oligonucleotide
aacugacagcgugcccauu

SEQ ID NO: 1144733 - RNA, 19 nt, Artificial Sequence
  Description of Artificial Sequence: Synthetic oligonucleotide
ggugggcggaaaggugaag

SEQ ID NO: 1144734 - RNA, 19 nt, Artificial Sequence
  Description of Artificial Sequence: Synthetic oligonucleotide
cccuguuaaauagggaaua

SEQ ID NO: 1144735 - RNA, 19 nt, Artificial Sequence
  Description of Artificial Sequence: Synthetic oligonucleotide
gcggagccggccgaucccg

SEQ ID NO: 1144736 - RNA, 19 nt, Artificial Sequence
  Description of Artificial Sequence: Synthetic oligonucleotide
gcuucaugauacugcuccu

SEQ ID NO: 1144737 - RNA, 19 nt, Artificial Sequence
  Description of Artificial Sequence: Synthetic oligonucleotide
ugucgcuuucgggcuucau

SEQ ID NO: 1144738 - RNA, 19 nt, Artificial Sequence
  Description of Artificial Sequence: Synthetic oligonucleotide
ucggaggggugggcggaaa

SEQ ID NO: 1144739 - RNA, 19 nt, Artificial Sequence
  Description of Artificial Sequence: Synthetic oligonucleotide
caccgggagcuccuuugaa

SEQ ID NO: 1144740 - RNA, 19 nt, Artificial Sequence
  Description of Artificial Sequence: Synthetic oligonucleotide
uggcguccuucaugccuuu

SEQ ID NO: 1144741 - RNA, 19 nt, Artificial Sequence
  Description of Artificial Sequence: Synthetic oligonucleotide
aagcggccccggggagccg

SEQ ID NO: 1144742 - RNA, 19 nt, Artificial Sequence
  Description of Artificial Sequence: Synthetic oligonucleotide
gccuagacaugacauucuu

SEQ ID NO: 1144743 - RNA, 19 nt, Artificial Sequence
  Description of Artificial Sequence: Synthetic oligonucleotide
gaccaugcucagaccgggu

SEQ ID NO: 1144744 - RNA, 19 nt, Artificial Sequence
  Description of Artificial Sequence: Synthetic oligonucleotide
gggccucgacuuacacccg

SEQ ID NO: 1144745 - RNA, 19 nt, Artificial Sequence
  Description of Artificial Sequence: Synthetic oligonucleotide
cugacagcgugcccauuuu

SEQ ID NO: 1144746 - RNA, 19 nt, Artificial Sequence
  Description of Artificial Sequence: Synthetic oligonucleotide
ggccugcggccagagaaga

SEQ ID NO: 1144747 - RNA, 19 nt, Artificial Sequence
  Description of Artificial Sequence: Synthetic oligonucleotide
ggccuagacaugacauucu

SEQ ID NO: 1144748 - RNA, 19 nt, Artificial Sequence
  Description of Artificial Sequence: Synthetic oligonucleotide
gccgaucccgggguggaca

SEQ ID NO: 1144749 - RNA, 19 nt, Artificial Sequence
  Description of Artificial Sequence: Synthetic oligonucleotide
cugauacuugaggcacucu

SEQ ID NO: 1144750 - RNA, 19 nt, Artificial Sequence
  Description of Artificial Sequence: Synthetic oligonucleotide
ccuguuaaauagggaauau

SEQ ID NO: 1144751 - RNA, 19 nt, Artificial Sequence
  Description of Artificial Sequence: Synthetic oligonucleotide
ccggagcuguacucgggca

SEQ ID NO: 1144752 - RNA, 19 nt, Artificial Sequence
  Description of Artificial Sequence: Synthetic oligonucleotide
ccggauucagugguuggaa

SEQ ID NO: 1144753 - RNA, 19 nt, Artificial Sequence
  Description of Artificial Sequence: Synthetic oligonucleotide
cagcacuagagacccuguu

SEQ ID NO: 1144754 - RNA, 19 nt, Artificial Sequence
  Description of Artificial Sequence: Synthetic oligonucleotide
cggugaccaugcucagacc

SEQ ID NO: 1144755 - RNA, 19 nt, Artificial Sequence
  Description of Artificial Sequence: Synthetic oligonucleotide
ccggccgaucccggggugg

SEQ ID NO: 1144756 - RNA, 19 nt, Artificial Sequence
  Description of Artificial Sequence: Synthetic oligonucleotide
ccaccgggagcuccuuuga

SEQ ID NO: 1144757 - RNA, 19 nt, Artificial Sequence
  Description of Artificial Sequence: Synthetic oligonucleotide
cucgggcacguagggcgga

SEQ ID NO: 1144758 - RNA, 19 nt, Artificial Sequence
  Description of Artificial Sequence: Synthetic oligonucleotide
gggugggcggaaaggugaa

SEQ ID NO: 1144759 - RNA, 19 nt, Artificial Sequence
  Description of Artificial Sequence: Synthetic oligonucleotide
ccggaggguaggacggaaa

SEQ ID NO: 1144760 - RNA, 19 nt, Artificial Sequence
  Description of Artificial Sequence: Synthetic oligonucleotide
cguagggcggauagguggu

SEQ ID NO: 1144761 - RNA, 19 nt, Artificial Sequence
  Description of Artificial Sequence: Synthetic oligonucleotide
gcucagaccggguccccau

SEQ ID NO: 1144762 - RNA, 19 nt, Artificial Sequence
  Description of Artificial Sequence: Synthetic oligonucleotide
gccucgacuuacacccgaa

SEQ ID NO: 1144763 - RNA, 19 nt, Artificial Sequence
  Description of Artificial Sequence: Synthetic oligonucleotide
gccggccgaucccggggug

SEQ ID NO: 1144764 - RNA, 19 nt, Artificial Sequence
  Description of Artificial Sequence: Synthetic oligonucleotide
gggcggauagguggugaua

SEQ ID NO: 1144765 - RNA, 19 nt, Artificial Sequence
  Description of Artificial Sequence: Synthetic oligonucleotide
ggacagcgacggggucugg

SEQ ID NO: 1144766 - RNA, 19 nt, Artificial Sequence
  Description of Artificial Sequence: Synthetic oligonucleotide
aucgugccuugggccucga

SEQ ID NO: 1144767 - RNA, 19 nt, Artificial Sequence
  Description of Artificial Sequence: Synthetic oligonucleotide
ccuucgcuugggcuugaua

SEQ ID NO: 1144768 - RNA, 19 nt, Artificial Sequence
  Description of Artificial Sequence: Synthetic oligonucleotide
ggcguccuucaugccuuuc

SEQ ID NO: 1144769 - RNA, 19 nt, Artificial Sequence
  Description of Artificial Sequence: Synthetic oligonucleotide
cucagaccggguccccauu

SEQ ID NO: 1144770 - RNA, 19 nt, Artificial Sequence
  Description of Artificial Sequence: Synthetic oligonucleotide
ccgaacccgguaggugauc

SEQ ID NO: 1144771 - RNA, 19 nt, Artificial Sequence
  Description of Artificial Sequence: Synthetic oligonucleotide
ggccgaucccgggguggac

SEQ ID NO: 1144772 - RNA, 19 nt, Artificial Sequence
  Description of Artificial Sequence: Synthetic oligonucleotide
ggauccggauucagugguu

SEQ ID NO: 1144773 - RNA, 19 nt, Artificial Sequence
  Description of Artificial Sequence: Synthetic oligonucleotide
ccggguccccauuagcguu

SEQ ID NO: 1144774 - RNA, 19 nt, Artificial Sequence
  Description of Artificial Sequence: Synthetic oligonucleotide
cgcuagcaguaaauaaauu

SEQ ID NO: 1144775 - RNA, 19 nt, Artificial Sequence
  Description of Artificial Sequence: Synthetic oligonucleotide
cgaucccgggguggacagc

SEQ ID NO: 1144776 - RNA, 19 nt, Artificial Sequence
  Description of Artificial Sequence: Synthetic oligonucleotide
cccucccaggguggucaug

SEQ ID NO: 1144777 - RNA, 19 nt, Artificial Sequence
  Description of Artificial Sequence: Synthetic oligonucleotide
ggccccggggagccguggu

SEQ ID NO: 1144778 - RNA, 19 nt, Artificial Sequence
  Description of Artificial Sequence: Synthetic oligonucleotide
cgcuuucgggcuucaugau

SEQ ID NO: 1144779 - RNA, 19 nt, Artificial Sequence
  Description of Artificial Sequence: Synthetic oligonucleotide
gcggccccggggagccgug

SEQ ID NO: 1144780 - RNA, 19 nt, Artificial Sequence
  Description of Artificial Sequence: Synthetic oligonucleotide
cgggcacguagggcggaua

SEQ ID NO: 1144781 - RNA, 19 nt, Artificial Sequence
  Description of Artificial Sequence: Synthetic oligonucleotide
ccccucccaggguggucau

SEQ ID NO: 1144782 - RNA, 19 nt, Artificial Sequence
  Description of Artificial Sequence: Synthetic oligonucleotide
uuagagaauacucaaauug

SEQ ID NO: 1144783 - RNA, 19 nt, Artificial Sequence
  Description of Artificial Sequence: Synthetic oligonucleotide
aacaacauaaacaaugugg

SEQ ID NO: 1144784 - RNA, 19 nt, Artificial Sequence
  Description of Artificial Sequence: Synthetic oligonucleotide
acuaggucaacguugaagc

SEQ ID NO: 1144785 - RNA, 19 nt, Artificial Sequence
  Description of Artificial Sequence: Synthetic oligonucleotide
cuaaauaaguguuauacag

SEQ ID NO: 1144786 - RNA, 19 nt, Artificial Sequence
  Description of Artificial Sequence: Synthetic oligonucleotide
acuguaaaaucauggaugc

SEQ ID NO: 1144787 - RNA, 19 nt, Artificial Sequence
  Description of Artificial Sequence: Synthetic oligonucleotide
uucacuuugccguagaugc

SEQ ID NO: 1144788 - RNA, 19 nt, Artificial Sequence
  Description of Artificial Sequence: Synthetic oligonucleotide
uuuacugcaaccuugaauu

SEQ ID NO: 1144789 - RNA, 19 nt, Artificial Sequence
  Description of Artificial Sequence: Synthetic oligonucleotide
uauuuuaggguuuugacaa

SEQ ID NO: 1144790 - RNA, 19 nt, Artificial Sequence
  Description of Artificial Sequence: Synthetic oligonucleotide
uacuguaaaaucauggaug

SEQ ID NO: 1144791 - RNA, 19 nt, Artificial Sequence
  Description of Artificial Sequence: Synthetic oligonucleotide
gaaguaauguuuuccaucc

SEQ ID NO: 1144792 - RNA, 19 nt, Artificial Sequence
  Description of Artificial Sequence: Synthetic oligonucleotide
uuuagcaccaugaucacga

SEQ ID NO: 1144793 - RNA, 19 nt, Artificial Sequence
  Description of Artificial Sequence: Synthetic oligonucleotide
accagauaaaacuugaugu

SEQ ID NO: 1144794 - RNA, 19 nt, Artificial Sequence
  Description of Artificial Sequence: Synthetic oligonucleotide
augaucacgaucucaaagg

SEQ ID NO: 1144795 - RNA, 19 nt, Artificial Sequence
  Description of Artificial Sequence: Synthetic oligonucleotide
aaauuaucaucucaaagua

SEQ ID NO: 1144796 - RNA, 19 nt, Artificial Sequence
  Description of Artificial Sequence: Synthetic oligonucleotide
gacuaaauaaguguuauac

SEQ ID NO: 1144797 - RNA, 19 nt, Artificial Sequence
  Description of Artificial Sequence: Synthetic oligonucleotide
guaaauuaucaucucaaag

SEQ ID NO: 1144798 - RNA, 19 nt, Artificial Sequence
  Description of Artificial Sequence: Synthetic oligonucleotide
augagcucaacuuaacaac

SEQ ID NO: 1144799 - RNA, 19 nt, Artificial Sequence
  Description of Artificial Sequence: Synthetic oligonucleotide
ugguauauuagaauaggca

SEQ ID NO: 1144800 - RNA, 19 nt, Artificial Sequence
  Description of Artificial Sequence: Synthetic oligonucleotide
aaucauggaugccugagug

SEQ ID NO: 1144801 - RNA, 19 nt, Artificial Sequence
  Description of Artificial Sequence: Synthetic oligonucleotide
uguaaaaucauggaugccu

SEQ ID NO: 1144802 - RNA, 19 nt, Artificial Sequence
  Description of Artificial Sequence: Synthetic oligonucleotide
aaauaugccuucuaucccu

SEQ ID NO: 1144803 - RNA, 19 nt, Artificial Sequence
  Description of Artificial Sequence: Synthetic oligonucleotide
ugaccuuaacuacaaaugc

SEQ ID NO: 1144804 - RNA, 19 nt, Artificial Sequence
  Description of Artificial Sequence: Synthetic oligonucleotide
gagaauaccagauaaaacu

SEQ ID NO: 1144805 - RNA, 19 nt, Artificial Sequence
  Description of Artificial Sequence: Synthetic oligonucleotide
acggacuacaaucaaagag

SEQ ID NO: 1144806 - RNA, 19 nt, Artificial Sequence
  Description of Artificial Sequence: Synthetic oligonucleotide
ugaacauagagguacugca

SEQ ID NO: 1144807 - RNA, 19 nt, Artificial Sequence
  Description of Artificial Sequence: Synthetic oligonucleotide
uauauaaggcuuuacccac

SEQ ID NO: 1144808 - RNA, 19 nt, Artificial Sequence
  Description of Artificial Sequence: Synthetic oligonucleotide
agcaaugacgacuaaauaa

SEQ ID NO: 1144809 - RNA, 19 nt, Artificial Sequence
  Description of Artificial Sequence: Synthetic oligonucleotide
uguagagcgauaucccugg

SEQ ID NO: 1144810 - RNA, 19 nt, Artificial Sequence
  Description of Artificial Sequence: Synthetic oligonucleotide
aauuaucaucucaaaguac

SEQ ID NO: 1144811 - RNA, 19 nt, Artificial Sequence
  Description of Artificial Sequence: Synthetic oligonucleotide
auucacuucuccuuuaaug

SEQ ID NO: 1144812 - RNA, 19 nt, Artificial Sequence
  Description of Artificial Sequence: Synthetic oligonucleotide
gguauauuagaauaggcac

SEQ ID NO: 1144813 - RNA, 19 nt, Artificial Sequence
  Description of Artificial Sequence: Synthetic oligonucleotide
uugauauuguugauuggag

SEQ ID NO: 1144814 - RNA, 19 nt, Artificial Sequence
  Description of Artificial Sequence: Synthetic oligonucleotide
ucauuugucagcguguugc

SEQ ID NO: 1144815 - RNA, 19 nt, Artificial Sequence
  Description of Artificial Sequence: Synthetic oligonucleotide
aagacccuacuguaaaauc

SEQ ID NO: 1144816 - RNA, 19 nt, Artificial Sequence
  Description of Artificial Sequence: Synthetic oligonucleotide
uuagaauaggcacuuuaac

SEQ ID NO: 1144817 - RNA, 19 nt, Artificial Sequence
  Description of Artificial Sequence: Synthetic oligonucleotide
augacgacuaaauaagugu

SEQ ID NO: 1144818 - RNA, 19 nt, Artificial Sequence
  Description of Artificial Sequence: Synthetic oligonucleotide
agucuuauaagauaugauu

SEQ ID NO: 1144819 - RNA, 19 nt, Artificial Sequence
  Description of Artificial Sequence: Synthetic oligonucleotide
accaucaacagauaaugug

SEQ ID NO: 1144820 - RNA, 19 nt, Artificial Sequence
  Description of Artificial Sequence: Synthetic oligonucleotide
aagaaaggaauuucuuaca

SEQ ID NO: 1144821 - RNA, 19 nt, Artificial Sequence
  Description of Artificial Sequence: Synthetic oligonucleotide
uucuaucccuauuaacugg

SEQ ID NO: 1144822 - RNA, 19 nt, Artificial Sequence
  Description of Artificial Sequence: Synthetic oligonucleotide
uuacccacguuucauuuag

SEQ ID NO: 1144823 - RNA, 19 nt, Artificial Sequence
  Description of Artificial Sequence: Synthetic oligonucleotide
caaguguagagcgauaucc

SEQ ID NO: 1144824 - RNA, 19 nt, Artificial Sequence
  Description of Artificial Sequence: Synthetic oligonucleotide
uacacaagaaauaugccuu

SEQ ID NO: 1144825 - RNA, 19 nt, Artificial Sequence
  Description of Artificial Sequence: Synthetic oligonucleotide
cugaccuuaacuacaaaug

SEQ ID NO: 1144826 - RNA, 19 nt, Artificial Sequence
  Description of Artificial Sequence: Synthetic oligonucleotide
aguuggaccuuuugaagcg

SEQ ID NO: 1144827 - RNA, 19 nt, Artificial Sequence
  Description of Artificial Sequence: Synthetic oligonucleotide
auuaucaucucaaaguaca

SEQ ID NO: 1144828 - RNA, 19 nt, Artificial Sequence
  Description of Artificial Sequence: Synthetic oligonucleotide
uauacauuuucucuacuua

SEQ ID NO: 1144829 - RNA, 19 nt, Artificial Sequence
  Description of Artificial Sequence: Synthetic oligonucleotide
caugguagcuaccagcucc

SEQ ID NO: 1144830 - RNA, 19 nt, Artificial Sequence
  Description of Artificial Sequence: Synthetic oligonucleotide
aaguguagagcgauauccc

SEQ ID NO: 1144831 - RNA, 19 nt, Artificial Sequence
  Description of Artificial Sequence: Synthetic oligonucleotide
acggauaucaccaucaaca

SEQ ID NO: 1144832 - RNA, 19 nt, Artificial Sequence
  Description of Artificial Sequence: Synthetic oligonucleotide
ucagaaauggugccgacau

SEQ ID NO: 1144833 - RNA, 19 nt, Artificial Sequence
  Description of Artificial Sequence: Synthetic oligonucleotide
acugguauauuagaauagg

SEQ ID NO: 1144834 - RNA, 19 nt, Artificial Sequence
  Description of Artificial Sequence: Synthetic oligonucleotide
ucugaccuuaacuacaaau

SEQ ID NO: 1144835 - RNA, 19 nt, Artificial Sequence
  Description of Artificial Sequence: Synthetic oligonucleotide
cuuacauccagcaaacgga

SEQ ID NO: 1144836 - RNA, 19 nt, Artificial Sequence
  Description of Artificial Sequence: Synthetic oligonucleotide
aaugcaguuggaccuuuug

SEQ ID NO: 1144837 - RNA, 19 nt, Artificial Sequence
  Description of Artificial Sequence: Synthetic oligonucleotide
uaagauaugauuggaugcu

SEQ ID NO: 1144838 - RNA, 19 nt, Artificial Sequence
  Description of Artificial Sequence: Synthetic oligonucleotide
uaaggcuuuacccacguuu

SEQ ID NO: 1144839 - RNA, 19 nt, Artificial Sequence
  Description of Artificial Sequence: Synthetic oligonucleotide
cuacuuaucugugucaggc

SEQ ID NO: 1144840 - RNA, 19 nt, Artificial Sequence
  Description of Artificial Sequence: Synthetic oligonucleotide
auguucagcauauuaauua

SEQ ID NO: 1144841 - RNA, 19 nt, Artificial Sequence
  Description of Artificial Sequence: Synthetic oligonucleotide
uuaaugacaacaguucguc

SEQ ID NO: 1144842 - RNA, 19 nt, Artificial Sequence
  Description of Artificial Sequence: Synthetic oligonucleotide
aaugggguuaaugcaaugu

SEQ ID NO: 1144843 - RNA, 19 nt, Artificial Sequence
  Description of Artificial Sequence: Synthetic oligonucleotide
guauuuuaggguuuugaca

SEQ ID NO: 1144844 - RNA, 19 nt, Artificial Sequence
  Description of Artificial Sequence: Synthetic oligonucleotide
cugguauauuagaauaggc

SEQ ID NO: 1144845 - RNA, 19 nt, Artificial Sequence
  Description of Artificial Sequence: Synthetic oligonucleotide
ugauccugugggcauacag

SEQ ID NO: 1144846 - RNA, 19 nt, Artificial Sequence
  Description of Artificial Sequence: Synthetic oligonucleotide
augcacaccauuuacugca

SEQ ID NO: 1144847 - RNA, 19 nt, Artificial Sequence
  Description of Artificial Sequence: Synthetic oligonucleotide
uugauguuguaugagcuca

SEQ ID NO: 1144848 - RNA, 19 nt, Artificial Sequence
  Description of Artificial Sequence: Synthetic oligonucleotide
ucuaucccuauuaacuggu

SEQ ID NO: 1144849 - RNA, 19 nt, Artificial Sequence
  Description of Artificial Sequence: Synthetic oligonucleotide
ugaucacgaucucaaagga

SEQ ID NO: 1144850 - RNA, 19 nt, Artificial Sequence
  Description of Artificial Sequence: Synthetic oligonucleotide
auuugacauggccaguauc

SEQ ID NO: 1144851 - RNA, 19 nt, Artificial Sequence
  Description of Artificial Sequence: Synthetic oligonucleotide
aacuaaaugggaagcaggu

SEQ ID NO: 1144852 - RNA, 19 nt, Artificial Sequence
  Description of Artificial Sequence: Synthetic oligonucleotide
aguaauguuuuccauccau

SEQ ID NO: 1144853 - RNA, 19 nt, Artificial Sequence
  Description of Artificial Sequence: Synthetic oligonucleotide
agcaucguucuuuuccaac

SEQ ID NO: 1144854 - RNA, 19 nt, Artificial Sequence
  Description of Artificial Sequence: Synthetic oligonucleotide
uauauuagaauaggcacuu

SEQ ID NO: 1144855 - RNA, 19 nt, Artificial Sequence
  Description of Artificial Sequence: Synthetic oligonucleotide
agccguuuuguauuuuagg

SEQ ID NO: 1144856 - RNA, 19 nt, Artificial Sequence
  Description of Artificial Sequence: Synthetic oligonucleotide
aauggaguggacauucacu

SEQ ID NO: 1144857 - RNA, 19 nt, Artificial Sequence
  Description of Artificial Sequence: Synthetic oligonucleotide
aauucucggacaucacagu

SEQ ID NO: 1144858 - RNA, 19 nt, Artificial Sequence
  Description of Artificial Sequence: Synthetic oligonucleotide
cuaaaugggaagcagguaa

SEQ ID NO: 1144859 - RNA, 19 nt, Artificial Sequence
  Description of Artificial Sequence: Synthetic oligonucleotide
aguaaauuaucaucucaaa

SEQ ID NO: 1144860 - RNA, 19 nt, Artificial Sequence
  Description of Artificial Sequence: Synthetic oligonucleotide
ucuacuuaucugugucagg

SEQ ID NO: 1144861 - RNA, 19 nt, Artificial Sequence
  Description of Artificial Sequence: Synthetic oligonucleotide
guugcaaacaaugcaguug

SEQ ID NO: 1144862 - RNA, 19 nt, Artificial Sequence
  Description of Artificial Sequence: Synthetic oligonucleotide
auaaugugucaauacugcu

SEQ ID NO: 1144863 - RNA, 19 nt, Artificial Sequence
  Description of Artificial Sequence: Synthetic oligonucleotide
ugcaaccuugaauucucgg

SEQ ID NO: 1144864 - RNA, 19 nt, Artificial Sequence
  Description of Artificial Sequence: Synthetic oligonucleotide
aucacgaucucaaaggacu

SEQ ID NO: 1144865 - RNA, 19 nt, Artificial Sequence
  Description of Artificial Sequence: Synthetic oligonucleotide
agaaagacccuacuguaaa

SEQ ID NO: 1144866 - RNA, 19 nt, Artificial Sequence
  Description of Artificial Sequence: Synthetic oligonucleotide
aaccuugaauucucggaca

SEQ ID NO: 1144867 - RNA, 19 nt, Artificial Sequence
  Description of Artificial Sequence: Synthetic oligonucleotide
ugacgacuaaauaaguguu

SEQ ID NO: 1144868 - RNA, 19 nt, Artificial Sequence
  Description of Artificial Sequence: Synthetic oligonucleotide
uguaugagcucaacuuaac

SEQ ID NO: 1144869 - RNA, 19 nt, Artificial Sequence
  Description of Artificial Sequence: Synthetic oligonucleotide
acauaagccguuuuguauu

SEQ ID NO: 1144870 - RNA, 19 nt, Artificial Sequence
  Description of Artificial Sequence: Synthetic oligonucleotide
ugcugauuaugaaaaggau

SEQ ID NO: 1144871 - RNA, 19 nt, Artificial Sequence
  Description of Artificial Sequence: Synthetic oligonucleotide
aaagacccuacuguaaaau

SEQ ID NO: 1144872 - RNA, 19 nt, Artificial Sequence
  Description of Artificial Sequence: Synthetic oligonucleotide
uguucagaaauggugccga

SEQ ID NO: 1144873 - RNA, 19 nt, Artificial Sequence
  Description of Artificial Sequence: Synthetic oligonucleotide
ugcuuucauguucaggcgu

SEQ ID NO: 1144874 - RNA, 19 nt, Artificial Sequence
  Description of Artificial Sequence: Synthetic oligonucleotide
uuacauccagcaaacggau

SEQ ID NO: 1144875 - RNA, 19 nt, Artificial Sequence
  Description of Artificial Sequence: Synthetic oligonucleotide
uaaugacaacaguucgucc

SEQ ID NO: 1144876 - RNA, 19 nt, Artificial Sequence
  Description of Artificial Sequence: Synthetic oligonucleotide
ugucaauacugcuuagcuc

SEQ ID NO: 1144877 - RNA, 19 nt, Artificial Sequence
  Description of Artificial Sequence: Synthetic oligonucleotide
aaaggauuacuggggaagu

SEQ ID NO: 1144878 - RNA, 19 nt, Artificial Sequence
  Description of Artificial Sequence: Synthetic oligonucleotide
aagauaugauuggaugcug

SEQ ID NO: 1144879 - RNA, 19 nt, Artificial Sequence
  Description of Artificial Sequence: Synthetic oligonucleotide
caacguugaagccuuuggc

SEQ ID NO: 1144880 - RNA, 19 nt, Artificial Sequence
  Description of Artificial Sequence: Synthetic oligonucleotide
cagcguguugcaaacaaug

SEQ ID NO: 1144881 - RNA, 19 nt, Artificial Sequence
  Description of Artificial Sequence: Synthetic oligonucleotide
caucaacagauaauguguc

SEQ ID NO: 1144882 - RNA, 19 nt, Artificial Sequence
  Description of Artificial Sequence: Synthetic oligonucleotide
agcguguugcaaacaaugc

SEQ ID NO: 1144883 - RNA, 19 nt, Artificial Sequence
  Description of Artificial Sequence: Synthetic oligonucleotide
aguguagagcgauaucccu

SEQ ID NO: 1144884 - RNA, 19 nt, Artificial Sequence
  Description of Artificial Sequence: Synthetic oligonucleotide
aaguguuauacagucuuau

SEQ ID NO: 1144885 - RNA, 19 nt, Artificial Sequence
  Description of Artificial Sequence: Synthetic oligonucleotide
agagcgauaucccuggauu

SEQ ID NO: 1144886 - RNA, 19 nt, Artificial Sequence
  Description of Artificial Sequence: Synthetic oligonucleotide
uaucccuauuaacugguau

SEQ ID NO: 1144887 - RNA, 19 nt, Artificial Sequence
  Description of Artificial Sequence: Synthetic oligonucleotide
cugaacauagagguacugc

SEQ ID NO: 1144888 - RNA, 19 nt, Artificial Sequence
  Description of Artificial Sequence: Synthetic oligonucleotide
ucuaugcacagcucagaga

SEQ ID NO: 1144889 - RNA, 19 nt, Artificial Sequence
  Description of Artificial Sequence: Synthetic oligonucleotide
uauuauugauauuguugau

SEQ ID NO: 1144890 - RNA, 19 nt, Artificial Sequence
  Description of Artificial Sequence: Synthetic oligonucleotide
gauccugugggcauacagc

SEQ ID NO: 1144891 - RNA, 19 nt, Artificial Sequence
  Description of Artificial Sequence: Synthetic oligonucleotide
gauugccccagauuuguuc

SEQ ID NO: 1144892 - RNA, 19 nt, Artificial Sequence
  Description of Artificial Sequence: Synthetic oligonucleotide
aucaacagauaauguguca

SEQ ID NO: 1144893 - RNA, 19 nt, Artificial Sequence
  Description of Artificial Sequence: Synthetic oligonucleotide
uuugacaaucaugguagcu

SEQ ID NO: 1144894 - RNA, 19 nt, Artificial Sequence
  Description of Artificial Sequence: Synthetic oligonucleotide
aaaugugccuugccagacu

SEQ ID NO: 1144895 - RNA, 19 nt, Artificial Sequence
  Description of Artificial Sequence: Synthetic oligonucleotide
aaguacauuccagaacuaa

SEQ ID NO: 1144896 - RNA, 19 nt, Artificial Sequence
  Description of Artificial Sequence: Synthetic oligonucleotide
auguuguaugagcucaacu

SEQ ID NO: 1144897 - RNA, 19 nt, Artificial Sequence
  Description of Artificial Sequence: Synthetic oligonucleotide
cagcaaacggauaucacca

SEQ ID NO: 1144898 - RNA, 19 nt, Artificial Sequence
  Description of Artificial Sequence: Synthetic oligonucleotide
aaauccgagcugaagcuga

SEQ ID NO: 1144899 - RNA, 19 nt, Artificial Sequence
  Description of Artificial Sequence: Synthetic oligonucleotide
auuagaauaggcacuuuaa

SEQ ID NO: 1144900 - RNA, 19 nt, Artificial Sequence
  Description of Artificial Sequence: Synthetic oligonucleotide
cccuacuguaaaaucaugg

SEQ ID NO: 1144901 - RNA, 19 nt, Artificial Sequence
  Description of Artificial Sequence: Synthetic oligonucleotide
ugccagaaaacagggacca

SEQ ID NO: 1144902 - RNA, 19 nt, Artificial Sequence
  Description of Artificial Sequence: Synthetic oligonucleotide
ucguucuuuuccaacuuau

SEQ ID NO: 1144903 - RNA, 19 nt, Artificial Sequence
  Description of Artificial Sequence: Synthetic oligonucleotide
uucaaguguagagcgauau

SEQ ID NO: 1144904 - RNA, 19 nt, Artificial Sequence
  Description of Artificial Sequence: Synthetic oligonucleotide
uaaauccgagcugaagcug

SEQ ID NO: 1144905 - RNA, 19 nt, Artificial Sequence
  Description of Artificial Sequence: Synthetic oligonucleotide
cuaggucaacguugaagcc

SEQ ID NO: 1144906 - RNA, 19 nt, Artificial Sequence
  Description of Artificial Sequence: Synthetic oligonucleotide
gaaauggugccgacauagg

SEQ ID NO: 1144907 - RNA, 19 nt, Artificial Sequence
  Description of Artificial Sequence: Synthetic oligonucleotide
ugauuaugaaaaggauuac

SEQ ID NO: 1144908 - RNA, 19 nt, Artificial Sequence
  Description of Artificial Sequence: Synthetic oligonucleotide
uuucauguucaggcguggg

SEQ ID NO: 1144909 - RNA, 19 nt, Artificial Sequence
  Description of Artificial Sequence: Synthetic oligonucleotide
guuguaugagcucaacuua

SEQ ID NO: 1144910 - RNA, 19 nt, Artificial Sequence
  Description of Artificial Sequence: Synthetic oligonucleotide
agacccuacuguaaaauca

SEQ ID NO: 1144911 - RNA, 19 nt, Artificial Sequence
  Description of Artificial Sequence: Synthetic oligonucleotide
aucccuauuaacugguaua

SEQ ID NO: 1144912 - RNA, 19 nt, Artificial Sequence
  Description of Artificial Sequence: Synthetic oligonucleotide
ucuuuauauaaggcuuuac

SEQ ID NO: 1144913 - RNA, 19 nt, Artificial Sequence
  Description of Artificial Sequence: Synthetic oligonucleotide
uuaaaguggaaggccacau

SEQ ID NO: 1144914 - RNA, 19 nt, Artificial Sequence
  Description of Artificial Sequence: Synthetic oligonucleotide
gauugucgggcuauagaug

SEQ ID NO: 1144915 - RNA, 19 nt, Artificial Sequence
  Description of Artificial Sequence: Synthetic oligonucleotide
ucaaguguagagcgauauc

SEQ ID NO: 1144916 - RNA, 19 nt, Artificial Sequence
  Description of Artificial Sequence: Synthetic oligonucleotide
ccuugccagacuuauauac

SEQ ID NO: 1144917 - RNA, 19 nt, Artificial Sequence
  Description of Artificial Sequence: Synthetic oligonucleotide
ucccuauuaacugguauau

SEQ ID NO: 1144918 - RNA, 19 nt, Artificial Sequence
  Description of Artificial Sequence: Synthetic oligonucleotide
aagccguuuuguauuuuag

SEQ ID NO: 1144919 - RNA, 19 nt, Artificial Sequence
  Description of Artificial Sequence: Synthetic oligonucleotide
agaauaccagauaaaacuu

SEQ ID NO: 1144920 - RNA, 19 nt, Artificial Sequence
  Description of Artificial Sequence: Synthetic oligonucleotide
uaagccguuuuguauuuua

SEQ ID NO: 1144921 - RNA, 19 nt, Artificial Sequence
  Description of Artificial Sequence: Synthetic oligonucleotide
uauuguugauuggagucuc

SEQ ID NO: 1144922 - RNA, 19 nt, Artificial Sequence
  Description of Artificial Sequence: Synthetic oligonucleotide
gaaaaggauuacuggggaa

SEQ ID NO: 1144923 - RNA, 19 nt, Artificial Sequence
  Description of Artificial Sequence: Synthetic oligonucleotide
gguagauguuuccauacuc

SEQ ID NO: 1144924 - RNA, 19 nt, Artificial Sequence
  Description of Artificial Sequence: Synthetic oligonucleotide
acgacuaaauaaguguuau

SEQ ID NO: 1144925 - RNA, 19 nt, Artificial Sequence
  Description of Artificial Sequence: Synthetic oligonucleotide
uugucagcguguugcaaac

SEQ ID NO: 1144926 - RNA, 19 nt, Artificial Sequence
  Description of Artificial Sequence: Synthetic oligonucleotide
caauggaguggacauucac

SEQ ID NO: 1144927 - RNA, 19 nt, Artificial Sequence
  Description of Artificial Sequence: Synthetic oligonucleotide
uccagcaaacggauaucac

SEQ ID NO: 1144928 - RNA, 19 nt, Artificial Sequence
  Description of Artificial Sequence: Synthetic oligonucleotide
guaaauccgagcugaagcu

SEQ ID NO: 1144929 - RNA, 19 nt, Artificial Sequence
  Description of Artificial Sequence: Synthetic oligonucleotide
ccacggacuacaaucaaag

SEQ ID NO: 1144930 - RNA, 19 nt, Artificial Sequence
  Description of Artificial Sequence: Synthetic oligonucleotide
uggcauuuguauucacuuc

SEQ ID NO: 1144931 - RNA, 19 nt, Artificial Sequence
  Description of Artificial Sequence: Synthetic oligonucleotide
ucggcuucaggcuguugcc

SEQ ID NO: 1144932 - RNA, 19 nt, Artificial Sequence
  Description of Artificial Sequence: Synthetic oligonucleotide
cauagagguacugcauggc

SEQ ID NO: 1144933 - RNA, 19 nt, Artificial Sequence
  Description of Artificial Sequence: Synthetic oligonucleotide
uguauucacuucuccuuua

SEQ ID NO: 1144934 - RNA, 19 nt, Artificial Sequence
  Description of Artificial Sequence: Synthetic oligonucleotide
gggguuaaugcaaugucag

SEQ ID NO: 1144935 - RNA, 19 nt, Artificial Sequence
  Description of Artificial Sequence: Synthetic oligonucleotide
uuuccguucacagccacuu

SEQ ID NO: 1144936 - RNA, 19 nt, Artificial Sequence
  Description of Artificial Sequence: Synthetic oligonucleotide
uuacuggggaaguaauguu

SEQ ID NO: 1144937 - RNA, 19 nt, Artificial Sequence
  Description of Artificial Sequence: Synthetic oligonucleotide
ccccuaaugggguuaaugc

SEQ ID NO: 1144938 - RNA, 19 nt, Artificial Sequence
  Description of Artificial Sequence: Synthetic oligonucleotide
gaucacgaucucaaaggac

SEQ ID NO: 1144939 - RNA, 19 nt, Artificial Sequence
  Description of Artificial Sequence: Synthetic oligonucleotide
guauauuagaauaggcacu

SEQ ID NO: 1144940 - RNA, 19 nt, Artificial Sequence
  Description of Artificial Sequence: Synthetic oligonucleotide
caaucaugguagcuaccag

SEQ ID NO: 1144941 - RNA, 19 nt, Artificial Sequence
  Description of Artificial Sequence: Synthetic oligonucleotide
ggacuacaaucaaagagcc

SEQ ID NO: 1144942 - RNA, 19 nt, Artificial Sequence
  Description of Artificial Sequence: Synthetic oligonucleotide
cagagugugcuuuccguuc

SEQ ID NO: 1144943 - RNA, 19 nt, Artificial Sequence
  Description of Artificial Sequence: Synthetic oligonucleotide
ugugccuugccagacuuau

SEQ ID NO: 1144944 - RNA, 19 nt, Artificial Sequence
  Description of Artificial Sequence: Synthetic oligonucleotide
ucuguaaauccgagcugaa

SEQ ID NO: 1144945 - RNA, 19 nt, Artificial Sequence
  Description of Artificial Sequence: Synthetic oligonucleotide
cagcagaaagacccuacug

SEQ ID NO: 1144946 - RNA, 19 nt, Artificial Sequence
  Description of Artificial Sequence: Synthetic oligonucleotide
gaaagacccuacuguaaaa

SEQ ID NO: 1144947 - RNA, 19 nt, Artificial Sequence
  Description of Artificial Sequence: Synthetic oligonucleotide
gauguuguaugagcucaac

SEQ ID NO: 1144948 - RNA, 19 nt, Artificial Sequence
  Description of Artificial Sequence: Synthetic oligonucleotide
ucagcguguugcaaacaau

SEQ ID NO: 1144949 - RNA, 19 nt, Artificial Sequence
  Description of Artificial Sequence: Synthetic oligonucleotide
uauguccacggacuacaau

SEQ ID NO: 1144950 - RNA, 19 nt, Artificial Sequence
  Description of Artificial Sequence: Synthetic oligonucleotide
gugucaauacugcuuagcu

SEQ ID NO: 1144951 - RNA, 19 nt, Artificial Sequence
  Description of Artificial Sequence: Synthetic oligonucleotide
ugacaacaguucguccagg

SEQ ID NO: 1144952 - RNA, 19 nt, Artificial Sequence
  Description of Artificial Sequence: Synthetic oligonucleotide
aggauuacuggggaaguaa

SEQ ID NO: 1144953 - RNA, 19 nt, Artificial Sequence
  Description of Artificial Sequence: Synthetic oligonucleotide
ccgacauaggggauugucg

SEQ ID NO: 1144954 - RNA, 19 nt, Artificial Sequence
  Description of Artificial Sequence: Synthetic oligonucleotide
guguagagcgauaucccug

SEQ ID NO: 1144955 - RNA, 19 nt, Artificial Sequence
  Description of Artificial Sequence: Synthetic oligonucleotide
cagauaaugugucaauacu

SEQ ID NO: 1144956 - RNA, 19 nt, Artificial Sequence
  Description of Artificial Sequence: Synthetic oligonucleotide
gcaaccuugaauucucgga

SEQ ID NO: 1144957 - RNA, 19 nt, Artificial Sequence
  Description of Artificial Sequence: Synthetic oligonucleotide
caaaugugccuugccagac

SEQ ID NO: 1144958 - RNA, 19 nt, Artificial Sequence
  Description of Artificial Sequence: Synthetic oligonucleotide
uuugccguagaugcccagu

SEQ ID NO: 1144959 - RNA, 19 nt, Artificial Sequence
  Description of Artificial Sequence: Synthetic oligonucleotide
ccugagugccagaaaacag

SEQ ID NO: 1144960 - RNA, 19 nt, Artificial Sequence
  Description of Artificial Sequence: Synthetic oligonucleotide
gccacuuggaauuuguucu

SEQ ID NO: 1144961 - RNA, 19 nt, Artificial Sequence
  Description of Artificial Sequence: Synthetic oligonucleotide
uggaaucuguccacaucau

SEQ ID NO: 1144962 - RNA, 19 nt, Artificial Sequence
  Description of Artificial Sequence: Synthetic oligonucleotide
ccuucuaucccuauuaacu

SEQ ID NO: 1144963 - RNA, 19 nt, Artificial Sequence
  Description of Artificial Sequence: Synthetic oligonucleotide
ccagaacuaaaugggaagc

SEQ ID NO: 1144964 - RNA, 19 nt, Artificial Sequence
  Description of Artificial Sequence: Synthetic oligonucleotide
gucagcguguugcaaacaa

SEQ ID NO: 1144965 - RNA, 19 nt, Artificial Sequence
  Description of Artificial Sequence: Synthetic oligonucleotide
cuacuguaaaaucauggau

SEQ ID NO: 1144966 - RNA, 19 nt, Artificial Sequence
  Description of Artificial Sequence: Synthetic oligonucleotide
uucaggcguggguucaagu

SEQ ID NO: 1144967 - RNA, 19 nt, Artificial Sequence
  Description of Artificial Sequence: Synthetic oligonucleotide
auuucucauuugucagcgu

SEQ ID NO: 1144968 - RNA, 19 nt, Artificial Sequence
  Description of Artificial Sequence: Synthetic oligonucleotide
augcacagcucagagaaua

SEQ ID NO: 1144969 - RNA, 19 nt, Artificial Sequence
  Description of Artificial Sequence: Synthetic oligonucleotide
ucucauuugucagcguguu

SEQ ID NO: 1144970 - RNA, 19 nt, Artificial Sequence
  Description of Artificial Sequence: Synthetic oligonucleotide
ucaauacugcuuagcucuu

SEQ ID NO: 1144971 - RNA, 19 nt, Artificial Sequence
  Description of Artificial Sequence: Synthetic oligonucleotide
cugaauccaauggagugga

SEQ ID NO: 1144972 - RNA, 19 nt, Artificial Sequence
  Description of Artificial Sequence: Synthetic oligonucleotide
ggguuaaugcaaugucagc

SEQ ID NO: 1144973 - RNA, 19 nt, Artificial Sequence
  Description of Artificial Sequence: Synthetic oligonucleotide
agcaaacggauaucaccau

SEQ ID NO: 1144974 - RNA, 19 nt, Artificial Sequence
  Description of Artificial Sequence: Synthetic oligonucleotide
ugaauccaauggaguggac

SEQ ID NO: 1144975 - RNA, 19 nt, Artificial Sequence
  Description of Artificial Sequence: Synthetic oligonucleotide
gccugagaauaccagauaa

SEQ ID NO: 1144976 - RNA, 19 nt, Artificial Sequence
  Description of Artificial Sequence: Synthetic oligonucleotide
aguaucacauaagccguuu

SEQ ID NO: 1144977 - RNA, 19 nt, Artificial Sequence
  Description of Artificial Sequence: Synthetic oligonucleotide
aaggauuacuggggaagua

SEQ ID NO: 1144978 - RNA, 19 nt, Artificial Sequence
  Description of Artificial Sequence: Synthetic oligonucleotide
ugucgggcuauagaugaua

SEQ ID NO: 1144979 - RNA, 19 nt, Artificial Sequence
  Description of Artificial Sequence: Synthetic oligonucleotide
ccuaaugggguuaaugcaa

SEQ ID NO: 1144980 - RNA, 19 nt, Artificial Sequence
  Description of Artificial Sequence: Synthetic oligonucleotide
cucauuugucagcguguug

SEQ ID NO: 1144981 - RNA, 19 nt, Artificial Sequence
  Description of Artificial Sequence: Synthetic oligonucleotide
uagaugcccagugugucua

SEQ ID NO: 1144982 - RNA, 19 nt, Artificial Sequence
  Description of Artificial Sequence: Synthetic oligonucleotide
acgaucucaaaggacuuuu

SEQ ID NO: 1144983 - RNA, 19 nt, Artificial Sequence
  Description of Artificial Sequence: Synthetic oligonucleotide
agcuaccagcuccuuacau

SEQ ID NO: 1144984 - RNA, 19 nt, Artificial Sequence
  Description of Artificial Sequence: Synthetic oligonucleotide
acuaaaugggaagcaggua

SEQ ID NO: 1144985 - RNA, 19 nt, Artificial Sequence
  Description of Artificial Sequence: Synthetic oligonucleotide
ggauugucgggcuauagau

SEQ ID NO: 1144986 - RNA, 19 nt, Artificial Sequence
  Description of Artificial Sequence: Synthetic oligonucleotide
cauuugucagcguguugca

SEQ ID NO: 1144987 - RNA, 19 nt, Artificial Sequence
  Description of Artificial Sequence: Synthetic oligonucleotide
gucaacguugaagccuuug

SEQ ID NO: 1144988 - RNA, 19 nt, Artificial Sequence
  Description of Artificial Sequence: Synthetic oligonucleotide
cacauaagccguuuuguau

SEQ ID NO: 1144989 - RNA, 19 nt, Artificial Sequence
  Description of Artificial Sequence: Synthetic oligonucleotide
gcguguugcaaacaaugca

SEQ ID NO: 1144990 - RNA, 19 nt, Artificial Sequence
  Description of Artificial Sequence: Synthetic oligonucleotide
guuuaaccuugcuucaaau

SEQ ID NO: 1144991 - RNA, 19 nt, Artificial Sequence
  Description of Artificial Sequence: Synthetic oligonucleotide
uuagcaccaugaucacgau

SEQ ID NO: 1144992 - RNA, 19 nt, Artificial Sequence
  Description of Artificial Sequence: Synthetic oligonucleotide
auaggcacuuuaaccauuu

SEQ ID NO: 1144993 - RNA, 19 nt, Artificial Sequence
  Description of Artificial Sequence: Synthetic oligonucleotide
gaggcguuuaaccuugcuu

SEQ ID NO: 1144994 - RNA, 19 nt, Artificial Sequence
  Description of Artificial Sequence: Synthetic oligonucleotide
uacccacguuucauuuaga

SEQ ID NO: 1144995 - RNA, 19 nt, Artificial Sequence
  Description of Artificial Sequence: Synthetic oligonucleotide
cugguucugggcaccucug

SEQ ID NO: 1144996 - RNA, 19 nt, Artificial Sequence
  Description of Artificial Sequence: Synthetic oligonucleotide
cuuugccguagaugcccag

SEQ ID NO: 1144997 - RNA, 19 nt, Artificial Sequence
  Description of Artificial Sequence: Synthetic oligonucleotide
ugcauuugacauggccagu

SEQ ID NO: 1144998 - RNA, 19 nt, Artificial Sequence
  Description of Artificial Sequence: Synthetic oligonucleotide
ggaccuuuugaagcgagga

SEQ ID NO: 1144999 - RNA, 19 nt, Artificial Sequence
  Description of Artificial Sequence: Synthetic oligonucleotide
gggauugucgggcuauaga

SEQ ID NO: 1145000 - RNA, 19 nt, Artificial Sequence
  Description of Artificial Sequence: Synthetic oligonucleotide
uaggggauugucgggcuau

SEQ ID NO: 1145001 - RNA, 19 nt, Artificial Sequence
  Description of Artificial Sequence: Synthetic oligonucleotide
aguucguccagggcccaug

SEQ ID NO: 1145002 - RNA, 19 nt, Artificial Sequence
  Description of Artificial Sequence: Synthetic oligonucleotide
uguugccaugcugcaaguc

SEQ ID NO: 1145003 - RNA, 19 nt, Artificial Sequence
  Description of Artificial Sequence: Synthetic oligonucleotide
cacggacuacaaucaaaga

SEQ ID NO: 1145004 - RNA, 19 nt, Artificial Sequence
  Description of Artificial Sequence: Synthetic oligonucleotide
ugucagcguguugcaaaca

SEQ ID NO: 1145005 - RNA, 19 nt, Artificial Sequence
  Description of Artificial Sequence: Synthetic oligonucleotide
gaacauagagguacugcau

SEQ ID NO: 1145006 - RNA, 19 nt, Artificial Sequence
  Description of Artificial Sequence: Synthetic oligonucleotide
guacuccaggcuaugcaca

SEQ ID NO: 1145007 - RNA, 19 nt, Artificial Sequence
  Description of Artificial Sequence: Synthetic oligonucleotide
cuaaugggguuaaugcaau

SEQ ID NO: 1145008 - RNA, 19 nt, Artificial Sequence
  Description of Artificial Sequence: Synthetic oligonucleotide
ggaauauguccacggacua

SEQ ID NO: 1145009 - RNA, 19 nt, Artificial Sequence
  Description of Artificial Sequence: Synthetic oligonucleotide
gaccuuuugaagcgaggau

SEQ ID NO: 1145010 - RNA, 19 nt, Artificial Sequence
  Description of Artificial Sequence: Synthetic oligonucleotide
ucgggcuauagaugauauu

SEQ ID NO: 1145011 - RNA, 19 nt, Artificial Sequence
  Description of Artificial Sequence: Synthetic oligonucleotide
aauccgagcugaagcugaa

SEQ ID NO: 1145012 - RNA, 19 nt, Artificial Sequence
  Description of Artificial Sequence: Synthetic oligonucleotide
caauguggugaaagccaga

SEQ ID NO: 1145013 - RNA, 19 nt, Artificial Sequence
  Description of Artificial Sequence: Synthetic oligonucleotide
auaggggauugucgggcua

SEQ ID NO: 1145014 - RNA, 19 nt, Artificial Sequence
  Description of Artificial Sequence: Synthetic oligonucleotide
gugccgacauaggggauug

SEQ ID NO: 1145015 - RNA, 19 nt, Artificial Sequence
  Description of Artificial Sequence: Synthetic oligonucleotide
cccuaaugggguuaaugca

SEQ ID NO: 1145016 - RNA, 19 nt, Artificial Sequence
  Description of Artificial Sequence: Synthetic oligonucleotide
auaaggcuuuacccacguu

SEQ ID NO: 1145017 - RNA, 19 nt, Artificial Sequence
  Description of Artificial Sequence: Synthetic oligonucleotide
guuggaccuuuugaagcga

SEQ ID NO: 1145018 - RNA, 19 nt, Artificial Sequence
  Description of Artificial Sequence: Synthetic oligonucleotide
cagaugcauuugacauggc

SEQ ID NO: 1145019 - RNA, 19 nt, Artificial Sequence
  Description of Artificial Sequence: Synthetic oligonucleotide
ugccccagauuuguuccuc

SEQ ID NO: 1145020 - RNA, 19 nt, Artificial Sequence
  Description of Artificial Sequence: Synthetic oligonucleotide
cauuuacugcaaccuugaa

SEQ ID NO: 1145021 - RNA, 19 nt, Artificial Sequence
  Description of Artificial Sequence: Synthetic oligonucleotide
uguucaggcguggguucaa

SEQ ID NO: 1145022 - RNA, 19 nt, Artificial Sequence
  Description of Artificial Sequence: Synthetic oligonucleotide
guacugcauggccaggccu

SEQ ID NO: 1145023 - RNA, 19 nt, Artificial Sequence
  Description of Artificial Sequence: Synthetic oligonucleotide
caccaucaacagauaaugu

SEQ ID NO: 1145024 - RNA, 19 nt, Artificial Sequence
  Description of Artificial Sequence: Synthetic oligonucleotide
ccaguaucacauaagccgu

SEQ ID NO: 1145025 - RNA, 19 nt, Artificial Sequence
  Description of Artificial Sequence: Synthetic oligonucleotide
caaguccaccuggaaucug

SEQ ID NO: 1145026 - RNA, 19 nt, Artificial Sequence
  Description of Artificial Sequence: Synthetic oligonucleotide
cuaucccuauuaacuggua

SEQ ID NO: 1145027 - RNA, 19 nt, Artificial Sequence
  Description of Artificial Sequence: Synthetic oligonucleotide
guagagcgauaucccugga

SEQ ID NO: 1145028 - RNA, 19 nt, Artificial Sequence
  Description of Artificial Sequence: Synthetic oligonucleotide
gcuuuccguucacagccac

SEQ ID NO: 1145029 - RNA, 19 nt, Artificial Sequence
  Description of Artificial Sequence: Synthetic oligonucleotide
gguucaaguguagagcgau

SEQ ID NO: 1145030 - RNA, 19 nt, Artificial Sequence
  Description of Artificial Sequence: Synthetic oligonucleotide
cauaggggauugucgggcu

SEQ ID NO: 1145031 - RNA, 19 nt, Artificial Sequence
  Description of Artificial Sequence: Synthetic oligonucleotide
ugucaggcccaggguagau

SEQ ID NO: 1145032 - RNA, 19 nt, Artificial Sequence
  Description of Artificial Sequence: Synthetic oligonucleotide
cguuuuguauuuuaggguu

SEQ ID NO: 1145033 - RNA, 19 nt, Artificial Sequence
  Description of Artificial Sequence: Synthetic oligonucleotide
ggggauugucgggcuauag

SEQ ID NO: 1145034 - RNA, 19 nt, Artificial Sequence
  Description of Artificial Sequence: Synthetic oligonucleotide
uggugccgacauaggggau

SEQ ID NO: 1145035 - RNA, 19 nt, Artificial Sequence
  Description of Artificial Sequence: Synthetic oligonucleotide
gcauuugacauggccagua

SEQ ID NO: 1145036 - RNA, 19 nt, Artificial Sequence
  Description of Artificial Sequence: Synthetic oligonucleotide
cuuuccguucacagccacu

SEQ ID NO: 1145037 - RNA, 19 nt, Artificial Sequence
  Description of Artificial Sequence: Synthetic oligonucleotide
gguuguuuaaggacagcau

SEQ ID NO: 1145038 - RNA, 19 nt, Artificial Sequence
  Description of Artificial Sequence: Synthetic oligonucleotide
aggcguggguucaagugua

SEQ ID NO: 1145039 - RNA, 19 nt, Artificial Sequence
  Description of Artificial Sequence: Synthetic oligonucleotide
guucaaguguagagcgaua

SEQ ID NO: 1145040 - RNA, 19 nt, Artificial Sequence
  Description of Artificial Sequence: Synthetic oligonucleotide
gucgggcuauagaugauau

SEQ ID NO: 1145041 - RNA, 19 nt, Artificial Sequence
  Description of Artificial Sequence: Synthetic oligonucleotide
cguagaugcccaguguguc

SEQ ID NO: 1145042 - RNA, 19 nt, Artificial Sequence
  Description of Artificial Sequence: Synthetic oligonucleotide
ggauuacuggggaaguaau

SEQ ID NO: 1145043 - RNA, 19 nt, Artificial Sequence
  Description of Artificial Sequence: Synthetic oligonucleotide
cgagcugaagcugaaucca

SEQ ID NO: 1145044 - RNA, 19 nt, Artificial Sequence
  Description of Artificial Sequence: Synthetic oligonucleotide
gcuuuacccacguuucauu

SEQ ID NO: 1145045 - RNA, 19 nt, Artificial Sequence
  Description of Artificial Sequence: Synthetic oligonucleotide
ggcguggguucaaguguag

SEQ ID NO: 1145046 - RNA, 19 nt, Artificial Sequence
  Description of Artificial Sequence: Synthetic oligonucleotide
cguuuaaccuugcuucaaa

SEQ ID NO: 1145047 - RNA, 19 nt, Artificial Sequence
  Description of Artificial Sequence: Synthetic oligonucleotide
cagcccucggcuucaggcu

SEQ ID NO: 1145048 - RNA, 19 nt, Artificial Sequence
  Description of Artificial Sequence: Synthetic oligonucleotide
caguaucacauaagccguu

SEQ ID NO: 1145049 - RNA, 19 nt, Artificial Sequence
  Description of Artificial Sequence: Synthetic oligonucleotide
gcagagugugcuuuccguu

SEQ ID NO: 1145050 - RNA, 19 nt, Artificial Sequence
  Description of Artificial Sequence: Synthetic oligonucleotide
caucagcccucggcuucag

SEQ ID NO: 1145051 - RNA, 19 nt, Artificial Sequence
  Description of Artificial Sequence: Synthetic oligonucleotide
ugccgacauaggggauugu

SEQ ID NO: 1145052 - RNA, 19 nt, Artificial Sequence
  Description of Artificial Sequence: Synthetic oligonucleotide
cgggcuauagaugauauuu

SEQ ID NO: 1145053 - RNA, 19 nt, Artificial Sequence
  Description of Artificial Sequence: Synthetic oligonucleotide
ggcccaggguagauguuuc

SEQ ID NO: 1145054 - RNA, 19 nt, Artificial Sequence
  Description of Artificial Sequence: Synthetic oligonucleotide
ugguagcuaccagcuccuu

SEQ ID NO: 1145055 - RNA, 19 nt, Artificial Sequence
  Description of Artificial Sequence: Synthetic oligonucleotide
gcguuuaaccuugcuucaa

SEQ ID NO: 1145056 - RNA, 19 nt, Artificial Sequence
  Description of Artificial Sequence: Synthetic oligonucleotide
aggggauugucgggcuaua

SEQ ID NO: 1145057 - RNA, 19 nt, Artificial Sequence
  Description of Artificial Sequence: Synthetic oligonucleotide
ggaggcguuuaaccuugcu

SEQ ID NO: 1145058 - RNA, 19 nt, Artificial Sequence
  Description of Artificial Sequence: Synthetic oligonucleotide
gcguggguucaaguguaga

SEQ ID NO: 1145059 - RNA, 19 nt, Artificial Sequence
  Description of Artificial Sequence: Synthetic oligonucleotide
ggcccauggaggcguuuaa

SEQ ID NO: 1145060 - RNA, 19 nt, Artificial Sequence
  Description of Artificial Sequence: Synthetic oligonucleotide
cgacuaaauaaguguuaua

SEQ ID NO: 1145061 - RNA, 19 nt, Artificial Sequence
  Description of Artificial Sequence: Synthetic oligonucleotide
ggugccgacauaggggauu

SEQ ID NO: 1145062 - RNA, 19 nt, Artificial Sequence
  Description of Artificial Sequence: Synthetic oligonucleotide
gggcccauggaggcguuua

SEQ ID NO: 1145063 - RNA, 19 nt, Artificial Sequence
  Description of Artificial Sequence: Synthetic oligonucleotide
agggcccauggaggcguuu

SEQ ID NO: 1145064 - RNA, 19 nt, Artificial Sequence
  Description of Artificial Sequence: Synthetic oligonucleotide
ggauugccccagauuuguu

SEQ ID NO: 1145065 - RNA, 19 nt, Artificial Sequence
  Description of Artificial Sequence: Synthetic oligonucleotide
cccuauuaacugguauauu

SEQ ID NO: 1145066 - RNA, 19 nt, Artificial Sequence
  Description of Artificial Sequence: Synthetic oligonucleotide
uuuacuucgaggcuaaagg

SEQ ID NO: 1145067 - RNA, 19 nt, Artificial Sequence
  Description of Artificial Sequence: Synthetic oligonucleotide
aaauauguagcauggagcu

SEQ ID NO: 1145068 - RNA, 19 nt, Artificial Sequence
  Description of Artificial Sequence: Synthetic oligonucleotide
gaaguuaguguuuacuucg

SEQ ID NO: 1145069 - RNA, 19 nt, Artificial Sequence
  Description of Artificial Sequence: Synthetic oligonucleotide
uuaguguuuacuucgaggc

SEQ ID NO: 1145070 - RNA, 19 nt, Artificial Sequence
  Description of Artificial Sequence: Synthetic oligonucleotide
uuuauuagaaguuaguguu

SEQ ID NO: 1145071 - RNA, 19 nt, Artificial Sequence
  Description of Artificial Sequence: Synthetic oligonucleotide
ugugauuaacaccaaauga

SEQ ID NO: 1145072 - RNA, 19 nt, Artificial Sequence
  Description of Artificial Sequence: Synthetic oligonucleotide
uucaaaaggcuuaaguugc

SEQ ID NO: 1145073 - RNA, 19 nt, Artificial Sequence
  Description of Artificial Sequence: Synthetic oligonucleotide
accacuauaugcuagagca

SEQ ID NO: 1145074 - RNA, 19 nt, Artificial Sequence
  Description of Artificial Sequence: Synthetic oligonucleotide
auuacuaagucacguuucc

SEQ ID NO: 1145075 - RNA, 19 nt, Artificial Sequence
  Description of Artificial Sequence: Synthetic oligonucleotide
  modified_base (7)..(7): a, c, u, g, unknown or other
agugcunuagcgcuugacg

SEQ ID NO: 1145076 - RNA, 19 nt, Artificial Sequence
  Description of Artificial Sequence: Synthetic oligonucleotide
  modified_base (14)..(14): a, c, u, g, unknown or other
caucguaagugcunuagcg

SEQ ID NO: 1145077 - RNA, 19 nt, Artificial Sequence
  Description of Artificial Sequence: Synthetic oligonucleotide
uaaagccuaaauuugguca

SEQ ID NO: 1145078 - RNA, 19 nt, Artificial Sequence
  Description of Artificial Sequence: Synthetic oligonucleotide
ugagacgugagcuaugugc

SEQ ID NO: 1145079 - RNA, 19 nt, Artificial Sequence
  Description of Artificial Sequence: Synthetic oligonucleotide
aauagaggccuuucaaaag

SEQ ID NO: 1145080 - RNA, 19 nt, Artificial Sequence
  Description of Artificial Sequence: Synthetic oligonucleotide
guuacuauguauuuggaga

SEQ ID NO: 1145081 - RNA, 19 nt, Artificial Sequence
  Description of Artificial Sequence: Synthetic oligonucleotide
auagaggccuuucaaaagg

SEQ ID NO: 1145082 - RNA, 19 nt, Artificial Sequence
  Description of Artificial Sequence: Synthetic oligonucleotide
ucauuagucucgaugagca

SEQ ID NO: 1145083 - RNA, 19 nt, Artificial Sequence
  Description of Artificial Sequence: Synthetic oligonucleotide
agaaguuaguguuuacuuc

SEQ ID NO: 1145084 - RNA, 19 nt, Artificial Sequence
  Description of Artificial Sequence: Synthetic oligonucleotide
agaaaauagaccaguggcc

SEQ ID NO: 1145085 - RNA, 19 nt, Artificial Sequence
  Description of Artificial Sequence: Synthetic oligonucleotide
auauauucgggccucuggg

SEQ ID NO: 1145086 - RNA, 19 nt, Artificial Sequence
  Description of Artificial Sequence: Synthetic oligonucleotide
guuaguguuuacuucgagg

SEQ ID NO: 1145087 - RNA, 19 nt, Artificial Sequence
  Description of Artificial Sequence: Synthetic oligonucleotide
uuacuucgaggcuaaaggg

SEQ ID NO: 1145088 - RNA, 19 nt, Artificial Sequence
  Description of Artificial Sequence: Synthetic oligonucleotide
auaccuaugcuuaaacacc

SEQ ID NO: 1145089 - RNA, 19 nt, Artificial Sequence
  Description of Artificial Sequence: Synthetic oligonucleotide
aaugauuacuaagucacgu

SEQ ID NO: 1145090 - RNA, 19 nt, Artificial Sequence
  Description of Artificial Sequence: Synthetic oligonucleotide
agaacuguucccaugggcc

SEQ ID NO: 1145091 - RNA, 19 nt, Artificial Sequence
  Description of Artificial Sequence: Synthetic oligonucleotide
cuaaacagaaccacuugcc

SEQ ID NO: 1145092 - RNA, 19 nt, Artificial Sequence
  Description of Artificial Sequence: Synthetic oligonucleotide
aacuaguagcugcugauca

SEQ ID NO: 1145093 - RNA, 19 nt, Artificial Sequence
  Description of Artificial Sequence: Synthetic oligonucleotide
aaaauagaccaguggccuc

SEQ ID NO: 1145094 - RNA, 19 nt, Artificial Sequence
  Description of Artificial Sequence: Synthetic oligonucleotide
uguagcauggagcugggac

SEQ ID NO: 1145095 - RNA, 19 nt, Artificial Sequence
  Description of Artificial Sequence: Synthetic oligonucleotide
uauaacuuguuuuccugcc

SEQ ID NO: 1145096 - RNA, 19 nt, Artificial Sequence
  Description of Artificial Sequence: Synthetic oligonucleotide
gaggcuaaaggggauaugg

SEQ ID NO: 1145097 - RNA, 19 nt, Artificial Sequence
  Description of Artificial Sequence: Synthetic oligonucleotide
uggaagaacuaguagcugc

SEQ ID NO: 1145098 - RNA, 19 nt, Artificial Sequence
  Description of Artificial Sequence: Synthetic oligonucleotide
gaagucagugcacucaccc

SEQ ID NO: 1145099 - RNA, 19 nt, Artificial Sequence
  Description of Artificial Sequence: Synthetic oligonucleotide
aaaaggcuuaaguugcccu

SEQ ID NO: 1145100 - RNA, 19 nt, Artificial Sequence
  Description of Artificial Sequence: Synthetic oligonucleotide
uaugagaguggucaaggga

SEQ ID NO: 1145101 - RNA, 19 nt, Artificial Sequence
  Description of Artificial Sequence: Synthetic oligonucleotide
aggaauaauucacauccag

SEQ ID NO: 1145102 - RNA, 19 nt, Artificial Sequence
  Description of Artificial Sequence: Synthetic oligonucleotide
acaccaaaugauuacuaag

SEQ ID NO: 1145103 - RNA, 19 nt, Artificial Sequence
  Description of Artificial Sequence: Synthetic oligonucleotide
acuaaagggcuucuugggg

SEQ ID NO: 1145104 - RNA, 19 nt, Artificial Sequence
  Description of Artificial Sequence: Synthetic oligonucleotide
ugggauuauaggcaaggcc

SEQ ID NO: 1145105 - RNA, 19 nt, Artificial Sequence
  Description of Artificial Sequence: Synthetic oligonucleotide
aaugcggcggacacggucc

SEQ ID NO: 1145106 - RNA, 19 nt, Artificial Sequence
  Description of Artificial Sequence: Synthetic oligonucleotide
aaagccuaaauuuggucaa

SEQ ID NO: 1145107 - RNA, 19 nt, Artificial Sequence
  Description of Artificial Sequence: Synthetic oligonucleotide
uagucuauaacuuguuuuc

SEQ ID NO: 1145108 - RNA, 19 nt, Artificial Sequence
  Description of Artificial Sequence: Synthetic oligonucleotide
ugaccugagcaucucagag

SEQ ID NO: 1145109 - RNA, 19 nt, Artificial Sequence
  Description of Artificial Sequence: Synthetic oligonucleotide
ugccuauaggcucugagac

SEQ ID NO: 1145110 - RNA, 19 nt, Artificial Sequence
  Description of Artificial Sequence: Synthetic oligonucleotide
gauauggaggucaaggaac

SEQ ID NO: 1145111 - RNA, 19 nt, Artificial Sequence
  Description of Artificial Sequence: Synthetic oligonucleotide
ggucucauagaguaggacg

SEQ ID NO: 1145112 - RNA, 19 nt, Artificial Sequence
  Description of Artificial Sequence: Synthetic oligonucleotide
uuuggcaguuaugagagug

SEQ ID NO: 1145113 - RNA, 19 nt, Artificial Sequence
  Description of Artificial Sequence: Synthetic oligonucleotide
ugcacucacccuaaaguag

SEQ ID NO: 1145114 - RNA, 19 nt, Artificial Sequence
  Description of Artificial Sequence: Synthetic oligonucleotide
aauuggauccuugcagcac

SEQ ID NO: 1145115 - RNA, 19 nt, Artificial Sequence
  Description of Artificial Sequence: Synthetic oligonucleotide
cucacccuaaaguagcucc

SEQ ID NO: 1145116 - RNA, 19 nt, Artificial Sequence
  Description of Artificial Sequence: Synthetic oligonucleotide
aguggccucauacaacaac

SEQ ID NO: 1145117 - RNA, 19 nt, Artificial Sequence
  Description of Artificial Sequence: Synthetic oligonucleotide
uuaugagaguggucaaggg

SEQ ID NO: 1145118 - RNA, 19 nt, Artificial Sequence
  Description of Artificial Sequence: Synthetic oligonucleotide
auaauucacauccagucua

SEQ ID NO: 1145119 - RNA, 19 nt, Artificial Sequence
  Description of Artificial Sequence: Synthetic oligonucleotide
guuaugagaguggucaagg

SEQ ID NO: 1145120 - RNA, 19 nt, Artificial Sequence
  Description of Artificial Sequence: Synthetic oligonucleotide
ugauuaacaccaaaugauu

SEQ ID NO: 1145121 - RNA, 19 nt, Artificial Sequence
  Description of Artificial Sequence: Synthetic oligonucleotide
  modified_base (13)..(13): a, c, u, g, unknown or other
aucguaagugcunuagcgc

SEQ ID NO: 1145122 - RNA, 19 nt, Artificial Sequence
  Description of Artificial Sequence: Synthetic oligonucleotide
agucuauaacuuguuuucc

SEQ ID NO: 1145123 - RNA, 19 nt, Artificial Sequence
  Description of Artificial Sequence: Synthetic oligonucleotide
aggucaaggaacaaacugg

SEQ ID NO: 1145124 - RNA, 19 nt, Artificial Sequence
  Description of Artificial Sequence: Synthetic oligonucleotide
cuuaaguugcccugguuac

SEQ ID NO: 1145125 - RNA, 19 nt, Artificial Sequence
  Description of Artificial Sequence: Synthetic oligonucleotide
  modified_base (12)..(12): a, c, u, g, unknown or other
ucguaagugcunuagcgcu

SEQ ID NO: 1145126 - RNA, 19 nt, Artificial Sequence
  Description of Artificial Sequence: Synthetic oligonucleotide
uuagucucgaugagcagac

SEQ ID NO: 1145127 - RNA, 19 nt, Artificial Sequence
  Description of Artificial Sequence: Synthetic oligonucleotide
ugcuagagcaggcuugugc

SEQ ID NO: 1145128 - RNA, 19 nt, Artificial Sequence
  Description of Artificial Sequence: Synthetic oligonucleotide
uggggaauguucuccacag

SEQ ID NO: 1145129 - RNA, 19 nt, Artificial Sequence
  Description of Artificial Sequence: Synthetic oligonucleotide
cauauauucgggccucugg

SEQ ID NO: 1145130 - RNA, 19 nt, Artificial Sequence
  Description of Artificial Sequence: Synthetic oligonucleotide
uccguagcugggauuauag

SEQ ID NO: 1145131 - RNA, 19 nt, Artificial Sequence
  Description of Artificial Sequence: Synthetic oligonucleotide
cauugaaucgcagggacag

SEQ ID NO: 1145132 - RNA, 19 nt, Artificial Sequence
  Description of Artificial Sequence: Synthetic oligonucleotide
aguggucaagggaugaagc

SEQ ID NO: 1145133 - RNA, 19 nt, Artificial Sequence
  Description of Artificial Sequence: Synthetic oligonucleotide
ugcucuaucaugucacugu

SEQ ID NO: 1145134 - RNA, 19 nt, Artificial Sequence
  Description of Artificial Sequence: Synthetic oligonucleotide
ucugccuauaggcucugag

SEQ ID NO: 1145135 - RNA, 19 nt, Artificial Sequence
  Description of Artificial Sequence: Synthetic oligonucleotide
  modified_base (15)..(15): a, c, u, g, unknown or other
ucaucguaagugcunuagc

SEQ ID NO: 1145136 - RNA, 19 nt, Artificial Sequence
  Description of Artificial Sequence: Synthetic oligonucleotide
gagacucgucacuaaacag

SEQ ID NO: 1145137 - RNA, 19 nt, Artificial Sequence
  Description of Artificial Sequence: Synthetic oligonucleotide
aagcuaaagccuaaauuug

SEQ ID NO: 1145138 - RNA, 19 nt, Artificial Sequence
  Description of Artificial Sequence: Synthetic oligonucleotide
uaagucacguuucccuugc

SEQ ID NO: 1145139 - RNA, 19 nt, Artificial Sequence
  Description of Artificial Sequence: Synthetic oligonucleotide
gacagcuuagucaaacagc

SEQ ID NO: 1145140 - RNA, 19 nt, Artificial Sequence
  Description of Artificial Sequence: Synthetic oligonucleotide
cuugacgugaaugcggcgg

SEQ ID NO: 1145141 - RNA, 19 nt, Artificial Sequence
  Description of Artificial Sequence: Synthetic oligonucleotide
aaggcuuaaguugcccugg

SEQ ID NO: 1145142 - RNA, 19 nt, Artificial Sequence
  Description of Artificial Sequence: Synthetic oligonucleotide
acgugagcuaugugcagcc

SEQ ID NO: 1145143 - RNA, 19 nt, Artificial Sequence
  Description of Artificial Sequence: Synthetic oligonucleotide
agcuaaagccuaaauuugg

SEQ ID NO: 1145144 - RNA, 19 nt, Artificial Sequence
  Description of Artificial Sequence: Synthetic oligonucleotide
agucucgaugagcagacug

SEQ ID NO: 1145145 - RNA, 19 nt, Artificial Sequence
  Description of Artificial Sequence: Synthetic oligonucleotide
acuauaugcuagagcaggc

SEQ ID NO: 1145146 - RNA, 19 nt, Artificial Sequence
  Description of Artificial Sequence: Synthetic oligonucleotide
ucaaagcuaaagccuaaau

SEQ ID NO: 1145147 - RNA, 19 nt, Artificial Sequence
  Description of Artificial Sequence: Synthetic oligonucleotide
uccucauauauucgggccu

SEQ ID NO: 1145148 - RNA, 19 nt, Artificial Sequence
  Description of Artificial Sequence: Synthetic oligonucleotide
  modified_base (5)..(5): a, c, u, g, unknown or other
ugcunuagcgcuugacgug

SEQ ID NO: 1145149 - RNA, 19 nt, Artificial Sequence
  Description of Artificial Sequence: Synthetic oligonucleotide
ucgucacuaaacagaacca

SEQ ID NO: 1145150 - RNA, 19 nt, Artificial Sequence
  Description of Artificial Sequence: Synthetic oligonucleotide
uauaggcaaggccaccaug

SEQ ID NO: 1145151 - RNA, 19 nt, Artificial Sequence
  Description of Artificial Sequence: Synthetic oligonucleotide
gugaaugcggcggacacgg

SEQ ID NO: 1145152 - RNA, 19 nt, Artificial Sequence
  Description of Artificial Sequence: Synthetic oligonucleotide
uauaugcuagagcaggcuu

SEQ ID NO: 1145153 - RNA, 19 nt, Artificial Sequence
  Description of Artificial Sequence: Synthetic oligonucleotide
auuagucucgaugagcaga

SEQ ID NO: 1145154 - RNA, 19 nt, Artificial Sequence
  Description of Artificial Sequence: Synthetic oligonucleotide
uuauuagaaguuaguguuu

SEQ ID NO: 1145155 - RNA, 19 nt, Artificial Sequence
  Description of Artificial Sequence: Synthetic oligonucleotide
gguuacuauguauuuggag

SEQ ID NO: 1145156 - RNA, 19 nt, Artificial Sequence
  Description of Artificial Sequence: Synthetic oligonucleotide
acggccauugaaucgcagg

SEQ ID NO: 1145157 - RNA, 19 nt, Artificial Sequence
  Description of Artificial Sequence: Synthetic oligonucleotide
uagcgcuugacgugaaugc

SEQ ID NO: 1145158 - RNA, 19 nt, Artificial Sequence
  Description of Artificial Sequence: Synthetic oligonucleotide
uauauucgggccucuggga

SEQ ID NO: 1145159 - RNA, 19 nt, Artificial Sequence
  Description of Artificial Sequence: Synthetic oligonucleotide
aguuaguguuuacuucgag

SEQ ID NO: 1145160 - RNA, 19 nt, Artificial Sequence
  Description of Artificial Sequence: Synthetic oligonucleotide
uauguagcauggagcuggg

SEQ ID NO: 1145161 - RNA, 19 nt, Artificial Sequence
  Description of Artificial Sequence: Synthetic oligonucleotide
acgugaaugcggcggacac

SEQ ID NO: 1145162 - RNA, 19 nt, Artificial Sequence
  Description of Artificial Sequence: Synthetic oligonucleotide
caagugacccaaaagaaua

SEQ ID NO: 1145163 - RNA, 19 nt, Artificial Sequence
  Description of Artificial Sequence: Synthetic oligonucleotide
aauauguagcauggagcug

SEQ ID NO: 1145164 - RNA, 19 nt, Artificial Sequence
  Description of Artificial Sequence: Synthetic oligonucleotide
ggcuaaaggggauauggag

SEQ ID NO: 1145165 - RNA, 19 nt, Artificial Sequence
  Description of Artificial Sequence: Synthetic oligonucleotide
aggggucucauagaguagg

SEQ ID NO: 1145166 - RNA, 19 nt, Artificial Sequence
  Description of Artificial Sequence: Synthetic oligonucleotide
auaacuuguuuuccugccu

SEQ ID NO: 1145167 - RNA, 19 nt, Artificial Sequence
  Description of Artificial Sequence: Synthetic oligonucleotide
guuuacuucgaggcuaaag

SEQ ID NO: 1145168 - RNA, 19 nt, Artificial Sequence
  Description of Artificial Sequence: Synthetic oligonucleotide
  modified_base (8)..(8): a, c, u, g, unknown or other
aagugcunuagcgcuugac

SEQ ID NO: 1145169 - RNA, 19 nt, Artificial Sequence
  Description of Artificial Sequence: Synthetic oligonucleotide
uaacaccaaaugauuacua

SEQ ID NO: 1145170 - RNA, 19 nt, Artificial Sequence
  Description of Artificial Sequence: Synthetic oligonucleotide
cucauuagucucgaugagc

SEQ ID NO: 1145171 - RNA, 19 nt, Artificial Sequence
  Description of Artificial Sequence: Synthetic oligonucleotide
ccagucuagaccuugguac

SEQ ID NO: 1145172 - RNA, 19 nt, Artificial Sequence
  Description of Artificial Sequence: Synthetic oligonucleotide
ugagaguggucaagggaug

SEQ ID NO: 1145173 - RNA, 19 nt, Artificial Sequence
  Description of Artificial Sequence: Synthetic oligonucleotide
uggagacucgucacuaaac

SEQ ID NO: 1145174 - RNA, 19 nt, Artificial Sequence
  Description of Artificial Sequence: Synthetic oligonucleotide
gaauccaguuaggagggcc

SEQ ID NO: 1145175 - RNA, 19 nt, Artificial Sequence
  Description of Artificial Sequence: Synthetic oligonucleotide
uccuaagggucucauuagu

SEQ ID NO: 1145176 - RNA, 19 nt, Artificial Sequence
  Description of Artificial Sequence: Synthetic oligonucleotide
gaaaauagaccaguggccu

SEQ ID NO: 1145177 - RNA, 19 nt, Artificial Sequence
  Description of Artificial Sequence: Synthetic oligonucleotide
auuauaggcaaggccacca

SEQ ID NO: 1145178 - RNA, 19 nt, Artificial Sequence
  Description of Artificial Sequence: Synthetic oligonucleotide
cuaaagggcuucuugggga

SEQ ID NO: 1145179 - RNA, 19 nt, Artificial Sequence
  Description of Artificial Sequence: Synthetic oligonucleotide
gggauuauaggcaaggcca

SEQ ID NO: 1145180 - RNA, 19 nt, Artificial Sequence
  Description of Artificial Sequence: Synthetic oligonucleotide
aguuaugagaguggucaag

SEQ ID NO: 1145181 - RNA, 19 nt, Artificial Sequence
  Description of Artificial Sequence: Synthetic oligonucleotide
ggauugucaucucacuucc

SEQ ID NO: 1145182 - RNA, 19 nt, Artificial Sequence
  Description of Artificial Sequence: Synthetic oligonucleotide
ggacagcuuagucaaacag

SEQ ID NO: 1145183 - RNA, 19 nt, Artificial Sequence
  Description of Artificial Sequence: Synthetic oligonucleotide
gucauaccuaugcuuaaac

SEQ ID NO: 1145184 - RNA, 19 nt, Artificial Sequence
  Description of Artificial Sequence: Synthetic oligonucleotide
cuaagucacguuucccuug

SEQ ID NO: 1145185 - RNA, 19 nt, Artificial Sequence
  Description of Artificial Sequence: Synthetic oligonucleotide
gucucgaugagcagacugg

SEQ ID NO: 1145186 - RNA, 19 nt, Artificial Sequence
  Description of Artificial Sequence: Synthetic oligonucleotide
agguagggcaggugugacc

SEQ ID NO: 1145187 - RNA, 19 nt, Artificial Sequence
  Description of Artificial Sequence: Synthetic oligonucleotide
ugguuacuauguauuugga

SEQ ID NO: 1145188 - RNA, 19 nt, Artificial Sequence
  Description of Artificial Sequence: Synthetic oligonucleotide
agacucgucacuaaacaga

SEQ ID NO: 1145189 - RNA, 19 nt, Artificial Sequence
  Description of Artificial Sequence: Synthetic oligonucleotide
augagaguggucaagggau

SEQ ID NO: 1145190 - RNA, 19 nt, Artificial Sequence
  Description of Artificial Sequence: Synthetic oligonucleotide
cuaugugcagccguuuggc

SEQ ID NO: 1145191 - RNA, 19 nt, Artificial Sequence
  Description of Artificial Sequence: Synthetic oligonucleotide
augauuacuaagucacguu

SEQ ID NO: 1145192 - RNA, 19 nt, Artificial Sequence
  Description of Artificial Sequence: Synthetic oligonucleotide
uugacgugaaugcggcgga

SEQ ID NO: 1145193 - RNA, 19 nt, Artificial Sequence
  Description of Artificial Sequence: Synthetic oligonucleotide
aauccaguuaggagggcca

SEQ ID NO: 1145194 - RNA, 19 nt, Artificial Sequence
  Description of Artificial Sequence: Synthetic oligonucleotide
cacacggccauugaaucgc

SEQ ID NO: 1145195 - RNA, 19 nt, Artificial Sequence
  Description of Artificial Sequence: Synthetic oligonucleotide
uccagucuagaccuuggua

SEQ ID NO: 1145196 - RNA, 19 nt, Artificial Sequence
  Description of Artificial Sequence: Synthetic oligonucleotide
auauucgggccucugggaa

SEQ ID NO: 1145197 - RNA, 19 nt, Artificial Sequence
  Description of Artificial Sequence: Synthetic oligonucleotide
ggucccgcaguucaaaggc

SEQ ID NO: 1145198 - RNA, 19 nt, Artificial Sequence
  Description of Artificial Sequence: Synthetic oligonucleotide
auaugcuagagcaggcuug

SEQ ID NO: 1145199 - RNA, 19 nt, Artificial Sequence
  Description of Artificial Sequence: Synthetic oligonucleotide
agccguuuggcaguuauga

SEQ ID NO: 1145200 - RNA, 19 nt, Artificial Sequence
  Description of Artificial Sequence: Synthetic oligonucleotide
gacguugagugucuccuca

SEQ ID NO: 1145201 - RNA, 19 nt, Artificial Sequence
  Description of Artificial Sequence: Synthetic oligonucleotide
agcuaugugcagccguuug

SEQ ID NO: 1145202 - RNA, 19 nt, Artificial Sequence
  Description of Artificial Sequence: Synthetic oligonucleotide
gacgugagcuaugugcagc

SEQ ID NO: 1145203 - RNA, 19 nt, Artificial Sequence
  Description of Artificial Sequence: Synthetic oligonucleotide
caccacuauaugcuagagc

SEQ ID NO: 1145204 - RNA, 19 nt, Artificial Sequence
  Description of Artificial Sequence: Synthetic oligonucleotide
acuucgaggcuaaagggga

SEQ ID NO: 1145205 - RNA, 19 nt, Artificial Sequence
  Description of Artificial Sequence: Synthetic oligonucleotide
acuuguuuuccugccucgg

SEQ ID NO: 1145206 - RNA, 19 nt, Artificial Sequence
  Description of Artificial Sequence: Synthetic oligonucleotide
agcgcuugacgugaaugcg

SEQ ID NO: 1145207 - RNA, 19 nt, Artificial Sequence
  Description of Artificial Sequence: Synthetic oligonucleotide
uaugugcagccguuuggca

SEQ ID NO: 1145208 - RNA, 19 nt, Artificial Sequence
  Description of Artificial Sequence: Synthetic oligonucleotide
ugagcuaugugcagccguu

SEQ ID NO: 1145209 - RNA, 19 nt, Artificial Sequence
  Description of Artificial Sequence: Synthetic oligonucleotide
aguugcccugguuacuaug

SEQ ID NO: 1145210 - RNA, 19 nt, Artificial Sequence
  Description of Artificial Sequence: Synthetic oligonucleotide
gaguaggacguugaguguc

SEQ ID NO: 1145211 - RNA, 19 nt, Artificial Sequence
  Description of Artificial Sequence: Synthetic oligonucleotide
gcuaugugcagccguuugg

SEQ ID NO: 1145212 - RNA, 19 nt, Artificial Sequence
  Description of Artificial Sequence: Synthetic oligonucleotide
ccuaaaguagcucccugcc

SEQ ID NO: 1145213 - RNA, 19 nt, Artificial Sequence
  Description of Artificial Sequence: Synthetic oligonucleotide
gaaugcggcggacacgguc

SEQ ID NO: 1145214 - RNA, 19 nt, Artificial Sequence
  Description of Artificial Sequence: Synthetic oligonucleotide
agcaucucagagcuguuua

SEQ ID NO: 1145215 - RNA, 19 nt, Artificial Sequence
  Description of Artificial Sequence: Synthetic oligonucleotide
aaguuaguguuuacuucga

SEQ ID NO: 1145216 - RNA, 19 nt, Artificial Sequence
  Description of Artificial Sequence: Synthetic oligonucleotide
uagaccuugguaccuccau

SEQ ID NO: 1145217 - RNA, 19 nt, Artificial Sequence
  Description of Artificial Sequence: Synthetic oligonucleotide
ccaaaugauuacuaaguca

SEQ ID NO: 1145218 - RNA, 19 nt, Artificial Sequence
  Description of Artificial Sequence: Synthetic oligonucleotide
gaauugucagggacucgag

SEQ ID NO: 1145219 - RNA, 19 nt, Artificial Sequence
  Description of Artificial Sequence: Synthetic oligonucleotide
uugcucuaucaugucacug

SEQ ID NO: 1145220 - RNA, 19 nt, Artificial Sequence
  Description of Artificial Sequence: Synthetic oligonucleotide
ggagacucgucacuaaaca

SEQ ID NO: 1145221 - RNA, 19 nt, Artificial Sequence
  Description of Artificial Sequence: Synthetic oligonucleotide
uuaaguugcccugguuacu

SEQ ID NO: 1145222 - RNA, 19 nt, Artificial Sequence
  Description of Artificial Sequence: Synthetic oligonucleotide
ugcgacccuggccauagaa

SEQ ID NO: 1145223 - RNA, 19 nt, Artificial Sequence
  Description of Artificial Sequence: Synthetic oligonucleotide
gcaggugugaccuuuccuc

SEQ ID NO: 1145224 - RNA, 19 nt, Artificial Sequence
  Description of Artificial Sequence: Synthetic oligonucleotide
gacucgucacuaaacagaa

SEQ ID NO: 1145225 - RNA, 19 nt, Artificial Sequence
  Description of Artificial Sequence: Synthetic oligonucleotide
uguccaggcuagucuauaa

SEQ ID NO: 1145226 - RNA, 19 nt, Artificial Sequence
  Description of Artificial Sequence: Synthetic oligonucleotide
aaccacuugccaaguuguc

SEQ ID NO: 1145227 - RNA, 19 nt, Artificial Sequence
  Description of Artificial Sequence: Synthetic oligonucleotide
agacgugagcuaugugcag

SEQ ID NO: 1145228 - RNA, 19 nt, Artificial Sequence
  Description of Artificial Sequence: Synthetic oligonucleotide
gaccaguggccucauacaa

SEQ ID NO: 1145229 - RNA, 19 nt, Artificial Sequence
  Description of Artificial Sequence: Synthetic oligonucleotide
ggagcgaggaccagguagg

SEQ ID NO: 1145230 - RNA, 19 nt, Artificial Sequence
  Description of Artificial Sequence: Synthetic oligonucleotide
uguuuuccugccucggcuu

SEQ ID NO: 1145231 - RNA, 19 nt, Artificial Sequence
  Description of Artificial Sequence: Synthetic oligonucleotide
cuugcgacccuggccauag

SEQ ID NO: 1145232 - RNA, 19 nt, Artificial Sequence
  Description of Artificial Sequence: Synthetic oligonucleotide
gccaaguugccggucaucg

SEQ ID NO: 1145233 - RNA, 19 nt, Artificial Sequence
  Description of Artificial Sequence: Synthetic oligonucleotide
guggccucauacaacaaca

SEQ ID NO: 1145234 - RNA, 19 nt, Artificial Sequence
  Description of Artificial Sequence: Synthetic oligonucleotide
ucccgcaguucaaaggcau

SEQ ID NO: 1145235 - RNA, 19 nt, Artificial Sequence
  Description of Artificial Sequence: Synthetic oligonucleotide
agaauccaguuaggagggc

SEQ ID NO: 1145236 - RNA, 19 nt, Artificial Sequence
  Description of Artificial Sequence: Synthetic oligonucleotide
cagcuugcgacccuggcca

SEQ ID NO: 1145237 - RNA, 19 nt, Artificial Sequence
  Description of Artificial Sequence: Synthetic oligonucleotide
cugccuauaggcucugaga

SEQ ID NO: 1145238 - RNA, 19 nt, Artificial Sequence
  Description of Artificial Sequence: Synthetic oligonucleotide
ggauauggaggucaaggaa

SEQ ID NO: 1145239 - RNA, 19 nt, Artificial Sequence
  Description of Artificial Sequence: Synthetic oligonucleotide
ggaauugucagggacucga

SEQ ID NO: 1145240 - RNA, 19 nt, Artificial Sequence
  Description of Artificial Sequence: Synthetic oligonucleotide
gacugugauuaacaccaaa

SEQ ID NO: 1145241 - RNA, 19 nt, Artificial Sequence
  Description of Artificial Sequence: Synthetic oligonucleotide
acccuaaaguagcucccug

SEQ ID NO: 1145242 - RNA, 19 nt, Artificial Sequence
  Description of Artificial Sequence: Synthetic oligonucleotide
gcuuaaguugcccugguua

SEQ ID NO: 1145243 - RNA, 19 nt, Artificial Sequence
  Description of Artificial Sequence: Synthetic oligonucleotide
ggugugaccuuuccucugc

SEQ ID NO: 1145244 - RNA, 19 nt, Artificial Sequence
  Description of Artificial Sequence: Synthetic oligonucleotide
gccuauaggcucugagacg

SEQ ID NO: 1145245 - RNA, 19 nt, Artificial Sequence
  Description of Artificial Sequence: Synthetic oligonucleotide
uugccaaguuguccaggcu

SEQ ID NO: 1145246 - RNA, 19 nt, Artificial Sequence
  Description of Artificial Sequence: Synthetic oligonucleotide
ucaagggaugaagcugaca

SEQ ID NO: 1145247 - RNA, 19 nt, Artificial Sequence
  Description of Artificial Sequence: Synthetic oligonucleotide
aggugugaccuuuccucug

SEQ ID NO: 1145248 - RNA, 19 nt, Artificial Sequence
  Description of Artificial Sequence: Synthetic oligonucleotide
  modified_base (6)..(6): a, c, u, g, unknown or other
gugcunuagcgcuugacgu

SEQ ID NO: 1145249 - RNA, 19 nt, Artificial Sequence
  Description of Artificial Sequence: Synthetic oligonucleotide
  modified_base (2)..(2): a, c, u, g, unknown or other
unuagcgcuugacgugaau

SEQ ID NO: 1145250 - RNA, 19 nt, Artificial Sequence
  Description of Artificial Sequence: Synthetic oligonucleotide
aggcuagucuauaacuugu

SEQ ID NO: 1145251 - RNA, 19 nt, Artificial Sequence
  Description of Artificial Sequence: Synthetic oligonucleotide
gggcacuaagccaagggcc

SEQ ID NO: 1145252 - RNA, 19 nt, Artificial Sequence
  Description of Artificial Sequence: Synthetic oligonucleotide
ugaaucgcagggacagcuu

SEQ ID NO: 1145253 - RNA, 19 nt, Artificial Sequence
  Description of Artificial Sequence: Synthetic oligonucleotide
gcacacggccauugaaucg

SEQ ID NO: 1145254 - RNA, 19 nt, Artificial Sequence
  Description of Artificial Sequence: Synthetic oligonucleotide
caaguugccggucaucgua

SEQ ID NO: 1145255 - RNA, 19 nt, Artificial Sequence
  Description of Artificial Sequence: Synthetic oligonucleotide
cuaagccaagggccugggg

SEQ ID NO: 1145256 - RNA, 19 nt, Artificial Sequence
  Description of Artificial Sequence: Synthetic oligonucleotide
acggucccgcaguucaaag

SEQ ID NO: 1145257 - RNA, 19 nt, Artificial Sequence
  Description of Artificial Sequence: Synthetic oligonucleotide
gaaccacuugccaaguugu

SEQ ID NO: 1145258 - RNA, 19 nt, Artificial Sequence
  Description of Artificial Sequence: Synthetic oligonucleotide
cccuaaaguagcucccugc

SEQ ID NO: 1145259 - RNA, 19 nt, Artificial Sequence
  Description of Artificial Sequence: Synthetic oligonucleotide
ggucaaggaacaaacugga

SEQ ID NO: 1145260 - RNA, 19 nt, Artificial Sequence
  Description of Artificial Sequence: Synthetic oligonucleotide
ggucaagggaugaagcuga

SEQ ID NO: 1145261 - RNA, 19 nt, Artificial Sequence
  Description of Artificial Sequence: Synthetic oligonucleotide
guaccuccauggucaagug

SEQ ID NO: 1145262 - RNA, 19 nt, Artificial Sequence
  Description of Artificial Sequence: Synthetic oligonucleotide
agucuagaccuugguaccu

SEQ ID NO: 1145263 - RNA, 19 nt, Artificial Sequence
  Description of Artificial Sequence: Synthetic oligonucleotide
aagccuaaauuuggucaaa

SEQ ID NO: 1145264 - RNA, 19 nt, Artificial Sequence
  Description of Artificial Sequence: Synthetic oligonucleotide
ucgaggcuaaaggggauau

SEQ ID NO: 1145265 - RNA, 19 nt, Artificial Sequence
  Description of Artificial Sequence: Synthetic oligonucleotide
aguaggacguugagugucu

SEQ ID NO: 1145266 - RNA, 19 nt, Artificial Sequence
  Description of Artificial Sequence: Synthetic oligonucleotide
auccaguuaggagggccag

SEQ ID NO: 1145267 - RNA, 19 nt, Artificial Sequence
  Description of Artificial Sequence: Synthetic oligonucleotide
guggucaagggaugaagcu

SEQ ID NO: 1145268 - RNA, 19 nt, Artificial Sequence
  Description of Artificial Sequence: Synthetic oligonucleotide
acucgucacuaaacagaac

SEQ ID NO: 1145269 - RNA, 19 nt, Artificial Sequence
  Description of Artificial Sequence: Synthetic oligonucleotide
  modified_base (4)..(4): a, c, u, g, unknown or other
gcunuagcgcuugacguga

SEQ ID NO: 1145270 - RNA, 19 nt, Artificial Sequence
  Description of Artificial Sequence: Synthetic oligonucleotide
aagcuuggcugcggcuccg

SEQ ID NO: 1145271 - RNA, 19 nt, Artificial Sequence
  Description of Artificial Sequence: Synthetic oligonucleotide
agaggccuuucaaaaggcu

SEQ ID NO: 1145272 - RNA, 19 nt, Artificial Sequence
  Description of Artificial Sequence: Synthetic oligonucleotide
uucgaggcuaaaggggaua

SEQ ID NO: 1145273 - RNA, 19 nt, Artificial Sequence
  Description of Artificial Sequence: Synthetic oligonucleotide
agccuaaauuuggucaaaa

SEQ ID NO: 1145274 - RNA, 19 nt, Artificial Sequence
  Description of Artificial Sequence: Synthetic oligonucleotide
agcugggacucugaauacu

SEQ ID NO: 1145275 - RNA, 19 nt, Artificial Sequence
  Description of Artificial Sequence: Synthetic oligonucleotide
gcucuaucaugucacuguc

SEQ ID NO: 1145276 - RNA, 19 nt, Artificial Sequence
  Description of Artificial Sequence: Synthetic oligonucleotide
gacgugaaugcggcggaca

SEQ ID NO: 1145277 - RNA, 19 nt, Artificial Sequence
  Description of Artificial Sequence: Synthetic oligonucleotide
cuauaggcucugagacgug

SEQ ID NO: 1145278 - RNA, 19 nt, Artificial Sequence
  Description of Artificial Sequence: Synthetic oligonucleotide
aggcuaaaggggauaugga

SEQ ID NO: 1145279 - RNA, 19 nt, Artificial Sequence
  Description of Artificial Sequence: Synthetic oligonucleotide
gugugaccuuuccucugcc

SEQ ID NO: 1145280 - RNA, 19 nt, Artificial Sequence
  Description of Artificial Sequence: Synthetic oligonucleotide
ccacuauaugcuagagcag

SEQ ID NO: 1145281 - RNA, 19 nt, Artificial Sequence
  Description of Artificial Sequence: Synthetic oligonucleotide
gccguuuggcaguuaugag

SEQ ID NO: 1145282 - RNA, 19 nt, Artificial Sequence
  Description of Artificial Sequence: Synthetic oligonucleotide
auacacgauggaggugcag

SEQ ID NO: 1145283 - RNA, 19 nt, Artificial Sequence
  Description of Artificial Sequence: Synthetic oligonucleotide
ugagcaucucagagcuguu

SEQ ID NO: 1145284 - RNA, 19 nt, Artificial Sequence
  Description of Artificial Sequence: Synthetic oligonucleotide
caccaaggugcuugaccug

SEQ ID NO: 1145285 - RNA, 19 nt, Artificial Sequence
  Description of Artificial Sequence: Synthetic oligonucleotide
gcgcuugacgugaaugcgg

SEQ ID NO: 1145286 - RNA, 19 nt, Artificial Sequence
  Description of Artificial Sequence: Synthetic oligonucleotide
gcugagaaaauagaccagu

SEQ ID NO: 1145287 - RNA, 19 nt, Artificial Sequence
  Description of Artificial Sequence: Synthetic oligonucleotide
gauugucaucucacuucca

SEQ ID NO: 1145288 - RNA, 19 nt, Artificial Sequence
  Description of Artificial Sequence: Synthetic oligonucleotide
ccguagcugggauuauagg

SEQ ID NO: 1145289 - RNA, 19 nt, Artificial Sequence
  Description of Artificial Sequence: Synthetic oligonucleotide
gugagcuaugugcagccgu

SEQ ID NO: 1145290 - RNA, 19 nt, Artificial Sequence
  Description of Artificial Sequence: Synthetic oligonucleotide
cugagacgugagcuaugug

SEQ ID NO: 1145291 - RNA, 19 nt, Artificial Sequence
  Description of Artificial Sequence: Synthetic oligonucleotide
cacggccauugaaucgcag

SEQ ID NO: 1145292 - RNA, 19 nt, Artificial Sequence
  Description of Artificial Sequence: Synthetic oligonucleotide
ucccuugcucuaucauguc

SEQ ID NO: 1145293 - RNA, 19 nt, Artificial Sequence
  Description of Artificial Sequence: Synthetic oligonucleotide
cagugacaacauuccucug

SEQ ID NO: 1145294 - RNA, 19 nt, Artificial Sequence
  Description of Artificial Sequence: Synthetic oligonucleotide
guugcccugguuacuaugu

SEQ ID NO: 1145295 - RNA, 19 nt, Artificial Sequence
  Description of Artificial Sequence: Synthetic oligonucleotide
cagccguuuggcaguuaug

SEQ ID NO: 1145296 - RNA, 19 nt, Artificial Sequence
  Description of Artificial Sequence: Synthetic oligonucleotide
ccgcaguucaaaggcaucc

SEQ ID NO: 1145297 - RNA, 19 nt, Artificial Sequence
  Description of Artificial Sequence: Synthetic oligonucleotide
gcuugacgugaaugcggcg

SEQ ID NO: 1145298 - RNA, 19 nt, Artificial Sequence
  Description of Artificial Sequence: Synthetic oligonucleotide
guuugugggaaagccucaa

SEQ ID NO: 1145299 - RNA, 19 nt, Artificial Sequence
  Description of Artificial Sequence: Synthetic oligonucleotide
agggucucauuagucucga

SEQ ID NO: 1145300 - RNA, 19 nt, Artificial Sequence
  Description of Artificial Sequence: Synthetic oligonucleotide
cuauaugcuagagcaggcu

SEQ ID NO: 1145301 - RNA, 19 nt, Artificial Sequence
  Description of Artificial Sequence: Synthetic oligonucleotide
ugacgugaaugcggcggac

SEQ ID NO: 1145302 - RNA, 19 nt, Artificial Sequence
  Description of Artificial Sequence: Synthetic oligonucleotide
cgcuugacgugaaugcggc

SEQ ID NO: 1145303 - RNA, 19 nt, Artificial Sequence
  Description of Artificial Sequence: Synthetic oligonucleotide
caguuaugagaguggucaa

SEQ ID NO: 1145304 - RNA, 19 nt, Artificial Sequence
  Description of Artificial Sequence: Synthetic oligonucleotide
cgaugagcagacugguggc

SEQ ID NO: 1145305 - RNA, 19 nt, Artificial Sequence
  Description of Artificial Sequence: Synthetic oligonucleotide
cauacacgauggaggugca

SEQ ID NO: 1145306 - RNA, 19 nt, Artificial Sequence
  Description of Artificial Sequence: Synthetic oligonucleotide
ugaaugcggcggacacggu

SEQ ID NO: 1145307 - RNA, 19 nt, Artificial Sequence
  Description of Artificial Sequence: Synthetic oligonucleotide
gucuagaccuugguaccuc

SEQ ID NO: 1145308 - RNA, 19 nt, Artificial Sequence
  Description of Artificial Sequence: Synthetic oligonucleotide
gagcacacggccauugaau

SEQ ID NO: 1145309 - RNA, 19 nt, Artificial Sequence
  Description of Artificial Sequence: Synthetic oligonucleotide
guguuuacuucgaggcuaa

SEQ ID NO: 1145310 - RNA, 19 nt, Artificial Sequence
  Description of Artificial Sequence: Synthetic oligonucleotide
ugaagagcacacggccauu

SEQ ID NO: 1145311 - RNA, 19 nt, Artificial Sequence
  Description of Artificial Sequence: Synthetic oligonucleotide
caggugugaccuuuccucu

SEQ ID NO: 1145312 - RNA, 19 nt, Artificial Sequence
  Description of Artificial Sequence: Synthetic oligonucleotide
uguuuacuucgaggcuaaa

SEQ ID NO: 1145313 - RNA, 19 nt, Artificial Sequence
  Description of Artificial Sequence: Synthetic oligonucleotide
ccuaugcuuaaacaccuua

SEQ ID NO: 1145314 - RNA, 19 nt, Artificial Sequence
  Description of Artificial Sequence: Synthetic oligonucleotide
gaauacuaaagggcuucuu

SEQ ID NO: 1145315 - RNA, 19 nt, Artificial Sequence
  Description of Artificial Sequence: Synthetic oligonucleotide
guugccggucaucguaagu

SEQ ID NO: 1145316 - RNA, 19 nt, Artificial Sequence
  Description of Artificial Sequence: Synthetic oligonucleotide
  modified_base (3)..(3): a, c, u, g, unknown or other
cunuagcgcuugacgugaa

SEQ ID NO: 1145317 - RNA, 19 nt, Artificial Sequence
  Description of Artificial Sequence: Synthetic oligonucleotide
ccauugaaucgcagggaca

SEQ ID NO: 1145318 - RNA, 19 nt, Artificial Sequence
  Description of Artificial Sequence: Synthetic oligonucleotide
ggacguugagugucuccuc

SEQ ID NO: 1145319 - RNA, 19 nt, Artificial Sequence
  Description of Artificial Sequence: Synthetic oligonucleotide
guaggacguugagugucuc

SEQ ID NO: 1145320 - RNA, 19 nt, Artificial Sequence
  Description of Artificial Sequence: Synthetic oligonucleotide
gcuagucuauaacuuguuu

SEQ ID NO: 1145321 - RNA, 19 nt, Artificial Sequence
  Description of Artificial Sequence: Synthetic oligonucleotide
uugcgacccuggccauaga

SEQ ID NO: 1145322 - RNA, 19 nt, Artificial Sequence
  Description of Artificial Sequence: Synthetic oligonucleotide
ggcaguuaugagagugguc

SEQ ID NO: 1145323 - RNA, 19 nt, Artificial Sequence
  Description of Artificial Sequence: Synthetic oligonucleotide
cccuaacccuggcaucugc

SEQ ID NO: 1145324 - RNA, 19 nt, Artificial Sequence
  Description of Artificial Sequence: Synthetic oligonucleotide
gucccgcaguucaaaggca

SEQ ID NO: 1145325 - RNA, 19 nt, Artificial Sequence
  Description of Artificial Sequence: Synthetic oligonucleotide
gcugggacucugaauacua

SEQ ID NO: 1145326 - RNA, 19 nt, Artificial Sequence
  Description of Artificial Sequence: Synthetic oligonucleotide
agacugugauuaacaccaa

SEQ ID NO: 1145327 - RNA, 19 nt, Artificial Sequence
  Description of Artificial Sequence: Synthetic oligonucleotide
auguagcauggagcuggga

SEQ ID NO: 1145328 - RNA, 19 nt, Artificial Sequence
  Description of Artificial Sequence: Synthetic oligonucleotide
ggcggacacggucccgcag

SEQ ID NO: 1145329 - RNA, 19 nt, Artificial Sequence
  Description of Artificial Sequence: Synthetic oligonucleotide
agcuugcgacccuggccau

SEQ ID NO: 1145330 - RNA, 19 nt, Artificial Sequence
  Description of Artificial Sequence: Synthetic oligonucleotide
ucuccguagcugggauuau

SEQ ID NO: 1145331 - RNA, 19 nt, Artificial Sequence
  Description of Artificial Sequence: Synthetic oligonucleotide
gccucggcuucuccguagc

SEQ ID NO: 1145332 - RNA, 19 nt, Artificial Sequence
  Description of Artificial Sequence: Synthetic oligonucleotide
ccaacccuaacccuggcau

SEQ ID NO: 1145333 - RNA, 19 nt, Artificial Sequence
  Description of Artificial Sequence: Synthetic oligonucleotide
acacggccauugaaucgca

SEQ ID NO: 1145334 - RNA, 19 nt, Artificial Sequence
  Description of Artificial Sequence: Synthetic oligonucleotide
cuucgaggcuaaaggggau

SEQ ID NO: 1145335 - RNA, 19 nt, Artificial Sequence
  Description of Artificial Sequence: Synthetic oligonucleotide
gcacuaagccaagggccug

SEQ ID NO: 1145336 - RNA, 19 nt, Artificial Sequence
  Description of Artificial Sequence: Synthetic oligonucleotide
gacuuccuaagggucucau

SEQ ID NO: 1145337 - RNA, 19 nt, Artificial Sequence
  Description of Artificial Sequence: Synthetic oligonucleotide
ggaggucaaggaacaaacu

SEQ ID NO: 1145338 - RNA, 19 nt, Artificial Sequence
  Description of Artificial Sequence: Synthetic oligonucleotide
cccgcaguucaaaggcauc

SEQ ID NO: 1145339 - RNA, 19 nt, Artificial Sequence
  Description of Artificial Sequence: Synthetic oligonucleotide
caguggccucauacaacaa

SEQ ID NO: 1145340 - RNA, 19 nt, Artificial Sequence
  Description of Artificial Sequence: Synthetic oligonucleotide
ccaugggccucagcugagg

SEQ ID NO: 1145341 - RNA, 19 nt, Artificial Sequence
  Description of Artificial Sequence: Synthetic oligonucleotide
gcaucucagagcuguuuau

SEQ ID NO: 1145342 - RNA, 19 nt, Artificial Sequence
  Description of Artificial Sequence: Synthetic oligonucleotide
cuccguagcugggauuaua

SEQ ID NO: 1145343 - RNA, 19 nt, Artificial Sequence
  Description of Artificial Sequence: Synthetic oligonucleotide
  modified_base (19)..(19): a, c, u, g, unknown or other
ccggucaucguaagugcun

SEQ ID NO: 1145344 - RNA, 19 nt, Artificial Sequence
  Description of Artificial Sequence: Synthetic oligonucleotide
cgugagcuaugugcagccg

SEQ ID NO: 1145345 - RNA, 19 nt, Artificial Sequence
  Description of Artificial Sequence: Synthetic oligonucleotide
gcggacacggucccgcagu

SEQ ID NO: 1145346 - RNA, 19 nt, Artificial Sequence
  Description of Artificial Sequence: Synthetic oligonucleotide
cguuucccuugcucuauca

SEQ ID NO: 1145347 - RNA, 19 nt, Artificial Sequence
  Description of Artificial Sequence: Synthetic oligonucleotide
cuucuccguagcugggauu

SEQ ID NO: 1145348 - RNA, 19 nt, Artificial Sequence
  Description of Artificial Sequence: Synthetic oligonucleotide
cacguuucccuugcucuau

SEQ ID NO: 1145349 - RNA, 19 nt, Artificial Sequence
  Description of Artificial Sequence: Synthetic oligonucleotide
ggccaaguugccggucauc

SEQ ID NO: 1145350 - RNA, 19 nt, Artificial Sequence
  Description of Artificial Sequence: Synthetic oligonucleotide
gcccugguuacuauguauu

SEQ ID NO: 1145351 - RNA, 19 nt, Artificial Sequence
  Description of Artificial Sequence: Synthetic oligonucleotide
ugcagccguuuggcaguua

SEQ ID NO: 1145352 - RNA, 19 nt, Artificial Sequence
  Description of Artificial Sequence: Synthetic oligonucleotide
ggcuagucuauaacuuguu

SEQ ID NO: 1145353 - RNA, 19 nt, Artificial Sequence
  Description of Artificial Sequence: Synthetic oligonucleotide
ggacacggucccgcaguuc

SEQ ID NO: 1145354 - RNA, 19 nt, Artificial Sequence
  Description of Artificial Sequence: Synthetic oligonucleotide
ggcuuaaguugcccugguu

SEQ ID NO: 1145355 - RNA, 19 nt, Artificial Sequence
  Description of Artificial Sequence: Synthetic oligonucleotide
ccaaguugccggucaucgu

SEQ ID NO: 1145356 - RNA, 19 nt, Artificial Sequence
  Description of Artificial Sequence: Synthetic oligonucleotide
gcagacugguggccaaguu

SEQ ID NO: 1145357 - RNA, 19 nt, Artificial Sequence
  Description of Artificial Sequence: Synthetic oligonucleotide
guagggcaggugugaccuu

SEQ ID NO: 1145358 - RNA, 19 nt, Artificial Sequence
  Description of Artificial Sequence: Synthetic oligonucleotide
  modified_base (11)..(11): a, c, u, g, unknown or other
cguaagugcunuagcgcuu

SEQ ID NO: 1145359 - RNA, 19 nt, Artificial Sequence
  Description of Artificial Sequence: Synthetic oligonucleotide
gugcagccguuuggcaguu

SEQ ID NO: 1145360 - RNA, 19 nt, Artificial Sequence
  Description of Artificial Sequence: Synthetic oligonucleotide
ccucggcuucuccguagcu

SEQ ID NO: 1145361 - RNA, 19 nt, Artificial Sequence
  Description of Artificial Sequence: Synthetic oligonucleotide
cggacacggucccgcaguu

SEQ ID NO: 1145362 - RNA, 19 nt, Artificial Sequence
  Description of Artificial Sequence: Synthetic oligonucleotide
  modified_base (1)..(1): a, c, u, g, unknown or other
nuagcgcuugacgugaaug

SEQ ID NO: 1145363 - RNA, 19 nt, Artificial Sequence
  Description of Artificial Sequence: Synthetic oligonucleotide
auuggaaugaacuaaagac

SEQ ID NO: 1145364 - RNA, 19 nt, Artificial Sequence
  Description of Artificial Sequence: Synthetic oligonucleotide
aaaauagggaaccuuuucc

SEQ ID NO: 1145365 - RNA, 19 nt, Artificial Sequence
  Description of Artificial Sequence: Synthetic oligonucleotide
aauaauaugagacccaugu

SEQ ID NO: 1145366 - RNA, 19 nt, Artificial Sequence
  Description of Artificial Sequence: Synthetic oligonucleotide
aauagucuuagcuuugacc

SEQ ID NO: 1145367 - RNA, 19 nt, Artificial Sequence
  Description of Artificial Sequence: Synthetic oligonucleotide
uuaauuauuaagcaaugcc

SEQ ID NO: 1145368 - RNA, 19 nt, Artificial Sequence
  Description of Artificial Sequence: Synthetic oligonucleotide
uauucaauauucuuugugg

SEQ ID NO: 1145369 - RNA, 19 nt, Artificial Sequence
  Description of Artificial Sequence: Synthetic oligonucleotide
auauaauuaacucuucggg

SEQ ID NO: 1145370 - RNA, 19 nt, Artificial Sequence
  Description of Artificial Sequence: Synthetic oligonucleotide
auuccauaggaucuuaacc

SEQ ID NO: 1145371 - RNA, 19 nt, Artificial Sequence
  Description of Artificial Sequence: Synthetic oligonucleotide
uaauuauuaagcaaugccu

SEQ ID NO: 1145372 - RNA, 19 nt, Artificial Sequence
  Description of Artificial Sequence: Synthetic oligonucleotide
guuacaaucaucuucagga

SEQ ID NO: 1145373 - RNA, 19 nt, Artificial Sequence
  Description of Artificial Sequence: Synthetic oligonucleotide
acucuuauuauauuucuac

SEQ ID NO: 1145374 - RNA, 19 nt, Artificial Sequence
  Description of Artificial Sequence: Synthetic oligonucleotide
uuaaguaucugcuugacaa

SEQ ID NO: 1145375 - RNA, 19 nt, Artificial Sequence
  Description of Artificial Sequence: Synthetic oligonucleotide
uuuaaucaauaauauauca

SEQ ID NO: 1145376 - RNA, 19 nt, Artificial Sequence
  Description of Artificial Sequence: Synthetic oligonucleotide
uaaagauuggccuuuaagu

SEQ ID NO: 1145377 - RNA, 19 nt, Artificial Sequence
  Description of Artificial Sequence: Synthetic oligonucleotide
uaaucaauaauauaucauc

SEQ ID NO: 1145378 - RNA, 19 nt, Artificial Sequence
  Description of Artificial Sequence: Synthetic oligonucleotide
auagucuuagcuuugacca

SEQ ID NO: 1145379 - RNA, 19 nt, Artificial Sequence
  Description of Artificial Sequence: Synthetic oligonucleotide
uuaccaacugucaaacugg

SEQ ID NO: 1145380 - RNA, 19 nt, Artificial Sequence
  Description of Artificial Sequence: Synthetic oligonucleotide
cauagauuauucaauauuc

SEQ ID NO: 1145381 - RNA, 19 nt, Artificial Sequence
  Description of Artificial Sequence: Synthetic oligonucleotide
ugaaguaacacugagguuc

SEQ ID NO: 1145382 - RNA, 19 nt, Artificial Sequence
  Description of Artificial Sequence: Synthetic oligonucleotide
aauagggaaccuuuuccgg

SEQ ID NO: 1145383 - RNA, 19 nt, Artificial Sequence
  Description of Artificial Sequence: Synthetic oligonucleotide
uugaccaagaauucuauug

SEQ ID NO: 1145384 - RNA, 19 nt, Artificial Sequence
  Description of Artificial Sequence: Synthetic oligonucleotide
cuuggugagccuuaaaagg

SEQ ID NO: 1145385 - RNA, 19 nt, Artificial Sequence
  Description of Artificial Sequence: Synthetic oligonucleotide
uaaaccuaagugcagaaaa

SEQ ID NO: 1145386 - RNA, 19 nt, Artificial Sequence
  Description of Artificial Sequence: Synthetic oligonucleotide
auaacggcugcauggaagc

SEQ ID NO: 1145387 - RNA, 19 nt, Artificial Sequence
  Description of Artificial Sequence: Synthetic oligonucleotide
uguugaauauaauuaacuc

SEQ ID NO: 1145388 - RNA, 19 nt, Artificial Sequence
  Description of Artificial Sequence: Synthetic oligonucleotide
uccagaaucagauucuggc

SEQ ID NO: 1145389 - RNA, 19 nt, Artificial Sequence
  Description of Artificial Sequence: Synthetic oligonucleotide
gauugguacggaaagaaag

SEQ ID NO: 1145390 - RNA, 19 nt, Artificial Sequence
  Description of Artificial Sequence: Synthetic oligonucleotide
uauuggaaugaacuaaaga

SEQ ID NO: 1145391 - RNA, 19 nt, Artificial Sequence
  Description of Artificial Sequence: Synthetic oligonucleotide
uaacaaaagagcauggaua

SEQ ID NO: 1145392 - RNA, 19 nt, Artificial Sequence
  Description of Artificial Sequence: Synthetic oligonucleotide
uucgaugcccuuaaaauac

SEQ ID NO: 1145393 - RNA, 19 nt, Artificial Sequence
  Description of Artificial Sequence: Synthetic oligonucleotide
ucuacauagauuauucaau

SEQ ID NO: 1145394 - RNA, 19 nt, Artificial Sequence
  Description of Artificial Sequence: Synthetic oligonucleotide
uauacucuuauuauauuuc

SEQ ID NO: 1145395 - RNA, 19 nt, Artificial Sequence
  Description of Artificial Sequence: Synthetic oligonucleotide
ugguuaaugaacaggaauc

SEQ ID NO: 1145396 - RNA, 19 nt, Artificial Sequence
  Description of Artificial Sequence: Synthetic oligonucleotide
guuaccaacugucaaacug

SEQ ID NO: 1145397 - RNA, 19 nt, Artificial Sequence
  Description of Artificial Sequence: Synthetic oligonucleotide
gaagcuuaauuauuaagca

SEQ ID NO: 1145398 - RNA, 19 nt, Artificial Sequence
  Description of Artificial Sequence: Synthetic oligonucleotide
agauugaauccauguaccc

SEQ ID NO: 1145399 - RNA, 19 nt, Artificial Sequence
  Description of Artificial Sequence: Synthetic oligonucleotide
aaaccuacuaugccuguag

SEQ ID NO: 1145400 - RNA, 19 nt, Artificial Sequence
  Description of Artificial Sequence: Synthetic oligonucleotide
ugaaagguuaccaacuguc

SEQ ID NO: 1145401 - RNA, 19 nt, Artificial Sequence
  Description of Artificial Sequence: Synthetic oligonucleotide
augacauuggcccaaauaa

SEQ ID NO: 1145402 - RNA, 19 nt, Artificial Sequence
  Description of Artificial Sequence: Synthetic oligonucleotide
caguccauaaguuacaauc

SEQ ID NO: 1145403 - RNA, 19 nt, Artificial Sequence
  Description of Artificial Sequence: Synthetic oligonucleotide
uuaaaaggaacuuccagua

SEQ ID NO: 1145404 - RNA, 19 nt, Artificial Sequence
  Description of Artificial Sequence: Synthetic oligonucleotide
aagcguccuaaccagagag

SEQ ID NO: 1145405 - RNA, 19 nt, Artificial Sequence
  Description of Artificial Sequence: Synthetic oligonucleotide
auuagauuccuuccccucg

SEQ ID NO: 1145406 - RNA, 19 nt, Artificial Sequence
  Description of Artificial Sequence: Synthetic oligonucleotide
gaaugaacuaaagacauuc

SEQ ID NO: 1145407 - RNA, 19 nt, Artificial Sequence
  Description of Artificial Sequence: Synthetic oligonucleotide
caugcuuacauauggaauc

SEQ ID NO: 1145408 - RNA, 19 nt, Artificial Sequence
  Description of Artificial Sequence: Synthetic oligonucleotide
uccacaagcguccuaacca

SEQ ID NO: 1145409 - RNA, 19 nt, Artificial Sequence
  Description of Artificial Sequence: Synthetic oligonucleotide
gugaucauauaucagucag

SEQ ID NO: 1145410 - RNA, 19 nt, Artificial Sequence
  Description of Artificial Sequence: Synthetic oligonucleotide
cuggaagugaaaacaaacc

SEQ ID NO: 1145411 - RNA, 19 nt, Artificial Sequence
  Description of Artificial Sequence: Synthetic oligonucleotide
ucagguguaacacuccugu

SEQ ID NO: 1145412 - RNA, 19 nt, Artificial Sequence
  Description of Artificial Sequence: Synthetic oligonucleotide
uguaucgugggucuagucu

SEQ ID NO: 1145413 - RNA, 19 nt, Artificial Sequence
  Description of Artificial Sequence: Synthetic oligonucleotide
uacaguacuccauagcuac

SEQ ID NO: 1145414 - RNA, 19 nt, Artificial Sequence
  Description of Artificial Sequence: Synthetic oligonucleotide
auugaauccauguacccgu

SEQ ID NO: 1145415 - RNA, 19 nt, Artificial Sequence
  Description of Artificial Sequence: Synthetic oligonucleotide
uuaggugagacauuugaaa

SEQ ID NO: 1145416 - RNA, 19 nt, Artificial Sequence
  Description of Artificial Sequence: Synthetic oligonucleotide
ucuauuggaaugaacuaaa

SEQ ID NO: 1145417 - RNA, 19 nt, Artificial Sequence
  Description of Artificial Sequence: Synthetic oligonucleotide
ugagacauuugaaagguua

SEQ ID NO: 1145418 - RNA, 19 nt, Artificial Sequence
  Description of Artificial Sequence: Synthetic oligonucleotide
aaguucugaacuuccauaa

SEQ ID NO: 1145419 - RNA, 19 nt, Artificial Sequence
  Description of Artificial Sequence: Synthetic oligonucleotide
agcucuuucauuccauagg

SEQ ID NO: 1145420 - RNA, 19 nt, Artificial Sequence
  Description of Artificial Sequence: Synthetic oligonucleotide
aaugguugugcucuuguaa

SEQ ID NO: 1145421 - RNA, 19 nt, Artificial Sequence
  Description of Artificial Sequence: Synthetic oligonucleotide
gaaauugugaaauucucua

SEQ ID NO: 1145422 - RNA, 19 nt, Artificial Sequence
  Description of Artificial Sequence: Synthetic oligonucleotide
uguaguuguaaaacacccc

SEQ ID NO: 1145423 - RNA, 19 nt, Artificial Sequence
  Description of Artificial Sequence: Synthetic oligonucleotide
gauaccaccaugacauugg

SEQ ID NO: 1145424 - RNA, 19 nt, Artificial Sequence
  Description of Artificial Sequence: Synthetic oligonucleotide
aucuacaguacuccauagc

SEQ ID NO: 1145425 - RNA, 19 nt, Artificial Sequence
  Description of Artificial Sequence: Synthetic oligonucleotide
uguagagauggaauagaug

SEQ ID NO: 1145426 - RNA, 19 nt, Artificial Sequence
  Description of Artificial Sequence: Synthetic oligonucleotide
aacucuucgggagaaaaug

SEQ ID NO: 1145427 - RNA, 19 nt, Artificial Sequence
  Description of Artificial Sequence: Synthetic oligonucleotide
aauggcauucaaacugagc

SEQ ID NO: 1145428 - RNA, 19 nt, Artificial Sequence
  Description of Artificial Sequence: Synthetic oligonucleotide
uguaaauccugaaguggag

SEQ ID NO: 1145429 - RNA, 19 nt, Artificial Sequence
  Description of Artificial Sequence: Synthetic oligonucleotide
gaagaagagaacucccagc

SEQ ID NO: 1145430 - RNA, 19 nt, Artificial Sequence
  Description of Artificial Sequence: Synthetic oligonucleotide
augagugcaaacuugcccu

SEQ ID NO: 1145431 - RNA, 19 nt, Artificial Sequence
  Description of Artificial Sequence: Synthetic oligonucleotide
aacugguuaaugaacagga

SEQ ID NO: 1145432 - RNA, 19 nt, Artificial Sequence
  Description of Artificial Sequence: Synthetic oligonucleotide
ugcaccaguaccaaacaca

SEQ ID NO: 1145433 - RNA, 19 nt, Artificial Sequence
  Description of Artificial Sequence: Synthetic oligonucleotide
gagacccauguuuacaucc

SEQ ID NO: 1145434 - RNA, 19 nt, Artificial Sequence
  Description of Artificial Sequence: Synthetic oligonucleotide
cagauugaauccauguacc

SEQ ID NO: 1145435 - RNA, 19 nt, Artificial Sequence
  Description of Artificial Sequence: Synthetic oligonucleotide
aagcuaaguacauggaaau

SEQ ID NO: 1145436 - RNA, 19 nt, Artificial Sequence
  Description of Artificial Sequence: Synthetic oligonucleotide
ggaagcuuaauuauuaagc

SEQ ID NO: 1145437 - RNA, 19 nt, Artificial Sequence
  Description of Artificial Sequence: Synthetic oligonucleotide
ugacaacuguguaucgugg

SEQ ID NO: 1145438 - RNA, 19 nt, Artificial Sequence
  Description of Artificial Sequence: Synthetic oligonucleotide
aggaagcuuaauuauuaag

SEQ ID NO: 1145439 - RNA, 19 nt, Artificial Sequence
  Description of Artificial Sequence: Synthetic oligonucleotide
uacagaggaagcuuaauua

SEQ ID NO: 1145440 - RNA, 19 nt, Artificial Sequence
  Description of Artificial Sequence: Synthetic oligonucleotide
agaugauaguaucugcuug

SEQ ID NO: 1145441 - RNA, 19 nt, Artificial Sequence
  Description of Artificial Sequence: Synthetic oligonucleotide
agugcuuugcgguucauga

SEQ ID NO: 1145442 - RNA, 19 nt, Artificial Sequence
  Description of Artificial Sequence: Synthetic oligonucleotide
uuuaaguaucugcuugaca

SEQ ID NO: 1145443 - RNA, 19 nt, Artificial Sequence
  Description of Artificial Sequence: Synthetic oligonucleotide
uuaaccccuucuaaaacac

SEQ ID NO: 1145444 - RNA, 19 nt, Artificial Sequence
  Description of Artificial Sequence: Synthetic oligonucleotide
auauucagguguaacacuc

SEQ ID NO: 1145445 - RNA, 19 nt, Artificial Sequence
  Description of Artificial Sequence: Synthetic oligonucleotide
uuacaucccugaaauaaga

SEQ ID NO: 1145446 - RNA, 19 nt, Artificial Sequence
  Description of Artificial Sequence: Synthetic oligonucleotide
ugcuugaggaaaauaggga

SEQ ID NO: 1145447 - RNA, 19 nt, Artificial Sequence
  Description of Artificial Sequence: Synthetic oligonucleotide
aaguauacucuuauuauau

SEQ ID NO: 1145448 - RNA, 19 nt, Artificial Sequence
  Description of Artificial Sequence: Synthetic oligonucleotide
uaaguauacucuuauuaua

SEQ ID NO: 1145449 - RNA, 19 nt, Artificial Sequence
  Description of Artificial Sequence: Synthetic oligonucleotide
auacucuuauuauauuucu

SEQ ID NO: 1145450 - RNA, 19 nt, Artificial Sequence
  Description of Artificial Sequence: Synthetic oligonucleotide
ugagcuaugaagaguucac

SEQ ID NO: 1145451 - RNA, 19 nt, Artificial Sequence
  Description of Artificial Sequence: Synthetic oligonucleotide
guugaauauaauuaacucu

SEQ ID NO: 1145452 - RNA, 19 nt, Artificial Sequence
  Description of Artificial Sequence: Synthetic oligonucleotide
ucacagauugaauccaugu

SEQ ID NO: 1145453 - RNA, 19 nt, Artificial Sequence
  Description of Artificial Sequence: Synthetic oligonucleotide
uacaucccugaaauaagag

SEQ ID NO: 1145454 - RNA, 19 nt, Artificial Sequence
  Description of Artificial Sequence: Synthetic oligonucleotide
caguuuggaagcuaaguac

SEQ ID NO: 1145455 - RNA, 19 nt, Artificial Sequence
  Description of Artificial Sequence: Synthetic oligonucleotide
aaccuacuaugccuguagg

SEQ ID NO: 1145456 - RNA, 19 nt, Artificial Sequence
  Description of Artificial Sequence: Synthetic oligonucleotide
aacccagugaucauauauc

SEQ ID NO: 1145457 - RNA, 19 nt, Artificial Sequence
  Description of Artificial Sequence: Synthetic oligonucleotide
agaugcaccaguaccaaac

SEQ ID NO: 1145458 - RNA, 19 nt, Artificial Sequence
  Description of Artificial Sequence: Synthetic oligonucleotide
cuacuaugccuguaggagg

SEQ ID NO: 1145459 - RNA, 19 nt, Artificial Sequence
  Description of Artificial Sequence: Synthetic oligonucleotide
ucuuaaccccuucuaaaac

SEQ ID NO: 1145460 - RNA, 19 nt, Artificial Sequence
  Description of Artificial Sequence: Synthetic oligonucleotide
auggaauccacaagcgucc

SEQ ID NO: 1145461 - RNA, 19 nt, Artificial Sequence
  Description of Artificial Sequence: Synthetic oligonucleotide
auaucaucaugucaacacu

SEQ ID NO: 1145462 - RNA, 19 nt, Artificial Sequence
  Description of Artificial Sequence: Synthetic oligonucleotide
ugucccuuaacuccagugu

SEQ ID NO: 1145463 - RNA, 19 nt, Artificial Sequence
  Description of Artificial Sequence: Synthetic oligonucleotide
cuaugaagaguucacucac

SEQ ID NO: 1145464 - RNA, 19 nt, Artificial Sequence
  Description of Artificial Sequence: Synthetic oligonucleotide
ccauuuguuccuaagagag

SEQ ID NO: 1145465 - RNA, 19 nt, Artificial Sequence
  Description of Artificial Sequence: Synthetic oligonucleotide
aaaagagcauggauaccac

SEQ ID NO: 1145466 - RNA, 19 nt, Artificial Sequence
  Description of Artificial Sequence: Synthetic oligonucleotide
ugaauauaauuaacucuuc

SEQ ID NO: 1145467 - RNA, 19 nt, Artificial Sequence
  Description of Artificial Sequence: Synthetic oligonucleotide
augcuuacauauggaaucc

SEQ ID NO: 1145468 - RNA, 19 nt, Artificial Sequence
  Description of Artificial Sequence: Synthetic oligonucleotide
uagucuggggaugaaauug

SEQ ID NO: 1145469 - RNA, 19 nt, Artificial Sequence
  Description of Artificial Sequence: Synthetic oligonucleotide
uucuauuggaaugaacuaa

SEQ ID NO: 1145470 - RNA, 19 nt, Artificial Sequence
  Description of Artificial Sequence: Synthetic oligonucleotide
aacuguguaucgugggucu

SEQ ID NO: 1145471 - RNA, 19 nt, Artificial Sequence
  Description of Artificial Sequence: Synthetic oligonucleotide
ugcuuugcgguucaugagu

SEQ ID NO: 1145472 - RNA, 19 nt, Artificial Sequence
  Description of Artificial Sequence: Synthetic oligonucleotide
aaacccagccacaauagca

SEQ ID NO: 1145473 - RNA, 19 nt, Artificial Sequence
  Description of Artificial Sequence: Synthetic oligonucleotide
uacuaugccuguaggaggu

SEQ ID NO: 1145474 - RNA, 19 nt, Artificial Sequence
  Description of Artificial Sequence: Synthetic oligonucleotide
uuccuaagagagaugggac

SEQ ID NO: 1145475 - RNA, 19 nt, Artificial Sequence
  Description of Artificial Sequence: Synthetic oligonucleotide
auggucgcaaguucugaac

SEQ ID NO: 1145476 - RNA, 19 nt, Artificial Sequence
  Description of Artificial Sequence: Synthetic oligonucleotide
guaucgugggucuagucug

SEQ ID NO: 1145477 - RNA, 19 nt, Artificial Sequence
  Description of Artificial Sequence: Synthetic oligonucleotide
cauucaaagcuuagaaauc

SEQ ID NO: 1145478 - RNA, 19 nt, Artificial Sequence
  Description of Artificial Sequence: Synthetic oligonucleotide
gaacaggaauccaauuagg

SEQ ID NO: 1145479 - RNA, 19 nt, Artificial Sequence
  Description of Artificial Sequence: Synthetic oligonucleotide
uguuccuaagagagauggg

SEQ ID NO: 1145480 - RNA, 19 nt, Artificial Sequence
  Description of Artificial Sequence: Synthetic oligonucleotide
aagagaacucccagcaauc

SEQ ID NO: 1145481 - RNA, 19 nt, Artificial Sequence
  Description of Artificial Sequence: Synthetic oligonucleotide
uugaaagguuaccaacugu

SEQ ID NO: 1145482 - RNA, 19 nt, Artificial Sequence
  Description of Artificial Sequence: Synthetic oligonucleotide
ugaaauucucuagaugcac

SEQ ID NO: 1145483 - RNA, 19 nt, Artificial Sequence
  Description of Artificial Sequence: Synthetic oligonucleotide
agugcaaacuugcccuugg

SEQ ID NO: 1145484 - RNA, 19 nt, Artificial Sequence
  Description of Artificial Sequence: Synthetic oligonucleotide
agguuaccaacugucaaac

SEQ ID NO: 1145485 - RNA, 19 nt, Artificial Sequence
  Description of Artificial Sequence: Synthetic oligonucleotide
uccauaaguuacaaucauc

SEQ ID NO: 1145486 - RNA, 19 nt, Artificial Sequence
  Description of Artificial Sequence: Synthetic oligonucleotide
aguggagaaauagucuuag

SEQ ID NO: 1145487 - RNA, 19 nt, Artificial Sequence
  Description of Artificial Sequence: Synthetic oligonucleotide
agugaucauauaucaguca

SEQ ID NO: 1145488 - RNA, 19 nt, Artificial Sequence
  Description of Artificial Sequence: Synthetic oligonucleotide
ucucucauugaaguaacac

SEQ ID NO: 1145489 - RNA, 19 nt, Artificial Sequence
  Description of Artificial Sequence: Synthetic oligonucleotide
auaccaccaugacauuggc

SEQ ID NO: 1145490 - RNA, 19 nt, Artificial Sequence
  Description of Artificial Sequence: Synthetic oligonucleotide
gaagcuaaguacauggaaa

SEQ ID NO: 1145491 - RNA, 19 nt, Artificial Sequence
  Description of Artificial Sequence: Synthetic oligonucleotide
cuauuggaaugaacuaaag

SEQ ID NO: 1145492 - RNA, 19 nt, Artificial Sequence
  Description of Artificial Sequence: Synthetic oligonucleotide
auauggaauccacaagcgu

SEQ ID NO: 1145493 - RNA, 19 nt, Artificial Sequence
  Description of Artificial Sequence: Synthetic oligonucleotide
cauuccauaggaucuuaac

SEQ ID NO: 1145494 - RNA, 19 nt, Artificial Sequence
  Description of Artificial Sequence: Synthetic oligonucleotide
cuuaaccccuucuaaaaca

SEQ ID NO: 1145495 - RNA, 19 nt, Artificial Sequence
  Description of Artificial Sequence: Synthetic oligonucleotide
uccuaagagagaugggacu

SEQ ID NO: 1145496 - RNA, 19 nt, Artificial Sequence
  Description of Artificial Sequence: Synthetic oligonucleotide
aucuuaaccccuucuaaaa

SEQ ID NO: 1145497 - RNA, 19 nt, Artificial Sequence
  Description of Artificial Sequence: Synthetic oligonucleotide
uguaggagguguaaagauu

SEQ ID NO: 1145498 - RNA, 19 nt, Artificial Sequence
  Description of Artificial Sequence: Synthetic oligonucleotide
ugugccuugguccaugcuu

SEQ ID NO: 1145499 - RNA, 19 nt, Artificial Sequence
  Description of Artificial Sequence: Synthetic oligonucleotide
aucaucaugucaacacuac

SEQ ID NO: 1145500 - RNA, 19 nt, Artificial Sequence
  Description of Artificial Sequence: Synthetic oligonucleotide
ucgcauaugcugucucugg

SEQ ID NO: 1145501 - RNA, 19 nt, Artificial Sequence
  Description of Artificial Sequence: Synthetic oligonucleotide
gaucauauaucagucagcu

SEQ ID NO: 1145502 - RNA, 19 nt, Artificial Sequence
  Description of Artificial Sequence: Synthetic oligonucleotide
aguuuggaagcuaaguaca

SEQ ID NO: 1145503 - RNA, 19 nt, Artificial Sequence
  Description of Artificial Sequence: Synthetic oligonucleotide
cuuacauauggaauccaca

SEQ ID NO: 1145504 - RNA, 19 nt, Artificial Sequence
  Description of Artificial Sequence: Synthetic oligonucleotide
uaucgugggucuagucugg

SEQ ID NO: 1145505 - RNA, 19 nt, Artificial Sequence
  Description of Artificial Sequence: Synthetic oligonucleotide
uggucgcaaguucugaacu

SEQ ID NO: 1145506 - RNA, 19 nt, Artificial Sequence
  Description of Artificial Sequence: Synthetic oligonucleotide
gauuagauuccuuccccuc

SEQ ID NO: 1145507 - RNA, 19 nt, Artificial Sequence
  Description of Artificial Sequence: Synthetic oligonucleotide
acccagugaucauauauca

SEQ ID NO: 1145508 - RNA, 19 nt, Artificial Sequence
  Description of Artificial Sequence: Synthetic oligonucleotide
guaguuguaaaacaccccu

SEQ ID NO: 1145509 - RNA, 19 nt, Artificial Sequence
  Description of Artificial Sequence: Synthetic oligonucleotide
uugucccuuaacuccagug

SEQ ID NO: 1145510 - RNA, 19 nt, Artificial Sequence
  Description of Artificial Sequence: Synthetic oligonucleotide
uuacaaucaucuucaggaa

SEQ ID NO: 1145511 - RNA, 19 nt, Artificial Sequence
  Description of Artificial Sequence: Synthetic oligonucleotide
uaaccagagagauuagauu

SEQ ID NO: 1145512 - RNA, 19 nt, Artificial Sequence
  Description of Artificial Sequence: Synthetic oligonucleotide
augcaccaguaccaaacac

SEQ ID NO: 1145513 - RNA, 19 nt, Artificial Sequence
  Description of Artificial Sequence: Synthetic oligonucleotide
uuaacucuucgggagaaaa

SEQ ID NO: 1145514 - RNA, 19 nt, Artificial Sequence
  Description of Artificial Sequence: Synthetic oligonucleotide
cauauaucagucagcuguc

SEQ ID NO: 1145515 - RNA, 19 nt, Artificial Sequence
  Description of Artificial Sequence: Synthetic oligonucleotide
ugauugguacggaaagaaa

SEQ ID NO: 1145516 - RNA, 19 nt, Artificial Sequence
  Description of Artificial Sequence: Synthetic oligonucleotide
uugugcucuuguaaaacau

SEQ ID NO: 1145517 - RNA, 19 nt, Artificial Sequence
  Description of Artificial Sequence: Synthetic oligonucleotide
ugguacggaaagaaagaaa

SEQ ID NO: 1145518 - RNA, 19 nt, Artificial Sequence
  Description of Artificial Sequence: Synthetic oligonucleotide
auugguacggaaagaaaga

SEQ ID NO: 1145519 - RNA, 19 nt, Artificial Sequence
  Description of Artificial Sequence: Synthetic oligonucleotide
uucagguguaacacuccug

SEQ ID NO: 1145520 - RNA, 19 nt, Artificial Sequence
  Description of Artificial Sequence: Synthetic oligonucleotide
cucacuggaagugaaaaca

SEQ ID NO: 1145521 - RNA, 19 nt, Artificial Sequence
  Description of Artificial Sequence: Synthetic oligonucleotide
uagaugauaguaucugcuu

SEQ ID NO: 1145522 - RNA, 19 nt, Artificial Sequence
  Description of Artificial Sequence: Synthetic oligonucleotide
uucucuagaugcaccagua

SEQ ID NO: 1145523 - RNA, 19 nt, Artificial Sequence
  Description of Artificial Sequence: Synthetic oligonucleotide
acaucuacaguacuccaua

SEQ ID NO: 1145524 - RNA, 19 nt, Artificial Sequence
  Description of Artificial Sequence: Synthetic oligonucleotide
ucgcaaguucugaacuucc

SEQ ID NO: 1145525 - RNA, 19 nt, Artificial Sequence
  Description of Artificial Sequence: Synthetic oligonucleotide
gagguguaaagauuggccu

SEQ ID NO: 1145526 - RNA, 19 nt, Artificial Sequence
  Description of Artificial Sequence: Synthetic oligonucleotide
augagacccauguuuacau

SEQ ID NO: 1145527 - RNA, 19 nt, Artificial Sequence
  Description of Artificial Sequence: Synthetic oligonucleotide
cuacauagauuauucaaua

SEQ ID NO: 1145528 - RNA, 19 nt, Artificial Sequence
  Description of Artificial Sequence: Synthetic oligonucleotide
gguacggaaagaaagaaaa

SEQ ID NO: 1145529 - RNA, 19 nt, Artificial Sequence
  Description of Artificial Sequence: Synthetic oligonucleotide
aguccauaaguuacaauca

SEQ ID NO: 1145530 - RNA, 19 nt, Artificial Sequence
  Description of Artificial Sequence: Synthetic oligonucleotide
ucccuuaacuccaguguga

SEQ ID NO: 1145531 - RNA, 19 nt, Artificial Sequence
  Description of Artificial Sequence: Synthetic oligonucleotide
acaauucccauggaggggu

SEQ ID NO: 1145532 - RNA, 19 nt, Artificial Sequence
  Description of Artificial Sequence: Synthetic oligonucleotide
agauggaauagaugauagu

SEQ ID NO: 1145533 - RNA, 19 nt, Artificial Sequence
  Description of Artificial Sequence: Synthetic oligonucleotide
aguaagauggucgcaaguu

SEQ ID NO: 1145534 - RNA, 19 nt, Artificial Sequence
  Description of Artificial Sequence: Synthetic oligonucleotide
acucuucgggagaaaaugg

SEQ ID NO: 1145535 - RNA, 19 nt, Artificial Sequence
  Description of Artificial Sequence: Synthetic oligonucleotide
uuuuccggcuucgaugccc

SEQ ID NO: 1145536 - RNA, 19 nt, Artificial Sequence
  Description of Artificial Sequence: Synthetic oligonucleotide
aguauacucuuauuauauu

SEQ ID NO: 1145537 - RNA, 19 nt, Artificial Sequence
  Description of Artificial Sequence: Synthetic oligonucleotide
aaaugguugugcucuugua

SEQ ID NO: 1145538 - RNA, 19 nt, Artificial Sequence
  Description of Artificial Sequence: Synthetic oligonucleotide
ccugaaauaagagugacca

SEQ ID NO: 1145539 - RNA, 19 nt, Artificial Sequence
  Description of Artificial Sequence: Synthetic oligonucleotide
uaaccccuucuaaaacacc

SEQ ID NO: 1145540 - RNA, 19 nt, Artificial Sequence
  Description of Artificial Sequence: Synthetic oligonucleotide
auccaauuaggaagaagag

SEQ ID NO: 1145541 - RNA, 19 nt, Artificial Sequence
  Description of Artificial Sequence: Synthetic oligonucleotide
caucauugacacaccugcc

SEQ ID NO: 1145542 - RNA, 19 nt, Artificial Sequence
  Description of Artificial Sequence: Synthetic oligonucleotide
ucugauugguacggaaaga

SEQ ID NO: 1145543 - RNA, 19 nt, Artificial Sequence
  Description of Artificial Sequence: Synthetic oligonucleotide
gaaagguuaccaacuguca

SEQ ID NO: 1145544 - RNA, 19 nt, Artificial Sequence
  Description of Artificial Sequence: Synthetic oligonucleotide
ggagguguaaagauuggcc

SEQ ID NO: 1145545 - RNA, 19 nt, Artificial Sequence
  Description of Artificial Sequence: Synthetic oligonucleotide
ccacaauucccauggaggg

SEQ ID NO: 1145546 - RNA, 19 nt, Artificial Sequence
  Description of Artificial Sequence: Synthetic oligonucleotide
uagggaaccuuuuccggcu

SEQ ID NO: 1145547 - RNA, 19 nt, Artificial Sequence
  Description of Artificial Sequence: Synthetic oligonucleotide
uggugagccuuaaaaggaa

SEQ ID NO: 1145548 - RNA, 19 nt, Artificial Sequence
  Description of Artificial Sequence: Synthetic oligonucleotide
aucauauaucagucagcug

SEQ ID NO: 1145549 - RNA, 19 nt, Artificial Sequence
  Description of Artificial Sequence: Synthetic oligonucleotide
gaugcaccaguaccaaaca

SEQ ID NO: 1145550 - RNA, 19 nt, Artificial Sequence
  Description of Artificial Sequence: Synthetic oligonucleotide
caguaccaaacacauccag

SEQ ID NO: 1145551 - RNA, 19 nt, Artificial Sequence
  Description of Artificial Sequence: Synthetic oligonucleotide
uucgcauaugcugucucug

SEQ ID NO: 1145552 - RNA, 19 nt, Artificial Sequence
  Description of Artificial Sequence: Synthetic oligonucleotide
gaauccacaagcguccuaa

SEQ ID NO: 1145553 - RNA, 19 nt, Artificial Sequence
  Description of Artificial Sequence: Synthetic oligonucleotide
uugguacggaaagaaagaa

SEQ ID NO: 1145554 - RNA, 19 nt, Artificial Sequence
  Description of Artificial Sequence: Synthetic oligonucleotide
gucaaacuggcccaaagcu

SEQ ID NO: 1145555 - RNA, 19 nt, Artificial Sequence
  Description of Artificial Sequence: Synthetic oligonucleotide
accuacuaugccuguagga

SEQ ID NO: 1145556 - RNA, 19 nt, Artificial Sequence
  Description of Artificial Sequence: Synthetic oligonucleotide
uugaauccauguacccgug

SEQ ID NO: 1145557 - RNA, 19 nt, Artificial Sequence
  Description of Artificial Sequence: Synthetic oligonucleotide
agaaauagucuuagcuuug

SEQ ID NO: 1145558 - RNA, 19 nt, Artificial Sequence
  Description of Artificial Sequence: Synthetic oligonucleotide
ugaauccauguacccguga

SEQ ID NO: 1145559 - RNA, 19 nt, Artificial Sequence
  Description of Artificial Sequence: Synthetic oligonucleotide
gcuaugaagaguucacuca

SEQ ID NO: 1145560 - RNA, 19 nt, Artificial Sequence
  Description of Artificial Sequence: Synthetic oligonucleotide
uagcuuugaccaagaauuc

SEQ ID NO: 1145561 - RNA, 19 nt, Artificial Sequence
  Description of Artificial Sequence: Synthetic oligonucleotide
guauacucuuauuauauuu

SEQ ID NO: 1145562 - RNA, 19 nt, Artificial Sequence
  Description of Artificial Sequence: Synthetic oligonucleotide
ucgaugcccuuaaaauaca

SEQ ID NO: 1145563 - RNA, 19 nt, Artificial Sequence
  Description of Artificial Sequence: Synthetic oligonucleotide
uuugaccaagaauucuauu

SEQ ID NO: 1145564 - RNA, 19 nt, Artificial Sequence
  Description of Artificial Sequence: Synthetic oligonucleotide
uaguaucugcuugaggaaa

SEQ ID NO: 1145565 - RNA, 19 nt, Artificial Sequence
  Description of Artificial Sequence: Synthetic oligonucleotide
uccauaacggcugcaugga

SEQ ID NO: 1145566 - RNA, 19 nt, Artificial Sequence
  Description of Artificial Sequence: Synthetic oligonucleotide
aagauggucgcaaguucug

SEQ ID NO: 1145567 - RNA, 19 nt, Artificial Sequence
  Description of Artificial Sequence: Synthetic oligonucleotide
ccuuggugagccuuaaaag

SEQ ID NO: 1145568 - RNA, 19 nt, Artificial Sequence
  Description of Artificial Sequence: Synthetic oligonucleotide
cuucccuacaauaaaccua

SEQ ID NO: 1145569 - RNA, 19 nt, Artificial Sequence
  Description of Artificial Sequence: Synthetic oligonucleotide
cuucgaugcccuuaaaaua

SEQ ID NO: 1145570 - RNA, 19 nt, Artificial Sequence
  Description of Artificial Sequence: Synthetic oligonucleotide
ccuacuaugccuguaggag

SEQ ID NO: 1145571 - RNA, 19 nt, Artificial Sequence
  Description of Artificial Sequence: Synthetic oligonucleotide
uaguuguaaaacaccccuu

SEQ ID NO: 1145572 - RNA, 19 nt, Artificial Sequence
  Description of Artificial Sequence: Synthetic oligonucleotide
ucuuagcuuugaccaagaa

SEQ ID NO: 1145573 - RNA, 19 nt, Artificial Sequence
  Description of Artificial Sequence: Synthetic oligonucleotide
uucuggcuacagaggaagc

SEQ ID NO: 1145574 - RNA, 19 nt, Artificial Sequence
  Description of Artificial Sequence: Synthetic oligonucleotide
guaacacuccugugaacac

SEQ ID NO: 1145575 - RNA, 19 nt, Artificial Sequence
  Description of Artificial Sequence: Synthetic oligonucleotide
guguugaauauaauuaacu

SEQ ID NO: 1145576 - RNA, 19 nt, Artificial Sequence
  Description of Artificial Sequence: Synthetic oligonucleotide
uggugaaacacaguccaua

SEQ ID NO: 1145577 - RNA, 19 nt, Artificial Sequence
  Description of Artificial Sequence: Synthetic oligonucleotide
gcuacagaaauccauucaa

SEQ ID NO: 1145578 - RNA, 19 nt, Artificial Sequence
  Description of Artificial Sequence: Synthetic oligonucleotide
agguguaaagauuggccuu

SEQ ID NO: 1145579 - RNA, 19 nt, Artificial Sequence
  Description of Artificial Sequence: Synthetic oligonucleotide
uuuccggcuucgaugcccu

SEQ ID NO: 1145580 - RNA, 19 nt, Artificial Sequence
  Description of Artificial Sequence: Synthetic oligonucleotide
uggcccaaagcucuuucau

SEQ ID NO: 1145581 - RNA, 19 nt, Artificial Sequence
  Description of Artificial Sequence: Synthetic oligonucleotide
agcuaaguacauggaaaug

SEQ ID NO: 1145582 - RNA, 19 nt, Artificial Sequence
  Description of Artificial Sequence: Synthetic oligonucleotide
gcuuaauuauuaagcaaug

SEQ ID NO: 1145583 - RNA, 19 nt, Artificial Sequence
  Description of Artificial Sequence: Synthetic oligonucleotide
gauggucgcaaguucugaa

SEQ ID NO: 1145584 - RNA, 19 nt, Artificial Sequence
  Description of Artificial Sequence: Synthetic oligonucleotide
ugguugugcucuuguaaaa

SEQ ID NO: 1145585 - RNA, 19 nt, Artificial Sequence
  Description of Artificial Sequence: Synthetic oligonucleotide
aagaguucacucacuggaa

SEQ ID NO: 1145586 - RNA, 19 nt, Artificial Sequence
  Description of Artificial Sequence: Synthetic oligonucleotide
uacccgugauguuuuguaa

SEQ ID NO: 1145587 - RNA, 19 nt, Artificial Sequence
  Description of Artificial Sequence: Synthetic oligonucleotide
cuuucgcauaugcugucuc

SEQ ID NO: 1145588 - RNA, 19 nt, Artificial Sequence
  Description of Artificial Sequence: Synthetic oligonucleotide
uggcuacagaggaagcuua

SEQ ID NO: 1145589 - RNA, 19 nt, Artificial Sequence
  Description of Artificial Sequence: Synthetic oligonucleotide
uagucuuagcuuugaccaa

SEQ ID NO: 1145590 - RNA, 19 nt, Artificial Sequence
  Description of Artificial Sequence: Synthetic oligonucleotide
agagaacucccagcaauca

SEQ ID NO: 1145591 - RNA, 19 nt, Artificial Sequence
  Description of Artificial Sequence: Synthetic oligonucleotide
aacggcugcauggaagcaa

SEQ ID NO: 1145592 - RNA, 19 nt, Artificial Sequence
  Description of Artificial Sequence: Synthetic oligonucleotide
gccacaauagcaugcugug

SEQ ID NO: 1145593 - RNA, 19 nt, Artificial Sequence
  Description of Artificial Sequence: Synthetic oligonucleotide
gguguaacacuccugugaa

SEQ ID NO: 1145594 - RNA, 19 nt, Artificial Sequence
  Description of Artificial Sequence: Synthetic oligonucleotide
ugagacccauguuuacauc

SEQ ID NO: 1145595 - RNA, 19 nt, Artificial Sequence
  Description of Artificial Sequence: Synthetic oligonucleotide
cugucuguugucccuuaac

SEQ ID NO: 1145596 - RNA, 19 nt, Artificial Sequence
  Description of Artificial Sequence: Synthetic oligonucleotide
gugaaauucucuagaugca

SEQ ID NO: 1145597 - RNA, 19 nt, Artificial Sequence
  Description of Artificial Sequence: Synthetic oligonucleotide
accccuuuuaggugagaca

SEQ ID NO: 1145598 - RNA, 19 nt, Artificial Sequence
  Description of Artificial Sequence: Synthetic oligonucleotide
cugauugguacggaaagaa

SEQ ID NO: 1145599 - RNA, 19 nt, Artificial Sequence
  Description of Artificial Sequence: Synthetic oligonucleotide
acuuccauaacggcugcau

SEQ ID NO: 1145600 - RNA, 19 nt, Artificial Sequence
  Description of Artificial Sequence: Synthetic oligonucleotide
cccuucuaaaacaccaaug

SEQ ID NO: 1145601 - RNA, 19 nt, Artificial Sequence
  Description of Artificial Sequence: Synthetic oligonucleotide
uguguaucgugggucuagu

SEQ ID NO: 1145602 - RNA, 19 nt, Artificial Sequence
  Description of Artificial Sequence: Synthetic oligonucleotide
uugcgguucaugagugcaa

SEQ ID NO: 1145603 - RNA, 19 nt, Artificial Sequence
  Description of Artificial Sequence: Synthetic oligonucleotide
acaguccauaaguuacaau

SEQ ID NO: 1145604 - RNA, 19 nt, Artificial Sequence
  Description of Artificial Sequence: Synthetic oligonucleotide
cuguguaucgugggucuag

SEQ ID NO: 1145605 - RNA, 19 nt, Artificial Sequence
  Description of Artificial Sequence: Synthetic oligonucleotide
uguacccgugauguuuugu

SEQ ID NO: 1145606 - RNA, 19 nt, Artificial Sequence
  Description of Artificial Sequence: Synthetic oligonucleotide
cacagauugaauccaugua

SEQ ID NO: 1145607 - RNA, 19 nt, Artificial Sequence
  Description of Artificial Sequence: Synthetic oligonucleotide
gaguaagaaugggugggga

SEQ ID NO: 1145608 - RNA, 19 nt, Artificial Sequence
  Description of Artificial Sequence: Synthetic oligonucleotide
aucccugaaauaagaguga

SEQ ID NO: 1145609 - RNA, 19 nt, Artificial Sequence
  Description of Artificial Sequence: Synthetic oligonucleotide
aacaccccuuuuaggugag

SEQ ID NO: 1145610 - RNA, 19 nt, Artificial Sequence
  Description of Artificial Sequence: Synthetic oligonucleotide
aguaucugcuugaggaaaa

SEQ ID NO: 1145611 - RNA, 19 nt, Artificial Sequence
  Description of Artificial Sequence: Synthetic oligonucleotide
gagaugggacugucagcug

SEQ ID NO: 1145612 - RNA, 19 nt, Artificial Sequence
  Description of Artificial Sequence: Synthetic oligonucleotide
guacccgugauguuuugua

SEQ ID NO: 1145613 - RNA, 19 nt, Artificial Sequence
  Description of Artificial Sequence: Synthetic oligonucleotide
ugcgguucaugagugcaaa

SEQ ID NO: 1145614 - RNA, 19 nt, Artificial Sequence
  Description of Artificial Sequence: Synthetic oligonucleotide
cuccggugugacaacugug

SEQ ID NO: 1145615 - RNA, 19 nt, Artificial Sequence
  Description of Artificial Sequence: Synthetic oligonucleotide
gucgcaaguucugaacuuc

SEQ ID NO: 1145616 - RNA, 19 nt, Artificial Sequence
  Description of Artificial Sequence: Synthetic oligonucleotide
gcuuacauauggaauccac

SEQ ID NO: 1145617 - RNA, 19 nt, Artificial Sequence
  Description of Artificial Sequence: Synthetic oligonucleotide
acuuucgcauaugcugucu

SEQ ID NO: 1145618 - RNA, 19 nt, Artificial Sequence
  Description of Artificial Sequence: Synthetic oligonucleotide
ccaaauaauaugagaccca

SEQ ID NO: 1145619 - RNA, 19 nt, Artificial Sequence
  Description of Artificial Sequence: Synthetic oligonucleotide
caccccuuuuaggugagac

SEQ ID NO: 1145620 - RNA, 19 nt, Artificial Sequence
  Description of Artificial Sequence: Synthetic oligonucleotide
ggugagacauuugaaaggu

SEQ ID NO: 1145621 - RNA, 19 nt, Artificial Sequence
  Description of Artificial Sequence: Synthetic oligonucleotide
ccacaagcguccuaaccag

SEQ ID NO: 1145622 - RNA, 19 nt, Artificial Sequence
  Description of Artificial Sequence: Synthetic oligonucleotide
agauggucgcaaguucuga

SEQ ID NO: 1145623 - RNA, 19 nt, Artificial Sequence
  Description of Artificial Sequence: Synthetic oligonucleotide
caaauaauaugagacccau

SEQ ID NO: 1145624 - RNA, 19 nt, Artificial Sequence
  Description of Artificial Sequence: Synthetic oligonucleotide
cacuggaagugaaaacaaa

SEQ ID NO: 1145625 - RNA, 19 nt, Artificial Sequence
  Description of Artificial Sequence: Synthetic oligonucleotide
cuggugaguaagaaugggu

SEQ ID NO: 1145626 - RNA, 19 nt, Artificial Sequence
  Description of Artificial Sequence: Synthetic oligonucleotide
cacuuucgcauaugcuguc

SEQ ID NO: 1145627 - RNA, 19 nt, Artificial Sequence
  Description of Artificial Sequence: Synthetic oligonucleotide
cccugaaauaagagugacc

SEQ ID NO: 1145628 - RNA, 19 nt, Artificial Sequence
  Description of Artificial Sequence: Synthetic oligonucleotide
guguaacacuccugugaac

SEQ ID NO: 1145629 - RNA, 19 nt, Artificial Sequence
  Description of Artificial Sequence: Synthetic oligonucleotide
agcuuagaaaucacagauu

SEQ ID NO: 1145630 - RNA, 19 nt, Artificial Sequence
  Description of Artificial Sequence: Synthetic oligonucleotide
cuguaggagguguaaagau

SEQ ID NO: 1145631 - RNA, 19 nt, Artificial Sequence
  Description of Artificial Sequence: Synthetic oligonucleotide
cccagugaucauauaucag

SEQ ID NO: 1145632 - RNA, 19 nt, Artificial Sequence
  Description of Artificial Sequence: Synthetic oligonucleotide
cuuugaccaagaauucuau

SEQ ID NO: 1145633 - RNA, 19 nt, Artificial Sequence
  Description of Artificial Sequence: Synthetic oligonucleotide
cuacagaggaagcuuaauu

SEQ ID NO: 1145634 - RNA, 19 nt, Artificial Sequence
  Description of Artificial Sequence: Synthetic oligonucleotide
gcaaauugcuguagagaug

SEQ ID NO: 1145635 - RNA, 19 nt, Artificial Sequence
  Description of Artificial Sequence: Synthetic oligonucleotide
ccaguaagauggucgcaag

SEQ ID NO: 1145636 - RNA, 19 nt, Artificial Sequence
  Description of Artificial Sequence: Synthetic oligonucleotide
cucuucgggagaaaauggu

SEQ ID NO: 1145637 - RNA, 19 nt, Artificial Sequence
  Description of Artificial Sequence: Synthetic oligonucleotide
auguacccgugauguuuug

SEQ ID NO: 1145638 - RNA, 19 nt, Artificial Sequence
  Description of Artificial Sequence: Synthetic oligonucleotide
uaacggcugcauggaagca

SEQ ID NO: 1145639 - RNA, 19 nt, Artificial Sequence
  Description of Artificial Sequence: Synthetic oligonucleotide
ggcuucgaugcccuuaaaa

SEQ ID NO: 1145640 - RNA, 19 nt, Artificial Sequence
  Description of Artificial Sequence: Synthetic oligonucleotide
gcuguagagauggaauaga

SEQ ID NO: 1145641 - RNA, 19 nt, Artificial Sequence
  Description of Artificial Sequence: Synthetic oligonucleotide
gcuuugcgguucaugagug

SEQ ID NO: 1145642 - RNA, 19 nt, Artificial Sequence
  Description of Artificial Sequence: Synthetic oligonucleotide
uggaaaugguugugcucuu

SEQ ID NO: 1145643 - RNA, 19 nt, Artificial Sequence
  Description of Artificial Sequence: Synthetic oligonucleotide
caagcguccuaaccagaga

SEQ ID NO: 1145644 - RNA, 19 nt, Artificial Sequence
  Description of Artificial Sequence: Synthetic oligonucleotide
guguaucgugggucuaguc

SEQ ID NO: 1145645 - RNA, 19 nt, Artificial Sequence
  Description of Artificial Sequence: Synthetic oligonucleotide
gcuuugaccaagaauucua

SEQ ID NO: 1145646 - RNA, 19 nt, Artificial Sequence
  Description of Artificial Sequence: Synthetic oligonucleotide
caccaguaccaaacacauc

SEQ ID NO: 1145647 - RNA, 19 nt, Artificial Sequence
  Description of Artificial Sequence: Synthetic oligonucleotide
ggaaaugguugugcucuug

SEQ ID NO: 1145648 - RNA, 19 nt, Artificial Sequence
  Description of Artificial Sequence: Synthetic oligonucleotide
gagcuaugaagaguucacu

SEQ ID NO: 1145649 - RNA, 19 nt, Artificial Sequence
  Description of Artificial Sequence: Synthetic oligonucleotide
cagugcuuugcgguucaug

SEQ ID NO: 1145650 - RNA, 19 nt, Artificial Sequence
  Description of Artificial Sequence: Synthetic oligonucleotide
cacaagcguccuaaccaga

SEQ ID NO: 1145651 - RNA, 19 nt, Artificial Sequence
  Description of Artificial Sequence: Synthetic oligonucleotide
acacuacaugguccagaau

SEQ ID NO: 1145652 - RNA, 19 nt, Artificial Sequence
  Description of Artificial Sequence: Synthetic oligonucleotide
agcguccuaaccagagaga

SEQ ID NO: 1145653 - RNA, 19 nt, Artificial Sequence
  Description of Artificial Sequence: Synthetic oligonucleotide
cacaucuacaguacuccau

SEQ ID NO: 1145654 - RNA, 19 nt, Artificial Sequence
  Description of Artificial Sequence: Synthetic oligonucleotide
acaguacuccauagcuaca

SEQ ID NO: 1145655 - RNA, 19 nt, Artificial Sequence
  Description of Artificial Sequence: Synthetic oligonucleotide
caauucccauggagggguc

SEQ ID NO: 1145656 - RNA, 19 nt, Artificial Sequence
  Description of Artificial Sequence: Synthetic oligonucleotide
cagaggaagcuuaauuauu

SEQ ID NO: 1145657 - RNA, 19 nt, Artificial Sequence
  Description of Artificial Sequence: Synthetic oligonucleotide
uccccucggcuuucccuug

SEQ ID NO: 1145658 - RNA, 19 nt, Artificial Sequence
  Description of Artificial Sequence: Synthetic oligonucleotide
aggggucuccacaucuaca

SEQ ID NO: 1145659 - RNA, 19 nt, Artificial Sequence
  Description of Artificial Sequence: Synthetic oligonucleotide
uggauaccaccaugacauu

SEQ ID NO: 1145660 - RNA, 19 nt, Artificial Sequence
  Description of Artificial Sequence: Synthetic oligonucleotide
caguaagauggucgcaagu

SEQ ID NO: 1145661 - RNA, 19 nt, Artificial Sequence
  Description of Artificial Sequence: Synthetic oligonucleotide
cauguacccgugauguuuu

SEQ ID NO: 1145662 - RNA, 19 nt, Artificial Sequence
  Description of Artificial Sequence: Synthetic oligonucleotide
auggugaaacacaguccau

SEQ ID NO: 1145663 - RNA, 19 nt, Artificial Sequence
  Description of Artificial Sequence: Synthetic oligonucleotide
cuaagagagaugggacugu

SEQ ID NO: 1145664 - RNA, 19 nt, Artificial Sequence
  Description of Artificial Sequence: Synthetic oligonucleotide
caaaccuacuaugccugua

SEQ ID NO: 1145665 - RNA, 19 nt, Artificial Sequence
  Description of Artificial Sequence: Synthetic oligonucleotide
gcauucaaacugagcuaug

SEQ ID NO: 1145666 - RNA, 19 nt, Artificial Sequence
  Description of Artificial Sequence: Synthetic oligonucleotide
accaugacauuggcccaaa

SEQ ID NO: 1145667 - RNA, 19 nt, Artificial Sequence
  Description of Artificial Sequence: Synthetic oligonucleotide
cccuacaauaaaccuaagu

SEQ ID NO: 1145668 - RNA, 19 nt, Artificial Sequence
  Description of Artificial Sequence: Synthetic oligonucleotide
cuaugccuguaggaggugu

SEQ ID NO: 1145669 - RNA, 19 nt, Artificial Sequence
  Description of Artificial Sequence: Synthetic oligonucleotide
ccacaucuacaguacucca

SEQ ID NO: 1145670 - RNA, 19 nt, Artificial Sequence
  Description of Artificial Sequence: Synthetic oligonucleotide
gcaccaguaccaaacacau

SEQ ID NO: 1145671 - RNA, 19 nt, Artificial Sequence
  Description of Artificial Sequence: Synthetic oligonucleotide
caccaugacauuggcccaa

SEQ ID NO: 1145672 - RNA, 19 nt, Artificial Sequence
  Description of Artificial Sequence: Synthetic oligonucleotide
guguaaagauuggccuuua

SEQ ID NO: 1145673 - RNA, 19 nt, Artificial Sequence
  Description of Artificial Sequence: Synthetic oligonucleotide
cuggcuacagaggaagcuu

SEQ ID NO: 1145674 - RNA, 19 nt, Artificial Sequence
  Description of Artificial Sequence: Synthetic oligonucleotide
ggaauccaauuaggaagaa

SEQ ID NO: 1145675 - RNA, 19 nt, Artificial Sequence
  Description of Artificial Sequence: Synthetic oligonucleotide
ccccuuuuaggugagacau

SEQ ID NO: 1145676 - RNA, 19 nt, Artificial Sequence
  Description of Artificial Sequence: Synthetic oligonucleotide
ccauaggaucuuaaccccu

SEQ ID NO: 1145677 - RNA, 19 nt, Artificial Sequence
  Description of Artificial Sequence: Synthetic oligonucleotide
ggucgcaaguucugaacuu

SEQ ID NO: 1145678 - RNA, 19 nt, Artificial Sequence
  Description of Artificial Sequence: Synthetic oligonucleotide
ccaccaugacauuggccca

SEQ ID NO: 1145679 - RNA, 19 nt, Artificial Sequence
  Description of Artificial Sequence: Synthetic oligonucleotide
acaccccuuuuaggugaga

SEQ ID NO: 1145680 - RNA, 19 nt, Artificial Sequence
  Description of Artificial Sequence: Synthetic oligonucleotide
cccuuaacuccagugugaa

SEQ ID NO: 1145681 - RNA, 19 nt, Artificial Sequence
  Description of Artificial Sequence: Synthetic oligonucleotide
gugagacauuugaaagguu

SEQ ID NO: 1145682 - RNA, 19 nt, Artificial Sequence
  Description of Artificial Sequence: Synthetic oligonucleotide
ccauaacggcugcauggaa

SEQ ID NO: 1145683 - RNA, 19 nt, Artificial Sequence
  Description of Artificial Sequence: Synthetic oligonucleotide
cugugccuugguccaugcu

SEQ ID NO: 1145684 - RNA, 19 nt, Artificial Sequence
  Description of Artificial Sequence: Synthetic oligonucleotide
ccccuucuaaaacaccaau

SEQ ID NO: 1145685 - RNA, 19 nt, Artificial Sequence
  Description of Artificial Sequence: Synthetic oligonucleotide
ccggugugacaacugugua

SEQ ID NO: 1145686 - RNA, 19 nt, Artificial Sequence
  Description of Artificial Sequence: Synthetic oligonucleotide
ggccccuucuguguugaau

SEQ ID NO: 1145687 - RNA, 19 nt, Artificial Sequence
  Description of Artificial Sequence: Synthetic oligonucleotide
cgaugcccuuaaaauacau

SEQ ID NO: 1145688 - RNA, 19 nt, Artificial Sequence
  Description of Artificial Sequence: Synthetic oligonucleotide
gggccccuucuguguugaa

SEQ ID NO: 1145689 - RNA, 19 nt, Artificial Sequence
  Description of Artificial Sequence: Synthetic oligonucleotide
aauuauuacaauaacuagg

SEQ ID NO: 1145690 - RNA, 19 nt, Artificial Sequence
  Description of Artificial Sequence: Synthetic oligonucleotide
uauucagggaagcagaugg

SEQ ID NO: 1145691 - RNA, 19 nt, Artificial Sequence
  Description of Artificial Sequence: Synthetic oligonucleotide
aauuucacgucuuuggcgg

SEQ ID NO: 1145692 - RNA, 19 nt, Artificial Sequence
  Description of Artificial Sequence: Synthetic oligonucleotide
uauuaaaccaacaagucac

SEQ ID NO: 1145693 - RNA, 19 nt, Artificial Sequence
  Description of Artificial Sequence: Synthetic oligonucleotide
aguaauuucacgucuuugg

SEQ ID NO: 1145694 - RNA, 19 nt, Artificial Sequence
  Description of Artificial Sequence: Synthetic oligonucleotide
aauaacuagguauuuauua

SEQ ID NO: 1145695 - RNA, 19 nt, Artificial Sequence
  Description of Artificial Sequence: Synthetic oligonucleotide
agagccaauaaauuauuac

SEQ ID NO: 1145696 - RNA, 19 nt, Artificial Sequence
  Description of Artificial Sequence: Synthetic oligonucleotide
ucgaauaccaccuggaugu

SEQ ID NO: 1145697 - RNA, 19 nt, Artificial Sequence
  Description of Artificial Sequence: Synthetic oligonucleotide
uaaucuucucgccaaagag

SEQ ID NO: 1145698 - RNA, 19 nt, Artificial Sequence
  Description of Artificial Sequence: Synthetic oligonucleotide
gacacugcaccuaagaagg

SEQ ID NO: 1145699 - RNA, 19 nt, Artificial Sequence
  Description of Artificial Sequence: Synthetic oligonucleotide
aaauuacaguuaaugaggg

SEQ ID NO: 1145700 - RNA, 19 nt, Artificial Sequence
  Description of Artificial Sequence: Synthetic oligonucleotide
uaauuucacgucuuuggcg

SEQ ID NO: 1145701 - RNA, 19 nt, Artificial Sequence
  Description of Artificial Sequence: Synthetic oligonucleotide
agcggcuccaauccgaucc

SEQ ID NO: 1145702 - RNA, 19 nt, Artificial Sequence
  Description of Artificial Sequence: Synthetic oligonucleotide
uaggugauggcaaugggcc

SEQ ID NO: 1145703 - RNA, 19 nt, Artificial Sequence
  Description of Artificial Sequence: Synthetic oligonucleotide
uuacaguuaaugaggguag

SEQ ID NO: 1145704 - RNA, 19 nt, Artificial Sequence
  Description of Artificial Sequence: Synthetic oligonucleotide
aaagggugccuccuccucc

SEQ ID NO: 1145705 - RNA, 19 nt, Artificial Sequence
  Description of Artificial Sequence: Synthetic oligonucleotide
ucacacaccaucuuggagu

SEQ ID NO: 1145706 - RNA, 19 nt, Artificial Sequence
  Description of Artificial Sequence: Synthetic oligonucleotide
aguggauccaggcugguag

SEQ ID NO: 1145707 - RNA, 19 nt, Artificial Sequence
  Description of Artificial Sequence: Synthetic oligonucleotide
uagacaacaggcuuguacu

SEQ ID NO: 1145708 - RNA, 19 nt, Artificial Sequence
  Description of Artificial Sequence: Synthetic oligonucleotide
aaugaggguaggugauggc

SEQ ID NO: 1145709 - RNA, 19 nt, Artificial Sequence
  Description of Artificial Sequence: Synthetic oligonucleotide
agcaguucugcagagaagg

SEQ ID NO: 1145710 - RNA, 19 nt, Artificial Sequence
  Description of Artificial Sequence: Synthetic oligonucleotide
gucaccauacuccacaccc

SEQ ID NO: 1145711 - RNA, 19 nt, Artificial Sequence
  Description of Artificial Sequence: Synthetic oligonucleotide
cuucauagguguuggagcc

SEQ ID NO: 1145712 - RNA, 19 nt, Artificial Sequence
  Description of Artificial Sequence: Synthetic oligonucleotide
ugcuaaggggaacaugggg

SEQ ID NO: 1145713 - RNA, 19 nt, Artificial Sequence
  Description of Artificial Sequence: Synthetic oligonucleotide
aggaagcuaacguagggag

SEQ ID NO: 1145714 - RNA, 19 nt, Artificial Sequence
  Description of Artificial Sequence: Synthetic oligonucleotide
ucuuccauacggcucacca

SEQ ID NO: 1145715 - RNA, 19 nt, Artificial Sequence
  Description of Artificial Sequence: Synthetic oligonucleotide
agcaggaguaauuucacgu

SEQ ID NO: 1145716 - RNA, 19 nt, Artificial Sequence
  Description of Artificial Sequence: Synthetic oligonucleotide
cuuuacgucuucuccagag

SEQ ID NO: 1145717 - RNA, 19 nt, Artificial Sequence
  Description of Artificial Sequence: Synthetic oligonucleotide
auuacaguuaaugagggua

SEQ ID NO: 1145718 - RNA, 19 nt, Artificial Sequence
  Description of Artificial Sequence: Synthetic oligonucleotide
gacagcgucgaauaccacc

SEQ ID NO: 1145719 - RNA, 19 nt, Artificial Sequence
  Description of Artificial Sequence: Synthetic oligonucleotide
gcugauacucccgagaucg

SEQ ID NO: 1145720 - RNA, 19 nt, Artificial Sequence
  Description of Artificial Sequence: Synthetic oligonucleotide
uagucagcggcuccaaucc

SEQ ID NO: 1145721 - RNA, 19 nt, Artificial Sequence
  Description of Artificial Sequence: Synthetic oligonucleotide
ugugucaugcagcuggagu

SEQ ID NO: 1145722 - RNA, 19 nt, Artificial Sequence
  Description of Artificial Sequence: Synthetic oligonucleotide
cugagugcgacacagaaga

SEQ ID NO: 1145723 - RNA, 19 nt, Artificial Sequence
  Description of Artificial Sequence: Synthetic oligonucleotide
guuguuacagauggagucg

SEQ ID NO: 1145724 - RNA, 19 nt, Artificial Sequence
  Description of Artificial Sequence: Synthetic oligonucleotide
aauuacaguuaaugagggu

SEQ ID NO: 1145725 - RNA, 19 nt, Artificial Sequence
  Description of Artificial Sequence: Synthetic oligonucleotide
agguauuuauuaaaccaac

SEQ ID NO: 1145726 - RNA, 19 nt, Artificial Sequence
  Description of Artificial Sequence: Synthetic oligonucleotide
uggucauagccgcugagug

SEQ ID NO: 1145727 - RNA, 19 nt, Artificial Sequence
  Description of Artificial Sequence: Synthetic oligonucleotide
uuacauggcugucaucuga

SEQ ID NO: 1145728 - RNA, 19 nt, Artificial Sequence
  Description of Artificial Sequence: Synthetic oligonucleotide
gagcaugagagacucgugc

SEQ ID NO: 1145729 - RNA, 19 nt, Artificial Sequence
  Description of Artificial Sequence: Synthetic oligonucleotide
cugucaucugacauggggc

SEQ ID NO: 1145730 - RNA, 19 nt, Artificial Sequence
  Description of Artificial Sequence: Synthetic oligonucleotide
uaagaaggcucugcuaagg

SEQ ID NO: 1145731 - RNA, 19 nt, Artificial Sequence
  Description of Artificial Sequence: Synthetic oligonucleotide
cagagucgcaucauggccg

SEQ ID NO: 1145732 - RNA, 19 nt, Artificial Sequence
  Description of Artificial Sequence: Synthetic oligonucleotide
gucaagucagaagucaggg

SEQ ID NO: 1145733 - RNA, 19 nt, Artificial Sequence
  Description of Artificial Sequence: Synthetic oligonucleotide
gucauagccgcugagugcg

SEQ ID NO: 1145734 - RNA, 19 nt, Artificial Sequence
  Description of Artificial Sequence: Synthetic oligonucleotide
gagaaugauggagguaucg

SEQ ID NO: 1145735 - RNA, 19 nt, Artificial Sequence
  Description of Artificial Sequence: Synthetic oligonucleotide
gaagucagggagaagacca

SEQ ID NO: 1145736 - RNA, 19 nt, Artificial Sequence
  Description of Artificial Sequence: Synthetic oligonucleotide
aaucgccuugcuccgcucg

SEQ ID NO: 1145737 - RNA, 19 nt, Artificial Sequence
  Description of Artificial Sequence: Synthetic oligonucleotide
guucccaugugucaugcag

SEQ ID NO: 1145738 - RNA, 19 nt, Artificial Sequence
  Description of Artificial Sequence: Synthetic oligonucleotide
uggcauuuuggccugggga

SEQ ID NO: 1145739 - RNA, 19 nt, Artificial Sequence
  Description of Artificial Sequence: Synthetic oligonucleotide
cacucucuuacaaaauuac

SEQ ID NO: 1145740 - RNA, 19 nt, Artificial Sequence
  Description of Artificial Sequence: Synthetic oligonucleotide
uggguauucagggaagcag

SEQ ID NO: 1145741 - RNA, 19 nt, Artificial Sequence
  Description of Artificial Sequence: Synthetic oligonucleotide
gagagacucgugcaugcgg

SEQ ID NO: 1145742 - RNA, 19 nt, Artificial Sequence
  Description of Artificial Sequence: Synthetic oligonucleotide
ugcacagagcaucgagugg

SEQ ID NO: 1145743 - RNA, 19 nt, Artificial Sequence
  Description of Artificial Sequence: Synthetic oligonucleotide
ucugugacagcgucgaaua

SEQ ID NO: 1145744 - RNA, 19 nt, Artificial Sequence
  Description of Artificial Sequence: Synthetic oligonucleotide
gaagcuaacguagggagga

SEQ ID NO: 1145745 - RNA, 19 nt, Artificial Sequence
  Description of Artificial Sequence: Synthetic oligonucleotide
ucgugcaugcgguucgugg

SEQ ID NO: 1145746 - RNA, 19 nt, Artificial Sequence
  Description of Artificial Sequence: Synthetic oligonucleotide
ucucaaucgccuugcuccg

SEQ ID NO: 1145747 - RNA, 19 nt, Artificial Sequence
  Description of Artificial Sequence: Synthetic oligonucleotide
agugcgacacagaagauga

SEQ ID NO: 1145748 - RNA, 19 nt, Artificial Sequence
  Description of Artificial Sequence: Synthetic oligonucleotide
uucccaugugucaugcagc

SEQ ID NO: 1145749 - RNA, 19 nt, Artificial Sequence
  Description of Artificial Sequence: Synthetic oligonucleotide
ucaagggugacuucuuaau

SEQ ID NO: 1145750 - RNA, 19 nt, Artificial Sequence
  Description of Artificial Sequence: Synthetic oligonucleotide
gucgaauaccaccuggaug

SEQ ID NO: 1145751 - RNA, 19 nt, Artificial Sequence
  Description of Artificial Sequence: Synthetic oligonucleotide
ggacacugcaccuaagaag

SEQ ID NO: 1145752 - RNA, 19 nt, Artificial Sequence
  Description of Artificial Sequence: Synthetic oligonucleotide
uggauaggacccauuauuu

SEQ ID NO: 1145753 - RNA, 19 nt, Artificial Sequence
  Description of Artificial Sequence: Synthetic oligonucleotide
aacccuguucccauguguc

SEQ ID NO: 1145754 - RNA, 19 nt, Artificial Sequence
  Description of Artificial Sequence: Synthetic oligonucleotide
agcgucgaauaccaccugg

SEQ ID NO: 1145755 - RNA, 19 nt, Artificial Sequence
  Description of Artificial Sequence: Synthetic oligonucleotide
gauccaggcugguagucag

SEQ ID NO: 1145756 - RNA, 19 nt, Artificial Sequence
  Description of Artificial Sequence: Synthetic oligonucleotide
uuuggauaggacccauuau

SEQ ID NO: 1145757 - RNA, 19 nt, Artificial Sequence
  Description of Artificial Sequence: Synthetic oligonucleotide
gacccauuauuucugcuuc

SEQ ID NO: 1145758 - RNA, 19 nt, Artificial Sequence
  Description of Artificial Sequence: Synthetic oligonucleotide
acaggggucaagucagaag

SEQ ID NO: 1145759 - RNA, 19 nt, Artificial Sequence
  Description of Artificial Sequence: Synthetic oligonucleotide
guugaagcacuccuggauc

SEQ ID NO: 1145760 - RNA, 19 nt, Artificial Sequence
  Description of Artificial Sequence: Synthetic oligonucleotide
agcaugagagacucgugca

SEQ ID NO: 1145761 - RNA, 19 nt, Artificial Sequence
  Description of Artificial Sequence: Synthetic oligonucleotide
gaaggcucugcuaagggga

SEQ ID NO: 1145762 - RNA, 19 nt, Artificial Sequence
  Description of Artificial Sequence: Synthetic oligonucleotide
uuauuacaauaacuaggua

SEQ ID NO: 1145763 - RNA, 19 nt, Artificial Sequence
  Description of Artificial Sequence: Synthetic oligonucleotide
acauggggugcccagccuc

SEQ ID NO: 1145764 - RNA, 19 nt, Artificial Sequence
  Description of Artificial Sequence: Synthetic oligonucleotide
augcucaaagggugccucc

SEQ ID NO: 1145765 - RNA, 19 nt, Artificial Sequence
  Description of Artificial Sequence: Synthetic oligonucleotide
aucuucucgccaaagaggu

SEQ ID NO: 1145766 - RNA, 19 nt, Artificial Sequence
  Description of Artificial Sequence: Synthetic oligonucleotide
aaaguauccauggcccgga

SEQ ID NO: 1145767 - RNA, 19 nt, Artificial Sequence
  Description of Artificial Sequence: Synthetic oligonucleotide
aaguauccauggcccggac

SEQ ID NO: 1145768 - RNA, 19 nt, Artificial Sequence
  Description of Artificial Sequence: Synthetic oligonucleotide
agaucgguugaagcacucc

SEQ ID NO: 1145769 - RNA, 19 nt, Artificial Sequence
  Description of Artificial Sequence: Synthetic oligonucleotide
cuuaaucuucucgccaaag

SEQ ID NO: 1145770 - RNA, 19 nt, Artificial Sequence
  Description of Artificial Sequence: Synthetic oligonucleotide
uacaauaacuagguauuua

SEQ ID NO: 1145771 - RNA, 19 nt, Artificial Sequence
  Description of Artificial Sequence: Synthetic oligonucleotide
gagugcgacacagaagaug

SEQ ID NO: 1145772 - RNA, 19 nt, Artificial Sequence
  Description of Artificial Sequence: Synthetic oligonucleotide
agaugguaggcaguggucu

SEQ ID NO: 1145773 - RNA, 19 nt, Artificial Sequence
  Description of Artificial Sequence: Synthetic oligonucleotide
guagauuucuuuguuaggu

SEQ ID NO: 1145774 - RNA, 19 nt, Artificial Sequence
  Description of Artificial Sequence: Synthetic oligonucleotide
uuaaaccaacaagucacuc

SEQ ID NO: 1145775 - RNA, 19 nt, Artificial Sequence
  Description of Artificial Sequence: Synthetic oligonucleotide
auacucccgagaucgguug

SEQ ID NO: 1145776 - RNA, 19 nt, Artificial Sequence
  Description of Artificial Sequence: Synthetic oligonucleotide
cuugcuccgcucgagggcg

SEQ ID NO: 1145777 - RNA, 19 nt, Artificial Sequence
  Description of Artificial Sequence: Synthetic oligonucleotide
ucaaucgccuugcuccgcu

SEQ ID NO: 1145778 - RNA, 19 nt, Artificial Sequence
  Description of Artificial Sequence: Synthetic oligonucleotide
ggccgugacauccucaaag

SEQ ID NO: 1145779 - RNA, 19 nt, Artificial Sequence
  Description of Artificial Sequence: Synthetic oligonucleotide
ucuuaaucuucucgccaaa

SEQ ID NO: 1145780 - RNA, 19 nt, Artificial Sequence
  Description of Artificial Sequence: Synthetic oligonucleotide
uguggguguagauuucuuu

SEQ ID NO: 1145781 - RNA, 19 nt, Artificial Sequence
  Description of Artificial Sequence: Synthetic oligonucleotide
ugucaccauacuccacacc

SEQ ID NO: 1145782 - RNA, 19 nt, Artificial Sequence
  Description of Artificial Sequence: Synthetic oligonucleotide
ucaccauacuccacaccca

SEQ ID NO: 1145783 - RNA, 19 nt, Artificial Sequence
  Description of Artificial Sequence: Synthetic oligonucleotide
uucccugcucccacuagug

SEQ ID NO: 1145784 - RNA, 19 nt, Artificial Sequence
  Description of Artificial Sequence: Synthetic oligonucleotide
agagcaucgaguggcagca

SEQ ID NO: 1145785 - RNA, 19 nt, Artificial Sequence
  Description of Artificial Sequence: Synthetic oligonucleotide
ugggacuagaaggugcaca

SEQ ID NO: 1145786 - RNA, 19 nt, Artificial Sequence
  Description of Artificial Sequence: Synthetic oligonucleotide
guaggcaguggucucuggc

SEQ ID NO: 1145787 - RNA, 19 nt, Artificial Sequence
  Description of Artificial Sequence: Synthetic oligonucleotide
ugagagacucgugcaugcg

SEQ ID NO: 1145788 - RNA, 19 nt, Artificial Sequence
  Description of Artificial Sequence: Synthetic oligonucleotide
ucccgagaucgguugaagc

SEQ ID NO: 1145789 - RNA, 19 nt, Artificial Sequence
  Description of Artificial Sequence: Synthetic oligonucleotide
accaagaaguggaaggcug

SEQ ID NO: 1145790 - RNA, 19 nt, Artificial Sequence
  Description of Artificial Sequence: Synthetic oligonucleotide
agaaggguucagugucuuc

SEQ ID NO: 1145791 - RNA, 19 nt, Artificial Sequence
  Description of Artificial Sequence: Synthetic oligonucleotide
agucgaagagcaugagaga

SEQ ID NO: 1145792 - RNA, 19 nt, Artificial Sequence
  Description of Artificial Sequence: Synthetic oligonucleotide
ugagucgccccagagucgc

SEQ ID NO: 1145793 - RNA, 19 nt, Artificial Sequence
  Description of Artificial Sequence: Synthetic oligonucleotide
cacacccaaaguauccaug

SEQ ID NO: 1145794 - RNA, 19 nt, Artificial Sequence
  Description of Artificial Sequence: Synthetic oligonucleotide
agcugauacucccgagauc

SEQ ID NO: 1145795 - RNA, 19 nt, Artificial Sequence
  Description of Artificial Sequence: Synthetic oligonucleotide
acagcgucgaauaccaccu

SEQ ID NO: 1145796 - RNA, 19 nt, Artificial Sequence
  Description of Artificial Sequence: Synthetic oligonucleotide
ucaucugacauggggcaca

SEQ ID NO: 1145797 - RNA, 19 nt, Artificial Sequence
  Description of Artificial Sequence: Synthetic oligonucleotide
ucuucagugcacagagcau

SEQ ID NO: 1145798 - RNA, 19 nt, Artificial Sequence
  Description of Artificial Sequence: Synthetic oligonucleotide
cagcaggaguaauuucacg

SEQ ID NO: 1145799 - RNA, 19 nt, Artificial Sequence
  Description of Artificial Sequence: Synthetic oligonucleotide
ucgccaaagaggucuuucu

SEQ ID NO: 1145800 - RNA, 19 nt, Artificial Sequence
  Description of Artificial Sequence: Synthetic oligonucleotide
auuaaaccaacaagucacu

SEQ ID NO: 1145801 - RNA, 19 nt, Artificial Sequence
  Description of Artificial Sequence: Synthetic oligonucleotide
cuuccauacggcucaccac

SEQ ID NO: 1145802 - RNA, 19 nt, Artificial Sequence
  Description of Artificial Sequence: Synthetic oligonucleotide
cauuuuggccuggggaagg

SEQ ID NO: 1145803 - RNA, 19 nt, Artificial Sequence
  Description of Artificial Sequence: Synthetic oligonucleotide
ggagcaccuggucauagcc

SEQ ID NO: 1145804 - RNA, 19 nt, Artificial Sequence
  Description of Artificial Sequence: Synthetic oligonucleotide
ugacauccucaaagcagug

SEQ ID NO: 1145805 - RNA, 19 nt, Artificial Sequence
  Description of Artificial Sequence: Synthetic oligonucleotide
cuuacauggcugucaucug

SEQ ID NO: 1145806 - RNA, 19 nt, Artificial Sequence
  Description of Artificial Sequence: Synthetic oligonucleotide
caugagagacucgugcaug

SEQ ID NO: 1145807 - RNA, 19 nt, Artificial Sequence
  Description of Artificial Sequence: Synthetic oligonucleotide
cagugcacagagcaucgag

SEQ ID NO: 1145808 - RNA, 19 nt, Artificial Sequence
  Description of Artificial Sequence: Synthetic oligonucleotide
cuuuggauaggacccauua

SEQ ID NO: 1145809 - RNA, 19 nt, Artificial Sequence
  Description of Artificial Sequence: Synthetic oligonucleotide
gaugguaggcaguggucuc

SEQ ID NO: 1145810 - RNA, 19 nt, Artificial Sequence
  Description of Artificial Sequence: Synthetic oligonucleotide
agcuaacguagggaggagg

SEQ ID NO: 1145811 - RNA, 19 nt, Artificial Sequence
  Description of Artificial Sequence: Synthetic oligonucleotide
gaaugauggagguaucgau

SEQ ID NO: 1145812 - RNA, 19 nt, Artificial Sequence
  Description of Artificial Sequence: Synthetic oligonucleotide
cugacauggggcacagaug

SEQ ID NO: 1145813 - RNA, 19 nt, Artificial Sequence
  Description of Artificial Sequence: Synthetic oligonucleotide
gagcaccuggucauagccg

SEQ ID NO: 1145814 - RNA, 19 nt, Artificial Sequence
  Description of Artificial Sequence: Synthetic oligonucleotide
acaguuaaugaggguaggu

SEQ ID NO: 1145815 - RNA, 19 nt, Artificial Sequence
  Description of Artificial Sequence: Synthetic oligonucleotide
cuuggaguccgccuuucuc

SEQ ID NO: 1145816 - RNA, 19 nt, Artificial Sequence
  Description of Artificial Sequence: Synthetic oligonucleotide
caguagaguccgcagcccc

SEQ ID NO: 1145817 - RNA, 19 nt, Artificial Sequence
  Description of Artificial Sequence: Synthetic oligonucleotide
ugauacucccgagaucggu

SEQ ID NO: 1145818 - RNA, 19 nt, Artificial Sequence
  Description of Artificial Sequence: Synthetic oligonucleotide
aacauggggugcccagccu

SEQ ID NO: 1145819 - RNA, 19 nt, Artificial Sequence
  Description of Artificial Sequence: Synthetic oligonucleotide
gcaggaagcuaacguaggg

SEQ ID NO: 1145820 - RNA, 19 nt, Artificial Sequence
  Description of Artificial Sequence: Synthetic oligonucleotide
gaucgguugaagcacuccu

SEQ ID NO: 1145821 - RNA, 19 nt, Artificial Sequence
  Description of Artificial Sequence: Synthetic oligonucleotide
gcuccaauccgauccaggc

SEQ ID NO: 1145822 - RNA, 19 nt, Artificial Sequence
  Description of Artificial Sequence: Synthetic oligonucleotide
agcaucgaguggcagcaga

SEQ ID NO: 1145823 - RNA, 19 nt, Artificial Sequence
  Description of Artificial Sequence: Synthetic oligonucleotide
uggccgaaagcaguucugc

SEQ ID NO: 1145824 - RNA, 19 nt, Artificial Sequence
  Description of Artificial Sequence: Synthetic oligonucleotide
aguagaguccgcagccccg

SEQ ID NO: 1145825 - RNA, 19 nt, Artificial Sequence
  Description of Artificial Sequence: Synthetic oligonucleotide
uguuuggauguaggcagcu

SEQ ID NO: 1145826 - RNA, 19 nt, Artificial Sequence
  Description of Artificial Sequence: Synthetic oligonucleotide
cuuguacugcuuuacgucu

SEQ ID NO: 1145827 - RNA, 19 nt, Artificial Sequence
  Description of Artificial Sequence: Synthetic oligonucleotide
acggcucaccacaucacac

SEQ ID NO: 1145828 - RNA, 19 nt, Artificial Sequence
  Description of Artificial Sequence: Synthetic oligonucleotide
guaggccaggagcugcuag

SEQ ID NO: 1145829 - RNA, 19 nt, Artificial Sequence
  Description of Artificial Sequence: Synthetic oligonucleotide
auggagguaucgaugaaaa

SEQ ID NO: 1145830 - RNA, 19 nt, Artificial Sequence
  Description of Artificial Sequence: Synthetic oligonucleotide
ggucaagucagaagucagg

SEQ ID NO: 1145831 - RNA, 19 nt, Artificial Sequence
  Description of Artificial Sequence: Synthetic oligonucleotide
gaauaccaccuggauguug

SEQ ID NO: 1145832 - RNA, 19 nt, Artificial Sequence
  Description of Artificial Sequence: Synthetic oligonucleotide
agggugacuucuuaaucuu

SEQ ID NO: 1145833 - RNA, 19 nt, Artificial Sequence
  Description of Artificial Sequence: Synthetic oligonucleotide
uuccuccuuacauggcugu

SEQ ID NO: 1145834 - RNA, 19 nt, Artificial Sequence
  Description of Artificial Sequence: Synthetic oligonucleotide
ucguggagcaccuggucau

SEQ ID NO: 1145835 - RNA, 19 nt, Artificial Sequence
  Description of Artificial Sequence: Synthetic oligonucleotide
caggggucaagucagaagu

SEQ ID NO: 1145836 - RNA, 19 nt, Artificial Sequence
  Description of Artificial Sequence: Synthetic oligonucleotide
ucccugagucgccccagag

SEQ ID NO: 1145837 - RNA, 19 nt, Artificial Sequence
  Description of Artificial Sequence: Synthetic oligonucleotide
gaaggugcacauaggccac

SEQ ID NO: 1145838 - RNA, 19 nt, Artificial Sequence
  Description of Artificial Sequence: Synthetic oligonucleotide
agagucgcaucauggccga

SEQ ID NO: 1145839 - RNA, 19 nt, Artificial Sequence
  Description of Artificial Sequence: Synthetic oligonucleotide
uggagcaccuggucauagc

SEQ ID NO: 1145840 - RNA, 19 nt, Artificial Sequence
  Description of Artificial Sequence: Synthetic oligonucleotide
auggccgugacauccucaa

SEQ ID NO: 1145841 - RNA, 19 nt, Artificial Sequence
  Description of Artificial Sequence: Synthetic oligonucleotide
aacguagggaggaggagua

SEQ ID NO: 1145842 - RNA, 19 nt, Artificial Sequence
  Description of Artificial Sequence: Synthetic oligonucleotide
agagacucgugcaugcggu

SEQ ID NO: 1145843 - RNA, 19 nt, Artificial Sequence
  Description of Artificial Sequence: Synthetic oligonucleotide
guucgugguuucguccucg

SEQ ID NO: 1145844 - RNA, 19 nt, Artificial Sequence
  Description of Artificial Sequence: Synthetic oligonucleotide
guagaguccgcagccccgg

SEQ ID NO: 1145845 - RNA, 19 nt, Artificial Sequence
  Description of Artificial Sequence: Synthetic oligonucleotide
ggauaggacccauuauuuc

SEQ ID NO: 1145846 - RNA, 19 nt, Artificial Sequence
  Description of Artificial Sequence: Synthetic oligonucleotide
ggcauuuuggccuggggaa

SEQ ID NO: 1145847 - RNA, 19 nt, Artificial Sequence
  Description of Artificial Sequence: Synthetic oligonucleotide
ggucauagccgcugagugc

SEQ ID NO: 1145848 - RNA, 19 nt, Artificial Sequence
  Description of Artificial Sequence: Synthetic oligonucleotide
cagaugguaggcagugguc

SEQ ID NO: 1145849 - RNA, 19 nt, Artificial Sequence
  Description of Artificial Sequence: Synthetic oligonucleotide
aagcuaacguagggaggag

SEQ ID NO: 1145850 - RNA, 19 nt, Artificial Sequence
  Description of Artificial Sequence: Synthetic oligonucleotide
cugauacucccgagaucgg

SEQ ID NO: 1145851 - RNA, 19 nt, Artificial Sequence
  Description of Artificial Sequence: Synthetic oligonucleotide
guagauuuggcagaaucau

SEQ ID NO: 1145852 - RNA, 19 nt, Artificial Sequence
  Description of Artificial Sequence: Synthetic oligonucleotide
acccauuauuucugcuucu

SEQ ID NO: 1145853 - RNA, 19 nt, Artificial Sequence
  Description of Artificial Sequence: Synthetic oligonucleotide
gggaagcagauggucaagg

SEQ ID NO: 1145854 - RNA, 19 nt, Artificial Sequence
  Description of Artificial Sequence: Synthetic oligonucleotide
gcaggaguaauuucacguc

SEQ ID NO: 1145855 - RNA, 19 nt, Artificial Sequence
  Description of Artificial Sequence: Synthetic oligonucleotide
ucgccccagagucgcauca

SEQ ID NO: 1145856 - RNA, 19 nt, Artificial Sequence
  Description of Artificial Sequence: Synthetic oligonucleotide
uccgccuuucucuccuugu

SEQ ID NO: 1145857 - RNA, 19 nt, Artificial Sequence
  Description of Artificial Sequence: Synthetic oligonucleotide
ucagcggcuccaauccgau

SEQ ID NO: 1145858 - RNA, 19 nt, Artificial Sequence
  Description of Artificial Sequence: Synthetic oligonucleotide
aggacccauuauuucugcu

SEQ ID NO: 1145859 - RNA, 19 nt, Artificial Sequence
  Description of Artificial Sequence: Synthetic oligonucleotide
uacucccgagaucgguuga

SEQ ID NO: 1145860 - RNA, 19 nt, Artificial Sequence
  Description of Artificial Sequence: Synthetic oligonucleotide
caucgaguggcagcagagc

SEQ ID NO: 1145861 - RNA, 19 nt, Artificial Sequence
  Description of Artificial Sequence: Synthetic oligonucleotide
uggaguccgccuuucucuc

SEQ ID NO: 1145862 - RNA, 19 nt, Artificial Sequence
  Description of Artificial Sequence: Synthetic oligonucleotide
ugcgguucgugguuucguc

SEQ ID NO: 1145863 - RNA, 19 nt, Artificial Sequence
  Description of Artificial Sequence: Synthetic oligonucleotide
ucgugguuucguccucgug

SEQ ID NO: 1145864 - RNA, 19 nt, Artificial Sequence
  Description of Artificial Sequence: Synthetic oligonucleotide
acccagaugguaggcagug

SEQ ID NO: 1145865 - RNA, 19 nt, Artificial Sequence
  Description of Artificial Sequence: Synthetic oligonucleotide
cucguggagcaccugguca

SEQ ID NO: 1145866 - RNA, 19 nt, Artificial Sequence
  Description of Artificial Sequence: Synthetic oligonucleotide
uccauacggcucaccacau

SEQ ID NO: 1145867 - RNA, 19 nt, Artificial Sequence
  Description of Artificial Sequence: Synthetic oligonucleotide
gcugguggcauuuuggccu

SEQ ID NO: 1145868 - RNA, 19 nt, Artificial Sequence
  Description of Artificial Sequence: Synthetic oligonucleotide
auagccgcugagugcgaca

SEQ ID NO: 1145869 - RNA, 19 nt, Artificial Sequence
  Description of Artificial Sequence: Synthetic oligonucleotide
uggagucgaagagcaugag

SEQ ID NO: 1145870 - RNA, 19 nt, Artificial Sequence
  Description of Artificial Sequence: Synthetic oligonucleotide
ugcaccuaagaaggcucug

SEQ ID NO: 1145871 - RNA, 19 nt, Artificial Sequence
  Description of Artificial Sequence: Synthetic oligonucleotide
ugguuucguccucguggag

SEQ ID NO: 1145872 - RNA, 19 nt, Artificial Sequence
  Description of Artificial Sequence: Synthetic oligonucleotide
caugcgguucgugguuucg

SEQ ID NO: 1145873 - RNA, 19 nt, Artificial Sequence
  Description of Artificial Sequence: Synthetic oligonucleotide
uagccgcugagugcgacac

SEQ ID NO: 1145874 - RNA, 19 nt, Artificial Sequence
  Description of Artificial Sequence: Synthetic oligonucleotide
gagcugauacucccgagau

SEQ ID NO: 1145875 - RNA, 19 nt, Artificial Sequence
  Description of Artificial Sequence: Synthetic oligonucleotide
ggagucgaagagcaugaga

SEQ ID NO: 1145876 - RNA, 19 nt, Artificial Sequence
  Description of Artificial Sequence: Synthetic oligonucleotide
uuucucuccuugucaccau

SEQ ID NO: 1145877 - RNA, 19 nt, Artificial Sequence
  Description of Artificial Sequence: Synthetic oligonucleotide
ucguccucguggagcaccu

SEQ ID NO: 1145878 - RNA, 19 nt, Artificial Sequence
  Description of Artificial Sequence: Synthetic oligonucleotide
uggaucccugagucgcccc

SEQ ID NO: 1145879 - RNA, 19 nt, Artificial Sequence
  Description of Artificial Sequence: Synthetic oligonucleotide
uguuggagccuggguauuc

SEQ ID NO: 1145880 - RNA, 19 nt, Artificial Sequence
  Description of Artificial Sequence: Synthetic oligonucleotide
uucgugguuucguccucgu

SEQ ID NO: 1145881 - RNA, 19 nt, Artificial Sequence
  Description of Artificial Sequence: Synthetic oligonucleotide
caggaagcuaacguaggga

SEQ ID NO: 1145882 - RNA, 19 nt, Artificial Sequence
  Description of Artificial Sequence: Synthetic oligonucleotide
guuaaugaggguaggugau

SEQ ID NO: 1145883 - RNA, 19 nt, Artificial Sequence
  Description of Artificial Sequence: Synthetic oligonucleotide
caggaguaauuucacgucu

SEQ ID NO: 1145884 - RNA, 19 nt, Artificial Sequence
  Description of Artificial Sequence: Synthetic oligonucleotide
acgucuuuggcggcgcuga

SEQ ID NO: 1145885 - RNA, 19 nt, Artificial Sequence
  Description of Artificial Sequence: Synthetic oligonucleotide
agagcaugagagacucgug

SEQ ID NO: 1145886 - RNA, 19 nt, Artificial Sequence
  Description of Artificial Sequence: Synthetic oligonucleotide
guguuuggauguaggcagc

SEQ ID NO: 1145887 - RNA, 19 nt, Artificial Sequence
  Description of Artificial Sequence: Synthetic oligonucleotide
gaucccugagucgccccag

SEQ ID NO: 1145888 - RNA, 19 nt, Artificial Sequence
  Description of Artificial Sequence: Synthetic oligonucleotide
gggucaagucagaagucag

SEQ ID NO: 1145889 - RNA, 19 nt, Artificial Sequence
  Description of Artificial Sequence: Synthetic oligonucleotide
acuagugggcccaggacuu

SEQ ID NO: 1145890 - RNA, 19 nt, Artificial Sequence
  Description of Artificial Sequence: Synthetic oligonucleotide
gccuugcuccgcucgaggg

SEQ ID NO: 1145891 - RNA, 19 nt, Artificial Sequence
  Description of Artificial Sequence: Synthetic oligonucleotide
cacuagugggcccaggacu

SEQ ID NO: 1145892 - RNA, 19 nt, Artificial Sequence
  Description of Artificial Sequence: Synthetic oligonucleotide
gcugcuaggaagggcacug

SEQ ID NO: 1145893 - RNA, 19 nt, Artificial Sequence
  Description of Artificial Sequence: Synthetic oligonucleotide
caucugacauggggcacag

SEQ ID NO: 1145894 - RNA, 19 nt, Artificial Sequence
  Description of Artificial Sequence: Synthetic oligonucleotide
cucugcuaaggggaacaug

SEQ ID NO: 1145895 - RNA, 19 nt, Artificial Sequence
  Description of Artificial Sequence: Synthetic oligonucleotide
gcuaacguagggaggagga

SEQ ID NO: 1145896 - RNA, 19 nt, Artificial Sequence
  Description of Artificial Sequence: Synthetic oligonucleotide
agucgcaucauggccgaaa

SEQ ID NO: 1145897 - RNA, 19 nt, Artificial Sequence
  Description of Artificial Sequence: Synthetic oligonucleotide
aucgccuugcuccgcucga

SEQ ID NO: 1145898 - RNA, 19 nt, Artificial Sequence
  Description of Artificial Sequence: Synthetic oligonucleotide
cuggaucccugagucgccc

SEQ ID NO: 1145899 - RNA, 19 nt, Artificial Sequence
  Description of Artificial Sequence: Synthetic oligonucleotide
gccaauaaauuauuacaau

SEQ ID NO: 1145900 - RNA, 19 nt, Artificial Sequence
  Description of Artificial Sequence: Synthetic oligonucleotide
uugcuccgcucgagggcgg

SEQ ID NO: 1145901 - RNA, 19 nt, Artificial Sequence
  Description of Artificial Sequence: Synthetic oligonucleotide
aggguucagugucuuccau

SEQ ID NO: 1145902 - RNA, 19 nt, Artificial Sequence
  Description of Artificial Sequence: Synthetic oligonucleotide
ugacagcgucgaauaccac

SEQ ID NO: 1145903 - RNA, 19 nt, Artificial Sequence
  Description of Artificial Sequence: Synthetic oligonucleotide
gauggccgugacauccuca

SEQ ID NO: 1145904 - RNA, 19 nt, Artificial Sequence
  Description of Artificial Sequence: Synthetic oligonucleotide
caccauacuccacacccaa

SEQ ID NO: 1145905 - RNA, 19 nt, Artificial Sequence
  Description of Artificial Sequence: Synthetic oligonucleotide
gccgcugagugcgacacag

SEQ ID NO: 1145906 - RNA, 19 nt, Artificial Sequence
  Description of Artificial Sequence: Synthetic oligonucleotide
agggccagccucuggguuu

SEQ ID NO: 1145907 - RNA, 19 nt, Artificial Sequence
  Description of Artificial Sequence: Synthetic oligonucleotide
gcaccuaagaaggcucugc

SEQ ID NO: 1145908 - RNA, 19 nt, Artificial Sequence
  Description of Artificial Sequence: Synthetic oligonucleotide
gcuaaggggaacauggggu

SEQ ID NO: 1145909 - RNA, 19 nt, Artificial Sequence
  Description of Artificial Sequence: Synthetic oligonucleotide
cccgagaucgguugaagca

SEQ ID NO: 1145910 - RNA, 19 nt, Artificial Sequence
  Description of Artificial Sequence: Synthetic oligonucleotide
gcaucgaguggcagcagag

SEQ ID NO: 1145911 - RNA, 19 nt, Artificial Sequence
  Description of Artificial Sequence: Synthetic oligonucleotide
uccuuacauggcugucauc

SEQ ID NO: 1145912 - RNA, 19 nt, Artificial Sequence
  Description of Artificial Sequence: Synthetic oligonucleotide
gagaucgguugaagcacuc

SEQ ID NO: 1145913 - RNA, 19 nt, Artificial Sequence
  Description of Artificial Sequence: Synthetic oligonucleotide
gcgguucgugguuucgucc

SEQ ID NO: 1145914 - RNA, 19 nt, Artificial Sequence
  Description of Artificial Sequence: Synthetic oligonucleotide
uagaguccgcagccccgga

SEQ ID NO: 1145915 - RNA, 19 nt, Artificial Sequence
  Description of Artificial Sequence: Synthetic oligonucleotide
cuuuggcggcgcugaugcc

SEQ ID NO: 1145916 - RNA, 19 nt, Artificial Sequence
  Description of Artificial Sequence: Synthetic oligonucleotide
ccgaaagcaguucugcaga

SEQ ID NO: 1145917 - RNA, 19 nt, Artificial Sequence
  Description of Artificial Sequence: Synthetic oligonucleotide
ucacgucuuuggcggcgcu

SEQ ID NO: 1145918 - RNA, 19 nt, Artificial Sequence
  Description of Artificial Sequence: Synthetic oligonucleotide
cauggccgaaagcaguucu

SEQ ID NO: 1145919 - RNA, 19 nt, Artificial Sequence
  Description of Artificial Sequence: Synthetic oligonucleotide
ucgccuugcuccgcucgag

SEQ ID NO: 1145920 - RNA, 19 nt, Artificial Sequence
  Description of Artificial Sequence: Synthetic oligonucleotide
gguucccugcucccacuag

SEQ ID NO: 1145921 - RNA, 19 nt, Artificial Sequence
  Description of Artificial Sequence: Synthetic oligonucleotide
uggcccggacgauggcugc

SEQ ID NO: 1145922 - RNA, 19 nt, Artificial Sequence
  Description of Artificial Sequence: Synthetic oligonucleotide
gucagcggcuccaauccga

SEQ ID NO: 1145923 - RNA, 19 nt, Artificial Sequence
  Description of Artificial Sequence: Synthetic oligonucleotide
aggguucccugcucccacu

SEQ ID NO: 1145924 - RNA, 19 nt, Artificial Sequence
  Description of Artificial Sequence: Synthetic oligonucleotide
guucccugcucccacuagu

SEQ ID NO: 1145925 - RNA, 19 nt, Artificial Sequence
  Description of Artificial Sequence: Synthetic oligonucleotide
ccgagaucgguugaagcac

SEQ ID NO: 1145926 - RNA, 19 nt, Artificial Sequence
  Description of Artificial Sequence: Synthetic oligonucleotide
gauacucccgagaucgguu

SEQ ID NO: 1145927 - RNA, 19 nt, Artificial Sequence
  Description of Artificial Sequence: Synthetic oligonucleotide
gggaagaaagcugcccuuc

SEQ ID NO: 1145928 - RNA, 19 nt, Artificial Sequence
  Description of Artificial Sequence: Synthetic oligonucleotide
agcugcuaggaagggcacu

SEQ ID NO: 1145929 - RNA, 19 nt, Artificial Sequence
  Description of Artificial Sequence: Synthetic oligonucleotide
ugcaugcgguucgugguuu

SEQ ID NO: 1145930 - RNA, 19 nt, Artificial Sequence
  Description of Artificial Sequence: Synthetic oligonucleotide
gggacuagaaggugcacau

SEQ ID NO: 1145931 - RNA, 19 nt, Artificial Sequence
  Description of Artificial Sequence: Synthetic oligonucleotide
ggcaguggucucuggcaug

SEQ ID NO: 1145932 - RNA, 19 nt, Artificial Sequence
  Description of Artificial Sequence: Synthetic oligonucleotide
augcgguucgugguuucgu

SEQ ID NO: 1145933 - RNA, 19 nt, Artificial Sequence
  Description of Artificial Sequence: Synthetic oligonucleotide
cugguagucagcggcucca

SEQ ID NO: 1145934 - RNA, 19 nt, Artificial Sequence
  Description of Artificial Sequence: Synthetic oligonucleotide
caccuaagaaggcucugcu

SEQ ID NO: 1145935 - RNA, 19 nt, Artificial Sequence
  Description of Artificial Sequence: Synthetic oligonucleotide
uggccgugacauccucaaa

SEQ ID NO: 1145936 - RNA, 19 nt, Artificial Sequence
  Description of Artificial Sequence: Synthetic oligonucleotide
gagcugcuaggaagggcac

SEQ ID NO: 1145937 - RNA, 19 nt, Artificial Sequence
  Description of Artificial Sequence: Synthetic oligonucleotide
cagcacccagaugguaggc

SEQ ID NO: 1145938 - RNA, 19 nt, Artificial Sequence
  Description of Artificial Sequence: Synthetic oligonucleotide
caaucgccuugcuccgcuc

SEQ ID NO: 1145939 - RNA, 19 nt, Artificial Sequence
  Description of Artificial Sequence: Synthetic oligonucleotide
caacccuguucccaugugu

SEQ ID NO: 1145940 - RNA, 19 nt, Artificial Sequence
  Description of Artificial Sequence: Synthetic oligonucleotide
ccuguucccaugugucaug

SEQ ID NO: 1145941 - RNA, 19 nt, Artificial Sequence
  Description of Artificial Sequence: Synthetic oligonucleotide
cacgucuuuggcggcgcug

SEQ ID NO: 1145942 - RNA, 19 nt, Artificial Sequence
  Description of Artificial Sequence: Synthetic oligonucleotide
ugcccuucacaggguuccc

SEQ ID NO: 1145943 - RNA, 19 nt, Artificial Sequence
  Description of Artificial Sequence: Synthetic oligonucleotide
ggacccauuauuucugcuu

SEQ ID NO: 1145944 - RNA, 19 nt, Artificial Sequence
  Description of Artificial Sequence: Synthetic oligonucleotide
gagcaucgaguggcagcag

SEQ ID NO: 1145945 - RNA, 19 nt, Artificial Sequence
  Description of Artificial Sequence: Synthetic oligonucleotide
cugggacuagaaggugcac

SEQ ID NO: 1145946 - RNA, 19 nt, Artificial Sequence
  Description of Artificial Sequence: Synthetic oligonucleotide
ugcuuccccugugcagggc

SEQ ID NO: 1145947 - RNA, 19 nt, Artificial Sequence
  Description of Artificial Sequence: Synthetic oligonucleotide
ccuggaucccugagucgcc

SEQ ID NO: 1145948 - RNA, 19 nt, Artificial Sequence
  Description of Artificial Sequence: Synthetic oligonucleotide
acuuuggauaggacccauu

SEQ ID NO: 1145949 - RNA, 19 nt, Artificial Sequence
  Description of Artificial Sequence: Synthetic oligonucleotide
gucuuccauacggcucacc

SEQ ID NO: 1145950 - RNA, 19 nt, Artificial Sequence
  Description of Artificial Sequence: Synthetic oligonucleotide
gccuggguauucagggaag

SEQ ID NO: 1145951 - RNA, 19 nt, Artificial Sequence
  Description of Artificial Sequence: Synthetic oligonucleotide
agucgccccagagucgcau

SEQ ID NO: 1145952 - RNA, 19 nt, Artificial Sequence
  Description of Artificial Sequence: Synthetic oligonucleotide
cuccuuacauggcugucau

SEQ ID NO: 1145953 - RNA, 19 nt, Artificial Sequence
  Description of Artificial Sequence: Synthetic oligonucleotide
gcagagcucuggguucagg

SEQ ID NO: 1145954 - RNA, 19 nt, Artificial Sequence
  Description of Artificial Sequence: Synthetic oligonucleotide
gguucgugguuucguccuc

SEQ ID NO: 1145955 - RNA, 19 nt, Artificial Sequence
  Description of Artificial Sequence: Synthetic oligonucleotide
gucgccccagagucgcauc

SEQ ID NO: 1145956 - RNA, 19 nt, Artificial Sequence
  Description of Artificial Sequence: Synthetic oligonucleotide
ugcuccgcucgagggcggc

SEQ ID NO: 1145957 - RNA, 19 nt, Artificial Sequence
  Description of Artificial Sequence: Synthetic oligonucleotide
agauggagucgaagagcau

SEQ ID NO: 1145958 - RNA, 19 nt, Artificial Sequence
  Description of Artificial Sequence: Synthetic oligonucleotide
cauggggugcccagccucu

SEQ ID NO: 1145959 - RNA, 19 nt, Artificial Sequence
  Description of Artificial Sequence: Synthetic oligonucleotide
cucgugcaugcgguucgug

SEQ ID NO: 1145960 - RNA, 19 nt, Artificial Sequence
  Description of Artificial Sequence: Synthetic oligonucleotide
agccgcugagugcgacaca

SEQ ID NO: 1145961 - RNA, 19 nt, Artificial Sequence
  Description of Artificial Sequence: Synthetic oligonucleotide
ccaacaagucacucucuua

SEQ ID NO: 1145962 - RNA, 19 nt, Artificial Sequence
  Description of Artificial Sequence: Synthetic oligonucleotide
ccgugacauccucaaagca

SEQ ID NO: 1145963 - RNA, 19 nt, Artificial Sequence
  Description of Artificial Sequence: Synthetic oligonucleotide
cagcggcuccaauccgauc

SEQ ID NO: 1145964 - RNA, 19 nt, Artificial Sequence
  Description of Artificial Sequence: Synthetic oligonucleotide
gagacucgugcaugcgguu

SEQ ID NO: 1145965 - RNA, 19 nt, Artificial Sequence
  Description of Artificial Sequence: Synthetic oligonucleotide
cccagaugguaggcagugg

SEQ ID NO: 1145966 - RNA, 19 nt, Artificial Sequence
  Description of Artificial Sequence: Synthetic oligonucleotide
ccgccuuucucuccuuguc

SEQ ID NO: 1145967 - RNA, 19 nt, Artificial Sequence
  Description of Artificial Sequence: Synthetic oligonucleotide
cacccagaugguaggcagu

SEQ ID NO: 1145968 - RNA, 19 nt, Artificial Sequence
  Description of Artificial Sequence: Synthetic oligonucleotide
ccgauccaggcuguccaag

SEQ ID NO: 1145969 - RNA, 19 nt, Artificial Sequence
  Description of Artificial Sequence: Synthetic oligonucleotide
ggcugucaucugacauggg

SEQ ID NO: 1145970 - RNA, 19 nt, Artificial Sequence
  Description of Artificial Sequence: Synthetic oligonucleotide
gugcaugcgguucgugguu

SEQ ID NO: 1145971 - RNA, 19 nt, Artificial Sequence
  Description of Artificial Sequence: Synthetic oligonucleotide
ggacgauggcugccagaga

SEQ ID NO: 1145972 - RNA, 19 nt, Artificial Sequence
  Description of Artificial Sequence: Synthetic oligonucleotide
cagcgagcagcacccagau

SEQ ID NO: 1145973 - RNA, 19 nt, Artificial Sequence
  Description of Artificial Sequence: Synthetic oligonucleotide
ggacuagaaggugcacaua

SEQ ID NO: 1145974 - RNA, 19 nt, Artificial Sequence
  Description of Artificial Sequence: Synthetic oligonucleotide
ggguucccugcucccacua

SEQ ID NO: 1145975 - RNA, 19 nt, Artificial Sequence
  Description of Artificial Sequence: Synthetic oligonucleotide
caacaggcuuguacugcuu

SEQ ID NO: 1145976 - RNA, 19 nt, Artificial Sequence
  Description of Artificial Sequence: Synthetic oligonucleotide
ggcccggacgauggcugcc

SEQ ID NO: 1145977 - RNA, 19 nt, Artificial Sequence
  Description of Artificial Sequence: Synthetic oligonucleotide
gagucgccccagagucgca

SEQ ID NO: 1145978 - RNA, 19 nt, Artificial Sequence
  Description of Artificial Sequence: Synthetic oligonucleotide
cccggacgauggcugccag

SEQ ID NO: 1145979 - RNA, 19 nt, Artificial Sequence
  Description of Artificial Sequence: Synthetic oligonucleotide
gccucuggccugggacuag

SEQ ID NO: 1145980 - RNA, 19 nt, Artificial Sequence
  Description of Artificial Sequence: Synthetic oligonucleotide
gagucgcaucauggccgaa

SEQ ID NO: 1145981 - RNA, 19 nt, Artificial Sequence
  Description of Artificial Sequence: Synthetic oligonucleotide
cgagaucgguugaagcacu

SEQ ID NO: 1145982 - RNA, 19 nt, Artificial Sequence
  Description of Artificial Sequence: Synthetic oligonucleotide
cgguucgugguuucguccu

SEQ ID NO: 1145983 - RNA, 19 nt, Artificial Sequence
  Description of Artificial Sequence: Synthetic oligonucleotide
gcccggacgauggcugcca

SEQ ID NO: 1145984 - RNA, 19 nt, Artificial Sequence
  Description of Artificial Sequence: Synthetic oligonucleotide
cccugagucgccccagagu

SEQ ID NO: 1145985 - RNA, 19 nt, Artificial Sequence
  Description of Artificial Sequence: Synthetic oligonucleotide
guguuggagccuggguauu

SEQ ID NO: 1145986 - RNA, 19 nt, Artificial Sequence
  Description of Artificial Sequence: Synthetic oligonucleotide
ccggacgauggcugccaga

SEQ ID NO: 1145987 - RNA, 19 nt, Artificial Sequence
  Description of Artificial Sequence: Synthetic oligonucleotide
gugcgacacagaagaugau

SEQ ID NO: 1145988 - RNA, 19 nt, Artificial Sequence
  Description of Artificial Sequence: Synthetic oligonucleotide
ccgcugagugcgacacaga

SEQ ID NO: 1145989 - RNA, 19 nt, Artificial Sequence
  Description of Artificial Sequence: Synthetic oligonucleotide
cccuguucccaugugucau

SEQ ID NO: 1145990 - RNA, 19 nt, Artificial Sequence
  Description of Artificial Sequence: Synthetic oligonucleotide
ggccaggggucaguagagu

SEQ ID NO: 1145991 - RNA, 19 nt, Artificial Sequence
  Description of Artificial Sequence: Synthetic oligonucleotide
gcaccuggucauagccgcu

SEQ ID NO: 1145992 - RNA, 19 nt, Artificial Sequence
  Description of Artificial Sequence: Synthetic oligonucleotide
cguccucguggagcaccug

SEQ ID NO: 1145993 - RNA, 19 nt, Artificial Sequence
  Description of Artificial Sequence: Synthetic oligonucleotide
ccgcucgagggcggcucuc

SEQ ID NO: 1145994 - RNA, 19 nt, Artificial Sequence
  Description of Artificial Sequence: Synthetic oligonucleotide
cguggagcaccuggucaua

SEQ ID NO: 1145995 - RNA, 19 nt, Artificial Sequence
  Description of Artificial Sequence: Synthetic oligonucleotide
cgaauaccaccuggauguu

SEQ ID NO: 1145996 - RNA, 19 nt, Artificial Sequence
  Description of Artificial Sequence: Synthetic oligonucleotide
cgucuuuggcggcgcugau

SEQ ID NO: 1145997 - RNA, 19 nt, Artificial Sequence
  Description of Artificial Sequence: Synthetic oligonucleotide
cgccccagagucgcaucau

SEQ ID NO: 1145998 - RNA, 19 nt, Artificial Sequence
  Description of Artificial Sequence: Synthetic oligonucleotide
uguacaauauagaagaauc

SEQ ID NO: 1145999 - RNA, 19 nt, Artificial Sequence
  Description of Artificial Sequence: Synthetic oligonucleotide
auauagaagaaucugauau

SEQ ID NO: 1146000 - RNA, 19 nt, Artificial Sequence
  Description of Artificial Sequence: Synthetic oligonucleotide
uccauuauagcuuccugcg

SEQ ID NO: 1146001 - RNA, 19 nt, Artificial Sequence
  Description of Artificial Sequence: Synthetic oligonucleotide
gauacuggagcucagcgcc

SEQ ID NO: 1146002 - RNA, 19 nt, Artificial Sequence
  Description of Artificial Sequence: Synthetic oligonucleotide
aauguagaugguguacugc

SEQ ID NO: 1146003 - RNA, 19 nt, Artificial Sequence
  Description of Artificial Sequence: Synthetic oligonucleotide
uguauaaaagccaucuguc

SEQ ID NO: 1146004 - RNA, 19 nt, Artificial Sequence
  Description of Artificial Sequence: Synthetic oligonucleotide
ucugauauagauacuuugu

SEQ ID NO: 1146005 - RNA, 19 nt, Artificial Sequence
  Description of Artificial Sequence: Synthetic oligonucleotide
aauuguuguuguugguagg

SEQ ID NO: 1146006 - RNA, 19 nt, Artificial Sequence
  Description of Artificial Sequence: Synthetic oligonucleotide
ugugcuguacaauauagaa

SEQ ID NO: 1146007 - RNA, 19 nt, Artificial Sequence
  Description of Artificial Sequence: Synthetic oligonucleotide
uuucccgucaccugcaggg

SEQ ID NO: 1146008 - RNA, 19 nt, Artificial Sequence
  Description of Artificial Sequence: Synthetic oligonucleotide
cauugggagaugaagcugg

SEQ ID NO: 1146009 - RNA, 19 nt, Artificial Sequence
  Description of Artificial Sequence: Synthetic oligonucleotide
aaugcagcgaccgagggga

SEQ ID NO: 1146010 - RNA, 19 nt, Artificial Sequence
  Description of Artificial Sequence: Synthetic oligonucleotide
gagcacgcggucuugaugg

SEQ ID NO: 1146011 - RNA, 19 nt, Artificial Sequence
  Description of Artificial Sequence: Synthetic oligonucleotide
ugugccguccauuauagcu

SEQ ID NO: 1146012 - RNA, 19 nt, Artificial Sequence
  Description of Artificial Sequence: Synthetic oligonucleotide
aaacggcaaucucugugcc

SEQ ID NO: 1146013 - RNA, 19 nt, Artificial Sequence
  Description of Artificial Sequence: Synthetic oligonucleotide
gaaacggcaaucucugugc

SEQ ID NO: 1146014 - RNA, 19 nt, Artificial Sequence
  Description of Artificial Sequence: Synthetic oligonucleotide
aguacuuggagagaugauc

SEQ ID NO: 1146015 - RNA, 19 nt, Artificial Sequence
  Description of Artificial Sequence: Synthetic oligonucleotide
ucgauacuggagcucagcg

SEQ ID NO: 1146016 - RNA, 19 nt, Artificial Sequence
  Description of Artificial Sequence: Synthetic oligonucleotide
ugauauagauacuuuguau

SEQ ID NO: 1146017 - RNA, 19 nt, Artificial Sequence
  Description of Artificial Sequence: Synthetic oligonucleotide
cucgcugacaccuuccagg

SEQ ID NO: 1146018 - RNA, 19 nt, Artificial Sequence
  Description of Artificial Sequence: Synthetic oligonucleotide
ugcagucagagcagaaccg

SEQ ID NO: 1146019 - RNA, 19 nt, Artificial Sequence
  Description of Artificial Sequence: Synthetic oligonucleotide
ucugauccgauccaggcau

SEQ ID NO: 1146020 - RNA, 19 nt, Artificial Sequence
  Description of Artificial Sequence: Synthetic oligonucleotide
ucuucacguaccuagucug

SEQ ID NO: 1146021 - RNA, 19 nt, Artificial Sequence
  Description of Artificial Sequence: Synthetic oligonucleotide
agucuggcaguauucuccc

SEQ ID NO: 1146022 - RNA, 19 nt, Artificial Sequence
  Description of Artificial Sequence: Synthetic oligonucleotide
auuauagcuuccugcgggg

SEQ ID NO: 1146023 - RNA, 19 nt, Artificial Sequence
  Description of Artificial Sequence: Synthetic oligonucleotide
ugaaguccggcuccggccg

SEQ ID NO: 1146024 - RNA, 19 nt, Artificial Sequence
  Description of Artificial Sequence: Synthetic oligonucleotide
auccgauccaggcauuggc

SEQ ID NO: 1146025 - RNA, 19 nt, Artificial Sequence
  Description of Artificial Sequence: Synthetic oligonucleotide
acaagcuccaaggucaggg

SEQ ID NO: 1146026 - RNA, 19 nt, Artificial Sequence
  Description of Artificial Sequence: Synthetic oligonucleotide
aaaccccaccggcagcucc

SEQ ID NO: 1146027 - RNA, 19 nt, Artificial Sequence
  Description of Artificial Sequence: Synthetic oligonucleotide
augagcuccgaaugcagcg

SEQ ID NO: 1146028 - RNA, 19 nt, Artificial Sequence
  Description of Artificial Sequence: Synthetic oligonucleotide
uauagaagaaucugauaua

SEQ ID NO: 1146029 - RNA, 19 nt, Artificial Sequence
  Description of Artificial Sequence: Synthetic oligonucleotide
caucgugguggucugaucc

SEQ ID NO: 1146030 - RNA, 19 nt, Artificial Sequence
  Description of Artificial Sequence: Synthetic oligonucleotide
acaauauagaagaaucuga

SEQ ID NO: 1146031 - RNA, 19 nt, Artificial Sequence
  Description of Artificial Sequence: Synthetic oligonucleotide
ggagagaugauccacugug

SEQ ID NO: 1146032 - RNA, 19 nt, Artificial Sequence
  Description of Artificial Sequence: Synthetic oligonucleotide
cauuguguucuucagcaug

SEQ ID NO: 1146033 - RNA, 19 nt, Artificial Sequence
  Description of Artificial Sequence: Synthetic oligonucleotide
ugguggucugauccgaucc

SEQ ID NO: 1146034 - RNA, 19 nt, Artificial Sequence
  Description of Artificial Sequence: Synthetic oligonucleotide
guugguagguaggagggcg

SEQ ID NO: 1146035 - RNA, 19 nt, Artificial Sequence
  Description of Artificial Sequence: Synthetic oligonucleotide
guagggaccgcuuggagac

SEQ ID NO: 1146036 - RNA, 19 nt, Artificial Sequence
  Description of Artificial Sequence: Synthetic oligonucleotide
uugaugggccucauauucc

SEQ ID NO: 1146037 - RNA, 19 nt, Artificial Sequence
  Description of Artificial Sequence: Synthetic oligonucleotide
gaaugcagcgaccgagggg

SEQ ID NO: 1146038 - RNA, 19 nt, Artificial Sequence
  Description of Artificial Sequence: Synthetic oligonucleotide
aguuagggccaguagaaaa

SEQ ID NO: 1146039 - RNA, 19 nt, Artificial Sequence
  Description of Artificial Sequence: Synthetic oligonucleotide
uccggugcagcucguagag

SEQ ID NO: 1146040 - RNA, 19 nt, Artificial Sequence
  Description of Artificial Sequence: Synthetic oligonucleotide
ugugcaggcggcugaggcg

SEQ ID NO: 1146041 - RNA, 19 nt, Artificial Sequence
  Description of Artificial Sequence: Synthetic oligonucleotide
ggagucggagcucacaucc

SEQ ID NO: 1146042 - RNA, 19 nt, Artificial Sequence
  Description of Artificial Sequence: Synthetic oligonucleotide
uccgaaugcagcgaccgag

SEQ ID NO: 1146043 - RNA, 19 nt, Artificial Sequence
  Description of Artificial Sequence: Synthetic oligonucleotide
cauuggccgccuuacacgc

SEQ ID NO: 1146044 - RNA, 19 nt, Artificial Sequence
  Description of Artificial Sequence: Synthetic oligonucleotide
acacaagcucgaucucucc

SEQ ID NO: 1146045 - RNA, 19 nt, Artificial Sequence
  Description of Artificial Sequence: Synthetic oligonucleotide
uccgauccaggcauuggcc

SEQ ID NO: 1146046 - RNA, 19 nt, Artificial Sequence
  Description of Artificial Sequence: Synthetic oligonucleotide
agaugauccacuguggcau

SEQ ID NO: 1146047 - RNA, 19 nt, Artificial Sequence
  Description of Artificial Sequence: Synthetic oligonucleotide
cuucacguaccuagucugg

SEQ ID NO: 1146048 - RNA, 19 nt, Artificial Sequence
  Description of Artificial Sequence: Synthetic oligonucleotide
cauccgaagccccuccucg

SEQ ID NO: 1146049 - RNA, 19 nt, Artificial Sequence
  Description of Artificial Sequence: Synthetic oligonucleotide
gacaaugcagucagagcag

SEQ ID NO: 1146050 - RNA, 19 nt, Artificial Sequence
  Description of Artificial Sequence: Synthetic oligonucleotide
cacaagcucgaucucuccg

SEQ ID NO: 1146051 - RNA, 19 nt, Artificial Sequence
  Description of Artificial Sequence: Synthetic oligonucleotide
uggucugauccgauccagg

SEQ ID NO: 1146052 - RNA, 19 nt, Artificial Sequence
  Description of Artificial Sequence: Synthetic oligonucleotide
uuguuuguguccucuugcu

SEQ ID NO: 1146053 - RNA, 19 nt, Artificial Sequence
  Description of Artificial Sequence: Synthetic oligonucleotide
agcgacacccugugguccc

SEQ ID NO: 1146054 - RNA, 19 nt, Artificial Sequence
  Description of Artificial Sequence: Synthetic oligonucleotide
cauucagcgucgugaaggc

SEQ ID NO: 1146055 - RNA, 19 nt, Artificial Sequence
  Description of Artificial Sequence: Synthetic oligonucleotide
ucgaaguuggggucuggcc

SEQ ID NO: 1146056 - RNA, 19 nt, Artificial Sequence
  Description of Artificial Sequence: Synthetic oligonucleotide
cuuguucccgcuccgcagg

SEQ ID NO: 1146057 - RNA, 19 nt, Artificial Sequence
  Description of Artificial Sequence: Synthetic oligonucleotide
caugagcuccgaaugcagc

SEQ ID NO: 1146058 - RNA, 19 nt, Artificial Sequence
  Description of Artificial Sequence: Synthetic oligonucleotide
acagcgacacccugugguc

SEQ ID NO: 1146059 - RNA, 19 nt, Artificial Sequence
  Description of Artificial Sequence: Synthetic oligonucleotide
gagaugauccacuguggca

SEQ ID NO: 1146060 - RNA, 19 nt, Artificial Sequence
  Description of Artificial Sequence: Synthetic oligonucleotide
gcaguauucucccuuuucc

SEQ ID NO: 1146061 - RNA, 19 nt, Artificial Sequence
  Description of Artificial Sequence: Synthetic oligonucleotide
ggaaacggcaaucucugug

SEQ ID NO: 1146062 - RNA, 19 nt, Artificial Sequence
  Description of Artificial Sequence: Synthetic oligonucleotide
auggugacggggcgcagac

SEQ ID NO: 1146063 - RNA, 19 nt, Artificial Sequence
  Description of Artificial Sequence: Synthetic oligonucleotide
caauguagaugguguacug

SEQ ID NO: 1146064 - RNA, 19 nt, Artificial Sequence
  Description of Artificial Sequence: Synthetic oligonucleotide
ucgucauggugacggggcg

SEQ ID NO: 1146065 - RNA, 19 nt, Artificial Sequence
  Description of Artificial Sequence: Synthetic oligonucleotide
ucagcgucgugaaggcucc

SEQ ID NO: 1146066 - RNA, 19 nt, Artificial Sequence
  Description of Artificial Sequence: Synthetic oligonucleotide
aucgaaguuggggucuggc

SEQ ID NO: 1146067 - RNA, 19 nt, Artificial Sequence
  Description of Artificial Sequence: Synthetic oligonucleotide
ggagcucacauccucuccg

SEQ ID NO: 1146068 - RNA, 19 nt, Artificial Sequence
  Description of Artificial Sequence: Synthetic oligonucleotide
uccgcuccagggcaaugcg

SEQ ID NO: 1146069 - RNA, 19 nt, Artificial Sequence
  Description of Artificial Sequence: Synthetic oligonucleotide
gagaucagggcaucgaagu

SEQ ID NO: 1146070 - RNA, 19 nt, Artificial Sequence
  Description of Artificial Sequence: Synthetic oligonucleotide
agcucguagagacucaguu

SEQ ID NO: 1146071 - RNA, 19 nt, Artificial Sequence
  Description of Artificial Sequence: Synthetic oligonucleotide
aagccaucuguccuuguuu

SEQ ID NO: 1146072 - RNA, 19 nt, Artificial Sequence
  Description of Artificial Sequence: Synthetic oligonucleotide
cagggcaaugcgcagggcc

SEQ ID NO: 1146073 - RNA, 19 nt, Artificial Sequence
  Description of Artificial Sequence: Synthetic oligonucleotide
ugggcauucgccggcgucg

SEQ ID NO: 1146074 - RNA, 19 nt, Artificial Sequence
  Description of Artificial Sequence: Synthetic oligonucleotide
gggccaaguacuuggagag

SEQ ID NO: 1146075 - RNA, 19 nt, Artificial Sequence
  Description of Artificial Sequence: Synthetic oligonucleotide
uccucgauacuggagcuca

SEQ ID NO: 1146076 - RNA, 19 nt, Artificial Sequence
  Description of Artificial Sequence: Synthetic oligonucleotide
guauucucccuuuuccaca

SEQ ID NO: 1146077 - RNA, 19 nt, Artificial Sequence
  Description of Artificial Sequence: Synthetic oligonucleotide
ggugacggggcgcagaccc

SEQ ID NO: 1146078 - RNA, 19 nt, Artificial Sequence
  Description of Artificial Sequence: Synthetic oligonucleotide
aaucugauauagauacuuu

SEQ ID NO: 1146079 - RNA, 19 nt, Artificial Sequence
  Description of Artificial Sequence: Synthetic oligonucleotide
cacguaccuagucuggcag

SEQ ID NO: 1146080 - RNA, 19 nt, Artificial Sequence
  Description of Artificial Sequence: Synthetic oligonucleotide
guaagcaaauuguuguugu

SEQ ID NO: 1146081 - RNA, 19 nt, Artificial Sequence
  Description of Artificial Sequence: Synthetic oligonucleotide
ucacguaccuagucuggca

SEQ ID NO: 1146082 - RNA, 19 nt, Artificial Sequence
  Description of Artificial Sequence: Synthetic oligonucleotide
caauauagaagaaucugau

SEQ ID NO: 1146083 - RNA, 19 nt, Artificial Sequence
  Description of Artificial Sequence: Synthetic oligonucleotide
ucucgcugacaccuuccag

SEQ ID NO: 1146084 - RNA, 19 nt, Artificial Sequence
  Description of Artificial Sequence: Synthetic oligonucleotide
aaccggugcaggcacuccu

SEQ ID NO: 1146085 - RNA, 19 nt, Artificial Sequence
  Description of Artificial Sequence: Synthetic oligonucleotide
uucacguaccuagucuggc

SEQ ID NO: 1146086 - RNA, 19 nt, Artificial Sequence
  Description of Artificial Sequence: Synthetic oligonucleotide
cauggccugcauccgaagc

SEQ ID NO: 1146087 - RNA, 19 nt, Artificial Sequence
  Description of Artificial Sequence: Synthetic oligonucleotide
ggcgucgucauggugacgg

SEQ ID NO: 1146088 - RNA, 19 nt, Artificial Sequence
  Description of Artificial Sequence: Synthetic oligonucleotide
gcauuggccgccuuacacg

SEQ ID NO: 1146089 - RNA, 19 nt, Artificial Sequence
  Description of Artificial Sequence: Synthetic oligonucleotide
ugucccuacacugccgccc

SEQ ID NO: 1146090 - RNA, 19 nt, Artificial Sequence
  Description of Artificial Sequence: Synthetic oligonucleotide
cugauauagauacuuugua

SEQ ID NO: 1146091 - RNA, 19 nt, Artificial Sequence
  Description of Artificial Sequence: Synthetic oligonucleotide
uccuuguucccgcuccgca

SEQ ID NO: 1146092 - RNA, 19 nt, Artificial Sequence
  Description of Artificial Sequence: Synthetic oligonucleotide
cucggcggggugaaguccg

SEQ ID NO: 1146093 - RNA, 19 nt, Artificial Sequence
  Description of Artificial Sequence: Synthetic oligonucleotide
uucucgcugacaccuucca

SEQ ID NO: 1146094 - RNA, 19 nt, Artificial Sequence
  Description of Artificial Sequence: Synthetic oligonucleotide
gccgugacaaugcagucag

SEQ ID NO: 1146095 - RNA, 19 nt, Artificial Sequence
  Description of Artificial Sequence: Synthetic oligonucleotide
aggggaaacggcaaucucu

SEQ ID NO: 1146096 - RNA, 19 nt, Artificial Sequence
  Description of Artificial Sequence: Synthetic oligonucleotide
ucguagagacucaguuccc

SEQ ID NO: 1146097 - RNA, 19 nt, Artificial Sequence
  Description of Artificial Sequence: Synthetic oligonucleotide
uccaagcggggcucggcgg

SEQ ID NO: 1146098 - RNA, 19 nt, Artificial Sequence
  Description of Artificial Sequence: Synthetic oligonucleotide
ggucugauccgauccaggc

SEQ ID NO: 1146099 - RNA, 19 nt, Artificial Sequence
  Description of Artificial Sequence: Synthetic oligonucleotide
ggucauuguguucuucagc

SEQ ID NO: 1146100 - RNA, 19 nt, Artificial Sequence
  Description of Artificial Sequence: Synthetic oligonucleotide
uuguucccgcuccgcaggg

SEQ ID NO: 1146101 - RNA, 19 nt, Artificial Sequence
  Description of Artificial Sequence: Synthetic oligonucleotide
ugccacucacgccgcaucc

SEQ ID NO: 1146102 - RNA, 19 nt, Artificial Sequence
  Description of Artificial Sequence: Synthetic oligonucleotide
cuagucuggcaguauucuc

SEQ ID NO: 1146103 - RNA, 19 nt, Artificial Sequence
  Description of Artificial Sequence: Synthetic oligonucleotide
caagcucgaucucuccgcc

SEQ ID NO: 1146104 - RNA, 19 nt, Artificial Sequence
  Description of Artificial Sequence: Synthetic oligonucleotide
uuccucccggcuaggguag

SEQ ID NO: 1146105 - RNA, 19 nt, Artificial Sequence
  Description of Artificial Sequence: Synthetic oligonucleotide
uggucuucacguaccuagu

SEQ ID NO: 1146106 - RNA, 19 nt, Artificial Sequence
  Description of Artificial Sequence: Synthetic oligonucleotide
ucuugaugggccucauauu

SEQ ID NO: 1146107 - RNA, 19 nt, Artificial Sequence
  Description of Artificial Sequence: Synthetic oligonucleotide
accuagucuggcaguauuc

SEQ ID NO: 1146108 - RNA, 19 nt, Artificial Sequence
  Description of Artificial Sequence: Synthetic oligonucleotide
ugggccucauauuccuccc

SEQ ID NO: 1146109 - RNA, 19 nt, Artificial Sequence
  Description of Artificial Sequence: Synthetic oligonucleotide
uccccuuaugaugucauuu

SEQ ID NO: 1146110 - RNA, 19 nt, Artificial Sequence
  Description of Artificial Sequence: Synthetic oligonucleotide
cuuucccgucaccugcagg

SEQ ID NO: 1146111 - RNA, 19 nt, Artificial Sequence
  Description of Artificial Sequence: Synthetic oligonucleotide
cgaaguuggggucuggccg

SEQ ID NO: 1146112 - RNA, 19 nt, Artificial Sequence
  Description of Artificial Sequence: Synthetic oligonucleotide
agacucaguucccacguuu

SEQ ID NO: 1146113 - RNA, 19 nt, Artificial Sequence
  Description of Artificial Sequence: Synthetic oligonucleotide
agggccgugacaaugcagu

SEQ ID NO: 1146114 - RNA, 19 nt, Artificial Sequence
  Description of Artificial Sequence: Synthetic oligonucleotide
caucagguccgccuguguc

SEQ ID NO: 1146115 - RNA, 19 nt, Artificial Sequence
  Description of Artificial Sequence: Synthetic oligonucleotide
gucgucauggugacggggc

SEQ ID NO: 1146116 - RNA, 19 nt, Artificial Sequence
  Description of Artificial Sequence: Synthetic oligonucleotide
agcucacauccucuccguc

SEQ ID NO: 1146117 - RNA, 19 nt, Artificial Sequence
  Description of Artificial Sequence: Synthetic oligonucleotide
agucagagcagaaccggug

SEQ ID NO: 1146118 - RNA, 19 nt, Artificial Sequence
  Description of Artificial Sequence: Synthetic oligonucleotide
cuccaagcggggcucggcg

SEQ ID NO: 1146119 - RNA, 19 nt, Artificial Sequence
  Description of Artificial Sequence: Synthetic oligonucleotide
agaaccggugcaggcacuc

SEQ ID NO: 1146120 - RNA, 19 nt, Artificial Sequence
  Description of Artificial Sequence: Synthetic oligonucleotide
agcgucgugaaggcuccgc

SEQ ID NO: 1146121 - RNA, 19 nt, Artificial Sequence
  Description of Artificial Sequence: Synthetic oligonucleotide
ugccguccauuauagcuuc

SEQ ID NO: 1146122 - RNA, 19 nt, Artificial Sequence
  Description of Artificial Sequence: Synthetic oligonucleotide
aaccccaccggcagcuccg

SEQ ID NO: 1146123 - RNA, 19 nt, Artificial Sequence
  Description of Artificial Sequence: Synthetic oligonucleotide
guacaauauagaagaaucu

SEQ ID NO: 1146124 - RNA, 19 nt, Artificial Sequence
  Description of Artificial Sequence: Synthetic oligonucleotide
ggccucauauuccucccgg

SEQ ID NO: 1146125 - RNA, 19 nt, Artificial Sequence
  Description of Artificial Sequence: Synthetic oligonucleotide
uggccguagggaccgcuug

SEQ ID NO: 1146126 - RNA, 19 nt, Artificial Sequence
  Description of Artificial Sequence: Synthetic oligonucleotide
gcagucagagcagaaccgg

SEQ ID NO: 1146127 - RNA, 19 nt, Artificial Sequence
  Description of Artificial Sequence: Synthetic oligonucleotide
cucgauacuggagcucagc

SEQ ID NO: 1146128 - RNA, 19 nt, Artificial Sequence
  Description of Artificial Sequence: Synthetic oligonucleotide
agccauucagcgucgugaa

SEQ ID NO: 1146129 - RNA, 19 nt, Artificial Sequence
  Description of Artificial Sequence: Synthetic oligonucleotide
ucccggcuaggguagauuu

SEQ ID NO: 1146130 - RNA, 19 nt, Artificial Sequence
  Description of Artificial Sequence: Synthetic oligonucleotide
ugcagcucguagagacuca

SEQ ID NO: 1146131 - RNA, 19 nt, Artificial Sequence
  Description of Artificial Sequence: Synthetic oligonucleotide
uucccgcuccgcagggccg

SEQ ID NO: 1146132 - RNA, 19 nt, Artificial Sequence
  Description of Artificial Sequence: Synthetic oligonucleotide
uuuuggagaucagggcauc

SEQ ID NO: 1146133 - RNA, 19 nt, Artificial Sequence
  Description of Artificial Sequence: Synthetic oligonucleotide
gaggggaaacggcaaucuc

SEQ ID NO: 1146134 - RNA, 19 nt, Artificial Sequence
  Description of Artificial Sequence: Synthetic oligonucleotide
cagggugccaccccgguca

SEQ ID NO: 1146135 - RNA, 19 nt, Artificial Sequence
  Description of Artificial Sequence: Synthetic oligonucleotide
ggagaucagggcaucgaag

SEQ ID NO: 1146136 - RNA, 19 nt, Artificial Sequence
  Description of Artificial Sequence: Synthetic oligonucleotide
augucauuuuggguccuug

SEQ ID NO: 1146137 - RNA, 19 nt, Artificial Sequence
  Description of Artificial Sequence: Synthetic oligonucleotide
gcuccgaaugcagcgaccg

SEQ ID NO: 1146138 - RNA, 19 nt, Artificial Sequence
  Description of Artificial Sequence: Synthetic oligonucleotide
ucucgauccgcagcugcca

SEQ ID NO: 1146139 - RNA, 19 nt, Artificial Sequence
  Description of Artificial Sequence: Synthetic oligonucleotide
gaaguuggggucuggccgu

SEQ ID NO: 1146140 - RNA, 19 nt, Artificial Sequence
  Description of Artificial Sequence: Synthetic oligonucleotide
ucggagcucacauccucuc

SEQ ID NO: 1146141 - RNA, 19 nt, Artificial Sequence
  Description of Artificial Sequence: Synthetic oligonucleotide
gagcuccgaaugcagcgac

SEQ ID NO: 1146142 - RNA, 19 nt, Artificial Sequence
  Description of Artificial Sequence: Synthetic oligonucleotide
uuacacgcugggcccugug

SEQ ID NO: 1146143 - RNA, 19 nt, Artificial Sequence
  Description of Artificial Sequence: Synthetic oligonucleotide
ccauuauagcuuccugcgg

SEQ ID NO: 1146144 - RNA, 19 nt, Artificial Sequence
  Description of Artificial Sequence: Synthetic oligonucleotide
ggggaaacggcaaucucug

SEQ ID NO: 1146145 - RNA, 19 nt, Artificial Sequence
  Description of Artificial Sequence: Synthetic oligonucleotide
aaguacuuggagagaugau

SEQ ID NO: 1146146 - RNA, 19 nt, Artificial Sequence
  Description of Artificial Sequence: Synthetic oligonucleotide
acguaccuagucuggcagu

SEQ ID NO: 1146147 - RNA, 19 nt, Artificial Sequence
  Description of Artificial Sequence: Synthetic oligonucleotide
acacagcgacacccugugg

SEQ ID NO: 1146148 - RNA, 19 nt, Artificial Sequence
  Description of Artificial Sequence: Synthetic oligonucleotide
agcgaccgaggggaaacgg

SEQ ID NO: 1146149 - RNA, 19 nt, Artificial Sequence
  Description of Artificial Sequence: Synthetic oligonucleotide
agcuccgaaugcagcgacc

SEQ ID NO: 1146150 - RNA, 19 nt, Artificial Sequence
  Description of Artificial Sequence: Synthetic oligonucleotide
ucgaucucuccgccuggcu

SEQ ID NO: 1146151 - RNA, 19 nt, Artificial Sequence
  Description of Artificial Sequence: Synthetic oligonucleotide
ccgccuuacacgcugggcc

SEQ ID NO: 1146152 - RNA, 19 nt, Artificial Sequence
  Description of Artificial Sequence: Synthetic oligonucleotide
agcacgcggucuugauggg

SEQ ID NO: 1146153 - RNA, 19 nt, Artificial Sequence
  Description of Artificial Sequence: Synthetic oligonucleotide
guggucugauccgauccag

SEQ ID NO: 1146154 - RNA, 19 nt, Artificial Sequence
  Description of Artificial Sequence: Synthetic oligonucleotide
cugcacccgcuccacgugg

SEQ ID NO: 1146155 - RNA, 19 nt, Artificial Sequence
  Description of Artificial Sequence: Synthetic oligonucleotide
ggcagagugagccgggaca

SEQ ID NO: 1146156 - RNA, 19 nt, Artificial Sequence
  Description of Artificial Sequence: Synthetic oligonucleotide
cgugacaaugcagucagag

SEQ ID NO: 1146157 - RNA, 19 nt, Artificial Sequence
  Description of Artificial Sequence: Synthetic oligonucleotide
gucccuacacugccgcccc

SEQ ID NO: 1146158 - RNA, 19 nt, Artificial Sequence
  Description of Artificial Sequence: Synthetic oligonucleotide
uccgaagccccuccucgau

SEQ ID NO: 1146159 - RNA, 19 nt, Artificial Sequence
  Description of Artificial Sequence: Synthetic oligonucleotide
ggugcaauguagauggugu

SEQ ID NO: 1146160 - RNA, 19 nt, Artificial Sequence
  Description of Artificial Sequence: Synthetic oligonucleotide
ggcauucugggcauucgcc

SEQ ID NO: 1146161 - RNA, 19 nt, Artificial Sequence
  Description of Artificial Sequence: Synthetic oligonucleotide
ucucugugccguccauuau

SEQ ID NO: 1146162 - RNA, 19 nt, Artificial Sequence
  Description of Artificial Sequence: Synthetic oligonucleotide
uccgccuguguccgaggca

SEQ ID NO: 1146163 - RNA, 19 nt, Artificial Sequence
  Description of Artificial Sequence: Synthetic oligonucleotide
gugcagcucguagagacuc

SEQ ID NO: 1146164 - RNA, 19 nt, Artificial Sequence
  Description of Artificial Sequence: Synthetic oligonucleotide
ggcaguauucucccuuuuc

SEQ ID NO: 1146165 - RNA, 19 nt, Artificial Sequence
  Description of Artificial Sequence: Synthetic oligonucleotide
cauauuccucccggcuagg

SEQ ID NO: 1146166 - RNA, 19 nt, Artificial Sequence
  Description of Artificial Sequence: Synthetic oligonucleotide
caccccggucaccagaguc

SEQ ID NO: 1146167 - RNA, 19 nt, Artificial Sequence
  Description of Artificial Sequence: Synthetic oligonucleotide
gacgcccgggcuccgccgg

SEQ ID NO: 1146168 - RNA, 19 nt, Artificial Sequence
  Description of Artificial Sequence: Synthetic oligonucleotide
ucaucgugguggucugauc

SEQ ID NO: 1146169 - RNA, 19 nt, Artificial Sequence
  Description of Artificial Sequence: Synthetic oligonucleotide
cagggccgugacaaugcag

SEQ ID NO: 1146170 - RNA, 19 nt, Artificial Sequence
  Description of Artificial Sequence: Synthetic oligonucleotide
uccugcgggguccggugca

SEQ ID NO: 1146171 - RNA, 19 nt, Artificial Sequence
  Description of Artificial Sequence: Synthetic oligonucleotide
ggucuggccguagggaccg

SEQ ID NO: 1146172 - RNA, 19 nt, Artificial Sequence
  Description of Artificial Sequence: Synthetic oligonucleotide
cacagcgacacccuguggu

SEQ ID NO: 1146173 - RNA, 19 nt, Artificial Sequence
  Description of Artificial Sequence: Synthetic oligonucleotide
auccgaagccccuccucga

SEQ ID NO: 1146174 - RNA, 19 nt, Artificial Sequence
  Description of Artificial Sequence: Synthetic oligonucleotide
ugaggcggaugagcacgcg

SEQ ID NO: 1146175 - RNA, 19 nt, Artificial Sequence
  Description of Artificial Sequence: Synthetic oligonucleotide
ccgaaugcagcgaccgagg

SEQ ID NO: 1146176 - RNA, 19 nt, Artificial Sequence
  Description of Artificial Sequence: Synthetic oligonucleotide
ggcccuccgggcucuaugg

SEQ ID NO: 1146177 - RNA, 19 nt, Artificial Sequence
  Description of Artificial Sequence: Synthetic oligonucleotide
ucgugguggucugauccga

SEQ ID NO: 1146178 - RNA, 19 nt, Artificial Sequence
  Description of Artificial Sequence: Synthetic oligonucleotide
gguccggugcagcucguag

SEQ ID NO: 1146179 - RNA, 19 nt, Artificial Sequence
  Description of Artificial Sequence: Synthetic oligonucleotide
uggacaccuuccagaacuu

SEQ ID NO: 1146180 - RNA, 19 nt, Artificial Sequence
  Description of Artificial Sequence: Synthetic oligonucleotide
ucgauccgcagcugccacu

SEQ ID NO: 1146181 - RNA, 19 nt, Artificial Sequence
  Description of Artificial Sequence: Synthetic oligonucleotide
cucgauccgcagcugccac

SEQ ID NO: 1146182 - RNA, 19 nt, Artificial Sequence
  Description of Artificial Sequence: Synthetic oligonucleotide
ucggcggggugaaguccgg

SEQ ID NO: 1146183 - RNA, 19 nt, Artificial Sequence
  Description of Artificial Sequence: Synthetic oligonucleotide
cccuuaugaugucauuuug

SEQ ID NO: 1146184 - RNA, 19 nt, Artificial Sequence
  Description of Artificial Sequence: Synthetic oligonucleotide
cauucacaagcuccaaggu

SEQ ID NO: 1146185 - RNA, 19 nt, Artificial Sequence
  Description of Artificial Sequence: Synthetic oligonucleotide
gcagaaccggugcaggcac

SEQ ID NO: 1146186 - RNA, 19 nt, Artificial Sequence
  Description of Artificial Sequence: Synthetic oligonucleotide
ggcuaggguagauuuugga

SEQ ID NO: 1146187 - RNA, 19 nt, Artificial Sequence
  Description of Artificial Sequence: Synthetic oligonucleotide
cgauacuggagcucagcgc

SEQ ID NO: 1146188 - RNA, 19 nt, Artificial Sequence
  Description of Artificial Sequence: Synthetic oligonucleotide
ggucuucacguaccuaguc

SEQ ID NO: 1146189 - RNA, 19 nt, Artificial Sequence
  Description of Artificial Sequence: Synthetic oligonucleotide
augagcacgcggucuugau

SEQ ID NO: 1146190 - RNA, 19 nt, Artificial Sequence
  Description of Artificial Sequence: Synthetic oligonucleotide
cagcgacacccuguggucc

SEQ ID NO: 1146191 - RNA, 19 nt, Artificial Sequence
  Description of Artificial Sequence: Synthetic oligonucleotide
guccgccuguguccgaggc

SEQ ID NO: 1146192 - RNA, 19 nt, Artificial Sequence
  Description of Artificial Sequence: Synthetic oligonucleotide
augggacacaugagcuccg

SEQ ID NO: 1146193 - RNA, 19 nt, Artificial Sequence
  Description of Artificial Sequence: Synthetic oligonucleotide
ggccguagggaccgcuugg

SEQ ID NO: 1146194 - RNA, 19 nt, Artificial Sequence
  Description of Artificial Sequence: Synthetic oligonucleotide
cccgucaccugcagggugg

SEQ ID NO: 1146195 - RNA, 19 nt, Artificial Sequence
  Description of Artificial Sequence: Synthetic oligonucleotide
aggacccucgccgccgccg

SEQ ID NO: 1146196 - RNA, 19 nt, Artificial Sequence
  Description of Artificial Sequence: Synthetic oligonucleotide
gucauggugacggggcgca

SEQ ID NO: 1146197 - RNA, 19 nt, Artificial Sequence
  Description of Artificial Sequence: Synthetic oligonucleotide
cucgaucucuccgccuggc

SEQ ID NO: 1146198 - RNA, 19 nt, Artificial Sequence
  Description of Artificial Sequence: Synthetic oligonucleotide
aggcccuccgggcucuaug

SEQ ID NO: 1146199 - RNA, 19 nt, Artificial Sequence
  Description of Artificial Sequence: Synthetic oligonucleotide
guagugggcauaggcccug

SEQ ID NO: 1146200 - RNA, 19 nt, Artificial Sequence
  Description of Artificial Sequence: Synthetic oligonucleotide
ccuuguucccgcuccgcag

SEQ ID NO: 1146201 - RNA, 19 nt, Artificial Sequence
  Description of Artificial Sequence: Synthetic oligonucleotide
gugcaauguagauggugua

SEQ ID NO: 1146202 - RNA, 19 nt, Artificial Sequence
  Description of Artificial Sequence: Synthetic oligonucleotide
ucugggcauucgccggcgu

SEQ ID NO: 1146203 - RNA, 19 nt, Artificial Sequence
  Description of Artificial Sequence: Synthetic oligonucleotide
uggcaguauucucccuuuu

SEQ ID NO: 1146204 - RNA, 19 nt, Artificial Sequence
  Description of Artificial Sequence: Synthetic oligonucleotide
gaaccggugcaggcacucc

SEQ ID NO: 1146205 - RNA, 19 nt, Artificial Sequence
  Description of Artificial Sequence: Synthetic oligonucleotide
gguggucugauccgaucca

SEQ ID NO: 1146206 - RNA, 19 nt, Artificial Sequence
  Description of Artificial Sequence: Synthetic oligonucleotide
accccggucaccagagucu

SEQ ID NO: 1146207 - RNA, 19 nt, Artificial Sequence
  Description of Artificial Sequence: Synthetic oligonucleotide
gggccucauauuccucccg

SEQ ID NO: 1146208 - RNA, 19 nt, Artificial Sequence
  Description of Artificial Sequence: Synthetic oligonucleotide
agguccgccuguguccgag

SEQ ID NO: 1146209 - RNA, 19 nt, Artificial Sequence
  Description of Artificial Sequence: Synthetic oligonucleotide
agggaccgcuuggagacca

SEQ ID NO: 1146210 - RNA, 19 nt, Artificial Sequence
  Description of Artificial Sequence: Synthetic oligonucleotide
gaugggccucauauuccuc

SEQ ID NO: 1146211 - RNA, 19 nt, Artificial Sequence
  Description of Artificial Sequence: Synthetic oligonucleotide
ggaacacaagcucgaucuc

SEQ ID NO: 1146212 - RNA, 19 nt, Artificial Sequence
  Description of Artificial Sequence: Synthetic oligonucleotide
cggaacacaagcucgaucu

SEQ ID NO: 1146213 - RNA, 19 nt, Artificial Sequence
  Description of Artificial Sequence: Synthetic oligonucleotide
cacuuucccgucaccugca

SEQ ID NO: 1146214 - RNA, 19 nt, Artificial Sequence
  Description of Artificial Sequence: Synthetic oligonucleotide
cugggcauucgccggcguc

SEQ ID NO: 1146215 - RNA, 19 nt, Artificial Sequence
  Description of Artificial Sequence: Synthetic oligonucleotide
auucagcgucgugaaggcu

SEQ ID NO: 1146216 - RNA, 19 nt, Artificial Sequence
  Description of Artificial Sequence: Synthetic oligonucleotide
agggagccauucagcgucg

SEQ ID NO: 1146217 - RNA, 19 nt, Artificial Sequence
  Description of Artificial Sequence: Synthetic oligonucleotide
cauaggcccugugcuguac

SEQ ID NO: 1146218 - RNA, 19 nt, Artificial Sequence
  Description of Artificial Sequence: Synthetic oligonucleotide
gcagcucguagagacucag

SEQ ID NO: 1146219 - RNA, 19 nt, Artificial Sequence
  Description of Artificial Sequence: Synthetic oligonucleotide
cuccuuguucccgcuccgc

SEQ ID NO: 1146220 - RNA, 19 nt, Artificial Sequence
  Description of Artificial Sequence: Synthetic oligonucleotide
ccggcuaggguagauuuug

SEQ ID NO: 1146221 - RNA, 19 nt, Artificial Sequence
  Description of Artificial Sequence: Synthetic oligonucleotide
cugccuccgcuccagggca

SEQ ID NO: 1146222 - RNA, 19 nt, Artificial Sequence
  Description of Artificial Sequence: Synthetic oligonucleotide
ggagccauucagcgucgug

SEQ ID NO: 1146223 - RNA, 19 nt, Artificial Sequence
  Description of Artificial Sequence: Synthetic oligonucleotide
uucccgucaccugcagggu

SEQ ID NO: 1146224 - RNA, 19 nt, Artificial Sequence
  Description of Artificial Sequence: Synthetic oligonucleotide
gcgucgugaaggcuccgcc

SEQ ID NO: 1146225 - RNA, 19 nt, Artificial Sequence
  Description of Artificial Sequence: Synthetic oligonucleotide
agcggagucggagcucaca

SEQ ID NO: 1146226 - RNA, 19 nt, Artificial Sequence
  Description of Artificial Sequence: Synthetic oligonucleotide
gcucgaucucuccgccugg

SEQ ID NO: 1146227 - RNA, 19 nt, Artificial Sequence
  Description of Artificial Sequence: Synthetic oligonucleotide
ccaagcggggcucggcggg

SEQ ID NO: 1146228 - RNA, 19 nt, Artificial Sequence
  Description of Artificial Sequence: Synthetic oligonucleotide
cgaagccccuccucgauac

SEQ ID NO: 1146229 - RNA, 19 nt, Artificial Sequence
  Description of Artificial Sequence: Synthetic oligonucleotide
uccgggcucuaugguuucc

SEQ ID NO: 1146230 - RNA, 19 nt, Artificial Sequence
  Description of Artificial Sequence: Synthetic oligonucleotide
aguccggcuccggccgucg

SEQ ID NO: 1146231 - RNA, 19 nt, Artificial Sequence
  Description of Artificial Sequence: Synthetic oligonucleotide
cagcgaccgaggggaaacg

SEQ ID NO: 1146232 - RNA, 19 nt, Artificial Sequence
  Description of Artificial Sequence: Synthetic oligonucleotide
gccggcgucgucaugguga

SEQ ID NO: 1146233 - RNA, 19 nt, Artificial Sequence
  Description of Artificial Sequence: Synthetic oligonucleotide
cuccucgauacuggagcuc

SEQ ID NO: 1146234 - RNA, 19 nt, Artificial Sequence
  Description of Artificial Sequence: Synthetic oligonucleotide
caagcggggcucggcgggg

SEQ ID NO: 1146235 - RNA, 19 nt, Artificial Sequence
  Description of Artificial Sequence: Synthetic oligonucleotide
ggcaaccccgcucucccca

SEQ ID NO: 1146236 - RNA, 19 nt, Artificial Sequence
  Description of Artificial Sequence: Synthetic oligonucleotide
caaugcgcagggccaagua

SEQ ID NO: 1146237 - RNA, 19 nt, Artificial Sequence
  Description of Artificial Sequence: Synthetic oligonucleotide
gaccgcuuggagaccagcu

SEQ ID NO: 1146238 - RNA, 19 nt, Artificial Sequence
  Description of Artificial Sequence: Synthetic oligonucleotide
gguggggccggaacacaag

SEQ ID NO: 1146239 - RNA, 19 nt, Artificial Sequence
  Description of Artificial Sequence: Synthetic oligonucleotide
gaccgaggggaaacggcaa

SEQ ID NO: 1146240 - RNA, 19 nt, Artificial Sequence
  Description of Artificial Sequence: Synthetic oligonucleotide
cgucgugaaggcuccgccc

SEQ ID NO: 1146241 - RNA, 19 nt, Artificial Sequence
  Description of Artificial Sequence: Synthetic oligonucleotide
ggggugaaguccggcuccg

SEQ ID NO: 1146242 - RNA, 19 nt, Artificial Sequence
  Description of Artificial Sequence: Synthetic oligonucleotide
cgcagggccgugacaaugc

SEQ ID NO: 1146243 - RNA, 19 nt, Artificial Sequence
  Description of Artificial Sequence: Synthetic oligonucleotide
uggugacggggcgcagacc

SEQ ID NO: 1146244 - RNA, 19 nt, Artificial Sequence
  Description of Artificial Sequence: Synthetic oligonucleotide
gacucaguucccacguuuu

SEQ ID NO: 1146245 - RNA, 19 nt, Artificial Sequence
  Description of Artificial Sequence: Synthetic oligonucleotide
ggccgugacaaugcaguca

SEQ ID NO: 1146246 - RNA, 19 nt, Artificial Sequence
  Description of Artificial Sequence: Synthetic oligonucleotide
gcgaccgaggggaaacggc

SEQ ID NO: 1146247 - RNA, 19 nt, Artificial Sequence
  Description of Artificial Sequence: Synthetic oligonucleotide
gcauucgccggcgucguca

SEQ ID NO: 1146248 - RNA, 19 nt, Artificial Sequence
  Description of Artificial Sequence: Synthetic oligonucleotide
cgccuuacacgcugggccc

SEQ ID NO: 1146249 - RNA, 19 nt, Artificial Sequence
  Description of Artificial Sequence: Synthetic oligonucleotide
aaguuggggucuggccgua

SEQ ID NO: 1146250 - RNA, 19 nt, Artificial Sequence
  Description of Artificial Sequence: Synthetic oligonucleotide
ucgccggcgucgucauggu

SEQ ID NO: 1146251 - RNA, 19 nt, Artificial Sequence
  Description of Artificial Sequence: Synthetic oligonucleotide
auucgccggcgucgucaug

SEQ ID NO: 1146252 - RNA, 19 nt, Artificial Sequence
  Description of Artificial Sequence: Synthetic oligonucleotide
ggacgcccgggcuccgccg

SEQ ID NO: 1146253 - RNA, 19 nt, Artificial Sequence
  Description of Artificial Sequence: Synthetic oligonucleotide
aucucuccgccuggcucug

SEQ ID NO: 1146254 - RNA, 19 nt, Artificial Sequence
  Description of Artificial Sequence: Synthetic oligonucleotide
ggccgccuuacacgcuggg

SEQ ID NO: 1146255 - RNA, 19 nt, Artificial Sequence
  Description of Artificial Sequence: Synthetic oligonucleotide
ccgccuguguccgaggcac

SEQ ID NO: 1146256 - RNA, 19 nt, Artificial Sequence
  Description of Artificial Sequence: Synthetic oligonucleotide
gcgucgucauggugacggg

SEQ ID NO: 1146257 - RNA, 19 nt, Artificial Sequence
  Description of Artificial Sequence: Synthetic oligonucleotide
gcggggugaaguccggcuc

SEQ ID NO: 1146258 - RNA, 19 nt, Artificial Sequence
  Description of Artificial Sequence: Synthetic oligonucleotide
uccgccggcccgguccucu

SEQ ID NO: 1146259 - RNA, 19 nt, Artificial Sequence
  Description of Artificial Sequence: Synthetic oligonucleotide
caguuagggccaguagaaa

SEQ ID NO: 1146260 - RNA, 19 nt, Artificial Sequence
  Description of Artificial Sequence: Synthetic oligonucleotide
cuccgaaugcagcgaccga

SEQ ID NO: 1146261 - RNA, 19 nt, Artificial Sequence
  Description of Artificial Sequence: Synthetic oligonucleotide
gcuccacguggucgcuugg

SEQ ID NO: 1146262 - RNA, 19 nt, Artificial Sequence
  Description of Artificial Sequence: Synthetic oligonucleotide
ccggggcggagucuggagc

SEQ ID NO: 1146263 - RNA, 19 nt, Artificial Sequence
  Description of Artificial Sequence: Synthetic oligonucleotide
gugccguccauuauagcuu

SEQ ID NO: 1146264 - RNA, 19 nt, Artificial Sequence
  Description of Artificial Sequence: Synthetic oligonucleotide
ucccgcuccgcagggccgu

SEQ ID NO: 1146265 - RNA, 19 nt, Artificial Sequence
  Description of Artificial Sequence: Synthetic oligonucleotide
cggggugaaguccggcucc

SEQ ID NO: 1146266 - RNA, 19 nt, Artificial Sequence
  Description of Artificial Sequence: Synthetic oligonucleotide
cgggguccggugcagcucg

SEQ ID NO: 1146267 - RNA, 19 nt, Artificial Sequence
  Description of Artificial Sequence: Synthetic oligonucleotide
ggcucggcggggugaaguc

SEQ ID NO: 1146268 - RNA, 19 nt, Artificial Sequence
  Description of Artificial Sequence: Synthetic oligonucleotide
cggcuaggguagauuuugg

SEQ ID NO: 1146269 - RNA, 19 nt, Artificial Sequence
  Description of Artificial Sequence: Synthetic oligonucleotide
ccucgauacuggagcucag

SEQ ID NO: 1146270 - RNA, 19 nt, Artificial Sequence
  Description of Artificial Sequence: Synthetic oligonucleotide
ggacccucgccgccgccgc

SEQ ID NO: 1146271 - RNA, 19 nt, Artificial Sequence
  Description of Artificial Sequence: Synthetic oligonucleotide
ccuggacaccuuccagaac

SEQ ID NO: 1146272 - RNA, 19 nt, Artificial Sequence
  Description of Artificial Sequence: Synthetic oligonucleotide
gggccgugacaaugcaguc

SEQ ID NO: 1146273 - RNA, 19 nt, Artificial Sequence
  Description of Artificial Sequence: Synthetic oligonucleotide
cgaccgaggggaaacggca

SEQ ID NO: 1146274 - RNA, 19 nt, Artificial Sequence
  Description of Artificial Sequence: Synthetic oligonucleotide
gaagccccuccucgauacu

SEQ ID NO: 1146275 - RNA, 19 nt, Artificial Sequence
  Description of Artificial Sequence: Synthetic oligonucleotide
ccguagggaccgcuuggag

SEQ ID NO: 1146276 - RNA, 19 nt, Artificial Sequence
  Description of Artificial Sequence: Synthetic oligonucleotide
gggacgcccgggcuccgcc

SEQ ID NO: 1146277 - RNA, 19 nt, Artificial Sequence
  Description of Artificial Sequence: Synthetic oligonucleotide
ccggcgucgucauggugac

SEQ ID NO: 1146278 - RNA, 19 nt, Artificial Sequence
  Description of Artificial Sequence: Synthetic oligonucleotide
ggcggagucuggagcggag

SEQ ID NO: 1146279 - RNA, 19 nt, Artificial Sequence
  Description of Artificial Sequence: Synthetic oligonucleotide
caaaccccaccggcagcuc

SEQ ID NO: 1146280 - RNA, 19 nt, Artificial Sequence
  Description of Artificial Sequence: Synthetic oligonucleotide
gccacucacgccgcauccc

SEQ ID NO: 1146281 - RNA, 19 nt, Artificial Sequence
  Description of Artificial Sequence: Synthetic oligonucleotide
ccucauauuccucccggcu

SEQ ID NO: 1146282 - RNA, 19 nt, Artificial Sequence
  Description of Artificial Sequence: Synthetic oligonucleotide
gccgccuuacacgcugggc

SEQ ID NO: 1146283 - RNA, 19 nt, Artificial Sequence
  Description of Artificial Sequence: Synthetic oligonucleotide
gagucggagcucacauccu

SEQ ID NO: 1146284 - RNA, 19 nt, Artificial Sequence
  Description of Artificial Sequence: Synthetic oligonucleotide
gaaguccggcuccggccgu

SEQ ID NO: 1146285 - RNA, 19 nt, Artificial Sequence
  Description of Artificial Sequence: Synthetic oligonucleotide
gcagggccgugacaaugca

SEQ ID NO: 1146286 - RNA, 19 nt, Artificial Sequence
  Description of Artificial Sequence: Synthetic oligonucleotide
gggacacaugagcuccgaa

SEQ ID NO: 1146287 - RNA, 19 nt, Artificial Sequence
  Description of Artificial Sequence: Synthetic oligonucleotide
cuggcagagugagccggga

SEQ ID NO: 1146288 - RNA, 19 nt, Artificial Sequence
  Description of Artificial Sequence: Synthetic oligonucleotide
cucaucgugguggucugau

SEQ ID NO: 1146289 - RNA, 19 nt, Artificial Sequence
  Description of Artificial Sequence: Synthetic oligonucleotide
cugcgggguccggugcagc

SEQ ID NO: 1146290 - RNA, 19 nt, Artificial Sequence
  Description of Artificial Sequence: Synthetic oligonucleotide
gccuccggcaaccccgcuc

SEQ ID NO: 1146291 - RNA, 19 nt, Artificial Sequence
  Description of Artificial Sequence: Synthetic oligonucleotide
gcaaccccgcucuccccac

SEQ ID NO: 1146292 - RNA, 19 nt, Artificial Sequence
  Description of Artificial Sequence: Synthetic oligonucleotide
ccgaggggaaacggcaauc

SEQ ID NO: 1146293 - RNA, 19 nt, Artificial Sequence
  Description of Artificial Sequence: Synthetic oligonucleotide
ggccaaguacuuggagaga

SEQ ID NO: 1146294 - RNA, 19 nt, Artificial Sequence
  Description of Artificial Sequence: Synthetic oligonucleotide
ccuagucuggcaguauucu

SEQ ID NO: 1146295 - RNA, 19 nt, Artificial Sequence
  Description of Artificial Sequence: Synthetic oligonucleotide
cagcgucgugaaggcuccg

SEQ ID NO: 1146296 - RNA, 19 nt, Artificial Sequence
  Description of Artificial Sequence: Synthetic oligonucleotide
cagcucguagagacucagu

SEQ ID NO: 1146297 - RNA, 19 nt, Artificial Sequence
  Description of Artificial Sequence: Synthetic oligonucleotide
cccggggcggagucuggag

SEQ ID NO: 1146298 - RNA, 19 nt, Artificial Sequence
  Description of Artificial Sequence: Synthetic oligonucleotide
gacacccugugguccccau

SEQ ID NO: 1146299 - RNA, 19 nt, Artificial Sequence
  Description of Artificial Sequence: Synthetic oligonucleotide
cauucgccggcgucgucau

SEQ ID NO: 1146300 - RNA, 19 nt, Artificial Sequence
  Description of Artificial Sequence: Synthetic oligonucleotide
ccgcagggccgugacaaug

SEQ ID NO: 1146301 - RNA, 19 nt, Artificial Sequence
  Description of Artificial Sequence: Synthetic oligonucleotide
gccguagggaccgcuugga

SEQ ID NO: 1146302 - RNA, 19 nt, Artificial Sequence
  Description of Artificial Sequence: Synthetic oligonucleotide
ccuccaagcggggcucggc

SEQ ID NO: 1146303 - RNA, 19 nt, Artificial Sequence
  Description of Artificial Sequence: Synthetic oligonucleotide
gggaaacggcaaucucugu

SEQ ID NO: 1146304 - RNA, 19 nt, Artificial Sequence
  Description of Artificial Sequence: Synthetic oligonucleotide
ccccuuaugaugucauuuu

SEQ ID NO: 1146305 - RNA, 19 nt, Artificial Sequence
  Description of Artificial Sequence: Synthetic oligonucleotide
guccccuuaugaugucauu

SEQ ID NO: 1146306 - RNA, 19 nt, Artificial Sequence
  Description of Artificial Sequence: Synthetic oligonucleotide
gagcggagucggagcucac

SEQ ID NO: 1146307 - RNA, 19 nt, Artificial Sequence
  Description of Artificial Sequence: Synthetic oligonucleotide
gggcccggggcggagucug

SEQ ID NO: 1146308 - RNA, 19 nt, Artificial Sequence
  Description of Artificial Sequence: Synthetic oligonucleotide
cagaaccggugcaggcacu

SEQ ID NO: 1146309 - RNA, 19 nt, Artificial Sequence
  Description of Artificial Sequence: Synthetic oligonucleotide
gccguccauuauagcuucc

SEQ ID NO: 1146310 - RNA, 19 nt, Artificial Sequence
  Description of Artificial Sequence: Synthetic oligonucleotide
ccuuacacgcugggcccug

SEQ ID NO: 1146311 - RNA, 19 nt, Artificial Sequence
  Description of Artificial Sequence: Synthetic oligonucleotide
ggugcagcucguagagacu

SEQ ID NO: 1146312 - RNA, 19 nt, Artificial Sequence
  Description of Artificial Sequence: Synthetic oligonucleotide
gggaccgcuuggagaccag

SEQ ID NO: 1146313 - RNA, 19 nt, Artificial Sequence
  Description of Artificial Sequence: Synthetic oligonucleotide
ggcacuccuuguucccgcu

SEQ ID NO: 1146314 - RNA, 19 nt, Artificial Sequence
  Description of Artificial Sequence: Synthetic oligonucleotide
ccuccggcaaccccgcucu

SEQ ID NO: 1146315 - RNA, 19 nt, Artificial Sequence
  Description of Artificial Sequence: Synthetic oligonucleotide
ccuccucgauacuggagcu

SEQ ID NO: 1146316 - RNA, 19 nt, Artificial Sequence
  Description of Artificial Sequence: Synthetic oligonucleotide
ggggcauagcagagcucca

SEQ ID NO: 1146317 - RNA, 19 nt, Artificial Sequence
  Description of Artificial Sequence: Synthetic oligonucleotide
cgcgcugccccgccgcggg

SEQ ID NO: 1146318 - RNA, 19 nt, Artificial Sequence
  Description of Artificial Sequence: Synthetic oligonucleotide
gcauaggcccugugcugua

SEQ ID NO: 1146319 - RNA, 19 nt, Artificial Sequence
  Description of Artificial Sequence: Synthetic oligonucleotide
cuccggcaaccccgcucuc

SEQ ID NO: 1146320 - RNA, 19 nt, Artificial Sequence
  Description of Artificial Sequence: Synthetic oligonucleotide
cgucgcgcugccccgccgc

SEQ ID NO: 1146321 - RNA, 19 nt, Artificial Sequence
  Description of Artificial Sequence: Synthetic oligonucleotide
cugauccgauccaggcauu

SEQ ID NO: 1146322 - RNA, 19 nt, Artificial Sequence
  Description of Artificial Sequence: Synthetic oligonucleotide
gcuccgcagggccgugaca

SEQ ID NO: 1146323 - RNA, 19 nt, Artificial Sequence
  Description of Artificial Sequence: Synthetic oligonucleotide
cguaccuagucuggcagua

SEQ ID NO: 1146324 - RNA, 19 nt, Artificial Sequence
  Description of Artificial Sequence: Synthetic oligonucleotide
gcgacacccuguggucccc

SEQ ID NO: 1146325 - RNA, 19 nt, Artificial Sequence
  Description of Artificial Sequence: Synthetic oligonucleotide
gccggcccgguccucucga

SEQ ID NO: 1146326 - RNA, 19 nt, Artificial Sequence
  Description of Artificial Sequence: Synthetic oligonucleotide
gcaaugcgcagggccaagu

SEQ ID NO: 1146327 - RNA, 19 nt, Artificial Sequence
  Description of Artificial Sequence: Synthetic oligonucleotide
gggcggagucuggagcgga

SEQ ID NO: 1146328 - RNA, 19 nt, Artificial Sequence
  Description of Artificial Sequence: Synthetic oligonucleotide
ggcauucgccggcgucguc

SEQ ID NO: 1146329 - RNA, 19 nt, Artificial Sequence
  Description of Artificial Sequence: Synthetic oligonucleotide
cuuacacgcugggcccugu

SEQ ID NO: 1146330 - RNA, 19 nt, Artificial Sequence
  Description of Artificial Sequence: Synthetic oligonucleotide
augcagcgaccgaggggaa

SEQ ID NO: 1146331 - RNA, 19 nt, Artificial Sequence
  Description of Artificial Sequence: Synthetic oligonucleotide
gucuggccguagggaccgc

SEQ ID NO: 1146332 - RNA, 19 nt, Artificial Sequence
  Description of Artificial Sequence: Synthetic oligonucleotide
cagguccgccuguguccga

SEQ ID NO: 1146333 - RNA, 19 nt, Artificial Sequence
  Description of Artificial Sequence: Synthetic oligonucleotide
ccgcuuggagaccagcuuu

SEQ ID NO: 1146334 - RNA, 19 nt, Artificial Sequence
  Description of Artificial Sequence: Synthetic oligonucleotide
cgcuccgcagggccgugac

SEQ ID NO: 1146335 - RNA, 19 nt, Artificial Sequence
  Description of Artificial Sequence: Synthetic oligonucleotide
ccgaagccccuccucgaua

SEQ ID NO: 1146336 - RNA, 19 nt, Artificial Sequence
  Description of Artificial Sequence: Synthetic oligonucleotide
cggccgucgcgcugccccg

SEQ ID NO: 1146337 - RNA, 19 nt, Artificial Sequence
  Description of Artificial Sequence: Synthetic oligonucleotide
gcccugugcuguacaauau

SEQ ID NO: 1146338 - RNA, 19 nt, Artificial Sequence
  Description of Artificial Sequence: Synthetic oligonucleotide
ccgccgcgggccucucccc

SEQ ID NO: 1146339 - RNA, 19 nt, Artificial Sequence
  Description of Artificial Sequence: Synthetic oligonucleotide
gcggagucuggagcggagu

SEQ ID NO: 1146340 - RNA, 19 nt, Artificial Sequence
  Description of Artificial Sequence: Synthetic oligonucleotide
cucccggcuaggguagauu

SEQ ID NO: 1146341 - RNA, 19 nt, Artificial Sequence
  Description of Artificial Sequence: Synthetic oligonucleotide
ccccaccggcagcuccgcc

SEQ ID NO: 1146342 - RNA, 19 nt, Artificial Sequence
  Description of Artificial Sequence: Synthetic oligonucleotide
cccacguuuugcuggcauu

SEQ ID NO: 1146343 - RNA, 19 nt, Artificial Sequence
  Description of Artificial Sequence: Synthetic oligonucleotide
gccuuacacgcugggcccu

SEQ ID NO: 1146344 - RNA, 19 nt, Artificial Sequence
  Description of Artificial Sequence: Synthetic oligonucleotide
ggggcucggcggggugaag

SEQ ID NO: 1146345 - RNA, 19 nt, Artificial Sequence
  Description of Artificial Sequence: Synthetic oligonucleotide
cgccggcccgguccucucg

SEQ ID NO: 1146346 - RNA, 19 nt, Artificial Sequence
  Description of Artificial Sequence: Synthetic oligonucleotide
gggcauucgccggcgucgu

SEQ ID NO: 1146347 - RNA, 19 nt, Artificial Sequence
  Description of Artificial Sequence: Synthetic oligonucleotide
cccuccgggcucuaugguu

SEQ ID NO: 1146348 - RNA, 19 nt, Artificial Sequence
  Description of Artificial Sequence: Synthetic oligonucleotide
cggcccgguccucucgauc

SEQ ID NO: 1146349 - RNA, 19 nt, Artificial Sequence
  Description of Artificial Sequence: Synthetic oligonucleotide
ccccacucaucgugguggu

SEQ ID NO: 1146350 - RNA, 19 nt, Artificial Sequence
  Description of Artificial Sequence: Synthetic oligonucleotide
cgcuuggagaccagcuuuu

SEQ ID NO: 1146351 - RNA, 19 nt, Artificial Sequence
  Description of Artificial Sequence: Synthetic oligonucleotide
ggguccggugcagcucgua

SEQ ID NO: 1146352 - RNA, 19 nt, Artificial Sequence
  Description of Artificial Sequence: Synthetic oligonucleotide
ccgggcucuaugguuuccu

SEQ ID NO: 1146353 - RNA, 19 nt, Artificial Sequence
  Description of Artificial Sequence: Synthetic oligonucleotide
cccggcuaggguagauuuu

SEQ ID NO: 1146354 - RNA, 19 nt, Artificial Sequence
  Description of Artificial Sequence: Synthetic oligonucleotide
ccccgccgcgggccucucc

SEQ ID NO: 1146355 - RNA, 19 nt, Artificial Sequence
  Description of Artificial Sequence: Synthetic oligonucleotide
ccgccggcccgguccucuc

SEQ ID NO: 1146356 - RNA, 19 nt, Artificial Sequence
  Description of Artificial Sequence: Synthetic oligonucleotide
ccccaucagguccgccugu

SEQ ID NO: 1146357 - RNA, 19 nt, Artificial Sequence
  Description of Artificial Sequence: Synthetic oligonucleotide
cgacacccuguggucccca

SEQ ID NO: 1146358 - RNA, 19 nt, Artificial Sequence
  Description of Artificial Sequence: Synthetic oligonucleotide
caggcccuccgggcucuau

SEQ ID NO: 1146359 - RNA, 19 nt, Artificial Sequence
  Description of Artificial Sequence: Synthetic oligonucleotide
ccccggucaccagagucuu

SEQ ID NO: 1146360 - RNA, 19 nt, Artificial Sequence
  Description of Artificial Sequence: Synthetic oligonucleotide
gccuccgcuccagggcaau

SEQ ID NO: 1146361 - RNA, 19 nt, Artificial Sequence
  Description of Artificial Sequence: Synthetic oligonucleotide
ccccggggacgcccgggcu

SEQ ID NO: 1146362 - RNA, 19 nt, Artificial Sequence
  Description of Artificial Sequence: Synthetic oligonucleotide
cggggcucggcggggugaa

SEQ ID NO: 1146363 - RNA, 19 nt, Artificial Sequence
  Description of Artificial Sequence: Synthetic oligonucleotide
ccggcccgguccucucgau

SEQ ID NO: 1146364 - RNA, 19 nt, Artificial Sequence
  Description of Artificial Sequence: Synthetic oligonucleotide
gccccgccgcgggccucuc

SEQ ID NO: 1146365 - RNA, 19 nt, Artificial Sequence
  Description of Artificial Sequence: Synthetic oligonucleotide
cgccuccggcaaccccgcu

SEQ ID NO: 1146366 - RNA, 19 nt, Artificial Sequence
  Description of Artificial Sequence: Synthetic oligonucleotide
aaaacguuuaauguuaacc

SEQ ID NO: 1146367 - RNA, 19 nt, Artificial Sequence
  Description of Artificial Sequence: Synthetic oligonucleotide
aaauauaucaaguaucgug

SEQ ID NO: 1146368 - RNA, 19 nt, Artificial Sequence
  Description of Artificial Sequence: Synthetic oligonucleotide
aauaacaccuaagucagcc

SEQ ID NO: 1146369 - RNA, 19 nt, Artificial Sequence
  Description of Artificial Sequence: Synthetic oligonucleotide
aaaauuuagaaguacacua

SEQ ID NO: 1146370 - RNA, 19 nt, Artificial Sequence
  Description of Artificial Sequence: Synthetic oligonucleotide
uuaauguuaaccuacaaua

SEQ ID NO: 1146371 - RNA, 19 nt, Artificial Sequence
  Description of Artificial Sequence: Synthetic oligonucleotide
ucaaguaauaaccccaucc

SEQ ID NO: 1146372 - RNA, 19 nt, Artificial Sequence
  Description of Artificial Sequence: Synthetic oligonucleotide
aaacguuuaauguuaaccu

SEQ ID NO: 1146373 - RNA, 19 nt, Artificial Sequence
  Description of Artificial Sequence: Synthetic oligonucleotide
aauaagcgcaaguuagccc

SEQ ID NO: 1146374 - RNA, 19 nt, Artificial Sequence
  Description of Artificial Sequence: Synthetic oligonucleotide
uucaacauaaucauagcca

SEQ ID NO: 1146375 - RNA, 19 nt, Artificial Sequence
  Description of Artificial Sequence: Synthetic oligonucleotide
aaagaaaucgcaguucccg

SEQ ID NO: 1146376 - RNA, 19 nt, Artificial Sequence
  Description of Artificial Sequence: Synthetic oligonucleotide
cauaauaaacgucaacugg

SEQ ID NO: 1146377 - RNA, 19 nt, Artificial Sequence
  Description of Artificial Sequence: Synthetic oligonucleotide
ucguguaauagguaaaccg

SEQ ID NO: 1146378 - RNA, 19 nt, Artificial Sequence
  Description of Artificial Sequence: Synthetic oligonucleotide
aaguacacuagauuucuuc

SEQ ID NO: 1146379 - RNA, 19 nt, Artificial Sequence
  Description of Artificial Sequence: Synthetic oligonucleotide
aauagguaaaccggaaugg

SEQ ID NO: 1146380 - RNA, 19 nt, Artificial Sequence
  Description of Artificial Sequence: Synthetic oligonucleotide
aauguuaaccuacaauaca

SEQ ID NO: 1146381 - RNA, 19 nt, Artificial Sequence
  Description of Artificial Sequence: Synthetic oligonucleotide
uauaaaacguuuaauguua

SEQ ID NO: 1146382 - RNA, 19 nt, Artificial Sequence
  Description of Artificial Sequence: Synthetic oligonucleotide
agcuguauuaaccuguagg

SEQ ID NO: 1146383 - RNA, 19 nt, Artificial Sequence
  Description of Artificial Sequence: Synthetic oligonucleotide
uuuguuuguagaacaagcc

SEQ ID NO: 1146384 - RNA, 19 nt, Artificial Sequence
  Description of Artificial Sequence: Synthetic oligonucleotide
uuagaaguacacuagauuu

SEQ ID NO: 1146385 - RNA, 19 nt, Artificial Sequence
  Description of Artificial Sequence: Synthetic oligonucleotide
auaaucauagccaggaacg

SEQ ID NO: 1146386 - RNA, 19 nt, Artificial Sequence
  Description of Artificial Sequence: Synthetic oligonucleotide
aaagagaaccucugugugg

SEQ ID NO: 1146387 - RNA, 19 nt, Artificial Sequence
  Description of Artificial Sequence: Synthetic oligonucleotide
uauucguaaacugugagca

SEQ ID NO: 1146388 - RNA, 19 nt, Artificial Sequence
  Description of Artificial Sequence: Synthetic oligonucleotide
uguauuaaccuguaggggu

SEQ ID NO: 1146389 - RNA, 19 nt, Artificial Sequence
  Description of Artificial Sequence: Synthetic oligonucleotide
guugcgacagaacucaucg

SEQ ID NO: 1146390 - RNA, 19 nt, Artificial Sequence
  Description of Artificial Sequence: Synthetic oligonucleotide
auaugagaggagcaguggc

SEQ ID NO: 1146391 - RNA, 19 nt, Artificial Sequence
  Description of Artificial Sequence: Synthetic oligonucleotide
aaauuuagaaguacacuag

SEQ ID NO: 1146392 - RNA, 19 nt, Artificial Sequence
  Description of Artificial Sequence: Synthetic oligonucleotide
ucauucgucugucaggucc

SEQ ID NO: 1146393 - RNA, 19 nt, Artificial Sequence
  Description of Artificial Sequence: Synthetic oligonucleotide
uauuacacugccuugggcu

SEQ ID NO: 1146394 - RNA, 19 nt, Artificial Sequence
  Description of Artificial Sequence: Synthetic oligonucleotide
aacgucaacugguugauga

SEQ ID NO: 1146395 - RNA, 19 nt, Artificial Sequence
  Description of Artificial Sequence: Synthetic oligonucleotide
uuaagugccuggcuguacg

SEQ ID NO: 1146396 - RNA, 19 nt, Artificial Sequence
  Description of Artificial Sequence: Synthetic oligonucleotide
uaauguuaaccuacaauac

SEQ ID NO: 1146397 - RNA, 19 nt, Artificial Sequence
  Description of Artificial Sequence: Synthetic oligonucleotide
aauaaacgucaacugguug

SEQ ID NO: 1146398 - RNA, 19 nt, Artificial Sequence
  Description of Artificial Sequence: Synthetic oligonucleotide
auaaacgucaacugguuga

SEQ ID NO: 1146399 - RNA, 19 nt, Artificial Sequence
  Description of Artificial Sequence: Synthetic oligonucleotide
aaccaaaagaaaucgcagu

SEQ ID NO: 1146400 - RNA, 19 nt, Artificial Sequence
  Description of Artificial Sequence: Synthetic oligonucleotide
auaagcgcaaguuagccca

SEQ ID NO: 1146401 - RNA, 19 nt, Artificial Sequence
  Description of Artificial Sequence: Synthetic oligonucleotide
gaucuugacgcucucgggg

SEQ ID NO: 1146402 - RNA, 19 nt, Artificial Sequence
  Description of Artificial Sequence: Synthetic oligonucleotide
aaacacucggcacacccuc

SEQ ID NO: 1146403 - RNA, 19 nt, Artificial Sequence
  Description of Artificial Sequence: Synthetic oligonucleotide
guaauaaccccauccaagc

SEQ ID NO: 1146404 - RNA, 19 nt, Artificial Sequence
  Description of Artificial Sequence: Synthetic oligonucleotide
uguucucucguaaagccug

SEQ ID NO: 1146405 - RNA, 19 nt, Artificial Sequence
  Description of Artificial Sequence: Synthetic oligonucleotide
uuuagaaguacacuagauu

SEQ ID NO: 1146406 - RNA, 19 nt, Artificial Sequence
  Description of Artificial Sequence: Synthetic oligonucleotide
uuauucguaaacugugagc

SEQ ID NO: 1146407 - RNA, 19 nt, Artificial Sequence
  Description of Artificial Sequence: Synthetic oligonucleotide
aaugaaacaauguccccaa

SEQ ID NO: 1146408 - RNA, 19 nt, Artificial Sequence
  Description of Artificial Sequence: Synthetic oligonucleotide
uaaacugugagcagucugu

SEQ ID NO: 1146409 - RNA, 19 nt, Artificial Sequence
  Description of Artificial Sequence: Synthetic oligonucleotide
cauaaucauagccaggaac

SEQ ID NO: 1146410 - RNA, 19 nt, Artificial Sequence
  Description of Artificial Sequence: Synthetic oligonucleotide
aguaucguguaauagguaa

SEQ ID NO: 1146411 - RNA, 19 nt, Artificial Sequence
  Description of Artificial Sequence: Synthetic oligonucleotide
uuaucaaugagaugacuuc

SEQ ID NO: 1146412 - RNA, 19 nt, Artificial Sequence
  Description of Artificial Sequence: Synthetic oligonucleotide
guggauugaaaacacucgg

SEQ ID NO: 1146413 - RNA, 19 nt, Artificial Sequence
  Description of Artificial Sequence: Synthetic oligonucleotide
gcuguauuaaccuguaggg

SEQ ID NO: 1146414 - RNA, 19 nt, Artificial Sequence
  Description of Artificial Sequence: Synthetic oligonucleotide
ucauuggguaacuugaaaa

SEQ ID NO: 1146415 - RNA, 19 nt, Artificial Sequence
  Description of Artificial Sequence: Synthetic oligonucleotide
cuuuauuacacugccuugg

SEQ ID NO: 1146416 - RNA, 19 nt, Artificial Sequence
  Description of Artificial Sequence: Synthetic oligonucleotide
agaguguugcgacagaacu

SEQ ID NO: 1146417 - RNA, 19 nt, Artificial Sequence
  Description of Artificial Sequence: Synthetic oligonucleotide
uguaaaccuuuaaugaaaa

SEQ ID NO: 1146418 - RNA, 19 nt, Artificial Sequence
  Description of Artificial Sequence: Synthetic oligonucleotide
aacggauagguguucucuc

SEQ ID NO: 1146419 - RNA, 19 nt, Artificial Sequence
  Description of Artificial Sequence: Synthetic oligonucleotide
uccauggauucuaugcccg

SEQ ID NO: 1146420 - RNA, 19 nt, Artificial Sequence
  Description of Artificial Sequence: Synthetic oligonucleotide
ugcgacagaacucaucgga

SEQ ID NO: 1146421 - RNA, 19 nt, Artificial Sequence
  Description of Artificial Sequence: Synthetic oligonucleotide
guuauucguaaacugugag

SEQ ID NO: 1146422 - RNA, 19 nt, Artificial Sequence
  Description of Artificial Sequence: Synthetic oligonucleotide
auaauaaacgucaacuggu

SEQ ID NO: 1146423 - RNA, 19 nt, Artificial Sequence
  Description of Artificial Sequence: Synthetic oligonucleotide
aguaauaaccccauccaag

SEQ ID NO: 1146424 - RNA, 19 nt, Artificial Sequence
  Description of Artificial Sequence: Synthetic oligonucleotide
uggauugaaaacacucggc

SEQ ID NO: 1146425 - RNA, 19 nt, Artificial Sequence
  Description of Artificial Sequence: Synthetic oligonucleotide
acuugaaaaugaucuugac

SEQ ID NO: 1146426 - RNA, 19 nt, Artificial Sequence
  Description of Artificial Sequence: Synthetic oligonucleotide
uagucguucugacaccagg

SEQ ID NO: 1146427 - RNA, 19 nt, Artificial Sequence
  Description of Artificial Sequence: Synthetic oligonucleotide
acguuuaauguuaaccuac

SEQ ID NO: 1146428 - RNA, 19 nt, Artificial Sequence
  Description of Artificial Sequence: Synthetic oligonucleotide
uaugagaggagcaguggca

SEQ ID NO: 1146429 - RNA, 19 nt, Artificial Sequence
  Description of Artificial Sequence: Synthetic oligonucleotide
uauaucaaguaucguguaa

SEQ ID NO: 1146430 - RNA, 19 nt, Artificial Sequence
  Description of Artificial Sequence: Synthetic oligonucleotide
uagucauucgucugucagg

SEQ ID NO: 1146431 - RNA, 19 nt, Artificial Sequence
  Description of Artificial Sequence: Synthetic oligonucleotide
uaacccucggguuuguuug

SEQ ID NO: 1146432 - RNA, 19 nt, Artificial Sequence
  Description of Artificial Sequence: Synthetic oligonucleotide
aacguuuaauguuaaccua

SEQ ID NO: 1146433 - RNA, 19 nt, Artificial Sequence
  Description of Artificial Sequence: Synthetic oligonucleotide
uagguguucucucguaaag

SEQ ID NO: 1146434 - RNA, 19 nt, Artificial Sequence
  Description of Artificial Sequence: Synthetic oligonucleotide
guagucauucgucugucag

SEQ ID NO: 1146435 - RNA, 19 nt, Artificial Sequence
  Description of Artificial Sequence: Synthetic oligonucleotide
gauaugagaggagcagugg

SEQ ID NO: 1146436 - RNA, 19 nt, Artificial Sequence
  Description of Artificial Sequence: Synthetic oligonucleotide
aucagguugaaugaggccu

SEQ ID NO: 1146437 - RNA, 19 nt, Artificial Sequence
  Description of Artificial Sequence: Synthetic oligonucleotide
aaaagagugcauaaaugaa

SEQ ID NO: 1146438 - RNA, 19 nt, Artificial Sequence
  Description of Artificial Sequence: Synthetic oligonucleotide
uuguagaacaagcccaaaa

SEQ ID NO: 1146439 - RNA, 19 nt, Artificial Sequence
  Description of Artificial Sequence: Synthetic oligonucleotide
uagaaguacacuagauuuc

SEQ ID NO: 1146440 - RNA, 19 nt, Artificial Sequence
  Description of Artificial Sequence: Synthetic oligonucleotide
uaucaaugagaugacuuca

SEQ ID NO: 1146441 - RNA, 19 nt, Artificial Sequence
  Description of Artificial Sequence: Synthetic oligonucleotide
uaaucauagccaggaacgg

SEQ ID NO: 1146442 - RNA, 19 nt, Artificial Sequence
  Description of Artificial Sequence: Synthetic oligonucleotide
accuuuauuacacugccuu

SEQ ID NO: 1146443 - RNA, 19 nt, Artificial Sequence
  Description of Artificial Sequence: Synthetic oligonucleotide
uaacaccuaagucagccuc

SEQ ID NO: 1146444 - RNA, 19 nt, Artificial Sequence
  Description of Artificial Sequence: Synthetic oligonucleotide
aacugugagcagucuguuc

SEQ ID NO: 1146445 - RNA, 19 nt, Artificial Sequence
  Description of Artificial Sequence: Synthetic oligonucleotide
gaacaagcccaaaagagca

SEQ ID NO: 1146446 - RNA, 19 nt, Artificial Sequence
  Description of Artificial Sequence: Synthetic oligonucleotide
aucguguaauagguaaacc

SEQ ID NO: 1146447 - RNA, 19 nt, Artificial Sequence
  Description of Artificial Sequence: Synthetic oligonucleotide
agguggauugaaaacacuc

SEQ ID NO: 1146448 - RNA, 19 nt, Artificial Sequence
  Description of Artificial Sequence: Synthetic oligonucleotide
gguaacuugaaaaugaucu

SEQ ID NO: 1146449 - RNA, 19 nt, Artificial Sequence
  Description of Artificial Sequence: Synthetic oligonucleotide
uaucaaguaauaaccccau

SEQ ID NO: 1146450 - RNA, 19 nt, Artificial Sequence
  Description of Artificial Sequence: Synthetic oligonucleotide
guacacuagauuucuucag

SEQ ID NO: 1146451 - RNA, 19 nt, Artificial Sequence
  Description of Artificial Sequence: Synthetic oligonucleotide
aguguugcgacagaacuca

SEQ ID NO: 1146452 - RNA, 19 nt, Artificial Sequence
  Description of Artificial Sequence: Synthetic oligonucleotide
agaaguacacuagauuucu

SEQ ID NO: 1146453 - RNA, 19 nt, Artificial Sequence
  Description of Artificial Sequence: Synthetic oligonucleotide
cucguaaagccugugagac

SEQ ID NO: 1146454 - RNA, 19 nt, Artificial Sequence
  Description of Artificial Sequence: Synthetic oligonucleotide
agguaaaccggaauggaag

SEQ ID NO: 1146455 - RNA, 19 nt, Artificial Sequence
  Description of Artificial Sequence: Synthetic oligonucleotide
uuaugcugcuccaaagcaa

SEQ ID NO: 1146456 - RNA, 19 nt, Artificial Sequence
  Description of Artificial Sequence: Synthetic oligonucleotide
ugacugauagagacuguga

SEQ ID NO: 1146457 - RNA, 19 nt, Artificial Sequence
  Description of Artificial Sequence: Synthetic oligonucleotide
acggauagguguucucucg

SEQ ID NO: 1146458 - RNA, 19 nt, Artificial Sequence
  Description of Artificial Sequence: Synthetic oligonucleotide
uaauaaacgucaacugguu

SEQ ID NO: 1146459 - RNA, 19 nt, Artificial Sequence
  Description of Artificial Sequence: Synthetic oligonucleotide
uguuaaccuacaauacaau

SEQ ID NO: 1146460 - RNA, 19 nt, Artificial Sequence
  Description of Artificial Sequence: Synthetic oligonucleotide
ugugagacccuguaacccu

SEQ ID NO: 1146461 - RNA, 19 nt, Artificial Sequence
  Description of Artificial Sequence: Synthetic oligonucleotide
uaucguguaauagguaaac

SEQ ID NO: 1146462 - RNA, 19 nt, Artificial Sequence
  Description of Artificial Sequence: Synthetic oligonucleotide
uacguucccugguagaaga

SEQ ID NO: 1146463 - RNA, 19 nt, Artificial Sequence
  Description of Artificial Sequence: Synthetic oligonucleotide
uucguaaacugugagcagu

SEQ ID NO: 1146464 - RNA, 19 nt, Artificial Sequence
  Description of Artificial Sequence: Synthetic oligonucleotide
cuguauuaaccuguagggg

SEQ ID NO: 1146465 - RNA, 19 nt, Artificial Sequence
  Description of Artificial Sequence: Synthetic oligonucleotide
gguguucucucguaaagcc

SEQ ID NO: 1146466 - RNA, 19 nt, Artificial Sequence
  Description of Artificial Sequence: Synthetic oligonucleotide
acacuagauuucuucagga

SEQ ID NO: 1146467 - RNA, 19 nt, Artificial Sequence
  Description of Artificial Sequence: Synthetic oligonucleotide
uauuaaccuguaggggucg

SEQ ID NO: 1146468 - RNA, 19 nt, Artificial Sequence
  Description of Artificial Sequence: Synthetic oligonucleotide
ccguauaaaacgaagagca

SEQ ID NO: 1146469 - RNA, 19 nt, Artificial Sequence
  Description of Artificial Sequence: Synthetic oligonucleotide
uagguaaaccggaauggaa

SEQ ID NO: 1146470 - RNA, 19 nt, Artificial Sequence
  Description of Artificial Sequence: Synthetic oligonucleotide
gaaaaugaucuugacgcuc

SEQ ID NO: 1146471 - RNA, 19 nt, Artificial Sequence
  Description of Artificial Sequence: Synthetic oligonucleotide
aaguagucauucgucuguc

SEQ ID NO: 1146472 - RNA, 19 nt, Artificial Sequence
  Description of Artificial Sequence: Synthetic oligonucleotide
uaaaacguuuaauguuaac

SEQ ID NO: 1146473 - RNA, 19 nt, Artificial Sequence
  Description of Artificial Sequence: Synthetic oligonucleotide
cguguaauagguaaaccgg

SEQ ID NO: 1146474 - RNA, 19 nt, Artificial Sequence
  Description of Artificial Sequence: Synthetic oligonucleotide
acgaagagcaaaccuaaau

SEQ ID NO: 1146475 - RNA, 19 nt, Artificial Sequence
  Description of Artificial Sequence: Synthetic oligonucleotide
auaucaaguaucguguaau

SEQ ID NO: 1146476 - RNA, 19 nt, Artificial Sequence
  Description of Artificial Sequence: Synthetic oligonucleotide
gguggauugaaaacacucg

SEQ ID NO: 1146477 - RNA, 19 nt, Artificial Sequence
  Description of Artificial Sequence: Synthetic oligonucleotide
agacugugaaaacuggaau

SEQ ID NO: 1146478 - RNA, 19 nt, Artificial Sequence
  Description of Artificial Sequence: Synthetic oligonucleotide
guaggggucgggaaggagg

SEQ ID NO: 1146479 - RNA, 19 nt, Artificial Sequence
  Description of Artificial Sequence: Synthetic oligonucleotide
cagggcaccuuuauuacac

SEQ ID NO: 1146480 - RNA, 19 nt, Artificial Sequence
  Description of Artificial Sequence: Synthetic oligonucleotide
gagucauuggguaacuuga

SEQ ID NO: 1146481 - RNA, 19 nt, Artificial Sequence
  Description of Artificial Sequence: Synthetic oligonucleotide
gauucuaugcccgucaggu

SEQ ID NO: 1146482 - RNA, 19 nt, Artificial Sequence
  Description of Artificial Sequence: Synthetic oligonucleotide
aagacagggugugcccucc

SEQ ID NO: 1146483 - RNA, 19 nt, Artificial Sequence
  Description of Artificial Sequence: Synthetic oligonucleotide
ugggcuaaggagccccagg

SEQ ID NO: 1146484 - RNA, 19 nt, Artificial Sequence
  Description of Artificial Sequence: Synthetic oligonucleotide
ugauagagacugugaaaac

SEQ ID NO: 1146485 - RNA, 19 nt, Artificial Sequence
  Description of Artificial Sequence: Synthetic oligonucleotide
ggauugaaaacacucggca

SEQ ID NO: 1146486 - RNA, 19 nt, Artificial Sequence
  Description of Artificial Sequence: Synthetic oligonucleotide
auguuaaccuacaauacaa

SEQ ID NO: 1146487 - RNA, 19 nt, Artificial Sequence
  Description of Artificial Sequence: Synthetic oligonucleotide
aaucgucucucuacucugg

SEQ ID NO: 1146488 - RNA, 19 nt, Artificial Sequence
  Description of Artificial Sequence: Synthetic oligonucleotide
cugauagagacugugaaaa

SEQ ID NO: 1146489 - RNA, 19 nt, Artificial Sequence
  Description of Artificial Sequence: Synthetic oligonucleotide
agaaaucgcaguucccgcu

SEQ ID NO: 1146490 - RNA, 19 nt, Artificial Sequence
  Description of Artificial Sequence: Synthetic oligonucleotide
ucguucugacaccagguaa

SEQ ID NO: 1146491 - RNA, 19 nt, Artificial Sequence
  Description of Artificial Sequence: Synthetic oligonucleotide
gguaaaccggaauggaagc

SEQ ID NO: 1146492 - RNA, 19 nt, Artificial Sequence
  Description of Artificial Sequence: Synthetic oligonucleotide
auucguaaacugugagcag

SEQ ID NO: 1146493 - RNA, 19 nt, Artificial Sequence
  Description of Artificial Sequence: Synthetic oligonucleotide
uggauucuaugcccgucag

SEQ ID NO: 1146494 - RNA, 19 nt, Artificial Sequence
  Description of Artificial Sequence: Synthetic oligonucleotide
caagcccaaaagagcaucc

SEQ ID NO: 1146495 - RNA, 19 nt, Artificial Sequence
  Description of Artificial Sequence: Synthetic oligonucleotide
ggccguauaaaacgaagag

SEQ ID NO: 1146496 - RNA, 19 nt, Artificial Sequence
  Description of Artificial Sequence: Synthetic oligonucleotide
ugugaucagcuguauuaac

SEQ ID NO: 1146497 - RNA, 19 nt, Artificial Sequence
  Description of Artificial Sequence: Synthetic oligonucleotide
uggguaacuugaaaaugau

SEQ ID NO: 1146498 - RNA, 19 nt, Artificial Sequence
  Description of Artificial Sequence: Synthetic oligonucleotide
auggauucuaugcccguca

SEQ ID NO: 1146499 - RNA, 19 nt, Artificial Sequence
  Description of Artificial Sequence: Synthetic oligonucleotide
gcauccauaauaaacguca

SEQ ID NO: 1146500 - RNA, 19 nt, Artificial Sequence
  Description of Artificial Sequence: Synthetic oligonucleotide
auaagaagucauggaugac

SEQ ID NO: 1146501 - RNA, 19 nt, Artificial Sequence
  Description of Artificial Sequence: Synthetic oligonucleotide
caggaaauucaaaugaccu

SEQ ID NO: 1146502 - RNA, 19 nt, Artificial Sequence
  Description of Artificial Sequence: Synthetic oligonucleotide
ucguaaacugugagcaguc

SEQ ID NO: 1146503 - RNA, 19 nt, Artificial Sequence
  Description of Artificial Sequence: Synthetic oligonucleotide
caugcggcgauccuucaac

SEQ ID NO: 1146504 - RNA, 19 nt, Artificial Sequence
  Description of Artificial Sequence: Synthetic oligonucleotide
caucagguugaaugaggcc

SEQ ID NO: 1146505 - RNA, 19 nt, Artificial Sequence
  Description of Artificial Sequence: Synthetic oligonucleotide
gauagguguucucucguaa

SEQ ID NO: 1146506 - RNA, 19 nt, Artificial Sequence
  Description of Artificial Sequence: Synthetic oligonucleotide
ucuguguggcgugaguccc

SEQ ID NO: 1146507 - RNA, 19 nt, Artificial Sequence
  Description of Artificial Sequence: Synthetic oligonucleotide
uguacguucccugguagaa

SEQ ID NO: 1146508 - RNA, 19 nt, Artificial Sequence
  Description of Artificial Sequence: Synthetic oligonucleotide
gguaagucugguuugcauc

SEQ ID NO: 1146509 - RNA, 19 nt, Artificial Sequence
  Description of Artificial Sequence: Synthetic oligonucleotide
agcgcaaguuagcccaggg

SEQ ID NO: 1146510 - RNA, 19 nt, Artificial Sequence
  Description of Artificial Sequence: Synthetic oligonucleotide
uguugcgacagaacucauc

SEQ ID NO: 1146511 - RNA, 19 nt, Artificial Sequence
  Description of Artificial Sequence: Synthetic oligonucleotide
auagguaaaccggaaugga

SEQ ID NO: 1146512 - RNA, 19 nt, Artificial Sequence
  Description of Artificial Sequence: Synthetic oligonucleotide
uaaaccggaauggaagcau

SEQ ID NO: 1146513 - RNA, 19 nt, Artificial Sequence
  Description of Artificial Sequence: Synthetic oligonucleotide
uugcgacagaacucaucgg

SEQ ID NO: 1146514 - RNA, 19 nt, Artificial Sequence
  Description of Artificial Sequence: Synthetic oligonucleotide
uucuagucguucugacacc

SEQ ID NO: 1146515 - RNA, 19 nt, Artificial Sequence
  Description of Artificial Sequence: Synthetic oligonucleotide
auagguguucucucguaaa

SEQ ID NO: 1146516 - RNA, 19 nt, Artificial Sequence
  Description of Artificial Sequence: Synthetic oligonucleotide
aucuugacgcucucggggu

SEQ ID NO: 1146517 - RNA, 19 nt, Artificial Sequence
  Description of Artificial Sequence: Synthetic oligonucleotide
agacccuguaacccucggg

SEQ ID NO: 1146518 - RNA, 19 nt, Artificial Sequence
  Description of Artificial Sequence: Synthetic oligonucleotide
cugugagacccuguaaccc

SEQ ID NO: 1146519 - RNA, 19 nt, Artificial Sequence
  Description of Artificial Sequence: Synthetic oligonucleotide
uuaaccuguaggggucggg

SEQ ID NO: 1146520 - RNA, 19 nt, Artificial Sequence
  Description of Artificial Sequence: Synthetic oligonucleotide
aguuauucguaaacuguga

SEQ ID NO: 1146521 - RNA, 19 nt, Artificial Sequence
  Description of Artificial Sequence: Synthetic oligonucleotide
uccucugaagggacacaag

SEQ ID NO: 1146522 - RNA, 19 nt, Artificial Sequence
  Description of Artificial Sequence: Synthetic oligonucleotide
uaaacgucaacugguugau

SEQ ID NO: 1146523 - RNA, 19 nt, Artificial Sequence
  Description of Artificial Sequence: Synthetic oligonucleotide
ucuagccggcccaccacag

SEQ ID NO: 1146524 - RNA, 19 nt, Artificial Sequence
  Description of Artificial Sequence: Synthetic oligonucleotide
aacaccuaagucagccuca

SEQ ID NO: 1146525 - RNA, 19 nt, Artificial Sequence
  Description of Artificial Sequence: Synthetic oligonucleotide
agucaugcggcgauccuuc

SEQ ID NO: 1146526 - RNA, 19 nt, Artificial Sequence
  Description of Artificial Sequence: Synthetic oligonucleotide
uaagcgcaaguuagcccag

SEQ ID NO: 1146527 - RNA, 19 nt, Artificial Sequence
  Description of Artificial Sequence: Synthetic oligonucleotide
ucuaugcccgucagguccu

SEQ ID NO: 1146528 - RNA, 19 nt, Artificial Sequence
  Description of Artificial Sequence: Synthetic oligonucleotide
ucguaaagccugugagacc

SEQ ID NO: 1146529 - RNA, 19 nt, Artificial Sequence
  Description of Artificial Sequence: Synthetic oligonucleotide
auuacacugccuugggcua

SEQ ID NO: 1146530 - RNA, 19 nt, Artificial Sequence
  Description of Artificial Sequence: Synthetic oligonucleotide
ucggguuuguuuguagaac

SEQ ID NO: 1146531 - RNA, 19 nt, Artificial Sequence
  Description of Artificial Sequence: Synthetic oligonucleotide
uaaccuguaggggucggga

SEQ ID NO: 1146532 - RNA, 19 nt, Artificial Sequence
  Description of Artificial Sequence: Synthetic oligonucleotide
guauuaaccuguagggguc

SEQ ID NO: 1146533 - RNA, 19 nt, Artificial Sequence
  Description of Artificial Sequence: Synthetic oligonucleotide
uuggcaucguuaagugccu

SEQ ID NO: 1146534 - RNA, 19 nt, Artificial Sequence
  Description of Artificial Sequence: Synthetic oligonucleotide
caaggcaggacccgucuug

SEQ ID NO: 1146535 - RNA, 19 nt, Artificial Sequence
  Description of Artificial Sequence: Synthetic oligonucleotide
aguagucauucgucuguca

SEQ ID NO: 1146536 - RNA, 19 nt, Artificial Sequence
  Description of Artificial Sequence: Synthetic oligonucleotide
ucgcaguucccgcuuggca

SEQ ID NO: 1146537 - RNA, 19 nt, Artificial Sequence
  Description of Artificial Sequence: Synthetic oligonucleotide
agguaagucugguuugcau

SEQ ID NO: 1146538 - RNA, 19 nt, Artificial Sequence
  Description of Artificial Sequence: Synthetic oligonucleotide
ggucguuaucauuacaaaa

SEQ ID NO: 1146539 - RNA, 19 nt, Artificial Sequence
  Description of Artificial Sequence: Synthetic oligonucleotide
gccguauaaaacgaagagc

SEQ ID NO: 1146540 - RNA, 19 nt, Artificial Sequence
  Description of Artificial Sequence: Synthetic oligonucleotide
ggcaucguuaagugccugg

SEQ ID NO: 1146541 - RNA, 19 nt, Artificial Sequence
  Description of Artificial Sequence: Synthetic oligonucleotide
uuccucugaagggacacaa

SEQ ID NO: 1146542 - RNA, 19 nt, Artificial Sequence
  Description of Artificial Sequence: Synthetic oligonucleotide
ggauaugagaggagcagug

SEQ ID NO: 1146543 - RNA, 19 nt, Artificial Sequence
  Description of Artificial Sequence: Synthetic oligonucleotide
aaggcgacacugauccaug

SEQ ID NO: 1146544 - RNA, 19 nt, Artificial Sequence
  Description of Artificial Sequence: Synthetic oligonucleotide
caaagcaaggcgacacuga

SEQ ID NO: 1146545 - RNA, 19 nt, Artificial Sequence
  Description of Artificial Sequence: Synthetic oligonucleotide
aggcgacacugauccaugg

SEQ ID NO: 1146546 - RNA, 19 nt, Artificial Sequence
  Description of Artificial Sequence: Synthetic oligonucleotide
auuaaccuguaggggucgg

SEQ ID NO: 1146547 - RNA, 19 nt, Artificial Sequence
  Description of Artificial Sequence: Synthetic oligonucleotide
aucgcaguucccgcuuggc

SEQ ID NO: 1146548 - RNA, 19 nt, Artificial Sequence
  Description of Artificial Sequence: Synthetic oligonucleotide
auaaaacguuuaauguuaa

SEQ ID NO: 1146549 - RNA, 19 nt, Artificial Sequence
  Description of Artificial Sequence: Synthetic oligonucleotide
aaccuacaauacaauguaa

SEQ ID NO: 1146550 - RNA, 19 nt, Artificial Sequence
  Description of Artificial Sequence: Synthetic oligonucleotide
agagcauccugcuguuuau

SEQ ID NO: 1146551 - RNA, 19 nt, Artificial Sequence
  Description of Artificial Sequence: Synthetic oligonucleotide
caggacuuuccuucaagga

SEQ ID NO: 1146552 - RNA, 19 nt, Artificial Sequence
  Description of Artificial Sequence: Synthetic oligonucleotide
ucccgcuuggcaucguuaa

SEQ ID NO: 1146553 - RNA, 19 nt, Artificial Sequence
  Description of Artificial Sequence: Synthetic oligonucleotide
gaguguugcgacagaacuc

SEQ ID NO: 1146554 - RNA, 19 nt, Artificial Sequence
  Description of Artificial Sequence: Synthetic oligonucleotide
aacccucggguuuguuugu

SEQ ID NO: 1146555 - RNA, 19 nt, Artificial Sequence
  Description of Artificial Sequence: Synthetic oligonucleotide
ggcaccuuuauuacacugc

SEQ ID NO: 1146556 - RNA, 19 nt, Artificial Sequence
  Description of Artificial Sequence: Synthetic oligonucleotide
ggauucuaugcccgucagg

SEQ ID NO: 1146557 - RNA, 19 nt, Artificial Sequence
  Description of Artificial Sequence: Synthetic oligonucleotide
aaacgucaacugguugaug

SEQ ID NO: 1146558 - RNA, 19 nt, Artificial Sequence
  Description of Artificial Sequence: Synthetic oligonucleotide
uggaaucgucucucuacuc

SEQ ID NO: 1146559 - RNA, 19 nt, Artificial Sequence
  Description of Artificial Sequence: Synthetic oligonucleotide
guaauagguaaaccggaau

SEQ ID NO: 1146560 - RNA, 19 nt, Artificial Sequence
  Description of Artificial Sequence: Synthetic oligonucleotide
aucgucucucuacucugga

SEQ ID NO: 1146561 - RNA, 19 nt, Artificial Sequence
  Description of Artificial Sequence: Synthetic oligonucleotide
uccgcccucagagaagcca

SEQ ID NO: 1146562 - RNA, 19 nt, Artificial Sequence
  Description of Artificial Sequence: Synthetic oligonucleotide
gucauuggguaacuugaaa

SEQ ID NO: 1146563 - RNA, 19 nt, Artificial Sequence
  Description of Artificial Sequence: Synthetic oligonucleotide
cugggauaugagaggagca

SEQ ID NO: 1146564 - RNA, 19 nt, Artificial Sequence
  Description of Artificial Sequence: Synthetic oligonucleotide
agucguucugacaccaggu

SEQ ID NO: 1146565 - RNA, 19 nt, Artificial Sequence
  Description of Artificial Sequence: Synthetic oligonucleotide
cacagucaugcggcgaucc

SEQ ID NO: 1146566 - RNA, 19 nt, Artificial Sequence
  Description of Artificial Sequence: Synthetic oligonucleotide
ugguccgcccucagagaag

SEQ ID NO: 1146567 - RNA, 19 nt, Artificial Sequence
  Description of Artificial Sequence: Synthetic oligonucleotide
gguucaggccguauaaaac

SEQ ID NO: 1146568 - RNA, 19 nt, Artificial Sequence
  Description of Artificial Sequence: Synthetic oligonucleotide
aggccguauaaaacgaaga

SEQ ID NO: 1146569 - RNA, 19 nt, Artificial Sequence
  Description of Artificial Sequence: Synthetic oligonucleotide
aggcgcuccaacuuucuuu

SEQ ID NO: 1146570 - RNA, 19 nt, Artificial Sequence
  Description of Artificial Sequence: Synthetic oligonucleotide
uuuguagaacaagcccaaa

SEQ ID NO: 1146571 - RNA, 19 nt, Artificial Sequence
  Description of Artificial Sequence: Synthetic oligonucleotide
guaaaccggaauggaagca

SEQ ID NO: 1146572 - RNA, 19 nt, Artificial Sequence
  Description of Artificial Sequence: Synthetic oligonucleotide
aacaagcccaaaagagcau

SEQ ID NO: 1146573 - RNA, 19 nt, Artificial Sequence
  Description of Artificial Sequence: Synthetic oligonucleotide
ucaugcggcgauccuucaa

SEQ ID NO: 1146574 - RNA, 19 nt, Artificial Sequence
  Description of Artificial Sequence: Synthetic oligonucleotide
cccgucuugggaaauuggc

SEQ ID NO: 1146575 - RNA, 19 nt, Artificial Sequence
  Description of Artificial Sequence: Synthetic oligonucleotide
gacccgucuugggaaauug

SEQ ID NO: 1146576 - RNA, 19 nt, Artificial Sequence
  Description of Artificial Sequence: Synthetic oligonucleotide
guacguucccugguagaag

SEQ ID NO: 1146577 - RNA, 19 nt, Artificial Sequence
  Description of Artificial Sequence: Synthetic oligonucleotide
uguguggcgugagucccgc

SEQ ID NO: 1146578 - RNA, 19 nt, Artificial Sequence
  Description of Artificial Sequence: Synthetic oligonucleotide
ccuuuauuacacugccuug

SEQ ID NO: 1146579 - RNA, 19 nt, Artificial Sequence
  Description of Artificial Sequence: Synthetic oligonucleotide
aaaccggaauggaagcauu

SEQ ID NO: 1146580 - RNA, 19 nt, Artificial Sequence
  Description of Artificial Sequence: Synthetic oligonucleotide
gcuguacguucccugguag

SEQ ID NO: 1146581 - RNA, 19 nt, Artificial Sequence
  Description of Artificial Sequence: Synthetic oligonucleotide
cauccauaauaaacgucaa

SEQ ID NO: 1146582 - RNA, 19 nt, Artificial Sequence
  Description of Artificial Sequence: Synthetic oligonucleotide
ggagguggauugaaaacac

SEQ ID NO: 1146583 - RNA, 19 nt, Artificial Sequence
  Description of Artificial Sequence: Synthetic oligonucleotide
aaguaucguguaauaggua

SEQ ID NO: 1146584 - RNA, 19 nt, Artificial Sequence
  Description of Artificial Sequence: Synthetic oligonucleotide
acagucaugcggcgauccu

SEQ ID NO: 1146585 - RNA, 19 nt, Artificial Sequence
  Description of Artificial Sequence: Synthetic oligonucleotide
cuucuagccggcccaccac

SEQ ID NO: 1146586 - RNA, 19 nt, Artificial Sequence
  Description of Artificial Sequence: Synthetic oligonucleotide
aacgaagagcaaaccuaaa

SEQ ID NO: 1146587 - RNA, 19 nt, Artificial Sequence
  Description of Artificial Sequence: Synthetic oligonucleotide
cauggauucuaugcccguc

SEQ ID NO: 1146588 - RNA, 19 nt, Artificial Sequence
  Description of Artificial Sequence: Synthetic oligonucleotide
gggcaccuuuauuacacug

SEQ ID NO: 1146589 - RNA, 19 nt, Artificial Sequence
  Description of Artificial Sequence: Synthetic oligonucleotide
gcacacagaguguugcgac

SEQ ID NO: 1146590 - RNA, 19 nt, Artificial Sequence
  Description of Artificial Sequence: Synthetic oligonucleotide
uggcgugagucccgccucc

SEQ ID NO: 1146591 - RNA, 19 nt, Artificial Sequence
  Description of Artificial Sequence: Synthetic oligonucleotide
guaucguguaauagguaaa

SEQ ID NO: 1146592 - RNA, 19 nt, Artificial Sequence
  Description of Artificial Sequence: Synthetic oligonucleotide
augcggcgauccuucaaca

SEQ ID NO: 1146593 - RNA, 19 nt, Artificial Sequence
  Description of Artificial Sequence: Synthetic oligonucleotide
agggcaccuuuauuacacu

SEQ ID NO: 1146594 - RNA, 19 nt, Artificial Sequence
  Description of Artificial Sequence: Synthetic oligonucleotide
aaccggaauggaagcauua

SEQ ID NO: 1146595 - RNA, 19 nt, Artificial Sequence
  Description of Artificial Sequence: Synthetic oligonucleotide
cacacagaguguugcgaca

SEQ ID NO: 1146596 - RNA, 19 nt, Artificial Sequence
  Description of Artificial Sequence: Synthetic oligonucleotide
aggcaggacccgucuuggg

SEQ ID NO: 1146597 - RNA, 19 nt, Artificial Sequence
  Description of Artificial Sequence: Synthetic oligonucleotide
acccgucuugggaaauugg

SEQ ID NO: 1146598 - RNA, 19 nt, Artificial Sequence
  Description of Artificial Sequence: Synthetic oligonucleotide
accggaauggaagcauuau

SEQ ID NO: 1146599 - RNA, 19 nt, Artificial Sequence
  Description of Artificial Sequence: Synthetic oligonucleotide
gcaucguuaagugccuggc

SEQ ID NO: 1146600 - RNA, 19 nt, Artificial Sequence
  Description of Artificial Sequence: Synthetic oligonucleotide
ggguucaggccguauaaaa

SEQ ID NO: 1146601 - RNA, 19 nt, Artificial Sequence
  Description of Artificial Sequence: Synthetic oligonucleotide
gacagggugugcccuccca

SEQ ID NO: 1146602 - RNA, 19 nt, Artificial Sequence
  Description of Artificial Sequence: Synthetic oligonucleotide
gcgacagaacucaucggag

SEQ ID NO: 1146603 - RNA, 19 nt, Artificial Sequence
  Description of Artificial Sequence: Synthetic oligonucleotide
cuguacguucccugguaga

SEQ ID NO: 1146604 - RNA, 19 nt, Artificial Sequence
  Description of Artificial Sequence: Synthetic oligonucleotide
gucguucugacaccaggua

SEQ ID NO: 1146605 - RNA, 19 nt, Artificial Sequence
  Description of Artificial Sequence: Synthetic oligonucleotide
cgcaaguuagcccagggca

SEQ ID NO: 1146606 - RNA, 19 nt, Artificial Sequence
  Description of Artificial Sequence: Synthetic oligonucleotide
acguucccugguagaagac

SEQ ID NO: 1146607 - RNA, 19 nt, Artificial Sequence
  Description of Artificial Sequence: Synthetic oligonucleotide
accucuguguggcgugagu

SEQ ID NO: 1146608 - RNA, 19 nt, Artificial Sequence
  Description of Artificial Sequence: Synthetic oligonucleotide
gggacacaaggcaggaccc

SEQ ID NO: 1146609 - RNA, 19 nt, Artificial Sequence
  Description of Artificial Sequence: Synthetic oligonucleotide
uucgucugucagguccuga

SEQ ID NO: 1146610 - RNA, 19 nt, Artificial Sequence
  Description of Artificial Sequence: Synthetic oligonucleotide
gguagaagacagggugugc

SEQ ID NO: 1146611 - RNA, 19 nt, Artificial Sequence
  Description of Artificial Sequence: Synthetic oligonucleotide
gguccgcccucagagaagc

SEQ ID NO: 1146612 - RNA, 19 nt, Artificial Sequence
  Description of Artificial Sequence: Synthetic oligonucleotide
ucggggucaucugcaggug

SEQ ID NO: 1146613 - RNA, 19 nt, Artificial Sequence
  Description of Artificial Sequence: Synthetic oligonucleotide
gacgcucucggggucaucu

SEQ ID NO: 1146614 - RNA, 19 nt, Artificial Sequence
  Description of Artificial Sequence: Synthetic oligonucleotide
ccggaauggaagcauuauc

SEQ ID NO: 1146615 - RNA, 19 nt, Artificial Sequence
  Description of Artificial Sequence: Synthetic oligonucleotide
caguucccgcuuggcaucg

SEQ ID NO: 1146616 - RNA, 19 nt, Artificial Sequence
  Description of Artificial Sequence: Synthetic oligonucleotide
gcgcaaguuagcccagggc

SEQ ID NO: 1146617 - RNA, 19 nt, Artificial Sequence
  Description of Artificial Sequence: Synthetic oligonucleotide
acaccuaagucagccucau

SEQ ID NO: 1146618 - RNA, 19 nt, Artificial Sequence
  Description of Artificial Sequence: Synthetic oligonucleotide
cacucggcacacccucuug

SEQ ID NO: 1146619 - RNA, 19 nt, Artificial Sequence
  Description of Artificial Sequence: Synthetic oligonucleotide
uggcaucguuaagugccug

SEQ ID NO: 1146620 - RNA, 19 nt, Artificial Sequence
  Description of Artificial Sequence: Synthetic oligonucleotide
aggcaggcgcuccaacuuu

SEQ ID NO: 1146621 - RNA, 19 nt, Artificial Sequence
  Description of Artificial Sequence: Synthetic oligonucleotide
guggcgugagucccgccuc

SEQ ID NO: 1146622 - RNA, 19 nt, Artificial Sequence
  Description of Artificial Sequence: Synthetic oligonucleotide
cguuuaauguuaaccuaca

SEQ ID NO: 1146623 - RNA, 19 nt, Artificial Sequence
  Description of Artificial Sequence: Synthetic oligonucleotide
ugacccggcugcgaggguu

SEQ ID NO: 1146624 - RNA, 19 nt, Artificial Sequence
  Description of Artificial Sequence: Synthetic oligonucleotide
uggagucauuggguaacuu

SEQ ID NO: 1146625 - RNA, 19 nt, Artificial Sequence
  Description of Artificial Sequence: Synthetic oligonucleotide
auucgucugucagguccug

SEQ ID NO: 1146626 - RNA, 19 nt, Artificial Sequence
  Description of Artificial Sequence: Synthetic oligonucleotide
uccuuucggcgucgccgcu

SEQ ID NO: 1146627 - RNA, 19 nt, Artificial Sequence
  Description of Artificial Sequence: Synthetic oligonucleotide
ggcgacacugauccaugga

SEQ ID NO: 1146628 - RNA, 19 nt, Artificial Sequence
  Description of Artificial Sequence: Synthetic oligonucleotide
gagguggauugaaaacacu

SEQ ID NO: 1146629 - RNA, 19 nt, Artificial Sequence
  Description of Artificial Sequence: Synthetic oligonucleotide
ccuguaacccucggguuug

SEQ ID NO: 1146630 - RNA, 19 nt, Artificial Sequence
  Description of Artificial Sequence: Synthetic oligonucleotide
ucucuacucuggagucauu

SEQ ID NO: 1146631 - RNA, 19 nt, Artificial Sequence
  Description of Artificial Sequence: Synthetic oligonucleotide
uaugcccgucagguccuga

SEQ ID NO: 1146632 - RNA, 19 nt, Artificial Sequence
  Description of Artificial Sequence: Synthetic oligonucleotide
ggcgucgccgcucucgcuc

SEQ ID NO: 1146633 - RNA, 19 nt, Artificial Sequence
  Description of Artificial Sequence: Synthetic oligonucleotide
guguucucucguaaagccu

SEQ ID NO: 1146634 - RNA, 19 nt, Artificial Sequence
  Description of Artificial Sequence: Synthetic oligonucleotide
caucguuaagugccuggcu

SEQ ID NO: 1146635 - RNA, 19 nt, Artificial Sequence
  Description of Artificial Sequence: Synthetic oligonucleotide
cacaaggcaggacccgucu

SEQ ID NO: 1146636 - RNA, 19 nt, Artificial Sequence
  Description of Artificial Sequence: Synthetic oligonucleotide
gucaugcggcgauccuuca

SEQ ID NO: 1146637 - RNA, 19 nt, Artificial Sequence
  Description of Artificial Sequence: Synthetic oligonucleotide
uguaacccucggguuuguu

SEQ ID NO: 1146638 - RNA, 19 nt, Artificial Sequence
  Description of Artificial Sequence: Synthetic oligonucleotide
ggugugcccucccauauuu

SEQ ID NO: 1146639 - RNA, 19 nt, Artificial Sequence
  Description of Artificial Sequence: Synthetic oligonucleotide
cccucggguuuguuuguag

SEQ ID NO: 1146640 - RNA, 19 nt, Artificial Sequence
  Description of Artificial Sequence: Synthetic oligonucleotide
ccucggguuuguuuguaga

SEQ ID NO: 1146641 - RNA, 19 nt, Artificial Sequence
  Description of Artificial Sequence: Synthetic oligonucleotide
cguauaaaacgaagagcaa

SEQ ID NO: 1146642 - RNA, 19 nt, Artificial Sequence
  Description of Artificial Sequence: Synthetic oligonucleotide
cggucugcuccugaguuag

SEQ ID NO: 1146643 - RNA, 19 nt, Artificial Sequence
  Description of Artificial Sequence: Synthetic oligonucleotide
gacccggcugcgaggguuc

SEQ ID NO: 1146644 - RNA, 19 nt, Artificial Sequence
  Description of Artificial Sequence: Synthetic oligonucleotide
ccuucuagccggcccacca

SEQ ID NO: 1146645 - RNA, 19 nt, Artificial Sequence
  Description of Artificial Sequence: Synthetic oligonucleotide
cuuucggcgucgccgcucu

SEQ ID NO: 1146646 - RNA, 19 nt, Artificial Sequence
  Description of Artificial Sequence: Synthetic oligonucleotide
gagucccgccuccugcagu

SEQ ID NO: 1146647 - RNA, 19 nt, Artificial Sequence
  Description of Artificial Sequence: Synthetic oligonucleotide
guguggcgugagucccgcc

SEQ ID NO: 1146648 - RNA, 19 nt, Artificial Sequence
  Description of Artificial Sequence: Synthetic oligonucleotide
aggacccgucuugggaaau

SEQ ID NO: 1146649 - RNA, 19 nt, Artificial Sequence
  Description of Artificial Sequence: Synthetic oligonucleotide
cggcgauccuucaacauaa

SEQ ID NO: 1146650 - RNA, 19 nt, Artificial Sequence
  Description of Artificial Sequence: Synthetic oligonucleotide
guucucucguaaagccugu

SEQ ID NO: 1146651 - RNA, 19 nt, Artificial Sequence
  Description of Artificial Sequence: Synthetic oligonucleotide
ccgucuugggaaauuggcu

SEQ ID NO: 1146652 - RNA, 19 nt, Artificial Sequence
  Description of Artificial Sequence: Synthetic oligonucleotide
gucgggaaggagguggauu

SEQ ID NO: 1146653 - RNA, 19 nt, Artificial Sequence
  Description of Artificial Sequence: Synthetic oligonucleotide
cuaugcccgucagguccug

SEQ ID NO: 1146654 - RNA, 19 nt, Artificial Sequence
  Description of Artificial Sequence: Synthetic oligonucleotide
gcgcuccaacuuucuuucc

SEQ ID NO: 1146655 - RNA, 19 nt, Artificial Sequence
  Description of Artificial Sequence: Synthetic oligonucleotide
ggcaggcgcuccaacuuuc

SEQ ID NO: 1146656 - RNA, 19 nt, Artificial Sequence
  Description of Artificial Sequence: Synthetic oligonucleotide
uuucggcgucgccgcucuc

SEQ ID NO: 1146657 - RNA, 19 nt, Artificial Sequence
  Description of Artificial Sequence: Synthetic oligonucleotide
gcgugagucccgccuccug

SEQ ID NO: 1146658 - RNA, 19 nt, Artificial Sequence
  Description of Artificial Sequence: Synthetic oligonucleotide
acccucggguuuguuugua

SEQ ID NO: 1146659 - RNA, 19 nt, Artificial Sequence
  Description of Artificial Sequence: Synthetic oligonucleotide
guaaagccugugagacccu

SEQ ID NO: 1146660 - RNA, 19 nt, Artificial Sequence
  Description of Artificial Sequence: Synthetic oligonucleotide
cuagccggcccaccacagu

SEQ ID NO: 1146661 - RNA, 19 nt, Artificial Sequence
  Description of Artificial Sequence: Synthetic oligonucleotide
gcaaggcgacacugaucca

SEQ ID NO: 1146662 - RNA, 19 nt, Artificial Sequence
  Description of Artificial Sequence: Synthetic oligonucleotide
ccugguccgcccucagaga

SEQ ID NO: 1146663 - RNA, 19 nt, Artificial Sequence
  Description of Artificial Sequence: Synthetic oligonucleotide
cagucaugcggcgauccuu

SEQ ID NO: 1146664 - RNA, 19 nt, Artificial Sequence
  Description of Artificial Sequence: Synthetic oligonucleotide
gggucgggaaggaggugga

SEQ ID NO: 1146665 - RNA, 19 nt, Artificial Sequence
  Description of Artificial Sequence: Synthetic oligonucleotide
ugacgcucucggggucauc

SEQ ID NO: 1146666 - RNA, 19 nt, Artificial Sequence
  Description of Artificial Sequence: Synthetic oligonucleotide
gccuucuagccggcccacc

SEQ ID NO: 1146667 - RNA, 19 nt, Artificial Sequence
  Description of Artificial Sequence: Synthetic oligonucleotide
acccggcugcgaggguuca

SEQ ID NO: 1146668 - RNA, 19 nt, Artificial Sequence
  Description of Artificial Sequence: Synthetic oligonucleotide
ggccuucuagccggcccac

SEQ ID NO: 1146669 - RNA, 19 nt, Artificial Sequence
  Description of Artificial Sequence: Synthetic oligonucleotide
ccauggauucuaugcccgu

SEQ ID NO: 1146670 - RNA, 19 nt, Artificial Sequence
  Description of Artificial Sequence: Synthetic oligonucleotide
cccuguaacccucggguuu

SEQ ID NO: 1146671 - RNA, 19 nt, Artificial Sequence
  Description of Artificial Sequence: Synthetic oligonucleotide
cugcaaguucugccgccuu

SEQ ID NO: 1146672 - RNA, 19 nt, Artificial Sequence
  Description of Artificial Sequence: Synthetic oligonucleotide
guguugcgacagaacucau

SEQ ID NO: 1146673 - RNA, 19 nt, Artificial Sequence
  Description of Artificial Sequence: Synthetic oligonucleotide
ccugcaaguucugccgccu

SEQ ID NO: 1146674 - RNA, 19 nt, Artificial Sequence
  Description of Artificial Sequence: Synthetic oligonucleotide
cuguaacccucggguuugu

SEQ ID NO: 1146675 - RNA, 19 nt, Artificial Sequence
  Description of Artificial Sequence: Synthetic oligonucleotide
gugacccggcugcgagggu

SEQ ID NO: 1146676 - RNA, 19 nt, Artificial Sequence
  Description of Artificial Sequence: Synthetic oligonucleotide
caccuaagucagccucauu

SEQ ID NO: 1146677 - RNA, 19 nt, Artificial Sequence
  Description of Artificial Sequence: Synthetic oligonucleotide
cguuaagugccuggcugua

SEQ ID NO: 1146678 - RNA, 19 nt, Artificial Sequence
  Description of Artificial Sequence: Synthetic oligonucleotide
ggcgauccuucaacauaau

SEQ ID NO: 1146679 - RNA, 19 nt, Artificial Sequence
  Description of Artificial Sequence: Synthetic oligonucleotide
ggacccgucuugggaaauu

SEQ ID NO: 1146680 - RNA, 19 nt, Artificial Sequence
  Description of Artificial Sequence: Synthetic oligonucleotide
ggcgugagucccgccuccu

SEQ ID NO: 1146681 - RNA, 19 nt, Artificial Sequence
  Description of Artificial Sequence: Synthetic oligonucleotide
cggcgucgccgcucucgcu

SEQ ID NO: 1146682 - RNA, 19 nt, Artificial Sequence
  Description of Artificial Sequence: Synthetic oligonucleotide
aauacuuguggcuaaaagc

SEQ ID NO: 1146683 - RNA, 19 nt, Artificial Sequence
  Description of Artificial Sequence: Synthetic oligonucleotide
uucauuauagcuuuuauug

SEQ ID NO: 1146684 - RNA, 19 nt, Artificial Sequence
  Description of Artificial Sequence: Synthetic oligonucleotide
acauaaagaaccuugcugc

SEQ ID NO: 1146685 - RNA, 19 nt, Artificial Sequence
  Description of Artificial Sequence: Synthetic oligonucleotide
aaucuguuaaugcacuucc

SEQ ID NO: 1146686 - RNA, 19 nt, Artificial Sequence
  Description of Artificial Sequence: Synthetic oligonucleotide
agaaccacaagccacauac

SEQ ID NO: 1146687 - RNA, 19 nt, Artificial Sequence
  Description of Artificial Sequence: Synthetic oligonucleotide
aaugguguaaccuauacaa

SEQ ID NO: 1146688 - RNA, 19 nt, Artificial Sequence
  Description of Artificial Sequence: Synthetic oligonucleotide
aaauccaugguuugaacac

SEQ ID NO: 1146689 - RNA, 19 nt, Artificial Sequence
  Description of Artificial Sequence: Synthetic oligonucleotide
agcaaugccacuuaugagc

SEQ ID NO: 1146690 - RNA, 19 nt, Artificial Sequence
  Description of Artificial Sequence: Synthetic oligonucleotide
ugaaaguuuacuuucacug

SEQ ID NO: 1146691 - RNA, 19 nt, Artificial Sequence
  Description of Artificial Sequence: Synthetic oligonucleotide
agaugaaccaaucugacag

SEQ ID NO: 1146692 - RNA, 19 nt, Artificial Sequence
  Description of Artificial Sequence: Synthetic oligonucleotide
uuuaagucucuuuugaagc

SEQ ID NO: 1146693 - RNA, 19 nt, Artificial Sequence
  Description of Artificial Sequence: Synthetic oligonucleotide
uaaccuauacaacagggcc

SEQ ID NO: 1146694 - RNA, 19 nt, Artificial Sequence
  Description of Artificial Sequence: Synthetic oligonucleotide
aaugccaaggaaguaacac

SEQ ID NO: 1146695 - RNA, 19 nt, Artificial Sequence
  Description of Artificial Sequence: Synthetic oligonucleotide
uuaucuaucccagagacca

SEQ ID NO: 1146696 - RNA, 19 nt, Artificial Sequence
  Description of Artificial Sequence: Synthetic oligonucleotide
uucauugauagcaaaugag

SEQ ID NO: 1146697 - RNA, 19 nt, Artificial Sequence
  Description of Artificial Sequence: Synthetic oligonucleotide
uuaugagcaagaaggaucc

SEQ ID NO: 1146698 - RNA, 19 nt, Artificial Sequence
  Description of Artificial Sequence: Synthetic oligonucleotide
aaaauuucugggaagaugu

SEQ ID NO: 1146699 - RNA, 19 nt, Artificial Sequence
  Description of Artificial Sequence: Synthetic oligonucleotide
ucauuauagcuuuuauugg

SEQ ID NO: 1146700 - RNA, 19 nt, Artificial Sequence
  Description of Artificial Sequence: Synthetic oligonucleotide
uuuguuggaggcaagaauc

SEQ ID NO: 1146701 - RNA, 19 nt, Artificial Sequence
  Description of Artificial Sequence: Synthetic oligonucleotide
cauuauagcuuuuauuggc

SEQ ID NO: 1146702 - RNA, 19 nt, Artificial Sequence
  Description of Artificial Sequence: Synthetic oligonucleotide
uugaacacgagaaacagua

SEQ ID NO: 1146703 - RNA, 19 nt, Artificial Sequence
  Description of Artificial Sequence: Synthetic oligonucleotide
ccacuuaugagcaagaagg

SEQ ID NO: 1146704 - RNA, 19 nt, Artificial Sequence
  Description of Artificial Sequence: Synthetic oligonucleotide
uauauauccgcuuacuauc

SEQ ID NO: 1146705 - RNA, 19 nt, Artificial Sequence
  Description of Artificial Sequence: Synthetic oligonucleotide
uauccuacacauuugaaaa

SEQ ID NO: 1146706 - RNA, 19 nt, Artificial Sequence
  Description of Artificial Sequence: Synthetic oligonucleotide
ucucacuugauguacagga

SEQ ID NO: 1146707 - RNA, 19 nt, Artificial Sequence
  Description of Artificial Sequence: Synthetic oligonucleotide
agccuuaaagauuggaaac

SEQ ID NO: 1146708 - RNA, 19 nt, Artificial Sequence
  Description of Artificial Sequence: Synthetic oligonucleotide
aauggguucaauugaauuu

SEQ ID NO: 1146709 - RNA, 19 nt, Artificial Sequence
  Description of Artificial Sequence: Synthetic oligonucleotide
aaauagaugcucuggauuu

SEQ ID NO: 1146710 - RNA, 19 nt, Artificial Sequence
  Description of Artificial Sequence: Synthetic oligonucleotide
uuucaaaccucucacuuga

SEQ ID NO: 1146711 - RNA, 19 nt, Artificial Sequence
  Description of Artificial Sequence: Synthetic oligonucleotide
aucaaccugaaauagugag

SEQ ID NO: 1146712 - RNA, 19 nt, Artificial Sequence
  Description of Artificial Sequence: Synthetic oligonucleotide
aaaccgauuguucaucaug

SEQ ID NO: 1146713 - RNA, 19 nt, Artificial Sequence
  Description of Artificial Sequence: Synthetic oligonucleotide
uaucuauauauuauccuac

SEQ ID NO: 1146714 - RNA, 19 nt, Artificial Sequence
  Description of Artificial Sequence: Synthetic oligonucleotide
agcauuaucuaucccagag

SEQ ID NO: 1146715 - RNA, 19 nt, Artificial Sequence
  Description of Artificial Sequence: Synthetic oligonucleotide
uuaucuauauauuauccua

SEQ ID NO: 1146716 - RNA, 19 nt, Artificial Sequence
  Description of Artificial Sequence: Synthetic oligonucleotide
uagcaaaugagaaaaccca

SEQ ID NO: 1146717 - RNA, 19 nt, Artificial Sequence
  Description of Artificial Sequence: Synthetic oligonucleotide
acucuuagaaccacaagcc

SEQ ID NO: 1146718 - RNA, 19 nt, Artificial Sequence
  Description of Artificial Sequence: Synthetic oligonucleotide
agaagacguauauauccgc

SEQ ID NO: 1146719 - RNA, 19 nt, Artificial Sequence
  Description of Artificial Sequence: Synthetic oligonucleotide
uggaaaguuagaaaauacu

SEQ ID NO: 1146720 - RNA, 19 nt, Artificial Sequence
  Description of Artificial Sequence: Synthetic oligonucleotide
ucuuagaaccacaagccac

SEQ ID NO: 1146721 - RNA, 19 nt, Artificial Sequence
  Description of Artificial Sequence: Synthetic oligonucleotide
auuagcacugaaacaagcc

SEQ ID NO: 1146722 - RNA, 19 nt, Artificial Sequence
  Description of Artificial Sequence: Synthetic oligonucleotide
uuacuaucggaagagaaug

SEQ ID NO: 1146723 - RNA, 19 nt, Artificial Sequence
  Description of Artificial Sequence: Synthetic oligonucleotide
aaggaaguaacaccaguga

SEQ ID NO: 1146724 - RNA, 19 nt, Artificial Sequence
  Description of Artificial Sequence: Synthetic oligonucleotide
uuauccuacacauuugaaa

SEQ ID NO: 1146725 - RNA, 19 nt, Artificial Sequence
  Description of Artificial Sequence: Synthetic oligonucleotide
uguuaaugcacuuccuuga

SEQ ID NO: 1146726 - RNA, 19 nt, Artificial Sequence
  Description of Artificial Sequence: Synthetic oligonucleotide
ucuauauauuauccuacac

SEQ ID NO: 1146727 - RNA, 19 nt, Artificial Sequence
  Description of Artificial Sequence: Synthetic oligonucleotide
uccguugggaugacgagcg

SEQ ID NO: 1146728 - RNA, 19 nt, Artificial Sequence
  Description of Artificial Sequence: Synthetic oligonucleotide
uucuuuccgaaaccgauug

SEQ ID NO: 1146729 - RNA, 19 nt, Artificial Sequence
  Description of Artificial Sequence: Synthetic oligonucleotide
cuauauauuauccuacaca

SEQ ID NO: 1146730 - RNA, 19 nt, Artificial Sequence
  Description of Artificial Sequence: Synthetic oligonucleotide
aaauggguucaauugaauu

SEQ ID NO: 1146731 - RNA, 19 nt, Artificial Sequence
  Description of Artificial Sequence: Synthetic oligonucleotide
uaacuuuccagcuagcaua

SEQ ID NO: 1146732 - RNA, 19 nt, Artificial Sequence
  Description of Artificial Sequence: Synthetic oligonucleotide
gagauagcauuaucuaucc

SEQ ID NO: 1146733 - RNA, 19 nt, Artificial Sequence
  Description of Artificial Sequence: Synthetic oligonucleotide
acaggaguuaacuuuccag

SEQ ID NO: 1146734 - RNA, 19 nt, Artificial Sequence
  Description of Artificial Sequence: Synthetic oligonucleotide
cuaucggaagagaaugugg

SEQ ID NO: 1146735 - RNA, 19 nt, Artificial Sequence
  Description of Artificial Sequence: Synthetic oligonucleotide
caggaguuaacuuuccagc

SEQ ID NO: 1146736 - RNA, 19 nt, Artificial Sequence
  Description of Artificial Sequence: Synthetic oligonucleotide
aaucgcuucacuauuuucu

SEQ ID NO: 1146737 - RNA, 19 nt, Artificial Sequence
  Description of Artificial Sequence: Synthetic oligonucleotide
ucucuuucaaaccucucac

SEQ ID NO: 1146738 - RNA, 19 nt, Artificial Sequence
  Description of Artificial Sequence: Synthetic oligonucleotide
uauacaacagggccuugcc

SEQ ID NO: 1146739 - RNA, 19 nt, Artificial Sequence
  Description of Artificial Sequence: Synthetic oligonucleotide
agaauguggaugcugaaau

SEQ ID NO: 1146740 - RNA, 19 nt, Artificial Sequence
  Description of Artificial Sequence: Synthetic oligonucleotide
acuguauauguuuaccacu

SEQ ID NO: 1146741 - RNA, 19 nt, Artificial Sequence
  Description of Artificial Sequence: Synthetic oligonucleotide
acguagcaaugcuuaaucc

SEQ ID NO: 1146742 - RNA, 19 nt, Artificial Sequence
  Description of Artificial Sequence: Synthetic oligonucleotide
auucccaguccuuugcaac

SEQ ID NO: 1146743 - RNA, 19 nt, Artificial Sequence
  Description of Artificial Sequence: Synthetic oligonucleotide
aauccaugguuugaacacg

SEQ ID NO: 1146744 - RNA, 19 nt, Artificial Sequence
  Description of Artificial Sequence: Synthetic oligonucleotide
agaaccuugcugcgaauac

SEQ ID NO: 1146745 - RNA, 19 nt, Artificial Sequence
  Description of Artificial Sequence: Synthetic oligonucleotide
uuaacuuuccagcuagcau

SEQ ID NO: 1146746 - RNA, 19 nt, Artificial Sequence
  Description of Artificial Sequence: Synthetic oligonucleotide
cauaaagaaccuugcugcg

SEQ ID NO: 1146747 - RNA, 19 nt, Artificial Sequence
  Description of Artificial Sequence: Synthetic oligonucleotide
uacaacagggccuugcccu

SEQ ID NO: 1146748 - RNA, 19 nt, Artificial Sequence
  Description of Artificial Sequence: Synthetic oligonucleotide
ugauguacaggaguuaacu

SEQ ID NO: 1146749 - RNA, 19 nt, Artificial Sequence
  Description of Artificial Sequence: Synthetic oligonucleotide
agauguggauaugaaauuc

SEQ ID NO: 1146750 - RNA, 19 nt, Artificial Sequence
  Description of Artificial Sequence: Synthetic oligonucleotide
uaaagaaccuugcugcgaa

SEQ ID NO: 1146751 - RNA, 19 nt, Artificial Sequence
  Description of Artificial Sequence: Synthetic oligonucleotide
ggaaaguuagaaaauacug

SEQ ID NO: 1146752 - RNA, 19 nt, Artificial Sequence
  Description of Artificial Sequence: Synthetic oligonucleotide
uuaagucucuuuugaagcu

SEQ ID NO: 1146753 - RNA, 19 nt, Artificial Sequence
  Description of Artificial Sequence: Synthetic oligonucleotide
cuggggagacuucaaaucg

SEQ ID NO: 1146754 - RNA, 19 nt, Artificial Sequence
  Description of Artificial Sequence: Synthetic oligonucleotide
uauguuuaccacuccacuc

SEQ ID NO: 1146755 - RNA, 19 nt, Artificial Sequence
  Description of Artificial Sequence: Synthetic oligonucleotide
caugguuugaacacgagaa

SEQ ID NO: 1146756 - RNA, 19 nt, Artificial Sequence
  Description of Artificial Sequence: Synthetic oligonucleotide
uaaugguguaaccuauaca

SEQ ID NO: 1146757 - RNA, 19 nt, Artificial Sequence
  Description of Artificial Sequence: Synthetic oligonucleotide
gguucaauugaauuucaag

SEQ ID NO: 1146758 - RNA, 19 nt, Artificial Sequence
  Description of Artificial Sequence: Synthetic oligonucleotide
caaggaaguaacaccagug

SEQ ID NO: 1146759 - RNA, 19 nt, Artificial Sequence
  Description of Artificial Sequence: Synthetic oligonucleotide
gaaauagugagauagcauu

SEQ ID NO: 1146760 - RNA, 19 nt, Artificial Sequence
  Description of Artificial Sequence: Synthetic oligonucleotide
uucaucaugucaacuauuu

SEQ ID NO: 1146761 - RNA, 19 nt, Artificial Sequence
  Description of Artificial Sequence: Synthetic oligonucleotide
cuggaaaguuagaaaauac

SEQ ID NO: 1146762 - RNA, 19 nt, Artificial Sequence
  Description of Artificial Sequence: Synthetic oligonucleotide
auauguuuaccacuccacu

SEQ ID NO: 1146763 - RNA, 19 nt, Artificial Sequence
  Description of Artificial Sequence: Synthetic oligonucleotide
acugaugagauccgagcag

SEQ ID NO: 1146764 - RNA, 19 nt, Artificial Sequence
  Description of Artificial Sequence: Synthetic oligonucleotide
aaggcgaaguauccacuuc

SEQ ID NO: 1146765 - RNA, 19 nt, Artificial Sequence
  Description of Artificial Sequence: Synthetic oligonucleotide
uguauauguuuaccacucc

SEQ ID NO: 1146766 - RNA, 19 nt, Artificial Sequence
  Description of Artificial Sequence: Synthetic oligonucleotide
cauuagcacugaaacaagc

SEQ ID NO: 1146767 - RNA, 19 nt, Artificial Sequence
  Description of Artificial Sequence: Synthetic oligonucleotide
cuguuaaugcacuuccuug

SEQ ID NO: 1146768 - RNA, 19 nt, Artificial Sequence
  Description of Artificial Sequence: Synthetic oligonucleotide
uggguuuguuuguuggagg

SEQ ID NO: 1146769 - RNA, 19 nt, Artificial Sequence
  Description of Artificial Sequence: Synthetic oligonucleotide
uauauccgcuuacuaucgg

SEQ ID NO: 1146770 - RNA, 19 nt, Artificial Sequence
  Description of Artificial Sequence: Synthetic oligonucleotide
ucgacgucgccgaagacca

SEQ ID NO: 1146771 - RNA, 19 nt, Artificial Sequence
  Description of Artificial Sequence: Synthetic oligonucleotide
aucuauauauuauccuaca

SEQ ID NO: 1146772 - RNA, 19 nt, Artificial Sequence
  Description of Artificial Sequence: Synthetic oligonucleotide
uuccauguaggugaccccg

SEQ ID NO: 1146773 - RNA, 19 nt, Artificial Sequence
  Description of Artificial Sequence: Synthetic oligonucleotide
caaugcuuaauccauacaa

SEQ ID NO: 1146774 - RNA, 19 nt, Artificial Sequence
  Description of Artificial Sequence: Synthetic oligonucleotide
agauagcauuaucuauccc

SEQ ID NO: 1146775 - RNA, 19 nt, Artificial Sequence
  Description of Artificial Sequence: Synthetic oligonucleotide
agugguaggccguucagca

SEQ ID NO: 1146776 - RNA, 19 nt, Artificial Sequence
  Description of Artificial Sequence: Synthetic oligonucleotide
uuugaacacgagaaacagu

SEQ ID NO: 1146777 - RNA, 19 nt, Artificial Sequence
  Description of Artificial Sequence: Synthetic oligonucleotide
auacugcccauucuuugac

SEQ ID NO: 1146778 - RNA, 19 nt, Artificial Sequence
  Description of Artificial Sequence: Synthetic oligonucleotide
uccgcuuacuaucggaaga

SEQ ID NO: 1146779 - RNA, 19 nt, Artificial Sequence
  Description of Artificial Sequence: Synthetic oligonucleotide
aauagugagauagcauuau

SEQ ID NO: 1146780 - RNA, 19 nt, Artificial Sequence
  Description of Artificial Sequence: Synthetic oligonucleotide
agauuggaaacuuuuccaa

SEQ ID NO: 1146781 - RNA, 19 nt, Artificial Sequence
  Description of Artificial Sequence: Synthetic oligonucleotide
ucuuugacguagcaaugcu

SEQ ID NO: 1146782 - RNA, 19 nt, Artificial Sequence
  Description of Artificial Sequence: Synthetic oligonucleotide
ucuguuaaugcacuuccuu

SEQ ID NO: 1146783 - RNA, 19 nt, Artificial Sequence
  Description of Artificial Sequence: Synthetic oligonucleotide
agaccaucaccaccugugc

SEQ ID NO: 1146784 - RNA, 19 nt, Artificial Sequence
  Description of Artificial Sequence: Synthetic oligonucleotide
uuccgaaaccgauuguuca

SEQ ID NO: 1146785 - RNA, 19 nt, Artificial Sequence
  Description of Artificial Sequence: Synthetic oligonucleotide
cuugcugcgaauacuugug

SEQ ID NO: 1146786 - RNA, 19 nt, Artificial Sequence
  Description of Artificial Sequence: Synthetic oligonucleotide
cuuucaaaccucucacuug

SEQ ID NO: 1146787 - RNA, 19 nt, Artificial Sequence
  Description of Artificial Sequence: Synthetic oligonucleotide
guaaugguguaaccuauac

SEQ ID NO: 1146788 - RNA, 19 nt, Artificial Sequence
  Description of Artificial Sequence: Synthetic oligonucleotide
auguaggugaccccgcgag

SEQ ID NO: 1146789 - RNA, 19 nt, Artificial Sequence
  Description of Artificial Sequence: Synthetic oligonucleotide
augacgagcggccuucggg

SEQ ID NO: 1146790 - RNA, 19 nt, Artificial Sequence
  Description of Artificial Sequence: Synthetic oligonucleotide
uccauaagucauuaucuau

SEQ ID NO: 1146791 - RNA, 19 nt, Artificial Sequence
  Description of Artificial Sequence: Synthetic oligonucleotide
ucugaguaaugguguaacc

SEQ ID NO: 1146792 - RNA, 19 nt, Artificial Sequence
  Description of Artificial Sequence: Synthetic oligonucleotide
aaugcuuaauccauacaaa

SEQ ID NO: 1146793 - RNA, 19 nt, Artificial Sequence
  Description of Artificial Sequence: Synthetic oligonucleotide
auuaucuaucccagagacc

SEQ ID NO: 1146794 - RNA, 19 nt, Artificial Sequence
  Description of Artificial Sequence: Synthetic oligonucleotide
uucuuugacguagcaaugc

SEQ ID NO: 1146795 - RNA, 19 nt, Artificial Sequence
  Description of Artificial Sequence: Synthetic oligonucleotide
caagauuccucuuggaaga

SEQ ID NO: 1146796 - RNA, 19 nt, Artificial Sequence
  Description of Artificial Sequence: Synthetic oligonucleotide
aaccgauuguucaucaugu

SEQ ID NO: 1146797 - RNA, 19 nt, Artificial Sequence
  Description of Artificial Sequence: Synthetic oligonucleotide
aggaguuaacuuuccagcu

SEQ ID NO: 1146798 - RNA, 19 nt, Artificial Sequence
  Description of Artificial Sequence: Synthetic oligonucleotide
auauauccgcuuacuaucg

SEQ ID NO: 1146799 - RNA, 19 nt, Artificial Sequence
  Description of Artificial Sequence: Synthetic oligonucleotide
guguaaccuauacaacagg

SEQ ID NO: 1146800 - RNA, 19 nt, Artificial Sequence
  Description of Artificial Sequence: Synthetic oligonucleotide
acuucaaaucgcuucacua

SEQ ID NO: 1146801 - RNA, 19 nt, Artificial Sequence
  Description of Artificial Sequence: Synthetic oligonucleotide
ccaauauuucuguaguggg

SEQ ID NO: 1146802 - RNA, 19 nt, Artificial Sequence
  Description of Artificial Sequence: Synthetic oligonucleotide
augagauccgagcaguggu

SEQ ID NO: 1146803 - RNA, 19 nt, Artificial Sequence
  Description of Artificial Sequence: Synthetic oligonucleotide
guauauguuuaccacucca

SEQ ID NO: 1146804 - RNA, 19 nt, Artificial Sequence
  Description of Artificial Sequence: Synthetic oligonucleotide
uuuguuuguuggaggcaag

SEQ ID NO: 1146805 - RNA, 19 nt, Artificial Sequence
  Description of Artificial Sequence: Synthetic oligonucleotide
ggauugaaugccaaggaag

SEQ ID NO: 1146806 - RNA, 19 nt, Artificial Sequence
  Description of Artificial Sequence: Synthetic oligonucleotide
ucuaucccagagaccauca

SEQ ID NO: 1146807 - RNA, 19 nt, Artificial Sequence
  Description of Artificial Sequence: Synthetic oligonucleotide
ggaagagaagcagaugugg

SEQ ID NO: 1146808 - RNA, 19 nt, Artificial Sequence
  Description of Artificial Sequence: Synthetic oligonucleotide
caugucaacuauuuccuca

SEQ ID NO: 1146809 - RNA, 19 nt, Artificial Sequence
  Description of Artificial Sequence: Synthetic oligonucleotide
uuuccagcuagcauaucau

SEQ ID NO: 1146810 - RNA, 19 nt, Artificial Sequence
  Description of Artificial Sequence: Synthetic oligonucleotide
aagacguauauauccgcuu

SEQ ID NO: 1146811 - RNA, 19 nt, Artificial Sequence
  Description of Artificial Sequence: Synthetic oligonucleotide
uuggaaacuuuuccaaaua

SEQ ID NO: 1146812 - RNA, 19 nt, Artificial Sequence
  Description of Artificial Sequence: Synthetic oligonucleotide
gauuguucaucaugucaac

SEQ ID NO: 1146813 - RNA, 19 nt, Artificial Sequence
  Description of Artificial Sequence: Synthetic oligonucleotide
ucgaucgucaggcgguugc

SEQ ID NO: 1146814 - RNA, 19 nt, Artificial Sequence
  Description of Artificial Sequence: Synthetic oligonucleotide
cugaaacaagccuuaaaga

SEQ ID NO: 1146815 - RNA, 19 nt, Artificial Sequence
  Description of Artificial Sequence: Synthetic oligonucleotide
ggauaugaaauucccaguc

SEQ ID NO: 1146816 - RNA, 19 nt, Artificial Sequence
  Description of Artificial Sequence: Synthetic oligonucleotide
guaaccuauacaacagggc

SEQ ID NO: 1146817 - RNA, 19 nt, Artificial Sequence
  Description of Artificial Sequence: Synthetic oligonucleotide
ugcccauucuuugacguag

SEQ ID NO: 1146818 - RNA, 19 nt, Artificial Sequence
  Description of Artificial Sequence: Synthetic oligonucleotide
agcuuuuauuggcuuuggg

SEQ ID NO: 1146819 - RNA, 19 nt, Artificial Sequence
  Description of Artificial Sequence: Synthetic oligonucleotide
uccacucuuagaaccacaa

SEQ ID NO: 1146820 - RNA, 19 nt, Artificial Sequence
  Description of Artificial Sequence: Synthetic oligonucleotide
uauccgcuuacuaucggaa

SEQ ID NO: 1146821 - RNA, 19 nt, Artificial Sequence
  Description of Artificial Sequence: Synthetic oligonucleotide
uggggagacuucaaaucgc

SEQ ID NO: 1146822 - RNA, 19 nt, Artificial Sequence
  Description of Artificial Sequence: Synthetic oligonucleotide
auuauagcuuuuauuggcu

SEQ ID NO: 1146823 - RNA, 19 nt, Artificial Sequence
  Description of Artificial Sequence: Synthetic oligonucleotide
aaucagguacuccucccau

SEQ ID NO: 1146824 - RNA, 19 nt, Artificial Sequence
  Description of Artificial Sequence: Synthetic oligonucleotide
gaauucacaucccacacau

SEQ ID NO: 1146825 - RNA, 19 nt, Artificial Sequence
  Description of Artificial Sequence: Synthetic oligonucleotide
cauugcauguuggaauucc

SEQ ID NO: 1146826 - RNA, 19 nt, Artificial Sequence
  Description of Artificial Sequence: Synthetic oligonucleotide
aaccuauacaacagggccu

SEQ ID NO: 1146827 - RNA, 19 nt, Artificial Sequence
  Description of Artificial Sequence: Synthetic oligonucleotide
ugccaucaaccugaaauag

SEQ ID NO: 1146828 - RNA, 19 nt, Artificial Sequence
  Description of Artificial Sequence: Synthetic oligonucleotide
ugcugcgaauacuuguggc

SEQ ID NO: 1146829 - RNA, 19 nt, Artificial Sequence
  Description of Artificial Sequence: Synthetic oligonucleotide
uacuaucggaagagaaugu

SEQ ID NO: 1146830 - RNA, 19 nt, Artificial Sequence
  Description of Artificial Sequence: Synthetic oligonucleotide
gacguauauauccgcuuac

SEQ ID NO: 1146831 - RNA, 19 nt, Artificial Sequence
  Description of Artificial Sequence: Synthetic oligonucleotide
ugaacacgagaaacaguac

SEQ ID NO: 1146832 - RNA, 19 nt, Artificial Sequence
  Description of Artificial Sequence: Synthetic oligonucleotide
acuaucggaagagaaugug

SEQ ID NO: 1146833 - RNA, 19 nt, Artificial Sequence
  Description of Artificial Sequence: Synthetic oligonucleotide
uaugaaauucccaguccuu

SEQ ID NO: 1146834 - RNA, 19 nt, Artificial Sequence
  Description of Artificial Sequence: Synthetic oligonucleotide
ccaucaaccugaaauagug

SEQ ID NO: 1146835 - RNA, 19 nt, Artificial Sequence
  Description of Artificial Sequence: Synthetic oligonucleotide
auauccgcuuacuaucgga

SEQ ID NO: 1146836 - RNA, 19 nt, Artificial Sequence
  Description of Artificial Sequence: Synthetic oligonucleotide
ggcuugucguccucgaucg

SEQ ID NO: 1146837 - RNA, 19 nt, Artificial Sequence
  Description of Artificial Sequence: Synthetic oligonucleotide
agcauuggcaggccggcag

SEQ ID NO: 1146838 - RNA, 19 nt, Artificial Sequence
  Description of Artificial Sequence: Synthetic oligonucleotide
gucgccgaagaccagcugc

SEQ ID NO: 1146839 - RNA, 19 nt, Artificial Sequence
  Description of Artificial Sequence: Synthetic oligonucleotide
caucggagcuuccauguag

SEQ ID NO: 1146840 - RNA, 19 nt, Artificial Sequence
  Description of Artificial Sequence: Synthetic oligonucleotide
uuaaugcacuuccuugaau

SEQ ID NO: 1146841 - RNA, 19 nt, Artificial Sequence
  Description of Artificial Sequence: Synthetic oligonucleotide
ggagacuucaaaucgcuuc

SEQ ID NO: 1146842 - RNA, 19 nt, Artificial Sequence
  Description of Artificial Sequence: Synthetic oligonucleotide
aggcgaaguauccacuucu

SEQ ID NO: 1146843 - RNA, 19 nt, Artificial Sequence
  Description of Artificial Sequence: Synthetic oligonucleotide
cagcuagcauaucauagac

SEQ ID NO: 1146844 - RNA, 19 nt, Artificial Sequence
  Description of Artificial Sequence: Synthetic oligonucleotide
cuuuuauuggcuuuggguu

SEQ ID NO: 1146845 - RNA, 19 nt, Artificial Sequence
  Description of Artificial Sequence: Synthetic oligonucleotide
guauauauccgcuuacuau

SEQ ID NO: 1146846 - RNA, 19 nt, Artificial Sequence
  Description of Artificial Sequence: Synthetic oligonucleotide
gguguaaccuauacaacag

SEQ ID NO: 1146847 - RNA, 19 nt, Artificial Sequence
  Description of Artificial Sequence: Synthetic oligonucleotide
uccucgaucgucaggcggu

SEQ ID NO: 1146848 - RNA, 19 nt, Artificial Sequence
  Description of Artificial Sequence: Synthetic oligonucleotide
cuauacaacagggccuugc

SEQ ID NO: 1146849 - RNA, 19 nt, Artificial Sequence
  Description of Artificial Sequence: Synthetic oligonucleotide
auuaaucuucaugcuacca

SEQ ID NO: 1146850 - RNA, 19 nt, Artificial Sequence
  Description of Artificial Sequence: Synthetic oligonucleotide
aaguuuacuuucacuggca

SEQ ID NO: 1146851 - RNA, 19 nt, Artificial Sequence
  Description of Artificial Sequence: Synthetic oligonucleotide
uccgagcagugguaggccg

SEQ ID NO: 1146852 - RNA, 19 nt, Artificial Sequence
  Description of Artificial Sequence: Synthetic oligonucleotide
uggguucaauugaauuuca

SEQ ID NO: 1146853 - RNA, 19 nt, Artificial Sequence
  Description of Artificial Sequence: Synthetic oligonucleotide
ugaccagguucauuauagc

SEQ ID NO: 1146854 - RNA, 19 nt, Artificial Sequence
  Description of Artificial Sequence: Synthetic oligonucleotide
uucuguagugggauugaau

SEQ ID NO: 1146855 - RNA, 19 nt, Artificial Sequence
  Description of Artificial Sequence: Synthetic oligonucleotide
acuggaaaguuagaaaaua

SEQ ID NO: 1146856 - RNA, 19 nt, Artificial Sequence
  Description of Artificial Sequence: Synthetic oligonucleotide
augguguaaccuauacaac

SEQ ID NO: 1146857 - RNA, 19 nt, Artificial Sequence
  Description of Artificial Sequence: Synthetic oligonucleotide
uacuuguggcuaaaagcuc

SEQ ID NO: 1146858 - RNA, 19 nt, Artificial Sequence
  Description of Artificial Sequence: Synthetic oligonucleotide
agacguauauauccgcuua

SEQ ID NO: 1146859 - RNA, 19 nt, Artificial Sequence
  Description of Artificial Sequence: Synthetic oligonucleotide
uguccguugggaugacgag

SEQ ID NO: 1146860 - RNA, 19 nt, Artificial Sequence
  Description of Artificial Sequence: Synthetic oligonucleotide
cucgacgucgccgaagacc

SEQ ID NO: 1146861 - RNA, 19 nt, Artificial Sequence
  Description of Artificial Sequence: Synthetic oligonucleotide
ccacaagccacauacugcc

SEQ ID NO: 1146862 - RNA, 19 nt, Artificial Sequence
  Description of Artificial Sequence: Synthetic oligonucleotide
uccaugguuugaacacgag

SEQ ID NO: 1146863 - RNA, 19 nt, Artificial Sequence
  Description of Artificial Sequence: Synthetic oligonucleotide
accgauuguucaucauguc

SEQ ID NO: 1146864 - RNA, 19 nt, Artificial Sequence
  Description of Artificial Sequence: Synthetic oligonucleotide
auccgcuuacuaucggaag

SEQ ID NO: 1146865 - RNA, 19 nt, Artificial Sequence
  Description of Artificial Sequence: Synthetic oligonucleotide
aagauuccucuuggaagag

SEQ ID NO: 1146866 - RNA, 19 nt, Artificial Sequence
  Description of Artificial Sequence: Synthetic oligonucleotide
uguaggugaccccgcgagc

SEQ ID NO: 1146867 - RNA, 19 nt, Artificial Sequence
  Description of Artificial Sequence: Synthetic oligonucleotide
auaaagaaccuugcugcga

SEQ ID NO: 1146868 - RNA, 19 nt, Artificial Sequence
  Description of Artificial Sequence: Synthetic oligonucleotide
ugguaggccguucagcauu

SEQ ID NO: 1146869 - RNA, 19 nt, Artificial Sequence
  Description of Artificial Sequence: Synthetic oligonucleotide
ugcgguguccguugggaug

SEQ ID NO: 1146870 - RNA, 19 nt, Artificial Sequence
  Description of Artificial Sequence: Synthetic oligonucleotide
guugggaugacgagcggcc

SEQ ID NO: 1146871 - RNA, 19 nt, Artificial Sequence
  Description of Artificial Sequence: Synthetic oligonucleotide
uccgaaaccgauuguucau

SEQ ID NO: 1146872 - RNA, 19 nt, Artificial Sequence
  Description of Artificial Sequence: Synthetic oligonucleotide
uguuuguuggaggcaagaa

SEQ ID NO: 1146873 - RNA, 19 nt, Artificial Sequence
  Description of Artificial Sequence: Synthetic oligonucleotide
aguuaacuuuccagcuagc

SEQ ID NO: 1146874 - RNA, 19 nt, Artificial Sequence
  Description of Artificial Sequence: Synthetic oligonucleotide
augaaccaaucugacagcu

SEQ ID NO: 1146875 - RNA, 19 nt, Artificial Sequence
  Description of Artificial Sequence: Synthetic oligonucleotide
ucaugcuaccaaucaguuc

SEQ ID NO: 1146876 - RNA, 19 nt, Artificial Sequence
  Description of Artificial Sequence: Synthetic oligonucleotide
augguuugaacacgagaaa

SEQ ID NO: 1146877 - RNA, 19 nt, Artificial Sequence
  Description of Artificial Sequence: Synthetic oligonucleotide
gagauccgagcagugguag

SEQ ID NO: 1146878 - RNA, 19 nt, Artificial Sequence
  Description of Artificial Sequence: Synthetic oligonucleotide
gaccagguucauuauagcu

SEQ ID NO: 1146879 - RNA, 19 nt, Artificial Sequence
  Description of Artificial Sequence: Synthetic oligonucleotide
uuguuuguuggaggcaaga

SEQ ID NO: 1146880 - RNA, 19 nt, Artificial Sequence
  Description of Artificial Sequence: Synthetic oligonucleotide
uccauguaggugaccccgc

SEQ ID NO: 1146881 - RNA, 19 nt, Artificial Sequence
  Description of Artificial Sequence: Synthetic oligonucleotide
uccauacaaacugccuuca

SEQ ID NO: 1146882 - RNA, 19 nt, Artificial Sequence
  Description of Artificial Sequence: Synthetic oligonucleotide
acuuaugagcaagaaggau

SEQ ID NO: 1146883 - RNA, 19 nt, Artificial Sequence
  Description of Artificial Sequence: Synthetic oligonucleotide
aacuuuccagcuagcauau

SEQ ID NO: 1146884 - RNA, 19 nt, Artificial Sequence
  Description of Artificial Sequence: Synthetic oligonucleotide
ucuuuccgaaaccgauugu

SEQ ID NO: 1146885 - RNA, 19 nt, Artificial Sequence
  Description of Artificial Sequence: Synthetic oligonucleotide
gaugacgagcggccuucgg

SEQ ID NO: 1146886 - RNA, 19 nt, Artificial Sequence
  Description of Artificial Sequence: Synthetic oligonucleotide
gucugaguaaugguguaac

SEQ ID NO: 1146887 - RNA, 19 nt, Artificial Sequence
  Description of Artificial Sequence: Synthetic oligonucleotide
acacgagaaacaguacucu

SEQ ID NO: 1146888 - RNA, 19 nt, Artificial Sequence
  Description of Artificial Sequence: Synthetic oligonucleotide
gccacuuaugagcaagaag

SEQ ID NO: 1146889 - RNA, 19 nt, Artificial Sequence
  Description of Artificial Sequence: Synthetic oligonucleotide
aagaaccuugcugcgaaua

SEQ ID NO: 1146890 - RNA, 19 nt, Artificial Sequence
  Description of Artificial Sequence: Synthetic oligonucleotide
ugagauccgagcaguggua

SEQ ID NO: 1146891 - RNA, 19 nt, Artificial Sequence
  Description of Artificial Sequence: Synthetic oligonucleotide
cuuccauguaggugacccc

SEQ ID NO: 1146892 - RNA, 19 nt, Artificial Sequence
  Description of Artificial Sequence: Synthetic oligonucleotide
guuaaugcacuuccuugaa

SEQ ID NO: 1146893 - RNA, 19 nt, Artificial Sequence
  Description of Artificial Sequence: Synthetic oligonucleotide
acaagccuuaaagauugga

SEQ ID NO: 1146894 - RNA, 19 nt, Artificial Sequence
  Description of Artificial Sequence: Synthetic oligonucleotide
ugcgaauacuuguggcuaa

SEQ ID NO: 1146895 - RNA, 19 nt, Artificial Sequence
  Description of Artificial Sequence: Synthetic oligonucleotide
gaaacaagccuuaaagauu

SEQ ID NO: 1146896 - RNA, 19 nt, Artificial Sequence
  Description of Artificial Sequence: Synthetic oligonucleotide
cuuacuaucggaagagaau

SEQ ID NO: 1146897 - RNA, 19 nt, Artificial Sequence
  Description of Artificial Sequence: Synthetic oligonucleotide
gacgagcggccuucgggcg

SEQ ID NO: 1146898 - RNA, 19 nt, Artificial Sequence
  Description of Artificial Sequence: Synthetic oligonucleotide
aaagaaccuugcugcgaau

SEQ ID NO: 1146899 - RNA, 19 nt, Artificial Sequence
  Description of Artificial Sequence: Synthetic oligonucleotide
aaccuugcugcgaauacuu

SEQ ID NO: 1146900 - RNA, 19 nt, Artificial Sequence
  Description of Artificial Sequence: Synthetic oligonucleotide
acuccacucuuagaaccac

SEQ ID NO: 1146901 - RNA, 19 nt, Artificial Sequence
  Description of Artificial Sequence: Synthetic oligonucleotide
gucauuaucuauauauuau

SEQ ID NO: 1146902 - RNA, 19 nt, Artificial Sequence
  Description of Artificial Sequence: Synthetic oligonucleotide
cucuuagaaccacaagcca

SEQ ID NO: 1146903 - RNA, 19 nt, Artificial Sequence
  Description of Artificial Sequence: Synthetic oligonucleotide
agcagugguaggccguuca

SEQ ID NO: 1146904 - RNA, 19 nt, Artificial Sequence
  Description of Artificial Sequence: Synthetic oligonucleotide
aucgucaggcgguugcgcu

SEQ ID NO: 1146905 - RNA, 19 nt, Artificial Sequence
  Description of Artificial Sequence: Synthetic oligonucleotide
gcuaccaaucaguucuuug

SEQ ID NO: 1146906 - RNA, 19 nt, Artificial Sequence
  Description of Artificial Sequence: Synthetic oligonucleotide
uugacguagcaaugcuuaa

SEQ ID NO: 1146907 - RNA, 19 nt, Artificial Sequence
  Description of Artificial Sequence: Synthetic oligonucleotide
accagguucauuauagcuu

SEQ ID NO: 1146908 - RNA, 19 nt, Artificial Sequence
  Description of Artificial Sequence: Synthetic oligonucleotide
aggccggcaguucuucauc

SEQ ID NO: 1146909 - RNA, 19 nt, Artificial Sequence
  Description of Artificial Sequence: Synthetic oligonucleotide
cucucacuugauguacagg

SEQ ID NO: 1146910 - RNA, 19 nt, Artificial Sequence
  Description of Artificial Sequence: Synthetic oligonucleotide
ucauuccccaaggcgaagu

SEQ ID NO: 1146911 - RNA, 19 nt, Artificial Sequence
  Description of Artificial Sequence: Synthetic oligonucleotide
acguauauauccgcuuacu

SEQ ID NO: 1146912 - RNA, 19 nt, Artificial Sequence
  Description of Artificial Sequence: Synthetic oligonucleotide
guugcgcugccgaagccgg

SEQ ID NO: 1146913 - RNA, 19 nt, Artificial Sequence
  Description of Artificial Sequence: Synthetic oligonucleotide
ugucaacuauuuccucauc

SEQ ID NO: 1146914 - RNA, 19 nt, Artificial Sequence
  Description of Artificial Sequence: Synthetic oligonucleotide
agcuuaucuuuugaaaguu

SEQ ID NO: 1146915 - RNA, 19 nt, Artificial Sequence
  Description of Artificial Sequence: Synthetic oligonucleotide
cuucaaaucgcuucacuau

SEQ ID NO: 1146916 - RNA, 19 nt, Artificial Sequence
  Description of Artificial Sequence: Synthetic oligonucleotide
agagaccaucaccaccugu

SEQ ID NO: 1146917 - RNA, 19 nt, Artificial Sequence
  Description of Artificial Sequence: Synthetic oligonucleotide
gcgaaguauccacuucugg

SEQ ID NO: 1146918 - RNA, 19 nt, Artificial Sequence
  Description of Artificial Sequence: Synthetic oligonucleotide
uagugggauugaaugccaa

SEQ ID NO: 1146919 - RNA, 19 nt, Artificial Sequence
  Description of Artificial Sequence: Synthetic oligonucleotide
ugacguagcaaugcuuaau

SEQ ID NO: 1146920 - RNA, 19 nt, Artificial Sequence
  Description of Artificial Sequence: Synthetic oligonucleotide
uagggccguccucugcccg

SEQ ID NO: 1146921 - RNA, 19 nt, Artificial Sequence
  Description of Artificial Sequence: Synthetic oligonucleotide
gaagacguauauauccgcu

SEQ ID NO: 1146922 - RNA, 19 nt, Artificial Sequence
  Description of Artificial Sequence: Synthetic oligonucleotide
gacgucgccgaagaccagc

SEQ ID NO: 1146923 - RNA, 19 nt, Artificial Sequence
  Description of Artificial Sequence: Synthetic oligonucleotide
ucggcggccggcuugucgu

SEQ ID NO: 1146924 - RNA, 19 nt, Artificial Sequence
  Description of Artificial Sequence: Synthetic oligonucleotide
caucaaccugaaauaguga

SEQ ID NO: 1146925 - RNA, 19 nt, Artificial Sequence
  Description of Artificial Sequence: Synthetic oligonucleotide
gaccccgcgagcuccgcag

SEQ ID NO: 1146926 - RNA, 19 nt, Artificial Sequence
  Description of Artificial Sequence: Synthetic oligonucleotide
cuugucguccucgaucguc

SEQ ID NO: 1146927 - RNA, 19 nt, Artificial Sequence
  Description of Artificial Sequence: Synthetic oligonucleotide
agagucaucggagcuucca

SEQ ID NO: 1146928 - RNA, 19 nt, Artificial Sequence
  Description of Artificial Sequence: Synthetic oligonucleotide
cacaagccacauacugccc

SEQ ID NO: 1146929 - RNA, 19 nt, Artificial Sequence
  Description of Artificial Sequence: Synthetic oligonucleotide
gauguacaggaguuaacuu

SEQ ID NO: 1146930 - RNA, 19 nt, Artificial Sequence
  Description of Artificial Sequence: Synthetic oligonucleotide
auuauccuacacauuugaa

SEQ ID NO: 1146931 - RNA, 19 nt, Artificial Sequence
  Description of Artificial Sequence: Synthetic oligonucleotide
auguuggaauuccucuuua

SEQ ID NO: 1146932 - RNA, 19 nt, Artificial Sequence
  Description of Artificial Sequence: Synthetic oligonucleotide
aggcaagaaucuugacugu

SEQ ID NO: 1146933 - RNA, 19 nt, Artificial Sequence
  Description of Artificial Sequence: Synthetic oligonucleotide
guagcaaugcuuaauccau

SEQ ID NO: 1146934 - RNA, 19 nt, Artificial Sequence
  Description of Artificial Sequence: Synthetic oligonucleotide
guccguugggaugacgagc

SEQ ID NO: 1146935 - RNA, 19 nt, Artificial Sequence
  Description of Artificial Sequence: Synthetic oligonucleotide
cugaguaaugguguaaccu

SEQ ID NO: 1146936 - RNA, 19 nt, Artificial Sequence
  Description of Artificial Sequence: Synthetic oligonucleotide
gucaucggagcuuccaugu

SEQ ID NO: 1146937 - RNA, 19 nt, Artificial Sequence
  Description of Artificial Sequence: Synthetic oligonucleotide
uuucuguagugggauugaa

SEQ ID NO: 1146938 - RNA, 19 nt, Artificial Sequence
  Description of Artificial Sequence: Synthetic oligonucleotide
caagaaucuugacuguaua

SEQ ID NO: 1146939 - RNA, 19 nt, Artificial Sequence
  Description of Artificial Sequence: Synthetic oligonucleotide
caaccugaaauagugagau

SEQ ID NO: 1146940 - RNA, 19 nt, Artificial Sequence
  Description of Artificial Sequence: Synthetic oligonucleotide
aggguuuguuuugccauca

SEQ ID NO: 1146941 - RNA, 19 nt, Artificial Sequence
  Description of Artificial Sequence: Synthetic oligonucleotide
uaucuaucccagagaccau

SEQ ID NO: 1146942 - RNA, 19 nt, Artificial Sequence
  Description of Artificial Sequence: Synthetic oligonucleotide
gguugcgcugccgaagccg

SEQ ID NO: 1146943 - RNA, 19 nt, Artificial Sequence
  Description of Artificial Sequence: Synthetic oligonucleotide
auugaaugccaaggaagua

SEQ ID NO: 1146944 - RNA, 19 nt, Artificial Sequence
  Description of Artificial Sequence: Synthetic oligonucleotide
agcuagcauaucauagaca

SEQ ID NO: 1146945 - RNA, 19 nt, Artificial Sequence
  Description of Artificial Sequence: Synthetic oligonucleotide
guacaggaguuaacuuucc

SEQ ID NO: 1146946 - RNA, 19 nt, Artificial Sequence
  Description of Artificial Sequence: Synthetic oligonucleotide
gcuagggccguccucugcc

SEQ ID NO: 1146947 - RNA, 19 nt, Artificial Sequence
  Description of Artificial Sequence: Synthetic oligonucleotide
uagaaccacaagccacaua

SEQ ID NO: 1146948 - RNA, 19 nt, Artificial Sequence
  Description of Artificial Sequence: Synthetic oligonucleotide
agggccguccucugcccgg

SEQ ID NO: 1146949 - RNA, 19 nt, Artificial Sequence
  Description of Artificial Sequence: Synthetic oligonucleotide
ucaucggagcuuccaugua

SEQ ID NO: 1146950 - RNA, 19 nt, Artificial Sequence
  Description of Artificial Sequence: Synthetic oligonucleotide
guguccguugggaugacga

SEQ ID NO: 1146951 - RNA, 19 nt, Artificial Sequence
  Description of Artificial Sequence: Synthetic oligonucleotide
cagugguaggccguucagc

SEQ ID NO: 1146952 - RNA, 19 nt, Artificial Sequence
  Description of Artificial Sequence: Synthetic oligonucleotide
gaucgucaggcgguugcgc

SEQ ID NO: 1146953 - RNA, 19 nt, Artificial Sequence
  Description of Artificial Sequence: Synthetic oligonucleotide
ucggagcuuccauguaggu

SEQ ID NO: 1146954 - RNA, 19 nt, Artificial Sequence
  Description of Artificial Sequence: Synthetic oligonucleotide
uaugagcaagaaggaucca

SEQ ID NO: 1146955 - RNA, 19 nt, Artificial Sequence
  Description of Artificial Sequence: Synthetic oligonucleotide
agucugaguaaugguguaa

SEQ ID NO: 1146956 - RNA, 19 nt, Artificial Sequence
  Description of Artificial Sequence: Synthetic oligonucleotide
aucagguacuccucccauu

SEQ ID NO: 1146957 - RNA, 19 nt, Artificial Sequence
  Description of Artificial Sequence: Synthetic oligonucleotide
agguucauuauagcuuuua

SEQ ID NO: 1146958 - RNA, 19 nt, Artificial Sequence
  Description of Artificial Sequence: Synthetic oligonucleotide
agauuccucuuggaagaga

SEQ ID NO: 1146959 - RNA, 19 nt, Artificial Sequence
  Description of Artificial Sequence: Synthetic oligonucleotide
cguagcaaugcuuaaucca

SEQ ID NO: 1146960 - RNA, 19 nt, Artificial Sequence
  Description of Artificial Sequence: Synthetic oligonucleotide
ccagugaccagguucauua

SEQ ID NO: 1146961 - RNA, 19 nt, Artificial Sequence
  Description of Artificial Sequence: Synthetic oligonucleotide
cuuugcaacaaaucaucuu

SEQ ID NO: 1146962 - RNA, 19 nt, Artificial Sequence
  Description of Artificial Sequence: Synthetic oligonucleotide
aucuguuaaugcacuuccu

SEQ ID NO: 1146963 - RNA, 19 nt, Artificial Sequence
  Description of Artificial Sequence: Synthetic oligonucleotide
ugggaugacgagcggccuu

SEQ ID NO: 1146964 - RNA, 19 nt, Artificial Sequence
  Description of Artificial Sequence: Synthetic oligonucleotide
gccgaagaccagcugcucc

SEQ ID NO: 1146965 - RNA, 19 nt, Artificial Sequence
  Description of Artificial Sequence: Synthetic oligonucleotide
ccagcuagcauaucauaga

SEQ ID NO: 1146966 - RNA, 19 nt, Artificial Sequence
  Description of Artificial Sequence: Synthetic oligonucleotide
cucggcggccggcuugucg

SEQ ID NO: 1146967 - RNA, 19 nt, Artificial Sequence
  Description of Artificial Sequence: Synthetic oligonucleotide
ccgauuguucaucauguca

SEQ ID NO: 1146968 - RNA, 19 nt, Artificial Sequence
  Description of Artificial Sequence: Synthetic oligonucleotide
gucucuuuugaagcuuauc

SEQ ID NO: 1146969 - RNA, 19 nt, Artificial Sequence
  Description of Artificial Sequence: Synthetic oligonucleotide
ugccgaagccggcucuccu

SEQ ID NO: 1146970 - RNA, 19 nt, Artificial Sequence
  Description of Artificial Sequence: Synthetic oligonucleotide
ucaguucuuuggucuucau

SEQ ID NO: 1146971 - RNA, 19 nt, Artificial Sequence
  Description of Artificial Sequence: Synthetic oligonucleotide
agcgcguccucgucguccu

SEQ ID NO: 1146972 - RNA, 19 nt, Artificial Sequence
  Description of Artificial Sequence: Synthetic oligonucleotide
gacagcgcucggcggccgg

SEQ ID NO: 1146973 - RNA, 19 nt, Artificial Sequence
  Description of Artificial Sequence: Synthetic oligonucleotide
gcuuacuaucggaagagaa

SEQ ID NO: 1146974 - RNA, 19 nt, Artificial Sequence
  Description of Artificial Sequence: Synthetic oligonucleotide
uugggaugacgagcggccu

SEQ ID NO: 1146975 - RNA, 19 nt, Artificial Sequence
  Description of Artificial Sequence: Synthetic oligonucleotide
gaaauggguucaauugaau

SEQ ID NO: 1146976 - RNA, 19 nt, Artificial Sequence
  Description of Artificial Sequence: Synthetic oligonucleotide
ugcgcugccgaagccggcu

SEQ ID NO: 1146977 - RNA, 19 nt, Artificial Sequence
  Description of Artificial Sequence: Synthetic oligonucleotide
gaaccuugcugcgaauacu

SEQ ID NO: 1146978 - RNA, 19 nt, Artificial Sequence
  Description of Artificial Sequence: Synthetic oligonucleotide
cucuuucaaaccucucacu

SEQ ID NO: 1146979 - RNA, 19 nt, Artificial Sequence
  Description of Artificial Sequence: Synthetic oligonucleotide
gccgugaccgcgcuagggc

SEQ ID NO: 1146980 - RNA, 19 nt, Artificial Sequence
  Description of Artificial Sequence: Synthetic oligonucleotide
cuccacucuuagaaccaca

SEQ ID NO: 1146981 - RNA, 19 nt, Artificial Sequence
  Description of Artificial Sequence: Synthetic oligonucleotide
ugaccccgcgagcuccgca

SEQ ID NO: 1146982 - RNA, 19 nt, Artificial Sequence
  Description of Artificial Sequence: Synthetic oligonucleotide
cugcccaaucagguacucc

SEQ ID NO: 1146983 - RNA, 19 nt, Artificial Sequence
  Description of Artificial Sequence: Synthetic oligonucleotide
uuacuuucacuggcauuuu

SEQ ID NO: 1146984 - RNA, 19 nt, Artificial Sequence
  Description of Artificial Sequence: Synthetic oligonucleotide
gcugcgaauacuuguggcu

SEQ ID NO: 1146985 - RNA, 19 nt, Artificial Sequence
  Description of Artificial Sequence: Synthetic oligonucleotide
ccauguaggugaccccgcg

SEQ ID NO: 1146986 - RNA, 19 nt, Artificial Sequence
  Description of Artificial Sequence: Synthetic oligonucleotide
guaggugaccccgcgagcu

SEQ ID NO: 1146987 - RNA, 19 nt, Artificial Sequence
  Description of Artificial Sequence: Synthetic oligonucleotide
cagagucaucggagcuucc

SEQ ID NO: 1146988 - RNA, 19 nt, Artificial Sequence
  Description of Artificial Sequence: Synthetic oligonucleotide
ccaugguuugaacacgaga

SEQ ID NO: 1146989 - RNA, 19 nt, Artificial Sequence
  Description of Artificial Sequence: Synthetic oligonucleotide
cugcgaauacuuguggcua

SEQ ID NO: 1146990 - RNA, 19 nt, Artificial Sequence
  Description of Artificial Sequence: Synthetic oligonucleotide
ggcgaaguauccacuucug

SEQ ID NO: 1146991 - RNA, 19 nt, Artificial Sequence
  Description of Artificial Sequence: Synthetic oligonucleotide
cuuuccgaaaccgauuguu

SEQ ID NO: 1146992 - RNA, 19 nt, Artificial Sequence
  Description of Artificial Sequence: Synthetic oligonucleotide
acgagcggccuucgggcgu

SEQ ID NO: 1146993 - RNA, 19 nt, Artificial Sequence
  Description of Artificial Sequence: Synthetic oligonucleotide
gucucugcccaaucaggua

SEQ ID NO: 1146994 - RNA, 19 nt, Artificial Sequence
  Description of Artificial Sequence: Synthetic oligonucleotide
uaacaccagugaccagguu

SEQ ID NO: 1146995 - RNA, 19 nt, Artificial Sequence
  Description of Artificial Sequence: Synthetic oligonucleotide
ccgcuuacuaucggaagag

SEQ ID NO: 1146996 - RNA, 19 nt, Artificial Sequence
  Description of Artificial Sequence: Synthetic oligonucleotide
accuugcugcgaauacuug

SEQ ID NO: 1146997 - RNA, 19 nt, Artificial Sequence
  Description of Artificial Sequence: Synthetic oligonucleotide
cuuugacguagcaaugcuu

SEQ ID NO: 1146998 - RNA, 19 nt, Artificial Sequence
  Description of Artificial Sequence: Synthetic oligonucleotide
gcgguugcgcugccgaagc

SEQ ID NO: 1146999 - RNA, 19 nt, Artificial Sequence
  Description of Artificial Sequence: Synthetic oligonucleotide
gcuaaaagcucuucuccau

SEQ ID NO: 1147000 - RNA, 19 nt, Artificial Sequence
  Description of Artificial Sequence: Synthetic oligonucleotide
gccuuaaagauuggaaacu

SEQ ID NO: 1147001 - RNA, 19 nt, Artificial Sequence
  Description of Artificial Sequence: Synthetic oligonucleotide
gguaggccguucagcauug

SEQ ID NO: 1147002 - RNA, 19 nt, Artificial Sequence
  Description of Artificial Sequence: Synthetic oligonucleotide
caggcgguugcgcugccga

SEQ ID NO: 1147003 - RNA, 19 nt, Artificial Sequence
  Description of Artificial Sequence: Synthetic oligonucleotide
ucugcccggccugcggugu

SEQ ID NO: 1147004 - RNA, 19 nt, Artificial Sequence
  Description of Artificial Sequence: Synthetic oligonucleotide
ccgugaccgcgcuagggcc

SEQ ID NO: 1147005 - RNA, 19 nt, Artificial Sequence
  Description of Artificial Sequence: Synthetic oligonucleotide
guccucgacgucgccgaag

SEQ ID NO: 1147006 - RNA, 19 nt, Artificial Sequence
  Description of Artificial Sequence: Synthetic oligonucleotide
ccggcaguucuucaucuuc

SEQ ID NO: 1147007 - RNA, 19 nt, Artificial Sequence
  Description of Artificial Sequence: Synthetic oligonucleotide
caaggcgaaguauccacuu

SEQ ID NO: 1147008 - RNA, 19 nt, Artificial Sequence
  Description of Artificial Sequence: Synthetic oligonucleotide
caucaccaccugugcacca

SEQ ID NO: 1147009 - RNA, 19 nt, Artificial Sequence
  Description of Artificial Sequence: Synthetic oligonucleotide
guaggccguucagcauugg

SEQ ID NO: 1147010 - RNA, 19 nt, Artificial Sequence
  Description of Artificial Sequence: Synthetic oligonucleotide
ccacuucagagucaucgga

SEQ ID NO: 1147011 - RNA, 19 nt, Artificial Sequence
  Description of Artificial Sequence: Synthetic oligonucleotide
cauccacccaaacuggcuu

SEQ ID NO: 1147012 - RNA, 19 nt, Artificial Sequence
  Description of Artificial Sequence: Synthetic oligonucleotide
ggcgguugcgcugccgaag

SEQ ID NO: 1147013 - RNA, 19 nt, Artificial Sequence
  Description of Artificial Sequence: Synthetic oligonucleotide
gaccgcgcuagggccgucc

SEQ ID NO: 1147014 - RNA, 19 nt, Artificial Sequence
  Description of Artificial Sequence: Synthetic oligonucleotide
acgucgccgaagaccagcu

SEQ ID NO: 1147015 - RNA, 19 nt, Artificial Sequence
  Description of Artificial Sequence: Synthetic oligonucleotide
accgcgcuagggccguccu

SEQ ID NO: 1147016 - RNA, 19 nt, Artificial Sequence
  Description of Artificial Sequence: Synthetic oligonucleotide
ggcaagaaucuugacugua

SEQ ID NO: 1147017 - RNA, 19 nt, Artificial Sequence
  Description of Artificial Sequence: Synthetic oligonucleotide
agacagcgcucggcggccg

SEQ ID NO: 1147018 - RNA, 19 nt, Artificial Sequence
  Description of Artificial Sequence: Synthetic oligonucleotide
cugccgaagccggcucucc

SEQ ID NO: 1147019 - RNA, 19 nt, Artificial Sequence
  Description of Artificial Sequence: Synthetic oligonucleotide
cgaaaccgauuguucauca

SEQ ID NO: 1147020 - RNA, 19 nt, Artificial Sequence
  Description of Artificial Sequence: Synthetic oligonucleotide
guucaucaugucaacuauu

SEQ ID NO: 1147021 - RNA, 19 nt, Artificial Sequence
  Description of Artificial Sequence: Synthetic oligonucleotide
ccgaaaccgauuguucauc

SEQ ID NO: 1147022 - RNA, 19 nt, Artificial Sequence
  Description of Artificial Sequence: Synthetic oligonucleotide
agcggccuucgggcgugcc

SEQ ID NO: 1147023 - RNA, 19 nt, Artificial Sequence
  Description of Artificial Sequence: Synthetic oligonucleotide
cacugccaauauuucugua

SEQ ID NO: 1147024 - RNA, 19 nt, Artificial Sequence
  Description of Artificial Sequence: Synthetic oligonucleotide
cguauauauccgcuuacua

SEQ ID NO: 1147025 - RNA, 19 nt, Artificial Sequence
  Description of Artificial Sequence: Synthetic oligonucleotide
ggaugacgagcggccuucg

SEQ ID NO: 1147026 - RNA, 19 nt, Artificial Sequence
  Description of Artificial Sequence: Synthetic oligonucleotide
gcgguguccguugggauga

SEQ ID NO: 1147027 - RNA, 19 nt, Artificial Sequence
  Description of Artificial Sequence: Synthetic oligonucleotide
ccuuugcaacaaaucaucu

SEQ ID NO: 1147028 - RNA, 19 nt, Artificial Sequence
  Description of Artificial Sequence: Synthetic oligonucleotide
cucgaucgucaggcgguug

SEQ ID NO: 1147029 - RNA, 19 nt, Artificial Sequence
  Description of Artificial Sequence: Synthetic oligonucleotide
caagccacauacugcccau

SEQ ID NO: 1147030 - RNA, 19 nt, Artificial Sequence
  Description of Artificial Sequence: Synthetic oligonucleotide
ccaaauagaugcucuggau

SEQ ID NO: 1147031 - RNA, 19 nt, Artificial Sequence
  Description of Artificial Sequence: Synthetic oligonucleotide
ggugaccccgcgagcuccg

SEQ ID NO: 1147032 - RNA, 19 nt, Artificial Sequence
  Description of Artificial Sequence: Synthetic oligonucleotide
agagugucuuuggcuucau

SEQ ID NO: 1147033 - RNA, 19 nt, Artificial Sequence
  Description of Artificial Sequence: Synthetic oligonucleotide
ggggagacuucaaaucgcu

SEQ ID NO: 1147034 - RNA, 19 nt, Artificial Sequence
  Description of Artificial Sequence: Synthetic oligonucleotide
gcccauucuuugacguagc

SEQ ID NO: 1147035 - RNA, 19 nt, Artificial Sequence
  Description of Artificial Sequence: Synthetic oligonucleotide
gagcagugguaggccguuc

SEQ ID NO: 1147036 - RNA, 19 nt, Artificial Sequence
  Description of Artificial Sequence: Synthetic oligonucleotide
ccuucgggcgugccgccgc

SEQ ID NO: 1147037 - RNA, 19 nt, Artificial Sequence
  Description of Artificial Sequence: Synthetic oligonucleotide
gccaucaaccugaaauagu

SEQ ID NO: 1147038 - RNA, 19 nt, Artificial Sequence
  Description of Artificial Sequence: Synthetic oligonucleotide
gcucauuccccaaggcgaa

SEQ ID NO: 1147039 - RNA, 19 nt, Artificial Sequence
  Description of Artificial Sequence: Synthetic oligonucleotide
guacugaaauggguucaau

SEQ ID NO: 1147040 - RNA, 19 nt, Artificial Sequence
  Description of Artificial Sequence: Synthetic oligonucleotide
ccauugcauguuggaauuc

SEQ ID NO: 1147041 - RNA, 19 nt, Artificial Sequence
  Description of Artificial Sequence: Synthetic oligonucleotide
cgaucgucaggcgguugcg

SEQ ID NO: 1147042 - RNA, 19 nt, Artificial Sequence
  Description of Artificial Sequence: Synthetic oligonucleotide
caggccggcaguucuucau

SEQ ID NO: 1147043 - RNA, 19 nt, Artificial Sequence
  Description of Artificial Sequence: Synthetic oligonucleotide
ccugcgguguccguuggga

SEQ ID NO: 1147044 - RNA, 19 nt, Artificial Sequence
  Description of Artificial Sequence: Synthetic oligonucleotide
ccaaggcgaaguauccacu

SEQ ID NO: 1147045 - RNA, 19 nt, Artificial Sequence
  Description of Artificial Sequence: Synthetic oligonucleotide
gcgaauacuuguggcuaaa

SEQ ID NO: 1147046 - RNA, 19 nt, Artificial Sequence
  Description of Artificial Sequence: Synthetic oligonucleotide
gcauuggcaggccggcagu

SEQ ID NO: 1147047 - RNA, 19 nt, Artificial Sequence
  Description of Artificial Sequence: Synthetic oligonucleotide
gugaccccgcgagcuccgc

SEQ ID NO: 1147048 - RNA, 19 nt, Artificial Sequence
  Description of Artificial Sequence: Synthetic oligonucleotide
gccggcuugucguccucga

SEQ ID NO: 1147049 - RNA, 19 nt, Artificial Sequence
  Description of Artificial Sequence: Synthetic oligonucleotide
cagcauuggcaggccggca

SEQ ID NO: 1147050 - RNA, 19 nt, Artificial Sequence
  Description of Artificial Sequence: Synthetic oligonucleotide
ggccuucgggcgugccgcc

SEQ ID NO: 1147051 - RNA, 19 nt, Artificial Sequence
  Description of Artificial Sequence: Synthetic oligonucleotide
cggccuucgggcgugccgc

SEQ ID NO: 1147052 - RNA, 19 nt, Artificial Sequence
  Description of Artificial Sequence: Synthetic oligonucleotide
ggcggccggcuugucgucc

SEQ ID NO: 1147053 - RNA, 19 nt, Artificial Sequence
  Description of Artificial Sequence: Synthetic oligonucleotide
gccuucgggcgugccgccg

SEQ ID NO: 1147054 - RNA, 19 nt, Artificial Sequence
  Description of Artificial Sequence: Synthetic oligonucleotide
cugcgguguccguugggau

SEQ ID NO: 1147055 - RNA, 19 nt, Artificial Sequence
  Description of Artificial Sequence: Synthetic oligonucleotide
gcugccgaagccggcucuc

SEQ ID NO: 1147056 - RNA, 19 nt, Artificial Sequence
  Description of Artificial Sequence: Synthetic oligonucleotide
cgccgugaccgcgcuaggg

SEQ ID NO: 1147057 - RNA, 19 nt, Artificial Sequence
  Description of Artificial Sequence: Synthetic oligonucleotide
ccucgacgucgccgaagac

SEQ ID NO: 1147058 - RNA, 19 nt, Artificial Sequence
  Description of Artificial Sequence: Synthetic oligonucleotide
gagcggccuucgggcgugc

SEQ ID NO: 1147059 - RNA, 19 nt, Artificial Sequence
  Description of Artificial Sequence: Synthetic oligonucleotide
cgaauacuuguggcuaaaa

SEQ ID NO: 1147060 - RNA, 19 nt, Artificial Sequence
  Description of Artificial Sequence: Synthetic oligonucleotide
cgguugcgcugccgaagcc

SEQ ID NO: 1147061 - RNA, 19 nt, Artificial Sequence
  Description of Artificial Sequence: Synthetic oligonucleotide
cgcuuacuaucggaagaga

SEQ ID NO: 1147062 - RNA, 19 nt, Artificial Sequence
  Description of Artificial Sequence: Synthetic oligonucleotide
gggagacuucaaaucgcuu

SEQ ID NO: 1147063 - RNA, 19 nt, Artificial Sequence
  Description of Artificial Sequence: Synthetic oligonucleotide
cgucgccgaagaccagcug

SEQ ID NO: 1147064 - RNA, 19 nt, Artificial Sequence
  Description of Artificial Sequence: Synthetic oligonucleotide
ugaccgcgcuagggccguc

SEQ ID NO: 1147065 - RNA, 19 nt, Artificial Sequence
  Description of Artificial Sequence: Synthetic oligonucleotide
ccgagcagugguaggccgu

SEQ ID NO: 1147066 - RNA, 19 nt, Artificial Sequence
  Description of Artificial Sequence: Synthetic oligonucleotide
cgagcggccuucgggcgug

SEQ ID NO: 1147067 - RNA, 19 nt, Artificial Sequence
  Description of Artificial Sequence: Synthetic oligonucleotide
gcggccggcuugucguccu

SEQ ID NO: 1147068 - RNA, 19 nt, Artificial Sequence
  Description of Artificial Sequence: Synthetic oligonucleotide
cggccggcuugucguccuc

SEQ ID NO: 1147069 - RNA, 19 nt, Artificial Sequence
  Description of Artificial Sequence: Synthetic oligonucleotide
cguccucgacgucgccgaa

SEQ ID NO: 1147070 - RNA, 19 nt, Artificial Sequence
  Description of Artificial Sequence: Synthetic oligonucleotide
cgagcagugguaggccguu

SEQ ID NO: 1147071 - RNA, 19 nt, Artificial Sequence
  Description of Artificial Sequence: Synthetic oligonucleotide
ccucgaucgucaggcgguu

SEQ ID NO: 1147072 - RNA, 19 nt, Artificial Sequence
  Description of Artificial Sequence: Synthetic oligonucleotide
ccggccugcgguguccguu

SEQ ID NO: 1147073 - RNA, 19 nt, Artificial Sequence
  Description of Artificial Sequence: Synthetic oligonucleotide
uugauuacuuucaaggugg

SEQ ID NO: 1147074 - RNA, 19 nt, Artificial Sequence
  Description of Artificial Sequence: Synthetic oligonucleotide
cuuuauuauauacuggucc

SEQ ID NO: 1147075 - RNA, 19 nt, Artificial Sequence
  Description of Artificial Sequence: Synthetic oligonucleotide
aauaucggaagauuuuguc

SEQ ID NO: 1147076 - RNA, 19 nt, Artificial Sequence
  Description of Artificial Sequence: Synthetic oligonucleotide
caugguaccaucgagagcc

SEQ ID NO: 1147077 - RNA, 19 nt, Artificial Sequence
  Description of Artificial Sequence: Synthetic oligonucleotide
gaugcuuugaaccugcuca

SEQ ID NO: 1147078 - RNA, 19 nt, Artificial Sequence
  Description of Artificial Sequence: Synthetic oligonucleotide
guugagacgaaacaucccg

SEQ ID NO: 1147079 - RNA, 19 nt, Artificial Sequence
  Description of Artificial Sequence: Synthetic oligonucleotide
ucuucguuuggucugugcg

SEQ ID NO: 1147080 - RNA, 19 nt, Artificial Sequence
  Description of Artificial Sequence: Synthetic oligonucleotide
uuugagaucagcuccaaaa

SEQ ID NO: 1147081 - RNA, 19 nt, Artificial Sequence
  Description of Artificial Sequence: Synthetic oligonucleotide
auugauuacuuucaaggug

SEQ ID NO: 1147082 - RNA, 19 nt, Artificial Sequence
  Description of Artificial Sequence: Synthetic oligonucleotide
gugaggaaaauguagucgg

SEQ ID NO: 1147083 - RNA, 19 nt, Artificial Sequence
  Description of Artificial Sequence: Synthetic oligonucleotide
gaaagucagacccuucccg

SEQ ID NO: 1147084 - RNA, 19 nt, Artificial Sequence
  Description of Artificial Sequence: Synthetic oligonucleotide
uucucuaccuccuggaaag

SEQ ID NO: 1147085 - RNA, 19 nt, Artificial Sequence
  Description of Artificial Sequence: Synthetic oligonucleotide
ugagccuucuuccauaaga

SEQ ID NO: 1147086 - RNA, 19 nt, Artificial Sequence
  Description of Artificial Sequence: Synthetic oligonucleotide
acguugaaauuccagaaag

SEQ ID NO: 1147087 - RNA, 19 nt, Artificial Sequence
  Description of Artificial Sequence: Synthetic oligonucleotide
agcgcuuuauuauauacug

SEQ ID NO: 1147088 - RNA, 19 nt, Artificial Sequence
  Description of Artificial Sequence: Synthetic oligonucleotide
ucggagaaggagaugagcc

SEQ ID NO: 1147089 - RNA, 19 nt, Artificial Sequence
  Description of Artificial Sequence: Synthetic oligonucleotide
gaaguuuacguugaaauuc

SEQ ID NO: 1147090 - RNA, 19 nt, Artificial Sequence
  Description of Artificial Sequence: Synthetic oligonucleotide
uauuauauacugguccagg

SEQ ID NO: 1147091 - RNA, 19 nt, Artificial Sequence
  Description of Artificial Sequence: Synthetic oligonucleotide
augugguaaaagcucaacg

SEQ ID NO: 1147092 - RNA, 19 nt, Artificial Sequence
  Description of Artificial Sequence: Synthetic oligonucleotide
ugguaaaagcucaacgcag

SEQ ID NO: 1147093 - RNA, 19 nt, Artificial Sequence
  Description of Artificial Sequence: Synthetic oligonucleotide
uaagagaccaguacuggca

SEQ ID NO: 1147094 - RNA, 19 nt, Artificial Sequence
  Description of Artificial Sequence: Synthetic oligonucleotide
aauugccucucagugauuc

SEQ ID NO: 1147095 - RNA, 19 nt, Artificial Sequence
  Description of Artificial Sequence: Synthetic oligonucleotide
accaaauugccucucagug

SEQ ID NO: 1147096 - RNA, 19 nt, Artificial Sequence
  Description of Artificial Sequence: Synthetic oligonucleotide
agugggacgaucucugugg

SEQ ID NO: 1147097 - RNA, 19 nt, Artificial Sequence
  Description of Artificial Sequence: Synthetic oligonucleotide
aagucggagacucugcaug

SEQ ID NO: 1147098 - RNA, 19 nt, Artificial Sequence
  Description of Artificial Sequence: Synthetic oligonucleotide
aagauuuugucuggugugg

SEQ ID NO: 1147099 - RNA, 19 nt, Artificial Sequence
  Description of Artificial Sequence: Synthetic oligonucleotide
auuugggcagagcaaaguc

SEQ ID NO: 1147100 - RNA, 19 nt, Artificial Sequence
  Description of Artificial Sequence: Synthetic oligonucleotide
ugcuguugacacaagucgg

SEQ ID NO: 1147101 - RNA, 19 nt, Artificial Sequence
  Description of Artificial Sequence: Synthetic oligonucleotide
agacgaaacaucccguccg

SEQ ID NO: 1147102 - RNA, 19 nt, Artificial Sequence
  Description of Artificial Sequence: Synthetic oligonucleotide
uguuauggaucgcacgaag

SEQ ID NO: 1147103 - RNA, 19 nt, Artificial Sequence
  Description of Artificial Sequence: Synthetic oligonucleotide
acuuuaucaagagaugcuc

SEQ ID NO: 1147104 - RNA, 19 nt, Artificial Sequence
  Description of Artificial Sequence: Synthetic oligonucleotide
uuagagugcaggagguggg

SEQ ID NO: 1147105 - RNA, 19 nt, Artificial Sequence
  Description of Artificial Sequence: Synthetic oligonucleotide
auaucggaagauuuugucu

SEQ ID NO: 1147106 - RNA, 19 nt, Artificial Sequence
  Description of Artificial Sequence: Synthetic oligonucleotide
ugagauaccccaugguacc

SEQ ID NO: 1147107 - RNA, 19 nt, Artificial Sequence
  Description of Artificial Sequence: Synthetic oligonucleotide
aagacucggucccagcauc

SEQ ID NO: 1147108 - RNA, 19 nt, Artificial Sequence
  Description of Artificial Sequence: Synthetic oligonucleotide
uuacguugaaauuccagaa

SEQ ID NO: 1147109 - RNA, 19 nt, Artificial Sequence
  Description of Artificial Sequence: Synthetic oligonucleotide
acacuauuugggcagagca

SEQ ID NO: 1147110 - RNA, 19 nt, Artificial Sequence
  Description of Artificial Sequence: Synthetic oligonucleotide
uuauggaucgcacgaaguc

SEQ ID NO: 1147111 - RNA, 19 nt, Artificial Sequence
  Description of Artificial Sequence: Synthetic oligonucleotide
cuucagaacaucaugcuga

SEQ ID NO: 1147112 - RNA, 19 nt, Artificial Sequence
  Description of Artificial Sequence: Synthetic oligonucleotide
cacaagccggacuugaggg

SEQ ID NO: 1147113 - RNA, 19 nt, Artificial Sequence
  Description of Artificial Sequence: Synthetic oligonucleotide
aaaauuucucugaggagug

SEQ ID NO: 1147114 - RNA, 19 nt, Artificial Sequence
  Description of Artificial Sequence: Synthetic oligonucleotide
ucuggguaagacucggucc

SEQ ID NO: 1147115 - RNA, 19 nt, Artificial Sequence
  Description of Artificial Sequence: Synthetic oligonucleotide
agaguuccacuuuugccac

SEQ ID NO: 1147116 - RNA, 19 nt, Artificial Sequence
  Description of Artificial Sequence: Synthetic oligonucleotide
ucauuugguguuauggauc

SEQ ID NO: 1147117 - RNA, 19 nt, Artificial Sequence
  Description of Artificial Sequence: Synthetic oligonucleotide
aacaccacgucgcacacau

SEQ ID NO: 1147118 - RNA, 19 nt, Artificial Sequence
  Description of Artificial Sequence: Synthetic oligonucleotide
ccuagcagaacacugacgg

SEQ ID NO: 1147119 - RNA, 19 nt, Artificial Sequence
  Description of Artificial Sequence: Synthetic oligonucleotide
uugaaauuccagaaaguuu

SEQ ID NO: 1147120 - RNA, 19 nt, Artificial Sequence
  Description of Artificial Sequence: Synthetic oligonucleotide
ugcaucgucacuuuaucaa

SEQ ID NO: 1147121 - RNA, 19 nt, Artificial Sequence
  Description of Artificial Sequence: Synthetic oligonucleotide
agcgaaugaugcuuugaac

SEQ ID NO: 1147122 - RNA, 19 nt, Artificial Sequence
  Description of Artificial Sequence: Synthetic oligonucleotide
gaaaauguagucggagaag

SEQ ID NO: 1147123 - RNA, 19 nt, Artificial Sequence
  Description of Artificial Sequence: Synthetic oligonucleotide
caccacgucgcacacaugg

SEQ ID NO: 1147124 - RNA, 19 nt, Artificial Sequence
  Description of Artificial Sequence: Synthetic oligonucleotide
gcgaaugaugcuuugaacc

SEQ ID NO: 1147125 - RNA, 19 nt, Artificial Sequence
  Description of Artificial Sequence: Synthetic oligonucleotide
uucauuugguguuauggau

SEQ ID NO: 1147126 - RNA, 19 nt, Artificial Sequence
  Description of Artificial Sequence: Synthetic oligonucleotide
aaggcggagagggaagccc

SEQ ID NO: 1147127 - RNA, 19 nt, Artificial Sequence
  Description of Artificial Sequence: Synthetic oligonucleotide
ucagucuucguuuggucug

SEQ ID NO: 1147128 - RNA, 19 nt, Artificial Sequence
  Description of Artificial Sequence: Synthetic oligonucleotide
uuauuauauacugguccag

SEQ ID NO: 1147129 - RNA, 19 nt, Artificial Sequence
  Description of Artificial Sequence: Synthetic oligonucleotide
gagggcggaacacaagccg

SEQ ID NO: 1147130 - RNA, 19 nt, Artificial Sequence
  Description of Artificial Sequence: Synthetic oligonucleotide
aucaugcugaaguuuacgu

SEQ ID NO: 1147131 - RNA, 19 nt, Artificial Sequence
  Description of Artificial Sequence: Synthetic oligonucleotide
uauggaucgcacgaagucc

SEQ ID NO: 1147132 - RNA, 19 nt, Artificial Sequence
  Description of Artificial Sequence: Synthetic oligonucleotide
aagagugcaaacaccacgu

SEQ ID NO: 1147133 - RNA, 19 nt, Artificial Sequence
  Description of Artificial Sequence: Synthetic oligonucleotide
ugaaccugcucaaacuccu

SEQ ID NO: 1147134 - RNA, 19 nt, Artificial Sequence
  Description of Artificial Sequence: Synthetic oligonucleotide
ggguguagaauauacuucc

SEQ ID NO: 1147135 - RNA, 19 nt, Artificial Sequence
  Description of Artificial Sequence: Synthetic oligonucleotide
ucaugaagggccacuccag

SEQ ID NO: 1147136 - RNA, 19 nt, Artificial Sequence
  Description of Artificial Sequence: Synthetic oligonucleotide
aagucagacccuucccguc

SEQ ID NO: 1147137 - RNA, 19 nt, Artificial Sequence
  Description of Artificial Sequence: Synthetic oligonucleotide
agaaagggcguugagacga

SEQ ID NO: 1147138 - RNA, 19 nt, Artificial Sequence
  Description of Artificial Sequence: Synthetic oligonucleotide
ugguguuauggaucgcacg

SEQ ID NO: 1147139 - RNA, 19 nt, Artificial Sequence
  Description of Artificial Sequence: Synthetic oligonucleotide
cuucguuuggucugugcgg

SEQ ID NO: 1147140 - RNA, 19 nt, Artificial Sequence
  Description of Artificial Sequence: Synthetic oligonucleotide
uccccauucaagucaaaca

SEQ ID NO: 1147141 - RNA, 19 nt, Artificial Sequence
  Description of Artificial Sequence: Synthetic oligonucleotide
uucguuuggucugugcggg

SEQ ID NO: 1147142 - RNA, 19 nt, Artificial Sequence
  Description of Artificial Sequence: Synthetic oligonucleotide
ugaaguuuacguugaaauu

SEQ ID NO: 1147143 - RNA, 19 nt, Artificial Sequence
  Description of Artificial Sequence: Synthetic oligonucleotide
gguggcaaaauaucggaag

SEQ ID NO: 1147144 - RNA, 19 nt, Artificial Sequence
  Description of Artificial Sequence: Synthetic oligonucleotide
cauaagagaccaguacugg

SEQ ID NO: 1147145 - RNA, 19 nt, Artificial Sequence
  Description of Artificial Sequence: Synthetic oligonucleotide
uucuuuccaucaaagcgcu

SEQ ID NO: 1147146 - RNA, 19 nt, Artificial Sequence
  Description of Artificial Sequence: Synthetic oligonucleotide
uacguugaaauuccagaaa

SEQ ID NO: 1147147 - RNA, 19 nt, Artificial Sequence
  Description of Artificial Sequence: Synthetic oligonucleotide
aucgucacuuuaucaagag

SEQ ID NO: 1147148 - RNA, 19 nt, Artificial Sequence
  Description of Artificial Sequence: Synthetic oligonucleotide
accaucgagagcccacagc

SEQ ID NO: 1147149 - RNA, 19 nt, Artificial Sequence
  Description of Artificial Sequence: Synthetic oligonucleotide
uguugcaucgucacuuuau

SEQ ID NO: 1147150 - RNA, 19 nt, Artificial Sequence
  Description of Artificial Sequence: Synthetic oligonucleotide
gagacgaaacaucccgucc

SEQ ID NO: 1147151 - RNA, 19 nt, Artificial Sequence
  Description of Artificial Sequence: Synthetic oligonucleotide
aaauaucggaagauuuugu

SEQ ID NO: 1147152 - RNA, 19 nt, Artificial Sequence
  Description of Artificial Sequence: Synthetic oligonucleotide
caugagacgggugaagccc

SEQ ID NO: 1147153 - RNA, 19 nt, Artificial Sequence
  Description of Artificial Sequence: Synthetic oligonucleotide
aaacaucccguccgagcuc

SEQ ID NO: 1147154 - RNA, 19 nt, Artificial Sequence
  Description of Artificial Sequence: Synthetic oligonucleotide
ucuucuggguaagacucgg

SEQ ID NO: 1147155 - RNA, 19 nt, Artificial Sequence
  Description of Artificial Sequence: Synthetic oligonucleotide
gugguaaaagcucaacgca

SEQ ID NO: 1147156 - RNA, 19 nt, Artificial Sequence
  Description of Artificial Sequence: Synthetic oligonucleotide
ucuuggacugcacuccgcu

SEQ ID NO: 1147157 - RNA, 19 nt, Artificial Sequence
  Description of Artificial Sequence: Synthetic oligonucleotide
uucuggguaagacucgguc

SEQ ID NO: 1147158 - RNA, 19 nt, Artificial Sequence
  Description of Artificial Sequence: Synthetic oligonucleotide
gauccgauucucauacucc

SEQ ID NO: 1147159 - RNA, 19 nt, Artificial Sequence
  Description of Artificial Sequence: Synthetic oligonucleotide
aggguguagaauauacuuc

SEQ ID NO: 1147160 - RNA, 19 nt, Artificial Sequence
  Description of Artificial Sequence: Synthetic oligonucleotide
gcagaaagggcguugagac

SEQ ID NO: 1147161 - RNA, 19 nt, Artificial Sequence
  Description of Artificial Sequence: Synthetic oligonucleotide
gaugagcccacauucucca

SEQ ID NO: 1147162 - RNA, 19 nt, Artificial Sequence
  Description of Artificial Sequence: Synthetic oligonucleotide
uguugacacaagucggaga

SEQ ID NO: 1147163 - RNA, 19 nt, Artificial Sequence
  Description of Artificial Sequence: Synthetic oligonucleotide
uuaucaccaguaucagucu

SEQ ID NO: 1147164 - RNA, 19 nt, Artificial Sequence
  Description of Artificial Sequence: Synthetic oligonucleotide
cacgucgcacacauggucc

SEQ ID NO: 1147165 - RNA, 19 nt, Artificial Sequence
  Description of Artificial Sequence: Synthetic oligonucleotide
acuauuugggcagagcaaa

SEQ ID NO: 1147166 - RNA, 19 nt, Artificial Sequence
  Description of Artificial Sequence: Synthetic oligonucleotide
uggggucauaaacacuucu

SEQ ID NO: 1147167 - RNA, 19 nt, Artificial Sequence
  Description of Artificial Sequence: Synthetic oligonucleotide
gugaguuucccuuugagau

SEQ ID NO: 1147168 - RNA, 19 nt, Artificial Sequence
  Description of Artificial Sequence: Synthetic oligonucleotide
gaaacaucccguccgagcu

SEQ ID NO: 1147169 - RNA, 19 nt, Artificial Sequence
  Description of Artificial Sequence: Synthetic oligonucleotide
agucacugcggaugcuccc

SEQ ID NO: 1147170 - RNA, 19 nt, Artificial Sequence
  Description of Artificial Sequence: Synthetic oligonucleotide
uucuucuucuucucuucug

SEQ ID NO: 1147171 - RNA, 19 nt, Artificial Sequence
  Description of Artificial Sequence: Synthetic oligonucleotide
uucccuuugagaucagcuc

SEQ ID NO: 1147172 - RNA, 19 nt, Artificial Sequence
  Description of Artificial Sequence: Synthetic oligonucleotide
uugagacgaaacaucccgu

SEQ ID NO: 1147173 - RNA, 19 nt, Artificial Sequence
  Description of Artificial Sequence: Synthetic oligonucleotide
ugagacgaaacaucccguc

SEQ ID NO: 1147174 - RNA, 19 nt, Artificial Sequence
  Description of Artificial Sequence: Synthetic oligonucleotide
cacuacucccagaagcagc

SEQ ID NO: 1147175 - RNA, 19 nt, Artificial Sequence
  Description of Artificial Sequence: Synthetic oligonucleotide
ugcaugagacgggugaagc

SEQ ID NO: 1147176 - RNA, 19 nt, Artificial Sequence
  Description of Artificial Sequence: Synthetic oligonucleotide
ugcagaaagggcguugaga

SEQ ID NO: 1147177 - RNA, 19 nt, Artificial Sequence
  Description of Artificial Sequence: Synthetic oligonucleotide
cuagcagaacacugacggg

SEQ ID NO: 1147178 - RNA, 19 nt, Artificial Sequence
  Description of Artificial Sequence: Synthetic oligonucleotide
guaggcucggauccgauuc

SEQ ID NO: 1147179 - RNA, 19 nt, Artificial Sequence
  Description of Artificial Sequence: Synthetic oligonucleotide
aagcgcuuuauuauauacu

SEQ ID NO: 1147180 - RNA, 19 nt, Artificial Sequence
  Description of Artificial Sequence: Synthetic oligonucleotide
caaaauuucucugaggagu

SEQ ID NO: 1147181 - RNA, 19 nt, Artificial Sequence
  Description of Artificial Sequence: Synthetic oligonucleotide
ucaggaaagugaagaaguu

SEQ ID NO: 1147182 - RNA, 19 nt, Artificial Sequence
  Description of Artificial Sequence: Synthetic oligonucleotide
cugaaguuuacguugaaau

SEQ ID NO: 1147183 - RNA, 19 nt, Artificial Sequence
  Description of Artificial Sequence: Synthetic oligonucleotide
acugacggggucugggaag

SEQ ID NO: 1147184 - RNA, 19 nt, Artificial Sequence
  Description of Artificial Sequence: Synthetic oligonucleotide
gguguuauggaucgcacga

SEQ ID NO: 1147185 - RNA, 19 nt, Artificial Sequence
  Description of Artificial Sequence: Synthetic oligonucleotide
caggguguuagagugcagg

SEQ ID NO: 1147186 - RNA, 19 nt, Artificial Sequence
  Description of Artificial Sequence: Synthetic oligonucleotide
uugguguuauggaucgcac

SEQ ID NO: 1147187 - RNA, 19 nt, Artificial Sequence
  Description of Artificial Sequence: Synthetic oligonucleotide
ucgucacuuuaucaagaga

SEQ ID NO: 1147188 - RNA, 19 nt, Artificial Sequence
  Description of Artificial Sequence: Synthetic oligonucleotide
caugguuggagacuuccuc

SEQ ID NO: 1147189 - RNA, 19 nt, Artificial Sequence
  Description of Artificial Sequence: Synthetic oligonucleotide
aaguagguugugagggcgg

SEQ ID NO: 1147190 - RNA, 19 nt, Artificial Sequence
  Description of Artificial Sequence: Synthetic oligonucleotide
cuucccgucuuugaagugc

SEQ ID NO: 1147191 - RNA, 19 nt, Artificial Sequence
  Description of Artificial Sequence: Synthetic oligonucleotide
cacaugguccgagaguucc

SEQ ID NO: 1147192 - RNA, 19 nt, Artificial Sequence
  Description of Artificial Sequence: Synthetic oligonucleotide
cuucuuggacugcacuccg

SEQ ID NO: 1147193 - RNA, 19 nt, Artificial Sequence
  Description of Artificial Sequence: Synthetic oligonucleotide
aggugggacacuauuuggg

SEQ ID NO: 1147194 - RNA, 19 nt, Artificial Sequence
  Description of Artificial Sequence: Synthetic oligonucleotide
ugugcgggcugagauaccc

SEQ ID NO: 1147195 - RNA, 19 nt, Artificial Sequence
  Description of Artificial Sequence: Synthetic oligonucleotide
cauccaccgggucauggcg

SEQ ID NO: 1147196 - RNA, 19 nt, Artificial Sequence
  Description of Artificial Sequence: Synthetic oligonucleotide
ugguguuuagucuucccuu

SEQ ID NO: 1147197 - RNA, 19 nt, Artificial Sequence
  Description of Artificial Sequence: Synthetic oligonucleotide
gucgcagucaaagagugca

SEQ ID NO: 1147198 - RNA, 19 nt, Artificial Sequence
  Description of Artificial Sequence: Synthetic oligonucleotide
uccaucaaagcgcuuuauu

SEQ ID NO: 1147199 - RNA, 19 nt, Artificial Sequence
  Description of Artificial Sequence: Synthetic oligonucleotide
ugcacuccgcuguaggcca

SEQ ID NO: 1147200 - RNA, 19 nt, Artificial Sequence
  Description of Artificial Sequence: Synthetic oligonucleotide
gcuaguucugccaaugcag

SEQ ID NO: 1147201 - RNA, 19 nt, Artificial Sequence
  Description of Artificial Sequence: Synthetic oligonucleotide
uaagacucggucccagcau

SEQ ID NO: 1147202 - RNA, 19 nt, Artificial Sequence
  Description of Artificial Sequence: Synthetic oligonucleotide
ggaaaauguagucggagaa

SEQ ID NO: 1147203 - RNA, 19 nt, Artificial Sequence
  Description of Artificial Sequence: Synthetic oligonucleotide
gacacuacucccagaagca

SEQ ID NO: 1147204 - RNA, 19 nt, Artificial Sequence
  Description of Artificial Sequence: Synthetic oligonucleotide
gguugcuuuucauuuggug

SEQ ID NO: 1147205 - RNA, 19 nt, Artificial Sequence
  Description of Artificial Sequence: Synthetic oligonucleotide
cagaaagggcguugagacg

SEQ ID NO: 1147206 - RNA, 19 nt, Artificial Sequence
  Description of Artificial Sequence: Synthetic oligonucleotide
ggucauggcguucaaacuc

SEQ ID NO: 1147207 - RNA, 19 nt, Artificial Sequence
  Description of Artificial Sequence: Synthetic oligonucleotide
aaauguagucggagaagga

SEQ ID NO: 1147208 - RNA, 19 nt, Artificial Sequence
  Description of Artificial Sequence: Synthetic oligonucleotide
agacgggugaagcccaugu

SEQ ID NO: 1147209 - RNA, 19 nt, Artificial Sequence
  Description of Artificial Sequence: Synthetic oligonucleotide
cacaagucggagacucugc

SEQ ID NO: 1147210 - RNA, 19 nt, Artificial Sequence
  Description of Artificial Sequence: Synthetic oligonucleotide
gaugcucccaggaaagcca

SEQ ID NO: 1147211 - RNA, 19 nt, Artificial Sequence
  Description of Artificial Sequence: Synthetic oligonucleotide
cuaguucugccaaugcaga

SEQ ID NO: 1147212 - RNA, 19 nt, Artificial Sequence
  Description of Artificial Sequence: Synthetic oligonucleotide
uccgagaguuccacuuuug

SEQ ID NO: 1147213 - RNA, 19 nt, Artificial Sequence
  Description of Artificial Sequence: Synthetic oligonucleotide
gagcgaaugaugcuuugaa

SEQ ID NO: 1147214 - RNA, 19 nt, Artificial Sequence
  Description of Artificial Sequence: Synthetic oligonucleotide
acgucgcacacaugguccg

SEQ ID NO: 1147215 - RNA, 19 nt, Artificial Sequence
  Description of Artificial Sequence: Synthetic oligonucleotide
agucagacccuucccgucu

SEQ ID NO: 1147216 - RNA, 19 nt, Artificial Sequence
  Description of Artificial Sequence: Synthetic oligonucleotide
agggaguccaggguguuag

SEQ ID NO: 1147217 - RNA, 19 nt, Artificial Sequence
  Description of Artificial Sequence: Synthetic oligonucleotide
agcucaacgcaguguccac

SEQ ID NO: 1147218 - RNA, 19 nt, Artificial Sequence
  Description of Artificial Sequence: Synthetic oligonucleotide
aggguguuagagugcagga

SEQ ID NO: 1147219 - RNA, 19 nt, Artificial Sequence
  Description of Artificial Sequence: Synthetic oligonucleotide
ugcgggcugagauacccca

SEQ ID NO: 1147220 - RNA, 19 nt, Artificial Sequence
  Description of Artificial Sequence: Synthetic oligonucleotide
uuauugcucagcuccccau

SEQ ID NO: 1147221 - RNA, 19 nt, Artificial Sequence
  Description of Artificial Sequence: Synthetic oligonucleotide
caucaugaagggccacucc

SEQ ID NO: 1147222 - RNA, 19 nt, Artificial Sequence
  Description of Artificial Sequence: Synthetic oligonucleotide
uaccccaugguaccaucga

SEQ ID NO: 1147223 - RNA, 19 nt, Artificial Sequence
  Description of Artificial Sequence: Synthetic oligonucleotide
gacacuauuugggcagagc

SEQ ID NO: 1147224 - RNA, 19 nt, Artificial Sequence
  Description of Artificial Sequence: Synthetic oligonucleotide
agucggagacucugcauga

SEQ ID NO: 1147225 - RNA, 19 nt, Artificial Sequence
  Description of Artificial Sequence: Synthetic oligonucleotide
ugggacgaucucuguggcg

SEQ ID NO: 1147226 - RNA, 19 nt, Artificial Sequence
  Description of Artificial Sequence: Synthetic oligonucleotide
uaucaccaguaucagucuu

SEQ ID NO: 1147227 - RNA, 19 nt, Artificial Sequence
  Description of Artificial Sequence: Synthetic oligonucleotide
caggaaagugaagaaguuc

SEQ ID NO: 1147228 - RNA, 19 nt, Artificial Sequence
  Description of Artificial Sequence: Synthetic oligonucleotide
cugcauggcggucagcuuc

SEQ ID NO: 1147229 - RNA, 19 nt, Artificial Sequence
  Description of Artificial Sequence: Synthetic oligonucleotide
uuggagccuagcagaacac

SEQ ID NO: 1147230 - RNA, 19 nt, Artificial Sequence
  Description of Artificial Sequence: Synthetic oligonucleotide
guuuccaguagugggacga

SEQ ID NO: 1147231 - RNA, 19 nt, Artificial Sequence
  Description of Artificial Sequence: Synthetic oligonucleotide
auguagucggagaaggaga

SEQ ID NO: 1147232 - RNA, 19 nt, Artificial Sequence
  Description of Artificial Sequence: Synthetic oligonucleotide
uguuagagugcaggaggug

SEQ ID NO: 1147233 - RNA, 19 nt, Artificial Sequence
  Description of Artificial Sequence: Synthetic oligonucleotide
accccaugguaccaucgag

SEQ ID NO: 1147234 - RNA, 19 nt, Artificial Sequence
  Description of Artificial Sequence: Synthetic oligonucleotide
uauugcucagcuccccauu

SEQ ID NO: 1147235 - RNA, 19 nt, Artificial Sequence
  Description of Artificial Sequence: Synthetic oligonucleotide
gcaaacaccacgucgcaca

SEQ ID NO: 1147236 - RNA, 19 nt, Artificial Sequence
  Description of Artificial Sequence: Synthetic oligonucleotide
uaccaucgagagcccacag

SEQ ID NO: 1147237 - RNA, 19 nt, Artificial Sequence
  Description of Artificial Sequence: Synthetic oligonucleotide
cagucaaagagugcaaaca

SEQ ID NO: 1147238 - RNA, 19 nt, Artificial Sequence
  Description of Artificial Sequence: Synthetic oligonucleotide
agcugucucugcauggcgg

SEQ ID NO: 1147239 - RNA, 19 nt, Artificial Sequence
  Description of Artificial Sequence: Synthetic oligonucleotide
aaagaacaguggugaggaa

SEQ ID NO: 1147240 - RNA, 19 nt, Artificial Sequence
  Description of Artificial Sequence: Synthetic oligonucleotide
gauaccccaugguaccauc

SEQ ID NO: 1147241 - RNA, 19 nt, Artificial Sequence
  Description of Artificial Sequence: Synthetic oligonucleotide
uugggagcgaaugaugcuu

SEQ ID NO: 1147242 - RNA, 19 nt, Artificial Sequence
  Description of Artificial Sequence: Synthetic oligonucleotide
cagucacugcggaugcucc

SEQ ID NO: 1147243 - RNA, 19 nt, Artificial Sequence
  Description of Artificial Sequence: Synthetic oligonucleotide
ggauccgauucucauacuc

SEQ ID NO: 1147244 - RNA, 19 nt, Artificial Sequence
  Description of Artificial Sequence: Synthetic oligonucleotide
caaauugccucucagugau

SEQ ID NO: 1147245 - RNA, 19 nt, Artificial Sequence
  Description of Artificial Sequence: Synthetic oligonucleotide
caucagucuucguuugguc

SEQ ID NO: 1147246 - RNA, 19 nt, Artificial Sequence
  Description of Artificial Sequence: Synthetic oligonucleotide
cuguugacacaagucggag

SEQ ID NO: 1147247 - RNA, 19 nt, Artificial Sequence
  Description of Artificial Sequence: Synthetic oligonucleotide
agggcggaacacaagccgg

SEQ ID NO: 1147248 - RNA, 19 nt, Artificial Sequence
  Description of Artificial Sequence: Synthetic oligonucleotide
gacgaaacaucccguccga

SEQ ID NO: 1147249 - RNA, 19 nt, Artificial Sequence
  Description of Artificial Sequence: Synthetic oligonucleotide
agucuucccuuuaucacca

SEQ ID NO: 1147250 - RNA, 19 nt, Artificial Sequence
  Description of Artificial Sequence: Synthetic oligonucleotide
gggacgaucucuguggcgc

SEQ ID NO: 1147251 - RNA, 19 nt, Artificial Sequence
  Description of Artificial Sequence: Synthetic oligonucleotide
caucaaagcgcuuuauuau

SEQ ID NO: 1147252 - RNA, 19 nt, Artificial Sequence
  Description of Artificial Sequence: Synthetic oligonucleotide
auaccccaugguaccaucg

SEQ ID NO: 1147253 - RNA, 19 nt, Artificial Sequence
  Description of Artificial Sequence: Synthetic oligonucleotide
auggaucgcacgaaguccu

SEQ ID NO: 1147254 - RNA, 19 nt, Artificial Sequence
  Description of Artificial Sequence: Synthetic oligonucleotide
acuuggagccuagcagaac

SEQ ID NO: 1147255 - RNA, 19 nt, Artificial Sequence
  Description of Artificial Sequence: Synthetic oligonucleotide
augcuuugaaccugcucaa

SEQ ID NO: 1147256 - RNA, 19 nt, Artificial Sequence
  Description of Artificial Sequence: Synthetic oligonucleotide
ugccucucagugauucuuc

SEQ ID NO: 1147257 - RNA, 19 nt, Artificial Sequence
  Description of Artificial Sequence: Synthetic oligonucleotide
aagagaugcuccagccaug

SEQ ID NO: 1147258 - RNA, 19 nt, Artificial Sequence
  Description of Artificial Sequence: Synthetic oligonucleotide
gaacacaagccggacuuga

SEQ ID NO: 1147259 - RNA, 19 nt, Artificial Sequence
  Description of Artificial Sequence: Synthetic oligonucleotide
cccaugguaccaucgagag

SEQ ID NO: 1147260 - RNA, 19 nt, Artificial Sequence
  Description of Artificial Sequence: Synthetic oligonucleotide
uaggcucggauccgauucu

SEQ ID NO: 1147261 - RNA, 19 nt, Artificial Sequence
  Description of Artificial Sequence: Synthetic oligonucleotide
gcaaacuuggagccuagca

SEQ ID NO: 1147262 - RNA, 19 nt, Artificial Sequence
  Description of Artificial Sequence: Synthetic oligonucleotide
uccgauucucauacuccau

SEQ ID NO: 1147263 - RNA, 19 nt, Artificial Sequence
  Description of Artificial Sequence: Synthetic oligonucleotide
acacuacucccagaagcag

SEQ ID NO: 1147264 - RNA, 19 nt, Artificial Sequence
  Description of Artificial Sequence: Synthetic oligonucleotide
cugcacuccgcuguaggcc

SEQ ID NO: 1147265 - RNA, 19 nt, Artificial Sequence
  Description of Artificial Sequence: Synthetic oligonucleotide
cugacggggucugggaagg

SEQ ID NO: 1147266 - RNA, 19 nt, Artificial Sequence
  Description of Artificial Sequence: Synthetic oligonucleotide
aguguccacgucauugaug

SEQ ID NO: 1147267 - RNA, 19 nt, Artificial Sequence
  Description of Artificial Sequence: Synthetic oligonucleotide
auugccucucagugauucu

SEQ ID NO: 1147268 - RNA, 19 nt, Artificial Sequence
  Description of Artificial Sequence: Synthetic oligonucleotide
cagcuaguucugccaaugc

SEQ ID NO: 1147269 - RNA, 19 nt, Artificial Sequence
  Description of Artificial Sequence: Synthetic oligonucleotide
gcagucaaagagugcaaac

SEQ ID NO: 1147270 - RNA, 19 nt, Artificial Sequence
  Description of Artificial Sequence: Synthetic oligonucleotide
caacgcaguguccacguca

SEQ ID NO: 1147271 - RNA, 19 nt, Artificial Sequence
  Description of Artificial Sequence: Synthetic oligonucleotide
auccagaacgcuucuucuu

SEQ ID NO: 1147272 - RNA, 19 nt, Artificial Sequence
  Description of Artificial Sequence: Synthetic oligonucleotide
acucagggaaagccgccca

SEQ ID NO: 1147273 - RNA, 19 nt, Artificial Sequence
  Description of Artificial Sequence: Synthetic oligonucleotide
ugguuggagacuuccucuu

SEQ ID NO: 1147274 - RNA, 19 nt, Artificial Sequence
  Description of Artificial Sequence: Synthetic oligonucleotide
gcguugagacgaaacaucc

SEQ ID NO: 1147275 - RNA, 19 nt, Artificial Sequence
  Description of Artificial Sequence: Synthetic oligonucleotide
guuuggucugugcgggcug

SEQ ID NO: 1147276 - RNA, 19 nt, Artificial Sequence
  Description of Artificial Sequence: Synthetic oligonucleotide
agcaucaugaagggccacu

SEQ ID NO: 1147277 - RNA, 19 nt, Artificial Sequence
  Description of Artificial Sequence: Synthetic oligonucleotide
ugggagcgaaugaugcuuu

SEQ ID NO: 1147278 - RNA, 19 nt, Artificial Sequence
  Description of Artificial Sequence: Synthetic oligonucleotide
uguggcgcaugcccaugcu

SEQ ID NO: 1147279 - RNA, 19 nt, Artificial Sequence
  Description of Artificial Sequence: Synthetic oligonucleotide
ggagccuagcagaacacug

SEQ ID NO: 1147280 - RNA, 19 nt, Artificial Sequence
  Description of Artificial Sequence: Synthetic oligonucleotide
cacuauuugggcagagcaa

SEQ ID NO: 1147281 - RNA, 19 nt, Artificial Sequence
  Description of Artificial Sequence: Synthetic oligonucleotide
ugcaaacaccacgucgcac

SEQ ID NO: 1147282 - RNA, 19 nt, Artificial Sequence
  Description of Artificial Sequence: Synthetic oligonucleotide
acacugacggggucuggga

SEQ ID NO: 1147283 - RNA, 19 nt, Artificial Sequence
  Description of Artificial Sequence: Synthetic oligonucleotide
uggaucgcacgaaguccug

SEQ ID NO: 1147284 - RNA, 19 nt, Artificial Sequence
  Description of Artificial Sequence: Synthetic oligonucleotide
ucgcagucaaagagugcaa

SEQ ID NO: 1147285 - RNA, 19 nt, Artificial Sequence
  Description of Artificial Sequence: Synthetic oligonucleotide
ggggucauaaacacuucug

SEQ ID NO: 1147286 - RNA, 19 nt, Artificial Sequence
  Description of Artificial Sequence: Synthetic oligonucleotide
ucaccaguaucagucuuuu

SEQ ID NO: 1147287 - RNA, 19 nt, Artificial Sequence
  Description of Artificial Sequence: Synthetic oligonucleotide
ucgagagcccacagcuagu

SEQ ID NO: 1147288 - RNA, 19 nt, Artificial Sequence
  Description of Artificial Sequence: Synthetic oligonucleotide
caugguccgagaguuccac

SEQ ID NO: 1147289 - RNA, 19 nt, Artificial Sequence
  Description of Artificial Sequence: Synthetic oligonucleotide
gcugagauaccccauggua

SEQ ID NO: 1147290 - RNA, 19 nt, Artificial Sequence
  Description of Artificial Sequence: Synthetic oligonucleotide
gcaugagacgggugaagcc

SEQ ID NO: 1147291 - RNA, 19 nt, Artificial Sequence
  Description of Artificial Sequence: Synthetic oligonucleotide
uccccauugccgucgcagu

SEQ ID NO: 1147292 - RNA, 19 nt, Artificial Sequence
  Description of Artificial Sequence: Synthetic oligonucleotide
gaaagccaccaucaucagu

SEQ ID NO: 1147293 - RNA, 19 nt, Artificial Sequence
  Description of Artificial Sequence: Synthetic oligonucleotide
uugccugcaugagacgggu

SEQ ID NO: 1147294 - RNA, 19 nt, Artificial Sequence
  Description of Artificial Sequence: Synthetic oligonucleotide
auauacugguccaggccca

SEQ ID NO: 1147295 - RNA, 19 nt, Artificial Sequence
  Description of Artificial Sequence: Synthetic oligonucleotide
gcguucaaacuccagcuuc

SEQ ID NO: 1147296 - RNA, 19 nt, Artificial Sequence
  Description of Artificial Sequence: Synthetic oligonucleotide
uggcggucagcuucuugga

SEQ ID NO: 1147297 - RNA, 19 nt, Artificial Sequence
  Description of Artificial Sequence: Synthetic oligonucleotide
cuccagguucauugauuac

SEQ ID NO: 1147298 - RNA, 19 nt, Artificial Sequence
  Description of Artificial Sequence: Synthetic oligonucleotide
gacccuucccgucuuugaa

SEQ ID NO: 1147299 - RNA, 19 nt, Artificial Sequence
  Description of Artificial Sequence: Synthetic oligonucleotide
cucagggaaagccgcccac

SEQ ID NO: 1147300 - RNA, 19 nt, Artificial Sequence
  Description of Artificial Sequence: Synthetic oligonucleotide
ccaucaaagcgcuuuauua

SEQ ID NO: 1147301 - RNA, 19 nt, Artificial Sequence
  Description of Artificial Sequence: Synthetic oligonucleotide
uugccucucagugauucuu

SEQ ID NO: 1147302 - RNA, 19 nt, Artificial Sequence
  Description of Artificial Sequence: Synthetic oligonucleotide
gguaagacucggucccagc

SEQ ID NO: 1147303 - RNA, 19 nt, Artificial Sequence
  Description of Artificial Sequence: Synthetic oligonucleotide
cacucagggaaagccgccc

SEQ ID NO: 1147304 - RNA, 19 nt, Artificial Sequence
  Description of Artificial Sequence: Synthetic oligonucleotide
gcgcuuuauuauauacugg

SEQ ID NO: 1147305 - RNA, 19 nt, Artificial Sequence
  Description of Artificial Sequence: Synthetic oligonucleotide
aguaggcucggauccgauu

SEQ ID NO: 1147306 - RNA, 19 nt, Artificial Sequence
  Description of Artificial Sequence: Synthetic oligonucleotide
ugguguggaguaggcucgg

SEQ ID NO: 1147307 - RNA, 19 nt, Artificial Sequence
  Description of Artificial Sequence: Synthetic oligonucleotide
cuguggcgcaugcccaugc

SEQ ID NO: 1147308 - RNA, 19 nt, Artificial Sequence
  Description of Artificial Sequence: Synthetic oligonucleotide
gggucauaaacacuucugu

SEQ ID NO: 1147309 - RNA, 19 nt, Artificial Sequence
  Description of Artificial Sequence: Synthetic oligonucleotide
ucaacgcaguguccacguc

SEQ ID NO: 1147310 - RNA, 19 nt, Artificial Sequence
  Description of Artificial Sequence: Synthetic oligonucleotide
cuggaaagucagacccuuc

SEQ ID NO: 1147311 - RNA, 19 nt, Artificial Sequence
  Description of Artificial Sequence: Synthetic oligonucleotide
gcuguaggccagcagcaug

SEQ ID NO: 1147312 - RNA, 19 nt, Artificial Sequence
  Description of Artificial Sequence: Synthetic oligonucleotide
cuuuaucaccaguaucagu

SEQ ID NO: 1147313 - RNA, 19 nt, Artificial Sequence
  Description of Artificial Sequence: Synthetic oligonucleotide
cauacuccaucacuuuucu

SEQ ID NO: 1147314 - RNA, 19 nt, Artificial Sequence
  Description of Artificial Sequence: Synthetic oligonucleotide
cgaaacaucccguccgagc

SEQ ID NO: 1147315 - RNA, 19 nt, Artificial Sequence
  Description of Artificial Sequence: Synthetic oligonucleotide
acgaaguccugugggguca

SEQ ID NO: 1147316 - RNA, 19 nt, Artificial Sequence
  Description of Artificial Sequence: Synthetic oligonucleotide
ucguuuggucugugcgggc

SEQ ID NO: 1147317 - RNA, 19 nt, Artificial Sequence
  Description of Artificial Sequence: Synthetic oligonucleotide
uucuuccauccaccggguc

SEQ ID NO: 1147318 - RNA, 19 nt, Artificial Sequence
  Description of Artificial Sequence: Synthetic oligonucleotide
agcaaagucccaggcaguu

SEQ ID NO: 1147319 - RNA, 19 nt, Artificial Sequence
  Description of Artificial Sequence: Synthetic oligonucleotide
guuauggaucgcacgaagu

SEQ ID NO: 1147320 - RNA, 19 nt, Artificial Sequence
  Description of Artificial Sequence: Synthetic oligonucleotide
ccacuuguugcaucgucac

SEQ ID NO: 1147321 - RNA, 19 nt, Artificial Sequence
  Description of Artificial Sequence: Synthetic oligonucleotide
cugcaugagacgggugaag

SEQ ID NO: 1147322 - RNA, 19 nt, Artificial Sequence
  Description of Artificial Sequence: Synthetic oligonucleotide
ggcguugagacgaaacauc

SEQ ID NO: 1147323 - RNA, 19 nt, Artificial Sequence
  Description of Artificial Sequence: Synthetic oligonucleotide
gucgcacacaugguccgag

SEQ ID NO: 1147324 - RNA, 19 nt, Artificial Sequence
  Description of Artificial Sequence: Synthetic oligonucleotide
acagggcggggacacuacu

SEQ ID NO: 1147325 - RNA, 19 nt, Artificial Sequence
  Description of Artificial Sequence: Synthetic oligonucleotide
augguaccaucgagagccc

SEQ ID NO: 1147326 - RNA, 19 nt, Artificial Sequence
  Description of Artificial Sequence: Synthetic oligonucleotide
ccgagaguuccacuuuugc

SEQ ID NO: 1147327 - RNA, 19 nt, Artificial Sequence
  Description of Artificial Sequence: Synthetic oligonucleotide
ucuguggcgcaugcccaug

SEQ ID NO: 1147328 - RNA, 19 nt, Artificial Sequence
  Description of Artificial Sequence: Synthetic oligonucleotide
augguccgagaguuccacu

SEQ ID NO: 1147329 - RNA, 19 nt, Artificial Sequence
  Description of Artificial Sequence: Synthetic oligonucleotide
ccaaauugccucucaguga

SEQ ID NO: 1147330 - RNA, 19 nt, Artificial Sequence
  Description of Artificial Sequence: Synthetic oligonucleotide
aucaccaguaucagucuuu

SEQ ID NO: 1147331 - RNA, 19 nt, Artificial Sequence
  Description of Artificial Sequence: Synthetic oligonucleotide
augagacgggugaagccca

SEQ ID NO: 1147332 - RNA, 19 nt, Artificial Sequence
  Description of Artificial Sequence: Synthetic oligonucleotide
gagauaccccaugguacca

SEQ ID NO: 1147333 - RNA, 19 nt, Artificial Sequence
  Description of Artificial Sequence: Synthetic oligonucleotide
ccgauucucauacuccauc

SEQ ID NO: 1147334 - RNA, 19 nt, Artificial Sequence
  Description of Artificial Sequence: Synthetic oligonucleotide
cagggcggggacacuacuc

SEQ ID NO: 1147335 - RNA, 19 nt, Artificial Sequence
  Description of Artificial Sequence: Synthetic oligonucleotide
ccuuuaucaccaguaucag

SEQ ID NO: 1147336 - RNA, 19 nt, Artificial Sequence
  Description of Artificial Sequence: Synthetic oligonucleotide
cauggcggucagcuucuug

SEQ ID NO: 1147337 - RNA, 19 nt, Artificial Sequence
  Description of Artificial Sequence: Synthetic oligonucleotide
uuccaguagugggacgauc

SEQ ID NO: 1147338 - RNA, 19 nt, Artificial Sequence
  Description of Artificial Sequence: Synthetic oligonucleotide
ggaaagugaagaaguucuc

SEQ ID NO: 1147339 - RNA, 19 nt, Artificial Sequence
  Description of Artificial Sequence: Synthetic oligonucleotide
uuuccaguagugggacgau

SEQ ID NO: 1147340 - RNA, 19 nt, Artificial Sequence
  Description of Artificial Sequence: Synthetic oligonucleotide
guagucggagaaggagaug

SEQ ID NO: 1147341 - RNA, 19 nt, Artificial Sequence
  Description of Artificial Sequence: Synthetic oligonucleotide
gguaccaucgagagcccac

SEQ ID NO: 1147342 - RNA, 19 nt, Artificial Sequence
  Description of Artificial Sequence: Synthetic oligonucleotide
uggguaagacucgguccca

SEQ ID NO: 1147343 - RNA, 19 nt, Artificial Sequence
  Description of Artificial Sequence: Synthetic oligonucleotide
ccgucgcagucaaagagug

SEQ ID NO: 1147344 - RNA, 19 nt, Artificial Sequence
  Description of Artificial Sequence: Synthetic oligonucleotide
ugguaccaucgagagccca

SEQ ID NO: 1147345 - RNA, 19 nt, Artificial Sequence
  Description of Artificial Sequence: Synthetic oligonucleotide
ugagacgggugaagcccau

SEQ ID NO: 1147346 - RNA, 19 nt, Artificial Sequence
  Description of Artificial Sequence: Synthetic oligonucleotide
gcucaacgcaguguccacg

SEQ ID NO: 1147347 - RNA, 19 nt, Artificial Sequence
  Description of Artificial Sequence: Synthetic oligonucleotide
aggcucggauccgauucuc

SEQ ID NO: 1147348 - RNA, 19 nt, Artificial Sequence
  Description of Artificial Sequence: Synthetic oligonucleotide
gugcaaacaccacgucgca

SEQ ID NO: 1147349 - RNA, 19 nt, Artificial Sequence
  Description of Artificial Sequence: Synthetic oligonucleotide
gccacucagggaaagccgc

SEQ ID NO: 1147350 - RNA, 19 nt, Artificial Sequence
  Description of Artificial Sequence: Synthetic oligonucleotide
guaccaucgagagcccaca

SEQ ID NO: 1147351 - RNA, 19 nt, Artificial Sequence
  Description of Artificial Sequence: Synthetic oligonucleotide
acacaugguccgagaguuc

SEQ ID NO: 1147352 - RNA, 19 nt, Artificial Sequence
  Description of Artificial Sequence: Synthetic oligonucleotide
agguggcaaaauaucggaa

SEQ ID NO: 1147353 - RNA, 19 nt, Artificial Sequence
  Description of Artificial Sequence: Synthetic oligonucleotide
cccaugcugguuugggagc

SEQ ID NO: 1147354 - RNA, 19 nt, Artificial Sequence
  Description of Artificial Sequence: Synthetic oligonucleotide
agauaccccaugguaccau

SEQ ID NO: 1147355 - RNA, 19 nt, Artificial Sequence
  Description of Artificial Sequence: Synthetic oligonucleotide
gcuguugacacaagucgga

SEQ ID NO: 1147356 - RNA, 19 nt, Artificial Sequence
  Description of Artificial Sequence: Synthetic oligonucleotide
aagccggacuugagggugu

SEQ ID NO: 1147357 - RNA, 19 nt, Artificial Sequence
  Description of Artificial Sequence: Synthetic oligonucleotide
gucacugcggaugcuccca

SEQ ID NO: 1147358 - RNA, 19 nt, Artificial Sequence
  Description of Artificial Sequence: Synthetic oligonucleotide
gccuagcagaacacugacg

SEQ ID NO: 1147359 - RNA, 19 nt, Artificial Sequence
  Description of Artificial Sequence: Synthetic oligonucleotide
cuucuucuucuucucuucu

SEQ ID NO: 1147360 - RNA, 19 nt, Artificial Sequence
  Description of Artificial Sequence: Synthetic oligonucleotide
acgaucucuguggcgcaug

SEQ ID NO: 1147361 - RNA, 19 nt, Artificial Sequence
  Description of Artificial Sequence: Synthetic oligonucleotide
uccaccgggucauggcguu

SEQ ID NO: 1147362 - RNA, 19 nt, Artificial Sequence
  Description of Artificial Sequence: Synthetic oligonucleotide
cacacaugguccgagaguu

SEQ ID NO: 1147363 - RNA, 19 nt, Artificial Sequence
  Description of Artificial Sequence: Synthetic oligonucleotide
gacagggcggggacacuac

SEQ ID NO: 1147364 - RNA, 19 nt, Artificial Sequence
  Description of Artificial Sequence: Synthetic oligonucleotide
cgcacgaaguccugugggg

SEQ ID NO: 1147365 - RNA, 19 nt, Artificial Sequence
  Description of Artificial Sequence: Synthetic oligonucleotide
gagacgggugaagcccaug

SEQ ID NO: 1147366 - RNA, 19 nt, Artificial Sequence
  Description of Artificial Sequence: Synthetic oligonucleotide
ccaucgagagcccacagcu

SEQ ID NO: 1147367 - RNA, 19 nt, Artificial Sequence
  Description of Artificial Sequence: Synthetic oligonucleotide
agacucggucccagcaucu

SEQ ID NO: 1147368 - RNA, 19 nt, Artificial Sequence
  Description of Artificial Sequence: Synthetic oligonucleotide
gaaagccgcccaccuccga

SEQ ID NO: 1147369 - RNA, 19 nt, Artificial Sequence
  Description of Artificial Sequence: Synthetic oligonucleotide
aggcggagagggaagccca

SEQ ID NO: 1147370 - RNA, 19 nt, Artificial Sequence
  Description of Artificial Sequence: Synthetic oligonucleotide
guguuagagugcaggaggu

SEQ ID NO: 1147371 - RNA, 19 nt, Artificial Sequence
  Description of Artificial Sequence: Synthetic oligonucleotide
cgauucucauacuccauca

SEQ ID NO: 1147372 - RNA, 19 nt, Artificial Sequence
  Description of Artificial Sequence: Synthetic oligonucleotide
ggaaagccgcccaccuccg

SEQ ID NO: 1147373 - RNA, 19 nt, Artificial Sequence
  Description of Artificial Sequence: Synthetic oligonucleotide
ggaacacaagccggacuug

SEQ ID NO: 1147374 - RNA, 19 nt, Artificial Sequence
  Description of Artificial Sequence: Synthetic oligonucleotide
gggagcgaaugaugcuuug

SEQ ID NO: 1147375 - RNA, 19 nt, Artificial Sequence
  Description of Artificial Sequence: Synthetic oligonucleotide
gcggggacacuacucccag

SEQ ID NO: 1147376 - RNA, 19 nt, Artificial Sequence
  Description of Artificial Sequence: Synthetic oligonucleotide
agcccauguccuugggcuu

SEQ ID NO: 1147377 - RNA, 19 nt, Artificial Sequence
  Description of Artificial Sequence: Synthetic oligonucleotide
ccugggcaauuuucuuucc

SEQ ID NO: 1147378 - RNA, 19 nt, Artificial Sequence
  Description of Artificial Sequence: Synthetic oligonucleotide
ggagcgaaugaugcuuuga

SEQ ID NO: 1147379 - RNA, 19 nt, Artificial Sequence
  Description of Artificial Sequence: Synthetic oligonucleotide
gcugaaguuuacguugaaa

SEQ ID NO: 1147380 - RNA, 19 nt, Artificial Sequence
  Description of Artificial Sequence: Synthetic oligonucleotide
ccaugguaccaucgagagc

SEQ ID NO: 1147381 - RNA, 19 nt, Artificial Sequence
  Description of Artificial Sequence: Synthetic oligonucleotide
auccaccgggucauggcgu

SEQ ID NO: 1147382 - RNA, 19 nt, Artificial Sequence
  Description of Artificial Sequence: Synthetic oligonucleotide
gucugugcgggcugagaua

SEQ ID NO: 1147383 - RNA, 19 nt, Artificial Sequence
  Description of Artificial Sequence: Synthetic oligonucleotide
cugugcgggcugagauacc

SEQ ID NO: 1147384 - RNA, 19 nt, Artificial Sequence
  Description of Artificial Sequence: Synthetic oligonucleotide
ccacucagggaaagccgcc

SEQ ID NO: 1147385 - RNA, 19 nt, Artificial Sequence
  Description of Artificial Sequence: Synthetic oligonucleotide
accacgucgcacacauggu

SEQ ID NO: 1147386 - RNA, 19 nt, Artificial Sequence
  Description of Artificial Sequence: Synthetic oligonucleotide
ggcggucagcuucuuggac

SEQ ID NO: 1147387 - RNA, 19 nt, Artificial Sequence
  Description of Artificial Sequence: Synthetic oligonucleotide
ccacgucgcacacaugguc

SEQ ID NO: 1147388 - RNA, 19 nt, Artificial Sequence
  Description of Artificial Sequence: Synthetic oligonucleotide
ccaugucuacuucuccauc

SEQ ID NO: 1147389 - RNA, 19 nt, Artificial Sequence
  Description of Artificial Sequence: Synthetic oligonucleotide
ggacacuauuugggcagag

SEQ ID NO: 1147390 - RNA, 19 nt, Artificial Sequence
  Description of Artificial Sequence: Synthetic oligonucleotide
cacugacggggucugggaa

SEQ ID NO: 1147391 - RNA, 19 nt, Artificial Sequence
  Description of Artificial Sequence: Synthetic oligonucleotide
cagaacacugacggggucu

SEQ ID NO: 1147392 - RNA, 19 nt, Artificial Sequence
  Description of Artificial Sequence: Synthetic oligonucleotide
guggggucauaaacacuuc

SEQ ID NO: 1147393 - RNA, 19 nt, Artificial Sequence
  Description of Artificial Sequence: Synthetic oligonucleotide
augaugcuuugaaccugcu

SEQ ID NO: 1147394 - RNA, 19 nt, Artificial Sequence
  Description of Artificial Sequence: Synthetic oligonucleotide
gaaagggcguugagacgaa

SEQ ID NO: 1147395 - RNA, 19 nt, Artificial Sequence
  Description of Artificial Sequence: Synthetic oligonucleotide
gcggucagcuucuuggacu

SEQ ID NO: 1147396 - RNA, 19 nt, Artificial Sequence
  Description of Artificial Sequence: Synthetic oligonucleotide
augcugguuugggagcgaa

SEQ ID NO: 1147397 - RNA, 19 nt, Artificial Sequence
  Description of Artificial Sequence: Synthetic oligonucleotide
cccgucuuugaagugcuuc

SEQ ID NO: 1147398 - RNA, 19 nt, Artificial Sequence
  Description of Artificial Sequence: Synthetic oligonucleotide
caucgagagcccacagcua

SEQ ID NO: 1147399 - RNA, 19 nt, Artificial Sequence
  Description of Artificial Sequence: Synthetic oligonucleotide
cgaaugaugcuuugaaccu

SEQ ID NO: 1147400 - RNA, 19 nt, Artificial Sequence
  Description of Artificial Sequence: Synthetic oligonucleotide
cugaauccagaacgcuucu

SEQ ID NO: 1147401 - RNA, 19 nt, Artificial Sequence
  Description of Artificial Sequence: Synthetic oligonucleotide
gggcggggacacuacuccc

SEQ ID NO: 1147402 - RNA, 19 nt, Artificial Sequence
  Description of Artificial Sequence: Synthetic oligonucleotide
cccuuugagaucagcucca

SEQ ID NO: 1147403 - RNA, 19 nt, Artificial Sequence
  Description of Artificial Sequence: Synthetic oligonucleotide
guguggaguaggcucggau

SEQ ID NO: 1147404 - RNA, 19 nt, Artificial Sequence
  Description of Artificial Sequence: Synthetic oligonucleotide
caggcccaaguguucaggu

SEQ ID NO: 1147405 - RNA, 19 nt, Artificial Sequence
  Description of Artificial Sequence: Synthetic oligonucleotide
caagucggagacucugcau

SEQ ID NO: 1147406 - RNA, 19 nt, Artificial Sequence
  Description of Artificial Sequence: Synthetic oligonucleotide
gacacaagucggagacucu

SEQ ID NO: 1147407 - RNA, 19 nt, Artificial Sequence
  Description of Artificial Sequence: Synthetic oligonucleotide
gugcgggcugagauacccc

SEQ ID NO: 1147408 - RNA, 19 nt, Artificial Sequence
  Description of Artificial Sequence: Synthetic oligonucleotide
uggccacuuguugcaucgu

SEQ ID NO: 1147409 - RNA, 19 nt, Artificial Sequence
  Description of Artificial Sequence: Synthetic oligonucleotide
gaguuccacuuuugccacu

SEQ ID NO: 1147410 - RNA, 19 nt, Artificial Sequence
  Description of Artificial Sequence: Synthetic oligonucleotide
gcagaacacugacgggguc

SEQ ID NO: 1147411 - RNA, 19 nt, Artificial Sequence
  Description of Artificial Sequence: Synthetic oligonucleotide
gagcaaagucccaggcagu

SEQ ID NO: 1147412 - RNA, 19 nt, Artificial Sequence
  Description of Artificial Sequence: Synthetic oligonucleotide
gguguagaauauacuuccu

SEQ ID NO: 1147413 - RNA, 19 nt, Artificial Sequence
  Description of Artificial Sequence: Synthetic oligonucleotide
ggagaugagcccacauucu

SEQ ID NO: 1147414 - RNA, 19 nt, Artificial Sequence
  Description of Artificial Sequence: Synthetic oligonucleotide
ggaguaggcucggauccga

SEQ ID NO: 1147415 - RNA, 19 nt, Artificial Sequence
  Description of Artificial Sequence: Synthetic oligonucleotide
caccgggucauggcguuca

SEQ ID NO: 1147416 - RNA, 19 nt, Artificial Sequence
  Description of Artificial Sequence: Synthetic oligonucleotide
guccgagaguuccacuuuu

SEQ ID NO: 1147417 - RNA, 19 nt, Artificial Sequence
  Description of Artificial Sequence: Synthetic oligonucleotide
ccuucccgucuuugaagug

SEQ ID NO: 1147418 - RNA, 19 nt, Artificial Sequence
  Description of Artificial Sequence: Synthetic oligonucleotide
cacuuguugcaucgucacu

SEQ ID NO: 1147419 - RNA, 19 nt, Artificial Sequence
  Description of Artificial Sequence: Synthetic oligonucleotide
ggacgaucucuguggcgca

SEQ ID NO: 1147420 - RNA, 19 nt, Artificial Sequence
  Description of Artificial Sequence: Synthetic oligonucleotide
guagguugugagggcggaa

SEQ ID NO: 1147421 - RNA, 19 nt, Artificial Sequence
  Description of Artificial Sequence: Synthetic oligonucleotide
ggcggggacacuacuccca

SEQ ID NO: 1147422 - RNA, 19 nt, Artificial Sequence
  Description of Artificial Sequence: Synthetic oligonucleotide
cgucgcagucaaagagugc

SEQ ID NO: 1147423 - RNA, 19 nt, Artificial Sequence
  Description of Artificial Sequence: Synthetic oligonucleotide
ccaugugguaaaagcucaa

SEQ ID NO: 1147424 - RNA, 19 nt, Artificial Sequence
  Description of Artificial Sequence: Synthetic oligonucleotide
acaucccguccgagcuccg

SEQ ID NO: 1147425 - RNA, 19 nt, Artificial Sequence
  Description of Artificial Sequence: Synthetic oligonucleotide
ccacagcuaguucugccaa

SEQ ID NO: 1147426 - RNA, 19 nt, Artificial Sequence
  Description of Artificial Sequence: Synthetic oligonucleotide
gggacacuauuugggcaga

SEQ ID NO: 1147427 - RNA, 19 nt, Artificial Sequence
  Description of Artificial Sequence: Synthetic oligonucleotide
gccgcugcuucaugaugga

SEQ ID NO: 1147428 - RNA, 19 nt, Artificial Sequence
  Description of Artificial Sequence: Synthetic oligonucleotide
cagguucauugauuacuuu

SEQ ID NO: 1147429 - RNA, 19 nt, Artificial Sequence
  Description of Artificial Sequence: Synthetic oligonucleotide
cccuucccgucuuugaagu

SEQ ID NO: 1147430 - RNA, 19 nt, Artificial Sequence
  Description of Artificial Sequence: Synthetic oligonucleotide
cucuguggcgcaugcccau

SEQ ID NO: 1147431 - RNA, 19 nt, Artificial Sequence
  Description of Artificial Sequence: Synthetic oligonucleotide
ggcguucaaacuccagcuu

SEQ ID NO: 1147432 - RNA, 19 nt, Artificial Sequence
  Description of Artificial Sequence: Synthetic oligonucleotide
cagucuucguuuggucugu

SEQ ID NO: 1147433 - RNA, 19 nt, Artificial Sequence
  Description of Artificial Sequence: Synthetic oligonucleotide
gcggaacacaagccggacu

SEQ ID NO: 1147434 - RNA, 19 nt, Artificial Sequence
  Description of Artificial Sequence: Synthetic oligonucleotide
gacgaucucuguggcgcau

SEQ ID NO: 1147435 - RNA, 19 nt, Artificial Sequence
  Description of Artificial Sequence: Synthetic oligonucleotide
acgcaguguccacgucauu

SEQ ID NO: 1147436 - RNA, 19 nt, Artificial Sequence
  Description of Artificial Sequence: Synthetic oligonucleotide
gcacgaaguccuguggggu

SEQ ID NO: 1147437 - RNA, 19 nt, Artificial Sequence
  Description of Artificial Sequence: Synthetic oligonucleotide
gguccgagaguuccacuuu

SEQ ID NO: 1147438 - RNA, 19 nt, Artificial Sequence
  Description of Artificial Sequence: Synthetic oligonucleotide
gaguaggcucggauccgau

SEQ ID NO: 1147439 - RNA, 19 nt, Artificial Sequence
  Description of Artificial Sequence: Synthetic oligonucleotide
ggaucgcacgaaguccugu

SEQ ID NO: 1147440 - RNA, 19 nt, Artificial Sequence
  Description of Artificial Sequence: Synthetic oligonucleotide
gguguggaguaggcucgga

SEQ ID NO: 1147441 - RNA, 19 nt, Artificial Sequence
  Description of Artificial Sequence: Synthetic oligonucleotide
cggaacacaagccggacuu

SEQ ID NO: 1147442 - RNA, 19 nt, Artificial Sequence
  Description of Artificial Sequence: Synthetic oligonucleotide
cauugccgucgcagucaaa

SEQ ID NO: 1147443 - RNA, 19 nt, Artificial Sequence
  Description of Artificial Sequence: Synthetic oligonucleotide
agccggacuugaggguguu

SEQ ID NO: 1147444 - RNA, 19 nt, Artificial Sequence
  Description of Artificial Sequence: Synthetic oligonucleotide
ccauugccgucgcagucaa

SEQ ID NO: 1147445 - RNA, 19 nt, Artificial Sequence
  Description of Artificial Sequence: Synthetic oligonucleotide
gggccacuccagggagucc

SEQ ID NO: 1147446 - RNA, 19 nt, Artificial Sequence
  Description of Artificial Sequence: Synthetic oligonucleotide
ccuggaaagucagacccuu

SEQ ID NO: 1147447 - RNA, 19 nt, Artificial Sequence
  Description of Artificial Sequence: Synthetic oligonucleotide
cguuuggucugugcgggcu

SEQ ID NO: 1147448 - RNA, 19 nt, Artificial Sequence
  Description of Artificial Sequence: Synthetic oligonucleotide
ccaccgggucauggcguuc

SEQ ID NO: 1147449 - RNA, 19 nt, Artificial Sequence
  Description of Artificial Sequence: Synthetic oligonucleotide
ccaaugcagaaagggcguu

SEQ ID NO: 1147450 - RNA, 19 nt, Artificial Sequence
  Description of Artificial Sequence: Synthetic oligonucleotide
ccgggucauggcguucaaa

SEQ ID NO: 1147451 - RNA, 19 nt, Artificial Sequence
  Description of Artificial Sequence: Synthetic oligonucleotide
cgucgcacacaugguccga

SEQ ID NO: 1147452 - RNA, 19 nt, Artificial Sequence
  Description of Artificial Sequence: Synthetic oligonucleotide
gcgggcugagauaccccau

SEQ ID NO: 1147453 - RNA, 19 nt, Artificial Sequence
  Description of Artificial Sequence: Synthetic oligonucleotide
cggauccgauucucauacu

SEQ ID NO: 1147454 - RNA, 19 nt, Artificial Sequence
  Description of Artificial Sequence: Synthetic oligonucleotide
auuaguuugaaauuugucu

SEQ ID NO: 1147455 - RNA, 19 nt, Artificial Sequence
  Description of Artificial Sequence: Synthetic oligonucleotide
acuagcgucauccuagucc

SEQ ID NO: 1147456 - RNA, 19 nt, Artificial Sequence
  Description of Artificial Sequence: Synthetic oligonucleotide
ugaggagccauaaucaggg

SEQ ID NO: 1147457 - RNA, 19 nt, Artificial Sequence
  Description of Artificial Sequence: Synthetic oligonucleotide
uguagauucauucucacau

SEQ ID NO: 1147458 - RNA, 19 nt, Artificial Sequence
  Description of Artificial Sequence: Synthetic oligonucleotide
ucuaguugaaggcaggugc

SEQ ID NO: 1147459 - RNA, 19 nt, Artificial Sequence
  Description of Artificial Sequence: Synthetic oligonucleotide
aagaucaaagagugcagcg

SEQ ID NO: 1147460 - RNA, 19 nt, Artificial Sequence
  Description of Artificial Sequence: Synthetic oligonucleotide
aacauaguacucaagauca

SEQ ID NO: 1147461 - RNA, 19 nt, Artificial Sequence
  Description of Artificial Sequence: Synthetic oligonucleotide
uauugucccuguuuaaugg

SEQ ID NO: 1147462 - RNA, 19 nt, Artificial Sequence
  Description of Artificial Sequence: Synthetic oligonucleotide
uuguuuaucagccguacca

SEQ ID NO: 1147463 - RNA, 19 nt, Artificial Sequence
  Description of Artificial Sequence: Synthetic oligonucleotide
uggaccuuaggauugcugg

SEQ ID NO: 1147464 - RNA, 19 nt, Artificial Sequence
  Description of Artificial Sequence: Synthetic oligonucleotide
uagguguugguauugaugu

SEQ ID NO: 1147465 - RNA, 19 nt, Artificial Sequence
  Description of Artificial Sequence: Synthetic oligonucleotide
uuaggauugcuggaaaacg

SEQ ID NO: 1147466 - RNA, 19 nt, Artificial Sequence
  Description of Artificial Sequence: Synthetic oligonucleotide
caucugaugaacauaguac

SEQ ID NO: 1147467 - RNA, 19 nt, Artificial Sequence
  Description of Artificial Sequence: Synthetic oligonucleotide
aagugaagcaggaagucac

SEQ ID NO: 1147468 - RNA, 19 nt, Artificial Sequence
  Description of Artificial Sequence: Synthetic oligonucleotide
aggagccauaaucagggcc

SEQ ID NO: 1147469 - RNA, 19 nt, Artificial Sequence
  Description of Artificial Sequence: Synthetic oligonucleotide
aucugaugaacauaguacu

SEQ ID NO: 1147470 - RNA, 19 nt, Artificial Sequence
  Description of Artificial Sequence: Synthetic oligonucleotide
uggaguuucaccucucuug

SEQ ID NO: 1147471 - RNA, 19 nt, Artificial Sequence
  Description of Artificial Sequence: Synthetic oligonucleotide
uccucaugcgcaaacgcgg

SEQ ID NO: 1147472 - RNA, 19 nt, Artificial Sequence
  Description of Artificial Sequence: Synthetic oligonucleotide
uauuaguuugaaauuuguc

SEQ ID NO: 1147473 - RNA, 19 nt, Artificial Sequence
  Description of Artificial Sequence: Synthetic oligonucleotide
uuauugucccuguuuaaug

SEQ ID NO: 1147474 - RNA, 19 nt, Artificial Sequence
  Description of Artificial Sequence: Synthetic oligonucleotide
uuuaucagccguaccauaa

SEQ ID NO: 1147475 - RNA, 19 nt, Artificial Sequence
  Description of Artificial Sequence: Synthetic oligonucleotide
uaggauugcuggaaaacgc

SEQ ID NO: 1147476 - RNA, 19 nt, Artificial Sequence
  Description of Artificial Sequence: Synthetic oligonucleotide
ugaguuccgacaacugagg

SEQ ID NO: 1147477 - RNA, 19 nt, Artificial Sequence
  Description of Artificial Sequence: Synthetic oligonucleotide
acggccaguaccuuggcac

SEQ ID NO: 1147478 - RNA, 19 nt, Artificial Sequence
  Description of Artificial Sequence: Synthetic oligonucleotide
uugaaggccaccaaaggau

SEQ ID NO: 1147479 - RNA, 19 nt, Artificial Sequence
  Description of Artificial Sequence: Synthetic oligonucleotide
uucucuugcacuagacucc

SEQ ID NO: 1147480 - RNA, 19 nt, Artificial Sequence
  Description of Artificial Sequence: Synthetic oligonucleotide
ugcgcaaacgcggugauag

SEQ ID NO: 1147481 - RNA, 19 nt, Artificial Sequence
  Description of Artificial Sequence: Synthetic oligonucleotide
uuugaauucucugucucug

SEQ ID NO: 1147482 - RNA, 19 nt, Artificial Sequence
  Description of Artificial Sequence: Synthetic oligonucleotide
ugaugucuagccuuuugcc

SEQ ID NO: 1147483 - RNA, 19 nt, Artificial Sequence
  Description of Artificial Sequence: Synthetic oligonucleotide
uaguacucaagaucaaaga

SEQ ID NO: 1147484 - RNA, 19 nt, Artificial Sequence
  Description of Artificial Sequence: Synthetic oligonucleotide
uaaucugcaugucagucuc

SEQ ID NO: 1147485 - RNA, 19 nt, Artificial Sequence
  Description of Artificial Sequence: Synthetic oligonucleotide
gaucaaagagugcagcgac

SEQ ID NO: 1147486 - RNA, 19 nt, Artificial Sequence
  Description of Artificial Sequence: Synthetic oligonucleotide
cugagcauaggggaaaugg

SEQ ID NO: 1147487 - RNA, 19 nt, Artificial Sequence
  Description of Artificial Sequence: Synthetic oligonucleotide
ucuaccuggaccuuaggau

SEQ ID NO: 1147488 - RNA, 19 nt, Artificial Sequence
  Description of Artificial Sequence: Synthetic oligonucleotide
auaguacucaagaucaaag

SEQ ID NO: 1147489 - RNA, 19 nt, Artificial Sequence
  Description of Artificial Sequence: Synthetic oligonucleotide
guuccgacaacugaggcag

SEQ ID NO: 1147490 - RNA, 19 nt, Artificial Sequence
  Description of Artificial Sequence: Synthetic oligonucleotide
ugaacauaguacucaagau

SEQ ID NO: 1147491 - RNA, 19 nt, Artificial Sequence
  Description of Artificial Sequence: Synthetic oligonucleotide
ucaauggggcggaagagcu

SEQ ID NO: 1147492 - RNA, 19 nt, Artificial Sequence
  Description of Artificial Sequence: Synthetic oligonucleotide
auaaucugcaugucagucu

SEQ ID NO: 1147493 - RNA, 19 nt, Artificial Sequence
  Description of Artificial Sequence: Synthetic oligonucleotide
cagaugaagcucaugcccc

SEQ ID NO: 1147494 - RNA, 19 nt, Artificial Sequence
  Description of Artificial Sequence: Synthetic oligonucleotide
ucagccguaccauaaucug

SEQ ID NO: 1147495 - RNA, 19 nt, Artificial Sequence
  Description of Artificial Sequence: Synthetic oligonucleotide
gagcgcaaaauccuuugag

SEQ ID NO: 1147496 - RNA, 19 nt, Artificial Sequence
  Description of Artificial Sequence: Synthetic oligonucleotide
uuggugagcgcaaaauccu

SEQ ID NO: 1147497 - RNA, 19 nt, Artificial Sequence
  Description of Artificial Sequence: Synthetic oligonucleotide
uuuaauggccaagccagug

SEQ ID NO: 1147498 - RNA, 19 nt, Artificial Sequence
  Description of Artificial Sequence: Synthetic oligonucleotide
uuuauugucccuguuuaau

SEQ ID NO: 1147499 - RNA, 19 nt, Artificial Sequence
  Description of Artificial Sequence: Synthetic oligonucleotide
agcgcaaaauccuuugagu

SEQ ID NO: 1147500 - RNA, 19 nt, Artificial Sequence
  Description of Artificial Sequence: Synthetic oligonucleotide
uagcgaucccggcaggugg

SEQ ID NO: 1147501 - RNA, 19 nt, Artificial Sequence
  Description of Artificial Sequence: Synthetic oligonucleotide
gauccucaugcgcaaacgc

SEQ ID NO: 1147502 - RNA, 19 nt, Artificial Sequence
  Description of Artificial Sequence: Synthetic oligonucleotide
ucuguagauucauucucac

SEQ ID NO: 1147503 - RNA, 19 nt, Artificial Sequence
  Description of Artificial Sequence: Synthetic oligonucleotide
agaaagugaagcaggaagu

SEQ ID NO: 1147504 - RNA, 19 nt, Artificial Sequence
  Description of Artificial Sequence: Synthetic oligonucleotide
ugguauugaugucuagccu

SEQ ID NO: 1147505 - RNA, 19 nt, Artificial Sequence
  Description of Artificial Sequence: Synthetic oligonucleotide
ucggcugaaacaccuccag

SEQ ID NO: 1147506 - RNA, 19 nt, Artificial Sequence
  Description of Artificial Sequence: Synthetic oligonucleotide
cacaauuccaggcggcugc

SEQ ID NO: 1147507 - RNA, 19 nt, Artificial Sequence
  Description of Artificial Sequence: Synthetic oligonucleotide
cuuaggauugcuggaaaac

SEQ ID NO: 1147508 - RNA, 19 nt, Artificial Sequence
  Description of Artificial Sequence: Synthetic oligonucleotide
uuguuggaguuucaccucu

SEQ ID NO: 1147509 - RNA, 19 nt, Artificial Sequence
  Description of Artificial Sequence: Synthetic oligonucleotide
aggacgaggagcuucugca

SEQ ID NO: 1147510 - RNA, 19 nt, Artificial Sequence
  Description of Artificial Sequence: Synthetic oligonucleotide
caagaucaaagagugcagc

SEQ ID NO: 1147511 - RNA, 19 nt, Artificial Sequence
  Description of Artificial Sequence: Synthetic oligonucleotide
agggugaccacgcgcacgg

SEQ ID NO: 1147512 - RNA, 19 nt, Artificial Sequence
  Description of Artificial Sequence: Synthetic oligonucleotide
ucucacaugggauccugca

SEQ ID NO: 1147513 - RNA, 19 nt, Artificial Sequence
  Description of Artificial Sequence: Synthetic oligonucleotide
uccggaagugccaggagcu

SEQ ID NO: 1147514 - RNA, 19 nt, Artificial Sequence
  Description of Artificial Sequence: Synthetic oligonucleotide
cauccuaguccacuccugg

SEQ ID NO: 1147515 - RNA, 19 nt, Artificial Sequence
  Description of Artificial Sequence: Synthetic oligonucleotide
aguuccgacaacugaggca

SEQ ID NO: 1147516 - RNA, 19 nt, Artificial Sequence
  Description of Artificial Sequence: Synthetic oligonucleotide
ugugcuguugagcccauua

SEQ ID NO: 1147517 - RNA, 19 nt, Artificial Sequence
  Description of Artificial Sequence: Synthetic oligonucleotide
gauugcuggaaaacgcggc

SEQ ID NO: 1147518 - RNA, 19 nt, Artificial Sequence
  Description of Artificial Sequence: Synthetic oligonucleotide
cauaaucugcaugucaguc

SEQ ID NO: 1147519 - RNA, 19 nt, Artificial Sequence
  Description of Artificial Sequence: Synthetic oligonucleotide
uuuccaccgcagccgaggg

SEQ ID NO: 1147520 - RNA, 19 nt, Artificial Sequence
  Description of Artificial Sequence: Synthetic oligonucleotide
aggauugcuggaaaacgcg

SEQ ID NO: 1147521 - RNA, 19 nt, Artificial Sequence
  Description of Artificial Sequence: Synthetic oligonucleotide
uaccuggaccuuaggauug

SEQ ID NO: 1147522 - RNA, 19 nt, Artificial Sequence
  Description of Artificial Sequence: Synthetic oligonucleotide
uugagcccauuaaucacca

SEQ ID NO: 1147523 - RNA, 19 nt, Artificial Sequence
  Description of Artificial Sequence: Synthetic oligonucleotide
cuguugaacuuguuuauca

SEQ ID NO: 1147524 - RNA, 19 nt, Artificial Sequence
  Description of Artificial Sequence: Synthetic oligonucleotide
aauggcgcagcagggaaca

SEQ ID NO: 1147525 - RNA, 19 nt, Artificial Sequence
  Description of Artificial Sequence: Synthetic oligonucleotide
cuucucccgggcaucaugc

SEQ ID NO: 1147526 - RNA, 19 nt, Artificial Sequence
  Description of Artificial Sequence: Synthetic oligonucleotide
ucgugagucggcugaaaca

SEQ ID NO: 1147527 - RNA, 19 nt, Artificial Sequence
  Description of Artificial Sequence: Synthetic oligonucleotide
uaucagccguaccauaauc

SEQ ID NO: 1147528 - RNA, 19 nt, Artificial Sequence
  Description of Artificial Sequence: Synthetic oligonucleotide
cuuguuuaucagccguacc

SEQ ID NO: 1147529 - RNA, 19 nt, Artificial Sequence
  Description of Artificial Sequence: Synthetic oligonucleotide
ugcuguugagcccauuaau

SEQ ID NO: 1147530 - RNA, 19 nt, Artificial Sequence
  Description of Artificial Sequence: Synthetic oligonucleotide
cuugacgguagcgaucccg

SEQ ID NO: 1147531 - RNA, 19 nt, Artificial Sequence
  Description of Artificial Sequence: Synthetic oligonucleotide
uaaucaccacuugaaggcc

SEQ ID NO: 1147532 - RNA, 19 nt, Artificial Sequence
  Description of Artificial Sequence: Synthetic oligonucleotide
cugugcauuauccaucuga

SEQ ID NO: 1147533 - RNA, 19 nt, Artificial Sequence
  Description of Artificial Sequence: Synthetic oligonucleotide
cacuagacuccugaggacc

SEQ ID NO: 1147534 - RNA, 19 nt, Artificial Sequence
  Description of Artificial Sequence: Synthetic oligonucleotide
acgguagcgaucccggcag

SEQ ID NO: 1147535 - RNA, 19 nt, Artificial Sequence
  Description of Artificial Sequence: Synthetic oligonucleotide
ugagcgcaaaauccuuuga

SEQ ID NO: 1147536 - RNA, 19 nt, Artificial Sequence
  Description of Artificial Sequence: Synthetic oligonucleotide
agaucaaagagugcagcga

SEQ ID NO: 1147537 - RNA, 19 nt, Artificial Sequence
  Description of Artificial Sequence: Synthetic oligonucleotide
caaccagauccucaugcgc

SEQ ID NO: 1147538 - RNA, 19 nt, Artificial Sequence
  Description of Artificial Sequence: Synthetic oligonucleotide
ucauccuaguccacuccug

SEQ ID NO: 1147539 - RNA, 19 nt, Artificial Sequence
  Description of Artificial Sequence: Synthetic oligonucleotide
gaguuccgacaacugaggc

SEQ ID NO: 1147540 - RNA, 19 nt, Artificial Sequence
  Description of Artificial Sequence: Synthetic oligonucleotide
augucuagccuuuugccuu

SEQ ID NO: 1147541 - RNA, 19 nt, Artificial Sequence
  Description of Artificial Sequence: Synthetic oligonucleotide
ugacggccccugaagagcc

SEQ ID NO: 1147542 - RNA, 19 nt, Artificial Sequence
  Description of Artificial Sequence: Synthetic oligonucleotide
uuaucagccguaccauaau

SEQ ID NO: 1147543 - RNA, 19 nt, Artificial Sequence
  Description of Artificial Sequence: Synthetic oligonucleotide
aguucccggaaguagcccu

SEQ ID NO: 1147544 - RNA, 19 nt, Artificial Sequence
  Description of Artificial Sequence: Synthetic oligonucleotide
gaugucuagccuuuugccu

SEQ ID NO: 1147545 - RNA, 19 nt, Artificial Sequence
  Description of Artificial Sequence: Synthetic oligonucleotide
gauguguagguguugguau

SEQ ID NO: 1147546 - RNA, 19 nt, Artificial Sequence
  Description of Artificial Sequence: Synthetic oligonucleotide
auccucaugcgcaaacgcg

SEQ ID NO: 1147547 - RNA, 19 nt, Artificial Sequence
  Description of Artificial Sequence: Synthetic oligonucleotide
cuuguuggaguuucaccuc

SEQ ID NO: 1147548 - RNA, 19 nt, Artificial Sequence
  Description of Artificial Sequence: Synthetic oligonucleotide
ucaugcgcaaacgcgguga

SEQ ID NO: 1147549 - RNA, 19 nt, Artificial Sequence
  Description of Artificial Sequence: Synthetic oligonucleotide
cagccguaccauaaucugc

SEQ ID NO: 1147550 - RNA, 19 nt, Artificial Sequence
  Description of Artificial Sequence: Synthetic oligonucleotide
gugagcgcaaaauccuuug

SEQ ID NO: 1147551 - RNA, 19 nt, Artificial Sequence
  Description of Artificial Sequence: Synthetic oligonucleotide
gaggacgaggagcuucugc

SEQ ID NO: 1147552 - RNA, 19 nt, Artificial Sequence
  Description of Artificial Sequence: Synthetic oligonucleotide
uccuugaauuuggccagcg

SEQ ID NO: 1147553 - RNA, 19 nt, Artificial Sequence
  Description of Artificial Sequence: Synthetic oligonucleotide
guucccgcaagcccgggag

SEQ ID NO: 1147554 - RNA, 19 nt, Artificial Sequence
  Description of Artificial Sequence: Synthetic oligonucleotide
uucggcuuuccaccgcagc

SEQ ID NO: 1147555 - RNA, 19 nt, Artificial Sequence
  Description of Artificial Sequence: Synthetic oligonucleotide
uucucacaugggauccugc

SEQ ID NO: 1147556 - RNA, 19 nt, Artificial Sequence
  Description of Artificial Sequence: Synthetic oligonucleotide
cugccuugccugcucaucc

SEQ ID NO: 1147557 - RNA, 19 nt, Artificial Sequence
  Description of Artificial Sequence: Synthetic oligonucleotide
agcgaccuucucuucuagg

SEQ ID NO: 1147558 - RNA, 19 nt, Artificial Sequence
  Description of Artificial Sequence: Synthetic oligonucleotide
auuauccaucugaugaaca

SEQ ID NO: 1147559 - RNA, 19 nt, Artificial Sequence
  Description of Artificial Sequence: Synthetic oligonucleotide
auucauucucacaugggau

SEQ ID NO: 1147560 - RNA, 19 nt, Artificial Sequence
  Description of Artificial Sequence: Synthetic oligonucleotide
gcaaccagauccucaugcg

SEQ ID NO: 1147561 - RNA, 19 nt, Artificial Sequence
  Description of Artificial Sequence: Synthetic oligonucleotide
agcccuguucccgcaagcc

SEQ ID NO: 1147562 - RNA, 19 nt, Artificial Sequence
  Description of Artificial Sequence: Synthetic oligonucleotide
uaguccacuccuggugucg

SEQ ID NO: 1147563 - RNA, 19 nt, Artificial Sequence
  Description of Artificial Sequence: Synthetic oligonucleotide
gaagagucugccacucgug

SEQ ID NO: 1147564 - RNA, 19 nt, Artificial Sequence
  Description of Artificial Sequence: Synthetic oligonucleotide
cuuucauauuaguuugaaa

SEQ ID NO: 1147565 - RNA, 19 nt, Artificial Sequence
  Description of Artificial Sequence: Synthetic oligonucleotide
cucgugagucggcugaaac

SEQ ID NO: 1147566 - RNA, 19 nt, Artificial Sequence
  Description of Artificial Sequence: Synthetic oligonucleotide
cauccuuugaauucucugu

SEQ ID NO: 1147567 - RNA, 19 nt, Artificial Sequence
  Description of Artificial Sequence: Synthetic oligonucleotide
gacgguagcgaucccggca

SEQ ID NO: 1147568 - RNA, 19 nt, Artificial Sequence
  Description of Artificial Sequence: Synthetic oligonucleotide
aucagccguaccauaaucu

SEQ ID NO: 1147569 - RNA, 19 nt, Artificial Sequence
  Description of Artificial Sequence: Synthetic oligonucleotide
uaggggaaauggcgcagca

SEQ ID NO: 1147570 - RNA, 19 nt, Artificial Sequence
  Description of Artificial Sequence: Synthetic oligonucleotide
uagaggagccacucuaguu

SEQ ID NO: 1147571 - RNA, 19 nt, Artificial Sequence
  Description of Artificial Sequence: Synthetic oligonucleotide
agccguaccauaaucugca

SEQ ID NO: 1147572 - RNA, 19 nt, Artificial Sequence
  Description of Artificial Sequence: Synthetic oligonucleotide
gcgaccuucucuucuaggc

SEQ ID NO: 1147573 - RNA, 19 nt, Artificial Sequence
  Description of Artificial Sequence: Synthetic oligonucleotide
gaucccggcagguggccag

SEQ ID NO: 1147574 - RNA, 19 nt, Artificial Sequence
  Description of Artificial Sequence: Synthetic oligonucleotide
ugccuaguguccugcugag

SEQ ID NO: 1147575 - RNA, 19 nt, Artificial Sequence
  Description of Artificial Sequence: Synthetic oligonucleotide
ggauugcuggaaaacgcgg

SEQ ID NO: 1147576 - RNA, 19 nt, Artificial Sequence
  Description of Artificial Sequence: Synthetic oligonucleotide
caucaugcuccggaagugc

SEQ ID NO: 1147577 - RNA, 19 nt, Artificial Sequence
  Description of Artificial Sequence: Synthetic oligonucleotide
acugccuaguguccugcug

SEQ ID NO: 1147578 - RNA, 19 nt, Artificial Sequence
  Description of Artificial Sequence: Synthetic oligonucleotide
agucugccacucgugaguc

SEQ ID NO: 1147579 - RNA, 19 nt, Artificial Sequence
  Description of Artificial Sequence: Synthetic oligonucleotide
uuggaguuucaccucucuu

SEQ ID NO: 1147580 - RNA, 19 nt, Artificial Sequence
  Description of Artificial Sequence: Synthetic oligonucleotide
cagcaguccuagaggagcc

SEQ ID NO: 1147581 - RNA, 19 nt, Artificial Sequence
  Description of Artificial Sequence: Synthetic oligonucleotide
ugucggcagccucaucuga

SEQ ID NO: 1147582 - RNA, 19 nt, Artificial Sequence
  Description of Artificial Sequence: Synthetic oligonucleotide
uucccgcaagcccgggagg

SEQ ID NO: 1147583 - RNA, 19 nt, Artificial Sequence
  Description of Artificial Sequence: Synthetic oligonucleotide
aucaccacuugaaggccac

SEQ ID NO: 1147584 - RNA, 19 nt, Artificial Sequence
  Description of Artificial Sequence: Synthetic oligonucleotide
cuaguguccugcugagcug

SEQ ID NO: 1147585 - RNA, 19 nt, Artificial Sequence
  Description of Artificial Sequence: Synthetic oligonucleotide
agauguguagguguuggua

SEQ ID NO: 1147586 - RNA, 19 nt, Artificial Sequence
  Description of Artificial Sequence: Synthetic oligonucleotide
agggaaacccucccuccug

SEQ ID NO: 1147587 - RNA, 19 nt, Artificial Sequence
  Description of Artificial Sequence: Synthetic oligonucleotide
gaggucuugacgguagcga

SEQ ID NO: 1147588 - RNA, 19 nt, Artificial Sequence
  Description of Artificial Sequence: Synthetic oligonucleotide
cuggaccuuaggauugcug

SEQ ID NO: 1147589 - RNA, 19 nt, Artificial Sequence
  Description of Artificial Sequence: Synthetic oligonucleotide
gugcauuauccaucugaug

SEQ ID NO: 1147590 - RNA, 19 nt, Artificial Sequence
  Description of Artificial Sequence: Synthetic oligonucleotide
cagauccucaugcgcaaac

SEQ ID NO: 1147591 - RNA, 19 nt, Artificial Sequence
  Description of Artificial Sequence: Synthetic oligonucleotide
cugacggccccugaagagc

SEQ ID NO: 1147592 - RNA, 19 nt, Artificial Sequence
  Description of Artificial Sequence: Synthetic oligonucleotide
ucacuagcgucauccuagu

SEQ ID NO: 1147593 - RNA, 19 nt, Artificial Sequence
  Description of Artificial Sequence: Synthetic oligonucleotide
cacgcgcacggccaguacc

SEQ ID NO: 1147594 - RNA, 19 nt, Artificial Sequence
  Description of Artificial Sequence: Synthetic oligonucleotide
cucuaguugaaggcaggug

SEQ ID NO: 1147595 - RNA, 19 nt, Artificial Sequence
  Description of Artificial Sequence: Synthetic oligonucleotide
cauaguacucaagaucaaa

SEQ ID NO: 1147596 - RNA, 19 nt, Artificial Sequence
  Description of Artificial Sequence: Synthetic oligonucleotide
gggaaacccucccuccugg

SEQ ID NO: 1147597 - RNA, 19 nt, Artificial Sequence
  Description of Artificial Sequence: Synthetic oligonucleotide
agcagggugaccacgcgca

SEQ ID NO: 1147598 - RNA, 19 nt, Artificial Sequence
  Description of Artificial Sequence: Synthetic oligonucleotide
gcaaacgcggugauagcgg

SEQ ID NO: 1147599 - RNA, 19 nt, Artificial Sequence
  Description of Artificial Sequence: Synthetic oligonucleotide
cccuguucccgcaagcccg

SEQ ID NO: 1147600 - RNA, 19 nt, Artificial Sequence
  Description of Artificial Sequence: Synthetic oligonucleotide
accuuaggauugcuggaaa

SEQ ID NO: 1147601 - RNA, 19 nt, Artificial Sequence
  Description of Artificial Sequence: Synthetic oligonucleotide
ucggcagccucaucugagu

SEQ ID NO: 1147602 - RNA, 19 nt, Artificial Sequence
  Description of Artificial Sequence: Synthetic oligonucleotide
auguguagguguugguauu

SEQ ID NO: 1147603 - RNA, 19 nt, Artificial Sequence
  Description of Artificial Sequence: Synthetic oligonucleotide
uggugagcgcaaaauccuu

SEQ ID NO: 1147604 - RNA, 19 nt, Artificial Sequence
  Description of Artificial Sequence: Synthetic oligonucleotide
ugaccacgcgcacggccag

SEQ ID NO: 1147605 - RNA, 19 nt, Artificial Sequence
  Description of Artificial Sequence: Synthetic oligonucleotide
gguauugaugucuagccuu

SEQ ID NO: 1147606 - RNA, 19 nt, Artificial Sequence
  Description of Artificial Sequence: Synthetic oligonucleotide
gcuguugagcccauuaauc

SEQ ID NO: 1147607 - RNA, 19 nt, Artificial Sequence
  Description of Artificial Sequence: Synthetic oligonucleotide
agcccauuaaucaccacuu

SEQ ID NO: 1147608 - RNA, 19 nt, Artificial Sequence
  Description of Artificial Sequence: Synthetic oligonucleotide
gagucugccacucgugagu

SEQ ID NO: 1147609 - RNA, 19 nt, Artificial Sequence
  Description of Artificial Sequence: Synthetic oligonucleotide
cccuucaauggcuucuacc

SEQ ID NO: 1147610 - RNA, 19 nt, Artificial Sequence
  Description of Artificial Sequence: Synthetic oligonucleotide
ugacgguagcgaucccggc

SEQ ID NO: 1147611 - RNA, 19 nt, Artificial Sequence
  Description of Artificial Sequence: Synthetic oligonucleotide
guuuaucagccguaccaua

SEQ ID NO: 1147612 - RNA, 19 nt, Artificial Sequence
  Description of Artificial Sequence: Synthetic oligonucleotide
gaccuuaggauugcuggaa

SEQ ID NO: 1147613 - RNA, 19 nt, Artificial Sequence
  Description of Artificial Sequence: Synthetic oligonucleotide
accagauccucaugcgcaa

SEQ ID NO: 1147614 - RNA, 19 nt, Artificial Sequence
  Description of Artificial Sequence: Synthetic oligonucleotide
ugucuagccuuuugccuuu

SEQ ID NO: 1147615 - RNA, 19 nt, Artificial Sequence
  Description of Artificial Sequence: Synthetic oligonucleotide
gggaaauggcgcagcaggg

SEQ ID NO: 1147616 - RNA, 19 nt, Artificial Sequence
  Description of Artificial Sequence: Synthetic oligonucleotide
cuaguugaaggcaggugcu

SEQ ID NO: 1147617 - RNA, 19 nt, Artificial Sequence
  Description of Artificial Sequence: Synthetic oligonucleotide
cuaguccacuccugguguc

SEQ ID NO: 1147618 - RNA, 19 nt, Artificial Sequence
  Description of Artificial Sequence: Synthetic oligonucleotide
uccgacaacugaggcagaa

SEQ ID NO: 1147619 - RNA, 19 nt, Artificial Sequence
  Description of Artificial Sequence: Synthetic oligonucleotide
ggaggucuugacgguagcg

SEQ ID NO: 1147620 - RNA, 19 nt, Artificial Sequence
  Description of Artificial Sequence: Synthetic oligonucleotide
ccaagcucucacuagcguc

SEQ ID NO: 1147621 - RNA, 19 nt, Artificial Sequence
  Description of Artificial Sequence: Synthetic oligonucleotide
cucccuccuugaauuuggc

SEQ ID NO: 1147622 - RNA, 19 nt, Artificial Sequence
  Description of Artificial Sequence: Synthetic oligonucleotide
gauagcagguccugugcau

SEQ ID NO: 1147623 - RNA, 19 nt, Artificial Sequence
  Description of Artificial Sequence: Synthetic oligonucleotide
aggccagugccugguacuc

SEQ ID NO: 1147624 - RNA, 19 nt, Artificial Sequence
  Description of Artificial Sequence: Synthetic oligonucleotide
caccaaaggauagcagguc

SEQ ID NO: 1147625 - RNA, 19 nt, Artificial Sequence
  Description of Artificial Sequence: Synthetic oligonucleotide
acgcggugauagcggcugc

SEQ ID NO: 1147626 - RNA, 19 nt, Artificial Sequence
  Description of Artificial Sequence: Synthetic oligonucleotide
caauggggcggaagagcug

SEQ ID NO: 1147627 - RNA, 19 nt, Artificial Sequence
  Description of Artificial Sequence: Synthetic oligonucleotide
guagcgaucccggcaggug

SEQ ID NO: 1147628 - RNA, 19 nt, Artificial Sequence
  Description of Artificial Sequence: Synthetic oligonucleotide
caugccccagcagggaaac

SEQ ID NO: 1147629 - RNA, 19 nt, Artificial Sequence
  Description of Artificial Sequence: Synthetic oligonucleotide
cucaugcgcaaacgcggug

SEQ ID NO: 1147630 - RNA, 19 nt, Artificial Sequence
  Description of Artificial Sequence: Synthetic oligonucleotide
cguaccauaaucugcaugu

SEQ ID NO: 1147631 - RNA, 19 nt, Artificial Sequence
  Description of Artificial Sequence: Synthetic oligonucleotide
ucuugacgguagcgauccc

SEQ ID NO: 1147632 - RNA, 19 nt, Artificial Sequence
  Description of Artificial Sequence: Synthetic oligonucleotide
cagggugaccacgcgcacg

SEQ ID NO: 1147633 - RNA, 19 nt, Artificial Sequence
  Description of Artificial Sequence: Synthetic oligonucleotide
gcucccuccuugaauuugg

SEQ ID NO: 1147634 - RNA, 19 nt, Artificial Sequence
  Description of Artificial Sequence: Synthetic oligonucleotide
aacccaagcagcaguccua

SEQ ID NO: 1147635 - RNA, 19 nt, Artificial Sequence
  Description of Artificial Sequence: Synthetic oligonucleotide
gucugccacucgugagucg

SEQ ID NO: 1147636 - RNA, 19 nt, Artificial Sequence
  Description of Artificial Sequence: Synthetic oligonucleotide
cccauuaaucaccacuuga

SEQ ID NO: 1147637 - RNA, 19 nt, Artificial Sequence
  Description of Artificial Sequence: Synthetic oligonucleotide
ugagcccauuaaucaccac

SEQ ID NO: 1147638 - RNA, 19 nt, Artificial Sequence
  Description of Artificial Sequence: Synthetic oligonucleotide
gucauccuaguccacuccu

SEQ ID NO: 1147639 - RNA, 19 nt, Artificial Sequence
  Description of Artificial Sequence: Synthetic oligonucleotide
cuucggcuuuccaccgcag

SEQ ID NO: 1147640 - RNA, 19 nt, Artificial Sequence
  Description of Artificial Sequence: Synthetic oligonucleotide
ucccgcaagcccgggagga

SEQ ID NO: 1147641 - RNA, 19 nt, Artificial Sequence
  Description of Artificial Sequence: Synthetic oligonucleotide
cuaccuggaccuuaggauu

SEQ ID NO: 1147642 - RNA, 19 nt, Artificial Sequence
  Description of Artificial Sequence: Synthetic oligonucleotide
ggaccuuaggauugcugga

SEQ ID NO: 1147643 - RNA, 19 nt, Artificial Sequence
  Description of Artificial Sequence: Synthetic oligonucleotide
gcuucuaccuggaccuuag

SEQ ID NO: 1147644 - RNA, 19 nt, Artificial Sequence
  Description of Artificial Sequence: Synthetic oligonucleotide
ggagccauaaucagggccu

SEQ ID NO: 1147645 - RNA, 19 nt, Artificial Sequence
  Description of Artificial Sequence: Synthetic oligonucleotide
guuggaguuucaccucucu

SEQ ID NO: 1147646 - RNA, 19 nt, Artificial Sequence
  Description of Artificial Sequence: Synthetic oligonucleotide
guaccauaaucugcauguc

SEQ ID NO: 1147647 - RNA, 19 nt, Artificial Sequence
  Description of Artificial Sequence: Synthetic oligonucleotide
ugccacucgugagucggcu

SEQ ID NO: 1147648 - RNA, 19 nt, Artificial Sequence
  Description of Artificial Sequence: Synthetic oligonucleotide
gugagucggcugaaacacc

SEQ ID NO: 1147649 - RNA, 19 nt, Artificial Sequence
  Description of Artificial Sequence: Synthetic oligonucleotide
uauugaugucuagccuuuu

SEQ ID NO: 1147650 - RNA, 19 nt, Artificial Sequence
  Description of Artificial Sequence: Synthetic oligonucleotide
cagcgaccuucucuucuag

SEQ ID NO: 1147651 - RNA, 19 nt, Artificial Sequence
  Description of Artificial Sequence: Synthetic oligonucleotide
agccgaggggcagacacaa

SEQ ID NO: 1147652 - RNA, 19 nt, Artificial Sequence
  Description of Artificial Sequence: Synthetic oligonucleotide
cuugcuccagucuguagau

SEQ ID NO: 1147653 - RNA, 19 nt, Artificial Sequence
  Description of Artificial Sequence: Synthetic oligonucleotide
gggcaucaugcuccggaag

SEQ ID NO: 1147654 - RNA, 19 nt, Artificial Sequence
  Description of Artificial Sequence: Synthetic oligonucleotide
cgcaaacgcggugauagcg

SEQ ID NO: 1147655 - RNA, 19 nt, Artificial Sequence
  Description of Artificial Sequence: Synthetic oligonucleotide
cagcccuguucccgcaagc

SEQ ID NO: 1147656 - RNA, 19 nt, Artificial Sequence
  Description of Artificial Sequence: Synthetic oligonucleotide
gcccauuaaucaccacuug

SEQ ID NO: 1147657 - RNA, 19 nt, Artificial Sequence
  Description of Artificial Sequence: Synthetic oligonucleotide
uuccgacaacugaggcaga

SEQ ID NO: 1147658 - RNA, 19 nt, Artificial Sequence
  Description of Artificial Sequence: Synthetic oligonucleotide
ggaaauggcgcagcaggga

SEQ ID NO: 1147659 - RNA, 19 nt, Artificial Sequence
  Description of Artificial Sequence: Synthetic oligonucleotide
cugccacucgugagucggc

SEQ ID NO: 1147660 - RNA, 19 nt, Artificial Sequence
  Description of Artificial Sequence: Synthetic oligonucleotide
ccacccaagcucucacuag

SEQ ID NO: 1147661 - RNA, 19 nt, Artificial Sequence
  Description of Artificial Sequence: Synthetic oligonucleotide
ccguaccauaaucugcaug

SEQ ID NO: 1147662 - RNA, 19 nt, Artificial Sequence
  Description of Artificial Sequence: Synthetic oligonucleotide
gcaucaugcuccggaagug

SEQ ID NO: 1147663 - RNA, 19 nt, Artificial Sequence
  Description of Artificial Sequence: Synthetic oligonucleotide
cuagaggagccacucuagu

SEQ ID NO: 1147664 - RNA, 19 nt, Artificial Sequence
  Description of Artificial Sequence: Synthetic oligonucleotide
gucggcugaaacaccucca

SEQ ID NO: 1147665 - RNA, 19 nt, Artificial Sequence
  Description of Artificial Sequence: Synthetic oligonucleotide
gcacuagacuccugaggac

SEQ ID NO: 1147666 - RNA, 19 nt, Artificial Sequence
  Description of Artificial Sequence: Synthetic oligonucleotide
gcccuguucccgcaagccc

SEQ ID NO: 1147667 - RNA, 19 nt, Artificial Sequence
  Description of Artificial Sequence: Synthetic oligonucleotide
gcgcaaaauccuuugaguu

SEQ ID NO: 1147668 - RNA, 19 nt, Artificial Sequence
  Description of Artificial Sequence: Synthetic oligonucleotide
ggcgcugagaggcugcucu

SEQ ID NO: 1147669 - RNA, 19 nt, Artificial Sequence
  Description of Artificial Sequence: Synthetic oligonucleotide
ggucguagagcagggugac

SEQ ID NO: 1147670 - RNA, 19 nt, Artificial Sequence
  Description of Artificial Sequence: Synthetic oligonucleotide
cacuagcgucauccuaguc

SEQ ID NO: 1147671 - RNA, 19 nt, Artificial Sequence
  Description of Artificial Sequence: Synthetic oligonucleotide
caauuccaggcggcugcag

SEQ ID NO: 1147672 - RNA, 19 nt, Artificial Sequence
  Description of Artificial Sequence: Synthetic oligonucleotide
acgcgcacggccaguaccu

SEQ ID NO: 1147673 - RNA, 19 nt, Artificial Sequence
  Description of Artificial Sequence: Synthetic oligonucleotide
guauugaugucuagccuuu

SEQ ID NO: 1147674 - RNA, 19 nt, Artificial Sequence
  Description of Artificial Sequence: Synthetic oligonucleotide
agcgcauccuugagguccu

SEQ ID NO: 1147675 - RNA, 19 nt, Artificial Sequence
  Description of Artificial Sequence: Synthetic oligonucleotide
ggcagugaucucacaccag

SEQ ID NO: 1147676 - RNA, 19 nt, Artificial Sequence
  Description of Artificial Sequence: Synthetic oligonucleotide
gccugaccuggcugaagag

SEQ ID NO: 1147677 - RNA, 19 nt, Artificial Sequence
  Description of Artificial Sequence: Synthetic oligonucleotide
gcaacccaagcagcagucc

SEQ ID NO: 1147678 - RNA, 19 nt, Artificial Sequence
  Description of Artificial Sequence: Synthetic oligonucleotide
guguuggugagcgcaaaau

SEQ ID NO: 1147679 - RNA, 19 nt, Artificial Sequence
  Description of Artificial Sequence: Synthetic oligonucleotide
guuuaauggccaagccagu

SEQ ID NO: 1147680 - RNA, 19 nt, Artificial Sequence
  Description of Artificial Sequence: Synthetic oligonucleotide
ccuuaggauugcuggaaaa

SEQ ID NO: 1147681 - RNA, 19 nt, Artificial Sequence
  Description of Artificial Sequence: Synthetic oligonucleotide
gagcugcaccuggcgauac

SEQ ID NO: 1147682 - RNA, 19 nt, Artificial Sequence
  Description of Artificial Sequence: Synthetic oligonucleotide
agacuccugaggaccugca

SEQ ID NO: 1147683 - RNA, 19 nt, Artificial Sequence
  Description of Artificial Sequence: Synthetic oligonucleotide
ggccaccaaaggauagcag

SEQ ID NO: 1147684 - RNA, 19 nt, Artificial Sequence
  Description of Artificial Sequence: Synthetic oligonucleotide
gagcccacccaagcucuca

SEQ ID NO: 1147685 - RNA, 19 nt, Artificial Sequence
  Description of Artificial Sequence: Synthetic oligonucleotide
ggcuuuccaccgcagccga

SEQ ID NO: 1147686 - RNA, 19 nt, Artificial Sequence
  Description of Artificial Sequence: Synthetic oligonucleotide
cagcaacccaagcagcagu

SEQ ID NO: 1147687 - RNA, 19 nt, Artificial Sequence
  Description of Artificial Sequence: Synthetic oligonucleotide
gcaguccuagaggagccac

SEQ ID NO: 1147688 - RNA, 19 nt, Artificial Sequence
  Description of Artificial Sequence: Synthetic oligonucleotide
ccuggugucggcagccuca

SEQ ID NO: 1147689 - RNA, 19 nt, Artificial Sequence
  Description of Artificial Sequence: Synthetic oligonucleotide
cacggccaguaccuuggca

SEQ ID NO: 1147690 - RNA, 19 nt, Artificial Sequence
  Description of Artificial Sequence: Synthetic oligonucleotide
gccacucgugagucggcug

SEQ ID NO: 1147691 - RNA, 19 nt, Artificial Sequence
  Description of Artificial Sequence: Synthetic oligonucleotide
ccacuugaaggccaccaaa

SEQ ID NO: 1147692 - RNA, 19 nt, Artificial Sequence
  Description of Artificial Sequence: Synthetic oligonucleotide
ccacucgugagucggcuga

SEQ ID NO: 1147693 - RNA, 19 nt, Artificial Sequence
  Description of Artificial Sequence: Synthetic oligonucleotide
ccagcacaaaagcagcaua

SEQ ID NO: 1147694 - RNA, 19 nt, Artificial Sequence
  Description of Artificial Sequence: Synthetic oligonucleotide
gacggccccugaagagccc

SEQ ID NO: 1147695 - RNA, 19 nt, Artificial Sequence
  Description of Artificial Sequence: Synthetic oligonucleotide
acucgugagucggcugaaa

SEQ ID NO: 1147696 - RNA, 19 nt, Artificial Sequence
  Description of Artificial Sequence: Synthetic oligonucleotide
accgcagccgaggggcaga

SEQ ID NO: 1147697 - RNA, 19 nt, Artificial Sequence
  Description of Artificial Sequence: Synthetic oligonucleotide
gcgcaaacgcggugauagc

SEQ ID NO: 1147698 - RNA, 19 nt, Artificial Sequence
  Description of Artificial Sequence: Synthetic oligonucleotide
gcgcacggccaguaccuug

SEQ ID NO: 1147699 - RNA, 19 nt, Artificial Sequence
  Description of Artificial Sequence: Synthetic oligonucleotide
uggugucggcagccucauc

SEQ ID NO: 1147700 - RNA, 19 nt, Artificial Sequence
  Description of Artificial Sequence: Synthetic oligonucleotide
cuguucccgcaagcccggg

SEQ ID NO: 1147701 - RNA, 19 nt, Artificial Sequence
  Description of Artificial Sequence: Synthetic oligonucleotide
ccuugagguccugagaugu

SEQ ID NO: 1147702 - RNA, 19 nt, Artificial Sequence
  Description of Artificial Sequence: Synthetic oligonucleotide
caguccuagaggagccacu

SEQ ID NO: 1147703 - RNA, 19 nt, Artificial Sequence
  Description of Artificial Sequence: Synthetic oligonucleotide
ccuucggcuuuccaccgca

SEQ ID NO: 1147704 - RNA, 19 nt, Artificial Sequence
  Description of Artificial Sequence: Synthetic oligonucleotide
caccgcagccgaggggcag

SEQ ID NO: 1147705 - RNA, 19 nt, Artificial Sequence
  Description of Artificial Sequence: Synthetic oligonucleotide
ccuaguccacuccuggugu

SEQ ID NO: 1147706 - RNA, 19 nt, Artificial Sequence
  Description of Artificial Sequence: Synthetic oligonucleotide
gccuucggcuuuccaccgc

SEQ ID NO: 1147707 - RNA, 19 nt, Artificial Sequence
  Description of Artificial Sequence: Synthetic oligonucleotide
gcgcugagaggcugcucug

SEQ ID NO: 1147708 - RNA, 19 nt, Artificial Sequence
  Description of Artificial Sequence: Synthetic oligonucleotide
cuguguuggugagcgcaaa

SEQ ID NO: 1147709 - RNA, 19 nt, Artificial Sequence
  Description of Artificial Sequence: Synthetic oligonucleotide
cauucucacaugggauccu

SEQ ID NO: 1147710 - RNA, 19 nt, Artificial Sequence
  Description of Artificial Sequence: Synthetic oligonucleotide
caugcgcaaacgcggugau

SEQ ID NO: 1147711 - RNA, 19 nt, Artificial Sequence
  Description of Artificial Sequence: Synthetic oligonucleotide
ggccccugaagagcccacc

SEQ ID NO: 1147712 - RNA, 19 nt, Artificial Sequence
  Description of Artificial Sequence: Synthetic oligonucleotide
ccgcaagcccgggaggagc

SEQ ID NO: 1147713 - RNA, 19 nt, Artificial Sequence
  Description of Artificial Sequence: Synthetic oligonucleotide
ggccaguaccuuggcacuc

SEQ ID NO: 1147714 - RNA, 19 nt, Artificial Sequence
  Description of Artificial Sequence: Synthetic oligonucleotide
cugcagcggcaaccagauc

SEQ ID NO: 1147715 - RNA, 19 nt, Artificial Sequence
  Description of Artificial Sequence: Synthetic oligonucleotide
augcgcaaacgcggugaua

SEQ ID NO: 1147716 - RNA, 19 nt, Artificial Sequence
  Description of Artificial Sequence: Synthetic oligonucleotide
gcucaugccccagcaggga

SEQ ID NO: 1147717 - RNA, 19 nt, Artificial Sequence
  Description of Artificial Sequence: Synthetic oligonucleotide
gcuuuccaccgcagccgag

SEQ ID NO: 1147718 - RNA, 19 nt, Artificial Sequence
  Description of Artificial Sequence: Synthetic oligonucleotide
cccgagcuucaggaacugc

SEQ ID NO: 1147719 - RNA, 19 nt, Artificial Sequence
  Description of Artificial Sequence: Synthetic oligonucleotide
gggaugaguccugggucaa

SEQ ID NO: 1147720 - RNA, 19 nt, Artificial Sequence
  Description of Artificial Sequence: Synthetic oligonucleotide
cacucgugagucggcugaa

SEQ ID NO: 1147721 - RNA, 19 nt, Artificial Sequence
  Description of Artificial Sequence: Synthetic oligonucleotide
caaggucguagagcagggu

SEQ ID NO: 1147722 - RNA, 19 nt, Artificial Sequence
  Description of Artificial Sequence: Synthetic oligonucleotide
ggagcugcaccuggcgaua

SEQ ID NO: 1147723 - RNA, 19 nt, Artificial Sequence
  Description of Artificial Sequence: Synthetic oligonucleotide
ccggaagugccaggagcug

SEQ ID NO: 1147724 - RNA, 19 nt, Artificial Sequence
  Description of Artificial Sequence: Synthetic oligonucleotide
gggcgcccagcgucugcag

SEQ ID NO: 1147725 - RNA, 19 nt, Artificial Sequence
  Description of Artificial Sequence: Synthetic oligonucleotide
ggggcggaagagcugcuuu

SEQ ID NO: 1147726 - RNA, 19 nt, Artificial Sequence
  Description of Artificial Sequence: Synthetic oligonucleotide
ccucaugcgcaaacgcggu

SEQ ID NO: 1147727 - RNA, 19 nt, Artificial Sequence
  Description of Artificial Sequence: Synthetic oligonucleotide
gcgaucccggcagguggcc

SEQ ID NO: 1147728 - RNA, 19 nt, Artificial Sequence
  Description of Artificial Sequence: Synthetic oligonucleotide
cgcggugauagcggcugcc

SEQ ID NO: 1147729 - RNA, 19 nt, Artificial Sequence
  Description of Artificial Sequence: Synthetic oligonucleotide
cccaagcucucacuagcgu

SEQ ID NO: 1147730 - RNA, 19 nt, Artificial Sequence
  Description of Artificial Sequence: Synthetic oligonucleotide
ggagggcgcccagcgucug

SEQ ID NO: 1147731 - RNA, 19 nt, Artificial Sequence
  Description of Artificial Sequence: Synthetic oligonucleotide
ccacgcgcacggccaguac

SEQ ID NO: 1147732 - RNA, 19 nt, Artificial Sequence
  Description of Artificial Sequence: Synthetic oligonucleotide
cuggugucggcagccucau

SEQ ID NO: 1147733 - RNA, 19 nt, Artificial Sequence
  Description of Artificial Sequence: Synthetic oligonucleotide
gaccacgcgcacggccagu

SEQ ID NO: 1147734 - RNA, 19 nt, Artificial Sequence
  Description of Artificial Sequence: Synthetic oligonucleotide
gccgaggggcagacacaac

SEQ ID NO: 1147735 - RNA, 19 nt, Artificial Sequence
  Description of Artificial Sequence: Synthetic oligonucleotide
ccagauccucaugcgcaaa

SEQ ID NO: 1147736 - RNA, 19 nt, Artificial Sequence
  Description of Artificial Sequence: Synthetic oligonucleotide
gcgcauccuugagguccug

SEQ ID NO: 1147737 - RNA, 19 nt, Artificial Sequence
  Description of Artificial Sequence: Synthetic oligonucleotide
cgcgcacggccaguaccuu

SEQ ID NO: 1147738 - RNA, 19 nt, Artificial Sequence
  Description of Artificial Sequence: Synthetic oligonucleotide
aaaacuugaauucuugauc

SEQ ID NO: 1147739 - RNA, 19 nt, Artificial Sequence
  Description of Artificial Sequence: Synthetic oligonucleotide
cauauuaugauuuguaugc

SEQ ID NO: 1147740 - RNA, 19 nt, Artificial Sequence
  Description of Artificial Sequence: Synthetic oligonucleotide
aguaguugucacuugaugc

SEQ ID NO: 1147741 - RNA, 19 nt, Artificial Sequence
  Description of Artificial Sequence: Synthetic oligonucleotide
aaaagaagcuucucuggcc

SEQ ID NO: 1147742 - RNA, 19 nt, Artificial Sequence
  Description of Artificial Sequence: Synthetic oligonucleotide
auuaguaacuccuauagca

SEQ ID NO: 1147743 - RNA, 19 nt, Artificial Sequence
  Description of Artificial Sequence: Synthetic oligonucleotide
ugugguuaguccaagaaag

SEQ ID NO: 1147744 - RNA, 19 nt, Artificial Sequence
  Description of Artificial Sequence: Synthetic oligonucleotide
uguauuaucggcaaacaca

SEQ ID NO: 1147745 - RNA, 19 nt, Artificial Sequence
  Description of Artificial Sequence: Synthetic oligonucleotide
auauguucuguauacacac

SEQ ID NO: 1147746 - RNA, 19 nt, Artificial Sequence
  Description of Artificial Sequence: Synthetic oligonucleotide
cuuucgaucuguauuaucg

SEQ ID NO: 1147747 - RNA, 19 nt, Artificial Sequence
  Description of Artificial Sequence: Synthetic oligonucleotide
ugggagauccacaagaggg

SEQ ID NO: 1147748 - RNA, 19 nt, Artificial Sequence
  Description of Artificial Sequence: Synthetic oligonucleotide
cuagcuauacauuagcuag

SEQ ID NO: 1147749 - RNA, 19 nt, Artificial Sequence
  Description of Artificial Sequence: Synthetic oligonucleotide
uuuaccuuaacaguuaccc

SEQ ID NO: 1147750 - RNA, 19 nt, Artificial Sequence
  Description of Artificial Sequence: Synthetic oligonucleotide
agagagcucaucuaaauuc

SEQ ID NO: 1147751 - RNA, 19 nt, Artificial Sequence
  Description of Artificial Sequence: Synthetic oligonucleotide
uccaguaaaauguaggggc

SEQ ID NO: 1147752 - RNA, 19 nt, Artificial Sequence
  Description of Artificial Sequence: Synthetic oligonucleotide
aagacgauaguuuucaaaa

SEQ ID NO: 1147753 - RNA, 19 nt, Artificial Sequence
  Description of Artificial Sequence: Synthetic oligonucleotide
ugauuaaguaaccagcuac

SEQ ID NO: 1147754 - RNA, 19 nt, Artificial Sequence
  Description of Artificial Sequence: Synthetic oligonucleotide
acauuaguaacuccuauag

SEQ ID NO: 1147755 - RNA, 19 nt, Artificial Sequence
  Description of Artificial Sequence: Synthetic oligonucleotide
uaucaauauauuaaacucu

SEQ ID NO: 1147756 - RNA, 19 nt, Artificial Sequence
  Description of Artificial Sequence: Synthetic oligonucleotide
gacuacaggauuuagagga

SEQ ID NO: 1147757 - RNA, 19 nt, Artificial Sequence
  Description of Artificial Sequence: Synthetic oligonucleotide
aacccaacuauauugucag

SEQ ID NO: 1147758 - RNA, 19 nt, Artificial Sequence
  Description of Artificial Sequence: Synthetic oligonucleotide
gaauuuucaaagacgauag

SEQ ID NO: 1147759 - RNA, 19 nt, Artificial Sequence
  Description of Artificial Sequence: Synthetic oligonucleotide
aagucuuagucuuugaaaa

SEQ ID NO: 1147760 - RNA, 19 nt, Artificial Sequence
  Description of Artificial Sequence: Synthetic oligonucleotide
ugaacugccaugagaauag

SEQ ID NO: 1147761 - RNA, 19 nt, Artificial Sequence
  Description of Artificial Sequence: Synthetic oligonucleotide
ucaugauagccaaggaugg

SEQ ID NO: 1147762 - RNA, 19 nt, Artificial Sequence
  Description of Artificial Sequence: Synthetic oligonucleotide
aaguauuucuuuauacugg

SEQ ID NO: 1147763 - RNA, 19 nt, Artificial Sequence
  Description of Artificial Sequence: Synthetic oligonucleotide
gugacuacaggauuuagag

SEQ ID NO: 1147764 - RNA, 19 nt, Artificial Sequence
  Description of Artificial Sequence: Synthetic oligonucleotide
aauaacuuauauugguuaa

SEQ ID NO: 1147765 - RNA, 19 nt, Artificial Sequence
  Description of Artificial Sequence: Synthetic oligonucleotide
aucuauaucauaggagucc

SEQ ID NO: 1147766 - RNA, 19 nt, Artificial Sequence
  Description of Artificial Sequence: Synthetic oligonucleotide
auuaucggcaaacacaagu

SEQ ID NO: 1147767 - RNA, 19 nt, Artificial Sequence
  Description of Artificial Sequence: Synthetic oligonucleotide
uaacaguuaccccauaaug

SEQ ID NO: 1147768 - RNA, 19 nt, Artificial Sequence
  Description of Artificial Sequence: Synthetic oligonucleotide
aguccaguaaaauguaggg

SEQ ID NO: 1147769 - RNA, 19 nt, Artificial Sequence
  Description of Artificial Sequence: Synthetic oligonucleotide
aacaacucccucuccauag

SEQ ID NO: 1147770 - RNA, 19 nt, Artificial Sequence
  Description of Artificial Sequence: Synthetic oligonucleotide
uuaauguauacuccucugc

SEQ ID NO: 1147771 - RNA, 19 nt, Artificial Sequence
  Description of Artificial Sequence: Synthetic oligonucleotide
uuuguguaggugaaaagcu

SEQ ID NO: 1147772 - RNA, 19 nt, Artificial Sequence
  Description of Artificial Sequence: Synthetic oligonucleotide
ucuaggagccuauuaagag

SEQ ID NO: 1147773 - RNA, 19 nt, Artificial Sequence
  Description of Artificial Sequence: Synthetic oligonucleotide
aaagucuuagucuuugaaa

SEQ ID NO: 1147774 - RNA, 19 nt, Artificial Sequence
  Description of Artificial Sequence: Synthetic oligonucleotide
uaggugaaaagcuagcuac

SEQ ID NO: 1147775 - RNA, 19 nt, Artificial Sequence
  Description of Artificial Sequence: Synthetic oligonucleotide
uuaaauugcugucuggaaa

SEQ ID NO: 1147776 - RNA, 19 nt, Artificial Sequence
  Description of Artificial Sequence: Synthetic oligonucleotide
ggagauuucaaucuugucc

SEQ ID NO: 1147777 - RNA, 19 nt, Artificial Sequence
  Description of Artificial Sequence: Synthetic oligonucleotide
uauauguucuguauacaca

SEQ ID NO: 1147778 - RNA, 19 nt, Artificial Sequence
  Description of Artificial Sequence: Synthetic oligonucleotide
auuaagaguagguauuuga

SEQ ID NO: 1147779 - RNA, 19 nt, Artificial Sequence
  Description of Artificial Sequence: Synthetic oligonucleotide
ggugcuacuaaugacaugg

SEQ ID NO: 1147780 - RNA, 19 nt, Artificial Sequence
  Description of Artificial Sequence: Synthetic oligonucleotide
agggugaauuuucaaagac

SEQ ID NO: 1147781 - RNA, 19 nt, Artificial Sequence
  Description of Artificial Sequence: Synthetic oligonucleotide
ugcuauauauuuaugucaa

SEQ ID NO: 1147782 - RNA, 19 nt, Artificial Sequence
  Description of Artificial Sequence: Synthetic oligonucleotide
ucucuaauuuagcuggugc

SEQ ID NO: 1147783 - RNA, 19 nt, Artificial Sequence
  Description of Artificial Sequence: Synthetic oligonucleotide
ugugcuauauauuuauguc

SEQ ID NO: 1147784 - RNA, 19 nt, Artificial Sequence
  Description of Artificial Sequence: Synthetic oligonucleotide
uuagcuagacuuacaacca

SEQ ID NO: 1147785 - RNA, 19 nt, Artificial Sequence
  Description of Artificial Sequence: Synthetic oligonucleotide
cauaauaaggcugauguuc

SEQ ID NO: 1147786 - RNA, 19 nt, Artificial Sequence
  Description of Artificial Sequence: Synthetic oligonucleotide
uuauauugguuaaacaauu

SEQ ID NO: 1147787 - RNA, 19 nt, Artificial Sequence
  Description of Artificial Sequence: Synthetic oligonucleotide
uuaagaguagguauuugaa

SEQ ID NO: 1147788 - RNA, 19 nt, Artificial Sequence
  Description of Artificial Sequence: Synthetic oligonucleotide
aguuucucuaauuuagcug

SEQ ID NO: 1147789 - RNA, 19 nt, Artificial Sequence
  Description of Artificial Sequence: Synthetic oligonucleotide
ucugaauugugaccagagg

SEQ ID NO: 1147790 - RNA, 19 nt, Artificial Sequence
  Description of Artificial Sequence: Synthetic oligonucleotide
ugaucuaggagccuauuaa

SEQ ID NO: 1147791 - RNA, 19 nt, Artificial Sequence
  Description of Artificial Sequence: Synthetic oligonucleotide
uuaauauguucccugucac

SEQ ID NO: 1147792 - RNA, 19 nt, Artificial Sequence
  Description of Artificial Sequence: Synthetic oligonucleotide
uauuaugauuuguaugcug

SEQ ID NO: 1147793 - RNA, 19 nt, Artificial Sequence
  Description of Artificial Sequence: Synthetic oligonucleotide
aaagacgauaguuuucaaa

SEQ ID NO: 1147794 - RNA, 19 nt, Artificial Sequence
  Description of Artificial Sequence: Synthetic oligonucleotide
acaaccauccuccagcgug

SEQ ID NO: 1147795 - RNA, 19 nt, Artificial Sequence
  Description of Artificial Sequence: Synthetic oligonucleotide
acuauauugucagggaggg

SEQ ID NO: 1147796 - RNA, 19 nt, Artificial Sequence
  Description of Artificial Sequence: Synthetic oligonucleotide
uuucgaucuguauuaucgg

SEQ ID NO: 1147797 - RNA, 19 nt, Artificial Sequence
  Description of Artificial Sequence: Synthetic oligonucleotide
acaguuaccccauaaugug

SEQ ID NO: 1147798 - RNA, 19 nt, Artificial Sequence
  Description of Artificial Sequence: Synthetic oligonucleotide
auaaggcugauguucauca

SEQ ID NO: 1147799 - RNA, 19 nt, Artificial Sequence
  Description of Artificial Sequence: Synthetic oligonucleotide
aaguuacuagcauuugugu

SEQ ID NO: 1147800 - RNA, 19 nt, Artificial Sequence
  Description of Artificial Sequence: Synthetic oligonucleotide
aauaaggcugauguucauc

SEQ ID NO: 1147801 - RNA, 19 nt, Artificial Sequence
  Description of Artificial Sequence: Synthetic oligonucleotide
aaauugaggcaauuuuagu

SEQ ID NO: 1147802 - RNA, 19 nt, Artificial Sequence
  Description of Artificial Sequence: Synthetic oligonucleotide
ucauacaugcaguuuuaag

SEQ ID NO: 1147803 - RNA, 19 nt, Artificial Sequence
  Description of Artificial Sequence: Synthetic oligonucleotide
gaucuaggagccuauuaag

SEQ ID NO: 1147804 - RNA, 19 nt, Artificial Sequence
  Description of Artificial Sequence: Synthetic oligonucleotide
aagacuacgugugugcaag

SEQ ID NO: 1147805 - RNA, 19 nt, Artificial Sequence
  Description of Artificial Sequence: Synthetic oligonucleotide
ugauuucaaauaaaugaau

SEQ ID NO: 1147806 - RNA, 19 nt, Artificial Sequence
  Description of Artificial Sequence: Synthetic oligonucleotide
guauauguucuguauacac

SEQ ID NO: 1147807 - RNA, 19 nt, Artificial Sequence
  Description of Artificial Sequence: Synthetic oligonucleotide
aauuagaagcuucuagcua

SEQ ID NO: 1147808 - RNA, 19 nt, Artificial Sequence
  Description of Artificial Sequence: Synthetic oligonucleotide
aguuuuaagacuacgugug

SEQ ID NO: 1147809 - RNA, 19 nt, Artificial Sequence
  Description of Artificial Sequence: Synthetic oligonucleotide
uuaguaacuccuauagcaa

SEQ ID NO: 1147810 - RNA, 19 nt, Artificial Sequence
  Description of Artificial Sequence: Synthetic oligonucleotide
uauacauuagcuagacuua

SEQ ID NO: 1147811 - RNA, 19 nt, Artificial Sequence
  Description of Artificial Sequence: Synthetic oligonucleotide
uuuguaugcugucuuacau

SEQ ID NO: 1147812 - RNA, 19 nt, Artificial Sequence
  Description of Artificial Sequence: Synthetic oligonucleotide
ugcaguuuuaagacuacgu

SEQ ID NO: 1147813 - RNA, 19 nt, Artificial Sequence
  Description of Artificial Sequence: Synthetic oligonucleotide
ugcauucuacauuaaaguc

SEQ ID NO: 1147814 - RNA, 19 nt, Artificial Sequence
  Description of Artificial Sequence: Synthetic oligonucleotide
ugugacuacaggauuuaga

SEQ ID NO: 1147815 - RNA, 19 nt, Artificial Sequence
  Description of Artificial Sequence: Synthetic oligonucleotide
uaucauaggaguccaguaa

SEQ ID NO: 1147816 - RNA, 19 nt, Artificial Sequence
  Description of Artificial Sequence: Synthetic oligonucleotide
aaacaaagaguaguuguca

SEQ ID NO: 1147817 - RNA, 19 nt, Artificial Sequence
  Description of Artificial Sequence: Synthetic oligonucleotide
gcaaacacaaguuacuagc

SEQ ID NO: 1147818 - RNA, 19 nt, Artificial Sequence
  Description of Artificial Sequence: Synthetic oligonucleotide
ggggcuuuuaccuuaacag

SEQ ID NO: 1147819 - RNA, 19 nt, Artificial Sequence
  Description of Artificial Sequence: Synthetic oligonucleotide
uuagccagacauuugugac

SEQ ID NO: 1147820 - RNA, 19 nt, Artificial Sequence
  Description of Artificial Sequence: Synthetic oligonucleotide
gaguccaguaaaauguagg

SEQ ID NO: 1147821 - RNA, 19 nt, Artificial Sequence
  Description of Artificial Sequence: Synthetic oligonucleotide
auacuguauuauuugauau

SEQ ID NO: 1147822 - RNA, 19 nt, Artificial Sequence
  Description of Artificial Sequence: Synthetic oligonucleotide
uuaacaguuaccccauaau

SEQ ID NO: 1147823 - RNA, 19 nt, Artificial Sequence
  Description of Artificial Sequence: Synthetic oligonucleotide
uaaagauggauccuccuuu

SEQ ID NO: 1147824 - RNA, 19 nt, Artificial Sequence
  Description of Artificial Sequence: Synthetic oligonucleotide
ucgaucuguauuaucggca

SEQ ID NO: 1147825 - RNA, 19 nt, Artificial Sequence
  Description of Artificial Sequence: Synthetic oligonucleotide
uuuuaagacuacgugugug

SEQ ID NO: 1147826 - RNA, 19 nt, Artificial Sequence
  Description of Artificial Sequence: Synthetic oligonucleotide
uucgaucuguauuaucggc

SEQ ID NO: 1147827 - RNA, 19 nt, Artificial Sequence
  Description of Artificial Sequence: Synthetic oligonucleotide
cagauaucuguuaucaguc

SEQ ID NO: 1147828 - RNA, 19 nt, Artificial Sequence
  Description of Artificial Sequence: Synthetic oligonucleotide
ucuagcuauacauuagcua

SEQ ID NO: 1147829 - RNA, 19 nt, Artificial Sequence
  Description of Artificial Sequence: Synthetic oligonucleotide
uugauauaagaauuuucau

SEQ ID NO: 1147830 - RNA, 19 nt, Artificial Sequence
  Description of Artificial Sequence: Synthetic oligonucleotide
cuuaauauguucccuguca

SEQ ID NO: 1147831 - RNA, 19 nt, Artificial Sequence
  Description of Artificial Sequence: Synthetic oligonucleotide
cuagcauuuguguagguga

SEQ ID NO: 1147832 - RNA, 19 nt, Artificial Sequence
  Description of Artificial Sequence: Synthetic oligonucleotide
agugcuuucgaucuguauu

SEQ ID NO: 1147833 - RNA, 19 nt, Artificial Sequence
  Description of Artificial Sequence: Synthetic oligonucleotide
uauaucauaggaguccagu

SEQ ID NO: 1147834 - RNA, 19 nt, Artificial Sequence
  Description of Artificial Sequence: Synthetic oligonucleotide
uuuuaccuuaacaguuacc

SEQ ID NO: 1147835 - RNA, 19 nt, Artificial Sequence
  Description of Artificial Sequence: Synthetic oligonucleotide
uuacuagcauuuguguagg

SEQ ID NO: 1147836 - RNA, 19 nt, Artificial Sequence
  Description of Artificial Sequence: Synthetic oligonucleotide
ugguauuauagcuccaaaa

SEQ ID NO: 1147837 - RNA, 19 nt, Artificial Sequence
  Description of Artificial Sequence: Synthetic oligonucleotide
acuuacaaccauauuauga

SEQ ID NO: 1147838 - RNA, 19 nt, Artificial Sequence
  Description of Artificial Sequence: Synthetic oligonucleotide
uaagaguagguauuugaau

SEQ ID NO: 1147839 - RNA, 19 nt, Artificial Sequence
  Description of Artificial Sequence: Synthetic oligonucleotide
uuaaagauggauccuccuu

SEQ ID NO: 1147840 - RNA, 19 nt, Artificial Sequence
  Description of Artificial Sequence: Synthetic oligonucleotide
uaauauguucccugucacc

SEQ ID NO: 1147841 - RNA, 19 nt, Artificial Sequence
  Description of Artificial Sequence: Synthetic oligonucleotide
cuauacauuagcuagacuu

SEQ ID NO: 1147842 - RNA, 19 nt, Artificial Sequence
  Description of Artificial Sequence: Synthetic oligonucleotide
ucuauaucauaggagucca

SEQ ID NO: 1147843 - RNA, 19 nt, Artificial Sequence
  Description of Artificial Sequence: Synthetic oligonucleotide
acaaguuacuagcauuugu

SEQ ID NO: 1147844 - RNA, 19 nt, Artificial Sequence
  Description of Artificial Sequence: Synthetic oligonucleotide
acauuagcuagacuuacaa

SEQ ID NO: 1147845 - RNA, 19 nt, Artificial Sequence
  Description of Artificial Sequence: Synthetic oligonucleotide
gaaguuggagacaaguuga

SEQ ID NO: 1147846 - RNA, 19 nt, Artificial Sequence
  Description of Artificial Sequence: Synthetic oligonucleotide
uuauacuggaguuucucua

SEQ ID NO: 1147847 - RNA, 19 nt, Artificial Sequence
  Description of Artificial Sequence: Synthetic oligonucleotide
uaggagccuauuaagagua

SEQ ID NO: 1147848 - RNA, 19 nt, Artificial Sequence
  Description of Artificial Sequence: Synthetic oligonucleotide
gauuuagaggagaggggcg

SEQ ID NO: 1147849 - RNA, 19 nt, Artificial Sequence
  Description of Artificial Sequence: Synthetic oligonucleotide
uauauugguuaaacaauuu

SEQ ID NO: 1147850 - RNA, 19 nt, Artificial Sequence
  Description of Artificial Sequence: Synthetic oligonucleotide
uaugauuuguaugcugucu

SEQ ID NO: 1147851 - RNA, 19 nt, Artificial Sequence
  Description of Artificial Sequence: Synthetic oligonucleotide
uuaucggcaaacacaaguu

SEQ ID NO: 1147852 - RNA, 19 nt, Artificial Sequence
  Description of Artificial Sequence: Synthetic oligonucleotide
auaaugugauuugucauca

SEQ ID NO: 1147853 - RNA, 19 nt, Artificial Sequence
  Description of Artificial Sequence: Synthetic oligonucleotide
uuaucaguccacaccugug

SEQ ID NO: 1147854 - RNA, 19 nt, Artificial Sequence
  Description of Artificial Sequence: Synthetic oligonucleotide
agcuauacauuagcuagac

SEQ ID NO: 1147855 - RNA, 19 nt, Artificial Sequence
  Description of Artificial Sequence: Synthetic oligonucleotide
auaucuguuaucaguccac

SEQ ID NO: 1147856 - RNA, 19 nt, Artificial Sequence
  Description of Artificial Sequence: Synthetic oligonucleotide
cauuaguaacuccuauagc

SEQ ID NO: 1147857 - RNA, 19 nt, Artificial Sequence
  Description of Artificial Sequence: Synthetic oligonucleotide
aucuguuaucaguccacac

SEQ ID NO: 1147858 - RNA, 19 nt, Artificial Sequence
  Description of Artificial Sequence: Synthetic oligonucleotide
ugcuacuaaugacauggga

SEQ ID NO: 1147859 - RNA, 19 nt, Artificial Sequence
  Description of Artificial Sequence: Synthetic oligonucleotide
ggagcaaucaaacuguuaa

SEQ ID NO: 1147860 - RNA, 19 nt, Artificial Sequence
  Description of Artificial Sequence: Synthetic oligonucleotide
acuccuauagcaaagguuu

SEQ ID NO: 1147861 - RNA, 19 nt, Artificial Sequence
  Description of Artificial Sequence: Synthetic oligonucleotide
uguaggugaaaagcuagcu

SEQ ID NO: 1147862 - RNA, 19 nt, Artificial Sequence
  Description of Artificial Sequence: Synthetic oligonucleotide
uacuguauuauuugauaua

SEQ ID NO: 1147863 - RNA, 19 nt, Artificial Sequence
  Description of Artificial Sequence: Synthetic oligonucleotide
uggagacaaguugagagga

SEQ ID NO: 1147864 - RNA, 19 nt, Artificial Sequence
  Description of Artificial Sequence: Synthetic oligonucleotide
agaggggcgaugaaguugg

SEQ ID NO: 1147865 - RNA, 19 nt, Artificial Sequence
  Description of Artificial Sequence: Synthetic oligonucleotide
uacacacuaguacauucuc

SEQ ID NO: 1147866 - RNA, 19 nt, Artificial Sequence
  Description of Artificial Sequence: Synthetic oligonucleotide
uagcuggugcuacuaauga

SEQ ID NO: 1147867 - RNA, 19 nt, Artificial Sequence
  Description of Artificial Sequence: Synthetic oligonucleotide
uacauuagcuagacuuaca

SEQ ID NO: 1147868 - RNA, 19 nt, Artificial Sequence
  Description of Artificial Sequence: Synthetic oligonucleotide
uaggggcucaaucuguaga

SEQ ID NO: 1147869 - RNA, 19 nt, Artificial Sequence
  Description of Artificial Sequence: Synthetic oligonucleotide
uguauauguucuguauaca

SEQ ID NO: 1147870 - RNA, 19 nt, Artificial Sequence
  Description of Artificial Sequence: Synthetic oligonucleotide
cauuagcuagacuuacaac

SEQ ID NO: 1147871 - RNA, 19 nt, Artificial Sequence
  Description of Artificial Sequence: Synthetic oligonucleotide
uauuaagaguagguauuug

SEQ ID NO: 1147872 - RNA, 19 nt, Artificial Sequence
  Description of Artificial Sequence: Synthetic oligonucleotide
uagcuauacauuagcuaga

SEQ ID NO: 1147873 - RNA, 19 nt, Artificial Sequence
  Description of Artificial Sequence: Synthetic oligonucleotide
aauugugaccagaggaagu

SEQ ID NO: 1147874 - RNA, 19 nt, Artificial Sequence
  Description of Artificial Sequence: Synthetic oligonucleotide
guccaguaaaauguagggg

SEQ ID NO: 1147875 - RNA, 19 nt, Artificial Sequence
  Description of Artificial Sequence: Synthetic oligonucleotide
ucuaauuuagcuggugcua

SEQ ID NO: 1147876 - RNA, 19 nt, Artificial Sequence
  Description of Artificial Sequence: Synthetic oligonucleotide
uuaugauuuguaugcuguc

SEQ ID NO: 1147877 - RNA, 19 nt, Artificial Sequence
  Description of Artificial Sequence: Synthetic oligonucleotide
acucuuaaguugcuucucu

SEQ ID NO: 1147878 - RNA, 19 nt, Artificial Sequence
  Description of Artificial Sequence: Synthetic oligonucleotide
uuaagacuacgugugugca

SEQ ID NO: 1147879 - RNA, 19 nt, Artificial Sequence
  Description of Artificial Sequence: Synthetic oligonucleotide
ugcuucugauuaaguaacc

SEQ ID NO: 1147880 - RNA, 19 nt, Artificial Sequence
  Description of Artificial Sequence: Synthetic oligonucleotide
accugugcuauauauuuau

SEQ ID NO: 1147881 - RNA, 19 nt, Artificial Sequence
  Description of Artificial Sequence: Synthetic oligonucleotide
caaguugagaggagcaauc

SEQ ID NO: 1147882 - RNA, 19 nt, Artificial Sequence
  Description of Artificial Sequence: Synthetic oligonucleotide
acuacgugugugcaagugu

SEQ ID NO: 1147883 - RNA, 19 nt, Artificial Sequence
  Description of Artificial Sequence: Synthetic oligonucleotide
ugugcuugccccucagucu

SEQ ID NO: 1147884 - RNA, 19 nt, Artificial Sequence
  Description of Artificial Sequence: Synthetic oligonucleotide
auaucauaggaguccagua

SEQ ID NO: 1147885 - RNA, 19 nt, Artificial Sequence
  Description of Artificial Sequence: Synthetic oligonucleotide
aaguugagaggagcaauca

SEQ ID NO: 1147886 - RNA, 19 nt, Artificial Sequence
  Description of Artificial Sequence: Synthetic oligonucleotide
uauuaucggcaaacacaag

SEQ ID NO: 1147887 - RNA, 19 nt, Artificial Sequence
  Description of Artificial Sequence: Synthetic oligonucleotide
uauguucccugucaccuau

SEQ ID NO: 1147888 - RNA, 19 nt, Artificial Sequence
  Description of Artificial Sequence: Synthetic oligonucleotide
caguuaauaucuuagugcu

SEQ ID NO: 1147889 - RNA, 19 nt, Artificial Sequence
  Description of Artificial Sequence: Synthetic oligonucleotide
uugaucuaggagccuauua

SEQ ID NO: 1147890 - RNA, 19 nt, Artificial Sequence
  Description of Artificial Sequence: Synthetic oligonucleotide
ucuggccuguuucaugaac

SEQ ID NO: 1147891 - RNA, 19 nt, Artificial Sequence
  Description of Artificial Sequence: Synthetic oligonucleotide
ugguuaguccaagaaagaa

SEQ ID NO: 1147892 - RNA, 19 nt, Artificial Sequence
  Description of Artificial Sequence: Synthetic oligonucleotide
uguuaucaguccacaccug

SEQ ID NO: 1147893 - RNA, 19 nt, Artificial Sequence
  Description of Artificial Sequence: Synthetic oligonucleotide
ugcugucuuacauuuuaaa

SEQ ID NO: 1147894 - RNA, 19 nt, Artificial Sequence
  Description of Artificial Sequence: Synthetic oligonucleotide
gauguucaucaagaggcug

SEQ ID NO: 1147895 - RNA, 19 nt, Artificial Sequence
  Description of Artificial Sequence: Synthetic oligonucleotide
auagaaacaaagaguaguu

SEQ ID NO: 1147896 - RNA, 19 nt, Artificial Sequence
  Description of Artificial Sequence: Synthetic oligonucleotide
uguucgggcagcuguacuc

SEQ ID NO: 1147897 - RNA, 19 nt, Artificial Sequence
  Description of Artificial Sequence: Synthetic oligonucleotide
caucaagaggcugaagaac

SEQ ID NO: 1147898 - RNA, 19 nt, Artificial Sequence
  Description of Artificial Sequence: Synthetic oligonucleotide
uugaggcaauuuuagugaa

SEQ ID NO: 1147899 - RNA, 19 nt, Artificial Sequence
  Description of Artificial Sequence: Synthetic oligonucleotide
aacuccuauagcaaagguu

SEQ ID NO: 1147900 - RNA, 19 nt, Artificial Sequence
  Description of Artificial Sequence: Synthetic oligonucleotide
gcaaucaaacuguuaauga

SEQ ID NO: 1147901 - RNA, 19 nt, Artificial Sequence
  Description of Artificial Sequence: Synthetic oligonucleotide
caaccauccuccagcgugg

SEQ ID NO: 1147902 - RNA, 19 nt, Artificial Sequence
  Description of Artificial Sequence: Synthetic oligonucleotide
ugcaaguguguauguauau

SEQ ID NO: 1147903 - RNA, 19 nt, Artificial Sequence
  Description of Artificial Sequence: Synthetic oligonucleotide
ggcaaacacaaguuacuag

SEQ ID NO: 1147904 - RNA, 19 nt, Artificial Sequence
  Description of Artificial Sequence: Synthetic oligonucleotide
cuugaugcaaacccaacua

SEQ ID NO: 1147905 - RNA, 19 nt, Artificial Sequence
  Description of Artificial Sequence: Synthetic oligonucleotide
aaacaacucccucuccaua

SEQ ID NO: 1147906 - RNA, 19 nt, Artificial Sequence
  Description of Artificial Sequence: Synthetic oligonucleotide
uuacaaccauauuaugauu

SEQ ID NO: 1147907 - RNA, 19 nt, Artificial Sequence
  Description of Artificial Sequence: Synthetic oligonucleotide
uuucucuaauuuagcuggu

SEQ ID NO: 1147908 - RNA, 19 nt, Artificial Sequence
  Description of Artificial Sequence: Synthetic oligonucleotide
aauuuagcuggugcuacua

SEQ ID NO: 1147909 - RNA, 19 nt, Artificial Sequence
  Description of Artificial Sequence: Synthetic oligonucleotide
uuguaugcugucuuacauu

SEQ ID NO: 1147910 - RNA, 19 nt, Artificial Sequence
  Description of Artificial Sequence: Synthetic oligonucleotide
uucauugcauagaguaguu

SEQ ID NO: 1147911 - RNA, 19 nt, Artificial Sequence
  Description of Artificial Sequence: Synthetic oligonucleotide
ugucaccuauuucuuuuaa

SEQ ID NO: 1147912 - RNA, 19 nt, Artificial Sequence
  Description of Artificial Sequence: Synthetic oligonucleotide
acuucaucguggaaggcug

SEQ ID NO: 1147913 - RNA, 19 nt, Artificial Sequence
  Description of Artificial Sequence: Synthetic oligonucleotide
uaagacuacgugugugcaa

SEQ ID NO: 1147914 - RNA, 19 nt, Artificial Sequence
  Description of Artificial Sequence: Synthetic oligonucleotide
uuaccccauaaugugauuu

SEQ ID NO: 1147915 - RNA, 19 nt, Artificial Sequence
  Description of Artificial Sequence: Synthetic oligonucleotide
gaggcaauuuuagugaacu

SEQ ID NO: 1147916 - RNA, 19 nt, Artificial Sequence
  Description of Artificial Sequence: Synthetic oligonucleotide
uucucuaauuuagcuggug

SEQ ID NO: 1147917 - RNA, 19 nt, Artificial Sequence
  Description of Artificial Sequence: Synthetic oligonucleotide
gguuaguccaagaaagaac

SEQ ID NO: 1147918 - RNA, 19 nt, Artificial Sequence
  Description of Artificial Sequence: Synthetic oligonucleotide
ugucaacuuucauugcaua

SEQ ID NO: 1147919 - RNA, 19 nt, Artificial Sequence
  Description of Artificial Sequence: Synthetic oligonucleotide
cuauaucauaggaguccag

SEQ ID NO: 1147920 - RNA, 19 nt, Artificial Sequence
  Description of Artificial Sequence: Synthetic oligonucleotide
uagugcuacagaagacuuc

SEQ ID NO: 1147921 - RNA, 19 nt, Artificial Sequence
  Description of Artificial Sequence: Synthetic oligonucleotide
caguuaaagauggauccuc

SEQ ID NO: 1147922 - RNA, 19 nt, Artificial Sequence
  Description of Artificial Sequence: Synthetic oligonucleotide
cugugcuauauauuuaugu

SEQ ID NO: 1147923 - RNA, 19 nt, Artificial Sequence
  Description of Artificial Sequence: Synthetic oligonucleotide
aggcaauuuuagugaacug

SEQ ID NO: 1147924 - RNA, 19 nt, Artificial Sequence
  Description of Artificial Sequence: Synthetic oligonucleotide
auguucaucaagaggcuga

SEQ ID NO: 1147925 - RNA, 19 nt, Artificial Sequence
  Description of Artificial Sequence: Synthetic oligonucleotide
uuugugacuacaggauuua

SEQ ID NO: 1147926 - RNA, 19 nt, Artificial Sequence
  Description of Artificial Sequence: Synthetic oligonucleotide
caaauugcagcaguuaaua

SEQ ID NO: 1147927 - RNA, 19 nt, Artificial Sequence
  Description of Artificial Sequence: Synthetic oligonucleotide
uuagaagcuucuagcuaua

SEQ ID NO: 1147928 - RNA, 19 nt, Artificial Sequence
  Description of Artificial Sequence: Synthetic oligonucleotide
auuugugacuacaggauuu

SEQ ID NO: 1147929 - RNA, 19 nt, Artificial Sequence
  Description of Artificial Sequence: Synthetic oligonucleotide
cuacuaaugacaugggaau

SEQ ID NO: 1147930 - RNA, 19 nt, Artificial Sequence
  Description of Artificial Sequence: Synthetic oligonucleotide
aacucccucuccauaguca

SEQ ID NO: 1147931 - RNA, 19 nt, Artificial Sequence
  Description of Artificial Sequence: Synthetic oligonucleotide
auggagauuucaaucuugu

SEQ ID NO: 1147932 - RNA, 19 nt, Artificial Sequence
  Description of Artificial Sequence: Synthetic oligonucleotide
ugccauuagccagacauuu

SEQ ID NO: 1147933 - RNA, 19 nt, Artificial Sequence
  Description of Artificial Sequence: Synthetic oligonucleotide
augguauuauagcuccaaa

SEQ ID NO: 1147934 - RNA, 19 nt, Artificial Sequence
  Description of Artificial Sequence: Synthetic oligonucleotide
ucaucguggaaggcugugc

SEQ ID NO: 1147935 - RNA, 19 nt, Artificial Sequence
  Description of Artificial Sequence: Synthetic oligonucleotide
guaggugaaaagcuagcua

SEQ ID NO: 1147936 - RNA, 19 nt, Artificial Sequence
  Description of Artificial Sequence: Synthetic oligonucleotide
gcuacuaaugacaugggaa

SEQ ID NO: 1147937 - RNA, 19 nt, Artificial Sequence
  Description of Artificial Sequence: Synthetic oligonucleotide
acacaaguuacuagcauuu

SEQ ID NO: 1147938 - RNA, 19 nt, Artificial Sequence
  Description of Artificial Sequence: Synthetic oligonucleotide
ggagccuauuaagaguagg

SEQ ID NO: 1147939 - RNA, 19 nt, Artificial Sequence
  Description of Artificial Sequence: Synthetic oligonucleotide
cacuugaugcaaacccaac

SEQ ID NO: 1147940 - RNA, 19 nt, Artificial Sequence
  Description of Artificial Sequence: Synthetic oligonucleotide
acuacaggauuuagaggag

SEQ ID NO: 1147941 - RNA, 19 nt, Artificial Sequence
  Description of Artificial Sequence: Synthetic oligonucleotide
uugugacuacaggauuuag

SEQ ID NO: 1147942 - RNA, 19 nt, Artificial Sequence
  Description of Artificial Sequence: Synthetic oligonucleotide
agacaaguugagaggagca

SEQ ID NO: 1147943 - RNA, 19 nt, Artificial Sequence
  Description of Artificial Sequence: Synthetic oligonucleotide
gucuuacauuuuaaauugc

SEQ ID NO: 1147944 - RNA, 19 nt, Artificial Sequence
  Description of Artificial Sequence: Synthetic oligonucleotide
uccuauagcaaagguuuua

SEQ ID NO: 1147945 - RNA, 19 nt, Artificial Sequence
  Description of Artificial Sequence: Synthetic oligonucleotide
guuaucaguccacaccugu

SEQ ID NO: 1147946 - RNA, 19 nt, Artificial Sequence
  Description of Artificial Sequence: Synthetic oligonucleotide
acccaacuauauugucagg

SEQ ID NO: 1147947 - RNA, 19 nt, Artificial Sequence
  Description of Artificial Sequence: Synthetic oligonucleotide
aguuaccccauaaugugau

SEQ ID NO: 1147948 - RNA, 19 nt, Artificial Sequence
  Description of Artificial Sequence: Synthetic oligonucleotide
uuguucgggcagcuguacu

SEQ ID NO: 1147949 - RNA, 19 nt, Artificial Sequence
  Description of Artificial Sequence: Synthetic oligonucleotide
uaguugucacuugaugcaa

SEQ ID NO: 1147950 - RNA, 19 nt, Artificial Sequence
  Description of Artificial Sequence: Synthetic oligonucleotide
agcaaagguuuuauacucu

SEQ ID NO: 1147951 - RNA, 19 nt, Artificial Sequence
  Description of Artificial Sequence: Synthetic oligonucleotide
uucaucguggaaggcugug

SEQ ID NO: 1147952 - RNA, 19 nt, Artificial Sequence
  Description of Artificial Sequence: Synthetic oligonucleotide
uucugugauucaggaagga

SEQ ID NO: 1147953 - RNA, 19 nt, Artificial Sequence
  Description of Artificial Sequence: Synthetic oligonucleotide
gucacuugaugcaaaccca

SEQ ID NO: 1147954 - RNA, 19 nt, Artificial Sequence
  Description of Artificial Sequence: Synthetic oligonucleotide
aagucugugguuaguccaa

SEQ ID NO: 1147955 - RNA, 19 nt, Artificial Sequence
  Description of Artificial Sequence: Synthetic oligonucleotide
ggaagugggagauccacaa

SEQ ID NO: 1147956 - RNA, 19 nt, Artificial Sequence
  Description of Artificial Sequence: Synthetic oligonucleotide
cuaggagccuauuaagagu

SEQ ID NO: 1147957 - RNA, 19 nt, Artificial Sequence
  Description of Artificial Sequence: Synthetic oligonucleotide
uugcauagaguaguucaua

SEQ ID NO: 1147958 - RNA, 19 nt, Artificial Sequence
  Description of Artificial Sequence: Synthetic oligonucleotide
agcguggaguaaguauuuc

SEQ ID NO: 1147959 - RNA, 19 nt, Artificial Sequence
  Description of Artificial Sequence: Synthetic oligonucleotide
uuagugcuuucgaucugua

SEQ ID NO: 1147960 - RNA, 19 nt, Artificial Sequence
  Description of Artificial Sequence: Synthetic oligonucleotide
gcuggugcuacuaaugaca

SEQ ID NO: 1147961 - RNA, 19 nt, Artificial Sequence
  Description of Artificial Sequence: Synthetic oligonucleotide
cuauauugucagggagggg

SEQ ID NO: 1147962 - RNA, 19 nt, Artificial Sequence
  Description of Artificial Sequence: Synthetic oligonucleotide
uggugcuacuaaugacaug

SEQ ID NO: 1147963 - RNA, 19 nt, Artificial Sequence
  Description of Artificial Sequence: Synthetic oligonucleotide
uagaagcuucuagcuauac

SEQ ID NO: 1147964 - RNA, 19 nt, Artificial Sequence
  Description of Artificial Sequence: Synthetic oligonucleotide
caguuaccccauaauguga

SEQ ID NO: 1147965 - RNA, 19 nt, Artificial Sequence
  Description of Artificial Sequence: Synthetic oligonucleotide
agccuauuaagaguaggua

SEQ ID NO: 1147966 - RNA, 19 nt, Artificial Sequence
  Description of Artificial Sequence: Synthetic oligonucleotide
uagugcuuucgaucuguau

SEQ ID NO: 1147967 - RNA, 19 nt, Artificial Sequence
  Description of Artificial Sequence: Synthetic oligonucleotide
ucgggcagcuguacucaug

SEQ ID NO: 1147968 - RNA, 19 nt, Artificial Sequence
  Description of Artificial Sequence: Synthetic oligonucleotide
uaguucauacaugcaguuu

SEQ ID NO: 1147969 - RNA, 19 nt, Artificial Sequence
  Description of Artificial Sequence: Synthetic oligonucleotide
augucaacuuucauugcau

SEQ ID NO: 1147970 - RNA, 19 nt, Artificial Sequence
  Description of Artificial Sequence: Synthetic oligonucleotide
acacuaguacauucucaua

SEQ ID NO: 1147971 - RNA, 19 nt, Artificial Sequence
  Description of Artificial Sequence: Synthetic oligonucleotide
caguaaaauguaggggcuc

SEQ ID NO: 1147972 - RNA, 19 nt, Artificial Sequence
  Description of Artificial Sequence: Synthetic oligonucleotide
gagccuauuaagaguaggu

SEQ ID NO: 1147973 - RNA, 19 nt, Artificial Sequence
  Description of Artificial Sequence: Synthetic oligonucleotide
guuuuaagacuacgugugu

SEQ ID NO: 1147974 - RNA, 19 nt, Artificial Sequence
  Description of Artificial Sequence: Synthetic oligonucleotide
aggugaaaagcuagcuacu

SEQ ID NO: 1147975 - RNA, 19 nt, Artificial Sequence
  Description of Artificial Sequence: Synthetic oligonucleotide
auauguucccugucaccua

SEQ ID NO: 1147976 - RNA, 19 nt, Artificial Sequence
  Description of Artificial Sequence: Synthetic oligonucleotide
gugcuacuaaugacauggg

SEQ ID NO: 1147977 - RNA, 19 nt, Artificial Sequence
  Description of Artificial Sequence: Synthetic oligonucleotide
uuuagaggagaggggcgau

SEQ ID NO: 1147978 - RNA, 19 nt, Artificial Sequence
  Description of Artificial Sequence: Synthetic oligonucleotide
agucugugguuaguccaag

SEQ ID NO: 1147979 - RNA, 19 nt, Artificial Sequence
  Description of Artificial Sequence: Synthetic oligonucleotide
uuccaucuaacugcauuuu

SEQ ID NO: 1147980 - RNA, 19 nt, Artificial Sequence
  Description of Artificial Sequence: Synthetic oligonucleotide
cugauuaaguaaccagcua

SEQ ID NO: 1147981 - RNA, 19 nt, Artificial Sequence
  Description of Artificial Sequence: Synthetic oligonucleotide
ucccugucaccuauuucuu

SEQ ID NO: 1147982 - RNA, 19 nt, Artificial Sequence
  Description of Artificial Sequence: Synthetic oligonucleotide
gccuauuaagaguagguau

SEQ ID NO: 1147983 - RNA, 19 nt, Artificial Sequence
  Description of Artificial Sequence: Synthetic oligonucleotide
cuacaggauuuagaggaga

SEQ ID NO: 1147984 - RNA, 19 nt, Artificial Sequence
  Description of Artificial Sequence: Synthetic oligonucleotide
gugguuaguccaagaaaga

SEQ ID NO: 1147985 - RNA, 19 nt, Artificial Sequence
  Description of Artificial Sequence: Synthetic oligonucleotide
cauuccaucuaacugcauu

SEQ ID NO: 1147986 - RNA, 19 nt, Artificial Sequence
  Description of Artificial Sequence: Synthetic oligonucleotide
cuuguucgggcagcuguac

SEQ ID NO: 1147987 - RNA, 19 nt, Artificial Sequence
  Description of Artificial Sequence: Synthetic oligonucleotide
uccacaccugugcuauaua

SEQ ID NO: 1147988 - RNA, 19 nt, Artificial Sequence
  Description of Artificial Sequence: Synthetic oligonucleotide
guaguucauacaugcaguu

SEQ ID NO: 1147989 - RNA, 19 nt, Artificial Sequence
  Description of Artificial Sequence: Synthetic oligonucleotide
aggaagugggagauccaca

SEQ ID NO: 1147990 - RNA, 19 nt, Artificial Sequence
  Description of Artificial Sequence: Synthetic oligonucleotide
gcuucugauuaaguaacca

SEQ ID NO: 1147991 - RNA, 19 nt, Artificial Sequence
  Description of Artificial Sequence: Synthetic oligonucleotide
aguuaauaucuuagugcuu

SEQ ID NO: 1147992 - RNA, 19 nt, Artificial Sequence
  Description of Artificial Sequence: Synthetic oligonucleotide
accuuaacaguuaccccau

SEQ ID NO: 1147993 - RNA, 19 nt, Artificial Sequence
  Description of Artificial Sequence: Synthetic oligonucleotide
ggcaagaagaaaccaaauu

SEQ ID NO: 1147994 - RNA, 19 nt, Artificial Sequence
  Description of Artificial Sequence: Synthetic oligonucleotide
gucugugguuaguccaaga

SEQ ID NO: 1147995 - RNA, 19 nt, Artificial Sequence
  Description of Artificial Sequence: Synthetic oligonucleotide
caugauagccaaggaugga

SEQ ID NO: 1147996 - RNA, 19 nt, Artificial Sequence
  Description of Artificial Sequence: Synthetic oligonucleotide
cauuugugacuacaggauu

SEQ ID NO: 1147997 - RNA, 19 nt, Artificial Sequence
  Description of Artificial Sequence: Synthetic oligonucleotide
caaagacgauaguuuucaa

SEQ ID NO: 1147998 - RNA, 19 nt, Artificial Sequence
  Description of Artificial Sequence: Synthetic oligonucleotide
caucguggaaggcugugcu

SEQ ID NO: 1147999 - RNA, 19 nt, Artificial Sequence
  Description of Artificial Sequence: Synthetic oligonucleotide
gcuuucgaucuguauuauc

SEQ ID NO: 1148000 - RNA, 19 nt, Artificial Sequence
  Description of Artificial Sequence: Synthetic oligonucleotide
ccuauuaagaguagguauu

SEQ ID NO: 1148001 - RNA, 19 nt, Artificial Sequence
  Description of Artificial Sequence: Synthetic oligonucleotide
gaguaagcagaaagucugu

SEQ ID NO: 1148002 - RNA, 19 nt, Artificial Sequence
  Description of Artificial Sequence: Synthetic oligonucleotide
guagugcuacagaagacuu

SEQ ID NO: 1148003 - RNA, 19 nt, Artificial Sequence
  Description of Artificial Sequence: Synthetic oligonucleotide
gccauuagccagacauuug

SEQ ID NO: 1148004 - RNA, 19 nt, Artificial Sequence
  Description of Artificial Sequence: Synthetic oligonucleotide
aggagcaaucaaacuguua

SEQ ID NO: 1148005 - RNA, 19 nt, Artificial Sequence
  Description of Artificial Sequence: Synthetic oligonucleotide
cucaaucuguagaguuucu

SEQ ID NO: 1148006 - RNA, 19 nt, Artificial Sequence
  Description of Artificial Sequence: Synthetic oligonucleotide
ccagacauuugugacuaca

SEQ ID NO: 1148007 - RNA, 19 nt, Artificial Sequence
  Description of Artificial Sequence: Synthetic oligonucleotide
augccauuagccagacauu

SEQ ID NO: 1148008 - RNA, 19 nt, Artificial Sequence
  Description of Artificial Sequence: Synthetic oligonucleotide
ccaguaaaauguaggggcu

SEQ ID NO: 1148009 - RNA, 19 nt, Artificial Sequence
  Description of Artificial Sequence: Synthetic oligonucleotide
cuagacuuacaaccauauu

SEQ ID NO: 1148010 - RNA, 19 nt, Artificial Sequence
  Description of Artificial Sequence: Synthetic oligonucleotide
cgaucuguauuaucggcaa

SEQ ID NO: 1148011 - RNA, 19 nt, Artificial Sequence
  Description of Artificial Sequence: Synthetic oligonucleotide
cuucaucguggaaggcugu

SEQ ID NO: 1148012 - RNA, 19 nt, Artificial Sequence
  Description of Artificial Sequence: Synthetic oligonucleotide
gagauccacaagaggguuu

SEQ ID NO: 1148013 - RNA, 19 nt, Artificial Sequence
  Description of Artificial Sequence: Synthetic oligonucleotide
gcuauacauuagcuagacu

SEQ ID NO: 1148014 - RNA, 19 nt, Artificial Sequence
  Description of Artificial Sequence: Synthetic oligonucleotide
gcauaauaaggcugauguu

SEQ ID NO: 1148015 - RNA, 19 nt, Artificial Sequence
  Description of Artificial Sequence: Synthetic oligonucleotide
guuaccccauaaugugauu

SEQ ID NO: 1148016 - RNA, 19 nt, Artificial Sequence
  Description of Artificial Sequence: Synthetic oligonucleotide
ggggccuuguucgggcagc

SEQ ID NO: 1148017 - RNA, 19 nt, Artificial Sequence
  Description of Artificial Sequence: Synthetic oligonucleotide
cuccuauagcaaagguuuu

SEQ ID NO: 1148018 - RNA, 19 nt, Artificial Sequence
  Description of Artificial Sequence: Synthetic oligonucleotide
cagaaagucugugguuagu

SEQ ID NO: 1148019 - RNA, 19 nt, Artificial Sequence
  Description of Artificial Sequence: Synthetic oligonucleotide
ccuauagcaaagguuuuau

SEQ ID NO: 1148020 - RNA, 19 nt, Artificial Sequence
  Description of Artificial Sequence: Synthetic oligonucleotide
cagcguggaguaaguauuu

SEQ ID NO: 1148021 - RNA, 19 nt, Artificial Sequence
  Description of Artificial Sequence: Synthetic oligonucleotide
ccacaccugugcuauauau

SEQ ID NO: 1148022 - RNA, 19 nt, Artificial Sequence
  Description of Artificial Sequence: Synthetic oligonucleotide
cguggaguaaguauuucuu

SEQ ID NO: 1148023 - RNA, 19 nt, Artificial Sequence
  Description of Artificial Sequence: Synthetic oligonucleotide
gaggggcgaugaaguugga

SEQ ID NO: 1148024 - RNA, 19 nt, Artificial Sequence
  Description of Artificial Sequence: Synthetic oligonucleotide
ccauuccaucuaacugcau

SEQ ID NO: 1148025 - RNA, 19 nt, Artificial Sequence
  Description of Artificial Sequence: Synthetic oligonucleotide
ccccucagucugauccuuu

SEQ ID NO: 1148026 - RNA, 19 nt, Artificial Sequence
  Description of Artificial Sequence: Synthetic oligonucleotide
uugauuaacuccaugauca

SEQ ID NO: 1148027 - RNA, 19 nt, Artificial Sequence
  Description of Artificial Sequence: Synthetic oligonucleotide
ucuucaacccucaagaugc

SEQ ID NO: 1148028 - RNA, 19 nt, Artificial Sequence
  Description of Artificial Sequence: Synthetic oligonucleotide
aaugggcaaaaguaguugc

SEQ ID NO: 1148029 - RNA, 19 nt, Artificial Sequence
  Description of Artificial Sequence: Synthetic oligonucleotide
cuuuauaccagucaccagg

SEQ ID NO: 1148030 - RNA, 19 nt, Artificial Sequence
  Description of Artificial Sequence: Synthetic oligonucleotide
aacuuuaaauacucuucgc

SEQ ID NO: 1148031 - RNA, 19 nt, Artificial Sequence
  Description of Artificial Sequence: Synthetic oligonucleotide
uuuuagguugauaacacca

SEQ ID NO: 1148032 - RNA, 19 nt, Artificial Sequence
  Description of Artificial Sequence: Synthetic oligonucleotide
aaaucauugccuucgcggg

SEQ ID NO: 1148033 - RNA, 19 nt, Artificial Sequence
  Description of Artificial Sequence: Synthetic oligonucleotide
auagucaccggcuaaaauc

SEQ ID NO: 1148034 - RNA, 19 nt, Artificial Sequence
  Description of Artificial Sequence: Synthetic oligonucleotide
auagcaaugguucggacgg

SEQ ID NO: 1148035 - RNA, 19 nt, Artificial Sequence
  Description of Artificial Sequence: Synthetic oligonucleotide
uucagcaacgguaagacca

SEQ ID NO: 1148036 - RNA, 19 nt, Artificial Sequence
  Description of Artificial Sequence: Synthetic oligonucleotide
aaugggucccaccauauag

SEQ ID NO: 1148037 - RNA, 19 nt, Artificial Sequence
  Description of Artificial Sequence: Synthetic oligonucleotide
aauagguucuccaaugacg

SEQ ID NO: 1148038 - RNA, 19 nt, Artificial Sequence
  Description of Artificial Sequence: Synthetic oligonucleotide
caugguacaaaucauugcc

SEQ ID NO: 1148039 - RNA, 19 nt, Artificial Sequence
  Description of Artificial Sequence: Synthetic oligonucleotide
caaaucauugccuucgcgg

SEQ ID NO: 1148040 - RNA, 19 nt, Artificial Sequence
  Description of Artificial Sequence: Synthetic oligonucleotide
uguagcauccaaaugggca

SEQ ID NO: 1148041 - RNA, 19 nt, Artificial Sequence
  Description of Artificial Sequence: Synthetic oligonucleotide
uuuagguugauaacaccag

SEQ ID NO: 1148042 - RNA, 19 nt, Artificial Sequence
  Description of Artificial Sequence: Synthetic oligonucleotide
aucucuaugaacucaggag

SEQ ID NO: 1148043 - RNA, 19 nt, Artificial Sequence
  Description of Artificial Sequence: Synthetic oligonucleotide
uuuggauccaugauucgag

SEQ ID NO: 1148044 - RNA, 19 nt, Artificial Sequence
  Description of Artificial Sequence: Synthetic oligonucleotide
ucuucaaugggucccacca

SEQ ID NO: 1148045 - RNA, 19 nt, Artificial Sequence
  Description of Artificial Sequence: Synthetic oligonucleotide
auagaacccuucuuggugg

SEQ ID NO: 1148046 - RNA, 19 nt, Artificial Sequence
  Description of Artificial Sequence: Synthetic oligonucleotide
ggucccaccauauagaaag

SEQ ID NO: 1148047 - RNA, 19 nt, Artificial Sequence
  Description of Artificial Sequence: Synthetic oligonucleotide
ucgggcaacaucauaaugu

SEQ ID NO: 1148048 - RNA, 19 nt, Artificial Sequence
  Description of Artificial Sequence: Synthetic oligonucleotide
ucuuuuagguugauaacac

SEQ ID NO: 1148049 - RNA, 19 nt, Artificial Sequence
  Description of Artificial Sequence: Synthetic oligonucleotide
uaaccaagccuucaguacc

SEQ ID NO: 1148050 - RNA, 19 nt, Artificial Sequence
  Description of Artificial Sequence: Synthetic oligonucleotide
aaugacguucaugauucgg

SEQ ID NO: 1148051 - RNA, 19 nt, Artificial Sequence
  Description of Artificial Sequence: Synthetic oligonucleotide
aaggucucuggaccgacgg

SEQ ID NO: 1148052 - RNA, 19 nt, Artificial Sequence
  Description of Artificial Sequence: Synthetic oligonucleotide
uuagcgacauuguugauua

SEQ ID NO: 1148053 - RNA, 19 nt, Artificial Sequence
  Description of Artificial Sequence: Synthetic oligonucleotide
auagaaagcuugcucuggg

SEQ ID NO: 1148054 - RNA, 19 nt, Artificial Sequence
  Description of Artificial Sequence: Synthetic oligonucleotide
guacaaaucauugccuucg

SEQ ID NO: 1148055 - RNA, 19 nt, Artificial Sequence
  Description of Artificial Sequence: Synthetic oligonucleotide
agaguaaccaccaugggcu

SEQ ID NO: 1148056 - RNA, 19 nt, Artificial Sequence
  Description of Artificial Sequence: Synthetic oligonucleotide
acaagacucaacauggcgg

SEQ ID NO: 1148057 - RNA, 19 nt, Artificial Sequence
  Description of Artificial Sequence: Synthetic oligonucleotide
auagaugcccaacucagca

SEQ ID NO: 1148058 - RNA, 19 nt, Artificial Sequence
  Description of Artificial Sequence: Synthetic oligonucleotide
uccagggcauuuaggaugg

SEQ ID NO: 1148059 - RNA, 19 nt, Artificial Sequence
  Description of Artificial Sequence: Synthetic oligonucleotide
aguucauccauacccaaga

SEQ ID NO: 1148060 - RNA, 19 nt, Artificial Sequence
  Description of Artificial Sequence: Synthetic oligonucleotide
ugcaucguacccaugucag

SEQ ID NO: 1148061 - RNA, 19 nt, Artificial Sequence
  Description of Artificial Sequence: Synthetic oligonucleotide
aacuccaugaucaguacug

SEQ ID NO: 1148062 - RNA, 19 nt, Artificial Sequence
  Description of Artificial Sequence: Synthetic oligonucleotide
uuugauugggccucucuca

SEQ ID NO: 1148063 - RNA, 19 nt, Artificial Sequence
  Description of Artificial Sequence: Synthetic oligonucleotide
aaaugggcaaaaguaguug

SEQ ID NO: 1148064 - RNA, 19 nt, Artificial Sequence
  Description of Artificial Sequence: Synthetic oligonucleotide
uagguugauaacaccagac

SEQ ID NO: 1148065 - RNA, 19 nt, Artificial Sequence
  Description of Artificial Sequence: Synthetic oligonucleotide
augacguucaugauucggc

SEQ ID NO: 1148066 - RNA, 19 nt, Artificial Sequence
  Description of Artificial Sequence: Synthetic oligonucleotide
uggauagaugcccaacuca

SEQ ID NO: 1148067 - RNA, 19 nt, Artificial Sequence
  Description of Artificial Sequence: Synthetic oligonucleotide
agggguguacacuuuauug

SEQ ID NO: 1148068 - RNA, 19 nt, Artificial Sequence
  Description of Artificial Sequence: Synthetic oligonucleotide
augaauaggagcaaauugu

SEQ ID NO: 1148069 - RNA, 19 nt, Artificial Sequence
  Description of Artificial Sequence: Synthetic oligonucleotide
uucgcauaggacaucacau

SEQ ID NO: 1148070 - RNA, 19 nt, Artificial Sequence
  Description of Artificial Sequence: Synthetic oligonucleotide
gauucugcccaauaaggca

SEQ ID NO: 1148071 - RNA, 19 nt, Artificial Sequence
  Description of Artificial Sequence: Synthetic oligonucleotide
auaacaccagacucaauca

SEQ ID NO: 1148072 - RNA, 19 nt, Artificial Sequence
  Description of Artificial Sequence: Synthetic oligonucleotide
gccaacaauauuuggaucc

SEQ ID NO: 1148073 - RNA, 19 nt, Artificial Sequence
  Description of Artificial Sequence: Synthetic oligonucleotide
cagaguaaccaccaugggc

SEQ ID NO: 1148074 - RNA, 19 nt, Artificial Sequence
  Description of Artificial Sequence: Synthetic oligonucleotide
aaaguaguugcaggggcag

SEQ ID NO: 1148075 - RNA, 19 nt, Artificial Sequence
  Description of Artificial Sequence: Synthetic oligonucleotide
cuaaccaagccuucaguac

SEQ ID NO: 1148076 - RNA, 19 nt, Artificial Sequence
  Description of Artificial Sequence: Synthetic oligonucleotide
agggauucugcccaauaag

SEQ ID NO: 1148077 - RNA, 19 nt, Artificial Sequence
  Description of Artificial Sequence: Synthetic oligonucleotide
ugaauaggagcaaauuguu

SEQ ID NO: 1148078 - RNA, 19 nt, Artificial Sequence
  Description of Artificial Sequence: Synthetic oligonucleotide
cuuuuagguugauaacacc

SEQ ID NO: 1148079 - RNA, 19 nt, Artificial Sequence
  Description of Artificial Sequence: Synthetic oligonucleotide
guaccauccauagcaaugg

SEQ ID NO: 1148080 - RNA, 19 nt, Artificial Sequence
  Description of Artificial Sequence: Synthetic oligonucleotide
agcgacauuguugauuaac

SEQ ID NO: 1148081 - RNA, 19 nt, Artificial Sequence
  Description of Artificial Sequence: Synthetic oligonucleotide
ucagcaacgguaagaccag

SEQ ID NO: 1148082 - RNA, 19 nt, Artificial Sequence
  Description of Artificial Sequence: Synthetic oligonucleotide
cauauagaaagcuugcucu

SEQ ID NO: 1148083 - RNA, 19 nt, Artificial Sequence
  Description of Artificial Sequence: Synthetic oligonucleotide
acacucaucucuaugaacu

SEQ ID NO: 1148084 - RNA, 19 nt, Artificial Sequence
  Description of Artificial Sequence: Synthetic oligonucleotide
agguucuccaaugacguuc

SEQ ID NO: 1148085 - RNA, 19 nt, Artificial Sequence
  Description of Artificial Sequence: Synthetic oligonucleotide
aagggauucugcccaauaa

SEQ ID NO: 1148086 - RNA, 19 nt, Artificial Sequence
  Description of Artificial Sequence: Synthetic oligonucleotide
ugacguucaugauucggcc

SEQ ID NO: 1148087 - RNA, 19 nt, Artificial Sequence
  Description of Artificial Sequence: Synthetic oligonucleotide
cauaggacaucacaucuuc

SEQ ID NO: 1148088 - RNA, 19 nt, Artificial Sequence
  Description of Artificial Sequence: Synthetic oligonucleotide
uggauccaugauucgagag

SEQ ID NO: 1148089 - RNA, 19 nt, Artificial Sequence
  Description of Artificial Sequence: Synthetic oligonucleotide
acccucaagaugcaugcuc

SEQ ID NO: 1148090 - RNA, 19 nt, Artificial Sequence
  Description of Artificial Sequence: Synthetic oligonucleotide
caccauauagaaagcuugc

SEQ ID NO: 1148091 - RNA, 19 nt, Artificial Sequence
  Description of Artificial Sequence: Synthetic oligonucleotide
cauccauagcaaugguucg

SEQ ID NO: 1148092 - RNA, 19 nt, Artificial Sequence
  Description of Artificial Sequence: Synthetic oligonucleotide
aucauaauguucauugcca

SEQ ID NO: 1148093 - RNA, 19 nt, Artificial Sequence
  Description of Artificial Sequence: Synthetic oligonucleotide
guugauaacaccagacuca

SEQ ID NO: 1148094 - RNA, 19 nt, Artificial Sequence
  Description of Artificial Sequence: Synthetic oligonucleotide
augggcuuuagcgacauug

SEQ ID NO: 1148095 - RNA, 19 nt, Artificial Sequence
  Description of Artificial Sequence: Synthetic oligonucleotide
cccacaagacucaacaugg

SEQ ID NO: 1148096 - RNA, 19 nt, Artificial Sequence
  Description of Artificial Sequence: Synthetic oligonucleotide
uuucccauaugacccguga

SEQ ID NO: 1148097 - RNA, 19 nt, Artificial Sequence
  Description of Artificial Sequence: Synthetic oligonucleotide
cuggaauccuuuaaugguc

SEQ ID NO: 1148098 - RNA, 19 nt, Artificial Sequence
  Description of Artificial Sequence: Synthetic oligonucleotide
aacuggacguccaccacgg

SEQ ID NO: 1148099 - RNA, 19 nt, Artificial Sequence
  Description of Artificial Sequence: Synthetic oligonucleotide
ucgaacuggacguccacca

SEQ ID NO: 1148100 - RNA, 19 nt, Artificial Sequence
  Description of Artificial Sequence: Synthetic oligonucleotide
aguaguugcaggggcaggg

SEQ ID NO: 1148101 - RNA, 19 nt, Artificial Sequence
  Description of Artificial Sequence: Synthetic oligonucleotide
ugauucgagagguggaguc

SEQ ID NO: 1148102 - RNA, 19 nt, Artificial Sequence
  Description of Artificial Sequence: Synthetic oligonucleotide
uccuggagagauuuguagu

SEQ ID NO: 1148103 - RNA, 19 nt, Artificial Sequence
  Description of Artificial Sequence: Synthetic oligonucleotide
aguaccauccauagcaaug

SEQ ID NO: 1148104 - RNA, 19 nt, Artificial Sequence
  Description of Artificial Sequence: Synthetic oligonucleotide
aaucauugccuucgcgggu

SEQ ID NO: 1148105 - RNA, 19 nt, Artificial Sequence
  Description of Artificial Sequence: Synthetic oligonucleotide
caaucccucaucgaacugg

SEQ ID NO: 1148106 - RNA, 19 nt, Artificial Sequence
  Description of Artificial Sequence: Synthetic oligonucleotide
uacucuucgcauaggacau

SEQ ID NO: 1148107 - RNA, 19 nt, Artificial Sequence
  Description of Artificial Sequence: Synthetic oligonucleotide
acgucugcgccgcauaguc

SEQ ID NO: 1148108 - RNA, 19 nt, Artificial Sequence
  Description of Artificial Sequence: Synthetic oligonucleotide
cacagucaauuuaucuucc

SEQ ID NO: 1148109 - RNA, 19 nt, Artificial Sequence
  Description of Artificial Sequence: Synthetic oligonucleotide
uggaccgacgggaauuuug

SEQ ID NO: 1148110 - RNA, 19 nt, Artificial Sequence
  Description of Artificial Sequence: Synthetic oligonucleotide
uuaacuccaugaucaguac

SEQ ID NO: 1148111 - RNA, 19 nt, Artificial Sequence
  Description of Artificial Sequence: Synthetic oligonucleotide
gucauccgcaggcacauag

SEQ ID NO: 1148112 - RNA, 19 nt, Artificial Sequence
  Description of Artificial Sequence: Synthetic oligonucleotide
gggaauuuugauuggugcc

SEQ ID NO: 1148113 - RNA, 19 nt, Artificial Sequence
  Description of Artificial Sequence: Synthetic oligonucleotide
aucguacccaugucagugg

SEQ ID NO: 1148114 - RNA, 19 nt, Artificial Sequence
  Description of Artificial Sequence: Synthetic oligonucleotide
uuuaggaugggcggcaauc

SEQ ID NO: 1148115 - RNA, 19 nt, Artificial Sequence
  Description of Artificial Sequence: Synthetic oligonucleotide
uuuagcgacauuguugauu

SEQ ID NO: 1148116 - RNA, 19 nt, Artificial Sequence
  Description of Artificial Sequence: Synthetic oligonucleotide
acguucaugauucggccca

SEQ ID NO: 1148117 - RNA, 19 nt, Artificial Sequence
  Description of Artificial Sequence: Synthetic oligonucleotide
auuuggauccaugauucga

SEQ ID NO: 1148118 - RNA, 19 nt, Artificial Sequence
  Description of Artificial Sequence: Synthetic oligonucleotide
gacguucaugauucggccc

SEQ ID NO: 1148119 - RNA, 19 nt, Artificial Sequence
  Description of Artificial Sequence: Synthetic oligonucleotide
aguauucagcaacgguaag

SEQ ID NO: 1148120 - RNA, 19 nt, Artificial Sequence
  Description of Artificial Sequence: Synthetic oligonucleotide
uuaggaugggcggcaaucc

SEQ ID NO: 1148121 - RNA, 19 nt, Artificial Sequence
  Description of Artificial Sequence: Synthetic oligonucleotide
gcuuuagcgacauuguuga

SEQ ID NO: 1148122 - RNA, 19 nt, Artificial Sequence
  Description of Artificial Sequence: Synthetic oligonucleotide
caauagguucuccaaugac

SEQ ID NO: 1148123 - RNA, 19 nt, Artificial Sequence
  Description of Artificial Sequence: Synthetic oligonucleotide
uugauaacaccagacucaa

SEQ ID NO: 1148124 - RNA, 19 nt, Artificial Sequence
  Description of Artificial Sequence: Synthetic oligonucleotide
uuugauuggugccccggaa

SEQ ID NO: 1148125 - RNA, 19 nt, Artificial Sequence
  Description of Artificial Sequence: Synthetic oligonucleotide
gacggagacgucugcgccg

SEQ ID NO: 1148126 - RNA, 19 nt, Artificial Sequence
  Description of Artificial Sequence: Synthetic oligonucleotide
ucaccggcuaaaaucugcu

SEQ ID NO: 1148127 - RNA, 19 nt, Artificial Sequence
  Description of Artificial Sequence: Synthetic oligonucleotide
uagccuacagcagaaggga

SEQ ID NO: 1148128 - RNA, 19 nt, Artificial Sequence
  Description of Artificial Sequence: Synthetic oligonucleotide
aggagcuucagcaugaaua

SEQ ID NO: 1148129 - RNA, 19 nt, Artificial Sequence
  Description of Artificial Sequence: Synthetic oligonucleotide
acgguuguagcauccaaau

SEQ ID NO: 1148130 - RNA, 19 nt, Artificial Sequence
  Description of Artificial Sequence: Synthetic oligonucleotide
ugguacaaaucauugccuu

SEQ ID NO: 1148131 - RNA, 19 nt, Artificial Sequence
  Description of Artificial Sequence: Synthetic oligonucleotide
agcaaacacagaguaacca

SEQ ID NO: 1148132 - RNA, 19 nt, Artificial Sequence
  Description of Artificial Sequence: Synthetic oligonucleotide
auauaccaacgccaccuug

SEQ ID NO: 1148133 - RNA, 19 nt, Artificial Sequence
  Description of Artificial Sequence: Synthetic oligonucleotide
ugggcuuuagcgacauugu

SEQ ID NO: 1148134 - RNA, 19 nt, Artificial Sequence
  Description of Artificial Sequence: Synthetic oligonucleotide
gggauucugcccaauaagg

SEQ ID NO: 1148135 - RNA, 19 nt, Artificial Sequence
  Description of Artificial Sequence: Synthetic oligonucleotide
caucguacccaugucagug

SEQ ID NO: 1148136 - RNA, 19 nt, Artificial Sequence
  Description of Artificial Sequence: Synthetic oligonucleotide
caugauucgagagguggag

SEQ ID NO: 1148137 - RNA, 19 nt, Artificial Sequence
  Description of Artificial Sequence: Synthetic oligonucleotide
ccgacgggaauuuugauug

SEQ ID NO: 1148138 - RNA, 19 nt, Artificial Sequence
  Description of Artificial Sequence: Synthetic oligonucleotide
gacacagucaauuuaucuu

SEQ ID NO: 1148139 - RNA, 19 nt, Artificial Sequence
  Description of Artificial Sequence: Synthetic oligonucleotide
auccauagcaaugguucgg

SEQ ID NO: 1148140 - RNA, 19 nt, Artificial Sequence
  Description of Artificial Sequence: Synthetic oligonucleotide
ggauagaugcccaacucag

SEQ ID NO: 1148141 - RNA, 19 nt, Artificial Sequence
  Description of Artificial Sequence: Synthetic oligonucleotide
cucagcaauggcacgggac

SEQ ID NO: 1148142 - RNA, 19 nt, Artificial Sequence
  Description of Artificial Sequence: Synthetic oligonucleotide
gagguagcaucuuuuaggu

SEQ ID NO: 1148143 - RNA, 19 nt, Artificial Sequence
  Description of Artificial Sequence: Synthetic oligonucleotide
auaugacccgugaagaccu

SEQ ID NO: 1148144 - RNA, 19 nt, Artificial Sequence
  Description of Artificial Sequence: Synthetic oligonucleotide
acgguaagaccagucagag

SEQ ID NO: 1148145 - RNA, 19 nt, Artificial Sequence
  Description of Artificial Sequence: Synthetic oligonucleotide
gauucgagagguggagucc

SEQ ID NO: 1148146 - RNA, 19 nt, Artificial Sequence
  Description of Artificial Sequence: Synthetic oligonucleotide
acccgugaagaccucagca

SEQ ID NO: 1148147 - RNA, 19 nt, Artificial Sequence
  Description of Artificial Sequence: Synthetic oligonucleotide
caguaggacaucuugaccu

SEQ ID NO: 1148148 - RNA, 19 nt, Artificial Sequence
  Description of Artificial Sequence: Synthetic oligonucleotide
gauagaugcccaacucagc

SEQ ID NO: 1148149 - RNA, 19 nt, Artificial Sequence
  Description of Artificial Sequence: Synthetic oligonucleotide
ucguacccaugucaguggc

SEQ ID NO: 1148150 - RNA, 19 nt, Artificial Sequence
  Description of Artificial Sequence: Synthetic oligonucleotide
uugauugggccucucucau

SEQ ID NO: 1148151 - RNA, 19 nt, Artificial Sequence
  Description of Artificial Sequence: Synthetic oligonucleotide
ucuugcccgggacacaguc

SEQ ID NO: 1148152 - RNA, 19 nt, Artificial Sequence
  Description of Artificial Sequence: Synthetic oligonucleotide
uccauagcaaugguucgga

SEQ ID NO: 1148153 - RNA, 19 nt, Artificial Sequence
  Description of Artificial Sequence: Synthetic oligonucleotide
uaggaugggcggcaauccc

SEQ ID NO: 1148154 - RNA, 19 nt, Artificial Sequence
  Description of Artificial Sequence: Synthetic oligonucleotide
cuggagagauuuguagucc

SEQ ID NO: 1148155 - RNA, 19 nt, Artificial Sequence
  Description of Artificial Sequence: Synthetic oligonucleotide
ugagacaagaagcgcugua

SEQ ID NO: 1148156 - RNA, 19 nt, Artificial Sequence
  Description of Artificial Sequence: Synthetic oligonucleotide
ucgcauaggacaucacauc

SEQ ID NO: 1148157 - RNA, 19 nt, Artificial Sequence
  Description of Artificial Sequence: Synthetic oligonucleotide
cuagagugggcugguagcc

SEQ ID NO: 1148158 - RNA, 19 nt, Artificial Sequence
  Description of Artificial Sequence: Synthetic oligonucleotide
caccaugggcuuuagcgac

SEQ ID NO: 1148159 - RNA, 19 nt, Artificial Sequence
  Description of Artificial Sequence: Synthetic oligonucleotide
gacucaacauggcggaguc

SEQ ID NO: 1148160 - RNA, 19 nt, Artificial Sequence
  Description of Artificial Sequence: Synthetic oligonucleotide
guacugucuucccaacgcc

SEQ ID NO: 1148161 - RNA, 19 nt, Artificial Sequence
  Description of Artificial Sequence: Synthetic oligonucleotide
agaggugauagaacccuuc

SEQ ID NO: 1148162 - RNA, 19 nt, Artificial Sequence
  Description of Artificial Sequence: Synthetic oligonucleotide
acgagcaccaggugguuca

SEQ ID NO: 1148163 - RNA, 19 nt, Artificial Sequence
  Description of Artificial Sequence: Synthetic oligonucleotide
agccccaccgaagaguccg

SEQ ID NO: 1148164 - RNA, 19 nt, Artificial Sequence
  Description of Artificial Sequence: Synthetic oligonucleotide
cuucgcauaggacaucaca

SEQ ID NO: 1148165 - RNA, 19 nt, Artificial Sequence
  Description of Artificial Sequence: Synthetic oligonucleotide
gggcauuuaggaugggcgg

SEQ ID NO: 1148166 - RNA, 19 nt, Artificial Sequence
  Description of Artificial Sequence: Synthetic oligonucleotide
cacacgccccacaagacuc

SEQ ID NO: 1148167 - RNA, 19 nt, Artificial Sequence
  Description of Artificial Sequence: Synthetic oligonucleotide
agaguccgaucuugccacc

SEQ ID NO: 1148168 - RNA, 19 nt, Artificial Sequence
  Description of Artificial Sequence: Synthetic oligonucleotide
caucucuaugaacucagga

SEQ ID NO: 1148169 - RNA, 19 nt, Artificial Sequence
  Description of Artificial Sequence: Synthetic oligonucleotide
ucauccgcaggcacauaga

SEQ ID NO: 1148170 - RNA, 19 nt, Artificial Sequence
  Description of Artificial Sequence: Synthetic oligonucleotide
ugccaacaauauuuggauc

SEQ ID NO: 1148171 - RNA, 19 nt, Artificial Sequence
  Description of Artificial Sequence: Synthetic oligonucleotide
cuggauagaugcccaacuc

SEQ ID NO: 1148172 - RNA, 19 nt, Artificial Sequence
  Description of Artificial Sequence: Synthetic oligonucleotide
aaucccucaucgaacugga

SEQ ID NO: 1148173 - RNA, 19 nt, Artificial Sequence
  Description of Artificial Sequence: Synthetic oligonucleotide
uggcguauggggccagcag

SEQ ID NO: 1148174 - RNA, 19 nt, Artificial Sequence
  Description of Artificial Sequence: Synthetic oligonucleotide
uucccauaugacccgugaa

SEQ ID NO: 1148175 - RNA, 19 nt, Artificial Sequence
  Description of Artificial Sequence: Synthetic oligonucleotide
gggguguacacuuuauuga

SEQ ID NO: 1148176 - RNA, 19 nt, Artificial Sequence
  Description of Artificial Sequence: Synthetic oligonucleotide
ugggucccaccauauagaa

SEQ ID NO: 1148177 - RNA, 19 nt, Artificial Sequence
  Description of Artificial Sequence: Synthetic oligonucleotide
accgacgggaauuuugauu

SEQ ID NO: 1148178 - RNA, 19 nt, Artificial Sequence
  Description of Artificial Sequence: Synthetic oligonucleotide
auaccaacgccaccuugga

SEQ ID NO: 1148179 - RNA, 19 nt, Artificial Sequence
  Description of Artificial Sequence: Synthetic oligonucleotide
cagucugguaucccugccc

SEQ ID NO: 1148180 - RNA, 19 nt, Artificial Sequence
  Description of Artificial Sequence: Synthetic oligonucleotide
cucaucgaacuggacgucc

SEQ ID NO: 1148181 - RNA, 19 nt, Artificial Sequence
  Description of Artificial Sequence: Synthetic oligonucleotide
augguacaaaucauugccu

SEQ ID NO: 1148182 - RNA, 19 nt, Artificial Sequence
  Description of Artificial Sequence: Synthetic oligonucleotide
ggauucugcccaauaaggc

SEQ ID NO: 1148183 - RNA, 19 nt, Artificial Sequence
  Description of Artificial Sequence: Synthetic oligonucleotide
aagacucaacauggcggag

SEQ ID NO: 1148184 - RNA, 19 nt, Artificial Sequence
  Description of Artificial Sequence: Synthetic oligonucleotide
acggagacgucugcgccgc

SEQ ID NO: 1148185 - RNA, 19 nt, Artificial Sequence
  Description of Artificial Sequence: Synthetic oligonucleotide
ugagggguguacacuuuau

SEQ ID NO: 1148186 - RNA, 19 nt, Artificial Sequence
  Description of Artificial Sequence: Synthetic oligonucleotide
aaccaagccuucaguacca

SEQ ID NO: 1148187 - RNA, 19 nt, Artificial Sequence
  Description of Artificial Sequence: Synthetic oligonucleotide
guucggacggugcucuccc

SEQ ID NO: 1148188 - RNA, 19 nt, Artificial Sequence
  Description of Artificial Sequence: Synthetic oligonucleotide
uggugccccggaauccagg

SEQ ID NO: 1148189 - RNA, 19 nt, Artificial Sequence
  Description of Artificial Sequence: Synthetic oligonucleotide
cucgggcaacaucauaaug

SEQ ID NO: 1148190 - RNA, 19 nt, Artificial Sequence
  Description of Artificial Sequence: Synthetic oligonucleotide
agguggaguccagaggauc

SEQ ID NO: 1148191 - RNA, 19 nt, Artificial Sequence
  Description of Artificial Sequence: Synthetic oligonucleotide
gucaccggcuaaaaucugc

SEQ ID NO: 1148192 - RNA, 19 nt, Artificial Sequence
  Description of Artificial Sequence: Synthetic oligonucleotide
auucgagagguggagucca

SEQ ID NO: 1148193 - RNA, 19 nt, Artificial Sequence
  Description of Artificial Sequence: Synthetic oligonucleotide
uucgagagguggaguccag

SEQ ID NO: 1148194 - RNA, 19 nt, Artificial Sequence
  Description of Artificial Sequence: Synthetic oligonucleotide
uggccccuaaccaagccuu

SEQ ID NO: 1148195 - RNA, 19 nt, Artificial Sequence
  Description of Artificial Sequence: Synthetic oligonucleotide
guagcugcgccugggguag

SEQ ID NO: 1148196 - RNA, 19 nt, Artificial Sequence
  Description of Artificial Sequence: Synthetic oligonucleotide
gccgcauagucucuggcag

SEQ ID NO: 1148197 - RNA, 19 nt, Artificial Sequence
  Description of Artificial Sequence: Synthetic oligonucleotide
agacucaacauggcggagu

SEQ ID NO: 1148198 - RNA, 19 nt, Artificial Sequence
  Description of Artificial Sequence: Synthetic oligonucleotide
ggcuagagugggcugguag

SEQ ID NO: 1148199 - RNA, 19 nt, Artificial Sequence
  Description of Artificial Sequence: Synthetic oligonucleotide
ccuggagagauuuguaguc

SEQ ID NO: 1148200 - RNA, 19 nt, Artificial Sequence
  Description of Artificial Sequence: Synthetic oligonucleotide
ccacccuuggcguaugggg

SEQ ID NO: 1148201 - RNA, 19 nt, Artificial Sequence
  Description of Artificial Sequence: Synthetic oligonucleotide
ccgaugaccgccacgauuc

SEQ ID NO: 1148202 - RNA, 19 nt, Artificial Sequence
  Description of Artificial Sequence: Synthetic oligonucleotide
gaccgccacgauucgcccg

SEQ ID NO: 1148203 - RNA, 19 nt, Artificial Sequence
  Description of Artificial Sequence: Synthetic oligonucleotide
uacccgggcacgagcacca

SEQ ID NO: 1148204 - RNA, 19 nt, Artificial Sequence
  Description of Artificial Sequence: Synthetic oligonucleotide
acucaacauggcggagucc

SEQ ID NO: 1148205 - RNA, 19 nt, Artificial Sequence
  Description of Artificial Sequence: Synthetic oligonucleotide
gcggaguccggguagagac

SEQ ID NO: 1148206 - RNA, 19 nt, Artificial Sequence
  Description of Artificial Sequence: Synthetic oligonucleotide
gaggugauagaacccuucu

SEQ ID NO: 1148207 - RNA, 19 nt, Artificial Sequence
  Description of Artificial Sequence: Synthetic oligonucleotide
ugggguagcgccgccgaag

SEQ ID NO: 1148208 - RNA, 19 nt, Artificial Sequence
  Description of Artificial Sequence: Synthetic oligonucleotide
gccacgauucgcccggugg

SEQ ID NO: 1148209 - RNA, 19 nt, Artificial Sequence
  Description of Artificial Sequence: Synthetic oligonucleotide
agcgccugccuucggcgac

SEQ ID NO: 1148210 - RNA, 19 nt, Artificial Sequence
  Description of Artificial Sequence: Synthetic oligonucleotide
cgggaauuuugauuggugc

SEQ ID NO: 1148211 - RNA, 19 nt, Artificial Sequence
  Description of Artificial Sequence: Synthetic oligonucleotide
uacccaugucaguggcuag

SEQ ID NO: 1148212 - RNA, 19 nt, Artificial Sequence
  Description of Artificial Sequence: Synthetic oligonucleotide
ugauucggcccaaggucuc

SEQ ID NO: 1148213 - RNA, 19 nt, Artificial Sequence
  Description of Artificial Sequence: Synthetic oligonucleotide
ucauagucaccggcuaaaa

SEQ ID NO: 1148214 - RNA, 19 nt, Artificial Sequence
  Description of Artificial Sequence: Synthetic oligonucleotide
gcaacgguaagaccaguca

SEQ ID NO: 1148215 - RNA, 19 nt, Artificial Sequence
  Description of Artificial Sequence: Synthetic oligonucleotide
acgggaauuuugauuggug

SEQ ID NO: 1148216 - RNA, 19 nt, Artificial Sequence
  Description of Artificial Sequence: Synthetic oligonucleotide
ucuucgcauaggacaucac

SEQ ID NO: 1148217 - RNA, 19 nt, Artificial Sequence
  Description of Artificial Sequence: Synthetic oligonucleotide
cucuaugaacucaggagcu

SEQ ID NO: 1148218 - RNA, 19 nt, Artificial Sequence
  Description of Artificial Sequence: Synthetic oligonucleotide
aguugcaggggcaggguca

SEQ ID NO: 1148219 - RNA, 19 nt, Artificial Sequence
  Description of Artificial Sequence: Synthetic oligonucleotide
aagggcugaguccccgcaa

SEQ ID NO: 1148220 - RNA, 19 nt, Artificial Sequence
  Description of Artificial Sequence: Synthetic oligonucleotide
gaugaccgccacgauucgc

SEQ ID NO: 1148221 - RNA, 19 nt, Artificial Sequence
  Description of Artificial Sequence: Synthetic oligonucleotide
gcuggaauccuuuaauggu

SEQ ID NO: 1148222 - RNA, 19 nt, Artificial Sequence
  Description of Artificial Sequence: Synthetic oligonucleotide
agcaugaauaggagcaaau

SEQ ID NO: 1148223 - RNA, 19 nt, Artificial Sequence
  Description of Artificial Sequence: Synthetic oligonucleotide
gaagggcugaguccccgca

SEQ ID NO: 1148224 - RNA, 19 nt, Artificial Sequence
  Description of Artificial Sequence: Synthetic oligonucleotide
cugcaucguacccauguca

SEQ ID NO: 1148225 - RNA, 19 nt, Artificial Sequence
  Description of Artificial Sequence: Synthetic oligonucleotide
ugaccgccacgauucgccc

SEQ ID NO: 1148226 - RNA, 19 nt, Artificial Sequence
  Description of Artificial Sequence: Synthetic oligonucleotide
aggacuuucuggccccuaa

SEQ ID NO: 1148227 - RNA, 19 nt, Artificial Sequence
  Description of Artificial Sequence: Synthetic oligonucleotide
auuuaggaugggcggcaau

SEQ ID NO: 1148228 - RNA, 19 nt, Artificial Sequence
  Description of Artificial Sequence: Synthetic oligonucleotide
augauucgagagguggagu

SEQ ID NO: 1148229 - RNA, 19 nt, Artificial Sequence
  Description of Artificial Sequence: Synthetic oligonucleotide
uuuucuugcccgggacaca

SEQ ID NO: 1148230 - RNA, 19 nt, Artificial Sequence
  Description of Artificial Sequence: Synthetic oligonucleotide
ugggcggcaaucccucauc

SEQ ID NO: 1148231 - RNA, 19 nt, Artificial Sequence
  Description of Artificial Sequence: Synthetic oligonucleotide
gguagcgccgccgaagggc

SEQ ID NO: 1148232 - RNA, 19 nt, Artificial Sequence
  Description of Artificial Sequence: Synthetic oligonucleotide
acuccaugaucaguacugu

SEQ ID NO: 1148233 - RNA, 19 nt, Artificial Sequence
  Description of Artificial Sequence: Synthetic oligonucleotide
ccccacaagacucaacaug

SEQ ID NO: 1148234 - RNA, 19 nt, Artificial Sequence
  Description of Artificial Sequence: Synthetic oligonucleotide
gagcuacccgggcacgagc

SEQ ID NO: 1148235 - RNA, 19 nt, Artificial Sequence
  Description of Artificial Sequence: Synthetic oligonucleotide
augggucccaccauauaga

SEQ ID NO: 1148236 - RNA, 19 nt, Artificial Sequence
  Description of Artificial Sequence: Synthetic oligonucleotide
ugauugggccucucucauc

SEQ ID NO: 1148237 - RNA, 19 nt, Artificial Sequence
  Description of Artificial Sequence: Synthetic oligonucleotide
augguucggacggugcucu

SEQ ID NO: 1148238 - RNA, 19 nt, Artificial Sequence
  Description of Artificial Sequence: Synthetic oligonucleotide
cacgguuguagcauccaaa

SEQ ID NO: 1148239 - RNA, 19 nt, Artificial Sequence
  Description of Artificial Sequence: Synthetic oligonucleotide
ggcauuuaggaugggcggc

SEQ ID NO: 1148240 - RNA, 19 nt, Artificial Sequence
  Description of Artificial Sequence: Synthetic oligonucleotide
cuacccgggcacgagcacc

SEQ ID NO: 1148241 - RNA, 19 nt, Artificial Sequence
  Description of Artificial Sequence: Synthetic oligonucleotide
cugcgccugggguagcgcc

SEQ ID NO: 1148242 - RNA, 19 nt, Artificial Sequence
  Description of Artificial Sequence: Synthetic oligonucleotide
cuucgcggguccucucacc

SEQ ID NO: 1148243 - RNA, 19 nt, Artificial Sequence
  Description of Artificial Sequence: Synthetic oligonucleotide
gggguagcgccgccgaagg

SEQ ID NO: 1148244 - RNA, 19 nt, Artificial Sequence
  Description of Artificial Sequence: Synthetic oligonucleotide
caggugguucauucaucug

SEQ ID NO: 1148245 - RNA, 19 nt, Artificial Sequence
  Description of Artificial Sequence: Synthetic oligonucleotide
ccaacucagcaauggcacg

SEQ ID NO: 1148246 - RNA, 19 nt, Artificial Sequence
  Description of Artificial Sequence: Synthetic oligonucleotide
agagcuacccgggcacgag

SEQ ID NO: 1148247 - RNA, 19 nt, Artificial Sequence
  Description of Artificial Sequence: Synthetic oligonucleotide
ucucuggaccgacgggaau

SEQ ID NO: 1148248 - RNA, 19 nt, Artificial Sequence
  Description of Artificial Sequence: Synthetic oligonucleotide
aacccucaagaugcaugcu

SEQ ID NO: 1148249 - RNA, 19 nt, Artificial Sequence
  Description of Artificial Sequence: Synthetic oligonucleotide
caccggcuaaaaucugcug

SEQ ID NO: 1148250 - RNA, 19 nt, Artificial Sequence
  Description of Artificial Sequence: Synthetic oligonucleotide
gagacaagaagcgcuguau

SEQ ID NO: 1148251 - RNA, 19 nt, Artificial Sequence
  Description of Artificial Sequence: Synthetic oligonucleotide
acucuucgcauaggacauc

SEQ ID NO: 1148252 - RNA, 19 nt, Artificial Sequence
  Description of Artificial Sequence: Synthetic oligonucleotide
gauggaccgcggcgggagc

SEQ ID NO: 1148253 - RNA, 19 nt, Artificial Sequence
  Description of Artificial Sequence: Synthetic oligonucleotide
ccgugaagaccucagcaac

SEQ ID NO: 1148254 - RNA, 19 nt, Artificial Sequence
  Description of Artificial Sequence: Synthetic oligonucleotide
uaugacccgugaagaccuc

SEQ ID NO: 1148255 - RNA, 19 nt, Artificial Sequence
  Description of Artificial Sequence: Synthetic oligonucleotide
gaauaggagcaaauuguuu

SEQ ID NO: 1148256 - RNA, 19 nt, Artificial Sequence
  Description of Artificial Sequence: Synthetic oligonucleotide
gggcggcaaucccucaucg

SEQ ID NO: 1148257 - RNA, 19 nt, Artificial Sequence
  Description of Artificial Sequence: Synthetic oligonucleotide
uucaacccucaagaugcau

SEQ ID NO: 1148258 - RNA, 19 nt, Artificial Sequence
  Description of Artificial Sequence: Synthetic oligonucleotide
acccaugucaguggcuaga

SEQ ID NO: 1148259 - RNA, 19 nt, Artificial Sequence
  Description of Artificial Sequence: Synthetic oligonucleotide
ugccuucggcgacggagac

SEQ ID NO: 1148260 - RNA, 19 nt, Artificial Sequence
  Description of Artificial Sequence: Synthetic oligonucleotide
guggcagcgccugccuucg

SEQ ID NO: 1148261 - RNA, 19 nt, Artificial Sequence
  Description of Artificial Sequence: Synthetic oligonucleotide
ggguccucucaccaacacc

SEQ ID NO: 1148262 - RNA, 19 nt, Artificial Sequence
  Description of Artificial Sequence: Synthetic oligonucleotide
acgauucgcccgguggcag

SEQ ID NO: 1148263 - RNA, 19 nt, Artificial Sequence
  Description of Artificial Sequence: Synthetic oligonucleotide
ccugccuucggcgacggag

SEQ ID NO: 1148264 - RNA, 19 nt, Artificial Sequence
  Description of Artificial Sequence: Synthetic oligonucleotide
auccgcaggcacauagaug

SEQ ID NO: 1148265 - RNA, 19 nt, Artificial Sequence
  Description of Artificial Sequence: Synthetic oligonucleotide
guucauugccaacaauauu

SEQ ID NO: 1148266 - RNA, 19 nt, Artificial Sequence
  Description of Artificial Sequence: Synthetic oligonucleotide
augggcggcaaucccucau

SEQ ID NO: 1148267 - RNA, 19 nt, Artificial Sequence
  Description of Artificial Sequence: Synthetic oligonucleotide
ccgaagaguccgaucuugc

SEQ ID NO: 1148268 - RNA, 19 nt, Artificial Sequence
  Description of Artificial Sequence: Synthetic oligonucleotide
uucggacggugcucucccc

SEQ ID NO: 1148269 - RNA, 19 nt, Artificial Sequence
  Description of Artificial Sequence: Synthetic oligonucleotide
gcggcaaucccucaucgaa

SEQ ID NO: 1148270 - RNA, 19 nt, Artificial Sequence
  Description of Artificial Sequence: Synthetic oligonucleotide
cugccuucggcgacggaga

SEQ ID NO: 1148271 - RNA, 19 nt, Artificial Sequence
  Description of Artificial Sequence: Synthetic oligonucleotide
ccaaaaccagucugguauc

SEQ ID NO: 1148272 - RNA, 19 nt, Artificial Sequence
  Description of Artificial Sequence: Synthetic oligonucleotide
ccacgauucgcccgguggc

SEQ ID NO: 1148273 - RNA, 19 nt, Artificial Sequence
  Description of Artificial Sequence: Synthetic oligonucleotide
cgacauuguugauuaacuc

SEQ ID NO: 1148274 - RNA, 19 nt, Artificial Sequence
  Description of Artificial Sequence: Synthetic oligonucleotide
cuugcccgggacacaguca

SEQ ID NO: 1148275 - RNA, 19 nt, Artificial Sequence
  Description of Artificial Sequence: Synthetic oligonucleotide
ccuaaccaagccuucagua

SEQ ID NO: 1148276 - RNA, 19 nt, Artificial Sequence
  Description of Artificial Sequence: Synthetic oligonucleotide
agcuacccgggcacgagca

SEQ ID NO: 1148277 - RNA, 19 nt, Artificial Sequence
  Description of Artificial Sequence: Synthetic oligonucleotide
gacgggaauuuugauuggu

SEQ ID NO: 1148278 - RNA, 19 nt, Artificial Sequence
  Description of Artificial Sequence: Synthetic oligonucleotide
gaugggcggcaaucccuca

SEQ ID NO: 1148279 - RNA, 19 nt, Artificial Sequence
  Description of Artificial Sequence: Synthetic oligonucleotide
auucggcccaaggucucug

SEQ ID NO: 1148280 - RNA, 19 nt, Artificial Sequence
  Description of Artificial Sequence: Synthetic oligonucleotide
cuucaacccucaagaugca

SEQ ID NO: 1148281 - RNA, 19 nt, Artificial Sequence
  Description of Artificial Sequence: Synthetic oligonucleotide
gcaaugguucggacggugc

SEQ ID NO: 1148282 - RNA, 19 nt, Artificial Sequence
  Description of Artificial Sequence: Synthetic oligonucleotide
ggaccgacgggaauuuuga

SEQ ID NO: 1148283 - RNA, 19 nt, Artificial Sequence
  Description of Artificial Sequence: Synthetic oligonucleotide
gguucggacggugcucucc

SEQ ID NO: 1148284 - RNA, 19 nt, Artificial Sequence
  Description of Artificial Sequence: Synthetic oligonucleotide
ccggcuaaaaucugcugga

SEQ ID NO: 1148285 - RNA, 19 nt, Artificial Sequence
  Description of Artificial Sequence: Synthetic oligonucleotide
caaugguucggacggugcu

SEQ ID NO: 1148286 - RNA, 19 nt, Artificial Sequence
  Description of Artificial Sequence: Synthetic oligonucleotide
ccagccccaccgaagaguc

SEQ ID NO: 1148287 - RNA, 19 nt, Artificial Sequence
  Description of Artificial Sequence: Synthetic oligonucleotide
ccgcauagucucuggcagg

SEQ ID NO: 1148288 - RNA, 19 nt, Artificial Sequence
  Description of Artificial Sequence: Synthetic oligonucleotide
gagggguguacacuuuauu

SEQ ID NO: 1148289 - RNA, 19 nt, Artificial Sequence
  Description of Artificial Sequence: Synthetic oligonucleotide
cauagucaccggcuaaaau

SEQ ID NO: 1148290 - RNA, 19 nt, Artificial Sequence
  Description of Artificial Sequence: Synthetic oligonucleotide
gcaaucccucaucgaacug

SEQ ID NO: 1148291 - RNA, 19 nt, Artificial Sequence
  Description of Artificial Sequence: Synthetic oligonucleotide
ccaauaaggcagacaccuc

SEQ ID NO: 1148292 - RNA, 19 nt, Artificial Sequence
  Description of Artificial Sequence: Synthetic oligonucleotide
gcgacauuguugauuaacu

SEQ ID NO: 1148293 - RNA, 19 nt, Artificial Sequence
  Description of Artificial Sequence: Synthetic oligonucleotide
cuuggcguauggggccagc

SEQ ID NO: 1148294 - RNA, 19 nt, Artificial Sequence
  Description of Artificial Sequence: Synthetic oligonucleotide
uagcaaugguucggacggu

SEQ ID NO: 1148295 - RNA, 19 nt, Artificial Sequence
  Description of Artificial Sequence: Synthetic oligonucleotide
gcauuuaggaugggcggca

SEQ ID NO: 1148296 - RNA, 19 nt, Artificial Sequence
  Description of Artificial Sequence: Synthetic oligonucleotide
accaugggcuuuagcgaca

SEQ ID NO: 1148297 - RNA, 19 nt, Artificial Sequence
  Description of Artificial Sequence: Synthetic oligonucleotide
ggcuaaaaucugcuggaau

SEQ ID NO: 1148298 - RNA, 19 nt, Artificial Sequence
  Description of Artificial Sequence: Synthetic oligonucleotide
ucgcggguccucucaccaa

SEQ ID NO: 1148299 - RNA, 19 nt, Artificial Sequence
  Description of Artificial Sequence: Synthetic oligonucleotide
ggcgccgaugaccgccacg

SEQ ID NO: 1148300 - RNA, 19 nt, Artificial Sequence
  Description of Artificial Sequence: Synthetic oligonucleotide
ccauagcaaugguucggac

SEQ ID NO: 1148301 - RNA, 19 nt, Artificial Sequence
  Description of Artificial Sequence: Synthetic oligonucleotide
ccaacaauauuuggaucca

SEQ ID NO: 1148302 - RNA, 19 nt, Artificial Sequence
  Description of Artificial Sequence: Synthetic oligonucleotide
ccaggugguucauucaucu

SEQ ID NO: 1148303 - RNA, 19 nt, Artificial Sequence
  Description of Artificial Sequence: Synthetic oligonucleotide
gugccccggaauccaggac

SEQ ID NO: 1148304 - RNA, 19 nt, Artificial Sequence
  Description of Artificial Sequence: Synthetic oligonucleotide
acgccccacaagacucaac

SEQ ID NO: 1148305 - RNA, 19 nt, Artificial Sequence
  Description of Artificial Sequence: Synthetic oligonucleotide
agccuacagcagaagggau

SEQ ID NO: 1148306 - RNA, 19 nt, Artificial Sequence
  Description of Artificial Sequence: Synthetic oligonucleotide
ggaugggcggcaaucccuc

SEQ ID NO: 1148307 - RNA, 19 nt, Artificial Sequence
  Description of Artificial Sequence: Synthetic oligonucleotide
caaugggucccaccauaua

SEQ ID NO: 1148308 - RNA, 19 nt, Artificial Sequence
  Description of Artificial Sequence: Synthetic oligonucleotide
cacgauucgcccgguggca

SEQ ID NO: 1148309 - RNA, 19 nt, Artificial Sequence
  Description of Artificial Sequence: Synthetic oligonucleotide
ccugcaucguacccauguc

SEQ ID NO: 1148310 - RNA, 19 nt, Artificial Sequence
  Description of Artificial Sequence: Synthetic oligonucleotide
cccgugaagaccucagcaa

SEQ ID NO: 1148311 - RNA, 19 nt, Artificial Sequence
  Description of Artificial Sequence: Synthetic oligonucleotide
ggguagcgccgccgaaggg

SEQ ID NO: 1148312 - RNA, 19 nt, Artificial Sequence
  Description of Artificial Sequence: Synthetic oligonucleotide
cacgggacagcacgguugu

SEQ ID NO: 1148313 - RNA, 19 nt, Artificial Sequence
  Description of Artificial Sequence: Synthetic oligonucleotide
acacgccccacaagacuca

SEQ ID NO: 1148314 - RNA, 19 nt, Artificial Sequence
  Description of Artificial Sequence: Synthetic oligonucleotide
cugcccaauaaggcagaca

SEQ ID NO: 1148315 - RNA, 19 nt, Artificial Sequence
  Description of Artificial Sequence: Synthetic oligonucleotide
cgacggagacgucugcgcc

SEQ ID NO: 1148316 - RNA, 19 nt, Artificial Sequence
  Description of Artificial Sequence: Synthetic oligonucleotide
ccaagccuucaguaccauc

SEQ ID NO: 1148317 - RNA, 19 nt, Artificial Sequence
  Description of Artificial Sequence: Synthetic oligonucleotide
gaguaaccaccaugggcuu

SEQ ID NO: 1148318 - RNA, 19 nt, Artificial Sequence
  Description of Artificial Sequence: Synthetic oligonucleotide
cgacgggaauuuugauugg

SEQ ID NO: 1148319 - RNA, 19 nt, Artificial Sequence
  Description of Artificial Sequence: Synthetic oligonucleotide
cgccccacaagacucaaca

SEQ ID NO: 1148320 - RNA, 19 nt, Artificial Sequence
  Description of Artificial Sequence: Synthetic oligonucleotide
uugccacccuuggcguaug

SEQ ID NO: 1148321 - RNA, 19 nt, Artificial Sequence
  Description of Artificial Sequence: Synthetic oligonucleotide
cauuuaggaugggcggcaa

SEQ ID NO: 1148322 - RNA, 19 nt, Artificial Sequence
  Description of Artificial Sequence: Synthetic oligonucleotide
ggacguccaccacggcgcc

SEQ ID NO: 1148323 - RNA, 19 nt, Artificial Sequence
  Description of Artificial Sequence: Synthetic oligonucleotide
gucucuggaccgacgggaa

SEQ ID NO: 1148324 - RNA, 19 nt, Artificial Sequence
  Description of Artificial Sequence: Synthetic oligonucleotide
cccggaauccaggacuuuc

SEQ ID NO: 1148325 - RNA, 19 nt, Artificial Sequence
  Description of Artificial Sequence: Synthetic oligonucleotide
cuucaaugggucccaccau

SEQ ID NO: 1148326 - RNA, 19 nt, Artificial Sequence
  Description of Artificial Sequence: Synthetic oligonucleotide
gaccgacgggaauuuugau

SEQ ID NO: 1148327 - RNA, 19 nt, Artificial Sequence
  Description of Artificial Sequence: Synthetic oligonucleotide
cccucaagaugcaugcucu

SEQ ID NO: 1148328 - RNA, 19 nt, Artificial Sequence
  Description of Artificial Sequence: Synthetic oligonucleotide
ggcggcaaucccucaucga

SEQ ID NO: 1148329 - RNA, 19 nt, Artificial Sequence
  Description of Artificial Sequence: Synthetic oligonucleotide
gcgggagcggcucgcagca

SEQ ID NO: 1148330 - RNA, 19 nt, Artificial Sequence
  Description of Artificial Sequence: Synthetic oligonucleotide
ugguucggacggugcucuc

SEQ ID NO: 1148331 - RNA, 19 nt, Artificial Sequence
  Description of Artificial Sequence: Synthetic oligonucleotide
cauauaccaacgccaccuu

SEQ ID NO: 1148332 - RNA, 19 nt, Artificial Sequence
  Description of Artificial Sequence: Synthetic oligonucleotide
gcaugaauaggagcaaauu

SEQ ID NO: 1148333 - RNA, 19 nt, Artificial Sequence
  Description of Artificial Sequence: Synthetic oligonucleotide
caguagcugcgccuggggu

SEQ ID NO: 1148334 - RNA, 19 nt, Artificial Sequence
  Description of Artificial Sequence: Synthetic oligonucleotide
ugccuucgcggguccucuc

SEQ ID NO: 1148335 - RNA, 19 nt, Artificial Sequence
  Description of Artificial Sequence: Synthetic oligonucleotide
gcacgguuguagcauccaa

SEQ ID NO: 1148336 - RNA, 19 nt, Artificial Sequence
  Description of Artificial Sequence: Synthetic oligonucleotide
cccaccgaagaguccgauc

SEQ ID NO: 1148337 - RNA, 19 nt, Artificial Sequence
  Description of Artificial Sequence: Synthetic oligonucleotide
gcgccgcauagucucuggc

SEQ ID NO: 1148338 - RNA, 19 nt, Artificial Sequence
  Description of Artificial Sequence: Synthetic oligonucleotide
cagagcuacccgggcacga

SEQ ID NO: 1148339 - RNA, 19 nt, Artificial Sequence
  Description of Artificial Sequence: Synthetic oligonucleotide
cagcgccugccuucggcga

SEQ ID NO: 1148340 - RNA, 19 nt, Artificial Sequence
  Description of Artificial Sequence: Synthetic oligonucleotide
gcuacccgggcacgagcac

SEQ ID NO: 1148341 - RNA, 19 nt, Artificial Sequence
  Description of Artificial Sequence: Synthetic oligonucleotide
ccuucgcggguccucucac

SEQ ID NO: 1148342 - RNA, 19 nt, Artificial Sequence
  Description of Artificial Sequence: Synthetic oligonucleotide
gccuucgcggguccucuca

SEQ ID NO: 1148343 - RNA, 19 nt, Artificial Sequence
  Description of Artificial Sequence: Synthetic oligonucleotide
cugagacaagaagcgcugu

SEQ ID NO: 1148344 - RNA, 19 nt, Artificial Sequence
  Description of Artificial Sequence: Synthetic oligonucleotide
cuugccacccuuggcguau

SEQ ID NO: 1148345 - RNA, 19 nt, Artificial Sequence
  Description of Artificial Sequence: Synthetic oligonucleotide
cuuuagcgacauuguugau

SEQ ID NO: 1148346 - RNA, 19 nt, Artificial Sequence
  Description of Artificial Sequence: Synthetic oligonucleotide
cagaggugauagaacccuu

SEQ ID NO: 1148347 - RNA, 19 nt, Artificial Sequence
  Description of Artificial Sequence: Synthetic oligonucleotide
cgcggguccucucaccaac

SEQ ID NO: 1148348 - RNA, 19 nt, Artificial Sequence
  Description of Artificial Sequence: Synthetic oligonucleotide
cgaugaccgccacgauucg

SEQ ID NO: 1148349 - RNA, 19 nt, Artificial Sequence
  Description of Artificial Sequence: Synthetic oligonucleotide
uggcuagagugggcuggua

SEQ ID NO: 1148350 - RNA, 19 nt, Artificial Sequence
  Description of Artificial Sequence: Synthetic oligonucleotide
ccgcaggcacauagauggc

SEQ ID NO: 1148351 - RNA, 19 nt, Artificial Sequence
  Description of Artificial Sequence: Synthetic oligonucleotide
gcaucguacccaugucagu

SEQ ID NO: 1148352 - RNA, 19 nt, Artificial Sequence
  Description of Artificial Sequence: Synthetic oligonucleotide
ugcaccccucgggcaacau

SEQ ID NO: 1148353 - RNA, 19 nt, Artificial Sequence
  Description of Artificial Sequence: Synthetic oligonucleotide
ccgggacacagucaauuua

SEQ ID NO: 1148354 - RNA, 19 nt, Artificial Sequence
  Description of Artificial Sequence: Synthetic oligonucleotide
ccggaauccaggacuuucu

SEQ ID NO: 1148355 - RNA, 19 nt, Artificial Sequence
  Description of Artificial Sequence: Synthetic oligonucleotide
gccccuaaccaagccuuca

SEQ ID NO: 1148356 - RNA, 19 nt, Artificial Sequence
  Description of Artificial Sequence: Synthetic oligonucleotide
gggagcggcucgcagcagu

SEQ ID NO: 1148357 - RNA, 19 nt, Artificial Sequence
  Description of Artificial Sequence: Synthetic oligonucleotide
gcgccugccuucggcgacg

SEQ ID NO: 1148358 - RNA, 19 nt, Artificial Sequence
  Description of Artificial Sequence: Synthetic oligonucleotide
cgccgcauagucucuggca

SEQ ID NO: 1148359 - RNA, 19 nt, Artificial Sequence
  Description of Artificial Sequence: Synthetic oligonucleotide
ccucaucgaacuggacguc

SEQ ID NO: 1148360 - RNA, 19 nt, Artificial Sequence
  Description of Artificial Sequence: Synthetic oligonucleotide
uagcugcgccugggguagc

SEQ ID NO: 1148361 - RNA, 19 nt, Artificial Sequence
  Description of Artificial Sequence: Synthetic oligonucleotide
gggucccaccauauagaaa

SEQ ID NO: 1148362 - RNA, 19 nt, Artificial Sequence
  Description of Artificial Sequence: Synthetic oligonucleotide
agucauccgcaggcacaua

SEQ ID NO: 1148363 - RNA, 19 nt, Artificial Sequence
  Description of Artificial Sequence: Synthetic oligonucleotide
cggguccucucaccaacac

SEQ ID NO: 1148364 - RNA, 19 nt, Artificial Sequence
  Description of Artificial Sequence: Synthetic oligonucleotide
cccuaaccaagccuucagu

SEQ ID NO: 1148365 - RNA, 19 nt, Artificial Sequence
  Description of Artificial Sequence: Synthetic oligonucleotide
cacgccccacaagacucaa

SEQ ID NO: 1148366 - RNA, 19 nt, Artificial Sequence
  Description of Artificial Sequence: Synthetic oligonucleotide
ggccccuaaccaagccuuc

SEQ ID NO: 1148367 - RNA, 19 nt, Artificial Sequence
  Description of Artificial Sequence: Synthetic oligonucleotide
ccacaaccuuuauaccagu

SEQ ID NO: 1148368 - RNA, 19 nt, Artificial Sequence
  Description of Artificial Sequence: Synthetic oligonucleotide
ccauacccaagauggcaau

SEQ ID NO: 1148369 - RNA, 19 nt, Artificial Sequence
  Description of Artificial Sequence: Synthetic oligonucleotide
gcggguccucucaccaaca

SEQ ID NO: 1148370 - RNA, 19 nt, Artificial Sequence
  Description of Artificial Sequence: Synthetic oligonucleotide
ggcacgggacagcacgguu

SEQ ID NO: 1148371 - RNA, 19 nt, Artificial Sequence
  Description of Artificial Sequence: Synthetic oligonucleotide
cugcaccccucgggcaaca

SEQ ID NO: 1148372 - RNA, 19 nt, Artificial Sequence
  Description of Artificial Sequence: Synthetic oligonucleotide
ccucgggcaacaucauaau

SEQ ID NO: 1148373 - RNA, 19 nt, Artificial Sequence
  Description of Artificial Sequence: Synthetic oligonucleotide
cagcaacgguaagaccagu

SEQ ID NO: 1148374 - RNA, 19 nt, Artificial Sequence
  Description of Artificial Sequence: Synthetic oligonucleotide
cccgggacacagucaauuu

SEQ ID NO: 1148375 - RNA, 19 nt, Artificial Sequence
  Description of Artificial Sequence: Synthetic oligonucleotide
cccuuggcguauggggcca

SEQ ID NO: 1148376 - RNA, 19 nt, Artificial Sequence
  Description of Artificial Sequence: Synthetic oligonucleotide
cggcuaaaaucugcuggaa

SEQ ID NO: 1148377 - RNA, 19 nt, Artificial Sequence
  Description of Artificial Sequence: Synthetic oligonucleotide
gccccggaauccaggacuu

SEQ ID NO: 1148378 - RNA, 19 nt, Artificial Sequence
  Description of Artificial Sequence: Synthetic oligonucleotide
cgucugcgccgcauagucu

SEQ ID NO: 1148379 - RNA, 19 nt, Artificial Sequence
  Description of Artificial Sequence: Synthetic oligonucleotide
ccccaccgaagaguccgau

SEQ ID NO: 1148380 - RNA, 19 nt, Artificial Sequence
  Description of Artificial Sequence: Synthetic oligonucleotide
cggagacgucugcgccgca

SEQ ID NO: 1148381 - RNA, 19 nt, Artificial Sequence
  Description of Artificial Sequence: Synthetic oligonucleotide
ccccggaauccaggacuuu

SEQ ID NO: 1148382 - RNA, 19 nt, Artificial Sequence
  Description of Artificial Sequence: Synthetic oligonucleotide
cgccgaugaccgccacgau

SEQ ID NO: 1148383 - RNA, 19 nt, Artificial Sequence
  Description of Artificial Sequence: Synthetic oligonucleotide
ccgccacgauucgcccggu

SEQ ID NO: 1148384 - RNA, 19 nt, Artificial Sequence
  Description of Artificial Sequence: Synthetic oligonucleotide
aaaucuauaagaaacaacg

SEQ ID NO: 1148385 - RNA, 19 nt, Artificial Sequence
  Description of Artificial Sequence: Synthetic oligonucleotide
aaugcauagucccuuaagc

SEQ ID NO: 1148386 - RNA, 19 nt, Artificial Sequence
  Description of Artificial Sequence: Synthetic oligonucleotide
  modified_base (7)..(7): a, c, u, g, unknown or other
ucuaucnccaaaucgauag

SEQ ID NO: 1148387 - RNA, 19 nt, Artificial Sequence
  Description of Artificial Sequence: Synthetic oligonucleotide
ugugcgaaagaaaagaaag

SEQ ID NO: 1148388 - RNA, 19 nt, Artificial Sequence
  Description of Artificial Sequence: Synthetic oligonucleotide
aaccuuaauacuuguaugg

SEQ ID NO: 1148389 - RNA, 19 nt, Artificial Sequence
  Description of Artificial Sequence: Synthetic oligonucleotide
  modified_base (10)..(10): a, c, u, g, unknown or other
ucaucuaucnccaaaucga

SEQ ID NO: 1148390 - RNA, 19 nt, Artificial Sequence
  Description of Artificial Sequence: Synthetic oligonucleotide
  modified_base (17)..(17): a, c, u, g, unknown or other
uucucuaucaucuaucncc

SEQ ID NO: 1148391 - RNA, 19 nt, Artificial Sequence
  Description of Artificial Sequence: Synthetic oligonucleotide
uguauuaagaaccgagggg

SEQ ID NO: 1148392 - RNA, 19 nt, Artificial Sequence
  Description of Artificial Sequence: Synthetic oligonucleotide
uuuaaagcgucauugacug

SEQ ID NO: 1148393 - RNA, 19 nt, Artificial Sequence
  Description of Artificial Sequence: Synthetic oligonucleotide
cuuaucagggucaucaucg

SEQ ID NO: 1148394 - RNA, 19 nt, Artificial Sequence
  Description of Artificial Sequence: Synthetic oligonucleotide
uuaagagucccuaugaaga

SEQ ID NO: 1148395 - RNA, 19 nt, Artificial Sequence
  Description of Artificial Sequence: Synthetic oligonucleotide
aaaucgauaggcauuuccc

SEQ ID NO: 1148396 - RNA, 19 nt, Artificial Sequence
  Description of Artificial Sequence: Synthetic oligonucleotide
uauauaguuauuugcaugu

SEQ ID NO: 1148397 - RNA, 19 nt, Artificial Sequence
  Description of Artificial Sequence: Synthetic oligonucleotide
aacaacguaauauggauaa

SEQ ID NO: 1148398 - RNA, 19 nt, Artificial Sequence
  Description of Artificial Sequence: Synthetic oligonucleotide
cauugaaugacucugauga

SEQ ID NO: 1148399 - RNA, 19 nt, Artificial Sequence
  Description of Artificial Sequence: Synthetic oligonucleotide
aagagagagagagagagag

SEQ ID NO: 1148400 - RNA, 19 nt, Artificial Sequence
  Description of Artificial Sequence: Synthetic oligonucleotide
cuuuuaauguaaaggaggc

SEQ ID NO: 1148401 - RNA, 19 nt, Artificial Sequence
  Description of Artificial Sequence: Synthetic oligonucleotide
  modified_base (11)..(11): a, c, u, g, unknown or other
aucaucuaucnccaaaucg

SEQ ID NO: 1148402 - RNA, 19 nt, Artificial Sequence
  Description of Artificial Sequence: Synthetic oligonucleotide
uuuaagagucccuaugaag

SEQ ID NO: 1148403 - RNA, 19 nt, Artificial Sequence
  Description of Artificial Sequence: Synthetic oligonucleotide
aaaucagucaccauugcag

SEQ ID NO: 1148404 - RNA, 19 nt, Artificial Sequence
  Description of Artificial Sequence: Synthetic oligonucleotide
guaaggguguguuagaugc

SEQ ID NO: 1148405 - RNA, 19 nt, Artificial Sequence
  Description of Artificial Sequence: Synthetic oligonucleotide
auggauaacaguauaauag

SEQ ID NO: 1148406 - RNA, 19 nt, Artificial Sequence
  Description of Artificial Sequence: Synthetic oligonucleotide
uccgucacggguuauaagg

SEQ ID NO: 1148407 - RNA, 19 nt, Artificial Sequence
  Description of Artificial Sequence: Synthetic oligonucleotide
acauaauucguguaccuuc

SEQ ID NO: 1148408 - RNA, 19 nt, Artificial Sequence
  Description of Artificial Sequence: Synthetic oligonucleotide
gagagagagagagagagcg

SEQ ID NO: 1148409 - RNA, 19 nt, Artificial Sequence
  Description of Artificial Sequence: Synthetic oligonucleotide
uauaguuauuugcaugucc

SEQ ID NO: 1148410 - RNA, 19 nt, Artificial Sequence
  Description of Artificial Sequence: Synthetic oligonucleotide
auucgaagagaauagaggu

SEQ ID NO: 1148411 - RNA, 19 nt, Artificial Sequence
  Description of Artificial Sequence: Synthetic oligonucleotide
gauucgaagagaauagagg

SEQ ID NO: 1148412 - RNA, 19 nt, Artificial Sequence
  Description of Artificial Sequence: Synthetic oligonucleotide
aauguacguaugcaugggg

SEQ ID NO: 1148413 - RNA, 19 nt, Artificial Sequence
  Description of Artificial Sequence: Synthetic oligonucleotide
uggauaacaguauaauagc

SEQ ID NO: 1148414 - RNA, 19 nt, Artificial Sequence
  Description of Artificial Sequence: Synthetic oligonucleotide
aggcauuucccuuucaaac

SEQ ID NO: 1148415 - RNA, 19 nt, Artificial Sequence
  Description of Artificial Sequence: Synthetic oligonucleotide
agaagagagagagagagag

SEQ ID NO: 1148416 - RNA, 19 nt, Artificial Sequence
  Description of Artificial Sequence: Synthetic oligonucleotide
agaauggaacuccauaguc

SEQ ID NO: 1148417 - RNA, 19 nt, Artificial Sequence
  Description of Artificial Sequence: Synthetic oligonucleotide
uccuguauuaagaaccgag

SEQ ID NO: 1148418 - RNA, 19 nt, Artificial Sequence
  Description of Artificial Sequence: Synthetic oligonucleotide
ugcacuauucuucuccggg

SEQ ID NO: 1148419 - RNA, 19 nt, Artificial Sequence
  Description of Artificial Sequence: Synthetic oligonucleotide
  modified_base (16)..(16): a, c, u, g, unknown or other
ucucuaucaucuaucncca

SEQ ID NO: 1148420 - RNA, 19 nt, Artificial Sequence
  Description of Artificial Sequence: Synthetic oligonucleotide
gagagagagagagagagag

SEQ ID NO: 1148421 - RNA, 19 nt, Artificial Sequence
  Description of Artificial Sequence: Synthetic oligonucleotide
gaaccgaggggcuugaugc

SEQ ID NO: 1148422 - RNA, 19 nt, Artificial Sequence
  Description of Artificial Sequence: Synthetic oligonucleotide
guauuaagaaccgaggggc

SEQ ID NO: 1148423 - RNA, 19 nt, Artificial Sequence
  Description of Artificial Sequence: Synthetic oligonucleotide
cuguauuaagaaccgaggg

SEQ ID NO: 1148424 - RNA, 19 nt, Artificial Sequence
  Description of Artificial Sequence: Synthetic oligonucleotide
agcuauggaaacaacacac

SEQ ID NO: 1148425 - RNA, 19 nt, Artificial Sequence
  Description of Artificial Sequence: Synthetic oligonucleotide
uucucuaauuccaacagau

SEQ ID NO: 1148426 - RNA, 19 nt, Artificial Sequence
  Description of Artificial Sequence: Synthetic oligonucleotide
acaguauaauagcauuuac

SEQ ID NO: 1148427 - RNA, 19 nt, Artificial Sequence
  Description of Artificial Sequence: Synthetic oligonucleotide
guugguaugagcugugugc

SEQ ID NO: 1148428 - RNA, 19 nt, Artificial Sequence
  Description of Artificial Sequence: Synthetic oligonucleotide
ucuccuguauuaagaaccg

SEQ ID NO: 1148429 - RNA, 19 nt, Artificial Sequence
  Description of Artificial Sequence: Synthetic oligonucleotide
agucccuuaagcuacugag

SEQ ID NO: 1148430 - RNA, 19 nt, Artificial Sequence
  Description of Artificial Sequence: Synthetic oligonucleotide
ugucuuauauaguuauuug

SEQ ID NO: 1148431 - RNA, 19 nt, Artificial Sequence
  Description of Artificial Sequence: Synthetic oligonucleotide
ucuuuaaagcgucauugac

SEQ ID NO: 1148432 - RNA, 19 nt, Artificial Sequence
  Description of Artificial Sequence: Synthetic oligonucleotide
agagcuauggaaacaacac

SEQ ID NO: 1148433 - RNA, 19 nt, Artificial Sequence
  Description of Artificial Sequence: Synthetic oligonucleotide
uauaagguguuccuuggcu

SEQ ID NO: 1148434 - RNA, 19 nt, Artificial Sequence
  Description of Artificial Sequence: Synthetic oligonucleotide
ugauuugaaaucagucacc

SEQ ID NO: 1148435 - RNA, 19 nt, Artificial Sequence
  Description of Artificial Sequence: Synthetic oligonucleotide
gcuacuuugggaaagaugc

SEQ ID NO: 1148436 - RNA, 19 nt, Artificial Sequence
  Description of Artificial Sequence: Synthetic oligonucleotide
guuauaagguguuccuugg

SEQ ID NO: 1148437 - RNA, 19 nt, Artificial Sequence
  Description of Artificial Sequence: Synthetic oligonucleotide
ugucacauaauucguguac

SEQ ID NO: 1148438 - RNA, 19 nt, Artificial Sequence
  Description of Artificial Sequence: Synthetic oligonucleotide
ucccuuaagcuacugagca

SEQ ID NO: 1148439 - RNA, 19 nt, Artificial Sequence
  Description of Artificial Sequence: Synthetic oligonucleotide
aagaauggaacuccauagu

SEQ ID NO: 1148440 - RNA, 19 nt, Artificial Sequence
  Description of Artificial Sequence: Synthetic oligonucleotide
aaucagucaccauugcaga

SEQ ID NO: 1148441 - RNA, 19 nt, Artificial Sequence
  Description of Artificial Sequence: Synthetic oligonucleotide
ccaauuguucacuugaagg

SEQ ID NO: 1148442 - RNA, 19 nt, Artificial Sequence
  Description of Artificial Sequence: Synthetic oligonucleotide
uucugcgcgaaucuguuug

SEQ ID NO: 1148443 - RNA, 19 nt, Artificial Sequence
  Description of Artificial Sequence: Synthetic oligonucleotide
agaauuagggaugucaaga

SEQ ID NO: 1148444 - RNA, 19 nt, Artificial Sequence
  Description of Artificial Sequence: Synthetic oligonucleotide
acaugauuugaaaucaguc

SEQ ID NO: 1148445 - RNA, 19 nt, Artificial Sequence
  Description of Artificial Sequence: Synthetic oligonucleotide
aucuauaagaaacaacgua

SEQ ID NO: 1148446 - RNA, 19 nt, Artificial Sequence
  Description of Artificial Sequence: Synthetic oligonucleotide
acaaguagcuaauucacau

SEQ ID NO: 1148447 - RNA, 19 nt, Artificial Sequence
  Description of Artificial Sequence: Synthetic oligonucleotide
auauuucacucuuuguucu

SEQ ID NO: 1148448 - RNA, 19 nt, Artificial Sequence
  Description of Artificial Sequence: Synthetic oligonucleotide
cucuaauuccaacagauga

SEQ ID NO: 1148449 - RNA, 19 nt, Artificial Sequence
  Description of Artificial Sequence: Synthetic oligonucleotide
uguaaaggaggcuucugga

SEQ ID NO: 1148450 - RNA, 19 nt, Artificial Sequence
  Description of Artificial Sequence: Synthetic oligonucleotide
gcuuuuaauguaaaggagg

SEQ ID NO: 1148451 - RNA, 19 nt, Artificial Sequence
  Description of Artificial Sequence: Synthetic oligonucleotide
uuaauguaaaggaggcuuc

SEQ ID NO: 1148452 - RNA, 19 nt, Artificial Sequence
  Description of Artificial Sequence: Synthetic oligonucleotide
gucuccuguauuaagaacc

SEQ ID NO: 1148453 - RNA, 19 nt, Artificial Sequence
  Description of Artificial Sequence: Synthetic oligonucleotide
  modified_base (5)..(5): a, c, u, g, unknown or other
uaucnccaaaucgauaggc

SEQ ID NO: 1148454 - RNA, 19 nt, Artificial Sequence
  Description of Artificial Sequence: Synthetic oligonucleotide
aaguuauccaguucuggau

SEQ ID NO: 1148455 - RNA, 19 nt, Artificial Sequence
  Description of Artificial Sequence: Synthetic oligonucleotide
caaaucgauaggcauuucc

SEQ ID NO: 1148456 - RNA, 19 nt, Artificial Sequence
  Description of Artificial Sequence: Synthetic oligonucleotide
uugguaugagcugugugcg

SEQ ID NO: 1148457 - RNA, 19 nt, Artificial Sequence
  Description of Artificial Sequence: Synthetic oligonucleotide
uaauauggauaacaguaua

SEQ ID NO: 1148458 - RNA, 19 nt, Artificial Sequence
  Description of Artificial Sequence: Synthetic oligonucleotide
uuuuaagagucccuaugaa

SEQ ID NO: 1148459 - RNA, 19 nt, Artificial Sequence
  Description of Artificial Sequence: Synthetic oligonucleotide
cauuuuaagagucccuaug

SEQ ID NO: 1148460 - RNA, 19 nt, Artificial Sequence
  Description of Artificial Sequence: Synthetic oligonucleotide
uugcaggauaacuguaagg

SEQ ID NO: 1148461 - RNA, 19 nt, Artificial Sequence
  Description of Artificial Sequence: Synthetic oligonucleotide
augacuuguccacucauug

SEQ ID NO: 1148462 - RNA, 19 nt, Artificial Sequence
  Description of Artificial Sequence: Synthetic oligonucleotide
aauugucacauaauucgug

SEQ ID NO: 1148463 - RNA, 19 nt, Artificial Sequence
  Description of Artificial Sequence: Synthetic oligonucleotide
uccaguucuggauucgaag

SEQ ID NO: 1148464 - RNA, 19 nt, Artificial Sequence
  Description of Artificial Sequence: Synthetic oligonucleotide
ggaauguacguaugcaugg

SEQ ID NO: 1148465 - RNA, 19 nt, Artificial Sequence
  Description of Artificial Sequence: Synthetic oligonucleotide
aauucguguaccuucucua

SEQ ID NO: 1148466 - RNA, 19 nt, Artificial Sequence
  Description of Artificial Sequence: Synthetic oligonucleotide
uaauucguguaccuucucu

SEQ ID NO: 1148467 - RNA, 19 nt, Artificial Sequence
  Description of Artificial Sequence: Synthetic oligonucleotide
aagcuacugagcaugaaug

SEQ ID NO: 1148468 - RNA, 19 nt, Artificial Sequence
  Description of Artificial Sequence: Synthetic oligonucleotide
gauaguuauuuuaaugcuc

SEQ ID NO: 1148469 - RNA, 19 nt, Artificial Sequence
  Description of Artificial Sequence: Synthetic oligonucleotide
cacggcuauaucuucauug

SEQ ID NO: 1148470 - RNA, 19 nt, Artificial Sequence
  Description of Artificial Sequence: Synthetic oligonucleotide
ucuucugccugauaguuau

SEQ ID NO: 1148471 - RNA, 19 nt, Artificial Sequence
  Description of Artificial Sequence: Synthetic oligonucleotide
aaucuauaagaaacaacgu

SEQ ID NO: 1148472 - RNA, 19 nt, Artificial Sequence
  Description of Artificial Sequence: Synthetic oligonucleotide
uccauuacaaagccuccca

SEQ ID NO: 1148473 - RNA, 19 nt, Artificial Sequence
  Description of Artificial Sequence: Synthetic oligonucleotide
accaccccgggcuacauac

SEQ ID NO: 1148474 - RNA, 19 nt, Artificial Sequence
  Description of Artificial Sequence: Synthetic oligonucleotide
ugcgaaagaaaagaaagua

SEQ ID NO: 1148475 - RNA, 19 nt, Artificial Sequence
  Description of Artificial Sequence: Synthetic oligonucleotide
agagagagcgcacauggcu

SEQ ID NO: 1148476 - RNA, 19 nt, Artificial Sequence
  Description of Artificial Sequence: Synthetic oligonucleotide
uccaggaauguacguaugc

SEQ ID NO: 1148477 - RNA, 19 nt, Artificial Sequence
  Description of Artificial Sequence: Synthetic oligonucleotide
uucagaaggguaagggugu

SEQ ID NO: 1148478 - RNA, 19 nt, Artificial Sequence
  Description of Artificial Sequence: Synthetic oligonucleotide
ucauugaaugacucugaug

SEQ ID NO: 1148479 - RNA, 19 nt, Artificial Sequence
  Description of Artificial Sequence: Synthetic oligonucleotide
gguacaaguagcuaauuca

SEQ ID NO: 1148480 - RNA, 19 nt, Artificial Sequence
  Description of Artificial Sequence: Synthetic oligonucleotide
uacaaguagcuaauucaca

SEQ ID NO: 1148481 - RNA, 19 nt, Artificial Sequence
  Description of Artificial Sequence: Synthetic oligonucleotide
auggcugaaauccuaggca

SEQ ID NO: 1148482 - RNA, 19 nt, Artificial Sequence
  Description of Artificial Sequence: Synthetic oligonucleotide
acggguuauaagguguucc

SEQ ID NO: 1148483 - RNA, 19 nt, Artificial Sequence
  Description of Artificial Sequence: Synthetic oligonucleotide
ucaucgucaccugugcugg

SEQ ID NO: 1148484 - RNA, 19 nt, Artificial Sequence
  Description of Artificial Sequence: Synthetic oligonucleotide
uuugggaaagaugccacgc

SEQ ID NO: 1148485 - RNA, 19 nt, Artificial Sequence
  Description of Artificial Sequence: Synthetic oligonucleotide
agugcuaagagagggaaga

SEQ ID NO: 1148486 - RNA, 19 nt, Artificial Sequence
  Description of Artificial Sequence: Synthetic oligonucleotide
uccauaaauggcaucuuua

SEQ ID NO: 1148487 - RNA, 19 nt, Artificial Sequence
  Description of Artificial Sequence: Synthetic oligonucleotide
ugugugcgaaagaaaagaa

SEQ ID NO: 1148488 - RNA, 19 nt, Artificial Sequence
  Description of Artificial Sequence: Synthetic oligonucleotide
gguuauaagguguuccuug

SEQ ID NO: 1148489 - RNA, 19 nt, Artificial Sequence
  Description of Artificial Sequence: Synthetic oligonucleotide
aucaucgucaccugugcug

SEQ ID NO: 1148490 - RNA, 19 nt, Artificial Sequence
  Description of Artificial Sequence: Synthetic oligonucleotide
acaauauuucacucuuugu

SEQ ID NO: 1148491 - RNA, 19 nt, Artificial Sequence
  Description of Artificial Sequence: Synthetic oligonucleotide
aucagucaccauugcagac

SEQ ID NO: 1148492 - RNA, 19 nt, Artificial Sequence
  Description of Artificial Sequence: Synthetic oligonucleotide
guuagaugcuggaacagcc

SEQ ID NO: 1148493 - RNA, 19 nt, Artificial Sequence
  Description of Artificial Sequence: Synthetic oligonucleotide
ugcauagucccuuaagcua

SEQ ID NO: 1148494 - RNA, 19 nt, Artificial Sequence
  Description of Artificial Sequence: Synthetic oligonucleotide
cuaagagagggaagagggg

SEQ ID NO: 1148495 - RNA, 19 nt, Artificial Sequence
  Description of Artificial Sequence: Synthetic oligonucleotide
gaaacaacguaauauggau

SEQ ID NO: 1148496 - RNA, 19 nt, Artificial Sequence
  Description of Artificial Sequence: Synthetic oligonucleotide
uauuaagaaccgaggggcu

SEQ ID NO: 1148497 - RNA, 19 nt, Artificial Sequence
  Description of Artificial Sequence: Synthetic oligonucleotide
auccuaggcaagaagaaag

SEQ ID NO: 1148498 - RNA, 19 nt, Artificial Sequence
  Description of Artificial Sequence: Synthetic oligonucleotide
caguauaauagcauuuaca

SEQ ID NO: 1148499 - RNA, 19 nt, Artificial Sequence
  Description of Artificial Sequence: Synthetic oligonucleotide
  modified_base (3)..(3): a, c, u, g, unknown or other
ucnccaaaucgauaggcau

SEQ ID NO: 1148500 - RNA, 19 nt, Artificial Sequence
  Description of Artificial Sequence: Synthetic oligonucleotide
cuuguccacucauugucgg

SEQ ID NO: 1148501 - RNA, 19 nt, Artificial Sequence
  Description of Artificial Sequence: Synthetic oligonucleotide
gaauguacguaugcauggg

SEQ ID NO: 1148502 - RNA, 19 nt, Artificial Sequence
  Description of Artificial Sequence: Synthetic oligonucleotide
ucauugucgggucuccugu

SEQ ID NO: 1148503 - RNA, 19 nt, Artificial Sequence
  Description of Artificial Sequence: Synthetic oligonucleotide
acagccacgccccucauga

SEQ ID NO: 1148504 - RNA, 19 nt, Artificial Sequence
  Description of Artificial Sequence: Synthetic oligonucleotide
auccauuacaaagccuccc

SEQ ID NO: 1148505 - RNA, 19 nt, Artificial Sequence
  Description of Artificial Sequence: Synthetic oligonucleotide
agaaacaacguaauaugga

SEQ ID NO: 1148506 - RNA, 19 nt, Artificial Sequence
  Description of Artificial Sequence: Synthetic oligonucleotide
uguuagaugcuggaacagc

SEQ ID NO: 1148507 - RNA, 19 nt, Artificial Sequence
  Description of Artificial Sequence: Synthetic oligonucleotide
cuugcaggauaacuguaag

SEQ ID NO: 1148508 - RNA, 19 nt, Artificial Sequence
  Description of Artificial Sequence: Synthetic oligonucleotide
uccuaggcaagaagaaaga

SEQ ID NO: 1148509 - RNA, 19 nt, Artificial Sequence
  Description of Artificial Sequence: Synthetic oligonucleotide
ucacucuuuguucuuuuaa

SEQ ID NO: 1148510 - RNA, 19 nt, Artificial Sequence
  Description of Artificial Sequence: Synthetic oligonucleotide
uacucacacccauuggacc

SEQ ID NO: 1148511 - RNA, 19 nt, Artificial Sequence
  Description of Artificial Sequence: Synthetic oligonucleotide
cuucuaguugguuuuccug

SEQ ID NO: 1148512 - RNA, 19 nt, Artificial Sequence
  Description of Artificial Sequence: Synthetic oligonucleotide
ugagcugugugcgaaagaa

SEQ ID NO: 1148513 - RNA, 19 nt, Artificial Sequence
  Description of Artificial Sequence: Synthetic oligonucleotide
ucacauaauucguguaccu

SEQ ID NO: 1148514 - RNA, 19 nt, Artificial Sequence
  Description of Artificial Sequence: Synthetic oligonucleotide
acucacacccauuggacca

SEQ ID NO: 1148515 - RNA, 19 nt, Artificial Sequence
  Description of Artificial Sequence: Synthetic oligonucleotide
auacucacacccauuggac

SEQ ID NO: 1148516 - RNA, 19 nt, Artificial Sequence
  Description of Artificial Sequence: Synthetic oligonucleotide
uuaagaaccgaggggcuug

SEQ ID NO: 1148517 - RNA, 19 nt, Artificial Sequence
  Description of Artificial Sequence: Synthetic oligonucleotide
uucauugaaugacucugau

SEQ ID NO: 1148518 - RNA, 19 nt, Artificial Sequence
  Description of Artificial Sequence: Synthetic oligonucleotide
acguaauauggauaacagu

SEQ ID NO: 1148519 - RNA, 19 nt, Artificial Sequence
  Description of Artificial Sequence: Synthetic oligonucleotide
acacccauuggaccacccc

SEQ ID NO: 1148520 - RNA, 19 nt, Artificial Sequence
  Description of Artificial Sequence: Synthetic oligonucleotide
aaggguguguuagaugcug

SEQ ID NO: 1148521 - RNA, 19 nt, Artificial Sequence
  Description of Artificial Sequence: Synthetic oligonucleotide
ugcucgguuggacuggucu

SEQ ID NO: 1148522 - RNA, 19 nt, Artificial Sequence
  Description of Artificial Sequence: Synthetic oligonucleotide
  modified_base (6)..(6): a, c, u, g, unknown or other
cuaucnccaaaucgauagg

SEQ ID NO: 1148523 - RNA, 19 nt, Artificial Sequence
  Description of Artificial Sequence: Synthetic oligonucleotide
acggcuauaucuucauuga

SEQ ID NO: 1148524 - RNA, 19 nt, Artificial Sequence
  Description of Artificial Sequence: Synthetic oligonucleotide
caaugcauagucccuuaag

SEQ ID NO: 1148525 - RNA, 19 nt, Artificial Sequence
  Description of Artificial Sequence: Synthetic oligonucleotide
acauggcugaaauccuagg

SEQ ID NO: 1148526 - RNA, 19 nt, Artificial Sequence
  Description of Artificial Sequence: Synthetic oligonucleotide
uguuuggcgaacacggcua

SEQ ID NO: 1148527 - RNA, 19 nt, Artificial Sequence
  Description of Artificial Sequence: Synthetic oligonucleotide
aucacuguuggguggugag

SEQ ID NO: 1148528 - RNA, 19 nt, Artificial Sequence
  Description of Artificial Sequence: Synthetic oligonucleotide
ccuguauuaagaaccgagg

SEQ ID NO: 1148529 - RNA, 19 nt, Artificial Sequence
  Description of Artificial Sequence: Synthetic oligonucleotide
cacccauuggaccaccccg

SEQ ID NO: 1148530 - RNA, 19 nt, Artificial Sequence
  Description of Artificial Sequence: Synthetic oligonucleotide
agcgucauugacugaggag

SEQ ID NO: 1148531 - RNA, 19 nt, Artificial Sequence
  Description of Artificial Sequence: Synthetic oligonucleotide
aauccuaggcaagaagaaa

SEQ ID NO: 1148532 - RNA, 19 nt, Artificial Sequence
  Description of Artificial Sequence: Synthetic oligonucleotide
ucugcgcgaaucuguuugg

SEQ ID NO: 1148533 - RNA, 19 nt, Artificial Sequence
  Description of Artificial Sequence: Synthetic oligonucleotide
aguuauccaguucuggauu

SEQ ID NO: 1148534 - RNA, 19 nt, Artificial Sequence
  Description of Artificial Sequence: Synthetic oligonucleotide
caaguuauccaguucugga

SEQ ID NO: 1148535 - RNA, 19 nt, Artificial Sequence
  Description of Artificial Sequence: Synthetic oligonucleotide
acauacuccccuggcauac

SEQ ID NO: 1148536 - RNA, 19 nt, Artificial Sequence
  Description of Artificial Sequence: Synthetic oligonucleotide
aggaauguacguaugcaug

SEQ ID NO: 1148537 - RNA, 19 nt, Artificial Sequence
  Description of Artificial Sequence: Synthetic oligonucleotide
gucacauaauucguguacc

SEQ ID NO: 1148538 - RNA, 19 nt, Artificial Sequence
  Description of Artificial Sequence: Synthetic oligonucleotide
aacacggcuauaucuucau

SEQ ID NO: 1148539 - RNA, 19 nt, Artificial Sequence
  Description of Artificial Sequence: Synthetic oligonucleotide
cauccauuacaaagccucc

SEQ ID NO: 1148540 - RNA, 19 nt, Artificial Sequence
  Description of Artificial Sequence: Synthetic oligonucleotide
uugggaaagaugccacgcu

SEQ ID NO: 1148541 - RNA, 19 nt, Artificial Sequence
  Description of Artificial Sequence: Synthetic oligonucleotide
aaagcgucauugacugagg

SEQ ID NO: 1148542 - RNA, 19 nt, Artificial Sequence
  Description of Artificial Sequence: Synthetic oligonucleotide
uucgaagagaauagagguu

SEQ ID NO: 1148543 - RNA, 19 nt, Artificial Sequence
  Description of Artificial Sequence: Synthetic oligonucleotide
ucuguuuggcgaacacggc

SEQ ID NO: 1148544 - RNA, 19 nt, Artificial Sequence
  Description of Artificial Sequence: Synthetic oligonucleotide
uuguccacucauugucggg

SEQ ID NO: 1148545 - RNA, 19 nt, Artificial Sequence
  Description of Artificial Sequence: Synthetic oligonucleotide
aucaucaaguuauccaguu

SEQ ID NO: 1148546 - RNA, 19 nt, Artificial Sequence
  Description of Artificial Sequence: Synthetic oligonucleotide
aagcgucauugacugagga

SEQ ID NO: 1148547 - RNA, 19 nt, Artificial Sequence
  Description of Artificial Sequence: Synthetic oligonucleotide
ccauccauuacaaagccuc

SEQ ID NO: 1148548 - RNA, 19 nt, Artificial Sequence
  Description of Artificial Sequence: Synthetic oligonucleotide
gagagagagagagagcgca

SEQ ID NO: 1148549 - RNA, 19 nt, Artificial Sequence
  Description of Artificial Sequence: Synthetic oligonucleotide
aauacuuguauggcuugaa

SEQ ID NO: 1148550 - RNA, 19 nt, Artificial Sequence
  Description of Artificial Sequence: Synthetic oligonucleotide
cacuguuggguggugaggg

SEQ ID NO: 1148551 - RNA, 19 nt, Artificial Sequence
  Description of Artificial Sequence: Synthetic oligonucleotide
acuucuaguugguuuuccu

SEQ ID NO: 1148552 - RNA, 19 nt, Artificial Sequence
  Description of Artificial Sequence: Synthetic oligonucleotide
ucagugcuaagagagggaa

SEQ ID NO: 1148553 - RNA, 19 nt, Artificial Sequence
  Description of Artificial Sequence: Synthetic oligonucleotide
ugacuuguccacucauugu

SEQ ID NO: 1148554 - RNA, 19 nt, Artificial Sequence
  Description of Artificial Sequence: Synthetic oligonucleotide
agaaccgaggggcuugaug

SEQ ID NO: 1148555 - RNA, 19 nt, Artificial Sequence
  Description of Artificial Sequence: Synthetic oligonucleotide
uaggcauuucccuuucaaa

SEQ ID NO: 1148556 - RNA, 19 nt, Artificial Sequence
  Description of Artificial Sequence: Synthetic oligonucleotide
ugucccauacucacaccca

SEQ ID NO: 1148557 - RNA, 19 nt, Artificial Sequence
  Description of Artificial Sequence: Synthetic oligonucleotide
ugacugcucgguuggacug

SEQ ID NO: 1148558 - RNA, 19 nt, Artificial Sequence
  Description of Artificial Sequence: Synthetic oligonucleotide
cguaauauggauaacagua

SEQ ID NO: 1148559 - RNA, 19 nt, Artificial Sequence
  Description of Artificial Sequence: Synthetic oligonucleotide
ggauucgaagagaauagag

SEQ ID NO: 1148560 - RNA, 19 nt, Artificial Sequence
  Description of Artificial Sequence: Synthetic oligonucleotide
uuuucugcgcgaaucuguu

SEQ ID NO: 1148561 - RNA, 19 nt, Artificial Sequence
  Description of Artificial Sequence: Synthetic oligonucleotide
uccauagucauugcagaaa

SEQ ID NO: 1148562 - RNA, 19 nt, Artificial Sequence
  Description of Artificial Sequence: Synthetic oligonucleotide
caagaagaaagauucuucu

SEQ ID NO: 1148563 - RNA, 19 nt, Artificial Sequence
  Description of Artificial Sequence: Synthetic oligonucleotide
agagagagagagagagagc

SEQ ID NO: 1148564 - RNA, 19 nt, Artificial Sequence
  Description of Artificial Sequence: Synthetic oligonucleotide
gauaacaguauaauagcau

SEQ ID NO: 1148565 - RNA, 19 nt, Artificial Sequence
  Description of Artificial Sequence: Synthetic oligonucleotide
cuauaucuucauugaauga

SEQ ID NO: 1148566 - RNA, 19 nt, Artificial Sequence
  Description of Artificial Sequence: Synthetic oligonucleotide
acuccccuggcauacuuug

SEQ ID NO: 1148567 - RNA, 19 nt, Artificial Sequence
  Description of Artificial Sequence: Synthetic oligonucleotide
uccaugacuuguccacuca

SEQ ID NO: 1148568 - RNA, 19 nt, Artificial Sequence
  Description of Artificial Sequence: Synthetic oligonucleotide
aaacaacguaauauggaua

SEQ ID NO: 1148569 - RNA, 19 nt, Artificial Sequence
  Description of Artificial Sequence: Synthetic oligonucleotide
gacucugaugagcagacgu

SEQ ID NO: 1148570 - RNA, 19 nt, Artificial Sequence
  Description of Artificial Sequence: Synthetic oligonucleotide
agagagagagagagagcgc

SEQ ID NO: 1148571 - RNA, 19 nt, Artificial Sequence
  Description of Artificial Sequence: Synthetic oligonucleotide
ugucccuugcaggauaacu

SEQ ID NO: 1148572 - RNA, 19 nt, Artificial Sequence
  Description of Artificial Sequence: Synthetic oligonucleotide
agucccuaugaagaauuag

SEQ ID NO: 1148573 - RNA, 19 nt, Artificial Sequence
  Description of Artificial Sequence: Synthetic oligonucleotide
uagucccuuaagcuacuga

SEQ ID NO: 1148574 - RNA, 19 nt, Artificial Sequence
  Description of Artificial Sequence: Synthetic oligonucleotide
gagcagacguccccgcccg

SEQ ID NO: 1148575 - RNA, 19 nt, Artificial Sequence
  Description of Artificial Sequence: Synthetic oligonucleotide
ucguguaccuucucuaauu

SEQ ID NO: 1148576 - RNA, 19 nt, Artificial Sequence
  Description of Artificial Sequence: Synthetic oligonucleotide
acaacguaauauggauaac

SEQ ID NO: 1148577 - RNA, 19 nt, Artificial Sequence
  Description of Artificial Sequence: Synthetic oligonucleotide
uuaucagggucaucaucgu

SEQ ID NO: 1148578 - RNA, 19 nt, Artificial Sequence
  Description of Artificial Sequence: Synthetic oligonucleotide
uguccacucauugucgggu

SEQ ID NO: 1148579 - RNA, 19 nt, Artificial Sequence
  Description of Artificial Sequence: Synthetic oligonucleotide
aucgauaggcauuucccuu

SEQ ID NO: 1148580 - RNA, 19 nt, Artificial Sequence
  Description of Artificial Sequence: Synthetic oligonucleotide
ugggaaagaugccacgcuu

SEQ ID NO: 1148581 - RNA, 19 nt, Artificial Sequence
  Description of Artificial Sequence: Synthetic oligonucleotide
auucguguaccuucucuaa

SEQ ID NO: 1148582 - RNA, 19 nt, Artificial Sequence
  Description of Artificial Sequence: Synthetic oligonucleotide
uucguguaccuucucuaau

SEQ ID NO: 1148583 - RNA, 19 nt, Artificial Sequence
  Description of Artificial Sequence: Synthetic oligonucleotide
uggauucgaagagaauaga

SEQ ID NO: 1148584 - RNA, 19 nt, Artificial Sequence
  Description of Artificial Sequence: Synthetic oligonucleotide
ucgggucuccuguauuaag

SEQ ID NO: 1148585 - RNA, 19 nt, Artificial Sequence
  Description of Artificial Sequence: Synthetic oligonucleotide
ucgauaggcauuucccuuu

SEQ ID NO: 1148586 - RNA, 19 nt, Artificial Sequence
  Description of Artificial Sequence: Synthetic oligonucleotide
cucauugucgggucuccug

SEQ ID NO: 1148587 - RNA, 19 nt, Artificial Sequence
  Description of Artificial Sequence: Synthetic oligonucleotide
agcugugugcgaaagaaaa

SEQ ID NO: 1148588 - RNA, 19 nt, Artificial Sequence
  Description of Artificial Sequence: Synthetic oligonucleotide
  modified_base (18)..(18): a, c, u, g, unknown or other
cuucucuaucaucuaucnc

SEQ ID NO: 1148589 - RNA, 19 nt, Artificial Sequence
  Description of Artificial Sequence: Synthetic oligonucleotide
auggcguugguaugagcug

SEQ ID NO: 1148590 - RNA, 19 nt, Artificial Sequence
  Description of Artificial Sequence: Synthetic oligonucleotide
auauaccgguggcagaaau

SEQ ID NO: 1148591 - RNA, 19 nt, Artificial Sequence
  Description of Artificial Sequence: Synthetic oligonucleotide
  modified_base (4)..(4): a, c, u, g, unknown or other
aucnccaaaucgauaggca

SEQ ID NO: 1148592 - RNA, 19 nt, Artificial Sequence
  Description of Artificial Sequence: Synthetic oligonucleotide
cauggcguugguaugagcu

SEQ ID NO: 1148593 - RNA, 19 nt, Artificial Sequence
  Description of Artificial Sequence: Synthetic oligonucleotide
uggucuaucaugggcugca

SEQ ID NO: 1148594 - RNA, 19 nt, Artificial Sequence
  Description of Artificial Sequence: Synthetic oligonucleotide
agcgcacauggcugaaauc

SEQ ID NO: 1148595 - RNA, 19 nt, Artificial Sequence
  Description of Artificial Sequence: Synthetic oligonucleotide
caccauugcagacaaugca

SEQ ID NO: 1148596 - RNA, 19 nt, Artificial Sequence
  Description of Artificial Sequence: Synthetic oligonucleotide
agaugcuggaacagccacg

SEQ ID NO: 1148597 - RNA, 19 nt, Artificial Sequence
  Description of Artificial Sequence: Synthetic oligonucleotide
uucugccugauaguuauuu

SEQ ID NO: 1148598 - RNA, 19 nt, Artificial Sequence
  Description of Artificial Sequence: Synthetic oligonucleotide
agagagagagagcgcacau

SEQ ID NO: 1148599 - RNA, 19 nt, Artificial Sequence
  Description of Artificial Sequence: Synthetic oligonucleotide
gacuucuaguugguuuucc

SEQ ID NO: 1148600 - RNA, 19 nt, Artificial Sequence
  Description of Artificial Sequence: Synthetic oligonucleotide
ugucgggucuccuguauua

SEQ ID NO: 1148601 - RNA, 19 nt, Artificial Sequence
  Description of Artificial Sequence: Synthetic oligonucleotide
uuaaagcgucauugacuga

SEQ ID NO: 1148602 - RNA, 19 nt, Artificial Sequence
  Description of Artificial Sequence: Synthetic oligonucleotide
uccacucauugucgggucu

SEQ ID NO: 1148603 - RNA, 19 nt, Artificial Sequence
  Description of Artificial Sequence: Synthetic oligonucleotide
agagagagagagagcgcac

SEQ ID NO: 1148604 - RNA, 19 nt, Artificial Sequence
  Description of Artificial Sequence: Synthetic oligonucleotide
uucuucugccugauaguua

SEQ ID NO: 1148605 - RNA, 19 nt, Artificial Sequence
  Description of Artificial Sequence: Synthetic oligonucleotide
gguaaggguguguuagaug

SEQ ID NO: 1148606 - RNA, 19 nt, Artificial Sequence
  Description of Artificial Sequence: Synthetic oligonucleotide
aaccgaggggcuugaugcu

SEQ ID NO: 1148607 - RNA, 19 nt, Artificial Sequence
  Description of Artificial Sequence: Synthetic oligonucleotide
uauuucacucuuuguucuu

SEQ ID NO: 1148608 - RNA, 19 nt, Artificial Sequence
  Description of Artificial Sequence: Synthetic oligonucleotide
ugucuugugccaacugcuu

SEQ ID NO: 1148609 - RNA, 19 nt, Artificial Sequence
  Description of Artificial Sequence: Synthetic oligonucleotide
ggauaacaguauaauagca

SEQ ID NO: 1148610 - RNA, 19 nt, Artificial Sequence
  Description of Artificial Sequence: Synthetic oligonucleotide
acugucugauuuugauccu

SEQ ID NO: 1148611 - RNA, 19 nt, Artificial Sequence
  Description of Artificial Sequence: Synthetic oligonucleotide
uuccaacagaugaaaccuu

SEQ ID NO: 1148612 - RNA, 19 nt, Artificial Sequence
  Description of Artificial Sequence: Synthetic oligonucleotide
cuuaagcuacugagcauga

SEQ ID NO: 1148613 - RNA, 19 nt, Artificial Sequence
  Description of Artificial Sequence: Synthetic oligonucleotide
cuucucuaauuccaacaga

SEQ ID NO: 1148614 - RNA, 19 nt, Artificial Sequence
  Description of Artificial Sequence: Synthetic oligonucleotide
ccuuaagcuacugagcaug

SEQ ID NO: 1148615 - RNA, 19 nt, Artificial Sequence
  Description of Artificial Sequence: Synthetic oligonucleotide
guguuagaugcuggaacag

SEQ ID NO: 1148616 - RNA, 19 nt, Artificial Sequence
  Description of Artificial Sequence: Synthetic oligonucleotide
cagugcuaagagagggaag

SEQ ID NO: 1148617 - RNA, 19 nt, Artificial Sequence
  Description of Artificial Sequence: Synthetic oligonucleotide
uauccaguucuggauucga

SEQ ID NO: 1148618 - RNA, 19 nt, Artificial Sequence
  Description of Artificial Sequence: Synthetic oligonucleotide
gaagagcuauggaaacaac

SEQ ID NO: 1148619 - RNA, 19 nt, Artificial Sequence
  Description of Artificial Sequence: Synthetic oligonucleotide
aucgucaccugugcugggg

SEQ ID NO: 1148620 - RNA, 19 nt, Artificial Sequence
  Description of Artificial Sequence: Synthetic oligonucleotide
gucccuuaagcuacugagc

SEQ ID NO: 1148621 - RNA, 19 nt, Artificial Sequence
  Description of Artificial Sequence: Synthetic oligonucleotide
ucacggguuauaagguguu

SEQ ID NO: 1148622 - RNA, 19 nt, Artificial Sequence
  Description of Artificial Sequence: Synthetic oligonucleotide
aauugacuucuaguugguu

SEQ ID NO: 1148623 - RNA, 19 nt, Artificial Sequence
  Description of Artificial Sequence: Synthetic oligonucleotide
acaaugcauagucccuuaa

SEQ ID NO: 1148624 - RNA, 19 nt, Artificial Sequence
  Description of Artificial Sequence: Synthetic oligonucleotide
auugucgggucuccuguau

SEQ ID NO: 1148625 - RNA, 19 nt, Artificial Sequence
  Description of Artificial Sequence: Synthetic oligonucleotide
gaacacggcuauaucuuca

SEQ ID NO: 1148626 - RNA, 19 nt, Artificial Sequence
  Description of Artificial Sequence: Synthetic oligonucleotide
uacauacuccccuggcaua

SEQ ID NO: 1148627 - RNA, 19 nt, Artificial Sequence
  Description of Artificial Sequence: Synthetic oligonucleotide
gagagagagagagcgcaca

SEQ ID NO: 1148628 - RNA, 19 nt, Artificial Sequence
  Description of Artificial Sequence: Synthetic oligonucleotide
uguccaugacuuguccacu

SEQ ID NO: 1148629 - RNA, 19 nt, Artificial Sequence
  Description of Artificial Sequence: Synthetic oligonucleotide
agagucccuaugaagaauu

SEQ ID NO: 1148630 - RNA, 19 nt, Artificial Sequence
  Description of Artificial Sequence: Synthetic oligonucleotide
ugguaugagcugugugcga

SEQ ID NO: 1148631 - RNA, 19 nt, Artificial Sequence
  Description of Artificial Sequence: Synthetic oligonucleotide
ggcugucccauacucacac

SEQ ID NO: 1148632 - RNA, 19 nt, Artificial Sequence
  Description of Artificial Sequence: Synthetic oligonucleotide
gaagagagagagagagaga

SEQ ID NO: 1148633 - RNA, 19 nt, Artificial Sequence
  Description of Artificial Sequence: Synthetic oligonucleotide
auuaagaaccgaggggcuu

SEQ ID NO: 1148634 - RNA, 19 nt, Artificial Sequence
  Description of Artificial Sequence: Synthetic oligonucleotide
guaauauggauaacaguau

SEQ ID NO: 1148635 - RNA, 19 nt, Artificial Sequence
  Description of Artificial Sequence: Synthetic oligonucleotide
cagaccuuccugucccuug

SEQ ID NO: 1148636 - RNA, 19 nt, Artificial Sequence
  Description of Artificial Sequence: Synthetic oligonucleotide
aggguguguuagaugcugg

SEQ ID NO: 1148637 - RNA, 19 nt, Artificial Sequence
  Description of Artificial Sequence: Synthetic oligonucleotide
uuaagcuacugagcaugaa

SEQ ID NO: 1148638 - RNA, 19 nt, Artificial Sequence
  Description of Artificial Sequence: Synthetic oligonucleotide
gcacuauucuucuccgggc

SEQ ID NO: 1148639 - RNA, 19 nt, Artificial Sequence
  Description of Artificial Sequence: Synthetic oligonucleotide
augagcugugugcgaaaga

SEQ ID NO: 1148640 - RNA, 19 nt, Artificial Sequence
  Description of Artificial Sequence: Synthetic oligonucleotide
augaagaauuagggauguc

SEQ ID NO: 1148641 - RNA, 19 nt, Artificial Sequence
  Description of Artificial Sequence: Synthetic oligonucleotide
uguccgucacggguuauaa

SEQ ID NO: 1148642 - RNA, 19 nt, Artificial Sequence
  Description of Artificial Sequence: Synthetic oligonucleotide
cauuggaccaccccgggcu

SEQ ID NO: 1148643 - RNA, 19 nt, Artificial Sequence
  Description of Artificial Sequence: Synthetic oligonucleotide
ggucuccuguauuaagaac

SEQ ID NO: 1148644 - RNA, 19 nt, Artificial Sequence
  Description of Artificial Sequence: Synthetic oligonucleotide
cuguaaggcuuuuaaugua

SEQ ID NO: 1148645 - RNA, 19 nt, Artificial Sequence
  Description of Artificial Sequence: Synthetic oligonucleotide
auugacugaggagcccaug

SEQ ID NO: 1148646 - RNA, 19 nt, Artificial Sequence
  Description of Artificial Sequence: Synthetic oligonucleotide
gauaacuguaaggcuuuua

SEQ ID NO: 1148647 - RNA, 19 nt, Artificial Sequence
  Description of Artificial Sequence: Synthetic oligonucleotide
gagaagagagagagagaga

SEQ ID NO: 1148648 - RNA, 19 nt, Artificial Sequence
  Description of Artificial Sequence: Synthetic oligonucleotide
uggcugucccauacucaca

SEQ ID NO: 1148649 - RNA, 19 nt, Artificial Sequence
  Description of Artificial Sequence: Synthetic oligonucleotide
gugugcgaaagaaaagaaa

SEQ ID NO: 1148650 - RNA, 19 nt, Artificial Sequence
  Description of Artificial Sequence: Synthetic oligonucleotide
uaagaaccgaggggcuuga

SEQ ID NO: 1148651 - RNA, 19 nt, Artificial Sequence
  Description of Artificial Sequence: Synthetic oligonucleotide
gaaggguaaggguguguua

SEQ ID NO: 1148652 - RNA, 19 nt, Artificial Sequence
  Description of Artificial Sequence: Synthetic oligonucleotide
ggcuacauacuccccuggc

SEQ ID NO: 1148653 - RNA, 19 nt, Artificial Sequence
  Description of Artificial Sequence: Synthetic oligonucleotide
gcuacauacuccccuggca

SEQ ID NO: 1148654 - RNA, 19 nt, Artificial Sequence
  Description of Artificial Sequence: Synthetic oligonucleotide
cucccauuggcuguccguc

SEQ ID NO: 1148655 - RNA, 19 nt, Artificial Sequence
  Description of Artificial Sequence: Synthetic oligonucleotide
agacguccccgcccgccac

SEQ ID NO: 1148656 - RNA, 19 nt, Artificial Sequence
  Description of Artificial Sequence: Synthetic oligonucleotide
guccgucacggguuauaag

SEQ ID NO: 1148657 - RNA, 19 nt, Artificial Sequence
  Description of Artificial Sequence: Synthetic oligonucleotide
cuacauacuccccuggcau

SEQ ID NO: 1148658 - RNA, 19 nt, Artificial Sequence
  Description of Artificial Sequence: Synthetic oligonucleotide
agagagagagagagagaga

SEQ ID NO: 1148659 - RNA, 19 nt, Artificial Sequence
  Description of Artificial Sequence: Synthetic oligonucleotide
  modified_base (9)..(9): a, c, u, g, unknown or other
caucuaucnccaaaucgau

SEQ ID NO: 1148660 - RNA, 19 nt, Artificial Sequence
  Description of Artificial Sequence: Synthetic oligonucleotide
cacucauugucgggucucc

SEQ ID NO: 1148661 - RNA, 19 nt, Artificial Sequence
  Description of Artificial Sequence: Synthetic oligonucleotide
gcuacugagcaugaauguc

SEQ ID NO: 1148662 - RNA, 19 nt, Artificial Sequence
  Description of Artificial Sequence: Synthetic oligonucleotide
cccuaugaagaauuaggga

SEQ ID NO: 1148663 - RNA, 19 nt, Artificial Sequence
  Description of Artificial Sequence: Synthetic oligonucleotide
uuucugcgcgaaucuguuu

SEQ ID NO: 1148664 - RNA, 19 nt, Artificial Sequence
  Description of Artificial Sequence: Synthetic oligonucleotide
auacuccccuggcauacuu

SEQ ID NO: 1148665 - RNA, 19 nt, Artificial Sequence
  Description of Artificial Sequence: Synthetic oligonucleotide
ccuuaucagggucaucauc

SEQ ID NO: 1148666 - RNA, 19 nt, Artificial Sequence
  Description of Artificial Sequence: Synthetic oligonucleotide
cugcaaaucagaccuuccu

SEQ ID NO: 1148667 - RNA, 19 nt, Artificial Sequence
  Description of Artificial Sequence: Synthetic oligonucleotide
auagucccuuaagcuacug

SEQ ID NO: 1148668 - RNA, 19 nt, Artificial Sequence
  Description of Artificial Sequence: Synthetic oligonucleotide
cuguuuggcgaacacggcu

SEQ ID NO: 1148669 - RNA, 19 nt, Artificial Sequence
  Description of Artificial Sequence: Synthetic oligonucleotide
gcuauggaaacaacacaca

SEQ ID NO: 1148670 - RNA, 19 nt, Artificial Sequence
  Description of Artificial Sequence: Synthetic oligonucleotide
agcagacguccccgcccgc

SEQ ID NO: 1148671 - RNA, 19 nt, Artificial Sequence
  Description of Artificial Sequence: Synthetic oligonucleotide
uacuccccuggcauacuuu

SEQ ID NO: 1148672 - RNA, 19 nt, Artificial Sequence
  Description of Artificial Sequence: Synthetic oligonucleotide
caucgucaccugugcuggg

SEQ ID NO: 1148673 - RNA, 19 nt, Artificial Sequence
  Description of Artificial Sequence: Synthetic oligonucleotide
agccacgccccucaugaua

SEQ ID NO: 1148674 - RNA, 19 nt, Artificial Sequence
  Description of Artificial Sequence: Synthetic oligonucleotide
gugcgaaagaaaagaaagu

SEQ ID NO: 1148675 - RNA, 19 nt, Artificial Sequence
  Description of Artificial Sequence: Synthetic oligonucleotide
cauuacaaagccucccauu

SEQ ID NO: 1148676 - RNA, 19 nt, Artificial Sequence
  Description of Artificial Sequence: Synthetic oligonucleotide
gggcuacauacuccccugg

SEQ ID NO: 1148677 - RNA, 19 nt, Artificial Sequence
  Description of Artificial Sequence: Synthetic oligonucleotide
gucacggguuauaaggugu

SEQ ID NO: 1148678 - RNA, 19 nt, Artificial Sequence
  Description of Artificial Sequence: Synthetic oligonucleotide
accgaggggcuugaugcug

SEQ ID NO: 1148679 - RNA, 19 nt, Artificial Sequence
  Description of Artificial Sequence: Synthetic oligonucleotide
guccacucauugucggguc

SEQ ID NO: 1148680 - RNA, 19 nt, Artificial Sequence
  Description of Artificial Sequence: Synthetic oligonucleotide
gguaugagcugugugcgaa

SEQ ID NO: 1148681 - RNA, 19 nt, Artificial Sequence
  Description of Artificial Sequence: Synthetic oligonucleotide
  modified_base (8)..(8): a, c, u, g, unknown or other
aucuaucnccaaaucgaua

SEQ ID NO: 1148682 - RNA, 19 nt, Artificial Sequence
  Description of Artificial Sequence: Synthetic oligonucleotide
gguguccauaaauggcauc

SEQ ID NO: 1148683 - RNA, 19 nt, Artificial Sequence
  Description of Artificial Sequence: Synthetic oligonucleotide
cccaaauugacuucuaguu

SEQ ID NO: 1148684 - RNA, 19 nt, Artificial Sequence
  Description of Artificial Sequence: Synthetic oligonucleotide
guggggcgguccuccaugc

SEQ ID NO: 1148685 - RNA, 19 nt, Artificial Sequence
  Description of Artificial Sequence: Synthetic oligonucleotide
gggucuccuguauuaagaa

SEQ ID NO: 1148686 - RNA, 19 nt, Artificial Sequence
  Description of Artificial Sequence: Synthetic oligonucleotide
cugaaauccuaggcaagaa

SEQ ID NO: 1148687 - RNA, 19 nt, Artificial Sequence
  Description of Artificial Sequence: Synthetic oligonucleotide
cugcgcgaaucuguuuggc

SEQ ID NO: 1148688 - RNA, 19 nt, Artificial Sequence
  Description of Artificial Sequence: Synthetic oligonucleotide
auuggaccaccccgggcua

SEQ ID NO: 1148689 - RNA, 19 nt, Artificial Sequence
  Description of Artificial Sequence: Synthetic oligonucleotide
gugucuugugccaacugcu

SEQ ID NO: 1148690 - RNA, 19 nt, Artificial Sequence
  Description of Artificial Sequence: Synthetic oligonucleotide
guaccuucucuaauuccaa

SEQ ID NO: 1148691 - RNA, 19 nt, Artificial Sequence
  Description of Artificial Sequence: Synthetic oligonucleotide
guccaggaauguacguaug

SEQ ID NO: 1148692 - RNA, 19 nt, Artificial Sequence
  Description of Artificial Sequence: Synthetic oligonucleotide
cugacugcucgguuggacu

SEQ ID NO: 1148693 - RNA, 19 nt, Artificial Sequence
  Description of Artificial Sequence: Synthetic oligonucleotide
ggguguguuagaugcugga

SEQ ID NO: 1148694 - RNA, 19 nt, Artificial Sequence
  Description of Artificial Sequence: Synthetic oligonucleotide
  modified_base (2)..(2): a, c, u, g, unknown or other
cnccaaaucgauaggcauu

SEQ ID NO: 1148695 - RNA, 19 nt, Artificial Sequence
  Description of Artificial Sequence: Synthetic oligonucleotide
uggaacagccacgccccuc

SEQ ID NO: 1148696 - RNA, 19 nt, Artificial Sequence
  Description of Artificial Sequence: Synthetic oligonucleotide
uggggcgguccuccaugca

SEQ ID NO: 1148697 - RNA, 19 nt, Artificial Sequence
  Description of Artificial Sequence: Synthetic oligonucleotide
gaggguguccaggaaugua

SEQ ID NO: 1148698 - RNA, 19 nt, Artificial Sequence
  Description of Artificial Sequence: Synthetic oligonucleotide
cacggguuauaagguguuc

SEQ ID NO: 1148699 - RNA, 19 nt, Artificial Sequence
  Description of Artificial Sequence: Synthetic oligonucleotide
cguguaccuucucuaauuc

SEQ ID NO: 1148700 - RNA, 19 nt, Artificial Sequence
  Description of Artificial Sequence: Synthetic oligonucleotide
ccauaaauggcaucuuuau

SEQ ID NO: 1148701 - RNA, 19 nt, Artificial Sequence
  Description of Artificial Sequence: Synthetic oligonucleotide
auccaguucuggauucgaa

SEQ ID NO: 1148702 - RNA, 19 nt, Artificial Sequence
  Description of Artificial Sequence: Synthetic oligonucleotide
uuuggcgaacacggcuaua

SEQ ID NO: 1148703 - RNA, 19 nt, Artificial Sequence
  Description of Artificial Sequence: Synthetic oligonucleotide
caucacuguugggugguga

SEQ ID NO: 1148704 - RNA, 19 nt, Artificial Sequence
  Description of Artificial Sequence: Synthetic oligonucleotide
caugacuuguccacucauu

SEQ ID NO: 1148705 - RNA, 19 nt, Artificial Sequence
  Description of Artificial Sequence: Synthetic oligonucleotide
ccaugacgcagcugagcag

SEQ ID NO: 1148706 - RNA, 19 nt, Artificial Sequence
  Description of Artificial Sequence: Synthetic oligonucleotide
ccauuggcuguccgucacg

SEQ ID NO: 1148707 - RNA, 19 nt, Artificial Sequence
  Description of Artificial Sequence: Synthetic oligonucleotide
uuggaccaccccgggcuac

SEQ ID NO: 1148708 - RNA, 19 nt, Artificial Sequence
  Description of Artificial Sequence: Synthetic oligonucleotide
uuccugucccuugcaggau

SEQ ID NO: 1148709 - RNA, 19 nt, Artificial Sequence
  Description of Artificial Sequence: Synthetic oligonucleotide
gagucccuaugaagaauua

SEQ ID NO: 1148710 - RNA, 19 nt, Artificial Sequence
  Description of Artificial Sequence: Synthetic oligonucleotide
cgucacggguuauaaggug

SEQ ID NO: 1148711 - RNA, 19 nt, Artificial Sequence
  Description of Artificial Sequence: Synthetic oligonucleotide
ggaggaagugaagagcuau

SEQ ID NO: 1148712 - RNA, 19 nt, Artificial Sequence
  Description of Artificial Sequence: Synthetic oligonucleotide
  modified_base (15)..(15): a, c, u, g, unknown or other
cucuaucaucuaucnccaa

SEQ ID NO: 1148713 - RNA, 19 nt, Artificial Sequence
  Description of Artificial Sequence: Synthetic oligonucleotide
cgaacacggcuauaucuuc

SEQ ID NO: 1148714 - RNA, 19 nt, Artificial Sequence
  Description of Artificial Sequence: Synthetic oligonucleotide
ugacgcagcugagcaggau

SEQ ID NO: 1148715 - RNA, 19 nt, Artificial Sequence
  Description of Artificial Sequence: Synthetic oligonucleotide
ccauugcagacaaugcaua

SEQ ID NO: 1148716 - RNA, 19 nt, Artificial Sequence
  Description of Artificial Sequence: Synthetic oligonucleotide
cauugucgggucuccugua

SEQ ID NO: 1148717 - RNA, 19 nt, Artificial Sequence
  Description of Artificial Sequence: Synthetic oligonucleotide
aagaaccgaggggcuugau

SEQ ID NO: 1148718 - RNA, 19 nt, Artificial Sequence
  Description of Artificial Sequence: Synthetic oligonucleotide
cccauuggcuguccgucac

SEQ ID NO: 1148719 - RNA, 19 nt, Artificial Sequence
  Description of Artificial Sequence: Synthetic oligonucleotide
guuuggcgaacacggcuau

SEQ ID NO: 1148720 - RNA, 19 nt, Artificial Sequence
  Description of Artificial Sequence: Synthetic oligonucleotide
ccuuucaaacagcuaauau

SEQ ID NO: 1148721 - RNA, 19 nt, Artificial Sequence
  Description of Artificial Sequence: Synthetic oligonucleotide
gcugacugcucgguuggac

SEQ ID NO: 1148722 - RNA, 19 nt, Artificial Sequence
  Description of Artificial Sequence: Synthetic oligonucleotide
cacauaauucguguaccuu

SEQ ID NO: 1148723 - RNA, 19 nt, Artificial Sequence
  Description of Artificial Sequence: Synthetic oligonucleotide
ggccauggcguugguauga

SEQ ID NO: 1148724 - RNA, 19 nt, Artificial Sequence
  Description of Artificial Sequence: Synthetic oligonucleotide
gccucccauuggcuguccg

SEQ ID NO: 1148725 - RNA, 19 nt, Artificial Sequence
  Description of Artificial Sequence: Synthetic oligonucleotide
ccccaaauugacuucuagu

SEQ ID NO: 1148726 - RNA, 19 nt, Artificial Sequence
  Description of Artificial Sequence: Synthetic oligonucleotide
ggcguugguaugagcugug

SEQ ID NO: 1148727 - RNA, 19 nt, Artificial Sequence
  Description of Artificial Sequence: Synthetic oligonucleotide
ccauggcguugguaugagc

SEQ ID NO: 1148728 - RNA, 19 nt, Artificial Sequence
  Description of Artificial Sequence: Synthetic oligonucleotide
gccauggcguugguaugag

SEQ ID NO: 1148729 - RNA, 19 nt, Artificial Sequence
  Description of Artificial Sequence: Synthetic oligonucleotide
cgggcuacauacuccccug

SEQ ID NO: 1148730 - RNA, 19 nt, Artificial Sequence
  Description of Artificial Sequence: Synthetic oligonucleotide
gcucgguuggacuggucua

SEQ ID NO: 1148731 - RNA, 19 nt, Artificial Sequence
  Description of Artificial Sequence: Synthetic oligonucleotide
gcagacguccccgcccgcc

SEQ ID NO: 1148732 - RNA, 19 nt, Artificial Sequence
  Description of Artificial Sequence: Synthetic oligonucleotide
cauugacugaggagcccau

SEQ ID NO: 1148733 - RNA, 19 nt, Artificial Sequence
  Description of Artificial Sequence: Synthetic oligonucleotide
gggcuggguauaacuuggc

SEQ ID NO: 1148734 - RNA, 19 nt, Artificial Sequence
  Description of Artificial Sequence: Synthetic oligonucleotide
cgauaggcauuucccuuuc

SEQ ID NO: 1148735 - RNA, 19 nt, Artificial Sequence
  Description of Artificial Sequence: Synthetic oligonucleotide
ggcauacuuugcagcccug

SEQ ID NO: 1148736 - RNA, 19 nt, Artificial Sequence
  Description of Artificial Sequence: Synthetic oligonucleotide
ccacucauugucgggucuc

SEQ ID NO: 1148737 - RNA, 19 nt, Artificial Sequence
  Description of Artificial Sequence: Synthetic oligonucleotide
gcgaacacggcuauaucuu

SEQ ID NO: 1148738 - RNA, 19 nt, Artificial Sequence
  Description of Artificial Sequence: Synthetic oligonucleotide
ggguaaggguguguuagau

SEQ ID NO: 1148739 - RNA, 19 nt, Artificial Sequence
  Description of Artificial Sequence: Synthetic oligonucleotide
gggaaagaugccacgcuuu

SEQ ID NO: 1148740 - RNA, 19 nt, Artificial Sequence
  Description of Artificial Sequence: Synthetic oligonucleotide
cuguccgucacggguuaua

SEQ ID NO: 1148741 - RNA, 19 nt, Artificial Sequence
  Description of Artificial Sequence: Synthetic oligonucleotide
ccgaggggcuugaugcuga

SEQ ID NO: 1148742 - RNA, 19 nt, Artificial Sequence
  Description of Artificial Sequence: Synthetic oligonucleotide
ggggcgguccuccaugcau

SEQ ID NO: 1148743 - RNA, 19 nt, Artificial Sequence
  Description of Artificial Sequence: Synthetic oligonucleotide
caucuggggcuggguauaa

SEQ ID NO: 1148744 - RNA, 19 nt, Artificial Sequence
  Description of Artificial Sequence: Synthetic oligonucleotide
ccgucacggguuauaaggu

SEQ ID NO: 1148745 - RNA, 19 nt, Artificial Sequence
  Description of Artificial Sequence: Synthetic oligonucleotide
ggguuauaagguguuccuu

SEQ ID NO: 1148746 - RNA, 19 nt, Artificial Sequence
  Description of Artificial Sequence: Synthetic oligonucleotide
ccaaaucgauaggcauuuc

SEQ ID NO: 1148747 - RNA, 19 nt, Artificial Sequence
  Description of Artificial Sequence: Synthetic oligonucleotide
cggguuauaagguguuccu

SEQ ID NO: 1148748 - RNA, 19 nt, Artificial Sequence
  Description of Artificial Sequence: Synthetic oligonucleotide
ccuaggcaagaagaaagau

SEQ ID NO: 1148749 - RNA, 19 nt, Artificial Sequence
  Description of Artificial Sequence: Synthetic oligonucleotide
gccacgccccucaugauau

SEQ ID NO: 1148750 - RNA, 19 nt, Artificial Sequence
  Description of Artificial Sequence: Synthetic oligonucleotide
ggcuguccgucacggguua

SEQ ID NO: 1148751 - RNA, 19 nt, Artificial Sequence
  Description of Artificial Sequence: Synthetic oligonucleotide
acccugcaaaucagaccuu

SEQ ID NO: 1148752 - RNA, 19 nt, Artificial Sequence
  Description of Artificial Sequence: Synthetic oligonucleotide
cauacuccccuggcauacu

SEQ ID NO: 1148753 - RNA, 19 nt, Artificial Sequence
  Description of Artificial Sequence: Synthetic oligonucleotide
ccgggcuacauacuccccu

SEQ ID NO: 1148754 - RNA, 19 nt, Artificial Sequence
  Description of Artificial Sequence: Synthetic oligonucleotide
ggguguccauaaauggcau

SEQ ID NO: 1148755 - RNA, 19 nt, Artificial Sequence
  Description of Artificial Sequence: Synthetic oligonucleotide
ccaugacuuguccacucau

SEQ ID NO: 1148756 - RNA, 19 nt, Artificial Sequence
  Description of Artificial Sequence: Synthetic oligonucleotide
cggcuauaucuucauugaa

SEQ ID NO: 1148757 - RNA, 19 nt, Artificial Sequence
  Description of Artificial Sequence: Synthetic oligonucleotide
ccucccauuggcuguccgu

SEQ ID NO: 1148758 - RNA, 19 nt, Artificial Sequence
  Description of Artificial Sequence: Synthetic oligonucleotide
cccuuaagcuacugagcau

SEQ ID NO: 1148759 - RNA, 19 nt, Artificial Sequence
  Description of Artificial Sequence: Synthetic oligonucleotide
gggguacaaguagcuaauu

SEQ ID NO: 1148760 - RNA, 19 nt, Artificial Sequence
  Description of Artificial Sequence: Synthetic oligonucleotide
ccaccccgggcuacauacu

SEQ ID NO: 1148761 - RNA, 19 nt, Artificial Sequence
  Description of Artificial Sequence: Synthetic oligonucleotide
ggaccaccccgggcuacau

SEQ ID NO: 1148762 - RNA, 19 nt, Artificial Sequence
  Description of Artificial Sequence: Synthetic oligonucleotide
gcuguccgucacggguuau

SEQ ID NO: 1148763 - RNA, 19 nt, Artificial Sequence
  Description of Artificial Sequence: Synthetic oligonucleotide
  modified_base (1)..(1): a, c, u, g, unknown or other
nccaaaucgauaggcauuu

SEQ ID NO: 1148764 - RNA, 19 nt, Artificial Sequence
  Description of Artificial Sequence: Synthetic oligonucleotide
aacacgaaggcauuguucc

SEQ ID NO: 1148765 - RNA, 19 nt, Artificial Sequence
  Description of Artificial Sequence: Synthetic oligonucleotide
ucuccauugggucauaugg

SEQ ID NO: 1148766 - RNA, 19 nt, Artificial Sequence
  Description of Artificial Sequence: Synthetic oligonucleotide
gaaaucaggauauuccagg

SEQ ID NO: 1148767 - RNA, 19 nt, Artificial Sequence
  Description of Artificial Sequence: Synthetic oligonucleotide
ugacaugaaagauggaugg

SEQ ID NO: 1148768 - RNA, 19 nt, Artificial Sequence
  Description of Artificial Sequence: Synthetic oligonucleotide
cucauaugcaguaaguucc

SEQ ID NO: 1148769 - RNA, 19 nt, Artificial Sequence
  Description of Artificial Sequence: Synthetic oligonucleotide
agagugaagaacugggcgc

SEQ ID NO: 1148770 - RNA, 19 nt, Artificial Sequence
  Description of Artificial Sequence: Synthetic oligonucleotide
uauggaucagcacugagcu

SEQ ID NO: 1148771 - RNA, 19 nt, Artificial Sequence
  Description of Artificial Sequence: Synthetic oligonucleotide
uuauggauuaggaugaaaa

SEQ ID NO: 1148772 - RNA, 19 nt, Artificial Sequence
  Description of Artificial Sequence: Synthetic oligonucleotide
auggauuaggaugaaaagc

SEQ ID NO: 1148773 - RNA, 19 nt, Artificial Sequence
  Description of Artificial Sequence: Synthetic oligonucleotide
uacauuacaggccagccug

SEQ ID NO: 1148774 - RNA, 19 nt, Artificial Sequence
  Description of Artificial Sequence: Synthetic oligonucleotide
aggagaugaagcaacaucc

SEQ ID NO: 1148775 - RNA, 19 nt, Artificial Sequence
  Description of Artificial Sequence: Synthetic oligonucleotide
aaugcuaaccucuggguca

SEQ ID NO: 1148776 - RNA, 19 nt, Artificial Sequence
  Description of Artificial Sequence: Synthetic oligonucleotide
ugaaguucccacaagcagc

SEQ ID NO: 1148777 - RNA, 19 nt, Artificial Sequence
  Description of Artificial Sequence: Synthetic oligonucleotide
ugagugacaccucagguug

SEQ ID NO: 1148778 - RNA, 19 nt, Artificial Sequence
  Description of Artificial Sequence: Synthetic oligonucleotide
uguacgagggaagagguag

SEQ ID NO: 1148779 - RNA, 19 nt, Artificial Sequence
  Description of Artificial Sequence: Synthetic oligonucleotide
guagaaaucaggauauucc

SEQ ID NO: 1148780 - RNA, 19 nt, Artificial Sequence
  Description of Artificial Sequence: Synthetic oligonucleotide
ugaagcaccgccaggaugu

SEQ ID NO: 1148781 - RNA, 19 nt, Artificial Sequence
  Description of Artificial Sequence: Synthetic oligonucleotide
caggaugucaaacaccgcg

SEQ ID NO: 1148782 - RNA, 19 nt, Artificial Sequence
  Description of Artificial Sequence: Synthetic oligonucleotide
ugcuguuagggccagccgg

SEQ ID NO: 1148783 - RNA, 19 nt, Artificial Sequence
  Description of Artificial Sequence: Synthetic oligonucleotide
agcugcacaaacuucauga

SEQ ID NO: 1148784 - RNA, 19 nt, Artificial Sequence
  Description of Artificial Sequence: Synthetic oligonucleotide
aaagaucucauaugcagua

SEQ ID NO: 1148785 - RNA, 19 nt, Artificial Sequence
  Description of Artificial Sequence: Synthetic oligonucleotide
aggauauuccagguuaugc

SEQ ID NO: 1148786 - RNA, 19 nt, Artificial Sequence
  Description of Artificial Sequence: Synthetic oligonucleotide
aaguuggugagguugcacu

SEQ ID NO: 1148787 - RNA, 19 nt, Artificial Sequence
  Description of Artificial Sequence: Synthetic oligonucleotide
agugaaagaaacgggcucg

SEQ ID NO: 1148788 - RNA, 19 nt, Artificial Sequence
  Description of Artificial Sequence: Synthetic oligonucleotide
ucaaucaugagggugggcu

SEQ ID NO: 1148789 - RNA, 19 nt, Artificial Sequence
  Description of Artificial Sequence: Synthetic oligonucleotide
ucggccaagugaaagaaac

SEQ ID NO: 1148790 - RNA, 19 nt, Artificial Sequence
  Description of Artificial Sequence: Synthetic oligonucleotide
aguggugcaaugcuaaccu

SEQ ID NO: 1148791 - RNA, 19 nt, Artificial Sequence
  Description of Artificial Sequence: Synthetic oligonucleotide
uuugucugaugucugugca

SEQ ID NO: 1148792 - RNA, 19 nt, Artificial Sequence
  Description of Artificial Sequence: Synthetic oligonucleotide
gagguugcacuccuggagg

SEQ ID NO: 1148793 - RNA, 19 nt, Artificial Sequence
  Description of Artificial Sequence: Synthetic oligonucleotide
gaguguacgagggaagagg

SEQ ID NO: 1148794 - RNA, 19 nt, Artificial Sequence
  Description of Artificial Sequence: Synthetic oligonucleotide
caaguacucacagaacugg

SEQ ID NO: 1148795 - RNA, 19 nt, Artificial Sequence
  Description of Artificial Sequence: Synthetic oligonucleotide
gaaagauggauggauccag

SEQ ID NO: 1148796 - RNA, 19 nt, Artificial Sequence
  Description of Artificial Sequence: Synthetic oligonucleotide
ugggagauaagcaggcugu

SEQ ID NO: 1148797 - RNA, 19 nt, Artificial Sequence
  Description of Artificial Sequence: Synthetic oligonucleotide
gaagaggucggccaaguga

SEQ ID NO: 1148798 - RNA, 19 nt, Artificial Sequence
  Description of Artificial Sequence: Synthetic oligonucleotide
uugugcuuaaggaagccaa

SEQ ID NO: 1148799 - RNA, 19 nt, Artificial Sequence
  Description of Artificial Sequence: Synthetic oligonucleotide
agauggauggauccaggag

SEQ ID NO: 1148800 - RNA, 19 nt, Artificial Sequence
  Description of Artificial Sequence: Synthetic oligonucleotide
ucaugcauagccaccagua

SEQ ID NO: 1148801 - RNA, 19 nt, Artificial Sequence
  Description of Artificial Sequence: Synthetic oligonucleotide
agcggugucucauccacac

SEQ ID NO: 1148802 - RNA, 19 nt, Artificial Sequence
  Description of Artificial Sequence: Synthetic oligonucleotide
agcaagguaccgaagaguc

SEQ ID NO: 1148803 - RNA, 19 nt, Artificial Sequence
  Description of Artificial Sequence: Synthetic oligonucleotide
agcagauagcaacacgaag

SEQ ID NO: 1148804 - RNA, 19 nt, Artificial Sequence
  Description of Artificial Sequence: Synthetic oligonucleotide
cagauagcaacacgaaggc

SEQ ID NO: 1148805 - RNA, 19 nt, Artificial Sequence
  Description of Artificial Sequence: Synthetic oligonucleotide
uuacauuacaggccagccu

SEQ ID NO: 1148806 - RNA, 19 nt, Artificial Sequence
  Description of Artificial Sequence: Synthetic oligonucleotide
uaacucggcaggcagggug

SEQ ID NO: 1148807 - RNA, 19 nt, Artificial Sequence
  Description of Artificial Sequence: Synthetic oligonucleotide
gaccuuacauuacaggcca

SEQ ID NO: 1148808 - RNA, 19 nt, Artificial Sequence
  Description of Artificial Sequence: Synthetic oligonucleotide
ucucaagggguuucgcucc

SEQ ID NO: 1148809 - RNA, 19 nt, Artificial Sequence
  Description of Artificial Sequence: Synthetic oligonucleotide
uuagccuggccacggcucg

SEQ ID NO: 1148810 - RNA, 19 nt, Artificial Sequence
  Description of Artificial Sequence: Synthetic oligonucleotide
ccaagugaaagaaacgggc

SEQ ID NO: 1148811 - RNA, 19 nt, Artificial Sequence
  Description of Artificial Sequence: Synthetic oligonucleotide
aggcggugcuguuagggcc

SEQ ID NO: 1148812 - RNA, 19 nt, Artificial Sequence
  Description of Artificial Sequence: Synthetic oligonucleotide
cuuccugggauccugccag

SEQ ID NO: 1148813 - RNA, 19 nt, Artificial Sequence
  Description of Artificial Sequence: Synthetic oligonucleotide
cuuacauuacaggccagcc

SEQ ID NO: 1148814 - RNA, 19 nt, Artificial Sequence
  Description of Artificial Sequence: Synthetic oligonucleotide
ugcauugugugguaccgga

SEQ ID NO: 1148815 - RNA, 19 nt, Artificial Sequence
  Description of Artificial Sequence: Synthetic oligonucleotide
uucucaagggguuucgcuc

SEQ ID NO: 1148816 - RNA, 19 nt, Artificial Sequence
  Description of Artificial Sequence: Synthetic oligonucleotide
aggugagugacaccucagg

SEQ ID NO: 1148817 - RNA, 19 nt, Artificial Sequence
  Description of Artificial Sequence: Synthetic oligonucleotide
uugaagcaccgccaggaug

SEQ ID NO: 1148818 - RNA, 19 nt, Artificial Sequence
  Description of Artificial Sequence: Synthetic oligonucleotide
gauuaggaugaaaagccca

SEQ ID NO: 1148819 - RNA, 19 nt, Artificial Sequence
  Description of Artificial Sequence: Synthetic oligonucleotide
ucggauugaagcaccgcca

SEQ ID NO: 1148820 - RNA, 19 nt, Artificial Sequence
  Description of Artificial Sequence: Synthetic oligonucleotide
cuucugguagaaaucagga

SEQ ID NO: 1148821 - RNA, 19 nt, Artificial Sequence
  Description of Artificial Sequence: Synthetic oligonucleotide
agaaaucaggauauuccag

SEQ ID NO: 1148822 - RNA, 19 nt, Artificial Sequence
  Description of Artificial Sequence: Synthetic oligonucleotide
cauugugugguaccggaug

SEQ ID NO: 1148823 - RNA, 19 nt, Artificial Sequence
  Description of Artificial Sequence: Synthetic oligonucleotide
agugaaugaccuuccauuu

SEQ ID NO: 1148824 - RNA, 19 nt, Artificial Sequence
  Description of Artificial Sequence: Synthetic oligonucleotide
ggagggaugggucaguagc

SEQ ID NO: 1148825 - RNA, 19 nt, Artificial Sequence
  Description of Artificial Sequence: Synthetic oligonucleotide
caugagggugggcugagcc

SEQ ID NO: 1148826 - RNA, 19 nt, Artificial Sequence
  Description of Artificial Sequence: Synthetic oligonucleotide
cuucacauagaaguuggug

SEQ ID NO: 1148827 - RNA, 19 nt, Artificial Sequence
  Description of Artificial Sequence: Synthetic oligonucleotide
ggugguucgggccacagug

SEQ ID NO: 1148828 - RNA, 19 nt, Artificial Sequence
  Description of Artificial Sequence: Synthetic oligonucleotide
aagaguguacgagggaaga

SEQ ID NO: 1148829 - RNA, 19 nt, Artificial Sequence
  Description of Artificial Sequence: Synthetic oligonucleotide
aggaccguguccucgcgcg

SEQ ID NO: 1148830 - RNA, 19 nt, Artificial Sequence
  Description of Artificial Sequence: Synthetic oligonucleotide
ucaagugaaugaccuucca

SEQ ID NO: 1148831 - RNA, 19 nt, Artificial Sequence
  Description of Artificial Sequence: Synthetic oligonucleotide
accgcguuagccuggccac

SEQ ID NO: 1148832 - RNA, 19 nt, Artificial Sequence
  Description of Artificial Sequence: Synthetic oligonucleotide
guaccgaagagucggcugc

SEQ ID NO: 1148833 - RNA, 19 nt, Artificial Sequence
  Description of Artificial Sequence: Synthetic oligonucleotide
caaacaccgcguuagccug

SEQ ID NO: 1148834 - RNA, 19 nt, Artificial Sequence
  Description of Artificial Sequence: Synthetic oligonucleotide
gaaagaaacgggcucggua

SEQ ID NO: 1148835 - RNA, 19 nt, Artificial Sequence
  Description of Artificial Sequence: Synthetic oligonucleotide
uacucacagaacugggaga

SEQ ID NO: 1148836 - RNA, 19 nt, Artificial Sequence
  Description of Artificial Sequence: Synthetic oligonucleotide
caaugcuaaccucuggguc

SEQ ID NO: 1148837 - RNA, 19 nt, Artificial Sequence
  Description of Artificial Sequence: Synthetic oligonucleotide
ugcgcaacagguugcaaau

SEQ ID NO: 1148838 - RNA, 19 nt, Artificial Sequence
  Description of Artificial Sequence: Synthetic oligonucleotide
aggcguuuugcaaaggcag

SEQ ID NO: 1148839 - RNA, 19 nt, Artificial Sequence
  Description of Artificial Sequence: Synthetic oligonucleotide
uccucggauugaagcaccg

SEQ ID NO: 1148840 - RNA, 19 nt, Artificial Sequence
  Description of Artificial Sequence: Synthetic oligonucleotide
ugguagcggugucucaucc

SEQ ID NO: 1148841 - RNA, 19 nt, Artificial Sequence
  Description of Artificial Sequence: Synthetic oligonucleotide
gacaccucagguugcuggc

SEQ ID NO: 1148842 - RNA, 19 nt, Artificial Sequence
  Description of Artificial Sequence: Synthetic oligonucleotide
aacaccgcguuagccuggc

SEQ ID NO: 1148843 - RNA, 19 nt, Artificial Sequence
  Description of Artificial Sequence: Synthetic oligonucleotide
agguugcacuccuggaggg

SEQ ID NO: 1148844 - RNA, 19 nt, Artificial Sequence
  Description of Artificial Sequence: Synthetic oligonucleotide
guagcggugucucauccac

SEQ ID NO: 1148845 - RNA, 19 nt, Artificial Sequence
  Description of Artificial Sequence: Synthetic oligonucleotide
gugaaugaccuuccauuug

SEQ ID NO: 1148846 - RNA, 19 nt, Artificial Sequence
  Description of Artificial Sequence: Synthetic oligonucleotide
uucuccauugggucauaug

SEQ ID NO: 1148847 - RNA, 19 nt, Artificial Sequence
  Description of Artificial Sequence: Synthetic oligonucleotide
accgccaggaugucaaaca

SEQ ID NO: 1148848 - RNA, 19 nt, Artificial Sequence
  Description of Artificial Sequence: Synthetic oligonucleotide
ugcaaauaaagggcaggac

SEQ ID NO: 1148849 - RNA, 19 nt, Artificial Sequence
  Description of Artificial Sequence: Synthetic oligonucleotide
agaggcaccgacccaggug

SEQ ID NO: 1148850 - RNA, 19 nt, Artificial Sequence
  Description of Artificial Sequence: Synthetic oligonucleotide
aagguaccgaagagucggc

SEQ ID NO: 1148851 - RNA, 19 nt, Artificial Sequence
  Description of Artificial Sequence: Synthetic oligonucleotide
ggcggugcaccauaacucg

SEQ ID NO: 1148852 - RNA, 19 nt, Artificial Sequence
  Description of Artificial Sequence: Synthetic oligonucleotide
agaggucauccugucggcc

SEQ ID NO: 1148853 - RNA, 19 nt, Artificial Sequence
  Description of Artificial Sequence: Synthetic oligonucleotide
gaggucggccaagugaaag

SEQ ID NO: 1148854 - RNA, 19 nt, Artificial Sequence
  Description of Artificial Sequence: Synthetic oligonucleotide
auuaggaugaaaagcccau

SEQ ID NO: 1148855 - RNA, 19 nt, Artificial Sequence
  Description of Artificial Sequence: Synthetic oligonucleotide
guuagcaccgccugcagua

SEQ ID NO: 1148856 - RNA, 19 nt, Artificial Sequence
  Description of Artificial Sequence: Synthetic oligonucleotide
aaacgggcucgguacuuga

SEQ ID NO: 1148857 - RNA, 19 nt, Artificial Sequence
  Description of Artificial Sequence: Synthetic oligonucleotide
acucacagaacugggagau

SEQ ID NO: 1148858 - RNA, 19 nt, Artificial Sequence
  Description of Artificial Sequence: Synthetic oligonucleotide
agugucuugagggccagcu

SEQ ID NO: 1148859 - RNA, 19 nt, Artificial Sequence
  Description of Artificial Sequence: Synthetic oligonucleotide
gagcuucugguagaaauca

SEQ ID NO: 1148860 - RNA, 19 nt, Artificial Sequence
  Description of Artificial Sequence: Synthetic oligonucleotide
caccaguaccuucuuguag

SEQ ID NO: 1148861 - RNA, 19 nt, Artificial Sequence
  Description of Artificial Sequence: Synthetic oligonucleotide
ugugagcaggccuccuacc

SEQ ID NO: 1148862 - RNA, 19 nt, Artificial Sequence
  Description of Artificial Sequence: Synthetic oligonucleotide
agguuaugcuuauggauua

SEQ ID NO: 1148863 - RNA, 19 nt, Artificial Sequence
  Description of Artificial Sequence: Synthetic oligonucleotide
agagucggcugcaugugcg

SEQ ID NO: 1148864 - RNA, 19 nt, Artificial Sequence
  Description of Artificial Sequence: Synthetic oligonucleotide
cuaccacugcccugaagag

SEQ ID NO: 1148865 - RNA, 19 nt, Artificial Sequence
  Description of Artificial Sequence: Synthetic oligonucleotide
uauuccagguuaugcuuau

SEQ ID NO: 1148866 - RNA, 19 nt, Artificial Sequence
  Description of Artificial Sequence: Synthetic oligonucleotide
ugguucgggccacagugcu

SEQ ID NO: 1148867 - RNA, 19 nt, Artificial Sequence
  Description of Artificial Sequence: Synthetic oligonucleotide
aguguacgagggaagaggu

SEQ ID NO: 1148868 - RNA, 19 nt, Artificial Sequence
  Description of Artificial Sequence: Synthetic oligonucleotide
cauccugucggcccagcag

SEQ ID NO: 1148869 - RNA, 19 nt, Artificial Sequence
  Description of Artificial Sequence: Synthetic oligonucleotide
gaagagucggcugcaugug

SEQ ID NO: 1148870 - RNA, 19 nt, Artificial Sequence
  Description of Artificial Sequence: Synthetic oligonucleotide
ugugguagcggugucucau

SEQ ID NO: 1148871 - RNA, 19 nt, Artificial Sequence
  Description of Artificial Sequence: Synthetic oligonucleotide
gugaaagaaacgggcucgg

SEQ ID NO: 1148872 - RNA, 19 nt, Artificial Sequence
  Description of Artificial Sequence: Synthetic oligonucleotide
gaacugggcgcagagguca

SEQ ID NO: 1148873 - RNA, 19 nt, Artificial Sequence
  Description of Artificial Sequence: Synthetic oligonucleotide
ggaccuuacauuacaggcc

SEQ ID NO: 1148874 - RNA, 19 nt, Artificial Sequence
  Description of Artificial Sequence: Synthetic oligonucleotide
cuugacaugaaagauggau

SEQ ID NO: 1148875 - RNA, 19 nt, Artificial Sequence
  Description of Artificial Sequence: Synthetic oligonucleotide
acgaacagcucuucccgcu

SEQ ID NO: 1148876 - RNA, 19 nt, Artificial Sequence
  Description of Artificial Sequence: Synthetic oligonucleotide
agaguguacgagggaagag

SEQ ID NO: 1148877 - RNA, 19 nt, Artificial Sequence
  Description of Artificial Sequence: Synthetic oligonucleotide
uacgagggaagagguagug

SEQ ID NO: 1148878 - RNA, 19 nt, Artificial Sequence
  Description of Artificial Sequence: Synthetic oligonucleotide
guucgggccacagugcuug

SEQ ID NO: 1148879 - RNA, 19 nt, Artificial Sequence
  Description of Artificial Sequence: Synthetic oligonucleotide
ugcccugaagaguguacga

SEQ ID NO: 1148880 - RNA, 19 nt, Artificial Sequence
  Description of Artificial Sequence: Synthetic oligonucleotide
agcaccgccugcaguaggc

SEQ ID NO: 1148881 - RNA, 19 nt, Artificial Sequence
  Description of Artificial Sequence: Synthetic oligonucleotide
accaaguaggcagggaggu

SEQ ID NO: 1148882 - RNA, 19 nt, Artificial Sequence
  Description of Artificial Sequence: Synthetic oligonucleotide
aggucggccaagugaaaga

SEQ ID NO: 1148883 - RNA, 19 nt, Artificial Sequence
  Description of Artificial Sequence: Synthetic oligonucleotide
ucauauggaucagcacuga

SEQ ID NO: 1148884 - RNA, 19 nt, Artificial Sequence
  Description of Artificial Sequence: Synthetic oligonucleotide
gaugaacuccagaggcacc

SEQ ID NO: 1148885 - RNA, 19 nt, Artificial Sequence
  Description of Artificial Sequence: Synthetic oligonucleotide
gcgguuacaacagcugugg

SEQ ID NO: 1148886 - RNA, 19 nt, Artificial Sequence
  Description of Artificial Sequence: Synthetic oligonucleotide
accgccugcaguaggcggc

SEQ ID NO: 1148887 - RNA, 19 nt, Artificial Sequence
  Description of Artificial Sequence: Synthetic oligonucleotide
ccuaccacugcccugaaga

SEQ ID NO: 1148888 - RNA, 19 nt, Artificial Sequence
  Description of Artificial Sequence: Synthetic oligonucleotide
guugcacuccuggaggggc

SEQ ID NO: 1148889 - RNA, 19 nt, Artificial Sequence
  Description of Artificial Sequence: Synthetic oligonucleotide
aacgggcucgguacuugac

SEQ ID NO: 1148890 - RNA, 19 nt, Artificial Sequence
  Description of Artificial Sequence: Synthetic oligonucleotide
uugucugaugucugugcau

SEQ ID NO: 1148891 - RNA, 19 nt, Artificial Sequence
  Description of Artificial Sequence: Synthetic oligonucleotide
ucguuagcaccgccugcag

SEQ ID NO: 1148892 - RNA, 19 nt, Artificial Sequence
  Description of Artificial Sequence: Synthetic oligonucleotide
aaacaccgcguuagccugg

SEQ ID NO: 1148893 - RNA, 19 nt, Artificial Sequence
  Description of Artificial Sequence: Synthetic oligonucleotide
caccacccacaucacaggc

SEQ ID NO: 1148894 - RNA, 19 nt, Artificial Sequence
  Description of Artificial Sequence: Synthetic oligonucleotide
gguaccgaagagucggcug

SEQ ID NO: 1148895 - RNA, 19 nt, Artificial Sequence
  Description of Artificial Sequence: Synthetic oligonucleotide
ggauuaggaugaaaagccc

SEQ ID NO: 1148896 - RNA, 19 nt, Artificial Sequence
  Description of Artificial Sequence: Synthetic oligonucleotide
cugguagaaaucaggauau

SEQ ID NO: 1148897 - RNA, 19 nt, Artificial Sequence
  Description of Artificial Sequence: Synthetic oligonucleotide
uuagcaccgccugcaguag

SEQ ID NO: 1148898 - RNA, 19 nt, Artificial Sequence
  Description of Artificial Sequence: Synthetic oligonucleotide
gaaacgggcucgguacuug

SEQ ID NO: 1148899 - RNA, 19 nt, Artificial Sequence
  Description of Artificial Sequence: Synthetic oligonucleotide
ggauauuccagguuaugcu

SEQ ID NO: 1148900 - RNA, 19 nt, Artificial Sequence
  Description of Artificial Sequence: Synthetic oligonucleotide
gacaugaaagauggaugga

SEQ ID NO: 1148901 - RNA, 19 nt, Artificial Sequence
  Description of Artificial Sequence: Synthetic oligonucleotide
ccacgaacagcucuucccg

SEQ ID NO: 1148902 - RNA, 19 nt, Artificial Sequence
  Description of Artificial Sequence: Synthetic oligonucleotide
acggcucguuagcaccgcc

SEQ ID NO: 1148903 - RNA, 19 nt, Artificial Sequence
  Description of Artificial Sequence: Synthetic oligonucleotide
agcaacacgaaggcauugu

SEQ ID NO: 1148904 - RNA, 19 nt, Artificial Sequence
  Description of Artificial Sequence: Synthetic oligonucleotide
auugaagcaccgccaggau

SEQ ID NO: 1148905 - RNA, 19 nt, Artificial Sequence
  Description of Artificial Sequence: Synthetic oligonucleotide
acgggcucgguacuugaca

SEQ ID NO: 1148906 - RNA, 19 nt, Artificial Sequence
  Description of Artificial Sequence: Synthetic oligonucleotide
gugcaccauaacucggcag

SEQ ID NO: 1148907 - RNA, 19 nt, Artificial Sequence
  Description of Artificial Sequence: Synthetic oligonucleotide
gaaguucccacaagcagcu

SEQ ID NO: 1148908 - RNA, 19 nt, Artificial Sequence
  Description of Artificial Sequence: Synthetic oligonucleotide
ccaccaaguaggcagggag

SEQ ID NO: 1148909 - RNA, 19 nt, Artificial Sequence
  Description of Artificial Sequence: Synthetic oligonucleotide
uauccuccggguccucgga

SEQ ID NO: 1148910 - RNA, 19 nt, Artificial Sequence
  Description of Artificial Sequence: Synthetic oligonucleotide
aggaugucaaacaccgcgu

SEQ ID NO: 1148911 - RNA, 19 nt, Artificial Sequence
  Description of Artificial Sequence: Synthetic oligonucleotide
caggcguuuugcaaaggca

SEQ ID NO: 1148912 - RNA, 19 nt, Artificial Sequence
  Description of Artificial Sequence: Synthetic oligonucleotide
cuggccacggcucguuagc

SEQ ID NO: 1148913 - RNA, 19 nt, Artificial Sequence
  Description of Artificial Sequence: Synthetic oligonucleotide
gguugcaaauaaagggcag

SEQ ID NO: 1148914 - RNA, 19 nt, Artificial Sequence
  Description of Artificial Sequence: Synthetic oligonucleotide
caguaaguuccaggagugg

SEQ ID NO: 1148915 - RNA, 19 nt, Artificial Sequence
  Description of Artificial Sequence: Synthetic oligonucleotide
cugggcgcagaggucaucc

SEQ ID NO: 1148916 - RNA, 19 nt, Artificial Sequence
  Description of Artificial Sequence: Synthetic oligonucleotide
agcgagcccacgaacagcu

SEQ ID NO: 1148917 - RNA, 19 nt, Artificial Sequence
  Description of Artificial Sequence: Synthetic oligonucleotide
gugcuguuagggccagccg

SEQ ID NO: 1148918 - RNA, 19 nt, Artificial Sequence
  Description of Artificial Sequence: Synthetic oligonucleotide
acacgaaggcauuguucca

SEQ ID NO: 1148919 - RNA, 19 nt, Artificial Sequence
  Description of Artificial Sequence: Synthetic oligonucleotide
gcagcuugugcuuaaggaa

SEQ ID NO: 1148920 - RNA, 19 nt, Artificial Sequence
  Description of Artificial Sequence: Synthetic oligonucleotide
augcuaaccucugggucag

SEQ ID NO: 1148921 - RNA, 19 nt, Artificial Sequence
  Description of Artificial Sequence: Synthetic oligonucleotide
uccuaccacugcccugaag

SEQ ID NO: 1148922 - RNA, 19 nt, Artificial Sequence
  Description of Artificial Sequence: Synthetic oligonucleotide
guagugcugcuggagggcc

SEQ ID NO: 1148923 - RNA, 19 nt, Artificial Sequence
  Description of Artificial Sequence: Synthetic oligonucleotide
auugggucauauggaucag

SEQ ID NO: 1148924 - RNA, 19 nt, Artificial Sequence
  Description of Artificial Sequence: Synthetic oligonucleotide
agaaggugagugacaccuc

SEQ ID NO: 1148925 - RNA, 19 nt, Artificial Sequence
  Description of Artificial Sequence: Synthetic oligonucleotide
cucgguacuugacaugaaa

SEQ ID NO: 1148926 - RNA, 19 nt, Artificial Sequence
  Description of Artificial Sequence: Synthetic oligonucleotide
aggaguggugcaaugcuaa

SEQ ID NO: 1148927 - RNA, 19 nt, Artificial Sequence
  Description of Artificial Sequence: Synthetic oligonucleotide
ccauaacucggcaggcagg

SEQ ID NO: 1148928 - RNA, 19 nt, Artificial Sequence
  Description of Artificial Sequence: Synthetic oligonucleotide
gugguaccggaugucauca

SEQ ID NO: 1148929 - RNA, 19 nt, Artificial Sequence
  Description of Artificial Sequence: Synthetic oligonucleotide
gacaccucaggaugguagu

SEQ ID NO: 1148930 - RNA, 19 nt, Artificial Sequence
  Description of Artificial Sequence: Synthetic oligonucleotide
ugugggcggugcaccauaa

SEQ ID NO: 1148931 - RNA, 19 nt, Artificial Sequence
  Description of Artificial Sequence: Synthetic oligonucleotide
uagcggugucucauccaca

SEQ ID NO: 1148932 - RNA, 19 nt, Artificial Sequence
  Description of Artificial Sequence: Synthetic oligonucleotide
uugugggcggugcaccaua

SEQ ID NO: 1148933 - RNA, 19 nt, Artificial Sequence
  Description of Artificial Sequence: Synthetic oligonucleotide
gcaugugcguacuccuucc

SEQ ID NO: 1148934 - RNA, 19 nt, Artificial Sequence
  Description of Artificial Sequence: Synthetic oligonucleotide
caggauauuccagguuaug

SEQ ID NO: 1148935 - RNA, 19 nt, Artificial Sequence
  Description of Artificial Sequence: Synthetic oligonucleotide
caagggguuucgcuccuuc

SEQ ID NO: 1148936 - RNA, 19 nt, Artificial Sequence
  Description of Artificial Sequence: Synthetic oligonucleotide
ugcguacuccuuccuggau

SEQ ID NO: 1148937 - RNA, 19 nt, Artificial Sequence
  Description of Artificial Sequence: Synthetic oligonucleotide
gccacggcucguuagcacc

SEQ ID NO: 1148938 - RNA, 19 nt, Artificial Sequence
  Description of Artificial Sequence: Synthetic oligonucleotide
gucggcugcaugugcguac

SEQ ID NO: 1148939 - RNA, 19 nt, Artificial Sequence
  Description of Artificial Sequence: Synthetic oligonucleotide
uaccggaugucaucauauu

SEQ ID NO: 1148940 - RNA, 19 nt, Artificial Sequence
  Description of Artificial Sequence: Synthetic oligonucleotide
cucguuagcaccgccugca

SEQ ID NO: 1148941 - RNA, 19 nt, Artificial Sequence
  Description of Artificial Sequence: Synthetic oligonucleotide
gguuaugcuuauggauuag

SEQ ID NO: 1148942 - RNA, 19 nt, Artificial Sequence
  Description of Artificial Sequence: Synthetic oligonucleotide
gcguuuugcaaaggcagcc

SEQ ID NO: 1148943 - RNA, 19 nt, Artificial Sequence
  Description of Artificial Sequence: Synthetic oligonucleotide
ggcucguuagcaccgccug

SEQ ID NO: 1148944 - RNA, 19 nt, Artificial Sequence
  Description of Artificial Sequence: Synthetic oligonucleotide
auccugccaggaccguguc

SEQ ID NO: 1148945 - RNA, 19 nt, Artificial Sequence
  Description of Artificial Sequence: Synthetic oligonucleotide
gguacuugacaugaaagau

SEQ ID NO: 1148946 - RNA, 19 nt, Artificial Sequence
  Description of Artificial Sequence: Synthetic oligonucleotide
caccgcguuagccuggcca

SEQ ID NO: 1148947 - RNA, 19 nt, Artificial Sequence
  Description of Artificial Sequence: Synthetic oligonucleotide
gcaagguaccgaagagucg

SEQ ID NO: 1148948 - RNA, 19 nt, Artificial Sequence
  Description of Artificial Sequence: Synthetic oligonucleotide
ggauggauccaggaggcca

SEQ ID NO: 1148949 - RNA, 19 nt, Artificial Sequence
  Description of Artificial Sequence: Synthetic oligonucleotide
aaggagggaugggucagua

SEQ ID NO: 1148950 - RNA, 19 nt, Artificial Sequence
  Description of Artificial Sequence: Synthetic oligonucleotide
gccaagccacaucuccugg

SEQ ID NO: 1148951 - RNA, 19 nt, Artificial Sequence
  Description of Artificial Sequence: Synthetic oligonucleotide
gugagugacaccucagguu

SEQ ID NO: 1148952 - RNA, 19 nt, Artificial Sequence
  Description of Artificial Sequence: Synthetic oligonucleotide
cuuauggauuaggaugaaa

SEQ ID NO: 1148953 - RNA, 19 nt, Artificial Sequence
  Description of Artificial Sequence: Synthetic oligonucleotide
ucggcugcaugugcguacu

SEQ ID NO: 1148954 - RNA, 19 nt, Artificial Sequence
  Description of Artificial Sequence: Synthetic oligonucleotide
ggguccucggauugaagca

SEQ ID NO: 1148955 - RNA, 19 nt, Artificial Sequence
  Description of Artificial Sequence: Synthetic oligonucleotide
cgcucaaagaucucauaug

SEQ ID NO: 1148956 - RNA, 19 nt, Artificial Sequence
  Description of Artificial Sequence: Synthetic oligonucleotide
cagcagauagcaacacgaa

SEQ ID NO: 1148957 - RNA, 19 nt, Artificial Sequence
  Description of Artificial Sequence: Synthetic oligonucleotide
ggcguuuugcaaaggcagc

SEQ ID NO: 1148958 - RNA, 19 nt, Artificial Sequence
  Description of Artificial Sequence: Synthetic oligonucleotide
guccucggauugaagcacc

SEQ ID NO: 1148959 - RNA, 19 nt, Artificial Sequence
  Description of Artificial Sequence: Synthetic oligonucleotide
guccucgcgcggcagcgag

SEQ ID NO: 1148960 - RNA, 19 nt, Artificial Sequence
  Description of Artificial Sequence: Synthetic oligonucleotide
ggugagugacaccucaggu

SEQ ID NO: 1148961 - RNA, 19 nt, Artificial Sequence
  Description of Artificial Sequence: Synthetic oligonucleotide
gcccauucaaggccaggag

SEQ ID NO: 1148962 - RNA, 19 nt, Artificial Sequence
  Description of Artificial Sequence: Synthetic oligonucleotide
ggcgguuacaacagcugug

SEQ ID NO: 1148963 - RNA, 19 nt, Artificial Sequence
  Description of Artificial Sequence: Synthetic oligonucleotide
guggugcaaugcuaaccuc

SEQ ID NO: 1148964 - RNA, 19 nt, Artificial Sequence
  Description of Artificial Sequence: Synthetic oligonucleotide
aguaggcggcccagcuccc

SEQ ID NO: 1148965 - RNA, 19 nt, Artificial Sequence
  Description of Artificial Sequence: Synthetic oligonucleotide
caggaccguguccucgcgc

SEQ ID NO: 1148966 - RNA, 19 nt, Artificial Sequence
  Description of Artificial Sequence: Synthetic oligonucleotide
gcccugaagaguguacgag

SEQ ID NO: 1148967 - RNA, 19 nt, Artificial Sequence
  Description of Artificial Sequence: Synthetic oligonucleotide
caagugaaugaccuuccau

SEQ ID NO: 1148968 - RNA, 19 nt, Artificial Sequence
  Description of Artificial Sequence: Synthetic oligonucleotide
acaccgcguuagccuggcc

SEQ ID NO: 1148969 - RNA, 19 nt, Artificial Sequence
  Description of Artificial Sequence: Synthetic oligonucleotide
ucaugagggugggcugagc

SEQ ID NO: 1148970 - RNA, 19 nt, Artificial Sequence
  Description of Artificial Sequence: Synthetic oligonucleotide
gguugcacuccuggagggg

SEQ ID NO: 1148971 - RNA, 19 nt, Artificial Sequence
  Description of Artificial Sequence: Synthetic oligonucleotide
gguccucggauugaagcac

SEQ ID NO: 1148972 - RNA, 19 nt, Artificial Sequence
  Description of Artificial Sequence: Synthetic oligonucleotide
agguaccgaagagucggcu

SEQ ID NO: 1148973 - RNA, 19 nt, Artificial Sequence
  Description of Artificial Sequence: Synthetic oligonucleotide
ggguuucgcuccuuccagc

SEQ ID NO: 1148974 - RNA, 19 nt, Artificial Sequence
  Description of Artificial Sequence: Synthetic oligonucleotide
gugguagcggugucucauc

SEQ ID NO: 1148975 - RNA, 19 nt, Artificial Sequence
  Description of Artificial Sequence: Synthetic oligonucleotide
ggaguggugcaaugcuaac

SEQ ID NO: 1148976 - RNA, 19 nt, Artificial Sequence
  Description of Artificial Sequence: Synthetic oligonucleotide
ggugcaccauaacucggca

SEQ ID NO: 1148977 - RNA, 19 nt, Artificial Sequence
  Description of Artificial Sequence: Synthetic oligonucleotide
agcccgccgaagccgggag

SEQ ID NO: 1148978 - RNA, 19 nt, Artificial Sequence
  Description of Artificial Sequence: Synthetic oligonucleotide
ccucaggcggugcuguuag

SEQ ID NO: 1148979 - RNA, 19 nt, Artificial Sequence
  Description of Artificial Sequence: Synthetic oligonucleotide
guagaggcugaggggcagc

SEQ ID NO: 1148980 - RNA, 19 nt, Artificial Sequence
  Description of Artificial Sequence: Synthetic oligonucleotide
cagcgagcccacgaacagc

SEQ ID NO: 1148981 - RNA, 19 nt, Artificial Sequence
  Description of Artificial Sequence: Synthetic oligonucleotide
guaccggaugucaucauau

SEQ ID NO: 1148982 - RNA, 19 nt, Artificial Sequence
  Description of Artificial Sequence: Synthetic oligonucleotide
caggaguggugcaaugcua

SEQ ID NO: 1148983 - RNA, 19 nt, Artificial Sequence
  Description of Artificial Sequence: Synthetic oligonucleotide
uccggguccucggauugaa

SEQ ID NO: 1148984 - RNA, 19 nt, Artificial Sequence
  Description of Artificial Sequence: Synthetic oligonucleotide
gccacagugcuuguggcca

SEQ ID NO: 1148985 - RNA, 19 nt, Artificial Sequence
  Description of Artificial Sequence: Synthetic oligonucleotide
gcuaaccucugggucagac

SEQ ID NO: 1148986 - RNA, 19 nt, Artificial Sequence
  Description of Artificial Sequence: Synthetic oligonucleotide
caccgccaggaugucaaac

SEQ ID NO: 1148987 - RNA, 19 nt, Artificial Sequence
  Description of Artificial Sequence: Synthetic oligonucleotide
ggccugaaguucccacaag

SEQ ID NO: 1148988 - RNA, 19 nt, Artificial Sequence
  Description of Artificial Sequence: Synthetic oligonucleotide
acagugcuuguggccaccu

SEQ ID NO: 1148989 - RNA, 19 nt, Artificial Sequence
  Description of Artificial Sequence: Synthetic oligonucleotide
gguagcggugucucaucca

SEQ ID NO: 1148990 - RNA, 19 nt, Artificial Sequence
  Description of Artificial Sequence: Synthetic oligonucleotide
ucugcgcaacagguugcaa

SEQ ID NO: 1148991 - RNA, 19 nt, Artificial Sequence
  Description of Artificial Sequence: Synthetic oligonucleotide
agccgggccaggcguuuug

SEQ ID NO: 1148992 - RNA, 19 nt, Artificial Sequence
  Description of Artificial Sequence: Synthetic oligonucleotide
guguguggcuuccugggau

SEQ ID NO: 1148993 - RNA, 19 nt, Artificial Sequence
  Description of Artificial Sequence: Synthetic oligonucleotide
gcucguuagcaccgccugc

SEQ ID NO: 1148994 - RNA, 19 nt, Artificial Sequence
  Description of Artificial Sequence: Synthetic oligonucleotide
gccaggaccguguccucgc

SEQ ID NO: 1148995 - RNA, 19 nt, Artificial Sequence
  Description of Artificial Sequence: Synthetic oligonucleotide
uggcaggauccuucuccau

SEQ ID NO: 1148996 - RNA, 19 nt, Artificial Sequence
  Description of Artificial Sequence: Synthetic oligonucleotide
caggucagcugagagugaa

SEQ ID NO: 1148997 - RNA, 19 nt, Artificial Sequence
  Description of Artificial Sequence: Synthetic oligonucleotide
acugggcgcagaggucauc

SEQ ID NO: 1148998 - RNA, 19 nt, Artificial Sequence
  Description of Artificial Sequence: Synthetic oligonucleotide
gcaccauaacucggcaggc

SEQ ID NO: 1148999 - RNA, 19 nt, Artificial Sequence
  Description of Artificial Sequence: Synthetic oligonucleotide
ggagacgguccaugccgcc

SEQ ID NO: 1149000 - RNA, 19 nt, Artificial Sequence
  Description of Artificial Sequence: Synthetic oligonucleotide
ccgccaggaugucaaacac

SEQ ID NO: 1149001 - RNA, 19 nt, Artificial Sequence
  Description of Artificial Sequence: Synthetic oligonucleotide
caccugcauugugugguac

SEQ ID NO: 1149002 - RNA, 19 nt, Artificial Sequence
  Description of Artificial Sequence: Synthetic oligonucleotide
ccuggccacggcucguuag

SEQ ID NO: 1149003 - RNA, 19 nt, Artificial Sequence
  Description of Artificial Sequence: Synthetic oligonucleotide
gccgggagacgguccaugc

SEQ ID NO: 1149004 - RNA, 19 nt, Artificial Sequence
  Description of Artificial Sequence: Synthetic oligonucleotide
ggucggccaagugaaagaa

SEQ ID NO: 1149005 - RNA, 19 nt, Artificial Sequence
  Description of Artificial Sequence: Synthetic oligonucleotide
gagucggcugcaugugcgu

SEQ ID NO: 1149006 - RNA, 19 nt, Artificial Sequence
  Description of Artificial Sequence: Synthetic oligonucleotide
caccauaacucggcaggca

SEQ ID NO: 1149007 - RNA, 19 nt, Artificial Sequence
  Description of Artificial Sequence: Synthetic oligonucleotide
gucugcgcaacagguugca

SEQ ID NO: 1149008 - RNA, 19 nt, Artificial Sequence
  Description of Artificial Sequence: Synthetic oligonucleotide
ccacacuuuguauuugugu

SEQ ID NO: 1149009 - RNA, 19 nt, Artificial Sequence
  Description of Artificial Sequence: Synthetic oligonucleotide
caccgacccagguguuuuc

SEQ ID NO: 1149010 - RNA, 19 nt, Artificial Sequence
  Description of Artificial Sequence: Synthetic oligonucleotide
ggauccugccaggaccgug

SEQ ID NO: 1149011 - RNA, 19 nt, Artificial Sequence
  Description of Artificial Sequence: Synthetic oligonucleotide
gcggugcaccauaacucgg

SEQ ID NO: 1149012 - RNA, 19 nt, Artificial Sequence
  Description of Artificial Sequence: Synthetic oligonucleotide
uucgggccacagugcuugu

SEQ ID NO: 1149013 - RNA, 19 nt, Artificial Sequence
  Description of Artificial Sequence: Synthetic oligonucleotide
gggagacgguccaugccgc

SEQ ID NO: 1149014 - RNA, 19 nt, Artificial Sequence
  Description of Artificial Sequence: Synthetic oligonucleotide
aacugggcgcagaggucau

SEQ ID NO: 1149015 - RNA, 19 nt, Artificial Sequence
  Description of Artificial Sequence: Synthetic oligonucleotide
cacggcucguuagcaccgc

SEQ ID NO: 1149016 - RNA, 19 nt, Artificial Sequence
  Description of Artificial Sequence: Synthetic oligonucleotide
ggcugggaugaacuccaga

SEQ ID NO: 1149017 - RNA, 19 nt, Artificial Sequence
  Description of Artificial Sequence: Synthetic oligonucleotide
cagcaggccuuuggcuggg

SEQ ID NO: 1149018 - RNA, 19 nt, Artificial Sequence
  Description of Artificial Sequence: Synthetic oligonucleotide
gaagcaccgccaggauguc

SEQ ID NO: 1149019 - RNA, 19 nt, Artificial Sequence
  Description of Artificial Sequence: Synthetic oligonucleotide
ccgaagagucggcugcaug

SEQ ID NO: 1149020 - RNA, 19 nt, Artificial Sequence
  Description of Artificial Sequence: Synthetic oligonucleotide
cucgggugugagcaggccu

SEQ ID NO: 1149021 - RNA, 19 nt, Artificial Sequence
  Description of Artificial Sequence: Synthetic oligonucleotide
ggaagucaaucaugagggu

SEQ ID NO: 1149022 - RNA, 19 nt, Artificial Sequence
  Description of Artificial Sequence: Synthetic oligonucleotide
guaggcggcccagcucccc

SEQ ID NO: 1149023 - RNA, 19 nt, Artificial Sequence
  Description of Artificial Sequence: Synthetic oligonucleotide
guaccuucuuguagaggcu

SEQ ID NO: 1149024 - RNA, 19 nt, Artificial Sequence
  Description of Artificial Sequence: Synthetic oligonucleotide
agucggcugcaugugcgua

SEQ ID NO: 1149025 - RNA, 19 nt, Artificial Sequence
  Description of Artificial Sequence: Synthetic oligonucleotide
gucggccaagugaaagaaa

SEQ ID NO: 1149026 - RNA, 19 nt, Artificial Sequence
  Description of Artificial Sequence: Synthetic oligonucleotide
gccaccugcauuguguggu

SEQ ID NO: 1149027 - RNA, 19 nt, Artificial Sequence
  Description of Artificial Sequence: Synthetic oligonucleotide
cgcagaggucauccugucg

SEQ ID NO: 1149028 - RNA, 19 nt, Artificial Sequence
  Description of Artificial Sequence: Synthetic oligonucleotide
cauucaaggccaggaggcu

SEQ ID NO: 1149029 - RNA, 19 nt, Artificial Sequence
  Description of Artificial Sequence: Synthetic oligonucleotide
ucaagggguuucgcuccuu

SEQ ID NO: 1149030 - RNA, 19 nt, Artificial Sequence
  Description of Artificial Sequence: Synthetic oligonucleotide
ccgggagacgguccaugcc

SEQ ID NO: 1149031 - RNA, 19 nt, Artificial Sequence
  Description of Artificial Sequence: Synthetic oligonucleotide
gccuccuaccacugcccug

SEQ ID NO: 1149032 - RNA, 19 nt, Artificial Sequence
  Description of Artificial Sequence: Synthetic oligonucleotide
guacgagggaagagguagu

SEQ ID NO: 1149033 - RNA, 19 nt, Artificial Sequence
  Description of Artificial Sequence: Synthetic oligonucleotide
caugugcguacuccuuccu

SEQ ID NO: 1149034 - RNA, 19 nt, Artificial Sequence
  Description of Artificial Sequence: Synthetic oligonucleotide
ccucggauugaagcaccgc

SEQ ID NO: 1149035 - RNA, 19 nt, Artificial Sequence
  Description of Artificial Sequence: Synthetic oligonucleotide
guguacgagggaagaggua

SEQ ID NO: 1149036 - RNA, 19 nt, Artificial Sequence
  Description of Artificial Sequence: Synthetic oligonucleotide
ccaggaccguguccucgcg

SEQ ID NO: 1149037 - RNA, 19 nt, Artificial Sequence
  Description of Artificial Sequence: Synthetic oligonucleotide
agaggucggccaagugaaa

SEQ ID NO: 1149038 - RNA, 19 nt, Artificial Sequence
  Description of Artificial Sequence: Synthetic oligonucleotide
ccaaguaggcagggaggug

SEQ ID NO: 1149039 - RNA, 19 nt, Artificial Sequence
  Description of Artificial Sequence: Synthetic oligonucleotide
gagcccgccgaagccggga

SEQ ID NO: 1149040 - RNA, 19 nt, Artificial Sequence
  Description of Artificial Sequence: Synthetic oligonucleotide
ggcgcagaggucauccugu

SEQ ID NO: 1149041 - RNA, 19 nt, Artificial Sequence
  Description of Artificial Sequence: Synthetic oligonucleotide
ugcuaaccucugggucaga

SEQ ID NO: 1149042 - RNA, 19 nt, Artificial Sequence
  Description of Artificial Sequence: Synthetic oligonucleotide
cuccccgcgggagcccgcc

SEQ ID NO: 1149043 - RNA, 19 nt, Artificial Sequence
  Description of Artificial Sequence: Synthetic oligonucleotide
gcguuagccuggccacggc

SEQ ID NO: 1149044 - RNA, 19 nt, Artificial Sequence
  Description of Artificial Sequence: Synthetic oligonucleotide
cucaagggguuucgcuccu

SEQ ID NO: 1149045 - RNA, 19 nt, Artificial Sequence
  Description of Artificial Sequence: Synthetic oligonucleotide
cgcguuagccuggccacgg

SEQ ID NO: 1149046 - RNA, 19 nt, Artificial Sequence
  Description of Artificial Sequence: Synthetic oligonucleotide
guacuccuuccuggauauc

SEQ ID NO: 1149047 - RNA, 19 nt, Artificial Sequence
  Description of Artificial Sequence: Synthetic oligonucleotide
gcgcagaggucauccuguc

SEQ ID NO: 1149048 - RNA, 19 nt, Artificial Sequence
  Description of Artificial Sequence: Synthetic oligonucleotide
gcuuauggauuaggaugaa

SEQ ID NO: 1149049 - RNA, 19 nt, Artificial Sequence
  Description of Artificial Sequence: Synthetic oligonucleotide
cucgcgcggcagcgagccc

SEQ ID NO: 1149050 - RNA, 19 nt, Artificial Sequence
  Description of Artificial Sequence: Synthetic oligonucleotide
cugcaugugcguacuccuu

SEQ ID NO: 1149051 - RNA, 19 nt, Artificial Sequence
  Description of Artificial Sequence: Synthetic oligonucleotide
ccggguccucggauugaag

SEQ ID NO: 1149052 - RNA, 19 nt, Artificial Sequence
  Description of Artificial Sequence: Synthetic oligonucleotide
cgggagcccgccgaagccg

SEQ ID NO: 1149053 - RNA, 19 nt, Artificial Sequence
  Description of Artificial Sequence: Synthetic oligonucleotide
agcaggccuuuggcuggga

SEQ ID NO: 1149054 - RNA, 19 nt, Artificial Sequence
  Description of Artificial Sequence: Synthetic oligonucleotide
ggugucucauccacacuuu

SEQ ID NO: 1149055 - RNA, 19 nt, Artificial Sequence
  Description of Artificial Sequence: Synthetic oligonucleotide
cuccggguccucggauuga

SEQ ID NO: 1149056 - RNA, 19 nt, Artificial Sequence
  Description of Artificial Sequence: Synthetic oligonucleotide
ccgcguuagccuggccacg

SEQ ID NO: 1149057 - RNA, 19 nt, Artificial Sequence
  Description of Artificial Sequence: Synthetic oligonucleotide
gcuucacauagaaguuggu

SEQ ID NO: 1149058 - RNA, 19 nt, Artificial Sequence
  Description of Artificial Sequence: Synthetic oligonucleotide
ccgccugcaguaggcggcc

SEQ ID NO: 1149059 - RNA, 19 nt, Artificial Sequence
  Description of Artificial Sequence: Synthetic oligonucleotide
cuugugggcggugcaccau

SEQ ID NO: 1149060 - RNA, 19 nt, Artificial Sequence
  Description of Artificial Sequence: Synthetic oligonucleotide
cgagcccacgaacagcucu

SEQ ID NO: 1149061 - RNA, 19 nt, Artificial Sequence
  Description of Artificial Sequence: Synthetic oligonucleotide
cuccuaccacugcccugaa

SEQ ID NO: 1149062 - RNA, 19 nt, Artificial Sequence
  Description of Artificial Sequence: Synthetic oligonucleotide
gcauugugugguaccggau

SEQ ID NO: 1149063 - RNA, 19 nt, Artificial Sequence
  Description of Artificial Sequence: Synthetic oligonucleotide
ccgcuccagcaagguaccg

SEQ ID NO: 1149064 - RNA, 19 nt, Artificial Sequence
  Description of Artificial Sequence: Synthetic oligonucleotide
gcgcaacagguugcaaaua

SEQ ID NO: 1149065 - RNA, 19 nt, Artificial Sequence
  Description of Artificial Sequence: Synthetic oligonucleotide
ccaccugcauuguguggua

SEQ ID NO: 1149066 - RNA, 19 nt, Artificial Sequence
  Description of Artificial Sequence: Synthetic oligonucleotide
gcucgguacuugacaugaa

SEQ ID NO: 1149067 - RNA, 19 nt, Artificial Sequence
  Description of Artificial Sequence: Synthetic oligonucleotide
gcaccgccaggaugucaaa

SEQ ID NO: 1149068 - RNA, 19 nt, Artificial Sequence
  Description of Artificial Sequence: Synthetic oligonucleotide
gcccgccgaagccgggaga

SEQ ID NO: 1149069 - RNA, 19 nt, Artificial Sequence
  Description of Artificial Sequence: Synthetic oligonucleotide
aggcaccgacccagguguu

SEQ ID NO: 1149070 - RNA, 19 nt, Artificial Sequence
  Description of Artificial Sequence: Synthetic oligonucleotide
cguuagccuggccacggcu

SEQ ID NO: 1149071 - RNA, 19 nt, Artificial Sequence
  Description of Artificial Sequence: Synthetic oligonucleotide
ccguguccucgcgcggcag

SEQ ID NO: 1149072 - RNA, 19 nt, Artificial Sequence
  Description of Artificial Sequence: Synthetic oligonucleotide
cguuagcaccgccugcagu

SEQ ID NO: 1149073 - RNA, 19 nt, Artificial Sequence
  Description of Artificial Sequence: Synthetic oligonucleotide
gcgagcccacgaacagcuc

SEQ ID NO: 1149074 - RNA, 19 nt, Artificial Sequence
  Description of Artificial Sequence: Synthetic oligonucleotide
gguucgggccacagugcuu

SEQ ID NO: 1149075 - RNA, 19 nt, Artificial Sequence
  Description of Artificial Sequence: Synthetic oligonucleotide
ccccgcgggagcccgccga

SEQ ID NO: 1149076 - RNA, 19 nt, Artificial Sequence
  Description of Artificial Sequence: Synthetic oligonucleotide
cggcucguuagcaccgccu

SEQ ID NO: 1149077 - RNA, 19 nt, Artificial Sequence
  Description of Artificial Sequence: Synthetic oligonucleotide
cgguuacaacagcuguggu

SEQ ID NO: 1149078 - RNA, 19 nt, Artificial Sequence
  Description of Artificial Sequence: Synthetic oligonucleotide
gggauccugccaggaccgu

SEQ ID NO: 1149079 - RNA, 19 nt, Artificial Sequence
  Description of Artificial Sequence: Synthetic oligonucleotide
gcgcggcagcgagcccacg

SEQ ID NO: 1149080 - RNA, 19 nt, Artificial Sequence
  Description of Artificial Sequence: Synthetic oligonucleotide
cggcugcaugugcguacuc

SEQ ID NO: 1149081 - RNA, 19 nt, Artificial Sequence
  Description of Artificial Sequence: Synthetic oligonucleotide
cccgcgggagcccgccgaa

SEQ ID NO: 1149082 - RNA, 19 nt, Artificial Sequence
  Description of Artificial Sequence: Synthetic oligonucleotide
aauuaguguccuuucaugc

SEQ ID NO: 1149083 - RNA, 19 nt, Artificial Sequence
  Description of Artificial Sequence: Synthetic oligonucleotide
uaagcgauaacucucaucc

SEQ ID NO: 1149084 - RNA, 19 nt, Artificial Sequence
  Description of Artificial Sequence: Synthetic oligonucleotide
agcaaaacauauuuaauag

SEQ ID NO: 1149085 - RNA, 19 nt, Artificial Sequence
  Description of Artificial Sequence: Synthetic oligonucleotide
uguaguuucagucaguguc

SEQ ID NO: 1149086 - RNA, 19 nt, Artificial Sequence
  Description of Artificial Sequence: Synthetic oligonucleotide
cuuguuugcagccauaggg

SEQ ID NO: 1149087 - RNA, 19 nt, Artificial Sequence
  Description of Artificial Sequence: Synthetic oligonucleotide
aauuuugcgcuuuggcagc

SEQ ID NO: 1149088 - RNA, 19 nt, Artificial Sequence
  Description of Artificial Sequence: Synthetic oligonucleotide
auaggcagagugcugagcc

SEQ ID NO: 1149089 - RNA, 19 nt, Artificial Sequence
  Description of Artificial Sequence: Synthetic oligonucleotide
gaaguuguggaaguuaugg

SEQ ID NO: 1149090 - RNA, 19 nt, Artificial Sequence
  Description of Artificial Sequence: Synthetic oligonucleotide
aggauagauguauugcucc

SEQ ID NO: 1149091 - RNA, 19 nt, Artificial Sequence
  Description of Artificial Sequence: Synthetic oligonucleotide
aaugguccugaacugagag

SEQ ID NO: 1149092 - RNA, 19 nt, Artificial Sequence
  Description of Artificial Sequence: Synthetic oligonucleotide
agcauguagcaguaggucc

SEQ ID NO: 1149093 - RNA, 19 nt, Artificial Sequence
  Description of Artificial Sequence: Synthetic oligonucleotide
caugcuaagguguauacac

SEQ ID NO: 1149094 - RNA, 19 nt, Artificial Sequence
  Description of Artificial Sequence: Synthetic oligonucleotide
uagaaugagaaauuuaaua

SEQ ID NO: 1149095 - RNA, 19 nt, Artificial Sequence
  Description of Artificial Sequence: Synthetic oligonucleotide
caauuuugcgcuuuggcag

SEQ ID NO: 1149096 - RNA, 19 nt, Artificial Sequence
  Description of Artificial Sequence: Synthetic oligonucleotide
gaauccgaauguuggaugg

SEQ ID NO: 1149097 - RNA, 19 nt, Artificial Sequence
  Description of Artificial Sequence: Synthetic oligonucleotide
aauguuggauggaaggugg

SEQ ID NO: 1149098 - RNA, 19 nt, Artificial Sequence
  Description of Artificial Sequence: Synthetic oligonucleotide
aguugaagccaccugugac

SEQ ID NO: 1149099 - RNA, 19 nt, Artificial Sequence
  Description of Artificial Sequence: Synthetic oligonucleotide
ugcaucaugaagcucuggc

SEQ ID NO: 1149100 - RNA, 19 nt, Artificial Sequence
  Description of Artificial Sequence: Synthetic oligonucleotide
auauccugagguuaugaag

SEQ ID NO: 1149101 - RNA, 19 nt, Artificial Sequence
  Description of Artificial Sequence: Synthetic oligonucleotide
uggugcaucaugaagcucu

SEQ ID NO: 1149102 - RNA, 19 nt, Artificial Sequence
  Description of Artificial Sequence: Synthetic oligonucleotide
aauuuaauauccugagguu

SEQ ID NO: 1149103 - RNA, 19 nt, Artificial Sequence
  Description of Artificial Sequence: Synthetic oligonucleotide
uacaaagggcucuucacag

SEQ ID NO: 1149104 - RNA, 19 nt, Artificial Sequence
  Description of Artificial Sequence: Synthetic oligonucleotide
agggauacaaccugccugg

SEQ ID NO: 1149105 - RNA, 19 nt, Artificial Sequence
  Description of Artificial Sequence: Synthetic oligonucleotide
acaauuuugcgcuuuggca

SEQ ID NO: 1149106 - RNA, 19 nt, Artificial Sequence
  Description of Artificial Sequence: Synthetic oligonucleotide
uuuagggauacuaccugcc

SEQ ID NO: 1149107 - RNA, 19 nt, Artificial Sequence
  Description of Artificial Sequence: Synthetic oligonucleotide
auacuaccugcccagcugc

SEQ ID NO: 1149108 - RNA, 19 nt, Artificial Sequence
  Description of Artificial Sequence: Synthetic oligonucleotide
aauuagccacaccuuuagg

SEQ ID NO: 1149109 - RNA, 19 nt, Artificial Sequence
  Description of Artificial Sequence: Synthetic oligonucleotide
gaauccuuagcuccggccc

SEQ ID NO: 1149110 - RNA, 19 nt, Artificial Sequence
  Description of Artificial Sequence: Synthetic oligonucleotide
uggacuuaagcgauaacuc

SEQ ID NO: 1149111 - RNA, 19 nt, Artificial Sequence
  Description of Artificial Sequence: Synthetic oligonucleotide
aauauccugagguuaugaa

SEQ ID NO: 1149112 - RNA, 19 nt, Artificial Sequence
  Description of Artificial Sequence: Synthetic oligonucleotide
uguagcgccgugcacuggg

SEQ ID NO: 1149113 - RNA, 19 nt, Artificial Sequence
  Description of Artificial Sequence: Synthetic oligonucleotide
ugugcgagcacaucgcuga

SEQ ID NO: 1149114 - RNA, 19 nt, Artificial Sequence
  Description of Artificial Sequence: Synthetic oligonucleotide
agcgauaacucucauccug

SEQ ID NO: 1149115 - RNA, 19 nt, Artificial Sequence
  Description of Artificial Sequence: Synthetic oligonucleotide
aacccuugacaauggcuac

SEQ ID NO: 1149116 - RNA, 19 nt, Artificial Sequence
  Description of Artificial Sequence: Synthetic oligonucleotide
gcaaaacauauuuaauagg

SEQ ID NO: 1149117 - RNA, 19 nt, Artificial Sequence
  Description of Artificial Sequence: Synthetic oligonucleotide
aaagugcacccucuccagg

SEQ ID NO: 1149118 - RNA, 19 nt, Artificial Sequence
  Description of Artificial Sequence: Synthetic oligonucleotide
gauacuaccugcccagcug

SEQ ID NO: 1149119 - RNA, 19 nt, Artificial Sequence
  Description of Artificial Sequence: Synthetic oligonucleotide
uccuuucaugcuaaggugu

SEQ ID NO: 1149120 - RNA, 19 nt, Artificial Sequence
  Description of Artificial Sequence: Synthetic oligonucleotide
aagcccaugcgcgacaggg

SEQ ID NO: 1149121 - RNA, 19 nt, Artificial Sequence
  Description of Artificial Sequence: Synthetic oligonucleotide
aauguagcgccgugcacug

SEQ ID NO: 1149122 - RNA, 19 nt, Artificial Sequence
  Description of Artificial Sequence: Synthetic oligonucleotide
uuagggauacuaccugccc

SEQ ID NO: 1149123 - RNA, 19 nt, Artificial Sequence
  Description of Artificial Sequence: Synthetic oligonucleotide
auuaguguccuuucaugcu

SEQ ID NO: 1149124 - RNA, 19 nt, Artificial Sequence
  Description of Artificial Sequence: Synthetic oligonucleotide
uccucgaccucacggaucc

SEQ ID NO: 1149125 - RNA, 19 nt, Artificial Sequence
  Description of Artificial Sequence: Synthetic oligonucleotide
guuaugggugcccuuguag

SEQ ID NO: 1149126 - RNA, 19 nt, Artificial Sequence
  Description of Artificial Sequence: Synthetic oligonucleotide
uaggauagauguauugcuc

SEQ ID NO: 1149127 - RNA, 19 nt, Artificial Sequence
  Description of Artificial Sequence: Synthetic oligonucleotide
ugguaggauagauguauug

SEQ ID NO: 1149128 - RNA, 19 nt, Artificial Sequence
  Description of Artificial Sequence: Synthetic oligonucleotide
caccuuuagggauacuacc

SEQ ID NO: 1149129 - RNA, 19 nt, Artificial Sequence
  Description of Artificial Sequence: Synthetic oligonucleotide
ugacgaacucugcaccccg

SEQ ID NO: 1149130 - RNA, 19 nt, Artificial Sequence
  Description of Artificial Sequence: Synthetic oligonucleotide
agggauacuaccugcccag

SEQ ID NO: 1149131 - RNA, 19 nt, Artificial Sequence
  Description of Artificial Sequence: Synthetic oligonucleotide
aagugcacccucuccagga

SEQ ID NO: 1149132 - RNA, 19 nt, Artificial Sequence
  Description of Artificial Sequence: Synthetic oligonucleotide
ucaacccucacagcagugg

SEQ ID NO: 1149133 - RNA, 19 nt, Artificial Sequence
  Description of Artificial Sequence: Synthetic oligonucleotide
uagggauacuaccugccca

SEQ ID NO: 1149134 - RNA, 19 nt, Artificial Sequence
  Description of Artificial Sequence: Synthetic oligonucleotide
uucaugcuaagguguauac

SEQ ID NO: 1149135 - RNA, 19 nt, Artificial Sequence
  Description of Artificial Sequence: Synthetic oligonucleotide
gaccuuggcaccugugccg

SEQ ID NO: 1149136 - RNA, 19 nt, Artificial Sequence
  Description of Artificial Sequence: Synthetic oligonucleotide
uccgaauguuggauggaag

SEQ ID NO: 1149137 - RNA, 19 nt, Artificial Sequence
  Description of Artificial Sequence: Synthetic oligonucleotide
aaguuguggauaggcagag

SEQ ID NO: 1149138 - RNA, 19 nt, Artificial Sequence
  Description of Artificial Sequence: Synthetic oligonucleotide
ucaauuagccacaccuuua

SEQ ID NO: 1149139 - RNA, 19 nt, Artificial Sequence
  Description of Artificial Sequence: Synthetic oligonucleotide
agcaguagguccuggcauc

SEQ ID NO: 1149140 - RNA, 19 nt, Artificial Sequence
  Description of Artificial Sequence: Synthetic oligonucleotide
auuuaauauccugagguua

SEQ ID NO: 1149141 - RNA, 19 nt, Artificial Sequence
  Description of Artificial Sequence: Synthetic oligonucleotide
aaucaucuucaaugguccu

SEQ ID NO: 1149142 - RNA, 19 nt, Artificial Sequence
  Description of Artificial Sequence: Synthetic oligonucleotide
uuaagcgauaacucucauc

SEQ ID NO: 1149143 - RNA, 19 nt, Artificial Sequence
  Description of Artificial Sequence: Synthetic oligonucleotide
agccucaacccucacagca

SEQ ID NO: 1149144 - RNA, 19 nt, Artificial Sequence
  Description of Artificial Sequence: Synthetic oligonucleotide
agaauguagcgccgugcac

SEQ ID NO: 1149145 - RNA, 19 nt, Artificial Sequence
  Description of Artificial Sequence: Synthetic oligonucleotide
uaauauccugagguuauga

SEQ ID NO: 1149146 - RNA, 19 nt, Artificial Sequence
  Description of Artificial Sequence: Synthetic oligonucleotide
cagggauacaaccugccug

SEQ ID NO: 1149147 - RNA, 19 nt, Artificial Sequence
  Description of Artificial Sequence: Synthetic oligonucleotide
ugagguuaugaagccaggc

SEQ ID NO: 1149148 - RNA, 19 nt, Artificial Sequence
  Description of Artificial Sequence: Synthetic oligonucleotide
agguuaugaagccaggcua

SEQ ID NO: 1149149 - RNA, 19 nt, Artificial Sequence
  Description of Artificial Sequence: Synthetic oligonucleotide
cuaagguguauacacacaa

SEQ ID NO: 1149150 - RNA, 19 nt, Artificial Sequence
  Description of Artificial Sequence: Synthetic oligonucleotide
agcuaauuccuagaaugag

SEQ ID NO: 1149151 - RNA, 19 nt, Artificial Sequence
  Description of Artificial Sequence: Synthetic oligonucleotide
uccuagaaugagaaauuua

SEQ ID NO: 1149152 - RNA, 19 nt, Artificial Sequence
  Description of Artificial Sequence: Synthetic oligonucleotide
gguaggauagauguauugc

SEQ ID NO: 1149153 - RNA, 19 nt, Artificial Sequence
  Description of Artificial Sequence: Synthetic oligonucleotide
uacaucccggucuuuguga

SEQ ID NO: 1149154 - RNA, 19 nt, Artificial Sequence
  Description of Artificial Sequence: Synthetic oligonucleotide
ucagggauacaaccugccu

SEQ ID NO: 1149155 - RNA, 19 nt, Artificial Sequence
  Description of Artificial Sequence: Synthetic oligonucleotide
aggacaucuuccucauguc

SEQ ID NO: 1149156 - RNA, 19 nt, Artificial Sequence
  Description of Artificial Sequence: Synthetic oligonucleotide
cuuagcuccggcccugcgg

SEQ ID NO: 1149157 - RNA, 19 nt, Artificial Sequence
  Description of Artificial Sequence: Synthetic oligonucleotide
agcacaucgcugaaaggac

SEQ ID NO: 1149158 - RNA, 19 nt, Artificial Sequence
  Description of Artificial Sequence: Synthetic oligonucleotide
caaagugcacccucuccag

SEQ ID NO: 1149159 - RNA, 19 nt, Artificial Sequence
  Description of Artificial Sequence: Synthetic oligonucleotide
guuggugugaggccagcgc

SEQ ID NO: 1149160 - RNA, 19 nt, Artificial Sequence
  Description of Artificial Sequence: Synthetic oligonucleotide
ccgaauguuggauggaagg

SEQ ID NO: 1149161 - RNA, 19 nt, Artificial Sequence
  Description of Artificial Sequence: Synthetic oligonucleotide
uuaauauccugagguuaug

SEQ ID NO: 1149162 - RNA, 19 nt, Artificial Sequence
  Description of Artificial Sequence: Synthetic oligonucleotide
aaguuaugggugcccuugu

SEQ ID NO: 1149163 - RNA, 19 nt, Artificial Sequence
  Description of Artificial Sequence: Synthetic oligonucleotide
ucaugcuaagguguauaca

SEQ ID NO: 1149164 - RNA, 19 nt, Artificial Sequence
  Description of Artificial Sequence: Synthetic oligonucleotide
caucacugccaaaacgcug

SEQ ID NO: 1149165 - RNA, 19 nt, Artificial Sequence
  Description of Artificial Sequence: Synthetic oligonucleotide
agugcacccucuccaggac

SEQ ID NO: 1149166 - RNA, 19 nt, Artificial Sequence
  Description of Artificial Sequence: Synthetic oligonucleotide
acaucccggucuuugugag

SEQ ID NO: 1149167 - RNA, 19 nt, Artificial Sequence
  Description of Artificial Sequence: Synthetic oligonucleotide
caggacacgccguccaccg

SEQ ID NO: 1149168 - RNA, 19 nt, Artificial Sequence
  Description of Artificial Sequence: Synthetic oligonucleotide
caaccugccuggacuaggg

SEQ ID NO: 1149169 - RNA, 19 nt, Artificial Sequence
  Description of Artificial Sequence: Synthetic oligonucleotide
acuuaagcgauaacucuca

SEQ ID NO: 1149170 - RNA, 19 nt, Artificial Sequence
  Description of Artificial Sequence: Synthetic oligonucleotide
uuucaugcuaagguguaua

SEQ ID NO: 1149171 - RNA, 19 nt, Artificial Sequence
  Description of Artificial Sequence: Synthetic oligonucleotide
aagcgauaacucucauccu

SEQ ID NO: 1149172 - RNA, 19 nt, Artificial Sequence
  Description of Artificial Sequence: Synthetic oligonucleotide
agauaccaaaucaucuuca

SEQ ID NO: 1149173 - RNA, 19 nt, Artificial Sequence
  Description of Artificial Sequence: Synthetic oligonucleotide
ucccugacgaacucugcac

SEQ ID NO: 1149174 - RNA, 19 nt, Artificial Sequence
  Description of Artificial Sequence: Synthetic oligonucleotide
ucacggaucccugacgaac

SEQ ID NO: 1149175 - RNA, 19 nt, Artificial Sequence
  Description of Artificial Sequence: Synthetic oligonucleotide
acgcugauuguacuucuca

SEQ ID NO: 1149176 - RNA, 19 nt, Artificial Sequence
  Description of Artificial Sequence: Synthetic oligonucleotide
accuuuagggauacuaccu

SEQ ID NO: 1149177 - RNA, 19 nt, Artificial Sequence
  Description of Artificial Sequence: Synthetic oligonucleotide
uccuugaaagcagccaccu

SEQ ID NO: 1149178 - RNA, 19 nt, Artificial Sequence
  Description of Artificial Sequence: Synthetic oligonucleotide
aucccugacgaacucugca

SEQ ID NO: 1149179 - RNA, 19 nt, Artificial Sequence
  Description of Artificial Sequence: Synthetic oligonucleotide
aguacauuuccagaaugua

SEQ ID NO: 1149180 - RNA, 19 nt, Artificial Sequence
  Description of Artificial Sequence: Synthetic oligonucleotide
guagcaguagguccuggca

SEQ ID NO: 1149181 - RNA, 19 nt, Artificial Sequence
  Description of Artificial Sequence: Synthetic oligonucleotide
gcaucaugaagcucuggcc

SEQ ID NO: 1149182 - RNA, 19 nt, Artificial Sequence
  Description of Artificial Sequence: Synthetic oligonucleotide
cuugcguggagccucuuca

SEQ ID NO: 1149183 - RNA, 19 nt, Artificial Sequence
  Description of Artificial Sequence: Synthetic oligonucleotide
ugccaaaacgcugauugua

SEQ ID NO: 1149184 - RNA, 19 nt, Artificial Sequence
  Description of Artificial Sequence: Synthetic oligonucleotide
ugacaaugguaggauagau

SEQ ID NO: 1149185 - RNA, 19 nt, Artificial Sequence
  Description of Artificial Sequence: Synthetic oligonucleotide
ucuuggaguugaagccacc

SEQ ID NO: 1149186 - RNA, 19 nt, Artificial Sequence
  Description of Artificial Sequence: Synthetic oligonucleotide
accucacggaucccugacg

SEQ ID NO: 1149187 - RNA, 19 nt, Artificial Sequence
  Description of Artificial Sequence: Synthetic oligonucleotide
gcgagcacaucgcugaaag

SEQ ID NO: 1149188 - RNA, 19 nt, Artificial Sequence
  Description of Artificial Sequence: Synthetic oligonucleotide
gauaggcagagugcugagc

SEQ ID NO: 1149189 - RNA, 19 nt, Artificial Sequence
  Description of Artificial Sequence: Synthetic oligonucleotide
gaauguagcgccgugcacu

SEQ ID NO: 1149190 - RNA, 19 nt, Artificial Sequence
  Description of Artificial Sequence: Synthetic oligonucleotide
cuggacuagggcagauacc

SEQ ID NO: 1149191 - RNA, 19 nt, Artificial Sequence
  Description of Artificial Sequence: Synthetic oligonucleotide
aauccgaauguuggaugga

SEQ ID NO: 1149192 - RNA, 19 nt, Artificial Sequence
  Description of Artificial Sequence: Synthetic oligonucleotide
caggcccucccguacaaag

SEQ ID NO: 1149193 - RNA, 19 nt, Artificial Sequence
  Description of Artificial Sequence: Synthetic oligonucleotide
guauugcuccuugaaagca

SEQ ID NO: 1149194 - RNA, 19 nt, Artificial Sequence
  Description of Artificial Sequence: Synthetic oligonucleotide
uggaaguuaugggugcccu

SEQ ID NO: 1149195 - RNA, 19 nt, Artificial Sequence
  Description of Artificial Sequence: Synthetic oligonucleotide
gcgauccucgaccucacgg

SEQ ID NO: 1149196 - RNA, 19 nt, Artificial Sequence
  Description of Artificial Sequence: Synthetic oligonucleotide
ugcagacacaccccuuguc

SEQ ID NO: 1149197 - RNA, 19 nt, Artificial Sequence
  Description of Artificial Sequence: Synthetic oligonucleotide
ucgaccucacggaucccug

SEQ ID NO: 1149198 - RNA, 19 nt, Artificial Sequence
  Description of Artificial Sequence: Synthetic oligonucleotide
uggcaccuuguuugcagcc

SEQ ID NO: 1149199 - RNA, 19 nt, Artificial Sequence
  Description of Artificial Sequence: Synthetic oligonucleotide
gaagccaccugugacccuc

SEQ ID NO: 1149200 - RNA, 19 nt, Artificial Sequence
  Description of Artificial Sequence: Synthetic oligonucleotide
acuaggccaagccccggug

SEQ ID NO: 1149201 - RNA, 19 nt, Artificial Sequence
  Description of Artificial Sequence: Synthetic oligonucleotide
gaugcggugucuccuccca

SEQ ID NO: 1149202 - RNA, 19 nt, Artificial Sequence
  Description of Artificial Sequence: Synthetic oligonucleotide
ugugccggccgcuccaagu

SEQ ID NO: 1149203 - RNA, 19 nt, Artificial Sequence
  Description of Artificial Sequence: Synthetic oligonucleotide
cagaauguagcgccgugca

SEQ ID NO: 1149204 - RNA, 19 nt, Artificial Sequence
  Description of Artificial Sequence: Synthetic oligonucleotide
gcagcuguaguuucaguca

SEQ ID NO: 1149205 - RNA, 19 nt, Artificial Sequence
  Description of Artificial Sequence: Synthetic oligonucleotide
auacaaccugccuggacua

SEQ ID NO: 1149206 - RNA, 19 nt, Artificial Sequence
  Description of Artificial Sequence: Synthetic oligonucleotide
ugcacccucuccaggacua

SEQ ID NO: 1149207 - RNA, 19 nt, Artificial Sequence
  Description of Artificial Sequence: Synthetic oligonucleotide
uggguagcauguagcagua

SEQ ID NO: 1149208 - RNA, 19 nt, Artificial Sequence
  Description of Artificial Sequence: Synthetic oligonucleotide
uuaugaagccaggcuacau

SEQ ID NO: 1149209 - RNA, 19 nt, Artificial Sequence
  Description of Artificial Sequence: Synthetic oligonucleotide
ggcugaaagaggcagcuaa

SEQ ID NO: 1149210 - RNA, 19 nt, Artificial Sequence
  Description of Artificial Sequence: Synthetic oligonucleotide
ccuggacuagggcagauac

SEQ ID NO: 1149211 - RNA, 19 nt, Artificial Sequence
  Description of Artificial Sequence: Synthetic oligonucleotide
gccgugguagcccuugccg

SEQ ID NO: 1149212 - RNA, 19 nt, Artificial Sequence
  Description of Artificial Sequence: Synthetic oligonucleotide
acggaucccugacgaacuc

SEQ ID NO: 1149213 - RNA, 19 nt, Artificial Sequence
  Description of Artificial Sequence: Synthetic oligonucleotide
aggcagcuaauuccuagaa

SEQ ID NO: 1149214 - RNA, 19 nt, Artificial Sequence
  Description of Artificial Sequence: Synthetic oligonucleotide
ugcguggagccucuucauc

SEQ ID NO: 1149215 - RNA, 19 nt, Artificial Sequence
  Description of Artificial Sequence: Synthetic oligonucleotide
ggaccuuggcaccugugcc

SEQ ID NO: 1149216 - RNA, 19 nt, Artificial Sequence
  Description of Artificial Sequence: Synthetic oligonucleotide
gcuguaguuucagucagug

SEQ ID NO: 1149217 - RNA, 19 nt, Artificial Sequence
  Description of Artificial Sequence: Synthetic oligonucleotide
uggcagcuugcguggagcc

SEQ ID NO: 1149218 - RNA, 19 nt, Artificial Sequence
  Description of Artificial Sequence: Synthetic oligonucleotide
augggugcccuuguagcag

SEQ ID NO: 1149219 - RNA, 19 nt, Artificial Sequence
  Description of Artificial Sequence: Synthetic oligonucleotide
gggaccuuggcaccugugc

SEQ ID NO: 1149220 - RNA, 19 nt, Artificial Sequence
  Description of Artificial Sequence: Synthetic oligonucleotide
guggcaccuuguuugcagc

SEQ ID NO: 1149221 - RNA, 19 nt, Artificial Sequence
  Description of Artificial Sequence: Synthetic oligonucleotide
cugacgaacucugcacccc

SEQ ID NO: 1149222 - RNA, 19 nt, Artificial Sequence
  Description of Artificial Sequence: Synthetic oligonucleotide
gcugcagacacaccccuug

SEQ ID NO: 1149223 - RNA, 19 nt, Artificial Sequence
  Description of Artificial Sequence: Synthetic oligonucleotide
gaggugaaguuguggaagu

SEQ ID NO: 1149224 - RNA, 19 nt, Artificial Sequence
  Description of Artificial Sequence: Synthetic oligonucleotide
gacgaacucugcaccccgg

SEQ ID NO: 1149225 - RNA, 19 nt, Artificial Sequence
  Description of Artificial Sequence: Synthetic oligonucleotide
cuuggcaccugugccggcc

SEQ ID NO: 1149226 - RNA, 19 nt, Artificial Sequence
  Description of Artificial Sequence: Synthetic oligonucleotide
uacaaccugccuggacuag

SEQ ID NO: 1149227 - RNA, 19 nt, Artificial Sequence
  Description of Artificial Sequence: Synthetic oligonucleotide
gacccucuugggaggaugc

SEQ ID NO: 1149228 - RNA, 19 nt, Artificial Sequence
  Description of Artificial Sequence: Synthetic oligonucleotide
augccgugguagcccuugc

SEQ ID NO: 1149229 - RNA, 19 nt, Artificial Sequence
  Description of Artificial Sequence: Synthetic oligonucleotide
ccuuuagggauacuaccug

SEQ ID NO: 1149230 - RNA, 19 nt, Artificial Sequence
  Description of Artificial Sequence: Synthetic oligonucleotide
cacgcgcggaccaggacac

SEQ ID NO: 1149231 - RNA, 19 nt, Artificial Sequence
  Description of Artificial Sequence: Synthetic oligonucleotide
ccaguccagggguucaugg

SEQ ID NO: 1149232 - RNA, 19 nt, Artificial Sequence
  Description of Artificial Sequence: Synthetic oligonucleotide
gaggaugcggugucuccuc

SEQ ID NO: 1149233 - RNA, 19 nt, Artificial Sequence
  Description of Artificial Sequence: Synthetic oligonucleotide
gaccccagauuccucugca

SEQ ID NO: 1149234 - RNA, 19 nt, Artificial Sequence
  Description of Artificial Sequence: Synthetic oligonucleotide
acaucgcugaaaggacauc

SEQ ID NO: 1149235 - RNA, 19 nt, Artificial Sequence
  Description of Artificial Sequence: Synthetic oligonucleotide
acgaacucugcaccccgga

SEQ ID NO: 1149236 - RNA, 19 nt, Artificial Sequence
  Description of Artificial Sequence: Synthetic oligonucleotide
caccccuugucugugcgag

SEQ ID NO: 1149237 - RNA, 19 nt, Artificial Sequence
  Description of Artificial Sequence: Synthetic oligonucleotide
ggacuuaagcgauaacucu

SEQ ID NO: 1149238 - RNA, 19 nt, Artificial Sequence
  Description of Artificial Sequence: Synthetic oligonucleotide
agacuccagccucaacccu

SEQ ID NO: 1149239 - RNA, 19 nt, Artificial Sequence
  Description of Artificial Sequence: Synthetic oligonucleotide
cucaacccucacagcagug

SEQ ID NO: 1149240 - RNA, 19 nt, Artificial Sequence
  Description of Artificial Sequence: Synthetic oligonucleotide
gacacucucaggggcauaa

SEQ ID NO: 1149241 - RNA, 19 nt, Artificial Sequence
  Description of Artificial Sequence: Synthetic oligonucleotide
ccugacgaacucugcaccc

SEQ ID NO: 1149242 - RNA, 19 nt, Artificial Sequence
  Description of Artificial Sequence: Synthetic oligonucleotide
ccuugaucacugcaaacuc

SEQ ID NO: 1149243 - RNA, 19 nt, Artificial Sequence
  Description of Artificial Sequence: Synthetic oligonucleotide
aguuaugggugcccuugua

SEQ ID NO: 1149244 - RNA, 19 nt, Artificial Sequence
  Description of Artificial Sequence: Synthetic oligonucleotide
cuggcaucgcacuuguucu

SEQ ID NO: 1149245 - RNA, 19 nt, Artificial Sequence
  Description of Artificial Sequence: Synthetic oligonucleotide
gaucccugacgaacucugc

SEQ ID NO: 1149246 - RNA, 19 nt, Artificial Sequence
  Description of Artificial Sequence: Synthetic oligonucleotide
ccuuguagcaggccagaag

SEQ ID NO: 1149247 - RNA, 19 nt, Artificial Sequence
  Description of Artificial Sequence: Synthetic oligonucleotide
cugauccuaggcugaccug

SEQ ID NO: 1149248 - RNA, 19 nt, Artificial Sequence
  Description of Artificial Sequence: Synthetic oligonucleotide
cuccguccccuucacugcc

SEQ ID NO: 1149249 - RNA, 19 nt, Artificial Sequence
  Description of Artificial Sequence: Synthetic oligonucleotide
auccgaauguuggauggaa

SEQ ID NO: 1149250 - RNA, 19 nt, Artificial Sequence
  Description of Artificial Sequence: Synthetic oligonucleotide
gaggaccccagauuccucu

SEQ ID NO: 1149251 - RNA, 19 nt, Artificial Sequence
  Description of Artificial Sequence: Synthetic oligonucleotide
ggaguugaagccaccugug

SEQ ID NO: 1149252 - RNA, 19 nt, Artificial Sequence
  Description of Artificial Sequence: Synthetic oligonucleotide
agcccuugccggaguaggc

SEQ ID NO: 1149253 - RNA, 19 nt, Artificial Sequence
  Description of Artificial Sequence: Synthetic oligonucleotide
ucucuggacuuaagcgaua

SEQ ID NO: 1149254 - RNA, 19 nt, Artificial Sequence
  Description of Artificial Sequence: Synthetic oligonucleotide
gccaaaacgcugauuguac

SEQ ID NO: 1149255 - RNA, 19 nt, Artificial Sequence
  Description of Artificial Sequence: Synthetic oligonucleotide
gcauaacccuugacaaugg

SEQ ID NO: 1149256 - RNA, 19 nt, Artificial Sequence
  Description of Artificial Sequence: Synthetic oligonucleotide
uccguccccuucacugccc

SEQ ID NO: 1149257 - RNA, 19 nt, Artificial Sequence
  Description of Artificial Sequence: Synthetic oligonucleotide
gguggguagcauguagcag

SEQ ID NO: 1149258 - RNA, 19 nt, Artificial Sequence
  Description of Artificial Sequence: Synthetic oligonucleotide
gcaucgcacuuguucuugg

SEQ ID NO: 1149259 - RNA, 19 nt, Artificial Sequence
  Description of Artificial Sequence: Synthetic oligonucleotide
ggauacaaccugccuggac

SEQ ID NO: 1149260 - RNA, 19 nt, Artificial Sequence
  Description of Artificial Sequence: Synthetic oligonucleotide
caaugguccugaacugaga

SEQ ID NO: 1149261 - RNA, 19 nt, Artificial Sequence
  Description of Artificial Sequence: Synthetic oligonucleotide
uccugauccuaggcugacc

SEQ ID NO: 1149262 - RNA, 19 nt, Artificial Sequence
  Description of Artificial Sequence: Synthetic oligonucleotide
auccucgaccucacggauc

SEQ ID NO: 1149263 - RNA, 19 nt, Artificial Sequence
  Description of Artificial Sequence: Synthetic oligonucleotide
uugcguggagccucuucau

SEQ ID NO: 1149264 - RNA, 19 nt, Artificial Sequence
  Description of Artificial Sequence: Synthetic oligonucleotide
guagguccuggcaucgcac

SEQ ID NO: 1149265 - RNA, 19 nt, Artificial Sequence
  Description of Artificial Sequence: Synthetic oligonucleotide
ucacugccaaaacgcugau

SEQ ID NO: 1149266 - RNA, 19 nt, Artificial Sequence
  Description of Artificial Sequence: Synthetic oligonucleotide
gacacgccguccaccgucc

SEQ ID NO: 1149267 - RNA, 19 nt, Artificial Sequence
  Description of Artificial Sequence: Synthetic oligonucleotide
ccaccugugacccucuuca

SEQ ID NO: 1149268 - RNA, 19 nt, Artificial Sequence
  Description of Artificial Sequence: Synthetic oligonucleotide
uccucaugucugugccaug

SEQ ID NO: 1149269 - RNA, 19 nt, Artificial Sequence
  Description of Artificial Sequence: Synthetic oligonucleotide
caccccggaccccuuuugc

SEQ ID NO: 1149270 - RNA, 19 nt, Artificial Sequence
  Description of Artificial Sequence: Synthetic oligonucleotide
augcggugucuccucccag

SEQ ID NO: 1149271 - RNA, 19 nt, Artificial Sequence
  Description of Artificial Sequence: Synthetic oligonucleotide
gaccgcucaucccgcucag

SEQ ID NO: 1149272 - RNA, 19 nt, Artificial Sequence
  Description of Artificial Sequence: Synthetic oligonucleotide
auuuugcgcuuuggcagcu

SEQ ID NO: 1149273 - RNA, 19 nt, Artificial Sequence
  Description of Artificial Sequence: Synthetic oligonucleotide
caucgcugaaaggacaucu

SEQ ID NO: 1149274 - RNA, 19 nt, Artificial Sequence
  Description of Artificial Sequence: Synthetic oligonucleotide
uggaccgcucaucccgcuc

SEQ ID NO: 1149275 - RNA, 19 nt, Artificial Sequence
  Description of Artificial Sequence: Synthetic oligonucleotide
ccgugguagcccuugccgg

SEQ ID NO: 1149276 - RNA, 19 nt, Artificial Sequence
  Description of Artificial Sequence: Synthetic oligonucleotide
caaaacgcugauuguacuu

SEQ ID NO: 1149277 - RNA, 19 nt, Artificial Sequence
  Description of Artificial Sequence: Synthetic oligonucleotide
aagccccggugccuugggu

SEQ ID NO: 1149278 - RNA, 19 nt, Artificial Sequence
  Description of Artificial Sequence: Synthetic oligonucleotide
gugacccucuucaauccca

SEQ ID NO: 1149279 - RNA, 19 nt, Artificial Sequence
  Description of Artificial Sequence: Synthetic oligonucleotide
acccucuugggaggaugcg

SEQ ID NO: 1149280 - RNA, 19 nt, Artificial Sequence
  Description of Artificial Sequence: Synthetic oligonucleotide
gaagccgguugaccugcuc

SEQ ID NO: 1149281 - RNA, 19 nt, Artificial Sequence
  Description of Artificial Sequence: Synthetic oligonucleotide
caucgcacuuguucuugga

SEQ ID NO: 1149282 - RNA, 19 nt, Artificial Sequence
  Description of Artificial Sequence: Synthetic oligonucleotide
ugaagccaccugugacccu

SEQ ID NO: 1149283 - RNA, 19 nt, Artificial Sequence
  Description of Artificial Sequence: Synthetic oligonucleotide
gugcaucaugaagcucugg

SEQ ID NO: 1149284 - RNA, 19 nt, Artificial Sequence
  Description of Artificial Sequence: Synthetic oligonucleotide
cagccucaacccucacagc

SEQ ID NO: 1149285 - RNA, 19 nt, Artificial Sequence
  Description of Artificial Sequence: Synthetic oligonucleotide
agccccggugccuugggua

SEQ ID NO: 1149286 - RNA, 19 nt, Artificial Sequence
  Description of Artificial Sequence: Synthetic oligonucleotide
cgguugaccugcuccaagg

SEQ ID NO: 1149287 - RNA, 19 nt, Artificial Sequence
  Description of Artificial Sequence: Synthetic oligonucleotide
caagccccggugccuuggg

SEQ ID NO: 1149288 - RNA, 19 nt, Artificial Sequence
  Description of Artificial Sequence: Synthetic oligonucleotide
cgcucagugcugacaaugg

SEQ ID NO: 1149289 - RNA, 19 nt, Artificial Sequence
  Description of Artificial Sequence: Synthetic oligonucleotide
ggacacgccguccaccguc

SEQ ID NO: 1149290 - RNA, 19 nt, Artificial Sequence
  Description of Artificial Sequence: Synthetic oligonucleotide
gauccucgaccucacggau

SEQ ID NO: 1149291 - RNA, 19 nt, Artificial Sequence
  Description of Artificial Sequence: Synthetic oligonucleotide
ugcgagcacaucgcugaaa

SEQ ID NO: 1149292 - RNA, 19 nt, Artificial Sequence
  Description of Artificial Sequence: Synthetic oligonucleotide
gggcagauaccaaaucauc

SEQ ID NO: 1149293 - RNA, 19 nt, Artificial Sequence
  Description of Artificial Sequence: Synthetic oligonucleotide
aguuguggauaggcagagu

SEQ ID NO: 1149294 - RNA, 19 nt, Artificial Sequence
  Description of Artificial Sequence: Synthetic oligonucleotide
ccguccaccguccccaggc

SEQ ID NO: 1149295 - RNA, 19 nt, Artificial Sequence
  Description of Artificial Sequence: Synthetic oligonucleotide
uugccggaguaggccauga

SEQ ID NO: 1149296 - RNA, 19 nt, Artificial Sequence
  Description of Artificial Sequence: Synthetic oligonucleotide
ggcaucgcacuuguucuug

SEQ ID NO: 1149297 - RNA, 19 nt, Artificial Sequence
  Description of Artificial Sequence: Synthetic oligonucleotide
aucccagaauccgaauguu

SEQ ID NO: 1149298 - RNA, 19 nt, Artificial Sequence
  Description of Artificial Sequence: Synthetic oligonucleotide
ggauggaagguggcuguug

SEQ ID NO: 1149299 - RNA, 19 nt, Artificial Sequence
  Description of Artificial Sequence: Synthetic oligonucleotide
cuuggaguugaagccaccu

SEQ ID NO: 1149300 - RNA, 19 nt, Artificial Sequence
  Description of Artificial Sequence: Synthetic oligonucleotide
ggaugcggugucuccuccc

SEQ ID NO: 1149301 - RNA, 19 nt, Artificial Sequence
  Description of Artificial Sequence: Synthetic oligonucleotide
ccggucuuugugagcaaag

SEQ ID NO: 1149302 - RNA, 19 nt, Artificial Sequence
  Description of Artificial Sequence: Synthetic oligonucleotide
agccaaccaucuuccggau

SEQ ID NO: 1149303 - RNA, 19 nt, Artificial Sequence
  Description of Artificial Sequence: Synthetic oligonucleotide
gcacgcgcggaccaggaca

SEQ ID NO: 1149304 - RNA, 19 nt, Artificial Sequence
  Description of Artificial Sequence: Synthetic oligonucleotide
cucggaccuuccugucuug

SEQ ID NO: 1149305 - RNA, 19 nt, Artificial Sequence
  Description of Artificial Sequence: Synthetic oligonucleotide
cacaucgcugaaaggacau

SEQ ID NO: 1149306 - RNA, 19 nt, Artificial Sequence
  Description of Artificial Sequence: Synthetic oligonucleotide
uggguacauccaccuucuc

SEQ ID NO: 1149307 - RNA, 19 nt, Artificial Sequence
  Description of Artificial Sequence: Synthetic oligonucleotide
ggaccgcucaucccgcuca

SEQ ID NO: 1149308 - RNA, 19 nt, Artificial Sequence
  Description of Artificial Sequence: Synthetic oligonucleotide
ugcaccccggaccccuuuu

SEQ ID NO: 1149309 - RNA, 19 nt, Artificial Sequence
  Description of Artificial Sequence: Synthetic oligonucleotide
cacggaucccugacgaacu

SEQ ID NO: 1149310 - RNA, 19 nt, Artificial Sequence
  Description of Artificial Sequence: Synthetic oligonucleotide
uccuuagcuccggcccugc

SEQ ID NO: 1149311 - RNA, 19 nt, Artificial Sequence
  Description of Artificial Sequence: Synthetic oligonucleotide
gccucaacccucacagcag

SEQ ID NO: 1149312 - RNA, 19 nt, Artificial Sequence
  Description of Artificial Sequence: Synthetic oligonucleotide
gucucuggacuuaagcgau

SEQ ID NO: 1149313 - RNA, 19 nt, Artificial Sequence
  Description of Artificial Sequence: Synthetic oligonucleotide
ccgcucaucccgcucagug

SEQ ID NO: 1149314 - RNA, 19 nt, Artificial Sequence
  Description of Artificial Sequence: Synthetic oligonucleotide
gccgcuccaagugcagugg

SEQ ID NO: 1149315 - RNA, 19 nt, Artificial Sequence
  Description of Artificial Sequence: Synthetic oligonucleotide
cgggaggcgauccucgacc

SEQ ID NO: 1149316 - RNA, 19 nt, Artificial Sequence
  Description of Artificial Sequence: Synthetic oligonucleotide
agccaccucggaccuuccu

SEQ ID NO: 1149317 - RNA, 19 nt, Artificial Sequence
  Description of Artificial Sequence: Synthetic oligonucleotide
cuugacccucuugggagga

SEQ ID NO: 1149318 - RNA, 19 nt, Artificial Sequence
  Description of Artificial Sequence: Synthetic oligonucleotide
cagaauccgaauguuggau

SEQ ID NO: 1149319 - RNA, 19 nt, Artificial Sequence
  Description of Artificial Sequence: Synthetic oligonucleotide
ccucacggaucccugacga

SEQ ID NO: 1149320 - RNA, 19 nt, Artificial Sequence
  Description of Artificial Sequence: Synthetic oligonucleotide
ccagacccagccaccucgg

SEQ ID NO: 1149321 - RNA, 19 nt, Artificial Sequence
  Description of Artificial Sequence: Synthetic oligonucleotide
ccuccugugcccaguccag

SEQ ID NO: 1149322 - RNA, 19 nt, Artificial Sequence
  Description of Artificial Sequence: Synthetic oligonucleotide
cggugccuuggguacaucc

SEQ ID NO: 1149323 - RNA, 19 nt, Artificial Sequence
  Description of Artificial Sequence: Synthetic oligonucleotide
aggugaaguuguggaaguu

SEQ ID NO: 1149324 - RNA, 19 nt, Artificial Sequence
  Description of Artificial Sequence: Synthetic oligonucleotide
gcauguagcaguagguccu

SEQ ID NO: 1149325 - RNA, 19 nt, Artificial Sequence
  Description of Artificial Sequence: Synthetic oligonucleotide
ggauacuaccugcccagcu

SEQ ID NO: 1149326 - RNA, 19 nt, Artificial Sequence
  Description of Artificial Sequence: Synthetic oligonucleotide
cuggugcaucaugaagcuc

SEQ ID NO: 1149327 - RNA, 19 nt, Artificial Sequence
  Description of Artificial Sequence: Synthetic oligonucleotide
ucccguacaaagggcucuu

SEQ ID NO: 1149328 - RNA, 19 nt, Artificial Sequence
  Description of Artificial Sequence: Synthetic oligonucleotide
guagcgccgugcacugggc

SEQ ID NO: 1149329 - RNA, 19 nt, Artificial Sequence
  Description of Artificial Sequence: Synthetic oligonucleotide
ccgcucagugcugacaaug

SEQ ID NO: 1149330 - RNA, 19 nt, Artificial Sequence
  Description of Artificial Sequence: Synthetic oligonucleotide
caccucggaccuuccuguc

SEQ ID NO: 1149331 - RNA, 19 nt, Artificial Sequence
  Description of Artificial Sequence: Synthetic oligonucleotide
cuugucugugcgagcacau

SEQ ID NO: 1149332 - RNA, 19 nt, Artificial Sequence
  Description of Artificial Sequence: Synthetic oligonucleotide
ggcgauccucgaccucacg

SEQ ID NO: 1149333 - RNA, 19 nt, Artificial Sequence
  Description of Artificial Sequence: Synthetic oligonucleotide
gcacaucgcugaaaggaca

SEQ ID NO: 1149334 - RNA, 19 nt, Artificial Sequence
  Description of Artificial Sequence: Synthetic oligonucleotide
cucacggaucccugacgaa

SEQ ID NO: 1149335 - RNA, 19 nt, Artificial Sequence
  Description of Artificial Sequence: Synthetic oligonucleotide
cugccaaaacgcugauugu

SEQ ID NO: 1149336 - RNA, 19 nt, Artificial Sequence
  Description of Artificial Sequence: Synthetic oligonucleotide
cuuaagcgauaacucucau

SEQ ID NO: 1149337 - RNA, 19 nt, Artificial Sequence
  Description of Artificial Sequence: Synthetic oligonucleotide
ccuuucaugcuaaggugua

SEQ ID NO: 1149338 - RNA, 19 nt, Artificial Sequence
  Description of Artificial Sequence: Synthetic oligonucleotide
gcuugcguggagccucuuc

SEQ ID NO: 1149339 - RNA, 19 nt, Artificial Sequence
  Description of Artificial Sequence: Synthetic oligonucleotide
uuuugcgcuuuggcagcuu

SEQ ID NO: 1149340 - RNA, 19 nt, Artificial Sequence
  Description of Artificial Sequence: Synthetic oligonucleotide
gguugaccugcuccaaggu

SEQ ID NO: 1149341 - RNA, 19 nt, Artificial Sequence
  Description of Artificial Sequence: Synthetic oligonucleotide
ccaugcgcgacaggguggc

SEQ ID NO: 1149342 - RNA, 19 nt, Artificial Sequence
  Description of Artificial Sequence: Synthetic oligonucleotide
ggcaccuuguuugcagcca

SEQ ID NO: 1149343 - RNA, 19 nt, Artificial Sequence
  Description of Artificial Sequence: Synthetic oligonucleotide
gggauacuaccugcccagc

SEQ ID NO: 1149344 - RNA, 19 nt, Artificial Sequence
  Description of Artificial Sequence: Synthetic oligonucleotide
guggcgggaggcgauccuc

SEQ ID NO: 1149345 - RNA, 19 nt, Artificial Sequence
  Description of Artificial Sequence: Synthetic oligonucleotide
ggcagcuaauuccuagaau

SEQ ID NO: 1149346 - RNA, 19 nt, Artificial Sequence
  Description of Artificial Sequence: Synthetic oligonucleotide
gccccggugccuuggguac

SEQ ID NO: 1149347 - RNA, 19 nt, Artificial Sequence
  Description of Artificial Sequence: Synthetic oligonucleotide
gugcugacaaugguaggau

SEQ ID NO: 1149348 - RNA, 19 nt, Artificial Sequence
  Description of Artificial Sequence: Synthetic oligonucleotide
uugacccucuugggaggau

SEQ ID NO: 1149349 - RNA, 19 nt, Artificial Sequence
  Description of Artificial Sequence: Synthetic oligonucleotide
cuccucgccccagcugcgc

SEQ ID NO: 1149350 - RNA, 19 nt, Artificial Sequence
  Description of Artificial Sequence: Synthetic oligonucleotide
gcgauaacucucauccugu

SEQ ID NO: 1149351 - RNA, 19 nt, Artificial Sequence
  Description of Artificial Sequence: Synthetic oligonucleotide
cgauccucgaccucacgga

SEQ ID NO: 1149352 - RNA, 19 nt, Artificial Sequence
  Description of Artificial Sequence: Synthetic oligonucleotide
ccaaaacgcugauuguacu

SEQ ID NO: 1149353 - RNA, 19 nt, Artificial Sequence
  Description of Artificial Sequence: Synthetic oligonucleotide
ggcaggccgggcacgcgcg

SEQ ID NO: 1149354 - RNA, 19 nt, Artificial Sequence
  Description of Artificial Sequence: Synthetic oligonucleotide
cucgaccucacggaucccu

SEQ ID NO: 1149355 - RNA, 19 nt, Artificial Sequence
  Description of Artificial Sequence: Synthetic oligonucleotide
gccacaccuuuagggauac

SEQ ID NO: 1149356 - RNA, 19 nt, Artificial Sequence
  Description of Artificial Sequence: Synthetic oligonucleotide
ggguagcauguagcaguag

SEQ ID NO: 1149357 - RNA, 19 nt, Artificial Sequence
  Description of Artificial Sequence: Synthetic oligonucleotide
cccuugacaauggcuacca

SEQ ID NO: 1149358 - RNA, 19 nt, Artificial Sequence
  Description of Artificial Sequence: Synthetic oligonucleotide
cuuucaugcuaagguguau

SEQ ID NO: 1149359 - RNA, 19 nt, Artificial Sequence
  Description of Artificial Sequence: Synthetic oligonucleotide
gcaccccggaccccuuuug

SEQ ID NO: 1149360 - RNA, 19 nt, Artificial Sequence
  Description of Artificial Sequence: Synthetic oligonucleotide
cucccguacaaagggcucu

SEQ ID NO: 1149361 - RNA, 19 nt, Artificial Sequence
  Description of Artificial Sequence: Synthetic oligonucleotide
gcucagugcugacaauggu

SEQ ID NO: 1149362 - RNA, 19 nt, Artificial Sequence
  Description of Artificial Sequence: Synthetic oligonucleotide
gccaaccaucuuccggauc

SEQ ID NO: 1149363 - RNA, 19 nt, Artificial Sequence
  Description of Artificial Sequence: Synthetic oligonucleotide
caccuuguuugcagccaua

SEQ ID NO: 1149364 - RNA, 19 nt, Artificial Sequence
  Description of Artificial Sequence: Synthetic oligonucleotide
cccuugccggaguaggcca

SEQ ID NO: 1149365 - RNA, 19 nt, Artificial Sequence
  Description of Artificial Sequence: Synthetic oligonucleotide
gugcgagcacaucgcugaa

SEQ ID NO: 1149366 - RNA, 19 nt, Artificial Sequence
  Description of Artificial Sequence: Synthetic oligonucleotide
ggaggcgauccucgaccuc

SEQ ID NO: 1149367 - RNA, 19 nt, Artificial Sequence
  Description of Artificial Sequence: Synthetic oligonucleotide
acgcgcggaccaggacacg

SEQ ID NO: 1149368 - RNA, 19 nt, Artificial Sequence
  Description of Artificial Sequence: Synthetic oligonucleotide
gggaggcgauccucgaccu

SEQ ID NO: 1149369 - RNA, 19 nt, Artificial Sequence
  Description of Artificial Sequence: Synthetic oligonucleotide
gccguccaccguccccagg

SEQ ID NO: 1149370 - RNA, 19 nt, Artificial Sequence
  Description of Artificial Sequence: Synthetic oligonucleotide
ggcacgcgcggaccaggac

SEQ ID NO: 1149371 - RNA, 19 nt, Artificial Sequence
  Description of Artificial Sequence: Synthetic oligonucleotide
cgugguagcccuugccgga

SEQ ID NO: 1149372 - RNA, 19 nt, Artificial Sequence
  Description of Artificial Sequence: Synthetic oligonucleotide
agcugcgcuccaggacacu

SEQ ID NO: 1149373 - RNA, 19 nt, Artificial Sequence
  Description of Artificial Sequence: Synthetic oligonucleotide
gcgcuccugauccuaggcu

SEQ ID NO: 1149374 - RNA, 19 nt, Artificial Sequence
  Description of Artificial Sequence: Synthetic oligonucleotide
ccaccucggaccuuccugu

SEQ ID NO: 1149375 - RNA, 19 nt, Artificial Sequence
  Description of Artificial Sequence: Synthetic oligonucleotide
gggauacaaccugccugga

SEQ ID NO: 1149376 - RNA, 19 nt, Artificial Sequence
  Description of Artificial Sequence: Synthetic oligonucleotide
cgcgcggaccaggacacgc

SEQ ID NO: 1149377 - RNA, 19 nt, Artificial Sequence
  Description of Artificial Sequence: Synthetic oligonucleotide
ccucaacccucacagcagu

SEQ ID NO: 1149378 - RNA, 19 nt, Artificial Sequence
  Description of Artificial Sequence: Synthetic oligonucleotide
cccugcggcgcuccugauc

SEQ ID NO: 1149379 - RNA, 19 nt, Artificial Sequence
  Description of Artificial Sequence: Synthetic oligonucleotide
gccgggcacgcgcggacca

SEQ ID NO: 1149380 - RNA, 19 nt, Artificial Sequence
  Description of Artificial Sequence: Synthetic oligonucleotide
cagcacaauuuugcgcuuu

SEQ ID NO: 1149381 - RNA, 19 nt, Artificial Sequence
  Description of Artificial Sequence: Synthetic oligonucleotide
ggaccccuuuugcccuguc

SEQ ID NO: 1149382 - RNA, 19 nt, Artificial Sequence
  Description of Artificial Sequence: Synthetic oligonucleotide
ccggaccccuuuugcccug

SEQ ID NO: 1149383 - RNA, 19 nt, Artificial Sequence
  Description of Artificial Sequence: Synthetic oligonucleotide
gcgcuuuggcagcuugcgu

SEQ ID NO: 1149384 - RNA, 19 nt, Artificial Sequence
  Description of Artificial Sequence: Synthetic oligonucleotide
cccguacaaagggcucuuc

SEQ ID NO: 1149385 - RNA, 19 nt, Artificial Sequence
  Description of Artificial Sequence: Synthetic oligonucleotide
ccucaaggcucuugacccu

SEQ ID NO: 1149386 - RNA, 19 nt, Artificial Sequence
  Description of Artificial Sequence: Synthetic oligonucleotide
cgaccucacggaucccuga

SEQ ID NO: 1149387 - RNA, 19 nt, Artificial Sequence
  Description of Artificial Sequence: Synthetic oligonucleotide
gcagcacaauuuugcgcuu

SEQ ID NO: 1149388 - RNA, 19 nt, Artificial Sequence
  Description of Artificial Sequence: Synthetic oligonucleotide
cguggagccucuucauccu

SEQ ID NO: 1149389 - RNA, 19 nt, Artificial Sequence
  Description of Artificial Sequence: Synthetic oligonucleotide
gggcugaaagaggcagcua

SEQ ID NO: 1149390 - RNA, 19 nt, Artificial Sequence
  Description of Artificial Sequence: Synthetic oligonucleotide
gggcacgcgcggaccagga

SEQ ID NO: 1149391 - RNA, 19 nt, Artificial Sequence
  Description of Artificial Sequence: Synthetic oligonucleotide
agcuugcguggagccucuu

SEQ ID NO: 1149392 - RNA, 19 nt, Artificial Sequence
  Description of Artificial Sequence: Synthetic oligonucleotide
cacugcccuccagggaacu

SEQ ID NO: 1149393 - RNA, 19 nt, Artificial Sequence
  Description of Artificial Sequence: Synthetic oligonucleotide
gccgguugaccugcuccaa

SEQ ID NO: 1149394 - RNA, 19 nt, Artificial Sequence
  Description of Artificial Sequence: Synthetic oligonucleotide
cgggcacgcgcggaccagg

SEQ ID NO: 1149395 - RNA, 19 nt, Artificial Sequence
  Description of Artificial Sequence: Synthetic oligonucleotide
cacugccaaaacgcugauu

SEQ ID NO: 1149396 - RNA, 19 nt, Artificial Sequence
  Description of Artificial Sequence: Synthetic oligonucleotide
caccguccccaggcucuca

SEQ ID NO: 1149397 - RNA, 19 nt, Artificial Sequence
  Description of Artificial Sequence: Synthetic oligonucleotide
gccagcgcugguggcaccu

SEQ ID NO: 1149398 - RNA, 19 nt, Artificial Sequence
  Description of Artificial Sequence: Synthetic oligonucleotide
ccucgaccucacggauccc

SEQ ID NO: 1149399 - RNA, 19 nt, Artificial Sequence
  Description of Artificial Sequence: Synthetic oligonucleotide
ccaccguccccaggcucuc

SEQ ID NO: 1149400 - RNA, 19 nt, Artificial Sequence
  Description of Artificial Sequence: Synthetic oligonucleotide
ccuugccggaguaggccau

SEQ ID NO: 1149401 - RNA, 19 nt, Artificial Sequence
  Description of Artificial Sequence: Synthetic oligonucleotide
ccuuggguacauccaccuu

SEQ ID NO: 1149402 - RNA, 19 nt, Artificial Sequence
  Description of Artificial Sequence: Synthetic oligonucleotide
cugcaccccggaccccuuu

SEQ ID NO: 1149403 - RNA, 19 nt, Artificial Sequence
  Description of Artificial Sequence: Synthetic oligonucleotide
cggaucccugacgaacucu

SEQ ID NO: 1149404 - RNA, 19 nt, Artificial Sequence
  Description of Artificial Sequence: Synthetic oligonucleotide
gcgcgacaggguggcggga

SEQ ID NO: 1149405 - RNA, 19 nt, Artificial Sequence
  Description of Artificial Sequence: Synthetic oligonucleotide
ccggugccuuggguacauc

SEQ ID NO: 1149406 - RNA, 19 nt, Artificial Sequence
  Description of Artificial Sequence: Synthetic oligonucleotide
ccccggugccuuggguaca

SEQ ID NO: 1149407 - RNA, 19 nt, Artificial Sequence
  Description of Artificial Sequence: Synthetic oligonucleotide
ccgugcacugggcucucuu

SEQ ID NO: 1149408 - RNA, 19 nt, Artificial Sequence
  Description of Artificial Sequence: Synthetic oligonucleotide
cccggugccuuggguacau

SEQ ID NO: 1149409 - RNA, 19 nt, Artificial Sequence
  Description of Artificial Sequence: Synthetic oligonucleotide
gcccugcggcgcuccugau

SEQ ID NO: 1149410 - RNA, 19 nt, Artificial Sequence
  Description of Artificial Sequence: Synthetic oligonucleotide
ccacaccuuuagggauacu

SEQ ID NO: 1149411 - RNA, 19 nt, Artificial Sequence
  Description of Artificial Sequence: Synthetic oligonucleotide
ccagcgcugguggcaccuu

SEQ ID NO: 1149412 - RNA, 19 nt, Artificial Sequence
  Description of Artificial Sequence: Synthetic oligonucleotide
aaagugauuugcuacaucc

SEQ ID NO: 1149413 - RNA, 19 nt, Artificial Sequence
  Description of Artificial Sequence: Synthetic oligonucleotide
aaucaauuaacucagaacu

SEQ ID NO: 1149414 - RNA, 19 nt, Artificial Sequence
  Description of Artificial Sequence: Synthetic oligonucleotide
uaaaguauuauucaccugc

SEQ ID NO: 1149415 - RNA, 19 nt, Artificial Sequence
  Description of Artificial Sequence: Synthetic oligonucleotide
acuaaauaauuuuagcagc

SEQ ID NO: 1149416 - RNA, 19 nt, Artificial Sequence
  Description of Artificial Sequence: Synthetic oligonucleotide
ugaaagacaucaaagaucu

SEQ ID NO: 1149417 - RNA, 19 nt, Artificial Sequence
  Description of Artificial Sequence: Synthetic oligonucleotide
ucuagcaacuacauggucg

SEQ ID NO: 1149418 - RNA, 19 nt, Artificial Sequence
  Description of Artificial Sequence: Synthetic oligonucleotide
uuagauaagaugaaacuga

SEQ ID NO: 1149419 - RNA, 19 nt, Artificial Sequence
  Description of Artificial Sequence: Synthetic oligonucleotide
aaagacaucaaagaucuug

SEQ ID NO: 1149420 - RNA, 19 nt, Artificial Sequence
  Description of Artificial Sequence: Synthetic oligonucleotide
acugcaaccgucuauacag

SEQ ID NO: 1149421 - RNA, 19 nt, Artificial Sequence
  Description of Artificial Sequence: Synthetic oligonucleotide
cuagauuuagcauaucccc

SEQ ID NO: 1149422 - RNA, 19 nt, Artificial Sequence
  Description of Artificial Sequence: Synthetic oligonucleotide
agcuagauuuagcauaucc

SEQ ID NO: 1149423 - RNA, 19 nt, Artificial Sequence
  Description of Artificial Sequence: Synthetic oligonucleotide
ugagauaaggaccaccaag

SEQ ID NO: 1149424 - RNA, 19 nt, Artificial Sequence
  Description of Artificial Sequence: Synthetic oligonucleotide
ucuaaaguauuauucaccu

SEQ ID NO: 1149425 - RNA, 19 nt, Artificial Sequence
  Description of Artificial Sequence: Synthetic oligonucleotide
uuauaguccuaacuaaugc

SEQ ID NO: 1149426 - RNA, 19 nt, Artificial Sequence
  Description of Artificial Sequence: Synthetic oligonucleotide
auacagguaucuuauaguc

SEQ ID NO: 1149427 - RNA, 19 nt, Artificial Sequence
  Description of Artificial Sequence: Synthetic oligonucleotide
aaauuuacuguuccaauaa

SEQ ID NO: 1149428 - RNA, 19 nt, Artificial Sequence
  Description of Artificial Sequence: Synthetic oligonucleotide
guauuauucaccugcaagc

SEQ ID NO: 1149429 - RNA, 19 nt, Artificial Sequence
  Description of Artificial Sequence: Synthetic oligonucleotide
aaaugaacuguaagcaggc

SEQ ID NO: 1149430 - RNA, 19 nt, Artificial Sequence
  Description of Artificial Sequence: Synthetic oligonucleotide
gaaaaugaacuguaagcag

SEQ ID NO: 1149431 - RNA, 19 nt, Artificial Sequence
  Description of Artificial Sequence: Synthetic oligonucleotide
uuuuaagcgggaaaaguga

SEQ ID NO: 1149432 - RNA, 19 nt, Artificial Sequence
  Description of Artificial Sequence: Synthetic oligonucleotide
uuuuacucgauucuauugu

SEQ ID NO: 1149433 - RNA, 19 nt, Artificial Sequence
  Description of Artificial Sequence: Synthetic oligonucleotide
uguauucuaguguucauca

SEQ ID NO: 1149434 - RNA, 19 nt, Artificial Sequence
  Description of Artificial Sequence: Synthetic oligonucleotide
ucccauaaaaugaauuucc

SEQ ID NO: 1149435 - RNA, 19 nt, Artificial Sequence
  Description of Artificial Sequence: Synthetic oligonucleotide
uacuagaccagcauacuag

SEQ ID NO: 1149436 - RNA, 19 nt, Artificial Sequence
  Description of Artificial Sequence: Synthetic oligonucleotide
guuauagacagcugaaaag

SEQ ID NO: 1149437 - RNA, 19 nt, Artificial Sequence
  Description of Artificial Sequence: Synthetic oligonucleotide
uggaaggucaucgacacgg

SEQ ID NO: 1149438 - RNA, 19 nt, Artificial Sequence
  Description of Artificial Sequence: Synthetic oligonucleotide
aaagguggcguccaucauc

SEQ ID NO: 1149439 - RNA, 19 nt, Artificial Sequence
  Description of Artificial Sequence: Synthetic oligonucleotide
ugcaccuggaaccuuauug

SEQ ID NO: 1149440 - RNA, 19 nt, Artificial Sequence
  Description of Artificial Sequence: Synthetic oligonucleotide
agaacaggaauauuggcca

SEQ ID NO: 1149441 - RNA, 19 nt, Artificial Sequence
  Description of Artificial Sequence: Synthetic oligonucleotide
ugucaauaaaguagggccc

SEQ ID NO: 1149442 - RNA, 19 nt, Artificial Sequence
  Description of Artificial Sequence: Synthetic oligonucleotide
agcuuagggauuuagauaa

SEQ ID NO: 1149443 - RNA, 19 nt, Artificial Sequence
  Description of Artificial Sequence: Synthetic oligonucleotide
uugagagcuagauuuagca

SEQ ID NO: 1149444 - RNA, 19 nt, Artificial Sequence
  Description of Artificial Sequence: Synthetic oligonucleotide
cuauacagguaucuuauag

SEQ ID NO: 1149445 - RNA, 19 nt, Artificial Sequence
  Description of Artificial Sequence: Synthetic oligonucleotide
agggauuuagauaagauga

SEQ ID NO: 1149446 - RNA, 19 nt, Artificial Sequence
  Description of Artificial Sequence: Synthetic oligonucleotide
agugauuugcuacauccag

SEQ ID NO: 1149447 - RNA, 19 nt, Artificial Sequence
  Description of Artificial Sequence: Synthetic oligonucleotide
ucccuguagaaucaggugc

SEQ ID NO: 1149448 - RNA, 19 nt, Artificial Sequence
  Description of Artificial Sequence: Synthetic oligonucleotide
auuuuacucgauucuauug

SEQ ID NO: 1149449 - RNA, 19 nt, Artificial Sequence
  Description of Artificial Sequence: Synthetic oligonucleotide
aagccaaccacgcacuuug

SEQ ID NO: 1149450 - RNA, 19 nt, Artificial Sequence
  Description of Artificial Sequence: Synthetic oligonucleotide
cacggcauuaaaaucauac

SEQ ID NO: 1149451 - RNA, 19 nt, Artificial Sequence
  Description of Artificial Sequence: Synthetic oligonucleotide
uauacagguaucuuauagu

SEQ ID NO: 1149452 - RNA, 19 nt, Artificial Sequence
  Description of Artificial Sequence: Synthetic oligonucleotide
uaaucuaaagcuaggugaa

SEQ ID NO: 1149453 - RNA, 19 nt, Artificial Sequence
  Description of Artificial Sequence: Synthetic oligonucleotide
agauuuagcauauccccag

SEQ ID NO: 1149454 - RNA, 19 nt, Artificial Sequence
  Description of Artificial Sequence: Synthetic oligonucleotide
ucacuuuccucccauaggu

SEQ ID NO: 1149455 - RNA, 19 nt, Artificial Sequence
  Description of Artificial Sequence: Synthetic oligonucleotide
auaacuguaagggcuauag

SEQ ID NO: 1149456 - RNA, 19 nt, Artificial Sequence
  Description of Artificial Sequence: Synthetic oligonucleotide
aauaagcuuagggauuuag

SEQ ID NO: 1149457 - RNA, 19 nt, Artificial Sequence
  Description of Artificial Sequence: Synthetic oligonucleotide
cuuauaguccuaacuaaug

SEQ ID NO: 1149458 - RNA, 19 nt, Artificial Sequence
  Description of Artificial Sequence: Synthetic oligonucleotide
uguguagacagaaguuucc

SEQ ID NO: 1149459 - RNA, 19 nt, Artificial Sequence
  Description of Artificial Sequence: Synthetic oligonucleotide
ugcuuggguauuuuacucg

SEQ ID NO: 1149460 - RNA, 19 nt, Artificial Sequence
  Description of Artificial Sequence: Synthetic oligonucleotide
gauuacuagaccagcauac

SEQ ID NO: 1149461 - RNA, 19 nt, Artificial Sequence
  Description of Artificial Sequence: Synthetic oligonucleotide
ucaagacuagccagaagcc

SEQ ID NO: 1149462 - RNA, 19 nt, Artificial Sequence
  Description of Artificial Sequence: Synthetic oligonucleotide
agcgggaaaagugauuugc

SEQ ID NO: 1149463 - RNA, 19 nt, Artificial Sequence
  Description of Artificial Sequence: Synthetic oligonucleotide
uagauuuagcauaucccca

SEQ ID NO: 1149464 - RNA, 19 nt, Artificial Sequence
  Description of Artificial Sequence: Synthetic oligonucleotide
uagauaagaugaaacugac

SEQ ID NO: 1149465 - RNA, 19 nt, Artificial Sequence
  Description of Artificial Sequence: Synthetic oligonucleotide
aucuaaagcuaggugaaac

SEQ ID NO: 1149466 - RNA, 19 nt, Artificial Sequence
  Description of Artificial Sequence: Synthetic oligonucleotide
ucuuauaguccuaacuaau

SEQ ID NO: 1149467 - RNA, 19 nt, Artificial Sequence
  Description of Artificial Sequence: Synthetic oligonucleotide
aaagcuaggugaaacaaau

SEQ ID NO: 1149468 - RNA, 19 nt, Artificial Sequence
  Description of Artificial Sequence: Synthetic oligonucleotide
aauucggcgggucucccag

SEQ ID NO: 1149469 - RNA, 19 nt, Artificial Sequence
  Description of Artificial Sequence: Synthetic oligonucleotide
aggaauauuggccaggauu

SEQ ID NO: 1149470 - RNA, 19 nt, Artificial Sequence
  Description of Artificial Sequence: Synthetic oligonucleotide
ugaccaucaagacuagcca

SEQ ID NO: 1149471 - RNA, 19 nt, Artificial Sequence
  Description of Artificial Sequence: Synthetic oligonucleotide
auuaacguuggguugguaa

SEQ ID NO: 1149472 - RNA, 19 nt, Artificial Sequence
  Description of Artificial Sequence: Synthetic oligonucleotide
uaguguucaucaaauuuac

SEQ ID NO: 1149473 - RNA, 19 nt, Artificial Sequence
  Description of Artificial Sequence: Synthetic oligonucleotide
agugugacuaaauaauuuu

SEQ ID NO: 1149474 - RNA, 19 nt, Artificial Sequence
  Description of Artificial Sequence: Synthetic oligonucleotide
ucaaguguagccagauuac

SEQ ID NO: 1149475 - RNA, 19 nt, Artificial Sequence
  Description of Artificial Sequence: Synthetic oligonucleotide
cauacucugcucuagcaac

SEQ ID NO: 1149476 - RNA, 19 nt, Artificial Sequence
  Description of Artificial Sequence: Synthetic oligonucleotide
aaaaccuuuguaaagugua

SEQ ID NO: 1149477 - RNA, 19 nt, Artificial Sequence
  Description of Artificial Sequence: Synthetic oligonucleotide
agcuguuauagacagcuga

SEQ ID NO: 1149478 - RNA, 19 nt, Artificial Sequence
  Description of Artificial Sequence: Synthetic oligonucleotide
uuagggauuuagauaagau

SEQ ID NO: 1149479 - RNA, 19 nt, Artificial Sequence
  Description of Artificial Sequence: Synthetic oligonucleotide
aguagugacuccuuuaauu

SEQ ID NO: 1149480 - RNA, 19 nt, Artificial Sequence
  Description of Artificial Sequence: Synthetic oligonucleotide
ccuaaaaguguuuacacug

SEQ ID NO: 1149481 - RNA, 19 nt, Artificial Sequence
  Description of Artificial Sequence: Synthetic oligonucleotide
auauuggccaggauuuugc

SEQ ID NO: 1149482 - RNA, 19 nt, Artificial Sequence
  Description of Artificial Sequence: Synthetic oligonucleotide
aaauggucaaguguagcca

SEQ ID NO: 1149483 - RNA, 19 nt, Artificial Sequence
  Description of Artificial Sequence: Synthetic oligonucleotide
ugaacuguaagcaggccua

SEQ ID NO: 1149484 - RNA, 19 nt, Artificial Sequence
  Description of Artificial Sequence: Synthetic oligonucleotide
auuugcagguaucaguccu

SEQ ID NO: 1149485 - RNA, 19 nt, Artificial Sequence
  Description of Artificial Sequence: Synthetic oligonucleotide
cacggaaagaaauuucuuc

SEQ ID NO: 1149486 - RNA, 19 nt, Artificial Sequence
  Description of Artificial Sequence: Synthetic oligonucleotide
uuaacguuggguugguaaa

SEQ ID NO: 1149487 - RNA, 19 nt, Artificial Sequence
  Description of Artificial Sequence: Synthetic oligonucleotide
agcccagaccauuguaucc

SEQ ID NO: 1149488 - RNA, 19 nt, Artificial Sequence
  Description of Artificial Sequence: Synthetic oligonucleotide
guaucaguccuguuguuug

SEQ ID NO: 1149489 - RNA, 19 nt, Artificial Sequence
  Description of Artificial Sequence: Synthetic oligonucleotide
auaaggaccaccaaggaua

SEQ ID NO: 1149490 - RNA, 19 nt, Artificial Sequence
  Description of Artificial Sequence: Synthetic oligonucleotide
uuuaagcgggaaaagugau

SEQ ID NO: 1149491 - RNA, 19 nt, Artificial Sequence
  Description of Artificial Sequence: Synthetic oligonucleotide
cacggaggcgguuaaagcc

SEQ ID NO: 1149492 - RNA, 19 nt, Artificial Sequence
  Description of Artificial Sequence: Synthetic oligonucleotide
acuagugugacuaaauaau

SEQ ID NO: 1149493 - RNA, 19 nt, Artificial Sequence
  Description of Artificial Sequence: Synthetic oligonucleotide
uggguauuuuacucgauuc

SEQ ID NO: 1149494 - RNA, 19 nt, Artificial Sequence
  Description of Artificial Sequence: Synthetic oligonucleotide
aguacucuaaaguauuauu

SEQ ID NO: 1149495 - RNA, 19 nt, Artificial Sequence
  Description of Artificial Sequence: Synthetic oligonucleotide
guccuaacuaaugcgaagg

SEQ ID NO: 1149496 - RNA, 19 nt, Artificial Sequence
  Description of Artificial Sequence: Synthetic oligonucleotide
caggauuuugcagaguuag

SEQ ID NO: 1149497 - RNA, 19 nt, Artificial Sequence
  Description of Artificial Sequence: Synthetic oligonucleotide
acacggaggcgguuaaagc

SEQ ID NO: 1149498 - RNA, 19 nt, Artificial Sequence
  Description of Artificial Sequence: Synthetic oligonucleotide
cugaaaugcaccucugcug

SEQ ID NO: 1149499 - RNA, 19 nt, Artificial Sequence
  Description of Artificial Sequence: Synthetic oligonucleotide
ugacagacgcgaaugcaug

SEQ ID NO: 1149500 - RNA, 19 nt, Artificial Sequence
  Description of Artificial Sequence: Synthetic oligonucleotide
guuguuugaccaucaagac

SEQ ID NO: 1149501 - RNA, 19 nt, Artificial Sequence
  Description of Artificial Sequence: Synthetic oligonucleotide
accauuguauccauaacug

SEQ ID NO: 1149502 - RNA, 19 nt, Artificial Sequence
  Description of Artificial Sequence: Synthetic oligonucleotide
aucuuauaguccuaacuaa

SEQ ID NO: 1149503 - RNA, 19 nt, Artificial Sequence
  Description of Artificial Sequence: Synthetic oligonucleotide
uccuaacuaaugcgaaggc

SEQ ID NO: 1149504 - RNA, 19 nt, Artificial Sequence
  Description of Artificial Sequence: Synthetic oligonucleotide
agacacggcauuaaaauca

SEQ ID NO: 1149505 - RNA, 19 nt, Artificial Sequence
  Description of Artificial Sequence: Synthetic oligonucleotide
aguccuaacuaaugcgaag

SEQ ID NO: 1149506 - RNA, 19 nt, Artificial Sequence
  Description of Artificial Sequence: Synthetic oligonucleotide
uagugugacuaaauaauuu

SEQ ID NO: 1149507 - RNA, 19 nt, Artificial Sequence
  Description of Artificial Sequence: Synthetic oligonucleotide
aaaguauuauucaccugca

SEQ ID NO: 1149508 - RNA, 19 nt, Artificial Sequence
  Description of Artificial Sequence: Synthetic oligonucleotide
aaugaucccuucugaggca

SEQ ID NO: 1149509 - RNA, 19 nt, Artificial Sequence
  Description of Artificial Sequence: Synthetic oligonucleotide
uuuuacccagaauuuugac

SEQ ID NO: 1149510 - RNA, 19 nt, Artificial Sequence
  Description of Artificial Sequence: Synthetic oligonucleotide
uuugcagguaucaguccug

SEQ ID NO: 1149511 - RNA, 19 nt, Artificial Sequence
  Description of Artificial Sequence: Synthetic oligonucleotide
uugguccucggcaccaagg

SEQ ID NO: 1149512 - RNA, 19 nt, Artificial Sequence
  Description of Artificial Sequence: Synthetic oligonucleotide
guaaguguugguuguccag

SEQ ID NO: 1149513 - RNA, 19 nt, Artificial Sequence
  Description of Artificial Sequence: Synthetic oligonucleotide
auuuagcauauccccagca

SEQ ID NO: 1149514 - RNA, 19 nt, Artificial Sequence
  Description of Artificial Sequence: Synthetic oligonucleotide
uaagcgggaaaagugauuu

SEQ ID NO: 1149515 - RNA, 19 nt, Artificial Sequence
  Description of Artificial Sequence: Synthetic oligonucleotide
gauuuagcauauccccagc

SEQ ID NO: 1149516 - RNA, 19 nt, Artificial Sequence
  Description of Artificial Sequence: Synthetic oligonucleotide
uuacuagaccagcauacua

SEQ ID NO: 1149517 - RNA, 19 nt, Artificial Sequence
  Description of Artificial Sequence: Synthetic oligonucleotide
uccaauaagcuuagggauu

SEQ ID NO: 1149518 - RNA, 19 nt, Artificial Sequence
  Description of Artificial Sequence: Synthetic oligonucleotide
guagccagauuacuagacc

SEQ ID NO: 1149519 - RNA, 19 nt, Artificial Sequence
  Description of Artificial Sequence: Synthetic oligonucleotide
acggcauuaaaaucauacu

SEQ ID NO: 1149520 - RNA, 19 nt, Artificial Sequence
  Description of Artificial Sequence: Synthetic oligonucleotide
uccguauccagaagaaaau

SEQ ID NO: 1149521 - RNA, 19 nt, Artificial Sequence
  Description of Artificial Sequence: Synthetic oligonucleotide
acuagaccagcauacuagu

SEQ ID NO: 1149522 - RNA, 19 nt, Artificial Sequence
  Description of Artificial Sequence: Synthetic oligonucleotide
gaccauuguauccauaacu

SEQ ID NO: 1149523 - RNA, 19 nt, Artificial Sequence
  Description of Artificial Sequence: Synthetic oligonucleotide
acuguaagcaggccuaaaa

SEQ ID NO: 1149524 - RNA, 19 nt, Artificial Sequence
  Description of Artificial Sequence: Synthetic oligonucleotide
aggcgguuaaagcccagac

SEQ ID NO: 1149525 - RNA, 19 nt, Artificial Sequence
  Description of Artificial Sequence: Synthetic oligonucleotide
cuaaaguauuauucaccug

SEQ ID NO: 1149526 - RNA, 19 nt, Artificial Sequence
  Description of Artificial Sequence: Synthetic oligonucleotide
caaaaugccuuggacggcc

SEQ ID NO: 1149527 - RNA, 19 nt, Artificial Sequence
  Description of Artificial Sequence: Synthetic oligonucleotide
auaguccuaacuaaugcga

SEQ ID NO: 1149528 - RNA, 19 nt, Artificial Sequence
  Description of Artificial Sequence: Synthetic oligonucleotide
aaguauuauucaccugcaa

SEQ ID NO: 1149529 - RNA, 19 nt, Artificial Sequence
  Description of Artificial Sequence: Synthetic oligonucleotide
guagugacuccuuuaauua

SEQ ID NO: 1149530 - RNA, 19 nt, Artificial Sequence
  Description of Artificial Sequence: Synthetic oligonucleotide
agauuacuagaccagcaua

SEQ ID NO: 1149531 - RNA, 19 nt, Artificial Sequence
  Description of Artificial Sequence: Synthetic oligonucleotide
gcgguuaaagcccagacca

SEQ ID NO: 1149532 - RNA, 19 nt, Artificial Sequence
  Description of Artificial Sequence: Synthetic oligonucleotide
ugagagcuagauuuagcau

SEQ ID NO: 1149533 - RNA, 19 nt, Artificial Sequence
  Description of Artificial Sequence: Synthetic oligonucleotide
uuggguauuuuacucgauu

SEQ ID NO: 1149534 - RNA, 19 nt, Artificial Sequence
  Description of Artificial Sequence: Synthetic oligonucleotide
acggaggcgguuaaagccc

SEQ ID NO: 1149535 - RNA, 19 nt, Artificial Sequence
  Description of Artificial Sequence: Synthetic oligonucleotide
uaguccuaacuaaugcgaa

SEQ ID NO: 1149536 - RNA, 19 nt, Artificial Sequence
  Description of Artificial Sequence: Synthetic oligonucleotide
agauuggaaagcggggccg

SEQ ID NO: 1149537 - RNA, 19 nt, Artificial Sequence
  Description of Artificial Sequence: Synthetic oligonucleotide
agauguuaucacucaauuu

SEQ ID NO: 1149538 - RNA, 19 nt, Artificial Sequence
  Description of Artificial Sequence: Synthetic oligonucleotide
guaucuuauaguccuaacu

SEQ ID NO: 1149539 - RNA, 19 nt, Artificial Sequence
  Description of Artificial Sequence: Synthetic oligonucleotide
ucuuugagagcuagauuua

SEQ ID NO: 1149540 - RNA, 19 nt, Artificial Sequence
  Description of Artificial Sequence: Synthetic oligonucleotide
ucguccucaccauuugccc

SEQ ID NO: 1149541 - RNA, 19 nt, Artificial Sequence
  Description of Artificial Sequence: Synthetic oligonucleotide
gacagacgcgaaugcaugc

SEQ ID NO: 1149542 - RNA, 19 nt, Artificial Sequence
  Description of Artificial Sequence: Synthetic oligonucleotide
gcuagauuuagcauauccc

SEQ ID NO: 1149543 - RNA, 19 nt, Artificial Sequence
  Description of Artificial Sequence: Synthetic oligonucleotide
caucaugcugacagacgcg

SEQ ID NO: 1149544 - RNA, 19 nt, Artificial Sequence
  Description of Artificial Sequence: Synthetic oligonucleotide
cuccguauccagaagaaaa

SEQ ID NO: 1149545 - RNA, 19 nt, Artificial Sequence
  Description of Artificial Sequence: Synthetic oligonucleotide
ugaggcaacuuguguauuc

SEQ ID NO: 1149546 - RNA, 19 nt, Artificial Sequence
  Description of Artificial Sequence: Synthetic oligonucleotide
uucggcgggucucccaggg

SEQ ID NO: 1149547 - RNA, 19 nt, Artificial Sequence
  Description of Artificial Sequence: Synthetic oligonucleotide
agguccucgcucucagagc

SEQ ID NO: 1149548 - RNA, 19 nt, Artificial Sequence
  Description of Artificial Sequence: Synthetic oligonucleotide
uauaaaauucuagccuuuu

SEQ ID NO: 1149549 - RNA, 19 nt, Artificial Sequence
  Description of Artificial Sequence: Synthetic oligonucleotide
agcacggaaagaaauuucu

SEQ ID NO: 1149550 - RNA, 19 nt, Artificial Sequence
  Description of Artificial Sequence: Synthetic oligonucleotide
cucccauaaaaugaauuuc

SEQ ID NO: 1149551 - RNA, 19 nt, Artificial Sequence
  Description of Artificial Sequence: Synthetic oligonucleotide
uaaagcccagaccauugua

SEQ ID NO: 1149552 - RNA, 19 nt, Artificial Sequence
  Description of Artificial Sequence: Synthetic oligonucleotide
aaugccuuggacggccaug

SEQ ID NO: 1149553 - RNA, 19 nt, Artificial Sequence
  Description of Artificial Sequence: Synthetic oligonucleotide
uuacucgauucuauuguuu

SEQ ID NO: 1149554 - RNA, 19 nt, Artificial Sequence
  Description of Artificial Sequence: Synthetic oligonucleotide
uaucaguccuguuguuuga

SEQ ID NO: 1149555 - RNA, 19 nt, Artificial Sequence
  Description of Artificial Sequence: Synthetic oligonucleotide
aggauuuugcagaguuagc

SEQ ID NO: 1149556 - RNA, 19 nt, Artificial Sequence
  Description of Artificial Sequence: Synthetic oligonucleotide
aagugauuugcuacaucca

SEQ ID NO: 1149557 - RNA, 19 nt, Artificial Sequence
  Description of Artificial Sequence: Synthetic oligonucleotide
uuaagcgggaaaagugauu

SEQ ID NO: 1149558 - RNA, 19 nt, Artificial Sequence
  Description of Artificial Sequence: Synthetic oligonucleotide
aagcgggaaaagugauuug

SEQ ID NO: 1149559 - RNA, 19 nt, Artificial Sequence
  Description of Artificial Sequence: Synthetic oligonucleotide
ugcaaccgucuauacaggu

SEQ ID NO: 1149560 - RNA, 19 nt, Artificial Sequence
  Description of Artificial Sequence: Synthetic oligonucleotide
cugcuuggguauuuuacuc

SEQ ID NO: 1149561 - RNA, 19 nt, Artificial Sequence
  Description of Artificial Sequence: Synthetic oligonucleotide
gguggaaggucaucgacac

SEQ ID NO: 1149562 - RNA, 19 nt, Artificial Sequence
  Description of Artificial Sequence: Synthetic oligonucleotide
cuuguguauucuaguguuc

SEQ ID NO: 1149563 - RNA, 19 nt, Artificial Sequence
  Description of Artificial Sequence: Synthetic oligonucleotide
cagaccauuguauccauaa

SEQ ID NO: 1149564 - RNA, 19 nt, Artificial Sequence
  Description of Artificial Sequence: Synthetic oligonucleotide
auaagcuuagggauuuaga

SEQ ID NO: 1149565 - RNA, 19 nt, Artificial Sequence
  Description of Artificial Sequence: Synthetic oligonucleotide
auuacuagaccagcauacu

SEQ ID NO: 1149566 - RNA, 19 nt, Artificial Sequence
  Description of Artificial Sequence: Synthetic oligonucleotide
ccaggucuugucaauaaag

SEQ ID NO: 1149567 - RNA, 19 nt, Artificial Sequence
  Description of Artificial Sequence: Synthetic oligonucleotide
cuagaccagcauacuagug

SEQ ID NO: 1149568 - RNA, 19 nt, Artificial Sequence
  Description of Artificial Sequence: Synthetic oligonucleotide
aaaguacucuaaaguauua

SEQ ID NO: 1149569 - RNA, 19 nt, Artificial Sequence
  Description of Artificial Sequence: Synthetic oligonucleotide
uguguauucuaguguucau

SEQ ID NO: 1149570 - RNA, 19 nt, Artificial Sequence
  Description of Artificial Sequence: Synthetic oligonucleotide
ggcccaaaucagcagauug

SEQ ID NO: 1149571 - RNA, 19 nt, Artificial Sequence
  Description of Artificial Sequence: Synthetic oligonucleotide
acuaaugcgaaggcggaaa

SEQ ID NO: 1149572 - RNA, 19 nt, Artificial Sequence
  Description of Artificial Sequence: Synthetic oligonucleotide
gacuccuuuaauuaacguu

SEQ ID NO: 1149573 - RNA, 19 nt, Artificial Sequence
  Description of Artificial Sequence: Synthetic oligonucleotide
uuguccuguucuuguaagu

SEQ ID NO: 1149574 - RNA, 19 nt, Artificial Sequence
  Description of Artificial Sequence: Synthetic oligonucleotide
aaguguagccagauuacua

SEQ ID NO: 1149575 - RNA, 19 nt, Artificial Sequence
  Description of Artificial Sequence: Synthetic oligonucleotide
auagcucccauaaaaugaa

SEQ ID NO: 1149576 - RNA, 19 nt, Artificial Sequence
  Description of Artificial Sequence: Synthetic oligonucleotide
agagcuagauuuagcauau

SEQ ID NO: 1149577 - RNA, 19 nt, Artificial Sequence
  Description of Artificial Sequence: Synthetic oligonucleotide
caaaucugcuggguggaag

SEQ ID NO: 1149578 - RNA, 19 nt, Artificial Sequence
  Description of Artificial Sequence: Synthetic oligonucleotide
cuaaagcuaggugaaacaa

SEQ ID NO: 1149579 - RNA, 19 nt, Artificial Sequence
  Description of Artificial Sequence: Synthetic oligonucleotide
uggacggccaugagcaaau

SEQ ID NO: 1149580 - RNA, 19 nt, Artificial Sequence
  Description of Artificial Sequence: Synthetic oligonucleotide
aagcuaggugaaacaaaug

SEQ ID NO: 1149581 - RNA, 19 nt, Artificial Sequence
  Description of Artificial Sequence: Synthetic oligonucleotide
aaucuaaagcuaggugaaa

SEQ ID NO: 1149582 - RNA, 19 nt, Artificial Sequence
  Description of Artificial Sequence: Synthetic oligonucleotide
cuuagggauuuagauaaga

SEQ ID NO: 1149583 - RNA, 19 nt, Artificial Sequence
  Description of Artificial Sequence: Synthetic oligonucleotide
uaggcuccguauccagaag

SEQ ID NO: 1149584 - RNA, 19 nt, Artificial Sequence
  Description of Artificial Sequence: Synthetic oligonucleotide
cugcaaccgucuauacagg

SEQ ID NO: 1149585 - RNA, 19 nt, Artificial Sequence
  Description of Artificial Sequence: Synthetic oligonucleotide
ccuaacuaaugcgaaggcg

SEQ ID NO: 1149586 - RNA, 19 nt, Artificial Sequence
  Description of Artificial Sequence: Synthetic oligonucleotide
gacgcgaaugcaugcacaa

SEQ ID NO: 1149587 - RNA, 19 nt, Artificial Sequence
  Description of Artificial Sequence: Synthetic oligonucleotide
aagggcuauagcucccaua

SEQ ID NO: 1149588 - RNA, 19 nt, Artificial Sequence
  Description of Artificial Sequence: Synthetic oligonucleotide
agauaagaugaaacugaca

SEQ ID NO: 1149589 - RNA, 19 nt, Artificial Sequence
  Description of Artificial Sequence: Synthetic oligonucleotide
uggucguccucaccauuug

SEQ ID NO: 1149590 - RNA, 19 nt, Artificial Sequence
  Description of Artificial Sequence: Synthetic oligonucleotide
ugaaaagguggcguccauc

SEQ ID NO: 1149591 - RNA, 19 nt, Artificial Sequence
  Description of Artificial Sequence: Synthetic oligonucleotide
ccagaugagauaaggacca

SEQ ID NO: 1149592 - RNA, 19 nt, Artificial Sequence
  Description of Artificial Sequence: Synthetic oligonucleotide
ccuuggacggccaugagca

SEQ ID NO: 1149593 - RNA, 19 nt, Artificial Sequence
  Description of Artificial Sequence: Synthetic oligonucleotide
cuagcaacuacauggucgu

SEQ ID NO: 1149594 - RNA, 19 nt, Artificial Sequence
  Description of Artificial Sequence: Synthetic oligonucleotide
cuguuacuucaucacugug

SEQ ID NO: 1149595 - RNA, 19 nt, Artificial Sequence
  Description of Artificial Sequence: Synthetic oligonucleotide
cagcacggaaagaaauuuc

SEQ ID NO: 1149596 - RNA, 19 nt, Artificial Sequence
  Description of Artificial Sequence: Synthetic oligonucleotide
ucaucgacacggaggcggu

SEQ ID NO: 1149597 - RNA, 19 nt, Artificial Sequence
  Description of Artificial Sequence: Synthetic oligonucleotide
gacaaaucugcugggugga

SEQ ID NO: 1149598 - RNA, 19 nt, Artificial Sequence
  Description of Artificial Sequence: Synthetic oligonucleotide
agccagauuacuagaccag

SEQ ID NO: 1149599 - RNA, 19 nt, Artificial Sequence
  Description of Artificial Sequence: Synthetic oligonucleotide
uaacguuggguugguaaaa

SEQ ID NO: 1149600 - RNA, 19 nt, Artificial Sequence
  Description of Artificial Sequence: Synthetic oligonucleotide
accgucuauacagguaucu

SEQ ID NO: 1149601 - RNA, 19 nt, Artificial Sequence
  Description of Artificial Sequence: Synthetic oligonucleotide
aaccgucuauacagguauc

SEQ ID NO: 1149602 - RNA, 19 nt, Artificial Sequence
  Description of Artificial Sequence: Synthetic oligonucleotide
cagaguuagcugcuugguc

SEQ ID NO: 1149603 - RNA, 19 nt, Artificial Sequence
  Description of Artificial Sequence: Synthetic oligonucleotide
acguuggguugguaaaaga

SEQ ID NO: 1149604 - RNA, 19 nt, Artificial Sequence
  Description of Artificial Sequence: Synthetic oligonucleotide
gguaucuuauaguccuaac

SEQ ID NO: 1149605 - RNA, 19 nt, Artificial Sequence
  Description of Artificial Sequence: Synthetic oligonucleotide
uaauuaacguuggguuggu

SEQ ID NO: 1149606 - RNA, 19 nt, Artificial Sequence
  Description of Artificial Sequence: Synthetic oligonucleotide
cuuaagcccaucauccacu

SEQ ID NO: 1149607 - RNA, 19 nt, Artificial Sequence
  Description of Artificial Sequence: Synthetic oligonucleotide
aacuaaugcgaaggcggaa

SEQ ID NO: 1149608 - RNA, 19 nt, Artificial Sequence
  Description of Artificial Sequence: Synthetic oligonucleotide
cucccauagguccucgcuc

SEQ ID NO: 1149609 - RNA, 19 nt, Artificial Sequence
  Description of Artificial Sequence: Synthetic oligonucleotide
caccugcaagcaaacauga

SEQ ID NO: 1149610 - RNA, 19 nt, Artificial Sequence
  Description of Artificial Sequence: Synthetic oligonucleotide
cauauccccagcacggaaa

SEQ ID NO: 1149611 - RNA, 19 nt, Artificial Sequence
  Description of Artificial Sequence: Synthetic oligonucleotide
cagacgcgaaugcaugcac

SEQ ID NO: 1149612 - RNA, 19 nt, Artificial Sequence
  Description of Artificial Sequence: Synthetic oligonucleotide
acagacgcgaaugcaugca

SEQ ID NO: 1149613 - RNA, 19 nt, Artificial Sequence
  Description of Artificial Sequence: Synthetic oligonucleotide
gugugacuaaauaauuuua

SEQ ID NO: 1149614 - RNA, 19 nt, Artificial Sequence
  Description of Artificial Sequence: Synthetic oligonucleotide
agguaucuuauaguccuaa

SEQ ID NO: 1149615 - RNA, 19 nt, Artificial Sequence
  Description of Artificial Sequence: Synthetic oligonucleotide
guauucuaguguucaucaa

SEQ ID NO: 1149616 - RNA, 19 nt, Artificial Sequence
  Description of Artificial Sequence: Synthetic oligonucleotide
aaggaccaccaaggauaac

SEQ ID NO: 1149617 - RNA, 19 nt, Artificial Sequence
  Description of Artificial Sequence: Synthetic oligonucleotide
cuagugugacuaaauaauu

SEQ ID NO: 1149618 - RNA, 19 nt, Artificial Sequence
  Description of Artificial Sequence: Synthetic oligonucleotide
augccuuggacggccauga

SEQ ID NO: 1149619 - RNA, 19 nt, Artificial Sequence
  Description of Artificial Sequence: Synthetic oligonucleotide
uagcucccauaaaaugaau

SEQ ID NO: 1149620 - RNA, 19 nt, Artificial Sequence
  Description of Artificial Sequence: Synthetic oligonucleotide
gcgaaugcaugcacaaugc

SEQ ID NO: 1149621 - RNA, 19 nt, Artificial Sequence
  Description of Artificial Sequence: Synthetic oligonucleotide
agcucccauaaaaugaauu

SEQ ID NO: 1149622 - RNA, 19 nt, Artificial Sequence
  Description of Artificial Sequence: Synthetic oligonucleotide
uaagggcuauagcucccau

SEQ ID NO: 1149623 - RNA, 19 nt, Artificial Sequence
  Description of Artificial Sequence: Synthetic oligonucleotide
caaccgucuauacagguau

SEQ ID NO: 1149624 - RNA, 19 nt, Artificial Sequence
  Description of Artificial Sequence: Synthetic oligonucleotide
auucggcgggucucccagg

SEQ ID NO: 1149625 - RNA, 19 nt, Artificial Sequence
  Description of Artificial Sequence: Synthetic oligonucleotide
gccaaccacgcacuuuggg

SEQ ID NO: 1149626 - RNA, 19 nt, Artificial Sequence
  Description of Artificial Sequence: Synthetic oligonucleotide
cagguaucaguccuguugu

SEQ ID NO: 1149627 - RNA, 19 nt, Artificial Sequence
  Description of Artificial Sequence: Synthetic oligonucleotide
gaauucggcgggucuccca

SEQ ID NO: 1149628 - RNA, 19 nt, Artificial Sequence
  Description of Artificial Sequence: Synthetic oligonucleotide
ggaauauuggccaggauuu

SEQ ID NO: 1149629 - RNA, 19 nt, Artificial Sequence
  Description of Artificial Sequence: Synthetic oligonucleotide
ccaaggauaacagcaaaga

SEQ ID NO: 1149630 - RNA, 19 nt, Artificial Sequence
  Description of Artificial Sequence: Synthetic oligonucleotide
cgcgaaugcaugcacaaug

SEQ ID NO: 1149631 - RNA, 19 nt, Artificial Sequence
  Description of Artificial Sequence: Synthetic oligonucleotide
ggccccgggaauucggcgg

SEQ ID NO: 1149632 - RNA, 19 nt, Artificial Sequence
  Description of Artificial Sequence: Synthetic oligonucleotide
cuaaugcgaaggcggaaaa

SEQ ID NO: 1149633 - RNA, 19 nt, Artificial Sequence
  Description of Artificial Sequence: Synthetic oligonucleotide
cacugcaaccgucuauaca

SEQ ID NO: 1149634 - RNA, 19 nt, Artificial Sequence
  Description of Artificial Sequence: Synthetic oligonucleotide
uggcaguagugacuccuuu

SEQ ID NO: 1149635 - RNA, 19 nt, Artificial Sequence
  Description of Artificial Sequence: Synthetic oligonucleotide
gccaugagcaaaugcuuuc

SEQ ID NO: 1149636 - RNA, 19 nt, Artificial Sequence
  Description of Artificial Sequence: Synthetic oligonucleotide
gccuuggacggccaugagc

SEQ ID NO: 1149637 - RNA, 19 nt, Artificial Sequence
  Description of Artificial Sequence: Synthetic oligonucleotide
aauuaacguuggguuggua

SEQ ID NO: 1149638 - RNA, 19 nt, Artificial Sequence
  Description of Artificial Sequence: Synthetic oligonucleotide
cuacauccaguacagcccu

SEQ ID NO: 1149639 - RNA, 19 nt, Artificial Sequence
  Description of Artificial Sequence: Synthetic oligonucleotide
agacgcgaaugcaugcaca

SEQ ID NO: 1149640 - RNA, 19 nt, Artificial Sequence
  Description of Artificial Sequence: Synthetic oligonucleotide
ccagauuacuagaccagca

SEQ ID NO: 1149641 - RNA, 19 nt, Artificial Sequence
  Description of Artificial Sequence: Synthetic oligonucleotide
cugacagacgcgaaugcau

SEQ ID NO: 1149642 - RNA, 19 nt, Artificial Sequence
  Description of Artificial Sequence: Synthetic oligonucleotide
agcauauccccagcacgga

SEQ ID NO: 1149643 - RNA, 19 nt, Artificial Sequence
  Description of Artificial Sequence: Synthetic oligonucleotide
gcaacuuguguauucuagu

SEQ ID NO: 1149644 - RNA, 19 nt, Artificial Sequence
  Description of Artificial Sequence: Synthetic oligonucleotide
ggucguccucaccauuugc

SEQ ID NO: 1149645 - RNA, 19 nt, Artificial Sequence
  Description of Artificial Sequence: Synthetic oligonucleotide
guaagggcuauagcuccca

SEQ ID NO: 1149646 - RNA, 19 nt, Artificial Sequence
  Description of Artificial Sequence: Synthetic oligonucleotide
gcucccauaaaaugaauuu

SEQ ID NO: 1149647 - RNA, 19 nt, Artificial Sequence
  Description of Artificial Sequence: Synthetic oligonucleotide
cagauuacuagaccagcau

SEQ ID NO: 1149648 - RNA, 19 nt, Artificial Sequence
  Description of Artificial Sequence: Synthetic oligonucleotide
ggucucccaggguuucggg

SEQ ID NO: 1149649 - RNA, 19 nt, Artificial Sequence
  Description of Artificial Sequence: Synthetic oligonucleotide
gcuguuauagacagcugaa

SEQ ID NO: 1149650 - RNA, 19 nt, Artificial Sequence
  Description of Artificial Sequence: Synthetic oligonucleotide
ucgcucucagagccucuuc

SEQ ID NO: 1149651 - RNA, 19 nt, Artificial Sequence
  Description of Artificial Sequence: Synthetic oligonucleotide
auggucguccucaccauuu

SEQ ID NO: 1149652 - RNA, 19 nt, Artificial Sequence
  Description of Artificial Sequence: Synthetic oligonucleotide
ccauuugcccaguugaugu

SEQ ID NO: 1149653 - RNA, 19 nt, Artificial Sequence
  Description of Artificial Sequence: Synthetic oligonucleotide
gaggcgguuaaagcccaga

SEQ ID NO: 1149654 - RNA, 19 nt, Artificial Sequence
  Description of Artificial Sequence: Synthetic oligonucleotide
gaccagcauacuaguguga

SEQ ID NO: 1149655 - RNA, 19 nt, Artificial Sequence
  Description of Artificial Sequence: Synthetic oligonucleotide
ccguauccagaagaaaaug

SEQ ID NO: 1149656 - RNA, 19 nt, Artificial Sequence
  Description of Artificial Sequence: Synthetic oligonucleotide
gacacggcauuaaaaucau

SEQ ID NO: 1149657 - RNA, 19 nt, Artificial Sequence
  Description of Artificial Sequence: Synthetic oligonucleotide
gcaacuacauggucguccu

SEQ ID NO: 1149658 - RNA, 19 nt, Artificial Sequence
  Description of Artificial Sequence: Synthetic oligonucleotide
cuguuccaauaagcuuagg

SEQ ID NO: 1149659 - RNA, 19 nt, Artificial Sequence
  Description of Artificial Sequence: Synthetic oligonucleotide
ggcaguagugacuccuuua

SEQ ID NO: 1149660 - RNA, 19 nt, Artificial Sequence
  Description of Artificial Sequence: Synthetic oligonucleotide
gcaaaaugccuuggacggc

SEQ ID NO: 1149661 - RNA, 19 nt, Artificial Sequence
  Description of Artificial Sequence: Synthetic oligonucleotide
acaaaucugcuggguggaa

SEQ ID NO: 1149662 - RNA, 19 nt, Artificial Sequence
  Description of Artificial Sequence: Synthetic oligonucleotide
gggucucccaggguuucgg

SEQ ID NO: 1149663 - RNA, 19 nt, Artificial Sequence
  Description of Artificial Sequence: Synthetic oligonucleotide
ggaaccuuauugguuucaa

SEQ ID NO: 1149664 - RNA, 19 nt, Artificial Sequence
  Description of Artificial Sequence: Synthetic oligonucleotide
ucggcgggucucccagggu

SEQ ID NO: 1149665 - RNA, 19 nt, Artificial Sequence
  Description of Artificial Sequence: Synthetic oligonucleotide
gccccgggaauucggcggg

SEQ ID NO: 1149666 - RNA, 19 nt, Artificial Sequence
  Description of Artificial Sequence: Synthetic oligonucleotide
caacuacauggucguccuc

SEQ ID NO: 1149667 - RNA, 19 nt, Artificial Sequence
  Description of Artificial Sequence: Synthetic oligonucleotide
gguccucggcaccaaggca

SEQ ID NO: 1149668 - RNA, 19 nt, Artificial Sequence
  Description of Artificial Sequence: Synthetic oligonucleotide
aggugcaccuggaaccuua

SEQ ID NO: 1149669 - RNA, 19 nt, Artificial Sequence
  Description of Artificial Sequence: Synthetic oligonucleotide
cgucuauacagguaucuua

SEQ ID NO: 1149670 - RNA, 19 nt, Artificial Sequence
  Description of Artificial Sequence: Synthetic oligonucleotide
gagcuagauuuagcauauc

SEQ ID NO: 1149671 - RNA, 19 nt, Artificial Sequence
  Description of Artificial Sequence: Synthetic oligonucleotide
cauaacuguaagggcuaua

SEQ ID NO: 1149672 - RNA, 19 nt, Artificial Sequence
  Description of Artificial Sequence: Synthetic oligonucleotide
gcauauccccagcacggaa

SEQ ID NO: 1149673 - RNA, 19 nt, Artificial Sequence
  Description of Artificial Sequence: Synthetic oligonucleotide
acgcgaaugcaugcacaau

SEQ ID NO: 1149674 - RNA, 19 nt, Artificial Sequence
  Description of Artificial Sequence: Synthetic oligonucleotide
gcaggccuaaaaguguuua

SEQ ID NO: 1149675 - RNA, 19 nt, Artificial Sequence
  Description of Artificial Sequence: Synthetic oligonucleotide
cuuggacggccaugagcaa

SEQ ID NO: 1149676 - RNA, 19 nt, Artificial Sequence
  Description of Artificial Sequence: Synthetic oligonucleotide
ccacugcaaccgucuauac

SEQ ID NO: 1149677 - RNA, 19 nt, Artificial Sequence
  Description of Artificial Sequence: Synthetic oligonucleotide
gguuaaagcccagaccauu

SEQ ID NO: 1149678 - RNA, 19 nt, Artificial Sequence
  Description of Artificial Sequence: Synthetic oligonucleotide
gguaucaguccuguuguuu

SEQ ID NO: 1149679 - RNA, 19 nt, Artificial Sequence
  Description of Artificial Sequence: Synthetic oligonucleotide
agcaggccuaaaaguguuu

SEQ ID NO: 1149680 - RNA, 19 nt, Artificial Sequence
  Description of Artificial Sequence: Synthetic oligonucleotide
gcaaccgucuauacaggua

SEQ ID NO: 1149681 - RNA, 19 nt, Artificial Sequence
  Description of Artificial Sequence: Synthetic oligonucleotide
cauuugcccaguugauguu

SEQ ID NO: 1149682 - RNA, 19 nt, Artificial Sequence
  Description of Artificial Sequence: Synthetic oligonucleotide
ggggcacucugguaagugu

SEQ ID NO: 1149683 - RNA, 19 nt, Artificial Sequence
  Description of Artificial Sequence: Synthetic oligonucleotide
gcagaguuagcugcuuggu

SEQ ID NO: 1149684 - RNA, 19 nt, Artificial Sequence
  Description of Artificial Sequence: Synthetic oligonucleotide
acacggcauuaaaaucaua

SEQ ID NO: 1149685 - RNA, 19 nt, Artificial Sequence
  Description of Artificial Sequence: Synthetic oligonucleotide
ccaggauuuugcagaguua

SEQ ID NO: 1149686 - RNA, 19 nt, Artificial Sequence
  Description of Artificial Sequence: Synthetic oligonucleotide
gcgggaaaagugauuugcu

SEQ ID NO: 1149687 - RNA, 19 nt, Artificial Sequence
  Description of Artificial Sequence: Synthetic oligonucleotide
gcuccguauccagaagaaa

SEQ ID NO: 1149688 - RNA, 19 nt, Artificial Sequence
  Description of Artificial Sequence: Synthetic oligonucleotide
ggaggcgguuaaagcccag

SEQ ID NO: 1149689 - RNA, 19 nt, Artificial Sequence
  Description of Artificial Sequence: Synthetic oligonucleotide
ccggccccgggaauucggc

SEQ ID NO: 1149690 - RNA, 19 nt, Artificial Sequence
  Description of Artificial Sequence: Synthetic oligonucleotide
gaaagacaucaaagaucuu

SEQ ID NO: 1149691 - RNA, 19 nt, Artificial Sequence
  Description of Artificial Sequence: Synthetic oligonucleotide
ccuguucuuguaaguagau

SEQ ID NO: 1149692 - RNA, 19 nt, Artificial Sequence
  Description of Artificial Sequence: Synthetic oligonucleotide
agguggcguccaucaucau

SEQ ID NO: 1149693 - RNA, 19 nt, Artificial Sequence
  Description of Artificial Sequence: Synthetic oligonucleotide
cauggucguccucaccauu

SEQ ID NO: 1149694 - RNA, 19 nt, Artificial Sequence
  Description of Artificial Sequence: Synthetic oligonucleotide
ggacggccaugagcaaaug

SEQ ID NO: 1149695 - RNA, 19 nt, Artificial Sequence
  Description of Artificial Sequence: Synthetic oligonucleotide
ccccgucugcuggggaugg

SEQ ID NO: 1149696 - RNA, 19 nt, Artificial Sequence
  Description of Artificial Sequence: Synthetic oligonucleotide
ccagcacggaaagaaauuu

SEQ ID NO: 1149697 - RNA, 19 nt, Artificial Sequence
  Description of Artificial Sequence: Synthetic oligonucleotide
cggccccgggaauucggcg

SEQ ID NO: 1149698 - RNA, 19 nt, Artificial Sequence
  Description of Artificial Sequence: Synthetic oligonucleotide
cccagcacggaaagaaauu

SEQ ID NO: 1149699 - RNA, 19 nt, Artificial Sequence
  Description of Artificial Sequence: Synthetic oligonucleotide
ccagaccauuguauccaua

SEQ ID NO: 1149700 - RNA, 19 nt, Artificial Sequence
  Description of Artificial Sequence: Synthetic oligonucleotide
gugcaccuggaaccuuauu

SEQ ID NO: 1149701 - RNA, 19 nt, Artificial Sequence
  Description of Artificial Sequence: Synthetic oligonucleotide
cggaggcgguuaaagccca

SEQ ID NO: 1149702 - RNA, 19 nt, Artificial Sequence
  Description of Artificial Sequence: Synthetic oligonucleotide
cucgcucucagagccucuu

SEQ ID NO: 1149703 - RNA, 19 nt, Artificial Sequence
  Description of Artificial Sequence: Synthetic oligonucleotide
cccgggaauucggcggguc

SEQ ID NO: 1149704 - RNA, 19 nt, Artificial Sequence
  Description of Artificial Sequence: Synthetic oligonucleotide
ggugcaccuggaaccuuau

SEQ ID NO: 1149705 - RNA, 19 nt, Artificial Sequence
  Description of Artificial Sequence: Synthetic oligonucleotide
ccgggaauucggcgggucu

SEQ ID NO: 1149706 - RNA, 19 nt, Artificial Sequence
  Description of Artificial Sequence: Synthetic oligonucleotide
ccauaacuguaagggcuau

SEQ ID NO: 1149707 - RNA, 19 nt, Artificial Sequence
  Description of Artificial Sequence: Synthetic oligonucleotide
ccgucuauacagguaucuu

SEQ ID NO: 1149708 - RNA, 19 nt, Artificial Sequence
  Description of Artificial Sequence: Synthetic oligonucleotide
caucgacacggaggcgguu

SEQ ID NO: 1149709 - RNA, 19 nt, Artificial Sequence
  Description of Artificial Sequence: Synthetic oligonucleotide
caggugcaccuggaaccuu

SEQ ID NO: 1149710 - RNA, 19 nt, Artificial Sequence
  Description of Artificial Sequence: Synthetic oligonucleotide
gcccguccccgggcccgag

SEQ ID NO: 1149711 - RNA, 19 nt, Artificial Sequence
  Description of Artificial Sequence: Synthetic oligonucleotide
ccucaccauuugcccaguu

SEQ ID NO: 1149712 - RNA, 19 nt, Artificial Sequence
  Description of Artificial Sequence: Synthetic oligonucleotide
cgacacggaggcgguuaaa

SEQ ID NO: 1149713 - RNA, 19 nt, Artificial Sequence
  Description of Artificial Sequence: Synthetic oligonucleotide
ccccgggaauucggcgggu

SEQ ID NO: 1149714 - RNA, 19 nt, Artificial Sequence
  Description of Artificial Sequence: Synthetic oligonucleotide
aaauuguacauuaaaaucg

SEQ ID NO: 1149715 - RNA, 19 nt, Artificial Sequence
  Description of Artificial Sequence: Synthetic oligonucleotide
agaaauacauuacagugcc

SEQ ID NO: 1149716 - RNA, 19 nt, Artificial Sequence
  Description of Artificial Sequence: Synthetic oligonucleotide
acuauaauauguuuccugc

SEQ ID NO: 1149717 - RNA, 19 nt, Artificial Sequence
  Description of Artificial Sequence: Synthetic oligonucleotide
uauuaaaucacccacacua

SEQ ID NO: 1149718 - RNA, 19 nt, Artificial Sequence
  Description of Artificial Sequence: Synthetic oligonucleotide
ucuuucaacaaucaaauac

SEQ ID NO: 1149719 - RNA, 19 nt, Artificial Sequence
  Description of Artificial Sequence: Synthetic oligonucleotide
uauuuguucauauccaagg

SEQ ID NO: 1149720 - RNA, 19 nt, Artificial Sequence
  Description of Artificial Sequence: Synthetic oligonucleotide
acaaucaaauacuccaucc

SEQ ID NO: 1149721 - RNA, 19 nt, Artificial Sequence
  Description of Artificial Sequence: Synthetic oligonucleotide
gaauugugcauauaaauug

SEQ ID NO: 1149722 - RNA, 19 nt, Artificial Sequence
  Description of Artificial Sequence: Synthetic oligonucleotide
uuuuagaacaaagagaaac

SEQ ID NO: 1149723 - RNA, 19 nt, Artificial Sequence
  Description of Artificial Sequence: Synthetic oligonucleotide
cuaagauagucuuacaugc

SEQ ID NO: 1149724 - RNA, 19 nt, Artificial Sequence
  Description of Artificial Sequence: Synthetic oligonucleotide
cauaauaugcaucugcucc

SEQ ID NO: 1149725 - RNA, 19 nt, Artificial Sequence
  Description of Artificial Sequence: Synthetic oligonucleotide
auugaaaucagugacauca

SEQ ID NO: 1149726 - RNA, 19 nt, Artificial Sequence
  Description of Artificial Sequence: Synthetic oligonucleotide
agaacuuacauauugugug

SEQ ID NO: 1149727 - RNA, 19 nt, Artificial Sequence
  Description of Artificial Sequence: Synthetic oligonucleotide
gacguuuuaaaucuuguag

SEQ ID NO: 1149728 - RNA, 19 nt, Artificial Sequence
  Description of Artificial Sequence: Synthetic oligonucleotide
uaucauagagauuuaaucu

SEQ ID NO: 1149729 - RNA, 19 nt, Artificial Sequence
  Description of Artificial Sequence: Synthetic oligonucleotide
aacucaauuaaguauggcu

SEQ ID NO: 1149730 - RNA, 19 nt, Artificial Sequence
  Description of Artificial Sequence: Synthetic oligonucleotide
aaguauggcuuuuagaaca

SEQ ID NO: 1149731 - RNA, 19 nt, Artificial Sequence
  Description of Artificial Sequence: Synthetic oligonucleotide
aacaaagccaauugaaaca

SEQ ID NO: 1149732 - RNA, 19 nt, Artificial Sequence
  Description of Artificial Sequence: Synthetic oligonucleotide
agugugauggaauggacac

SEQ ID NO: 1149733 - RNA, 19 nt, Artificial Sequence
  Description of Artificial Sequence: Synthetic oligonucleotide
uuaaucuauuaaaucaccc

SEQ ID NO: 1149734 - RNA, 19 nt, Artificial Sequence
  Description of Artificial Sequence: Synthetic oligonucleotide
agccaauugaaacagcuac

SEQ ID NO: 1149735 - RNA, 19 nt, Artificial Sequence
  Description of Artificial Sequence: Synthetic oligonucleotide
uuuaaucuauuaaaucacc

SEQ ID NO: 1149736 - RNA, 19 nt, Artificial Sequence
  Description of Artificial Sequence: Synthetic oligonucleotide
uuguucauauccaaggacc

SEQ ID NO: 1149737 - RNA, 19 nt, Artificial Sequence
  Description of Artificial Sequence: Synthetic oligonucleotide
aauuaaguauggcuuuuag

SEQ ID NO: 1149738 - RNA, 19 nt, Artificial Sequence
  Description of Artificial Sequence: Synthetic oligonucleotide
ugugugacguuuuaaaucu

SEQ ID NO: 1149739 - RNA, 19 nt, Artificial Sequence
  Description of Artificial Sequence: Synthetic oligonucleotide
uauaauauguuuccugccu

SEQ ID NO: 1149740 - RNA, 19 nt, Artificial Sequence
  Description of Artificial Sequence: Synthetic oligonucleotide
agugguuccaucaacaggg

SEQ ID NO: 1149741 - RNA, 19 nt, Artificial Sequence
  Description of Artificial Sequence: Synthetic oligonucleotide
ugugcauauaaauuguaca

SEQ ID NO: 1149742 - RNA, 19 nt, Artificial Sequence
  Description of Artificial Sequence: Synthetic oligonucleotide
agcaauuauucuccgagac

SEQ ID NO: 1149743 - RNA, 19 nt, Artificial Sequence
  Description of Artificial Sequence: Synthetic oligonucleotide
caaugaaacugugagaugg

SEQ ID NO: 1149744 - RNA, 19 nt, Artificial Sequence
  Description of Artificial Sequence: Synthetic oligonucleotide
ucuauuaaaucacccacac

SEQ ID NO: 1149745 - RNA, 19 nt, Artificial Sequence
  Description of Artificial Sequence: Synthetic oligonucleotide
agaauauauagacagcagu

SEQ ID NO: 1149746 - RNA, 19 nt, Artificial Sequence
  Description of Artificial Sequence: Synthetic oligonucleotide
ucauuaauuaugcuuccug

SEQ ID NO: 1149747 - RNA, 19 nt, Artificial Sequence
  Description of Artificial Sequence: Synthetic oligonucleotide
auacauuucaaacauccca

SEQ ID NO: 1149748 - RNA, 19 nt, Artificial Sequence
  Description of Artificial Sequence: Synthetic oligonucleotide
aauuaagcaacaaguuugg

SEQ ID NO: 1149749 - RNA, 19 nt, Artificial Sequence
  Description of Artificial Sequence: Synthetic oligonucleotide
acuuuuaaucaugacauuc

SEQ ID NO: 1149750 - RNA, 19 nt, Artificial Sequence
  Description of Artificial Sequence: Synthetic oligonucleotide
acaucagaauaucauagag

SEQ ID NO: 1149751 - RNA, 19 nt, Artificial Sequence
  Description of Artificial Sequence: Synthetic oligonucleotide
auccucacagaauauauag

SEQ ID NO: 1149752 - RNA, 19 nt, Artificial Sequence
  Description of Artificial Sequence: Synthetic oligonucleotide
ucccauuuucaaaucaggg

SEQ ID NO: 1149753 - RNA, 19 nt, Artificial Sequence
  Description of Artificial Sequence: Synthetic oligonucleotide
uguugugagaccugaagcc

SEQ ID NO: 1149754 - RNA, 19 nt, Artificial Sequence
  Description of Artificial Sequence: Synthetic oligonucleotide
aauauauagacagcaguga

SEQ ID NO: 1149755 - RNA, 19 nt, Artificial Sequence
  Description of Artificial Sequence: Synthetic oligonucleotide
uuuugcaugagucaucuuu

SEQ ID NO: 1149756 - RNA, 19 nt, Artificial Sequence
  Description of Artificial Sequence: Synthetic oligonucleotide
uuauaaaacaagagggcuc

SEQ ID NO: 1149757 - RNA, 19 nt, Artificial Sequence
  Description of Artificial Sequence: Synthetic oligonucleotide
uuaagcaacaaguuuggaa

SEQ ID NO: 1149758 - RNA, 19 nt, Artificial Sequence
  Description of Artificial Sequence: Synthetic oligonucleotide
aaggcuagacaauaaauua

SEQ ID NO: 1149759 - RNA, 19 nt, Artificial Sequence
  Description of Artificial Sequence: Synthetic oligonucleotide
uuaauuaugcuuccuguau

SEQ ID NO: 1149760 - RNA, 19 nt, Artificial Sequence
  Description of Artificial Sequence: Synthetic oligonucleotide
aguccguaaagucucuggc

SEQ ID NO: 1149761 - RNA, 19 nt, Artificial Sequence
  Description of Artificial Sequence: Synthetic oligonucleotide
uagagauuuaaucuauuaa
